United States Patent Application Publication US 2011/0183924 A1 - sequence listing, part 205

SEQ ID NO: 490652 - DNA, 605 bp, Homo sapiens
  misc_feature (563)..(564): n is a, c, g, or t
acccccccccccccgccccccccccccgggcggaggggaggagcgaacgccgcaaaagaggcgcttggtgggcttcctgagaataaggactggaattaaaaagaatcacttatctcatcccacacaccatcctgaggcccagacagcctgctgaggaaacatcaggtcctctccttgatgtgagccattgaaaatgacaagatggaactggagaatacctgcagtttgattccccaacagaaaaatggggaagatggggtatttcacgttcaatttctccttccacatcgatgaataagaatagatcatccctcctctgatgagaggaatgagtaaacaggaagactgaggtcaaagaagattgtaatactaaaattctgtctatatgaaaacaaaaaattaggttagaaagaagtggtcacctgcaccgtaagaattgatagtggactatagaccttgagtttgagtggaaaaaccccatttctccaataaaaattgtctttgtgagttgactagcctcaccccacacctcaccatcaacaccctcaaggaagacagaaagnnaaattggcctctttggccctaacggggggagcctgggcgcc

SEQ ID NO: 490653 - DNA, 169 bp, Homo sapiens
gggttgaccgctgcgtgtgggttgaacgtggcttgcccggacccctggtcgagcgtggtggaccttgtagccgtggtttccctggcgcagattgtgttgctggtccctaggagtcccgctggtgaacgtggttctcctggccctgctgggcccaaaggatctcctggtg

SEQ ID NO: 490654 - DNA, 278 bp, Homo sapiens
  misc_feature (108)..(108): n is a, c, g, or t
  misc_feature (113)..(113): n is a, c, g, or t
  misc_feature (146)..(146): n is a, c, g, or t
  misc_feature (153)..(153): n is a, c, g, or t
  misc_feature (156)..(156): n is a, c, g, or t
  misc_feature (228)..(228): n is a, c, g, or t
  misc_feature (257)..(257): n is a, c, g, or t
taatataggcagggctaaccccttatccctttggaataaatggaataacctaggaaaaaccttgcaaggggggaggccaaagctaaagaccccccggaaccaggacgnggctncctaaggaccaggcttaaaggggcccacccggnctatggnagnaaaaataggggggaaggattatagggaggaggcggcaaaacctacccgagcctgggggatagctgggttggnccaagataggaatcttaggttcaactttnaaatttggccacaggaaccct

SEQ ID NO: 490655 - DNA, 363 bp, Homo sapiens
  misc_feature (326)..(326): n is a, c, g, or t
tactatccgcccgacgtgcaaaggctctttccaaactcgcttcacctccattacaagggcaagcgaggttccacgaccggacagggcgagctcaagaaagttcgcttcgatccgctcttcagcctgaatcacacctgcgcgatgttccgggcgaacgtgaatcggttgttccgcaaaacctggtgcacgaccaagcgatcagaccgcttgtacgcacacctgatgctttacgcccagtaccacaacgaagagttgcttaagccgtcggcctaactgcaacgagaaaccgacaaacctccgaaaagtttggcggttttcaatacacnatcaaatgggccagtttggtcctagcccagcagcgcc

SEQ ID NO: 490656 - DNA, 237 bp, Homo sapiens
cggcgtccgctacggatgcttatattgaaactagtaactactctcttttaaggtagcacagccagccaggcacagtagttcacacctgtaatcccagcacttggggaggccaaggtcggtggatcacctgaggtcaggagtttgagacgccagcctgaccattatggtgaaatcccatctctactaaaaatacaaaaattaggcctggtgcagtggctcacacctgtaatcccagca

SEQ ID NO: 490657 - DNA, 678 bp, Homo sapiens
tgtctcaattgagctggaagtcgccgtcgcctgttcgtaggaagtcaggcaagggtttctggcgggctgaattggtgggctttacgattcgggtggcggcatgatggacgggcgtgaggtgtgcccctctcgtgaacgtcctcggatgatgggcggcatttagcgccacccccgccggtcgccccagatgggcaggcctcctctggccagtggcccccagatgggatttaaataggccgcttgttcacctgaagccacccttttcaagataccgcgattaggtaattaggcgttgttggtatcttgtgacgctcttatatttgccctccgttacgtgctattgcgcgtcaatcatttagggccccacgcctcccactacccgctaatttcatagtttggcgaccttaaggcatagtaccaagtagctctccccctcagtgcatcctacccccggctctcctgcccgatgtagtggctccacgccccccccttaccgggtttttgcgcccaatagcggcctccttctgcgttggatattccccgataaccatggagcgtgtgatgccgcaccccttattgtggtcacctccacgaggacgccctcttgactatatggctttgagatcaacggctaattttttccccccctcccccagccccaaaaatctcccacaaaac

SEQ ID NO: 490658 - DNA, 135 bp, Homo sapiens
agcggtatcctgagaacagtccatctgtccccactgcaggtgtccacaaatgcagcagttccatgtggcagccccggggggctggctgtggagtggttgtggggcagccggtcgacctcgagaatgaagtcatcc

SEQ ID NO: 490659 - DNA, 207 bp, Homo sapiens
tacagtatcataatcttacgagaccatagtcttatacggggtcagtctctaaaacattgttattgggtgcatgactgtaccttttctatgcttagtgtatatttagatatacaaataccactgtgctcacaacggactacattattcaatatagtaacatggtgtacagggaaggcttgcgtagagggggctaccgcagcctctaag

SEQ ID NO: 490660 - DNA, 140 bp, Homo sapiens
tttcaggaatattttatctaggtacttcattgatttcatccagttatgtgccccttctctccatttgtgacgttctcttttccatcctccacactccttatttctgctgttcagcgagcctctcctggtattggagagtt

SEQ ID NO: 490661 - DNA, 661 bp, Homo sapiens
agccaatgtttggtggcaggcacctgtattcccacctactcgggaggctgaaacattgacaattcagtaaaacctgtggcccggggaaggtgtgccgttgacgccgtgagatctcctgtgacccttggttactccaggccgtgggctacagagttgacatttccattcttcgaaattaaattaagattaagaacattaaaattaaaatttagctttactttataaagtgagcatttgcttatattttttaaattctccagatttcctcgagcggcgagaaaaaaccgtgggagcagggaagctgtgggctcaagtgtgtacaattgagttctcaataaaagtttgaacattaggggtacggctttatgctggtataaacattgacttttctaggagctctcctcatttgggtgttggcattagattttatttaataaatttaaaggactacctaatgagctaggcttatatcttaaaggatactctatggttctcccttcacatccagaggtttaaagaagaactccatgtctcagaacgttataggaggtccaagatttaattggccatccattttcaccccctcccttaagtcgtcctcaccatatttgtgcctgggcttttgtcataactgttccttctgaaaaatatgctgatattc

SEQ ID NO: 490662 - DNA, 714 bp, Homo sapiens
gatgctttgttcaagggttggggtcgtccctcggtgtgggtcaacccctgtttggaagttttaagatggtggacccccccaggttctgtccgtgggtggatgccgcccgcttgtcagcccgatcctgggtttagaccccgccccgtgcgccacgtttgtacatgtaacgctgttttgtagggcgcccagaattatcaacccctctcctggactctcctgattaaggcatttttctgtgcctgttcatcttctcccttgtggcgtccccctgcccctcacattcacattttcttaaaacataataattcttggatttttccccgtgtgtcaagaagcaatcctcatacccctcacaaataaaacttttattcccaatgtttgtggtttaagaaccatagctcttcgagggcgggtcttacaagcccctaaaaaatgcatcatctccacaagggaacacttctatcaatgattatagcatcgaataaagcatgcgccacccgagagatctgtgttccccgtgtcaaattcctgtttatttcttgatagggtcccccatttatctatgtagggtttgttgcaccatccgggcacttggatcagaaattatactggaccaccaccttatgtttcagaaaccaagaagccagaaattttattttttcaaaagcgtggggatgctttaaaaaaaatgtcaatctcagtcgcgacaaaaca

SEQ ID NO: 490663 - DNA, 255 bp, Homo sapiens
cgacttatcgttgcacaaacgaacctttaatagcggactgcaccatcggcgatgtcctgatccaacatcgaggtcggtaaaccctattgttgatattgaccctacaataggattgcgctgttatccctagggtaacttgttccgtcggtcaatttattggatcaattgagtatattaattcgctttgactggtgaagtcttagcgtgtactgctcggaggtcgggttctgctccgaggtcgccccaaccgaaatt

SEQ ID NO: 490664 - DNA, 96 bp, Homo sapiens
cctgaggacactgccgtatattactgtgcgagggatcaggtgttatcctgtactagtagtacctgcctggagggtatggacgtctgggggcaaggg

SEQ ID NO: 490665 - DNA, 319 bp, Homo sapiens
aaaaaaaaaaaacccccctacccattctttgaagaaaggaaggggttaaataatttttttccccaccccttttttgaagggccggggctttttttatgaaaaagtagtaaatagttttttgtaccctgggtgaagccccccccccccttaaagggggccctttttgctaatggttagacccgggaaaactagtggaattgtttggggcgcctttaagttttttttaaccaaaattactagatgatagaattccagaccttgttccctgttttccttggggggtcgataatcctttaaaagtaaaggctttgtcctgcca

SEQ ID NO: 490666 - DNA, 188 bp, Homo sapiens
cgggtgactctacgaggatcccccaaggcagttgaatacagactcagattaacccacactaacaaaaatttaacaaagctacccctaagacaccgagaataaaacttgaccttttccagtcaaagggcagagagacggcctactccatgtcctggacgttgaagtgagttcaaagacttggcaattaa

SEQ ID NO: 490667 - DNA, 160 bp, Homo sapiens
ataaaagtcgtagctgaaggtggtggcatatacctgtgggtcccagctgcttgggaggctaaggtagaatcactaaggagaatcacttggggcagggaagtggtggctgcagtgagctatgattgtgctattgcactccagcctgggcaacattatggag

SEQ ID NO: 490668 - DNA, 900 bp, Homo sapiens
  misc_feature (10)..(10): n is a, c, g, or t
  misc_feature (107)..(107): n is a, c, g, or t
  misc_feature (131)..(131): n is a, c, g, or t
  misc_feature (142)..(142): n is a, c, g, or t
  misc_feature (146)..(146): n is a, c, g, or t
  misc_feature (171)..(171): n is a, c, g, or t
  misc_feature (184)..(184): n is a, c, g, or t
  misc_feature (186)..(186): n is a, c, g, or t
  misc_feature (200)..(200): n is a, c, g, or t
  misc_feature (212)..(212): n is a, c, g, or t
  misc_feature (224)..(225): n is a, c, g, or t
  misc_feature (244)..(244): n is a, c, g, or t
  misc_feature (254)..(254): n is a, c, g, or t
  misc_feature (258)..(258): n is a, c, g, or t
  misc_feature (267)..(267): n is a, c, g, or t
  misc_feature (271)..(271): n is a, c, g, or t
  misc_feature (285)..(285): n is a, c, g, or t
  misc_feature (307)..(307): n is a, c, g, or t
  misc_feature (310)..(310): n is a, c, g, or t
  misc_feature (319)..(319): n is a, c, g, or t
  misc_feature (323)..(324): n is a, c, g, or t
  misc_feature (336)..(336): n is a, c, g, or t
  misc_feature (348)..(348): n is a, c, g, or t
  misc_feature (353)..(353): n is a, c, g, or t
  misc_feature (379)..(379): n is a, c, g, or t
  misc_feature (389)..(389): n is a, c, g, or t
  misc_feature (395)..(395): n is a, c, g, or t
  misc_feature (407)..(407): n is a, c, g, or t
  misc_feature (421)..(421): n is a, c, g, or t
  misc_feature (442)..(442): n is a, c, g, or t
  misc_feature (448)..(448): n is a, c, g, or t
  misc_feature (457)..(457): n is a, c, g, or t
  misc_feature (460)..(460): n is a, c, g, or t
  misc_feature (481)..(481): n is a, c, g, or t
  misc_feature (543)..(543): n is a, c, g, or t
  misc_feature (555)..(555): n is a, c, g, or t
  misc_feature (565)..(565): n is a, c, g, or t
  misc_feature (567)..(567): n is a, c, g, or t
  misc_feature (620)..(620): n is a, c, g, or t
  misc_feature (636)..(636): n is a, c, g, or t
  misc_feature (670)..(670): n is a, c, g, or t
  misc_feature (683)..(683): n is a, c, g, or t
  misc_feature (693)..(693): n is a, c, g, or t
  misc_feature (757)..(757): n is a, c, g, or t
  misc_feature (768)..(768): n is a, c, g, or t
  misc_feature (770)..(770): n is a, c, g, or t
  misc_feature (786)..(786): n is a, c, g, or t
  misc_feature (790)..(790): n is a, c, g, or t
  misc_feature (792)..(792): n is a, c, g, or t
  misc_feature (809)..(809): n is a, c, g, or t
  misc_feature (835)..(835): n is a, c, g, or t
  misc_feature (838)..(838): n is a, c, g, or t
  misc_feature (895)..(895): n is a, c, g, or t
gtttacagcnaagatgtcatatacgaagagcagaaatagccaaatatttttggtcataatttagaaatgcaaactaatctataaaatggagcacacattctccccanttcatctctctcatagaagagcangagcacgggcnctcngttccttgatatcctcaaggggccncgggtacgtctgntnagagcctgtatganactatatcgagntcgaacttttgnntataatccttcaatgtccngaaggttctnttgnagtgattcnccanaagcgttgattgcntcagcctgaagctggtctaaancangttggctcnctanngccagcccactnctaaaatctagnttggnttctggggcgaaggaatcttgcggtnttctgctttnaaaccngggtctcgaggnaaattagggatctngagggtccgtgggcatgcaangtgacnagtagtacnccngatggcgccaaagggtaggtnggcaggtctctatgataaaaggacaaagggaaagcagttttgctcgtttgttgatcaccttnaccaagcgccgncttgctagancntatttctgagctgtggtgattttatgcaacgccagcaggcatcacagactganacaactcttttatctnatctggggggagctgctctacattttgtagcttnctgacactctgtngatgactgtnataatagctgaagaaatcattagcactctgtttcagcaggtagatgataatgcctaaaccaggnaggcgccagtntnggaccactggagcttnggtntnttgccgcggtccatctntattaactgtttctgaaaggctaggngtnaagagacacacagcatgctgggaggtagggggactctgttacatgagtaactggcanattca

SEQ ID NO: 490669 - DNA, 436 bp, Homo sapiens
accatggccatccccttactagcgggcgcagtgatttataggctaccgctcttagattaggaatgccctaacccacgttcttaccactatgcaccaggcacccgctagatagatctacctcgcgagtgcctacacggactctgtggagaacccgggcagtgcatttgcaccgactgctgggacgagaagctactgtgatagagatgtacggacctgctcatacgagcccctatgccaaaaaacgggacctgcgtagagcctggacgatggcctctataaatgctcatgtgcccccgggtactcgggaaaaggagtgccagaaaatggacgggcccctatgtgatcagggggtccccctgccagcacggaggcacctgaattgataactagggccgggcctcccatgcctcctgcctgtgccccccttgcttctcat

SEQ ID NO: 490670 - DNA, 939 bp, Homo sapiens
catctacagttcttttcaaatctctttgcaagcgacgtccacactacctgaaatggtgacctccagaagacaatatctgtaaaggacgtcgttggaagagatgaaagaatgtatgcccgcttgaaatacgtgaggactgaggtggtggacgatgtgacggcccaaaaaacctattgatgtcccatgtcattacacaccacatgcagctatatgccagttggtacggaggatcacatgcttgcttccacgcctgagttctaaccaagttattgcaacacccacaacaagggcttcatgaacagcactttggacctagcaatttgttcgccacacccattccaggtgtttggacagtcactgtcgtcaaacattggcttcattcagtatattggcgggtaagggaaggtgggaaagagataatctgtcttgataacctggtgtgggtctggatgggcaggggatatgaggatataaaaccctgaattggaattgttacagccatacatgattactcaggcacatattgtgactaagtggtattacacaaggcagaatgttgaagagaggaaacggtggatggggtattcattcagactggagtatggatcattatgttgtaacaaaccgccaaaggggtgcaggtactgacggagccgacagttatggatattagggaactatccagatcgagggaattacagggtgagacaggacattaatgcggactggacctctcaggtgacgacaaacataggaaatcacactgctacttgggacacaacgagacaaggttcgtggaaacgaccgtaggatatcaaaagctggatgaacacagtgaagagattgagtgactcagaccaccaaatgaggtggcatacagtaagtcagtaacgtgtaaagaggtccgtacacatgctctccccattctctttttcttgg

SEQ ID NO: 490671 - DNA, 178 bp, Homo sapiens
  misc_feature (17)..(17): n is a, c, g, or t
  misc_feature (43)..(44): n is a, c, g, or t
  misc_feature (48)..(49): n is a, c, g, or t
  misc_feature (61)..(61): n is a, c, g, or t
  misc_feature (68)..(68): n is a, c, g, or t
  misc_feature (70)..(70): n is a, c, g, or t
  misc_feature (87)..(87): n is a, c, g, or t
  misc_feature (110)..(110): n is a, c, g, or t
  misc_feature (119)..(119): n is a, c, g, or t
  misc_feature (121)..(121): n is a, c, g, or t
  misc_feature (174)..(174): n is a, c, g, or t
gtaaagaggagaaaaanacataagctgtgtttccccataagtnntttnnaaattgtatatngtatttntngtaatattccaaaagantgtaaataggaaatagaagagtnatgcttatntnaagtcctaacactacagtagaagaatggaagcagtgcaaataaattacatttntccc

SEQ ID NO: 490672 - DNA, 1022 bp, Homo sapiens
gacagcagtccgtgccgccgtcccgcccgcagcgccccagcgatggaagcagctgctgcatgccctgtggcccatgctgcaccctgcatgcaagctgccctgcatgctcgtcctgcgccatgttccatggctggctgatgctgcccccaggagttgggccaatggagggcccccgcggatgggctgacagaatggagcggctacttggacgaccgtgcactgaaagcgggccttggactccatgaaaagaccgacggagtacgagccatgaatggtcaaagtgagctgcaggagaatcccgggcttcgagcccggcaggagggttgcccgctgcgggatcgggaagcccctgggagaggcacgcgaggttcacctgaagcaacgggggactcggttccttgccaacttgggccaattcattcccatgaacagcacacaacgtgcatcttggacccatgggcaaacgctgattccaggcccagggttgaacacggggacgcaccctgcgcgttgcgctcaacgctttccaaggaaagaacaccttgcgagcccagcacttaccagttcagactttggctggttgagtcacacaagaccagcgccactacacacactttgcttgaagacgcaacttctgtgggacgcttggcgctaggtgaatccccttgacgcctccgtagaaccttgtcgaagggaacacttaccgcagcctaaacacttttgcccttgggtatccacaggggcagttgcccttgaggtccaactggagttggggaaacagttccttagcctcaaggtccatttggaggcgagtcccactggaaacgtttcgatatctcatagtacctttggaaagggtttaccagaggctaagagacactgggcacccagttgtgtctataaagcgtaatacaccgtctaagtcgcatgtgcatacatgtgggactatctgagggacagcatatttgagtcgacttgggtcgtcgaaggcttctacacatgccaaagaccctgtgtacttg

SEQ ID NO: 490673 - DNA, 429 bp, Homo sapiens
  misc_feature (42)..(42): n is a, c, g, or t
  misc_feature (127)..(127): n is a, c, g, or t
  misc_feature (166)..(166): n is a, c, g, or t
  misc_feature (192)..(192): n is a, c, g, or t
tgcgtattgaagagggaatacaacgcatcgcctatctgcctntccgcgtgaaggcacaatgacatcgatgcatccggttcgtcaacgatcgtacggcgaggttgctccccattaacggatctgcggntgtcactcaccgggcctcctagtatggatgtcggtctgngctgtacactattagtatgtcggccnccctcccgcacgctacttggtgcgggctgtctgacttccgccccgcctcgcccacgcttagatgacgcacaacatcgattcggagccctgtcgtcacttgtgtcacacgcatgagtggaagaccctcgctcctctttgtttaatatacgctcactcttcctcccccactcttgttgcctcctagttctccccccccccccctttatttcccgggtttcccccctaacaaacaaaaca

SEQ ID NO: 490674 - DNA, 525 bp, Homo sapiens
  misc_feature (4)..(4): n is a, c, g, or t
  misc_feature (18)..(18): n is a, c, g, or t
  misc_feature (36)..(36): n is a, c, g, or t
  misc_feature (50)..(50): n is a, c, g, or t
  misc_feature (65)..(65): n is a, c, g, or t
  misc_feature (90)..(90): n is a, c, g, or t
  misc_feature (122)..(122): n is a, c, g, or t
  misc_feature (129)..(129): n is a, c, g, or t
  misc_feature (168)..(168): n is a, c, g, or t
  misc_feature (445)..(445): n is a, c, g, or t
  misc_feature (489)..(489): n is a, c, g, or t
  misc_feature (495)..(495): n is a, c, g, or t
  misc_feature (501)..(501): n is a, c, g, or t
  misc_feature (503)..(503): n is a, c, g, or t
  misc_feature (507)..(507): n is a, c, g, or t
cccnaggggaccccaagnccctaagagcctaagtgnaggataaacttggncatggtcctacaagnggtttattacaggaacattaaaaancggtatacacaatacaaaaaaagggataacangacccangtcaccccagctttaacaggctacctagtcatgtgtcanttttggttttaccctatacttcccagccattccccacccccaatttcattattttttagcctttttggataaaatgtatattcattgcaaggtacaatgtgaactgtaaatagtagagacatggggtttcaccacgttgaccaggctactcttgaactactgtcctcaggtgatccacctgcttcggcttcccaaattgctgggattacagcataagccaatatactcagcctgagaattcatatttgtaacaaagtacaaatccatagggcacatnagaacgtacaatgtctatctacagtaaatacagtttgatgaatnaaatgnaaaggncnatgnccttgggaaaaaaaaaaa

SEQ ID NO: 490675 - DNA, 220 bp, Homo sapiens
ataagccagatgatcaagaagagagagtcttgtcaagaccatcagaaacatcaggcaactcatggtaggaattcagcatattcattagactgcaccatacccgtctcatgtcaggatcacttgtgtagaccactttaggcagaagcacaaatatcactaaaggaagaaccatcatcataaccattgggttcattagaaagtctgtccagccccacgattc

SEQ ID NO: 490676 - DNA, 411 bp, Homo sapiens
ttgaacactttccatttgtctatactaagaaaagtatttggctggagatagaaaaggatattaacgtgtcatgaacatatataaaatttggtagcacagtcttttttcccctacatttttagtttcagttcactgtttctgtagtttctaaatattttcacctactaatgaaaaccttatttaggtcaaacggtttgcttatggatttaaaagcattttggttgaattccttgctccagatgtagagcagacgtgtcgtacatctcattcaaaactgttaactttcgggtctccagcagtgtgatgaatcgactttggcagatcaacccatgcagatgttgaataatctacatgatttgggttgacttatttttaagaagccattccctattaactcatttggtagctatg

SEQ ID NO: 490677 - DNA, 303 bp, Homo sapiens
  misc_feature (47)..(47): n is a, c, g, or t
  misc_feature (134)..(134): n is a, c, g, or t
gaaagaaaggagagaagcagattccaggggaagaaaaggggagaaancggagaagagttaaggaggataaaaagaagcgagatcgagaccggtggagaatgaggcagaaaagatctccagtgtcacgccccttnagattagacttgcctcctagaagcctctcacaagctctttagccaacaagaagagtagacagacacccttcagagctttgatcactcatgagacattgcagagaaagatccagtgcttctttcattcctgtgactgatttattgctctgctctcatgatcattaacacc

SEQ ID NO: 490678 - DNA, 252 bp, Homo sapiens
  misc_feature (55)..(55): n is a, c, g, or t
ggtagtctgcttgggctagctagagttccccgtaacgagcgcggcatgggcgttnaacccggcgttcgttcatcccgcacgccagttctgcttaccaaaagtgtgccactaggcactcgcattccacgccggtcacgcaggagcgggtttttacccatttaaagtttgagaataggttgagatcgtttcggccccaagacctctaatcattcgctttacccggataaaactgcgtgtgcggctcgttacgga

SEQ ID NO: 490679 - DNA, 168 bp, Homo sapiens
attggccctttctccacttaggccggtggtccctaatggtgtagtttttccttttcctttttggggtccggcgctcgctttcgtcttctgggtcttggctggttcccacgggcttggcggtttccccggccgggccgcgccggccggccccggcgcccgcccctcccc

SEQ ID NO: 490680 - DNA, 466 bp, Homo sapiens
tctgacgagttccccccgatctgcgcgccgccgccgccagcagcttgggagtgtgctgcacacaggtacctgcacatgttgtctattgtcagtgctgtcaagtgtgtgccaggatgatccatggtcactttccgggatggcagcaaggtgactacggatgagtgactgacctgactgaaaaggtgcgtgagcagatatctcgggccttctacacgcatggagctcctctgtgcatcctatcccatccccatacatcctcttcacagggttctgcatcttacgcctgctgctacccactgctgaaactccccttgccaggaacaggagctgtgcgccttcaccaccccatatgaaggattactcgcccccacctgtggactctgaccgaaaacaaggcgagcctactgagcagcctgagtgggtgggtactcgtcatgtacctgaggccagcacagagcgtagggtg

SEQ ID NO: 490681 - DNA, 896 bp, Homo sapiens
tagatgttcgccgaccgttgactattctctacaaaccacaaagactggaacatatacctattatcggcgcatgagtgagtcctaggcacagtctaagcctccttattcgagccgagctggccagccaggcaaaccttctaggtaacgaccacatctacaagttatcgtcacagcccatgcattgggtaataatcttcttcatagtaatacccatcataatcggagacttgtgcaaactgactagttcccctaataaatcgggtgcccccgatatggcgtttccccgaataaaacaacataagcttctgactcttacctccctctctcctactcctgctcgaatctactatagtggaggccggagcacggaacagggttgaacagtctaccctcccttagacagggaaaatattcccaccctgagcctcgtagacctaaacattttctccttacactagcaggtgtctcctcatatctaaggggccatcaatttcatcacaacaattatcaatataaaaccctggaaataaacaaataacaaaggcccctctgcgtctgatcgtcctattcacagcagtctacttctccctacttcttcccagttcctaagtggtggcatcaccaatataattaaaagaccggaactcaaaacaacctttttcgaccccgccggaggaggagaccccattttaataccacacctaatcggggtttgggcaccctggaggtaatacttatccaacgaggtgggaaaatctccaaattggagtaataccggaaaagaaccttggacatatgttgtgcgggaagataaatgggccagggtctggggcaccaatatatgtgaataagaaagaattcggaaacagaccggagattgtgcccacaatgtcgcg

SEQ ID NO: 490682 - DNA, 230 bp, Homo sapiens
cagcatgttttcgtgtactactgtaatgcaaaatttattacatcatatagacataaatattaacatcataagtagaaggaagaatgatgagccttcgtgccccctcattccccctttttcgtcccccaaattgagatgtctgacggctaataggtctcccagggccacagggtaggcaggcacagccacagggcatccctagtaccatgactcgcgcaccaggcgtcagg

SEQ ID NO: 490683 - DNA, 304 bp, Homo sapiens
  misc_feature (105)..(105): n is a, c, g, or t
  misc_feature (219)..(219): n is a, c, g, or t
gtcccaccatcccagaacatcagtaaaactgaaagaaactcagtcagagcctgggatgatgtagatgatgatgagaatatcattcctttctctctatgtccatgngagaatttagcaagcttccagtcgtgaagcaaactgcaactcattccattatacttttcaagggctctcggtacactaagtgaccattcatttcccattaggtgcatgtagtcnagaaccacaagactggtaggtagtgtcgatggggcagggggatggccaccacctggatacttcttgtacaatgctgcaggggtac

SEQ ID NO: 490684 - DNA, 234 bp, Homo sapiens
aacacaagtctgcacgtgattaatcacttccaccaggcccacctttaacattccgactgacaattccacatgagtttggtagacgacacacgagcatgaattttacttaattttctgtccctggctccccaaatctcatgtcttctcacatgaaaatatatgatgccttccctaaatccccaaatcttatatcattaagcatttatcaaatgttgaaagcttaaagttcatctg

SEQ ID NO: 490685 - DNA, 169 bp, Homo sapiens
gtaaaccctccaaagggaaagggaaagtttttggggcccccttgggttttttttttggggggggggggttttaagtttttggtttttaaaaccgggcctttttaaggggaacacctggcccaaaatttgggcccaaatttttgggcccccttaaaaaggtttattggga

SEQ ID NO: 490686 - DNA, 751 bp, Homo sapiens
gatgcccaagaaagttcctagggtgagaacagccgatagtcgagcagacggtccgaggcacgtttcggcagaggtcgataggcggcgactgatgccaagaagcagagagtgagctggagcgatgccatactgtggatggacgacgacgaacacgtcattgaggaaggagcacgtgcatgggatggagatagggagaagcggcgcctcgaccagctggaacgtaaggaaggagacgcagcgcctactggtaggaggatggactcctagagcgtcaatgtcggcaaggtgccgcgggtggccacgtccacgcaagggtcatcctcgggcccagatcgacggacacgtctgcgcctgagaccatcagctcagggaggccccggacacatggcgagaaagtcatagagccagtctggaggtgccgctggaggagaacgtgaaccagcgcgtgctggaggagggcagcgtggaggcgcgcaccatcgaggacgccattgcagtgctcagcgtggcggaggaggcggccgagctggacccagaaagacgcatgcgggcagccttcacagcctttgaggaagcccagatgccgcgggtaaacaagagaaccccaacgatgcggtctgtcgcagctgaaacagctgctcaaagaaggagtgagtccgtctcctggaaacccatgaaccagcgggcgtgcccttcaatgcccccaagtgagcccagaacttggggagccaagttcacccacgggtggtca

SEQ ID NO: 490687 - DNA, 627 bp, Homo sapiens
ggggtgacttcgcgtatcaggcagggtaactggccgtggttatagaaactgtccattggagtgctccgctgcgagagggagtgggacccctgactcgagtaagtttgtgagagcactacgcgagtcagtcggtgggcagcagcaagatgcgaagcgagccgatacagatcccgggctctccgaacgcaatttcgccctgcttgagcgaggctgcggttgaccgatggccctctccagccaaggaaaagctacgcaaataagcctggatcactcatcgaaccagccctgaagccatgtgaaggctctctcgcctcgccctctagcgttcgtctggagtatgcagccagacccggcttccttggggacacaggggttggcaccaatggggcccaccagcgtcccgctggtcaatggccacctgcaggctcggtctctgactacgtcagactatgatatcatcgtccggcattacagctacacgggaaagctgaatatcagcgcggacaaggagaaactagcatttaaactgacctcggtggtgttcattctcatctggctgctttatcatcctggagaacatcttggtcttgctgaccatttggaaaaccaagaaattccatcgaacca

SEQ ID NO: 490688 - DNA, 312 bp, Homo sapiens
aggcctataatcccagcaccttggtaggccagggcaggaggctcgcttgagctcaagagtcaagagcaacctcagcaacactgagagacctgtctgtacaaaaaaattcaaaaattagccaggtgcagtggcatgtatctatggtcccacctactcgggaggctgaggcgggaggatggcctgagcccggggggtcaaggctgcagtaagccataattgttgccactgcactccagcctgtgtgcactgagaccctgcctcaaaaaataaaaattaaaataaagggatcagaggtatctgggaataggcagg

SEQ ID NO: 490689 - DNA, 616 bp, Homo sapiens
tgtgatactaactcgtacgttgattttacattgctttgatatcatcataatattgtcctactcttttctctagttgcctactatattaaggagaatctgctatcaacctttcctttgttcctccataaaacatgtcctttgtctctgacttgctttgaggctttcaattttaacactgatttagagcattctggtaatgactcatgtggcttagtgtagttttcttcatgcctcttgtgctcagggtttgatgagcttcttagatcagtaagttcccatcacatttggacattttttcatcatctcaaaatattgttttctgttcttttcccactttccttttacagactccaattccatgtgtgttagagactacttgaagttctcttaaagctcacaggggcttggagtctgtaaaaggaaagtgggacacgaaaagaaagacaatattccaaaagattaaaatgttcaagtattgtgagaggaaaggggagatacaaaatagaatgggttcagaataagtcaattatatttactaccttaggagagacactgacacaactgtttttatccaggtatattttatgccattagaacacatactgttatccattta

SEQ ID NO: 490690 - DNA, 327 bp, Homo sapiens
ggtgagaaaatagtgggcaatgatccataagaagataaacatctcaggccgggagcggtggctcacacctgtaatgtcagcactttgggaggccgaggtgggcagatgcttgagctcagaagttcaagatcaccctggctaacatggtgaaaccctgtctctactaaaaatacaaaaattagccaggtatggtggcaggtgcctgtaattccatctacttgagaggcttaggtaggagaagtgcttgaactggggaggcagaggttgtagtgagccaagattgtgccattgcactccagcctgggcaacagagtgagactccatctc

SEQ ID NO: 490691 - DNA, 252 bp, Homo sapiens
  misc_feature (207)..(207): n is a, c, g, or t
acatcctagctgagcgatcaactgctatcctcagtgagaatgtttaggttggcttagccaaatcctccttacccctaatgtttcctcttagtaattttccatccactgacccccacctgcctatgctgtattcagagctgagcccatctctctccccagtgcagaatctcactgcagtggtctggtccctacatctttcatccatcntctgagttaatgtctgtattaccgtgtctgatacgcgttccccag

SEQ ID NO: 490692 - DNA, 2523 bp, Homo sapiens
agcggggacgcgcccagaccgagcgcttgaggtgccgcagccgccgccgccgccgccgccgcgatgtgaccttcagggccgccaggacgggatgaccggagcctccgccccgcggcgcccgcggctcgcctcggcctcccgggcgctctgaccgcgcgtccccggcccgccatggccccttcgctctcgcccgggcccgccgccctgcgccgcgcgccgcagctgctgctgctgctgctggccgcggagtgcgcgcttgccgcgctgttgccggcgcgcgaggccacgcagttcctgcggcccaggcagcgccgcgcctttcaggtcttcgaggaggccaagcagggccacctggagagggagtgcgtggaggagctgtgcagccgcgaggaggcgcgggaggtgttcgagaacgaccccgagacggattatttttacccaagatacttagactgcatcaacaagtatgggtctccgtacaccaaaaactcaggcttcgccacctgcgtgcaaaacctgcctgaccagtgcacgcccaacccctgcgataggaaggggacccaagcctgccaggacctcatgggcaacttcttctgcctgtgtaaagctggctgggggggccggctctgcgacaaagatgtcaacgaatgcagccaggagaacgggggctgcctccagatctgccacaacaagccgggtagcttccactgttcctgccacagcggcttcgagctctcctctgatggcaggacctgccaagacatagacgagtgcgcagactcggaggcctgcggggaggcgcgctgcaagaacctgcccggctcctactcctgcctctgtgacgagggctttgcgtacagctcccaggagaaggcttgccgagatgtggacgagtgtctgcagggccgctgtgagcaggtctgcgtgaactccccagggagctacacctgccactgtgacgggcgtgggggcctcaagctgtcccaggacatggacacctgtgaggacatcttgccgtgcgtgcccttcagcgtggccaagagtgtgaagtccttgtacctgggccggatgttcagtgggacccccgtgatccgactgcgcttcaagaggctgcagcccaccaggctggtagctgagtttgacttccggacctttgaccccgagggcatcctcctctttgccggaggccaccaggacagcacctggatcgtgctggccctgagagccggccggctggagctgcagctgcgctacaacggtgtcggccgtgtcaccagcagcggcccggtcatcaaccatggcatgtggcagacaatctctgttgaggagctggcgcggaatctggtcatcaaggtcaacagggatgctgtcatgaaaatcgcggtggccggggacttgttccaaccggagcgaggactgtatcatctgaacctgaccgtgggaggtattcccttccatgagaaggacctcgtgcagcctataaaccctcgtctggatggctgcatgaggagctggaactggctgaacggagaagacaccaccatccaggaaacggtgaaagtgaacacgaggatgcagtgcttctcggtgacggagagaggctctttctaccccgggagcggcttcgccttctacagcctggactacatgcggacccctctggacgtcgggactgaatcaacctgggaagtagaagtcgtggctcacatccgcccagccgcagacacaggcgtgctgtttgcgctctgggcccccgacctccgtgccgtgcctctctctgtggcactggtagactatcactccacgaagaaactcaagaagcagctggtggtcctggccgtggagcatacggccttggccctaatggagatcaaggtctgcgacggccaagagcacgtggtcaccgtctcgctgagggacggtgaggccaccctggaggtggacggcaccaggggccagagcgaggtgagcgccgcgcagctgcaggagaggctggccgtgctcgagaggcacctgcggagccccgtgctcacctttgctggcggcctgccagatgtgccggtgacttcagcgccagtcaccgcgttctaccgcggctgcatgacactggaggtcaaccggaggctgctggacctggacgaggcggcgtacaagcacagcgacatcacggcccactcctgcccccccgtggagcccgccgcagcctaggcccccacgggacgcggcaggcttctcagtctctgtccgagacagccgggaggagcctgggggctcctcaccacgtggggccatgctgagagctgggctttcctctgtgaccatcccggcctgtaacatatctgtaaatagtgagatggacttggggcctctgacgccgcgcactcagccgtgggcccgggcgcggggaggccggcgcagcgcagagcgggctcgaagaaaataattctctattatttttattaccaagcgcttctttctgactctaaaatatggaaaataaaatatttacagaaagctttgtaa

SEQ ID NO: 490693 - DNA, 258 bp, Homo sapiens
cataagtgtatacattctctgtgtgtagcatttttaattcatgtggtttattgtgcctcgcatgacatttcgcaggcgggcgagacccgcgacaccggaggaggccggtttccgcaaggggctgggcaggcgtcagctgcagatgatcgcggtgggctccgcgatcggcacgggcctgttcctcggcaccggcgcccgcctggagatcgccggcccgtcggtcgcgctcatgtacctcgtgtgcggcagggtaccgag

SEQ ID NO: 490694 - DNA, 252 bp, Homo sapiens
  misc_feature (42)..(42): n is a, c, g, or t
  misc_feature (62)..(62): n is a, c, g, or t
  misc_feature (120)..(120): n is a, c, g, or t
gatatgtctatatggatgccatctcatacctttgactggttnatactataacatcactacantttatataacattcgcctattaacggtacatttaggttattttcagcatttttcactntaatcagtaagttgccaaatatctctgatacactttccatatttcttgagtagagtatttgtatttggcaactgttgactgtaaccataatatctttctttctacgtatcttcttgtcctatctaaagaaga

SEQ ID NO: 490695 - DNA, 121 bp, Homo sapiens
gtgtagctgtcatgtcttttggcataattgtcaacgtatggcctggatatgcacacaggttggtgtcttcaaaaaggccaaccagataggcctcatttgcctcctgcaaccgccccgatag

SEQ ID NO: 490696 - DNA, 345 bp, Homo sapiens
gtcgaccctaattggaagcgccaccctagcactatcaaccattaggtgcatgagtaggtggcctgcagtaatgttagcggttaggcgtacggccagggctaacattactgcaggcactactcatgcactaattggaagcgccacccctatgcaatatcaagccattagaccttcccgtctacgacttatcgatcttcacaattctaaggtctacgtgactatcctagaaatcgcttgcgccttaatccaagcctacgttttcacacttctagtaaggctctacctgcacggcaacacatagaaaaaaaaaaggtcggcgcggcctgggattttagtaggtagtag

SEQ ID NO: 490697 - DNA, 690 bp, Homo sapiens
agcggggacgcgcccagaccgagcgcttgaggtgccgcagccgccgccgccgccgccgccgcgatgtgaccttcagggccgccaggacgggatgaccggagcctccgccccgcggcgcccgcggctcgcctcggcctcccgggcgctctgaccgcgcgtccccggcccgccatggccccttcgctctcgcccgggcccgccgccctgcgccgcgcgccgcagctgctgctgctgctgctggccgcggagtgcgcgcttgccgcgctgttgccggcgcgcgaggccacgcagttcctgcggcccaggcagcgccgcgcctttcaggtcttcgaggaggcccactcctgcccccccgtggagcccgccgcagcctaggcccccacgggacgcggcaggcttctcagtctctgtccgagacagccgggaggagcctgggggctcctcaccacgtggggccatgctgagagctgggctttcctctgtgaccatcccggcctgtaacatatctgtaaatagtgagatggacttggggcctctgacgccgcgcactcagccgtgggcccgggcgcggggaggccggcgcagcgcagagcgggctcgaagaaaataattctctattatttttattaccaagcgcttctttctgactctaaaatatggaaaataaaatatttacagaaagctttgtaa

SEQ ID NO: 490698 - DNA, 928 bp, Homo sapiens
aaaaaaaaaaaaaaaaaacttttgggcccgcctgggcctttaaaatgggcccccgaaaaagttttttaaaacattcgttgggggggggggcccaggggtaggggaactggggctctttacggcgtgggtgttcctataagggagaatccgtggccaatcgattctagtgcttgggggtttctaaccaaattaaaaaacggccgggggggcaaccggacggggtccctggaacaattcaaagaagggagggttcgaagcgtcattcacggggcctcttatcaccaggagtccaaaggcagagctcggattatcaaattaacgccccggcccgggaaatcggactgcgcacatctacgccttccggcggccggaacagtgggagacgcccctcaacaacgggggatagggagtgacccaccgagaacttaggaccagaggggactatcaagcacaccctggcggccaccttgggggataacaaaacattcgaggcgccaagtgggcggaacccacgggggggacacaaaaaaatgtgggtccacctatgtgggagcacggggtaacacaccacgaccggggtgtgaacaccaaccacagcggagctgggcgtgacacagaaaaaaagtacttctcccagaaaagaccccttaaggggaaaaaacgcggccaagcgatcacccgggacaccagcgccaagctggccagatcatttggtgttagaaacaccgcgcggaacaaatcagcaggcgaccttaacacccacaaggcgagaaacaagggttcaggtcaggtccagtgaaaccgccggtcaaggggagacacttccaaatcagcggcacgtttaatgcaacaccagccggaagaaattcacgccgaccaatgtaaagccggcaaaaggacttactaacagggaaagcccaaccgagcg

SEQ ID NO: 490699 - DNA, 788 bp, Homo sapiens
agcggggacgcgcccagaccgagcgcttgaggtgccgcagccgccgccgccgccgccgccgcgatgtgaccttcagggccgccaggacgggatgaccggagcctccgccccgcggcgcccgcggctcgcctcggcctcccgggcgctctgaccgcgcgtccccggcccgccatggccccttcgctctcgcccgggcccgccgccctgcgccgcgcgccgcagctgctgctgctgctgctggccgcggagtgcgcgcttgccgcgctgttgccggcgcgcgaggccacgcagttcctgcggcccaggcagcgccgcgcctttcaggtcttcgaggaggccaagcagggccacctggagagggagtgcgtggaggagctgtgcagccgcgaggaggcgcgggaggtgttcgagaacgaccccgagacggattatttttacccaagatacttagactgcatcaacaagtatgggtctccgtacaccaaaaactcaggcttctcagtctctgtccgagacagccgggaggagcctgggggctcctcaccacgtggggccatgctgagagctgggctttcctctgtgaccatcccggcctgtaacatatctgtaaatagtgagatggacttggggcctctgacgccgcgcactcagccgtgggcccgggcgcggggaggccggcgcagcgcagagcgggctcgaagaaaataattctctattatttttattaccaagcgcttctttctgactctaaaatatggaaaataaaatatttacagaaagctttgtaa

SEQ ID NO: 490700 - DNA, 564 bp, Homo sapiens
agcggggacgcgcccagaccgagcgcttgaggtgccgcagccgccgccgccgccgccgccgcgatgtgaccttcagggccgccaggacgggatgaccggagcctccgccccgcggcgcccgcggctcgcctcggcctcccgggcgctctgaccgcgcgtccccggcccgccatggccccttcgctctcgcccgggcccgccgccctgcgccgcgcgccgcagctgctgctgctgctgctggccgcggagtgcgcgcttgccgcgctgttgccggcgcgcgaggccacgcagttcctgcggcccaggcagcgccgcgcctttcaggtcttcgaggatgagagctgggctttcctctgtgaccatcccggcctgtaacatatctgtaaatagtgagatggacttggggcctctgacgccgcgcactcagccgtgggcccgggcgcggggaggccggcgcagcgcagagcgggctcgaagaaaataattctctattatttttattaccaagcgcttctttctgactctaaaatatggaaaataaaatatttacagaaagctttgtaa

SEQ ID NO: 490701 - DNA, 242 bp, Homo sapiens
gcagatactgattaagtcggggcatgttatatgagggggggtcatggtgcctcagaacagttagatggtgacatcaaaaatcactgattatgataatcatagcagatataataacaaaaaagtttgaaatattgtgaaaattaccaatgtaacacagagacatgaagtgagcacatggtgttgaaaaaatggtcccaacggacttccttgacacagagctggcacaaaccttcaacttgttc

SEQ ID NO: 490702 - DNA, 222 bp, Homo sapiens
attgggggccggtccgacacctaaggcaggacgactgtggccgcaaagaatacgagaaagtcggtggagtcaatcaactctaggctccaactcgttatgaaaagtgggacgtacgtcctggggtacaggccgactctgaagatgatcagacaaggcaaagcgaaattggtcattctcgctaacaattgcccagctttaaggaaatctgaaatagagtactat

SEQ ID NO: 490703 - DNA, 352 bp, Homo sapiens
  misc_feature (24)..(24): n is a, c, g, or t
  misc_feature (49)..(49): n is a, c, g, or t
  misc_feature (67)..(67): n is a, c, g, or t
gggatggtcacagaggaaagcccnagctctcagcatggccccacgtggntgaggagcccccaggctnctcccggctgtctcggacagagactgagaagcctgccgcgtcccgtggggccatgctgagagctgggctttcctctgtgaccatcccggcctgtaacatatctgtaaatagtgagatggacttggggcctctgacgccgcgcactcagccgtgggcccgggcgcggggaggccggcgcagcgcagagcgggctcgaagaaaataattctctattatttttattaccaagcgcttctttctgactctaaaatatggaaaataaaatatttacagaaagctttgtaa

SEQ ID NO: 490704 - DNA, 121 bp, Homo sapiens
cgggtccagataaatgaggacgcgaaatgggaagagcgaggcagcgagctggccgagatgcttccgcatcttcgacacgaatgcaaactgctacatctgacctcggaggtagctggacttg

SEQ ID NO: 490705 - DNA, 368 bp, Homo sapiens
  misc_feature (162)..(162): n is a, c, g, or t
  misc_feature (180)..(182): n is a, c, g, or t
ccagccctactgcccaggtcctccggtgcctgcctgggagcctgtttgtgcacttgactctccggcctgctgccggaaaatcatccaggctgtggttcctgatcccatcacctggctttatctgagatacaagcacaatattcaccgagggctgtgccttcntgaggttgcctgatacannncacctgtacccacctgcacgacttggggcctctgacgccgcgcactcagccgtgggcccgggcgcggggaggccggcgcagcgcagagcgggctcgaagaaaataattctctattatttttattaccaagcgcttctttctgactctaaaatatggaaaataaaatatttacagaaagctttgtaa

SEQ ID NO: 490706 - DNA, 576 bp, Homo sapiens
atcgagcgctgtaccttccagccaacgcctgcttcggccgactgcagcgccctctccttcgtcctgcatctacttccccaagcggctggcctagacgctagacaacaacgaatctcaacgactacggtgtgcgggaggtgccgccctgtttcagccgcctcattgtgctcagactcagtgtaaaccagatcactgccggtggggtagaggtgctaagctgaagagttgagcaaatacaatattgtgacctacatttgggttttatagaaccaaccagatcaccgatgtcgtagccaggtaggtcaccaaaatcctgtatgaatagcaaaggccgcacagcatcttaagaatgtgaaaaaacaaattaacacgtgaaggaggggaagtatcctcgcccgggcttgtgcagcacagcacatcaatctctgaggttggtcttgcgtccaagggctctccacggaaggaggaaggcagccttgagaaggggcctgcaggtaaagacgtctctagaaatactgtgggtgaccgaaaaggaattcgaggatgaggtggaagagagttaggcgttggatggaa

SEQ ID NO: 490707 - DNA, 776 bp, Homo sapiens
acccatctgattgaaaggccggggggagatttcacgctctgaccgtcccttcagtgtagacctgtggtgtcagtgaagaccctggaggaagaatagctccagggcctgctggagacccatagtggagagcccaagcaggccagcctgtcccctttgcaaatcctaccccacaggtggcctgggagggctttgctaaggagtggccagctctggcctggccttgtctgtcctcggcacccagaggtcactcctggcctgcagcctcctccgtagccaggggctgtgcacccttgggctccccttcaggcctgtgcttgttcccagatgtcaacgaatgcagccaggagaacgggggctgcctccagatctgccacaacaagccgggtagcttccactgttcctgccacagcggcttcgagctctcctctgatggcaggaccttgcgtgtggtttgagcaatcgcggtgtgatcccacggcgggacagcgtagaggcctccccggctcaccgccgcttccctctggctggcagatgtggacgagtgtctgcagggccgctgtgagcaggtctgcgtgaactccccagggagctacacctgccactgtgacgggcgtgggggcctcaagctgtcacaccggtaggaatgcagtacccacatgtggacgtttctgggcagggcggctcttgtctttcctcttcagcctgggcctgtgcattgcacatggttggggaggcctcagaatcacggtgggaggcaaaggcacttcttacacgca

SEQ ID NO: 490708 - DNA, 431 bp, Homo sapiens
agcggggacgcgcccagaccgagcgcttgaggtgccgcagccgccgccgccgccgccgccgcgatgtgaccttcagggccgccaggacgggatgaccggagcctccgccccgcggcgcccgcggctcgcctcggcctcccgggcgctctgaccgcgcgtccccggcccgccatggccccttcgctctcgcccgggcccgccgccctgcgccgcgcgccgcagctgctgctgctgctgctggccgcggagtgcgcgcttgccgcgctgttgccggcgcgcgaggccacgcagttcctgcggcccagggcgcggggaggccggcgcagcgcagagcgggctcgaagaaaataattctctattatttttattaccaagcgcttctttctgactctaaaatatggaaaataaaatatttacagaaagctttgtaa

SEQ ID NO: 490709 - DNA, 237 bp, Homo sapiens
acttgcggtcagagacacttgcatccagaggacacttgcatccagagacacttgcatccagaggacacttcgcatccagaggacacttggcatccagaggacacttggcatccagagacacttggcatccagaggcacttggcatccagaggacacttggcatccagaggacacttggcatccagagacacttcgcatccagaggacacttggcatccagaggggtaacgagctcga

SEQ ID NO: 490710 - DNA, 349 bp, Homo sapiens
cactcggacactgggacggtgcttcctagggggtagtcctgatcccgtttcgtgcacgactaggaggtggcgtgctgctagggctgcaataatgcacgggtaagatgacgtgcccggtcaagcatcgtgtgagggtgggactgtctactgagtagcctcctcagcattcattgacctaggtctgtaccaatgtatgggctggcggatagtaagtatgtacttcctgtggcccctcagcaatgatcatttggcctcacgggaggcacatagccaatgaaggctagtagctaatagtagtaagcaggaggataatgccgatgtaacaggaaacagaatagagaaatgatcc

SEQ ID NO: 490711 - DNA, 581 bp, Homo sapiens
  misc_feature (347)..(347): n is a, c, g, or t
gcgtgcggcgtaggggtggccagcagctgtgaggaccagcttggacctaacagctcacgtaggggtggccggcaggccctgaccacacctcggtctcctgcagctggtggtcctggccgtggagcatacggccttggccctaatggagatcaaggtctgcgacggccaagagcacgtggtcaccgtctcgctgagggacggtgaggccaccctggaggtggacggcaccaggggccagagcgaggtgagcgccgcgcagctgcaggagaggctggccgtgctcgagaggcacctgcggagccccgtgctcacctttgctggcggcctgcaggtaggtgctccctgtncgctcacccgggtgaagagctccagggaggcccagcttggtcaccccagatctaacctggacaggctggggtttctggtagtgaatgcggaagaggacttgtgttttaagaggaaggagaagtccaggtgggtcgttagtggctattatggtgtctcggtgctggtcaggtcattggctgagactgagaaacacgtacgggggccggcattggcctgagtcaggccccacgaac

SEQ ID NO: 490712 - DNA, 343 bp, Homo sapiens
  misc_feature (285)..(285): n is a, c, g, or t
  misc_feature (288)..(290): n is a, c, g, or t
ggccctgctccgacctcactagtggcctctccaccgtgcataccaccctataatgcaccgctttcattgcagtgcggacccctctggacgtcgggactgaatcaacctgggaagtagaagtcgtggctcacatccgcccagccgcagacacaggcgtgctgtttgcgctctgggcccccgacctccgtgccgtgcctctctctgtggcactggtagactatcactccacgaagaaactcaagaagcaggtagggcctccgccacccagggcgtcctgaccggctngannnacgggtacgtgcgtcgcactccctggcaggggacgaagggggcccgcggtggg

SEQ ID NO: 490713 - DNA, 170 bp, Homo sapiens
agaggagggaagggatgcctgtagaagactgaggtcgtccataagatgttgtgaggcagcagataccactcacaggacagagaggcagaccctgaccgtgtggctaggaccacggaatctagggggctcctgagacctggaggcagacctcagatcgaggtaaacggctc

SEQ ID NO: 490714 - DNA, 309 bp, Homo sapiens
tgagacggagcttgctctgtcgcccaggctggagtgcagtggcagatgctcagctcactgcaagctccgcctcctgggttcacccgccattctcctgcttcagcctcccgagtagctgggactacaggcgcctgcaccacgcctggctaattttttttttatttttttttatttttagtagagacggggtttcatcgtgttagccaggatggtctcgatctcctgaccttgtgatccacctgcctcggcctcccaaagtgtacctttctatttatttctataattttgtactttagtcataaaagtcga

SEQ ID NO: 490715 - DNA, 126 bp, Homo sapiens
ctcatacagcaccttgttactgcagtatcacatcgccctcaggcaggtcattgtccgagatagcgaatgaaaaactgtttcgctgttcttctccaggcaacagggttttctcggcaaggaccttca

SEQ ID NO: 490716 - DNA, 1425 bp, Homo sapiens
  misc_feature (874)..(874): n is a, c, g, or t
gtcgatctctgtgtgtactgtgtgtgcgcccggtgcccgcctgccgcggaccagtggagagactaccataagcctggaccagcgatgagagactgcaggaccttgtacatggacactggcgcaaactggcgtactggtaataagtgtctcactcctcaggccaagcaacctgcgttctgggctcttggccgacactcacgacagttctatgcgtgcaagcgcgcggcgatcagaatcaatggcatgatagcatcttttattcgcacgacctagtggcgcgtacctagagatcccaaggcatccccaggtaatcccgtgacaacttgcatcggctgtgtgtgacatacatcacaaaaggaggcgcatgtgtgcatgcatctcgagatcacatcataacggacgggtgtcgtgaggtcctgaaaagacgtgggtgtgtccatggtacgcgaaggacgagactgcccttgtctgaaatcacctgactggaaaattgagttcactggcgtcccagataccttgtgaaacgtggacatcccggccttgccccgtggatataacccccgtgacctattttacacacacggattcggttgagttgcgccagactgtggtgttctcacctgtggtgtgcctcgaggcgtgtccgcctacgcgggtgtccccgactctttgatcgggggtacttgcgtagccttagcaccacgtaggttcggataattaatccttgtctggattccaaaagggcttccaagcgcttaacccccgtaatgtgcataacttcgtgccgttattagccaatggggcggaaacagaacccagaggaggaggaaacgccatatggttccagcaggaaaggaggggacctacctttggntaacattcgcgcggagtgcggccccgaagttggacgccccatttatcagaggcaccaaatgagcgaacttccctacatagagatcgccttcgccgaaccaaaaacacaccttattggtttgcgacccccaattataccttaacggcacctgatttacagacagttccaagacacgctttgggggagcccccacgcgaatgtttggaaccccacaggtgtcgctaccaccataacacatgggctgaagtgcaaacgccacaggtaatttggtgaacacgagttcttaaaccccaaagaaaaagcgcctggtgttggccggaagggcagcccatatacaggaggtttgggtgacaatttgccccaagtcccaattcccgctagcgcatttggcgaccaaccacaacggccgttttagtatactagtgaatgccgtagtgttgccacaaaggacgccttttttggcgccccaatgggacccacactgtcacaacccaaggacgactaatagctaggcgacacacattcaagatagtggccaaaaatggaaccct

SEQ ID NO: 490717 - DNA, 567 bp, Homo sapiens
  misc_feature (29)..(29): n is a, c, g, or t
  misc_feature (73)..(73): n is a, c, g, or t
  misc_feature (87)..(87): n is a, c, g, or t
  misc_feature (101)..(101): n is a, c, g, or t
  misc_feature (137)..(137): n is a, c, g, or t
  misc_feature (225)..(225): n is a, c, g, or t
  misc_feature (318)..(318): n is a, c, g, or t
  misc_feature (371)..(371): n is a, c, g, or t
  misc_feature (390)..(390): n is a, c, g, or t
  misc_feature (427)..(427): n is a, c, g, or t
  misc_feature (445)..(445): n is a, c, g, or t
  misc_feature (490)..(490): n is a, c, g, or t
  misc_feature (506)..(506): n is a, c, g, or t
actcagagagaacccaccatggtgactgntctcctgaccggacaagaccaacgttcaaggaccgtcctggggntaaggttcggcgcncacgctgggcgagntatggtgcggtaggccctgggagaggatgttcctgntccttccccaccaccaagtacctacttcccgcacttcgacctgagaccacggctctgcccaggttaagggccacggcaagaaggtggnccgacgcgctgaccaacgccgtggcccaacgtggacgacatgcccaacgcgctgtccgccctgagcgacctgcacgcgcacaagcttcgggtngacccggtcaacttcaagctcctaagccactgcctgctggtgaccctggccgnccaacttcccgccgagttnaaccctgcggtgcacggcttcctggacaagttctggntttttttagcaccgtgtnaacttcaaataccgttaagcttgagcttggtagccgtttcttctncccgttggcttccaangggccttctccttcttgaacggccttctggttttaataaatttagtgggggaaaaaaaaaa

SEQ ID NO: 490718 - DNA, 515 bp, Homo sapiens
cacgaggagggcagctgccctgactccaagggctgccatgaacaacttccaggccatcctgactcaggcagctcacagtgtgccaccatggagttggggcccctagaaggtggctacctggagcttcttaacagcgatgctgaccccctgtgcctctaccacttctatgaccagatggacctggctggagaagaagagattgagctctactcagaacccgacacagacaccatcaactgcgaccagttcagcaggctgttgtgtgacatggaaggtgatgaagagaccagggaggcttatgccaatatcgcggaactggaccagtatgtcttccaggactcccagctggagggcctgagcaaggacattttcatagagcacataggaccagatgaagtgatcggtgagagtatggagatgccagcagaagttgggcagaaaagtcagaaaagacccttcccagaggagcttccggcagacctgaagcactggaagccagctgagcccccactgtg

SEQ ID NO: 490719 - DNA, 749 bp, Homo sapiens
ggagtccggtggcccaatcgctgttactacttctctgaagtctcctctcggttgcttgccgagacacacctgactgccaagatgcctcgaattatgatcaaggggggcgtatggaggaataccgagggatgaaattctgaaagcagaggtaatgaaatatgggaaaaatcagtggtctaggtattgccgtcattgctgcatatgaaaatcagtcaaatgccagtggaaagaccagagtggtgatgaatgggtgtatccaagcgattaagaagacagaatggtccagagaataagaggaaaaactcttgcgagttggccaatgtagatgccgaattcagtggatgagatcatagctctgatcattgggaagaacagcggctgagtgcttagatcactatgaatttcttctggatagagctgccgatgagagacaatgatgaggaagacaagagatgatccatgaaaacttaaatctggggaattagatccatatgcgaggaaacaataatcagaggggtcttgatcgaggttgatattggatgaaggatgaacttgagatgcgattctgaagcccagagcctctgcttggttaactatctcagggagcaggaaggtcagcgaggaacgcaatgagagtaaattgtgtggaagaaaggcaatgagttctttggttgctcctgcaataacatggaagatgaactgtctgaagcaggtgggtattagactttcatacagaaatcgaaagaggc

SEQ ID NO: 490720 - DNA, 119 bp, Homo sapiens
gaagaatttaagaaactcaactgccaagtagattggtgcttctgtggattctcacttctgtcatctagcatggggcaatacacctaaggaaacaaggagggactgggacccatgaacat

SEQ ID NO: 490721 - DNA, 189 bp, Homo sapiens
ttctggtgggattcagtggttgagagggaagaaggggagggtggggggctccttcccttcacaacttgaagtttctcccactgcctcctttccagaggtctcccaggagccagacccaaaagcttttcctacagggataccctttatttttacttccccttgactcacatgctttaacatgattttacc

SEQ ID NO: 490722 - DNA, 208 bp, Homo sapiens
gcctgggactggaacgtgacgttggctgaactgatgaacccatcgctttccgtcgcggggttcaccccccgtcgcaaacgcccgtcgatctggctgctgctacctgtgctgttgctggttggcctgagcctgttgccgctcgcctacgtcgggctcaaagcctggcaggcgggctggacggaggcggtgcatctactgtggcggcctt

SEQ ID NO: 490723 - DNA, 207 bp, Homo sapiens
gtacagcggccaatacacctcccgcgtgtcgaaccgcgcgggcgccatcaacgccacctacaggtggattgatccagcggaccgttcccaagcccgtgctcacaggccgcaccccgtgaacacgcaggtgggtactgggaagaggctgttaccccagaccaaagctttatcctgggagcaacaggtagaagtatagtctggaccccc

SEQ ID NO: 490724 - DNA, 296 bp, Homo sapiens
gagccttcaactcatgacttttgaggaagaacaggcgggtcagggctctgtttatctcgagtcccaccaggagcccttgataaatttacaggtgggaaccaaacatgagcttatcaccttttagtcaattcaggagtggctcgctcctccatttgcttccccccatccaacattgcctgctcttcagaagaacttttagtctctggggtaaaaggagaaggatttaaagcaaaaatcttagaaagtacagaagttaaataccaagatcggctgactcatatccaatttttgttggt

SEQ ID NO: 490725 - DNA, 176 bp, Homo sapiens
attcatctccatttcagtttggttgccatttctctgcatggtccaatgcatgttgcagccaccttttccaccttttccatcatgtgtgtttgaccatttgtcatatcttcttttgcagcaaatgcatattcaaatctttcacccattgtttgatcagattgttagattcttttttt

SEQ ID NO: 490726 - DNA, 92 bp, Homo sapiens
ccggccgagggcagggctcgcggctgctgggctcgcgccgtatatccatataagaattcaacagagaaacggcaagaagacccttactactg

SEQ ID NO: 490727 - DNA, 434 bp, Homo sapiens
acctctggggtccacaccattctgcgtcaccctcccaaatagttgggattacagtgcacctgccaccacacccggctaattgtttggtatttctagtagagacggggcttcaccatgtaagccagcatggtctcgatctcctgacctcaggatccgccggcctcggcctcccaaggtgctgggataacaggtgtgagccaccggtgcccggccagatgtacgaatctttaatgaagacctcgtcgatcagaatgcaggaggaagtactaagctggggggggacaatacctcttgatttagagtaacttcggacggggatctaatatctccttcaactataatatagagaaaactaatagtagtggtgattctcgtcaccaatacaattcatatatatttccatatttaatattacggggtgggcaatacttcat

SEQ ID NO: 490728 - DNA, 807 bp, Homo sapiens
ccttgtaaaatggtgtcttggccgggcgcggtggctcgtgcctataatccaggcacttgggaggctgaggtgggtggatcatgaggttaggagattgagaccatcctggccaacatggtgaaaccccgtctctactgaaaataccaaaattagccgggcgtggtggcaggtgcctgtggtcccagctactcgggagaatgaggccggagaatcggttgaacctgggaggcggaggttgcaggggccgagatcgcgccactgcactccagcctggcaacagagcgagactacgtctcaaaaaaaaaaaaagaagaagaagacggggaaagaaaaatagttctctttaaatagcttctcaagggtttatggccaggaagttaatggttcaaagatatatcccatcttaattagagcctacagattatgaaacctggggtgagctaaaatttctgggtggaggaatggtaaaacacacccttgtgtggcaccttgtggaagtgaaaaacccggtatttagtaagtgtgactccgggtgtgtaccaggaagtttcagttcaacgcagcaaatagctatagggctgtactggcggaaggatgttaagtgggagatcataagattttatccttggaggcgggcctggtattgataatcctccagacacggggttggggttccagcgggagagttttaaaatatgagggtttgcctgacaatacgggggtgtttatggcgcgtcacttgggcccctgttttttccgggagtggggagtggcacttgcaacccgagttgaagatcgctaaacggg

SEQ ID NO: 490729 - DNA, 200 bp, Homo sapiens
cattcctttatcaaagaaaagtatctactacctttttggaataggagtaatagctgtcaccctctgccctttatttgaacaggagtgttggttctttttttgcctcatcagagaaggaatgtggactccccatccccccaccagggtaaaagtcctgacctttgttgtcttgacggaataaaagcttgcttttccttgta

SEQ ID NO: 490730 - DNA, 156 bp, Homo sapiens
  misc_feature (28)..(28): n is a, c, g, or t
  misc_feature (43)..(43): n is a, c, g, or t
  misc_feature (77)..(77): n is a, c, g, or t
  misc_feature (79)..(79): n is a, c, g, or t
tgacaatcgtgacaaccaaagccaatcnactgaaggattcagngacctgctccccaggaatggttagactctccgancncaaatcgacagttcataattccaggcccatcaaaacgggcaccaccttgcccgatgacatgatcacccagcgagagg

SEQ ID NO: 490731 - DNA, 854 bp, Homo sapiens
gcaagtgtgcacacgttgtggagaggagggtgtctggcctgagaagctaaagaagaggcatgtccagtatgcttgcaggttgtgttgctcttttccatgcccatgcaacccagatggggtggagcaggaaggagctcttttctgtgcccaagcctcagaactcttgagctgtggcttactttgcttggtcttcaccaggttcaagctccgtggccacactgttgctgtgccaggaaaggtgtacagcctccccaggatgggggcctcatacaacccttcatctgcaactcaacatttaatcgtgtcctgtgctgtctttcttatttgccttttgttgttagcaacaaaacctctatttagatttcaactaagtcacggagacaggtgtcaacaattaaccaccccagattatattggggtaaccagacacacaaagcttgcccgatttacgaaaagtgacaactgctaagagaggtagtaacacgcgtgcagtgggcgaaggaaaagtggcggcagagaacagacagctccaggggaagccgatcggataagacttgggaagacagaaacaatcggcagagaccacagtgatatgtacgatgcagtttgaaagggaagagcgtgatttaacatagcgctatatataggttgccagtgtggacgctaaaggaggataccaatgtcatcgaggttccggtccagtgggaaaagtaattagggaacggagagagagggtaggtattcacacacaatataaaaggggggcactccgaaatatgtcagtacaaaaaagactattatttgaggcactaattaggtattacataggaggtgagaatgatatttatacaagg

SEQ ID NO: 490732 - DNA, 207 bp, Homo sapiens
tatagaaaaggaaagaaagccagtattatctggaacaaaaactcattttaaataccatcattcaccaaattatgtccagaaagtggtcagaacttaagcaagaaaagtcaagaaagaatgcagaattgtggagcaattgctttaggaaatatttctacctagaacacttgtactcttagaattcacaacataaataatgatgacgct

SEQ ID NO: 490733 - DNA, 400 bp, Homo sapiens
cctcgcacaggtgtgatggtggggatgggccagagaaggacaggctactgtgggggggatgagggctcagagcaagcgagggatcctaactctcaaatacccatgaacacggatcatcacaatggatgacatgggaggaaaaagggaatttccttgggggggcaaaaccccaaactcctttctacaatgagctggtgtagcacctgaagagacccacctgctcacagaggctccctaaatccaaggccaaagggagaagatgaccagatcatgttgaaacttcatgtcctgcagtagtcgccatcaagcgtgtctccctctatgcctctggcgcacgacaggatcggcctggattcaggtgatggcgtcaaccacaatggtcccatctatgaaggctatg

SEQ ID NO: 490734 - DNA, 1111 bp, Homo sapiens
gctgtcgaggagtgcctgcataatagacttttccccgtgtgtggcaacaaactgacagacccaaaggccagtcattatgccaacatttgcgcagaggcgagtttccgagtgaccaacactggtgaggatggcttccaaggaactgcgcctgtcagatgccttccctcccaatggttatggcttatacaacatagtaggaggaactgcatgggaatggacttcagagctggtggactgttcatcattctgttcgaagaaacagcttaacccaaaaggtccccgcttctgtggaaatgacctgagtgaagaaaggtggatcctacatgtgccataggtcttatagttacaggtatcgctgtgctgctcggagccagaacacacctgatagctctagcttcgaatctgggattcctgctgtgcagccgaccgactgcccactatggactgacaaccaaggcaacgtctgtccccagtccaaggagcagtcgtgtctgacctaccatcgggcttagctcagaactttgaacgatcccatgcaatgaatcccaccctgaggtgggttaccatacctggccaatggccaaaggaaaccgcttggtggaggacccacattgttgactggcgtcagtgcatgtcgcttcatgagtgtggtgcatcttcggaaacccatcgcatttttaccttttgagatctttcactcacggacgtgacgtggcagcgaaccctgaagttacgctctcggattgacccgcggtctacacagggcatggcaagagggtataaacccaggcgccaactcatgacccttccgtggcttacagtcgcctccatactctctacaggtgtctcccactgacccctgcgtggtctccgcaacctctccgtatcacacaggcgttcgaaccttcggtggctccacgacgcgctatacacaatgtctacgtgatccccggtcgccacgttgccctccctatccatcaccagcccgtcattacatgcgacggtgtccctctcactctcccagcgcattttcaccgctattctttctctctctccgcgcttcacccccccaaaaagttatgttatcaaatctccatacgctcccgccgcc

SEQ ID NO: 490735 - DNA, 129 bp, Homo sapiens
attctacctgcacttctgggcccacggtgaaacaccacttctactaaaaattagccagatgtggtggcacgcaactgtagtcccagctacacgggaggctgatgtgggaggatcacctgaacccggagg

SEQ ID NO: 490736 - DNA, 905 bp, Homo sapiens
gatatcagagttgctttctaatcttgttacattgcttattctaggtctgtaatttattaactggctactgggaaattacttattttctggatctatctgtattttcatttaactactataattatcatactaccggctacatcaaatcagtcctttgattccatttggtgaccatctgtatgagaatatgatcatgtaaatgattatctcctttatagcctgtaaccagattaaggacatacacgctcttaacaacatcacgaacttcctgagtttcacatatacacatggtgacaaacacctgcttctgataaagtttatccaatactgtactctatagcaattctattgtcactactcacgacatcctattcctgtgcttccctccgttagacatagttttctaccttcttgtactaaccaggtacttccatctatattgagctaaacactgttcattgaccagtcacactctgcatccatgtgccctgcctgatttggattcggtttcacttatacaatatagttgcgaccatagccccatactatcacgacaagcatcacctgaactaactagtggatgtccacttacacactcaatgataagtgacaacccgttacactggcaccaccaacaacagtgacatcgggccacaccgaacgccgcagacaactacacgtgccacacgtgataccgagcgtagcacgacactcccgcctcgcccccaaactaactgagcgcagcagagaccgacgagaaagagacccctacagaactacctcagacacacgcacatcaagccaacatccatactactgagcgacacgcaccactgcgggacccacggccgcacaccaactgcccacagacacaagtcaacccccacgcgccaagacaaccaaag

SEQ ID NO: 490737 - DNA, 894 bp, Homo sapiens
gagctgttctcttctgtcaatcccacacgcctttggcacaatgaagtgggtaacctttattgtaccgcttctttttcgtctttagcgtcggcttattccaggggtgtgtttcgtcgagatgcacagaagagtgaggttgctcatcggtttagagatttgggagaagaaaatttcaataggccgtatggtgtgattgcctttgctcagtatcttcagcagtgtccatttgaagatcatgtagaattagggaatgaagtaactgaattgtgcaaagacatgtgttgctgagtgagtcagctgaaaattgtgactaaatgcacttgcataccctgtgtttggagacaaattatgcactagttgcaactcttcgtgaaaccgtatggtgaggaatggcgtgactgctgtgcaaaacaagaacctgagagaaatgaatgcttcttgcaacgcaaagatgacagcccaaggctcccccgattggtgagaccagaggttgatgtgatgtgcactgcttttcatgacaatgaggagacatttttgaaaaaatagttatatgaaattgccagaagacatccttacttttatgccgcggaacctcctatttctttgctaacaaggtctacagctgctttgaccagaacgttgccaagcctgctgataaagctgctgcctgttgacaaagctcgagtgactccgggatgaacgggcaggcttcgcctgcatacagagactcagtgtggccagtctccaagaattgggacaaagagcttccaaagcatggggcagaactcgcctggaccagaaatttcgcaaagcctgagtctgccgcaagttcccagttagggaagggtttaccagggccaccggaatgctgcctggccactgctgacgtctgag

SEQ ID NO: 490738 - DNA, 183 bp, Homo sapiens
agaggcaggacatttacatagagtctgctgaagtcttgcaaataaattcccggatggtatgtttaattattcatccgatgaattgaatgcaatactgggtgaattgatggaagtatcagatgatctgactgcactgtcctacagatatattcttgattctgcaaatattatagtgagcctact

SEQ ID NO: 490739 - DNA, 236 bp, Homo sapiens
  misc_feature (38)..(38): n is a, c, g, or t
gcccaaatccccaagggggtcacccccaagcttgtttnatttgccttctttgcccccccccagcttgggaagggggtttgtgcccgtttttcccagggggtcaggttggtccggccaaaggccaaggccaaggcccaggccaaggttcaaaccaaggcccagggtgcagcccccggtttagttccaggtcagggtccccaagggacccgggcccccacaaagggtttaaagtaaat

SEQ ID NO: 490740 - DNA, 306 bp, Homo sapiens
cagcagagtattgctatttaagaataagaggccgggaacgtggctcacgcccgtaatgcatttctttgggaggccgaggcgggcagatcacaaggtcaagagatcacagcctggctaacatggtgaaatcccatctctactaaaaaatacaaaaaattaaccgggcatggtggcgggcacctgtaatcccagctacttgggaggctgaggcagcagagccgcttagacccaggatgcagagactgcaatgagctgagatcgtgccattgcactccagcttgggcaacaagagtgaaacttcatctc

SEQ ID NO: 490741 - DNA, 126 bp, Homo sapiens
cggccacacgcagtcatcgtatgcgtggagtggcctaaaaagacaaaaataaaataaaaaaacccgaaatcacaacagcaaaaaaacagacatagcatgtaggaaacaaaactcactatgtgaggc

SEQ ID NO: 490742 - DNA, 156 bp, Homo sapiens
gacttccaacatcagaaaccattgatttagttgtgtgagagacctaatctcggccgggagcagtggctcatgcctgtaatcccagcactttgggaggccaaggcaggtggatcacgaggtcaagagatcgagaccattctggccaacatggtgaaa

SEQ ID NO: 490743 - DNA, 1061 bp, Homo sapiens
  misc_feature (14)..(14): n is a, c, g, or t
  misc_feature (25)..(25): n is a, c, g, or t
  misc_feature (30)..(30): n is a, c, g, or t
gtagattagcacantgcacaatttnctttngttaaaaattaaattggccacctaactcactcttgagaggccagaagtgatgctggaactttcttcctctgtgggtgaaaaagggaaaattagggagaacagaaggcatgagagatgcagcgatggatatgtctatatggagcttctgtctgcatccagtagaaaatgcatctgtaggcaccaggtttaagagcaaaatcctggagtcttgtctgttagcattctccttccccacaaaccagagaaggaatatatttgctccagcacacccggatgtaggaaatgtcacattcctatttctgtaacttcacttaaatctgctctgagtctctggatgcctggcaggtggagaattcaatcttgtcgttaccagtattcctttcccttctccatgggcttatgtaagaattctgggcttacacactgttggaaagccaggtaggaactacatcccccgaactctccattcttccagctgctcatgatccatcaaccttctttgggccacctgctatagcaagaccctcctcacagcatcattccactgacccacaggctcagccccagggaccctcactagaacaggtctccactatgcataggaactcacaaaaaccttctcttcatcttggcttctgctgatatccagccactcccccacttctcatcttaaacacagatggcagctccttcccatcgttccaaaacagggggattgtccagccaaattctctgcagacaccaaagcttcacccgtcctcttcagggaggtgatgcaagggcatctgatttctttggaagcccaattctggcctctctttggggtgggctgagagtgggaaccagactctcttttccaaatgtcatgtttatcttgttcatcattatattatctccaatgcctggcacatagtaggcactacagactgacacatagtaggtgctattagtgtctgtataatgggactcttgaggttgaagctattagcagaaacctgccaagcaaaaggatggaaaaccaaccaccaaaa

SEQ ID NO: 490744 - DNA, 346 bp, Homo sapiens
tgggtaccgcgggagggtactgtcggggatgaactgccgtgtggggcgacacatatgtgaattcagtacatttggagacagtattctaccattcagtaatttgggttactgcttttaacacttctcagtgtatttactttcaaactggtttttgtaccttgggttttactgctgcttagttaggaaccagactgtgtcgtggacagtgtaccccttactacacgacacgaacttctactgtatcttaaacctactgactctttctacaacattctactttcccgtaaggtacctatctggggtccttgaagtactttttctaccacacggctcaaccgtggtagag

SEQ ID NO: 490745 - DNA, 237 bp, Homo sapiens
tctcgatctaagctatcggtcattactgagcttctgacctcagacactggagccacctgcctgaagctcagtcccttcttgaggacgcgcacacctgttccaggacgtgacacaggctctgtccttggtcgtctgctgccaaggagatcttaagctttgtcgaggtaggttgtgctccctgctccaggggttccctggagcctccacgagggtcaggtgaaccccttgttagaacta

SEQ ID NO: 490746 - DNA, 284 bp, Homo sapiens
tggcggtgcctctacagaggcaactggccttcctcatgcaagaaagcagaaatgatgaatatgagaatctgttaatatgatgtagaacatacctcggtggacaaatgctaaaatggagattgccagcaaggagccaatgaatccccttacacaatatgtaacggatggaacgctacgctatgtggcgaatatcttcccgttacaagggttatatcatggaataatggtaccctccctccagactgggcaagcatccccatgcaaaagcataagagcacgacacg

SEQ ID NO: 490747 - DNA, 1131 bp, Homo sapiens
gtgagcctgcgggaagtcgtgcgctacctcgtgggtgcagcttggctgtgcgccggcggtcgcctaacccgcggccgcgtgcagggtgctgctggaggaggaggctggctggctcgaggcctgtctgtgagcgcaccctgtctcggagctgcttgcgctgccccgctggggacatggccctggacgggcgccgtcggcctgccatgctgcccgccctgtctcgcagcaagagagcgtggagacagagcgagttacttgagaaagaagaggaacgaagatgcatgatgaacgatgaagactgaagaagatgatgtgtcagagggctctgaagttgccctgagagttgaccgtcctgcaggtgcccagcagcaccatgcttaactggcgagcggggacctcagagtgccaaggagagggtcaaggagtggaccccctgcggaccgcaccagggccaggatgaagggcgggggccagccccgggcaccggcacccgccaggtgtctccatggcagccatgaacaaggaaggcggaacagcttctgtagccaccgggccagactccccgtccccgtgctttgcccccaggcaaaccagccctacctgtggccgacgggaccccttttggctgtcctcccgggcgccacgcagaagccatcttgatcccgtccgagttgacccgtgatggcatgtcgctcaaactatattactgacggctgaaattaccggcacagtgcgacagctatccaggagcagtgaacaatgatgggcaaatctttgctgctcattgcagtgcaacagaatttgctcacaaggcctgtcaaatcgccttgaggcaaagccataaaactataacatgtaccatattcaagactgatataacctacatgcccaccttttgacggaaatcagtgaaccacggaagggacctactataacgcattaaagccccaagtacactatacacccgtcttccacgctaacttacatgacccaacttcaagccaaagactacctcagtatacacaccacattcatccagctaacaccacaaacgcacaccaacatccacatagaaacgcacctctccgaaactatccgccacgcaatcaacacaaacacatcacacacacg

SEQ ID NO: 490748 - DNA, 489 bp, Homo sapiens
gcgttgcgtgggttgggagtaggaagatagagtcaggagagatttgggaagtcaggttgataaaatggcacaaaggagagtaaccagtaaggtgtagagtgctctgtgggaaggacagccctcttgggatgggctttcttcctgcataggagctggtgaccagagccaaggcctaaactcctggtggcagggactgtaaatgtgtgaggggaataggtaccctaacccattcctcacttccaccccctcttcggggcatccgcagctgtagctgggccactgcccagaaaaaagagattattttacactacctagcaaaattcccagcctttttcctgcattgtgtttggtgaatctaaagattccctgatccctccatgtgcaggtcagtgtttttttataacctctcctccctttaaaaaaaaaaaggttcgatggtctttgcatgttgaaaaatatcttttttggaattcagagaagtattttgga

SEQ ID NO: 490749 - DNA, 119 bp, Homo sapiens
ctctagacgatcctttgctgtggacggagctgacagaccagaggcgattaatgaggctagtgtcttgcgcaaggcattcacggggcagacgtttgcagaagagccggatccacagtagt

SEQ ID NO: 490750 - DNA, 1026 bp, Homo sapiens
cctaataaaatttattaaccactcgttcatcgacctccctcatccccgatgccaatcatgctccgcttgatgcaagcttcggctcactccttggcgcctgcctgatcgtccatatcagcacaggtgactatttctagccatgccatctactcacacagcacgcctcgatgcgcactcttctccattacaagtcgcccatcactcaacctcgaagtgacgtaatattgatgggctgcaattcatccgtcttacctttctacggccatatggcgacctccacaatattctttgtcatcatgccatctgtccgtgacgacaatctcgatcgaggtctttatatttaacggaatcatttactctaacatctgagaaaatcctgtaacaccactctggacaattattccatccttgtctttgtcatacttattagtcaagagtccttatctatagggcatatgtccttccctgtgatgggccaatttgtcatttcctgaagggtggccctcagataatataccaagatcattacatatttccgccaagtcccatacatttgtcgaacagcgacccttatttcaaactcgaagtccttgatgcgagggcttagcttcaagtatatgtaccccgatctcccaccctcgtctactcctgaggttcctcttaccgttttcatcttgccatcattggctgcttcaattaattgcaagcccgtagcagcactccacacgtcctattctttgcgacgaaacgggatcaaactaacccccgctatgaatcaccctcccaggtcccgataaaatcaccattccacccttactacgccaattcacaagacgcccgtcggcttaccttctctgtcaattctctcccttaatgagcagtttttcgcgtattctccacccatgacctcctattggcgagcccgacatttattacccttagctaaaccctttataaacccttccccagattaatgccgaatgatatttcttattgggctcaacaatctcctatacttcctaaaaa

SEQ ID NO: 490751 - DNA, 443 bp, Homo sapiens
  misc_feature (113)..(113): n is a, c, g, or t
  misc_feature (119)..(119): n is a, c, g, or t
  misc_feature (149)..(149): n is a, c, g, or t
  misc_feature (156)..(156): n is a, c, g, or t
  misc_feature (158)..(158): n is a, c, g, or t
  misc_feature (161)..(161): n is a, c, g, or t
  misc_feature (167)..(167): n is a, c, g, or t
  misc_feature (171)..(171): n is a, c, g, or t
  misc_feature (174)..(175): n is a, c, g, or t
  misc_feature (181)..(182): n is a, c, g, or t
  misc_feature (194)..(194): n is a, c, g, or t
  misc_feature (208)..(208): n is a, c, g, or t
  misc_feature (210)..(211): n is a, c, g, or t
  misc_feature (213)..(213): n is a, c, g, or t
  misc_feature (275)..(275): n is a, c, g, or t
  misc_feature (395)..(395): n is a, c, g, or t
  misc_feature (397)..(397): n is a, c, g, or t
  misc_feature (400)..(400): n is a, c, g, or t
  misc_feature (402)..(402): n is a, c, g, or t
  misc_feature (423)..(423): n is a, c, g, or t
  misc_feature (432)..(432): n is a, c, g, or t
  misc_feature (434)..(434): n is a, c, g, or t
  misc_feature (436)..(436): n is a, c, g, or t
aagacagagcgggaaggggcgtgtcccattttgtgaggtccacaaggcttttgttaaatgccgcttcccttcaagagggtaaagagtttaatcccctctcaaccgcatctctnaagggntccatgtgaaggctcccattttcagttccntcctgcncnganctgcantgtnttnnagcccnnaggtggtggcangggccctccctccnanngntttggaagccacgcatatgccctgcccttcctaagggcccttggggattttgccccctttgnccttccccaaaggatggtcacaccccagccctttatacacttttggctcacaggaaagtgtttgcagtaggggacccaaagtcccaggcccctggagttgttttcggcaggggccttgtntntcncngcatttggtcaggggggcatnaataaaggntncnggctcca

SEQ ID NO: 490752 - DNA, 918 bp, Homo sapiens
gctctttcccatcttgcaagatggcgggtgcaacaacagttgagcaagccgagcatactcaacagcagcaagcaaacccgcaagcccaagcaaggttgcatgctcggtggcacaggtgcaaaacagggtcaacctcaacagctcaaaacagccccaagaaggggcacagccgccattgcagcctgcaacccgtgtaccttgtccagaggcaaattggccaggtcattcgccgcacccgcatgtcattcgcagcaaaggcgccatgtacaaagcaggacagtactacagaccgactaacatcacaagcgttgcaaaagcacacaagcaacggcagcaaggtctctcgacacacttgtttacgaaaaccaagttgggtggatgacaaagccagcggcgagtaccacggcgtggattacaacttcagcacaaatgccgtagcatcattatcgctacctgcacagactgtgccatcgacaagcatgttgcagaccacaggcaaaacaacccttcagatcacgcacgatgagcaaacactgcgagcccagacattagccaccgggaaccattctgcatacatcactcacatggacggccacaagggggccacgaggcgtggactatacctgacagcacgctggcatagtgggcattctacactagtagactgggacactctggtccctcacatcgacagtacctactacgacagcaaccacaacacagacagttaggtccagtcgcccacttgcaacccaaagaagtcacagtcatcacgccacggacaccacaatcccgacacacaatcttacatgaaaggcaacataccacgcaagacagaagactgcgggaagcccccagacaacgacaggaccgggggcacacacgtacagaacaaaaacagaaacaagatgacgcacg

SEQ ID NO: 490753 - DNA, 441 bp, Homo sapiens
cgtatacattttcgatgtgggcataaatcaagtaaaggtctaatttttacaaactaataaccagtattttttctaacacagattatgaagcaattgtgaagctttcggctggttttaatggagcagatctgaggaatgtttgtactagacgcaggtatgttcgcaattcgtgctgatcatgattttgtagtacaggaagcactatcatgacacagcagtcagcacaacgtggctgattctacgcaagctggagtctaaattggactacaaacctgtgtaatttcactgtacgatttttgcatggctgcatgacagatgttggcttcattgtaaacaatccaagttaacagaaaataatgtatgtattggcaatgcatgtcattaaaacagtcatatgaataaaaatcatgcagtaacatccataaaaaattagtaattcca

SEQ ID NO: 490754 - DNA, 126 bp, Homo sapiens
tgctgtgtccacacctactctggtgtctgtcgagccccatgcccacacccactcttggtgagtgctcttctcaatgctggtccacatgggtgatctctagacgtctgacctgcatggcagtgcaat

SEQ ID NO: 490755 - DNA, 353 bp, Homo sapiens
aatgtggctccaactccgtccttgccctttgtccatggcattctccagagaggggcaagggtttctttattcctaccccatccacccattcattgcaaccctctccctgatctctctctctctctctctctcacatacacacacacacacacacacacacacacactctctggtgtgcctagctcagctcccacccctgtgcatgccttttctggagtgcctggtctctctgaggctccctacacatggctgtaagactcagtatacacacacagacccactggggttcaaactcactttatccccccttcttcactgataaagaaacatctttagccccctggtttccaaca

SEQ ID NO: 490756 - DNA, 845 bp, Homo sapiens
tgattggctgagtgtctgtcccagaatctgttctctgactgtgagtgcttgtatttgaaccactgtgctttcctagtcacatctgtattatgagtcaggacattcgtacaaggagctgtctgcttatatgcactgcctaggatggtctaggatgtagacaatctttcgaatcttctaccttttttgcacatgtatacatgggtgggatgcggctttccaatacgcatgggctgcaattcggagtcataatcccagttttgatcaggtatttgcgtctgggataaggatcttctggtggcaacagttgtacttatggacttcatacacctcctttagcttttctcttgagcaaatgtgactccagagagcattactggccgtctatctctaaatatggtagtttctttccttcctttagagccagtgacaaacaacggctcagactcttttaccactgagtactctgtccagcgatctcgcagggctgggtctctctctctctgtaactagtgatgtagccatcgaattctttagcgaactccatacacctgtaggggaatgtaaacaggctaaagagtgacgactgcaacttgggtcattacagctcacttctaaatcttcacttggggggattccggcgtcaactttagaaggatctgatgcaagcaactggttttggggaactctagtgggacgccagggccatattcccgtgaacagacagatactcctgaagttaataactcaattccaaggcacacagattggtacatggaagcatgtacactcaactacagggtaaacggcgaccagtctatcaggtggacaagttcacccagaaacgg

SEQ ID NO: 490757 - DNA, 351 bp, Homo sapiens
aggagaccaggagtatgccactgagaaatatttctcttgagatctgttgaattttaagtgtctgaaatatccagtctaggatgtccgacaatcaggagagatgacaggatgagattgcgagggagtacagattgggtcgtgaaagaggactaagtgcagtaactccggaacatgcgtactgccatatactaaaaggtcagaggacggtgtgaccttggacaggggcagtgtagaggagagtaagtggtagaggcactgactgaccagctgattgatgacgaagaaggcggcctcgggtattgggttgtagacacaagccaccctttggggagagtagagtcctgggcggtg

SEQ ID NO: 490758 - DNA, 353 bp, Homo sapiens
tcctggtgcctgaagccccgtttcctggggtgcctgaggccccatgtgccttttccctttgctgacattgctgtggattattcactgtaatgagtcttagccagagtgtgactgtgtgctgagtcctgtaacactgaatcacctcaggatgatcttggggacccttaacacatgcctggtccagtcttttgctttctttttttgagacagggtctcattctgtctggctagagtgtagtggtgtgatcacagctgactgcagcctcaacatcctaggctcaagtgagcctcccaactcagcctcctgagtagccaggaacacaggcacaggccaccacacccagctaatggtt

SEQ ID NO: 490759 - DNA, 726 bp, Homo sapiens
gcagtggtcgtccctgccctccccggccccggggtgcaccccgcaaggctcccgttggtgtccctggagcatgggaggctgctgagcgtgagtggcggggtactggcaggacgctgcgtggcacgggcagggcgtccatggctgcagccaacaagggcaacaagcccagagtcctggagtatccgctttgcggcaggccacgatgcacacggatcccacagccacgtccactttgatgagaagctgcatgactcggtggtcatggtcacccaggagagtgacagcagctttctgggtcaagggttggcttcctgaagatcctgcacagggtatgagattaccttcagtctgcccccatgtgcacagggcttgagcaaaggattgtccggcgagggcaccttgtccccaggcgctgaaccttcaaagcgtccttcaggcggtggtgcccgggtcccgtgaagggttatacggggtcaaggtgttgaggtactcgcgcgcacaaaggaagggcgtcctccaaagaggagatacctggctaagcctgcgaaagggtggcactgggcacctgttgtgcgacgtgacgggtgcaggcccgcgtcatggaccggcaacagggaacgcccatgctgctgggatggtgtcaagtgtgtgggcgccgagctggaatacgactcagagcacagcgactggcacgggttgactgaggcccgaggccccgcatgtccg

SEQ ID NO: 490760 - DNA, 195 bp, Homo sapiens
agcacgctggagtggaagaggagggtctggtactccacacactgcaagggaccaaggagcaagtgcggcatagttgattatgtattagtctcacgctcagtacatcggcactttatgtaacgcgtggtgaacatggagcagctaccagtggggatatttaaccttttatctgtagctgtctgattaggaacagga

SEQ ID NO: 490761 - DNA, 573 bp, Homo sapiens
  misc_feature (7)..(7): n is a, c, g, or t
  misc_feature (367)..(367): n is a, c, g, or t
tggcgangtaatgttagtggttatctcagtgagtgccgctggcgaagcctttgcgtattgggcccgcacggagaacaggtaggtggtgcctgggtgcaggttggagaaccacatggtatgtctcattgcggagcttggagatggtacgtcgtgggcctggcacgttcactgccgggtctgatgactcgatgctctggtagctgatctcatacggggtgatgagaccattgttttcctggggctcctcccacttgaggaagatcatgtcctccagtggagtgaaggtcagggactcggctgcaatcccactgggcacatcctcatccgtctggaaagtgacctccttgccctctttgcgcccctcagngttagtgaggacaagcctcacgtgaacgttccgatagggcagcaggttcttgatggtgtagcggctgacaccttgctctgtcttcacacactctcggatggtctggttgtggctgctgcccagggtgtagtgatagcacagcgacacagtataggtgtggcaacgcgtcacgttgttagcccagtgttcccactgcagggtcagct

SEQ ID NO: 490762 - DNA, 678 bp, Homo sapiens
  misc_feature (678)..(678): n is a, c, g, or t
caggtattactcgactactaccatgaacgatacagtaacttagccaggcctggtggtgtaaacctgtagttccagctatttaggaggctgaggtgggagaatctcctgagcccaagaggtcaaggtggcagtggctgtaattgtgccactgcactcctgcctgggtgacagagtgagaccttgtctcaaaaaaagaaagaaaattttaaaatttcttgaaacaaatgaaaatggaaacacaacatactaaaacctacaggatacagcaaaaacagtactatgaagaaagtttatagcaaaagtgcctacatcaaaaaagtagaaaaacttcaaataaacaacctaaaaatgaatcttaaagaattagaaaagcaaaagcaaaccaaacccaaaattagtagaagaaaaagatcacagcagaaataaatcaaattgaaacagaaaaaacacaaaagatgaaaggaaaaaaaaactgggtgtttggaaaagataaacaaaatggacaaacctttagccagactaagaaaaaaagagagaaggctcaaataaataagatcagagatgagacattacaagcaataccacagaaattcaaaagatcattagaaactactggccaggcatggtggctaacgcctgtaatccccgcactttgagagggcaaagcaggcggatccn

SEQ ID NO: 490763 - DNA, 198 bp, Homo sapiens
aaacatgaaagaatcagccgttaccacatatcatctggtttgtgggccatataccttcccttattttatagaatatggttatatttgaggtcaaaattaccttggaaagatatttcccacaattaagcatgctttagagcacctcacaaatttagtgtttacctgtgttgtgatttttgtcgccacaattccatgaga

SEQ ID NO: 490764 - DNA, 243 bp, Homo sapiens
ttcaggaactgggtttcctcaccacatgccccatccagtggaagccagtgagctctgaccttggctgggcctctccctcccaccagcctgttcctgacaggcctgctgtttccccactcatcaccacaccaaatcagtggtatgtgcatgccctgttcatggcttgcgggcagggccttcctggttttgacatctgaccaagccacaccacctcccatcagtgctcaaaacctgtaacaaaaa

SEQ ID NO: 490765 - DNA, 487 bp, Homo sapiens
  misc_feature (324)..(324): n is a, c, g, or t
acaaccaattttattccaacccccttgaggtttaacggggcagttaattttaatattggccccggacttacatccttattaataatttgcctagcaaacttcaactaaggacggaattacagttggattaatatccttttttaaggaattcaaactttaattcccataaaaggtttttgaaggattttaggaagccttggtaaccttgccttaccccccactattaacctactgggagaactctctgtgctagtaaccacgttctcctgatcaaatatcactctcctacttacaggactcaggtggtgtgactcaggtggtgtnactcaggtggtgtgactcagtggtgtgactcaggtggtgtgactcaggtggtgtgactcaggtggtgtgactcaggtggtgtgactcaggtggtgtgactcaggtggtgtgactcaggtggtgtgactcaggtggtgtgactcaggtggtgtgactcaggtgg

SEQ ID NO: 490766 - DNA, 518 bp, Homo sapiens
taccaatcgcgcgcagggcattgcctaccccgccgcctcatggcagatgatactgaatgattcacaagggagactgcgtttagcccaggctgtttgcggtgttgaggaagtgagattgtgagaagtgacacgaacaagtgcatgtgtcctcgtctacattcccagtatagcagtacttgaaggtccataatcctgccaagttgcatctccgcaaactttctcccacgtgctgctcttccataaagttggtgaccggccggacgtctgtgcccctccactcctgtcgcaggcttattgttccgctgcacgaaccactgcaagattttggacacccatcttcatttcgcgtttgcaacatcgtccagttcgtcaaccactcacacaccctcaaaccaaccatcatgtctggacgaggtgctgccggcggcgctcgcggccgcggaggcaagttcaagaagtacacaagaggaggtaagcacaatctgcaatctttgagcttggcagccaccggatcgact

SEQ ID NO: 490767 - DNA, 187 bp, Homo sapiens
tggtggatttacgcttcagagtatagaaggaccaaaaaaaaaaaatcccacagccacctgccggagcacctattgaaccttaaacctgaggtcggcgtttcattctcatatagcctaggagaggcgatcaacagcaaaaccaacctggataaggctgaataaggatgtcaaagcccaaacaactagc

SEQ ID NO: 490768 - DNA, 831 bp, Homo sapiens
gttgcaatgagccaagatcatgccactgtactccagtctgggtgacagagcaagactccatctcaaaaaaaaaaaatgtttaataattagccatgcatggtggtgtgtgcctgtgaccccagctactcaggaggctaaggcaggaggatcatctgagctcaggaggtggaggttatagtgagctgagatgtgccatggcactccagcctgggtgacagagtgtgaccctgtctcaaaaaaaaattttttttttaaacaagtggcagagggatccttaaagtattttccattggtttcaagttgaaaaccaggcaaagctaagcatctttttagggtgacacgataaacacagtgaagaagtgtctgaggactatggacaagttaacggttggggtgcggagcatccaatgagggatgggcacacaagacttgaaagtaggggtacgggccgggcgcggtgggctcacgcctgtaatcccagcacttggagaggccagaggacgggtggatcactgaggcagcagatcgagaacactgcaaacagggtgacaccccgtccctctgttgaaaatgcacaaattgcggggcgggggggcggcgcctgatgacccagtcgctcgggggcctaaggcggaaatgcggtgaccggaaggggagcctggccgagacgaaatgccccatgcaccagctgggcaagacggaccgctcagaaacaaaaaaaaaaactgggcgcgcgcccaaattcaacagtggcggcccagaaaacgaccgcccagactggcagtgggcccacagcggccgcacacacactcgcaggcaagcacaaaccgg

SEQ ID NO: 490769 - DNA, 343 bp, Homo sapiens
gggggtttcaacatgtactctgcggacagtgcgaatatgtcaatgctcgacagaggagcgggacaccgtacctcagaatggttatatatatataggacacgggtcgtgacagagccatcacacatgtatctaaccccgttggacaagattatatgagtgagaaagggtctgcataggattcagatctcccttgaggcaggtatgttagtgcccagatatacgggtgagactacaaactccaatatgaagacactgatatggacctgatataagaatccttggtcgctatagtgacactccgagaacttttgtaactgggccacttagggtgctaattgtcttc

SEQ ID NO: 490770 - DNA, 411 bp, Homo sapiens
  misc_feature (244)..(244): n is a, c, g, or t
  misc_feature (255)..(255): n is a, c, g, or t
  misc_feature (305)..(305): n is a, c, g, or t
  misc_feature (312)..(312): n is a, c, g, or t
  misc_feature (325)..(325): n is a, c, g, or t
  misc_feature (338)..(338): n is a, c, g, or t
  misc_feature (365)..(365): n is a, c, g, or t
  misc_feature (377)..(377): n is a, c, g, or t
  misc_feature (399)..(399): n is a, c, g, or t
tttggagacagagttttgctcttgttgcccaggctggagtgcaatggcgggatcttggctcactgcaacctctgccttccaggttcaagcagttctgcctcagcttcctgagtagctgagattacaggcatgagccaccacccccagctaatttgtgatttcgctttctgcagtttcagttacccattgttgggggctcagaaaccaataccccgaaatatagtgggtgtgacattctgaactngaggagccttnaggtctcttccgaccagattcccacagggcccccaacctttgtctttttnccaaggntaaagtgaagttnttctttgaaggtncccaattgccttaaggtttgggacccncccaaggggggnaaacatggccctggggcccttnccggggtttttt

SEQ ID NO: 490771 - DNA, 110 bp, Homo sapiens
gtgattgccaagatgggattggaagacaagtgaatgcaatggaagatttgatcacaaatgtaatttctatgtggaatttcctatcttgcagcatcctgtaaataaacatt

SEQ ID NO: 490772 - DNA, 115 bp, Homo sapiens
cgctaagtgatcagcagtctctaacaatagtacatacaataattgtacattattgttctcaaattggggctctccacaacctggggacccttccttattgtagctgaccacaggt

SEQ ID NO: 490773 - DNA, 106 bp, Homo sapiens
ggcttatgcactactgtagaaatccaattagtataagtgattttttggatgggcacggtggctcacacctgtaatcccagcactttggtctgctcgggaggctgag

SEQ ID NO: 490774 - DNA, 400 bp, Homo sapiens
aagtgagcatgccacttcgaggtagagcaaaagcctcattgtgaaaggcactggacttggaccaggacaccatcaggccttggttttctcacgcataaaatgggggagtgggttaattcggccaaagattcttctgatctgacattttgaaattgtgagagaaactagatgactgtaaacttggtcacaggcctggttctggcagttctttgcggacttttttctagcatttatgcaaataaacatgcagtctcggtgtgctctcgcatggtatgaatatctagtcctttctgtggttctcaggcaagacataaaaactaggactcagagcacatacaaaaccagttatgtttcggaaagagggaaaagagtccccgagcccggatcttgtgctgctttt

SEQ ID NO: 490775 - DNA, 253 bp, Homo sapiens
gcttctggatcgctggcaggagtacagcttccagaatgtgcggatgtatgtgagctgggtaggcagatactctccaaggtgtctcctaaatagtcattatcatctacaaattctcatttagaaagtaatgaccaatttaagggccaagaacggtggctcacacatctaatcccaacagtttagcaggttaaggaccgtggataacctaggtcggagtagaaccagcttaacaaaatgagaacctatgtgcaaa

SEQ ID NO: 490776 - DNA, 245 bp, Homo sapiens
atgcaagttctcctcagcctccccagtagctaggattataggcatgggcaccatgcccggcaagttttgtattttatcagaggtggggtttcaccatagttggtcaggctggtctcaaactcccgacctcaggggatccacccgcctcggcctcccaaagtgctgggattacaggtgtaagccaccatgccccaactccaatgttttcttatagacgtttcatagtttgaggcacagattgcagt

SEQ ID NO: 490777 - DNA, 383 bp, Homo sapiens
tgaggagtagcaacaagtacattccccaggtaatagactgtggaacttctggacctatctcattcttagcgcgctggtgaattccacttgagaaagggagcatccacaagtttaggagtggtccagggtagagtccatctaccaaggcagacgggcattccgccgctgcggccagtgatcgttagagcagattgtctatgctcgtgctgtcgtggcgatggtctttgggtgttgtgctcgtcccgatgcgtataactacggtggcaccttgagcgatctggggtcatccttgatctacgagcctacagtatcgcggacgtccctttcctacgtgttccgcgcacccgacgcacccggctacggcggtatcgctgaatgtatgg

SEQ ID NO: 490778 - DNA, 759 bp, Homo sapiens
tcccctctttctttttcctctctttttttttttgtgtttaaacacacccctcttggtgttgggccccccgcgcgggggccgcggcttccccctgcgacagagaacaactctggtgggtgggttttcttgacaaagagagggggcgtcaagaagaacctctctctgtcagtgagaggcgaaacatgtggggaacaataacgaattctctctctatctccaatcatagagaggtagggggcagtacagaggaccagtgagtggagttcttctaacaaaagatggtcctaagagtgaggtgcgcctatgtggagaaaaaatgtacccacagagggaggatgcgagaggcagcaccccgcggtggagggtagggtgagtacaacaatcacactgaacacacaccacccaacatagagagaaacgaatctctctcttatgcggcacagtgggggtggaaaagcatacacacagagggcccctcgtgggtggagaggaggcgtgagtgggcgttctccccgacgacgaagatctcccatggtgggtcgtggttccctcgtgtcggagggggacacggtggtgtggcgcgcttgtgtccgacatagttgttctccccccgcagaactcaccttgttggccgcggtggtggttcaatgatgtggaaaacgttgtggccgaggatgttgtttgtgccccgggaggttgggtggtggcgtacacccctgttgttgtccaacttattcaccccacataccggtggggtct

SEQ ID NO: 490779 - DNA, 294 bp, Homo sapiens
gtcctccttcttaaaagtctactagcctgggtgcagtggtcacacctataatcctagcactctgggaggctagaggcaagaggattgcttgagcccagggtttgagaccagcctgggcaacatagtgagaccccgtctctatttaaaaaaaaaaagaggagtctcccatcacttcagaccttagaactttatgtgtcctcatcccttgagtccagagtaccttctctattgactttgcctgtcccacagatcaggaatctgagcattgatgagaggactcaagaggccaggttg

SEQ ID NO: 490780 - DNA, 807 bp, Homo sapiens
  misc_feature (232)..(232): n is a, c, g, or t
  misc_feature (235)..(235): n is a, c, g, or t
  misc_feature (240)..(240): n is a, c, g, or t
  misc_feature (266)..(266): n is a, c, g, or t
  misc_feature (271)..(271): n is a, c, g, or t
  misc_feature (277)..(277): n is a, c, g, or t
  misc_feature (283)..(283): n is a, c, g, or t
  misc_feature (313)..(313): n is a, c, g, or t
  misc_feature (319)..(319): n is a, c, g, or t
  misc_feature (323)..(323): n is a, c, g, or t
  misc_feature (332)..(332): n is a, c, g, or t
  misc_feature (364)..(364): n is a, c, g, or t
  misc_feature (389)..(389): n is a, c, g, or t
tcgaagtaaagctctcggtcaagttcaacatgcagggatgttcagcttgaatgaggatgccggtcccgacaaacagtagcagtgggtacttctgagatgtcaagcatttgctgtgtgtcacacaacgagcagacgatggtccagaggatgcccttactatcgttgcgccacgttgcggtggagggacgactctgagctgccgagtgcatgagagtgaagtgtggagcatctncgngtgtncggtgtggccggacatccagcactgnaggcngcttcnacgtcnatacaggacgtgtcggtgatgatgagcganatggangtgncgccatcgnaggcacgctgaagctgtacttccgtgagctgnccgagcccctcttcactgacgagtnctaccccaacttcgcagagggcatcgctctttcagacccggttgcaaggagagctgcatgctcaacctgctgctgtccctgccggaggccaacctgctcaccttccttttccttcttggaccacctgaaaagggtggcagagaaggaggcagtcaataagatgtccctgcacaacctctgccacggtctttggccccactgctgctcctggccctccgagaaggagagccaagctcccttgccaaacccaagccagcctattcaccatgactgacagctggtccttggaaggtcatgtcccagggtccaggtgctgctgtacttcctgcagctggaggccatccctggccacggacagcaagagacagagcatcctgttctccaccgaagtctaaagggtcccaggtccatctcctgg

SEQ ID NO: 490781 - DNA, 908 bp, Homo sapiens
aaaatgtgtccacgaagtagctttgtgatcgcagatacattcatagtgaactcatcagaatggctggtttgcagtactgaaatactatcttctaggctaattgtagcactacatacagcctagaagatagtatttcagtactgcaattagagaaacagaagtccaaggctggcgacagcttgaaaagtctgacagcttttctacttttcctgaaaattttaagactgtgatatctgtcattttactgtatagctgactgtgtactcaggtattttattggtccttgaaagattggtcgttatggatcacccagcctttccaagtcagtggctgttgttctgtcttgctgtctgatacgagagtggggcttttcagtgaactaaccagggattgttcttgacatacctgacttttctcacatttgaacttccactatcattgtatccatataacttctagcattttcatgccatggtaatccatgagctacacatacgtagcccggcaccgtgatgcaagttcatggtatcgtgcatgttcgtggtatcatggtatcattcatgcgtgtttgaatagttctacatctagtgcttcttgccaaaaagaatacattgtttaaattcacaaaattagcataattgcagtgctaatgaatatcggaatatgtgcacagtaacattggactattcatggagagtttacccatacatttagcaaaattgacctggccacaacatttgatctccagtgagggctcaagttagatccctatagaaagaggaccacttcatcttacttcaggtcatagttacgatctgtgatacgaaccataagatatgcctgacaagcagaatcaccaagttcccactttgaattaccacaaaaagtgtagaacccatatactttct

SEQ ID NO: 490782 - DNA, 467 bp, Homo sapiens
gctcggcccaaattccgaccatacacagaaatcaaactcaaaatagatatagacttgaattttagatctgaaactatgaaactactagaagaaaacactggggaaccaccccgtgacattggtctgagcaaatatttcttgtgtaagttctcaaaagcacaggcaaccagagcaaaaatagacaattggaattacataatgctaaaaagcttctgcaccacacaggaaacaacaaactgaatagacaaaccacagatagagagaaaatctttgcaatctaactgacaagggactaataacctgaatatataaagaactcaaacaactaaatagcaaagaaacaaataatttcatttttaaaaatgggcaaaaaattgggacaaacatttttcaaaaagaagacatacaagtggcctacagttatattttttaaatgtttgacattgctaatcatcagataaatgcaa

SEQ ID NO: 490783 - DNA, 182 bp, Homo sapiens
ggaggatggagcagtaagcgggtctgggcgcctggtggcagcgccatggagacggtttaaataaggaacccacctcgcggcagctgaaaaggttggatgaggtagtttaaccaaacacccagagggagtatttgatgccttaggaaacttggagagggtccaatggcagcctttacaaagct

SEQ ID NO: 490784 - DNA, 555 bp, Homo sapiens
atcctgccatacagaatgatttcagctattatagaagaacatgagtcgtatgaggattaacaatgtaccggcagaaggagaaaatgaagtaaataatgaatcggcaaatcgcatgtctttgttttatgctgaggcaagctccaatgctgaaaaccttgagtgatgccacaacaaaattgtatcagagaatcaaacaattctaccaatagaaacatcaccacagatggttaacgcacacctggctagtgtatgcagagtcactgctggaaacaccggaataccagaagcagatttacaaatgagagagacagtgtcattctgcttgagggtaatggtgggtgtcactaatactctatgaccacgtacatccagtgggagcattgctaacaacttccaaaattgatatgcaaggttcgtctcacagttcttaaggaccaacctcctacatagtgtggacggtcttctacaatgctctcaggtacaccaaaaaaacatttgcacatgatgagactccctccaagcaaattcacatccatgctgcaataacaattctga

SEQ ID NO: 490785 - DNA, 88 bp, Homo sapiens
gtttctgctcccccgtgcccctctcccccattccctggggttaaaatcaaacccccggggccctgcaaatcttttccgtttccctttt

SEQ ID NO: 490786 - DNA, 622 bp, Homo sapiens
tccgtgtaggtccatgtctgaagtcactatcaacagctggtgtacaagtttctccgagtatataggtagtgcgatagctcgcagatatcatcttaatgatgcgcatggccagtgtattatgtcgcttcccctgagctctcacgtacagaacgcatgtcaccggtctcagtacgacactatgtagtctgactgtgtcgtatgaatgatcttgcgctgcatagtctcagtcatggtactatgctgatcgtcttcagagttgatctatcaatccgtgtatgtctcacttcgtcagctctcatgaagccactctcgtggctgtttgacaggacaacctcggagttgtcacctagtacggtctggtgtgcgctacctaaactcctgctgtcactgaagtgttcaattcgtcatgactcatccctttgtctcatgtcgtagtcctggagagccgtctagccatcatcggtcctgatgcagtgactagggatgtagcgaatgtcttcaagtcgggccatcacatgcagagcctgcgggagctcagtgtgagtcacgtcagagctcagtgggcctgcatagatcctagccgctgcagcatctccgtccgagcacacgccctccggctcag

SEQ ID NO: 490787 - DNA, 103 bp, Homo sapiens
tatgtctctgcttcatttctgaagcaccacgggaaggtttctttaagccatgtggtggccgcagttggtagaacgtccagggagaccacttggaatatctttt

SEQ ID NO: 490788 - DNA, 144 bp, Homo sapiens
ctccgaaggaggcattatgaaatgatctgctgcagtggtcatgaagccctaggattcatcttacttttcaccgtaagtggcctgactggcattgtattagctaactcatcactagacttcgtactacacgacacgtactacgtt

SEQ ID NO: 490789 - DNA, 998 bp, Homo sapiens
gataccttgcgccgcgtcgcgtagtggggccttttttataataaatgttctctgcgtcattatatccgttctccttttcgggggggtcgttttttcccccgactttcttccccggcgccacaccctgtgcgcgtgtctcttgtcaccaccccttctacggccgcactagtttgtgtcccccgtctgcgctgcgacggttgttgggtccgcccccacatcccacttgcgggggggcacgcccgccatgggttctgcgcgcccccaaaaaagtttgttgtgtcaaaagctccgcgaaatagcctctgtattctcgttcgtcttactccggtggtggcgtcccgccccgagtagtacaaacgcgtctgtttacacttagggagatttttggcgagaaaaaaaacacctgtcctccccccccgtctttgggggggccccaaaaaattcagcccctcttccttagttgggggccccaccaccacacataccggaagaagccgggagacaccaaatggggcgcccctccgctcgcctaacccacaacgaaaagaaaactctcttaggagcacccctcttgtgaagggtgagcccacaacaacgccgctcttctccggagagattacccgcctggtgctaaatatagaaagaggacctgccaccacctctcgtgtcggggtgtgccacccccctccgcccggcggttgtttaatatgttggggtttgtattccccaccccccccgcgtgtctaccaaatagtggcgcgaccttcgtctcctgtgttgaaaacaacacgtgggcgcaacaacttgtgttatagcacaacaaaaacaagtaataaaaaggagtaatcccacccctccctgcgcccctggggaaattttggtgctgattaaaggagaccccccttcttttaataaaccgagcaaaaatggaaggtgttcgccaaaatatgaaaaaattattgttgttttgagccaaaaaataatatttccccccccaa

SEQ ID NO: 490790 - DNA, 171 bp, Homo sapiens
ggtccctcccttccaccagcgtcgggttgttggggagcagctctggggttgggctggcccactcctgtccccctactcattgcccggctctgtcccagacttctgtggtgctcgacgactcccttcactgtccaggccacctacatctctgggtgagctggtgaagtggag

SEQ ID NO: 490791 - DNA, 131 bp, Homo sapiens
gtccgcatgtccgtatcttgcagtgccctttgctttctgtgacctgcagccggctcatggtgtttgtgctgctgggcctccaggtggtggtggttgtgacagcctgggtgtatggtgagtttggtcccctt

SEQ ID NO: 490792 - DNA, 871 bp, Homo sapiens
  misc_feature (871)..(871): n is a, c, g, or t
gaagggcttccttatgcttctcggtgttcttgtctactctgctgaatggaaaaagaaaagcagtccacttgctaacaatttagaaatgggtagaatagggaagtaaatattgagttactgctaaagccaccactaaaccaattgcatctgtagatgttatgcctagaatgtctcctttttttttttttggaaacagtctcactcgtgtcaccaagcgggggtgcaggtgagccgacttcgcgccatggcactccagccggggtaacaagagcaaaacttccgtctcaaaaaaattttaaatggtccgcggggcatgggggcctcaggccgttgatctcagcgcttgggaaggctgaggcgggcggatggctagaggtcgggagtccgggaccatccgggccaacatgggtgaagccccaggtctactaaaaacacgcaaaaagtgggccaggttggatggcaggcaccgggggtcccagctatcgggaggctgagaaggagaacctgaaccaggcggagatcgcggagctgagatcagccattactcaggctggagaggagcaaaacttccgtctcaagaacacaactgtccgactctgggggttaaatgttggctcgtcccttcggattttggccaatgtggtttgtcggtcctggttttaattttctgtcagccacctgatttccagtacacatagaccgcgtctacaataaaacatttagtttcaaagcccccatattcgatatcatgtgctactcggactgggcaccttggcaaatttttacaacaacacagggtcagagagcctcaaggaggtgtgggtgggagaagcgcatttgtgcaggctggcatcatcggtcagatactatn

SEQ ID NO: 490793 - DNA, 1019 bp, Homo sapiens
gggaaaaaaccacaaatggtaaataaaggtttgctatttgcaaaaaaaaaaaaaaaaaaaaaaaaaaaaatatttttgggcggctggccctgaaaaagttttctgaaacaccatgtctggttggcggggcgagggccccgatggagtataggggagaacacgtgtgccgaaggagtggtttcccataggagaaactcggggctcttgaaagaagtggctgtgggtttcttctcacagataaataaaaacgccccggggggcaacagcggaagtggttgcgtgaaacaacattccagaagagtggacgttaccgaggggcgtcctaacggggggacttctttccaacagcgaggaggcgtccccagagcggagaggccgcgagattatcataaatattaagcgcgcccgcggccacggggggagggaacagtagccacaccaaacagaggagacgaccgaacacaacaaaggaacgcaagctggcactcgacgcaaaggaaccaaagagaaggcgcagaccacagaaacatgaaagcagcaggagacaaacccaggacgaacaacaacacaccaatacgacaacaaacgacgacaaaacacctagcgcgacgacaaagcaacaagcagacagcccagacagcacggcgcacgcagcaaccagcagcgtcaaccacagcctcacataccagagacgaggagaagtgcacgagacacaacaccgaagagcaaacacataagaacgtagcaagaaggaaagacagagaacaacgacaagcacacaacaggcagacacgcatcagcgccaacgagcacagacagaagtcaccaacaagcgagcacaaagagaaggagacgagcaacggagacagcagcacagagcacaaccagccagacagaggaacacatagcagcaagacacacgcgaagacaaagcagcagacgagacaccggacaacggagcgatgtggaagtagccagacgaacaccaagcaggaagacagcacaaaaacataagagct

SEQ ID NO: 490794 - DNA, 159 bp, Homo sapiens
gctttgaaatgattttcctcctaatatcatgggggaaaaaatccccaattttaattatatgttttgggctctcatttattatcatttttttctggccaaatttattatttttagatttttgtataacatgatagacataaaattggtttttttccccca

SEQ ID NO: 490795 - DNA, 221 bp, Homo sapiens
gtatgatcagagtcaatctccatataactcttggtctaggtactttactatcaagtacccccttttttaaaaaaggtcttccaactttaagactttatgagttgatgaaaatattaaggtgaagaataatggtataaagggaaaaaagacaatattcaacttaccatattgttccactttccaaaggatacagagctgataaatccacgtaataggacaaa

SEQ ID NO: 490796 - DNA, 244 bp, Homo sapiens
gactaacaggcagcttaaatgtactatagctaaggtgaacacttgggaaactattaatttggaggtttagaacgcatacgaaacacacaacacttcaacagcacttgaaagtaaacgacaatatcatgaggtcgaaaaaacttcaaaaggatactcagggaacgagaaaatgtgaatgaaagcagtgaatttctgcctctcctcgtatatagggtacttaaaattactacaaactactgtttac

SEQ ID NO: 490797 - DNA, 226 bp, Homo sapiens
acacataagatacatacttgtgttgcagaaagtatcttcctccaggtcttgtgatacccttcagcatggaacgattaatgagggaaatctttatattctgtataaaaagcaaagagcaaatttatatactaaaatcatttgtctaaagaatttaagttgttgttcaaataaacaattagaatgccatttcttgattattgcaaaatacacatcacacatagaaagg

SEQ ID NO: 490798 - DNA, 435 bp, Homo sapiens
  misc_feature (138)..(138): n is a, c, g, or t
  misc_feature (373)..(373): n is a, c, g, or t
  misc_feature (389)..(389): n is a, c, g, or t
  misc_feature (391)..(391): n is a, c, g, or t
  misc_feature (421)..(421): n is a, c, g, or t
gcggcacgagggaatgagaaggtgtgacccagactttagacttttataacagaggctacaaaataaaaaaatagatgctcgcagacagaactgattttacagcattctcctccccacagtacaagagctaccctgatngtcaaaagacatgttttgggataccttctgtgaacaaaaagtacctttttctgtctcctccattctgtcatctccttcatctggcacaggaagcctgttttggtgtaacagtttaggtaaacaagggaaggacttgatttcctgttggatccagcaaacagtgatatgatcctcacacatgaagctaatgttcttgcacaaagaattgtgcgcagctagctagggtggggtgggnaagtgatgacttggantngggcagggagggttaccctcaccttcttgntgggtcttagtttc

SEQ ID NO: 490799 - DNA, 537 bp, Homo sapiens
tggctcaaatgatacttctgctttaagttctttgagaaatcgccacatgctttccacaatggctgaactaatttacattcccaccagcagtgtataagcatttccttttctctacaatcttgccaacatctgtttttttttgttttttactttttaataatagcctttctgactggtatgagatggtgtctcatgattttgatttgcatttctctaatgattttacatgtttctgtatgcttgttggctgcatgtgtatctccttttgaaaagtgtcgttcatgtcctttgcccacattttaatgggcttgtttgttttttgcttaatttatgttccctatagattctggataattgagctttgtcagatgcatagtttgcaaattttctctcccattctaggttgtctgtttactctgttgatagttactttttctgtgcttaatctctttagttaaatttggtaccatttattaaatgtttgtttaagttgcaatttgctattgggggttttcattactgaaatattttgccggt

SEQ ID NO: 490800 - DNA, 182 bp, Homo sapiens
cccccgggtttttgggaaggcccccggttccaaaggggggccctttttttccccatggggtttaaaatgggggaaaccccttttttcagggggggccccccttttcccccgattggggccaaatttaaaccctttttttggaggaccaaaaatgggttttgaattttttttttttgcgccca

SEQ ID NO: 490801 - DNA, 1032 bp, Homo sapiens
  misc_feature (317)..(317): n is a, c, g, or t
  misc_feature (324)..(325): n is a, c, g, or t
  misc_feature (330)..(330): n is a, c, g, or t
  misc_feature (341)..(341): n is a, c, g, or t
  misc_feature (343)..(343): n is a, c, g, or t
  misc_feature (357)..(357): n is a, c, g, or t
  misc_feature (367)..(367): n is a, c, g, or t
  misc_feature (369)..(369): n is a, c, g, or t
  misc_feature (373)..(373): n is a, c, g, or t
  misc_feature (995)..(995): n is a, c, g, or t
gcttgcttctccttcagtcttctccaactcagtaaatggcaatgccatacttctggttgctcaggccaaaaaccctgaagtcatccttgattcttcttttagcacccatatccaatccattagcaaatctggtagaccctaccttcacaatatatctaaagctgaccacctcttttgacctctactattaacgccctattccaagccaccatcatctcttccctggattgaagctgtcatctacaaaaattcttcttatatccttgcattcctacagtctgttccccataaagtagccagaatgattatttttaaancaagtcnnctcanaccattcatcngntcaaaaccattcantggcttctcntntcantcagagcagtcaaagtccttaaaagttgcaggcctagactccctgtcctacctcaggtaccaccatatcccacctcctcatgcagctccaggcaccttggcctcagtgctcctcaaagcatcaagtatgcacttgccttggacagtctgtacttggtattccctctgccttgaatgttgttctcccagaaaaatgcatagttcactcttacatccttcaggtgtcactccactgttacctgagcaggtcgtccttgaatatatacatcagcattccctttcccccctgctttatgtatgtccatagcactcaccacgatctgactttactaagtatttattcatttactgtttgttttcccataccgaaatataaactttctaaggacagaaatttttgtgctttattgttgaatctccaatttgtagaaaaatgcctaccttatattaaacactcagtaaatgtttattgaacattaaaagtattactaatagaactttggtttttgaaagaaataataactttaattataagacgtatatgatttttgcagttttacttagtggtgacattgggtttatgagaatcgtgtacattcaagtccaggaatattaatgggcancaaatggttgaaaaggaaataatccagtggcaaatgt

SEQ ID NO: 490802 - DNA, 341 bp, Homo sapiens
aaaaaaaaaccttttttcccccggccctttttttaaggggggggagggggttttttccccccgggccggggggggagccccttttaaattgggggtttaattttttggggtggggtttaaagggtgccccgtttttcccttttgaaaaaaacccttttttcctttttggggtcccctttttggggttttggggggggggtttttttcccaaagcccggggtggaaatttttttaagtttttggggggggccccttttttttttggggggtttaatttggggtttccccttaagggttttttgggttcccccttttggttcccaaattaatttgccccctga

SEQ ID NO: 490803 - DNA, 108 bp, Homo sapiens
cgtggtgagtagacgactcatgaagaactctgctcatcgtttgtgcatcagtgtactcatctgctgtgtgcactggacacatgtgagggtatctcaagactgctgtca

SEQ ID NO: 490804 - DNA, 1272 bp, Homo sapiens
tttgtcttttcgccttttttctcccgtcggagcctcctgtcaccacgttgtgttttggcccgttgttatttttttcccccccggtcgtgtgtttccgcacttgtgcctgttttccccgtaaggggccctctggggacataggtttgctttgggctgtgtgtccctgggcctccttaggggttttctctgtggtggccccccccattatttgccccgttgggtatatggctgtgtatccccccggagcagagtgtttactgccctctcgggtcgccgctttgtcgtccccgcgattttcgccccccaccggggcggtcaaagggtattgtatgccctgaactttctgcccataaccctttcacccggatatgcccatttattggaaaatgtagttttgggcgccaacaggtggcttcctgtagggccccttatgggatgtccaattctcctttctcttgtgacaccccgctaaggggtggggccccttgggctcggggcactgttggtaatgtagcgccagagcttttcagtccactgttatggacctgttctggggatagtagacctccggagacaccggtgatgtgtatacgcttgtttaaggctccaaccgtgttcccccacttattgtctccttttcccaaatatggagccctgttaattttgcccactctactaatggaaggcttctactttcacctgaagtttctcccctatttttcacaggctaacacccccttaagagccccaaaccttattccccctacaaatgccacttttcacactattacataaatttcacattcgcggcgctataaattctaaaaacttttcttatcccaccaaaccaacttttcttcggcccctatttcacggaatatgtcccccgcacacgcttaatctccggagacttaacccccgcagatggcactaacacccaccactggaacactccctattcacttctcgtaagggtgcactttcactttttcttctaaccacccacgtaatattatataatttttcactcgagttgtgaagaaagcctcttccctcttcgaaagcgaaaaagtcctatatatgtatgaagaaaccctccacttaaacctcggaggtgaactaatattggaatgccccccacccctatccaccaccacttcgcagaaacccgtatatatcacttaaaattctatgacacaaaaaaggaaaggaattcgaacccccccaaactggtttcatagcccactcccctggcctccatgactttttcca

SEQ ID NO: 490805 - DNA, 268 bp, Homo sapiens
tcacatacaaatcatccatccttgccaatagtggtcatcctcacagtgaacactcagtgggcccagggcattttatagggcataccttcttatggggtggtcaccaaggctacggtgctattgggtcatctggctccgtgttcacaccaggagaaccagggctacaaggagaaaaaggcagaggccaaggaggttggaggggagacaatagtcgggtgaaggaaaccggtatccattaaggacccggattccacttaaatgtgtgctg

SEQ ID NO: 490806 - DNA, 314 bp, Homo sapiens
  misc_feature (163)..(163): n is a, c, g, or t
  misc_feature (169)..(169): n is a, c, g, or t
  misc_feature (179)..(179): n is a, c, g, or t
tgttgagtcattccccagagggaaggggaacctcctccatctttttggcaacatctcctatcttcctttgctgtgcttttttcccacttacactggtttgttctatcctacactacagatttctattttgaacttgctgccattttttcatacttgaaaatgntgacanttgctccaangagccaaacaataaatgttgaattcggaaacaaaaaatgcacacgttctcacacaaaatgtgtacactgcatgtttacagccagcattattcataagtagtcaaaagctggaaacaagccagatgtctatcatca

SEQ ID NO: 490807 - DNA, 543 bp, Homo sapiens
gatgttcacacaatgatgcagttttttagaactattcccatcattaagcaatgcatgactgtacacatacatatacttgcatgtaaaactggggaaatttgagtaagttgggtgtatcaatgttaatagctggttgtgatgctttgctatatgcaggatgccaccattgggggaagctgggagaagaatatatggtgtctctcttcatcatttcttagaactgcatgtgaatctacagtgatgtcaatgttttgtaaaaagctcacccagtgtgattatcgttaataataacttaattgtacattttaaaatagctaaaaaaatataatttgattttctgtaacacaaaagataaatgcttgactggatggataccccattctccatggtgtgattattatgtattgcatgtctgtaacaaaacatctcatgtacctcataaatatattcatttcctatgtacacacaaaaattaaaaacaaaaaattttcaaaaggtgacacagtggaggcttgtagagccaaattacaatattgctgctga

SEQ ID NO: 490808 - DNA, 215 bp, Homo sapiens
tccttgagtaatagccattatctatatcactctatcctctgccccccgccacccccccctgtcccctatacattgtaagagttgttatccaccttttctgagggtatcaaaattaattatcattttccatgtgatattctaatacataacaggtggcagcatacagcagtatatatataaacaggaatagtatatgctgtaatagtttatgctgt

SEQ ID NO: 490809 - DNA, 559 bp, Homo sapiens
tgggtgggggttgtgtgggaaccaccctacagcctaaaagactttattaaagatcttattggcgttatggcagttataagaagacactggattggagcgctacaggtgtttcctggtgacctgggtgctcagggtcactctggtggcaagacgtcttccccagggctggtggggagacgctgggagaagactggctagcgcatggtgtgcaggtgccccaggattgtgggagaagtcgcatgggtacctcctaaggaggcttcaagatgtgggtgtacgcggggttctcaagagacaggcctctcaggggtagaaccaagaagaggtgtcaggagaggtgtgtcgggttataaggccagtgggggcccagtggggtctgaacatttcctctggaagactagagtgtcaagagctccaagcctcttcttctgggtgtgttttcacagagaaccacaaggtgctaccgtgtgtgtgggggggatagcacgcactctgtgcggagaaagagtggcgctttgtgggatgccagatagttctccacagagaggtgatttttggt

SEQ ID NO: 490810 - DNA, 283 bp, Homo sapiens
aaatctgcgggcgcgtaatagggtagtcacaataccgcagagatctggatataggtggtctgtttatattcttctgtgacaatgacatcacagagctctggcttggcaggttcctctcatctttgacagtcaaggatgaacacagtaggtccccacgttgcaagcccaagtcacagatagcaacacgtgctgttagcattctgcgaagctgcacccctatcaggtacctgtgttttttcccagaagatatgagataattttctgatcatctgagctcttgctg

SEQ ID NO: 490811 - DNA, 258 bp, Homo sapiens
cctatccggagcagtgggaagtacagtggggttgttcaggagcagtgggaagtacagtggggtgttcaggagcagtgggaagtacagtagggtgttcaggagcagtgggaagtacagtgggggtgttcaggagcagtgggaagtacagtggggggtgtccaggagcagtggggaagtaccagtggggtgttcaggagcagtgggaagtacaagtggggttgctcccggatcgggtaccgagcctcgagttcggttaat

SEQ ID NO: 490812 - DNA, 134 bp, Homo sapiens
ccaggctcagctccacttacaagcttgtcaggagtttaaggtcgcaaaacgaaggcatttcagccaccttgcagcccttcaatacggaaacacaccagactttcctagtagctccgtcccgtcgctctgccaaa

SEQ ID NO: 490813 - DNA, 499 bp, Homo sapiens
  misc_feature (6)..(6): n is a, c, g, or t
  misc_feature (65)..(65): n is a, c, g, or t
  misc_feature (106)..(106): n is a, c, g, or t
  misc_feature (127)..(127): n is a, c, g, or t
  misc_feature (161)..(161): n is a, c, g, or t
  misc_feature (168)..(168): n is a, c, g, or t
  misc_feature (181)..(181): n is a, c, g, or t
  misc_feature (221)..(221): n is a, c, g, or t
  misc_feature (259)..(259): n is a, c, g, or t
  misc_feature (264)..(264): n is a, c, g, or t
  misc_feature (271)..(271): n is a, c, g, or t
  misc_feature (278)..(278): n is a, c, g, or t
  misc_feature (281)..(281): n is a, c, g, or t
  misc_feature (283)..(283): n is a, c, g, or t
  misc_feature (286)..(286): n is a, c, g, or t
  misc_feature (290)..(290): n is a, c, g, or t
  misc_feature (297)..(297): n is a, c, g, or t
  misc_feature (304)..(304): n is a, c, g, or t
  misc_feature (317)..(317): n is a, c, g, or t
  misc_feature (328)..(330): n is a, c, g, or t
  misc_feature (341)..(341): n is a, c, g, or t
  misc_feature (343)..(343): n is a, c, g, or t
  misc_feature (357)..(358): n is a, c, g, or t
  misc_feature (387)..(387): n is a, c, g, or t
  misc_feature (399)..(399): n is a, c, g, or t
  misc_feature (408)..(408): n is a, c, g, or t
  misc_feature (411)..(411): n is a, c, g, or t
  misc_feature (423)..(423): n is a, c, g, or t
  misc_feature (461)..(461): n is a, c, g, or t
tatggngaaaatatagtataatggggtgctgctgttaatctccttccaattctgcattctgtganatcatagtggtaacctgaaatccaccatagtggggacattnacacaataactggcaaatgcnacaaggctgggctttttcagtattgttgattgtntggacanaaaaaggtaatanagaaaatgtaaccaatacaagcatttgggaaaaataaacnaaaaccttttgtgaaaaacaacaggtttaatggaattnacaanaaataanactgtanatntnatnattnataaatnctgtgcnacacattcttcanatcagtaaaannnagaacaaatanangtatccatacattnncttttctagaaagccactggttgaacatnaaccagcacacnactggagtntcnacccacaaaggnagtataggtgggcaaggagtaaatactctgtaagaatnctgggggagtaactaactaagtacatcaagagtagtgc

SEQ ID NO: 490814 - DNA, 213 bp, Homo sapiens
tcaattaaaaaatttaaattatcaaagtaaaaaatttaggcgaaaaaaaccttttaaaaagggggttaaaaaaggacacccatttcccaaaagccacttataaataaaagggggaaattattttcccaaaaaaggttggaaaaagtccagttcggggaaaaaaacttttgaaataaaaaaagggcattttagagggaaaaaccccctaaaaag

SEQ ID NO: 490815 - DNA, 163 bp, Homo sapiens
ccctatgtctcgatcgtaacccttccccagttttttttgaatactttaaaccccgctcctcatggcctggccgtttctgaagctgcttcctcttataaaatcgctttggcgcgcaacatagttttttcttcgcagatcccaaaatataatgaaggggctgggg

SEQ ID NO: 490816 - DNA, 494 bp, Homo sapiens
tgtccatgtgtatgtatgcccgactcatatggtgatgaacaggctgatagggaacggcactgcggatgatggactaggcgaatgtagatcttgacctcagcctgtagcacacggaagttccacagccggctagccgtagcgcaataaccatgtagcgcacggactcctcgatcttgaaggggtccatgatgacagtgggacacgaagtataaggaaagatgtggtagcagtcggtgcgcaccgctgatgttatagaacgccacctccagctcgtccattgcctccaggagcagccgatcaccctcgaactgcaggttatccgaagggagggctaccctttgtgatcaggtcaaagtgcctaatgaatggcgcggataaagaaacctatggcccgtcactaccaaaccttcctacaccttggcagcacccaggtaaaaggtgctctagtggtaggcacagggcacggcggtcagatcgaagtaacgcatccggta

SEQ ID NO: 490817 - DNA, 377 bp, Homo sapiens
gtgtcgggcgtcacagccacgatgccttcagcctcgacggtacttccaatatagactacatccatgcacagaagatctgtctggcctgaggttctgtttaacaaaataccataccaggtcaggcatggtggggaagtgagtgaggatgtgcgtgaaattcaaaaaaccatgggtagataattattaagtctcagtgatgggatgctcgcttccttcctcccttccttcctttccttcctctttctctctccctctcctctctctttctttccttctttctttgagacagagtctcgctctgttgcccaggcagggatcttggataaggttgctcagcagaaaacacatttgctgcttcaggaaagcacagcagcttc

SEQ ID NO: 490818 - DNA, 711 bp, Homo sapiens
gatttataattgactgatatatgactcgtctatatctagacggtgaggtcatccgaccggacagagcattcaagtgatcccagtgtcttgagaatagttcccgggagcaccttgtgttgctacaatgagtcgactgattaacttccgtctcaagtcacatttgagttagggaaaagcgggaatgtttgcaggagtatgttagtatcttgccgtggatatcttgtctcatttccgatttgagcactagatggattagtcaccagttgtggaggtggccaacggatactccgaaatttctgacccctaataaggtagaagtcagtcatatatcagattacaccttgcgcacaggtcgagtattagcaaacggtcaggtgaacatgaggacatagactgctgagacgattagctccaaggtgtaagtcagaccttgtcatgacagcattccaccctgtttacgtccaagcctagagcgataacctagcagacaggagtgccctgctactcgactcgagcacattcaccgaacaagatagcggcatatcgtgcaatgggcgacatgggccacattgtgatagcgttcaataattcaggttaaaaatacgcgggttaaattctttggttcagatcagcgttcatttaattagacaaataaggcggaaattcgtgcaaaagccccttttttcgaagtagacccgcgaatgggtgttg

SEQ ID NO: 490819 - DNA, 161 bp, Homo sapiens
aaaaaattagaaaaattagctgggcatgatggggcccctttaatcccagctacgcaggatgttgaggcaggaaaattttttgggatttcgagttttaggcggcagtgaactatgatttccccagccctccagtttgggcaacaaaggtggcccctgtttca

SEQ ID NO: 490820 - DNA, 933 bp, Homo sapiens
  misc_feature (63)..(63): n is a, c, g, or t
  misc_feature (89)..(89): n is a, c, g, or t
  misc_feature (95)..(95): n is a, c, g, or t
  misc_feature (139)..(139): n is a, c, g, or t
  misc_feature (221)..(221): n is a, c, g, or t
  misc_feature (284)..(284): n is a, c, g, or t
  misc_feature (300)..(300): n is a, c, g, or t
  misc_feature (304)..(304): n is a, c, g, or t
  misc_feature (342)..(342): n is a, c, g, or t
  misc_feature (419)..(419): n is a, c, g, or t
  misc_feature (437)..(437): n is a, c, g, or t
  misc_feature (468)..(468): n is a, c, g, or t
  misc_feature (499)..(499): n is a, c, g, or t
  misc_feature (846)..(846): n is a, c, g, or t
  misc_feature (860)..(860): n is a, c, g, or t
  misc_feature (922)..(922): n is a, c, g, or t
gtactacctcccaactctgttttccatccccttcaggtccttcctcgggaagcggcgaaggcngtccaccctgcgcgtaatcctttatncccggnccctgcccctccctccgggtggaacttccccctcaccgccaganttaaactgaggatcgttggatctctggcggggtgcagaactaaacccaggccacagtaccctattcacgctctgtgcttgtnccaaggtttcaaataatcctcccgcctcaacctgcccaggtgctgaaattacatttataaacnactgcacctggaaaanagcnaaaaatttaaagtgctagctgaaggatgaacagcagcnagccaggcaaaaggggcaatggcggcttccttttttctactgcacactgggcagaaaatgcctctaattggtctggntacctggaaaaataaacntggtcaagtaaaaacagcttttaattattcncttatcgtaggctaccgccacattaattgtnctgctatctacagcaataagccttaaatttgggaggccctgaaggaggacgttggaacaggcaaggcggtgcctcgggaggagctgtttgtatacatccaagctgtggaacaccaagcaccaccccgaggatgtggagcctgccctccggaagactctggctgacctccagctggagtatctggacctgtacctgatgcactggccttatgcctttgagcggggagacaaccccttccccaagaatgctgatgggactatatgctacgactccacccactacaaggagacttggaaggctctggaggcactggtggctaaggggctggtgcaggcgctgggcctgtncaacttcaacagtnggcagattgatgacatactcagtgtggcctccgtgcgttcagctgtcttgcacgtgggaatncacccatactt

SEQ ID NO: 490821 - DNA, 276 bp, Homo sapiens
caacacccgctatgtgaacacccctgctacgtggaacaccccgctacgggggacggggaccctgccccgtttagttcatgctctgggggctcactgtggtgctctagtgctctctgctatttcatcacgtttcagcctggctccctcagaaaggggccttgagtgcaacctgtcagtttggtctccctgagtttggtcaccctggctcaggtagaacccgtggttctcagctgtcactcgcttatgcaaccgttaggagatgagctctggggcctg

SEQ ID NO: 490822 - DNA, 967 bp, Homo sapiens
tcccgagtagctgggacttcaagcttccgccaccacaggcggctaatttttttgtattgttttagtggagacggggtttcaccgtgttggccaggatggtcttgatctcctgacctcgtgatccgcctcctcggcctcccaaggtgctgggattacaggcatgagccaccgcgcccggcctttgtgtgtgtgtgtgtgtgtgtgtgtgtgtgtgtgtgtgtgtgtgtgagatggagtattagctcttgcccctgtctggagtataatggcaccatctttggctcactgaaaactacgcctcccgggttcaagagattctcctgcctcagactcgcgaatagctgagattacaggcatgcgccaccacgcaacagataattttctctatttatataagagacgaggtctcactatgttgtacaggctggtctcgaaactcctgagctcaggtgatccacccgaactcggattcgcaaagtgctggaattacagggtgtgagcccgcgcgtgcggctgtcactaaaagagtattatagagggcactacataaacgtgggcagcgtatttaagacatactgaagtgtctctggagaactggtgtcacgacgagacgaagacacttagtgtcgttggtgtaaaagacccaataaacaatctccttaaaacatggtcgattactacagaagctctacgcgtggagagagatgcccccccccggggataataaaaacgggctctcgggaaactggtcgtgacgggcctccgaaaaaatcctgacattaaaacaaaggacaaacttcacgaacataccgagacatgaggcgtgtacaaaagggacttaccacactgcacaacatagggaaggcggcaattgaaccatgatgtcccaccaaagacggaaccgagacatagtaacacagctgtaaccacagcaggctccatcgcatatacagctcagccctgcgta

SEQ ID NO: 490823 - DNA, 120 bp, Homo sapiens
gagccggtaccgtctgtgacttctcaacctccacaactatgaaaaaataagtctttaagtcacccagtctgtggtattttgttatggcagccctactgactaatacagctaaggagctat

SEQ ID NO: 490824 - DNA, 774 bp, Homo sapiens
ggttaactatcagtcgatccgaggccgctacaggtctggaggttgggggctctgtggatttacctgattgcgtggggccccgtctcaaagtactcccaggcggatgccagcctgtgagcgaggggcccattcccgaggtgctcaagaactacattgacgcccagtactatggggagattggcatcgaggacgccccacaccagtgcttcacagtcgtcgttcgacacggggctccatccaacctgtgggtcccctaccatccactgcaaactgcttggacatctgcttgcctggatcgcacacaagtacaacaggcgaagaagtccatgcgacctacggtgaagaatggtacctcgtttgacatccactatggctcgtggcagactactccgggatacctgagccaggacagtgtgtcgggtgccctgcccagttcacgcgttcgctcaggcctccttgccccttgggccggatgttcaaacgtggaggatggccatggcacatattggaagaacgtgccacccaaagccagcccaagagcacatcacacgtatcatcccgcgagcctaaagtatcggatgggcactccctggggccactggggcgtatccccccgcggcgcagttgtcacggtcgaaactactagcgctgccgtgtcaccggcggcgtttcggaccaaccacgtgcattgcacgggaggaaaggcgtaggaaggaaacacggatagccaccatcacatccatttgttacactgtatgcaggggaacccagact

SEQ ID NO: 490825 - DNA, 111 bp, Homo sapiens
atagagcgagccgtgtaccattaacattctagaaagcaaacttggtggcagatgttaatacagtaattataaatatgttcgagttattttagtacttcttttctaaacttt

SEQ ID NO: 490826 - DNA, 533 bp, Homo sapiens
  misc_feature (47)..(47): n is a, c, g, or t
  misc_feature (160)..(160): n is a, c, g, or t
  misc_feature (236)..(237): n is a, c, g, or t
  misc_feature (243)..(243): n is a, c, g, or t
  misc_feature (299)..(299): n is a, c, g, or t
  misc_feature (438)..(438): n is a, c, g, or t
  misc_feature (473)..(473): n is a, c, g, or t
  misc_feature (531)..(531): n is a, c, g, or t
gaatacgttagcggaaatggctccgagaggctttgacgcatgtgtanctttttagtggcggtatctcggccggggattttcgggctccagtggaggtggctatgctcaccccatctcccttgagaggcacagaaggttagagatgtgtgcgaggaacggncaggtccagcgtctcctcgttgctgccccttgagcccgggaccggcgccaatgcgcgcccgggttcttgggttctnncgtccngcagacctgccttggtgtggcgtccctgggccgtagttccgaagctgcagccgacntggtcgggtcctctagcccgcttaccctcccccattgacagatggagaactgaggcccagccaaaaaatatctcactagaggctcacgccattcctggatggggtgggactcaaggacgctcgtcagcagcacgcgganttccgaatgcgcccgtgacgatgctttgtccttanaagcgtgtgttctgaatgcttccagcgcttatgagccccgattacaactgggttaatncc

SEQ ID NO: 490827 - DNA, 633 bp, Homo sapiens
acgatttagtgtatggctctgctactgctggtgtcctttgagttatctatatccttagatttgacagctgagaaatctaggtggattcatattcgtaatcattgattaacatgcacatttgggtatagcacattatatgtttatcatacatttaactccgttttctattaaagaacatgctctaggggaactattaatagcccaccagtcgggtaggcagcattcaatccttctatgccttctttcgccacctgttgaggtctttcttctgaaacaaagaagaaatagacaaatcagactatgccctcttggaaatgtggtccagatttctctactcccaagctccaaaaaaggtatacattggatgggctagatcaactcctcctgagagccataaatccgccaagagttgttttccatgtaaagggtgtggtacaatggggaacacctgatgttggaggaaagcaggaggactttagagtggagttgcattctaatctactctgccgcttcaactatgtgacctggggcaaatgatataaactctatgagcctctttccttatctttaaaatgaagagaagtaatactaacttgtaaggctgtagtgaggattacatgaagtaatgcatac

SEQ ID NO: 490828 - DNA, 203 bp, Homo sapiens
ctccacactctatgcttactgggtgctgttaccgtcgcaggttactgcagatcaccgtggacagcatcaccatgaacggtagaggcatcgctgcgctgagggctgccgagcgctattgctgacacctggcatctctctgctgaccggcccaaccagccccattgccaacatccagagcggcatcggagccagtgtggagagag

SEQ ID NO: 490829 - DNA, 108 bp, Homo sapiens
ggtaccaaacgcctggattgataacttgggggaagggacgcccatatcgccttctggtagagtgtctcatggaagaggatgacactctaccagaagtgcgcctgggtg

SEQ ID NO: 490830 - DNA, 1059 bp, Homo sapiens
ggtttcaggagaacgtggaaagcaaacacaggggagtcccggggcaccaggaattctcggggagtttgcaagagtgtggccttatttgggtatatatcccgcaagtgaccaaacccccccttggaagtaaagtgcccccgacccagttggccaccgtggggcaatacacgcgtggggtaatagggagggccttccacagggaaaccccgggagtatttccccccggagtagagccccccggtgccccaaaggtgggggacacgagcgcgtggacccacacatggcccctccttagagccccccctgggcgtctccccccccgcggaatattgtcgcgagatgtagcctcccccagagaggttttgtctgtgggggacacccggctattagcgcgaggcctttagaggctttaatccccagagtgcacctcgccaaccgcccctgtggtggcacactccccgcagttgggtgcccctctctggggtgttcccccacgagggattctgaccccgccgtagggtgtttgggtgtggccgcccgagccagcccagaaagagtgttccctcggagagttctcccgaagacctcgtttcccttggacccctctgggccggagagcccccccggggctgcccctgtgctgcttctggtcgggcaccccattgcgctgaggggcttccagacccgtttcccccgggttgcctcgtacggccgaagccagaacgggtgttttccccccgcacattttgggaggcttccccctggaagactcttgtgcccaaaggtgggagaacaagaagctggagcacctctaggggtggtctcccgcccaacaacacccgcggtgtggacccctggaccagggggggagtacacccggccccctgggaacacacaggggttacacttacgaggctcttggtcccggggccaacccagattcagacacccaaccacttccgggctgcattattcccccacccggttccccaccacagccttttttcccgcgtttttttaaaaaacgcacccctctttaaacaccccttcggaaaccca

SEQ ID NO: 490831 - DNA, 387 bp, Homo sapiens
gaagccccctttctcatatgtttctcattcctgtttgcccttcagagttcagctttagttgctaaaacattcagacatccctctgacttagatcccccactactgtttttctgtgagaagcagctatgcataattcctcttcaacacagtagttcttgaaattttgcaggcctctcctggaaaggaggaaatgacttctttgactttgtatgatgcttatttgtggatgaatgggcaatggaaaaaatgtaaggaccagtgtaataacccgtattgggattttgaaaaaggggttaaattggggttagttgaaaaaaaggttcaaaatgggattttggttttcgggaaaaatttttacatttttggggaaattttaaaaggggggtt

SEQ ID NO: 490832 - DNA, 2018 bp, Homo sapiens
  misc_feature (1731)..(1731): n is a, c, g, or t
  misc_feature (1829)..(1829): n is a, c, g, or t
  misc_feature (1907)..(1907): n is a, c, g, or t
gcccactcagctccaggctagtgttctgcctgagtacccgcaatgaactcgggtgtgtcacgtagggtcatgatggcaactcacctgccttttgcacgggctgcatgacattcatcaggtggctgcaagacagcacaggaatgtggttactctcttctactgttcgctgacgccgggttgtaacgtctgtggacatgaggagagctaccgggagatagactccatcgtaacgcttttgcatttctctatgttccaagggcacatgcggattcgcagccagttggaactttgcgtaatccccgtctaggtcccgtggttgtttcgtgcgcgtccagaacgcgggcagctagggtaagtgtgctctaccatgttgtgcgcgtccacgcgtctctcttgtgtgcgtttaggctcgccttgtgtgttcatggcgcaccccgaacgcgacccgtgcgaggagcccgccaaggggtcgaaggctcaccatccggcccatgcgcgttagcgcgacctccccaattgttcctcgctcatgtcaattgtggccccaagcaggttccttccttttggccacccgggttctttcggttagaactagaatactcgtctttggcctttgtgtccccttgcgagcgtgactatcggctggtggatcacccttaggtgtggaaccacagttggtgccccactgggccctttcctgggtgcgtctccccactggtgtgtctaagtctttttctaataaggcctagtccggtttcccacacttacccttgggaagattgcgtttaggcaccccccattttagttctttacactggcctaagggtgatcacaccggcttttgggggaacgtgggttctctgttatccacaaaattaatacaatcgccgaaggcaatggtcggacaatgtgggcgaatttcaatggaccattgccgcgttcccaaacaaggaacacacacaaaggattaccaccacacattttattatacatttataatacaccaccatatcataaaccattatttgataccacccaaaacggaaacacggccacaagggcggaggagtatattcaggcacccttacttattaagggaacacaagacccccaagcaaaggtactgtatagcatcacaattgtgtttggcttcggactcccttccacacccgttaatcgaaagttcgtgaaagcccacacagggtactccttaacgttggacaggagcgcgatcacgagttcagctaaaagtggggacacccattttgggaaatcaggtctcagcagtaaccgcgtggggggttgacattcaggggctatgcactgggcgattcacgaatcagcagagaaagtgcccctcataatagagggtcatctatcgcaagccgtatttacttgccacgacggcgatgcaactcaacgaattccctgtgcgccaacggccggccaaagtgtgggacgctacatgtctagacattcaaacaaaggagcaacgacacaagagcgcatcttaaatataaagcaagggatagcccgcaacaggagtagagtgatgactcacacacgtagacaaatgagtactctaagtgcagaaagcccacagcagtacaagctgggagcgaacacaagagctagatcgagagctacagagacatatcactgtagctcagaagaggagagagatacacacagagagacgagaggcgaagaagacacaacacagaaagctanccagacgacaggtatatgactgaatcgcgatcaggcacaacaccagcctacagactgttatgcgataccgaccgcatcacgacgcagacagaggcgtnagcgtagagcgacgttgagctacatatgtgaccatactgcctcgactagacagcaagcgagctcagcgctgacaagangtagaagacggaggaacacacgaacgagtgaagacgctgcgagacccgactacgctggcgcagcactgccgacagctcggcgaccgactcgacagcacgtcacactcgacc

SEQ ID NO: 490833 - DNA, 679 bp, Homo sapiens
gaggcagccgatggccgagctggtgttgctggacctgggtgctggctgcgcctgcgctgctttctggctcccacggcctctcccatgcgctgatgtggagccctggctgggccgggccggcggcgtggaggggaggctcctctccagtggtccagaatgaccatgcattgtccctggggcccttacccaccctcccatgtgatgatccgccataggatgtgtcttctgaccccatgccctgcatgtggcaaatacatgcaatgaggaaatgggcgatttcaaactggtcatgatcgggagcacgtcctcggataccacatccaagcagcttttgtccgccagggctcagctggagtcctacaccaggccgtccatcagactctgattgtatctcttggaggggaggacctgggaaggccttaatgggagtggaaggcaggagcgccaggtgcattagcgcaggctcgagcaaggccaatgaccaagccagtggcattttgcgtgtgcggaccaaattgttgggctaacaatccggtactccaggggatcgaggttgcctggtgcaggggtagttggccatcacgcttcggagcccaaagaataccttgcaaatcagcggcatgaaataacaataattgacttggtaggatcggggcggcttgtgaagggacggctgtga

SEQ ID NO: 490834 - DNA, 620 bp, Homo sapiens
  misc_feature (243)..(243): n is a, c, g, or t
  misc_feature (483)..(483): n is a, c, g, or t
  misc_feature (576)..(576): n is a, c, g, or t
ggcggtggtgaaggtgcaggccgtgggggcggctcagaggtcaggtgactatgagaggcttatatttcgcaacagagttccacacgatgaagaaataacatttgtagttgtcagagaaagaggataggatcattcgctgtttgacacgcaggagtagacttctgtgaaagcgttcacagttgaaacgtcgttgtgtcgtcatgaggcctacgatagatagttacataacgcattgcatggggncagaagagtgagacgatggaacagatagggactctgtcagttctgccgtgttctggtgggacgacgagagacattcgctggggaaaacttagttgagtatcatgcactggtgtcggcaacgccagagggctcatttcagtgtgctattactatctccacggagtgccagtgacaagtcatgttctggtgaaatctgtgttgccgcacttggggatctcctgggagagaccaccttgggangctctatagtggagacagtctagtctacagacagtagcgactggaggcacagttagcgttggggtcttcagtgatagactcccagagaagaangtgtgcagcactcgggaaccggcgaaagggcaggcatgcgaaac

SEQ ID NO: 490835 - DNA, 104 bp, Homo sapiens
gtgaagatggcaaattgtaaccatctctctgaagggcaatttggtggtgggtatcaaaaagcaatgaaggccaggcacagtggctcaagcctgtgaccccagca

SEQ ID NO: 490836 - DNA, 211 bp, Homo sapiens
tatgtagcgagcgtaatccggaattatgggctgaaagggcatctaggcggtaagacaagttgaaggtgaaaacctgtggctcaaccataggcttgcctacaaaactgttgaactagagtactggaacggtgggtggacactacacgagtagaggtgaaattcgtagatgtgtgtaggaatgccgatgatgaagataactcactggacagaa

SEQ ID NO: 490837 - DNA, 391 bp, Homo sapiens
atgaccagaaactacacattgtattaatcaggagttagcgcagtacaggtaccacgtggttgtttccaggatatagaggggcctagatcagactggggggatatcccctccccagggctgagaccaattgacacccttctgcccaagggctggccctcggatccaatccccagcagtccaaaggctgtgtcgaagaggttgatgggagtggagcaaacggtgatgagggttgattacaggcctagggaatgggcgagttataactgtatctcaggaccagtcacagtacagtccctgatagctctggtgctatggctctgtcatctgattgatcttcttcacctccacacaaacagctgctggtccatgtctactccagttacaaattgtc

SEQ ID NO: 490838 - DNA, 131 bp, Homo sapiens
gaacgggtgatgcggttgctgcctgctcccctgcctcccacccacatctggttgatgaacaccgtggaaggagacctgactgatgaatccctgacactgttcttctgcacactctgatgtagcaacgatga

SEQ ID NO: 490839 - DNA, 107 bp, Homo sapiens
acatgatgccaaaatggcggaacagaccaagcgctacgctcaacacaataatactgaaagcaatttagaaccagatatcaaaaatgcacctggcggtattcgtgata

SEQ ID NO: 490840 - DNA, 990 bp, Homo sapiens
  misc_feature (18)..(18): n is a, c, g, or t
gggagctgctgtggggancgaggcgaggcggtgcggaggagacccacccctgtccacatgaagagtcgcaaaggcctccgttgatgcattcacgcctgggcggggtggcggaccggccgaagcgggcggggcttgcagaaccgagctaggggcctggggggcggcctgaggggtcgcaaaagaccttcggcggcttccgacggcgggcggttgcggccatttacacgggcctctgggacgaaaggacacggcggtgttggtgtgctcgttttcattcctccattttctgggggaaccccaaggggtgtggggagaacggtccctacaaggagcaaggccgtggtgtgggacgggagacattggggaagtcagtgggccgagaaggaaacccggggggccgggaaagggcgcaggccagacagttcagcaaggcgggagcgggtacctcccgcgggagaggggcctagtaacaagctgggagcgggggcacctttgggtatgcccggacaagccgaggggaacgaggccccaggggggcgcctgtggggctcgcttaaggaatagggccccgctgagggtgggaaggcgcacaccgactggacggtttacccccgggtccggcaaccccggggggagattcaccccctcctcgggggagaccctaaatcccgggaagcaggcggaggatggggccacgggattaaccaacgagcgaggcggtcggagacgaatcatgcggccggcaagcgcggggacaccaagcgagaatcaacttcgggaagcgacgtaggtcatgccgtggggggaaaggggcggatatggcaaaggggcgcccaagacccggaattcagcatcggcggggagacacggggcgacacaacacacgacagcaaccaggagacgatgttggagaccacggcgaccgcaagaaggaacagcacatcaccagagcgaggtcgcaacaatgggctagagcgagactcacaacaa

SEQ ID NO: 490841 - DNA, 942 bp, Homo sapiens
aggccggccaccgacatggcggacggggagaacggcagcaccacggacaagcggcgcaagacaacgaggcacacaaccacgagaatcacgggcgcaccacccccgggggataccaacgggccccacatcctcccaggagggggatgcccgcaaaaaagccctccccaagggcgcaaaaccgaatcggaaagtcagactccctggcccagtactgttgggccaccaatggagccggcataggtccccccgcccgctccgggtcagctaaacccacagcgtgcttacaacgtttgccgcggcacacagcagcgttccccggtcaacaatgcggacgccccccccaaggggtcccacagttaggacacatcccgcggacacaaacgagaggggcccccaaactttgtgtcgaacaccggggcaagaccacaaatggtgccgccccacgggagaaacaagggtcccacgtgcccaccgtgcgcagaaaagggcacacgacacacaacaaccagttctcgttctcgcggaatcatagggagcccgtgaaacccatagaaggagattcccaggcgcccgctcctctccaacccggagggtccctcatgcccagagagaattcggagaccgcacaagcgtgagatgattggggaactacgcaaactggtgtaagaaattaatatgtggaaaacagacagatggggacaacgcccccacgcgttaacccaggacgagggagtagcgcaacccacaacttattctcagtggaggacccaaatctgggaaaaccacaggttcacatggattggcagtgtgcctccgaaacccggtcgccggggggaagttcctgcccaccccctacccaccccgcaagaggagaagtctccttattggccccagaggggcattcccataaaaaattcttcagggggaacggcaaaaaaaaca

SEQ ID NO: 490842 - DNA, 194 bp, Homo sapiens
taaatccacagagtgggtgagatgatgagtttggacatttaaatgagagaatgatgctcccaatcaagtaatttcaaggatttgattgacttttttttccatgtttatggatattacttgttcctggttaacttccaggactcaaactgagctctaacaacaaaagccactggcattcatgagtgagaagaatg

SEQ ID NO: 490843 - DNA, 266 bp, Homo sapiens
ccagttacacagtggaatataggcagactgactaaccttgcctgtattttcttgtaggcaggcagaaaatcagaggcatcaacgatctggtagataaaaattttttagagtttttgaaaactttgagtacaaattactggtgtacatatagataaaactagtatgtagacgctttgtacactggggggatcctgctactactcgagtctgacacggcatgcatagcttggtcactggctccgtccgtttttacaacgatcttcgac

SEQ ID NO: 490844 - DNA, 240 bp, Homo sapiens
cccttctaatgcgttgcctaaacggtccatagctgagtgttctgttgtcttttttccaactttattgggaggagggggctcagggaaaacctccgtttcctctttggtatctttatctggtaacggcaggactgagggaggaagaggaggcgataaggtgatggttcctcctcctttcccttcttaggctcttctgtgtagagcaaggccaaagtagccttaactaaggcccataacgtt

SEQ ID NO: 490845 - DNA, 271 bp, Homo sapiens
taggaactataatctgtgccctttttttcagctactcaggaggctgaggcaggagaattgttggaacccaggaggcagaggttgcagtgaactgagatcgtgccactgcactccaccctgggcaacagagcaagactccgtctccaaaatgatgataataataataataatgaagagaaggaggaggaggaggaaggaagaagaattgcattacattatgtttccttgtggggccgggtatagtggctcatgcctgtaatcctagcacttt

SEQ ID NO: 490846 - DNA, 178 bp, Homo sapiens
ggtgtatcctttgtctggcctctttatatctgtgatgatggtgcggtcatatattatagggataaaacagaagaattatggaattgacagatgagcaagaaatgactgatgaaaaagaagcagtcgactcccgaagactggacatcgtgtaacatactcacctcgtaaaggggaaaca

SEQ ID NO: 490847 - DNA, 665 bp, Homo sapiens
  misc_feature (600)..(600): n is a, c, g, or t
tgaatttaagacaaagaaaacctgaatgttaaatatttaaaggattataaaagagcagccacattcttggtctatttttgtaggcaatagatatgaagatcaagttctgactggaatcctgagtgacacggagacagcccccacatgtgacccacctgtaggtttccaacaggcatttttccaagagtgagttttggaacattaaattaagagcaaattaaattttctcaggctttgaggggcctgggctgaatttttttaatgtatagaggttagaagcaacgatttaaagctcagtgtcccctatatgggtctaattatgaacatgccactatgtccacattagaatagaactgattgtgtaacaagttattttctatgaaaccctgtaaggtggtgaatgagggaaagtgcccaaaacatgtaaacaagaaaaaaggaactattgacgaggggaatgcttttaactgtgaaagctggaacatcagctctgacagtttatgttcacgtaatgcgaaacggatgtggggtgagctgggccacaagtgagtttcctctttctttggacacaacaagcaacaatgatgtgatgcactacanaactaaaacacccaagtaaatgctatgccaaagaaattggagaccttaaaagaatgacatttcaa

SEQ ID NO: 490848 - DNA, 950 bp, Homo sapiens
gactagttcgagatcgcgagcagtcctcctgctactacatacgaggggccctggcacacatgaaccagaacatgagagaaggacatcacaacatcacaatgaaagataattgtcgttgcgagcatccgtgttccggtccgggcgcggggagccccgcttcatcgccgttgtggctacgtggacgaggacgcagttcgatgcgtgttcgatcatgctgacgcctgggagccgagaagattgtgatgccgtgggcgccggggggatagagcaggaggggccggagtattggggaaccatggcagacactggaagtatgaagggcccaactctgcagactgaccgagcgaacctggggaccctgcgcggctactacaaccagagcgaggacggttctcagaccatccagataatgtatggctgcgacgtggggccggacgggcgcttcctccgccgggtaccggttatgtgacgcctacgacggcaaggattacatcgccctgaacgaggacctgcgctcttggaccgctggcggacatggcagctcagatcaccaagcgcaagtgggaggcggtccatgcggcggagcagcggagagtctacctgtgagggccggtgcgtggacgggctccgcagattacctggagaacgggaaggagaccgctgcagcgcacggacccccccaagacacatatgaccgaacagcccatctctgaccatgaggccaaccttgaggtgtggggcctgggtcttctaccctgcggagatcacactgacctggcagggagatggcgacggaccaaacccagggcacgagaccctgtggatcaaccaatggcttaacgtggggcatgcaccttccaagaagtggccgggctgtagttgtgcttattggaaggaacaactaacactgcatctacaacagaaggttccgcaaaacgcccactgacata

SEQ ID NO: 490849 - DNA, 651 bp, Homo sapiens
  misc_feature (3)..(3): n is a, c, g, or t
  misc_feature (71)..(71): n is a, c, g, or t
  misc_feature (81)..(81): n is a, c, g, or t
  misc_feature (130)..(130): n is a, c, g, or t
  misc_feature (220)..(220): n is a, c, g, or t
  misc_feature (227)..(227): n is a, c, g, or t
  misc_feature (229)..(229): n is a, c, g, or t
  misc_feature (234)..(234): n is a, c, g, or t
  misc_feature (283)..(283): n is a, c, g, or t
  misc_feature (286)..(286): n is a, c, g, or t
  misc_feature (350)..(350): n is a, c, g, or t
  misc_feature (362)..(362): n is a, c, g, or t
  misc_feature (381)..(381): n is a, c, g, or t
  misc_feature (390)..(390): n is a, c, g, or t
  misc_feature (429)..(429): n is a, c, g, or t
  misc_feature (439)..(439): n is a, c, g, or t
  misc_feature (507)..(507): n is a, c, g, or t
  misc_feature (523)..(523): n is a, c, g, or t
  misc_feature (526)..(526): n is a, c, g, or t
  misc_feature (530)..(530): n is a, c, g, or t
  misc_feature (535)..(535): n is a, c, g, or t
  misc_feature (556)..(556): n is a, c, g, or t
  misc_feature (595)..(595): n is a, c, g, or t
atnaaacaactggttcttgctagcctctagataaatcccagaacactcagccctgacacgttaatactctncatcagtatnataggctgctggtcacacagactcaccaagccacatacttgtcttccanaagcacgttcttatcttagccatgaagtactcatagccacatcgtactaaaggttgaactcaaatgatatgtactagggtattaaacaantaccaangngaatngttaacttcaatacaaggtcaaaattagcatcaagttctacaatccatnttntgatatcattatactaagtttcaaggacaatttcttttcgaaggtttattccagttttgtgagnctatttttaggngtttgcatttttctttggnttttttttnttctcaattaacccatgcagcaaatgctacgcatctgcngagtccgttnagaagcatttgcggtggacgatggaggggcccgactcgtcgtactcctgcttgctaatccacatctgntggaaggtggacagtnagnccanggatngagccaccgatccacaccgantacttgcgctctgggggtgcgatgatcttgatcttaatngtgctgggcgccagggcggtgatctccttctgcatcctgtccgctatgcccggata

SEQ ID NO: 490850 - DNA, 959 bp, Homo sapiens
agcggaactggtctaaaatactgttgcattataaattcaacaaccggacaagtgtcatgttaaaagacagatggaggaccatgaagaaactaaaactgatttcctcagacagcgaagactgatagtgtttgtaacaagcttgatgacaggacagttaagtatttagatcactgcatttagtctgaaacttgtgtcattgatgtaatctaaacactttcgtttaaagcattacagtatttactctgtgaccatcaacttaatgagggtttgtgctaccagagttaaagcatatgctatcattgtattcttctaagaaccttattctgataaacatgtaaatctgttgaaccctgccacattctcgtatccccacccccaaatcctgttccaatcgaaaaacttacaaacctgatacgacgaaaacaaagaaattccagttaacctattacggtgtctgtaggctgacctcaaccctgtgaacataacccattcacaatgaattctcttttggcatcaacgacagagtactcatctgttgcccaggctggagctgcagtggctgcaatttcagcatactctgcaacctctgactcccaggttcaaggtgatactccatgcctcaaggctcctgagtacgcctgggcactcaccggaacaccagacaacacgcccacgcacaacaccacgaccaaccacgcacacgcgcggcggtaacaccaccgctggccaccatcgccaccaaactccccgacctccacgacccacccagcaccaagacaccaccacaagagcgcggcaacctaaccgcacccgaaagcccaacgcgacccaagcctcacgagagacactcacaaacgacggaagcacgcgcaagcccagcaccaacagcataaggcaccggaacagcggcccagcagaatacaaccagagcacaaaaacgccgaacgaacacacgacga

SEQ ID NO: 490851 - DNA, 296 bp, Homo sapiens
  misc_feature (13)..(13): n is a, c, g, or t
  misc_feature (47)..(47): n is a, c, g, or t
  misc_feature (182)..(182): n is a, c, g, or t
aatagaaagcctnagaaatatcaaacgtcagaaggacccgagacagnaaatacagtcatgtgttaccttaatgatggggatatgttcccaagaaatgtgtcattaggtggtttagttgttgtgcaaacgtcatggagtatacttctacaaacctagatggtatagactaccggacacctggnctatatagtgtagcctattgctcctaggctacaaacctgtatagcaggttactgtactgaatactgtaggcaattgtaacacaatggtaagaatttgtatatccaaacatatct

SEQ ID NO: 490852 - DNA, 250 bp, Homo sapiens
gatatataggggatgcgcgtgtgcatgtccggcgcatggggctgggatcgattagctaaatgttatttcattggtcagtgtcagaactaggattggatttagattgttatctcttgccacagataggaaaatggagcagatgaggagaaaaaagcatttaatgggagagaacatttggactcaatcactagtgaattcgggggcgcctgcaggtcgaccatatgggagagctcccaacgcgttggatgca

SEQ ID NO: 490853 - DNA, 250 bp, Homo sapiens
tagtgccacttcaggctactattcttcccacctacagcaaaaactcttcctttttagtattcatgctttgtgtctcgtgctgtcaactcgtcccagtctaaatcattggcaattctccaggacactaccctatatgcatggagcatgaccacctcttcaattccatggaaacttacttttaaaccatattagtatcctcctccaggggttatactctgaatctcccattccccataactattccgtacct

SEQ ID NO: 490854 - DNA, 1116 bp, Homo sapiens
  misc_feature (429)..(429): n is a, c, g, or t
  misc_feature (621)..(622): n is a, c, g, or t
  misc_feature (627)..(628): n is a, c, g, or t
  misc_feature (632)..(632): n is a, c, g, or t
  misc_feature (639)..(639): n is a, c, g, or t
  misc_feature (645)..(645): n is a, c, g, or t
  misc_feature (664)..(664): n is a, c, g, or t
  misc_feature (675)..(675): n is a, c, g, or t
  misc_feature (677)..(678): n is a, c, g, or t
  misc_feature (706)..(707): n is a, c, g, or t
  misc_feature (728)..(728): n is a, c, g, or t
  misc_feature (736)..(736): n is a, c, g, or t
  misc_feature (738)..(738): n is a, c, g, or t
  misc_feature (752)..(752): n is a, c, g, or t
  misc_feature (765)..(765): n is a, c, g, or t
  misc_feature (798)..(798): n is a, c, g, or t
  misc_feature (804)..(804): n is a, c, g, or t
  misc_feature (824)..(824): n is a, c, g, or t
  misc_feature (979)..(980): n is a, c, g, or t
  misc_feature (994)..(994): n is a, c, g, or t
cgtctctccccttgtatggttccgcgccgccccacaatggtgcgtgtctccgggcgggttgcccacgcaccttgcgaccaaaggggtgtctgctccccacgggagttcttttcgcccccctccacgggagcccttcctacgtagggtcgcctgccccactttcaaattcgctgcgccacaggtgtttccacacctcccttgggtgagggctttttttataccggcggcttccgctaagcggggttttaagcacctcggtgcccacatggtgtcgtgttagactgaaaacctcttttggaggccccgctccgagatgtgtaaatagtggggcgctctcttgtaaaagaagaaactttttggtcgcacgaagataacctcgtgtttcgtttgcaccaccccagtttctcccacttgaagaggagagaaagngggagacacaactggcctcgagagaaaaacctttgagatggagaaatctggtcacgagatcccccactcgagagggtggccccgaaattcttttcccctttcacagggagatatctccagagagagacacgcccagagccctggtgagatgacacttgtgggagagaaccctgggcgcctgagatgcacacnnggagnntgtngcacatnaacacnctttggagaaaaaaatgtngaaatcacgtncnnctaactggagaactgcacccaaactggnncacctgagccacaaattgagncccccacntnttgttgtggaactnttcacttgaggancaccacttaccctcgaaatgaggccacggtganaagccnctcacaagagattgggtganccaccgtgagcccaacttgccccaagaatgggaggcgcccgaatttggcttggcggaaatattttttttgaacacagcacacacaccctgggaggaccacgtgatatatggaagctaagcctcgggctaatttccccactagccgctggggtgannttccctggtcaccnaggcacgtgcacatgcactgttggggtttcctttaccttttttaataaagttgtacccaaaacaatccacttaagttttttgatttgtaccattccttcaaataaagaaatttggtacccca

SEQ ID NO: 490855 - DNA, 492 bp, Homo sapiens
cgatgccggtgcatgagcaggtgcggcggccccccgcggccggcgagtcacccgagttggcaccatggtaactgtcgcgctggcagaatgatggcgaacgccactggtagaggaggtaggccttgagggaagccggcagcggaagagtgtggatctcccccaggcgctccctccccagggccaggaacaccgagcgacggaacaaatccatgagcggaagaggatcgggatcgagtccgttcaaatagcgcattcggatctcacagtggccccagacggcactcactacaggatacagtaaattgcccttaagtccccaaaaagacactcccatgtactgtccatccacaatgaagctcaaagtcccgtcgtacatgtccaggactaccaggaaggagtcagggacaatgaatgtctcatctggctccagagaggctgagtatgtatagctaggctggtacttgccatcgtggtagagccggttgcgcccaa

SEQ ID NO: 490856 - DNA, 592 bp, Homo sapiens
gtgtctcactctggcacccaggtttgagtgcagtagcatgatcaaagctaactgaagtcttcacttcctgggctcaagcaattctttcattttaaccttccgactagctgggaccatacctgggggccacgcctaactaaattttggatttttaatttttggagagatgaaggtttgccatggtgcccaagcttgtcttgaacttttggactcaagcaattcttctggcttagacttccaagggctgggaattcacggctgagctactgtgcccccccccctactttttaaaataacacaatgtgatgggtattttccagacacgagaagaggagccccttccaccttttatatatatatatacagcagctttttacaccagtgtttaggatgtgtacccggcgatttccccgacgactacctaacagctggtggagagcgtccagaaaaaataatttgttgagaaaaagactttttaccacaaattaaaaggtgttttttttgttgaaatttttcaaaacttaaaaacccccaaaaaatatttttataaacccccaagggggggacccccaaaaaacaatttttttctatt

SEQ ID NO: 490857 - DNA, 87 bp, Homo sapiens
cgagaggacgaccggatcgccggccttgaccgaggaggggagctctatgctcgtcgtgtttccgaccgcgcgataggctggggcgtt

SEQ ID NO: 490858 - DNA, 184 bp, Homo sapiens
gccaggtgatttttctttttttttctcagtagtgacaggtttctccatgtgggctaggcaggtctcgaattcctgacctcaggtgatccacttgcctcatgtgctgggattacaggtgtgagccactgcgcccggccttctttttattttggtataatatttcgttgtataaatctaccggggg

SEQ ID NO: 490859 - DNA, 240 bp, Homo sapiens
aaaaaaaaaaaccttttaaaaccccccccctccacccccaccccttttttgtttttggccaaggggtttttccaattttttgggggttttttttttgggggtaaaaaattttttcccccccaaaccccccccttttttccccccccttttttttgggttggggggggggggggggggggggttttttttttttttttttaggggggggggccccaagggaaaaaaacccgggggtgggca

SEQ ID NO: 490860 - DNA, 220 bp, Homo sapiens
  misc_feature (85)..(85): n is a, c, g, or t
cgatgtcttgagaaaaaggacagaatgaggatcagaagcatgatctttctgagtttctgtccttgctgggagacatagccacagncatttaggtacctaaatggctgtatggctgttgctgctctgccaaggcttgctgaaggcgcatccacttccgaaaggagctggtgaatgctcagtgtgcgaaatttattgatgaacagccatacagccatttagg

SEQ ID NO: 490861 - DNA, 1320 bp, Homo sapiens
  misc_feature (492)..(492): n is a, c, g, or t
  misc_feature (591)..(591): n is a, c, g, or t
  misc_feature (763)..(763): n is a, c, g, or t
  misc_feature (1320)..(1320): n is a, c, g, or t
ctggcccgtctgaggcgctccgacttccagtaggagcgctgtgctcgtggagaagacgcggggactcggcgactctgcactcgcgactctcatgttcgatgagcctgcgtgggccaaggcggccccagtcgtcgcgggccttggtgcccgtagtctcggcgacctcctgctcctggcggtgcttcctcggcagataacaaaggagactccaaagcggccggtcgagtcgtctattggtccaacagtgtaactcgtactccctaacacgtgacttgactattattgttctgcctacttaccgcaccaaactggtatgtataatatctgagatgcttagtgaggaggacgacgtacatgaagaagatagtgcctccatatacatgggtcatccaatttgactcagatggcgctgcttgctgtaacttagcgggaaaggaagacgcggacatgtacatgtacaattgctgaagagaagccagtggtaccaccctnctggcacgtgtaaattctgaaaggaaacgcaagctatgtacaagtgataagtacactaacaatgccacagcaagaaccacgcgcatccattgcttggcncacgatggacagtcctcgcagtcgaaagcagtggagtcacagaacgcaataagtaggggacacagtgaccccaaaaagacgagtagcccgccggtaattgaaatccccagtggctccgaggggacacttgagaactgagactgaattgtaccctaatcaccagggttccccnaaaaacgcacctgtgcaaaaggggttaaggtagcatacgaagagtgcagtccacgcaagaagcaacaggccccctggggttcccacattcccccgtagaaacccccactacaataccattaaggcctgcaaagcagttgggcgagaacccgggacaacaaggaaataaggcagaaaagatgataaggaacaagggttttcaagacccacacttccagggttgccaagacaccaggggccccaccaagactagaagggccacccaaacaagaaagaagaacaagaaggaaggtactcactaggtttcccaaggagacaggaaacaggcacaattgaagcagcatccgagagacagagggcgccttttagcggaagcccccgacaattgggcaacaaagcgtgaattgtgaatatgggggccccgaatttaacggcataacctcaaagtgaaaccaggtgttgtacatcaaggaggcccaacgcaggtggcatggaaacaggcgatactcatcccaaggaaagaaccctagaggagatataagtacatacaacacaacn

SEQ ID NO: 490862 - DNA, 993 bp, Homo sapiens
  misc_feature (640)..(641): n is a, c, g, or t
  misc_feature (678)..(678): n is a, c, g, or t
  misc_feature (744)..(745): n is a, c, g, or t
ggcgacacctttgggcgtgcttcctggtgatgggacagggtcttgtgtttaatgccaatacatgtgccagctggtgcagagacataaaaggacacaaccaatcactagaagatgcctgggacctcaaaccagaaagtaggaaggctctgggcggtagtcatccagtgttcaaggtgcttcaacaccagtgtacttcatttctaccaagcgatccgtccttatcgaccgactatacttgatacatttggacaagctctgttgtacgagcgcatcttttccatgtgtgtggatagccgccagcgtcttgccagatcacttttctccagagaatgcaaatgacgacggccaaggaaacatgcctaacattggtttgggcgaagattgcctccatcagggaactcattccgagggataacacgtggaggctatccatcctgaaatgtaacagattcctctccaaaacgggaatacacattatttgcctgccccggttgactatgtcatgatccgagggatcggagacccactagtgtcggtgtatgcccgtgcctacctgtgccgggtgggaatggaagtggccccacatctcaaagaaaccctaaataagaacttttttgacttcctccttacgtcaaacagnntcatggggatacggtccagaacagctggtggtccaanggagtggagctcccatcttacctccccttgtacccgctgcatggactggatcttccagtgcatctnnctaccatgcccccgaggctctgctgaccgagatgatggaaaggtgtaagaaactaggaaagcaagtgcccttgcctgggtctgaaagtttctcgtgccatgtcgtgcccttccccgggctgcagttcactcgccacaaggtctatggatttcattggcatgattaaagagtgtgatgaatctggtttccccaagcatcttctttttcgagtcactgggcgactttacaaaccctttgcgcccttgccg

SEQ ID NO: 490863 - DNA, 182 bp, Homo sapiens
cacgaagggggatggacacatccatgggggatggacacgccaagggggatggacacacgaagggggatggacacacaaaaggggatggacacactaaaggggatggacacacgaaaggggatggacacacgaaagggtatggacacacaaacggggatggacacacgaaaggggatggacac

SEQ ID NO: 490864 - DNA, 145 bp, Homo sapiens
catcccccctctccgggggagcaccgagtggggacggcggcggggggagaagggtcggggcggcaggggccggcggcggcgactctggacgcgagccgggcccttcccgtggatcaccacacagatgcggcgggcgtcgcggccg

SEQ ID NO: 490865 - DNA, 1143 bp, Homo sapiens
gagtagcagcggggatagcccggggcccggtcttcggtcaagggtatacgagtagctgcagctcccctgctagaaccaccagctggcaagcctccttcctagaggactgcgaacgtcatccctggcgagatcggggcgcagcttaagctgctgcctatgaatgcatcagatacggggagctacagaccatcatccgtggagcaagtaagccgagagcggaaggggaaagggaagtggagggtcttgcaggctgtggagcggggattggaagtaaaaggggctagagagacagtgttctttggacttggaaaacttttggagattggggtaagaccgtgtaattggggtgtgatgtgtagtggtgtgtagagtagtggtgtgtagtgtgagttgtgataagattcggagaaggagaagcggttctactcaaaagaagtagcgggggatgattctcaaaagtccaactgtggggtggaaggacagagaacgacgttgaggaggtagatcctgagagcgcctccttgctcggtctacttcaccggagggaagtaagaagacccctcactgtagggcaccactagaccccaggtgcgatagatagaaaccatccccgtactaactcacttagttgtggcggagcacggtggcggttggctaccgaacgttcggtcataaacgccttaatgacacaccaaggaaagcggtggattatcttactacccaaaagcgtttgatggccaatacacacgaaccacacatccaaccatcacggggctaaaacgacacaaccaggcaaagacacgccgcaaaaacagaaaagcaagagcacagacgctctcaaacccagggggcccgcagaagccccaaagaggagcttaagagaagacaaccgaggaagaaaagaaaagaggcccaaagaaggacaccgagacgaacgaaggggtgaccgagtaagccagtggagaagaacaaagtgcccaccacatacctacaaacgttcgccgcaggacaccacagcagcacagcagacaacgaggtaatcacgcgagggcagcacataaaagcgccaccccacgggggcacaaccaaaaccacacaaaaacaccgaggggcacacgaaaccaggcaggaaaccaggggccc

SEQ ID NO: 490866 - DNA, 558 bp, Homo sapiens
gcacgagcccaatttttgaatttggttcttaattctgctatggtattcctctttccattcccagaccttaccaacaaaagcttctcttccatagtcatgtctagtctttctgttcttagcccagatttgcttctccacaacggactgagtagcaataccagcatggtcgaaacctggcaagaataagacagttttacctttcattctgttatatctgatcaaagaatcttggatggcaatagtcaaagcatgaccaatatgtaaggcaccagtgacatttggtggaggtgctggaatgcaaaatacaccttctggtttaaccttaccatcagcggtaaattcaggttcaaaaacaccagtcttgatccaccagtcataccaagaactttcaacgttagcaggattataagcttttaaagccggatcatccaaggatactaagatttttttctcacctggaacagttttgtcaataaattcagggattggctcaacttccttctttttcttaggtttcttttgagatgcacctgtggtggcagcagcattttttttagc

SEQ ID NO: 490867 - DNA, 1497 bp, Homo sapiens
  misc_feature (1496)..(1496): n is a, c, g, or t
tacgggtttaaaaaaagggtgacattggcttatatatacatattgggacaggggtggggccgtgcaagtgaggggggtcagggggtgcctcaggggagatgtggggtgggcttggtggaagattgatgtgacaagaaagggctgtgagaagagaaagggggggtgggattagagaagggcccagggcgccaaggggtgctacccacaggtgtcccggctctcggggagaagggagacacgcctaggaggagaagggaggctcctgggcacagccaatacctagggccacacaactcaatataacaagaacatcctggagaaaacatacaaacgcgtgcgaaccaaatacacagggtggggtggctccacagtaacctacacaacacaaggggcggggcccaaggagagcccccacaggggggcgcacataaacgggggggacccctagcgggagaacacgggccacggataaagtaccagagagatcacaaagggaagagctatataaaggagaaccaccacgaggtccatgggcggcgagcaggaggcgtcgcagcttatataaccccccaatcctctattaccacagcacaaaaaccttacccgcgggggacaacacaccacggcaaaaatcaccggggggcacacctgcgatagagaccacgccgacaaccaaccaccacgagccaaaggggcgcgcgaggcgaaaattattgcggggcccaatgtatcgagggcacgctcctgacaacagcgaagcggccccgaggaaagcgcaccatgagcggccctagggacacgccggcgccataaaaacaacctcctggagagacccccgcccgcgacggcaggcccggtcccccgggcaagaccccctcatcccctcacaagggaggaaaccacaacctacatcctcagaggggcactcaaacagggcaacgcaggcagccggcgaaacaaccgccgggccaccctcacacggctggccccacggggaacccaagagcggagcaaccacgagacccccacaggaatccctgtctgcaccacacaggggggacacacctcgggcgggaaccccccacaaaacgagggccgccgaataaaatgccgacaaaccgcagggtaacccggcaagtaaaaaaatccgccgcacacaaaaagcaacaacaaaaagaagagcgacgaacgacacagcgcacgacggaacaaagaggcgggccaacacacataagaacaacaaacacgcgggagcgacacagaccgaacaaggacgcgaaaaaaaccacggacaccagcagagaaagaccagacgacacgacagcagccacgagcaagctaaagacgcgaggacagagcgagagcaacaccaagcaacgcgagcagccaaacagcgaggaagcgagacagaacacagagcagacgggcagagcgaaggaacagagcaagcgagaggcagaagaagactggcgacgaacacgaaccagcgctccagna

SEQ ID NO: 490868 - DNA, 303 bp, Homo sapiens
ttttgtcttttaatttaagccttggtggagcccttgtgatgaatattaaatacatacattttgggctgggtgtggtgcctctagcctataatcccagcactttgggaggccgaggcaggcgaatcgtgaggtcaggagatcgagaccatcctgcctaacacggtgaaacctcgtctctactaaaaatacaaaaaaattagccgggcgtggtggcgggtggctatagtcccggctgctcgggaggctgaggcaggagaatggcatgaacccgggaggtggagcttgcagtgagctgagattgcg

SEQ ID NO: 490869 - DNA, 228 bp, Homo sapiens
ggtcgaccaaaaccaagatgaagagacgagctgtatgtggtctggactgtgggttctggattgagacagtgggtggcgggtcctggacgttccaatcgcctttccgctgtaagggtaagttcggcattcggagacttgagggatttgaaggaccattggcggctctctacttctttaggaattcctgggctattataaatggggttatttattgtaaaaaaaaagtcg

SEQ ID NO: 490870 - DNA, 886 bp, Homo sapiens
  misc_feature (67)..(68): n is a, c, g, or t
  misc_feature (82)..(82): n is a, c, g, or t
  misc_feature (99)..(99): n is a, c, g, or t
  misc_feature (101)..(101): n is a, c, g, or t
  misc_feature (115)..(115): n is a, c, g, or t
  misc_feature (118)..(118): n is a, c, g, or t
  misc_feature (129)..(129): n is a, c, g, or t
  misc_feature (138)..(138): n is a, c, g, or t
  misc_feature (182)..(182): n is a, c, g, or t
  misc_feature (188)..(188): n is a, c, g, or t
  misc_feature (193)..(193): n is a, c, g, or t
  misc_feature (207)..(207): n is a, c, g, or t
  misc_feature (210)..(210): n is a, c, g, or t
  misc_feature (213)..(214): n is a, c, g, or t
  misc_feature (217)..(217): n is a, c, g, or t
  misc_feature (219)..(219): n is a, c, g, or t
  misc_feature (222)..(222): n is a, c, g, or t
  misc_feature (254)..(254): n is a, c, g, or t
  misc_feature (274)..(274): n is a, c, g, or t
  misc_feature (441)..(441): n is a, c, g, or t
  misc_feature (500)..(500): n is a, c, g, or t
  misc_feature (523)..(523): n is a, c, g, or t
  misc_feature (543)..(543): n is a, c, g, or t
  misc_feature (548)..(548): n is a, c, g, or t
  misc_feature (576)..(576): n is a, c, g, or t
  misc_feature (590)..(590): n is a, c, g, or t
  misc_feature (604)..(605): n is a, c, g, or t
  misc_feature (637)..(637): n is a, c, g, or t
ggctcaccccaggaaggagggaggccaccgagctactgggccgacggactcgcacactagttcctgnngctggtgccaggcnaggtgacacctcctgcngnccccagcatgcggngcnggcgcaggccncaccgttanattggcctggtgctggcggtgtcatgggccatggagctcaagcncacagnaccanccatcttcactggncgncgnnttngnagntagcgtgggacgtgcccacacaggactgtggnccacgcctcaaggtgccacnggacctgaatgcctttgatgtgcaggcctcacctaatgagggttttgtgaaccagaatattaccatcttctaccgcgaccgtctaggcctgtatccacgcttcgattctgccggaaggtctgtgcatggtggtgtgccacagaatgtcagcctttgggcacaccggnatgatgctgcagaaacgtgtggagcactacattcggacacaggagtctgcggggctggnggtcatcgactgggaggactggngacctgtgtgggtgcgcaantggcnggacaaagatgtgtatcgccggttatcncgccagctagtggncagtcgtcaccctnnactggctccagaccgatagtcaaacaggcacnatatgagtttgagttcgcagcagagacagttcatgctggtagacacatgcggttaatcgtcataggcacgtgcgggcccggtgaccctctggggcttctaccttctttcctgactgctacaatcatgattatgtgcaagaactgggagagctactcgaggtccgctgccctgatgttgacgcgtgagaccgcaatgaccatgtctggcctgtgctgtgggctgagagcacggcctcttcccgtctgtct

SEQ ID NO: 490871 - DNA, 249 bp, Homo sapiens
agatgcggtgcaggagctgccactgctgcaaggagacaccgatccgtttgtagaccatctgcagccagtgaagcagcacagagagcaggcaggggtaggcctccgagtactgcagctgcttgtggatcaactcatacatctggaaagcactctcggggtcgatgtggaccatgacaaacctcctgcctagctccaggtcatgctcattacgcaccatctcgaagaagtctaaatgtttgtccaggatgg

SEQ ID NO: 490872 - DNA, 1049 bp, Homo sapiens
  misc_feature (506)..(506): n is a, c, g, or t
ggtggtttcttcttctctgcaatccctcttgcactggccaatcggatcattctccaacacagttcttacagtggctactacatcaggtgcactctcttcttcctggcaggaatattttagaaggctttaccaagaatgtggaattacactatggctttaagaatttggccagacacgaggtcagaggaggacagagcaaacttcagaaatagacaaggtcttactctgctacccaagctggagtgcaatggtatgatcatagcttactacagcattgaacttctggattcaagagattcccccacgttggccacccaagtagctggaactacaggcatgtaccatcacacccagcttatatatgtatataattatttttggacatacaggatctcactacattgcccaagctgctctaaaactcctggcctcaagatgatccttctgcttctgcctctcaaagtgctgggattataggcataaaccaccatgctcagtccaatgtnttaatatcagatactctttagtatctttaagattttatacactgtgtatgcattagttaattattaaattttaaagaagtacaattctatggataacaagtatatccccatattaccaaattaaagagacaaaaggattagccagaaccatattaacagaaaccgttgacgtcaagtaacacacacagaaacagtccacgcaggagaaagagccatggtcggaggcggcgactcggcccgcgcagaagagcgttagaaccgctagagtatataagcagccggaggccacacaccaaagacaacagcaagcaagatgggcaacaaaagcgaggctgccaccagaggaaaactcgcgtgaacacaacacaaaaagggcgaagaagaaataaagaacacacacaagatataagaacacagcgcgggggaggacacccaggagcgggggtccgtcaaaaacacaccgaggagagagccgcgtagacgccatcgacggcggccatccacaacaaggagaccacaaggcgcgccagatataaataatgc

SEQ ID NO: 490873 - DNA, 113 bp, Homo sapiens
atacactattgtgcaaaaaaaagttttcactcaattgaaattgctagtgttaactgaattttgtctagactccatttctgttgatgaaataaagacatatcattatgcattgt

SEQ ID NO: 490874 - DNA, 552 bp, Homo sapiens
gacgccccggccccgcgtgtggctatccagtcagttcgctgctattcccatgggtcacaggagacagatgaggagtttgatgctcgctgggtaacatacttcaacaagccagatatagatgcctgggaattgcgtaaagggataaacacacttgttacctatgatatggttccagagcccaaaatcattgatgctgctttgcgggcatgcagacggttaaatgattttgctagtacagttcgtatcctagaggttgttaaggacaaagcaggacctcataaggaaatctacccctatgtcatccaggaacttagaccaactttaaatgaactgggaatctccactccggaggaactgggccttgacaaagtgtaaaccgcatggatgggcttccccaaggatttattgacattgctacttgagtgtgaacagttacctggaaatactgatgataacatattaccttatttgaacaagttttcctttattgagtaccaagccatgtaatggtaacttggactttaataaaagggaaatgagtttgaactgaaa

SEQ ID NO: 490875 - DNA, 440 bp, Homo sapiens
gacgccccggccccgcgtgtggctatccagtcagttcgctgctattcccatgggtcacaggagacagatgaggagtttgatgctcgctgggtaacatacttcaacaagccagatatagatgcctgggaattgcgtaaagggataaacacacttgttacctatgatatggttccagagcccaaaatcattgatgctgctttgcgggcatgcagacggttaaatgattttgctagtacagttcgtatcctagaggttgttaaggacaaagcaggacctccttccccaaggatttattgacattgctacttgagtgtgaacagttacctggaaatactgatgataacatattaccttatttgaacaagttttcctttattgagtaccaagccatgtaatggtaacttggactttaataaaagggaaatgagtttgaactgaaa

SEQ ID NO: 490876 - DNA, 232 bp, Homo sapiens
gagagagagagagagagagagagagagagagagagagagagagagagagagagagagagagagagagagcttccccaaggatttattgacattgctacttgagtgtgaacagttacctggaaatactgatgataacatattaccttatttgaacaagttttcctttattgagtaccaagccatgtaatggtaacttggactttaataaaagggaaatgagtttgaactgaaa

SEQ ID NO: 490877 - DNA, 225 bp, Homo sapiens
  misc_feature (2)..(2): n is a, c, g, or t
angatctgtcgaactggagcggccttgagcagcggtgaaggggccgctgcgggaggacaccgggccaagagttgtagggcttgagggccggcccgcaagagccactggagatcatctctggctcagctctgtctcttgcttggagatgctggactaaaggcactgcctttgctcacccagtaggtcttcagagtcacttcagccaacagcttcctcttcctcagc

SEQ ID NO: 490878 - DNA, 222 bp, Homo sapiens
  misc_feature (53)..(53): n is a, c, g, or t
atcatttatattcatttaccgttctttaatacgaacccaatctaccccctgantagggacttccccaaggatttattgacattgctacttgagtgtgaacagttacctggaaatactgatgataacatattaccttatttgaacaagttttcctttattgagtaccaagccatgtaatggtaacttggactttaataaaagggaaatgagtttgaactgaaa

SEQ ID NO: 490879 - DNA, 1038 bp, Homo sapiens
gacgccccggccccgcgtgtggctatccagtcagttcgctgctattcccatgggtcacaggagacagatgaggagtttgatgctcgctgggtaacatacttcaacaagccagatatagatgcctgggaattgcgtaaagggataaacacacttgttacctatgatatggttccagagcccaaaatcattgatgctgctttgcgggcatgcagacggttaaatgattttgctagtacagttcgtatcctagaggttgttaaggacaaagcaggacctcataaggaaatctacccctatgtcatccaggaacttagaccaactttaaatgaactgggaatctccactccggaggaactgggccttgacaaagtgtaaaccgcatggatgggcttccccaaggatttattgacattgctacttgagtgtgaacagttacctggaaatactgatgataacatattaccttatttgaacaagttttcctttattgagtaccaagccatgtaatggtaacttggactttaataaaagggaaatgagtttgaactgaaattaggtatttgtttcatgtgtttgcattaataagcagaaaattaagtgctgtattggtttcatggttttgctgccctcttacatgctgagagaactgtgttaattctctggaaaccatctgacatgaaaatcagcttcattaatatgtttgggtgccctagcttgtaaattagctgaaggctagaagtcatttatatagaattttcttgttgacaccctaggcttaggggactggttgtctgtggggatagatcaaattgtgtacctttccaaaacaggttttaatgatgtttaaaagtggtcactgagatagtcttgaggatgtgctatgcagtagccaagccctcttacggtgtgttcctctcttagtgcccctttcctttcctacctgttcttcccttgcagtggtgtattagccttggacattaaaacatttgctttgtaaatttggaggcattctgattaaacagctgagtaaaacaaaaa

SEQ ID NO: 490880 - DNA, 732 bp, Homo sapiens
cttgggcatcctgtaaatgtaggtgggaaagtaaaatattatcagtggactggaataaatcttatcaccacaaaaacatgttcctaatgctactgcgtcttttcagtttgttcttaaacctgagggttaatcactcttgtgacagacttggtgctgctacacactttttggtatagctatattagtaagaactcttggttccaggtctgaaacccagtcctaataaactggcttaggcaacaaagggcatttattgattcatgtaactgagaagttttaagtagtttggcttcagtcttaggcaggtcttcattacgtggtgataaccacattgaatctttcattctatccctttaccaaccagcagcaattctctttccagtagtgttcataaaatccaagtactgagtctcaatggaataatgtagatcacatgctcatttctgaaccaataactctggccaatgggatgaacaggggactgaccagaacctggagtcacattcttatatttgatattctaacaggcaaggaggaggaagaacgttctctaaagaaaaaagataggtggtattaccaaggacacggtttcatgtgaaatttgtttgaggaaacaatggggcacttgtcctgcaaaggtttctccatggttattcaataacttgggatcacttactttcgcaccagggggatttaaaaaatggcccctggtttcaacttacaactatgtgc

SEQ ID NO: 490881 - DNA, 828 bp, Homo sapiens
gacgccccggccccgcgtgtggctatccagtcagttcgctgctattcccatgggtcacaggagacagatgaggagtttgatgctcgctgggtaacatacttcaacaagccagatatagatgcctgggaattgcgtaaagggataaacacacttgttacctatgatatggttccagagcccaaaatcattgatgctgctttgcgggcatgcagacggttaaatgattttgctagtacagttcgtatcctagaggttgttaaggacaaagcaggacctcataaggaaatctacccctatgtcatccaggaacttagaccaactttaaatgaactgggaatctccactccggaggaactgggccttgacaaagtgtaaaccgcatggatgggcttccccaaggatttattgacattgctacttgagtgtgaacagttacctggaaatactgatgataacatattaccttatttgaacaagttttcctttattgagtaccaagccatgtaatggtaacttggactttaataaaagggaaatgagtttgaactgaaattaggtatttgtttcatgtgtttgcattaataagcagaaaattaagtgctgtattggtttcatggttttgctgccctcttacatgctgagagaactgtgttaattctctggaaaccatctgacatgaaaatcagcttcattaatatgtttgggtgccctagcttgtaaattagctgaaggctagaagtcatttatatagaattttcttgttgacaccctaggcttaggggactggttgtctgtggggataggccgaaacttggggagcctctagat

SEQ ID NO: 490882 - DNA, 1079 bp, Homo sapiens
  misc_feature (559)..(559): n is a, c, g, or t
  misc_feature (572)..(572): n is a, c, g, or t
gacgccccggccccgcgtgtggctatccagtcagttcgctgctattcccatgggtcacaggagacagatgaggagtttgatgctcgctgggtaacatacttcaacaagccagatatagatgcctgggaattgcgtaaagggataaacacacttgttacctatgatatggttccagagcccaaaatcattgatgctgctttgcgggcatgcagacggttaaatgattttgctagtacagttcgtatcctagaggttgttaaggacaaagcaggacctcataaggaaatctacccctatgtcatccaggaacttagaccaactttaaatgaactgggaatctccactccggaggaactgggccttgacaaagtgtaaaccgcatggatgggcttccccaaggatttattgacattgctacttgagtgtgaacagttacctggaaatactgatgataacatattaccttatttgaacaagttttcctttattgagtaccaagccatgtaatggtaacttggactttaataaaagggaaatgagtttgaactgaaaaaaaaanaaaaaaaaaaaanaaaaaattgggggggggcctccggcgccctcgagaaaaggtttctaaagaaccaactcgcggttggggcgcgcgcggggcgcccaagagagggaacgggagacactgtgggccaaaagcgcgtggtgccccaagggaaacccgggcgccaaagagaaaaggggcggggagtattatctacacacacaatataaaaaaagaggcgcgcgggggggcgaccaacgcgagaggcgttcgcggaaacaaaattccccgagaaggtggagcacgcgagagaggggccacacaaaacagagggggagcaccccactatcacacgaggggggagttcccccacggggaggaacccgcgaaaaacattcaaacaatataacggccccggggcgtggtggggagatacaaaccaaagaacgacaccacaagcaagacaacctagagacagaagccaaaagaacacgaaaaacacacaaagaacacagaacgacacacgaaaaaaaccaacgacgcc

SEQ ID NO: 490883 - DNA, 652 bp, Homo sapiens
  misc_feature (559)..(559): n is a, c, g, or t
  misc_feature (572)..(572): n is a, c, g, or t
  misc_feature (621)..(621): n is a, c, g, or t
  misc_feature (638)..(638): n is a, c, g, or t
  misc_feature (648)..(648): n is a, c, g, or t
gacgccccggccccgcgtgtggctatccagtcagttcgctgctattcccatgggtcacaggagacagatgaggagtttgatgctcgctgggtaacatacttcaacaagccagatatagatgcctgggaattgcgtaaagggataaacacacttgttacctatgatatggttccagagcccaaaatcattgatgctgctttgcgggcatgcagacggttaaatgattttgctagtacagttcgtatcctagaggttgttaaggacaaagcaggacctcataaggaaatctacccctatgtcatccaggaacttagaccaactttaaatgaactgggaatctccactccggaggaactgggccttgacaaagtgtaaaccgcatggatgggcttccccaaggatttattgacattgctacttgagtgtgaacagttacctggaaatactgatgataacatattaccttatttgaacaagttttcctttattgagtaccaagccatgtaatggtaacttggactttaataaaagggaaatgagtttgaactgaaaaaaaaanaaaaaaaaaaaanaaaaaaaaaaaaaaaaaaaaaaaaaaaaaaaaaaaaaaaaaaaaaaaanaaaaaaaacaaaaaaanacaacaaaanaaca

SEQ ID NO: 490884 - DNA, 956 bp, Homo sapiens
  misc_feature (35)..(35): n is a, c, g, or t
  misc_feature (56)..(56): n is a, c, g, or t
ggtgattgccagtcctccggagtggagatcccagntcatttaaagtggtctaagtnccggatgacataggggtagatttccttatggttccagagcccaaaatcattgatgctgctttgcgggcatgcagacggttaaatgattttgctagtacagttcgtatcctagaggttgttaaggacaaagcaggacctcataaggaaatctacccctatgtcatccaggaacttagaccaactttaaatgaactgggaatctccactccggaggaactgggccttgacaaagtgtaaaccgcatggatgggcttccccaaggatttattgacattgctacttgagtgtgaacagttacctggaaatactgatgataacatattaccttatttgaacaagttttcctttattgagtaccaagccatgtaatggtaacttggactttaataaaagggaaatgagtttgaactgaaattaggtatttgtttcatgtgtttgcattaataagcagaaaattaagtgctgtattggtttcatggttttgctgccctcttacatgctgagagaactgtgttaattctctggaaaccatctgacatgaaaatcagcttcattaatatgtttgggtgccctagcttgtaaattagctgaaggctagaagtcatttatatagaattttcttgttgacaccctaggcttaggggactggttgtctgtggggatagatcaaattgtgtacctttccaaaacaggttttaatgatgtttaaaagtggtcactgagatagtcttgaggatgtgctatgcagtagccaagccctcttacggtgtgttcctctcttagtgcccctttcctttcctacctgttcttcccttgcagtggtgtattagccttggacattaaaacatttgctttgtaaatttggaggcattctgattaaacagctgagtaaaacaaaaa

SEQ ID NO: 490885 - DNA, 284 bp, Homo sapiens
tctagatccggcgagtgattgtcaaccttagctaacagttggaggcatgcagcagattgtggagtcaggttcacgacagtttgtgcaaaatagtgatctcctgcctcagctactgagtagctatgactataggtgtgcgcatcatgctcagctattttcttcatttttttttaaagcaggcgtccactattttgcccaagctgctcttgaactcctgggctcaggcaatagtggctcaagctcccaaagtggtaggcttacaggtgtgagccattgcagtccgg

SEQ ID NO: 490886 - DNA, 185 bp, Homo sapiens
caccattaccggatgtgcccccactttgcggggcttaaactcatcccccggcacacgggatggaccaccctgattggcaagggggcacgggggttgcccctttcccccgactaacaccggttgcatatttgggctagcttctgggggcacgggttctttaaaagggatatggtggaccctttcgc

SEQ ID NO: 490887 - DNA, 815 bp, Homo sapiens
gtaccaagccatgtaatggtaacttggactttaataaaagggaaatgagttcaaataaggaaatctacccctatgtcatccaggaacttagaccaactttaaatgaactgggaatctccactccggaggaactgggccttgacaaagtgtaaaccgcatggatgggcttccccaaggatttattgacattgctacttgagtgtgaacagttacctggaaatactgatgataacatattaccttatttgaacaagttttcctttattgagtaccaagccatgtaatggtaacttggactttaataaaagggaaatgagtttgaactgaaattaggtatttgtttcatgtgtttgcattaataagcagaaaattaagtgctgtattggtttcatggttttgctgccctcttacatgctgagagaactgtgttaattctctggaaaccatctgacatgaaaatcagcttcattaatatgtttgggtgccctagcttgtaaattagctgaaggctagaagtcatttatatagaattttcttgttgacaccctaggcttaggggactggttgtctgtggggatagatcaaattgtgtacctttccaaaacaggttttaatgatgtttaaaagtggtcactgagatagtcttgaggatgtgctatgcagtagccaagccctcttacggtgtgttcctctcttagtgcccctttcctttcctacctgttcttcccttgcagtggtgtattagccttggacattaaaacatttgctttgtaaatttggaggcattctgattaaacagctgagtaaaacaaaaa

SEQ ID NO: 490888 - DNA, 348 bp, Homo sapiens
agggagatggggtacgtggagttgatggagatggtgtaggtggagttgagggaactgagcatggcacagtcacatcctggctgggattcgtgtagtgcttcacgtggcatgtcacgaaacttgacggctaggcactgtgtgaccggcaggatcagctgactgctcgtagtgtacaggtccccggaggcatcctggctgggtgtgaagtctctggcgggtcacgccctagtccgctctcgctccagatcacactgagtggctcctaggagaagaagccctggaccaggcaggcgatgaccacgttcccatctggctgggtggttgcaagaaagtcagcaggaagacctt

SEQ ID NO: 490889 - DNA, 401 bp, Homo sapiens
gatgaacttgaactcgcgaatccggatcgtctaccacggaccccgccgcggtagtataaggacctattacatacaaaaactcttaggtgggaaattgaggtatcaatttatatatcacagagggtaacacattttaagagcattttcagaatgaaaagcagggatgaaaaagattagggaaggggaagggtgggctttctaacggagagtaaaacccagcttttttttaagggaggtaaaatgcattatctgtcaagattttaagattttccatgaaatggctgaaaaacaagattcttcattgaagggaggatctcccaatgggaaactgggtctgaaaagagcctcgggcttttttgttttgtgtgattgtatacccccgccccccccccctcctgttt

SEQ ID NO: 490890 - DNA, 220 bp, Homo sapiens
gatgccgtgatctatgttctccgctgatgacctgtggtgcagcatctccttcaacctggcagtgtctatcaccatcatcatttgcttcttctacccttacatggagggcgcgtccacagttcgtgctggactcccctctcatctcatttgctctttggccggcatgtgcttggacctggcagttacttggccatcggaagagattctcccaggcaagctg

SEQ ID NO: 490891 - DNA, 670 bp, Homo sapiens
tttttccataaaggtctatttcattatgggtgggtagcgcatttaacagttaaactacttttaaataatgtataggtgactgcaggactgcagcatgtggtaactagaataaccaactagaaaccagcttaacaaagaacgtgctcgtaaattactttaaaattacgagcctcttgtggtgtgaagattcactccctttgtgctttgtgactcattcttatctttgcgcgggaaaacaacgccttgcctgcttggtctccacaatgtggaacattattatttaaaggcccaaattctctctgatgtatccatttccacacagagggttctctttctacagcgtgagagttaaagccttccaacttccagtggcagaagcccaaccctttggtggccctccaagcatttaagtgctcatgtcccattcttacgcaagaagcacgacgcagtggtaacgccttcagacaccatggccgtcagaagctcctgagtttatagcctaactccgatttacagctacgagttcgttgacttctggcagcaaagtgaaagcagttgggcatccaagctgatattctacgctgcaatgccaaaaacgaggtgcagttggtacctgatgtccaacgcaaggttcactgacgtgtcaagatcttcacaaactttctgatca

SEQ ID NO: 490892 - DNA, 101 bp, Homo sapiens
attagctttgattgaatgtgtaactagaccagaggcattcccacccccacccccacccctgttcatctccagccaggctgacagagtgagacttcctagta

SEQ ID NO: 490893 - DNA, 217 bp, Homo sapiens
ggaagaagggcgaaggggaagcaggcaccttcattcacatggtggagcatgaggaagaaagagaagagggacgatgccacatacttttaaaaaccagatctcccgagaactcattcactatcatgagaacagcaaggggcagtccacctacatgattcagtcacctccttcaggcccgttgtccatgctggggagtacaattcacatgaggatttgg

SEQ ID NO: 490894 - DNA, 782 bp, Homo sapiens
  misc_feature (13)..(13): n is a, c, g, or t
  misc_feature (62)..(62): n is a, c, g, or t
  misc_feature (69)..(70): n is a, c, g, or t
  misc_feature (103)..(103): n is a, c, g, or t
  misc_feature (113)..(113): n is a, c, g, or t
  misc_feature (118)..(118): n is a, c, g, or t
  misc_feature (130)..(130): n is a, c, g, or t
  misc_feature (154)..(154): n is a, c, g, or t
  misc_feature (195)..(195): n is a, c, g, or t
  misc_feature (242)..(242): n is a, c, g, or t
  misc_feature (430)..(430): n is a, c, g, or t
  misc_feature (436)..(436): n is a, c, g, or t
  misc_feature (457)..(457): n is a, c, g, or t
  misc_feature (479)..(479): n is a, c, g, or t
  misc_feature (501)..(501): n is a, c, g, or t
  misc_feature (517)..(517): n is a, c, g, or t
  misc_feature (526)..(526): n is a, c, g, or t
  misc_feature (554)..(554): n is a, c, g, or t
  misc_feature (560)..(560): n is a, c, g, or t
  misc_feature (593)..(593): n is a, c, g, or t
  misc_feature (695)..(695): n is a, c, g, or t
  misc_feature (767)..(767): n is a, c, g, or t
cgcctcggctcgnagaccggaccgggcagagaggcgccgacatgcctcaacctgccttcacnaaggaanngggaatgaacagaaaagcttaaggcccaaaggncaaggaaagngggcngaggcctagatncagacagggaagccgaaccggaancggaccgtggctcgcgctgtccccgggacacagatcgaacnttagacacacacagataacacgtaagacagccggtggaacgcggganctggggcggcgcgcggactgggggccatggcgtctgtgcaggcgtcccgccgccagtggtgctacctgtgcgacctgcccaagatgccgtgggccatggtgtgggacttcagcgaggccgtgtgtcgcggctgcgtgaacttcgagggcgcggaccgcatcgaactgctcatcgatgccgcccgccanctcaancgcaccaccgtgctccccganggccgctcgcccgggcccccgnccttaagcacccggccaccaangacctggcggcggcancaccagggngccccagctgccgcccccgcaggcccanccccanccgtcagggaccggcggcggcgtgtcgggccangaccgctatgacagggccacatcatcagggcgcctccccctgccctcgcccgccctggagtacactctggggtcccgcctggccaatgggctgggccgtgangaggccgtggctgagggggcgcgaagggccttgcttggctccatgcctggcttgaatgccccctgggctgcntggcagctgcagtgt

SEQ ID NO: 490895 - DNA, 350 bp, Homo sapiens
cccttcataatatcaaaagtagacaaaataatgcaatggaatttgtgttcctcttgcccaggttcaacaatacgaatgcatgcccagcgaggtttcacctgttcccattggatcattttgaagcaaatcccaaatttcatcatttcatccacaagtgtttcagaatgtatttctaagaattctttaaaaaaaaacttaacacaatgcaattatcataccaaatacaacaattccttaacatcattacatttccccaactgtctaagaattttttttaatagtttgtttaaatgagaatccaagtaaggtctatgcgcggcaaatgacggattggtttcttaagctgcttt

SEQ ID NO: 490896 - DNA, 769 bp, Homo sapiens
  misc_feature (24)..(24): n is a, c, g, or t
  misc_feature (64)..(64): n is a, c, g, or t
  misc_feature (68)..(68): n is a, c, g, or t
  misc_feature (78)..(79): n is a, c, g, or t
  misc_feature (81)..(81): n is a, c, g, or t
  misc_feature (83)..(83): n is a, c, g, or t
  misc_feature (85)..(85): n is a, c, g, or t
  misc_feature (92)..(92): n is a, c, g, or t
  misc_feature (131)..(131): n is a, c, g, or t
  misc_feature (138)..(138): n is a, c, g, or t
  misc_feature (163)..(163): n is a, c, g, or t
  misc_feature (176)..(176): n is a, c, g, or t
  misc_feature (181)..(181): n is a, c, g, or t
  misc_feature (185)..(186): n is a, c, g, or t
  misc_feature (198)..(198): n is a, c, g, or t
  misc_feature (216)..(216): n is a, c, g, or t
  misc_feature (219)..(219): n is a, c, g, or t
  misc_feature (296)..(296): n is a, c, g, or t
  misc_feature (355)..(355): n is a, c, g, or t
  misc_feature (364)..(364): n is a, c, g, or t
  misc_feature (367)..(367): n is a, c, g, or t
  misc_feature (377)..(377): n is a, c, g, or t
  misc_feature (496)..(496): n is a, c, g, or t
ttgtttgtgtttttcaatggtccnggcgcagggaatagggactttaataggtaccgcgtttgtntggngtactatatnncncntntgttggngctgggcgcagtggctcgtgcctgttatcccagcacttnggggggnggaagtggggaggtcacttgtggtnaggggtttggggncaggntggnnggcatggtgtgnccgccgcctgttcttgangtncggagcttagccgggcatggtagtgggtgcctgtgatcccagctgctcaggggactgtggcgggagaatcgcttgancccaggaggcagaggttgctgtgtgccaaggtcgtcaccagtgcactccaacctggggntcagtgggngtnctctgtaacnaagatattaaaatgttggggccgggcgcggtagctcacgcctgttttcccagcgctttgggaggcccaggtgggggggtcgcttgggcccatgttggacaacgctgtctcttccaaaanattttagccgggtgtggtggcacacgcctgtggtctccgctaggaggctgaggtgggaggatcacctgagcccaggaagttgaggctgcagcgagctgtgatcgagccactgcactccaggctgggcgacagaatggggcccagtctcaaaaattacaaaataagaaaagtcccattgttcccaagatggtttcccgcctttaccccagatgtgtgaccctgagcaaaaaaacctttctgtacccaactgcctcatctataaaatgggggtaa

SEQ ID NO: 490897 - DNA, 422 bp, Homo sapiens
  misc_feature (396)..(396): n is a, c, g, or t
gaaaccctgattattgttagagagttatttccacgaagagtttgtcaggtagttggagatttgagacccgatgaaaggccgtttctggtaacgtaatcggcttgggtgtgatgtcaacaacgtggggtaggaatctttcagagcattacttagtcggagaccaggaaccttgggcctttaaaggtggtctagcatgagatgtacaggtctcaatatgagtttacaactgagttgacattctgtttgttttatgagaaaccttaagttgcgcattagatgggtggatggattggcatgaccaacgctgtctagtgccaaagtcaatatacttacatagctgggagtttaaatctaagtgtcctcatgtgtaacaagcatattttgaggcgatgctgngtgccacacacgccttggcgcatggg

SEQ ID NO: 490898 - DNA, 835 bp, Homo sapiens
gtggccatgctctgtgcgtttctgtccctgttgggctttttgtgacttgctattggtgtccccggtgcctgttatggggcgtctgctttttacagtgttttgccttggccagggggcgttgccactggccctccttgtggcctctttgtgggagtgagtgcgccctgagtcggtagtgtcatgagttgtgggcttgtctttttcgacgcttttttatggtctgggtttggtagatatgttatccacctttctccactcttcgtgtgagcacttctggggcgcgcttgcccctgggcggatatgagggtgtttttctctttgtctcttgtgatgtcctgagggcacgttgcaccaccacttatattgtgctcgttgttggtggagagtgtgctgtggcgccagaggagaggtgtgtctagggcctgttcgcctttgtccgcctctatctgccttcacggggaggaagtttcttattcttctagcgtttggtgtttccacccttgagggttgttttctgaggagagggcttgggacccagagagtgctgtcactgcttagttatagcccgggccacggaattcctatctataatcccgcttttgttttgtgagagtgtgtttggtccgctattgagttgttttatagatatgtccagtttagaatttccgaaaaacccttttttgttcttgagattacgttttggggtaatattttcaaatgacgagaccgttttgtagacccctgtgagaatacctatgggaagtatataccaattcccagtgtatacccaacgaaggccaattctttaatccaataaagcgccattataaaatga

SEQ ID NO: 490899 - DNA, 132 bp, Homo sapiens
  misc_feature (21)..(23): n is a, c, g, or t
tggggtcgtctagaggatccnnncgtatatgtacagggaaatatataagaagaaaaatatttttacattaaaccttttctaaaaatggtaaatagaaaaataattggttttttatcaagaacaacacttatc

SEQ ID NO: 490900 - DNA, 282 bp, Homo sapiens
  misc_feature (2)..(2): n is a, c, g, or t
  misc_feature (12)..(12): n is a, c, g, or t
  misc_feature (22)..(22): n is a, c, g, or t
  misc_feature (36)..(36): n is a, c, g, or t
  misc_feature (44)..(44): n is a, c, g, or t
  misc_feature (73)..(73): n is a, c, g, or t
  misc_feature (83)..(83): n is a, c, g, or t
  misc_feature (127)..(127): n is a, c, g, or t
  misc_feature (168)..(168): n is a, c, g, or t
  misc_feature (196)..(196): n is a, c, g, or t
  misc_feature (200)..(200): n is a, c, g, or t
  misc_feature (234)..(234): n is a, c, g, or t
  misc_feature (241)..(241): n is a, c, g, or t
  misc_feature (245)..(246): n is a, c, g, or t
  misc_feature (258)..(258): n is a, c, g, or t
  misc_feature (268)..(268): n is a, c, g, or t
cnttcgggtctntcagggttgnaaagaccaagccgnaggaccgngtgtccgttcatagctgatgtctttggcnagaacaccgngggctgttacttgctttgagatggaaggggtttgcatttacgcnggtaaatgtattcatccgtaatttatgtaaggttttttttntacgcgaattctcgattctttgtaaganatgnagaacgaaattttggttttctactgttatgtganaacattncccnncaacacgtcatntgtaaggagnataaaatctcccct

SEQ ID NO: 490901 - DNA, 968 bp, Homo sapiens
  misc_feature (384)..(384): n is a, c, g, or t
gcatgggccatgcatgccgggataacaaagagcccagatgcctcgcgaccccatgcagaagtcctcagcaaaggttaagttgtgtttcatactgctctatctggatagtggagggtgagaagcactcaggacctagctcacacaaataggtaaaatagtgctggttacgcctaggtatgttactgtacagatagtaccactcccctggccatgctataccgagttatcacagaggtcttcgtcgtgttcccaggtcgtaagtaatcgattgcctcgactgcttgaatgaagatgcgtgagtcattattatatttgccgatggatctatacgtagtgatcgacccaaggcttggagtggagtggcccaaatccccaggtcatggnatagcctccacagctcactgagtgcaagccagtgctcccgcctcgagcctccctgagtaggtgggtacttacaggcagcgcaccaccacggcccctgactacatgtctttccatcagtttcttggtagagacaagcaactcactaggttacccaggactgagtggatatgaactcctgagcttaatcacgttctcgtcctgccttgtgccgtcccaaaggtgctagtgattacatgacactgagccagttcacgcttggtcctgcgtgagtcaatctacaggtgtcagtcctatgctgtagacggatgccgcttattttttgccaaggccaaaaatccctagtccattttttctgcttccccttcaggagtctgagtacatccgtctcaagccatccctgttgctactggttggtgctctgtggtggggagtggggggggggctggaagggcatggtttgttcggaagtctgccttagagggctgggtcctggggggcccttgaggcctttacctggcggtggagcccctcgtgggttgccctcttgggggtgggggacgggtcccggggcctggggcccctgg

SEQ ID NO: 490902 - DNA, 771 bp, Homo sapiens
gggagctgatggctgcgccgagggcggggcggggtgcaggcctggagccttcgggcgatggcgggctttggggggcattcgctggtgggaggagaccccgtttgagccctgacctccggtgccctgcttgacgtcaggaacttctgacccccgggcccgagtgacttatgggacccccagtctctgggcccggttgtctgttggggtcacttgaaccccgtagctatgcctgacagtcgtggagaccccgggtccccgggcacaactgactgcgagtgagcccagataccaggacccgggaggcctcagagaactctggaacccgttcgcgcgcgtgtgctggcggtggcgctagggctgctcgggcggggcagtgctagtggttcgtacgtgggggcgggaggtcggggtcctccggccgtcctcgccgccgtccctagcccgacgaccgtttctccccggagtcagtacaatcttcatcgcaagatgtcggtggaagaagacggctacctgccgtcggtctatatcgagatccctggaccggaacccttttctttgggcctgcgaggtccctatctcgaagggctcaggattcgtggtggcttgccgatgggctcattgtcaccaaggcccatgtggtggctgatcggcgcagaagtccgtgttgagactgctaaggcggcgacacgtatgaggccgtggtcacagctgtgggatcccgtggcagacattcgcaacgctgagggattcagaactaaggagcctctccca

SEQ ID NO: 490903 - DNA, 330 bp, Homo sapiens
  misc_feature (62)..(62): n is a, c, g, or t
  misc_feature (72)..(72): n is a, c, g, or t
  misc_feature (89)..(89): n is a, c, g, or t
  misc_feature (97)..(97): n is a, c, g, or t
  misc_feature (137)..(137): n is a, c, g, or t
  misc_feature (149)..(149): n is a, c, g, or t
  misc_feature (157)..(157): n is a, c, g, or t
  misc_feature (170)..(170): n is a, c, g, or t
  misc_feature (192)..(192): n is a, c, g, or t
  misc_feature (202)..(202): n is a, c, g, or t
  misc_feature (206)..(206): n is a, c, g, or t
  misc_feature (220)..(220): n is a, c, g, or t
  misc_feature (224)..(224): n is a, c, g, or t
  misc_feature (238)..(238): n is a, c, g, or t
  misc_feature (244)..(244): n is a, c, g, or t
  misc_feature (250)..(250): n is a, c, g, or t
  misc_feature (256)..(256): n is a, c, g, or t
  misc_feature (259)..(259): n is a, c, g, or t
  misc_feature (265)..(266): n is a, c, g, or t
  misc_feature (270)..(270): n is a, c, g, or t
  misc_feature (277)..(277): n is a, c, g, or t
  misc_feature (303)..(303): n is a, c, g, or t
  misc_feature (307)..(309): n is a, c, g, or t
  misc_feature (312)..(312): n is a, c, g, or t
ggggggggggtcccccttgggaatttgggaatttggttttttctcccttgcttccttcagcnccatgtgatntttgggcacacaggggnatcctttngccctcccccagaagcagcagcagcctcagggatgagggnggtcctcagtgngggccccngcccagttttganccttccagccatcagaatttgngccaaatcancctnttcctttataaagncccngcctcgggtttttngtcagngcaacncaaaanggnctcggnngggntcaaatngggtttcccccccccccccaaaaaantttnnnttnaaatcctaacccccagca

SEQ ID NO: 490904 - DNA, 466 bp, Homo sapiens
agcttacccttactgtcaccttcactgtgcattcccttctcttacagatgccattaattttattaccacaattgttaacataagaccatctggtatagcccaaacaagacaccactttcatttttatattctatgtattaattgctatgtattaattgtcgctcccagtactttaagctataacaattgtgctaattaacatgttttctttgatcaagtgagagcgaagactcagtttcatatcaatatttattctgattcttagaaattacaaaaggatttattctaattttatgtagatttggaaaatttttgtttagcatattattcaggaaccaagataatcctttggctatatagaaataacatgagcaacaccatcagttggatttgtaggatatattgtatgagcatatcatacatttgccatagaaacagtcctagacacaatagcatacttcccatc

SEQ ID NO: 490905 - DNA, 828 bp, Homo sapiens
gatacagaaaaaagtaatggaactggagagtgaaaatctaaacctccagtccaaaatgaaacctcttatctttaccacacaatctctcatacagaaagttgaaacatatgaaaagcaacttaagaacctggttgaagaaaagagtactattcagtctaagttaagtaaaacagaagaagacagcaaagagtgtcttaaagaattttaaaaaaataattagtaaatataatgttctgcaaggccaaaataaaactctagaggaaaaaaatatacaatttctttagagaagcaacaaatgatggaagcattagatcaactaaaaagtaaggaacacaaaactcaaagtgatatggccattgtaaataatgaaaataatcgaatgagtatagaaatggaagcaatgaaaaccaatattctgttgatacaagatgaaaaagaaatgttagagaaaaaaacacaccagcttctaaaagaaaaaagctcacttggaaatgaactaaaagaaagccagctagagaataatgcagctaaaagagaaagaaagattggcaaaaaacggaacaagagacacttcttcaaataatagaaacagttaaagatgaaaactcagcttgaaacaacattacagaatctaaatgtgcaagaaaattttggcaggagaatttgggaatttcaaacctaacattattgcgaagagatttttggggaataaaatggatcagaggcggtttttagaatcttgttgaattggggggagtgatgtgtcacatggtgggacacaaattatttcttgaagaaagagcattgaaatattgagaggcgatttaa

SEQ ID NO: 490906 - DNA, 1954 bp, Homo sapiens
acaggccacaggccaagggcagcagtcaggcctgctctgtctgtgaacgctcccggcttggcctcggctgatgggccctcacgcctgaagcgggcaggaagctccgggatggatttcgggtctttggagaccgtggtggccaactctgccttcatcgccgcccgaggcagctttgacggcagcagctcccaaccctcccgggacaagaagtacctggccaagctcaagctgcccccgctgtccaagtgtgagtccctccgcgacagcctcagcctggagtttgagagtgtgtgcttggagcagcccatcggcaagaagctctttcagcagttcctacaatcggcagagaagcacctgccggccctggagctctggaaagacatcgaggactatgacacggcagacaatgacctccagccacagaaggcccagaccatcctggcccagtacctggacccccaggccaaactcttctgcagcttcctggatgaggggatagtggcgaagtttaaggaggggcctgtggagatccaggacgggctcttccagcccctgctgcaggccaccctggcacacctgggccaagcccccttccaggagtacctgggcagcctgtacttcctgaggttcctgcagtggaagtggctggaagcccagcccatgggggaggactggttcctggacttcagggtcctggggaaagggggcttcggggaggtgtcggcctgccagatgaaggcgaccggcaagctgtatgcctgcaagaagctgaacaagaagcggctgaagaagaggaagggctaccagggtgctatggtggagaagaagattctgatgaaagtacacagcaggttcatcgtgtctctggcctatgcgtttgaaaccaaagccgacctctgtctggtgatgaccatcatgaacggaggtgacatcaggtaccacatctacaacgtgaatgaggagaaccctggcttcccggagccgcgcgccctcttctacacggcgcagatcatctgcggcctggagcacctgcaccagaggcggatcgtctaccgcgacctcaagcccgagaacgtgctgctggacaatgacggcaatgtccggatctctgaccttgggctggccgtggagctgctggacggacagagcaagaccaagggctacgcagggaccccaggtttcatggcccccgagctcctgcagggcgaggagtacgacttctccgtggactactttgccctgggggtcaccctgtatgagatgattgcggccagaggacccttccgagcccgtggagagaaggtggagaacaaggagctgaagcaccggatcatctcagagcccgtgaagtaccctgataagttcagccaggccagcaaggacttctgcgaggcgctgctggagaaggacccggagaagcgcctggggttcagagatgagacctgcgacaagctccgtgcccaccccctcttcaaggaccttaactggaggcagctggaggctgggatgctgatgccccctttcatcccagactccaaaactgtctacgcaaaggatattcaggacgtgggtgccttttccaccgtcaaaggtgtggcctttgacaaaacagacacagaattctttcaggaatttgccactggcaactgccccatcccctggcaggaggagatgatcgagacgggcatctttggcgagctgaacgtgtggcgctcggacggtcagatgccggacgacatgaagggcatctccgggggctccagctcctcgtccaagtcagggatgtgtctggtttcctaggtgacgccccagagtccacgtggaggaaaaggacccatacggctcgatgggggccgcctgcctccgtggtgccagcctggggtctgctagcaaggggacacgtggttccctccacccaggtccccatcacgccatctccttgcggcccaaggag

SEQ ID NO: 490907 - DNA, 280 bp, Homo sapiens
aacatgatagtatcaatccataaattgctcttggggagttaccatcttaatgaaatagttttcaacctatggatgcaaaatgtcttttcatttatttacagttctttaatttctttcagcactgttttgtagttttcagtgcaaaaatcttgcaccaccatggttaaatttattactaagtaatttttacgctattgtaaatggaattgtttacttaatttcctttttggattgttcattgttatatagaaatacaactgatatttgtgtgttgatcttg

SEQ ID NO: 490908 - DNA, 149 bp, Homo sapiens
ctctatgatgtatcactcatgctgcagccatcgtgcaacgaagtagatcaattaacggagaaaaggcaggtatggaaattccaaggcccggtgcacgttgggtcactcctgtagtcccagacacttatgggaaagccgatgtagggcgg

SEQ ID NO: 490909 - DNA, 103 bp, Homo sapiens
tgaagcacctgcgcgaggcccggtgaccggcgggcgatctcgtctgtttcgatttcgaggccagcgcgtttctgcaccacatggtgcgcaacctggtaggcag

SEQ ID NO: 490910 - DNA, 180 bp, Homo sapiens
gacatcagagacagactcatcccaggcagatggagtctaccctctgatccaaccactgatattattattttactaacatggtgatgggctccctcccactaaccttggtgcctgactccatccccagtaccaggacagcagaccactcacgttcttcctaccaccatccttacatgataa

SEQ ID NO: 490911 - DNA, 347 bp, Homo sapiens
ccactcgcgtgtcgcatatccaaggggttgcacaaatattgaactagtacttttaacaaaagcattctatttaacataaaacaaattggttgtctataatattggttgaatgggttacatgctttgatcaatacgacaaccaataactatttactgaattcaaactatttacttttaaacatttgacatagcattatgagatctaaatacagtctttgacaatgttcaatcaaaataatgtcgtcatgtttaaaaaataccgctgatgagcaatatatcattctatatattgtctttcaacagttccagctagagaaatagcacagtatttattaaaaggacaacgc

SEQ ID NO: 490912 - DNA, 1499 bp, Homo sapiens
ccggaggctcccgcagccccggcgtcgccccgctgccccctcccccgggggccatgggggcgcccccggagctaccggcacctcagcttgggtgcatctcctcgcaccaggtgccccgaagccgacttccagcttcctgcccggtgcccatgcgtattcactgcgccccaatgagcaggaataccagcaggccttgcttgctcggatggcggccttgcgcagggcctgggctatgcggcctgacgccctcatattatcactcagcttgtcctaaccatcagtccgacttctgtctgcatgcctggcccctcctgagccccctccgtgtgttccacaggcagtccccgtcgcctcgcgtggtgacggcctgcgctctaccctgtgtcagctgtcattatgcttctgccccctttcttcagcccggtctgcaaccttggaccaacttttgcggcactcactggctatatcccataacatgtggctcacacccacagttcgcacgtaatcccacgctcgtacatcacgcgagcactgcatcgcaccaacgtagcttaccacctgtcaatacactgcacggccaatgcacaatagtcaacaccaggtctcaacatctacaataccacacaaaccataccaacttcaatacagccacgacaactaggaagcatcacaacacacataggagcataggcctacaggcggcaagcgcacccgccgcctacggcgcaactcgcacaggcgacccgtcgccgcggccagcaaacgtagctccagaccgacactgcactcggctggaatccccacggcgaatagcacactgcagaccccaagagacaccatatgcgagacaccagtcgctcactgtcggcttggggcacgtaccaggatacgagcactgcggcgaggcccacgctagcggctacgccacccattgcaagccctgtgcggcacactaggacccccagtcacacccacgcaaacgtcgcgccgaccactcactccagcacgccgcgccgccctcacgaatcgatccacggtgccattccctggactcttagtcaacgtggcaacctacccccaaccatcacatgacaactcgcgcctatcgctcgtgtcttgttcctatggtatgatactcactcactaccactgaccgacaccacacgcagctgtcaacgcattagtcttctaccctcatctgttacaagtgatctacaaccagccaattagtaccatacatgtactctgcacctccctatgggcaccgatagaccctcgtgctacgcatatcacgcccaatcactgcgatctgtcctcatagcctggcccaagtaaacccccaagtgcgctagcatgcgactcactgacagcccaccgaactcatgctcgacatctcgctctctacaccctgtcgcgccttcggccatatcaccacatggttctccacgaccatcactctcatgacctaacctagtctccactgcctcgttatctaacgc

SEQ ID NO: 490913 - DNA, 964 bp, Homo sapiens
gctgttttcctgcgcaggagccgcagggcctgtagtgcagccatggcgcccagcctggaatggcatggtcttgaagccccacttccacaatggactggcagcggctgcgtggccacgtggttcaaccagccggcccgtaatgatcctgcagacgtaagtgccctgtgcaatgccaatggctgcgcctgcatctgccccgctgcccccgcgtcgggtcccatcctgtgcccatcgtgcgctgccccacgggttctggtaccacactgaagtgtgcgctgcctggcctgcggcttcaagcctgtgaggacgctcatgtggtgtgcctggcattcacacagaacggtggcccggaccactcggcatttcatgtggatccgaggacggcgtgaacaaagtccacggacgtccctgcagtgccaactgtgcagcgagctgaacggagtaccgatccaaactcatcctcttccccaggaagccctcggcccccaagaagggagacagttctgctgaagaactgaaactggccacccagctgaccggaccggtcatgcccgtccggaacgtctataagaaggagaaagctcgagtcatcactgaggaagcagaagaactttcagagccttcgcttagtctccgtatggcccgtgccaaacgcccggctcttcggccatacgggcacacacagagccacaggaacgccgcagaaacacggatgttgacactgaaaacaatcaaagccctcctggggacttggaatcagtcgggagacaatgctgggtctacacgtgggtgtgtaacgaggggaacaactgggtctggggatgggggcttcactgcctgtgacttcctccttgccaggggaattgggggacttcttgaaagacaggtcaaaggcctggataatgctttactttctgtgatgaaggacatgatggcaggatggataagtgacttgatgtagaaa

SEQ ID NO: 490914 - DNA, 326 bp, Homo sapiens
tgctgggaccacaggcgtgagcactgcaccgagccagaagttttgaatttttacgaagtctaatgtgtctgtttttcttttgctgcccatgcttttggtatcgtatccaagagatgattgccacatccaatgtcatgaagcttctcccctgtgtttccttctaagagttttatagtcttagctctcacatttaggtcttttattttgagttaatttgtatacggtgttaggtaagagtccaactttatatttttgcaggtggatatccagttgttgtgacaccatttgttgaaagactgtcttttccccattgaatggtcttgaca

SEQ ID NO: 490915 - DNA, 296 bp, Homo sapiens
  misc_feature (195)..(195): n is a, c, g, or t
  misc_feature (270)..(270): n is a, c, g, or t
  misc_feature (287)..(287): n is a, c, g, or t
cagcccttccgccacggccgtctctggagagcagcagccatggccctacgctaccctatggccgtgggctcaacaagggccacaaagtgaccaagaacgtgagcaagccaggcacagcgaacgccgcgggtctgtaccaaacacaccaagttcgtgcgggacatgattcgggaaggttgtgtggcttttgccccntacgagcggcggccatggagttactgaaggtctccaaggacaaaccgggccctcaaatttatcaagaaaagggtnggggacgcacatccggngccaagagg

SEQ ID NO: 490916 - DNA, 1607 bp, Homo sapiens
ggggcaaatcagctgtgggagacgaggctatgcctctgaggaggccatgtccggcgggtatcagcgccatcacaaccggccatcatgacggtgggcgagagacagcacatgtatgctggcaggcatattcgtactgactagtgactgacgtgtgacatcgctgcaggtacggggccgggagtacttcatatggccaccgtatcaagggcgtataagaaccaaggcgtcatgcagactctctcgatcccgtctgttgaaccttgctgaatgaaggtaacagtagcagatcagagtcctgagacgacatctccaaaaatcgagaagacaggtaagggggcagatgatgagagtcgtaggtccgtccggtctggggtcgcgtgcattgcgagggcggacgtaaatcctaggatcgttcacagtgatcaagataagaagggggacccatgcacctcccctaaccgtattgacatgggatatttcgcctcggaaggtttccctttcgtattggcttggagatcctcgaccggggggcgagcctcgacgagggtagttcggagtccacggggccttgggcttgggcctatgatgggcacaattcgccgaggcctaggagggtggtataccccaattggcccacgcgaggaggggtcccttggccgtttggaaccttttcacttcgaggcccccagatcccggttcagggggggttgggggcttgggggctctattcacgcggagtccaagggtgttgatgggaacacacccgattcggacgtgaacatgcatgggttaactcgggtaataggcaagggcccagcacttagctaagggttcggattggaacaactaggccccaagttaatgcttgcccgggggagtgctttcgcgagtaccccccaatgaaaaagctcaaacccttgggggtccgattagagaggggagtcaccgtcccccccccagggccctaattgtggagcgccgaacggcgcaggacaatggcctgcattcccaaggggcatcttgcattgaggggccccgtcgcttgcccattgggttatttggagggaacccttcccctaaatggtgggttccccccccaaaataggggggaaatactccgccgcttggggccatggaacggggaacttacccaaaattggggcggcaatgtccccccttccccggggaaaattggagggaacgtcccatttcccctcctggggggaattggccggggggccccttccggtgttggaggacccgtgtggggcccacaacagcgagtttattcggggaccgttagcctcccgcggaaaaaaggcgccggagtgggccacagcaattaccgccacagggggcacccggtctaccccaccagaagccgggttagaaaacataaacaggcagggtggaacgcagggcgactctcaggcgacatgtggagaggggtcacacctagtaaagggagccccccgccaccgggaaaaagggctcccatgagagcggaagaaacacgtgtgccataccaaacacacgagggtcagcaagcggggagaacacgtaacaccacggcggacacagggaggacacctctacagaggaggaac

SEQ ID NO: 490917 - DNA, 828 bp, Homo sapiens
cgaggggcggacgggggcaccaactgcggtcgatggcgcctctcgtagtgctaccgcagtgagggtgtgttccgcgcttgttgtctcaccgaccgtcgttgtgtctccgaggcgctctcttcaagagcgcgcctttttgctgcgcccccattgtttaaaggccggttttggggcccgctctccaaataaagggtggccccccctgttggagacaatgtgtcttgtgggccgccacccgccccccctttgggttgattgcgttcacccccctccgggtaatttgccccccggggggctttttgagcctggttttccccccaaggaaaaagggccagcgctttccccgttggccccgcagttcgggacccaatgggccgcccacgcccgtggcggcccccatcagtcaattctcagattggtctgggacgcaacccagccccctcagaggtgagaaggttgccccgccccttgctccaatagcggggtctttagggctccccgagcgccttaatgcgagaaagaaccatcccctgtgctctttcgtatggcccaccaccgcttcccgagcggcttggctcctgccccgcccctttcaaggccccctaatcaccggcgggcgatcacttgcggtccctgcacccgaggcctcgattcccgcgctccctctcggggcccccctctggggtggccaagtatcgtcccacccccggcggccccggcgtgctccatttttctctatccctgggcctcgtgtcccttccattgagtgtttctttccccaagaaatgtgcccgggggataaacaccccgggcccacgaaaaacatac

SEQ ID NO: 490918 - DNA, 159 bp, Homo sapiens
cgcctacttcttactggcgatacctagtggctgctgtcttgtagttgctccacttttatttcatgcttctaatccatgtttctcacccttatactttttgctgctacacatcttcatctaccaggaggagtctgtaagtgttgtgggactgggcatgac

SEQ ID NO: 490919 - DNA, 150 bp, Homo sapiens
  misc_feature (108)..(108): n is a, c, g, or t
  misc_feature (128)..(128): n is a, c, g, or t
ggaatggagagctcgtgtgcagtgggtggacataacgcatctggagaagaacgccaccctgctcttccccgagagcataccgtgtggacacccgcgaccaggagctcnttcttctaccatgttcctcnaacatacggcgatgaccttcaa

SEQ ID NO: 490920 - DNA, 93 bp, Homo sapiens
ggatttgctggtgcagtacaactaggcttaatagggacatggcaccactgcactccagcctgggtgacagagcaaacgaaactctgtctcaaa

SEQ ID NO: 490921 - DNA, 1535 bp, Homo sapiens
  misc_feature (983)..(983): n is a, c, g, or t
tacacaaatagcattttttattggccactatttgtgaagttctgaactttaaacagatttctgggagctgggtggttcatattccatcagcctcgttcaacttttagccaccgtggtctcgtccccagtgtggcttttctccaaaactacgtgccttcaccagtgaaggcctccatgtgagcttctcccaatttacaaaccgtggggctctctttcaggcatttttatacttttctcataaccgagaaaacatctcatgtggagagagagaataaacatagagattgtggcaacgccttttctcatatgatcctatatctcacaaagtggcgtggtctgtggagaatcaaatatttttatgtggaccacacttctcttctctccagagtgtcataattgtggtcttgcgcacctctctctcggggtcaatgagattctccacactcaaaatctttcttctccggggatttggggcgggcaccgtgtgttgcgtgtgtgtctgggagcatataagagaaagtgttcatctcgcggtgtcttcgtgagtatgtgagtgagagggtggttttttaagatgtacaaaacacccaacccacagagacacacaagacagagaagacgcaagatgtaaaaccttatgcggggtagagtctctgttgggacatataccacagcgtgagagagtcttacaacaccctatgctgggtgtctggggcgcctattattttcgtggcaccctatgggggcacacccacactatttttgtgggtcgccaccggggggtaaacaagaatcccctatggggccctattggggcaaactgttaacagtcaccaggcggcaaacgtgtttttacaccccccttggggaaacacacttcccttcgccgaggattcacactcacacacgacctagtgagcacaatttttcttcataacacattgggccgaacctttctccaatcacaattttcctggggacanaaatcttccagaggacacacgaactcctccaactcttcttccaaagacgcaacaccggaaccccctttatggaaacacacatacttcaaggatgtggcacaattttgggggttgaccctgtggagggctccccggagtgtagaccaaaagaggtgatattttccccaaattatttttcctttattaattgggagacacttagagcagggatgttgcttattccatcaaatttaataacacccaattttttctctttacaacaactgtggggtgttcagccgacgatttttctttttgtgttagcaccccctattatggggacggcacttaggtaaagggggcggtgttagttttagcaaccgggccaggggtgtgttgggtgtaatagaagtcggcacaaatcagaagatacaacaacaaagcggggcggggagaagaacaaacaacgcaaggaggaggaagaaatgagcaaccaccatctgtagataagagctactcattcgagagcaacatatacgaatcgcgcgagtcacactagcgtgaggtcaggag

SEQ ID NO: 490922 - DNA, 1275 bp, Homo sapiens
  misc_feature (208)..(208): n is a, c, g, or t
aaccacctgaaggagtatcacatcaatgcacgaacatactctacttcacctcaccatacgccgacgagttacgccatcggactatctttcacataaatgctagtggattgtctccaatggacattcaaggtgcccaaggagcccgctacctgggctaacagtcaaggactacgagtgtgatgcgatcggctgactggaagatgtgagnctgaaatccccgctagtccgcctactagcgggaggcgtgtccgcaggatcatcaaggaagcgagcaaagagatcaatcaagaaggctgatttgagacggcaaaccatggccctagatccggcaaagggtccataccacggagggctctagcaatgcttcagaatgacgtgacctggtcgagtgctagaatcccttgttggacgcagccgtactcttgaggatgtcgaagacgacagggctgcgaaccgccgatcgggagatgcgcgacaggggaaaggcgcagcctgcaaagggaacctccggaacactagacatcattacacacatgcgcatccaaagaaaagcatgtatgagcacccagattgcgaacggtcgtcatacctccatggttgacctgtgggcacccttccgtaggaaggcccttgctaaaaaccaagatgtcagcgacggacgccctgtgaacttgaccctaacgaaagggctcaattcgcggcgttacaccccaattctgtagcccttgccatggacacccgagtgaacccgtgaacgacggggacctgtccagaaatgtcgccgttcttcgctaacagatttgaacgcgcaaggtaacagtccccaaattggtgggggcgcagagacccttgtataacgcagagagtggctaaccagaccaaaaacatgcaccgcgtaaaggttaccgaagctccccgtcaggggacaactcagcggagtgttcccctggcacggtgttgattgaccgaaagatgctcaccttggtggcaagaaaagattccgttcacgtaaagggttgacaaaggacctgtcccacaggaaaatgtggccaagcgcccttcaaatgtgtgagcgccacgccttaaggggacccccatacctatgtgaggcaccagtcaagaccccgtgttaacggctggcaaaatggtatactacccgagccgatcaggggaatcgcctgcaataactagcaggcccagatacaagggggaagaacacgtggggccccaacggtaactcgcgaatcatcagtgtagagagacaacagtaacgca

SEQ ID NO: 490923 - DNA, 214 bp, Homo sapiens
ccgcgaaagctagtgcgttagaagtcggatgcgtgtgactctacactctgtaatcccagcactttgggaggccctagtgcaggcggatcacttgtaggttaggatttcaagagcagcctggtcaatattgtgaaagcccgtctctactaaaaataccaaaagtagccgggcgtgttggcacgcacctgtaacccctcctactaagtttgccgcg

SEQ ID NO: 490924 - DNA, 706 bp, Homo sapiens
ctgtaatcacagcactttgagaggctgaggcaggaggatcacttgaggccaggagttggagcccagctggggcaacatagctagacgtcatctcaagaaagaaagagagagagagaaagaaagagagagagagagacagagaaagaaagaaggaaagaaggaaggaaagaaagaaaaagaaagaaagaaagaaagaaaagaaagaaatcagccaggcatggtagcgcccgcgcctgtagtcccagttactcctgaggctgaggcaggaggatcacttgaggccaggagttggaggccagcctgggcaacgtagctagaccgcatctctaccaaaaaaaaaaaaaacagaaagaaatttattcaggcattgggggcacacatgtgccgtgttgtgctcccagtttacctacagagcgctgagcgcacggaggctctccctttgatctcccagggagtttacgacggctgcagataagctattgattgattgccacttattacttccaaccttgggcgagagagtaagaccctgtctaaaaaaatcctaaaatggtgccaggcacgggggctcacgctggtaatcctagcacttggggaggcggaggcaggcggactcacagggacaggtcaggagtcaagaccagcttggccggcggggcatgatggctcatgccctgtaatccagcatttggggaggccgagtggt

SEQ ID NO: 490925 - DNA, 280 bp, Homo sapiens
ggttttttgaaacaaaaaagaaactgccaaaacctggtgtgttttaaactccccccccaggagccactccaattcctccgccccgtggtttggggggtgacaataccaaagcgccgagaccagggtgttgtgtccctcaaacccaaagtggtgggggcctttgaaaccaaacagccactcctggccccaaacattggtttgcatcccaggttcctggcccccctacccccgccacaccccgtttttttaaagatttttttaataaatcgggtaataagca

SEQ ID NO: 490926 - DNA, 535 bp, Homo sapiens
cagaaagaaagctgacttgttataccgggagagggccgtccaaatagttgttcctttggggggtccgaagcctttgatgattgcagtctttgttggtctagtgggctcgcctaatgagggcgatcgcctatattagacgtctcgcagtggcgcgtagcatctaacaacagctgtcgccttggggcaaacgttgggagccggggcagttttggggaaaggaactttatttgcggggcgtgcgagcaaatatctgggaagtacagtcactctaaagattgttacagcgtctctaggggaaagattattaatacttttatcacaggtgtatttaggggtgtctgtgacgacgcgaaggcgggcaatagggcgggggggcgtcggaacaatatggcgcccatggggatctttgaacttttagcaaagtcttttttacctcggggagcgatgtgaaaataaactcgcaagagcagctatgacctgggctacaccgccgcctacacctcctacgctccctatggaaccagtttcgtcccca

SEQ ID NO: 490927 - DNA, 350 bp, Homo sapiens
  misc_feature (4)..(4): n is a, c, g, or t
tganagtcgggtaggccaaggcttaataaatacttgtttcttaattgatacaaagaaaatcaaattggtcttggcgcggtggctcgtgcctgtagccctagcgcttggggaggtcaaagagggaagatacttggagccacgagttttaggctagcccgggcagcatagcgggaccctatctctacagaaaataaattggccgggcatggtggtatgtgggccagtggtcccagatacttggtaggttggggcagggggatcgcttgagcccaggagttgagttaaagtgagcttattcattgtgctgctgcgcttcagcttggaaaatcccatgatatactgtctctatt

SEQ ID NO: 490928 - DNA, 225 bp, Homo sapiens
agctcccccaattccattccagcgttgcgggtgcagcaggtcgggggtcaggttacagatctccaggcgggaatagtgcctcaggcaagtcactgaaagacatccagcaattctccatcttcatgccgtcgggtcagcctttccctctcctcggggtctatagtgttccagctggggcagtggtcattccaccgccctaggcgggaatggaatgggggtaccgag

SEQ ID NO: 490929 - DNA, 294 bp, Homo sapiens
tcgaggattaggcagctatcggttcaatggcaacattgtaaaccccgtctctactaaaaatacaaaacattagccaggcatggtggcaggtgctgtaatcccagctacttgggaggctgaggcaggagaattgcttgaacctgggaggcggaggttgcagtgagctgagatcacaccactgcactctaccctgggcaacagagccagactgggtcttgagaaaaaataaataaataaagctgggacaatggcataaatgaatctcacaaacataatattgaaccggatagcttg

SEQ ID NO: 490930 - DNA, 364 bp, Homo sapiens
  misc_feature (110)..(111): n is a, c, g, or t
  misc_feature (113)..(113): n is a, c, g, or t
  misc_feature (319)..(319): n is a, c, g, or t
agagaacccaggctgagaaggtcacatactgtgtagggttatatttatatggcattctggacgaggcaaaactctgggtgtggataacaggtcagtggctgccaggagtnngnggtcggggaggggtgagtacgaaggagcagatagaggggattcttgggagtactaaaaatttcaatatcttgtctaaaagtgaggttaacatgaatctttgtaaaaataattagaaaaatgatagctagagaatatgggcaatgattgtccttgaattttaaatgacacataaaaataggaatagatgagcatttccctaacatgntaaagtgtatctatcttggcccgcaagttgagtagcatgctgact

SEQ ID NO: 490931 - DNA, 726 bp, Homo sapiens
gggtcagcaatttccaaatcttagacttgacacaaatcaaaattacccaataaaaaagaacactgagtaatgatttaaacgtggaatcattacttgactaacagatgtcgcgtccacggcgatgtccgttaacacagccctcttcatggaacagtcagctgtgtaaatgcagtcttaggaaaagttattttcccactctgccctttacattctgactttcctttcctagttggttcctgccattcatgttaataagtggctacacttgccttctgaatgatcgaaagaaacttttacatcttttcttccaagaataaaagtaacaagctgactgtgattcttaaatggagaccagagcagctaaacgtctcacgtttaaattttggttttcttttcctttttttttcttgtttcttttagtttttttggggcgcaggggcagggtgggaataagttaatttcctaacttgaattttttcttcttgacactgttttttacagtggtgcgctaaatatttcccggaccggacgggcacctgtccacaaaatcagtggggtggtcttccacacgtagtccctctggagaattacacagtggtttgggccccccaaagaattcagtaataagcggcgccaaaacttgtggctggggcacaaatttttggccgaacttttgtaacccttgggcacaaaaccggcgcaagggccaaaaggacagctaaacgg

SEQ ID NO: 490932 - DNA, 132 bp, Homo sapiens
agaacaccggcaagttatagctgtgttaatgacaaaatgtgatatttactagttctaaattatagcagctagggagaatcccctataataaggacagacgagaaaatacatttataatacaagactagcatt

SEQ ID NO: 490933 - DNA, 471 bp, Homo sapiens
  misc_feature (280)..(280): n is a, c, g, or t
tgggttcggtggttctcttaaaaataatgcacagtacttactaatggcatccatttgaataaagtggcaataaagctagttgatgtcagtgacattaagccaactccaggattcgggagttttagcattaggatttagatttaccagctagagcgtggcttccttcctccctgtagcccatccctactgctgcctttcgtggtctgtctcgcaggtctgtcttgcggcctaccaaggctctctgacgagcctctgttctcctgcgccccgccccgttggnaaaccagctacatcagagtctagagaacacaaattttacttctgtggcggtgtacaaaagtggagtttttgtttttgaagtttttgtttctgatttctgggttttcttagttactagccgataatacagaaaaaggtctgacaggggctttattttccccaaatttattaatacctaaactagattaatgt

SEQ ID NO: 490934 - DNA, 375 bp, Homo sapiens
agaccactccatgcctggtgcataagagctactccagccttcaagttgtgcagctctccactgcttaccacagcgttacagagtcgttgtgcctcttttgtcattccagtgcggtttatagtaaagagattttgagtaatctaacttcatcttctctatccagatcatcaaggggcattttctgtcttatgggagcatcagggtcctgtaagaagaaaaaataagtcatcatcaaccataaatcctttgtacttacatacattttacacatcatcaagagatgataaacctatcctgagtttatacacaaataaattcattttttcttttttcttttccgagacggagtctagctcttattgcccaggctggagt

SEQ ID NO: 490935 - DNA, 143 bp, Homo sapiens
tgtaaattaatcatctgttggcgaaagaggaaagaaataggagctgagggtgtatgagagcaaaatcccggtattttaaatagttggttaaaaggaggtgaccacaaataaagaaagggagtaaaatcacaatttaacaaaat

SEQ ID NO: 490936 - DNA, 196 bp, Homo sapiens
cttaacctgccgcacgtcatctcaatccacaggtcttttgcacggactgctccaggtctctgagggcagtcactgagtcagcttgctccacactctgacaccagtgtaccgggaggctttgcctcatgggcttgggttaacttcagtgacctcagaacgagccacgggctgtaaccctgcccttccagcccatcca

SEQ ID NO: 490937 - DNA, 324 bp, Homo sapiens
tggcgcggtatttttgggcaagagtcccaattccccgcatattatttttgtggacctctccaagggttctcgggggtttctcgcccggagtttttctactgtcagacggcggttcgcacaaacaagggcggggtggtaacacaccgggggtgttgtaccctcggtttttcccacgttcttctgttgtgtcccccggattgtgggcagagttatgctcctcggcacacgccgccgcgcggttatggctcggagcgattgtgtggacgccggtccgttataacgaaagagtacaccgtcgggcccaccagcttccccaacaaaaag

SEQ ID NO: 490938 - DNA, 1557 bp, Homo sapiens
gacgggcccgaaccctcgtgtgcaagggtgcagtacctaagccggagcggggtagacggcgggccggcaaccccctttctgaccctccacgtgccgccggcctcaagactcacgaccatggcccagaacttgacacggaccttggcagagagaccgagcatgcaccagcccgaggaacacccagaggagacaatgagagcaacgagaaccaatgaacaggcatggctatgcatgagggagaccggagaaagaccacgagtggaccaataaccgggacaggatggccggccggaacaatcgtagacaggaataacaaacccgagggcccacaggggacaggggaccacccaggaaagacccaaagaacaaataacatagaccacacactcagggaaaatcagaagaagagaaagcatgccccacgaccacaagagggaaaacaaacacgtaaggaccgacgttgggggaacacccggaaacgcaggtgcgagcgaagagaccaacaccgatggaccaagggaggaaaagatgcgcccccggacggagagcgaaaactccgacaaaggagagaaaagagcaacaacaaagacagcaaaatccgaaataaacatggggcaacgacaacgtttaccacggagagggggcaccccaccggcgccacgcacccacattcaccgggcagagcacacgcaagacagtatccgaattacgtgccatattcacgccgcgcaccggtatacacggccaaggagggagccgatatcaacacaacaaaagatagtgaacacacgccacagatcaccccaacacgtcacactctgggcggatagggccaacaacgtaacgtatcggatatcaacacaccgatggggcacacggaaaaaacgaagcaggggagaccgcaagcggagacaccagtaccaggagaaacaacagcacgacgacaaaacaagtggaggacccataccaccaaaggcgaacacaggaccccagaaacgacacccccgaacgaaacgaggaaccaaacagctggggcaacaacagcagccaaaaagcaaaacggaacaaccaagaaaaagcgacgcggagagagacctcgtgagggaacgagacgttaacgcgcaagacaaaggaaggccacaacacccgagaaaaggccagtgaggcacagcgggaccacccggggactcgaccacaagatgaaggacaaccaacaaacaccatgacacagcgaggactgacggcccatccacaaaaagacacacgcacaggagtagggagcaaacaggagaccacacgaaaacgacacaatcacggacaagaacataggaccacgccagtaaccaggcaacaaaagacaaagatcaggaacagcataccgacagaagcaagcgcaaaagagaatcgagagcaaggaccaccagcaagacaggaggggagtcgacattccccccagcgagagaggaagataagggaaagaatcagagcgagcaacgacggacggggaaacgagccacagggaaaccgaacggagcacagcaaacagggagggaaacc

SEQ ID NO: 490939 - DNA, 105 bp, Homo sapiens
atggtctgcactctgttttggggcacggcacagggtgccaataccacagtcaccacacaggccagagaggagccaggacccaccaagcatcctgggggcacccct

SEQ ID NO: 490940 - DNA, 648 bp, Homo sapiens
tttcccacggcagttactcacagaaaaaaaaatttttgttccaccggagaatattttaggcattccaagccggacccttgtggaggggaatttggccccccgaattgttctcaacaagttggcccgggggtggaaaaccacggccccatgaagaatccctctagggggacccaaaaatttaggggactttggggcccaccccaaacaaattctttaaaatttttgggggggggcccaaactatagggggtaaaaaagggctccccaggaaaaactaacacacgtccccgtttaaaacccgccggaccttgggcccgcattctggagaaatcaaaaaaggtgtaaaaagagtttcacgcaaccccctattggggggggcccactggtctccctcaggggtgaaaggggtcctctttggccgccaatttaaaagctctgcgggccaaatctgtgggccaagcaccagcccaaacgtgtacgtctggtcaataatagaaacaaaaatcctcccgacccgcccaaaaatctccccgggaaaagaaaacccttgggagggtggaatatgttctctcgcttggatcccaaaccccgagggcccgtgttctcctattcacaatccccatgccaccacactttggcaccgtactcc

SEQ ID NO: 490941 - DNA, 154 bp, Homo sapiens
gagcagtgcggagtgcatataggaggtccttaactgggtgcacaactacctattcggggcagtatccaattcagggtttcagtgctcccttgtgtaaactgtgggctttggtgaagaccactttcaaacaagggagcactgaaacctgaattgg

SEQ ID NO: 490942 - DNA, 206 bp, Homo sapiens
tatttccacagggttccatatcaacaatagggtttaggacctcgatgtgggatcaggacatcccgatggtgcagccgctattaaggggttcgttggtcccaacagattaaagtcctacgttgatctagagttcagaccgggagtattccatgttgggtttctatctacttcaaatttcctcccgggggaaaagtagggaaccgagc

SEQ ID NO: 490943 - DNA, 153 bp, Homo sapiens
ggcggctgcggcacggatgcagaacatgagtttcatacgaagaccaccagcggctatgcaggtcgtctgagctcggcctatgtggggcctcgcatagccccggcctcagctacatgcctggcgctccagcctttgggctctggcgtcgggctc

SEQ ID NO: 490944 - DNA, 238 bp, Homo sapiens
gctcgacctttgccattgtgaacagcacaacaatgaacatatgagtccacatgtctttttggtataatgatctgttttccatactcagtaatgggattcctaagtcaagtggtagctctgttttaagttctctgagaaatctccagactgctttccacagtgtgtgaactatttgcattcccaacgacggtgtataagtgttctttattctctgcagcctccccagccttcagtcgac

SEQ ID NO: 490945 - DNA, 215 bp, Homo sapiens
gtccgactgaggggtactcgccaccggctgcgtccacccgagcggctgcgggagccaaggcccgagggggttgggcgttggcggccgcgaaacacaaccccctctgttccctctaatcgcggggcggccgggtagtttccatccgccagctgccatgagcgagcgcctccgtcccaggaaagggagagggcatggcaacgagaagacaaccatct

SEQ ID NO: 490946 - DNA, 356 bp, Homo sapiens
  misc_feature (94)..(94): n is a, c, g, or t
  misc_feature (251)..(251): n is a, c, g, or t
  misc_feature (253)..(253): n is a, c, g, or t
  misc_feature (280)..(280): n is a, c, g, or t
  misc_feature (339)..(339): n is a, c, g, or t
agatggccaagattctgttttcatcaagtcgacctggggatactgtggttgtgctggaagggctaacctaaggaaaattggtgtatcccccccncacaaagaaggcaccctgggtcttttgacgtggttccgtgaaaagatgccaatggcaacagcttttccactcgactttccaacatttttgttattggcaagggcaacaaaccatggattttttttccccgaggaaagggtatccgcctccccattgntnaaaaaaaagacaaaagactggcggccnaacaaaacagtgggtgaaatgggtccctgggtgacatgtcagatttttgtacgtaattnaaaatattgtggcagga

SEQ ID NO: 490947 - DNA, 105 bp, Homo sapiens
tcgggcttcagtgtgctgtatcctcagaagtgaggcatctcggtcattctgcccatggcacagggtgcagagaggcagcagtggctcatgcaatgctggcgaccc

SEQ ID NO: 490948 - DNA, 170 bp, Homo sapiens
  misc_feature (37)..(37): n is a, c, g, or t
caggatgagggggcagaggagtaccaagcgagggacnattggagaaaatcagatccacagatgaaaagcattacacggacaagaaccccaagaagaagttaagagcttcctggatcgcaagaagggatttaccgaagttaagtcgccgaatggagaattcatgacccccg

SEQ ID NO: 490949 - DNA, 362 bp, Homo sapiens
  misc_feature (23)..(23): n is a, c, g, or t
  misc_feature (54)..(54): n is a, c, g, or t
  misc_feature (56)..(56): n is a, c, g, or t
  misc_feature (90)..(90): n is a, c, g, or t
  misc_feature (109)..(109): n is a, c, g, or t
  misc_feature (146)..(147): n is a, c, g, or t
  misc_feature (189)..(189): n is a, c, g, or t
  misc_feature (207)..(207): n is a, c, g, or t
  misc_feature (257)..(257): n is a, c, g, or t
actttcgtggatttcaccagcantagctactagtttttttcctgtaagctcccntnattcttatgctaactaacaggctggaactgaccnctttgaagaacctcagtanagcccatcctgatgacattgcgagactcaaagagacnnagagagagctagggctttaaaaccctgagctttaagactccnactagccttcgtgctccntttggcatgcttaacgctgcctcagctttcctcactctgctactaactgngcggactactactgaaaggccaccacgctcctaaggctgaacactaagctgagactgacttcctagcttacagacctctagaacaatttccacgcacactacgct

SEQ ID NO: 490950 - DNA, 175 bp, Homo sapiens
  misc_feature (53)..(53): n is a, c, g, or t
  misc_feature (67)..(67): n is a, c, g, or t
  misc_feature (122)..(122): n is a, c, g, or t
  misc_feature (127)..(127): n is a, c, g, or t
gtatactgacccccgcttacctaaggatcacatcccggcatctgagttgcggngcgtttccatgtcngagttgaagaccgacgtcatccatcggggcgactgcttcgaggtgctgcgcgccntgccngacgcttcggtcgacatggtgttcgccgaccccccctataatctgcag

SEQ ID NO: 490951 - DNA, 946 bp, Homo sapiens
gatgttggccgtcagcattcaccaaataaacttgctctctgggccaaaaaaaaaaaaaaaaaaaaaaaaaaaacacttttgtggcgcggcttggccccgggaaaaagtttttaagacccattcgggtgggggcgcgcgggggcccaacaaggtatggcacagtggacacctggggcgcaaaagcgcgggtcccaaaggagaaacccggggggcacaagcagacaaagggggagcgagagatccctaccaaatataaaaaccgcccggggggggcaaaaccggggcgtggtctcgggaacaaaatctcccaaaataggggacagccacagggaggggcacctaacagggggcgtctccattcacaagcgggggatgcccaaacagcaggaggtctccaaatatcccaaaatttaaacgcccccaggccttggggtgggggaggcacaacagacacgacaatcacaacagcaagacgatcacccaagaaacgccacacgatcatcaagaaaatacaaatctcgagaacgagagaaaccaacaccagatagcaagcaagacgtccaaacctacccacagcagcataacacaacgagcacaagaaaaaacagcaagacaaagacagccaaacgacacgaagcccgtaatgcggagcgaggaacaggcgcgaggaggaggacaaagacgccccgccggcagggcggccaggacctgggagggcgagaggcgccaagatataatactaagaaacaaaaaaataaatcatacatcatcaaaaacaccaacaaccaacaaatacatgaaccatagatatcaaaaacgaagctcactgtaacattaatcaaatcaaacataatcacaacaaccacaacaccacacaaactccccacaccacacatataacaaacatccaccacaacaagacacacccataacatatacaaaaaaa

SEQ ID NO: 490952 - DNA, 186 bp, Homo sapiens
tgtgttatctcgtagagtctgactgctggcgtcaagcttgtgttctggcctgtctgttttaactcagtacacagttatgactggacgtcgttttaccctcaggaaacagttatgactgggcgtcgtttaacactcaggaaagagcaataccggggcgccgtataacactgaggaacgagcatataa

SEQ ID NO: 490953 - DNA, 591 bp, Homo sapiens
tggtcttgtttttggtgggttcctcggttcatcgtgtcggtctcttgggcgagctggcgcgaggtccctctctgcgtggttttgttgtgcccgtccctgctttgcttttgtgcttcccctgggcggcgctgactggtccaggccgggccctggtttggggcgtgagctctgtgggtgctcgcgtgcgttccgtgattgcgccgctgcgtgcccgcacgcacgtgtcgtgcaggtctactgggcccccgtgtacgtcccgctccgctggtatgtgcgctgtcctccgtattgtgctcgcatatcggtatatgtgcaggcggtttgactgcctcgtgtctgccttcccgctctccttttgttccctctggatttcattcgactccacctccttcccgtaccgtcgatcgatactccaacctgataatcacaagacataacttaacactataacagagaagacaagacacataaatccttaatacaaaatatacacacatcaaataacaacaaataatacataaacaataaaacatacaataaaataacaattccctcaacaaataataacaaaaacaatatgacataacatat

SEQ ID NO: 490954 - DNA, 750 bp, Homo sapiens
tgtttaagctggctgacgggacagtgagaagccagagctccagcggcgccgcggggcggccgtcaatgaccagagccggagccgtcactcacctctggattagcctgaagcggagactaccggctgcggagcggcgtgtggcgagacacttgctcgcccttttgacacccatcatgtcgcggggctccatctgagattcccctccgggacactgacgagcgtcattgaacttgattcgatcagttaccggagggagatgaagctatcagtattctgaacacaggaacacaacacaactgcacatatggatgcttgcgcgctggaatacctacaagcactggaaaaacagaagagttgcacaattcgtcggaagcagcacgtatagatgccattcggactatagcagaccatgaaaaaccaccagatgacttgcttggactacataggcagcgtattattgtaacaagcaggctcgcaacgaccatgaccttctccgtccattacacaacggatcttattcgcacagtgccacctttgttagtattacaagggggcgcactcacacatccttcatggtctgcacagcaacaatttgttggggaacgacacctgtgttcttgccctaactcgcacggtggaccaaccttggattccaggctgattgcacacgctgcactcttcttcctcagtcaagtcttccacatctatattcccgcccttctgtctccgttgcttaccaaccacagcccg

SEQ ID NO: 490955 - DNA, 255 bp, Homo sapiens
  misc_feature (3)..(3): n is a, c, g, or t
tgncagggccaaatatgagacagattggaacgatggagatcacccggagagcaagaagctggctacccagggaagactcaatcagttctcaacttggacccatccatcctcccccaaggactacaatgacagaagagtacacgggtcccagacggcatgggtgggcctgatcattggcagaggaggtgaacacattaacgaaatccaacaggattcaggctgcatagtacagacttctccagattgcggagtatg

SEQ ID NO: 490956 - DNA, 229 bp, Homo sapiens
tcggccgtcttaccttgcattaccacagagtacgagaattactgccagagctaacttttatgtcattacgtttcttaataaatgtaataaaatgtactaaccacatcccaaccaccaacccccagatgtagagtgccctaagagtaaaagaactgtaatgaggacaatctaggtatccacaattcattcaacgtgtgattactgcagctgttatagcacacacacatat

SEQ ID NO: 490957 - DNA, 684 bp, Homo sapiens
  misc_feature (12)..(12): n is a, c, g, or t
  misc_feature (65)..(65): n is a, c, g, or t
  misc_feature (87)..(87): n is a, c, g, or t
  misc_feature (89)..(89): n is a, c, g, or t
  misc_feature (116)..(116): n is a, c, g, or t
  misc_feature (120)..(121): n is a, c, g, or t
  misc_feature (125)..(125): n is a, c, g, or t
  misc_feature (146)..(146): n is a, c, g, or t
  misc_feature (153)..(155): n is a, c, g, or t
  misc_feature (164)..(164): n is a, c, g, or t
  misc_feature (166)..(166): n is a, c, g, or t
  misc_feature (172)..(172): n is a, c, g, or t
  misc_feature (176)..(176): n is a, c, g, or t
  misc_feature (184)..(184): n is a, c, g, or t
  misc_feature (200)..(200): n is a, c, g, or t
  misc_feature (221)..(221): n is a, c, g, or t
  misc_feature (223)..(223): n is a, c, g, or t
  misc_feature (243)..(243): n is a, c, g, or t
  misc_feature (248)..(248): n is a, c, g, or t
  misc_feature (257)..(257): n is a, c, g, or t
  misc_feature (260)..(260): n is a, c, g, or t
  misc_feature (286)..(286): n is a, c, g, or t
  misc_feature (316)..(316): n is a, c, g, or t
  misc_feature (322)..(322): n is a, c, g, or t
  misc_feature (331)..(331): n is a, c, g, or t
  misc_feature (356)..(356): n is a, c, g, or t
  misc_feature (360)..(360): n is a, c, g, or t
  misc_feature (368)..(369): n is a, c, g, or t
  misc_feature (377)..(377): n is a, c, g, or t
  misc_feature (382)..(382): n is a, c, g, or t
  misc_feature (384)..(384): n is a, c, g, or t
  misc_feature (391)..(391): n is a, c, g, or t
  misc_feature (407)..(407): n is a, c, g, or t
  misc_feature (409)..(409): n is a, c, g, or t
  misc_feature (427)..(427): n is a, c, g, or t
  misc_feature (450)..(450): n is a, c, g, or t
  misc_feature (547)..(547): n is a, c, g, or t
  misc_feature (668)..(668): n is a, c, g, or t
gctgctcgtgcncgtgccgctgctgccagctgctggcccaagggcccggagggcgaagggaaacnggcatgcggtgtactggaacancnccaaccagcacctgcggcgagagggcnacannaagnaggtgaacgtgaacgactatntggatannnaaagcacgnantaaaanagcncgggggtnggccccggggcgggancggggcccggaggcggggcanancagtacgtgctgtacatggngagcngcaacggcnacngcacctgcaacgccagcaagggcttnaagcgctgggagtgcaaccggccgcacgcnccgcanagccccatnaagttctcggagaagttccagcgcnaaancgccttcnntctgggcnacgantnccacgcnggccacgagtactacnanatctccacgcccactcanaacctgcactggaagtgtctgangatgaaggtgttcgtctgcagcgcctccacatcgcactccggggagaagccggtccccactctcccccagttcaccatgggccccaatgtgaagatnaacgtgctggaagactttgagggagagaaccctcaggtgcccaagcttgagaagagcatcagcgggaccagccccaaacgggaacacctgcccctggccgtgggcatcgccttcttcctcncgacgtatcttggcct

SEQ ID NO: 490958 - DNA, 118 bp, Homo sapiens
tccctgcaggtgcattgttatatttctaacctcaactctttgagagacgaagtcagtgagatcacttgatgccaggagtttgagaccagcctggacaacattgcaacacggtctctca

SEQ ID NO: 490959 - DNA, 186 bp, Homo sapiens
gtcgacataagcacactagattcttagtttccatgatcacaactatacctttgtagatgatgattccttggtcatctactctagagagattttactcatttttcgtggcttttgagaatttgaacaaaggattcattagagctatatgtattctttcatactcacaatgtgagttaaaatatctta

SEQ ID NO: 490960 - DNA, 486 bp, Homo sapiens
  misc_feature (438)..(438): n is a, c, g, or t
cctgtaggaaaaatataaaaatgttacatatcaataacctattaataacacctgatgtattattgagataacagacgttttcaaaaattttccaaatattcaagtaaatacaatgataaataaggtttataggtagctttactgccatatgaaacaaaaatatttataacatgtttataaggaccagtattaagtctggtcaatcatatccctccttatttaccagggttaaacgtcctggagttaacttcatttacttttttaaagatctttctgaaagggatattgctatgcttgtactcgaactgtactgtaacgtaagtaatttaattaaaaacccatttttctgatattacttttttaaacatttatctcaaaagaggtatttaagggcaaaatttttcatttaggtatttttacagtgtttggggcccccancaaataattctgaggattcggctaaaatttcttaactgtttttttaaa

SEQ ID NO: 490961 - DNA, 515 bp, Homo sapiens
gcggcagtgatgagcttgccgaccagactacaacgatcaagctgtaccagagcagatcttaaactactacagagctaatgaagtgcagcagttcagatactcccggccgtaccgaaaaggagacacggatccagacaatggatctgctacgctgtggcttgaccggaccccgtatacgactgcatataccttccctgggattctcaagtggtttgcagtcaaaccgatttcaacagaagagatcagtcctctggagcatgccatcgaaaccatggagctgaccaacgagaggatcagcaactgtgtacagcagcatgcctgggaacggtccctctctgtgcaccctctctccatgctgctcagtggcatcgtggacccggacgtcatggggggcttctccaactatgaaaaggttcgcttggtcccagaatcccctagggattcaaagacctgggtgtctgtgtgcctccctctgtgccatttgccactgacaaattcatttcctacagctgctc

SEQ ID NO: 490962 - DNA, 655 bp, Homo sapiens
gcgaagcggtatacagtacagagggtggggttgcgggcctgacagctctatgacagaggcgaggctctcacgagacaggctattagagccagccttctgaggggacatacactgctttctatttgcgaccgcccatcttctagagacgactggactaggatagcctggcgtgagttatgaaggagagcgtctatatgactgcgcaaagagactcgagtctagtggcacgtactttcagagcaccggtcctatggctctacgatgagagaggccatttattccctcgcagatgccactagcgacgcgcgctagagatatgtaatgagtgtctaccattccccaccttgcttaacagggggagggcaggttttttagaaaaggacaagcacccccaaccgaacccagtgggtgatggcaccttctcaaaatactggccaaagactcacaggtccaaaagaaggaatgttcttaaaccgattagaagagattttagatggtctttgacccatcacgaatttgtgaagatcatggaaccctctttccggcggtgggcaaatgtgttccggccaccctttcagtgggggaccgggctcttttactggatagggatcctccggggttaatcagggcaacccacgagattttgccctttttt

SEQ ID NO: 490963 - DNA, 1631 bp, Homo sapiens
  misc_feature (589)..(589): n is a, c, g, or t
  misc_feature (733)..(733): n is a, c, g, or t
  misc_feature (833)..(833): n is a, c, g, or t
  misc_feature (1631)..(1631): n is a, c, g, or t
gactcgttatcatgggccgagcaccttgatgctccttcgagactccttggcctcagtcattctacagcgcaacgcagcgcacctatctattaagcctagaccgtgggctgtcgcacgcgttatctggagcggtgcgcagactgaattatggcgcctttctgcgtcgtacgtcagttaatatacactgaccctggatggacactgtcgttacctaccaagtgtgcacacactagactcgccgttatcctgcagtagtatgctatataaggctgagaatgcgatgtcagcacatactcatgcaaccaaagtatgccgctggctcggtacgctcgtacacccgtgtcacactattttacatgcagtgcctaccttagatcagtgctcctgtacttgtcggaaagctaccacctggtagcccagtagttcctgcgccttttagtccattccccgtgctatgcaactgtagtaagtgctttgcatgaattatatctagactttcactatgctagagctattgcacatacgtacacatgtgcggcttgcatcgacgcgttatagatgcgcaatggccccctacccgtttatgttncaccaccatattgcgtaaggtttagaaggcccttctacaagctggttcaaccgaagaaaacccactagcacatggggaccccaattccaaattcaacattggcccttcatgcaataaatgtagtagagagatactccctaggtncccgatttggaacccctctagaatcccagggtggccccatacttcaatgtgggccttctctaaagattgaatcctcccgcggcctgatggggcattgttncggcgtttttcgaccgtttcgcgagcactctccaactagagccgtctctcggtcaagtacattaggggccccttaacatgagagcccataggaagggaattaaagccgagtaattaccccagggtggagttcgggcggccggattgttgagatcggcaggaaggaaaagaggcaacaattaccccaagagggcttcaccctagtaggtaggccaactgctttgttccccaaaagaaggggtcgtctcggaataccagggggagtacagtcgcgtaatgttaattagaccgtctagagagagtttggtccacatttcacgcggagagagatactggccttgaaggcccttttgcagctacgtcccagggcctaggtgccctatagccccccaagttattcggggggcactttggcgcgcccaagaaaggggcatatagccgcgggggaatatccccctatagaaaggtgcccaaatcgtagaaagcgatccgggcagttatacccgggttgaggggagcatacaactagcccgtggggtcccgatattaaattgaaacagacgaagaggacgatatctacacaggcggccacaaaagaaagggggctatgaaatactgcataaaacagagatgaggctcccaaatgtaagggaacaggggccaacaatatgagaaggccgaatgtaggtggaatacccacatcatgcggaaagttacaacagccgaggcgggtgtgtctggaagatttcgttggcatgactatatcatgctcgatctgcgcttcattgtgcgctctagn

SEQ ID NO: 490964 - DNA, 468 bp, Homo sapiens
  misc_feature (11)..(11): n is a, c, g, or t
  misc_feature (162)..(162): n is a, c, g, or t
tctagtcatancaggtcacactgataataatgtgctttcaaggtgtattactgccaacacaattcatgtctggactttcaggtttccacaagaaactggacttgcagattcatcggagaatgtcggctcccaggttccatcaagctgacatactgatatgtnacctccctcaaaggtatacccttctgcacatgacacagaaacttggctattcacactgaaatcgtccccatgaacaagtatatgtgttatgtggtcggggagaggacattctttaggactgcaggagattctctcagggaaccagcgaccatctttctgacaggtgaatgtatctgtatctgtatccatcgtataaccttccagacatctgagtttcacttcactttcataggtgtgtgcctctccagttgccactgcctcggcgacagagggtggggacccacaaggtataagggctcccgtggg

SEQ ID NO: 490965 - DNA, 677 bp, Homo sapiens
aaacttctgtgtacagagcagccaggccgagctgaaagaggcggtggaagagccatcatacaaagatgttatggagaacaagagaggaagaggaggaggaggaggaggccaccaacacccaccctccagacagcctccccagccagaaatacccaggcccacagcgccgagggggacagtgagggcctctctcagggctctggatgcgacagagagaagggcctgagctgcacagccagggatggcaggcaaacgcagagaagaggacggagcgagagaggcaggaggaggctgaggctggagaggaggctgatccccgaggaagaaggccccactgtagctgctagaacccccacccgagccttggctacaaggagatccggaacaggcgagagtcggtcggagagctctggctgtggactggagctgggaagcctggggctgaggaggctcaggaacccgaagggaagggagaacaggagcacatcccagcagaaacgagcgaggaggaggagatggcagtggatcccgcaaggaccatcttccaggggatgggaagagcggagagctggagacaggaggaggaagcggctctccaaggagtgagaggactccaaaagctggaacaagatggaaccagctgccaagggctgacggctgaaagcggtggagggcag

SEQ ID NO: 490966 - DNA, 411 bp, Homo sapiens
  misc_feature (8)..(8): n is a, c, g, or t
  misc_feature (20)..(20): n is a, c, g, or t
  misc_feature (39)..(39): n is a, c, g, or t
  misc_feature (58)..(58): n is a, c, g, or t
  misc_feature (96)..(96): n is a, c, g, or t
  misc_feature (114)..(114): n is a, c, g, or t
  misc_feature (133)..(134): n is a, c, g, or t
  misc_feature (257)..(257): n is a, c, g, or t
  misc_feature (305)..(305): n is a, c, g, or t
  misc_feature (378)..(378): n is a, c, g, or t
  misc_feature (383)..(383): n is a, c, g, or t
cctgatgntatacaaacccnagacactgaaatgcttacngattaaagaaaacactacngtctaaaatgccactcaccgcagaataaatctgcagcnggaaaatctgacctttanccctgaatctgcctctaannagctgtgtgatctggggctagttagtaagtcactctgaatcccaatttctttatcagcatttgggacttcctacttggggtgcctatctctcaataggcagaaagtgaggtagaatgagattnaggatgctgggcacagtggctcacgtctgtaatcccagcacttttggnaggcaagggtgggtagattgtttggagaccagcctgggtagacatggcaaaaccctgtctctacattttgttnaccanaaattaggccaggcattggtgggttgca

SEQ ID NO: 490967 - DNA, 682 bp, Homo sapiens
ggatttttgtgtccgcacgctcctgctcctgactcaccgctgttcgctcatcgccgaggaacaatgtcggtcatggaagcccgcgcgcaactagccatggctttctaaggataccggaaaaacacccgatggagccggacggtaggcaattcaccgacattcgaactcaccctaaccaagccgcacacgtacaaactcctctggacaccggtgtgtgcctgacctttgataacgacggcgcacacacagacccagaactctcaacagctgaacacggaccagctatcgaactgccctaccaacggacctctgacgcactcacctaccccacgaccacacaactcccttgcttggtcgacagggcttcctaaacgtaaccgctcggcgcactccgctatctcgccaggcactgcagcgaccattgcaccaaacgacggagcgtccacttcgccccttctgacactcagaatcaccttacttggacgcaacttcggcttacaacgccaacgaattaacactactcccccaataaccaacgctactttttggcctggcaccactgggaacggtttcagactgcgtgcagaaacgttacaaccccaatattggccgcgcatttgggctcttcgacgtgttcaaaccttactttcacctcacctccgacagtcccggacctcaaccc

SEQ ID NO: 490968 - DNA, 384 bp, Homo sapiens
  misc_feature (9)..(9): n is a, c, g, or t
attcgcggncgcgtcgacccgccagcaacatcgccaggcggttctgatccaggcccagggtgacacgacgcgggttggccaggtggctgtcgtccaccagcgcctgcacttccaccagcatcggccgggtgccttcccacgttgccatcaccacactgcctgggacttcttcctgggcacgggtaagaaaaatcgccgacgggttggagacttctttcaagccccggtcagtcatggcgaacactccgagctcgttgaccgcgccaaaacggttcttcaccgcccgcaacaaacgcaaccgcccatcggactcgccttcgaaatacagcacggtgtcgaccatgtgttccaacagtcgacgcggccgcgaatttagtagtagta

SEQ ID NO: 490969 - DNA, 328 bp, Homo sapiens
aggagttaacctcgagcgacatcggtctccagccatcagtacagtgaggcagttcttgaaaaccagacagaacagaaggtatcactgtgcaacgtcccttctgtggtcacggcgccctctgagtcaggataatgagagaacattcttaaaacatgacctaaccacgctctgtcctcaaacaaattcctggatgtgtgtggagtaagctctcccagcaagcctgagcacagacgtgcgggcgggcttgttagcactcttctgagttgctccctttacaaagccaccttcccagccagttcatttgtattaaagtaaacttttaaaaata

SEQ ID NO: 490970 - DNA, 161 bp, Homo sapiens
ctcgggcacgcgctgatcatgaggacgtaggcacagtggcctagcagccacctgctaggtacggccgagtgtctggcaacctggcggcggctcaggtccgagctaccttttcctgctggctttggacctaatctgaggccccgttgggcacctgggttaca

SEQ ID NO: 490971 - DNA, 143 bp, Homo sapiens
agccagaaactaaattacagggcccaaccaacattagaaaaatacttgctataacctggaatctttcactcaagttttatattggtgtgagacttgtgtaaattatatgctttgatcctctaacacacgagtatatcacaaat

SEQ ID NO: 490972 - DNA, 971 bp, Homo sapiens
  misc_feature (48)..(48): n is a, c, g, or t
  misc_feature (764)..(764): n is a, c, g, or t
ggcgggggggccgttaggggcgagagtttagtcttaagaaaagcctcncgtatgctggccaatattctgctcaggtctgtctttgggagagagaaagaatcttcatacacacccattgacaaaatggctatgtatccgatcccatgagctcaatgcattttcattcttgccgaaatagtagcagctttgaggacagcagctgacagcattcggcgtatacctaaggagagttttttccccgaactgacagcaacgattccaaccacggcaagctggcttccaactataacattttactctcacaggtctccttaaattgggcttgcttttgcttgtcctctctaattccccccctcttcgctcgcctcgtatttgtgcctccggattcctgtgcgcccgagccccccccagcgcgtctccggtgaattgcccgccgccgccgtcccctcctcttcccttttccccccttctcccaacccgctcccatctttcgtgtgctcgctgcttcttgtgccgcccggcgcccctttctcctctgtccggcccgcccctcgtcgggccccttcgcggggggccctcccgcccctgccgcctctcggcgctgcaccccgtatcttccccccccctgttcttccccctgcccccccccccgccggtccgtagtgtctccccccccccccgcccccccgtcgcgcccccccctcccttcccccctgcttgtaactctttcccccctcccgcgcgtgtccccccgccgccccggntgccccccgcgccgcgcggtccgccgcgcacgcgccttgcatcaccccccccgctctagtacatgccgcgtgttaacccccgcctcctcccttcgcctcctcgtgcccctcgccgcttccgcccgtgcgtctgcctagctcctctccgtctcgctttttcacttcgctcgctcgcccgccgtactgaataacattagaacaacaaac

SEQ ID NO: 490973 - DNA, 372 bp, Homo sapiens
tccagatgagcgtcccccacagagagagcgtcccccacagagagagcgtcgacgctctctctgtggggcctttgacatgctctcctctcctccaggagtccttgatactctctgtgctgtctcacaaccaggctagcttagggaaccttctctgaactccaccagcagtgtcacatgtacacacagacgtactgtgcggggagcatcggtggtgtcctcctgtcatgctctgttattctcatagcataggacttgccagacttgatattggctggttgacttgcttatttcccctcccagggtggggccatgttgtgagtttggtgagccccaggtacatttgccttcataggtcccccccagagagagcgt

SEQ ID NO: 490974 - DNA, 361 bp, Homo sapiens
gagcttacctcccactgggtggcaggtagactggttcccggcggtgagcgacacacagggaacggtgggtccctcaagctccatcctaaaaccctcggctcggtttcctatcttcttcctcacgtagtgtggagcggctgcatcacttcccctagtggggatgccaaaacggcctcacagcccttcccctctggtgggatattaaggtctctggcgattctcctctatggtaaacactggtgaaaaatggtctcattgcttggtccttctggcgggatttcaagaccccaaatccttcacataagtccttccaacagcgctctcctctccagaaggaaccttttggcaaccaagggggagg

SEQ ID NO: 490975 - DNA, 375 bp, Homo sapiens
  misc_feature (59)..(59): n is a, c, g, or t
  misc_feature (223)..(223): n is a, c, g, or t
ctaaaaatataaaaaattagccaggcgtggtggcgggcgctcgtagtcccagctactcntgggggctgaggcaggagaatggcgtgaacccgggagcggacttgcagtgagccgagatcacgccactgctctccagcctgggtgacagagcaagactccgtctcaaaaaaaaaaattaacatacaaaacccacccatttccagtttcacagccgtggcgaagnggtgtgaagcactgtagcctgccctctctggcgctttcccttctaagccgcagaaaggcaccgcttggagggagccccttcaggcccagacactggcagggacgagcagcagcagttggcccgaccgcccgcctgcacctgccttggcacct

SEQ ID NO: 490976 - DNA, 307 bp, Homo sapiens
  misc_feature (19)..(19): n is a, c, g, or t
  misc_feature (38)..(38): n is a, c, g, or t
  misc_feature (50)..(51): n is a, c, g, or t
  misc_feature (57)..(57): n is a, c, g, or t
  misc_feature (63)..(63): n is a, c, g, or t
  misc_feature (73)..(73): n is a, c, g, or t
  misc_feature (102)..(102): n is a, c, g, or t
  misc_feature (110)..(110): n is a, c, g, or t
  misc_feature (113)..(113): n is a, c, g, or t
  misc_feature (122)..(122): n is a, c, g, or t
  misc_feature (128)..(130): n is a, c, g, or t
  misc_feature (162)..(162): n is a, c, g, or t
  misc_feature (164)..(164): n is a, c, g, or t
  misc_feature (168)..(168): n is a, c, g, or t
  misc_feature (176)..(176): n is a, c, g, or t
  misc_feature (192)..(192): n is a, c, g, or t
  misc_feature (203)..(204): n is a, c, g, or t
  misc_feature (256)..(256): n is a, c, g, or t
  misc_feature (267)..(267): n is a, c, g, or t
  misc_feature (279)..(279): n is a, c, g, or t
  misc_feature (287)..(287): n is a, c, g, or t
  misc_feature (294)..(294): n is a, c, g, or t
  misc_feature (304)..(304): n is a, c, g, or t
ctaaagagatgcccaagcngcagtgcgaactccgcganggagacaaagcnnccgggngctggnaaccaagganggccccaccgacatcttacttctcggccntatgcccncgngttttgcgncaagcnnnttccagagcccttccacactcaaaacgcacangngatntcacaccngggagaagccataccngtgcaagaccnncggacggtgcttttcggtgcaaggaaacttacagaaacatgaacggatccanccggggttganggagtcgtctgncagtattncaacacngattcacttnaat

SEQ ID NO: 490977 - DNA, 738 bp, Homo sapiens
gctcgccgcggttccgcggcctggcgccggctgcgcagcagagcgcaccgggccgatcgggcgagtggccatggcgggcgccgaggactggtcgcgggccagacagctggagctggagctgaggacgaggctgtcctatgtttgcccgacataggtggctgcggcatgcaccgcgcggggacccgacgaagctggccatgcggcatcgtactgcgtccaaggtcaaagacagcgatccaagagagctgagatgcatcgtgatggaatcactggtagcgtatcaaggtcttcgagtacaggctccaacaataacgcgtgggatcgcgacttcgttcgcattggtctagtcgatagggtcccccaggcttttgtggcggaaagcggaacgaacaaagcgcgccccttcgggttccgaagtagcgtccagggtagggttttgggttagtcgaagggggaggccattcgtttccgaggtttggcacgttgaaccctgtctcgcttctgcttacccttggggtaccccgcttgggggtttaaccaaacccatttggggcgcgtttgttggccccttggagaacctaatcccaaagttggcggggggcgggaccaattccattggatttggaggaaaagccccgttggagcccttcgacatttttgcgttggcgcggagttaaccacgcggggccgtttgatacaaattgccccaggaaaaaccacgccgttgttcccccggac

SEQ ID NO: 490978 - DNA, 457 bp, Homo sapiens
  misc_feature (449)..(449): n is a, c, g, or t
gtaggacccccaaaccagaaaccaggagtgaagagccagggagcatgtgtggaagtgttctcgggagcccaccaacatttaagggttaggcgcaccaggtgtgatggctcatgcctgtaatcccagcactttgggaggccgaggcgggcgaatcgcttgagcccaggagtttgagaccctcctaggcaacatggtggaaccccgtctctacaaaaaatacagaaattaggccgggcgcggtggcttatgcctgtaatcccagcactttgggatgccgaggcgggcggatcgcgaggtcgggcgatcgagaccattctggctaacacagtgaaaccccgtctctactaaacatacaaaaaattatccgggcgtggtggcacgcgcctgtagtcccagctactcaggaggctgaggtgggaggatcgattgaacccaggaggcagaaggtntagggagc

SEQ ID NO: 490979 - DNA, 487 bp, Homo sapiens
  misc_feature (113)..(113): n is a, c, g, or t
  misc_feature (131)..(131): n is a, c, g, or t
ttagttacgaaattaactgttaatagccatatgttggcccttcatttactgtactttaaagtttttgagacagggtcttgctgtattgcccaggcaggaattcagtggtgtanccatggctcaccttcgantttcagcttcaaacctcatgggctcaagcgattttcctgcctcagcctcccaattagctaggactacaggtgcacacccctatgcctggctaattaaaaacatttttttgtagagactgggtctcactatgttgctcagactggtctgcgattcctgggctcaagtaatcctccaacctctactcctcaattttttttagttttggagacagggtcttgctgtgtttcccaggctggagtgtagtggcacagtcttggctcactacagcctcgaactcctgggctgagttgatcctcctgcctcagctttttgtgtagctagactacagtcctgtgcccaccacaatcagctaatt

SEQ ID NO: 490980 - DNA, 191 bp, Homo sapiens
tattgtcatgaaataccacaatctctcacgagataaggaaaatatctatttaatgaaaggtgggaggagtgactgcattcttcaacagtctcaatgtgcatcaaacaggacataaatgtcataagatttgtgtaaatgttcacaattaaaggagactatgccaagcatggtggtccacggcatcacgtggg

SEQ ID NO: 490981 - DNA, 252 bp, Homo sapiens
tatcgcacatccagccagccaccaagtcggcttgattcaaccagtgaagcatctctgcatctctctgttatgccccatccccactgcaactgttctagcccaataatggtctcttccagtatttactatttgcagaatactatgttagtcactttatatacatctttttatcctcagaacaattcctatttgcgagtgaggaaactgagtcacagggagacgaagtaactttcccaaggacacgaatgttca

SEQ ID NO: 490982 - DNA, 322 bp, Homo sapiens
aattaaaaaattggccttttaaaaaaccccaaaatttggccccgggttttaattttccaaaaattttctttttgaaaaggcaaattccaggggtcccgcccctcaaaaatttcccccttttttatttttccttaggccctaaaaaacggcctttggaaacctgtgtttccttattaaagcttaatttattttttaaataaaaaggatgggctttgggggcaaaaaaaattaaatgaattagtccccccaatgttggctggtgttaatgtgaaaattaaacccctggttcccctttttaaaaaaaaaagttttctttgaatta

SEQ ID NO: 490983 - DNA, 155 bp, Homo sapiens
accgacacctccagcgccgaccagcggaagtgactggagaggttcagacgtgaactccccactgtgtctctggtccccgtggaaatgaagaaggtgtagggccgttgttcggcaccctggagggactctgggcggatcctcctgctagccgagca

SEQ ID NO: 490984 - DNA, 176 bp, Homo sapiens
ctctttgccgaaattgcgcgtgaatgatagcggcttgacgagagggtctgatatcgcaattgagtttatgatcgcttccgttgcgtccttgcttccgtcattgatgaatactatctctacttcgtattgctgaaggtcttcaaactctctgacggttttgtaaaaaattggtatcg

SEQ ID NO: 490985 - DNA, 115 bp, Homo sapiens
taaaggatttgaagttagcttcagtatcaaccaagctctgcaatttacacgaccactgggaactgactcagccttgctgagtctatgtatcctcagtctgcaaagcagcgcaaaa

SEQ ID NO: 490986 - DNA, 278 bp, Homo sapiens
aatttaagaaagcttgtctagaaacaaggtgtggactatccccccatcgttatatatgccatgattggaaatgatgtttgcagtgggaaaagtgacccagtcccagccatgaccactcctgagaaactttactccaacgtcatgcagactttgaagcatttaaattcccccctgcccaatggcagccatgttattttgtatggcttaccaaatggaacctttttttgggataatttgcccaacagatatcatccctctactattttttaacccaatca

SEQ ID NO: 490987 - DNA, 696 bp, Homo sapiens
cgcgtctgtccgtgcggcccggtccggcccgaagcatggccggcgtcagcttcagcgggtcaccgcctggagctgctggcggcttacgaggaggtgatccgagaggagagcgcggccgagtgggctctgtacacatatgacagatgggtccgatgacctcaagcttgcagcatcaggagaagggggctatgcaggacgcttacgggacacttttgagaaccacgagaggtgatgtacggcttctgcagtgtcgcaggactcccaagctgctctgccagaatactgtgctcatcaactgggtgggcgaagatgtgcctgatgcccgcgaagtgcgctgtgccaggccaccgtggctaaggtggcagagtggcttaccagggtgtccgaccgtgatcgtgaaacgccagtcacgccgtggaagaccactagacgcgggtgccactcggggcagcgggagtctctaaaggggtcgttggcgcgactctccagccctggtgctgccaccgacatgcgtggctgtcagacgaggggctgcagaacgcagacgcccgtgggctccacctacacaggaaggcacggagtgcatcctgtggaaactgacagcggattaaccgacgagcaggatctggagagcaggacaaggagggacagaagagctgcggaacggaggcggagcggaagccggcctggatggag

SEQ ID NO: 490988 - DNA, 827 bp, Homo sapiens
tggtctaaatttaatgtatacgggtcctccaaatgtgtggaagggtggggggcatccatatatgtccccccaggttaatggagggttcctatctactaataagggactttatctgcttcgaatgcagaaaggcttctacaaatcatagaaaatttattaatataaactggctggtaaaagaagaaatagaatgagacgccatacaggatagataaaggatgtgtatccatggtgggtgtgtaatcgctatcggggagtaagccccggagtaaaacgtgctcggggagctattcctcggggaaaaagggccggagaaacgagtgggttgtgtggggcgcaaccaacaactgtatcaaaaatataacaccgcccgtattagacatcatcgtattaaggcggacaatgggaatataggcggcggcaaagtgtataggggccacgagcgggggtgaacaaccaggaaaaaataagggggggaaacacactgcgcgaggaatgaagaaaagctctcactcatacatggatggggggcaaaagataaccaacggactcactcaaatatagaggaaaacagggagaaccaataaatgcgtcgggcaagaagcgtagaaagccataaccaaacgcgagataagaaacagcgagatgaccgagggataagcaacacggaagtgactcatacagggtgaaagagacagataagtggcagaaaaaaacaccaagagtgtgtcccaacgctacgagtggcgccacacccaagacgggggggggaacaaaacgagaaaagagagatgaagacaccccaaaagggggaccaccaaaaaatc

SEQ ID NO: 490989 - DNA, 281 bp, Homo sapiens
aattaaagttcgggtgggggcccaattcttggcccgacttcctgggaagggtttgtttgaagaggggggttcttttcccgcttttttttcaaagggttaacggggcaaaaaggttaaactccggggggaactttttcttggttttttcccggggcaaagggaaaaaaatttgggaagggttgaaaaaaatttggttttccctttttggggggggatgaaaaaaaggggtggggggtttaaaaattgaaatggttctttttggggaaaaggtttttttccca

SEQ ID NO: 490990 - DNA, 633 bp, Homo sapiens
gccgggctcgggggcgcagccggactggacggcggctcctgtgggcacttggccgggtttgctggtttttcgggaaataaggccactggggacagtcactacgttttcaggaaccgctcagcccctctgagtgccccgcagatggacctggcggcgttcctggctacggctgactgggctcccggagctaggagcgcccctgcgggcccagcctgggccctgggcggtgggagggcctccgcccccttcccgcttccgccccgctggcgccggacccccgtcctcgtctgtgcctgccaggccgggcccttccctcccgtcacaggcggtccctgagcccacccttcgtctccgagcaggctggaccggcgtatagcgtttgccagctgagttccaggatgtccccgagtatcttaggaaagggccgtgttggacaaacgcggggctcggtgtttcttccgcgccgtccctcgctgctggcgccggggccgtcggaggctcagtgatggcccagcccgcccgtttccgagaattccccaaacgcgggcccctacacgctgagttcgcgctctcccgtgacggcgacagcccgcggaccctgctgacagcacactctgggctgcagagggtacc

SEQ ID NO: 490991 - DNA, 186 bp, Homo sapiens
agtactcattaatttatgaagcatacaactagacagtttcacttgcccaaccagtatgttctgtcctatacaatgagttatacaggaagccagctcacctgaaggttgagaacaagttggaatataacaaagacactttttttttttttttttatcactcgggtggcggaaaaataagagggggac

SEQ ID NO: 490992 - DNA, 351 bp, Homo sapiens
  misc_feature (177)..(177): n is a, c, g, or t
  misc_feature (181)..(181): n is a, c, g, or t
aagggaggggaaaaaaaaaaaaaaaaggaaaagcacctgtctttctctccctctcttttccctttttttggcacatcttttttttaaaacggtcagatcatttcagtatttcaaatccgaggaaaacagcccccctgctgctgtatttaaagttgtaatggggtcaaaaagtcccgnctgnctgccacccgccagtcccaaaggggctcattaaatcataaaaacttgccaaggaaaaaattgggcattgccaccaacttggcgccggtttaaacgtttttattttttttcattattagtcccccccattacgttcattaacaaattgcattaaacacctgttaagggcta

SEQ ID NO: 490993 - DNA, 185 bp, Homo sapiens
ccccttgccctgtccaaagcaaacttcacagcctggctctagtccacgacgaaattagtgccttcatgtagtacattgtagagggatccatatagcatccagtgtgtgatgagagtaggatagaggagcaggtggagactggcaggcacctgctcctcatcctactctcatcacacagtagcgaa

SEQ ID NO: 490994 - DNA, 128 bp, Homo sapiens
tggggcaaggtttggacaggcagggtggaaaggcctggggttgaataaggtgttttaaacccccaaaaaaaatggtaaggagtcaggtaaagactgatgattttcccttttaaactaataattttata

SEQ ID NO: 490995 - DNA, 1253 bp, Homo sapiens
tcccttaatacttctgtaaattttcctgcttataaaaaccgggcaacaatggccttatacaaggagaagggaaggaaatggctgggaaaaggtcctcaggagccctgagccaatgtcctcaaaaaaaaagtagaggcagctggggagatctgggagaggccaaagtccggggccagggcctcagctatccaaaaaccaggggtcttgtctctcccgcagaaaagacatgttacaagatgtgtggtgtgagatctcccatatagcgggacaggggtgtgttccacaacaccatgtgctcttgagaacacacctctctttcttctctctcagcccacaggggaagtctctcacaacgaggggacacgtgggggaccgtgcttactcaagactctcgagccgagagagaggacacgcgtggacacacgtggcgctgtgcgtgaacagaggggacacaagtggccacacacacaggccagtaggagacagagggagagactcccgctgtgtggagacacaagactgtggccacacactctccacacgaccccgacagcagggtgtggcccacacagaagtggggggctctcttcatcccacagcaggggaaaatagtagcgccgacacaggccggttgtggggaagagtctcaccagaggaggggaagttgggtaaagacatcccacaccccggggtactaccaaacgcacaacaaacacacacccctgtgggccgacaaacaacccaacttatacaacaatagtcgccgcagacattaaaggagagagaagtaggccaaaaagacaccccaccaggacagaaaaccggtgtcgacgtatcaatcatgtagaaccaacgtcggtgggcgtcgcccccatcatggtgagcaggattcacaccattccacttccacacaatataacacaccagcgcggtcgaggaggcaacgcaaaaccgaaggaaggcggtagatggccgacaccccacggcaggacgattgtagatcctccaatatataggagggggggcaacccaaacggccccccccaacaaagacagaagtaggacacagtagcaacaaagatcgatcatactaaaccaggatggggaacaaccacacagagggggggacatacatcgtcggagccaacaacaacatcgccaggaaaccacactacgatgcgatgttggcaagcccgatgatatgggagtaacccccgtcgccacactagtgtgggacgaaaaacaacaggcga

SEQ ID NO: 490996 - DNA, 381 bp, Homo sapiens
atggagtctcactctgttgcccaggctggagtgcagtggtgcgatctcggctcactgcaacctctgcctcccaggttcaagcatttcttccgtctcagccttccaagtagctgggattacaggtgcccaccatgccaccacgcctggccaatttttatatttttagtagagatggggtttcactattttgcccaggctagtctcaaactcctgacctcaagtgatccgcccgcctcagcctcccaaagtgctgggattacaggcatgagccaccgtgcccagcaattttttgctactttttgtttgtttttgttttgtttctgagacagagtcttgctctgttgtcgtggctgcgccccctccgcgctgtccgccgggggg

SEQ ID NO: 490997 - DNA, 323 bp, Homo sapiens
tctagaggatccagttccttctctaatacagcaaatactttttatatgaaagtaaaaagtacagggtcacaaggcagaattggtggttctccccagtacacaccggtgttggcacaatctctgggttggaaatggctttttggtccatagtttggcagtaggttcttccaaaaatgttttggtccgggtgggaggaagccagattggttttcccggggttctcccagtcggtagggcctttccctccaagcacacttcgttatggggggtgggaattttactccttaatgggaccagagaaaatcaggggctgcaccaatggg

SEQ ID NO: 490998 - DNA, 110 bp, Homo sapiens
agtcaccacaggagagctatctcccaaactccccgattcctgcgtagtccgcttaactcttgcagacacattctaaaggctatgatatattccaaatggatcaatgaggg

SEQ ID NO: 490999 - DNA, 124 bp, Homo sapiens
tcttaggattctcatgtgtcttaggatggtggaccggagcacattaatagtatgggtttgaagaaggcgtgggtacagatgtgcaggaatggtaggtgtgggtggttgatgcgattgtaatatt

SEQ ID NO: 491000 - DNA, 918 bp, Homo sapiens
  misc_feature (14)..(14): n is a, c, g, or t
  misc_feature (554)..(554): n is a, c, g, or t
  misc_feature (584)..(584): n is a, c, g, or t
  misc_feature (678)..(678): n is a, c, g, or t
  misc_feature (779)..(779): n is a, c, g, or t
  misc_feature (789)..(789): n is a, c, g, or t
  misc_feature (798)..(798): n is a, c, g, or t
  misc_feature (807)..(808): n is a, c, g, or t
  misc_feature (810)..(810): n is a, c, g, or t
  misc_feature (813)..(813): n is a, c, g, or t
  misc_feature (816)..(816): n is a, c, g, or t
  misc_feature (819)..(819): n is a, c, g, or t
  misc_feature (858)..(858): n is a, c, g, or t
  misc_feature (914)..(914): n is a, c, g, or t
agtgtgctggaaanccatgccgactgtgtatagggcgaaagtgtcacaatagggtaaccacagctagcatgcctgacctgaacaccaaccacagcgcatttcttgccttgtgtctctactccttaattttgcttcattttccctctcagtaccccattacttgatgatagatagttactgagtgctgctcacctttctgtgacctcggccatgatgaccgtaagaggcccacggtttccttgccagccctgtatcccacatcaggaacagagagccttgcttgcacttagcagaaggttaacaaatgtttgtaggatgagtagctgatctcatgtgagtcgatcattctgatgaaaggaagagtgatcacagattctgatcagttctgggatgttgacacagtttactgcaaagaagaagagcttgagccatactgagttaactaagaaaaatgccagcacccagcacgggcaaagctgccagccggctctcctcaggcattcctttctgtttcctagtgctcactgggtatacctccagtcacaaatataaancagtgacaacaaatgactacaaactgattnatactgacaccaactatagtaatgacagttactaagtactttctatgtgcaagaacatctccagagttggccatactgcgctgcaaaacatttnatcaataacaccccaccaacaagattccagaagacctgaaatctcacctgaatcagaatggctatcagcaagaaaaaaaaataaataacagatgctggcgnagatatgggnaacaaaggntgctttctnnanacnganaanaatgtaaactgtttctgctgctatgggaatcagtatggngattctcataaaaccaaagtaggactactgtacttgcattcttgggtgtatattcnaagg

SEQ ID NO: 491001 - DNA, 836 bp, Homo sapiens
ggaaaaacctcaaggttccacaaaaaaactattaaaactgataaattcagtaaagttgtaggataaaaaatcaacataaaaaatcagaagcatttctgtatgcaacagtgaacaatctgaaaaagaaataaaaaagtaatcccatttataatagccacaaataaaattacatacttaggaattaacgtaaccaaagaagtgaaagatctctgtaatgaaaactgtaaaacactgatgaaagaaattgaagaggataccaaaaaagtggaaagatattccatgttcatggattggaagaatcaacattgttaaaatgtccatactacccaaagcaatctacagatttcatgcaatccctatcaaaatatcaatgacattcttcatagaaatagaaaaaacaatactaaaatttatatggaaccataaaagacccagaatagccaaagctatactaagcaaaaggaacaaatctggaggaatcacattacctgacttcaaattatactgcagagctatagcaaccaaaccagcatggtactggcataaaaacagacacattgaccaatggaacagaatagagaacccagaaacaaatccacacactgagtggaactcatttttgacaaaggtgccaagaacagggaacaagacagtctctttcaatagatggtgctggggaaaaaactgggattatccatatggcgaaagactgaaaattagaacccctaatctcttgcttatataccaaaaatcaatcacacttgggtttaaccactttaattctagacatttaacttatggaacacttacagaaaacatggggggaaaaaatcctc

SEQ ID NO: 491002 - DNA, 298 bp, Homo sapiens
acatacaatcacgatgtaaaagaggcttagcaaaactattaccaaatcccacaactgttcagtctctaattagttgtgctcatcagctccttcttacatacgtctaacacaggcaatgggcaaccctctctcatggaagctaacatcatatggcacctctgtggttctttcatgacccaatttccaacatataatcaacccattactacactatgtacaaaggtaggacactatgactgacaactaacgagacaagaaaaatgatccaagacacccccatggactgatctacgactat

SEQ ID NO: 491003 - DNA, 179 bp, Homo sapiens
tcgtaccggactatgggctgtagctgatttcttattatttttttttttgagatggacttttgcccatcactcaggctggagtgcaatggtgtgatctccgatcactgcaacctccgcctcccaggttgaagtgattctcctgcctcagccttcctagtagctgggattacaggcttgtg

SEQ ID NO: 491004 - DNA, 165 bp, Homo sapiens
gcaagtacccagaagtttgatgttgtttcttgagaagaaagaaggaggaaccgagacatgtgtcattcccatgagagaaaatgaatcacaactcgtgtagttacttggaaatctctgaggtgctaccctcaccccatttcctcagccattccaagagaaagggtt

SEQ ID NO: 491005 - DNA, 233 bp, Homo sapiens
gtaatgaagttaaaatgaggtcattaggatgagtcctaatccaataggactggtgtttttatatgaaaaggaaatttgaacccagacccatatacaggaaagcccatgcgaagaagacacaaaaaggaaacggccatctccaatccaaggaaagaggcctcagaacaagccaaccctgcaaataccttgatttaggcatccaaaattgtatgaaaatacatttttgttattta

SEQ ID NO: 491006 - DNA, 1565 bp, Homo sapiens
ggagagaagcagtccttctagcgggcttatgcgtgaaggctctggtgctgatagtagcacgccaagtccaaaagcacaaatctactaacagggacaagtattcagagacagccacacaggctctctagcaagaaactgtacagcgccagtgacagaagaaaacgtgggacaccagccaggcatggagacaatgctgaaagcaagcaggaacaactcgcacgccctcacgacgacgctcgcttgcgcctgacagctactctagaaacaggacctcccaacgaacatggcacgcctggcaacggacaccaggacgtgctgcatatccagcacaacaacgcccattacactccacacaacatggcacgcgagcccgaggggccccccccggcatctcaagcatcaaagaaaccatagcccataagacacaacacggcaacgcatggcacaccgcggcagccaacacagcaccacaatgccccttacacaggtcgcacacgaccctggaagcgcacgtagcacacgaagaacctacagagcgacaagcacctacctagacacagtaacagacactaagagcgaagaacaccaccaaagaaaaagagaggaaacaaagagacatagacgaccaaagaaccaaataaggggacacgcggccaagcaacacaccaacacgaggccacagcaacaaggacccccactagcacccttaccacccacgcgacagagaaaaacatgcctaggcccaacaaacctaagccccagcttcagcccccgacgagacccaagcctcacgacaaaagagcagaaactccttaagggcgcaccccaacggcagcacgcctcaaattagacggacagcctatcaccacaactagcaccaatgcccaccgccgcccacttgccgaccctaaccccacagacacaaaagcaacatccagaataaaaatctcaccaacacacaatcaccccacatcgcctagggacaacacgcgaccctccagggcacacaccccctgggcaccacaaccacacacctcaactcacgcatcggacgcgaccactgcaacagacacaacacacaacagacaacagccccacaccatcccaccctctcaacactaagcaccacaccacacccaaacaagcagagcaagcactgcaccagaaaacacagtgagcaacgactcatacagcaacaagagaaaccgaaacaaacagaaacacaaccaccacgcagcacaaacagacaaggcacaacataacgcacaccgtccaccaacctctagtcgacgtcccatcgacacaacacatacgccacaaatagcaacatcatctataatatcattaagtctgatcagtagtgcagtaataccccatgcgtcacaatagctcagccaatagcaagtcgtatatcaataccaacactaataacaatgatatctacggcgctcatccacagtcccagattaatttcctgtataccaaacctgcatctctcactcaatactcggtaggtctatcgtaacacactattagatatactacacatcaacacaatactcatg

SEQ ID NO: 491007 - DNA, 321 bp, Homo sapiens
tagggccgcactaaccctgatactcaactcttgccgaggaaaactgcagacccatatcagcatgaatatacactttcaaacaactcccatcataataataacaaactgaactcagcagaatataaaaaacttacttgggtaaatcctgagaacataaggcttattaaactttttaaaatcaatcaatgtaattagctatagtaacagactacagaaaatccatatgattaaatatactggagaaaaaaaacatttaactggatttaacattgattcccaataaaaactcacagcagactatccacagaaagaacttcctca

SEQ ID NO: 491008 - DNA, 292 bp, Homo sapiens
aaataggctgggctcagtggctcatgtctgtaacctcagaaattttgggaggctgaggcaggcagattgcttgagcccatgagttcaaaccagccagaagcaacatggtaagaacccatctctaccaaaaaaaatacaaaaattatccaggcatggtggtgcacacctgtggtcctagctactttggaggttgaggtgggaggattacctgaacctgggacgtcaaggcagtggtgagctgtgattgcaccactgcacagcagcctggataacagagcaagaccctgtctca

SEQ ID NO: 491009 - DNA, 208 bp, Homo sapiens
atctttgccggtattatgaataatgcagaaatcacctttgttcttcagctggttggacttctagagcttgggcgtgggtgccctgcgtcctgcatctaccttctccacggcagctcttgatcggtggctttgagggaaccagtactcctctgtccagcacgggccagaactgcccgtgggggccttgctggctttctcaattgacggt

SEQ ID NO: 491010 - DNA, 442 bp, Homo sapiens
aataaaatttgtctttgatttcactggtggaagggtgcttatcccagcttttgcttcaccatgaggaggactctgtttttcagtttccgctttatttccctctaacgccacccctgcaagctttgcgcagctgtgagtgatgcgccttcttcacttccttgtcggccaatatcttctccagagcccgggtcaggaacatgttcttcgtcttcttcccttcatacatggacccagaaaggaggcggggctctttccgaccgcgggctcaaacggggtcgagggccgccgcgtcggggacccgttttctccgtgcccgggggtcggtcccggccgccaccttttactcgtcctccgtgccctggtggcggtgagggacgccggcccgggcggctgtctgccgggaactgagtgacgaggtggcggcggctctcagaggcaccgc

SEQ ID NO: 491011 - DNA, 126 bp, Homo sapiens
ccaagtgaggtctgttgcattgacagctgcagcctgggactgaccgggagtctctgattgtttacccaccacagttaggttgcgtcctgagtctcaggtccacaggtgaaggccacagcatccttg

SEQ ID NO: 491012 - DNA, 110 bp, Homo sapiens
cacacggcctaacaacaatagattaactggatatgaagcacatacacggccatgtacggaatatgttatgaatacacaggttctgggtgtagaggctcatgcctgtaatc

SEQ ID NO: 491013 - DNA, 1560 bp, Homo sapiens
  misc_feature (1272)..(1272): n is a, c, g, or t
  misc_feature (1339)..(1339): n is a, c, g, or t
ctgtagatgttgtagcacgcccactgtttgttgttatttcgtatccgtctcgtttggggtgttcttcctcgtcttctctgttctcgcgtgtggtctcttccatcgtttcttggttgtcctcctcccgcgcgtggttctgcgctcaccattgtcttctctggtctgccctcattatcaaccgggcttctcgcggcccccatggggtcgccccccccgtgtcttggagactcctttttagtaactctcggagtgggtgttgtggggccaccccactttttcctgtcgctcttttccgtgcaccatggttgtcccccttgtgtggcgcgtaacaccgcctaccctgtcgccctggcgccctcctttccttcggggaccccacacccgcctttgtaggggataataaccaaagggggtggtgaaacccacgagctttacgtcccgcagaatcccagggatgtggaaaggcgccccacccaccactttcacggggccaaataattctgggaaaatttctgaaaaagtgtgtgcctgataaatatctgcgtaaggcaaatttggctttccccagaaaaggtcaccacctcaaatttctggcctcctctagtgacccaaatggggagactttcgcgcccccgattgtaaaggggaaacttcctcaggggcgcccctctctttgtcgtctttaagtctcggataagcatattttaaattggaatatttctcccttcggaaaaatgttttcgcacacagagtgtggatatatcggggttatatgtgagcactcccacatattgttggggtgcccctgtgggttttaaaatagggttctcgacacacactcatcgtggagatttgttgtgacgtctctcacacatgtgtacacactcgtcgtgtacacacgtggtttccaccgcgtatatattgtatatgtaaccgcgcgcacattcacgcgcgcaccacacatatatgaaatccctcttatatcttagagaactctgcccacaatatatagaatatattgttataagaatagcgcttataggcgcttatatatatctccagcccacataatacccctcggatatgtatagagccccccacagacctcgtgagatatataaaacgctctcccacatatataatattaattaaggaagtgtctcatacatgtgtaaaaggggagataatatccatattgagtattatacaccgcggggagagggtgccacagggataagaacacgacacccttggacacgttctccacgtccncacatgttctcaccacgatctcgtttgtgtaagattctcttatttttaagccactacgcacctcgtntgtggaaggaaaaattatcctcgttcttggactcgccacacgtggtgtcatgcacttcttagaatgattttgaaacttcgctatagtgatgggatatttaaccccgaatagcaaatactgttttcctatctgaggccctggtggaattaaaaacccgtatattttactttgttcccacatagtcttgccccctcttggccaattgccaaaatggtggagct

SEQ ID NO: 491014 - DNA, 479 bp, Homo sapiens
gtaacacctagcacatccttttaaccacagttacagttattatctgcctgacaagtccagacctcccacagactcaaatcacaaaagaggaatgaacatactctagttcatgaggaaatacctgacatgtgatcaaattagtgtcacaactagaaatatgttttttggttacgttttgagacagagtcttgctctgtcacctaggctggagtgaagtggcacaatctcggctcactgaaacctccgcctcccaggtttagagtgattctcctgcctcagccccccaagtaggtaagactacaggtacacgccactactacccggctaatttttgtattttagatagagtcagagtttcactatattggccaggctggtctcgaactccagacttcaggtgatttgcctgccttagcttcccaaagtgctgggattacaagcatgagccaccatgcccagcctggtgccatggagtaaaa

SEQ ID NO: 491015 - DNA, 150 bp, Homo sapiens
ggcgcctagaggatcccgggtcggcaaaggagaggagggttcctcttaggtcagaaggaggtctcagagccaagtcctccctctctacggagtggaaggtctatggccaacaatcctttctgcccacttccccttcccgaattactattc

SEQ ID NO: 491016 - DNA, 463 bp, Homo sapiens
ccgttagccccaaagtactgggattacaggcgtaaaccgccgcgcaggccaggacatattcttatataggtatagtctcagactttgacaatagcagataaaagagagactgcatggaaagggaaagtggtgttgccaccatatcttattctgttaactcttacactcacttcaccttgggttcagtcaactcttctagcagttcaaagtatatctaagtaaatgtacttcaatagcacagataactgtgcgcctagatttaagcaaattggatatgccaaagtcagacattattacacatccaatttagggcttaaaattcctgcattatataattcacattccaaatggcctctttttaataggcgatgaaaatcgtgaaaagtagggataaccgtgatgcgcatttacaggggtaagataatttaaacattagtattagaaaactgaattttaatattcc

SEQ ID NO: 491017 - DNA, 133 bp, Homo sapiens
aaccaccggatctttgtcctactttcgtacctgctcgattgtagtctcgcagtcaagcacgcttatgccaatgcactatcgtcacgattccgaccgtaactagcgtaccttcgaactcctccgttacgctttg

SEQ ID NO: 491018 - DNA, 702 bp, Homo sapiens
  misc_feature (10)..(10): n is a, c, g, or t
  misc_feature (17)..(17): n is a, c, g, or t
  misc_feature (21)..(21): n is a, c, g, or t
  misc_feature (24)..(24): n is a, c, g, or t
  misc_feature (26)..(26): n is a, c, g, or t
  misc_feature (30)..(30): n is a, c, g, or t
  misc_feature (42)..(42): n is a, c, g, or t
  misc_feature (50)..(51): n is a, c, g, or t
  misc_feature (56)..(56): n is a, c, g, or t
  misc_feature (59)..(59): n is a, c, g, or t
  misc_feature (61)..(61): n is a, c, g, or t
  misc_feature (70)..(70): n is a, c, g, or t
  misc_feature (89)..(89): n is a, c, g, or t
  misc_feature (94)..(94): n is a, c, g, or t
  misc_feature (96)..(96): n is a, c, g, or t
  misc_feature (108)..(108): n is a, c, g, or t
  misc_feature (116)..(116): n is a, c, g, or t
  misc_feature (133)..(133): n is a, c, g, or t
  misc_feature (142)..(142): n is a, c, g, or t
  misc_feature (146)..(146): n is a, c, g, or t
  misc_feature (148)..(148): n is a, c, g, or t
  misc_feature (174)..(174): n is a, c, g, or t
  misc_feature (177)..(177): n is a, c, g, or t
  misc_feature (180)..(180): n is a, c, g, or t
  misc_feature (182)..(182): n is a, c, g, or t
  misc_feature (190)..(190): n is a, c, g, or t
  misc_feature (199)..(199): n is a, c, g, or t
  misc_feature (201)..(201): n is a, c, g, or t
  misc_feature (217)..(217): n is a, c, g, or t
  misc_feature (239)..(239): n is a, c, g, or t
  misc_feature (244)..(244): n is a, c, g, or t
  misc_feature (265)..(265): n is a, c, g, or t
  misc_feature (270)..(270): n is a, c, g, or t
  misc_feature (286)..(286): n is a, c, g, or t
  misc_feature (294)..(294): n is a, c, g, or t
  misc_feature (300)..(300): n is a, c, g, or t
  misc_feature (311)..(311): n is a, c, g, or t
  misc_feature (336)..(336): n is a, c, g, or t
  misc_feature (341)..(341): n is a, c, g, or t
  misc_feature (362)..(362): n is a, c, g, or t
  misc_feature (369)..(369): n is a, c, g, or t
  misc_feature (375)..(375): n is a, c, g, or t
  misc_feature (388)..(388): n is a, c, g, or t
  misc_feature (390)..(390): n is a, c, g, or t
  misc_feature (397)..(397): n is a, c, g, or t
  misc_feature (409)..(409): n is a, c, g, or t
  misc_feature (411)..(411): n is a, c, g, or t
  misc_feature (429)..(429): n is a, c, g, or t
  misc_feature (431)..(431): n is a, c, g, or t
  misc_feature (433)..(433): n is a, c, g, or t
  misc_feature (435)..(435): n is a, c, g, or t
  misc_feature (444)..(444): n is a, c, g, or t
  misc_feature (446)..(446): n is a, c, g, or t
  misc_feature (448)..(448): n is a, c, g, or t
  misc_feature (450)..(450): n is a, c, g, or t
  misc_feature (457)..(457): n is a, c, g, or t
  misc_feature (461)..(461): n is a, c, g, or t
  misc_feature (465)..(465): n is a, c, g, or t
  misc_feature (474)..(474): n is a, c, g, or t
  misc_feature (478)..(478): n is a, c, g, or t
  misc_feature (509)..(509): n is a, c, g, or t
  misc_feature (531)..(531): n is a, c, g, or t
  misc_feature (533)..(533): n is a, c, g, or t
  misc_feature (547)..(547): n is a, c, g, or t
  misc_feature (561)..(561): n is a, c, g, or t
  misc_feature (593)..(593): n is a, c, g, or t
  misc_feature (689)..(689): n is a, c, g, or t
tgtttcttanctcaaanaaanatnangtanctttatttaaanttgcaaannaaaanaananaaatttcangtaagttttaaaaaaaaantcccnancccctgccccantaaaaccnaaccaagccagcctganaggttaaancaananagggagccggagtgggagccaagggnggngtnanaaaggggnggggtacanancaagggggcctggganactcagtgactggaagtctctnccccncactcttggtgagtagctaanttcancagccggcttcaaaangaggagtnaggggngggtggaggcnccccccaattccaaaaccacttccncttcnccttctgtctcctggacactnaggtctnactganaaggttttcccanantaaaaanaggggggggcanantactaagggtcaggagtntnantntttcccatnantnangcctctntgcnaaangtgaccctnaaangaaggagaaaccccaaaacctttagccaatnagtggtggggtcatcataccananagccagcttgactntgggcaggcaccancacaggcacagcacccatgcggctcaagccanaggaagaaaccccaccagggatgggggatattggttgagggtgggccccaacttttgtgggcagttttggtgagggcagggcctggctggagaaantgggcgtgggggt

SEQ ID NO: 491019 - DNA, 370 bp, Homo sapiens
tgaaaatcattccaaaacagatgttttctgtttaaaacagctaaaagtgatcctgtacatgagccagattgtgtaataataaagaaaaccagaacatgtctatcccaccccaaaaagggaacctgtcagctttagttttctccagcagtcttggattggcatattactcatcttaggttcccctctcccttgttatttaaagctgttttgaagttcgtttggctattaatatcaatgcagaaatcagggaaggaaacccttgtggatcatatcatgtcactcagaaactatcctctcaacaaacagagtgaatcaattaaaatgggcagcttgatgactggcccttgatttcttgagttcaacagatgag

SEQ ID NO: 491020 - DNA, 352 bp, Homo sapiens
aggaatctgcattcacccccagtattctgtgcccaactaaccgttttaaggaaatactagtccttgggagatgagtttagatggtgaattaggtgttcagagatacggaatcattgtccatagctgttaccggtattgataatgcagggtatcatctgccactcctggtgttcaatacattgagtcactgcctagacggttctcttggtcttattcccagtcctggccaatgcttaaatactatttgttgaaaataattctttgagacagatttcagctacctcccttccaggttcgatttaacttggttgtaattgtcaatttgttgttataggtcttacctgtgtgaaag

SEQ ID NO: 491021 - DNA, 634 bp, Homo sapiens
gctccgcaaggaggctggtggcggcctgtgtggtgctcgactgccggcctatctgtcctgcgctagctcgaacgtgcgcggctcgctcacgtcaacctcaactcggtggtgctgcgggggcccgggcgtggcggtgtcggcgcgctacgtgctgcccgaggaggcgggcgcgcgcggtcctgcggagggcggcgggggtcgcggcgtggtggtgctggaccaggcagccgccactgggcaagaaagctgcgagaggagaagcgccgcgcgtgtcgtcctcacctcgctactcgcttgcctacccgccggcccgcggtctacttcctcaaagggggatatgagactttctatcggaatatccttgagtgtagcgtggattgtaaaacccatttcacaatgagaagattgagagtgagagagccctcatcagccagtgtggaaaaccagctggtaatgtcagctacaggccagtttatgaccaggtgggccagttgaaatcctccccttcctctaccttggaagtgcctaccatgcatcaagtgcgagttctcgccaattgcacatcacagcctgcttgaatgtctcccgacaggacctcggaggtctgatgaaccaactaaatacaatggatcct

SEQ ID NO: 491022 - DNA, 152 bp, Homo sapiens
ctgatcggcctgatcttcctcggtttcatggccgcgggttcctctacttcctgttgaccgggcaatcgcgtgccgggcgccggcgactggcgatcgctgaccgggctttcaagggctattcggaccgatcgggcttacaatggaaccaccga

SEQ ID NO: 491023 - DNA, 440 bp, Homo sapiens
  misc_feature (377)..(377): n is a, c, g, or t
  misc_feature (392)..(392): n is a, c, g, or t
  misc_feature (403)..(403): n is a, c, g, or t
  misc_feature (426)..(426): n is a, c, g, or t
  misc_feature (431)..(431): n is a, c, g, or t
tcataggggtttgttgtacagattatttcatcactcaggtattaagccttggacccattaattattttttctgattctctctctcctcccaccctccaataggccccagtgtgtgttgttcccctccatgtgttcacatgttctcatcatttagctcctatttgtaagtgagaacatgcggtatttggttttctgttcctgtgttattttgctaaggataatggcttccagctccatccatgtccctgcaaaggacacgatctcattcttttttgtggttacttgatgttatttctacatcataaaaaaagtaatttttattgaaattagttttcataaaagttgtaccagtattgagtcccattaggcctcatctncatctcaggtctctncctcgggttantcttttagggccacagtggggcnggccntgttaggtt

SEQ ID NO: 491024 - DNA, 558 bp, Homo sapiens
  misc_feature (434)..(434): n is a, c, g, or t
  misc_feature (490)..(490): n is a, c, g, or t
  misc_feature (511)..(511): n is a, c, g, or t
  misc_feature (524)..(524): n is a, c, g, or t
  misc_feature (558)..(558): n is a, c, g, or t
gtgacatgaccaatgaggaattcaggcaggtggtgaatggctaccgcaccagaagcacaagaaggggaggctttttcaggaaccgctgatgcttaagatccccaagtctgtggactggagagaaaagggttgtgtgactcctgtgaagaaccagggccagtgcgggtcttgttgggcgtttagcgcatcgggttgcctagaaggacagatgttccttaagaccggcaaactgatctcactgagtgaacagaaccttgtggactgttctcacgctcaaggcaatcagggctgtaacggaggcctgatggatttttgctttccagtacatttaaggaaaatggaggtctgggactccggaggagtcttacccctatgaagcgaaggaccggatcttgtaaaatacagagccgagttcgctgtggctaatgacacanggttcgttggatatccctcagcaagagaaaaccctcatgaaggctgttggcgactngtgggggcctattccggttgntaatggacgcaanccatccgtctctccagttctaatagttcaggcan

SEQ ID NO: 491025 - DNA, 432 bp, Homo sapiens
aagtttagaagcattttgtatgctactttggtatttcttaagtatagtcagcaggaaagggtaacctgttttatgcaaaatttttttaatttgtcaaatgtttttagtgtgtcctactttctgcaatagaataaacaacacaagacccccacaccccaacaaacaaaacaaacaccacaccaagatagaaaagaaaagtatttgaggaaatcttaaattccataagaaagtaattcttgcaagaatgttggctacatatttttttttctgtcctgaataaattacatcattaggtctgttgaagcttttgaagctaccactattctttctgggataaaggctaattactgatttatctgccctcaaaatcccagagttaattctaattgagtactaaattaacagtaagtagttaacacagagaacgagaaa

SEQ ID NO: 491026 - DNA, 969 bp, Homo sapiens
  misc_feature (953)..(953): n is a, c, g, or t
ctctgatgcctctaagatgatgtagccctgcactgttgtgtcgtctggttgatctgtcctgttgttaatactttgatttgtgagcactggtccattgctcggcaagcgtgttcacttgggggatgcgcactcgtccgagtcatgccgtgcatttcatcctgtacacgaatgtcagtctaggccccgggctcgtgcgggttaagctgttagctttatgggatcggcgtactttaaactcttatacgtccattacctttcgaatcttcataaagtactgacatgtttgtcaggtccactggtctccactatttattggatctattcgggctttctagtggttactgaccgcgcgcctgaatgttgtgggtatttaagtaaaatttggggaagatacaatcagcagaagtatgcagaagatgggcctccagatactccttggtttagtcatggaggacacactgctaagatttcagattttagctggaaccccaatgatgccttgggtcatttgctcaagtgtctgaggatacctaatcatgcaggtattatggcaaatggctgttaatatttactatatgatgatagagtctagatgtcacgacatccgtaactggaggggtaatcaaggatctttaaccctatagtacgagaaatgtttctgttgaatgtaatgctacatgaatgcttgatttatcaagcgccaaaaaggcattgtatagtaggatatgtaagtggggtggcccatggcttctttatcctctgattctagcactttcaagtgagctgttgcgtactgtatcatattgtagctattagggaagagaagaatgttgcttaagaaagaacatcaccattgatttgaaatacaagtagcagggtaccccccttgattcaactgttttaagtcactcagtatctcaaactaagtgcttgctgttcccaaataagttaangactaacgattacact

SEQ ID NO: 491027 - DNA, 275 bp, Homo sapiens
  misc_feature (6)..(6): n is a, c, g, or t
  misc_feature (11)..(11): n is a, c, g, or t
  misc_feature (48)..(48): n is a, c, g, or t
  misc_feature (88)..(88): n is a, c, g, or t
  misc_feature (145)..(145): n is a, c, g, or t
  misc_feature (204)..(204): n is a, c, g, or t
  misc_feature (207)..(207): n is a, c, g, or t
aacccnaaaanctgcccacttgtggaacctcggtggcccctgcccctngaaaacccttgcctggtggtccttgaaagcctcctaaaanaccctgccatggcaaatgaggcccaaccttctcccgcttgaatccgtttacaggctnctggtccgctactgcatcgtgtgccttctgtcccaagaggcagagagactgaaactatnctntgccgccctggattctcccagagattgcccggaacacccagctcgggtcctcgcacaccatccctggt

SEQ ID NO: 491028 - DNA, 265 bp, Homo sapiens
aaaccttttatacttacagactcgcacttagggcagcacgctctatctgtatacgatactattcaacttgatactttgtttctgacgttcagcaatgtaatgcttttttgcctctgcgttagctgcgaatacatgctcctttaatgccacctaaaacgtttttaaccttcttaggttgccacaagtgttgtaataccataggtgaatcaacatcgctctgaccacattgagcgcacgaatcattaattaatttagcgcgttctag

SEQ ID NO: 491029 - DNA, 240 bp, Homo sapiens
gagctgtcccagctgcgcgtcgccaagtgacaggcggtgcggctccaagctctctaagatccgagtcgtccggacaatcatttgccgtgttctcacagtattaccagactcaaaagaaacctcaggaaatctacgagggcaagatgtacacgcgcctggacctgcgggctaagaagacacgtgccatgcgccgccgggtcaacaagcacgagtagaacctgaagaccaacaagcgcctgg

SEQ ID NO: 491030 - DNA, 837 bp, Homo sapiens
gccagcaattatggccggcgcctgagcaggatgagccgggtgcgccggacgatctctgcatggcccgcgaggtaacctgggccgttagccgtcagtccagcgctcgcgtccccacggacgcatgactcgactcatgagaaggagctgccggcgtgtgggttctccctcgtagttatgtgcaacgtgtagatgagagatctgacccatgatgtgttaccaggtgaggcatcgattgatgtacacttgaagacgattgtagctcttaggcggacagaacgcttggtactcgtattttcgagatacaccatgctgcgtcgacgcacccttcgtaaatgatctcatagacagagatgagacaggattgcccgagcacctttcctacatcggtacacacagaagtacataggggccctttcacacagtaacgacactatacgccgtgtaggatgcccttcgtaggcgatattgggcctaggtacagacgatcgcccttagaaagacaccccacaggactaggttggcccctggtgagggagaaacgcggggtggaacggtccacgggattcttggcaggtccattgtaacgagcgtttcgtgtagacatgcgcgtcgcaccccttcgaggcgcttgtattaccgacacagaagcctaaccgcaccacgtgtgctttgtcgccattcaggtcacaagagcaattgtactatcgggggccgcataagttgccagcacctctagtaatcttggcgatacgttatcgcgcatagtgaaacaccaagccagatgtagtataaactcacgtaagcttccctcatggaatgtatacttgtcgccggcca

SEQ ID NO: 491031 - DNA, 272 bp, Homo sapiens
attcttttcttattgtcttcatcaaatcttttcacatcaaaaaacacgattcttacaacgtggggtccacacatttggggagagaggagaagcagacggcgagacgacagctgaacaataaacactgacacagagaacacacacgatgacagacagacagctacatcacaaaagaactatataaacataatataagatgaatatgatatgatatgaaaacatgacagcacaccatgaacaccacatatgacaaacacacatatatgtacata

SEQ ID NO: 491032 - DNA, 764 bp, Homo sapiens
gccctctggcaccgggcgccccccgtccccctccgttcccgagagggccctccgttgagccattatgggaaactgccctttcaacctgggctactacccagaggttctggccctcttctacctgcttgaccccctggctttctgacccgtttttccgcccacttccccccgctccatgagaagctatgtcccgctcttcggagactatacgcctgtctccctgtatccctctccacatcccggcccaggagagcatcccgcgagtcctgcaggctgtggataaagcccatggatactgtttcggagccccagagcagcgaagcttggagagccctgatgtctgcccccatgggagccgacttccctttcttgttcccaccactgggcatcccggagaagtacctggccaccctcgaaccccagtccgtggacccggagagccactgcagctgtagcaacaaggtggacccctggagagccggatgcataatcccgccctggggaaagtggaggctcctgatggcaggctgcagaccccagagcaagtgcctcccagccagagctggcgggctggcaaggggatattcagctctcccaaggacttctggccccaaagcccgacatggtgcccagcgagaaccaccccccatactgttcagatggtgtccgtgagctttgggccccgccccccagaaatcggagcactggtcctattcaggctgttgatgtaaatttgcataccaatacaagagtttattttttta

SEQ ID NO: 491033 - DNA, 466 bp, Homo sapiens
gatcagcagtatcgccgtattgtccatgatgatctcatgcccatgcatcactcaaaatagagtctcatcactcttgtctgcagagcttctcgagttccgagctacgcacacgtgttcaatggatgcgtgaacccatggcagtgggttcatcaaggtcacttccattcatgagaatatagccgtctccctctcatgctggacagtcgcctcgagcccgtgctcagggtctgagagcaggttcactggctgctgacggtgtctggggtccacacagatgcgctccacactctgctcagtcagtggctggatggcagagtgagcctgtattaggactggggtctgggttgtcatggttgtttcttccatgttcctattcatgtacacgatgcgcaggtggttcagaatgttaggtgtctggtggtgctgcagcagtccagatggccacacgtcgaaacgcgtggtaaac

SEQ ID NO: 491034 - DNA, 89 bp, Homo sapiens
agctcgagcagccaaccccgggcgcgtctggggccatggacggcctgaggcagcgctgtggagcacttcctggagcaaatggaacctgg

SEQ ID NO: 491035 - DNA, 88 bp, Homo sapiens
  misc_feature (17)..(17): n is a, c, g, or t
  misc_feature (27)..(27): n is a, c, g, or t
gagaaaccgccccagancatcaccctnctctagcccagcctcatcccgctcccagacacctgtagaggccagcaactttaacaagcgg

SEQ ID NO: 491036 - DNA, 353 bp, Homo sapiens
agcttttaccgctgcataccactgctctccagcctgagtgatagtgagaccctgtttcaaaaaaaaaaaaaacaaaaaaaaccagtaaaacaattttcatttaaatttagcttcaaagaggaaaaagtctttttagattaaaaacaaaagaagtgtgcaaaacttaaaaaacatttacaacattgtgctaaaagttaaagaaaacccttaaattaaatgtggaaagacattcccagtgttccattagattcaacaacagtttactattgtgtttagattggcaattacagggccgagccacagttggcccagcgccttattaatctcccagaactttggaggggcgcccaggg

SEQ ID NO: 491037 - DNA, 461 bp, Homo sapiens
gcatccagtctcgttcagccacggggagcagtttcagggccaggagtccctcagcatctggaggcaggataagccctgcctgctccccaaacacacgtctccccactgggcttcagggccagcttgggctgctcagggaagcgtctcaggaggagacgttgcagcagcaccgggtacgggtgtaagacggtggccaggccgtgacatcgagggtagcacccgccgtggccagggtgaggctctggtggaggagaggaggcggagggctgaccttttgatcttgataaacctatagctttccgcacagcttgtggctgagtgcggcttccttaaaaaaaaaaataaaagcgctgttgagtggctctcacctatcagcattacccagaggcaggtggctcttcatcgatcgcctggtgggcttaggaattgacccaggagggaaaagcagctcgcagcacacc

SEQ ID NO: 491038 - DNA, 103 bp, Homo sapiens
catgatgagacccctactttacataaattcataagttagttaggccttgtggcatgtgcctatagttcagattctaagtgagcctgagcttcgctgaatagct

SEQ ID NO: 491039 - DNA, 101 bp, Homo sapiens
atcatcattatggatttgctggcgcagtacaactaggcttaatagggactcgaattcgaggctcgaattcgagaaaaaacgttagaagcttgaattcgagc

SEQ ID NO: 491040 - DNA, 135 bp, Homo sapiens
ggggcagggtcaggcgcgccaaggcgacgagagccactcaccccctggccccgcagcggcagtgtctggagctcctaacccaagagctgccttgacctggtcctgaaattgttgttgccgaagagcagcggcccc

SEQ ID NO: 491041 - DNA, 98 bp, Homo sapiens
acctcaacacagggatcttcgagacagtcagtgtaggcgacctgactgaggtcaaagggcagaccagcggcagtgtctggagctcctaccgcaagagc

SEQ ID NO: 491042 - DNA, 828 bp, Homo sapiens
ggaggtttcaatgatggcggtagctgaggtggttgaccgagagacccagttgaacggcctttacgaagtgaaagaggccgggagtcgccccctacccgcttcgtcgtagctcctgggagcacagcagaagtgtttttcttgtatttataatgaacaatgtaaagcatacaaatggtcaacatgggacggagatctacatcatccaccagagatgtggaaaatttatgaacgcctcactagatcctaagctccgtaaaggaaagcccggaatgacgagaattagagaagaacaaaaaaacagcgcatgatggttcgagctgcagtcttgtaatgtatgaatggatccaagacagataatccgagacatggagaaattggatgaaatggagtttaactcgctagtggaacagccactaattatagatgacgaagagtactgaagagacaagcgtaaaaagctgtgtgaaatctttgaacgtattctacgactcgtatgaaaaagagaatccagatatttacagaagaattgagaaagctagaagtagaatatgaacagaagagggctcaagttagccaatattttgatgcttgtcaagaatgctcagtgatgtggaagtggaggagtattcctttggcagatatgcgcacatgctccttcgaaccatttgatccaggacattccacttccatgagtgcccaagcaaccgtcgtatcctaaagaaaaacgctcagcctatggaccttcaaaatcgggcagttctaatacgttactcttcttggacatggtgctcacggtttgggccctggagaaaaacctcctggactacc

SEQ ID NO: 491043 - DNA, 234 bp, Homo sapiens
accacctcagcctcccgagtagctgggattacgggcgcccgccaccacgcccggctaattatttgtattttagtaaagacggggtttcaccatgttatccaggatgatctcgatcccctgacctcgtaatccgcccgcctcggcctcccaaagtttgggattacaggcatgacccatagtgctctgccaaacatacataatttgagtttgctaagaactattggtttaacacaa

SEQ ID NO: 491044 - DNA, 811 bp, Homo sapiens
agcggagaacccagccccccaccccgctcccatttcctcattcttaggggtggctgcagctggcccctccagctgggatctggactagggaacggagcaatgatgtgcggggtcgagctgaagactttggcagagctgcacagcaggccaggagaggctggcgccccttctcccaagaatactgtcagatgctgatcctgacaccacctgttacagatgtacgagctaaaacgactgaaggatgcttgtcaagaggacctgtggactctcatattacatgggccagcactgcttcatccgggaagtgcttggggatggagtgcctccaaaggtatgctgaggtgatttacttgtctttgggtggaacatccaaagggctgcacttcaattaatgttaactagttggcactttgtcctccttacaagaggcacagcatgacagacgacaccgcacaatacattgctagtctaaacccaaggtgacatctgggaaactatgtaatacgggaaggaaatggaacagaatgccccacgtggtggataatacaagtcccagatacactcagggaagtgtttctcagagggtgaaaaggtaaacatatgacaacgtttagcaacttggcttgtactagacaaagatgctgaaactggggctcgtcgaatgggctaacaagtctgaaaagtggcgaaaatgaaacccaccacagaatgaaagatgaaaaaacacaaagtactaaccaaacgcaggactgaaaacacgacaaagggaagaaaacaagagtcaagaacatgagaaacagaaaggaaaagg

SEQ ID NO: 491045 - DNA, 397 bp, Homo sapiens
gagacagggtgtcgctctgttgcccagtctggagtgcagtggggccatctccgctcactgcaccctccacctcctggtttcaagtgattcccctgactcagcctcccaagtagctgggattaaaggcgcccgccaccatgcccggctagtttttgtatttatagtagagactgggtttctccatgttggccaggctcgtcttaaactcctgacctcaggtgatccaccgccttggcctctcaaagtgctggaattacaggcatgagccacctcgcctggcctagatactttttcaattgtgaaggacaaattttttattttaagcaaatatttattaagtgccagatactagcccatgtgctggagatacaacagttaaagtatttattgaaaaaaa

SEQ ID NO: 491046 - DNA, 401 bp, Homo sapiens
atagactagggtccccaaccccgggctacagaccggtaccagaaccgggccacacagcaggaggtgagcagcaggcgagcaagggaagcttcatctgtatttacagccacctccccattgatcccacagcagcctgacgtccgcctcctgtcagatcagtggcggctggagattgtcataggagctggaaccctatggtgaactgcgcatgtgaggaggttgcgcgcttcttttgaaaacctaatgcctgatctgtcgttgttgcccatcacctccagataggactgtctagttgcaggaaaacaagctcagggctcccacggatcctacattactgtgagttgtatatttcactatatgttacaatgtaataataatagaaataaaatgtacataaatgt

SEQ ID NO: 491047 - DNA, 433 bp, Homo sapiens
  misc_feature (15)..(15): n is a, c, g, or t
  misc_feature (46)..(46): n is a, c, g, or t
  misc_feature (172)..(172): n is a, c, g, or t
  misc_feature (186)..(186): n is a, c, g, or t
  misc_feature (190)..(190): n is a, c, g, or t
  misc_feature (415)..(415): n is a, c, g, or t
  misc_feature (422)..(422): n is a, c, g, or t
tgaggcgaaacccanagagtaagcttagtgatgtgtgtcaagaccnctgaagccccaagcaaagcccatcatatcccctgtgacctgcatgtatacatcccagatggcctgaagcaagtgaagaatcacaaaagaagtgaaaagggccggttcctgccttaactgatgacantccaccattgtganttgntcctgccccaccttaactgagcgattaacctgtgaacttccttctcctggctcagaagcttccccactgagcaccttgtgacccccgcccctgcctgccatagaacaaccccctttgattgtaattttcctttacctacccaaatcctataaaacggccccacccctatctcccttcgctgacactctctttggactcagcctgcctgcacctaggtgattaaanaagacanttatctcacgc

SEQ ID NO: 491048 - DNA, 140 bp, Homo sapiens
tgcatatgtctgcgaccctccgctccttcatgaccgtccactgtgcttcgggcgtcctttcacttgcttgctcacgttgaattttatacgcttcgagagccttatttctccccgacccctcctaacacggctccttggca

SEQ ID NO: 491049 - DNA, 689 bp, Homo sapiens
ctctctttcactgcaaggtttcactggaagaggttgtgaggctagtttgtgtaagtcgttcagtgacatcatcgagggtgaagcgacacacgctatcgacgcaggcatgactgagcagatgacctttcgaggtacccttaagggccacaatgaatgggtaacccagatggctactacagagcagttctaggacatgatcctctgcgactatcgtgataagatcatgagcatggggcaactgaccagggatgcgaccaactatggagttccacagtgtgctctgagagggcactctgactttgctagcgaagtgggtatgtgctgagatgatcagcttggcctgtcaggctgctgtgatagaaccctgcgcctgtgcgatgtgacatcgggcactaacacgaggcgatatgaggagcataccaaggatgcgctgagagtgtgcttctactgtgacaaccggcagattgaatctggatctcgagatagaaccatgaagctatggcataccgtgattgagtgcgacactgtgcaggatgagagccacatatagtggccgcttagagtgcgcttctcgcgcaacagtagcaaccatatgatcgactcctgtgactgggacaagctgctcaaggaattgtgactaggtctgcacgctgtagaccgacgccagtggccacacagactatctagac

SEQ ID NO: 491050 - DNA, 146 bp, Homo sapiens
cgcgctgaactgtctgttgatgccctttctgactgtgtctctgttttctctgtctgctgtctaaccctgtgccttgccttgggataaggacaatgatgaggttactggtttggatagtaagtagaggacttttattaattggttaa

SEQ ID NO: 491051 - DNA, 141 bp, Homo sapiens
gaattattgccccttctgggcataaatattggggtgaatcgtatgaagttgacgggcttttttgatagttcaaaagtggttgacttcgccgggcatggtggcgtgttgctgtggtcctggctactcgggaggttgaggtgg

SEQ ID NO: 491052 - DNA, 329 bp, Homo sapiens
cccggctcctgccatgttggagtgagtggcataatctcagctccctgcactccatctcccaggttcaattgattctcctgcctcagcctcctgagtagtcggcaccacaggcatgcaccaccacacctggcaaatttttagtagagacggggtttcaccactgtttggccagactggtctcgaactcctgaccttaggcaacccacccgccttgtgctcccaaagtgctgggatttcaggcgtgagccactgcatccgaccttctctttttttaaaaaactaatttcaacttttattttagattcagtgggtacatgtgcagatttgtt

SEQ ID NO: 491053 - DNA, 208 bp, Homo sapiens
acatttttttttaattaaacatggttgatttacctagttcttcaatttctgggtcacagcaaagtgacccagtcatacatacacatacattctttttttcatactttgttccatcatgttctatcccaagaaactggctagagctccctgagctgcacagcaggacctcattgcttatcctttctaaatgccatcgtttgctgcatct

SEQ ID NO: 491054 - DNA, 361 bp, Homo sapiens
gagctctctcggtggggcgtagtcatccccggtttaatggacacaggggctacccactccacattaccttcttttcaagggccggtttccctggcctccataacggtggtgggtatggatggccaggctccgggaccccttaaaacttcccaattgggtgccaactggaacaatattcttttatgcactcctttttagttatccccaccggcccagttcccttattaggcggagacattttaaccaaattaccggcttccctgactattccgggactacagccacatctcatggccgcccttcttcccaacccaaagcctacttcacgtcttcctcttgtatccccccacagagagagcgt

SEQ ID NO: 491055 - DNA, 468 bp, Homo sapiens
gtagcccatgaggtggcaagaaatgggctacattttcaacaaaaaaaaaaaaaaaaaaaaaaaaaactttgttggcgcgcgccctcggcggcccctctaagaaaaagtttcttggaagaaccattgtcgttgtggggcggcgcgggcgccgcccagatgaggttaggtggaacaactgtggtctcataagcgggtgttcccctagggaagacgctcgcgggttcaatggaagcaagaggtgctggcggatttttctctcacccccatatataaaaaaaaagagcgccgcggggggggggaaaaacccgcgaaagcgcttttctggaaacaatattcccccagaaaggagaaattctcgcgagagacgctccaattaagacggggatatcccttataccaccggggggatttcaccaaaggagaagtccgagatatttctaaatttagacgccccgcgctgtgggagta

SEQ ID NO: 491056 - DNA, 203 bp, Homo sapiens
gagcgggcgctttttacttttgtttattattattttttgtaggaatactcatcacaaataccttgttaaacattataggcttaagaacccagggcatcggaaacatttttccctgtgatcttaacttctgtttccaaagcaccctgcaaagggctttgcatgacgttagtgctaatgctaatataataaatgaacgtttattg

SEQ ID NO: 491057 - DNA, 396 bp, Homo sapiens
acgatggtctcagctaattttctagagcattaatagacacagctagatttattacattctgatgaacaaactgttattttatcgatttcagctgttactttccataacctaagagcattgaaataagagctccttgtctactttccttttagcattcattaaaatgtattcagtggtttaatacatgttaagtgatattggttttttctctgattaatggctcatattaccactgtcctcagaatctagaagattatcttgactaaatgaatttttacttaaggtttaaatggcatatggaaactgtggatgatataataaaataatagtgttttggctgacactaggaaaccatggatgatatcatagagtaatagaattttgcagctgaggacc

SEQ ID NO: 491058 - DNA, 313 bp, Homo sapiens
atgataatcagctcggtacggctagcggattagtgaacgatgcagtggatcatgcagcttgattgaatgcagttgattccatggagcgtggcccaatgcatcccgattaaatgcagtggattttatgcagcatggcccaaagcatcccgattgaaggtagtgcattccatgcagcatcactgaatgcagtggattccatgcagcatggtaaaatgcatcccgattgaatgaagtgtattccatgaagcatggctaaatggatcccgattgaatgaggtggattccatgcagcgttcacttaatgccgctagcg

SEQ ID NO: 491059 - DNA, 237 bp, Homo sapiens
cagaacgtctcccaggggaaggtttactccatttatatagaagctgcaaccagatatagcttgagcatccctaatctgaaaatctgaaatgctccaaatgctccaaaatctgaaactttttttttctttttatttttttggaaagggattcaaatggcaaccataatggctttaaccccatagttagtggccaacaaacgtgaaacctgtgtggtgccttataaaaaacaaaaaaaa

SEQ ID NO: 491060 - DNA, 140 bp, Homo sapiens
ccgcgtttacgctgatccgaagctgcctcgttagcgtattgcagctgtgatatagtccagctcttaccctactgtggaccagagccgtccccacagctccgtgtctgacgtagcaccggacccacgaagtataaagacca

SEQ ID NO: 491061 - DNA, 132 bp, Homo sapiens
tcacctcggcacactcacgggtgctgtgctcgatgtgtgtgctgtgttcatgcgtgtgctgtgtgttgtgtgtgtgtagctgcgggatgcataaagtatgagtgcttttataggatgggacttgagatgtaa

SEQ ID NO: 491062 - DNA, 684 bp, Homo sapiens
tgcaggaattcggcactagcgggacatgtttacaggaggttgtgcttgcatggagctgggtgtccagagagcaactgtctttgtttcttgcgtgctacaatccagcgaaagttccttggaccccgtgataaacacttgctttcatgggatcaatgaccgagagaaggccttggtatcaccttgaggctttggagacccaactgcctttgtcgaaggtatgatacagtcattacacagagccttctcctacacataatcaccagtgacccgatctgagatggcccatacgtgttactacaggtccatgctgtaaagcaggtgtttatgcatcagctgatgccacccctgctgctgatgagcacgtgcctgctgcaggtccagacacagcatacagcgctttgcattgcctaaggagagatgatgatttgtgagcactgaatgattagattttgaaggatgacgtcgataccagtgtgacacactgatgcacttgtgttgtcacacttagacagtgaactcttgctctcttctgtcatacgggtgtacctaccgctgccgtggaggcgaccacagagttcctggggtcgactgagtccacacagatgctcttggcgtgcattgccatcccacagggttccctttcctgcttgcacgtgtacagccagtggcttttgttcctttttc

SEQ ID NO: 491063 - DNA, 1784 bp, Homo sapiens
  misc_feature (1238)..(1238): n is a, c, g, or t
  misc_feature (1442)..(1442): n is a, c, g, or t
  misc_feature (1666)..(1666): n is a, c, g, or t
  misc_feature (1784)..(1784): n is a, c, g, or t
ggaggctccgtaggatggtgaagaggttgagatgctgtccagcccacagaggccccggaaagccagtgccgcccgtcagaggggtctcctgagtgcgtgtgggtggctggattctgcatactgggttatcttaaccccggctgtgaaaactggatgaagtagcaatcctttcaaccccaagagtctgtgattcagccagagttacaagatgtctcttcatcctctgaggtttacaaggttctcagaaaacctgtgaagagctgcgcggatcctctcctgccccggcccagcggcagggctgccgcctccctctcccctgggcctgagtgggtggatttcccctcccctcctccttcccaggagaagcacagagggagcggccaagcgagccgtgtctgcaaaccccgcttccctctgcggcggcctctgccatcgtgtcatggggccggaggtccctggtccagggtgactatgaccagagcaggaccaaagtgctgcacatgagcctgaaccccaccagtgtggccaggcagcgcctgcgcgaggaccacagccagctgcaggcggagtgcgagcgactgcgcgggctcctgcgcgccatggagagaggaggcaccgtcccagccgaccttgaggctgccgccgcgagtctgccatcgtccaaggaggtggcagagctgaagaagcaggtggagagtgccgagctgaagaaccagcggctcaaggaggttttccagaccaagatccaggagttccgcaaggcctgctacacgctcaccggctaccagatcgacatcaccacggagaaccagtaccggctgacctcgctgtacgccgagcacccaggcgactgcctcatcttcaaggccaccagcccctcgggttccaagatgcagctactggagacagagttctcacacaccgtgggcgagctcatcgaggtgcacctgcggcgccaggacagcatccctgccttcctcagctcgctcaccctcgagctcttcagccgccagaccgtggcgtagcctgcaggctcgggggcatagccggagccactctgcttggcctgacctgcaggtcccctgccccgccagccacaggctgggtgcacgtcctgcctctccagccccacagggcagcagcatgactgacagacacgctgggacctacgtcgggcttcctgctggggcggccagcaccctctccacgtgcagaccccatgcgtcccggagcctggngtgtgggcgtcggccaccagcctgggttcctcaccttgggaaataaaatcttctcccctaaaaaaaagatagaaaatgcggctcgatggcctgatcgggggagcccgggcggccgcttgcctttggctacggggggatgactggacgcctggtcggtgggtggggcgggcgcgcggccggcgccgtcggtggtagcgacgggcntcacgcctacgagggggggagaccggtcataacccacaaacggcgcggtcgcccgcggagagaagatccgaggcgcaaggccggccaacatccgcctaagcggccaggagcgcggagagtagacgcgatatcaccgcccctggcggcgtggggactcgtataataacggctcgccgaagacggggggcgggccgtggagctagagcggaggagcgcggacccgngaggcgcccggagggagtcagggagaagtaagcgccacccagtactagcggacgcttggtgacagaggagggacgggctagggcaggagggaggagctaggagaggcggggcgcgcgn

SEQ ID NO: 491064 - DNA, 84 bp, Homo sapiens
ggagctcacagctgcagtgagccgcgagtcccaccagtgcactccagacctgggagacagagggagaccctatcccctgccacc

SEQ ID NO: 491065 - DNA, 1605 bp, Homo sapiens
  misc_feature (1059)..(1059): n is a, c, g, or t
  misc_feature (1263)..(1263): n is a, c, g, or t
  misc_feature (1487)..(1487): n is a, c, g, or t
  misc_feature (1605)..(1605): n is a, c, g, or t
gctgaggatatggtgcagaaggtgcacagccacagcgccgagatggaggctcagctgtcgcaggccctggaggagctgggaggccagaaacaaagagcagacatgctggagatggagctgaagatgctgaagtctcagtccagctctgccgaacagagcttcctgttctccagggaggaggcggacacgctcaggttgaaggtcgaggagctggaaggcgagcggagtcggctggaggaggaaaagaggatgctggaggcacagctggagcggcgagctctgcagggtgactatgaccagagcaggaccaaagtgctgcacatgagcctgaaccccaccagtgtggccaggcagcgcctgcgcgaggaccacagccagctgcaggcggagtgcgagcgactgcgcgggctcctgcgcgccatggagagaggaggcaccgtcccagccgaccttgaggctgccgccgcgagtctgccatcgtccaaggaggtggcagagctgaagaagcaggtggagagtgccgagctgaagaaccagcggctcaaggaggttttccagaccaagatccaggagttccgcaaggcctgctacacgctcaccggctaccagatcgacatcaccacggagaaccagtaccggctgacctcgctgtacgccgagcacccaggcgactgcctcatcttcaaggccaccagcccctcgggttccaagatgcagctactggagacagagttctcacacaccgtgggcgagctcatcgaggtgcacctgcggcgccaggacagcatccctgccttcctcagctcgctcaccctcgagctcttcagccgccagaccgtggcgtagcctgcaggctcgggggcatagccggagccactctgcttggcctgacctgcaggtcccctgccccgccagccacaggctgggtgcacgtcctgcctctccagccccacagggcagcagcatgactgacagacacgctgggacctacgtcgggcttcctgctggggcggccagcaccctctccacgtgcagaccccatgcgtcccggagcctggngtgtgggcgtcggccaccagcctgggttcctcaccttgggaaataaaatcttctcccctaaaaaaaagatagaaaatgcggctcgatggcctgatcgggggagcccgggcggccgcttgcctttggctacggggggatgactggacgcctggtcggtgggtggggcgggcgcgcggccggcgccgtcggtggtagcgacgggcntcacgcctacgagggggggagaccggtcataacccacaaacggcgcggtcgcccgcggagagaagatccgaggcgcaaggccggccaacatccgcctaagcggccaggagcgcggagagtagacgcgatatcaccgcccctggcggcgtggggactcgtataataacggctcgccgaagacggggggcgggccgtggagctagagcggaggagcgcggacccgngaggcgcccggagggagtcagggagaagtaagcgccacccagtactagcggacgcttggtgacagaggagggacgggctagggcaggagggaggagctaggagaggcggggcgcgcgn

SEQ ID NO: 491066 - DNA, 111 bp, Homo sapiens
tatcatggtaatcaggaacatagcaaagcacctcgaataaatttagaaataaccaccaaagcccgggaacaaactgtgacatgctgcaaggagcattacaagtctaggccc

SEQ ID NO: 491067 - DNA, 974 bp, Homo sapiens
  misc_feature (9)..(10): n is a, c, g, or t
  misc_feature (13)..(13): n is a, c, g, or t
  misc_feature (48)..(48): n is a, c, g, or t
  misc_feature (428)..(428): n is a, c, g, or t
  misc_feature (632)..(632): n is a, c, g, or t
  misc_feature (856)..(856): n is a, c, g, or t
  misc_feature (974)..(974): n is a, c, g, or t
cggaggggnncgncccggggcccggaggggttaagttttaggaaaagngcttcgttttccacaacccttgtttttccaagatgcagctactggagacagagttctcacacaccgtgggcgagctcatcgaggtgcacctgcggcgccaggacagcatccctgccttcctcagctcgctcaccctcgagctcttcagccgccagaccgtggcgtagcctgcaggctcgggggcatagccggagccactctgcttggcctgacctgcaggtcccctgccccgccagccacaggctgggtgcacgtcctgcctctccagccccacagggcagcagcatgactgacagacacgctgggacctacgtcgggcttcctgctggggcggccagcaccctctccacgtgcagaccccatgcgtcccggagcctggngtgtgggcgtcggccaccagcctgggttcctcaccttgggaaataaaatcttctcccctaaaaaaaagatagaaaatgcggctcgatggcctgatcgggggagcccgggcggccgcttgcctttggctacggggggatgactggacgcctggtcggtgggtggggcgggcgcgcggccggcgccgtcggtggtagcgacgggcntcacgcctacgagggggggagaccggtcataacccacaaacggcgcggtcgcccgcggagagaagatccgaggcgcaaggccggccaacatccgcctaagcggccaggagcgcggagagtagacgcgatatcaccgcccctggcggcgtggggactcgtataataacggctcgccgaagacggggggcgggccgtggagctagagcggaggagcgcggacccgngaggcgcccggagggagtcagggagaagtaagcgccacccagtactagcggacgcttggtgacagaggagggacgggctagggcaggagggaggagctaggagaggcggggcgcgcgn

SEQ ID NO: 491068 - DNA, 322 bp, Homo sapiens
  misc_feature (174)..(174): n is a, c, g, or t
  misc_feature (176)..(177): n is a, c, g, or t
gtacacagaggtaaactgaccgcaggtgtcacttccgcccctttactcttgttcactcttaagtccctttagggcatgcagagaatatataggtaatatatttatagatataaaattaggcctctaccagtgataggcgcaggagagattgctgccaccaaacaatgtttcttntnntcacacctcttcccagcctccctcacttgacctatttagggggtgatgggatgaagagaagagagtgaaggatatgtaatcaagtgcaaaatactgtggtaagcacagagaatgtataaggtggaaaggaaagtgaagagtgtgg

SEQ ID NO: 491069 - DNA, 1223 bp, Homo sapiens
  misc_feature (677)..(677): n is a, c, g, or t
  misc_feature (881)..(881): n is a, c, g, or t
  misc_feature (1105)..(1105): n is a, c, g, or t
  misc_feature (1223)..(1223): n is a, c, g, or t
cgcgcgtgcaccttatgctgcacgtcgctctacacggagccctgggccaacgcaccgtcccagccgaccttgaggctgccgccgcgagtctgccatcgtccaaggaggtggcagagctgaagaagcaggtggagagtgccgagctgaagaaccagcggctcaaggaggttttccagaccaagatccaggagttccgcaaggcctgctacacgctcaccggctaccagatcgacatcaccacggagaaccagtaccggctgacctcgctgtacgccgagcacccaggcgactgcctcatcttcaaggccaccagcccctcgggttccaagatgcagctactggagacagagttctcacacaccgtgggcgagctcatcgaggtgcacctgcggcgccaggacagcatccctgccttcctcagctcgctcaccctcgagctcttcagccgccagaccgtggcgtagcctgcaggctcgggggcatagccggagccactctgcttggcctgacctgcaggtcccctgccccgccagccacaggctgggtgcacgtcctgcctctccagccccacagggcagcagcatgactgacagacacgctgggacctacgtcgggcttcctgctggggcggccagcaccctctccacgtgcagaccccatgcgtcccggagcctggngtgtgggcgtcggccaccagcctgggttcctcaccttgggaaataaaatcttctcccctaaaaaaaagatagaaaatgcggctcgatggcctgatcgggggagcccgggcggccgcttgcctttggctacggggggatgactggacgcctggtcggtgggtggggcgggcgcgcggccggcgccgtcggtggtagcgacgggcntcacgcctacgagggggggagaccggtcataacccacaaacggcgcggtcgcccgcggagagaagatccgaggcgcaaggccggccaacatccgcctaagcggccaggagcgcggagagtagacgcgatatcaccgcccctggcggcgtggggactcgtataataacggctcgccgaagacggggggcgggccgtggagctagagcggaggagcgcggacccgngaggcgcccggagggagtcagggagaagtaagcgccacccagtactagcggacgcttggtgacagaggagggacgggctagggcaggagggaggagctaggagaggcggggcgcgcgn

SEQ ID NO: 491070 - DNA, 974 bp, Homo sapiens
  misc_feature (713)..(713): n is a, c, g, or t
ctcaatgcacgttgtatattagtcaccctaacgtggaagtgtgacttgacgtagtcacaagtatactctcgagatcctaattatctgaatggttcattatcgtaatggagaatagaaatctccacagtcctgaatatctggaaatggcttgccattatttgcaaaggcgatgagcaagctaccccttgcagcccaaggaaaacatgatcagactgtggtctaaaatacagagtgcagacacagggattcggagaatgatggagaccattgtcacgctagacttattacttataaagtcataagcagagtgaattctaagcagtcgaaatctagtgaatgatgagtgagtgccattgagctgcttcgaggtgcttgaaaatggtgtacctatgcaagatgtcgtgggaggggaagtggacacgaatcacaagtgaagaagatgatgaagagcccatccctgagtccagcgagcggacacttcagagaactttcgggagaagaaagaagatacaagaaaggtcctcgagtgggaccccctggaaactgagcttggtgttaaaaccctggattgtcgaaaaccacttatccctttgaagagtttattaatgaaccactgaatgaggttctagacctggtccagattatacttccagagtagaaacagagaacaatctctttatgacatgtccctttatatgatgctgtccaagatngctgtaattttggcctgatcggctgtcggacgaaatcctgtccacaggtagtcacggacgcgtgatccatttggaaccacagtactggcctctaaagatggctgccggaaaaatcctggaaaccgcacttaaaacgtttggctgcgggacgggggggggtcccaatccggggggaactcccaagggccacaacacacggggcaccaaagggacacgggggggcaaggccccagaagaccccaaggaagctaagaatacact

SEQ ID NO: 491071 - DNA, 224 bp, Homo sapiens
  misc_feature (78)..(78): n is a, c, g, or t
gacgatctcacgcacttaacgcttgaaaaggcagtttctgatcagcagctcggtggacttctggtagcggcgagtggncgcggagagccactgtaccaggccgatagcgatggggcttcttgacaccgccggtggccggagcgctcttccgagccgccttggtggccagctgcttgcgcggagccttgccgccggtggacttgcgcacagtgactgatagtggc

SEQ ID NO: 491072 - DNA, 372 bp, Homo sapiens
  misc_feature (304)..(304): n is a, c, g, or t
  misc_feature (312)..(312): n is a, c, g, or t
gggcggatcacgaggtcaggagatccagaccatcctagctaacatggtgaaaccccgtctctactaaaaatacaaaaaattagccggatgtggtggtgggcgcctgtagcctccctagtagctgggattataggcgccccccaccacgcccaagtaacttttgtatttttagtagagatggggttttgccttgttggccagggctggtcttgaactcccagcctgaaatgatccacccacgtccaccttaccaaagtgctgggaattgcagggcattgagccaccactcccgggcctgcttttnagtttttngaaggacagggatttagggtctccttcctcccggaattcttaaacctggcgtgtgttggc

SEQ ID NO: 491073 - DNA, 1706 bp, Homo sapiens
  misc_feature (518)..(518): n is a, c, g, or t
  misc_feature (1503)..(1503): n is a, c, g, or t
  misc_feature (1706)..(1706): n is a, c, g, or t
tggagtggggtccattttaataggggggatcaggcctaaaaggataagcaccgggtcagcatgtgttgggcgtgcaccactctgtgccgactcctttctcgtggtgagccaccttctgtgttgaaagagtcataaattcagcccaagaaaatcgggactcaaaaaggggtaaaaagccggggaccacatgtggccaacctccggtcgtgtattcatacgaccttaccagtctcacgtgaacagcctgtgcccagaggtggtgagtggctttccagtgccaggaagaacccagaggtgggcttcgtgcatagggagaaagtgacctttatttataccttagaggcttatttataatttctcctcaaagagtgtggggggaaaaaagaggggcgtgggttccttagaaacacgagaagtggtgcgaattgtgaagaaagtgttcccagagggggagcttagagtgttatatagagaggaacttaatctcacgaaaagcgtgtggtttatctctcccgaanacaaagccactcgcgtgaaatctccattctcctgtggcgcaccgcattcgaccaacatattttctcgagtggcatttccacgcaacgtgtgtgtctctccataagaaagactctccgagaaaagcccaggcggagtatacgctgtctatactccagcgtctcctgtgagaggcgacctcaatatatttccccccacaagaacaaaagcccccgcccgtgtccacccaagggccctgtttctctctccatagaaaagtctcccgtgggaggaaaccgttggaaggattaccttccccttcccgaggaagaggtgcgttgggagagggcattacccggaatgacagaggaaagtgatttgtgtgacacccactgtggtgtgggttacggacagcccgccattttgagttagtctgaccgtcgaacaactgcttccccccgcactgtgtggtggctctgaagattacctcccccgaattcacacaaggcggtgtcccaacgtttacttccccccaaggtctgtatgggggcaatttggtgcggccatccactaggagattagtttactccaaccaaaaagggctttgtctcatgagccaagagaacacacctcggagaagcgtctggggcgcatcaattcacggaaaggtgtgtcccgccagcattatttctccttgttaaccccactggtggtcccccggaaaatgatcagcgcatgggaccgttcacgggcagagatgatgtgctgtggcaaagagcactgtattcattaaccacggggagagccgccgtcgaaagatatcccagaagcatatcaggagaggggcgtgcaatgctgggtcgtacacaaagagtatgcatccccttctctagataaaaaaacgcctccatatgtcattcacacgactgtttgttctaatgctcaatcccacttctgtgcgggaggggaaagcggccagaatcatatcttctatggctaatcggtatnaaccaccaacgacacgagggaattctcgacacgaagcaaacgattaagacgacagcgtcccctccgcagatgagtagtattcaaagaagtaatgagtgtatgctcactactataaatactacctagtgaggaggaaagcaacgcaaaacgtcgtacagactacgagtcacaggtcgcgcagtaatatatttcaatctcatggn

SEQ ID NO: 491074 - DNA, 186 bp, Homo sapiens
cggatccggactttgctataaatattattttttatttcaacccagagtgtctctatgttttcccctgcagtggaactaccgtcccgatcactgcatgaacagacacaccttcatgctcagcctgtctggacggtgcttccgtacatgcagtgatcggtacggtagatccactgcaggggaatacat

SEQ ID NO: 491075 - DNA, 476 bp, Homo sapiens
gggagaagggcttccatgtgaacagcagttgaacatgggtgtgaggcgtcctgatgcggtcgacatgtggttctgtttttttattgtgttctttgttttcgggagaaaacggcggggcaagggaaggccggggtggagcggggacaagagaggaggacaacaaggggggaaacagggcggtcaaacacaacgagagaggggagtgtcccccgcggaggacaagggagggcgtcaaagaggggccagaggtggggaggggtgagaggggcaccccccagaggggagggcgtggacacaaacaatgcatagcgagcggggacaaatgaggggcgtgggaacatcgcagagcgtgagggcccccccggaaaaaagaacagagaaaaagcgggactaagtcgcacccacggagaaaaaaggggggtgcaccacaaccaacgaagagagaccccccccgagaacggtacacaaaggggcgg

SEQ ID NO: 491076 - DNA, 235 bp, Homo sapiens
tccggcactgtatgcctggtcatgactgaatgcctggtcagtgcactgaatgccttggtaggataatgaatataaacttcagtggtgacctgaaaaatcagaataggtgttggtatagaatgggtgtctcctcctcctgcggggtcgaagaaggtgtgttgttgagtgttgctgtgtctgatagtagtatagttatgccatgcagcagtgcttcagttgccttgacctgggtacc

SEQ ID NO: 491077 - DNA, 1113 bp, Homo sapiens
  misc_feature (327)..(327): n is a, c, g, or t
  misc_feature (329)..(329): n is a, c, g, or t
  misc_feature (424)..(424): n is a, c, g, or t
  misc_feature (456)..(456): n is a, c, g, or t
  misc_feature (461)..(461): n is a, c, g, or t
gccgggtgggaatgttgagggcgccacgcagtctctggcggagcacatgatacagatcgcctaggagtccgaggggcgctctgatgaacagatggagtcggataactgttcacgaggagatgatgactggacccatctgtcttcagatcaagtggacccggctacaggtgatcttgagtccctacagatgccactatcctgatggccacactctctgcacccctcccaagatggacccacagggctgaaggaagctgccttgtacccacatatcccgccataggctgacccgcaactgattgtgtccctctaccagatgctgcccangngctctgatgaaggcggctggctcaccaggctcctgcagaccaagaactatgacatcggagcggctctggacaccatccagtattcaaagcatccnccgccgttgtgaccacttttgcccacctcttntgcgngcccctcttctgtctcatagttgtgttaagcttgcgtagaattgcaggtctctgtacgggccagtttctctgccttcttcccaggatcaggggttagggtgcaagaagcccatttagggcagccaaaccaagtgacatgaagggagggtccctgtgtgtgtgtgtgctgatgtttccctgggtgccctggctccttgcagcagggctgggcctgcgagacccaaggctcactgcagcgcgctcctgacccctccctgcaggggctacgttagcagcccagcacatagcttgcctaatggctttcactttctcttttgttttaaatgactcataggtccctcgaacatttaagttgattatttttctgctacagacctggtacactctgattttagataaagtaagcctatggtgttgtcagccaggcaggctggggaggccagtgttgtgggcttcctgctgggactgagaaggctcaccgaagggcatccgcaatgttggtttcactgagagctgcctcctggtctcttcaccactgtagttctctcatttccaaaccatcagctgcttttaaaataagatctctttgtagccatcctgttaaatttgtaaacaatctaattaaatggcatcagcactttaatcaaaaaaa

SEQ ID NO: 491078 - DNA, 384 bp, Homo sapiens
aaaacaaaacatttttctatggatactgaaatttgaatttatataatttgcatgtgtcccaaaatattatttatttttattttctaaatccattttaaaatgtgaacattattttgagcttgaaggctatacaaaaacagggacccacgtttagatatgtgaattttcacataaaaaaaacacggccgggcgcagcggctcatgcatgtaatcccagtactttgcgaggccaaggtgggcagatcacccaggagttcgagaccagcctggacaacatgacgagaccccgtctcgaccaaaaatttaaaagccgggcaccgtgacccgtgcctgtgatcccagctactgggatgttcacttgagcctaggagccgtaatagcacc

SEQ ID NO: 491079 - DNA, 1057 bp, Homo sapiens
  misc_feature (327)..(327): n is a, c, g, or t
  misc_feature (329)..(329): n is a, c, g, or t
  misc_feature (424)..(424): n is a, c, g, or t
  misc_feature (456)..(456): n is a, c, g, or t
  misc_feature (461)..(461): n is a, c, g, or t
gccgggtgggaatgttgagggcgccacgcagtctctggcggagcacatgatacagatcgcctaggagtccgaggggcgctctgatgaacagatggagtcggataactgttcacgaggagatgatgactggacccatctgtcttcagatcaagtggacccggctacaggtgatcttgagtccctacagatgccactatcctgatggccacactctctgcacccctcccaagatggacccacagggctgaaggaagctgccttgtacccacatatcccgccataggctgacccgcaactgattgtgtccctctaccagatgctgcccangngctctgatgaaggcggctggctcaccaggctcctgcagaccaagaactatgacatcggagcggctctggacaccatccagtattcaaagcatccnccgccgttgtgaccacttttgcccacctcttntgcgngcccctcttctgtctcatagttgtgttaagcttgcgtagaattgcaggtctctgtacgggccagtttctctgccttcttcccaggatcaggggttagggtgcaagaagcccatttagggcagcgggtgccctggctccttgcagcagggctgggcctgcgagacccaaggctcactgcagcgcgctcctgacccctccctgcaggggctacgttagcagcccagcacatagcttgcctaatggctttcactttctcttttgttttaaatgactcataggtccctcgaacatttaagttgattatttttctgctacagacctggtacactctgattttagataaagtaagcctatggtgttgtcagccaggcaggctggggaggccagtgttgtgggcttcctgctgggactgagaaggctcaccgaagggcatccgcaatgttggtttcactgagagctgcctcctggtctcttcaccactgtagttctctcatttccaaaccatcagctgcttttaaaataagatctctttgtagccatcctgttaaatttgtaaacaatctaattaaatggcatcagcactttaatcaaaaaaa

SEQ ID NO: 491080 - DNA, 205 bp, Homo sapiens
  misc_feature (29)..(29): n is a, c, g, or t
  misc_feature (33)..(33): n is a, c, g, or t
  misc_feature (76)..(76): n is a, c, g, or t
  misc_feature (82)..(82): n is a, c, g, or t
  misc_feature (184)..(184): n is a, c, g, or t
cagcaatctgggaggccaaggcgggaggnctgnttgaacccaagagttaaaggccagcctgggcaacagaggaccntatctntacaaaaaatttttaaaaaatagataggcatggtggtgcacacctatagtcccagctacacaggaggctgaggtgggagaatagctttagcccaggtgtttnaggctgcagtgaaccatgatt

SEQ ID NO: 491081 - DNA, 1731 bp, Homo sapiens
gccctgtgaccgtggccgtctcctgaggaatggctgaggaggcggcaccgaaaagctcactccgcaagccgtattcatgagcccccatcgggacaatgccactatggaatcagtgaagcttatcttcaatggcgatgaagcactcaggatgcagaccgccgtgtgcacactgtaacgggcaagggtattgtggagctctctcgaatatggttgacagtttagccatccgcatgaggcgagccttcaatcgtgcgctgatcgccgggggtatcgagacgactgtgagcacgagatgctggcctatggagtgctgcgcatctgcgagagaagccaggatcagagtatcaggcgccatgggtcgagcagatccagcaccttgagactgatcgcgtcatctatgcgcgacacagatgtagcgctaggacctcagagagatcccgcactggcacttcagagaggtcctgggcgagctggaacttcgcgtaccgtctgtgacgctaactatgcgatagatacacagcgcgaccgcgcagatcgctttgccgtctcaacgagagttatagcgaatagcctcatcgtggcccacattgttgcacctacgtaaggtaatatagcgaacagggcgcatttaccaaggaaacgtaacgagctccgtgctgctcaggagtgtgatcctggcgataccctgagattgggcggctttccaacggaagtcggttacccaaacgggggaggaaccgtggactgggttcctcatttggcagccaacgtattacatacgtcacggaggattaccccgttgtcggcgcacgagcgccattaaagcagtggcggccccattggagggtaccagttcatccataagcaagcgcaccggtccaaccttctgtagggaccggcaactcacgtatttggaatcgcataacttgggcgaccccaccgttgtgaacggtggcaaccgccatgttattcctcggttccgaatagccagttaaccattaaccatagggcatatggtctacggtttgggggacaacaacgggccatgcgccaatctggtggcggtggtcggcgtcctatccccccctggggcacaaacttttccctttagcactagacagcagaatttccgccctgtcccaagtgtgggcggacaactagcacagcgacaaagtgtggggggtacagcacacacgcccgcatcagcaacgtgtggcccgtaacgcccccaacatatacagggcgcccagcgaaccagccatctagaggttggggacaaacgcgccgccacatgcggtaaccccgtccgtaaataacgcaggtgacgcccacaacggggcggagcaaagtctctcccagggacgacctccccttaaaacaaagccgccccgccacaggaacgcagaagcccacttcggtgcgcgaaatctctcacaactggagcaccataacgctctctgcacaagcgacgggccaaatcaacaggcgagcgcgccaacgacgaaccacccgcaaagagtcactctgcgcagcacgaaccaccacaaacatgtcggtacacaccgccacagaggacggacaggtgaccctcatcgagcggcccagccgaccgagggtggagcacactcacaccactctagcccccagcggcggtacgccaacacgaacaccagatctccactccacaaacacggtccacgccacaccatcacggaccgggtagtacacccc

SEQ ID NO: 491082 - DNA, 349 bp, Homo sapiens
gatcccccgggcggcaggaattcggcacgaaataaaaaaaaggttctctaaaggactgctaaattagtaggactaatcttcaaagggattaaaaattggtcccattagtttgagattgaaaattttcacaagcggtgaacaagatagttctaaaaaactaaaggtaaaattacaaaaggtccggtaaaaaaaaaaaaagcaatcggaagtaagactgaaataattgaaaaaaatcaaagttaatctcaaccccccctcaagccttttatctaattaaaaagggaagcatggaacttgtatttgaattccaataattgaaaaaattgttactaaaaattttcccaaggca

SEQ ID NO: 491083 - DNA, 399 bp, Homo sapiens
  misc_feature (89)..(89): n is a, c, g, or t
ttacactgggtacaggacaaacctggtagtctatcaactgcctacatcagttgccttggcaacacactgcccttgccccctagcagttnaagatttatttcagccggtagccctggtaacttgagtggctccccagggacaggaagtggcagaacctcaactctgcctctcctgacctgaggggttcacttttcatccctgtcagggacggggcactgcgttctcagcccatatggaagaatgttatgggtttgggggaatccacggggaggagactaggctgttccagcgtgcccctccttcctcagcctgaggccttgctcctccgtggaaggcaacacagggacagagccacacattcagcccctaccctcagccctgctccagagtcctccccag

SEQ ID NO: 491084 - DNA, 202 bp, Homo sapiens
ttcccactgagcgactttgattccacggatacattggaggctcatagatgttttcaatctgcaccagctccaacagtgctccgttgtgaatctgggaacgtcttgctgattatgcttagaaaggtagaaacacctttttgtggagaggcggctgggccactcaccttgcaagaaacaaaatgtgctgtgaagcaggaaagta

SEQ ID NO: 491085 - DNA, 103 bp, Homo sapiens
aaaaagagaaaacaataactacatgtttgaagcgttgttcaaatgtcgcctctcccccatgtgagctccttgtgggtcccgcagtgcagccattgcactccgg

SEQ ID NO: 491086 - DNA, 163 bp, Homo sapiens
tgctgcattaccagcctcccccagtttaaattcagacccgcgtctagctctgatcctgggcatcaatacccagacatcgtaccagtgatcatccaagccactgtggcaatatattcaagacacataagctccaagcccctaagggtaactgcagctcgcaatt

SEQ ID NO: 491087 - DNA, 424 bp, Homo sapiens
aatgtacctttcttactcaaagaaaatccagcaaattggccgggcgcagtggtgcatgcctgtaattccagcacttgggaggccaaggcaagcaaatcacgaggtcaagagatcgagaccatcctgaccaacatggtgaaaccccgtctctactaaaaatacaaaaattagctgggcgtggtggcatgtgcctgtagacccagctactcgggaggctgaggcaggataatcacttgaacccgggaggcgaaagttgcagtgagcccaatattcgcaccactggactcaaaactggcgacagagtgaaactgtcttaacaaaaaaaaataatagatttccgccaattttgtttgctcataactttggtggaaatggttcgctttacaactgaaaatgaatgggggtgtaacaattgataaattaa

SEQ ID NO: 491088 - DNA, 205 bp, Homo sapiens
gctcagcatatgttgtttacactataatgtctcaacttttataagctctctatctagcgctctggtagttgaggattatattgtaacagagagagtatagggtactgtgtatgcgaatcatcatatacagtcggcgatatcctgtacgagaagacctacctgtccgtatgggatgtagtctgactcggacagcgagagctccttg

SEQ ID NO: 491089 - DNA, 498 bp, Homo sapiens
  misc_feature (6)..(6): n is a, c, g, or t
  misc_feature (13)..(13): n is a, c, g, or t
  misc_feature (19)..(19): n is a, c, g, or t
  misc_feature (26)..(27): n is a, c, g, or t
  misc_feature (31)..(31): n is a, c, g, or t
  misc_feature (47)..(47): n is a, c, g, or t
  misc_feature (49)..(49): n is a, c, g, or t
  misc_feature (73)..(73): n is a, c, g, or t
  misc_feature (75)..(75): n is a, c, g, or t
  misc_feature (108)..(108): n is a, c, g, or t
  misc_feature (114)..(114): n is a, c, g, or t
  misc_feature (119)..(119): n is a, c, g, or t
  misc_feature (121)..(121): n is a, c, g, or t
  misc_feature (136)..(136): n is a, c, g, or t
  misc_feature (152)..(152): n is a, c, g, or t
  misc_feature (154)..(154): n is a, c, g, or t
  misc_feature (177)..(177): n is a, c, g, or t
  misc_feature (229)..(229): n is a, c, g, or t
  misc_feature (280)..(280): n is a, c, g, or t
  misc_feature (324)..(324): n is a, c, g, or t
  misc_feature (340)..(340): n is a, c, g, or t
  misc_feature (369)..(369): n is a, c, g, or t
  misc_feature (381)..(381): n is a, c, g, or t
  misc_feature (390)..(390): n is a, c, g, or t
  misc_feature (403)..(403): n is a, c, g, or t
  misc_feature (430)..(430): n is a, c, g, or t
  misc_feature (446)..(446): n is a, c, g, or t
tagcangcctgangttccntctttannaaangacggagtaggatgtngngattacagtggaaggcgacgggtnanaaaggacaggggcatgaaggcagaaagtgcccncagacncggcncncgaaccggggcaggngggaacaaggggagcngngcagcccacaggacgggcgggcnggggggacacagccccccaagttggccaagccgagtctctgggcgagtggcncccaggagaggcctggctgagcaggcagagcaccccgggaccccagggcanaaggacccccgccccccagtccccaagacccaggcccgtctccnctcaaacacgccaccnacatgtgacgtcagccctgaaaaggtaanaggaaagttcanaacaaaaanaaaaccccaaaantaaaaaggctacgtgtagcagagtaanaccggaaacgttatanacacaggcggggatggccccctcggaagtgtccgggtcacttagggggcact

SEQ ID NO: 491090 - DNA, 184 bp, Homo sapiens
caacagcaccgggtgtctgcgctacgaacaagagggctgagagggtctggtcctgaaacaggctcccccttaggctcaacacgaaagggctttcaatgaattaagtgaaaactttttccttaattacaaaaatgcaaaactcaacaaagctccaaacctattggaaatcaaatatgaacttgca

SEQ ID NO: 491091 - DNA, 379 bp, Homo sapiens
gctgctcgctctgctacagcatactcctagagtagtacaggcagggagatcttaactattggaggaatcctaaacactattcagggtaagaattctggctagtcccaaaagggtccttcttttaagggttttgagaaactagacactgcaatttattagtatcggcgacgtttgtatggggcaaattcagctcccggagctgcacggttgaatgcaggaggagttccaccacattgcccccattccttccattgtagcagcctgaccaaagcgttcagttgttggtggggtctatcccaaagttccatccggcatcatagtggcaggtcctggaggagctggggtaccagctggcacaggagcagggggtgtgcgtggt

SEQ ID NO: 491092 - DNA, 1060 bp, Homo sapiens
gacgggataggcggcggttgatcccaggtgcgagtggcggcgacgatgcggcgattcggtggcccgtcgccgaccctgagtgctgcctgagccgccctcgctgcgcgcgcgctccccggacgggcccactcgccgtgcgcccatgccatgaatctggcgagccagtagcggggaggccggcgccgtccagactgctcttcgccaacttcaaccatggacaacacgtccctatctgttggatacgtaagtccggttataaatttttctccctttcttctgtggataagctggaacagatctatgaatgcaccgatacggaagatgtgtgcattgtagagagattgttctccagcagcctagtggccatcgtgagccttaaagcaccaaggcaagctaaaggtttgccactattaagaagggaactgagatctgcgaactacagctactccaacacgattctggctgtgaagctcaaccaggcagaggctgactagtatgcctggaggagatccctgtacatccacaacattacggggacatgaaggttgctgcattacgatcagggagacgcctcgaaacccttgcagtgccctgtgttgcgctggtcaattcaacaaggaaaacttgctacttggcgttaccccaagggaagcggcgacccatcggacgaggtgcaggtcttcagaaacccattaatttgaagaagctggaaaccatgattccccgggtcaccgagagctccatttaaacgggcgctggccctttgcacgcacgtgtgggaactaaacacttggccactggcaatcggaagaaacggggaccggtgattaggcggtaagttgtgccattcccaaaacgggaaccgaacaagttcattaggaggttatcgagcaacaggaactttacagcaaggttgcgtatgagcattagtagctcccccgtggccaattacgcgaattgacggggcacatgtacccatcaatctgcggatccaagacaacacatgagtaaccgtggaaaaattatcaaacgtcgagaactggtagaagaaaaagacccc

SEQ ID NO: 491093 - DNA, 136 bp, Homo sapiens
  misc_feature (110)..(110): n is a, c, g, or t
aggagtacaggtagactaacccaggtcggaggcttataaacattagctgtcagctcagcttgtccaaggtatgtgcccccaaaaaagcacaacccaggagaagtccaggnagcaggggactttagggcttgctcaa

SEQ ID NO: 491094 - DNA, 350 bp, Homo sapiens
  misc_feature (13)..(13): n is a, c, g, or t
caaccctttttcnccccccccccaacgccagggggggggggtacttggccccaaggaactggggggggggattttaaaacccagccccccttttcgggtgggttgggggcgaagaaaccccccgcctcccgcccccccccccccctaaagggaatctttttttatcccggggggggccccgaaaattcttttttttaaaaaacccccccccccagagaaggccccccggccaggggttggggccccccccttccggtttgccccccggggtttgggttcccaaaaaaaccaaggggggcccttgggtgggttcccccatgggcccttctaaaaaacccccttttttttta

SEQ ID NO: 491095 - DNA, 417 bp, Homo sapiens
  misc_feature (39)..(39): n is a, c, g, or t
  misc_feature (144)..(144): n is a, c, g, or t
  misc_feature (157)..(158): n is a, c, g, or t
  misc_feature (199)..(199): n is a, c, g, or t
  misc_feature (224)..(224): n is a, c, g, or t
  misc_feature (246)..(246): n is a, c, g, or t
  misc_feature (284)..(284): n is a, c, g, or t
  misc_feature (295)..(296): n is a, c, g, or t
  misc_feature (322)..(322): n is a, c, g, or t
  misc_feature (329)..(329): n is a, c, g, or t
  misc_feature (331)..(331): n is a, c, g, or t
  misc_feature (336)..(336): n is a, c, g, or t
gactttttgggtcgtcaggaacctggtattagaaatcgntcgttacagagattaacgagaacctacgaacgagtcgggtacggtggtgtacgttcacaacttcagtatcccaggggtcgaggtcggaggactatcagaggctangagcctgagagtnnttcggttaatacagcaaaattttgctcgcatcaaaacatanaaactagttggatgcggcggcgtgngttcgcaactttagtcatccgnggagttcgaggtacgagggctatccgaattcgggaggnggaggtcgtanngagtcgcaaccgcgtaatcgtatctnagtccgngngatanagcgagatatcgctcccacatacacactccgcaggggggtttggcattaacctgtcttcacagcgagcctgtccatccttt

SEQ ID NO: 491096 - DNA, 477 bp, Homo sapiens
cgccatggggtgggacccgggaaattcggccataatggccgggaaggaagatgagtttgaagatcaggccttttttccaacagaattagtcccaattccgtaaattttggttcttcggaatgggacaccattttggaccataaggtaatgggaattttctttaatccataatattcctttaaaactttaaggcaaacgtaagggggacttttggaaaaaggtttaggataaattccattaaattagcccaggatttcctttggtttccttaattcctctggttaaccaggaggtaccaaaggtttagtttggccagagtgggggtcaataattcaagttttagtggatggcaagaattttcaattagggaaaaggggcctttaatcctggccgaaggaaacccatgacggaagggaaaaactgaggttaaaaagtccactttaaaacctatattaattaaggtaggaccggccaagg

SEQ ID NO: 491097 - DNA, 1161 bp, Homo sapiens
gatctaatgaaataggttggcatggctatccacgagggcaggtcccgaaggccagcgtacagctgaggtgtggacacggaaaggtttgctacacacagtgtgatgtctcttgaggttagagaaccctgtgcctctttgggaggatgtatgttttgccctaggcctggatttcggtagaactgatgcaagagttagccttgaagatcctgttcaggtgggcaccacgtcatatgcaccatgtacacagaatgagctagatgtgacgatgccgagagtggcttcgaagggaagagagcccggaccttgcttcccgtcaggccttccaggatgctcaactgctcgggccagaaccatccatgatgcggacagatacatcgcgcctgacttagtacctcgatgaaagtaacagacacgcacggaagggccagttgcgtagaagtgagcctcagcggcactagttaaggtccccaagcgcacatttcgggcgagaggcctgaagatgccgcgcgtatgccgcactacaacggttatgaccgcaattcaagccatggggaccaaagcgacatggggctgaacaaacctcccggtccctccttaagcctaccacaaaactaaacaactcgaatactctcaagcccaagcgacattgcgatgggccgtgaggcaatacctcagtacgatacctacgtcccggaacctctcgggacgcacacggccttcgacacgcggacacgcgcaggaaactacccacccttctcggaaacccccccaacgggggcaagatgctcagcgacagcgcggtatgggaccacatccggacacgcccttgacgctccatacgacaccactcctgcaacctagacggcctctcccgaagaccaccttggctaaggccacaaccaaaagggaacggcaaaaaaaacaccccccccaattcctcccaaacaaaaaatactaacagcaagcacccatcaccattcagcatacaaccaacactccaagcaatgcaaccaaacaatctaatacacttaccatgcaaccatccgagcccaccaacacacatactactcccaatccctccaccaccacagctagacacacacacttgttggctattaacaataccaagttcaacaacacacacccgacaacaccaacttt

SEQ ID NO: 491098 - DNA, 1047 bp, Homo sapiens
  misc_feature (494)..(494): n is a, c, g, or t
ggccctcctgtgcgtgcccggcgggtctcactatccaggtccctgtttgctgaaccgactgcaggtccagtatgccatcggaagggtggtgaaagcccaagcgggactccccttggtggcggagcaaaggctaccgctgcatctggacgggtcctcatacaagagggtatcgtgcgcaaagcaacgctacctccaaagatccatccggcacatgcccacatggtgatgcagtggcaggatgtgcccctcctgcgtcacatggccggcttggattcctagccatggcagacatgtagaccctgttctcctgagctcaggccgaggtcatctgcaagccggacatgcacgtgagccagtcactcacggcaagagcagtcgtgtcacggcgacagtggaagaaccgagtgaacggatgtagctgaacatgtaactagcataccacggcttcgtgcatggatgacaagtcgctggtgaatgctgctgtccccgaaggnatcctacgggatctccggcagaacaggtggccagtggatgcctcacgatgggtaactgtcgcatggggctatccttgccgaacggaaataccgcgtatcgcgagaacttgccctcgattcatcccctgaccatgtggtccgagaggacgaaagcattgcacaggatgtttgcgtccgtgacgttcgcatgtaaaggggcaatcgtggactacgcgagaacacgtgaaccttgtactccgtaatagacgcaactggttggtaccgttggtcccgcggccaaagggcacggcaggggtacttggacatgacgtaaacttcttcccttccaaaaagggccttaacttggtagcccccctcgttggtttggccacagatggtaggcaaaacgtgaataggaaaaacctaagaatagccttgtccttgtgagccgcccacgaaactttattgcccccaggcatgggtggggtggcaggttgtgccccccggatagggacgtcacacaatagtaggcaccagaaattagtctgccctaatccgcttaaccactgggaaa

SEQ ID NO: 491099 - DNA, 956 bp, Homo sapiens
aacagctaaggactgcaaaagcccactctgcatacaagctgaacgcaggaatcagccactttgaattaggagctaagtcccttactagaccaagtgggaactgtaatagcccaacgaaaccacgttagttaaagagctaagcaacccttatatctaactgcgctttccagtcgtacttcctccgcgccgtcgggagaaaaaggcgtggcaagtaatgccccggcaggtttgaagctgcttcttcgcaatttgcaattcaatatcgaaagatcacctcggagctggtaaaaatagaggcctaacgccctgtcgttctagcatcttacaagtcccaatgcttcactcagcgcattgttcacgctgcaccgccgaataaagccaacctaacaaaggatcaaaagacaaggtccatgtggtggggcgcactggctccggggaaagcgttttgcaggacaagaccatgtgtgaggccaccctggccccgcgttgaattggactccctagatgttgcacgcacacttgcaccctcatggagacgcgtgcgcattgccaaagggttgccagtggctctttcgacctagaaatagactcgcgccacggggcgcaagactcgtgctttttcccaatcaacttggcactgcagttgtcctggagcgtccatcaagggcgccttcctaacaaggtcccttacccagaggccatcttgatactattccccccgggcgggtggatggtctgaatgaatcgccagaattgagtccatatgtatgactaacctatctgtatactcattttatcagaagcctcaagctccaaagtatgtgtcagcaatgacgtctgtgtcacaacgcaatccttcacttccccaaatattaatcaaaactagcgcatggacccggcagtatatgatgaaatgacaagactctgactattaacactacaaacaactcaaccgc

SEQ ID NO: 491100 - DNA, 627 bp, Homo sapiens
ggcattaccattcaggacataggtacaggcaaagatttcatgacaaaaacaccaaaagcaattgcaacaaaagctacgattgacaaatgggatctaattaaactaaagagcttctgcacagcaaaagaaactatcatcagagtgaacaggcaacctacagaatgggggaaagttttgcaatctatccatctgacaaagctctaatatccagaatctacaaggaacttaaacaaatttacaaaaaaaaaaaaaacccccattaaaaggtgcccagggttttgaccggacctttctcaaaagaagacttttgggcggccaagcaacccatgattaagaaaaattctcaaccattcaccgtgattcggttgagaagaaaacggtgcagaattcaaaaacccaccaattgaagtattacccattcttcagcgcccagttcagaactggggctgatttattcaccaacggtttacacgacaacaaattagattgcgggggtgagctcgggaagaaacacgggaaattggctttacaccttggtggggggcaaggtgtcaactttagttccatccctttgggtggccacaaacagctggtggttgcttcccctcagggaatttcttagaacca

SEQ ID NO: 491101 - DNA, 298 bp, Homo sapiens
aaaaaaaaaaaaaaaaaaaaaaaaagcacgagggcctgtaatctctgaactttgggaggctaaggcaggaggattgctggagcccaggagttccagagcagcctgggcaacacagcaagacccatcttacaaaaaaataaaataaaagctaggtgtaggggtgcatgcttatagtactagctacttggcaggttgaagtgggaggatcacttgagctcaggaggttaacgttgctgtgagttgtgatcacaacactgcactccaggctgagcaacccagccaggccctgtctcaaaaa

SEQ ID NO: 491102 - DNA, 338 bp, Homo sapiens
tactggagtgcatgtgatcaatttgactacaggcttgatgctctgagtaccatgattgacacaacatatgtgcaatgcaataaatgttacacaaccacactagtatccttcttcctgaagagcaacagatacctgctccttggcagtgtggtgggaacttgcttttcctttgataccctacttcaacccccatacagtcacattagacctttcttccttaagtgctgggcagtacggactggactaatattcaggacccactaacgtcagcacaatcaagttttccacaaataggatgaccctctagctatagataacatgacactcctcctttcccc

SEQ ID NO: 491103 - DNA, 286 bp, Homo sapiens
atatgtttataattgttatatctttatgctggatttacacttttattgggggggacaggatctcactctgttgcccaggttacagtgcagtggcataatcatggctcactgcagtgttgagcttcccaggctcaggtaatcctcctacctcagcctcctgagtagctgggactacaaaagtgtgccactatgctcgtctaattttttatttttatttttattttattattattttttgagatggagtctctgttgcctaggctggagtgtagtggtgcagtctcag

SEQ ID NO: 491104 - DNA, 966 bp, Homo sapiens
ggggtgggagtgcgagtgggggggtcgtggggggtgggtgtgtgggtggcggcgcctggattttgtggccggtaggggttgatggggttgggcaagcaggggcgactttgttgctctgggtgggtgagatgttggtggttgggttgtgcgccacggcgtggggtgtcgagggtttgtttgggtgggctggctgccgcagtacaggatcgttggtgggggggcagctctgtgtgtgtgtgggttgttgttggcgccgagtggggtgtgtgggccgctggaggtgggttgtacgtcgtgtgtttgtgttgtccacgctgcgggggtcggctggggcggcgccgttttgtggtgcgtcgggcgtggttcgctagttagtcgttgctggtgtgcgtcgtggcgggcgggtttggtgctgtctggtggagctgggtggtctcccgtatgtggtctcctgttccgattgagggggagcgcggtttcttgtctcgcagtagaatggggggggggggttctgtttgctcgctgtgtgtctcgcgccactattgtcgttcgggtgcgccgcgcctttggcgccgcatgcctgtggcggccgcagagtcgtcctttgtctcgttggattgtttcctgttgggcggatgatcatgattttttttgtcgcgcgcgacacagttgttctgggcgtgttctgggagctatccgcccgtcgtgttttttggtggcgtttcccctggtgagcgtctccgcctccatttgtgccatcctctggttgctctttgtgggggttgcctttcattttcttttccacgacggccggtggttgtgttaaatagatgtttttgagtatttgggcacccctcgtcttttagggaaattttttttttttggaggacacccccctacccggggggggaaaagtggggggcccctccccccccccccttaacgacataaccctcttttccccca

SEQ ID NO: 491105 - DNA, 600 bp, Homo sapiens
gccagtattaatttaggattaagacaaataggtgcttgtccctcttagtcgttaaaatcgctactagggtgtcactatagaaagcaagacatagcattagaatataccagcagagagtcttttgagcagctgaaacctgcgagagcttgcaaagatatgtctctatcactgtagctgcttttggaagtagagtttccatcctttcagtattttattttaaaatgtaaatagtatttcatgtatggaaaagaagcctgctatttttctttgctaaaaaaaattttaaatctaaaataatgatatagtgtcacagcaaattagtgatgtttcatactactacattaatggattattttagaaacaaagataaaaaaaccttactgagccacttaatgaaagtaaattatttaaagtacacactttatagagtgctttcaggccttggagatgtcatctggagtcatagaattacattttaacactttattttcagagacttatttgtgaggttatccttaggttatcagtctgaatttttgctcttactggcaaattgtttgtaggtttatgaaccacatgaaacatccttggaacttgaga

SEQ ID NO: 491106 - DNA, 315 bp, Homo sapiens
caaactgcacgggcctggtgctggtggcacgtggttgggcctggccttgggcttgtgctggcttggctgggtctgcgcagcggcagtggcggctggccttcttcttcgctgcttcggccggcggcacggcactgaacaggaacaacgcagcaatggcagcggccagcacgcggggggaatacggcatcaagaagcttccgtggaacacagaccgtggagcttgcacgatccgcgcgcgtacggccagcgtgaaggcgcagtcagcttggtggcgctggggcttcagtcagccgcggcggcgtgcccgcagcgcgg

SEQ ID NO: 491107 - DNA, 981 bp, Homo sapiens
  misc_feature (676)..(676): n is a, c, g, or t
cgactggaggggcgggggagtcacctgcgagcggtgcgctggggccagcccgcccaccgcgtcttggaatcgcgccgtgttgctgcggggcttgggacaggacaacaacctcttggaagggccccgggggggagacacgggggcaagaaaggttcgagcagccccttggagagttccggagaaccaagggaaggaatcgggaaccttttaggccttcgggattggttcgccgggacctgtgctgggccggccacgggggacagggaacgggggcctaaataaaggtggaaaaggaattgggggggacagtccgctttgtgtgcaaacaccatgtgttgaacagctcaatatttactattaaggacgggtttataagcggtaatatagggtgtggacacaacctgtgttgtagggaagcaccagggcttgggattccaaaaccttttttaatattttatttacgcctgtggggacgagaaggttctcattaattttggggagagacagcggtgactttaattgggaccaaaccggtattggtgttggagaggagaaaaagtaggcgccccaaaaatggtgcatagaggacaacgagttcttatcgaccccggtgggggattgaaaagaagtgggaatttatttcacgttgggttatatttggtgggcgaccaaatanttgggttagtactttcccaagtggaaaagaggacacacatgaagttttattacagcacgaaagcgaaacgaattaagtttatatttccccacgctggtgtgaaaaatagatgtggtgttcatcgttaagtttgggaattgcacccaaatactacaatgaattgtgcagcgcgtgacaagacaatttataaagggtcgaagattggggacttgggcacataaagtttcagatggggtaatagcccaagtggattcagaactctgttctaggaggcagaggtatataatggcacgtggcgcaactgt

SEQ ID NO: 491108 - DNA, 464 bp, Homo sapiens
aatcgagctcggtccgggttccttgtcttgaaaagtactgatttgtccagatgtggtggctcatgcccgcaatcccagcacttcgggaggcagaggcgggtgggacacaaggtgaggagtccaagaccagccctaccaacacggtgaaaccctgtctctactaaaaccacaaaaattagtaggccgggtgtggtggctcatgcctgtaatcccagcactttgggagtctgaggcaggcggatcacctgaggtcaggtgtttgagaccagcctgaccagtatgatgaaaccctatctccactaaaaatacaaaaattagctgagaatggtggcatgcgcctgtaatcccagctactagggaagctgaggcaggagaatcgtttgaagccgggaggcagaggttgcagtgagcggagatcacaccattgcgctccagcctgggccacaagagcgaaactccatctc

SEQ ID NO: 491109 - DNA, 996 bp, Homo sapiens
tctagcatcaccactatcagaggcacgtctgaccagtgacacatgttgatagggcctgggtaccctaagcgtgcaccgggtaggataatcacgtagtaccttaaatagggacctgtatgcagtggctgcaggagggttcagacgtctcttgactgttgaaccagtgagaactggacctggccgtgaagatggcgcggcatagacaagcgagccagagacgaggaagaccctatggagctctatttggatagaatgcaaacagtagctaacaaagctgacaggtccataatactagcaaatcgtgctatgtatgaaatttctggtatggggcgacctcggatgatgaacccgaaccggccgagtcagtcacatgctaagacttcagcagtcgagagcgaaatactatactcacatggatccgataagttgaccaaggaacgagttacgctagggataacagtgcgatcctattctagagtccatatctaacaaatgagggttaaacagaatctcgatgttggatccggacattcccatatggttgtgatgccgctgcttgaaaggtgcgtatgaccaatcgaataaacgtcctacgtgatctgaggttcagacggagtaataccaggtgcggcctctaatgtacgtcacattcctccctgtacgaaaggacggagaaataaggcctacttttacagaaagcgcgtttcccctgtgcatgatctcatcgtccagctttagtattaatggcccaacccaatcccacgaaccaggggttggaactagcttccggaagatggagacgtcagtaaaactaacatgtgcggcgcaccccaagatgcgcatcgaaaaccaaaggaggcacaccatcaagagaaaaggggcaaaaccgggggataacaaagcaaaggcccgttataacgtcaagaaaaaaatgtatatgcagagcccggtgcgtaatgaacaaccaacatctaccaaagactatgaccttcggca

SEQ ID NO: 491110 - DNA, 216 bp, Homo sapiens
gggggggggggggggggaaccccccccccgggcctttgggggcttttttttttttcccctttttggggccccttttgtccccccccccccccgggggggaaaaaaacccccccctttcccccccccccgggggcgggggggggaagggggggggtttttttttttttttttttgggggggttttttcccccccctttaaaccctccccccggggca

SEQ ID NO: 491111 - DNA, 161 bp, Homo sapiens
  misc_feature (4)..(4): n is a, c, g, or t
  misc_feature (6)..(6): n is a, c, g, or t
  misc_feature (78)..(78): n is a, c, g, or t
  misc_feature (111)..(111): n is a, c, g, or t
  misc_feature (123)..(123): n is a, c, g, or t
  misc_feature (145)..(145): n is a, c, g, or t
cccngnaacacccacatcccctcccccccccccggccggggtgtgctcagggaatgtggattcgctcaaatgccggantgagccctgagtgtttggaaaggggagactccncctttttaatcncaaatgtagcctacaagcaagnggctttggattgttta

SEQ ID NO: 491112 - DNA, 828 bp, Homo sapiens
ggctcgcctggtgagtggctggacaggcagcgaggcaatcgtctcccagcggtatttcgcgctcctggctggaaacgctggctgctaaagtggctgtgatctgatgcacgcataccccaggtctcgggaacggaggaagaggaatggcgtcgttcaccgtgtcccgagatcgctgtccttttgtcgcgacatgaatgctgatgtggctccgctggcacctcaagagagtggcgtgctggagacctagtcacgaagacagcagtctgcatccatcgtctgggtgcgcgcatgacaactttcacttggacaactcacggctttacttttgatagctggaacgcatggatgagaagacgtgggagtccggattgaattgggtggagccttgaaaattggttagacagtttagtcgagttgaataagagagagttgtgacatggaactcaagtgtcatcgtctgaattgtacctacagggaaagtgggacgtctatttgaagaatatgaatggattctgtaggtgctgagagatgattgttagaccggacgatattctagttagtaacctaatgctagtacaacgcataggccagccctagaggctatcggtctgataaggttacttctctggtgcacacgtgtgctggagaaaggacttttcacatgtcctctgcctggtgagtaaccacaaatgtattttccttttaagcgagagatgaatccatccgtggataaccttcaggacttcaaaaagtgagcatcactatcctttcagagaagtgtgcccaggatactgatataagaatggcaatggaatcttcgtcagtcga

SEQ ID NO: 491113 - DNA, 118 bp, Homo sapiens
aggctccagctacgatatatggaggcagcacggtactcacgtagtcgactgaacttgtacagtggaggcatagcaccgcatagtaaatacacgtacgacctggctaccatatataacg

SEQ ID NO: 491114 - DNA, 285 bp, Homo sapiens
tagcaggaccttatgctgaccatcactgcaatctcctttcaatcaacaatacaagcctcccagacagatcatcagccctcttagaacttgaacaaaataggagtaattaaagttggtcattggacactgaaaacctctggcatgacaaagacccctgatcctccgtggactcactccaacagctttctataacttggacgatgaccagggggtttgggaagaatgaagctggagaagatgaaccgggggcaggtgaggcttttaattcaaaatttggaaagaggc

SEQ ID NO: 491115 - DNA, 200 bp, Homo sapiens
ggcgagtggcacggtagatgatgagtatgactgtataatgagtatagcggtatatgagtatgggccgtataatgagttggcagtatagatgagtatgggtggcatagatgagtatcggttggcgttgatgagtatcggctggcattgatgagtatcggctggcgttgatgagtatcggctggcattgatgagtttggctg

SEQ ID NO: 491116 - DNA, 1196 bp, Homo sapiens
  misc_feature (16)..(16): n is a, c, g, or t
  misc_feature (19)..(19): n is a, c, g, or t
  misc_feature (127)..(127): n is a, c, g, or t
  misc_feature (129)..(129): n is a, c, g, or t
tgactcagaggatgcnttngcgggcttttcccctctctcccactccactcctggctcagtcttagagatttctatgccctcatggattctacccctgccttcctggcctcttgattctgggcttgcntntcctccaattccaaacttagtgaaatggccttaagcattttaaactgtatgtatacattagcgcattcatgcctttctaaacgcatttcaaatgtcaaccaggaaggcacaccactgtattagttttatactgccgctgtaaaatttaccacaaacttagtgacttaacacaaatttattgcaattctgtaggctggaagtctgactatgggtctcactggactagaatcaaggctggcaggctgccttccttcctggaggttctaggggagactctgtctcctgctccttcaggctgctggcagaatccacatcctttcggtggcagggccaaggtccccactttcttgctgactgtaaactaaggccacttccagcttgtagaggctgcctacattccttggctcttggccccctcctccatcttcagagctagcaggttcagtctgtgtcacgaaccatttctctggttccctgcagacaggaaaggttgtccctaaggactcatgagattaggttgggcccagccagataatacatgataatctccctcctcaaggtttttaatattaaacacatctgcaggacacattttgccatgtaaactaacattcactggttccagggattaaggaatgaacctcttttgttggggaagggtggcattctgctgaccacagcactccaaccaaaagccaaaaaccaaagcaagacttactaacgcatatcaaataaattaaaggtaccaaattctcacgccttccaactcaaaattagcaatctaaagtaatttccatatcctagatggaaaccctcatgctaaactgtctgattatgcatggttctaaatggtttcagtggcaaatacataacattgtactactgattaaactgaacttaaaagcatcaataccaccattgctgcacttaatcatgtctctgttgaatttttccttttaaattttatcttttcagaattatatatgtattgtttttaaagtagaatagttttttttttgaggccaataataaataataaatgcaggctcctactctgatcctctcca

SEQ ID NO: 491117 - DNA, 316 bp, Homo sapiens
  misc_feature (34)..(34): n is a, c, g, or t
  misc_feature (47)..(47): n is a, c, g, or t
  misc_feature (58)..(58): n is a, c, g, or t
  misc_feature (127)..(127): n is a, c, g, or t
  misc_feature (203)..(203): n is a, c, g, or t
ccgtaccacagcattttcatgggatgatccttantgtgctcacgggnctgctcttcgncagtgatggctactacgtggccctggcctggacatcatctgcgcttatgtacttcattgtacgatcttngcggactgcagcttcaggccctgacagcatggggggcccagcccctcggcagcgtctccagctctacctgaccctnggagcagctgccttccagcccctcatcatatactggctgaccttccacctggtccggtgatccctggtccttaggtggcactcatttttccataccctgaagattgtggctgg

SEQ ID NO: 491118 - DNA, 1276 bp, Homo sapiens
  misc_feature (16)..(16): n is a, c, g, or t
  misc_feature (19)..(19): n is a, c, g, or t
  misc_feature (127)..(127): n is a, c, g, or t
  misc_feature (129)..(129): n is a, c, g, or t
tgactcagaggatgcnttngcgggcttttcccctctctcccactccactcctggctcagtcttagagatttctatgccctcatggattctacccctgccttcctggcctcttgattctgggcttgcntntcctccaattccaaacttagtgaaatggccttaagcattttaaactgtatgtatacattagcgcattcatgcctttctaaacgcatttcaaatgtcaaccaggaaggcacaccactgtattagttttatactgccgctgtaaaatttaccacaaacttagtgacttaacacaaatttattgcaattctgtaggctggaagtctgactatgggtctcactggactagaatcaaggctggcaggctgccttccttcctggaggttctaggggagactctgtctcctgctccttcaggctgctggcagaatccacatcctttcggtggcaggggttggggggtgggtgtgggggagccgttaggcctcccaggtccttaggatcagggttgcccccagaaccccttcccatatcctccattctccgccctgagttcctacccaggctgcctggccggggccactgcctcctcagcatgcaggaggctgccctgtagggaaccccagctctggggcttgggggtgagggtcagccctggacagacctctgcccagggaactgctccatggggtctgggagagcagccatcccctgctggcaccatagacccacacaaggagcctgcacagcaagccagcggtgacacacctgcaggtgtcaggcatggcactgggcacaacagggacctggcaggagaaacagaccacagcactccaaccaaaagccaaaaaccaaagcaagacttactaacgcatatcaaataaattaaaggtacaaaatcgtgaatctcagttatcttaaatattccaatactatttacaaaattattcaaattctcacgccttccaactcaaaattagcaatctaaagtaatttccatatcctagatggaaaccctcatgctaaactgtctgattatgcatggttctaaatggtttcagtggcaaatacataacattgtactactgattaaactgaacttaaaagcatcaataccaccattgctgcacttaatcatgtctctgttgaatttttccttttaaattttatcttttcagaattatatatgtattgtttttaaagtagaatagttttttttttgaggccaataataaataataaatgcaggctcctactctgatcctctcca

SEQ ID NO: 491119 - DNA, 338 bp, Homo sapiens
ttggggctccattcgagggcagaggcagagaacaggaagtggatgattcagcaaatcaacaggaccatcgggtatctggggggagccacggagaaagcacagccggcagagcacctcagcgtcatcatcacatgagaccaggggatgaccacggtgaagaagagacccaaggtcaacaagatcccttgtccaactacatcaagttcagggacggtgtcaagttggatatggtgggctacggtggcttggggatgcccctaaccaaatgggggcaagaggaagccctttaccaggcactggaagatggtgaccctgacctccaggtctaccctggatgg

SEQ ID NO: 491120 - DNA, 552 bp, Homo sapiens
cttgtttaaaggactgcagaccaaggagcgagctttctctcagagcagttgcagttcttagccaagggtatgaagtcgcaaatagaaaaaaaaatcaagggtggcagctgaagagccgtaagggggccatattgaagcctggttgggggacgtaggaggcaccggaatgaggtgaggtccgtctaactaagtttatttcgcaactgtggcaggtagatatttaaatagactgcgagagactatggggaaaaactggaataagcgtgggggacatcttggtagaaggaacctgtagaatatactgtgtgaggttgttgaacaataattggggatcagaactatatggctacaggagaagtgtaacaaagactttctaagagggttcagaattactataaagttttatagaacggtggtatagagggtggtaaaaagtaggctgacatagtgggcttgaagagcagttgaagaagtgtgagagacttaaagtggaatagtgaatatattgaacagtgattagtagaacacagagagtgtagtgtgaaaaacgag

SEQ ID NO: 491121 - DNA, 145 bp, Homo sapiens
acgaaatgtaacaactatccaatgttggaataagtgtcatgagtgtctatataatttgctaatatttaaaatatttatagtaaatatactataacaatcactagtagctattgtctttaacacttacatgttgatatactcccct

SEQ ID NO: 491122 - DNA, 181 bp, Homo sapiens
atccgcctgcctcgacctcccaaagttgctgggattgcagatgttagccaccgatcctggcccccccaaaaaaaggattttaagaaaaacttctcttgcgccgggcgcagtggctcacgcctgcctcgacctcccaaagttgctgggattgcagatgttagccaccgatcctggacccccc

SEQ ID NO: 491123 - DNA, 115 bp, Homo sapiens
tcaaagatttttaggggaatcatctcaggcagcatgggccatgcaaactgtggtttgctcccacagcatttccagagcattgaccgtagtatacccccggtcgtgtagtacgatg

SEQ ID NO: 491124 - DNA, 340 bp, Homo sapiens
  misc_feature (1)..(1): n is a, c, g, or t
ncccaccagcagagatttctccttgacctggcttgggctagagtgatctttcactggtttcctaaccataccttctctataaagcatgtaccactgacatgtcactgagggagcatagttctaggtgttaattctctcaaccggctactccactaaggcgtgatcaacggatgcgcaacgatggaacccttttggtacacaatacaatcccttctacccgagtttagacgctgttaagaggttatagaggaatgttaaagtatctaagatatctcaacaaagaactgagcatgggagagcaaattgctctggaacagataggcccgcttcacagtgtgcg

SEQ ID NO: 491125 - DNA, 748 bp, Homo sapiens
  misc_feature (663)..(663): n is a, c, g, or t
  misc_feature (665)..(665): n is a, c, g, or t
  misc_feature (708)..(708): n is a, c, g, or t
tgagacagagtctcactttgttgcccaggctggagtgcagtggcatgatcttggctcactgcaagctccgcctcacgggttcatgccattctcctgcctctgcctcccaagtgggactacaggcgcccaccaccacacccggctaattttttgtattttttagtattttttagtagagacggcgggggggggggcgggtttcaccatgttagccagggtggtctcgatctcctgacctcgtgatccgcccacctcggcctcccaaagtgctgggattacaggcatgagccaccgtgcccagcctggagctggttttttgaaaaaaaaaaaaaaaaattaataaaataggctactagctagactataaagaagaaaagagagaagaatcaaataaacacaatcagaaatgataagggggatatcttcactgaccttaaagaaatacaaacaacgatcaagaatgctttaaacagttctatgcacataaactagaaaatctggaagaaatgaataaaatactggacacatacaccctctcaagactgaatcaggaagaaattaaatccctgaatagaccaataacaagtcctgaaattgaggcagtaataaagtagcctaccaatgaaaaaaagcccaggaccagacatattccagcttgaattncnccaaaagtacaaaaaaaaactggtactatttctactgaaagtnttcaaaaaaaatcgaaaaaggaggggactcctccctaact

SEQ ID NO: 491126 - DNA, 124 bp, Homo sapiens
ggggcagagagaacggagttatctcagagcaggagaagccactggaaaggtgtttttttggtttttctgttttgagacagagtctagctctgtcacccaggcagactgcagtggtgcaactctt

SEQ ID NO: 491127 - DNA, 126 bp, Homo sapiens
acttacatagacccatttggtattgtccttgcaaaaatcctccagaggtttcacagagttgtacaggtaacgtgtcaacagtagatagtgaaccttcccagggcccctgtgcccccaaacttttgt

SEQ ID NO: 491128 - DNA, 133 bp, Homo sapiens
tgtcagaaacgattataggatcagaaaccatgaaacgcttcaagaatagtatctttaagtacgctactgaataactcagtgaacgctgttttgaagcttacatggacgaatgtttaggacttcaagatcacac

SEQ ID NO: 491129 - DNA, 174 bp, Homo sapiens
aaaattcccaaaaatataattggactcctcccccccaatggggccattttttccccctatagaagaattattgttggtttaagtaacatgaaaactttttcctccgcataggccggggtcagattaaaaccctgaattgccaattaacggcccaatttttcccttcccccccca

SEQ ID NO: 491130 - DNA, 213 bp, Homo sapiens
  misc_feature (169)..(169): n is a, c, g, or t
  misc_feature (177)..(177): n is a, c, g, or t
gaagatgccagcttttgatttgttatgagaaacattgtacttgaaagaaagaattgtttcatcgttcaaatactgtaccaatactggtagtttcgctctgaggagcttcttccgatgcacactgtttgaaggatgacctctaggaagaaagtgttgctgaaggttatcnatcctggnagattctggagtcgggaagacatcactcatgaacca

SEQ ID NO: 491131 - DNA, 107 bp, Homo sapiens
aatgatactaacagctctctctcttgtttacctttctcttcagccgtgctctactgtccttcgtctctttcttagacacttcttcagctgcatgtgctcaaaatgcc

SEQ ID NO: 491132 - DNA, 779 bp, Homo sapiens
gcttccaacgccttaacggaggaggcaggaaccggagcgcgagcagtatgctggtgtgggcaccatggtctgtggatcaccagccatcgatggcgtgtgacgcgcaagatccaggttctgcagcagcaggcgagatgatgctacgaggatgcggtagctgatctgcctccaggcgagaagttgagtggagaaaggcgggcccgggaacaggctgaggctgagtgtggcctccttgaaccgtaggatccagtctggttgatacgaagagctggatccgtgctcaggaggcgcctggccatctgccctgcatgaagctggacagaagctgaggaatgctgctgatgagagtgagagaggtatgaggtgttattgaagaccgggccttagaagatgaagaacagatggaactccatgggatatccagctcaacagaagctaagcacattgcgcgaagaggcagataggaagtatgaagaggtggctcgtacagtcggtgatcattgcaggaggacttgtgaacgcacagaggaacgagactgagcttggctgagtcccgttgcccgagacgactgggatgacgcaagattaagactgggatggaccaagaacctggaaagctgtcatgagttgctgcgtgaaaaaaaaaggtacttctcacacatagacggatagactaatgagcgaccccaacatcaagatttctactggctaactcatgggtggcagaagacccgtgcttgggttgctgagagactggtaccagcttgagggccatggtc

SEQ ID NO: 491133 - DNA, 258 bp, Homo sapiens
cgccaggtcggaaacggcgcaggtcacaactcccgtgctgatcagtcgtgggctctgcgcctgtgaatagccactagcactccagctctgagcaacatagcgagaccccgtctctactaaaaatacaaaacttagctgggcgtggtggcgagcgcctgtaatcccacctacttggagaggctgacggcaggagaatcacttgaacccgggcaggcgacaggttgcagtgagccgagatcgcaccaattcatttcagcc

SEQ ID NO: 491134 - DNA, 194 bp, Homo sapiens
cccaaaagccataaacccacctagaaaaaaaaaaggttttccaaaatgaaaggaaggaaaaaaaaaaaaggcccccacccccattagaagtcttggccctttggaacggaacggggactaccctttatcttaattcttaatttaaaaacaggtttccaagttccaaccaacttctatgaaaagttgaaaagcca

SEQ ID NO: 491135 - DNA, 304 bp, Homo sapiens
  misc_feature (43)..(43): n is a, c, g, or t
  misc_feature (45)..(45): n is a, c, g, or t
cagagcaggggaggcattaaaaaaaaaatgtaggtgccaggcnanttggctcacgcctgtaatcccagtactttgggaggccgaggcaggaggatcacgatgtcaggagtttgagaccagcctgaccaacgtggtgaaacccaaaaattagccgggtgtggtggcacatgcctgtaatcccagcttctcaggaggctgaggcaggagaatcgcttgaacccgggaggcggagggtgcagtgagcttgagatcgcaccacttgcacttccagcctggggttgacagagttgagattccatcttca

SEQ ID NO: 491136 - DNA, 122 bp, Homo sapiens
tcgcgggaacataccgctaatgagccaagggcttgtggcggcactactccttgctgaggatgtaactgggctccacttctggtggggcttgatggaacctggcttgaccatgaccaggcccc

SEQ ID NO: 491137 - DNA, 314 bp, Homo sapiens
ggtacacaacctagggtcagttttgcaggtggtaagccatttaccaagatagttgtaggtaagaagggcagatttattagagaaattgtgaaaatatgttgcagtgggcagctcagcagagaaggggctacctgcaaagaggcaagggctggaggaaagttttatagggtcctgctgaagggtgctacgtgtggaatgaggtcattgtgcccgcaggttgtttgtgattagctgtctctaacaattgttcatacaataattgttcattattgttctcaacttggggctctccccaacctggggacccttcctta

SEQ ID NO: 491138 - DNA, 104 bp, Homo sapiens
gtaaataccaggatgtagaagaaaatgaaaatggagaatttcaggccaaatattgtggtgacctggctgtgatgcttttgaggaggatacctgggatgaactcc

SEQ ID NO: 491139 - DNA, 202 bp, Homo sapiens
gagtgtctaacaagagtgatggcatcacttccatattgcccacgcccatctggcacctgtttgtggccacgggagcagcagtgcattactacgccattgggaaataccttgaccgaagtcctacggactttatgcgtgcattttatgacctagtctgtaccataactactccaaaccagtataatttcatttatggcactgg

SEQ ID NO: 491140 - DNA, 412 bp, Homo sapiens
  misc_feature (10)..(10): n is a, c, g, or t
  misc_feature (27)..(27): n is a, c, g, or t
  misc_feature (36)..(36): n is a, c, g, or t
  misc_feature (84)..(84): n is a, c, g, or t
  misc_feature (103)..(103): n is a, c, g, or t
  misc_feature (157)..(157): n is a, c, g, or t
  misc_feature (183)..(183): n is a, c, g, or t
cctccccaantcccactacggcctggnagggcccantccggccaaggggtcctgtcctaatggtccaaggccacttcccccacntcccccttttcccccatcnctggcgcttgccataatccaaaattttgcctggctctcctgcctaggttttccnataaccttaccctaccattattaggnatatggtcacataacaaggaagatgacccaatttatccaatcattttattgttatttttaaaaacagaaaatgacgtagctaaattaaaaccaggttagaagaatatggtattccaagactagaaatggatatcataaatagattatataatttatgaaaatcctcaagagtaattttggaattggatatactatcttaatatacatgtcctattacatcaaatcacaa

SEQ ID NO: 491141 - DNA, 85 bp, Homo sapiens
  misc_feature (2)..(2): n is a, c, g, or t
  misc_feature (14)..(14): n is a, c, g, or t
tntcaataatggtnaacatttagttgagttctttgtaaagcctggtacgtatgttaaacgagttgctgagtgattacatggtcgt

SEQ ID NO: 491142 - DNA, 158 bp, Homo sapiens
tctccacagaatcacccttagcgctagggatatggagatgaagggtgcatccttcatacatctcatcacagttgcgacaatacagtaacgacggagaggtaagggcaacagaatataacgacagcggcgttgacatatatggtggcgtcgggcagata

SEQ ID NO: 491143 - DNA, 573 bp, Homo sapiens
ttcgggggtacagccaaatttcatgcgcaaacagttattattccagccgtttctgtcaagggcaaccgtcagtcaaatctgaaacaattgcaatcttaagagtgtggatattaaagaacaatgatcaggggtgaacataattggcaatatgcataaatcataccagtggcatcgtcaagacgagtagagaagaagacaagcaatcgcggatcgtcaagcggtattcaaataagtaaattaaggagtaaacaaataagagtatggaaataaacaaagaagcaataaagcacactactatcgattggaaaggagattaaagatggcaagataaataagtaatgggcaataatactagcccgttggaatctaccacgtagtgtgtgaacaagtagaaggcatgaaacagagatcaaaacaagaaagagaagggcaacacagaggacagaagacggggcgggtaaagcggggcacgtcacacgaggcagacgacaagaatcgaggagtaggacaggagacaaagtaacaagacgaggaaagaagagaagaagcagaaccaaacaaagacacaacaaa

SEQ ID NO: 491144 - DNA, 219 bp, Homo sapiens
agtgtaggcccatatgcacagtgattgccttgtgtctaagctccgtccttgatagcagagcacagcctatatcttggccaagtctgtcataattgattactatccatactggatctcctgttctgttgtcaaagtgaggcccagtgtatttcaacatgcgcttcaggggcgctgactgcctctctctcattgtgtatgccccggatactgtcataagct

SEQ ID NO: 491145 - DNA, 359 bp, Homo sapiens
  misc_feature (11)..(11): n is a, c, g, or t
  misc_feature (44)..(44): n is a, c, g, or t
  misc_feature (72)..(72): n is a, c, g, or t
  misc_feature (95)..(95): n is a, c, g, or t
  misc_feature (105)..(105): n is a, c, g, or t
  misc_feature (144)..(144): n is a, c, g, or t
  misc_feature (149)..(149): n is a, c, g, or t
  misc_feature (190)..(190): n is a, c, g, or t
  misc_feature (273)..(273): n is a, c, g, or t
  misc_feature (335)..(335): n is a, c, g, or t
tacgttctttnaaaaactacggggaatggggtcgtctttgcccnaagtcccgaaaaaacttgttccctgaancccctcagggatggcccccaaantgtccccctnctctggcaccccctttcattggttccatccatcccccanaaaancctgcccaatcgaaacccgtccctgcatcccaggatggtanccagtcccgcccctcgccccccacctccacaggtgccttaaagggccctcgttcacccaaggtgggggcaggggccctcactntccggccctggtgtgggggaaagagtgaggggttgggggatcggcagttgggaggggcgctntgagattaaagagttttacctctg

SEQ ID NO: 491146 - DNA, 810 bp, Homo sapiens
ggcgcccttttttttgtttttccctgaaatgtaaatggttttaatatatttaagagcacacagaagtctgtgatttataaaaaaataaatatataacatgacaaatttacggatgatcctggagctctgaggtcaaactcttataaatgatcagggaaaactataaaacatccatgatctggttaacacacacgggagctattatcccagtggtaaaaaacaaattccttgagggctcagaacgaacaaaaatcagtctttatggggcagaaagcacaatccaaagctaggcaatgaagttcagccggggccacgtgaacctttcaccagccagcctataacctatggagccaggacaggaaagcatgatccttcagctcatgacgccacccaggcttccagacaactgcagaatgaaagagtccctcagaggctccccagccccggctgccatcataaagcagcgggagggatggttggtcctaaggggctctgtcctaaattggagagcaggagactgagaaggttatgctcataaatatggtcatggtaaccgggatcgggaaacttcatgggatcttggccccaggggcactggagctgaagagaaaagaggaccctcacgatgagaattaaccctctaataaaactgaattaacccattcattgcatcgactccccacccatacaaattctccgcatgatgaaacttcgggtcactcctgtggggcgggctgatcctcaattcaccagggattttcctaagcatggcatactcacaagaagcctaaacggcttttaacatccgca

SEQ ID NO: 491147 - DNA, 1019 bp, Homo sapiens
  misc_feature (278)..(278): n is a, c, g, or t
agccagataggttgctcaattgaggagacgtatactatacttcagagcactggtgtcgataactttgtccagggatgcagagatgctgtacgatggactagtacactaataggccctacactctcctgatgaccgacgtgtaaatgttcctctgagtcatggtgcaccaaatttgactggcgtccgatgggtaggacccgtatgtcaaacacctgggagccatgtattcctgaagcgttgacctagtctattaatgcatgcatcatactataccccgnaacatatcgatggtcatagtgcctcaattagctggtcgtagacggtaagtgcaatatcacgcatatatgggcaagtgttactacgagagcaccccttagtgttaaattaatgagtgctgcggaggatctgtgcggggttcgttttgtggggtgaaacttaagatactgttgaaaatattctcctcggagtatgatttgagcaaaaatgcactacataattcacgctcctcagatggtcctcataaagaactctaaattggtatgcaacggacatataaagcaatgggggtgggcctgaggagagaattcatctagtagccatcggggggtaaacgtctgggatgatccgatgggagccacttggaatcatgggggagaacatttttattcttttggaaaaccttttgcaataactgaaacgggccctgtgaaggaccacttccaagggggaagtgttgccatattggcctgggaagtcctatgactaagggtaactttctattttagaaagatgagaatcatcgtccttcgaatctggacttgagtcacgatcgtgggagtcattactctgagggtgcgaccatatgaactagttatggcacaatcctaggcgagaaaagatctccccatacgtgcctgaaaagtcggttgaactttcagcagttattttgtagtaccaagcaaaaagtcgatgttagctggaagaacggttcggggaagctccggtaaaagcgggcaacg

SEQ ID NO: 491148 - DNA, 440 bp, Homo sapiens
cacacagatacatctatgcacacacacatatttaaaatacacaaaaatattagcatataagtcactgggggtaaatttagttcctgttcctaggttcttgtactgactaggaagaggatagaagtactaactcataggctgggcgcggtggctcacgcctgtaatcccaacactttaggatgccgaggtaggcagatctcttaaggtccggagttcaagaccagcctggccaacatggtgaaaccctgtctctactaaaaatacaaaaattagctgggtgtggtggcgcatgcctgtaatcccagctgcttgggaggctgagggatgagaatcgcttgaatctgggaggtggaggttgcagtgagctgaggttacaccactgcactccagcctgggcgacagagcgagactctgtctcgaaaaagaaaaaaaaagaaaag

SEQ ID NO: 491149 - DNA, 1061 bp, Homo sapiens
ggccacgatggttcaacgcagccggcccggaagatccgcagacgtaaggcccggtaatgccaatggcgctgccggcatcgctccgcgccccgctgtcgggtcccatccgtgcctcatcggtgcgctgcctccagcggttcgggtaccatcacgagaggtgcgcgccggacgcggcttcgagcctggatggagctcagggtgtgccggcgattcaacaagaacggtgtgcccggagcatcgtgacatttctgtggatccgaggaggcgtgaacaaggtccacgggagtccctgcaggccaacgtgcagacggctgaaggagtaccgctccaatagctcatcctcttcgcgccaggaagccctcggcccccaagaagggagacagttctgctgaagaactgaacattgggcacccaggtgaccggaccggatcatgcccgtccgggaacgtctataagcaaggcagaaagctcgagtcatcactgaggaagcagcacagaatttcaaagccttcgctagtctccgatatggcccgtgccaacgcccggctcttcggcatacgggcaaacaagagccaaggaagccgcagaacaggatgttgaacaagacaaaataaagccctcctggggacttggaatcagtcaggcagtcatgctgggtctccacgtgagtgtgataacacgttgggaacaactggggcctgggatggggcttcactgctgtgacttctcctggcacgcgactagggagcttcttgacagacagtcaagccctggataaatgctctacctatctgtgttgaaacactgatgcgaggacggataagtactgaatgtacacgggctaccatacagcgcgcacccgtcaccgaccgccgtacctcacaaacgcgcccactagcgaccccactacaaagcagaacagctggacaggatgccacaacataacccaacattagaagagccgccatataacacccacgccaccgtgccaccccacaagcacaacaacgccgaactattctaccacaacacatagcacagcaaacgctcccccctgttca

SEQ ID NO: 491150 - DNA, 927 bp, Homo sapiens
gctgcactcaaccaggatgagaggctgcccggccaatgcagctgccgccccgtctgctgcggaggctttgctttttgactccctggcgacagtaaagttgaagagcttccggccggaggccaatagatgggacccccggaaggcggaagttctagggcggaagtggccgagaggagaggagaatggcggcggaaggctggatttggccccactacacctctctttcttcttttgttgttggggtctgtgactgcggatataactgacggcaacagtgaacatctcaagcgggagcattcgctcattaagccctaccaaggggtcggttccagctctatgcccctctgggacttccagggcagcactatgctcacgagccagtacgtacgtctgacccctgacgagcgcagcaaagagggctctatctggaaccaccagccgtgcttcctcaaagactgggaaatgcacgtccacttcaaagtccacggcacagggaagaagaacctccatggagacggcatcgccttgtggtacacccgggaccgcctcgtgccagggcctgtgtttggaagcaaagataacttccacggcttagccatcttcctggacacctaccccaatgatgagaccactgagcgcgtgttcccgtacatctcggtgatggtgaacaatggctccctgtcctacgaccacagcaaggatgggcgctggaccgagctggcgggctgcacggctgacttccgcaaccgcgatcacgacaccttcctggctgtgcgctactcccggggccgtctgacggtgatgaccgggggcctgtccctgggcccaggagccaatgtgaacttttttttttaccgggattataaaagaacaacaagatgaccttatttcttaactgtttcaaataaatgattaaagtattttcat

SEQ ID NO: 491151 - DNA, 189 bp, Homo sapiens
caagtcagtgctagggcaagcccacgaagatgatccttacatgtagaaaacttagcaattctaaatgcatacacaccaaagaacagagcatcaagatatatgaaacaaaaacggacagagctaaaaggagaagtacacaaagtcacaattacagcgggggacttctgtaacccactatgaacagttgat

SEQ ID NO: 491152 - DNA, 980 bp, Homo sapiens
  misc_feature (877)..(877): n is a, c, g, or t
  misc_feature (882)..(882): n is a, c, g, or t
gctgcactcaaccaggatgagaggctgcccggccaatgcagctgccgccccgtctgctgcggaggctttgctttttgactccctggcgacagtaaagttgaagagcttccggccggaggccaatagatgggacccccggaaggcggaagttctagggcggaagtggccgagaggagaggagaatggcggcggaaggctggatttggcgttggggctggggccggcggtgcctgggaaggcctgggcttctcggccccggccctggccccactacacctctctttcttcttttgttgttggggtctgtgactgcggatataactgacggcaacagtgaacatctcaagcgggagcattcgctcattaagccctaccaaggggtcggttccagctctatgcccctctgggacttccagggcagcactatgctcacgagccagtacgtacgtctgacccctgacgagcgcagcaaagagggctctatctggaaccaccagccgtgcttcctcaaagactgggaaatgcacgtccacttcaaagtccacggcacagggaagaagaacctccatggagacggcatcgccttgtggtacacccgggaccgcctcgtgccagggcctgtgtttggaagcaaagataacttccacggcttagccatcttcctggacacctaccccaatgatgagaccactgagcgcgtgttcccgtacatctcggtgatggtgaacaatggctccctgtcctacgaccacagcaaggatgggcgctggaccgagctggcgggctgcacggctgacttccgcaaccgcgatcacgacaccttcctggctgtgcgctactcccggggccgtctgacggtgatgaccgcctggggacngaacngtggagactggtttggctcgggatggccgtccccggtatacttcgggccccggccggaccgttttgtctggtcttcccgagtgtctttttgtgcccca

SEQ ID NO: 491153 - DNA, 946 bp, Homo sapiens
aaaattgctagcgatcagtgctcgttgtatttcgtcacaggagaagtggtcgagaatagctggatttggcgttggggctggggccggcggtgcctgggaaggcctgggcttctcggccccggccctggccccactacacctctctttcttcttttgttgttggggtctgtgactgcggatataactgacggcaacagtgaacatctcaagcgggagcattcgctcattaagccctaccaaggggtcggttccagctctatgcccctctgggacttccagggcagcactatgctcacgagccagtacgtacgtctgacccctgacgagcgcagcaaagagggctctatctggaaccaccagccgtgcttcctcaaagactgggaaatgcacgtccacttcaaagtccacggcacagggaagaagaacctccatggagacggcatcgccttgtggtacacccgggaccgcctcgtgccagggcctgtgtttggaagcaaagataacttccacggcttagccatcttcctggacacctaccccaatgatgagaccactgagcgcgtgttcccgtacatctcggtgatggtgaacaatggctccctgtcctacgaccacagcaaggatgggcgctggaccgagctggcgggctgcacggctgacttccgcaaccgcgatcacgacaccttcctggctgtgcgctactcccggggccgtctgacggtgatgaccgacctggaggacaagaacgagtggaagaactgcattgacatcacgggagtgcgcctgcccaccggctactacttctactatttcggggctcgcggcggccggcgacatgttgacaatcatgactcatctccagaagtgtccagtgagggggcacacagccgagagagactcgtggccaattggccgcggcaatcacagggccagaaagggggacccg

SEQ ID NO: 491154 - DNA, 151 bp, Homo sapiens
ctagttttgaatacatgggctcaagccatcctcccgccacagactcccaaagttctgggattacaagtgtgagcctatgtgcccagatattatgatatctacagacattaataatgcagatcctctacctttacagcacatataatattgg

SEQ ID NO: 491155 - DNA, 446 bp, Homo sapiens
ccagggaccggcccagaaatcccgggcaccgacacttactactaaattcgcggccgcgtcgaacattttgcttcttgcccagcagggacaggtggcagagccgaggcttagggtctggcaccccccacagctggagacggaggctctcctggggctggtgtctcaggagcaggggtctgtgtctacagatgggctgtggcccctgcaggcagctgttgaacactggagggtcccccggaccacactggggtgggctcctgaggacgtggggaagtgattttgttttgtggtgtgtggcacgtgtggcgacggataaggcctgaactgggaaacccaggccttcctgttcaccctgagctgcttcctgagacagatgctcaagtgaggctgcaggcgcggtgtggtggggccgagtgtgaccgtttgctaaataaagtgaaataccc

SEQ ID NO: 491156 - DNA, 188 bp, Homo sapiens
gggggggggcccctccctgggggagggtttccccatgggcctgccccaggaaaaaaaaaaaaaaggaagcagggggctttttttgttaagaaagggggttggccccccccccttcttttttgttttttaaagcccgggggggggggggaaacccccccccctcctgcaataaaaaagggggatgggca

SEQ ID NO: 491157 - DNA, 588 bp, Homo sapiens
gctgcactcaaccaggatgagaggctgcccggccaatgcagctgccgccccgtctgctgcggaggctttgctttttgactccctggcgacagtaaagttgaagagcttccggccggaggccaatagatgggacccccggaaggcggaagttctagggcggaagtggccgagaggagaggagaatggcggcggaaggctggatttggcgttggggctggggccggcggtgcctgggaaggcctgggcttctcggccccggccctggccccactacacctctctttcttcttttgttgttggggtctgtgactgcggatataactgacggcaacagtgaacatctcaagcgggagcattcgctcattaagccctaccaaggggtcggttccagctctatgcccctctgggacttccagggcagcactatgctcacgagccagtacgtacgtctgacccctgacgagcgcagcaaagagggctctatctggaaccacagagatggagtcttgctgttgttgcccaggctggtcttgaactccttggctcaagcaaacctcccatgatgtgctcccaaggtgcttgggacta

SEQ ID NO: 491158 - DNA, 619 bp, Homo sapiens
gctgcactcaaccaggatgagaggctgcccggccaatgcagctgccgccccgtctgctgcggaggctttgctttttgactccctggcgacagtaaagttgaagagcttccggccggaggccaatagatgggacccccggaaggcggaagttctagggcggaagtggccgagaggagaggagaatggcggcggaaggctggatttggcgttggggctggggccggcggtgcctgggaaggcctgggcttctcggccccggccctggccccactacacctctctttcttcttttgttgttggggtctgtgactgcggatataactgacggcaacagtgaacatctcaagcgggagcattcgctcattaagcccggggtggcgggtgttcctgctgctgctgtgcgctctcctgggcatcgttgtctgcgccgtggtgggggccgtggtgttccagaagcggcaggagcggaacaagcgcttctactgagtggcgcctccggcggggcctgtccctgggcccaggagccaatgtgaacttttttttttaccgggattataaaagaacaacaagatgaccttatttcttaactgtttcaaataaatgattaaagtattttcat

SEQ ID NO: 491159 - DNA, 375 bp, Homo sapiens
tctgctccgtatacttcacaaacaggacagacctatggagaggatcgctgtgtaaccggacgctcgtgcaggctgtgttggaagcaagataacttccacggcttagccatcttcctggacacctaccccaatgatgagaccactgagcgcgtgttcccgtacatctcggtgatggtgaacaatggctccctgtcctacgaccacagcaaggatgggcgctggaccgagctggcgggctgcacggctgacttccgcaaccgcgatcacgacaccttcctggctgtgcgctactcccggggccgtctgacggtgatgaccgaccctgaagggcaagaaacgagtggaaagaactggcattgaccatcaccggggagc

SEQ ID NO: 491160 - DNA, 102 bp, Homo sapiens
ccggctgactgcagctctctctgatctgcagcgtattagctcaacagggcgcgaggtgcgggtcgttgaagaagcgcacttccacagcaggaggatgatcag

SEQ ID NO: 491161 - DNA, 2345 bp, Homo sapiens
gctgcactcaaccaggatgagaggctgcccggccaatgcagctgccgccccgtctgctgcggaggctttgctttttgactccctggcgacagtaaagttgaagagcttccggccggaggccaatagatgggacccccggaaggcggaagttctagggcggaagtggccgagaggagaggagaatggcggcggaaggctggatttggcgttggggctggggccggcggtgcctgggaaggcctgggcttctcggccccggccctggccccactacacctctctttcttcttttgttgttggggtctgtgactgcggatataactgacggcaacagtgaacatctcaagcgggagcattcgctcattaagccctaccaaggggtcggttccagctctatgcccctctgggacttccagggcagcactatgctcacgagccagtacgtacgtctgacccctgacgagcgcagcaaagagggctctatctggaaccaccagccgtgcttcctcaaagactgggaaatgcacgtccacttcaaagtccacggcacagggaagaagaacctccatggagacggcatcgccttgtggtacacccgggaccgcctcgtgccagggcctgtgtttggaagcaaagataacttccacggcttagccatcttcctggacacctaccccaatgatgagaccactgagcgcgtgttcccgtacatctcggtgatggtgaacaatggctccctgtcctacgaccacagcaaggatgggcgctggaccgagctggcgggctgcacggctgacttccgcaaccgcgatcacgacaccttcctggctgtgcgctactcccggggccgtctgacggtgatgaccgacctggaggacaagaacgagtggaagaactgcattgacatcacgggagtgcgcctgcccaccggctactacttcggggcctccgccggcaccggcgacctgtctgacaatcatgacatcatctccatgaagctgttccagctgatggtggagcacacgcccgacgaggagagcatcgactggaccaagatcgagcccagcgtcaacttcctcaagtcgcccaaagacaacgtggacgaccccacggggaacttccgcagcgggcccctgacggggtggcgggtgttcctgctgctgctgtgcgctctcctgggcatcgttgtctgcgccgtggtgggggccgtggtgttccagaagcggcaggagcggaacaagcgcttctactgagtggcgcctccggcggggcctgtccctgggcccaggagccaatgtgaacttttttttttaccgggattataaaagaacaacaagatgaccttatttcttaactgtttcaaataaatgattaaagtattttcatacattttgcttcttgcccagcagggacaggtggcagagccgaggcttagggtctggcaccccccacagctggagacggaggctctcctggggctggtgtctcaggagcaggggtctgtgtctacagatgggctgtggcccctgcaggcagctgttgaacactggagggtcccccggaccacactggggtgggctcctgaggacgtggggaagtgattttgttttgtggtgtgtggcacgtgtggcgacggataaggcctgaactgggaaacccaggccttcctgttcaccctgagctgcttcctgagacagatgctcaagtgaggctgcaggcgcggtgtggtggggccgagtgtgaccgtttgctaaataaagtgaaatacccaaacctcaaaaaaaaaaaaaacaaaaaaaaacaaacaaaaaaaaaagaataaaaccaccacactacaaacaaccctaaaacaaaaaagggggggagggcgggggcccctaagagaagattatttcccccggagggaggcccacaaattgactttcaggtgtccacgcccagtgtttttttacttgcaaaaagaggtgggggccccacaaattagagggggagctgcttatataaacagagacaaggagcaggaggggcagttattaaaaaacacgcgcgtggtggtcggggagacaaactgcttaataagaggtgaggatcacttttgatggagagagaagacaccatcacatctgttggagggggagacagacaaaataatttgggagcaacaaactccatcactcaagagaaaagaaattaacacgtcccctgggaaacatactacaaaaatagttcacgaattatatacatggtggtacaacacaccagatataaaataattacgccgtctataaaaaatatatttgcgcaacaagagcaaatgtgttacagaaaacatatttaaacacggg

SEQ ID NO: 491162 - DNA, 1770 bp, Homo sapiens
gctgcactcaaccaggatgagaggctgcccggccaatgcagctgccgccccgtctgctgcggaggctttgctttttgactccctggcgacagtaaagttgaagagcttccggccggaggccaatagatgggacccccggaaggcggaagttctagggcggaagtggccgagaggagaggagaatggcggcggaaggctggatttggcgttggggctggggccggcggtgcctgggaaggcctgggcttctcggccccggccctggccccactacacctctctttcttcttttgttgttggggtctgtgactgcggatataactgacggcaacagtgaacatctcaagcgggagcattcgctcattaagccctaccaaggggtcggttccagctctatgcccctctgggacttccagggcagcactatgctcacgagccagtacgtacgtctgacccctgacgagcgcagcaaagagggctctatctggaaccaccagccgtgcttcctcaaagactgggaaatgcacgtccacttcaaagtccacggcacagggaagaagaacctccatggagacggcatcgccttgtggtacacccgggaccgcctcgtgccagggcctgtgtttggaagcaaagataacttccacggcttagccatcttcctggacacctaccccaatgatgagaccactgagcgcgtgttcccgtacatctcggtgatggtgaacaatggctccctgtcctacgaccacagcaaggatgggcgctggaccgagctggcgggctgcacggctgacttccgcaaccgcgatcacgacaccttcctggctgtgcgctactcccggggccgtctgacggtgatgaccgacctggaggacaagaacgagtggaagaactgcattgacatcacgggagtgcgcctgcccaccggctactacttcggggcctccgccggcaccggcgacctgtctgacaatcatgacatcatctccatgaagctgttccagctgatggtggagcacacgcccgacgaggagagcatcgactggaccaagatcgagcccagcgtcaacttcctcaagtcgcccaaagacaacgtggacgaccccacggggaacttccgcagcgggcccctgacggggtggcgggtgttcctgctgctgctgtgcgctctcctgggcatcgttgtctgcgccgtggtgggggccgtggtgttccagaagcggcaggagcggaacaagcgcttctactgagtggcgcctccggcggggcctgtccctgggcccaggagccaatgtgaacttttttttttaccgggattataaaagaacaacaagatgaccttatttcttaactgtttcaaataaatgattaaagtattttcatacattttgcttcttgcccagcagggacaggtggcagagccgaggcttagggtctggcaccccccacagctggagacggaggctctcctggggctggtgtctcaggagcaggggtctgtgtctacagatgggctgtggcccctgcaggcagctgttgaacactggagggtcccccggaccacactggggtgggctcctgaggacgtggggaagtgattttgttttgtggtgtgtggcacgtgtggcgacggataaggcctgaactgggaaacccaggccttcctgttcaccctgagctgcttcctgagacagatgctcaagtgaggctgcaggcgcggtgtggtggggccgagtgtgaccgtttgctaaataaagtgaaataccc

SEQ ID NO: 491163 - DNA, 792 bp, Homo sapiens
ggggtaaagatggcggagcgcgggtacagtttttcgctgacatacattcagcccgatctggctaaacttgtccagattgaatatgctttggctgctgtacctggaggagccccgtccgtgggaattaaagctgcgacatggtgtggtgattaggcagactgagaaagataacagaaatccattctgtatgatgagcgaaggtgtacacaacagtagaactcaatttagccagagcatataggtttggtgtacagtggcagtgggccccgatttactagagttgcttgtgctactgaggctcgaaaactaggctcaacaatactatcttgtgtaccaatgaacttccgattccgtactagctcagactggtacagatgagtagcttctgtgatgcaagaatatactcagtccaggtggtgttcgtccatttggagtcttccttaacttaattatgtggtgggaatgagggacgaccatatttattatcagtgagatcactatctggagcttactattgcctgggaatagctacagcaaggggaagagaactatgtgaatgggaagactttccttgagaaaagatataatgaagatctggaacttgaagatgccattcatagcagtcatcttaaccctaaaggaaagctttgaagggcaaatgaccagaggataacatagaagttggaatcgtgaaatgaagctggatttaggaggcttactccaactgaagttaaggattacttgggctgcatagcataacaatgaagtgactgaaaaatcagaatttcgata

SEQ ID NO: 491164 - DNA, 349 bp, Homo sapiens
atggcacaggtatacctatgtaacaaacctgcacgttttgcacatgtatcccagagcttaaagtataatttaaaaagaaagtagaaccttcaaaaaaaaaaaaaaacaacaaaactttggggcaaatttcctgtaagttaaaaaattagatgaaaattggaaaaaaatttatccaaattgagggcccaaagattgggtttcccttttaattagaccaaagagcttttagccaattcacttaagaatgaacacccccagttttaaaattggggcaaacaattatgaaagggcatttcaccacaattgaacttgcagatggctcaccgcattggatggggtcccgagctca

SEQ ID NO: 491165 - DNA, 381 bp, Homo sapiens
tatgcagccataaaaaaggatgagttcatgtcctttgtagggacatggatgaagctggaaaccatcattctgagcaaactatcgcaaggacagagcaccaaacaccatatgtttctcactcataggtgggagttgaacaatgagaacacttggacacaagacggagaacgtcacacactggggcctgtcatgggttggggggatgggggagggatagcattaggagaaatacctaatgtaaatgacgagttaatgagtgcagcaaaacaacatggcacatgtatacatgtgtaacctgcacgttgtgcacatgtaccctagaacttaataataataattaaagattaatcctgggttctacctcccagaggttttgatgca

SEQ ID NO: 491166 - DNA, 1386 bp, Homo sapiens
gctgcactcaaccaggatgagaggctgcccggccaatgcagctgccgccccgtctgctgcggaggctttgctttttgactccctggcgacagtaaagttgaagagcttccggccggaggccaatagatgggacccccggaaggcggaagttctagggcggaagtggccgagaggagaggagaatggcggcggaaggctggatttggcgttggggctggggccggcggtgcctgggaaggcctgggcttctcggccccggccctggccccactacacctctctttcttcttttgttgttggggtctgtgactgcggatataactgacggcaacagtgaacatctcaagcgggagcattcgctcattaagccctaccaaggggtcggttccagctctatgcccctctgggacttccagggcagcactatgctcacgagccagtacgtacgtctgacccctgacgagcgcagcaaagagggctctatctggaaccaccagccgtgcttcctcaaagactgggaaatgcacgtccacttcaaagtccacggcacagggaagaagaacctccatggagacggcatcgccttgtggtacacccgggaccgcctcgtgccagggcctgtgtttggaagcaaagataacttccacggcttagccatcttcctggacacctaccccaatgatgagaccactgagcgcgtgttcccgtacatctcggtgatggtgaacaatggctccctgtcctacgaccacagcaaggatgggcgctggaccgagctggcgggctgcacggctgacttccgcaaccgcgatcacgacaccttcctggctgtgcgctactcccggggccgtctgacggtgatgaccgacctggaggacaagaacgagtggaagaactgcattgacatcacgggagtgcgcctgcccaccggctactacttcggggcctccgccggcaccggcgacctgtctgacaatcatgacatcatctccatgaagctgttccagctgatggtggagcacacgcccgacgaggagagcatcgactggaccaagatcgagcccagcgtcaacttcctcaagtcgcccaaagacaacgtggacgaccccacggggaacttccgcagcgggcccctgacggggtggcgggtgttcctgctgctgctgtgcgctctcctgggcatcgttgtctgcgccgtggtgggggccgtggtgttccagaagcggcaggagcggaacaagcgcttctactgagtggcgcctccggcggggcctgtccctgggcccaggagccaatgtgaacttttttttttaccgggattataaaagaacaacaagatgaccttatttcttaactgtttcaaataaatgattaaagtattttcat

SEQ ID NO: 491167 - DNA, 259 bp, Homo sapiens
ccccctccccgattagggataactttccaggtataaggacgattttgaattccagggacctttgaatattttagaagggttagaaaacttggtattatgcagcacagaaaaagtggtatgactgaggagatagagaacttaccacaaagggtctggaatgccatgatacatagtttggattttcttctgtggggagcatggggttagtgaagtattttaaaagcaacatgactcttggcaggaagattcaatgtgaggc

SEQ ID NO: 491168 - DNA, 442 bp, Homo sapiens
  misc_feature (17)..(17): n is a, c, g, or t
  misc_feature (85)..(85): n is a, c, g, or t
  misc_feature (98)..(98): n is a, c, g, or t
  misc_feature (123)..(123): n is a, c, g, or t
  misc_feature (134)..(134): n is a, c, g, or t
  misc_feature (140)..(140): n is a, c, g, or t
  misc_feature (155)..(155): n is a, c, g, or t
  misc_feature (165)..(165): n is a, c, g, or t
  misc_feature (178)..(178): n is a, c, g, or t
  misc_feature (183)..(183): n is a, c, g, or t
  misc_feature (206)..(206): n is a, c, g, or t
  misc_feature (217)..(217): n is a, c, g, or t
  misc_feature (235)..(235): n is a, c, g, or t
  misc_feature (292)..(292): n is a, c, g, or t
  misc_feature (363)..(363): n is a, c, g, or t
  misc_feature (378)..(379): n is a, c, g, or t
  misc_feature (426)..(426): n is a, c, g, or t
gaaacaaaagagaaagnagagagaaaaacaaaaaaaaaaaaccaagttgtacgtcctgagggcttacaacttattttctccaacnccttactttttcnaaagggctttgggggtttcaattgncaaaagcagancaagtngcatgtttagccagngaagtcttanttgcttaaccccngttancctccgccgttttaaagtgtctntttcctttttnattgttttgtccaggggnagaaaaggtgggggtggtttcctcctcctttggaaggggacctccccctggggctanacccaccttcccgtcccggttttaagaatcccagttacatagttattttttacctttttttttcctccccngttcctgcttgggcnntgggcccctcctgtttgcggcgttaattacgtgtggttcggtttccnggcccatggttggggg

SEQ ID NO: 491169 - DNA, 354 bp, Homo sapiens
ggtcactctagaggactcgcatacacagtctcaaactccttctcctgatggtcatcttagatcctgttagactgcgttctggcttgctagctgctgcggcatgaaggcctcagaggctccaaaaaattcctagtatgactagagacatgaaaaactagtccctcagtgggcttggtaggtcctctacatatttgggtcaatgcagaaccaaaacagcagctttctggtgaagcacgaattctaaatcttgtctattcaatattatcggatccattttgagagaagaaaagcaccagagactgcttggaaagggacagcttcatttccaaatgagtcttcttttctttccacaga

SEQ ID NO: 491170 - DNA, 153 bp, Homo sapiens
ttatctcggtatacctctccataagacaaagtgttgctctggatccccaagttatctcactcagagtaaaagccagaatgcctatagtgaacctccctccaataccctacaggacacagtgcctctctatgacctcggcttcttggccttcct

SEQ ID NO: 491171 - DNA, 335 bp, Homo sapiens
tcttacttgccggtgtctataacaaaaaaagtgagactttagaaccatggaccagaatcgagaacctaaataaaaccttagtgtatgtggataaatgatatctgacaaggggtgccaagaccatttaatgggggaaaagacagtctttacatcaaatattgctgggaaaacaggatgtccctatgcaaaagtatgaagttagactcttaccttacaccatatacaaaaatcaactcaaaatgtatcaaagatctatacacaggcctaaaactataattcactaggagaaaacgtaggagaaaatgtagcattgaatttggcaccgatttcacagg

SEQ ID NO: 491172 - DNA, 612 bp, Homo sapiens
cccagaaggtggagtgttgtcactgcattccagcctgggcaacggaacaagactctgtctaaaaaaaaaaaaaaaaaaaaaaaaattagccaggcgtggtggcacacctactcaaaaggctgaggtgggagaatcgcttgagcccaggagttcaaggctatgatcaattcattgcaccccagcctgggtgacagagtgagatcttgtctcaaaaaaaaaaaaaaagtatgaatttcagtgggccatggcatacctaaaacattattatgagagtttctgtaaggatgttttaagggtagctttttttttttttttttttgagacagggtctcgcttcgtcacccaggctggagtacagtgacaccatcttggctcactgcaactgccgcctcctgggttcaagccattctcctgtctcagcctcccaagtagctgggattacaagcgttcgccaccatgcctggctaatttttgtattattagtagagacggggtttcaccatgttggccaggctggtctcaaactcctgacctcaaataatccacccacctttgccttccaaaatgctgggataccggcttaattcaccggacccaaccttttaaggtgtt

SEQ ID NO: 491173 - DNA, 232 bp, Homo sapiens
  misc_feature (221)..(221): n is a, c, g, or t
cgcacctgaagatgccagacattggaggtgtctgcgtaggcagatgctcctccctggaccattgctagtcatccttcaaatgaccactccattaatataacatttcatccagtaaactggcctctactatctttaactcatgcatggccactgaaccatttctctatgtagcctgcgatttatctattctctctgtcctgcccacccctcttttttgtatnagcccaacgaa

SEQ ID NO: 491174 - DNA, 315 bp, Homo sapiens
ttagcatctccccttaccgagtccagtatcaagaaggtaccaggttcggggtagttttcctggataaaacgtcctggagacatttgagtcccactattccaggtccctggccttactcaaaggtgagagcaaaatgactgaggttttgagctggaggtgacatgaagctgctttgaggcaaagatgataaagccacggtcaacccacgagccacggtcaacccacaagccacggtcaatccacaagccacggtcaacccatatgccccggtcaacccacaagccacggtcaacccacaagccccggtcaacccac

SEQ ID NO: 491175 - DNA, 192 bp, Homo sapiens
agtcaatatccgagtactggtgctcccatgttctcagtagtgtactcccatttcagagtactgggaatggggagcacagtactggtgaacatgggagctcacagtacgtgaggaaatgggagctcacagtgactgggaaaatgggagcactagtgcgtcgtgccaggggtaccagagcatcgaattctgtaa

SEQ ID NO: 491176 - DNA, 124 bp, Homo sapiens
  misc_feature (1)..(1): n is a, c, g, or t
ntaggcaggaactgtgggaggcagttactgtgatcttaacctgtatcctgagactccagatgcagctacctgtggtggatgaatggtcagagctccctatactcacagcttgagctgtctgaaa

SEQ ID NO: 491177 - DNA, 1370 bp, Homo sapiens
gtgctggtggcatgttgcctgcctgatgtgcagctaatggtcaaatgagagttcatatttggttatttgccattaaacaaagacttcccagccatgtgctgctggtgtgctcactgcctgtaaatcccatgcacttatgggatgtgcctgactgctggcatgatcacccatcagtgtcaagtggtgttcagagatcatgcctgtgccaatcactgtgcgaacaaccccctatcccttactaaaaactacaacaacattagcttgggtcgtggcggccggcgccgccttgtaaactctccatgactaccctacaggtgcatcggcttgacgtgtaactgacgacctcaacattttaacaccccacgggacgggcacgaagtgtctggccaagatggacggcttggatcgcactcacttgccctgcttggccattatgccacaatggcacattgtgatgcccacacctccgacgatggcccgacaacacgtacgttgattcttcccacctataccacacacactgaatacaaacctcacacacaggattacacctccttctgcactgcactcactcaccttctccacacagcaatggtccccaggaacagttggctggggtaacttcgactattttacacaacggtgtgactctctggaacaacccacgtccaacagacacctaagtgttcccgcccaacttctggttccacatcctacggctacttaccgcttggtttggccacagcttcctctccatcgaacggctttggacaccccattatactgtcacatgtcagacccttttgtgcatagcttgagccatttctcaacttcctcctctacctcttttcacccaccccgctcacccgcaactccctccgccctgtgctcatcctccgaataactctccacccccccccgtctcccacgattggtagcactaatggcatccaacccctgtctgcaacggaacttaacagcaacggtcaacacgttcacacccacgccttaatcaataccttgcttattgcagttggcctcgaccactcctcccccaacacacacgaatcgacctgaaacctgcgccggtctcgaacactggcacactacgccacaaccggcgctcacctgagcttgccatcagacccaccacccaccacctgcgcaaaacatcccgcgccaccaccggcccccaacccgactagcaccagaccaccacacacacacgcccccgaccaacctcccaacaccacagcaccagaacaccatacatcccacaccgcacaaccacccgaccaccaccacgcacccacgaccacaaccccccccaacaccccatcccccgtcccgcatcccccgccgccacgccc

SEQ ID NO: 491178 - DNA, 161 bp, Homo sapiens
tcataatgaatagtcctataactattaaagacattgaatatcatagtattaaaaactagccaaaaatgaaatatactatggaccagatagtattcacctagacgaatactaaccacgtattactaaaacgaatttatacacaatacctgtaacaatactcc

SEQ ID NO: 491179 - DNA, 342 bp, Homo sapiens
acccctccataaagagtgcccagggagcacacgaggaaagacatttggagaatattaaatgctctgccgggcatggtagttcacagccttgcagacccagcggcactttgggagcccaaggcaagaggatcgcttgaggacgggagttcgagaccagcctgggcaacatagtgagactccgcctctataaaaaatcttaaaattagctgggtatggtggtgtgcacctgtggtctcagctactcaggaagctgagatgggaggatcgcctgagcctgtggggtggaggctgcagtagctgtgatggtgccactgcactccagcctgggcacacattatggag

SEQ ID NO: 491180 - DNA, 231 bp, Homo sapiens
  misc_feature (8)..(8): n is a, c, g, or t
  misc_feature (36)..(37): n is a, c, g, or t
  misc_feature (41)..(41): n is a, c, g, or t
  misc_feature (56)..(56): n is a, c, g, or t
  misc_feature (66)..(66): n is a, c, g, or t
  misc_feature (93)..(93): n is a, c, g, or t
  misc_feature (100)..(100): n is a, c, g, or t
  misc_feature (106)..(106): n is a, c, g, or t
  misc_feature (124)..(124): n is a, c, g, or t
  misc_feature (126)..(126): n is a, c, g, or t
  misc_feature (150)..(150): n is a, c, g, or t
  misc_feature (177)..(177): n is a, c, g, or t
  misc_feature (194)..(194): n is a, c, g, or t
  misc_feature (197)..(197): n is a, c, g, or t
  misc_feature (205)..(205): n is a, c, g, or t
gggtgcangtatagcaggtgggtcagggaacagcannggtncagtctacttcaggntgtcaagggnactctcaagcccgttaacccataaatntcaggcncggtcntagcgttaccctggcagntnactgccccagtctcctggtcaagntgcatgcttactctgaaggccgggggnggaaaatgattaaagtnagngagacggnagcctttcctttgatcagggaatatt

SEQ ID NO: 491181 - DNA, 109 bp, Homo sapiens
gcactggtccgtcatgcgacaacgtagatactgggaaatatctcaggaaggatatggtcacgaagagctctttgtctccatccacggggccagaacgtgctacagcccg

SEQ ID NO: 491182 - DNA, 320 bp, Homo sapiens
tatcaggcgcacttctgtaggctgaggctggaggattgcttgagcccaggaattggagaccaacctgggcaacatagggaaaccctctctctgccaaaaaattaaaaaacaaaacaaaacctaggtgttatggtgtactcctgtggtcccagctgcttgggagctgaggtggagggattgcttgggcccgggaggtcgaggctgcattgagccacgattgtgctgcagcgctctagcctgggtgacagagtgagagcacgtctcaaaaaaaacaataaaaaataaataaaatgacatctttggagaagtgcgcctgggtg

SEQ ID NO: 491183 - DNA, 476 bp, Homo sapiens
ggactcactgtcaacaacatcccatcctgaagacttgcttaccacaactgagagtggggagtcagttcgaggcctagcatcacttaaacttcctccaaaggcacaaaagccagcacgagaaaaatgaagacgggacatatcgacacactagtcaccatgctgctggcaaccatgatacatagtggacatttaccagcgtgacggctgaagtgttagacatggcagcactaatgcatttgactgatgaatacctgaaactgtacggacaggatggcaaattcacactacgttcacccaacctgctaacaggagcgaaaaagcaagcccaccagccactcagatacctgtgtgggaaaatgcaaaagccacactgggcagcctgaaagactcaaatcattactccctatgaacttctaaggataaacatggactagccctgactggcctatatccccgaaccccaagagcaaactccc

SEQ ID NO: 491184 - DNA, 265 bp, Homo sapiens
tggattgatctagaggatccctgtcttgatgtactgcgccaggttagagtgcaatggcgcggtctcggctcactgcaacttccaccacccaggttcaagcaattcggcctcagcctcctgaatagctgggactacaggcgcgtgcattacacccagctaatttttgtattttttttttttttttttggaaacagagttttgctctttcacccaggtcggactgccagggggctatctcgggtcattggaaagctcggtctccggg

SEQ ID NO: 491185 - DNA, 129 bp, Homo sapiens
  misc_feature (107)..(107): n is a, c, g, or t
agaggatcatcctaacagaatggactatgcccctagttacatgtgaatgtgggagttacttaggagtctgaaccaaatacattaaggatggtgttaccgaggctcgnaattctgtaatcgtggatcata

SEQ ID NO: 491186 - DNA, 919 bp, Homo sapiens
  misc_feature (2)..(2): n is a, c, g, or t
  misc_feature (65)..(65): n is a, c, g, or t
  misc_feature (81)..(81): n is a, c, g, or t
  misc_feature (84)..(84): n is a, c, g, or t
  misc_feature (100)..(100): n is a, c, g, or t
  misc_feature (121)..(121): n is a, c, g, or t
  misc_feature (142)..(142): n is a, c, g, or t
  misc_feature (150)..(150): n is a, c, g, or t
  misc_feature (161)..(161): n is a, c, g, or t
  misc_feature (213)..(213): n is a, c, g, or t
  misc_feature (216)..(216): n is a, c, g, or t
  misc_feature (242)..(242): n is a, c, g, or t
  misc_feature (263)..(263): n is a, c, g, or t
  misc_feature (291)..(291): n is a, c, g, or t
  misc_feature (314)..(314): n is a, c, g, or t
  misc_feature (316)..(317): n is a, c, g, or t
  misc_feature (323)..(323): n is a, c, g, or t
  misc_feature (334)..(335): n is a, c, g, or t
  misc_feature (341)..(341): n is a, c, g, or t
  misc_feature (353)..(353): n is a, c, g, or t
  misc_feature (368)..(368): n is a, c, g, or t
  misc_feature (395)..(395): n is a, c, g, or t
  misc_feature (397)..(397): n is a, c, g, or t
  misc_feature (399)..(399): n is a, c, g, or t
  misc_feature (472)..(472): n is a, c, g, or t
  misc_feature (474)..(474): n is a, c, g, or t
  misc_feature (543)..(543): n is a, c, g, or t
  misc_feature (786)..(786): n is a, c, g, or t
  misc_feature (832)..(832): n is a, c, g, or t
  misc_feature (853)..(853): n is a, c, g, or t
  misc_feature (916)..(916): n is a, c, g, or t
tnttatggatgggaactggaactgagaacccagcaggtacttctaggaagactcagcagtcagtngtgacggtggctgacnccncctggctgccccacgngctgcaggccttgcacaagangtgcccatccagcgggtagcngccctganactcgccctcngaggagagcagcagcccacactcctcgcacttgtaacagccaatgtgaaaanttngatccagagcaacaattctcacagtntcctcctgacctggctcaggnattatggccccaccgcacactgagcatnttggggcaaacttcctgtgaaantnntcaatntagtggatttnnttcgtngcatccactgtnttggggatgctgttnaggtcgcggtgacacaccacgcaggtnangntgccagggtggtaggccttccccatagcccgcagatccggtccaggatgggctgggagcacgtggcacatttntncagggtggccacgtagcagccctcgcaatatgccctcctctccacggcgtagaaatgctggccgcgaantgggcccggcatgtagaacacacaaagcagcccacgtgaaagacgcgatcaagggccacaaccccagctccatccccaaccacatcttctccgcagccaccacactggccaaagtactccccgctgggcgggtgggttcatgtcgtgaaccagcttcttcgtcagcctatccagctcatcctctggaggctggctcaggggcactggggcccgtgctcgcctcctcttcctcttcctgcaggncagagacccagcagcttctctttggccctggcctggctctctctgntctatagcaggccccagactnactcggctgggagaggaagtggggccgggagggccagaggctgagaggtccccgctgggtggncga

SEQ ID NO: 491187 - DNA, 333 bp, Homo sapiens
actgtctataaagcatccgccagccagctaatcatgcatcagaccaataccatcccgagtcacctgggccgcaccctaggtctctatggtaaggaccagcaggaggcccccctgcaggacatggagaatgacggcgagcaggacctccgctgcaaatacatctccctcatctacaccaactatgaggcgcacaaggatgactatgtgaaggcactgcccgtactactgaagccttttgagaccctgcgtgcccagaaccagtgaggcaagaccttcattgtgggagaccagatctccttcgctgactacaacctgctggacttgctgctgacc

SEQ ID NO: 491188 - DNA, 1819 bp, Homo sapiens
  misc_feature (112)..(112): n is a, c, g, or t
  misc_feature (375)..(375): n is a, c, g, or t
  misc_feature (835)..(835): n is a, c, g, or t
tttgtatttgttactgggtaccggtgactaaaatggaagcgttttgggggtcgcggtccggacttggtgagtcgggtggagtccggtccccagtgaacaagttttataccgncgatttccggtccaactctcccggattccttctcagtgggactccgggcgttctgtggcactttatacaaaagggctcacaaatcacgcgcggtacccagaaatccccatgggtgtgacgcgggaaccgtcgaggtccgtcggagtgtattaagttttcaagaggggcgggaagtgtgggtagaatgtgccggacagacacgatgtggcgtggagatctcgcatagcgggctctcctgtgtggctctgcgattactccgcganaacattcttctctcgcacattatatgtggcagagtctcagaacaaacgagtatacccatgtgcgcgtgggtgtgccctctctgtgggcagattatagcgccggtgatatttctcacagggagtattgtgggaaacgacatagggttgtctctccgggtcacacataggtggcgttgcatatgtgagtgtagagagagaagcctctctctgtggggcaaaacatggtgggaccacaacgaggggctataactatgggctcgctataagagagaccccatatattatctatctgctacaatgtgaggcgctgtggcacgccgaggggggcgcacgatgtgtcatcagacaaagtgctgctgtgagcgcgctctcgataaagagattatgtagaaaaacccccttatgtgttgtgtggaggaacagcgcacgcgaggtgggtctccccatctgcaggagggancgggggctattaaggtggtcctagtgagcattgttgcgggagagtgacgagtacggctttttctccactactgcggggctattcatgtggcgtgcgggcagccatgttgtccttggtggcgcagttgtatataaaaggccctcataatgatggaacaggggcccccccgctattttccagcgccgtggggggcccaacgctggggagggtacataagagcgcggcggaggagcgatataaaccctgaggggggacacttacatagggaccgcctttctgttggggtggtcggcgaaaagaaagacggtttctcctggtgggaggaaagtaaaaaggccgacggccccccagggtggtgggctataaaagcgctacgaagataaaccgctgggatggggtgcccccctgggggagaaccacttatttagggtattagggaaacacggccgtgagacattgtgggcgcgcaaaggtgtggccggtaggttcaccactaaccgcgggaaagaaagagtcgcccccagaggtcctttataaaaaaacgcgggagggttctgaccaaacaccccggcgtccaagtgtggtatccaccgcccgtgaaagaaaagaggggtgtgttttcgtggcaacacttacgcaagggcgggaccccacatggtggtctcatcacaagggagaggataccccccagtggtggggaaaatttatgttggtgggccccccaaacgtttgtaatcaccacggcggggggactttatggaaaagtgtgaaataatatcaccggacgagactgggccattgtaatatcccgcaggaaaacattgtgaaacgtttgtggccccacatcatttttaacaaccttgtggagaacccattgggggcttatactctctacacagacagaaattagcaaacctctttctcatttgggcgtgagacaggagacaacaataagttctccatcagacgtgtggtttacaaaaa

SEQ ID NO: 491189 - DNA, 556 bp, Homo sapiens
cccaaaattatctcatttactcctcgcagcaaccttaagagtgaaggttaaacttatcacctttttacaaatgattactgaggcccagaatgtgacttgtccaatgtcgcatagacagtaagtgcaaggctgggaatccacatctgtctggctgatgggagaacctgcattaaacaccatactgaaactgaaaaccgtttaggaaaccgaaggtttaataacacatggaataagtggtataagtctgagtgccaagacttttttgtcaacaaaacagtggaatttagaaaaacaacaacagcaaaatccccttagtgcgtaacttgaaattcccttcggccgtttgtcaaaacacactcacttaagtcttagttctcagtattcatatctgatcctccaaattagacggcctttaaaacacatctcacatttctttgtctgccaaatagtgtccaaccaacactgtgcaaaaagagtcgtattttaaataaaacctcatattatcaaaactgtgcttcagaaggctcccgttgcttagagtgaagtccgaacgtgg

SEQ ID NO: 491190 - DNA, 158 bp, Homo sapiens
gttttagctgtgttaggagagcagaagagaagacggggactgtacttcaatatttcgatcatttttagaaataggaattcttgagtctcttttctttcttcagtcttttccatatctggttcttttctttttcactgtgatttctgtgcccatttcaa

SEQ ID NO: 491191 - DNA, 604 bp, Homo sapiens
tgttagccattgttacacagattagaacttctaggcctatgccattgtgtgttgcctttcttttttttattgaactgttaactctgtgtgttgtagtagttcatgcgtgtttacttctttgcaggctgaacataacttctttattttcaaagttccctgtgttgtgaactgatctggggtgacgtgaaatctttgaggtaaggcaagctctaatgataaaatatggaaagaaagcctgttgaaacttggggacgcctttcagagataacacttttagagtcactgcctataatttttgaaatgccgccatttgtgtgttagggaggggactgtggagcataaattggagcaaccgggagcagcacatcgtgcgcttgacgtgctaaggtagtgtccatctcatagctggctcacccataatagcaattttatatgctgtgcactcactagtctgtggattgtatcaacagctttaaaggaggaaacatggagacatgaagagacttcatttctgtggtttttcccttacatgtttgagtgttgtccctggttaggccctagttcttttccattattatcactaaagttggctttggtcctgttg

SEQ ID NO: 491192 - DNA, 231 bp, Homo sapiens
ccttctacgtctcatgcatgtggatttcatgctccccctgccctccacttacagtgatgctacagcctaacatgtaacggctgtggtgagaaacattactgtttctagccatatcctctgcaagtaatccaaagagaaatgctgccacactgtctctctggtcaaagaaaggaaaggtgattcctagtacacacacatgtcacaagtatttcagtgatgagacgtagaagg

SEQ ID NO: 491193 - DNA, 294 bp, Homo sapiens
  misc_feature (3)..(3): n is a, c, g, or t
  misc_feature (156)..(156): n is a, c, g, or t
  misc_feature (166)..(166): n is a, c, g, or t
  misc_feature (255)..(256): n is a, c, g, or t
tcngcacactggtctcacatatcagcaggtgctcaataaaagtccgttccctcgcttgtgtatggcattctaatgaagacttacaacaatagtttttcgaataatatgtcacctgttttcgaataacatatcaccaaggtaaggcagatggccagngaaagtttanggcctccaatgttaatttgactcatcatactacaatatgccgaggctcagcacgccttaatccagtcgattgagctcttggtctgtacnnacttcgcttcatatctaggcaatacacctgacgtgctg

SEQ ID NO: 491194 - DNA, 422 bp, Homo sapiens
cccccgggaaagggtgaaacccctccctaattgaaacccctttccccagaaatattttcaaatttacctttgccccctgaccccatccagaggaatcacctatcctatggcaactatagcccatacaaaatgtatttccttaataagacttgaaagtcagaattattccttgatccatggagtaattctgcatggagctgcagaatagatgttaacaggcataaaaacattaatctccttgtacatctccaccagagctcttgggtgaccaggagccttgtcaataagcagtaacgttttgaaagaaattttttgagcaggtctcaacagtgggcctaaaatattcagcaaaccatgctgtacacagatatactatcatactgactttgttgttccatttacagagcacagagtagacttag

SEQ ID NO: 491195 - DNA, 188 bp, Homo sapiens
  misc_feature (13)..(13): n is a, c, g, or t
  misc_feature (27)..(27): n is a, c, g, or t
  misc_feature (133)..(133): n is a, c, g, or t
tatcatggattgnaaaaaaaaatactntgtatggatttttgtattctgtaagtattgttttgtgtgtgtgtgtgtgtgtgtgtgttggaactcctggggcatgttatattttgaagtgattaaactatttaantgtgtgtctatattttggagtggaataattcttcataaaaatgttttaaaacact

SEQ ID NO: 491196 - DNA, 106 bp, Homo sapiens
ttggatggcactcggtgactggcggtccctagcaatagcagctgctgtggggaagaagggctgcccagccagctggttctccctgtggacaccatgcatgatccac

SEQ ID NO: 491197 - DNA, 717 bp, Homo sapiens
  misc_feature (18)..(18): n is a, c, g, or t
  misc_feature (159)..(159): n is a, c, g, or t
  misc_feature (163)..(163): n is a, c, g, or t
  misc_feature (166)..(166): n is a, c, g, or t
  misc_feature (168)..(168): n is a, c, g, or t
  misc_feature (174)..(174): n is a, c, g, or t
  misc_feature (184)..(184): n is a, c, g, or t
  misc_feature (210)..(210): n is a, c, g, or t
  misc_feature (239)..(239): n is a, c, g, or t
  misc_feature (247)..(248): n is a, c, g, or t
  misc_feature (254)..(254): n is a, c, g, or t
  misc_feature (261)..(261): n is a, c, g, or t
  misc_feature (266)..(266): n is a, c, g, or t
  misc_feature (273)..(273): n is a, c, g, or t
  misc_feature (278)..(279): n is a, c, g, or t
  misc_feature (291)..(291): n is a, c, g, or t
  misc_feature (321)..(321): n is a, c, g, or t
  misc_feature (356)..(356): n is a, c, g, or t
  misc_feature (400)..(400): n is a, c, g, or t
  misc_feature (423)..(424): n is a, c, g, or t
  misc_feature (433)..(433): n is a, c, g, or t
  misc_feature (441)..(442): n is a, c, g, or t
  misc_feature (447)..(447): n is a, c, g, or t
  misc_feature (498)..(498): n is a, c, g, or t
  misc_feature (513)..(513): n is a, c, g, or t
  misc_feature (525)..(527): n is a, c, g, or t
  misc_feature (537)..(537): n is a, c, g, or t
  misc_feature (546)..(546): n is a, c, g, or t
  misc_feature (550)..(550): n is a, c, g, or t
  misc_feature (572)..(572): n is a, c, g, or t
  misc_feature (578)..(578): n is a, c, g, or t
  misc_feature (593)..(593): n is a, c, g, or t
  misc_feature (620)..(620): n is a, c, g, or t
  misc_feature (677)..(677): n is a, c, g, or t
ggtactgaattttgtcanctgtgtgctctacaaacccccagcaattctaatctcgggtccatatctctcagcataacgctcatggatgttgtctttatgtcatgtgctacgcctcttgtgttctttggtgttttctttcatgggggggtgatcacattntttnaancngggaanaaaaccagtngagcttccagctcaggtctgtgtatnttggggcgagggaagaccccactggctcntgtgattnngggtanggttggnttggnttgtttnttttnngctttgtgggtntggtggaaaaaagatttagcaaatgggcgntccatttcatagatgagaatctcttcataattganggctccagctcctaatttgggtggggcctggctggtctgcctgngtcaggtgaggattcggccacanngttttttancaatctgnnaaatnatcgctcttaattttgaagccagataaaatttttggggagagtggtaaaangagggggaagccccngacagatggtannntgctggcgtntgagtggtntaangtatttcggctgggttttcagnggtggnggctaatttggcccngttctgtagtggggcacttaccttgtncaagctgagggtcgtagaaaaggctagaaagaggggcttggagacgatgaattttgnctcctgattttattattcaatttctttttttcatttaaag

SEQ ID NO: 491198 - DNA, 1157 bp, Homo sapiens
catttaccatctcacttctaggaatactagtatatcgctcacacctacatatcctccctactatgcctagaaggaataatactatcgctgttcattatagctactcgtcagtaacccgtcaacgacccactccctcttagccaatattgtgcctattgccatactagtctttgccgcctgcgaagcagcggtaggcctagccctactagctctcaatctccaagcacagtatggcctagactacgtacataaccttaacaccctacgtccaatgctaacaactacatcgtcccaaccacattatactcactaccagctgacactgactctccaaaacaacacatacattcgaatcaacacaaccacccacagcctaatctattagcactcatccccctactatctctttcaaccaacatcaacacacacacctactctaacctgtcccaccacccttttcctccgatccccctacacaagcccccctcctactacttaactacctgactcctagccctcatcacatcatggccaagcaacgccacctgtcatccagctgcacaccgactatcaacgaagacacgacgtctagcctcctctactactaactctgcccgtagcgacaatgcatccttacgttcatcccatcaccagccacggaccgctcgctcctccttcatatctccctgcgagacgcacgactacaatccccaaacttgggctatccagtcaccacgatgactgtcatccgcctagtaacggcctaaatcgcggcgcattactttactcttcatacaccacctagatagctccccctccccttatctcatgtactacttaaactcctcgcgccgctcaggcccgctaaagatgtctacactccagcactagcgtgtccagacgattcagcctccgagacacgacgtttacatcacccagcctccacgatgccataccgcccaacgaacgaataagagcaccacgaatgactccccaagccagccaaaccacccccagccacaacgccaacacgccagcccaacaacagcccgcgcccccccccccacgccatcgcctccatacgcaccctcccaaaaacacggaaaactaccagcgacacgacacccgcatcgcaccccaacagccacccagacaca

SEQ ID NO: 491199 - DNA, 186 bp, Homo sapiens
cgcgatcctcggctggtggtgccccgttgctactcccactgtgaatcgctggtgctcatctattgtctctcacgagtgtatcgtattctccgaaggaagacaatagttccctctttcagattctgaaggtgctgccattattttgccacccactttgcccgagactttcgcatgttcggcatcatc

SEQ ID NO: 491200 - DNA, 411 bp, Homo sapiens
  misc_feature (37)..(37): n is a, c, g, or t
  misc_feature (231)..(231): n is a, c, g, or t
  misc_feature (233)..(233): n is a, c, g, or t
  misc_feature (377)..(377): n is a, c, g, or t
tcctttttgtttacttgttgggttgttgtggtttaantttctttgttttgccccccaaaggggttttgttgcaggacttaccacatctgtgtgaagggttgcctgctctttccacactgtttttttagtttgtttaaactaaatactgggccatcctttgcttacggaaggccactaactagctatcgccacaaaacaacatgtggccgggaacagcagtaggcagcagcnanctggggctaaagtacttcccagcaagttgttcctaattctcagtttcctcctgcctcctcagctcttttcaccctctaaaactgatgctccaactggatcacaagaaagggagagaaacagcaagggtgaagacagagcgagtntagggttgcatttctaaacattttctcagactct

SEQ ID NO: 491201 - DNA, 162 bp, Homo sapiens
gaacatataccccctttctaccactgaccccaaacatgactcattttgtgtgctatacattcttatcttttattaatataacaactacacaagaacagggatggagaggggcaagggtaataagctgcaggggcgcagtcccaggaggccggggatcctctc

SEQ ID NO: 491202 - DNA, 600 bp, Homo sapiens
ccatggatatcgagggtatcggttcggttgtgacttctttgacatcgagcgttaccgtgccggcggcttcacaagtggagccgcgcaagcagatcagcaccgaatgctatgtgccgaccactaacacaaaggtcatgctttggggagactcccacgcccagcaatactattacggcctgagcaagacgctcccgccctccgtatccatattgcaggtggcaagctctggctgtgaggcgaacttgccggggaccgctacagggggcttgaagtactgcgaccgctccaatgagttcgcctttgaggtgatggcaaaggaaaagccacaggtacttgtaattgcccaacttgaacagcatgacacaaagaataatttgatcgaccttacagcaagggccaaggcgcttggggtcaaaaatgtaattgtggttggtccagtgccgcgctatgaccagttcctgaatcagttggttgtgcgcaagttttggaacaacacgccgcgccggactaaagaaaatctgctgcctgcatccttcgacaccgacagggcgctggcctcccaagtacgctggtggtgctggtgggttagatatctgtcgg

SEQ ID NO: 491203 - DNA, 190 bp, Homo sapiens
  misc_feature (190)..(190): n is a, c, g, or t
agatataggagaattggctgtcctcaaatcccaagtaattttctactctcccttaggcactatgtcgtccgaggccccgagatgcccccttatgaaggtggctcttctcatggaaaactactttttcccagagactatcctttcaaacctcccaatatctatataatcactcccaacggaaggattacan

SEQ ID NO: 491204 - DNA, 702 bp, Homo sapiens
  misc_feature (682)..(682): n is a, c, g, or t
tggaaaggagtctcgctctgtcgcccaggcttgagtgcgtggcgcgatctcggctcactgcaagctctgtctccgtgggttcatgccattctcctgttcagcctcccgagtagtcccaggagtagctgggactacaggtgcccaccaccacacccagctaattttttggtatttttagtagagatggggtttcaccatgttatccaggatggttttgatctcctgacctcgtgatccgcccgccttggcctcccaaaagtgctgggattataggcgtgagccaccgcccgggcaaattttggtattttagtagagatggggtttcaccgtgtgggccaggatggtctcaatctgaccttgtgatctgcccacctcggctcccagggtgctaggattacgggcgtgagccaccactcctagccttaatgcatattcttaaatatcaagggtgcatttgttctgacaatggcttgggggctctaataacctaccttttaagattgagaaatggggggcttaagggagttcagttatgaatcaaagattgacccttcaaatgtgggctgggatttctgctatttcataagagtgggatccttctgagaatcctggatcgggacattggacaccaagccattcagcgtgtgaaccttattcttgtactttcctccttggcggaatntatggccggttaaaagggtg

SEQ ID NO: 491205 - DNA, 738 bp, Homo sapiens
  misc_feature (477)..(477): n is a, c, g, or t
gcttattagtcagcagttgtggtcaactctgtatataagaatcattaaccacacatgtgggtgatgggaagacgatttcagctgacagagttaatggcaaccaataatggtggccggtagctgctgaagagcttcacgcaggttcggccgtgggctttgcactgtaggatgaatttgagagtgtcctattgaggtggggcggctattctaaaagatttccttgtcgtatcacgtggttaagggggggggtaaagtgaaggttcgagggatgtacgtaggtaatgtatggccatccaatagtgtctcattggttacatagtggttattgtgaaggaagaatgagaagcacgaaaaggctggcgtcctggaacactccccagggaagacgaatctccagccatgtagtccttacgtgaagcacaactgttcatcagcgagaaggcaggagactgctcatgaggactagagcacaaaggntgcatttcccagtgaacttctggagtcgagaacatgagagtctcttagccttcagaaagtttgaacgtccaagcagcaggaaaaggccctatcgtatctccaaggcgcttgaaacggggggctgagaacgataggacggcgctacgcgggagctcaacgcgctgaaccgcggggcctcatctggtgcaacttacaccccaattggggaagaagaggaacaacagggggaaacatccctggggtaaggggggaccattgaga

SEQ ID NO: 491206 - DNA, 126 bp, Homo sapiens
agcatatatctgcagccgttgtatcacactgcggtgtgctcctgtaaagttccgtcgacacgtgagcacgtgcgtgacctccaaatatcgttaagctggagctggtcgaactagagaatcctccag

SEQ ID NO: 491207 - DNA, 378 bp, Homo sapiens
gagagacctgatctccaggctctcatggcaaattttgcgtgaactgtgtctatggttgatggaactgtggggctccccaggtagacccctgttttcagtgactgcctgacctattgcatgcagtctaatggcagcgttcgccttttcagatatcttctacctcctgtatgttctactgtactcatgtaagtcatggccttcctcactgagcagatcactgtattccctgggatgtctatcaacagttttaacgatctgatctgcataaatgatactgtggatcgaaattctgcttgcatatgaacctggccgtatccatagtctcaagaggcaatgatttgtgagataatatggcatgcccggagccctgctcatttg

SEQ ID NO: 491208 - DNA, 700 bp, Homo sapiens
ataacaagtttgcaaaaccagggcttggccgtcccgaatcccggaattcgtaccaggccccgcggggtttttggggggtgggtaatggtatttaaaaggaaaagcccttaaaaaaaaaaatggtttcctaataaatttgctttttttccctgccccttaaggaaatttgcccaagtggaaaaaccaattttttgtttcaatctaaaaaccccttcacgcccttaggattcacctggttcttcctggttttcccggcccggggcaagggaatttttggttgttttgggtgttttcttaaaaaacaagttaaaacccccccatttctgcaggccgtgtaagcaagtttacccgttggcctgccttgggggtctgttaaaagaaagtcaaatgtaaaagctaaaataaatcgcccgtgtctcaaaactgaaaaaccgcaggggctttatgctctaaaacagggtaggatttaaaaaaaaaagatttttaatcccggaaattgtgattgtgacccccgagtggaggaaccttccgttctaaaactgaaaaaggggggagcccaaaaaggacttttttttttgtaacccccgtcttgatggccaaaaaattatgggaaaaaaccagtttcgggtttattattccctaaaaactctgtgttatattcccctgggacccccaataaaaccaaaagtgggtgtttcca

SEQ ID NO: 491209 - DNA, 788 bp, Homo sapiens
gcaagaaacaaattttccttctggtaagggctcaagtgcgaaggccaatcctatggtacaaattgcccccaaaaacgatgttgatgtccaaattgacaggaggtcctacctgcctcaagacatagctggtggagttgagttctataatggagttcgtaaaataagggttccagcccctgggaaagcggttggttctcatagcccagcatattatgccagaagtccggggagccttgtttggtgcaaatgccaacaggaagtttttggactaagccttcaggaggtggagctcgtgggcagtctccccgcggccatgggaagcttttaatattttaaaacaccccaattgtctcagaaccttcctcttcacggccccagtattgctttgtatttataagcgatgcccctctgtcactcatgccgtgcctaattgttcccaatgggggaaggcttcatgtaatatgatcaggacccacctccagttcttctgaaagtgtgacagtgtccagccggttctgcagcagtagggaagggggcatatggtggttgcatgggcttcgtgggtgggcgctctccctccggcctaaaggtgatgtatttggtgtttggccccccagtcccccctcttgaggcttaaggggggtgtggcgctccactccttccaccagtagtgggttccctgttacctgtttaggcctagaagttttccctcctctgtcggtgtgaatttaaaatttaagccatgaatatgctttatttattaaaagagttatgcggaaaaaaaaaaa

SEQ ID NO: 491210 - DNA, 391 bp, Homo sapiens
  misc_feature (55)..(55): n is a, c, g, or t
  misc_feature (125)..(125): n is a, c, g, or t
  misc_feature (315)..(315): n is a, c, g, or t
tttattttaaaaaaaaaaaaaccccccccccccccccccttcctttttccccccnggcgccccccccaaaaaaaaccctttttttaaccaaaccccgcgggagacccccgcgcttttcccccacncttttaaaagaaattttttttccacccaccttcccccgggggggggggggggggggccccctaccccggggacttttcccaaagttttcccaataaaaagaggtggggcccctttctcacattcaccgtggcttggaacccaaaaaccccttttaaagggcaaatttgaaatttaaaattttttaaaatnacccaataacaagaaccccggtgggccatttgcccgccataagaatgagctggcttcctgcatatacagttctgag

SEQ ID NO: 491211 - DNA, 294 bp, Homo sapiens
tatctaataaacactaaagttttatccatgtctttcttcatatccacttactcgggacccgcagaaagtattgtgactcgagagcagccactcggcccctgaatcaacccagcatccgaataaaaacaaccagaagaaattattcttcaacctgaaatgaagccgggatcaaatggtcgctgatcatagcccatatttaaattggaatagtcaaactgagcattattaaatcaagcttgtttaatatgtctcaaacagaaaacaaaaaattcaatttggctctttctggcctta

SEQ ID NO: 491212 - DNA, 904 bp, Homo sapiens
  misc_feature (50)..(50): n is a, c, g, or t
  misc_feature (136)..(136): n is a, c, g, or t
  misc_feature (454)..(454): n is a, c, g, or t
taatcagcgcactggcaaggtgcagcgcttgtaaatgtttggcagagtcntgtgagggccccaagggttgttgcagttccttcgaccttgatcgcgttggtcaagtctgcttgagagaatatcacctcgtggatgnatgccatgtgctcttcgccctaatgtggttccttccgtcagcccagaggggaccgagataatcttcaatgcggttgtggtgcagaaaagcaaagatcctgtcaagcctggtggtcatgtgacttaaccagatccgacaagagcacaccgattaatccagctatgactcaacttgggggggaatcgggtgcaagggtcctgaattatctccctctttcatccctccggaaatctgaatacttattctatgtgaggctattacagccagtttgaacaccttcctcgttgttatgttctaccaaccctgtacgtctacaantttaaggacaaccattttaaataagtggcacaggttgcaggccgtggaaaaaacttaagggggcgccttatagtatcaattttcacggacgcttattgtggtggcgtttacacgcacctggtaattggcagaaatccactgtgtgcggtgtggtagtgagccatatagaacgtggttatctgggtgtggaccctatggaaattctggaggttttgcattatataactctacccttcattaattactttctgggaggatggtcttgcttttggactcagtggcattcttttccttttttttcctgttactatggtttactctggggaccactgagggtgaaatattattttttaaatttccaaattgtttggcaccattctttagggggggatttaaggtttttccaaattatactggaacctaaagtgggtttagaaatcaaaaattcgg

SEQ ID NO: 491213 - DNA, 385 bp, Homo sapiens
gggtggatggttccacatgtaatctcaccactttgggaggccggggcaggcagatcacctgagggtgggagtttgatttgagcccaggaggtcgtggctgcagtgagctatgattgttctccagcctgggcgacagagtgtgactccatctcaaaaaaaaggaaaatattagccaggcatacctgtggtcccagttactcaggggactgaggtgggaggatcatttgagcctggagggtcgaggctgcagtgagccatggttgcgccactacactccagcctgggcgacaaagcaagaacccgtctcgaaaattatacaaataaaaacaagcccctctttttcagtcagaaattccacatagttcagcgtctgacggggatcctc

SEQ ID NO: 491214 - DNA, 531 bp, Homo sapiens
  misc_feature (316)..(316): n is a, c, g, or t
  misc_feature (333)..(333): n is a, c, g, or t
  misc_feature (398)..(398): n is a, c, g, or t
  misc_feature (410)..(410): n is a, c, g, or t
  misc_feature (412)..(413): n is a, c, g, or t
  misc_feature (421)..(421): n is a, c, g, or t
gataaaggagaaccccatgcgggaacttcgcatccgcaaccaactctgtctcaacatctgtgttggggagagtgggagacagactgacgcgagcagccacaggtggttggtaagcagctcatcagggcagacccctgctgttttctcaagactagatacactgtcagactccttatggcatccggagacaatgaaaagattgctgtcccctgcacacgttcgaggggccaaggcagaagaaatcttggagaagggtcgaaaggtgcgggcgagtatgagttaagaagctaacaacttctcagatactggaaacttnggttttgggatccaggnacacatcgatctgggtatcaaatatgacccaagcattgtatctacggcctggacttctatgtgtnctgggtagccangnnttcagcanccagacaagaagcgcaggaccaggctgcattggggcctaacactcgaatcagcaaagaggaggccatgcgactggttcctggcagaagtattacatcggtcatccttcct

SEQ ID NO: 491215 - DNA, 957 bp, Homo sapiens
catctcaagatgacgcaccgccgaggacaaagaagcaacaaagcaggaagaaacaaaacacaagacagacaaaaaggagaacagaaaacacaagaagcaacaacaacaaagagaagagacaaaacaaaaacagaacaaaaagacagagaaaagaagaagaacaaagaacaaagaaaaaaagacacaacggcagagcaacagaagaagaagaaaagaagagacagcggaagaagcaagagcaagggaagagagaggaaaggcgcaggagagggaaaggcgagaggagaaacagagaagcaagcagagagagcagaaagagaaggaagaagagagagcgaagagaagagacagccacagaagacaaaaaacgaaaagaaaaagaaaaggaaggaagaggaaaaggctaagagagggagagaggagacgaagataggacaacggcagaagagaacggaagagagaagacgagaaaggagagaagcgggagaggggagagagagaagggaggaaagaacggaggaaagacgggaggaaggaagagacaaaggaggagaaaaaagaagaacgaagcacggcaaggggagagaagggaaagaaaagagaaaagaagaaaaaaaaaccagaagtacgccgcacgaagacgaagacggccaaaagatgcagaaagaaggaagcaccaagaggcaacgcagcagaaagaagccagaagacagacgaacagcaaaagaagaaagaaagagaaaaaaagggaagagaagaacgagaggacaacacaagcaaaaaaaaagaaaggaacggagcacacacaagcgaaacgcaggaaaaagtgaaacaaaaaaaagaacggcgcaaaccaaccagaaagaaaggggaaagagaaaacagcagacaacaagagaaaacgagggcacgacaacaaagaagacgaacagaaaacacaaagaacaccaagacgtc

SEQ ID NO: 491216 - DNA, 102 bp, Homo sapiens
aaagtgacatgatgacccagagatgacatgagagaaggagagagatgagagagatgatgagactggaacccatgatgatgatgatgagacatgagacccaga

SEQ ID NO: 491217 - DNA, 256 bp, Homo sapiens
  misc_feature (91)..(91): n is a, c, g, or t
  misc_feature (94)..(94): n is a, c, g, or t
  misc_feature (100)..(100): n is a, c, g, or t
  misc_feature (102)..(102): n is a, c, g, or t
  misc_feature (104)..(104): n is a, c, g, or t
  misc_feature (110)..(110): n is a, c, g, or t
  misc_feature (126)..(126): n is a, c, g, or t
  misc_feature (131)..(131): n is a, c, g, or t
  misc_feature (135)..(135): n is a, c, g, or t
  misc_feature (145)..(145): n is a, c, g, or t
  misc_feature (148)..(148): n is a, c, g, or t
  misc_feature (150)..(150): n is a, c, g, or t
  misc_feature (157)..(157): n is a, c, g, or t
  misc_feature (162)..(162): n is a, c, g, or t
  misc_feature (164)..(164): n is a, c, g, or t
  misc_feature (169)..(169): n is a, c, g, or t
  misc_feature (185)..(185): n is a, c, g, or t
  misc_feature (190)..(190): n is a, c, g, or t
  misc_feature (212)..(212): n is a, c, g, or t
  misc_feature (218)..(218): n is a, c, g, or t
  misc_feature (220)..(220): n is a, c, g, or t
  misc_feature (224)..(224): n is a, c, g, or t
gtataacccctccctcgagagtcgagtcagcatgtcacttgacacgttcaggacccagttcttcctgaaagtgacctcttttgaccgcggnggncaaggncntntatttncttttcgagagaacgnctatnttgnggatgcgggncgngnctttttnaaatntntgggncaagggactctttgtnacccnctctttagctttcaccaagggnccatangncttntctcctcgcggcgtgcttcacgagcagctcct

SEQ ID NO: 491218 - DNA, 140 bp, Homo sapiens
ttcataggatcccctcagatatccgcgcgctcggctctcaaagtactgcgattcatgggtgaaccaccatgcccggactactttgcctattttttgaaatgtctccatgattctgaattcaatccccggtcgacggagta

SEQ ID NO: 491219 - DNA, 602 bp, Homo sapiens
  misc_feature (46)..(46): n is a, c, g, or t
  misc_feature (55)..(55): n is a, c, g, or t
  misc_feature (73)..(73): n is a, c, g, or t
  misc_feature (120)..(120): n is a, c, g, or t
tctttagccaggtttagtggctcatgcctgtaatccccagcacttngggaggctnaagccggttggatcactngaggtcagaagttcaagaccagcctgacccaacatcgtgaaatgccngtctttacaaaaaaatacaaaaattaactggatgtgatggtgtgtgcatatattctcggctactcgggaggctgaggcaggagaatcacttgaacccacgaggcagtgagctgagattgcaccactgcactccagcctgggacacagagcaagactctgtctcaagataaaataaaataaacttgaaagaattattgcccgactgaggctcacatgccaaaggaaaatctggttctcccctgagctggcctccgtgtgtttccttatcatggtggtcaattggaggtgttaatttgaatggattaaggaacacctagaacactggtaaggcattatttctgggacattatttctgggcatgtcttcgagggtgtttccagaggggattggcatgcgatcgggtggactgagtggaaaagacctacccttaatttgggggggcaccgtccgacagactggggagcaagatagaagaaaacaaa

SEQ ID NO: 491220 - DNA, 304 bp, Homo sapiens
  misc_feature (67)..(67): n is a, c, g, or t
tgaccactgcacagctccaatgcatatctagactgaagacacactagtctatgaacacaactttatntgcgttagcaggtccatttcactttatttatttggttaatttgttttcgagacagagtcttgctctgtcccccaggatggagcgcagtggcgtgatcttggagcactgaaacctctgcctcccaggttcaaagcaattctcctgcctacagcctcccaagtagctgggattacaggcttgtgccaccacgcccgggtaatttggtattttcagtagagatggggtttcaccctgttg

SEQ ID NO: 491221 - DNA, 615 bp, Homo sapiens
tgaatcagctctgtaccagtgttgttggttctccagccttctcatcgactgtcatgataggggactttctctgagtctggatagcaacagagacataatggtgcacgggttacttgtgtatccctgatggggtggcaaaaggcagtggtaggttattgagattggccaaggctggctcatgtctccagtatagaggaggaggggatcagggccctcagaccacatggtactgcgtgtgcggagactgttgttctttatagaaaaccacggttgtagtttctagaatgcaggaactggatacatgggtcatagcagagatccagctgcctaagaggcaaggactccgatgggctgccgtcgggcccaaccccatggctgagaacttttgaagcttccgcagcctccccatggtggtcattgtcattacacttgtctgccttatgggaaattcctgtaaatgaaagcagacctggagtttgttcgccggtaccgtcaggcaatggggaatagagaaccttgcagagcaaagaggccgctcagcatcatcaccaccatgtctggggctacagaggaactgagaaatgtcctgtttcccaggcaaccaagcaaccccgg

SEQ ID NO: 491222 - DNA, 122 bp, Homo sapiens
ataccctggtcaaagaacctggaatcaaggggccggaacccattgagacccaacccctaagggagctccttagtaacagcttgaccgtagcccacgatcccagaagggaaggcccgatttgc

SEQ ID NO: 491223 - DNA, 362 bp, Homo sapiens
aaaaaaggggggggttccggggcttgggccccgtttttcccctaaaataagggttttttcaaaagggccccttttttttttaattggggggggtggagggggcccccaccccccgggaaagggtccccagtgaagaaaattcccctttttaggggggtgggggaaggttttgggtttttttggcccgggcccttttttaccttgggggatttttttttgccgaaaacttttttttaaaagggggtttggggtttttttacccctttccggttgggggggtttccccaaccccccatatgcccccggggggtttttgggggaaaccccaaaaaaggttttttttgggggtggggtttccttta

SEQ ID NO: 491224 - DNA, 548 bp, Homo sapiens
ttgttacaagcgtacgtagtactcactctaacatccgaagtgctgaatcacctttccttcacagtactggttcgctatcggtctctcgggagtatttagccttaccggatggtcccggctgattcacgcagaattcctcgtgctccgcgctactcaggataccactacgcttcggttaccttagaataccgggctatcaccgtctatggcacgactttccagtcgtttcttctcaataactgtcttgcgagagcgtggtcctacaaccccacacatgccgtaacatgggtggtttgggctaatccccgttcgctcgccactactaggggaatcattatttattttcttttcctgcaggtactaagatgtttcagttccctgcgttagcctccaaccaagttggatgacattccttcagaatgccgggttgtcccattcggaaatcttcggatcaatggtcatttgcacctacccgaagcttatcgcagcttatcacgtccttcatcgcctccgagaaccaagacatccgcggtgcgcccttattggag

SEQ ID NO: 491225 - DNA, 929 bp, Homo sapiens
cttggtgctaaaacgcttttgggtatcacatactggggcgttgcgcaagagttggccaaaacggtcgatgcttatataagttggcgtacggctcgtcgctaatcgccagatgtgcaacccctgttttgtccagcgtggtgcgcaactcatctgcactagctggttgtcccagaagtgtgcctcccctgcgtggcgtgactagcatacgctttccgttgtaatcggtcctatgggcgccccgtgtcttcatgggggatggatacatgtttccctgcgcgagaccatgttgattacagttagttagttctattgctggtactcgtttgaggtcccggtacattccacctcggggttcgttggctaacccgtcggcaagaccaaagtacggtactttgatgagcaaagagttgtcagtccccattcctgcaggcggaagtgctcccaccaacttctggtggaacgacaagccattgtcacgacggggaacgttctttactaacagctttgggtctcccagtaaccaagatgtggcagctgttggtgtgtccgccacaatagctcaacacgctgacatctttcttcgccactaataacacccgtggctcccaccaaaaggtggggcacacaggtcggcgcggcgcacgcgtcgggtgacgaagatgggtcgtgcttaggtcttctgcttgcgaggatctacttccctcttggatataggccacgtgcttgctatgaccccgtcccacgccagtgggcacctctggtagagtggacaacactacggggggcgctagagcaccggctttgtcaaaactgctgagaccagtcgggcgcgcccttcaaaacaactaacctcggcgtcttgtgtacgccgtacagcacaacttcagccccccttatcccaaaaccccagtgggcccccacaatatcaa

SEQ ID NO: 491226 - DNA, 152 bp, Homo sapiens
tgacttgtacaagcaattcacagcgcctgtgatgtgcctttgggtgcaactgtgtgacacctgtgcctctccggacagaggaaggaagtcccaccccgacttccagcagcagagagcctgtgtctggcattccctgttccgttgctcccacc

SEQ ID NO: 491227 - DNA, 136 bp, Homo sapiens
aactgcctagattgggctagagctgttgctccccaataatagttttatgttgacagcagtaaggcttggaaacctattattccctacacaagttacagaatacacatgttcctttctgccgaaagttctccatttc

SEQ ID NO: 491228 - DNA, 502 bp, Homo sapiens
taactcactgtttttctttttgtttgttccagagatcactttacccttcattatttggccctttccggggacaaaatattcccttaggattcacatagaccatccatttcttttatttctgggacttctaaaaatttattggccccgttttctggcataattagcaatacaaattgctcaattttgcccaaggtaggccaccataaaagtcgggccctttttcctttaacaaaggggtttaatttaaaattttttactggccgtttcaaaaaattatttttaaaaataaattttgccaagtgatactggggtaaaaaatttgtttttaatctttatggatttagggatttagggacctgttgggatggcgataaacctgcaagaataatttaaatttttataatttagggactgggtctttgtttattgaattttaaacatttatccctgcttggcaggctgtttaaacgtttaggaacttggtaccgggtttatttttact

SEQ ID NO: 491229 - DNA, 1175 bp, Homo sapiens
cgggcaggcctgcggtttcctttgtggacctgttgcgaaggatgtgcccctgcggcaccccgtgcactcattggccccgcccctgtgagacggctcgtgctgagctcattgggcggggtggctggggctctgcgctgccagatggcggggcctgactggacgagctggcctgaattgtgtgcacatttgctggtgaactgcagagcggagcagttgcatgagctgagaggcgaagtctgtgcataacagtggcgacctgatgattgttggatgaccatacagttctgcatgcttctagttggctacttgagagcacgggggcccagtgggaaaagcctatccccaagaactgcaaggtcccattcattggtgcccaggggtgacagtgagttgcacccaaggtgccgtggacccccccctttgaatgccgaacggcaatcccacatgtaattgacgtgcccaacgtggtgaaagctttccatgataacaggagacaattgaagtgtcttttaccattgtgtaaccgtgtggcaaagggttgagcccgaaagggtatacttcgagaagcatagatttcaaagccccagatggaaatggtaacaagcgccaatggtggtcaccccagggacattaggagagaggcactgaggcacttcccaggtatggggaaccgctggtacatttggggacaatcagggacatccggcgaaggacacaaccaggggacaggacaacgtagcggcacatttgggtaagtagtttagatacatgaacagttgagagccccaggaaagagcattatcacgaccgcacggatatgtggaactaccggcaagactaaaccaactagccatacggcaaataatgagcaacaaattacagtgggaaaccattccggggatatgacgctcggcaggtgatacactaatgggagaaaccacactgattaactagaagcgagcgaggacgccggtacgaaccggcggccaggatagcttgggcgattggcgagaaaaggtaaagtactgggatagcaatatccggactcacacccgtaaattggagtccaagcataacgacggcaccgcatagattgacagtaaatatatcccagttcgaaccggttgtaatgtggcacttggagaaaagacactataacaaacaaacaatacttg

SEQ ID NO: 491230 - DNA, 261 bp, Homo sapiens
gagctggtaccatttagaacatccacgagcatgattactttacccccataatgcaacgactatacatataatcacagatttcaggttaccttcctcaagttgtcagagacgcgctgttagcgggtctatatatgtcatgttgcaagaatagcaaagtgaccctggctgctgcttcttccaggcttgctctgtaaagggatgagagtgacatactgatgcctactgaggcatctgagatgcactgtttgtggaggtagcact

SEQ ID NO: 491231 - DNA, 1055 bp, Homo sapiens
  misc_feature (422)..(422): n is a, c, g, or t
ccaagtcgtccgtgaccttaccccctccctagaggctctacttgtatggtcccaggtcctgctggcaatactaccgtcaagataagggctgaacctctatgtgcgagatcgtacgacttggcgcacgaggtcgaagggtagagacgtctcatcagtgtggcacggagacacatgctcagcgaacgtcttgtcggctccacaggcaccctcgagtttgccggtgacgttgagagtccacgtcctgtaggatcataggccaccttgtacaggtcgctcacgacgttggtgggacgcgagctaggatctccccgtagctatcttggtgtgacaccccggcgtagtgggccgctgatgcctcccgcaccttggtgaggcatatttgctctgtcggaccttctctaccactcacctcgtctacttgncctcgtgagtacgccctatagctctacgtaggacgcctccgtcaccgaggccatgtgtccgcatcgtacgtgcccttccagtgtaacgtggaaagctagatgcccatcctgcgtacaccatcacgttgcatgataacttcacgtggcatccctatacagcacatcattgagtgtgtctaccatctactcgtctcggggcacgagtgctccctttctattcagcaaccccaaagggccctatactaaccctttgatgtaacccatacatccaagggaaagctcttcgtgaatccttatacgaacgaaattgttccgtctgtattaccttgcctttcgtagtacttttcccgaaagtgcttactttaagtaggcagtctcttgtacctatgtaaggaggaacctgtaagccctgtgacaacctagtcgttattgtcgcaccaccgcgcctagggaaaggggaacccaattcttgaccatcctgaatgctgaattccgggaccccattttagaggcacccccttggagggttttgatcaataccatataatcataaccaaaaggaatatcggagatataattttcccccatatttgtaaagtacgaggcgggcggaaaaaaaaaaaaccccctggg

SEQ ID NO: 491232 - DNA, 305 bp, Homo sapiens
  misc_feature (2)..(2): n is a, c, g, or t
gnaacatgagtgaacagacagtggtcacaaagagctccagagaccctgcatgcttcgccagcagccctcggatgatcccacgtagctcccggctgggggggctgtagggatatcatgagtatgcgtggctcagcgtgggtcacttagaggagcttgtagcttgtagttaagatagctggccaggtccttcaaccatatggatgggtttccagagaacacactctggctctatgtccagtacgttctgcaggtctgccacatccagagctttcagtgcttcctccaggctgcggaagcggccctgc

SEQ ID NO: 491233 - DNA, 320 bp, Homo sapiens
atccagaaaacaagtggctcgagtttgtgaggttaacctattcagcaaatggggtttcaagttcagttggtccttttttcttatagcttttcacaacactatatttgaagataacctctgtacaataatcattctactaggatggtagtttctaaaagaagataacttcaaaatggcaggtatttttctttgtttaccttcttaactaattaattattttattcgagagacattattgttaatctaccatgtatatgataatgttcactttactggaggtgcagcaaggtttctactgtatgggtctttcattcttcttg

SEQ ID NO: 491234 - DNA, 701 bp, Homo sapiens
agcggagcggcgcggggtcttcatggctgagctgcagctactctccgtggttgcaggcaggctggtggagtccattggtcaaggagtctgaaagagagcagaacatccggacgatgcaggatctcatgttccggtgctaggcgccagctgttgtgaggactagccaggcctccatgaaacaggtgcaccattgcatcgaatgggtgccatgtgcctctggcgtcaagcccaggctttggtcagccagatgacgctgtgataaccgttccaggagccggcatgggcccggatgcaccatgcagtgtgcgatgacgaagccgaagataacaattagatgctgggaggtaaggagcttcagtgtgagacatgcagctggacagtcgtgtgaacaagtgtgtggatgacaacatgcacctcagtccctaactatgatcaagaggatgaaggaggctctcttatcaattggaagatagtaaaagtgttttgtcatgtggcgcagtcatggcctgagggcggagaatagttattttttataacgggagatttgggaatcctagtctttataatgcataagtttacgaatgaagaaatgaagggatgtgccacaagtggtatagagatatgtcacgttgcctcgtggacactggttattaattatgtttcagtccctaaacaggtgacattggtggtaagtgttgcta

SEQ ID NO: 491235 - DNA, 580 bp, Homo sapiens
agaatgctggtggcgcctggttgactcggccgaggccgctgccgctcaggcggataccttcctagctcaagcaatgagctaaaaggagccttatgcatgatcttcccacgtatcaaataactaacaggcactgaggttggcatgttctgcctgctctgctaagaccttgggattccccacttgcattataagcttatatacatgaacattatccaaaaatgattaaaatatattaaaacaacatcaacaatccaggatatttccctataaaagcttttaaaaatatttgtatctatgttttcaattttacttcctttttcagaggcttggtttttctaaaggcttggtttccctttttattatttttctcctttttttattttttggagacagtcttgctctgtcgctcaggctggagtgcaggggccgatctcgagctcactgcaacctcctcctccccggttcaagtgattctggtggcatcagcctcccgagtagctgggactcacggcttgtgccactatgcccagctaattttggtctttagtagagacgggtttccccacatgggtcaggctgt

SEQ ID NO: 491236 - DNA, 115 bp, Homo sapiens
ccacttcccatcaagtagtatccaggagaatgggtctctagtgactccgaaatttcttgggtgaaaaatatatccgcaggttcggatgagaccaggtgtagcttgttcgaattat

SEQ ID NO: 491237 - DNA, 1097 bp, Homo sapiens
gtcttggagtacgtccattgctcctactggtcgtactattcaaacggaagcagatgaacaagattgatcaggagagtatattggaccaacagtcaacgcgcgatgtcgactggatagcttgcggctcgacttgtcctgtgcattctatcccgctctggcagtccagtgcagagtcacactagacaaatcgactccattgctgacatactacagcatggagactaggaccactcgttgtttttcacgagttagtagtcccttctccatgagctcgccactacaacgtacatacgtagtagtactatacctgtgagtccatttggcgcgtagtgaatgggtgcatgtatgatgtaaggttgacggtgtttcactaggagtacgtgtacagcagccatgaagggcacttcagacgttgctagacattcactaatacgtggtcatccttaatgacttgaagctccatgttccatctgtagtccactagcattgcagctcgacgatctggggcgaacaatcggagcgttaacctagttgcctgatgaacgtcgaatccctctaactaggtcttgcagcttcgctgacagtactatcggtcgcatccacttcgaacttccccagagctggccctttccagtgcatgccactatgagttgcggcaaagggcgtcgcccttatcttgagaaaaacaccctaggggcaaaataccctttcccactccaatttacccacgctcatgggatctttcgtttaaaggttcaccgcattgcagatacttaccctcctactggtccggagggaaggcgtcccgattggccagaacctatcgttatgtgggagtaccagcgtatttgtctcgttagacggtcctagttctttgaaccgacaataccctgttgctttactactaccgaggccccattcgccttcaaagggtaccagctaacttcatggattaggtaatcctgtacggtgtggcctcctattcctgattagctgtgcgttgggcgcaagcttcacttgcatgagagctccaggttcttaaacccgcgcacacccacgtgcattggggttgcgcgtgggcgctgccaggcactccc

SEQ ID NO: 491238 - DNA, 183 bp, Homo sapiens
  misc_feature (46)..(46): n is a, c, g, or t
agaatctcgctgagggattgtggggaggggtgtgctcacgcgctgngtggagatctggtgccccctgtatgccggacagaaagggccaggggggacaaggtcttggagaactcggtggcatccggctcttgatggctgtggttcccacggcccttccccaagccttcctgacagcagagagag

SEQ ID NO: 491239 - DNA, 775 bp, Homo sapiens
  misc_feature (89)..(89): n is a, c, g, or t
tgaaccagagtcgtccttctagcgattgtccctcagcagtttgtagcacaatcggcgcccaaatatccaccccagctgctcccatggtncattgctagtgggcgcagtaataagccagcatgtcacacgtaaagtcgcctctccatagcggcaatcaacatatagtgggctctcttataagtagatgaccacgatgagcccttggccagctggtcacatcaactgtgcaccatacattaagcaaaggtagtggcatctcagtctgacgatgttgaaatcatcccacatgaagccaggggtcacacagaatgctgtattcatggtgtcaggatcgtctgcccccccgcataagcaatgttgaccagcatgtctaatcgacagtgctgtagcagatccacatgcgcatacaggcttcgcacatcactcacctggcttgcatcgcgctcatcaggcacacaatggccctccagggattgtgcctcctgagcaaccactgaaagggtgccaatgccggacagatatgtcagctgtggcgcctgctttgcagaatagcaaggcaacgcacgctcgatacccctgtaggcaccagtcgcgacagactgtaggccattcatggcagctgccatagctcacaggcaaagcaggcaggtctgccacacgctatacccattagagtctgcagaaagcatgtctgcggtgaaagtctcggatatggcccagattagccgccgacgtgaagtcagtgttcaaggaatgaatctgcagccgaagcggg

SEQ ID NO: 491240 - DNA, 124 bp, Homo sapiens
gaactaggctacagttgctaaagaaaatatagaacctcttcctcttccctagacttacaacaggctagggttggccggggcggtggctccagcctgtcatctcagcactcggggaggccgacgg

SEQ ID NO: 491241 - DNA, 115 bp, Homo sapiens
cgacacagcttctgaaggacgagccatcgccgctcgtacccgcttctatgccgccagcctaaatggcgcccctcaagggggtgcaagtacgactgacgtcatcctgtatgggctg

SEQ ID NO: 491242 - DNA, 799 bp, Homo sapiens
agcggtgctaaggttttagcccctcggagtcccggcccccttcaatataagtgggtccccggggttcgggatattggccaggaaaaaaaaagcctggtttgttgtggtttctttgaaggggtacacccaatttccagtgaagaatctaaagctgatttccggtcagagtccctgctcacaaatcaagtccattgtttacttccgtgtaagaaggttaggttccagtgttcttttttgattcttcaggcttcatagggaggctcctttctcgtaccattcctaccaatccaactggtaagccccaaaatagaacgttttgggtgtgtattccgagcaccaccatgatattcacctctcatacatgtgactggtggcaagttatgtttcctccctagagagaagggtgagcatggctagctttacacggccagtcatttccctggtgatgaatattgattcttcggccacacccaatgagctcgcgcctgtcatcacagcatttcaggaggatctagcatgagcactgcttcagccctggcgttccatgccagcgtggccaacacaggtatgcctcgtctgggcaacatacgctttatctcttagccgaacatggtggcactcggccatggtttctggtatgcgggtgtagtatgggcggttcatctgagctcagagtattgagtgcacagtgccccgttcttgcccatttactctacagtgtgtgccacagagtgacccgctgtctaaaaaaaaaaggttgtatcttatctgctggttattataacagtgctcggcatgt

SEQ ID NO: 491243 - DNA, 1096 bp, Homo sapiens
  misc_feature (259)..(259): n is a, c, g, or t
cgatttttttttctttggctgctgtcgtacgtggtagcacacgaagagaagaggggacgtgccttttgttggtgtttctcgttattgctttatcgcgtgttgtgtggactgtttcctgccctatgggtatttgcgcagagtgtcaatcaagtctgaagagccacgggggtttaggacctttcccgagacctgggcttgcatacgttccccccgccaggacccgttttgggggatttttcccggggccacccatgggggnttccctagcttcggttacggtattctttgcgctggctccgctgggtcagaggtgaaccccgcattggcttcgtgtcacggagttttttttagccgcgcaccaactggggccccgagccccatggttgggcgcattcctggggttctcactacgtgttccgggggacacttgtaggatgatccttctatcccgcgacctcggttttttgggggcttgttgcccctcgggcaccggttccgcactgggggccccccctgtccgcattttgtagacgcctttgggcccccagttcccgacctcgcgtgtccttccgcgtatttgccaggagagtagtctgtggccatcccagagctaaattttcccggcagggacattctcaggaacaccccttgtgctccagatataacctgttgggccaggctcaatacccctgttgggtcaaccctgtcgtgggtgacaacccaggaacccctctcccctctgttgtcaagcgttctcaggccagattctgaggccctcccggcatcacaactttcacggggtccctgtgttaggtagacggcgccccccctcgctgggagtttgttgcatgcttgccgtttgagacttttctccagcgagctcagcttcctctggggccccgttgtgccagctctgtagactttgccagttgtgtcaattggcccccgatccaatgtttttttcgcctcacacttccccccagatgttttggagatcatattgagcctcctgtctatttccggggtggcccccggctagatacccccggggttttgtggcgccaaaattaaaaaccctccatggacccctggagca

SEQ ID NO: 491244 - DNA, 288 bp, Homo sapiens
  misc_feature (155)..(155): n is a, c, g, or t
ttttttttttttaaaaccccccccccccccccatttttaaaaggggggggggggggcaaaaatttaaaaatgggggccctcttttaaaagggggccaaaaaaagggggggcccccccaccccccccaaattttttcccggtttttttcccccggntttttttttaaaaagggtttggggaaaaacccccttgaaaaattttttttgtttccccaaagggggggtttttttttttttgggggttttggggaaaaaaccccaaaaattttcccctttgggaaaaaattta

SEQ ID NO: 491245 - DNA, 397 bp, Homo sapiens
  misc_feature (388)..(388): n is a, c, g, or t
acactcggatgtaggaagtctcaccctcgtgagagcggaatttggtgtcatcccagtttacgcagagcatattccatgtcctcttttctcaaatattcaaccatccccattccgtccttctgtacgtctgcataacagacatccccagcttctcgcatgtgatctttcaggtcctgccagctgcctgatggaggaagtcctgaaacaagaactcggaaatctgaccgtcttgtaggaggcccgttccttgcaccacggggccacccaccccgacctccgtaagtcctggggaactccacacggagtcgacactggccataatcgtaaccgtttcttccatagatcgcatcctcagcatctcgcgggtcctcgaagcgcacgaaggcgnagaggacga

SEQ ID NO: 491246 - DNA, 1615 bp, Homo sapiens
aatgcgggctgcctccgatcccctgactctcttcagtgtcccctgaatagtctccaaggccagcagccgaccagcaagcagcttcagcatggcaagcaggcagtccgtgatcaggccatcaacccatccccatgggcacattacaccacaccaggaaaaaggcagagaccaacagatacaggactgaacggcccagagcccaatgtacatcccacacacaccacaaccacaacagtgcagaaccggcaacagagaataagggtaataccaaaaagcacacaaacagggaaacctactcgactacaaacgaaccaaacaacaccagtgaaacaacaacagaggccaaacgaaggcaacgacgaagcaacaccaacgaaacgacaaccaaaaagacaacaacgacacaaaaagagaacacacgccacacacaaaagaaaaggaaaaaaaacaaaacaaacagacaaccacaaccgcgtcgcccaaccacacacgcaacacaccagaagaaatcacaggagcaccaatgcaacacccactcagaaaggaaaaagaaagcaccgcccaagccagacccacacaccatcgacaccaccacctcacatgaacgacaagcactagaacaccaatacgaaacacaacaaacgtacatacacacagatcaacaacctgacaccaacagaagcgagcacaccagaaaccaaccacactcaacatccacaccaccaccaacagaccctaccaagcaaccaacacaagaccagacaacatagtcaccacactatcaccaagaccatcggagcacacacaagcaccagtagccacaaacaaacgacgacacaggagaacaaatagaaacaacggaacattgccaacgcagcacacacaaagatgacgcataagcacggaaaacaaaggcgacacagacacaacgaagacagctacaaacaacagagaacacaggaacagaacaagacatcaaaccaaaaaagacagcaaacagcgacaaaacagagaatacaggaggaacgatccaccacgacagacaaccacaagagagaacaagcagaagcacaaagaaggccgacacacccaccacaccatacaacagcgaacagcgagatcgagaccaacgagcaacgatgaacaaacgagacaaaacgcgaaagaatctccagaaaccacccaaccacgacacacatacggatcacgacaccacaacgacaccataagaaccaacagcgctacaaacaaggccacgcagcacaacacagccgaaggactacgcacagccagtagccagccacaaatcgacctggacatcacatctcatgaaacacaatcgaccacacacacaatactaaataacacatccaacaaacaactcacacaaacacaaaactactacataaactagacaatacacatatactaatatagagacaaacgcatacacatacgcatctactactccacactacaacacacacacgaacacctactaaacaccagcactcaagcaataacaaacacaaaaaaaacacaacacataatcaaccactataaaacacttaccatccaccactcaccacccacacaacatacaaccaaaacacca

SEQ ID NO: 491247 - DNA, 140 bp, Homo sapiens
tttcggacagactctcggcccagctaaacataatcgtcttggtaggccattaccctaccaactaactaatgttccgcacccccatttttaagtgaaagctgagaagctcctttctattactcatcatgcggaaaaagctt

SEQ ID NO: 491248 - DNA, 1010 bp, Homo sapiens
gcactatcctaatgtaaaactcgtagatgaccttgcttgaccattatctccagttaattaagtgttcatgtggtgcttggaaactgttgttttcctgaacatctaaagtgtgtagactgcattcttgctattattttattcttgtaatgtgaccttttcactgtgcaaaagggagatttctagccaggcattgactattacaactttcattttggtggagtctcagtttcaggttttattgtataataaaatcctgcactgaatctgtgtctcctctgttacctacttttgcctagtgaaatttaatgttttacaaatactttcagcaatgtatttttactactgcaagttaatggtctttaaaactgtcaagtagcatctctctctttctctctgtctctttctgttagctctctccagtatgggattcttgaattgcccatagtgggcctaaagaattccacaatatttctgtaaaaatctgttctctctattgcttgctcgtcagtaaaggtgaattaatcccttcgtgtgggggttccatggtaagatgtaatataattcttagcttttgacttggaagatcccttgttaatgttaaccttggtagttccaaatacttctgggtcgattcgcttcagttatctcttccatcacaaaaaaacctttaattttgcccttgaaactgtagaacctatgccatgctttcattagaagcaggcctctgtgttaacagaccaagaatgggtgtacattagaaattgggactgtggactattcacctgttctgacaaccacattttaccagttctgtcatcgacaagattgcagttttacccacctgttgacgctagcagacggtctttggacatcacgctttcaacattatcagggcttctgaaggctccctggggaacctatcttttactttcataacatgggctaggcaattcgggtaattgacagcttctctaagatttacaattacatttacccactgttcaacaccc

SEQ ID NO: 491249 - DNA, 466 bp, Homo sapiens
tgggcgcaaacacagaaggataaataagatcctcactttggcagtgctatcctctcctgtcactaccacggctctttccagtaaccacacagcctgagtgctgcagcctttttatttatgcttttccctattggctgtgactggagtggggcagcactagcagcttctagattttaacagcggcatctacgggaattgtcaggcaccctacagtaaggcctgccatgctgtggccaactgtatcactggagcaagaaaggagatctcataggacggagggggaaatggttaccctccaagcttgggtcagtgtgttaactgcttatcagctattcagacatctccattggtttctccatgaaactctgtggttacatcattccttcttagttgacctggacagtttggctcgacctagatttaacccctcaggtaaagatgctggggtatagaacgctaagaattt

SEQ ID NO: 491250 - DNA, 365 bp, Homo sapiens
  misc_feature (364)..(365): n is a, c, g, or t
atgaggacaggagttggtcagccctggccgacatggtgaaaccccatctctactaaaaatacaaaaattagctgggtgtggtggtgcgtgcctgtaatcccagctactcgggaggctgaggcaggagaatcgcttgaacctgggaggcagaggcctgcagtgagctgagatcgcgccactgcattccagcctgggcaacagagcgagactatgtctctaaataaattaattatattaattaattaatttaataactgcagagcgtggtggctcacacttgtaattgcagcattttaggaagccgaggcagtaggatcgcttgagcccaggagtttgagaccagcctcgacaacgaagcaaaacnn

SEQ ID NO: 491251 - DNA, 828 bp, Homo sapiens
cgagacggcacagcagggggacgaaggggacaggcaggcaccgccaacgtggcccgggaaatcctccgccggcaacctcctcagccacagcacccagagcagggattcgagcaaataaggccgaatacctcaccaagaaaacccaggcagacaagcgatggaggtctgagtaagatgcatggacgagatcctcctgacagctgagcgcctcagtgcccgatgaaagatgatgccaggcgaggtttgattgccatccagattaacaacgatcccccagcagcccgtcaacaccctgcatgttcgacgctggccaactagcttactccacgcgtccagctggtacaccaacccctaccaggccaccattgatggagtcagatctttggggacatcaggacagaacgtgagtgacatatcttccgatacagcagcatggaggatcacttggagatccatggagtggaccctgcagggtccgtcacatcagccccatcagcccctgacactctaggttgttaccccttcgtacaaaacgtgacgccgttcatcttcccagagtgcccgcatgtcgtactatgttagtggcaacacccccagcttattggctccaaaatcatccgaggtcctgaggaccagacagtgctgttggtgactgtccctgacttcacgtgccacgcagaccgcctgccttgtgaactctgcgcacgcctggcctgccagcccatcagcttctcgggcttcggggcatgaggacgatgacctgggaggcctggggctgggccctgactctaaaaaagtggttttgacaagagaggcccagaatggagg

SEQ ID NO: 491252 - DNA, 830 bp, Homo sapiens
tgtgagtaaaatcttcataacctaaagctgggagggacccaaaaaagccaatttgtgaccccttgttttgcttcaatttgaaagttggctcagggctctctagacagaattaaccatagcaaaggttgagaaaacttctgtcccgtttcgcacttagttttggtgttttaatgatttaaaactcgtttcttctccctccgtgcagtggctctcagagccgtggtctgggccctccgggacattaaatttctcgatggctggtctggcgctccttcggtgggctgatgttctggccgcacagaagtctgcccgtcttggccgccaggagtctcttggcgggcctcctggcgctgtcttgtcgctgggctgtctggaggccttgtcgcggtcccactggccggcttggatttgggctgggcttctttggggaccggagggggtggttccttctcttccttcctcttctcgggggtctccaccagctgccagctgttggccttgaggtggtagagttcatcgaacttcatgctgatatcctcgatggacagctgtagcaggtcccaaaaccctgccaggtcctgggctgtggggcgtgggttggcatcagggtccaagtttggctcacagaggccccggaactgctggaatctcggggacatcagtagctgggcactgccccacagcactgaggactttcctaaaacttcttcagaaaggttgacccttgggaccccttgtccatctggcagcacaagccttccaggcggctcatgtctttgcctgacagtaggttagcgaaccaagtaagccgtctcggggggaggcccctg

SEQ ID NO: 491253 - DNA, 803 bp, Homo sapiens
gggcaagcggacgcagtgacttagtacgcctccattgagtgtcaaggcggaggtgactcccttccagcatggataaccgtaccttcagactatcaccctgagtgtgcatacataccacatgctccgcaacgttctggccgagtctaactgaacctgcaagctgtcgtgatcagcacagcttacggctgtgctgacgtcaggactgcaggtcaagtaccagtgatgcaccggcctgcccagttcatgtgcccacaaggtggtgctggcctcatccagccctgtcttcaaggccatgttcaccaacgggctgcgggagcagtggcatggaggtggtgtccattgagggtatccaccccaaggtcatggagcgcctcattgaattcgcctacacggctccatctccatgggcgagaagtgtgtcctccacgtcatgaacggtgctgtcatgtaccagatcgacagcgttgtccgtgcctgcagtgacttcctggtgcagcagctggaccccagcaatgccatcggcatcgccaacttcgctgagcagattggctgtgtggagttgcaccagcgtgccgggagtacatctacatgcattttggggaggtggccaagcaagaggagttcttcaacctgtcccactgccaactggtgaccctcatcagccgggacgacctgaacgtgcgctgcgagtccgaggtcttccacgcctgcatcaactgggtcaagtacgactgcgaacagcgacggtctacgttcaggcggctgtgcgggcggtggcctgcactcgttgaggcgaaattctg

SEQ ID NO: 491254 - DNA, 898 bp, Homo sapiens
gcattcttggaaaaactcagcagggcaatgctggatctacaagtgcgccatgtgcgacacagtcttcagctcacaaacccgcatcctctcctcacacttcgtaccagcacttgctgccccagcgtgtcagggtctttaagatgcccgtcttgtcctctgctctttggccaaaaaaggagcatgctggaacatctcaagagacacccatcagtctgggcgcttggaggagacatgctgggaagaggggccgggggtgccctgtgtgacccccaagactgagtcctgaggcagtctggcatgtgttctcaggggaggggcatacccgtgtctactgaggagtcgtcttcatcttcagaagaggaggaacgtacccagactcccctgagccccctccgttccagcacaaaggggctcggacgggtaactagggagcaaaggcctcaaggcgtgggggtggggggcctggtaggcgtggaggctgtggcgctgtgtcacgcctggttcccatgagcgtgcatgcacatcacgtggcccacatgaggcaaggatgcatggcaagtcagctgaaacaagttcccctgtcgcctgtgtgagcggctcgttctgctccgaccccagactgaggcgccatgtcagagttaatcacgagggcatcaagcgagtttacccctgtcaggtattgcacagagggaaagcgcaccttcagtagccggctgatcctagagaaacatgtccaggtccgagacggattgcagcttggggcccagtcccgtggtcgggggatgcacttggctcgggttccagtgtctagaggccagggggcaaggtcggaagacgccgcagtcgttctgactcttgcagtgaggagctgagagagcgaagcgccagcaagtcccca

SEQ ID NO: 491255 - DNA, 121 bp, Homo sapiens
ggtcggaccgctattcatcggcactcgctattcatccccaccatcatagccacatcaccctccttaacctctacttctacctacgcctatattacaccaaccccggtgccgatgaatagcg

SEQ ID NO: 491256 - DNA, 332 bp, Homo sapiens
agacaagttcgttcctcctcgggacgttctaatcagactcttacacacttgatccagataccctccgcaggaggagaatgcccctcacagagcctttgagaggacggtcatcgacgccaaaaccaaattcagtaccaacggattctacaggattcccctgggatctgaaaatagagctccctctcccatgtggtacaggaaacctccacaggttaggtgctcgcagtcttcactcagtctttaatacaatgtctacagcagcactcgatgtcagcagtaatttagagtttgatgagggtcaaataagtcatttggcatggaaggacccttag

SEQ ID NO: 491257 - DNA, 369 bp, Homo sapiens
gttttacaaaccttacaaagccctgcacgacactgctatcatctctgggataccggctgcagctggcgttgacttacatgagaaatttatagagtctgcacgagatttgcacatgttaagaacggatggttctgagctgttccagcatgtgccacagtttgacattgatcgaatgaagcttgtgcaccccatagccatactccactacattgccagcaaatacatcctgtatggcaaagacattacggagagagccctgatcgatatgtatatagcaggtatagcagaatcgggtgaactgagcctccttctgcccgaacgtacatcagcggtagatgccaatctagcctcgatcagtgagagacatcc

SEQ ID NO: 491258 - DNA, 485 bp, Homo sapiens
attgagtggaagtagctctcagccgatgggggagccagaagggagatggttttcctctggagttgggctgctcagcggcccgactctttttcgaccactccagacaaactccgcatccttctgcaattgatggactgctagactgcctgtgcctttcgacatgctcttccagcagtgtgttcttgatgaccagctccttgtgtcttcttgtgccgatgtgtttctcatgatgtccagcagatagtgtgtgtacccgctagggtctcaggtttttataggcccaggatggggacatggcagaccagggtggtcttggaaaatgcaacatttgggctcggaagcaggagtgtctgtcctcacctaggtctgtgggggtggggccctaccagggaccatgccctccatgcacttccctttcccccttttccatatcacttaaaggggaccatttgtttttcctttccaagcacttcccgtattaattt

SEQ ID NO: 491259 - DNA, 946 bp, Homo sapiens
catttgttctgtactaagaaaaatagttttgccttgagacgctgttaatctgtaaccctacccccaaccctgtgctccctaagacatgggctgtgtcaactcagggttaaatggattaagggctgttcagggtgtgcttgttaaacaaatgcttgaaggcagcatgcttgttaagagtcatcaccactccctaatctcaagtacccagaggcacactacactgcggaagactgcagggtcctctgcctaggaaagccaggtattgtccaaggtttctccccatgtgatagtctgaaatacagcctcgtgggaagggaaagacctgactgtcccccagcccgacacccgtaaagggtctgtgctgaggaggattagtaaaagaggaaggaaggcctctttgcagttgagataagaggaaggcatctgtctccggctcgtccctgggcaatggaatgtctcggtgtaaagcccgatgtatattccatctactgagataggagaaaaccgcttaggactggaggtgggacatgctggcagcaaatactgctctttaaggcatgagatgttctgtatatgcacatcaaaagcacagcacttttttctttaccttgtctatgatgcagagacattgttcacgtgtgtactgctgatcttctctccatattatctatgtcctgcaatccccctctcggaaatggccgataatgatccataaatacaagggactcagaggcaggcgagatggtccacggaggtgaacgcggcccggggccattctacctgaacagcatcgagcacaccgtcaagcccctcctaggaaagccacgggggggcaccactcaaacagtactcaaaaggagaagaaacccacgggaaccagttaggacgcgaaaaggcgaaagcgagagccaaacaaaaagaaatgaaaagaaggacagaaacgcta

SEQ ID NO: 491260 - DNA, 432 bp, Homo sapiens
  misc_feature (307)..(307): n is a, c, g, or t
  misc_feature (378)..(378): n is a, c, g, or t
  misc_feature (410)..(410): n is a, c, g, or t
attcacctctgcccagcaggacaagatgatgaaagtacagagaacttgtgggtctaggtttgtgtcagaaaggaggttagtggcttgcttagggccaggcagagggcacattggaaggaattctctgttcccggtgacagcccttggaattgctgtgcacccagagttgcggagtaatttattggcttctgataactatagtattggataacttcccaacattttattaaaaattttaaacatatagggcatgttggaaagaatttaatactcaccacctaggatttttgccactatccacatatcntgtggcatcctatttaatacattttttaattattatttttttttggaggacaggagttttcttttttactncagggctggggatttgccaatggggtggccantcttcaggcttcacctggcaac

SEQ ID NO: 491261 - DNA, 260 bp, Homo sapiens
  misc_feature (207)..(207): n is a, c, g, or t
cagcagttgtgtcctggaaggattgctctttgctaccagaggacaaaaagtcaatgacacatctgtcaccgggcattcccattcttgccactaattggagtgtttgctaagatccaatataactaagtggctggcaagcagctgaaataccagatgaaatggaattgtgattattttgtttaatcccatttcaaatatttatatttngttgaagatttaagtagatggcctgtatcagaaagatgtgctatttcaatagg

SEQ ID NO: 491262 - DNA, 139 bp, Homo sapiens
acacctggcgtatacaagtgcagctgtgaacccgggtacgagctggccccagacaagcgccgtgtgaggggtgtgatgatctacaggttgggaaacccctgttgtgggacagacactgtttccgcctctccacgcatgg

SEQ ID NO: 491263 - DNA, 257 bp, Homo sapiens
cacctctttggaggggagctgatgagaaggggatttggtcacctgagagggttgagtaaacttggcatcaggtcacaggcttctctcaccatactcagtcttttcgcactcactcccgtagttgagcctactggcatcaatgctcttaaataccaaggctggtgatggctgtggagcatgagctatgtgcccaatgtgctctgagaggggaggagacctaaaaccccttgtcagggaacatactgacgctgggcagt

SEQ ID NO: 491264 - DNA, 746 bp, Homo sapiens
tgcctacgtcgggttctgtgtccgaacgtttcgggtcctccgccgttaggccctggggagatggcgcgtggagccccttgcgtggctgggcctccgtgtgtactggtccgatcccacgcgcgttaatttagaaacccgtcgtccgcttgaagtttgtccccggcggggggtggactgcagtctataccgtgtgtgcctttgtgaaggtccacaaccatttttttgccagctgggtccagggccggtagacctcctgtgtccgatccggcgcggtgtgttgtgcccggtcgtatgagtgggttaatatgagttttagcccccctagggttggggttcgagtgtggcccattcggcgaggtgcttgggttgccgtgtccccaagtaggctgggggggatccccgggccgtggtgcccactaacgatccgcgccttttgttgtgtttttcttttggagaatgggagttcctttgtcccttgttcaaccccagggccttggaagttgcaatggcatgatctctgctcactgcaacctctgcctcctggctcaagcaattctcctgccttagcctcccgagtagctgggattacaggtacccaccaccatgaccggctaatttttgtattgtttagtagatatggatgttacaccatgttggccagacctgttgtcgaactccacacctcaggtgattcgcctgcctcagctccatgccacccagacgaaacacccccccccacaaaaaca

SEQ ID NO: 491265 - DNA, 371 bp, Homo sapiens
  misc_feature (1)..(1): n is a, c, g, or t
  misc_feature (3)..(3): n is a, c, g, or t
  misc_feature (33)..(33): n is a, c, g, or t
  misc_feature (124)..(124): n is a, c, g, or t
  misc_feature (127)..(127): n is a, c, g, or t
  misc_feature (165)..(165): n is a, c, g, or t
  misc_feature (367)..(367): n is a, c, g, or t
ntnggacgaggtgagaggattgcttgagcccantgagtttgaggcggcagtgggctatgattgtgccacatcactccagccttggtgacagaacaagactctatcttaaaaaacaaacaaacanaanaacagatactgatgactaggatgatcaaaaggaaccanatagatgggagaaattaagaagtcattatgtatgcccaggggagggtggaagcctcagtaaagtcatgtactgaataatgatgttttggtcagtgacagaccaaatagataacagtgggtcctataagattataatgggaaggccaggcatggtggcttatacctggtaataccagttgcttttggggaatgggggggggcnctcc

SEQ ID NO: 491266 - DNA, 247 bp, Homo sapiens
aacatttcagggtgaaggtacagtgtatatatagccaagggacagagctgtgatatatagcccagtggttcttaaagtgtggtcctagcaccaatggtgtcagcatatactatagaaacttgtttagacatagcagatatcttaggcctatcaaccatatggcctggccaactacaagaaattcctgggggatgagccaatctagtggtttttacacggtccttccagggttgattcctgattgtaa

SEQ ID NO: 491267 - DNA, 344 bp, Homo sapiens
tttcatgagtactccccggccgcccagcttctcggcctttaccagcatttgaggatattgtacttgccatcagtccttccagttaactgctgaggcttctcccttcacggctaagttatgtgcttcttgtgtctccaacagttttctctggatcctgaggatttggtttgtttataattctctcatctactgaaaccatttttgtaaatcaatatattagtagattctaagttccacttgttttctcttctggatccatctacagaatgttcttgcgcatatgttttcgttcttgctgcaccattaagagacttcacgatggaaggcagtccccactctgtgct

SEQ ID NO: 491268 - DNA, 188 bp, Homo sapiens
attgagtaagggagggtgaggggggctatgatgatgggggggggttggtatgtccaaacggtcatttaattttaacgtggtaagatagggggagtagggtgatggaggtggagtagataaggcgtaggtagaagtagaggttagggagggggaggggggctatgaggccaatcaacatagggtaccga

SEQ ID NO: 491269 - DNA, 273 bp, Homo sapiens
cagacctctccaactgggcataaaatgtaaacatatttttgttctatgtgaattgctgcccaaagaacagcctcagcagaggaagatcatgataagcagcctttttcctcagctattcctgtccttgaacaatggcctcatgagaaaaaaacggtcatggtggtagggatggatattccacatctgcatgttattaatcttcctaaacctgttttctcatatataaaatacagattacaaaagtacctactccacagggctgttgtgatgttt

SEQ ID NO: 491270 - DNA, 787 bp, Homo sapiens
gaggtggtctggtgggccctggaggtggcccccacagcttcccacacccattacccagcctgacaggtgggcatggtggacatccatgcatgcacaaccccaatggacccccacccacttgtgatgcagccaccgagcaccaccagatgaaccaagggcacacccgaccgctccatgtggcaccatggccctccgtccaatggatcaagtacctgggaagtacagcctgtgggctctggggtctatcgcctgcaatcaaaggaaaaaggtatgatagccagcacatccagcctactaggggcaatgagtgacacgacacgccggccggactggcaacctcgaggagggacaggaacgccagagaaggagaagcgaaaacagaaaacaagaacagaagagaagggaaaacaagagaaaaggagaggaggagacagggaggagaaacaagagagagcgaacgcaaggggcagcaacagcggcccccgcagcgcgcaaccaaagcccaccagaccacggagagcaagaaacacgcgagggcgggacacgcgcccacacagacccagcacccagccgagagccagaagcccagagcccgaccgggaccaggcgccagacccaaccacccccgcggcagaccggtcagccccgccgccgcccagccgaccccaccagcgcacaagcaaacagctcccacgcaggaagacagcgcggagcagacgctgcacaccccacgccagagaagcacaacgaccagctggcgcagagccacacccacgcccgcacgccc

SEQ ID NO: 491271 - DNA, 386 bp, Homo sapiens
  misc_feature (141)..(141): n is a, c, g, or t
  misc_feature (193)..(193): n is a, c, g, or t
  misc_feature (294)..(294): n is a, c, g, or t
  misc_feature (315)..(317): n is a, c, g, or t
  misc_feature (332)..(332): n is a, c, g, or t
  misc_feature (344)..(344): n is a, c, g, or t
  misc_feature (360)..(360): n is a, c, g, or t
gggagaattgaaaaggtgctcatagtttcactatgcaaacttaccccagtctctaaaaaagtaatttagatttaaagttctttgatgtatttgattttctaaatctttatggttatgatttggaattgtgcctaatcctgngctacattctgttcttaaatctgaatgccttctcatttaagggtgaggaacnatcacacacgtgtcttcattgaccttgacgtgcgtatacaggggccttataagacaccataagtttagaccataacttttatggaggacgggctttggcanctgggccctgccccgcgccgnnnctcgaagaagccttntgctccctcacnctttcccactccccgnggtctggcgccccctccagggccgac

SEQ ID NO: 491272 - DNA, 509 bp, Homo sapiens
ggggtcttctcacccccacccccttgtcctgggtaggggcctgcctgcccctctctgccttttcctcgtggtgtaccctcctacgagcccctgtggcatttggcttgggtggcagagcccacttgtttcagtggaccccagtgaggtgccccctggctcccagtgactgtgtgtgggtaccggggtggtggtgggggtggtggatgaagggtcgggcagcggtggtgcagcgggaggaaactcctcaccatggagagccaaagacagtggttgtgccttaccccagtgagccacccctggtaaccccgccagcttgtacacttgcccactttcacccgtccaactccctaacccacctgaggccgggcccctgcctcgctctttatccctatcctcctttctctcagcgctgacgcctgaatgcagccgtgggtatccccgcaacccatgggcgagccagtgcaattgaatctgaactggcagaaactaagcaaccaccagagaaccac

SEQ ID NO: 491273 - DNA, 1659 bp, Homo sapiens
ttacgtggatcatatgttaggaaatggtaccataataatactccgtgtcgtttgtcttctctcgtgcatataatatgggtagcaaaaacgcactctttgtacaaggggggcgggccgcctctttatttctacgctctgggttgggcgcccgctagatagactcaacgggggagagtgggttttcccgtcgccacagtagtttgtcgttgggccgcctacaactatccccctctgtggtgttgcgccccgctgtgcgttgttccccacctaggagaggaagtccggttctctctataagacgtcgtgttccaaaaaatagggtgtttcttgttcactgtccggcccttttatgtgatgatacaccaactacaactgtccccgcctgtgtgttgctccttgatcaaatacaaagcaatcagtttacccacgcagggtgagcaagaagccgtacatagaatgtagcccaaaacggtggggtgtgaaagattgtcgtcggggttgttgttgctcctcctccgatataaaataaatgtgtgtcttttgtctggtggggggggacgacgcccgtcagtagtgtggttgtagcctggttgtgttgtgtcgtgtgccccccaacaacaggtgttgatagccccagtccttgacaacccccccctttagcagtgttgggtttctcattaattaacaaacaccttcggcgcattatatcccgggggaagaaaaaaccttttgtcctcggaagaacaccccctgttgtgttcttctctgcgccacagttttggccgcacactttgtctgggaaactttgttccccaacagggggcgagacaacaatagtggagggagggttgtccacagcgctttattgtgaggacaatatactcacaacacactcctcatataaacacactgctcgaagacactcttgtggctcccttgagagcgttgtgtctgtgtacacagtgggggccgtgttatcgccacaacacctgcggtcgtcttttttgtgcggagatataaacattagttgccgtctctaaagaatagtggtctcacgacggagtattctgtccgtgaataacaatatattcacaggcgtcgtgtcaataatcttcgcggcgacatacaatcccctccctctctttgtgtgtgtatctgtctaatatgggccgtcaaagagacacacacactcgggcgttttacacagtttggcacaatgcacacacgtgtttcttggctctctcacagagaccccttcacacacacacctcgtgtcctctctgtctcgcctcggcacaacaccttctgtcctcttcacactcttccaccctcaagctagagtctctataaaggtgtcctcttcctccacgggagggtgtctttttctgaagtttcttggtgggggtgcacaagagacttttctagagaaaaatacagttagcacccacatgcacttttcacacgagagtttttaattacacacttgtaaaaattaatggccgtgaaataaggcgtggctgcgctgctatagagttgtaaagctcaccgaggggcacagaagaattttgttcacacacatcttgctcacatggaataaatatttccattgctgagccacaccagggtgcaggtccaatgaaattttgaatgaacatccca

SEQ ID NO: 491274 - DNA, 865 bp, Homo sapiens
cgtgttttgtggaaacacactttcgctgttggttgtggggggtttcccgcattggggccccccgaggcggggagttcgccccagtattgggccctctgcgggtgcggcacctggggcggcagttgtctcggtgtgggggtatatgagcacccacatgtgtgttgctgtgcaatggcgctagttggacccctgtctcaagagtggtacggagcgatcaggcgtggagcccgtcatcgcaagccacgaaccaacgatggtgtagccaagccgcattgccccccacgtttcgagcgtgggtcaatcccgccagggcaccaccgccgagcctttgtgcgcgtgcccctcggtcataggccccggggcagtcgtcgcagtcctctcttgcagaggatgtactctccggcgcgtctccttgtctctatgcagtcaggcgtgagttccccctctcggtaccacatgttggcgcagccttgtcttcgttccctttcctctgcaagggaccgaggcggtggggcttttggtgacataaataggcgtttagcgagcgacccatgttataagtgctatgaccatgtctcctccgccgcactccttcttcagtgtttccctctcgtttcaacgcacatcgcgatatactcccactctatccagggtctctatacaagcgcggtctctggagaggtccatggtaggccgccggtcgaacagacaggcggtattgtaggtgccttggacaccgggattaaagactgctgtcgtcgcccctattcgcctccgctctcgaatgagcctccatgtactcgccttattttgggacaacagctgctcagaaatccggggacccaatatgccccgaccacatgcc

SEQ ID NO: 491275 - DNA, 600 bp, Homo sapiens
  misc_feature (600)..(600): n is a, c, g, or t
atttccttactgcctcttgccatacagacctaagtcagcggcaaaatgaccggcagctacaggatctccaacaccatatcatcacatgcgttgaacctcaccggggctcacttcaaatttgacacatcaaggtacgcctacatgacctttatcagcatctcaaactgcaaacacactgacatattcatgaaatccaccgctagagtaaaaatgcgcaactgaaacgacattaacagcggaaccacgggaatgactagacacaacagagactgatcattcactgatagatactgtgatctaagcgcataatgtgcatagacaaacccagtcttacttctgcatcaagaccatagagcgtgaaggcagtctgcaatgcgaaaacatccacaggatgatagtcgtcagatgtcacatagccgaaggctcaagaacagccaaaatgactatcaggtatgcatcagagcgtagatggaacagcatatgctagagagaaacctctgatgctatgagctctcagcagcataatgaactcagacactgacagatcaatgacaggagcctgatctactggtgaacagagtcgtgtctagctacaggagn

SEQ ID NO: 491276 - DNA, 198 bp, Homo sapiens
tgtaggcagcaggtgattacgagtcagagttcagaccagccttgccaagatggtgaacacatctctactaaaatacacaattagccagcgtgctgccagtgctgtaatcccagctactttggatgctgagcagagattgcttagccttggaggtggaggttcagtagctaaaatcatgcacttacttcagcttggcac

SEQ ID NO: 491277 - DNA, 441 bp, Homo sapiens
ttggcccccaacaggcatccccccgttaaatcccctaaaagtccccctcctaaacacacccgtattactcgcaccagaagtatcaatcccttgagccccccaaagtttaaaaaaaaccacccgaacccaaataatccaaccccggcttattccaattttcttgggtttctattttaccccccacaaagcctcagagtacttcgagtctcccttcaccatttccgacggcatttacggctcaacattttttgtagccacaggcttccacggacttcacgtcattattggctcaactttcctcacaatttgcttcatccgccaaataatatttccctttacatccaaacatcactttggcttcaaaacccccgcctgaaactggcattttgtaaatgtggtttgacaatttctgtatgtccccatccattgatgagggtcttt

SEQ ID NO: 491278 - DNA, 227 bp, Homo sapiens
agttgctaactccacaaacagtgtatagccggtggaatgtgtatatgtggtgtttatgtttagaactgtgtgtaaagtgggtttgtgtacattgtggtgagtgtgatgacccggtggtttgtgtatgtatggggtgtgtgcaggttgcacgtgtggtgtgtatatgtgtatgtgtggtctatgtggtatgtgtatgctgtgtgtgtgctgtttgtggaggtagcact

SEQ ID NO: 491279 - DNA, 232 bp, Homo sapiens
ccggatagagcggtctggggacagtggagagctttgttcaagaggttgggttgccacgtggggtgagccccttgtgaattatcaggcaagggttcatgaagtacgactacgatgtgattaagccatagccgtgcacacagtaggcctggtaaaatgccatcacctgctgcatcccagagatgaaatagggcatgcatgggagtatattcggccggtgggtttgtctgctgtg

SEQ ID NO: 491280 - DNA, 958 bp, Homo sapiens
  misc_feature (796)..(796): n is a, c, g, or t
gggtcttccccggctcgccaactcggactgactctgggggattcgtgcgcggtaagaagctgcgcggtcagcgcggtgaggtaccactgatgaaattatgaccaggtggtgcccgacttagtaccacatatcaactagggtagtagtccttgggtctgcgagtttcatgggaggacatgaaacgtaagggacttcctttgtagcgggaatacaagtcgcaaaagcctagctcgaaatgcgtaaaatcaatcgttgaaggccaatgaggctatcccttcaggatacatgatgcgcccctacgacagaatgttagaaacgattcaagaagaggaaatagatccctgacgtatctattactttgaacgattggtgaccttcggatctccacttggtacatttaaccctgatcgaaccttgagacttttcacccaaagaattgggggtctccacacaagttgcgggtctaacccctctactttggcacatcacggaacgagggatgtacgcagataaagcctaaggggggaccaccccaaaaggtttggacaacggttctcggcggtattttaccacacttcaaaaaacggcaaccaggtccgcgaaacgagcggcgattaaggaggataagcgaaaacgtagagtttaactacgaacacgaacgctaaatgagctgagttattaaacgccattaactaggtatgccacagttgggcttagttgtgttactcaattgtgcttaaggaacattaacgcctggggttcccatttgcgggaacactttgggccaccggatgtnttgctcccccgaaccggacccccttctgacacaatttccttagtgatcatttggggccgactgggggagtatttgtttgaccaggggtggctggcgggtccgacccagaacgccacgaaattttatacctagggttgttaaggcgcttaacacgtatttaca

SEQ ID NO: 491281 - DNA, 135 bp, Homo sapiens
tcacattccacatccttttagaatttattttcgaaggggaataggttccatgttttattcacttgggctttttttcttccccctctttctttagagaactgctccatattcaatctgttgtgaagagggaggccg

SEQ ID NO: 491282 - DNA, 178 bp, Homo sapiens
tcagatgacaaagcagggggaagaaggtgggataactttgtttgctgtgtcttctggcatatattccctttcctatactgatatgcttcctccatgctcctcctgacccttgagacatcatacattcaggttcttcagaccttcggattcctgcaccttacaccagttggttttgctg

SEQ ID NO: 491283 - DNA, 140 bp, Homo sapiens
agaccgcggatggcttggtcttaaggaagattcttgactgggaggtcccactgctacacatggatcaggagggatgggaaggtcccaatgccacatgtccaaggattcgagatcaaggcagccacagagctgtgaagatg

SEQ ID NO: 491284 - DNA, 515 bp, Homo sapiens
catgaaatagaggtgggggactaccgcatgcactctgggaggtgcagccctaaggggtggactccagatctccctgcaagagacagcttggcttggctttggctgttggggaggagtccctgccatccccgtgagcctggggctgttgcttaaggtcttctgggtggacacctggagaaagagaaagcaaacgttggaacactaggaaaagctagaaattcagaccacacacatggatccccttaaaacatgttaatgggccagaacacggttgacctgcccgcttcttgaaccctgtggcccccgtggaactatcagtggcgtttccatgcacacgcccttttgttttctctttctagactcgcggtgctaaaatcagacaataccttgttgtaagcccaaagggcgtgcagggacaccagattttcctttgttgaatttgccaattttgggccccgtcggggatgttctacaaccctggttttaaggtggaaaagttcaagggtgaaaaatta

SEQ ID NO: 491285 - DNA, 460 bp, Homo sapiens
  misc_feature (19)..(19): n is a, c, g, or t
  misc_feature (90)..(90): n is a, c, g, or t
  misc_feature (133)..(133): n is a, c, g, or t
  misc_feature (138)..(138): n is a, c, g, or t
  misc_feature (154)..(155): n is a, c, g, or t
  misc_feature (168)..(168): n is a, c, g, or t
  misc_feature (393)..(393): n is a, c, g, or t
  misc_feature (459)..(459): n is a, c, g, or t
ctggtgcttcccacctggnacactggtgaggtggtgggagacctcctggtggcccctagtggtggccttccagttatttcttggagctgngcgctcaggtgagtggggcgacatctggtggccggttgttganggtcnttgcagagaggaaggnngccggggaggggngcctgcggtgagggccgtgctggggtgtgctccggttctcaccacccttgggccacgccgtctaaaacaacacactgaaggaagttgagtcaggtagaaggggcggatgaccgtgcggcagcccgttgaagtgccctgtcggcgcaggggaaggaggaggtgctcttcgagctcgcttggtgtccagggcactggtgaatcgcacgccttccagccctctgaaantcggtgactgtcgtgctacgaagaagcccttcgcagtagcttccggagcatttgttttcgtgggcna

SEQ ID NO: 491286 - DNA, 226 bp, Homo sapiens
  misc_feature (39)..(39): n is a, c, g, or t
  misc_feature (96)..(96): n is a, c, g, or t
  misc_feature (155)..(155): n is a, c, g, or t
  misc_feature (189)..(189): n is a, c, g, or t
  misc_feature (219)..(219): n is a, c, g, or t
cacatcaatgaagtagtgctcctagacgaccccgtggtnggtgtgcgcggttggctgacgagagcggccacgtagttatacgctggctcccgccgnctgagacacccatgacgtctcacatccgctacgaggtggacgtctcggccggcaacgcnagtggagcgtacagagggtggagatcctggaggnccgcaccgagtgtgtgctgagcaacctacngggccgg

SEQ ID NO: 491287 - DNA, 968 bp, Homo sapiens
gctggtgtcggcggctctgtctgcagcggctgggtgcggcggcctgtctggcctggcggtgcggctgtcgcgctcagctgcggccgaggctcgtacggcgccttctgcaaggggctcacgcgcacgctgctcaccttcttcgacctggcctgtgcggctgcgcagtgaacttcccctacttctacatcgtggcctcggtgatgcttaacgtccgcctgcaggtgcggatcgagtgagcgccggcggcggcggctggcgaaggcccggctgaaggggcgcccgtgtccccgcccgccccccggccgggtacgccggcatgaaggaaagctggagccgcgtgtggggtgcgcggagcgctggggctggctcggaacccctggactctagacctacgcccgacaagggcacagacgtgcccagccctgagcccggctgcggtctcagacccgggggccctggatcgccgcagacaacgcactgaactgggcccctgcacatacgggctaccagaaactacctggtgctcaggacgaacctgttgcctcactattggccaaagagggggaaaccagaatgagggaagtactgcctgcggcgacttgactttacaaggccggagcagaaaggcataggcattagtaaggcaggtagacccgacgcttctctgggccttgccaagaagtcacatccctgccaaggggcacctctggcccctgtaactggcctgggaagaaggcacgttgaatgggcctgaaacaagaaggaagaacgaaagggaccttcctaagtaaggaagggcaacaaggtataggcacaaagagggtcacacagcagcggtgagagatgcaccaaattgaatccaagtatcctggaatagggacacggaaagggtatgaaggctacacataaggagactgacaatctgcataaacagacagtaagaacaaggtggatatatcccacagatg

SEQ ID NO: 491288 - DNA, 942 bp, Homo sapiens
  misc_feature (8)..(8): n is a, c, g, or t
  misc_feature (79)..(79): n is a, c, g, or t
  misc_feature (174)..(174): n is a, c, g, or t
  misc_feature (186)..(187): n is a, c, g, or t
  misc_feature (195)..(195): n is a, c, g, or t
  misc_feature (263)..(263): n is a, c, g, or t
  misc_feature (274)..(274): n is a, c, g, or t
  misc_feature (278)..(278): n is a, c, g, or t
  misc_feature (286)..(286): n is a, c, g, or t
  misc_feature (288)..(288): n is a, c, g, or t
  misc_feature (365)..(365): n is a, c, g, or t
  misc_feature (441)..(441): n is a, c, g, or t
  misc_feature (478)..(478): n is a, c, g, or t
  misc_feature (500)..(500): n is a, c, g, or t
  misc_feature (504)..(504): n is a, c, g, or t
  misc_feature (507)..(507): n is a, c, g, or t
  misc_feature (510)..(510): n is a, c, g, or t
  misc_feature (514)..(514): n is a, c, g, or t
  misc_feature (518)..(518): n is a, c, g, or t
  misc_feature (520)..(521): n is a, c, g, or t
  misc_feature (525)..(525): n is a, c, g, or t
  misc_feature (527)..(527): n is a, c, g, or t
  misc_feature (530)..(531): n is a, c, g, or t
  misc_feature (534)..(534): n is a, c, g, or t
  misc_feature (538)..(539): n is a, c, g, or t
  misc_feature (544)..(544): n is a, c, g, or t
  misc_feature (551)..(551): n is a, c, g, or t
  misc_feature (557)..(557): n is a, c, g, or t
  misc_feature (559)..(559): n is a, c, g, or t
  misc_feature (565)..(568): n is a, c, g, or t
  misc_feature (570)..(570): n is a, c, g, or t
  misc_feature (590)..(590): n is a, c, g, or t
  misc_feature (596)..(596): n is a, c, g, or t
  misc_feature (599)..(599): n is a, c, g, or t
  misc_feature (601)..(601): n is a, c, g, or t
  misc_feature (603)..(603): n is a, c, g, or t
  misc_feature (609)..(609): n is a, c, g, or t
  misc_feature (612)..(612): n is a, c, g, or t
  misc_feature (644)..(644): n is a, c, g, or t
  misc_feature (648)..(648): n is a, c, g, or t
  misc_feature (651)..(651): n is a, c, g, or t
  misc_feature (675)..(675): n is a, c, g, or t
  misc_feature (698)..(698): n is a, c, g, or t
  misc_feature (716)..(716): n is a, c, g, or t
  misc_feature (718)..(718): n is a, c, g, or t
  misc_feature (739)..(739): n is a, c, g, or t
  misc_feature (798)..(798): n is a, c, g, or t
  misc_feature (803)..(803): n is a, c, g, or t
  misc_feature (832)..(832): n is a, c, g, or t
  misc_feature (836)..(836): n is a, c, g, or t
  misc_feature (856)..(856): n is a, c, g, or t
  misc_feature (918)..(918): n is a, c, g, or t
agaaatgnaaggcttttacatgtcataatttatattttaaaattaacatgcttctagaaataaaaaaggaaaggaaganagatatatacaaactaatcagcctggtcaacatggtgaaagcctgcctctactaaaaatacaaaaattagccgggtttggtggtgcacacctgtnatctcagctacnnggaatgcngaggcactagaattgcttgaaccttggaggcggaggttgcagtgggtcaagatcacggcactgccctncagcttgagcnacanaatgagantncatcaggtgcaggggctcatgcacgtaatcccagcactttggaaggccaaggtgaacaaatcacgaggccaggagcncgagaccagcctcaccaacatgaggaaaccgcaccacaactaaaaatgcaaaaattagtcaggcgtggtggcacanacctgtaatcccagctactcagaaggctgaggcagantcgcttgaacccaggaggtggngggngcngtnagtngggntnntgcngntgnnctntggnntggtnaacagancgagantntgtcannnnanaaaaaaaaaatttaaacccntagaancananantaaaanaanaaaaaaaaaatcccctatgaggttttcttctntttnggngagcttcttcattatctttcaganattatattttcttccatcttccncatcctcctgttcttcancnaataaatgaaaaaagatacanagaagacacatttgctttttatccactgcacttccactcactattagtcaatgtggttncagcngagaatagcagttttctggcagggcagcnactnctcagcaataaacagcacantgaaaaaaaaggataaatccttcataaaaagctaatgaactttttttttcctggaaactttnaaatccctcaaaaactgtttatta

SEQ ID NO: 491289 - DNA, 565 bp, Homo sapiens
aaaaccttcacagtatacttgaattctgcaggggttcgggggaactcctcggccccttccccgttccccttcaccagcctcccaccgaccgggcgtccccaactcagcccaaggagctgtcaggaatgggaggcggggggtcctcgcggagaaattaagaggggccccgcggggtggccgggctctggcccgggggccgatggcacgccgacagcagatggcccgaccccggaggagcccactccaccagtggcgggctgagagggtcagacacgccccgggaggtgggccccgagcccggggggctcgcagggcggggcctccggcccagtcccggggatgtcctactgcgcgcgcagggtcgggggcccaagggcggcgcgaaaaaggcaggccgcgacgaggcggcctcgggtgcgacgcacacagtctcccgccgcggcagccggcggaccaaggtccggcagggcgccggcgcaccgctgcaaaagccgcccgtgcataggacacaaacggcgcggaccacatgggccacacggccaggcaccactgaggagcacggtgc

SEQ ID NO: 491290 - DNA, 765 bp, Homo sapiens
gtaccaattaaaattatccatgagggagaaaccagtattgaataccctacctgactcactttgagcaattagaaatatttagtcttctattatggataatatgtaaaggagaaacaattttctctaccatgacgtacttgcattctcctcagagaaaatgggagtagagcattcctaaatccaagggtattccgctcataggtgggactagattactacgtcttgactctgccaactagcaatttcagggaggacttcgttggctcagcttagacgaccaactttcgtgtgtgttttcaaaagtggatgccttaacttgctagcctgttatccctaagtctgtgagggtggaacctaactcactggctgtccaatccttgatagagcaaaactcagaacaggttatgtaaaaatatagtctggctttagaacttatgttaattcacctgctttgccacagaaaaatggaggctttcacaagggtttgatcagaattaaaacccaaacccgccctctgttaggggtggtctttataactttactgaaacaagagggaagcaactgtgatgggaagagattacctagccttactaacaagaagcattctaatagataaactagtaaccatcatgtaagggaagatgaagccatgtgcatccaacatgtcccgttcagaaaacctcacaggacagacgaatatccggcttttaagttcattaaaggcagcaattcctactcgcttaaggtatgtgagcggcgacccgg

SEQ ID NO: 491291 - DNA, 251 bp, Homo sapiens
  misc_feature (79)..(79): n is a, c, g, or t
  misc_feature (110)..(110): n is a, c, g, or t
  misc_feature (209)..(209): n is a, c, g, or t
  misc_feature (211)..(211): n is a, c, g, or t
attctcaaaaaaaaaaaaaaaaaaaaaaaaaaaaaaagcggccgctcgaatttccggtgacaaaataacgtttactcangagcaatcactcccaaagatgatacgtcagnggatatcgcccctgctgttgcggccagccagttgaaatcgctgcaactgcgaacgcgttaatattcgcgggtcgcgcccttcatgaagatgcgtggcancnatgcctttcagcgcgcatggcatgagcgcatcatcccacc

SEQ ID NO: 491292 - DNA, 209 bp, Homo sapiens
tcatgagatccattccatagtccttcagcttaagatcaatattatgtggcaccagcatccagactgttatctaccatcttcttcacctgcagtgcttagactcagtactaccgtgcccagagcaaatctgatggactgacttccgatcaataggtttgatggccttagccggttcgtattgcaggctgtacatgtgaatgcatgtgctt

SEQ ID NO: 491293 - DNA, 109 bp, Homo sapiens
agtatctacagatgcataggacagtgctgacacagtgcagagtctaaataaacgctgttgatagaggaagtggctgccgagaacaagccggaagagataatgatgcagc

SEQ ID NO: 491294 - DNA, 948 bp, Homo sapiens
cgcccgctccaggctgttcccccgctgccgctccccgcgccgtgtcgtcgcagctcatgtcgaggagaagcccaaggagggtgtgaacgacagagaatgaccacagtcaacctgtaaggtggccgggcaggtactgttccgtggtgcagttcaagatcaagagttgcattacgccgttggagcaagctgatgaagtgcctacgtgcagatgaggcagggcttgtcaatgagggcagatcagattcaggttcgaggtgcgcagccaatcaatagaaatcttgataactccagcacagctgtgaatcaatgaggaggaggaggacaccatcgaggtgttccagcacgcaatacggggagggtgtgccggatatgcagcctggcatggcacagtttctagagggcccgtccccctagccgcgggcctgtccatcctcgcattgctgttgaattgtagagcgacgtgacccatgcgcgacgaagaaaggtgtctatgaggaaagtcgagggagcattcaccgacgatgattttcgctctctttgatgtagcttcatgtgtaattcgaaaattatatctggagggatgaatctgtagcttaaattggtgccaatcagaattgtgtatctttgttcaggtaaaaatgagttgcaagatattggggggtactttgtgtgctcagtgtgtgtatcgcgcccttctagaacatttttttaagcccaaagattataggctgaatgtttcgctttttagctctgggcccgggattttgactcctgagttgggtgcctttccctgttatccagtcccatacagcattggggttcccccgcgggattccgtgttggccgggtttgcggcggtgtctgccccgcgctgtccttggttccgcggccggtgtacatgccattgccttcctgtcgcttgccgttgggccacgcggttccggtcaa

SEQ ID NO: 491295 - DNA, 753 bp, Homo sapiens
ccacgcgttcgggccactcggacctcatcagcttccagcctacggacagctgacatccccaggttcctgtgaggactccaaccgggccaagctgccccggggtatccagcgcaatgtgcggaccctacactgctagaatcatttgatcaacgtgccccatgcatagtgccccattttcaccagagcgttgcaccccagtataccattgtgtgaggatgataaagatcatgcaacgagtacggggggagggtgaccatgctgccttgggcatgtcgtcgtgccaaccactgccgggaacagctgcccctcttcctcccagagcagaattcagcatgtgccctggatccccgtgtacccatcccgtagctcctggaagacctttggctaccgccaccagcatcatcctatgggcccagtgctcggagtgccctttctccccttgcagtctgtcagggcagtcgtcaacatgcctgcccctgttgccacgtgacccttttcgccaaggagggagagcatcacgcgtcttccgtggtatcgaaccggctccgggatggccacctatgcgcttccgtcaatgtgccttcctcttccgtggcgttgcagttgccctgctgcaccctggtggtcatccagttccttaccttgtctggtccacgcctgccgccacttctctgaagataccacccgacttccttgtggctgtctgcttgttgccacccctctggccagcaatctctcttgtggggacgcccc

SEQ ID NO: 491296 - DNA, 201 bp, Homo sapiens
taccgctctgaaagatgacagcaggctcaagggagaatttgtcacagagtgtgcagcagacgtggcgctgcatgtcatcagttgctcgaaaagtatccagctgccatgtcgtgctgctatctgccatactgtgaccacttctagggacatcttggtttggaaccccaggagggacagcttagtgtccatggttgtgggtac

SEQ ID NO: 491297 - DNA, 163 bp, Homo sapiens
atcaaagcagtggacaagaggctctggagctggcaggtaccagttccagaagctcagaggctaatgaatattatcctaatacctccacccactctaatcagtggagagacgtctcagactgttgtacatggccattagttgagtagtaaagctgtatgacaca

SEQ ID NO: 491298 - DNA, 992 bp, Homo sapiens
gggtatgaagaattgtctagacctgatatctatatacaggttagctagaactccatatgtatctactgctatgattttggcttggcaagtgcaacaggtatagcccgtgtcacacgcactcagaggatcaatggtaatgcatatatattcgacggcaatgactaatatgactgtgctactaggtgagcgcatgtccactaagagggaaggatactgactcaattggtaattactgtgcactgggaaagctgatcaatacaatacggatatcacgtccagctatgaatagggatcatagaatatatccatataattcaagtaagtgaccactgcgatatggattattggcattaagggaaatgagaactgagctctgctgtgtaatgagaaaaaggattctaataatggtagaatacatatatgtgggattttaagaagcagggagacattacatgatttgattgttaaaattgtgatggtcatggtgatagcagtcatgagacgtgtatggtatacactagtatatgctcacgtcataaaaaaaaatagtgtacgtgtggattagtcgttcataagtttttataattcgatatggagatgtacgataacaataagtatcgtattagggtccaaagaacgagatggtgttggtgtccattactagtggttgggatgaatttggtgcctacattgtgcaaatactgtcatgatgctaagtaatcaagagtggatgagtccatgttcatagggaggggagtcacgcaatcaaggcttgtgggaaatcggagaaagctttgtctgaataatggggaactgttataaaagaagctagtaaaggaagttagagtgcaaagaaagaatcttctgtagaccgggtctgtgttcaatgaggtggcatggaatggggaaaatttggttaagcgctataatggaaaggtcacgggggttttaaaaaggcaagagggggggacaaccgttaacagggaaaaaag

SEQ ID NO: 491299 - DNA, 116 bp, Homo sapiens
gacctggtataccacccatgatcgcaaagtatattgtggacgatttaagtctcgtaaagaacgagaagctgaacttggagctagggcaacaagaattcaccaaatgtttacactca

SEQ ID NO: 491300 - DNA, 143 bp, Homo sapiens
tcttaacaccccgtcgcacgaccctttcgttaggaatgtcctctggggattaactggtccaacatgtttgtcgaaacagactctgagtcctgggacttctccacatcattgacattccgaaagtactgacgtctggaagatta

SEQ ID NO: 491301 - DNA, 802 bp, Homo sapiens
agcggatccatccttcttccctatccaaatacttcgttctcagtgggcagtcagatttttttggcttccaaacctcactgagcatgttcagagaattcctctcagttaaggaaatatttgttccccacaatggtctgatgtatgagtccgtctcagaagcacaagtgcatactaggaaggctttgtaaactggttttgtaggcaggctgtacctgcaaataggcattctgagcaaggatcctagatttcccttcggctcatgtccctcctgactcaaccgacattctcctttttggcatgtctggtgaataagctacagaggttcacaggggccaaatattctccctttatgtactctaatacatgttgcacacataagactcaagggagtgatttgcggttcctaagtcctagggagttctgattccatttattctagatgtcccttttaagggaggagatggtgttgaacgtgtgacatgctttagatgataactgctttggcaattccgccagacaggtatagctgtcttcagtccaaaagtggcacctaaggtttcatattagacaagaagtggttcgcttagtgatccactgatctctaatcagaaatatttttaaaaaatacaattgagatctctgacacatgggaaccactcaagagtatcatctagatagtgttacttcacgcatatgactgacctgatcttatgaaggggagtctagcctgacttttccctgtagaccctatcatagtcagaacaaaaagtggtcacattgaaagcagcagggaccaaagggc

SEQ ID NO: 491302 - DNA, 197 bp, Homo sapiens
  misc_feature (121)..(121): n is a, c, g, or t
  misc_feature (139)..(139): n is a, c, g, or t
  misc_feature (172)..(172): n is a, c, g, or t
  misc_feature (195)..(195): n is a, c, g, or t
actggtagttagacaggcgcgtgctcactcctgtaatccagcatttggggaggcgagcgggtggatcatgagctcaggagtcatgacagctagcacagatgggtaaacccatctctactanaaatacaaaattagctgngcaaggtggtgcctgcttgtaatcccagctacntgggaggctgaggaggaattcgncc

SEQ ID NO: 491303 - DNA, 1008 bp, Homo sapiens
gtgacgcgtgggtccggggtgccacccgtgcgggtacgcggtccgcgcgcccctagccaccgtcgcgtgtcatcgtcccgagtcgcgttggctcgtggcgcttggctgccgggcggggtgcctggggccgcgtgacgcgtgggggcgcgctcggcctgcgctcatcctttagatcggaagaatgcgggcggggtggcggtcgcttcggggtccctcagctgatcgcatcctagggtcgatttctcggtgcggtgctgccgctggccctgtgcggatgccggtgctcccttgtgagtgccctcgtggaggtggtgcttgggacggttcttgatctacctacattctcgttccgtgtcgcccgtgttgtgggttgggaaatgcccgggagtagtaggccctggatcagagctgacggggttgcgagcggcgtggggtgtgcctgggacggtgaccggcatgtgtcttcctgaaatcgttgtattcgagctccagttctctctgtttctacagctgggcctcagtcctcacagggctctagtgggcgttcagccacaccaggagaaggcgcccaggggattaacaggacccttccctctcctgcctcttcccctcgccccccatggtccccctcctcctattaagtaggtactttctccagcaccccacagcgatgagggatgctgggcctaaagtccaggtgggagaacccaggcggaattcaggcaccctgtcttttccttgttagggggggttgcccagggctctcagaagtttggggcagcgtaatacagggggttaccgggggtacccagaaccgcattccacacatgcatccctgtttagggcactggcgcccttgactgtgtggatgctaagataaggggggccagagccaaattggaagtgtctcttttaacgcaccatggttaagagttccgggacaccggatggttgatctctaccgtttcgtaagcaatcctaagtacaccatgacatagaagtaacgga

SEQ ID NO: 491304 - DNA, 562 bp, Homo sapiens
cggttgcgtcgtcgctggtagtgtactgctgcgtgcagcgctttaggactattgcgggtcgctaccaccagcacgcggaaaccgtcttcgttgtaatcattggcgagcgccagtagcgcttcactgatggtggtcatccaggtgcccaggcttcgccggcctccatgacatgggtagaaatgctcagcatctcttccaccgcgcccttgcataccagcaactggtcaccggcggcgtccttgagcactatcgacaggcgacgacggacaaagtcgcacggcaattcatcgaccttgctgtaggcaaacggcacctggcacttggggtttcgttccgagaactgcaccaccgcctggtccatcaggtttatcatgccgctctggtgaaagctgttgagccaggccagggacagcacggagtcatcgcgctggccaaaggcatcgacgtgatgctcgaggatgatcttgtcctgggtgccgcgcaaagattcgaaactctgacgcggcgtacgcggctgatggcgtgcgagtccaccgagcatttgctccaggtgatcaatgac

SEQ ID NO: 491305 - DNA, 135 bp, Homo sapiens
ctggcttgctgtaagtgccgcttcttcttccgaggactcatctgtatcctcctggaattggttgaaggttcaggctggggggtgctactagagcactggtactcccttggagggatggaagttgtccccttttgt

SEQ ID NO: 491306 - DNA, 1238 bp, Homo sapiens
  misc_feature (587)..(587): n is a, c, g, or t
tcaaggtaaaaaggaatgttaaattttttttccagggattcaggggagtccataaatggcttaccaggggcaaaatatcagcccagggtaaaggcaattcctggggaggaagcccacctctggccctaacagcagcctcgggaaatccaaaataaggtgggtggatgttctggccagggtttggctaactggggcgagcacattaagaaccaattgggagaaagtgtgtgaaaagaggtgagttcatagtgttctccctctcgagccactcccacaagtgttatcaccccacgaggcattagacagccctatagtgtggtagagtctcagcaaactcattctccgtgaaccttgtgccagcatagaggacccaatcttgtgaacatttatacgcgagaaacgccaaaactgtggagaggggtgtataccccataaagtctcgcgacaagtgtggccacatgtgtgtatattatacccccttgtgtgcacacatgtgtgtgacacaacatcccagtggtgtgacgcgagatacaggtgtgtggacgacacgggtgttaaactctctctctctctctcacacacacagncgtgtgtgtaagccccttgttgtgctctccacaaaaacgggcacagagtcatccgcgtgtgtcacaaagaagtgtgaggagaaagaacagattgtggggcacaagactaccacacaaagagtctttgtctcctcaatatatcacccgctcttccgagtagcagtatggcgcccacagagagcatcttagatgtcatcaaagaagtgggagacactccagtgatgacaactgtgacacacacccaataagaaacacagtgtgtggttgtgttcgccacgaccgtggggtctctcagtcataacactctctcaaaaaaaagcagcgggggtcctcccctatgaaaacgggggtaacaacggcccgtgggcgaacactgtgggtcctagtggaacagtttacaacggggaggggaggggggggcggcgacccacatacagagcgtggtggcctgattgtctgttggcgacctccacccgctattaacaaaaaaccgccagacaagaaccacacaaacatattacagcaaaatccttaacgagacacctcatcccaacaaacggccttatttaaaaaacgggttggtgccacacacacgccgcccccaccaataggtagtaggacaaagattctcacaggggacgagcacatacc

SEQ ID NO: 491307 - DNA, 205 bp, Homo sapiens
gaggaagggaggcaggagttgcgagttatcgagtgtcaagaggattcatcagcgaaggccctttgggttgaacagcacaggggtgcatatgtcgctcttcaccatgccaggtgtggtgcagaatggaagccagtagtatagagcacatatagtgttgcaccagttgtggccgtcgtgcagtcgtcgcccttctgtcgtcttctcg

SEQ ID NO: 491308 - DNA, 160 bp, Homo sapiens
caacagcaagatgcacacagatggagacaggccacaggacaggctgaggagtgaataaagagttcacactgcttcccatgaattaccccagtagacatagaaggctctcaggccagcctccgtacctcagcgctacctccatcgaacatcgaccactcct

SEQ ID NO: 491309 - DNA, 282 bp, Homo sapiens
cccagagcgataaacaaatgttgacttcgctctactgtgactcataaatgcagcaagtcatacaatacaggaattgttcaccatgatgagaatcattcatcttctagtgcgggaaacatgattgaagcctcttctctgcttagtgccacgtgtaacacattcatcacaacggcttgaggaatgtgtgaaagaatagcccaatgcccaggtttaaaacctggagatgtttcaacgtggcaccatcccggatccctttaagtttctcctggtgttcaccttctt

SEQ ID NO: 491310 - DNA, 323 bp, Homo sapiens
  misc_feature (75)..(75): n is a, c, g, or t
  misc_feature (85)..(85): n is a, c, g, or t
  misc_feature (93)..(93): n is a, c, g, or t
  misc_feature (95)..(95): n is a, c, g, or t
  misc_feature (125)..(125): n is a, c, g, or t
  misc_feature (140)..(141): n is a, c, g, or t
  misc_feature (149)..(150): n is a, c, g, or t
  misc_feature (166)..(166): n is a, c, g, or t
  misc_feature (189)..(189): n is a, c, g, or t
  misc_feature (212)..(212): n is a, c, g, or t
  misc_feature (214)..(214): n is a, c, g, or t
  misc_feature (229)..(229): n is a, c, g, or t
  misc_feature (236)..(237): n is a, c, g, or t
  misc_feature (253)..(254): n is a, c, g, or t
  misc_feature (298)..(298): n is a, c, g, or t
atcatgatactaaacgtacacataactactacgtaataataaacataggagacactcagataatatgcccaatangacatcattnagtctttnanatcttctcttcctctttatgggagagtatntctagacactaattnncccatctnntattcaactatagganacagattccacaaggtgctttanttgatgagacctcaagtgctgtntnctctcttgaactttnggatagnnaaacagtccatagggnncacacacaatgctatgacagaagagttgttacattaagtctttncatgggacttgagtattgtataaag

SEQ ID NO: 491311 - DNA, 847 bp, Homo sapiens
  misc_feature (3)..(3): n is a, c, g, or t
  misc_feature (89)..(89): n is a, c, g, or t
  misc_feature (92)..(92): n is a, c, g, or t
  misc_feature (99)..(101): n is a, c, g, or t
  misc_feature (114)..(114): n is a, c, g, or t
  misc_feature (210)..(210): n is a, c, g, or t
  misc_feature (228)..(228): n is a, c, g, or t
  misc_feature (270)..(270): n is a, c, g, or t
  misc_feature (282)..(282): n is a, c, g, or t
  misc_feature (292)..(292): n is a, c, g, or t
  misc_feature (303)..(303): n is a, c, g, or t
  misc_feature (317)..(317): n is a, c, g, or t
  misc_feature (319)..(319): n is a, c, g, or t
  misc_feature (321)..(321): n is a, c, g, or t
  misc_feature (324)..(324): n is a, c, g, or t
  misc_feature (333)..(333): n is a, c, g, or t
  misc_feature (354)..(355): n is a, c, g, or t
  misc_feature (358)..(358): n is a, c, g, or t
  misc_feature (363)..(364): n is a, c, g, or t
  misc_feature (366)..(366): n is a, c, g, or t
  misc_feature (371)..(372): n is a, c, g, or t
  misc_feature (374)..(375): n is a, c, g, or t
  misc_feature (380)..(380): n is a, c, g, or t
  misc_feature (389)..(389): n is a, c, g, or t
  misc_feature (393)..(393): n is a, c, g, or t
  misc_feature (395)..(395): n is a, c, g, or t
  misc_feature (399)..(399): n is a, c, g, or t
  misc_feature (401)..(402): n is a, c, g, or t
  misc_feature (421)..(421): n is a, c, g, or t
  misc_feature (445)..(445): n is a, c, g, or t
  misc_feature (453)..(453): n is a, c, g, or t
  misc_feature (468)..(468): n is a, c, g, or t
  misc_feature (495)..(495): n is a, c, g, or t
  misc_feature (510)..(510): n is a, c, g, or t
  misc_feature (512)..(512): n is a, c, g, or t
  misc_feature (518)..(520): n is a, c, g, or t
  misc_feature (533)..(533): n is a, c, g, or t
  misc_feature (535)..(536): n is a, c, g, or t
  misc_feature (546)..(547): n is a, c, g, or t
  misc_feature (552)..(552): n is a, c, g, or t
  misc_feature (554)..(555): n is a, c, g, or t
  misc_feature (563)..(564): n is a, c, g, or t
  misc_feature (581)..(582): n is a, c, g, or t
  misc_feature (588)..(588): n is a, c, g, or t
  misc_feature (629)..(629): n is a, c, g, or t
  misc_feature (636)..(637): n is a, c, g, or t
  misc_feature (642)..(643): n is a, c, g, or t
  misc_feature (657)..(657): n is a, c, g, or t
  misc_feature (668)..(668): n is a, c, g, or t
  misc_feature (728)..(728): n is a, c, g, or t
  misc_feature (730)..(730): n is a, c, g, or t
  misc_feature (748)..(748): n is a, c, g, or t
  misc_feature (752)..(752): n is a, c, g, or t
  misc_feature (782)..(782): n is a, c, g, or t
  misc_feature (842)..(842): n is a, c, g, or t
canacaaaaagataatcacaataaaatatacactaaattaaaaaaaaaatagattatagttgtcataaaatgttatattctctttttangtngggtggnnntattttgtttgcntctacataaatttctattcatgagagaataacaaatattaaaatacagtgatagtttgcatttcttctatagaatgaacatagacataaccctgangcttttagtttacagggngtttccatgaagccacaaactaaactaattatcaaacacatnagttatttccanactcaaatanatacacattcnaccaataaactganananaancatttcatnttctctttcattttgctatanngcnttttnnantttgnntnnatgcnaagtgaganattntntttntnntccttttaattgaactcanaagatgcactatctaattcatganatatacgnaatttcaggtgtttntcttcttccttacttttggcgtctacnaccagcatatcttcntngctgtnnnattcatggctgtngnnttcacggctnnctttngnnagttcctnnctatcaatcacatcggnntgctcnttgctctcatcattagctttccgcttatataatctggactnctttttnnttttnntttcagcactcttntcatccagctntctcgtttcataactgtccttcccacggctgtcccaatcagaaggcgcgttcaggtcctngngcaacggggatggccttntatncaccattcaactcctcgctttccatgtgtnaggtgatgtcctcgtctgttgcatcagggtactggatgtcaggtctgcgaaccttcttanatttt

SEQ ID NO: 491312 - DNA, 1022 bp, Homo sapiens
agcgggggctggaggtgccctgccgggggtgggggtgggctgcggggagccccggggggatggggagcgggagcgggcgctgagtcaacgggcgtggggtccctcgcggtgtgctcggggagcgcagctagcgacgaggggagggggccagtggtgaggacgggtcggcggaaagcagccgcggtggtggcagacacgaggggacgccagggcggcacagaggacaaaggggattagaccggggctcacggtgacagcaacagccgagagaacccaatacaatccggagacgagtaatcgaccagggaaagcttacaagcaggggctgaaattgtagattagactagaatgcccagaggaacacagacccaccgaagatcttgcacactaaatacatagtaatcgcctgtggtcaccaaaacgggaacacaatgcattacacattaatgtgacattaaacattaaaattcccatgggagacctggggagaatagaagtccaaccacatatccacgagacacgtagcaccagaaagctacgacttacacagggagaagaccattgcgagaccccggcgcgagaatggataccaacagaaacacgaacaaacgacacagagagaccccagcatcgcatagagccagaacggagaaagaaaggaacaaggtacaccgtcccaatagactgaccaaaatgcccaaccgagtagcacagcaacaaaagggcgcgggacaataaggcgcacacatgcgagaagcacaggggatccacaaacgaccggcaaagagtggagcgtcataggccaggaacggaaacagccccaaagtgcaaaaacaacacacagcagaacgacaatgtagataaccacacaaagaaaacttaacaacgaggaaagaagagcaaagaaactagcatcgaagacgccaacaaacagggctaaaggcaaccaaggggtctaagaaagacgaatacccagacgagaccgggaaacaccaacggatgcactagccgacgaacacaca

SEQ ID NO: 491313 - DNA, 440 bp, Homo sapiens
caatcgacatttccatcatttgggtgcacttgtgtcagctcgtcctcatgggcgagtccatctagtcgtcggcctgcaggcgtggtagtgtgtgcctgagcgacgtatgtaacccttagaactgcccagcaccttgccaggcacagtggctcactgcctgacacttggtgaggccacggcgggtggattgcctgacgcccaggagtttgagacaagcctgggcaacatggatgaaacccccatctctactaaaatacaaacaacacgtatctgggaccttgctgcgtgcacctattaatcccagctactcctgactgctgacggccagagaactcgcttgaaacccaggacggccgacggttgcactgacaacccggacggcaagaggtatgcacgcgacgccaaagatcgtacccgcaggcactccacgcctggggtgc

SEQ ID NO: 491314 - DNA, 322 bp, Homo sapiens
caggcaacagagcaagactctgtctcaaaaacaaacaaatgaaatttttaaaaaattaaatcaaattaaaattttaaagagaggccaggtttggtgactcacacgtgaaatcccagcactttgggaggccgaggtgggtggatcatgaggtcaagagatccagaccatcctggccaacatggtgaaaccccatctccaccaaaaatacaaaaattagctgggcgtggtggcacctgtaatcccagctactcgggaggctgaggtacaagaatcacttgaaccggagagatggaggttgtagtgagctgaagtcatgccactg

SEQ ID NO: 491315 - DNA, 132 bp, Homo sapiens
tccccgtcgctatcatcggcacctccaaaccacgttgttgtaactagctggtcctgcttcatctagatttcacggccaacctcctgaccatgctgtgagatgtgtctggcgacctgtttggctgtcactgct

SEQ ID NO: 491316 - DNA, 195 bp, Homo sapiens
gttatttactcgccaggtatgtggctcatgcctgtaatcaacaccttgggagcagaggtggatggatcacctgaggccaagagtttgagaccagcctggcctctggagttactttttacatcagaactggtccatagaaacaccatcctggccgcacagccactcccctcgagtttgtggcgagtgaaattacgg

SEQ ID NO: 491317 - DNA, 311 bp, Homo sapiens
  misc_feature (9)..(9): n is a, c, g, or t
  misc_feature (103)..(103): n is a, c, g, or t
  misc_feature (127)..(127): n is a, c, g, or t
  misc_feature (157)..(157): n is a, c, g, or t
ccccccccntttttttaccacccagttattaggggggctgtaaaggtattttgtaaggtgattaacattccccccccaccgtgctttaaggaagagattcctnaaaaaattgggtagctgcccctgnatagttgaaaggcctcaagaacaaaccccngcaggttctggaaaagaagaaactttgcctcaagactaaacccatcgactcccccctgagtttccagcctggtagtttgccctatggatttgaagtttgccaccccccacaattgtgtgaattaatttttaaaaataaagctatatacagccca

SEQ ID NO: 491318 - DNA, 380 bp, Homo sapiens
tctacatatagtaacagctgtcatatccactcagtccatcttgttcttcattattatagctatctctgtgatacaccagtattcttactgctagccagatgtagaaaagatcacttcttcttacagaaacattatctcttagttatagaaggcatcttaatataataaataaggcagaggctttgaagttgactgggccagtatggaatatcaggttctgacacttttctctgtgaccctgggcaaatcatatagtccaggtctcatctttctcatctgaaaagtgggaatattatttctcttaatagctgactgaaaattaaaagacataaagtaaggaaagtccctaaaatagcatctaacaaatggcaggtgcaaaa

SEQ ID NO: 491319 - DNA, 1334 bp, Homo sapiens
  misc_feature (715)..(715): n is a, c, g, or t
  misc_feature (761)..(761): n is a, c, g, or t
ccgccctcctcgcgctcgtgtcgtggttgcatagtccatttgtggccctctcgtttcccctggcggcccccctccacagccgttggtttgccccccccatgaggagccccgggcggccggtatcccacctctcggggatttttccctctcagccccgggggcccgggataacccgattttcgccccccccggcgcaccccagctttttgcccccctttagcccctctaatttttgggcggcccactgttatgaggacacaaaagatggtggaccacgaagaagccgccgggttggtgtacccgggtccccgggaattttccccggggatttttggttcggaccccccagcggttctccgggccccaagggagccccccccagggcccccttatgtggccagccccattggcggccccacgccccgggaattgggcaatgggtcctttggaagccccccaccgtggtccaccccagggacctgggcaaaccgggccgccggtgggccacaccgtggggtgtcaaaacaccaacgcgccgggcaccccgggagaggagtccccgcaagacgcatataagggcccccccggccacaatctcacaagaggcggcagcccgcaaattctgcttcacagcggcccccccgccgatttcgggggtgtccccacattccggggcaccactttcgcttggcgcgcttgcccccccacccgcgtntttcgggtatccacccaccacgaaaagtgttgccgcgcgcaccgcnggccgccgcgtctttttcacgccctctgcgagaggagagtctctcacgcggttggccccgcgcacatttcacaccaaggagaaggtgtgcccccccggagcacacatctggcacatttctctgggggagatccgagaggagaggcccggagaacacacaggtccaccgggagggtcccctgcacaggccacaaaccgtgcacagccggcctgaaaggagagtatccgcgcttcccaaactcaatccttctttcccccgggaaagccctcggcccccccaagaaagggagagaccacgtttctgcctgaaagagaactgaaaactggccaccccacgctgagaccggagccggttcaatgcccgctccggaaacgtctaataagaaaggaggaaaggctcgaggtcactcacctgagggaaagagaaagaaatttccaaagccttcgctagttctccgtatggcccgtgcccaacgcccggcttttcggcaaacgggccaaaagagcccaggagaacccccagaaccggatgttgaaaagaaaaaataaagcccccctggggacttgggatcca

SEQ ID NO: 491320 - DNA, 1053 bp, Homo sapiens
tatgcacctgcgtcgcaatgtggtcaaacaaagtttactcctgcagtgatatactatctgatcatagtttgagttcaacgcgcgcggcttatcattcgctcgtaccctgcgtcatgtactgttattatgcgacttttctccaaaaatgccatgtaagcgtactaacataagagtgcttcatggcgcatctagggagcgcgtaaaggggacttgaaacatatcctggatgcgcacaattgaccttatgccatcgatgcggcaccatcttcatccaacgtattccactcacgtatctattaaacagaacagtgggattaccagaatcccctacgtgtcttaactgtcaaattcaaattagtcatgcatgtggggacttgcacccgttgcgagagtagacctgatacaaggggggatgctatgcttttcacctccgatgccttgtgttcaccgcgaatgtctcccttatgatgtcacagatgtcgagacatgcgcagtcctcttgcccaattgactccactcagcggtacgttctacccacgtgtttgagtggcacccttgttcgccgttaataacttgacgtcacgatgaagtgtggcatcttcatgttgtatgtccacccagtatattcttactcaacgcgatgacgctgcacttggaagccgccgacatcaattgtcacttagcacagctatacgcatcgcagtatatggtgacgtagagtgcgctgccctcggtggtgcacccattgttgcctgtaatttactataactgcgtccttacagcctgtaaaggtcggggttaactaagaggcgcattggcctgtgaggaatgtgtcctacagatcacaaacatttgcgtgagtgacttgtcacaatatacatcttgttgcaccaaatacgtgacactagctgtcatacaactggaccatagggggcaacaaccggggtcccagatcaacctaatgggtatcgtctacacgattatcaaacccgacagaactacaagaaacagagtccgtgtatcagtgcttatattacgcagttcgtcatcatt

SEQ ID NO: 491321 - DNA, 371 bp, Homo sapiens
tcttagccaaccgaaagtgtggcgaatggtgggaggacgacgtgaaaattgcacggcgagtagggcgaaaagcagggcggcagtatcggtcaacatatgacccgcatcggccagcaatgccagagaaccagaaagaaaaccaccaacgacttctaccagcataaacccggcagtcacgccgaaagcatacaacaagcgacgagcattattatcttctggcaggtgtgaggacgtgtgtgagtgtgagtgcgccatgacgagtcatcccttaattattctcacttaactttatgacatcatactgcttttagaagtgaaaaattaaaagggagagactccgctctcccattattggctattttgcagggtta

SEQ ID NO: 491322 - DNA, 833 bp, Homo sapiens
cacgcgtcgggccggcaccacggggttatcgaagcatgctgtcagatgctggggtccctggtgttgaggagaaaatgcactggctgccaccggctactcctccggctgctcaggtccccaacgctccggtggccatggagtgtgcttccgtgccggaatgtgactactgggagtctcgtgggagccgctatgtgtgctgaggtgtagccacctgggtggtgcgccctggaacatcgccggccttgttctccgtgacgtgtgggcatgccaccggggggctgccagggatggacgcttcgataccaaatgcctcgcgagctgcacactatggaggactgccttcctgggtcccgaagaaacactcccaggacatggacagctgagaacggggtccccagcagggccggacctgggcatgtgcgcccatggccgctagcgactggtggttcatttgctcacagcaagagtccgtccaacaaggatgacagccactgttggaatgcttgcccgtgccaaccaatatgcaagaagtcagcagagctgtagctcacgaaggtgcagatgtccattgcaaaagcacagactaggctcggacagcacctcatggtggcagccacacacaccgaaacacaacacagagctggcacaacggaccaggccaggcagcacggagctgaacgcaacaccctgcgagaagaatccaacacgcgacacccaaaactgcccaccacacagggacacccatcctgagaacaccgcagaccgacaagatgatcacaacagagaacaacggcaaacacgcagcacagaccagaaccgccacgcgaaccacc

SEQ ID NO: 491323 - DNA, 360 bp, Homo sapiens
actgttggaggggcctttggggctgcccctttgtttggagtcactgggggcttccaagggtttccccccaccctcttttgttctgggatggctgtcgggaactgtatcccctgggttttgtcccccggctttgtatcaggcccttttttaaaactgggccccagtggggggggtttttttcctgcttttttggggcctggaaggaaagggcttccggaggaggcttttgggctggaggggcccaatggggggggcccccccctacccctttccccctggggtgatgggtggggggggtggctgcccccaacttggtttttttattttttgttccggaataaacccccctccgctccggga

SEQ ID NO: 491324 - DNA, 403 bp, Homo sapiens
acataggatattggctgacttcctgcttgtcacaattgctttttgccttcttctgtctctgcctttttagttcccaccctcccactttcctattgtatccttgtctggtaacagcattccacattactgtaattgttatttgtgtattgattccccttcacatgctctacaaaaatactaagttctattgaataccatatgtttctgccattcctctccccgtacttcctaccattcacattcttctttattctttttatataatttacaccaaaatttgaacatacccaacttattatttcaatccaacttcatcaataatgtgtcaagtcaggaattctttataatagtactgctacaagttgtactaaggagattcctttgtcagctactcgtctgacaa

SEQ ID NO: 491325 - DNA, 1553 bp, Homo sapiens
ttgtcttctcatagtatacacagatttgcgtttgggtttttgtgtggatgcagcacacgaccagtctgggggggggtgctctgccacttcgtttgtgtgtgatagtcgacctgttttctgcccgacaagttttttgccctcgagtggttgccgcccgtcctgtttgttattgggtgttgggtgggtagtacacggccgcccgtcctttttgtgtgggggtgttactcctcgcgggggttgtgtccgacgacgggtggggggggggttggtgtgtgggtgccccgtggccgtgtggtctgagccctgcttttggtgttgcatcacagctattttggtgggtgacaccaaccacatcagtacggctccgacccctcccttgtgtgtctcgcccccttctctgcgtcgccttcttctgtcgggtgaagattttttttcgtgaggggaggagaccaacgagtagcttgtgtgtgggggtgatattattgtgtagtggtattttcgcctcggcttcgactccgtttgtgtgtgtgtcgccccccgagttgatgagggcgctcccccacagggggtccccctctttgtgtgcgcgccccccacccccttctgagagtgtttgtgagctttgcgtgcgctctgttttgttctcccctcgtatgcgcccttcttacgtgtttgtgcgtttgttcgctcgcgcgcgcgtgtcacgcgccccacgtttgtgctctcgcctctctctctctcagagatggtgggccgcacccccgagttttagcccagagaggactctctctcaccttgtcgcccgcgttctctctctcaacaccaccctctcttctgtgtgggtctctctctctcagtgcgtccctctctctcacgagatttctgtgtggggtcccacatctgtgtttttctctctgtgttgtaccacacacactatactctctctgtgggcacacacgtgtgtgtgtgttgtgtgtgtttttgtggtgtgttcacagcatgtgtgtgtcccacatctgtttttgtgcggcacacatctcgcgcgtcgtcatcattgttgctgtggacgcgtgttgtatacacacgagcgcgcgcacacatatgtgttctaatctctctctctttgtgcgcctctctctgtgtgtttgcgtcacaccacgagatctctccctctctctctctcacagagatatatctctctttttgtgtgtggtgagaagagagagggcgctgtggcgcacactgtgcacagagggtgtgtggagagccgcagcgtataccccacagcttcccacaagcgcgagaagagtggggccctcgcccctcataggagagctgtcacgccacagagagggagagcaccaagaggggccccgagaattgagaccacaaaaagaggggtaagagggccacccccctccccccgttttcgttggggagaggggtgataccaccgagatttgtccccaccctcggggctcccctctttgggtttctatatttgcaccttataccttgagaatataaaaaaaaattccctttttgggaaaaat

SEQ ID NO: 491326 - DNA, 160 bp, Homo sapiens
ggaaaaggaatcttaggaggagaactttgtgagcaggtaatctgacagcccaggaggtgggctcgctgataggcatgaccttccttaatgcttaaagtcttcgggcaagactttttatcataagactttctacttctctcggtgtcttatattacctact

SEQ ID NO: 491327 - DNA, 614 bp, Homo sapiens
cgtggtggcgcatgcctgtaatcccagacactcaggaggctgaggctgcggtgagccgagatggcaccactgcactccagcctgggcgacaagagcgaaactctgtctcaaaaaaaaaaaaccacaaaacaacaaaacactttaagaggcaagaccgggctgtaagatgacggataacaaatagggaggagtccacccttataaggaaaagattgatgccagtgtggagactccagaagattatcttaccctgctaaaatatgtgcgtgggactgacgacaggtaggacttgtgatctgtccatggtcctgaacctccatgaactgttggacaatagtccatcctacctgtgaaatactgatgaccttcctcaaagttcccggaggaaattctcagaataagccccaaggaacagactgcaccgaacccaggacaccaccaaataaacaaacacaacctatatttacccaaagttctctgggaacgtcttttcccctgtggaaaaattgcccggtttgggcactgggagcaggggtcgggggcgagacagggttccccgggtcggcgaacgctccaattttcccgttttccccagaaaaagataaacaaaacaa

SEQ ID NO: 491328 - DNA, 275 bp, Homo sapiens
tctagaggatcctgatcacgtgcattgtgagtgaagaagtatatcggtatgtaaagctctatcagcagggaagaaaatgacggtactgactaagaagcccggctaactacgtgtcagcagcgcggtaatacgtagggggccaagtgtaatccgggatttacttgcgtgtaaaggggagcgtagacgggcgatgtaagtctgaaggtgaaagcccaccggttcaactgtggggactggctttggaaaactaatatagctagaagtatcggaagggg

SEQ ID NO: 491329 - DNA, 210 bp, Homo sapiens
tggtgtgtggtgtcgtctgtgaatgctaagtccatcaccctttccggacattgcaaataaacagctatttaaggggagcgctgttacggaggcgctcgttaggaggcgctgttagggctcgttacggagggtgttacggaggcgctgttacggaagcgatcgttacggacgttacggaggcgctcgttaccggagggtaaccgcagctag

SEQ ID NO: 491330 - DNA, 248 bp, Homo sapiens
agtgttgctgattggtaatattttgccgttaacgttgtgattagaaaaaaatacataattaggaggtgcaatatggcattttggtattattatgatagtggtggcaggtaacagatatcaccaaattctgccctgccattcaattctattatttacaggattcctaagtgcactgtacacactacaaatgttatcagaaaggagttatactttatgagttacttcactagcacaataagtaggtatcg

SEQ ID NO: 491331 - DNA, 418 bp, Homo sapiens
gtcgacgttctccggcgcgctagggctgaagtcgtgaaccaccgctgccggtccgagaactggctggtggcataggaccaaatataagaactgtgggttttcttagttcccggcatgagcatttgcacaggtgtctcatcggcttgaataatctgctgcccgagaaccacgtcgcgcagcatcaaccagcggctggaactgaaccccagtcacggccatctggcagccgtcggtgaggctatgcacgctaactcctcctctctttctcttcgttaagtagcatcagccatgaattcattcaaaaagaccgttcaagtcattgcactcgttgcaacgctaaatgcagcctcattgttacaggcagcgtaatcaattgccgtctacaaagcccctaactgtggctgctggaccaggtggg

SEQ ID NO: 491332 - DNA, 371 bp, Homo sapiens
atggctcctgcgtgtaattccagcactttgagaggccaaggcaagaggatcgcttgtgttcaagagttcaagaccagtctgggcaacagagcaagatgctatatctactacaggcatgcacctgtagtctcagctacctgggaggctgagagaagaggattgcttgagcccaggaggcaacagagagctgattgtaccactgcaccccagccaaggcaacagagaccttgtctctaaaaaacaaaaacaggccgggtgcagtgtcttatgcctgtattcccagcactttgagaggcagaggcgggtggatcatttgaagtcaggtgttcaagaccagcctggcaaacatgatgaaaccctaaaatacaaaa

SEQ ID NO: 491333 - DNA, 350 bp, Homo sapiens
aagatcagtgtgtatcagaaccaatttgagagaaaattgcacacgcacacacaatatgaaaaatataggcctgttgcggtggcttacgcctgtaatcctagcactttgggaggccgagatgggtgcattgcttgaccccaggagttcgacaccagcccgggcaacatggcaggactcccatctttacaaaaaatacaaagcccagtgtggtggtgggagcttgtagtccttgctactaaatggggagcgctgaggttggggagtcgcctgagcccaggaagttgaggctgcagtgagccgtgatcgctccattgcactccagactgggcgactggagtgagacctttcct

SEQ ID NO: 491334 - DNA, 303 bp, Homo sapiens
gaaccttggagccatcaggttactgttggaaagctgatgggagatgccgtaagagaaatgggttcctattctccagtgcatttcaactggccatattctcagcagtgaatgatggaggcagagctcagagaagcacgtctgaacacgtaaggaccgagaggcgagtcttcagtgaaacacccacagagagccgtttgccccttgagattcctgaggagtgtggagagcaaagaagcaaacccaatgagtcacagtgtaaattattcctattagtcagtgctatcttataagcacacatacaca

SEQ ID NO: 491335 - DNA, 249 bp, Homo sapiens
tgtcgctgctgtccgtgtatatgacggcagtgcatcgatactatagtctttgctttacatgtgtacaacgacggcagtgaatccctagtcatagttatagcttttaacctaggtgtaaaacgactgccactgtataactacctcatagtaaatatcaatagtcgaatgtcatacgagtactggtgagcactagtcttttatcacaggttgaacctgaggaggatgaactcttgagattaagtatctgta

SEQ ID NO: 491336 - DNA, 543 bp, Homo sapiens
  misc_feature (167)..(167): n is a, c, g, or t
agcggggccattggctggtgcgggagggggcgcgcacgccggcggcgggaggggccgtcacgtgatgtttgggtgcccgccccgcccgcctcgcccgccgtgagcgcccggagcggtccgcgagccaccgaggcccagctcagtgtggaggctgctggccctgccanctgtaagaagatgtcatacggatccatcgcccgtggaggtggcctggggagccgtggccctttcgggggaccttcgagacaaggctgtcagcccctagagtgcgctagatgttggaccgagtatggaatccgccatttcccctgcccgtcgccagagagcaagctgcagaaccgctgtgtggggaaggacggggaaggtgatctggggccagcaggcacgcctatttgtcccaagggccaggaagcgagggcctggggttgcccctgaaggcagcggatgccggagcccacctcatcaccaccattggcccgaggaaggactcggttgctgggcccatggccggatggcggggccagcgctacccgggcacgaaga

SEQ ID NO: 491337 - DNA, 107 bp, Homo sapiens
gtttgtttgttcaacgattatagtcctacgtgatccgagttcagaacgaagtaatccaagtctgtttctatctacttcaatttcctccctgtacaaatgattagaaa

SEQ ID NO: 491338 - DNA, 126 bp, Homo sapiens
gtttatttggcctggctttctattagctcttataatgattacacatgcaagcatcccgttccagtgagttcacccttctaaatcaccacgactcaaaatgtggacaatgcatcaatgcactgcagc

SEQ ID NO: 491339 - DNA, 139 bp, Homo sapiens
  misc_feature (102)..(102): n is a, c, g, or t
  misc_feature (112)..(112): n is a, c, g, or t
  misc_feature (133)..(133): n is a, c, g, or t
cggcacagttaacctgactgaacacacttatacacacacatgaacacacacacacactcgcccccagaggcacaggatacgagtggaaacagcagctctgcnaagccctgtngctccccatcattgaaatgtngctgat

SEQ ID NO: 491340 - DNA, 561 bp, Homo sapiens
cctcaaagtactctatgatccagtatctttggcatccatgtatatacgcacagtcaaatctagtatgatatataatcacgacatgctcacttgatcagggaagactcatttttttctagcatttaggattgtatatccggctgtgtccactgtctaatggtgatgtttgtaattctgtgtgcctagcaaggtctgtaggatcaaactacaacactgctggtagtatgtgtagcactatgcaaatacaaggtagtaataatgctgttactgtcactgtccttgagacatatcttgtgaatttcaggggattaagacagatgactgaaaagttgataatctgttgacataaaatctttaatttagagcttgctctgtgctatgtaatgaaaaaaagacaacgaagatatagggggtccttggtttagtctgagtataattttagtggagccacatctataagtaagttcagctatagagatttagttaatagaaataagatggtggttgaaagagaagtctgatattacagcagaatagtatagtaatttcctgctctgagtc

SEQ ID NO: 491341 - DNA, 1142 bp, Homo sapiens
  misc_feature (1111)..(1111): n is a, c, g, or t
cccacgcgtccggactagttctagatcgcgagcggcgcccttttttattttattttctggggaaagcctctcgtgccagctgaagctgccgcagcagagctcagtgagaaagcccttttcctaagggtggcctccaggagccctaaccgggcgtgcgtgggcaggtgcacgcattttactttttggctgtttggtttaaacaaacgggagagtgagttaagcccccgaggacccaggcggggtgcaacttaaccagccctccagttcaccccagccccgagccaggaagagaagcccctctccggggcagacaggcaggactacgggggtgggcgttgggttgaccaggagctaaagggggatccaggcacagcccaggggccgtgttggccaagatgaccccgtgaaggccatcatccccagaaacagtgtgtgaccctcgggacgccccagggtggtgctcttgcctgtggtgtgtgacctgtgttccctgtgcaggtggggtggtgcctcctagggtgcgtgtgcgcgttgtgtgcgctcgtgacagctcctaccgaggaccagacgctgccccagctcggcgtgtgggcatggcgttggcctgcctggcccccgagaagcccagccctaggtatctgacaccttggcgaagtggggcaaggacccctataaccacaccaccgtgccccaggtgctcaccccagttcccgcccttcacagacccctggttccacgccaggagcctatgtggcctgccgcgtaggtggacagacggcactggatggccgaacgccttgtcttccttacttcctcgggccacattcatttctccctgggaatcccagggttgggggatctgagagctacctagagagtggacaataagaccctgaaacagggccactggccataaacgattgggcaccaaatgaggacgaataaaacacctcgtggaaggagttagacaccctcggaaacccacctgggtgaggctatccggcaccaggacccgacatttctacatatgtcccagccactgctgggagacatgtacaacgtaatgcagcgacaacgcgagacctaacggacgccatccacatacaacganaaggacacaacacgaaactgcgcgataatag

SEQ ID NO: 491342 - DNA, 169 bp, Homo sapiens
caaacagagctttaatattactacaaagtttactcagatcagcctgggaaggtgagggacacatgaagcagatgctggaaaaagggtcatggcagagaaaaggtatctcgtgggaagacaatacatctcttttgacttcgtgtgctgcctcacggcactagcactggag

SEQ ID NO: 491343 - DNA, 1352 bp, Homo sapiens
  misc_feature (107)..(107): n is a, c, g, or t
tttgttggtttggtgtattgtttgctgtctgggtgtctgtctctgtcgatgtgggtagtggtgggtgtgtgttggtgtgcatttgtgtattgttgagtgtatactangaaagagaggaatagaagagatagagaagatggatgagaaataaaagagtaagagagagagaagaagaaggaagaagaaggaagcgagatgtgatgtgattgtcgtagttcgagtatcttgggatgttcttgttttgtgcagatcagtgtcgttttcgttatgttattggactaaggctactccctgcgcatggtcggcgtgtgccgacatcctcggcgtgcgtggctggacgcggccagcaagccttctggttgtgtgcggcaacccgcactctctttgtttgtgtgttgtggtagtctgccccccgccgcgttgggttttgctcggaccgaggggtgtgtctccccctaggggggtttttctcctccgcccggcgtgttgtgatgtgtttgggggcccccctcgccgccctgtttcctcacagacggttgttgtttgtcacgcgtcgccgaagagtctccacaggcgtgccctgtgtctaggtcgccccagcaccctggttctgttcttgcatagcggggtttttaccggttggtggccccctgtgccgaaggaaagtcgcttctgtaggaattgtgcggggctccggctgggaaatatgtttcttgtgagacatgtaaggtgatgcgccaactagaatagacgactgttcgaagaacaagcgcgttgtgttacacatacactgggacatgtgaaagtccgcggcaaggccaaaaaatgtgggtggaaggccctccccactgtgattcccctgtgttggcgcccgaggctgttcggctcccgccgctagatcttcctattatgtgtggcgagtgaggtggtcatattatcgccgacttgtgtacatagctctccctcggcgcctagaaaatgtccacactttctacattctgtttttgtagggtgtttctaataggttataattgtctccctcttcctacccgcgctcttctatgaatagaagtttctgctcaccaccaacattatattctctgttgcagcggcgagttaggttttaacccacctctctatttacaagataagatggcgtaaaacacacctccgtctaatttgatagagccccctcctttgttcaattctaaagggtctagaccgcaaagaacaattctgtataaccacccgcgggccacaacattactttcttgatcacacccacgcactgtgtattagagaataattaatacaaaaatagaaaaactgtatctagcaaataacagaagaaa

SEQ ID NO: 491344 - DNA, 653 bp, Homo sapiens
  misc_feature (409)..(409): n is a, c, g, or t
caggaattcggcacgtgttgaatagatgagaatttgccctttataagaagggccagtgaatttctagagcaaaaactaagggacagctaagaagttattatggttgacttcaaaagcctcaactgtgtcttttatgtccactaaacaacttaattaaaagatggaattttgactcgtgtctgtatcatacaagtacaaatagtaattttgccctatgtatgtgtaaatgttatttgtgatattgtcttatttatttaatgccctttcttatgccgtgggttttcaagtttactcatttctatggttgcaaataactctcttattatataaactttcatattataggcagaacacaatggctaaatatctgtttcatgtacttcaaagttattataagatatattataantataatatattataacatatatattatatattatatatatataacataacatattataagatttattcttcacagatctatgatggtccctcttacctgtgttttggatggccagactcgggttcggtcccgaagggagggtatgactggcttaccctcctgaatttttagccaggtttaggatttacggggggataacagaggctacctaaggtcctttccccttactttatttgggggggcg

SEQ ID NO: 491345 - DNA, 516 bp, Homo sapiens
ggagaattacccgaacaaacgaaccacactgcttcgatcctggacaggatgcaggcagattattaattctgctgtgcggggctgctaactacaacacgattggagagaaaaatcccttccatgtccgaaataaccgagtccccgactcctgctgcattaatgttactgtgcggctgtgcggcattcaatttccaacgagaaggcgatccataaggagcgggtcgtcgtgagagcaacattcggggtggctggctgaggaagaaatagtgctaggtggtagctgcagggagcccttggacattgcttttgtcgaggtttagggacttgtctttgcctgctgcctcgatgaacgagtatcagaagtggctacgaggtgactgataggggtctggtctccgtcacgcctcctcatctgggggagtggaatagtatcctccaggttccccaaagttacacggattatttttccagaccgaaaaatgtaacttagacttgtcctgatgacgagaaagaggg

SEQ ID NO: 491346 - DNA, 628 bp, Homo sapiens
aggactgatgtccataagggtcgaattagcagggtctccaatcagacagtttgagtttctaacatgagcgccccgactggcaaaatatcctgaagcgaaccactagtctgacctacacataaaatgaaaataagctgggtgcagtggctcatgcctatagtcccagctactcaggaggctgaggcaggagaattacttgaacccaggaggcgtggaggttgcagtgagctgagattgcactactgcactccagcctgggcaaacagagcaagactccgtctcaaaaaaaaaaaaaaaaaaaattccggtccaagggatggggatgtgggggcccatggacaaggaacaatccaagagaacattaggggaaccgagcacaaagagaggggaggagggaggacaccacgaggagcaccacagatgagaggacaaccactgggctagacaaggggaaaacaacaccaaattaatacataacagagaagaagaaataaacggagtgacgaacacagagacacatgtaggacacaagacaacactagaggatgaaggcaagacgaagttggataaaaccaggacaagatggaaggacgagacgaaccgaagacacaaagcaaacgacaaacca

SEQ ID NO: 491347 - DNA, 349 bp, Homo sapiens
  misc_feature (12)..(12): n is a, c, g, or t
  misc_feature (78)..(78): n is a, c, g, or t
  misc_feature (149)..(149): n is a, c, g, or t
  misc_feature (179)..(179): n is a, c, g, or t
  misc_feature (184)..(184): n is a, c, g, or t
tttgctgacggnctattcagaggctaaaaagcacatgtcagggaaagagaaaagttttgggaagatgtgaaacatcangaaatcctgcatatcgggccaggtgcgggtgtcacgcctgtaatcccagcactttgggaggcccgaggtgngaggatcacttgagcccaagagtttgagancccancctggaaaatatagtgaaatcttatctctacaaaaaataaaaaataataataaaaaagaaatcctgcatacctctcaaacagataaaaagccctataaaactgtaacactgttaccaattctatttagcacaactcacagaaacgatctattaaatcagtatatt

SEQ ID NO: 491348 - DNA, 952 bp, Homo sapiens
  misc_feature (288)..(288): n is a, c, g, or t
  misc_feature (409)..(409): n is a, c, g, or t
agcggagtaactgacgagctcaccgggttgacccagcgccagggctcgcgggggtcccgcgagggtctcggtagccgggcgcccagaggacccccggcgcggcccgattctgtgagcgccagacactgaaccgcgagaaaactgcagatagctgacggacgacctataagccaaacaattgcaagcacttgtatgtccgaggttgttgatagcagcatacatgatggcgtgtggtcacacatgtataggcagtggattcatggcattatctacatggtattcgttcgnaggcatcttctggggtaggaaaacacatggaaataatagcgtttgacagtggtgtgtggattggcaagtgggtgcacggcattcgagtctgtcaaaggaggtaatatggtgtgcgaaatgnttggaaggagaatgaggcgctttccgtcagtaacagtccgatgctgaggtagagacacctggactgaaggtaattgagaggatgaggtggtgaaatatacagatgaaggaagagatggatgcatgatcatgtatgggaagctgtgattttgcagtactatcgcaacctaggcgtagaggagagcatagagacgtcttcgtaacgtaggcaggcactattgggcccatagtcgttcgcgtggcatcgcacaagagcgcagactggaattgttgacacgctcgaagtcattccaaagaatccaaatatggaattcgaggtgatgatgtggaataacctgaaactgtgctagtattgggtctcgacacctgaagtttagaaatgaacggcaggccaacgacataaatactaggacgaatagagcgctctctaaagaggcgacatgcgtgagtccggagcatctaggggggccaagaatcggactgagaggggggggggccccggggacccaagatttgaggccgccttaaaaaaagggggttaaaa

SEQ ID NO: 491349 - DNA, 629 bp, Homo sapiens
  misc_feature (16)..(16): n is a, c, g, or t
  misc_feature (24)..(24): n is a, c, g, or t
  misc_feature (27)..(28): n is a, c, g, or t
  misc_feature (31)..(31): n is a, c, g, or t
  misc_feature (34)..(36): n is a, c, g, or t
  misc_feature (38)..(38): n is a, c, g, or t
  misc_feature (42)..(42): n is a, c, g, or t
cccccccgaagacggnaactttanttnngtngannnangccntcggccgcgctggtgaacaggacccgtcgccatgggccgtgtgatccgtggacagaggaagggcgccgggtctgtgttccgcgcgcacgtgaagcaccgtaaaggcgctgcgcgcctgcgcgccgtggatttcgctgagcggcacggctacatcagggcatcagggaactatgccaccgttatctcccacaaccctgagaccaagaagacccgtgtgaagctgccctccggctccaagaaggttatctcctcagccaacagagctgtggttggtgtggtggctggaggtggccgaattgacaaacccatcttgaaggctggccgggcgtaccacaaatataaggcaaagaggaactgctggccacgagtacggggtgtggccatgaatcctgtggagcatccttttggaggtggcaaccaccagcacatcggcaagccctccaccatccgcagagatgcccctgctggccgcaaagtgggtctcattgctgcccgccggactggacgtctccggggaaccaagactgtgcaggaaaagagaactagtgctgagggcctcaataaagtttgtgtttatgccaaaaaaa

SEQ ID NO: 491350 - DNA, 1420 bp, Homo sapiens
  misc_feature (16)..(16): n is a, c, g, or t
  misc_feature (24)..(24): n is a, c, g, or t
  misc_feature (27)..(28): n is a, c, g, or t
  misc_feature (31)..(31): n is a, c, g, or t
  misc_feature (34)..(36): n is a, c, g, or t
  misc_feature (38)..(38): n is a, c, g, or t
  misc_feature (42)..(42): n is a, c, g, or t
cccccccgaagacggnaactttanttnngtngannnangccntcggccgcgctggtgaacaggacccgtcgccatgggccgtgtgatccgtggacagaggaagggcgccgggtctgtgttccgcgcgcacgtgaagcaccgtaaaggcgctgcgcgcctgcgcgccgtggatttcgctgagcggcacggctacatcaagggcatcgtcaaggacatcatccacgacccgggccgcggcgcgcccctcgccaaggtggtcttccgggatccgtatcggtttaagaagcggacggagctgttcattgccgccgagggcattcacacgggccagtttgtgtattgcggcaagaaggcccagctcaacagggcatcagggaactatgccaccgttatctcccacaaccctgagaccaagaagacccgtgtgaagctgccctccggctccaagaaggttatctcctcagccaacagagctgtggttggtgtggtggctggaggtggccgaattgacaaacccatcttgaaggctggccgggcgtaccacaaatataaggcaaagaggaactgctggccacgagtacggggtgtggccatgaatcctgtggagcatccttttggaggtggcaaccaccagcacatcggcaagccctccaccatccgcagagatgcccctgctggccgcaaagtgggtctcattgctgcccgccggactggacgtctccggggaaccaagactgtgcaggaaaagagaactagtgctgagggcctcaataaagtttgtgtttatgccaaaaaaaaataaaaaacaaaagaaaacaaaaaaaaaaaaaaaaaaaaaggcagaaaaaaaaaaagaaaaaccaaagcaaaaggaagaaaaaagaaaaaaagaaaaagaagaagaagaggcagagaggagaacaagagggcgcaccacacacagccagcggggccaaacaccaccccacggcgacaacaaccgacagagagagagaccaaccctcacccaggcggagagggaggggcgcgcggagaagaaaaaaccacaaaaaacagccgaacacgcgcaacgaagcgaccacacacaaagcagaagaaaacaccgaaaagcctaagaaggaagaggcacgccaccccgccaccgggggcgacaacggcgcaccgaccacgcacgacagagcatagcaccaagcagcagaaggcggagcaaccatagacagccatcagacccacagccgaggaacacgacagacgcaccacccccaggcgcgccgaagcatagacgaacacacgagataaacaccacagtgacggcggcgcagaggaagcacacgacacatccaacgaaggaaagaacgaaacacaaagcaaaacaggccaccgccagaaacaatcagtcacgccagccccacacaccagc

SEQ ID NO: 491351 - DNA, 541 bp, Homo sapiens
cagtgcatgggagttttcttgctcgtattaaaaaaaaaatctggctaactctgggtgttggcatatttaaagtttggtgaatctgatgggagcaagagtgcgatctggcgggcatcagggaactatgccaccgttatctcccacaaccctgagaccaagaagacccgtgtgaagctgccctccggctccaagaaggttatctcctcagccaacagagctgtggttggtgtggtggctggaggtggccgaattgacaaacccatcttgaaggctggccgggcgtaccacaaatataaggcaaagaggaactgctggccacgagtacggggtgtggccatgaatcctgtggagcatccttttggaggtggcaaccaccagcacatcggcaagccctccaccatccgcagagatgcccctgctggccgcaaagtgggtctcattgctgcccgccggactggacgtctccggggaaccaagactgtgcaggaaaagagaactagtgctgagggcctcaataaagtttgtgtttatgccaaaaaaa

SEQ ID NO: 491352 - DNA, 846 bp, Homo sapiens
  misc_feature (5)..(5): n is a, c, g, or t
  misc_feature (12)..(13): n is a, c, g, or t
  misc_feature (15)..(15): n is a, c, g, or t
  misc_feature (21)..(21): n is a, c, g, or t
  misc_feature (24)..(24): n is a, c, g, or t
  misc_feature (27)..(29): n is a, c, g, or t
  misc_feature (68)..(68): n is a, c, g, or t
  misc_feature (106)..(106): n is a, c, g, or t
  misc_feature (109)..(109): n is a, c, g, or t
  misc_feature (258)..(258): n is a, c, g, or t
  misc_feature (439)..(439): n is a, c, g, or t
  misc_feature (442)..(442): n is a, c, g, or t
  misc_feature (445)..(446): n is a, c, g, or t
  misc_feature (448)..(451): n is a, c, g, or t
  misc_feature (454)..(454): n is a, c, g, or t
gcggntgactcnnangacccnaanacnnnccaaacccccggttttgctggacggcgcaaaagttggcncgcaccctgctatatgcttagtacaaaaacaataacangcnttgtacaagacaataaaaataagacgaatcgactcacgcataacaaaaacaacacggcggaggcgcagctaactgattcttttggagaggcgttgcatttggggcttgccccgcaaccaggccgagaacaacaaaaactgccctaaggnagagcctgaactggttggatcgtagatcagcaacacagcgaccaaagcaatccgtttgctcttggctcccgattgggagtgtcatgaaggaagcttcgtggcgagggcgatcaacaaaaacaagaagcccgacatcaataataaaaatagagcacgcaactacttctgggggagcttcggntcnttnnannnnccngaagaccaagaagacccgtgtgaagctgccctccggctccaagaaggttatctcctcagccaacagagctgtggttggtgtggtggctggaggtggccgaattgacaaacccatcttgaaggctggccgggcgtaccacaaatataaggcaaagaggaactgctggccacgagtacggggtgtggccatgaatcctgtggagcatccttttggaggtggcaaccaccagcacatcggcaagccctccaccatccgcagagatgcccctgctggccgcaaagtgggtctcattgctgcccgccggactggacgtctccggggaaccaagactgtgcaggaaaagagaactagtgctgagggcctcaataaagtttgtgtttatgccaaaaaaa

SEQ ID NO: 491353 - DNA, 1361 bp, Homo sapiens
  misc_feature (16)..(16): n is a, c, g, or t
  misc_feature (24)..(24): n is a, c, g, or t
  misc_feature (27)..(28): n is a, c, g, or t
  misc_feature (31)..(31): n is a, c, g, or t
  misc_feature (34)..(36): n is a, c, g, or t
  misc_feature (38)..(38): n is a, c, g, or t
  misc_feature (42)..(42): n is a, c, g, or t
cccccccgaagacggnaactttanttnngtngannnangccntcggccgcgctggtgaacaggacccgtcgccatgggccgtgtgatccgtggacagaggaagggcgccgggtctgtgttccgcgcgcacgtgaagcaccgtaaaggcgctgtcggtcgcttgctgcgccgatgtgattatctgcttgaagcgggacggcgtacatcaaggggcatctgtcatagggatcattcagtccacggagcccgggctcgctggtcgcgctccacttcagtcgcaaacgggtgtggttctttccctgggagagtcccgtgagtacggggcttgtacacggaaagtcgtgatcggcagcttagtttcatatggcgctgacacgaaaggtgtcgatttcaacaacgggtggccatgtttcagtagttactttggctgggcgagagtacacgaggcccccatgtctccaagctatattgcgccgaatgtgtgacttacacgcaagtgttgtgggtcaactcgattgccctcgtaggaaggtgttaccagagtctgctcgattgactagggcttgtggacggggaagggataggccctttgggaggcaacacggtcgcgccaaaaggcctaggtcgctcggggcgccaaagttcggatgtgggacaactttttagtgtgcccaacgctgggtataatacttgctcccaaatacatcgcccattgaaggaagccctaggatggaaaaggaccacacgggtaggctcgaataaggtccgtagcccgcatgccgagcggtttgccgaacaagggagagggggtttaaagttcttccacactcctatgtgcccatagacgacaggaaggggccatggtaaggagtgatatgagaagtagaatggtgattggagcactatggagaagggtgtggggcgcggtatcaagttccgaaacaaataatcaccacaatgtcgttgtggaaagagagggctgtgggggaaccgggaggactgtttagtgggaccaatgaaattaattagacggggcgatcaaatgtaccgcgaaagaactggggttgtgagagcaagaggggaataggatacactgaagcagagtatgcgtatgcagcaccaattggatagttcccctttgctgtgggaaaggccaattcccagtaattagtgcgacacgcggttgggcaaataccactaatgccgaggggcaaatacttacggaggcgaataggcccccgatcccaacccgattttcaggtaagcacgaaattgcacccttatagctgtgggatccggtgcacacggtgccgagtctttaaatttaggcaatgagcccgagccggacaaattagtggacg

SEQ ID NO: 491354 - DNA, 1245 bp, Homo sapiens
  misc_feature (16)..(16): n is a, c, g, or t
  misc_feature (24)..(24): n is a, c, g, or t
  misc_feature (27)..(28): n is a, c, g, or t
  misc_feature (31)..(31): n is a, c, g, or t
  misc_feature (34)..(36): n is a, c, g, or t
  misc_feature (38)..(38): n is a, c, g, or t
  misc_feature (42)..(42): n is a, c, g, or t
  misc_feature (370)..(370): n is a, c, g, or t
cccccccgaagacggnaactttanttnngtngannnangccntcggccgcgctggtgaacaggacccgtcgccatgggccgtgtgatccgtggacagaggaagggcgccgggtctgtgttccgcgcgcacgtgaagcaccgtaaaggcgctgcgcgcctgcgcgccgtggatttcgctgagcggcacggctacatcattctagagggagcagtctctgcgaagggcatcatcagtacacattgcataccaggtggcttcggtgcggcagcgggcccatgtctgctcacaggagtggctactctcccgggggagtcccgatagtcgtcttatacagacagcgtacggagcttgtctcagtgtgccatgcgngtagtgggcgagtgaccaaaacgggcgcgcgacgtctctgtggtttatcgggccggcgcaaatagcacaaggctcgcaaacgcatgcgaaagcttatgtgggctacatatgttcgggtcacacttaggttcgtgggcccacacgattgcccatgtgacggggtatacaaagtgccgtggtgggcttgggactggggacgtgcatgaaatggcccttggggatgcacacacgggttgcgaccaaaaaggccttggggcacactgggagctaatcgatggggacacatctgagtttgcccaaccccggatgtattctgcgcacaaacgaaggcaccatgaatgaaacgcaaaagtaaacggaaggccaggtagttgatagcgtcctaggaccagctttcaccagagggttcctctgacaagggaaaccgagggtatcacttcgtttcgccgtttacaggaggcgccaaagtgaattggacatgaccgtttgatggggactatgggcggtaaggctttggagtatgggtgacctttggcagaaggcgtcgtttagtggcccaccggaggacattgtgtgaccatgagagtcgcccaattcccttttgaaaagaaagcggtgcttgggactcctgggagaaggaattaacgcacgaggacaattgtacttgactttaggaatggcggcttaccattaactgtaaggcgtaaaaacaaatagtgttttgcggcccccaattttgcattgggttgaaccggggggggggcaattggttggggtgggaaccaaacttcgggaaaagttggcccgttggttggaagagaagtgtccggaatttcgcggtgcttaagatggtaggaaggaggaactatcggggc

SEQ ID NO: 491355 - DNA, 162 bp, Homo sapiens
tgttgggggttgtgggacccaggaatgacacttgtgtcctcatgatgttctcacagtcaagcagaattgaccacccctcccgcagagtgggagaagggtctcctgtgtgtctgtcttcaccgcaaaggctgcttcaaatagaagtcagattgtcccttcaca

SEQ ID NO: 491356 - DNA, 144 bp, Homo sapiens
  misc_feature (2)..(2): n is a, c, g, or t
  misc_feature (31)..(31): n is a, c, g, or t
cnggcagaaaatgtaggacgactcagagagntctgactgaagcgtggtgctcacgcctataatcccagcagggaggccaaggcgggaggattgcattacccaggagggccagcttagtaagaccctgtctccctgtctctactt

SEQ ID NO: 491357 - DNA, 1238 bp, Homo sapiens
  misc_feature (16)..(16): n is a, c, g, or t
  misc_feature (24)..(24): n is a, c, g, or t
  misc_feature (27)..(28): n is a, c, g, or t
  misc_feature (31)..(31): n is a, c, g, or t
  misc_feature (34)..(36): n is a, c, g, or t
  misc_feature (38)..(38): n is a, c, g, or t
  misc_feature (42)..(42): n is a, c, g, or t
cccccccgaagacggnaactttanttnngtngannnangccntcggccgcgctggtgaacaggacccgtcgccatgggccgtgtgatccgtggacagaggaagggcgccgggtctgtgttccgcgcgcacgtgaagcaccgtaaaggcgctgcgcgcctgcgcgccgtggatttcgctgagcggcacggctacatcagggcatcgtctaaggacaatcatccacgtacctcgtggacggggagtgctgctcccttcgcctgaaggctggtcttccggggatccgtatcgcgtttacatgaaggccactatcttcaagcgattggcaagtagtagcgtccctgttgggggctaccagtgcctagagtggtacgaatcgtggtgctgcccatggaagggagaacgcgctggggaggacactgtgagcgatagctggtgcctgggcactcgaggggatacttagtgcccaccggtaatatctctcgcacaaacgctgagatccaagaaagatcccgtgtgaactgctgccctccggctccaagcaaggttatctcctcagacgcaacagtagcgtgtgcgctgtggtcgttggatggccctggcagtgatgcgcccgaattgagcaaacccccatcttgcaaaggcctggccgggactgttaccaggaaagattttaagcgcagcagacggaactgacttgggccacgaaagataaccggggggttgtgggcccatgaattcctgtggtgttgatgccatcccgtttgggaagggtggcaagcaacgcaagacacatcgtagcaatggccacgtcacaccaatcccggcaggaagaattgcgccccatggttgggcccgcaaaaggttgggatccttcatttggactttgacccagaccgggcaacgtgggaaacgttcttcccggggggaaacccaaaaggacctggtgccatggaaaggaacaccggaaggaacaccttaggctggccattgcaagggggtgctcttccaacactaagaggagtgtagccggataaaatggcccaaccatgcaaacaaccactagacacacaaggagggagggcgtgtacgagacccacaacgacaaatgtagtcacatcggaagtgggcacccccacgtgttgacccgaggtgtaccacccccgagcctttcaagtgtgacacacaacagtggagggcaccacctaaatagagagaggaacgacgcagaacaacaaaa

SEQ ID NO: 491358 - DNA, 396 bp, Homo sapiens
gtttctaccttttggctattatgaataatgctatgaaaattcatatataagtttttgcatgaacatatgttttcaagtctcttgggtatgtacctaagagtggaattgatgagtcatatggtaactctatgtttaacttttttgagtaactgccaaactgttttccgaagtggttacaccattatgtaatcccaccaatgtatgagggtttcaacttctccatatcctcgccaatattcgctctcatctgtctttcctctcttagttgtcctagtgggtgtaaagtgggtctcattgctgcccgccggactggacgtctccggggaaccaagactgtgcaggaaaagagaactagtgctgagggcctcaataaagtttgtgtttatgccaaaaaaa

SEQ ID NO: 491359 - DNA, 107 bp, Homo sapiens
ctagacgaagttggtggaatctccagccatccccaggattccctgtcccatgcctgagacagtggtgatcaggtcagaagagcaggagcagcaccacgaattcgccg

SEQ ID NO: 491360 - DNA, 976 bp, Homo sapiens
  misc_feature (976)..(976): n is a, c, g, or t
acatatcaatatctggattccttagtcctgctggactgggctggagcctaagaaagtggcccccaagtccttagtgagctaaagctgggtctgaaattggtcagtggggaggggtagcttttctttatctttttctttttcttatttctttttttttttgagatggagtctcactcttgtcacctaggcaagagtgcaatggcacaatctcagctcactgcaacctacaacctcctgggttcaagcgatatctcctgcctcagcctcctgagtagctgggattaacaggcacacaccaccaggctatggttaatttttgtatttttagtagagatagtttcaccatgttggcaggctagtcttgaattcctgacctcctgacctgcccacctagaacctcccaaagtgctgaggattacaggcgtgagccaccaaacccagtcagggaggcgtagtttatctttaactattaaatataaacccaagtttattggcagactccctttagactccctttgcctccccatctggtgctttcttggcatctacaccccaggccctgtgttggggctgcagggggaagcttgtgcacctgagatgaggctgaacgggacttggctctctgctcccttcttcagtaagccaggagcccgccctcaggcccagctctggcaagaaggtggtggaaattcctggtgccaggactacaggaggatagggcaaaacaggcatgctcgggcgtgctggtctgctgtgactgtctacagttggcacagctgtcttacttattcacctttgaggtttctaatacggttcacagtatgctcttatagctaaagaaatccatttgaagaggggcgattaagcagtagcgcgcagggggactatgcccgggccgacaagtctctgggactgactagtaaggtaacactaatgatatgtgtactgtaaatatataactttgtaccgactatcn

SEQ ID NO: 491361 - DNA, 125 bp, Homo sapiens
tgagttcatagcacatgctgctggggcatctgtcttaattccagctccttcaagtcaccgtcagtcagtgtaaggaacgcttccatgtccgcctcttgtcctcaaaaatgggctgatatttctca

SEQ ID NO: 491362 - DNA, 439 bp, Homo sapiens
caggacaatgacctggggtcccagctcccctggaggggcctcctcatgattgtttgggggttgatcccagaccaagagtggcgagtgatgtccccctgtgaatcatggccggacctttttgcccctattgtttcagcccaacattatttgacttttccctcagggggggtgggcaaaggaaaagccctgtggttttggggacttgggatccaaagttgaagacccttcagctgggtttgccctgccagtgccacaaagtgccatggcccaggaaaacaggtttttttccatttaggccaggccatccagtggccatcctccgtgtcctcccgcctcctcctggtgtgacttttgaaaaccaaaaatttgttcctgttgactttttttggggtatggaccattgtcctttccccccctcaataaattttgaaacatgcca

SEQ ID NO: 491363 - DNA, 113 bp, Homo sapiens
ccgacggggtggaatccaggtaatggcgagaacccccactcaggactggggacggaagagactctggggaggcttatgaactgtctatggggagcagctaggcggggatccct

SEQ ID NO: 491364 - DNA, 121 bp, Homo sapiens
cccttccacgctccccacaacttgctccttctccagccctgcctctcaattaaaacaatgctttcttttatcttttctttttatattgagacggagtcttgctcctgtcacccgggctaga

SEQ ID NO: 491365 - DNA, 183 bp, Homo sapiens
cccatgggtcttgtacccatcggctctacttgtctctcggctctaccttgtctctcggctctaccttgtccctcggctctaccttgtctctcggctctaccttgtccctcggctctaccttgtctctcggctctaccttgtctcgttcgttatcggaattaaccagacaaggtagagccgcag

SEQ ID NO: 491366 - DNA, 794 bp, Homo sapiens
ccttctcgccctccaaaacgacactcatgcaccagtacctgcttgaatttacaactgtgaaaagtgtgtgtggaatgtatctggctcatacacgtagtgatcatatcataaaccatggcataattataactttgtacagaaaatttaatacataggacactggattgtcccaatgaatgaataacccttcagtgcgatgaggaatgtcatctcagcattcttgactttcctagcgaatcatacatagcattcattattagctctttgcatggggctcagctatcacatcattctagaacgcgaaacaagcttcagtaatgcgttgtacagccctgcagctaccttctccttattctttgctagcatcctggtggttctctcttgcctcttaatacgactacggcacaagaatggggcacctccaatatatgaagcacatcataagctcgactaattatcctaactatatcatctacacctcctttcaccctagtacactcacgcatatttactaaactggctactggggagggcttctaagacatgtgatgttattaggtgcctagattagtaaacatgatttggaattgatctagtgtctacttctatcgatggcgatttaaagtacctgtttgttcgacacagaatcgatgggttgagtttggtatggctggtcagatattaaatcatagtgattcagcgggttaagttgattataaatgggtactttgttccaccttttgggtactaaaattatgttgctgtccaaggtaattattacataggatgtagag

SEQ ID NO: 491367 - DNA, 142 bp, Homo sapiens
agtttggggctgacactgtccaaaccttcttctctcctgtcaacagtggaccagccccccaactataagatgctacaaggaggagcacgaggtggctgtagctggagggagcaccacaaccctgctcccccgacgtccaccg

SEQ ID NO: 491368 - DNA, 806 bp, Homo sapiens
  misc_feature (50)..(50): n is a, c, g, or t
  misc_feature (65)..(65): n is a, c, g, or t
  misc_feature (73)..(73): n is a, c, g, or t
  misc_feature (93)..(93): n is a, c, g, or t
  misc_feature (95)..(95): n is a, c, g, or t
  misc_feature (97)..(97): n is a, c, g, or t
  misc_feature (99)..(99): n is a, c, g, or t
  misc_feature (101)..(101): n is a, c, g, or t
  misc_feature (104)..(106): n is a, c, g, or t
  misc_feature (113)..(113): n is a, c, g, or t
  misc_feature (120)..(120): n is a, c, g, or t
  misc_feature (156)..(156): n is a, c, g, or t
  misc_feature (158)..(158): n is a, c, g, or t
  misc_feature (171)..(171): n is a, c, g, or t
  misc_feature (176)..(176): n is a, c, g, or t
  misc_feature (178)..(178): n is a, c, g, or t
  misc_feature (180)..(182): n is a, c, g, or t
  misc_feature (187)..(187): n is a, c, g, or t
  misc_feature (346)..(346): n is a, c, g, or t
  misc_feature (360)..(360): n is a, c, g, or t
  misc_feature (373)..(373): n is a, c, g, or t
  misc_feature (379)..(380): n is a, c, g, or t
  misc_feature (382)..(382): n is a, c, g, or t
  misc_feature (384)..(387): n is a, c, g, or t
  misc_feature (389)..(389): n is a, c, g, or t
  misc_feature (399)..(399): n is a, c, g, or t
  misc_feature (406)..(406): n is a, c, g, or t
  misc_feature (408)..(409): n is a, c, g, or t
  misc_feature (412)..(412): n is a, c, g, or t
  misc_feature (435)..(435): n is a, c, g, or t
  misc_feature (439)..(439): n is a, c, g, or t
  misc_feature (443)..(443): n is a, c, g, or t
  misc_feature (460)..(460): n is a, c, g, or t
  misc_feature (601)..(601): n is a, c, g, or t
  misc_feature (620)..(620): n is a, c, g, or t
  misc_feature (627)..(627): n is a, c, g, or t
  misc_feature (657)..(657): n is a, c, g, or t
  misc_feature (660)..(660): n is a, c, g, or t
  misc_feature (666)..(666): n is a, c, g, or t
  misc_feature (674)..(674): n is a, c, g, or t
  misc_feature (677)..(677): n is a, c, g, or t
  misc_feature (730)..(730): n is a, c, g, or t
  misc_feature (800)..(800): n is a, c, g, or t
tttttttaatttcattcatttattaaatatttacaatttttttatataanaaaataaaaacatanaaagttanaaatataaaaaatataaaanananananatnnnaaaaacntgaaaanggtgtccactttggattcttacatgaaacgattcantncacattgtaatcntaaananannnaaaanggtttcctatttttttttttattttgtaccttacaaaagttaatgcattagacacttcagatgttaactgctctaaacaaaactcctaagtctgtcctatgcaatatatattttatatacatatatatttttacatagaatactcacaaagtgcaagcnaataataacattanaaaaaaaaaatanatatcnncnannnnanaatatcaaanaattcangnnatnttttttttttaattaacattaanagantttntttttccacttcaaatnaatcatatttctgtcatctccaacctaagatattttttagattgtctccgctattctttgattcaaaagcgcaattacagaaactatgaacttgacctaattctggtttttgacaattatgagacagaaataaagaaatgnaagcagttcttttctttgnacactgnccattttttaattagcatcatcctctatgntgntggtgntttcacantgngctctcctgtatgtcaaaatcattctgggtttccaggtaaatggacaaaggangatttgccttcagtgtctagaaggcaatttactttttcagctgccttaattacctatagtttaaaggaanggaatg

SEQ ID NO: 491369 - DNA, 109 bp, Homo sapiens
ccaattgttgctcttcaagcatcaaacccacatcaaattgagttccttgtctcccaaacagaatctaattctgaaaacagtcccatcatactttctgaaccctggccct

SEQ ID NO: 491370 - DNA, 109 bp, Homo sapiens
  misc_feature (104)..(104): n is a, c, g, or t
ggtgtcccgcctcttccgctctacagcggaggtggctgtggcggtggcgctggtggctgcggcggcggcggcggcagagacgcttggtcgggtcgtgtctgggncagcc

SEQ ID NO: 491371 - DNA, 340 bp, Homo sapiens
tcttatctatttatctagaattttaatacagctccgaggtgtgaagaatattatcacctaaattatatctcaggaaaaagccaggatcgggtataatccagactgtgattgtaatacacacagggtgctgtgtatgattgaaactactgactttctgtggcccgtatgcagcccagctaacctgcctcagggaaaggtgttaatgctgtgaattggcagagaagagagctgtgctccatagggtgctgccggtgctgtgctccctagccttctgttctgtcttcctccttagccagaacgccactcccttcccacatccccttcttctctccgccaagat

SEQ ID NO: 491372 - DNA, 195 bp, Homo sapiens
acaggattcgggaggctgaggcgggcagatcacctgaggtcaggagttcgagaccagccgggcaacatggtgaaaccggagcgtctactacaaacacagaaaaattagctgcatgtggtggcacgtgcctgcagtcccagctaagcaggaggctaaggcacaaaaatcgattgaacctaggatacagtagggaga

SEQ ID NO: 491373 - DNA, 212 bp, Homo sapiens
tttttcatttttagaacatgtccagtttcaccatgtgggtcctcgtgtgcatctcctgacctcacgcaatccgcccacctccgcctcccaaagtgcagggattgcaggcatgagtcaccatgcccggcctttaaaatttttttttttagagacaggcactcaccatgttgtccaggctggccttgaactcttgagccacatagatcctcctg

SEQ ID NO: 491374 - DNA, 356 bp, Homo sapiens
cattgaattgggagtcttgagagcaggtgcccagagaggtgtgtcaagctccatgcccagccctgggacacaggcgctggcctcagccaaggttcttaaaccttgggatgggatggctgggcaggcaggaaaaggcaccagccagtgttactggggtttctttgtgggttctgggggcatcatctggctgatagacgatgggtagggtagggaaatggcttcagtgtaagatgggagctgatgcccttccttgggacatctgggatgggctgtgtggactttggttctgttcccctccaagggccagttacaaggccagcaagagcccccgtcagtcccactagctcactcactag

SEQ ID NO: 491375 - DNA, 289 bp, Homo sapiens
tcctggaataccacacaagcagaaagagtgtgcagtacaccaaaaatgtagaattgtataatgaatgtatgaaaatatccaaggccgggcacagtggctcacgcctgtaatcccagcactttgggaggccgagccaggcagatcacttgaagtcaggcgttcgagaccagcctggccaacatagtgaaaccccgtctctactaaaaactacaaaaattagccaggcttagtggcaggcgcttgtaatcccagctgcttgggaggttgaggcaggagaatcgcttgaacc

SEQ ID NO: 491376 - DNA, 979 bp, Homo sapiens
  misc_feature (225)..(226): n is a, c, g, or t
  misc_feature (229)..(229): n is a, c, g, or t
gaagatttcgacaaccgaatggtcaagcatgtgatcgctgagtttaatgcgcatgcttataaaggacatctatgagaatcctgagagcttgtatagatgctctgccgtacctgcttgttgaacgatgcgtacagcgtagccctctgcattcgagctagaccaggcccacgtaattgggagattcgagttgcgtctcttatgagagggtacatctgaacattcgtnntanctccattaccgtgcccgattgagactgaatgctgacctgttccgtggcacctggaccagtagagaaagcccttcgagatgccaaactagacaagtcacagattcatgatattgtcctggttggtggttctactcgtatccccaagattcagaagcttctccaagacttcttcaatggaaaagaactgaataagagcatcaaccctgatgaagctgttgcttatggtgcagctgtccaggcagccatcttgtctggagacaagtctgagaatgttcaagatttgctgctcttggatgtcactcctctttcccttggtattgaaactgctggtggagtcatgactgtcctcatcagcgtaataccaccattcctacctagagccatggactactaggagcttcagctacctattctgacgaaccagtcctggtgtgcttattcaggtttactgaaggcgagcgtgccatgacaaatggataactaacctgtcttggcaagtttagaactcactaggctatacctcctgctaccccgtaggtgtctcctcagattgaaagtcactttggacattgatgccgatggtatactcgaatgtctctgctgtggacaatgagtacggggaaacaagagacacacagattactatcactaatgactaagggccgttctgagcaaggacgacattgaacgtatggtccaggaagctgagaagtacaaagcgtgcagatgagaagcagagggaccccgggg

SEQ ID NO: 491377 - DNA, 188 bp, Homo sapiens
cagagtgctgggattacagacgtgagccacttgtgcccagccacgaccttctaagagctttgctttatagtttgtttttgacatgatcttgaaagcaatttaattctaaaagtggggtttggttttggctcagtagattttcagtcatttttacggttttatcttcatgatttctcttatatatcagg

SEQ ID NO: 491378 - DNA, 211 bp, Homo sapiens
ccatgtataatgtaaattccttcagggacacacctgttaatatgaatcaccacctttctagcacaggggtattatgcgcatcttgttgcaataatcaccaccggagacattaggatccctgagacacctgcctcactcacttgtcatgtcttgcagtgcagtgctgaacagatgtctcgaattatccaaggctacagtctcgagcactacg

SEQ ID NO: 491379 - DNA, 1151 bp, Homo sapiens
ggcgtggcgagggtgcagttgcggctggtgtgctggtgtgcttggcccccagcggcttcctcgtgcctcccggctgcccttcagctgatggaagatgatggactgatgtgcacagatgcggactgctgccaggcagagttcacctgccttggaggatttatgttcagcacaagattcatgaatgtgcctgccagcgggcccctccgtgattgcccttgccttgccacaccctgaccaacacatgcgtttgcttgtgtgccatggagtgtggttgcctggcatgcatcaagtgcccagagtgatgcccattcacttgttgtgccacacatacgtgtgttgagacggcggagacatcttcttgtgcacgcattgacattccagccaactgcattcttgaacctatgataaggttgggtggtgcaccattcaacagacgtgtcatctgttggctttgcatggaggtgcggggatccttggggacgactgggtggaggaatgcgcctgatgggccccggggggcaaggaccccacagaccaagcaatgtggtgcctttggtgggcctcagcaatgaggtgagcgagttggagccaatgtgcccccatgagttgaaaacagctaaacttggggttgagacaaaatgcgaattgggccctgcatactttgattgtttgattagcaggctatgggtggacccaagcgaaaagaaacccttttcagatgaaccgtgtgtagcaaggacagaatccctcacaaaggtgtcccaccaacacattgtgatccaacatacgaacaaagggcaaaaggccatcggccaaagggacaccgaagcgagaaggattgcaacaaggactccttgattggtggtgccatacccttttccacctggacgaacccaaagtgaggacgcaatccaaacatcaaatatcccgagtggagagccaaactcgggcagggagcaaccacatggggagttagacggactgccccccgttaacacacaggattggcgtacgcaaaacggctggtttgggtgcaaaagagagccattacaccagggggagaaaggaccggaggagtttgaacaacctttggagccccacgagaagagaaacgttccaaaaaaggttagttcatcagaagcgcccgtttg

SEQ ID NO: 491380 - DNA, 945 bp, Homo sapiens
gctttaaagtgcgggccgggccgggcgtccgagggtctggtcgggagtcgggccgcgtctccgcagcagccctccgcggcatgaggcgctgccggcgcccctgccccgcgggacgtggagaaggtggaggaggaagaagccccgttgtcgccaccgttgcatgacccggcgctcctgaggccctaccccacgcccggaccctcgaggcccgccgccggggtgccgccactcgaggcatgggggttcaggcgctaaggagcgccccgtccctccgggggccccggggcgcgtacgcgcttggagccatgcccgggctgccccggcgcgcaccggaggaccctagagcgagcgacgatgggggccatggaggccgccagcggctacacggacctgcgtgagaagctcaagtccatgacgtcccgggacaactataaggcgggcagccgggaggccgacgacgctgccgcagccaggcgtagccgacgcaggcggagacgccgctggcgacgaaccattaacactgagtccggggccaagacgcaagtatcaggaggactcggagcccgagcgcagagactatgaggagcagcagctgcagacggaggaggaggcgcgcaaggtgaaagagcggcatcacagacaagatgacgccatccttacagccaggaacgagtgcgccgagaatcgaaggccccgcactggaagaggtgggtgtcacaggccaggacaagggccaggacaacagatggaccacggtgggacggggacccccaaaggaccgacaacggacgtatgaggcgaagggggacaccgaaaggggcccaaggcgtgaaacagcacggacccggcaaggaaccggaccaccccaacgatagtacagggcaaagaaacacgaatggatcgacaaagtagaggcgcgaagaccagggggcgagcacggaaaac

SEQ ID NO: 491381 - DNA, 285 bp, Homo sapiens
agtggcccgcccgggccctttccctcccctcaggttttttaggggcaaagcccccgccccccgtttggggtggtgaagtgggggttcagggggggtgctccccccctcctttaaagggcccccccattttttgggcccttttcagggggtgggaggtcctttgggccccctaggggtctttcctgggaagtgttttgggggggggtccccggggggctggccccaaaaacccttaaaaaaggggggtcctttactggggttaattaaacggggtttcccccttga

SEQ ID NO: 491382 - DNA, 132 bp, Homo sapiens
ggacccagcctctatccccagcgaatttgtgaaatgtaaacatcatgggttttatggcgtgttccatttgagaaggcattttggtgtggtccgatgaagccttggacgaggcgcgtcggacgctgggcgagc

SEQ ID NO: 491383 - DNA, 387 bp, Homo sapiens
  misc_feature (280)..(280): n is a, c, g, or t
cacgttgagcccaggaattcgagaccagcatgagtaacattagcaagactctctctaaaacacacacacacacacacacacacacacacacacacacacgacacacacataaaaccagaatactcaccagcaacccaattttgtgtccgaattgcaatctataaatgtctccaatattagtcagaggaccattatatttaatatttagagcgaccggagcacagtggctcatgcgctgtactcccaagcactttgaggaggctgacggtgggcagactcncaaggctcaaggagtgtgagacccagcctgacgcaaaagtggtgaaccccctagtctctactaaacaaaaagaaaatattagccaagacctggtggcattgcgctcg

SEQ ID NO: 491384 - DNA, 365 bp, Homo sapiens
cactgagtgttaccaggagggaccagtttttcttcatgaaagcttcttacctggtggatagactgatcagccataacatgggtagaagtcctgcgctctccattgctccatcgctggctccccctgggagtcatgccaatcatttggtctggtccccgacagaagtatccacagagccccacacaagtttcccagcatggtcattgcatagacaatcacagccaccttcccattggctccaagccacacctggacccctgcctctctggcggacctagcagggagccatcaggtgtacgactcacggacacagatgctaacttctcagctgggagatccactcggaaaccattcacccacacacc

SEQ ID NO: 491385 - DNA, 521 bp, Homo sapiens
  misc_feature (179)..(179): n is a, c, g, or t
ctgctcagcttcccaagtagctgggactacacagttgcacactcagcgggtgattttttcagcatttgaagtcgagacggggtttcaccagtgttgcccaggctgatcccgaactcccgagttcaggcgatccatctgcctcagtctcccaaagcatcaagattacaggtgtgagccancacacccagccctgtttgggtttcaatactggcctttctgcttattaactgtgtgaccttgggcgaactccttaacatctgagaaccttagtttccccgttggtaacagggttataattctcagctcacaaggttattggggtagatcacttcacacagagcatgcttaactaaccagtgagctacttattatcaaatcgtaattatttgttcccaggattctctttcccactagcccctgagtttctttctttcttttgtgcgtgtgtgtctgtgtgtagtgtatgtgttgagtatagtcttgtatttgagacagagtctttgctctcttgccaagactgg

SEQ ID NO: 491386 - DNA, 195 bp, Homo sapiens
atctgcctccgtggttagtgcgagcgtggggagtttgacgtggggcggtacacctgtcaaacggtaactgcagagtatcctaccggcgagctcagggaggacagaaacctcccgtggagcagaagggcaaaagctcgcttgatcttgattttcagtacgaatacagaccgtgaaagcggggcctcacgatccttc

SEQ ID NO: 491387 - DNA, 161 bp, Homo sapiens
cccactatggctcttgaagcatgatggcccgggcttcagagaactcaggcaaccaaggtcgaatcaggtcttccatcgtaacagttgccaatgaattaacaagcacgaggatactagtgctgagagcagcctgctgcaagcaggccacggcaattgatacg

SEQ ID NO: 491388 - DNA, 833 bp, Homo sapiens
tggcggacatcttgtggatccttgagagtggccgggccggcagagcagtgtggccgaggacaccaggtctgttctcagagacgatgtggcctgctggagactgatctgccgccatgattgtgatgtgcttattcatctataatcacaaggtgggagtgtgcttcatctccctgagatctacctgatgattgacagactgtgtgatgtgaactgcatgttgggatgcctattctggagtacaagttgttcatccatttgccctgtgtcatgcatggtgttgcgcatgcaccctgtacaccaacgatttgctctgcaccatgacttacttccacggtataaagccgtggtccaaccattaattggcttggcagcaagtacaccaatgcaggaattgtcaacgtcttgccattggtactttctgaaaatatccctcgtataagagtgttgtagacctggtgaattggtgctttgcctaccacttatgagcagagactccagcctggatgggaaacacacagtacacagtgaaaccaatattttagttgctcagtaatacttgaggactgacttggctattgatgcatatctaagcaactctttgtgcatacccaacatgagatttcccgacgaacgatgtggctgacggctagcaaacaaccccttccactcaaccggccaggacaaggggccaatcgaaagaaaggtccatgcgatcacgacacaacagaggaatgaagccagacaactggattccaccagcccagggtaacctggggcagatttgggtggctggaagacgagcggtatccaagtattcggcgggaaatgagctc

SEQ ID NO: 491389 - DNA, 191 bp, Homo sapiens
  misc_feature (47)..(47): n is a, c, g, or t
  misc_feature (51)..(51): n is a, c, g, or t
  misc_feature (83)..(83): n is a, c, g, or t
  misc_feature (96)..(96): n is a, c, g, or t
  misc_feature (152)..(152): n is a, c, g, or t
  misc_feature (173)..(173): n is a, c, g, or t
aaaaaatacttattgaaagaggatatggctgggatccaaaagcaaanaacncttaaaaaggctccgaaatatcactcctcttnatactgccctctncttatcgcctgggccttgcattgcaagatgcagatggctcggaatgtctggttctnattgtagcttctgttataatnctctctactttagagatc

SEQ ID NO: 491390 - DNA, 662 bp, Homo sapiens
ggtgacagcgtttaacaaagcttagagaaacctccaggagactgctatcatggcagagaagcccaagctccactacttcaatgcacggggcagaatggagtccacccggtggctcctggctgcagctggagtagagtttgaagagaaatttatgcacgtgccaatggttgagattgatgggatgaagctggtgcagaccagagccattctgaactacattgccagcaaatacaacctctatggcaaagacatacaggagagaggcctgattgatacgtatatagaaggtatagcagattcgcgcgacctcgatctacttcctcccgtatcgtcccctgcgcgactccgagcctaccttcgcctgatcgcaggctggatcccactcgctgctcccctcgcttagagtcagctctcggactcacggtcatacccccttctcgccgcccgctcaggcaccttaccgccctctgctggcacccccggtccataacgcctcatgtcctcgtcctccgcacgcctctcgccagcgcctcgctcgccgccctcttcttctgtgtatggaccgaccagccttgtcacgcacgcccctgtccttgatactctctagattgcaacacccctctgtctctccactacagcctctaccggcccgcgtctgtcct

SEQ ID NO: 491391 - DNA, 416 bp, Homo sapiens
  misc_feature (119)..(119): n is a, c, g, or t
tgagatactttgcttcattcacaaagaacagagtcaagaagcagtgccctctggaattagtgtgaacgtgtatgtacatcactattaaatatattacttaatatattctaagttgcttntggagcagtatactgttgttttaaaaatgcaagattcagacaaattttaatattgtctcattaaaataatttaaataatggtataaaatatctatatcattaaaataattttccatagtgtttagaaaccatgaaaaagaaaacatagcaggagaaaatatgacaggaaaagaaaacctaacaaagcccagaacccacagttaaccaacactagactgacttcgttattacccattctttgttagtattggatagggaattaggataatgagccattaggcagaactgaactgagcc

SEQ ID NO: 491392 - DNA, 588 bp, Homo sapiens
  misc_feature (538)..(538): n is a, c, g, or t
ctcgaggaatatcttcatggtgttctctgtatttcctgaatttgaatgttggcctgtcttgctaggttggggaagttctcgtggataatatcctgaagagtgttttccaacttggttccattctccctgtcactttcaggtacaccaatcaaacgtaggctaggtcttttcacatagtctcatatttcttggacgctttgttccttttcattcttttttctctaatctgtcttcacgctttatttcattaagttgatcttcaatctctgatatcctttctcccacttgatcgattaggccattgatacttgtgtatgcttcacgaagttcttgggctgtgtttttcagctccatcaggtcatttatgttcttctctcaactggttattctagttagcaatttctctaatcttttttcaaggttcttacttccttgcattgggttagaacatgctcctttactcggaagaatttgttattatctgccttctgaacctactctgtcaatcctcaaacttatctctgtcaatttgttcctngtggtgaagattgtgatcttggaagaaaaaaggttctgttttggaattcc

SEQ ID NO: 491393 - DNA, 700 bp, Homo sapiens
agcgggggttttccggagcctccggtcgcgggtctaagaggactagggcgggagcggcgcggaaaaaagagaggactgcgttttggggcgttctgtcagaggggaaggacgtgtggattggagtcagactgcactcccgccctatttctgcaagtagaactcactgcctttagaaacggtcttctgaggctctgttgggaggctctaactgtattacagaggacacatttttgtttgtttttatgtgaaacattcagaagttgcttgcatcaagtgctttacaagtacactggttttcaaactttttaagttgaggaactgttttgatttttgtaaaaatagaactttacttggaagcccaaggtaggcagatggagatggcgtttttaatttgcgaatgtattctataaaatcacatctgtactgaagtactagaaataattgaggataagtcagatgtgaagagcaagaacttttgaaataggattacaactgaaggtttccatcttacattagcttcagaaaacaagaaaatgctatctttggtttggttacatagtaacaggaagtccttattcaagctagaacttgctgatgtgaacagtttcataagggctctccttaaaaagattcggtacaccaattttaatcggggaaatatacatatgagtatatctcatgtgcatatcttaaagaaaga

SEQ ID NO: 491394 - DNA, 362 bp, Homo sapiens
agccaagtcaagagtgggacatgagccctgagaagacctcaactaggagtctgcactacaccgagtcggactggtgacctcaacaggacagagcttcaaggaggcgcgcacggagcggtcgcctgcaggcctcacggagaagcttctcaggctgaggagtcgtctccgcctccggagagatccggagactggaggaagagctccgcagctgaagtccgattcccacgggccgaaggaggacggaggcttcagacactcggaagcctttgagcactcctcaaaagagcagggactggactcagctcacacgtgagatgggtcctcatcaggtgctctcgcgcaaccgaacctgagtcctcctg

SEQ ID NO: 491395 - DNA, 150 bp, Homo sapiens
aacgaggatctactaagcagagaggtccagtagagcgggatctgacgccacactggttgaaagagggacctcagcacacaaactggtaatgcctagacagctgactgtcagtatgcagaggtacgaacagctacgggccactgcaaggag

SEQ ID NO: 491396 - DNA, 546 bp, Homo sapiens
atcagttgtggttcgatcgataccctggcgcatgagcctaacgcgctgcttccctcaaggtctctctcgtcttgtgccttctatcgcgcgccaggatcttgcttatttcggggattcatctgtggggccatctgatggtctggatcatcatcggccctgttccattatctagcctttctcgggtcgtatgtataggctctcagccccaagtcgctgcggaggagcagctctaaagatagaagatcttggagctctttgcctgtccgacggtggcctcacacagccgcctgcctacttttgcgcgccgtgagggaaggggccaagctgcaggactacacacagtcattcatgttcgtgtccacacccctgtgggtggctgggtgtgcgtgtgtgtgcttgtgtgtgcgcacgtgtcggcgctcacacacaccatgctagcccactgatgcacaccagcccagggtctggcagtctttgacagcgtggggccgtctcacctggagccctggagagatctatgcttgtataactccgagggcatatgac

SEQ ID NO: 491397 - DNA, 621 bp, Homo sapiens
  misc_feature (410)..(410): n is a, c, g, or t
  misc_feature (498)..(498): n is a, c, g, or t
  misc_feature (524)..(524): n is a, c, g, or t
aatgaaagggataacaaaacaaattaaatagtatctgaaaacttcccaagtctatcaacagatttagacatctagatatggaaagctcagagatctcaaacagatactatgctaaaagatcttctgcataacacattaaactcaaactgccaaaagtcaaggacaaagagataattctaaaaagagcaagagaaaagcatctagtcacttataaagatagtcccacagactagcagtgaatttttcagcagaaaccacaggagagaatagggtgatatatttaaactgtcaaaagaaaaaaaaaaaaggaggaataaagtattcctcagacaagcaaaagctgtgggaatttgtcaccactagactggccctccaagaaatgcttaatggaattctatacctggaagcanaagaactatatctactataatgaatacacaggaaaatagaaaacccactggtaaagctaacatacaaataaggaagggaaagacacanatgttaccactacagaaaaccaccanaccaaaacattatacagtaagagagaaagaaaggaaccaagaatatgtcccccaaatcaattaataaaaatgactaaacacatatcaatatctcttt

SEQ ID NO: 491398 - DNA, 382 bp, Homo sapiens
caggtcaagacacaatggcattttgttagcccatcaatgctgatatacactagcgtagatagcagatctagctatatagtatccttatatctagtagaactttctacatctgtttatccagtcgactgatacccttctatggaggtcgcctgaaacctggatgactccatttccacattccatttgggcctgacaacatagtccttgtttgaaggcattgggacccttgcacgggcacagaatccaggatctccaggtctaagagccttctcctctcctgtcagcaccttttccaggtctcttctgggtgtctgaccaccagtgctgttcattcttcgtcgttgaggcatctgttctagatctctctgctccctttcttctc

SEQ ID NO: 491399 - DNA, 252 bp, Homo sapiens
tgctttgaaaaaaataccctttttccaagtggcgtaatacaaaaagggccgaacgattgcctttccaaacatttgccaaccctaaattggaaatgaaaatttaaacgtaaaattttgttaaaatcgcgtaaaaattttgtaaaaaaagttaattttttaacaaaatgggccaaaattggaaaaaacctttttaaataaaaaaataaaaccccaaaagggttgaattttttttcaatttggaaaattcctttt

SEQ ID NO: 491400 - DNA, 108 bp, Homo sapiens
tgttatattcagtgtctttcatagtgcctggctcagactagctttcggaaaatatttcctttttttattcccctgagacggaatctagctcttattgcccaggctgga

SEQ ID NO: 491401 - DNA, 145 bp, Homo sapiens
tgtcttaacaaagtacctttgccttagtatgtaactaccagaagaatgctgagccaactataaacactcaatatatgtatgttattccaaattgtacttattactgcttttgatactgtattacgtgccaatagtttcccaatca

SEQ ID NO: 491402 - DNA, 379 bp, Homo sapiens
ctattcaactaaagcagacaaggaccccatgctaaataaccccgctttctaacttcctaattctatacattagaattttcatgaaaactttcatttcagccagcataacaccttgcaagaagcaggcagtcaataaatatttgttaagatgatttgaagatataaacacattagctgaacattatagaaagttagcctaagggctcttcactaaacgaaaattacagtgaagcttcctctttttaaccctgctacatatttttaacatgttgtttatttccaagtgaaaggacatagccttgctagctaaaaacacacccttccccacatcactagcatcctgtaaatggtcataaatcacaattggtccttgtcatga

SEQ ID NO: 491403 - DNA, 1363 bp, Homo sapiens
ccaaaaaaatttacaaaaaatcacgcgtctcccccgctcggtagagctttgtcttgttttttcattccgtctttcattaatacatgtaatcccgtgtgtaacgtgcagtcgagcaccgtaccccgtcccgtcatcgtggaacccgtaaagtagcttccaaggaatggtacaccaaggagaagcgaggtcactatacacctggctgtcgcacaggaactcccgtagaccagacaatacgcttcgtcatctctctgcactgggaacgctcgcgcaatgcccactgacggacatgctgggaatacggatacacctagatatctgagcagagcccagtattgtcgctatttgctttctaactctatctcagtgattcgacctgttgtgaagctacgcaccatcgtggagagaccctttggaaatccctggaatgcgtagagttaacaaaccgggagtcgctaacggtgacagagaggataagagaataatatcgaaagcattcccagtaactaggtaggcagttaccgaacccacatttttcatttctcccctacaggaagaaccccgaaagtggccgtcaattgcctaggtacgcaattttccacattttgcaagcgcgtttttagaaccccgatttttccagaagaggttaccattcacccgttcgcggcggaacacattcagtacaagggcacaacataacccacttttgcaggtcattttagagtttagagctttcaatccatctttcgacccaagacggaaactaggttgccttactgagactattacttccacttttgcaactgcacttcgtatcgcccctcgaggcgagcttattaaggggacatttatagaacaaacgacaacacagaccttcggccgaaatctactcccccccaggagaaacgcgcatccattaaaataagtcgcagagagaacaccaacacacgtatgcttccaaccgcgcggactttaatcccactcaggaacacccggagaacgtgggattacattaaacgttaaaccgcaggattgccgcaacagatgccccattcaccttgagaaacaaaacgttcgctttgacaatgtcgaaaagcacacaaggcatccacaaaccagacgagatactaaatacaagattggtcccccccaaaatccggtgctgcacgttactacaaaactttctacaatctatctaccgcccgcccagtttataaacacgacaacttaccattacataggggagaacgagactgaacgagcggtgaccacacaacggtgtgatagttatagataagcccccgcattaaacttaagcgcacaccacgcccaccactatcacataaaccacgccaccacaatg

SEQ ID NO: 491404 - DNA, 240 bp, Homo sapiens
gttggggctgtcatgtctgtgtcagcagctcccggggcgacggtctgtgtgcgtgggaccctctgacgtgtcagagctcccggaccagttgactggcacgtgtctgcagcgctccgtgcaacgggacacgtggacggtgagcaccgagcctgatgtgcgccctggcggaccaattgacacaccaacctgacggaagagagagtatcctagcgagcgatggagcatacctagtaggatatc

SEQ ID NO: 491405 - DNA, 560 bp, Homo sapiens
acgaggggtaaatatggcgataagaagatgtgtatacctctgtgtgttaaaaagagaacactgtgtaaaaatatctctcttatgcaccacaaatgggttttatgaatctgtgcattctaaccggcttcttggggaaatataagtagagcaaagagaaggtaagggagaattatttggggcgcacactggtacacttaaattttggtaaccggagactttgacctatatatatactattaggcttcaatttgctaacttaacgaagctctattcaagtatcctcattttatataaccagaagaatggagtatattactttggggagactgtggtcatgaagtcaggcttttgaggggaatattatataattaaactttttcacatacacggtaacattctacctttagaactgtgtggcatatacacgggagaaatatttcccttcagctttaaatgtgtttttaaaatgaccttatcctatagggtttgttgggaattcaattaaggcttataggctctctatgagatagagaccctttttttttgagtcccctctcttt

SEQ ID NO: 491406 - DNA, 170 bp, Homo sapiens
gatcagctactaggccaggtatcagcacagaccttatcaggagcaacatatcctctacactatgctgatacgggaaagtagctatgactatcctgagagttattcagtttttatctaaactgggtacagacctattactggactggctactgacgtttaccaagaatatt

SEQ ID NO: 491407 - DNA, 530 bp, Homo sapiens
gggaaatggaaaagactcatatcagcatagtcgtcattggacacgtagattcgggcaagtccaccaatactggccatcctgatctataaatgcgagtggcatcgaccaaaagaaccattgaagaaattagagaaggaggcgtgctgagatgggaaagggctccttcaagctatgcctggagtctatggtatcaaggctgtaaagctggttgcgtgaaacgctgggtatcacgcaatgtgaatatctcctctgtgcacagtcacgaggacgcagacaagtacatatgtgactagtcacttgatgcgcccaggacaccagagaactgtatctaaaagacaatgacttacaggggacatcgtcagggcctagaactggtgcgtagatcggtgaatgagtcagctgctgggctgtcgagtgagagtttgagcaacgcttggatatcgtacgcaaccgaaattgggccagggagcctcagcacgaagcatttgcccgttcgtaggcctttaacaacgacagtggaggttgatgaa

SEQ ID NO: 491408 - DNA, 434 bp, Homo sapiens
  misc_feature (12)..(12): n is a, c, g, or t
  misc_feature (32)..(32): n is a, c, g, or t
  misc_feature (41)..(41): n is a, c, g, or t
  misc_feature (65)..(65): n is a, c, g, or t
  misc_feature (110)..(110): n is a, c, g, or t
  misc_feature (132)..(132): n is a, c, g, or t
  misc_feature (167)..(167): n is a, c, g, or t
  misc_feature (189)..(189): n is a, c, g, or t
  misc_feature (287)..(287): n is a, c, g, or t
  misc_feature (317)..(317): n is a, c, g, or t
  misc_feature (377)..(377): n is a, c, g, or t
  misc_feature (381)..(381): n is a, c, g, or t
  misc_feature (409)..(409): n is a, c, g, or t
caattcctaccnaggttaaatttgaagacaanacccagagncataaagttaagtaagttaattgnaatattggagtggagaacttatttgtctacccgaattattgttanctttgtcggacatacaccctanactgcattccctcaaagtaaaatttaagtgtggcnctgtgcctatcctctccccagnggaaagtgaccagaagaggtgtgcagtttcccaggcctggcccatacagacctcccaacaggtgcccccctgtgctgttactccttctgccaactggnagcagatggtgacccaggctctggagaagncaaggcctgaagatgggagatccctaagtggaggagaactgtgccttactgacctaaatntccnctcagtattgttatgtgagaataaatanacttgtgttgaccgtttaaaaaaaa

SEQ ID NO: 491409 - DNA, 460 bp, Homo sapiens
aatgaagagacgggagtccttctcaggattcgtaaatatcaccaaatatgattcttcatggtatctcaggaatactctaaaccggcggatgtaacaccggctcaagggattttctggagggatcaaaaacagatgccacggatggcaaggattacaaggcttcagcctctaccatatcaccaccctcttccagggaggaagacaaattcagcagatcggcttaacgtgatgcttacggctctgaagtgaaagccagcaccacttgggacttcaaagatagcatctcagcggtttcaggtgaaagggtcagcccatcgaagagccggtccttgagtccatctccaccatcacccttagaaaagaccccccggggtgaacgtagtgtgaacttctctctgaggcccattgagattaaagtctctgcagaggcagaagaagcccgggtgtctcttgaggtgac

SEQ ID NO: 491410 - DNA, 352 bp, Homo sapiens
tggcctcaggcttatacttccaattcatctgatcatttgaggtgatctgaagtctgttaggatgagtctagagcagcctttatgctaagactactgcattagtccgttttcacactgctataaagaactaactgagatcaggtaatttataaacaaaagaggtttaattcactcaccattccacatggctggggaagactcaggaaacttacaatcatggcagaaggaaaaggggaagcaaggcatggcttacatggcaacaagagagaaagtgagtgagcggggaactgtcaaacacttttaaaccatcagatcttgtgagaactcactcactatcacaagaacagtatgg

SEQ ID NO: 491411 - DNA, 520 bp, Homo sapiens
  misc_feature (308)..(308): n is a, c, g, or t
  misc_feature (314)..(314): n is a, c, g, or t
  misc_feature (316)..(318): n is a, c, g, or t
  misc_feature (321)..(322): n is a, c, g, or t
  misc_feature (331)..(331): n is a, c, g, or t
  misc_feature (334)..(334): n is a, c, g, or t
  misc_feature (336)..(336): n is a, c, g, or t
  misc_feature (347)..(347): n is a, c, g, or t
  misc_feature (353)..(354): n is a, c, g, or t
  misc_feature (361)..(361): n is a, c, g, or t
  misc_feature (367)..(367): n is a, c, g, or t
  misc_feature (370)..(371): n is a, c, g, or t
  misc_feature (394)..(394): n is a, c, g, or t
  misc_feature (405)..(405): n is a, c, g, or t
  misc_feature (409)..(409): n is a, c, g, or t
  misc_feature (414)..(414): n is a, c, g, or t
  misc_feature (430)..(430): n is a, c, g, or t
  misc_feature (448)..(448): n is a, c, g, or t
  misc_feature (458)..(459): n is a, c, g, or t
  misc_feature (465)..(465): n is a, c, g, or t
  misc_feature (476)..(476): n is a, c, g, or t
  misc_feature (481)..(481): n is a, c, g, or t
  misc_feature (492)..(492): n is a, c, g, or t
ttgcccttaacctccccgttgtgccatcataatgaatgggaatttcccgagtgcatggccctggaggcctgcttcaacatcgagttcacacgcagccacaaaaggaccggcttctccaccagcccctagtccccgtacacgttctggaagcagacggtgttctacatggaggactacctgaccgtgaagacgggcgaggagatcttcggcaccatcggcatgcggcccaacgccaagaacaaccgggacctggacttcaccatcgacctggacttcaagggccagctgtgcgagctgtcctgctccancgactncnnnatnnctgaggccnggntntcccgccctgnacgagnnccagggnctgagngtnnctaggcggtttcggggctccccnttcctctcctncctnccggngggggttttagggccngggctggggggatggganggcacatcgnnactggnttttcataacntatgntttatatggtngctttacgccaaataatcctcagctggg

SEQ ID NO: 491412 - DNA, 797 bp, Homo sapiens
tgtggaaccccagtgaccaaaggatgggccggggactccggggccccagtgcaggcctggatgtgttttggtctcccagtgagaaaaaggtgcccagtggtgtgaacaatggcttcatggggaacactggacccacctggggcagtgggctgacagagtgccccaagggacccaagggagacccaggattccctggtgcccccgggactgtgggaggcccccgggattgcaaggaaatcccccagaagattgccgtccaaccatggggacatgtagagtgtcccccagtggtgaagtgcgatggcccccccatgagaggcaccaggtgggaagatggggccccaagggaaaccacccccgggagaacacagggtttacgttggggctccagggacacatgcttgaggaccccaaaggaaaagacggtgcgtgtgtctgagatagtatccccggaaatttaccggggcagaaatgaagggaaaccaaataagagaccaacgcaagaggagacccgactttggccaagaaaggtgacacccaggacagtccaagggggaagcccagggacatgccagagggtatggccaagggacgacaagcagataagccatcgagctaacacatcacatgggtagaaggcaacaaaggcaaggaacttagcgcaagggacgacacattgtgacccggttgaggcattgaaacaaaacttcatggcattggaatacaagatctgacgtgtacttcctaaaggagcaggtgcaaaactcgtgcacaatacaaagaacatgagggcatgg

SEQ ID NO: 491413 - DNA, 647 bp, Homo sapiens
tggtgggttaaaatactggcactctatttttaaagggactctgtgcatggtattcccgggggcaaatgtgtaaaatttttaatgtaaatcgtgtggtttaaccaaaggactatcaaacctgacagcagctgggactatcgaggtcctcactgggggtggtggactggccacgctgatgctggatgtgggaagccaagccccttcagtcaaagctggggccgatctcagacccaaatggctaccaccaccaagccctgtgtcacgacggcagcggttggcagctcaccaaaaacaactcctttccgtgcctcgacacccgggccagccccagccacccgtgacggggggcgtgctccagggaaagtgccagggccaaaagcccaggctccttcacgcgggcctcttcccgtgcggggcggggcctccccaatggccttcaaatgttctgttggtgcgccagagctctgggaaatcctggccggagacaggtgtcctggcaaatgcttcttcaccgtgtagcccagttcctgggtccggcccctccagcagggggtgcttctcgcgggctggcgggttcacacgctcgccgtcgcccaggctctcggggtgcctcaagttctcgggcgcaatctccagtggcttcggga

SEQ ID NO: 491414 - DNA, 212 bp, Homo sapiens
aaaactcagccctggggacaggattgcaaagtcggggacataaatgcaaacagttgtttaaatttggggaaaaccgggcttgtgaacggtgcccatttccaaatgaagcctttcagcccttttgagtccccggcccttggtgcaatgtttgtgagttttacctgcccagcgtgtgggctggctcaatgctgaataaaatgggtttgtgtcca

SEQ ID NO: 491415 - DNA, 222 bp, Homo sapiens
cttattctgaccctatccttatgttctgacccactcttatgttctgacccactcttatgttctgacccacccttatgttctgacccacctccttggcctcccaaagcatgggattacaggcatgagctaccacacctggcccgttttgagacagggtcttgctgtgtcgcccaggctggagcgcagtgatgcaatcactggcctactgtggctttgacctcc

SEQ ID NO: 491416 - DNA, 180 bp, Homo sapiens
agccttgtctctggccctgtttattggcgccattgtagtatggtttatacgcagacaagattatccaccaatttcttattattctcatggcaataaggggcagaaaaagactattaagatggtgaattgagcaaaaagataaaaagaagtgcaggacttgatatgcgtcaattttcgttt

SEQ ID NO: 491417 - DNA, 983 bp, Homo sapiens
cagaggggctttcctgatgaaggcatcctggcagtgtactccactggccccccataatctgggcgagatgctctacaccaagcgatttggtcccaatgccatgtctggtgagcctgtccccaatgggcagatatgtaatggtgggcttggctcacgaaggatctctgctgtcacccctccattggagcacatggtggcccaggtcttcaagctgaacaggcccatggtggagacgacctccatgaggagagtgtgaaacgtcctttatcccatggcctgccgaccatcggagacatgtcagtatcaactctgcccgtgtggactgcctgagaccagtggcgtatggcttgagtctatggtaactaactaaaggagagctggtgatctgcgaccataggccttgaacctcgtggtgtctgagtactacatggagaccagtcgtgagaccgagacggtcttcgagctgtcgcattccaacaggaggagcagcgagcggcctggaaccagcagagccacatggaggacagacagagacatggggctgatgaatgccattggggcttcagcccggaaccctgccacctcagtgaccatctcagggcacccagactctggcccttcagctgcagaatggcgaaacacagactggagggaggtgcggagccacggacagcgctcagtcctgaggaaggggcaggtcagagtatggtgccaggggggaagaagcgcccgcaggatcagaggctggagcgaaggggatggaaccggggcagggagcaaggacacaggctccagggggcttggaaaaatatggtcaccgcgatccgagatcacagacggacgtgtgcgccccactacaggcccactgggggaccagcgaatgagagcacaccagactggacacggcaggggacacacacatagaaacaacacagcgacgaaggaacaaaggagcgaacaacacacacaaacacacggccagg

SEQ ID NO: 491418 - DNA, 162 bp, Homo sapiens
cggacgcgtgggctggtccctctgggcctgctgtgctcggacggaaagcggggcctgtgggtccttgtgtccctgcccctgaagaatggggctgctttgagggaaacgctgtctgctgccttcataccagatgctgattaaagtgatagcgattccagatta

SEQ ID NO: 491419 - DNA, 642 bp, Homo sapiens
  misc_feature (44)..(44): n is a, c, g, or t
  misc_feature (48)..(48): n is a, c, g, or t
tctataattctaaaggaattccatcagacagagttgtggtatcnaccncagtgtctatagcaactccagccattccacgatcaccacgagctcgagggttgtctgaatcatagccacgatgtgtcgccagatcaaaggcatctgataatccctgctggccagcgttaatgttgtccttatagtactcagtgctttctacctcagtactaagtccagcatgctgctgcatggtccaggccttcaaggtatacatggtaggatatggctcacgtctgtatggctacactcctggaagctcctcaggtaagtccatagcatctctcttggaatgcgagggtttcatagagatcccttacggggtgtgccatattaggtcttctgggtttttcccgtacagatgctgtttagccagggcagcccattctgggtgaacgggctgctgctggtgtagaagtcgccgctgtatgatccgataccctcatgattcttcggtctggcatcaagtaatcagctgtgcagtctcaaaggccaagtgtgagcttgccacatgctccagcctgggggccacaataggcttaagaactctctggtagcactgatatgcagtccgctgtgcgaaacgtcgcttccagtgttgagtgg

SEQ ID NO: 491420 - DNA, 185 bp, Homo sapiens
tctcaggatcttatacttgaagcaagggacacctttggaactactagagtattgttaagtggttgtggctcaatgctgatagcaagttgacacctaaaggccagactgatgaggcctcagatggaaataaagaacttattgtcgaactgtagtaaaggtcacccatattatgccccagcaaagaa

SEQ ID NO: 491421 - DNA, 150 bp, Homo sapiens
tggtttcgagacagaattttgcttggtcacccaggtgggagtgtaggggtgcaatctcagttcattgcaacatgattctccgggatcccagtaattctcctgcctcagcctctcaggtagcggggataacgggtgcctggcataatggcc

SEQ ID NO: 491422 - DNA, 1758 bp, Homo sapiens
  misc_feature (397)..(397): n is a, c, g, or t
  misc_feature (566)..(566): n is a, c, g, or t
  misc_feature (1317)..(1317): n is a, c, g, or t
tattcatatgtctgcttaatttctgtgataaggattacacgtgaaacgtttgagaagtgattacaatagctaatgtgacagaagtgttgaaaatgtgaggcattcagctttctcttaaccacctccttacaaaaagtgtttagtagtgtattgtggtcatttacatgtgtttaactttgtgattattgtggccctcattatatataccatatgtgtgctcattattataatagagtggtaacacattaccagatagagtatagggtagactccgtggcatttctacaggtataagcgcggatagcggtggaaaatctccagaaatttctcccctttggaggagaacagagctccgtgagagacactctctcactcacacagagaagagggccacatntgtgcggagtcgtcctctcattattaacacacacagtgtgtgcacccaagagagacgcaagcacccacacttacacatacagcgttgtcacaagagggggaaatatccacactatgagtctcacaccgtgtgtgtgtgtggaacagatagtgtctcatattatactccngagtgtcttgtgacagtgacgacacgaggcccccttgtgtgacgcgcgccgctgtggtgtgctcaaaagaatctcccccgcctgttctgttaagagaagaatatgtcgcgcggggagggtaataaaaaataatccgcgggggataagggaggagtgacaatagttttctcacaggacagactgtcggccgagaggaacaacctattctctagggcaggggtgagcggcgcatcaaaacaataaaatattttctttcactagtggacgccagcagtttttttcccccaaaagaagcgccctaataaaagaacgctataattgtcggggctaaatccccatattttaagaacaccacaaatatattctatttcgatttctgcagagaagaaccccaaatcaaacagaggggggcacccgacgggggggctataacgaattttggggattgaagggcgtctcccccaagaaagaaggattctatcccggtgtgggcagaaccgaaaagtcggtctccccctctcgtggtacaacacaagggggcgctccggatatatacactccacaaggggatcacctatcttcaatacacgactatgtccccccaaaaaaattctagccctttgtgatcatggtgtttcacccacgtgccgtctttaaaagcagtcaaagagaaaccgtgtccgagaaaaaaaactcgttgtcccaacagcggggggaaaacccccccaacaacgtattcaatcaccacgangcgggacacaaacgcgctccccacttagaacacaataccaccagcctcacaagtgtcccacaaacggtgtacacaaatttcctcgagcggaacaaaccgcggcagggatcaaacatatatttgtggaaaagagcgccccaacaaacaaaccacaggggaggagcgagacgcaactaccttagatatgaggggacaagttaaaccacaagactcgttccgcacgaggggggagtaactcgatcactacacaaacaaaacggggtgcgatgaacgtagcatcgagcaaccacgcgacatcatcatacatccgagtggtgaacaacacgaggggcgaccaccgagcagaactaaggacctccgcgagcgtatcaaccaaacctagagctcagcaactaggaggcatgcgaacatacactgctcgactgaacgacaacacagccg

SEQ ID NO: 491423 - DNA, 306 bp, Homo sapiens
agtcaggaccacgtcgttggacggcttgtatctagattaccgaacaaagaggtcatagtatagaaagtccgctgtatgggacgaagactggccgattcgtttgccaccactctggagagaaaccttatgaatgtaatgagtgcgggaaggccttcagccagagctcggacctcatcagccgtattgtatattacacattgttgtgaaacgaagtacccagaacttaatatacttacaaatctgaacagtctatacccattaaaggaataatcactcgcttcccccctgatgggagcaacgactgcg

SEQ ID NO: 491424 - DNA, 828 bp, Homo sapiens
gtgaggatgtggatagtgaggataaggaagatgattcagaagcagccttgggagaagctgagtcagacccacatccctcccacccggaccagagggcccacttcaggggctggggatatcgacctggaaaagagacagaggaagaggaagctgctgaggactggggagaagctgagcctctgtccccgttccgtagtggccgatcgtatgtacctggtagagaagcacaccgcgcttcccgtgggctcgcttcactagtggtgccaccatccgactgcaaaggcggcgtcaagcgccccagaaacccctactcatgatccggaccctgagactcccctaaaggccatgaaaggtgcgcttctccgagtaaggtcactgtccatttcctggctgtcttgggcatgggccgtgcccaggccgccgccaggcccctgggagcagcttgctcggtgatcgctagccgcttcgcacgccgcatcagcctaggcccaggatggagctgaggcccgctgcctcacccctgctgccccgggcagagcctgggcacgcctcaggaacccacctttagacccccatccctgtcctcacccagactcttgccgttccctcctctgtcccttcgtccccagtccagaccacgcccgttgagccaagctgtggccacaccttcccgcgtcgtctgctgctgcagccggctgccctggacctccaggtgggaggcgtggctgagaccaaatggtttgcctataattgtataaacctatttatttctctaagtgtgggttatattaaggaataaaggccttttgatttgtagcgaaacagaca

SEQ ID NO: 491425 - DNA, 873 bp, Homo sapiens
cgcgagctggcgtatgtggctctggcgcgcggtcgtcctggctcgcttctgctcgattgtgcctggtgttgcatcgtcgacgagcggcgtgcgccgcggcttccgtgagcggacgtggcttcctctccggatctcggccatgcagctggcgcgggccagcggccgggcccccccagtcgtcgaggtgcacggagtaaccgacggagcaaagcctcaatgaccaatcttggggcctccaatggacgaccggagcagtcgacatcattgcaaggtctgcagaaggaatcaggtcaatcatctgtgctgcgccgtggcacaaaacacagcgacactaacaagcacacgacttggattgttgctgtgccttgctggcctgatctgcacatggaagtagatcagtcccgagacatggatcgtaaagtccgaagattattacgaacatgaactgcgcgacaagtgtgagggtgcgaacaacactccagtcttcatctagagggagtcgaatgggaccacagctgcgtgcctggcgtcgttgaatctccgctccgaggagacgcgctggcgcaaccgctattggttgctagggcccagccactacctgaacacttctcgtgctcatcgatgcaccactaaaccgcgttaaagatgactaggagaacaaagatcgacaaagtgccgcgcgacactgtaccttgccacggtgagaggccagactgctggatcttgtagcctggtatctgccttgaaatcccctggtagcccagcgagcaactggcaatcgatctccagcaacaatgtgcttaagaagctgtcaagatggttggtatcgaaaaactgtacgcggcaagtccggggagaggagaagccacctgg

SEQ ID NO: 491426 - DNA, 325 bp, Homo sapiens
  misc_feature (1)..(1): n is a, c, g, or t
  misc_feature (264)..(264): n is a, c, g, or t
nagtgcaatggtagttgaatgaatgtagtgggtggatgggtgaatgaatgaatcagtgggcaagtgcaagggcctgcagttttcactcccacagagcactgaatgctcagtttcacttaaatcatagataagtacttggaagaaaagtcaaaatcaatgctcccagtctgtttcttttaataatatggaagtgtttgtgctgtaattcctcaagtttacaaacccccacgtgatttctaaaacttacatccttgttattaactngacatctggccaaacccacttcttctaaggtggcaagacgtggtagcccaactgcacggag

SEQ ID NO: 491427 - DNA, 231 bp, Homo sapiens
tgatcatatcgaacgtgttcacgtagtgcaggtgctgtgaagaaaagtagagctagagtgtggagagggtgggggaatacaggcagagcaagccaggaatggactctctgaggaggtgacatgggctaatcgagaagtcggaaccaggtgtgtggcaatgggatgaaaatgctcccagtgcaggggtgaacaagcaatgcgccaatgtgctctgagtgtggtcctgagcgg

SEQ ID NO: 491428 - DNA, 1104 bp, Homo sapiens
catacccgtcatctactactaccatactattgcaggcacactacatcacagcgctaagctcgcactgagttctttacctgagtaggcctagcaactaaacatgctagcttttattccagttctaaccaaagaaaataaaccctacgtatccacagaagctagccatacaagtatattccgtcgacgccgaaggcaaccggggagtccagtagagtccggtgtcgtacggtagccgtagtcgcgtcgtgtcagacgagatagtagcgtcgtccgcggacagaggtgcagacccagtaagagccgacagtatctacgcagaacgtcgacacgtacgtacagtcgagtgtagcatgcaatacatgtaacataggcctaactacgtccacactaccacagctaacgggagactaacagccccctcctgttcacagctatacttagcaaggttaaccagccacgcctttaaccgccacacacagcgacaagacacgcacgatacaatagaagcaagatatacccagagacgccatagcatactactatacgttccgaacaccgttgtacacgccacgccaagcagagccgataagagcacaccccacacgataccgttccaagaaagtcccacgtagaatttaccaccacgaggagttacgttctaggacccgccagtacggactgtcaacagccacgggcttaagaggccccagtagtccggtaccacagatatccagaccttccttcctctacgcaacagatacagctatcactatcgcccagggcgcgagtaagcgccagacggaccaacgacatcccgacaccgcgcactagcggcaccttaacaacacaaacctcctacatatgatatacccccacaggactattaactccggcctctacctgccagctcccgatactaaagagctccaccatcttacgctctgccacctttccacagacgtctcaggcctcacccagatccaaaattcagcggcgcacattggcaccacctaacactctagtccaccgagctcttcccttacccccggacttactaacaaaagcgccgactataataccaactataatcacctacatgaccct

SEQ ID NO: 491429 - DNA, 462 bp, Homo sapiens
gggatttttctagggtgagatgggaaagatatattctggagaaaggactgtgcaaggcagaaagctgaagtcgtatgttcagaaagtgacaagagaataagcatggttctggtagggaagagtgggtagggattgatattggtatattatggtaagggttaatattgagggattttgtggaatataattgggagaatgacgccatcattttagtagtctgggaaaaatatcagtctggccacagtgttaaaatagaatggagaaactagatagagtgaaaaaaatcaggagttttgccatagttgaagcaataaacgataaggacggtagccttgtctgtctttttcatcattatattcccagtgacaaggaatagtgcttggaacagagagttgaactaatgtgcagacaggaggagggatccaagatgtatctagaaaaatagagctgacaggacttgaa

SEQ ID NO: 491430 - DNA, 579 bp, Homo sapiens
  misc_feature (3)..(4): n is a, c, g, or t
  misc_feature (7)..(7): n is a, c, g, or t
  misc_feature (14)..(14): n is a, c, g, or t
  misc_feature (31)..(31): n is a, c, g, or t
  misc_feature (38)..(38): n is a, c, g, or t
gtnntcntttgaancccgttgaactatgatnactcttngtaggaaccggcgctatggtgtggtaccccggaaattcggccattagggccggggtctctcaagcaccgccgtcgcggaatctcaggtactattggccaggcagaatgtccgcgtgaacgtcgactgtggcggctaccgccagccctgggaccgggcatgatgtgagctccttactcacctattaccgattgcaggaggtggctttgcgcctctgctcgctggaactgaggcttgtgatccatgggcgagctgactatgcagcccgattcctgagctaacaccctagaggagaagctgtactcgtgatacaggctctggtggctgcaccatctagctttagagatgtggggcactgtactgaagcctgaggcatgctgcatgactgcattgcagatatccatccgagcgcccttcaacctgatagcagttgctcatacgctctgacaagagttacatggctgaattgctgcacatattggattgtacccatcatagacgctgtgctatttaggttgctcgtccgctgctacgcatcgaggg

SEQ ID NO: 491431 - DNA, 134 bp, Homo sapiens
cataagttgtaccaaaagtatcatgggaaatatttttcttcttctttggcttgagagcttttggcattttcatagataatttataaagggcatccgatgccaggtgtgtcctcctcagaaccagatccaatgag

SEQ ID NO: 491432 - DNA, 120 bp, Homo sapiens
  misc_feature (10)..(10): n is a, c, g, or t
agtaaggaangcagacagtccctttctcacatgttatctgctaaacctagaagaagagaaattatcccaaaagaaagaatctgaaaagaggaatggtgacagtacagccttgatgacccc

SEQ ID NO: 491433 - DNA, 130 bp, Homo sapiens
  misc_feature (37)..(37): n is a, c, g, or t
  misc_feature (47)..(47): n is a, c, g, or t
cccagcctaccttgggaaagcctgcaggccaggcagnaatctcttgnaaccgagggaggaggagcgttgcagtaagccgagatggcgcccctgcactccagcctgggtgacagagtgagaccttgcgttt

SEQ ID NO: 491434 - DNA, 265 bp, Homo sapiens
aaatgtatctttccccagtacctggggatagattttttacatggactggcggtgctaagcaaggtgaaaggttctgatccctaggaaatcatgtgcgggggagtaggaaataaatgtccccaattctgaattttggccaatagctgagataacaaagagtcaccaagggctagttatcagagacaagagttaacttggcttttacgaggataggatactgggttggcattcggatttacagaaataaacgtttagggccggaccc

SEQ ID NO: 491435 - DNA, 1105 bp, Homo sapiens
cgtatagtcctagctgacgccaataatagaaaacaagaaaccaagtgggctggtattctctctatgcaaacatgtctgttttagttggaatgagctgaagagaagaacagtctgttcctgtgttcttcgatatatacacacaaacaaggagcgggcagggccgctcgatgcctttgctgtttagcgttcctccagaggtaggggacttgtaggaatctgccttccagccctagacccccagtgtattttgtccaatgttcacagtagagtagggtagaaggaaatgcatgtctctgcttccatggcttcctgagaaagcccacctgggctgggcgcggtggctcacgcctgtaatcccagcactttgggaggccaaggtgggcggatcacaaggtcaggagttcgagaccaacctagccaacatggtgaaaccccgtctctactaaaaataagaaattagccgggtgtggtggcacgcacctgtagtcccagctacttgggagcctgaggcaggagaatcgcttgaacctgggaagtggaggttgagtgagccgggaccgtgccatggtactccagcctgggtgacagagcgagattccgtctcagaaaatagaaatagaaaagccatctgaagcctgtatcttccatttgtgttggcccttccagggggatgattgagcatgtggtttacaaagggcgcatttaccctttattacaagggcgtggcacagaagcaggggcgagacaacgaggacacacacaagtaaaccgtgggatcaaatagagtaacgagagcccaaacgttttcaccaaattgggtgcaacacaggtggtaaaatttacacacgagaggggaacacggtatacaaagagacacaacagacggagaaggagagagaaccacgacgtagcaaacacagaaggtcagacccaaaaagagcgtagacccgaggagaggagaaaaagtacagagaaaaaatagtagagggacacaagaaaggacaagcaaccacatagagcagagagagagaacgagagaagaggacacacaaaacaacaaaagaagaaaaatatagcatcaagcgtcacatcgctgcgacagagc

SEQ ID NO: 491436 - DNA, 536 bp, Homo sapiens
ttttttttttatattgagtaggtttttttccattggagtattggaaaaaaggagttttctaggcatggacttcttgttatatggaaaactgataaactttgttttcttgctaaaattttagtgggcccaggtagctttttaaaatgtttaatgcaaattaggctttttggactgtttagccccctttgctttcaccctttgggaataaacttttttggatttaaggcaaatctataaaaatagtgattgttggccgggcaaagtggctcatgcctgtaatcccggccctttgggaggcttaggtgggcggatcatttgaggtcaggagttcaaaaccagcctgcccaacatgaggaaaccccctttttcctaaaaatataaaattagccaggtgtggtggcacatgcctgtaatcccagctactcaggaaggcttaggcaggaaaatcgcttgaatccaggaggtggaaattttggtgaaccgagattgggccattgctttccaacctgggcaacaaaagtgaaactaggtctccc

SEQ ID NO: 491437 - DNA, 511 bp, Homo sapiens
tcttccaccaataggcacaagtcccttttcaagtgcgcgaaatgtagttttccacagaactcggggctcgagtttcagagccacatacctcagcaccaggtggacagctccacagcccaatgtctcctctgtggtttgtgctacacctctgccagctccctcagccgccacctcttcattgtccacaaggtgagagaccaggaggaggaggaggaagaggaggcggcggcagcggagatggcagtggaggtgcagagccagaggagggctccggggaggaggtgcccatggagactagagagaatggactggaagaatgtgccggtgagcctttgtcagctgacccagaggcgaggagattgctggcccggcccctgaggacgatggtggccacaatgatcacagtcaaccacaggcctctcagggggattacatcctttctttggcggggcaggggggaccggagactttgcagtgtgcatggtcaggggtggtgccgaagtgtcttcca

SEQ ID NO: 491438 - DNA, 2495 bp, Homo sapiens
cttctcttagggacccggcactcgtcgccctcagtccggctcagctggggctgggcgccgtgggtctggcggttccgtagcggtcccagcgtctgtcccgccggccgggcggtcgcggcacagccgcgggaaggtgtcggatggcggttccgccgcgcggcgggcgcgccgcccacatggcggccatcagggcgctgcaacagtggtgccggcagcagtgcgagggctaccgcgacgtgaatatctgcaacatgaccagccacctccccgcagccgcctctgcaagccccaagttgacgggtctggtcccccgacagccaggggccatgggtgtggattccaggacctcctgttccccacagaaggcccaggaggcaaacaaggccagaccgtcggcctgggagcctgctgcgggcaactcgcctgccagggcttccgttccagctgcacccaaccctgcagccaccagcgccacgtccgtccacgtgaggagcccagccaggccctctgagagccgcctggcccccactcccacggaggggaaagtccgccctcgtgtgaccaatagctccccgatgggctggtcgtcagctgccccgtgcacagcagcggctgcctcccatcccgccgtgcccccgagtgccccagaccctcgcccggccacaccccagggcgggggagccccccgagtggcagctcctcaaaccacactcagttcaagctccacatctgcagccacggtggaccccccagcctggaccccgtccgcctccaggacccagcaggcccggaataagtttttccaaacatcagcagtgccccccggcaccagcctttctggcagaggtcccaccccgtcacttgttctatccaaggacagcagcaaggagcaggcgcggaacttcctcaagcaggccctctcagcgctggaagaggctggcgctccggcgcctggcaggccctccccagccactgccgctgttcccagttctcagcccaaaactgaagcaccacaagcaagtcccttagccaagccgttacagtcctcgtctccccgggtgcttggcctcccttcgaggatggaaccgccagccccgctgagcacgagcagtacctctcaggcatccgcgttgcccccggcaggcaggaggaacttggctgaatcctcaggggtcggcagggtgggtgctggctccaggccgaagccagaggccccgatggcaaagggtaaaagcaccaccttaacgcaggacatgagcaccagcctccaggaaggccaggaggacgggccggcaggatggagagcgaatctgaagcccgtggacaggaggagcccagctgagaggactctgaagcccaaggaaccacgggccctggcagagccgagggcgggggaggcccccaggaaggtctcaggcagctttgctgggagtgtccacatcaccctgacccccgtgaggcctgacaggaccccacgcccagccagcccaggacccagcctcccagccaggtccccctccccaccccgccgcaggagactggccgtccctgccagcctcgacgtttgtgacaactggcttcggccggagccccctggccaggaagcccgagtgcagagctggaaggaggaggagaagaaacctcaccttcagggcaaaccagggagacccttgtccccggccaatgtccctgctctgcctggcgagacggtgacctccccagtcaggctgcaccccgactacctctccccggaggagatacagaggcagctgcaggacatcgagaggcggctggacgccctggagctccgcggcgtggagctggagaagcgactgcgggcggccgagggagatgacgctgaggatagcctcatggtggactggttctggctcattcacgagaagcagcttctgctgagacaggagtcagagctgatgtacaagtccaaggcccagcgtctggaggagcagcagctggacatcgagggcgagctgcgccggctcatggccaagcccgaggctctgaagtcactgcaggagcggcggcgggagcaggagctgctggagcagtacgtgagcaccgtgaacgaccgcagtgacatcgtggactcgctggacgaggaccggctccgggaacaagaggaggatcagatgctgcgggacatgattgagaagctgggcctccagaggaagaagtccaagttccgcttgtccaagatctggtcaccaaaaagcaaaagcagcccctcccagtagtagccagtagggccgtgggctcggcccggacctggcatccggacttggactcggggccatgggcttggcccggacccggaacccggacttgtactcggggccgtgggctcggcccggacccggcattcggacttggactcgggaagggcctcctgtccctacaaggggcatgtggacagcagggacctgcgctaccgtctgtggtctcaataaagaaaccgaccacatggccccggaaaa

SEQ ID NO: 491439 - DNA, 588 bp, Homo sapiens
cgttgagccgatttctgttcccgtaccctccataaatcagcatatccgtgtacctgatcaacctccaatgcttgtgcctttgctatgatgagcaggaaacacactcccaaatcgtcgacacggggtacggggctctaatcgcatacgtgcctctttgagccaacgactgctctatgtcaccttcaccgtttgacatctcaagacaagtacagcagcctctactgacacagcagaatggcccggtgtaggcgaacttcccgtcatgttctctctggcaatcgtgcaaaataactccgtcgcagtgatataactcctgccccacgcccaagcacgacattcccagcagaatccaactcccagccccctcttgttgaggtgtaaagtgcctttattgggagacttttgtcttccagcctgtcaatcaaccatcctgggtgtggccaccatatgtgtgcgctctaggtcctcattcatgcacgatccaataggagacaccagttctgaagaacatgcccccacccaagtcacaaaataatcgaagtgggagttagatttcagagtccaggccatagcttggaccattaacgc

SEQ ID NO: 491440 - DNA, 323 bp, Homo sapiens
  misc_feature (16)..(16): n is a, c, g, or t
  misc_feature (157)..(157): n is a, c, g, or t
  misc_feature (194)..(194): n is a, c, g, or t
  misc_feature (198)..(198): n is a, c, g, or t
  misc_feature (237)..(237): n is a, c, g, or t
ggggggtgtttctcanaaggtttttatcggttctctccgcgtcacaagccatcgggtaaggcaacggattgtgcgtggggtcccctgtggctccgcggtcacaatactgagcctggaattgctgttagcaaaatatacatttgtgtcaccataaaanaccgcgccgccgcccctcgggtctcacaacaggtttnaaanattttaaatttttacccccttgttacccgctttttcggnaaggggttccttggggggcccccgggccagggcgcgggggcggtagaaagagccccaagacaggggcgcccgccttccgggtccca

SEQ ID NO: 491441 - DNA, 501 bp, Homo sapiens
ctccggggcacccagtcggggcaggttctcacgtgggagggcacagggcttcctgcaggctcggaggcccagggcggattgtggccagtggaagggaaggatgtttctggcagggggacttgtgtgggccacggctgtgcggctgcggcgttgagcacggcctcactgtccacctgtcccctaggcctccagaggaagaagtccaagttccgcttgtccaagatctggtcaccaaaaagcaaaagcagcccctcccagtagtagccagtagggccgtgggctcggcccggacctggcatccggacttggactcggggccatgggcttggcccggacccggaacccggacttgtactcggggccgtgggctcggcccggacccggcattcggacttggactcgggaagggcctcctgtccctacaaggggcatgtggacagcagggacctgcgctaccgtctgtggtctcaataaagaaaccgaccacatggccccggaaaa

SEQ ID NO: 491442 - DNA, 3131 bp, Homo sapiens
cttctcttagggacccggcactcgtcgccctcagtccggctcagctggggctgggcgccgtgggtctggcggttccgtagcggtcccagcgtctgtcccgccggccgggcggtcgcggcacagccgcgggaaggtgtcggatggcggttccgccgcgcggcgggcgcgccgcccacatggcggccatcagggcgctgcaacagtggtgccggcagcagtgcgagggctaccgcgacgtgaatatctgcaacatgaccacgtcgttccgcgacggcctggctttctgcgccatcctgcaccgccaccggcccgacctcataaacttcagtgctctcaagaaggaaaatatttatgaaaacaataaactggccttccgcgtggccgaggagcacttgggcatcccagccttgctggatgccgaggacatggtggccttgaaggtgcctgaccggctgagcatcttgacctacgtgtcccagtattacaactacttccacggccgctcccccattgggggcatggcaggcgtgaagagggcctcggaggactctgaggaggagccgtcagggaagaaggctccagtccaggcggccaagctgccctcgcccgccccagcccggaagcctccactatctccagcccagacaaaccctgtggtccagaggaggaatgagggtgcagggggcccgccccccaagactgaccaggcattggcgggcagcttggtcagcagcacctgcggggtctgcggcaagcacgtgcacctggtacagcggcacctggccgacgggaggctttaccaccggagctgcttcaggtgtaagcagtgctcctgcacgctgcactcgggggcctacaaggccacaggagagccgggcaccttcgtctgcaccagccacctccccgcagccgcctctgcaagccccaagttgacgggtctggtcccccgacagccaggggccatgggtgtggattccaggacctcctgttccccacagaaggcccaggaggcaaacaaggccagaccgtcggcctgggagcctgctgcgggcaactcgcctgccagggcttccgttccagctgcacccaaccctgcagccaccagcgccacgtccgtccacgtgaggagcccagccaggccctctgagagccgcctggcccccactcccacggaggggaaagtccgccctcgtgtgaccaatagctccccgatgggctggtcgtcagctgccccgtgcacagcagcggctgcctcccatcccgccgtgcccccgagtgccccagaccctcgcccggccacaccccagggcgggggagccccccgagtggcagctcctcaaaccacactcagttcaagctccacatctgcagccacggtggaccccccagcctggaccccgtccgcctccaggacccagcaggcccggaataagtttttccaaacatcagcagtgccccccggcaccagcctttctggcagaggtcccaccccgtcacttgttctatccaaggacagcagcaaggagcaggcgcggaacttcctcaagcaggccctctcagcgctggaagaggctggcgctccggcgcctggcaggccctccccagccactgccgctgttcccagttctcagcccaaaactgaagcaccacaagcaagtcccttagccaagccgttacagtcctcgtctccccgggtgcttggcctcccttcgaggatggaaccgccagccccgctgagcacgagcagtacctctcaggcatccgcgttgcccccggcaggcaggaggaacttggctgaatcctcaggggtcggcagggtgggtgctggctccaggccgaagccagaggccccgatggcaaagggtaaaagcaccaccttaacgcaggacatgagcaccagcctccaggaaggccaggaggacgggccggcaggatggagagcgaatctgaagcccgtggacaggaggagcccagctgagaggactctgaagcccaaggaaccacgggccctggcagagccgagggcgggggaggcccccaggaaggtctcaggcagctttgctgggagtgtccacatcaccctgacccccgtgaggcctgacaggaccccacgcccagccagcccaggacccagcctcccagccaggtccccctccccaccccgccgcaggagactggccgtccctgccagcctcgacgtttgtgacaactggcttcggccggagccccctggccaggaagcccgagtgcagagctggaaggaggaggagaagaaacctcaccttcagggcaaaccagggagacccttgtccccggccaatgtccctgctctgcctggcgagacggtgacctccccagtcaggctgcaccccgactacctctccccggaggagatacagaggcagctgcaggacatcgagaggcggctggacgccctggagctccgcggcgtggagctggagaagcgactgcgggcggccgagggagatgacgctgaggatagcctcatggtggactggttctggctcattcacgagaagcagcttctgctgagacaggagtcagagctgatgtacaagtccaaggcccagcgtctggaggagcagcagctggacatcgagggcgagctgcgccggctcatggccaagcccgaggctctgaagtcactgcaggagcggcggcgggagcaggagctgctggagcagtacgtgagcaccgtgaacgaccgcagtgacatcgtggactcgctggacgaggaccggctccgggaacaagaggaggatcagatgctgcgggacatgattgagaagctgggcctccagaggaagaagtccaagttccgcttgtccaagatctggtcaccaaaaagcaaaagcagcccctcccagtagtagccagtagggccgtgggctcggcccggacctggcatccggacttggactcggggccatgggcttggcccggacccggaacccggacttgtactcggggccgtgggctcggcccggacccggcattcggacttggactcgggaagggcctcctgtccctacaaggggcatgtggacagcagggacctgcgctaccgtctgtggtctcaataaagaaaccgaccacatggccccggaaaa

SEQ ID NO: 491443 - DNA, 277 bp, Homo sapiens
agctcgaccccaccgcaggttgtactggagcgtgagcgaccactgcgtctagctggggctctagagcgtgagcggccacgtctggctggcgttctggagcgtgagcggacacgactagctgctcttctagagcgcgacctgccacttctactgcctgatgatctactacgagacctgcgaccgactggagatcggcgcctagatctgcgcctagcaagcgttctagaccgagacctgcccctccggactggagctctagaccgagacctacgcctgg

SEQ ID NO: 491444 - DNA, 2808 bp, Homo sapiens
ggaaggagtggggaccgacccggggctgtgccagaaaaggtgccctcatggttacctctccccagtccctgggcccccaggtcccccccgggcaccaaggcctgtgctgggcactgggacctctggagggactagaccctttcagagccaggcctgggaccctcccgatccctgcttgattcccccattgggggcatggcaggcgtgaagagggcctcggaggactctgaggaggagccgtcagggaagaaggctccagtccaggcggccaagctgccctcgcccgccccagcccggaagcctccactatctccagcccagacaaaccctgtggtccagaggaggaatgagggtgcagggggcccgccccccaagactgaccaggcattggcgggcagcttggtcagcagcacctgcggggtctgcggcaagcacgtgcacctggtacagcggcacctggccgacgggaggctttaccaccggagctgcttcaggtgtaagcagtgctcctgcacgctgcactcgggggcctacaaggccacaggagagccgggcaccttcgtctgcaccagccacctccccgcagccgcctctgcaagccccaagttgacgggtctggtcccccgacagccaggggccatgggtgtggattccaggacctcctgttccccacagaaggcccaggaggcaaacaaggccagaccgtcggcctgggagcctgctgcgggcaactcgcctgccagggcttccgttccagctgcacccaaccctgcagccaccagcgccacgtccgtccacgtgaggagcccagccaggccctctgagagccgcctggcccccactcccacggaggggaaagtccgccctcgtgtgaccaatagctccccgatgggctggtcgtcagctgccccgtgcacagcagcggctgcctcccatcccgccgtgcccccgagtgccccagaccctcgcccggccacaccccagggcgggggagccccccgagtggcagctcctcaaaccacactcagttcaagctccacatctgcagccacggtggaccccccagcctggaccccgtccgcctccaggacccagcaggcccggaataagtttttccaaacatcagcagtgccccccggcaccagcctttctggcagaggtcccaccccgtcacttgttctatccaaggacagcagcaaggagcaggcgcggaacttcctcaagcaggccctctcagcgctggaagaggctggcgctccggcgcctggcaggccctccccagccactgccgctgttcccagttctcagcccaaaactgaagcaccacaagcaagtcccttagccaagccgttacagtcctcgtctccccgggtgcttggcctcccttcgaggatggaaccgccagccccgctgagcacgagcagtacctctcaggcatccgcgttgcccccggcaggcaggaggaacttggctgaatcctcaggggtcggcagggtgggtgctggctccaggccgaagccagaggccccgatggcaaagggtaaaagcaccaccttaacgcaggacatgagcaccagcctccaggaaggccaggaggacgggccggcaggatggagagcgaatctgaagcccgtggacaggaggagcccagctgagaggactctgaagcccaaggaaccacgggccctggcagagccgagggcgggggaggcccccaggaaggtctcaggcagctttgctgggagtgtccacatcaccctgacccccgtgaggcctgacaggaccccacgcccagccagcccaggacccagcctcccagccaggtccccctccccaccccgccgcaggagactggccgtccctgccagcctcgacgtttgtgacaactggcttcggccggagccccctggccaggaagcccgagtgcagagctggaaggaggaggagaagaaacctcaccttcagggcaaaccagggagacccttgtccccggccaatgtccctgctctgcctggcgagacggtgacctccccagtcaggctgcaccccgactacctctccccggaggagatacagaggcagctgcaggacatcgagaggcggctggacgccctggagctccgcggcgtggagctggagaagcgactgcgggcggccgagggagatgacgctgaggatagcctcatggtggactggttctggctcattcacgagaagcagcttctgctgagacaggagtcagagctgatgtacaagtccaaggcccagcgtctggaggagcagcagctggacatcgagggcgagctgcgccggctcatggccaagcccgaggctctgaagtcactgcaggagcggcggcgggagcaggagctgctggagcagtacgtgagcaccgtgaacgaccgcagtgacatcgtggactcgctggacgaggaccggctccgggaacaagaggaggatcagatgctgcgggacatgattgagaagctgggcctccagaggaagaagtccaagttccgcttgtccaagatctggtcaccaaaaagcaaaagcagcccctcccagtagtagccagtagggccgtgggctcggcccggacctggcatccggacttggactcggggccatgggcttggcccggacccggaacccggacttgtactcggggccgtgggctcggcccggacccggcattcggacttggactcgggaagggcctcctgtccctacaaggggcatgtggacagcagggacctgcgctaccgtctgtggtctcaataaagaaaccgaccacatggccccggaaaa

SEQ ID NO: 491445 - DNA, 967 bp, Homo sapiens
tgtactgccttggtttggagtccctctgcccgttgacttgcgttttgtttgcaggttaacccctgttgtgtgtatcgcggcccgcccttggaattgtattggttcaaccttgttggtccgctgttccctggttcctcgcggtacacttctttttgtttgccccttgtgtgcgccaattagtattggctgtagttgatgggcgggtccaccagacttctccacatgtatctttggatttcgttgcttgcccctcgtggcgcgtgtgagcccatagagtgtctgcattgtaggttgatcagcatgcgcgaacgggtgagtcgtgttgaatgaacgggttatgctgccccgcgctgccgagccgattctgtctcctgccgatggttggttctcccgccgctggaccgttggttctatatggtaatgtattcgagacgttttctcgtctccccgccgccctgctctcacaaggtcgcctatgtgacgtcatattcgacgccgtttggtgcgacctcgctgccctgcggtagaatgtgcgtgtgtggtgtagctttgttagccagttggggcggcgccagtgtccctatgtggtactgcgcccgcaatccccgctccgccggggaatattatcaggcctttgttggtgacgcacccccgcggcgcttccccattctgattacggtgggcggagtggtgcgtgaagctataatcgtataagtaggaccaaggcgccatcgcctgtacacaccttgcctggcgcggggaaatattttcttttccttatttttttggaggggtgaggcgtcatatcaatctacaatggtattgatgcaccgtgttcaaagaacaatagaacaaaaagaaaaccaataaaataaatgagacaacaaaaacacacaaagagcacaatagaaatagaccgcgtcacaacacatgaaaaacaaaaagaaaaacacacacaacataacaa

SEQ ID NO: 491446 - DNA, 3086 bp, Homo sapiens
cttctcttagggacccggcactcgtcgccctcagtccggctcagctggggctgggcgccgtgggtctggcggttccgtagcggtcccagcgtctgtcccgccggccgggcggtcgcggcacagccgcgggaaggtgtcggatggcggttccgccgcgcggcgggcgcgccgcccacatggcggccatcagggcgctgcaacagtggtgccggcagcagtgcgagggctaccgcgacgtgaatatctgcaacatgaccacgtcgttccgcgacggcctggctttctgcgccatcctgcaccgccaccggcccgacctcataaacttcagtgctctcaagaaggaaaatatttatgaaaacaataaactggccttccgcgtggccgaggagcacttgggcatcccagccttgctggatgccgaggacatggtggccttgaaggtgcctgaccggctgagcatcttgacctacgtgtcccagtattacaactacttccacggccgctcccccattgggggcatggcaggcgtgaagagggcctcggaggactctgaggaggagccgtcagggaagaaggctccagtccaggcggccaagctgccctcgcccgccccagcccggaagcctccactatctccagcccagacaaaccctgtggtccagaggaggaatgagggtgcagggggcccgccccccaagactgaccaggcattggcgggcagcttggtcagcagcacctgcggggtctgcggcaagcacgtgcacctggtacagcggcacctggccgacgggaggctttaccaccggagctgcttcaggtgtaagcagtgctcctgcacgctgcactcgggggcctacaaggccacaggagagccgggcaccttcgtctgcaccagccacctccccgcagccgcctctgcaagccccaagttgacgggtctggtcccccgacagccaggggccatgggtgtggattccaggacctcctgttccccacagaaggcccaggaggcaaacaaggccagaccgtcggcctgggagcctgctgcgggcaactcgcctgccagggcttccgttccagctgcacccaaccctgcagccaccagcgccacgtccgtccacgtgaggagcccagccaggccctctgagagccgcctggcccccactcccacggaggggaaagtccgccctcgtgtgaccaatagctccccgatgggctggtcgtcagctgccccgtgcacagcagcggctgcctcccatcccgccgtgcccccgagtgccccagaccctcgcccggccacaccccagggcgggggagccccccgagtggcagctcctcaaaccacactcagttcaagctccacatctgcagccacggtggaccccccagcctggaccccgtccgcctccaggacccagcaggcccggaataagtttttccaaacatcagcagtgccccccggcaccagcctttctggcagaggtcccaccccgtcacttgttctatccaaggacagcagcaaggagcaggcgcggaacttcctcaagcaggccctctcagcgctggaagaggctggcgctccggcgcctggcaggccctccccagccactgccgctgttcccagttctcagcccaaaactgaagcaccacaagcaagtcccttagccaagccgttacagtcctcgtctccccgggtgcttggcctcccttcgaggatggaaccgccagccccgctgagcacgagcagtacctctcaggcatccgcgttgcccccggcaggcaggaggaacttggctgaatcctcaggggtcggcagggtgggtgctggctccaggccgaagccagaggccccgatggcaaagggtaaaagcaccaccttaacgcaggacatgagcaccagcctccaggaaggccaggaggacgggccggcaggatggagagcgaatctgaagcccgtggacaggaggagcccagctgagaggactctgaagcccaaggaaccacgggccctggcagagccgagggcgggggaggcccccaggaaggtctcaggcagctttgctgggagtgtccacatcaccctgacccccgtgaggcctgacaggaccccacgcccagccagcccaggacccagcctcccagccaggtccccctccccaccccgccgcaggagactggccgtccctgccagcctcgacgtttgtgacaactggcttcggccggagccccctggccaggaagcccgagtgcagagctggaaggaggaggagaagaaacctcaccttcagggcaaaccagggagacccttgtccccggccaatgtccctgctctgcctggcgagacggtgacctccccagtcaggctgcaccccgactacctctccccggaggagatacagaggcagctgcaggacatcgagaggcggctggacgccctggagctccgcggcgtggagctggagaagcgactgcgggcggccgagggagatgacgctgaggatagcctcatggtggactggttctggctcattcacgagaagcagcttctgctgagacaggagtcagagctgatgtacaagtccaaggcccagcgtctggaggagcagcagctggacatcgagggcgagctgcgccggctcatggccaagcccgaggctctgaagtcactgcaggagcggcggcgggagcaggagctgctggagcagtacgtgagcaccgtgaacgaccgcagtgacatcgtggactcgctggacgaggaccggctccggggcctccagaggaagaagtccaagttccgcttgtccaagatctggtcaccaaaaagcaaaagcagcccctcccagtagtagccagtagggccgtgggctcggcccggacctggcatccggacttggactcggggccatgggcttggcccggacccggaacccggacttgtactcggggccgtgggctcggcccggacccggcattcggacttggactcgggaagggcctcctgtccctacaaggggcatgtggacagcagggacctgcgctaccgtctgtggtctcaataaagaaaccgaccacatggccccggaaaa

SEQ ID NO: 491447 - DNA, 241 bp, Homo sapiens
  misc_feature (5)..(5): n is a, c, g, or t
  misc_feature (57)..(57): n is a, c, g, or t
  misc_feature (100)..(100): n is a, c, g, or t
cctangttcaacaaccacaaagagattccagaagtaattcagatgcgtgtgaaccanatttccttttcttcgttttcttttaactgttggggtgtttcantaaaaactattttattttcctgtgagtcttgcgagggggaagtaatgattaaatactcatgtggtcagaaaacataaactttttttataaaaatattttggacaattcattaaagggtaatttatgaaaaaaaaaaagggg

SEQ ID NO: 491448 - DNA, 124 bp, Homo sapiens
tgcacatagatcctcacacacacatgcacaaatacacacccatgcacaaggatcctcacacacacgcacaaatacacacccatgcatgcacacagacaggcatagagctgaacccgcatacaca

SEQ ID NO: 491449 - DNA, 961 bp, Homo sapiens
gtgtctggtacgttgggctggacggccaggtcccagaggctcaccctgctccttctccagggagacccttgtccccggccaatgtccctgctctgcctggcgagacggtgacctccccagtcagggtgagtagtggtggggagccgggcaggggcccagccctccggcatcctcaccgcccctccgttcccagctgcaccccgactacctctccccggaggagatacagaggcagctgcaggacatcgagaggcggctggacgccctggagctccgcggcgtggagctggagaagcgactgcgggcggccgagggagatgacgctgaggatagcctcatggtggactggttctggctcattcacgagaagcagcttctgctgagacaggagtcagagctgatgtacaagtccaaggcccagcgtctggaggagcagcagctggacatcgagggcgagctgcgccggctcatggccaagcccgaggctctgaagtcactgcaggagcggcggcgggagcaggagctgctggagcagtacgtgagcaccgtgaacgaccgcagtgacatcgtggactcgctggacgaggaccggctccgggaacaagaggaggatcagatgctgcgggacatgattgagaagctgggcctccagaggaagaagtccaagttccgcttgtccaagatctggtcaccaaaaagcaaaagcagcccctcccagtagtagccagtagggccgtgggctcggcccggacctggcatccggacttggactcggggccatgggcttggcccggacccggaacccggacttgtactcggggccgtgggctcggcccggacccggcattcggacttggactcgggaagggcctcctgtccctacaaggggcatgtggacagcagggacctgcgctaccgtctgtggtctcaataaagaaaccgaccacatggccccggaaaa

SEQ ID NO: 491450 - DNA, 235 bp, Homo sapiens
ccggaatctagaggaccccttcgattggcgggcacttagcgagactccatccctacaaaaaataaacaaaattaggctggtgtggtggcgagtgtctgtagtcctgtctactcaggaggctgaggtggaaggatcacccgagcccaacgaggtcacgggctgcgagtaagcccatgtgtcacgccacgtgcactccagcctgggccacagcaataagttgcccgcgcaatcgaac

SEQ ID NO: 491451 - DNA, 3177 bp, Homo sapiens
cttctcttagggacccggcactcgtcgccctcagtccggctcagctggggctgggcgccgtgggtctggcggttccgtagcggtcccagcgtctgtcccgccggccgggcggtcgcggcacagccgcgggaaggtgtcggatggcggttccgccgcgcggcgggcgcgccgcccacatggcggccatcagggcgctgcaacagtggtgccggcagcagtgcgagggctaccgcgacgtgaatatctgcaacatgaccacgtcgttccgcgacggcctggctttctgcgccatcctgcaccgccaccggcccgacctcataaacttcagtgctctcaagaaggaaaatatttatgaaaacaataaactggccttccgcgtggccgaggagcacttgggcatcccagccttgctggatgccgaggacatggtggccttgaaggtgcctgaccggctgagcatcttgacctacgtgtcccagtattacaactacttccacggccgctcccccattgggggcatggcaggcgtgaagagggcctcggaggactctgaggaggagccgtcagggaagaaggctccagtccaggcggccaagctgccctcgcccgccccagcccggaagcctccactatctccagcccagacaaaccctgtggtccagaggaggaatgagggtgcagggggcccgccccccaagactgaccaggcattggcgggcagcttggtcagcagcacctgcggggtctgcggcaagcacgtgcacctggtacagcggcacctggccgacgggaggctttaccaccggagctgcttcaggtgtaagcagtgctcctgcacgctgcactcgggggcctacaaggccacaggagagccgggcaccttcgtctgcaccagccacctccccgcagccgcctctgcaagccccaagttgacgggtctggtcccccgacagccaggggccatgggtgtggattccaggacctcctgttccccacagaaggcccaggaggcaaacaaggccagaccgtcggcctgggagcctgctgcgggcaactcgcctgccagggcttccgttccagctgcacccaaccctgcagccaccagcgccacgtccgtccacgtgaggagcccagccaggccctctgagagccgcctggcccccactcccacggaggggaaagtccgccctcgtgtgaccaatagctccccgatgggctggtcgtcagctgccccgtgcacagcagcggctgcctcccatcccgccgtgcccccgagtgccccagaccctcgcccggccacaccccagggcgggggagccccccgagtggcagctcctcaaaccacactcagttcaagctccacatctgcagccacggtggaccccccagcctggaccccgtccgcctccaggacccagcaggcccggaataagtttttccaaacatcagcagtgccccccggcaccagcctttctggcagaggtcccaccccgtcacttgttctatccaaggacagcagcaaggagcaggcgcggaacttcctcaagcaggccctctcagcgctggaagaggctggcgctccggcgcctggcaggccctccccagccactgccgctgttcccagttctcagcccaaaactgaagcaccacaagcaagtcccttagccaagccgttacagtcctcgtctccccgggtgcttggcctcccttcgaggatggaaccgccagccccgctgagcacgagcagtacctctcaggcatccgcgttgcccccggcaggcaggaggaacttggctgaatcctcaggggtcggcagggtgggtgctggctccaggccgaagccagaggccccgatggcaaagggtaaaagcaccaccttaacgcaggacatgagcaccagcctccaggaaggccaggaggacgggccggcaggatggagagcgaatctgaagcccgtggacaggaggagcccagctgagaggactctgaagcccaaggaaccacgggccctggcagagccgagggcgggggaggcccccaggaaggtctcaggcagctttgctgggagtgtccacatcaccctgacccccgtgaggcctgacaggaccccacgcccagccagcccaggacccagcctcccagccaggtccccctccccaccccgccgcaggagactggccgtccctgccagcctcgacgtttgtgacaactggcttcggccggagccccctggccaggaagcccgagtgcagagctggaaggaggaggagaagaaacctcaccttcagggcaaaccagggagacccttgtccccggccaatgtccctgctctgcctggcgagacggtgacctccccagtcaggctgcaccccgactacctctccccggaggagatacagaggcagctgcaggacatcgagaggcggctggacgccctggagctccgcggcgtggagctggagaagcgactgcgggcggccgagggagatgacgctgaggatagcctcatggtggactggttctggctcattcacgagaagcagcttctgctgagacaggagtcagagctgatgtacaagtccaaggcccagcgtctggaggagcagcagctggacatcgagggcgagctgcgccggctcatggccaagcccgaggctctgaagtcactgcaggagcggcggcgggagcaggagctgctggagcagtacgtgagcaccgtgaacgaccgcagtgacatcgtggactcgctggacgaggaccggctccgggaacaagaggaggatcagatgctgcgggacatgattgagaagctgggcctccagaggaagaagtccaagttccgcttgtccaagatctggtcaccaaaaagcaaaagcagcccctcccagtagtagccagtagggccgtgggctcggcccggacctggcatccggacttggactcggggccatgggcttggcccggacccggaacccggacttggtactcggggccgtgggctcggcccggacccggcattcggacttggtactcggggccgtgggctcggcccggacccggcattcggacttggactcgggaagggcctcctgtccctacaaggggcatgtggacagcagggacctgcgctaccgtctgtggtctcaataaagaaaccgaccacatggccccggaaaa

SEQ ID NO: 491452 - DNA, 416 bp, Homo sapiens
cctggttgctcaggtctagacagtgtggagtctgtatttgagacactggtagaggacagcgcacaacaggaatctactctcaccaaacttggcaacaccatttccagcctgtttggaggctgtaccacaccagtatgccaagtgataatggtacttgatactgtccaggcaggaagaggagacgccctgcagagtgggagcaaggtacgtagcttgggtgagcagggtggacgctcatggtaggaagcttgaggccccaggtggagcgatggtctctcagcatcccatccccctttaacctaaggtgagatgcaatcccatggggagaaaagggccacagaaaaagaatcatggtgactagtctgaggcccagaaatcaagtgagaaggccgaggcagggcctgagggcgtcgctc

SEQ ID NO: 491453 - DNA, 293 bp, Homo sapiens
cccgaggtatacggcgaccccgagggtcggacggctgctgcgtgacgagtgtgtgcatcgtacagactgacggctgagcgagttgctaagacaacgtcatgctgccgtcgggagcatgatcgatagggatctcgataacaaactcatggagacattccgcaggcttggagaacatggagcggataatgacccgagtggcattgcgctcagcacgtccacgtgacatctccagattacgggatagcctcagactcctgccaacgtttacgtgacgcttctcaaatgcatcggat

SEQ ID NO: 491454 - DNA, 2947 bp, Homo sapiens
cttctcttagggacccggcactcgtcgccctcagtccggctcagctggggctgggcgccgtgggtctggcggttccgtagcggtcccagcgtctgtcccgccggccgggcggtcgcggcacagccgcgggaaggtgtcggatggcggttccgccgcgcggcgggcgcgccgcccacatggcggccatcagggcgctgcaacagtggtgccggcagcagtgcgagggctaccgcgacgtgaatatctgcaacatgaccacgtcgttccgcgacggcctggctttctgcgccatcctgcaccgccaccggcccgacctcataaacttcagtgctctcaagaaggaaaatatttatgaaaacaataaactggccttccgcgtggccgaggagcacttgggcatcccagccttgctggatgccgaggacatggtggccttgaaggtgcctgaccggctgagcatcttgacctacgtgtcccagtattacaactacttccacggccgctcccccattgggggcatggcaggcgtgaagagggcctcggaggactctgaggaggagccgtcagggaagaaggctccagtccaggcggccaagctgccctcgcccgccccagcccggaagcctccactatctccagcccagacaaaccctgtggtccagaggaggaatgagggtgcagggggcccgccccccaagactgaccaggcattggcgggcagcttggtcagcagcacctgcggggtctgcggcaagcacgtgcacctggtacagcggcacctggccgacgggaggctttaccaccggagctgcttcaggtgtaagcagtgctcctgcacgctgcactcgggggcctacaaggccacaggagagccgggcaccttcgtctgcaccagccacctccccgcagccgcctctgcaagccccaagttgacgggtctggtcccccgacagccaggggccatgggtgtggattccaggacctcctgttccccacagaaggcccaggaggcaaacaaggccagaccgtcggcctgggagcctgctgcgggcaactcgcctgccagggcttccgttccagctgcacccaaccctgcagccaccagcgccacgtccgtccacgtgaggagcccagccaggccctctgagagccgcctggcccccactcccacggaggggaaagtccgccctcgtgtgaccaatagctccccgatgggctggtcgtcagctgccccgtgcacagcagcggctgcctcccatcccgccgtgcccccgagtgccccagaccctcgcccggccacaccccagggcgggggagccccccgagtggcagctcctcaaaccacactcagttcaagctccacatctgcagccacggtggaccccccagcctggaccccgtccgcctccaggacccagcaggcccggaataagtttttccaaacatcagcagtgccccccggcaccagcctttctggcagaggtcccaccccgtcacttgttctatccaaggacagcagcaaggagcaggcgcggaacttcctcaagcaggccctctcagcgctggaagaggctggcgctccggcgcctggcaggccctccccagccactgccgctgttcccagttctcagcccaaaactgaagcaccacaagcaagtcccttagccaagccgttacagtcctcgtctccccgggtgcttggcctcccttcgaggatggaaccgccagccccgctgagcacgagcagtacctctcaggcatccgcgttgcccccggcaggcaggaggaacttggctgaatcctcaggggtcggcagggtgggtgctggctccaggccgaagccagaggccccgatggcaaagggtaaaagcaccaccttaacgcaggacatgagcaccagcctccaggaaggccaggaggacgggccggcaggatggagagcgaatctgaagcccgtggacaggaggagcccagctgagaggactctgaagcccaaggaaccacgggccctggcagagccgagggcgggggaggcccccaggaaggtctcaggcagctttgctgggagtgtccacatcaccctgacccccgtgaggcctgacaggaccccacgcccagccagcccaggacccagcctcccagccaggtccccctccccaccccgccgcaggagactggccgtccctgccagcctcgacgtttgtgacaactggcttcggccggagccccctggccaggaagcccgagtgcagagctggaaggaggaggagaagaaacctcaccttcagggcaaaccagggagacccttgtccccggccaatgtccctgctctgcctggcgagacggtgacctccccagtcaggctgcaccccgactacctctccccggaggagatacagaggcagctgcaggacatcgagaggcggctggacgccctggagctccgcggcgtggagctggagaagcgactgcgggcggccgagggagatgacgctgaggatagcctcatggtggactggttctggctcattcacgagaagcagcttctgctgagacaggagtcagagctgatgtacaagtccaaggcccagcgtctggaggagcagcagctggacatcgagggcgagctgcgccggctcatggccaagcccggtgcgtcccccgcgcgccagccaaggggccccagccagggatgccgcggagcccaggatgtttgggggccggctctgtgaggccacctgactgtcctggtggtgagaccttccctggagccaggcgagcccacgtttgagtttcaaatctcccacctcctggctgtgtgtcctcagccaaggtacttaaccttgctgtgcttgggtttcatcctctgcaaagtgaggatgcttgtagcacccacctcacgcagctgttgtgaggattaaacgaatcaattcgcacaaggaaaaaa

SEQ ID NO: 491455 - DNA, 1280 bp, Homo sapiens
agcgggggttccctggtcagcggcgctgaggcggctcgcgggagacgctgcgcgcggggctagcgggcggctggagcgtccggcgcacggggcgctctcgggctgccggcggggacagaagcgccgatatgatacgcaaggcatggaaggctcccatgccatccctgtgctggtggaacatgttgtccaccagggtaattgccatcgacaagagtcgagcacatggtaagtatgagcaaggcttcaacatggacgaagtgttgcaagatggaagttgaatgaccttagacactattaccaattaacgaccagtatgaagccacactccgagataagaccctacgattaagtgcataccacaattttgggcccacgcatatgcgacaagtgggccttccatgttggaaacaaactggggggaatcctaattgggaaaagggggttaccatcgggaggccaaatgataggttacctaacacactaactacgttgcgaaggactggaagccattgaggaggacgccaaaataataatttcactaactgtggaccaagaagaccgcttcaaaaagatcaaaattatagcgcaaataaaaaataccccgaagcaaggaaagtcatttggcaagaacagactgaagtcgatagtggaaattccagttttgaaacctgatatcacaagaggaacgtacataacagtttagcgcaagttccgaagggcaatggattgcaagcgacccatagagacgtcacgcaattcatttggagcacaatatctcaaaacgaaattgatagggcgtagaaaccaaataacgcgttgaaaccaccggagcgcattgacgcaccaatttagaacagccccgtaataaaataggagttcaaaacccaaatagtatcaaatcgcacaaacgtggcggagaaaaaccgttaacatctaaactgagagcacgccttgacaatcgaacatcacaattgccccgaaattggccaagcatagccaaaataaatcaccactgattatccatatccactacagtatggcttaaagcggcgaaaaaacgaaaaaagcttgaagacaaacccacatacccgggacacaccaagtaccacggtggaaaaaacccgggaaaaaaacggcaaaaacaaagcggacaaaaataccacacgggacagcaaataagacaccccccgaacaataaccgtccaaaagaaaaaataacgaccacatgaaacgatcgatgcgggagaaacccccaggaacacactggaagtacaacacga

SEQ ID NO: 491456 - DNA, 1127 bp, Homo sapiens
gacgtgggtgtagggcttgtgatgccaaccctgtgcagtcgggaggcccaggcatggggatggccgggctacccagcgagctgttggctgtgctgggacagaccccaggctcccagtggccctgctctgaagcgtggctctgtctccctacctgggggcagccaggtccccctccccaccccgccgcaggagactggccgtccctgccagcctcgacgtttgtgacaactggcttcggccggagccccctggccaggaagcccgagtgcagagctggaaggaggaggagaagaaacctcaccttcagggcaaaccagggagacccttgtccccggccaatgtccctgctctgcctggcgagacggtgacctccccagtcagggtgagtagtggtggggagccgggcaggggcccagccctccggcatcctcaccgcccctccgttcccagctgcaccccgactacctctccccggaggagatacagaggcagctgcaggacatcgagaggcggctggacgccctggagctccgcggcgtggagctggagaagcgactgcgggcggccgagggaggtccaaggcccagcgtctggaggagcagcagctggacatcgagggcgagctgcgccggctcatggccaagcccgaggctctgaagtcactgcaggagcggcggcgggagcaggagctgctggagcagtacgtgagcaccgtgaacgaccgcagtgacatcgtggactcgctggacgaggaccggctccgggaacaagaggaggatcagatgctgcgggacatgattgagaagctgggcctccagaggaagaagtccaagttccgcttgtccaagatctggtcaccaaaaagcaaaagcagcccctcccagtagtagccagtagggccgtgggctcggcccggacctggcatccggacttggactcggggccatgggcttggcccggacccggaacccggacttgtactcggggccgtgggctcggcccggacccggcattcggacttggactcgggaagggcctcctgtccctacaaggggcatgtggacagcagggacctgcgctaccgtctgtggtctcaataaagaaaccgaccacatggccccggaaaa

SEQ ID NO: 491457 - DNA, 302 bp, Homo sapiens
aatgatggtcctcagctactcaggaagctgaggtcagaggatcgcttgaacctgtgaggcagaggtttcggtgagccgagatggcgccactgcactccagtcctgggcgacagactgagacacggtctcaaaaaaaaaaaaaaaaaaaggaaaaaaatttttcctttaccctgtcaatagtaaaccagaaaaatcaggattattctgactttgaaagggacataattcctggaacaggggctcacgcattgtactctcagacctcggggaggcagagttgggcggatcgcatgaactcgggt

SEQ ID NO: 491458 - DNA, 328 bp, Homo sapiens
actaagtaaaccagaacctctgggtaatcgcaatagacgatctgtaatgtaaactagagggctggcggaaggtcagcagagaggaggagacatgatggaaattgcttgttatgttagacagggtgacacggaaactttctctcaggcaggtcatacctcacttgcagaagtgaggatcataagaagtcagctgtgttaaagatcatgcagatcaagctgatcaggcagagggaacaaaagttatcaagatcctgttgcaaacaaatagtctgtcattttcgagaaattgacatgagaccatggtaagtgagtttgagatttattctac

SEQ ID NO: 491459 - DNA, 138 bp, Homo sapiens
tgccttgagcatggagaatacggtcttgccagtatatgcaatggaggaggaggtgttctgccatgctaatacagaagctgtagacaacctctgatatttaaggagacaaccctatgtgaccagaaggcctgctgtaat

SEQ ID NO: 491460 - DNA, 173 bp, Homo sapiens
gaggataaacagagcgtacggatcgtggtggagatgggtgaaaacgacatatctgctttcacactacgagaggacactaatgatggagcggaggtcgcagatgctgaagcagatgcacgctgtccaagaacgagcaggagcgagaggcccagctgatccacgatcctaactct

SEQ ID NO: 491461 - DNA, 173 bp, Homo sapiens
  misc_feature (16)..(16): n is a, c, g, or t
  misc_feature (36)..(36): n is a, c, g, or t
tgcaaagctgaaaagntgtaacaatttctgggcggntttgaagctaaactccgtggatcacatcaaataccattcattttgtcatgttctagtaaattagttccattgtaaaaggttactctcatactccttatgtacagaaatcacatgaaaaataaagttccataatgcgt

SEQ ID NO: 491462 - DNA, 400 bp, Homo sapiens
cttgtcttattcaaatggaagtgttggccaaaacactcattatggtgatatatgtcctccttttcctcaggcctggggtgtggttcttgtgcttcgatggattctgtccatattggctttcacacaattgagagttaggtctcacatctgccagaagcattctttcttccgaaccttgcagagtccttagaatatatttcttgtgtgtatatagcacaagcgattgttcctgattggttcagaggcacagtttgtactggcaatactcgttttacatgagataaagggtgtcaggtcccccacttttggatacctcggagtcagagtggtggttctgcagagagagcgagatagacagagagagtgagagagacagagagagagagagacagagagagag

SEQ ID NO: 491463 - DNA, 152 bp, Homo sapiens
ggtttagggcaaaaatttttggccctttgttttcaaaagggggttttcttttgaatttttaaaaaaagccggtttttttcccccaaaaaggaccgggttaaaaaccaaatgtttattttttttgtttaaaaaggggggtgtttttttcccca

SEQ ID NO: 491464 - DNA, 952 bp, Homo sapiens
tacaagtggtccagtttccttaaaggacccccatctccctgaagggcaggtgcaggcagctaggtgagggcaaaaaatgtccatttgaaaatctggcccgtgatgtgaaggctttggcccaacatgtgctgtggaaaggcccccttcccgaggaaaaagttactctcgaaaccgagcgttcggggctctcctcggcgtgccgaggactccaagtttctccgccagtgggttagtgacctcgtagctccaccgtgcacaatcgtggacttcgaggggaaagaggcaaagctctcctgtggccttcggaaagaacccaagaactctccaagaaatgtgggagcgtgttaatgggtgtggtctccaaaagagggcatgcaaactggggaaaaaggctttctttccttcgagcttggctccaagctcggcgggaaccatatctccaaggggaagtgaaatatgtgcagagctcatatgacaaggctcgtgagtggagttctctttcgagggaaaaaagaatcacttcgggagtcacccacgagggccaccaaagccggccctttttataaaaaggtgcctcccagagaaatatagtggcgaggcgcccacgagaagaaaggggtgctccctcgagtgggggagctaacgtggccgcttataaatattcctatccaaaaccacaagagggggtccctcttggggcgcgagtgttgaacgcgaaaggggggccccttggcgcccttgggggcttcaagcaaagccagaggcgcccgtggtctccaaaatttctatcccaaatttccctcccttcgagggaccgaggggggcaagccggccttttgatgcctcctttcctttccggctgtcaaagcctgtggggggctttccgggggatatcttctttccccgggtgaaacaccctttcttcttttccccggggggggggggtggtcca

SEQ ID NO: 491465 - DNA, 1372 bp, Homo sapiens
agcggggggttggcgggtggggcggggcctcgccggcgccgtcaagtagcctgggggacaggccggcgcggctgggagcgggtgggcggccgggaggccggagcagcacggccgcaggacctggagctccggctgcgtcttcccgcagcgctacccgccatgcgcctgccgcgccgggccgcgctggggctcctgccgcttctgctgctgctgccgcccgcgccggaggccgccaagaagccgacgccctgccaccggtgccgggggctggtggacaagtttaaccaggggatggtggacaccgcaaagaagaactttggcggcgggaacacggcttgggaggaaaagacgctgtccaagtacgagtccagcgagattcgcctgctggagatcctggaggggctgtgcgagagcagcgacttcgaatgcaatcagatgctagaggcgcaggaggagcacctggaggcctggtggctgcagctgaagagcgaatatcctgacttattcgagtggttttgtgtgaagacactgaaagtgtgctgctctccaggaacctacggtcccgactgtctcgcatgccagggcggatcccagaggccctgcagcgggaatggccactgcagcggagatgggagcagacagggcgacgggtcctgccggtgccacatggggtaccagggcccgctgtgcactgactgcatggacggctacttcagctcgctccggaacgagacccacagcatctgcacagcctgtgacgagtcctgcaagacgtgctcgggcctgaccaacagagactgcggcgagtgtgaagtgggctgggtgctggacgagggcgcctgtgtggatgtggacgagtgtgcggccgagccgcctccctgcagcgctgcgcagttctgtaagaacgccaacggctcctacacgtgcgaatgtggacgagtgctcactagcagaaaaaacctgtgtgaggaaaaacgaaaactgctacaatactccagggagctacgtctgtgtgtgtcctgacggcttcgaagaaacggaagatgcctgtgtgccgccggcagaggctgaagccacagaaggagaaagcccgacacagctgccctcccgcgaagacctgtaatgtgccggacttaccctttaaattattcagaaggatgtcccgtggaaaatgtggccctgaggatgccgtctcctgcagtggacagcggcggggagaggctgcctgctctctaacggttgattctcatttgtcccttaaacagctgcatttcttggttgttcttaaacagacttgtatattttgatacagttctttgtaataaaattgaccattgtaggtaatcaggaggaaaaaaaaaaaagaaaacta

SEQ ID NO: 491466 - DNA, 768 bp, Homo sapiens
ggagaaaacccaaatcctggcggcaccggtgccttgtgcatgtcggggtctgacgggcactggtgccttgtgcatgtcggggtctgacgctggctccctgttgcagagtgtgactccagctgtgtgggctgcacaggggaaggcccaggaaactgtaaagagtgtatctctggctacgcgagggagcacggacagtgtgcaggtcagtgacggggtctgtgctggacgctggtggacccttcccaagtgaccatgatgtgaatggccccagcaggtactgccagggatgggaagcagttgagacccgtcctgcagacgtggctcccccagggtcactgtgcactcgccctgaggtccacgtgagacacagaagcagtgggggtgggggacgggctctgcatggccgaccccggtgtggatggcgctgctgcaccagcctctcgccggtggcctcgttccccaggtccaccgcctctgctctccctccagctcctgggtggcgattgccccgaggcttaaggccaggcctgcatggttgtgggctgcctgggtgagccctgggcgtggatggaacccggtggagaaagtgggtttcctgggcaggtgcggtggctcacgcctgttaatccagcactttgggaggctgagcgcgggggatcacgaggtcaggagatcgagaccatcctggctaacacggtgaaaccccatctctactaaaaacacaaaaaattagtccgggcgtggtggcgggcgcctgtagtcccacct

SEQ ID NO: 491467 - DNA, 395 bp, Homo sapiens
ggaatgtgcacgggcacagcatgtgggcacatatgacccagagttgtgaacacacgacacacaccaacctgtggctgagcgctctctatcccaagtcagaccggccggaagacagatcacaagtgcacgggtgaggacacccgctctgaccacagagtttggggaggctcaagacaatggtgtgctttggggaatcccttcacaaggtgtacgcgcatattggccccaagggcaccggccggaagatataagagaccgggcgggctttggttactcttaaccggttctgagttggccaagagggcactgtgccatgtgcccgcgaagagaagagacacactggtgggagaaggagaccgagagattccctttctgtgactcggcctcatctcttt

SEQ ID NO: 491468 - DNA, 338 bp, Homo sapiens
  misc_feature (88)..(88): n is a, c, g, or t
  misc_feature (90)..(90): n is a, c, g, or t
ttgcaggcctgaattacaggaaggggagaaaccaatggctcagggaatgagagccaatacctgtaaaagcagagttgggctgggcgcngnttgtcacgcctgtggtcccaggactttgggaggcttgaggcgggcagatcacgaggtcaggagttggagaccagcctgaccaacatggtgaaaccctgtctctactaaaaatacaaaaattagctgggtggggtggtgggcgcctgtggtcccggctgctcaggaggctgaggcaggagtatctgggagaattgaaccccgggggtggaggtcgcggtgggctgagactgtgccactgcactccagcc

SEQ ID NO: 491469 - DNA, 218 bp, Homo sapiens
gggaaacctgcttttttgttttaaagggaaccgagtctgctgggattcagatgaatgtaaacctccatcctcaggaagagcgaatatcctgacttattcgagtggttttgtgtgaagacactgaaagtgtgctgctctccaggaacctacggtcccgactgtctcggtgcgtttctcctcagggaaatcccatctcctacgtcacttcccctcttctt

SEQ ID NO: 491470 - DNA, 1470 bp, Homo sapiens
agcggggggttggcgggtggggcggggcctcgccggcgccgtcaagtagcctgggggacaggccggcgcggctgggagcgggtgggcggccgggaggccggagcagcacggccgcaggacctggagctccggctgcgtcttcccgcagcgctacccgccatgcgcctgccgcgccgggccgcgctggggctcctgccgcttctgctgctgctgccgcccgcgccggaggccgccaagaagccgacgccctgccaccggtgccgggggctggtggacaagtttaaccaggggatggtggacaccgcaaagaagaactttggcggcgggaacacggcttgggaggaaaagacgctgtccaagtacgagtccagcgagattcgcctgctggagatcctggaggggctgtgcgagagcagcgacttcgaatgcaatcagatgctagaggcgcaggaggagcacctggaggcctggtggctgcagctgaagagcgaatatcctgacttattcgagtggttttgtgtgaagacactgaaagtgtgctgctctccaggaacctacggtcccgactgtctcgcatgccagggcggatcccagaggccctgcagcgggaatggccactgcagcggagatgggagcagacagggcgacgggtcctgccggtgccacatggggtaccagggcccgctgtgcactgactgcatggacggctacttcagctcgctccggaacgagacccacagcatctgcacagcctgtgacgagtcctgcaagacgtgctcgggcctgaccaacagagactgcggcgagtgtgaagtgggctgggtgctggacgagggcgcctgtgtggatgtggacgagtgtgcggccgagccgcctccctgcagcgctgcgcagttctgtaagaacgccaacggctcctacacgtgcgaagagtgtgactccagctgtgtgggctgcacaggggaaggcccaggaaactgtaaagagtgtatctctggctacgcgagggagcacggacagtgtgcagatgtggacgagtgctcactagcagaaaaaacctgtgtgaggaaaaacgaaaactgctacaatactccagggagctacgtctgtgtgtgtcctgacggcttcgaagaaacggaagatgcctgtgtgccgccggcagaggctgaagccacagaaggagaaagcccgacacagctgccctcccgcgaagacctgtaatgtgccggacttaccctttaaattattcagaaggatgtcccgtggaaaatgtggccctgaggatgccgtctcctgcagtggacagcggcggggagaggctgcctgctctctaacggttgattctcatttgtcccttaaacagctgcatttcttggttgttcttaaacagacttgtatattttgatacagttctttgtaataaaattgaccattgtaggtaatcaggaggaaaaaaaaaaaagaaaacta

SEQ ID NO: 491471 - DNA, 1116 bp, Homo sapiens
gcgcaggtatggagccgcaggagcgcagagagaaactccatgttagctcgcgctcggttaagaaaacatgatatggagatcatcctattccacagtatgaggtgaacccacgtgaccacagagatttcacatcacctttcatgaacgcaacagggtccgggacagggatgtctacctggtaatagaggacttgaagcatgaaatgcaacgtgaagtacgaggtcagaagccaaggtatcttcaagaccttctcatggagagtgtgaattttatcaccccgccaatctctctagcacatggttccaggtatctgaatgcttaggttgacagtgcggtggcccttgaaacaaaggatacctcgcgtagcataggattaatccctgcaggtgaactgactctggacctctggatctcgtattcgtacgcagaagtccaaaagttgaaagaactcacagcaattgaactggagacaacactttgacaaacacagacgtttaaacttgccaaaccttttaggtactccagacagacgcatgctctacaacgaaggcattgtccaaggacaagcacgaggttgccatctggtcatacagacaaggggccaaaagtttggatacaatcgtccgtcaagaacatgggaacttgtcttagcacaggcaaatgtcagaagagacacttcacgattttggaaatccaatgggcttgacaagaagaggaagcaaaactttttccaaggccccaggaaggggcaaatttgggaattgcatatcgtactgggtactccaatcccaaggtccccgttaaggtaacggccacctagttcacgaaggaaaaacgtggggcaacagaatttcacaagtgcaacgcaagaactaaatagaccccttttttggcaaacggcagacgcacagcacttctggcacaggtccccttaatatgagacagacacttttacacatgggcccggaaattccgggacacttctaatgggctcccaaaaggttcgagcagagcagtttcgggacgaacaggcaacaaggcgcagataaaccctagaatccaggcatttttggcaagccttcgcacattttaaccaaggaaacagcaggtcagaac

SEQ ID NO: 491472 - DNA, 138 bp, Homo sapiens
aattcaagcttctaacgatgtacggggacatgtgagagtaacttgcagatcatttgaccctgggaggttgaggttacagtgagcgaaggtcgcaccgctgcactccagtcttggtgatagagtgagaccctgtttcca

SEQ ID NO: 491473 - DNA, 1022 bp, Homo sapiens
  misc_feature (238)..(238): n is a, c, g, or t
ctgtgtagtcttgaggttactcgtgcaatcctatgccaaactccatgtgcctggtagaggtcaagccatcacgaacgtgcgataccacggtacatgtcgcatgcggctaggacgcgccagatgacttctcataaaggtttcagcatatgcaacatactgagttcgggagagtccttacctcaggactcctgcacgctcctggcagccggtatgcctcatatccacgtgatgcgagaantgtatatcctaaccttcaaacaggtctcctccgcgggtaacgtctgggagcgagaggactgtggggtaccgtgcatgtcagacacccacggctgttcctacgtaggaagtgagagtctagtcgtcaaggctagatacctcctggcgcacatccaaaccctgagatagaggggggacgcagcctcatgaggagggcccctcgtttacctgcgtcagtagagggctgtaataagagcatctatactaggtccatgagcgtacaagtgtcctgcttttcgtatcaagaaccatattcccttatggttcaggccatcgcttcacatacccctctatatggaaatgtcgatgtgctcaaattcgtttcttagtcagtagcctcttaaaatcgtttttgcccgaagggggaaacaaatttccttcgggcttattggatacccaatcctaaggctccattagtgtggccttcccggctctgttttggtgagcgttgcgcccctttttgagggttttatgccattacccaaggctcggctcccaggatttggcgccggcctggaaaggtaactccttccagtgggtagagaggccgcgttaaatatgcccgccgataaatggttatcccaattagcccctcgttggatatttggctgtctcacagacccttttaagttcttatcaaatcggtgctttttacgatatataaacccccttcacaagggcgccgagacgccctagagggaaacccccaagagagagggccaccttattatatttttaaccacacg

SEQ ID NO: 491474 - DNA, 1617 bp, Homo sapiens
agcggggggttggcgggtggggcggggcctcgccggcgccgtcaagtagcctgggggacaggccggcgcggctgggagcgggtgggcggccgggaggccggagcagcacggccgcaggacctggagctccggctgcgtcttcccgcagcgctacccgccatgcgcctgccgcgccgggccgcgctggggctcctgccgcttctgctgctgctgccgcccgcgccggaggccgccaagaagccgacgccctgccaccggtgccgggggctggtggacaagtttaaccaggggatggtggacaccgcaaagaagaactttggcggcgggaacacggcttgggaggaaaagacgctgtccaagtacgagtccagcgagattcgcctgctggagatcctggaggggctgtgcgagagcagcgacttcgaatgcaatcagatgctagaggcgcaggaggagcacctggaggcctggtggctgcagctgaagagcgaatatcctgacttattcgagtggttttgtgtgaagacactgaaagtgtgctgctctccaggaacctacggtcccgactgtctcgcatgccagggcggatcccagaggccctgcagcgggaatggccactgcagcggagatgggagcagacagggcgacgggtcctgccggtgccacatggggtaccagggcccgctgtgcactgactgcatggacggctacttcagctcgctccggaacgagacccacagcatctgcacagtcaggaccggcctctccgattcttacccgccttgctgtctgtctcttggatgttggcgtggcgtgggccacgcatggatccgtggccggaacacgcacacccagccaggctacagctccagagtatggatagctgccttctctccagcctgtgacgagtcctgcaagacgtgctcgggcctgaccaacagagactgcggcgagtgtgaagtgggctgggtgctggacgagggcgcctgtgtggatgtggacgagtgtgcggccgagccgcctccctgcagcgctgcgcagttctgtaagaacgccaacggctcctacacgtgcgaagagtgtgactccagctgtgtgggctgcacaggggaaggcccaggaaactgtaaagagtgtatctctggctacgcgagggagcacggacagtgtgcagatgtggacgagtgctcactagcagaaaaaacctgtgtgaggaaaaacgaaaactgctacaatactccagggagctacgtctgtgtgtgtcctgacggcttcgaagaaacggaagatgcctgtgtgccgccggcagaggctgaagccacagaaggagaaagcccgacacagctgccctcccgcgaagacctgtaatgtgccggacttaccctttaaattattcagaaggatgtcccgtggaaaatgtggccctgaggatgccgtctcctgcagtggacagcggcggggagaggctgcctgctctctaacggttgattctcatttgtcccttaaacagctgcatttcttggttgttcttaaacagacttgtatattttgatacagttctttgtaataaaattgaccattgtaggtaatcaggaggaaaaaaaaaaaagaaaacta

SEQ ID NO: 491475 - DNA, 295 bp, Homo sapiens
ggcgatcacacccaccactaccaccgaggctgacactgggtccatttgcttcccagagtcttcctgtttgttaagaacatccacagtgacctgagaatcccttgaggagaactcattgctgacatggcatacgtagatgccgctgtgctcagtggtcagtgggggaaagcccaaagtgtccccatccactcgtaccccactgtgcagaggcccatccagccgtgtccagttgtatgagggagggggctgcccttcactcaggcacttgagcatatctccttctctgccaatgtgc

SEQ ID NO: 491476 - DNA, 1411 bp, Homo sapiens
agcggggggttggcgggtggggcggggcctcgccggcgccgtcaagtagcctgggggacaggccggcgcggctgggagcgggtgggcggccgggaggccggagcagcacggccgcaggacctggagctccggctgcgtcttcccgcagcgctacccgccatgcgcctgccgcgccgggccgcgctggggctcctgccgcttctgctgctgctgccgcccgcgccggaggccgccaagaagccgacgccctgccaccggtgccgggggctggtggacaagtttaaccaggggatggtggacaccgcaaagaagaactttggcggcgggaacacggcttgggaggaaaagacgctgtccaagtacgagtccagcgagattcgcctgctggagatcctggaggggctgtgcgagagcagcgacttcgaatgcaatcagatgctagaggcgcaggaggagcacctggaggcctggtggctgcagctgaagagcgaatatcctgacttattcgagtggttttgtgtgaagacactgaaagtgtgctgcagtcaggaccggcctctccgattcttacccgccttgctgtctgtctcttggatgttggcgtggcgtgggccacgcatggatccgtggccggaacacgcacacccagccaggctacagctccagagtatggatagctgccttctctccagcctgtgacgagtcctgcaagacgtgctcgggcctgaccaacagagactgcggcgagtgtgaagtgggctgggtgctggacgagggcgcctgtgtggatgtggacgagtgtgcggccgagccgcctccctgcagcgctgcgcagttctgtaagaacgccaacggctcctacacgtgcgaagagtgtgactccagctgtgtgggctgcacaggggaaggcccaggaaactgtaaagagtgtatctctggctacgcgagggagcacggacagtgtgcagatgtggacgagtgctcactagcagaaaaaacctgtgtgaggaaaaacgaaaactgctacaatactccagggagctacgtctgtgtgtgtcctgacggcttcgaagaaacggaagatgcctgtgtgccgccggcagaggctgaagccacagaaggagaaagcccgacacagctgccctcccgcgaagacctgtaatgtgccggacttaccctttaaattattcagaaggatgtcccgtggaaaatgtggccctgaggatgccgtctcctgcagtggacagcggcggggagaggctgcctgctctctaacggttgattctcatttgtcccttaaacagctgcatttcttggttgttcttaaacagacttgtatattttgatacagttctttgtaataaaattgaccattgtaggtaatcaggaggaaaaaaaaaaaagaaaacta

SEQ ID NO: 491477 - DNA, 506 bp, Homo sapiens
cagcaaccgtgaatctcaaacctggagagtggcttccggagtgcgaggcggaggtggctcctgacgctaagagcttcgtgctgaaccgtgggcaaagacagcgaacaatcctgtgcctgcaaattcaaccctcggttcaacgcccacggagacgccaacaccatcgtgtgcaacagcaaggacggcggggcctgggggaccgagcagtgggaggctgtctttcgcttccagcctgggaagctgttggagaggtgtgcatcaacttcgaagcaggcaacctgatgcgtcgaagctgccaggatggatacagaattgccaacgttcccgcaagacgccggtcatcctggaggccatcgaactacatggcatgctgacggtgagttcaagatcagaatgtgtggcggctttgacgtgaaatcggccagtccagtggtccccaaataaaggcgatgctgccctctgcttccgctcgtgaaatagaaaagaatagaacacatacaagaagt

SEQ ID NO: 491478 - DNA, 371 bp, Homo sapiens
gctctattaggatccccgctgagatgacagtcggcccccttcctgtgccctcaccaggaaacccgggtgcggggtaggggggcatgctgcggccgtcttgcagccggggccagggagacccacccagggtcacacagccaccagaggcagagttccagccctgtggttcccacagccaggggtggccgctcagccctgactgttgcttggactgaccccccactgcctttccggcctgtcccctgtgcaggtgctgggggcctcccacacccgtcttcacaacaaccctattaggtagtgattcccaccaccacttcacatctgagaaaaccaggcacagagatgtcacgtacctgcctgaggtcacacag

SEQ ID NO: 491479 - DNA, 326 bp, Homo sapiens
aaaccagtcgacgcaggttttggcaattactttccagccctaacctgcatcgacccaattcaaatggttcttagaggtaacgcagttccaaagtcgcctgaccatcaagagcgatttgactcgtcgtatcaagctcagaagttctattgataactgcgtgaacttccagatttccgggccaagtgtattcaagttggagtggcgttattggtgtccaagtgtgccatgctcgcaatattcgcgtccttgcccgcaaagccgtgccctgccctgcacccaatggtcgactcggcctgcgaatttagtagtagtaggcggccgtctag

SEQ ID NO: 491480 - DNA, 83 bp, Homo sapiens
atttggcagtttttgcttttgttggtcaagaattctttacaaaacccacacacacacatccacacacacacacacgatgcctg

SEQ ID NO: 491481 - DNA, 231 bp, Homo sapiens
ggtgacctcggtgtgttacggacggcgctgttacggacgggctcgttaggcggcgctgttccggcgggctcgttacggaccgtacggaggcgtgttaggagggatcgttggcgctcgttacggcggcgctcgttacggagggtgttaggaggcgtttaccggaggcgactcgttaggggcgcttgttacggcggggctgttaaggaggacgctcgtaacggtgggctcctc

SEQ ID NO: 491482 - DNA, 120 bp, Homo sapiens
ccgtaaaggcaaaaattttttttttttcccctttttttgaaagaaaaattttaaaatccaattatgtaaatatttccaagcctttgctatttttttttggggtttttttaactcctttta

SEQ ID NO: 491483 - DNA, 389 bp, Homo sapiens
gccataaataatcgtctttataatgttcataacataatattaacagcccaaagagcgaaaataatcgaaatatcaagcgatgtatgggtaaatacatagggcatattattcagccgtaaaataaaatgatgtactgatacgtgctgtaacagggatgagccctgaaaacatgcgatatcaccgaagcgcagttccaaaggatcatacattgtatgaacgttttatgaaatgtccagaacagggaaagccatagagacggaaagtagcactggtgagtccgaaagactggaggagagagatggatggactgctaatgggaggttcttatgggggtgatgagaaatgctataaaagatggatgtggtgatggtcgcacactggtcgagatt

SEQ ID NO: 491484 - DNA, 258 bp, Homo sapiens
  misc_feature (8)..(8): n is a, c, g, or t
  misc_feature (51)..(52): n is a, c, g, or t
cgaacggngtagtcgttgagggacgtgcaggagggcaggttgagggacatnngcaggagggcaggtggagggacacagcaggagggcaggtggaggggcatgcaggagggcaagtggagggacatggcaggagggcaggagggcaagtggagggacatggcatgagggcaggagggcaagtggagggacatggcacgagggcaggagggcaagtggagggacatggcacgagggcaggagggcaggtggcgttacgtg

SEQ ID NO: 491485 - DNA, 379 bp, Homo sapiens
tcggtcccaacagtcaagcacatcagcgcacagttctctttcaagcagtactgcaatcatcatacatcagtcaagccattcaagcaaccatggatctcatgaggcaggcaagcaggggcatgcactctagcaatcatcactactggctcccaatatttgctaatgtgtaaatttagtcagctactctgagtctggtatctcatgtgtaaattggagacattagtagatcctatgtcatggggttacatgaatatttaactggtaaatgtaagatgtttaacatggtgcctcgtacacagtaagtgcttaatccagcaatcgtcctgttgatcacaaaagcaagataatggacaggtatggtgagagcaacaacaatcaa

SEQ ID NO: 491486 - DNA, 535 bp, Homo sapiens
tgaagaatagttttgctggacatgggctccttgggtggcagtatttttctttcaacactttgaaaatgtcatccccttctctcctggcctgtaaggtgtctgctgagaaatccactgttagtctaatgggggttcctttatgggtaattagaagattgtcttttgctctttttagtatatttgcttttgctttgactttaagtggtttgattataacgtgctggggagaagatgattttgcattgtatctgtttggggacctttgggcctcctgcatctggatgtctaggtttgttgttatatttgggaagatttgatctaatatttcattaaataggatttctaatctttcattctctcttcacccttggggacactgatgatttgaatattcagttgctttacactgccccatatatcatgaaggggtcgctcattcttttttattctttactctttatttttgtccgaataggttgtttcaaaagacccgtcttcaagttctgagaatctttcttttgcctgatctagtcta

SEQ ID NO: 491487 - DNA, 570 bp, Homo sapiens
  misc_feature (569)..(569): n is a, c, g, or t
tgttatacaattcagctcgtacctcataggttcgctggcacactgatggatgtgtcatggcgacaagaggagaggggctgcacaccaagactgccctgttctcacgtagaggtacaagcggccgcagaagagaatcccgttggtcttgctgtgctggatgaagaaaaggaaggggtggtcggcgcagaagcgggggacgaatctggcacaccgcatcatcatgatggcagctgtggcggctgcagcctccgtgccttcctcattgacctccacaaaagacttgtgcacgaccttggacagagacaggtctgtctgggacattccagagaagtctgccttgcccagctcgaaggcatcagtcatgcccaggttgcgcaggacactctccatgtcgtagctttcctctagtttaaaccgcgggagggacacttccacctcctcttcatccatcatgtccagcctcgtccattctacgaacttctcgtaagtgagttctttctccaccgttctcaagtcagtggtctcgtccggaagcatgatgatcatattcagttccctgcgaacctatna

SEQ ID NO: 491488 - DNA, 198 bp, Homo sapiens
gaccccttcactgttcccaagagcgaacgggaagatgaggacgacaacgtggaggggagtgtaccaggaacgagtcagaaagagataggtaagatcgataagggaagatggctaagatctaaagaggaaaatggctaagatctggagagttggacttatatggacgcatgcttcactgagcagcaggaaaagacggaa

SEQ ID NO: 491489 - DNA, 190 bp, Homo sapiens
aatcgcttccttaaactgctgactcgagctgttctcggacaccgcgaactcctctttctctttgggagtcttcaccgtgactttgatgatcttaggctcagccgggcagcagccgagccttgggcgcagcagggccgcgggaggggccggtggggccgctcgtctcgccattctcgagcatggcggccgc

SEQ ID NO: 491490 - DNA, 372 bp, Homo sapiens
  misc_feature (56)..(56): n is a, c, g, or t
  misc_feature (116)..(116): n is a, c, g, or t
  misc_feature (118)..(118): n is a, c, g, or t
  misc_feature (122)..(122): n is a, c, g, or t
  misc_feature (124)..(124): n is a, c, g, or t
  misc_feature (128)..(128): n is a, c, g, or t
  misc_feature (137)..(137): n is a, c, g, or t
  misc_feature (192)..(192): n is a, c, g, or t
  misc_feature (194)..(194): n is a, c, g, or t
  misc_feature (209)..(211): n is a, c, g, or t
  misc_feature (216)..(216): n is a, c, g, or t
  misc_feature (224)..(224): n is a, c, g, or t
  misc_feature (227)..(227): n is a, c, g, or t
agaatgtgtaacaacgaccaggaaagtgagtttcctgaaggagttctttgttcctnatcaaagaaattgatacctgttagcattcactgccaccatattttaaggagaagaactcnantggngncgcngagcagcantaaaaatggaactaaggatggtgctgatgtactgtgtggctggtagaagtggggnantatgagagatggagnnnaactngatatgcnccntggcatatttacctacttactcgtgccaacaatgaacaaccgcttcaagcgttatgccttaaaaatctgtccgtttttttcccaggtacttaaaatacaagtgccagtaagtggttcttatgtgttttggggggaaaattttatt

SEQ ID NO: 491491 - DNA, 332 bp, Homo sapiens
atatcatcctatagaatctagacagaagcattctcataaacagctctgtgatgtctgcattcaagtcacagagttgaacattgcctttcatagagcaggtttgaaacgctctttttgaagtatatggaagtggacgtttcggacggtttggggcccatggtgataaagggaatatcttcccctacaagctagaaagaagcattctgtgatacttgtttgtgatgtgtgtactcaactaacagagttgaacctttctttttacagaacagttttgaaacactctttttgtagaatctgcgaggggatatttggatagatttcaggatttaaaa

SEQ ID NO: 491492 - DNA, 493 bp, Homo sapiens
ggacatgcctccggtgaaggacctgaaggcgagagctagcgaaagcactgtagtcacagctgtcgatagttgctcgtgaaccatcagctgcaggaaacacgtacacaaaagaagcctacaagaagtacatcaaagattacatgaagtcgttcaaagggaaatttgaagaacagagaccagaaagagtaaaaccttttatgacagaggcagcagaacacaaatcatgcacatccttgctaatttcaaaaactaccagttctttaattggtgaaaacttgaatccagattgcatggaaagctctattggactaccgtgaggatggtcgtgaccccatatatgattgactttaaggatggtttagaaatggcaaaatgttaacaaatgtggcaattattatggatctatcacctgtcaatcctaactggcttctgcttgtcatccacacaacaccaggacttaagacccatgggactgaatgtctaatagagcggg

SEQ ID NO: 491493 - DNA, 163 bp, Homo sapiens
ccctggctaatttaagtttttgcagagatggagtcttgctgtgttgccaggtctcagactcctggcctcaaccaatcctcctgcctcaacccagcaaagagctcggattacaggcatgagccactgcactccagcctgggtgacagaacaagaccccatcttt

SEQ ID NO: 491494 - DNA, 138 bp, Homo sapiens
cacgaggcgacgtctcgtttctctgccagtgagcgcaccgccacggggactgagctggacgacggaagcctgcgacccccgaccgcggcaggcaccgcttccagatgctgatgtctcgtcttgccttctgcgggaaca

SEQ ID NO: 491495 - DNA, 276 bp, Homo sapiens
gagccggtacacagagtctcattctgtcgcccaggtgaagtgcagggcgtgatctctggctcccgtgttcaagtgattctcatgcctcagcccactgagtagctgggattataggcacacgcaaccatgcttggctaatttttgtattttcagcagagacagagtttcatcatgttgtccaggctggtctcaaactcctgacatctggtgatacgcctacctcggcctcccagatttgtagaatttccacaatatagttcccctatttctgtaggg

SEQ ID NO: 491496 - DNA, 791 bp, Homo sapiens
  misc_feature (55)..(56): n is a, c, g, or t
  misc_feature (125)..(125): n is a, c, g, or t
  misc_feature (186)..(187): n is a, c, g, or t
  misc_feature (189)..(189): n is a, c, g, or t
  misc_feature (201)..(201): n is a, c, g, or t
  misc_feature (239)..(239): n is a, c, g, or t
  misc_feature (266)..(266): n is a, c, g, or t
  misc_feature (297)..(297): n is a, c, g, or t
  misc_feature (299)..(300): n is a, c, g, or t
  misc_feature (355)..(356): n is a, c, g, or t
  misc_feature (406)..(406): n is a, c, g, or t
  misc_feature (454)..(454): n is a, c, g, or t
  misc_feature (456)..(456): n is a, c, g, or t
  misc_feature (488)..(488): n is a, c, g, or t
  misc_feature (495)..(495): n is a, c, g, or t
  misc_feature (527)..(528): n is a, c, g, or t
  misc_feature (609)..(609): n is a, c, g, or t
ggtttcccccttctttttttggaagtaaaaatttttttttattatagcagttacnnccccttcccacagaaagaagttaattatccttttttttaaaggaaattatatttgacagcgccaccccncccctgtgccatatcctgggaagcaggaaattgttctcctgatgctaaatagctcttcttnnanaaccaatgaagngataagtattttatcattaacgcagtatctaccctttntaattataaatattttatataaaaagnatcccccccacattttctttttcacaaaaananngatagatctgatgtagagtccaaaaaaatggaaagaatgaaaaaagcatactagnnttttcttctctggtgtgcccgcccccccccccccaaaaaaaaagcccatnatgtcttccgcaagtataaaaagcattccatcccaaaggaaagttctncnggaaacaaagaagtaaaaagagcagaagatcnccctgtntttactcccccaaaataatcaatttcaacatnngtgatatgtttttccaggcttctttgggttgatcccccactaatagatcagaatatgtatgcagttctttctttaaccctnttttctcctatgtactgtgaacatttaaaaagtacttttaaatattctttggaaacttagcttttagtaactacttggttgtatcataatttattaactaatgttttattggtaaacattggcttgcctcccatgacttgccattataattaaaactgtgactactatctgtctccattaca

SEQ ID NO: 491497 - DNA, 397 bp, Homo sapiens
aagtcacgtctgggttggggataggaaagtaggagaccacggcgtgactatttctagctccccagtctccacaggggctactcgccctggctagctgcctggttttctctctcctgggctagggagctggggaggtctgcggggctcattcctggccctgcagtatcccaacaccctgctctggggctgtccccagagctcaaaggctagtgcctgaggtcacagaggtgtgagtggcagttcaccgatcccgtgtgtgctccatccagcacacagagccagagtctcactcagtagcaaacaggcaaagctcagaggtgcggtccgcagaggtggccgtggcatgccctgtgaccaggcagggattcgctatgtcgctgtgtggtgaccactacgg

SEQ ID NO: 491498 - DNA, 150 bp, Homo sapiens
gcatttccgatgtgctttggtggccagcccgtacggatagtctggcaacatggagagaatcctgatagcacaagcgtaccatacgggtcaggacatctctacaaattactatgcgagttagaagaaaacatttgaaattaatcccagaca

SEQ ID NO: 491499 - DNA, 949 bp, Homo sapiens
  misc_feature (31)..(31): n is a, c, g, or t
  misc_feature (72)..(73): n is a, c, g, or t
  misc_feature (120)..(120): n is a, c, g, or t
  misc_feature (200)..(200): n is a, c, g, or t
  misc_feature (204)..(204): n is a, c, g, or t
  misc_feature (206)..(206): n is a, c, g, or t
  misc_feature (253)..(253): n is a, c, g, or t
  misc_feature (273)..(273): n is a, c, g, or t
  misc_feature (286)..(286): n is a, c, g, or t
  misc_feature (337)..(337): n is a, c, g, or t
  misc_feature (373)..(373): n is a, c, g, or t
  misc_feature (398)..(400): n is a, c, g, or t
  misc_feature (428)..(428): n is a, c, g, or t
  misc_feature (432)..(432): n is a, c, g, or t
  misc_feature (438)..(438): n is a, c, g, or t
  misc_feature (458)..(458): n is a, c, g, or t
  misc_feature (507)..(507): n is a, c, g, or t
  misc_feature (512)..(512): n is a, c, g, or t
  misc_feature (557)..(557): n is a, c, g, or t
  misc_feature (566)..(566): n is a, c, g, or t
  misc_feature (606)..(606): n is a, c, g, or t
  misc_feature (740)..(740): n is a, c, g, or t
  misc_feature (801)..(801): n is a, c, g, or t
  misc_feature (876)..(876): n is a, c, g, or t
  misc_feature (886)..(886): n is a, c, g, or t
  misc_feature (913)..(913): n is a, c, g, or t
tccggccctgccatgggtctggccgataaantactgggtggccttggggccgggtgggggctgttagccatnngggaggcaggggaggtctagttgccaccccacgtggggttgtacgtntgaggacactggctgggggggcagggctgggtcggggccccagggtcagtggcagagctggcacttgattccaggtctcntacntntggtgctttgtggggaactgggtgggggcgggttctgtggtagggtnttgggggatgggggggaaanacgacctatttcnggtgggactggcaacggctcccaccctccctggggacggggtttattaaantttgacatcactgttggttttttttttttttttgcncacgttttgtgaaaagttgattttnnntacccaagacccagctttcgggtttganagtncccgtnatgggagttcaagttttgtntgagctgggggggaaggggctagagcccccattcagacatgggcaactngggtntggggtgggggctcccggtttgtcccataccctcttggtcttgtntcgggtctngggggattcggggggttcagcagtggctcctaaagcagcnaccggtgcctcctccatctccctgtcctcagacagtttgggccccgggcagaacgtgtcccctcggcccgcccggccaagcacagccatccagcgtcgctgtagttcctctgtctcagggctgaagtaccagcngaggtggctctgggtgatcttgaagacatgccttctgtcaggccgctcccctgcctcgggnggtccacctcgaagccaataaggggcaggctgcgctgggctttcacatcctgaggggctccgtagatatacagcncaagggttantttcagggacacgaaccatgccttgtncaacctttgccaccttctccatgtagtcagggagct

SEQ ID NO: 491500 - DNA, 121 bp, Homo sapiens
tgtctgcctctctgggcttggtccttggtgccttatttcacttttttggtcagctcatgtttttctggatggtcttgatgttttccagtgtctgggcattaaagagtttcatgtttattgt

SEQ ID NO: 491501 - DNA, 315 bp, Homo sapiens
cggcaccattctcatgaagttggtagtgagctgcgtctcagttcctgttatgccctttgcttctattttgccactacaagtggaagagagcgctctgccatctgctgtgctggtccatatggaggtaaagatgcccttcactatgccagaatcttttctagatgatggagatctggtccttggagatgaactatatgacctgcttgattctgcatcctgaatacttatgaaactgttatgccgtcagctttagtcagaggaccccttcatacagccagtgtctctcctagcatgcccttttcgggattgctttta

SEQ ID NO: 491502 - DNA, 1269 bp, Homo sapiens
ggcaagatggctgaagtagagcagaagaagaagcggaccttccgcaagttacacctaccagtccggcagttggaccgtcgatgcgagcatgcgtggaacaagtgctcccttacggatggcagacatgatctgtcgagcgtgctatcgaagtgcagcggccatgtcgggtctggcgtgctgaacctggggcctgcggtgcggcaagcagcagtccctgctgaagcgcctgcgcaaggccaagaaggaggcgccgcaccatggaagaagccggaagatggtgaagacgcacgcgtgcgggacagtgagtcgagtcctacaccgatgaaggtgggcagctctggtgggcgtctacgaatcgtgcaagaccttcaactcaggtggagatcaagcgcctgagatgatctggctactacctgggcgacgttctccatcaactactagacccgtatagcatggccggcccggcatcggggccatccactcctcccgcttcatccctctcaagatagtggcatcaactaatcagggcgctacatgactccaatgaagaacatcatcacataaaaaccgacatgaagttccccgggtgcagactgtgggacgggacccaccagggactccaagaagcgaggcaccccagacaggtcgagagcgacgtggcccccagggaactggcgggtccggactcacaggacccgcacagacatgggtgtggaaggggactgcggacaaccataccggtggacaatggggctggtgagccccaagagaaggggctcggggcccgtcagggggcaccacgggagaccagaaggaaggggcaacaaatggggatggaacatgggcagcggggcgcacaaaaccggggtgcacatggtgggcgacggcacaacacataaaagggagagcaagcatacacgtcccgcgagaaaaatcgcgcgagacgctctgaaaagccccacaggctcgagaaaaaagcccgcgacgggagaagaccataggaaacgaggcgagaatcagggacagcgggaacaagacgggcgccgcgcggaagagaacccacagtctcgccggcacaaagacaacaacaggggcgagaacccgaggggactcagcacgcaagaagagactaacacaagagacaagacgggaaatagcaaagagtgagaagaaaaactgggagagaagggtagatcaaacatcgaagcgcgcccaggcgcagatgcacgccgcagcaggacgaacgcaaaagaacgcagggaggagcga

SEQ ID NO: 491503 - DNA, 1222 bp, Homo sapiens
  misc_feature (6)..(6): n is a, c, g, or t
  misc_feature (8)..(8): n is a, c, g, or t
  misc_feature (10)..(10): n is a, c, g, or t
  misc_feature (13)..(14): n is a, c, g, or t
  misc_feature (16)..(16): n is a, c, g, or t
  misc_feature (19)..(19): n is a, c, g, or t
  misc_feature (21)..(22): n is a, c, g, or t
  misc_feature (26)..(26): n is a, c, g, or t
  misc_feature (107)..(107): n is a, c, g, or t
  misc_feature (699)..(699): n is a, c, g, or t
  misc_feature (763)..(764): n is a, c, g, or t
cgcgcngntncgnncnggnannggangtgagctgtcgcgggcggcgcccggccttgctcaacgcccagcagtccccaccgtcgctgccgccgccacctgccctcggnccgctgcctgccgccaccgccctcggccgctgccgaggcctcctgcagccatcatgtccgccagcgccgtctacgtgctggacctgaagggcaaggtgctcatctgccggaactaccgtggcgacgtggacatgtcagaggtggagcacttcatgcccatcctgatggagaaggaggaggaggggatgctgtcgcccatcctggcccacgggggggtccgtttcatgtggatcaaacacaacaacctgtatctggttgccacatccaagaagaacgcgtgcgtgtcgctggtcttttctttcctctataaggtggtgcaggtgttttccgagtacttcaaggagctggaggaggagagcatccgggacaactttgttatcatctacgagctgctggacgagctcatggacttcggctacccccagaccaccgacagcaagatcctgcaggagtacatcactcaggaaggccacaagctggaaacaggggccccgcggcacaccagccaccgtcaccaacgcggtgtcctggcggtccgaaggcatcaagtatcggaagaatgaggtgttcttggacgtcatcgagtctgtcnacctcttggtcagcgccaacggcaatgtcctgcgcagcgagatcgtgggctccatcaagatgcnnagtcttcctctcgggcatgcccgagctgcgcctgggcctcaacgacaaggtcctctttgagaacacgggccgcggcagaagcaattccggtggagctggaggatgtgaatgttccaccagtgtgtgcggctatcacgcttcgagaatgatccgcgaccatctccttcgatcccacccgagcggcgagttcgagctcatgtcctaccgtctcgacagccacgtcaagccttcgatatggatcgagtcggtgatcgagaagcattccccacagccgagatcgagtacatgatcagaggccaaatagccagtgcaagcggcggtcaacagccaacaacgtggagatccagcattcccgtgcccaagtgatgccgactcatcccaagttcaagaccgacggtggggagcgttaagtgggtccccgagaacagcgagattgtgtggtccatcaagtccttccc

SEQ ID NO: 491504 - DNA, 983 bp, Homo sapiens
gtgtatgttttgttttggttcctgtttggtgtgagttttttgtctggtttaggctttttggttgattttgagggttcttatggtgtttccccattatgttccctgcctttcaccctttgggtgtgtgttgtgtttcgtgagtctctgttctcttctgatccctgccatcgtgctgctctttctagctactttccagcattatgcacttctaatgttgttgtccgtcgctgtacttatgttggccttcacacagactgatgtggctaccttctcagattttacaggggatggtcaatccctttgcatttgaatgaagactttgcattcactccaagtttggtaatacgattgtacatggagttttgatcaatcggacttatctcagctctcctaggaactttaatgccagggccaggctgtgtatttctttcccaggaaattagctttccagcccctttatatattggagaagttgttttagcttctgcagaagtgaaaaagctgaagcggttcattgctattattgcagtgtcatgttctgtaatagaaagtaaaaagtactgttatggaaggctgggttaaagttatggttccagaagcttcctaatcctgattatagtatgttgttaatagatgcatacctcattacactcaatgcctgttgttaaagagcctatggggaattgctgctctttaccaaagaatggttgataggcccagtagcccatcttagttacggggaatgggaagcaaggaacgaagggttgttcaaatgcccactttccagtttggccttatgcatacatagcagacttgagtgtatgcaggatttcattatatgaccatgaggttttttgatttgtataattgttttagtaagttcaagaaagtagcgctgggaccacggtggcttcaatgccatgtaatcctggcaactttgcggaggctgcgtaccggcggagtcaacttgaagggtacgggaa

SEQ ID NO: 491505 - DNA, 474 bp, Homo sapiens
  misc_feature (60)..(60): n is a, c, g, or t
ccgcgcagctcttgttgctcaatgatcttgggggttgtgtctgttctcccccaattcttntgtggccccatcccctatttgttaaaacttacgtgtaaccccaaaattcacacttatgtcactttcccagtcatttgcgggcacgcacaggctgctaaaagcccaagttgcgtggtgcttgggtgcctgctggggtgagcgaggcaccctgccctctgccactgctcccatgttggaagcaaattgtcctttctccatctactgagggccatgcttcttgcatttgggggctcttggtgattttgctttttagatgcccctgggggaggtgccgcagtgctgttgagtgtccctggacacaggcaggctgggatgggtcccatggagagaacgtgtgttggacaggctctgccccacgtgagttcagtgtcggagaacaataataattataaagttctttaaaagaaacgtaaa

SEQ ID NO: 491506 - DNA, 387 bp, Homo sapiens
  misc_feature (1)..(1): n is a, c, g, or t
  misc_feature (73)..(73): n is a, c, g, or t
  misc_feature (91)..(91): n is a, c, g, or t
  misc_feature (95)..(95): n is a, c, g, or t
  misc_feature (99)..(99): n is a, c, g, or t
  misc_feature (115)..(115): n is a, c, g, or t
  misc_feature (117)..(117): n is a, c, g, or t
  misc_feature (192)..(192): n is a, c, g, or t
  misc_feature (198)..(199): n is a, c, g, or t
  misc_feature (237)..(237): n is a, c, g, or t
  misc_feature (247)..(247): n is a, c, g, or t
  misc_feature (250)..(250): n is a, c, g, or t
  misc_feature (253)..(253): n is a, c, g, or t
  misc_feature (312)..(312): n is a, c, g, or t
  misc_feature (381)..(381): n is a, c, g, or t
naaacagctatttttaaaaacacaacaaatacacaacacaaaacttggtaaaaataactcactatatggtacntatacgccagcatgcgcngctnatanatttatataataaaantncaaaatactcactttccataataaaaataagcttcgtagtttttgtgctgttattttacaagtatactgtaatangtctcnnccgtgtcttgtacctgtcctctccacctgtaatgttangtgtaatccncanatnaaaacgcgcgcgcgtaaaaaaggcgcgatgcgtaaaaaataaataaacatcgcggctangcgcggcgcgcgcgcgagcgcgagcgcggcgcgcgacgcgcgcgcgatttagcgcgaaaaaagcgacgncgcgaa

SEQ ID NO: 491507 - DNA, 1191 bp, Homo sapiens
  misc_feature (6)..(6): n is a, c, g, or t
  misc_feature (8)..(8): n is a, c, g, or t
  misc_feature (10)..(10): n is a, c, g, or t
  misc_feature (13)..(14): n is a, c, g, or t
  misc_feature (16)..(16): n is a, c, g, or t
  misc_feature (19)..(19): n is a, c, g, or t
  misc_feature (21)..(22): n is a, c, g, or t
  misc_feature (26)..(26): n is a, c, g, or t
  misc_feature (668)..(668): n is a, c, g, or t
  misc_feature (732)..(733): n is a, c, g, or t
cgcgcngntncgnncnggnannggangtgagctgtcgcgggcggcgcccggccttgctcaacgcccagcagtccccaccgtcgctgccgccgccacctgccctcgctgccgaggcctcctgcagccatcatgtccgccagcgccgtctacgtgctggacctgaagggcaaggtgctcatctgccggaactaccgtggcgacgtggacatgtcagaggtggagcacttcatgcccatcctgatggagaaggaggaggaggggatgctgtcgcccatcctggcccacgggggggtccgtttcatgtggatcaaacacaacaacctgtatctggttgccacatccaagaagaacgcgtgcgtgtcgctggtcttttctttcctctataaggtggtgcaggtgttttccgagtacttcaaggagctggaggaggagagcatccgggacaactttgttatcatctacgagctgctggacgagctcatggacttcggctacccccagaccaccgacagcaagatcctgcaggagtacatcactcaggaaggccacaagctggaaacaggggccccgcggcacaccagccaccgtcaccaacgcggtgtcctggcggtccgaaggcatcaagtatcggaagaatgaggtgttcttggacgtcatcgagtctgtcnacctcttggtcagcgccaacggcaatgtcctgcgcagcgagatcgtgggctccatcaagatgcnnagtcttcctctcgggcatgcccgagctgcgcctgggcctcaacgacaaggtcctctttgagaacacgggccgcggcagaagcaattccggtggagctggaggatgtgaatgttccaccagtgtgtgcggctatcacgcttcgagaatgatccgcgaccatctccttcgatcccacccgagcggcgagttcgagctcatgtcctaccgtctcgacagccacgtcaagccttcgatatggatcgagtcggtgatcgagaagcattccccacagccgagatcgagtacatgatcagaggccaaatagccagtgcaagcggcggtcaacagccaacaacgtggagatccagcattcccgtgcccaagtgatgccgactcatcccaagttcaagaccgacggtggggagcgttaagtgggtccccgagaacagcgagattgtgtggtccatcaagtccttccc

SEQ ID NO: 491508 - DNA, 248 bp, Homo sapiens
ggggggggccccccccccccccccccccccgggggggggggggggggggaaaacccttatttttttttttccggggggggggtttttcccttgggaaatttttttttggttttttccccccttggggggtgggggccttttttttttttttttttttttggcccccccccccgggttttttggggggggggaaaaaaaaaggggaaaaaaaaaaaaagttttttcccccgggttttttttttttttta

SEQ ID NO: 491509 - DNA, 452 bp, Homo sapiens
  misc_feature (225)..(225): n is a, c, g, or t
  misc_feature (237)..(237): n is a, c, g, or t
  misc_feature (257)..(257): n is a, c, g, or t
  misc_feature (279)..(279): n is a, c, g, or t
  misc_feature (283)..(283): n is a, c, g, or t
  misc_feature (286)..(286): n is a, c, g, or t
  misc_feature (316)..(316): n is a, c, g, or t
  misc_feature (334)..(334): n is a, c, g, or t
  misc_feature (354)..(354): n is a, c, g, or t
agaagaactgccctggcaacatgcaagtacagttctagcagagacgccaaatcaactgtcaaaaccgagccactgccaccccacaaagccaggaaaagcttctaactgacaatcttgggtaagtcggccctcagcctctgcatctcccaccacagaccaaggctcccagatccccccagcccatgcactccatgtggtcccctctgtgtgctggaaaacaacggnattttgggtgtncatggggaattctgccctgnccacaggggttaaatcatggtnaatnatncaatgtgggaaattctggttcacgaacctncaaacacaaaaaccagtnatttttcccaacaaacctgnaccaactctgttattttccataaacgctggtcggctgggcacagcgatcttggcaacagattttgcgaaataaacttggtcagtggatcccagtcaaa

SEQ ID NO: 491510 - DNA, 512 bp, Homo sapiens
  misc_feature (75)..(76): n is a, c, g, or t
  misc_feature (101)..(101): n is a, c, g, or t
  misc_feature (108)..(108): n is a, c, g, or t
  misc_feature (123)..(123): n is a, c, g, or t
  misc_feature (131)..(131): n is a, c, g, or t
  misc_feature (136)..(136): n is a, c, g, or t
  misc_feature (161)..(161): n is a, c, g, or t
  misc_feature (222)..(222): n is a, c, g, or t
  misc_feature (285)..(285): n is a, c, g, or t
  misc_feature (474)..(474): n is a, c, g, or t
  misc_feature (503)..(503): n is a, c, g, or t
cttgtggctgtgtcgtgcgcgtgaccccgtaggcagcgggaggaccagctgccgcgcggggaggaggccgaggcnnagcttgagggaggccccggccctcngcgcctntgtctggcagatctntctgtganactanacaatccctgccccgccgccgggantaatcaagagttttggccggacctttgagcatacaccgagagagtgaggagccagacgacnagtacacactatggcgctgaaacaggattaataaggaacttagtgatttggcccgtgaccctncagcacaatgttctgcaggtccagttggggatgatatgtttcattggcaagccacaattatgggacctaatgacagccatattaaggcggtgtattctttttgacaattcattttctacagactacccctttaaaccacctaagggtgcatttaccaccaggaatttatcattccaatattaacccgtnatgggcagctttggcttcgataatttttnaggaatccg

SEQ ID NO: 491511 - DNA, 376 bp, Homo sapiens
taaggatccccagactgtcgacaggttggttagtgcagttggcacaaagtctatggctcacagtcagccttgatcttgccagtattcatgctactcctccaactcatctagtgcttctcctatatgtgcttgtgcagttactggcttaaccgtcaaactctgtccgggctgaattacatatttggtactgaaaggcttgggtccttaatgtgtcttatggcgaatcttcttctttcgcaggaacctttaggatagttctaatctaggagctcatgcttttatgcattgtaatatctttcttatcttgaagttattttgacttctcaattctccaaaattatatacctaaacctgtttttaaagaatgatactctac

SEQ ID NO: 491512 - DNA, 167 bp, Homo sapiens
tcagacggctgtgactgcaaggaaggtagggtgaccaacttgtctaatttgtccaagactttcccagttttagcactgaatgccccacatcccaggaaatccctcagtgccaggcaaactggaacagctgatcaccctcacctgccttggggctgctgcagaggcct

SEQ ID NO: 491513 - DNA, 763 bp, Homo sapiens
  misc_feature (363)..(363): n is a, c, g, or t
gtggcctccggtcgcccaccgagacgggtccccacggcgcacatcaagacggagcgagcgagtcccggccactacggcgacagccccgaggctcgcccgactacggttcctgcagcggccagtccagcgccacccgggcgcccccgccggacccacttcgccggctcacagggcgactatggcgacctgcaggcctccgaggcatacttagtggtgccctacccgtggctagcggcgaccacggctctcataccaggtagcgctcgcttgcgttccacgtcagcccgcagcgcggccccgtacgctccgtctacccccctgactttcaaaaccgggccccctttggtgccccctttgtgcccngcgccccgccccggagaggcccccaatttcccacggttccaaccttggggcacccgaagcgccgggttgtaaccatacaacgccctggacgccaggccccttggagaggcccgcatgcgctgcgggcgcgtaggggactcggcagggcggttcagcggggcgagccattggataccacgggcgccgagtgggtgtcgtcgactcggggctgggaaggggcgccccagagttgcgcttgaggcttccaacgtgacctgctagataggtctagcccggggataagcacgctatgcttgcccaagtggaccctcgaggctccaagataagccacatctctctgccggatgatggacctaggtctcgtctcccttactatcgtttgcttttcgagggtggtggg

SEQ ID NO: 491514 - DNA, 225 bp, Homo sapiens
cgctggcaatggagacaagcatatcccttgacaagaatctatctaccttccatagcggccaggctccactgaaacaacactcttatgctgactaacaccatcagcctcaggcctccttgaagcatctatgactccgttcagatgcaggactggatcggcacagcacaatactgtcccgctgtcggatctacaagccgtcaggaagaatctaccatgatgccgatt

SEQ ID NO: 491515 - DNA, 257 bp, Homo sapiens
accagatctttggaccttaactgcagacactccgtgagttcatcctgctccttctgtttttccacacatctttgtatggaagaattcttacttgaagtctctcaaggggcttgcctagaggagaatcacttgaacccggcagacagagcctgtagtgagccaagatcacaccattgcactccagcctgggcgacaacagtgaaactccgtctcagaaacaacgggaaatgcacaccagggggtactctgcttcatct

SEQ ID NO: 491516 - DNA, 110 bp, Homo sapiens
ggtgattagaggatccggatgaagtgttggtaggtgtgtcacgtcttctggaggtgtgctgctgcctttttgcctggagtgacagctgctttcgacactttgcatcagag

SEQ ID NO: 491517 - DNA, 256 bp, Homo sapiens
ttgagtgccgctacttgatatacctagctactggacagactgagtgccacattgattgcttgagcacgggaagtccaggctgcagtgaactatgatcgtcccactgcactccaccctgaagtgaaagaatgagaccctgtctcttagcgaaacaaaacaacacaaaaatcactgaaattaccagtgtcacccaaccttcagaaagcaccaccctaagcagtcagccgccatcaatgtcacgaatcggaacatcagg

SEQ ID NO: 491518 - DNA, 104 bp, Homo sapiens
ggctactggaaacaacccagctctggtatgacactgctgcctcatatccgggggacatgtgggctttgtgttcaccagaggtagcgccctcgactgacgatcag

SEQ ID NO: 491519 - DNA, 406 bp, Homo sapiens
  misc_feature (11)..(11): n is a, c, g, or t
  misc_feature (25)..(25): n is a, c, g, or t
  misc_feature (218)..(218): n is a, c, g, or t
  misc_feature (406)..(406): n is a, c, g, or t
aaaaatttggncttatgaaaattcncttggggaaatgtggaaatgaatgataatcccttgtcttttccccatcatatgtaaaacccctccccctccctctctatctttcccctccctaaaagatgagctgggctgggcgcggtggctcaagcctgcaatcccagtactttgggaggccgaggcgggcggatctcgaggtcaggagatcgagaaccatncctggctaacacggtgaaaccccgtctctactaaaaatacaaaaaattagccgggcgcctatagtcccagctactcgggaggctgaggcaggagaatggcgtgaacccaggaggcggagcttgcagtgagccgagatagcgccactgcactccagcctgggcaacagagcgagactcggtctaaaaan

SEQ ID NO: 491520 - DNA, 97 bp, Homo sapiens
aggtggacccctaccatggaggagaccatcaaagatcccccccacatccagctgtcttcctggatcactgtcattctctcaggtcatctttaacagt

SEQ ID NO: 491521 - DNA, 283 bp, Homo sapiens
tccactagtgtaggagtaatggcacatgcctgtagtcccatctactgaggaggctgaggaccgagaattgcttgaacctgggaggcagaggctgcagtaaaccaagatcaccactgtactcgagcctgggcgacagagtgagactctgtctcaaaatttaaaaaaaaaaaaaaaattatatgggactggaaaaggagtgccagtccattgcaacctgtggataataccagctccatgtgagggtggatctttcaattcattcaccaagcaagcatgcttttga

SEQ ID NO: 491522 - DNA, 256 bp, Homo sapiens
  misc_feature (113)..(113): n is a, c, g, or t
gatttcacaagtgtggtgttttcccaaggcccccttcccaaggtcagtgcaaacctctcactcccaagtttttttgaggccacttgcccccaagcatttcacaaaaaaccctngaggggttgggtccatttgcccttttacaagggtaaagccaatttcattaatttttgtttctttgggcctgatttgtatctctggaaggcattaattcttgaaaaatttgggtgattttccaaaaagcttttgtaaccagtta

SEQ ID NO: 491523 - DNA, 437 bp, Homo sapiens
agttgcaacgaaccatgaagacctctcccactctgcgaggatggcggggtgtctgctcatgtggttttgcgggggttatcctggtatgcgggagctgccttccaataagtgctggggaacctacagcctgagtcttggtgtgctcagtggccgagtagcacatggtgatgggcttgggagtggcacactgcagtaggctcagtgagccccggagctctgttcttgcttcttgtcttgctctactatagtacacgtgtgtatgagccatcttggtaccctgacagccatccagtgtatggcatgcctgtggcccctgactgatgtgcaggtagtgggcagcatgaacagcaacccctgggatggcatgagacttgccatcccagatccactgtggagaaccacaggccatcaatacgtgtgcagttggcccaactgga

SEQ ID NO: 491524 - DNA, 541 bp, Homo sapiens
tcaggtgatccacccaccttggctcccaaaatgctgggattacaggtgtgggccaccacacccggcccattttctcttctttacagccccgtgatccgtttcccgttgggcacagatcagtggatctacaacctgttacccagcttcccctagccaagtgaacaggtgcccctccctgaagtttgaatggtgagtggagcgacagcgatgttaagaatagttgcggttcgggtctgtctgtccaggctgttctgcagtgggactgttgcggttcctgtttcctggtctccagccgccttggcttccacctgtttccaagtccctttctctggcctacagtcagttccatgagttcctgatagttttccaatcagtttccttttgctaagttacctagaaaggatttctgttgcttacaatcagagaaccttagctgttatacgtaaggagcacaggaaacatttgcaatataagggcagggtcccctgagagctgggagtcgtgtgtaggaggggccatcctcagattaggaagaagactt

SEQ ID NO: 491525 - DNA, 492 bp, Homo sapiens
gacacttttaatattatgttatgacatgctggttcttactgtattttattaaacatgatactagttagtgggcaattaatgtgtttagactcataccacaagttcctgccttctgtgtgttatggttgaatgtcagttcagttttcaaaacatttgtagcgctatttgaattttctcatgtgtgtgccacccactggctaatctgtgacttgtagagtgttctatttcttaattcagttctcaaagactttgatatgctgactagaatcagatccatttattcatagctgtgggtaagactgggagctcataaacaactttacggtgttgctttttaaaattcttccctctccttaatattttctggctgtctggagtttctcttttcagttatctggctaaaaagctggggctttagttatctgctctgccatgcagttttgtggctgttcctaagtgacatgagcacaaacaatgggagaagagagttag

SEQ ID NO: 491526 - DNA, 127 bp, Homo sapiens
cgtgatgacgactctagaggtatccccctaggtcttcaacaggctgatgtttcaaaatgtggggtcacagaaaagacgcttctagtgctgaggtcaaagctgactgtggtaggagatggggtctccc

SEQ ID NO: 491527 - DNA, 843 bp, Homo sapiens
gaaaaacacaaggatgcccactcacaccacttctcttcaacattgtattggaagttctagccagagcaatcagacaagagaaagaaataaagggaatccaaatcagtaaagaggaagtcaaactgtcactgttttctgacaatatggtagtttaccttgaaaaccctaaggactcctccagaaagttcctagaactgataagagagttcagcaaagtctccggatacaagattaatgtacacaaatcagtagctcttctatataccaataacaaccaagcagaaaatcaaatcaataaatcaaccctttttacaatagctgcaaaaattaaaatacttaggaatatacataaacaaaaagtcaaaagacctgtacaaggaaaattaaaacactgctgaaggaaatcatagaaaacagaaacaaatggaaacacatcccatgctcatggatgggtagaatcaatattgtgaaaatgttcatactgccaaaagcagtctacaaattcaatgcaatccctatcaaataccaccatcatgtgttcacagaattagagaaaacaattctaaaatttatatggaacaataaaagagcccacatagcaaaaaaaaggtaagcaaaaagacaatctggaggcatcaactactgattgaatatactataaggctagtcaccagacagtgtggtcatggtcaaaataggccgacacgttgattagaccgaatttaccatattagcagtgttttcaagcacaaaatatggggaaggctttcaattgtggttgggcggggaagaggggcttttttaaaacggggtagataggaattaaggaacattgggggtcca

SEQ ID NO: 491528 - DNA, 270 bp, Homo sapiens
atgtgcacagaatgagaaagcctgacacaggtgcctcccgcgaagactgtaatgtgctggacttaccctttaaattattcagaatggtggtgccgtggaaaatgtgtgcctaggatgccgtctcctgcagtggacagcggcggggagaggctggctgctctctaacggttgattctcatttgtcccttaaacagctgcatttcttggttgttcttaaacagacttgtatattttgatacagttctttgtaataaaattgaccattgtaag

SEQ ID NO: 491529 - DNA, 252 bp, Homo sapiens
ggattacttattcgtgttgcacaggcggaaaattacagaaggcaggcacagtggctcaggcttgtaatcccagcactttggaggctgaggtggggggtcacctgagatcaggagtttgagtcgagcctggccaacacggtgaaaccctgtctatactaaaaatataaaaattagctgggtgtggtggcatgcacctgtaatcccagctacttgggaggctgaggcatgacaatctctgtgcaacacgaataa

SEQ ID NO: 491530 - DNA, 1334 bp, Homo sapiens
taatggggcttgggtgagggaggtaggtggtagttggtgttaaatattttaagtggggtgatgaggaactagtgtgttaaggagttatgtgggggttaatttatgtgggtgggccattacttattaacccaaaaaaggattcaaaacccagcagaagtgtgcaagcagcagtgtgaaccaggagtggctcataccttctctgtggctttcccgtggaacaggatgtgaattttacacttcactttgtgacacaagccctattttctcaagttaattatgtggtgggattgggattggctgtggtttgtgggttttgtcgcagccttaaacaataaaaatttctcaaaattaccacatttctatagttctcttacaagaaataagtggtcttataatttggtgtgtccccaattctcacggtgtagaccagttagagaggccttcacccctcgagcaatatagaggggtgttaatcacctcgcaggtttctatacaccacattgtgtgtgtgacaagaacaaagagggtgtaccccagccttttgggccacaccggagaagtgtcttttatcacctcaattaaacggcacacgagtgttgttttacacacaccaaaacacacagacaacacacacacaccccctcgcgagagcggcgcatctatcatcatagtgtcgcgcgcgcgtagccgcgcgcaccacaaaccagcgcggcgcccccacggccaccacgatggggggccccacccagaggtggtcggcccaacaactacgccgccgcttgcagataaacaccgctgacgacgcacccccccacacacccacattcaactagcggcgatggtcacccaaccaacaagaccggagctggcggcaacaacaacaaactctcgcctcgagccgcggagagaccactccaccccccccccaatattattaccgtggcggaaagaccatccccggccacaacaactcacaaacaatactacccacgaaacaaaaacagggacgcgccccgaaggacggtcggtaaacaaaccccccccgggtgggccgacattaaatggaccaccccaccatccgcgcgccacaaaacacaacacgccacgccgcgtaccaaccaccacacaaccaccacccaacgcccacccgcacccagccaacgccccaccaccccaacacagcatacacgcccagaacccacccacacgccgcaacaacgcaacccacacaagacccaccgacctaccaccccacaccccaccccactacaccactcgcgccacacacacccaacccatcaccaaacacaacacccgacaagagcacaccaccc

SEQ ID NO: 491531 - DNA, 460 bp, Homo sapiens
gtataggttcattttgacagtgctgattaagacataaccaagactgggtaatttattaagaaaaagacgtgaatgaactcacagctccaggtggttggggaggcctcacaagcatgacagaaaggcacgtcttaaatggcggcaggcaagagagaatgagaactacggcaaaggggaaacctcttataaaatcatcagccctcatgagatctatccactatcaccagaacagtatggcggaaactgcccccatatttcgattatctcccagtgcgtccttcccacaacacatggcaattatgggagctaccattcaagatgagttttaggtggggacacagccaaaccatatcaggtggggaaacggatgcattctctagggggtaggggactggttttgctaccagagctgtttatggaagctaaagttcaccctgtttcccaccgagccgctgctgga

SEQ ID NO: 491532 - DNA, 173 bp, Homo sapiens
cgacctagaggatcccatcaacacggtagtattaagttcttaagatcattttatatatatatgtgtatatatataccatggtatatacgtagtatatatataaaatgatcttagaaacttaaatacttaccgtgttgaattttcgttggaagtgaattcttatcttaaaaatc

SEQ ID NO: 491533 - DNA, 649 bp, Homo sapiens
aaacgagggccagtgtatactgacgggcaggggtagaagcgggagccggatttatatcgtagggtgtgggttctacgtcgagctctttggtagctgatagaaggctgtactgaagacagcaagtcctgaagccccagatccagaaagcaactcagggcgaagagagtagtattgttgctcatcctcataggagggggcttgcgtcaccccagggctagggtcaaactgacccaggacccagggagtatttaatttgatttcagtacttgctccattcccataaatcatgagaacatgatgcttttcaaatttaaacacttagaaacagcttattaacacatatagaaggacctctaagctttcccctgtttgcctaatatacaacacccacagacccttctgagagtctgacaggagctttaaccttgagggaagggactcaaaggtgtgcacacttctcccacagtttaagtgccttctgccaacaacttctaaggtgctggtgccaggagaggactggggaggacgttgggatggctatggggcatgtacaacacaaagcaacagagaggtcttcatgttagggaagtggctgggcaggatgccaaacccaaatgacttattgagcaattctaaaccaaacagagag

SEQ ID NO: 491534 - DNA, 460 bp, Homo sapiens
  misc_feature (79)..(79): n is a, c, g, or t
  misc_feature (180)..(180): n is a, c, g, or t
atggaatcttctgcgatacaacaattcgtatctacagaaggtaactatgtttccacaatgcaaattttcccgcgagttnctacatcctcgctactggctcacatggtttgggcttggtgtactctggctttgggtacagcttccttatcctgttctctgctttctcggcacgcgtattgncgcaatggcgcgaccattcctgaaacgtcgtgaatctatcgcccgtaaaaacctggaactttgtttcccgcagcattctgcggaagaacgcgagaagatgattgccgaaaactttcgttcactcggcatggcgctggtagaaaccggcatggcatggttctggcccgacagtcgcgtacgtaaatggtttgatgttgaagggttggataaccttaaacgcgcacaaatgcaaaatcgcggcgtaatggttgtcggcgtccattttatgtcgctggaactg

SEQ ID NO: 491535 - DNA, 315 bp, Homo sapiens
  misc_feature (5)..(5): n is a, c, g, or t
ggtantctgtggtagcaaagagaagttatttgtgcccagcattggtcacttgggtgatgcaccagatagcaggcagatgttggttcatatggcttcgtcctctttcctcctaaaataatattggctttaccatcttaactcagctgtgggtttaacgtgggtacttgtacgtccacttggcatgaattgtcatctttgcgtgttttatttaagcccctcagcccctcaatataaataaggcctccaggtatcaagatctcatattaggatttactgtccttaatttattgagcaaaatctggaaaatgtgaaagc

SEQ ID NO: 491536 - DNA, 148 bp, Homo sapiens
ataaatacgggaaaagagaacaagattactatcactaattgacaaggggccgtttgagcaagggaagacattgaagcgtatggtccagggaagctgagaaagtacaacagctgacagatgacgacagcagcagggacacaggtgtcat

SEQ ID NO: 491537 - DNA, 262 bp, Homo sapiens
tttgtacggggtatccgagtaacgtcggggcatcggatagggcgagaaagtgttgtgggaagaaagttagatttacgccgatgaatatgatagtgaaatggattttggcgtaggtttggtctagggtgtagtctggagaatatggggaatatcagttgaatgagagcctccatatggatggcacaatacatgctccatattgatatggacataggtggaacgctgagctacagacgtactacatgcccgggtacatgctagt

SEQ ID NO: 491538 - DNA, 205 bp, Homo sapiens
ctcagccttccaagtagctgggattacaggcacccgcacaccacttcctggctaatttttataattttagtagaagtgggatttcggcatgttggctaggctggatctcgaacgactgacctcaggtgatgcctgcctcagcctcccccagttgctaggggttacagatgtgagccactgaacctgggcctggtaaggcttctct

SEQ ID NO: 491539 - DNA, 105 bp, Homo sapiens
cccagggtggggctggggctggagacgacgaggaggaggaaagtccacctgtccctcctgggctgctggattgtctcgcctgccaaataaacaggatcagcgcac

SEQ ID NO: 491540 - DNA, 538 bp, Homo sapiens
  misc_feature (45)..(45): n is a, c, g, or t
  misc_feature (67)..(67): n is a, c, g, or t
  misc_feature (87)..(87): n is a, c, g, or t
  misc_feature (127)..(127): n is a, c, g, or t
  misc_feature (134)..(134): n is a, c, g, or t
  misc_feature (141)..(141): n is a, c, g, or t
  misc_feature (152)..(152): n is a, c, g, or t
  misc_feature (160)..(160): n is a, c, g, or t
  misc_feature (165)..(165): n is a, c, g, or t
  misc_feature (171)..(171): n is a, c, g, or t
  misc_feature (186)..(186): n is a, c, g, or t
  misc_feature (189)..(189): n is a, c, g, or t
  misc_feature (197)..(197): n is a, c, g, or t
  misc_feature (220)..(220): n is a, c, g, or t
  misc_feature (223)..(223): n is a, c, g, or t
  misc_feature (225)..(225): n is a, c, g, or t
  misc_feature (227)..(227): n is a, c, g, or t
  misc_feature (260)..(260): n is a, c, g, or t
  misc_feature (264)..(264): n is a, c, g, or t
  misc_feature (269)..(269): n is a, c, g, or t
  misc_feature (296)..(296): n is a, c, g, or t
  misc_feature (299)..(299): n is a, c, g, or t
  misc_feature (301)..(301): n is a, c, g, or t
  misc_feature (306)..(306): n is a, c, g, or t
  misc_feature (318)..(318): n is a, c, g, or t
  misc_feature (322)..(322): n is a, c, g, or t
  misc_feature (327)..(327): n is a, c, g, or t
  misc_feature (349)..(350): n is a, c, g, or t
  misc_feature (371)..(371): n is a, c, g, or t
  misc_feature (379)..(379): n is a, c, g, or t
  misc_feature (381)..(382): n is a, c, g, or t
  misc_feature (386)..(386): n is a, c, g, or t
  misc_feature (388)..(388): n is a, c, g, or t
  misc_feature (399)..(399): n is a, c, g, or t
  misc_feature (404)..(404): n is a, c, g, or t
  misc_feature (412)..(412): n is a, c, g, or t
  misc_feature (464)..(464): n is a, c, g, or t
  misc_feature (538)..(538): n is a, c, g, or t
gaccctcaactatcagcaaaaccaacctcaagaacaccggcaaancaaccacacaaaaatggaacanaaagaggcttgcatggacancaccccattaagaaacaacaatggactgtcccctctttgngccaatngcctcangacggacatcncggctcgnatctnaaaatngccctcttttaaacnacngcacaaanaaaagctgggtggaaaaaacaanccncncnccaacctgataaccacctttaaaaaaaaccatnaccnccttnatgccttgggaaaaggaacgcttttcnacntnaggcncaacaataaaanaagnctgtngaacgaccgtaaaaaggtaacnntaggcacccaacccaccgtantaaagacntnncgtncnctttcaaccancaacntctttacntgtactaaccgccccacagtcatcaaaagcagcaaccacaaaaaggtcttcncaaaaatcaacctcaaggaagtaaacaacatgtatcccctcaaaacagaaggctatcctgacagcctggcgcan

SEQ ID NO: 491541 - DNA, 248 bp, Homo sapiens
ccaacttttttcccccggggggggggggcggttttaaaaagggggttttttaaagggccccccccccacccgggtggggggggcggttttttccccccgaattttttttttaacccccccggggggggggttttttaaatttttgaaaaaccccccctttcggggggcctttttatgggggcccgggcccccccggggccttggggttttggttgttttttttttttttaccccccctttttttttta

SEQ ID NO: 491542 - DNA, 268 bp, Homo sapiens
attcgcggccgcgtcgaccttaattttaaaaatactttattgctaaaaaaaaggtatatacattgttattttatacataatgctattgcacacttaatagactacagtatagtgtaaacataattattgtctgtttgtttttgagacaaggtctcactcttactgggggacctgccccgataatcacgtaggttcttttctattttcctaagtgtcggctggcttgagaaataaagggactgtcaacgcggccgttaatttagtagta

SEQ ID NO: 491543 - DNA, 955 bp, Homo sapiens
gagacagaggcttccagacgaacacagggctgcagtcgcgagcaaccctctgaagaagggaattacgctttagattcttcgatagcaatgttccagtgaatgaaatatagagtgttagcccaagacaccatgtacaaaatagcccagtcctttctgacgagtaactttgggaaaacgaagctgtcagaagtttctaacttacaaactggtttgaagattctttgatgcccagacagcaagtatccaatcacttttggaggcttacttttcatgatacaaaagcaattctgtgatgacttttctcttttcaagacgaaacgaaagatgcaagctagtttgtgagcaaaggaaggccaaattgcggtccgggcggacgggctgtggacggtgcacggaacgtctcaaagatcactaatagggcgaggacacacaaactttcattcacacgaattttcccaaacgaggattgataaatcttttctttaaactcgcatttgtaaacgctgtgtttccagttatggtcaagagcaagcttagtggggcgagaaatctggcgattctgggtgtgttccataacacgtggtcttcgtaatttgtgtgataacagaggttcacccccttgtatacacaagtgttgtacaccaatttgaatttacggaattacccaccgttctcacacacgtgggttatctcccaaaagggttgccaactcttccctcagtggacctaattttaacccccctttgtgggttgatatatctgccttcactttttgtggggcattttaaccgttgggttcccgttgggggaaaccattaaaaggtgttgtttaaagaaaatttctacatcattggcccattttcaaatgggccgacccactttttcctttgtggcgcccattgtggcgatggcgttgtattcaatcaggggcgattagttggccaaccattccccc

SEQ ID NO: 491544 - DNA, 166 bp, Homo sapiens
tgaatatcgggtacaagtcatgtgtagacatccaccctcatttacttggggttaagatgtcaactactttttttaaaaaaaaaaaccggatatttattggagcacttataactaccaggccccgtgccaacgccttaaaggttttatctcctttaatcccggaagg

SEQ ID NO: 491545 - DNA, 158 bp, Homo sapiens
agctcggtacccctttttttttgatatatctttttgtgtatatggtgaccacacaacacaagcatattcaagaattggttgaaccagtgcacaataaagagtcttactaagatatgggtcacccaaatcttttacccgtctcttaacaaaacctaaca

SEQ ID NO: 491546 - DNA, 326 bp, Homo sapiens
  misc_feature (273)..(273): n is a, c, g, or t
  misc_feature (282)..(282): n is a, c, g, or t
gctcgtaccttctggagctccggcgcacatgcaggctggagatagagctgcagtcccagctcagcatgaaagcatccctgtgagggcaacctggcggagacagagaaccgctactgcgtgcagctgtcccagatccagtgtgctgattaggcagctgtggatggagcacgctggcccatgcttcgctagcggagatggagcagcagaaccagtgaatacaaatatcctgcgtggatgtagaagacgcgtgctggagcagtgagattgccaccntaccgccgncctgcgtggaggcgagaaggatgcccacactagcctcaagtaca

SEQ ID NO: 491547 - DNA, 1113 bp, Homo sapiens
ggttcacaaccgcccttttaaaatgcgccttgtgcgcttttgtgtctccggggtccgctgtgttgtcaaggtgttctgtggaacttggtgggaattcaagcttccatggggcgctggggaattgggcctctcttgaggggcgctcgggggggttccaccttggccccccatgtggtgtacaccccctttttcgcgccaccattaaccagggggtttgggccatgtgccctcgcttctggtgggcaacctcttgctggatttgttcaccagggcccatggggaattgggcccctttaattgtcctcttgcaacagtgcctggggcccaaacaaacggttgccaacctccagcagctttcccacggtgtgcacagagggctcgaggcctggtgggggcctgaacacctgctggccgaatttaatgcaacactgggcctggcccctggccccaccaaaatatccccaccccgggttgtgtaaaaggcaacacacaggggccccacgaccacgggggcctggataggccacacggaagactgggtagccccctggattcttacctctagagcacctggcaacgctgggggctggcattacgcgccctctcacccaaactttctccacctggggctttctctgcctggggccacaccacacacacaggggggccccacacatgggtggcgcgcttggcaaaaggcctccaatggaggccccggagaccctcgataatggctggccctcggcgtggggctgagaccacgccccggacagagcacaacggctccacttggcacagcctcgttcctcgtggcgggagagctgcacaggagggcgccacctgtgcacactggccgaggggctggcaagcttttcctggcacgcgctaagcccacagggtggtgctggagagcacccaaaccctatcggcgccctgcttttcccacactgctgttccctgggcctttaacccctgctggctgcttttttggaaatgtgcttttttggaaagtgagagagtctgcctgtccgggctgggacacagagactcccacaaggaccccattttgcctcctttctggggaaataaatgagtgtctgtttcagccagcta

SEQ ID NO: 491548 - DNA, 265 bp, Homo sapiens
gtaaaaaggtctgccaatctctgggcggacgccgtggcattttacacaaagaagtgtatgtgtgtgttctcacattggtcatcatatcattccatgtagagcagttaactcttctgtctcagcaataacaacaacccattacctgtcatggaccagaggggtccctagagaattgcgaaacttgttacctccacatgatgccaagggatctcgttatcatactgaccactactgactgaggactaattgatgtcccctgcatcta

SEQ ID NO: 491549 - DNA, 367 bp, Homo sapiens
tcactccatggcgggtgacagagtgggactctgtctcataaaaaaaaaaaaaaaagaatcaaaaaatcaggccgggagccaggggctcacgctggtaatccccagtacgggggggggggaggcaggaaacctggcttgacccggggaggcggaggtggaagcgagctgaaatcgcgccatggcaccccagccggggcaacaagagcaaaaccccgtctcaaaaaaaaaaaaaaaaaaaaggataaaatagacggagtgtgtttccactttaatttgtggtgttttggagtggagtatataggaaaaatgttctcaatttaaccaaaaaattgtcgcggaaaataattcgggggtaggaaagaggaat

SEQ ID NO: 491550 - DNA, 174 bp, Homo sapiens
  misc_feature (14)..(14): n is a, c, g, or t
  misc_feature (66)..(66): n is a, c, g, or t
  misc_feature (88)..(88): n is a, c, g, or t
gtaatatatgctcntctgtgtgctgtgtgtgctgtgcgtttgtgtgtgtgtatacgtgtgtgtgtntatgtgtgtgtctgtacctgtntgtgtatatgtgtgtgatgtgtgctcgtgtgtgtgcatattcaggcaggtgtgcatttgtgcatgccagtgtgtatgtatgtgcgc

SEQ ID NO: 491551 - DNA, 296 bp, Homo sapiens
gattctaccaggaacacaactctggagaggcctccagtactatcggcctcagagatcacctgcagggatgccgtgtgctcgtctgtgataccttacatgtctctctagtcgctcatggctgcccctgtagtcaatgactcctcaaggatatcaagtgggtgtgcagatgtcccagaactggctgcttggcacatagtactcgtgtgctgcattgtggacgtccggcccctggtacgctgttatcgatctagcctgcgtttgtccaggtaggacttaccggcatgaagtaaatcgaa

SEQ ID NO: 491552 - DNA, 1014 bp, Homo sapiens
  misc_feature (13)..(13): n is a, c, g, or t
  misc_feature (291)..(291): n is a, c, g, or t
  misc_feature (996)..(996): n is a, c, g, or t
tattacaaaattntctagaaaaacgaccgtcctaggcctggccaattgggcccatcggcggcggcggcggacattgtccaccgcaacaagcgaaacgtcacaagatccagcttaatatgcggggagtggcgcggtcccagcatttgttgggcccttggcatgcgtttcgggccggccagttgacccagatttggaaatccaagaaggcgctactcacgaaggtcgtgtattaggacaggaagtaggtcctcctccgtcggatcatcatttggattctcccctttgtcactnggttgaagatcatggtcccaccaatgctcctcctcgtcctcttgagaccctttctctcccgacgggagaataaacagctggttgcggccatcaacaacgcgtaggggagcagcttgcttatcctcctgatcttccgcacgtatttggttatgtggatctttccaccactgatcctgtttctctttccgattagttttggtttcgtcttcatctttatggatcgatgcttcacagttgccaaggtgaacaagaaagtccacaataaaatccaaccaatacctttcaacaccagaggcatcccgattctggtccatcgggtacaagacgaccaacaaccgatgaagacagtgagtcagtatatgacgaaactcaaccaataaagataagttaggtcacgtacccttcgacgacaaattcacttcgacgttcgggttctggacaggtatcttgtcgttcgctttttcaaagaccacctcgagctaggagggaattatgtatccgacgatcgatctataccggcaagtattatgacgtgtcatctttgacacacaacaggtgacaaaggcaaacaaaaggaggagggtggtattctctgtcaactttgagctctctttatcaaatgtaatcccaaatccatgagagcatttgtttaacccaattaaaaaaaataaaacaattagccgttttagacgaagatagcatttnttataccaaaaaaaaatg

SEQ ID NO: 491553 - DNA, 121 bp, Homo sapiens
tactcaaataacttaatgagatgaaaaactctcagcctggcttactataaaattccccacatacgggcagctacaaagtcagtcagtctctagtcctttatcgctgtactacaaacacacc

SEQ ID NO: 491554 - DNA, 924 bp, Homo sapiens
tatgttcggctaattctggtattttgtccttgagacagagtctcgctctgtcgcccaggctggagtgcaattggtgcaatctgctagcgtcactgctaagactgctcgctcgtcccaggttcgcgccatttctcctgtctctaacacatataagaacaatgtggcacaatgttagtgagaaacaaattcagtcattatcccagttgtccagagaaacttctagtgatacatactagtttacatttttgttatatacactcctgttttagccttataactgcttacagaacattcaggtgttctacgaaagccggattttatattcaaagcattttactagttttataccctactttttaaagacttaactggattatcttgactctcttggcgggcaacctagtttccatgactgctgggcatcttagtactatgagatgtaccacagtattctgatgacgttgctcactgtcagggtctcgaaggttgttgccagttactgatctattactctatagcacagtgcaggtacattcttggagctaaacctctgagtgtctgttgagctctgtaggcaggatacgagtcttgagaatcacagttaggtgagtcaccagggtgtgtgtcgtatcactcttatatgtagcacgcacgacgtgtatgtatgtacgcactttgattttgtgctcatgcagtgtgcacattcactcgttaatcgtccctatgattggacactggcgtgaacataataccaccttttgagaactcctttagaggcctggcgatacgaatcttgaggcaagcggcttgccaaataagttcccactgtagggtttaccagtggtcggcttcacgcagtggcagttccccgacaccccagaggagtgatacgcccctagaacagtccgcgaccggatggaagaa

SEQ ID NO: 491555 - DNA, 560 bp, Homo sapiens
cgtatcaaaagtcctgctgatgctgctagctcatatgtctgctgtcgactcagcctgtctggccctgattcagaatttatcaaagtcacgaatatccaaataaattgagcaggaggatgtggaatcctctccggcatatctgaggagtgctgggacccagccaggaaaccatgcaatcagaggtcattggtatagtcccaagtacaaatgtcagaaattcaggtcacagggcaagccatgacttactctcctgagaagaagagatatggaagtccatttatcagagtccagggtattccctgcgtcctatgtacaggggatccttgtacagccacttgtgtcccacagaggacgttggcctcctaaggggttgaggcaagcagacagcccggagtgctccagaggaccctctgtgttgttcacagtgtgtgacaggtgacgagggactgaaggccactgttatacctcctcaggggacctttgtggctttggggtctcctcaccggcccccagttagtgttcctcctggttccccgaatcctcctgcctgtcccttcatc

SEQ ID NO: 491556 - DNA, 112 bp, Homo sapiens
  misc_feature (7)..(7): n is a, c, g, or t
  misc_feature (38)..(38): n is a, c, g, or t
  misc_feature (93)..(93): n is a, c, g, or t
ggggcgntgtgcccacgaggcaggggcgtacctgcctntgccccacccccaaacctcctgtataagaagtaccgtattttctgcccatcatantttgtaataaaacttgaac

SEQ ID NO: 491557 - DNA, 234 bp, Homo sapiens
aagcttgtatcataaaaattctggattctggtacatctagagtggcttgaatatcactatatttaatcttaccaaagggtttttattcacacctaaatttggacaaagttaacctgttcccttatgcacaccaccatcttacataaattcattattgggcaccctttttccttttttcaggatccctttcccttgaaaggtattatatttttataccttagggccatttggttt

SEQ ID NO: 491558 - DNA, 282 bp, Homo sapiens
agacaacaccatctctgactaaaaggagtcatctgggagcccgagaatcctactcctgcccgggcacagtggctcacgcaccaacatggagaaaccccgtctctactaaaaatacaaaaaaattagccaggcgtggtggcgcgcacctgtaatcccagctactcgggaggctgaggcaggagaatcacttgaaccagggaggcagagtttgcagtgaatggagattgcgccgctgcactccagcctgggcgacagagtgagactgcatcacaagataaaaaa

SEQ ID NO: 491559 - DNA, 157 bp, Homo sapiens
tttgaggatcccggctctaccttgtctcaatggtatctgctcagtacgagaggaaccgcaggtttcagacaaggtagagcctgagagacaaggtagagccgagagacaaggtagagcctgagagacaatggtagagcgcgagagacaatggtagatg

SEQ ID NO: 491560 - DNA, 749 bp, Homo sapiens
agttctggactggagaagcccttcctgttccgtggcatgggtttagtgcttaggagtatttttagtaacagtcctaactcagtagctatgtaagcacggagcgaagatggagtcacagggcaggctgggcttgcttcccacaggaagggctgggagtggagcaggaaggaaggcctgtgtgagcggcgccttgtgtgcaactatgtctgagtaggcagccggcagcacaatgtctcccttgtaccgagtagctttctcagaaagcgctccgagatgtgagggcactgcattggtggagtgtgacaatatgaaccgcttgaccgaacagacagaaatgtacgacagtcgcaggacggatttggaaaaggccaccccagaggtggagtggacaggaccattaccacctcagccaccctggtcactatcatcaccatggacaaagtgacttgagcagaggctctccttatagagaatctccttgggtcattttgaaagctatggagggaccccctttttccaggctcagaagatgtttgtagatgtgcccgacaacacagtgatcctggatgagatgaccctccggcacatggtccaggattgcacagtgtgaaaaacgcagttactgaaactcaagcgtctgttacaccagcaggacggaagtggatcattgcatgatgttcagtctcattggcatccaatccagagccagaagaaggcgatcagatttttagaatgagttttctaaatga

SEQ ID NO: 491561 - DNA, 963 bp, Homo sapiens
ctcgtctgttgtgtaaccggttcaaaggtggccctcggtgtctcgcccccagggtcgttcttgcccgctatatcgctcattgcggacagctttctccggttcatctcgcgtccagtcaaccagccggcattgtctccatcttgaaatgcccgtggaccagaatgagaacacacctgggctaccgggagggggaacaacacccaccgggggggtctccacttgtatgaggttatatgggatgcgttatccctctctgtgcacgattgtcctctcctcaattggcctccgcgttgttggtggcgccccccgcagcaccccctgcggcaggccgtgtgtgtgaccgcacattatgccccgacgctgccgcgcatgtcttggcacgcagcgggtgccccggggccttgatggctaattcttcgcgcctcgaatgaggcccccttccctcgggttgtgtgctctccgccgattgtgacactctccgtcttccccgggctatttcgcccatgcttggtgttttttgaaacacccgtgtctctctcgtcagtgcagatttttctcgtcggtaattatagaaagttaaagagtgtttccgctcctcccggcgacgacagcgtcgcccaggatgatgtttgaacccccccccaggggtcttagatatccccagaactggtaagatgtcttgcacacgtgggcggacatagaagagtttcgagaagaatttcaaagccccccctcatgatctatctcccattatgtttgcattgcacccgcttcttggatgtataattgttcgcagtgcttctgcgaggtagcgtcgcccaaaattgtgggagatggcgaaagtccccaaaaatgaagcttcatgttgcctcctctcacagggccgcctatgggccaccgatgtaagtcatttccacccacaggccccaagacacaccacacccctttttccaccacaaaaac

SEQ ID NO: 491562 - DNA, 137 bp, Homo sapiens
gggagagcatacttacatcttcacagaaatcacgggacagggcgggtctaaggagttccactccacatagtaggcacagataggccagaaggctaatatactaacattggaagagggagaaagtcagttataaaaag

SEQ ID NO: 491563 - DNA, 279 bp, Homo sapiens
agccatttcttgcacagctttggacgcaccaaacacacaagagacaccactcggtcggccagtcacctggttctaggtggacgaataggaaagcgatgatagaaatatggctctctgacatgctctgcaatctctgaaaccagagagtgttaccgcaaaacccaggcaaaggacacaggagacacaaacagaacgccttaacaagaaccactcaaagcaaaacagcctaccaaggagtagagtgcgggaatgcaacatggcgcggtggctgggagcctg

SEQ ID NO: 491564 - DNA, 560 bp, Homo sapiens
ttacgtgagaagttttctacatgtaaaattaaaagattatatttaaaatacttctttaggatgttattcagccatcaaaaaaaaaaaccaattaaaaggtcttaccagtaaagtattattaaaagcctcattggtgggagattcgcggacttcctgggttaagctggtctggtatttacttaattggtcccctcaaccaggtgttttcttttcagccggtgactggtccggtgccatttttaaaaatagccatcattgagtaagggcttctttaaaataatcccggacaatatcttgggcataatacgacataaagacaagacagtatatgtatgttttcattccggtttggtacgagtgcctcattggtagtcatgaacagtaacatagtacccttaattaaacaatggtaatgactaatctaaggtctaggaataacctatgtcgaagctaagtagaacacttagttggggtgtcaattttctatcatgcaaacaccttagggtacccagaccactttatgtatatatatccctgaaagctccctttaatggtccttg

SEQ ID NO: 491565 - DNA, 177 bp, Homo sapiens
  misc_feature (92)..(92): n is a, c, g, or t
  misc_feature (116)..(116): n is a, c, g, or t
ctaaggacgcggtgatgatgtgcactatgctggcagttgtattttggtaagatgggattcaccatataggcaggctggtcttgaactcctgnactcgggtgatccacatgcttggnctcccaaattgtgggattacagactgacccactgcttctggcttcattttcttaaagaatt

SEQ ID NO: 491566 - DNA, 1195 bp, Homo sapiens
gcaaggagagagtgcggctgctgagagccgagccctagacaatccgctgatcctctgagtcgtgaagtccgggaggcagcgaggtggtgttggggtttggtggcctgatggcaatgccccggcaggtctccgctcattgccagtaggtgacatggatgccaatgggctcgaggagaaagtggatcgtgtggtgcggtgcctcctcgtgtttccagtgctgtaggcctccgttagaagtacagcgccttgtcttagtgcagaccttgagtggatggccatcgcaggatctcaggagtgctccacctactaaaccatggccagcgtcagcttgctagtcgcccagagttcacgagccccaatttgccaattgacgatggcttgacattcagggtgatcaggcacgctcgcctgctaggggcgtaaggtcaagcgctttaacagtccaagaattgccatccacaaacgggccctaaatgcgtgtcgtatcgatttcgtcatctaggcgtccataatgcccaaggcatgtgcccgaacgacgcaggccgaaggccaggctttaagtcccaaaatgctaccccgaacagggtccgaaatgctgcctatgattgttgcccaggcagcgaaacactggtgagttagctgctaacaagtctgagatggcttcaaggccagaatgccactactaaagtgggtccaaatgcgactaaatttctctccaggtctctcaaatgccaatgaccttggcaagcagcacggctaagagccctttcacgggtggcaatggataccactagggcccaaaagatgataccagactctgaatgtaatcacggccaagtggcacatcccaggctgccttaagatcgaccccgggttattcttgacctgacggtgcccttgcgcgaaatttcgagtgggtcccagggtaaaacagggagcccgggaaataaattcggggcagagggaccgcagcatctacactgtcgtttctcaccaccaagctgcgaatcaagaggtggcccttcttgtctgtaatcgtacatgacaaactcacacacagacagacaacggtggccctgatttgctggtctgttcttatctatggtcaacagtgctacgacgggtcacggcacacggtgagcgcgactatcagagaagaacatctgcagaggaatacggcgccatactgtgaaaa

SEQ ID NO: 491567 - DNA, 106 bp, Homo sapiens
  misc_feature (69)..(69): n is a, c, g, or t
ggtagttagagctacatcatttcggcttcttcaaagtaggcatgcataataagaggacagtcttccttnaggtcaatcagctggaatagtcagtctattttatcca

SEQ ID NO: 491568 - DNA, 366 bp, Homo sapiens
tgaaccagtggtggccttttccacagtcaacttgtccctgtggcccagtctggcatggaaccggcagtaaatctgacaccagcatgggaacagagtgcgggccctggagctttggggattgtgagggaacaagacggccaggtcagattctctcagcgtttaaaaggcccacgccttcccgggtaacaattctgggctgagttccccaggacagcattcttgtgtcaactcgctgctaccgcagctgacgacctcacatgtgatgaggcaatgccacctctccagagtgaaaagctcctaagacagaaccattctccccgagatgcttattcccttgaagtgttataaatctcccctttcttgtta

SEQ ID NO: 491569 - DNA, 746 bp, Homo sapiens
ggtcccttgtttcaaaggtatggcacaaggtaacctataagccaaggaacccagaccagttcccttacagagacacttgattagagctggttttagaccccccacccccaacacatagtggttgagagaacagcagcataagtggctggcagaggcaaggaaagaccagcagagagagagaaaggaaagagacagagaggaaaagaggaaaagagagagaggaagagacaggaagagacagacagagagtcaaggatagagagagagagagagagagagacacacacacacacagagagagagaggaagagacagaggcaaaaggaaagtcaaagagagagacaaagtcaaagagagaaagagagagagaaagagagagagatacaaagttaagaaaaaaaagccatctataccaattctaatttagacaaaacagggtcttattaatagcaaaggataattaaaatcccaaattacaagggttttctttattattattattattattatactttaagtttgaggggtacagtgtgcacaacagtgcatttttttaaaatttttttaaaggttttcaactagagtgtgctaaaagttaacgagtgtaacagtgtatatagtaaccttatattcttgtgggccttagacagtctagtccacagacacaaaaagaggtttcgtgtggaaaagagtggttctcatctgcgaaaaaaaaggggaaaaaagggggggggggaattttataa

SEQ ID NO: 491570 - DNA, 310 bp, Homo sapiens
catcatggggtctggagactttcagctttcactgtgttctgagtgagatgtacttcaaaaaaaatggttttaaaaaatttagacatgggattcactattttgatcaggctggtcttgaattcctggcctcaagcagtcttcccatctcggactcccagcgtgctgggattacaggcgtgagacaccatgcccggctgagacgtactttcgagcatacccgacaggccgttacctactgggatgaacgtgagatgggaacatgccagagtagtgtttcaactgctctagctgttcccacactcgcagttaa

SEQ ID NO: 491571 - DNA, 1716 bp, Homo sapiens
  misc_feature (113)..(113): n is a, c, g, or t
  misc_feature (172)..(172): n is a, c, g, or t
  misc_feature (1275)..(1275): n is a, c, g, or t
  misc_feature (1619)..(1619): n is a, c, g, or t
tggaagacagagttttggctcttgttgcccaggtcgggagtggtggatgggctcgatctgggtctcaccacaaacctctctgtggccctccgtgggtttcaaggcaatttctntccgtggccttcaggcctcttggagtatagcgtggggttaaatagggggcatgtgccanccagtgccgtgggctaatttgtgggtggttttatagataagagacagggttttctctccaagtgtgtgggctcgaggctgtggtctctctcaaaactctctccaaacctctcgaggtgtgcactctgtgcgcctctcctgtgtggcctctcccaagagagtgtggcgtgggaatttcacgaggtgtggtgaagccacacgtgtgtgcgcgtggccccgccgtgtccccctctctcttattttatgagggcccgctgaaatatatcaaacgagtataagaagaagaatctcaagctatctctctctttctcagctgtggctgcgccgctgagagaaacaattcttctataagaatataactaatacacgagagtctctttaatactctcgctttctctctaatctccctgtgtgtggtgtcataattctcggaggggtggtgttgttccatcccacgaggagcagcgcgtgcgtagcagaaaaagggcgagacactctgctgggtgctctaccacgcgtggtggatgaaggggtgatcagccggtggggtggcccacccgaggtgtatcaagacggtggtgctgtgggaggcgctgacacattgttgtgtaaccccacaatatcctatacaacatgatgtggcggatgcagcaagttgcggcgtagcaacacaatttataatcatcgccccgcaaatatgctggtgggtcccctataagaggtgggggggcctatataacgcctgctctacacctctttgtgaggccgcccttttgtgggggagacactctcccaacgcttttctccacaagaggagatcatctaataagggggggcgcctactccaaactatctgttatcacaccaaggagggggcgtcctcctattaaaaaaaatactccaagctactacaaatctaccttgggggacgcacttggtggaggataatacacactcctatcaaacgattgagtccgccctgtggtgcacacacatattttttccccccaaactttttgtgtgtctgcccagcggaggcagggagagggaacaacaccccaagggggagtggtaaccccccgttatgtgggtaccccgtggagnaatggggaacagcgcaagcgaaagagacagacaacatgcaatgaacaaaggacaggtaagactagacatgaaacagcatatagaatacacacaacaacggagatggaattacgaatagacaataagcgagggtaccgacagcggcaacacaaaaatatagaggaaggtaacacatcctccgtggtgagaccccacacaaaaagaacgtgtgtgcttcactcacactaataagccagagaatcaaaacagacggagaacaagaaataaatctccacatatacaccaagaccacccaacggcgttgttgcgccaaccatagagggaggtgaggtcaaacaaacatntcatcaacaccccacatcagaagcacagcaggtgacacacacacacgctgtcgggccccacatcgtagcggagtgagaagaaagtaactaacatcag

SEQ ID NO: 491572 - DNA, 738 bp, Homo sapiens
  misc_feature (5)..(5): n is a, c, g, or t
  misc_feature (73)..(73): n is a, c, g, or t
  misc_feature (77)..(77): n is a, c, g, or t
  misc_feature (87)..(87): n is a, c, g, or t
  misc_feature (119)..(120): n is a, c, g, or t
  misc_feature (122)..(122): n is a, c, g, or t
  misc_feature (124)..(124): n is a, c, g, or t
  misc_feature (127)..(127): n is a, c, g, or t
  misc_feature (130)..(131): n is a, c, g, or t
  misc_feature (133)..(137): n is a, c, g, or t
  misc_feature (147)..(147): n is a, c, g, or t
  misc_feature (157)..(157): n is a, c, g, or t
  misc_feature (167)..(167): n is a, c, g, or t
  misc_feature (273)..(274): n is a, c, g, or t
  misc_feature (738)..(738): n is a, c, g, or t
tgaanctcgacataatgccgctcaaacaaagagagccaggggctggggggtcacgggaatggagcatggagcnctanattctgaaangggatgagaggagaggtgaaaaaaaaaaaaanngngnggnggnngnnnnnggcgggtggngtttggtttngcgattgggncaagcctggggatcagggaaatttgaaacagtcccacctggccacctggtaccccctccccccgttctaagtcagtgtgaataggcagaggtcagggatgattganntagaggggctggtgggaggcctggtgggcctggctggctgcagagactggcaaggggccacctgtggcattgcctggggttggggatggctgtgttcggagcgaggggggcactgtggaggtcttgatgtgaatcaccctggtgtccatgacctcacactcgatctgcatcatctcctcatagtcccccggggccccacggcctgacagggtctcattgggggccatggcaggcatcaccagggacatcttgggccgggaggtcttgttgtggctgatggctgggagcagcaggtggtcccttcggaaagagacaacataaaatgtgtcttcccgtcggtcaattgcatccaagaatgctggctgcgaacggtctgggtggcgatatagttgcagctggcccacagaatccctttctgggggtccagggggttggatggggactgccttaactggaggtgactn

SEQ ID NO: 491573 - DNA, 599 bp, Homo sapiens
  misc_feature (3)..(3): n is a, c, g, or t
  misc_feature (412)..(412): n is a, c, g, or t
ggnggcattcaaactggacatggtacacattgggactctggctcttcctcctcattaccggcttctccttcacgagctcccatctcagtacagggctccatcatctacccgggggctccagccagaaaacggggagtcagccttacagtctcggtaacaactactccctatttccaatcaaacgcaaaggggtatgggtcctaattctaaaatccatctacttcccttccccggttctaccacatctaaatccaaagctggccatcatctcttacccatagggccacaacagtatcccggcgggtctcccggttttcactcggaccattatctacatggcagccacagggggcttggaatacttgtatcagcgggccacagggggctcacgccggtagtccctacagttggngagggggaggggggaggatcgcccgagtccaggagttcaagaccagccggggcaacagggtgaaaccccgtctctatagaaaatacaaaagtcagctgggtttggtggtgccgcctggagtccaggcactcaggaggctgaagcgggaggatcgccgagccgggagggtgagcgcgagtgagcatga

SEQ ID NO: 491574 - DNA, 461 bp, Homo sapiens
  misc_feature (4)..(4): n is a, c, g, or t
ggancgctctagagtatccccatctcctaccccacgggtttaagcgattctcctgcctcagccccccgagtagctgggactacaggcatgtgccaccactcctggtcaatttttttgtacttttagtagagacagggtttctccatgttggccaggctgagatgctgctgtctctacaaaaaatacaaaataaaattaactgggcagtggcaggtgacttagtcttagctacttgggaggctgaggtaacaggatcacctaagcccaggaggttgaggctgcagtgagctgagattgtgacactacactccagcctgggcaacagagcaagatcctgtctcgaaacaaaacaaaactccagaagtttaacaacatgtatacctcctatgtatccataggagataaacagagaaagaagtaaacctcaaagaggtcgtggggtaggaggtgggtaccgagct

SEQ ID NO: 491575 - DNA, 203 bp, Homo sapiens
tctctctgccacttcatgagcccttggtatagcctttctagctccctggcaaagtccatggcgtcaccgccccgggtagccgcgagcgcgccaacatcaataccagcctttgcgagagcttcagtagaaccatcttgcgcgttcaggttgaagttgttctggaactcttcgaaccttttaagcgtgtcgagcgcctccgacgc

SEQ ID NO: 491576 - DNA, 139 bp, Homo sapiens
tagtgtctagaggatctcaattctgcaccacagcgtaggaaagcaaagcatcagtactgtgtctctgggaaggggccagaatggctgtgcccctgctgtggacagcgaggggtgggttaaggccagtacgagggcgctc

SEQ ID NO: 491577 - DNA, 462 bp, Homo sapiens
tgagacagagttttgctcttgttgcccaggctggagtgcaatgacacaatctcagctcactgcaaccaccacctcccaggttcaagtgattctcctgccttggcctcctgcgtagctgggattacaggcatgagccaccgtgcctggcctttttcttttttaaacagggtcttgctctgtcacccagactagaggtgcagtggcacagtcatggctcactgcagcctcaatctcctgggctcaagtgatcctcaagggcctccagagtagcccaccaccatgcctggcttttttttttttttttttttgtaagtagagacacatttcactgtgttggccaggctggtgtcgaactcctgggctcaagccattgcccacctcaaagtgctgggattacaagtgtgagccacgtcgacccggccgtgaattttattatagtagtagtattcgacccggggattt

SEQ ID NO: 491578 - DNA, 384 bp, Homo sapiens
  misc_feature (249)..(249): n is a, c, g, or t
  misc_feature (290)..(290): n is a, c, g, or t
  misc_feature (358)..(358): n is a, c, g, or t
  misc_feature (372)..(372): n is a, c, g, or t
actctagtaactaattttttaaagtctaaaaacgtttagtatgtgccagtgctaaaagggaagtgcaaagaacacagctgtgatgtttacaaaagcttgtcccaaataaagaggagctgatgttttaacaattcatctccggctgaactgaaggagataagctttacaaatggagtcagggtaccagagctgcctggggaagcagactcagcaggtggttcctcggctctgcttaaagcttcctcattncatatttaacctctgaattaaaacaatttcagaaagacctnacgctgggaaccaacgtcaaacaattttcaaatggtctccctgcatggaccttcaagacttacctttnattggttaccttanaagaccggcaat

SEQ ID NO: 491579 - DNA, 878 bp, Homo sapiens
ggagtctttgaaatggggttgtttaacagaggttgatacccctctttgacaccttggttggtttttggtgggaggcagtggggctggttgatacaatcttttcctcctgtctacctgtttctggtgtctctcagctaaaaggtgtgtgatcactgattgccagtttttaggactctgtgctcatgactttccccgcttcccaacttgcttgtaccttcttagtcttcatgcatttcttaaattcttcctaggtggttctgttggctgttttggtgttgtcctaactgtgcagttcttactagtgcttggtgtattcagtaaggtagccggaaagcatggcttggaggtcagatcttggttgcagccccagttctgcctattgggctgtgtgattttgagtaagtgattaactctatctcggcttcttgtttcctcctctgcaaaatggatgaaaataatagtacttctccacatgtgagtttcaatgaaatatagcgaatgacccactgtcagcctctctgttggttcccccaacccattgagaagtctcttgcttcctccactctccagtttctcagtacagggtcctgaggtttcctcccgaataaacaataggcctggtctgacgtggggggtcattttatttggcgcttgacgtcttccatccttgggggtatagaattatagctttgcccccaaggttccactcttgactggatttcacgcataatagatagccagccaacttagcaggacaacggtcaagtacgagtaaactttaagtgcggcggggaaaccctctggcgaatatacagagagtatccccaccagggaaaaattaccttgtataatatcacattcaccgataaacaaaacca

SEQ ID NO: 491580 - DNA, 1277 bp, Homo sapiens
  misc_feature (373)..(373): n is a, c, g, or t
  misc_feature (596)..(596): n is a, c, g, or t
  misc_feature (680)..(680): n is a, c, g, or t
  misc_feature (1001)..(1001): n is a, c, g, or t
cttagaaatttggggaaaaattcttccggcccaacacccccctgtggtgggagaaacactgtggcgctttcctctgtttcacaacaatggggtgggagaaaaaaagaggtagttatatatccccccgacagaggggctaccaacacttgtgggtacaacaggaagaggaatttttgggtgcttttttggggggtttttttcgcccccctgtggcgccaccaacataaaccctaatgcgggagaatataaattggggagaagatttttataatgcgctcgccacacaacaaatggtatggagatattctcttattaaaatgtttcacacccagcgccacaggagttgggtgaaacaacacacgtaaaggagatntttcttctcacaacagagggagataaatatttggggagagtttaataaaaaagaggttggagaccgctcggtgttgttctcaacagcaggagagggagattgagcccccacctgtagatggagatattctgcacacatgtctgtgagattttttctgcacacatatagtgggagactacaacagtttgttctcgcatatagtgtgtgtgtgcataaagagacncacagatacacacactgtgtgacacaacaacccgctgggtgatcaatacacacaggctctttgtgtctcttgtcatcacaaagnttgtgagagagagaagggtgtcacaatactcacacacacactttatacatctcgagagtatcactctccacagagtggacacacagtgatacatctgcgagatctctcgagagagagagtgtgagaacaatatatattcacacaatatatagagacacgtctatatatatatgtgagaaaaatacacacgttggctgtcacacataagagattgggacacatatttatagaggcatatatatatacatatatgagagctatatatatataaactataataacaataatataattttgagaaaataacacacacactataanaagaatgtaataaacacatatgcacaaaacgtggcttaaaacaatcccactttgtgaacacacttgtttttgccacgcttatggtttgaacacctttgtaagttaatgagattccacaaattggtttaagttgggccactttcaatttttcacacttcctgtaaaaccacactccacataagagatttgtcttttttcaaagagaaatatagttttttttcctttatttgattgatggtcattgactactgaaataaaactacccattttaagata

SEQ ID NO: 491581 - DNA, 230 bp, Homo sapiens
gaggaagatgttcaaaatgtcaacctgggtaacaaaattacatgtctttttataaatggcttgccatcttgtaattttctatttggaaagaaaagttgaagcgaatggaagtatcggaagtaccaaataatgttggcttcatcagtttttgtacagtctcataagtagttaataaggtgaatttaatgtaggcttttattaatttgtaattaaaataacgtgtgcagcta

SEQ ID NO: 491582 - DNA, 163 bp, Homo sapiens
ctggtagcatgtagacaatgttacaagtggaataagcctaacgggtaaagctcagagaagggtcggatctagagagaatggggaggcctgagtagggagtaggggggccttgatccacacacccatacccctactgtagacttgcattagctgtgtcagggtc

SEQ ID NO: 491583 - DNA, 269 bp, Homo sapiens
caggcagactcgcagtctactcatggagctagcagtgtgccggtgtgtaattgtattccgcgatagagatggggtctcaccatgttgcccaggctgtaattcagtgacatgatcactgtttacttcagcctcaaatttctggggccaaagcaatcctcccacctcagcctcccgagtagctgggattgcaggcgtgtatcaccatgcctggctaatttatttttggtagagacagggtttcttcatgttgttcagttaggtctacctgg

SEQ ID NO: 491584 - DNA, 242 bp, Homo sapiens
cgctgtgattacaggcctgagtaaaaatctttaagaaaaattggagtctaaaaaccttcaaggatttccccaagaagaatttctgttcaaccttccagctccttaagtgctaggatgatgtctggaagcagaggaagtagtttaaatgatacctatcactcaagagactcttcattcagattggattctgactatcagtctacatcagcatcagcatctgcgtcaccatttcaatctgcatg

SEQ ID NO: 491585 - DNA, 996 bp, Homo sapiens
  misc_feature (800)..(800): n is a, c, g, or t
  misc_feature (803)..(803): n is a, c, g, or t
  misc_feature (805)..(805): n is a, c, g, or t
  misc_feature (948)..(948): n is a, c, g, or t
  misc_feature (959)..(959): n is a, c, g, or t
gtggttgtgacacgaacgttggtgccagagctgtgaacacccaaatttttcttataagctttgtgtggctcaaagggtctttacaccttttaatagcggaaatgtttcaccccaggaacggtttaaaaagtggtttaagggctgttaccacccaaaatttagttggaaatctggggtagtgaacccgcattttgggaccggcttggcccgaaatatgaaacctgatgttggttcccaaattatggtttacccgagtataatgtgcttatttagccatgtgcttggtttttaaagagaattctccccttgggaaaaaagtagcctcgtttgaagtgttacttccccctaagcgtaaatgcctggacatagctcttgggccaaccctgttaaataaattgttttgaatgttttttgagcccccagcaccaataatgttttaaagttatcccccttgctactttactgatcaccctttatccattcctgagcaccctttgcctaaatttaaaaaatgtagccacttccacatttgtaatttaatttctctccctctgcccacaaagatttttctaatactcgcttgtacccaccccacgagagaagagtcccaaacacctactcacgcttttcttgcacctgaggaaattttttccccctaccattgactcctggcctacatcagccaaacttaacccttggtggggtttggatttgatagcccaattagttctgtgctggttgcaaagaattgatatttagatggtttttaatacccagcagattgtcttcctttatattgngtncntttttatgttgcatgttgcttttgttatcagcctgattttttgctccagtatatgatagttctgctgatgttttgtttattgggcagacatatcttcattaagagtttttggaaaactcatcaaattcgatgaatacattttnttcataacccntttggaattattcctaataaaatgataaaatacgtaa

SEQ ID NO: 491586 - DNA, 711 bp, Homo sapiens
  misc_feature (327)..(327): n is a, c, g, or t
  misc_feature (457)..(457): n is a, c, g, or t
gaggtggctcagggcccccccccagctatggacgaacggctactggggccgtcccctccaggcgggggccgggggggcctgggattggtgagtggggagcctgggggccctggcgagcctcccggtggcggagaccccggtgggggtagcgggggggtcccgggagggcactgagggaagctagaggacatcgggggacgattcgtgctaggcgagatatatgacgcatcgaccgacctaggagccgtggtagcgaggccccaggccgaagaaacacggcccctaaagtgcgcagcctgacatgaagctcgttgctcttcgtttagncagtcccgtgtgtgagaatccaaggtaggaagaatcgtgagcttcaggcgattgcaggcatgcgtcccagtgtacggagagagcacgtgtgtgatcgctcgactagacatgaatgcgtcgtttggagctnaacagtttgcttctggtcagcagtggcttgtggctgggcccccgagacaagtggggcgggctcaagcatgcagtcagactgctagcctgctgcgagcctctgtgtggtgtgtgtgtcccctgaacaactcgcatcgaacgactcggactatcggcagcgaaacttgcccagatccgtcacatataccactcggagctggagaagtatgagcaggcatgtaatgagttcacgaccatgtcatgaacctgctgagg

SEQ ID NO: 491587 - DNA, 884 bp, Homo sapiens
  misc_feature (32)..(32): n is a, c, g, or t
  misc_feature (67)..(67): n is a, c, g, or t
  misc_feature (91)..(91): n is a, c, g, or t
  misc_feature (94)..(94): n is a, c, g, or t
  misc_feature (100)..(100): n is a, c, g, or t
  misc_feature (107)..(107): n is a, c, g, or t
  misc_feature (109)..(110): n is a, c, g, or t
  misc_feature (112)..(112): n is a, c, g, or t
  misc_feature (116)..(116): n is a, c, g, or t
  misc_feature (118)..(118): n is a, c, g, or t
  misc_feature (123)..(123): n is a, c, g, or t
  misc_feature (135)..(135): n is a, c, g, or t
  misc_feature (146)..(146): n is a, c, g, or t
  misc_feature (160)..(161): n is a, c, g, or t
  misc_feature (163)..(163): n is a, c, g, or t
  misc_feature (169)..(169): n is a, c, g, or t
  misc_feature (173)..(173): n is a, c, g, or t
  misc_feature (208)..(208): n is a, c, g, or t
  misc_feature (211)..(211): n is a, c, g, or t
  misc_feature (227)..(227): n is a, c, g, or t
  misc_feature (233)..(233): n is a, c, g, or t
  misc_feature (235)..(236): n is a, c, g, or t
  misc_feature (240)..(240): n is a, c, g, or t
  misc_feature (254)..(255): n is a, c, g, or t
  misc_feature (257)..(259): n is a, c, g, or t
  misc_feature (261)..(261): n is a, c, g, or t
  misc_feature (264)..(264): n is a, c, g, or t
  misc_feature (269)..(269): n is a, c, g, or t
  misc_feature (280)..(280): n is a, c, g, or t
  misc_feature (289)..(289): n is a, c, g, or t
  misc_feature (296)..(296): n is a, c, g, or t
  misc_feature (302)..(302): n is a, c, g, or t
  misc_feature (307)..(307): n is a, c, g, or t
  misc_feature (310)..(312): n is a, c, g, or t
  misc_feature (315)..(316): n is a, c, g, or t
  misc_feature (320)..(320): n is a, c, g, or t
  misc_feature (326)..(326): n is a, c, g, or t
  misc_feature (340)..(341): n is a, c, g, or t
  misc_feature (344)..(344): n is a, c, g, or t
  misc_feature (354)..(354): n is a, c, g, or t
  misc_feature (369)..(369): n is a, c, g, or t
  misc_feature (376)..(376): n is a, c, g, or t
  misc_feature (382)..(382): n is a, c, g, or t
  misc_feature (389)..(389): n is a, c, g, or t
  misc_feature (394)..(395): n is a, c, g, or t
  misc_feature (412)..(418): n is a, c, g, or t
  misc_feature (421)..(421): n is a, c, g, or t
  misc_feature (425)..(426): n is a, c, g, or t
  misc_feature (430)..(430): n is a, c, g, or t
  misc_feature (445)..(445): n is a, c, g, or t
  misc_feature (456)..(456): n is a, c, g, or t
  misc_feature (464)..(464): n is a, c, g, or t
  misc_feature (468)..(468): n is a, c, g, or t
  misc_feature (501)..(502): n is a, c, g, or t
  misc_feature (517)..(517): n is a, c, g, or t
  misc_feature (530)..(530): n is a, c, g, or t
  misc_feature (540)..(540): n is a, c, g, or t
  misc_feature (545)..(545): n is a, c, g, or t
  misc_feature (548)..(548): n is a, c, g, or t
  misc_feature (554)..(554): n is a, c, g, or t
  misc_feature (688)..(688): n is a, c, g, or t
  misc_feature (691)..(691): n is a, c, g, or t
  misc_feature (693)..(693): n is a, c, g, or t
  misc_feature (836)..(836): n is a, c, g, or t
  misc_feature (847)..(847): n is a, c, g, or t
tgactggctgtcaaatgagctttcaaaacgtnaaatgaaattggatatctaaccaaggacatgtttnaaaaaattggtctaggcttgttanaanaaaatnagtttgnanntnggtnantaaanagtatctgggantggttgggaanaatattaaacttanncncccccnattnttgtttaccgagtataatgttgctatttccccccngcncccccccccccccacncccccngnncccnccccagccccccgnnannncnccncccanaagcgcaaatncccgcccanggccccngccccnccccnggnnnggnngccngggggnccccccgagccccnnccnaataatgttntaaagcccccccccngcccccnccccgntcccctnccccnncccgaggccgtttgctnnnnnnncantgtnncctnccctttgtatttatntctctcccttnccaaaaanattntctaatactgcttgtaccaaccagagaaagaannaaaacactacccagnaaacttgcactgnaaaaaaattnccccnaanaaaaanacctggcctacatcagccaaacttaacccttggtggggtttggatttgatagcccaattagttctgtgctggttgcaaagaattgatatttagatggtttttaatacccagcagattgtcttcctttatattgngtncntttttatgttgcatgttgcttttgttatcagcctgattttttgctccagtatatgatagttctgctgatgttttgtttattgggcagacatatcttcattaagagtttttggaaaactcatcaaattcgatgaatacattttnttcataacccntttggaattattcctaataaaatgataaaatacgtaa

SEQ ID NO: 491588 - DNA, 1222 bp, Homo sapiens
gcgccgatggcggagtggaacgtgcggagtgctcctctagagaatggtgtgtggtgtgctgactctggtgagcctggagctttgtgcactgaggagtggctgcccattaagcagtcaatacctcaccaccaaggagcagtttcaccaattcctggaatgccaaatgggcagtgagaatgacttgcctggtgaaacctgagtgtagtgatgaccctgcttggcaactgacgcttgtgcttgcgcctatgagtgctaagctgtgatcctgactagtgatggacttggaccatgaccggctgtgaccgtggcatgatctggacgtgacgtgcatgcagaatgccctggtggatgcatgctacaagaccatcacgaaagagggcagccctggtgagacacaacaccaacaggtgcccagtgcccacaatgatagacatgcctcacagaaacctaccagaccacacgacaccatgagcatagtcgtacccgtactctctataaaagtacccaggaggagggtcaagcgcgtatgactgaacaagcttcgtactctgctttacagagtggtttgtactactgcctagccaccaggcactatgatcttctgacaagccagaaacaagttagagtgggcacggcattaaacacgttggaggaaagcacgccaaaatggcctagagttgctgaacaccattagtgtctgccccccacaccatgcccagtagccactgattaggccgtaccatataacatagaatcggactcacatgtttcatggtgccccaggaagattagtcccccacgtattaagcgtagtggacgaggttatgagaccctatcttgcccataggcactctcacgcaggcacataggatagtgatagcacctcacatcagcatactatggagcgtgtgccccactggaatagggtgcacacaatcgaaaacaagcccattgggagaatagcccaagagcgaaggcggacacgcataggcggccagaagacacccccaggccgaggaaagtaaaccacgcaaacggacaccctccacccagggatagcgcaaactactccgggccaataccgcagcacccgatagcagtaccaaacaagacgacgcgcagtgtggaacaagaccaaggacgagggatccttgacagagggaaaagagcgcggccagaaagagacgacccaggccacaaccagaaagcaacggaaagcaca

SEQ ID NO: 491589 - DNA, 116 bp, Homo sapiens
  misc_feature (4)..(4): n is a, c, g, or t
  misc_feature (103)..(103): n is a, c, g, or t
  misc_feature (116)..(116): n is a, c, g, or t
cagnactttctggtcagccgatgggcaaaggtctttcaaaccgacttctttatgacttttttttaggggcccggaatgctttgatccgaagggttaaggggtnccttctttaaccn

SEQ ID NO: 491590 - DNA, 485 bp, Homo sapiens
ggggagcggagagcggaccccagagagcccgtgtagcagccccaccgcgtctgtcggcctagttaccatcacaccccgggaggagccgtagctgaccgtatccggccccagtcatcactcaccgcaaccatgagcagtgaggcctgagacctcagtagccgtacagtctcccttgcaagcacggacagcagggtcccaggcgtgcgaaaactggaagcacagtcatcggggaatggggagggaaacacggtgctgtatccactccctgtctctctgctcttgcgtggctgtgacaaccctggtctcacttgatgcatcgtctaggttgttcttgtcggaccctctgtggagtccccatcaccagttttcatcctgagaccaaccaaggacccatgccattggcctcattgtcccttggcacacttgtagagcacaggtgaggggctaggacctgaaggtattggactgttcaacaatcagtcata

SEQ ID NO: 491591 - DNA, 253 bp, Homo sapiens
tttttgttttgttttgttttactttgaagaatgggcattggaggacaagatggagaaaatcatgaatttacttttgaaacttttgagtttgaaatgcctgtgagacatcctgaataggcagtggggcagataggcttaaaggatacatttgggctagagggaaaaaatgtgtgagtcatctgcatattggtggttattggaaccacactggcagggctgacattgattctcctgcattacttttttttttttt

SEQ ID NO: 491592 - DNA, 424 bp, Homo sapiens
  misc_feature (397)..(397): n is a, c, g, or t
tagcggtggcgtacactacggcgtcggtacgccgtacgcggttccggcgggtgctggtggctactgctggtggggctgctgcggctctagtttttggtgccttcttcgactactggccccttagggccaccagccggttcgcgggggcaggcctcctcgggcgcggcgggtggctggccttccgggtgttcgtcctgtaagctggtttccggtgcgacgctcgtacgtacgggtcgtggtgctggcgtttccgtagcgtacgtcggactgcggtagtacgtacggctcctactccctcgttcccttccgcctggttctgtacgggttgtccggtcgccctgatctacttcactccactgcccacgtcttcgcctgctgaggctcctctcgcgtcgcnctgacggactgaacgcttggacctggc

SEQ ID NO: 491593 - DNA, 211 bp, Homo sapiens
tcaacagctctctcagtacacagctggagtataagtaatagttagaacttccttacgagtaatcataggtagctttgtcaaacaagactaagttattagagcttgtcccgaactttgcctttggaccacttctacttttaggacttgcccccggattagtacactgggtctttgtctttctaggccgactttccagcgtcatcccccgcga

SEQ ID NO: 491594 - DNA, 139 bp, Homo sapiens
agccctcagccggtttctcaggccgctctagtcaataaaccataaagatcagactcggcgcttcttcactatccttctctccgtggtttcgccattagcttccggctatccggcggcaggggccgagttttcttcgaag

SEQ ID NO: 491595 - DNA, 823 bp, Homo sapiens
ggggacccgctggcactcccgcgcgtactcggcgcctgagcgatactaaaatgtctgatgatgctggtgacaccttagccactgagacaaagcagaagttactgagatgcctaatagtgattctttacctgaggatgcagaagtgcatggtgattcagctgcagtttcacatgagccaacaccaggtgaccccagaggggaggggcatgaaaatgcaagctgtgccgggtgcaggggtgccgccaatgtgggccccctgtgcaagcctcaggaatgccaaagggccctggagccccccttctcaaatggagaccgtgactgaggatacacttgtgctgaatgtatgggattccgtcagccttgggagggaagaacccaaggatcgggaaaatacccgttgaagaacaagaattatctgcctggtggattccccctccaaaggtgacgcgaaggatggggccaggctggggatccgggggcaaaatcttctgctgtcgtcaggcattcttgccaacaagtaaggtcatggcatgggaccggggcacgtccagggaaaaaagcaggaggcaattctaacggggttccagtggttggcacaattccgtgatcctttctgaagggaggccaaacccaaatacttgagaaagcgggagttccctgaagattggaggcaaggattaggggccctgaagaaaggcccaaccaatttcccttttataaagcctctcggggtatggtggttgcgcatcccagtgtggtgccacacccccgtgacaactgtcttaactggggcgcttgagcgttggaactcactccggcaaaa

SEQ ID NO: 491596 - DNA, 410 bp, Homo sapiens
ctggtggcaacttcgaaaaactgtaagtcgcagggaatggcgcaaccaccacaatcaacgacaccatcgacaaggttgatgtagtcctgaccgcgaccaccaccgttggcgaaggcggcaatatcgtctacaccgccagccttgtggataaaaacggcgcaccggtgaccaacatcaccaatccgctcaccgttactttggacaacggcaagaccatcaccatcggcgtaaaccaatcgagcggtagcgtttcggttcttgctcctgatgatgtgtacaagggcgaccaaactgtcaccaccgctatcaaaggcgtgaccggcggcgagcactttgaaaatctggttccaggtactaccccagttaacacgaccgttaccgatacaccgggtaccgacaacaccacgact

SEQ ID NO: 491597 - DNA, 133 bp, Homo sapiens
ggggcccccaaaatttttttttttaaaggggggtggcccaaccccttgcccccttttttagggggggggttttttttgggggtttttgggccccaaaaaaaaacccttctttttgggggggggccccctttta

SEQ ID NO: 491598 - DNA, 119 bp, Homo sapiens
cgctggcactgactttgccttgaacacactgggggaccctcccccacaggcctttaattgagaacccttctctgtaagtgtttgcttgtgcaaaagggaacagggacaaccctgtcggt

SEQ ID NO: 491599 - DNA, 620 bp, Homo sapiens
  misc_feature (62)..(62): n is a, c, g, or t
  misc_feature (170)..(170): n is a, c, g, or t
  misc_feature (172)..(172): n is a, c, g, or t
  misc_feature (176)..(177): n is a, c, g, or t
  misc_feature (189)..(189): n is a, c, g, or t
  misc_feature (202)..(202): n is a, c, g, or t
  misc_feature (207)..(207): n is a, c, g, or t
  misc_feature (235)..(235): n is a, c, g, or t
  misc_feature (246)..(246): n is a, c, g, or t
  misc_feature (276)..(276): n is a, c, g, or t
  misc_feature (295)..(295): n is a, c, g, or t
  misc_feature (403)..(403): n is a, c, g, or t
  misc_feature (462)..(462): n is a, c, g, or t
  misc_feature (618)..(618): n is a, c, g, or t
aaggaccagtctgcagagggatcctttggctggaacgaggaggctccacacggccgttgcanctaccgcagccaggatctgggcatccaggcacggccatcacccctccgacgctcttctgggtgtggctgctggttccaggaacccaaggcgtgaacgatggtgacatncncctnnccgatgggggcnccaccaaccaggnccccntggagatcttctacagaggccagtgggncactgtgtgtnacaacctgtgggacctgactgatcccaccntcgtctcccggcccctggncttccacaaccccacccaccctctccccacacctcccttcccccaaccatcaccccccatcatcctccaccacctccactccaccccaacccacccctcactcccccnctccaactccctcccctccctcaacaccaactccacccaccacacacaccctggtgtcntctccaccaatgaaaccaccaccacccacaccctccacctctccaccgacctctcccacccccttcccacatctttgacacccaccgcccctcccacctctccatcaccctcaatctccacccccaccaccccctccccttcgggggccacacggnca

SEQ ID NO: 491600 - DNA, 898 bp, Homo sapiens
  misc_feature (404)..(404): n is a, c, g, or t
gattccttcatcgttcagtgcaccacctactgatctggggaacagtgaatctgactgattgcctgatctggtacttgtcttcaatgagtggtcattcattctctcgctgtgacagtgcctgttagcgtgcctgttcctctgggcatcccgtgtgctgagagtatccgccaggggagattgctgtcctggagacagatacatcccaccatgatcagtgatcaccccaatctgtcaacaagatcaccccgcaactggctgagttcggccgtatcagcctataccgaccagctggcacaccagtccagcagcaccaatatcttcgttctccccagtgagcatcgcatacagccttggcaatgctctccctggggacacaaggctggacactacacgatgaaatcccnggagggcctgaatttggaatctcacaggagcattccggaggctcagatccatcgaacggctttcctaggaactcctcccgtaccctctaacctaggcacgacaggcatgctcgcgtagctgagcaccggccaattggcctgttcctcagcagagggcctgaagctagtggataagtttgcgggcaggatgtgtacccagttgttccactctgaagccttcactgtggaacttcggggacaccgaagaggccaagaagcagatcaagcgattacgtggagaagggtactccagggcccacatgtggatggggtccaaggagcttgacagaggacgacagggtttgctctggtgaattacatcttctttaaaggccatgggcgagacccttttgctcgtcatgacaccgaggaggaggacttccacgtggaccaagtgaccaccgtgaaggtgcctatgatgaagcgtcaggcatgttccaccatccagcacggta

SEQ ID NO: 491601 - DNA, 461 bp, Homo sapiens
gtttccagctagtgagtttcatcttcaaccagggatcaagagatgtgtggaggttccatatattgtgagtcgcaatgtattccttgtcactgatttctagtatcattccatcgtgattagaaaatacttagtattttgcatactttcaaacttttaaaacattaatatttgtttagcagcctaatacactgtatactgtggacaatatcccacacgctcttgaaaagaatgtgtattttgctgttgttgggttggtgtctgcatatgaccattagatctaattggattatcatgttgttcaagtgctctctttcctattgatctggtctctgtattattaacattgaggtagtgaggtctccaatgatcatcctgaaactctatttctccctttaattctatccttttttacttcatatgttttgatgctctgttgttaggcacatatgttttaaattatt

SEQ ID NO: 491602 - DNA, 393 bp, Homo sapiens
atattacttattcacaggttagagaacactatgttacatctcattacactctcgtttctttacaatccttttaagctctgtgtggtgtgtatctactcaggtagcagtgttacaactggtattgatctacgccacgataattatcatgaactacgtcatttactgtctataggttctgactgcgttatctcgctcgcatgattagtttgagctcgatgatacctattcttaactgttaaaaggtctataagttactttagtattacctctgtgtgagaccatggaccacgtttctaactcagcctttgtggtacgtcttcggaaacatggcttaaaaatgatctatatcatagatcccttttattagtactgtgtccgatagctgataggaat

SEQ ID NO: 491603 - DNA, 209 bp, Homo sapiens
ggtggttggggtatgctactcataagatatcaggctgtcttccaactgaaatctcatgttctcagtacgaaaaactgaaatcacattgctatgtaagggaagtgctattcacccagtaaaacccaaaaagccaatggataatgctgggcattttggctttcttgaattttctttgaatacttgggaataagctgggttgcttgggaata

SEQ ID NO: 491604 - DNA, 138 bp, Homo sapiens
aatagtatatacagcttcaatcgagatcttctcataacttggcacttctgggcgccatcacctttcagccggatgtcctcattttctccctcatgaaactctaaagttagctgttatccagtttacagaactgcaata

SEQ ID NO: 491605 - DNA, 251 bp, Homo sapiens
ctgtatgactgttgctacagcagcgtgcgatcggtgcacatcccgggcctttgtccaaagctagagactgcgctaccgctataccgtagcttggaaccgttcgaacgatcttgtcggccatatagctgcttgctgacctgcctgtagccgattgcgtggcttagtcctcgttgtcaacccatgcacttcgagattgcgccagatcattcgaccggcctggaaggactccgtcacacgctggtcattctgcc

SEQ ID NO: 491606 - DNA, 322 bp, Homo sapiens
tcggtctgtggtgacacaataaggaagggtcccaggtgggtaagccccaagtgagaacaataatgaacaatgattgtatgaacaatagttagaaacagctaatcacaaacaacctgcgggcacaatgacctcattccacacgtagcacccttcagcaggaccctataaaactttcctccagcccctgcctctttgcaggtagccccttctctgctgagctgcccactgcaacatattttcacaatttctctaataaatctgcccttctttacctacaactatcttggtaaatggctttaccacctgcaaaactgaccctagg

SEQ ID NO: 491607 - DNA, 906 bp, Homo sapiens
  misc_feature (386)..(386): n is a, c, g, or t
  misc_feature (455)..(455): n is a, c, g, or t
ttttaccacaaaaaccctggtagtagcctgtttatggcttaacctagcaggcacaaatccaaaacaattttacaacatattaaagggccacaataattacaggaataaaatgtccaataaaaagtacaaaataatgagtgacagggatcaaacccgttgtggacattaacaaggcattcctcagttttccctacgtgcatgccattttctctttattcataggaaccaccgttatacgctattcaaccccaggaccacagggaacacggaacagaaaaacctatcttcccacctgtggaaacgcctcagtgggttgccacttgacggacaacaacacagggcgacgtttatggctctgggtttctgcaacgtgaatctcccttganaaaacccgctgcaccaagctctcccgcagtctgtgagtgccgtatttatagaaaatttctctgatttancacgtgcaacattgcctgcgtgattctgaactcctttgtgggccccaacttctacagccgtgctctcctttgtggcacaaaactaacgaaacctaatttcgtgcattctccacagtgcacgacatctgacccgacttttccgtggtgacacagggaagcctcttcagcacgtgtaaccagtctggtttatcgctctctatcgtggtcccaggtcacacattgttgtcccagtcttcccatcaaaatggtgcccccccttcgtggccgcctatcccggccctttggcggggcccaccgcgcctgcgccttcatcgtgcccgcacccgaccagccggcctccccttccgcacccactcccccgcgggctcgcgacacccacaacccggcgcgtttcccttccacgctgtgcccccccctttgcctcacctcacccactgcgttcagcgacatc

SEQ ID NO: 491608 - DNA, 464 bp, Homo sapiens
acatccataaattacacataagaaaaacaaattcaaaaaattcacagtgatgctgacagtaatacccactcatgggaaacatcccgtaaacctgcctgttgccatgccaatagagtgactgcactggtgacatctgtttgagcatgcttagtgtggctggtacgacatgccacccgttgtgcatacactttgtacatcagggagtgaagagaagggttttctagattattgggggaaggtaaaattggagatttttttgtagtccctttttcgatggggtgtgggggttagatactcagctaatgccctaaaataccatgtataaaaacccctgaagtacttgtgtggatgtgtaccgtgtgagtgtgtgtctgtactacgtctggcactcacaagctttgtcttctgaaacttagtgaatccttatctcttacacctccagaagtatttgaacaacatttgaa

SEQ ID NO: 491609 - DNA, 269 bp, Homo sapiens
cagtggaggcggcaggatctcctgctggtgcaggtccagctggctgaaagcagctccaccggcgcgcctacacttgcacgattgatgctccctaggttgacgttggtcaggtgcttcgcaaactagccaggccgagaaggctccgcatttacacccggctgcttttctgagggcattgatcttatcctccgtgattgtcagctcatcgtcgtgccgaatgagggccgagtatatgctggcggtctggagagtctgaaggcggtctggat

SEQ ID NO: 491610 - DNA, 516 bp, Homo sapiens
  misc_feature (417)..(417): n is a, c, g, or t
  misc_feature (482)..(482): n is a, c, g, or t
gactcttgaggatacccgacctcatcagccagcagtgtgttgttgctcccctgaagaggtccttcacattccttgtaagttggattcctaggtattttattctctttgtagcaattctgaatgggagtttgctcatgatttggctctctgtttgtctgttaatggtgtataagaatgcttgtgatttttgcacattgatttgcatcctgacactttgcctaagttgcttatcaggttaaggagatttggggctgagatgatggggttttctaaatatgcaaccatgtcatttgcaaacagggacaatttgacttcctcatttccaattgaataccctttatttctttttcttgcctgattgccctggccagaacttccaacactatattgaataggagtggtgagagagggcatccntgtcttgtgccgtttttcaaagggaatgcttccagtttttgcccattcagtatgatattgactantggtgtgtcataaacagctcttattattgagatc

SEQ ID NO: 491611 - DNA, 818 bp, Homo sapiens
gactagttctagatcgcgagcggctgcccttttttttttttggaagtttggggtcgtttaattaaaaaaactcaacagggataaaaaaacaagcattttacataatgcatacattctcaacatctgcagatgagataaataaaagaaggctaaagcagacatactgtgtatggcttctcttgggtaagttaccaatatcctcggcagaaataaaatatgttaaaaacaaaacccagggtcttaaaataattggtcccttagtattaacaaagatattcagcaataatacagtagatgtagttttcaaattgacaagaatgcgataatactttattctctgaggggtaagtagctgctttccaaaattaaggctgatgagagccaacctttttttcgtagctacctttttgcctgggcttctttttgttaatcatcacattcaaactcccagagaccattctttgggaaactctttttcacatccaaaacctcttatcagtttcacaccatctatcctggaccaattccatttcctatgaggcaattcatctcatctaaacttagtgcccccaaataaaaagaaaaaaggaacaaaaattcccctgaattgtgctctaatggaacagacactattatacaaatcggggcgtctattaaaagcaatattatacggggtccagaactgaaggaggaaaactaaaggggccattcaattatattagcaggagatccatgtgcttaactatatacctggtttgttattgtgctccccaggtttctttaaaaaaattacttgattgtgtccgaaaaattcaggg

SEQ ID NO: 491612 - DNA, 384 bp, Homo sapiens
ccaaataaaaaatccttcacatattaattctgaggttctttcagagagatgtaaatgtgcaatatttaggggatttctgacgctgaatcatctctgttgcatgggagccagagaatagcagcaataagactagattaggaaggaatccaaagcttcattctcctagctctgtcctctattaactgggagaatttggggaaggctttttacttctccaagtctgtgtttcctcactcagaaaatatgaataaaaatacctacctgactagattaaaagaatattataaaggtatatcataaattgctaagtactctgtacctgttaagcaatattatgcctagaaaaatagttaataaaaggattaattttttctccttaaaaaa

SEQ ID NO: 491613 - DNA, 364 bp, Homo sapiens
  misc_feature (24)..(24): n is a, c, g, or t
agatccactacagcagctatcagngtcagagactttcatgtaggaatatctagctatactactttttctatattctattctgtagtgagacagagtctgctctgtcatccatgctgacgtgcactgaagcgatctcggtccactacaacctccgcctaccggttgaagagattctcgtgccttagcctcccgagtagctgggactgcaggcatgggccaccacaccaggctaattttttgtatttaagcggagacggggttcaccgttgttgcccagggtggaattgaacttctatgctcaggcaatccattcgcctcggcttaccaaagggctagcgttacaggcatgagtcaccgtgtccgg

SEQ ID NO: 491614 - DNA, 128 bp, Homo sapiens
cacgaggcaaactttaatttatcagaaattttgtttggaattcttacattctcaatgtgagccaatctgggacccactgccccacccagaagtggaccagtcctgggggcaggggacagagggatggc

SEQ ID NO: 491615 - DNA, 898 bp, Homo sapiens
tgacaagtgtccctgcttttattaaaaaaaaaagaccccaaaaaaaaactcttttttttgaaaatttaaaaattttcttggtccctgttggtattatttggtggttggtcagggtggttccttggcgaggattatcgcagcggtttcttttctcttccccccaccctacctatttctacacggcgggttgggggcgcggtgttgtagaaatctgcgcctcctttctttgagagatagtgactcgcgtgctcttcacagcgggcctctgagacgaggtttggcccagccccgaggggtctgtgggacgcctgggagggtgtatggtgcgcccccatccgtgtagaggggtttcccgctgtgtctaacacccagcgggtttatagagaggggtctctcctggggaaaacacacccgcgggagggggtgggtctatctcgtgggtaatatctaattttcctttggaagtgggaaaacacttctcctctaactaggagaggagaggaggggaggccaaaatgttgtggggaacaaatatctctacgcagagcacaccgagagagcacaagcgaggggagatagaaccaccaaccggctgttgtaccaagtagaggtaatgatgagaagaagcaagtgtaggggggaggaagccccccaacaactagaagaaaagacagccccccctcctgttcaggaggaaaagtgttgttgttgctccccctccccaacaaggtattttatgcagaggataaagtgccctctcatcagcgggagcaaaaaggggctcacacacgtatttggcgagaagagagaacaccctggtgggagagagaacccccataggggttagacccccccagtgcgaaaggagtgttgtggaaaactaacacaagagctggtg

SEQ ID NO: 491616 - DNA, 151 bp, Homo sapiens
ttgttgagttgtcccagccatctgctctttagtcccgggagaggaacagagccaacgggacacagggtgggtctcggtagggaatcacggtgaggtctccagaaggaccgggccgccagccccttcatcaacatctccagtggggataccg

SEQ ID NO: 491617 - DNA, 840 bp, Homo sapiens
taattgtttggtttttttcccggggtccccaaatttttttttaaaaccattgggcttgggggggaaaaggggaatttttataaaaaactccccccacccgcagtagtaaggaagtcgagcaaaacacatgtgcggggcacaggcggagcgtggtgtcaacaagaacaaacaaaaaacacaaggcgggggcgccgcacacaaaataaccaccccgcggggggccaccactgatagcagcgcacaccaccagcgtttttgtgtgaaagaagggcgtctcccacagacgagagggctgcgtaataaaacagcagacgcgccagcgacacgcggcgaatatataaaaagaaagcgccgagctagcgagacgaggaaacaacaggctgcacagaccgcgtgaggaatatcttgcgaggaaagagcacacaccactcccatgcgggcggcggggcacccacaaatagtgaggcgccacaaccacaccccagcagaaataatcacaagcctcgacaaggaagacaaatactacaacaccatcatccgagcgaggtctagagcggggtgaacaacccaacaccgagagcgcagatcacggagacagctgcgagcgatcacgaaaaaaagtgccgctcgcacccacgacggagcagaactgatactcgattgagaagcaacaaaaatatatactcacccagcagcgcgagccacttatcatacatccacacaaccgactagcacaataatatcgcagacacacaaccacaacacacaacagaccactcaaacacacaagcactaccagacaacacacaatacagactaggcacacaaccaaacaatcaa

SEQ ID NO: 491618 - DNA, 462 bp, Homo sapiens
gacgtcttcatgtatagagcggtacctggcgcagaggaaggtcggttgtgttcctggatgagatcaagccctcctcggaccctgagccccagggccgtgcgcatgtttgctgactacctcgcccacgagagtcggagggacagcatcgtggccgagctgggacgagagatgaacaggagcgttggacgtgaccaccaccacgttcctggtcatggacgcctccatctatctccacgaccagaacccggatgccgccctgcgtgcgctgcaccagggggacagcctggagtgcaaagacatgacagtgcagatcctgctgaagctggaacgactggacctagcccggaaggagctgaagagaatgcatgaactggacgaggatgccaccctcaaccagctcgacaatgcctgggtcagcctggcaaagggtggtgagaagctgcaggatgcctacctacatct

SEQ ID NO: 491619 - DNA, 104 bp, Homo sapiens
ccagtgtgggaaggagaccacatggctgcactggggctcggaggaatttctacggcaactgcttcgtcatctgtgggtgtgctgtatgccgtggatagctacaa

SEQ ID NO: 491620 - DNA, 181 bp, Homo sapiens
ctctgaggatcccctcgatgttttctgctctgcgtcaccttctgctctcctgatatctctctgccagtcgactccgacagagaaaactccgtgcactatgtggcctggatcacaacagctgcccgctcccgttccttctgcacaagacctttcttctcagtgcctgtacgggctctatcga

SEQ ID NO: 491621 - DNA, 705 bp, Homo sapiens
  misc_feature (55)..(55): n is a, c, g, or t
  misc_feature (78)..(78): n is a, c, g, or t
  misc_feature (88)..(88): n is a, c, g, or t
  misc_feature (145)..(146): n is a, c, g, or t
  misc_feature (149)..(149): n is a, c, g, or t
  misc_feature (239)..(239): n is a, c, g, or t
  misc_feature (328)..(328): n is a, c, g, or t
  misc_feature (419)..(419): n is a, c, g, or t
  misc_feature (602)..(602): n is a, c, g, or t
taaaaatggagagcatcaagaaagtattgtgtgagagaagattgatggaaatganaaagttgaggttgcgagtaatangtgagagagngtgatatatgaagaaggtggctaaatatacatcttataagaccaatagctaaaaagnngancatgtacgaatagaaaatagtgaaagaagtgagtgaagcagaaaatttaccgagttcattcactcaacaaatatttatcgagcacctctnctgtgccagagaagtttacacatgggacagagcagtgaacaagagaaaggacaaaggtccctgccccaaggagcttacattctattggngaggggcaaacaataaacaagttaattatgaagtattttagacggtgataagtactactggcaaaaaagaaaaagaagagttaagtgaggngatcaggagtgagggatggggagctcaggggctgggggggtctcatcagggaggagagatttgagcaaagctttgaacagattcaggtagttgaccacacagagcaggggaaattgccatggtgcggcggaggggcaggagaaggccaagtgggctagaacagaaagagcaagggaccaagtngtgaggaccctggaggccttgaacaggactttggcttttaacctgagaaccattgcagagctttaaggagaagagtgaaattttgacttatgttttaaaaagg

SEQ ID NO: 491622 - DNA, 831 bp, Homo sapiens
  misc_feature (452)..(452): n is a, c, g, or t
cggctgtacggcggaagtcttgattgcgggtgggggtgagggggctctctagcttgcggctgtgtctatggtcgggccctctgtcgtgcagctgctccggacgagtctcgggtgtatggggccgtaggaaccggctccggggccccgtatacgggtcgtccccagcagtatcccgggctggcgtgagggtctcccttgatctgagaatggtacctctcgatagtgacggccagatgagctgaaccatttggtgttctggtgcctatgggacagtgttacaaaggaccgtgatccccacagtgggcactttgtgtgcctcaagagtgtgagagtccccaataggaggaggatggtggtaggaggcacttcctcatcagacacagttcgtgaggtggctttagcgtgaggcacgatgctggcacgggccttttgacgtctactcccatagatgnttgcatccgagctagaatggtaccggtactgttggcgcacatgtgccccgtaatgcatgaaaccgtggtgcaaggaaattcaaggggcataaagtccacctggggttgggcttatggaaatgggcaacttgggttaggaaccgcgaagggaacgcattagaaggtgatctatttacttcgtaggaggtaaaccaaaattgcggcccaagcaccttcccccaaaagcggccaaaggtgggcctttaggggcgccaatgggcctcccggaaaaaagaacctgggaattaccattaacggggtaatttctttcggaccttgggccggacgccaaaggtatctccattagaagcgcagagggcccttaggaattttatcccgc

SEQ ID NO: 491623 - DNA, 1246 bp, Homo sapiens
acgtgctgtggctctacagtgggtctgcccttgccacttacccaaacattcatcaagtttttccccttcagatctgacagtgcaataggacagacgtgatggactgttatacagaactactcagtgtttatgttcctgggcacggaaggtaggagttctgtgcacttaagagccagcggtcacaaaccctttgtgatattctaagagacagagtgagaacgtggagacgcgggagggaatcctagacttatgtaaccctatatctatgaggacttgacacaggttctgctgagttgtcactgctgctccagactcaccatagagatgctgcctccacttaaccatcctgtcatgggtctgacaaacagtgggtctgcagatagtgcccacaaaacccatgtgactggtctgaaggacccagagcataaaggtctctcaggaaaacatgtacagaaaccgtagcagccggtacagaatagctgttctccaaacactttatacccaggttaaaagcgtggtcgataggcatacgtgcaaggtaaccacgtacagaaagatactcaagacgaactggaggttatccacctcatgggtatgacccatgggctgagacgatgaaacgggacaccgacatcttcgagcataactgaaacctacccaaccataactgtgtagccagccgcaggaatactcagggccctacagcatataccacaaaggaaagaaggagaattaccagttgaggcatatttacaaaacaaaaacacatgtggataaaatactgctggaaaatagaaaccaagctaacaagaattgatgagactaaaccccacatgatggagaatacatacgatagggataagtaaaatcggaaccagaaagaacaacgtataaactttgagcctacagcaagtagtagaacgcaaaaaatgattgagtcagtaaaaagacaagatgaaggaagagcagagtacacgccgggcaaacaagtacaacacaccaaacacaaacaagcaccagaacaaagacgacacgaacggacaggaggacggacgaaacaaacgaaccgcaaagcgcagacaaccagaaaacgccaagaccaagacgaaaaagcagcggtgcatacgagcagcagccaccgagacaggccacacagaacaccacggcaaacacacaaccaagaagggcaagcagaaagagcagaagagaacaaaagaacgcacaagaacaacaaacgacgaaaaaa

SEQ ID NO: 491624 - DNA, 116 bp, Homo sapiens
cgggggggattgagatgggacggatccaactttctctctaccctgtattctatgttctcttcaacatgtaaccaatcagtatcttgtccatatagtcaacccatcgatcggcctca

SEQ ID NO: 491625 - DNA, 541 bp, Homo sapiens
  misc_feature (369)..(369): n is a, c, g, or t
gatctagaggatccatgggtgctcatcccccaggtccagcaacaaaggcatttcctttcttttggaaaagaagggggaaagttccaggaaacataggtacccccagagcatgtgggagccagaagggaaggagcttcagctagaccaggaggaaagagccccatggattgagatcttcctggggaactcaacacccagcacccagggacaggggaagggggctatgggcactcagaaggaggtgatagggatggaggctgaggtcacaggggttctgctggttgcagagggtcagagagcaacagaggggactcacaaaaaggaagcagagtggagtcacgtccagaggctgctgatgcccagccccangagggctgtagagggagcagtatcagggagcaggcaggggtcggggggctctagcatcctgggggagccctgggtccttcagggacacgcaacaaaggaagactctaccgtggagaatccacaagtgcaaacagaagtgacccttgtggccagaggggggatggagcaccca

SEQ ID NO: 491626 - DNA, 685 bp, Homo sapiens
ggtgggggtctcctgccggtgtggtgctggcctctggaggtgggcctggcagcagtgacccatcattgcgcatggagacccatggggcaccaatgcttcaatgcggccatcacagccggccagactggtcaccacttcccagacaatcacaccagtgtggcccagagacctgggggcccagacggtggcccctcgggcctggagtgcatagcaggtgtgccagattcactctgaagtggtggaggaccccgaggctgtgagcgctgtgcagccagctcctggatgatgagcgtattctggtggagcctgcctgtggggcagcccttagccagcccatctactcaggcctccttcggaggctccacggccgagggctgcctgcccccttccctgagcttcagttgtggtaatcgtgtgtggaggcacacaacatcaacagccgagagctgcaggctttgaaaacccaccctgggccacggtctgaggggtcccaatcctggcccccaagacccctgagaggcccctggacagtcctgtgtttggatgaggaggacatcagtgctggcagatggcagatggaaactgccctgtgcaactgtgctggctgcctcctgaaggaagccctcctggactgctttttttggctttccgaccactccggcccaattaacactttttgaattga

SEQ ID NO: 491627 - DNA, 202 bp, Homo sapiens
agacggttctcttctgatactcttctcatatgctataggtattttttttttaaacaccagaatctctttaagtcttaaacaaaagggtagtcggcccggggcatacaggggtccggcgtcccgtgaacccaaccaaccacagatcaaacatattggaggaaaaaaaaattcccaaaaaggtccggaaagagaaaaacttgga

SEQ ID NO: 491628 - DNA, 422 bp, Homo sapiens
ctactgacatacggtggaccgctggataatcagctgttacaaggatgtatatgtggtagtctggcccagttcaaaagttaaagacaagtacctggggatattggtttttatttctttttaactcttattttaggttcaggagtgcatgtgcagctttgttaaacaggtaaattgtgtgtcacaggggttgcgtgtgtacagatatttggtcacttgggtaataagcacagtatctggtaggcaattttttgattctcaccctcctcccaccatccatcgtcaagtaggccccaaggtctgttgttcctttctttgcatccatgtgtactcagtgttaagctcccacttgtaagcgacaagatgcagtatttcgtttccagttcctgtgtaagtacagttaggataatggctttcagctccag

SEQ ID NO: 491629 - DNA, 213 bp, Homo sapiens
gggcccccgggatgggggcccggggaacctttggccggggggaaagggaggggggcaaccccccaaactgtttttttacggggggcgggtttaaagggatttgggggccccccttggccttcaaaaatttggtttccaaattggccattgggttaaggtgggtccccggggtttttttgttttttttgggggcatttaaggggtttttttgga

SEQ ID NO: 491630 - DNA, 838 bp, Homo sapiens
aactgggccgcaagtctttgtgtcggtatcggcctgatggtccgcaacccaattgggatttcgcctctccagagccccttctgcgcacattttcgccgggaaatctgcccagggtacaggctccagtgtaaccatgctggtgggataccctgttgacgtggcataaaatactgttccgtcagtatgattcaccttgggtgaaagcccaccgaaagtctggaagatcccctgtgaaagatttcatctggactcccaccagacacccgctggcccagctctcacgtgcaccggatttccgcaccccgagcccgccccagcccttgcttccatattttccccctcccgctcattaaaccttttagttttttgttaaaaaatttaagaccctgaagaaagcactaggaaaccccccaaaattgaattttgctggaaatttaagtttgagagcacgcccgcccagaggaaacaccacttgggtgggtaaacactgttgtgctttttaatttttttcccgtaagatagtccaccataattaaatttggaccacagagaaaaaatggttgtcaatacaatatataaaagtaaagtctagaaaaaattaaaagtttttgttttgagcctaaattcacgagttaatataaaaaaatggaatcaccacgtaatttgtttttacatattttgaaaattaaataacccttgaaatgataaagtgccagaaaataatgtgaataataatgttgagttttctagtccctcttctgatcccttcatcctggtagcttatatcctgttttgctgcataataaataattttattctcccccttgggaaataccca

SEQ ID NO: 491631 - DNA, 455 bp, Homo sapiens
agcggcaagaagcagcccttctgtgacggctcccacttcttccaacgcgactggcgctagtctccacgatcaagttcgaaggcccaagtagacccagcatggtaggcagctcgtgtaccgtgcagagcacacgtcgagaggcgccacgtagctgcgtatggcagcccacaggtagtgagacgctgtgcaggaaggcagagagtgggctccccagctctgagggggctgctgctgtccagccacaggtgcttggtccaggcctctgacaggcacccccttctgtgggaaaggaaacaggtgctgagcccaagagactctggtacccactgctggctcatgaaggaagaattattccttataacctaaaagtctccagtctggggcaggcgggagtgggccctggttcaatgtttgctgatggggaagatggcaaaaacaagcctgcccaaccagag

SEQ ID NO: 491632 - DNA, 178 bp, Homo sapiens
tatttaaatctgtgttggtttttaattagggagaaagagtctcactgtgtggcccaggatggagtgaaaggaatggtccgggcccaccgtaacctccacctcccaggtccaagtgatcctcaagcccaccctcctgagtagctgggattacaggcctgtgccaccaccccggctaatt

SEQ ID NO: 491633 - DNA, 495 bp, Homo sapiens
  misc_feature (382)..(382): n is a, c, g, or t
  misc_feature (476)..(476): n is a, c, g, or t
ccctggcagacataggaggcggcgatcatgccgcccagcaccagcacacccagcggcaccatgaaccagagaacagcagcaccatgatcgcgacgatgacgaacaggccggctcgtcgccaggtttcaaatgggcccagtagcccgacaccacgcatccgataaccctcccagagaccgggcggaaggcctcatcgcgagaccgcgccacgctccaattgtatcaccgagtgatgtctgtctagtggtccgctacccggcgatcttgaggttgatgcgaccggcgaagatgtccgagaacaggtcatcgaccgaatcatcggcgatctccctgatgtcctcttcctgcccctcgccggcgatgacggcatccatcatggccngcgacgaggcagcccggagcgccgatccaaggatgacaagctcccggtccagagcgaacccgatacccgtctgcttggggctttaatgggggcncgcaagagggcacacactt

SEQ ID NO: 491634 - DNA, 518 bp, Homo sapiens
  misc_feature (6)..(6): n is a, c, g, or t
  misc_feature (62)..(62): n is a, c, g, or t
  misc_feature (69)..(69): n is a, c, g, or t
  misc_feature (74)..(74): n is a, c, g, or t
  misc_feature (88)..(88): n is a, c, g, or t
  misc_feature (174)..(175): n is a, c, g, or t
  misc_feature (183)..(183): n is a, c, g, or t
  misc_feature (193)..(193): n is a, c, g, or t
  misc_feature (208)..(208): n is a, c, g, or t
  misc_feature (214)..(214): n is a, c, g, or t
  misc_feature (228)..(229): n is a, c, g, or t
  misc_feature (232)..(232): n is a, c, g, or t
  misc_feature (240)..(240): n is a, c, g, or t
  misc_feature (425)..(425): n is a, c, g, or t
  misc_feature (501)..(501): n is a, c, g, or t
tctgtncaggccctggggggggactgggcctgggtgggacccagagggtgtcctgggtgggngcccctngtggncagcgctgccagcnttctgtcgcttcagcgtctcctccaccttctccttgaagcgccggttcttctgcttgatcttggccagctcagccttgcgcttggnntccaggtnagggtccttnccctctaggtttagntgcttncgtttgttgttttnnttnttttcgtnaaagtgggccgcctccagtttgtatctcacactctcttcgcaccacgttgacctgtgtgaggttctgttgcacctcggcctcttccacggagaactcctccagcttcttctctgcacgggccgtccggccgactcggtggatgtagatcttgggggagcccgggggtgttgtggttgatgaccanctgtaccgtaggaatgtccaggccccgggaggccacgtctgttgcgatcaggatccggtagatgctggacttgaanttggctagggcggcaaa

SEQ ID NO: 491635 - DNA, 410 bp, Homo sapiens
  misc_feature (36)..(36): n is a, c, g, or t
ggcgaggcgggacggaggaacagaagatgcagattnttgacaggactgctgtctacacaaaagcaatttagtcgatttcacgcggactccgtgtgcgaagcctcgaaccgacgccgctcagtctacctgcctacccgcgagtacccgtctgaacagatcatcgtgacagaaaagacaaacattctcctgttttagctgcatcagcaatgggacaaaaagaacgctgtcaagaagagagaccatgagcaagttgagctggaaggcgagagctccgacactccccgcaaggtggggcggaaggacagcccagacatgcacggaggacacttaagactctcaactccacaggcgcctcctgccaggtctgctcctcggtcgcccacccgcctgcccgccgtaccaaagcacag

SEQ ID NO: 491636 - DNA, 169 bp, Homo sapiens
taagacatggtcaatcagagatactatagacatattgttctgtcccttcgcctaaaggtgcttctgttgagtaagtgtcctctatgcttatcttgatctctttgctctgatcttcctgcagcttcagaattatgtatcggatttcttctctttactttctaataacttg

SEQ ID NO: 491637 - DNA, 454 bp, Homo sapiens
  misc_feature (295)..(295): n is a, c, g, or t
  misc_feature (352)..(352): n is a, c, g, or t
tttcatggcgaccaggacgctctgcatccccagtagcaggctgagccgagggaggctgggtatggccgccccttttggctgtgggagccgcacctcttcctcttccggcccccgtagcaattaggtttctttgcaggagatgaagccagactgctcatcattccagacatcttcagcgtgctacacccagaacaagggcattcgaaaataatgaacagggatggtgagcgccagtatcttttccatatcagtggtggaggtggatgtgaactctcctccaagaggtatctccaanggagattccaggtcccccagtgtttattatagtcacgccatcttaggctcttgatcncacatcaaataagaggcagataaattcttccattctgaagggagcactacttcttaaagcaaacctatggtgaaaatataacaatatgtcacttctaaaaaa

SEQ ID NO: 491638 - DNA, 166 bp, Homo sapiens
ttgctgtggctcagagaaggtgatcacgatctgagcttttgccaggagcctgcctcttttcccacagaaacaacatcgcatttcttcctcatcttcttgtccctcctcagagtctgctgctggtggtgggctggtgtctcctcatggagcaccagtggctcgtggg

SEQ ID NO: 491639 - DNA, 501 bp, Homo sapiens
agacaagtgtggacactggccccttgcctcctgccggcaaagatccccagctgacaaattgagagcatccaccaagggctgcctgagatcacatggatgcctggagccacatctcagcactggcctcgcatggagccatgggggaagcccactcgcccacctacccaccaaaccctgtgtgcagacagtcctaacaaatgcctggaaaaggacaattcctgtcttgcagatcctgacagcccagaggaagggcaccttaccaaccttgaggagtcaggaaggcaacctggagggcatgcccaagctgggttttgacggttgcataggagttcaccagacagactcaggatgggccgggtgggagaggaggttttgcaagaagaaaaggcaggtgccctggctggacagaatgacaaatacaatgactgggaggagaagagggaagtgaaggacaaaagaagggaaggacaaagaaatagaaacaggagcagaaactgtacc

SEQ ID NO: 491640 - DNA, 480 bp, Homo sapiens
  misc_feature (16)..(16): n is a, c, g, or t
  misc_feature (58)..(58): n is a, c, g, or t
  misc_feature (60)..(60): n is a, c, g, or t
  misc_feature (63)..(63): n is a, c, g, or t
  misc_feature (150)..(150): n is a, c, g, or t
  misc_feature (160)..(160): n is a, c, g, or t
  misc_feature (190)..(190): n is a, c, g, or t
  misc_feature (213)..(213): n is a, c, g, or t
  misc_feature (216)..(216): n is a, c, g, or t
  misc_feature (235)..(235): n is a, c, g, or t
  misc_feature (326)..(326): n is a, c, g, or t
  misc_feature (358)..(358): n is a, c, g, or t
agaagtgatccggaanttccaagatggaaccctgaaccttctggtggccacgagtgtngnganggaggggctggacatcccacattgcaatgtggtggtgcgttatgggctcttgaccaatgaaatctccatggtccaggccagggcgtngccgggcgantccagagtgtatacgcgtttgtagcaactnaaggtagccgggagctgaagcgngantgattcaacgaggcgctgnagacgctgatggagcaggcagtggctgctgtgagataaatggaccaggccgagtaccaaggccaagatccgggatctgcagcaggcagccnttgaccaagcgggcggcccaggcagccaagcnggatgaaccagcggcacagtttcccagtggagcacgtgcagctactctgcatcaactgcatggtggctgtgggcatggcaagcgacctgcggaaggtggagggcaccaccatgtcaatgtga

SEQ ID NO: 491641 - DNA, 815 bp, Homo sapiens
  misc_feature (786)..(786): n is a, c, g, or t
ggggcctacttgcctacttgacgccgccggggccggactgacagaacaagcgccaaacaaaaggctaacaaaccggagccaccataaacaggccagacacactttttaaaaaaaaatgctttgatgagaccacacacgacaaggtccatttaatgaactttagacagcgacactaggaaccaacgaccaagagaaccaaaattgcctgaagatggattcacgggccacgggttttacctgaggcaacctaatacgcatattgattatcttggaacaactacatgaagcggtttacttgtggtagatacgataaaaactagatgactaagccccaaggcgtgtatacctcccatgacagaatgctgctgcatggacaacattgcatatactagacaaaagactacgttgattgtctgactaccagaggaaacattggttgaaccctgtcggcctggttcttccaaaaaacgcatcaatctggaaccgggagaacgattttggtcaggtatcaaaaggaacttcaactcttggaaaaaaagagggagattatcacctgagaggggccgacttatgaactcggggaaatggacaatacattgagtcacccaacttttttgccggcacctaaaacgcctttcccccgatgaagcctctccaaaaaggcgccgctcaaaaagcataacgccgaaaaagcccactttggggttggaaaaatcttgggccctaaaattgaaggaaaatttcttggaaaaacactggaaaaaaccacattttaacaacgggatnttggtacccccccccctttttcggttggg

SEQ ID NO: 491642 - DNA, 582 bp, Homo sapiens
ggtgatgtatccccaacactttgagtgcaaggcaggcacatcacctgaggtcaggagttcaagaccagcctggtcaacatggcgaaaccccatttctactaaaaaattagccaggcgccatggcgcatgcctgtagtcccatgtattcaggaggttgagacaccagaatcacttgaacccagaaggcagaggttgcagtgagctaggatcgcaccactttactccaacctgggcaacagagcgagagtccgtcctttatgggtgggcactgtggctcaagcctgcaatcccagcactttgggaggctgaagtgggcggatcacctgaggtcaggagttcgagaccagcctggccaacatggtaaaaacccgtctctactaaaaatacaaaaattagccaggagtggtggtgggctcctgtaatcccagctacttgggagggtgaggcaggagaatcgcttgaacccgggagatgcaggttacagtgagccaagatcacgccactgcactctagtatggaagacagagtaagattctgccttttttttttaaacgtcttctagaaggggaaaaacttctctca

SEQ ID NO: 491643 - DNA, 736 bp, Homo sapiens
tattacacgagtaggaatagacgtagacgacacgagcatattttcacctccgctgaccataatcatcggtatccccaccggcgtcaaagtattaagctgactcgccacactccacggaagcaatatgaaatgatctgctgcagtgctctgagccctaggatacatctttcttgtttcaccgtaggtggccatgacatgggctcgtcattagcaaactcatcactagacatcgtacatacacgacacgtactacgttgtaagcccacttcacactatgtcctatcaataggagctgtatttgccatcataggaggcttcattcactgactttcccctataactcaggctaaaccctaggaacaaaaccatacgccaaaaaatccatttcactatcatatcatcgggtaaatctaacttcttcccaaaaacaatttctcgggcctatccggaatgccccgacgttactcggactaccccgatgcaatacaccacatgaaaaatgctatcatctgtaggctcattcatttctcataacagcagtaatattaataatcttcatgattgagcagcttcgttcgaaggaaaagtcctaatagtagaagaccccctccagaagctggagtgactatatggatgcccccgacctaccaaaaatgcgaagaaaccgatactaaatgtgacaaaaaaggaggatcgaaccccaagtggtgcaagcaaccaggcaccaggactcgac

SEQ ID NO: 491644 - DNA, 475 bp, Homo sapiens
gaagccaaatccctgggagactaacccacaattttttgagaattaaggtattcttggagcccgcactggtcgttattgatcacatctgtgtgaagccaaagccccgtggttgcccatgagaagtgtccttgttcattttcacccaaatgaagtgtgaacgtgatgttttcggatgcaaactcagctcagggattcattttgtgttttagtttaaaaggcacccttatttttaaaacccctgcttcacgtccctatgttgggaagtccaaatttgtttgctttttttgcagcatcatttccttacaaaactgtccgggggacaaaatgacaattgaaatgtttttttgaaaaaattactttagctgccctaacagtccaatgcttgttaatggttaaaataggcagggcgaaaactactttgtaacttttaaagttttaaacttttcaataaaattgagtgagacttataggccca

SEQ ID NO: 491645 - DNA, 305 bp, Homo sapiens
gctcactcagggagctcggattttaagacactagcctgctgatgctcccagctgattaaagccactcccttcactatcttggtgtctgaggggttttgtccgcagctggtcctgctacagtgagatgggaaattttttaaattacatttttaggctgggtgcagtggcttactcctgtaatccgagtgctttgggaggccaatgaaggatgcttacttgaagccaggggttcaagaccaacctgactacatagtgagaccccatctctgcaaaaaaaaattttttttaagtaactgccttttaat

SEQ ID NO: 491646 - DNA, 310 bp, Homo sapiens
aacgggtgatgcggttggttccaaaaaaaaaaaaaaaaaaaggggtggccctttctgggaccgggggtttcccccggaaacatccaatttggggccagccaccaaaaaggcccggcctttaattttattccaaaaaccgggatgggggggaccttaaagagcccctttccggggggccccccaatttttatttgggtttggaaaaaaccgggaaaaacggtctttggttaaaaaaaaaaaatttccccccgggtttccttccccggataaaccttcaagggccgaaagggggaaaaccggggtttgtttt

SEQ ID NO: 491647 - DNA, 293 bp, Homo sapiens
gggggggcctccttaaaatttgcacctggcaccttgtgtgtctcaccctaatcctggccctgtccatgactcagtcttcaaactaccccattaaagatctcttccaatcaggaaaacataaaaaggtcttttcctaggcagttagttcagacacagcaggtgagtgcaggtatagcaggcaggtgcaggtacagcaggtgggtgcaggtatagcaggtgggtacaggtatagcaggtaggtgcaggtatagcaggtgggtgcaggtatagcaggcgggtcaggatcagcagag

SEQ ID NO: 491648 - DNA, 493 bp, Homo sapiens
cacatgtgccaccccctaccttccgggtcccagcaattcccatggctttggttggggtgagtgctggatgacctaggcgttgggtcctagccatgcaggagagacctggagggttggcaaagccaagtctggggctgtcaggcctgggtgccccttcacagggacggggaattgtagactgagtagcagaagggagccctcaggcacaaggatcatgaattacaaattgcaaattacataaaggaaaaatcagagcccaaaggtgggcctgcaattattaatgtaatgttcttaagttctctttctgctttcgtttctgcctgctttaagtctgctgttacttttctacagagataaaatccactgtttgcatccaaccatttctttttattgtttgtgtaaaccaatgaatttgtattactatctcatggctggagttctgaagtaaaaccatacttttgcttgagtgtgtatgtgtgtatatgtgcacata

SEQ ID NO: 491649 - DNA, 1127 bp, Homo sapiens
  misc_feature (613)..(613): n is a, c, g, or t
ggaagaacctgcaggttcattcttgaggtgagtacccccatcggttcggggtccatgtgcccgcgctcagtgcacagtgcatgaggtgggccccaccatgactgagaacggcagaagatggtgtgtgcgccctggctgcgtgtgtctgggaacgtcctccttacgaactgtgatcgcgcttggagtctggcggggggtgtccgagcgcgtgaggcccacggagggaagagtctccatctttactctctcgtggcgtgtggggctttctagtgtgccatgcactcgcctcatgggactggcacgcgctggtggtgagctaagcacatgcccctagcgaaacgatttacgcattgaggaatctgccttgctgcgatcgccagggctagaactgtaggtccttctaacatgggcttgcgttgagagcataggcggccctccgaggcttggggtgccttggcatactacgcgccgcgctgcatcgacccttgttccgtcggtcaaacgcctttgttgagctcttaatgtcgaacaaacggccggaaacgtgctatattcgaaatagtatctcctcgatacggggaccgaccgactatttcaccgcgagggtgggaancgaagcgcgtaccagtcgcttcagaactaggcaccccctggagggtaggacgtcgaagtccagtgaggcccgggcatcaatcgaggttcgcggggcgtcccgatctccgttgctcatgaggcacgctgggagaagcgttgctcgaaaggagagtatgtttacggacaaccgatcttcaattgggggaaccaataaagaagcgcaagaccagtcgtggacaggctcgttgtggactttgttccgaccacccggtgtaccgggcagaacggtgaaaggttaaggcgaccgtccttgggatttcgccacgaggctggacctaccaagaaacgtaaattcgacaatgccgtacatggggcgcaactacttcgacgtgaagcgtagaaatgggccgtgggttggttctttttcgcgcgcggaattacaaaaggggcggggcacagacatgcctctcgaggttgcacgcaggttggccggagcgctgttccgttccctgcggtttgcgaagggcccatcg

SEQ ID NO: 491650 - DNA, 893 bp, Homo sapiens
gctagagctagcccctaaacccattccaacttactaccagaccaccttagccgaaccatttacccattaatcacgtataggccgataggaaattgaaacctggcgcaatagatatagtaccgctagagggagatgggatgaaaaagttgtgataccgaaggctataatatagctagggactaacccctataccttctgcgataatgaattacactagtaaataactttgcaaggagagcctaaaagctaagaccgcccgataatcagacagagcgtaatcttaagaacatgtgaagaggagcacacccgtctatgtagcataacatcagcatatgtgtggtaggaggagtatatgtggatgatgaagaatcaggttcaacctctcactgtcttacttgcttcccagtctcgatagccttggcatctggaatgggtccggactgtccatcctctgccggttcaggccaggtgtctcttcggttctgggcaaaggtgggatggcttatgtctatgtacgtttgcaggcaaatgaccttcgatcggaggcttcggtgggattcagccattatgctatggtcctgtggctgcgacactggcgccgtgtccaaatctacccctatgctaaaggtctactcggtcttaatggtgatgtcaccgtacgcgctgatccatcgtctaggaggtgcgactgatgcaactcatgtggctcaggtgggtctcgaccgcctcggggtcggacttcgggccgcgaatccccctccgttgggtgcgcctaccggaaagggtgggggccgactggcttcgcttcacttgcctgacttgaggtgtgcttcggaaccgtgcgacgcgcacttcagggggcacacgcaatccccactccagctcacgggggc

SEQ ID NO: 491651 - DNA, 1894 bp, Homo sapiens
  misc_feature (1071)..(1071): n is a, c, g, or t
  misc_feature (1122)..(1122): n is a, c, g, or t
  misc_feature (1655)..(1655): n is a, c, g, or t
tatgttgctttgtttcgatagtcgatcgtagttggaatgaagaatatggtgagctcagcattatagaagtgttttttgctgttcactcttttggtttggggttccgtgtcttgtttgtctgcacgtggcttgttttcttcttgtgtggtgctatagtctctctcgcttcgttattggttgtggatgtttcgctcatgctgctcgttgattgctgttgtggttgtgtggtgctacgctcgttggcgttgtgttgcctaggacggcttgtcatgtctcgtgtggttgctcactgtattatgtctccgggtgggtctcattgtgtgggatagtggtggtgattgatgattcgccctgagggtgtggtttctatttgttgtgtttgtggtctccgtgtgtgctttctcgggtgtgtggtccgcaccagcgtgtgggtagatgcagctgcgcgctgtgagagcgggtatgtgctgttcttctcgctggatttggggggtaactcgctcgctagtgtcatattgttacacagtggttgtgtgatgcggttgcttgctgggttatcacagaccactgcgcgtgtctgctgcggggatcctcccgtggtgtcccgctctgctggttgtgttgtgcgctgagagggggtttccgccctggtgtcatggttctgtcattgggcactttatcctttttggcccctatagtggatttgtgtggcgcaagctgtgtgtgttgttgacccgcccgaagtggtagccccctcgagaccaggttgtgttgctgcagcatctgggggcccacaatcgcctccggtggcccccgtcgttatgatgattttgttgggggtcgggttcgtactcctggttggcctcgttgttggtgtgggagaagttgctggtgtggagaaagagggtgtggttttgtgtggtgccttcggcctcagtccgggtgagttgtagacgccctctagccttgtcctaagagggttcttgcgtgttgtttagtaggccccacctgctgcgggggggattgccactactattagttctgtgacacctcaactaatgggggattagnagccactgtgtccgccccccctctggaagtgggaagatagtggcgactaancctctcccacgggagagcacctagtgtgttctccacaaggttgtgataacacacatccgcacagaagtgacaattagttgtgttgaatttgagccctagaagacgccacagtaataggggtgtgcctcccatattgaagtcgtctcgccctctttggggctcagtcttgtgccgattgtgtcgaggccgccaccctgtctctttggggggttttttggttggcttagagatggagttgtagctgcgtgtgaccccgcacaggtgccccgagacccgttgtccgccctccccctggggttgtggtgataaggagattggtggtgtgcgtaccacgcgagtgcccttgtccaacacagaggctttcccgggggagccgcttatctcccagggagaatatctggccaccaccggttggagacccagaggtaaccccagagcgtccatgggttgtaagagttatagcttctcagaaatgtgcccttcttgtttgtatagacacttcggtgaagtggccctgcgttgtgcccgacttnggatgttgggacttgcggaacttgtgcctgcatgggattgtctggaatgaaacagagcaccctggtgacacctgcgtgttaatgccaaggtgccatagtgagatgtaatggacttgtggtgtattatatggctcacccctgtgtagagacttgtttcggatttccttgttcccttctgtaattttgtaaaaaccttttaactggtagaaccttggaatataagtaaagtggggtttaaa

SEQ ID NO: 491652 - DNA, 1139 bp, Homo sapiens
ctttgagactcacatgactttctggtttggggtctggtcatttccctttcaatttttgaatctccttctctgttcagttggcttggcaaagtaccctctgttctcatgtcactaattcctgctctaggtcatctttcctttgtgcagcccacattcccaccatcctgtgaactttgttgtacttggtgttgggcaactggtgagtgttgtgacaggctcagacctgatccttcctcaggagcaattggagaccacaaatttaaagcagaaatacctgttaaaagcttggctttccttatatgagtgaggctcccagcttgggtgtggcctcctgggctcacggatcagcttgctgggccagagggggtcttagtaatgtgctagagagacacatgctcccttctcatcgtagagagcctgcatgctgagaggctccctttagacacctgcctctcgctggcttttcctttagacctagccaccagtgttttgaatcatggttttgttttgtttttgcatgcaaaaaccagaacatgacttagaaattaaaaaaaaaaaatcctactagccaagtgactgcctgcagaggctcttcattaacatttgggctgatcctgcttttgacttattcccataatggcccagttttgaagtcagccaagtccttttgtccttgacaacatcatgcagtggaaatacggtgagttctagattcttatgggacagcatgcagccctagaggaaaaattgacttcttgggtatgctgagaaataagacagtaaaatggcttcagttgatgcaaggggattttagttaaaaattggttcaggatttttaaattttattttattttttggctgggcgcggtggctcacgcctgtaatcccagcactttgggaggctgaggtgggtggatcacctaaggacagcagttcgagaccagcctggccaacatagtgaaaccctgtctctactaaaaatacaaatatcagccaggtgtgatggcacatgcctgtagtcccagctacttgggaggctgaggcaggagaattgcttgaatccgggaggtggaggttgcagtgagctgagatcatgccattgcattccagcctgggcaacagaacgagactccgtctca

SEQ ID NO: 491653 - DNA, 867 bp, Homo sapiens
accaacttgcatttaacaaacaagaacttcgtaaagtcattaaggagtaccctgggaaagggaagtatcatacaaggtctagataacctctacaaggaaagttgataaacatttatgtgaagacagagaacttacttcaggtggtgtggccactccatgcaagagtgaatttagtacgccagctataagcactcttgaaggtctggatagcgtcgctgttgatccctggatcgtggtgtaacaatggaattcactattcaggacattctggcattattgttccagcattgcaacagtcccacttaaaccttgtgaaagaagaaaagataactgaagtgaagcatttgagtaataacagacagcatataccaaaagtaccaagcaacgtgtttttgagaacccagacttaaaattttatgtattattaaagtgttagataaatgggtagtaccatacttacaaatatttaaatgcaaaattaccagactatatagcagtgtatttgccctatagggttgcataataagttaagcattcatgtcagcataaaaggcttgagacatttgtcgatgacctggatgggaaatgttgccttagtgtactaggctgcttgtgttagaggtggtaggtcctaatgaagcaatgcattggggaggtgcgtaagaatagaactaatacatctgctggctgtattaatcatgtacgtaattaaaatactgggacaaaagtgtttgtaaaacctcaggaagttgtatacagagaaagagggtcgtgggaggatcagtgggaacaaaagttgaggaatagtgctgaacatatggtaataatcaaagtgacatgggagaaaaagaaacaaaatgggaagaa

SEQ ID NO: 491654 - DNA, 284 bp, Homo sapiens
  misc_feature (74)..(74): n is a, c, g, or t
  misc_feature (153)..(153): n is a, c, g, or t
  misc_feature (155)..(155): n is a, c, g, or t
  misc_feature (164)..(164): n is a, c, g, or t
  misc_feature (236)..(236): n is a, c, g, or t
  misc_feature (268)..(268): n is a, c, g, or t
gagacggtctcactctcacccaggctggattgcagtggtgtgatctcgaccaactgcaacctctgcctcccacnccgcaagctatctgcccacctcagcctctggagtagctgggacgggactacagcacctgccaccatgactggctaattntnttttgtatnttttgtggagatggggtcttgccatgttgctcaggctggtctggtctcaaaactgctctgggctcaagtgantgtcccactttggcctcccagagtgctgggantaaggtgtgagatact

SEQ ID NO: 491655 - DNA, 1034 bp, Homo sapiens
acttacatgagtgcgcgtgtgtgcggagtcatcgagagggcagaggtaggagcatttgcacccgaagtgatagttagtcacatctgaagctgaaattatgcaaaaatcgctgggcaagttgatataccatatgtgtgtcctatcatattaattgttgaaatcatgaattgagtagaagggtgactaattagatcaagacatacgagaagatgagaagtgagagctaagtgttgcaagaatcatgcgtattgtggcagcaatcgctagtagaaacatggagaataaccgtgggacagtagattctactgaaggtttagaatgactgatgtgggatatgggatcagattggtaattcaacattgaagttatctgagcaagtgaatcggtgacgaagaagaatgatagtagtcgcgtacttgggagcgacaatgaaactgtcagagaaaggaatgcccggatgatgattctgtacttaagggatctggtgtagtaaggggttaatatttgatttcgggtaaggcagaagaacttgagggcactggttgatgaaacggtaaccttggggatttacgaacgttataagcaagcatggaacgtagaggttccgattcgcaagatgaatgccaagggcatttgtggtgatgattgcattgggtggatggggacgccttgagacttgattgaagaagtatgtcacctaaattgaatgtcatgcgcaatgcagaagcgatgtttggtaccagacatggtgtcagagatcgtcttggggcctacaaaatgcagaaatcacgggccgctcgcccttaggacaagacaccttcagcctcgtcaaaaagggtatgctccaccgtactgtccaaacacagcattatgcgtggataggtagccccacaggactgcaagaacatcccaggtctcccgacccgtaacctacaacggccggggggcaaacacccgaggggagacaactgatacagaaacaccggggatgtagccaccccggaaaatccaaaggcgctctggagggaaaccgg

SEQ ID NO: 491656 - DNA, 379 bp, Homo sapiens
  misc_feature (12)..(12): n is a, c, g, or t
  misc_feature (118)..(118): n is a, c, g, or t
  misc_feature (120)..(120): n is a, c, g, or t
  misc_feature (125)..(126): n is a, c, g, or t
  misc_feature (133)..(133): n is a, c, g, or t
  misc_feature (136)..(136): n is a, c, g, or t
caataaattgtnggcattgatacgataggtcagctgtcgccaacgtcacacttcttcaaatatttgggagtggcggatgtcaacggcgctataatgcaagaaatcgagcgctttcttncntctcnngatcctnagnttctatgtgtccgcgggaaatggggaaccggaaagacttacaattggaagactatcgccaaggcagcaaaactgaaagatggcggcgtggcaatgaatacctacgcctacatctcgctcttcggggtgaattccttgggtgacttcaaaatgcagatcgtccaagcgacggtcccacgctcctccataggcgacccaaaccctgccaaccgctggattgcgatcaatgaccaacaatttattg

SEQ ID NO: 491657 - DNA, 419 bp, Homo sapiens
gctctagaggacctttatatgcgtctcatcttcgttaaaattttgatttttttcatcatggatgttggcaataattttaacttttaacaaatgatggcatcaaactattactaattaatggaggtgggttttttggcacttctttaaaatatggtgtctagagcaagtgcctgccccccctcaacctagtctcagctctggatcgggcaaaatcaccctttctaaaaggattatcacaaagcgtcagtgacagtgtatgggagctgaatgctgtcattttgagatactaacttattccactgtagacaatttccttatatccattgacttgcattcatatgctaagttggtttcctatattccctgctctccagggaaactcagaacaaagagtaaaatccttggctttgagttgcaaa

SEQ ID NO: 491658 - DNA, 154 bp, Homo sapiens
ctcaagacctgaccagaggcagaagcaggaagcagcggtctcacaaagcactttcttaaaccttgaaaatctccaagagaaaaatatttggggaaggagggaggaaatgtgtcccttgcacaccacccctgaagcacatggcagaagcaggaag

SEQ ID NO: 491659 - DNA, 105 bp, Homo sapiens
ggccactcctggagcttacatgtttgaccacatggagagctgctgcttggagagttttccccgtgcattcaccccagctgagcatgtgtgaccacagcctgtcac

SEQ ID NO: 491660 - DNA, 299 bp, Homo sapiens
gttaggtgccgctgttgctgctcgtgttgaatctagaccgtagccagacatgggactggaggacgagcaaaagatgcttaccgaatccggagatcctgaggaggaggaagaggaagaggaggaattagtgataggactgaggctttcagtgcatacttggcaaccttggaaggcaggaatgtgaacttttcctactacttagcatcagaattgaatgggagacgcattctgcatttctgtcggcagttggctctacagctggcttctgcacggatccctaacaacagtagagagcatgc

SEQ ID NO: 491661 - DNA, 295 bp, Homo sapiens
agagccggtccggctctttgtggctcgttggggtggctcgtgcgtgtggctcgttggtaatactaagttgagatgatatcatctacttcaaattcctccctgtacgaaaggacaagagaaataaggcctacttcacaaagcgccgctgcccacgaagggtatctcttccggatccgcctaatctactccacctcaatcacactactccccatatctaacaacgtaaaaataaaatgacagtttgaacatacaaaacccaccccattcctccccacactcggcacttcgtgggcag

SEQ ID NO: 491662 - DNA, 262 bp, Homo sapiens
ccgacttgacgcgtctcctgagcagctgggattacaggcatgcacacaacccaaataatcttctatctttagcaggacaggtttctccacattggtcaggcgtggtctcgaactcccgacctcaggtgatcctcccacctcggcctcacaaagtgctgggattacaggcatgtgccgccacgcccggcctaattttctaattttttttttttaactgaagaaggaccccagggaacgtcaaacaggggcctatagccccatg

SEQ ID NO: 491663 - DNA, 297 bp, Homo sapiens
taaaggaatttgatctaggtacactggttgccctcttatctctgtcatcactttaaatatatggcttattgttccctgtctatagttccttcggtgggtcattctaacacctaaagaggtgtcaattctaattcatacagagtttttaacctctaggtggtttactttactctataatctcccacagaacctttcttaaggttctgttacatgcatttatatagagtaagttttgtatgtttcgatgactttccttttatttttctttttgaaattttttatctatttcttctagtc

SEQ ID NO: 491664 - DNA, 331 bp, Homo sapiens
gtggataagaggaagaggttgtagggatttgggaagaacctttattattccctggaggaaaagacaaatctacttccctggaaatcaccctcgtaatcttcttccaccctcatgaacttaaatatgaactgcatcctttttttcatcttcttttcttctcctagtgaatatgatctccaaacccttattttttctttgaactgttaaatttccactcatggacgatgcaggcaacatatgcaatctctgagaagatgaaaattgggacctcttattatctaattgacctagctggactcaggaaaccagggaagaagtctatgcaggcatt

SEQ ID NO: 491665 - DNA, 410 bp, Homo sapiens
ggggggtccccccgggggccccagggggggggggaaacctttttttctttgtccccccccttggggggggcccggtgaagttttccgggaaaaccccttattttttggggcccgggggggggaagggcttccgggattccccccaaaacccccggggggggttaatttgggttttttttttttccccccgggggggtttttggtcccccccccccccaattgggttccgccccccccaaaggggttttggggttccccaattaaccgggccccccctcctgggccccaaatccggcccgccctttccccctttgggttctgcccctttaccccccccttttttggtttttggggggaccaaattttttccgcccgccccttttttctttaaacttttttttggggtggga

SEQ ID NO: 491666 - DNA, 459 bp, Homo sapiens
tggctaagaatgggtaacatgactcttgttggattgttattttttgtttgcaatggggaatttataagaagcatcaagtctctttcttaccaaagtcttgttaggtgtgtaatagttttggtggctgactgatcattttgctaataaagattttttactgctaaaatggaatttgtttggagttccccttaagccagtaaagagagtattaggcactcagtaaaatctgccatataaagaagttgtaattgtttgttgtgtatgttgtttcttcaatgcccaaccatctgtggtccgatttacatacgcattttaggtgccacagccataagttcagagatagatttcccaaccagacattgggtcactccctggtcaccttgccagtgcattttattataagggaatctggtgtagccaatgggaataaacctgggtttctatagacccagttctgaa

SEQ ID NO: 491667 - DNA, 922 bp, Homo sapiens
agaggggggaggggaaactggggtgaagaacggggagtgcggcagggtaagggggtgggggcctggcgggggcaatcacggcgagagctggtgagtccgccggggctccgttccggagcgaagggaacgcgtgcggctgcgccgtgggcaagtgcgggaggggacggggacagcgacgcggcagggcaggacggagtcgaccctgtaaggtagacgtggcgccgtgcaggggcgcgtcctgcctgggcgagaggtgccctggcatgagggccgccgccgctgcgcgcgaaactgattgcataacttcaaatgggactagaaggttgggtagaaagacttgtgtgaattagggttgggaaatatcagggtagtcatgataatctgcattacggggtacactgtagagggagaggaagactctgttatgtgtatcacatttgtggtgaccaatgaatcttcgcggatagagaaatgtttgtggtggtggttcaagagtagaagaagactatgcgaagcattatgtggaagagctacaaattttcgcttcacgcgagcaaagatgcccagtccctttgaactgatgacacatttttgggcactttaatcaagtggtgggagttgacacgccctttgcggataagaagacttgctttctaaagggatggaacatccaaggagttaggagcgccccgggattatctcctttccaagttgggttagaaaaattaaggcatttgaaaaacaggggattaattgagtttctttgtggtttaaacccgcagggaactatgacttttgagacgaaaggaagattgacttacttctactgacattggctccgaagggggtgggagaacgaagaaagattttacctggaagtagaaagggacccagaaggttattggggattgcttgataagaa

SEQ ID NO: 491668 - DNA, 694 bp, Homo sapiens
  misc_feature (292)..(292): n is a, c, g, or t
tttgtgttttttttttcaaaaataaccttttcgtgtgtggaccaagaaaacaaggttgcattaaggttctcgtggtttgaccctgagaagctccaaagactgagagtgcctgcctctttgtaatagctctgtatgaaccttgtgcatcccctcagtgttgccttgttccaagctcttttgttgacaagcaatttggtccttaagtatttcctctgggtgaagtttcaaaatacttgccattcggtctatatactatatatactaactatataactatatatactactgtacntgtttcccattttaaaccaagacacacagaactgaatgtagttcttcacatatggtctggcagagtaaaatgttgtagatatatcacagttatgaatcttgtatggttattaatgcaatctaagcttgcttgtttatttgctggcatttttagcaactgcatctcatcttgggctaatattgacgctaaggttttgcttagttaattaatccaggatttcttatcacatgaattgttttatccaaaggcaaaactttgtacgaagtccttttaaaattcatcttgttggccgggcgcggtggctcacgcctgtaatcccagcactttgggaggccaaggcgggcagataacgaggtcagcagattgagaccattctggctaacgcggtgaaaccccgtctcg

SEQ ID NO: 491669 - DNA, 182 bp, Homo sapiens
ggggcccccgtttttttttttaaaggaatttgggtggggggcttcaccgggccccccttttttttaaaaaaacttttgggggttgtcctccccccccccccggtcccccccccctgtccccccccttttccttttccccccctggggtcttttttttataaaaaaaaattttttgtggttta

SEQ ID NO: 491670 - DNA, 933 bp, Homo sapiens
catggtggctcacacctgtaatcccagcactgtgggaggccaaggcaggtggatcccttgaggtcaggagtttgagaccagactggccaacatggtgaaaccccgtctctactaacaatacaaaaattagctgggtgtggttgcgcctgcatgtaaatcccagctactggggacgcagaggtgagagaatcacttgaactcgggagatgaaggttgcagtcagcagcgatcgcgtcactgcactccagccttggggaacgagtgagaccccgtactctgaatgacatgacatgaatgaatgaatgaatgaatgaatgaatgacagaaacttgccttaagtcaactaagggacaaaacaaatatataactaaatccatgtactcttatctctacaacatcaccccacaagcactctagacactgcttcttaattatcttggctggattccttagtcacatggatataacaaccatatacgattgttaacataattccctagaatacgtagaaattgtataacattcataagctatcagcagaacgaaaaggaccgtgagactactgtagcgcacagacacatgggacacgacaaacgggacaatacacaagagagcgaaaacaaacacacaagagaaaaccaaagaaaagaaagaagaaaaagacaaacaagcaagcaacgaaaaaaaaaaagaaaaagaaagaacacagacgaacaaacaacaagcgcaacgagagaaaaaaaaaggtaaggaacacacgaaagacgagagaacaagcagcaagcagacgaaacacaaaggagcagaaaaaaaagacgaacaagaacggaaaaaaagaaagaaaaaaccacaaaagaggaaaagaggagagaagaaaaaaagagagaaaacaaaaaaaaaaacaaggaaaaacgagaagaacagaacaggaaa

SEQ ID NO: 491671 - DNA, 1358 bp, Homo sapiens
acgtttgttgtgaggttcgtcttgttctcttttgcgtctgttgttcttgtgttgtgttttttcacgctgttgttgtcgtgtctcttcttgtgatcggctcttctttttgcttggtgttttcctcttttctcgtgtatcgtggggtgtctgtggtgcgtctttcggtgatttttctatcgttgtgcctgtggtgccctttggtggttctttttcgtgatactgtccccgctggtttttcttgtcaaatattgggttttgttggttgctccgtgttttattttttccttgtttctggtcttgtctggatggtgattgtgttgttgtttttttggtttgttctcctggtgtctttgggtgcttcctgttgttcaccccgtgggagttccctttgtccgttttttgttggcccgtttattgtctcgtctgttgttccatttcctcttttctctgttcatgcccttttgtgcctccttctataccggtctgttacttccttgtctttttgtctttgcattgttttttcttgtcttgcatgtggttcttgtgttcccgtgtcctaggttctatgttgtggttactctcctggttccccccttgtgtgtatgatgtggcatatcgtttgtatgatgttactatcatcctatggtctttgtatctccttttgttcatgcttggtactatgtgtcttgcttattacagtctctagtactcttcgtgccgttattccgtctctacatgggtggtcttttaggttagtatccctttggtccaggtatgggctgtatgtcctagtcttattcattgtcttctgttcattatctgacctgtggtattggtagctcgattagttactaccttctagtatacataggccttatgtatgaagtcctatctctagtagatatgtaatggtataggtagtaggtatagtaagtaggtagtatactagatagatacctacctctaggagtaggaagaagtaatagcatggataactcaggtagtgactattcccttctactccttttcctacccatatggtgtgtgtaagtactggagcctatagctgcctgctactgggctttacatggtgaacagacaccccccgtgggatagggaagatagcaggaaagaaaaagtaaactccatagaagtgtcaataccaactgggttttgataattggacattaagactgccagtctcccatttgtgaccataatgccaagccatcatataatggaggatacacaacaaaaccccccaatattctatgatcatcacaaacatcacatgaaaaccccatcatcatcaactaatacatttgcatgttgaaattcccttgctgagatgttaaagt

SEQ ID NO: 491672 - DNA, 215 bp, Homo sapiens
  misc_feature (26)..(26): n is a, c, g, or t
  misc_feature (31)..(31): n is a, c, g, or t
  misc_feature (35)..(35): n is a, c, g, or t
  misc_feature (50)..(50): n is a, c, g, or t
  misc_feature (55)..(56): n is a, c, g, or t
  misc_feature (75)..(75): n is a, c, g, or t
  misc_feature (77)..(77): n is a, c, g, or t
  misc_feature (114)..(114): n is a, c, g, or t
  misc_feature (137)..(137): n is a, c, g, or t
  misc_feature (186)..(186): n is a, c, g, or t
gcaatcggacagactgagagagttangtcanatantagcaatctctctgntctcnntcagcggaactcctttccngntgggatagctgctgccaagagtgacagtgccttcctnatgagggttcctttgttcaggtntttacctcgttatagtacagcctatttctgataccactcaggtcaaaanactgtcgtgttgggtactacgctttggca

SEQ ID NO: 491673 - DNA, 347 bp, Homo sapiens
gcgccaggcagcagcggcaacagcttgctgtcgtagtggcgcaattgtccctgagcctgggcgtggcctgtgccggtgcattgctcggcggctttaccgccgaagccggcaatgacggggtcaataccgtgcggggcgccttccaactgaccttcctcaccgtgggcctcatggcgatgctggcggcggcgatcttcctgcaactgtcgcccaaggacggcaaacgggtggtcagccgcgagcacgatatcgagcattgaagcagctgcaagcttcaagttgtaagcctcaagcttgcggcttgcagctgataacttgccgcgcccccctactcgcgtccgtagcgg

SEQ ID NO: 491674 - DNA, 102 bp, Homo sapiens
tgcggtcgctctagaggatctcctatcagcaccacacatgtatacactcaagaccacagtgacattctctacacagaactatattcgatatagcttggactg

SEQ ID NO: 491675 - DNA, 250 bp, Homo sapiens
ttatcccctaaactggtttttttcaaaaaagctaaggaaaccctatttggtgaaacttggattttttcctataaaagtggggcccaacaatgatgattttttgtgggggttaaggaaactttctaaagctcccctaacagtttcataaggaggcagccctcataaccctttaatagcatgccagggtaaaaatgagttttttactgctttgtaaaaaaatggaaaagggccataaaaatatattttttta

SEQ ID NO: 491676 - DNA, 1089 bp, Homo sapiens
  misc_feature (164)..(164): n is a, c, g, or t
  misc_feature (237)..(237): n is a, c, g, or t
  misc_feature (452)..(452): n is a, c, g, or t
  misc_feature (555)..(555): n is a, c, g, or t
  misc_feature (612)..(612): n is a, c, g, or t
  misc_feature (797)..(797): n is a, c, g, or t
gcaaagacgtacgtccgcgcgttcggtccatcagccatcaattggctctcttgccatgtgcgcatcggctcgcgccgtacctactctagctggccgtagcgaactcaggaggcataccggagtcagacagcgtggaccccctaggcatgctgcagcgctgcagngcttgaagtacccggcatggcaactgagtgctcttcctgtcggtgtcacgccaatctcaaggtgacaactggnagccagaacagggctgctggcaggcagcttgcctgccgcgtgacagtggccgtgaaaaggaacggtgttggcgaggcagacagtgcgagccatgattgggatcgaaggaagcccacctaggggaccctgggacctggcctaggtagacgtggaagacattgtggcggagccacgggatcgctgtcatacttacaagaggtcatacgatgccagcnaggaacaaatagaggacccaagaggccagaagtgaccgaatggacaaaggtgtagtagcgtgacgtagcggacagcacgagagtacggggatggcagcacttnaccgggcagaggaacctctgagggcagcggggacatagccaaggctcgtccgcaggnattagtagctgacggggggaaaagattagtccgatcccaccgatcaaatcggaaggagggtagacgcaacgcagggaactgcatgtcagtgagaggggcaagacagaggcgcatggagagttccaaatcactccaggccaatcagtcgcacgagggttccactgggacttggagaccaacgcagnttgacgcgggtcgctcgagggaaggggcataaggggcccgcgggttggccccccctctcgggacggttgaccacaaaaccagggggcacgcgtgttcaaacggtcccaaacacagttgtgcgcggccacagaatggcacgaaccccgcgcagcgacgcaacgtggaacgccaacgggcaggacccgtcatcgccgaagaccacaccccccaaaagaccccgaaaacccgaattgagagaaatttgtggggcacaccaacaaggggggggaagggcaacaaaaagagagaaga

SEQ ID NO: 491677 - DNA, 310 bp, Homo sapiens
gatctaggctcactgtcaatctctgcctcctgggttcacgtgattctccttcctcactcagcctcccaagtagctggggttacaggtgtacgccaccacgcctggccaatttttgtatttttggtagagatgggatttcactatgttggccaggctggtctcaaactcctgaccttgggtgttccacctgcgtccccctcccaaagtgttgggattacaggcatgagccactgtgcccggctttactctttattttgaacagataactattgtaggcttttttgacttcttaggatggaccgggggatct

SEQ ID NO: 491678 - DNA, 238 bp, Homo sapiens
aggcctgcctaccgtaggtctctcagagcctttactctagtcactctttagaggggggcactagaagcaatatctccgaaacttcttcgactgtcgagactttttactcataattcgcttcaagccaactacggaggcgcatttacaaaactgaaatacgagcgacaccccaggaacgcacggagacatgacgcccttaatcctctgtccctactccctctcctaggacaccgcatta

SEQ ID NO: 491679 - DNA, 506 bp, Homo sapiens
  misc_feature (9)..(9): n is a, c, g, or t
  misc_feature (30)..(31): n is a, c, g, or t
  misc_feature (96)..(96): n is a, c, g, or t
  misc_feature (202)..(202): n is a, c, g, or t
  misc_feature (206)..(206): n is a, c, g, or t
  misc_feature (369)..(370): n is a, c, g, or t
  misc_feature (393)..(393): n is a, c, g, or t
  misc_feature (450)..(450): n is a, c, g, or t
  misc_feature (461)..(461): n is a, c, g, or t
  misc_feature (467)..(467): n is a, c, g, or t
gcattaatntgagcgcgcacaaaggctttnngttgaaacagttctcgtgactgggctcctaggtgggccttgtattggagcctggccctgttcttngccaccgcgtaagggactcctttagagtgtaatcctaatcagtaatgtaagcctcatagtacccgtctgctccgtccttagtaatagcctcataagcgttcttagncttnggacctcctcctgctcagcagcagtcataacagtctgtactaatatcgttccaggtcgcattgctaatatagtcattcatgggcgtctgtcggaatttcaaagacaccagtacctcagtaatccggctagccttggtattgttagagttttcctcatgtattnntaagaaccagcactcatgccttntttcacttatgttattcaaatctgtacaaatgccactgagtaccccttgcctacttngaagcttaatncgactnttggtaacttccatcttgtgtttgtaaagagcatcttgt

SEQ ID NO: 491680 - DNA, 814 bp, Homo sapiens
  misc_feature (208)..(208): n is a, c, g, or t
  misc_feature (232)..(232): n is a, c, g, or t
  misc_feature (264)..(264): n is a, c, g, or t
  misc_feature (298)..(298): n is a, c, g, or t
  misc_feature (326)..(326): n is a, c, g, or t
  misc_feature (375)..(375): n is a, c, g, or t
  misc_feature (396)..(396): n is a, c, g, or t
  misc_feature (406)..(406): n is a, c, g, or t
  misc_feature (428)..(428): n is a, c, g, or t
  misc_feature (432)..(432): n is a, c, g, or t
  misc_feature (547)..(547): n is a, c, g, or t
  misc_feature (591)..(591): n is a, c, g, or t
gaacggcagggaatcctggcctgcaccttagtgatctgaggcgtggtgtttctgctggatccggtttcatcgtgttgcgccgcccatcctgaatagttgtgatgttgttgcctggctgtgctgcaggttagcccacactaagcggtcccgggctgttgtgtgggcttgggcgtgtgaaaaaagggagcagatttacggtgcggttganaagtacggcgaccaaacggtaaanagggaggaacttgaagtctaaacaagcctgcntctcctggttttctcaagtggcgtttcatctaantagcggtctggcccagaccctgcttatnttcacgagatcagaggagaccggacgccttcggggtggtatggccttanacgccggtagtgcagcctgtntgccccaaangcgcggctcagccacgcccgtncgantccatgcgccacctctaatccagtgccatggggatcttatcgggacccgggagccgctcgccggaggtctggctgggttgctctccgtgtctacgcccaagcaccgttgcccgcngccttgcgccttctgttggcctcttagagccttccgtgattgcntgcgcctaggccactcgctggacctccgcggcgccaccctgtttcctcgcgggagtgccagaagccttttcccctgcccaagctctgggatctccgggcagcctccattccgccgactctccaggccttccccggctccggagctccagagcttccatgactttgggccgctccggacttggtgtgctctgaggtgtcaacgcccagggcccacagtcctggg

SEQ ID NO: 491681 - DNA, 187 bp, Homo sapiens
gagcttgcttcttggctgaatggactgctggggtctggcatagaaccgcagatggcgtacattcggtactgttcctattgcacgagtgctgggttacctagagccctgtggcgcttgcgcctaagagaacgggacactgggctatggagcctgacattgctgaccattcttactcattcctagctct

SEQ ID NO: 491682 - DNA, 170 bp, Homo sapiens
tcagtgacttgaccgtcaagagtttgtgacatgcgagactgtgtgcatgtacgagtgtggttattctggcgtgtgcagcaacaagttcgtccaccctgatctgcaagaacttcgtccactgcgatctgccgaatatccagactgagcagtatggtggctcggcgtgtgca

SEQ ID NO: 491683 - DNA, 126 bp, Homo sapiens
gtaggaagacatgatgtcaaagacttaaccaagatattgagaaacttaagactgcaaatcaaacactttgaatcgttggaagcagagcttaagaaaatgaagtccaaaaataacgaccgttcagga

SEQ ID NO: 491684 - DNA, 812 bp, Homo sapiens
ctgtcctatgtgcagatcttaatatattcgaaggccctgggaattgtgctgaattcgccagtggtactgataacgtagcattcgactatggaagaggctcaccaagaacccaaggctgttaccgaagatcagccctcggggacctcgaccggggagaactcccttgggctcgagccagttcgaacttcggggatctcaccatcttcgctcaggatggggagctcactccgtaggaatcaggagaaatcaacatggcagtagacaaaagaatggtatagtcattgccagtttcggcacgtcctcagtgccctcacactctgctactagtgagtcatcagagccactagctagcttgaatgcttaatgaggtacgaatggttctcgaaggaagaaaaaaccgtgctttctgactgcattattgccttgaaggatcaccaagaacctattgtttgtgcatcatttaccaagtcatgccacgagcaagcattgtattgttaggtacattgttagttttgttcataagaagttgctaattgccaataggctttgtagttaagaagataattagacataagtaaaactagggagaaatcaacaagaagaacagatataaacgagaaagagggggggtcacggttgtatgagagtgacacccctcagatggggtgccccaagaaatttaacgctgataccgcaagatgatcggcgacaccacagtggtacccctaaatgagtgaggtacggcaatagaaagaccacggggcctgtgggcgccggacgttataccgaccagcgcgggcaactgggaaaaa

SEQ ID NO: 491685 - DNA, 156 bp, Homo sapiens
gtgggttcaccgtggctagtagggttcaccgtggcttgtagggtagaccgtcgcgctagtagggttcaccgtaggatagtagggttcaccgtgcgctagtgggttgaccgtggtctagtcataagtcttctaccacccaagtagaggtagtctcca

SEQ ID NO: 491686 - DNA, 229 bp, Homo sapiens
tctagaggatcccgtgatgttatccccaacaccgtgggtaagcaaggtttgacgctccctcctttgtgggctggttacttggctagggatagatagattactaggtctgtggaccccttggacacaggcatgcgtgagctaggctgcctgaggcaggggcagggcccaccctatgtcaccggtccagtgcctatttgggaactagtcctatccctacaaagaggccctt

SEQ ID NO: 491687 - DNA, 166 bp, Homo sapiens
gattggagagacgtgggactgtaggaagaaaatggccagatgatgagctgcacatgtcttgggaacggcacaggagacttcaagtgtgaccctcatgaggcaacgtgtcatgatgatgggaagacataccacgtaggagaacagtggacgaaggactatctcggtg

SEQ ID NO: 491688 - DNA, 166 bp, Homo sapiens
gtagtacctagtactgtcgcagagaagagggtgttacaagacaacccacagcctccagtctatcgaatgggtcagccaggctactggtacatgctaagctggagaacacatggacaggacgaccttgcctgcttcatggtgtagagtgtatgtcaaccagggtgga

SEQ ID NO: 491689 - DNA, 197 bp, Homo sapiens
tgggttgtctgtagattatagaccctattgctgcttgaggaactcatcttaggattggcaaaaaggcaggatggccgggcgcggtggctcacgcctgtaatcctagcactttgggaggccaaggtgggaggattgcttgagctcaggagtttgagaccaacctgggtaacatagtgagacaccatctctattatgaa

SEQ ID NO: 491690 - DNA, 172 bp, Homo sapiens
ggtgtatctgaggatccccgaacatgtcgaggctaggtacgtggttgtcgatgtcacccttgacatggtgactcctgcccaaacagcacttgtatggagaggaggatggacagatgtggccgaggacccatggcccagtccccctgcaaaaagggacactctagactattgc

SEQ ID NO: 491691 - DNA, 102 bp, Homo sapiens
gtgggttcaccgtggcttgtgggttgaccgtggcttgtgggttgaccggcttccgccgcttccgcaggcaccagtagaaggccgtcaccaagcaacagatcc

SEQ ID NO: 491692 - DNA, 154 bp, Homo sapiens
aggatcctgctgcacattattggttatcttttcagcagcaccccacttactggtacccatttaccatattagtcctttttcatgctgctgataaagacatacccatgactgggccaatttacaaacaccaagaaggtttaactgggactttata

SEQ ID NO: 491693 - DNA, 361 bp, Homo sapiens
tggaagtcgaggctgcgctgagctgtgattataccactgtactccagcctgggtgacagagcgagaccctgtctcaaaaaaaaaaaaaaaaaaatttaggatttggttacaatggcacttccctgtggtctcagttactttacagggccaagggggagttttggcttgagaccaagagttggagatcagcctgggcagcatagtgaggctatctcaaaaaaaaacaaaaaaatgggaatactactttaaagtaccctgtagattttttctttcatttaaaatgtttgatgtgcctaagtatggatttttctcagtatgttagaaatctagaggcagaatagtggagtagttaagagagggt

SEQ ID NO: 491694 - DNA, 1457 bp, Homo sapiens
  misc_feature (607)..(607): n is a, c, g, or t
cccgcgtcgtcaaaatcgcggcaagcgtccctaacacattaccctccaatatggttaatactacctatacgaagacccccgccggcccccctcgcgccgaaactaccgcgacggaaatcctccttccccttctgattatgattataattctctttacgattatcattatcattatagttctgttaaggctcggacttctattaaccactactattagacgcagtaatacctatcctcaaaagcgaagtcgacttaggcgggggagacaaacgacctactactatgagcctaccaccccctctagtaattaaaaagatccgtactaatctggaacaataagcgcgcttcccggtttaacaccatcggcgaaggaccataaccttaggacgaaatgcggagagtgcccccctaactactctacaactgtctatccccctattatacaacactacttcaaaggcgacctcaaatacggtagaatcacaactattaatatccccgcaacttaagaattggaaacacacgcgcactacccccgagcgaaaccccctccacaggcctcaagatataacatccacagtatacaccagacaaaccagtaaacacncaccaagaaaaaaacggaatacataaacccgaataacccgtaactgtgcaaagtaataacaaaggaacacaagcccggaaaaagccgccgagactgcacacaccctacgcaacacgcaataccaaacacccagcgcttaaaagaacaagatccccgaaagtacatcacgacggaccaaccatgagaaaggattgaaaaaacaaaaatccataagactaggaatccctgcacgcatccataaaatttgatatccctactcccgtaaacagattgcctcatttcctaaccacaacactgaagtcaaagaacaaaacacgtgatactctcgccgcagataagagggtctaaacccaccgtggtcgcttagcgccggtcctctcgccattctactgccactgttccagccccgccatgtacttaatatggttagagaaccctctcgacctactaataagtgggagacccctttccgactcatccccgcacgcattggacgccctagaaagccgaccttgccctcttttgctggttacgcttgatcgacccccatttgttactactgacctactaacaaatgcaagacctcctgctgactcactgagacctagccttgctcccgaccccgcgcccatcgctcattactagactcatccgccactgaacctcgacgtgctgactcatccccgtacgcattagaaaccatagaaatccgaccttgccctatttcactgctcccgcccggtcgacccctacctcttactactgacctactggcaaatgcaagtattcctgctgactccctgcacccagccctgcttccgggcggggccttcgcacatccctagactca

SEQ ID NO: 491695 - DNA, 946 bp, Homo sapiens
  misc_feature (946)..(946): n is a, c, g, or t
gcgaaggcgccgccaggaagagcccaagaggagatcggcgcggttgtcagctaaaccgtcctgcaagaagttggaagcgcaagccggagaaagaggcagcagcgacaaggaatgaaatcgttcgagcacaataagaagttgcacaaaccaacacaggggcacaacaggggggagcaccaaatgcggaatacaccaggcccgcaaagggtggcttaaccaaaggaaaactacaagaaggacttaacccgtgccggccaacaaccggggggaaccaccgcaaacgcacctctgcagggcagcagaggctccccaggcccttctgtgccatggcacacggcaacggggaggcaggcacaaagaacacgccccacaggtccgtcggacttcctaaaactcacaccccgaattaattacccaaacgggctacttctactcccaaggctgggcgtcccccgttggctccagtcacccctttttcatgtgattaccccaactctcccaacgcaagcgcgaccaccccactcccccccaacttacccaaacccctaaacttcccccgcggacacaccacctgggccaccacgcttcccaccacaccacacgccctaccggccccctcacccataacggaaacaccaccccagctcccccccccaccacacgcaaaaccacggggccacgccgccgccacaactccgccccccaacaccctgtccaactcccccgcacactcgatcacaccccacaacaccgctcggtctccacaccactcggccacctcccaagcaacgcgccctactcaccaccgccacagccggcttgggcaccaccacagtcccaaccttcgcctgaggccctgggggccttcgcgcgccccacacaacatcaccgcccgagcgggcgcgctccaccaacaccccccacgccagcccaccacttcccgcgn

SEQ ID NO: 491696 - DNA, 763 bp, Homo sapiens
gcgcgtggtggccatggcggcagcggggctgtggaaccagtgcccccggtgggctggtgtcgcccctgtcgtccgcgcggcccagcgctggcctgatcatctgttccggcccatcagcgccgaggacgaggagcaggagcccaccgagatcgagtcgctatgcatgaactgttactgcatatggcatgacgcgcctccgtggtcagcaagattcccttcttcagagaaatagtagtgagctccttttcctgcgagcactgtggctggaacgagacacggagcatccagtcggtcaatgcaggactccaggaccagggagtagcagctacactttagtctgtcagggtctcgtggacgacctctgaacatgagaaggtggtgcaagatctgacctctgctgtcacaaaggatttcctgcagcatatcatactcgaagattcctgtcgtttagccagacacatggagctctgagcgactgtcgacaggattgatcacccgtgctatctctgggctggacccagggacacagactgcacgaacgggcaaagcaaagatgctacagtctgaccatgaactagcatgacgtccattggtcaagacgtggagggcaggctaaaggcaaggttcgcctcaccctttttcactctgacagtcattgggtgattccctcagggaaccaggtatagtgaaaacccacatgctccttcagacacgctgatgccctggtgatcacacattacaaccggacccgaaggcaggaaga

SEQ ID NO: 491697 - DNA, 124 bp, Homo sapiens
tagcagacatccactgactccccagctgattacatccaacttgaactgaatccgatcttctcttgtgaactatcacggggtccgccagaatcacctcatgcaagtattggggtcagtatagata

SEQ ID NO: 491698 - DNA, 318 bp, Homo sapiens
  misc_feature (178)..(178): n is a, c, g, or t
tgtctactcccccgagatctccaggccgttcggccattcccgcatttctcgagaggtgcgctatctcaccgatgccgcggtgcgaacccttgtcagggcggagacctcggcggagttctttgcttccccgcagcgctacgtgctgggtgcctctgccgatcagatggaggcgatgcangacaggtggcgtgctgtcactggccgtgtcctcgccttgtctcccaacgacgagggcgagaatccggtggttggtcagttcacgcagatgtcgatggagccgcatctgagcatgtatcggcagctggcccagaatttttg

SEQ ID NO: 491699 - DNA, 128 bp, Homo sapiens
caaagaatagcaacttggcgcatgtattggagaaggcactttggagatgtacatcaaggcatttcatatgcagtcccagcagcaatcccagcttatggcggtatcgcattagacacatgtacaaaact

SEQ ID NO: 491700 - DNA, 228 bp, Homo sapiens
tatccaaggcagctactccaagatatactgttacttgactagaaagaccacagaacaggctgggcgccctgactcattccttttatcccagcactttgggaggccaaggttggtggatcacttgaggtcaggagttcgagagcagcctgactaacatggtgaaaccccatctctgctaaaaatacagaattcgctgggcgtggtggcacatgcctgtaatcccagcta

SEQ ID NO: 491701 - DNA, 110 bp, Homo sapiens
gcatcatgcacgaaatagcacaaaactataaggtgacaaatactgaaggggaacttcgctcagtgatggtacccacattagcgagcatcattttcccttcagattatcct

SEQ ID NO: 491702 - DNA, 799 bp, Homo sapiens
cccagacaacatctgggcgcgataaacgggtccctgtgcctcttggggacaagagccgtccaggtgcaatccctaggtgtacaccagaaatcctgggatcttcaccaatccaacccagtgggtttaagaagtcccgcctttcgattccaaaaaaaagctacccgcccggaggagtcaaaaagcaatttaaacacctggttttattgattgcaagcaaaaagcggtgggggaaggttccaaaaggaagccgccactcagaattttagctgctttaacgtaaaatgcgtgaacggcgattaaagcagtgcaagccgctataggccaccccaacctatacacattgggcccccgtttagaaccatgagtgccgttccaaacaaacatggattgcacacaagccacagctagtgaagtggtcatgccgagctgaaactttagccacacagaagggattcacaggtggagctcaacccagattgcgaacgctttaatctaagggtcccagcgcctcctgtaatagtgcaccgcgatctctgatgataacattatgggctacagcgtcttgatctttagctcccgtctggtgcctggtcggggttagtggtatcaacgtgtctgttcgaatacggctctggtcagatatggtaacaacgctccttttgggtgccctcagtgtatcttgcagaacacttgggccatgggatgcaaccaccttgctaaaatgctcaacgttcacaggattacgtgatggcttgcacccaatcagtacaggtgaggtctctttgaatatgtattcatc

SEQ ID NO: 491703 - DNA, 164 bp, Homo sapiens
cccccccttttttttgggggggtttttaaaaaaaaaaccgcctttggtgggttttttccgggggggggggagggatgtttctttggcccccaaagggggggtggtgcccctttgggttaaagggggtggtttggttccccggccccataaaggctttaattgta

SEQ ID NO: 491704 - DNA, 154 bp, Homo sapiens
atcgctcgttaggtctagaggatcccaaagcatgtatgtaggttataacaggttcataactataaatgacaaagaactccagcataaagcaatcacagtaacaagcatacatcacccaagaagtgagatgaaagccaatcacaggcgcatttgc

SEQ ID NO: 491705 - DNA, 167 bp, Homo sapiens
ctatgacaggactgatgagactgatgcagaggagtgtgatcctgaggagtcttattccacaggagtaaccactgtgagtagtttttcatgttttggttagacctaattctatagattgcaaatttaatagtgtgtatgtccatataaacaaacacatttccagtcca

SEQ ID NO: 491706 - DNA, 323 bp, Homo sapiens
aaaaactcccaaacaacctttttaaaaaatagacaaaggactcgctgggcgtggtggttcatgcctgtaatcccagcactttgagaggccaaggcaggtggatcacgaggtcaggagtccaagaccagcctgaccaataatggtgaaaccccgtctatactaaaaatacaaaaattagccaggcgtggtggtgtgtgcctgtattcccagctgctcgggaggctgagacacaagaattgcttgaacctggaaggcagaggttgtggtgagtcgagatctgccactgcactccagtctgggcaacagagaaagaccccatctct

SEQ ID NO: 491707 - DNA, 798 bp, Homo sapiens
cgccaggtgctcctacgaaagagcatgttaatgtagtattcattgggcacgtagatgctggcaagttcaaccagtggaggacaaataatgtattcgagtggaatggttgacaacacggacgcttgaaaagtatgaaagagaagctaaagagtaaaaacaggataaagcttggctacttgtgcttgggccttagacatcagaattcagggaagaacgagacaacggtaagacagtacaagtgggtcgttgcctatttggaaaccgaagagaagcattcacgaattctagatgtcccctggccacagagagtgtgttcccaaatatgattggtggtgcctctcaagctgatttggctgttgctggtaatctcaggccaggacaagtgatgagtgtggaaactggatttgattacaggaggaccgacaagtagaacatgtcacatgttggcaaagtacagccggtgtaaaacacctaattgtgctagttaataacgatggatgatcccaaacagtaaatcggagcaatgagagatctgaacgaatgtacggagaaactagtgccatttttgacaaaaaagttggctttcaatcccaagaaaaggacgattcactattatgcccgtgctcaggactttacgtggagcaaatctcaaagagcagtcggaatttctgtccttggtacatggattaccgttattccatatctggattatttgccgaacttcaataagatcaggttgattggaccaatcaggctgccaattgtggatagtacccgactctgggacacgtggtccgg

SEQ ID NO: 491708 - DNA, 181 bp, Homo sapiens
attcggcacagagcaagaccccatctctaaaaaattaggcatggtggtgcatgcctgtattcccagctactcaggaggttgaggtgggaggatcacttgagcccagaagttcaaggctgcaatgagtcatgattacaccacggcactacaaccttggtggcacagtgagaacctgactctt

SEQ ID NO: 491709 - DNA, 343 bp, Homo sapiens
gaataaaagattctgcatcagatagccattcaacctacgatcttccctctgacagataaaaggttagttattcaacttgaggcaccaggaaaaggcaaagcccaagtgcaaggaactccaaaaaatgatacaagaagtgaagggagaaatattcaaggaaatagatagcttaaataaaaaacagtgaaaacttcaggaaacattggacacacttatagaaatgcaaaatgctcgggaaagtctcagctatagaattgaacaagcagaagaaagaaattcaaagctctcagacaaggtttttgaattaacccaatccaacaaagacaaagacaaaagaataaga

SEQ ID NO: 491710 - DNA, 247 bp, Homo sapiens
gcctagaggatcgttatacacccagtcatgtagctatgtaggtataaaaaaataaagtagtatctaaacaagtgatttaaaaaaaaaaacactaacgaatgccacgatgataacattgaactagttccctctagaaggccattggaaatgttaccggaggttcattttccccagccactgaattcattcttcctccagtgtagacggggattgacgacaggtaaacgttcttcacttcaaggggtca

SEQ ID NO: 491711 - DNA, 111 bp, Homo sapiens
cctaacacacgctttgccgcgaaggctacatcgcctgcgtcacccgtcgcagcgcgacaaactgcagcccctggtagacagcattcagttggcgggcggtgaagcccatgg

SEQ ID NO: 491712 - DNA, 161 bp, Homo sapiens
gtatgtgcttgatcgtaaagatgcttttttcactgtacgctgcacccctcgtccccgcctctctttgctttcacttagactgaccctgacacccatcaggctcagcaaattacctgggctgtcctgccgcaaggcttcacagacagcccccattacctcag

SEQ ID NO: 491713 - DNA, 801 bp, Homo sapiens
  misc_feature (129)..(129): n is a, c, g, or t
  misc_feature (183)..(183): n is a, c, g, or t
  misc_feature (257)..(257): n is a, c, g, or t
  misc_feature (260)..(260): n is a, c, g, or t
  misc_feature (278)..(279): n is a, c, g, or t
  misc_feature (333)..(333): n is a, c, g, or t
  misc_feature (346)..(346): n is a, c, g, or t
  misc_feature (350)..(350): n is a, c, g, or t
  misc_feature (357)..(357): n is a, c, g, or t
  misc_feature (360)..(360): n is a, c, g, or t
  misc_feature (366)..(366): n is a, c, g, or t
  misc_feature (383)..(384): n is a, c, g, or t
  misc_feature (395)..(396): n is a, c, g, or t
  misc_feature (406)..(406): n is a, c, g, or t
  misc_feature (408)..(408): n is a, c, g, or t
  misc_feature (412)..(413): n is a, c, g, or t
  misc_feature (419)..(419): n is a, c, g, or t
  misc_feature (434)..(435): n is a, c, g, or t
  misc_feature (438)..(439): n is a, c, g, or t
  misc_feature (450)..(451): n is a, c, g, or t
  misc_feature (465)..(466): n is a, c, g, or t
  misc_feature (470)..(470): n is a, c, g, or t
  misc_feature (477)..(477): n is a, c, g, or t
  misc_feature (480)..(480): n is a, c, g, or t
  misc_feature (484)..(484): n is a, c, g, or t
  misc_feature (489)..(489): n is a, c, g, or t
  misc_feature (499)..(499): n is a, c, g, or t
  misc_feature (527)..(527): n is a, c, g, or t
  misc_feature (530)..(530): n is a, c, g, or t
  misc_feature (547)..(547): n is a, c, g, or t
  misc_feature (554)..(554): n is a, c, g, or t
  misc_feature (560)..(560): n is a, c, g, or t
gatgctgcttcggcgaccgggcggcggcagcggggcggggctgtggcagagtctgtgcctgtggcggtgacggcgggggagcaagcgctgcctcgcagagcagccttggggtcgccggccgctcgcagngttgtggaggggcgggccggacgctgagcggacagctgcgccacgggtggcatngtgtgtcccagagtgccggagcgagtcccagaagagaggcgaggtaagcccagagcgctgggttgcttcagcanggnaagactcccttccccctnnttcaggctgctgagcactgagcagcgctcagaatggaagccatcgccaaatatnacttcaaagctantgangacgagngcntgagcntcaaaaaggggggacannctaaaggtttnnaacgaagaantntgannagaacntggacaaggcagagnntanntgaaaagaggnntcaatcccaagaannacanagaaatnaancaantcgtngtttttttgnaaaaaccccagagcaaggagaagaaatnttngcaaacagcggcacganggggccnttcttntcgagagagtgagagcgctcctggggacttctccctctctgtcaagtttggaaacgatgtgcagcacttcaaggtgctcccgagatggaggccgggaagtacttcctcttgggttggtgacgtccatccttgatgccgcggggggttatcacagatctacctctgttccaggaaccagaggtttctgggcacccacaccggccagggcgaatagccagcccttgtttgtccaggggtgggg

SEQ ID NO: 491714 - DNA, 585 bp, Homo sapiens
  misc_feature (5)..(5): n is a, c, g, or t
  misc_feature (79)..(80): n is a, c, g, or t
  misc_feature (88)..(88): n is a, c, g, or t
  misc_feature (125)..(125): n is a, c, g, or t
  misc_feature (127)..(127): n is a, c, g, or t
  misc_feature (154)..(155): n is a, c, g, or t
  misc_feature (162)..(162): n is a, c, g, or t
  misc_feature (172)..(172): n is a, c, g, or t
  misc_feature (177)..(177): n is a, c, g, or t
  misc_feature (211)..(212): n is a, c, g, or t
  misc_feature (215)..(215): n is a, c, g, or t
  misc_feature (220)..(221): n is a, c, g, or t
  misc_feature (236)..(236): n is a, c, g, or t
  misc_feature (247)..(247): n is a, c, g, or t
  misc_feature (262)..(262): n is a, c, g, or t
  misc_feature (266)..(266): n is a, c, g, or t
  misc_feature (273)..(273): n is a, c, g, or t
  misc_feature (279)..(279): n is a, c, g, or t
  misc_feature (290)..(290): n is a, c, g, or t
  misc_feature (297)..(297): n is a, c, g, or t
  misc_feature (299)..(299): n is a, c, g, or t
  misc_feature (301)..(301): n is a, c, g, or t
  misc_feature (345)..(346): n is a, c, g, or t
  misc_feature (348)..(348): n is a, c, g, or t
  misc_feature (350)..(350): n is a, c, g, or t
  misc_feature (361)..(363): n is a, c, g, or t
  misc_feature (368)..(368): n is a, c, g, or t
  misc_feature (370)..(370): n is a, c, g, or t
  misc_feature (378)..(378): n is a, c, g, or t
  misc_feature (382)..(383): n is a, c, g, or t
  misc_feature (387)..(387): n is a, c, g, or t
  misc_feature (396)..(396): n is a, c, g, or t
  misc_feature (407)..(407): n is a, c, g, or t
  misc_feature (420)..(420): n is a, c, g, or t
  misc_feature (447)..(447): n is a, c, g, or t
  misc_feature (451)..(451): n is a, c, g, or t
  misc_feature (456)..(456): n is a, c, g, or t
  misc_feature (582)..(582): n is a, c, g, or t
ggggnggagtgagggggaggaggtaggggggggggggaggtgaagaaagaaaagaattgaagagggatggaggcttttnnatacgacnttcaacgttttcctgtttcagtgggagagtaaagtangnaagaatgagcagccacggattgttganntgttacnagcaccatgnttttnaggaatgtttcagcggagttggaaacattttttnnagnaaaannattataacgaagtcnctccccaaacnacctttaaccatctnaagntaacacncaattncttgcaaacantggtatnananacagtttaaacaattagaaaaatgaaaactgataccacttatgnntntntagtgtgtttnnnctctntntttgttgnttgnntttnctgtgggtnttttggctttntattgttatttcnttttgctattggtggtcttgggagatntggntcggngacgacacggttttgctgaaaaagcctctatgttgtcgtgttagtgtgttagagaacctaaaagctgggaccagtaaaatccacagaaattcactcttgcctttaagaacttttgaaaactgtttngga

SEQ ID NO: 491715 - DNA, 262 bp, Homo sapiens
gtctgtagaggaggctgggcagttgggaccacacgtgttcggcacgtgcacctgcaggtctccatgcacagctgtgcgtttggtgggcgcagagtgccctgtcttcacttagggcagggagggacacggccagtattacggctagagcacgaggcggaaggaggggcaaggaaacagcttctagactccaggagatgtagaggccgcactgtccctgtctgagaagcacagattctatgcaggtggacagcaagggttgaac

SEQ ID NO: 491716 - DNA, 294 bp, Homo sapiens
acctgcttactgggcgtatgaggtttaaaaaaaaaaaataaagatttcccttttttaggtttttggtttttggagacacagtctcactctgtcacctaggctgaagtgcagtggcgcaatcatggctcactgcagccttgacctcccaggcacaagcaatcctcccgccttagactcctgagtaaccaggactacaggtgcacaccaccatgcccagctaattttggtattttgggtaaagacggggttggccatgttgcccaggctggtcttgaactcctgtgctcaatgagc

SEQ ID NO: 491717 - DNA, 168 bp, Homo sapiens
cttgccacgggctgaggtggccagcgggggcccagagccaaaacacttgggaggggtggagaggaagcagcgagcacactggagaggaagtgattcaaaagccacgctatgcctgcgatgtgtccggacatacggaagacatctgcccaatctgcctttctccgtggc

SEQ ID NO: 491718 - DNA, 1426 bp, Homo sapiens
agcggggtggttaacggccatgaaacaaaagaaacactgagaggggagccgctgccacctccaccagcacatccccctttcgacaagcaaaaaaagcacaacataaacagaaacagacgccacaatcacgcagaacagcacaaagcacaagaaaaaaggaacagataaaaacaaacaaatatcaagagcaaaaaaaaaacgaaaaaaaaaaaagacaaacagaaaaccacaaaaacaaagcaaaaaaaaaaataacaaaaaaaaagcacaggacccacaaaagagagaaaagaacaaattacaacgagacaccacaacaacaaaaacaacaaaggccagacaaaaagaaacaacacacacaacacacacaaagacaaacggagagaaaaaccaacgtgccaccaatgaacacacgaagagtcagccagaacgagaacacataaaccacacaaacaacacacatagccacgcacagaactccaatgcacaaacgagccaccaacacaagaagagaacacaaaaaatacacatacaaaacacaaaaaactataaacaatacaaataacaacaacaaaaataacaacaacaaccacaacaaaaacaacacaacacacaacacataatacacacaccaagaacaaaacaaaataaaaaacaacaaccacgaccaaacaagcacaacaaacaatcaaaacacaacaagccaacaacaaaaacacaacacatcaataaaacaaaaacaatatataacaaaacactaaacacatcatataaaataaactcagccacacataataactacacaaactctataatcacaacatataacaacacaaaataacaaatcataatacctacaatacaaacaaacgaacaacaataaaatctacacaaacatatataagacgacacatacaaacgaaagcagcaaataaaacaaacagtgcacaacacagaacacacgacatgaaaaaaaagcaacaatagcaacacaacaacaaggacgtaacaagacataatcgagaaaacagaaagcagaggcaagacaggagaaaaggagagcaaaaagagcagacagacagagacgagaagcagtacaagagccgtacaacaagacacaaaaggagcacgaagctagaagaccagacgcagcaacatggcaaagcgactagaaagaaactgaaataaagagagaaagagcacccgacgctcacaatcaaatgaacagatacaagtgcactccacacacaactgacaaatcaagaagaacatgcataaaaagagaagaaagcgatatcaaagcaagcataagcaagcgaatacatagcgcagtgacgacaatggcacaaagataagaagcaaagatcgaagcaacgaacagcgatagctgcatttgcagtaatgatgagtgatatgatcaaccaca

SEQ ID NO: 491719 - DNA, 118 bp, Homo sapiens
tgagtagattcatgcccttaggcctgatagaaaaggtgactcagaaaagctgatagcgacagagtacagcaggagagggtgcattgtgaaatcagagagaagtagtgtcacctatttg

SEQ ID NO: 491720 - DNA, 124 bp, Homo sapiens
cggcgattacgctctcatgaagactcgggacttttggtatggtggttcggcgatgtgcatgcacacgctgagcgtccatactgctcacgccgaggcatccagagcaaaatcgccgatcttcacg

SEQ ID NO: 491721 - DNA, 349 bp, Homo sapiens
  misc_feature (56)..(56): n is a, c, g, or t
ccatttgatgatgatggacctgaaaagttcctgtaatcttgtgattttaaaatgtnatagagcagtgcgttaccttttctatgttaggtatgttggattttttgtttgtttgtttgttgttttttttgaggagtctcactctgttgcccaggctggagtgcagtggcgtgatcttggctcactgcaacctctgcctcccaggttcaaacgattctcctgcttcagcctcccgagaagctgggattacacatacgtgccaccacacctgactaaattttgtatctttagtagagacggggttttaccgtgttggccgggctggtcttgaactcctgatctcaggtgatcc

SEQ ID NO: 491722 - DNA, 767 bp, Homo sapiens
cttttgatatagaggctcatttccacctcagcatacaagatcgtagtctttgggcatgtgtgccatttagaatactaaagcaagtccaagcacatttttctcttctcacgtactaataagtgtaagggacttggcctctttatacttaccatgtccccaaaagtgtcagtgtagacatgtcacaaatggctctgtagagagccatgggaagagagaggagggtgatgtggaacatttaaagggttcagaaattccagaagaggagtgggttttggatagaagcatttgaggacagttgctcaaaagccttatgtgtatgatgaacacttaaccacggggaagagactcttcagtagccgtgtatctgtctggtgattttcaattttaagtgaaccttttgatctatcttaaactctctttatggtgagtctaaatcccaattctgcagaaagatcagtaaatcacagtatttttcctgtggaaaatctattcaataacggaaatcaagacaggctcaataacattttaaccaacaaaaacacttttgaattcccttgcataaggtctaccagttgtttccagcgcatacctcagtatgacttttgctagcggggaccaaaattagaaccttcgattctctaagccaaatgactttgtgctaatcacaaattttatagtacttattacagttactgacgcagaaatgcagagaagagatctaataattgcaagaaatacttaaatccacgatctataccctttgaatg

SEQ ID NO: 491723 - DNA, 186 bp, Homo sapiens
gacaaccttagccaaacgatttacccaaataagtataggcgatagagattgaaacctggcgcattagatatagtaccgcaggcaaaagatgaaaattgataaccaggcatatatagcagggactacccctataccttctgcataatgagttaactagaatactttggcaggggagccaaagctaag

SEQ ID NO: 491724 - DNA, 238 bp, Homo sapiens
  misc_feature (102)..(102): n is a, c, g, or t
  misc_feature (136)..(136): n is a, c, g, or t
  misc_feature (143)..(143): n is a, c, g, or t
  misc_feature (146)..(146): n is a, c, g, or t
gccatcccagcacatgtcccaaaataatggatctgacttcctgtctcgttccagttctctccagcatagggccactgaccagtgtccactctcaatcctgcnacccccccccccttgaattcccctgaccccggcngccttgnggngacccgaccgagagccctgccctgctggccccaactgcactccggcttccgaagcccggcctgtcctcccctattcactggtcccctgctgc

SEQ ID NO: 491725 - DNA, 1108 bp, Homo sapiens
gatcccgccgccactccgcgatcagaccgctctgtgcctgcgagcctgctgtgagcactcggattcgaggcctgtgcgccaacgagtcctgtggggcatctgcccgcaggtggcaagctcatggcctggctgagctgggactgccgcctccgcctcagccaccgcctgcgcctgccgcctcctcctcctcagcctggcggtggcccgggcccagacaaccatgtgtctgaagactactgggacgggcgcctgctggccgaaccaggagggacgacaggaggtcgccgcggcctcaatccctgggccgccgcaccagggcgcccgaagatgctgggccccgggagttctggagggttggcctcgttgcgtgccacccccggacggattcgacacaggggaagtcggaattgagcgaacagattcaaaacggcacagccgttggtccacaagtgacgacttcccggagtgtgtgagccagaagtgcatctagaacaaaaggaacaaagtgtgatgacccccatgcacgctaggaataagcgaccttggacttgaagcactcaggcggtcgcgatggaccatgcggaggcgaacaggatgcaacccctgtggaggataatgtagcccccgcaaaagcaactagtttgcattggctgccgatgtgcggtgagaactatcttcgcgttcccgtatgaaacgaggggagagccaacgcttcaggcgcttcgtggacacgcagcggcaatatgcgatgaccagatgcgacaccatagtgaaagaattgggggagactacgaaatggacgcgaagaagggtgagccgcgaggggcgcgaccaacgcaagaacgggatcctcaccgacacatgacagcgctgccaagagccccccaaggggtatagagagcacagtaccaagcagcgagggacgcacataatcaacaacaaccaaggagggcaaaacccgaggaacggacacgagagggaaaatacaaggggagcaaaaggtgtggaacccaacgcaagaaaagcaccaagcagcaggggaagagaggccgcctaagaaggagggcgacacccccaggaagaggacagagacgaacaccagaacaac

SEQ ID NO: 491726 - DNA, 899 bp, Homo sapiens
atgtgaaaccagagatgcccgccaacctggaatagagaggaagagagcaagcagattgaaccctactgcttccaagctggcccatcatgatgaaaacttaggacacaaaacaaaaaaaaacaaggaaacaaacaaacacacaccaacactgtgtgcgtgcgcccgcccccggcccccccccgaaaaaaagcccttcccaaaagaccccacccccgcgttctgggcgccgccgcggacccccccacagacgggcacagacgcccacacaccgggcccacaaacgcgcgtggccccaccaacaaagacacaaacacccgcgggctcccaatgaacccacaacggcgcgctgtgagatcactctcttcaccccaacaagtataaaaaaaaccccgccaccggggggcgcaacaccacaccgaaccccctttcttctgcgtgcaaaccaccatctcccccacatgatgcgccccaacccacggacgcgcgcaccaccacactaacagcgggggaccacctccaacttcacacaccaaacgcggactagcagcctccccaacaggcggacgcgaacccccactcacagaataactcacaacaattaagccgccccccgccgacaacgcaggaggcaccacacacacacaaaaacgaaaccacacccacaaccacccactcccaccaccaacaagacacacacagcacacaacacacacacaacacaaacgacaacacaacaccaacgaaaacaaacacacaacacacgtaaccccacgccatcctccatgcacacacccacacctaccaccaacccacaacacacaccacaccacacattcacgtcgtacactcacccccccaccacacgcacacacaccacacccccacccaccacccacaac

SEQ ID NO: 491727 - DNA, 235 bp, Homo sapiens
tgttattgtcgattatgattttgtaaagtacataatcaatataagtttatggaaaacgtaagaaggaaacacgttagacagagagaaatagacatgccacacctagagagacattctatttttttttttttttttggaaagggatttccattttggtggcccaggcgggagtgcaagggcgctttctcggcacaccacaacctcagccttcggggtcaagcgatactccggcctg

SEQ ID NO: 491728 - DNA, 308 bp, Homo sapiens
ggactaaagtacccacctgcagtggtgacttccatcctcaactcctggctcaatactgatggaagataatctgcttaacaatctccagaaggactgtgcacgtcaatgagtcgcttgtgagttctcatctgggaaacgatcccagcgtcttagcaaccttcactacaatggagtttttcttgtagtgattctcaaagtcttgttcggcattcgaactggtcctttcactacaagattcttttctttagcgcctcttatcaagtcagcacacaccttttccaaggattttacgttgcggctgcaggtgg

SEQ ID NO: 491729 - DNA, 124 bp, Homo sapiens
  misc_feature (51)..(51): n is a, c, g, or t
  misc_feature (88)..(88): n is a, c, g, or t
atggtgagcctggcccatggcccagtctttcacatggagcagcagggcgtntctctccagtgggaaggtagctcatgtcagttccggnccattttgcagaccttggcttcttcttggagaaagg

SEQ ID NO: 491730 - DNA, 169 bp, Homo sapiens
atagcgacgctaacatagcaaagtaatgctggatcaagctagcttgcaagcctacactacagctcacagcaacactggatccttaacccaatgagcaaggcaagattgaaccagcaactaatggataccagtcagcttcattaacaactgagccacgacaggcaactcc

SEQ ID NO: 491731 - DNA, 683 bp, Homo sapiens
  misc_feature (469)..(469): n is a, c, g, or t
gcaggaattcggcacgaggggttcggacgctcatggccacggtgtgctgggtgcacgcgccctgcgtgcaagggatgctcccggccgcccccggttccgaggatccatctgggatgcggcgaggagggcagccgagctgtacgcaaacaacgggcctttaggtttcagagggcgaaactgactgcgctggatagagcgcgtgcaagccaagccgcactgctgattggatttttaaatatctccttctgagtgagtagcattcgagatggaaccattctcacaacagctccagctggcagcatgacttaccgccaatttatccaacttgtgtcaaggctctgaaatgccaacaacgtagaggcctgcacttgatgtaagggtggcacctcacctgcgaaggaggatgccaaacaatagatgagctcagcggactactccaaacttgcggtgaaagagatgaagcataggncatactgcactacccttgtgtagcctcaaatggaccaaggccagtggggcacccactaggtactcgggatcttcaatatgttgtagtacaaccacgcctcctactaaccgccatcatcaatgctgaccccgccaataccttttgtgtagcatgcaccttgcaaacataatagccgatctagggatagtttgccttccaggcccggggagcgggg

SEQ ID NO: 491732 - DNA, 384 bp, Homo sapiens
atccccttcaacaaaggagtcatcctcgtatggcaaataaccaagatgtgtctctgatcaactgtgcaaaggaaaatgactcattatacccaagttatctaaacttctgggtgaaaaaaaacccagcattaggacttaggtgtcacttaggaacaaaatcaattgggctcgaaaatcctaccccctaagagatgctcttactgggtggctcaatagttgacatagccttccttttccagaaattcaccatttgacagaagtgggtcctcccaatggttggccaagatgtactttgctggtgtccaaattcaatccccacaacgtttttggttaaaggtaaccacaagccaattgcttcattgtcatacttgtatggtggtatag

SEQ ID NO: 491733 - DNA, 709 bp, Homo sapiens
  misc_feature (14)..(14): n is a, c, g, or t
  misc_feature (33)..(33): n is a, c, g, or t
  misc_feature (228)..(228): n is a, c, g, or t
  misc_feature (236)..(236): n is a, c, g, or t
gtgaccatcttatncactggaggggcagaatgnattcaaggaattcagagaacacagcagcgtcttaacttccccttcctttgttgaaagtcggctcaagcagttctgagaacagaagccctgggggtttgggcctggaacagacgagacacccgcggtcccttctccatgccaccccaaacaggacccaggaccaacactccgcggcggcagcaggagtaatcgcgngcgcgcgnggcggtggcgatatttaaaggggacgcagcctatctgtcaggagtggagcgtgagtcggctcagccaatgcgcatgcgtgaggcgccagcggtttctcccgtcacagtggttcccacggttgtcttagaaaccagtccccgaggcttggcagagcaggagccctccgtggcagtgcttgggtatcgaggctctgaggctccggcctcacctttccacggggtcgaagggaacctctcctgatgacagcaatcgcaacgggccgaccatgatgatgaaaccccaggcggagacgggggaagcagcacgggatcccagcctcaggcctgcaaggacggtgttggttggggtgagtctcaccaaaagtcgtgccgccgtctgtgatctcgaggacgggtcggcctgcgtgcccctgggctgctctctcacccgagggtcgttctcctccagagcagaaccccggatcctcaggggt

SEQ ID NO: 491734 - DNA, 311 bp, Homo sapiens
gtcctagcctcgccagtgtcctagcctcgccagtggtactagcccgacagaactgtggcttgtaagaggaagagagccgggtgtggtggcacatgcctgtcacccagcactttgggaggccgaggcgggggaattgccccgacagaactgtggccttgtaagaggaagagagccgggtgtggtggcacatgcctgtcaccccagcactttgggaggccgaggcgggggaattgccccgacagaactgtggccttgtaagaggaagagagccgggtgtggttggcacatgcctgtcacccagcactggcgag

SEQ ID NO: 491735 - DNA, 378 bp, Homo sapiens
tgggaggacttcacagatagtgtttcggaaaggcccaatcatctcagtgcctgactaagccgggaaggtcccgttgtccaaattgcccaactaaagcacacatgtccactacggcagcccctaggagtcagtagtcaaagaggactgaggctccagcgccgttctttagatcggttagagagtgacccacagggtgcccttctaggtaccggtactccagaaagtttcctacacccttgcctagcagttagcagaggtccgggtagctgagactggctagggtgactaagacctctactacgtgttggtcttttactcctcctggtctcagttggcccgttaggtcattcccagaaccctgtgtcctcccaccacaaa

SEQ ID NO: 491736 - DNA, 362 bp, Homo sapiens
agggtaaaatgcccttttcatcatatcacatcaagggtatgtattattaataagatctatccctgttggccttgtgcagtggctcacacctgtaatttcagccctttgggaggccaaggtggggggatcatttgaggtcaaaagttcgagaccatcctggccaacatggtgaaaccctgcctttattaaaaatacaaaaattagctgggtgtggtggcaggcccctctagttgcaactactcgggaggctgaggcaggaaaatccctttaacccggggtggagggggtggaaatggaggttgtagttaacttagaccatgcccctgccctccagtttgggagataaaatgagactatttcca

SEQ ID NO: 491737 - DNA, 255 bp, Homo sapiens
aatgagggctaacttcgggggtaagcatattattaatgtagtgttctgcagttcgtgagtactcggcaggggtgtaatccgaatttttgtctacgttaagggcctgcagatttggtttggtgaaagcggcgatgtgctggcccccatatgatgcagttacgagactttagaacctcgtttggtgtaaagtacggtagagatcttaattaagggatttagaagctctatccggataaatggatgcttgaagcgaga

SEQ ID NO: 491738 - DNA, 165 bp, Homo sapiens
  misc_feature (24)..(24): n is a, c, g, or t
  misc_feature (33)..(33): n is a, c, g, or t
  misc_feature (69)..(69): n is a, c, g, or t
  misc_feature (157)..(157): n is a, c, g, or t
  misc_feature (160)..(160): n is a, c, g, or t
tcccaaatgaaaaaaggtttgttnatgttctgncctgtaaactgttggtcaacgtaaaaataacaaacnatgagcttgtgtataacattcacctggctgtcaacttcttggtgtcattgctcaagaaaaactggcagaatgtccggaccttataatnatncaaga

SEQ ID NO: 491739 - DNA, 285 bp, Homo sapiens
  misc_feature (15)..(15): n is a, c, g, or t
ccggattggagcctnatgatgttgaagcatttgttattgatgctgtaggaactaaaatggtctactgcaaaattgatcagacccaaagaaaagtagttgtcagtcacagcacacatcggacatttggaaaacagcagtggcaacaactgtatgacactcttaatgcctggaaacagaacttgaacaaagtgaaaaatagccttttgagtctttcagatgcctgaatttttatgaaaatgattttgttcgttgagaaaaaaagttctaagtaaaacattatcaact

SEQ ID NO: 491740 - DNA, 144 bp, Homo sapiens
ctgaggttgatctagaggatccctaactcagtggcgagctgcgctgggcgctcaaaagcgagttcctggtgcgcgagaacctgcaagtactacatgtgatctcaaggagtaaccagcgcggccgcttcctgcgcatcctgccag

SEQ ID NO: 491741 - DNA, 234 bp, Homo sapiens
ggccaacatgggccgcgttcgcaccagaatcgtgaagaaggcggcccggtgtcatcatagaaaagtactacatcgcgcctgggcaagcgacgttccacagcgacacaagcgtcgtgtgctaggagatcgtccagttagtcccccagcagaaagtctccgggacaagaatatcaggttatgtcacgtcatctgattgaacgcgaattcagagagggcccaggtaacgacggtact

SEQ ID NO: 491742 - DNA, 962 bp, Homo sapiens
  misc_feature (11)..(11): n is a, c, g, or t
  misc_feature (185)..(185): n is a, c, g, or t
  misc_feature (216)..(216): n is a, c, g, or t
  misc_feature (287)..(287): n is a, c, g, or t
  misc_feature (312)..(312): n is a, c, g, or t
  misc_feature (323)..(323): n is a, c, g, or t
  misc_feature (331)..(331): n is a, c, g, or t
  misc_feature (337)..(337): n is a, c, g, or t
  misc_feature (365)..(365): n is a, c, g, or t
  misc_feature (399)..(399): n is a, c, g, or t
  misc_feature (418)..(418): n is a, c, g, or t
  misc_feature (439)..(439): n is a, c, g, or t
  misc_feature (442)..(442): n is a, c, g, or t
  misc_feature (464)..(464): n is a, c, g, or t
  misc_feature (468)..(468): n is a, c, g, or t
  misc_feature (494)..(494): n is a, c, g, or t
  misc_feature (524)..(524): n is a, c, g, or t
  misc_feature (529)..(529): n is a, c, g, or t
  misc_feature (559)..(559): n is a, c, g, or t
  misc_feature (567)..(567): n is a, c, g, or t
  misc_feature (569)..(569): n is a, c, g, or t
  misc_feature (576)..(576): n is a, c, g, or t
  misc_feature (585)..(585): n is a, c, g, or t
  misc_feature (592)..(592): n is a, c, g, or t
  misc_feature (621)..(621): n is a, c, g, or t
  misc_feature (636)..(636): n is a, c, g, or t
  misc_feature (655)..(655): n is a, c, g, or t
  misc_feature (699)..(699): n is a, c, g, or t
  misc_feature (710)..(710): n is a, c, g, or t
  misc_feature (731)..(731): n is a, c, g, or t
  misc_feature (739)..(739): n is a, c, g, or t
  misc_feature (789)..(789): n is a, c, g, or t
  misc_feature (799)..(799): n is a, c, g, or t
  misc_feature (803)..(803): n is a, c, g, or t
  misc_feature (812)..(812): n is a, c, g, or t
  misc_feature (814)..(814): n is a, c, g, or t
  misc_feature (825)..(825): n is a, c, g, or t
  misc_feature (837)..(837): n is a, c, g, or t
  misc_feature (842)..(842): n is a, c, g, or t
  misc_feature (850)..(850): n is a, c, g, or t
  misc_feature (858)..(858): n is a, c, g, or t
  misc_feature (863)..(863): n is a, c, g, or t
  misc_feature (878)..(878): n is a, c, g, or t
  misc_feature (927)..(927): n is a, c, g, or t
  misc_feature (932)..(932): n is a, c, g, or t
  misc_feature (939)..(939): n is a, c, g, or t
  misc_feature (948)..(948): n is a, c, g, or t
tttaatttttncccatatgacaaaagctgagtatttcagagaattatacaacttgaaaaaccctgtgtcattaaattgtaactttattgcaagatggtagaattaattacaaatttaaactataacctgttaatctttagtcaggcagcaagtttttataaaggcaaactgcttattcagaagtnatcacggaacaactcaaaggcagagcaaganggatgagaaacatctgactggccgatagagatttcgttctctcactatatgaaacaaacttttcatttttnggaagggtaaactataacttcagtngacaccaacanagaaagantttgtnaaatagactagtttccatttagtcagtnaactgtttctagctgtttcaattgggatagatanatttacataactggctgtnctttagctttctttgccagcngcnttaggtccgcaatgcacttggnaatngtttccttttcctgctgtttggagangctttgcaccacgtcttttccacccaattnatcangtctccttgtccctttcgacgcatcaggtnctgcacananatatganagtccaggngattctntacttccttatatactctatacagttgtncccggtaagtcactnccaaagccatagcaatgtnattcctttgcacatcaaaaaggtaatggcgcttctgaaccagtncctgttgtganttctccgtatcaattgcattntggatgtnttggatggaagcctgcctcgcctcttctagttgggcaagtttttgctcantgagtttatnagcnaagtttgcnanaaagggaccanattttttaattncatanaccattanacctagtnctganagggcagtgaaggtntctgcgctaatcacatatatttctttggataaagcgtacaagacaagcncagtnccgagtncatagggtnctgttacacagttt

SEQ ID NO: 491743 - DNA, 522 bp, Homo sapiens
  misc_feature (11)..(11): n is a, c, g, or t
  misc_feature (185)..(185): n is a, c, g, or t
  misc_feature (216)..(216): n is a, c, g, or t
  misc_feature (287)..(287): n is a, c, g, or t
  misc_feature (312)..(312): n is a, c, g, or t
  misc_feature (323)..(323): n is a, c, g, or t
  misc_feature (331)..(331): n is a, c, g, or t
  misc_feature (337)..(337): n is a, c, g, or t
  misc_feature (365)..(365): n is a, c, g, or t
tttaatttttncccatatgacaaaagctgagtatttcagagaattatacaacttgaaaaaccctgtgtcattaaattgtaactttattgcaagatggtagaattaattacaaatttaaactataacctgttaatctttagtcaggcagcaagtttttataaaggcaaactgcttattcagaagtnatcacggaacaactcaaaggcagagcaaganggatgagaaacatctgactggccgatagagatttcgttctctcactatatgaaacaaacttttcatttttnggaagggtaaactataacttcagtngacaccaacanagaaagantttgtnaaatagactagtttccatttagtcagtnaactgtttgaatgctgtctgaactctgggaaagatatacagaaaaaagcagactatgctctgagcgtctctgtgcgcaacgcagctgttaggtgcgcaagtgcagctggcgaatcgtctccttatcgctgaattatgtggggaggtctgaagagtcg

SEQ ID NO: 491744 - DNA, 740 bp, Homo sapiens
tcgagttttttttttatatttattttttatttatttaatatttgggcaaggtttttttcccataatattaaagtttttcgaggttataaatatttttcttcggggaagcacaagtttcttttcacattggctccctggattcaattttataacacagttggagaaccaccggtggggcacttggtgaaacgtggcgttctcgtggggcacgccctcttatatagcttgggtggtgtgttggatagtcacacgttacaggctctcactcacacctatacaaaacaggagagtgtgacctctctgtggagaaacctctcagaacacatatatgtgacaagaacagttctcgtagatattaaatctcacaatctctctcacacacacaacaacatgtgcgcacgtgtgatatttaaccccaacacacaaagaaagtatagggggtgacatgtgcgacgcatgatgagcacaataacaagaagagaggacacaaacacccgcccgcgcatcacacacccacaacaccacactttgagcgatatgtagtggcgctctgtgatgagaagagagagagggcgacaccagaaagttagccacaaaccagttgttgtgcgacacgacccagttatcccaaagagagcgtctccaggtgacgacactgttgttgtttccacttgtggacaacacagagacgagagaggccctgtggtgttgagccactaatgttgcttcacactgtgtgg

SEQ ID NO: 491745 - DNA, 123 bp, Homo sapiens
  misc_feature (40)..(40): n is a, c, g, or t
  misc_feature (77)..(78): n is a, c, g, or t
  misc_feature (104)..(104): n is a, c, g, or t
tatggggagggctaacccctatgcctttgcataggggagnaactagaaataactttggcaaggaggaaccagaagcnnaagaccccgggaacccaggacgaggntcctaaagaacagggttaa

SEQ ID NO: 491746 - DNA, 332 bp, Homo sapiens
gcacagctacacacagggcgctctacaatatgagccgttctgaagtcatcaaagccttagaccagataaagactccagccatgacctcatgctgctccgcctgctcagagcactgccaagatcacagatgtcgtgaaggtcctgggcctgcccaaccaggagccagcactggggaccacctgctacgccatcaggctggggcagcatcaaaccagaggagtgagtcttcagtgtgtgagcctccatctcctgtccaatgacatgctgtgcaaaagctatactctgagaaggtgacagagttcatgttgtgtgcagcgctctggacaaggtgg

SEQ ID NO: 491747 - DNA, 481 bp, Homo sapiens
  misc_feature (469)..(470): n is a, c, g, or t
ctcgataccccgtgaaagcacacccgcattcgatgaacagccccgccgatagacgaccgcaacggatcatcttcgccaccgcgtccgcgatttcagaaaccggaccgccgagtgagcccgccagcccggccgcggtcagcaggccttgtcgcagaatcgccaactcaatgcggtattccagctcgtcaccgtcgaacaacaatgctgcgtcctggcccaccagctcggccacgttggcgaacgcccccacgctatactcaacggcgccgaagtcactctctggttcacccgcaatttccagagcagcccccccgatttgtttggtgctgttcgaaaccgccacagcctcggtaccgactcggccaacggtctcgcagtagcggacgatcgcaagaatctgctcattcagctcaattgcccacttcgcccgggtcagtgccacgtacagcaagtgcagctcctgacgcanngtcagggtatc

SEQ ID NO: 491748 - DNA, 179 bp, Homo sapiens
aacatcattcttgtaatacctgttgttacatatcttaacttcccgtcctggtcgaaactcaaactccaggaactcgtggccgaacttgccttgtgcccacgtagtaccgcagataaaagtcactctccatggctcccaaaagacaacctgagcctgaacttccaagagcaagccgcact

SEQ ID NO: 491749 - DNA, 226 bp, Homo sapiens
tcaagcttaaaattttctgctgttctttttttccagtagggacaggtcttgccatgttcgcccaggctgctcttgggctcttggactcagcaatcctcccacctcagcctctcaaagtgctaggattacaggcctgagcccccatgcccagtctcctggtgtccttggggggtttccctctgtaggtacttgtgcatttgtgtccagagagacttgggagactata

SEQ ID NO: 491750 - DNA, 637 bp, Homo sapiens
  misc_feature (1)..(1): n is a, c, g, or t
naggttcacccacaagaggcttaatgactgtgcttcccctccggtgtcaagaacttaaagccctcagagtccacacaagctcttaggctcatagtgcttctgcgctcacccggcccgtttgcacagatacagtgaggcgcttgttccttctcctctggcacacctagaaagccggaagagtctcccatttgcacactgacccgaatgcatttggaagtgtagtttagacccgtggccttgagtgtaaagccttctccacgattcacagagtaagccattgtgagctccacaaaaaaggtctgaaaggctcgaagagagccagtgatagagataccaagtccagcttcttcacacagacagaaggcccctgccttccactcggtgatggtgtcagggtctgttactcctacctcagccacacctgttgagtttaccaccaccaaatcccagatccatgtctcaggaaagtactttcgtacggtctccgtgtgaggctcttcacacatgcaccaggcgtgcatggcctcttcccattacatctgactcataaaaacctacacgtagaccttcaggtccatgcatttcatactgttaaagctgtgcacacattttgggtttacgaatctttgagttggtg

SEQ ID NO: 491751 - DNA, 934 bp, Homo sapiens
  misc_feature (11)..(11): n is a, c, g, or t
  misc_feature (94)..(94): n is a, c, g, or t
  misc_feature (99)..(99): n is a, c, g, or t
  misc_feature (111)..(111): n is a, c, g, or t
  misc_feature (115)..(117): n is a, c, g, or t
  misc_feature (124)..(124): n is a, c, g, or t
  misc_feature (130)..(130): n is a, c, g, or t
  misc_feature (138)..(138): n is a, c, g, or t
  misc_feature (152)..(152): n is a, c, g, or t
  misc_feature (155)..(155): n is a, c, g, or t
  misc_feature (158)..(158): n is a, c, g, or t
  misc_feature (174)..(174): n is a, c, g, or t
  misc_feature (176)..(177): n is a, c, g, or t
  misc_feature (279)..(279): n is a, c, g, or t
  misc_feature (282)..(282): n is a, c, g, or t
  misc_feature (297)..(297): n is a, c, g, or t
  misc_feature (305)..(305): n is a, c, g, or t
  misc_feature (309)..(309): n is a, c, g, or t
  misc_feature (311)..(311): n is a, c, g, or t
  misc_feature (317)..(318): n is a, c, g, or t
  misc_feature (322)..(324): n is a, c, g, or t
  misc_feature (328)..(328): n is a, c, g, or t
  misc_feature (343)..(343): n is a, c, g, or t
  misc_feature (347)..(347): n is a, c, g, or t
  misc_feature (351)..(351): n is a, c, g, or t
  misc_feature (356)..(356): n is a, c, g, or t
  misc_feature (358)..(358): n is a, c, g, or t
  misc_feature (379)..(379): n is a, c, g, or t
  misc_feature (394)..(394): n is a, c, g, or t
  misc_feature (402)..(402): n is a, c, g, or t
  misc_feature (407)..(407): n is a, c, g, or t
  misc_feature (414)..(415): n is a, c, g, or t
  misc_feature (426)..(426): n is a, c, g, or t
  misc_feature (428)..(428): n is a, c, g, or t
  misc_feature (433)..(433): n is a, c, g, or t
  misc_feature (438)..(439): n is a, c, g, or t
  misc_feature (441)..(441): n is a, c, g, or t
  misc_feature (443)..(443): n is a, c, g, or t
  misc_feature (447)..(447): n is a, c, g, or t
  misc_feature (452)..(452): n is a, c, g, or t
  misc_feature (467)..(467): n is a, c, g, or t
  misc_feature (469)..(469): n is a, c, g, or t
  misc_feature (475)..(476): n is a, c, g, or t
  misc_feature (489)..(491): n is a, c, g, or t
  misc_feature (493)..(493): n is a, c, g, or t
  misc_feature (518)..(518): n is a, c, g, or t
  misc_feature (522)..(522): n is a, c, g, or t
  misc_feature (537)..(537): n is a, c, g, or t
  misc_feature (553)..(553): n is a, c, g, or t
  misc_feature (565)..(565): n is a, c, g, or t
  misc_feature (637)..(637): n is a, c, g, or t
  misc_feature (645)..(645): n is a, c, g, or t
  misc_feature (653)..(653): n is a, c, g, or t
  misc_feature (767)..(767): n is a, c, g, or t
  misc_feature (796)..(796): n is a, c, g, or t
  misc_feature (801)..(801): n is a, c, g, or t
  misc_feature (822)..(822): n is a, c, g, or t
  misc_feature (843)..(843): n is a, c, g, or t
  misc_feature (850)..(851): n is a, c, g, or t
  misc_feature (901)..(901): n is a, c, g, or t
tattcattatngtcaccacatatatatacttgttattataacctttcccatatctttttttagcattaattggaaaaaaaaaaaaaaaaaaaanttaantaaaatataaanatannnaaaaaanccaatnaaaaaaanatattccttaaaanatntanaattttttttttttcnannttttttttcttttttttttttttttttttttttttttttttttttttttttttttttttttttttttttttttttttttttttttttttttttttttttttnttntttttcatattttantccttttnttancntttcannggcnnntttntttttaacattagtntttntttnccagntngtaatttagatttttttctgnggtgttttttatttnttcttttntgctnttttttnnttttttttttntntctcntcttnnancntttnttttnctctttgttcctttntntttttnnttgtttttttgannntntggttagctttttctctgtttcctntttngtggttttttttctnacccatccttcttttntctcagtgcccncaccagccgctattgttgaaccaccgtaacgtagcatgaacctccccagctctttaaagtctttatatagcncaagagcnattggtcnttgtgtctgtagctctaccaatgcattctggcctttagtcaaaaacttaggctttttctttgtgacttcacccgtgcttttgtttaagacactaatcaatcgtttaataacggngggttcactgacagtttggtagtgtacancacangaaatcctttagtgataggantttcaatattaaagatgaggnttcgggnnctgaaacgagtgcaagctttaatgggtactttggggccacaaaatatgcngccaacattgattttgatgatatccatcccacc

SEQ ID NO: 491752 - DNA, 327 bp, Homo sapiens
gcgcgcggaaggcggaggctttgggtgccgttcaagattcaagcttaacctgtaaccaaccgccatggccgagggaaggcattgctgctggaggtgtaatgacgttaatactgcttacaagaggtcttgaggactgcctcatcacgatggcctagcacgtggattcgcgagtgccaaagcttagcaaagcgcaagctatcttgtgtgctgatcaactgtatgagctatgtatgtcaagttggtgaggccttgtctgacacaatcacctattaggtgatgcacagaactagagatggtagcttgtaaatgcagagggactgtaagtgt

SEQ ID NO: 491753 - DNA, 106 bp, Homo sapiens
tcttgattgatgtgacttgccagaatgtttgaaaccccagtgaccaagaataatttttacttttaagaaagcatacccagcaataaaagtattatttttgagtcta

SEQ ID NO: 491754 - DNA, 396 bp, Homo sapiens
  misc_feature (1)..(1): n is a, c, g, or t
  misc_feature (108)..(109): n is a, c, g, or t
ncttagatcagggtgcaaaggaagaataatgagcagcttttcagagggaactgggcgtttaggtgttcaggggagggggtggtgcttttaaaatctcaggcttggcannaaatgcgtggcaattttacggtcaattggcgggacatctggaaccagacattctggccttgagttgatggtagggaaaccagcttacaggcaacagcaagcccataatgagtccctgtcatgtactagtggaaaccacgttgacggtctgccaaatatccatgcgcctttttctcagcgacaggattctccttagagccattatctagtatctgaaatctgtccacttacagatcttcacctgttttcgctattaaagacaatgcaaaaacaaaagctaaaaattag

SEQ ID NO: 491755 - DNA, 177 bp, Homo sapiens
gatgagatcagactgtgtgtggggagccggttgctgtagagtgagggtactccctaccccacctgtcccttggtgtttaatcattgcagggacgcctctctgattattcacccacgtttcaaaggtgtcagaccacacagggacgcctgccttggtccttcacccttagcggcaagt

SEQ ID NO: 491756 - DNA, 568 bp, Homo sapiens
  misc_feature (342)..(342): n is a, c, g, or t
agcggagtcctgccggctggttcgggtggagtggtgggctagcggtgctaggggaggggatggaccgagtaccaggagtgtcgggatgagggttccgggaggatctggccatggggtgccgaggcacaggcaggtgacgaaggatacttcgtgaaggatatcaagatctgggcttcatgaaattctgataccttatacctgtctatggttgcaggattgcacatggccagagatgacgcaaaggagcaagagagacagggacattgagggtgtctggagcctgacccatacgtgtggggacaagatagcatgggcatggcatcatatatctactgtctgggnacgagttgttgtgctgatctgtattctagccgtggtggagcgtttatgccggctgtcatgcgaaaggagtagcgcatgcatgtttatcatagagggtatggttctgcatacgtaatatacatgggcacgagcggagttgtgattcttgtagaccgtagtttggaagtaaacctctagtagtgcgttccataaactagatggttgcgctagggttacagaagaagcc

SEQ ID NO: 491757 - DNA, 160 bp, Homo sapiens
ttaaacaaatagttacacatacatctgtgtgcagcgattatgctacgattctgagactaaaataatgctgaatgtctctcatcatacaggctttccattattagtgggtatgtcgtgaaaacatcaaatttgccacaagaacttcacaagtcagtgtctg

SEQ ID NO: 491758 - DNA, 255 bp, Homo sapiens
ctttgtcccccaggccggagtgcagtggcacgatctctgctcactgcaagttctggctcccggggtcacggcattctcctgcctcagcctcccgaatagctgggaccacaggcacccgccaccatgcccggctaattttttgtatttttactagagacaggggacctacatatgattgtctccttctgaaggagcttatgcaattgtcatttgggtctcagctttcgtcagaagatacaattaaggtcagataca

SEQ ID NO: 491759 - DNA, 515 bp, Homo sapiens
gactctagaggacccctgctgacgtatatgttgggggattaaagaagacaccgaaaacatcacctaagagattattttgaacagtatggaaaaattgacagtgattagaaatcatgactgaccgagccattggcaagaaaaggggctttgcattggtagcctttgacgaccataactccgtgcataagattgtcattcagagataccatactgtgaatggccacaactgtgaagttagaaaagccctgtcaaagcaagagatggctagtgcttcatccagccaaagaggtcgaagtggttctggacacttaggtggtggtcgtgacggtggttccggtgggaatgacaacttcggtcgtgaagcaaacttcagtggtcgtggtggctttggtggcagccgaggagttggagaatatggtggcagtggggatggctatcatggatttggtaatgatggaagcaattttggaggtggtggaagctacaatgatatggggaataacaacaaatagtca

SEQ ID NO: 491760 - DNA, 410 bp, Homo sapiens
tgagatggagtctcgctctgtcgccaggctggagtgcagtggcgcaatctgggctcactgcaacctccgcctcctggggtcaagcgattctcctgcctcagcctcccgagtagctgggactacaggcgcctgccaccatgcctggctaatttttgtatttttagtagagacgaggtttcaccatgttggccagggtggtctcgatctcctgacctcatgatccacccacctctgcctcccaaagtgcacagattacaggcgtgagccactgagcccggccacaaatcaatgaggtgactttcactacaattttcctcccagaggtttgcctgggatttggttcttagaataataggaataatagttataccccagttggcttctgctgtgtaataaagctccccccagct

SEQ ID NO: 491761 - DNA, 350 bp, Homo sapiens
agctgttagatcctggggtggccacgtcacttgtgtttatttgttctgtaaatgctgcgttcctaatttagtaaaataaaagaatagacactaaaatcatgttgatctataattacacctatgggatcaataagcatgtcagactgattaatgtctactgtaaaaatttggtagtaaattttcatttgatattagatataaatatctgaatataaataattttaatatactagtcatgatgtgtgttgtattttaaaaattatctgcaaccttaattcagctgaagtactttatatttcaaaagaatgaataacattgataataaaatcgctactttaaggggttaaaaa

SEQ ID NO: 491762 - DNA, 1012 bp, Homo sapiens
gcgtgaggctgtggacatttcggaatgtgggtttgttttttttaaaccgggcaatatgtgttcagttcaagctgtgaaggacaaatatatatcacgggttgtgccaataaaataccaggactacctgaaaaaaaaaaacaaaaaaggacaaaaaaacacacaagaaccaaaaaaaaattggtgtgggcgggcccggggccccagaaaagcttcacaaaacacaatggtgggggcgcgggggcccccaaggtctagacaaccagcggggacaggaggggcccccaggagaaccgggacaaaacaaagggcgagggacttaaccacaataataaaaagccggaggaaaccaccacagtatcgagagaacaaaatacagcagtgatattacagggagcacacaaagggggatactaaccaagaagggaagcaacagacgagagccacgataataaaaaattaggcccccagactgtagggataccacacaacacaacaccacacacaacgagacaaactgaagcaacatcgaacaaagaacaaagtagaaaaaagaacaaggaagcgaccaagagcaaggagaagacgcagggacagaaccgatcagcgagacacgaaaggaggactcatcagcaagcagaaacagaagagtacaagagaagaacgcgaacgagaaacaggacagcaagcagagtagagagcgagaaagaacgaggacaaagcgaacgagagaagcgcagatgaaaacaagcgagaagcgacagggagagagcctaggaaagaagtagtaagagaccgaagatatcacagcagtaagcgaagaggagacaacgagaagagacaccgagaacagaagcaggaagacgaggagagaagagcacagagagcgaacagaacacacagatgagagccagagagcaaaacagagagacaatgagagaacaggaatatagagaagaacagaagagaaacacagactagaatagacagaaacagcaaacaacgagagaaggag

SEQ ID NO: 491763 - DNA, 93 bp, Homo sapiens
gctgaggacactgccatatattattgtacgagagattgtaccttgtcctggccacagatggtaggcaactggttcgactcctggggccaagga

SEQ ID NO: 491764 - DNA, 428 bp, Homo sapiens
cacatgaagagtatatccgtgggggtatatatactcaggaagggattacttctagatctgtgaggaatcgccagcagggtcttccacaagggtggaactaatttacatgcccaccaacagagtaaaagcattccttttgctcctcacgctcgccggcatctgttgtttcttgactttttaataatcgccattctgactgggtaagatggtatctcattgtggtttggggttgcatttctctaatgatcagtgatgtggagctttttgtcagtgttgtgggctgcatgaatgtcttcttttgagaagtgtctgtgtcacgtcctttgcctatttttaatgtggttgttttcttgtaaatttgtttaggtcccttgcagactctggatatcagacctttgtcagttggatagattgcaaaaattttctcc

SEQ ID NO: 491765 - DNA, 579 bp, Homo sapiens
ggtctagctgttcagaggtcaccgactgacagctgatatccaagtcatcgattacatgcatgtgattctaacacgtagccatatttcaaagccttcaactatgactcaattaccaagccgcagttttgtgtcagtgcccaaaggaggtaggttgatggtgcttaacaaacatgaagtatggtgtaataggaataatatttatccaaaagatttttaaaaatagggctgtgtttaaaaaaaaaaacaaaacaagaaaagcagcagtgattatagagaggtcacactctaagtggggtcgcggcgtgaccacgcttcacggtcacgctcgtccgtcctgcagtggcgtgtttacatggtcacacgtgtgtgtatcaccagtgggtcaactgcttgtcattcctcccgtggcagttggtgtagacaatcttactgagcaaaaggcaatgaaaagtcttggttcccacactgcgatatattggaattttcacctcagtttatgaagtttatttcgaaatccatagtcatctaagaatgaatacctgtctgccatgtatctcactcttagtgagcaaaattgtg

SEQ ID NO: 491766 - DNA, 152 bp, Homo sapiens
caggtcagacggggtggttctggtgcgtagtcgggcgaggccctgatcggcattgcgggtcggatcgaagagatcacgaccctgatgagcgaaatccgcgcctcgactcaggaacaggcggtgggtctggccgaggtcaacaccgccgtgaa

SEQ ID NO: 491767 - DNA, 234 bp, Homo sapiens
taccttactgtatctgctctgtgttcagtgtctcttcctcagcttcaattagcttggactacaggtgctcgccaccacactcggctaattttttatattttcagtagacacggtgtttcaccatgctggtcaggctggtctcgaactcccgacctcgtgatccatccgccttggcctcccaaagtgctgggattgcgggcgtgagccaccacgcccggcctgtagcctgaattt

SEQ ID NO: 491768 - DNA, 1034 bp, Homo sapiens
  misc_feature (1034)..(1034): n is a, c, g, or t
ggagtatgctatgattcagaagttgcaagttgcgtcttcaggttggatgggtgagaatagtaatgtgggctgtgagtcgatgcttgagaatcgggacggactgaacctctggtgaaggatgttgtatagtaatttcgataaggtgtttgtgatcaggtgtatcggaattgagctggaggatgatttcattcatgcagctgaggatgtaagagagcggggggagacggaaagttactgatggtcagtacggtgtaaactctagagccagggttaggtacagcttgtatatttcctatgcatgctgccggggattaggattcggtcggtttcagtctgattgagtgtatcatgggaagagtcagaacaaatgtggttgcaatgcttgtcgggatactgtatatgagatcatcattttctgggtggcaagtatacacgctaacagagtggtttcatgatgtgagtgtatagcgtatctcatgcttctgatcttcctatcaacttacagggctcccctgataatgatggagttgacattggattcataggcgattggaggggattttcgtcaggtaatacgatacagaaggtttttcctggtgttacctctatcttatggattttggttctcaccttttggtaaaacccagtgggctgtatgaagattgtggttgacacaaggttgtttggaagtacctgggcgaaagtttgacttctgaattttggcgagcgcgataccaagcatcggtgggggcactggacaccggacgagaccggggcgggatctgaggagaaacgagagaccgggcaatagggcgaacccggggaatgacgccggccggcatcccgcgcaccacagtcccaatgcgtccccaagaaggggtccagccataaaagacgcccgcgcgaagacaatcacctcacaagcccggagttaggcaaaacgtcacaaccgcaactttctaacgagagccctacaaccattgttcccagcaaagttctagaaccacactggagaccgtactcccactctcacn

SEQ ID NO: 491769 - DNA, 233 bp, Homo sapiens
gacgacagggcgactctttgcagcgatcatgctctcctcgaactgggcgtaagctgtcaatacacctgtgtgaagtcccgcacggtcatcactgtccggatgtgtctcctcgtacacgtcccgagccttctcgaactggccgctgcggatgtagtaagtcgcgcgagagaaacaccatgagcttgcccagcctggtcccgtgaagctgggtgagggccccgcggattgactgg

SEQ ID NO: 491770 - DNA, 103 bp, Homo sapiens
ccccaagcatgtaatacatgactcagactcccaatgtagctgggactacagattgcccaccaccatgcctggctaagtattatatgtagttttatgtagagat

SEQ ID NO: 491771 - DNA, 114 bp, Homo sapiens
ggataccttgtgtattatagtgaggagtacgtagtattgagtatgctaggcagaatagtaatgaggatgtaagtccgtgggctgatatatgaagaatgtaattgctgccggtgt

SEQ ID NO: 491772 - DNA, 187 bp, Homo sapiens
  misc_feature (173)..(173): n is a, c, g, or t
aattaaaatgaaattttttgcaaacccggcaaatagagccaaggaaggccagggagagtttcatgcattaaatccatgaagcaagaactatcaataaagattcggcaaaattcccaatcttcacagaggccattgcaaccttaaacacacacaaaaacttgtggaggacattnttcagcaactgcct

SEQ ID NO: 491773 - DNA, 327 bp, Homo sapiens
cgagatcatgctactgcactccagcctgggtggcagagcaagactctgtctcagacaaataaacaaacatgaaaacacaaccctagcccttgataggctaatcttatttagagttccgaaaatatgattggtcactataatcataggggctcaaaattttttcattaattattatgccctaagtaccaatgccagatacccaactacactttatcatggaaactctatacaaataaaaaaaaaagtctgtactaagtgttgctaggaaatttttaactttataaagcttataaataaactttactaacttctggttacagaaaaaaa

SEQ ID NO: 491774 - DNA, 452 bp, Homo sapiens
  misc_feature (20)..(20): n is a, c, g, or t
  misc_feature (110)..(110): n is a, c, g, or t
  misc_feature (178)..(178): n is a, c, g, or t
  misc_feature (244)..(244): n is a, c, g, or t
  misc_feature (251)..(251): n is a, c, g, or t
  misc_feature (266)..(266): n is a, c, g, or t
  misc_feature (324)..(324): n is a, c, g, or t
  misc_feature (332)..(332): n is a, c, g, or t
  misc_feature (343)..(343): n is a, c, g, or t
  misc_feature (414)..(414): n is a, c, g, or t
tggaaaaacaggccaggganaagtgcgtgcccaacttaggcagatgttcccccagtggcccaaaagccctggggtatagttttttcccccccaaggaaaaaccccttttntgggacatggggtggagggcaggacctaaaggcccccagggaaggcccccttccggggctgttccccnaggaggaaaggaaggggctttgtgtgccccccaggaggaaaaggcccttagttctgggatcaaacnccccttnacgtgtatccccccncaaaagcaagctccccaaggtcccctttcagtccccttccctacaccctggccggccnctgccgcncacccccccanagcacgcccccccccatgggagtgtgctcaggagttgcgggcagggtggacatttgtcccaaagggggcanaatttcccataaagggctgagcccttaaaaaaaaaaaa

SEQ ID NO: 491775 - DNA, 718 bp, Homo sapiens
  misc_feature (718)..(718): n is a, c, g, or t
gtcccgtgtggggcgtggtgaagagtgtggcctaggaaccccagccccgctgtactgcctggtggctgcagcctgtggagtgactcggtgctgctagctgaacccagctctgggggacctggcgtggtggctgggcagcacagatacagctgtatgatgcgccttctgtccctgcctgatggagcccccctatgcatgcctgtgccctgctggcattggagtgcctacatgatgtgaggagctgccaatgtggtgcctgcgtgcttgctgcatactgccactggtgaatgccatgtgactgcagtgtagaccttggcactggtgctgtagggtgactaccgtggcctgtggttgctggccacccaatggcctacacccatgggtgcttgattcaccagcttgagcctgtcgccgcagccctgagtccgtttccgcctgcttgccacgtgacaggtgcagctgatgtggccttccacctcttgcccggccccttccttgtatcggttggctgtacccagcgcatgtgtcctgcctctacccacctagcttgcggcctgttgaagctacaccaggaaagctgcatgcccaactgcgaactgggtagtccagactggcgggtgcaaccctgccggttacaacgtagttctggtgtgagctacgatagcaagcctggtgtggttgacctggatcttcaccaaggcataatggatgctgctcn

SEQ ID NO: 491776 - DNA, 326 bp, Homo sapiens
tccagaggcccagtgggtcatctcccaaggtgggtgtggaccctagcctcaggggccttgctggtgctgtcacctcccacctgttccattccgaggtgggtggatcatgaagtccggagatcaagaccatcctggctaacatggtgaaaccccgtctctactaaaaatacaaaaaaaattagccgggcatggtggcgggcccctgtagtcccagctacaggctgtggcaggagaatggcgtgaacctgggaggcggagcttgcagtgagccgagatcgcaccactgcactccagcccgggcgactgagcaagattctgtctcaaaa

SEQ ID NO: 491777 - DNA, 160 bp, Homo sapiens
gaccagctttaaattagcgacggatgataggttgttttctttatattcagtattatattacacatacatttcctgcagttactagtttttataataacttgtgtagctgcacaacatataacttaacagcttactaaacactgcattttaacacttattt

SEQ ID NO: 491778 - DNA, 666 bp, Homo sapiens
tcgacccacgcgtccgtttttttgtttatttttacgcaaacagggaaaaaattatttttattgatccaactatttgaatacaattttcaccccatggctattctcggtctggaagaggtttggggaaatattccttgtttggtgaatggatggtccagcagctcaaagagtgaaattattcctcgcgagggccaaaaagtctctgaggaacctaattcacggatatcacgggcgaggccgtcttatcacctttacgtcgcaacagatacaagacgcgagcagaaaaagatcataacatagcgcgaaaagccacccgaggagaggcagtggacacatatagcggtgctccacagaggggataacgtgggaaggagaactccgagacaaaaatagcggaccgtgggagaacaggacattctgtagagtacatcgtgacacactcttaccacacgcgagagtgcctcaactcgtgtcacaggggagagccacaaaaacgaaagagagggggggagccccagagagccacagcacaacatgtgacgggacccagaggggcgggaggggcacacaaagcggctgcgttatccaagagaggagatagagggtatcaacatctgtgggtatcaacacacgcggctccactacaccgacgcgatgtgacacaca

SEQ ID NO: 491779 - DNA, 118 bp, Homo sapiens
  misc_feature (41)..(41): n is a, c, g, or t
tagagttcactcgtacgagcgcctcgtacagtactccgtancgagcgccgtgagcttttaatgtttaagtcatattaaactcttaggtcaaattaagcagacccggcgtcgttacgga

SEQ ID NO: 491780 - DNA, 194 bp, Homo sapiens
  misc_feature (76)..(76): n is a, c, g, or t
gaaagagtctttctccgaaaatcatggtaaagaatactgagacattgaaaaaaattcaacaaaatatgcttctgangacctgtacctttatggtttgcttcacatcagtagttctgctgaacgggctgtcataatgagggattccaagattttttcctgattaggactggtgaccagttattcaattatggttt

SEQ ID NO: 491781 - DNA, 136 bp, Homo sapiens
tatttggccgtcacttcttctgttggtaccgtcatttatttcttcccaactgaaagcactttacattccgaaaaacttcatcgtgcacacagaattgctggatcagactctcggtccattgtccaatattccccac

SEQ ID NO: 491782 - DNA, 145 bp, Homo sapiens
cccgttaaaaaaaagggccgggttggcggggttgggttcttgggtggggcccttcccttcccgttcctcccccccccggggacgcgcacggcttcccaggcaccgcccggcggcggcggcggcggcggcgaggcgcggcggccgc

SEQ ID NO: 491783 - DNA, 225 bp, Homo sapiens
  misc_feature (213)..(213): n is a, c, g, or t
cccagcagccccgcactccgatcctgctgatccgcgacaaaccgcaaccgcgcggccgaacgcggacggccggctcatctggagtcaccgctggccccccagcccaccgcccgtcactggttccaagctggctactcgacatctaggagcccgaagcatggcctcgcgcgcggagaaccagacagcgccgggagaagttcctgcgctcagtanacctgcggtcgc

SEQ ID NO: 491784 - DNA, 153 bp, Homo sapiens
aagatcccccagtttcagccctgcttattagtgagaaagactggcaaggtttcctagagctttacttacagaacagccctgaggcctgtgactatgggttttgaagggggcaggagtcagcaataaagctatgtttgattttttccttcccta

SEQ ID NO: 491785 - DNA, 307 bp, Homo sapiens
ccctctacatatttaccactaccacaatggggctcattcacccaccgacacttacaacatataaccctcattcacaccagaaatcaccctcttgtcttacatttatgtatgacatgaggcaaattcacatgacctctttgtgtctttggccctagcagaaacaatattccttaacaatgcttagttggtgttgtgtagacgaattaaaataattggaaggctggcacttggcatatgcaatgaagtgtgtcatgtaattccctaataacaacaacagaattggtatgtgacctactgttgagttaca

SEQ ID NO: 491786 - DNA, 169 bp, Homo sapiens
tatcagctcggtcctctcttctcccagattctccccaaagggccaggagttggcacacccctgtaatcccagcactttaggaggccaaggtgggcagatctctgaggttgggagttcgagaccagcctggccaacatagtgaaaccctgtctctactaaaaatacaaaa

SEQ ID NO: 491787 - DNA, 516 bp, Homo sapiens
actaactgacttgggggaaggaaaatatccagctccagttggctctagccttccatgtggggaagggaaatacaccactgtagtcccctttagcaattctgtccatcataagagggagaaacaactgaaaaaaaactgctgaagtttaccgtgcagggttataggcttaccaaaagactgagacctaatcataggactacagaatgcttccactccctgacaccttaccaccacattacttaaggcttatttactgtagttccttttactcaacacatcatagtcacctttcaacaaaaaaattacaagacatatttgtaaaggcaaaaaaaaaagtgattttcagtttgaagagaataagcatcataaccagagtcaaatatggtaagaatattgtgattattaaaccaggaattaaaaacaaacagaactatttttatatgataaaggctttacggaaaagtagacaacatgcaggaacaaatggataatgtaagcagagagatggaaatttta

SEQ ID NO: 491788 - DNA, 430 bp, Homo sapiens
ccgggcttccaggaaatttgccacgagtgccgagcaaggtcgtgtagaaaggggagttaggtggtacggccatttcttccgccttccgtgtctgcggccctcgcagaactttccagcagcgacatgttgggccagagtatccggaggttcacgacctccgtggtccgtcgcagccactatgaggagggtccggggaagaatttgccattttcagtggaaaacaagtggcggttgctggctatgatgaccgtgtactttggatctgggtttgccgcacctttctttatagtaagacaccagctacttaaaaaataaggatatttaattcatccctttaacagaatgaagaaagtttaagagatgatctgaaaattggattaaactcttgaactcttatactagaaaaaattgtaaataaactaatgacata

SEQ ID NO: 491789 - DNA, 86 bp, Homo sapiens
agcgggcgttctacgtaacggacggcggaggctacgtgaagagaggcgcggcgtgactgagctacggttctggctgcgtcctagag

SEQ ID NO: 491790 - DNA, 395 bp, Homo sapiens
  misc_feature (336)..(336): n is a, c, g, or t
gaccgggccgtgcccctggcagtgatgacgcgcaaccgcaaggcggagctgcggctgtgcaacaagttggtggcactgctgcccacgctggaggagccccaggagcgctttgagtttgcccacatggccttagcactcagcatcaccctgcccgaccggttgaacgagcgcgtggcataccaccggatggccgccatgcaacaccgactgggccatggcgagctggcagagcacctttacctcaaggccatgtagatctgcaactcgccgctggagttagacgaggagaccctctccgacgtgaaggtgtacctggtgctcggtgacagcatcttntacgacctgaaggacccgattgatgcacccagaaaaaaacaaaataacgttggcgcccg

SEQ ID NO: 491791 - DNA, 1335 bp, Homo sapiens
gcaccaatatggcggatgacgccggtgcagcgggggggcccgggggccctggtggccctgggatggggaaccgggggtgtcttccgcgggaggttatcggcagctgtgacttcctggtggccgtgtggtctgcgtggctgtggactggggtccggggccgaggccgtcggagctctgcggaggcatgggctcgaggataaggagtggatgcccgtcaggcaagttagggccgcttggtcaaggacatgtagacgatcaagtccctggaggagatctatctcttctccctgcctattacggaatcaggagatcatggatttcttcctggtgggccatctctcaaggatgacggttttgagagattcatgctcagtgcatgagaggcatgacccgtgtccggtgctagggctacccgaggttcaacggcagttttgtatgcctactcggtgggcacgtaacacagtggcgctacgatcggatctggggtgcttaagtgcatcctagaaggtagcggtgagccgaccgggccattccaggtgggggccatctatccttggtctcaagacttctctcatctgttcccccagatggcggcaagagaggcattaactggcggggaaccaagaatcggggcaaggcccccaccactggttcccttttgtctcagggttgaccagtgcccgctggcatgactcctaggtgccttgtgtacgcccatcaattcggcttgtggccccaagggggccaccttgggcaatacggtctaccacgggaccttggtgcctaaagacaagcgtgcatccatggagttgggagtggggtaattccgagtagagcgtggggtataagcctttaatgccccgcgggggagcttgatgagcttggtgtgctaccccctgtgtgggggggacaactatatcgcacaggagtgccaacacctttttggatgttgcccacgaattctataaagagagacaccttacagagggtattccctgtgatatcactcgcgaagcctcggagtgaggagagcagagaagcggagggaggtggttttcaccaacaagcagttaccgcccccaactacacagagagggcggcgaccatgtgagagccacgcacaacgtcggtttgtaagaaaagccagccaacacaacgagaaggactacttgctgcgacgcaggagagagcaagagcaggcccccacagcacgcgggggagagacccaacacaggagcggacggggtatcaagacagaaaaacaaaaggggaagcaacagcgccgggaggacagcagcgacaagaaagcaaagccggcgcggccgaccatcttgg

SEQ ID NO: 491792 - DNA, 444 bp, Homo sapiens
atgatgtcctggcctcatgccccccaatcctagaaccagagaggacaatgatcttgcattcccaggttcccaggaaggtcttggcctggttctacagccccagcccaaaatcctattgcaagagcatctcgtgtgaccaagatcactaaaccagatgggatagtggcggcgcgccggactgtggtgaacagtgagcgccggaacaagagactacagtaacccgataggaagcagatagcagtcctaggggtgatccagacatcacaagacctccagccctggatgatgccttttccatcctggacttatacctggaacgtaggttccggacccgatagcctatgataaccctcagaggccttcaagtcctttccacctctcacccattgcccaccattaataagcttagcttctcttgccagctcaggggctaggatatgtgga

SEQ ID NO: 491793 - DNA, 356 bp, Homo sapiens
  misc_feature (241)..(241): n is a, c, g, or t
gattttcctggcccaacacaattgggcaagaaaacaagatgaaagataacccggttggaaaataagaattaaaactctttatttgcaaatgatatgatcttctggatagaaaattctaaagaactcacttaaaaactattagagctaataaatgatttcaacaaggttgcaggatacaagatcagtatacaaaatcaattgtattttagtataccagcaatgggcaatctaaaattaaaanaggccaggtgtggtggcctatacatgcctgtacttcccaaaatttaggaggctgagacaggtgggttgcctgagcccaggaattcaagaccagcctgggcaacatggctagatcc

SEQ ID NO: 491794 - DNA, 208 bp, Homo sapiens
aaagcagagagagtgcgagacgcagcagagtcagacgagacgtcgctgacagtcctctgtgtccaggtggtctctcagaatccattgaccatgcagctggacaaatagactggggtggaacttgctgtgtttatatttaatctcttaccgtatatgcgtagtatttgagttgcgaataaatgttccatttttgtttctaaaaaaaaaa

SEQ ID NO: 491795 - DNA, 132 bp, Homo sapiens
tccagagctaagttagtactgtttaagttactattgagtggattttcttcattttctgtttagtccagtgttgccaaggtaagctggggaatggagtataccaacttctttcagagcattttaggacattat

SEQ ID NO: 491796 - DNA, 200 bp, Homo sapiens
caccgctgcgtactaaaaaatgagtataaaggtatatgttcacatgtatttatttatttattggagggttgtgctttgtccactaggctggagtgcagtggcatgatcatggctcactgcaacctctacctcctgggcccaagcaatcctcccacctcagcctcctgagtagttgaagtccttgccacgactatgtcctg

SEQ ID NO: 491797 - DNA, 227 bp, Homo sapiens
ttgggggccggcccgcaacctaaggcaggaagatagtggccgcaaagaaaacgaaaagagtcgcgtggatatcaatcaactctaggctccaactcgttcatgaaaagtgggaagtacgtccgtgggttacaagcagactctgaagatgatcagacaaggcaaagcgaaattggtcattctcgctaacaactgcccagctttgcaggaattctgaaatagagtactat

SEQ ID NO: 491798 - DNA, 1086 bp, Homo sapiens
  misc_feature (950)..(952): n is a, c, g, or t
gtaagacgaatggctaactagaataaccaatgcagagaagtccttaaaggacctgatggagtgtgaaaaccaagggcatgagaactacgtgaccaatgcacaagcctcagtagccggatttgatcacctggaaggacagggtctcatgtgatggaagactcacatgacactgaacactgcacgtgacgaccgacgaccgtttacgacgaccacaacacgacatacaaccaagaaacccaaacaaaggcctccaatgacatgtactgggacctacttgtgacaacaggacccagaatctacgtgcttctggactgtgggtgtacccttgaaacaggtgactggggggaagacctgggacactcaacgttgtggaacgcccactcttgcagggtattcatccaggagaacttccccaaatttagcaaggcaggcaacattcaactttcacggaacctacagacaaatgctacaaagatactcctcaagaagttgcacttccaagacacataatgtgtcagattcaccaaagttgcaattgacggcaccacattgtttaagggccagccagagcaggacaggtcgggttaccccaccaagggagcccatcaggataacagacgatctccttggagaaaactcttccaagcagaagaagagttggggccaatattcacacttttaagacaagcatttctaccagaattctatccgcgcaacataggttctacacgtaagggcgacaacactccttgtcaggaagccacggtgtgcagcattgggtccaccacggggcccaaaaaaagccttcgggacacactctgggggagaccagctccctcgctagcactagctttattacatctgcggaggattatagactcgcgactccttgggagaaacctattctggtagacggcagcaccattttatcaacagatagcagtagtagnnncccctgtcactcctctcttctatctactgctccacaatcacccagcacatagacagcccggcacctcacgcactatacataacacagaccagccgaccgcgagctacagagtcagcgtagagcacacacccgtt

SEQ ID NO: 491799 - DNA, 194 bp, Homo sapiens
gcttgagtgtccccagtgtgcctaagatcaagaagtactagtcgcatactgacatccctgcctatcctggtgagccgcggattcctgagcctttggtacccatgtgcagcgggatgagaagcttcagccgtaggacaggagcaggcactattggggctgcagagctgctcactctgagtgaatatcttgaggaa

SEQ ID NO: 491800 - DNA, 181 bp, Homo sapiens
gtgaacattcgtgtacatgggcgttggatcagcagtttgatttctctattataaatatagaccacatactccaagcaccaggaatttacattgggagaactacctatggcaggtctcggcgtcgggattactatgacagaggatatgatccggggtatgatgatcgggacacgaatgttca

SEQ ID NO: 491801 - DNA, 166 bp, Homo sapiens
  misc_feature (9)..(9): n is a, c, g, or t
  misc_feature (58)..(58): n is a, c, g, or t
  misc_feature (120)..(120): n is a, c, g, or t
  misc_feature (162)..(162): n is a, c, g, or t
atcagcttnatgaccatcacctgggacaatctgaaaggcaagaagtcctgccatacgnatctggcagaaccgctggctggaacatccccatggcctgctctacaataagatcaaccactncagatttgatgaatttttcagtgaaggttgtgccccttggtntaag

SEQ ID NO: 491802 - DNA, 628 bp, Homo sapiens
acctgtaggaatccaagatcacaccattgggctccactctgtatgtgagatcgtgaccctgtctctcaaaatcctaatagactcgtctactggtggaatcctatcttcatgcgctccaacaaacataggttcatggctcaaagagatgacgttgactgtgagctccgtgtttcaagagtgtgttaggagaccaccatgcgcgagctctattcctgtgtgaaagcctttagtagatgatcataattcactttgtagtaccttttatcgtggagtgtgcaggagaaggccatatttcaccaggtggacctagtggatccatttctgcggtacgcgcttgaagcctaaggagaattgtcaagtgacatgaatactaagcacggcagttttactcacatactaggcagatcatttcagtatctccatgcaaagcaaacattgtgtatgtagagctatatttaatgggttttgggagaaaattaggacagctatgtattttattacattttagaattctatacaaagtgaactgcataaatgctttgatgatgcttcagaaaccaaagtactttgcatgctcaaatagtgtcttatgtaagttgaaataaaatcgttactcaggtatagcttc

SEQ ID NO: 491803 - DNA, 91 bp, Homo sapiens
tggcaggtctaggcggaagggagtggagaatggggcctggttcctgcctgcagtgaggggaacagatgggacaataaagactggagaactc

SEQ ID NO: 491804 - DNA, 223 bp, Homo sapiens
atggcagtggtggggcacgagggcaggtggtggggttccctcaaagcactccattgacattcctgactgccttcatgtggcttctcatgtgggaatgagaagatgaagtgaactacacttgttcatacatggcgttcactgcgagacttgtgcgcgtatctccatcatggtcgtgagttgcatgcattttcccgtctaggtttaggaattagagggagaatat

SEQ ID NO: 491805 - DNA, 316 bp, Homo sapiens
tgctgtagggcaagggttcgcgatgtaccgtatcatttcagatcggaactcacgtcgttctaagggcatgctacgtggaatctgtgaaaatcagctgtgccactggcatgggcgactggcagcggttgggggaggcccaacattggacaggtccacggcgaaaaacggtggagcaggcaactgaagggcggggcagggcccagggggcccgcccaatccggagaggccgggacttggcctggaaaagaaagcgagaacaacaggcgcaagtgggcaacgaaagacggcgaaaggggggccacagaaaagggaaacc

SEQ ID NO: 491806 - DNA, 364 bp, Homo sapiens
  misc_feature (6)..(6): n is a, c, g, or t
  misc_feature (68)..(68): n is a, c, g, or t
  misc_feature (95)..(95): n is a, c, g, or t
  misc_feature (104)..(104): n is a, c, g, or t
  misc_feature (140)..(140): n is a, c, g, or t
  misc_feature (177)..(177): n is a, c, g, or t
  misc_feature (181)..(181): n is a, c, g, or t
  misc_feature (187)..(187): n is a, c, g, or t
  misc_feature (191)..(191): n is a, c, g, or t
  misc_feature (193)..(193): n is a, c, g, or t
  misc_feature (205)..(205): n is a, c, g, or t
  misc_feature (215)..(215): n is a, c, g, or t
  misc_feature (262)..(262): n is a, c, g, or t
  misc_feature (278)..(278): n is a, c, g, or t
  misc_feature (281)..(281): n is a, c, g, or t
  misc_feature (313)..(313): n is a, c, g, or t
gctgtngagaatgagttttctgtccaggggcttgatggtgaaggggtccagcacgcggatgttgtatnttttctttcttcagcagttcggcagcngccaaggcntcgtgcagggtcaccccagccccgataagggtcacntggtcatcgttgctcttcaggattattttggtttgtncganttggangtcntnattgttgttatngttgatggtnttttctgggggggtggtcgggatgaagcagataccctttgtattggnggctagttccactgcnttntttgtagcaacgccatcacttgggtaaaaganagttgatgtggggattgatcgaaacatagccagattttctagggccatccc

SEQ ID NO: 491807 - DNA, 173 bp, Homo sapiens
ctggaccggcacgaggctgcggcgggacaagaaccagcagcggtgcatgactccctctgcagcgatcaccccctccaaaaccttccctatctgtgggtgtgactttggacaaaatcaggcacatggcagatggcagttggatggggtttatatcctttgtctgtttttttgag

SEQ ID NO: 491808 - DNA, 1484 bp, Homo sapiens
  misc_feature (730)..(730): n is a, c, g, or t
  misc_feature (830)..(830): n is a, c, g, or t
  misc_feature (871)..(871): n is a, c, g, or t
  misc_feature (905)..(905): n is a, c, g, or t
  misc_feature (912)..(912): n is a, c, g, or t
cggtgcctgacagtgtacattcgtgctacgtagtgtagtagtagtagtagtagtagtagtagtagtagtagtagtagtagtagtagtagtagtagtagtagtagtagtagtagtagtagtagtagtagtagtagtagtagtagtagtagctacagtatcacgacgagtctgactatcacgctcatactcactatatacctactcgtcgtagttcttccatctatctctactacgattgacaattgctactctatagatctcgttgagctaactatactgctgaatactatgtcctctcagcactactatgactctgccactatacttactcgttcaattgtcgcaatgactatatctacacatactctagctgattgatgagttattactctgactaatctctcatacactctgtctaacgcatgtatatacctgattactactatctcgatacgctacatacatcctgctctctctactacttttgtagtctagatctcccactgcaattacgtctactctgcatcaattctatatatctctatctacttatctcactgctatcttgtctgaaagttcatatcttgattcaattgcttatatgacttactgattgtcttctaattgtatctgactcatctatatttcacattgtacttctgtaattcacattgacatttgtctcctaactacacattcatctaccttcatgtgtatgacacacgtcctnctaatcaaccttctctactcacatatatacatcttatgtctacaatgattatcgctaccacatcacgtactcactagtcctcttatcatcttgcaattangtatcaatgtcgtacgtccattcgtctacgctctatacatntcattatgtcctcaataccatcgttaacatcttntggctancactcttcatactcgactagacatctgcccctccctcacaatatctgcgtctctcgcgatctcatctcacgttgtcatctatttctttacttccatacctatagtattaatatactaatcgtctagtctatgacatctcttcctagtctactctctctctctatatctacgtgtgacgtactcatgtccccactcgtgatctagtctctctacaacttatttctttcacacccttgtaataatcatggtgatactcacctttatgaccaatctacccccattctgtctcatcctctcttacgtgcctccttctaaaccactgctttcatcaatcctacgtcaacttcttttgatcgcgtacactctctacattcactatgatctctcctctatgatgtctcctttcatcctcgtctataatctcatcttaacctacttttcgcagttctctcctctactttctcattaatctaccatctctccttccgacctattcatctatccatatgcgttactgtatatccctctactattaatcatcatatctatccatcataacctcatgtccctct

SEQ ID NO: 491809 - DNA, 207 bp, Homo sapiens
atctttctttgagtgaccgtctgtgccggccctgtatgtccgtcacaggtgtctgagctgcactggccccggtgctgtcctcggggggcgcgtagccactcccttcagattccacaggtccatggcctcacttgtgtaacaaactcctaccaagtgtgagcaataaaaaaaaatgtggggtttttttttttattttttttatttttt

SEQ ID NO: 491810 - DNA, 163 bp, Homo sapiens
cgtaccggcaggtctgagactcctggtgtcggtgaaggctgcacatctgtgggcagaatccagatgctgaaatctacaaaatcactgccactgacttttagcctctccagtttgtcctcctccaagataagggctttcagaagagacctgcttgagctccctt

SEQ ID NO: 491811 - DNA, 199 bp, Homo sapiens
gattttttttttctccccctctccccaatgtatttgctatggcccttgctttttaccctccagaggtaagaggtagcagagtctcttgggatgagtgattcacccttttacttggcgaccaatgatgagatcaacaacaggtggacaataaacctattatttatggcagaactaataaaaaatccaaagccttgtaaaa

SEQ ID NO: 491812 - DNA, 141 bp, Homo sapiens
caagaagcacatccctttcccctattatcaacattcacttgcattagtatggtgcatttgtcacaatttttgtgccaatactgatacattattatcaagtaaagtctgtagtttacattagagttcagtcttggtgttgta

SEQ ID NO: 491813 - DNA, 160 bp, Homo sapiens
gagtcaatgaggagcagaaagctctaagtaacatctaggaacatgtatacacttcagcatttaggtcaaatacctaacaagctcttctctaaacacttctaactttagttgggtggcttctggcatagcctttatcagtggtgtcctcattacatgccag

SEQ ID NO: 491814 - DNA, 152 bp, Homo sapiens
caaacacagggaaccccatgactcggccctcacctaggcgtggagctgccttggtttgggctcgaagcagagctggaaagcgggattgttcctttggcccacatgttggtcctgttcccggtaagctctgttgtaaagaggttcacggggca

SEQ ID NO: 491815 - DNA, 273 bp, Homo sapiens
agcaacaccagccacccccaggtctccagctccacaaccctcagccttaagcaacagcagcaccagctcctccctgggtctccagattcacacccctcagattagaacagcacccctcctccctgagtctccagctccatgaccctcaaactacaacagcaacacgggctcctccctgcatctccagctcaacaactctcagacttgagaggcggcaccggcaactccccaaggctccggctccatgaccctcagatttgaataatggtagca

SEQ ID NO: 491816 - DNA, 415 bp, Homo sapiens
ctgtatgctgttcagaggatccctcgagtctgacatgtgtatgggaggaggcaatgtatgctggtgcatgttgaacacgcctcacactggagaccgtacgaaagtacttccctgagacatggatctgggatttggtggtggtcacctcagcaggtgtggctgaggtaggagtaacagtccctgacaccatcagcgagtggcaggcaggggccttctgcctgtctgcagatgctggacttggtatctcttccactgcatctctccgagccttcccgcccttctttgtggcgctcaccaatgccttactctgtgcttcgtggcgacggcttcacactcaaggccacgttccacccgtaccttccacaaatgcatccgggtcagtgtgcagctggaagcatctcccgccttcctatct

SEQ ID NO: 491817 - DNA, 284 bp, Homo sapiens
  misc_feature (18)..(18): n is a, c, g, or t
gttccacatgtgctaggnggccttagaattatgccccggagaccaaaggcacttcttacatgctggtggcaagagaaaatgaagaaacaaaagtggaaacccctgataaacccatcagatctcgtgagacttcaccatcacgagaatagcacgggaaagaccagcccccatgattcagttacctccccctgggtccctcccacaacatgtgggaattctgggagatagatacattaaaagtgtgatatggtttagctgtgcccccacccacatttcaacttgag

SEQ ID NO: 491818 - DNA, 996 bp, Homo sapiens
tcttttctgtcctgtcctctgtgttgtcgtgttttctccgcaatacttgtttttttgtttccggaccccctgtgtttcttgttctctcctctcggctctttgtctcccccctcgccccttgttttgctgactgggtgcgctagaaccttgccccctgcgttgggggccctttcctttgtgcacctttgcgcccgttgccggtgttcccaccttaggagtcagcttcttagttgcttagtcttcctattgtcgcgccctcggccctgccttgtcgtcagttttgtcatttgagtgcctgcgcttcctctcctagagaggccaggcatggtcgccgatttccccctcctcacttgcgccgtgttattccccgagttgacccgcatcgtttttgttggtctaccagcacggtacggagtctctattcgaccactcctcggcataggccggccgcccgttcttctatgtttactctccctacccttatgtggtacttcaagttctcgaccactcgcactctctctctgggatggggctatccactctcctcccccaccctgcctgttagatgaacactcctactctttccgacttccaacgcgtagtatggctcaccgatctactcggtgtacaaggataggctagagcaataggttataggctcattttgctacgaagactgctgctcctggctttatctcgtatttcgtctcgccttctgcatcctctccgcctccttccaagtcccaccccccccccccgcccctctccccccttcttttgcgatcccgcgtttctctctcggcacgcccgcgctggggtgctggttgtgcagatgtcagtttcacccttctttctggctggactccagtccgacatcctcggctcactcacaccctcgcctaaccggaaaacagccattatcagaaaataaaaattaaaaaaataaaaatagatcagaccactcgcgataatagaactagtaatagatttagatca

SEQ ID NO: 491819 - DNA, 379 bp, Homo sapiens
  misc_feature (241)..(241): n is a, c, g, or t
  misc_feature (276)..(276): n is a, c, g, or t
  misc_feature (289)..(289): n is a, c, g, or t
  misc_feature (311)..(311): n is a, c, g, or t
  misc_feature (358)..(358): n is a, c, g, or t
  misc_feature (374)..(374): n is a, c, g, or t
tgtgcagtgagctgagatcgcgccactgcactccagcctgggtgacagagcgagactccatctcaaaaaaaaaaaaaaaaagaaaccatgcctgcctaatttttgtatttttagtagagatggggtttcaccatggtggccaggctggtttcaaactcctgacctcaggtgatccgccagcctcagcctcccaaagtgtcgggattacagctgtgagccaccgtgccctgcctcttccttnactttttgaaagacactgttggccagatatttganttcttgggttgantgttttttgttttttgtttttnaggaccgttttctgggcttctgtttggcactccagccggggggttgnacaggaggcggagganttcca

SEQ ID NO: 491820 - DNA, 138 bp, Homo sapiens
catacgccaccgcacccagcctgcccagctaattttcaaaaattttttgtagataccgggtcacactttgttgacctggctgatcttgaactcctgacctcaagtgatcttcccagagtgctgagattacaggcatgc

SEQ ID NO: 491821 - DNA, 1023 bp, Homo sapiens
ggtgacggcccgtttgcagccgccggagttactgcaagggcaaaagcctggagtggactgtgtcttttgaaactggctgctctttcacttctcaggcgtcaccgagagctcagcacccaggctgaactctgtaccattttggcacgactgggagctgatgcatctgtggacatgtttgccaaagtcctggagcatcagctgcttcagcactaccaaactgggtggcaagaacatttggcattctgaaattcaaaaactgggatcagcatggcatgagcgcatgactgggcaacgccttaacagcaaaagcagactccaggcactaaggaaagctcaacagcagaaacaagaatggctttctaaaggacatggggcactccagagaaatccctagtgcacagcgactttgctcaagaagtcacaggcagagtgacaatgtggttggccatattctacagagacttccacattcaggtgtacacatactagacagacattctggcaatactggtccaagaacaactcgagaccaaattctgcacgctgaatgtggaacaaagcaccttttgcttttgtgagcagactgcattttcaaagttcatgccgaaactagcactggtaacaacgcatggggacaacacaagagtcatgtgtgggttacttaactaggacataccgatgattcaacacgaaacttacactggaggactcgcatctctgacatccttattaccggggactttactggagccacaatttcagacccacaggtattggggacaaccttcaaagcatgaacgcaccttcggggcacccattatccaacctgcggagatagcccaacaactgtggacggcgtgtccccgtagaccaacgggtaaaaactagcgacacggggccacaacaatactgagtaatcagtgccccacgttgtggggcaacatgagaccatactggcggacatcgactactaaaactgtaacgtcactaccctctcccttggtacttgtctggtgtctttgc

SEQ ID NO: 491822 - DNA, 929 bp, Homo sapiens
atgtgtgttgaaagaagcgaaaaggaagaaggagaggaggtgaaacagaagcacgcgtgagaacgagaaatgaactgctccacttttgcgcgcaagtggttctaaatcgagtggctttctttgttgttcgtttctctagcatattgctgcgccgttgagattgtcccgtgcttaagttgatcataatcacgcgttggcgcaatcttcgtggttatttcgtgtgtgtatgattggccatgcatgtcgtctagcgcatctataatgcaggtctgccacgcttgtgggctaatgtagtcataccagtggtttgatgcgtgtccccgaagctcggtgggcattcatgtcgcgtgatgtccgcgctcgattatcttgatgcatgccgaggtgcgccctgtatcccgacggacgtccggtcatatttgtgcccatagctgcaggcactcgaagtagtttcccccctcagatgaccctggccccgcgcgtactctccttagggggtccgtcccccccagctgactcctgggcggggcagggctccccggaagtttccgtctcgccccgtggctcgccgctcgtgtccacgccgtgctggcagtatcatcctgcatgcgctgtcagcgcccccgccgcctcgttttccaggacggagggactgcgcggccgggccacacaaaggcggatcggtcttacccgcccgacggcgcattgatctaccacaatcgcctcggcgtttgtggctggcacacccccccccagaggagcagcagctccctcccttcgtccccgcgcgttccatgtgtgggggagggtgggggagcgcctccattgcctcccccccccggcaggactaccgctcccgcgccccccagaaagacacaaaaaagaacagacacaacacaaaaaacaaaaaaaacaaacaaacatgacaa

SEQ ID NO: 491823 - DNA, 131 bp, Homo sapiens
atggatgtcgtcagaagatgaagaggaggaggatgtgaaactcttaagtatatctggaaaggcggtctgcccctggacggtggtagcaaggttccacagaaaaaagtaaaacttgctgctgatgaagatga

SEQ ID NO: 491824 - DNA, 876 bp, Homo sapiens
ccattcactcatttcttatatttgggaaacacttcatgtgagcgccgtgctgctgtgctgggttattgatgcttggcttgatggtgaaagattctctccttaaccaaactctaatcaggctcctctgaactctcttctcgaatgtaggtccgtgacctttgggacttccttgttttatctctgtattgtctaattttaccaatgaatcctgtcgagtcagtttaatgttaatcctcgatatctgatcgacccgtacactacgctgaccaggttccattatcctaccatacatcctcctgggtgatgtctgacacgaacctggacctgccttcaggcaagaacccagtgtaggattaacctctttcactcctattgttctcttactaaagtaatttttcacccaatgaccacgcttccgcaccaacttagggtatacattcccatcttcttactttgcgtatcttcatagttgagcccaatctctcttccctattgaatatatcccgattgcgagtggtccctacggctatcatgatggtcctgatagaagtctgccttatcatcttacacgtggtgtcatgaactccttgcgtctttacatggtgagtatgcaagttgcactaagacaactcccatgggtatgagtctgactatctggcgattgatgctatgttgagagctctgcggtcccttcctgtatggtactttcgtcacctgtagcagaaacaggggtaacactagcctgcaaattctctccaatacacgcgacagacaaacaaacgatttttggcgcgccttgaccctcgagaacttcaaaactgtggttggactcgggtcccccaggccatgtcagcgggtccaaggtggcccaaggag

SEQ ID NO: 491825 - DNA, 225 bp, Homo sapiens
  misc_feature (74)..(74): n is a, c, g, or t
ccccccccccccccccccgggggggggggggggggggggggggggacccccccctttttttaaaacccccttanaagggcccccaaaagggggggtttttttccccccccctttttttttttttcccccccaaaaaaacccccccggggggggtgtggtttccccccccccttttttggttttttttttttttttttttaaaaaaaaggggggggggggggggga

SEQ ID NO: 491826 - DNA, 327 bp, Homo sapiens
cggaagcacactgcaacaggacatacattttctcacatgcaaaaacaaatcaaggccaggcgtggcagctcacgcctgtaatcccagcactttgggaggccaaggcgggtgaatcgcttgaacctgggaggcggaggttgcagtgagctgagatggcaccattgcactccagcctgggtgacaaagcgagattgcgtctgtaaaaaaaaaaaaggaaaggaaaggaaaggaaaggaaggaaattgcctttgtggatggacaattccctggaaggcatataaaaaactgggttaactctgccctttttgaggtggcagggggcttccg

SEQ ID NO: 491827 - DNA, 341 bp, Homo sapiens
ccccccagttcccctttagaacagcatggggcacgcttatgcctgtggaattccccattccccacctgcctgcctcggggcgcagcgttaaggtccccctggaggtagcagttctttcagggccctcccttgaggacagggtaggccttttcctgtctgccttttttttgcttgggcttttcaaggcactgggctgggctgctgtttacctgtccccctgcaaggattcaaaaaaaaaagcaaagtgagggccctccctgccatcctgtggaagcccccatcatttttggcccaagcttttgtagtagctccctaaaataatcccctatcttttgctccta

SEQ ID NO: 491828 - DNA, 103 bp, Homo sapiens
  misc_feature (2)..(2): n is a, c, g, or t
tntgtacgacggacctccgacactgacacgtacgacggacggggtcttaccgtcggggctacttttgcccctgacacacgtgggtccgtgtggccctctactg

SEQ ID NO: 491829 - DNA, 834 bp, Homo sapiens
ggtagaagcgctggtaggccttggagaggcgggttaggaaagacgcagggcccctcgggctaccttcgatcgtcgcgaattcacgagcacgtccttccgaggtgaaggaacgcgaaactccacccatccgatgctgtacggctgcgggcgggtcctttggtcgggcgtgacccgtgggtgagcggaccggagccgaagactcgagagtggtacgcacgtgctgcgacggactctggaaccatgaacgatatttgatcgaaagatcaactttgatgcgctttgcaaaattttctcgatataaaccccgtcaaccgcagcagcgacctgaaggaaggtctcatgcaagttatgccctattgtatgtttgtggcggctgcaggggcctatgtccatattggtcactcatgttcattcaggctggcctgctgtctgccttggtgctccctgcatattgatgatttggcctgatggcaacagcctcatagtccatgtaacactgaacagaaaagactggacttctagctggatttgcattccttacaggagttggcctgggccctgccctggagtttgtgtatcgctgtcaaccccagcatccttcccactggtttcatgggcacgggtgatgatctttagctggctgcaccctcagtgcactctatgccaggtgccgtaagctacctcttttctgggaggtatcttgatgtcagcctgagcttgttgctttgtcttccctggggaatgtttctttggatcatttggttttcaggcagactgttgtggacctggggtaggtgtggggtccgcctttgactcatcatttgaagccgattg

SEQ ID NO: 491830 - DNA, 105 bp, Homo sapiens
  misc_feature (1)..(1): n is a, c, g, or t
ntctgagaatgagtgtgaggcggctatggtataatacgcctcacactcattctcaactcccttcccctactcatcgcactaatttacactcacaacacgcctagg

SEQ ID NO: 491831 - DNA, 548 bp, Homo sapiens
  misc_feature (77)..(77): n is a, c, g, or t
caggcagatcacgaggtcaagagatggagactatcctggccaacatggttaaaccccttctctactaaaagtacaanaattagccaggcatggtggcacacgcctgtagtcccagctacccaggaagctgaggcaggagaatcgcttgaacccaggagacagaggctgcagtgagccaagatcacgccactgcactccagcctggcaacagagcgagactccttctcaaaataaaaaaaaaataataatctttggctgggcacgatggctcacgtctgtcccagcactctgggaagccaaggaaggaggattgcttgagcccagggtgtcaaagttgcagtgatctatgaccttgccactgtactccaatctgggtgatagagcaagaccttgtcttgaaaacaagataaaacaagataaaacctttccctcatcaaccatttgcccaggaaagaagacaattacttggggttttgtttcctttgtttaccagttttcagaatgagttggtactatattaaacaccaaagaattttaaacataaaaaa

SEQ ID NO: 491832 - DNA, 1128 bp, Homo sapiens
ggcaacctttccaatggtgagtggttgtgtgatcgccatctgagggaaaagatgttcgtcgtacgtggcgcacctggacgcggtgcgaatccctcgtttcaaggatggtccatatcttgcaagcatgtgctgcactgatggatcctccggggaccgtccgaaggcaagcatcctcgcagtggcctcaccgtggctctagctcgccgacagtcctcgtcaagacttgtgctagttgcagccgcctgtgcatagtagtagcacgttggtgagcttgtggcgtccttgcgaaggtattaatgcaactgtggtggcatttgtgttgggggtcttaatgttgttggatctttacaggagcagctggcttgctggcttcctctctaggattatatgccgaaattagaccagataatgcattggtgcgagctccctggagaggtagcacaggggctctatataagcgggatgttcacgagtgccactatctgtgtaaagacggcaatgggtgctctcggttgggctctagggcttcaacgggtattggggccatccggaactctatcggcttcgagtctcagctacccaattggccatgggcgagcatacctagaacgggaaaggtcactgggtcgactatcgaatgggacaccgctgctctggcaagagggtgcatataggtattaagcgtaatcacttgcgtgtccggacggaagaggaaggatatcaatatacttcctcctagggacaggtaggaggcatttccagtcctaatgtggcctaagtcgtctttgggtccgaattgtttggaaagaacccttgtgtgcgtgcgtacgattaaaaggcccgtggtccattcccctcattggatagagccttggtggttgaggggtagctaaacggtaaatttttccacaaacaaggctacgggtcgagggctcttcttgggccaacacacagttggtgtcggagggcgccgcattggccacgttttcatcgaaggggagtctgtcctccaaagttgtaaggcaaaggcgcgcccttcattctttgcaattactacaaaccagggtgggatttgctcaccttttcctgggtcctcgaggaacaagaataagccattaacaacccatg

SEQ ID NO: 491833 - DNA, 702 bp, Homo sapiens
caagagactagctagtagagctgtttaaattggacgagggcgaggcagcgttcccgggactcgctgctcaagttgtctattgctccgcacatcatcctagcagggcccgtcgcccacaggcggacaaaagcggtccgtgaacaccatgcggcgctcggcgtgccgccaggctctgctggtgagcgccgcaccccgcgccaggtcccgcgagcccgccttgcggcacctcgccctgtcccagtctactccaggccccgtccgccccgggggcgccgcccacgggcctcgctcgggccgttgcctgtctgcacccagaccctgagccgcgccgccggccatggaggtggcgcctgtgagcagccgcgctggatgggcgcacccggccgtgctgaatgcgcaagcaccccgatcaaccacccggggctggcgcacaaactaatggaacccggcagttgttggctccagacggagggtggaccgtcttcttcaatcacctcgacttcgcagggaaacccccatattatggccaaccccggtcacggcgcgggcgcgcagtatcctacaggccccgggcaagcccggcttgaccggaggaccatatgttccggccacattttgttgcacagccgggttttgcctgttgggcggggaaaaggagcctttttgcggtggggccacacaatccgggagcggagcctttca

SEQ ID NO: 491834 - DNA, 1093 bp, Homo sapiens
ggatttacgggatcggaagtgctgggaggccgcctgggagcccgttcggttgcgggtgtctctggccctgcggtcagaccctgggaactgtccctggagagctagattcctagagtgcccgattccgctagccctggaacagacaaatgccagcgctcccgcactttccccgacttaggatcctgatgccggcagagtcctggggcccccgtagcggggctggaccatgagacctgctggacggactcgacttcctcgacacgctgggctccgatgcagtccagcaatggacaggatgaaaaagcatccacgaaggaagagccagaatgagaagtaccggcttgaagtacatgcgtgctgatgcaaaagtggtacaggtggccatcggatggtatggaaaaagtgcgtgctataggtgtgactgagaattgatcgaacgttgaagggaagggtttgcttgagaggcacgaagcaagacaggaagggtagcttgacgtaaaggaaagctcggatagcagacatatccagaggagaccaaacagcatgaacagggaagaaaggaacaccaaggggcgctgaacggcgaccctgtttcgccagcaacgagtgcacagcgacgggaccccaccgtgaacaacataagtgcgtgggtggcccacagcacttcctagctgaggaaagcacaatagaaaaagagggcacgcatggggtgccgaacaaaccagacagacacacagagcaaacatgagggaagaactgacagaagcaacaccgccacacacgcgggcagacgaacaccgaccaccaacaccgcgcgaacagaacaccgcggcaacaccgacgggcacacacaacagacaggcgcgaaacacaaaacaggggcagcagttacatccaaagcgaagacagccaaatcacgacgaccagaaacggagagcaggatggaaacgaagaaaggcaaggggaccgggacaaaaaccgcagaaagagagcagcaaggcgcgccgggaggacacccaccaaagcaggcgacggcaccgagagaagaccacacacgagagaagaaggcgaagacaaaaaccgaccaagaaga

SEQ ID NO: 491835 - DNA, 218 bp, Homo sapiens
ggcgggggcggtgggagctgacaaagctgtccagtcccataggaagctgctcctccagtgaggagcaagctgcacgcatgggtcactgctcctccttcgaggactcctgcgagatgccctgctcttgctccttctacagtgtttgtgggtctggcccttggtttccttcctggagttgtggtggttttccgggtcttggcagcacccttgtttttgct

SEQ ID NO: 491836 - DNA, 538 bp, Homo sapiens
  misc_feature (5)..(5): n is a, c, g, or t
  misc_feature (61)..(61): n is a, c, g, or t
  misc_feature (70)..(70): n is a, c, g, or t
  misc_feature (100)..(100): n is a, c, g, or t
  misc_feature (115)..(115): n is a, c, g, or t
  misc_feature (118)..(118): n is a, c, g, or t
  misc_feature (123)..(123): n is a, c, g, or t
  misc_feature (133)..(133): n is a, c, g, or t
  misc_feature (136)..(136): n is a, c, g, or t
  misc_feature (158)..(158): n is a, c, g, or t
  misc_feature (218)..(218): n is a, c, g, or t
  misc_feature (225)..(225): n is a, c, g, or t
  misc_feature (516)..(516): n is a, c, g, or t
aggtntgtggggaagtgcacgataaaccgttgtgtttgctttttggttaaagaagagaaantttgtgatngatatgccggctgcgataagtgaaagtggnaaagaagaggagctngantggcnttgatctggngtnttggcatctgctctgccatttnatatgcgcagtttatttgggttatgctaccgtgaccagcagaacacctgttagtaaaaanaaatgtnagggaggaaaaagtatgaacaacagggagctccagaggcggctgcatgcgggcgctgggctcagtagaagcagagggtgtgcagagaggtgcggccactgtgctgctcgaactcctgcggcggcgcgtggatctggttctccatgttttccgtgtgcgggatacactggcagagctcacagatgagagaggcccccggggtggcctcctcgtggttgtgctggatgtgcacattgaccacgtgcacgggctggcaggtcttctgtgctctgggatgcagatcttccaccanctggtcatacactctctcttcg

SEQ ID NO: 491837 - DNA, 621 bp, Homo sapiens
agcggagcagcctgcaagctgggagcttgcatgggtgaatgccgcagaaactgaggactagacattttcataatggtggctccatcttcccttctctgccagccacgctgtatcctaaggagcagaccagatggggctgataactgaaaagcccatttgcataagattagggtaaggtgaccacgccttgccccatgtgccatgtaaatgtcatacctaattgaaccaatctgtgagccctacataaatcagacaccacctcctcatgccagactaaaacaatcggtgcattccctgccagctggtgtttgtttcttctccatcctttccgcatggtcttttctgcttggagaacccttcctctatggaggaagctgttcctctttctcttctcttctacctattaaacctcatgctcctaaattccagcctgtgtctgtgtcctaaattttcttggcatgcgacaacgaacccctggcattattcaaaggcttctggactgaatcccagcctccgacagtgcagtccaggtgtaggtgaaaggatctccaggcgtatcctgtcacaaaactttcctttcttttctatccatggtcagttatgtctccgtatgcgtctccg

SEQ ID NO: 491838 - DNA, 277 bp, Homo sapiens
cgcactagaggatcccctctggcacacaggcttggagaccatgtctgttggtactgtctacatctctcaatggggaatccattctgtgttcacaggctcatagctcgctgtcagtgaccaagtcagtcgcttcctcgtccttacttgaatgctgagaactgtgatgaaaatggcattgtggtagtgcggtggacaagaaaagaagtgtgccgtagtgtctatgtgaagatatttgcgatcctccaagagcgactgagagggggtatggagctcgaat

SEQ ID NO: 491839 - DNA, 103 bp, Homo sapiens
  misc_feature (92)..(92): n is a, c, g, or t
  misc_feature (94)..(94): n is a, c, g, or t
ctgctgtcccccgagctgctctacgcgctggcgcggatggggcacggggacgagatcgttcttgcggacttgaacgttcccggtgccttccnantccatcgta

SEQ ID NO: 491840 - DNA, 120 bp, Homo sapiens
gcggggttatcacaaggaatagtgttgtctaagccacagggggaagctgcctgtgagtatttccaaaaaaattctgtaattcaaacccaaaatgtctgcggaatcgaccagttcgatact

SEQ ID NO: 491841 - DNA, 150 bp, Homo sapiens
aatgcctgccatcgctgcctctgccggcttagctttgaccagagaggcgaggtttctgttacccgacagaatatggcgctgctcgttgccctctcgcctgctctcctctgatagccggtcgtcgaaggttctgctgcgtacctgctcggc

SEQ ID NO: 491842 - DNA, 372 bp, Homo sapiens
cagagcgtcatggacgttgggtctcagaaggggggacgaatagcatggcccttagtgatcgtcaggccgtccaaagcgggatgggaactacaccagtaggtgtgcgggggatgttccagcacacagatgcagatcctcagcttccataatggcatgaaccagtcggtcataataactctctttccataggacctaggggattctgtttctcaggagaaccccgggttacatcacacttaaggaaagtaaattgacggagttccaaggcagctaagataatatggaggtggaatagtaaagaatggaaggtcagaatgctgatccatgacaattaacccaggagcaaaatttaaattactccttgggccagag

SEQ ID NO: 491843 - DNA, 184 bp, Homo sapiens
cggtacttgatcgggacaatcctggcgatcaaaatcatatcagtatcttctcagaccacaattgaataaaacaaatccataacaagaggaacttagaaactatacaaatacatggaaattaaacaacatgcacctgagtgaccactggatcaatgaaaaaagaagagataaatttcttgaaaca

SEQ ID NO: 491844 - DNA, 794 bp, Homo sapiens
gccacacctctacatgtctaaaacaaaaaacaacaacaacagataccccactcgccactatgcccaaaccctctggatgctgaaaaaaaaaaaagtgtatgcaaggctattatttaaaaatggtgtaaaaatggctattcctttttccctggtaaaatattggcagtttataggttatttacaaaatgtaagcttgggtacaaggctggacctttctatagcggtgctggcattgggtaaatggaaaaaaaatgggggcaaacgttgggagtcctttccttgtaattggccagcatcagcttaaaaactccggtatgttacattatcggtaccatttaaatctcttcaactttcttggtaccttctgggctggtatggcttcctctttaaaccttttaatattggtcatttcatatttaacatttctggggtatataatggtaaaaccacaatttttggaattaaaattttaggttcctggcaggcttggatttacaatagagggacttttactgggcaccttggcattctcttccaagatgctttgtacctcagaggggaccggtcagacacaaagttaaattaccttaagaaacaagagcaggccaagtggccctaattacattattaccatttggagtgtcctactccattacactatgggtaccagtaccattttggggggttccacgacaagtttaaaagtccaccgtggtttcctcaagattgtgttaacattaaaacccaacagtgccagttcctggacatggtacaacaacaccgacacacatcaa

SEQ ID NO: 491845 - DNA, 328 bp, Homo sapiens
  misc_feature (313)..(313): n is a, c, g, or t
ggactaattaactaaagaggttttgtacagcaaaagaaactgtcaacagagtaaacagacctacagaatgggagaaaatattcacaaactatgcacccaacaaagctctaatatccagaatctataagaaacttaaaccattgaacaaccaaaaaacaaacaaccccattaaaagtggacaaaagtcatgaactgacacttctcaaaaaaaagacatacaagcagccaacaagcatataaaaaatgcttgatatcattaattatcagatgaatgcaaatcaaaaccacccaagtctttttcttctgtctaggntaatttattttaggg

SEQ ID NO: 491846 - DNA, 107 bp, Homo sapiens
  misc_feature (77)..(77): n is a, c, g, or t
gctaaagtggctctcccaaacctgcctttgttctaactcagttgtctgtgaatctcaatataggtaccgttaggccnttgtggatattggaggcccgttcgcggacg

SEQ ID NO: 491847 - DNA, 673 bp, Homo sapiens
  misc_feature (409)..(410): n is a, c, g, or t
  misc_feature (421)..(421): n is a, c, g, or t
  misc_feature (426)..(426): n is a, c, g, or t
ggctgcctgaccccgcatacacgtgggctgaaaagaggttaaccgctgcatcgcgacgcgcccgtggccagatctcctggtggtgatccagtgtccagatcttcttgttccgcttcttcatggttttgcggtggctcagggcaatgatgttgagctcgggcttgtgtcgccattcctgtgtcccgcaggcactccagccggctctgcatcatgaacctcgcggccttccgctgctcacgggcccggatcaggtgctcttccgctcctccttgctccagtagcggcccatcttcattctgctcaccgcgtcgtcgtcggtcgtcattcacctgcgctctcccggatcttcagggcacgggctttcagcagccgatctcgcacggccgcttggccacgtagcgggttccgnnctgcgcaccgnacgtnccactccatgccggtgcttcagtgccgcggccagccacccacgcccacccgagggccaaccaggccaagctcaggggccgtggcccagctcctccaggcatcgcgtcgggccactgcacgcagctgtggtagtgctcagccctcactggccctgccgcggtggcgccgcgagaggtaagggctgctttacagggcccacacgctccaggtcaaccccgtcttgggtttcgcgccgcgctcctccgcg

SEQ ID NO: 491848 - DNA, 163 bp, Homo sapiens
  misc_feature (1)..(1): n is a, c, g, or t
  misc_feature (5)..(5): n is a, c, g, or t
  misc_feature (107)..(107): n is a, c, g, or t
  misc_feature (135)..(135): n is a, c, g, or t
  misc_feature (158)..(158): n is a, c, g, or t
ngganataataccaaccagaaattggcatttataaacctattaagagactttaagcatgcttcaagaggcagttgacccactcgaattcctataaggctggtacccntcccagagttacagaatcttaggtgccnctctctagtctgtgagggagganctcca

SEQ ID NO: 491849 - DNA, 977 bp, Homo sapiens
  misc_feature (973)..(973): n is a, c, g, or t
tggcaaacggatgatttaatgaggggtgaaaagcactccgcaggtgcgggcagcggcgggctgcggtcggggcccagcaccggtgggagcggggccttctctggcctcgcgcgcgggggacgcggccctttcccctccggggggacgcgcaggaggcaccgcggccccggtttggaacaaacgcgtttactgcaggcaagggcggcgggcgccggggccggtctcaccagggcgaaaaaggggtcttgaccgtcctccttggaaaagtctcgcacaggcagttgaagcagcagcaggcgattcgcccaggaatcttgggggggcaccagcgttgcgcatgaaccagctttggcgccaggcgcgcggcccgcggtctgtctgttgccaggggggttggccgccgccaggttcgggcccgcgtgttcttcagagaattcgcgaaggtgtttgatgaaggaactcgccgtgaaagcgccgcggtgtttgtccccgttctcgcgcgcgttgtgtatgcccccagggtttcttcccagggcctcgcgcgcctcaggggctcaaggttagcgcgccttggcgtcttcagccttcgcgcgccagattttccttcttcgttccagcggagagaccccggtgccagagagaacgtgtgcggtggaagagactctgtggcctcgaaactctattctctgcgggagaattgtttgtggggcccaccgcgtgtgaaaaagcctggtttaaaaagccccccgcgggtattccaacacgcccccctgggtggaacaccccaccgtggttagggcggccccacggagaatatgtcggggagggggccccccacacgcttgtggagaaaacgcggaaggacactttcgagaccccaaaaccccacacggcgcgggccgcgagttccccattttcattccggagggcgcgcccccgggcaacaaaaagacttctttgggggcaatccccnaatg

SEQ ID NO: 491850 - DNA, 731 bp, Homo sapiens
gcattggacctttcgcccggcgcgcgtgtgcctggcgctttttccaagcagctgggacacagacgcccaacgccatactaagatcatcgtgggacgtggttagagaccgggttcaaccgcgttaggtcaaccttatctggacctgcggacctcaggtgatgagccggacttggcctccaaaagttctgtgattacaggtggtagccaacgtgcctggcctcattaagattgttaatcatcgaatggaaccttaatagttttcagcagtgatgtctatatcaaggcctggtagactgacaggaagccttcattccccacagggatcttaccaagtgtggaaaaatgggatatgggaagcaatcaagataacagtggatttcaaagtgtggttcctggacccagcattattagttataccctggcacttgctagaaaggcgaatcatggtccagcacgtgactcacacctataatacctgcacttttaggaggcacaggtgggaggactttttgtgcacagggttccaagaccagtttgggcaacactagaaaaaccccaatctttggaacatatctaaccttagctggcattgttggaccaatgcctgtcggtcccagcttattctcggaggttgtacgcgaggacaattggccgatatccagcgcacctgagggctcgactggcgacaatgatagcatcccaccttacttcgcctcgggccatcatatgcg

SEQ ID NO: 491851 - DNA, 973 bp, Homo sapiens
ggcaagagccggcgccggaggagacgcgcgcagactgagttggtcttctccgcacgattgttacagaggtctccagaaggcttctctctcctgtgcacaaattgggcaacctcttaaggaaacaacctcatttgcccgcagatgccggaagaagaggcaaaagtgtgcaatacaataagatcactgtagcgggtgtaggacccagtaggtatggcgtgtgctatcagcattctgtggaacagtctctggaactgagtgaagcttggtcttgatggagtgtattggaagtataacgcttaatatggacgaaagtgactggagtctgacagacatggtgaggcttatatatcttcagacaccgtaaaagttgtggacagagtaatgacttattgctgtgatgcgccaagttctaatgatagtggttggctaaactgcgagtgaggtgccgttcagcaagaaggggaaagttgcggatcacatctgagttgacagagagtaacattgtatacatggtctttcaagattggattatgcctcagatcgtgaggtacagtcgtgattggatcataattgtggtgaccaactcagtggacattcttaacgtatgttacctgggaaagtaagtggattagccaagcagcgcgtgattggaagtggatgtaatctggatctgctagatttcggtacttatggtgaaaagatggattcatcgcagtagatgcatggatggatcaggggggaacatgggagtcaagtgtgggatgaggtggagcgggtgaattgtggcaagtgttactgtacagcgcattggattcagagattgggaaactgagatgctagtggagagtgggaaggaagtgttaagaatgaggtagaaagtggtatgaagtattaggctcacaggatacaatgggtatggaaaatggggggagataaggagagagatgaaaaaacacagattacgcagggtcaa

SEQ ID NO: 491852 - DNA, 277 bp, Homo sapiens
tagccttatctcccaaaatgctgggattacaggagtgagccaccatgcccggctggcagttgcatggaagagaacacctctttatggcttaccctctagaatttctaatttctgtgttctgttgaaatattggttcgtgttagcctttatgtgaaacaaaccataaagtcgagtatagaaacatatcttccggtattctgttgtcgaatgcaggatgatgtggcagcagtgtgctatatatcattcagataatcgttctattttgtaatcaacattc

SEQ ID NO: 491853 - DNA, 591 bp, Homo sapiens
ggggtttcatcaactcctccacttcttttcttttaacgttcagacagctttattttatcaccagagtttacataatacacagtttccatcagaccagcccccgagtccccaagaagtcacccacataaaataataataaataacagacttatataaatacagctgtctgagcaggaatcgggtgtctcaggaaccttgagcgcattccacagggcaggacaactgaggtgcgtcccccgcgcaggtgcacagtggaaggaccaggactgctcatatgcagtggcagtctttggctaacaagtcatcataggtctggaggacacccgggtggtctttgaatgagcacatggatttagctgcggcacgagaggcgtgcacgtgtcggcttcagcgtcaggtgtttgattgggtgatgttgcgccgaactgctggcagcccgatgcacatgtcacttgcactccgtgcgcacacccaatcgcccagcccaggtcttccaggacgcgcggaccgtgtgcagacggcagcaacgcccgggcccgagcggacagtggtccccgttgcggcatctctgcggcccccctgctgcggacc

SEQ ID NO: 491854 - DNA, 246 bp, Homo sapiens
  misc_feature (20)..(20): n is a, c, g, or t
  misc_feature (68)..(68): n is a, c, g, or t
ggcccccgtgtcgggcttcnggcggtgccggctcgtcttgctctgcgcgtgcctgtttgccgcccggncctggctcgggcccgcgccgctgcccctggtcccttgcccctcccgtggcgacagcacccaatcgcccagcccaggtcttccaggacgcgcggaccgtgtgcagacggcagcaacgcccgggcccgagcggacagtggtccccgttgcggcatctctgcggcccccctgctgcggacc

SEQ ID NO: 491855 - DNA, 226 bp, Homo sapiens
aggaagtaatgactccacgagcagtatcaataccaaaagaacagaggagtgacatccaagagcagcaaagtcttgaacattctcagacttgtctccagacaagatggctgcctggacagctgcaccacaacgtcctggtggtgctgcttcagaacaggtaataaccaaaatgataaacaccagaaataggaagccaaacatgtaataccaccaggacagcagcacc

SEQ ID NO: 491856 - DNA, 904 bp, Homo sapiens
  misc_feature (63)..(63): n is a, c, g, or t
  misc_feature (73)..(73): n is a, c, g, or t
  misc_feature (79)..(79): n is a, c, g, or t
  misc_feature (82)..(82): n is a, c, g, or t
  misc_feature (107)..(107): n is a, c, g, or t
  misc_feature (109)..(109): n is a, c, g, or t
  misc_feature (121)..(121): n is a, c, g, or t
  misc_feature (138)..(138): n is a, c, g, or t
  misc_feature (145)..(145): n is a, c, g, or t
  misc_feature (148)..(148): n is a, c, g, or t
  misc_feature (159)..(160): n is a, c, g, or t
  misc_feature (170)..(170): n is a, c, g, or t
  misc_feature (173)..(173): n is a, c, g, or t
  misc_feature (193)..(193): n is a, c, g, or t
  misc_feature (195)..(195): n is a, c, g, or t
  misc_feature (231)..(231): n is a, c, g, or t
  misc_feature (233)..(233): n is a, c, g, or t
  misc_feature (238)..(238): n is a, c, g, or t
  misc_feature (241)..(241): n is a, c, g, or t
  misc_feature (248)..(248): n is a, c, g, or t
  misc_feature (272)..(272): n is a, c, g, or t
  misc_feature (279)..(279): n is a, c, g, or t
  misc_feature (301)..(301): n is a, c, g, or t
  misc_feature (311)..(311): n is a, c, g, or t
  misc_feature (314)..(314): n is a, c, g, or t
  misc_feature (322)..(322): n is a, c, g, or t
  misc_feature (325)..(325): n is a, c, g, or t
  misc_feature (338)..(338): n is a, c, g, or t
  misc_feature (343)..(343): n is a, c, g, or t
  misc_feature (345)..(345): n is a, c, g, or t
  misc_feature (348)..(348): n is a, c, g, or t
  misc_feature (354)..(356): n is a, c, g, or t
  misc_feature (358)..(359): n is a, c, g, or t
  misc_feature (361)..(361): n is a, c, g, or t
  misc_feature (364)..(364): n is a, c, g, or t
  misc_feature (366)..(366): n is a, c, g, or t
  misc_feature (372)..(373): n is a, c, g, or t
  misc_feature (377)..(377): n is a, c, g, or t
  misc_feature (382)..(382): n is a, c, g, or t
  misc_feature (391)..(391): n is a, c, g, or t
  misc_feature (398)..(398): n is a, c, g, or t
  misc_feature (417)..(417): n is a, c, g, or t
  misc_feature (432)..(432): n is a, c, g, or t
  misc_feature (443)..(443): n is a, c, g, or t
  misc_feature (813)..(813): n is a, c, g, or t
  misc_feature (844)..(844): n is a, c, g, or t
  misc_feature (895)..(895): n is a, c, g, or t
cggcttcggcgcggaggggcggcggccggggaggcggcggcggcggcaggattcccaggagcnatgttgtcanaaatcntantggtgtctgctccggggaaaaacancnttcaaggagaanataccgtggtaaatggnaaagtancantggctgtatcnntgaacttganaanattcctccggcttcaacccnanagcaatgggaaaatgagacctcagcttacccaaaantngtatnaanacgggcntgaggatgtggccaggcttcagtnactgganaaaagctttctggagcaaggtnatgtcacaanaancacctcanagnaagtggaaaaaanaaaanangtngcaggnnngnntnaanantgtacnntcancgaangcctggctntgctggnctttctttacttatacctntccatctgccggaanaaaggtagacnaaggagaatttggagctaattaacaagtgggccttccaaggggagagaatgattcacgggaaccctccggagtggacaatgctgtcagcacctggggaggagccctccgataccatcaagggaagatttcatccttaaagaggtcgccagctctccagatcctgctgaccaacaccaaagtccctcgcaataccagggcccttgtggctggcgtcagaaacaggctgctcaagttcccagagatcgtggcccccctcctgacctcaatagatgccatctccctggagtgtgagcgcgtgctgggagagatgggggaagcccagccccggagcagtacctcgtgctggaagagctcattgacatgaaccancaccatctgaatgccctcggcgtgggccacnctctctggaccagctctgccaggtgaccagggccgcggacttcacagcaanctgactggc

SEQ ID NO: 491857 - DNA, 260 bp, Homo sapiens
gggggtttggttttttcccccgttttgtgggggcccctttgaggtttgccgggggcccttaaaccggattttttttttccccttgggcccgcccccggttttttttaaatttgcccccccctttttttttttttgggtggtccgggggttccccctttgggggggggggggcttttttttccccgtgtttggggggtgtttctcccccgttagggttggccccccccctggttttaggccccccttttttttccccccca

SEQ ID NO: 491858 - DNA, 375 bp, Homo sapiens
gtttgagaccagcctggccaacatggcgagaccccatctctactaaaaatacaaaaattagctgagcatgttgacacacgcccgtaatcccagctactcaggaggctgaggtgggagaatcgcttgaacccaggaggtgcaggttgcagtgagccgagattgcgccactgcactctagcctaagcaatggagcaagaccctatctcaaaaaaaaaaaaagaaaaagaaaaagaaaagaagtagaagctcagtggccagggattgggggctcacaccgtgttaattcccagcacttggggaggccgaggcagggtggatcactttgagccgagttccagaccagcctaggcaacattggtgaaacctcgtctctat

SEQ ID NO: 491859 - DNA, 537 bp, Homo sapiens
ggtgtcggtgcgtaaagtaactgacgagatatgtgtcgcgactgactgactaggaagatgtcttcaggaaatgctacagcattgggcacccgtgcccccaagcttcgacacagccgacagctgttcatgaccaaatggtcatgtttaagagatatcagtcgctagtcttgactacgaacggagcactatgtttgtgttcatcttttaccctcttgatttcaccttctgtgttgccccattggagatcatttgcttgcatggagatagtgggcagaacgacattctacaagaaactcaaccatgtccgaacgttgatttggatgcttctagtggattctcacttcttgtcatctacgcatgggtcaatactacctaccgaacgaacgtgccggactgggacccatgaacattcctttggtatcagacccgaagcgcaccattgctcaggataatgggcgtcttacacggcttgatgcccgtgcatctcgctcagtgcgcctttctatcatctgcatgataagcggtattcttacggcc

SEQ ID NO: 491860 - DNA, 286 bp, Homo sapiens
cactttccagagtagaaatatatgaaattgaaacagagcatatttgttcattattttaagcaaaacattacggatatcttaactcttggttactgctctcaggagagcacaaagctgttgaagcctatatacacagaacgtatttttcagtagtgactttaaccattgtatatcatgtcaatgagtgaacctgacaaccccatatttagtatctgcagaaagctgtaatacactctggcttaaacaatcaaccaacaaacatgtatttagtgcctactctggaaag

SEQ ID NO: 491861 - DNA, 942 bp, Homo sapiens
gggacgatggtcctgctgcgtgccgccttcttgctggctgtccgcctgtgttgtgccacctagttgagccgcctgccgcccctgtcctcacgagcatgaggagctgctagtgtggtgaagcggtctctgcccccgcggtggccctcccggtttcctggttgaagctaggcccctgtatccacgcgaagcaatggttttgataatggcccctgggaacaatatggcggggcttgaacagcgtagcatcctcatcctcgcatcctcgatggagaaccatggagctcatccttcgtgggtgccctctctatgggactcaggtacgggacttcaggttccgcggaggcgggttctcatgtgttgcagcatgacccttcgcgcaacgcagtaagcatgcggcagcgatcaactgttcgttgttggaaatgcatccctgcagggagcatagctctcagtctgacagacctagttgttggaactctggagggcctgtcgtgccttggcgagagagtggggactgtgttcttcagactgtgtccattcgacccggatgattcgcgcccagggtgttccggttgagacgcctacagtctgggatcttgcgctgggaaagtggagccatgaagaaggggtattttctcccgcgatctgaggggtcattccaactctcttcttgctcatggcaggtttgggggaggctcaattggagcatagacacctctgcagactattgtggaaaggaacctgcatggtttaccgtgaatgggattgcagggttttgcttgacttagttggcactcacacgtatacacgcgagggagacaatataaccgggggacaacctgtggcagagaaacacagaaaggagagaggtgtccaccacataaggtttacacactatttgactcttacgtgctctccattaaaaaaaacggaacaaacaga

SEQ ID NO: 491862 - DNA, 585 bp, Homo sapiens
actggcggggtgcaccgcgtcatgttcccagcatgcggtggggccagaacatgtccaggggagccaagtgtaattagggcgtggccgccccaaaaataatgggggccattcaaaggcagttgattttcccggcaccaaactggcggcaacagatggggtccgtgcagaaaagaatacgggccccccaataggagacaggggattctgtccgcccacattgttgggggtgcgccgcactgctttccacaaaatggttcaataatgggcccaaccgacacccatttttcgagacaaaaaaccacaaagtttccttgctgttcacaacaagaaacgcggatcactcattgtgtcaacatttcacaaaccagtcgttttgctctcgcagaccacattacagtgaccacccattttcgcggtgattaaatatatagtgcccttctcccaccgccttccattattaagctttttgaaagcaaggccaatgcatacatcttctttttaatgaactcctctctgtaaaacccatgtcgcaatacagggaatttaacgcaagtttgaaaaacaatcccccccaaccccaaaaaa

SEQ ID NO: 491863 - DNA, 367 bp, Homo sapiens
tggtgtgttaagaacttttaaggtctaccctcttcacaaatgtcaattacagtatatgacactattaactacagtcacactgttgtacattagatctccgaacttatttatgttgcataactgaatctttgtacttgaagtttcaacatctctccatttactcctttccctagcccctggtaaccaccattctactctgtaagtttgatattttcagattccatgcagtatttgtctttctatggctgcgttacttcacttagcataatgtcctccacgttcatccatgttgccgcaaatggcaggattttcttcttttttaatgctgaataatatgtcatggtgcaagtgcgtatgtatcacattt

SEQ ID NO: 491864 - DNA, 1315 bp, Homo sapiens
  misc_feature (336)..(336): n is a, c, g, or t
tatcatatctcatcggagttaaatctatgatattcttcccacaacgacttactactgtctatccggaatgccccgacgtcaactcggactaccccgatgctatacaccacatgacaacggtcctattcatctcgtagggcttcatttcattcttctgcttagcagcggtaatcattgattgaattgtgaccatagagtttgatgaatgccttacggcttacgaatgcgaaaacagtccgtaatatgtacgatagagggcctcttcccatgtaagccggggaattggactaatatcgggattgacccctcctaagcctttatcgagcacatatgcgnaaaaaatatcgcgtatataaatcgtgaaaatgctaaaaattcgaacaagatggcaagcgtaatacggtaaagctcatcaaaagactcggctctaacgctagacacaatccacctagtgggacccttcccatcggaactcattttttcctaacataaattcccagacagccatatcagcacgagacaaggaaacaccaattttgtgcttgcggcctcctacatgatagaccaccacttacaagttgctgtgtaaaacgcaacacaaggcatcggacaccagtgataggcaggaaaacagaggttccttgtgtgcctgcccaaagcgccgttaaacgagtacggctttccaaaggacagaacaggcacgcaaccacaatttgaaatccatttctcggggacatctggtggaccatgaaccccgttcagtcagttaacaatgcggtctgggcccccagcattatcaaggacacaacttgtccgccgcagcgaggcgacggccctataccctagcaactctgctccttttggaacagtacaaactttctgtctgccaagacaagaggggtcttcacagcacagctcggcgagcaccttggcccctggtgagcaaactatccaacgtatatacacattatcctttggctgtgagccaccaaatacgcagcataccgatctggacaattgcacccattttatatgatgacagccgcaaaacggacacagttgtgcaccgcacacaacgttcaacaggaacatcagtcattatacgcatgagacagagcaacacccattagagttgacaccatacagtttatattcctcagcctacggacttatccgttgtggacaacttgagcgttgcacaacaacaacccaaccagaactatccgtggaaagaagaccacacaccgataaaccacatattggtcaagatacactacttacaccaaaacaaatatatcaacccaccagcacacag

SEQ ID NO: 491865 - DNA, 211 bp, Homo sapiens
  misc_feature (183)..(183): n is a, c, g, or t
gaagcgaatgatggcacgaaataatcaccaccatcagattcccagagcctgtttctttagggcaggaacatttacccacacactgagttccccacctgtgagggacaggaggagtagagaaatctgggaaggtcggccatactgagaccaggcacaatgaactggaaggaacaccagactganaatcacaacatcatggtagaaccgacta

SEQ ID NO: 491866 - DNA, 118 bp, Homo sapiens
ctgcgcctccaccattgccctccttttccttctccacctgaatacgccatccgcacgtcagcactctgaaacaggctaccggaggaactcgggtggttggggtttggatttggcatcg

SEQ ID NO: 491867 - DNA, 747 bp, Homo sapiens
tacaagagaaacttcttaggtattataaaccatcaatgtaaaggatccacagtggtattgtattccacacttgctagctctcaagatagaaactgggagataatgaaatatatctgtgcagatattaagattgacatacacaaagaaacccatataaagtgtcaaagggcaaataattttgctctagatcacaaaactagttagcacaaggctaggattataaccagggtctaggaaaaaatcctgaaggtgatttaactgagtgttaggccctgtcaagccacctgttaaggctcatggtctttcagcactagcttcaagcattccaaattcaggcaatagcgtacaacggaaagcataattggacggggaatcctgagatcagagtccgtagttcggctttgtctcttgtagcaggattttttaaatcaggggcagctctcttctcccagtcccatgcgcatgaactctttcaaccttagtggtcaccaagcttgtattccattccttatatcaagccttgtcctgtcaattctcccttaaatgttagttgcgttccatttctaaatatttccatggccatcaccctagtaaaaagactattacctcagaccccggacttgatcttcccccaactttaagtgactcagttccttatatcacttgccacaagaattaacaaccatgtccatctttcatttctctgctgaaaagatttccactggttcccactgaataccaaataag

SEQ ID NO: 491868 - DNA, 561 bp, Homo sapiens
ccgtctaagaggacaggagggtctagagagattcagatctgccattaattactaatatccaggtttctcatcaacttagtgaatttacagaggctggaaagcacccacatctgtggtacctgggaatggtaggtaaatgctcgggttatgtggaaaaagctaaggaatatgagtctaggaaacgggtagctctgtcatgaactggtgcaatctggaacaaactattggctggggcctcagataccttatctgtaaaatggaaagcatggaactaacaataaaactaactatggactgagcatatactaagtactaagctcttggttatacactatatgtactttatctaatttaattctctgaggtaggtgatataactttcatttaacagatgaaactgcggctcagagagtgggcaaagtatgttaggcatagtcatggatgggataactattggctaagcatcttctatatatcttatgtcaagaggtaagggtagacatttagctctcatcctcaaggacctcacaacaggagtctcactagaagatggcgcctgag

SEQ ID NO: 491869 - DNA, 247 bp, Homo sapiens
gctagaggtgcagcagcaagaccgaccggctggctgaggtggagctgcgacttcaaggactgcctgtgttgagaaggcacaggaggaggagcggctcagtcggcgcctgccttgacatccacgagaccattgccatgcctgcgggcccaggccccacctgtcatgtatgtcatcaagacagtgtaggtgacattcgtccaagaccaagcaggccctcagctgattcccatgcccggagccagcacct

SEQ ID NO: 491870 - DNA, 734 bp, Homo sapiens
ccggacacggaggcccacttcagcattgaccagccactaaggaggccaagggggaggactgccacgagcccaggacgccgccgctgaccagcgcacccgacgccaccgaccggcacttccagcccgcgcgaccacaccgacacccctccccccaccacgcaccaacagctaccactagcacaaacaccacccacaaaccacgccccatcgcgcccctcacccccccggaccgcagacaagacgcccccgggacgccacgccagaagacgccaaccccaccgctaaacagctgcctcccggacccgtccctcacccggcaacgacagcaaccgcccagccacacaaccgccgcccccaacccaagccggcacgaacacgccgcgcgcggcccccccccacccacccgcaccacctagccacacagaaccccactaagccacccagagacgcccgccaccccgccagcgccgacgacagccgcagcacccaccaccgacacccacgcgcacccacccaccggccgacacccaccccacccaccgccccaggcaccccaccccccctaccaccaccccacaccaacacaaccgcacccccccgtacccacaccccatcgcaccaccccgcgtcaccacaacccacccccacgcacccagacccacgcacacaggcccacaccacatccaactcccccgacccgtccacctactccccactccggcacaccccgcccc

SEQ ID NO: 491871 - DNA, 1159 bp, Homo sapiens
  misc_feature (294)..(294): n is a, c, g, or t
  misc_feature (465)..(465): n is a, c, g, or t
  misc_feature (532)..(532): n is a, c, g, or t
  misc_feature (578)..(578): n is a, c, g, or t
  misc_feature (601)..(601): n is a, c, g, or t
agcggggggtgggctggcggacccataggtgctgaagctactgagtccaagtggtctggcggctgtcaggtggacccataagacgtccccaactctagggtagcattcatccgcagtctctgcgacgtcggcgtgatacgagcagaatggatagttcctgttcacggcagcggtgctcctgctctctggagtgtgagtgcagttgtcagtgcctcgcgcaggtgggtcactgcggggtgccgggggatggccatcgatcctgtcgtcggtccttcgagaggcagcagtgcgtcntcctatccccctgccccgttgtctgagtgtcccagagaaatgcaggcatggccggggccggcatgctaggtgcaagtggcgttgtcgtggggtaccttcatattaagcctggctactcgccaacaagtagacttacgcacgcactctgggtggttcatttgcgagacgatngtcggcaagcgccgagacgataaatctcaagcggcgtgcaagacttcacaagtgagaccgtctaganccagcctcacgtggggagtgcaccctggtgcgctgtcgaaaacatngcagcactatccatggcatcagncaaaggatctagtgccccgcatccttggagcggggagatctacatacgttcgcgtgggttgcaccttggggccttggctactaacactacgataacactctttacttcaggagacaagccaggcgatccatgggaacttatcgttcggacaccaccacgaatcatctgtgtgtgcccgacagagcgtggtgggccaggcaggcgggaaggtggagggtgcaggctgtcatgggtagccgggaaccaattgacccaagaggcgtgcgcatcctggacgccttgaggcgtggtcgggtggccacgaatggggcttgggagtgggaagccctagggttgtgacctagggtgccaggcctggttgtgggaagtggaccgacggtggcacccttggtgtggcgatgttggttcacattggtgtcgcggaatccagtgcgcccacggaggggaaggccgtaaggaccaaacaggcgtggcgcttggccaagggcttccttcccccaaaaaccaaccttggcaattccaaagggtattcccagcattgggagtttaatgaacccg

SEQ ID NO: 491872 - DNA, 1800 bp, Homo sapiens
  misc_feature (722)..(722): n is a, c, g, or t
acttcgagcgcgggcgtgatcatattgttctccccccactcgccgtggggggccgccccgtccgtgtggtggggctgctatagctcggtctgttttgttgtcggccctcgtttgatggccgtcttttgtcagtcacagcgggtggtgtgctgcgcctgctcgctggttgctgtcctttaaggtgctggcgcaccacctgccagcgagggttttggactggtcccgcccgccgacacccgatgcttggtggtctgcccgcatgcttgtttgtttagtccgctccccccccctgtggcccgacttatttgactccccccgctaaatgtatgcctgcccgtaatacggtcgcccccccctcgtgtgttaggtttccgcgggttgctcgtgagtaagtctcgctcccgggtgtgtcctcggttgtagtggttctctcagacgtagacagcgaacgtggttcgtccgcggctagggacggttgtgggttttgccgcccgaatgatttgttggcttgctgtgtcggccgcccacaggcgtgccgtctcgtcatgacgccttggtcccttgtgggggggcaacatcttaccaacgcgtttaatgttgtacatcgttaatagtctgtgcgtacaccacactgggtggcctgcctggggcctagctaaggcactctttggtgtctgaatatatccgacgagcccgcaacgacccgcggtgttttgttgtgngtgctgtggaatgacctcccccctctcgcctccccgcgctggatgagggaggaatgatggtgtgatgtgtatgctccccccccccccacccttctttgctctttaaaatagtagtccccctccagcaccacccctccttcattgtttgttcctcggagaatttctgttctccaccggcggtgtcacaacacccccccttcgtagtaaaggttttataaaataaaaatctttcctctgtatttatctcctcttatgaaccccaacgcggcccttctttccgccgcagaacataatatatttcttctccccccaccatatgagttttgtttacaacacctctatactctatcatctctccccgcgagatgatatcaactagagaggagcaccacacctctttgggagaataaacaaatatagcgctatatgggtttttctgtagagcgcctatatggagatgtatcacacacatgtggggcctcttctctatagcgggctctttatattctccgctcgttgggagagcaacacaccccacatatataatatgtgtaccacagtataggggataatattgagaccggttatagagacacacactccgagggacacattatatgtgttctacaccgcctctccggcggtactcgccacgatatatatgcactgtctgcgcgatatattctgccacacaccgggcggtctacagagagtatatttatataggctcgaaaactccgcgccaccacaactctccaccgcgagagagccacacatcatatgtagaaatggaggtttctcggctgccaacgctggctctctgaggcccctataggagtttcacttctctttctctttttcccaccgctaaggtggccctgaactggcacttgtaattatgcacaaactcactcacctatgagcactcgtaactacaccgagcaccgtatctaacgctctgtatgctcacactttccacactaatgtctctcaatcacaatataggaagctgtatatttgccactacacatataggaggcttcattcactgatttcccctattttcaggctaccccca

SEQ ID NO: 491873 - DNA, 881 bp, Homo sapiens
  misc_feature (83)..(83): n is a, c, g, or t
ggatcgaggtctacccttcactgctctgtgtcctcagcgtgtgtggcttcgtgacctgaagatactgggaaatccatagctanagatgccaggaccccctgaaagcctagacatggtgagagtgctgggtccgacatcacgagagaggggaaggagttgctcggaaccggtgggaagtggctgtggcgggactcaggcctccccgcagtcagctccacaatctgctccctgagttctccttgcccagctcggcctcagtctccttcagccgtaagttggcggctgcgccaacagccggggccccgggcgtcctgtctcttccctgcactgtgactgtgccctgcctggagtcctctctggcagttctgcacccgcagcgccgcgtctttctcagattgtgcggggaccacgggagggtcatcaggggagaatcctgacttggggtgcgggttcatgaatgggaagagctttggtccgtggggttcccagttgctattttctcctattaaaaatttatgggcgtcactgcaaaaatattaaacgaatgtaactcaaagagtggttctagaattgtagagcacccagctactggttcgtagctttcgtggtctgtgggagaggcttgaagggatacgtcttttataccatgctgatgaagaaaccaaatttactacttggttagggtacccgttacatggttttcctctactactgtgccggtttaacggggtgcaacacgtttcctggttcactgtcactccgaggcttaccatggcacgttaaccagttgcctgcacgcccggatctgtcggtcctcctgcaactgaggtatcttcgccactccggccccttgacgctccatctctgtccaccccacccac

SEQ ID NO: 491874 - DNA, 347 bp, Homo sapiens
gtatttaaaacggagcgggtaattataaattctcttccgggaacttctgactttctcacaatgggaatctttggacaagaattatcagtaaggggaaaacttggtgtagtggtcatctttcctcccatcagtgagatagatatgatgggagttatgtgggacggatatttggaaaaaagatttaattatagctattaataaagacatttaaactacggactatgcatttttattctttggggagggtttaaggtttatagtttaaagctaacggtggtttttaaaaaagtatctaacagggccgggcgcggtggctcacacctgtaatcccagcacttgggggtacc

SEQ ID NO: 491875 - DNA, 431 bp, Homo sapiens
  misc_feature (22)..(22): n is a, c, g, or t
  misc_feature (427)..(427): n is a, c, g, or t
gaccctttcaaaacctgtctgnccgtttggggtctgctggattagccctgttgccctgtttgaatccatgaaacatttatatgaaggtgacatccttattttgtttgtccctgttcaagaaaagtatcatctgttaggatagatgatacttttaaatcatccatttaaaatcagtcatttaatatcccgtgcatctttaaaaaatattgtagagcatgtacaattaataaatatatctttttttcttatttatttatttatttagagacggtgtctcgctgtctctattaaaaatacaaaattagccgggtgtagtgacgcatgcctgtaatcccagctactcgggaggctgaggaaggagaatcgcttgaacctgggaggcagaggttgcagtgaactgagatgggccaatgcactccattccatntatg

SEQ ID NO: 491876 - DNA, 219 bp, Homo sapiens
gtttgttttttttttgaactatgaaaagccccggtttgtgaatatattttagaaagagaggaaggaggtctgcagaactttgttttgttttttgccccaaaaatgtgaatagttcagagtgaaacccttttgtgagggttgatgtttcaggaataagcgggatctccaatgttttggggaggctttgagtctcaaaaaaaattgataatcagaaaagta

SEQ ID NO: 491877 - DNA, 246 bp, Homo sapiens
tttgagcgggggcttgataggtcgcgtacctgcattcaaccgcgcggacatcccgtcatccaacagttgatcctaactgagcacgcccacggccctgtgtctggcctgggctcacggccaccgatagcgccatcccattgatggcctctgtgtccccagtgagggcgggccgggagcgtatgcccagtgggctggaagcaggtggacctgtggctccagtacgaggtacggccggacgggatgtga

SEQ ID NO: 491878 - DNA, 463 bp, Homo sapiens
acagacagacaggcaggcaggtagagcaaataaagatgatcaattaccctgactgccagaattctgaatagagttgaaataactgacaaatcaagcacacagggaaagccaaagagatgaaaaaacaaaaatcctactaagtcttaccagctgctgaacagctacaaagaacatagcagtgagtaagcagatatatattgtgaactcaccttgtgtactattcaaggaaccggcgttgccatggtaaacaagagtcctaccctcaaggagcctggatgtacaaccagaagaaaagaaccatataaagagaaccatgagaaagagagaagggtagacagagcactggaaggagactcttcttcaaatgagcatgtatgtccaatagatcatatatatatagggatcaaacagaaactacaaaacagaactatcattgcctgtcagaacatacaagggaatcgaa

SEQ ID NO: 491879 - DNA, 262 bp, Homo sapiens
catgtaggatattatgagcagcattgtcgatgttcatttggattataggaagaccgcctggtaaaatttatgaagactgacgaagccattatatactcatatggattagtcaccatagccagtgctattcctgcttactctagaagaggggacattgttttcgtagatagagttgcctgttttgttattcagaaaggattacaggcttcccgtagtgacattcagttattttagcataatgacatggttaacccgagcgcta

SEQ ID NO: 491880 - DNA, 1102 bp, Homo sapiens
acgtatagccactactaagtacccaccatatgggtatagcgctttctgtagaaccgataggggcttgtgatagagactatctacatcactattgacgctgtacagtgactgacagtcgcaccgcgtcgatcgcgtgacaaattcctgtgaccttgacgtgtgttgacttgtgaatacgccgttcctcgtgactaatggacagcgatgactcactcgctcgacaagggtgacacaactagtcaccactatcacgatgtaagcgacgaatgctggtggggtgcaactcactcgtactgagtacaagaatgtcgtcacatctaaacctttattcagcactgtggccgagggttgcatcctcggtgtctagatcgtcttctccgccatagtgcatgtctgcctcttggtttccccatacaacgcctctcaaatacgactgtttctgagcgattcatctacgtcgcggtgcacgtgtgcagaactcgcagaggtcagcgaacgcgcagccaatggacccactagtcccctgtcagcctccacacggacgcgtaatgcgacgtagtggacctgtacccagggacgtcgatctcaacggtgtctgaccgacgacgagatcgctcggatccgactattggaccggcccgaccgagtatcttgccgaggacgaggagtagcaaacaaggtgttcgcacacccgacctactaccaaacctgggttctgctatcgcctgcacactggatttccggatcaccagtctgcgggtatgtaccctctcagaggttcgtgcccctacgtgtctaataggggcacgtggacaatggccgcagttactggtacacggcggcaagacgttgttcaattggaatcctcgtaacacaccattgtatcggaccaagtcccactaaaagggcacccaggtatccacataaaccgttgaattaggcgcggctggatctctagaacctgggcctcttctccatccaaggagcatgtcatgggaacaccagtgcacgcacgcacaggcgggcaatccctgacacagtgcatggtatcgggacttagcgctccggcgcccggtaacctcactcagcgaccgcgatgtcc

SEQ ID NO: 491881 - DNA, 368 bp, Homo sapiens
tgaactgacttgactgtggatatgaaaagcccaaaaccaccgcccaggaagaaccgcgtttgcctgcggcccgggaagaaacatccacggctgcgttagaaagagggtcgcacgctaccaccgaggtcgcggggtccgcgagtcctggggcatcgcgccccacagaccgagtcccttccccgcgggggtggtggctatgggtaggacgcgcgcttggcgcggccagccctgcggcaggaggtgagcggcccagggacacgggcagctgggaggggcgcgtggtgatttactcacttccctcgtagccagagaagtgcggcaataccgaacagttctaatagtagcgtccatgataacttcatgtttta

SEQ ID NO: 491882 - DNA, 139 bp, Homo sapiens
caaattatcgacctcctgagtagcaggattactgacatcgctatcactgcctggttaagttttttgtatttttagtagagacggggtttcactgtgttagccaggatgatcttgatctcctgacctcgtgatctgccca

SEQ ID NO: 491883 - DNA, 116 bp, Homo sapiens
ttattagtatgagacaggtctactttgttgccacgctggtcttgagttcctgggctcaaaggattcccccacctcagcctcctgaagtgctgggattataggcatgagtcctcgaa

SEQ ID NO: 491884 - DNA, 144 bp, Homo sapiens
gatataaactcatgggctatagtgatctgcccaactcggactcccgaagtgctggtgattacagtgcgttagccactgcgcccagcccctgcacagttatttcaaatggcagcagcaatggtagcctagtgaagaccagtgcat

SEQ ID NO: 491885 - DNA, 224 bp, Homo sapiens
acactttttgcagacagcaacaacaggatttcaggaaccagtgttctgatgaagctcggactgaggagctaagctagcaagcagcagttcgtggctgaatataggaaacgagtccaggagccatgctgcgatttgagtgaagagaagctcggaagtaaggaatggagcgctaactgatttgagtgatgaagactaggaattccggattccagtgaaggagcgag

SEQ ID NO: 491886 - DNA, 222 bp, Homo sapiens
gcccctccccccttccttttttcccccaacaaaaaagaccaacgacttccgcaaaagggcaaggtttctccctttcctgcaaagtagggatttggggcccaaaacctttcctcaacaaaggacacttagcccaacggagtttttggatgggaggggtgggagcatgggaaaggaggcatccccccccccaaaaaaacttaataaaaattttttagcaaagga

SEQ ID NO: 491887 - DNA, 184 bp, Homo sapiens
gcggtcgctctgaggccccccgggtccagtacggatgtgggaccccggagtacctggcccctgagcgtgctgacgtgacacgtcgtacacgcgagctgtgtactggtggcggactggtgtgtgctgctctactagatgctgtgttggcgagtccccattcccaggggtacgcttagcgaggagg

SEQ ID NO: 491888 - DNA, 1055 bp, Homo sapiens
  misc_feature (1055)..(1055): n is a, c, g, or t
tgcctgaacaaagtggagcatgttggtgctgcctgcctgcatggggaccctgccacccacctccctgtgggcctgctgcagctgggccgtctctgctctacttgccacctatgacctgccaactgtgcacatgcctgatgtgctggtgcatgatccatgttctgtgcctcatcaactgctgtgcaacaatgtaccttgagctggcctgatgtgctgttctgagtgttcaatgtgtgaactgctgtcctgccatggcatgccattgaatgaagaaggcagtgactcgttgtgactgcttgtgatgcatgcccccctgactgattggtggctgtgtgcatgctgcggtgcctggtgtgcctttgctgccacggccactttggtgccctggcttagccttgggtctggctgtggacaagtggggacgtgggggcagactgttgagcctttgcttgattgctcgcttggatggtggttgcaccgtgtgttcgccctgaactttgcccttgtttatccctccagttctgttgtgctggcacgggacaggagctgtgtctggcattgggtcatgcttgccagtgttcccgtgattggcttgccactctgtgcgttgcttaccttttctggggttgtggcacctggaatgtggagcccggccttggttcccttggcgttttctgggtgccatgagagctgtggttgtgcccccccggcccggagggacagggttgcgactgccggttgcagctttctgcgcatttgccagccccttcaagtggtcacgacatcttagcatgctggtccccccctggtatacggctgcttacggctggcgaccttgaagctgctgccgggcctggggactgaccggaatgtattccggccttggtggggaccctgcggaacggttggccccttgtgtgtgggttcgactctgcgtctattcacgccccttcgccctttccagagggacccccagtgcgcttacagggctgtagcatggacctggctggacccccctgggttaccttgggccacagggagcgggggcgccttgn

SEQ ID NO: 491889 - DNA, 915 bp, Homo sapiens
gaaacagacaaatgggttgccaactccaaagttctgtgcttattccagtcacaagttgttaaattcgtgttgtcgatacttgtggatgcgaaatgaagagacccttgaatacatgaaaaatgaggtggatcttgcagactcgatcagagactctaacaagtatagccaccagtgctgtgttcgaggagtatggtgacaaagttatggttcggtagtatgggtaaagaaagtttcatagtgaaatgaggttcctgataagaatagatgtttacgttctatatggatttccttaattcaaagatcatgattttagctggacactaaaccaagaacatatctagcaagataacttgaagaaagtataagcattatgtataagaaatgtgaagttcttgaatgaattgcatatttgtgactatgagtttgggcagaatgagaatgatcggctcatcagtgaagcgcagtatcttagtctcgagatctcgattttgatgctttcatggaagtgctatgcggttaggtctgtttgtgcgtcaggcaagagttaatgagatatgtatgaattgtaagtcgagagatgggtcaactcagatggtagtcagttgagtctcacagtaagcgggtctatatatgtatttaagtgccaaatgtattccattttaacaccgtaagccagagttgagtcaaggcatatacaacactttctcacaaaaattcctaaacagattcgggggtctaatatggtcccaattcctcatgcaattatattccattccatttaaattattttccatctttttaacattaaattgtaaaggtttaagcacccattcatttaattatgggctccggtgtaatccagggctaacacacgggaaccggcctcttaagtctcacatgttgattaaacccata

SEQ ID NO: 491890 - DNA, 201 bp, Homo sapiens
ctaggtaacgcatcgacattgaatagtgttctgaatgcgccatcgttgtgctcggtccacccaccgcatctatttcatcaataaaaattacgcaaggacgatttttccgcgcctcctcaaacaacttacggacagattgagcaccagcacacgcataaatttgaacaaatgaagaagcagattgggctaagaaagtagcat

SEQ ID NO: 491891 - DNA, 202 bp, Homo sapiens
tgggtaatacaaaataagcatcatgcatgaggattggtgctggaagaacaagagcctggaggtggaagtgctggaggatgacgcgtcttcagttgcattcaggcagacgggatacatgagtgatatgttccctgatctcacgccatcactctggaattttatcagcaatggaaatggaccgtgagagtgtggagatttatct

SEQ ID NO: 491892 - DNA, 434 bp, Homo sapiens
ttacgggtgctgatgtgcaaaccaggacatattgggagagagggaccgggctggctgtgtggtcagcagggttgaagccaggactcggggctccaccaagagctgacaggctggccctgccttccttgagcctcactttcatcttgtccagtgtaagatgggacagtgactctcatggaggggctgggtgaggattagggtgatgagggtctaaggcagccggagagggtcctagcatcgactctttctctgttagttcttctgagtagatagaaaacatggctcagcctggccacacacagacacatgtagcacacacacaggtccacatgtgtccagcacacgcatgagtgcacatgcacgggtatccccaaccccatcacacacacacacacgcacacaccagggcaccgagcctcgaattccgcatcacg

SEQ ID NO: 491893 - DNA, 271 bp, Homo sapiens
  misc_feature (50)..(51): n is a, c, g, or t
caccggcccgctccggagcagagtccggagcggattcggcccacagtttnnagggcggtgttgaagaattgattggcgaacatctgtcacttactagagatgttctcacgagagcttgcgctaccaggatcggcgggccagcagcgctcccgagtggagggacctgataagtactgccctcttacacagagtctcattcacagccagtcttcgtctgactgcacttcagaggatgcagcttacttagcgtatcattctccatgcgctgggc

SEQ ID NO: 491894 - DNA, 620 bp, Homo sapiens
gcgggctttcttcctcgccttcccggcgggctggggaccccagccgcgtccggaccccaccggacgcccggaaggcggggggtctcttgttcgggcgggggcacggggaccacctcccaacggtgtcaccgaccacccggccttcctccgctcctggagttcacgggaccagtggggggtgccttttgggggtgcgcggccatgcaattggtggatttttttaaaccgttttggaggggggagcgcggcgttgggggcgggagagcgctcctggctgtgagctgctcctgccgcttcgctccgcgctctcctgccgctccgctccgggtctcccgcgctcctctccccggtcggccgacgcgctgcccgacgccgcacccagagccgggccgctgccgggcgccgagatgaaggtgctgggacaccggctggagctgctcacaggcctcctgctccacgagtgaccatgggcgggctgcaggagctgggattccctgaggagaagccgctgctccggggccaggacgcccaccgagctggagagctccgatgccttcctcttgggtgtgacacagactggaaggacatgacatcggagataccctaaggcttctggatga

SEQ ID NO: 491895 - DNA, 663 bp, Homo sapiens
gaaaagattcatcttaaaatcactttcactctgtagtatacaagtatgcatacttcttctctcaagtactgaatgtagtagcgttcagttcattagcaggtttactttgctatgcgtttcaaagtctgatttcaactgctgatttggcatatttataaaatgcctactaagtgttaggctctactctagtacatgtgaccatacacagtatgagtcagactagtagcgctagcactatatgtgtgagccaatagagatgatcacatggtgacagctgctatgcttagtattacaatgaataatgtcatcaacagtggctgggcatttagattgttcggtcatagatggcctctatgaaatgatggcatttagtctaggatatgactagcaaggaggagccagcgcatacgcagagtggtagaagtacactccagtgtcccagtggggacgctaatgcatgtaagcattaatgctgacttcatgtgttgcagatacataagtcttgtggagttgtagcatagtagggtagcggatagccagtacaaagtggtcttagagaggcatcatcaactccatcatgaacagctgggagtggtggttctcccttacaatctgagcacagtgggaagccgaggtggccgtatagctttagtgtgggagctc

SEQ ID NO: 491896 - DNA, 152 bp, Homo sapiens
cagtgtctgggagggacattacagctcatggcaacaccggatccttaacccactgagtgaggctagggataaaacccacatcttcatggatcctattcaggttccttaacccttgtgccatgaaagggaacttcccgaaattagttcgcatt

SEQ ID NO: 491897 - DNA, 1007 bp, Homo sapiens
tctagaacgcgttatcccatggatagtgcccctcagggtcatacagagtaatctaaataagccccctattcttctaaatgtaagcaataccttcatgtcgaaatggtcgtaagtctgccaatcacataggaagcaaagagggagtgtcaactctctttgcttatagactataagactgcattgaacaacgaatccaggcccagtccagcttgtaccatccataaagtctcacgttcactgtgatcccttagagatggttggacataccatattacccaacacagtgaatattgccaatcgtcacaagattatgattcacgacacccgttaacagatttctaagaaccctaagtcgaggctacctatataaccttaagacaacaaacgaggtcctgggcgttttacctcaaacacagcgaggattgctcaggcattgatcatatcggcacaatcctgtagaatattacacgtctaacaaaatttggatcgctactgagaggattcagagtccctaaggtggcttgtcctgcatagaagacactcctagtattctaactcaggccctagtagccaaggacacactgctggtcgtaccgcggacaccttgcggaaggtctgccctcctcgcgcaagtccacagctgggcatacggggtaacaaaagatactctcaagtagcaaagaatataccatagcccccggaagggacccccggggaagcggtactctagacctaacgaacctcattggacaagatggcaactgctgcccacacaaaaagtcccggcaagtaacagacaaagggactaccggcaagcacatttacagcgcccacaacacgtacggtccaggaaacgccacacagccgtcacagggaactggcgcgaccgccacgaggcagaacaggagcacgtgcgcccgccaacacaacagcgacgcgcaaacaacaaggcgagcagccagcgcccacagcgaagcacaccggttcggcgcaccacagacgcgcgc

SEQ ID NO: 491898 - DNA, 188 bp, Homo sapiens
aggatctctgagcacgaatgtaatatatgacaacacagcacaagatctgtaggtggaaatggtattatcataagggtttattactatacattcagtgatacaatgtggcttggagatagacctttttttacattacatatgtatactataaaaccctacgattgagaactaacaatagttaaatctaa

SEQ ID NO: 491899 - DNA, 138 bp, Homo sapiens
cctgaagatgcgagaacaacagaaagaaaaaaggcaggaacaagaaaaagaagaatgaagaaaacaacacgaacataaaaagagagagaaaaaggaaaaaaatttagaagaaaaaaagaaaaaaatgggaagaggaaa

SEQ ID NO: 491900 - DNA, 101 bp, Homo sapiens
gccaagaatctgaatctttgagtttgcttcccccacacgcaatccacctgctgaagcctagtgaccagctgaacagaacggagaggttgaagattcaggag

SEQ ID NO: 491901 - DNA, 635 bp, Homo sapiens
ggcgatgcacgagcgcgaggtgctgcacgaggcgctggaggagaactaacaacttcagtgcgccaggcggcaggagaagctcaactacaagatggatgctcagcaatggagatccgctaggcacacctggcctgcactgcgcgatgcggctgcgcgagaaggagctgcacgctggctgaggtgcgcaggaacaaggagcagcgagaagagatgtcgtggctaagtggccctgggactgggctggcgcccatcctgcgacggaacacgttcgggtttgggtttggtttcgttcacctctgtctagatgcaacttttgttcctcctcctcccaacccgagtcccgcagcttcatgcttctcttccgcgactcagcgcgccctgccctgtcctcgtggtgagtcgctgaccacggcttcccctgcaggagccgccgggcgtgagacacggtccctcggtgcagacagcaggccgggcgcggctgggtccccccgggggccctgtgagagaggtggcggtgaccgtggtaaatccaggtcggtggccgtgggatcgctgggtccttacgctggtgctgtctggtcagccacgtgccgcgtcagggcgccggtcctctgcacccgcgcagccctggccag

SEQ ID NO: 491902 - DNA, 1406 bp, Homo sapiens
agcggagcggggggtcgccatggctgagctgcacgcatgctccgggtgcagtgaggcggtggaggtccatggtgaaagagtctggaaagagagaacatccggaagatgcaggtgagctggacctgaggcccatgcagaggcgctgccaaatgtgaagagaccatgaaaggcgaggactttccggccatcccctggtttgggcaggtcatgccgtgcttctcttgcggcccaagctcgcattcaacacagacgcgggttatcttacaacgtgatactatctctgaggccccgctaattgccttcttgtgttgttcaacgggtaccttgcattcatcttcaacggaagataatgcggtagtacgccagattaggtgaccccctttgatggtcacttgtgatatacgttggagacggacatgaacatcttgagatgggaatattggtactttgctaagggtatgcgatgagcacatttcttggagaagccccatgttggaaaaggcaggggcgttccattgagattcgtcagcacgtaacagttgacgtggagcatatcgcgatcgtagagaaccaacctcgcgttagacacagatacaatcgcctaacattctggtgtgactgaaaagacacgcatcttggattttctgtgcagcaataggctcaattacggtgttgcacaacaccaatgtgattggccaggaattgaaagagcatagagcgaaggagagaattgggaacgacccgtagtaggaagtaatgatgttagtaaagttaaggaagagtttagggagtgatgaaattaaacttttttagtccgacgcaaaggatagggatagtgtgtaagatggtaatgggggttacacattgggtatgtattagtaaagtttacatacaaggaggagaaaatgtgtgtggagaatatgagagggataaatatgggtgttgtagaagaaacggtatgcaaggggagttatgatgaatatggtataattagaagtggattgccagcacaggaggcacgaaggcaatgtgaggaggcaaagaagacgatcaaacatggacaccaaggccgacacacaacgcgaaaatggaaaagggcaagctggggatttcacaacgacagagcagtgagacagtatagggagagaagaggcatgaggcacaaagttgctgttgaccaatgcgagggtgccaagacgaagaggaagcaggggggcacgactagagggaggcatcaacaccacaatgatggaagtacagaggagagagaaaacgataggccgaagcagaagccgggaaccagtgaggagacgcgggggaggtaacaccgcgagtgaagagtaacggggcaagacgtgaacggaagaagagcaacaagacgagacatgcggatgcaacgagcaaag

SEQ ID NO: 491903 - DNA, 312 bp, Homo sapiens
  misc_feature (41)..(41): n is a, c, g, or t
  misc_feature (75)..(75): n is a, c, g, or t
  misc_feature (142)..(142): n is a, c, g, or t
  misc_feature (152)..(152): n is a, c, g, or t
  misc_feature (154)..(154): n is a, c, g, or t
  misc_feature (209)..(209): n is a, c, g, or t
  misc_feature (224)..(225): n is a, c, g, or t
  misc_feature (238)..(238): n is a, c, g, or t
  misc_feature (299)..(299): n is a, c, g, or t
aatggctacatttgatagaccaacactttagagaaagggtnaaacactttcggtttctcccctttggcccctaanacaacatcttacagtctgggtctgggtctacctatacggtcctacattggcttctgaaatatttgtnggggggggancnataaaatgacactggccagtacagtctttgggtatttggggggggggtggggggnaagtcagttctcggnncaaatttgtcggnttcggtctcgtcggcggggtctttgggttctttgttcttccgcgcttcttcaatgtgcttntccttctctcgca

SEQ ID NO: 491904 - DNA, 679 bp, Homo sapiens
  misc_feature (491)..(491): n is a, c, g, or t
  misc_feature (562)..(562): n is a, c, g, or t
  misc_feature (564)..(564): n is a, c, g, or t
  misc_feature (664)..(664): n is a, c, g, or t
tggaattatacggtttgactgtgtccccactgaaatgtcaacttgaattgtatctcccagaatacccacgtgttgtgggagggactcagggggaggtaactgcaatcataggggcgggtctttcccgtgctattctcatgatagtgaataagtctcacgagatccgatgggttttcaggggtttctgctgttgcttcctcctcattctctcttgctgccgtcatgtaagaagtaccttttgccctctgccatgattatgggacttacccagccatgtggaactgtaagtcaaattaaacctcctggccaggcatggtggcttacacctgtaatctcaacactttgggagggtgaggtgggtggatcacctgaggtcaggagttccagaccagcctggccaacatggtgaagccccgtctctactaacagtacattagccaggagttggggcacgcacctgtaatcccagctactcaggaggtcgaggcggncgggtcacttgagttcaggagtttgacaccagcctgtccaacatggtgaaaccccgtctctacaagtacananattaaccagggcgtgtggcgtgtgcctgtatcccagctatacagaggcagaagcggagaatactcgaacttggagcggagttgcatgagctaagacgcgnactgactcacctgcc

SEQ ID NO: 491905 - DNA, 1279 bp, Homo sapiens
taataaatcaataagcttccgttcctcttgaaggaagtgcccgaacgagggccggaattgttgcctgtattagttctactgctgtatcccatgtcacatagtcaagcacttgatcaatatctagtagagagtgaatgcaatataatagattcgtaagtgaacaagatgacatgccttcattcacgacgtgtatagtgactagggataactcggtttcgatagactatccgctagccgtggcttttagcgcttgggagttgcctgcctggccattcgagacatggggcgcgcatggccacttgcagctctcgctcgtgtaggtcgactaatgcagacttatgcacacttctctagagagactcatgtgggctgtcatggcatcttacgacacactcacttgacacgtatcttgacacaaagttagcctaaatcaatggtcccagtggggaacggatagttggcctcccaatcgggcgcttgtttaagaattacgccctaagggctaggctctctggaagcgacaaagccgctctagaaacgggaccttagtgaatggggcaattccaaaactattgagcaaggggtcgccgagagcaaagccttgctttttaagaacaagcgctaggcttctcgtgtgtggggccttcacacaagtccacactacggggttattgaacaagaatcccccccccgcggtatttttggcctccaaccctgggcagatcatatctggtggaaatccagcagaatacaattgtcgaaggggcaccggcgacaggcaaattatggacattcctgggggtagggcattggccgaacaacctttcgcgtttccacatggtcaccctcccaaccgagtttcatttaacccccttgtttgatcgcgaaaattgggcggtctcttcggcatataatcggggccaaacccagaaattgcgcaatcaatatttgccggcgagccggtgttggccgagaaagccgccaccatgaggcgacacacacggttgcttcaaccgtaaacagagggctctatcggatccaaacgggtctcgggacaagggttccgccgaacggtggggaaacctttgccgggacaaaaagacgttcaaaaaccacgttgtagtagataaagtcgtttcccttccaaaggactcccatatggagggcagcacacctttggaaaccccaactcggcaaacggacattcggcaagcggtagcagccttattcccttctaggagctccactctttcctcaaggcgacaaaagcatataatcg

SEQ ID NO: 491906 - DNA, 1259 bp, Homo sapiens
  misc_feature (292)..(292): n is a, c, g, or t
  misc_feature (297)..(297): n is a, c, g, or t
  misc_feature (309)..(309): n is a, c, g, or t
  misc_feature (627)..(627): n is a, c, g, or t
agcgggcttccgtggtgggtcgcgggtggtgcgggccccggggcggcgctgagccaatgaccccggcagggtcgcggtgcgtgcgggatacctacgaccaaccgatgcctgggtcgaggtgcatatgaggagctgtgccacgcaagcgggaagagcctgtgccgagcatgatccacgcgaggagggacggacgaggagagcgagcaggactgacaggaagtgaagggtgacgcgctggcgtggacagcagtaagtctggccgcccgtgctcgagagcgaggagaccgtggcntgcgncaacagagttgncccgtctcgccgaactgcagtgtctgacgcggtgactctactctggccggagtacaggagtgcgctgccctactcatcaatggaatccgtagggacgagactcgcgcatgaactattaggctgccacgcggtctccttcgaagggacgcggcaaggctcggtgcaaaccacgtagagcactagagtggcttaccaaggccccccaggaacgcgacgtacaaaacgttcaggccgaggccgtgcccatgtgggaaccagtgctcggaaaccaatgtatcccagcgggttggcacgcgtgtccttggccttccctgtggnttgcgcccgctccacagcatccacagctcctccagcgctgacgtttggttgatggcctactaggaattggcaatttgccttttgttgatatttcctttccccatcagtgaccgaaagttccacggcgttagctcccgtttcctcccatgccaatcgttgtaccttgcagagcgcttcgcccggggaatgcattgggggcgcccaaggaggttggactctcattggggccttatccacacatgtggtgaccattacacggttgtagcaaaacgctctcgacggggaccacgaggggttcgctaatccgcaaggaaggtggtccctttctggctttttgggaatggcgttgcaagcttaccaggtggccgtcatcgagtgagtactgggggttgggatgggcttcactaggcggttcccaaggtcgttcgttaggccaaaagaggggagctcgttgtgggctgccttccttgtttgtggagcaaaccctctagctaactttctcgttggttccccttgggtcccacaggggcacgagtcttgccttcggggttgttgtttccgtggtaagcccacgcccaattgcgtgtggggggccccccccctttccaacccttttggtttcgccttccctg

SEQ ID NO: 491907 - DNA, 668 bp, Homo sapiens
gggagtcaaatttgcaacaaacgcataaaaggaattagaactctctcaaagtctctataccatttatacctccagtattgaaaatgatgtgaagatgaaatacagtagcatagtgaattgcaaaaagtaatgctatttaaaatagtgggggaaaaaatatatatatatactaagagaccagttctagttgtgtttcaaagtttaacatatgaccaagtgtataacagggagagattatgggcagattgcacagagaccgttcataagagttgacgctcacaggatacaactatcctgtgattgagatttttaggatattagacttaggggattggatctttggggatttcaatatttgggattatgggtatttgagatggtctcttttaggattatgatccaagacccagtctcagggaatgtgtcgaaatccacacgtaatccagtacccatcccggcgctgtgagaaatgtaggaaccacaaggcctctcgttacagagccacttactgacccatggcagattccccagagtaagcatgaagcagtagccggcggaaggactacaaatggacacaatgtatatctgagcatcatggcgttgctcgacaaacatcatacaacagggcacccgcacctatgcaagcataatcattacgaaggggaaaa

SEQ ID NO: 491908 - DNA, 368 bp, Homo sapiens
tgcccaggattttattaaactgcttttttttctcaatatacctgtattggaagattgaaacaaaaaggcccaaactcacattaaataaacaagggaatttaatcaattctccaaagggttgtttgtaaaacaagtggcccttggaaccaaccaaagtaagtcagggggtcccacccgggactgtaaaaaaacttgggaagctttacacatgcccacgatactgaccctgtcccggacctttttgtttgaaaaggccaaagcccaacacccctcctacaaaggcactgttgttttttttggggctgtgaccctggaatttttatggaagcacctggtctgaaggggcatggcacacactcaggttctac

SEQ ID NO: 491909 - DNA, 156 bp, Homo sapiens
gctagaacagagcacacctgtttgccgaagacaaacgagaaaaaagactttggagactcgacttatttcagagaccacatctgtgtgcaaaacagaacaggtgggcaaacaaattgtttacgatagccatacaagggaaatttcaccagaatccct

SEQ ID NO: 491910 - DNA, 934 bp, Homo sapiens
ctgtgatccatctacatgaaccttccctggattttcttctaggcttctcggccggcactgagtacatggacctgcacggaatggacctaggccagacagccctgtcacctggcagccatcctgggggagacatccacggtggagaagctgtacgcagcaggcgccgggctgtgtgtggcggagcgtaggggccacacggcgctgcacctggcctgccgtgtgggggcacacgcctgtgcccgtgccctgcttcagccacatgacccggggcccctaggagaaggcccgccgtatcacctacctcggctcaggaccctaaacgtagcacacgaaagcaaacatacaccctgtcaggactaagtaaccccgattccgactagaagaaggaagaaaaggagagtgaggaggacctgagaaaacttgcaaggcagagaggctgaaaacactacaggtaggggcaaaaaccgaatccgacgtgggacataatcgcatcaaacgattgtggagatggtccggatgatccgaagatgctggagctgaccttgacaaaatcgaaagtcccactgatgcgagcggaacaccctacatttggcagaggaggacccaggcagccgatgtgactggagcttctcctgagggcagacgcgaaccctgctgaccgcattgttcggagagctacaacgtcacagctcgggctaataggcaaaaagctcacgagtcccaaaccgcaatcatcgtcgcggctcctccgtagcaggacgaggaaccccgtgaaagcgcgaggagcgaaggaacgaaaaaaattctgggccctttcaacaaggtagtaagagtgaaagctgatagggaaaacaagagcgtcagtcaaagtaggagatacagggcaacccagtggaggggcaaggaataacgggaagcaaaaggcaaaaagata

SEQ ID NO: 491911 - DNA, 129 bp, Homo sapiens
  misc_feature (121)..(121): n is a, c, g, or t
ccccgaggcggcagattgttgagtcaggagtcaagactgccgggcacacattgagactctatctctacaagaaattaaaaattagccggacatggaagcatgcacctgcatgtcccagctnacctggga

SEQ ID NO: 491912 - DNA, 202 bp, Homo sapiens
gcacatttcaggcatggtcatctgccacttttcatcaatatcggcatttcttcaaattctgatctgtgagtagcggcagtcgtcgagttgaatcgtgtaagattatcatctaaccaccgtattgaaccgcatcgctcacccgtaattgttgtaaatcctctagcaaggtcgcccgcatatttggcgtggcatacggatcatt

SEQ ID NO: 491913 - DNA, 128 bp, Homo sapiens
tttctgaaggagaaaatgttatagttattgaggtggcactgcaatcgtctcttagtaaatggatcagttttaggactttcagaaaataaaagatcgttgattagaccattatttaacaagggatgaga

SEQ ID NO: 491914 - DNA, 1258 bp, Homo sapiens
  misc_feature (246)..(246): n is a, c, g, or t
  misc_feature (921)..(921): n is a, c, g, or t
ccatgcccagtcttcaagatttctaatgttttggcaggtgttaacaatgtttctgcatatatacaatgccagataacaaccagatcacaataagtatctcactcaattgatgaacattgtagtgattctttttgaagttttctcatacgagtgtcattctgtatatatgacgaccacaggaatctacatagtattagagatagcatagaagcacggtagcattcttgattcgtcaaatgtaattcnaggcaagaaactaatacagtgacttgccgaccgaggatttgtatgatatacatctatttgacaaattagtcagtatgctctaagtgaaaattctgtgtcaggctataaattgagcagtgtaagatataaacaatttatgcatgctgtgacttagtctatggatttattccaaaattgcttagtcaccatgcagtgtctgtatttttatatatgtgttcatatatacataatgattataatacataataagaatgaggtggtattacattattcctaataatagggataatgctgtttattgtcaagaaaaagtaaaatcgttctcttcaattaatggcccttttattttgggaccaggcttttattttccctgatattatttctatttaatactcttttctctcaagaaaaaaaaaaaaaggttggtttttcctttatggtccttcatagcaggccaaggtatggcctctctgcaatagacagctactggtcaatacatgctggtaatttggacattcctggggtcacagattataagggtattcaaaatctatttatgctttatagagaaaccagactttaaaacttcatgcactacttatttcgaattactggtaccttatccaaatttacacctagctataaggatcttcaacccaggtaacaggaataatnctggggttccattttcctgtaaaccaactgaaagaactaattagatcatattctagtatgtcctgaaatatctttaagactggatcttaaaaactaacttctaagatgatttcatcttctcatagtatagagtttacttgtgtacaccgtttggaaacccaactactgtagaaagatgaggaatctatgggtaatttcggcttaatttccatctggccagtggacttattgtgaaattttccactttagtcaaattatttggggataagtttggatgcagacttaaaattagcaatcattttaaaatgtgtcaaaatttccagattactgctaaaat

SEQ ID NO: 491915 - DNA, 458 bp, Homo sapiens
  misc_feature (65)..(65): n is a, c, g, or t
  misc_feature (87)..(87): n is a, c, g, or t
  misc_feature (242)..(242): n is a, c, g, or t
  misc_feature (273)..(273): n is a, c, g, or t
  misc_feature (396)..(396): n is a, c, g, or t
ctggcaggaggatataggtttaggggccagccaagccccccccccccaagaagccattgccttcngaccccagggccggtgcccatngggttacctgcccggcccaggggttggaatcccgcccctagtggtaccctccagacaagggcccccccctccgacagtgtcctcgttttccctttgacctttccggaggttccgctccctccaacccggatttagggtttcaaaaggggggggtnccctttggagtcccctcccatgattaaaggngccaaaaactgggggttttttaaaactccgggcccccccccgggttgtcaaacaaccctttggggcccccccggggtagttccaccgggggcttggggaggggctgggggttggacgggattnaggaaggtccccccaccctgtttttgttcagttgcaataaacgtgactttttgggggggtta

SEQ ID NO: 491916 - DNA, 548 bp, Homo sapiens
  misc_feature (65)..(65): n is a, c, g, or t
  misc_feature (87)..(87): n is a, c, g, or t
  misc_feature (332)..(332): n is a, c, g, or t
  misc_feature (363)..(363): n is a, c, g, or t
  misc_feature (486)..(486): n is a, c, g, or t
ctggcaggaggatataggtttaggggccagccaagccccccccccccaagaagccattgccttcngaccccagggccggtgcccatngggttacctgcccggcccaggggttggaatcccgcccctagtggtaccctccaggtaagaggacccctgggcatgggtgggcggggcgatttacctggggaaaaggggcctttcattttttttttttggcttcccccaatccagacaagggcccccccctccgacagtgtcctcgttttccctttgacctttccggaggttccgctccctccaacccggatttagggtttcaaaaggggggggtnccctttggagtcccctcccatgattaaaggngccaaaaactgggggttttttaaaactccgggcccccccccgggttgtcaaacaaccctttggggcccccccggggtagttccaccgggggcttggggaggggctgggggttggacgggattnaggaaggtccccccaccctgtttttgttcagttgcaataaacgtgactttttgggggggtta

SEQ ID NO: 491917 - DNA, 478 bp, Homo sapiens
  misc_feature (65)..(65): n is a, c, g, or t
  misc_feature (386)..(386): n is a, c, g, or t
  misc_feature (414)..(414): n is a, c, g, or t
  misc_feature (429)..(429): n is a, c, g, or t
  misc_feature (463)..(463): n is a, c, g, or t
  misc_feature (478)..(478): n is a, c, g, or t
tgagatggagtcccactcttgtcacccaggctggagtgcagtgctgcaatcttggcggctcaccnaacctatgcctcccaggtacaagcaattctcctgcttcagactccagagtagctgagattacaggcacccgccaccacgcctggctaatttttgtatttttagtagagacagggtttcaccatgttggccaggctggtctcgaactcctgacctcaggtgatccacccacttcagcctcccaaagtgctgggattacaggagtgagccaccatgcccagtcacagtatttattccaaatcataaaattaggatcgatttgcttgtttactgttcaaggaagaatgtgtttttcgttctgtgggagagtgggcaaagagggnttagtgggtttattagggtatttaatgncagtgacagaaaggnaaaccaagggcaaattaggaatttttttttcttnccttccttttccttn

SEQ ID NO: 491918 - DNA, 129 bp, Homo sapiens
cactgctggctggacaactgaacaagttgagatgatcaggagaggtcagagaagctggagaggagagaccatgctatacttcgtgtgccattttacagactgatttccttttgaggggaacagaccctt

SEQ ID NO: 491919 - DNA, 608 bp, Homo sapiens
gtgggagagcagaggctcctggaagaagatgaggataggggctgggcacggtggttcatgcctgtaatcccagcactttgggaggccgaggtgggcggatcacttgaggtcaggagtttgagaccagcctgaccaacatggtgataccctgtctctactaaaaatacaaaaattagccgggcgtgttggcacacgtctgtaatcccagctacttgggaggccgaggcaggagaatcgcttgaacctgagaggcggagcttgcagtgagccgagatcgcgccattgcactctagcctgggcaacactatgagatccgggacccataagaaagttgacaatgggctttggatggagtgtggtggagcaggggaggttggagctggtgactccacatttccctccctagggtgtgtctcaaacgtgacggcagaagagaggtcataggtttgcctggatgccagaagcaggtgggagtaaaagacggaaatggctaggaattggccaggcaaccgtgaaacagcttagaaattacaggcaatccagccaggtgcggtggctgtacgcctgtaatcgcagcacttgggagggccaaggccaaggtggatcac

SEQ ID NO: 491920 - DNA, 407 bp, Homo sapiens
tatatctcgatggcggtgagataccgggttttcgtgtatatcaaagaatatcggggtaaatgtaaagaaaattcaagcagacagacagagggtgcaggtgctttctattatttaatagttcacctggccaggcacagtggctcatgcctgtaatcccggcacttagggaggctgaggcgggcacatcacctgaggtcgggagttcgagatcagcctggcaaatgtggagaaactccgtctctactgaaaatacaaagttagccgggtgtggtggtgcatgcctgcgaccccagctgctcgggaggccgaggcgggagaatcgcttgaacccgggaggcaaaggtggtagtgagctgagatcgcgccatcgcactccagccggggcaacaagagtgaaactccatctc

SEQ ID NO: 491921 - DNA, 261 bp, Homo sapiens
  misc_feature (14)..(14): n is a, c, g, or t
ttagtcgatgccgnacatacacaacacaaaaggaaaacagtaggcctttctttttcagggaaatgcaaaataaagctattatgagatgccactacacacctattagaatgttacaatggcagtcataaaaaagaatgagatcatgccctttgcagcaacatggatggagctggaggccataatcctaagtaaattaacacagaaacagaaaaccaaataccacgttttcacttataagtgagaacgtggcatcgataaaca

SEQ ID NO: 491922 - DNA, 285 bp, Homo sapiens
  misc_feature (184)..(184): n is a, c, g, or t
gcgcccaggatgactaaccagctagactccaggtagacctaagcctgctaaattactgcaggccacctactcgtgcacctaattggaatgcggttaggtctacctccaggtagacctaacatggcacaccccggaaggtgaatctctataaagacccttgtattccaatgagagatactatggnacttacctgaacgaacttccagagagtgaagccattcacacgtggaccgatatcctacctggtggtctacctgggtagtctacctgggttaggtctacctg

SEQ ID NO: 491923 - DNA, 668 bp, Homo sapiens
tacgccggtcagcgggggggcccggtgggccctgtgtggccctgggatggggaaccgcgtgtgtgcttccgctggagtgtttcggtgtctatcggtttaaggttgggcgatatttcacccatttgggtggtggtaggaactcaccacccgtttggggttccgggattgggttagagagtttccatggagcccattttgggttgtgggggcacaatccccccattggttggggggctcttttttgtggtccttgtgtgggcaaaaatatgtccacccacattatgtcggtgcgtggtgggtatgtggcttgtgtgagatacaccaaacgccccactattggctggctgacggtcctgtcggttgctgggtgacacccagaaacccccagaaggggggtgaaaaaaaaaacaccggagcggcggtgggtgggagcacagaaggaccaccacagatgtggtatgacgacacaccacgagattgtaaagacgagcgaagagtcaaacaaaactcggtatctatacacacccccacgataagatttatttttatccccccccgggtgagtagagcacccacccaccactggtgtgtgtcacagagaatgccgacaaaaaaacaacggcgcgtagaagtggtggggcacaccacccgtaagaaaataatctaaa

SEQ ID NO: 491924 - DNA, 107 bp, Homo sapiens
gtgtagtatatagtttttcagaattggaatactaattatttttgtataaaataattagtattccaattctgaaaaactatatactacaccttttgggtagtcacaga

SEQ ID NO: 491925 - DNA, 366 bp, Homo sapiens
gggacggagtttccctcttgttgcccaggctggagtgcaacggtgcagtttcggctccctgcaacctccaactcccaggttcaagtgagtctcgtgcctcagcctcccaagtagctgggattacaggcacccgcccccgggcccggctagtttttttttgtattttttttaggacaaatggggtttccccatgttggtcaggctagtctcaaactcctgacctcaggtgctccccctgccttggcctcccaaagtgctgggattacaggcgtgagcccctgtgcccagcctaagcccttttttaaaataaaaatgctaaagggctagtaagtaaaaataaaacttcctatgggatttcccagtgga

SEQ ID NO: 491926 - DNA, 314 bp, Homo sapiens
gggctgtggtcggctggcactatctccaaggtgactgtgaagcccggctgctggtgcccctggagtgtcaagtggaccccgctgttcagcagctgaagaacaggagaaggaggagatgaaggccgtcaatgataaatggcctccctaatggggaaggtgatgccctggaacagcgcaacttagcgtgctggagacaccgctggagcttcctggaggggcaggactcagccatcttcgacctcgggcatctctatgaggaatatcagggccggctgaggaggaactgcgcaaagttgagccaggagcgggggcag

SEQ ID NO: 491927 - DNA, 160 bp, Homo sapiens
aactatctcaaacccacttaaaaattaaacagctatttttacatccttcacaaagcccataaaaataaataattataactaaccctgagaaccaaaatgaacgaaaatttgttcgcttcattcattgcccccacaatcctaggcctacccgccgcgagag

SEQ ID NO: 491928 - DNA, 159 bp, Homo sapiens
ctagaggtatccccgcgcatacctggaccttctggcatacctggaccttctggcatacctgaccttctggcatacctggaccttctggcatacctgcgacctttatgccttagtcatttctgctctgtaggtcacacagtacaagaaggtccaggtatg

SEQ ID NO: 491929 - DNA, 103 bp, Homo sapiens
ccagcgtcttcactaaatatgagattactgaaagcttctctgggtaaactcttgtcatagattttccctgctgtaaagaacacggtcctggatgcccctctaa

SEQ ID NO: 491930 - DNA, 150 bp, Homo sapiens
tgcgaccgcaccgctgaagcagccaagaagaagacagaggatgccctaaatgagaccaggtaatcagacacacaactgaaggagctctcagaagagagcaatgagaccatgatggcactctgagaagagcgtaagccctgcctgaaacag

SEQ ID NO: 491931 - DNA, 658 bp, Homo sapiens
ccatcataatcggaggcttgatgtaccttctaggtaacgaccacatctacagacgttcctcgtcacagcccatgctttggtaataatcttcttcatagtagatacccatcataatcggaggctctaggcaacatgagctagattccccgtacagtaactcggtgccccgcgatatggcgtctccgccgcatataacgacataagcttctgactcttacctcccatcgtctccgtagctcctgctcgcatctgctatagtggaggccggagcaggaacgggttgaacagctctacccttccctgtagcagggaactacagagtagaaaccccaaaaagtaccaaaggggcaataataaaaacggatatctcagatataacaacttaaaagaggatgggcgtcgtggttttggctagaggatgggctccgacttttcctggggctactccatgcagggactctggcaagtttggctttgtatgaagtgctgttaaagtctggataagccaatatgcttggagacggagaatacttatctccgggggcaccctcactatattaggaggccctcctgccagggctgaatactttggctgacattgcgctggctcctatggaaagctgctaagggttcggaattccaaaccccaggcaggtaa

SEQ ID NO: 491932 - DNA, 452 bp, Homo sapiens
  misc_feature (3)..(3): n is a, c, g, or t
tcntggatccctgtagccccgccccgcatccccccagggggcccagggggcctgcccttttttttggcaaccaaattggggggtagtgggaggttgggcatggaggcccgtgaaaacttacctttgttaaaggccctcaaggaaaaaaaacccggccccgggcccggccgggggggtttcccggttgcccccaaccttttttttttttttttttaaaaaaaaaaaacctttaaaaaaccccccctaaaaaccaaacctttttggggtttggaccaaggaattttccaaatttggttgggattttgttttgaaggttaaaaaatttttccccccaaaaagccccccgttttaagcccctccaaatttaaaggttggggaaggggggggggcaaggggtttttttttttttttaaagggggggggaaccaaaggaaaaaaaaccggggcggtga

SEQ ID NO: 491933 - DNA, 521 bp, Homo sapiens
tagtcaatgaatgctgatctaggacagtgacatggacccaccagtcgtgattgagtcacagtaaaatgaagtgtgactctttactcttccaagttgctttctagatcctttcattacaacctattctgatcggatagtcttggaaaggaaagataagtctagcctcgaggctatcctctaaaagcaaagagagagtgatggattttctgctcagtcattccatgggggacctttatgaggcacgtgttagttcccaggcagcactgctagtgcggtctgtgccagaaagtacacgtactgcccgcggggttcaaaatggtcagcgagccgtttgtacgctgtccacacctggttctcccacaagacagccgcatggccattcgtgtagttcttctcagtacacgttgacgcggtgatagatccccgtggggagcgcaccatgtctcccttctccatgatgatccggatcaaatgatcctccttgtccctcatatcgaagtacgactgccatccaggatgta

SEQ ID NO: 491934 - DNA, 218 bp, Homo sapiens
taacctagaggatcgattctttgagcacgaggctagctgaacaacgttggccttcctgaaaccagttccacgtttggtgtcttctatgccttcgtgaagctcaaggagcaggagtgtcgcaacatcgtgtggactcgctgagatgtatcgcccagtccccaccgtcgccaacaatcgacagactacatcccgtatcttctaggcgtcctgagcccaag

SEQ ID NO: 491935 - DNA, 186 bp, Homo sapiens
atatcaattagtccgcaaggatgggaaaagtacagggattgtttatattgaatttaagacagtagctgatgcagagaaaacctttgaataaaagctaggtaacagatatcgatgggcgatctatttccctgttactatactggagtagaaaggtcaaaatcaagactttgaggggaaaagaccctg

SEQ ID NO: 491936 - DNA, 727 bp, Homo sapiens
gagctgggctggcctgtctgggcccagccgaggtcgggcctgggggctggtggggtgagctgcacaccccgcaagaaatgagcctcctgcgtggcctctgcccccctggtgggcctggctgtgaaccgcctgtgggtccgcagtggcctcaggccggccctactgtctgtgcctgtggtctgcagacccccgatggaacactggaatagcagagactcctggagtgggcgtcgtgaccatgccggcgccaagcgggcgacaggtacgagtacagagacgatggatgcaacgctttggccaacgctctcagaacgatgagtattattcagacacgaagagagacatgccaaagcagacgacaggacaacagaagcttcccccagcagcccctcaagccccacctgaggacgacacatgaacagtgagcctgaagaaccatcggggcaagtaggaggacttcaacgacgacagttctgggagggtatggagacggccaagcatcaggtgtggagggcgcagcgtttccagaagccgacttcctcatgaccggatgacttctcaagaagcagactggtttccagatattatcagtggaccagaatgagagccagaagggtatatcttttcattagaaagcggacacgtgcagttgtggttgggatattcagagattcagggtgagatttgaggctatctccaaaattagaaagagcttataacagtgata

SEQ ID NO: 491937 - DNA, 188 bp, Homo sapiens
cccgcgggctatgaggaaatgatctttcatgggaacgtggacaaggacgcacccgtgctgagtgagctttcaaagccggtggtggctcgcttaatacgcatgtacccactcacttggaatggcaacttagtgcaagcgcctggaggtgctggggtgctctgaggcccatgtctacagctactacgagg

SEQ ID NO: 491938 - DNA, 208 bp, Homo sapiens
gtatctaaggatcgtaatatcagagagtactctgtgggtgggtgacagttcgacaggcgagtgtgagagcgtggggttacaggcgtgtcgagcgggatcatgtgctgtgtgagcttatcagctggatggcgcggttggtgtgggtgctcgattcgttgtgtgggattctaatatcacgatcttgaatcatcagggtccgagctcgaat

SEQ ID NO: 491939 - DNA, 991 bp, Homo sapiens
  misc_feature (1)..(1): n is a, c, g, or t
  misc_feature (554)..(554): n is a, c, g, or t
  misc_feature (565)..(565): n is a, c, g, or t
  misc_feature (575)..(575): n is a, c, g, or t
  misc_feature (600)..(600): n is a, c, g, or t
  misc_feature (621)..(621): n is a, c, g, or t
  misc_feature (633)..(633): n is a, c, g, or t
  misc_feature (702)..(702): n is a, c, g, or t
  misc_feature (944)..(944): n is a, c, g, or t
nccaaaacaaccaggggcagggagggcggagcgggggagggcggcagggggagggaggccgggcagccggcggagggccgggggagaccgggggcggggcgggggccggggcgacggggaccccgggggaggagcgggagaggggcaggcccagggcggcggccgagggagcagcggggcgggccgggggggacccgggcccgcggagcaccagggacggggggggcgcacgacccgcgacggcggggcccgggcggcggcgcgagcagagccagcggaggaagcgggcgaagaagccggggggcgccaggcgggcagaggccggcgcggggaacacggcggcgcgggcacccaggcggagcggggggagcacggccagggccacggcgcggcccaaggccagcacgggggggaccacgggcggcgggcgcagggagggcgccgacgcgggcagacgggcggggcccgggacgccggccgggaggaacacgaaggacagcgcggcgggccgccgggccccgccacgcggcggcgcacgagggcagggagggcgngcaccacgccngcgcccacgngcgagaaggagtgcagggagggggngggcgccagcgccgcgggganggccgggagggnggggcgcagcgggaaggccaccggcggcgcgccggggccaccaaacggcagcagcgccacgcgggcggngagaggggcggcggcccgccgggccagcggcaccgccgcgccaccggcgccacgaagcgccgggccggggggaagggcggcgcacccagccgcgcggagccggccagcaggaagacgagggccacgggccgcggcgggcacggggccacggacagcgcgggggggcagggaagggcggggcacacgagcggaggggccgggcagaggacggccgccagggcagcgaggaacggcgcagcgancagggcggagaacagcggcagggggcgcaccggcgggggcggggcgc

SEQ ID NO: 491940 - DNA, 134 bp, Homo sapiens
cgaccagttatattctcacgcttatacttcctcaacgctttatactttctcagctttatcttcctcaacgctttatacttccatgcatacttaatattatactgcaattcaatacggaagtataaagcgttgag

SEQ ID NO: 491941 - DNA, 128 bp, Homo sapiens
  misc_feature (28)..(28): n is a, c, g, or t
  misc_feature (72)..(72): n is a, c, g, or t
  misc_feature (76)..(76): n is a, c, g, or t
  misc_feature (78)..(80): n is a, c, g, or t
cctcacttttccatcaggggagtatcanataagatggctgcgatcatcttatcatgcagtcttgactgatanaacngnnncgacaatcataaaaaagcattccataacttggatggaaccagttaaat

SEQ ID NO: 491942 - DNA, 331 bp, Homo sapiens
  misc_feature (9)..(9): n is a, c, g, or t
  misc_feature (243)..(243): n is a, c, g, or t
  misc_feature (319)..(319): n is a, c, g, or t
aaagaactncctacaactcaattaaaaaaaaaacaaaaaaaaaaatgaagaacccaattttaaaatgggcaaaaggttgggtgcaatggctggtgaatgactgtagtcccagctacttgggaggctaaggtaggaggatcacttgagcccaggagttcaaggtcagcctgggcaatacagcaagcacctgtctcaaaacaaaacaaaacaaacaaacaaaaacccaaaaacatgccaggtgtngtggcttcactcctattaatcttcaacactggttaggcttgttacttcgagggggggggccccgttacccattttngcccttttagtt

SEQ ID NO: 491943 - DNA, 335 bp, Homo sapiens
  misc_feature (47)..(47): n is a, c, g, or t
  misc_feature (69)..(69): n is a, c, g, or t
  misc_feature (89)..(90): n is a, c, g, or t
  misc_feature (107)..(107): n is a, c, g, or t
  misc_feature (121)..(121): n is a, c, g, or t
  misc_feature (141)..(141): n is a, c, g, or t
  misc_feature (164)..(165): n is a, c, g, or t
  misc_feature (178)..(178): n is a, c, g, or t
  misc_feature (185)..(185): n is a, c, g, or t
  misc_feature (221)..(221): n is a, c, g, or t
  misc_feature (242)..(242): n is a, c, g, or t
  misc_feature (245)..(245): n is a, c, g, or t
  misc_feature (261)..(261): n is a, c, g, or t
  misc_feature (297)..(297): n is a, c, g, or t
gaaaggtttttttgctcagggtcacacatctggggtaaagcgcgggngaccatcttggggacaatgggncttttcttattttgtgattnnccccccccccccccccnccctcccccccccncccccccccccccccccccnccccccccccccccccccccccnncccccccctcccnccccccncccccctccccccccccccccccccccccccccccnccccccccccccccccccccnctncccccccccccccccncccccccccccccccccccccccccctcccccctcnccctcccccccccccccccttccccccccccgcccccc

SEQ ID NO: 491944 - DNA, 167 bp, Homo sapiens
tactctggacgtagttatacggaggtaggtgttctagaccggctcgcctttgtacatcagaaacgatctttcaaagggaagctatattctatggatccttgtattcccaggcactactatattgctagaatatgatcattgcttaagacatgtaggctgaatacagg

SEQ ID NO: 491945 - DNA, 333 bp, Homo sapiens
ggggaaggggaatggaggaggagaagtcaaggattagaggtctcttcagcatctcaggactgcctctctctctctgtggtcacaggggtaggtttggtccacacggcagacatgaaactcaagatacagccctggcgtatacgggttgggaggccagtgctgcctctggtggtccccccagacctgcaattcatattttgaatgggtttaaagcctacttggcaattacttttatcctctaatgaaatagatttgaaccactttcccttgattatattttaaatgtttacccccatataaatataactgctctgaggtgggaggggttaagcc

SEQ ID NO: 491946 - DNA, 332 bp, Homo sapiens
cctgtctctcctagcacgtatcgtctgcttatccgattctctgtgtctcacactttgaactgctttatgttttggctttatgttgctgagttgaacatccgtgttttagtttattttgtttggtttttgtttttggctatcttatgtagaaaggcatgtatggtatggcatttattattctaaattatttttactgggaaagctttaccaagattttgaatagctaaatgtctacttttttcttaatagtattttcatctcagcctagtgacgatgattcaagtagtgatgaaaccagtcatcagccctagtcctgcttttagtacgacgcc

SEQ ID NO: 491947 - DNA, 129 bp, Homo sapiens
agcgggtggtctgtgtacggcttccggtggcgggacgcggggccgcgcacgcgggaaaagcttccccggtgtccccatcagtcgaggaggaatgcccggaggacagggccggctcaataccgcccagag

SEQ ID NO: 491948 - DNA, 1203 bp, Homo sapiens
ctgttcgacgcgagactctgttcccccctgggtgttttctgtagtctcctcgcctgtgcgcccccgtgttgttgtccgccccgggggaatttgatgaaatgtgcgcagtattttttgtgggactgtggtcctatgccccgtgaagaagagttttcaaaaagggcaccctttatccctgtgcccagactttctgggcacacatatgtctgtcaaccacggccccatttgggaaggtggaagaaactttgtggaaccccccaatgtgggcccagcgcacaagaaagtggcaccggagaagaattttggtgatggaatgaacctgatctttactccctaatatcttaaggcgtcggtacgctcttgccttcggattattcttaccgtggggccacaatggatgttcatagtgtgaatgagatgggaccgctcctgttaccattgatgccccctttgggtgtaaatgaagagagactttttgggagctccaaaatctgttggtttccccggtggggggtgctgttagatacccagccccctttgcccatgatcacccttgtgaaatctattgcccaccccgccctgggggttctccgggaaccaccgccttgccgcgttgccacgagttttgcccaagagttccctttctctgttaatttcccgcactaccacctatgccacgcttataatgtctcgccccacggagacttcccacccacgaattctcggttcgccacacaaattataagaggcctcttttcactataatgaaggccccacacgcgttataccccacggcagacacgctataaaattctctataaaatgggaattggtttctctgagattttgaggccacactggtaaaccctccgagaccacacccaaccacacgcccgcgggtgtcttgagacccacacccactaagttataagttaataagaggtttgagaaatttgcacaccacgagaagctgcacactcacccactttcttcgaaattgagtgagttcttattaaattacactccccgagaagtataaagatgataaaccactggaagttatgaaagatgctgttcacctctggaggcccctaatgagttgattctgatgttcctctttatttataaccacactgttaaaatgccattgtcttgtaccctgagttgagtattacacctttaagtctaagtacccagctgtta

SEQ ID NO: 491949 - DNA, 375 bp, Homo sapiens
  misc_feature (8)..(8): n is a, c, g, or t
  misc_feature (46)..(46): n is a, c, g, or t
  misc_feature (102)..(102): n is a, c, g, or t
  misc_feature (104)..(104): n is a, c, g, or t
  misc_feature (109)..(109): n is a, c, g, or t
  misc_feature (112)..(113): n is a, c, g, or t
  misc_feature (145)..(145): n is a, c, g, or t
  misc_feature (160)..(160): n is a, c, g, or t
  misc_feature (162)..(162): n is a, c, g, or t
  misc_feature (165)..(165): n is a, c, g, or t
  misc_feature (177)..(177): n is a, c, g, or t
  misc_feature (181)..(181): n is a, c, g, or t
  misc_feature (185)..(185): n is a, c, g, or t
  misc_feature (197)..(197): n is a, c, g, or t
  misc_feature (231)..(231): n is a, c, g, or t
  misc_feature (235)..(235): n is a, c, g, or t
  misc_feature (255)..(256): n is a, c, g, or t
  misc_feature (266)..(266): n is a, c, g, or t
  misc_feature (310)..(310): n is a, c, g, or t
  misc_feature (322)..(322): n is a, c, g, or t
  misc_feature (340)..(340): n is a, c, g, or t
  misc_feature (356)..(356): n is a, c, g, or t
  misc_feature (358)..(359): n is a, c, g, or t
  misc_feature (363)..(363): n is a, c, g, or t
aggctttntatcctcctaaaggagttcaggatttataggtataagnagctatatttttaggcatgagctttctatggtttaaagtgtcccccaaagttcatntnttggnagnntaacccccaaagccatatgttggtttcatttngaggtggggcctgtngnatntaataagggttnaatnaggncatcaggggggntcccattgatgttacaggtggctttataagaagngagncctgagctagcatgctcttnntctctcaccntatgatgctctctactatgttatgacatagcgggaaggccctcnccagatgcagantctttagtttaacttttnagcctccagaactttnannaatncatttccttttc

SEQ ID NO: 491950 - DNA, 183 bp, Homo sapiens
ctgatcgcctgtgtgcctgacctgtctgactcgcgactgatagcctaccccgtgatggttcttcttgtggttttctctcattctgacggtccttctttccggcacagctgggtgctctcaggtgtcctgatgtctcctgccgcttgcattcttccttttgtctgaaccgatcatatataagct

SEQ ID NO: 491951 - DNA, 720 bp, Homo sapiens
  misc_feature (64)..(64): n is a, c, g, or t
  misc_feature (206)..(207): n is a, c, g, or t
  misc_feature (241)..(241): n is a, c, g, or t
  misc_feature (275)..(275): n is a, c, g, or t
  misc_feature (279)..(279): n is a, c, g, or t
  misc_feature (298)..(298): n is a, c, g, or t
  misc_feature (305)..(305): n is a, c, g, or t
  misc_feature (327)..(328): n is a, c, g, or t
  misc_feature (684)..(684): n is a, c, g, or t
ccagggccagagccaaacccggcacggaccccccagcccaggcgcccagccacgccccaccgcnaccagggccgaagacgcagacaggcgcaaggagcgggaggagaggcagcgaagggcggaccagggggcggaggaggcgcgggaaagcacccggcggaagcggcaactgggggaagagaggaaagaggcgggaaacaggacannggggaggtgggaggaacaaggagaacaacgcgancggggcgaagaaggcaggaaccaaaacaaccaanacangaaggaggcggagaaaaanggaaaanaataagggaaaggcgggggccnnggcaaaaggccggggaacaagcggaaaacaagtgaggcggacaaaaaagccgggggcaaaaaacaggacggagggggggccagccagccggcacggggaggggacgaacgggagcagagggccaacagtggcggcgtcaaccgcagggaacaaaggaagcccgagaaaatgaaagggaagaaaacctagagcaggtgagcggcaacatcgggaacctccgtcacatggccctggatatgggcaatgagatcgatacacagaatcgccagatcgacaggatcatggagaaggctgattccaacaaaaccagaattgatgaggccaaccaacgtgcaacaaagatgctgggaagtggntaagtgtgcccacccgtgttctcctccaaatgctgt

SEQ ID NO: 491952 - DNA, 100 bp, Homo sapiens
ggtgggtacgcggtgggcctggacacgacggacgcactctactgacctacgttgcctgtctacggacgcgtaactcggggactccttctacgacgtcgac

SEQ ID NO: 491953 - DNA, 410 bp, Homo sapiens
aatagcgggcattacgatctgaatcactgcgccagccttataagtatttttcatgtaaaaagtatcacactgaattctactgtggagttttttgttttttatttagcatcgtacatgagatctatccatgatgatatagatatagacctggtacacctttactctgctgtatagcataactatcgggtcactaacccacatctatttatccatttctttactgacagacattttggctgtctaccaattttttgctattacaaagacacaatgccaactatatacttctaccaatatatagtagaaattaccccatattcttgtcaaaaattaatactgtgagaccatttagttttaatttagtctttaatttcgtctttctgggtcctttgtattacttgtggcaaata

SEQ ID NO: 491954 - DNA, 1144 bp, Homo sapiens
  misc_feature (214)..(214): n is a, c, g, or t
  misc_feature (413)..(413): n is a, c, g, or t
  misc_feature (479)..(479): n is a, c, g, or t
  misc_feature (485)..(485): n is a, c, g, or t
  misc_feature (568)..(568): n is a, c, g, or t
  misc_feature (597)..(597): n is a, c, g, or t
  misc_feature (602)..(602): n is a, c, g, or t
  misc_feature (694)..(694): n is a, c, g, or t
  misc_feature (740)..(740): n is a, c, g, or t
  misc_feature (755)..(755): n is a, c, g, or t
  misc_feature (777)..(777): n is a, c, g, or t
  misc_feature (783)..(783): n is a, c, g, or t
  misc_feature (792)..(792): n is a, c, g, or t
  misc_feature (863)..(863): n is a, c, g, or t
  misc_feature (867)..(867): n is a, c, g, or t
  misc_feature (870)..(870): n is a, c, g, or t
  misc_feature (873)..(873): n is a, c, g, or t
  misc_feature (962)..(962): n is a, c, g, or t
  misc_feature (991)..(991): n is a, c, g, or t
  misc_feature (1015)..(1015): n is a, c, g, or t
  misc_feature (1025)..(1025): n is a, c, g, or t
  misc_feature (1047)..(1047): n is a, c, g, or t
  misc_feature (1053)..(1053): n is a, c, g, or t
  misc_feature (1069)..(1069): n is a, c, g, or t
  misc_feature (1127)..(1127): n is a, c, g, or t
aaggcggagcctggcctgcaggaaactgaagagccggggcctggtggacaggaacaacgagaccggttacacacgccatgtataacctggcctctttgcgtgagctggtgtgaggacccagcgccgtaccatgcaccatccagtgtgccctgatggcgccatccgtaccgcgatagataggagaccattcctcgaatcgcattcacggccctgntagggagtaggttcactgtggatcgcctccatgaactccggctgcatgagtgatgacatcttgcccttgggcagggactcagggtcctctgagtgaccctatcatcaggcaagccctatgtgcccctgttggaagcagaggaggtacgtctcagccagagtctgctagaactgtggcggcggcgagggccggtctggcnggaggccccccagctacctgtggacccacatcgggacaccatcctcaacgccattgagcagcaccnggtggnggtcatctctggggacacgggctgtgggaagaccacgcgcatcccccagctgttgctggagcgctatgtgaccgagtgccgangtgccgctgcaatgttatcatcacccaanctcgncgcatctctgctgtgtctgtggcacaggggtcagccacgaactggggccctccctgcgccggaatgtgggcttccaggtgggggtggaaagnaaggcccccatcccgagggggggccctgctcttctgcactgtgggnatcctgctgcgtaantgcagagcaaccccagcctggngggcgnggagcacgngcatcgtgggatgagggggcatgaggcggggacgtgaaacacagacttatctgctgatcctgctcaagggnctgnagnggntcaacccgggcctgcggctggtgctcatgagtgccacaggggacaatgagcgcttctcccgatactttggtggctgccccgtcatcaangtgcctggcttcatgtacccagtcaaggngcactacctagagggcatcctggncaagttgggnaagcaccagtacctgcaccggnaccggnaccatgagtctgaggntgaatgcgcactcgatttggaccttgtgactgatctggttctgcacatcgatgctcgnggggaccaggtgggatc

SEQ ID NO: 491955 - DNA, 713 bp, Homo sapiens
  misc_feature (713)..(713): n is a, c, g, or t
catgattaaccagttgtgacacttacttgttcaagttggagtatatatgactcatgtgggcagactggtcgtcggtcttatgtgaattgtcgcatcgggtgcagaaatgccgagtcaattttgacatagcccttaagagacttttggtaacagaattacacgctcttatggtccgtgggtataatagtgtgtatctaggcactttattataactggatatttcgacctcgacacgatgttcactaacttgatcagtgcgtctgacctatttttgtcgcggtagctatctgtagttgtactgcaagtctataatacaggatcatgcgtttccaaagcaggattaagtacgaagaatcggcgatccgtgccgctgttggatcagtctatccagctgtggaaatcgggcaagacctggtggtttctctgtactggtgtttaactggcgggcatacgaccttatgacacgagcgtattacaaagtagctggtaggtattcgttggtatacctactatttataaaattagatctggcgacgagtctgactgggccttgtggcgtggccttttgtagtgctcgcgcctcgtaagctaggataagctgtaagatcgaggagtgtaatcttgggcattcattgatacagtttaaatagagcttaaacatccgaggacatttgggttaaagaacttattgcggtagtacccttggattgacn

SEQ ID NO: 491956 - DNA, 440 bp, Homo sapiens
ggggctgattgacaaaaagggagtggaggggaacctactttgcacatgaaatctttctgtgatcatgtcatagatcttgaaggaactgctggcagctccagttcgtccggaggttcaaaaactttggagacacgaagaagccactatgacgagggcccagggaagacgtttccatccacagggcgaaaacacgtggccaggcttagctaagatggctaagtactgcggatttgcacattctaccctattgctagtcgtaagacactaactggttcataaagatcttccagtctgtccaaatacagatgtgactagcatattaagatgggcggacattgtaatttggtcaaattagatcttatctgccatactcgatatgatcgtcaatccacacaggacgttaatctgaatgacctggttgctagcagttgtcttgtcgc

SEQ ID NO: 491957 - DNA, 222 bp, Homo sapiens
ctgaggcccagcgagaattcgagcgtggcgcgagcgggccggaagtgctgtggtacccggtgcaccctccacagctgctggcccgggtgctaagcccctcactgcccagggccagcggcaccagccggctgctccaagtgcggggcctggtgagcccatgctgagctggaactcgtgctggcccacgagtgccacgcacctctccctccccctcaaaaaaaa

SEQ ID NO: 491958 - DNA, 719 bp, Homo sapiens
  misc_feature (17)..(17): n is a, c, g, or t
  misc_feature (101)..(101): n is a, c, g, or t
  misc_feature (122)..(122): n is a, c, g, or t
  misc_feature (125)..(125): n is a, c, g, or t
  misc_feature (136)..(137): n is a, c, g, or t
  misc_feature (155)..(155): n is a, c, g, or t
cattggataagcggatnaggggagactcgtcaccaggcgtgcagtgggcactgctgggctcccccatcccgtcctaacccggaatagccccgggcaggagncgtggaaagtcgagggggtanccngcgaatgtgcnnttgtgtaagccacgtgcncgggtggggcgcgggcgggacttgggcgggcggggtgggcttggccgagctggcctccggggcaccgaccgctataaggccagtcggactgcgacacagcccatcccctcgaccgctcgcgtcgcatttggccgcctccctaccgctccaagcccagccctcagccatggcatgccccctggatcaggccattggcctcctcgtggccatcttccacaagtactccggcagggagggtgacaagcacaccctgagcaagaaggagctgaaggagctgatccagaaggagctcaccattggctcgaagctgcaggatgctgaaattgcaaggctgatggaagacttggaccggaacaaggaccaggaggtgaacttccaggagtatgtcaccttcctgggggccttggctttgatctacaatgaagccctcaagggctgaaaataaatagggaagatggagacaccctctgggggtcctctctgagtcaaatccagtggtgggtaattgtacaataaattttttttggtcaaatttaaaaaaatgaaaaaaaactcgagcattat

SEQ ID NO: 491959 - DNA, 789 bp, Homo sapiens
  misc_feature (17)..(17): n is a, c, g, or t
  misc_feature (101)..(101): n is a, c, g, or t
  misc_feature (122)..(122): n is a, c, g, or t
  misc_feature (125)..(125): n is a, c, g, or t
  misc_feature (136)..(137): n is a, c, g, or t
  misc_feature (155)..(155): n is a, c, g, or t
cattggataagcggatnaggggagactcgtcaccaggcgtgcagtgggcactgctgggctcccccatcccgtcctaacccggaatagccccgggcaggagncgtggaaagtcgagggggtanccngcgaatgtgcnnttgtgtaagccacgtgcncgggtggggcgcgggcgggacttgggcgggcggggtgggcttggccgagctggcctccggggcaccgaccgctataaggccagtcggactgcgacacagcccatcccctcgaccgctcgcgtcgcatttggccgcctccctaccgctccaagcccagccctcagccatggcatgccccctggatcaggccattggcctcctcgtggccatcttccacaagtactccggcagggagggtgacaagcacaccctgagcaagaaggagctgaaggagctgatccagaaggagctcaccattggctcgaagctgcaggatgctgaaattgcaaggctgatggaagacttggaccggaacaaggaccaggaggtgaacttccaggagtatgtcaccttcctgggggccttggctttgatctacaatgaagccctcaagggctgaaaataaatagggaagatggagacaccctctgggggtcctctctgagtcaaatccagtggtgggtaattgtacgtgggttattgtacaattacccaccactggatttgactcagagaggacccccagaggtgggtaattgtacaataaattttttttggtcaaatttaaaaaaatgaaaaaaaactcgagcattat

SEQ ID NO: 491960 - DNA, 1218 bp, Homo sapiens
  misc_feature (1218)..(1218): n is a, c, g, or t
gatcaggtgctgctgagtgctgtgctcctacccacctgtgagtcttccctgtgcgaggaccaggtggtggtattcgcttggccatctccacacgacatgtcccgggtctgcgacttagtaccccttgttccgccgtggtgagtccttggcttggcaatgatgtcgatgtcaccactccttgtaccctctgagcctctagtagcgtcctctgtgtcgttcgtattccggcagcatgtctgtggtcgctctgaggtcacttgactgctgcgtgggggttggtcccctgggtccttgggttgccgcgggggcagcttcgtagggctagtgcgcagtgatgtggcgcgctcgtatggcctcgtgcgatgtgataccctctctccgtaggtgaagcgtccttttgtggtcccgcgctttggtatctagcgggtgactggtagtgagccgtgcgcaacagatcgccaactgattacatttccgtgcgtctgcggccggacttcccacggcgcttcagagcgctcggatctttgagccgttcgccgttgaggattgcgtagcgtatgatcgagggtagattgacagcgctgagctctgtgaacgtggcgttcgcactcccttttgcgcttttgagagcttcgcccttttgggcagcggcccttcgaggagtgcgtgccgatagagttctcgttggctgagtgagagcgcgacctttcggtttttgccactgcgtttattccatccccccttgtttgcccggtgcgccatccgaggttatagtagaggcgctctggtggcccatgttgcgtcttcgtcagccaacgggtcggttcctcgtttgttcctattggtttggtttgccgcccatggggattcagggtgtaggttctgctacgtgtcggtatcgcgtaccggatacccgtctttgtgcccctgtgatgcgcaactgccgcttctgccgagcgaggagcttctctgcgccgcaaaggccggtacgggacgtccacaggcgacggacttcgagtccgctgttctctttcgattcgcgctgtctgctttgttgcgcaccgatctgtgtcgcaaagggtctggtcaccgcatcgatacgccgttcgttcagttagcggttgttgcgccttaacgactctttggggcctaagaaacttttccccctcctttagcgcttggagggggatcggtatgggagggcggcatacatttcgn

SEQ ID NO: 491961 - DNA, 496 bp, Homo sapiens
tgagctagtttgtgtaggcggcaaatgcgacgcgagcgtcgaggggattggctgtgttgcagtctgactgcctaccgctccaagcccagccctcagccatggcatgccccctggatcaggccattggcctcctcgtggccatcttccacaagtactccggcagggagggtgacaagcacaccctgagcaagaaggagctgaaggagctgatccagaaggagctcaccattggctcgaagctgcaggatgctgaaattgcaaggctgatggaagacttggaccggaacaaggaccaggaggtgaacttccaggagtatgtcaccttcctgggggccttggctttgatctacaatgaagccctcaagggctgaaaataaatagggaagatggagacaccctctgggggtcctctctgagtcaaatccagtggtgggtaattgtacaataaattttttttggtcaaatttaaaaaaatgaaaaaaaactcgagcattat

SEQ ID NO: 491962 - DNA, 502 bp, Homo sapiens
  misc_feature (17)..(17): n is a, c, g, or t
  misc_feature (101)..(101): n is a, c, g, or t
  misc_feature (122)..(122): n is a, c, g, or t
  misc_feature (125)..(125): n is a, c, g, or t
  misc_feature (136)..(137): n is a, c, g, or t
  misc_feature (155)..(155): n is a, c, g, or t
cattggataagcggatnaggggagactcgtcaccaggcgtgcagtgggcactgctgggctcccccatcccgtcctaacccggaatagccccgggcaggagncgtggaaagtcgagggggtanccngcgaatgtgcnnttgtgtaagccacgtgcncgggtggggcgcgggcgggacttgggcgggcggggtgggcttggccgagctggcctccggggcaccgaccgctataaggccagtcggactgcgacacagcccatcccctcgaccgctcgcgtcgcatttggccgcctccctaccgctccaagcccagccctcagccatggcatgccccctggatcaggccattggcctcctcgtggccatcttccacaagtactccggcagggagggtgacaagcacaccctgagcaagaaggaaatccacatggtgcaggctagacacggcacttgtcggccatgtccaggaagtgctgcgcgttcatctcatccagcagagcgat

SEQ ID NO: 491963 - DNA, 458 bp, Homo sapiens
  misc_feature (17)..(17): n is a, c, g, or t
  misc_feature (101)..(101): n is a, c, g, or t
  misc_feature (122)..(122): n is a, c, g, or t
  misc_feature (125)..(125): n is a, c, g, or t
  misc_feature (136)..(137): n is a, c, g, or t
  misc_feature (155)..(155): n is a, c, g, or t
cattggataagcggatnaggggagactcgtcaccaggcgtgcagtgggcactgctgggctcccccatcccgtcctaacccggaatagccccgggcaggagncgtggaaagtcgagggggtanccngcgaatgtgcnnttgtgtaagccacgtgcncgggtggggcgcgggcgggacttgggcgggcggggtgggcttggccgagctggcctccggggcaccgaccgctataaggccagtcggactgcgacacagcccatcccctcgaccgctcgcgtcgcatttggccgcctccctaccgctccaagcccagccctcagccatggcatgccccctggatcaggccattggcctcctcgtggccatcttccacaagtactccggcagggagggtgacagaacacagtatataatacatatcacagccagacggtgagcaagtcatgtgtaccgagccta

SEQ ID NO: 491964 - DNA, 256 bp, Homo sapiens
tctgtggaccactgtgaaacaagaccaggtcagcagcttcgccggtcccacgtcctgtaaaaggctctaaagtaaatttcaagtaaacttcaaaagacacaaatcacatcaaatatcttttcttaccacatgatggaatatatctagaactcacttaacaaacgatacatagacaaataccctaagaacctagcatatacctaatcagtcatttatgccaataaccccaccaggttaccataagaacaaacaaaaa

SEQ ID NO: 491965 - DNA, 842 bp, Homo sapiens
acccacgcgtccgtggctcatgcctgtaatcccaccactttgggaggctgaggcgggtggatcacttgaggtcaggagttcgagactagcctggccaacatggtgaaaccttgtctccactaaaaaatacaaaaattagctgggtaaggtggcaggcacctgtaatcccagctactcgggaggctgaggcaggagaatctcatgaatccgggaggtggaggttgcagtgagtggagatcatgccattacactccagcctggcaacagagtgagactctgtctaaaaaaaaaaaaaaaaaaaaaaaatttttttggaaaaggccacaaaacagaataaacggttttatctctattttgtaaaaccagccaatgaaaagcaaaaacaaaaactaacaaagggggccaggctgggtgaatcacacctatgatcccagcactttagaaaggctgaggcaggaggactggcttgaggtcaggagtgcaagatcagcctagccaacgtagcaagaccctgtctctagaaaacaatttaaaaaattatccagactggtgggcacgcacctgtagtcccagctactgaaggctggaggcagaaggatcacctggaatcccgaagttggagggctggccagtgacgccgtgatagccacaaatgcactgcaggtctggggcaacaaagcaagatcctgtgtcaaaccacacaaattacaacaaacctgaaagacctagaaacgaacccaggtgtgaccttttttaataattctcgaccaacaaaaaaaggggggctaaaatttcccgggggccattacctccccttttgtaaagggccaagggcgtttaac

SEQ ID NO: 491966 - DNA, 400 bp, Homo sapiens
  misc_feature (26)..(26): n is a, c, g, or t
  misc_feature (46)..(46): n is a, c, g, or t
  misc_feature (63)..(63): n is a, c, g, or t
  misc_feature (107)..(107): n is a, c, g, or t
  misc_feature (220)..(220): n is a, c, g, or t
  misc_feature (240)..(240): n is a, c, g, or t
  misc_feature (305)..(305): n is a, c, g, or t
  misc_feature (326)..(326): n is a, c, g, or t
  misc_feature (359)..(359): n is a, c, g, or t
tatttgccggtgtaaacccgagaggnccccactgctttcctggggncgcttggaggccacacncacctgactgcagggcaggatccgtggacttctaggcccctccnagcctcggcagtgtccccagatccggatgtggaaaccgctgaggaagtcaggggccttggcaatcatgtcctcccagtcagcaaagcccagcttgccgtcaccatccaagtcncgcctcctcaatgaccttgncgcacacaagcaccacctcctcctcatccagctctgacttagtggagccgggccagcgtcagttncaggttcctccttcgcagatngaagttgtcagtgttggaagttcatagattttngaaagggcatagtttggcctttggagctttttcgggggaag

SEQ ID NO: 491967 - DNA, 111 bp, Homo sapiens
ggtgatacaactaggcggtgatgatggtggtgatgtggtggtgatggtggtggtagtgatgatagtgatgacggtaatggtgatgatgatgatggtgccgatcaatagcga

SEQ ID NO: 491968 - DNA, 743 bp, Homo sapiens
  misc_feature (377)..(377): n is a, c, g, or t
gttcctatgttaaattcaagggaagaaagggggacccagggctggtatttttaaaaaagggtggaatatttaggtgttttggttttttacaaatgctggattaaatttggcctttaaaaaagggtggaaaaattttataaaattttcatttttggggtggccagttccctggccaccggtttttcctttacccagtgtttttaaaaatctcaaatgaaaaagttttcgatccaatattggtaagctggattataaggaatggtacccaggggtaagccattcccggcctggagcatttttgaaattcaaaatgtctgtcctgtggaacaggcagggattttgttcccaaactttggaaacccctttggaaaaaaggnctttaaattttcaggggtttgtctgattttaaaggccgtttttaacccaactgctaacaggggttaattggatccccttccttccctgaaaaggaaaagtttataagcctacgttaggattgtaatatggaaaggaagccccaccaaaatttttaaaaatttgatggtcccccaaaaatttacccttggatgttaaataaatccccctttttggaaaaaaaattttccctgaaaggaattggcaaagaggacatggggataagttggatccccctctccccccttttattttttccaggggttttttggtaaaggagggttttttacaagttaatccttaaatttgttagatcctggtatgggcca

SEQ ID NO: 491969 - DNA, 613 bp, Homo sapiens
gccagaatccggcagtcggcccaatggggatagaggcccacaggtccacagggccccccaggaggccctggcgggctggagctgtgcacccctgagagaggggacctccgtgggccatcagggcctcctggccccctgggccccagcccctgttgggccaccctatgcccggatctcccagcatggagacccattgttgtccgacaccttcactgagagcaacaaccgactggccctcgagggacccaactgggcctccgaggcccttccagggcccatgggtcccctctgggcctccgtggcccctacaggtgtccctgggagttcctggtcacataggaccccgcaggcccacactggtaccctaaaggaatctctggccacccaggagagaagggcgagagcaggactgcgtggggagcctggcccccgaaggctctgctggagcacgcggggggaaccctggccctaagggagaccctggtgagaagagccactgggggcagcgggttgcaccagactacgcgaggcttcgcaagatgttaccctgagcagggtaacacatcttggacaacaatgcattgggctctatgaacccagagctggggctctg

SEQ ID NO: 491970 - DNA, 361 bp, Homo sapiens
gctcggtccccctagttttagaagtttcaatagcatatcatattattctgtagaatgtcaggtacttcactctatttccccccccccatattatcatttatcatacattaaaatacaaatttaagtaatgaccattgaataattcatagagaaaaaagtgaagaagtgcaaaattattcaagcatattcaagtacaattttacatctgaatcctttcctgccatttaagtcacagctccctagtattaaccacccaggctggatactgtgtatgtgagcggggttgcccaaaggcgccattgctaaaaccaccccagagtaaaagcagctattaaaataaaacaacttaatcccctgtact

SEQ ID NO: 491971 - DNA, 167 bp, Homo sapiens
tccagatcacaagcagcccggcgtctagtatcaatatcagatccttccaaatctctccttaggtactcctcagaattatcttcaaaggcttcttcatcagcagctacaaggagagaggatatttcagataacactccaaaagacgtcacggtactttacagcggaga

SEQ ID NO: 491972 - DNA, 860 bp, Homo sapiens
aatctccaccatgaaagtgatgcagtgttaatgggtatgaaacgcaggaagccagttctcccgtgccccctacctccagtcagcacaccttgacctcacccccaggccctgatgtgcctctcaccatcatgaataggaaactgatgaacaccaatgatctggaggagtccaggcagctcacgcgaggatgatccagcggcatctgagatgccgatggcacctctattgatgaatgtccacgttgcgtaacgatcgtctcctgtgctggcagatgtccgacgcgctgacgtgttggacgtcaactaccttgtgcccgatgaagagccccggttcaccggggcacgagcatcgcttaccacagcaggcccttgctgcagcttccggacccacatgcttcaacatgggcactccccgcacgtacgagtatgcagttgagacattttcgtacgctgctgggtctacatgctatatgttgacaaggccgtatccgggttcacacggataagagattgtccattggaccacaccgtgtgcctatggtcactactagaagagctgcctcctggaagctttcccaagtgtgatcgccccaacgactgtgtgctgatcagagactggagagggtggccgttgagaaagtctccggtgctcgggccctcctggggagcccccgatccagcggctcgctcccagagaccttcttcacacacgatgactttgtcgctgttgacctgcttcccccaggcttttctgaaaactacgcattagggtgggaaaaccctgcttgcgagggtctattgcttctacgacgttggggcgctgttgtttgggacggaggcccaggggctttgagcccttca

SEQ ID NO: 491973 - DNA, 475 bp, Homo sapiens
cttctgagacttagtcatataatgcatcagaaatgtggagaaaagcttattagatagcacggacatctcctgtcgaatatcacatgatacacactggggagagggcctatgagtgcatggagtgtggacaggcctgtcaacgcgcaagtcaaagcttagccagcaccagtgtatacatcagtggagagaagccttacaagtgcaatgaatgcggaaaggccttcacccaccgctccaatgttgtcttgcataacaggagacacactggagaaaaatcctttgtgtgcacagaatgtgggccagtctttcgacataggccaggctttctccggcactatgttgaccacagtggtgagaacccctatgagtgcttggagtgtggcaaggtcttcaaacacaggtcatatctcatgtggcaccagcagactcataccggggagaagccctatgagtgcagtgaatgtgggaaggtctt

SEQ ID NO: 491974 - DNA, 107 bp, Homo sapiens
gtggtccctttgccccagacgtccatgtggtagtagtagtagtacataccgccccgttctccggttggatctctcgcacagtactacacggcagtgtctcagccttt

SEQ ID NO: 491975 - DNA, 401 bp, Homo sapiens
cactctgctgaacacacattgctttgtttgtataaacaagagagtttcatcctgtagtgaagcctctgctttgaggatattgtaacatagcaagttcacaccactacctgtttttaaaaaaatacagctgtatacttcaaaacaagacgcaggcgaatgcaacggctttaaatttgttatgtccctttaacacacgaaagagccacggtcgtgtagtgtcacttttttatgacaaacgagctgtgccattcatctcttcactgtacccctgaccttaactctcagcttcacgggcaggcacgcagggtcatggagtgcctaaccaagctctacaaatcgcaacatcagtgcctgaacccctctctacaagtgcggctaatcatagaccatctgaacagcta

SEQ ID NO: 491976 - DNA, 218 bp, Homo sapiens
ctggatgatgcagcttcttacctagatgctgcatgaggcaggtacacatctgactgctatccacagagctagaacagcagtggcactaccttctctcccccgtggataggccccaccccatgcggaaatgctgaggactcgtgcaccatgagaacttctgaccatgagcacttttgacttccggatacggggcatctgcccagtgtgaacaccaatca

SEQ ID NO: 491977 - DNA, 146 bp, Homo sapiens
tcgaacaaccaacggcgagtcaaggaggcttccagctgtttgaccgaacaggtgatggcacgatcctgtacagccagtgtggcggatgtgatgagggccctgggccaaaaccctaccaacgccgaggatctcaaggctcctgggga

SEQ ID NO: 491978 - DNA, 1017 bp, Homo sapiens
  misc_feature (1016)..(1016): n is a, c, g, or t
ccacgcgtccggtctcgctctgtcacccaggctggagtgcagtggcgtgatctcggctcactgcaacctccgcctcccgggttcaagcgattctcctggctcagcctcctgagtagctgggattagaggtgcgcgccaccatgcctggctaattttgtatttttagtagagatggggcttcaccacgttggccaggctggtcttgaactcctgaccttgtgatccgcctgcctcggcgtcccaagagtgctgggattaccaagtgtgagccacgcacgccgggccaaaacatttttaaaaaacaaaatttgtcatggcaaaacttctccctagggccccatcgacatgcacaaacggagtatatttgtgtaattcatgtgctgggtacacagatatacatgactttagaacacaagcagcaggtcaggcatgggggtcagtgtcgtgaaggtcactcagcacatttggagagagcttgagggcgggcagatacacctggaggaggggagacgcagaggaccacgacccaggacagatccatggtgacaacctcgatagtgtaccaaaaaatctacaccaagataagcagggtgatgacgcgacgagtgcagtgtaataccgagtaaggaggggagagccgaggaggaaggctcagagagacacagagcaggggacaagagacgaggggcaacaggaacgtgcaagcattcacaggacggtgaggggatgaagaagggaagaacaggaacgcggctaaaagatgaagaagcaaaaagaagggaggagaaggtagagaaagaatagcacgaagacaataaaagaggagaatagaacgaaatagaaagaaaaggagagggggactgaaaagactttgctgtctaaccgtatctaaagtcagaagaagaaggaaggaagggagcgatagagaagacaacacagagtatagaagacgacatagaaaaaaggaagaggagaagaaaataggtatgtctctgtgcttgatctcgtgtaggttnt

SEQ ID NO: 491979 - DNA, 165 bp, Homo sapiens
ctggtccggtttggattgcggcctgggcggggtctggcgctgctgctgctggctctccttggcctcgccgtccttgtccacaagcactattgcccccggctcaagtgctgctctggcaaagctccggtgagtgcccaggatgtgagaacagtggcaggcgaccag

SEQ ID NO: 491980 - DNA, 753 bp, Homo sapiens
gtggtgtgcgttgcgtgcattgtcggagtccggagtcgggggcgagacgaggccccccattcgggtcaccgtcaagaccccacaaggacaaggagtgaataattgttgatactgcgatcgagaccgtcggatcaaggaggtccggagtccatggagatgcgtggtcataggagtcagtggcagaaccccctgggtccgaggatagtgatgtcatagagccgcgtggatctgtagtgcgtcacaatgagttatggccaagaccccagtatgcagcgagatttggaatgggatgcgtcataacgcgtgcagcatcaggagcaacgattgcgtccggactaagccccttggaacctccattgaggggccaggaacgcactgggtgaaggccttggctcgcggcaagtctccagagtcgcatgtgaatattcgcagaaaagcagtagaagtgccgagaaaaaccactgtgcgacgccgaggcgacctcatgaagcccaaaccctctttgagaggaggcaatccccgtgggagagggattataagatgcactcgtccccggccctgtccattggttactatcgtggaagcgctcctgagtgaaggccccacttggttcgagattgctggcgcggtggcaaaccaggtttggtgcaatcgggaatccccttcttctttccacgtggcccgggggtgactcctgatgatgcaccagtcgctccccagggcctcctgtagtgatcgtgtcgacattggagg

SEQ ID NO: 491981 - DNA, 258 bp, Homo sapiens
cacgagggcggtttcggtggatgctgcggttgcaacagcttcgggctcggagctttggcggcggtgccggtcggctaagctgcgcggtgcggaccccggagcgcggtccgggttgctggggcggcgcgttggatgcctctaatggaggagattctgagcagcacacctgacccagtggctttgtgagggagctcaaaccaaagactatttcaagccctgcatatcaaatcctgagggccataggacaccataacacgg

SEQ ID NO: 491982 - DNA, 1158 bp, Homo sapiens
  misc_feature (1158)..(1158): n is a, c, g, or t
actagttctagatcgcgagacggcgccctattctatcctaatgaatcatgcctaatatagcacattctctgttctatgtaggcaggggggggggaagatttatatggtaagaggcgacgagaagcgtaccgagcctggtgataagctaggctctgtccaagatagaatcttaagttcaactttaaataggccccacagaggccctctaaatccccacatatgataaaataatacactgtataagataccaacagaggaacagctctaatggacactaggaaataaacctatgtaagaggagagtaccaggatggtaacgagccgatagtcaggtcctagggatagtcaggtgcgagccaactctcgagggagagaggcgtatccacgcgctcggaaggagcgcgcgagcttaccctaagtgagagagtcgcgcaaaccattatacagcgtgaagagcttcccttcagaacccaaactaggaaccgaggtgcttaatcaaccccctaattaggcaaaggaaagctaaatggtaaagtaatttaaggttaacccaatgcagaagcgcgatttggtggctccggccataaaggcgcggccggtacagaagtttcagaagacgacctggaagactgaccaattataacatagtccccaagtagtgctaacaattcaaacccacacgaagttacagtgtgaggcaccccatccaccatgctcgaaacaccagagcgacagggcaatgctccatcaatggaagggggttaagacactcacggtccgagggaacatacgtgtgaagcctcattaacccccggcggtggttgaagccaagaaaaaagattcaccctccttgaggcactcaaccaagtaattcagcaagggatccgcgccgtggcccccgggtgatcaacgattggtttaaacccgggcccgacggggtagacccctaagccggggggaagagggtacagcgagtaaatcagctgggagtcctattaaaccttagaggaagccgggaagcgcacacgaggggccggccaagggtgtacaggcagggcgccaccccctgcaaagccaggggacaaaatgacctggccgtgtgggaaacccgggcacgggaaaagggatagccggagaagaacccgtagggcccccaan

SEQ ID NO: 491983 - DNA, 1081 bp, Homo sapiens
  misc_feature (2)..(2): n is a, c, g, or t
  misc_feature (101)..(101): n is a, c, g, or t
  misc_feature (107)..(107): n is a, c, g, or t
  misc_feature (185)..(185): n is a, c, g, or t
  misc_feature (206)..(206): n is a, c, g, or t
  misc_feature (247)..(247): n is a, c, g, or t
  misc_feature (274)..(274): n is a, c, g, or t
  misc_feature (312)..(312): n is a, c, g, or t
  misc_feature (314)..(314): n is a, c, g, or t
  misc_feature (323)..(323): n is a, c, g, or t
  misc_feature (399)..(399): n is a, c, g, or t
  misc_feature (414)..(414): n is a, c, g, or t
  misc_feature (562)..(562): n is a, c, g, or t
  misc_feature (680)..(680): n is a, c, g, or t
  misc_feature (832)..(832): n is a, c, g, or t
  misc_feature (1016)..(1016): n is a, c, g, or t
angaagctacagagacacaacccattgtttatgttcagcccctagttgatgctaacagcaggacccagtgttgccgtccctccccaggcaccttttgtttntgtttntaccgcaccaccgtatgtacagccacagcctggctttgtgtacagcatgtgagatgaagcgctgatcctgtagtcacntattttcgtactgaaacatcntctttacccacttctcagtttataatgggggaacacaggcnacgtgttcttgtaacctttatttcatnaagcacttctttttgtttctaactatatacttggatcncntatgttaanaccttatttcacattccacatcattttagaatttattttcgaaggggaatagtttcaatgttttattcacttggcntttttttctcccccnttttcttttaaagaactgctcaatattccatctgttgtgaagaacctcgatttgcactctgtagtgtttaaagaaaccaagaaactctaatattgaatctcttaaatttagtgtatgtaaaccgcttaccaatacgtattgtctaaangcctttaaatctgttttattcaaagaaaagcttaagccaaaaccctggcatatgaccatgccagactgtccagtgcccaccaagaccacccttatcagcaccatcgtacactggattnccgtgcttccccgattattgaaaaatgttaccagaccacttgcctgatttttaaatgagcgtaaaaggccctctaacctatgcaggtttcccccttatgcatatagaaaatgctagtatgttttgctcacttcatatgtaacacggtgcccntatgttgtgctgtatcctgtgctttttctgtgggacccattcccttcaggagccaagagcacccctgattcccatcttgtgtgtgtttactaacccttccctgaggtttgtgtatgttggatattgtggtgttttagatcactgagtgtacagaagagagaattccaaccaaatattgctgttnttcagttttgtttgtggaatttgaaattactccaatttaaattaattactggactgtggaaatta

SEQ ID NO: 491984 - DNA, 100 bp, Homo sapiens
cgcggacccgaaatgggagtcaggagccagaacagaagcagcacaaatattttcagaaatagtaaactgttccggggactcacaaatcatggtttttaag

SEQ ID NO: 491985 - DNA, 137 bp, Homo sapiens
tcctgcttctgccccccagggtcttgtgaggaaactcgatttggggattcattttacgttcttaaatattctgatttacaaatatcttaagattcagggacttggtgaggagacatgagaggggcagaagcaggaag

SEQ ID NO: 491986 - DNA, 346 bp, Homo sapiens
cccaacgccagtcgatcttactactagatagccttagccacaccatctactacacattaggtctcagccgatgaaactgaaacctgtggcagtagatatcacactggatgggaacgatgaactagtatgaccgagtatatgactgcagggactaactggtataactgctggataatgagctgaactagaagtatctgtgcaaggagagccaaagctaagacaccggagaccagaccagctacctaagaacagctgagagagcacacgcgcgtatgtaccagctgcttgtccaagatagaagcctagactaaccctagattggcccagagccatctacatacctggt

SEQ ID NO: 491987 - DNA, 158 bp, Homo sapiens
attggatatgccatgatgcagccattgccactaccttcacagccggtgtttgccccatgcttcagagcacccacgcatgctgacgtcgggcagccatccccagtgcatcgtgtcatcctcttaatcccctcatactgctttataccaatagggggtta

SEQ ID NO: 491988 - DNA, 467 bp, Homo sapiens
ggttatgaaggcctgggtcatggtgcatatagcattgggatatgacgagagctgtggtgtaggcagattctatctaaatgtggggtgggggagaataacaaatggtaatgtgtcctgttcattgtgtcagaagccaaaagcaggtacaatttccaatgtgttttagggtggatccagacagactcagaagtgttcatggcagctcctgttcactcatcccaccgttttacctccagtccctcccacctgccgtctctgtgtgacatctggcttctggtgcccctgtagtcgtttattcctatgtgggaaaacattccccttattctcaagtagctttacaccacctttcctccactgtcttggtcttgctgaaaaccaacattactaacattactgtgcagccaccatgatttgtagctctctcatgatggagtcatctgctctgcccacactctggaaagtggggt

SEQ ID NO: 491989 - DNA, 836 bp, Homo sapiens
cggacaactccagcatcgactgccgtctcagcctggcgcagactgtcagccttctgagcacccagcgaggaggggcgggggcgatgggctggcagcccccagtctgctgcctattgcggattctgtttttgagccgtggactatgggttgtaaatttatttgtggcggagtgcgctccaggaagagccatcatccctgcccccgtttatcccacctggggagatctagtactagagatttttctacagtagtattatttttgggcctcagagggatggcgattgtggaggaggggatggtgcatctggcagcggttggatggcatggtctgcggcgctcatctgtgtccagccttttcactcgcactaatgctggtcttcagtgttttgctctcctctctctttcgagcttgcactccggtacccgatccggcgccctgagcccaatcccatgccggggggccagttggacatagaagacaggtccgtccatcccgtgcccgcgctgcggcggcgggcacccagcaagtcgcgatcagcgatccgagtgccttcaccatgacttcaggccaatgagactctatgattcccaagcgcccttgtggaccgtccgctgtgtggggtagggggtgaagcatagttctatacgaactgttccgcccgtgcatctgggcctgcgctctatcgctgcaatgtgcccagcaacgcaatctaacatgcaagaatagctcccgtccgacagcaccgtcactggagggaccacgcgctggcgagccggcttcgcctccaagtttgtcataaaggttgtctcctgtgttccctcctcccttgccccat

SEQ ID NO: 491990 - DNA, 490 bp, Homo sapiens
tccacgactgcgcgtcatatgtaaagaatcaggcacaccatcaattcagtcacatccattgttcctcactcggcgacaaggtgtgacgcgcatgagtcgcaatgtgcttcatccaaaggtaagggcagaggctccccggacattgagatgacttttttgcctcgagcttatggccagttgatattactcacgctcgacgccatgctctgcggttcgtgaggccagagtaaggaaaccagcgttgcccacgcactccacccgcacaagcatctcccgccaatgggaaatgctcaaactgcttccaaatcgtgccccaggccttactgccgccggactcctccaacagttggaagaggccggccatcgcacgacaaaacgtacggttgagcgagaccccaacgaactgtcgagcctgtttccattgcactgcaacgataaaggcacgcctttatggttggtactggcaacctggacgcgccatcgtgcgctt

SEQ ID NO: 491991 - DNA, 326 bp, Homo sapiens
  misc_feature (70)..(70): n is a, c, g, or t
  misc_feature (82)..(82): n is a, c, g, or t
  misc_feature (89)..(89): n is a, c, g, or t
  misc_feature (93)..(93): n is a, c, g, or t
  misc_feature (119)..(119): n is a, c, g, or t
  misc_feature (124)..(124): n is a, c, g, or t
  misc_feature (131)..(131): n is a, c, g, or t
  misc_feature (133)..(133): n is a, c, g, or t
  misc_feature (160)..(160): n is a, c, g, or t
  misc_feature (163)..(163): n is a, c, g, or t
  misc_feature (167)..(167): n is a, c, g, or t
  misc_feature (182)..(182): n is a, c, g, or t
  misc_feature (196)..(196): n is a, c, g, or t
  misc_feature (207)..(207): n is a, c, g, or t
  misc_feature (210)..(210): n is a, c, g, or t
  misc_feature (212)..(212): n is a, c, g, or t
  misc_feature (227)..(227): n is a, c, g, or t
  misc_feature (262)..(262): n is a, c, g, or t
  misc_feature (272)..(272): n is a, c, g, or t
  misc_feature (276)..(276): n is a, c, g, or t
  misc_feature (294)..(294): n is a, c, g, or t
  misc_feature (297)..(297): n is a, c, g, or t
  misc_feature (302)..(302): n is a, c, g, or t
aattcaaattccagaattttatggatccagtagattaataaaacctgaagggatgataaaaggggataangaattcagtccnttatttnatancacactttttaaaattaaaatccttnaaatntttcttntnaaaattttaattgccatgaagggccanctntttnacaattggcagggtngccctcctatcagnggcatccttcnggngnaagggcagacatttnagcacctttgaagattaagggtgcccaggagtaancactaggtangatncacaaggggaagagcccnttnaactntccaacaaatggggacatcaagaa

SEQ ID NO: 491992 - DNA, 564 bp, Homo sapiens
aagcataaaacatttaccatctagctcttcatagataaagttgctgactatgaattagaagaatatatatcatataaaatataaacagagaccttagggaaacgcaaatcaaaaccataatgagatattatttcatacacactaggaaggctgtaatttaggggaaaaaaggacaataacaagtgttggccaggatgtagagagattggaactctcatacattgctgatgagaatgtaaaatggtacagccactgtggaaaacagtttggcagttcctgagaaagttaaacatatgctaaagagatgcaatgaaaaacgaataaataaagtaacaataaaagaaaaatatagagttatcttagcgacccagcagttttgctgctaggtatatacccaagagaattggaaacgtatgtgtacactaaaacttgtgcaagactgtgcattacaataaacaaaaagtggaaagaagccaaatgtccatcaagtgataaataaagcaagatgtgatatagccatacaatggaatatgatttagccataaaaaggaatgagatactgac

SEQ ID NO: 491993 - DNA, 460 bp, Homo sapiens
ctagtataggacatgctacctaaaaacagaccatatattccttaactatgcatcagttttggtctagccttatgagattctgttttagaacaagtgtaacacactgatggtattataatgtatctttaaccacttattatagttatattcctacaatccaatttaaaaatagtcttattatattatatttaatgcttctgtgtcatgcttacagcaacgctgttatattagttgtcaccagtagtattcacattaactcttgcttcaaaaccccttaaaaacaagaaaaacaattaccaaacaataaactaggctaaaaccttgatccagaggattatccaacgacctttgatagcgatcagatcttaaaactccattgcacatagaaactgcttccttacttctttccagtcagatattggtcttaccagctgtaataatctaaccgtattgtatacag

SEQ ID NO: 491994 - DNA, 110 bp, Homo sapiens
  misc_feature (70)..(70): n is a, c, g, or t
aatatgaaagttacttgggaagacgggggccaaccccgccaggcaactcgaccggccgcggccgttctancttaacattccaggtgtaagttacagagctcaagttcatc

SEQ ID NO: 491995 - DNA, 242 bp, Homo sapiens
gtaacggcgcagtatgctaggaatatcggctatggtccagtgtcataggagccaacgactagatactattcacctgtagttcctaactaacctagctggaagcgacctacctggataataataaagcagttagataagagtatagtagaggctacaacacactagcacccacggactagtaggacataaagctacctagataatagacagacctagggaccagcaggactagctagtactag

SEQ ID NO: 491996 - DNA, 182 bp, Homo sapiens
agacacatgataggcagccaagtgtaaagggctatattgttagctctattatctgaatcactcagcatgtctgtccctgaaggttaccatataaaacatctagaaggagtttcacttagcaatcagctgaaagacatagaccggtggccaatcagcaagactgaataatagaactagcatta

SEQ ID NO: 491997 - DNA, 502 bp, Homo sapiens
catctctcccactccatagtacatacttgccagaaagttctaccaacccgggtttatctcacatctatgtgcagggcataagcttcatcactgggcagacccgggcgagggtcctggcccaacacttaatctgactggccctgtgtaagctacttaacctctcagcacccctggttactcctctatacattttaatacttaccttgcagggtccttgggagaaactggggaggtctaagggccatcaaactgaccactgcagagcatgcatgagtggatgccgggtcaggcagcctgggctggagtcccagctctgtccctaaatgtcagctctcttcagtaaagtagggtgagtaatgctgactccttgcctgacacagtagcttcaaagcacatggaaacttcttccattttcctactttaaatatctttattcctccatcctagcacttaagggtcagctgcctttgagatttttactttaaagcccaagaagcaccct

SEQ ID NO: 491998 - DNA, 290 bp, Homo sapiens
cgaggcgcgagagtcgcttgaaccctggagatggaggttacagggagcagagatcgcaccagggcactccagccagggcaagagtggagacaggtgtctcaaaaggaaaaaaaaaaaataaaaaggtggcgggtattacatcaaacctactcgggataaatttcccagtagggcatctgaaatggcatgggcaaaagcaaaacaggttatcaatacaccagggacatcaagtagttttaaggcaactacagtgtggagtgcttttttacggggagaaaaatcctagcaga

SEQ ID NO: 491999 - DNA, 655 bp, Homo sapiens
ggggagacgcaagatggcggcagccgcgaactccggctctatcctcccgctgttcgactgcccaacctgggcaggtaagccccctcccggtttacagtctggatgtactcaaaggagacaagactaattgagaaactgattattgagtgagaagaagtattactgtagtttgggagaaacccctgatctgtagtgactgttaccattgaagcaccagtcttgtctctcgggtccatgactgcacttgtctaccacaagcatctgaagagagttctccctgatagatctcaactagtacacacggcagcttatcttggtgtcacaattcggttggaacctcacaagcactcagcaatattcccatcgattccagcggatctcatattgggtcgcatccctacaaagggcatacagctctgcgcgatgaagtcctcaggactagttgctcatccgtgctggtgaatagggagatcgacgaaagattgggttggcatgacgcgatggatcgacacttccgagggagcctaaactctgggaggcattcccagagggacggggaatacgtgagctctcgactagagcttgcacaggatgtggccaatcaacttgtacccaagaactccgcaggtagttgctgacctggtagcgatgagct

SEQ ID NO: 492000 - DNA, 403 bp, Homo sapiens
tgaggctagaaaggccttggggcgcttcccaagggcagtcctcccgtgcgctgaccactcgccgcctggtctgtggatggagcctgtggggcaaacaagtaaacaggcacacaaaactgtcatgcaatgaacgcagcctaacatcagaaagcttggcatagctacttcccacagcgggaagtgcagtggaaaacacagcaaagccggaacgcacagcctgggcttgtccatgggcgctgctgtggccgggtcggctgggtgtcccgtgatgcatgaagccggttgctgccgaggcctggggcagcgtggaggagggcgatcccagagctctgtgggccataaacacgtggactttattctaggtacctggcagggtttcctaaagggggctgcggggaaaagg

SEQ ID NO: 492001 - DNA, 443 bp, Homo sapiens
gtcgacgcagtagccaggttgtggttacagtgggccctgggtgagaccaagtgctgtctggcttcagatctgactcagcatagtctcaggggtggtggctacaagggtgcttgcatcaccccaaaatcaggcagctcagcacagaaagagagacttcatttctttgggagaaggtgagggaaaagaacaagaggctttccctggtaatccagagaattcttctatatcgaatccaagaccaccaaggtggtatctctatgagtcagcataaaccacagaatgattgggcttggggcatgagttccttagaatacttggaaagctttcccaaaaaagatgagcacagactgcaaagcctacaataaatgcctaactcaacaatgcgcagacactgatgaatgtccacaaagcatcaagaccatccaggaaaacatgacctcact

SEQ ID NO: 492002 - DNA, 921 bp, Homo sapiens
  misc_feature (919)..(919): n is a, c, g, or t
  misc_feature (921)..(921): n is a, c, g, or t
aggtttgtatgtgagagtttaaatctgatgtgaagctcaaaaaaaaaaaaaaaaaaaaaaaaaaaaaaaaaaaaaaaaaaaaaattctcgggggtaattttggggtcccccacttcttgggattttaaaagggcgagagagagcggttccccagtatttagacacccctctttttttaagattggactttcaccctttgccccggtggctcctttatattccaggtccctcgtgatatattggccctggcttggtggctctagggaaatttcacctacattccctttttaaaggggcgtactaaccggtattcccggtgtagctttgggctttccccgggttttttcacacggttttagtggcacaggaaacccttcactttttcaatttacgtgtcccgaatgaggggcgtaatagtgggcggcgaggtcccacaattggggtctcatctttctcaactcggggggtttacgcggtgttaccccttttttttttgcggggttaaatattccccaattaatggtttttttcacctttcgctttgaccccaggctggcaccgttttggttaccccttccgaaggaaatacactcgggcgcctcgggttatttttacattaccactgtgtcgggccattgtgaacggcggctatttttttggggagcgccggggttcttaccgcggtgcgccttgtcccagtccgtgtttacccaaattaccttgggttaattcgcgcgtgcttacttccctggtggcttggccgtcggcttgtggttggaacgcttaattttcggtaccttatttttgctagttcggtgatgcccaggttggtggatggctaaaccgcgaagattacgagggttgcgaacagggttttgggggcaaagtgcctctggcttcgttgtcgatgacctcctcntn

SEQ ID NO: 492003 - DNA, 279 bp, Homo sapiens
  misc_feature (1)..(1): n is a, c, g, or t
  misc_feature (5)..(5): n is a, c, g, or t
  misc_feature (44)..(44): n is a, c, g, or t
  misc_feature (137)..(137): n is a, c, g, or t
  misc_feature (234)..(234): n is a, c, g, or t
  misc_feature (277)..(277): n is a, c, g, or t
ntcgnccccgcccgcgagcccgccccgcacgtcccccgccggcngcaccatgagcacaggcctgcggtacaagagcaagctggcgaccccagaggacaagcaggacattgacaagcagtacgtgggcttcgcacacntgcccaaccaggtgcaccgcaagtcggtgaagaaaggctttgacttcacactcatggtggctggtgagtcaggccctggggaaagtccacactggtncacagccttcttccttgacagactttgtacaaagaacggaaantt

SEQ ID NO: 492004 - DNA, 275 bp, Homo sapiens
attaggttggataggtggggaatctgaagtgggtacattttttaaattttcctgtgtgggtaacacaaggtctacattacacaagacagagttcagggatggaaaggagaatgaccacatgtgggggttcatagttttccttgaatccaccttttaattaccagagtagtgccaaaatgtgatttttgaggtccacagggacctatgaaaccagacactttacacaggcaccccacggggtatgtgatacgtacatgtacaggagtaggggtagt

SEQ ID NO: 492005 - DNA, 313 bp, Homo sapiens
acctttacaggatgaaggaggagactcccctgtgagatgccaaaagaatcttatctgatgggagacatagtacagcttttgtgcatttatgttctgaatgcagtcaacaattctgatctagagtttcaaagtgaaagtacattagcaccataacatgcgtctataaagcctacccaaatcttagtaatcatgaccagcaatgacaagaaaaaagaggagcacctttacaagcagttgatatccactattaaaataattgtggctttaaaaatatttctataactacttgcattacactttacttcttcaacca

SEQ ID NO: 492006 - DNA, 146 bp, Homo sapiens
ttttttttttttccaaagcacattttaatcatttattttaaaagggggattaaagcatttaaactgccaatcctataaactaggacttgaacttcaagggaaaaataaacaaaaactaaatgataaattctttcaaaagcacaaaa

SEQ ID NO: 492007 - DNA, 161 bp, Homo sapiens
cgggtgacgctagaggcctgtttatgagctggaaggagtgagaggggacaaaacccaccttgttggcgcctgcagggtgatgctggcacatgagcccgtcccaggcgcatgtatatgacctggaggtgggtttgcgattggaggctggagccagccttcct

SEQ ID NO: 492008 - DNA, 1380 bp, Homo sapiens
  misc_feature (785)..(785): n is a, c, g, or t
tggctataaaacatttaaggttaccctacaatacaaggtaaacttttatgaaaaaaatttaaagtccccctaaattttctttcagtaaatttatctcacatgtgactatattctcaggcgcagtacaagtgtgggggcccgtgcatctcctttgggtggatgtggatttcccggtggcgtggtgttcccctcacaagtctccataaaaaaaccaggtgtgtgttaagagcgcgggacgctctcctgtgtgtgtctcaagcgcccccgggatataatgtgattcgcccctgtgattttggacattctctgtggggagttatcatccgctctccttctctctcagctcatttttctctgtgaaacctctcttgtgtggcgtgtggccctgtggtgcccccccatatatagacacatttttctcacacacacgcgtgagcctcacatgtgtgaagagggtgtctcatgagagtgtctccatatttaaaggcctatatagagtatattataaagagagcagacacacaggtgtgtgtctactctctctctctgtggcgccccactctctctctatatatttctcacagatatatctcaggtgggagtgagagagcgacacagcgccaaaggggcgtgttgggtgtcggcacacaaaaccgcgtgagagagcgcggagcagcgaagagagccggttctctgtgagagagagagagaggctgtgtacagcaacaagcagcgagaaagagacaccacccccagagtctccacagataatctcccgcagaganagcgtgggaagaaactcccgcacaagaaataaaccccgacgtgataacaccgccggtgtggcccacaccatactccacaagcagcacatcttccagcacatactactcttccgccgggggcgcctattaacaacacgacggacttctattgagaacgccgagagggtgctctactcaccgccgagaggggcggaaccacgaaaggaggcggtgttgataccaccgccgcccctaattaaacagcaggtggcgggccctgaatgggcgcacctattaattgttggggggtggcaacccccccaaagaagaaagagccctcttatcaccaaggttactacttggggggagggacatcccttcggtgcgcccgacgccgcacttatttgtcggaaggcagacattcaatttaccaccccacagagacaggccgaacgtcgcgtgctcgacaacaacccccccaaccaaactatccccacaaatggtatacaaccacgacaaaagtggttattacacaggacgggccctcttgtgaggacccccccccgatggttgtgagagatacaaacccacaacatagcaaagaaacaaccgccag

SEQ ID NO: 492009 - DNA, 694 bp, Homo sapiens
  misc_feature (1)..(1): n is a, c, g, or t
ntcaagtactttgaccagttgctgcctatgtcgggacacaggctccagaagttctgtgcgctcctagctttccactatggcaagctgtgtaaggggttctacgagattccatataacctctaaaagagcgtgtcagtgtatcagtcggtgtcacacgagggcgctgagcatgtcttcatgcgccatctgcgagcccttggggccattgttgtatcagttatgtgtctgggccaccattgtgggttccctgtctggccagctgctacaggagcgggcccagtcctgggatgagcgactgcgcaccctgatggatgagatggctagccggatcctgtactgcctggacaaggtgaagcatcaggtgtcggatgtgctcgcctaactggaggaacaggcccagcatatacgcgtgcaggccgagtctttcctggaccgcctcaagatctggttccagcccttggtgcaaaacatacagtatcagtgggccgggctgatgcagaaggtgtgctttgccgttggctccagagcggtccctgtgctcagttacaatcattgaccgcccaagcctgcagccatgcgacccctcgccctcccgtgcttcctgcctcagcgcagcttgcatcgtggagaccctgtccccgccccagcggtcctctggggtggtccctagtttaataaagattcaccgagtttc

SEQ ID NO: 492010 - DNA, 425 bp, Homo sapiens
aagggctagtgttccagcgatccaagtggaaaatgtacaaccttttatactcagcctctggagtcccaaaatgtcacttccactgcattctcttggtcaagcaagtcactgaggaccaacccagattcaaggggaaggtaatcagattctgcctctcaatgaaagaaatagcagagacttgatggacaactttaacgtgtcacagacagccagagctgcttgatgagattatatgccaatggaacaagcagcagactggtcagcaaatagtccaggggcagaggctaccttgaagaagtgactagaaagcctattgagtagtatagtgaataccgtttgaggactaagctgctgagagtctgaggttgctgccttgtgctctcttggaggattcctgtgatgccccccacctctactaaaaatac

SEQ ID NO: 492011 - DNA, 360 bp, Homo sapiens
aacatctccgccttacgggttcaagtgattctcctgcctcggcttcccgagtggttgggattacaggcccgtgccaacatgcctggctaatttttgtatttttagtagagacggggtttcaccatgttggtcaggctggtcttgatctcctaatctcatgatccgcctgcctcggactcccaaagtgctgggattacaggtgtgagccacggcgcccggcctattcatttctaaaaacttaaacatgcatctcccaagaacaagaatattctccaacagaatcatatcattgttaatctgaagaattttaacactgatatgattctgttggagaatattcttgttcttaggagatgcatg

SEQ ID NO: 492012 - DNA, 515 bp, Homo sapiens
ggcttattttggaaaaaaaaaaaacaaacaaaaaaaaaaaaaaaaaaaaaaaaaaaaaaaaaaaaaaaaaaaaaaaaaaaaaaaaaaaaaaaaaaaaaaaaaaaaaaaaaaaaaaaaaaaaaaaaaaaagggggggcccttttaaaatttcccttggggggcccaaatttacccctccccaattttttttgaaaaaggggcccctttaggggggcctttttaaaccttggccctggcccgttttttaaaaacttggaactggaaaaacctgttatttgggaatttttgaaaggaaccttttttttggggggggaaaaaattggaaaaacttcctcccgaattttaaacctttaagggaaatttaaaatttttaagggttaaaggggtaaaaccaactgaaaaaccttggcgtttaaaaattttgcttaccgggttttatttttaaaaattttttcccccgggccttgggatttaaaagggtggggttttttaaattccaaagcccaagggttttt

SEQ ID NO: 492013 - DNA, 2775 bp, Homo sapiens
  misc_feature (26)..(26): n is a, c, g, or t
  misc_feature (2353)..(2353): n is a, c, g, or t
ggaacgagcgacaagggaaaacaacnaaaaacatacggctaggtacgaggctgggtgttaggcggcagttgtggtggcggagggggacagcgactcccggcccggacaggagttgttagtggcctggaacaccgtgagcaccggcctggtgccgccggctgcgctggggctggtgtcttcccggaccagcggtgcagtcccgccaaaggaagaggagctccgggcggcggtggaggttctgaggggccacgggctacactcggtcctggaggagtggttcgtggaggtgctgcagaacgatctgcaggccaacatctcccctgagttctggaatgccatctcccaatgcgagaactctgcggatgagccccagtgccttttgctactccttgacgcttttggcctgctggagagccgcctggatccctacctgcgtagcctagagctgctggagaaatggactcgcctgggcttgctgatgggcactggtgctcaggggctgcgagaagaagtccacactatgttgcgcggagtcttgttctttagcacccccagaaccttccaagagatgatccagcgtctgtatgggtgcttcttgagagtctatatgcagagtaagaggaagggggaagggggcacagacccggaactggaaggggagctggacagccggtatgcccgtcgccggtactaccggctcctgcagagcccgctgtgtgcagggtgcagcagtgacaagcaacagtgctggtgtcgccaggctctggagcagttccatcagctcagccaggtcttacacaggctcagtctgctggagcgggtcagtgccgaggctgtgaccaccaccctgcaccaggtgacccgggagaggatggaggaccgttgccggggcgagtacgagcgctccttcctgcgtgagttccacaagtggatcgagcgggtggtcggctggctcggcaaggtgttcctgcaggacggccccgccaggcccgcatctcccgaggccggcaacaccctgcgccgctggcgctgccacgtgcaaaggttcttctaccgcatctacgccagcctgcgcatcgaggagctcttcagcatcgtccgagacttcccagactcccggccagccatcgaggacctcaagtactgcctggagaggacggaccagaggcagcagctgctcgtgtccctcaaggctgccctggagactcggctcctgcatccaggcgtcaacacgtgtgacatcatcaccctctatatctctgccatcaaggcgctgcgcgtgctggacccttccatggtcatcctggaggtggcctgtgagcctatccgccgctacctgaggacgcgggaggacacagtgcggcagattgtggctgggctgacgggggactcggacgggacaggggacctggctgttgagctgtccaagaccgacccggcgagcctggagacaggccaggacagtgaggatgactcaggcgagccagaggactgggtcccggaccctgtggatgccgatccagggaagtcgagctccaagcggcgttcatcggacatcatcagcctgctggtcagcatctacggcagcaaggacctcttcatcaatgagtaccgctcgctgctggccgaccgcctgctgcaccagttcagcttcagccccgagcgggagatccgcaacgtggagctgctgaagctgcgctttggcgaggccccaatgcacttctgtgaagtcatgctgaaggacatggcggactcccgccgcatcaatgccaacatccgggaggaggatgagaagcggccagcagaggagcagccaccgttcggggtctacgctgtcatcctgtccagtgagttctggccgcccttcaaggacgagaagctggaggtccccgaggatatcagggcagccctggaggcttactgcaagaagtatgagcagctcaaggccatgcggaccctcagttggaagcacaccctgggcctggtgaccatggacgtggagctggccgaccgcacgctgtctgtggcggtcaccccagtacaggcggtgatcttgctgtattttcaggaccaagccagctggaccctggaggaactgagcaaggcggtgaagatgcccgtggcgctgctgcggcggcggatgtccgtgtggctgcagcagggtgtgctgcgtgaggagccccccggcaccttctctgtcattgaggaggagcggcctcaggaccgggacaacatggtgctcattgacagtgacgacgagagcgactccggcatggcctcccaggccgaccagaaggaggaggagctgctggtgcgcgtgctaggtcccacggggggccagggggcgggggcnaggcctgcaggtgcctgacgggggctggcctgtgtccgcagctcttctggacgtacatccaggccatgctgaccaacctggagagcctctcactggatcgtatctacaacatgctccgcatgtttgtggtgactgggcctgcactggccgagattgacctgcaggagctgcagggctacctgcagaagaaggtgcgggaccagcagctcgtctactcggccggcgtctaccgcctgcccaagaactgcagctgacacatcgcccgcccgcccgcccgcccgccaggcgctgccctgcaggtgctctcgtcctcccgtgccagcccccgcccgcccgtgtcccagaatgcactgctgaggagcatgcccacccccacccccgcagtgtgcagattaaagcaagtcagatcatcaaaaaaaaaa

SEQ ID NO: 492014 - DNA, 297 bp, Homo sapiens
tctacggaatagtagcgactctgctgatgtagatgtaggctcctcccagcagtaaggagatgatgaggactgggatgaagatagccaggggcgtgttacccccttccagcgacgtctctgctgccgcttctgctacttctaaagcatgttcaagaactgtcttgattaactttacacacgggcaggagcccgttccagtgtgatggctgtcccaggatgcagcggatggtcacttgagccatgagttcaaagcctccgtagcacatgaaggtaagggactctcttggcttactttaa

SEQ ID NO: 492015 - DNA, 138 bp, Homo sapiens
agcgcgatgtaagcgcgatcattgccgagctggacaagcaattccctggcgtgcccgagctcggtgaagacatcgagcaattcatggaggttgcccgtgctcagcactggatcgaacttgcctgacctgccaccgaaa

SEQ ID NO: 492016 - DNA, 2574 bp, Homo sapiens
  misc_feature (26)..(26): n is a, c, g, or t
ggaacgagcgacaagggaaaacaacnaaaaacatacggctaggtacgaggctgggtgttaggcggcagttgtggtggcggagggggacagcgactcccggcccggacaggagttgttagtggcctggaacaccgtgagcaccggcctggtgccgccggctgcgctggggctggtgtcttcccggaccagcggtgcagtcccgccaaaggaagaggagctccgggcggcggtggaggttctgaggggccacgggctacactcggtcctggaggagtggttcgtggaggtgctgcagaacgatctgcaggccaacatctcccctgagttctggaatgccatctcccaatgcgagaactctgcggatgagccccagtgccttttgctactccttgacgcttttggcctgctggagagccgcctggatccctacctgcgtagcctagagctgctggagaaatggactcgcctgggcttgctgatgggcactggtgctcaggggctgcgagaagaagtccacactatgttgcgcggagtcttgttctttagcacccccagaaccttccaagagatgatccagcgtctgtatgggtgcttcttgagagtctatatgcagagtaagaggaagggggaagggggcacagacccggaactggaaggggagctggacagccggtatgcccgtcgccggtactaccggctcctgcagagcccgctgtgtgcagggtgcagcagtgacaagcaacagtgctggtgtcgccaggctctggagcagttccatcagctcagccaggtcttacacaggctcagtctgctggagcgggtcagtgccgaggctgtgaccaccaccctgcaccaggtgacccgggagaggatggaggaccgttgccggggcgagtacgagcgctccttcctgcgtgagttccacaagtggatcgagcgggtggtcggctggctcggcaaggtgttcctgcaggacggccccgccaggcccgcatctcccgaggccggcaacaccctgcgccgctggcgctgccacgtgcaaaggttcttctaccgcatctacgccagcctgcgcatcgaggagctcttcagcatcgtccgagacttcccagactcccggccagccatcgaggacctcaagtactgcctggagaggacggaccagaggcagcagctgctcgtgtccctcaaggctgccctggagactcggctcctgcatccaggcgtcaacacgtgtgacatcatcaccctctatatctctgccatcaaggcgctgcgcgtgctggacccttccatggtcatcctggaggtggcctgtgagcctatccgccgctacctgaggacgcgggaggacacagtgcggcagattgtggctgggctgacgggggactcggacgggacaggggacctggctgttgagctgtccaagaccgacccggcgagcctggagacaggccaggacagtgaggatgactcaggcgagccagaggactgggtcccggaccctgtggatgccgatccagggaagtcgagctccaagcggcgttcatcggacatcatcagcctgctggtcagcatctacggcagcaaggacctcttcatcaatgagtaccgctcgctgctggccgaccgcctgctgcaccagttcagcttcagccccgagcgggagatccgcaacgtggagctgctgaagctgcgctttggcgaggccccaatgcacttctgtgaagtcatgctgaaggacatggcggactcccgccgcatcaatgccaacatccgggaggaggatgagaagcggccagcagaggagcagccaccgttcggggtctacgctgtcatcctgtccagtgagttctggccgcccttcaaggacgagaagctggaggtccccgaggatatcagggcagccctggaggcttactgcaagaagtatgagcagctcaaggccatgcggaccctcagttggaagcacaccctgggcctggtgaccatggacgtggagctggccgaccgcacgctgtctgtggcggtcaccccagtacaggcggtgatcttgctgtattttcaggaccaagccagctggaccctggaggaactgagcaaggcggtgaagatgcccgtggcgctgctgcggcggcggatgtccgtgtggctgcagcagggtgtgctgcgtgaggagccccccggcaccttctctgtcattgaggaggagcggcctcaggaccgggacaacatggtgctcattgacagtgacgacgagagcgactccggcatggcctcccaggccgaccagaaggaggaggagctgctgctcttctggacgtacatccaggccatgctgaccaacctggagagcctctcactggatcgtatctacaacatgctccgcatgtttgtggtgactgggcctgcactggccgagattgacctgcaggagctgcagggctacctgcagaagaaggtgcgggaccagcagctcgtctactcggccggcgtctaccgcctgcccaagaactgcagctggccccatggtctcccttaattctactgggttggggtgcctataaattcttt

SEQ ID NO: 492017 - DNA, 1058 bp, Homo sapiens
cacgcgtcgcaacgggatgccacatttcataactgtttttaatggtaaaaaaaaaaaaaaaaaaatacaaaaaaaaattctgaaggacaaaaaaggtgactgctgaactgtgtgtggtttattgttgtacattcccaatcttgcaggacccaagaaagttcgcagttgtgaacagaccctgttcattggagaggcctgtgcagtaaagtgtaaacccttttcattgttactggtacgtggtacaccgtggaatactggtaaacattaccgggtaataataagtgtctcacagttggaaacaggaaaacgcgtggggtcagcagcaagcgtgtagtttttctaaaaagtgttttagattaacacgtttgaggagaaaaaaaaaaagaggggttttccccccaaggttttcgtgtgtgttggacccttacaacaccctgtgaacctctcttttctcttccctcctgttgttggtattgaatttcccctgtgtagatttcccccttctttagacctgtgtttacacccttttagcgcttgacggggattacgcgtgccaggtgtgtgttattattttttgcggtcgtcattggccacattactccttggtctcccccacagttgtgggccctcccttccagagatacccccttttaattagtattgaccagcttacacggtgcggggacccggcacaagcgggagacaccggttttttatatcttgtttgccagaattatttcgccccctttgggtgtgcgatgccgtaaacctgggtcctcgtataaaggttcctgtcgtgtctcagcgccacatcacgcttatagggttaattatacaggagcatgcgaagggaaggacattctaaaacgcggctttgcacaagttccttgtcagcgtagacctctttgtgcagaaccccagtggaattttccggatacacgcggtttgtgttcaccggtgctaactagtgtgtaaccccatatccgtatggcaaagagacacatcgacagaactaatattatgtcatcgatagtcaatcatgtataacaaaggagcgt

SEQ ID NO: 492018 - DNA, 2666 bp, Homo sapiens
  misc_feature (26)..(26): n is a, c, g, or t
ggaacgagcgacaagggaaaacaacnaaaaacatacggctaggtacgaggctgggtgttaggcggcagttgtggtggcggagggggacagcgactcccggcccggacaggagttgttagtggcctggaacaccgtgagcaccggcctggtgccgccggctgcgctggggctggtgtcttcccggaccagcggtgcagtcccgccaaaggaagaggagctccgggcggcggtggaggttctgaggggccacgggctacactcggtcctggaggagtggttcgtggaggtgctgcagaacgatctgcaggccaacatctcccctgagttctggaatgccatctcccaatgcgagaactctgcggatgagccccagtgccttttgctactccttgacgcttttggcctgctggagagccgcctggatccctacctgcgtagcctagagctgctggagaaatggactcgcctgggcttgctgatgggcactggtgctcaggggctgcgagaagaagtccacactatgttgcgcggagtcttgttctttagcacccccagaaccttccaagagatgatccagcgtctgtatgggtgcttcttgagagtctatatgcagagtaagaggaagggggaagggggcacagacccggaactggaaggggagctggacagccggtatgcccgtcgccggtactaccggctcctgcagagcccgctgtgtgcagggtgcagcagtgacaagcaacagtgctggtgtcgccaggctctggagcagttccatcagctcagccaggtcttacacaggctcagtctgctggagcgggtcagtgccgaggctgtgaccaccaccctgcaccaggtgacccgggagaggatggaggaccgttgccggggcgagtacgagcgctccttcctgcgtgagttccacaagtggatcgagcgggtggtcggctggctcggcaaggtgttcctgcaggacggccccgccaggcccgcatctcccgaggccggcaacaccctgcgccgctggcgctgccacgtgcaaaggttcttctaccgcatctacgccagcctgcgcatcgaggagctcttcagcatcgtccgagacttcccagactcccggccagccatcgaggacctcaagtactgcctggagaggacggaccagaggcagcagctgctcgtgtccctcaaggctgccctggagactcggctcctgcatccaggcgtcaacacgtgtgacatcatcaccctctatatctctgccatcaaggcgctgcgcgtgctggacccttccatggtcatcctggaggtggcctgtgagcctatccgccgctacctgaggacgcgggaggacacagtgcggcagattgtggctgggctgacgggggactcggacgggacaggggacctggctgttgagctgtccaagaccgacccggcgagcctggagacaggccaggacagtgaggatgactcaggcgagccagaggactgggtcccggaccctgtggatgccgatccagggaagtcgagctccaagcggcgttcatcggacatcatcagcctgctggtcagcatctacggcagcaaggacctcttcatcaatgagtaccgctcgctgctggccgaccgcctgctgcaccagttcagcttcagccccgagcgggagatccgcaacgtggagctgctgaagctgcgctttggcgaggccccaatgcacttctgtgaagtcatgctgaaggacatggcggactcccgccgcatcaatgccaacatccgggaggaggatgagaagcggccagcagaggagcagccaccgttcggggtctacgctgtcatcctgtccagtgagttctggccgcccttcaaggacgagaagctggaggtccccgaggatatcagggcagccctggaggcttactgcaagaagtatgagcagctcaaggccatgcggaccctcagttggaagcacaccctgggcctggtgaccatggacgtggagctggccgaccgcacgctgtctgtggcggtcaccccagtacaggcggtgatcttgctgtattttcaggaccaagccagctggaccctggaggaactgagcaaggcggtgaagatgcccgtggcgctgctgcggcggcggatgtccgtgtggctgcagcagggtgtgctgcgtgaggagccccccggcaccttctctgtcattgaggaggagcggcctcaggaccgggacaacatggtgctcattgacagtgacgacgagagcgactccggcatggcctcccaggccgaccagaaggaggaggagctgctgctcttctggacgtacatccaggccatgctgaccaacctggagagcctctcactggatcgtatctacaacatgctccgcatgtttgtggtgactgggcctgcactggccgagattgacctgcaggagctgcagggctacctgcagaagaaggtgcgggaccagcagctcgtctactcggccggcgtctaccgcctgcccaagaactgcagctgcgccaggcgctgccctgcaggtgctctcgtcctcccgtgccagcccccgcccgcccgtgtcccagaatgcactgctgaggagcatgcccacccccacccccgcagtgtgcagattaaagcaagtcagatcatcaaaaaaaaaa

SEQ ID NO: 492019 - DNA, 242 bp, Homo sapiens
tttcagcatcctaggaatttttaaactaaaagcaaaatgttttttccagtttgtttttttcaaggaattactattgttccttttgtcccaggtaaaatcagtgttgggaattataattttagaaaaatatttccccgtaaccttgaatgtagatggctaaacgatttttactcagtgtgatgtataattatgcaacaggggcccttgtaaattgtcatacgccaataaaatgtcccaagtta

SEQ ID NO: 492020 - DNA, 1844 bp, Homo sapiens
gggtggctgtagctctccagctctagcagccgggctcaccatgcctccctgcatgctcacactagctgttctcctgacagtggatcgagcgggtggtcggctggctcggcaaggtgttcctgcaggacggccccgccaggcccgcatctcccgaggccggcaacaccctgcgccgctggcgctgccacgtgcaaaggttcttctaccgcatctacgccagcctgcgcatcgaggagctcttcagcatcgtccgagacttcccagactcccggccagccatcgaggacctcaagtactgcctggagaggacggaccagaggcagcagctgctcgtgtccctcaaggctgccctggagactcggctcctgcatccaggcgtcaacacgtgtgacatcatcaccctctatatctctgccatcaaggcgctgcgcgtgctggacccttccatggtcatcctggaggtggcctgtgagcctatccgccgctacctgaggacgcgggaggacacagtgcggcagattgtggctgggctgacgggggactcggacgggacaggggacctggctgttgagctgtccaagaccgacccggcgagcctggagacaggccaggacagtgaggatgactcaggcgagccagaggactgggtcccggaccctgtggatgccgatccagggaagtcgagctccaagcggcgttcatcggacatcatcagcctgctggtcagcatctacggcagcaaggacctcttcatcaatgagtaccgctcgctgctggccgaccgcctgctgcaccagttcagcttcagccccgagcgggagatccgcaacgtggagctgctgaagctgcgctttggcgaggccccaatgcacttctgtgaagtcatgctgaaggacatggcggactcccgccgcatcaatgccaacatccgggaggaggatgagaagcggccagcagaggagcagccaccgttcggggtctacgctgtcatcctgtccagtgagttctggccgcccttcaaggacgagaagctggaggtccccgaggatatcagggcagccctggaggcttactgcaagaagtatgagcagctcaaggccatgcggaccctcagttggaagcacaccctgggcctggtgaccatggacgtggagctggccgaccgcacgctgtctgtggcggtcaccccagtacaggcggtgatcttgctgtattttcaggaccaagccagctggaccctggaggaactgagcaaggcggtgaagatgcccgtggcgctgctgcggcggcggatgtccgtgtggctgcagcagggtgtgctgcgtgaggagccccccggcaccttctctgtcattgaggaggagcggcctcaggaccgggacaacatggtgctcattgacagtgacgacgagagcgactccggcatggcctcccaggccgaccagaaggaggaggagctgctgctcttctggacgtacatccaggccatgctgaccaacctggagagcctctcactggatcgtatctacaacatgctccgcatgtttgtggtgactgggcctgcactggccgagattgacctgcaggagctgcagggctacctgcagaagaaggtgcgggaccagcagctcgtctactcggccggcgtctaccgcctgcccaagaactgcagctgacacatcgcccgcccgcccgcccgcccgccaggcgctgccctgcaggtgctctcgtcctcccgtgccagcccccgcccgcccgtgtcccagaatgcactgctgaggagcatgcccacccccacccccgcagtgtgcagattaaagcaagtcagatcatcaaaaaaaaaa

SEQ ID NO: 492021 - DNA, 1847 bp, Homo sapiens
gcatgtccaggtagcctggggcctagtctgccagccctggacttgtaggtctaaggaagaaatgggttgagaagcaattggtgaggtccttaggggatctgaggtgcccgtcagcttgcttgtttcttctttggagggagtcaggactgaccggtaggtctgaggtgatgagacttagttctctcagaacagacctccctgcagggcgggacctgtgaacaggtagaggtggggatggggggacaagggaacgaggctgcagtggggacctgtagaccacctaccggcatggccagctgtctactcgggtgttgcccctgggaggctgtggtcccgggtactgcatggctgccctggagactcggctcctgcatccaggcgtcaacacgtgtgacatcatcaccctctatatctctgccatcaaggcgctgcgcgtgctggacccttccatggtcatcctggaggtggcctgtgagcctatccgccgctacctgaggacgcgggaggacacagtgcggcagattgtggctgggctgacgggggactcggacgggacaggggacctggctgttgagctgtccaagaccgacccggcgagcctggagacaggccaggacagtgaggatgactcaggcgagccagaggactgggtcccggaccctgtggatgccgatccagggaagtcgagctccaagcggcgttcatcggacatcatcagcctgctggtcagcatctacggcagcaaggacctcttcatcaatgagtaccgctcgctgctggccgaccgcctgctgcaccagttcagcttcagccccgagcgggagatccgcaacgtggagctgctgaagctgcgctttggcgaggccccaatgcacttctgtgaagtcatgctgaaggacatggcggactcccgccgcatcaatgccaacatccgggaggaggatgagaagcggccagcagaggagcagccaccgttcggggtctacgctgtcatcctgtccagtgagttctggccgcccttcaaggacgagaagctggaggtccccgaggatatcagggcagccctggaggcttactgcaagaagtatgagcagctcaaggccatgcggaccctcagttggaagcacaccctgggcctggtgaccatggacgtggagctggccgaccgcacgctgtctgtggcggtcaccccagtacaggcggtgatcttgctgtattttcaggaccaagccagctggaccctggaggaactgagcaaggcggtgaagatgcccgtggcgctgctgcggcggcggatgtccgtgtggctgcagcagggtgtgctgcgtgaggagccccccggcaccttctctgtcattgaggaggagcggcctcaggaccgggacaacatggtgctcattgacagtgacgacgagagcgactccggcatggcctcccaggccgaccagaaggaggaggagctgctgctcttctggacgtacatccaggccatgctgaccaacctggagagcctctcactggatcgtatctacaacatgctccgcatgtttgtggtgactgggcctgcactggccgagattgacctgcaggagctgcagggctacctgcagaagaaggtgcgggaccagcagctcgtctactcggccggcgtctaccgcctgcccaagaactgcagctgacacatcgcccgcccgcccgcccgcccgccaggcgctgccctgcaggtgctctcgtcctcccgtgccagcccccgcccgcccgtgtcccagaatgcactgctgaggagcatgcccacccccacccccgcagtgtgcagattaaagcaagtcagatcatcaaaaaaaaaa

SEQ ID NO: 492022 - DNA, 221 bp, Homo sapiens
tgaggctcccctctcaaccctcaagtagccgggactataggcattaccacgcctggctaattgttgtattttttgttttgtagagtcggagtttcaccgtgttgtccaggctgctctcgaactcctgggctcaagtgagccgtctgcctcggcctcccaaagtgctgggattacaggcttgagctaccatgcccggaggcccttttcatagatcttgtaca

SEQ ID NO: 492023 - DNA, 357 bp, Homo sapiens
gggcctgagtgctgtttgagttgtgcagggaggtggtcttgtggtgcctgagccacttccctccccagcaggcttcctgggcttctcgcccctcctggctgtgagcttgccaacaacccaaacccttggcctggtggtttgcaatggacagattgaatttgctacttcccagttatgtgccttgagcaaatctaggcttggagccccagtttgtaaaatgagggtcgtttgcaaatataaggccaaagggagaagcagcctataagcttttcaggacaatttgttaaggtgagcttttagtgagcaagatactttcacatacctctcctcgcgtccacaggggcttttttcagggag

SEQ ID NO: 492024 - DNA, 1768 bp, Homo sapiens
  misc_feature (26)..(26): n is a, c, g, or t
ggaacgagcgacaagggaaaacaacnaaaaacatacggctaggtacgaggctgggtgttaggcggcagttgtggtggcggagggggacagcgactcccggcccggacaggagttgttagtggcctggaacaccgtgagcaccggcctggtgccgccggctgcgctggggctggtgtcttcccggaccagcggtgcagtcccgccaaaggaagaggagctccgggcggcggtggaggttctgaggggccacgggctacactcggtcctggaggagtggttcgtggaggtgctgcagaacgatctgcaggccaacatctcccctgagttctggaatgccatctcccaatgcgagaactctgcggatgagccccagtgccttttgctactccttgacgcttttggcctgctggagagccgcctggatccctacctgcgtagcctagagctgctggagaaatggactcgcctgggcttgctgatgggcactggtgctcaggggctgcgagaagaagtccacactatgttgcgcggagtcttgttctttagcacccccagaaccttccaagagatgatccagcgtctgtatgggtgcttcttgagagtctatatgcagagtaagaggaagggggaagggggcacagacccggaactggaaggggagctggacagccggtatgcccgtcgccggtactaccggctcctgcagagcccgctgtgtgcagggtgcagcagtgacaagcaacagtgctggtgtcgccaggctctggagcagttccatcagctcagccaggtcttacacaggctcagtctgctggagcgggtcagtgccgaggctgtgaccaccaccctgcaccaggtgacccgggagaggatggaggaccgttgccggggcgagtacgagcgctccttcctgcgtgagttccacaagtggatcgagcgggtggtcggctggctcggcaaggtgttcctgcaggacggccccgccaggcccgcatctcccgaggccggcaacaccctgcgccgctggcgctgccacgtgcaaaggttcttctaccgcatctacgccagcctgcgcatcgaggagctcttcagcatcgtccgagacttcccagactcccggccagccatcgaggacctcaagtactgcctggagaggacggaccagaggcagcagctgctcgtgtccctcaaggctgccctggagactcggctcctgcatccaggcgtcaacacgtgtgacatcatcaccctctatatctctgccatcaaggcgctgcgcgtgctggacccttccatggtcatcctggaggtggcctgtgagcctatccgccgctacctgaggacgcgggaggacacagtgcggcagattgtggctgggctgacgggggactcggacgggacaggggacctggctgttgagctgtccaagaccgacccggcgagcctggagacaggccaggacagtgaggatgactcaggcgagccagaggactgggtcccggaccctgtggatgccgatccagggaagtcgagctccaagcggcgttcatcggacatcatcagcctgctggtcagcatctacggcagcaaggacctcttcatcaatgagtaccgctcgctgctggccgaccgcctgctgcaccagttcagaattgccccgaagtccagaattgccccgaagtccagaattgccccgagtccagaattgccccgaagtccagaattgccccgaagtccagaattgccccgaagtccagaattgccccga

SEQ ID NO: 492025 - DNA, 1502 bp, Homo sapiens
  misc_feature (26)..(26): n is a, c, g, or t
ggaacgagcgacaagggaaaacaacnaaaaacatacggctaggtacgaggctgggtgttaggcggcagttgtggtggcggagggggacagcgactcccggcccggacaggagttgttagtggcctggaacaccgtgagcaccggcctggtgccgccggctgcgctggggctggtgtcttcccggaccagcggtgcagtcccgccaaaggaagaggagctccgggcggcggtggaggttctgaggggccacgggctacactcggtcctggaggagtggttcgtggaggtgctgcagaacgatctgcaggccaacatctcccctgagttctggaatgccatctcccaatgcgagaactctgcggatgagccccagtgccttttgctactccttgacgcttttggcctgctggagagccgcctggatccctacctgcgtagcctagagctgctggagaaatggactcgcctgggcttgctgatgggcactggtgctcaggggctgcgagaagaagtccacactatgttgcgcggagtcttgttctttagcacccccagaaccttccaagagatgatccagcgtctgtatgggtgcttcttgagagtctatatgcagagtaagaggaagggggaagggggcacagacccggaactggaaggggagctggacagccggtatgcccgtcgccggtactaccggctcctgcagagcccgctgtgtgcagggtgcagcagtgacaagcaacagtgctggtgtcgccaggctctggagcagttccatcagctcagccaggtcttacacaggctcagtctgctggagcgggtcagtgccgaggctgtgaccaccaccctgcaccaggtgacccgggagaggatggaggaccgttgccggggcgagtacgagcgctccttcctgcgtgagttccacaagtggatcgagcgggtggtcggctggctcggcaaggtgttcctgcaggacggccccgccaggcccgcatctcccgaggccggcaacaccctgcgccgctggcgctgccacgtgcaaaggttcttctaccgcatctacgccagcctgcgcatcgaggagctcttcagcatcgtccgagacttcccagactcccggccagccatcgaggacctcaagtactgcctggagaggacggaccagaggcagcagctgctcgtgtccctcaaggctgccctggagactcggctcctgcatccaggcgtcaacacgtgtgacatcatcaccctctatatctctgccatcaaggcgctgcgcgtgctggacccttccatggtcatcctggaggtggcctgtgagcctatccgccgctacctgaggacgcgggaggacacagtcgccaggcgctgccctgcaggtgctctcgtcctcccgtgccagcccccgcccgcccgtgtcccagaatgcactgctgaggagcatgcccacccccacccccgcagtgtgcagattaaagcaagtcagatcatcaaaaaaaaaa

SEQ ID NO: 492026 - DNA, 930 bp, Homo sapiens
  misc_feature (13)..(13): n is a, c, g, or t
  misc_feature (80)..(80): n is a, c, g, or t
  misc_feature (89)..(89): n is a, c, g, or t
  misc_feature (144)..(144): n is a, c, g, or t
  misc_feature (220)..(220): n is a, c, g, or t
  misc_feature (317)..(318): n is a, c, g, or t
  misc_feature (332)..(332): n is a, c, g, or t
  misc_feature (342)..(343): n is a, c, g, or t
cacgagatcaagncagcagaggccgctcatgatggcagctcaaaaaataacccaccaatcagagtccgtgtcctgtgacngtggcgcgntcggatgcagaggagcttctcagtgcgttcctcctcatctcggaacctgccaccncactcaagcgcgacataggccagacagccaggacggccgcagcgagcgcaacacgaggcccgtcgacatcctgagncccccgcgcctgtcgccgagtcccggcttggggagtgtccccgggccacactggtcctgctcccggctgtgtgatcaaccaggcgcgtggctccaannacggggaccagganctggtgtgannaaaatttaccataggagacgcccatacttgcagctcacgcctttgtctggtgccctggcctcacacctataggaattgggtacctgggggcctcttcatctttacttgtctcagcttagagaagcccagctacacttcctccatgcctggattcatgcacggccccacagggtgaggcctggacaccctcacgggcactggggctccacggatgcagaaggcagcctggcccggtagctcgggggtctgagatggaggtggagtaagacagagtgacaaaggctgcgtcctggaggcaggctcggagcctccctgagctcagagagcccgcgtgcgccaggaagccacacctgcaggacccgagtcggaactcagaggctggtacagccgcggtgcttgtcctgtagataagaatggcctcctctggcggccaaagttaattaaactgacaatcttgataagttgcacagttacctgctcggggacaaagaagatgggagccttgtttgtggtttcttcttgttctttcctgtgccccacagtcattttaaaattaaattaaatggcttatctgcactaaaagagga

SEQ ID NO: 492027 - DNA, 159 bp, Homo sapiens
tcttaagatcccccgcgtaaatagtaacgaaaacggaaaaccatatatcatgtagagatatataaaacacaagagccaataggcatagtaatatcccggtacatcacacactcacataaaatgtgtaaagagctcaagcactatcaatccaaagggtca

SEQ ID NO: 492028 - DNA, 829 bp, Homo sapiens
  misc_feature (2)..(2): n is a, c, g, or t
tntcggcagaggggcccctgtagccttttcgggacacaccttatgatgctggccccattgcccttccatggtggctgagcaggccatgcggaccctcagttggaagcacaccctgggcctggtgaccatggacgtggagctggccgaccgcacgctgtctgtggcggtcaccccagtacaggcggtgatcttgctgtattttcaggaccaagccagctggaccctggaggaactgagcaaggcggtgaagatgcccgtggcgctgctgcggcggcggatgtccgtgtggctgcagcagggtgtgctgcgtgaggagccccccggcaccttctctgtcattgaggaggagcggcctcaggaccgggacaacatggtgctcattgacagtgacgacgagagcgactccggcatggcctcccaggccgaccagaaggaggaggagctgctgctcttctggacgtacatccaggccatgctgaccaacctggagagcctctcactggatcgtatctacaacatgctccgcatgtttgtggtgactgggcctgcactggccgagattgacctgcaggagctgcagggctacctgcagaagaaggtgcgggaccagcagctcgtctactcggccggcgtctaccgcctgcccaagaactgcagctgacacatcgcccgcccgcccgcccgcccgccaggcgctgccctgcaggtgctctcgtcctcccgtgccagcccccgcccgcccgtgtcccagaatgcactgctgaggagcatgcccacccccacccccgcagtgtgcagattaaagcaagtcagatcatcaaaaaaaaaa

SEQ ID NO: 492029 - DNA, 931 bp, Homo sapiens
  misc_feature (13)..(13): n is a, c, g, or t
  misc_feature (80)..(80): n is a, c, g, or t
  misc_feature (89)..(89): n is a, c, g, or t
  misc_feature (144)..(144): n is a, c, g, or t
  misc_feature (220)..(220): n is a, c, g, or t
  misc_feature (317)..(318): n is a, c, g, or t
  misc_feature (332)..(332): n is a, c, g, or t
  misc_feature (342)..(343): n is a, c, g, or t
cacgagatcaagncagcagaggccgctcatgatggcagctcaaaaaataacccaccaatcagagtccgtgtcctgtgacngtggcgcgntcggatgcagaggagcttctcagtgcgttcctcctcatctcggaacctgccaccncactcaagcgcgacataggccagacagccaggacggccgcagcgagcgcaacacgaggcccgtcgacatcctgagncccccgcgcctgtcgccgagtcccggcttggggagtgtccccgggccacactggtcctgctcccggctgtgtgatcaaccaggcgcgtggctccaannacggggaccagganctggtgtgannaaaatttaccataggagacgcccatacttgcagctcacgcctttgtctggtgccctggcctcacacctataggaattgggtacctgggggcctcttcatctttacttgtctcagcttagagaagcccagctacacttcctccatgcctggattcatgcacggccccacagggtgaggcctggacaccctcacgggcactggggctccacggatgcagaaggcagcctggcccggtagctcgggggtctgagatggaggtggagtaagacagagtgacaaaggctgcgtcctggaggcaggctcggagcctccctgagctcagagagcccgcgtgcgccaggaagccacacctgcaggacccgagtcggaactcagaggctggtacagccgcggtgcttgtcctgtagataagaatggcctcctctggcggccaaagttaattaaactgacaatcttgataagttgcacaagtttccctgctcgggggaccaaagaagaatggggagccccttggtttgggggttttcttttttggttcttttcccttgtgccccccacaattcattttttaaaaattaaaattaaaat

SEQ ID NO: 492030 - DNA, 1230 bp, Homo sapiens
  misc_feature (12)..(12): n is a, c, g, or t
tcgccgcgcgcngcgccgagcgaatctcggagtcggtgggtgcagatggcggcggcagttgtggtggcggagggggacagcgactcccggcccggacaggagttgttagtggcctggaacaccgtgagcaccggcctggtgccgccggctgcgctggggctggtgtcttcccggaccagcggtgcagtcccgccaaaggaagaggagctccgggcggcggtggaggttctgaggggccacgggctacactcggtcctggaggagtggttcgtggaggtgctgcagaacgatctgcaggccaacatctcccctgagttctggaatgccatctcccaatgcgagaactctgcggatgagccccagtgccttttgctactccttgacgcttttggcctgctggagagccgcctggatccctacctgcgtagcctagagctgctggagaaatggactcgcctgggcttgctgatgggcactggtgctcaggggctgcgagaagaagtccacactatgttgcgcggagtcttgttctttagcacccccagaaccttccaagagatgatccagcgtctgtatgggtgcttcttgagagtctatatgcagagtaagaggaagggggaagggggcacagacccggaactggaaggggagctggacagccggtatgcccgtcgccggtactaccggctcctgcagagcccgctgtgtgcagggtgcagcagtgacaagcaacagtgctggtgtcgccaggctctggagcagttccatcagctcagccaggtcttgtgagtagtctgtcccgatggccatgcccttgctccttctggttccccgctgctcccctgggtccagctggcctcagcagaaagctggtgagccgtcctgataaccaggaacatgacagagagagagtcccagggattcctgtgcagcgtgtcctggacacaggtgtctctcttctgtcactcaccttcagtcccacagattcatgccttgaccctggtaaggccctatgtggcttgtgtctgcagcagcaaatttcttagcaactccaaacttcctggactctgcagaattccactgtgccttttgtcgatcctggggaggaatgattctcaccctcgtcgacattccttgccctgtaattgtgaacagaagcttgctgctgcttctctccaggaagatcaggtcactgtgagggcaagcagtctcttgtcagttttggagagg

SEQ ID NO: 492031 - DNA, 731 bp, Homo sapiens
  misc_feature (12)..(12): n is a, c, g, or t
tcgccgcgcgcngcgccgagcgaatctcggagtcggtgggtgcagatggcggcggcagttgtggtggcggagggggacagcgactcccggcccggacaggagttgttagtggcctggaacaccgtgagcaccggcctggtgccgccggctgcgctggggctggtgtcttcccggaccagcggtgcagtcccgccaaaggaagaggagctccgggcggcggtggaggttctgaggggccacgggctacactcggtcctggaggagtggttcgtggaggtgctgcagaacgatctgcaggccaacatctcccctgagttctggaatgccatctcccaatgcgagaactctgcggatgagccccagtgccttttgctactccttgacgcttttggcctgctggagagccgcctggatccctacctgcgtagcctagagctgctggagaaatggactcgcctgggcttgctgatgggcactggtgctcaggggctgcgagaagaagtccacactatgttgcgcggagtcttgttctttagcacccccagaaccttccaagagatgatccagcgtctgtatgggtgcttcttgagagtctatatgcagagtaagaggaagggggaagggggcacagaccccgcccgcccgtgtcccagaatgcactgctgaggagcatgcccacccccacccccgcagtgtgcagattaaagcaagtcagatcatcaaaaaaaaaa

SEQ ID NO: 492032 - DNA, 128 bp, Homo sapiens
  misc_feature (11)..(11): n is a, c, g, or t
  misc_feature (101)..(101): n is a, c, g, or t
gggaataagancttccacgaggtgatgctggctctcacagtcttagaaacctgtgtcaagaactgcgggcaccgtttccacgtgctggtggccagccaggncttcgtggagagtgtgctggtgaggac

SEQ ID NO: 492033 - DNA, 209 bp, Homo sapiens
  misc_feature (13)..(13): n is a, c, g, or t
  misc_feature (16)..(17): n is a, c, g, or t
  misc_feature (27)..(27): n is a, c, g, or t
  misc_feature (30)..(30): n is a, c, g, or t
  misc_feature (46)..(46): n is a, c, g, or t
  misc_feature (55)..(55): n is a, c, g, or t
  misc_feature (63)..(63): n is a, c, g, or t
  misc_feature (74)..(74): n is a, c, g, or t
  misc_feature (76)..(76): n is a, c, g, or t
  misc_feature (83)..(83): n is a, c, g, or t
  misc_feature (86)..(86): n is a, c, g, or t
  misc_feature (94)..(94): n is a, c, g, or t
  misc_feature (104)..(104): n is a, c, g, or t
  misc_feature (107)..(107): n is a, c, g, or t
  misc_feature (117)..(117): n is a, c, g, or t
  misc_feature (119)..(119): n is a, c, g, or t
  misc_feature (124)..(124): n is a, c, g, or t
  misc_feature (143)..(143): n is a, c, g, or t
  misc_feature (172)..(172): n is a, c, g, or t
  misc_feature (176)..(176): n is a, c, g, or t
  misc_feature (204)..(204): n is a, c, g, or t
ctgaatattaatncanngctttccgangcngtaactaagtcctccncgcggtttnttttctcngttaagccagntnttaactnggnttttttcngcataaaacngangactcaagangnatcangcactgtatacagaaacgngctgcgtatcctacagaaagctacagacngccnggggtcagaatcattcggattgtttcangttcc

SEQ ID NO: 492034 - DNA, 174 bp, Homo sapiens
  misc_feature (18)..(18): n is a, c, g, or t
  misc_feature (23)..(23): n is a, c, g, or t
  misc_feature (57)..(57): n is a, c, g, or t
  misc_feature (63)..(63): n is a, c, g, or t
  misc_feature (108)..(108): n is a, c, g, or t
aggggagaatccacatantcaanacatagctttcttaaggagatggagctatttaantttagnaagggcagctgctcttctttctgtgttctgaaacaaggcacgaantaaagcttttacttcactggaagagaaagcagctgccaggggtccttttccatctgcccaccgatc

SEQ ID NO: 492035 - DNA, 399 bp, Homo sapiens
acgaggtgatttctgcctctagttcattgtccagttaacttcagtgagcctttcaaagttgacattgtaaataaaacaacttaagaaaagtatgctgaaatagaattaacaaaacatgatacttgttcatgaatcggaaactggaatagggcagcttgaagttaaccatgtgggtgtcttccaacctctatgctgctggtaacttgagtgcagctgggctctcttaattggatctgaggccttgttttttctttttttttttcttttttttttttttaatcttctcagctttgaatatgttgcctagagatttagtttactacccagtttgtggttttggagtgggaactgtaactcaacaatttgttagcttttcaattaaaaaagacacttacttca

SEQ ID NO: 492036 - DNA, 466 bp, Homo sapiens
atagtgacatgtaattgaaattgattaaatagttacctatagactaagggagcctacgttaaagtgcttattgttggcgtattttaactttatagcgaataccacgcaatgcaatgagcccgctgacgctgcggggttgccgcgaccggcagggctgattaaccccacaaagaaattgggacttatttagccgccgaccaagtgcaagtgcaaaatatatgtagttgagcagtataatggtggtgctgctagtataaaatagcaattacagtttgtatttatttatactaattaaccccaaagcgggacgagggcataattttggtactacgagccagacgcctgtatggttaaattaacaaggcaaaattaaggtttacgatgcgtactacatactacatggtgcttttaaagaagggtatggaatggaagtgaaacgcagacttgatacaaattacttgccgtg

SEQ ID NO: 492037 - DNA, 459 bp, Homo sapiens
gcactatgtagattgttcacaactcgtacatgcttaggtgataatgctattaggtatcatggcccactacagtaatctaatgcttacctgggtcaaggcatgacacatatctctacgcaataatatgacagaagcaaccaggttttctccgccgttatctgtcatccccagcctcattcagactgtgccgtattataatagagcactctgaaatgtggagcacccccatcttttgcatacgcgtctcgttagtgaactcatgaacagcacatggtcaaacaagcgttgtccgcactgcgctactgcaggattcgaaagccttaactgtttacccagcggtgcggtatgaaaccaatatcagctttaaattatctaaacgcaccacgcgtttgacatgcatattttgaaggacttataccacccggcaaccgttagggcaggccccggacctcatgtcgc

SEQ ID NO: 492038 - DNA, 134 bp, Homo sapiens
tccaagtgtcgcgttatctcatctaatcttacagatactttcctacccccctgtagtgtggatccgtcataggagctcgggaacctcgcaaagtgcgatcgcgagagtctctcgggcacttcggacactgttcc

SEQ ID NO: 492039 - DNA, 390 bp, Homo sapiens
ggtagagctgagagtgcggagtgtgtgctgcgggctcggaacacacatgtatgattaaaaaatccaaatcagatctaaaggaatcttttaaaaaaccgcaagaacatttacaagtccgcggcttccccgacggagacttatattttatttcttcctctcttattaacccggtgaagcagccgagaccgacccgaccgaccgtgggcccgcagcagctgcaagaaggaaccacgagaccgagggcttaccgctggccggacccgacaccgtcaccctcgcttcccgacggcagacggtagacagcgcgagaggaacgacccaggtctgaggccgttgagtagttatcttccggatgattgttgaccctctgcgcttgctccccgctcattt

SEQ ID NO: 492040 - DNA, 743 bp, Homo sapiens
  misc_feature (1)..(1): n is a, c, g, or t
nctgcctgcctcctaaagtgctgggattacagtcgtgagccactgcgcctggccccgagtgcctgtcttatggatgtattgaatgctgctgtgtacaagatcacatgggaagtatgaaacacaagagactgtatgtttttaccgtgtaggagcttatagtgcaattgcggaaacaatgcatgtactgaaacgataatttatttggttatatatgcagtgtaagtgctagcaactactggggttattgacaggaaatcagaggaaagctgtagccttgtaattaagtcagaagagcttcatggatgacatggaagttgaagtgggacttacatgatgcctgtattgaaattgcataagggaacttcaagcaaggggactggtctgagcaaaggcatacaaagagatggggaagctaaaggtaggtttgggagttcagagtggacaagtctggctcgctggaggggaaatttggagtctagttttggagggtgttgaagagcagagtttgactttaacttgaggaaaatagggaactttggaccgttttgggcagattgaagcagtaaatggtttatgttgtgctacagcatataggattctttggaggagagagacaggctgttcttttccaggaatacactttgttagcaggaagggaccagactcgtagggacagtgggaagacaactttcattcaggaaaactatgtaggaaaaaatcagtagtcagacatgactgcacgt

SEQ ID NO: 492041 - DNA, 845 bp, Homo sapiens
  misc_feature (26)..(26): n is a, c, g, or t
ggagtaagtcttatagatgaacgaantcagcgcttgaacttactagcagataccgctcgcgcccgttgggacctttttcacataattcgctgccgaacggatcctccccggtaaaagactgtactgaaaccgtgtgtgttaaacacccgcgggtccccacaaccgggttcggaaccatatttacgggccccccgaaaaggggaaccaccaccacaaggagtgtcgagtccccgaaaagccgggccctttcccagaaaggctcgtgaatctgcgcaaaaattaaaggggaaggatacccccgggggggagcacaagtcgtggaagacacccctgcggaaggccccccctaaatggccagcacggaaaccggtgtacaaatcggggaaaaagcagagcgggaaacaacaaagggggggtaacccacacccggggtaaacagggccctaagtaccaccaagagtgtccccccggtagtcacctccggaagccgcagacccccaacgggcgggcccagcagaagatgtgttttaacaagaaattgcttcaacaatgcattgcgtatctttgagcgcacccacttattaaccccgggggggaatccacagatgtgcgactccccacagggcacaccgcgactttgggaacttgatgtatcttctggggagcttatatagatgtggacaaactgatctgtccactaacaaggaattaattggggaccggacaacaatatagttgccgccgaaatgggatgcaaccacccctttctgattaaagccaatcaatttcccctttctcctgcggggaattatttacaaaaaaaaatttttttcaacccaaataac

SEQ ID NO: 492042 - DNA, 275 bp, Homo sapiens
tgcagcttccccatcgtcactctttaggcacaaatgcaggtgcagcttccccatccccactcttagggcacaaatgcaggtgcagctttcccatccccactcttagggcacaaatgcaggtgcagcttccccatccccactcttagggcacaaatgcaggtgcagcttccccatccccactcttagggcacaaatgcaggtgcagcttccccatccccactctttaggcacaaatgcaggtgcagcttccccatccccactcttagggcacaaat

SEQ ID NO: 492043 - DNA, 769 bp, Homo sapiens
  misc_feature (136)..(136): n is a, c, g, or t
  misc_feature (334)..(334): n is a, c, g, or t
  misc_feature (339)..(340): n is a, c, g, or t
  misc_feature (352)..(353): n is a, c, g, or t
  misc_feature (559)..(559): n is a, c, g, or t
  misc_feature (572)..(572): n is a, c, g, or t
tctccacactgggtgacagagtgagaccctgctcagacgaaacaaaacaaaaaaaacctcaggacatcaggctaccgtgggccaacattccatctggtaataactggcaatcagctgggctgggtggccactgtcntctttagatgggatctgctctgcactctacttcgcagtcaccacgtttcttgatcatctcccgacacccagctagcttcccttgtttgaaatttttgtttggtctctgtgggtatttgagttctcaaaacttgagtgtccatcagaactacctgagatcctattaaaacgcagattctgccaggcgcggaggctcaanaaaannaaaaaataaaanncagattcctgggcctcatccaatttggaatgtccggggtggagcccaggggttgagtttgcaacctctgccttacctaacagtgtgttcccaggtccctgtgcccaacaggtgctttttgggcccagtaatgtctgcttctactcctaggcgtgggtctgtcaacatctctgtttctgtctctctgcaggctgtctctcaaggtgntctcttctgctgntagcaactcaaaaatcccaacagcactccctatcctttccctgaccccagaccgctgccaagcctgttctcccccattacaacatggtctcactcagggcctggactgctccaaaactcgcccaggtctccagctctcctctaccacccaacaccctgggctcacttaaggatcccaaataaactctttatttatat

SEQ ID NO: 492044 - DNA, 105 bp, Homo sapiens
ggcccggcatcggaatgttcgaggctataactacgatgaggattttgaaggatgatgatctctacgggccagtctgtaggaggatggattattgtattttcgccg

SEQ ID NO: 492045 - DNA, 417 bp, Homo sapiens
  misc_feature (136)..(136): n is a, c, g, or t
tctccacactgggtgacagagtgagaccctgctcagacgaaacaaaacaaaaaaaacctcaggacatcaggctaccgtgggccaacattccatctggtaataactggcaatcagctgggctgggtggccactgtcntctttagatgggatctgctctgcactctacttcgcagtcaccacgtttcttgatcatctcccgacacccagctagcttcccttgtttgaaatttttgtttggtctctgtgggtatttgagttctcaaaacttgagtgtccatcagaactacctgagatcctattaaaacgcagattctgccaggaccagtgtggagagagccagtgtggagagagagccagtgtgccagtgtggagagagggagagagggagagagccagtgtggaggggtaccgagctcg

SEQ ID NO: 492046 - DNA, 332 bp, Homo sapiens
cctaagttgaagttttacagagagtgcctaggatcaggcagggcacacagaaatatcttgggccagggtcgcctggtcacattcatcaaagaaactagacagaaagcaacccaccgtccgcttcccagtgaacctaatataccctagaaagtccagtaattctacctaatctacccaatttgtgcctttgatacgagcttcagcattctctttttcacaagacgctaagtcattttgagtggagtgccatcacacgttaattacctagcctgacaaaccccagggcagctgcttttcctggggctgtgtctgccagggaggcagcgggagtt

SEQ ID NO: 492047 - DNA, 1131 bp, Homo sapiens
  misc_feature (275)..(275): n is a, c, g, or t
  misc_feature (344)..(344): n is a, c, g, or t
  misc_feature (360)..(361): n is a, c, g, or t
  misc_feature (375)..(375): n is a, c, g, or t
  misc_feature (377)..(377): n is a, c, g, or t
  misc_feature (403)..(403): n is a, c, g, or t
  misc_feature (410)..(410): n is a, c, g, or t
  misc_feature (415)..(415): n is a, c, g, or t
  misc_feature (418)..(418): n is a, c, g, or t
  misc_feature (427)..(428): n is a, c, g, or t
  misc_feature (434)..(434): n is a, c, g, or t
  misc_feature (436)..(436): n is a, c, g, or t
  misc_feature (438)..(438): n is a, c, g, or t
  misc_feature (446)..(446): n is a, c, g, or t
  misc_feature (448)..(448): n is a, c, g, or t
  misc_feature (455)..(455): n is a, c, g, or t
  misc_feature (462)..(462): n is a, c, g, or t
  misc_feature (479)..(479): n is a, c, g, or t
  misc_feature (494)..(494): n is a, c, g, or t
  misc_feature (513)..(513): n is a, c, g, or t
gtgacgcgtgggtcgacccacgcgctcgaagggctgacggaggtaccctcattggcagtatgggggcattcacttggcatatccttagagaagctctaaggtagctgcagtcaccttacctcgatctggcaggtgctagaaccaacatcatacagtattctatgtctaatcaggcgcccttacccaatctgccattgctctgccaagcccatttacgccccgacctcatgcatccgaaggctctactgggtccctggacctaaccctgctttcancctggtggccttaactacagtggaggtggaacttcccaggaggggaagggacagaccagccccaaccgntgggccaacttccaannattccagctagaanancttccccctgacaccctgtgactgancctgtgncctgnctncctgcccanncatgcncnancggctgtnanggcagtncccgganaggccagagggttgganctgcagggacccgtntggacccacagcctctgtnctagagatgcttgtataggctgttaattgtgatgaataaacgttcaaccctcggcctgcagccagagtaagccaggcagcgcacccaaaagaagagcaacaaaagggcgacggacagcaaaagagtaccgaagatgagcccaaagaacacaagaccaacgagtatcaggacaagatggagcaataaagagagcgagataagaaggcaagattagccaaatacaacagagaatgcgcaaacatggaaactagtaaacacttgcgaaagaaaccatactccaagcgggcacacagtggagaccacaccacgacaagatataagaacatgagacactaaccaatacacgatcacaacgatacaaaaagagaggcaagagcagggagggaagcaaccggacacaggccgagaaacggacaacaaggagcagcgaacagacaacacaaaccaagagaacagcacgacaagccaaacagaaaacaagagcgaccacgacgcacgggcagcaacaagcaacaggaagacaaaacaccacgaccagcaacgacatcgacacgaacacacgcacaaccgacagcaccaccagaacaagaacgacgacagaagcagaccgacagagtg

SEQ ID NO: 492048 - DNA, 117 bp, Homo sapiens
agagcgcctcaatcccggataatcctgcattatcacttttaaatgttcccaaatccgttttggtttcccaattctcccctgaccaaatgactgcatgaatggttttagaggcgctct

SEQ ID NO: 492049 - DNA, 640 bp, Homo sapiens
cgtacatgcaggcctcacgcgctgctactcccaatctatattctgcgccaggcccgactgccgacctaggactcattgcacgcggtcccagagcacatctgaatcacccaatccttggcgtcacacggcgtgtgcacaaccaccctgtcctccataacgtcacacacattgacctcacaacacaataccaaggcgcctgagttaccatgccgtgcacctggggcagcgagctcgggaccacgatacaagtgtacgcgcaaggcctttaacactccgcaacgctacaagacacgacacacgccaagacgaatgacaactccgacgcgaactgtacagagggcaccaaaggtaacgggacttcgacacgcgacactcgccgaacgctagcagggaccacatgcaacaccccgctacgccccaaaccttggacaacacgtcccatcgaacccaaggaaaaaattggacaagaacacacaatctgcatacattcaatcacacacccaaccccaaaataaaggcaaaacacaccaaacaccatctaacaaaaacccacacctcccaaaacaagaaaagcaccatctcaccaccgttcccaactcatacataacgccacaacacaaacactatacttcgatccaaa

SEQ ID NO: 492050 - DNA, 892 bp, Homo sapiens
  misc_feature (281)..(281): n is a, c, g, or t
  misc_feature (368)..(368): n is a, c, g, or t
  misc_feature (376)..(376): n is a, c, g, or t
  misc_feature (380)..(380): n is a, c, g, or t
  misc_feature (394)..(396): n is a, c, g, or t
  misc_feature (398)..(400): n is a, c, g, or t
  misc_feature (407)..(407): n is a, c, g, or t
  misc_feature (410)..(410): n is a, c, g, or t
  misc_feature (418)..(418): n is a, c, g, or t
  misc_feature (438)..(438): n is a, c, g, or t
  misc_feature (448)..(448): n is a, c, g, or t
  misc_feature (461)..(461): n is a, c, g, or t
  misc_feature (464)..(464): n is a, c, g, or t
  misc_feature (468)..(468): n is a, c, g, or t
  misc_feature (470)..(470): n is a, c, g, or t
  misc_feature (474)..(474): n is a, c, g, or t
  misc_feature (479)..(479): n is a, c, g, or t
ctgagactcggggtaccgttctgctgacccagctccctttagtcacgttggcttggctctggtaccaaatagttgggattaccgaagagtccccttccttgcgtgtcagcacggatgctgtgactgccacctgcgtcctcgtcaagtgcccgagctcgccgcgtgtgtgctgcgctgagtgagttatgaggtgcctttcccggaaccctcctctcgcctggacccaagagaggcgacagctgtggctggggctcttggtttccagagggtctggactggtntgggtgctttaaaatagatatttagttcagtggtgcttatgggggagatgggactagaacttaagtgtgagactgggtggatgggcnaagttaantatnggtctcttcaagtnnncnnncttggcntgntaccactngtcactgtctccatgtcaanatgccaaaanatgatgtagtgtngtngctntncccntattntccaccccagtcgctccttaccgtgatcctgccttggagggcatgtagcagcggtctgctcctgccacgtcccaaggccctgtggcgcaggacgactggcctgcatctctctcagcacttagctctgacgccacgcgcatctctggtactgagttcaatcagtagtccaggcgagaagcttctgctacttcagagcttcggctaagctaacctaatttgtccaaatcaccccaaaaccaccatctctgacgtaacgcttccatgcgacaggctgatccgtttccctggcacaggtctcttcctggaactgcagcccaggcacctgtgcctcctggcacccttgacgtctctcctttgacgccgcggtcacccacagggctgagcgacgcatgtcccgaggtcccgcccttgac

SEQ ID NO: 492051 - DNA, 510 bp, Homo sapiens
gcaaataatcaggccaagtataagactaaaatttattctacaaacaacacacacggtcctatcataatttgtttttacaaaaaatgaggactggagagagaaattgtgctccaaagcttatcatacatttgtcattaaatcctagtctaattgtttttaagctttttgcctacattttagactaaccctgcttattcctgtgaatcaagtggcgatctcctacagcttggatgaaacaaaatgggatggataacataaaaatctggatcaatatgctggttctgggcaattatcctgcaaattctgccaggagtaccaagacaataaaatagagaaagaatgaatagtcttttcaacatatgatgctgagacaactggatatccacatgcaaaataataaatgaagttggaacccttcctaacaccatacacaaaaatcgactgaaaatgaatcacagacctacatagcaacaatgtgcccagctacaaattacgattctatcacacaaa

SEQ ID NO: 492052 - DNA, 233 bp, Homo sapiens
  misc_feature (10)..(10): n is a, c, g, or t
  misc_feature (30)..(30): n is a, c, g, or t
  misc_feature (32)..(32): n is a, c, g, or t
  misc_feature (45)..(45): n is a, c, g, or t
  misc_feature (52)..(52): n is a, c, g, or t
  misc_feature (69)..(69): n is a, c, g, or t
  misc_feature (75)..(75): n is a, c, g, or t
  misc_feature (78)..(78): n is a, c, g, or t
  misc_feature (86)..(86): n is a, c, g, or t
  misc_feature (93)..(93): n is a, c, g, or t
  misc_feature (95)..(95): n is a, c, g, or t
  misc_feature (160)..(160): n is a, c, g, or t
  misc_feature (162)..(162): n is a, c, g, or t
  misc_feature (166)..(166): n is a, c, g, or t
  misc_feature (175)..(175): n is a, c, g, or t
  misc_feature (177)..(177): n is a, c, g, or t
  misc_feature (185)..(185): n is a, c, g, or t
  misc_feature (187)..(187): n is a, c, g, or t
  misc_feature (193)..(193): n is a, c, g, or t
  misc_feature (200)..(200): n is a, c, g, or t
  misc_feature (208)..(208): n is a, c, g, or t
ggagacacanacacacacacacacacacananacacacctgattnggaaganaggacaacagaagactntctaanggntgcctggnttccttntnatctcaggactctaaatactctaacagctgtccagtgttggtgattccagtggactgtatctctntnaaanacacaattntncctttctntnattctntttgagnaagttggnagtttaattaggtttccaaccaacc

SEQ ID NO: 492053 - DNA, 297 bp, Homo sapiens
tgggacgtagctcacagatcccagtccttctctaatactctgttataggtgctttattaaatattcacttcctaaagtggactcctgaggtgtacctattcagtattcggctttcactggactctcaataagctctaaactttaagaaaaaggccttcttggattctggatgagaacaccgagatgtgcaccagaaccagacttcgatggtggcccttttgaattccttcttctttatactttatttggtggtgggtctggaacttctggttccccaaatatggtgatggcataaat

SEQ ID NO: 492054 - DNA, 514 bp, Homo sapiens
  misc_feature (75)..(75): n is a, c, g, or t
ccctacttcagatatatcagcaccctcatcgatcaatcatctctctactggtatctctggagagagtactgtagntgagacgagtcccggctacttagagaaccagtattaatgtggtaggaatttagtttccaggaattgtctcgtcatgttcagaaataagccaagttctgctccagcttccttatcggagtctactccctgaacgcctcttgaggtatagctttctgactgccattgctgctggtaactgcggcaagattgccattctgcccagtactgtctttttctgttgtaattctctgctggtacctggtcttcttctgttccccgtccccagttgttctttgtcggtgggccccaaaggctcctgcttatattaatagtttctggggcctctttgaaggctcagatctagtccttaaggcctggtaggagataagtgtatctcattccagcttccatagttcttcctgacttgctgtcccacccaggcaccagagcaaataattcc

SEQ ID NO: 492055 - DNA, 893 bp, Homo sapiens
gtgtcgcccatggcagttgatgggagaagatgaaggttaaatatggtggaaagtgcagtctttcaaaatgtgtccctttgcttctgtgaatattagggcaagtcgtgtcgcataatagaatatgtagtagagggggtggggaggtaaattcctcgtgactgtgccaatgaaaagagaagggaaccacagtggatatgctagcattttagtgtgcaaagggaggtagtgtgggaaaagtgttccattcgtgtgaaaagcccaaacagaatacggtcagaaggtcaactcgcagggtttgtgctgtgattcctgatgaataatagtttggagcatcttgtggttaaataacttcgttaaaatctgcctagtttggatgaattctttgtgtgaaactttgaaagagaatagaagtatgacatatagaagttaagtacaaaacagtttaacaaccgattaactgggggtaggaaaatggaactgtgactcatatcgctactggcatctggcatctagtatgcattctgggtgtgtaatctgaaagggaagacatttctacctaagatccaattgcattatgtatcacatgaggtgcacgttcactggaaattctattcccttctaacactttctcactgagtgaccaaataagttgagaagtttagcactggttagcctaagtatgtgctggacatgtttgggccgaatcggtcctgggcctgtgttctatcaaacttcatcatgtcctgtcttatggataactaggcctgaccttgtggtcattatagcaaggttccgtctataccaagcctatgggatccatgagatgcccaccatggggtctcggtccaagggtccccaccaaaggggggacccggtagatagttggaagagag

SEQ ID NO: 492056 - DNA, 192 bp, Homo sapiens
gcactccagccttgggaccagactaagacgctgtcaaaaaaaaaaccaaaaacgacaaaaaaaaaccaaaccagaaaaattaaactagggcatgacagtccctggcaaatgctgggagggaggcagcagtggtcagggaaggtacccctgagcaggacttgtaaagcaataagattggaggccaaggtggtg

SEQ ID NO: 492057 - DNA, 722 bp, Homo sapiens
tggaaatgaagtctccctctgttgcccaggcttggagtacgggggtgcgatttggatctcactgcaagtttccacctcccgagtttccaggaattctccttgcctcaggtactcagggggctgaggcaggataatcattttgacacccgggtttgcagtgagccgagatcgtgccatgttgcactccagccgtggattggcagagcgagactctgttcttcaaaaagaagaaaaacaaaaaacaaaacaacagaagagagttaccactagagaggagttgcccggccacaacaacaaaggggtgcaccaaacaggagaaaacgccgggaaaaagcaggcaacccacgcctggagccacaccaatgtgtggggttgtccttatgtggaaaagccccccctaaacacagaagaggggttataaatcaccaggggagtgcaacgtcgtgccaccgggttaaaaaaacccccacccctgggggtatacgtgctgcagacgtggtggaaacaaccatgtggggcgcggcgccaggcaaaacaaattatgagaaggacggcgaaaaaacatcccccccccgtgtataaagcacacgcgttgtaggggagaaaatccgcccgaggagggaggaaacacactgaaccagcgtcatgaatccggggcttcgagaacagtgttacaacccacaacaaacgcgcattctggagaggaagaaccaaaaaccaag

SEQ ID NO: 492058 - DNA, 144 bp, Homo sapiens
atcagcagagcatacaaacttgacactttctaaccgacactctggtactcccccggtcacgacccaccctctctgctctttcttatagcaacgcgttcagcaacagagatgcagagattcgtcgaggttgggtacagaccgtcg

SEQ ID NO: 492059 - DNA, 383 bp, Homo sapiens
  misc_feature (82)..(82): n is a, c, g, or t
gggattttttgtttgtttgttttgttttgtttggtgtttgttgtttgtttttttgcccccaattttaggattccttcggccntgctagataaaagctgaaggtcctttatgtttgtcttttaatgcttcattcaatattgccatttgtagttgagcgggggggttgggttgcttggggtttaaatttttccagggggtgggtttggcttgttatattaagcagaaatcccgcaatgaaagggactatatttgctagcctctagccaagatattggccataaaagaatttttttgtctttaaatagaaccaaatgtctatcccctttaaccaagggggaacttatattgaagcccatttgatacataataaaaaattttgccca

SEQ ID NO: 492060 - DNA, 297 bp, Homo sapiens
ttgccatcatatctacgtcgtacacttgaaaagcaaaattgcaagtatttttgtaatttagatcaatagaaactcaatcaagagcctctgcaaggagacacttgaatctggtgtcacagccacagacaacacacactcagtggcccctgctgcgtcaccctccctgggacgcagagctagatccagagtcctgaagtacatctaaaacaacgtactgtacacggctccttcctcacccacgctaatgtgctcggcattatgtacaattctgtcaatacggatttagttctaaagaca

SEQ ID NO: 492061 - DNA, 312 bp, Homo sapiens
cttgaaggctttgcagtggtttggcacatggaggaggaggaagggcattccaggaggagggaggagcaaaaacaaagactcagaggaaatgagactggaaaggcagttgggggacagaggggccttgcaagctagggcaggacgtactgtgttaggttctgtggcaccataagaagccttaaatcatgggaagagccaggcgtggtgggtcacacctgtaatcctagcactttggaaagccaaggtgggaggatcacttgagcccaggagttcgattcctccctgggcaacatagggagacctcatctctac

SEQ ID NO: 492062 - DNA, 203 bp, Homo sapiens
cacgaggccgcccgcaccgagccgcgggacccgggccgtaccggggaggggccgctccgggccgcagcgcgagggcatcgaggggcggcggggacctggcaccgggcggggccggcggcagcgaccatgatcgcttttgttcaacaagctgctggactggttcaaggccctattctggaaggaggagatggagctcactctgg

SEQ ID NO: 492063 - DNA, 178 bp, Homo sapiens
ttttgtatttttagtagagacaaggtttcaccatgttagccaggcttgtcttgaacacctgacctcaggtgatctgcccgccttggcctcccagagtgctaggattacaggcttgagccaccgtgcccggctataacttcttaaaattagtaaaattggtccttaactcacaggccca

SEQ ID NO: 492064 - DNA, 403 bp, Homo sapiens
  misc_feature (333)..(333): n is a, c, g, or t
ccagactgcgaacaggtggagacggaggaggaatcattctccggaagtatgtgtaatcagatgactgactattaagcacggcttcaggatcagtatgaagacactattctatggtaattctttccttaaactttggcacttagaaaaaactgatgttgaaagattcctgaccttacctgtagattaatctttgagatttaaaaaatacactttgggccgggtatagcacttacacctgtagtcctaacactttgtgaggctgagaaggttggattgcttgagcccagaagttagaggtcagcctgggcaacaaagtgaaaccccatctctacnaaaaatacaaaaattagcagggcatggtggtgtgcatctgtagtcccagctactcaggaggctgaggtgg

SEQ ID NO: 492065 - DNA, 427 bp, Homo sapiens
atgtcgcgggatgtcgtctgaagtcttggaacactcatcttcttagttaccgttcacactaatatagccataacatatagcttttaaccgtctcctacccttgatcacaacacaagacacacctcttattactcctgtcatcatgacccttggccataatatgatttatctcctcactagctgagtaccaatcgaacccccttcgaccttgctgaagggtagtccgaactagtctcaggcttcaacatctattactgccgcatgctctttcgctctattcttcatagccaaatacacaaacgttattataattaacaccctctaccactacaatcttcctaggaacaacatatgacgcactctcccctgaactctacacgatatattttgtcaccaagatccttcttctaacctccctgttcttatg

SEQ ID NO: 492066 - DNA, 129 bp, Homo sapiens
acatgatagaccgagcttgtaccccgatagccgaaggattgctcgttgcctcggctgatcgaaagggagtgggttcagatcccgactagccctgacagtgaggaagatgggggcagcgatgggtacgag

SEQ ID NO: 492067 - DNA, 205 bp, Homo sapiens
atacccacctgagagttctatcatctgtaggctccatcatttctctcaacgccagtaatcattcaatcaatattcatgatatgagaagccttcgcttcgacgcgacaggtcctaatagtagaagaaccctcccataaacctggagtgactatatggatgccccccaccctaccacacattcgaagaagccgtatgcatctcggca

SEQ ID NO: 492068 - DNA, 1605 bp, Homo sapiens
gccaacaactgggaacaggaaaacgactcactatcaacacttgtcgtcattggacacgctagattcgggcaagtccaccactactggccatctgatctataaatgcggctggcatcgacaaacagaaccacttgacaacacattctgacgacagggacggctgcttgacgcactggcgaccacgcggctccctctcacacggtactgccatgggcctctctgcgataaacccctgcaccacgccctgcacgccgctgcacaccgatggctactcgaccccacttgaactcactcctctcctctgctgcgaaacactctctgcacgcatcccacgccacacgcctactcactgcctgcaccctacatccacctctgcaactgcacccccagcgcaccaatctagtacgcatcctctctacatcgaagacacaccactggcactttacacgcggttatcaaactcgctccagcgcccatgcaccatggtgtcttggctccctgtccactctggcgtctcgtgcctgccctggcgctgcctctcgcgcccgcaccctctctcgcacacgcccctgcgtttacctcatcccacacgcacactgggcggcctacgcaccccccgcacggagcccattgctccctcttcctgcgccctctcaccacccaacccatgcgcgcctcgccgcacacaaccaagacataaagcaaaagcatccagggctggctcccccacccacacaccccctgcgaacttctcccccaccctgcacacgcccaaccccccataaccaagccaccaaccacagagcaccccactccctgcgccgggacaaccactcgcgcccccacccgcggacacacgcctccaatccccacccctccaaccacctccccgcccggcgacaccccccagctccggccgcctccacccaccaaccccccccacaggccaccccaccaaccgccactcgccccaacacccacgccccgtctccaccccctctcccccgcacgctcctggcgcacaaccctggcccagacaaccacgacccacgtcgccctcagcggccgaccctcacaacagcctcgccctcaccacccacacctggcccccgtcggacgcgcccaacccgcgaccgcacgcacacctgcggcaacccaaggcccctgacaccccccggacctaaaaggcgccagacctggcccccacgccgtgccccactagcacccgcccccaccccacacccggccaccgacaccacgccacgcacgccccccccgtcccagccctgccccaccaccccccacgccccgcccccaccaccgcttcacgcgcccaccacaaccgcctgcgacccaaggccccacccaccaacccgccctctcgcccatcccgtcaccacgagacacaccggcgcccaccccccaacaccccgcaccgcgcacaccccgacaccaccacgacgccaccctcggactcggccacacacactgcacgctgcaccacagccagcaccactcctacaacaacccacgcacgccacgcgaccaacccacacgcacgaccccccacaccgccacacccacacccaccccggccacagaccc

SEQ ID NO: 492069 - DNA, 101 bp, Homo sapiens
tagcggagcttataaatggctgttacctaaatggctgttacttaaatggctgtggacaactgtggaaaaactgaagcgtatacagcgctgttgtcagaaca

SEQ ID NO: 492070 - DNA, 375 bp, Homo sapiens
cgtctattggccacgcgcagtggctccggctgtatcctggaactttggaggacaagtgggtggatcacaaggtcaggagatcgagaccagccatggccaatatggtgacaccccgtctctactaaaaatacaaaaattagctggatgtggtggcgggcgtctgtaatcccagccacttgggagattgaaacatgagaatcacttaaacccaggaggcagaggttgcagtgagtcaggatcatgccactgcaccccagcctgggtgacagagtgagactgtctcaaaaagggaaaaaaaaaaagtttgttactattctggttattaactttatcagtaatcaaagaaaggtggcccatcatctggcacccctgttc

SEQ ID NO: 492071 - DNA, 104 bp, Homo sapiens
cgcaccaagcgcctgagccccacctccggggagtcgccagtggaggaggccacgtcacacaccctgcatctctcctggatgcgctgacggagggcacaatcctg

SEQ ID NO: 492072 - DNA, 136 bp, Homo sapiens
  misc_feature (98)..(98): n is a, c, g, or t
gggcatggggttgtagcatcatcgcagcacatggcacggaccgtttattgtacagatgtcggtgcaggtctcttgtccatgtgccagcgaaacattgncctcaacagccaactggctgccactggaggtggtatag

SEQ ID NO: 492073 - DNA, 1878 bp, Homo sapiens
  misc_feature (995)..(995): n is a, c, g, or t
  misc_feature (1261)..(1261): n is a, c, g, or t
  misc_feature (1675)..(1675): n is a, c, g, or t
gtgtgttgatcttggttttatagctatcactgtatgttgcctgtaggccggatcacctgatgttcagcagatcggtgtgttccctcccgcctttttttctgcgttgaggtgcacgcgcccttggcggtgatatatgtccgcagaggctggtggatgtgcacacggccttcgcttttgccccccggtggtgttgcccgaagatcccctccgcgctgttcgcggttgtgtttgtttgttgtagtccgccacgcggggctttgtttgctgtaggtagctccacgcggtttaaacaccctggggtggagatagctcgtgtcccctcctccgcgcgcgcgccttttgttgggaacctgttgttgtctttcgcgccccttcccggggtctctagaaggtaatgtctcgggtgtccccgacggaactgttccccgccccgcgtgtgtcgcccgccccttcgccttagatggaggtagaagggtgtccttttttttcccgccctcggggggaggcggaatatttttccccctgagaaggggaaattgttgtggagaaccccttgccccagcgaataggtgtgttatgagaaccccgcctcaaaggctgccccccatcgtgtataagccttttgaagggggtttctccttttggaagagacccaacgccttttgggcctgttgtaggagaaatactcctgtgaggtaggccccctccggagggatgagatggtaaaggagtggccgctgtctcaagaaataagggcccctcatttattgtaagggagtgtgctcccactccccatacttgttcctcaccgttataaaaaagttgggggccaacgaataagtagaatataccttgtgagccccccccacctcccaacatatggggagaaagtcgttttatatatttatatagaggggatttccccgcagcagaagggcgccacacacaagatatgggcctttctgtcccccacaagaccctggggagaacgccgntgtgtgctcctgcacagaaagagataggataatatatagcccaccgcacctcgtggaagatcagagatgagttcctccggcgggagaagaagaagatcccccaacagcaggagatgtctccccaccacaaaggagcccccgcctcgctctcgtaagcacgcaggagagctcctcgtagaaagctcttcggagcagcttataatattatttgttgtgttcttcggagagagaacaccgtcgagaactcgttttctccgcccaactgngcgccgcctctgcgctcgtatagataattccccacagagagcctcgtgatgactgcgcgccacacgtgggtgcacatcttgtatttgtgttgtgtgccctcgctctcgacgcacacagagagtgtgtgtatagagagagtctataattgtataggacctcgtaaatataggtaagagtctccacagagtctccacagacctcgtgagaagagttggtgtggtgtttttataggggcctactaaaggcgggagagaatacactcgagaaagtgtgtgttttacactctctctttttgctactaaagtgtgtgtggtgtctctgttctaaatgtgaagctaatttgtgttgtctctgtgtggccatactctttgtctgacttcccagagcacccctctggtggtgtactcgggttntaataggcgttagtgtactcgtgtattgggctcctgtggaaaacacataatattgtggaaaagaagtgtatagttaatgggctttcttttggaactcgtgttagatagctgaatatctgttccactgttccagtcccccttctgtcccccatcttacccgatgctactggaccttgaatggttaattaaactgccccgtgcct

SEQ ID NO: 492074 - DNA, 200 bp, Homo sapiens
  misc_feature (8)..(8): n is a, c, g, or t
  misc_feature (13)..(13): n is a, c, g, or t
  misc_feature (43)..(43): n is a, c, g, or t
  misc_feature (65)..(65): n is a, c, g, or t
  misc_feature (67)..(67): n is a, c, g, or t
  misc_feature (71)..(71): n is a, c, g, or t
  misc_feature (103)..(103): n is a, c, g, or t
  misc_feature (111)..(111): n is a, c, g, or t
  misc_feature (121)..(121): n is a, c, g, or t
  misc_feature (145)..(145): n is a, c, g, or t
  misc_feature (182)..(182): n is a, c, g, or t
  misc_feature (188)..(188): n is a, c, g, or t
  misc_feature (193)..(193): n is a, c, g, or t
cagaagcnagatncacgaagggaacgtcatcgtttggaaagcntcgcaataagacgcacacgttntnccgncgctgtggctctaaggcctaccaccttcagangtcgaccngtggcaaatntggctaccctgccaagcgcaaganaaagtataactggagtgccaaggctaaaagacgaaanaccacnggaantggtcga

SEQ ID NO: 492075 - DNA, 519 bp, Homo sapiens
  misc_feature (2)..(2): n is a, c, g, or t
  misc_feature (90)..(90): n is a, c, g, or t
  misc_feature (97)..(98): n is a, c, g, or t
  misc_feature (103)..(103): n is a, c, g, or t
  misc_feature (147)..(147): n is a, c, g, or t
  misc_feature (153)..(153): n is a, c, g, or t
  misc_feature (155)..(155): n is a, c, g, or t
  misc_feature (179)..(179): n is a, c, g, or t
  misc_feature (206)..(206): n is a, c, g, or t
  misc_feature (208)..(208): n is a, c, g, or t
  misc_feature (210)..(210): n is a, c, g, or t
  misc_feature (304)..(304): n is a, c, g, or t
  misc_feature (518)..(518): n is a, c, g, or t
gnagaggaggaacatctgtaaaaaaagcagcctgaaagtcagctgtttgcaaactcatagcatatcctcaagttaaatggaaaaaaaagnaataaannagggncaaaaagaaaagggagaggaggaagaaaaataacttaaataaanacacananaaagaaaagagaaggcaacatgangtgagctggtgatccatgaaggtaggnangnaggggaatcgttttagcctgtgctgaaccaagggaagaatgcggagagggagggagggaaaggggaaaaaaaaatcagaagaaacactgggggnagagggaggaggggacacggagacaactttatacaacttgagacgaggcggcccggccggcgagttctcagtgcggtgtggcggcggaggatctggtgctggtggtgctggcacttcagggtggggggccgaggacgggcacagtctctaagcagctcccccaccccaaacacggaggccccaaggggcttgggaacaagagtctgtggcgaana

SEQ ID NO: 492076 - DNA, 265 bp, Homo sapiens
  misc_feature (173)..(173): n is a, c, g, or t
atagaattttgggggaaattctggaaaatagttttgcagttcctgaaaaggttaaacatagagttgccatatgacctagcaattccactcctaggcagtggaaaattccatggtatgtatataccgcattttgtttattcatctgttgatagacacgtgggttttttctaccncttgactgttgtgaatattgctgctatgaacatgggtgtgcaaatatttcttcaaggtcttgccttcagttcttttgggatgtatgcccagg

SEQ ID NO: 492077 - DNA, 296 bp, Homo sapiens
caacttaaaaaggactggacaatacttttaccactttcgcttctcagaattcaggcctgtcctcagaatgttacaggatacagcccatttaagctcctgtatagatgctcctttttattaggccccagtctcattcgacaccagaccaacttagactgtgccccaaaaaaacttgtcatccctactatcttctgtctagtcatactcctattcaccattctcaactactcatacatgccctgctcttgtttacactgccggtttacactgtttctccaagccatcacagctgatat

SEQ ID NO: 492078 - DNA, 587 bp, Homo sapiens
  misc_feature (587)..(587): n is a, c, g, or t
gagcctaggaattcgaggccagcctgggcaacatggcgaaacccagtccccattaaaaaaaaaaaaaaaaaaaagggccgggggggggggccaaggctggtaatcccagacacttggggagggccagagggggggcaggattcccaggggtcagggaagattgggagagaatattctgtgggttagcacaggaaaacccaattttttattaaaaaaaaaaaaaaaaaaaaaaaaaaaattttgggggggggcggaggcccttgagaaaagagttttaaagacccaattcggtgggggcgcggggggcaccaaatagagttacaggacaaccgtggcgcacaacgggtgtgtgccacaaggaggaaaccggggcaagaaaaaaggggggggggattcccccccaaataaaaaaaagacgccgcggggggggaacacacggggagggtttttggggaaacaacattcgccgaagaggggagaacatcaggagggagcacaaacaaggggggagatcttataaacaacgggggggtccaccaaagggacagcacgaaatatacaaaattagcccgcgcggtgggggggcn

SEQ ID NO: 492079 - DNA, 461 bp, Homo sapiens
  misc_feature (73)..(73): n is a, c, g, or t
  misc_feature (92)..(92): n is a, c, g, or t
  misc_feature (112)..(112): n is a, c, g, or t
  misc_feature (125)..(125): n is a, c, g, or t
  misc_feature (197)..(197): n is a, c, g, or t
  misc_feature (202)..(202): n is a, c, g, or t
  misc_feature (205)..(205): n is a, c, g, or t
  misc_feature (295)..(295): n is a, c, g, or t
ggacgaaggggtagttctttcacctcggctgggcgcctagaaaagcctagaaacagctccttttttcttccgnctccgagtcttcgcgtcangactgcgcagggcccttggngaaatcgcggtgncgttcggggcgaccgctgacctccctgggaggacgagggggctagcggcgacggctggggcgagcgctctgnggcgntgnattttttcacgtgtcgccagggccggactgcgagtctctttgcggcgctacactagagcagagtacgagtctgaggcggagggagtaatngcaggacaagcgtttagaaagtttcttccactcttttgaccgagtattggtttgaaaggagttctgctgaaactgtaaccaaaggagggcattatgcttccagaaaaatttcaagggaaaagtatttgcaaggcaacagtagttcgctgtttgggttcgggttttt

SEQ ID NO: 492080 - DNA, 668 bp, Homo sapiens
cacagcgccgagtatactctgattaccgccatgctccacgacccgcactgacagtccccacgtgagggacctgtggatgggagtgctaaatggcgggaggaggtgagagcgaggacggcactgtgcatctgcgtgtgcctcgcgagacgctccagcaggggtccccctattctgcaggatgcatgtcgcggtggcgcccgccgcccgtcaacagctcccgttcatctgtcatcggttccctcaatggagtccacgatgttagggcagaatctggacgtgcagttgagctctgcgaggaccgagaacacgactgctggtgtggaacaagcttccatgacagcatcaccctcatagtactgtcatctgaggtgggcatctctgagctgaggctggagagactactccaaatggtgtttggcacgccatggtccttccttgtgggacttgaagaactgaccaatatccgcaacgtggagagactgaagaaggacttgagggccagttattgcctcatcgacaggttcctgggggactcggagctcatcggggaccgtgaccagatgtgtggactagccgtgattcctccagagggggtccctcttgcaggaagccctctccgtggttcgctgaggccgcgggcacgagcttcgtgcagtctggtggtgtcc

SEQ ID NO: 492081 - DNA, 974 bp, Homo sapiens
aaaagggccaggtctttaacgagccaggtcagagcacagacatgtcaatctcagacacttcaaaactttatgcatggacaggagatcccagaaagtggcttttttttcttctaaaacatttcagaagtttctagtaacttccttgagccacagtttgcacatctgtaaaggagggataaaggccccccaagctctgataagacaaccccggttctcaagcttacctcgcctcacagtcctggggtgcaggaggttaaggatgtagagcccgaatcccgaactcatttgccatccttccagctgtgtggccttggccaagttactgccagtctctgagacgttttctcaactgcaaaacaggagtaactggagcaacctttcgtggagggtgccaggcgctggagcgtggctaaggcagggaccacgtcccagccgacctttcccgccctgcggcgcaggcccactctcttggctctcctggcccgcacactcagctcggccgccgcggctgccgcggaagcgcgcagtgaggctagtggggccaacgagcggcgcgctgagcaatgcgcgcccgatagagcctcgagatgcgccgggacgagctgcgctgcaagtacccgccgcgagctagcagatgtcgctgcgagcacaggctgggcacagatacaggagtgtaaaggtcataaccccggcgcgtgcgggcggagcagcacagaggctcacctgggcgtacccgaccccgttcgacccgaggctcccgagactcgtgaacggtacccggccccggacaccacaggtgccaactagggcagcaatcccaaggccgcccggtgacctcagaacgatacctagagtaggagcaaacacccgccacgaccacaaagaagatcccaccgacctacagccaagcagtagcactaagacccatcaacacacggccagggcacagcacaacgggagaccctgccacagaa

SEQ ID NO: 492082 - DNA, 594 bp, Homo sapiens
catctcctattcaacacgtgggggggcagctgtgagacataaactaaccagggcatgatgcataagctactcaaatgccttcctctagtacatagaatcttgccctacacaccagactgtggatagctgaccttatgagcctcctacgcagagcgacagatgccaatgtgttcgcgtgctgggggacagactcactccatgctgccgttgaacatgagggctgaccttctgccaagggcgcgattgcaggacttgaatcggatgtcacaactttctgtggactactctggatcacgctcaggttccatatccgtctgtgtatcaggatcagggagagggttcctaacgcagacggaacacgtttaccaactagctgacaaacgtgcagctttccatgacagccttaggtctcttgacaggaaacagccctcatgacagtcagtactcgggtcaacagggctctgaagaggattttatatgtaacagaggatgtgcccaccttgacaccgaggatcggctatagcatattagaggtaccatgattatttgaccaacattcgcgacatagaattttatagactttgtgtaacatcg

SEQ ID NO: 492083 - DNA, 112 bp, Homo sapiens
  misc_feature (13)..(13): n is a, c, g, or t
ttataatttctcnagccttatgatacataatttcatcctctgtcatcaagtggaaattgtgttatcaaaagccatcagttacctcaatcttccaagccaaccgtggactagt

SEQ ID NO: 492084 - DNA, 439 bp, Homo sapiens
cgggcagtacggatgtgaggaggtccggcagcttcctggagtactcgtttggccagcatggctggaaaatacatggaggtcagtcgccacagtaactcatgaacattctcaataaggtcgtgacctgacaccctgcatctgaagactgatggttttggcattgacacatgtcgcagcatggtggccgtgatggatagcgacaccacaggcaagctgggctttgaggaattcaagtacttgtggaacaacatcaaaaggtggcaggccatatacaaacagttcgacactgaccgatcagggaccatttgcagtagtgaactcccaggtgcctttgaggcagcagggttccacctgaatgagcatctctataacatgatcatccgacgctactcagatgaaagtgggaacatggattttgacaacttcatcagctgcttgg

SEQ ID NO: 492085 - DNA, 981 bp, Homo sapiens
  misc_feature (401)..(401): n is a, c, g, or t
ctttagactaaatatatactttaaagaaagaaatattatggattctatagaaaaccattaaccaacggaaaggacacgaagatcaagctaccggagcaaaagcgtgttgagaggcccaggctgtactagccgtggcggccttacctcgcggccagagtggaggccccaggcggctagcacaggtgtgaaggctggaggcccggggagcggtgtgatcgtgccgggggcatccatccgggcttctctacctaagttcatttgggccccaaaaactcagaggtatgtgcctatgctctcgggaggacacgggtacctacctacactgggaagtgggctaagcggtaccacacgggccgccgaggtggaggtaaggagtgagaatggtggcggtcgtagtacangacgttggacaagccccacgctggacacccaaggggcaatatgtaagctaaggcacaagggccaacggggactttagcagagtacacttctagaaggggtggtggcctgggacgccacccatctacacaatgggggctagtgcgcacaggacaggccacaataacaccccacaggtggagaaattaccacacgagagaacagacatcctcgcgatacaaaggggacaccaaaaaggggactgggagataaagatgaggggctacaatttcattcagcgaccatacacataaattccaaacaaatacacagacccctgtggaccacccacatacaacaaagaaagaaacacaagagcaggaggacaacacacaaaatcgagaggggaaacaggctagaccataccaaaacaaaagagataggcagccacaccacactctttgaaccgcggttccaccgaggggataacaaccccgagcgacaaagctgggaaaccttcgcccacaaacggggtccccccccacagggacgaaacgtccacaaaaaagggggaggcacaagaaggaaaggggctaccaaaca

SEQ ID NO: 492086 - DNA, 179 bp, Homo sapiens
tatctcagtttcgggacgcacgctctctctgttggggtgctttgggtctgtgtccctgttgttgatctgccttgcccttgtgtgggtgtgcagttggtgtctgtgccctagtgtggggtgcctgcgctgtagtgggatgcgatggtgtctgtgccctgtgtgaggtggctggcctatgt

SEQ ID NO: 492087 - DNA, 630 bp, Homo sapiens
aatcaaaacattgtttttattatgtattttttttacttatccctaccttaccttacagtgtgcaaacacaccccacattacacattccaagctaaggggataaccaaaccaccgggcgggtaatcaaatccttatttaatgcaaaggattacataaaatgtaatccccgtcccgaacaatcaaacccccttccccccaacacaatgccacacttcccgtaccaaaaaaaaaaagatactcccgcccaccaagctatgaagagcctttagccatgccattcccgttttctaaacgaaactgcctccccaacaaaaaaatactttaccatttcacatgcggccgcatgattcatattccaccacgcctttggtaatccaacccccccgccagaatcttaaccggagaagccggttaaaaaaccctaaccgtacctttttgttaacccaccaccccccccttcaagaaaagcccccccggcttgcaatagctccccccccctcaatggtctggggaaaccctacccactctttggtgaaaggaaatacgtttcctgtgcacacacccttacaaccgggaccgaaacattaaactacacccccgcctctcttttggcccccccacttacatttc

SEQ ID NO: 492088 - DNA, 156 bp, Homo sapiens
caaggttaggactataattatgcttaagaagcctgggctgtttaacagctcagagagttgaaagggaggggagggatgaagttgcatgtgttgtgtgtccagtgccacagccagcttctgtgcccctgccatgagtgatcttgtattgcttgttcc

SEQ ID NO: 492089 - DNA, 263 bp, Homo sapiens
ggggtcggcacatggacaactgtacaacagaggagacaatagggtctgggcgataaggcaaaatacatgctcactctacgaaggactctcctcgaataccagacactaaatattgcaagataagccagaaatcatctaacagtgctcttttcgctatatgttcgatatgtctcttgtatattaacaagatggcacatcactttctttgaaacaaagacagaaggtgtctcctcctgtgacattcatatcatccccccgtcttt

SEQ ID NO: 492090 - DNA, 328 bp, Homo sapiens
ggatcccctgaattcagcgggcatgacgaccctcgtctggggggtcctcccaagtggaccctgtccacgtgtgcagttgtacgcacacgaactgcctgtggatgccggtgatgaagccctgggccaggcggttgggccagtagcagcccacgacattggtctccatctcggtgcagttcggggaaactctcatagtacaccatgaactcggacaggttgcaccatttccagacgtccaccttgctcatcatgtctgcgaaagcctgcccacacaggggccgcctctccaacatgcctatctcgttgcagccgactgctctggggcacc

SEQ ID NO: 492091 - DNA, 147 bp, Homo sapiens
gcttacccggacccccagctctgaagagatcagccctactaagtttcctggattgtaccgcactggcgagccctcacctcccttttcttcctcgatgagcctcctgatgtagggtctgatgatgaaatagatcatgggaagaaaaaa

SEQ ID NO: 492092 - DNA, 126 bp, Homo sapiens
ctgaccatttgagaaatattgctgagttgaagagttaattgacataattggttttctgcctagaggtccaatcatctatttcagactgtcatggttggcattgttctcagaggtccaatcttccgg

SEQ ID NO: 492093 - DNA, 904 bp, Homo sapiens
caaatgttactctccgggacgcaaatatactccggcagcgccactatccccgggggtgtccaggccgcgtatcccggcgcccccgggggcgctgggaacggtgaatcagggccaaaagcgccaggggtgcggaatccccctccgcgcagcttgtgtacaccctggggaccccaccccgcggctgtaaggaggagtggccgcaatgaccaaacccaggggcgtgcatacccaacacggattggcggtcaccaccaggatgggtccaaaatccctcctgggcgcaacccagattggcgcaggtggagcactagcacccacgggggcgttggggcagcccgtcttgctcccggaagccgccccggcattcttcctctgctgtaaacaaggtggcccaaacaacgccgacttttgtcgtgttccacccccctttgtttttgtgacgaccgcgccccgccccgccacactgcggtggggctacacccggacacccggtgattccgccacgttgaatgggagggtcgctcgcagtgatcttcactcgctccgggggatgaatcagtttctgcgggttgttgtagccccccgcggcgtgtctctgcgacgagaaaggtgccgcaccactcgggggagatggcagcctgcgatgccgctggaggcgacggacgcccccctcttaggagcacgcacgtgggcaggcgaccccagatccaggtggcgagacctggaagcaggcatccgcccccgagaagcgagcagacacgcacgatctaaaggcacaccgacgaagagccaacctggggagaccccgacgcacctcgcccctctctcgcacccccaagaggccccccccgggcccccccgccttggccccaaaaaaagggggttgttcccttcaaaaaaaaaa

SEQ ID NO: 492094 - DNA, 129 bp, Homo sapiens
ttaccggtttttaactagggttgggggggtttttttggggggcccagggtggtttttcaaaccaattttttttttttaaaaataaggtttggggttggaaattttcctttaaaggccccggtttgggga

SEQ ID NO: 492095 - DNA, 343 bp, Homo sapiens
  misc_feature (96)..(96): n is a, c, g, or t
  misc_feature (112)..(112): n is a, c, g, or t
tcccacgtattgaccgaaaagggtgtacagtgccttgctgtaaatttatgatggaaaactgattttgaaccccaaaaaatagctaactaacgttanttaaaggaaaggacancaaattgggctaacagagggtgaaagctggtcacatttgtcaacaaaatctgcttgctgcagtagtagcctcaagtggttaaaacttgatttcccgagaaaactaaaccctttgtgcctaaaattgatgacttgagttcaagtgggatgagcaaaaagttgtgttaacttgttgttcaacagtattgagtgtgaaggaaattttgatggcttaataaaattccacagcgac

SEQ ID NO: 492096 - DNA, 423 bp, Homo sapiens
  misc_feature (290)..(290): n is a, c, g, or t
ataggaaacccattccagtgtacaactgccttcaaggattgaaacccttgtatgtagtccccagcctactctggaaactgaggtagtaggattgcttgaggcctgaagttcaaggcctgcagtatgcctgattgtgccctgtgaatagccactgcaccccagcttgggcagcatcagaattatagagacagaaagtagaatgatggttgcccaggggttgcaggaagggcagcgagagggaattactgtgtaatgtgtacaaggtttcagtttgggaagaagaaatgagncctggagatggattacggtgatggttgcacagcagtatgaatgtacttaatactactgaattgtatactcgaaagggttaatatggtgaattttatgtgtattttatcacaataaaaacattgaaaaataatt

SEQ ID NO: 492097 - DNA, 83 bp, Homo sapiens
catgactcccgtttgtcccaggctgtgcgtagtagtgaggaaggggtactggaacaataaacaggcactatccaaatatacat

SEQ ID NO: 492098 - DNA, 146 bp, Homo sapiens
tcacgcctccgtccccattttcctcattctcagcattcccgttagcaggggcgtctcttccatgttctgcctcttccacaacttccttcttctcctttaagtccttgtgtggtgcatttcggagcatggtgtctacaggctgcgtc

SEQ ID NO: 492099 - DNA, 137 bp, Homo sapiens
cattcatgtacaagtttcattcattactattcaccttggtagacttggtgacacctgtaaaagaattctgtctttggctcagtcttgggaactaaatttgtcgtgaattggggactgtcacagattgcctccagtgt

SEQ ID NO: 492100 - DNA, 601 bp, Homo sapiens
gccccagcaagccccactcaaggagaggctgagcccagaaatacccatccctgcacccaacctggagttctttctctacccgccttggtagccaaagacaaaggtcatcatctcttgggagctctatggccctgctcaccacacctgagaaatctgaatacttaaccaggtgaccctagggcaagtttgcattctccctatagtaccacagctgatgagctcttgaaagcaccacctcctggctggaggccaaacaacacaaaaccagtgcattaaacaaaaacacaaccaaggaccctaagggagtccagttcactcctctgctacctccaccagagtaggtgtgggtatccacagctgaaagatctgaagacagatcacatcagagcactcttcgcaaatactccctagtgccaacccagagcccagtagccctgctgggagagatttctcttctcaggaacaccaattattcttatgttggacgtttaacagtcccaaatttcttagaggctttgttcattttttaaaatttttgtcttgaatagactgggtcaatttgaaagcttgtcttcaagctctgaagtctttctttttgctg

SEQ ID NO: 492101 - DNA, 478 bp, Homo sapiens
  misc_feature (282)..(282): n is a, c, g, or t
tgagaagagtcactagccatgatctcgatattgtgcatcatgatcatcagtcagccatcattcactgtgagagtgtctccgtaatcgactgtgagctcatccatgtgcgcagctatggacacgtgtcattatattgcgtgagctcgcatcatctgctcattcagtatgtatgcagttcatctgaatatgaccatctccagattatgctcaacagtcctctcctgtccatcctgagtgtctgcgctcagggtctcaggcatcctcaggcgtctcagttcctgnaagactgtgcagttggctacgattggcatgcgtggcatgtcaatacggagcctgtatcccggatgtctttgctgcaggcctctgtctcctctcatgttcagaatcgtcgcacggtgtcgcaactcgctagcaatatcagcgtgcatactgctcctgcagcacttcagctgggcacatcaagcgcaaactgctcaag

SEQ ID NO: 492102 - DNA, 211 bp, Homo sapiens
accagtcgaaaggcacatatatccacacatgcacacacagcacacacacaaacgcacagcacacacaaacgcacagcacacacgcacacacagcacacacacgagcacacagcacacaaacgcacagcacacgcacacacatgcacacacagcacacacactagcacacagcacacacacaaagacacagtacacatggaatgcacacaca

SEQ ID NO: 492103 - DNA, 824 bp, Homo sapiens
agaacccgaggaaatgaaaagtggtcaaatcgaagtcttcttacatagggggagcgtataacacctggtggtgatgtgatgtttgatttggctggagctgcaatccatggtgtcaggtgtcttgggttatgagggctgggcttgctggacgtacgagatgagctttgaacagtgccagatagtcgaaagctgagtaagtgaatagatcgtctgagagtgggttacaggacatgtggagttcgcgagatacagactaatgtctaggattggacggaattgggaggcagtcaatttatcagaaatgttggtgaagatcttgaactacttcgaagtgaaaccattgcgttgtgacatcaggtagcaactgcactcgtcgggcaatgcagctaacatatcaggtaggttcccgctggttccagtttctgcaagagtctaactacctctagcttaattggagtaggcaatactcagactctgagtgtctggggtgctgcttatccgtctctgctcatggtagaatgggaaagaagcagttatactgctgggatggacaactagagggtttgaggggcggtcacatggaagctgtgggacggcattaagtcggaggatgggaacgtataacttttgaggagactgggataatcaagaaggaattatggacattaggaaatactacgccattggtggcaccaaaggagtgagggttttttgaccccctatgaaatgattggctggaatacagagcggtgtgaactcgagcataacttgttctttaaacgaattacaacaggcgttgaaaacggacagaagtggagaataag

SEQ ID NO: 492104 - DNA, 301 bp, Homo sapiens
cctactcctcattgtacccattctaatcgcaatggcattcctaatgcttaccgaacgaaaaattctaggctatatacaactacgcaaaggcccaacgttgtaggccctacggctactacaaccttcgctgacgcataaactcttcaccaagagccctaaaaccgcacatctacatgacctctacatcaccgcccgaccttagctctcacatcgctcttctactatgagccccctcccataccaacccctggtcacctcacctaggctctattatctagcaccttagctagcgttactaatc

SEQ ID NO: 492105 - DNA, 137 bp, Homo sapiens
tcgatttctatgaggatcccctatttgaaaccttaatcaaagaattaatgcccatcattacacattttctatagacaggagacaaaaatgttacagcaaacttaggggtactctggtgagttattgagttataccat

SEQ ID NO: 492106 - DNA, 174 bp, Homo sapiens
  misc_feature (4)..(4): n is a, c, g, or t
cttnttctcacttcagtgcaagtccgagaaaataaaaaatcaattaattaaatattttaaaaggccaggctgggcgcactagctcacgcctgtaatcccaggactttcagaggctgaggcgggtggttcacctgagggtcaggagttcgagaccagcctggccaacatggtgaa

SEQ ID NO: 492107 - DNA, 564 bp, Homo sapiens
  misc_feature (347)..(347): n is a, c, g, or t
gataattttagtgcatgctcacccggtatgttttttttttttaactgtgaacatttggctggtttggtttttcttttttaattagataatcacacggaaaattaagctgttcatatctttaaatttaggatgtgcaaaccaaggaaagaacgcattgtgagattttaagagtgtcacttataaggggagaaggtgttcttaaaaagtcaaccagaaaacgtgttatgccttttattggttgtgcaaggactgtcttgtgtaagtgtgttctcatgaattacgattatccaattagagaataagcgtgactgtgaatacatttgtgagcacatttgtgcccgtggtgnttactatggttgtttcagcgcacattattgctgcagtgtggattttcttccaacagaaaaggtggctttcacttacgttggcacatttagacagagcaccagatgaggtttttagttccaagctccggagcacgtggggtgtgagttaacattcgacctcaagttttcttatttatcgcttaagagactatgggcatttctcatatctctttacttc

SEQ ID NO: 492108 - DNA, 320 bp, Homo sapiens
aactgatagggtcagccaactaccttaaacatgttttcattaaaacaaaaattaaaaacccagctcctatagccagacgtggtggcagatgcctgtagtcccagctaattgggagactgaggtgggaggatcctttgagcccaggagtttgcagccatcttgggcaacatagtgagacccttatttgaaaaacaaacaaacaaacaaaccaaaaccctagcaaagcacattttttatagaagctactcagtggacataattaaaacaaatggtaggatcttgaaaaaattaaaacatttagtgtgacccccatgtttaga

SEQ ID NO: 492109 - DNA, 684 bp, Homo sapiens
tcccccaaccttttcactccgatccccctaacaacctcccctccgtaatactaactacactgactcctacaccctcacaatcatggtagagccaagagccacttatccagatgaaccactgatcacgaaaaaaaatctacctctctatactaattctccctacccacatctcgcttgattatcgacattcacagacacagaactacatcctatgtatactcttctacagagaaccagcactatatccccacctatgggctcctcatcaccccgatagaggcaaaccatgcctagaacgccgtgaaccagccgggcaccagtactgtccctaatgctacacacccgtagtgaggctgccccttaccctattcatacgccacctaactgacacaacctacaacgaaagagacccttaggctccacctaacacaatctatcttaatcagcattccgccacatgacccaaagacaccataatctaagactgaccttgagagcaaaacgaacgtctaattcatgacctcagctatacaccacaatagaccatacaatacgtccaaacgcataaccccctatcacccgactcccgaacatactggatattccctgaagggcccacatgatcggcaaacacccatcccatgcgctcactagaacttgcacgccagaaccttaccaatacgg

SEQ ID NO: 492110 - DNA, 1143 bp, Homo sapiens
agcgggccagacacagtggctcacacctgtaatcttaacactttggaaggctgaggcaggcggatcacttgagcccaaaaggttagagaccaaaacccagtctctacccaaaaaaaaaaaaaaaaaaaaaattagccggggcatagttagccacagtgccggttagttcccagctatactggggaggcgtgagggtgagaaggattcaccgtgagccatgtggggaaagttggagaacgtgcacggtgagccatgtgagtcgccccaccgtgcactctccagccgggggcaacagaagtgtgagacctctagtgttcttgaaaaaaagaacaaatgtgattagaaactttagatttagaaccttattatattacccaacggggctattataggggatactggaaatagcttctcttataccaccagcctgtggtggggcccagaagccctgtgcaagacagccttttagaagaaaagctttaaaatcttttatagaaaatctctctcccagagtattctccttctcttatgtgtgtgtcctggtggcgccctgtgggcctctcttaaagttgggggcccaatctcacaaattgtgcgcgcggctaaaatgcggtttgacagaaatatatgggggcgcacatcgggaccatcacgccttctggggtgcgcggaaaaactcctttttccagagaaacgaataacactactcttcagaaggttagcaactctccccgaggttgacaccacattctgtgtggttatatgtgtctgcgtatcctccttaaaccaaaggagagagacaacggcaggaagacgatgcgtgggggctccactgtgatgtgtgggccccccgacgacgcgggtgggcctccgcttgggacaacaagacgtccgccggagggcgacctgatgaaagaacgacaacatgttcatctctccccgcggtgtcacctgagacgccgcttcgccaccaaaagaggagggtgcgccctaacgacaaccatctcacaccgcgggggggtgggtagcaaagcgcaataaccccagccagacctgggggggccgccaagaagaaacccctctcgagctacgtacacactccgctgatggcgcgggggaccacaatctgcgcgctggcaaacg

SEQ ID NO: 492111 - DNA, 143 bp, Homo sapiens
ctgcctctagagttttagactacttttcttatagcaaagctcttttatgtctgtgagtacacgactcatctatgtaaaagagcctctgtaaacaaggactgatatcgcatctgtgctctatattcatatgtacttactttcct

SEQ ID NO: 492112 - DNA, 190 bp, Homo sapiens
acatcatcctccttcacatacaggtttggattctccagtatctagggattactctagggaaggcagttaggccaaagggctacccagggtgacactgcgcatgatccgttattacagaaaagactgtctctatctttgaaagtcttgcaatgaagaaaggtagttagactactaaatctttcaatacacg

SEQ ID NO: 492113 - DNA, 382 bp, Homo sapiens
aagcgagatgtatctggaataccagtgagcgctccatgctccctgcagtggggcggcagccggtgagtctgttgctgctgccaggagaaagtgctggtcagtgtatgctgaagttgtcatgtgcctgtgtagctgcagcatccaggctgcaggaggcgattccgatgccaggtgcggctgcatcaacctaagtccacgcaggacatcgacaactctcatgatagaccagcgcgagaatggttgataatacccccttccttcctcccaggaggatactacaggacgcagatgatgatgtgactcatcagggctgagcaaccctggtgccagaagaaagatgttcctgccaaagatatgcacctccaggacatgcagtgagctg

SEQ ID NO: 492114 - DNA, 534 bp, Homo sapiens
  misc_feature (99)..(99): n is a, c, g, or t
aggtagtctaagatccctgtgctcctcttcagctatgactgtacggtgcatcagcatgagccacgacaacgtgctctgtctctctcatgtggcaggccntctcggcctctcgctgggacggagcaggaacagaatcatcattcaccgggctctctactatgacttgatcagcagcccagacatccatggtacctataaggagctccttgacacggtcactgccccccagaagaactcaagagtgctcccggatcgtctttgagaagaagctgcgcataaaatccagctttgtggcacctctggaaaagtcatatgggaccaggcccagagtcctgacgggcaaccctcgcttggacctgcaagagatcaacaactgggtgcaggcgcagatgaaagggaagctcgccaggtccacaaaggaaattcccgatgagatcagcattctccttctcggtgtggcgcacttcaaggggcagtgggtaacaaagtttgactccagaaagacttccctcgaggatttctacttggatgaag

SEQ ID NO: 492115 - DNA, 482 bp, Homo sapiens
  misc_feature (433)..(433): n is a, c, g, or t
  misc_feature (455)..(455): n is a, c, g, or t
  misc_feature (467)..(467): n is a, c, g, or t
attgtcgtgtgaaaatctacactttcaatcaaagcaggtacaatgagtaaaaaattaactctgggtatgttactcctgggaaaggacttctttatcttgtttataacagagcagtttcaagatgtacaggtaccaaatattgatgttcacaagtgtttgatgcccataaaagctgagcatttgttgatatgtgattgttataatcactctggttctctaatttccagttcttaaaattcagtctgcttgagactctgttccatgtccagaatatttggggatagtttaagcctttgctttctgagagcatatttggtctccagggtggggtctgtgaaaatctttttatattcctacattattgataacctttcctatgggaaagggaatttcctttcaacacctttttatggggcttgggggtaatttaatnaaattctgggagggaatccttnggggaatagtgnggaaaaagtaaattc

SEQ ID NO: 492116 - DNA, 217 bp, Homo sapiens
tggggtttcactctgacacccaagctgagtgcagtggtgcaatcacgggtgactacagccttgacctcctggactgaagcgatccttccaccttaatctctctagtatcggggaccacatgcacatgtcaccatgcctggctaatttttgattttttgtaaaaaccaggtctcactattttgcttaagcttgtgttgaacttctgaacacaagtgat

SEQ ID NO: 492117 - DNA, 840 bp, Homo sapiens
gttgagaacaatccaactggggggtcttgtcctgttagtgagaatgctggcccacattcgtggtgagagcacccacgtgagtatgtgtcggtggtgaaagagccactgtcgatgcccgacacgagatcgagtcgatggattagcatctggcttggtgagctcaagcagaggtctcaattcacgatgtgatgatttgcctccgccgaagaagaatgaaagtcgttggcgatgaaatgaggccgcaggaagcgtcgcgagctaaagaacagcgatcgtcggtgtcgaacaagaacaaaccagatgtgaggagtcctgtgctcgaaatagtgtgtctccgacaagatttagtttgtgagcaagagtgtgggtttttgttggggatggatgtgttttgcacacacaggtggtagatagggcaaccaggtgtgggggggtggttctcccacgaagccgactgatagattgtggctgggtgagcaccgactcggtgctgtcccacaagacacatagggggttgccccacacacgatgagtggctgcgcactatggatccacggatggtttgctagacatgtgttcgcaagagccatccacctacgtgtgttggtccctttgatgttggtgcggggtgtgtctcactataaggactctgcccgtgtgtgtgcgcacgacgcgggggaagaagtggtgcggagtcgtgtgcacccactaagagggttgttttgccaacagacagaaaagtgcgcgtgtgttgagggaaggggagatgttgcgccctcctgccgtcggtataggtgatctaggtgagcgtccatccacgaccacgaggggagaagaggt

SEQ ID NO: 492118 - DNA, 111 bp, Homo sapiens
tatagcatctgagcctgaatttcacacattcctagagagaagaaatgggggttcaatcttggaccataaaattggtttcaaaggagcacaaaggccaggagcggtggagca

SEQ ID NO: 492119 - DNA, 231 bp, Homo sapiens
  misc_feature (23)..(24): n is a, c, g, or t
  misc_feature (31)..(31): n is a, c, g, or t
  misc_feature (49)..(49): n is a, c, g, or t
  misc_feature (55)..(56): n is a, c, g, or t
  misc_feature (59)..(59): n is a, c, g, or t
  misc_feature (67)..(67): n is a, c, g, or t
  misc_feature (74)..(75): n is a, c, g, or t
  misc_feature (94)..(94): n is a, c, g, or t
  misc_feature (119)..(119): n is a, c, g, or t
  misc_feature (182)..(182): n is a, c, g, or t
  misc_feature (195)..(195): n is a, c, g, or t
  misc_feature (219)..(219): n is a, c, g, or t
gagagtgcatagaaatatgcaanntaaaatntttgcatgaattcatccncacatnncangtgaagtnctccccnnattccataagatggaacantatagaagtctcatttctctgtgancttctgtccattaggaaagtaaggagattgttatctatatctagtctcctttccatattgaantgcatggctctanatcctcagtgtatttttatccctnctcgagttattt

SEQ ID NO: 492120 - DNA, 425 bp, Homo sapiens
  misc_feature (425)..(425): n is a, c, g, or t
tctcccagaaagtgcgagagccagcaaaggaaggcccacactcgagcctctgcaagactggtggtcagcacctccctgtcagtagtctgctctgcatggagtcgtgagagggcgcgaagtgtgcatggtcatctgtctgagaagtagtatggcgtcaggttactcataggagcgaagctttgggaagtagcaaagtgacttgagcatgtgcatccttggtagcttccctgtaacctaaacaaaagtggagacacgagagcatcacggcggcgtaactgacagctgtccacaatcttggatggatcccgggtgcggtgcggtgtcgctggattgcgcgtgcggcctccctctgtgtgcttgtccttcgtcaattttgttgtggtgtgctagttacattctgggcattgattgcactgtgtaattcn

SEQ ID NO: 492121 - DNA, 586 bp, Homo sapiens
ccaagttgacacttaaccctactgctcatgttgccacatcagggcatatcctgctctctgggtccaacacttccctgcactccttctttcctggagttgagccactcacagctgggactgagtttgtagagtaatgtctcagagtcacaaatcctggctctgtgggaagcctacatccaaccctagcacagagagtgaacctgtaacccaagaccccaggtgtcacgaataggttggcaagatcctgggcataagactctagtcccacggacacttcaagcacctgcacctagaactcagcaccactgcacttgcttgtaggtcatgtgatatctgacatgaagagacagtccccttggctaaatctccccattatgaaaaaaataagaataggaggacctcaaaagcccttgacaactaacattctttacaatatactttacagctggctgctcctcagacacatcaaggcccctcacatctcaatcttagtaacatgtgtcaactttgacctgtgagttcttgaaagaatagtctatatctaatgcactgacatttaaatatattgagccatggagtaataaca

SEQ ID NO: 492122 - DNA, 214 bp, Homo sapiens
gagcctggtccgctagcggcattagtgaacgtatcaaaacagacgacagaccaatggaacagaataagaatccggaaataaaccctgacacctatggtcaattaatctttgacaagggaggcaagaacataaaatgggaaaaggaaagcctattcagcaagcattgctgggcgttcacttaatgccgctagcgccgttcacttaatgccgctag

SEQ ID NO: 492123 - DNA, 143 bp, Homo sapiens
gtgagactggccatgccttacaagtgcatgcatgctcactgatttcatcctcaagtttccgcactgtgcccaccagaagtatgtcctacaagcctggcagaaggcagacatcgatactcatatacagccacggggctacccga

SEQ ID NO: 492124 - DNA, 411 bp, Homo sapiens
ggaaggcagccctgccagcatctggacattagagtttcctacccatagaactgtaagagtcaattgtatggtttaagccactaaacttaatgtggtaactgttagagcagccacaggaaactaatacacccttctgtcctaaaccagtcacttagaaacattgaagctacaatttctttgctcatttgagtgcagaataaagctaatagagttctattttattttttctcccattcattttcctagtaagatattatttctgactatttgatgagcaagaacattgaggggtaaggagtgaagttcagtaactttgcccaggttgaatggttaatgattgagcaggattaatctaagctgcagagacactgtctgggaacatcatgcaagatcagggtctcatataaaaat

SEQ ID NO: 492125 - DNA, 778 bp, Homo sapiens
  misc_feature (34)..(34): n is a, c, g, or t
  misc_feature (51)..(52): n is a, c, g, or t
  misc_feature (140)..(140): n is a, c, g, or t
  misc_feature (150)..(151): n is a, c, g, or t
  misc_feature (201)..(201): n is a, c, g, or t
  misc_feature (205)..(205): n is a, c, g, or t
  misc_feature (217)..(217): n is a, c, g, or t
  misc_feature (221)..(221): n is a, c, g, or t
  misc_feature (229)..(229): n is a, c, g, or t
  misc_feature (266)..(267): n is a, c, g, or t
  misc_feature (273)..(274): n is a, c, g, or t
  misc_feature (277)..(277): n is a, c, g, or t
  misc_feature (289)..(289): n is a, c, g, or t
  misc_feature (297)..(298): n is a, c, g, or t
  misc_feature (300)..(300): n is a, c, g, or t
  misc_feature (304)..(304): n is a, c, g, or t
  misc_feature (307)..(307): n is a, c, g, or t
  misc_feature (311)..(314): n is a, c, g, or t
  misc_feature (317)..(319): n is a, c, g, or t
  misc_feature (322)..(322): n is a, c, g, or t
  misc_feature (324)..(326): n is a, c, g, or t
  misc_feature (329)..(330): n is a, c, g, or t
  misc_feature (332)..(333): n is a, c, g, or t
  misc_feature (338)..(340): n is a, c, g, or t
  misc_feature (343)..(343): n is a, c, g, or t
  misc_feature (350)..(351): n is a, c, g, or t
  misc_feature (421)..(421): n is a, c, g, or t
  misc_feature (426)..(426): n is a, c, g, or t
  misc_feature (440)..(440): n is a, c, g, or t
  misc_feature (471)..(471): n is a, c, g, or t
  misc_feature (496)..(497): n is a, c, g, or t
  misc_feature (517)..(517): n is a, c, g, or t
  misc_feature (528)..(528): n is a, c, g, or t
  misc_feature (614)..(614): n is a, c, g, or t
  misc_feature (617)..(618): n is a, c, g, or t
  misc_feature (621)..(621): n is a, c, g, or t
  misc_feature (623)..(623): n is a, c, g, or t
  misc_feature (628)..(628): n is a, c, g, or t
  misc_feature (634)..(634): n is a, c, g, or t
  misc_feature (654)..(654): n is a, c, g, or t
  misc_feature (664)..(664): n is a, c, g, or t
  misc_feature (666)..(666): n is a, c, g, or t
  misc_feature (670)..(670): n is a, c, g, or t
  misc_feature (672)..(672): n is a, c, g, or t
  misc_feature (691)..(691): n is a, c, g, or t
  misc_feature (702)..(702): n is a, c, g, or t
  misc_feature (759)..(759): n is a, c, g, or t
cgctccgaaccttgtcctcgctgtcgcgccggcncctcggagccccacagnncgggaaggaggccgccgcgggccgggcgcccgctctgccaagcggacccgcaacccggaaaggcggcgcggcggagtggagccggatnatgctcaganngggccccggccggccagagccgcgggcatgtcggaggcgcggaaagggcnggangaggcggagganagcnagtacgantctggcattgagtctctgcgctctctgcgctccctanncgagtnnacntcggctccagcntccgggcnntngganggnagcnnnnagnnntgnannnatnntnngggannngtnaaggaannaaaggagaaggaagacgcggatggggagcgggctgattccacctatggctcctcctcgctcacctacacnctgtncttgctggggggcnccgaggctgaggacccggccccacgcctgcnactcccccacgtgggggcgctgagnnctcagcagctggaaacactnacttacatctncgaggacggagacacgctggtccacctggcagtgattcatgaggccccagcggggcggcgcgggggccgggcggggcggccccagnagnnccngnacatncaaaanaacctttaccagacagcacnccatctggcngnacancnggaccaaccgggcgcagtncgggcactggngctgaagggggccagccgggcactacaggaccggcatggtgacacagcccttcatgnggcctgccagcgccacact

SEQ ID NO: 492126 - DNA, 418 bp, Homo sapiens
  misc_feature (14)..(14): n is a, c, g, or t
  misc_feature (27)..(27): n is a, c, g, or t
  misc_feature (86)..(86): n is a, c, g, or t
  misc_feature (115)..(115): n is a, c, g, or t
  misc_feature (140)..(140): n is a, c, g, or t
tagccagttggaanaaaaagtaattgngtaggatattacctgtgccggggtatttcccccgttatttgatcaagttcctccccatncccttttgaaatatatatgtaagttaaanagaaaaaacttggcccagtccgcgngtcgtcacgccctgtaatcccaacactttgggaggctgaggcgggcagatcacttgaggtcaagagtttgagaccagccctggctaacatggtgaacccagtctctactaaaaaaaaaaagacaaaaacattagctgagcatggtggcacatgtctgtagtctcagctactcgggaagctgagatgggaggattgctttaacccaggaggtggagattgcagtgagctgagatcacaccactgcactccagtctgggtgacaaagtgagactccatct

SEQ ID NO: 492127 - DNA, 220 bp, Homo sapiens
gatccacctcggaaaatcatcaccttggacaagtcacttaacctctatctctaaatattaccacactttataaaatgaccaatattactaagtatgtaccttatgggcttacataacgtgtacgatactatgtgtaacaaggcttggaatgatgcctggaatatattacaactgccatctacttgtaaacttgtgacctatagtaactggtgctgctgac

SEQ ID NO: 492128 - DNA, 146 bp, Homo sapiens
tacccgtcagcattccagcagccgggaaggtagatgcgatatcatcgcaagactccgggagaacgggatcaaaaacgtgtgatacaggaagggcgaggagagctcccggactttcaagatgggaccaaggccacgttcccataccg

SEQ ID NO: 492129 - DNA, 524 bp, Homo sapiens
  misc_feature (45)..(45): n is a, c, g, or t
  misc_feature (57)..(57): n is a, c, g, or t
  misc_feature (102)..(102): n is a, c, g, or t
  misc_feature (111)..(111): n is a, c, g, or t
  misc_feature (125)..(127): n is a, c, g, or t
  misc_feature (129)..(129): n is a, c, g, or t
  misc_feature (133)..(139): n is a, c, g, or t
  misc_feature (141)..(142): n is a, c, g, or t
  misc_feature (148)..(148): n is a, c, g, or t
  misc_feature (153)..(153): n is a, c, g, or t
  misc_feature (155)..(156): n is a, c, g, or t
  misc_feature (162)..(165): n is a, c, g, or t
  misc_feature (168)..(170): n is a, c, g, or t
  misc_feature (174)..(176): n is a, c, g, or t
  misc_feature (187)..(188): n is a, c, g, or t
  misc_feature (195)..(196): n is a, c, g, or t
  misc_feature (199)..(199): n is a, c, g, or t
  misc_feature (201)..(201): n is a, c, g, or t
  misc_feature (204)..(205): n is a, c, g, or t
  misc_feature (210)..(212): n is a, c, g, or t
  misc_feature (215)..(215): n is a, c, g, or t
  misc_feature (217)..(217): n is a, c, g, or t
  misc_feature (220)..(220): n is a, c, g, or t
  misc_feature (222)..(222): n is a, c, g, or t
  misc_feature (228)..(230): n is a, c, g, or t
  misc_feature (232)..(232): n is a, c, g, or t
  misc_feature (249)..(249): n is a, c, g, or t
  misc_feature (257)..(257): n is a, c, g, or t
  misc_feature (275)..(277): n is a, c, g, or t
  misc_feature (288)..(288): n is a, c, g, or t
  misc_feature (290)..(292): n is a, c, g, or t
  misc_feature (298)..(300): n is a, c, g, or t
  misc_feature (305)..(305): n is a, c, g, or t
  misc_feature (314)..(314): n is a, c, g, or t
  misc_feature (316)..(317): n is a, c, g, or t
  misc_feature (321)..(321): n is a, c, g, or t
  misc_feature (326)..(326): n is a, c, g, or t
  misc_feature (329)..(329): n is a, c, g, or t
  misc_feature (334)..(334): n is a, c, g, or t
  misc_feature (336)..(336): n is a, c, g, or t
  misc_feature (338)..(338): n is a, c, g, or t
  misc_feature (342)..(342): n is a, c, g, or t
  misc_feature (344)..(345): n is a, c, g, or t
  misc_feature (354)..(354): n is a, c, g, or t
  misc_feature (356)..(357): n is a, c, g, or t
  misc_feature (364)..(364): n is a, c, g, or t
  misc_feature (375)..(375): n is a, c, g, or t
  misc_feature (400)..(400): n is a, c, g, or t
  misc_feature (408)..(408): n is a, c, g, or t
  misc_feature (417)..(417): n is a, c, g, or t
tcactgaaaatagatttcatttcattcaaattagaaatgtgttcncccaaaccgccncccaacaaaggtctctgcttgataaatgaaaagatagtaaaaganaacttcccntttctttttatttnnntntatnnnnnnntnnataatnaaaananntttaannnnggnnntatnnnttattattgtnnattattnnctntnaannaaaannntananaananataaannntngggttattttaattttngaaatttnttatctatttcacttaannntggtataattnannnagaaannnaaatnaccctcaanannaagntttcnttnagcanancntaanannaacaataananngtagggnacacctcctgngaaggtttgcttgtgttcagctgangattaatnggaaacagngaaaaagcaacgtcctgtgatcagtaactttaaagacaagcttggttccccctttctggcactactgacattcccaccattctagcttccaaattctggaaaaagag

SEQ ID NO: 492130 - DNA, 140 bp, Homo sapiens
aaattgtaaactttcttcaaatactgagggtttgtttttgtattggtattaagctcatcagctatagttagtgtaatgtattttatggtgtggcccaaggaagccaaaagattggatacccttgggcacacattatggag

SEQ ID NO: 492131 - DNA, 199 bp, Homo sapiens
aaaccccccccctggggttccttttttttcccttaacccttttgggtttttattaaccccattccgggccaattcttttttgaaaaccccccaggtttttttacagagccacccaaaaattttttgtccccacaaagcaattttttggggggttgagaaaccaggtttggccccaaaaaaaatccattttgggaaagga

SEQ ID NO: 492132 - DNA, 741 bp, Homo sapiens
tttgtgattaaaggatcgtttttatttctcgcgaagcggtttggcactccctcgggctcctccaggccacacggacacacacggacataagcacacaggtactaggataacagccaggccccaagcttagtccgcggggatttgtgggggaaggaggggggtgcctggcctccccgagtggcctttgaggaagaagaggccgcagccgatggagatcggtcggtgaagctccggggccaagcccctcccttccctccacgacccagcgcccaggctcatatggcctggtcctgcctccgtctcaggctgagctcgcgggctgctgccaggaaggctgccccggtgagcagctcggcgatgaagctgatccagcccagggccagggaccagccgaagctgatgtccacctggtccaggagggccttctcctccaagagacacagcgcctcccggaaggcggcggctgaatacgctatgtagacgctgatcccagcgagggtcaccatggtgagaagttgccggctcgattcgctgactgtcacgttctccagcctgaaggggttcatcagcggtgtgcacgggctctgcacccggcaggtccgccagaggccggagtgggagctcagaggctcgggctggctgcgattgatggaccccagcaggtcctgcgcccccgggccagtcctctccagccgctcggtgtcaatgatataccagaagtccgtgccgatggcggccgca

SEQ ID NO: 492133 - DNA, 499 bp, Homo sapiens
  misc_feature (24)..(24): n is a, c, g, or t
ggcacgaggctgatgctaatattntaataaacattcttcccaattcatatagctattcacatatatgtatagattctatttttcataaccatgataatatcatatgatatcatatggtgtgaagctacaatctggttttatccgccattctgttttataccaggaacttctttccatgacggcaaagccctgcagaagttttccattctattgattgactgttaataattcaccattgacatccatggagctatcaaaaagcatggtgagaagttgccggctcgattcgctgactgtcacgttctccagcctgaaggggttcatcagcggtgtgcacgggctctgcacccggcaggtccgccagaggccggagtgggagctcagaggctcgggctggctgcgattgatggaccccagcaggtcctgcgcccccgggccagtcctctccagccgctcggtgtcaatgatataccagaagtccgtgccgatggcggccgca

SEQ ID NO: 492134 - DNA, 879 bp, Homo sapiens
tttgtgattaaaggatcgtttttatttctcgcgaagcggtttggcactccctcgggctcctccaggccacacggacacacacggacataagcacacaggtactaggataacagccaggccccaagcttagtccgcggggatttgtgggggaaggaggggggtgcctggcctccccgagtggcctttgaggaagaagaggccgcagccgatggagatcggtcggtgaagctccggggccaagcccctcccttccctccacgacccagcgcccaggctcatatggcctggtcctgcctccgtctcaggctgagctcgcgggctgctgccaggaaggctgccccggtgagcagctcggcgatgaagctgatccagcccagggccagggaccagccgaagctgatgtccacctggtccaggagggccttctcctccaagagacacagcgcctcccggaaggcggcggctgaatacgctatgtagacgctgatcccagcgagggtcaccatggctccaaagaggaagagaattccagtgagcaggaggaggaggtaggcttggaggaggaagctcagaaaccccgtcatccccccaaaaaccatcaggatcaggctgagcggcagcagaatcacaaatgtcccatgcatggtgagaagttgccggctcgattcgctgactgtcacgttctccagcctgaaggggttcatcagcggtgtgcacgggctctgcacccggcaggtccgccagaggccggagtgggagctcagaggctcgggctggctgcgattgatggaccccagcaggtcctgcgcccccgggccagtcctctccagccgctcggtgtcaatgatataccagaagtccgtgccgatggcggccgca

SEQ ID NO: 492135 - DNA, 413 bp, Homo sapiens
tacagagctccaaagctagaggacagaggagtgatttccaggggtgaagcaaggactataagggggaccaggcacagcggctcacacctgtaatcccagcactttgggaggctgaagcaagaggatcacttgaagccaggaatttgagaccagcctgggcaacacagcaagacgccatggtgagaagttgccggctcgattcgctgactgtcacgttctccagcctgaaggggttcatcagcggtgtgcacgggctctgcacccggcaggtccgccagaggccggagtgggagctcagaggctcgggctggctgcgattgatggaccccagcaggtcctgcgcccccgggccagtcctctccagccgctcggtgtcaatgatataccagaagtccgtgccgatggcggccgca

SEQ ID NO: 492136 - DNA, 106 bp, Homo sapiens
aacttttttcttcccccctgaaaaaaaaaatttgaaaaaaaatttggtttttccaaaatttgctatgaaagggtgatgggtttattaaaaaagtccattcctggga

SEQ ID NO: 492137 - DNA, 366 bp, Homo sapiens
ctcatgtttgcagatgaagttggaggtggctcctgtattttgctggtcttgctgatgcatagcaacggttttcctcagtgttggaggaactgcattatactgcactttcggtgacatggagtcacctgtttgtactgactttgcagacaacatggacttctattacactaagttacttcagggagtggcagaactgaagcactggatctacctctcctagcagcattccagacacagacatgctggcagtgagagtgaaaggcgggagactttctaaacagtttttctttcaggaattctgtagcattcccccttccctctgttaggaaccaaggacatcagaaatagcaactttaagtggcaagc

SEQ ID NO: 492138 - DNA, 1214 bp, Homo sapiens
  misc_feature (307)..(307): n is a, c, g, or t
  misc_feature (381)..(381): n is a, c, g, or t
agcgggctggggtgggagcgggcgagatgcgccgggcgggcggtgcccactgacctccctcggcggcccggcccgggcagcgcccgagcccaggcagccccgcccgccgcgccccgccagccatgggccacgggcccacaccgcgccgcggggaggaccgagccataagagggcagccgctgagaggaacgacgacggacgagcccgcaggtattttcagtgctgtacaagcgtcttgagttactctggtagcttttccagaaagacccatgagcttcaccagcagtttctcgaggttacgatgaanggtcctctggatgtcagcatggcagccacaaagctggagaaccagctgcacagcgcacagagagaacctcctgnttccttcagacgggagcatgccagcacgcatcaaggggctgtaactccgagaatcaggcggtctgaaagcagcactgcacagatttacacatatgagctgacagtcaaagagttcggaacagacaggagacgggacttctaaaagcaggtgaattaaagacaagatgtgaagagcatggagaaaccaagactgaacacgtgcaccagacgcaccgcacacaatgcctgcaggttgttgacacggacactgcagcagcagacaaacgccgacagcatacacaggagcaggggaggaaacacgcattcgaagagaacgaagagaacaacgtacctggaaagaagcatgacaggacgcagagaagtgaaaaaagatggacaccaagaaggatcagacacgagaagcaggaaaggagcgcagaggcacaggacagaaagagccagtaaccgaaaaaccacagaagagagaaagcgagcacaaaacgagagatcaaagaacacacaaaacggagactacagaatcgccaaaccgcgacagggagagcgcgccgagcgagcgcgacgcgtacgcagagaagagagccacgacgaaaaggaagagagatcaccgacaaaacgagccgacaagcgagaagagaaaagacagagcaggacacaagcacacgtgcaccacggaagatgaacaaacgatacaaacaaataggagacagagcggacacaaaccagcagcaggcaccaacagacgtagaggccgaagaccacacaataggagagagaaagaagacggacacgaaaaagcaccagtagagcaatcgcggcaggagagagagtgacct

SEQ ID NO: 492139 - DNA, 1291 bp, Homo sapiens
  misc_feature (384)..(384): n is a, c, g, or t
  misc_feature (458)..(458): n is a, c, g, or t
agcgggctggggtgggagcgggcgagatgcgccgggcgggcggtgcccactgacctccctcggcggcccggcccgggcagcgcccgagcccaggcagccccgcccgccgcgccccgccagccatgggccacgggcccacaccgcgccgcggggaggaccgagccataagagggcagccgctgagaggaacgacgacggacgagcccgcaggtagcccagcggagtggagtcctgaggcatccaccggaacagcgcccacgaagtgtgtccgtgatgaaagctatcatggcttttcagtgctgtacaagcgtcttgagttactctggtagcttttccagaaagacccatgagcttcaccagcagtttctcgaggttacgatgaanggtcctctggatgtcagcatggcagccacaaagctggagaaccagctgcacagcgcacagagagaacctcctgnttccttcagacgggagcatgccagcacgcatcaaggggctgtaactccgagaatcaggcggtctgaaagcagcactgcacagatttacacatatgagctgacagtcaaagagttcggaacagacaggagacgggacttctaaaagcaggtgaattaaagacaagatgtgaagagcatggagaaaccaagactgaacacgtgcaccagacgcaccgcacacaatgcctgcaggttgttgacacggacactgcagcagcagacaaacgccgacagcatacacaggagcaggggaggaaacacgcattcgaagagaacgaagagaacaacgtacctggaaagaagcatgacaggacgcagagaagtgaaaaaagatggacaccaagaaggatcagacacgagaagcaggaaaggagcgcagaggcacaggacagaaagagccagtaaccgaaaaaccacagaagagagaaagcgagcacaaaacgagagatcaaagaacacacaaaacggagactacagaatcgccaaaccgcgacagggagagcgcgccgagcgagcgcgacgcgtacgcagagaagagagccacgacgaaaaggaagagagatcaccgacaaaacgagccgacaagcgagaagagaaaagacagagcaggacacaagcacacgtgcaccacggaagatgaacaaacgatacaaacaaataggagacagagcggacacaaaccagcagcaggcaccaacagacgtagaggccgaagaccacacaataggagagagaaagaagacggacacgaaaaagcaccagtagagcaatcgcggcaggagagagagtgacct

SEQ ID NO: 492140 - DNA, 942 bp, Homo sapiens
taacacaggtatctcctgcatgccatcgagccaggtgagatctgaatgctcccgtggtaattgctacactagctcttgtggtgacatgtctgattcgtttcaaggctgtcctagtggatggcctaggtgtactgtttgtcctgaactttagacgatttcatgacagagaaagtagtgtccataggatccttgaatactattggcgcaagattctcagggtagagccgaatcgactaggctagggttgtgcggcgtctgcttctccccagaggtgaatgggctgatactactgggggcctagcccgaccgttcacgtgaatttgcgttgaggcgtgcctgcgaacccatcattattcattactatgaggggtgtcccttcggctccctaactgcctgatcgtttgtgatccgtcgcaagttctagccctctcgtgttcggccatttggctgtgcttgccctgtccctgtggttccttgcccagtgtcccacccttggactggcagttttgtgggcccctgacattgtcgcctccgacatgtgtcgtgtcattccatcctgggttcttaccctgaatgagcgtggttcctgctttcttgggctggtgagtccttgagacgaagtgtggtgggcctggttggaagctcttggtttgttgatgctcccccgctttgagtggacaagcgtttgcggctgttttgatcgctttcgtggcctgtggagcaccgtcgtccagggattgcgaaagcctggtcaggctgtctccagttggccggcccggctaccggccgtttccggggcggggcctcaggttctcgtttggccttaccgaagtggtttcaagacaacgcccgcctttcgcgtttgggcgcgcaatggcccacgaggcctttccccgcctttctagagagagggtctcccctcggttgggcgaccacttgcgg

SEQ ID NO: 492141 - DNA, 188 bp, Homo sapiens
cagtgttctcaagacacataattgtcagattcaccagagttgaaatgaaggaaaaaatgttaacggcagcgagagagaaaggtcgggttaccgcacaaagggtaagcccactcaggactaaacagctcgtatctcttgagcaaaatgctctacaatgcgcagaagcagtgcgggcgcgcgatagttca

SEQ ID NO: 492142 - DNA, 359 bp, Homo sapiens
  misc_feature (247)..(247): n is a, c, g, or t
  misc_feature (251)..(251): n is a, c, g, or t
  misc_feature (258)..(258): n is a, c, g, or t
  misc_feature (262)..(262): n is a, c, g, or t
  misc_feature (350)..(350): n is a, c, g, or t
gtctgattccatctttataaccaaagccaattaagatcttaaaactaaacatataacttcatcttttgacaagtacttagagcctgagttgctccacaggaatccaggaactggcacaggaaaaggatctcagctggtggtgtgggaagatggaaaccaacttctccattcctctgaatgaaactgaggaggtgctccctgagcctgctggccacaccgttctgtggatcttctcattgctattttnttgnattcacntttntttttttgggtaatgggaaatgggcttgtgatatgggtggactgggttaacgcggtggacacgcacacagtacaaacaacacatactngttgacact

SEQ ID NO: 492143 - DNA, 111 bp, Homo sapiens
ggcctgttttatttcttttaaaaaaaggtgatttctcagaaattgatattaaaccctatcttatcttctcctgaactgttgattttaattaaaattaagggctaattccca

SEQ ID NO: 492144 - DNA, 776 bp, Homo sapiens
ggtggcatgccccctgtggtcccagctactcaggaggctgaggcagagaattgcttaaaaacccaggaggtggaggttgcagtgagctgagatcgtgccagtgcactccagcctgggtgacagagcaagatcttctgtctcggaaaaaaaaaaaaaagtttacaaagcagacttgagttgcagttggcacgaatctgggctttacgtgcagccttccaccttccgtggaatttcagggtggttctccttgccttcggcctcccaaattagctgagactccaggcattccaccaccacacctccctaattttttggtattttgggtacagacggggtttggccatgttgggctacgctggtctcggactccttgagctcaagtgacccgcctacctcggcctttcaaagtgctgggattacacggtgtgggccacttgcacgcagccatgtttccagtttccttgacgggagattcctaggagtagaatggctgggctgtgtggtaacttccaggcctccttaaagcttaagcctggacaggggtagagcatggtttccactgcattctctatagtcacagtgagtttgcaggttcacccacagcgttcagtggcgggcggaaacttggggactgacacaggggaccttgaagtgtccaagggggggctacattggaagccctcatgtgaagtcccccgcattggaccctgacacatcgaagagtcctcaaacaaatgtcaatccctgtagacacttcgtgtaagtactaagaatca

SEQ ID NO: 492145 - DNA, 339 bp, Homo sapiens
caagtacgcctggctaattttcttatttttgtaaagactgggtcttcccatgtgcttaggctggtctggaactcctggcctcaagctatcctctcaacatggcctcccaaagtgctggaattaccaccatggcctcccaaagtgctgggattaccaccatggcctcccaaagtgctgggattaccaccattttaccaattcatatcttgagtgcattccttccaacttttctttatatcatctatggtgtgtttacagacaatttgagaatatataacaattttatccgtactttcatccatatattattaagcttacacaattttctcaggtcattca

SEQ ID NO: 492146 - DNA, 155 bp, Homo sapiens
tttctttttggctttctggacagtgctgactccagctctttccttcttgggcctctagatcaaataataagaaggtaatcaaaatgtaataattattagtagtaaggctaggagggtgatattggatcaggagaacgtggttactagcacagaga

SEQ ID NO: 492147 - DNA, 377 bp, Homo sapiens
ttaaacaccaaaattgtgtttaacagaaccaaacagcgccacgcacttgtgaccctgacctgaagcttctggtcgagaaggcccttgaactcccaggccctccctgtaagcaggttgggcagtgcagagggcacagggcacaggcggagccacagggaaagatgagcagggtgctacccacaggaaggtgccctcccgatccccccacagcctctgccccctgtaaacacagtggcctgtcttctctgggcctcttcccttttctctgcatcctgccctctattttcttctcactaacacagaatggaacatttattttgtttgttacatgatcttggtaaatacttgtttgattgtaaataaaaggtgaatgagta

SEQ ID NO: 492148 - DNA, 127 bp, Homo sapiens
tgatagatcgagctcgtaccgaatccggcaggcacaaccctcacattagaacatccaatgatacttcttaattaggttttttttttgagacggagtttcgctcttgtcgcccaaggtgggatgcaat

SEQ ID NO: 492149 - DNA, 431 bp, Homo sapiens
  misc_feature (323)..(323): n is a, c, g, or t
  misc_feature (342)..(342): n is a, c, g, or t
gattcctatggctcaagcctgtgtcctccctgctgagggatgggcaccctctccctgcccctgagtcctcccttcgccacgaatcacctcctcctccctccacagacatccacgtctgcttgcccagtcagttcaaatgcaccaacaccaaccgctgtattcccggcatcttccgctgcagtgggcaggacaactgcggagatggggaggatgagagggactgccgtgagtgtcagaggtggtggtgggccggtggtgggagatgacacggaagcagggcaggcagaatctccccacagctttgagaggctctcaaataactntagtagatgggcaacacanattatattgggtgtaacttgctttgctcataaaaatcatcatgcatgatatagagacatagagatccagaaaacaaaaagcaccaaaac

SEQ ID NO: 492150 - DNA, 803 bp, Homo sapiens
  misc_feature (14)..(14): n is a, c, g, or t
  misc_feature (21)..(21): n is a, c, g, or t
  misc_feature (287)..(287): n is a, c, g, or t
cggcattcgtcccntcgactntacgccagtcagcccagtcagcccctcaaccagttccgtcgctgctgtgcactgctgcacgtgctggacgtgcgctaggcctcagtacccttgccaagtggcacgaagagcccctaactgcttccattagccgtggccattgggacacttcgagccttacccatgtgcaagtcccccatggaattaagcacaagttatcttctggcgcctggctggctcacgtttgaccaattctcactctagggctaggttcgcattcacggtcncgtctacttcggtgttcaaccttaacttgcaagcaacacgcaacccgtcgcacaccaacactatacgccaaggcacaccccgttgtaacttctcactggtggaccccggcaacacgccacaccaccccggtcaacgcggtaaaccccgaacattttcctcacagggttcacacgtggcacaactacacccacacgcacacctttttgacaccctttatcctggcggcctttgggcacacacgggcacctgtttacaccctgtaaacccttggcaaacgccgtgcaaaagagccgtcaggaccccgagcaggtctcataggtgtgtcacaactcatcactctgctgtatcacagggtcgaggcacataacgaaagcgccgagtgggttccatcaaacagagccgcggcagcatgacttacacgtacgagcggccaacgcctcaacacatatgcgcgacgctcccgcattttggggccacgcaagtccccctttgcggccgactcgtcccacacatac

SEQ ID NO: 492151 - DNA, 1083 bp, Homo sapiens
gggtcaatcaagatgatctgtgaatactgggggcattccataaccttccctccttaggtgggtctaaaacaaatggatttggctaactcagtgggctggagttggagaagcaacactcccttgaatctataggtggaatccagacctacaaactctggatatctggatgctggttcaagaactggccaatctggcgttccccaagaggcaggtctataccattgggtttctcacccgggtcaacaattccagggtctccccatataagagggaatctaagaactggccagtcttttcctctggggtgatccaagaatctcgtgggtgagaacgtggaggaactcgagggctacataagaggggtccctcagggagggagcacagaaagccagagaggaacttagaggcccagtagtgttccagtggggggttcaccgaggacagtggcagaaacctttaccaccatagtcatttacccagaaggccgtgtcggatattcaggaacacctggcccccatcccaggagagagccccattccctccatcttggctacctgggggaagggggcatacacggggaaggggacatcagttggcactcagggaggcagggtcagcgccaggcttggtgtgagaacctcgggggcatagcaagccccatctatcggtttcaccccaatcccttcctacagtcccatcggccccattcacatcggggcagcagctcgaggcagtccatcgccaatacaaatggcgtcaaagagcgggaaactagaacttgaaggccggggaaagccggactgcccgacaacccaggcgctagcgagagggcaacggggcccggagctctttccccaataggggggcgccccaagcgggcagagaattgcgggaacacgtaagcggggagacaaaagctgcagaaaggagggtaccccgcgaaaaagggtccggggtcagagagccagccccagaagagagagaccctcagggagaaaacaccacaagaagacacacagaggggtagcccactatacaggaacgacaccacgaggtacggtgcttgataatgttctatatttg

SEQ ID NO: 492152 - DNA, 269 bp, Homo sapiens
gatgaacacatttaataacaattcagaactgaactgaaacgtggcacaaacatgacaactatccaggcatgccttcaagcatctccctcaggagggattcgctacaccctagacttcattgtggggaggattacaagttctttggaagaattcctagttcacactttcttgaaattttacagaagaattttagggccgaaacatactgggttcattactcttcacttccagggacaaatctgatgctttcctcaaaccacattaagctt

SEQ ID NO: 492153 - DNA, 478 bp, Homo sapiens
gagttctggccaagtctggagctttcttcacactcggctctcagagctctgggttcagaaaaaactgagcatggtgagagaagacagtgtcagaccgaggccccctggaggacctttggaacctctgatagtctgtcataccagagcatgattttctctaatgttcagacctggcttcactgaggaatagttcaggggatcagggcctagagacaagactcccaactgccttatttccctcctgttttcctggcaaccccactacttcctccaaaggtttctgtatgcgaagttgctagcctgctggctgagctccggagcattaatgaggctacggtacaatccagacatcaggcctgctccatgatccctgtcaggaattcagtgaggatgctactcctcccagtcactgacaccctgatacactgagtggaaatctgccaaagatggcggtcaagggagcccagtggttcatgag

SEQ ID NO: 492154 - DNA, 573 bp, Homo sapiens
ggagacgggtgtctcacgcaaaggggaggaaggaggcgacagtctcttccctgaatactgagggaaaggctgtagatggtcacgaaatctctcctgagctcgcgctgtcctctcgggtggccacagcctgatacaggctggaaaggtccaggagtggggtccgagcccaggaccgggtgagggccgcagagccaacctagccctctggtccctggagggggggggacgagggcagcaacaattacatcctcggttgacgggcaaggcagaaggcacgcagcccaggcgggtcctgaatctgcagtgagacagggcagccggtggcagcgggatacatgtggaaggtgaagaggccagggggggagggtttccaactcggtctcagacaaccagttgggatgcatccccaagcaccccgtgggaggccatgaacggcagcaatcgggtgtgctgcatgccaggatatctcttccctctcattctagtttcacgtagggaattgttttgaaaacaaggggctcagtttacataaggagcagtgttccaacaaaactaaggcagggccccattatt

SEQ ID NO: 492155 - DNA, 747 bp, Homo sapiens
acccacgcgtcgtatggttctatgtatagttgaaaactctatgatcagcatacaactgtcttttggtaatttttaatgaagtctacatttagccgtcggttttatctttcttaaatctttgacctaaacttttgtaagagcagctaataatttctaagattttccctgtttctttttcctacctttccttttctcataactgattggagaaattaatcagaagtcaaatacaagggacttcataatctagaaaccagataatcagctcccaagtcatgtagctaactatgcatttaaaataagtctgtctctttagttcttaagtcatatatttgtttgttaattacagtaaagtgaactttacatctggggttttctaaacaagaccagaacttagccgaagtcctaattctcttactcaatgcacaatcacacgcctctctctcgaatacttgcctctacttggcaccgcattttacgctgaccaaaaactaatcggcataaacaccttgccttaagcataacattaactatatttagaatggcattcttcagtgctagtatttgaccacttggacattcagtacattgtgcattcttaagtagtctttatccctagaatcaattctctcagcatcaccaaaactgaatcggtcgaaatagtgctacgattctcgggcacaggacgattacctgactatgctccttgcttcccgggtggcccggccttggcttgcattaggcccg

SEQ ID NO: 492156 - DNA, 713 bp, Homo sapiens
tgaaattaaagtttaagagacctaaaaaaatgtactcccaataaagaatcaatactgcttcaaaaaaaaaaaaaaaaaaaaaaaaaaaaaaaaaaaaaaaaaaaaaaaaaaaaaaaaaaaaaaaaaaaaaaaaaaaaaaaaaaaaaaaaaaaaaaaaaaaaaaaaaaaaaaaccaaaaaacaatataaacacaaaaaacattaaaaatgcgccccaatttcaagcaaattggcccaataaaccctatgggaacccaaataaaaatcaattgcccaaattttaacaacatcaaaattggaaaaacctgggagtacccaaattaaaccgccttgaaaaaaatccccatttgtcaaacttgcctaaaaaacaaaaagcccctaacagttggcaaatccaaaaaatagcccagctaaaagggcaaatgtaattgtaaaggtgaaaaatttggcaaaaatccccataaaatcttggtaaaacaatgtaattttttaaccaaaagtccaaaaatgaaaaaatcgctaacaataaaaaaaattgaccacaataggtttagacggttatcccactttaaaaccaaaatccccctttataggcaccttccctcaaaacgtaaaacttctccaaacaccggtttcttaagaggattggaccacttacttaacacaataaccctaataaattttttctggtcccgaagtaccccgcaaaaacaa

SEQ ID NO: 492157 - DNA, 975 bp, Homo sapiens
gtggccagtccctgactgcaccgcgtgatgcccagtgcaagacagggctgatctggaagtacaactacttccattaagatcatccaactattggatgattatcctgaaatgtttcatttgtggtgagcagacaatgtgggctccaagcagatgcatgcagatcctgcatgtcccttcgctggtgaatgtgctgtgtgatgctagatgtggcaagaacaccatgatgctgcaatgtgccatcctgatgggcacctggtaaaacaacccagctctggagaaacttggttggcctccatatatcgggggagatagtgtggggaatgtgtgcaccaccggctggtgcgcatacatcttgcatgactcaatcgagggcgacgatgtctaggatgagaaccaatatgtgcgttgccatagcttggcttgccgccggatgttggcgttgcgcactctgtctgctcattggtgaaatgtgcagacttggtgcaccatgaaccagtagccacttgtgttctccggaggacccagaactaaggaaacttaccttaaaaccaagggtttaaagagatatacaccaacttaaaaaatctcccaggtgtgcacccctatgcagaagtccctgaagttgattgtgccaagctgattcaagaactgcgcgcacaactatgtgtgagcccaagccggaaagccaaccgcgttgctggaaacatttgctcaacaattctccccccgttatctccttattggggcctggtccatccaagcaggatgtttcgagaaagtggaggaatctacaacaccatgacagttgtattgtattaccacgaaggaacctctggttactcgacataccatggagagtgtccgaattgatgcacagttcatgactgcaaattggtaaccagtgtgggactcatacccatactatacacacgtgcaacagattcgacagtatggaagagacactaccatgtaaag

SEQ ID NO: 492158 - DNA, 257 bp, Homo sapiens
gtgtggctacgctggacgacacgcagttcgtgaggttcgacagcgacgccagtagtcgagagaggagcgcgggcgcatggatagagcaggaggggcggagtattgggaccgggcagacacacgatctccaagaccaacacacagactataccgagagaacctgcgcaccgcgctccgttactacaaccagagcgaggccggtctcacatcatccagaggatgtaccgttttcgacgtggggccggaggggcgcctcc

SEQ ID NO: 492159 - DNA, 804 bp, Homo sapiens
ttagaaagagggattaaaaggagttttctttgccccgcgaaattgtaggggcaataattgggccctgatagcgataattgtcacacttcctttttgtccccaattgtgcacacccgccttttttggaaagaacaatctaaatggggggaaagagagcctgtggagacctcggcggccgccccaacaggtgggagatgcggcttcacaacttccccagaaagaaagttttatttttggcacagaagaacctctgggagagattctcacccaggcgaggctttggagcctctccacacacgtggtgggcttttcttaaatattggggggaataaaccactctccctctccatatgagatgtaccccagtttcacgagtattttaaaagataggccctcttggccacgaggtgaatataggagagtggattaacccccaatatcccgtgggcctcttccaccccagccccgggagatgaggagagtaacaagaaccatattggtgcaagataaagagaactcgtggcctctcacctataaggccaagagaccacgcacagctgtccaaaactgcacccgaggaccgcggggagagcaaaccgtctcccccaacacggagaaatttgggtggcacaaatggggcccccgagaaccgccgggtttgagagagagtgtgtgaaagaatggcccacagttttttatatcccccaccccttaaaaggcccaggccttgaagccccagattttgggaaaattttgtttttaaaaacaagaggaaattcccaactgcaggttttttaaaaacca

SEQ ID NO: 492160 - DNA, 231 bp, Homo sapiens
acaacagttcatcaaacaactgcagtaactatgcacacaaattacttcacacagtcaccataaagagaaaatgcacagatgtatggaggcaaacactgtatctaacactgaacctactacaggactccatcaatgagtccaacttttagtgataaaaaactactgtactgggcaacacttggccgacataaacccacatctactcaaacaagtcagaaaggtgcatacgta

SEQ ID NO: 492161 - DNA, 357 bp, Homo sapiens
ggggggttttttttttgtgggccaaaactccccccccttttccaaaattgggggggggggggcccccgggggggtttttttaagggggggtttttttttgggcggtttttttcccggggggcccctttcccccttttttttttcccttgaaagccccccgggcggtttttcccccccgtttttaccccgggggggggggggggtttcttttttttcccggggccgggggggggcttttgttttttcccagaaaatttttttttccctttttttttggggggcccccttttgggggcccctttttttgggggcccccccggggggggcggaattttcggggttacccccggggtcgga

SEQ ID NO: 492162 - DNA, 881 bp, Homo sapiens
cttccgcgggggcgcggatctttttaggggacatggttcttccgcccttctggcctctccggttgttcctctcttaatgttggccagcgggaccattgtaaccttgctccttgtgggccattgggggcgcctttcgcctttggtgcggcgaagggcttttcccgagtttagattgaattgttgcgcgcaccttgtgcggggaaccccccttcccccccagagggtgactcccactctgtcgccccgcccccggtgggtttatccggaattctttccccagagatcctttgggtatagcccccggagtagtcccccaagagcccccttctggggcgccccccctgccagaaggcctcccttggccagagtccccttataggaagggacccccctgtgagaaccttgtagagatctcatgtttgtagaacgctgctacacccatagtgtcccaaggacccaatgtcggccccgggaccaccccctattttttctgcccggccccgggatctcaccagactcccggtgggataaagcgcagctggctgcaagcacggcggcagcgatcaagccccattcaggatgagcaggcgcgcggtttcacggccagaagcccgtggtaaggtaatagaaaaaggagaagaaggctgctgttggggttaaagaaagcaacgcgagaagcctctgggggggaaaaaggcaccacgctatcccacggaaaccacccccccggaaagaagacctccccgagaagaaaccttctacacgaggggaagaaacctctgcattaaatttttaaattggttattccctataagggccaatccttttgggcaggtttttttggaataagacccggttatacaggccgtgaggaacctgga

SEQ ID NO: 492163 - DNA, 895 bp, Homo sapiens
ctcccgttatagtatctattgcaactcttgttaaaacgattttcgaccccctgaaacacatacttttttaagcagaggtatttttcaacaccccttggggctaaatcaacgtagtctcaccaaagtccattgtgagattaaccgcaattaccccctttatagaacgcccccgctgtttgttaatattcaacaccccaactcctaattgttctccccggaaaacccaactttggggagttccaaaccacaaagtttcccaacttttgcccccctataatttccgcgttccacggaacaccctatgtttttcgagacctttcttgccccagaattcttcttggtcttttgggaactccttttgcccaaccccctaaattgttcccactcccttccccaaatcgccccccctttgtgggtcaacaattaaatctaaaaaaaggttctatcaaaatcttaaaattttagaaagctcatttttttcccacaagaatataactggttttaaaaggtagtgaaacccagattaatataatacagtgacctaaatagatatggctatctctaaaagaagaaactctcctctctattgtgttaattaccccccgtccaacaatactactgagataaatactcaaaatggtcacaaaaatttgaaactttcacacagacctgtaccacacaaaggagatataaaaaagatttttgaaaattttggtggccccccacctcctttaaattaaacaaattccaggggcccccccatacgcctccccctacgaagaagtatttttcctcccctcccaaaagatgcttttatcacagcgtgtaattaacaacagcctttattttgggcttacacccgaaacaaaaaaatttcttgaaagaaaaaaaaaca

SEQ ID NO: 492164 - DNA, 463 bp, Homo sapiens
  misc_feature (61)..(61): n is a, c, g, or t
  misc_feature (281)..(281): n is a, c, g, or t
  misc_feature (402)..(402): n is a, c, g, or t
  misc_feature (454)..(454): n is a, c, g, or t
tggtctgagcccaataaagactgttaattcctcaaaaaaaaaaaaaaaaaaaaaaaaaaangatcagtggttgagatattctgcagaccctgcacttgatggatcagctggcaccacccagatcaataaactggctcatctgatcttgtggcccccacccagaactgactctgaaagaagacggctccgacttcctacgatttcatctttaaccaatcagcactcctggctcactggcttcccctcatctgccaaattatccttaaaaattctgctccccnaaatgctcagggaggctgatttggagtaagaataaaactccagtctccctggcacagctgggctctgtggttgatttaactctttctcctattgcaattttccctggtcttgaatgaattnggtctgtctatgtaagcggggcaagggtggaacccccttgaagtgggttacnggtaaccgg

SEQ ID NO: 492165 - DNA, 450 bp, Homo sapiens
  misc_feature (8)..(8): n is a, c, g, or t
  misc_feature (22)..(22): n is a, c, g, or t
  misc_feature (55)..(55): n is a, c, g, or t
  misc_feature (62)..(62): n is a, c, g, or t
cccccctnaaagtgaatttttnccgggtgccttaatttccaaaacattttaaagnccccagnaaaaccccctacattgcctttaatccactgccattaatacccatgatgtgttccagggttttttgtttttgccttttgtttaaagatgccccagaatggggcggggcatggtggctcatgccctgtgatccccagcactttgggaggccgaggcaggtggatcacttgaggtgaggggtttgagaccagccctggccaacatggcaaaaccccgtttctgccaaaaaatataaaaattgtctgggtgtggtgacatgcacctgtagtcccagctactagggaggctgaggcaggagaattacttgaacctaggaggtggaggttgcagtgagcaaagactgcaccactgtactacagcctcagcaacagagtgagaccctgtctctta

SEQ ID NO: 492166 - DNA, 306 bp, Homo sapiens
gcatggatgacagagggaaaccctgtctcaaaaaaaaaaaaaaaaattggaggtggaaaaataccggtcccccagacttatttccggattagaaaataggctgaaaataggaggaaaccttagtttcatgaggggggggggatcatcagcccccaggaagtgggggtaggcaaacaagccacatttccttggaagaacctccttggacacgtggggggctaagttcccattcacaaccaacttcaaaaaaaggggctcaccttttcaaaaaaacacagggctcagggaccccagcttaggggcaag

SEQ ID NO: 492167 - DNA, 160 bp, Homo sapiens
cccccccccccggtttccccggtttgggcccttcccggggggaaataaatggggtttggccccgggggggtttttttttttaaaaaaaaatttttcccctttttacccccattttccccctttttgggccccgggaaaaccttttttattttttttttta

SEQ ID NO: 492168 - DNA, 292 bp, Homo sapiens
  misc_feature (40)..(40): n is a, c, g, or t
cggtaccacatgattgtcaccgctcacaaagaaaggcgcncgtggtctctgaactgggaggactccatccctcagtcctcagactctccctcccagaccatgctgggtggggaaagggctgggctgctgcaggatagggtcggctcctcagcatgccgctgagctgcagctaccctagttcaggctcctcccttagggggtctcagagggcgggtggtgttgggttttttgtttgtttgtttgttcattttgagacagggtctcactccggttgcccaggctggagcggtgg

SEQ ID NO: 492169 - DNA, 103 bp, Homo sapiens
ggactaacggataaatagtttgtactgtacgtctggctatgaacggggagggaggatcccttggtatcacctgtattttttccatcatgatgaggataccagg

SEQ ID NO: 492170 - DNA, 680 bp, Homo sapiens
agtcaaatcaatgccacacatgccccccaatgccgaagaaagagtcgggctccagcatgtgcttcggaacgagtgaagacacgaaaccgaaggcctaccaatgcgcaaacgaaaatgggtcctctgcagtgggctctgacagttactgattgccctgcattccccatcccacccccgtgctgcactagccctactacctatacttggtgatatcaaaggttaatagaggctgaggagatattgcagggtgaaacaccctatgctgcataccccaagctcccccggtggcaacgagcgagctttctacctactggctagagtttgagaagctgccatgcagcccctagccccttccctcctcctggggcctccagcccctcacactgctgttcccagtgactatttgggatctgactgaatgccagaggctctgtaaaatcagaccatagtgcaagtcctcagccccctagccccttaccgcaatctcctcccccattctcgcaaatatccatttcaacatgagaagtggacaattcaccacgtgggcccgctggcccggagtgagctcaggatgagagcaaagactcagctgtagagggtttcccttccttctccccttcggccttggtctgtctgagcgggcgtcacgagcactatccaatccgtttgacttgctcttg

SEQ ID NO: 492171 - DNA, 412 bp, Homo sapiens
tgctgtgatctagaggatccaattctgcaccacagcgcaggcgggacagtgggatccagggggaggcagtgcccccacctgtcactctggctgctgcaaaaaaagcaagtctgagactgtgctgacctgtgccacagggtgtgccactgtgtgtggctagagtgccccatccctgatgcccccgttgtcaccaacgtgaccgtgaaggcacgagtgtggaacagcaccttcatcgaggattacagagatttggaccgagtcggggtaaatggctgggttaaccctaattcctccgaaccagaatccccagcatcaacatggagaacaagaaccacgtggttctctgtggacattgactcgggagctggtggaggagctgccggccgaaatcgagctgtggatggtgctggtg

SEQ ID NO: 492172 - DNA, 278 bp, Homo sapiens
cccccctggggcattggcatcttcgggggcagacccagtggatttggcatcttttggtgaattcttgtcctgcattattgttggctgtgatgactcgtcgatggaggcttctcaactcatcatttcttcagcatttgccactcggccttctctttatttcatgtcagtgtggcttctaggggttagagttcatgactgttaccatttattttgatgttcacttggcccagatatggccagaaagactccctccaggctggcttctgggtcctcttgcc

SEQ ID NO: 492173 - DNA, 301 bp, Homo sapiens
ggtaatcttctcatctgtgaggatatggaaccccaacctcttcctggacacgtgatgatctgcttgtgatgggctcagagtcttgaaacacagaactatgagctcatctcatatcccaatccagcagcatggaaacctcagactgcaaggcccaagactggcacttgttctctacccaactcttttcttactctcacaccttacttttaacccgaaaatgatgcttgctaccagcccagatttaaacaattgccttttaggcacaaacatcctgaacatgtaaaatcaactaattaaaagc

SEQ ID NO: 492174 - DNA, 229 bp, Homo sapiens
tcccccccccccgaaaatggggttaagggggcctttttccttttttattccatagccaaccttgggtaaggaaatttttaaaaattgattagggggatcggttaaaaagggaatttttccaaacccggggggggcttttggaaataaaaatattttttttggggaaggattccttgggaaacaaaccaaaaaaacaattttttaaacctttggctttttccccccttta

SEQ ID NO: 492175 - DNA, 417 bp, Homo sapiens
gtcacttctggctgtgctcagtgctgagtatgatcgtttttctgaattcactggtaattggagctttaaagccacctttcctgagcaaggagttctattgtctggatctgatcccagctcttgtaccttagcaaacttcaggtaaatatctggctgtgcgtgtgacacctttctcattaagtgaattcgattcgaatcctcagtggtacccctaccgcgaaccgcgaatatgcaacgagagatgcagagttccaaatgcggctgtgctcacctcgcagtccaggttatcactggcatcctcaaagttagtaaggcagggaatacagatccaaaacagtttacgccgctcctctcgggtcaggcggggaaatcggctgtccttaagtgcactggttaacgtttattccctgcatactg

SEQ ID NO: 492176 - DNA, 602 bp, Homo sapiens
  misc_feature (123)..(123): n is a, c, g, or t
tcgagatctcacatgtacactctcctcgcttttctttctttttttttcccttttctttcttctaatttttaaaaagcagcctctggagccagccatgtttggcactgaatcttcatgtaagtnaatggatcccacttctctgctatttagaaatctgcttgctgtcatggtttcattggcttagagttcatatcactttgccttaggtcattaacaacctttgtattttggctctgattacaaaggaattggtctcagggaaggaactccccttaactgggttattcatccttaaggctagggatgtcaatgtgtcataaccaggcctgtaagagggaggtaggaaaatcagaatccatacagccaccctagaatgtgttaattgatgggatcaggcctgtcactgatctattgttgtaggctccgtaatggtgcttagaccttaaaatagatactgggaggatctgagatgatagtgtttattagaaaggaaagaaaggcttacattttttcatctaaagagataaatagttatcattatatactcttccatattttcacaaaaacatagacattataggtagatctcgagaattcctgca

SEQ ID NO: 492177 - DNA, 233 bp, Homo sapiens
aaattagttaggattggtggcatgcacctgtagtctcagctacttgggaggctgaggcgggaggatcacttatgcgcccaggacggcagagttgcagtgagatgaaatcgtgctattgcactccagcctgggtgacagtgagaccctgtctcgaacaaaacaaaaactaatcttgacatctcatatttttagtacgtcataagcagacgtagagataaaaaccagcctaggag

SEQ ID NO: 492178 - DNA, 661 bp, Homo sapiens
  misc_feature (321)..(321): n is a, c, g, or t
  misc_feature (338)..(338): n is a, c, g, or t
attttgctctgctttatatatctctctctctttctatcttccacttaataataaattgaggacttcatgtccctttgtctaaatattttccaagatcaagggctttgttttatataatcacagtgcaattatcaaactcaggaaatttagcattagtacagtactatgatctaatctgtaatccatgttcaaattttgtcaattgtcccaataatgccatttatatgtatttcttaaaaatccatgttcaggataattcaatgcatttgattgtaatggctctttagtcttctttaatctgaaacagttctttaggctttntcttgaccttgacattntaaaaattaactctattgagatatacttttcatgcaataaaatgcactcactttaagtcatgaggaatatgggtttttacatatatacacacacacacacacaccttatatatatatcttcccccggttgaaacagatattgagatttttaatatctcttaaagattcctttgtgcctttgccacacttttgcccagcaaacccggttgcgtctatatgcgaaatagttacctcaccttaaaataaagcgaaaggctccttttggatggctaattttaaccacagtttttgattatagggttgggatctcccgcttttcctac

SEQ ID NO: 492179 - DNA, 978 bp, Homo sapiens
gagtgtgaaatcttcagcagaagaatgtctcttataagttctttgcgagaaggtagagataaatgacagcttatttcaaaaatggtccgatggttatcagaattcctcgaagcaggcctggttcattggaaaatcgaagacgcaggaatatgttacatagaagctgtgaagtcatccaagaggtggtcccgggatcaggcggtgagccccttatcctacccttcatatccatcctcggatgtcgctgccttgctatgaaaggccatgaaatggttaaaggtgtggatgaagcaagcgatcaggttgacattctaatctagtcgataacacttgcataggtccacacatgatcaaagaactagaatatctctcgaggaagaatccgaggaaatgctccctggagtgaaaacactgaagatagtcccttagccgggtcacctggaggacggtgtatcgggtctgttaggaaaactccacgcgcaatggtggatggctgatgaacttcgtgcggtcgtgaggggccctggatcggatgtaagcgattttctctatatttggacgatatgccatcatgaactagtcaaagataatcgtagaacatggacatggatctaactgagaggaacctgctgagagattctggctccaagagtttgattcgtcatgcacgcatctgggagcatttccccgggatcgctctgcttgagcgtcttgctaaagtggtgagccgactctagacagactattggtgtgcattgaacactttggcttgcttggcacatgccccgggccttgtctgcacgcaggacacacggagcatcgggcgaagacgacgtaaaaccgtggttcaataccatccctaacaccagaaaggttcttccaaacttcgcgggcggggttccagaaaatacacccagtacggaagctggcctttgaccacagttccgcgcctcggttttggcggtgccttgcgatttc

SEQ ID NO: 492180 - DNA, 408 bp, Homo sapiens
  misc_feature (3)..(3): n is a, c, g, or t
  misc_feature (82)..(82): n is a, c, g, or t
  misc_feature (130)..(130): n is a, c, g, or t
  misc_feature (138)..(138): n is a, c, g, or t
  misc_feature (176)..(176): n is a, c, g, or t
  misc_feature (202)..(202): n is a, c, g, or t
  misc_feature (216)..(216): n is a, c, g, or t
  misc_feature (241)..(241): n is a, c, g, or t
ganacagaaggagagtggaaggtaggaggcagtgatggagaaggagccattgggcttagccgtgatcccaagagccggaacnatgatcaatgaccggattggttataaaccccaacccaagccccataancgttctcncaattggaagtcttgaaagagatggattatcttgcatnccagagccgctgggaatgggataaantgatgggcagagtncaaaccagatagagaattgagtgcntgcagtcaagccagaatgtacctcctgcagagacaaatcttctgcatgagattactgatgcttcacttgcactctaagctggaatccaaactctggtttgtctcttgaaaatttgactctataaaactgatctgattttctgtttttaaaaataaatatatttttac

SEQ ID NO: 492181 - DNA, 256 bp, Homo sapiens
caccttgcacttgtcgctgggtcagtgctggaaagcgcctctcactccggcgctgacaagggcccttctctactgtcggggggtggttccgggctgggggggctgccatcctttgcagctgatggtgaaggtgtctctttcatccatggttaagtcataaaaagcttatcggtttgggttttgactcacctgaaagttgttgcggtttaaaagaagaataggcggggcacggtggctcatgcctgtaatcccagca

SEQ ID NO: 492182 - DNA, 714 bp, Homo sapiens
tctcagggccaacatttatttcttttaagaaggaaattatcacccccttgggggaaaaaatcgtggatacccgggttccagaatttcctatatgtgtgtgttccacaggtgggcataaaacagttcccccatacgtgggggcaatgtgcccttccgtggcaggccaaagggcgtgctgtggggccccaaagggggggtccaggttgtgaaaccctgtgagaaatggcgcaacacagaaaagagggctgtgacccagagtggggggacatattcttcacaactctccgtgagatgtgcccacaaaactcttccagagttcctaacagaatttataaacaacggtggttctctcttgtgacggctccacaaggtgggggagaacagagggccgtggcaaagaggcgaagtgctcagctcccacctttatagtgcgggccagaacaccgttggcaagggctaaccggcttaacacaatataacctcggtgcgcctggccccaacccgaggttgccgcggggcggccatcaacaaccacacaacactctatcacaaagaagtgccgggagaaaatactctcaaagagacccgtgatggggcgcccaaagaacacgtgggcgacaacgcgacaaagcgcgggggaggagacaacaaccggggaatcaccgagctagccgtgcgcgtgcgcacaaacccgggacataacccttgaagggg

SEQ ID NO: 492183 - DNA, 807 bp, Homo sapiens
ataaatattggaaattagaaattacaccaggtgccacatagaatataaatagatcatacaattcagaactttatctaaagactgttctcacaaattaagatattctaaagtatgattatggaatctcaaaatcaaatcttatcctgtctttgagaatgcattatttcatttgatttgttcagttaatttcttgctttagtccatttcagcacattcttgtgggcttcaagttgcaagtttgttaataataatagctattccttaaaagtttcaagagctgaatactgggatgctccatttgtgaaatactatgattaaacatttccaagtaattttgcaaaaaaaaaagcacccaaagtttagaggacttatgtataaaaagttattttcaatagtaagtatgagaaatgccaagaaaatatgccgatggctatgttaaagtatttcattttttaattcaatatcagtttgtctccaaaatctgtaataaagtgattctaattataaaaatatttataaatctggtcacctttatcttctattcgatccgtagaatatcgcattaattgggaccccaatgtgcattattttggcgccacaacaaattcagagtccattctactccatacattctatgggatagactacggtcaggtattaggtccgacaattggtgttccctgaaaatagtacctattcaggtaccttcacaacggtcccttcccattgcggttaatcggaaagaccgatcttggcgggcaacacctgaataactggataagaaccccaaaaaatcggcacaaaggg

SEQ ID NO: 492184 - DNA, 467 bp, Homo sapiens
ggggggttttccaaaaccttgcccggggaaaaaccggatttggggttttcccaaaaaaaccccaagggggggggaagggcccgggggttccccccggggttggaaaagggggggttcccccgctggtttttgggaaaaaaaccccccccgggggtcccccccccctggtggtttccctggggtccccttggggaaggccggctcttgggggggtttccctttccccgggaaccttaaagcgggtttggttggaaaaaaaattagggaaaaaagggggtttcttaaaccggtttggggtccggtcaaaatattaaggtcctgggggggcccaaattttgttttttaaaaaaggggccttttttcggttttaaaaaaaaaaaagaagggggttccccccttggttttttttccccccccccccaaaattggttttaaggaaaaagaaaaaaaaaggaggttttccccca

SEQ ID NO: 492185 - DNA, 100 bp, Homo sapiens
atccctaaccaggattgacactggacgtacggcaaggagacgaagtttccgtgcattatgaccccatgactgcgacgctggtcgtgtgggcagcagatcg

SEQ ID NO: 492186 - DNA, 479 bp, Homo sapiens
gctctgggttagtcgggtcctaagctgaggccgataggcgtaggcgatggataacaggttgatattcctgtaccaccataattcgttttaagcgatggggggacgcagtaggataggcgaagcgtacgattggattgtacgtccaagcagtaagactgagtgttaggtaaatccggcactcttaaggtcaagctgtgatggggagaggaaattgtttcctcgagtcgttgatttcacactgccgagaaaagcctctagctagatttatggtgcccgtaccgcaaaccgacacaggtagtcaagatgagaattctaaggtgagcgagcgaattctcgttaaggaactcggcaaaatgaccccgtaacttcgggagaaggggtgctctttagggttaacgcccaggagagccgcagtgaataggcccaagcgactgtttatcaaaaacacaggtctctgctaaaccgtaggtgatgtatag

SEQ ID NO: 492187 - DNA, 455 bp, Homo sapiens
ccagagtgaccctaatcagatcatggggccctcttttccaaaatcttttcagtgttttcccaaatcactcaggagcttacaagaccctaccaagactggctcccctgttctccgctagtctcatcttctctgattctctctcttctatctcgggtactaacacactggcagcctttctgagctggatgctcccttacatcccttggatactccaagcacgccctgccttgggccttctgcacttgctattggctgcctgcaatgtcgttggccagtcagccacatgacccagtccctcacttcctttgggtctttgctcaagctcacattctcagtgaggccttttctgacctccagtgtttaaaatctcaccccttatcacagacaaccccaacccctttgaccttcatctgatggacatttttatacagaaaacaataaagatttccctctca

SEQ ID NO: 492188 - DNA, 330 bp, Homo sapiens
aatcagctcggtacccacgatatggggcctcaaataaaagctgtctcaggagatgctgatagtcttgcactgagagctaaacccatctagtgatttacctcggcattaagaggtttgcgtatccctgaatgcctgaaccaaatgtacagatgcctacttttgagataaacgaatatttggacttatcgagtgtgaacctcctagagtcgatctgaatgcctaaggtgttgtaacggtcctgcgttcttcaagtcttttcaacgatcctagagtatggtctcattctacaaagtgacctcatggtctgtgacagctgcgtttcacttccga

SEQ ID NO: 492189 - DNA, 312 bp, Homo sapiens
tgtgtcatgcactagctgcctagtaagctagaaattagtaggatattgagccgggcacagtggcttacgcctgtaatcccagcgctttgggaggccgaggtgggcggatcatgaggtcaggagatcgagacgatcctggctaatacggtgaaaccctgtctctactaaaactacaaaaaattaaccaggcggaatggcacgtgcctgtagtcccagctactcgggaggctgaggcaggagaatggcgtgaacccgggaggcggagcttgtggtgagccgagatcacgccactgcactccagcctgggcgata

SEQ ID NO: 492190 - DNA, 1847 bp, Homo sapiens
gcgtacggcaacctttccaaggagagtggtatgtagtgatcgccatcttagggaaaagatgtactacgtccgtaggagcaccatggcgcgggcagaacccctatcaacacgccacatctagcagctaggtgcacagatggatctcggggaccatccgacagcagacatcccacagggacccacagggaccagcccacggccgaccctacgacacacctaggacagcacgaccgaccgatggtacagcagtacaagtatgtagcaattataggaataccggacagacagtattttatagacatctagtagatagggctatatagcgatagggagtacttaaagtatagtaggatcatgaccaacaccacgtagcacaatgtggatttccacccatgcgactataaagatgacaagtgcccagaaatagccaaagcgtaggaaccaccacaagaaccagttaaaaaaagagggccatacataataaaacgagagaatttctatccacgatataccacacttaataaacacagaagaggcaattgggataggtttaccggtaaggagaatatatacgggcgttaaataagagacttgagggcaatactccagaagcatatatatcgcagtatagtggacttaccgtacacaaaataggcaagagggaggaaaatacatatggacatacagaatataaagagcgataataatgaaaaatatagagaacagggatacatagtgtacaaaataggaattcctataggcaattaactataactagcaagaccttacaatgagacataatggagaaatggaacagggacacgacacacataacacgattaaaagttacacttcaactatggaaggcaagggccaacacgaatgttcgaaccaagtaactataaaattgaatgcagcggagcagatggaggacgccgatatctacgattgagtacgaccacagcaagtcaggacacatgagcacagaagatgtcagacatatatatgagccagatagcagagaagcataatgaggacacacatctggtgcagatcacaataataatttgggcaaaccaggacctgggacatatccacacagaggattctaagacacaaaattataccaacgacagcacacaagaacccaaaacgagattagaataggcaccaaagaacaccatagtcggacagcacgcgcacgaatgcaagaagatacaccacaagagaaagatgtatacgttaaacgaaggcaacagagaatcaggagtccatacacacacgaccgaaccgatattaactcaagcgaagaacgaaggctggaaaggcagaacacacgaaaatagctaggacctattaagaccacggacatcgctcagcatataacgcacagctgcagtcaaggaagtgaatacagacgaagaagattagcacaacgagcataacatgacaagacagaaaaaaaatgtatccaccaacgataacgtggggagaaccgaaaaacgcgaaccacggcacaatgaaatctatcacacgagaaccacatacaaacaacatagctatgtcgatcaacacaatatatatctcaacatgagatacctaatcaaactcaacaacttaacatagacaatagataatacaccacataatacactacaatataatctcatcgtaacaaacacacaaacaaacaacataacttggtcaagcagacaccaatatcagaactccactacaagcattaaccatatactcaacatgactcaactacaatcaactgcaactccacacacacatacaagacaccaaaccacataacatatctgagacgattactccctaagtac

SEQ ID NO: 492191 - DNA, 1135 bp, Homo sapiens
  misc_feature (723)..(723): n is a, c, g, or t
  misc_feature (750)..(750): n is a, c, g, or t
  misc_feature (753)..(753): n is a, c, g, or t
  misc_feature (776)..(776): n is a, c, g, or t
  misc_feature (784)..(784): n is a, c, g, or t
  misc_feature (807)..(807): n is a, c, g, or t
  misc_feature (811)..(811): n is a, c, g, or t
  misc_feature (818)..(818): n is a, c, g, or t
  misc_feature (823)..(823): n is a, c, g, or t
  misc_feature (827)..(827): n is a, c, g, or t
  misc_feature (830)..(830): n is a, c, g, or t
  misc_feature (915)..(915): n is a, c, g, or t
  misc_feature (929)..(929): n is a, c, g, or t
  misc_feature (944)..(944): n is a, c, g, or t
  misc_feature (1089)..(1089): n is a, c, g, or t
tggatctggagaacctggtcacagaattcaaaccgcagcattgccacgctggcatcaccaccctcccggacgcgtgggctcatcctgtccaaggtgggggtctcccagcagccggaggacagccagcaggacctgcctggggagcgccatgccctcctggaggaggagaaccgggtgtggcacctggtgcggccgaccgacgaggtggacgagggcaagtccaagagaggcagcgtgaaagagaaggagcggacgaaggccatcaccgagatctacctgacgcggctgctctcagtcaagggcacactgcagcagtttgtggacaacttcttccagagcgtgctggcgcctgggcacgcggtgccacctgcagtcaagtacttcttcgacttcctggacgagcaggcagagaagcacaacatccaggatgaagacaccatccacatctggaagacgaacagtttaccgctccggttctgggtgaacatcctcaagaacccccacttcatctttgacgtgcatgtccacgaggtggtggacgcctcgctgtcagtcatcgcgcagaccttcatggatgcctgcacgcgcacggagcataagctgagccgcgattctcccagcaacaagctgctgtacgccaaggagatctccacctacaagaagatggtggaggattactacaaggggatccggcagatggtgcaggtcagcgacaggacatgnacacacacctggaagatttccctgggngcncacggactccttgaacaccctcntggcactncaccatctctaccaatacacgcngaanttctatnacganatcntcnatgccttggaggaggatcctgccgcccagaagatgcagctggccttccgcctgcagcagaatgccgctgcactggagaacaaggncactgacctctganctacaatctccagtnctgccttgggacataggtacctgaggtactgagagccctcaggggaggaggccgagtggctgtggctgaggccccacctccctggaacgcgcccaagccggagtgggtgcagcggaacccgcccagcgtctagactgtagatctnctctgagcataccgcgggcacgcacagcacagcccagcccagcgcc

SEQ ID NO: 492192 - DNA, 711 bp, Homo sapiens
gtcggttctcctgtcgttcgggccatgtattccagttcatccggttgttcatgggcgtacaattcatggagaccactgagttagttgcaggccatttgtgaagtcggcagttgacaatatattcgatgcgcgcacgtaatcgagggacgtcgtgtatgtcgaaggggttgctccacttgttgagtcgtcacccacggtgtggaagttgtcaacaagtgagggctgtgacaaccgattgtgcagatgcgtgcagaaaagggtgcagtgtgacaatacaatgtgcgacatcctagaaaatatatatttgaaatcagcgcagtatcacgtcatcaggtacaatgtgtcaatacatgcatgtcaggcccaccatcattctgtgtaatcaggtgtataagttagatatatgtatgaaaatgtgagcattagaatatgtagaagtgcaagaggcatctaatgaatatatgggagagtaaggagatagacacgcatagatggtgaccacacatatgtacccacacaggtgtgtgtagaagtagtacagattttcatagagaggcaatgaggagtagacaatgatgatagtatatattatagtggagtagttgtagaagagtagtgtcgatggtcacgcggaggtgttatagttgtagtaggatgtgacaaagaataggaaaaatacagtaaaagcagtatacgatcataacgcagaaa

SEQ ID NO: 492193 - DNA, 765 bp, Homo sapiens
taaaaaaaaggtctcactaatttgcccaggttggtctcaaactcctgagctacaagagttttcccacctgtggcccccaaaggtgtggaatttttagcgatgaacccatggtacgggtctctttgtggtccaagtccctaatcaacctctaaaactatcctcgcaccaagaacgaggcacacaggtgttcttgtctattggaaatcttttattacaagatatttatacaagcagaagtcttctgtacacaaaattaatacactattcgggtgtttgtgctttaaaacctcccagatgtaaatgtctgagagaaaacattcttctaaataataagcgccccctgttgaaagtgtaaccaaaaaaaaaaaaacaaaagcacaacaaaacaaaaacagaaacaaacaaaacacaaaacaacacagaggggcggggccgcacaggagaaagaataagacctccacgggcggaggcgagcaccccacaacgtatatggactgcacacacacccaacggaagtagtcaagggatggaacagaacgaggggagcgcccagcaaaacgagtgaggcggctacataaaatacagagaagggactaagcgagcagcgcgggacgcggcgtaacaaaaaaacaaacaggcgagagacacggggggaacaaaaacgagaagtaacagagcagggaaggaacacagtaggcgggagcagacgcccccaacaaacaagaggggaggaaggaaaaaaaaaagaagggcgcaaacaccagc

SEQ ID NO: 492194 - DNA, 438 bp, Homo sapiens
actcgaatcgagtttgtcgtacaggaactcgatcggctcgctcgggcgcaggtcctggaagtgcacatcaccgctcgccagcttgatgcgctcgatacgcagtgggaacggcttggcgtcgggatcggcaggggtcggttcgctggcggggatcttgaacagccccagcagattgagtttgccttccttgtcaaacaggatctcggtcttgggtttatccagttcgatatccgccagatgcagcgcgcgggtccacaggctgtccagttgcaggttcagatagaggcgttcgaagcctacctgctctttacctggcgcaccgatattcagcccccagagcgtgagctccaggctgtacggattgaattcgatacgttggatatgggccggggtggtggcgtagttggcgagttgctgattggccacccgcaaggcaat

SEQ ID NO: 492195 - DNA, 5314 bp, Homo sapiens
  misc_feature (425)..(425): n is a, c, g, or t
  misc_feature (4902)..(4902): n is a, c, g, or t
  misc_feature (4929)..(4929): n is a, c, g, or t
  misc_feature (4932)..(4932): n is a, c, g, or t
  misc_feature (4955)..(4955): n is a, c, g, or t
  misc_feature (4963)..(4963): n is a, c, g, or t
  misc_feature (4986)..(4986): n is a, c, g, or t
  misc_feature (4990)..(4990): n is a, c, g, or t
  misc_feature (4997)..(4997): n is a, c, g, or t
  misc_feature (5002)..(5002): n is a, c, g, or t
  misc_feature (5006)..(5006): n is a, c, g, or t
  misc_feature (5009)..(5009): n is a, c, g, or t
  misc_feature (5094)..(5094): n is a, c, g, or t
  misc_feature (5108)..(5108): n is a, c, g, or t
  misc_feature (5123)..(5123): n is a, c, g, or t
  misc_feature (5268)..(5268): n is a, c, g, or t
gccgtcgcgaattagcgggaaagttttcgtggccagcatgatagtgcgtgccacagtggtggctggtgagctccacgggtcctggtggtgaccgcgtgctgtttgtgggcaaaggcaatgggccacacgacaacggcatcatcgtgagcactcggctgttggaccggactgacagcagggaggcctttgaagcctacacggaccacgccacctacaaggccggctacctgtccaccaacacacagcagttcgtggcggccttcgaggacggcccctacgtcttctttgtcttcaaccagcaggacaagcacccggcccggaaccgcacgctgctggcacgcatgtgcagagaagaccccaactactactcctacctggagatggacctgcagtgccgggaccccgacatccacgccgctgccttnggcacctgcctggccgcctccgtggctgcgcctggctctggcagggtgctatatgctgtcttcagcagagacagccggagcagtggggggcccggtgcgggcctctgcctgttcccgctggacgaggtgcacgccaagatggaggccaaccgcaacgcctgttacacaggcacccgggaggcccgtgacatcttctacaagcccttccacggcgatatccagtgcggcggccacgcgccgggctccagcaagagcttcccatgtggctcggagcacctgccctacccgctgggcagccgcgagggctcagaggcacagccgtgctgcaggtggaggcctgaacctcacggccgtgacggtcgccgccgagaacaaccacactgttgcttttctgggcacctctgatggcggatcctcaaggtgtacctcacccagatggacctcctcagagtacgactctatccttgtggagataaacaagagagtcaagcgcgacctggtactgtctggagacctgggcagcctgtacgccatgacccaggacaaggtgttccggctgccggtgcaggagtgcctgagctacccgacctgcacccagtgccgcgactcccaggacccctactgcggctggtgcgtcgtcgagggacgatgcacccggaaggccgagtgtccgcgggccgaggaggccagccactggctgtggagccgaagcaagtcctgcgtggccgtcaccagcgcccagccacagaacatgagccggcgggcccagggggaggtgcagctgaccgtcagccccctccctgccctgagcgaggaggacgagttgctgtgcctttttggggagtcgccgccacaccccgcccgcgtggagggcgaggccgtcatctgcaactccccaagcagcatccccgtcacaccgccaggccaggaccacgtggccgtgaccatccagctcctccttagacgaggcaacatcttcctcacgtcctaccagtaccccttctacgactgccgccaggccatgagcctggaggagaacctgccgtgcatctcctgcgtgagcaaccgctggacctgccagtgggacctgcgctaccacgagtgccgggaggcttcgcccaaccctgaggacggcatcgtccgtgcccacatggaggacagctgtccccagttcctgggacccagccccctggtgatccccatgaaccacgagacagatgtgaacttccagggcaagaacctggacaccgtgaagggttcctccctgcacgtgggcagtgacttgctcaagttcatggagccggtgaccatgcaggaatctgggaccttcgcctttcggaccccaaagctgtcccacgatgccaacgagacgctgcccctgcacctctacgtcaagtcttacggcaagaatatcgacagcaagctccatgtgaccctctacaactgctcctttggccgcagcgactgcagcctgtgccgggccgctaaccccgactacaggtgtgcgtggtgcgggggccagagcaggtgcgtgtatgaggccctgtgcaacaccacctccgagtgcccgccgcccgtcatcaccaggatccagcctgagacgggccccctgggtgggggcatccgcatcaccatcctggggtccaatttgggcgtccaagcaggggacatccagaggatctctgtggccggccggaactgctcctttcagccggaacgttactccgtgtccacccggatcgtgtgtgtgatcgaggctgcggagacgcctttcacggggggtgtcgaggtggacgtcttcgggaaactgggccgttcgcctcccaatgtccagttcaccttccaacagcccaagcctctcagtgtggagccgcagcagggaccgcaggcgggcggcaccacactgaccatccacggcacccacctggacacgggctcccaggaggacgtgcgggtgaccctcaacggcgtcccgtgtaaagtgacgaagtttggggcgcagctccagtgtgtcactggcccccaggcgacacggggccagatgcttctggaggtctcctacggggggtcccccgtgcccaaccccggcatcttcttcacctaccgcgaaaaccccgtactgcgagccttcgagccgctacgaagctttgccagtggtggccgcagcatcaacgtcacgggtcagggcttcagcctgatccagaggtttgccatggtggtcatcgcggagcccctgcagtcctggcagccgccgcgggaggctgaatccctgcagcccatgacggtggtgggtacagactacgtgttccacaatgacaccaaggtcgtcttcctgtccccggctgtgcctgaggagccagaggcctacaacctcacggtgctgatcgagatggacgggcaccgtgccctgctcagaacagaggccggggccttcgagtacgtgcctgaccccacctttgagaacttcacaggtggcgtcaagaagcaggtcaacaagctcatccacgcccggggcaccaatctgaacaaggcgatgacgctgcaggaggccgaggccttcgtgggtgccgagcgctgcaccatgaagacgctgacggagaccgacctgtactgtgagcccccggaggtgcagcccccgcccaagcggcggcagaaacgagacaccacacacaacctgcccgagttcattgtgaagttcggctctcgcgagtgggtgctgggccgcgtggagtacgacacacgggtgagcgacgtgccgctcagcctcatcttgccgctggtcatcgtgcccatggtggtcgtcatcgcggtgtctgtctactgctactggaggaagagccagcaggccgaacgagagtatgagaagatcaagtcccagctggagggcctggaggagagcgtgcgggaccgctgcaagaaggaattcacagacctgatgatcgagatggaggaccagaccaacgacgtgcacgaggccggcatccccgtgctggactacaagacctacaccgaccgcgtcttcttcctgccctccaaggacggcgacaaggacgtgatgatcaccggcaagctggacatccccgagccgcggcggccggtggtggagcaggccctctaccagttctccaacctgctgaacagcaagtctttcctcatcaatttcatccacaccctggagaaccagcgggagttctcggcccgcgccaaggtctacttcgcgtccctgctgacggtggcgctgcacgggaaactggagtactacacggacatcatgcacacgctcttcctggagctcctggagcagtacgtggtggccaagaaccccaagctgatgctgcgcaggtctgagactgtggtggagaggatgctgtccaactggatgtccatctgcctgtaccagtacctcaaggacagtgccggggagcccctgtacaagctcttcaaggccatcaaacatcaggtggaaaagggcccggtggatgcggtacagaagaaggccaagtacactctcaacgacacggggctgctgggggatgatgtggagtacgcacccctgacggtgagcgtgatcgtgcaggacgagggagtggacgccatcccggtgaaggtcctcaactgtgacaccatctcccaggtcaaggagaagatcattgaccaggtgtaccgtgggcagccctgctcctgctggcccaggccagacagcgtggtcctggagtggcgtccgggctccacagcgcagatcctgtcggacctggacctgacgtcacagcgggagggccggtggaagcgcgtcaacacccttatgcactacaatgtccgggatggagccaccctcatcctgtccaaggtgggggtctcccagcagccggaggacagccagcaggacctgcctggggagcgccatgccctcctggaggaggagaaccgggtgtggcacctggtgcggccgaccgacgaggtggacgagggcaagtccaagagaggcagcgtgaaagagaaggagcggacgaaggccatcaccgagatctacctgacgcggctgctctcagtcaagggcacactgcagcagtttgtggacaacttcttccagagcgtgctggcgcctgggcacgcggtgccacctgcagtcaagtacttcttcgacttcctggacgagcaggcagagaagcacaacatccaggatgaagacaccatccacatctggaagacgaacagtttaccgctccggttctgggtgaacatcctcaagaacccccacttcatctttgacgtgcatgtccacgaggtggtggacgcctcgctgtcagtcatcgcgcagaccttcatggatgcctgcacgcgcacggagcataagctgagccgcgattctcccagcaacaagctgctgtacgccaaggagatctccacctacaagaagatggtggaggattactacaaggggatccggcagatggtgcaggtcagcgacaggacatgnacacacacctggaagatttccctgggngcncacggactccttgaacaccctcntggcactncaccatctctaccaatacacgcngaanttctatnacganatcntcnatgccttggaggaggatcctgccgcccagaagatgcagctggccttccgcctgcagcagaatgccgctgcactggagaacaaggncactgacctctganctacaatctccagtnctgccttgggacataggtacctgaggtactgagagccctcaggggaggaggccgagtggctgtggctgaggccccacctccctggaacgcgcccaagccggagtgggtgcagcggaacccgcccagcgtctagactgtagatctnctctgagcataccgcgggcacgcacagcacagcccagcccagcgcc

SEQ ID NO: 492196 - DNA, 4016 bp, Homo sapiens
  misc_feature (3604)..(3604): n is a, c, g, or t
  misc_feature (3631)..(3631): n is a, c, g, or t
  misc_feature (3634)..(3634): n is a, c, g, or t
  misc_feature (3657)..(3657): n is a, c, g, or t
  misc_feature (3665)..(3665): n is a, c, g, or t
  misc_feature (3688)..(3688): n is a, c, g, or t
  misc_feature (3692)..(3692): n is a, c, g, or t
  misc_feature (3699)..(3699): n is a, c, g, or t
  misc_feature (3704)..(3704): n is a, c, g, or t
  misc_feature (3708)..(3708): n is a, c, g, or t
  misc_feature (3711)..(3711): n is a, c, g, or t
  misc_feature (3796)..(3796): n is a, c, g, or t
  misc_feature (3810)..(3810): n is a, c, g, or t
  misc_feature (3825)..(3825): n is a, c, g, or t
  misc_feature (3970)..(3970): n is a, c, g, or t
gtggtgcaatggcactgcagctctgggccctgaccctgctgggcctgctgggcgcaggtgccagcctgaggccccgcaagctggacttcttccgcagcgagaaatgagctgaaccacctggctgtggatgaggcctcaggcgtggtgtacctgggggcggtgaatgccctctaccagctggatgcgaagctgcagctggacctgccagtgggacctgcgctaccacgagtgccgggaggcttcgcccaaccctgaggacggcatcgtccgtgcccacatggaggacagctgtccccagttcctgggacccagccccctggtgatccccatgaaccacgagacagatgtgaacttccagggcaagaacctggacaccgtgaagggttcctccctgcacgtgggcagtgacttgctcaagttcatggagccggtgaccatgcaggaatctgggaccttcgcctttcggaccccaaagctgtcccacgatgccaacgagacgctgcccctgcacctctacgtcaagtcttacggcaagaatatcgacagcaagctccatgtgaccctctacaactgctcctttggccgcagcgactgcagcctgtgccgggccgctaaccccgactacaggtgtgcgtggtgcgggggccagagcaggtgcgtgtatgaggccctgtgcaacaccacctccgagtgcccgccgcccgtcatcaccaggatccagcctgagacgggccccctgggtgggggcatccgcatcaccatcctggggtccaatttgggcgtccaagcaggggacatccagaggatctctgtggccggccggaactgctcctttcagccggaacgttactccgtgtccacccggatcgtgtgtgtgatcgaggctgcggagacgcctttcacggggggtgtcgaggtggacgtcttcgggaaactgggccgttcgcctcccaatgtccagttcaccttccaacagcccaagcctctcagtgtggagccgcagcagggaccgcaggcgggcggcaccacactgaccatccacggcacccacctggacacgggctcccaggaggacgtgcgggtgaccctcaacggcgtcccgtgtaaagtgacgaagtttggggcgcagctccagtgtgtcactggcccccaggcgacacggggccagatgcttctggaggtctcctacggggggtcccccgtgcccaaccccggcatcttcttcacctaccgcgaaaaccccgtactgcgagccttcgagccgctacgaagctttgccagtggtggccgcagcatcaacgtcacgggtcagggcttcagcctgatccagaggtttgccatggtggtcatcgcggagcccctgcagtcctggcagccgccgcgggaggctgaatccctgcagcccatgacggtggtgggtacagactacgtgttccacaatgacaccaaggtcgtcttcctgtccccggctgtgcctgaggagccagaggcctacaacctcacggtgctgatcgagatggacgggcaccgtgccctgctcagaacagaggccggggccttcgagtacgtgcctgaccccacctttgagaacttcacaggtggcgtcaagaagcaggtcaacaagctcatccacgcccggggcaccaatctgaacaaggcgatgacgctgcaggaggccgaggccttcgtgggtgccgagcgctgcaccatgaagacgctgacggagaccgacctgtactgtgagcccccggaggtgcagcccccgcccaagcggcggcagaaacgagacaccacacacaacctgcccgagttcattgtgaagttcggctctcgcgagtgggtgctgggccgcgtggagtacgacacacgggtgagcgacgtgccgctcagcctcatcttgccgctggtcatcgtgcccatggtggtcgtcatcgcggtgtctgtctactgctactggaggaagagccagcaggccgaacgagagtatgagaagatcaagtcccagctggagggcctggaggagagcgtgcgggaccgctgcaagaaggaattcacagacctgatgatcgagatggaggaccagaccaacgacgtgcacgaggccggcatccccgtgctggactacaagacctacaccgaccgcgtcttcttcctgccctccaaggacggcgacaaggacgtgatgatcaccggcaagctggacatccccgagccgcggcggccggtggtggagcaggccctctaccagttctccaacctgctgaacagcaagtctttcctcatcaatttcatccacaccctggagaaccagcgggagttctcggcccgcgccaaggtctacttcgcgtccctgctgacggtggcgctgcacgggaaactggagtactacacggacatcatgcacacgctcttcctggagctcctggagcagtacgtggtggccaagaaccccaagctgatgctgcgcaggtctgagactgtggtggagaggatgctgtccaactggatgtccatctgcctgtaccagtacctcaaggacagtgccggggagcccctgtacaagctcttcaaggccatcaaacatcaggtggaaaagggcccggtggatgcggtacagaagaaggccaagtacactctcaacgacacggggctgctgggggatgatgtggagtacgcacccctgacggtgagcgtgatcgtgcaggacgagggagtggacgccatcccggtgaaggtcctcaactgtgacaccatctcccaggtcaaggagaagatcattgaccaggtgtaccgtgggcagccctgctcctgctggcccaggccagacagcgtggtcctggagtggcgtccgggctccacagcgcagatcctgtcggacctggacctgacgtcacagcgggagggccggtggaagcgcgtcaacacccttatgcactacaatgtccgggatggagccaccctcatcctgtccaaggtgggggtctcccagcagccggaggacagccagcaggacctgcctggggagcgccatgccctcctggaggaggagaaccgggtgtggcacctggtgcggccgaccgacgaggtggacgagggcaagtccaagagaggcagcgtgaaagagaaggagcggacgaaggccatcaccgagatctacctgacgcggctgctctcagtcaagggcacactgcagcagtttgtggacaacttcttccagagcgtgctggcgcctgggcacgcggtgccacctgcagtcaagtacttcttcgacttcctggacgagcaggcagagaagcacaacatccaggatgaagacaccatccacatctggaagacgaacagtttaccgctccggttctgggtgaacatcctcaagaacccccacttcatctttgacgtgcatgtccacgaggtggtggacgcctcgctgtcagtcatcgcgcagaccttcatggatgcctgcacgcgcacggagcataagctgagccgcgattctcccagcaacaagctgctgtacgccaaggagatctccacctacaagaagatggtggaggattactacaaggggatccggcagatggtgcaggtcagcgacaggacatgnacacacacctggaagatttccctgggngcncacggactccttgaacaccctcntggcactncaccatctctaccaatacacgcngaanttctatnacganatcntcnatgccttggaggaggatcctgccgcccagaagatgcagctggccttccgcctgcagcagaatgccgctgcactggagaacaaggncactgacctctganctacaatctccagtnctgccttgggacataggtacctgaggtactgagagccctcaggggaggaggccgagtggctgtggctgaggccccacctccctggaacgcgcccaagccggagtgggtgcagcggaacccgcccagcgtctagactgtagatctnctctgagcataccgcgggcacgcacagcacagcccagcccagcgcc

SEQ ID NO: 492197 - DNA, 648 bp, Homo sapiens
ctgtgttccaagagagaggccaaaagagggtccgcatgttaaagccctgtctttacagcatggtgacctggcactcactcttcgaggttactgtgagaccgtatcacagcctatctttctcaggagaacatttggtctggtcgtaagataacacagtgtggtccctgagaatgagaacacagtctgcccacagagagtagcccatgagggtccaagtgcacatcatgtccacaagcgctttcaggtcacacagaaaggccatcaaagatagggggagaagaaaagaccggtgaagtaagcggcccagagaggaaattccacacagttactaccgttcaagtcaggcacatgtgactgccatttcgttttagtcccaagtataagtcacccagagtgtagaaaatatatctctcacagttaataagatgttctttaggtcatataacctgttgataggacttcaaaaaccctcagctctctggcacctatccaaggcgcattctacttggatcactataaaaaatatttggcctgacaaagagtgaaacctttacatgacagaacactgtcattgatatttcaaaagaaacacagtgatagaaaatagtggctagctccttttttaaacccacaaaaacacattcaccc

SEQ ID NO: 492198 - DNA, 5425 bp, Homo sapiens
  misc_feature (425)..(425): n is a, c, g, or t
  misc_feature (5013)..(5013): n is a, c, g, or t
  misc_feature (5040)..(5040): n is a, c, g, or t
  misc_feature (5043)..(5043): n is a, c, g, or t
  misc_feature (5066)..(5066): n is a, c, g, or t
  misc_feature (5074)..(5074): n is a, c, g, or t
  misc_feature (5097)..(5097): n is a, c, g, or t
  misc_feature (5101)..(5101): n is a, c, g, or t
  misc_feature (5108)..(5108): n is a, c, g, or t
  misc_feature (5113)..(5113): n is a, c, g, or t
  misc_feature (5117)..(5117): n is a, c, g, or t
  misc_feature (5120)..(5120): n is a, c, g, or t
  misc_feature (5205)..(5205): n is a, c, g, or t
  misc_feature (5219)..(5219): n is a, c, g, or t
  misc_feature (5234)..(5234): n is a, c, g, or t
  misc_feature (5379)..(5379): n is a, c, g, or t
gccgtcgcgaattagcgggaaagttttcgtggccagcatgatagtgcgtgccacagtggtggctggtgagctccacgggtcctggtggtgaccgcgtgctgtttgtgggcaaaggcaatgggccacacgacaacggcatcatcgtgagcactcggctgttggaccggactgacagcagggaggcctttgaagcctacacggaccacgccacctacaaggccggctacctgtccaccaacacacagcagttcgtggcggccttcgaggacggcccctacgtcttctttgtcttcaaccagcaggacaagcacccggcccggaaccgcacgctgctggcacgcatgtgcagagaagaccccaactactactcctacctggagatggacctgcagtgccgggaccccgacatccacgccgctgccttnggcacctgcctggccgcctccgtggctgcgcctggctctggcagggtgctatatgctgtcttcagcagagacagccggagcagtggggggcccggtgcgggcctctgcctgttcccgctggacgaggtgcacgccaagatggaggccaaccgcaacgcctgttacacaggcacccgggaggcccgtgacatcttctacaagcccttccacggcgatatccagtgcggcggccacgcgccgggctccagcaagagcttcccatgtggctcggagcacctgccctacccgctgggcagccgcgagggctcagaggcacagccgtgctgcaggtggaggcctgaacctcacggccgtgacggtcgccgccgagaacaaccacactgttgcttttctgggcacctctgatggcggatcctcaaggtgtacctcacccagatggacctcctcagagtacgactctatccttgtggagataaacaagagagtcaagcgcgacctggtactgtctggagacctgggcagcctgtacgccatgacccaggacaaggtgttccggctgccggtgcaggagtgcctgagctacccgacctgcacccagtgccgcgactcccaggacccctactgcggctggtgcgtcgtcgagggacgatgcacccggaaggccgagtgtccgcgggccgaggaggccagccactggctgtggagccgaagcaagtcctgcgtggccgtcaccagcgcccagccacagaacatgagccggcgggcccagggggaggtgcagctgaccgtcagccccctccctgccctgagcgaggaggacgagttgctgtgcctttttggggagtcgccgccacaccccgcccgcgtggagggcgaggccgtcatctgcaactccccaagcagcatccccgtcacaccgccaggccaggaccacgtggccgtgaccatccagctcctccttagacgaggcaacatcttcctcacgtcctaccagtaccccttctacgactgccgccaggccatgagcctggaggagaacctgccgtgcatctcctgcgtgagcaaccgctggacctgccagtgggacctgcgctaccacgagtgccgggaggcttcgcccaaccctgaggacggcatcgtccgtgcccacatggaggacagctgtccccagttcctgggacccagccccctggtgatccccatgaaccacgagacagatgtgaacttccagggcaagaacctggacaccgtgaagggttcctccctgcacgtgggcagtgacttgctcaagttcatggagccggtgaccatgcaggaatctgggaccttcgcctttcggaccccaaagctgtcccacgatgccaacgagacgctgcccctgcacctctacgtcaagtcttacggcaagaatatcgacagcaagctccatgtgaccctctacaactgctcctttggccgcagcgactgcagcctgtgccgggccgctaaccccgactacaggtgtgcgtggtgcgggggccagagcaggtgcgtgtatgaggccctgtgcaacaccacctccgagtgcccgccgcccgtcatcaccaggatccagcctgagacgggccccctgggtgggggcatccgcatcaccatcctggggtccaatttgggcgtccaagcaggggacatccagaggatctctgtggccggccggaactgctcctttcagccggaacgttactccgtgtccacccggatcgtgtgtgtgatcgaggctgcggagacgcctttcacggggggtgtcgaggtggacgtcttcgggaaactgggccgttcgcctcccaatgtccagttcaccttccaacagcccaagcctctcagtgtggagccgcagcagggaccgcaggcgggcggcaccacactgaccatccacggcacccacctggacacgggctcccaggaggacgtgcgggtgaccctcaacggcgtcccgtgtaaagtgacgaagtttggggcgcagctccagtgtgtcactggcccccaggcgacacggggccagatgcttctggaggtctcctacggggggtcccccgtgcccaaccccggcatcttcttcacctaccgcgaaaaccccgtactgcgagccttcgagccgctacgaagctttgccagtggtggccgcagcatcaacgtcacgggtcagggcttcagcctgatccagaggtttgccatggtggtcatcgcggagcccctgcagtcctggcagccgccgcgggaggctgaatccctgcagcccatgacggtggtgggtacagactacgtgttccacaatgacaccaaggtcgtcttcctgtccccggctgtgcctgaggagccagaggcctacaacctcacggtgctgatcgagatggacgggcaccgtgccctgctcagaacagaggccggggccttcgagtacgtgcctgaccccacctttgagaacttcacaggtggcgtcaagaagcaggtcaacaagctcatccacgcccgggtgaggacggtgcagccccgggtgtctgggtcctgctcgggtctgggctgagagctggtccacctgtccctggttccctcctcctcaccccgaccactgccgcctccccagggcaccaatctgaacaaggcgatgacgctgcaggaggccgaggccttcgtgggtgccgagcgctgcaccatgaagacgctgacggagaccgacctgtactgtgagcccccggaggtgcagcccccgcccaagcggcggcagaaacgagacaccacacacaacctgcccgagttcattgtgaagttcggctctcgcgagtgggtgctgggccgcgtggagtacgacacacgggtgagcgacgtgccgctcagcctcatcttgccgctggtcatcgtgcccatggtggtcgtcatcgcggtgtctgtctactgctactggaggaagagccagcaggccgaacgagagtatgagaagatcaagtcccagctggagggcctggaggagagcgtgcgggaccgctgcaagaaggaattcacagacctgatgatcgagatggaggaccagaccaacgacgtgcacgaggccggcatccccgtgctggactacaagacctacaccgaccgcgtcttcttcctgccctccaaggacggcgacaaggacgtgatgatcaccggcaagctggacatccccgagccgcggcggccggtggtggagcaggccctctaccagttctccaacctgctgaacagcaagtctttcctcatcaatttcatccacaccctggagaaccagcgggagttctcggcccgcgccaaggtctacttcgcgtccctgctgacggtggcgctgcacgggaaactggagtactacacggacatcatgcacacgctcttcctggagctcctggagcagtacgtggtggccaagaaccccaagctgatgctgcgcaggtctgagactgtggtggagaggatgctgtccaactggatgtccatctgcctgtaccagtacctcaaggacagtgccggggagcccctgtacaagctcttcaaggccatcaaacatcaggtggaaaagggcccggtggatgcggtacagaagaaggccaagtacactctcaacgacacggggctgctgggggatgatgtggagtacgcacccctgacggtgagcgtgatcgtgcaggacgagggagtggacgccatcccggtgaaggtcctcaactgtgacaccatctcccaggtcaaggagaagatcattgaccaggtgtaccgtgggcagccctgctcctgctggcccaggccagacagcgtggtcctggagtggcgtccgggctccacagcgcagatcctgtcggacctggacctgacgtcacagcgggagggccggtggaagcgcgtcaacacccttatgcactacaatgtccgggatggagccaccctcatcctgtccaaggtgggggtctcccagcagccggaggacagccagcaggacctgcctggggagcgccatgccctcctggaggaggagaaccgggtgtggcacctggtgcggccgaccgacgaggtggacgagggcaagtccaagagaggcagcgtgaaagagaaggagcggacgaaggccatcaccgagatctacctgacgcggctgctctcagtcaagggcacactgcagcagtttgtggacaacttcttccagagcgtgctggcgcctgggcacgcggtgccacctgcagtcaagtacttcttcgacttcctggacgagcaggcagagaagcacaacatccaggatgaagacaccatccacatctggaagacgaacagtttaccgctccggttctgggtgaacatcctcaagaacccccacttcatctttgacgtgcatgtccacgaggtggtggacgcctcgctgtcagtcatcgcgcagaccttcatggatgcctgcacgcgcacggagcataagctgagccgcgattctcccagcaacaagctgctgtacgccaaggagatctccacctacaagaagatggtggaggattactacaaggggatccggcagatggtgcaggtcagcgacaggacatgnacacacacctggaagatttccctgggngcncacggactccttgaacaccctcntggcactncaccatctctaccaatacacgcngaanttctatnacganatcntcnatgccttggaggaggatcctgccgcccagaagatgcagctggccttccgcctgcagcagaatgccgctgcactggagaacaaggncactgacctctganctacaatctccagtnctgccttgggacataggtacctgaggtactgagagccctcaggggaggaggccgagtggctgtggctgaggccccacctccctggaacgcgcccaagccggagtgggtgcagcggaacccgcccagcgtctagactgtagatctnctctgagcataccgcgggcacgcacagcacagcccagcccagcgcc

SEQ ID NO: 492199 - DNA, 1561 bp, Homo sapiens
taccttttactcctattcctcccttgccacctacaggtgacaaatctgaactcagatgtctagcttacttccattttcatcgtctctcatcccctcttcccccattatccatatgacattattttcacttcaaatgcacagacatcaatcttacaacaagatcatcacattaaaactaaagagagtattatttcaaagaacagcctgaataagttccatattcccctggtcaactatagcacacacagccagtcacagagttgctcatcatagcatcatatgtaggctcctattcaaacatgcttatgtagtcatcgtgtgagtgtattaaacaacaaacacaacatctacaccaaggttaaaacattatgacagccgctcctacaggtcaaggaacgtggtacactaacatacacacgatagtacaccagataggacaaaaaaaaataaccacaaacaaataagtgtagcggcactataccctcaaatacacaaggacataccaacaccaggggccgagacacaggagccaaacaaccagcgcagcagtggctaatatcaacacctacacaaagtcgataaggacaatacagatggcccatgacggcgcgactctaagacaaagagaggatgggagagtgccaatcacacacatacacaacacggacagtagaaatccaaggaacaagacacagggaaccccaaatttaaccatcaacatatcccacacgacagaaaacaacaagaacatacacaagaccaaaacaactgaggaaaccaaaacatatcacccaggaacgttgaaacagaggcacttggtgcataaataacgaacgacatctacaagagggcaccacacaagcgtgggggacatacgagagaaagacaaacggaccagacgaatacccagtgataaccagacataacagacaagcagtaaaacaagacaggggacactatattaccaacggataacgtgcaacacgacagggacgtccgcccagaataattaaaagagaccagataaaaaaagagggaagcaatcgggccaacaccacggcatggcacgccaccgacggagcaccagaactacatccacaaacacagcaatgacacactaaccacgagacatgacaacgaatcaactaccgagaacaccacagagacaacggaacaaccaaatcaccaagagtgaacaaacactgagagatagaatgaacaaataaaagaacatatactgggcagcaaaacaaaacaaagaaagagacagctaaccgagtagtagtaccaaacagacagtgaagacacaaggtgatagaaataacatcataacaaaagtagaaacgtacggataacagtgacaaagggtgaaatgaagataagagggaatacagaaaaagaacataacaagagaggagagtagatatagacacaaatacagagatccgaggcaaggcacacaagaaaatcgaaacagaaaacacatgaactactatctcaccagaagaagaaacaacaaaatatgaatgagacagaagaaaagaagatgtacgatatactg

SEQ ID NO: 492200 - DNA, 667 bp, Homo sapiens
gaaccaccagagcagtgccttctcgtcgaagcgggctccgatgcagggcgagcatcccccatgtgaggatccgggtctgcctcctcctgctgaagacagacatgcagcagcgggcccgggccactcacgtgccatacctagggcctgagtttggggatgggatgctctgcctgctgcatgtggccctgcacatggcagccgttgaccgttccattgcggttgaacgtggccttttcccacagtgcttccttctcactgcgcagcagagttcgtcccctgtggcatgatagatgtggttgggccatcgtgggttccctgagcccagccagccgtgggagctcccaaagtgggtggcttaccaggaccacccgttaaatgactttcatcttggtttcctcgtttcaccaaaatatacgtcgtataattatagtttcttccagtgtggctggctatagttccaaggaaaaagcagttttacacttatttcatttgtatttgtttaacatttatatattccctcattggacatcagaacttttatataaagacccaaacacgtgatgtttacacgagaatttcatattcgtgcaaaagggatttctgatccagtcatgacgtgtagtcttccaggcttgacaaaattagatgtagacaacgattacttaca

SEQ ID NO: 492201 - DNA, 2958 bp, Homo sapiens
  misc_feature (425)..(425): n is a, c, g, or t
  misc_feature (2849)..(2849): n is a, c, g, or t
  misc_feature (2896)..(2896): n is a, c, g, or t
gccgtcgcgaattagcgggaaagttttcgtggccagcatgatagtgcgtgccacagtggtggctggtgagctccacgggtcctggtggtgaccgcgtgctgtttgtgggcaaaggcaatgggccacacgacaacggcatcatcgtgagcactcggctgttggaccggactgacagcagggaggcctttgaagcctacacggaccacgccacctacaaggccggctacctgtccaccaacacacagcagttcgtggcggccttcgaggacggcccctacgtcttctttgtcttcaaccagcaggacaagcacccggcccggaaccgcacgctgctggcacgcatgtgcagagaagaccccaactactactcctacctggagatggacctgcagtgccgggaccccgacatccacgccgctgccttnggcacctgcctggccgcctccgtggctgcgcctggctctggcagggtgctatatgctgtcttcagcagagacagccggagcagtggggggcccggtgcgggcctctgcctgttcccgctggacgaggtgcacgccaagatggaggccaaccgcaacgcctgttacacaggcacccgggaggcccgtgacatcttctacaagcccttccacggcgatatccagtgcggcggccacgcgccgggctccagcaagagcttcccatgtggctcggagcacctgccctacccgctgggcagccgcgagggctcagaggcacagccgtgctgcaggtggaggcctgaacctcacggccgtgacggtcgccgccgagaacaaccacactgttgcttttctgggcacctctgatggcggatcctcaaggtgtacctcacccagatggacctcctcagagtacgactctatccttgtggagataaacaagagagtcaagcgcgacctggtactgtctggagacctgggcagcctgtacgccatgacccaggacaaggtgttccggctgccggtgcaggagtgcctgagctacccgacctgcacccagtgccgcgactcccaggacccctactgcggctggtgcgtcgtcgagggacgatgcacccggaaggccgagtgtccgcgggccgaggaggccagccactggctgtggagccgaagcaagtcctgcgtggccgtcaccagcgcccagccacagaacatgagccggcgggcccagggggaggtgcagctgaccgtcagccccctccctgccctgagcgaggaggacgagttgctgtgcctttttggggagtcgccgccacaccccgcccgcgtggagggcgaggccgtcatctgcaactccccaagcagcatccccgtcacaccgccaggccaggaccacgtggccgtgaccatccagctcctccttagacgaggcaacatcttcctcacgtcctaccagtaccccttctacgactgccgccaggccatgagcctggaggagaacctgccgtgcatctcctgcgtgagcaaccgctggacctgccagtgggacctgcgctaccacgagtgccgggaggcttcgcccaaccctgaggacggcatcgtccgtgcccacatggaggacagctgtccccagttcctgggacccagccccctggtgatccccatgaaccacgagacagatgtgaacttccagggcaagaacctggacaccgtgaagggttcctccctgcacgtgggcagtgacttgctcaagttcatggagccggtgaccatgcaggaatctgggaccttcgcctttcggaccccaaagctgtcccacgatgccaacgagacgctgcccctgcacctctacgtcaagtcttacggcaagaatatcgacagcaagctccatgtgaccctctacaactgctcctttggccgcagcgactgcagcctgtgccgggccgctaaccccgactacaggtgtgcgtggtgcgggggccagagcaggtgcgtgtatgaggccctgtgcaacaccacctccgagtgcccgccgcccgtcatcaccaggatccagcctgagacgggccccctgggtgggggcatccgcatcaccatcctggggtccaatttgggcgtccaagcaggggacatccagaggatctctgtggccggccggaactgctcctttcagccggaacgttactccgtgtccacccggatcgtgtgtgtgatcgaggctgcggagacgcctttcacggggggtgtcgaggtggacgtcttcgggaaactgggccgttcgcctcccaatgtccagttcaccttccaacagcccaagcctctcagtgtggagccgcagcagggaccgcaggcgggcggcaccacactgaccatccacggcacccacctggacacgggctcccaggaggacgtgcgggtgaccctcaacggcgtcccgtgtaaagtgacgaagtttggggcgcagctccagtgtgtcactggcccccaggcgacacggggccagatgcttctggaggtctcctacggggggtcccccgtgcccaaccccggcatcttcttcacctaccgcgaaaaccccgtactgcgagccttcgagccgctacgaagctttgccagtggtggccgcagcatcaacgtcacgggtcagggcttcagcctgatccagaggtttgccatggtggtcatcgcggagcccctgcagtcctggcagccgccgcgggaggctgaatccctgcagcccatgacggtggtgggtacagactacgtgtggggaatacattacggtcctttcttcaaaaggtttgatcggtctttccttttccattctcggctattaactataacttcattctcagttccacggctgcctagctttcggtgccctgntagattcatcattattcatccaagaaacttaaaaggaaaaaattggnctggcgcggtggctcaagcctgtaatcccagaactttgggagggcgaggggggcggatcatg

SEQ ID NO: 492202 - DNA, 731 bp, Homo sapiens
tgattctgtgaggaaacaccaatctgttttccacgccctcctctgtgtggagtctctcgctggacctggaactcagggattctaggcaggtcagctggcagggaagacaggcctctccacaccaagcctgaggttcaccgcgaaagagagggcgccgctctgcccccagcccggcccaacctgcacatccagcagagccctgtgttattcctggctgaggagtggttccagcaaagcgggctcttccacgtccttcagctcccccagtggcgccggatctaggaaaggttgtgccttttgctgaaactctggggttgacaggagctcatctaacagactggaggtgagtgcagatgagcacgccggctcctggagcggttgggaggtacctggatggctggcatctgtgcttgacgcggaggcttccggggtcacgagctccggaggtggaggtgccccgtctccgggttcccacgccgccctggcgacctggggctccagccccaccacggactccggtgggacgtgggtggcgcaagcccaccttgcccctgtgactcagcttgagggggcccaagctgtcccactgagcacgcgcccagcaggccgtcgcgctgcgcgttctggttttcctgtcatttgtggggtgcagaggtcaccaggagtctgaggatgggagagccccagttccagaggagccaggtcagcgaacacaaagccccgatgcccgg

SEQ ID NO: 492203 - DNA, 369 bp, Homo sapiens
  misc_feature (104)..(104): n is a, c, g, or t
  misc_feature (361)..(361): n is a, c, g, or t
tggcttcttttaaagtaagctaaaaaacccatgtcgatacagttgtgatgtgattttgattattacccttcaagagatagttaagtgggcccaggtgcaagttncacgcctgtaatccccagcactttgggaggccgaggcggtcggatcacgaggtcaagagatcgagaccatcctggccaacatggtgaaaccctgtctctactaaaaatacaaaaaaattagctggacgtggtggcgcgtgcctgtgatcccagctactcgggaggctgaggcaggagaatcacttgaaccctggaggcagagattacagtgagcagagatcaggccactgcactccagcctgggtgcggagccatantccgtctc

SEQ ID NO: 492204 - DNA, 1317 bp, Homo sapiens
tcctaattactacctttaattctaatgtgacccagggccctgaaagctgataacaagctggtgctgaccaagagggaactaggggtcggcaagaaaggattatggggtgggaacaacattgggctcttccttgtgggagtggatcgctgggggaaaggggaaaaagagtgggctacagcctgcagtgtaaatagggctaaaaaacgccaaggccaaaggctgagagggagagaggacagctcagaatgttccagcctgggggctctggggtgatagggtatactcccttttccctggtgccttcccatcttcgtccatgagccataggtctgggaagccctgtgtggtggggaggcgtgcggtgtgaatgttcaggaaacggggaactcgtggctagcctttgggccacattccgtgggcacctcaaggccccttgttggcacaaatggagaaaatgggcgcacaccagggcgccttgtgccggccatgagggaaaaccgagcgggaacccagaacctggggaggccgtgggcccaaaggggggcaccgaaagaagccaagggcacccaggggcccccagtggggcatgagaggcacaccagagggagggggcgacaaactgtgcgcgacacggggacccatgcggcgggcctagcaacgcgagcccgccacagaaaaaagcccatgaaacccctgatgatgagcgcccacgggacaaagacaatgcttgtgcacaaaacccgcaccaccaacagggagcccctcacccaattgtggagaacactggggggccccaagagaccacgtaggcgagagacacacaccccaaggcgcaaaaaaaagcacggggctcatccccagaggacccaggggagacacccatatccgagagggagagaaccccaccaccaagcggacaattagggcccccaaaggaggagtgtagcgcgcgcgacaagttatccaaaacaagcgaggagccaagggggggaacaccaccggcgaccaaaagaaaaagcgcctacagagaaaatagaccacccaaaagaagggacacacaaaggagggggccacaaaggccactcccctcaggagagaaaccccccccacaagaagggagggggggacacacccccaacggaggaggccagccacaggtaacgacagcgagccacaaagataacacgcctaggaagagccgacaaaacaggagcactaccagatcccgccacgaacaggccaccagcaagcccgcacgcaacacacacgagggagacgccaccacaaccaaagacgagcagagcatcaatgaacgac

SEQ ID NO: 492205 - DNA, 296 bp, Homo sapiens
taattgcattaacccaggaggcataggttgcagtgagctgatgttgctgcagtgcactctagtcctgggtgacggatcatgactccatctcaatatctatcaaatcaaaaaacaaatctaagtgccggggttttataggcatgagccaccattgccaggcctttatttttaatggtggttaaatacattttacaaaatatgttccatcttcagcctgttaagttcagtagtacattcatacgttcatattattgtgcaatccagtctctagatctttttcatcctgcaaatattgg

SEQ ID NO: 492206 - DNA, 222 bp, Homo sapiens
  misc_feature (219)..(219): n is a, c, g, or t
gtggcgaagtgattctcctgcctcagcctgctgagcagctgagattgcaggcgcctgccaccactgccagctaatcattgtatgtttagtagagacggatttttgccatgtcggacagactgctctcaaactcgcaatctcatgatctgcccaccgcggcctcccaaagtgctgggactacacgatgagacgatgcgagccaccgtgcctggccctttnttt

SEQ ID NO: 492207 - DNA, 317 bp, Homo sapiens
tgtgttgccaactgtggggggtacaagttaaccccccccccacataattcaagctacctataagataccagtgaatgcagacaggaagagatacgcacagttggttctcacgagtgaactgacactagcaaaccactgcctctgacacacatacacacatcaatgttataaccataacagggtatccatgattttataaatacaatagcactctcaagccagtctgcttttgcttatgttgttactactgccaagaatacccacccacatgtgtactggcaaacttttactttacctccaaggctcagaaaaaaaaa

SEQ ID NO: 492208 - DNA, 503 bp, Homo sapiens
ctccactctaatgacctaatcacctctcaaaggcccctaccaccctaatatcatcccacatttggggagtaggattttcaacatatgaattttttagggggacacaaaacatttccatctataacaagtactcttttctaaaaatgtaaaatctgattgttttactccttagacatattttgtaacgggttttccattacctagagcagggttcccaaactcaaatgtaactgattaaaggtaattaaatggtgatttttttttacatacccttttttttttttcgcatattggagtaaaagagaatattttttattcccatgaggatggctttctcttattttccttaaagtatgtctttctttttgtcttccatttggtcacttggaataaaaaggacagcttagaaatacattcctctgctatacaagacagcggcaaaacatgatgaatggcatctaacactggacatcattctgggtacaggggggaatcctggggct

SEQ ID NO: 492209 - DNA, 591 bp, Homo sapiens
ctgtacccgccgccacacacacacggggtgtcccctcggagccaacgcgaggggagttgcctcttaataattttgtgaataattctcgttttgttaaaagaaccccccattgtggtaaatatcttataactcgttttagaaattggtacataggcttctattacctattaggtggaaattttaataatgtaaaatgtgttagccctgatagtcccttttcccaagttttaattggggaaattaaatagtgtgaatgtttggattgatatcgtgaaatcctccgccgagaaattgggctggagttgtgctttggttaatacatctttccctataagaagatataacacccaaatcccttccacggtagctcggcaccccactatagagaaaaaagcaccaagttctcagagctctcgaggaaaagtggttgtccccgtacccccacatgcacctgtaaatatccctcccctctctccctggtcccctcccccatccccccccctgatatcatggggagtaataggacccgagcggtatttctggcaccaaccctagggactatcaggttattaaagctttgacttcctgaga

SEQ ID NO: 492210 - DNA, 661 bp, Homo sapiens
gcgtcatgtgatgcctggtaataatatggaatagtactatctctcaaggcttagagaattgcttgtagatggtggcgctagatattctgggtcgtccagtctgcgtgtggtggtgagacagaagtctctgactctcatcagatactgagacgctaacagttattgctgcgaagctttctgggcaggtagagcgtccgatacttctagttctttttcaaactcgtaggttagtcttcctcaacaaaatctctcaaatccggtggtaatgtttctataccaacaaggggctgcccagtttctttattaaactcctcttgtattaggaactgtgccttatcatttatgtacattaaacagtatgcactggcatttctataaccaccaaaagagtccctcactagctcttcccatgatgatttagtcacagcaatatcattgtacttcatccatctgctttcacgatgatcaaaaatatatgcccagtagtgcccagcattagcttggacttcgtgaactaaaacggcatgtaatcgataaggaacttgtatcatagatccgtcagagtacattaattcaatggttcgatggattctggatatgcttacctgcgaatctctggtgtcatttctatttctgtccccagcgatctgattattccggg

SEQ ID NO: 492211 - DNA, 585 bp, Homo sapiens
agggcggcgggtgaacgtgaacgtgggcgtgctgggccacatcgacagcggcaagacggcgctggcgcggtgcgctaagcaccacatgctccacctgcctgcctttgacaatgcatgcctgcagatgcctgctgagctgctggcatcactgctcgatctggggcttctcgtgcttctctggtgcctgctgccctgctgcgcctgctggtctgtcttttgccctgagttccagtgcatgctgccctgaggccagatgccctgagccctgtgtgagccacatgcttcagtgtcacgctgtgtctgactgccccgtgagcacgccatccctcatcctggacccatcatcaggacgtgggcccaagatcatttgatctgatgattgcttggtcatctgatgttgaccaacggggattgcagacccaagtcacgctggaattgccttgttcgatctggccacgatttgccttgccacgaatgcttggctcgttgtgttgcttgaaacaacaattacgacacttctctacccatcgaatgggacaaccgacggaccacgtgccacggcaagtttgactcacacaaattgac

SEQ ID NO: 492212 - DNA, 414 bp, Homo sapiens
  misc_feature (41)..(41): n is a, c, g, or t
ggaaaaacccctccaattttcccaaatgcaatcagggtaantagggggggggttttggcattaaaataaatgtttcaggctttggggtcctgatcaaggtcctcattaaaaaatgggggttccccctaggggtttttcccctttgggaggggcaaaaaacaaaaacttttgaaagaaacttggggattttttttttaggggcgggcggattttaatcttttcagggggcacaggattcctttaagggggcatccttttttgaaaaaaaaaacctttttttcaaaatgaccggtttaacccaaataagaacggggtttttaaaccctcatggtttccaaatcattttattttatttccgggagggagggggcggtttccccctccccccacacaaaataaaaacggtttttgcca

SEQ ID NO: 492213 - DNA, 633 bp, Homo sapiens
  misc_feature (609)..(609): n is a, c, g, or t
ggcgcgcctcccggcgcggtggccgaggcgtagcgctggacccccgacccctgcgaacatggcgctgcagagtggtgcggagcgtgtgcgggccctgctctgcaccctgcggcgcggtccctgttaccctgcctgcgccctgcccgcccgaggccctggcagctggggtgtgggcgccgtccgtacgctgccgcactgggacccgctctgcctctcggtgcgtaaattcacagagaaaccccgagtgggtaaacaaccagaaagtggcattggaacagtgggaatcagcaatttggcacagggaaggcgtgggagatgtggttaatgggtaggtctcccctgaaagtttgggacaaaaattgaacaagacaagatgagttttggggcttggcgcacagtgttgaaagctggctaggtgaactctattctccttttaatcagggagaagtacctgaaaatttaagtgacgctctttgcagaaaatccaggacttgtacaccaaaatctgtgttatgacagatggtggggctgatcaagattgacacttgagtaaccccttcagaacctagattgacctttatgagtgaagaaggcttttgagaaataccntaaaatctattggaggagttgaac

SEQ ID NO: 492214 - DNA, 218 bp, Homo sapiens
  misc_feature (7)..(7): n is a, c, g, or t
caccatngtgcaattctttcgtttgggtttcaaaagatggcttatacacatatgaaggtacagggagggccccggggtacctcggtgtacctttccatgtgaataagccatctttgaaaaccaaaacgaaagaatatgcacaataaatttggatccacattaaactagttcattcaaaaatggaaccccatcaaggccagcacaagtggtggcgggta

SEQ ID NO: 492215 - DNA, 242 bp, Homo sapiens
ggggtacatagtgatgttcaaatatgtataatgtgtaatgatctgatcagggtaattagcatatccataatctcaaacatttatcatttctttgtgtttggaatcttttttttttaatttaaaagtaaactttagcacaccaacatggcacatgtatacatatgtaacaaaaccgtacattgtgcacatgtaccctaaaacttaaagtataataataagaaaaataaatgtgaacataaact

SEQ ID NO: 492216 - DNA, 357 bp, Homo sapiens
  misc_feature (156)..(156): n is a, c, g, or t
  misc_feature (271)..(271): n is a, c, g, or t
  misc_feature (278)..(278): n is a, c, g, or t
  misc_feature (288)..(288): n is a, c, g, or t
  misc_feature (309)..(309): n is a, c, g, or t
  misc_feature (317)..(317): n is a, c, g, or t
  misc_feature (348)..(348): n is a, c, g, or t
ggctcgcgagcagataccaggattctcctgtctcagtctcccaagtagctgggattataggcgtgcaccaccacacccagttgatttttgtatttttagtagcagacggggtttcacacatgttggcccaggctggtctcaaactcctagacctcngtgatctgcccaccttcggcctcacaaagtgctggagatttacaggcgtgagccactgcaccacaaccagagtcactgtgtttttctttgtgtgttttgttctacagtttctccnatcacangtgtaagctncctttgggaatgtggactctngtccacanttgctagtcatttgtgtctgcaggtttctangagcagcac

SEQ ID NO: 492217 - DNA, 341 bp, Homo sapiens
ccccctccccgggtacttttcatttgtctctgtgtcatgacttgacctgtggtcagtccttctccctccatggcaggcctgaccaaggacttctgtccaccctgtgcaggcccttagtcgcccccgccgtaggggcgggggactagatggaatgacctactgagcctcggctgtctgtctgtctggctcgctggttgtctgtttgtctgtctcctggctgctggcctcctcagtctaggttgctgtcggtccagatttgcccttgggatatctggatttcttctcctcggggctgaagctcgggaatcacagagttgcaacccagaggcaggatgcagacc

SEQ ID NO: 492218 - DNA, 939 bp, Homo sapiens
  misc_feature (165)..(165): n is a, c, g, or t
  misc_feature (385)..(388): n is a, c, g, or t
  misc_feature (394)..(396): n is a, c, g, or t
  misc_feature (398)..(400): n is a, c, g, or t
  misc_feature (402)..(404): n is a, c, g, or t
  misc_feature (409)..(409): n is a, c, g, or t
  misc_feature (411)..(411): n is a, c, g, or t
  misc_feature (426)..(427): n is a, c, g, or t
  misc_feature (429)..(431): n is a, c, g, or t
  misc_feature (433)..(433): n is a, c, g, or t
  misc_feature (447)..(447): n is a, c, g, or t
  misc_feature (450)..(452): n is a, c, g, or t
  misc_feature (459)..(459): n is a, c, g, or t
  misc_feature (472)..(472): n is a, c, g, or t
  misc_feature (480)..(480): n is a, c, g, or t
  misc_feature (482)..(482): n is a, c, g, or t
  misc_feature (489)..(489): n is a, c, g, or t
  misc_feature (493)..(493): n is a, c, g, or t
  misc_feature (495)..(495): n is a, c, g, or t
  misc_feature (515)..(516): n is a, c, g, or t
  misc_feature (522)..(522): n is a, c, g, or t
  misc_feature (527)..(527): n is a, c, g, or t
  misc_feature (535)..(535): n is a, c, g, or t
  misc_feature (541)..(541): n is a, c, g, or t
  misc_feature (546)..(546): n is a, c, g, or t
  misc_feature (553)..(553): n is a, c, g, or t
  misc_feature (555)..(555): n is a, c, g, or t
  misc_feature (850)..(850): n is a, c, g, or t
  misc_feature (936)..(936): n is a, c, g, or t
aggggtacgatcaggcctgcgagcttctcccagcggagcctgggcgagccgaggttggccgccgccgccgccgagcccgctgccgccctcccgctcctgccccacccgcgccttgcccgggggcttctgccggggtggggtccgagccgggcgaccgcccgctgncgccgccgtcggggccgtaacccggccctgccgtccctcccgccccagccagcctctggccgccggagcccgcggggcgtggagcgcgaggagccccgcggccccgatcgagcgtccggggcggcccccggcagccagctgcgacgttccaaaatcgaacctcagtggcggcgctcggaagcggaactctgccggggccgcgccggctacattgtttttnnnnttagannntnnntnnnttccntntttcgcttttttttnntnnncnacccgggccgttcnttnnnccccctncctcttcctggcngtccctcntnccctctncttncncccatacctctttgtaccgnncccccnggggncccctgcncccctnccctnccccctnancgcatggaccgtcccgcaggccgctgatgccgcccgcgggagggtggcccggaccgcagtgccccaagagagctctaatggtaccaagtgacaggttggctttactgtgactcggggacgccagagctcctgagaagatgtcagcaatacaggccgcctggccatccggtacagaatgtattgccaagtacaacttccacggcactgcgagcaggacctgcccttctgcaaaggagacgtgctcaccattgtggccgtcaccaaggaccccaactggtacaaagccaaaaacaangtggggcgtgagggcatcatcccagccaactacgtccagaagcgggagggcgtgaaggcgggtaccaaactcagcctcatgccttngtt

SEQ ID NO: 492219 - DNA, 489 bp, Homo sapiens
  misc_feature (18)..(18): n is a, c, g, or t
  misc_feature (50)..(50): n is a, c, g, or t
  misc_feature (252)..(252): n is a, c, g, or t
  misc_feature (392)..(392): n is a, c, g, or t
  misc_feature (438)..(438): n is a, c, g, or t
gtggtttctctatctggnggcagaggcttcttgcctttccaaagcccctncctggcagtggaccttgagtagagaggagttctgctctactccagcacacaccctgggggttccaggtaaacagagacccagacctgtcctcacttagtccagagccctggggtcttctagctgaggctgtctggggcccatgggacctggagccaggcccggcctaatcccctccaggggtaggggtggtgagtgattcanccgagctttgttttgcctgtgggactcccctctttaattggcatcccaaagggcattacctgtttgtcaactgctttacccacagcagacagaagttgggggttgctttaagtctcaggaacagaatataaagaaagagncagataatagaaagtgatgtttttatgtttactatctgaactcaanaagtggggattttaagaagatatctagatgagtccaggatcttttttcttt

SEQ ID NO: 492220 - DNA, 250 bp, Homo sapiens
ttcaggagtcattatgattaatgcactatgcctggttcttcaatattgcagagttcagagtatatttgttggttgagaaaagcatggtacatgtcttggaaggcttatatttgtatagaaaactatagctgaagggtgactacttttttttttttttggaaacagggtctcatgttatatggcccagccgggaagcacggggcccgggcggggaataccgaccccaaatccgaaatcagtggccatagcg

SEQ ID NO: 492221 - DNA, 355 bp, Homo sapiens
tgctagtagaactctacgtcgacaggaccttatacccgcactcactgcacattgtaggggcggtccgcgtgtggatgtgatctgatgctagaatgaggtgtgagctctggctgaagcccttaccacattcagacacgaggaagtagtggatttattccccagtatgaactgttgctggatagtgtgagaatcgatagatgtctagaagatgccggatgtgaagggaccttatacgcacactggttacactctgcatggcgggcctatcaccgatagtatgaagtcctcgtgactgctgaatgaggagttgagcgtctggacgtgaagggttgattcacatttccactaccactgg

SEQ ID NO: 492222 - DNA, 161 bp, Homo sapiens
gtctagacgatccctgttatagcacgctggacgtgcgctcacaacgcttagctagcacaccccagggaaacagcagtgattacctttagcaataacgaaagtttaactaagctatactaaccccaggataggtcaatttcgtgccagccaacgcggtcaca

SEQ ID NO: 492223 - DNA, 498 bp, Homo sapiens
cagctgacctagcaccatccacagccctgagctccctttggtgggaggtggggtgagagtgtggagcaggcacagctccagacacccaggccagaggaacccccacctctgcaagggctggtgctggatgggcgacgttccaggagggtcccaggcctacagcttctgcccagaagagtccatggggcaaaggggtagaaccctgggccaccccagggcatgactggctttactggaaatggctggagaggttgggcttgtgttccttgaacccccagagcccggtgatcccacagcccggaggccatcactcccctccagctgccttttaggattagacaggcatgcggctaaaacatggccaggccatacccattttccacgtgacaagaggctgtggccgtgtttgcccacaccacctgtgtttctgctttgttgtcgtacagcagttgtgggtgattaggaataaaggctgactcattgcaacacggtctctca

SEQ ID NO: 492224 - DNA, 402 bp, Homo sapiens
  misc_feature (375)..(375): n is a, c, g, or t
  misc_feature (382)..(382): n is a, c, g, or t
agctccgacccctcataatgtgtgcccatggcacctagcacataggaagcgctcaatagtagacgaaggtaggtgaggtgatggcgaagattccttctagagctagacttctgtaacacactactcagcctggtcagagtctcgagatcttaaagttgggtgcatcggtccttacagaattattttcctagcctcttggagctgagaaaggaatttcttttgggccacagagccaggccccttgtggttcactctggccctgggccctggaggtaaaggtgaagtatctcagccaccagctctggattccatctgcccccatgtgtggacctttctcacaagcccaaacagttcccagctgaaggcctgcgcccncagcggngaggttgggcacacattatg

SEQ ID NO: 492225 - DNA, 333 bp, Homo sapiens
  misc_feature (163)..(163): n is a, c, g, or t
  misc_feature (172)..(172): n is a, c, g, or t
gggacggagtttcgctcttgttgctcaggctggagtgcaatggcaggatctcagctcactgcaacctccacctcctggattcaagcgattctcctgcctcagcctcccgggtagctgggattacgggtgtccaccagtatgcctggctgatttttgtattttnagtgggganggggtttcatcatcttggccaggctggtcaaaaaatcctgacctcagttgatccacccgccttggcctcccaaagtgctgggattgcaggcatgagccaccacacccggcccacttacaggatttttctcccccttctgtcgtcttctcccccccgtatag

SEQ ID NO: 492226 - DNA, 1077 bp, Homo sapiens
gtactggtcggactcccggtgtattggaggcggagccgcgctctacccgattgcggggctgcgtgggccgcaggtcgacgaggacctgctcggggtcccggacgggcccgaggccccgtggacgagctggttggcgcgtaccccaactacaacgcaggaggaggaggagcgccgctactacctgcgcaagcgcctgggcgtgctcaagaactgtgcttggctttgccagcgccgggggcaatgctcacctacggcgtctaccgtgggcctcctgcagatgcaggctgatcctgcagctacgacgaggaccctacctgcggaggttgaacgtattgggcaacattgggggcttgccccgaacaatccgaccagcaagaattgcttgatggcgcatcaacgtgactcccatcgccgccctgctctacacacctgtgctcatcaggtttttttggaacgaagtggattgatgttcctcgctgtgggcatctacgccctactttgtcatccaccaagtactgggagcgctactacaccgcttgttgccctcggcttgttggcccttgggcattggccatcgtgcctcttttgggcttccattgggcaactacatcaccaggatggcgccagaagtaccatgagtactcccactacaaggagcaggatggcagggggatgaaccagcggcctccgacggggctcccagcgctgcgctatctccgtggtctaccaaggccatcttctacagcttcttccatctgaggcataggcttgcggccagttgcccatgaattactttcctgaaccattagctgtatttccgtgaaccaagacgctgaccactgttcaagcttcgggaacccaaccaggcagcggggaatcctcagagcggtttcaacaagagcggttctgcggacgctccccagcgggtcgggagaaccccatggttgcggaagagcgtgtcccactggagtggcctctttggacaactgtgagtgagccggtataagtcagcgccgattcgtgccccacgagggaggactatatcgcggccgagcggtgtgggagcagatattcagt

SEQ ID NO: 492227 - DNA, 535 bp, Homo sapiens
ttaaacagctcatcacctttacttataccaaggcgtgcccagattcttttctgagcaggaaatatcaggtagtccacaacatactttatcttttttttgacaaaatatgtaatcgactgacatagcagaaagcctgcattaattgttttttgtttgtcgttttacagcgctacgacttgttccttgacccagcagtacctttactgggatggggaaaaagagacctacgtgccagctgcagagtctagctcccaccagcagtcgggcctgcctcctgcaaaagaggggaaagagaagaaggagaaacccaagagcaaaacagcccagcagattgccaaagacatggaacgctgggctaagagtttgaataagcagaaggaaaactttaaaaatagctttcagcctgtcaattccttgagggaagaagaaaggagagaatctgctgcagcagacgctggctttgctctctttgagaagaagggagcctagctgaaaggcagcagctcatcccagaattggtgcgaaatggagatga

SEQ ID NO: 492228 - DNA, 467 bp, Homo sapiens
  misc_feature (1)..(1): n is a, c, g, or t
  misc_feature (211)..(211): n is a, c, g, or t
ncacctgtgctgtggtgactctagattatccctccttgttatccaagcagtcgttacttgcactgatctggccggtgctctgcacacgcagttcatccataggccctcccagatgtctgcgaggtgaccatgttgctgccgatggcaggcgtcactgcgctacattgggcagcgcgcagtacagcatgacgtgcagccagcccaggacggncagcgcgatgcccattacctgtagccccatggaggccattgttcagcgtccgcggggagcttgaggacctggaaaggctgagggggatcgggctgtgggggccgaaaggatcccaagcgctggggacggcacttacacgttcgcagagtgcacttttgcaccgtgagtcaaggagaataagccagtcctgatgcgcaagccagcaagtgtgtcagacccagttctttcaagcgactgcttggattacaggggggta

SEQ ID NO: 492229 - DNA, 1352 bp, Homo sapiens
tggtaaaaaaaaatattttattggaaacagtttctcatttaacaagggaccaaagtccaattggactcaaccctgtgtctccaaccagcatctcaacagcttactgtgaaaaaatttcaaacattacagaaaaaggtgtgggggtgtggggtgtgagggggtgggcccctttaggtctcccattcttctgtgccatgtgtgtggcaaaaaaaaaaacaaaagggaaacaacacaaaagtagtgtgctgtgtgcaccacgcgccgcgggtgtccatatctctgtgtgttttgggacgctgtgaaggcagaccaccccccttgaacctcgctggcttacattaattccttaaaatatccggcaaagcgggccgcgttctaagagaaattatctcccctgagagggggcggccacaaaggttttaaacgcgtttatcaccccaggtctcttctctgttatctccacacagggggggggggccccctatatataggggagagcgcgtcgggatatattaatataaacgctatagggcgcactgggggcgcgcggcgagatattatacacacaaacgggcgtcggagagaaagtggggggaaaacaaaccggtggcgcaaagctcgtgggagaagacactcccctgtgtggggcagacacgagagaacaacaccctaataatctctcggggggggagcggggggggccccccatacatgtggggggcacaccaaatctctacaccctctagcgacaaaagaatttttaaaaaaggaccctccaaaagggggcacaacctatctcttacacacactttttcaaacggggggtgtctctaaacgggggtggcgtattcacacccctaaaggcgctgggccatttaagctgcctcctgcgcccgggcatattaacaacaaagcttttcgcgcccacaaccggggcaacatcgtcacaatttcgcgggcacacaccgtcttttttttttccgcagggaggacacgttctatgtttatctaatataccataccggctaacgacagtataaccagatcatatcacgactctcaccgcacaaatacagaacaccacaccacaagatactggcagcgctggatgcaggtcgcatatactacaagttgtaacacagaagaaaaaaagtgtcaggctgttttcaaatacagtagaacagagcacaacggtagtcgcagctacacctcaagcaaccgcatcaatcaacaactgcccccaccagcaagacgcacgcagcacccacaacaactcgagaacacacacacgaccaccacgcacgcgaggcaaaaatgaccacaacgcaaaccacgacaaaacacaaaatcca

SEQ ID NO: 492230 - DNA, 760 bp, Homo sapiens
gctcgcactctgttcttccgccgctccgccgtcgcgtttctcatgccgtgtcgcaaatggaacgaagacgatcgccgcgctggtcacttgacaatggctccggacatgtgcaaagctggattttgcttggggaacgaacgcatccccgaagaccaggtgtattccgttccatacgatacgggcggcacccagcacacccagggacgtccatcggatgtggccattgggggaccagaaacggacctcacataaccggttggcgcagaacagaagggccccacggaagcaaacgccgttgggcaacttcccttggacgctcccatgaacaacgttaccccacacaacatgggacggccacttggggcccacttccgatacaaacccaaacccctggtgcagaaccgaacccacttggcgaacggcacacggagatttctgttgggaccacaacaccaaacgcaaccgccggatagtaccgttaagcaaaaaacgaggcacggtccgattggccagacaccggaattgggggaaccgcacccagtgagcaaacgggagaacgaccagaacacccccaacgcgaggaggaccaatggccccgttagagacacccccccggcaaacgctgagcccacagacacccccaccaatagcccaacaaaccccaccccccaaacacacgggggaaccaccgaaagccctcaacggcaacacgaccagcacaagaacgggcacaccttgcgacaccccataccgaacagca

SEQ ID NO: 492231 - DNA, 208 bp, Homo sapiens
tggcaatgctagcaagatctcaatgtgaggcaaatatttttaaagttgtgaacaaggatgtgtcaaaaaaaaaaaaaaaaaagaaattccccaaacctcgcacacaagggttggggggcaggtagggttaaaactgggtttaacagggaaccctggaaaaagtctcctaaagagtttttggtggacccgtaaattatattattctgga

SEQ ID NO: 492232 - DNA, 229 bp, Homo sapiens
aattcgacagttgtgcataatgttcctggaatactaagatggtgctgtgtctacagagccctgggaggtgacggtgaggatggtcccaacaggcgcagattagggtcactggccccggtcctggtgcctcttgcctttgccttttcttcttcttgtcctctggccgtggctccagggcgcacacacaggtggagccgccagcgatggccttgggcaggtcgacgccccg

SEQ ID NO: 492233 - DNA, 405 bp, Homo sapiens
  misc_feature (31)..(31): n is a, c, g, or t
caatgggctatagcgtttgggcggggtgggnggggggggctatttttggttcccaacatatttccccctttatttttagaaccgggggccttgggattccttggggttgacaatggggtggtattcccgattgaggccccctttggtataatatttccttcccaagggttttgggatttttggggggtccccccattgggtttaaaaacagagggatttccggggggtttaaaccaacccctttttccgggtaacggggcggggggtaacacgggggaatggttttgaattttggggggcaacccccggttttaggcccttggtcttagatttttttcccctaaaattttttgaaatgggggcggtttttcccctatggccccccctttcccccttttagggcca

SEQ ID NO: 492234 - DNA, 260 bp, Homo sapiens
ctggttgatgcatttatgtattaagagctcataactcgaagtaaaagaaaactgtaaaagattgttactttaaaaaaacatttaaattcccttagctttaatttcacatttataaatttgaaattatgattctatttacagggtctattctcattgcgtctattagcattatcacttatttattgttatttagaggtggtggtggtagacatagataaacaagtagaaaaagcaaatttgatagttgcccattgtgataa

SEQ ID NO: 492235 - DNA, 1059 bp, Homo sapiens
taaaaaaaaccaacaacaacaaaaaaaaacaatgaaaaaaaaaccgccttgtgattgaaaaaattgccccggccgggggcctgggaaaatctatgtctcgtaagctgagagggggtggggtgcccctcctggttctgggggcattgggcccccatcagcagggatctccgccagtcctgatccccaggactctgagacttaagtgtggttatttgcgccccgacaaaaaaaaaaaacaaaaaaaaaacaaaacaaaaaaacacaaatccaaaaaaaaaaaaaaaaaaaaacaaaaaaaaaaaaacacaaaaaaaaacaaaaaaacacaccaacaccacaaccaaccacacacacacaacacaagggcggcgggcgcagcagcacccacccccccaggggcgcgccacctacacaccccacccatccactcacaccgaacgggaccagacccaccgaacgtagaggcaggaaccgacacaacgccacaccgccgccgcgcggccgagacaacaccccccgccgaggagaacaaacacccaccacaccacgtcaacccaacacgacgaacgcacacacagggaggcgagacaccacacacgacgcacccaccccccgcacgaaaacacaccgcccaccagcgaccaaaactaactactcggcccctaggctgccgtcctccatccactggccgcacgctccacgccgcgagagaactataaatcaaggagcacacagccgcacacctcacccagaccgaagtacaacacagcgcaacgggcggactgcaaccacgcccaccgccgtgaccccgcgccccaaacacccgcccctcccgcccccaccgctcgagctgagcaccaacctctccgcagctcccatcgtagcaccgcccgctctccaattaccaggacaccgcgcccccccgcagcatcccgccagtataacaagaaacacaacagcgagcgggacctcggacccaaatcgtcgataccaggcttcgacgcacccccacccgctccccgtccccaacgagcacgcagccacgcgccccccccccct

SEQ ID NO: 492236 - DNA, 198 bp, Homo sapiens
ttcgccattatatgggggtatgtctctgaggctctccatacacctagtaataacagggacggcatatgtttcatccagtcacgggagtcaagtaaatggtattccccgcaagaacacgattcttgaagatctgacaatacacgcaagtgtcaaaaccggcaaacaagtgtgtcggacatgagcacggcatcagggcag

SEQ ID NO: 492237 - DNA, 159 bp, Homo sapiens
gcttttgcccccccctttttactatttgcccaaccccttttttaggaatgggcttttttttgggcccctttttatcccttttcccttttaaacccgggtaagttgtatatttctgttttttatggccaagggccccccattaatcctatgggaatttta

SEQ ID NO: 492238 - DNA, 316 bp, Homo sapiens
taatgtcatgtctgtgtgtcatgattgcggcctccatttatacagacaggcgtgaagacattcacgacaaaaacgcgaaattgtatcccgtgtccagagaaggcagttacggatattcttacatcctggcgtgggtggcattggcttgcaccgtcttcagcggcatgatgtacctgatactgaggaagcgcaaatagagttccggaggtgggttgtttctggtgcagaacagaatccactttcagatatccattttgtatgtaatcagtattttttgaggtttttgtagcaaacatattgtttcctttcaaagcca

SEQ ID NO: 492239 - DNA, 456 bp, Homo sapiens
aatggataaccgttcagatccaccaagcacacctatgccattacgcccatgaaacgcccaatggaggaggacggggaggagaagtcgcccagcaaaaagaagaagaagattcagaagaaaggtacaggccgggcgcggtggctcacacctgtaatcccggcactttggaaggccgaggtggacggatcacctgaggtcaggagttctggtgagagatcaagccagctggacttcctgggtcgagtgaagacttggagaacttttctgtctaggtaaaggattgtaaatgcaccaatcagcactctgtaaaaacgcaccaatcagtactctgtgtctagctaaaggattgtaaatgcaccaatcagcactgtgtaaaaatgcaccaatcagtgctttgtgtctagctaaaggattgtagacacaccaatcagccctctgtaaaagcgcaccaatcag

SEQ ID NO: 492240 - DNA, 113 bp, Homo sapiens
gcacaagaagcacaagtcggacacacacctctacgaggagtatgtagagaagcccttgaagcttgttctcaaagtaggagggaacgaagtcacccaacttttcaggggcaact

SEQ ID NO: 492241 - DNA, 962 bp, Homo sapiens
agtaaatacattagctacacactgaaaaatataagtagacatgctttgttgcaaccaaaagatgtactctgctttttaatgacagaattattatagctcgagctgacatcactagcgtttctctatcactcatgtatactcgcaagaacagtgtatacccgagaaagacaacatacttatctatgaaggaatttatgttgtccatgaacgtttgctaatattaggagaaattcctcccagctgcatggtcaggtatccttcgtggaatgtaaaccggatctgaatgaccaaagccaccttagaccttcgttgtctcagtgatcccttatacaggcctgccttatcattaattctcaggcttattctatgaagcacttctcagtcttcagatagaaatttgtgaaaatctaagcgtggtttggaagtgtctttgatattctgttagttacattgcccaatatggaaacatgtctcatagcatggtcccccgtatccagtacatttttatggagtttcatgttgtccaactatagctggacactgaaccttttgcctaatttattataaaggcctgaccctctattgtcccatcttcacccccattccagagcagaggagtctctgtggaccatgaattgcactgtctccctcctcatttctaaatgaaaggtattagatattacattgctttagaaaggttagttgtcgagatgctaagcacggatcaataaacttcagattttcaacaaattgttcccctgtaaacagttcagccacatgacacaggcacactttaccaaaactacctaagaagtaatctagaaaggggcggaaaaacccacaaacacacacattaccaacgaaaaccacaggacgcccagggtgtcccagtcctcctgttacagcaatgaaaacatgtcaactcattgataatctggcgccacctccacacctaggaccat

SEQ ID NO: 492242 - DNA, 711 bp, Homo sapiens
  misc_feature (543)..(543): n is a, c, g, or t
  misc_feature (647)..(647): n is a, c, g, or t
  misc_feature (686)..(686): n is a, c, g, or t
gtggggggaagaaaaaattttttccccccccccccccccaccaaaggttttttccccgggtggcccccccacaaaaaaatttttttgtgggggggggggtttttcttctttgtgggggggaaattttgttctctaacaacccggtgggggtatttaaaacaaaaccccccctaaaaaaaaaggcccctcccttttttataaaaaaacgggggccccctggtgggggggggggggggttgtctccccgccccggcggtaaaaacaaatattccgcccggcggctttttttgttttttttataaaaaaaaaaaaaaccccccccccccccacataaaaaaccccaaaacccccccccggccccaaaagggtttatgggagtgtttctcggggggcgcaacccccccttttttccccccttggggtaaaaaaaaaaaaggaattttttttaaaaaagggcctagcgcccacataaaaaaaaccctttcccacccctttaaagggtgggaaaatataaaaaaggaggggcctttccatggggttccnaagccaagttccctaagggaaccccctaccccattaaaatcaggattttttccccaaaaaatatgagatagtatatcttttttaagtatcaatgaggatatacnttacttttcatagtcctgataaaataccaacaaaaactntgctatgtgcataagattatatagg

SEQ ID NO: 492243 - DNA, 152 bp, Homo sapiens
tagattatagataaaaggagatactacgactcactgtggatcctgaaattagacagaaggtcagaaactgctagggcactctttaccaatatatgtgcagatcccaactggctaaatttagcagcgcattatatatggtggtatagctggcg

SEQ ID NO: 492244 - DNA, 624 bp, Homo sapiens
aagtgcactaatgtatgtgtttgtcgcgcgtggacagaagacttactgatagtgtgcaataaatatatcctcttaggtaatgcagaagtcatggtgcagtatgagtatcgatacatataagagagggatataatgatagctgagacagttgattgatgggagtatggatagctcataagggttggttccaggccatgtgcaagtgggtcaagcttgatatccgccacagccaatggtggggagtattgcttggaaaccagtgatgttcaatgaccatgcctaaggcaacgaaacgtacagacaacacgattctccagcaagaaactttcaaacacattggctgggcgtacctgcgggccattgttgcccctgtgcgttgcgacgttcacttccagacaccgggcggcgaggcctcgagtcgcacgacgtgtggcacgcgctgcatcttgcagcctttcgaaatggacacccacttgttatctcccaatgcctggatgttagacaagagaacgagaacccgtgtcctcttttaacgacacaaacacaggtttgactctccaggtgctctggtacgcaaatcagcattaacacgaggcagtggggaatcattgcagcgggcaaaat

SEQ ID NO: 492245 - DNA, 954 bp, Homo sapiens
ggttgaacggctgtgggcgtcttgctgcctatggagtagggggttacacatcgctaacttgagaggaacgtctctgtgcgaagagataatgagtgatagctctggacaagttgagtcttgtagtggacaagaacaaagaggaaaaagagaatagaactgtctgaggaacagaaacaatgaaattgaaagatgcttttgaactatttgatacagtcaaagatacaatgactactatgatttatttgatgaattaaaggtggcaatgagaggcttggggttggatgtaaaaaaagctgaatgtatctgagatgattcttaaggagattatgacagagaagccgcagggtaaaatcacctctgaatgattttacatgaagttgtgatcaagatctggatatttggagagagagatccccatgaagatgatactcaaggtatttaaactatttgatgatgatgattcgggtagaataagctggatggaattggcgacgggttgctggagaatgggtgaaaacatgagtggtgaagaacttcgatgctgtgatagaagaattgactaaagatggtgatggaggaatttgatcagaggtgttcactttgctcattactgacctgggtgaacattttccaaggaatgcccccgattaggtcactaagcaattgtcgcagtgtggcagctaagattgtaattagtgcctgggtagccgggtgatagaaccgactgtaggtgctttagctacaggacccggaagtaagggatctcatagatctgggtcgactaggcaggtctcgttgactgggtggtgggaacaagaatgtaacgggttttacaaccctgattaggtacaacggggggaccgtctgaagcgcggcaataccctccggcgtccgcccaacttttaatacaacaaaaacggcgcaacaatgggcgacacaaccggccaccgcgca

SEQ ID NO: 492246 - DNA, 826 bp, Homo sapiens
  misc_feature (124)..(124): n is a, c, g, or t
  misc_feature (133)..(133): n is a, c, g, or t
  misc_feature (161)..(162): n is a, c, g, or t
  misc_feature (171)..(171): n is a, c, g, or t
  misc_feature (185)..(186): n is a, c, g, or t
  misc_feature (226)..(226): n is a, c, g, or t
  misc_feature (231)..(231): n is a, c, g, or t
  misc_feature (238)..(238): n is a, c, g, or t
agcgggagcgtctcgcaggccgtaggaggaagatggcggtggagtcgcgcgttacccaggaggaaattaagaaggagccagagaaaccgatcgaccgcgagaagacatgcccactgttgctacngggtcttcnaccaccaataacggccgccaccaccganntggacgagnttctcccggggaanntgtaccgtccagcgagttgcagatctacacttggatggangcacnttgaaanactgacagcttagtaaagagtctacccagaagctagatggaagggctctcacttcaagttttgcaatcgttttatacagactgttaaacagtacctggctatcgagttaaaggagattggcagcaccatgtctggcagtaagaggggacgtgactgattccatgaccctgcaggtcgcagaagttccagataggagattacttggacattagcaattacctcctccaaatcgggcaccacctccttcagggcgcatgagacctatattaaattcgtattgtactatttgttgaagtttattgtttccgtcagttgatgtcctaataaacatactcttcttcctcccctgattattgccattaaagcctttacgattctaaacaaattataagtgcatcagtctatttaggagttagatttggatgtgctattgtatgattacgaatagtctgtatgttgccaagcccttgctgtaaactatgaacgaaaagtgcgtcttaagcattctggtgttaaaactgtacctgttcacactactattgtggtgctactcgcaacatgaaggaaaaaaagattctcccagggctg

SEQ ID NO: 492247 - DNA, 198 bp, Homo sapiens
agaggtgtattatgcaccacagcattctgcacgcttagcattctgcaccacagtgcgatgctgcaggcgtaccaccaagtcttccctcttgtcattatctcttccaagaaacagtcatgttcctcctcttgagaaaatcaatgtccctggaggagatgatgcccaccaagcggttccccatccggctccggcgctcgg

SEQ ID NO: 492248 - DNA, 129 bp, Homo sapiens
gaggcacaccctatatacatatatacatatatacatatatacatatatatatatatatataagaaaatatatatgcgtacatatatatacccacatacaccaacaccaagacacaggtacgtttgttat

SEQ ID NO: 492249 - DNA, 377 bp, Homo sapiens
tctacaggatcttcaaacacgcaatctcaaccctctgctggtgatagggaaccagaatgatggccctcagcagtgaccaccccaacacaggaggcacgcagcaacaaggtccaccacctcctcaggcaaagcacaaggaccaccccaacagtgagggcatcccccatcctcctcaaggaaggccacaaggaccaccccatacaggtaggccatccccgtactcctcgagcaaggccacaaggaccaccccaacatggaggccatcagcaaggtcctccctcatctcctcctggaaaggcccagtgaccacctccccaaggggccgaccacaaggacctccacagaggcagtctcctcagtaatctaggattcaatga

SEQ ID NO: 492250 - DNA, 352 bp, Homo sapiens
  misc_feature (12)..(12): n is a, c, g, or t
  misc_feature (92)..(92): n is a, c, g, or t
  misc_feature (271)..(271): n is a, c, g, or t
  misc_feature (275)..(275): n is a, c, g, or t
  misc_feature (306)..(306): n is a, c, g, or t
acacagagccanagaagaatttccccaccacgccccagacagagagaaagccaaaacccagcccccgccacccgcccagccccccaaccccnaaaaccccccaacgcccccagcccaaaaaacgaccaaaagcacaaaaccaaaaaacaaagccaccaaaagcacacaaaagaaaagcacaagcaaacaaaacaacccccagcaaaaggaaacaagagggaacccccaccagaaccaaaaccccagcccccacccccccaaacgcaacccncccnagcaaccccaccccccagacaccaagaacanaaaacaaaacaaagcccacccacccgcccgccaaccaaaccagaca

SEQ ID NO: 492251 - DNA, 785 bp, Homo sapiens
ggtcatctgtaatccagaatcttcgagctgttggcagccctattgcttctgtgcctggatccactaatacgggtactgttccgggatcagagaaagacagtgactcgatggaaacagaagaaaagacaagcagtgcatttgtatggaaagacaccagaagccagtccagagcctagaggaccagacttctgaagaatgattaacatattttaagtggtgaaatgggtattgaggttacactctgctagttcttaatgacgaaacatataagtacgagacctcagtgatatctaaagaagacacacaatggatgctaggtacggaattctcgtatgtcgatactgcgaaccgttgataggcgaaacgtctttgtatgcacgtgtgaggacaaccatgtgacaccacgttctctctcacgagataagtttggatatggattagagcagcagccgataacgtgggcaaagatttactgcgtacagccagatttgggtgtaattcataacgggtcatgaacacacagaaagcattacagcttaatgggaacataccttcccaaggatacttctctcaggatcaggctatcaggaacggtggcggtctcgtatgcactagggtcttattcatgccaagtcatggatggtgatctaattgagtatctgcttaactcagggttaagaacgccaggaatgatatcgtcagagactggtggtagatctgggccttggtttggacaccccatgggaactgcacgtgacgatgtgatgatagtgtgaaaacaaact

SEQ ID NO: 492252 - DNA, 400 bp, Homo sapiens
agaacggtgccggcgtttatcaaagtttagggaaacctccaggaaacggttataatggcaaaaaagcccaggttcaattacttaaaggcacggggcaaaagggagtcaacccgggggttccgggttgaagttgaagtaaagtttgaggggaaattattaaaatctgcaaaaaatttggccaggttaaaaaaggagggttatttgaggttccagcaggggccaagggttgaaattgagggaataaacttgttgcaaaccaaagccattttaaattacattgccagcaaatccaacctttatgggaaagccttaaaggaaagagccctgatggatatgattttagaaggtttagcaaatttgggggaaaggatcctccttttgcccgaatgtccacctgagg

SEQ ID NO: 492253 - DNA, 379 bp, Homo sapiens
agtatttctgggacagacccagtttcactattggacaccagttattagaaaggaatcctttggttcaataactcagaagttttaagtttgttaagccatctgtcggaagagtcattttcagtattactgattcctgtgctattgtgttaagatttgcctgtgctttcaacatacatattacatgatttcctttggaatgtatttgattaataaggaagttaaagcaatgttttcacctcaatgtagaaatacagtggttttgatttttttcttcttagtgctgccaaaataaaatactcatttttgcataaaattccctaatcattttgcagaatcttctatttgtatcaataaaggcattctaggagttttgagaaaa

SEQ ID NO: 492254 - DNA, 643 bp, Homo sapiens
tccaccatggccagacgcccccggaacagcagtggcctggcacttcgtcctgagtgcatgccctgccgagacgcagatgcccggtgcctgtggctctagcagtgctccactaactggtgtgctacagactcatgattgggcatgcacatgcgactctggactccgacccctgagtactccacgctgccgccatccatccccatgtgctggtgccctgtgacctggctgagtccttctgtgacttgtgcttggtgcatgagctgatggcctccttctgtagcagcctgcactctggcccaccggggcagtgtgactgcctgcttgcgtgagcatgaagactgagtatttctgactgggtctgggatgacttaaataagtcatcacgccaccctgctgatgctgtgacaaccgtaaggtcatgcttccacatggatgtacatgctgctgtgcacatgctggccatcctggttgcaccaagtgagctggtgggatgggccagcacttctgtggagatcaagatgacctctcccgtctacgtgcaccgacatgatggtgggcatcgggacgtcggatgtggacctggacaaatacctgccacacgttctgcagcctgctgtgcagggatgaggacagctggggcctc

SEQ ID NO: 492255 - DNA, 127 bp, Homo sapiens
aggtaacaaacgcatatcgccgccgattcgacttggtagaaatcatcggctaatttcgttccaaacaaagcggatctacaacagatggaatccaatatttttccattgctggctctttgtaatgggt

SEQ ID NO: 492256 - DNA, 133 bp, Homo sapiens
  misc_feature (4)..(4): n is a, c, g, or t
ccgntggatactaatgatcatgtaaacacaagacagttcaagtataaaataggggatggcacaatggtacccaaaatggggtagagaaaaaagttataatttagtggttgctatggaaacttctaaaactagg

SEQ ID NO: 492257 - DNA, 111 bp, Homo sapiens
gatacttgctatctctcctgtaatctcttccagatcaggatatttgcctgtcaccattccaccaaaatcctttagctcactgttgtcgaaactacagatcaactcttaatc

SEQ ID NO: 492258 - DNA, 905 bp, Homo sapiens
cttttccagtgtacctggagctagtttgtaagcaggtttgtattgacttctgctccgtgtcaacagctaggcgaggtctcgaaacgtcggcacagaaacaatgccctctgattcagtgacctctgctatagctagtaacatgtataatcatgaagctacctggacattctatcctgaaccaagactttacaatatggtggccagtatgctttcgcttcatcctagaagtattatctcaatgcatcttcaaagatacgtgaagtacgtctttgcccagatgggacataaagcaaccagcagaacagatatacttttctctcaagatgtcgtcgtccagcaaaacttttacccagtgtccaaggccttgggctatcctcattcagtttccagacgatatatgagtcaagaacgacaggtgcgtagtcagtagcagtcgcccactgcaggctgttagacacattgacagcgtgacatgccaagacacttctaggcccagagccctacaaagcaagccatccactatagccttaacttgacagccccacaagaacagggcattcatggtgtagactctgggcaggaagtaattcaccgtatagatggcatccaccagctgttcatgctgatgacaacaacgcttatagtggcccttatttaggctcttactcagattgggcttcatggacgacaagatacctagtcgttacctaggggatgggggatccaagaatggggggctaagtgagccacaaccgcagaactggtctagtcccgacgaagcccaagagcatagtcttacaatgaagcatcagccagtatgcaagtaccaagtataggcatttacactggtatggccttccttatttctgaaacacgtagagagaaagccgagttacaggtatatt

SEQ ID NO: 492259 - DNA, 134 bp, Homo sapiens
atccaaacagatcccttggcttacgaattgggaacatttccagaacttaatccatgagcatgggatatggaaaagaaaacctgaaacaaaaccagacccagccctacacttgggttggtcatggtgtcagcgca

SEQ ID NO: 492260 - DNA, 325 bp, Homo sapiens
ccatgtggttcatgcctgtatccaagcactgtgggaggcaaggcgggcagatcacctgaggtcaggcgttcgagaccagcctggccaacatggtgaacacccatctctactaaaaatgcaaaaattagctgggcgtggtggcttgtgcctgtaacccaaactactcaggaggctgaggcaggggaatcgcttgaaccagggaggcagaggttgcagtgagccaagatcatgtcactgcactccagccttaaccaaaatcacccagcagtgccccaaaataatatgaagctattctaaactgaagccttcacagacaatttcctgg

SEQ ID NO: 492261 - DNA, 749 bp, Homo sapiens
  misc_feature (391)..(391): n is a, c, g, or t
ttctgtctccttgttcatctgtcattcctgccactccccaaaagccagagccatggacgtctctcaggttatgactcatgtctttgccttactgtctctttagcctggcagagacatttatgcccccagtaccagattacgagctccagttatgagcctcagccccttgatgcgtacacacgggattcttcgccgtctcgaggcccccctgtctccatgtgttgagtcgattgcgtccgcccagggacgttccaaggagacactcacgtcgtgcaaggttgagcgaagcggagcacatgtattgccgcctcccgtgtggtgaacatcgttcctaggcccgtcgcttggcgtgcaggcgtcagtgcgtacgcatgtggtgcctctattcgcntccaaaggcgtattgttgcgtgtgaagggcgcagacatcgtgtggcgcgaggtaaccaagagttgtcgctttaacattggctagtaggacaatgcggcaggagcttgctgcgtatgcatacgccacgaaccgtctggcattgtgacatcgcgtgacacagttgttggacttgtgatgtccacttgaggcgacctagtcgcttcatgcgcgacatggccattgcagacacggagcatgctttgaccccctcctgggccttttgcatcgcctgcttcttgttattcagccacggccttacatggacaccctgtccggaacctgacgacagaatggaaggaggatacgggcagctggcccc

SEQ ID NO: 492262 - DNA, 713 bp, Homo sapiens
  misc_feature (208)..(208): n is a, c, g, or t
  misc_feature (632)..(632): n is a, c, g, or t
gtgggtggggcagcctgggcattttataccggctcccccaccttggggggggggtgaaggccccgggtcaaacccaaacccgggccggatcctttttgtgaggctggggccattacggcatcatcatggcaatggtctttacaacatgggtgagcctttcagtgccacagacccaaaggccatcggccatcggaacttccatgcaggntactccatggttggggctggcctcaccgtaggcctgtctaacctcttctgtggagtctgcgtgggcatcgtgggcagtggggctgccctggccgatgctcagaaccccagcctctttgtaaagattctcatcgtggagatctttggcagcgccattggcctctttggggtcatcgtcgcaattcttcagacctccagagtgaagatgggtgactagataatatgtgtgggtggggccgtgcctcacttttatttattgctggttttcctgggacagctggaactgtgtcccttagcctttcaaaggcttggtgttcagggccctccctgccctcccctcttgttgggtgttgatttggaggccctgcagtccaggccgagtccccagtgcggggagcaggctgctgctgctgactctgggcagntgggcccctgggtccccccccccccccccccacccctcttcctagggtttgtgaaataaacttgggatttgtctggggcca

SEQ ID NO: 492263 - DNA, 306 bp, Homo sapiens
aaaacccccccccttttttttaaggagaatgggcccgtccttttcccaggccccccagggggggggatagccttgcttttgggttaaatatgtaaagcaaaattttttttatttttgccctaaaaccttttttttttggttttttttgaaagaagggcctttggggcccccccttccccttttttgttcccccactttagatggattaagggttttgggttccccgggggggggggggggcagccaggggtttcctggtcccttactttgggcccgtttaattaaaggggccccctttaaaattga

SEQ ID NO: 492264 - DNA, 799 bp, Homo sapiens
ggcatgatgatggcttgtgtccacgaggcgatggttgcatagagccaagattgtgccattgcatctccaaacctgggtcgactgagcgagattccgtttcaaacaaaaaacaaaaaaaaagattcacttaatctatgtatgaagtatatcagtaaccgctgagtatgtgagaggtgggtgaacttacagtgtgtaaaatgcaggtgggggtcagggcaagtagccaattaggggtattttctcgtctgtccactccagtgaaataaagttctgtatttcagttgcatcggccgaggattaagtgctatctaattacatgtgattgtttcttgacacattggtcattgcaggggagtgtcttcaacatgtggcgtgatatgggctgtaaagattcgggcgtcaggttagaagagtaaaatgtcgttagtgctgcaacttttctaccctgtaggttatacatttatagtagtctcctctttagaaacattgtgatatgtctaaataggcatgtgaaagggtgactaatcaggctggcaatacatatccgaggtatctaatcatggccgggtgggcgacctccaactatgtggatcataactctatgaatactgtttgtcattcaccttacatgattaagcagggtcttgtcttcaaaagagtgacaagaattctggatcacagatgtcatattctttgggaaagtttctcccctcatactaaggtggagtgtgcgtgtgtgaacgcggttcacaacggtggcattttaaatgaccgttgcaatataggtagtaactacggg

SEQ ID NO: 492265 - DNA, 1238 bp, Homo sapiens
gagaagcacccagaatatgctgagcagaacatcagaaaaagcacgacgaagaaaaggcgacatccaagacaggcaccaggtctcagcatgcaacagcagcagggtacagacttaaacgggcacatgagaaggatggtacgctgcacggaacaagtggcgcttggggccattgcaatcacgcggagtagccaagacctaagtcaagtccctccaggaacagggcaagacacacaacgacagaggtggcaccactgaacgaggagaagactgggggtcttgcgaggacaggacggacaaacggcaacggaggctgcaggcacacgtcaggacaagaggaggctagacgacgcagggcctatgctgacccatgacagcccgaacgaaagacagagcgcagacaaccaggagcgaggaggacttgacacctagaacgatagaggtgaggaacaccgtcacaggtggatggaaccagggaagcagcagagccacagcatgcacgccgcaaggcaagacgcacggaaacagccacagcacgccacaacaacgacgcaatcaaagcacgacggcggaacatcataggacgccacgcacgcacacggcacaccgcggccacagcacagcacacgaagcacacagcacaaaactgagatccaagacagcaaaggtaagaacgaacaggcacaaacaccgcacaagaacgcacgcagccagaagtcaacaagaccaccacaaggccaacaagaaaccgaagacgaagaaataaaagaacaaggacaacaggagagaaaaacaaccgacaggaactacaggaagcatgaagaccaaaaagaaccggaggaaggaaacgaaagaaacgaccatacgaaaacaacataaagaaagcacaccctaccatcacggaaacctgacctccgacaatatagacagaaacaaggaacagacgagacacaaaaagcaataaacagcaggggagagaccgcatacgcaccaaagacaggacaggaagaggggcgtaaacagcaccagacggcaacgagccgacccaaaaacacaaacaaacaaaaacatccaacaaacataaccacaacacaccaaatacaaaacaaaaatacaaaacacacaccccacaacaccccacaacatcaccaacctgtcaacaccaaaaacaaacctatacaccctccaaacaactcccaacaccccaccacaacaccaaaacacaacaaaaccaacacaca

SEQ ID NO: 492266 - DNA, 590 bp, Homo sapiens
atttaatttttacgtggttagatatggggagtagtgtgattgaggtggagtagattaggcgtaggtagaagtagaggttaaggagggtgatgggggctatgatggtggggatgatgaggctatggtttttggtgaattcttcgataatggcccattggggcaaaaagccggtatagcgggggcaggccctcctagggagaaggaggggttggatggaattaaggggtgtatagttcagtgttagctgtgtttcagggtgcgagaatagtagtagggctcggtgggtgcatgagagttaaagttgagtagtaggaatgcggtagtagttaggataatataaatgtgttcaattaagaagggtcatgtcagggttgtacggtagaacttgctattattcatcctatgggggtaattgaggacgtatcgcctaagaatttgcataacgagggtaggaaaatccacctcaaagggcctggctatgagggacaagcattgcacaacttggcgaaaagctacgcgaagggaggaaaacacggaacacatgcaaagggggcacttggcccttgaaaaacagccgatcaaaggcccga

SEQ ID NO: 492267 - DNA, 552 bp, Homo sapiens
  misc_feature (1)..(1): n is a, c, g, or t
  misc_feature (79)..(79): n is a, c, g, or t
  misc_feature (131)..(131): n is a, c, g, or t
  misc_feature (137)..(137): n is a, c, g, or t
  misc_feature (191)..(191): n is a, c, g, or t
  misc_feature (195)..(195): n is a, c, g, or t
  misc_feature (201)..(201): n is a, c, g, or t
  misc_feature (240)..(240): n is a, c, g, or t
  misc_feature (279)..(279): n is a, c, g, or t
  misc_feature (309)..(309): n is a, c, g, or t
  misc_feature (407)..(407): n is a, c, g, or t
  misc_feature (433)..(433): n is a, c, g, or t
  misc_feature (502)..(502): n is a, c, g, or t
  misc_feature (539)..(539): n is a, c, g, or t
natgtagttgatcttctatggccaggagaggcactggggaggggtcacaggatgctacttgggcacctagaagccacanctgctctccacagatctggcacttcaccatgcgcaggaatgtattgaccttnttcatnttcttcctgaagcagtagatcagctcgtagttcttgagcagttcgtaatggttnttcnattttnttttaaacttgctgtaggtcttctttatgatcttcccanttcggcggctgctgttttccagcctggatttctgttgcnttttctccatgttggagggtgttggaatanagttttataagcagaaggaggtctgggagttatgcaggaattaatacttcttgtcctttgggatataggtttcttcaaactcctggtaggtgttaatngccagctggtgcgcgctatgggcttngagcatagcgtggtcaaaaagcctggataacggaacggtttggacggcaccagcctcttgaagccaggncaggcagagcagggcaaaagccaggagcagggacgtncgggagcctggag

SEQ ID NO: 492268 - DNA, 426 bp, Homo sapiens
  misc_feature (4)..(4): n is a, c, g, or t
gcgngcttccggagctctttgaaacaagcaaaaaacttctggaggacgtggaagtagcaactgaacccaccggctcccgaacaatccaggataaggtgtccaaaggactagaactccttgagaaggctgctggaatgttatcgcagcttgatttgttcagccgaaatgaagatctggaagagattgcttccaccgacctgaagtacctgatggtgccagcgttgcaaggagccctcaccatgaaacaagtcaaccccagcaaagcgtctagatcatttgcagcgggctcgagaacacttccgtacatttcttaactcagtgtcattgctatcatgttggcagagtttcagctaccccaaaccaagactaacttcagcttgaaaataatacttgctagctcctccatgggcctatcccaaatctcgg

SEQ ID NO: 492269 - DNA, 304 bp, Homo sapiens
ccttgtcttagaaccacgctggagaagaaaggtggcaaggagtatagtggaagctagtcctggcaactccgcgcacaaagaacgggcccttggaagtagctggaggtgaggtgggaacgccaccgtgcttatctggttgtgacacatgccgtattaggaacagccattttgtgagagggcttagaattcagcaggtgtgtggcagcacagccgcatcttcaacatggaggccacggacagccctgtagctttcacatctatagagtatcaccaccatgcaggtagtctgggaaaatcacctttg

SEQ ID NO: 492270 - DNA, 198 bp, Homo sapiens
  misc_feature (130)..(130): n is a, c, g, or t
  misc_feature (168)..(169): n is a, c, g, or t
tgaggaattgcatacaactggcattacaaagttaatatggtaattatggtctgtggtaaaattgagtttcagaataaaattaggaacagtaaaatcctaagaactatgtaacacaaaaaagctttggttnttgcttacaagagtatatttacaggattattcgtgctnngaagattcagtttctctatctcttgggag

SEQ ID NO: 492271 - DNA, 1047 bp, Homo sapiens
gggcgaaatgagactgtacgtgagtgatgagcgtcccgggttgcttgtctgtgttgctaggctgcggcggagagagcccggggtgagagcaggagtggtgctcatcaggcactgtaggcccggaagatgtgtggtccacgttcctgagccgggctaaggtccctgtcttgcagttggataggcggcaagctacctcttctccactagtgcgaattctagccagagtattattttatattccgtgtatcatggctggcgagcaaaatgactcgtcactacaccagtggctggaatcggagaaagcgacagcaagctgaagccccaacattatgtcttagctagccctgtacatatattgagttggtccaaggccataaaggcggccgaagcatctacttggttccgtgcaggtcgagcccgtgattcactcttagatcaaagacttggaggtctgatcaagagaatgtccattgtccgtggttgggggagactccgaattcgtctaggcctgacgatggtttgtagggggagcgcctatacccgatgactggaaagatccctgcctacctccctgagagagcgagagtgccctgacaacagctggttccatgacaagcatgaggtacccgaggaatgcatgtcacgtgagcttgagagattgtctttgaaaacagtaacggtgtgctggttctcccgtggctttacctccaagaatgaggccgcagccaaggcgcggctgagtgaagtgggttggtaaccgaaatgagccttgaagatggaagagacgtgtgtaccttaatctgggggaggggaattgcaatgagctggcacagctgggaagaaacgggcctaacaagttggggccccgatgtgggccaagagacaaccgcgtttcctagttgctgacacaggagttctcaacacaggggctctcttgtttcaaagtgccgcccttgacctcccgccggttcctctcacttatacgagactgccgcatgaaccccattggtgcatagctcccacgcctctgcatccacctaatcactc

SEQ ID NO: 492272 - DNA, 143 bp, Homo sapiens
tgaggatcccactgcggggcgacagcctgatcagccaatgccgcgtgtgtgcaagcaaggcttcgggttgtaaagccattttgtccggaaagaaatggctctggttaatacctggggtcgatgacggtaccggaagaatcagg

SEQ ID NO: 492273 - DNA, 1162 bp, Homo sapiens
ggaacagaaagatagcgaatgagacaaagacagaagagaaaagcaaagaaaatgtagtagatgtataggcctaggcgatggctggctcatgcctataatccgtagcactttgtggagggccaaggccaggcggtctcccgttggagctcaggagcttgcgagaccagcccgggcaacatgcgcaaaaccagtgtctcaaataaaagaagatagaaatgacccgccagcgaacttgggtcggttgctcgacaagcagaagggataggagtacaaggtgccctggtggtgcagatctgagtctccatcgtgacctgagccccatccccggggcacccccacggggactcaattgcacgtcgcgttcccccgcccttgatgaccctcgtcttccaagggtccgacgtgcccgctgcaccccactcggttgccccgctgccagttaagtccagaatccccggtagaccgggcccaagacgtcacaccaagggtttacaaacggcgcaatcggcgatacggcttattcggggagaacttaccgaactgggcccacagctcggagtcactgcggccgtttcacaaggtggcttccaactggaagaggttggcggcaaccccggacaactcaccgattgcatgcgccgacttccaatcatccctggggtccaaaaacttccatcccaattcagataccgccgttgctcgacacgaagggcccaacatcggggcgcgaaccccacagactccgggaacgccccccaaatcgtggtccccattaggcaacgggtggaacacgagcgcgactggcaaccactctagtcgccctggcccacggccctgcaatcccgctgaccagccccaagacaaacaacctggcgcattcgtcctcccggccacacttggtcgccctacctaaacgctcagcctacacttcaatgaggccgcaatctccaaccagaccctgcctaacactcgtccatgccccgagaggtccgcatctcggacaacgtccctgatggccaagcttccggccaacaagggccaacactttgtgactggcccatctagctaaaggacccttacaagcctacgcccgtaaccccccggaaccctgcgtcggaacggagcaacgtggaatcgcccccaaggacgttccccacatcga

SEQ ID NO: 492274 - DNA, 444 bp, Homo sapiens
  misc_feature (237)..(237): n is a, c, g, or t
  misc_feature (320)..(320): n is a, c, g, or t
  misc_feature (323)..(323): n is a, c, g, or t
ggcgcgtctggtattacagctggacacggtggctgatgctataatctcagcactttcggaggctgaggcaggcagatcacctgaggtcaggagtttaagaccagcctggccaacatggcaagaccctgtctctactaaaaatacaaaaattagccgggcatggtggtgggcacctgtaatcccagctccttgggaggctgaggtaggagaatcgcttgaacccgggaggtggaggtngtggtgagctgaggtcgtgccactgcactccagactgggtgacagagtgagactctgtctcaaaaaaaaagaaaaattaaatnctngtctaggtaaggcattcgctgcttcggattggaaagataacaaagcatgtacagtgaaaagtctccttcatatcccttccaccagacagttctcccgctcagtagaccgctgtgaaacttt

SEQ ID NO: 492275 - DNA, 1264 bp, Homo sapiens
ggttccggccgagaggagatctgtttcatactggggaccttcggacctggccagggcacgaggaccgagcctgtatttgacgagcgtggagcgcgtgcagtgctgtcagcctagcaggaagccaggtgtccccgatgcctggagtgtgaaagtcacgctcagggcaggattactttgtagcacaggaggtcgcaaccacgagtgaactctgggacgtcgtggcgtatggcgagctctcttggcgctagtcgtggtgttacatgcagtggtcagccccgacgtggccctgcgtgtgattgcagcatgcatgtgacatagttaacaccaaggacaacgacattccggacacgggacaggtggatccgtctttctcgacgcgagacgttcagaactcaacaaacacttggtatggcttcgttagagaagcgacatccgccatcaccctcggcagggaccgtggtcgacgaaaaaactacggtcgtcagtcgtgggagcgtaaccatggtggacagggcaggggtacgtagggacttgctcccctggatttatctttgggcggcggccctctggaacgcgaaacttaccacaggaggtccagtacggttgtggcccatctctaactcattgccccccatgacactaaaacaaggtcagttatggaagccttgcgaaaagcgcgtcgaaggccctggacctcagaatccattctctaccagggccacacaaactggcgagaatcgagctgccctttggacccccttcgtgtgagtagttgtatccacaggcaaacgagaggtggagccttcgtatgaggacacccatggttgcctaagaggtaatcaaaaaggttgcttcccgtatcctggggcagaacgtggacacggggggttgggtcccagcgctggaatagaggcgggctagggttccatgtgcgcccccagtgtctagccctacggcaatagtcgatgggagcgaccatgcctttgtttggaatcttgtgaagctgaaaggaagagatcctgaccgttgggatgatggaggccaggccaatgagacgggccccatggggaaaggccatgggagccatggtgcccgacacggccctcaggcgatgtcgccaaagaaacaacaagggccccgcaggacagcaaccgggggcccaataattgcatccgtggcagggcccaagaacgccactcaatgagagggtggccaatgaatagacgggacatcacaccacggcggtgggcataaataggccccg

SEQ ID NO: 492276 - DNA, 257 bp, Homo sapiens
ctactcaacgtatgcctgggaccacaagtgctgccctgcacaacttacccagctaattctttatattttgggtacagacagtgtttcaccatcttgggcaggctgatctcgaactctctgacctagagtgatctgcttgcctcagcttcccaaagtgctgggattacagccgttagccacctcgcctggcttttttgcataatttgtagtgcatatactctgcaattagagatttattctggggctccgggctcgtc

SEQ ID NO: 492277 - DNA, 261 bp, Homo sapiens
atctgggttccccacgtgtcctcatagacccaaaataggaagaggcgagtgagctacccacacagatgccatctgctcaactggtctttctgtgtatgacgaagccgctctcattctcatagtgacagctcagaggagatagtagtcatgttctgtaatttgtgaatcctgtgagacaccattttcctagctacagatgaggaaactgaggcccatagaggttaagaaatttgctggaagtcacataccgtgatccaaggt

SEQ ID NO: 492278 - DNA, 924 bp, Homo sapiens
  misc_feature (419)..(419): n is a, c, g, or t
ggtgcagtgggggggccgggggccctggtggccctgggatggggaatcgaggtggcttccgcggcatggtttcaggctagctggcatccggtgggccgggagttcagcgagtgcgtgagacggcggccggggccgagagtcgacggagcttcgcggaggtacatgccgaggtattaaggaggtggtatgcccgatacaccaagatgtgggcctcggcttggtcctgaggaccatgaagaaatgcaacgcatcctctggtgagtgaagatctagttcgtacttgctaccgctgactgcagtgtacgagaatgcatgagattcgatgtgactgttgcattcctggtgggggccatctactgctaaggtagtggagagctctaagcagattactgtgagtgcccgagtgcgaatagaatcangacgcccgttgtcgcgggctcgaacgacaaggcgagggtatcgaatggaccaatatttggtgttgccatatacgtgcggtacgtacaacatgcgaccaacgctccggctcctcgggatgttcaacgagtgctacgcactggcagggtagggccggagccgtgctattccgtgggggtgcatctatctcgtggcgctaatgcgtcttcccattctggttcgcccagtggctggccagaggcgctaacatggcgtgagacactacaagatgcggctagaggcctcccaacacatgatcgcactttgatcaaggattgagcgaggccggcttgcggtctcttgatgcgtacgggacagcgctcaatccccctgacaacccgagggtgccaaattggggtaatttgatcttcagtctagccttgatgacgctaatagaaagccttgctgcatttgatggcttggcttattctgaattgacgttgctagaaccatttagaacctgtgggc

SEQ ID NO: 492279 - DNA, 378 bp, Homo sapiens
  misc_feature (16)..(16): n is a, c, g, or t
  misc_feature (20)..(20): n is a, c, g, or t
  misc_feature (22)..(22): n is a, c, g, or t
  misc_feature (33)..(34): n is a, c, g, or t
  misc_feature (41)..(41): n is a, c, g, or t
  misc_feature (44)..(44): n is a, c, g, or t
  misc_feature (80)..(80): n is a, c, g, or t
  misc_feature (100)..(100): n is a, c, g, or t
  misc_feature (107)..(107): n is a, c, g, or t
  misc_feature (165)..(165): n is a, c, g, or t
gaggaagatgtcacgnggantntccttgtgctnnctggctnganatctttatggtggtcactagcgttccatcagttgtntcaaccaaggaggtcttggnaggaacngaaatagagcttgcccatgtttctggagaactctttcttctggctgtgggttctgtgngagaagagacaggtaacaaggatgttggggtctcagatggtgtgaaggttaacgtctgtgtttcagctgttgttccctcttcttctgcaatggtctggcttgaggttaactcaggaggctcctcctgggacatatttagagtggatgttggagaaagtgtcagagctgaagtctgaagatgcaccaatatgttgggctgccttgccatggaag

SEQ ID NO: 492280 - DNA, 1216 bp, Homo sapiens
cgagttacaggctcgtgctaagctagcgcagtacgtcgatactacccttcagtcgccatcatgattatctaccgggaacctcatcagaacacgatgagatgttctccgacatctacaagatccgggagcatcgctggacgaggttgtgcctggaggtggatggggacgatggtcagtagagacagaagcgtaccattagatgactcagcttcattggtgcgacatgcctccgctgaaggacccgatcggcgaaatgtatccgagtagcacacgtaaatcactgtgtgctcacatatacgtccatgaaccaatcacctgcaggcaccacctgttctcaccactacacgatagccttccaagcacgctacattctacgacgactatacacttgacaaactcaactccacacggtcaacaccttctgcacaccaccacgcacgacgaacccacgcaacacgaccgctaaccaaccgtacatactagacacagagggagacctgacaaacaacacaatccaaggcaccacatccctacgccctacctattacagacacacgactaaccccacgttcatacacactcagggatcgacacacgagatgacattcccaacgactgcgaccactcggaatcggcctcccactatcggtaccctacacggagcaaacactgagattagctgcaccgccagataatttttactctcctacccatataagcgggcactgtgctactctagcaaaccactggcacaccccgactgtaacaaccacaacctgaatggcccacctcgcattacacggacgtaatcgatatgcaaccttgtttgaatccataatcctcgagccctcctaggcttccgattctcagccaagaacccaacacctcaatggtcgttacaccaaccacagctgtgaaaccggatgctgactcactgggagcgctcttcaacatacaaattcaggagcagtgtcataaaaactaggaccgtgatacccatctgttccagcgacaagtccacatacgcggaacgaagttatcacaattaacacggcgcggcacatatatcgcatcagtagcagctatctcgtcctatcaaacacacattagaatcatatagcagtcgaaaactagttaaccgtcgaaaagacaaagatagataaactctcatctaacatatacacaacaagacataaccagccatacctgtcccgct

SEQ ID NO: 492281 - DNA, 1005 bp, Homo sapiens
tcgcagacaaggtatgtagattggctctcaatgtaatcaatgtaggatgaatgtgtttggatcagtataccatgttaccggttactccagtggggtgtgtgggagataatcaaggcgcatactggcaattccaatcgctacgggaacgaagtgtcggcggtcagtgagtctggaagcgtcatataacaccgtctggggaatgcccattcgcaacgtgtatatctgcacacaagatggtggccgcatgacacgtcccggagtgtgatgccactgttacagatatctcatcgatatatctcccaggagagcagttgactgaaacatagcaattcttgcacgatacttgtaagtatctgctgtggagtattgccaaatctgagtcactaggcgagatatgatcaaaggaatggtcgttagcatgtctatttgaatagtcgcgggtaagtacaattatgcaggtttcactgaatacctgttaacctgggccgaagcatccctcacagtggtggtgtgggcagatcgttggcgtatttttgatagggagtcgagacgaaagagcggggtattatcactccagttcctggaggtgtaaggtccctatgacagtggcaagtgctaaatgaagggaattaccattaatgtgctggcgaaatactaggtgcttgaggggttgcaatgagcgaggacagtgcttgacgcgtctaaagaggcttggggtaggcagtaccttaagtgactcgtgtccttcttgtgtgcacgatacgggcaggtctaggtccaggctcccgggaagcgtcagccggccctttttggaattggcctatttttggttctttgctactggcatggttcaaaatgggggcgcggttgttggaaggcctcactggtggggggtgccggccctaaccttttgggtcctccacccggggctccacgttctacagggctgtggttatccgggccgcctcctcattgtctttggggccccccccgggcgggcgctct

SEQ ID NO: 492282 - DNA, 312 bp, Homo sapiens
agataaagatgatcatccccaatgagacaaaaactccaggtgccatggagcatgagcttgtcctccaccagctagaggtgtaacggtgtgctgaaaggcatccgcatctgtaaggaaaggattccaagcagaatcctttatgccgacttcaaacagagatacaaggtattaaatgcaagtgcaatccctgaagggcaatacatagataagcaagaaggcctactgagaagctccttgcatccatcgacattgaacacacccagtataaatttgggcacaccaaggtcttttacacagctaggtcttctgggg

SEQ ID NO: 492283 - DNA, 894 bp, Homo sapiens
ggacgcgtgggggggctccaggctgttgagagcccgcctgcatgtcaggaccagatttttcccagccatccagcatgctgctgcggcagaaggtggtcagcaggctcacctccctcctggggcctttgtttgtgatcctggggatggtgagaatggaggttctagcaaggggtaagtgcagataccagggatccagttagtcggctctcagctggagcttctctataccttctgggctccctttgctgacctacactagtccaagggagcctacgacgcaggagggggctgggctgcgtgtcccttctctttcccagtgagctcctgcctaggggggctgtgggcctacaaggcttcctggggatgcaatccaggcctgttggaaaccagataggatggggaatgtggctcctaggggggctgacgtcttccttcctctctccgtcccctagtaccatcacttattgctttctctccttctatctccagtggccccacaatctgttttacttgtttattatcctatgggggcctgagccagggattgagggagcccaggggacggggcatggagtccccagtcaccaatcggttcgggtacgtgtgcttgtgtgtgtgtggagatcctcctgggggatgtggatggggccaggctcaggcgtacgtaggccgtctcttgttgctgaggccccgagggttcccggctcctttacccactctcttccctgtggcgtggtctggttgctcattggtaaaccccactccgtggttttgtttccctggcttttggttgccggcagtttgggtacccggtcaacttgtcgcttgtgtcacagatctgtctggctgccaacaagaggagggggggcgaaattccctgggggccgttgtttc

SEQ ID NO: 492284 - DNA, 318 bp, Homo sapiens
gggccaaggagtcatgatggcaggagtatcaaaggtgtcttgtgtaagtgataagggtgagaggaactcagaagaaggcttaacaccatatattatattcacaagtttatttatgtaattttgagtccaacagaaagagtcacagggggtaaacactttagcaacgcccgtacgattttaggtctgtatgtcgtaggcagatagagctatgttataattatgcctcatagggctagtccaaggaaggggtaggctatgtgtatagtcagggggttgagaatgagtgtgaggcgtataatcccatcgccgcctagtttt

SEQ ID NO: 492285 - DNA, 281 bp, Homo sapiens
ggggttttcccattttattattttattttggtttttttcccaatacgggaaattcccaatttggggccttttgatccgtttttgggaaaccccgggtttttcgcctgaaaattccccttttttctttttgttttttagctaaaaaagggggcggtttaatccaatggttgatcccctgcccaaattttttcctgaatggtttttggaaaaggatttttgaattttccattgggatttttttttgaaaatgccccgggtggaataaaaagggggccccccta

SEQ ID NO: 492286 - DNA, 888 bp, Homo sapiens
gctggcgcgacatgtggcgcctcccgtgagtcctgggccgaagctcttccccgtacacctgggacctatgcctctgtgctgggtgatcatcctaatgtccatcatgcccagagtggggctcagactaggctacctccactattggctggtacctgctgcctaaacctctgacaggtcagggtcccctatggccgcaggcacgatgtcggtggtccctgggtcccatgagatgtgaaaggatgcctatccaattggatgtcgttcccgtgtcgtccccgaatcacccgtatggagatgccataatcttgtggtgcactactagggcgtgctgaccctgcagctggcaaggcagatccactatccaggcatccctgccagcaggacctcagcgggtagaacatgctcctggcacagtcccctgaaccgtttcttctcatctcccttgtaggcacccatgacacctcactgcctgacaaacgacagtcctccccagaccctgatggcccagctcccaggcacacttggcctcagggaaacccagtgcttggcacggaaaggaagcctcagctcagcaccccggaactacgacacagcaactctttgagaggagcacgtcctcaggacccctcttgaaggaagtgtccccggtgaatacaggcttccttgaattgccacggtagtacgacataacgaagtcccgaggcaaaaacagacacaaggccacaagccactggttgaagaagtcacacagataaattcccaaaaatcttacctttgaggaaggttggcattcatacaaccacgtcgtccagatcagagttccatcacacttcaaatccaggaacaaaaaacataataatagggaacaccagagcatttacttccgaa

SEQ ID NO: 492287 - DNA, 168 bp, Homo sapiens
tagcagaccagatctgatactggggaaggagagaggtcagtgacctcgagatgagtgatagaatggaacagactctgtgaggcctactcaggcactgtatggtgagcagcacccccctctgtgtgccccagcccccacagtagccgggactacagctatgcacaacca

SEQ ID NO: 492288 - DNA, 676 bp, Homo sapiens
  misc_feature (495)..(495): n is a, c, g, or t
  misc_feature (505)..(505): n is a, c, g, or t
aaatttatgaaagtagctacactggtcaggcatggttgctcacgcctgtaagttcagcactttgggaggctgaggcgggtggatcacctgaggtcaggagttcgagaacagcctggctaacatggtgaaacccaatctctactaaaaatacaaaattagctgggtgtggtggcgcaggcctgtaatcccagctattcaggaggctgaggcaggagaatggcttaccaaggagacagaagttgcagtgaacggggattgtgccattgcactccagcctgtgcaacaagagtgaaactccatctcaaaaaaataaaaataagaaaaaagaaagcagccaaaccaaacaacagattttcaataaagacaacatagacttctattgtaagaagatataatctaggactttcatagctatagagaagtcagtcaatgcctggcttcaaagcttaaaaggacaggctgattctcttgttagggactaatgcagacaatgantttaagaganaagccaatgtctttaccattccaaaaatcctagggcccttaagaaatatattaagtctatttagcctctctatgaatagaaaaaagcctagatgacagcacatctgttgaaagtatgggttacggaatattttgcccattgttgggacttactgtagaccctttctattcg

SEQ ID NO: 492289 - DNA, 880 bp, Homo sapiens
gggggtcacaggtgctcagtgggggagcttttccagccagcatgagccaagagaaggaatttcacaagataatgtcatcagttaaggcaggaacaggccattttcacttcttttgtgattcttcacttgcttcaggccatctgggcgtatatacgtgcaggtcacaggggatacggtggcttagcttgggctcagaggcctgacaaccacccctcccatcccaaagaccaccactccggacttctgtggtgaacacattcttgctttttgtcaggatttcaacacccacgtgtgggttaaaccaaacctaatcgagtgttggctaaacccaaacacgatgagttagagcttccaacatctaagttcttggacgtctgctgattagggttttctatggaggcctcattatgtagggacgattgcttaaatcattcccctaaggactgactcaatccagtccctctcccctccccacaggctgagggtggggccggcagttccagccctcaaatcgcctggcaaccagagcccctttccaaaggcctctcacagcgtaaacgcaggtgtggttgagaggagctctatctttactcctcatcgcctcggaatcacaaggatgttaggggctctgcagaaccgggaacgaaggccaagccggtttttcttactgtatcaccgtatccatttcccattccttgaaaaaatcttcaagtttacctttggtttccaaaagcatagcgagcaccgctgctttatggtctgggaattccagcacccggagttttgctgcctgtggctccgcttgtccctcgcctcactgtcttctctctccacggtgcctggtcatgcttcattgttcggacacggaagcgacttccag

SEQ ID NO: 492290 - DNA, 407 bp, Homo sapiens
tccgacttagaggatcccccgctacctggcatttcaagataaatgaatcccatgtaaggaccattttaaaaaaaaaataaaatgaaatttatgaagcgtttgttgcagctacaccagcaggtgtgaaaatcttgcacttttttgtgaaacacctttcatttcatattgaagatgcagcttttatgtgggtacaggattactataagaaaggcatccccatagactcgaatatgactgtctatgggaaaagtgaagttgttatatgacaacttaaagcaaaaggaaggtggaaggatataaagctggagaatgtattgccaaccaaggatggtttgataattttagaaagagatttggctttaaaatgtgaagacaaaatgtgaaggggaagctgtttctgccaacta

SEQ ID NO: 492291 - DNA, 155 bp, Homo sapiens
ggtgacagatctactgggtgcatgcattgtggctgaaagcaataagtggggttctgaggtttaacaccggggaggggagaatgcggtctatttggtagggtatgccaatttccaaaaaaaaagggggggggggggggaggaataaggggaggaaa

SEQ ID NO: 492292 - DNA, 339 bp, Homo sapiens
gttagtccttgctatattatgaattaactagaaataactttgcaggagagccaagctaagaacccccgaaaccagacgagctacctaggaccagctaaaaggagaacacccgtctatgaggcaaaatagtgggagatttataggtggaggcgcaaacctacgagcctggtgatagctggttgtcaaggtagaatcttagttcaactttaaatttgccacagaaccctctaaatcccttgtaatttaactgttagtcaaggggacagctctttggcactaggaaaatccttgtgggggggtaaaaatttacaccatggtaggctaaagaagcaccattag

SEQ ID NO: 492293 - DNA, 478 bp, Homo sapiens
  misc_feature (72)..(72): n is a, c, g, or t
  misc_feature (354)..(354): n is a, c, g, or t
cgcctacgacggcaaggattacatcggtttgaatgaggacctgcgctcctggaccgccgcggacaaggcggntcagatcacccagcgcaagtgggaggcggcccgtgaggcggagaagcgggagagcctacctggagggcacgtgcgtggagtggctccgcagatacctggagaacgggaagaagacgctgcagcggcggaacacccaaagacacacgtgacccaccatcccgtctctgaccatgaggccaccctgaggtgctgggccctgggtttctaccctgcggagatcacactgacctggcaagcgggatggcgaggaccaaactaagacaccgagcttgtggagaccangccagcaggagatggaccttcagaagtggcagctggtggtggtgccttctggagaagagagaaatacacgtgccatgtgcagcacgaggggctgccagagcccctaaccctgagatgggggcat

SEQ ID NO: 492294 - DNA, 473 bp, Homo sapiens
ggcagccttggggaagcagggccccatttgtccctcggtccccgggtggccaaagtggggccgttgtcccccccccttgggctcgctccacccctttggcagggtgtttggggcccccccaacaggaggggggtcaaaccgggcaggggggccccctaaacccccagccccttgggggccccccccctttgggggggatggagctttttctccccccgcccgcaaggggccgatttgccctcgaaaaagaccccccctcctttttttttttggtttttgataaaccccgaagccggggcgggttaatttttcttggggaaaccccaaaactggtctttttgggggcgggggcccccttcccgccttccaaacccgattaggaatcccctggtttggaaacctgttttccgttttcctttcgcccacccagcccggggattatagcttttagaataaaatttttttccttttta

SEQ ID NO: 492295 - DNA, 172 bp, Homo sapiens
  misc_feature (20)..(20): n is a, c, g, or t
acagtgatgcgggtgcctanaggatcccgtgatgttatccccaacaccagagaaaaggaaaggcactcatattttcctctgggaaccaattatgatgatgccaacattccctttgttcaagcattaggatctgtcaatcaggttgtgaagtttgtgttgggcgataacatca

SEQ ID NO: 492296 - DNA, 278 bp, Homo sapiens
gcttatgttgctggcgaccggaagactaccacatgtacgatccccaggacagagaactccgaacacaccacaagacagtacagcgagccctcggccctgccaaaaggaagacgactagacgacaggacctgactagagcttcccagatggaacagccttactatgaggctgagacagacccctttcctctagtccctatctttctctgtaccttccttccagccacactccagggcggagttggatgaggcccgtccggagggagccatctcattgct

SEQ ID NO: 492297 - DNA, 969 bp, Homo sapiens
gtacccacgccttcttcaaagccatactatttatgtgctccgggtcgcatcatccacaaccttaagcaattgaacaagatatgcgaaaaataggaggactactcaaaagcatacctctcacttcaacctccctcaccatggcaggctagcattagcaggaataccttgcctcacaggtgtctacggtccaaagaccacatcatcgaaaccggaaacatagtcatacagaaacggcgctgaggccctatcgtattactctcagtcggcgtagcctccctaacaagacggcctatagcactcgaactaattctgtcgtcaccctaacaggtcaacctcgcttccctaggccttagattaagcattaacgagaagatagaccccaccctactaagaccccgatggaagacggcctggacagtcgcgggaagcctattcggcaggagttgctcagttactgaagcgagacatttcccccgcatccccgcttccataacaacagatccccctctagtaagaatcgcggcctcgcggtcactttcctaggacttcgtagacagccctagacgtcaatagctaaacagaaaacttggaataagaatccccactatgcacattttatttctccaaatagtgcggattctaacctagcatcgcacaaccggacaatcccctatgtaggctgcttaggagccagaactggcccgtattcttctagaactaaactgatagaaagagtgttacgtaaacaatttgagagggacgaatcacagtcattatacttaaccaaaaggatattaagtttagttcgtcttgttttccattatctaactatgtaataatagtatcccggagttagtatataccaagaatgtcccggaaatatattaagcaatatagaggaaaggtcgaaaggttttaaataaggtaagaaggcgcaatataggggttatagcaaaaaagggaggggct

SEQ ID NO: 492298 - DNA, 440 bp, Homo sapiens
ttcctctcctcccacctcccaggttcaggcgattctcctgcctcagcctcccaagtggcttggatagcgggcacccgccaccacgcttggctggtgtttgcgttattagtggagacggggtttcaccgtgttggccaggctggtctcagactcctgacttcaggtgatctgcccaccttggcctcacaaaaagctgggattacgggcatgagccactgctcccaccctcctactagttttattatatcattttaggttattataaaatcacagccatagtaacttcctgtgaggaaacggtttaaaaatatgagagcaggccacatggccacctaaggaaatttatacattttgagaagcgtgaaatcttattctatttccctgagaaaaggtattgatatcacaatgcagaggtgggaggagaggaagggtaccgagct

SEQ ID NO: 492299 - DNA, 694 bp, Homo sapiens
  misc_feature (694)..(694): n is a, c, g, or t
gttggataaattccctgaaaactccttggtatgtgttctaaaacagggaacatgtgactggcaagcaggcacccgatgatttggaagcagtgggaggggctggggagccccagcacaatgatattggtggtgggtcttccctcctggtggaatcgagggggaaattattcttcccaataactggatttgattttcagtttcataagcttcttcctctgaatcttattgagggactatgggaccaagcagggaggaatggtcaactggtggaacaggtcttggtctggcttctaaggttcatcccagaaatccaggctctttctggagaacccaaagctggagggagatgggctttcctctggggctctctcctaatttggcatccacactggtcctggctaaacccagcaataaccaacaaatggtaggaagccccatctattggtttttctcaattatgactggatagtttgtggaaaccaagatcttggagaagatgagggaaggccttccctcttcatagttcccatctcttcttctttggtacctgtcccagaagtcagggtttaaacagaccaaatattaagtattgggtaagtgggtcatatggcggattccattgggtggaagcaccaggttatagtgtggccgcacactttgcttccgggggcccttccgagggtctttatccctn

SEQ ID NO: 492300 - DNA, 727 bp, Homo sapiens
  misc_feature (36)..(36): n is a, c, g, or t
  misc_feature (66)..(67): n is a, c, g, or t
  misc_feature (81)..(81): n is a, c, g, or t
  misc_feature (108)..(108): n is a, c, g, or t
  misc_feature (171)..(171): n is a, c, g, or t
  misc_feature (190)..(191): n is a, c, g, or t
  misc_feature (194)..(195): n is a, c, g, or t
  misc_feature (197)..(197): n is a, c, g, or t
  misc_feature (199)..(200): n is a, c, g, or t
  misc_feature (220)..(220): n is a, c, g, or t
  misc_feature (239)..(239): n is a, c, g, or t
  misc_feature (241)..(243): n is a, c, g, or t
  misc_feature (247)..(249): n is a, c, g, or t
  misc_feature (251)..(251): n is a, c, g, or t
  misc_feature (257)..(257): n is a, c, g, or t
  misc_feature (260)..(260): n is a, c, g, or t
  misc_feature (262)..(262): n is a, c, g, or t
  misc_feature (266)..(266): n is a, c, g, or t
  misc_feature (296)..(296): n is a, c, g, or t
  misc_feature (305)..(305): n is a, c, g, or t
  misc_feature (310)..(311): n is a, c, g, or t
  misc_feature (317)..(317): n is a, c, g, or t
  misc_feature (327)..(328): n is a, c, g, or t
  misc_feature (333)..(334): n is a, c, g, or t
  misc_feature (346)..(346): n is a, c, g, or t
  misc_feature (348)..(349): n is a, c, g, or t
  misc_feature (359)..(359): n is a, c, g, or t
  misc_feature (368)..(368): n is a, c, g, or t
  misc_feature (390)..(390): n is a, c, g, or t
  misc_feature (399)..(400): n is a, c, g, or t
  misc_feature (407)..(407): n is a, c, g, or t
  misc_feature (417)..(417): n is a, c, g, or t
  misc_feature (500)..(500): n is a, c, g, or t
  misc_feature (541)..(541): n is a, c, g, or t
  misc_feature (568)..(568): n is a, c, g, or t
  misc_feature (585)..(585): n is a, c, g, or t
  misc_feature (588)..(588): n is a, c, g, or t
  misc_feature (594)..(594): n is a, c, g, or t
  misc_feature (597)..(597): n is a, c, g, or t
  misc_feature (599)..(599): n is a, c, g, or t
  misc_feature (607)..(608): n is a, c, g, or t
  misc_feature (613)..(613): n is a, c, g, or t
  misc_feature (619)..(619): n is a, c, g, or t
  misc_feature (624)..(624): n is a, c, g, or t
  misc_feature (645)..(645): n is a, c, g, or t
  misc_feature (653)..(653): n is a, c, g, or t
  misc_feature (656)..(656): n is a, c, g, or t
  misc_feature (677)..(677): n is a, c, g, or t
gcgggggccccaccagggctatggagagacagtagnggcaggtctgaaccgtcagccaagattagnngggtgacctggggntggcaaccacaaatccaagtagccagngggggctgccccttccaagtctcaccaatgacccagtgccggttccagggcccaaaggcccanatgtgcaattcccaaatgnnttnntntnngtgccttcggggggctcccngtgatccagcggcgctcantnnnctannntntctttnttntncctncgcttggtggtggtggctggggtgcccagngcttcagtnttctnngagggnttcttgttcnngttgnnctgctcgtcccncnngcctgtgtcnaacacgttntccacctccgtctgtgtgggcntcttgggcnngtgctcntgccggttcntcacctccccgatgttgatgttcttctcgcgtgtttctccccccccttctcccggccggtctgccgctcctgctccgtggccngggctgccgcctgcccttgtccgtcctcgcttcccctgggntgctctcgtctgagaatggccagcganacttcttcttctggtanaantccaangananctgccccnnccccncgcccnccganttgcgccgtgcctccttgcantcccccanaancttgcgccgggcacgatccantacctcagaagagacacgcacataagtgaagtcggtgaagtcacagtcaa

SEQ ID NO: 492301 - DNA, 759 bp, Homo sapiens
gtctgttccagttgagacaccctctggtgagaaatcagttcggtctctcctctcctctctactcgtatgagcatggtgcgcactaaaggcagacagatgtctccatggcacatgtacgagaaaataggtgggtgtggcatgcatcgcagctccgcactagtagatatggatgctatggatttcctgtgcccacgctgcttgtcaccaatcgtaattcggaacactctaggttcctattcagcatgcgaagagctgatgatactataattatgcaaccgaggagtaaccctcgctttgctgttgcagccacaatagctcaccaaggtgtgcacataaggtactgggcatgaaattatcctgttagtagtttgtcctcctatacgtattcttgaacacacacgcatgacactcatagatcccctgaatggtgcatgaagctagatggcgttatgtagatagaagcaaaggagtaataacgcatgtccttttgcaacactgatcacacaacatgagtgaagtaatagaagtagagactttctcatgtcatctttgaataacgtctccttggtttacccgtggtattctacgcaatgtacaactttacataggatgtgttctgttccactctagcttttgtatgaacaggcatttaattaagagcaattcagggtttaaatctagatgttcaaaggtagttgtgacactttgagaatctgtaagactagttatggtaacttagcttagtattcaactatgtgc

SEQ ID NO: 492302 - DNA, 1408 bp, Homo sapiens
ttctacaatgctagatttagactatacattctagcaagtgtgccacacaattggtcaattggatttagatgatgttctctataaatccattctcctctcccgtgtaagcaaggcaaagtactccaggccatggggagtccctgaagactcgatgaactgcaatggccatatcaggagttgcaggttgaccagaactcaccgacacagcaggagagcagcttggaaccttcaacccagccagacccagtgccttggactgggggagaaaacatgcagccattcctctctctctctgctggctagaggggattctggcttttcctgccagagccacccctttccctcctcctaaagttgatggtggttctttaaggaaagggagaagtgcacggtgtgatagggcaggaagagaagaaaacggaggagaggaggggactttcccataagcaggcagaagaaaaggcagctgtggtgtgtgatggacatggatgcagtggtgtccaatgtggggtcagccctagaggagagacagagagagagacagaaaagtgagagagtcctgacccttacgattaacatgggatctgcctgcaaatgctgtttagggccatcgcctcttcctgtactgctatttttgagagtgatgctcctgagccccatgacccagtcaaatttgatgtccccttgagccagattcagtgctgggagtccagtgtgatctgcctggatcttgctgcattgagaacaggccagatcttgacaccaatacagggggctggatatgaacaggcaacagctgggtttctgagtcagaaagacttggttaattgctaattgcttaggcgagtaattcaattttgttcagtcagattcctcagctataaaatgcagatgacagtacttattcctccaggttgtggggaaaatggagattctgagcacgatgtccatttcacagaaaggtaccaatttggtggcttattttcctttctaccttcagaagtggctatccctgccacccaaacagacccttgactctcaagtggatggggtcccatttgcacagggggagagcttacagcctacgttgagtctatacttaccacttagtgagcatggtatccgctcaggggcctctgtgggcatccgtctcctctgcagcatctttcctccccaccgctgggcctgcacatgaccccctccttgggttaggcctctgatcagtgatgaccttggtatggtggtgatggtcagtcttggcaccaaatgagccagtttatatcatcagctattcaataaaacactaatctaggtgtcaccgtgaaagtattttgtgacattgttatgtacatgttgttacaaatgtgcatgatgcatttactacagtatagaattttgcctgggtgcc

SEQ ID NO: 492303 - DNA, 393 bp, Homo sapiens
  misc_feature (72)..(76): n is a, c, g, or t
gttttaaagcacaaagaccagtgaaccctcctttttttaaaaaaaaaaaaaaatatatatatatatatatannnnnggtcttgctatgttgcctaggctggcctcgaactcctgagttcaagttatccttccacattggcctcccaaagtgctaggaagacattgtttttccagtaggaaaaattaacagttgtggagtgctatcattttatctgctcagctaatttataaggttctaagagggcttaaaaaaaaaaaagtcttctcaaagcccgagaatgttctgcacatactaggtacaccttactgaatggaaacagttcctactgatagcaagaaatatggtttactcagtgatctgtaaatagtgacaaaaataccacccttaccagg

SEQ ID NO: 492304 - DNA, 1195 bp, Homo sapiens
  misc_feature (1051)..(1051): n is a, c, g, or t
  misc_feature (1125)..(1125): n is a, c, g, or t
ttctacaatgctagatttagactatacattctagcaagtgtgccacacaattggtcaattggatttagatgatgttctctataaatccattctcctctcccgtgtaagcaaggcaaagtactccaggccatggggagtccctgaagactcgatgaactgcaatggccatatcaggagttgcaggttgaccagaactcaccgacacagcaggagagcagcttggaaccttcaacccagccagacccagtgccttggactgggggagaaaacatgcagccattcctctctctctctgctggctagaggggattctggcttttcctgccagagccacccctttccctcctcctaaagttgatggtggttctttaaggaaagggagaagtgcacggtgtgatagggcaggaagagaagaaaacggaggagaggaggggactttcccataagcaggcagaagaaaaggcagctgtggtgtgtgatggacatggatgcagtggtgtccaatgtggggtcagccctagaggagagacagagagagagacagaaaagtgagagagtcctgacccttacgattaacatgggatctgcctgcaaatgctgtttagggccatcgcctcttcctgtactgctatttttgagagtgatgctcctgagccccatgacccagtcaaatttgatgtccccttgagccagattcagtgctgggagtccagtgtgatctgcctggatcttgctgcattgagaacaggccagatcttgacaccaatacagggggctggatatgaacaggcaacagctgggtttctgagtcagaaagacttggttaattgctaattgcttaggcgagtaattcaattttgttcagtcagattcctcagctataaaatgcagatgacagtacttattcctccaggttgtggggaaaatggagattctgagcacgatgtccatttcacagaaagcagccaagcaagcactggctgtgacagaagcaagattaaaacagttacaactcacccagttcacagatgctgagtaactgatctcctgncccaccaaccttaatgacagctttcactggacaagggactgatttcaataactttctcctgataagagaccatncttcagggactggtctgggcagttttagaggctgtgcctttcagaggctgagtccttctgtcctgttcct

SEQ ID NO: 492305 - DNA, 111 bp, Homo sapiens
gccgagatgacccaatctgcctttgaatcttgaggaaataggcagaaacataatgactctagagcttatactctgtaggccaaatatcatttcagccacttctgcaggatc

SEQ ID NO: 492306 - DNA, 138 bp, Homo sapiens
  misc_feature (6)..(6): n is a, c, g, or t
  misc_feature (15)..(15): n is a, c, g, or t
  misc_feature (74)..(74): n is a, c, g, or t
  misc_feature (93)..(93): n is a, c, g, or t
ctggtnactttgcgncatatcctttgggaacggagacaccagcttcttggaataattgccatactcatgtattnatgtagtgagagatgtccnttgctgttgctgctgtacttggagtccatggttcttaaacaatcc

SEQ ID NO: 492307 - DNA, 403 bp, Homo sapiens
tctaaattataatagtgactataacaaatatgagtgagcatcatggataaagaggcttatactctactggtagacatgtaaattgctattatcattttggagaaaactttggtaatatgtctatgtcctataaaatcacaattccaaatccaattatgtattcaaaggaaactcttgtataagaaaacataaaagaattattattacagtagtatttgtaataacaaagaattgtaaatatgtacccctgaagtaagattatatctaaaatgatatgcaaaattttatcaactattcaaagaagaaataacttttgtataaatgattttaaaatgcaaaaacacataacaagttttctggtttattcttgaagatatcacttttctgtcaccaaaaaaaaaaa

SEQ ID NO: 492308 - DNA, 176 bp, Homo sapiens
ggcaaaaaggcatgggagaagctgcgtctgcaaaatcttcctggatgacttgtcagaaccagtcagtaattcaaactgtccagagtcccttttgaaaaccacagatgccgtggacccactaaggtgaggacgcagtgtttgtcccctccaggagacacagtgttcaaggcgccatc

SEQ ID NO: 492309 - DNA, 288 bp, Homo sapiens
agcaacgggtgattaccgagactacttactttctccagtgtacctagggaaccctcaggtctctagagtgagggtcttgatagaggactgaagtttagagtagatcctaagactttacagtgtaacatcctctctggtccttttctgtgttcctatgttttgtacagacttgtttccagacgtgttcgagtagccagggacaaagataaggggaattgtctatttattctaagacaaattccattttccattgttgttctacctatccttttcctgtggaaacgtcct

SEQ ID NO: 492310 - DNA, 724 bp, Homo sapiens
ggggtacatttggaaaaataaaactttattaaatcaaaaaaaaaaaaaaaaaaaaaaaaaaaaaaaaaaaaaaaaaaaaaaaaaaaaaaaaaaaaaaaaaaaaaaaaaaaaaaaaaaaaaaaaaaaaaaaaaaaaaaaaaaaaaaaaaaaaaaaaaaactttttggcccctttggcccaatcgatttttaaattgggcaagttttttcattgggcccaaatttgggcccaattggccaaattccccttatggggggcgttttaaaattaaagggcccggtttttaaaaccgttggactgggaaaaccctggggttccccaatttaaaccccttggaaaaaaatccctttttcccaagtggggtaaaacccaaagggccccaaccgattgccttttcaaaaagttggcccaccctaatgggaaatggaaatttgaaggcttaaattttgggaaaaaattccgttaaatttttggtaaaacagtcttttttttaaccaaatggcccaaatttggcaaaaccctttataatccaaaaaatttccccgaaatgggttaaaggttttcccattttgaaacaggtccccttttaaaaaaggggcttcaacgtaaagggggaaaaaccctttttaggggaaaggcccatttgggacccttcccctaaaaaatgttttggggccaaggggcccaaaagcctttgggcccttgggcccccccttttttgcggg

SEQ ID NO: 492311 - DNA, 310 bp, Homo sapiens
tgtctatcgatgccaccagagtacttctggtgggtttactccagtgtacttctgggtggtctgtgccccaggctcaccgggggctggatggcccctatggctgcgtcttccttcattctctagggatccgggcttcccatcttcccagccaggatttggatcatcagcccccaggggctgtgttcctctagcttcctcctttggggtgttcctcctccagggactaaagtatgttaacacattaaggaacaacggtgtttcatagtttatgccacccagcataagtggcatcgataaacaccgggtaccg

SEQ ID NO: 492312 - DNA, 1284 bp, Homo sapiens
tcacatgtgggccccctttatatggggtggataatggagcgggtgttcattcctaaagggccgctttctcccgctttgtttggccccaggaaggtttcttgccgacccacgtagtggaggggttgtttgtaaaaaaaggggatatactatcacggtggggagaagtccccccacgaaaagggtgtgtgtcataagggtttttctgttacaccagcggtccccacggaaaattgggaggagggcgttgtacattaagaaaggtcactgttttcgtggtggagatattcctcccgcccccccccccgtcttgtgggttgtctcttttaatataataatattggagtttcttgctaagtcaacaccccataatgttgtcgagaccgggttttgctcgtaaaaaaaagggggggtccccaacaaatccctggagaacatctttcatggcaaatttgccccacagaaattgttcttggggcgttacaattgggggccccacaaaaaatatctgggggggcgtgtgttttctcctcggagagaaagtttgtccccacagggtgttttgggggggcgcccgtcacatcttgtgtgacacacacgcgaaggttgtctgtgggagataaaggagagtggtctggaagtttccttcgaagggataaagcgggaaaatggggggttttctctgggggtgtgtggtgttgcaaacaccccccctctttccgaagagtgttccccacacaaaaggaagcgggaaaactttgggttttatttctcttcgggtttcttccacagcccgcacagcacggcacacgctcataccctcgggcgttctttgggtgcccttgggccctcgccaaggcccaaaggtgtgcttgtttcctatagcctcgaaggcgttttgaagaacacggtgtgggggttttgggcgtctctcttcaaccacaactcccacagtttcccgtgtcccactctcctcgagagggcaaagagattcctcgggcgttcaataaggcacagttccctcttacaactttcctcttgtgtcttgggcttccctcggtaattggtcggaagattgagaatgtgagactaaaaagggccattcttgctggcttaaatgtgtggatcggaagagagagccacgcctcggagagagcacaatgtggcacaaatggggcgcttcacatgccacgtctgtcttaaagccctgtcgagcttggggaggtgatttctttcctggttttataatgtgaagccaaataaaatgttttctaaaattaaaagcca

SEQ ID NO: 492313 - DNA, 599 bp, Homo sapiens
attcttacagtgtctcgcgctctgtatggcatgcttgagggcacagctgtgacgatagttcatggttgtgtcagactctaacactaacgacacactcatgtgtgaccctgccacggtgctccaactataggagtgtgcgagctcactgcgccacatccatcgatgctctggtcaggactgggcctaactatacaggtgagcaacgacggttgcgcagacagcgaagacgatatggcggatatcgacgaggctcaggtccagacttagcgaacttgcactatctaggacactgtgacgtgctgatctggttgcgcctgatacagaaccgaggccttggagatagcaagtagttaccacctggtgcagcaacactttacgggcccggtacgtgcgagacccgatgaggagacactgcaagagagcctgtaccgacttgcacgtcggcagtctgcggagcacatgctgctcgtgaatggctatagacagacaccatatctcccggaagactatctgataacgacccatgcggagctggtggtggagcatgtgcaagatgagtggcatgcctaagcggagcgcactgcaggtttctcagcagg

SEQ ID NO: 492314 - DNA, 236 bp, Homo sapiens
ctaccgccagtaacagtgtataggcggtgtcaatgtgtagttgtgtgtgaggttttgttgtgtgagtggttgtgtgtgttctctgtgtttcttgcttggaaaacccttgggatggtgtgtgtggggttgtgttgtgtgtgtgctctgtgtgatgtgtgtggtgtgtgtgtggtgtatgtgggggagtgtgtggttgtgttgtgtgtggtgtgtgctctgtttgtggaggtagcact

SEQ ID NO: 492315 - DNA, 162 bp, Homo sapiens
accggatagagcggtctggggacacacatgctgaaaagtagtccctgtttatcttgatgctcaggttgaatgagcgccatcacaaccctctgttgaatggacaaccaggactcggaggaaacgtgggttgtgaaagactgaagccctcaaaattccaaagag

SEQ ID NO: 492316 - DNA, 452 bp, Homo sapiens
cctatccgcgtccggggttggtcaaaaaaattaaccagccaggcttggtggctcatacctgtaatcccagcactttgggaggccgaggcaggtggattacctgaggtcaggagttcgagaccagcctggccaacatggggaagccccatctctactaaaagtacaaaagttagctgggtgtggtgccaggcacctgtaatcccagctactcaggaggctgaggcaggagaatggcgtgaacctgggaggcggaacttgcagtgagctgagatcacgcctctgcactccatcccgggtgacagagcgagattccgtctcgaaaaaaaaaaaggaaaaaaagaacattgatttgagaaccagtcaacataatgtattattttaactatggccactttcacatgatttctttagcccagtgctcttgctgtattccccaccaatgtgatctgcac

SEQ ID NO: 492317 - DNA, 159 bp, Homo sapiens
tgttattctccgagcttcgaatgccgcctaaggacgacaagaagaagaaggacgctggattttcggccaagaaagacaaagacccagtgaacagagccgggggcaaggcctaaaagaagaagtggtccaaaggcaaagttcgggacaagctcaataact

SEQ ID NO: 492318 - DNA, 161 bp, Homo sapiens
gctaatactgacttgtaagttgattgtagatattgggctgttaattgtcagtacagtgttcataatctgacgcaggcttatgcggaggagaatgttatcatgttacttatactaacattagttcgtctatagaggtgatagattggtccaatatgggtgtg

SEQ ID NO: 492319 - DNA, 303 bp, Homo sapiens
  misc_feature (31)..(31): n is a, c, g, or t
  misc_feature (79)..(79): n is a, c, g, or t
  misc_feature (149)..(149): n is a, c, g, or t
ggcacgagtgatagggtatgtggcgcctctntactttctgagcctaacaagtgaggttcagagcaaggcaatgtaaatntctgctttgaaagtgaacatggattgggtaactaaaaagagagtgatacgtaggagaaacttccaaaganttgcaatctgtccctctgactaacatgtctacgtggagacttccaaaatggaaaatgagacatagcataacagaaagcaagaaagcctcctaaagataagcttagcccagcagctctgcagagtatgactttaccctccaggggaaccatttgg

SEQ ID NO: 492320 - DNA, 154 bp, Homo sapiens
agtccctaaaatctcaaaagtagggaagccagcgactgcagccgttcagtctgtggtccaaggtctcaagagttcccatagctgatgaacttggatgtctattagtttgaagggcagaattgcacccagccacacggacaaagatgtacggctg

SEQ ID NO: 492321 - DNA, 108 bp, Homo sapiens
cccggccccaaatggggggggggttttccccttttttttttgaaacccccaaccccttttttttgggggggggggttttaaaaccccccttttcccccggggggggga

SEQ ID NO: 492322 - DNA, 398 bp, Homo sapiens
tggagcaggggttctcacctttgttcgcccaggctggagtgcaggggcacgatcttggctcactgcaacctctgctccccgggtttaagcgattctcttgcctcagcctcccgagtgggtgggactgcggttgcccgccaccaggcccgtgtaattttgtgtatttagggtgaagatggggttacaccatgtttgtccaggctggtctcgaactcttgacctcgtaatccacctccctcagcctcccaaggtgctggaataataggcgtgagccaccacacccagccagaaagtggtcctcatgatgcttctcagaccggcaacatcagcatcactggacacttgtaaaaattggacactttgcatccagaggggtcacgagctcaaattcgaaatca

SEQ ID NO: 492323 - DNA, 133 bp, Homo sapiens
ctgttgccagcttggggatagtgacacaagccaggaatgggcctggcattgtggaaggggcattgtgagtgagccctgcccagccagaagctggggcagtatcggtggcaggtgctgagtggctggagccact

SEQ ID NO: 492324 - DNA, 842 bp, Homo sapiens
  misc_feature (399)..(399): n is a, c, g, or t
  misc_feature (738)..(738): n is a, c, g, or t
  misc_feature (756)..(758): n is a, c, g, or t
tgcgccggagtgaactgtgctctttgaggccgatgctaggggcccggaagggaaactgcgaggcgaaggtgaccggggaccgagcatttcagatctgctcggtagacctggtgcaccaccaccatgttggctgcaaggctggtgtgtctccggacactaccttctagggttttccacccagctttcaccaaggcctcccctgttgtgaagaattccatcacgaagaatcaatggctgttaacacctagcagggaatatgccaccaaaacaagaattgggatccggcgtgggagaactggccaagaactcaaagaggcagcattggaaccatcgatggacacaaaatatttaacaattgatcagatgggaagatggtttgttgctggaggggctgctgtnggtcttggagcattgtgctactatggcttgggactgtctaatgagattggagctattgaaaaggctgtaatttggcctcagtatgtcaaggatagaattcattccacctatatgtacttagcagggagtatcggtttaacagctttgtctgccatagcaatcagcagaacgcctgttctcatgaacttcatgatgagaggctcttgggtgacaattggtgtgacctttgcagccatggttggagctggaatgctggtacgatcaataccatatgaccagagcccaggccaaagcatcttgctgggttgctacattcctggtgtgatgggtgcagcgggnggctctctgaccaatatnnngggggtcctcttcgtcatcgagctgcatggtacacaggtggacttgtgggaagctctcatgtggccagtgttcgccaggaaagg

SEQ ID NO: 492325 - DNA, 262 bp, Homo sapiens
  misc_feature (75)..(75): n is a, c, g, or t
  misc_feature (86)..(86): n is a, c, g, or t
ggggggctttccccaatttttaaaaattggttatgggttgggccccctaaaaactggggagcaggatgaagtttncccttccacantggggccccttgggtggggttggcaacatttaagcccccggtcccccccccggaaaaaagagggggggcccccccccctaaggggtattgtggggatggaaaacgaaagggggagaaaaaacctccccaggggctggggcaaaggggggggttaataaacccctttttggttgcca

SEQ ID NO: 492326 - DNA, 205 bp, Homo sapiens
attgtttcagtactgggtgtttaaggacaatagctgctagattcaggggtaaatgtaagtgtcagaaacgtcagacatttggggtttaactgatttgttgctcctatcagcctagcacagaactctgtgttacaggccagccttgcaggataggctcgttgtcaatgtattcagttgtttcacacttttgctattataaatggcg

SEQ ID NO: 492327 - DNA, 296 bp, Homo sapiens
  misc_feature (128)..(128): n is a, c, g, or t
ccaggaaaaaaagctaaaatcactcaccgtgtgattgttcagcatgaactgtaccgcactaagcttcactagcttccttacgctactgtagccaatggagaggtcattaagaagctgtagtgtcttgnaggtgattggttcacaacggccccagtacttcaagttggtcacgaggagcacctaaagaaaaaaataagcaggagccccctttaatttactggtatcataaagggctggaagaagaataaagacattcatcgaaagtcgccacacatctgcaccaccaattcacagac

SEQ ID NO: 492328 - DNA, 440 bp, Homo sapiens
  misc_feature (11)..(11): n is a, c, g, or t
  misc_feature (64)..(64): n is a, c, g, or t
  misc_feature (162)..(162): n is a, c, g, or t
  misc_feature (224)..(224): n is a, c, g, or t
  misc_feature (267)..(267): n is a, c, g, or t
  misc_feature (269)..(269): n is a, c, g, or t
  misc_feature (276)..(276): n is a, c, g, or t
  misc_feature (286)..(286): n is a, c, g, or t
  misc_feature (327)..(327): n is a, c, g, or t
  misc_feature (348)..(349): n is a, c, g, or t
  misc_feature (360)..(360): n is a, c, g, or t
  misc_feature (366)..(366): n is a, c, g, or t
  misc_feature (368)..(368): n is a, c, g, or t
  misc_feature (388)..(388): n is a, c, g, or t
  misc_feature (418)..(418): n is a, c, g, or t
  misc_feature (429)..(429): n is a, c, g, or t
cagtctgcagngggttcctgctggctggaggcgagggggctcccccgcgggccgtctgccgctngccgcggccacggctctgggcatccaggcacggccattgacccccgtccgatggctcttctgggtgtggctgctgcgttgcaggaccccaaggcgtgnccgatggtgacactgcgcgctggccgatgtggggcagccgccaaccagggccgcgatggagntcttctactcgaggccgtgtggggcactgtgtgtgacgccctntngggcctnactgatgccngacgtcgtcatgccgaggccctgaggcttgagaaaaacgcntacacaccagcactctgaggnngtgctgccttntgggcnanggagtcgggcgcccctaatnctggccggagtccggtgctcgggtagccgnagcctccctgnccgactgctag

SEQ ID NO: 492329 - DNA, 228 bp, Homo sapiens
ttttgatatctcctcttcactacgtactcccacaatagactcctcgtaaagctacatttccgtgttgtgagtatattatagccattgccctacatgtcccctaccgtcaggtctttacctaattatatttattgtcttgcgtacttgaaaagagattttttggtggtgaagtacagtatgatagaacgttgactatctggagagtcagttggtaaggtatacatatca

SEQ ID NO: 492330 - DNA, 210 bp, Homo sapiens
ctctcgtagctcctgtttatgaaatccattggcacggccaacagaccgatgggtgctggcgaggccctgcggatgagtgctgtatgtgcctggctgtcgggcatcgtgatgccaaatggctcctggcatttatgagcccttgtgatacaagaagccactgatgctattgggcatctagacggtacagcaaccgtggaagatatcacacag

SEQ ID NO: 492331 - DNA, 274 bp, Homo sapiens
tcgggattgtgctacggtgcggccgatgcggaggtgggttaaggtgcccgataaggtatctgtgtataaagataatgcgccggattattagaactagacgggtcctcaggctaatttgttgacgtcctagaagacggctcaggtatctagaactagtgctctcgctttgttgagctcgcagatgcctcagcgggccttgctttggcggccggggattaaccaataggaataatggcttttttggctatatagcctaagaatctcgaacaaagtg

SEQ ID NO: 492332 - DNA, 544 bp, Homo sapiens
ataataataatgcgttgtgaatagccttgtgtttatatcatcttgtatttgcccgtgtatctttggggtagattcctaaatgcagatgaaaaggtaagtacatttgtaattttaccaggtatgtctgtattgcttcttttggggctgtattatttgcattcctcccttatttgtaatatactagtgtatctgtttcactactgtctggccaacattgtgaaacattcagattttttccaatttataggtgagaaagggtttccctttgttaccttaatttttcttttattatgagtaaagtcaggcatatttttatatatttaatttgcatttttcagtaaatcatctgtgggcccatttttaacattaggtctttgctctttttattttgcttctccttactatcttagctttttaggtaagagtcagatgttttatgtgcatctctactgtgcttgctagtggaaagctcctcaagagaaaatgagcctaggatggtgcctgtgttattcctttcaggctgctatagcagaatagcacagag

SEQ ID NO: 492333 - DNA, 449 bp, Homo sapiens
ttacaacaaataagtttatagaatcataccttaaaaaaatatataagaatgtaagaattctctaagaatgtattatatcttcagagaaagttttctatgttttacagaatttaacaacttgagaagttataaaattatgcgattattaataatatgttaaattattatattttgaaatgcaaataagagataccaacccatatttacttattctttctggtgtctgtattatgggcaaaacactactgcatgaaatcagctggttataatgattgtataaaataacttcccaggtactactgtgttaatagtctatgcacgaccttgcataacctttatatatagtgcttgtaccatgataatgtccaaatgatgacttagaggccctccaagcctattaaacatctaccgaattaccaaaataagtgatattcatttgacagttgcag

SEQ ID NO: 492334 - DNA, 312 bp, Homo sapiens
caccacatcggcgcccatgtccttggaacccatcacgcagtacgcgccgccgtaggacttgcgggtgatgacggtgaccttggcgaccgtggcctcgccgtaggcgtagagcagcttggcgccgcgccggatgatgccgttgtactcctggtcggtaccgggcaggaagccggggacgtcgaccaacagcacgatcgggatgttgaagcagtcgcaggtccggatgaaccgggcggccttctccgaggcgttgatgtcgaggcagccggcgaactgggtgggctggttggccacgatgcccaccgggcgccc

SEQ ID NO: 492335 - DNA, 174 bp, Homo sapiens
ctagaggatcccccggcaggttgtacttgtaaagaaaaacacaatgcttcacattcgtgctttttatactaaaaataagtatgatatataagacaatgcaacctaaatgcttcgatttgaggaagggaatgggggaggggaaaatcaggagaaggagggagcgattctgaaagg

SEQ ID NO: 492336 - DNA, 180 bp, Homo sapiens
tagactgttttattaggtgatgacaggatgctgtgacatagatctgagtttaagccctgggctttggcaggaacagagcaggagtcgtatatccttcctctattactccctcccaggatggatgttgcattcaggagagattgatgaaccaagtgatggaaatccagagagccggaattc

SEQ ID NO: 492337 - DNA, 501 bp, Homo sapiens
tccagttgtcaaatgatcctttattgaaatgtgttttccctttgtgtgtgcttaacgtggctgtgggcatttccacacagcaccactgtgtgtgtgattgctcatctcagatgagtgttcatgtgaggatgtggcggccatctcaacatttacagccccacgtgacgtgggcagctccccaggaatctcctcttttaatgtggttctccaagaaagtttcctcgtggctataagggatctcggtgtgccgacattctgtgtgtcgaggacaatgtgtttgaacaatctctctcactacaaaaagtgtgatatattctcccccactgtgtgtgtgttatagagtgtgttattctctgtgtgttctctatctctctgtgtgtctctcctgtgtggggtggtactcccttttgagaggcgcctttgtgaagtgaactcgaggggcacaaaagcgcaagaagaggcgaccaaccttcaatatcttgggcctgtgttcgtgttccg

SEQ ID NO: 492338 - DNA, 131 bp, Homo sapiens
agtcggtgcctggggtgccgcgagcacctttggctccaggagcaccaacattaccaatggggccagggggtccagcgggtccggcagggccagtgggaccagcatcgcctttagcaaccgcatcacccgtt

SEQ ID NO: 492339 - DNA, 545 bp, Homo sapiens
  misc_feature (7)..(7): n is a, c, g, or t
  misc_feature (9)..(9): n is a, c, g, or t
  misc_feature (11)..(11): n is a, c, g, or t
ccaattngncnttggccggggcactggtggcagcataagggagatgcatgtctttagtggaaaccagagccagcagggagatgtagcacttcctgagttcggaaatgactccaccagttgatatagggcctctcagtgtgttgaaggaaggaagtcctatgttttatgattgagcattagtgtcatactacaatcagccactccccaaatgttgcatcactgaaactccaggtttcacagagaatttcctaaggtattaggtttgagtttcttccttcgtgggatgctatggattctttaaccaaaccaacctaatctttctcctgccacagtaccaccttctcctgccatgcaaaaagaagcagtttgcaaaagtcagtaaaagaaaaaaaaatgccttgttatttctcaaaatgatgggctcacttgtcttctatttatataagagagaccacagtaattattctcaacagtatcagctacaaggtgattttctgtgcctgcgtattctaagaagtagctggcaatttctcttgttaaaagag

SEQ ID NO: 492340 - DNA, 485 bp, Homo sapiens
  misc_feature (56)..(56): n is a, c, g, or t
  misc_feature (173)..(173): n is a, c, g, or t
  misc_feature (312)..(312): n is a, c, g, or t
  misc_feature (321)..(321): n is a, c, g, or t
  misc_feature (421)..(421): n is a, c, g, or t
tcctggtctgcgggtttcaaagaccatgggaaaagtgcagtatctgggccggagtnaccgttcctcaggtacagtccctcatggcttcccttgggtagaggaggtagttccctgaccccttgtgcttcctgggtgaggtgacacccaccctgtttcagctggccctccatggntgcacccactgtccaaccagtcccactgatatgaactgggtacctcagttggaaatgcagaaatcacccgccttctgcgttgatctcactgggagctgcagaccagagctgttcctatttggccatcttgccaagcaantcagaccangaagttttaaatggactacaaaataggtcaaactctatttcacgaactaagaaggctaaggaataatgtccaaactttggttatggaaagtttttttttnttttttggtctgggtaaggataagagggtttttactcatcttaagtttgaattaaacttttgta

SEQ ID NO: 492341 - DNA, 228 bp, Homo sapiens
ccagcggctgtggggatagttagaatactgctatggctggagggagaggcttaggagaagcctattactttgccaggggcccttcaggaagtcgctgggctcagaaggctcttagtcgtgcttgagatgtgatgccttatcgaagagatactcgcccagcccagcctccgggccacccagctctgtgaaggctaggtcacggtggtcacccaatcttcttgactaagc

SEQ ID NO: 492342 - DNA, 804 bp, Homo sapiens
  misc_feature (47)..(47): n is a, c, g, or t
  misc_feature (231)..(231): n is a, c, g, or t
  misc_feature (257)..(257): n is a, c, g, or t
  misc_feature (276)..(276): n is a, c, g, or t
  misc_feature (302)..(302): n is a, c, g, or t
  misc_feature (334)..(334): n is a, c, g, or t
  misc_feature (351)..(351): n is a, c, g, or t
  misc_feature (373)..(373): n is a, c, g, or t
  misc_feature (402)..(402): n is a, c, g, or t
  misc_feature (451)..(451): n is a, c, g, or t
  misc_feature (455)..(455): n is a, c, g, or t
ggtctgcgtcagtggtcacgtggttgttcggagcgggcgagggagtnagcagggctttactgcagagcgcgccgggcactccagcgaccgtggggatcagcgtaggtgagctgtggccttttgcgaggtgctgcagccatagctacgtgcgttcgctacgaggattgagcgtctccacccagtaagtgggcaagaggcggcaggaagtgggtacgcaggggcgcaagggcnaaagctctaagagatcgtttccctcnggccaacctctgaagccgngtctactttgacagctgcagggccgnggcctgtcttctgtgcttcaccatctacatanatgaatcccagtatgangcagaaacaagaagaaatcaangagaactatacgagaatagttctgtcccnaagagagaactctgaagatgattcagccttctgcatctggatctcttgntggnaagagaaaatgagctgtccgcaaggcttgtcccaaaaggaaccatcggaatgaccacttaactatctacaaatttccagccctggggttattgtcccagaatctagtggaacactaacactctgggagggagtcaccccaggagtcatttgatctttatgaattcaccgaaaatccatcctctcagtatgggaaggacgtggcagaaaaacgggagaaagggctgtatgaagcactttaggacatgggaaattcttaggaattggcacacaggcgaagaattgcccgctggaaaaggggaaaagacggcggaagtgcgacatggcggttttgtgggataaaaacgaagg

SEQ ID NO: 492343 - DNA, 677 bp, Homo sapiens
  misc_feature (47)..(47): n is a, c, g, or t
  misc_feature (207)..(207): n is a, c, g, or t
  misc_feature (224)..(224): n is a, c, g, or t
  misc_feature (246)..(246): n is a, c, g, or t
  misc_feature (275)..(275): n is a, c, g, or t
  misc_feature (324)..(324): n is a, c, g, or t
  misc_feature (328)..(328): n is a, c, g, or t
ggtctgcgtcagtggtcacgtggttgttcggagcgggcgagggagtnagcagggctttactgcagagcgcgccgggcactccagcgaccgtggggatcagcgtaggtgagctgtggccttttgcgaggtgctgcagccatagctacgtgcgttcgctacgaggattgagcgtctccacccatcttctgtgcttcaccatctacatanatgaatcccagtatgangcagaaacaagaagaaatcaangagaactatacgagaatagttctgtcccnaagagagaactctgaagatgattcagccttctgcatctggatctcttgntggnaagagaaaatgagctgtccgcaaggcttgtcccaaaaggaaccatcggaatgaccacttaactatctacaaatttccagccctggggttattgtcccagaatctagtggaacactaacactctgggagggagtcaccccaggagtcatttgatctttatgaattcaccgaaaatccatcctctcagtatgggaaggacgtggcagaaaaacgggagaaagggctgtatgaagcactttaggacatgggaaattcttaggaattggcacacaggcgaagaattgcccgctggaaaaggggaaaagacggcggaagtgcgacatggcggttttgtgggataaaaacgaagg

SEQ ID NO: 492344 - DNA, 373 bp, Homo sapiens
ttttccaggggtgggttgggcccagcgtttcggccagggggcctgcaggaggggggccccccaagcctgcattgaggagcagttgtgttacagttgccgggtgaacatgaaggatttgccctcattggaccccctgcccccgtactttttggttgaggcccagctccgcccacaaagggcctggggcttgcaggaaatccgggacttttttatttaggccagtgccacaagggggggccaaagttgagggtgaggacgtgcttcccgggacagcaggcaggggccccctggtacccccccctggagccggaaggcaaggagggggggcgggcctttgattgtccttttgtataaataaaacattttttattta

SEQ ID NO: 492345 - DNA, 90 bp, Homo sapiens
aattcggaacgaggaaatcaaattgcttaaaaaagagttttctttagtatagccacaaatgccttgaactgttgtctgggattgttttgc

SEQ ID NO: 492346 - DNA, 88 bp, Homo sapiens
aattcaagcttctaacgatgtacggggacatggtaattattggaaagtattcaaataaatatggtttgaatatgaaaaaaaaagaaaa

SEQ ID NO: 492347 - DNA, 502 bp, Homo sapiens
gagtagtcctagatcgcgagcggccgcccttattatataaatccaatatatatataatctaaaaaaatcttttaatataaatccccaaaaaaatttacgaatataatatcctgttgtctcccccggcggggagacatatataaatattttttacgtttgcctcttttatacaagagtaacccggtgaagcagccggagaccagaacacagcgcgcgccagagggcccgcagcagctccaagaaggaaccaatgaagaaacacgaggctcttttctctgcttgtccacggatcgcttgatattcccttaacattttacttcttactacagcacagagacacgtgagaaagacaccgagacaaagacaacaaaaaagagaatgtggggaattcctgatctcacccgtttcttagactatgatccgtgtggagtgtaagacatatatccaaatatagcacggggttggaatttataaggtatccatttctagcccgcttagataa

SEQ ID NO: 492348 - DNA, 245 bp, Homo sapiens
ctttttttaaaggggtccccccccaaagggaaaggccccggaaaatatctcccccttcccccccagggggttttggggtccccaaaaattaaaaaaaaaaaaactttttttttttccccccctttctttttttttaaattggggggaaaggcggggggggaaaaaggggtccccccgggggggggttggggggaaccccttttttgccttttttttccgccggggggtacccgggtttcctccca

SEQ ID NO: 492349 - DNA, 135 bp, Homo sapiens
atttgagctcggcccccggtccagctacaagagctggtgtggagcctgctcctatgctggcggatggagcagcccccggacccttacactcagttgctggcacaacccacctgctgggggctgttagcacagtca

SEQ ID NO: 492350 - DNA, 324 bp, Homo sapiens
  misc_feature (76)..(76): n is a, c, g, or t
gatggttagcagagacttaaaagggtaggtagtaggagtttgtgtggggaggtgtggatggtcaatgggtactaanaatgaaaaaaatgaataagactttctatttgatagcacaatagggtgactatagtcaacaataacttaattgtatatgttaaaataacttaaagagtgtaactggattgtttgtaactcaaagaataaatgcttgaggggatggataccccatactctatgatgtgctcattttacattgcatgccctcaccaaaacatctcatatattccataaatacatgcaacaactgtgtacccacaaaaattt

SEQ ID NO: 492351 - DNA, 128 bp, Homo sapiens
gatctagaggatcccgctgctgctactactaccctggtgtctggagagcagtaccaagaactatcagtggccctggattcatgctccgcaataatcatgtcaactcactgaaaacatcaattcactgc

SEQ ID NO: 492352 - DNA, 165 bp, Homo sapiens
  misc_feature (149)..(149): n is a, c, g, or t
agcattgatgtgatcactaatctggtcatatgatggagtatctgctacaatctcagaaggctgtgcagtcaatgagtcgcttggtgaattctcatctggaaacgatcccacgtcttagaaccttcaccacaaggagtttttcttgtagntgattctcaaagtctt

SEQ ID NO: 492353 - DNA, 179 bp, Homo sapiens
ttcagccataacatattaccaataatcctgtcaattatatgtctaaattttccccctaattctagcagagtatgtacattggcagttaacttatgcacgcttaactatcttaacaagcttggagtgctagagattgaagagttcaaatctgaccaagatgttgacatggttgtctcgaa

SEQ ID NO: 492354 - DNA, 1570 bp, Homo sapiens
  misc_feature (393)..(393): n is a, c, g, or t
ggagcccggaagctcggctcgtgaacacacactgacagatataggagcaggcggcggcaccagtccccggtctccctctcgagcggacagtgagtgtgttcccgatcagtgactggagccttgcaatgtgaccgcatataacatgatctatgctgacgagtgatataggcctcatcggcatactgcggatcagtgagctcatagcttacctcatcggcccgagatatcctgagtaatgatgtgacccctggtcaatgcaagagtctggcaatctagatgtgcatgaactccggtcgtaagagatgtgaccagtagcaagcgcagcttgtcctgtccacgctggactgactacactgtacatgtgaacaccgggtgagagggtagactaatccnccaggaacacttacctagaagagtctgcgtgagagctattcacaggactagcattagactaccttgaatcgactagcatgctagaatcatgttcatctgacataggactctctttctatgaaacgaagaaagttccgtcaaaggtggttcgcttggaagtacaacacgtttattttacgggagccttggaaagacatagtccttatactatccgcgaccgaaagtaacatgcctggcagaggcacttgaatgtgtggaataaccggatctttgctcgttggcttggaagtttgcatcttagatgcgacagatgccacgcatgaagtcgaacgcaagttctaagctactgcgtatgcgcgcatccccagacaattggctgtgacttacctgctgttattcaactggaaagccttgacaatggggaccaaactacctatgaactttgatgcagaactcttggtttccccaaactaggcaaaggtgctcagtacacaccaccaattgaagaacattcgcgtttaaaaccgaaatcttctttggggcacccaaaccttggtccactcctagtgatcacgtggatggttacaccctctattggaattccgcaaacctgggcaacaacggggatactccttagctggggtcaccgaattgaacttgttctctggtgtgaaaactcattggggccacacaccgactgactgtggacaccggctttgccagaatagcaacaatacccatgttatgacgaaaggagcaacttggacttgagtctgaacaagtaataccagagcaccatagcgctttgctcaagccctctttaaaagtataccaaccgagtaatacgagagagctggaggaacacgatggaacaaaacagagacgccaagagacatctcacgaacaaccgcagaacagtagcagaacacaaaggagaagaacacaaacgaaacaccacaaagaagcaaaaagcatcaaaacaaacacaccagaggtcacgcagcagcaagaaaaaataaaaaccgaagaacgaaacacacacaaaaaaagacgacagacgaaggcacaccatagcaccacacaaaatataacaaccgcgcaaaacaacgaacaaagcgtagagaagaacagagaccgacaagaagcatgcacggcagaagcgaagcaatccactaca

SEQ ID NO: 492355 - DNA, 411 bp, Homo sapiens
gccggcccggaaacggttgccccaatttgagttttttttgcctccctgggggggctttccccggaagatccatttttggttttggccggggggccccttggggtttgggcccctttgggcccgtgcggggggggggccctttcttccctgggggttgccggcccccttttttggggttaagtccctggtttcctgggcccggctgggaaagttggggggccgcctccttaggtggcccccccggggaaaaaaaaaaaaaaacccggttggggtttccggggggttccggccccccggggctttttttccgttggggccccctttgggcgggggggggggccccctgcccccttttttgttttttggttttttgggttttttttttttaaaggcccctttgttccgtcccca

SEQ ID NO: 492356 - DNA, 215 bp, Homo sapiens
tattacagaagtgttgtattctacgtcgaaaggagggggtgtacgggtacaacctacaagacacaacccgctacaaacagtgttttactaaacatgagaggttttttaacactttccgttggggaaagaaccggtgttccgtctaccttcaaagactccgtgactaggaagaccgtcaactatcgtcgaggaaaaagaacgtgtgtttcgtctag

SEQ ID NO: 492357 - DNA, 242 bp, Homo sapiens
  misc_feature (227)..(227): n is a, c, g, or t
ctggctcagcctctcaagtagctgggaccacagatgtgccaccacgcctggctgctttttgcctgtttggtagagacgggtttcaccatgttgcccaggctgctctgcaacttctgagctagagcgatttgtctgcctgagcctcccaaagtgctgggattgcaggcatgagccaccatgctggcctgatacggttccttgttttaaagtgcattattcaacaagcnaagtaccgattccct

SEQ ID NO: 492358 - DNA, 390 bp, Homo sapiens
attagtctgtgtcagtgtaacatcaaaggaaccattctgtaaagactaccgttcagattagaaacatagcttcactatttacccttgtatcttaactgtgtttacagatattttttggctagttatacagtgataactcagtaactgtttagcatcagtagtcttaattgatcacttgcggtagtcatcacatcattttgcatgcagtgcagtgcatcatcacaacatttcatctcactcacacatttcattctgcattagtcaggcccaacagcaatgcgcagacaacagcgcgtgaagcaacagcgggttaggggtctggtgtcgctgcgtggggcagcaattggtctcccatgcctgtggcaggggccgccccccacagatgtaagg

SEQ ID NO: 492359 - DNA, 480 bp, Homo sapiens
  misc_feature (75)..(75): n is a, c, g, or t
taccgacacccccccccaccccccaccaacccccaaaccacagcacagtttcggggttactaaccacacatttcnaggagaacacacaagttcttccacgatgtcgtacagacgagatttagagaaataccgtgacctgcatgaagatgaaattcttggagccctaacagaggaagagctgaggaccctgcaaaatgagctggatgagctcgaccctgataatgcactgctgcctgcacgcctgccgcagaaggatcagaccaccaaggcgctttttgtcccctttaaaacagaggagctcttggatcacttggaaaagcccgccaaggcgcttacggaccgagaagatctgcccccccactcaggcgaaagcccacgaaaggcctgggctgccaaccattaccccctccccccccagctcggaagcccgaccctcccgccaccaccctcactcctcccctcgccccctctcccaccccg

SEQ ID NO: 492360 - DNA, 216 bp, Homo sapiens
agtggctgaccctgtcttctcccgaaactcggatatttccagtatgtgtccggtgtccccagaactgaacggagatggactggcttgcgggggaccccatgtcctcttccccaacatgaagagcctcgggatccattttcactgctgcagcgcccgtcgcctcctcagctcctcctcgtctgctgtaccttgtttcgtcctcttccttgcctcgtg

SEQ ID NO: 492361 - DNA, 468 bp, Homo sapiens
ggagtgaaatctgcgcggtggtgcatcggtttcatggagaggcgtatttctgcgcgaagccgcctggttcgaaaccgccgaagaggaagtcagcgaaatgctgctgccgatcatggtcggttcgggcctgttcgaagaggaggcagagttctccgacatcgccgccgacgccaacctgatggacgacatgatcgtgcagatcccggaagccctgaccgcgctgtacctgctgtgcaacgcgcctgacgaaaaaccggcgatcctcaagccacgtcaccactgagtcgcttgcccgtggaacccatgggcaaccgtccactgctcctgcgctatgcgctgctggccatcggctggctaagcgtagcgctgggagtcatcggtattttcctgccggtactcccgaccacacccttcctgctactcgccgccgcctgcttcgctcgcagctccccgcgcttctaccactgg

SEQ ID NO: 492362 - DNA, 837 bp, Homo sapiens
  misc_feature (303)..(303): n is a, c, g, or t
  misc_feature (366)..(366): n is a, c, g, or t
  misc_feature (370)..(370): n is a, c, g, or t
  misc_feature (382)..(383): n is a, c, g, or t
  misc_feature (385)..(385): n is a, c, g, or t
  misc_feature (442)..(442): n is a, c, g, or t
  misc_feature (475)..(476): n is a, c, g, or t
  misc_feature (490)..(490): n is a, c, g, or t
  misc_feature (617)..(617): n is a, c, g, or t
  misc_feature (634)..(634): n is a, c, g, or t
gaataaaattttgttaaaatatgtgctcatctcctaagtagctcttcagagtctgaccgtaagtaaaaacacacagaatgtgttgactgggggaggtgaatcacaaaaaagttacgaggagtttaagagttaaatattatttgatcgtggctgtcaaatttagtgaacaacatagatggatttggagttggtagtaggtatggttctcataccagaattctcttaaaaaaaaaaaaagggacaatgggaatggccttatttattttaaaatcaaggcttactagtgggtaggattcccaggtnagcagcagggtggattaaataatctggacaaggagcagcggccatctggggggattcattcgngggnttttaaaatgtnncngtcttggatgctaccatccagggttcttatggtgaccttgtagcctattggtcctgngttctctaacatggggcagtcacgcagatggtnnaggtacttcacaantcacatggctctctgaccccaagcctagtcccttttacatcaccatcttctcagacttctgtgctattcttaaaatatgttggggggcaaggatggaattaggacatcaggttaagcaattcgtganggttaacgtgtgaagtncaggcataataaatttccctgatgtgtggtgtgtttaacagatgttcaaggtacttttatggagctccactgggagggagcggaagatgggcgggtaaaaccggattttgagggactgccgagcagacactatgttgttcaacaaaaaaaaatgcggggcaataaaaggggcgagaaaagagaagcagggaaaaggaggaagg

SEQ ID NO: 492363 - DNA, 157 bp, Homo sapiens
aggctccagcttaacgatatttggaggtcagcacggatactcacgtgtcgacggaacttgtaccagggaaggcatgcaccgcaatggtgaatacacgtcgaccaggctccatgttagcgtacttgggccctcagcacggatctcacgtgtcgaagga

SEQ ID NO: 492364 - DNA, 1172 bp, Homo sapiens
  misc_feature (610)..(610): n is a, c, g, or t
  misc_feature (732)..(732): n is a, c, g, or t
  misc_feature (1172)..(1172): n is a, c, g, or t
gagaaaaggcggttcctcttctccagtgccctccgttccctgtctctgcctctccctcccttcactcccaggcatcaacagcggagacttcgagggggagacgcagaagcggccgagacattgcctagagcgacgtgagactagaagcccatgcctatggtcacccctgtagaccccattctctatacttgtgctccatgtctggactatgggttgcttcatggctgacactaggagtcatgcaaatggagcgcggcatggcaactggtagggcgttcgatacggtagggacgataagaaagtagcctaagctagtagaacagaagcttccattgcatcttttaacgtaaccctaggaatgtcatgcttagtcgactagtagcgtaaataacagggacttggaagctggcgataagcgccgcaataggatggaacttgccgactgagtgggactggttcgtttacatctcactgaccgcggatggaatgtacgctaccatctgcgtgcgttattggaccgattggccgcagcgagaattaacaacaaaatgtccaacttggtctcaattgcatgcagggcctggaggggggtccacccatccgcatgaancgcatcatgaaacccttcaccaggactccctagttctccaagacgggagattccctctggcatcacttgtaccaaccttggtgtgctaggaatatccttgtgaagtgagaagtgaagggccncctctgggacggccccttgcaagtgcttgggtgctggcccttctgaaaaagacccatgtgtaggcggcgcgaattcaccgcattctccccaaggggcgcctaggaagaagcccttattcaatgccgaaggcggaacggactcttgcaaggtcccccccaggtcaagaagcggaagggaaccttgggttgcgaagttgggggaaagcgcccgtattctgtaccggccgtttcactcgtgagcctttccaattgtagaccggttaccccttctttgtggcctttccctgaggggctaggtcacctcggattattggaaactcttggggaccgaaaaaaccgggccagcgattgaagggccttggaggtaaccccccaaatgtcttcaattccccgaatgattggttccgttgtgggcgccatcccaataggggcccccgatn

SEQ ID NO: 492365 - DNA, 363 bp, Homo sapiens
agcatccttttcaatgctgggcactatcattttaaatcaattcggtaaaaaaaaaaaaaaaaagcaatccggttttaattttttaattcattagtaggggttatgtttaattcattattaagaagaagtgttatgtttattagccatttggaattcctttaattcgtggtaatttctcctgggctgggttagtggccggggtatataaatttttccatatttattgggtaagaagttctttatcttaatatggggaggccagctagcatttattggggcacttaccacggtgctaggaaaatggcaaagggtctgggccggtgcgcaggggctcaggcctggtaatcggggaaccgagctcga

SEQ ID NO: 492366 - DNA, 196 bp, Homo sapiens
cagatacaagcacagtactaccagtctatcagcgtgtgcaaagcgcctccataggtaccggcgatacacggtacagcacagacaccagcatggagcatgcagaggccttcctatgtaggagctacacataaagcagcctaggacatgggaacccgtgtggcaacatgtaggacataggaatgagccccaagggctc

SEQ ID NO: 492367 - DNA, 199 bp, Homo sapiens
gagccggccccatatctagcgtcttcatgagtcttcacgagtaaattagtatgacaaggacatcatgtgaccagtgtaattaaaacatctttagatatcagtgcagaaatgtacccctggcaccacttaaaacgtaagagcaggctcaacaacacgtagtgatggaaataagctagctccgctcaatgccatctataga

SEQ ID NO: 492368 - DNA, 921 bp, Homo sapiens
  misc_feature (909)..(909): n is a, c, g, or t
gacttccaggggatttaaagggctagcactcttttcctttgttttcattttttttcttttcccctttgtgttggagccagacattaaagactagtacattttaaagcagccacatatacatgggaaattagaaagtcaccgctcatacctagagaaagatgcaggctcacaaaagatgtgagaaggacttaactttacatctcaggcttatcctcagcacagagacaacctacaacaattcagaatgaaaaagcaaaccctggggaaggggaaggagaatctgattttcacagttatcacattattttatttcaatgtccggttttcaacaacaacaacaaaatcacagcacataaaaagaaacaggcaagtatggcacattcaaaggaaagaaaatgaaccaacgaggtctgtccctgaaaaagttataattgtggatctactagacaaagagtctaaaacaagtatcttaaagatgctcaaaaaataaaagatatggaaaaagtacaaaataaatgatgtatgaactaactagcaaatcaatacagagattcagaaaaagtcacacactagaacgagaaattttgcagttgaacagtataataactgaagtgaacaatccactggagatattcaaaggctatgcgaccggtaggagcaagagtccggcaactgagatcggacaggcaatctgagtctcggacgaacggaacacatcgaccacgcggaccaggcggggccctggagcgacacttcccacgtgaaatcaacctaaaaagcgaaacgcgcgtctggaactggcacgtcccatcggtgacatataagccagcgattcaagggagcagaccccagacactccggcagggacatactcggcgcccacacactatgatcgcacgtactaagtanagaaaactctcg

SEQ ID NO: 492369 - DNA, 1316 bp, Homo sapiens
gaggcaatagaggccgtatgtcgaacggttccgtggtgcagagtgtctgcgagtaaattccaggcgtgcgctcgctctgtctgcggtgtggaactgcataatgaatccgagtaaacggaagccatagaagtccacatacaggctgcccggagcgctactggaagtaggtcatcgcgccttgttcgattcctagcggtcgtgaggaacgaggtatagaggcgggcctgtaggccaggaggcatctggcccgtgggtgccgtgtgactactccctgtggacttgcgacctgaagtggtggagcccgagaggtgtcgctgtcagcaccagcgaagtcggttgagcgctggtcagggcatcggagttccagacttcgtcggctgtacagccaaattacgtacactgtgaagcgtagcctgcatcggacgggagtgcgaggcagctacgctgagttggagaattggtacttgcggtgttgccttgcgtacagggggttacccgggaattcctctgggcatgaaagctgggcgatgctcttgctctaggacagtaccaagtgtccggcccatacaattgaaccttggggataatcgatacggatgcgttcttggcagaggtaagaacggtgcaacctttggcccacatcttgaaacgcgaagtactttcacaccccttagacagatcaggttgcggaacaggtcagcggttaactacattaaaagtgcacgggtattttagttagcacactgcaccgcgatttagagcgggaatattgacaatagcaagtccgttgaaatattggcctagactattgaccggccgattatatacctttcccctcttgacaccacgaaacacacaacgatataaccctatttgacacatatcgccaatacgttccacagcaagtgcaggaagactcccttctcacatagagcgcatgtacttagtgaacccccaaccggtggaggtgttcccccaactatgaaactgtcttgcgagtatcaagtacgctctctaaaaattattctagttcacgcacctctatttgacactatattcagcatacgatatttcatattaacagccgagccccaatatgtcgatatggcgacaattatttgcgtttacatggatggcgataacattgcgcgtttggtgccctccactggccacatacctgtgggagaccaacctaaatgtagccacgacaaataggggacaccacaggacaccccgtcagtctatttgggaagagactacttggagtaagaggcaaagataaccacttacgccatatggttgaaatacacccctga

SEQ ID NO: 492370 - DNA, 248 bp, Homo sapiens
cgccctcacactggccccgagctctacccggttcaagcattgctgaccagtgcgcccttcgagcacggatgtcaacaccctgacccgcttcgtcactggcaggagggcacgtgaaggcccgcggcacgggcgagttgacccatctgctcaactcgctctgcacagcatgtctaagccatctcttcggcggtgcgcaaggtgggcatcgcgcccctctattgcattgctggttctaccagcgtgacagg

SEQ ID NO: 492371 - DNA, 274 bp, Homo sapiens
ctgccgttattcactcgccagaaagtgtgaactatgtgatctcaattgtttctttaaaattcaaaaatattggccaggcacagtggctcacgcctgtaatcccagcactttgggaggccgaggcaggcagatcacctgaggtcggtagttcaagaccagccagacgaacatggagaaaccttgtctctactaaaaatacaaaattagccggggtttcgccatgttggccaggctggtctagaactcctgacctcaggtgtccctactgcctcag

SEQ ID NO: 492372 - DNA, 676 bp, Homo sapiens
  misc_feature (6)..(7): n is a, c, g, or t
cgctannttatgtggtgaatcggacaggggcggaggcaaattggtgctcctcagctccgcttctccgaacatctgtggaccaggccccggggcaggcatcccagtgccctggttctcatcagcattgccttatcatcctcatccccctcaacgtctgctcttctaccgctctggtcctggaaaggacagccacacctttgagtcctggcacagctggcctggcaaggcaagttcccccagacggcacagagtggccgaatcctgggctgagaaacaattccacacgtgaggtgcacaatggaggcagatcctgcgggcctccgtggagctcctggatgagatgaagtcctcgctggagaagctgcaccaaggcatcacagtctcagaccctccctttgacacccagcccggcccgaggacagcttttcctgaggaccccggcacgcagctgttccccacatggacagatggacacaccgaggcctcggcggcaccgctggcacggtgtgagcgccagggcatcttcccaccggccctccgacggcgcaccaaggggctgtgcagacgtggggacacggaccgagatgcacttagaaccaggagctggccggctctggaggcccccactaacttatttgccggctgagttgggggggggctctggggtgccgatccc

SEQ ID NO: 492373 - DNA, 279 bp, Homo sapiens
tagactatgtcataactcttaggagtgagtggggcagtagaactatgtcatacttaggagtgtgtgggaaaggtagaactatgtcatacactcttaggagtgcgtgagacaggtagacactatgtcataactcttaggagtgagtggggcaggtagaactatgtcataactcttaggagtgagtgaggcaaggtagaactctgtcataactcttaggagtgagtggggcaggtagaactatgtcataacccttaggagtgagtgagacaggtagaacta

SEQ ID NO: 492374 - DNA, 103 bp, Homo sapiens
tttcccctttaccagcaaacctgacttccccatgtttattccctttgcctacaaccagttaaaatttgaggaacttatttccttcaataaaataattttaata

SEQ ID NO: 492375 - DNA, 573 bp, Homo sapiens
agggaatcctatcccatttcttgtttagtcaggtttgtcaaagatcagatagttgtagatgtgtgatattacttctgagggctctgttctgttccattggtctatatctctgtttgggtaccagtaccatgctgttttggttactgtagccttgtagtatagtttgaagtcaggtagcatgatgcctccagctttgttcttttggcttaggactgacttggcgatgtgggctcctttttggttccatatgaactttaaagtagttttttccaattctgtgaagaaagtcattggtagcttgatggggatggcgttgaatctataaattaccttgggcagtatggccattttcacgatattgattcttcctatccatgagcatggaatgttcttccatttgtttgtatcctcttttatttcattgagcagtggtttgtagttctccttgaagaggtccttcacatcccttgtaagtgggattcctggttttcatgacccttaggtgtggcctggggttgccaatgcgccaggtgagtgtcaagatattttttcagacattactgtctataatag

SEQ ID NO: 492376 - DNA, 370 bp, Homo sapiens
  misc_feature (20)..(20): n is a, c, g, or t
gaaaacatggccttaccaanatgaaatattgaccaggtgtcaatcccagagagacagagatatgggacctttcagaaagagagcttaaaatagctgttttgaggaaactcaaattcaaggtaacacagaggaggaactcagaatattatcagatacatttaacaaaggaattgaagtaagttaagagaatcaggcagaaattctcgagctgctgaatgcaattgacgtactgaagaatgcgtcacagtctgttagtagcagaactgatcaagcagaagaaagaattagtgagcttgaagacagactatttgaaaatacacagtcagaggagacaaaagaaaaaagaataaaaacgaatgaagcccaccta

SEQ ID NO: 492377 - DNA, 750 bp, Homo sapiens
ctcaaaattacacctttccccaaatcacccctatttcggtaataataaatagggcaacacagttaatttgcttttaaaacttataaaagaatgtttctctatagtttggcctcttctttaatatatacagagcccccacagagacagagagtgcaaataattctccgtcacacacaccccctctggagaaaagagatgtcttttgtgtttttctcacactgcggctttggttatatagagatagttgtttccccacccttcacataacaccccctactataaaatctgctaacacaaaagagaggccccccctttgtagaaactgccctctgttggtttctgctgagagagaaccacaacacatattctctatactctatagaagtgtgagaaggagacttgagtttgtaggagaaatgctgtcccccaatcccacattggagatgcacttcaccccacacttatcacaattgctgcgtcatttttggtgagctactatggagatgtccaaatatttttgaacaataatgggaagcccctttgtccccccaagaatgagtactaggggatcaatggtgcttttaaaaaaggaaagagctacgatgactgggccagaaagaaaagaatggggaactggtattaacccacttgatccagcatcactgggaaatggggacgaattccgccggaggccccgggggataccccccaatacattggtttccaccaaattaagtttttccttcccca

SEQ ID NO: 492378 - DNA, 133 bp, Homo sapiens
tctagaggatcaccaatgcagcggaatcggggaacggaagaagggaaagagcaaaagacaaaaagaggtcagagaatccaagtgttagaggagaacaaaggattcagtatatatacatgatctacaaactcgc

SEQ ID NO: 492379 - DNA, 945 bp, Homo sapiens
gagtctgtgatctgccatggatcgggaaggaactgtgggtgtgtgggtgtatgtgtgtgtgtatgtgtgtggcgcgctgtggtgagtagtatgtgcgcgcgggtagtgtggtgggacaaggtgggtgggggcgcagggtgagtgagagtgcaactcttggtgctcgcattgatatgtcgtcgttactgttctctactcacaaggtatctggtggtggcagtgggacgttaatagtgggttgctttactttgaatttctaaatctgttaaaaatgtgggcgtggagcgggtatgggcggagggcaaagaaacggacaataaggagagtaggaagcgagacgagcacggatgttggggtaccatggacgtctgactgaatagtgataataactgggagttaagtgaaagagattaccacctggcagggaggttggacaacgaggtaagatcattgcatgaagtcagtgtgtgtgtcaactgggaggacttagatgggccatgaaggatattgtactaagaagtaagagtctatgagtaatggttgaatgtcggtaagtacgtttggttgtcacgcggttttcctaagatttatgaaactgttgaaaatttgacgctagtgataattttaacttatgggggcttgggaggttcatggtagatggctgttcaatatttaacctacatcaattgaggggacaactggcgagctaggatgagaagtctcgcggtatattgaccgtggaacgtttggtggaacaagcgtgagtaggaaggagggaattgcgaccccataaaggttgcgagggaaaggcgatgagacgacaaagtgtaataaaaggcatgggacgctgtggaaaaaaataataggcgtcggataacgggggaaggagattgtataagtaaacgcttactattgttgtgagcgtgttctattatgtgggggaaa

SEQ ID NO: 492380 - DNA, 340 bp, Homo sapiens
cgggctccgtgatatcaggagctctctcagcccacactatcctccagacgcaaacgagatgactcagacgttccctggagcaacttctccttataactccgagaactgtatctcaaggtccagcatctcactgacacactcgactgcggcgtcgctcatagtcctcatcataccatctcggagctctcctcttctgactctgtctggctgccgctccgatcctcctcactctcttcctcctccccattcatctcagcagcagaatcaccctctgcttccatctcttctgtgtctaagctaggaggctggacaggcatctggactcgcggggacttgtacg

SEQ ID NO: 492381 - DNA, 1215 bp, Homo sapiens
ctagagtgacaaggtgaattactggacggtgaccattcctcttgctccctgtatattgcacgaccctttgttgcctccctggagactttgtctgtgtctccttcgcatgagagtgagttctccttataggtactcccctgtgtcagagacgtctctctttgtgcaacccgcgggtttattctttttaggcgctctccctcccccaggttcaaccaccctgggtggaaagtttttatctccccgggttttccttcctccccccggaggtttctcccagagtggaacccctttgtcaaccttgagccccttggtgataacgcaaatgtttttttctggtgcaacaaggattcccggggcaaaagtgctccaggattttctttttccctatatggacacaggccccctttggccccaggaaacacttggacgatatgggcccacggaacctgagaagtgaccaaagcctggagatggagaagccaagagggaccccaagcgggtcaatccccagaagttcaccttggaggtccctacacgcccttcaaaccatgaaaaagccacctctgttcgaaagattgggaaacttttcaaaggccaaagatcttaaccgattgagggaccaacaccaggagattttctggaacaaagtagttaatcgaaattataccacttgggctctgattaagaatacagagctggctggagaaaggaagaacatttgtaacaatcccaccggaaagaagactggagaaaaattttccaacaccccatcgatccaccctaactgttacccggagatgcccgggaggccatatcccagaggagaggaatagtccctcgggggatattcctcggtggttggagactcctctccctctctggtggtgctcttcctccagggcccccacccatatgcaagaaggttgatattaagacccaacccagatgttagaatagcttagcctatgtgtgcccaccaccatttaaaaccactttgaaggagcctctaaattcgctagcacaattctcgtggcacgctttttaaaacgttaaagctgctactagtaagttatctcgggcactttttacataacttgaaatactggaaacacataatgcacccggggagaagaaatcaaccttgcacctttataaaccctgtattgtaagtgggaaaagccaatgttttaaataaaaactattttaaaattggga

SEQ ID NO: 492382 - DNA, 140 bp, Homo sapiens
ctcactctgtcactgaggttggagtgaagccttgaactcctgcactcaagtgatcctaccaagtagctgggactagaggaatgtgctgttttttgttttttttagagacagggtcttgctgtgttgcaaaggctagtctc

SEQ ID NO: 492383 - DNA, 1188 bp, Homo sapiens
taacatcaaggtatcacaaggtttattggatagatacaagttattataaaatcagggcatgaacatgacctggataaattaaggtaagactttaatttctcaattacttatataattagggaggggaccaatttcaaattctcctcaccatttggttctcacacccacaaaaaccactttcaaggggctttaacgagatcttctcaaaacggactcagtttgggtgccaagttaacaccgagtgtgttccttttataaaagagaactgtggtgccacttgtgcccgaggcgctcagaggggattattaaaaactcttgagccacaattaaagcccaatttatataggaggtagaaacatacgggcgaatatcactatattacacgggcgaaacaaaccctatcatatctcacggagttaaaaaatattcttctctgtgtgacacaacacccaatatgggtataaactcccaatattatttggcgcaacacactcccagatgtttttacactggggacgcaaagaggggctattctctatacaaggtattctcaggggttgcgcgatattctcaggttcttcataacttttaaaaacacgcctatatgtgatataaccggtgggcacgccacaacagaaggggcgccctgtgcgaaataagaactggcgcctctgttgctgtgaagaacacctttatgtgacgcggtgacatataattggggcagtggcgtggctcaaattatatacttatttcttaaaacgctttttacagaggataactctcccgttagagaactctatttcgcgggagcgcgcgcacacagctctattgcgcattcagacgcactcttttaccgctttaccaaagataaataagcccttttattggccgcgacagggggaaaatccctcaaatggggaacggtgacagatcccagggcggttttaactaattgttggggggcaacaacccctattttcaaggggggagaaggaaaatatttcgccaagaggacggtcagtgcccacacatggacgcggtacactctctcaggcagccccgcgtagtgttttttcgccacaactctgaagggcacgtgagggggggcgacctcatataacaacacagacgctacacccacggagtatccttgttctcttcacagaggagcttacaccacgggtgagc

SEQ ID NO: 492384 - DNA, 795 bp, Homo sapiens
  misc_feature (6)..(6): n is a, c, g, or t
  misc_feature (74)..(74): n is a, c, g, or t
  misc_feature (90)..(91): n is a, c, g, or t
  misc_feature (98)..(98): n is a, c, g, or t
  misc_feature (102)..(102): n is a, c, g, or t
  misc_feature (109)..(109): n is a, c, g, or t
  misc_feature (127)..(127): n is a, c, g, or t
  misc_feature (132)..(132): n is a, c, g, or t
  misc_feature (135)..(135): n is a, c, g, or t
  misc_feature (142)..(142): n is a, c, g, or t
  misc_feature (147)..(148): n is a, c, g, or t
  misc_feature (151)..(151): n is a, c, g, or t
  misc_feature (153)..(153): n is a, c, g, or t
  misc_feature (163)..(163): n is a, c, g, or t
  misc_feature (166)..(166): n is a, c, g, or t
  misc_feature (178)..(178): n is a, c, g, or t
  misc_feature (269)..(269): n is a, c, g, or t
  misc_feature (303)..(303): n is a, c, g, or t
  misc_feature (319)..(319): n is a, c, g, or t
  misc_feature (336)..(336): n is a, c, g, or t
  misc_feature (361)..(361): n is a, c, g, or t
  misc_feature (373)..(373): n is a, c, g, or t
  misc_feature (410)..(410): n is a, c, g, or t
  misc_feature (419)..(419): n is a, c, g, or t
  misc_feature (432)..(432): n is a, c, g, or t
  misc_feature (449)..(449): n is a, c, g, or t
  misc_feature (457)..(457): n is a, c, g, or t
  misc_feature (527)..(527): n is a, c, g, or t
  misc_feature (534)..(534): n is a, c, g, or t
  misc_feature (540)..(540): n is a, c, g, or t
  misc_feature (549)..(549): n is a, c, g, or t
  misc_feature (554)..(554): n is a, c, g, or t
  misc_feature (576)..(576): n is a, c, g, or t
  misc_feature (768)..(768): n is a, c, g, or t
tcagtnttatacacaacctcccgtgtgcattaacatccccataggcccccaccttgatcagcttggagaaagtntcatagatgaagatgnnggaaatntggnaggagangatctcctgggtattgtnggggntgnggggggncgggnnggnancctggggggnganggcgaagaccancgggggggtgggggaggggggggtggagagggggggcaggatgtactctagaccgttggtttcgcagaatgtgagggggggttcctcaaanatcagcgggggttctgggaggggggggagaaggngggggtgagccccagnagggggaagagaatgcnctgcactgaagtggagattaggagntccgagacttcnatgtggttccgggtgttttctcccaggaggccgccgnggtggtggngggtgagggtggnggggagttggtgaggangggggggngagggggtgggggctgaatgcatctgtgatgttacttaggtaataggggtagcggcgccggatattacgnaccaggnccccgnagagctggnctgtntgctgcagagggttatctgggnccccatttaagtctaggcccttgtagaagctggagtctggcttggcagggctggactgatagcgccttcgaagtagctccctctgcacaggcaccagactgagcagtgcctgctcggagggggcatcggtgggaggcagcactaggctgcagtccaggaagccctctagggagtgcagcagctcccctcggntctgagccatgtaggcatctatgcgga

SEQ ID NO: 492385 - DNA, 659 bp, Homo sapiens
  misc_feature (101)..(101): n is a, c, g, or t
  misc_feature (555)..(555): n is a, c, g, or t
  misc_feature (604)..(604): n is a, c, g, or t
tttcagtggttagagatgtaaaccaaaaataaaattctaagcccccaatcaactgaatggatcctcttgttgtccaaggggattccaaagaaccccgaaanacttgctcaggccatgacaggaatggaaaggtcggtcatggcttgtttgtactcttcttgctttggagttcaggcacaaaactgagcagcattaacattaaaatagagattagaagactgacaaaacagactctttgtagcactaagataacaaataccaccctgattgtagtatagcatcacatgacagatagcaggccctgtaagaaatcaaagcattttaccccatatttaacatgttttgaaatggcccttcagggttatctcttgtgggagaagtttacattctgaatagaatcacagtcccattcctttcccagctgtttttctgatcctgaagagattagctgggagtccaataccttttaaagatttaataggagaaacagttgccatctatgcctctgaagatgaccacttaactctttcagctaatgcaccagaaatctttgantccacctatgacctggaagccccctttgctttgagatgccccgcctttntggacagaaccagtgtatacctcacatatattgattcatgtcgtatgtatccctg

SEQ ID NO: 492386 - DNA, 241 bp, Homo sapiens
actagaggaccccggtacgagcggtcgttacacagctcttggcaaggcgtatcttaacccactaactaaggcaggatcaaacctgtgtcctcatgaatcctactcagattcgtttcccctgagccatgatgggaactccctgattcttttttaattgaaatatagttaacctataatactatattagtttcaggtatattacatagtgatttgacatttgcatgcattatgaatcagaccg

SEQ ID NO: 492387 - DNA, 415 bp, Homo sapiens
ccccgcctggatctcaagatcccattgtttaagaaaattacactgtacagcgttaaatatattttggatctcacacttgagtgtaacttaatctacccgattcagaacttttgtagagtgctctcggagttcctacttttgaaatatcattttccatttttattctgtagagtaacatattttctatatttattatatatcacagagactttctgaagcataaccctgattgactctagagtcttttcctagttctgttttctctcagaacctggatttatttggaggtgggtggggcgcgtggtccttggctctatctgtggtgatgcctcataatgagattgcctgagcgcttaccgcatttgaaggctcgtagagattccgtggtctggatgcttgtttgagtctgtctgga

SEQ ID NO: 492388 - DNA, 151 bp, Homo sapiens
cttacacgaagaggacacaggcaacaacggaaagaatccatagaaaacaggatttcatagaaaattttaaaaatcttgtgcatagccatggctatggtggcatgtgccttgtaaccccatgctacttagggactacatggcattgcgccac

SEQ ID NO: 492389 - DNA, 712 bp, Homo sapiens
  misc_feature (135)..(135): n is a, c, g, or t
  misc_feature (159)..(159): n is a, c, g, or t
  misc_feature (180)..(180): n is a, c, g, or t
  misc_feature (226)..(226): n is a, c, g, or t
  misc_feature (232)..(232): n is a, c, g, or t
  misc_feature (235)..(235): n is a, c, g, or t
  misc_feature (238)..(238): n is a, c, g, or t
  misc_feature (243)..(243): n is a, c, g, or t
  misc_feature (247)..(247): n is a, c, g, or t
  misc_feature (258)..(258): n is a, c, g, or t
  misc_feature (265)..(265): n is a, c, g, or t
  misc_feature (268)..(269): n is a, c, g, or t
  misc_feature (273)..(273): n is a, c, g, or t
  misc_feature (283)..(283): n is a, c, g, or t
  misc_feature (304)..(304): n is a, c, g, or t
  misc_feature (308)..(308): n is a, c, g, or t
  misc_feature (312)..(312): n is a, c, g, or t
  misc_feature (322)..(322): n is a, c, g, or t
  misc_feature (325)..(325): n is a, c, g, or t
  misc_feature (331)..(331): n is a, c, g, or t
  misc_feature (334)..(334): n is a, c, g, or t
  misc_feature (342)..(342): n is a, c, g, or t
  misc_feature (349)..(349): n is a, c, g, or t
  misc_feature (384)..(384): n is a, c, g, or t
  misc_feature (386)..(386): n is a, c, g, or t
  misc_feature (388)..(388): n is a, c, g, or t
  misc_feature (390)..(390): n is a, c, g, or t
  misc_feature (406)..(407): n is a, c, g, or t
  misc_feature (410)..(410): n is a, c, g, or t
  misc_feature (425)..(425): n is a, c, g, or t
  misc_feature (429)..(429): n is a, c, g, or t
  misc_feature (438)..(440): n is a, c, g, or t
  misc_feature (451)..(451): n is a, c, g, or t
  misc_feature (463)..(463): n is a, c, g, or t
  misc_feature (466)..(466): n is a, c, g, or t
  misc_feature (470)..(470): n is a, c, g, or t
  misc_feature (483)..(483): n is a, c, g, or t
gttacctgaaaaagggctacctgaccctgtcagacagtggggacaaggtggccgtggaatgggacaaagaccatggggtcctggagtcccacctggcggagaaggggagaggcatggagctatccgacctgatgntttcaatgggaaactctactccgnggatgaccggacgggggtcgnctaccagatcgaaggcagcaaagccgtgccctgggtgattctgtcngacggnganggnaccgngganaaaggcttcanggccgantgnntggnagtgaaggangagcgtctgtacgtgggcggnctgngcanggagtggacnacnactacnggngatgtggngaacganaacccggagtgggtgaaggtggtgggctacaaggncngngnggaccacgagaactgnntgnccaactacaacgccntgcnggctgctgnnngcatccagccnccaggctacctnatncatnagtctgcctgctngagtgacacgctgcagcgctggttcttcctgaccgccgagccagcaggagcgctacagggagaaggacgacgagcgcaagggcgccaaccctggctgctgagcgctcccctgacttcggcgacatcgctgtgagacacgctcggggcggggtcccaatcaggctcctcgtccttcaacgttcatccccaaaccgacgaccagatccatgtggcctacaatccgaggaga

SEQ ID NO: 492390 - DNA, 338 bp, Homo sapiens
  misc_feature (28)..(28): n is a, c, g, or t
  misc_feature (42)..(42): n is a, c, g, or t
  misc_feature (80)..(80): n is a, c, g, or t
  misc_feature (176)..(176): n is a, c, g, or t
  misc_feature (203)..(203): n is a, c, g, or t
  misc_feature (214)..(214): n is a, c, g, or t
catatatatctttttaaaatctttgttnttgatgaccttaanttgtgttaatagggctggtgtgatggctcacacctgtnttcccagcactttggcctaggcaggaggatgcttgagcccaggagtttgagaccagcctggacaacatagtgagaccccggctctacatatatatntttttttatttagctgggcgtggtggnttgtgcctgtngtcacagctactcaggtggctgaggtggcaggattgcttgagcccaggagttcgaggctgcagtagtgagctatgattgcaccactgtactccagcctagatgacagagtgaccctgtttctct

SEQ ID NO: 492391 - DNA, 406 bp, Homo sapiens
atcaacatgtggtacctaatgtagtagtcaaatttaaggctgtcgaggacaatttcaacacttccagcaggtgactatatcaggaaggagcaaaaccaagtgcttcctgcttcaccttctgctgcttttgggacttttctagagctagtagctaaggacaagaccctgcaacccattttttcactggcgagaggaaaaccaccaggcttctcagctatggcttggcaactctggagttcctatggcttccatcagggctccaggccctgataagtggcctcaggcaggcggcgactcgggagcggatgggagagctagtcaggaaggtggaatcgggaccatccccaaacacgttggcgtatgatgatttgcggacctggacgtagttctgcatgctgcgatcggt

SEQ ID NO: 492392 - DNA, 246 bp, Homo sapiens
aggatcccccggtcagactctcctctgcactcaatggaaacgatgtggtgtcgggtaccatggcaggccagcacacggggctcccggcagagaagggaatcggacggcttgaggaactcctgcgccgagcccaggatgacattgcagtcacggtcagtgcagaggaagcagccgaccagtgtccgtccatctgtcatgcgaatgcgcatagtcttgctgagcgcgcccgacagcagctagaggcgc

SEQ ID NO: 492393 - DNA, 106 bp, Homo sapiens
tcgaatgcgaattcctggatcgggtggcaccaagcgtcaaggcgggccacatcgatgatggcaggacggagagtgtctatggttggttttgtatccaatcactgta

SEQ ID NO: 492394 - DNA, 825 bp, Homo sapiens
ctgtaactctgtcagatgaatggacagaacacaaagcattttctcagaaatcttttttccagtttttaactgaagatattccctttttcaccatagccctctattggcttccaaatatcaccttacaaattccacaaagcattcttagcgaaagcttccgagaaacggcattgtgttctcttaattcatctcacggaattgtagctttcccctcaagaagccgatcactaagactgttcttgtggaattcgcaaattgatatttggaagcccatagaggtctatggtgcaaaaggaaatatcctaagagaaaaactgaaaagaatctttctgggaaactgctttgtgttctgtggattcatttcacagagttacagctttctcctcaagaagccttttgcaaaggctgtttcttgtggcatttgcaaagtggtatttggaagcccatcaagggctagggtgaaaaaggaaatatcttccgttaaaacctggaaagaagcttctgagaacctgctttgtgttctgttaattcatctcacagagttacagctttcccctcaagaagccgtttattacggctgttcttgtggaatttgcaaggtgatatttggaagcccagagagggctatggtgaaaaaggaaacatcctatgataaaaactggaaagaagctttctgcgaaactgctttgtgttctgttaattcatctcacagaattacagctttcccttcaagaagcctctgcctaagactgttgttgtggaattttcaaagtgatattttaaagcccttagagagctatggtgaaaaaggaaatatcctataaa

SEQ ID NO: 492395 - DNA, 424 bp, Homo sapiens
  misc_feature (13)..(13): n is a, c, g, or t
  misc_feature (383)..(383): n is a, c, g, or t
gtcgacacggctncgagaagacgacagaggggaaggggccctggtgggatccgtcctcagttccagaaggcagggaacccctcaatttcctagcaattctcttattactcccagaatcggtatactttatatcaatatagaggctggggccggtgtggtggttcacactgtaattccagcactttgggaggctgaggtgggcggatcactgaggtcaggagttcgagaccagcctggccaacatggtgaaaccctgtctctactaaaaatacaaaaattagccaggcgtggtggcgtgcacctgtagtcccagactcaggaggctgaggcagcagaattgcttgaacccaggaggcggaagttacagtgagccaagatcatgnccattgcattccagcctgggtgacaagtgaaactccgtctc

SEQ ID NO: 492396 - DNA, 388 bp, Homo sapiens
tgaagtatgttactactctcaatatacaatcttcatcaggttagtatacatagctggttcacagaatactaaaaatcctgattcatcgactcatatcaaccttaggagtcctttgctgcttgacaaaaatgccagaagcttacatatgctctatcattaccaatacatatcacttatttatataaacttcataaaaaccatttgcgtacagaatgttatttctgtcatattcatgccttgattaatttatactgataggagaaaagtggtcgtgacatttagtttttggttggagtgtaggcttctcaaggttccatgagggactttgtgtgcattagtttgatgtggttgcagtggtgacacgaatctgtacatgtatatacaagag

SEQ ID NO: 492397 - DNA, 424 bp, Homo sapiens
agtccctgagggacacctattggcattgcaattgggtccaaagtgtagtcgacccagctatagagagtggccggaagtcatcggctcatcagcgctatcagggcatccggctcatacagcttggcgttcactgcgacctcatgctcatcatctcgtacagtctgtaccaagtgccgaagcagcatctcgtctatcagtgagcgcatcagctcggcccagtcctggatgcgctcctgatgcgactgaccgagacactcagtccacacgagtcggtccgcactcggccctgttccaccagggtcgccaggcgctctcggatggtcattagtccgcgctatgcgccctagcgggcctcggcctggtacactagcaggagcttatgcaggtcatcggcatcgcggaggaaccgcttacgcagcatgcg

SEQ ID NO: 492398 - DNA, 1914 bp, Homo sapiens
tggccttctagttttgtgtttgcggcgtcttctcttctctcgttgtctagtttctgctgcttgccgcgtccgcctcctggttggggttgggttgttgttgtgtgccgcttgcctgccgtgcaccgcctgttgggtttgttgccttctcgcgcggccggtggtcagctcgtcttgcccgtggtgtgtgtgtcgtcgctgcgtgggggggctgcatcgatccttgtggtttcggacagcgctgtcgctgtttttatggacgtcctggtgtgctgctggtgcgtaatgctccgggtgtggtttgtctgccctggcgctggacgctctgcgtccgtactagcggtcttgcgtgtgggctttactaactctgtctgtattggtggctccgctacccgtggcttttgttcgtgccgcttctcgtggcgtgctcctcgccctccgcgtttgtttgtatattatcttgcgggctggaccgtgtagttgatctttggttgtgtgtggtgggcggcccgccccccccccccccgtttggttctgctgtgggggggggtggttgatatgttgggtggagtggttcgtcttttgttggtgggggtgttgatcctaaccacattcgctcctctctgcggagggtggggggtggtacagaagatgttattgctcgccctccccccgttctgttgtgagtcgacatcccgtttgtgtgtgttcgccccccggcaggttgttcttcgcttccgtcggggttggagttggtccttcgcgccgctcgtcgtcctggttctcctttctttgggtgtggggggcgtcgtctcttccttctactatgtggtgcgcgcagcgcgcgccgcggtgagtagctcaccgctcctcagggagttgtttccgtcggccgcccccaccacatgggtgtcgtgtaggggttgttgtccaccccaccacgtgtgagtcgccgctgtgggggtgtgttctctctccacgcccgttcccactccttggtggcgtgctcctcctgcgcgcccctctgtggggccccgcctgaaacattgggcgtgtgggttgtgaaacttctcgccttcctcgtgtgtgcccctcactcaagaaacacatacacgatcataatgagttagggagattggggagggatgcgctccacatgaggggcgctacaacatgacaggtattatgtgcgcgcacgaatcactgcgcgcacatcgtgttgacactcgcagaccacacactcgtgtgcacacacagcacgtggcgccacatctcatcatggtagacggatacgatgtggtagcccacggcgtagatgtatatgtgcgcgcctctcttgtgtggtgtcccacagcacgcaccttgtgacagaaatactctcaccgccacaaccctctgtgtgggagacgcccccaacacagtgcttcacagagaggagggagtactctccgccctggtgatggggccccacagcagagaagcgtttgtgtgtggaggagaagacgctcccttcttcgtcctccttgtggtgttcgtacgacacactataaattcggcgcagcagagctgctctcaccccggctgttgtcgtaccccacaaccacaccagcagatacacaacagatgatacgcgcacaagggtgtacatgcaccgcaccgctccattgtgtagtgtgcgagtatatgtccacctcgtctgtggggtcccacgcgctactctctgtgagcacatgggcatagaagagagttcgtggagcgcgcgcctccgcgccatgagagctcgcttataggaggatgttcacacagggatttcaccatgaggactcagtgtcacattgcgggcgcacacaggtcacgcattccgcgccctcgcgggcgaccacgcagcccaagacaccccattgtccagaaaaaaac

SEQ ID NO: 492399 - DNA, 847 bp, Homo sapiens
tacatggttgaaaaaatttacccacaaatacctgatcacctgaaagtaaccattacttagaagccactgacaattctcatctgaggtccatgccagcaagcttccttcctccttcatcagtgaagaaacggaggtgtacttccttattgggagactgccagtatgaatatagaggctaatccgacattcactggtggagggaatgacatgtatgcgtttcaaagcatatacaaacgtcatggcagagcaaattgcgtaatagtggtatcccctgaccgttatatgagtagatgccatgcctattggtcgaggccataaaatgatcaattttacattggggcagagaaataacgatctcataaccttttgtccgtgaattatcctgtgctcaggctctatatgaagttatttatcatgccacagagtgatgccctgcatcaatataagaaaagccgtgtattcctttatttcaaacctttggtggcgaatgttgtagcgggtccatgtgtgggctgcttgcttgtattgtgctcctgaaccctctagttttaattggcacacattgcttatgctgtagcaaatctatgccgtgtatttgatgtgcttaaagtcaaggaaaccttggattgacaaaaactcgagccccttctcagtagttggttgctgtagtgtacaaagcgtgttcctgtaatatgtcgctctaatgaactcagaacgtggagtatatggtccataaagacttaaggcggaccatttgtgactgaatactggggacctaaccagtcctagagcacattgggagaagatatatatagaaaatacaatcaatataaaggaaatcatggac

SEQ ID NO: 492400 - DNA, 551 bp, Homo sapiens
  misc_feature (9)..(9): n is a, c, g, or t
  misc_feature (37)..(37): n is a, c, g, or t
  misc_feature (44)..(44): n is a, c, g, or t
  misc_feature (70)..(70): n is a, c, g, or t
  misc_feature (76)..(76): n is a, c, g, or t
  misc_feature (78)..(79): n is a, c, g, or t
  misc_feature (88)..(88): n is a, c, g, or t
  misc_feature (338)..(338): n is a, c, g, or t
  misc_feature (354)..(354): n is a, c, g, or t
  misc_feature (382)..(382): n is a, c, g, or t
  misc_feature (422)..(422): n is a, c, g, or t
  misc_feature (447)..(447): n is a, c, g, or t
  misc_feature (482)..(482): n is a, c, g, or t
  misc_feature (497)..(497): n is a, c, g, or t
  misc_feature (510)..(510): n is a, c, g, or t
  misc_feature (549)..(549): n is a, c, g, or t
cttttaagnaaataaaaagacaaaaccatgcacgtgnactgagnaccgtgtgtgtgaccgcagacaaagngccagngnntggtatggnatccagaagccccttcggtgcagctgttctgcattcttccaaggcactttacagataccttggaatgtatatttttgtcttcttactcagaaggtttgcagtttgtaaaataatcaggattctgctctgtcctgtgtgtggggtcagctccctccacagaggggctccagctctgttggtcacagctgatggggttctctgattgatagggagacgagctcttgagctctaaggaacagtgaggtcgccngttgggagctttgctngggacaccaagcaaatgcatcgtatgtncccttggagacgtttttatgcagctgtgtatgttactatncagaaggagtcgggggtagactttnccgtgtaagctcagtccataaactggttacttctnatcctgggacgtggnctttacattatanggcttggatctgtttctgttgggtcacaggtaggaaatntc

SEQ ID NO: 492401 - DNA, 650 bp, Homo sapiens
  misc_feature (617)..(617): n is a, c, g, or t
ctgcttcacacatttccactttataatggcatttccagaactgaacttcattaagtctttcctaccctaggcaagatgagtagttgactctcattaaatgtttgttgtatttttatcttgagtctaccaacaggagagcaaagatagtacagcatgatcaatttttaagaaaaaataaataaataaaactggacctaggccaggcatggtggctcacacctgtaatcccaggactttgggaggccaaggtgagaggaactcaaggatctctggactctaggagtttgagaccagtctgggcaatgagactcctgtctctatttttaaaaaattaataaattaattatttttaaaaaataaaaaaactagacctagtgaaataaaaggaaatgagttaaaaggataaatcattaacttcgtaatttaaaactgctaggttttttttaaatttttatttattttttcactctcactttgtagcccaaggctggagtgcccctgcccaaatttaggttcactgcaacctttgcctaacagttcaagccattttcctgcctcagctccggagtagctgggattaccaggccttggcacccaacctggattttcctgatttnttagggatgggtttttccatgtttgccggctgg

SEQ ID NO: 492402 - DNA, 207 bp, Homo sapiens
cagaagtactgccgggagagtgccgggctctcaggaagcagcaggcacgtgccacggtggaagccagctgcatgcgcagtgtgacggaaggaggcccttactctctccttcttgttccatgggcaccatactacgtgcacgcctgcagcctttgcgctgctcgctccacgcaagacggtcgtactcccttggccgagttcgtcccag

SEQ ID NO: 492403 - DNA, 857 bp, Homo sapiens
tccacactgaaaattccattgtttagtgtagccaccttcggtcaatgatcttagctagattttcttgataacttgtgcttctctatcagtatttgctgcttcaccttgtacttttatgttatggagagggcttcttttcttaaacctcatgaactaacttctagcttcaaacttttcttctgtggcttccttacttgctcagccttcatagaatggaagacagctaggatgttgatctggattgggcttggccgaagggaatgtgtggctggtttgatcttctgttccgactactaaaactgtctctatatcagcaataaggctgtttaactttcttacccttgtgtgttcactggagtagcgtttttaatttctttcaagaatttttcttttgcattcacaacttggctgttggcacaagaggcctagctatagatggcctgtcttggctttcaactaagcttaatcatttctttttttttttttatttttagggtctttggagaaagtgtcttccgcttgtgtggcccaggactggagtgcaagggcgtgaccctcgggccccactgaaacctcgcgacctccccaggtttcagagagatacctccgtgcatcagcctcctgagtagacggggatcaaaggtgcactgcaccaccggccccgggtaaatttgacaggatacaaccagaagacaagggtacgggccgagtggggccaaggcggactagacacggaacatcaagcgaatgggccaagccggggcacccattaacgtgcggaaaataatggattcgagccccacgacctgagcttcaagagtaaccgtacgagcatgacgaaaaaaaggaaagaacaa

SEQ ID NO: 492404 - DNA, 1035 bp, Homo sapiens
ccatgatctaggtgtgacgtgggacactatgttcgtgatcgctaggttgaagagtcatgaccaggatctgttgatgccacctatatggtttaggttttccattataggctcgagaagtgaggcttgacaggccacctcggagaggagtttcgtcatcacgtgtgtgttagccgagcggggatggggccaatttgctcgtgaacgctgagcatggaagtagaggtagagagagaggtgcacaactggagcaaaggaaagcggtgtaggatgatatagctcgtggactcgagttaggccagtgcagtacacgttggtcaggtggtcgactgcaagctggaccttttcgacactgccagacatgcagcgaaagggaaagcgttcctgtacgccccctacaagcggccaggacgcaggctggtagagcccgtaatccgtcgattcgtgggactcgctactgaaggagacgtgtacgcgcgtgcaggacgctcgaggtggtcacgcttcgcatgcatcgggatgcgtgtcggtcttggcggtcgcacggtgctggcattggctggccgtcggtgagatatggcgggggcgtgcgctcggttcccagtcttgcgacgaaaggacttcctctgtgctccacgtggatcgttggttgcacgaggctcctagagtgtctggaaccccgaagggggctccgtgctgtgtggccccggcgtccctcggaggtcaaccacccttttgccttcgggggtgtggtggcggcacgaagatcggttatgtggtagcacggcgttttgggcccgggccactgggtgccacttgggccgcgcttatccgtcgatgttgtccaagtttggtcctccccaagtgggcggagttgtccccggcgtcgccgtgttgtatgtgcgtgtaccgcaacgactcaactggtgtgggacacgtgcgcgggcaagggtggcattgtaggggtaacgggtgggggtggcgtgtggacttggttgggacgctttttggtggggtggtggtagccagatggtgtag

SEQ ID NO: 492405 - DNA, 736 bp, Homo sapiens
atgttggttacattaatactaactaagagttcattcatttggattatggtgaagttggttaattaatggttctcttagtgaggttcctaggtatctcgtaatacgatgaattggggataattacatttagttgacagtctggcgttagccgatctgggtggtgatggccattatggagagtttcgatgtgtcattagatggatttagataggtggagaggagtataggtcagggtattaagtaggaatgtccctgagtttgggtatgtctgatgttttcttcatggttagactgggattatgggttagggggaggagagtcacagagataaagtgccgctctcattgcatcatatcaaggggaaatactatcagtacggcttatcactgatatcgttaacctcggtcaccaggctgagctagtgtatgccaggtttctttactggtatagttttcccgtactcgtctttctggaaacaagtcattaatcgtagagcacactcagtaggtctgttctccttacaggggagctgtctataaaattatctggaattcttctgctatggatagtcttttatttcttctccgttatatatttattcaagtcatttcatccatatactgcctggacctcatagcatcggccattgactacctcggggttcactaatcctataccacctttcattcattagggtgggcccaaacttctcctagccaacaggacatagaccagt

SEQ ID NO: 492406 - DNA, 929 bp, Homo sapiens
agcggactgctgccgtcgccgccaccgaagcaggtcacagcccctcgaggcgacaggggccccgccgaaccagagcagtggtacaggcatggatgggcaagaacatgcagcgtatggcatgttcctacctcttgtatgtactttgtttacttacagctggactgtggatagtatacttcatagctgtggacagcatgacaacaaacttttaccattaaattcatgctgaaaggaaacctggtgtgaagcatgcaccatatataagcattgcaggtgatgatcctcctgcaaggctgatgtgtaaaagtcaagttatgaacatggcagccttcctagccctttgtggtacgctgtgactgcagctatcatagcaatttgaaaaccgaagaggcttctaaaaccccgtgcgctgcaatatcacagttgccatcggtgcgctcctgtgctcatgggcattcccattcgcaaaatgacccttacctgtgggtacacttcacaccacgcgttcaacaagattgagtgcaacaacacatcccattaaaccggtctgtgcacactatcactgtgaaccccattctgagaaatctcaggagcaaccaattagaccccgtgacatgacattaccaagtgaccttgcgcctagcaccacaccatctcaaagcggtgtcacacccaattcccaacgaaaacttcccacctgggggtcagagagaacaactactcctggaggacatgctacccaagcatgcgcagtgctacttacccaagcgtcacgggcccattcactaactccgaacctgtcctttcacaggaggttggtggtatccactacctaatactttaccattcacctatacagagtggcccccaaaaacggcaacgttaccacccattagttcattcgccagcaaccggggggagtcccccag

SEQ ID NO: 492407 - DNA, 162 bp, Homo sapiens
gcatgcttgtacttgcggtttggttcaccgcagatcactctggaatgacacggttcgagacaacgtgactttaatgggagggtgggtgggccgcagacaggctggcagggcaggtgctgcgtggggccctctccagcccgtcctaccctgggctcacatggg

SEQ ID NO: 492408 - DNA, 256 bp, Homo sapiens
tgatgcatagcaagtacagaaatttttatggccaaataattacaccactatatccatagtaccgcatttggtttatccactcatctgctgatcgttgccccctcttgggtattatgagtaatgcgtatgaacataggatgtacactatctctcttgtaagtccctatcttacggtcactttagcggatacatagtccagggagcagacactacttagatcacactatgctacttgaacacttctaatacactgagg

SEQ ID NO: 492409 - DNA, 251 bp, Homo sapiens
gagtgtcttcaagagttgtcatcatgtcatttaaacattttcatgatggatgctgtatcagtccgttctctcactgctctaaagaactacctgaaaattagctgggtgtggtggagggtgcctgcagtcctagctactcaggaggctgaggcaggagaatcacttgaacctggaggtggagattgcagtgagccaagattgcaccactgcactgcagcctgggagacagagtgatactcagtctgaaattt

SEQ ID NO: 492410 - DNA, 680 bp, Homo sapiens
aagcgctgtacggtctggaattttgggatcttgctgctgaccatctaggctgggctgcccgagcctcgcctcagccccatgatgccctgaagccccaagcatctggtgcctccactatcgatgactgctgactgacactgaggactgagactgaggttgagttctgtctgccttttgttcgtcatttaggtactgagaggctggaaaatgcaccccaagagctattaccgagactggagtcaggagagagcaggaggccctcatgttcaccaggtaacaaagaccacaccggccactggaggagggcaggagcagtcctccctctgaatggctgcagagttaatgttcccaagcccagatccccatttcgggggccttgggagagttaaaggcacctgctggttccaggacctcgctttccatctgttcttgttgcaatgccatcttcaaaccgtattatttattgaagtagtatgtacagttaaggggctggagagagggagcttgctgacctcctgccttgctacactaatgtttacagcacctaagacttagcctccagggccaccacctctcccagcatgatggtgagcatgacagtgtccacaggattccaaggaccatattgagattggaagcatacactcaaagacaatccacaacaggactcttatgtccca

SEQ ID NO: 492411 - DNA, 166 bp, Homo sapiens
attctggactggtttgaacgagtaggaaaatatctcacactcttataaactgtaaaattcacccttttaaagtgtaaaactcagtgatttttagtatattcacaaagttatgcattcatcattactttctagttccagagcattttcatcaccccgtcgtgtggag

SEQ ID NO: 492412 - DNA, 687 bp, Homo sapiens
  misc_feature (388)..(388): n is a, c, g, or t
  misc_feature (440)..(440): n is a, c, g, or t
  misc_feature (589)..(589): n is a, c, g, or t
  misc_feature (596)..(596): n is a, c, g, or t
  misc_feature (644)..(644): n is a, c, g, or t
tgtgatgcactccagcctgggagacagagcgagactgtctccaaaacaaacaaacaaacaaacaaacaaaaaaaccctgtagcttgggatcagccttctcttctgttgtttttctttaaaaaataaaaattaaaaataggcttcaagtgatcctcccgccatgacctccaaaactgctgggattgtaggtgtgagcactgcacccagccgtatgtttttttctacataaaaaacagcacaggattatcttccaaagctaacaaatatgttcaaataaccacaaccccacccctgctccttggaggacaacgtgatcactgtattcagctctgtcaagaatggtccaggttcttcataaattccccaagtttccaagtagttctttaanagcagtgtgaaaacaagactaatgggacccttcctggttgaagggaatgtangccaattccggcttggtttaaggtatttccctttccaattcaatcccccaatttccccggggaaggggtggtttaaacccaaaagttgcaaattaagggagaataatttgggtggaactggcaaaaagttcccccctcaaatggttccnggccaanttaaaataagtttaaaagggttgattcaagtggattctcccaggcaanttttcaaatccggggaatgggaaaaagccccccaatggttaac

SEQ ID NO: 492413 - DNA, 893 bp, Homo sapiens
cgactgccacccccaactctggccccaccacagccgccccttcctgaaaccatagagcggccgtgtgggcactgggcgccatggtggctcgctccagcgacctgccctatctgattgtcggggtcgtcctgggctccatcgtttctcatcatcgtcaccttcataccccttctgtcttgtgagcagcggcctgtgtctaacgcaacaaacatacaacagagcctgggttttcctcgaagatgcccttccacccgtccatgctcctgtatactataggtgtccacttggcgaggatctcaccaggtcctactcatagccatgtggtacagccctacctcagtaggcatcagtggacgggcctgtgctaatgggatccacatgaattcggggctgcccctcggactgcagtgggctacccgtggcatgaagccccagcagcactgcccaggcgagcttcagcagcagagtgacaccagcagcctgctgaggcagacccatcttggcaatggatatgacccccaaagtcaccagatcacgaggggtcccaagtctagcccggacgagggctcttacttatacacacgtgcaccgacgatcgtccacatcaccagctgctgcagccccatcacgacatgctgccaacgcccaggagcagcctgctgctgtgggccagtcaggggtgaggagagccccgacagtcctgtctggaagcagtgtgggaccctccatttcactcagggcccccatgctgatttgggccttgtgccagttgaaagagggtggacaagtcctgactcctgccaagttgagttggacggagactgggtgtccccagcaccccgatagggggccctacgtaggaccaggcaacctggaatgccagctctacacgg

SEQ ID NO: 492414 - DNA, 218 bp, Homo sapiens
ctggcactaaccttggtcgaggcgttacacagttggagcggggcgaggaggttaccccgccgcggcgtcggcatgatcgcaaagtgccggaccgcgaaggtacgcggtaagcgcggaaaaccatctcaccgtcccaccgaaccggatgccgaactcctgcacccgagacgaagccgcgcaccacaacagtccgacgaggaggtgctgggcgaggaaca

SEQ ID NO: 492415 - DNA, 1566 bp, Homo sapiens
  misc_feature (1155)..(1155): n is a, c, g, or t
  misc_feature (1277)..(1277): n is a, c, g, or t
cccgctttatagtagtactgcgtgtcgtgtttatattactagtataatgaaggttgggtggtactcctccctccccgcaggtgtagtattactctcctcttcgaaggagagaggcagtcttgttgttttctcacaccacacagctccagctctgtggtgtgtaccacacctgttgggagggcatgaggcccgtggtgattacaacacaaggggggggcttctattgggtgaaaacaaagacaggtgtttccctgtgtagataaattatatttgtgggtgggagggattactattgttcgtgtgcccataaagaggactccttaagaccggggcaacaaaaagttgggataatctcacgcagaaaggggcttctttctaataattattttttcccccgggggtgttccacgacccgttgttttaaagcgcctcttccccgtgtctctttgggttatcaacagaagagaaaatattggtgtttccacccgcccccacggctctgtttctttgtggttcccccgagagccccttatctgtcccccccggcccccccccccgtgttttaaattccaaacgcccccggttttaaaagaaagagcttggagaatcttgggtgtctctcgtgtgtggcactaatcatggttaatattttataaaaaaagggggggttattaaaaccttctctgagcacaattcgcccccaaggccctctttcccaattttattatgcgcgtccccaaaatttataagcggctctctctcgggtgtataaaaagggtgtttatacacacacgccctctagatgtgtagataatattctctataaggtgagatccccccccgcccccccctgagatgccacagggagacttttataggctaaacttctttttgtgctataaaaataagccactatatgttgaatgtgtgttccacacactctacagcggccacttccacgagtttctttgagagagaccccccccccggctgtatttttatagagagtttttccgcgcgtttgtatacataaaatggtgtttttacccccgccactgtgccgccctttcactcttaattttgtgtagacccacacaaaataataagagtggaattccttatatgggtgagatgtttttgggagattataagaanaatttttgttgtgtggttggaaagagttgtgctcttgtttaaagagtgtccacacttgggaatatttataggggacacctggtgtccctctttgtgtttagaatattttagagagcccacangagaaagagggctttattagatgttttagattattgggagacacctcttgtgaagaatatagaatatatattttccgcgaaaagaatagtttaggatgtttaaagatttaatattttaatattttaggaaaaagaatatatagataggcccatatgggaatatagatccaccacatagaagttctttctcatacccactgtaggggttttcaccacgtggtttattttgcccccggtgaatagtgttaaactgttgggggatttcaccaaaaaagattatggattccca

SEQ ID NO: 492416 - DNA, 175 bp, Homo sapiens
ccaggggcgtgcggtgcacaccgggatgctcaaagataatgctatgcttggaatacctgaagatagatcaggacctgcaaatgtatggaatcaactatttctagatagaaaacaagaaaggaacggacctttcgcttggaggtgatgccctcggactgaatatttatgaaaaaga

SEQ ID NO: 492417 - DNA, 516 bp, Homo sapiens
ggccggaccgacgggtccgcacggtgtagtgacatgcagcaggtctctccttatcaacttaatcatgactgttagtcactacatccagacagagcataacatcagtcagtgataatagccttatcttatctaaagcatcagaagcattgaaatcagttctctcaggaaaatctctttatttttatacaatgaattgatgataagtttcatcattctgttaacttcggcttggaaggcaaacttttccgacttctctctaagttctcttatttgtgatgcatttaatccatccaactgaatagcttcttcctctctctgtactacttcatcatccgtccttgatccttctctacttttacccagatcctcttctactgtaccatccacatcaacttcatcgtcagctctgaccgacccgaaggtcagcaggacgcagcagaggcccagcacccacagggccctcatggcgtgcggccggtgagtctcaagtccccttcgatcgcagggacccactcg

SEQ ID NO: 492418 - DNA, 417 bp, Homo sapiens
  misc_feature (347)..(347): n is a, c, g, or t
cgaaaagcagttttcagccgcttaggctatatttgtttcaactccactctgaggtgtttgattggaattattttagagacttaagttctttccattttttcctaacaaaagttcctgagtccagtatttacaatattacagcactagcagatcagtgtctacaactcatctttttctgctggatcctcttcaccagttgggggagggcctgcacttccatagagtttgctgataattggatgaacaatttcttccagttccttcttcttagctgtgaagtcttcaatgtcagcatcttggtggctttccagccattcaatcttttcttctacagctttttccatggnctccttatcttcagaggaaagtttacctcccagcttttctttatctccaatctgattctttagagaatag

SEQ ID NO: 492419 - DNA, 359 bp, Homo sapiens
  misc_feature (227)..(227): n is a, c, g, or t
  misc_feature (230)..(230): n is a, c, g, or t
  misc_feature (233)..(234): n is a, c, g, or t
  misc_feature (236)..(236): n is a, c, g, or t
  misc_feature (240)..(240): n is a, c, g, or t
  misc_feature (248)..(248): n is a, c, g, or t
  misc_feature (263)..(265): n is a, c, g, or t
acgatccttgatgaatgtgggtgaagtctcttcaccattccttccatatcagtgtgccccccatacctactccttcaccctatttctcctccccccatctattcacctcactaagagacataacctcaaactgtcctatatgctctgttacttcctcccaaggtgccctccactctccctccatccctacacatcccctcagaggaacactcccaggggaggactgncanatnncntcanccacatcnatctaatccatccannncatccatcccatccatcaatccaatccatccatctaatccatccatccatctaatccatccatctcatccatcccatccattgagtccatccat

SEQ ID NO: 492420 - DNA, 668 bp, Homo sapiens
ggggatccactgcaggaaaagcaaaaaaggaaaacttcatttaaaagaagcaagaagtaaaatgggacaatattgggaatgtttaagtctctgaaactctgcgactgaaaagaaaataagatatgattacttaagcttaagattctgaggcataaagaaacattaactttggagtattcatctagactactgaatatacaagatttagagagacacagtggttttcattgcatggatcacgagatcacagtctttgctttaacatgtcataatccctatgggttggactcgttgactgtatttttgtaaaggttgctcgtcagttgaagcctgagccttggaattcatggagtattctaaagactaagcaaatgaaaagtatattcctgttgaagaacccagcggaaatttgtacagcagagcaaatgtaacatgtttctttaggggtatgatctgagaacaaaggaaatattgataaaaccgtccaaagatccagataatgttgcaagagtaaatgggaggtgatagaggttataatctgaatcccaaaggagactgcagctgatgaaagtgcttccaaactgaaaactaggacagtgcctttacgatggtaagcgttaacagtcccactgcttctatatgactcctttaagtacactgtgtatggg

SEQ ID NO: 492421 - DNA, 1022 bp, Homo sapiens
cttggtggctcacgcctgtaatccagtactttgggacggccaacgactgggaacaatctcttagcctaggagtttgacgatcacgcttaacgcaaccactacgtgacatcttgtactctattacacacaactaaacatacacacgttacgacagtggcatagatgtgcatgcaacatgcagttcccatgctacatcaggaaatgctcacggtgagatcggcaattaagcaccagtgccagtctcgacggcttccaagtcgcagttcgtagatacgtgccaaccttgacactccaaaccatggagtagcagataggtagcattcggcttcattaactggtcatcgatactccttggtgctcaatggtgactacctcctaaacatgggtcacatccacaggggtacgcatgaaaacctttacaacacagacacagaacacaacaaacaaacaacgcggaaacaacaacctctcaaaaacaaagcgtgggccaaaacatacctgcgggagcacactccggcaaggcaacaacagccaacaggacagaaagaaccagagacacaaaaactacacagggcaaaaagagaaaggagcacactacttgtgtcaccaacgactacaatatgatgaggcacagagtaccaacgagaaaacattttcattccctaaaagaggacaatcattcacactaaacacgcggactataatcttatgaagtgccagaataatttttagaaaaaaaaacacgtgcctgacacagcaaactcaaccctccccacacaaaagacaacgagcgtggtggacccccccacgagggacgaacaacatgtgcggagctgcaagccacaaccacaaggacgagaccgcccgaggcagaaggagcaatctccacacacgatgaccagtcacaccaccactggagtgaggagcacaacaacacgtcagcgacacaccacagacagaacatgagggaggggaaacacaacacagaagctagcacaccgcaagcgaagaggacacacaga

SEQ ID NO: 492422 - DNA, 414 bp, Homo sapiens
  misc_feature (11)..(11): n is a, c, g, or t
  misc_feature (23)..(23): n is a, c, g, or t
  misc_feature (69)..(69): n is a, c, g, or t
  misc_feature (178)..(178): n is a, c, g, or t
  misc_feature (240)..(240): n is a, c, g, or t
  misc_feature (305)..(305): n is a, c, g, or t
  misc_feature (364)..(364): n is a, c, g, or t
  misc_feature (375)..(375): n is a, c, g, or t
ttacatatcanaataaagatttngaagatacctgaaaggacttgcattcttacttgaataaaagacatnacagaacgtggagactacagtagcctgagctagaaagaaaaaaatctggctcaagaatgctgtttagtgtttggccacagaattaagaatgaaactggcctggcgcggnggctcacgtctgtaatcccagcactttgggaggccgaggcgggaggatcacgagctcagganatcaagaccatcctggctaacacggtgaaatcctgtctctaataatacagttagccaggtgtagnggcgggtgcctatagtcccagttactggggagggtgaggcaggagaatggtgtgaaccnccaaggaggcngcttgcagtgagcctagaggccccactgcacttcgcctg

SEQ ID NO: 492423 - DNA, 657 bp, Homo sapiens
ggcggtgcgtcgggctgcaggagaagatggcggtctccacaggagtaaaagtccctcgtaattttcgcttgttggaagaccttgaagaaggccaaaaaggagtaggcagacggtaccagttagcttgggcgccttgcaagatgcatgaagatatgacacttcacaaggtggcgacaggcatgattatgtgggccacccatggacaaatttattgcaaccagaatatataagcctgaacggtagaatgtggcaccataaatacccagaagctcctccggtcagtaaagaatttgtaacaaaaccttattatagaccggacatacaaataaatcccaggtggggactgggtgggatgcccgggagcaataccaggtgttagcaaaatgggcacaaattcatatacggcattaaactgttgtgtaccttcacagagctaaagacgtctacagtgatgtccaacagacaaatatgcagcttccacagcaaccagaagggaccaaaattacaagcaataaatttcaagtggcatctcaaaacttgtctaaaagatcaacaagcttactaacttcatgttcaatgtcttgattcaattatcacaatgcaaacgtaccccattacgtaacgagaatcccagctggtaaacaatgaccctgtccc

SEQ ID NO: 492424 - DNA, 100 bp, Homo sapiens
caatcgagcttgggaccctatgcgggagggtgaagcccaccaaacagtgaaccccatctggggtttgcaaggaacaaaatgatttactagtaaacacaga

SEQ ID NO: 492425 - DNA, 125 bp, Homo sapiens
actcctatatgcaaaaatatagccaatatcagttaacgaagcgatcattgtgtagcatgtatgtgctatatgaactaatatgtgagcatgtcctaaccatgccgtttctctgactcacaacagta

SEQ ID NO: 492426 - DNA, 1076 bp, Homo sapiens
gccggcggttaattggacgaggataccaggcggttgggacgtgtacacgtatcctgaaaactggagggcttcaaggctctcatcgctgctcagtacagcggggctcaggtccgcatgctctccgcaccaacccacttccattttggccaaaaccaaccgacacccctgaatttctccgacaaatttcctgccggacaaggtcccagctattgagaggtgtgatgatggattctgtgtgtttgagagcaacgccattgcctactatgtgagcaagtgatggagctgcgtgggaagtactccagtaggcagtcgatgcccaggttggtgcatgtgggtgatggctttgctgattcctgatattattttgcccccagccagatagctcgtgggtgttccccaccattggggcatcatgcactcagcaagcaacacagtgccatctgagaatgcaccaggaggaagtgagggcgaattctgggggctgttggatgcattacttgaagacgaggactttgactggtgggcgaacgaggtgatccattggcctgacatcacagttgtcctgcgccctgttgtggtcgtctaatacagcaggctctaaagtcgcttctttcctgacaggacttacccagagtaccaaccgtttggttcctcacctgtattaaccagcctcagttccggtcgtgtcttgtagggaagtgaaactgtgtgagaagatggccagtttgatgctcatgaagtttggcagagatccaatcgagaaaggacatcggcacggaatgagaggttcacgggaagagaagcgaaggccagctgaggggctgaggggaacagggcggtggcctggatcctgagaggagaggtgatgtgagcagcgctggtggtggccacggcagcaccttggtacatgcagagtacttggtcggtgattagggggtacacgagaccccgggcggccattccggcctgtagggggccggcacagggtctgaaaccacacacggcgcagtccaggcgcaagacgtcgcccttgcacctcggctcagccgtacgggcagggaagcctgcacattcac

SEQ ID NO: 492427 - DNA, 404 bp, Homo sapiens
aatgggagcactctgctgtgacttgtagtatattatcccggcgagacacctaaagctggtctgcggcacgttgggatgtgctccttgtcgggctgtagcacagatggcctcgttgtaacattaaactggagatgctggtactgccttggcagaatattgaggaggtcaaaaggctcaagagtgggcatgtagtgtgtatctcttatgacagatcagaagagccaatcatcataccatgatcccaggagggccgagaggtcgcttccttcactaaagggataagtgcatctgtgagagggcacagcgtctttgagaagctcagtggttttgtcctctgttggctggagtagacagttagagacactgccacgccatgcgttgatctgccaggggatcctctaaag

SEQ ID NO: 492428 - DNA, 818 bp, Homo sapiens
taaagaacccttcatcaataaatggaaacctacaaaaatagtcaaaccacttctacaaaatgtcagtatcaggcgggggtcttcaaacccaaagtgattgttgcggattgttaagaggtgaaatattagtgtggcggatgaaccagataggtgaggaaagtttgacccacttaagtgacggtgaagctccggtggaaacccgtggtggctacaacaacaaagtgttgacccgataaatcccgttcggaaagtgggtgaagggagactcgaagttacctctgaagagcctgtgtataggagggtataaaattagaagaaacccagtataaaaaatgtgtaaagtgagccaggtgctttgaacatataatatggggatatacgcggatgtgatattcactaattatagcacctcagtggtttgacgctcccagaggtgaatgtgaaaaactccctggaagtgcgcaagaataataaccgagcagtgtagtctcagcgagaggaggcgcatcttctcagaggagaggaattatcacacggggggagagtatagccctgttggggggggggcccccagaatgccccctcctcaaaaatggggggagggggataggggagcttcaaggcgtcggaagtgtgggtacacacaggggcctcaagaaaaaaactctctgttcaaaagaaaaaaaaaacttcctgtagcgttaaataaaataaggaattaatcccccgaaaatcaaaggaggccattttggggaccaggttgggtattcatggatagcccatgggaaatgaggcttaacacggtgatacaatcggcc

SEQ ID NO: 492429 - DNA, 188 bp, Homo sapiens
aaggcgctgtcggaccaggaagctggaatggggccagaaggctgatgtccctgcaagaatacaaacttgactggatggtagcagtagaggagctcatcctgggccaacccctagactgcccgatgtccagcataacaggtatagtccaccccgcatgagctcctcctgactcctcttagtcagtttca

SEQ ID NO: 492430 - DNA, 327 bp, Homo sapiens
ttcatattgtaacaaccagcccatgaccctgaacaggggcctctcggacctcctaatgacctccggctagacatgtatttcacttccactccataacgctcctcatactaggactactaacctacacagtaaccatataccaataatggcgcgatgtaacacgagaaagcacataccacggccaccaaacaacacctgtcccaaaaggccttcgatacgggataatcctgtttattacctcagaagtgtttttcttcgcaggactttttctgaggccttttaccagctccgagccttagccccttaccccctcaatttaggagggca

SEQ ID NO: 492431 - DNA, 831 bp, Homo sapiens
ggggatagtgaaatccagaaacagtttgaagagctctatagaccttttagaagatccttatccgatggtccgttccacagggatccttggtgttcgtaaaataacttctaagtactgggaaatgatgcccccgaccattcttatgggacctcctgaagaaggtgactggggaactggcatctgacacgagctcagctgatgttcgttgtgctgtctttaagtgtctgccaatagattttggacaagcaaactgagccacccatgtgtagagcagactccttccagctctcagatacagtctccacgacagattcggagaaagtgagggtagctttgtggacatgctcgttgccgatcacagctgtgagggctgctacgtccggaaaatatgtcccactggagcacattctggttcgtctggcaacactgacttctcgacctgtgtctcggcgcctggtgagcctcatctcttaattcttctcctgcctgtgacctcagccggcaggcggtctggtgcgagcgctgtgtcaccccctggtgcagatgaaccaacgccgccagccaggaggttctatcagtacgcccacgaacacaccgcctgaccaagattagcaagctgatccacgttatcgccatcgcttcaatgcctgtatccagagggcagctgagagagcctccaaggacgaggaggcagaggcggacgggccaaccgcacgcgcccgcccgcccccccccgcgccaccacgcgccgccgcccgccccaaaccccggacccggccccttcggaagtcgcaccacccgccaccccacccgcccggcacaacccggccc

SEQ ID NO: 492432 - DNA, 430 bp, Homo sapiens
tcatgtggctttatgaaaaacaaaatatgttggccacatgacagaattcgaagtcagcaaataaaaagaacataaaattgtgttttaactcttttaagatttgatatatgaaggaaaaataggtttaaatgcacccaaatgagaatagccacaataacaaggacaaaatcaaagcaaaatacagaaggaaaaagacagcctatgaggaggagaattagactgtttttatcaatgatacaaaagagattaaaaagggggaaaaaaatcaggcaaacacataaataatctcaactataaaagattaatcaggccagctgtggtagtcatgcctgtaatcctaacactttgggtggccaaggctggaggatcacttgagcccaggagtttgagaccagcataggcaacatggcaaaacttcacttttaccaaa

SEQ ID NO: 492433 - DNA, 229 bp, Homo sapiens
ggcagaggttgcagtgagccgagagcgcaccactccactccagcctggacaacagagcgagactccgtctcaacaaaaaaatgtttttaattagccagctgtgatgatgcatgcccatgtcccagctacttgggaggctgaagcaggaggattgcttgagcctgggaggtcaaggctgcagtgagctatgattgcgcccctgcactccagcctggacagcggagggaag

SEQ ID NO: 492434 - DNA, 906 bp, Homo sapiens
gcaaatcaaaattatagtgagttaccactttacccccactaggatggttaaagtctaaaagacagtaataagtgtggtgaggatgtggagaaattggaacccttatacattgctggtgggattgtcctggtacagccatttggaaaacagttcctcaaaatgttaaatacagagttaccattgtcccagtatattagttagggttctgcagagaatagaaccaatagagggtgtgtgtgtgtgtgtgtgtgtgtctgtgtgtgtgtgtgtgtgtgtctgtgtgtgtgtgtatgtgtgtgtctgtgtgtgtgtgtgtagagagagagaggaagggacagattattaagagaattggcttacgtgatgggggagactagcgatgttcaaatatgctgcagggtaggaccagcagggtgtagacccagagaagcatcgatgtgcagtgagagtccagaggggagtgctggtgtcagtattccttctctcgtgaagagaggtcagccctttttctctaaagggccttcaagtggattggtgtgagcgccccactcatgaagagtactctgctttatcagagaagtactgatgtaagatgttactccattataaaacacccttgtgtaacggacccccatatgttgtgtgcccaccgacgtcttggtgtggggcttacgccaaattaacaacataaaatagagcaccctacatagagattcacccagggaatttctcagggtacttgaacacgtggtcccttttgttaccccatcacaatttgcgggattataccaaaatcgaagggggaaagcccaatccccccggatataggaaaagggggcggcacacacaagtgtattgcgcccaaggggaaatgttgcacgttggccacaattgagcaacgaaatc

SEQ ID NO: 492435 - DNA, 132 bp, Homo sapiens
ggtgactcttagaggatccctcctccagcgcaacctggtggtcccccgtctcccgggtaggtcaccactattgatgccgaacttagtgctggacacccgatctgggatagctgcactacagcccagaactcc

SEQ ID NO: 492436 - DNA, 151 bp, Homo sapiens
  misc_feature (121)..(121): n is a, c, g, or t
tctctgagtatgacgggattaggcgacaccctcttttcgccatcgcaagcctgctggaatactgacgtagccaggcttcttcgggtctctgaaggcattgaagttgtcgcgcagttgtttngccaactcttcgcggttcttcaacgcgtac

SEQ ID NO: 492437 - DNA, 129 bp, Homo sapiens
acaccttcgaagctagatacaaaacttcacacaggaaaaggcacggactcatggggagactggaaaggatccatcagccattcagcaccaatgcggacgagctccagccccatgggacccgttcacccc

SEQ ID NO: 492438 - DNA, 339 bp, Homo sapiens
  misc_feature (319)..(319): n is a, c, g, or t
ctcaccacaaccttgaactcctgggcttaagagatcttcccacctcagcctcttgagtagctgagactacagggcacaccactttgcccagctaatttaaacaattttttgtagagacaggatcttactatgttgcccaggctggtctcaaactcctggcttcaaatgatcttcctccccagtctcccaaactgttgggattacaggcatcagcaccatgcccagcctcactgttctttgattttgctgttttcccaaagacaaagtttggtagacaggggccaatgctttgctaataaattactacgaaacactactnaaagaattcttaccaaacag

SEQ ID NO: 492439 - DNA, 144 bp, Homo sapiens
tttcttgccacgacttgggacacggctgcgtgtggctccgagcagtcctctcagcccacttgcacggtgggagtagtggattgatgttggcatgccgttttgagactgagaagaataatggggcaggctacttttttggagcat

SEQ ID NO: 492440 - DNA, 213 bp, Homo sapiens
ttactagtcatcccagccatctcagcctggttcagcaccctatgcttggagaggtgctatcatcatattgaaagaaagaagcgcactctggttatctttgagtagtcacggtacttgcactattttctttctatatttttatgaggcttatcttacttcgtgtctttgagagttgctgacctattgagatgggttgaattttatttagaacag

SEQ ID NO: 492441 - DNA, 435 bp, Homo sapiens
ttaagagaatatataaaaacattagggctgtgattatgtatacagcagtatacccggggaacaaagatacagtagtagcgtgggaactactgacagtgtcaagctacccggccagtgactgagcagtagtactagcagcgctccgtgcaaaaggaacgtggcggtgagcaccggcctagtgtgcgccctgcggccaattagaacaccacctgacggaggagggttcctagcgagcgtggagctcctgatggtaatcagctaccctaggtagtggggtcttgcggcagcagctgccggaaatgttaggcaccccaactcaagtcccaggccccaggcatctttcctgccctgccttgcttggcccatccagtccaggcgcctggagcaagtgctcagctacttctcctgcactttgaaagacccctcccactcctg

SEQ ID NO: 492442 - DNA, 478 bp, Homo sapiens
gttggaatgtgggtatggttgctggaggtgaaatagaaattctgaaccaggagcacattttggaaatgaggtcaccactgcacaacaacagagtaaaagaagtctgtgtcctgaaaccgagaaacaccattccagtcctgtagctcctgccttattttaacaagagacagaaagaaattcctattttacctaaggccctgttagtttgagctttctctaacttttggctgatacttagcaatcagcaagaaactttatgattttgtttttgctcctaggtctacctgaatgaaggaaaaagactgtcccgcgtattaatttcaactagaaaagagataaagcgaattaattttaaaaatatttctactaacctctagattcagaatatacattcacagcaggctgatttatgctgtgataagaagcaatctccaagtttccgtggctcaacgcaataaatgtatacctaactctaaaa

SEQ ID NO: 492443 - DNA, 556 bp, Homo sapiens
gctgtaggagtacggcacgagggggagttctctgtgcgcgtgcgcgttccctcttctccgcgctcagggtgtcacaggcaccatggcgtattatgggcagcagagcctgcggcagcattggcctttgcagcggcggcaggagcaccaggctctgcagcggcaacccccagacggcttaagccatggcgcttctcacgggattcaacaacaacgttgctgtgaccgacaaagacacctttgaattaagcacatttctctgattccaggaaagcacacggacatgagccaaatgagctttctgagcagcgaggtgttggtgggggacttgatgtgcccctttgagcagtcgggtttgggggctgagagaaagcctaaggctcttaaatggatacctggagggggccaagcacttccctcaagggttctccagcgacaaggcttagggggccttcttccaatggctggctgtggatgggttgggcaatgcctgcaacaacagcggaggaggccttcttcgggacagattggatgttgtagtggaccatgtcagatgcct

SEQ ID NO: 492444 - DNA, 151 bp, Homo sapiens
ctgcattattagatctgatgctactgatgaatttgatctacaaatgcaactaattagtctgtgagatctccttgagattcagagaaggaacatgtgatcagtattgatccagagatctaggctgatgatcactgtccgatcaatatctcag

SEQ ID NO: 492445 - DNA, 1210 bp, Homo sapiens
cgctgggcgaacgacgcgtccgcggactcgtgcgcgtagaaccagcaattgtcctagtagtgcaccctccttgtgcctcacccagtgggctgagcgcctagagtgggtcccaagcaaacctgcgctctcagtgcttccatgtctccctagtgcatgcttctccatacaatacttgcacatgtgtgtgctacggattttgcacatgacaagaaagtccgcagcgtggccctccatgtccattgtgtaaaccaccgtattcaactatatcttctcgacgaccttgagcctcaagtcatgaccatgtcagcctggggccaccgcagtgctgaccccctgcgaagacctctagcgttttaacgtcaaattaccctacattaaagttataagcgtaccaaaatttatgctaggatcatgtatcaacctcatgatgagcaaaccctagtccataaaatcgttgagtagatctttcacatacttcctacccttatacaccacatagaattctattagcctccagaaaatcgtatggtttaggcctttggtaaccaaccatgaaggccaccgagcaagttgggcaaaagagtacgttgaatcggtgtctctagagaagcctatccagcgcggatataacatctatagcacttaccaactccgacggccaaccataatttaggacaggacttttgggactcgtaggcatactagcagagagaggcctccgtgataaaggggcgcccacgctggaccggggcaacgaagcgttggccctcggtagcgcctccatgtcgcggtgggttataccgtaactcaaaccccatgtcgccaacaaaaggggccattacgttttggcgtgattagagttatgtgactcggttataggctgttgacacaacacccccgcgttgataaagacacggcactccatattgggatggtggcaccagagaaggcgatgcgcccattcaacgacaggggtcatttgccacggtgggcaccaatacaagagcggggtgcattgactagaacagtgctgtacgtgtggacttcgaacacgttgttgtcattcataccggagagaggagcacccatgcaggggtgaagttgatctagacggcgcgaaacacacgtctgggcagcacacgatggggcattttggatggggaaaacataccttagacaggggtcaaattggaatgcccactaccggagg

SEQ ID NO: 492446 - DNA, 298 bp, Homo sapiens
gcagtacatatgtcacgatttgtctgtaagaaactatttatgtaataggtaatgaaactgaaactatactgatgcccattaaagagatccagattcattcaaggtgatcttttctctacctgtacaggcgtgtaaacttttttgtgctttatattaaacaaaagtgagagccactgattggtatgtacacacaaatttgtgtctacaacagaaatggataccatcagtgctatataccgtggaaacctaccttaggacaacgacatgtttaccatgaatgtatattttattttacttt

SEQ ID NO: 492447 - DNA, 456 bp, Homo sapiens
tgacacccattcgagactaccataccattcccaccatcacctctaccatcactaactgggcctcagggatagcagtcaccgggagatgaggtccggggcggctctgccccttctatccagcagaagcactaatgtccggagacccaagctcactttggatgactcggtccacaaggctgattataacatgcaagaagctaaaaagctgaagcacaaagctgatgcacggtccgagaaattcggcaaagctgtgaataatgctgatgccgccctctccttcactgaatgtggcaatgccagggaacgcgaccctcggaaagcaaagtccccatacaccatgtactcggagacggtggagctcctcaggtatgcaatgaggctgaagaacttggcaagtccctgggcttcggagggggccaaacagctagcagtactaatgctacggatgttaatcat

SEQ ID NO: 492448 - DNA, 1094 bp, Homo sapiens
acacaggagccaaaaacctgttatatcatctccgatgcaaggggatcaaggtgacggctgaacagacttcccgtctgctggctgtgggtgacatggtgatggccacagtcaacgaaaggcgaaagcagagctcagaaaaaaggtacgatccagcaggtggtcattcagacaagcgaacagtcataccgtagaaaagatggcgtgtttcgttgtatttaagtgcatggagtcatacgtgacacacataacaggcgagcatgcaaaggttctgtcgcagttacaggaccaggtagcacaaggcaggtgtgcagacttgtgggccccggagtggcatccaatgctggcagcatggcatgatgtcgtccaggtagtactttgtaaaaaactaagaaacaaaaggtaatacccgattaaaagatagagaagagaataataaataacatctggggggggatcttagtgacggggcggggcaaaaacacgggggttgggaactgggcacatgggtgcataaagcgtggtactccgtgacccacagattctcgtggtgtcccagaggggggacaagactcgtgccgggctcctcccataataagcggagggcggcattcaaggtgtgcgagaaaagcccgaggggtaaacacaggcgtttaagaacctaggcgcgacggaaacaaaacgcgcacaggcaccgccgagaacagaaaaggcaaaggacagggaaaaccttggacgagacggcggaatgaacgcgcaaacgaggtcacagaaagaaagacatagcgcggaaacgcctaggagcgcttacgcaatggacagaaggacaaagcatggggccgcgcccctgtaggacagcgcagaacaaggagatacattcaccatagaaaaacgaaagggagcgaggaacatctccaggctaaaggttaacctacagaacagggcccagcaaggacactaccatagggacccgcggagagagccactcggcatgggcaatcacggatggggcggccccaacacagggcccccaacgacaccccaaagacccaaagacaacaggggaccatgaggatgggcgaacacgcgacggggag

SEQ ID NO: 492449 - DNA, 292 bp, Homo sapiens
tgctatattttagtagagattgggtttatacctactatttggccaggctgttcttgaacttcctgtacctcattgtgatccacccgcctcagcctctcaaagtgcttaggattacaggtgtgagtcaccacgcccagcccacacatgagttttcaaacattaaaactattacttaatgcccttgtgacaaattagtgttttatgaaaattgttattttatcccacagtacaatagtagtaaggaacgtgtattgttaccttttagtaacttagtgagacacttaagtctctg

SEQ ID NO: 492450 - DNA, 533 bp, Homo sapiens
gagaagctagttaggcacaggactcagagaactgagatcaggtaaacataaactagacgtcgctgattcggataggcaagtaaatagagacgtctaggacagctcggagggatgataggctggtatcgctgtttccagtcaggcagaaagttgcgctttccacccagagcccttctctcctgctgacagtcaggctctcctatgccctctctctgtctccactgatgcagcagccggtgcagcactggcctctggcagacggtagagcttcatggtgcgctgcatggtcatatttctgctcaggtgggaaaacttcacttcaatcagctaccgtgggtttaggtgaccgatgccaatgcctgcaggtgccaacgggctttggtagtaccaccccggtagtgtagactgcttgtgaagatgccctccaggtgaacccgcttggtgatctctcggatcagaactggagcaatcctcttggaacgcagcttcttgtggacacaccggaagtagatctctaccatcttcttctctgt

SEQ ID NO: 492451 - DNA, 890 bp, Homo sapiens
  misc_feature (134)..(134): n is a, c, g, or t
  misc_feature (276)..(276): n is a, c, g, or t
  misc_feature (282)..(282): n is a, c, g, or t
gggtcttcttccttctcgcctaacgccgccaacatggtgttcaggcgcttcgtggaggtggccgggtggcctatgtctcctttggacctcatgccggaaaactggtcgcgattgtagatgttattgatcagaancacggggctttggtgcgagtggacctgtgcactcaagtgacggacgacaggccatagcctttcaacgtgcgatgcagcgtcactagatttcattcctcacagtttcccgcacaggtgcccacacagaagtatgtccgacaangcctgngcagaaggcagacatcaatacaagaatgggcagcccacacgatgggccacagaagattgaagccacgagaaaggaaagccaagatgacacgattttgatcgtgtttaacagttatgagaggcaaacgaaaagtgaggacacagaataatcaagaactgaagttaagaacgcttcaagaaggcagctctcctagaaagcttctcccaaaaaagcacctggtactaagggtactgctgctgctgctgctgctgctgctgctgctgctgctgctaaagttccagcaaaaaagatcaccgcggagtaaaaaggtccagccagaaggttcctgcccagaaaagccacagggccagaaagcagcggcggctccaagaagctcagaagggtccaaaaagctccagccagaaagcacctgctccaaaggcatctggcaagaaagcataagtggcactccatcaagaagtaatagggtcttgtgacctgtgaaaacaaaaagacaaaaccacacccacaggcagcacaaagaaaaaacaacgccggggcgcgtggggggggaaaaggaagggggggtcagccgcccccctggaaggggggggcccaggggaacggcc

SEQ ID NO: 492452 - DNA, 227 bp, Homo sapiens
gatccatcactatgtcacaattggcagcgtggatatcagatacccgattcttcattctgctcagctcacgccggagatgtctgtgatataacactaggttctgcatttaagttgaaggtactgggtcgtcatataaacagctgtgcaagcaagagcacaccagtctaggaggacgcacagagaagggccctgctagtttacttaccaatataccttagcaggtatgg

SEQ ID NO: 492453 - DNA, 383 bp, Homo sapiens
gactgctacagccgtgaacagtcatctgtggctttaactggttggttttaacaggtcgcgagagatatacatgtgatgtatatgtttagatttaagatgtcctaaaaaatgtatatattaagatacacttaacaacatactctgaatataataaacaagatgttggttcaaaaaagggtcaacaagaagaggaagccaagcttcctagcatctgttttggtggccacgcttttccccattaatggtgtgaaagtctgaatcaacagcaaatacagccatacagacctatgtatctgtgtgcatgagtgtgcatgggtgtgcacacagagaagtacatctaggacgacttaagacaaaattatctgtgttgtgttccacaaaca

SEQ ID NO: 492454 - DNA, 751 bp, Homo sapiens
  misc_feature (6)..(6): n is a, c, g, or t
  misc_feature (115)..(115): n is a, c, g, or t
  misc_feature (174)..(174): n is a, c, g, or t
  misc_feature (361)..(361): n is a, c, g, or t
  misc_feature (498)..(498): n is a, c, g, or t
  misc_feature (515)..(515): n is a, c, g, or t
  misc_feature (523)..(524): n is a, c, g, or t
  misc_feature (541)..(541): n is a, c, g, or t
  misc_feature (557)..(557): n is a, c, g, or t
  misc_feature (618)..(618): n is a, c, g, or t
  misc_feature (633)..(633): n is a, c, g, or t
  misc_feature (641)..(641): n is a, c, g, or t
  misc_feature (662)..(662): n is a, c, g, or t
  misc_feature (704)..(704): n is a, c, g, or t
tctttngaaacagggttttgttcttattgcccaggctggagtgcagtggcacaatcttggctcaccgcaacccccgcctcccgggttcaagcaattctcctgcctcagcctccanaaaagccggggttgcaggcgctcaccgccacaccagactaatatttttatttttagtanagacggggtttcaccatgttggccaggctggtcttcaactcctgacctcagataatacacccacctcagcctcctaaaatgctggcattacaggcgtgagccaccatggagcattctcctagtaacattttgctgagtccttttcaaaaagattcaaaccttgtatccaagtctcttaaaaaatgangtgaacatatactcatcgtatgctctccattcagatacactgttgctttatctgaaaaacctacagtaaatgtgaacatgaacttttgttcctaaagcataaaattttaaaaaatgacttaatcacaggttacacantaattttaaaaaaatcnattaaacnnttttgtttggcgattcnaatacaaatacctaanaattttttatctctgttcaaatggtcaaagaattgtgcttgtctataaagccgatgctccnaatttatgaatacanaagaaagnaatttttcaaaaaaaaaaatntctgtttacttataacaattattaaaatcttttaaaaatctntgaacatttccaaaactgaaaaccatgattattttaaggtaactttt

SEQ ID NO: 492455 - DNA, 515 bp, Homo sapiens
catcatcatcatttcatgtcagcatcatcacttcccatgcaacatgggctaatcacgatgccatcatcactgcacaggggccacaggcacttttatgcacccaatggtgcacattttttccagccgcagcacatggtcagaacagatcagtcacaaccccccaatggggaatttaagggggcttgcaaaccatatgaaatagctgccatttgtagtttaaaaaactgtcagccagtttcatcatggttccacctaatcattcattgcaagcacaattattttcttagctcatcaatcaggcttacatagtttgcagtgtattaatagcttttggaaccagtgttttaaacagcatttcctttatcggcacaggcaccatctttcatgcacctgctttctgtttttccaatcatgatcacatagggtgtatgtccccagcaatcaattagtcaaccattcagtcaatgcaccagatcttccgtacatccttatttccatgcttaatgtggtgttgc

SEQ ID NO: 492456 - DNA, 502 bp, Homo sapiens
cggatctattagcaagacaggtggaaaacaggcctctgtgcaaacagccagttgtgaatgcaaggaatagttattgaaggaaattaaaagtgccactcctgtgagcccaagacgtaacagaaagtgacatagacttactgctgatatggacgaagttttagtggtccagacagaagatcaaacgagccacaacattccctttatccaaaaccgaatccagagcaaggccctaattctctttaattctattaaggctgagaggtgaggaagctgcacaagaaaagactgacgctagcaaagggtggttcatgaggttcacaagaagaaaccatctccacaatacaaaagtactaggtgaagcacgcaagtgctgatgtagaagctgcagcatgttatacagaagatctagctaagatcaataatgaaggtggctacactaaacagatttacaagtggaggtaaaacagtcacatcttagaagaagatgtcatctaagactctc

SEQ ID NO: 492457 - DNA, 573 bp, Homo sapiens
caattgattggtgtgatatgtattgttgtggtgtagtgatgggtcccccccccgcgccacgccacatggtgtttgtgtgctattaggacgcgcccccaccttcttatgctggcgcgcgccacacccccctcatgttcttccaaatgatttttttcccctcctgcgttctgattattaattattataaaagatgatggtcgccccccgccgatatttttctctccacgggtctctccgctacatatattatatccctaaaacacatatgtctaataggagagaggaccatacagaaggtcttcctccccccccccgcccccctattattaggtgtatccatagatacatcctcgctctgagcgacactatttctccgacgctatatatatataaatatatctttctagagaagaagtatgtgttgtggagattttaacaaaaaaaccttgtgttgtagaggcaagttgtggtcaacgcccacacgtatgggtctctcacagtgtgagagagatatagaacaatactactccccacacgagtgtggtttcgcccccaccaatgtacagagaaaca

SEQ ID NO: 492458 - DNA, 585 bp, Homo sapiens
gaaatcgtcagagtgccgttccctcaaccggctatctctattcacttgcccctatgccgatcttcttcaggtggcaaaacggttacagcagttctgggtctcatctgttttctccacagtctcaaatgcactgtgtcactctaaactggttaagtttcttgccttcctctaaagcattctcggaatcacatgggcatatgacctaaggaaatcaggggctttgggaagtaaaatggggagtatgtcctggggaggcaaccaacaaggtaaccgtgcagtaagttcttagcatagttctctgtcactttgaaaagaaaacttaaaaaccactgaaaataaatgggtgactctagcagactgcagactactgaccctcaactgcttcagtcactaactggtgattcctctttagttctttccaagaacaacctccttgtgactcatttttagaagaatgacaaaaagaacaggcctacctgtaagcccaacagagacaaggctggaatgactaccagatgcaccagtcatgggtgccatcttgtttctcgtgtggtcactgcactttcatggcattcgaaaacaaaa

SEQ ID NO: 492459 - DNA, 139 bp, Homo sapiens
cttaaacacgtcggggcattccggataggccgagaaagtgttgtggtagggtggggggcatccatatagtcactccaggtttatggagggttcttctactattaggatgccccgacgttactcggattacgccgatgcg

SEQ ID NO: 492460 - DNA, 146 bp, Homo sapiens
tccccaaaaatgtatagtgccttgtttttatgtacagtttatataccgcaaaagtttgctctgcatttttgatgatggtttggaacaaaataaacaatttaactctcaaatagtcaaaataaaaacatatcaatttataataaaaa

SEQ ID NO: 492461 - DNA, 662 bp, Homo sapiens
  misc_feature (8)..(8): n is a, c, g, or t
  misc_feature (10)..(11): n is a, c, g, or t
  misc_feature (14)..(14): n is a, c, g, or t
  misc_feature (19)..(19): n is a, c, g, or t
  misc_feature (24)..(24): n is a, c, g, or t
  misc_feature (28)..(28): n is a, c, g, or t
  misc_feature (34)..(34): n is a, c, g, or t
  misc_feature (50)..(50): n is a, c, g, or t
  misc_feature (56)..(57): n is a, c, g, or t
  misc_feature (61)..(61): n is a, c, g, or t
  misc_feature (65)..(65): n is a, c, g, or t
  misc_feature (67)..(67): n is a, c, g, or t
  misc_feature (70)..(70): n is a, c, g, or t
  misc_feature (74)..(74): n is a, c, g, or t
  misc_feature (76)..(77): n is a, c, g, or t
  misc_feature (83)..(83): n is a, c, g, or t
  misc_feature (88)..(89): n is a, c, g, or t
  misc_feature (91)..(92): n is a, c, g, or t
  misc_feature (95)..(96): n is a, c, g, or t
  misc_feature (98)..(98): n is a, c, g, or t
  misc_feature (100)..(101): n is a, c, g, or t
  misc_feature (104)..(105): n is a, c, g, or t
  misc_feature (110)..(110): n is a, c, g, or t
  misc_feature (114)..(114): n is a, c, g, or t
  misc_feature (117)..(117): n is a, c, g, or t
  misc_feature (133)..(134): n is a, c, g, or t
  misc_feature (141)..(141): n is a, c, g, or t
  misc_feature (146)..(147): n is a, c, g, or t
  misc_feature (150)..(150): n is a, c, g, or t
  misc_feature (164)..(164): n is a, c, g, or t
  misc_feature (193)..(193): n is a, c, g, or t
  misc_feature (196)..(196): n is a, c, g, or t
  misc_feature (221)..(221): n is a, c, g, or t
  misc_feature (239)..(239): n is a, c, g, or t
  misc_feature (242)..(242): n is a, c, g, or t
  misc_feature (246)..(246): n is a, c, g, or t
  misc_feature (254)..(254): n is a, c, g, or t
  misc_feature (258)..(258): n is a, c, g, or t
  misc_feature (265)..(265): n is a, c, g, or t
  misc_feature (269)..(269): n is a, c, g, or t
  misc_feature (276)..(276): n is a, c, g, or t
  misc_feature (313)..(313): n is a, c, g, or t
  misc_feature (316)..(316): n is a, c, g, or t
  misc_feature (318)..(318): n is a, c, g, or t
  misc_feature (324)..(324): n is a, c, g, or t
  misc_feature (342)..(342): n is a, c, g, or t
  misc_feature (353)..(353): n is a, c, g, or t
  misc_feature (358)..(358): n is a, c, g, or t
  misc_feature (383)..(384): n is a, c, g, or t
  misc_feature (407)..(407): n is a, c, g, or t
  misc_feature (422)..(422): n is a, c, g, or t
  misc_feature (447)..(447): n is a, c, g, or t
  misc_feature (453)..(453): n is a, c, g, or t
  misc_feature (465)..(465): n is a, c, g, or t
  misc_feature (473)..(473): n is a, c, g, or t
  misc_feature (494)..(494): n is a, c, g, or t
  misc_feature (504)..(504): n is a, c, g, or t
  misc_feature (511)..(511): n is a, c, g, or t
  misc_feature (537)..(537): n is a, c, g, or t
  misc_feature (554)..(554): n is a, c, g, or t
  misc_feature (556)..(556): n is a, c, g, or t
  misc_feature (562)..(562): n is a, c, g, or t
  misc_feature (578)..(578): n is a, c, g, or t
  misc_feature (585)..(585): n is a, c, g, or t
  misc_feature (590)..(590): n is a, c, g, or t
  misc_feature (594)..(594): n is a, c, g, or t
  misc_feature (600)..(601): n is a, c, g, or t
  misc_feature (662)..(662): n is a, c, g, or t
acaatgcngnnctncgtgnagacnctgnctggcnagaccatcacccccgnggttgnncccngtgncnccntcgngnntgtccnggccnngnnccnngncnnggnnggccncccnccngccccgccgcggctgnnctttgcnggccnnccnctggccgctgggcnccccctgtctgcctcccccctcccgcccncgncccccctgcccctggtgctccgtcnccccggtgggctgccccnccncganccgccccncccnggccccncccnccccctngcggtggcgccccgtgcccccctcgcgcccgtccccnccncnctcccngccccggccggccttccncctagcacccnccgcngttgctctttgccggccacacccgnnggccgctgggcgccccccgtctncctccccccatcccncaccaacaatctcccctgccactgngtgctnccgtctcccgcnggtggagnatgccgcatctctcgatgccngcaccctgcnctggatncagcacccatccacccctccgcaggngggcagacccaatcgcncncccatnagaaccatgtcccagngccccancatcncccngcatcnnggccaggccttccctcctagcatacagccagcaggttagcatcttttgcacggcccccacn

SEQ ID NO: 492462 - DNA, 398 bp, Homo sapiens
  misc_feature (61)..(61): n is a, c, g, or t
taagcaaaaagaacaaatctggaggcatcacattatctgacttcaaatcacactcgaggantatagttaccaaaacagcatagtactggaatgaaaataggcatgtacaccaacaacagacaaacagagagccaaatcatgagtgaacttccattcacaattgcttcaaagagaataaaatacctaggaatccaacttacaagggatgtgaaggacctcttcaaggagaactacaaaacactgctgaaagaaatatagatgacacaaacaaacggaaacaggtcccatgctcatggatgggtagaatcaatattgtgaaaatgaccatattgccaaaagcaatctggtcattcaatgcaattcccatcaaaataccatcattattcttcacggaacta

SEQ ID NO: 492463 - DNA, 368 bp, Homo sapiens
tgaatagctttgcttggccaatggggttggggaatagggttgtctttcctatgaaaatgccatctgtagcccttgtgagtcacccgtccaaatgtttgcaggtgaattcctctgcttgacatcctccctgtccctttggaccctatgggagtgggcatctccccgcccctgggtatgtgaaagtccttttccatttccaagcaggggggggttcttatttttaaatttttaactctttatttttggatggataaagtgaactttttggcttctgtaagtatgctctatgcccctctaatgttttatcatgtatttatatgttgtacccaggactggctgattctgtaaatggatgttttggcccgaga

SEQ ID NO: 492464 - DNA, 885 bp, Homo sapiens
agcggagtggtgtcgagcgtcgagctcccaaaaccgagctggtgaggggctgcaggtggcggcgcagtctcggtaggcggtatgagtttggctgggggccgggcaccccggaagaccgctgggaaccggctttctgggcttttggaggcagaggaggaagatgagttctaccagacgacttatgggggtttcacagaggaatccggagatgatgagtatcaaggggaccagtcagacacagaggacgaagtggactctgactttggaccattggattgcacggggattgaccccattccagtgtgagtggcagaacgcaagaaagacgccaaagacaggaacacgcgccgatgtagtcaccaagggcctataacggaacctctcaacgagcttaaggcctcgaaaggtcaacaccccggctggctagctctcagaaggcgcgacgaagagcacaggcacctactgccacttacgaactacaacgactgacggctctgacagctcggaagtctatgcgtcacgtctaccagctgacgcatacaccgacaaacgttccttcgggtacaggagacggcacggcccacgtcaacgacggcgacaacggggccccactgtgagccggccactaacccacggacggaacgtgctccgggaaggccacagatcacacaccgacgctctacttttacgggtcaactggaagaccatctgacgcggctcgcacgcctgctaccccacgaagcacgcgtcctacagacgcgcgaagctgcccccgggcccaccatcccctactcatcacgcgaccaccggcccccgccgcggcacccacgcccaggacgagaacgtgcactgaacgcaccccccccgcccccccccggccgctcg

SEQ ID NO: 492465 - DNA, 443 bp, Homo sapiens
tcatgtgacttcagtaatctatggtaattgaggctagttttacaatttgttggtaaaataacaattagaaatattattcagagatttacatttagagcatttttgcctgggtctactagtcaaattggtttagccctatttctggtaggtgtctataggtcatacttctgtcgcttttgtaatattgttgatacctgtttgattctggggtatagacaagtggccacgggaaggcctggggacacgtggatgtctgcagcacctaggccaagagctgtggggcagagctacgctacatgtcttccctggctcacttgtgcctcctgaaaatgctgggaggggttggttctccaggcattgctttcataactctgtccttttttctgggctctgtatcaagatacataattaaaattgcttacttcttaagacttttcacaaat

SEQ ID NO: 492466 - DNA, 1397 bp, Homo sapiens
  misc_feature (605)..(605): n is a, c, g, or t
agcgggggggtcgtggccgtgacgcgttgcgtacggcgtcggtcgccgtgctcggtgctggttagctcggcctcgtcctagtggcgcgcttccttccccgtgttcgcgccgtcggtctccaacctaggatatacggacgtggaaggccaactattgctgcttgcgccattccaccaaggataaccgttgcggaatcaccgtgcagagtacttggaagtcgtaggttattcaaccagatcggggtgtccctctagtataccgctggtaataaggtcatccatagcatcctacaagatttagtgatacgattagataaaggagaaattactatagagattgcgcgttgcgttgatcactcagcatggtgtggttctaagctgtcgagtcgtggaatacaatacgaggcaagaaaagtgcatcccgagcgtatcgcattgcgtagaaattaagcgtgcgcgatgcttatgcacttgttttaagcaggattgagggacgagcgtcctcgacgaagaacctaggtcgtgatcattcatgggagaacaacgcatatattgactcacgaagaatgagagctcggttagatccaactggattctccttccctnattgtttggcctccagcgaagcggcgattgaggactcccgttcatcggcatgtacattagaagagcgccgattgttgcctttgtgggcctaggggctgcccttcggaatgttgcgctgtcgttgtattcccctgtgggagtgacgccgatgcgcgggaacatgcagagggccactattacccctagggtcggctctcgacaattaggaacccgtcatgtatattggcgatgaagggttaaccgaggaggttttaatttaacgtgggacctcagtatgtgcgcagaagcggtgggtatgaaaaacgcctccatgagcaaaaagcgtataattctagtaacacaataaccagggaccccatggaaggaatatccggcaggttcaaacagactatccggaagtattcgctgaattggctgcaatgcggctgtttgcgtgaggaaagatccaagccacctcaaagaaacgtgggcctctcatgaacctgaaggacaagatctatttcttgtggcccgtggaagttagtgaaccccaatttctttctgcaaaggggaaatgggttagcagcgctgcaggggtcatttgacgaattgttcgtatgaacaggggataacctgggtggactggcgacaagaagtaacgagaaagggccccagttgcttctagcacttatgtgtgtaccacttggtggtgcaagtttttggcataacatttttattcccaacacataaggattgtgcagttgataaggacacaagaaaagaacattgtcacatttctgtaggaaaggtaag

SEQ ID NO: 492467 - DNA, 112 bp, Homo sapiens
tcctgcacaggggttggttgctgagggatccacatgagtttgatttaggtaagcacgctagctacatgccgtggcaccaagtaagcactcaataaatcactcaactcctttc

SEQ ID NO: 492468 - DNA, 572 bp, Homo sapiens
agagcatgcgtcctgtggcgcggctactaagttaggtatgtgaacatgctgatacttggataccatatctcatctctgttgccgcagtgagggatatgcattgtcaccgaattatcataatcgaccggaggctccggctccgctagttcacgtgactactacgtggcttcaggactcccataataggtgtcgtatcacaggcgagctcgcaagccgatgctcgagtatccattttagtccttgtcatgtacagatggggtctcaccatcttggccaggctggtcttgaactccttgacctcaggtgatctgcctgcctcagcctcccaaagtgctgggatgacaggcgtgagccacctgcacttggccttatatatatatatttttagagatagggtctcgctatgttgccccagggtggtcttgaactccttggctcaagtgatcctcctgcctcggctcccaaagcactaggtttaactgacatgagccactgcgcccaggctgatgtgtgcttttaatttaaattgttcggcagtcctatttggttgtgttttcctttaattaaatctc

SEQ ID NO: 492469 - DNA, 265 bp, Homo sapiens
gcccacggtatctgtaatgagcatggctgtttctctttgtatgaagtggcagttggctgtggagcctcttgattaactgtagataagggatgagattctgaaggaacactgacactagacttaaccaggctagaagtacttgatattcgctttcttctctgtgaaacaggtagaggaagatctactggattcttcaacatcatagtcaccaccagtcttttcagtactgctcctaggagccttttcttggggctccgctccaccg

SEQ ID NO: 492470 - DNA, 270 bp, Homo sapiens
agacagacattctgtggtttgagcggtacgcagtagatcgtggatctaacggaggcgatgatgaatgatgccattcatgatccatgggtgatgaggacgattaagagcagagtgatgctgtggtgccccaggttctggatgagctgggacttagcctaacagatgagctgtctgaacctcccctcaactgggggctcgcttagtgtggctgctggtgggaaaaaagcagaggccgcagcctcagccctagctgatgctgatgcagacctt

SEQ ID NO: 492471 - DNA, 2192 bp, Homo sapiens
agctcagctgggagcgcagaggctcacgcctgtaatcccatcatttgcttaggtctgatcaatctgctccacacaatttctcagtgatcctctgcatctctgcctacaagggcctccctgacacccaagttcatattgctcagaaacagtgaacttgagtttttcgttttaccttgatctctctctgacaaagaaatccagatgatgcaacacctgatgaagacaatacatggaaaatgacagtcttggaaataactttggctgtcatcctgactctactgggacttgccatcctggctattttgttaacaagatgggcacgacgtaagcaaagtgaaatgtatatctccagatacagttcagaacaaagtgctagacttctggactatgaggatggtagaggatcccgacatgcatatcaacacaaagtgacacttcatatgataaccgagagagatccaaaaagagattacacaccatcaaccaactctctagcactgtctcgatcaagtattgctttacctcaaggatccatgagtagtataaaatgtttacaaacaactgaagaacctccttccagaactgcaggagccatgatgcaattcacagccctattcccggagctacaggacctatcaagctctctcaaaaaaccattgtgcaaactccaggacctattgtacaatatctggatccaatgtcagatcgcatctcacacaatcactggtcaccttcagcacccgcggtcacccatggcacccataataatttcacagagaaccgcaagtcagctggcagcacctataagaatacctcaagttcacactatggacagttctggaaaaatcacactgactcctgtggttatattaacaggttacatggacgaagaacttcgaaaaaaatcttgttccaaaatccagattctaaaatgtggaggcactgcaaggtctcagatagccgagaagaaaacaaggaagcaactaaagaatgacatcatatttacgaattctgtagaatccttgaaatcagcacacataaaggagccagaaagagaaggaaaaggcactgatttagagaaagacaaaataggaatggaggtcaaggtagacagtgacgctggaataccaaaaagacaggaaacccaactaaaaatcagtgaagatgagtataccacaaggacagggagcccaaataaagaaaagtgtgtcagatgtaccaagaggacaggagtccaagtaaagaagagtgagtcaggtgtcccaaaaggacaagaagcccaagtaacgaagagtgggttggttgtactgaaaggacaggaagcccaggtagagaagagtgagatgggtgtgccaagaagacaggaatcccaagtaaagaagagtcagtctggtgtctcaaagggacaggaagcccaggtaaagaagagggagtcagttgtactgaaaggacaggaagcccaggtagagaagagtgagttgaaggtaccaaaaggacaagaaggccaagtagagaagactgaggcagatgtgccaaaggaacaagaggtccaagaaaagaagagtgaggcaggtgtactgaaaggaccagaatcccaagtaaagaacactgaggtgagtgtaccagaaacactggaatcccaagtaaagaagagtgagtcaggtgtactaaaaggacaggaagcccaagaaaagaaggagagttttgaggataaaggaaataatgataaagaaaaggagagagatgcagagaaagatccaaataaaaaagaaaaaggtgacaaaaacacaaaaggtgacaaaggaaaggacaaagttaaaggaaagagagaatcagaaatcaatggtgaaaaatcaaaaggctcgaaaaggcgaaggcaaatacaggaaggaagtacaacaaaaaagtggaagagtaaggataaattttttaaaggcccataagacaagtgattattatgattcccatactccagatacaaaccatatcccagccattgcctaaacagattacaattataaaatccctttcatcttcatatcacagtttctgctcttcagaagtttcaccctttttaatctctcagccacaaacctcagttccaatattgttataagttaagacgtatatgattccgtcaagaaagactggatactttctgaagtaaaacattttaattaaagaaaaaaaaa

SEQ ID NO: 492472 - DNA, 157 bp, Homo sapiens
agttcctggtcccctcacggtctgtaccccaggtagcgggtgctggtcacgtgtgactccaggtgttcacattcacacttaatgacttcctaggcaccaatcatgtatttcaccgtttgcacttttggtatttcaataaaaatgtagatgcacacac

SEQ ID NO: 492473 - DNA, 1080 bp, Homo sapiens
tccgacgcaatcgggtaacttttcccgaccccacttgagaccacgttcgttccaatggtgcctgtgaaattaccaatacccaccttcggtcgctcttcgtgttataatgtttccatcgggccttaggcggaacgtgccctagtcaccctatgtgccccgtgataactggtaaaggataggtgacttgttttttgcaaccgaataagggtcatcttaccccggccgctaagcaactttcctcgtaacccgttgtggttatctggcgccttatctttacgcgacgggtaggatcgtctttgctgtactacgggtgccgtctctttgggccgtccgtggtgcctctgtgatgaggtgacatcgggtgccccctcgtggtccccgcctgaggtcttggcgctgttgtgcgtgggtttctcttctcttctgtttagtctcatctgttggttctgtgaaggccacctggtgtgcggatagtgccgtcgtggcgcaacggcctgtacaacttatctgatcatcggttatccccatgggacatggactcacctttgtccgataaaagcctaagtagatttgaaatgccatgccaagctgcatccgtgttgtgtggcccaggctgcgcccagtcgttcgcgccatgcggcatagccggtgtcctcgttctcagtgtcgtctccccggccgcgctggtttcgcgtcaccgttcgtctcccctgttccatgccggtccatgagtccccaccccatgtgttttaaaaaggcagtagcctttgcagggacctgtctgtcccaactgtttgaacagtgtgctcctcagattgctgtcgttccagacaggatcttcgctagcattcgagagcttgaaacctcttaggattatggggaataaaattatatatatatatattttgcttgttgctggtttcgcatttcttaatttgtgcattggaatgtgttgatgtgcacagctaatgattcaatgcgagacaagattggcgtctgctcgttgtggacgctttcaaataagccctccagcgggcgccgccagcgcgaccgggcgcggcgaagcgcgagcgagcgcga

SEQ ID NO: 492474 - DNA, 406 bp, Homo sapiens
gtacaacaagctctgtggttttatttctcctaaatgggaggaaacagagagaggaagaaaagtatgcaatctcagttgcaaatggaggcaggggctcaccatgttctctgatacgattgtaccgcccattggtaagaatcagaggctgaaaagattctgttactgaaactcaacacttagttgatacctgctacaactttaactactcgttgactgtttacggcttttgctgtaagttggagtatggtgacaaacacacaaaaaattgtcaaccgcagatgtagccatgaagtattatgagcgagtaatagcaagggctttgctgtcctctctctccactgttgtttcaaacaaacacaaaatcaacagcatatgcaatctcaataaaataacatagacatgtgaa

SEQ ID NO: 492475 - DNA, 662 bp, Homo sapiens
  misc_feature (419)..(419): n is a, c, g, or t
  misc_feature (452)..(452): n is a, c, g, or t
  misc_feature (635)..(635): n is a, c, g, or t
ctgatgtgggcctgaccaaacttcccttttttggctcaagccctgggcttcaagggctaaatccacaggcctttggctagcaagctgggtctccctggcaaggccatacctgggggcacctgggccttctggggtctgagtaccactcccctggcccaggagccacttccacttcagctggctgttttcagcaagttcccagggtccccgacaagcccctgctggtgtctccatctcctgccaagcattctccagtgcctcctcctgtgggcctggcctcaaggctatggacagacttctgtcccataccagagacccctcgtgatcgtgccctggcacgtgggcccgggccccggctggttcgctgaagaactgcggatggaagctgcggaagaaggccctgatggggcccaccatcncggacccaagtcttcttcttgcgggcctctcgnctactttctgggttgggcggaagccatcacctggatgcctacgtgggaagggacctcgaatgtgggaccccagcccctcttcagctcgtccttcacagacacggggacaccctgaactattttcacggacaagctggacccagagactcttgaccccggggcctccccttgagagagacccgncctctgactgatggccccgcttctggg

SEQ ID NO: 492476 - DNA, 290 bp, Homo sapiens
tttcattttgcggaggctgtggtggaggatcaccttagatccggaggctcgagatcagcctgggctacatggtgaaaccctgtatctactacacatgctaaaattagccgggcgtggtggcgcgcgccctgtgtcccagctactctttgaggctgggacaggagaatcgcttgaaccccgggggtggtggttgcagtgagctgagatcgcaccactgcactccagcttgggagaaagagtgagactccatgtcaaaaaaaaaaaagggagaattaccttaaaaatttttt

SEQ ID NO: 492477 - DNA, 467 bp, Homo sapiens
cccccggggggggccccttttaaaataatgggtccccccggctgcaggaatttggccccaggggggggttttaatttggggttggagttggttaaaacatttctggatttccttttttaccccctgggttatttggggttggttttaggggaaagaaatggagttgcctaattaaaagggggtttaatttaaattttttaaaaaaacccctttttcagggggggtggagaactggggttaaataaaaaaaaattccttcgccccaacaaattcaaacaggttcttttgtttttcaaaggtagtttagaaattcccctttttcctttttaaaaagactgtcctttaaaaaaattttttttgggaaaaaaggcaattagttttggaaaaaagaaccgttagggtggggaaccccccaaaggcccaaagggttttttcgttttttaaattaaccaaacaaaaacccctta

SEQ ID NO: 492478 - DNA, 773 bp, Homo sapiens
aggagcacatggattgcaagttgaagatagtccccttcataaggaacacgcgatctctctgaatccaatcctagagggtgaacaagataatgcatacatagacccaaggatacatgaagtctgaatgcttaacagcatgcaggaagatatagctgaatataaaataatatatggaattaattttcaagaggtgtactaatgtcactgggcacagtacagggtcaatctgtgccttacagcaggcgagagaccctgtggtataaggacggataagtattaaggacttgctttcttggaaaatagatgcaaatattaaacatgcaatcagctaaaaaagatgaataagaatatacaagcaaaaatataattaaaaaacagaatgcatggttaaagtaaatatttgcccagtttgatattaatacctacctaagaataactgtcattcttagttactcctactgctgctgttgctaggctaccatttttgagggcctactaagttccaagaactatactaaatacttcacattgatggatgttattttcctcattttgtagatcaattctatatgattgatgttaattcctttactttgtcgatgatgaaacaagctcagtttagactcattgcttgtgagtagtggagctgcattctgacccaagtaaattcaactccaaagctcatgcccttaaaaagaaaaaagtctgaaatctggtattctctacagcattcaagtatagacacatggaagttttaaggcatggggaatata

SEQ ID NO: 492479 - DNA, 125 bp, Homo sapiens
attgcaggtaagattacacactgcagtgacctgccatgctacccattctagcactgcccacatgcatgttgccgatgcactgaagagctcttggcccggccggcccccaataaacagtgtcctgg

SEQ ID NO: 492480 - DNA, 149 bp, Homo sapiens
ctcatttcaactttccatggcaatgtcttacaattctctttaggctagggccaggggaagaatccatggaattgaccacttggcaggacattaccaaggtaggggtggctatagagatttcagccgaaccaccctaggggatgaagcaa

SEQ ID NO: 492481 - DNA, 147 bp, Homo sapiens
tctagagcatccccgattacaattgcggagccatccgagggccgtgagggcatgacctgctattacctgacacacgttaaagctgtcggtgcagtcacactgcacgtgcaggtaggccttggggtgtcggttctccaccaccacgat

SEQ ID NO: 492482 - DNA, 247 bp, Homo sapiens
tgcggctaagtctgagcgtttatgaggtttttatgacctcttatatatgctttcataaaataaattgacatcataatgatagtagatcaatatatcaagtatttacataacatattaagtaaccaagtcttccccccaactttaacaaacaagcttttcttaaggtccccaagcccccacaaatttacagaaacgggcagtaaacttttcctgcaaaattgttttggcttcttaggcaatataagaa

SEQ ID NO: 492483 - DNA, 185 bp, Homo sapiens
gggagaggcctatagcggcacccgagaccccaccggtcccctcctcggcctctagtccctcggcaagcgccctgtgagtgcgccattcggaacattggacagaagcccaaagagccagattgtcacaattgtggaacccacattggtctgagatccaaaacgcttcgaggcacccggtcctctag

SEQ ID NO: 492484 - DNA, 160 bp, Homo sapiens
cagccgaaaaagattacaaatcagatagagcgttaccatcacggtatgaatctacgtatacaacataaaactagaaaaggtacaaagaacaggtagctataggaaataatagtgtaaatagcacgtatataaactggctattgaaacttctaaaactagg

SEQ ID NO: 492485 - DNA, 106 bp, Homo sapiens
agtaaggcgcagtagtagctggaatataggttgtacagatcgagcgaggagttcagagcctagagttggaccgtcttagagtaggagacccagaaggagccctgta

SEQ ID NO: 492486 - DNA, 493 bp, Homo sapiens
gttgactgatatggcaccatcactggggaaggctgaatagaggtggtcacggggagggcagatggcttaagggggtgtgacagctgattctggccggactctgggatgtagccaggagggctggatgggtctgctggagggtgctaacgactagtacacggtgcactctgaccagacaggttacctgaaagcagggggcattctattcccgagggaactgcttcgactagatttgctgcctttgctttctagctgggtcgtcgtactctctccctggaaaggggagcagctgtggggaatagtaacagcagggggcaccttgcccagttaggtatacaaagattcaatttcatgcttctggcgactctgcaggtcctgaatctctttgagatgtttatctcgtagtcgtcgcagctctaactttaagtcttcatcttcgatatctgactcattgtcgctactcatgtaggaggagttaaatgaattactaagg

SEQ ID NO: 492487 - DNA, 820 bp, Homo sapiens
cgcgtaacggaagataccttgcgattgctggatacacaacatcgccccttccgcacataaaattggtgcatcgagcgcgagttgaggccctgcatcgccaggtcgtcagtcggtctgaagtgaacgcgcagcataatgcgcgatttcgctgcgcctgcatggcggctacgctgattgttcctggtgaacaaggattgtgagatctgggccggtgactaagccgggcaatatgccttacaggacatgagtatccctgcacaatggctcgttagcttacatttaacaatgtaaccacaacaccctttagaaaccttgaccagccgcaggcaggcagttcatgcatggagtggcgtttcctctcttgcgcgttgctgctgaccgccccggactggggctggcgctggcacaaaaactggtgaccatgtcccatctgatggatcttcgtcagctaaacagtttatcggttcaagtctgtggttttatagtgctgggacgctattgagtattggttctgcgctttatctggcgacgctggttctcagcttggcggattaacgtcgattatcgcacgtacttcgaggcatactttgcttattctccttcgcctaaaggagcgtttatggatacagcaatcactgacgaaacggcgaaacgcctggccttgagttacccctttgatcgagctttgctggcctattggcccggagttcgatgtagcagacatggagggcagattgttatgctgtcgatcggagctacgcggagtcccttatcaatctgaggtcaggtcgacaagatacctgataatacagagtatacc

SEQ ID NO: 492488 - DNA, 107 bp, Homo sapiens
agtgtctgagaaggtgagaatgtgttatactgtatatggaaacctaatgcctcttttctaaagcgttgtacatttttttcgtgaaatagattaaatattttctctct

SEQ ID NO: 492489 - DNA, 128 bp, Homo sapiens
ttgtcagtgagcgttgtcagtggcgcaggaatttaatcaaaaaggccaaatcccatgtcatcatctgactcttcagactcctccttcttctcatcttacttctcctctgctgcagacaggggccagaa

SEQ ID NO: 492490 - DNA, 1115 bp, Homo sapiens
tccccttgaaagggggggggtggggggaccaccaaaaaaggggggggggggctcttgtcaccaaccctctcccccccccgcccccccccccccccgcggtggtacaaatgtatatttttgtgtgtgtctctcccccccccacacaaacgcgcgtggatatttcggggcgcaccacacacacacccgaccccgcgcggccacatgtggtggtgtttttaaagaaaaaagagagggggggcccccgcgaggggcgcgcgcgggcggggctctaaaacccgcgacgccccccggggaaatctccccgcgcgcgccccacacaccctccacacaagagaggaggggagaatctcacacgagggggtaaacccccctccacacacccaccacacacataatataaacacaacactccacataacaccacgcacgcgcaggaggagacatataatacacaccagcgccacgtagcctcaaaaaaaacataaatacacaagagcgtcactccgagcaggcgctagtcacacttgaccatatatagatgatcaacaccaccacaaaacactacccactgtagcgaacacaactaagcgacacacacaaacacatacactcatacgacactagtggtagaacaacaacaccccaactaccaacaaaaaacaccaaaatcatcacttctactacccttcttcacctaaaagaaaaccacacaccgggacgtcagaaggggaacaacacgggcagaaggacgcaaggggagaagaccacccggccggacacgatgtcacacccgacgcacaaaaacagtacagcaggagacacagcaacccaaaagaagctgacagagcatcacacatcacaccaggtgagccaagcagacaaggtagaacaaacaaaaacacaccccccccagcgggacggcaccaaaacaatcatcaaccaacgacacaccaccacaacccaccctccaacacaccaaaaaaaaaaacacacctcagcacacgtcggacgcagcgaagacaataacaagaatcaaaacacccacgccagagagggagcccccgaacacccgcgagaggcgcgcacagcacaccgcaagcactagagagcagaac

SEQ ID NO: 492491 - DNA, 150 bp, Homo sapiens
aatccaacatgctctcgaggcctgagcagagactagactcaagcacagattctggtgatggagtaaagtacagcgtatctcatgtctcacaagagaggacgtcttaagctcacacttctgaggggatgaccatcagtttggctagatcct

SEQ ID NO: 492492 - DNA, 524 bp, Homo sapiens
ccacgcgtccggagccaacacagatctatagatttctttgaactcggaatctcatagcagtaagtagtcaacaaaattcatcaatattatttctctcttataactgcatctgtattcaattttaaaaatgttaaaattgaatacagatgcagttataagagagaaataatattgatgaattttaacatttttaaaactctttttgtagccaatatttttgcacagaactcttacttacatgtctcatcgaaactccagaacaaacatcaaaaggtacattttatgaatcttatttcaagctgatcaaaccatgttagttttattttaaagtactatttctcaaaattaaaaaaaagaacaaaaataagtactatttctaactaaagatttaatatgaaaactgaagtgagagagtgactggttgaattggttgcacagtggttttcaatagtataatctttgtaagtctcaggttgttattagctctttttttttttcccctaatagaaatgaggctgggtgtg

SEQ ID NO: 492493 - DNA, 759 bp, Homo sapiens
  misc_feature (476)..(478): n is a, c, g, or t
  misc_feature (485)..(486): n is a, c, g, or t
  misc_feature (579)..(580): n is a, c, g, or t
caccatgaggattgcacctattttatgcattatgtcatatgccattttcataagcctgcacgttaatctccaaagaagaggatgctcatgatgatccactatagctgcccttagttctatacgtacagagctttctgttcatgacgtaccagcggtcacatgtacacttgcatagtctctgagcatcgtgagctgcaaattcagcgttatcggtagtgcacggtgacgagtgtcactactcatctgacatgtcctcctgatatgtcgcttgagcgcactaatatattctctaagtgcataccggtgaaactcccctgctatgctctaatttcccaatcatctatattacatctttcaatttaattgttaattgtgaaatctgcatgactgtgcgtgaatcacgcagcactacgttaatatcactgcttcctaagctaagtgcgctacaccatgtttggtatacacattaactcaannnactctcnntaaaaaccataattactgttgcagtacagaattttgcaagccaaggaactaaaacaggcaggtctgaaagcaaaactgtcctaatacgaatgnncagttgtttgggaaaatggtctgatcttctcgattatgacaacccaactttgatcacaacttgtttggttcttttgaaccttgggatctaaatctgacattgcttttcacttagttaaacacaaaaggttaatgttaaaaactacttttaaacttgtatatgcctgccatctgaggtga

SEQ ID NO: 492494 - DNA, 387 bp, Homo sapiens
tcttaaaaagtttatgcattaatttgtcatatcccacgaaatttcactctgaagtatcttctcaaagaaatgaaaacaggtccacacaaagacgtatacaccaatatttagagcagcatcattttactttattttgagatggggtctcactctgttgcccaggctggaatacactgatgcaatcacacctcactgcagccctgaaacttctgggccctagtgatcctcccatctcagccccccgagcagctaggactacaggtgtgtgccatgcgctggccaacttttttctattttttgtagaaacagggtctcgccatgttgcctaagcaggtcttgaactcctgggctcaagcgatccacccgccccattctccatagtgctga

SEQ ID NO: 492495 - DNA, 142 bp, Homo sapiens
tccttgtactcgggataggattggctctatgggctgggtcggtcgggctggggcgctcgttacggagttcgttacggaggcgtcgttaggatggcgctcgttacggaagcgctcgttacggaggcgtgttaggaggcgctcg

SEQ ID NO: 492496 - DNA, 808 bp, Homo sapiens
taccgcatagctaggaggtgcagttggtgggcttgaggctcactgcactgcagcctccacctccctggagtcaagtgattctctcacctcagcctcacaagtagctgggactacgggcatgtgccacaatgcctggctaattttttaattttttaatattttttattttatttttttttgagacagagtcttgctctgtcacccaggccggagtgcaatggtgtgatctcggctcactgcaacctctgctcaagcaattctccctgccttagcctcctgagtagctgggattacaggcgcctgccaccacgcccggctaatttttttttttttttagtaaagacaggattttgccattgttggccaggatggtctcaacgctcctgaccatcaggtgatccgccacacctcagcctcccaaaggtgctcggattacaggatgtgagccaccacgcccagccttatttgtaatataaatataattcaattaattaatatggagatggaatttaaatctttgtttgcccaaggctggagtgcaatggcgcagatcttggcctcactgcaaattcaaaccccccaggatacaagcaattctccatggtctcaggcccctgagtagactgggatatcaggcgcccagcaccatatccaggctaattagggcatttgttacagtagacaaatgcggtttcccagtttcggcaagtgatttgagctctacctcagtgacacctgctacgcccaagtgtggcatcagggttacacgactcgtttatttttgacaaccattgtttcgcgatacgaa

SEQ ID NO: 492497 - DNA, 931 bp, Homo sapiens
cacgagctccctgtgggcccaaggtctacaaaaagcgtagtactctaggaccgccggacagtggccgcgggctgagcacgcccgaatggggacacccgcggtggtggataactgtgcgaagagcgcctacctacgggaacacgagccgtccgcgaacccccaaagacttggggaaccagagagacacagagtctgctgagccgggtacatcgacaggcgttctcccaacgagagtgaatcccatggggcccgccacaaacagtggattgccagggagtgcaaaaacaccagggtgaaaacggccacagacgtgcgtccacggattcagaggaaataaccccactcggggacaacaggaaacaaatgcgcggcaaacagctaataggagaaccaccgcctgggccaaaactttctgccggaagttaacctccccgttgccccaccaacgatacaaagggaaatgtacggcccccggaaaaagtcacattattccccggacccctccaaggtgttcctccccacaacaccgcgggtgatcaatacccgccgggtttcccaccccgcccgcggccttaaaaagatgaagtacaggctcccccagtccacacaagaagacgggcagcaatacacctcctgggaacatattccccagggaggtcctgataggaacagcggtgatatcgaggccttctcgggcgctcagcaacatgtgatacttaccacaggggggtaacaccgcggccccctagtggtgcaatccaggactgcacaccgaggaacccaccagttgacgagggtgagctagtttccacaaacaaggagagatgtggggctcaccacaagaacccacaaaggccaacagtcgttgcgtaaaagacgcaaacaggggcttgcgcccaaaaaaaaacaacttttttcgcccaacaaaaca

SEQ ID NO: 492498 - DNA, 166 bp, Homo sapiens
catacctgctgcaaatgccttgacactggtgtgacagccttttaaaaactggtgtttggggctgctctccctccagtggattctcagacagatgccagagtaactttgtggaagtagaaatccaaagcattgactggtgtctagtgggaaatcggtaaaaaaaaaa

SEQ ID NO: 492499 - DNA, 863 bp, Homo sapiens
  misc_feature (46)..(46): n is a, c, g, or t
  misc_feature (769)..(769): n is a, c, g, or t
  misc_feature (844)..(844): n is a, c, g, or t
acccctcaggtacctcttccaaggctctgcagggatcccagcccanaccaacttggtggaaacatacgaacttcaagaagctactacacctatgtcttcctttcgattatgaggtctttgtagaattgaaatacggctcagaggatgatggataaacacagtatcccagaccagggggaaaagacagagcgaaaccaaaatctcctgagatctcacccagttccctccttggtgtatcttatatcagtcacctccatcgatttatttattactcaccctgtcctacggattaagtttctcttaaacctgttcctcccctgaaccctggcagccgcctaagtaaaatgcataagatctgatttgggggaaagtatgtgatcggcatgtcagatctagagctatggaagaagcaagagccaacgagctctacattgacccaaaattctaatcagaagacccatcaactcagacagggtctctctgtgtagccccctgaatatcctggaattcaatcgtagaccgaactggccttgaactaaaagatctgcctgcctctgcctcctaaatgctgagattaaaggtgtgcaccaccacacccaactgaacagtatcagccttaactgaaagccaagaatccaagatcttggcaatggatccagcaagttgtcacttctaccaggtgagcagcagggctcagagcagctggcatcaggaagatgacagagatcaccaagctcaactataacccagagaaggactgagcaggggncccttctaccttctagtgagacaggttctatgtagacttggtacactgggtaggagttaaatttgcagccagaanaaagacagggcaggaaagc

SEQ ID NO: 492500 - DNA, 109 bp, Homo sapiens
tgaatcatgtacaagcttgaagaacaggattccacccaggcaaccacacaacaatgcccagctggctggcagcagctgaaattgattgaagaaccagtcagtaaatgca

SEQ ID NO: 492501 - DNA, 661 bp, Homo sapiens
  misc_feature (44)..(44): n is a, c, g, or t
  misc_feature (69)..(69): n is a, c, g, or t
  misc_feature (73)..(73): n is a, c, g, or t
  misc_feature (98)..(98): n is a, c, g, or t
  misc_feature (127)..(127): n is a, c, g, or t
  misc_feature (143)..(143): n is a, c, g, or t
  misc_feature (154)..(154): n is a, c, g, or t
  misc_feature (159)..(159): n is a, c, g, or t
  misc_feature (257)..(258): n is a, c, g, or t
  misc_feature (263)..(264): n is a, c, g, or t
  misc_feature (282)..(282): n is a, c, g, or t
  misc_feature (287)..(287): n is a, c, g, or t
  misc_feature (302)..(302): n is a, c, g, or t
  misc_feature (330)..(330): n is a, c, g, or t
  misc_feature (332)..(332): n is a, c, g, or t
  misc_feature (366)..(366): n is a, c, g, or t
  misc_feature (375)..(375): n is a, c, g, or t
  misc_feature (393)..(393): n is a, c, g, or t
  misc_feature (395)..(395): n is a, c, g, or t
  misc_feature (401)..(401): n is a, c, g, or t
  misc_feature (412)..(412): n is a, c, g, or t
  misc_feature (453)..(453): n is a, c, g, or t
  misc_feature (478)..(478): n is a, c, g, or t
  misc_feature (485)..(485): n is a, c, g, or t
  misc_feature (492)..(492): n is a, c, g, or t
  misc_feature (507)..(507): n is a, c, g, or t
  misc_feature (522)..(522): n is a, c, g, or t
  misc_feature (529)..(529): n is a, c, g, or t
  misc_feature (544)..(544): n is a, c, g, or t
  misc_feature (548)..(549): n is a, c, g, or t
  misc_feature (578)..(578): n is a, c, g, or t
  misc_feature (652)..(652): n is a, c, g, or t
gggggggggggggggggggaaagagggtctctggaaggacaccnttaggatcccctgactcagggtgcnaccnaaacgggcctggtgttctgggacgnccgggatggagtaaccccaaaaacctccntacgttcaagggaccnttgggtttgtngagtnctttgttggatgagggtcaagatctaggtcaagctgatttcagcaagggtgtgggggttgggttttgtagccccaagatttaattcactttttttatnnggggnnaggaaggtaattttaggnttttntagttaggaaaaggnccctgaaatgtggaatggtgtgggtgtntngggaggtcttgatgtgccaagttggaataaatgntgtggtttnaagaggttgatgaagacngnagttgnttaatttgganaagggttaggaataattaatggataaggggttatgtttggnagaagcagtttttaagaatgagganagaaggngaagctntgagggtgagaaggnggggggttgcccctntcttctnagggctccagagttnatcnngaggggtccctggtggaggctgggccagncggtgccccgatcagtgcgggtgggtgatgagggccgggggtggagtaactgggggcgcaaattttggcgggtntttgctgtc

SEQ ID NO: 492502 - DNA, 336 bp, Homo sapiens
tgaaggctcaaataaagttataccatggagtttctgtctaaacatgaccactactagtcctgaattatcagagtcttaggatggcttagagtaatctcgttcatttgtccttgctttttccttgttttaaagacaagtacaggcaagaaaatggctactctcaagtaaggattattctgaaacacggtctggatttagaaaataaatgaacattagggaaatttccttaattaagactctccaaaccaggtgtggtagctcatgcctgtaatcccagcactttgggaggcagaggtgggtggatcacctgaggttaggagttcgtgactagcctgg

SEQ ID NO: 492503 - DNA, 428 bp, Homo sapiens
  misc_feature (331)..(331): n is a, c, g, or t
  misc_feature (360)..(360): n is a, c, g, or t
  misc_feature (376)..(376): n is a, c, g, or t
  misc_feature (390)..(390): n is a, c, g, or t
  misc_feature (405)..(405): n is a, c, g, or t
gcttcaataccctgtctctacaagaaatacaaaaactagctgagcatggtggtatgtgtctacaatctcagctcactgcaacccccccaccttccgggttcaagcaagtctcctgcctcagcctccccaacagctgggaggctgaggcaggagaattgcttgaactcgggagggcagaggttgcaatgagatgagatcgccccattgcactacaacctggggaaacaaaccaagaccccgtctcaagatttaaaaaaaaaaaaaaaaaaaagatctttaattaaggcggcccgaagcttattccctttagtgaggggttaattttagcttnggcacttggccgttcgtttttacaacgtncgtgactggggaaaancctggggcgtttancccaatttaattcgnctttgcaggcaaaattccccttt

SEQ ID NO: 492504 - DNA, 212 bp, Homo sapiens
ggaatcaagttaaaaagacaagtagatctatcaacagaggtcatgtaatatagaggattataagtactaaacattaaaaaaaagcggggatggggaataaatcagaccaatacctgaagcggaaagcatctacaacacgaaacaaaactggagagaaaagaagttgactttatcaaatctagtagctcagttgaatgcgtccgtcgaagttg

SEQ ID NO: 492505 - DNA, 235 bp, Homo sapiens
aaccccgccgacccttctggacatctgagcagcagagctgatgtcttacttctaggacacaagccccatccggacatttacagaggggcatatcttttctgtacatctaaaactgttttagaataaaaagataaaaagtcactttttttttgtttttttgttttttggtttcgagacagagtctcactctgtcacccaggctggagtgtaatggtatggtcgctcggcgtgtgca

SEQ ID NO: 492506 - DNA, 311 bp, Homo sapiens
  misc_feature (4)..(4): n is a, c, g, or t
  misc_feature (23)..(23): n is a, c, g, or t
  misc_feature (37)..(37): n is a, c, g, or t
  misc_feature (67)..(67): n is a, c, g, or t
  misc_feature (197)..(197): n is a, c, g, or t
  misc_feature (239)..(239): n is a, c, g, or t
  misc_feature (268)..(268): n is a, c, g, or t
  misc_feature (307)..(307): n is a, c, g, or t
tggnccttaaagaaaatgtcagnctcctacaatctangcctgactgttaaggaaagagcacccacanctgctcctacttagctttttttctgtgggtcttacacagtaatcctttttttcttttcttgaaagagactcctcctttcttttcttttcttgaaagagttttaaagagataagatggcaaaagtgactgntctctactcccccagtttgaatggtaaatttgaatggtaaantcccatgaacatatatggaaatgtctttntcctactttctccaataaaggctgttcttagcttttcanttgc

SEQ ID NO: 492507 - DNA, 206 bp, Homo sapiens
cctattaaatggctgtcatcttgaaaacgacagactatggtgtaaccatgattctattatgtattaggtacgtctgtagaccaagatataatttttttaaaaagtaagtttatttctttcaaggtttacaaatgacaaaggtgcaccttgttatttaataattgccattatatgataagagcgtgcatgcacagtccatttagggt

SEQ ID NO: 492508 - DNA, 1240 bp, Homo sapiens
ttcgtcgaccacgcgctcgggtggcccagcatttgggtgagagcacagtaaggactactgctatggatggtacagaaggcttggttagaggccagaaagtactggattctggatgcaccaactcaaaattcctgtcggtcctgagacttagggcagaatcatgaatgtcattggagaacctattgatgaacagaggtcccatcaaaaccaaacaatttgctcccattcatgctgacggctccagagttcatggaacatgacgtgttgagccacggaacatctctggctgactggctatcaacggttgtcgactctgctagctcccctatgccaagggctggcaaaacttgggctttcccggctggtgctggagcttggcaagactgtactgatcatgcgagcttaatcaacaactgtctgccaaacgcccactggctggcttactcatgctgttctgctggctgtcgcgtgcacgacggaccctgtgcaaggcaactgactttactactcatgaaactgacttgatactctcggtgctcactcacacctccatccacgcatgccacctcctaacggtacccgctggctatatggctccaactcgacttgcacccacctggctgcctcgctgccccggcgctagcctctgcactgcgcgctggaacctgatgcgcctgccttaccttctcagaccacccaaccacacgctcaacgactgctacctgctcattcaccccgcctcccccctcctcccgccttcaacccaggcctgcctcagcacgcgccctgcactccctagacgcccacaatcccatccctgctggggcgccctacccaacccctacccccggccccctcggacacgggcgcacttactgccccggcacacaacccacgcccactaccacgaacgacgagccaaaccccgccgacccacccacaccacacgcccgccaacatcacctccaccgaacccgcgccccgcgaccacaccaggcccaacgcgaccccctccccattctcttccccctcccaactctatacactaccttccttcactcctcccccctctcaactaccctcacatccatccataaccaaactctttcctccacctccaccttttcccctctacactcctttctctcttaatcacccccacccctccccccttatcacctctcccacccccccttctccccacacaccctaatctatctcatccacactaaccctcaca

SEQ ID NO: 492509 - DNA, 898 bp, Homo sapiens
caacccccgcggaggaggtcaacataacacggagctcgcgttgtaatggggaccggtcgagaatcgtccctcggtgatactgccaatgtcaacgctcgtgtgttggaccccgccgatagagaagagacaagccgggggacgcggaatgacccaggccgtcctggggactgcttaagcgctgaggcccgccggggtaccgcggatatacacatcaaggtgtgcgaccagcaggggtagacacgcctgctataggacacccttgcagagtccctaatgtctaagggggagacaccccgaattaggaaagacacagaggtgttgaggaacaaccaagaaacgcacgtgggctcggttaaccgggtgcccgggagaatttccccgcgggacaatattcgtccggaaccacaaacgcggtccggaaaactatgcttcaaaaccgcgacatccgggtgatctgttgagataggcgcgaacttgatacccctggggcacgccgccgactaatgggccgcgattttagggaatacttgacagcggattgcggctaagtgatgcagcgtacagcgttggtgcacgctttcgagcaagcagcggcctatatcgcgacggtcttctacctaaagggatacccccaatagttttgccaggcccgcaatatcgggtatttgtttctttacgcgtgggtggccgccagtttgttagtgttttatcttatctacacatgggggactgaagagttcgagagatccccagagggagaatcccgctgcctatgaaaatggccaatgagcacgcatccggatgacggttccctgttctttgaaagaccttttttctggaagaggaggtactgcacttgtagtgttctcaaagacaccattaacttcctatggtctga

SEQ ID NO: 492510 - DNA, 537 bp, Homo sapiens
gatggtcaacaaattcctatgcaaaagacttgacagaagcagagtttcctacgaatttcaacacagcagggtacaaaatatgctaattttactaccttgtacatacactggcaacctctttaacatctagagactagatgttgaaaaattaggactatttgtccattatatatactatatacagagcggaacaaaatagcacaaaacatatagaaaaatggtgtctgaaaatgtccaagtatgaacacactagtcatattaccttaagcaatttcatccctccttcctcctctaaactattgaacaagtatagacattactatactgttcacaaaggtggcttcacaattcaatatccaaaagcatttcctatgaattacagcaaaaagataatttacaaagtggtattttactacctatacatataacatacatcgggcacttctaaacatctagataagactcagatgtatcaagtaaggagtcaatacgtctactctgtatacagcagtcttgaataagctgcaaacatgtaac

SEQ ID NO: 492511 - DNA, 383 bp, Homo sapiens
aaagatactggagaatcgtccacggctgcaggaagcatttcggtttccttctgctataagtcctctcagggaaggctgtcgccgctaccgctgcattaaatagttatgtacatcgcagagagtcccaggccatgggcaggtggaagaggggcgtcatatcaccaggggccaaattatatcatcgtacaccgcactggtgaactttgtactttttcacttctagccatgtactatggaacacgcgaaaccatatacttgtaaatacctcatcctccgtcttctgcttcttggctactattcccgtcttgaaggctagtttgttcccgcctctgcgtttggccacgaagctaagtgtagagcccggaacaccctcctctttcgga

SEQ ID NO: 492512 - DNA, 455 bp, Homo sapiens
  misc_feature (90)..(90): n is a, c, g, or t
ttgggctcagtgcctggcagaaaatgatttcactggcccttttgaaggcaagctgggatgggaccttttttaaactcaaggttaagaatntaggtccgccctcaagcccatactgaccatgcctcatccagagctcctttaaagccagggggctaacggatgttgtgtggagtcctgggtggaggtcctcccccagtggccttcctcccttcctttcacagcgggtttttttgccaggaaatgggggaaggaactaaacccccctgccccttgaaatgtttctgtaaatgggtacttgtgatccccctccgggaatctttgtggtatatacctggggccattttaggttttttcaagtgacttttggaaatcacccttttttatttgggggggaggatggggaaaaaagctgagagtttatgctgaaatggatttatagaatatttgtaatttta

SEQ ID NO: 492513 - DNA, 249 bp, Homo sapiens
  misc_feature (116)..(116): n is a, c, g, or t
  misc_feature (133)..(133): n is a, c, g, or t
  misc_feature (158)..(158): n is a, c, g, or t
  misc_feature (179)..(179): n is a, c, g, or t
  misc_feature (208)..(208): n is a, c, g, or t
  misc_feature (241)..(241): n is a, c, g, or t
  misc_feature (246)..(246): n is a, c, g, or t
ctgttttcaaactcctgggcttctcaagtgatacttctgcctcagccttctgagtagctgagattacaggaacgagccactgtacatatatatatatacacacacacacacaccgngtatatgcccagtaatntgattactggctcaaatggtatttntggttctagatccttgaggantcaccacactgtcttccacaatggttganctaattgacactcccaccaacagtgtaaaagcnttcgnatt

SEQ ID NO: 492514 - DNA, 468 bp, Homo sapiens
ggagtccagacagcctggcaatatggtgaaacccatctctactaaaaatacaaaaattagctggacgtggtggtgcatgcctgtaatcccagctactcaggaggctgaggcaggataattgcttgaacctggaaggcggaggttatggtgagtggagattgcgccattgcactccagcctgggcaacaggagtgaaactatgtttcaaaaaaaaaaaaaaaattaaaaaaattagccaggcatggtggcgtgtgcctgtagtcccagctacccaggaggctgaggtgagaggaccacctgagcccgagaggttgaggctgaagtgagctgtcatcacaccattgcactccaaccggggaaacagagtgagaactggtctcaaagaaaaaaaaaaggagggttatgaatttagtatttttatatttcccttaaaattctagtatctctgaggaaaagcctcaatcagaa

SEQ ID NO: 492515 - DNA, 409 bp, Homo sapiens
  misc_feature (312)..(312): n is a, c, g, or t
ccttgaggcattgcctgtgagaagcctgcagccggtatgggccaggccccagcatactcggccacctcggtggatgtccccactccagtgcagggtgcccacggggaccggtcatctgggcatgtccagcctggagcagctggagcagaacttggcagcggcagaggaagggcccctggagccggctgtcgtggacgccttaatcaagctggcatttggttgctcagaatgtcccaatacttccgctaggccctcgtttctcaggctgcccaagcttttctgtaaactcttttgttaatccacatttccttnaattaaaaacgcctcagtaaattcttagggatggaagtatttggacaaaaacctaatagaagagtcaccaccaaatgaagaataaaactaacaaaaa

SEQ ID NO: 492516 - DNA, 125 bp, Homo sapiens
ccagaactgttcgacagagttgggctgccggactcgcgaaactgcctagtgggcactgtgctactccttccggggtggtgaactccttgcgtctcactgtcgcaggccgcatcacgctctctcca

SEQ ID NO: 492517 - DNA, 356 bp, Homo sapiens
agagatcgatgtggcctggcgatgtcaaggtgcaagaacttctatgaagccaaggtccaagccttgatacatcggccagtaagtatgaagcagagtagaaagctgagacaagatgagcggcaagcgggaggcaggagagagaggcggctccgaccaggcagaccttccagcaaactcaaggccaacattcaatacatagctccgtgctgacacttgccctactgcccacagactgtgcctcacagtctgccccgacgaagagatgactagcgcctcttcatcactcgctgtcggtcccctccctgagccagcatctccatccaccaccccgtgccagctcccgtgccagccttcat

SEQ ID NO: 492518 - DNA, 1289 bp, Homo sapiens
gccaatggaacggccctggaagagacccttgtggtctgactccgtgagcttcaaaaacatgtgaggagggaagagtgtgcagacggaacttcagccgctgctctgttctcagcgtcacgtgcctgcctactgacccctgtccagagcccaccaggccagcgatgtcctctgtctcacttcaacctgaggccctgcctacgtggctgtcagccgaggttaagaaccaagctggcccagaagtatgaccagccagctgggagcaggagctgatgagagtggatctgagtgcgtggtagacacgtgccgtctgcatcggcaacaacttcatggacggccatcaacagatggcatcatactttgcgaattcatcaataatgctgccggccagtgctccgtgaaggaagatcaatgagtcaacccaaaattggcaccagactggagaacatcggcaactacatcgaaggccatacaccaagtatggggtgaagcccctacgacatatgatgagtgccaacgaacctgtatgagaacaactatacatacacaggtgcaagtaccacgactacctgggctttggaccagacaatggcgaatgacgcaaacggaacacaaaggtgcacacgtgagcaggtgagcgctactgccagaaacaatagtcagtgcagcgtggcacattcgattctcgctggtcaagcctaagcacgatcattggtctggcaacgaatcaatagtgtgcatgccagactatgggcaacctaactaatgttgtgcccagtaccaggcactgggcaataggagagggacaaatatgaagcgaagcacgagaacggccaaaaccattaatacgtaataacgcgaaaagtacattggagcacaatggaaccgatgaagcctcagtgaaacaccgagaagacacgagtgcaggatccgttcatcaactgcggcaacgaagaacaaagatgatagcaaagaacagtgcagtggatatctactgcacccaggggaacgacaaatctggcaacgaaatctttacggacaggccgtggcgttacagtaggcacaatggaatggcacagtgcataaagatgagcccagggtttcataccatgtggcaagatagggacgagcaaaataaaagtgcgagcactagagatcgatagagcgttaaaagcggtcatattatcctatgcacagtacagtgttaataatagaaccacaggaaactgtataaacatacccggtgtcacctgtagcctgaggttagtcctcgcccaataaccaagccacgt

SEQ ID NO: 492519 - DNA, 694 bp, Homo sapiens
gtggggcctctgagctctgctcttccggtcggatctctctcctctctgacctggactcacgcgttgtgtgtgctcaacttctgtacctacaaagaaatagataattcaataatggttatcctgccttatctgctaatacataatatatattaccatataaaagtgattaaatgagaaacaatggaatgagtggacttcatattatatgacatagcttttacatatttaaattcaccttgcaataactactgaatatagtcattcttgaaagtatgcaagttgggatttggttatattacaaaaatgtcaatcaagagtattaaaaaatagttaatgtgatagaaaaaccttacatatttttttctttatgttggtttagcgactttaggcgaaaactgttttcatataatctcatcgtgtttacctagaagataggttaaggaaatatattattattccgtgttgatgtgggtgaaggcagagatctaacctggctgtgtttagggccataccacttagtttagaaaatctgtgctagaacctgtgtcttattcctataagctatgtgttcagactgaaactggagaaattatgactatttatttatagtagtagttaaatctgaatgtgtatggacaaaaatatttaatggtcaagtaaatgtttaattcaaagatagttatgaccttataat

SEQ ID NO: 492520 - DNA, 930 bp, Homo sapiens
  misc_feature (18)..(18): n is a, c, g, or t
  misc_feature (26)..(26): n is a, c, g, or t
  misc_feature (28)..(28): n is a, c, g, or t
  misc_feature (30)..(30): n is a, c, g, or t
  misc_feature (36)..(36): n is a, c, g, or t
  misc_feature (48)..(48): n is a, c, g, or t
  misc_feature (54)..(54): n is a, c, g, or t
  misc_feature (59)..(59): n is a, c, g, or t
  misc_feature (64)..(65): n is a, c, g, or t
  misc_feature (73)..(73): n is a, c, g, or t
  misc_feature (77)..(77): n is a, c, g, or t
  misc_feature (107)..(109): n is a, c, g, or t
  misc_feature (111)..(111): n is a, c, g, or t
  misc_feature (123)..(123): n is a, c, g, or t
  misc_feature (126)..(126): n is a, c, g, or t
  misc_feature (133)..(133): n is a, c, g, or t
  misc_feature (137)..(137): n is a, c, g, or t
  misc_feature (143)..(144): n is a, c, g, or t
  misc_feature (147)..(147): n is a, c, g, or t
  misc_feature (151)..(153): n is a, c, g, or t
  misc_feature (186)..(186): n is a, c, g, or t
  misc_feature (209)..(209): n is a, c, g, or t
  misc_feature (220)..(220): n is a, c, g, or t
  misc_feature (224)..(224): n is a, c, g, or t
  misc_feature (228)..(228): n is a, c, g, or t
  misc_feature (232)..(232): n is a, c, g, or t
  misc_feature (247)..(247): n is a, c, g, or t
  misc_feature (258)..(258): n is a, c, g, or t
  misc_feature (278)..(278): n is a, c, g, or t
  misc_feature (299)..(299): n is a, c, g, or t
  misc_feature (362)..(362): n is a, c, g, or t
  misc_feature (395)..(395): n is a, c, g, or t
  misc_feature (451)..(451): n is a, c, g, or t
  misc_feature (468)..(468): n is a, c, g, or t
  misc_feature (493)..(493): n is a, c, g, or t
  misc_feature (536)..(536): n is a, c, g, or t
  misc_feature (539)..(539): n is a, c, g, or t
  misc_feature (567)..(567): n is a, c, g, or t
  misc_feature (677)..(677): n is a, c, g, or t
  misc_feature (763)..(763): n is a, c, g, or t
  misc_feature (831)..(831): n is a, c, g, or t
  misc_feature (909)..(909): n is a, c, g, or t
gagctgctccgcggaacnccgatctntncnccggcngctaccttagcngccgcngatcncccgnngccattcnaccnacgctgctgtggtcgctgctgctgttgctnnnanttttcgtcgccncanccgcggncccnctagannctntttnnnagctgcccgctcctcagcacccgaagattcgcntgtaaaacgcagagaaggtcctnagttgggagcnaatngccntganaaatagcacgaggcntgttgtctacngagtgcagtttaaatacacngacagtaaatggttcaaggcngaaatcatgtacataggggttaattttatacagattaaagcaacagagtgtgacttcactgcngccagttcctcagcaggcttcccaatggatttnaatgttactctacgccttcgagctgaactgggagcactccattctacatgagtganaatgccttggtttcaanactatcggaatgttacttttgggcntccagaaaacattaaggtgaccccaggagaaggctccctcatnatnaggttctcctctaactttaacatagatnatacatccacggcctttttttattatatatgtacattactaggaaaaaggaggaatccaacaggtcaaaggccctttcagaagcaactccatttcattggataacttaanaccctccagagtgtactgtttacaagtccaggcacaactgctttggaacaaaagtaacatctttagagtcgggcatttaagcacantatcttgctacgaaacaatggcagatgcctccactgagcttcagcaagtcatcctgatctccgtgggnacattttcgttgctgtcggtgctggcaggagctgtttcttcctggtcctgaaatatagaggctgattaatactggttnacactccaccaagatccatta

SEQ ID NO: 492521 - DNA, 454 bp, Homo sapiens
aacggtcatccttgacctgcccctggtaattggcaggagatcaggtctaagcagcagaacatccagcatggccagccgaaccagaatctgagcatgagttgggtagagtctgatacagtcccatgatagcccagaagctcacgtccctgctatatggatgtcattcctgaagatcacctgacttgtgagtagcccaaacccaacatcacctctggcctagactggaacagtgggaattggggactgcggtcaacgtaacaacggacacgtaactacatatttactggtaatgtaccccctgcaggttcaatgtatacattgcctagccacacgaactgtattacttgacgggtaggattcgcactaggcattccatcaaatcaaaccaactgtagcgatgtggaagcgaatgtgtggaacgacaacaagacagccagctttaaccctaccttag

SEQ ID NO: 492522 - DNA, 155 bp, Homo sapiens
gcagaagtgtaaacgacacaaaaaagcacaaaacacaaaacaaaaaccacaaaacaaaacaacaaaaaacgaacacgctccaatacctcagagaactctctatcactaaggactttcttacagaagatcttcaccccgtgaaagcaccaagaaac

SEQ ID NO: 492523 - DNA, 255 bp, Homo sapiens
  misc_feature (155)..(155): n is a, c, g, or t
  misc_feature (174)..(174): n is a, c, g, or t
cgcccagtgttgcgctccgagcacaccacacgcgcgcgcgcgcgcgcgaccccgccgatcccgtccactctcgagtgccggcgcaggccggatatgggcccgacgctccagcgccatccatttgcagggctagttgatccggccggtgcgttgtnccacactccttagcggatnccgatttccatgggcacggtcgtgttgtttatatcaaccaacaccttttcgggggtctgatgagcgcaacagggtaccgag

SEQ ID NO: 492524 - DNA, 185 bp, Homo sapiens
acatattactcatcatggtaacaaacttatatttaggcatgggtctattgatctctggggatcaacaagttttttttcttgggtcctactcaaagtaaacaagtatggagatacttggctatgagtgaaaaattacatcatcggagataaaggcgtttcaaaatccagcttcatcttggtggtca

SEQ ID NO: 492525 - DNA, 696 bp, Homo sapiens
gtgcctgccggccgtgtggggtgacggtggacttcccccatatgtagctaagtgcccagccagtcgtttggaaggccgtacaagttttcccgaggatactgtaataacgtacacatgtgaagaaagcttgtgaaacttcctggcgagaaggactcagtgatctgccttaagggcagtcaatggtcagatattgacgagttctgcaatcgtacgctgcgaggtgccaacaaggctaaattctgcatccctcaaacagccttatatcactcagaattatttccagtcggtactgtgtggacatatgagtgccgtccaggttacagaagagacaccttctctatcaccaaaactaacttgccttcagacatttaacacgtggtccacagcagtcgaatctgtaaaaagaacatcatgccctaatcccgggacgcaactacgaaatggtccacgatcgatgtaccaggtggcactatcatcggtgcaaccatctccttctcatgtaacacaggggtacaaaattattttggtcgattctagttgagtctttatttcagggccaggtctgtacagtggagtgacccgtgccagagtgacagagaaattaatgttccaggagcacacaaattggaaatggaataattcaagggaagtgaccattatggtataggaagctgtaggtatgcatgtataaaggat

SEQ ID NO: 492526 - DNA, 148 bp, Homo sapiens
gtagatgggcaggtcttataaggattgatgaccacacagaacaggcctgaataggtgtagatgagccctgagtagtaagcgctccttgagcgtctgtgcagtaccgaggcttcgttgaggcacgtgagctctgccatgtcctccatcc

SEQ ID NO: 492527 - DNA, 427 bp, Homo sapiens
  misc_feature (354)..(354): n is a, c, g, or t
  misc_feature (364)..(364): n is a, c, g, or t
  misc_feature (407)..(407): n is a, c, g, or t
tcgtaacccagatattcctttctattgataataactctttaaaccaattgccaatcagaaaaattttaaatctacttgtgacctggaagccctgcttcaagttgtcctgcccttcctgatcaaaccaatgtaagtcttacatgtactgattgatgtgttatgtcttcctaaaatgtataaaagcaaactgtactctgaccacctttaacacatgttatcaggacctcctgaagctgtttaaccttggcgaaataaactttctaaattgattgagacctgtttcagatacttttgggctcacaataatacggaagaagtatgcataggacagttggaaaacaccaaggaaaagtncacttaggcntaggagggagtggacagggggggaattgggcattggctggatnaacaaaaattcttttgggag

SEQ ID NO: 492528 - DNA, 198 bp, Homo sapiens
cgtaccctcctctagaagaaattccagtaatggatctgtttaagtgttaacgggagcagaagagaagacggtgcatgtacttgcagattatttcgaacatttttagaaataggaattcttgagctctcttttctttcttcagtcttttccatttcgtttttcttttctttttcactgtaatttctgtgcccatttcaa

SEQ ID NO: 492529 - DNA, 486 bp, Homo sapiens
gcggcggcggcgggactgcgcgccccagctccgatccccgttccgcgtcccgccgccgggaggaggtgcccactcgctcgcggagcgcgccggccgacagactcgtgcctgtggtgctgatttccgtccggaaccacaggggtcccacgtcccgagggaggaaagatgcagacctttctgacaaggggaaacgcagacgttggctactggttgagcgagcaagaaatatcaagaagctgaatttccaggccttcgccgagctgtgcaggaagcgagggatggaggttgtgcagcttgaagccttagccggccgatcgaggagcagggcccccttgggaccgttcattcgaattcccgaagcgaaaaggccttggaacctttggaaacaggttccgatttccctcttttgcgccacggcccggcaaaccacagaagcattggagtaataccccacgatcacctgcggcgcagctggtgcacaggttc

SEQ ID NO: 492530 - DNA, 1188 bp, Homo sapiens
taaatgaaggctcatttacttgaaatgtaaaaacttttcacgtgaatacaaattagaaaaagtgatggtgtttaatatcatatggcttttgggtccatcttgggggttaagtttatttactcacttcaggtttttcacctataaaatggtcaagctagcaaaaaaactctgggttttttaaagtggggagaagaagaagaccgtgccagaattatacagaacctcttcatggttaaagagaccatctccgtataaaatgtgacctaggtgggacaagcgtgaattgtgaaatagacgtggtaaagtaagcgtggtaccttgggtcatttttacatcttgggttataacagcgggataacgtgactttcagagtgcagtgtatttacaatacccaagaaataaagcaaaaagtgcgaccttaaaattctaatatagaattctcgtggggatcaccaagttccagggtggctactggactcgtgggctacaatcgtgagataaacttagtgggccatagacctattaaattaaatttccacaaatatacaatttcaaaaaaaaaaacacaaccaaaacaacaacaaaccaaaaaaacaccacaccacaaccaacgacaaacaaacagagagagaagggcaaaaaacaaactacggaggcccacccacacacacaaccaaacaacaaaaaaaagagaaccatcaacccgacacacacaacaagcaacacacagcagacagaacaaaacaaagacaaaacaagcagacaacaaaacagaaacaacaacacgaaccacaccaccacacgagagaagaacaacagagacacaaaaacccacaacaaacgcgcaacaagacaaacaaacacaacaacaacgatcccacccacacaccacacccaacaaaagcagacacgaagaacacagcccccacaaagacacaaacaaaaaaaataaaccacaagaaaacagcacaacaacaacgccagagcaacagacagacgagaccaccaccacgaagacaaccccacgaccaggacagcaccgaagcaggacccacaaccgtgaacaagacacaccaaccacacacaccagccaccgaagcaacaaactcccccaccaccgaccagcacaacaacaaacgacaagaaacgaaacagccgagccacacaacaacaagccaagaccagcag

SEQ ID NO: 492531 - DNA, 701 bp, Homo sapiens
  misc_feature (25)..(25): n is a, c, g, or t
  misc_feature (71)..(71): n is a, c, g, or t
  misc_feature (288)..(288): n is a, c, g, or t
tatgcacactttataaccttaagtntttatttgagaatgtgaaagtacaaagtgcagtagacttcaacaantcttgagtggcccagaatatacagaaaagaagacgttgatgaatgagttatagggttctaatcttagatggtaaaatgttgaaagacacctgtgcgggtttttggggggtatcgtttcttaaacaaattccaatctaggctttagaaagaaaaggttttagccggtttaagccacctttaatcttcatggaataaggcttcaagcttggctcttggngcaggaagaaagagtggcttgagtttacaagaaagggcataaagttaagtttgaagaattgccgcagccttttttgttaaacctttccccaggaattattcaaaattaggaacttttgattattattaacgttgggtttttccttggaagaataggaaccaccttggccttcttaatttttcttaattaaacccatttctccacctgggaacctaattctaaatttcaggtccccttattgaaaattggttattccccttaaaattgttgggcgttttattttggaaaaaacccttaaaattaggcttggccttcaatagaaccaagttaccattgcttcattttaacgcgcggggcgacacaacattatttacacttttttggaattagctgggttagggctcccctatcaa

SEQ ID NO: 492532 - DNA, 1258 bp, Homo sapiens
cccccgatcttgtttggttcttcgcactcgtgttagtattatcgaggcgccccccgctgggtataacagttaagtgctgctaaccaagctgttctgcgccatctgtgtgtgtgaacctttcgcgcgatatttaattatgtatcagagtgcaaacgctttcgttggattactgaactcctgctgacagtggtcttgaaacaacgccttaggttagtacagcgccaaagttttcgcgtcttgctaaaaaacgggtacgattgtcggccacaaagatctaactgaccctcttggtcttgctaacacgaaatgctccaagtttggttaacattgtgaacgttggactttctgtgtaaccaattcacttagctcgggggtataattcacgtgaattggcaatgccctcgagcctataggaccgtgcagcctttctcagatgctcatggcatacgtcctggcccagtgcttcctctgtgtttcgcaccaaaagtatcgtagttcacagctatatgacactggcccaatctgcatcgtgaaatattcgtatcggacagtttcattccacagtgatatcacatgggacacgacaagcgtattacaccctgttggcacactccgacacttatacaccatcttggatgatatcatgtgctcaccgatacgaaatggacacaatcctgaccacgcttttgtaacgacaagggctgtacctttaacacggcttaaatctcgctgatctgattatgaagctgaatttgaatactcatcatgaatcgtgtctgaccaaagaccattgtcccttccaataatcgtctctcttaagacggcaatgctgttctctaacatgactttcacctcaagtttggacccaagaaattacttgttctgtgtatttgacaacaaacaactggtacgctcactaaaatgacctcagcacatcgacgatcttctattaaccatctttactgtcgtttgtgagaagtactctttacatggttcatcccttctccataagccgaatgcacctgaactagacagtgtttcaagtctgatggagagaatgcttgtatttcttcatatggtcgatgaaagtctgcaacgtgcatttgtcatccccagtgccactcaatgccctgaccatgtaaggctttatttattgttaaagaaaccagagttatcccaatacattatcctgtgatttaccttacctacaaaagtggctcctgtttgtttgatgattaactgggttatctttatgaaa

SEQ ID NO: 492533 - DNA, 278 bp, Homo sapiens
actcatgtcccctgtgtttatcatctttggcaaatgtgtattcaagttcctctgccctatgataacttggtttatttggtgttcgttgttaaatcatgggatttctgtagtgatatagagtgtgctcctttcaatcatggcatatggtaggtaaaagtaccaaagtgctcctgttcaacctaaagaaggtgctatagtactaagattcttatctctgtcttctttgacatggtccaatcctctattatgctttcgtgatctaaataggcattatcaac

SEQ ID NO: 492534 - DNA, 155 bp, Homo sapiens
ggcgtgcgatctgtgtgcattgcgaagcctagtactcttacaacgacaaggtgccgaaagccttcatcatcaacgacttgatgatctgcgcccgctggtcgccgcccaggtccttgaagacctcgtacactgcccgccccttctgtcgtcttctc

SEQ ID NO: 492535 - DNA, 790 bp, Homo sapiens
cagagcctgtaaggactgaaacaatccctcccgggctttatgatggacagtcaggggcttggggagcctctgagggactcttatcattgctgcagttgtctggaagcctgggtgggtcatgatctgcatggggatcgatgctttcgtgtacttggcttccattaggtttataaggtcgtgggatgtgtgaaaggttcgacgtgggcccagagcttgaagttcatttgcacctcagctttggcatgtggtgttcgtgccgataaagcacatgtatttctgttacgtgctgcagccattccaaggaattttgtttttgaataacatgggaatatgcgtcacgtggtgttgttgttcaacagtatcatggtatgttgtatgtatcttcgactgatcatttaaagagtttgacctcagagctccaggatcatcagataaacttgtcatgttagtatattctatgtattgtataaatcgaagacttctgtgtgctcttaaatatattaaaaacgagttggacattggcaaatgaaaggagtaactggatatcacacatgtccactctgcggacgcggagactcccaagacctccatctaccagctagctagtttagagcccagcgcaggtcctggacggcacgcgcgcgcaaagcgtgtcctgaggacacggggtgcaagcaaactgggggtgcggcacggaaaaaaacccggggccagcggtgcgctggacaacccagggggccgaggcaagggggccacgcaaggggaccgagaattaaatacccccggctgg

SEQ ID NO: 492536 - DNA, 289 bp, Homo sapiens
tgatgcctccaggtgccgcgattacacgtttagcactgagccggcttagtttctgtatctaaagataacggagtttttatttgtaagtccaatacttcttagcaagcagccttcatgatctagcttctgcataaccctatcgtttcttgtatcaaaggagcttgtgacccacatcacatcccaaaactccactgtgcaaaaatgttggtagttctcaaatgtggaactacagggtagccttctttgcttcaaccttcctcaccaacctatccacctaggaggacataca

SEQ ID NO: 492537 - DNA, 400 bp, Homo sapiens
taccgacggcgctctgctggctgacttgaccgacgtctgcactgcgcgcttttaggtctgtatgtcgtcggcacgctggcgcttgttctacttactgcctcctcgggctcgtccccggccggggtcggctatgtgttttgtccgggggttgcgcctgcgtgtgaggcgtattataccatagccgcctagtttaaagagtactgcggcacgtactattgacccagtgaatgggggcttcgacatgggcttatagggagtcataagtggagtccgtaaaagaggtactctttaactataaaagctattgtgtaagctagtcatattaagttgttggctccggcgtttgatcgttcttgggccgtgacacgtgcgtcgtcgacctgtcccgtgcgcctagggt

SEQ ID NO: 492538 - DNA, 881 bp, Homo sapiens
  misc_feature (42)..(42): n is a, c, g, or t
  misc_feature (45)..(45): n is a, c, g, or t
  misc_feature (60)..(60): n is a, c, g, or t
  misc_feature (111)..(111): n is a, c, g, or t
  misc_feature (231)..(231): n is a, c, g, or t
  misc_feature (243)..(243): n is a, c, g, or t
  misc_feature (246)..(246): n is a, c, g, or t
  misc_feature (282)..(282): n is a, c, g, or t
  misc_feature (291)..(291): n is a, c, g, or t
  misc_feature (467)..(467): n is a, c, g, or t
  misc_feature (511)..(511): n is a, c, g, or t
  misc_feature (521)..(521): n is a, c, g, or t
  misc_feature (526)..(526): n is a, c, g, or t
  misc_feature (847)..(847): n is a, c, g, or t
  misc_feature (878)..(878): n is a, c, g, or t
tttcaagtaccgaaaacaagatttattgcatttcatgcagtntgnagtccatgcagcaanggagatgagcacaatctttaatgtatttaaaaaataaaacagtggccagancagtgcacaaagtcctggttctcctggatcttggagagaagggatggggaggaaaccagctctctgtggagaatgagttcatggcccacaggcaagaaatgttcccacatcttctggatncggaaggctctnggnaaggggcagagaagaatgctggtggaaagggtctgnccctttctntttttctgagggcagaactggcagagtggaaatcctgtacacccttgggaaggaagagcacaggctgccctgccctttagcagtggtggtgagtgcccaagccaggaaacacacaagagaattatttcttcaaccacacgtttcaagaaaatgccataaatatgttatttaatatnctcgtttcatagcattggacacatagctcgatatattgaaatantgattccttngaganaaaaatgaaaaaaagaaaataaaaaataaaaaatattgcatctttctgttgtaggctctcagtccccaggcgtggagagtagtgcaccagtatcttagcctgcaggaggcaatgaagtcccgggtcctctggtgagggaaggtgtgtccccatcgcctgggggctctatggcaaatattgtgctcggggtccttggctttgcagctcaggcctcagtctccagtcacctggggggtctgcccatcagagggctggttggctgactgaataaacatgggctgggcaaggtcttggcctgcaggcatggtgacttgctggatntggctcgtgccgctcgccccgaatcccgcangag

SEQ ID NO: 492539 - DNA, 828 bp, Homo sapiens
  misc_feature (42)..(42): n is a, c, g, or t
  misc_feature (45)..(45): n is a, c, g, or t
  misc_feature (60)..(60): n is a, c, g, or t
  misc_feature (111)..(111): n is a, c, g, or t
  misc_feature (231)..(231): n is a, c, g, or t
  misc_feature (414)..(414): n is a, c, g, or t
  misc_feature (458)..(458): n is a, c, g, or t
  misc_feature (468)..(468): n is a, c, g, or t
  misc_feature (473)..(473): n is a, c, g, or t
  misc_feature (794)..(794): n is a, c, g, or t
  misc_feature (825)..(825): n is a, c, g, or t
tttcaagtaccgaaaacaagatttattgcatttcatgcagtntgnagtccatgcagcaanggagatgagcacaatctttaatgtatttaaaaaataaaacagtggccagancagtgcacaaagtcctggttctcctggatcttggagagaagggatggggaggaaaccagctctctgtggagaatgagttcatggcccacaggcaagaaatgttcccacatcttctggatncggaaggctcttctgagggcagaactggcagagtggaaatcctgtacacccttgggaaggaagagcacaggctgccctgccctttagcagtggtggtgagtgcccaagccaggaaacacacaagagaattatttcttcaaccacacgtttcaagaaaatgccataaatatgttatttaatatnctcgtttcatagcattggacacatagctcgatatattgaaatantgattccttngaganaaaaatgaaaaaaagaaaataaaaaataaaaaatattgcatctttctgttgtaggctctcagtccccaggcgtggagagtagtgcaccagtatcttagcctgcaggaggcaatgaagtcccgggtcctctggtgagggaaggtgtgtccccatcgcctgggggctctatggcaaatattgtgctcggggtccttggctttgcagctcaggcctcagtctccagtcacctggggggtctgcccatcagagggctggttggctgactgaataaacatgggctgggcaaggtcttggcctgcaggcatggtgacttgctggatntggctcgtgccgctcgccccgaatcccgcangag

SEQ ID NO: 492540 - DNA, 130 bp, Homo sapiens
ggcagcactggtggtgcctcagccatggccttgaccgtttttcttcttgggcttcttttttaattcacaggcttttttaccttctattttttttacttagccacccttggggtttaatttgcccagggaa

SEQ ID NO: 492541 - DNA, 139 bp, Homo sapiens
gaatgtcactaaggaaacagactcatttattcctcacatatttattaaaatgcattcactgtgagtgatggaggttcaaagatgaaagaggctcacagcagtaagtatgatctttcaaatacctaaatcagagcggtaa

SEQ ID NO: 492542 - DNA, 425 bp, Homo sapiens
  misc_feature (27)..(27): n is a, c, g, or t
tccgtacacaatatttctaattagtanaaagatctgacatgtacccaggacccatttcacccactgctctgtttggctcgcagtcttttgtctctctcttcagcaaatggtgaggcggataccttttcctcggggaaagagaaatccatggtttgttgcccttgccaataacaaaaatgttggaaagtcgagtggcaaagctgttgccattggcatctttcacgtgaaccacgtcaaaagatccagggtgcctctctctgttggtgatcacaccaattcttcctaggttagcacctccagtcaccatacacaggttaccagtgtcgaacttgatgaaatcagtaatcttgccagtctccaaatcaatctgaatggtatcattcaccttgatgaggggatcggggtaacggatgggtaccgagctc

SEQ ID NO: 492543 - DNA, 248 bp, Homo sapiens
cagggttctggcacatccacgtggacagcatcaccatgaacggagaggccatcgccatgcgctgagggctgccaggccatatgtagacaccggcacctctctgctgcccggcccaaccagccccattgccaacattccagagcgacatcggagccagagagaactcagactggcgacatggctggatcagcatgctcagccatatcaggaagcctgcccccggataatcggatctttccaccattcaa

SEQ ID NO: 492544 - DNA, 254 bp, Homo sapiens
  misc_feature (104)..(104): n is a, c, g, or t
actgtactcatctgttttcagactgcagctgaccatgggtaactgaaaccatggaaagccaaatctcagataagggagaactactgtacagacacttttttatntgacctcatccaggcagcctcagttttgttttggtttgctttttggagatggagtctccctctgtcccccaggatggagtgcagtggcatgatcttggctcactgtaacctccacctcccgggttcaagcgattctcctgcctcggcctc

SEQ ID NO: 492545 - DNA, 1055 bp, Homo sapiens
ggaccagacgataaaggccccgagacacctacataacgtgggagctgggaaacacgtgaggcgggatccgtgccgaacagtcgctggacctgttgctctgcatcaacatggcccatgtcagcccctctgtctgctgcacggaggggcgtcttcagagcacgcaggacacctgactcaaatccagggtccctgctcgatcacctacggggaacccagcaatgggggcttcgggacacagccctcctggcaggacctgggcaagaggccagtggcctgttcctgtgcagcagcgatggtggacatgccagccagcaagcatagatgcctgatcttcctggaacaagagctaagcaccctccttcaaccccgaacatcctgcatccctgccggaggctctgtgaggcacgaaccctgcctcccttaggccggaccttgtggactgaaggccccagccagtctgtgctctcagacgctggctgaatgggcccagtctgctcagaataaagcagtgtcctgggttgccgggacaagaaatccacaaagaatacattcacaaagccatactcacgggggggacctcatgaggagcaggttgcgcctgaccacactgggagcggactaaaatctgcagcagatattggatctacaaccgcatcaccagacggagcccgcaaatgagattcatcttcgtattgcccaatagtgttgattacacacgtatgccagtcacacttcgccgcagcaaatatcaaggcatgccattacaacaagccttccacctaactgcccgacgtttaccccgggcatttcaccctcctgtcgacaaacacctgcggcaaagaggggagaatagatacaccgataccagcgccattacgaagagtgacccattgcaggcgccccatgggcacgcgaaccagtggggcagacgccaccccccccggcaacagcactaggccgcccccgacgtacacccgccgagacatggtcgccgctcaactctccccacgcacagcggcagacaaacccagctacgaccagactaacgagacacc

SEQ ID NO: 492546 - DNA, 853 bp, Homo sapiens
  misc_feature (4)..(4): n is a, c, g, or t
  misc_feature (128)..(128): n is a, c, g, or t
  misc_feature (136)..(136): n is a, c, g, or t
  misc_feature (141)..(142): n is a, c, g, or t
  misc_feature (144)..(144): n is a, c, g, or t
  misc_feature (147)..(147): n is a, c, g, or t
  misc_feature (149)..(150): n is a, c, g, or t
  misc_feature (152)..(153): n is a, c, g, or t
  misc_feature (215)..(215): n is a, c, g, or t
  misc_feature (372)..(372): n is a, c, g, or t
  misc_feature (378)..(378): n is a, c, g, or t
  misc_feature (394)..(394): n is a, c, g, or t
  misc_feature (402)..(402): n is a, c, g, or t
  misc_feature (419)..(419): n is a, c, g, or t
  misc_feature (452)..(452): n is a, c, g, or t
  misc_feature (455)..(456): n is a, c, g, or t
  misc_feature (461)..(461): n is a, c, g, or t
  misc_feature (465)..(465): n is a, c, g, or t
  misc_feature (469)..(469): n is a, c, g, or t
  misc_feature (471)..(473): n is a, c, g, or t
  misc_feature (475)..(475): n is a, c, g, or t
  misc_feature (549)..(549): n is a, c, g, or t
  misc_feature (558)..(558): n is a, c, g, or t
  misc_feature (562)..(562): n is a, c, g, or t
  misc_feature (565)..(565): n is a, c, g, or t
  misc_feature (568)..(568): n is a, c, g, or t
  misc_feature (591)..(591): n is a, c, g, or t
  misc_feature (598)..(598): n is a, c, g, or t
  misc_feature (679)..(679): n is a, c, g, or t
  misc_feature (681)..(681): n is a, c, g, or t
  misc_feature (692)..(692): n is a, c, g, or t
  misc_feature (708)..(708): n is a, c, g, or t
  misc_feature (720)..(720): n is a, c, g, or t
  misc_feature (740)..(741): n is a, c, g, or t
  misc_feature (751)..(751): n is a, c, g, or t
  misc_feature (757)..(757): n is a, c, g, or t
  misc_feature (762)..(762): n is a, c, g, or t
  misc_feature (845)..(845): n is a, c, g, or t
aaanaaaaaactttcaaatgctggtaaccataaaggtctggttttaaggatggcctttaaggaaaggccgtggcaggcgggctgagaggggcggctccacctcagccctgcccacagcacaggctcanagaagccnagatnnanatnanngnntggcatgcaaaggagttgaagacaaaaccatttttttccagcttctctacaaagccaattantaagcaacagttattaaagtgaagtatccatttacagactgacacaaatatcaaaaataagcagcttagatgagtacagaggctggagtgcattttctgctaacaaaaaccactgtgatattctcccagtttagagggaaaagtctatctcaggccnactcanatatggcagaaataantgggtctnaagtgcattttcaattntttctgcccggaaggagcccggatgataaaaanaannctggngttnatancnnnanaaagagcccaaaaacaaaatacgtctaaaaaaggaaaaaaaaaaaaaataaaaaaaaataaaaaaatggctgtnggccggctngggncgncgntgaaaaactgacaatattttttncacccantagggtccacagcagtgtttgaaatgacaggctttttatttctcaggaacagccgagatgacctccagaggtttccagcgnangtataacaatncaccctgcagctctanaaaagggagganggcgaatcaaatccatcatnntacgccaganttcagncctgngggagctgctgcctccaaagaaaacggggacctgggcggactgcgtctctcccccgtgtggagaacgtgacaaatgtgaaggntgggctga

SEQ ID NO: 492547 - DNA, 949 bp, Homo sapiens
gcatttgctggtactgctgtataaatttaatagttttaatatagtgcaacagaagaaactgcatttgaagaaaagagctattgaataccataaattaaccctcaagtctgttctaggtattcttgggcctgaggtcttctgaattaattgagtagcagtatttggctactcagttggttattaactgtgctttttgactgataagagaatacatttaaattttttaaatggtatttatggggccaggtgtggtggctcacacctttaatcccagcactttgggaggccgatcaattatatagatcaacatgatcaaggtgggcagaccactcaaagtcaagagttcaagaccagcctggccaacatggcaaaaccccgtctccactaaaaatgcaaaatttagccaagcatggtggcacacgcctgtagtcctagctactcaggaagctgaggcaggagaacagcttgagcccaggaggcagaggttgcagtgagccgaaatcacgccacagcactccagcctgggtgacagaatgagaccctatctatctcagaaaaaaaaaaaaaaaaaaaagttttccaggggtaaacgtagcaaacaatttcaggtgaccaccaattttccctcagaaagtctcaaaacactttaatgtctccggatcatctctatgctctcaatctcgcatttgaccaaattttccacgtagtctataagcctataagcttgttgtcacaacaggccacacaaaactgcgtgcaccatcacatgtggctttcttggacaaggattgaccctggaacccagacaagggatacaggcactcctaggagcctcacacgtccgtcaaaaattccggtgtgtctaaaaaatccacgtcaactaattcctaagtacccttatatggggcctcctggcgcacaacctgcatcttggggtcgaaggacattc

SEQ ID NO: 492548 - DNA, 256 bp, Homo sapiens
  misc_feature (142)..(142): n is a, c, g, or t
ttcccccccccggggggtcccccttcccttgggggccttccccttttttagggggaaaaaagaggggggaccttttgggaccctaagttttttgatttttttttggggggggtttgggggggcgggcccttttttttacccntgggggggaaaaagatgggggggaaggggggggggggggaaattttcccctccccccttcccctttgggtttttgaaaagggggcccgggggaaaaaattggccggttttttta

SEQ ID NO: 492549 - DNA, 497 bp, Homo sapiens
  misc_feature (6)..(6): n is a, c, g, or t
  misc_feature (447)..(447): n is a, c, g, or t
  misc_feature (475)..(475): n is a, c, g, or t
gaacangtatgagcatttgatgtaaatcttgtcaggagccacacacaccaactttctgtgctcagggacagtgcagtctgtgtggaccagaaccatatgaagtggactcaggagatagtctccaagcctgtctcctcagagtgagcaggctaggcttcagaaggtaggttgatttggctgtcattgttgttattgacttgatgctcagtaatccagagccaatgaaggcaagaataaacgatgacctcagctgctgcacagctcttcactgttctcttaataccaactctacccagcagtcttgcaaagatgtgttgtgggttacatggggacaacgaagagatggatcagcccacatcaccatcaggaatggaaaaccaattcaaaatccctatcctactgattggggagttttacatacttgtaagacaagaggtaattatactncgaatcattaaaggaggtgggtgaaagntctccaacctctgaaaattcac

SEQ ID NO: 492550 - DNA, 185 bp, Homo sapiens
ttcgagccctcaccagtccccactgtagaagaggtgacacttctccaacacagtcaacagaaagaaagacctcagagtcggccccagtcaaacggcggtaccatgacctgactggatgaacatggaacgatgcacagcctggacgacgacgggcaaggattgacgatgagaaccgtcacggggaa

SEQ ID NO: 492551 - DNA, 292 bp, Homo sapiens
tctgactcctagaggatcccttgagattatcgctaggatatagaactcgcagatccttgaatgttgcgggaaaagatatagtaactatgtcgtatttgaatatcatgcttagtattcctctggagtgcgtcttgcacattaagaatatccaatggagcatccaggtttcactctccatgacagtgccattgtgaattgtgctgtactagtaatatactcgtaggtgtctattctgcttaatttacatacccttagtcatagatcatccattacctggcatgctggctggtgt

SEQ ID NO: 492552 - DNA, 908 bp, Homo sapiens
  misc_feature (22)..(22): n is a, c, g, or t
  misc_feature (73)..(73): n is a, c, g, or t
  misc_feature (81)..(82): n is a, c, g, or t
  misc_feature (97)..(97): n is a, c, g, or t
  misc_feature (110)..(110): n is a, c, g, or t
  misc_feature (115)..(115): n is a, c, g, or t
  misc_feature (170)..(170): n is a, c, g, or t
  misc_feature (183)..(183): n is a, c, g, or t
  misc_feature (187)..(187): n is a, c, g, or t
  misc_feature (281)..(281): n is a, c, g, or t
  misc_feature (291)..(291): n is a, c, g, or t
  misc_feature (308)..(308): n is a, c, g, or t
  misc_feature (318)..(318): n is a, c, g, or t
  misc_feature (329)..(330): n is a, c, g, or t
  misc_feature (347)..(347): n is a, c, g, or t
  misc_feature (386)..(386): n is a, c, g, or t
  misc_feature (388)..(388): n is a, c, g, or t
  misc_feature (395)..(395): n is a, c, g, or t
  misc_feature (402)..(403): n is a, c, g, or t
  misc_feature (413)..(413): n is a, c, g, or t
  misc_feature (457)..(457): n is a, c, g, or t
  misc_feature (460)..(461): n is a, c, g, or t
  misc_feature (491)..(491): n is a, c, g, or t
  misc_feature (521)..(521): n is a, c, g, or t
  misc_feature (524)..(524): n is a, c, g, or t
  misc_feature (548)..(548): n is a, c, g, or t
  misc_feature (570)..(570): n is a, c, g, or t
  misc_feature (578)..(578): n is a, c, g, or t
  misc_feature (593)..(594): n is a, c, g, or t
  misc_feature (596)..(596): n is a, c, g, or t
  misc_feature (601)..(601): n is a, c, g, or t
  misc_feature (611)..(611): n is a, c, g, or t
  misc_feature (628)..(628): n is a, c, g, or t
  misc_feature (644)..(644): n is a, c, g, or t
  misc_feature (687)..(687): n is a, c, g, or t
  misc_feature (710)..(711): n is a, c, g, or t
  misc_feature (753)..(753): n is a, c, g, or t
  misc_feature (776)..(777): n is a, c, g, or t
  misc_feature (779)..(781): n is a, c, g, or t
  misc_feature (811)..(811): n is a, c, g, or t
  misc_feature (814)..(814): n is a, c, g, or t
  misc_feature (822)..(822): n is a, c, g, or t
  misc_feature (845)..(845): n is a, c, g, or t
  misc_feature (859)..(859): n is a, c, g, or t
tataagtaatgcctagggtgantggtaggaagtctttctctcaataggaggtgtatgacataggtcggtagcnggaactcnnggggtatgcctgtcngaattcataaganctctnggaggttagaagtcaggcgcttggctgcaaaatatgtctgtcgtagacgttctcncggggagagtgcngtcnatatgttgttccctaggaagattgtagtggtgagggtgtttattataataatgtttgtgtatcgggctatgaagaatagggggaaggcggcttncggggtatcngatgttgaaccttgagnatagtcgggncccccctcggnnaaggcagaagggggtcnggttggcccttcctagtgtggagataaacaatattatgncnaagggcnatgatgnnaggagtaacnagaggtgtccttgtgttgtgataagggtggagaggttaaaggancannttattagtaatgttgatagtagaatgatgnctagggtgcctcaatatgagattgtttggnctnctccccccagtccccggacaaggnggtagtttgagtttgatccccnccctgacnagaggattgagtaanngnctagnctagaggtgnctagaataaataggagncctaggttgaggttgncaagggggttgggtatggggaggggggtcgatagtagaagacngatggtgagacctaaggctgggnnggtgatgtagagggtgatggtagatgtgcggggttttagggnccttttggtgaagagttttatgnngnnnggaaggggttgtagtacccggtaggccgtnaanagttgggncttttctgtagttgtatataccntagaattttctgtntggtaacgattaggaatccaattccgattagaatgggtaaaatgaggag

SEQ ID NO: 492553 - DNA, 546 bp, Homo sapiens
taccgttatgtatggcgtgcacttttcccctcacgtttacgaggctaccgcgtaaagcaggttaagctatttgggtccacaacaatgtagtttttagtaaatgtcatgacttatataaaccctagactcacagtgtagtaactatattatagttcctttcatttttaaaacatttctgtccctttgtgatttcatgctctgcattctgtacatattctttccaaatcactcctcagaacctgccccaagatggagctactgtgttattgttcccttaacatttacttattccattcacatgtgactattcttgttattagtgggaggaaggggctgcatagtgtactataagcagttgtggtaccttagctcccagacacaggtgaatcctccattcattggttaagctccagttttattcttggctcacctatattttgtgataccaaaatattaagttctatatatcctcctcctcttcatcctgtctgtttctcatctctccaaatttacagagttaacatatcttatttctgcttagtcaaa

SEQ ID NO: 492554 - DNA, 629 bp, Homo sapiens
ataaataaagaatatattcgtgttcgtttatcaatgcacagtaagtctacaaactcatgatgcttaaaaaacatttcataaatgatgaattgtgtggcaagcgatcggtctgctttggtgcagacatgtatgagaagctcattgtgaatcacttcttagcacatagattaatacaattggcctatgattgttccaatgatatgtacgagctacttccattaactttttgaaagccaacacagtcccttaaactctagtgcttctgctttatgacatgggaactgttctgtcatcgaatggagtgctattctagctacatacgaattctttcagtatcagttctcatttctatagacttgcaagcctatgtatgaattatgacggggtctccctgacaaggggccggtagccctttctgacataatttcggtcacattccctaattcttgtgttaagcgctccggtttcccatatagtcttaatggtattactgaacagcaaaaagttcttggcactccttacggaacatccggattcgggactgctcatgaccagggcaggagaggtgcattcgactgagatccactacttgttgcgaaggcctattttcacacccagacatgactgca

SEQ ID NO: 492555 - DNA, 836 bp, Homo sapiens
  misc_feature (29)..(29): n is a, c, g, or t
  misc_feature (58)..(58): n is a, c, g, or t
  misc_feature (778)..(778): n is a, c, g, or t
  misc_feature (813)..(813): n is a, c, g, or t
ggaagcagggagagagaactggccagggnataaaaagggcccacaagagaccggctcnaggatcccaaggcccaactccccgaaccactcagggtcctgtggacagctcacctagtggcaatggctccaggctcccggacgtccctgctcctggcttttgccctgctctgcctgccctggcttcaagaggctggtgccgtccaaaccgttccgttatccaggctttttgaccacgctatgctccaagcccatcgcgcgcaccagctggccattgacacctaccaggagtttgaagaaacctatatcccaaaggaccagaagtattcattcctgcatgactcccagacctccttctgcttctcagactctattccgacaccctccaacatggaggaaacgcaacagaaatccaatctagagctgctccgcatctccctgctgctcatcgagtcgtggctggagcccgtgcggttcctcaggagtatgttcgccaacaacctggtgtatgacacctcggacagcgatgactatcacctcctaaaggacctagaggaaggcatccaaacgctgatggggaggctggaagacggcagccgccggactgggcagatcctcaagcagacctacagcaagtttgacacaaactcgcacaaccatgacgcactgctcaagaactacgggctgctctactgcttcaggaaggacatggacaaggtcgagacattcctgcgcatggtgcagtgccgctctgtggagggaactgtggtttactgccggnggatcctggacctccagtgcttctgcctgagtgcntcaggccacactgctattagtgt

SEQ ID NO: 492556 - DNA, 316 bp, Homo sapiens
aactccatggtgattatctgtgtgtctgaacacatcgaacaccgaaaagggcagggagctgtggctcacgcctgtgatcccagcgctttgggaggccaaggcgagtagatcacttgaggtcaggagttcaagaccagtctaggcaacatggtgaaaccccgtctctacctaaaaaatacaaaaattagccgggcgtggtggtgcacgcttgcaatcccagctgcacgggaggctgaggcaggagaaccgcttgaacctgagaggcggaggtcgcagtgagccgaggccgcgccattgcactccggcctgggcaaca

SEQ ID NO: 492557 - DNA, 888 bp, Homo sapiens
  misc_feature (29)..(29): n is a, c, g, or t
  misc_feature (58)..(58): n is a, c, g, or t
ggaagcagggagagagaactggccagggnataaaaagggcccacaagagaccggctcnaggatcccaaggcccaactccccgaaccactcagggtcctgtggacagctcacctagtggcaatggctccaggctcccggacgtccctgctcctggcttttgccctgctctgcctgccctggcttcaagagggcagtgccttcccaaccattcccttatccaggctttttgaccacgctatgctccaagcccatcgcgcgcaccagctggccattgacacctaccaggagtttgaagaaacctatatcccaaaggaccagaagtattcattcctgcatgactcccagacctccttctgcttctcagactctattccgacaccctccaacatggaggaaacgcaacagaaatccaatctagagctgctccgcatctccctgctgctcatcgagtcgtggctggagcccgtgcggttcctcaggagtatgttcgccaacaacctggtgtatgacacctcggacagcgatgactatcacctcctaaaggacctagaggaaggcatccaaacgctgatggggaggctggaagacggcagccgccggactgggcagatcctcaagcagacctacagcaagtttgacacaaactcgcacaaccatgacgcactgctcaagaactacgggctgctctactgcttcaggaaggacatggacaaggtcgagacattcctgcgcatggtgcagtgccgctctgtggagggcagctgtggcttctaggtgcccgagtagcatcctgtgacccctccccagtgcctctcctggccctgaaggtgccactccagtgcccaccagccttgtcctaataaaattaagttgtatcatttcaaaaaa

SEQ ID NO: 492558 - DNA, 762 bp, Homo sapiens
caggtctgtgcgtactagtgatgtcagtccgacgcctgtctggtttgctgtctgctgcctggttcaggctggtgcgtccaacgttcgttatccaggctttttgaccacgctatgctccaagcccatcgcgcgcaccagctggccattgacacctaccaggagtttgaagaaacctatatcccaaaggaccagaagtattcattcctgcatgactcccagacctccttctgcttctcagactctattccgacaccctccaacatggaggaaacgcaacagaaatccaatctagagctgctccgcatctccctgctgctcatcgagtcgtggctggagcccgtgcggttcctcaggagtatgttcgccaacaacctggtgtatgacacctcggacagcgatgactatcacctcctaaaggacctagaggaaggcatccaaacgctgatggggaggctggaagacggcagccgccggactgggcagatcctcaagcagacctacagcaagtttgacacaaactcgcacaaccatgacgcactgctcaagaactacgggctgctctactgcttcaggaaggacatggacaaggtcgagacattcctgcgcatggtgcagtgccgctctgtggagggcagctgtggcttctaggtgcccgagtagcatcctgtgacccctccccagtgcctctcctggccctgaaggtgccactccagtgcccaccagccttgtcctaataaaattaagttgtatcatttcaaaaaa

SEQ ID NO: 492559 - DNA, 833 bp, Homo sapiens
  misc_feature (29)..(29): n is a, c, g, or t
  misc_feature (58)..(58): n is a, c, g, or t
  misc_feature (687)..(687): n is a, c, g, or t
  misc_feature (689)..(689): n is a, c, g, or t
  misc_feature (728)..(728): n is a, c, g, or t
  misc_feature (731)..(731): n is a, c, g, or t
  misc_feature (735)..(735): n is a, c, g, or t
  misc_feature (737)..(740): n is a, c, g, or t
  misc_feature (763)..(767): n is a, c, g, or t
  misc_feature (798)..(798): n is a, c, g, or t
ggaagcagggagagagaactggccagggnataaaaagggcccacaagagaccggctcnaggatcccaaggcccaactccccgaaccactcagggtcctgtggacagctcacctagtggcaatggctccaggctcccggacgtccctgctcctggcttttgccctgctctgcctgccctggcttcaagaggctggtgccgtccaaaccgttccgttatccaggctttttgaccacgctatgctccaagcccatcgcgcgcaccagctggccattgacacctaccaggagtttgaagaaacctatatcccaaaggaccagaagtattcattcctgcatgactcccagacctccttctgcttctcagactctattccgacaccctccaacatggaggaaacgcaacagaaatccaatctagagctgctccgcatctccctgctgctcatcgagtcgtggctggagcccgtgcggttcctcaggagtatgttcgccaacaacctggtgtatgacacctcggacagcgatgactatcacctcctaaaggacctagaggaaggcatccaaacgctgatggggaggctggaagacggcagccgccggactgggcagatcctcaagcagacctacagcaagtttgacacaaactcgcacaaccatgacgcactgctcaagaactacgagacatgntnaaacagctatacgaggaaagaaacaatagaaacaaaggncanaaanannnnagacagacaatagagaagaaagnnnnnctctgtggaagaagacaagaatgtggcttcnaggtagacaccaaagataagacaaaacaaaaaccc

SEQ ID NO: 492560 - DNA, 713 bp, Homo sapiens
  misc_feature (29)..(29): n is a, c, g, or t
  misc_feature (58)..(58): n is a, c, g, or t
ggaagcagggagagagaactggccagggnataaaaagggcccacaagagaccggctcnaggatcccaaggcccaactccccgaaccactcagggtcctgtggacagctcacctagtggcaatggctccaggctcccggacgtccctgctcctggcttttgccctgctctgcctgccctggcttcaagaggctggtgccgtccaaaccgttccgttatccaggctttttgaccacgctatgctccaagcccatcgcgcgcaccagctggccattgacacctaccaggagtttgaagaaacctatatcccaaaggaccagaagtattcattcctgcatgactcccagacctccttctgcttctcagactctattccgacaccctccaacatggaggaaacgcaacagaaatccaatctagagctgctccgcatctccctgctgctcatcgagtcgtggctggagcccgtgcggttcctcaggagtatgttcgccaacaacctggtgtatgacacctcggacagcgatgactatcacctcctaaaggacctagaggaaggcatccaaacgctgatggggaggctggaagacggcagccgccggactgggcagatcctcaagcagacctacagcaagtttgacacaaactcgcacaaccatgacgcactgctcaagaactacgggctgctctactgcatcagagagagctgcaagga

SEQ ID NO: 492561 - DNA, 147 bp, Homo sapiens
tgacgactttacatcatcacggagggcaccagcgtccgtgctgcagcgccggttcccccaattgaggagtacgtggaggtggggcggcctggagaccctctgactatcgttctggggagattgcactgcatgctgaaccggccccgg

SEQ ID NO: 492562 - DNA, 204 bp, Homo sapiens
ttcacggttgcccgtgctcatcctttccaaaatatgcccggtgctatccgtccagctgctcctagaccaccatttagtactctgagaccagcttcttcacaggtaccacgagtcatgtcaacacagcgtgtagctaacacatcaacatcagaccatgggtccacgtcctgcagctgcagccgctgcagctcggggtaccgagct

SEQ ID NO: 492563 - DNA, 1240 bp, Homo sapiens
  misc_feature (673)..(673): n is a, c, g, or t
  misc_feature (687)..(687): n is a, c, g, or t
  misc_feature (694)..(694): n is a, c, g, or t
  misc_feature (702)..(702): n is a, c, g, or t
  misc_feature (707)..(709): n is a, c, g, or t
  misc_feature (720)..(721): n is a, c, g, or t
  misc_feature (723)..(723): n is a, c, g, or t
  misc_feature (726)..(726): n is a, c, g, or t
  misc_feature (735)..(735): n is a, c, g, or t
  misc_feature (737)..(737): n is a, c, g, or t
  misc_feature (744)..(744): n is a, c, g, or t
  misc_feature (748)..(748): n is a, c, g, or t
  misc_feature (752)..(752): n is a, c, g, or t
  misc_feature (754)..(756): n is a, c, g, or t
  misc_feature (760)..(760): n is a, c, g, or t
  misc_feature (763)..(763): n is a, c, g, or t
  misc_feature (765)..(765): n is a, c, g, or t
  misc_feature (780)..(780): n is a, c, g, or t
  misc_feature (791)..(791): n is a, c, g, or t
  misc_feature (794)..(794): n is a, c, g, or t
  misc_feature (809)..(809): n is a, c, g, or t
  misc_feature (827)..(827): n is a, c, g, or t
  misc_feature (836)..(836): n is a, c, g, or t
  misc_feature (841)..(841): n is a, c, g, or t
  misc_feature (863)..(863): n is a, c, g, or t
  misc_feature (884)..(884): n is a, c, g, or t
  misc_feature (886)..(886): n is a, c, g, or t
  misc_feature (891)..(891): n is a, c, g, or t
  misc_feature (893)..(893): n is a, c, g, or t
  misc_feature (895)..(895): n is a, c, g, or t
  misc_feature (897)..(899): n is a, c, g, or t
  misc_feature (901)..(901): n is a, c, g, or t
  misc_feature (903)..(903): n is a, c, g, or t
  misc_feature (907)..(907): n is a, c, g, or t
  misc_feature (909)..(909): n is a, c, g, or t
  misc_feature (911)..(911): n is a, c, g, or t
ccacctctgcctcccaacgtgccgggaccacaagcgtgagccacaccgccagaccaagatgatttaaagtatacaggaggatgtatgtaggttatgtacaaacactacgccattttatgtcagggactggatccccaggggggttttggaatcattgaggatcccaaggcccaactccccgaaccactcagggtcctgtggacagctcacctagtggcaatggctccaggctcccggacgtccctgctcctggcttttgccctgctctgcctgccctggcttcaagaggctggtgccgtccaaaccgttccgttatccaggctttttgaccacgctatgctccaagcccatcgcgcgcaccagctggccattgacacctaccaggagtttgaagaaacctatatcccaaaggaccagaagtattcattcctgcatgactcccagacctccttctgcttctcagactctattccgacaccctccaacatggaggaaacgcaacagaaatccaatctagagctgctccgcatctccctgctgctcatcgagtcgtggctggagcccgtgcggttcctcaggagtatgttcgccaacaacctggtgtatgacacctcggacagcgatgactatcacctcctaaaggacctagaggaaggcatccaaacgctgatgngggtgagggtggcnccagggntccccaancctgnnnccccactggcnncnagngctggggananaaacacngctncccncnnnttancantnaggcgctgacccaanagaactcaccntantcttcatttcccctngtgaatcctccaggcctntctctacancctgnaggggagggaggaaaatggatnaatgagagagggagggaacantnccaancncntnnncncncccncncntccttcactttgcagggaggctggaagacggcagccgccggactgggcagatcctcaagcagacctacagcaagtttgacacaaactcgcacaaccatgacgcactgctcaagaactacgggctgctctactgcttcaggaaggacatggacaaggtcgagacattcctgcgcatggtgcagtgccgctctgtggagggcagctgtggcttctaggtgcccgagtagcatcctgtgacccctccccagtgcctctcctggccctgaaggtgccactccagtgcccaccagccttgtcctaataaaattaagttgtatcatttcaaaaaa

SEQ ID NO: 492564 - DNA, 620 bp, Homo sapiens
agtacactccacccttttatgggagggggagatccattttacctactttgtcagactcgatagaagttgctttacatatcacaaaaactccattcttttccacaaaagggtttacagaaaactcttttttgagtgagtgattgcaacttagatactcctgttgcctgaatcagactgtcctagaacagaatggacaatgcttggaggagaatccacacaaacagcacctgttctgagacctatcccagcccaccgcgcctgctcaaatgaagtctttacttcaagtgcaaacagccacatgaggtttctgttgataaaccatgagcttaccgctgatttaaagccccatccccatgattcacacaatcagttcctttttttttgctgctcttggtaaaaagtggattctcatacaggccacgtacatttacttctattcacagtgagtacccaataacaacaaaagcgcttacaaaattgaaagcccgcgactttagcccctttatctgaagaataaccatttcaaattattattatattaaacggggcaggtttaaggctgtttaaacaggcaccttaatgccttcaattcggttgaaaaacaaattaactttaacgga

SEQ ID NO: 492565 - DNA, 864 bp, Homo sapiens
ccacctctgcctcccaacgtgccgggaccacaagcgtgagccacaccgccagaccaagatgatttaaagtatacaggaggatgtatgtaggttatgtacaaacactacgccattttatgtcagggactggatccccaggggggttttggaatcattgaggatcccaaggcccaactccccgaaccactcagggtcctgtggacagctcacctagtggcaatggctccaggctcccggacgtccctgctcctggcttttgccctgctctgcctgccctggcttcaagaggctggtgccgtccaaaccgttccgttatccaggctttttgaccacgctatgctccaagcccatcgcgcgcaccagctggccattgacacctaccaggagtttgaagaaacctatatcccaaaggaccagaagtattcattcctgcatgactcccagacctccttctgcttctcagactctattccgacaccctccaacatggaggaaacgcaacagaaatccaatctagagctgctccgcatctccctgctgctcatcgagtcgtggctggagcccgtgcggttcctcaggagtatgttcgccaacaacctggtgtatgacacctcggacagcaacgtctatgacctcctaaaagtacctaaaggcagggctccacaagctgattgcgccgctgtgccgattgcaacccccgtgactgggccgatctttcaaacagacctacaacaagttcgacaccaacccaacaacactgacgccccaaatccaaccaacgggcttatccgctaacgacggacacggccaggccactccccagcaccggccacgccgcacgccgccggcaccacagcgacccgc

SEQ ID NO: 492566 - DNA, 815 bp, Homo sapiens
  misc_feature (652)..(652): n is a, c, g, or t
  misc_feature (670)..(670): n is a, c, g, or t
  misc_feature (675)..(675): n is a, c, g, or t
  misc_feature (701)..(702): n is a, c, g, or t
  misc_feature (706)..(706): n is a, c, g, or t
  misc_feature (724)..(724): n is a, c, g, or t
  misc_feature (743)..(743): n is a, c, g, or t
  misc_feature (756)..(757): n is a, c, g, or t
  misc_feature (766)..(768): n is a, c, g, or t
  misc_feature (782)..(782): n is a, c, g, or t
  misc_feature (809)..(809): n is a, c, g, or t
ccacctctgcctcccaacgtgccgggaccacaagcgtgagccacaccgccagaccaagatgatttaaagtatacaggaggatgtatgtaggttatgtacaaacactacgccattttatgtcagggactggatccccaggggggttttggaatcattgaggatcccaaggcccaactccccgaaccactcagggtcctgtggacagctcacctagtggcaatggctccaggctcccggacgtccctgctcctggcttttgccctgctctgcctgccctggcttcaagaggctggtgccgtccaaaccgttccgttatccaggctttttgaccacgctatgctccaagcccatcgcgcgcaccagctggccattgacacctaccaggagtttgaagaaacctatatcccaaaggaccagaagtattcattcctgcatgactcccagacctccttctgcttctcagactctattccgacaccctccaacatggaggaaacgcaacagaaatccaatctagagctgctccgcatctccctgctgctcatcgagtcgtggctggagcccgtgcggttcctcaggagtatgttcgccaacaacctggtgtatgacacctcggacagctcacctagtggcaatggctccaggctcccgnacgtcctgctcctggctnttgcnctgctctgcctgccctggcttagagnntggngccgtccaaaccgttccnttatccaggctttttgacnacgctatgctccnngcccatcgnnngcaccagctggccnttgacacctaccaggagtttgaagaancctata

SEQ ID NO: 492567 - DNA, 729 bp, Homo sapiens
ccacctctgcctcccaacgtgccgggaccacaagcgtgagccacaccgccagaccaagatgatttaaagtatacaggaggatgtatgtaggttatgtacaaacactacgccattttatgtcagggactggatccccaggggggttttggaatcattgaggatcccaaggcccaactccccgaaccactcagggtcctgtggacagctcacctagtggcaatggctccaggctcccggacgtccctgctcctggcttttgccctgctctgcctgccctggcttcaagaggctggtgccgtccaaaccgttccgttatccaggctttttgaccacgctatgctccaagcccatcgcgcgcaccagctggccattgacacctaccaggagtttgaagaaacctatatcccaaaggaccagaagtattcattcctgcatgactcccagacctccttctgcttctcagactctattccgacaccctccaacatggaggaaacgcaacagaaatccaatctagagctgctccgcatctccctgctgctcatcgagtcgtggcgccacagcggcgagccggcagtccaaggtttcgccaacagcgggtacgggcctctgacagcaacgtctatgacctcctaaaggacctagaggaaggcatccaaacgctgatggggaggctggaaggatacctcacacaacgatgacgcactactcaagctacgggctgctctc

SEQ ID NO: 492568 - DNA, 203 bp, Homo sapiens
gcaaatcacactgaagaatgtatgatatatttgggaatatggacctattcgtcaaatcagagtggggacacaactgtaactagaggacaacttatgtggtctatgaggacaactttgatgccaagatgcatgtgtcaactatcgggattcaatgtttgtacaaatacctgtggtttgtactatatgacacaggcatttcagag

SEQ ID NO: 492569 - DNA, 450 bp, Homo sapiens
gtctacgttctttggtttctgtctggacatgctgcatgtgtctgtataatgagagcagcaataatctcccacttcccctggacgaaaccgaacaagatgtgtttttctttttttttttcctttgtactctgaatgtgggaacttaattgtctgtgtttgctggtgaactatttgtttctatgctaggtgctagtacatattaacgttgtacttcctttgcagaaggggaaaaaaatctgattatatagtgttacttagctgctcaaagttaattgaaattgactgaagtaagactgtggggactctaagatgtctcttcttacagctgggaatgtgtcctcaaagtttgtatattctccaagatgggtcagcagtgttgcaattccaagaaagggactagatgtcagaacttgggcaaaggaggcatttcctgtgactgcttgagattag

SEQ ID NO: 492570 - DNA, 1141 bp, Homo sapiens
  misc_feature (29)..(29): n is a, c, g, or t
  misc_feature (58)..(58): n is a, c, g, or t
  misc_feature (574)..(574): n is a, c, g, or t
  misc_feature (588)..(588): n is a, c, g, or t
  misc_feature (595)..(595): n is a, c, g, or t
  misc_feature (603)..(603): n is a, c, g, or t
  misc_feature (608)..(610): n is a, c, g, or t
  misc_feature (621)..(622): n is a, c, g, or t
  misc_feature (624)..(624): n is a, c, g, or t
  misc_feature (627)..(627): n is a, c, g, or t
  misc_feature (636)..(636): n is a, c, g, or t
  misc_feature (638)..(638): n is a, c, g, or t
  misc_feature (645)..(645): n is a, c, g, or t
  misc_feature (649)..(649): n is a, c, g, or t
  misc_feature (653)..(653): n is a, c, g, or t
  misc_feature (655)..(657): n is a, c, g, or t
  misc_feature (661)..(661): n is a, c, g, or t
  misc_feature (664)..(664): n is a, c, g, or t
  misc_feature (666)..(666): n is a, c, g, or t
  misc_feature (681)..(681): n is a, c, g, or t
  misc_feature (692)..(692): n is a, c, g, or t
  misc_feature (695)..(695): n is a, c, g, or t
  misc_feature (710)..(710): n is a, c, g, or t
  misc_feature (728)..(728): n is a, c, g, or t
  misc_feature (737)..(737): n is a, c, g, or t
  misc_feature (742)..(742): n is a, c, g, or t
  misc_feature (764)..(764): n is a, c, g, or t
  misc_feature (785)..(785): n is a, c, g, or t
  misc_feature (787)..(787): n is a, c, g, or t
  misc_feature (792)..(792): n is a, c, g, or t
  misc_feature (794)..(794): n is a, c, g, or t
  misc_feature (796)..(796): n is a, c, g, or t
  misc_feature (798)..(800): n is a, c, g, or t
  misc_feature (802)..(802): n is a, c, g, or t
  misc_feature (804)..(804): n is a, c, g, or t
  misc_feature (808)..(808): n is a, c, g, or t
  misc_feature (810)..(810): n is a, c, g, or t
  misc_feature (812)..(812): n is a, c, g, or t
ggaagcagggagagagaactggccagggnataaaaagggcccacaagagaccggctcnaggatcccaaggcccaactccccgaaccactcagggtcctgtggacagctcacctagtggcaatggctccaggctcccggacgtccctgctcctggcttttgccctgctctgcctgccctggcttcaagagggcagtgccttcccaaccattcccttatccaggctttttgaccacgctatgctccaagcccatcgcgcgcaccagctggccattgacacctaccaggagtttgaagaaacctatatcccaaaggaccagaagtattcattcctgcatgactcccagacctccttctgcttctcagactctattccgacaccctccaacatggaggaaacgcaacagaaatccaatctagagctgctccgcatctccctgctgctcatcgagtcgtggctggagcccgtgcggttcctcaggagtatgttcgccaacaacctggtgtatgacacctcggacagcgatgactatcacctcctaaaggacctagaggaaggcatccaaacgctgatgngggtgagggtggcnccagggntccccaancctgnnnccccactggcnncnagngctggggananaaacacngctncccncnnnttancantnaggcgctgacccaanagaactcaccntantcttcatttcccctngtgaatcctccaggcctntctctacancctgnaggggagggaggaaaatggatnaatgagagagggagggaacantnccaancncntnnncncncccncncntccttcactttgcagggaggctggaagacggcagccgccggactgggcagatcctcaagcagacctacagcaagtttgacacaaactcgcacaaccatgacgcactgctcaagaactacgggctgctctactgcttcaggaaggacatggacaaggtcgagacattcctgcgcatggtgcagtgccgctctgtggagggcagctgtggcttctaggtgcccgagtagcatcctgtgacccctccccagtgcctctcctggccctgaaggtgccactccagtgcccaccagccttgtcctaataaaattaagttgtatcatttcaaaaaa

SEQ ID NO: 492571 - DNA, 242 bp, Homo sapiens
aaaaaaagggggggggggggggccgggccccccccttttttttttcccgggggggggggcgcgggtttccccacacccttttttgggggggggccctgggggggggggggtttccccctttttttaaaaatgggaccggggggttttttaggaaaaaattttggggggttgaaaaagggccttttttttccccggggggggggattttttttttttaaaaaaaaggccccccgggcggggga

SEQ ID NO: 492572 - DNA, 338 bp, Homo sapiens
cccgcctgtgcctccaagtgctgggattacaggcatgagccacgcgcccggcggcatggatttattcacaaggttctagtattaaattctgtggatcccttaggaggagattaatttttttttttttggaatgggggtctcattctgtcacccgggtgggagtgcaggggcccaatcatagctcatggtagcctcaaactccggggctcaggggatcctcgggcctcagcctcccaagtagcgggggttacgggcgtatgccaccatacctagctgatttgggtattttaaatagagagggggttggatcatgtgggccaggcgggtcttaaactcac

SEQ ID NO: 492573 - DNA, 187 bp, Homo sapiens
  misc_feature (93)..(93): n is a, c, g, or t
  misc_feature (99)..(99): n is a, c, g, or t
  misc_feature (123)..(123): n is a, c, g, or t
  misc_feature (147)..(147): n is a, c, g, or t
  misc_feature (161)..(161): n is a, c, g, or t
  misc_feature (180)..(180): n is a, c, g, or t
ctttacctttttaaaattttacttctacgttttggaatataaaaatttctattttaagtttagaatgttatacggcccgaaagtatgcagccnaatcgntcagatcaaacccttttacctggngtttgggactggtttttacttctntgaatctgtataanaaaaataaagccaattgancttccca

SEQ ID NO: 492574 - DNA, 80 bp, Homo sapiens
gcggccgcctactactactactgctcgaattcaagcttctaacgatgtacggggacatgctcaataaatatttttaaatg

SEQ ID NO: 492575 - DNA, 899 bp, Homo sapiens
ttctggaatggaggtacttatgagactgctatatgaacactggacagcactatcaggacgtcgcggacatgggacatttccttccaacatggccgccactgcctctccgcagaccactcggcactgaggatgccgatctgagaatagcagcttctattactatgagtacctggatgaagtggccttcatgctctgccaggacggatgcagtggtgtcctttggcaaagtcttcctcccagtcattctatagcctgattttagtgttgggcctcaggcgggaacctccttcttctcatggtcttgctccgaaatataactcgcaaggtggatggttgagactctatctgctgaactctggccatctccaaccttctgtgcctggatgacactgcccttctggggacatctccgttgaccatggcattgggctctcacgggagttccttgtgcaatgatggctgagcactcatatatactataaactttagcagtgcatctatatcattacgctgcatgagcctggaacaagtacctggacgatcgttcatgctcagccctaccacaggctgaagacccggccaagagcctgctcacttgataccatagaatgcagctgtgggtcgctggacgtcgtccaacccttgataatggtcttttgtacaagacaacatggtcaaatcccacagggttgtgtggtcactgacaacgagatttcagtcgaggcatggcaacacgtttggaaagctcatcatccgttcatgcacgacctcctagggttatcaactcaactcctagcaatgatctttctttacttcacgattcggcatggactctggtaagcaaaaccagacacaggcgaccttctaactagatacacaatttggggcattccaggcaa

SEQ ID NO: 492576 - DNA, 729 bp, Homo sapiens
  misc_feature (308)..(308): n is a, c, g, or t
  misc_feature (544)..(544): n is a, c, g, or t
agcggaggattggcgggcgagcggctgggacgggatgggattcttctcacggcgcacgttctgtgggcggagtgggcggagctgccggggtcagttggtccaagtgtcccggccttgaggttgtccggcgccgggaaccctctcttctctccgcgcgcctctaaagcggagagacattactctccatacgaagtaattgtatgcctacggaacgcgaacacagtatatgtttagctcaaccgcataggaatagattgcatagttgccttggagcattgggagtggtgcgattggctgccaagatgcgnaagtgggaagcgtggggagggacaaagaactctagtacttcattaatgttccaagggtgggttgggggaaaacttccccaaaatgaaggacagacattttgggggcaaaaagggggaaaaaaaatttttcccgtttttccttacctgtggccaaaggaaggtaagaaattgggcaggggttaaaaggggaaaaggagaaaattcgtgggaaagcgcttaaaaaattccatagaaanaaaaacccaaaaggttgtccttggggcgaaccaaattattaattaggaaaaagaattccttccaatggtttccagggatttttccctaaggttgagtgtttttccaaaaaaaccaaaaacgtggggaacaaccaaaaaaaaaggccaaaaaaaggaaaaaggtttagaaggggggagtttttgga

SEQ ID NO: 492577 - DNA, 351 bp, Homo sapiens
tgtgggtctagatgcattcaaaattataaagcagcagaactcattttttggagcggaaaatcaatgctatctattgtatgtcacaattacatatttgaaaatttgccaagaattttactatttatcctttctccccagggttgaacaaaaatattatggaaaacatgggctaattagtagattaaaatagagtaataaaaattctattaatgatttatagggtttgggggcaggtattactggcatacaatgcatattaattacaattttgaaaaatgtaaacatgtgcataaaacaaggtctagactagaactctctagtagaacttctgagataacagaagtctgtatt

SEQ ID NO: 492578 - DNA, 562 bp, Homo sapiens
tccacttctgaatccgctggggcgggttcctgcgcgatctcaaaaccaaccgcattatctgatgacgcggggtgaacttcaccccgttgcttccagcagcagtaaatccatcagcagcaccagattcgactcaaatgacgtcacgcctgctgcttcagcagcgaaatgtaccgcttcgtcatagagggcaaagtgtacgtccgccatccccgccagcgtattggccgaggcgcgggtaaacgcgacgacggtcatcccgacgtttttggcaattcgcgctttatccagcacctgctccgtttcgccgctgcgtgaaacggcaatgaacacctgatagcgggcggcgttgctgagaaaaatgttccggctgtcccccggcccggagataaatgccgttttgcccaacacctgcaatttcttggtcaggtactcggcaaacagataggaaaacccggcaccgtagagaaaaaagctctctttctggcgcagcaggttggcaaactgctggcgtttgtcctgggtgacccactgaaaagtttgctgatagttggcgatgaattgg

SEQ ID NO: 492579 - DNA, 327 bp, Homo sapiens
atcttaatggaggtagttgtaattgaagagaaaagatgacgatagggggcagcctcgggtagcggtgtgggggagagctcaggggcgggtcacttgtggtaggtctaagagccgggttcctggaggcttaggagatcttctctcagcccagatccagccgtcacctcctcctcttcactctcggcggactgcccgcccttggctccatctgcagatgtcttcagagacgagatgtacttggaccagaaggagcagtcggctttctccaggccctgtcgatgggggagcagttcagggtaccgagcctcgaatcgataagtcatggcc

SEQ ID NO: 492580 - DNA, 822 bp, Homo sapiens
cattaagaacagctctgtatctatttagtgtgtcttagtgaaaaaaacatagagattgccctagatggcctttcaggaccttataattcaaatgggcagctggggaggttccagattcttcacatgatatttgtgttaatctgccatgcccgtgtcggctcctcacactctttggagaacttcactgcagccattcctagtcatcgctgctgggtccccatccttgacaatgacactgcctctgataatggcagtaggatcctgagccaagatgacctcctgaggatctccatccccctggactccaacctgagaccggataaatgccgtcgctatattcaaccacagtggcatctccttcatctgaatggcaccttccccactgtaacagagccagacacagagccctgtgtggatggctgggtgtatgaccaaagcaccttcctctccaccacagtgacccagtgggacctggtgtgtggatctcaggcactgaattcagtggctaaatttatatacatgactggtatctttataggatatatcatgggtggccacttatcagacaagtttgggaggaagctcattttcacagtgctctttactgaaaatgggccatcactgaaaactgtgtgtagctttgctcccctccttcctcaatctactggtcactttccgattcctgtcagggattttttcctccaacctggagggacaaagacaggctttgctcaatattagaaatgggccagtcctaaagtttcacagcccgggaaagggcgctgatattatgtggccccaggagagtggacagacacggtt

SEQ ID NO: 492581 - DNA, 229 bp, Homo sapiens
ttatacctgaaattcgtgtccccggtaggtattagattgctgtctgtcaggcaggacacgttgaactcctccgtgtaggaggaaacgtctatgctctccacatactgcttcacgctacccaggttcttatactcacatcgcctgggatcgagacctcagccggcagaggcatacgcagaagctgtacaaaggctactctatgtacccccgacatggacacgaatgttca

SEQ ID NO: 492582 - DNA, 832 bp, Homo sapiens
  misc_feature (627)..(628): n is a, c, g, or t
  misc_feature (631)..(631): n is a, c, g, or t
  misc_feature (638)..(638): n is a, c, g, or t
  misc_feature (640)..(640): n is a, c, g, or t
  misc_feature (654)..(654): n is a, c, g, or t
  misc_feature (656)..(656): n is a, c, g, or t
agtctcgaactcctgacctcaagtgatctgcccaccttggcctcccaagattaaaggtgtgagccaccgcgcctgctattaggtgtattgatattttctatagtggctgttctcaaactttctggtctcaggacttcttgtacccttaaaaattattgaacacccaaagagctttagttatgtagattatgaatattaactgtatcaaaaattaaatgacattttaaatgaaaaatacccatatttttaaaaattgataagtatgttttatcagttttgcaaatcactttacatctagctggatttttgtatctgtttctgccttcactttattgcaaagtgttgttttggttgaagtctgaagaaaacctggcctcataaataggtgattggaaaaggggggagtgttttagtagccttttagatcgttgtgggtgttctttgatactacaaccaaaaatcaagtggtagtttcttaaaggctagttgcaatgtgggatcacactttttgtaccatgtggatcagtgaactttttggcactctgttatgtagaatcgttaatctatctgtactttgaatggatccttttacccgtgaatgatcttgtaatatgctatgtaggttgnnaantactggntncaccgagttctgcngntcttctagaatgtctcatttattatggccgatttaaaaattccactaatctccgaaagtttagcttgggaatcgacacttgcactggaagcaccagttcacatctatttctctgaagaccattttgggggcaaaacgggcggagaagcctttttaaaattggccccggatgttttc

SEQ ID NO: 492583 - DNA, 364 bp, Homo sapiens
ttgtccagtgctgtgcgagcactctcttcagaaaccagcatggagcactaagttaccacgagtgtattgtgatttcttggtattcctccacttaggaatagatgaagtgaaattgtttcttctcccttttacctctggtgtctggaggggatatctgagatcatgctttcttattatttctcttttcttttccctcagaatccttctagaaactacccaagaaatattcagctgactttgcaggaatactttttcagtaggcagataaagcatataccccaaagtaatatgtagctttctttctttctttctttcttttttgagatggggtctcactctgtcacccaggttggagtgcagtggc

SEQ ID NO: 492584 - DNA, 200 bp, Homo sapiens
ctgacctaaggatccccatggatagcggataggggcaacatctgtaccacgcgagttgtgagctcctgccagcagtgcctggctgtgagccccattgtgtgccgtggtgctctagatgaggccctgccatctggctcacctctgctgtgaccgtgacaggagaatctagctgaaggataacttgtgccccaagaatccat

SEQ ID NO: 492585 - DNA, 448 bp, Homo sapiens
  misc_feature (14)..(14): n is a, c, g, or t
  misc_feature (26)..(26): n is a, c, g, or t
  misc_feature (334)..(334): n is a, c, g, or t
  misc_feature (440)..(440): n is a, c, g, or t
taaactgaagcccngcacggtggctnatgcttgtaatccccagcaatttgggatgccgaggtgggcaagatcatgaggtcaggagttcccagacccagcctggccaacacagtgaaaccccgtctctactaaaaatacaaaaattagctgggcatggtggcagacacctgtaatcccagctacttgggaggctgaggcaggagaatcacttgaacccgggaggcggaggttgcagtgggctgagatcacaccactgcactccagcctggacgatagagctagactctgtctccacaaattaaaaaattttaaaaaataaaataggccgggcacnggtgcacgcctgtaatcccagcactttgggaggccgaggcgggcgaatcacaaggtcaggagatcgaaaccatcctggctaacactggtgaaaccccgtctctacntaaaaata

SEQ ID NO: 492586 - DNA, 814 bp, Homo sapiens
  misc_feature (7)..(7): n is a, c, g, or t
  misc_feature (28)..(28): n is a, c, g, or t
  misc_feature (34)..(34): n is a, c, g, or t
  misc_feature (62)..(63): n is a, c, g, or t
  misc_feature (70)..(71): n is a, c, g, or t
  misc_feature (88)..(88): n is a, c, g, or t
  misc_feature (99)..(99): n is a, c, g, or t
  misc_feature (103)..(103): n is a, c, g, or t
  misc_feature (107)..(107): n is a, c, g, or t
  misc_feature (111)..(111): n is a, c, g, or t
  misc_feature (138)..(138): n is a, c, g, or t
  misc_feature (143)..(143): n is a, c, g, or t
  misc_feature (173)..(174): n is a, c, g, or t
  misc_feature (178)..(178): n is a, c, g, or t
  misc_feature (182)..(182): n is a, c, g, or t
  misc_feature (278)..(278): n is a, c, g, or t
  misc_feature (283)..(283): n is a, c, g, or t
  misc_feature (305)..(305): n is a, c, g, or t
gaacggncggaggggacccggacctcgnggaccncgggggggggcagggccgggtgtctggnncaagcgnntcctcgggaggtctcanggcccccttgngggnccangggnaacctggccttgggccgcggtggcccnaggancgggacggggacttgggggcacggcttttnnccangggnccccctaaagcccgttttttccccgttttccgccgcccaaaaagggggcccccccgggttcccccgccctgtttaaccatccagaggggaaattcnctccnttggggcgggaaataacgcccncccatcctgcctgccggggtctcccgcgggtgggtctcttcccccccggggcggggtgcccggggggggccaaaagggggaaataaaagcgccgggggggaaaaaacgcggggaaaccagcggattttctcccgccccgaaataatatccccgtgggggctgccccaaagagtatggtcgtcccgacggggtagggcccttttggggtcggcgtcggcaccccctggcgtgcgtgtgggcggcccccacaaacaatgggtgcaaaacggggcgggctgttatccccccccggggggcggggggccacataacagggtcgcgcccgcgccctgcggggtaaaacgtcgcggcgtttgtccccgccccggaaaaggtcgcccgcctcgtgggggcgtcccccgcacgtgggtgtgttttggggtggcccctggtttccccccccccacgggccgggcggggggttcacccgccccccggggggcgggccggggaaaagcgcccttgcctag

SEQ ID NO: 492587 - DNA, 329 bp, Homo sapiens
acagagcttatttgcggtgcctttccccaccctgcattatgtttttaagcagtggtatgtgttgtgttgtgttgtgtgtagtagtagtgtagtatgtgcgcgcgcaggtgctgcgtgtgtgtgtaagaatatcacactttagacggtattttcacattcagagaactgtgaggctggatgagatcattaaggagaggaggagtacgtagagaagataagttccagggcagagtgagttaaggggcacctccagtgttatgaggttaaggaggtgagatggaacccttacaggagacttgagaggattggctagggaataggagaaaaac

SEQ ID NO: 492588 - DNA, 163 bp, Homo sapiens
  misc_feature (7)..(7): n is a, c, g, or t
tggaatngagaacagcaagtactatgtgactatcattgatgccaggaccagagactttatcaaaacatgattacaggacatctcagctgacgtgctgtccgattgttgctgctggtagtatggtgaatttgaagctggtatctccaagaatgggcagacccga

SEQ ID NO: 492589 - DNA, 151 bp, Homo sapiens
aggtatctagaggatcctgtatcagagcatacccctcggttgatttgtgggcctgatgagggccaacctggccttattggtggatgccaaagaaattaagatgcatctcggggcattggcactggatgagaaagtggctcaattggagatt

SEQ ID NO: 492590 - DNA, 147 bp, Homo sapiens
gatgccagataattcagagtcactctacccatgcttgtaggccaatcacaaccctcaccctccgtaacatagatcatcttccttctggctcctcctcacttcccttccaggacctactaagcagcttactttcttttgtacactcaa

SEQ ID NO: 492591 - DNA, 155 bp, Homo sapiens
gacagaaagaatgtcatctcttcaactagatgtaagctcttgaagaagggctcaataccctctgcttcctctgtatcccttatggtagagttaaataaaattggtggttggaatatttaggaaataaagccacaagattgataagatttttttaa

SEQ ID NO: 492592 - DNA, 968 bp, Homo sapiens
  misc_feature (36)..(36): n is a, c, g, or t
  misc_feature (65)..(66): n is a, c, g, or t
  misc_feature (72)..(72): n is a, c, g, or t
  misc_feature (76)..(76): n is a, c, g, or t
  misc_feature (79)..(79): n is a, c, g, or t
  misc_feature (92)..(92): n is a, c, g, or t
  misc_feature (98)..(98): n is a, c, g, or t
  misc_feature (142)..(142): n is a, c, g, or t
  misc_feature (188)..(189): n is a, c, g, or t
  misc_feature (192)..(192): n is a, c, g, or t
  misc_feature (199)..(199): n is a, c, g, or t
  misc_feature (206)..(207): n is a, c, g, or t
  misc_feature (210)..(210): n is a, c, g, or t
  misc_feature (213)..(213): n is a, c, g, or t
  misc_feature (220)..(220): n is a, c, g, or t
  misc_feature (225)..(225): n is a, c, g, or t
  misc_feature (231)..(231): n is a, c, g, or t
  misc_feature (234)..(234): n is a, c, g, or t
  misc_feature (262)..(262): n is a, c, g, or t
  misc_feature (266)..(266): n is a, c, g, or t
  misc_feature (277)..(277): n is a, c, g, or t
  misc_feature (280)..(280): n is a, c, g, or t
  misc_feature (317)..(317): n is a, c, g, or t
  misc_feature (321)..(321): n is a, c, g, or t
  misc_feature (334)..(334): n is a, c, g, or t
  misc_feature (385)..(385): n is a, c, g, or t
  misc_feature (390)..(390): n is a, c, g, or t
  misc_feature (394)..(394): n is a, c, g, or t
  misc_feature (413)..(413): n is a, c, g, or t
  misc_feature (429)..(429): n is a, c, g, or t
  misc_feature (439)..(439): n is a, c, g, or t
  misc_feature (491)..(491): n is a, c, g, or t
aagtttggaacaaaaaaaggcaggctggtaacccgngccgggattcccccggggtgggccccacnncccccnatcnaantcaggggtcctgntgaacnggctcacccaggtggcaattggccccaaggcttcgcggaacggncccatgccccttggttttttgcccttgttcatgccttgccctttgnnttncaaagangcgtggnnccnggnccaaaancgttnccgttntancccagccttttttgaacccaagccttangctnccaaagcgccntgngccgcgccacccagctgtggcacatttgacaaccttnaccnaggaagtttttgnaagaaaactcttattatctccaaaaaggtacccagaaagttattctatgcnctganatgnacatcctcagaacgctccnttcctgcttactcganaactcttatntccgaaccaccctccgaaccatggcaagaaaacgccgaaccaaaaaaccgantctgaggagctgctccgcatctccctgctgctcatcgagtcgtggctggagcccgtgcggttcctcaggagtatgttcgccaacaacctggtgtatgacacctcggacagcgatgactatcacctcctaaaggacctagaggaaggcatccaaacgctgatggggaggctggaagacggcagccgccggactgggcagatcctcaagcagacctacagcaagtttgacacaaactcgcacaaccatgacgcactgctcaagaactacgggctgctctactgcttcaggaaggacatggacaaggtcgagacattcctgcgcatggtgcagtgccgctctgtggagggcagctgtggcttctaggtgcccgagtagcatcctgtgacccctccccagtgcctctcctggccctgaaggtgccactccagtgcccaccagccttgtcctaataaaattaagttgtatcatttcaaaaaa

SEQ ID NO: 492593 - DNA, 464 bp, Homo sapiens
tcgagcggccgcccgggcaggtcgagtcgtggctggagcccgtgcggttcctcaggagtatgttcgccaacaacctggtgtatgacacctcggacagcgatgactatcacctcctaaaggacctagaggaaggcatccaaacgctgatggggaggctggaagacggcagccgccggactgggcagatcctcaagcagacctacagcaagtttgacacaaactcgcacaaccatgacgcactgctcaagaactacgggctgctctactgcttcaggaaggacatggacaaggtcgagacattcctgcgcatggtgcagtgccgctctgtggagggcagctgtggcttctaggtgcccgagtagcatcctgtgacccctccccagtgcctctcctggccctgaaggtgccactccagtgcccaccagccttgtcctaataaaattaagttgtatcatttcaaaaaa

SEQ ID NO: 492594 - DNA, 427 bp, Homo sapiens
actaggccgctcgctgtcctatagtctcctagaatcaattctctgagtccgtgcattcccagataaaggcagctattaaacgtctctgtcacacagataaaagaagagaatcagaaagtgccaaacttttcaacagagtttcacattcctctcttaggtggtcaatattaaccccatggcaaaagcagaaggacactatttaatggttaagggatccattcaagaagaggatattaaaatcgtcaacatatatgcccctaatataggagcacccagatacctataacaaatattaacagacataaaaggagaaatcaatgggaatacaatcacattagaagactttaacaccccactcggcaatggacagaggctctagacagaaaatcagtaaggcaacagagatcaggagcagttccacttaggc

SEQ ID NO: 492595 - DNA, 721 bp, Homo sapiens
  misc_feature (25)..(25): n is a, c, g, or t
  misc_feature (98)..(98): n is a, c, g, or t
  misc_feature (102)..(102): n is a, c, g, or t
  misc_feature (116)..(117): n is a, c, g, or t
  misc_feature (140)..(141): n is a, c, g, or t
  misc_feature (147)..(147): n is a, c, g, or t
  misc_feature (149)..(150): n is a, c, g, or t
  misc_feature (155)..(155): n is a, c, g, or t
  misc_feature (167)..(167): n is a, c, g, or t
  misc_feature (179)..(179): n is a, c, g, or t
  misc_feature (190)..(190): n is a, c, g, or t
  misc_feature (198)..(198): n is a, c, g, or t
  misc_feature (202)..(202): n is a, c, g, or t
  misc_feature (208)..(209): n is a, c, g, or t
  misc_feature (214)..(214): n is a, c, g, or t
  misc_feature (224)..(225): n is a, c, g, or t
  misc_feature (227)..(228): n is a, c, g, or t
  misc_feature (232)..(232): n is a, c, g, or t
  misc_feature (234)..(234): n is a, c, g, or t
  misc_feature (237)..(237): n is a, c, g, or t
  misc_feature (239)..(239): n is a, c, g, or t
  misc_feature (245)..(245): n is a, c, g, or t
  misc_feature (252)..(252): n is a, c, g, or t
  misc_feature (255)..(255): n is a, c, g, or t
  misc_feature (259)..(260): n is a, c, g, or t
  misc_feature (267)..(268): n is a, c, g, or t
  misc_feature (271)..(271): n is a, c, g, or t
  misc_feature (275)..(275): n is a, c, g, or t
  misc_feature (280)..(281): n is a, c, g, or t
  misc_feature (283)..(283): n is a, c, g, or t
  misc_feature (285)..(286): n is a, c, g, or t
  misc_feature (288)..(290): n is a, c, g, or t
tcttccttccctttcttcaatattntttttccttccaaacctttcctttatccattcttttttaccactctattctccaatcccatctctctcaccanctgnccatttacacctannattatttttaataaacctatatnncaaatnannataantattcattcctncattactcccanacctccttctncttctcanactntattcnnacacnctccaacatnnannaaangnaananaaatcnaatctanagntgtnngcatctnnctnctgntcatnnantnntnnntggagcccgtgcggttcctcaggagtatgttcgccaacaacctggtgtatgacacctcggacagcgatgactatcacctcctaaaggacctagaggaaggcatccaaacgctgatggggaggctggaagacggcagccgccggactgggcagatcctcaagcagacctacagcaagtttgacacaaactcgcacaaccatgacgcactgctcaagaactacgggctgctctactgcttcaggaaggacatggacaaggtcgagacattcctgcgcatggtgcagtgccgctctgtggagggcagctgtggcttctaggtgcccgagtagcatcctgtgacccctccccagtgcctctcctggccctgaaggtgccactccagtgcccaccagccttgtcctaataaaattaagttgtatcatttcaaaaaa

SEQ ID NO: 492596 - DNA, 767 bp, Homo sapiens
ggaggtgacgtctagatgatccccgttcgcgccttttctggtattaaatcagagcaggctgccgtgcagtccgttcctgttagtccagagctaatgactcatcgctcattctgccaatctcattgcgcgcaccacctggctatttatacctacccagattttgcgcacgatgatcttgcagcataccgtaattatacattcttgcttgagtcccggattgccattcgtgcttctcacacttcatattccaacacccgtcgcgagcatggaggatctgcaacataaatctgatctagtgctgctctggatctggctgttgttcatcgagttctggcttggagcccgtgcggttcctcaggagtatgttcgccaacaacctggtgtatgacacctcggacagcgatgactatcacctcctaaaggacctagaggaaggcatccaaacgctgatggggaggctggaagacggcagccgccggactgggcagatcctcaagcagacctacagcaagtttgacacaaactcgcacaaccatgacgcactgctcaagaactacgggctgctctactgcttcaggaaggacatggacaaggtcgagacattcctgcgcatggtgcagtgccgctctgtggagggcagctgtggcttctaggtgcccgagtagcatcctgtgacccctccccagtgcctctcctggccctgaaggtgccactccagtgcccaccagccttgtcctaataaaattaagttgtatcatttcaaaaaa

SEQ ID NO: 492597 - DNA, 110 bp, Homo sapiens
  misc_feature (93)..(93): n is a, c, g, or t
cacgaggccgggtggcctcggtcggtaccctgggcgcggagcagctgcctcattagtattcgtacccacgaggcggcgcagcgggccctcggngacagcgagcgtcgcgg

SEQ ID NO: 492598 - DNA, 690 bp, Homo sapiens
ggcaatacagcaagatcccatctctattttaaagaaaagtctcactttgggaggccaaggcgggtggatcacaaggtcaggagatcgagaccatcctggccaacatagtaaaaccccatctccactaaaaatacaaaaaagtagctgggactacaggcgcccgcctacacgcccggctaattttttgtatttttttttagtagagatggggtttcactgtgttagccaggatggcctcaatctcctgacctcgtgatccgcccgtctcggcctcccaaagtgctgggattacaggcgtgagccaccgcgcccggcccaagaattctttctggaaacaaagaaaaggacctagaggaaggcatccaaacgctgatggggaggctggaagacggcagccgccggactgggcagatcctcaagcagacctacagcaagtttgacacaaactcgcacaaccatgacgcactgctcaagaactacgggctgctctactgcttcaggaaggacatggacaaggtcgagacattcctgcgcatggtgcagtgccgctctgtggagggcagctgtggcttctaggtgcccgagtagcatcctgtgacccctccccagtgcctctcctggccctgaaggtgccactccagtgcccaccagccttgtcctaataaaattaagttgtatcatttcaaaaaa

SEQ ID NO: 492599 - DNA, 456 bp, Homo sapiens
  misc_feature (1)..(1): n is a, c, g, or t
  misc_feature (3)..(3): n is a, c, g, or t
  misc_feature (5)..(6): n is a, c, g, or t
  misc_feature (8)..(8): n is a, c, g, or t
  misc_feature (21)..(21): n is a, c, g, or t
  misc_feature (208)..(208): n is a, c, g, or t
  misc_feature (297)..(297): n is a, c, g, or t
  misc_feature (350)..(350): n is a, c, g, or t
ncncnngngactttaatggtncgttcgtaggtgtcctcggctcggggtagtacccagggtagtgtgcgagcaatctggaaagtagcccatctcgttccagcaaggattctcagcgagcagatctgcttgttgaggaacaggatcacagagatggtgcgcagcatctgttgttccagatgctcttgaagaggtcagagctcctgcaggnggttggctggttgtcccccggatgacatttgtagctgctgctggcacacgaagatgatggcagcacatcgttgagcactggatccactnggggtcacgcgctggcaccacgtcaaacatgtggaagttgacttgccactggncttggctcaaagatccagaagtcaggacatgtagggagcaggtcctgatcgctcggacatgtcagctgcttgacacgtcgacttgtccaggaagtctgggacagca

SEQ ID NO: 492600 - DNA, 395 bp, Homo sapiens
cagagtggcgggagcccgtgcgctaccgaacacctcggacagcgatgacacccagagaggaaggcatccaaacgctgatggggaggctggaagacggcagccgccggactgggcagatcctcaagcagacctacagcaagtttgacacaaactcgcacaaccatgacgcactgctcaagaactacgggctgctctactgcttcaggaaggacatggacaaggtcgagacattcctgcgcatggtgcagtgccgctctgtggagggcagctgtggcttctaggtgcccgagtagcatcctgtgacccctccccagtgcctctcctggccctgaaggtgccactccagtgcccaccagccttgtcctaataaaattaagttgtatcatttcaaaaaa

SEQ ID NO: 492601 - DNA, 152 bp, Homo sapiens
attctgcgacactcatccggtcgactgctcgaagactcgcgatcaccagcgtgcgcgttcgtcgacagtacctgggtcttcacgtgcttggtgttgaccgcgatgccggcaggtatgttctcgcgcctggttgtccttgtagatgtccacgt

SEQ ID NO: 492602 - DNA, 1012 bp, Homo sapiens
ccacctctgcctcccaacgtgccgggaccacaagcgtgagccacaccgccagaccaagatgatttaaagtatacaggaggatgtatgtaggttatgtacaaacactacgccattttatgtcagggactggatccccaggggggttttggaatcattgaggatcccaaggcccaactccccgaaccactcagggtcctgtggacagctcacctagtggcaatggctccaggctcccggacgtccctgctcctggcttttgccctgctctgcctgccctggcttcaagaggagggagtggcttcccaaacattcccttatccaggctttttgaccacgctatgctccaagcccatcgcgcgcaccagctggccattgacacctaccaggagtttgaagaaacctatatcccaaaggaccagaagtattcattcctgcatgactcccagacctccttctgcttctcagactctattccgacaccctccaacatggaggaaacgcaacagaaatccaatctaaaactggtccggcatctccctgtgtggtcatccaatcgtgggtggagcccgtggcagttcctcaggagtgtcttcggcaacaggctggtggtacgggggctctgacaggaacgtctatgaactcctaaaggaactagaggaaggcatccaaacgctgatggggaggctggaagacggcagccgccggactgggcagatcctcaagcagacctacagcaagtttgacacaaactcgcacaaccatgacgcactgctcaagaactacggggtggtctactggtttcgggaatggcatggaccatgtcgagaatttctgggcaccgggcatgcagctcgggagggcagtggggttctactgccggtggatccgggaacctccaggccctggccggaatgctcatgcccactggcaaaaaaatgtcaacaaaacaaaagacagcccacaacaccaggggcaccatgatggggcacgggaggaatatcccggaccccgg

SEQ ID NO: 492603 - DNA, 652 bp, Homo sapiens
ggcgccatgtctgtactagcagctatctatcgagtgtgcgaggttatccagaatcacttatgaacctggcgtatacgtgtgtgccaatgtgtggctatgagctgttctaccagcctgctcgaagtatgcacactcgtctccatggtcctggcgattcaccgatgaccattcacgcctgacagctgtggccaatgctgtcctgtgagcacaatagatctgaaagccttgaagtgtgtcctgtggcaaacgtgtggcacattgtggttggtgccactgagttcctgaactgacggccccaaagccggggcagtccctgattcttgaatattcagcagctacgctgaagtattgtacccctaaatgtgcaacagaaacttctgtcctacccatgggtcatctaggcgggcagcccacatccattcccagactggccaccacactgaggccacacgtaggccattccaccttgtgagttgtgaaccctgaggcgtctgagacaggaaggcagtgcgcaatggttgaaacatcatggacactcccaaggcccgtactctgaacaatgaccttaacgtcacttggaaaccgagactcactatgctgatggtacatgccctctgctcgggacaggcctgtgctgtgcagccacactgtc

SEQ ID NO: 492604 - DNA, 393 bp, Homo sapiens
cactaggcagtggtgggcaaaagccaggagcagggacgtcaggagcctggagccattgccactaggtgagctgtccacaggaccctgagtggttcggggagttgtggccttgggatcctcaagcagacctacagcaagtttgacacaaactcgcacaaccatgacgcactgctcaagaactacgggctgctctactgcttcaggaaggacatggacaaggtcgagacattcctgcgcatggtgcagtgccgctctgtggagggcagctgtggcttctaggtgcccgagtagcatcctgtgacccctccccagtgcctctcctggccctgaaggtgccactccagtgcccaccagccttgtcctaataaaattaagttgtatcatttcaaaaaa

SEQ ID NO: 492605 - DNA, 147 bp, Homo sapiens
tcggctctccacataatttgcccagcccctgcagtcctggaccctgacacgctaaagcaagtcacagtagtgggatgggggtggagcagaggccccccactacccactacagtgcctccgccatatctactctagtactccgaccct

SEQ ID NO: 492606 - DNA, 481 bp, Homo sapiens
gacaccacatttcccttccacatcaccctagcagaggttctccatgagggctccattcaagcagcaaacgtctgcctggatatccaggtgtttccatacatcctctgaaatctaggcagagcttcccaaaccccagttcttgacttctgtgcacccgcagcccaacaccacatgtaagccaccagggctttgtgcttgcactctctgaagcaacagcctgagctgtattgacacaaactcgcacaaccatgacgcactgctcaagaactacgggctgctctactgcttcaggaaggacatggacaaggtcgagacattcctgcgcatggtgcagtgccgctctgtggagggcagctgtggcttctaggtgcccgagtagcatcctgtgacccctccccagtgcctctcctggccctgaaggtgccactccagtgcccaccagccttgtcctaataaaattaagttgtatcatttcaaaaaa

SEQ ID NO: 492607 - DNA, 643 bp, Homo sapiens
gccggggagggccggtctggacgtcgctcgcgctccgcctgggttcccctcccccaccgggtggtgcgcgcgcgcggacagcggtccgtgggaggaggggttcggggcgcgcgctggggcgcccgtcgcggaacggccggcgtcgcgccctttctttcttagggggctgcgcgtctcgtaggtggaggcatgcaggggtctctagactcgcgtgcccgggggcgggcgaggagaaatgcgcgcgatgaggtcatcggagcgcgcgccctagccaaggttgtatcctgtctgcgcgtcaacctccctcggaagccggggcctccggtgtgggtgtctctgatggtgtcatcacaggtgtccaacgagcatgaaggtgcgtaatgtcttcaatcgccacgaggcagtgtgaagtaagcgcaagacaggcggagcgtcttcatgcctgagttgatggacaagattgaacatcaatactcatggtagggaggtgcaaggcatgaatccatgggtggtgccgactgttggtgctcaagtacctgtctgatcgtacccattaaagacgcaacattttgttggaacgatgctagccagaataaggactgcggttatgacccctctactgatggcagccctatgactacca

SEQ ID NO: 492608 - DNA, 283 bp, Homo sapiens
ccacctctgcctcccaacgtgccgggaccacaagcgtgagccacaccgccagaccaagatgatttaaagtatacaggaggatgtatgtaggttatgtacaaacactacgccattttatgtcagggactggatccccaggggggttttggaatcattgaggatcccaaggcccaactccccgaaccactcagggtcctgtggacagctcacctagtggcaatggctccaggctcccggacgtcatgtcatggctttccatgatgttatgtgttcttgtgaggtg

SEQ ID NO: 492609 - DNA, 128 bp, Homo sapiens
taaaatcttcataattttattcaccccatatactgggctgaaaaagaaaatttcttgattaaaaaaacccctattaaatgatcaccccgtagggaacatttatttatttattttaatggttatttttg

SEQ ID NO: 492610 - DNA, 314 bp, Homo sapiens
tgtggatacatatgtagcagggcagtattgaggctgtgcactagtatgttcgagtcgtgtacagtaggagagtgatattagatcaggagcacgtggttactagcacagagagtactccccagtagattaatcagtgaggggtaaaggcgaggttagcgaggcttgctagaagtcaatcaaacaagctcattcagtgggcagtcagcagatttgaagtccattcacagcaggcatccatgatgcgcactgtgcggtgcgattcgatagtaagcagttatgctcacgccagcacatagtaatgaggcatgataaga

SEQ ID NO: 492611 - DNA, 244 bp, Homo sapiens
aaaatcagattggattaaacaattctagagcaacctcatgcagttctcttagatgatgaaaaggatgttgtcgagataattgacaagttcacagagtcacttactggcaattaccaattgtgaggagaggttcagccctgtttaccaccagccaacagcctatgttaaaggcctccaactaggacgcggactgtccctgcaagtccagcttgagaatcttgcgatgaaaaattaccctggagtt

SEQ ID NO: 492612 - DNA, 399 bp, Homo sapiens
  misc_feature (77)..(77): n is a, c, g, or t
  misc_feature (94)..(94): n is a, c, g, or t
  misc_feature (114)..(114): n is a, c, g, or t
  misc_feature (173)..(173): n is a, c, g, or t
  misc_feature (260)..(260): n is a, c, g, or t
  misc_feature (335)..(335): n is a, c, g, or t
agacgccgctacacaatggagtctcgctctgtcgacccaggctggagtgcaatggtgcgatctcggctcactgcaanctctgcctcccggtganaggtgaagccagctggactnccctgggtctagtggggacttggagaacttttctgtctagctaaagatttgtaaatgcnccaatcagtgctgtgtctagctaaagtttgtaaacgtaccaatcagcactctgtaaaaatgggccaatcagcactctgtaaaatggnccaatcagcactctgtaaaatggaccagtcagcaggatgtgggcggggtcaaataaaggaataaaaagctggtancgagccggcagtggcaaaccgtttgggtccttctcggtaccctggtggctttgttgttttgctc

SEQ ID NO: 492613 - DNA, 1256 bp, Homo sapiens
  misc_feature (772)..(772): n is a, c, g, or t
  misc_feature (811)..(811): n is a, c, g, or t
  misc_feature (846)..(846): n is a, c, g, or t
  misc_feature (878)..(878): n is a, c, g, or t
  misc_feature (885)..(885): n is a, c, g, or t
  misc_feature (927)..(927): n is a, c, g, or t
  misc_feature (940)..(940): n is a, c, g, or t
tgctctttttcctcgcttgcatgcggagatgagcgaggcgggcgcacggatggacagcagggtcgttgtggtcttaagtgatttcccgtttagcggttttcgtgtagaggtctcagttatgttgtggggcttcttcatttacggcacaatgggtttcaatggtctcggcgcctgtggttcctcttgagaggctggttcactgctttcaacgcggccttttttttagcgccctagtgttccgaatgagttgcgttcaatgtggtctctgagcgcgccccgtaaacagggcttctaagagtttttagtcgagcaatgttaaagcgttaattgggggttccagaaccggtgttccctccgaatcccttttgggtgcaaattcaagttaaaaataaaaggttggttcgggggacccttgtctcgtcaggtgtcttctaaggcaaattagtgtactttgtgtttgttctggccgaaatttttatgagatatctctcacctgtcttcccctttgaaccggttaaagctcatagctgtcagctctgaatgaggaggggagaagcccccgggtctttctttgaaaggaatcccctgctttgagggctgcctccctcatggtgtgcgctgtcgtttctcttcctgacgcatcttgtgaaatcacgaggtaactatgccaagcatccacggcggttttgaaagtgaagccctacaccccgcagagtcccggggccctctgtccccacactgccggcccacagttctctctccggagtcaccnaggaatgcacaggtttcgactaccagaaaggggagtccntgggttctttcaaaaaattcgtgaggagagctgtntacagtggaatagggggtctccctggggaatncaggccnagtccttttattttaacatgatgtccatgaagaggtttgccntctgggcagcccngtcggcaaaggagcgtgcatactgcgtttgtgtaattgtttgctgtatctcccttccctctgagctgtattgttctttaatggctgtcttgcccttccaaaaaaaattgaaaaacaaaaaaaaaaaaaaaaacaccgcgaaaggttaacaaaaaaaaaacaaagagtgtttgtggtttaagtttcacgtgggagaaaggagaaccggggaggggcttttttcaccggcttttttaaacttctctttaatataacacacccttaggacgccttgaggtgtattgtagaaaacaacaacacacaacaaaacaacaaac

SEQ ID NO: 492614 - DNA, 1287 bp, Homo sapiens
  misc_feature (772)..(772): n is a, c, g, or t
  misc_feature (811)..(811): n is a, c, g, or t
  misc_feature (846)..(846): n is a, c, g, or t
  misc_feature (878)..(878): n is a, c, g, or t
  misc_feature (885)..(885): n is a, c, g, or t
  misc_feature (927)..(927): n is a, c, g, or t
  misc_feature (940)..(940): n is a, c, g, or t
tgctctttttcctcgcttgcatgcggagatgagcgaggcgggcgcacggatggacagcagggtcgttgtggtcttaagtgatttcccgtttagcggttttcgtgtagaggtctcagttatgttgtggggcttcttcatttacggcacaatgggtttcaatggtctcggcgcctgtggttcctcttgagaggctggttcactgctttcaacgcggccttttttttagcgccctagtgttccgaatgagttgcgttcaatgtggtctctgagcgcgccccgtaaacagggcttctaagagtttttagtcgagcaatgttaaagcgttaattgggggttccagaaccggtgttccctccgaatcccttttgggtgcaaattcaagttaaaaataaaaggttggttcgggggacccttgtctcgtcaggtgtcttctaaggcaaattagtgtactttgtgtttgttctggccgaaatttttatgagatatctctcacctgtcttcccctttgaaccggttaaagctcatagctgtcagctctgaatgaggaggggagaagcccccgggtctttctttgaaaggaatcccctgctttgagggctgcctccctcatggtgtgcgctgtcgtttctcttcctgacgcatcttgtgaaatcacgaggtaactatgccaagcatccacggcggttttgaaagtgaagccctacaccccgcagagtcccggggccctctgtccccacactgccggcccacagttctctctccggagtcaccnaggaatgcacaggtttcgactaccagaaaggggagtccntgggttctttcaaaaaattcgtgaggagagctgtntacagtggaatagggggtctccctggggaatncaggccnagtccttttattttaacatgatgtccatgaagaggtttgccntctgggcagcccngtcggcaaggagcgtgcatactgggcagccctgtcggcaaggagcgtgcatactgcgtttgtgtaattgtttgctgtatctcccttccctctgagctgtattgttctttaatggctgtcttgcccttccaaaaaaaattgaaaaacaaaaaaaaaaaaaaaaacaccgcgaaaggttaacaaaaaaaaaacaaagagtgtttgtggtttaagtttcacgtgggagaaaggagaaccggggaggggcttttttcaccggcttttttaaacttctctttaatataacacacccttaggacgccttgaggtgtattgtagaaaacaacaacacacaacaaaacaacaaac

SEQ ID NO: 492615 - DNA, 407 bp, Homo sapiens
ctcatgtctgtaatcccagcactttgggaagctgagacaggtggatcacaagctcaggagattgagactatcctggctaacatgtgaaaccccatctctactacaagtacaaaaaattagccaggcgtggtgcacatgcctgtaaacctaagctggctaatttgttggcttttctatcttaaggtttgatgaatgcctgtccacctccattcacatctggctttgaacacttaaattagctataggtcttttggctcaaagtcacttggccatagcggtcccaccaagggacaggatagacccagagcaagcagctgtgccgccttggaaatgctatgggacagaataaaagtttggccattgactgctctctggcaaatcttggccagagggggataaggtaaacc

SEQ ID NO: 492616 - DNA, 127 bp, Homo sapiens
agcaggatctctagtcgctgtattgggggagctgacggcataaggatcacagagttctgccaccgcttcctggagggcaaaatcaagccccacctgatgagccagtgagctgccggtgagacgtggt

SEQ ID NO: 492617 - DNA, 494 bp, Homo sapiens
  misc_feature (277)..(277): n is a, c, g, or t
  misc_feature (283)..(283): n is a, c, g, or t
  misc_feature (297)..(297): n is a, c, g, or t
  misc_feature (300)..(300): n is a, c, g, or t
  misc_feature (311)..(311): n is a, c, g, or t
  misc_feature (314)..(314): n is a, c, g, or t
  misc_feature (320)..(320): n is a, c, g, or t
  misc_feature (374)..(374): n is a, c, g, or t
  misc_feature (378)..(378): n is a, c, g, or t
  misc_feature (387)..(387): n is a, c, g, or t
  misc_feature (419)..(419): n is a, c, g, or t
  misc_feature (457)..(457): n is a, c, g, or t
cagctccaaaacccagggcctgtgttctggacccgggggaacttccaggaaatttgggtggtggagacccaaagggttggaggcagctggcccaaggggttgaggcctggctgaattacccatgctttaagaattgggatgggtccccagtgagctcttggattttgttggtgagacctcctgcttcctccctgccatttatcccggcccctttccatgaagcttgagacatatagctggggccctttttttccaaagaacttacctcttgccattnatcccngcccctttccatgnagnttgagacatanagntggggncccttttttccaaagaacttcccttttgccaaaggccctttattttcatatagngacnggctgggcnccattttttccagtcattttggtcccaatcgngggtttttggaattttcccatcccttgtccagaattcnttcccctaagggtaataataaataatttttaacccca

SEQ ID NO: 492618 - DNA, 663 bp, Homo sapiens
agcgggctctctcagcgccgccgtcgccaccgccaccgccaccgccactaccaccggctgagtctgcagtcccgagatcccagccatcatgtccatagagaagatctgggcccgggagatcctggactcccgcgggaaccccacagtggaggtggatctctatactgccaaaggtcttttccgggctgcagtgcccagtggagcctctacgggcatctatgaggccctggagctgagggatggagacaaacagcgttacttaggcaaaggtgtcctgaaggcccaaggctgggggacacccgacagattcaaagtccaccatcgcgccagccctcatcagctcaggtctctctgtggtggagcaagagaaactggacaacctgatgctggagttggatgggactgagaacaaatccaagttcggggccaatgccatcctgggtgtgtctctggcagtgtgtaaggcaggggcagctgagcgggaactgcccctgtatcgccacatggctcagctggccgggaactcagacctcatcctgcctgtgccggccttcaacgtgatcaattggtggctctcattgctggcaacgaagctggccatgcaggagttcatgatcctcccagtggggagctgagagctttcgggatgccatggcgactaag

SEQ ID NO: 492619 - DNA, 608 bp, Homo sapiens
tcctgcctgacctgctctgaacaactcctgtgtgaagcattgacttttttttttctgtgacaccccacggggtgacagggaccaataaatagaatgcgagcactgcacagttcgcttccctgaatcgatatgaagaacaccgcaagggacggggcccccgtcatccccacggggtgacagggaccaataaatagaatgcgagcactgcacagttcgcttccctgaatcgatatgaagaacaccgcaagggacggggcccccgtcatccccacggccagtctgcaggacttcaggtaaaattgtcccacccaaactgcacgtggcaccagaagcttgctcacttatctctacttaagattttctgaaatacggaccacggctttcttgatctaaggaagaacttgctgctgcagtattgaaactgtgaagaactgacatttgaagaaaaatagattaccgttgcgggactagaatgggcgactgcttggagccagtgcttgtttttatctaggacacttactgtcctgtgaagtagaatacatttatctgcatttagtttgttaatgtctgaaatgaataaaaagaggaaattgcgattaaaaaaaaaa

SEQ ID NO: 492620 - DNA, 229 bp, Homo sapiens
ctgctgagtagacaagacgcacagcgcaaaggggccgcctatggcctgatggcctgtagaagggcctttgcacctatcgctgaagcgcaggagaagatggcggcactgactgatgccatccaagataagatgaactttcgccggcgagagggagccctctttgccttcgagatgctctgcaccatgctgtggaaactactctgagccgaatgcggtatacgtgctgtcc

SEQ ID NO: 492621 - DNA, 209 bp, Homo sapiens
cggagacgattgattgagcctggagctcagaccagagcaacatagtaaacccggtctctatcatacaataacgacaaaagaatttaatcttatccccaaagatctggccttcatcctttacacgtaaggggcgatctgtaagataccagacctgagcaggagacctgaggaagccaggagacctgagcaggaaaacggggcaagccaag

SEQ ID NO: 492622 - DNA, 192 bp, Homo sapiens
tttttttaaaaaggggggggggggggggggggggggggccccccccggccccctttttccccgggggtgggggggggaaacccaaaaattttggcccccccgttttttgggggggggggggggggggtttttttttttaaaacccccccccccccccgggggggggggggggggccccctttttttttttta

SEQ ID NO: 492623 - DNA, 677 bp, Homo sapiens
ccatctacaaatgaaatgttcacccgtaactaccaatggggacctaccccgaccaatattcatccccaactggaatgccaaacactgttgtgccatgtggcacactgatgaagcaacttcaccaagatggtaatggtattactggtcatcatgccactctcttcctgcagcagcccactttacaggattagcatcagttgcaggtgccaccgcatacagaatggactgaggcacagaagctggtatcttccgtgtcactcatcagcacagaagtcgcgcccgagtcctcgtttggcacatgccagttgcagttcgttccactgctacatgtgcattatcctcgagaatgaaatgaccctattagtgagtggcgtgctttgggtattctaatgctattctccggcttagacgagacccaactcctcaccttcagcgaagactaggtaactcatgcctcagcgattgctgactgacagctatggtgctatcaaatactccgattcacatctacgaagcttgtgccagaacagatgcggaactccgtgtgcctctggctgcccagtggctatacgattcttgcaagaggctgctacaaatctgatctgctcggggaacgacaagagcctttcattgcgaacatgccttataatcgcgtgtgcgacttgggatccgcacag

SEQ ID NO: 492624 - DNA, 494 bp, Homo sapiens
gggaggccgaggcgggtggatcaactgtggtcaggagtttgagatcagccaggccaacctggtgaaaccccgtctctactaaaaatacaaaaaaaaaaaagaaaagggaaaaaaaaatagcatttatacctctttcctgtgtcttcaaccggccatgaaaatttctgaacacttccaaatttcagtggaataattccaaaacaaaatttataaggtataaaataatttaaacttcttataggtaataggtatactttaaaaaggcctcaggggtatatagatcttctaaacaggctacaattcaggtggcagcttacatttaacgcaactatggttcctctaagttggagaacaactaaggcctatttcactggctggtgtagcctcagtggcctaacatggggtggccaaataaatattcggtaagaattaccactggaatttggtaaaaacccattccgttttcggtttacaattggccaaaaatctcaaag

SEQ ID NO: 492625 - DNA, 293 bp, Homo sapiens
tgctgagtcgatctagagatccccgcagtgcacctgtgtgatttctgctcactgtaacctccacctcccgggctcaagcagttctcctgcctcaccctcccaagtatctaggattactgcttgctgatccgaactatctatccggctatgctgtatgttctagatccctcagtcagcacgttcctactcctagtccctatgggatccattctctgttcatcttcttgctttggtgtccaccaagtgcctgctcccacaagatatccttctatgtcttcggttatgcttccggt

SEQ ID NO: 492626 - DNA, 1473 bp, Homo sapiens
  misc_feature (723)..(723): n is a, c, g, or t
tgggaagttttcatctcatacgtggttatctcttttataattaaaaaaaaaaaatttaaaaactcaaagaaaaacgtctctgtggccgagggcccgaggattaaaacaaacgaggaaacattctcgagaaactccagagggcgaggggaagaggcgtggtgtggcctctctctctctctcaaaaggagacgctgtggcagggggtgtggagaagagagggagagggagacacagagactctcagtgtgtcacacagaaagggatctgcttatcacagatattatcacaccacaccccaccacacccccacacccctctctctaataataaaaaacacagagagagagaaacaagagcgcgccaccatctctatctatataaacacacccacaacaacacaaggacaacactattatatctcacatatacacaccgctcttatctcttgtgtggtgtcgccacacacacatgtggccttatattgtgtagaaaagagagggaggcgcctgtgtgtagagagaagtgtgtgagagaagagagcgcacaggggggtgagagagacgggagaaagatatatgtgtgcgcctctctcagggtctctatagtagtttctcacactattttctcacatatttctctctctctatcacagcgagagaggtctctctctcagggtctctctctctgtgagatgcgacactgtgagacaatctcgagacgagnctctctgtgagcacagagaaaaccccagagtgtactttgtgtgtgtgtgtgcgcgccacaccagacacgtgtgcggcgtggtgtcgccccactgtgtgtgtgtgcggcgtgatgagagaaatgcccacctatggggccaactacaaggaggggtgttttctacaacaaaaacattttatgtgatgagatgcgcgcggtgtggacaagcgcggagatatttgggggaagaaaaaccagccggtggggcgacgcgaccaacatctctctatgaggtggggggcgagatcctctctatccatatcttcttttatacaaacagccccaatattctccccctctgctttttctccctttctaccccaaagatgtgtggtctcacgcgctgtggcaaatctctctcttccccacgggtgttctctctccgccaggaggcactattttctccgggtgggccaccacgatgttgtgggggcccccttttgagcgacccttatagcgttccccccggtggggagtgttacaccccatccctcggcgggggggtttgcttctccacaaaaaaaatattcttccgccaacgtctttaaagttttttctccccccaaagtggttgttcccccctctttgtatacacctctcccccgcgcgactctttccttctgcacgagaggattctttcccgcaaacacgtcgtggtgtgtccccaacgtctgtgggcttcccaccccgctgcgggggccccccagcgcc

SEQ ID NO: 492627 - DNA, 840 bp, Homo sapiens
gagccagtctcacttctaggaatacctagtatatgcgcgtcagcacggcgcattttcctccctactatgcctagaaaggattaatagtagtcgcgggttggatatataggctactctcataaccctccaagcaaccaatccctcttaggcacatatgtgcctattgacatactagtctatgcagtgtgcgagggcgacgggtgggccgtagcccctagcgtagatctgcaatgctcgcaagcacaatatggaccgtagagcgtacgtacatagaggctaaagcatactccaatgctagaactaggtgcgtcccaagcagagttatgatgtagctacacagtgcacaggcgacattttcctcatgcagtatcaacaatacatctcttgaagtcaagcgatcgaagcccagtcccagcgagcgcgtacatgtatttaggcagtcgatcgccgcgctttaactatttgggataaagccgaagggtccaaacagagcatagccttatgttaggcgggtgtcctcggaaacaccttttttcgctccagaaggaccgggtataaaatcccactcgcatccttaggtagcgtatagcgtacgcggtggagacatcccttaaccctccggtcagcaatactctagtgtgacaacatgacctaagacgtccgggaattaattgcccaggtggagaccccaacgttagatcaggggacaaagaacaagggggctgcaccctcggcagtaaatatcgtaagggtccgtacctaaccaagctcgtgccctttgaaggttacatacacattggacaagcactagagaacacttaatacagtactcctgactat

SEQ ID NO: 492628 - DNA, 271 bp, Homo sapiens
gaggattcatcagaaatgaaagaaaacatgagggctgggtgtgctggcttgtgcttgtgataccagctacttgggaggctgagatgggagaccagcctgggtagcatagcgagaccctgtctcactaaaaaaaaaaaagaaaaattgggctgggtacgatggctcgtgcctttagtcccagctattcaggaggctgaggaggagaatcgctagaggccagaagttcaagtccagggtgggcaacatagcaagacgctgtctttacaaaaaa

SEQ ID NO: 492629 - DNA, 611 bp, Homo sapiens
ttttttgagacgagccgcttgtccccaggcggacgcggactgcagtgcgcatctcgctcactgcaactctgcttccgggtcaccccatctcctgcctcagcctcccgagtagctgggtgcctttgtccccagctgtacgggaggctggggtggatgatcgcctgaacccgggaggttgaggccgcagtgggctgtgatcatgtcagtgcactccagcctgggtgacagagtgagaccctgtctcaaaaaaaaaaaaaaaaaaaggtctgtttgtggagtcttagacatttcttttaaagaaatgaagtatttactttattgcatagctttataaattgtgcaagaatcccacatagatcttacaaagtacctttacttttgatggcaagaaatatgcctctgaccaattgttttcagaattcttaaaatgaaaaattgccagaatgttatgttataactgagaagaaagtcatgtaaaataacacaaagtgatagtgaaaaaatagaaaatcagactgataaaaataaatatatttttaaatcatattttatattaatctttttcatctttaagagtcccccattttttacagataaagtgtgaatttgtc

SEQ ID NO: 492630 - DNA, 277 bp, Homo sapiens
  misc_feature (114)..(114): n is a, c, g, or t
  misc_feature (132)..(132): n is a, c, g, or t
  misc_feature (137)..(137): n is a, c, g, or t
  misc_feature (163)..(164): n is a, c, g, or t
  misc_feature (168)..(168): n is a, c, g, or t
  misc_feature (186)..(186): n is a, c, g, or t
  misc_feature (205)..(205): n is a, c, g, or t
  misc_feature (218)..(219): n is a, c, g, or t
  misc_feature (228)..(230): n is a, c, g, or t
  misc_feature (244)..(244): n is a, c, g, or t
  misc_feature (271)..(271): n is a, c, g, or t
tagatcgagcgtgttaccggtgtttatgatgcacctgaggttaaatgacagaggatcccaaggcccaactccccgaaccactctcacctagtggcaatggctccaggctcccgnacgtcctgctcctggctnttgcnctgctctgcctgccctggcttagagnntggngccgtccaaaccgttccnttatccaggctttttgacnacgctatgctccnngcccatcgnnngcaccagctggccnttgacacctaccaggagtttgaagaancctata

SEQ ID NO: 492631 - DNA, 150 bp, Homo sapiens
gcgtgaggcggcttcgtgggcagcgagagtcacagacaagacagcaagcaggattgagcactacacggaaagcttgactctttagagactaccagacgacttaacacaattgaacccagacgtaactactgagtaaccttgagagtgcgg

SEQ ID NO: 492632 - DNA, 740 bp, Homo sapiens
attcggccccacggtgtacacatggtgctcaaccagcagggccggccatcgggcgatgccttcattcagatgacatcagcagagcgagccctagctgctgctcagcgttgccataatgaaggtgatgaaggagcgctacgtaggacgcgtggtcccctagttccacagcacgagatgagccgagtgctgcatggcgagggcacccttggcccgcagccggcatgtccccttccaccctgcaacctgccttgcctctcaccagctacctacagcagcttccaagccaccccaaacgctcattcccacggagacggcagctcttatacccctcttcagcactgctcccagttgccagggtgcctgcttggcccaagccctgtggcctactaattccagtgccagccactcaactctacctgaactacacaagcctactacccaagccccccagtctcccccaccactgtgccctacctcactacacccactgctgccctggcctctgctcccacctcagctgtcgtcccagtcaggagccttggtccgcatgcagcggtgtcccattacacggctggtatgaaggatctgctcaggcgtcttccaggcttaccagctaaccgcttgatgactaacacaggtctgatggcctggtgggtgacccagcttcgcactggccgccacaagccccccaaggcaatgggcgctgccgcaggcacagcaagccacgaggccaagacccc

SEQ ID NO: 492633 - DNA, 260 bp, Homo sapiens
tagcgtctatagcctaagcttgagtgcagaggcgcgatattggatcactgcaaactccacctccctggttcaagcgattctcctgcctcagcctcccacagtgctgagattacaggcatgcaacaccacacccagcctgaaacccagattcataatatgaaatcaaagtcttcagaccttgtaggtgtcctaaaaagcacgcctgagtgacccactagttagcaactgccaatctacaatatcatacacaaagggaaaca

SEQ ID NO: 492634 - DNA, 276 bp, Homo sapiens
gccggaatgagatcgctgcatccccagatgtgattgggcttggttaaccaagggatcgtagcagtaaggttcaagagcctttaatttcagcaaaacctaagaattgagagcaagtgtgagtgtggaggagtagaacttcctagagggaaagagaagggtcagatgtaatacagcaccagttttgtgcagaaggagtaggcatctcgttttcaaataatacagagcatcagtatctgattatgaacgtcacccaacatcaaggtcatcattaaagaa

SEQ ID NO: 492635 - DNA, 660 bp, Homo sapiens
acaagctttctagtaacattcctcttggcgctcgaggtgccacctgctagtcaagtagatacatggtctataagctgtatgtaccatagagatcatccttgatcctgactaaatgttatgagatggctcatcctcatcaccgactgcccaggggagaataccgagtgtcctcggagcgaatcctaatggcactcccttgatgtcattactcggtgagtctatcgtacgagagagtccagagcagatcccggtatcacatttacgctctccaagagtaaaccagtaagaagttgaatccctgaatagaccaataacaggctctgaaattgaggcaataattaatagcctaccaaccaaaaaaagtccagaaccagacagattcacagcagaattctaccagaggtacaaggaggagctggtaccattccttctgaaactattccaatcaataggaaaaaagggaatcctccctaactcattttaagaggccagcatcatcctgataccaaagcctggcagagacacaacaaaaaaagagaattttacgaccaatatccctgatgaacatcgatgcaaaaatcctcaataagatactggcgaactgaatccagaagcacatcaaaaaagcttatacaccatgatcaagtgcgcttcatccct

SEQ ID NO: 492636 - DNA, 503 bp, Homo sapiens
atccccgaattcatcagccagcagtgatatggacaatgaagtccaagctgaggaggtctcagatggagatgaggaacctattgggaattggagtaaaagtcacgtcttgctatgctttagcaaagagacaggcggcactgtgtccctgctctaaggatctgtggaactttgaacttgagagagatgatttagggtatgtggtggaagaaattcctaagtagcaaagcagtcaagatgtggcctggctgcttctaacagcatacactcacatgcgtgcacgaagagagtatctgaaactggaacttatatttaaaagggaagcagagcataaaagtttggaaattttgcagcctgaccatgtggcaggaaaaaaagcacaattttcagggaaggggttcaagccagctacagaaatttgcatgaggagctgaatgttaatagccaagacaatggggaaaatgcctcagagacctttgcagcagccccttccatcacaggcctgg

SEQ ID NO: 492637 - DNA, 333 bp, Homo sapiens
  misc_feature (227)..(227): n is a, c, g, or t
caggcatcacctagatgaccagagctctcatggactcgcttgggctgagtggcgcctgaagctgccctcaatccccttggtgcctgtttcagctcagaagaggtggaattccttggccttctggaggaaccacaacagagatggctaacaagcaaatccaacagcaaccacacgctacaagcgaacagcagagcactctgctactttggtcctgacagcagtacacnagcagcagtgaaggactgcacagcaagccctcaagactggatggaacagaacgtgacaggcattctacgagcttcgtcgagtcagggtacccgagctcggaattcg

SEQ ID NO: 492638 - DNA, 174 bp, Homo sapiens
actgcgcgaaatcgatcaaccctggggttagtatagcttacgtttaactatcgtttattgctaatcgttattcattgtttttccctgttgttaaaagtggtaggctaagcgttttgagctgcattgctgcgtgcttgatgcttgtcccttttgcccaacggtgaccggcgactt

SEQ ID NO: 492639 - DNA, 137 bp, Homo sapiens
tcgagggcacgctcatcagcaaacagcagtaggacaccaagaagtgactcgctattgactatcaccaccaccagcaccagcacaccatgtgaccagcaacaccgagacaggcagagacgactccctatttctcctct

SEQ ID NO: 492640 - DNA, 306 bp, Homo sapiens
gacccagcaggagcgcatgaagttctccatcgggagcaaggcgctggtgcccgatgtctcactgatcgacccggaaaccacggcgagcatggacccgtttctctcggcctgtaccggcatcgatgcgctggtgcatgccatcgaggccttcgtgtccaccggccacgcccgctgaccgatccccacgcgctggaagcatgcgtctgatcaatggcaacctggtgcagatgatcgccaaccccggcgacatcgccctggggaggaaaatcatgctgggcagcatgcaggccgggctggcgttttcca

SEQ ID NO: 492641 - DNA, 838 bp, Homo sapiens
  misc_feature (422)..(422): n is a, c, g, or t
  misc_feature (476)..(476): n is a, c, g, or t
  misc_feature (517)..(517): n is a, c, g, or t
  misc_feature (598)..(598): n is a, c, g, or t
gacatttggaatatatgctatctatagattcagtatctactacccatatttactttaccaaatatatttctcctcactgcataaggactactcttctcatattttcttctttgatgaagatatttttcaccaaagtttattttgtgatgccctcttggttttgatactttaaaatctgtggcacccgttctacatgaattatcaatatttggtaaattcaatctgtatttgttttgttaaagtcaaaaatctcattttccaaaaaaaaaaaaaaacccaggttacggcctcagttaagctctttgaacattgagcaataaaatttctctggcatttccattatggattgtgctgatgaaccgggactttttaaaaattatttggtttccttataccttttacccttttaccttaacagactnatttgggtactcagtaaaacaaaattttttggggtcaaaatttctaactgggtntcatcactttataagataattaatttaatttatggaaactngtgaccttagagtaggggtagccctcaaaatatagatttactcatttactcatgggaattttcttcaggtgtaagggtacntttttcactaggaaaagaattcaaattttgcttatgcaatatattttggtggtggtcttcccttaagtgtatatggtatatatgagccttctggttaagttccttaatctggctaagtggtaccttaattagaggggcaatatatgtttcataacggaagagtcttaaataactttgggttgggtcagataggtattggggactgggtataatagggatgttaaaagccataataagtgg

SEQ ID NO: 492642 - DNA, 817 bp, Homo sapiens
  misc_feature (106)..(106): n is a, c, g, or t
  misc_feature (124)..(124): n is a, c, g, or t
agcgggtcttaccttcagcaggagccggttccctgtgtgtgtgtccgctcgccctctgctccgtcctgcggtgcccatgccctcctacggtccaccatggccctgntgcactccggccgcgtcntccccgggatcgccgccgaccttccaccccgggcctcgtccgccagctggtctctgccaggagccagtctcctggctggacccagtgtggaagatggagacctcgctagatcccatatctgaggagtcactgtaagcctttaacgagggacaccaatagtcatacacagatgaatctgcggagttaggtgcctagccgggtatgataacggaaagccattactgtgctgccttagacgttccgctaatggcatgaggcccagagttgtccgctagaaaagatttggcacaacggacatacctgcactttgcggcggactggcttgaacttttgcaagggcatctcgcagaactagccctgggtgagaacatgcgaacgtcttgacatgagtggccggtttgtcacctgtgcagaccattcctggaactggagccttaacggatcggagccagttttctgctaaagatttctgaagttcgagccgagatgtctattctgaccaagagcaacctggggaaagccacaaacccatcttcagggatgctggcattgcagctacgaggttatcggtattcatgaccccaagacttgcagtttggactacacaggcgctgtggcaggacttttcagcactaccagagcatagtgtcttcttctgcatgcctgcagcccaacgatccacggcagtggacc

SEQ ID NO: 492643 - DNA, 699 bp, Homo sapiens
cggctcgggcccgagttcggcccgatccagcagatccaagttttcaccagcatccagtccaacaacgtgctgcaggccctactgacccccatgatgttgctactcggtcgcatgacactgacctactgccgttaaaggcacatggacttcgtgatagccgactctctacagggtccacaggtggatactctctcggctgatactgtgactcgagcccgtaccctgcaccagatcatagcttaagttcatagacctgtcgacgctgtcgacggcgtcttgacttacacggcctacaaacgggcgcctgcactcatgggcttacaggtgcacgtggccattgcgtgacatgactgtgccctgagaggccccttgggcctcgtgttaggtgatgctcccaacagtgctttcagagtgagatacagtgacctttttggagccccacagacttacacatgtatcggaagtgtaactaccccatccaaattcaggctataaggtgcaccaagcaggcaggccctgcccctgggttaccttaaggaatgaggaagtgccttcgaagcaacttgaaccctcgctttggcgcatctcttaacctactgtttacgcagatattacagccgattacaggaccagttaccgtttctaactccagactgttatattagacttaatcgcctgggttttttcgccaccggtccg

SEQ ID NO: 492644 - DNA, 128 bp, Homo sapiens
gatgagctcggtccagtcggtctaccattcttataccttcaccactcaccactctatcaccatcactatcaccatttttatcaccattaccatcaactttaacatcaccaccatcatcaccaccaaca

SEQ ID NO: 492645 - DNA, 1094 bp, Homo sapiens
aacacgatgtacggcgttatcttctacatgagtttgcatacagcgcatggtggtaccgtgttcccgctatcatgctcctaacaagtctactacccaggtacgttggcgcagcaaagttaggctcgtcctatcgcggctgtgacttgtggccaggggagtcttaatggtgtgggccaacgcggtcgatctgagcaggcagtcagcacgcccctgtacaggtgtaccatgacaaaggacccgtgtgctagcagagtccccgtgtgtctcgttggtacgtggttgagaccgcctagagatgccactgccgtaagtagacagcccaggatcaaggagcctgtatcaattgaaacccttcgacaaaccgtaaggtttatgagcgtgccgttacatgtatgtatcacatggttagcaggcatcccgtggcatgactatgtctatgaacccagaaccaatgtcattgggaggcgactcacgtggatgggaatgccctttctacatgtaccagtgactccaagagatgatgcggatgtccagacatggcaatgacttggtaccatagtcggtatgcctatcgcgaggaaaagcactaacctagtcgtcagcgagtacgcattgtaatgcacgagtctatggcgctcgtaaagtacaggacccatggcgtcgcaggcgaatggaaagctgttcgtagaggcctgtgttgaccgggtagtcacgccttgtggggcggcaacggtattgccgcaaggaggtggctctcgggaatgcatagctgggatggtttctgcctcggccacatagagcggtgtacctgacagagaattgcgacgtcattgcaatatttcacattagcgggttgacccccccgaaaggaggttgtcggacgcacatctagaactttggttaagtactcgatctcagttcgaaaataaaccgcgactttgcaggttattcagaaaggcggctccttgatacagatttgcaattcgggcagggtttatgcggaacgcctttgggaaagttcgttcagtcgctcggggacacggggggctttcgaagctgaaaccgatccaagtcgcaaaggttgttaccttgtc

SEQ ID NO: 492646 - DNA, 129 bp, Homo sapiens
ctcgctggtggctgcactgcttgggtgtgacagagactgctggggttgatggatgactgctgggtctggacctgagtacgctggtgatgggtgtgttgcatgcttgttaccacacaatgcacagctgtc

SEQ ID NO: 492647 - DNA, 1541 bp, Homo sapiens
gggtgaagcacacaacgagttttccaaagcttcctttgggagtgggcctgcggtggaatggcttcccaagtacgctggacgtctcaccaaaggacaggtgcacagctcatctgccaagcccaacaggcatggctcacttcttcagttttgccagccccaaggttgtcagcatggtactcccatgtcagcccagcattccaactctgtctagtgtgcaaaaggcacagtgtgtcaacacagctggtctgtgaatcgcaatccatagaactccaaaacacagcacagttccgcatcacactgtggctgttctgcggggggcacaccggcatctcacctatgtaaaccacaacatcatccaggcatccagtttcactacagctgcccaaaacagcgtaggacaatcatcgcatgcatcatccatcacagcacagttccccacacatggcaggccgaaccacagcatccgcacagtggcaacaccagccggcgcaccaccaagcagcggagaatccacagtgcaacgcaagcgggcaccagagccttaagcatatgggacagactgccaacacagaccatgcgccgggtcactggaggaacagacagttcgttccttctcactttaaacgtggggatggcaccattacccacatctcgggctaccaacacgctcttacgcagccacaaggacccactcccactggtacgccaacaagcggtgaataagaacactcagcacaggggtaaccacagcgggggactcacactccatgcaaggagacaacattggagcaccaacggcaaatatccggacaagcgcgcttagcagacacagccgtacgttcgcaacaaaggacacagcccactactagagcgcccaacgttgccacaggaggaagaccgtcaccactggccagaggggacgacacaggcaccccgtgcagcgaacccagtacacacgagcgcacagcacctcacccacccgatacaccccacgggcacgaagaacacgccacgccaccggggccacctccgaccctcaacacagaggcccacagcccaccaccagcacgtcgctgccccagagccgaactgggggcccccatcgcgccacacgcacacgggacagccgcaacagcggagcgcgtaagggccgaatagccgcacacacttggagccaggcgggcagcgacgacaacaacaaccgggagaagcaacaagcgcactcgagagcacctcacacagcggaaccaaggccacgaactaacgcgaggacgcaccccgagccgacaacgctcgacaaccagccacaagacaaccacgacccacatgcggcaccgcaccccacccgcgcgccgccaaaaaagacgacgcgaggacaaacgggacacacacggaacgaaagaacaccggagacaacgaggaacaacagaaacgagacagcacagagctcagagccaagcacccgcgaccagccacaccccgaacacaccagcagacacccaaccccaccgacgcacccacaagcagcagcgcaccctcgc

SEQ ID NO: 492648 - DNA, 378 bp, Homo sapiens
gaggtcccagtgcccccaaccctccagcagcccaacccgacgacgaagaggatgaggaagagcttctgcttcttgcagccagagcttccaggccggccttgcaaccaagcgcccttaaattgtggttaagtcctcccggccggttaaccactttccaaacaatagggcatatcctccctccttctatataactaagagacccgagagcccgaagagattcagggcagacagaccctcaatagtgagcctcgcaggagaggcacaccaaacatctgttaactccctctccccaccctgtctcggggcgcagcgcacttccacaatttactaccatactcagagtccagctttacaggcgacgattacttctgctctcgt

SEQ ID NO: 492649 - DNA, 568 bp, Homo sapiens
ggaattcggcacgagatatatttccctttcttatggaggacaatatttatgcggctgagacgggtttgaaacaaaagaatatgcgcaatctatgcgaagagggcaaaataggtgcacatggaaaaccagtgatttttctccatcctaaagactgtggtggaggccttgcggaactggagcaagcttgatttatatttgcaagcaactgattttaatgacctggaaaagcctatcaaatactatcacaatgtactatgacattgagtccttgactgcttgcatcatgtacaagttcacagtttatgactgatttacagagcgatttgaatatatacctatgtcaatacatagatatgtgtattatttagattaaccaacatatttcgcaagttgaatttgaagaaaatattgattactaattacttagggcacattatttcatatagaacctaattattcctcttcttgagttagaacaagtttgagttactggactcgttttacaacggccttactgggtacctggcgttacccaacttagaacccttggaacacatcgccttttgtc

SEQ ID NO: 492650 - DNA, 163 bp, Homo sapiens
tgggagcaggcagggcccctgggagcctgggttttttggcccgttccatgggactcatccctccctcccagggctgttgtgaggtgttgtgggactgggtgtcctgcaaacgcccagctcggggcccagccaggggggggccccccataaacgctcccccata

SEQ ID NO: 492651 - DNA, 130 bp, Homo sapiens
agctcggtaccagccactgtactcagacacgggggcgtcatcccgggcctggtcctggtgaatcgggggagccactgtactcagacacgggggcgtcatcccgggcctggtcctggtgccctccacctcg

SEQ ID NO: 492652 - DNA, 515 bp, Homo sapiens
  misc_feature (16)..(16): n is a, c, g, or t
  misc_feature (33)..(33): n is a, c, g, or t
  misc_feature (48)..(48): n is a, c, g, or t
  misc_feature (67)..(67): n is a, c, g, or t
  misc_feature (207)..(207): n is a, c, g, or t
gggaccagggcactgngcttgttaggtggtacntcattggaaagggtngaaacttattaaaatattngcattattttaaggcaaggaaatgtttatccttaaaccaactcggtatcttaacttatacaaaaaggcttcatggatgtgaaattggcattccagaagaaaagtgatttttaaggaaataatttaacaattttctaaatnaaaatcaacaaattaatcaatatacattgtcctgcatccattaactactaagaaaacacatttacttctgtattgtgtctttgcttgagaacctgaagcaatctaacagcttcataatgttgctttccagataagatcagtcttgaaactattataaccaaattattatctctaagaaccaagttgttttatgttgaaacccaaaatttcagtctcgagaaaaggaattctgcctttaccaggaagaactatctgggattctgatggtagttgaatgtgttaggaataaacctctgctatgatacatt

SEQ ID NO: 492653 - DNA, 707 bp, Homo sapiens
  misc_feature (27)..(27): n is a, c, g, or t
  misc_feature (51)..(51): n is a, c, g, or t
tacctggaggctcaacggcagaagctncaccacaaaagcgaaatgggcacnccacagggagaaaactggttgtcctggatgtttgaaaagttggtcgttgtcatggtgtgttacttcatcctatctatcattaactccatggcacaaagttatgccaaactgaatccagcagcggttgaactcagagcgagacaaactacatcaagtagagaaagttttaaaactgcagacaattggcgtggatgggttctgcctataacatttgggcaggactccaagccgcggaaggcaccacttcccattttccaacctgtaatcaactcattaaacaagctcttcttgtcctgcaaagcagtttagtccaatacttgtgccacatgaacattacttttagcctttcttgtgctaaggtaaggtataccaccctcgatgcacatccaccttgtggtaacacttaggctggactgtgatcgtacaggcacagcaacaccttgcaaaaagatctgggccttctgtagttggcaccttttcaaaaggggccaacaatgaatacaaatatacgagaattccacagccgcgacaacaaaaaggttcctaaggtattgtcacatattgtcaagctccataagggcttgtcacacacatgacttgctgcagtatgccttaggtcatccaaactttattctacattatatcgaattgataca

SEQ ID NO: 492654 - DNA, 363 bp, Homo sapiens
  misc_feature (29)..(29): n is a, c, g, or t
  misc_feature (309)..(309): n is a, c, g, or t
  misc_feature (350)..(350): n is a, c, g, or t
atcctgggatgcggtgaggaactggccgnggtagttggagttgagatcctggaggaccagcgcggacagctgcgccgcggcggcgtccgccttgcgaccggtgtcccggacatgatccacctgcagattgaccaggatcgcggtcagcaccatggcgatcatcatggggatgatgatgaccatgagggcggcctgggtcatcaggccacggtcatcgcgccggagaccggccaggcggttacggattcgagacatcatcggtgcgttcaccccgttcagttggtgacggtcagaggttggaatactgcngcaaccccgtggtggagttgtgcatcagcagttggacgtanagtgactgcgtct

SEQ ID NO: 492655 - DNA, 197 bp, Homo sapiens
  misc_feature (21)..(21): n is a, c, g, or t
  misc_feature (71)..(71): n is a, c, g, or t
  misc_feature (90)..(90): n is a, c, g, or t
  misc_feature (117)..(117): n is a, c, g, or t
  misc_feature (122)..(122): n is a, c, g, or t
  misc_feature (125)..(125): n is a, c, g, or t
  misc_feature (172)..(173): n is a, c, g, or t
  misc_feature (178)..(179): n is a, c, g, or t
  misc_feature (195)..(195): n is a, c, g, or t
  misc_feature (197)..(197): n is a, c, g, or t
tgtttgatagatatgtttatnttccattaaccgagtatgatgcaaaatcattggtatatttttgctggtgnttataggtgtttagaaatntaatagtttcatatccagtatacaggnatcanatncttcaatttacagctgttttttttttctgatttatataatgggtttnntttcnnggtgcttattcctatngn

SEQ ID NO: 492656 - DNA, 289 bp, Homo sapiens
  misc_feature (235)..(235): n is a, c, g, or t
  misc_feature (276)..(276): n is a, c, g, or t
gccggaggcactgtcgaagacggtgaacttcaagggcaaccggatcgacatcggtggacatcgattcttctccaaatcgacacggtcatggagcggtggctcaacatccttcctccggaaaagaccggcggcgagacgttcaccttgaagcatcagggtaaatcgcgcccgttcgagggtgacgcggacggcgtcgatccggaaacgaccgacgacgtgatgctggaatactgcngcaaccccgtggtggagttgtgcatcagcagttggacgtanagtgactgcgtct

SEQ ID NO: 492657 - DNA, 146 bp, Homo sapiens
atctgattataagcgagtgacggtataaggagtgggatctgtgtcgcagtgttaaaaaaattccaccagatctaaaaactattgcagtcaaacagaaattttcagactacttgtggaatgtcactgcctcggggtatttcacaaga

SEQ ID NO: 492658 - DNA, 293 bp, Homo sapiens
  misc_feature (33)..(33): n is a, c, g, or t
cccaggaaacacgctagtaacatggaactaaanttcaccaatgaatacttttttttttaatttgaaacggagtctccctctgtcgcccaggctggattgcagtggccgcgatctcggctcactgcaagctctgcctcccgggttaatgccattctcctgcctcagcctcccgagtagctaagattataggcttcagccaacacacctcgcctggtgttacctgttttccctatttatttttctctgtagctgttcatacagaggcagacttcatagctgtttccctgtgttac

SEQ ID NO: 492659 - DNA, 810 bp, Homo sapiens
agcggggtgggaagctctgctctggctccggcaggcacaggcggctcgggaggtgcagctgccggctccagccccgggccccgcccgtccgacgcgcgcccgcgcctcccaattcccagatgccggggctggggctctaggctgccgcggcggactcaaaggatggagctgactgggcggcgaggcccagggacggtgccgggagatggctgcgccagagcaggtgggatcgcgacaagagaggcagcgtagagcctgagacttggcccgaaaccatggacaggtaccagggaaaacccgggagacaccgaaggacgagcacctgagcgacaacaggggaaggcagggtgcaccagggaacgcgaccgaacaagcgaacagtgaacataaggaagccggacaatgcacgttgagaagagcgaaagaagcaccggacgaatggagacacactcgcggcgcaaacgcgccgacgagagcaaggaacagaggatgacacgagcaaggagagaaacagcatagtatacaggctggaacatttatgtcgaaaggacaaagcgctagtaaggccataagaatccacatggtgaaacaaatcgagagaatgaaactgatggctactccacaagaccctacgacttgatcagcccacaccggtcaagacacttcacaaaagtattttcaaaagcaaagaaccaccgcgaatcacgagcacaataacagcacggaacaggcaacacgaccgcgtacacccaaataactcccacacaacacatgccagtaccacggcaccaaatcactcgtatgcaacgc

SEQ ID NO: 492660 - DNA, 554 bp, Homo sapiens
agctggtatctaaggatccatgagaccaggctgagatctgagatcgacagtcagaagcagtgcgcaactgcagggcgcattgctgatgctgagcaggtggggagatggccctcaaggatggcaagaacaagctggaaggctggaggatggcctggagaaaggcaaagaaggacctggccggctgctgaaggagtacaggagttgatgaattgtcaagctggccctggacgtggagatcgccacctaccgcaagctgctggagggtgaggagtgcaggctgaatggcgaaggcgttggacaagtcaacatctctgtggtgcagtccaccgtctccagtggctatggcggtgccagtggtgtcggcagtggcttaggcctgggtggaggaagcagctactcctaatggcagtggtcttggctttggaggtggcttcagttccagcagtggcagagccattgggggtggcctcagctctgttggaggcggcagttccaccatcaagtacagcaccacctcctcctccagcaggaagagctataagcactaaagtgcg

SEQ ID NO: 492661 - DNA, 385 bp, Homo sapiens
taaaatatttaagagctcaaggggatacgggcggaagggggaaaatctcactactacttttaatcctaagctcagggtgtttcagatatctatttcacacccaagaccatgaaccccatcatagtattggtgcctcctatgaaacctatgacatgtcagtcagcctggctgccggcggggtgcggtatataagtccattacatatccctaatagctggatggaaaccctgaaaatgacatgaagtccctagagaaattgggccatgcgggtgcttctcaccaggttggaccttttacaaacaaaatctcggttgtccaagggcgacttacagagtgtccattagggtggccagagatgttagggggactacaatttcaatcccct

SEQ ID NO: 492662 - DNA, 511 bp, Homo sapiens
gtagtaagaacacttaacatgaaatctaccctcctgacaaatcttttgttgtacaatactgtaatattaactatagggacagtgttttacagcagacctgtagaacttaattagcttgtgtaactgaaactttatacccactgaatagcaactctttgtttccccctcttcccagcccctggcaaccaccatgctacttgatgcatctgtgtgtttgagtattttatatacctcatataagtggtatcatgcattatttgtcctgtgactggctttcacttagcatagtgtttcagggttcatccatgttgtcacatgtggcaggatttccttttttaaaacttaatattccattgaatgtgtatactatattttctaactaattcatccggtgatggaccattaggttgtttccacattttgggccttgtgaattaatgcttccaaggaacgtaggaatgaaaaaaccccctcaagaaaccggaattaggtttttttggttaaaaattca

SEQ ID NO: 492663 - DNA, 950 bp, Homo sapiens
ggttatggtgggtccgtgtctcaagtccacccaaggtctcctcgtatcgcctggtaaaaaggcactcggacctgaaacaggtgaggagaatgagtaccttccaagacagcagtggcagctccagataatagagaaaccctttgaggtgtagtgatgcactggaaaggagtctgggagcatgactatgggtggagtgctccggggagcctgcaccgagtctgaattgcaagataatcttgcgacgagagtccaggagctccagcattcacgtgttgcatatgccgtcacctgggaagtgtcttgagaagccgcgaggtatagtgctgtatggaacaggtgcgtgcttattatatcaggttgcacgaagtacgacactgttcatcagcaggcctcagcatcctcgtactcgtttatcggggccagattcgacatgggtctgtatcgtcatcaactggtggtgtacccgagaagacaaagtatctatgacctaatgctaagatctctgtgatgcctgggagatggactgggcagattgtgaccgccttaatggcctgacagattcagagctgtagctgctcttttgaagcctgacacgattactactgcgtgcaggacatacaccaacagtttgggtctcatcacccacgcattgcaaattcactgtcgcacttgatggctcagtgctaagattcgcgcgcaattattggagtcctttctcttgacaaacgacgaggctgtatctccaatgccagaatcaagaaagtcagggctcccgagaatgtagctcgccctttgcagcgaactggttccttggatggcaaaccctgcacgggtatcagctccttacgtaccatgcacgaccccgagattgtgtcccaaagcatacttgcaaacggcggattttcaaggcggcatctcactatgcgggcaccgcggctacaatgtctcaa

SEQ ID NO: 492664 - DNA, 550 bp, Homo sapiens
  misc_feature (36)..(36): n is a, c, g, or t
  misc_feature (182)..(182): n is a, c, g, or t
  misc_feature (234)..(234): n is a, c, g, or t
  misc_feature (262)..(262): n is a, c, g, or t
  misc_feature (308)..(308): n is a, c, g, or t
  misc_feature (387)..(387): n is a, c, g, or t
  misc_feature (431)..(431): n is a, c, g, or t
  misc_feature (434)..(434): n is a, c, g, or t
  misc_feature (463)..(463): n is a, c, g, or t
  misc_feature (507)..(507): n is a, c, g, or t
tcccagccagtgaggttagcatggttaggagtccanatgtgtgcaagatgcttgtgtggaggctcatgtatgcatgtgtgtatatgcaaagctgcacatgacaatgtgcatgccagtccagagttagatgtacctatgcagttgccctcaagcgaagggtcatatttggaaacaaggatggntctaaacatgtaagcgtgcatgtgggcatgtatgtatctggggcctaaggangtggggaagtgggtgttggggtaagggntgggcttcagggcatttgcagaaggaggaatgggtgggagggaaanatgggcagagcaaaaaaaagaaatgaaagccaggcaggaaagtggaagaacaggggaaggctcatgtaatggattaaanctcacacaaagattaaatttccttgattcctgagagtttttctnttngatttttaccccctcagtctatcactgcnagagaaagaggtagaaaagacaaacagaccacaaaagacaaganccagacatatagacagacgcacctgttgcatgtgcatgagcca

SEQ ID NO: 492665 - DNA, 341 bp, Homo sapiens
gtggtgcatctcagctcagtgaacctccactccctggctcgagtctctcctgctccaccttctgagcagctgggattacaggcacataccaccatgcctggctaatttttgtattttagcagagacgaggtttgggcatgtcggccaggccagtctcttactcttgacctcaaatggtttgcctcggcctcccaaagtactgggattacaggcgtgagccactgtgcccgaacttattaaatacattctttataaagacacatacatgcatatgtcagtaggtgcattatgcacaatagcaaagagatggaatcaagctaaatgcccatcagtactagact

SEQ ID NO: 492666 - DNA, 425 bp, Homo sapiens
tcatggtggccagacagaatcgccggaggactttccaaggcttcccgttggcgaagaccacaccggtcccctggaagatggcgtccgtgatggcaataggccccctgccagagaaagcctctgcctgctccaccagggcctcccgcaccgtctggtagccacacaggatgaccacaggccgggagcccaggtacaccgtgaagatgtccccgtgtttctcccgcagccgctggaaggagtggagaaagcccttgtgatggatctgcaggatgttccccaggaggggcagaggccaaggtccgggcggaaggtggcccggggaggcggggcggccccaggcccagagcagcaggaggccagtgaggcccaggaggagcgagaaggcggacagcaccatggtcccctctctgcctgccgtgagctcg

SEQ ID NO: 492667 - DNA, 491 bp, Homo sapiens
gactatacaggatcccccacgagcacagcgctgcttatagagaaagataaggctatctaagagtctactgtccaagggatttatcgtggggagaaacgcatggaaaacatcacaacactacctctataaattggactcatggcaggattccaaggaattcagtatgccatcaacattaagcaatataatcagagctaaactcaacaaaatttttctttcagcgataatcctaatttttggtaaattatcgtggaacctgcccccaataattcaaagtgagtccttttctattttccctaagtgtcggctggtctgagaaataaagggaaagagtacaaaagagagaaattttaaagctgggtgtctggggagacatcacatgcccaagccgcaaaaccagcaagtttttattagtgattttcaaaaggggagggagtgtacgaatatggtatgagtcacagagatcacatgcttcacaaggtaataaaata

SEQ ID NO: 492668 - DNA, 226 bp, Homo sapiens
gaatggcgtgacctggtttaacggcaacctccgcctccggggttaaagggagtctcctgcctaatcctccggagtggctgggattacaggcttgccccaccacaccaagttagttttgaatttttaatagagatggggtttctcgatgttggtcaggccgacctcgatctcttgacctaaggtgatccgcccgcctggccctcccaaagtgttggggttacaggca

SEQ ID NO: 492669 - DNA, 289 bp, Homo sapiens
gtacataccgcactgtggatggcctttaagcaacgtttataggcatactgtaccccttgctatgttagagtggtgccactgaagtttccccttgctatgtctagagtggtggacctgaagtttggacacttgtttgtccgttagttagtactgagatggagtcttgctctgtcgccaggctggagtgtagcgacgcgatcttggctcactgcaacctctgacttctgggttctagcaattctcctgcctcagcctccagaatagctgggacttcaaggtgggctacgta

SEQ ID NO: 492670 - DNA, 135 bp, Homo sapiens
acagagatacataatgtgcatgatgcaaaggatcggcagaaagcgcaagacgtatagtacgtacaagtcgatacaagtcacgactcacctacggaatgacaggactgcgacggatggacaacacgattctatcat

SEQ ID NO: 492671 - DNA, 924 bp, Homo sapiens
gaaagcaactcgacctccgtccgctctgcttgttagagctcttgaagaagggcagcctcctgcctactatccgccagactgaacggatgagatgtgaaatggctgtggcttctggtccacctataacagtacaggtgtcctcctggaggtaggcggggtccttctcctatgatacatggatggcggagatacggcgaacacccagatactgttgcagatctcctcctgctgcatcaggtgcatccaccacatctttcccggtttaagaagctggtcctacaggagttcaccaaacctctcgcttccttcactactgttgccatttgagcctccagttaaagccttgatgccaacgccctgtatgatgatctgtgtcccaagactaggcattggtcatgatgccttgcgcctgacgaggacatcctctgtctccggatgtctccagtactgaaagtgtagctccttgctgagtcaacccgacaactgtgttccctatgtgaggctgtgggtgcgatccacatacttgtgactgtttccactggacaggagtgaaatattcattgatctctcaattctatcaaagaagagtgttccgatccaggggtagcagatgcttctgttggatcaaaggctcccaggacgtatgatttcgccaggggaggaattatgagtcttggctccagaaggaatggaataattgcgtgtggtcttaacccagtggtgggagagctcggaattttgccaccgtgacgccgcgacgagttacttggcccatccctttgaaggagaccggaatgacttagtcattacctgaaagttgtggactggtggctctgccgattcagggggcccatcgtccgttttgtgacacccgatgctgttctccggccatgcctggtccctcgcagggacttcttccgaaag

SEQ ID NO: 492672 - DNA, 87 bp, Homo sapiens
  misc_feature (25)..(25): n is a, c, g, or t
  misc_feature (38)..(38): n is a, c, g, or t
gaatcctggtcccggcgtgcacttntaaaggacttcanatgtggtggagaagacagcacctgccgtggtctatatcgagatcctgga

SEQ ID NO: 492673 - DNA, 557 bp, Homo sapiens
gactctagctccaaagatcgtcagcctcgcgagtagctgagactacaggcatgcaacagctgcacccagtgctgaaagtgctgatcattatgtgtttatcataccggcctgtttatgatttacaatgatgtgtggattttacccatctgtttatgactacagccctataactggacacagccttctctctataacatctgagcctctaataaatgccactatacttaacacagggaaaatcagtgcatacaatctcaaataattaaccgaatcaacacagactttctagtgacttatcttcataaaggccctagctcatggaagcaatgtagcgtagagcattctaaaatattccggactttttacactgaaaattaaacacttcattcaaaaaaagcgattattattatttttagtccaaggataaagtatcttaagaatatggctggacgtgccaatcaatatgttacaattttatttgaaacatatatttatatcgctaaatgcagggtgtacctggcataattgggctataattagtccctaggaaatttact

SEQ ID NO: 492674 - DNA, 492 bp, Homo sapiens
ggtcggcggagccgctcgggcattggagcaagactaagactgcccggcgctgacagacagacagacagacagacagaagactgaccatggcagacgagccgaaacccatcagtccgtttaaggatgcctggctggcggcttcggcggcatgtgcctggtgtttgtggggttccccctggacacggtcaaggtccgactgcagacacaaccaccaagtttgtctggacagccacctatgtactctgggaccttggactgtctccggaagactcttatgagagagggcatcacagggctgtatcggggcatggctgcgcccatcattggagtcacccctatgttcgccgtgtgcttctttgggtttggtctggggaagaaactacagcagaaatcttcagaggatgaacttagctacccacagctgtttacagctgggatgttctctggtgtgttcacccacaggaatcatgacccctggagaacggatcaaat

SEQ ID NO: 492675 - DNA, 1016 bp, Homo sapiens
  misc_feature (1013)..(1014): n is a, c, g, or t
gctgggaattgtccgaatctgccttctgcatatcttgagtccagagtgggatgcccaggaacagcgtggtgcatgcactgattcgtgcgtaacatatgcgtaaatactgtgactcacgaacattagaatggtaagctttagcgacaatacagcgtggtctactgtaacttgtaatactgatagcacacatttggataagttgaacttgctgttcggtagaattgcattttcacttacagtgtattcacgggtgggtgcccaggcacttagcacattaggagtcgaaccagtgtgaaatcaattatgatagtgagttgccgtgccaggtataatggtgcgcgcagataaatagtgttgttgagaatcatgactctcggctcctgatcacttgtccatattcgctacttcagtcatctggcctcatttcctgcatacatcgtgaggtgaccaccctggttttacggaccgtcagtgttcctgcttgtttggtggttgaccgtgacctgagatgttatacgacttgtgtgtccaatcaccataaagccaagttcttagattattgtgcccatcgcctttcaggataacacggatgtttgttaccctactagaaacgtctattggaaagggggtgtagagggcgttgtgttgttggaaacctttaaacacttggtgtttcgcgcagtggcgatcgtgggacaggcgtgcaggagggtcaactgggtcccttggtgcaacaatgagtgttgggctaaccatgttttttggcgtccccatgaaaggatttcgacgactgggagggagtccttagtggacccatgtggcgcctcacttctggcgcttgaacgaatggcgttaactaatcggggccggaaaaatttggacacgaatcaggcaacaggttatgggcagtatccacaactcaatggggcagaaccacatattttgacacagtgggacaacagcttgcgtgatgcaacagactaccgggaccctctgccctattacacctcggnngg

SEQ ID NO: 492676 - DNA, 365 bp, Homo sapiens
  misc_feature (122)..(122): n is a, c, g, or t
ggtccctcccccaatggcacaacaatttgacatgagatttgggtggggacacagagcctaaccatatcattaggctaagcaatgatgttcagtaggctaggtacgttaactgcattttgacnttaggatgttttcaacatatagtgggtttattgggatgtaaccacattgtaagacaagaagtaagtgtagtggtagtaataataataaatatctaagactaacactgagattctattctatctagtagttctcaggccctgatgtgcaaatgaatcacctaagatgttaatttaaaatgcatctatcccacccaattccccagtttctgatcattagataggagatccatcaaagtgactttt

SEQ ID NO: 492677 - DNA, 645 bp, Homo sapiens
  misc_feature (417)..(417): n is a, c, g, or t
  misc_feature (563)..(563): n is a, c, g, or t
  misc_feature (578)..(578): n is a, c, g, or t
  misc_feature (600)..(600): n is a, c, g, or t
  misc_feature (602)..(602): n is a, c, g, or t
  misc_feature (620)..(620): n is a, c, g, or t
cttacacctttttttttcccccctcctttcaaaaactcatccacctatcattttgctccttttatttacattttcttactcttctcctgctataatttcacttataataacatcactcctttgctttaaatatctatatctttaatattttcctcgttccatctattttctatttaattttccacttcatttagcataacacatttacctcatttaacatataaatctatttctaaaaacttctgtctatatgtatttttttgttaaaaaattctacactttgttcttaacatgtcataattttaaaaaaactttacttatacattcgcttaaaattcattagctagtgtctcctcctttcctaatactttagctttaaactagtaaactccacctttttcctgtactagtaaatanttttacaatatttaaactacctactaaatactatttattaaacccttacttccatatttccttaaattaaaacaaaaaacacctttaacttatataccccagttctttcttaatctatatcttacactaactcaacttcttatacnatctttttttcttcnccgcccggttcacaaccaaagncngttcagtcatcattcaancccggcccctggtccaattgacata

SEQ ID NO: 492678 - DNA, 807 bp, Homo sapiens
  misc_feature (142)..(142): n is a, c, g, or t
  misc_feature (227)..(227): n is a, c, g, or t
  misc_feature (249)..(249): n is a, c, g, or t
  misc_feature (256)..(256): n is a, c, g, or t
  misc_feature (261)..(261): n is a, c, g, or t
  misc_feature (278)..(279): n is a, c, g, or t
  misc_feature (337)..(338): n is a, c, g, or t
  misc_feature (354)..(354): n is a, c, g, or t
  misc_feature (362)..(363): n is a, c, g, or t
  misc_feature (405)..(405): n is a, c, g, or t
  misc_feature (418)..(418): n is a, c, g, or t
  misc_feature (456)..(456): n is a, c, g, or t
  misc_feature (458)..(458): n is a, c, g, or t
  misc_feature (471)..(471): n is a, c, g, or t
aaaagatgccaactctgttacctcgtctttgagaaaagccaacttagacaagaggctgcttgaactctttccagttaacagacagagtgtggatcattatgctaaatacttcactgacgcaggtcttaaggagctttccganttcctccgagtccagcagtccctgggcaccaggaaggaactgcagaaggagctccaggagcgtctttctcaggaatgcccgatcnaggaggtggtgctttatgtcanagaaganatgangaggaatgatcttccannaaacagcagtgattggtcttctgtggacatgtataatgaacgctgttgagtggaacanngaaggaagaacttgtngcagagcnnggctctgaagcacctgaagcaatatgctcccctgctggccgngttcagctcccanggccagtcagagctgatcctcctccagaaggttcaggnantactgctacgacnaacatccatttcagtgaaaggccgtttcagaagattgtggtgtctcttttataagagctgatgttctgagcgaagaaggcaaatacgtgaaatggtataaggaagcacatgttgctagccggcaagcagtgttttgcgttgaccagatgaagaaatttgttgaggtggttagcaaaatgcagaagaagaatccgaagtcggaaggtgatggaaccattatagatggctcaagcaagcacaatagcttaggttatcacagcacacttttttgattggtgaatgctgaaccatttgagaagagaaagttggattcgtgttgttcgcaaaggaaagtaa

SEQ ID NO: 492679 - DNA, 574 bp, Homo sapiens
  misc_feature (41)..(41): n is a, c, g, or t
  misc_feature (508)..(508): n is a, c, g, or t
  misc_feature (522)..(522): n is a, c, g, or t
  misc_feature (553)..(553): n is a, c, g, or t
  misc_feature (566)..(566): n is a, c, g, or t
gggattacctcactaaagggacaacgctggagttctacgtntgaggatgaagtccgaagaaaaacgggctgaagactcttcgcacgaacaccggcatgcctcaaacccagaaggagacagcgacacaaaacaagcctcagtacccaaatgccttctccatgtaaactttggacgtaaactttatgcttcagggggcctcccatcggctgtgctctccggtcttctcatcttcctggagttaagggatggctcaggtggacgcaacatcaggtaaaacctggtgatagaacgcgaggagttcctccatagccctggaggttgagttcaaatcctctgtctcaagtgggttggcaatcttggcttggaaattcccccttcttttggaaacccatttaaagcagttcagagtcagcgcctgcagcctgagcggcagttcccttctccactgtgcaggtgggtgttaagtgcagaagggttgccaccggtcttgggcgtagccagcagctcncgggaggcccctgnaggtgggacgtcttggggcaccgtgggcggnaaggagcaagcangggcgtcg

SEQ ID NO: 492680 - DNA, 1122 bp, Homo sapiens
ctggacgcgttgtggcggcggtggcggtgcaggaggccggtgcaggggtgcggagggaccgacttggacgcacgggcgggcgtgccggtgagccatggagcgcgtgccctggggccctggggtgcgctgggcccgagggtgtggcttcccatcgggcacgacatggcagacctgtgcgttgcgaggctccctggtggctcggcttggaccgcgatggggctggtgccctggcctcctaacggggctgctgtctgtgggcggtagctgggcgggagcagcttctaccatccatgctcccgagaacctcgtgagcaacctcgcctacactaatacaccatgccctggctcatggtcgtgtcacaatccagttccgtctgctcgagaggagccaccgggaatggacggtacactggccgcatgaaccccgccgcccactgccagtgaacttgcgcgcccgggctcggcctgggaggctgaagccgtctttggttgtgtggcgtcctttcctggcctggtcggcggcccctgtgccctcgcggtcccggggtattcgtccgttgccccgtgctccgtccttgcgctttgcgcggcctggtgagtggtctggcctacctacgccttgcttgtggacaggaaggacaccgtatcccactgatcgctgcctgaacttgcggtgacacaaatgcgagcggcagtgccctccgtcggggcatctgcatgacgaagcccctacgtcgggtgagggcaccccgtggctgtcatgagaaacgcttgccatgcgtgaacggggacactgtcacggatacaatcccacctcccccctccagtaccgaaacactctcaaaacctcactcgaatcgtcaccatcccttaccaaaacataccgccccacgctcacaaaaccatctccaccccctaccactttcttgcttcaaccatccagtaccctatgctgaccaaaaaaccacccacttcctccatcaactacaaaacgaccaaacttccatacaccgcatcctgcgccccatgacatgtacacccttacacatacagtgcttccctccctcaaaccctacccacgtcacaacccatcgtacctacccattacatacaactcaactc

SEQ ID NO: 492681 - DNA, 168 bp, Homo sapiens
  misc_feature (27)..(27): n is a, c, g, or t
  misc_feature (46)..(46): n is a, c, g, or t
  misc_feature (132)..(132): n is a, c, g, or t
atttttttcagcctgcttctctctgtngttcagattaggtaatttnattcttctgtctcgaagctcactgattctttattctgtctaatctgttctgctgttgagcccatttattcctgattttaatatttnagttattgtatgttttatttctaaaatttccattca

SEQ ID NO: 492682 - DNA, 85 bp, Homo sapiens
  misc_feature (29)..(29): n is a, c, g, or t
  misc_feature (47)..(47): n is a, c, g, or t
catactacatagctgctcgaatatcaagncttcaaccgatgtacggnggacatgaaaacattctcctccgcataagcctgcgtca

SEQ ID NO: 492683 - DNA, 380 bp, Homo sapiens
  misc_feature (120)..(120): n is a, c, g, or t
  misc_feature (126)..(126): n is a, c, g, or t
tggacccataccaaaacgcgcaggacacctgtcggcgatctacgccagcgcatgggcgaacaagccctgcaccgattcagtttcatgatctggactggggcaagatcgacccgtggagtntgagtngtatttcccccatgcctcccggtttctggacgcaatggggcgagtatctgacgccggcggtcggccgcatgatctggtcgggtaccgagactgcgcagatctgggccggggcaatggacggtgcagtccgcgccggacatcgcgcggcaatggaagcgctccaggcgttacttcaacctcggaggaacgcctgatgaagcggattatgatggttggagccatcgtcgtgagcgcagcgtgctggtggaagggag

SEQ ID NO: 492684 - DNA, 321 bp, Homo sapiens
ggtgcctttggaggcacctaatcttggatgtacacaacaccataatggacactacacttcctctgacattacaagaataaaaagaatgggggaatccttcatctgatgacaaacacaagaactacataaaacgttactgtccctatcaaaatattaaccctcagcattatccttcaattcacataacggcatatgacaacgatgaacgggtacctctgaaaggcattgtaagttattctgagaaactcaaggacgccatcgcggagcttgctaaggacacaggtcaagggcaatagaaccctaatatcattctagatattc

SEQ ID NO: 492685 - DNA, 969 bp, Homo sapiens
gctcaaagaggtttaccggctccaagatggatggcgaggccaccaggccccttgccccgggaccgcagcggccccctcccctcctcctctggcactccgtcctcctcctcccaggtcacgtggtaccctggcggcgtagcaaccgcatccccaatagagcgctctacatcacccagaaatggcaactggtgcatccgttcactacgcgaaccgtggcgagccacactgcagagacgatcgagatccaagactgccgagactaggctctgcaaccagaaacgggacatacaaggtgacttgcacgagctagacgggcgcgcgcgacctggcctgcagcctgacagccacgcacacccggccagccctgccggcctaccagctgcccagatgcggcaatgccccgttccactggcgggcagccacccttgtccacgagtcgcgggccccatcgcgcaccttccccccccttcgttcacattgacagcccaccgtcatacattcgcttaccaatagccacccagtggacacttgacaggcgagcaaggagatgctcgctagagggcgaaacggaacgaggggagaaaggcgcccacggccggtaactacaaattaaccgcgcggaagcacagacaataagagaacggaggccacttccatagaaccacagccaaataggaaaacaggcgaagcacacgaactacgaagacacactgcgacgatgtacaaaaggcataccggtaaccccgtgcaccattcgcgcccgattaagagacaagcaaagtgcaatccgcagatgcccgaagcaaaacgggagcaaccaaggctgaccaacctgatagcacgcagaccaccctaccactagccacacaacatcgaacagcaactgagaaactagaccataaaaggaagtcacgcagaacacaaagaaacacaaaacatcgaagtgacagcagcaccaacaaaaggaca

SEQ ID NO: 492686 - DNA, 391 bp, Homo sapiens
  misc_feature (262)..(262): n is a, c, g, or t
  misc_feature (356)..(356): n is a, c, g, or t
aagtttaacttaataaaaaattcactttattttaaagattagttcttctcaaataggactacattacgatctggcaccggtactgagacaatttcatctctttatgaggcacgttttgtttggtttatcaggatatattaattacaggaagaacagccaatgaagtgctaccaggtcaacagggcttgtggtccagtttataaactgctaaaagcgatggctgaaaatgaagtttctaatgagcttttcctcatagtagtanttttcttctccaataaaaagtaacatgaatattctctgtcaactcttagttgcttactggttgacccactaggagaggtgcgttacccaacacncttttctttattgtttgaatcttgtttgtcggttg

SEQ ID NO: 492687 - DNA, 115 bp, Homo sapiens
tgcctgaagcttacgcagccatgtgaactgtgagtctattatatctctttcctttataaattacctggtctcaggacagatcctttgatagcagtatgaacaatggactaattac

SEQ ID NO: 492688 - DNA, 149 bp, Homo sapiens
tccccagcactttgggcaggcgaggcgggcagatcactgaggtcaggagtttgagaccaacatgggccacatggcgaaaccccatctccactaaacaatacagaccttagctgtatttcgtccatgccatgctggctggtccccgtgct

SEQ ID NO: 492689 - DNA, 282 bp, Homo sapiens
  misc_feature (55)..(56): n is a, c, g, or t
aatggaatggaatggaatcaacacgattgcaatcgattggaatggaatggaattnncccgaataaaatggaatggaatggaatggaacggaacggaatggaatggaatggaacggaatggtatggaacggaacggaatggaatggaatggaatggaatggaatggaatggaatggaatggaatcaacgcgagtgtaggggaatggaatggaatggaatgcaatggaatggaatggaatggaatgcaaaggaatggaatcaacccgagtggaatagcatggaa

SEQ ID NO: 492690 - DNA, 173 bp, Homo sapiens
agactccccagattatctctggctgttgtaaagatttcccatgctgacatggacagcattacaaacagtatgcagcacacaaataaagaacctggaacccaggtatgtgcagagaaggagagaacccctggaggacgcagtagtccattctaacatctggtgtttcaagcccc

SEQ ID NO: 492691 - DNA, 150 bp, Homo sapiens
agaagagagactagttctctcttctctgcagtagcgcctcggtggcggtgtgcaggtttgcccgccgggtgttgttaagggagacagatgttggagggccacaagggtacttcgccacggattgaggcggcagccttagcttaaggttcg

SEQ ID NO: 492692 - DNA, 444 bp, Homo sapiens
  misc_feature (337)..(337): n is a, c, g, or t
tttgacagcatcgtcaacaccggggttccctacccccgcttcctgtgggccgaaaccatcggcttctttagaaggctgctttggaggaacccaaaccggagggtgggttctagcgaaaaaaatccaaaaaatgtgaaaaaaccgccctttttcaggattttggggtgggaagccctgttgggccggggcctcccccccccctttgggccccccctggccggccgccccgaggtcagcaatttttacggggggttccccgggggggccccccccttggggccgcccccggcgggggggccccttccaaccggggggcaggcaccctttttggattttnattttggggccgggggggggtagccccctcccctgccccggcccccgcccccgcccgaggggtttttgttttttaaaaggcctttggggtttgccgggcccctgcca

SEQ ID NO: 492693 - DNA, 125 bp, Homo sapiens
acctgcaaactttttttgtaaagaccagatagtaagtattttatgctttgtgagccatacagtttttgtgcaactagtcaactctcaactcaccgtggacagcatgtaaatggatgggagtggct

SEQ ID NO: 492694 - DNA, 418 bp, Homo sapiens
ggcccgtgccactaagaggcagctttggtggccaagtggcttgcattgttgttgctcctcaaagggcctgtgaagggctgggcaggtcgcaaagacctcttgtgaggggaagctagattaaagggggagggatcctggaggataaaggcccagcacgtgcgcctggactccacaggaccaacagaccgagcgggcggggccagctgggagtcaggccccccgggcttcacgcagggagcccaaatattgggaacaaaagcaggaaaagaagagtgagagcaggagggagggagggagcgaggaagcagaaattagggggtcttagatgaaaaaaaaaagaaagtagctttagggggaatgtgctgtggagtgtgaaattgcagcccatggtgctccatattgtaccagaagctcttcc

SEQ ID NO: 492695 - DNA, 145 bp, Homo sapiens
tgctaaggtgatctacaggatcttaggcgcttgtggaaatacttaagcgcctgcatcacggctgaggtgcaccccacataggtgtagtcaatcatgatgtccccgaagacctccgaggggttcagcagctccaacaagcgcctgg

SEQ ID NO: 492696 - DNA, 267 bp, Homo sapiens
aaaatatctctgtttggaagcccatttgactccaccattgaagactgaagaaatttgtggctttaaaaaatctggtgctagagaagtaatgcaggctttgattcaaacacgttggagtgcctgtctgttccaaatactctatgcctcctttttttgcttaaaatggcaggctctggatcctctgttctgctatattcagagcagttctactttcttcttttactgatcagattttacattttcttaaaagagagttctgttgacttt

SEQ ID NO: 492697 - DNA, 117 bp, Homo sapiens
ctcagccggaccgggcgcggaaaactagtgcgttagaagtcggatgcggtggtccacctgtaatcccagcactttgtgaggcccaggcaggcggatcacttgaggttaggagttcaa

SEQ ID NO: 492698 - DNA, 537 bp, Homo sapiens
ttttttcatcggttatatgatgaagatattgtacgagacagtggacatatggttaaatgtttagattctttttggtgatccgatttctccatattccgttgcatggagttacgacagagtttggctagttggaagactctaggaaaaatatgcacaatattcaagccgaacctagatagaggaaacgagttacctgtttctgggtgcttctttcagagagcattctcttgggcctttgggttgggaagccccttggtccaaaattaatggcaggatcgtcgattctagcccattaatttcctggggacaaccaatcaaaaagggcctgtatgatcctccatgaacaggcggggaattccttggggttcgcaaggttggttatccccgccacaccaaggtaaaatttccccgttcccaaaaaaacacccaacgagcacaaacattcaccaaggcaattttaaaccctcctgtttcctgggttcctttcttccaccaaaggttcttcttaccaggctttttcatggttcaaaccggttg

SEQ ID NO: 492699 - DNA, 494 bp, Homo sapiens
  misc_feature (153)..(153): n is a, c, g, or t
  misc_feature (354)..(354): n is a, c, g, or t
gaaactatcttgctgagaaatcacaactctttcaaactatacatttggactctggggcttgcagcagtaggcatcacttacggcacacctacttcagaaaccagcagggtattacttcatattaaatttattcttgggtattcagtggccagngagagatgtggctcacaccgtgttaatccttagcacacttggggaaggccgagggtgggctcgactcaccgtgaggctcaggagtttcgacccagcctgggccaaccggggtgtgaaccccattcttctactaaacaacacaaaatttagctcggggcatgtgggggcgcatgtgccttattaattccaaggctacttggngagaggcgtgaggttgtgccagttaagcgtgaagaatgtggtgcccatgtgccactctccgagccgtggccaaacaagaggagtgtgcaacactccaatctcaaaaaaaaaacaaaagagggggttccttctaaaagccg

SEQ ID NO: 492700 - DNA, 346 bp, Homo sapiens
  misc_feature (154)..(154): n is a, c, g, or t
  misc_feature (276)..(276): n is a, c, g, or t
  misc_feature (296)..(296): n is a, c, g, or t
  misc_feature (301)..(301): n is a, c, g, or t
  misc_feature (327)..(327): n is a, c, g, or t
ccagtacgaccttccctacaaggggctgcccatcctggacagcactcccggccaccctgggtgttgagacggagttggctctgtcgcgcaggctggagtgcggtggcgcgatctcggctcactgcaacctccgcctcccgggttcacgccattntcctgcctcagcctcccaggtagctgggactacaggcgcccgccaccacgactggctaatttttgtatttttagtagagacagggttcaccatgttggccaggatggtcttgatcccttganctcgtgatccgcctgccttngcctnccaaagtgctgggatgacaaggtgtnagccaccggggccggcaat

SEQ ID NO: 492701 - DNA, 130 bp, Homo sapiens
aaaaccatggcattagactgcactaaattaacaagcatgttagttgctggtagaggttttggaggttgcagtgagccaagatcgcgccactgcactccagcctgggcgacagagtgagattccatctcca

SEQ ID NO: 492702 - DNA, 892 bp, Homo sapiens
tcccaggagctgtgcgctcggcgtcgcggtgtgggtccggcgggcgcggttcggcgggcggcggccgtgcagacgagtctgcggagacggagtttcgtcatgttggccaggcccagtttgagatctttgaagatatcctcaacgtgaggctctgctgccatgaaggtgacgattaagtgctggaacggcgtggccacttggctctgggtggccaacgatgagaactggtggcatcctgctcggatggcatttagacggatgctggcctgactgcaaggtgccacggcagacagacttgccctgcttggtgtggggccagtggttcccagctgcattccacatgcattgcatcgctctaagtggctgcacgcacagtgaggtgcagcagcagctgcccctagtggtgccgacagggaatggaaagttcaaaggagtgatggcccgatcctggtctcatcgctaggaggtggcagtcctgatgactccttcctcatgctgtggcgccgatggctgctaggggacagcgccacctgagactagcaacaaggttggataaacaagggctggagctggggttcggtctattgccatcactatgttgacgagttttatcgcaataaggtgaaaagatcaattaaaagctatctcaaagtcttggagtcaagtaaattgataaccatgtagagggattgttattccgaggattgcagagcaaagactagggcgaactgtcgaaattggggtcccttgttgccactaaagtgtggttacccttgagacccaaggtattacgtgggctgcaaagagttggccagaatttgggcaggttgtccccaatattcggtgggagcgatcatagaattcagaataaggctggcttcacctggcatag

SEQ ID NO: 492703 - DNA, 307 bp, Homo sapiens
cctctacgagcgcatctcacatagtatagtaataaaataaaataaaaaattatccaacaggccaggtgcaatcgctcacgtccgttatcccaaagcgctgggattacaggcgtgagccattacacctggccagaagtcagtaagttttacgttcttggatggtagtactagaagtgtttagaaggatttaaaacatgtctgggatgcagtggaggcgtagaaggccattgtgggaagctccacagagtcctgccagaggcggattgctggcgctcgttagtagaagggtacccgacgctcgaatttc

SEQ ID NO: 492704 - DNA, 262 bp, Homo sapiens
agacttcatgtcgtggtcccagtccttcagccgttcgagtcttcccagtctaaatacaatacgtgtgactgaggaatcttttgaaatgatcccacattgtgatgcatgcctgtaatcccagctgcttgggaggctgagggagagttgcttgaacccaggaggcggaggttgctgtgaccaggatcaaaccactgcactccagcctgggtgacagagcaagactctgtttcaaaaaacaacaaaaataacacagtgacctaag

SEQ ID NO: 492705 - DNA, 785 bp, Homo sapiens
  misc_feature (1)..(1): n is a, c, g, or t
  misc_feature (141)..(141): n is a, c, g, or t
  misc_feature (145)..(145): n is a, c, g, or t
  misc_feature (151)..(151): n is a, c, g, or t
  misc_feature (157)..(159): n is a, c, g, or t
  misc_feature (161)..(164): n is a, c, g, or t
  misc_feature (172)..(172): n is a, c, g, or t
  misc_feature (174)..(174): n is a, c, g, or t
  misc_feature (180)..(180): n is a, c, g, or t
  misc_feature (186)..(186): n is a, c, g, or t
  misc_feature (191)..(191): n is a, c, g, or t
  misc_feature (193)..(193): n is a, c, g, or t
  misc_feature (199)..(199): n is a, c, g, or t
  misc_feature (203)..(204): n is a, c, g, or t
  misc_feature (208)..(208): n is a, c, g, or t
  misc_feature (214)..(214): n is a, c, g, or t
  misc_feature (217)..(217): n is a, c, g, or t
  misc_feature (223)..(223): n is a, c, g, or t
  misc_feature (251)..(251): n is a, c, g, or t
  misc_feature (323)..(323): n is a, c, g, or t
  misc_feature (337)..(337): n is a, c, g, or t
  misc_feature (391)..(391): n is a, c, g, or t
  misc_feature (417)..(417): n is a, c, g, or t
  misc_feature (423)..(423): n is a, c, g, or t
  misc_feature (428)..(428): n is a, c, g, or t
  misc_feature (436)..(436): n is a, c, g, or t
  misc_feature (453)..(453): n is a, c, g, or t
  misc_feature (471)..(471): n is a, c, g, or t
  misc_feature (483)..(483): n is a, c, g, or t
  misc_feature (488)..(488): n is a, c, g, or t
  misc_feature (527)..(527): n is a, c, g, or t
  misc_feature (562)..(562): n is a, c, g, or t
  misc_feature (593)..(593): n is a, c, g, or t
  misc_feature (603)..(603): n is a, c, g, or t
  misc_feature (617)..(617): n is a, c, g, or t
  misc_feature (713)..(713): n is a, c, g, or t
  misc_feature (759)..(759): n is a, c, g, or t
naaaaagggaaaaaaatggatggtccattcgctttattgggtgcgtgtagtgttgttatgaaatctcctaaggcactggggggcacgtttgacactcatgaggtcagaacaggtctggtgggcgggggggggggggtcccngggnggtgantacccnnngnnnncccccccncnaaaagngaaaanggggngnggggcntggnnggcnagattntgntccccntggtccccccggggaaccccccaccagnggcctcggccccccgcggcggagcgcggggggctggcgggcctggccccctccctttgcccgttcggcctgntttggggtgtcttntggcccctcttcccacctgccacctgtggttgggggtgttttttaaaaaaaggngggggggggggttcgggggggtgggnggtggnttccnggggcccnggggccccccggctggntggggggggggctttttntccggggggggnggggnttggggggggcgggggggcctgggcccctgggggccttnttctttaattaattaattggctccatttttaattnggggtggggggctgggtcgggggcgggggtnttgtgcccgnggctggtgggggcngggtcgggcccgggtggttgggggggggtgggggggccggggggggggggggggggtgggttggctctcggcgggcgcggtcctggtgcggtggcnctgctggtcactgagctgtgggccctgcttggcgcctgtaaccgcnggtccgccgtgtccaacgactcggac

SEQ ID NO: 492706 - DNA, 820 bp, Homo sapiens
gttatataggtactgttcatcttattacatcgccgacctaacttccccggtgttggcccttgtaacagtcgcctgccatggctccctccggtaatcccctgttctcggcttgtccccccgggcttttattttgaattaaatcttcagtgccctgcaagttctcgtctgttgctgtgcaaacgtgtttaatgggcccccgcagagcattttatcgtgctcccaaaggttttttaccagcgcatagggcgttttcgcccctcgctaatatggggcccccgctgcgcccaagttttgatttacatgcccagagtgcgaatacacacatttctgggcaatagatgagtaaacaccgtcgcatactttagtgggcaaaaacaaggtcgcccggaaggttgcttttcttaagcatgcgcgtctcccaagctgatacgtctagcagattttgtcttgtcaaaataaggatatatgatggcttcttggtgatacacaaaatgtggaggaatgtgttgaggagcaccccttgtagcactggtgtataaaagtgttttgtgaaccctaagttcacaaatgttagatggggttgtaaatggcgctatgcacgtgacccccgcgtgtggggcaccacctggttgttcccgccaagatattgccgcgcgaggcgatggttcgtcgctgagtattttttccctggtgttacatgtacacaatacgggttggtccacacattgtgagcaattaggtgctctcgcatttccaccccgggggtcccccccgtacaacaggggccccaaaaaaaaaaccccccccaacacacaaaaca

SEQ ID NO: 492707 - DNA, 125 bp, Homo sapiens
cattttttttgcagcctggggggctatggggactttgtggccgcccatcctacagttggaaatccatccaaaggccatgttccaataaacaggaggttgggtatttggtcccgacctttttttta

SEQ ID NO: 492708 - DNA, 685 bp, Homo sapiens
  misc_feature (1)..(1): n is a, c, g, or t
  misc_feature (141)..(141): n is a, c, g, or t
  misc_feature (145)..(145): n is a, c, g, or t
  misc_feature (151)..(151): n is a, c, g, or t
  misc_feature (157)..(159): n is a, c, g, or t
  misc_feature (161)..(164): n is a, c, g, or t
  misc_feature (172)..(172): n is a, c, g, or t
  misc_feature (174)..(174): n is a, c, g, or t
  misc_feature (180)..(180): n is a, c, g, or t
  misc_feature (186)..(186): n is a, c, g, or t
  misc_feature (191)..(191): n is a, c, g, or t
  misc_feature (193)..(193): n is a, c, g, or t
  misc_feature (199)..(199): n is a, c, g, or t
  misc_feature (203)..(204): n is a, c, g, or t
  misc_feature (208)..(208): n is a, c, g, or t
  misc_feature (214)..(214): n is a, c, g, or t
  misc_feature (217)..(217): n is a, c, g, or t
  misc_feature (223)..(223): n is a, c, g, or t
  misc_feature (298)..(298): n is a, c, g, or t
  misc_feature (301)..(301): n is a, c, g, or t
  misc_feature (312)..(312): n is a, c, g, or t
  misc_feature (338)..(338): n is a, c, g, or t
  misc_feature (344)..(344): n is a, c, g, or t
  misc_feature (356)..(356): n is a, c, g, or t
  misc_feature (368)..(368): n is a, c, g, or t
  misc_feature (374)..(375): n is a, c, g, or t
  misc_feature (381)..(381): n is a, c, g, or t
  misc_feature (409)..(409): n is a, c, g, or t
  misc_feature (420)..(420): n is a, c, g, or t
  misc_feature (423)..(423): n is a, c, g, or t
  misc_feature (425)..(425): n is a, c, g, or t
  misc_feature (439)..(439): n is a, c, g, or t
  misc_feature (443)..(443): n is a, c, g, or t
  misc_feature (453)..(453): n is a, c, g, or t
  misc_feature (466)..(466): n is a, c, g, or t
  misc_feature (468)..(469): n is a, c, g, or t
  misc_feature (478)..(478): n is a, c, g, or t
  misc_feature (516)..(516): n is a, c, g, or t
  misc_feature (547)..(547): n is a, c, g, or t
  misc_feature (567)..(567): n is a, c, g, or t
  misc_feature (578)..(578): n is a, c, g, or t
  misc_feature (584)..(584): n is a, c, g, or t
  misc_feature (586)..(586): n is a, c, g, or t
  misc_feature (596)..(596): n is a, c, g, or t
  misc_feature (603)..(603): n is a, c, g, or t
  misc_feature (607)..(607): n is a, c, g, or t
  misc_feature (662)..(662): n is a, c, g, or t
naaaaagggaaaaaaatggatggtccattcgctttattgggtgcgtgtagtgttgttatgaaatctcctaaggcactggggggcacgtttgacactcatgaggtcagaacaggtctggtgggcgggggggggggggtcccngggnggtgantacccnnngnnnncccccccncnaaaagngaaaanggggngnggggcntggnnggcnagattntgntccccntggtcaaaaaagggaaaccccaaaaaggggcttgggccaacgggggaaaagcgcgaggggttggaaggcttggcnacntccaattgccngaaaagcttgtttaagggtgtaattnggcccnttttaaaaattnaaaattgtggangggggnnaatttnaaaaaaaggggggggggggggttaaggngggtaaggggngantnaagggggcaagganaaanaaaaggggantggggaaagggtnanntttaaaggnggggaagggtttggggggggaaggggagcttgggcccntgggggaaattttaaaaaaaaaaaaaaaaanaaaaaaaaaaaaaaaagggnaaggggttaantaaggngngggggttttntgccggnggtnggaaggggcggggtaagggcggggtattggggggaagggggggaaaaaagggaanaggggaaagggagtgggagggtt

SEQ ID NO: 492709 - DNA, 81 bp, Homo sapiens
cccagccctctcctgcctggcctggcctgggacacctcctctctgccaggaggcaataaaagccagcgccgggaaaaaaaa

SEQ ID NO: 492710 - DNA, 150 bp, Homo sapiens
ccggacggagggccggtgaggtgcggggtctggtgatgcgagctgcgcctctcggaaagatttcgcgctgcccatccagggccctttaataagtaatcggtagtggataactttccaagcggcaggaggatttaggaaacgccaagagac

SEQ ID NO: 492711 - DNA, 149 bp, Homo sapiens
tcgcgtactgcttctctatgtgcagtgtagtatcaccctggacagtgagtgcatgctttttcggtgagggcagatcccagcacctatgaattaccatagagtaatgatgtaacagtgcaagatttttttttttaagtaacataattgtc

SEQ ID NO: 492712 - DNA, 248 bp, Homo sapiens
gcagtgcctcagatgcttcgatgtgttcctgtttctcccgagttgctcctgttctatagatacctttcgtgcttggaaaaacctgtgggcgcagtttattaaaatgcctgacaactgcacttccagtcacccgggccttgcatataaataacggagcatacagtgagcacatctagctgatgatgaatacacctttttttccctcttccccctaaaaatggtaaatctgatcatatctacatgcatca

SEQ ID NO: 492713 - DNA, 171 bp, Homo sapiens
atacacggtcgaggctatacaatgtgggttgcattccacttttcccagtgcgcccaggtcctgggatctctaggccaccgccgtgcgtgccgcaccctctgctcaccagggaggccagaccaggaaccctgcagctcgcagagcaagcacggtcccacaagccttggggag

SEQ ID NO: 492714 - DNA, 1363 bp, Homo sapiens
tctggggacagggtctcactctctcacccaggcgggagtgcaggggcgccatctgggctcactgtgcagccttcgaaccctcctgggaacttcagggtgactccttcattacattcagccttccgtgagtatagcctcagaactatagcacacaccacgcgggcccagcataattttttttttatttttttttttttatgtggggaaaagagagggggttggcgccagagggtcgcccaagaggcgggactctccaaacacccgggggccacaaggcaacacccacaccccacccaaagccttccaaaagaggcgggggaatcaggagggggagagcccaaggtgccccgcgggcccccattgtgtggcgccttaactatacacgcgggggagacaccaagcaacaaaagacagaaaccacaactcacaagtgcgccccctctagtgcgcgcaccacctggtgggcacaacggagcgaacaaagggggcttaaccaccctcggggcatcacccccattgtgggcacaacgccgagaccccacagaagaccattgagagggcgctcaaacacacctgtgcgacgaacggagagccccacaacagggggggagaacacaccaaaaacgcgagaccccgcgagggtaaaacctcgcagccaaacaagctagaggcggagggacgagggcgccaaaaaccaccgaccactcatccaggaggggagggaaaagagcccaacataaagaggcaatagggagcggccccacacagaatcggaggggaaggaacaccagcgaatgggaccacacacacacaggagaggcgcaccccacataacaaaaagacgcccccccggggaccacaaaaacaggggggaacaacacagaccgcggggcgcgagagagaaaaaaaaataggaagagcccaaagagaccaaccacgcccgcactcatagtgagagagcgcgcacagatccgcaacaaaatataacagccccgacggggagcacaaccccccacaccaacaagcagggggcggcaacacacgaacggcggccgcaacaacgagcgccatcgtgagaccagcccaccagcgaaacaaacaaagaccccccgggaggggagagcacacacacaataaagcgacaaaaaagaggagtgcaacaaagagagaccggccctcacaatcaaacaaaacagagcaggagagcacgacccaacagagacaccacacacaacagcacacgtgagacgaacgaaacgaatcagtacacaccacgaccaaaccgggagaagcgacgacgcaggaaaaacacaaacaaagcagcggccgacgaacgaaaacaacacaagcaagaaggaagcca

SEQ ID NO: 492715 - DNA, 502 bp, Homo sapiens
cgagctcggtaccagtgctactccacaaagcagtatatgcagagaagtggcagtgtcgagctgttcccactcctgtaattaacccctaccagtcagctacctccttcatgttacattcatggtagctatcccacagactcagaatcgtgctgcatactatcctcctagccagattgctcaactaagaccaagtcctcgctggactgctcagggtgccagacctcatccattccaaaatatgcccggtgctatccgcccagctgctcctagaccaccatttagtactatgagaccagcttcttcacaggttccacgagtcatgtcaacacagcgtgttgctaacacatcaacacagacaatgggtccacgtcctgcagctgcagccgctgcagctactcctgctgtccgcatcgttccacagtataaatatgctgcaggagttcgcaatcctcagcaacatcttaatgcacattccactggcctgtttgtggaggtagcactg

SEQ ID NO: 492716 - DNA, 358 bp, Homo sapiens
aaatgtccttcagtaggtgaatggataaggaaactcttgtacatctattccatgctgtactactcagcagtaaaaaggagcaaatggtgccaggtgcggtggctcacgcctgtaatcccagcactttgtggggctgaggcgggtggagcacgaggtcaggagtttgagaccagcctggccaatatggtgaaaccctgtctctactaaaaatgcaaaaattagccgggtgtggtggcacacgcctgtagtcccagctacttgggaggctgaggcaggagaatcacttgaacccaggaggtggaggttgcagtgagccaagattgcaccactgcactccatcctgggtgacagtgagact

SEQ ID NO: 492717 - DNA, 306 bp, Homo sapiens
acaggaggtccgattgtcaggctctggagatgtgttcataggctcccggacgtaagcgttgagatgacttgttaatgaatgtctcgaaaatggataatgagcctggtcacgagagaaaggtattcgtcccgggtctaggccttcaggaaaacagtggctctccatctccttgctggatttagtgtgtgccacaccagcatttcctcagtggcatcaccacttggcatgacagtccgtcactataagaccgctctcaagacgggttttccgtccaaatagtccccagctagttaacatgaggtaccc

SEQ ID NO: 492718 - DNA, 178 bp, Homo sapiens
tttgggggggggggaaaaaaaaaattccccctttttaaaaacgggtaaaaaacctgggttggggggtgggttccccccccaaattttttttttaccccctgggtcctgggcctttggggggggaagtttttttccccccaagggccccccaaaaattttttttttttcccctggtcta

SEQ ID NO: 492719 - DNA, 383 bp, Homo sapiens
ctcacaacacgcacagctccacactccgtcacacacacttcgcagactgcaaacaacctcgcggcacacacacgcacacacatgcacacacagcacacacgcaaacgcacagcacacacaaacgcacagcacacacgcacacacagcacacacacgagcacacagcacacaaacgcacagcacacgcacacacatccacacacagcacactaatacacagcacacacacaaatacacagcacacacatccacacacagcacacacacgcgaacacagcacacacgaacacagcacacacagcacacacacaaacacagcacacacatacacacagcacatgcacacactgcacacacttaaacacagcacacgcggccgcact

SEQ ID NO: 492720 - DNA, 320 bp, Homo sapiens
ctttaggggggggtttgggggaaaattaaaattttttcccccccctcccctttttccggtttttaagggcccccggttttttaataggagccaggttaacctccctcttggatttttttcccttttaggccaacttaggttttattttgggttggtttttaacccccctttcgaaaccaaactgtggaactggggttttttttggggaagggggtttttccccccttaaagggtttaaggaacggggaatttcccccattttttaattttggggggttcccaaacttaaaattatttaaaaaaaaacccccggtccttta

SEQ ID NO: 492721 - DNA, 1266 bp, Homo sapiens
ggcacgcgttgtgtccgggccgcgcggcgcatttccgcctctggcgaatggttcgtctgtagtgcacgccgcgggccagctgcgaccccggctgcgccccggtaccccggccatggacgaactgttctcgcctcatcgttcctcggtgaggagcgcagaccaggtcgctactgtagctccgtagtgtggcacgatcacttagaagccaagcaccatagcagcgcgtggccattgaccgcctatctcggacgtcagaagatgccgaaagggcgccgcttccgcgggtgctaagatatacttcaagcgtcagagagtggagcaacatagttacgcactcaaagaaccactggaccctactcattgaacgtagtcatgtggggcgtaccagccaggaacctagggtaaacaacgcctgcgtgcatatctctccctagggttcaacgcggaaagggaccgccgttctcgtcagcaccgaggcactcaaaccctgccacgcacaagcacatatagttacacagcaaagacggagacgtttgtcctaggacacattgcgctgtgcgtattacgagcgggcttggaagtcgtaccatggccctctcgagaagcgccatgattagccaataccacctagggccttttcccacaggatagccctttagtgggcacactcccgaccgtttgttggctcgcaaacgcaagaacgctagcgcaaccccatgtggagaaatgcaatacgcgcgctttaaattccgcaggttcaaacctagtggcgtaggagcaatttcccggaagggaaatcccccataggaaaaaaattccaaaagcccacacctacatttccaccaatcaagggttttacggcgttcaggttagcgaaacaattcaaggccgattaccaccgttaagagcaggcgacaccgggtcaacacgagaaacaccgctttttaaacacattttgacagttggattcgctaggaactcgatcgtttgggccccatcaacccaaaggcggatactgccaaaaccatgattatgaaccacagcgcaaaacacaccgagagttcccagaggtccaactggaaagccccccataccctagaattcttgggcaccgagaccgtcataggttctccccttttactactgtacagaattgacgctgaacatacctatgttggtgaacacccaccaatagtccgccttatctccgagaccccacaaacacaagcgtaatccccacctgacaataacccttgcacaagcaac

SEQ ID NO: 492722 - DNA, 1493 bp, Homo sapiens
tgtttggttatgggttgggttgtggtttggtttttttggaaacgggtgttctcgcgtgcattcccccaggcgtggagtgtgcaggtggcgcaattcttcgcctttccgtgcagtcctccgccctccgtgagtttcaagcgattcctccgggccatcagccctccacaaagtaatagccgtgggaacgtgacgagggccgcgcgccaacaaccacggcccacagatataattcaggtgggtacttcttatagtatagaaacagccggggttttacactcagtgttgtgcacccgagggcgtgggctctctacaaaatctcgcgtgagacttctcgaggggtgaatctccaccgcggcctttacagacctctccccaaagcgtgggcgtggggaaatataccacgcccggtgaacacgcggccggcgccccgtggggccataaaacttgtggtggtgttctccataacaaccagcgtgttatccatgctcgcccagggtctgcgcggggctcttatactaactgtaacatacgtgtgcccagcgcgcaagtgacacctcaagtggccctctccgtgagagcccttctcatacaaagcgtggacaagccgtgcgcgtgtatacccttaaccgagggaacacttcgttgaaaaaacagacaaaacaacaccgcgcgtgggagaagggccagcagaggggcccgttaaaaagatggggtccatgggggggatgtgcgcccaccgaaataagtcatccccaccgtgcgtgctatactgaggcccccagtggtgtcagcaccacgcaccaaacaacacccacccaaaaacgactcacaggtggcccacgcgtcctggcgtcggcgcgtgtggaccccaaggaccacaattcggtcccagcgagaccccccggtgggcaacaaaaccatatggaggtataccaacacacaacggcccctaccaaacaactcgcggggcgggacacacatcacacggggagacaaccccctgtgtgggactccaaacccctagagtgatttaaggcacaaggaaggacaaaaaagacacaccgcggtgaacatcgacaagggggcaccacattggcggccccaagaaataatacagcgtgctaccacaggcacttacaccacgagcgaaactatagctcccccccctagtaaaaagcgggcaccacagccctattacaaaagcttcctattaaaaacagaaggcggggaagcagcacaaaccagaaaccacgcacgcgagacaacccaccaccgaggatcgaaacgaggcccgacactcaacacaactggagaggaccgaccacaacccctcgggtgagcacgagggccaacacaacttctgctcgagggacgtccccccacacacagagggccggctccactaccaccatccggctagtcacgcccaccacacccaaagacacgatgagagagaccacacccaacaacaagagacacgtccgcgcacaacg

SEQ ID NO: 492723 - DNA, 266 bp, Homo sapiens
gcacaggatctaatggctggctgcacattcgcaatcaaatccatcacctgtgtttcctgcacttttataatgactgccattctaagggatctagaactagaaataccatttgacccagccatcccattactgggtatatacccaaatgactataaatcatgctgctataaagacacatgcacacgtatgtttattgcggcattgttcacaatagcaaagacttggaaccaacccaaatgtccaacaatgatagactggattaagaa

SEQ ID NO: 492724 - DNA, 388 bp, Homo sapiens
tcgctccgctattgggcacgccttagtctatcagatgttagaagtaggtataatctgagttgactagagatgttcattcaagataccagtatgcattaatcctggtgcaatgatatgtctaaatatcaaccccaagattctaaacagagtagtgtgaattggaagttaacttatgcacgcttaactatcttaacaagctttgagtgcaagagattgaagagttcaaatctgaccaagatgttgatgttggataagagaattctctgctccccacctctaagttgccagccctcctagagctacctgtggagcaacctgctcagatacatcaaacatggagacagcactcaaagtagaattataaagaagatcatgtccatgttaacat

SEQ ID NO: 492725 - DNA, 732 bp, Homo sapiens
gtgcatctctgcctggaatgaccaggagtatgaacacacggctgaggacccagcactactgtaccgtgtggagaccatgcctgggctgggctgggtgctcaggaggtccttgtacaaggaggagcttgagcccaagtggactacacacggaaaagctctgggattgggacatgtggatgcggtatgcctgagactaacgccggggccgagagtgcatctatccctgatcgttgtcccgtatcctatcctactttggcatcgtctggcctactaacatgaatggctactttcaccgaggcctacttcaagaagcacaaggttcaatcgacggttccagggtgtccagcgtcaggaattgtggactaggtcgtgaaggaaagaagcttatgaagctggaagttcacagggctggctcgagagaggcgtgaggtgctggaccacagcaagaacccattgtgaagacgtctttcctgcgcacgacacaggagggcgcactagctaatgtggcgtttattcgaatggaggaaagatgatgacgttcagcagctggagccaggttggcaagtgcctccgatatctgggatctggatgtgcgtggcaaccatcggggactgtggagattgtttcggaagaagaaccacttactggtggtgggggtccggcttccccctactcagtgaagaagccaacctcagtcacccaattttcctggagccagcccaaaggacgacg

SEQ ID NO: 492726 - DNA, 165 bp, Homo sapiens
tgcgtgttaggtatgaaagcactcggtgaaattgataacttctcagtaattgaacaaatggtaggtacgacaaatgaacatcaaccagattcagaaacagtcgatatttatcaacaacttgtaagtatctttatcaatattagtcgttctttaactgacacgtat

SEQ ID NO: 492727 - DNA, 142 bp, Homo sapiens
tcctcctcctcctcctccctccgccccccccggctcggccccgtctccttcggagaggccaagcccccgcccatctcctagaagggagcacaccccctcaaccctcagctcccgggcctccgcctccgcctccgcgcggccg

SEQ ID NO: 492728 - DNA, 295 bp, Homo sapiens
ctcgaggactaatctctccaggccattcaacgcctccgtcaacggctccgggccattcaacgcggaggcgttgaatggcctccagctccgtccaagttgctgcaaaaggtattatttcgtacctttttgtggctgagtagtattccatggtgtatatataccacattttctttatccactcattgcttgatgggcagttaggttggttccagatctttgcaattgtgagttgtgctgctccagatatcatctttaactcctttgccttctccaaatacatttccaagtcctggcc

SEQ ID NO: 492729 - DNA, 573 bp, Homo sapiens
gaaatatagaaagaaagagtcagtgaattgaagagagtatcagtagaagttaggcagaggacactgagaaaatggattacacagagtgaatagaacttcaggatcctgggagacaagtagcaggataaatcgagcgtattttttgagactagagtctcagagggaagagagaaattggtggagagtcaaaataagtttttagaaataactgctgaatacttcttatatttggcaaacaatataaatacacagttcaatgaaactcagcatagtccagagaagatgctcagcatatcataatccaactgctgtaatagcatagattgaaagaatccgtgagagtagccaggaaaaaaacccagaacattcggtatagggaagaacaattttgaaatacgggttatctcagacatatgataaacaatcatgtaggccaggatgcatgggaacagtacctttaaagcgctcataggagagaatcatccatccgaaattctatacccagtgccgaggctcctcaggctgcaggacagattcacacagattttgaaaaggggttcattatggctgaag

SEQ ID NO: 492730 - DNA, 191 bp, Homo sapiens
tgttaacactgggagagtgaagtggggggtacggcgaggttatctaggctgtctaaaagtcatccagaatagctattagctgggagtaaagctttgaatgtccttgagatgaggattatgatgcgactgtgagtgcgttcgtactttgagtttgctaggcagaatagtaatgaggatgtcagtccgtgggc

SEQ ID NO: 492731 - DNA, 848 bp, Homo sapiens
  misc_feature (1)..(1): n is a, c, g, or t
  misc_feature (12)..(12): n is a, c, g, or t
  misc_feature (32)..(33): n is a, c, g, or t
  misc_feature (44)..(44): n is a, c, g, or t
  misc_feature (61)..(61): n is a, c, g, or t
  misc_feature (65)..(65): n is a, c, g, or t
  misc_feature (82)..(82): n is a, c, g, or t
  misc_feature (97)..(97): n is a, c, g, or t
  misc_feature (113)..(113): n is a, c, g, or t
  misc_feature (117)..(117): n is a, c, g, or t
  misc_feature (126)..(126): n is a, c, g, or t
  misc_feature (136)..(136): n is a, c, g, or t
  misc_feature (175)..(175): n is a, c, g, or t
  misc_feature (195)..(195): n is a, c, g, or t
  misc_feature (207)..(207): n is a, c, g, or t
  misc_feature (210)..(210): n is a, c, g, or t
  misc_feature (214)..(214): n is a, c, g, or t
  misc_feature (219)..(219): n is a, c, g, or t
  misc_feature (222)..(222): n is a, c, g, or t
  misc_feature (225)..(225): n is a, c, g, or t
  misc_feature (228)..(228): n is a, c, g, or t
  misc_feature (232)..(232): n is a, c, g, or t
  misc_feature (245)..(245): n is a, c, g, or t
  misc_feature (255)..(255): n is a, c, g, or t
  misc_feature (276)..(276): n is a, c, g, or t
  misc_feature (293)..(293): n is a, c, g, or t
  misc_feature (301)..(301): n is a, c, g, or t
  misc_feature (310)..(310): n is a, c, g, or t
  misc_feature (313)..(313): n is a, c, g, or t
  misc_feature (321)..(321): n is a, c, g, or t
  misc_feature (325)..(325): n is a, c, g, or t
  misc_feature (331)..(331): n is a, c, g, or t
  misc_feature (335)..(335): n is a, c, g, or t
  misc_feature (345)..(346): n is a, c, g, or t
  misc_feature (349)..(349): n is a, c, g, or t
  misc_feature (356)..(356): n is a, c, g, or t
  misc_feature (379)..(379): n is a, c, g, or t
  misc_feature (382)..(382): n is a, c, g, or t
  misc_feature (384)..(384): n is a, c, g, or t
  misc_feature (398)..(398): n is a, c, g, or t
  misc_feature (408)..(408): n is a, c, g, or t
  misc_feature (418)..(418): n is a, c, g, or t
  misc_feature (423)..(423): n is a, c, g, or t
  misc_feature (427)..(427): n is a, c, g, or t
  misc_feature (461)..(461): n is a, c, g, or t
  misc_feature (493)..(493): n is a, c, g, or t
  misc_feature (499)..(499): n is a, c, g, or t
  misc_feature (580)..(580): n is a, c, g, or t
  misc_feature (589)..(589): n is a, c, g, or t
  misc_feature (591)..(591): n is a, c, g, or t
  misc_feature (596)..(596): n is a, c, g, or t
  misc_feature (709)..(709): n is a, c, g, or t
  misc_feature (735)..(735): n is a, c, g, or t
  misc_feature (750)..(750): n is a, c, g, or t
  misc_feature (775)..(775): n is a, c, g, or t
  misc_feature (800)..(800): n is a, c, g, or t
ncccaattaacntttttaaagggccccaaaannccgtgacaaanttttggccaagttgttnccantaaaaagaaccgatttnaaaaaccaaaaaccnaaaaccgccacacgcnaaanagaaaaccnaagtggcccncaaaacattccccctcccccccgaaggttttacgacgcnttgttatcattaaccagtcntttaccaccaanccnaaanggccnatnganacnaacngtcccgagaccgncccccccccnccgattaagagggggggggcngggattagggaaaacanccatttanccccccganccncccgggcngacntggtgncccncccacccccnnccnccccccngccccccgccttgatgacacccnccncnaccgcccgccccanaccacgaacngccaacgcgncccanaggnggaaagcccgagaagcccccaacacacatgggcntgccaggcaccatatcaacaatggcagcctcnccaganttcaagaatttagggccatcttccagctttttaccagaacggcgatcaatcttttccttcagctcagcaaacttgcatgcnatgtgagcngngtggnaatccaatacaggggcatagccggcgcttatttggcctggatggttcaggataatcacctgagccgtgaagccagccgcttccattggtgggtcatttttgctgttaccagcnacgttgccacgacgaacatccttganagaaacattcttganattgaagcccacattgtccccaggnagagcttcactcaaagcttcatggngcatttcgacagaatttacttccgttgttacgttgactggggcaaagg

SEQ ID NO: 492732 - DNA, 782 bp, Homo sapiens
tggatcaactgtggtcaggagtttgagatcagccaggccaacctggtgaaaccccgtctctactaaaaatacaaaaattagctgggcgtgatggtgggcgcctgtaatcccagctacttgggaggctgaggcaggagaatcacttgaacccgggaggcggaggttgcagtgagccgagatcgcaccattgcactccagtctgggcaacagagtgagattccgtctcaaaaaaaaaaaagaaaaggaaaaaaaattagctttatacctcttcctgtgtttcaaccgccatgaaatttctgaacactccaaattcagtggattaatccaaaacaaattttataaggtttaaaatattttcacttcttatagtaatagtatactttaaaaagcctcggggtatattatcttctaaacagctacaattcagggcagctactttacccaactatgtcctctagtggagaacaactaggcctattttcacggctgtgtagcctcagggcctaatctgggtgcccaaataacatatcgtagaattaccctgattgggtaaaaaccatgcgtttttgtttacaattgcaaaattctcaaaggcctgtatttatgtacttctggacatattatttcatttaattctcaggtattggctggtgggggtgacttagtacacttagtcccatttttaaaaccacattattggcggtttaacaaactcttccttttacagtcattttacaacatgggtacccaatggtatttaggctctagaacagttacatttg

SEQ ID NO: 492733 - DNA, 780 bp, Homo sapiens
ggttgagggaaagacgtttttgggccccaggggccctaggactcaaagtggaacccaaaagttcctttgggtttttcaaatattgcccattccccctaagagctttagggttcaccctctccgagtccaaaagaatgtacctggcgacaaaatcgcaaaaaggggtcccaccagtctggtatgggtggctccagccacaaggttggagatgggtctattaagtgggctcccctgaatttggagcaactgttcagaatgcagggaggaaagtgccaatccactccaggtccgtatatggatatccgaactatccgcatggtccacctctttattaccaggattgtcgggccttaggtaccctgattgcctactatctgaatgtagtgtagtggatagaatgacccatactatagccagcagtacaggtcaagaggtagagcctcttgagaatggcaggtgtaataatctactgtggagcagcggctagtgcaagtagtgattcaggatctatgtagcaatggttttggccatggtgataaagtctctttcgctcccgaatatagcctaaagaagtgtagcgaactcaaggagtctctgtgattggctggcgctaagtaagtcacctactgcatctaggatgccagcagtctggcttggtgaacacttgaggcatgggaggtaaggccctggtaaggaggatgacaggttccacatttaatgtcactttggattgttgttcatcagaggaggtttcttgaagcaggtgtatatagatactca

SEQ ID NO: 492734 - DNA, 459 bp, Homo sapiens
  misc_feature (198)..(198): n is a, c, g, or t
ccagctgtctaccatgcatttgcaacaggaggaagatgtaatgaatatgcagtattaagttgatttatgaacagtgctttgatatgccaaagggaaaactgtcccacttaaattagattaagtagggtggctaaaaataaataaaaacactggaaattctttctctcactttctcttgatgcaatgaagggaatatgncacttcagtatacagagttgttgttatatgatgcacaaaatattttgaagatttgaataaatggtaacctttaatttgggcctttataaaggctgggtatccggtaaaaatagacaaaatccaaatggaattttttggtgggttttggccctttaaggaatttttttccaaaaccaaaaaatggaataaccattgaaatggggaaatttttctaactgaatcaattgttacatgaaaaataaatttatataacccctttgt

SEQ ID NO: 492735 - DNA, 341 bp, Homo sapiens
  misc_feature (5)..(5): n is a, c, g, or t
  misc_feature (64)..(64): n is a, c, g, or t
  misc_feature (136)..(136): n is a, c, g, or t
  misc_feature (295)..(295): n is a, c, g, or t
  misc_feature (311)..(311): n is a, c, g, or t
taacnggtattcaactggggaacaattaaaggaagaccccatttatttatttttcgagatggantctcactctgttccccccaggctggagtgcggtggcgcggtcttggctcactgcggcctctgcctcccgggntcaagtaccgctcctgtggtgggattacaggtgcccacccacgatacccagctaattttcatatttttagtggcgatggggtttcaccatgttggctaggctggtcttaaactcctgacctcgggtgattcacctgccttggcctcccaaagtctgggnttataggcatgagccnccatgcccagccagtaagacccgtctataa

SEQ ID NO: 492736 - DNA, 879 bp, Homo sapiens
ctcctccagactcgcccagcaagcgagaacgccacaagcaactcgtgagcccacgtcggccgtcgggaaagcacggggcctttcccacccaccctcagccagcgccacacggcacccacgagactgggtgccccgagcggcgccacgctatggcatggatcagcgactgcaggatcccgccatgttccagggcaggacccgggcccggccacaccggcccccatggctatgggaaggcgtgggccacatggtcccctctggggcgtccccgagcactcccacgtcctcttgtcgtagcctcaccctctaacacgttcagcggatggaaagagtttgtataattatgtaaattattacgtgctttgaaatatgacggacgtgtgagctcacgtggcggccatgcatggattagtaggcgagaacgacgggggcccagcggctaccaccagcgcatgaaagcacggggtatcacgcagagaatccccacagatgctgcaggtgccagacaaggaacgggaccacagatgggacacaacagccatccccaacatcgcagccggactccaaggaaccacggaaggtagaggaggcgcttcgaggaacacactgagggactgtcacccaagcacaacagtacacaggaacgcgaacaactggatcgccaaagcaagaacagcatatcatcacaacacggggacaacacgacacatagttggatggtagtcctatgggaccaaaggcactacgattaaacgaactacccaaccaggacgttacaacgggacagaaaccacaacaacaaaaacagacaaacaacaaagaaaacgacgaggccgccccgccgcaccagacgcacaaataggccgcccacaccaacgg

SEQ ID NO: 492737 - DNA, 118 bp, Homo sapiens
acagacaaacacagatgcctggatgaattttacacagcaggcaacagtgaggaagaaggctgtgtagacaaaatatacaatcagacacatagacctaagacaagccaggagaccactg

SEQ ID NO: 492738 - DNA, 203 bp, Homo sapiens
tgcgctaagtgctgagattacaggcatgagccaccatgcccagctcaggttcctatattttatatcttctatttgtagaacaaggctctattaaactacccaatatggtatttatatagtcccacctatccagcaccaaaccatatacatactacataatataccgatctacaaataaacaatacaactatatggaggtagtt

SEQ ID NO: 492739 - DNA, 1405 bp, Homo sapiens
aagctcaataaatatagtacctgcacagggcacatagatgcaaacattcatggagccaagtcgatatactatgaacatagggacttaggccctaataccttctggcgataagtgcacatcaactagacaagtgacacttagacaaggcagagtctcgcacagacttggggaatccgccgtaaaacaagcacggaaggttacctaaaagaaccagctagacaagcaggctacaaccccgatactgagtgtaggcccaaacccttgcagtcagcgagcatagggcgtctgcactaagtgcttagaggcgcggaactagaagctcattaacctcggaacgacgcgtagggcttgcaataatgcacatcgcggtttgattcgctaactgacataggaaaacttcctatgaaaggtaaccataatctatttcagaccactaaataggaccagcagcaagtaacagcgctctggctatcagattcccactttgaaaagaagtagataacaactagtgttgaagtatcactacacaggctatgtggtaaaaccacggctactatacgcgcgggcgcaaacataaaatttgtgacacaaacacacacgcgttcgttactggaacagaggcaagtgacacaccagcaattttgccacactaagcctcatatacgtcgacggagaccctgaagagcagagacccatgacgcaagccccacatacgcacacgcaaacaactgactgtcattcctagggattaccatgaaaatctcccagcagtaaagggcggtcaaaagataagtattcgtcacaaaacaccaacgttaacttaaagcattgcaaaccgtggccgttcacagccaggctcccaagcataatgcgacgacctgtagggtacatactggtcgacacgcgcatacaatcgattggacaaggagacaataaaaggtggcatcgacgcgtacataacaccggcgtaaccacgccacttgcaatgatgcaaacacactatcagtacgccatgcacaggagcgagtacaaacagcccgacgccgaggtcacccgagactatacgagtcgacgcagctgtccaacacggtggacctgacaagatcaaaccgcaaggaaccgccaagaataacattgcaacgcaagacgacaacagagtgcacgaaaccaacggggtacaaatcaaatgtaccagacacaaaggaacaggaacgaagcacgacagagaacagccagggcaatgtgaactacaaaagaagggggaaaagggggagccaacaacaaagaagcgcaacaacgagggaccaccaccggaacgaacgcaacacacaccacgaacacagggagcgaccacacaagaaagagaatgaagaagaggacaagccacaacaccacccaagagaca

SEQ ID NO: 492740 - DNA, 874 bp, Homo sapiens
gcctctgccctttttgccctccttctccctggggcaatcttcgcccctttttcctctccttgtggcgaggcccaatcaagccgaccagttttggttcccccaaaagtgcatgggggcccttccaacggaccggggctcctattttcaagacgcctggctgttgttgctcgctcccgggcgggtatatccacagaagttccttcggtgcaccactccggtgcttcgtgtgagctctggatcatgggccccgcctccttccgggggttatgcacacctattcttcgcccgcgcagcagtggttcatgtgtctgcgtccctctcgtgtacccccaccccacgatgtgctggatgcacactgcacgccccggatctttctgcggatatggcatgaacgccttcgctccacacgccactctaatggctgatggaccctccctcttctcgggggagaaaaaagactttccttcgcacagacacttcatttgttccgggggccctctaccaatccgggggggtgcgaccgtggtactggcaggcacactccactccggccggattcccctcccctgggggatctcaacaagtacacatgcttgactcatagaccgccgcgcgctctgaagaacgtgagaattcatatcattggtgtcacaccacatggttctctgcgataagagattggtgttttcaagggtgagtcatttggccagctcccctgacactatgtgagactcgcgaataggggggggtacccacctgacagggcccctccgtgaaggagatggaatcccgaagtcccccctcggcggggcatcgtctgtttcgacgggtacgcgtgccccccccccaaaacggggcggacacacatgacgaa

SEQ ID NO: 492741 - DNA, 212 bp, Homo sapiens
agaactcattggtaatctacataacctctcataattaaacagataaaaatttgaagaaagagtattttgtcgtagaaacaagcgagaataagaatatctgagggataaactggcactataggatcattgtgttcagtgtcctaacattcaagaatcgtctacattacattgtttaaggaaaacaaattatcagaaacggtgtgaatacgtgg

SEQ ID NO: 492742 - DNA, 439 bp, Homo sapiens
  misc_feature (8)..(8): n is a, c, g, or t
  misc_feature (68)..(68): n is a, c, g, or t
  misc_feature (72)..(72): n is a, c, g, or t
  misc_feature (76)..(76): n is a, c, g, or t
  misc_feature (85)..(87): n is a, c, g, or t
  misc_feature (89)..(89): n is a, c, g, or t
  misc_feature (91)..(91): n is a, c, g, or t
  misc_feature (94)..(94): n is a, c, g, or t
  misc_feature (96)..(96): n is a, c, g, or t
  misc_feature (99)..(100): n is a, c, g, or t
  misc_feature (102)..(102): n is a, c, g, or t
  misc_feature (113)..(113): n is a, c, g, or t
  misc_feature (120)..(123): n is a, c, g, or t
  misc_feature (125)..(126): n is a, c, g, or t
  misc_feature (137)..(137): n is a, c, g, or t
  misc_feature (144)..(144): n is a, c, g, or t
  misc_feature (147)..(147): n is a, c, g, or t
  misc_feature (151)..(151): n is a, c, g, or t
  misc_feature (154)..(154): n is a, c, g, or t
  misc_feature (168)..(168): n is a, c, g, or t
  misc_feature (188)..(188): n is a, c, g, or t
  misc_feature (192)..(193): n is a, c, g, or t
  misc_feature (205)..(205): n is a, c, g, or t
  misc_feature (208)..(208): n is a, c, g, or t
  misc_feature (213)..(213): n is a, c, g, or t
  misc_feature (220)..(220): n is a, c, g, or t
  misc_feature (224)..(224): n is a, c, g, or t
  misc_feature (231)..(231): n is a, c, g, or t
  misc_feature (236)..(237): n is a, c, g, or t
  misc_feature (240)..(240): n is a, c, g, or t
  misc_feature (244)..(244): n is a, c, g, or t
  misc_feature (252)..(252): n is a, c, g, or t
  misc_feature (259)..(259): n is a, c, g, or t
  misc_feature (271)..(271): n is a, c, g, or t
  misc_feature (273)..(273): n is a, c, g, or t
  misc_feature (364)..(364): n is a, c, g, or t
  misc_feature (435)..(435): n is a, c, g, or t
tacttgangagggggtgtcactcctgcccgcaatggaatgttcagaacgcgggacctccttgggttcnggantttnaagaccccnnnancntcnangtnngntttcggctttntggaccnnnngnntcctcttgatntgccttnggntccntantgaccctggtctcnccctgatgcgaattgggatntttnnatcgcgtggcgntcnccctngtgcagntttngagattnttatnntcngtcnttgctgcngcatganttaagatttctnanccccagcatcgccctggtttgatttaggatatttagactccggcttccctttggtgcgattcaggattcttagactccgccgttgccgtgncgcgatttatggttttttgatgatgccctggcaaatgctctggttcgatggagtagtggtagtacccctgnatct

SEQ ID NO: 492743 - DNA, 222 bp, Homo sapiens
  misc_feature (40)..(40): n is a, c, g, or t
atcctcagcatggtgtgcatacatgtgtgtgcacatgctngagtgtgcacatggctgtgtgtgtgtgcatgtgtgaggtgcatgctctgatggcctgggtttctgctgttattggcagtgctttggtctggatctgcttccctgctccccattctgtccctcccatctcacccagcatctccgggtgtgggctccgagcccgggcacatgcatgcacccagg

SEQ ID NO: 492744 - DNA, 760 bp, Homo sapiens
cctggcccgcatccggatttattcttttgtttttttttgtatttttgctttttgctgtctatcgtttgtaatgggctgatggaaagaaggaaaaaagttttttgcccttgtgttggcgcgggcaattcggaaaaagcttattttaagacttacgcctctgcgcgtaataaaacaccgcgtattcaacactgttataacagggggaaaaaatgcctcataaaattggctttcgagacaccaaaaaacacccggcggctttttttgatggcctccgacagctttaaaaatgctcttgcatcaagaaaaaaaccgtttgctttttttaaaaaaggggtcttttctaatagaaaccttcaaacctctcgagacgaagagaacgaaatttttgaggaggtttatgccccttgtgtttgttccttccggccaattgtgcgaaagggggggccttttcttttttttgcgccctgtcccccttagaagaaaagggttataaagaccgttcttgttttttccggggataaaatctttttcctcggcacaaaagttttttttggtggtggaagggggggttacccccggttttagcccttgggggtgcccggagattgcgtttttattctgaaaggaccccttgttgggcctcgcttttgtggaaaactcgcggaggtagggctttccccgcctttttatactagtaatggcgcgagggggggtttcaatagttttgtggacctccccccgggtaaaataacgggggtcg

SEQ ID NO: 492745 - DNA, 242 bp, Homo sapiens
cccccgttgctctcgtcatgtgtgccatggagaccgctctttgtcacccaggggtacctcctgcggggacctcatccaccgtgatgtcccacggcgctctcttccgtccacctggggttcatcctgagctcctcctcctcctatgtgtcatcctcagagctcctcctccctcgtgagtgtcccatggggctcctcctccccccatgtgtcatcctcagacactcctacaccgaagaccccat

SEQ ID NO: 492746 - DNA, 165 bp, Homo sapiens
tagagtaggtatctctaggtagtattctactcttaactgctgacccataaaaatttgagttgccaaatatatctctggtcagttattcattccaggcgctatatatcaatgcctactggtatttctacttggatatctctacttggatatctccatgtcctgcgt

SEQ ID NO: 492747 - DNA, 310 bp, Homo sapiens
ggtcacatcctcatcgccgatcttcatacccgagcggcaaggctctgaggccgactggcccaggtccagggtcttggtgctattttctcctgcggccgggtttgatgtctagggcggtgataccaagctccttcaactctgggccacatcctgggagcaacatagcagcatatggcgaggattcatctcggtctgcctttaccttcatccaacagtcaaaggcacatcgcttctgcaaaaagtcactgcatggcaaagttcatgagggtgcaactatggcgaacaaatcatctttcttagcactgggtcg

SEQ ID NO: 492748 - DNA, 168 bp, Homo sapiens
aagctccaacaagatatcaaaatataccacaattaattgggattcatcccagggatacaagagtggttcacacacacaaatcacagacattacattttttaatctttattttgaaaggtggataaaactgaatttgggatttggcagattttgttttgtggtcccacg

SEQ ID NO: 492749 - DNA, 170 bp, Homo sapiens
agtcttaataccataataaatgtatggtcggagggaaacagcaagccagatggtcaccatgccctggccagggtaggcactcagctgacaaatgaaattcatttcaaggaactaccctaatggaaacccaggggaaaggttaaaaacagaagggggatcctactagagtc

SEQ ID NO: 492750 - DNA, 181 bp, Homo sapiens
aacacggcgtgtaggagtattgggcatggctagatatggctggctggctgggaatgctgagggttgtaggggatgtaggaagaataggggtgcagccaccagaggagggcagcagcgcggggctgatgcgtggcttgctctgaagcatgggggccaaacacgggctgtgcaggggtagtgg

SEQ ID NO: 492751 - DNA, 276 bp, Homo sapiens
ggtcctgcatactgggcgtatgcttgatcagggattagttgaagggtagtcattaacagtgtagatagatctttcagagaaactttttttgagacaggctctcactctattgcccaggatggagtgcagtggcgtgtcgtgatcttggctcactgcaacctctgcctcccaggcccaagcgattctcctgcgtcagcctcccaagtagctgggactacaagcacgcaccaccacccctggctgattgtttttttgtttggagagatagggtttcgc

SEQ ID NO: 492752 - DNA, 103 bp, Homo sapiens
acaatgaagagagcaaaaaatgctagttaaacagaagagacgaagatcaaacagaacaaagcagatgcatgaagattactggtttcaatgtggagatggtgga

SEQ ID NO: 492753 - DNA, 930 bp, Homo sapiens
tctaagtacatatgcagtgatcaagacatggcgcattcatactaatatacatttaaagtggtataattcttggttgatcctgttcgaaattttgatgtcatctagcgccagtgtaatcttaaaggtttgatgctttccacatgatcagtcatgttgtcttttggtaagatacagtgtttacttcgactcgattgtttaacggccatcgtggtgtatacgtattaatcgacggataagtctctgtagtcctaataatccattttaggccagtttccccatctcgcagcatccatgtggtttcagaggtctcgccgcttctacgtacaattatgatgtggtgggtgcacttgtgcctagtgagaaagcatagaccaattggttttaatagcatcgttatgatactgagggaccaagcttttggtcaccgaatagcaggaatgaaggtcctagttaagaatgatcaagagttccaatgagaactgatcatattggttaagaagtgtgtcttagtacctatgttgtcccttaactgggcagcttatttctaagtaggatctggttttgacacagttgacttctaataaacgttatactgggggtctcacaaatcttgtgactagtaaattcaacctttgggtgatcctgtgaacagtttcccgtctggcttcctgcctctagatgtagagttgtgttatgttggcatgcgccacgcgtgtggcacaataactatgtatttcgagtcctggtttgggtaatggaagcgtgaatgagtggcataatatttcccctgaattggaacttttctaacgcgggggaacccgggattaccggaacatggccacgttcccgcgaactaattcgacaaattgcggaaatgggtcgccgacgcaacaaatataatcagaacagtgggggcccaaaaattttcct

SEQ ID NO: 492754 - DNA, 125 bp, Homo sapiens
agggaggatacgtgaagacagcggatattggaaataatataagtgtggataagaccacagactcatatgtgctgggagctggcaggacctaggccaggctgctggggtaccggagctcgaatacg

SEQ ID NO: 492755 - DNA, 267 bp, Homo sapiens
  misc_feature (14)..(14): n is a, c, g, or t
  misc_feature (43)..(43): n is a, c, g, or t
  misc_feature (45)..(45): n is a, c, g, or t
  misc_feature (61)..(61): n is a, c, g, or t
gagtggcttacaancacttcatcttcctaatagcattcatgtncnaccctatcagtatganagatctttccttggtcagtgacaagagaagtaaaagcataatcatgtcatatctgcatgctctacctatagtatatagcacacataatctaaggatattatctttaaaaaaatgatatgattatatgatccatctccacattggattggtattaacgtagtaattaaccactgtgtctaattagaaactaacaaaaccattggctc

SEQ ID NO: 492756 - DNA, 151 bp, Homo sapiens
ctctcgtgacagactcggcgacctactgccctgcctgtcatgtatgggtcctcggcgtgtgcagtgtggacattgggcgtgtgcagtatgggcactcggcgtgtgcagtttggcggctcggcgtgtgcagtatgggctttcggcgtgtgca

SEQ ID NO: 492757 - DNA, 989 bp, Homo sapiens
  misc_feature (691)..(691): n is a, c, g, or t
tactggagtgaccaccaagaaagtgtgtgactgtgtgactggagaatacactcgccgaggaagtcaacctctgcttgtataactccatgtggccactggtaggaccagtgccacctagtgacaacgaaggcggcagaagtgttcccaactcccaagtgggcattggagaaagtatttcccgaggaatacgaaaggcgaacaggagaaattgaaccacggagatccaaattgcacggtaccaaagctatgtgtgttatagttccacccgaaaagaaaaagatatggtgaaatatgagatgccacaaatacgaaagtgatgtttggatctcgaataacaaagttcaaatttgagaacccattatggttggaattccatacgattaaaaagtataatccagtggtagcaaaaaatttttgggttaagcaattttaaagcaaagcgagagaggaaaacaattgtaggtgagcgactagacacattacagggggggtcagtaggaagaaggaggtagtccaaagccaataatgcaggagtaagataggcgaggcaaattcaaaacagaatttgagaaggaaaaaagaagtaccgacttttgtgaggggacacagagttttcatggttgaagatatttggcacattaacgaagaggagagtgagagattaaaatttcaagaaattttgaagcgaagntatggtgatcaccaattataaacatatgtgtgtggacaagaaatgattgttttgcccgcaggagtaaaaaaattaaggagaaaggattatttgatgtgtaatagtgtagagaagtattaggcacaacagtggagaagatatgtgcaaacaattactacgattgagtgcggataggaggagcaccgactttatactcaatgaggaggagggaccataagcaacaatgatagttaacaatttgttgggacgaagttgaaagggatgtgagagacatttgtggtaataaacgacgtagaaa

SEQ ID NO: 492758 - DNA, 121 bp, Homo sapiens
ccgatttttgcagacgtggtcgcagaggtctgcggcctacagcaacgtgtcaacccgaaggtgtgggacttctacactgaggagacgctggcctgagggccctcccttatgacttgggaac

SEQ ID NO: 492759 - DNA, 162 bp, Homo sapiens
  misc_feature (20)..(20): n is a, c, g, or t
  misc_feature (106)..(107): n is a, c, g, or t
  misc_feature (158)..(158): n is a, c, g, or t
  misc_feature (160)..(160): n is a, c, g, or t
ttgccttgcgggccttccancaccatcatgaaatccaccttggccccaatggatggattattgcgatccacccacaacacccgcaccacggcaccgaccatgaaannaaggaggcttgccgcgcataggtgctgtcactggcaccgaacatgtcgatnanca

SEQ ID NO: 492760 - DNA, 547 bp, Homo sapiens
  misc_feature (35)..(35): n is a, c, g, or t
  misc_feature (107)..(107): n is a, c, g, or t
  misc_feature (117)..(117): n is a, c, g, or t
  misc_feature (127)..(127): n is a, c, g, or t
  misc_feature (138)..(138): n is a, c, g, or t
  misc_feature (141)..(141): n is a, c, g, or t
taaagaaaatttctctttttggtgtccctcaatantttagcagatgttcattggggggaaattcttattacttacatgaatgagttgtgaatttaggggcaaggaanaaaaaaaaanttcaattttntggtttaaaanaanaaaattggcaagagtacattaagttatttttttaaaaattcaactcgaacagaagggaagtgcatgtgcgttgtttccaagggtcttagacattgcttttatctcacgtgactagttattcactttttttacaccttgggttctcaaaacaaagtgatcttggttttggctcacgggcaaaaccgggtttgacaacggggggcgtggcgctttattataatataatttttttcctataagggtttccttaacaataagtggtgaaattcctaaatttataggcatattgtttagagtaaatctctggaaattcaggttacttcattgtggtgaattttatccctcaatatcatggaatttgggttgtttaaaaattggttctattccaaattttgggatcaacttg

SEQ ID NO: 492761 - DNA, 739 bp, Homo sapiens
tccacgcttaatccatttaatttttctggtttaaaaaccctttgtggtacccacaggtgggacccggagttccgtgtgcagggaaactcgggggggggtctggacgagggggtcagggaactccggatagggagaggactgggtagaatacaggtctcctcccagaggtcgggggtcagggtacgctggtagggtctaaagaattgggcttcaaagggggcgcctgggcagaagtgcgcccagggtgggcagtgcagccccgggctgaggtgtacgcagtacatcagatacacagccatacatgagagcagttcctaagcgcacaggtcgcgagaagacagattggccagcgtggccccggggttgcgcaggggatgagagggctgtaccaggcacaaggagccggcaggggcctggtcacctcggcaagggagacatgtgggggggctggccaggtctggtcccccaagtagcctcttggcgcagggggacagagggagaagctgggccagggatagatgggccccaagggattgggggggggccacctcttgggagacactgtaacaccaagaaccgagcggggccatggtagtcccccgatgagcaacaaaggcctggaaaccgggagcgcgggccggcaggggtctgctcaggcaacggggaataatctcaaaacctacatcttggagaagagagccccgggaaggaatcaaggatctctgatcacctaaagggc

SEQ ID NO: 492762 - DNA, 371 bp, Homo sapiens
tgctgggattacaggtgtgaaccaccctgtccggccacaatacccagctaatttttgtagttttagtagagacagggtttcattgtattggccaggctggtcttaaactcgcggcctcagatgatctgcctgcctgggcctcccaaagtgcttggcttaaatggtgagccaccatgcctggcatgcctggactttttttttttttcccagatggaatctcactgtgtcaccctggctggagtccagtagcatgatccaagctcactgcagccaccacctcccaggtcaagcggttctcctgcctcagcctaccaagtagctgggattacaggcgcgccccaccgcccagccaattttttatattgatggta

SEQ ID NO: 492763 - DNA, 2385 bp, Homo sapiens
agcaaggtctaatgggatgctgtcttcaagagacccatctctcatcccatgagacccataatgacacccataagctcaaaataaagacatggagaaaaatctaccaagcaaatggaaaacagaaaaaagcaagggttgtaatctcatttcagacaaaacagactttaaaccaacaaagaccaaaaaagacaaagaagggcactacataatggtaaagggttcatttcaacaagaagacttatcctaaataatatatgcacacaatacaggagcacccagactcataaagcaagttcttagagaccttcagagaggcttacactcccacacaataaaaaaagaaaaaggcctgggtatagtggctcatgcctgtaatcccaacactgtgggaggccaagacaggaggattgcttgagcctaggccttcaagagcagcctgggtaacacagcaggacctcacctcatctcttaaaactcccacacaatacggggagactttaatacccaactgacggtactagacagaccatcagagcagaaaattaacaatgatattccggacctgaacacaacactgggccaaatgtacctgatagacatctagagaactctccacccaaagatcaacagaatatgcattcttctcattaccacatgggacatactctaatatcaaccacacaattggacataaaacaatcctcagaaaatgcaaaagaaggaaaattataccaaccactctcttagaccacagcacaataaaaatagaaatcaagacaaaatcactcaaaaccatacaattatatggaaattaaccaacctactcctggatgacttttgggtaaataatgaaattaaggtagatatcaagaagttctttgaaacgaacaaaaacaaagacacaacataccagaatctctgggacacagctaaggcagtgttaagagggaaatttatcacactaaacacccacatcaaaaagataggtcaatggccaggcacggtggctcatgcctataatccaagcattttgggaggccaaggagagtggattgcttcaggctagcagtttgagaccaccctagccaacatggcaaaacctcttctctactaaaaatgcaaaatttagctgggtatggcagtgtgtgcctgtagtcccagctattcggaaggctgaggcacaaggaggtggaggtggcagtgagccaagattgtgccactgcactgcagcctgggtgacagagcaagactcttgtttaaaaaaaaaaagaaagatctcaaattaacaacctaacttcataggagaaagaactagaaaagcaagagcaaaccattcccaaagctagcagaaaaaaagaaataatcagagctgaaaactgaaggagactgagacaggaaaaaccattcaaaagattaacaaatctaggagttggttttttgaaaaagttggtaagatggaccgctagctagaataatgaagaagagaaaaaatccaagtaaacacaattagaaacaacaaagcgggtgttgccactgacccctcagaaatacaaataactagcagatactactatgaacacctctatgcacacaaactagaaaatctagaagaaatggataaattcctgaacacatacaccctcgcaagactgaaaccaggaggaacttgaatccctgaacagaccaataacaagctctgagattgaattagtaatgtatagcctagcaaccaagaaaggcccaggaccaggtgaattcacagccaaattctaccagatgtacaaagaagagctggtaccatttctactgaaactgttccaaataactgaggagaaaggactcctccccaactcattctttgaggccagcatcatcctgataccaaaacctggcagagataacagaaaaaactaggccagtatccttgatgtttattaatgcagaaatccttaagaaaataactagcaaaccaaatccagcagtatatcaaatagctaatccaccatggtcaagtaggctttatccctgggatgcaaggttggttcagcatacgcaaatcaataaatgtgattcatcacataaaaaagaactaaagacagccaggtgtggtggctcatgcctgtaatcccagcactttggtaggccaaggtgggtggatcacctgaggtcaggagttcgagaccagcctgaccaacatggtgaaaccccatctctactaaaaatacaaaaattagccgggcatggtcgtgggcacctgtaatcccagctacttgggaggctgaggcaggagaattgcttgaacctgggaggcagaggttgcagtgagccgagatggcgccactgcattccagcctgggcatcagagcatcagagcaagactatgtc

SEQ ID NO: 492764 - DNA, 225 bp, Homo sapiens
  misc_feature (13)..(15): n is a, c, g, or t
atccctgccctgnnnctgagccttgaaggccggcctgcgtctgaatggttgcctgccagtacccgagcctattcacagccaggccattcaccttcgattagcactgattgcccaatgcacctccctccccagctcgaggtcattcttcaattaggacgacgaacctagacaggtttaatagcgaatctaatggtgaagtctgacctggatgccctcacgttggca

SEQ ID NO: 492765 - DNA, 153 bp, Homo sapiens
atggtctgactctagagtgatcccccaagcagttaactacatgactcagcctccaagtatggtgggactacatgtgtgccctgctaccaacaccctggctaacttttttgcatattttatgtaattgacatgtggtattcacccattgtttgg

SEQ ID NO: 492766 - DNA, 401 bp, Homo sapiens
  misc_feature (344)..(344): n is a, c, g, or t
gctagaaggttcgatgcctctggaaagcatgtgaaactcatctcccttttgtttccctgaatgcatttttgttcttttaacagatctgtccctgtgggtggtgtctaaaaaatcggaccccctggtttttgtgttagattgagctgggcagctgccatcagcttctttatatgcaaattaggcccgacccctctgtggttcctggttggtggctaattaaatgaggggagggagggatgtcccccccaaagtaggccctccccttggctttggccaggccaaacccttcccatcgtttacatggttctgtgtaattttaaagtttatgtgtataaaacgaaacngtttctgtgaaactgtatattttgtaaataaatatattgctcctttgaggttcatga

SEQ ID NO: 492767 - DNA, 265 bp, Homo sapiens
caggtgctcactaaacacgggttatgattttcatcaacaagcacaggtgctcactaaacacgggttatgattttcatcaacaagcacaggtgctcactaaacacgggttatgattttcatcaacaagcacaggtgctcactaaacacgggttatgattttcatcaacaagcacaggtgctcactaaacacgggttatgattttcatcaacaagacaggtgctcactaaacacgggttatgatgttcatcaacaagcacaggtgct

SEQ ID NO: 492768 - DNA, 189 bp, Homo sapiens
aacgggtgatgcggttgaagaggatccagaccttttgatactcttccgaggaagaactaaggatgagcttctgcgacgggcaaacgctagcaatagcattaccatctacgtgctgaatataaatcacccccttcgcaaggcttattgtgagcactacagccgcagaagcacacaagccacatagagagg

SEQ ID NO: 492769 - DNA, 451 bp, Homo sapiens
tcacactcaacaaacaatgttatttaatttctaagtgtctggagatctgttatgatttttagtttctttctttcaattgtagttagagaacacattctgatttcattttttctttaaattttcattatttcttaaaattttaaatagagatgtggtctcactatgctgcccaggtaggtctcaaattcctggactcaatcctcccacctcaacctcccaaagtgctgggataacaggcttgagccactgtggttggcctgatttcaaattttttacatttttttaagttttattttatattccaggatatggcctatttgggtgaatgttccatgggcttgaaaaaaatgttcattctgttgttgctgtgtgcagtgttctataaatttcagatagctttcgttaattaatggtgttacgttcttctatatcctagctgacactagctgat

SEQ ID NO: 492770 - DNA, 429 bp, Homo sapiens
  misc_feature (159)..(159): n is a, c, g, or t
  misc_feature (182)..(182): n is a, c, g, or t
tgtttccctttgtctagtgtatgtgctgccaagtgagcaccattttatttgtagcatcagtattactgcatcctacttgtgagaagaagcctctttaatacacaggttcctaagagggactcttaccatgttagtatctttttgatgaggtgaattgangaagaaggtgctaaaaataggtntatacaggctatctgacaaaacagtcaggtaagtctctgtgaattcaaatgccgggggatgctggtgcaccagctgccagacacaatctaggaaaagcaggaacacaggaacctgcatgaaaacaagatacgttacttggtgggcagagcccagagcaagccatcctgagttcagggggcagccacctcaacagctgtggaataagcacttctgaggacttcattctctggaacaccgggtccttaa

SEQ ID NO: 492771 - DNA, 177 bp, Homo sapiens
tacttagtgacatacatgttatcccttgaaagcatttctgaccttgaccttctgttcatccctttaaatatctgtagccactgggaattctttggacatcagtgattgctctcagtcgcacttgttggctaacttagtctctacatccttggccctcacaatcatgggacactgcgt

SEQ ID NO: 492772 - DNA, 234 bp, Homo sapiens
tataccaccctatccccacaattccaacatttcaaaaacattatatataatgggatactttagtcacaaggtgtcacctttgctgagtcaaccaaatatttataatgctcctgttcaaagatggctactggatgtaaacggtaattacccagtattgctggcattttaccggaagccactggagcatattacattttcccatttcggtattatggtggtatccgggggtacgag

SEQ ID NO: 492773 - DNA, 118 bp, Homo sapiens
catatccccatccccctgcactctagctatcctccccccatgtcctcgcctgtatgtcctgcgtctatcccaccctcctcccctctccctcacaccctcttccctcacaatgccagac

SEQ ID NO: 492774 - DNA, 409 bp, Homo sapiens
tacagagtgaatggccgatcaaggacttctcggctatttgtcccgagctcaaggcgatcttctcggaactcagggctgggttctcattccaaaagccgtgggggcttctgcattttgatccggttgactatccgatcgcaaaggaagaactggctgggttccaaaaggctgccatgcaaagcggcgtgagtttctgctttctctccacgtgggagcagcggcatgaagacaaggatctgttggagatgttcaagtagtgccaacccgatacttcgttctaggccaagcagattcgtggttgggcacattcactcggtacacattcactctgtacgtacagagtgaatgtgtatgtgtagcattagacaaaattatttaaagtcaataaattgttattcgaggattccat

SEQ ID NO: 492775 - DNA, 126 bp, Homo sapiens
  misc_feature (8)..(8): n is a, c, g, or t
agctcggnaccccgccgaagtcgagggcatccgggaaagccacgacgctatatccggcgaaaggattctcgtcggccccgatacccgccgcgaggagagctgcaggcccgtggcacaacgtgataa

SEQ ID NO: 492776 - DNA, 154 bp, Homo sapiens
aatacctggggtaggcatatcagatgagcactgcataataatatcacctactgggagcaatatacacaaactctggagtgaccaagtgtacctaatgagcccagagtgcctacactgaacccttctacgattcttctactcacccggaaaggca

SEQ ID NO: 492777 - DNA, 334 bp, Homo sapiens
  misc_feature (1)..(1): n is a, c, g, or t
ncagactgaggcaggaggatcacttgaagccaggagatcaagaccagccttgtcacaatgtgaacccccggtctacagaggataattatcataataattttttaaaaagaaaagagggtgccctacaaggagagggatacttgggaaaagagaacagagagcagccagtacaaaggccctaaggtagagggggccagtgcttctgcagggccgagacctaggagggagtagctgagacgagggatggggcagaccaggaagggcctgcgatcccagtaaacactagattccagtctgtgagatgggcagccatcagtaggatacagtagggaga

SEQ ID NO: 492778 - DNA, 402 bp, Homo sapiens
ggtgcgcgcacatagtgtatggtactggtaggtgctcattagatatagaatgactgaatcaataaaagccggatgccctggctcatgcctgtaatcccagcagtttgggaggctgaggtgggcagatcacttaaggtcaggagttagagatcagtctggccaacatggtgaaaccctgtctctaccaaaaatacaaaaattagccgggcatggtggcccatgcctatagtcccagctacttgggaagctgaggcaggagaatggcgtgaacccgggaggcagagcttgcagtgagccaagatcacaccactgcactccagcctgggtgacagagcaagactctgtctttaaaaaaaaaagaaaacaaaagaattaagcttaaaatacatttttacttagtga

SEQ ID NO: 492779 - DNA, 159 bp, Homo sapiens
cgacaccatagaatgcgtgggccatttgtatgtcttctttgagaaatgtctgtcatatccttggcacattttaaaatggggttgttttcttaccattgagttgtgtaagttccttatatatttgggatattagcttcatcaaatgtatggtgtgaaaat

SEQ ID NO: 492780 - DNA, 1554 bp, Homo sapiens
gcacagcctcccttccttctttctccctccgcactcccgagacaccagccgcgctctgagctgccccacagggatccctcacacccgccgaccagcagcccatattggagggaggaagtaagggacagaggagagtgaaggggagcctggaccgactacccagacagagccggatgaatgggtttgtggtgaccagcacgaacaacaaaaaaaaaagagaagcagagagagaaaaaaagacagaagaaacaaaaagaaagcccagacacaacaaccagacaaagactaaaacacaaagagacgaaaacgacaaagaaacaaaccgaaacaaaaaaaaaaagataggaacacagcacaacacacaagatgagcacgacacaaacaatatcacaaagagagagagagaagagaacaccaaaggaaggagagaccgaagacaccaaaagagagtaacatgtaaagccaacaaaaaataaagaacccacgagagaaacaaggggcaaaataatgaggataagagggcagaaaagtataagacacaaacaagcacaacgagcgaaacaacagaaacgaacaaccgagaacaaaaaaagggagaccaacaaaaaaaaaaagtaacataagccggagaaaagagaaaaaaaaagaacaagaaggaggatttgcaagaacatgcaagagcgccagcagagacgaagacagcgcaggacggggcgcacagcaagacgggcacagacgcaacacatagcacgtgaggtcggcaaacacgcacagaacgcaaactgaccagagggagcaagaacgacaggagcggcaagaaacaaggcaacaccacacagactcaacacgaccaacaggacgagaaacgatagacacggcgacagaagagcacaaccaacgagagaagacacaacgcgcgacaccaaaaaggaaagcgaacgaacaccaatacacacagcaaccaacacaacgacaacacaagtcatcaacgggaaccacatcaatggcggaaacagaacacacccaacgacagaacaatgagaaccacactagaacgaaaaagacaaaaagaaacaaaagcgccacagcgacagaaacacaaatataaaattaactcatgacactctcaacgatcattaaaacatagataatagaatctacagtaaacaacaaacatacaccaacaaaacaaccaacataccagaacaacataacctagaacattacagacgccaagacggccctcacccacacgacaccacacaaaactacacggtgagaatacgctggacccagaaaagctacgcacgggaacgaccagatgatgctgagaagaaacgacagcaaacagagccatggaagacggcacgcaaagaaagacagacctaccagagcgaaagcacaaagacagaaaccataagtgaaacacagaacaagaacaacaatcagagacgacaatcactagtagtacagagccaaacacacacagaagagaccgacagacacacgcagcgaccactacacgagaaagagcagacacgctgactgaacgcg

SEQ ID NO: 492781 - DNA, 411 bp, Homo sapiens
  misc_feature (39)..(39): n is a, c, g, or t
tggcctttactggatacagctatcacgcgcgtacgtggnagaacgtgctgagaatccactatgatagggaaacatttcattcccaaagaaaaaaaaatttctcttctgccgggtaataggtagttctgaacgttagatatatatatatccatggggtcaaaaggtacctaagtataatgattgcgagtggaaaaataggggacagaaatcaggtattggcagtttttccattttcatttgtgtgtagaatttttaatataaaatgcggagacgtaaagcatataatgcaagttaaaatgtttcagtgaacaagtttacagcggttcaactttataatatttataaataaacctgttaaatatttctggacaatgccagcatttggataattttaaaaacaagtaaatatct

SEQ ID NO: 492782 - DNA, 359 bp, Homo sapiens
  misc_feature (82)..(83): n is a, c, g, or t
  misc_feature (105)..(105): n is a, c, g, or t
  misc_feature (209)..(209): n is a, c, g, or t
  misc_feature (252)..(253): n is a, c, g, or t
cgtcatctactctaccatctttgcaggcacactcatcacagcgctaagctcgcacgtgattttttaccccgtgagtcaggcnnctagaacataaacagtgctagncttttattccagttctaaccaaaaaaataaaccctcgttccacagaagctgccatcaagtatttcctcacgcaagcaccgcatccataagtccttctaactagncgtaggtccgtcgtttccaagcaaagtagtaactccttcccgnngacacatgcaaccgataaccagatactaccaatcaatactcatcattaataatcataatggctatagcaataacaacttagcgaactacgcccccacatgtctcga

SEQ ID NO: 492783 - DNA, 455 bp, Homo sapiens
cattgcagaaagaaaaggcagtccaatgataattttagagttgttttgtaggatgcaaagaaattggatagtggccactcatacgttgtggtgagatataaatagtagagccactgtggaaaatattcttggcagtttcttataaaactaaacatacatttaacataaactggcatttgacacttgcagttatccctgagaagttaaaacttaacattcacaaatgttacatagcccttcattataatagccaacccggacaactgatgtccttcaaaaagagtgaatggtttagtatgtcccaccatggaatataaatagtaatatgaaggaacaactctatacatgacaaatgcatggacctcaaggaattatgcttgggtggtttggggggcaatctaagttttacaccgtatatttgctttgtaacattttaataataagaaataaatggg

SEQ ID NO: 492784 - DNA, 346 bp, Homo sapiens
agtgcatggcacttcctccattggtgctggtgcttcgagaaggcctagtgcacccctgctgagtgcccacgtcaatcatgcctgtgagcgaggggcgtggctggccgcctgagacctgagctgctgtgaaagcccctgcatcaatcagccagggagtaactgggcgggtttagtggcccctagtgcccactcctcatgcagcagtgtgctggggcgacagctcgtctcccctctcttaagtcacccgtgtcctcaccatgccccactgttgggcctatagtagcacgttagtgagtacctagggcggctcaactcctcccacagcaccagtccacaattgccccga

SEQ ID NO: 492785 - DNA, 199 bp, Homo sapiens
atatcctcatacttcaaggcacatgttccaaagtactataccaaaaatattccttgcttactgtagccagaagtatcctttctggctccatgtgtatagtccctgccttttttttttattgttttattggatacctatagccttcggcttggaaatagggtacctcacaaataactcttctttggaagggaaaagggcc

SEQ ID NO: 492786 - DNA, 675 bp, Homo sapiens
  misc_feature (558)..(558): n is a, c, g, or t
gttggtacttcctagagacttgttatattgttgtgagcaaaatgccaatagtgatacagactatgaagtccaggctgaggttgtctcagatggagatgaagaacttattgggaaccgaagcaaaggtcacttttgttatgtgctagcaaagaagttggaggcattatgctcctgccccagagatctgtggaacattgaacttgagagaaatgatttagggtatctggcagaataaatttctaagcagcaaagtgttcaagatgtaacctggccgcttctaacagcatatggtcctatgcatgggcaaagagatgatctgaaacaggaacttatatttaaaagggaagcagagcataaaagtttagaaaatttgcatcctgaccatgtggtaaaaaagaaaaactaattgtctggggagaattcaagctggctgcagaaatttgcataagaggacctcgatgttaatagccatgacaatggggaaaaatcatcccaggcatctcagagacctttacggcagtcccttccatatttgcccatggacctaggacggatgtntttggggccaagcccagggcttcagctgcctacatattctcaggacactggtccctgtgtccaactggtttagcttcaacgttggctgggccccagatgggttaagccgctgatcgg

SEQ ID NO: 492787 - DNA, 578 bp, Homo sapiens
  misc_feature (404)..(404): n is a, c, g, or t
  misc_feature (413)..(413): n is a, c, g, or t
  misc_feature (488)..(488): n is a, c, g, or t
  misc_feature (525)..(525): n is a, c, g, or t
  misc_feature (531)..(531): n is a, c, g, or t
  misc_feature (569)..(569): n is a, c, g, or t
aggtaagccaaaagcaattcttttcagctttggaacatacttaaggcttctgcgcaggctcgctctcatcagatttctaacctttctaaataacaaggccatactgtgaagactgtaaactctggaagtgactaaaaatgtggtcaggcttctgccttgcacctgtcagtccttaaacctttttggaacaccagactccaggctcagcataaccatgctttcaaagctgtcactggaagacagaaagtgaagattttcttttaagagtccatctagtgtgaattcgaaattcagatatcttcttttttaactgctgtagtgtcagtaaaacacttggcagataataggttcccaggagttctcaaaataagtctgagtgattggggtaatcggctgctcctttngtccctggnctttgtgacttagggaatacctcgttctcttcccctggatcccatgccctgttccaactggggccctgttaaggntgtgtgttcttcccgcaggttggctgggagagcgatnacgttntacaaatttgttctgtgacccagattgccctcttcttncatgggctt

SEQ ID NO: 492788 - DNA, 122 bp, Homo sapiens
  misc_feature (116)..(116): n is a, c, g, or t
gccagcgccgaggacaccaagaaggttttggacagcgtgggcatcgaggcggacaacaaccagctcaacaaggccattagtgagctgaatgaaaaaaacattgaagacgttattgnccagga

SEQ ID NO: 492789 - DNA, 536 bp, Homo sapiens
  misc_feature (245)..(245): n is a, c, g, or t
  misc_feature (263)..(263): n is a, c, g, or t
aatgaactggatagaactgtaaagttaaataacagtagatagacaggtccagtatataataagctaatgaaggaaggcacccccctggataggactcataaccttaatgtgaaggagagccatcttactgatgaggttgaaaacaattcttatttgatttgatacaacagagggctcttcactaactaataggggaaaaccaattgcattcagatgcacatggccaggtcgaatgtataaaatanaatgtgtactctggaaancagtctgcccttgatctcctggaaattgattatctcagggatgccaagatgacaggaaatgttaactgactcccagtgtgacaaggtctacgggacttagaacagggataaaggcatttacagataaagtaaaaagaaacttggaaatcaaaatataaaaagttgtgaatatggatattggcaccaacaataatagtggagaaaaggatggagaataaaaggtaaatggggctgggcgtaatggctcacgtctgtaatcccagcctgatgttg

SEQ ID NO: 492790 - DNA, 347 bp, Homo sapiens
  misc_feature (16)..(16): n is a, c, g, or t
  misc_feature (25)..(25): n is a, c, g, or t
  misc_feature (35)..(36): n is a, c, g, or t
  misc_feature (44)..(44): n is a, c, g, or t
  misc_feature (55)..(55): n is a, c, g, or t
  misc_feature (72)..(72): n is a, c, g, or t
  misc_feature (78)..(78): n is a, c, g, or t
  misc_feature (95)..(95): n is a, c, g, or t
  misc_feature (106)..(106): n is a, c, g, or t
  misc_feature (115)..(115): n is a, c, g, or t
  misc_feature (151)..(151): n is a, c, g, or t
  misc_feature (156)..(156): n is a, c, g, or t
  misc_feature (159)..(160): n is a, c, g, or t
  misc_feature (164)..(165): n is a, c, g, or t
  misc_feature (167)..(167): n is a, c, g, or t
  misc_feature (173)..(173): n is a, c, g, or t
  misc_feature (177)..(177): n is a, c, g, or t
  misc_feature (180)..(180): n is a, c, g, or t
  misc_feature (240)..(240): n is a, c, g, or t
  misc_feature (243)..(243): n is a, c, g, or t
  misc_feature (267)..(267): n is a, c, g, or t
  misc_feature (287)..(287): n is a, c, g, or t
  misc_feature (301)..(301): n is a, c, g, or t
  misc_feature (310)..(310): n is a, c, g, or t
  misc_feature (344)..(344): n is a, c, g, or t
aggcatccccgtgccnatgtccccnggtggtggcnncagatccngtggccggccnggcggacgggaccgggngatacntgtatattacacagtcnggatttcagangatttcaanggtaatcgatttaaaaaagaatattctatacaagcnttttnaannggtnnanggcttnaaangcntgtgttgtgcgcgttggggatgggaggaggggctgaggagcggctcagtgtcacctcccncanccaccggccctgacccgtaatccngacaccgatggaagtcgacntttcatatctttcncgggaaatnaactctgttttaaattggaataaatttgttccgnaat

SEQ ID NO: 492791 - DNA, 548 bp, Homo sapiens
  misc_feature (9)..(9): n is a, c, g, or t
  misc_feature (24)..(24): n is a, c, g, or t
  misc_feature (44)..(44): n is a, c, g, or t
  misc_feature (51)..(51): n is a, c, g, or t
  misc_feature (147)..(147): n is a, c, g, or t
  misc_feature (151)..(151): n is a, c, g, or t
  misc_feature (211)..(211): n is a, c, g, or t
  misc_feature (222)..(223): n is a, c, g, or t
tatgtaccntcaaggccaaagagnaaagcattgaattccaaccngggcaanagaattattattattattttttaagagataggaaatcattttattggttcagggtggagaacagttgggcgatcatagctcactgtaattttgaanaagnggaattcaagtgttccttcctaccttcagccttttaggtagtgggaattaggggtgtgtnccaccaaaacnnggtaatttttctattttttttcaatagatgggtcttgctgtgctgcccaggctggtcttgaactcctgagctcaagcaatccccttgcctcagcttcccaaagtatggggattacgggcgtgagccattgtgcctggcccaaaatttttcaaatatcatccttttaagcttcaaatgttaccaacattggcgaatgcaaccagaggagacataacacataaaacatggggggtttatccacaaggagaattcactatcttgctggtgttaggatctgtccttccagggaggatacgccatgagtcagaagtagatgccactcagc

SEQ ID NO: 492792 - DNA, 670 bp, Homo sapiens
  misc_feature (450)..(450): n is a, c, g, or t
  misc_feature (459)..(459): n is a, c, g, or t
agcggacggggagcgccttccggagagacgcagtcggatggcaacccgggatgggtcgctggtgccagaacgtcgcgcgcgggcagcgcccccggacgtctggcccctcccgcgccggtgccctgctgctgtcctgcttctgttgctgaggtctgcaggttgctggggcgcagggagaagccccggagggcgctgtccactggcatgatccgctgccgacacatgagcgtccagtgtgtccccgaaggactcacctgtccttccagaccgtgcgctcgctctatctcatggcagacctccgatccacgcacagtagcactgtcctctcgaacacacgccaatgtgaaacccaatataccagttttcatgacaggcaaagatcagacccagtatcgctgcactgtggaccttttctctatcggacgcagagactcgccataccctcagggnaaccgcagnaagctcgtggtctcgtgcgagtggagcctggaatgggtcagcagtgtcgggctcgaatggacatcactacatctagtgccggtcacgcattcattgcctctccatgtgggtgtctgacctcgtggcccactgggcctgcatctgggacgtgactgtatatctacttcagatgaggagtggggagatccagtagggattgatccagtatgat

SEQ ID NO: 492793 - DNA, 127 bp, Homo sapiens
ccaggacgtggtcatgcctataatcccagcactttgagaggctaaggcaggaggatcgcttgagcccaggagttctgggctgtagtgcgctatgccgatcgggtgtccgcactaagttcggcatcaa

SEQ ID NO: 492794 - DNA, 230 bp, Homo sapiens
  misc_feature (53)..(53): n is a, c, g, or t
atcgattatattccaagtctctctggacacaaatgaacagtactacagagganaaccctccaagaacaccaggagactgggcatgggggctcaggcctgtcatcctagcactttgagaggctgaggtgggaggattgcttgagtccaagagcctaagaccagcctgggcaacatggcaagaccttctccctactgtaaaaaaagaacagcagaaaattattttaagcttg

SEQ ID NO: 492795 - DNA, 679 bp, Homo sapiens
  misc_feature (360)..(360): n is a, c, g, or t
  misc_feature (669)..(669): n is a, c, g, or t
cgggcccgggtaggacggtcccggactggccgtgatctcagcggtgtccaggtccggcgtgactcgaaaccgccggataggcccgcactggtggagtcggcaagagctgacttacggcgcggcaagtgccggccagtgccagcgagcgcgacgtcgctcgccaagcccccgtctctatggcaaccgagtgcgtctctaggaccgccacggcgcaggcgcccggaggctaagccgctcggaacctagctgcgccacgcagggtaggcgacgcagacgctcccgcgtgacgcacttccggtgcttgccctgcccatccccgtgcggtgggcgtggccatggcgggggcgctccggccggcgncggcccctgggctcccgcccttcgggtcccacagtttccagccgccgctctcctcagtgcccggtggcccaggagggcctgggagcccgaagccgtccccgagtcgctcctaggtcactggcgcgatgcgggccgtcctctcggctgatggtgcgtgcgggcgcggatctcctcccctggtcctccgcaccgtccccgagtcgttctccgctctggcagaacgcgagcgccgtccggttcccgctcccgctggcccagcagccccgggctggactcggcgtagggtccgcacgggatgggctggggctncgcgcccgct

SEQ ID NO: 492796 - DNA, 1315 bp, Homo sapiens
ggacgcgtaggtcgaaccacgcgatcggagcagtgcccgagcgcggtttcatcttaaggttctgcagggcaaggctgtctgggacatggcttggccatggatccagctctcagagctgcaggatgatctagaccttggacatgacaccagcgaggcatctgaaccagctgaagctggacatccatcgcatgcacaagaactgggccctcgcgatgcaacatgacatgacattccccaaagtcaagatgacctccaaaacgcagaatcccacggaactatgtcacaacacactgaacgtgggcatgaccacatacatctgcacatcagaaccgggacaccacgatcgctggcacggtggcacggcagatgcacaacgtatgcggacgagcaagatccatcagatgtaatcacgtgcactgatcgaaactgacccactccaagacacacacacgctacgaacaacatgacacagactccatgagaggatacctggacacgcacaacaccccccagagcgagcaagctacccgatgagaacacacggctgcaccacacaacaccaacacaggaacatcaagcacaccacacggacactgaaccacagcgcaacaaccacagaccacaaccaccaacagacaggacaacacagacaacactgccatacaacgaaacaaataaaagcacacgaacaaagatacacaaagaaagcaaacaatacaaacgagacacacaggcaacaaatccagaagccaatcaccaacacacagtaggcaccgaacaacaacaacaacacagcaacacacccccacaataaccacaacaccccaataaatcacaagaattataccaaccgaaataccagggacatcaaaacgaaaaaacatatacacatgacagaaacatccaccaagaaaacacaacgacagaacacacaccgacacactataaccacgaaaggaacgcaaacaaaaagagagcaaaacaaccaaagagaccaacacagagacaccacacacacaccacaacacgacacaaccagtacagctgaacaaactatcatcacacacaccaaaaaaacaaatcaaccaccacaccaacaaacacaaacaaacaatcaacccaatcaaataactatactatgcaaacacgaacaacacaaccatacaaaacaaccacaccatcacacaaacaccaaaccaacaacaccaacaacacaactataaacacgaaagacacaataaaataatcaaacaataaaacacaataaaacacaacacaccaacaacacacccaacaacaaacaacaaaaacataa

SEQ ID NO: 492797 - DNA, 656 bp, Homo sapiens
  misc_feature (16)..(16): n is a, c, g, or t
ccggggccagcggcgntggggtcggcgctggggtcgtcgtccgggccgggtgggctgcggcgcgcggcaggcgctctggcctggcctggccgccgctgagcagtcggggccggtgggtggcctcgaacgccgggacagaccgacagacggactggccggcggtcccgcgcccccgagcggagcgggcgggacggaaacgtccgggcaagttggggtcggcagggttggaagcccagcgaggctagaggccagtcccaaagtttccaggcatcagggctgcagcccaggagcctcaaggcggcccggcgggcgactggacggccggacaggtcaggtgtctccatgctggcctccccgcctcagggcttcatcccactccgtgggcctgatctccctggggcacctgggatgtccatctgcgttagctggagctactccatggcctgtggcgtgccacacacagcggcatttcggtgtcattaggcacagctggaggtgcaaggaggagggcagcctcatgtccagttccatgtaacttgcttcttctgaataaaggcaatttgctaactttctcgctaaaaggatttggtttctatggcttttaaagcttctccgataaaatacttgcaacaagggaactctctcctcctacactc

SEQ ID NO: 492798 - DNA, 694 bp, Homo sapiens
gaggacccccaacgcgcgtcacacatatatatgataaggggctgtatctggaatatataaataactcttataacacaacaataaggagaaaaataaatcaatttaaaaatgggctaacggtttgaatagacatttctccaaagaagatatgcaaatggctaataagcacatgaaaaaatactcaacattattattcattagggaaatgcaagtcaaaatcacaatgagattccagtttacaatcactaggatggctacaataaaaagatggacaagaacaagtgtcggtgaggatgtagagaaactggtagaaatttaaattgttggtgggaatgtaaatggtgcacctgctgtgaaaaacagtttggcagtacctcaaaaagttaaacgtagagtgaccatatgacccaggaatgccactcctaggtatttacccaagagaaatgaaaacgtacatacacacaaaaacttgtacaccaatgttcatagcaacattatttgtaatagccaaaaagtggaaacaacccaaatgtctaccaactgatgaatgggaaataaaatgtggtctgtccacgcaatggaacattattagactctaaaaagaaatgaagtactcacacatgccacaacatggatgagccttgaaaacttgctaagtgaaagaagccggtgcaaagccccatatgtctgctgc

SEQ ID NO: 492799 - DNA, 229 bp, Homo sapiens
tagctctacgactcccgtaccctacactttgcctcgtgttcacgtgcggcacgggcatgcgcgcctgcggctccggctcagcgcctgccccatctgccgccagcccatccgcgaccgcatccagatcttcgtgtgagccgcgccgtccgccgcgcccgagctgccttcgcgtgcccccgccctgtgttttataaaaagaaagattctcggaaaactacagacaacaacg

SEQ ID NO: 492800 - DNA, 3599 bp, Homo sapiens
  misc_feature (360)..(360): n is a, c, g, or t
cgggcccgggtaggacggtcccggactggccgtgatctcagcggtgtccaggtccggcgtgactcgaaaccgccggataggcccgcactggtggagtcggcaagagctgacttacggcgcggcaagtgccggccagtgccagcgagcgcgacgtcgctcgccaagcccccgtctctatggcaaccgagtgcgtctctaggaccgccacggcgcaggcgcccggaggctaagccgctcggaacctagctgcgccacgcagggtaggcgacgcagacgctcccgcgtgacgcacttccggtgcttgccctgcccatccccgtgcggtgggcgtggccatggcgggggcgctccggccggcgncggcccctgggctcccgcccttcgggtcccacagtttccagccgccgctctcctcagtgcccggtggcccaggagggcctgggagcccgaagccgtccccgagtcgctcctaggtcactggcgcgatgcgggccgtcctctcggctgatgggttggaagcccagcgaggctagaggccagtcccaaagtttccaggcatcagggctgcagcccaggagcctcaaggcggcccggcgggcgactggacggccggacaggtcccgagcagccccgcccaacatggacccagacccccaggcgggcgtgcaggtgggcatgcgggtggtgcgcggcgtggactggaagtggggccagcaggacggcggcgagggcggcgtgggcacggtggtggagcttggccgccacggcagcccctcgacacccgaccgcacagtggtcgtgcagtgggaccagggcacgcgcaccaactaccgcgccggctaccagggcgcgcacgacctgctgctgtacgacaacgcccagatcggcgtccggcaccccaacatcatctgtgactgctgcaagaagcacgggctgcgggggatgcgctggaagtgccgtgtgtgcctggactacgacctctgcacgcagtgctacatgcacaacaagcatgagctcgcccacgccttcgaccgctacgagaccgctcactcgcgccctgtcacactgagtccccgccagggcctcccgaggatcccactaaggggcatcttccagggagcgaaggtggtgcgaggccccgactgggagtggggctcacaggatggaggggaagggaaaccgggccgtgtggtggacatccgtggctgggatgtggagacaggccggagtgtggccagcgtgacgtgggctgatggtaccaccaatgtgtaccgtgtgggccacaagggcaaggtggacctcaagtgtgtgggcgaggcagcgggcggcttctactacaaggaccacctcccaaggctcggcaagccggcggagctgcagcgcagggtgagtgctgacagccagcccttccagcacggggacaaggtcaagtgtctgctggacactgatgtcctgcgggagatgcaggaaggccacggcggctggaaccccaggatggcggagtttatcggacagacgggcaccgtgcatcgtatcacggaccgcggggacgtgcgcgtgcagttcaaccacgagacgcgctggaccttccaccccggggcgctcaccaagcaccactccttctgggtgggcgacgtggtccgggtcatcggcgaccttgacacagtgaagcggctgcaggctgggcatggcgagtggacggacgacatggcccctgccctgggccgcgtcgggaaggtggtgaaagtgtttggagacgggaacctgcgtgtagcagtcgctggtcagcggtggaccttcagcccctcctgcctggtggcctaccggcccgaggaggatgccaacctggacgtggccgagcgcgcccgggagaacaaaagctcactgagcgtggccctggacaagcttcgggcccagaagagtgacccagagcacccgggaaggctggtggtggaggtggcgctgggtaacgcagcccgggctctggacctgctgcggaggcgcccagagcaggtggacaccaagaaccaaggcaggaccgctctgcaagtggctgcctacctgggccaggtggagttgatacggctgctgctacaagccagggcgggcgtggacctgccggacgacgagggcaacacggcactgcactacgcggccctggggaaccagcccgaggccaccagggtgctcctgagtgctgggtgccgggcggacgccatcaacagcacccagagcacagcactgcacgtggccgtgcagaggggcttcctggaggtggtgcgggccctgtgtgagcgcggctgtgacgtcaacctgcccgacgcccactcggacacgcccctgcactccgccatctcggcgggcactggagccagcggcattgtcgaggtcctcacggaggtgccaaacatcgatgttaccgccaccaacagccaggtttcaccctgctgcaccatgcctccctcaagggtcacgcgctagctgtgagaaagattctggctcgggcgcggcagctggtggacgccaagaaggaggacggcttcacggcgctgcatctggctgccctcaacaaccaccgcgaggtggcccagatcctcatccgggagggccgctgtgacgtgaacgtgcgcaaccggaagctgcagtccccgctgcatctcgccgtgcaacaggcccacgtggggctggtgccgctactggtggacgctgggtgcagtgtcaacgccgaggacgaggagggggacacagccctgcacgtggcgctgcagcgtcatcagctgctgcccctggtggctgatggggccgggggggacccagggcccttgcagctgctgtccaggctacaggcctcgggcctccccggcagcgcggagctgacggtgggcgcggcggtcgcctgcttcctggcgctggagggcgccgacgtgagctacaccaaccaccgcggtcggagcccgctggacctggccgccgagggtcgcgtgctcaaggcccttcagggctgcgcccagcgcttccgggagcggcaggcgggcgggggcgcggccccgggccccaggcaaacgctcgggacccccaacaccgtgacgaacctgcacgtgggcgccgcgccggggcccgaggccgctgagtgcctggtgtgctccgagctggcgctgctggtgctgttctcgccgtgccagcaccgcaccgtgtgtgaggagtgcgcgcgcaggatgaagaagtgcatcaggtgccaggtggtcgtcagcaagaaactgcgcccagacggctctgaggtggcgagcgccgcccccgcccccggcccgccgcgccagctggtggaggagctgcagagccgctaccggcagatggaggaacgcatcacctgccccatctgcatcgacagccacatccgcctcgtgttccagtgcggccacggcgcatgcgccccctgcggctccgcgctcagcgcctgccccatctgccgccagcccatccgcgaccgcatccagatcttcgtgtgagccgcgccgtccgccgcgcccgagctgccttcgcgtgcccccgccctgtgttttataaaaagaaagattctcggaaaactacagacaacaacg

SEQ ID NO: 492801 - DNA, 3490 bp, Homo sapiens
  misc_feature (360)..(360): n is a, c, g, or t
cgggcccgggtaggacggtcccggactggccgtgatctcagcggtgtccaggtccggcgtgactcgaaaccgccggataggcccgcactggtggagtcggcaagagctgacttacggcgcggcaagtgccggccagtgccagcgagcgcgacgtcgctcgccaagcccccgtctctatggcaaccgagtgcgtctctaggaccgccacggcgcaggcgcccggaggctaagccgctcggaacctagctgcgccacgcagggtaggcgacgcagacgctcccgcgtgacgcacttccggtgcttgccctgcccatccccgtgcggtgggcgtggccatggcgggggcgctccggccggcgncggcccctgggctcccgcccttcgggtcccacagtttccagccgccgctctcctcagtgcccggtggcccaggagggcctgggagcccgaagccgtccccgagtcgctcctaggtcactggcgcgatgcgggccgtcctctcggctgatgggttggaagcccagcgaggctagaggccagtcccaaagtttccaggcatcagggctgcagcccaggagcctcaaggcggcccggcgggcgactggacggccggacaggtcccgagcagccccgcccaacatggacccagacccccaggcgggcgtgcaggtgggcatgcgggtggtgcgcggcgtggactggaagtggggccagcaggacggcggcgagggcggcgtgggcacggtggtggagcttggccgccacggcagcccctcgacacccgaccgcacagtggtcgtgcagtgggaccagggcacgcgcaccaactaccgcgccggctaccagggcgcgcacgacctgctgctgtacgacaacgcccagatcggcgtccggcaccccaacatcatctgtgactgctgcaagaagcacgggctgcgggggatgcgctggaagtgccgtgtgtgcctggactacgacctctgcacgcagtgctacatgcacaacaagcatgagctcgcccacgccttcgaccgctacgagaccgctcactcgcgccctgtcacactgagtccccgccagggcctcccgaggatcccactaaggggcatcttccagggagcgaaggtggtgcgaggccccgactgggagtggggctcacaggatggaggggaagggaaaccgggccgtgtggtggacatccgtggctgggatgtggagacaggccggagtgtggccagcgtgacgtgggctgatggtaccaccaatgtgtaccgtgtgggccacaagggcaaggtggacctcaagtgtgtgggcgaggcagcgggcggcttctactacaaggaccacctcccaaggctcggcaagccggcggagctgcagcgcagggtgagtgctgacagccagcccttccagcacggggacaaggtcaagtgtctgctggacactgatgtcctgcgggagatgcaggaaggccacggcggctggaaccccaggatggcggacaccactccttctgggtgggcgacgtggtccgggtcatcggcgaccttgacacagtgaagcggctgcaggctgggcatggcgagtggacggacgacatggcccctgccctgggccgcgtcgggaaggtggtgaaagtgtttggagacgggaacctgcgtgtagcagtcgctggtcagcggtggaccttcagcccctcctgcctggtggcctaccggcccgaggaggatgccaacctggacgtggccgagcgcgcccgggagaacaaaagctcactgagcgtggccctggacaagcttcgggcccagaagagtgacccagagcacccgggaaggctggtggtggaggtggcgctgggtaacgcagcccgggctctggacctgctgcggaggcgcccagagcaggtggacaccaagaaccaaggcaggaccgctctgcaagtggctgcctacctgggccaggtggagttgatacggctgctgctacaagccagggcgggcgtggacctgccggacgacgagggcaacacggcactgcactacgcggccctggggaaccagcccgaggccaccagggtgctcctgagtgctgggtgccgggcggacgccatcaacagcacccagagcacagcactgcacgtggccgtgcagaggggcttcctggaggtggtgcgggccctgtgtgagcgcggctgtgacgtcaacctgcccgacgcccactcggacacgcccctgcactccgccatctcggcgggcactggagccagcggcattgtcgaggtcctcacggaggtgccaaacatcgatgttaccgccaccaacagccaggtttcaccctgctgcaccatgcctccctcaagggtcacgcgctagctgtgagaaagattctggctcgggcgcggcagctggtggacgccaagaaggaggacggcttcacggcgctgcatctggctgccctcaacaaccaccgcgaggtggcccagatcctcatccgggagggccgctgtgacgtgaacgtgcgcaaccggaagctgcagtccccgctgcatctcgccgtgcaacaggcccacgtggggctggtgccgctactggtggacgctgggtgcagtgtcaacgccgaggacgaggagggggacacagccctgcacgtggcgctgcagcgtcatcagctgctgcccctggtggctgatggggccgggggggacccagggcccttgcagctgctgtccaggctacaggcctcgggcctccccggcagcgcggagctgacggtgggcgcggcggtcgcctgcttcctggcgctggagggcgccgacgtgagctacaccaaccaccgcggtcggagcccgctggacctggccgccgagggtcgcgtgctcaaggcccttcagggctgcgcccagcgcttccgggagcggcaggcgggcgggggcgcggccccgggccccaggcaaacgctcgggacccccaacaccgtgacgaacctgcacgtgggcgccgcgccggggcccgaggccgctgagtgcctggtgtgctccgagctggcgctgctggtgctgttctcgccgtgccagcaccgcaccgtgtgtgaggagtgcgcgcgcaggatgaagaagtgcatcaggtgccaggtggtcgtcagcaagaaactgcgcccagacggctctgaggtggcgagcgccgcccccgcccccggcccgccgcgccagctggtggaggagctgcagagccgctaccggcagatggaggaacgcatcacctgccccatctgcatcgacagccacatccgcctcgtgttccagtgcggccacggcgcatgcgccccctgcggctccgcgctcagcgcctgccccatctgccgccagcccatccgcgaccgcatccagatcttcgtgtgagccgcgccgtccgccgcgcccgagctgccttcgcgtgcccccgccctgtgttttataaaaagaaagattctcggaaaactacagacaacaacg

SEQ ID NO: 492802 - DNA, 141 bp, Homo sapiens
gtgcgtatagtccgcctggataccagaagcaccagacgaattcccttagcaccagcacaattcccttagcaccagcacgaataccttagcacagcacgaatacccttagcaccagcacaaagcaccagcacgaataccctt

SEQ ID NO: 492803 - DNA, 881 bp, Homo sapiens
  misc_feature (17)..(17): n is a, c, g, or t
gcgaagaagaaaagaanactaccctcctccgtcgctggttctaccagtgtcgttttatatctcttttgtacgtacctttgggcctgttttctaagtcttttagcgtaacatctgccgcgccctcatatcagttcccggttttgtatctccaggtaaccttcgatatagtgctttataactgcattgtgtcctgtacaataggtggcatgtgcacgaccaacgggcttttcttagtgaacccccccgcccgcctcctggtatttgtacattaagccccaacatcttgctccttcctcgttttaccagcttaccttttctcccccaagatgtcccccttgcaagcaaataaaaacggcggatcacccagaaggacttcccccactttcttgtgccctccctcaacaattctttatctcattattccccgtctatctgaatcactcatatattttaagcgccacacaattaccctttgtttgtcagaccacctcatataatcactcggcactctataggaacccacttccaaaaccctcctccgataatatattgattagaatcactcgggaacaaagaactcaaaatttcataatgccccgagggctccaccaacctcctcttaccaatctttccccctcctggaagtgaattctccctccccaccaccttggtggctgtcccaatagcagccctcaccttgtaacatttttttacccaccacccttcgatttcttcaaaactcatggacacccccgcccctccttttaaaaccgtacaatcatgcctttttcatataaaagactccccctctttcaagaaaataacattttgggacacacagttgtccccgtttggaaaacaaaaaaacgccccacaaaaca

SEQ ID NO: 492804 - DNA, 3641 bp, Homo sapiens
  misc_feature (360)..(360): n is a, c, g, or t
cgggcccgggtaggacggtcccggactggccgtgatctcagcggtgtccaggtccggcgtgactcgaaaccgccggataggcccgcactggtggagtcggcaagagctgacttacggcgcggcaagtgccggccagtgccagcgagcgcgacgtcgctcgccaagcccccgtctctatggcaaccgagtgcgtctctaggaccgccacggcgcaggcgcccggaggctaagccgctcggaacctagctgcgccacgcagggtaggcgacgcagacgctcccgcgtgacgcacttccggtgcttgccctgcccatccccgtgcggtgggcgtggccatggcgggggcgctccggccggcgncggcccctgggctcccgcccttcgggtcccacagtttccagccgccgctctcctcagtgcccggtggcccaggagggcctgggagcccgaagccgtccccgagtcgctcctaggtcactggcgcgatgcgggccgtcctctcggctgatgggttggaagcccagcgaggctagaggccagtcccaaagtttccaggcatcagggctgcagcccaggagcctcaaggcggcccggcgggcgactggacggccggacaggtcccgagcagcccggcccaccacggacccctctgcccacaggtcccgagcagccccgcccaacatggacccagacccccaggcgggcgtgcaggtgggcatgcgggtggtgcgcggcgtggactggaagtggggccagcaggacggcggcgagggcggcgtgggcacggtggtggagcttggccgccacggcagcccctcgacacccgaccgcacagtggtcgtgcagtgggaccagggcacgcgcaccaactaccgcgccggctaccagggcgcgcacgacctgctgctgtacgacaacgcccagatcggcgtccggcaccccaacatcatctgtgactgctgcaagaagcacgggctgcgggggatgcgctggaagtgccgtgtgtgcctggactacgacctctgcacgcagtgctacatgcacaacaagcatgagctcgcccacgccttcgaccgctacgagaccgctcactcgcgccctgtcacactgagtccccgccagggcctcccgaggatcccactaaggggcatcttccagggagcgaaggtggtgcgaggccccgactgggagtggggctcacaggatggaggggaagggaaaccgggccgtgtggtggacatccgtggctgggatgtggagacaggccggagtgtggccagcgtgacgtgggctgatggtaccaccaatgtgtaccgtgtgggccacaagggcaaggtggacctcaagtgtgtgggcgaggcagcgggcggcttctactacaaggaccacctcccaaggctcggcaagccggcggagctgcagcgcagggtgagtgctgacagccagcccttccagcacggggacaaggtcaagtgtctgctggacactgatgtcctgcgggagatgcaggaaggccacggcggctggaaccccaggatggcggagtttatcggacagacgggcaccgtgcatcgtatcacggaccgcggggacgtgcgcgtgcagttcaaccacgagacgcgctggaccttccaccccggggcgctcaccaagcaccactccttctgggtgggcgacgtggtccgggtcatcggcgaccttgacacagtgaagcggctgcaggctgggcatggcgagtggacggacgacatggcccctgccctgggccgcgtcgggaaggtggtgaaagtgtttggagacgggaacctgcgtgtagcagtcgctggtcagcggtggaccttcagcccctcctgcctggtggcctaccggcccgaggaggatgccaacctggacgtggccgagcgcgcccgggagaacaaaagctcactgagcgtggccctggacaagcttcgggcccagaagagtgacccagagcacccgggaaggctggtggtggaggtggcgctgggtaacgcagcccgggctctggacctgctgcggaggcgcccagagcaggtggacaccaagaaccaaggcaggaccgctctgcaagtggctgcctacctgggccaggtggagttgatacggctgctgctacaagccagggcgggcgtggacctgccggacgacgagggcaacacggcactgcactacgcggccctggggaaccagcccgaggccaccagggtgctcctgagtgctgggtgccgggcggacgccatcaacagcacccagagcacagcactgcacgtggccgtgcagaggggcttcctggaggtggtgcgggccctgtgtgagcgcggctgtgacgtcaacctgcccgacgcccactcggacacgcccctgcactccgccatctcggcgggcactggagccagcggcattgtcgaggtcctcacggaggtgccaaacatcgatgttaccgccaccaacagccaggtttcaccctgctgcaccatgcctccctcaagggtcacgcgctagctgtgagaaagattctggctcgggcgcggcagctggtggacgccaagaaggaggacggcttcacggcgctgcatctggctgccctcaacaaccaccgcgaggtggcccagatcctcatccgggagggccgctgtgacgtgaacgtgcgcaaccggaagctgcagtccccgctgcatctcgccgtgcaacaggcccacgtggggctggtgccgctactggtggacgctgggtgcagtgtcaacgccgaggacgaggagggggacacagccctgcacgtggcgctgcagcgtcatcagctgctgcccctggtggctgatggggccgggggggacccagggcccttgcagctgctgtccaggctacaggcctcgggcctccccggcagcgcggagctgacggtgggcgcggcggtcgcctgcttcctggcgctggagggcgccgacgtgagctacaccaaccaccgcggtcggagcccgctggacctggccgccgagggtcgcgtgctcaaggcccttcagggctgcgcccagcgcttccgggagcggcaggcgggcgggggcgcggccccgggccccaggcaaacgctcgggacccccaacaccgtgacgaacctgcacgtgggcgccgcgccggggcccgaggccgctgagtgcctggtgtgctccgagctggcgctgctggtgctgttctcgccgtgccagcaccgcaccgtgtgtgaggagtgcgcgcgcaggatgaagaagtgcatcaggtgccaggtggtcgtcagcaagaaactgcgcccagacggctctgaggtggcgagcgccgcccccgcccccggcccgccgcgccagctggtggaggagctgcagagccgctaccggcagatggaggaacgcatcacctgccccatctgcatcgacagccacatccgcctcgtgttccagtgcggccacggcgcatgcgccccctgcggctccgcgctcagcgcctgccccatctgccgccagcccatccgcgaccgcatccagatcttcgtgtgagccgcgccgtccgccgcgcccgagctgccttcgcgtgcccccgccctgtgttttataaaaagaaagattctcggaaaactacagacaacaacg

SEQ ID NO: 492805 - DNA, 3354 bp, Homo sapiens
  misc_feature (16)..(16): n is a, c, g, or t
ccggggccagcggcgntggggtcggcgctggggtcgtcgtccgggccgggtgggctgcggcgcgcggcaggcgctctggcctggcctggccgccgctgagcagtcggggccggtgggtggcctcgaacgccgggacagaccgacagacggactggccggcggtcccgcgcccccgagcggagcgggcgggacggaaacgtccgggcaagttggggtcggcagggttggaagcccagcgaggctagaggccagtcccaaagtttccaggcatcagggctgcagcccaggagcctcaaggcggcccggcgggcgactggacggccggacaggtcccgagcagcccggcccaccacggacccctctgcccacaggtcccgagcagccccgcccaacatggacccagacccccaggcgggcgtgcaggtgggcatgcgggtggtgcgcggcgtggactggaagtggggccagcaggacggcggcgagggcggcgtgggcacggtggtggagcttggccgccacggcagcccctcgacacccgaccgcacagtggtcgtgcagtgggaccagggcacgcgcaccaactaccgcgccggctaccagggcgcgcacgacctgctgctgtacgacaacgtacaagatcggcgtccggcaccccaacatcatctgtgactgctgcaagaagcacgggctgcgggggatgcgctggaagtgccgtgtgtgcctggactacgacctctgcacgcagtgctacatgcacaacaagcatgagctcgcccacgccttcgaccgctacgagaccgctcactcgcgccctgtcacactgagtccccgccagggcctcccgaggatcccactaaggggcatcttccagggagcgaaggtggtgcgaggccccgactgggagtggggctcacaggatggaggggaagggaaaccgggccgtgtggtggacatccgtggctgggatgtggagacaggccggagtgtggccagcgtgacgtgggctgatggtaccaccaatgtgtaccgtgtgggccacaagggcaaggtggacctcaagtgtgtgggcgaggcagcgggcggcttctactacaaggaccacctcccaaggctcggcaagccggcggagctgcagcgcagggtgagtgctgacagccagcccttccagcacggggacaaggtcaagtgtctgctggacactgatgtcctgcgggagatgcaggaaggccacggcggctggaaccccaggatggcggagtttatcggacagacgggcaccgtgcatcgtatcacggaccgcggggacgtgcgcgtgcagttcaaccacgagacgcgctggaccttccaccccggggcgctcaccaagcaccactccttctgggtgggcgacgtggtccgggtcatcggcgaccttgacacagtgaagcggctgcaggctgggcatggcgagtggacggacgacatggcccctgccctgggccgcgtcgggaaggtggtgaaagtgtttggagacgggaacctgcgtgtagcagtcgctggtcagcggtggaccttcagcccctcctgcctggtggcctaccggcccgaggaggatgccaacctggacgtggccgagcgcgcccgggagaacaaaagctcactgagcgtggccctggacaagcttcgggcccagaagagtgacccagagcacccgggaaggctggtggtggaggtggcgctgggtaacgcagcccgggctctggacctgctgcggaggcgcccagagcaggtggacaccaagaaccaaggcaggaccgctctgcaagtggctgcctacctgggccaggtggagttgatacggctgctgctacaagccagggcgggcgtggacctgccggacgacgagggcaacacggcactgcactacgcggccctggggaaccagcccgaggccaccagggtgctcctgagtgctgggtgccgggcggacgccatcaacagcacccagagcacagcactgcacgtggccgtgcagaggggcttcctggaggtggtgcgggccctgtgtgagcgcggctgtgacgtcaacctgcccgacgcccactcggacacgcccctgcactccgccatctcggcgggcactggagccagcggcattgtcgaggtcctcacggaggtgccaaacatcgatgttaccgccaccaacagccaggtttcaccctgctgcaccatgcctccctcaagggtcacgcgctagctgtgagaaagattctggctcgggcgcggcagctggtggacgccaagaaggaggacggcttcacggcgctgcatctggctgccctcaacaaccaccgcgaggtggcccagatcctcatccgggagggccgctgtgacgtgaacgtgcgcaaccggaagctgcagtccccgctgcatctcgccgtgcaacaggcccacgtggggctggtgccgctactggtggacgctgggtgcagtgtcaacgccgaggacgaggagggggacacagccctgcacgtggcgctgcagcgtcatcagctgctgcccctggtggctgatggggccgggggggacccagggcccttgcagctgctgtccaggctacaggcctcgggcctccccggcagcgcggagctgacggtgggcgcggcggtcgcctgcttcctggcgctggagggcgccgacgtgagctacaccaaccaccgcggtcggagcccgctggacctggccgccgagggtcgcgtgctcaaggcccttcagggctgcgcccagcgcttccgggagcggcaggcgggcgggggcgcggccccgggccccaggcaaacgctcgggacccccaacaccgtgacgaacctgcacgtgggcgccgcgccggggcccgaggccgctgagtgcctggtgtgctccgagctggcgctgctggtgctgttctcgccgtgccagcaccgcaccgtgtgtgaggagtgcgcgcgcaggatgaagaagtgcatcaggtgccaggtggtcgtcagcaagaaactgcgcccagacggctctgaggtggcgagcgccgcccccgcccccggcccgccgcgccagctggtggaggagctgcagagccgctaccggcagatggaggaacgcatcacctgccccatctgcatcgacagccacatccgcctcgtgttccagtgcggccacggcgcatgcgccccctgcggctccgcgctcagcgcctgccccatctgccgccagcccatccgcgaccgcatccagatcttcgtgtgagccgcgccgtccgccgcgcccgagctgccttcgcgtgcccccgccctgtgttttataaaaagaaagattctcggaaaactacagacaacaacg

SEQ ID NO: 492806 - DNA, 81 bp, Homo sapiens
gctgaggacactgccgtgtattactgtgcgaggctgagttcagctacatctgtacccccgttcgacttctggggccaggga

SEQ ID NO: 492807 - DNA, 3291 bp, Homo sapiens
  misc_feature (16)..(16): n is a, c, g, or t
ccggggccagcggcgntggggtcggcgctggggtcgtcgtccgggccgggtgggctgcggcgcgcggcaggcgctctggcctggcctggccgccgctgagcagtcggggccggtgggtggcctcgaacgccgggacagaccgacagacggactggccggcggtcccgcgcccccgagcggagcgggcgggacggaaacgtccgggcaagttggggtcggcagggttggaagcccagcgaggctagaggccagtcccaaagtttccaggcatcagggctgcagcccaggagcctcaaggcggcccggcgggcgactggacggccggacaggtcccgagcagccccgcccaacatggacccagacccccaggcgggcgtgcaggtgggcatgcgggtggtgcgcggcgtggactggaagtggggccagcaggacggcggcgagggcggcgtgggcacggtggtggagcttggccgccacggcagcccctcgacacccgaccgcacagtggtcgtgcagtgggaccagggcacgcgcaccaactaccgcgccggctaccagggcgcgcacgacctgctgctgcgtccggcaccccaacatcatctgtgactgctgcaagaagcacgggctgcgggggatgcgctggaagtgccgtgtgtgcctggactacgacctctgcacgcagtgctacatgcacaacaagcatgagctcgcccacgccttcgaccgctacgagaccgctcactcgcgccctgtcacactgagtccccgccagggcctcccgaggatcccactaaggggcatcttccagggagcgaaggtggtgcgaggccccgactgggagtggggctcacaggatggaggggaagggaaaccgggccgtgtggtggacatccgtggctgggatgtggagacaggccggagtgtggccagcgtgacgtgggctgatggtaccaccaatgtgtaccgtgtgggccacaagggcaaggtggacctcaagtgtgtgggcgaggcagcgggcggcttctactacaaggaccacctcccaaggctcggcaagccggcggagctgcagcgcagggtgagtgctgacagccagcccttccagcacggggacaaggtcaagtgtctgctggacactgatgtcctgcgggagatgcaggaaggccacggcggctggaaccccaggatggcggagtttatcggacagacgggcaccgtgcatcgtatcacggaccgcggggacgtgcgcgtgcagttcaaccacgagacgcgctggaccttccaccccggggcgctcaccaagcaccactccttctgggtgggcgacgtggtccgggtcatcggcgaccttgacacagtgaagcggctgcaggctgggcatggcgagtggacggacgacatggcccctgccctgggccgcgtcgggaaggtggtgaaagtgtttggagacgggaacctgcgtgtagcagtcgctggtcagcggtggaccttcagcccctcctgcctggtggcctaccggcccgaggaggatgccaacctggacgtggccgagcgcgcccgggagaacaaaagctcactgagcgtggccctggacaagcttcgggcccagaagagtgacccagagcacccgggaaggctggtggtggaggtggcgctgggtaacgcagcccgggctctggacctgctgcggaggcgcccagagcaggtggacaccaagaaccaaggcaggaccgctctgcaagtggctgcctacctgggccaggtggagttgatacggctgctgctacaagccagggcgggcgtggacctgccggacgacgagggcaacacggcactgcactacgcggccctggggaaccagcccgaggccaccagggtgctcctgagtgctgggtgccgggcggacgccatcaacagcacccagagcacagcactgcacgtggccgtgcagaggggcttcctggaggtggtgcgggccctgtgtgagcgcggctgtgacgtcaacctgcccgacgcccactcggacacgcccctgcactccgccatctcggcgggcactggagccagcggcattgtcgaggtcctcacggaggtgccaaacatcgatgttaccgccaccaacagccaggtttcaccctgctgcaccatgcctccctcaagggtcacgcgctagctgtgagaaagattctggctcgggcgcggcagctggtggacgccaagaaggaggacggcttcacggcgctgcatctggctgccctcaacaaccaccgcgaggtggcccagatcctcatccgggagggccgctgtgacgtgaacgtgcgcaaccggaagctgcagtccccgctgcatctcgccgtgcaacaggcccacgtggggctggtgccgctactggtggacgctgggtgcagtgtcaacgccgaggacgaggagggggacacagccctgcacgtggcgctgcagcgtcatcagctgctgcccctggtggctgatggggccgggggggacccagggcccttgcagctgctgtccaggctacaggcctcgggcctccccggcagcgcggagctgacggtgggcgcggcggtcgcctgcttcctggcgctggagggcgccgacgtgagctacaccaaccaccgcggtcggagcccgctggacctggccgccgagggtcgcgtgctcaaggcccttcagggctgcgcccagcgcttccgggagcggcaggcgggcgggggcgcggccccgggccccaggcaaacgctcgggacccccaacaccgtgacgaacctgcacgtgggcgccgcgccggggcccgaggccgctgagtgcctggtgtgctccgagctggcgctgctggtgctgttctcgccgtgccagcaccgcaccgtgtgtgaggagtgcgcgcgcaggatgaagaagtgcatcaggtgccaggtggtcgtcagcaagaaactgcgcccagacggctctgaggtggcgagcgccgcccccgcccccggcccgccgcgccagctggtggaggagctgcagagccgctaccggcagatggaggaacgcatcacctgccccatctgcatcgacagccacatccgcctcgtgttccagtgcggccacggcgcatgcgccccctgcggctccgcgctcagcgcctgccccatctgccgccagcccatccgcgaccgcatccagatcttcgtgtgagccgcgccgtccgccgcgcccgagctgccttcgcgtgcccccgccctgtgttttataaaaagaaagattctcggaaaactacagacaacaacg

SEQ ID NO: 492808 - DNA, 245 bp, Homo sapiens
  misc_feature (191)..(191): n is a, c, g, or t
  misc_feature (226)..(226): n is a, c, g, or t
  misc_feature (238)..(238): n is a, c, g, or t
atgaatgagagtgatctgggtatacggattgtgtatccggacacttagactgaagtatatcagctgaaggagctttgggctgagactatgggtttattagatatagaattaagtcatctgcaacggagacgtagtttgacttcccgtcttcctatttgaataccctgttatttctctcgtcttgcctgacntgccctggcccaggacttccaggtactatgttganataggagtggtngggagac

SEQ ID NO: 492809 - DNA, 852 bp, Homo sapiens
gagtgaggcgtcgtccgtactggaggctagctcttgtcgcggcgcggcgagataacatcgtttttccaatctgtccgggttgccgccacccaagaagagccagaatgtcaggatgcgtgaacagccagtttgaggatgaccccttcttctctgagtccattctggcactctcgagaaaatatgcgaagatgataagaagttttgctgaacccttgtggaaagagattgctcagtatctctgatggtagagggagagctcataatcgtacgaggacataatgatggtgaagatgcttgtgatcatacagatgtcagttctttccagacaattggaccaaatggtgtcaaatatgagaaattatatgcagaatttagaaagaaagttcggtcaactttcagtggatccaaatgggctttcatttgtgtcttcctcagttatgattattccaaaaataggagatgaacgcgcaaaggtttttcaggctcaaatcaaactcgtcgaaggtcaggaggaataaaggaaaccaggaaaagcaatgagagattctgacagtggactaggagaaaaatggtattggtcatcatatcatgaccgagctcatgtcatttacaaagtcaagacacagaagactgtcgatgcagaggtcacccggagttcatccatatgaatgaagcgaatgctcatgctgatgaggagtggcaaacgagggtggaattcaaaccgggggacaaattaggaaaactagatggaggtgggctggaatctgtggccggagataagagggaacttcaaggcgcatggatgagagccatggtggacacaaggttgtagaaaaaggtttgaaaaaaaag

SEQ ID NO: 492810 - DNA, 3383 bp, Homo sapiens
  misc_feature (360)..(360): n is a, c, g, or t
cgggcccgggtaggacggtcccggactggccgtgatctcagcggtgtccaggtccggcgtgactcgaaaccgccggataggcccgcactggtggagtcggcaagagctgacttacggcgcggcaagtgccggccagtgccagcgagcgcgacgtcgctcgccaagcccccgtctctatggcaaccgagtgcgtctctaggaccgccacggcgcaggcgcccggaggctaagccgctcggaacctagctgcgccacgcagggtaggcgacgcagacgctcccgcgtgacgcacttccggtgcttgccctgcccatccccgtgcggtgggcgtggccatggcgggggcgctccggccggcgncggcccctgggctcccgcccttcgggtcccacagtttccagccgccgctctcctcagtgcccggtggcccaggagggcctgggagcccgaagccgtccccgagtcgctcctaggtcactggcgcgatgcgggccgtcctctcggctgatgggttggaagcccagcgaggctagaggccagtcccaaagtttccaggcatcagggctgcagcccaggagcctcaaggcggcccggcgggcgactggacggccggacaggtcccgagcagccccgcccaacatggacccagacccccaggcgggcgtgcagggcgtccggcaccccaacatcatctgtgactgctgcaagaagcacgggctgcgggggatgcgctggaagtgccgtgtgtgcctggactacgacctctgcacgcagtgctacatgcacaacaagcatgagctcgcccacgccttcgaccgctacgagaccgctcactcgcgccctgtcacactgagtccccgccagggcctcccgaggatcccactaaggggcatcttccagggagcgaaggtggtgcgaggccccgactgggagtggggctcacaggatggaggggaagggaaaccgggccgtgtggtggacatccgtggctgggatgtggagacaggccggagtgtggccagcgtgacgtgggctgatggtaccaccaatgtgtaccgtgtgggccacaagggcaaggtggacctcaagtgtgtgggcgaggcagcgggcggcttctactacaaggaccacctcccaaggctcggcaagccggcggagctgcagcgcagggtgagtgctgacagccagcccttccagcacggggacaaggtcaagtgtctgctggacactgatgtcctgcgggagatgcaggaaggccacggcggctggaaccccaggatggcggagtttatcggacagacgggcaccgtgcatcgtatcacggaccgcggggacgtgcgcgtgcagttcaaccacgagacgcgctggaccttccaccccggggcgctcaccaagcaccactccttctgggtgggcgacgtggtccgggtcatcggcgaccttgacacagtgaagcggctgcaggctgggcatggcgagtggacggacgacatggcccctgccctgggccgcgtcgggaaggtggtgaaagtgtttggagacgggaacctgcgtgtagcagtcgctggtcagcggtggaccttcagcccctcctgcctggtggcctaccggcccgaggaggatgccaacctggacgtggccgagcgcgcccgggagaacaaaagctcactgagcgtggccctggacaagcttcgggcccagaagagtgacccagagcacccgggaaggctggtggtggaggtggcgctgggtaacgcagcccgggctctggacctgctgcggaggcgcccagagcaggtggacaccaagaaccaaggcaggaccgctctgcaagtggctgcctacctgggccaggtggagttgatacggctgctgctacaagccagggcgggcgtggacctgccggacgacgagggcaacacggcactgcactacgcggccctggggaaccagcccgaggccaccagggtgctcctgagtgctgggtgccgggcggacgccatcaacagcacccagagcacagcactgcacgtggccgtgcagaggggcttcctggaggtggtgcgggccctgtgtgagcgcggctgtgacgtcaacctgcccgacgcccactcggacacgcccctgcactccgccatctcggcgggcactggagccagcggcattgtcgaggtcctcacggaggtgccaaacatcgatgttaccgccaccaacagccaggtttcaccctgctgcaccatgcctccctcaagggtcacgcgctagctgtgagaaagattctggctcgggcgcggcagctggtggacgccaagaaggaggacggcttcacggcgctgcatctggctgccctcaacaaccaccgcgaggtggcccagatcctcatccgggagggccgctgtgacgtgaacgtgcgcaaccggaagctgcagtccccgctgcatctcgccgtgcaacaggcccacgtggggctggtgccgctactggtggacgctgggtgcagtgtcaacgccgaggacgaggagggggacacagccctgcacgtggcgctgcagcgtcatcagctgctgcccctggtggctgatggggccgggggggacccagggcccttgcagctgctgtccaggctacaggcctcgggcctccccggcagcgcggagctgacggtgggcgcggcggtcgcctgcttcctggcgctggagggcgccgacgtgagctacaccaaccaccgcggtcggagcccgctggacctggccgccgagggtcgcgtgctcaaggcccttcagggctgcgcccagcgcttccgggagcggcaggcgggcgggggcgcggccccgggccccaggcaaacgctcgggacccccaacaccgtgacgaacctgcacgtgggcgccgcgccggggcccgaggccgctgagtgcctggtgtgctccgagctggcgctgctggtgctgttctcgccgtgccagcaccgcaccgtgtgtgaggagtgcgcgcgcaggatgaagaagtgcatcaggtgccaggtggtcgtcagcaagaaactgcgcccagacggctctgaggtggcgagcgccgcccccgcccccggcccgccgcgccagctggtggaggagctgcagagccgctaccggcagatggaggaacgcatcacctgccccatctgcatcgacagccacatccgcctcgtgttccagtgcggccacggcgcatgcgccccctgcggctccgcgctcagcgcctgccccatctgccgccagcccatccgcgaccgcatccagatcttcgtgtgagccgcgccgtccgccgcgcccgagctgccttcgcgtgcccccgccctgtgttttataaaaagaaagattctcggaaaactacagacaacaacg

SEQ ID NO: 492811 - DNA, 3692 bp, Homo sapiens
  misc_feature (360)..(360): n is a, c, g, or t
cgggcccgggtaggacggtcccggactggccgtgatctcagcggtgtccaggtccggcgtgactcgaaaccgccggataggcccgcactggtggagtcggcaagagctgacttacggcgcggcaagtgccggccagtgccagcgagcgcgacgtcgctcgccaagcccccgtctctatggcaaccgagtgcgtctctaggaccgccacggcgcaggcgcccggaggctaagccgctcggaacctagctgcgccacgcagggtaggcgacgcagacgctcccgcgtgacgcacttccggtgcttgccctgcccatccccgtgcggtgggcgtggccatggcgggggcgctccggccggcgncggcccctgggctcccgcccttcgggtcccacagtttccagccgccgctctcctcagtgcccggtggcccaggagggcctgggagcccgaagccgtccccgagtcgctcctaggtcactggcgcgatgcgggccgtcctctcggctgatgggttggaagcccagcgaggctagaggccagtcccaaagtttccaggcatcagggctgcagcccaggagcctcaaggcggcccggcgggcgactggacggccggacaggtcccgagcagccccgcccaacatggacccagacccccaggcgggcgtgcaggtgggcatgcgggtggtgcgcggcgtggactggaagtggggccagcaggacggcggcgagggcggcgtgggcacggtggtggagcttggccgccacggcagcccctcgacacccgaccgcacagtggtcgtgcagtgggaccagggcacgcgcaccaactaccgcgccggctaccagggcgcgcacgacctgctgctgtacgacaacgcccagatcggcgtccggcaccccaacatcatctgtgactgctgcaagaagcacgggctgcgggggatgcgctggaagtgccgtgtgtgcctggactacgacctctgcacgcagtgctacatgcacaacaagcatgagctcgcccacgccttcgaccgctacgagaccgctcactcgcgccctgtcacactgagtccccgccagggcctcccgaggatcccactaaggggcatcttccagggagcgaaggtggtgcgaggccccgactgggagtggggctcacaggatggaggggaagggaaaccgggccgtgtggtggacatccgtggctgggatgtggagacaggccggagtgtggccagcgtgacgtgggctgatggtaccaccaatgtgtaccgtgtgggccacaagggcaaggtggacctcaagtgtgtgggcgaggcagcgggcggcttctactacaaggaccacctcccaaggctcggcaagccggcggagctgcagcgcagggtgagtgctgacagccagcccttccagcacggggacaaggtcaagtgtctgctggacactgatgtcctgcgggagatgcaggaaggccacggcggctggaaccccaggatggcggagtttatcggacagacgggcaccgtgcatcgtatcacggaccgcggggacgtgcgcgtgcagttcaaccacgagacgcgctggaccttccaccccggggcgctcaccaagcaccactccttctgggtgggcgacgtggtccgggtcatcggcgaccttgacacagtgaagcggctgcaggctgggcatggcgagtggacggacgacatggcccctgccctgggccgcgtcgggaaggtggtgaaagtgtttggagacgggaacctgcgtgtagcagtcgctggtcagcggtggaccttcagcccctcctgcctggtggcctaccggcccgaggaggatgccaacctggacgtggccgagcgcgcccgggagaacaaaagctcactgagcgtggccctggacaagcttcgggcccagaagagtgacccagagcacccgggaaggctggtggtggaggtggcgctgggtaacgcagcccgggctctggacctgctgcggaggcgcccagagcaggtggacaccaagaaccaaggcaggaccgctctgcaagtggctgcctacctgggccaggtggagttgatacggctgctgctacaagccagggcgggcgtggacctgccggacgacgagggcaacacggcactgcactacgcggccctggggaaccagcccgaggccaccagggtgctcctgagtgctgggtgccgggcggacgccatcaacagcacccagagcacagcactgcacgtggccgtgcagaggggcttcctggaggtggtgcgggccctgtgtgagcgcggctgtgacgtcaacctgcccgacgcccactcggacacgcccctgcactccgccatctcggcgggcactggagccagcggcattgtcgaggtcctcacggaggtgccaaacatcgatgttaccgccaccaacagccaggtttcaccctgctgcaccatgcctccctcaagggtcacgcgctgtgagtgtggggtgggcacacagctgcagccggcctcttgctgtgctgcctgggggcagtcccaggtcccagaccaacctccctgctccacagagctgtgagaaagattctggctcgggcgcggcagctggtggacgccaagaaggaggacggcttcacggcgctgcatctggctgccctcaacaaccaccgcgaggtggcccagatcctcatccgggagggccgctgtgacgtgaacgtgcgcaaccggaagctgcagtccccgctgcatctcgccgtgcaacaggcccacgtggggctggtgccgctactggtggacgctgggtgcagtgtcaacgccgaggacgaggagggggacacagccctgcacgtggcgctgcagcgtcatcagctgctgcccctggtggctgatggggccgggggggacccagggcccttgcagctgctgtccaggctacaggcctcgggcctccccggcagcgcggagctgacggtgggcgcggcggtcgcctgcttcctggcgctggagggcgccgacgtgagctacaccaaccaccgcggtcggagcccgctggacctggccgccgagggtcgcgtgctcaaggcccttcagggctgcgcccagcgcttccgggagcggcaggcgggcgggggcgcggccccgggccccaggcaaacgctcgggacccccaacaccgtgacgaacctgcacgtgggcgccgcgccggggcccgaggccgctgagtgcctggtgtgctccgagctggcgctgctggtgctgttctcgccgtgccagcaccgcaccgtgtgtgaggagtgcgcgcgcaggatgaagaagtgcatcaggtgccaggtggtcgtcagcaagaaactgcgcccagacggctctgaggtggcgagcgccgcccccgcccccggcccgccgcgccagctggtggaggagctgcagagccgctaccggcagatggaggaacgcatcacctgccccatctgcatcgacagccacatccgcctcgtgttccagtgcggccacggcgcatgcgccccctgcggctccgcgctcagcgcctgccccatctgccgccagcccatccgcgaccgcatccagatcttcgtgtgagccgcgccgtccgccgcgcccgagctgccttcgcgtgcccccgccctgtgttttataaaaagaaagattctcggaaaactacagacaacaacg

SEQ ID NO: 492812 - DNA, 343 bp, Homo sapiens
gaaccatagccattaactaacccaaggtcctaccttctcttccctatacacagccaaaattctatttcatgcaaaaacattttggcagtttgtcagttcctgaaatctctggctctgttatccaggttccccaacccctcccaggcctcttctcaacacagcaagttggctcttatcattgccactatattaggtcccccaaagtaactcctcacatggggttcattaaaatcttcaaggatatagccagctcctgatggaaggtgggagttcgtgtatactgcttgcccaaaccaggcctttccaaaaattgggtattaaaaaaaaaaccaagataataaaa

SEQ ID NO: 492813 - DNA, 898 bp, Homo sapiens
atcttaaagccaccattgcgttcctcattgtgaactgtcttctcatattttaagtcaagtctataagatcatttttaacctaagtccaacttgttgactccttaaaataagcacccatgaaagccagccagcccttcctccttccctcaccaccctccgtctcttcgtccctcaccaccctccgtctcttcggctgcctgctctttagtgtagattagtggaagccattcacagaatgtagactcatgtataggtcaccgtttctttcccccactagaaatcacattcactaagcagtggattgaatttaagagtgctgcccctgcccggcgcagtagggcgtgcctctagttccagctactcgggagtctgaggcagaggatggcatgtgccaggagtttgaggctgcagtgcactatgcttgcacctgtgaatagccactgcactccatcttgggcaacacagtgagacccccatctataaaaagagagcactgcctgaaccttggtggcactgggaagctctggcctgagagttaaacacccatgctgaatggtacagtgtgcattctctccagctgaaaactttcttcaactttcctaaattcttactaaattcagaggaatcaggataaagatcacttagagaaagggtgcttatggacatagcctgagtttcctttaacctctctccaatgggtgctttaactagcttctacatggcaagctgtttcagtttgcaaaatcactgcccagcatgtttgaggtcagttggcaccttaaaacacctgttctccagccttggacagtggagagaatctgtaaagtgtgaacccctctaaagatatcgttcaaatgatcagattcgggtccagttatcttgttgagtttccctaaga

SEQ ID NO: 492814 - DNA, 167 bp, Homo sapiens
aagcttcttgcttcacgtcgcgcgtcaggatcttcagcattggatagggagcggctgcacgaactgctgcttcgatactagctttcatgtcgggatcagaagaattaacaatcacagacataactgcaccactatcattgagtgtgacccgagctgtagctttttga

SEQ ID NO: 492815 - DNA, 277 bp, Homo sapiens
tagcgacggttgtggttgtggcgatagcgtatggctgggtcactttgctgtacagcagaaattgacaaaacattgtaagttaactattctttaattcttttaaaagaaaattatgcaaacggaatgttttagagttgatggcacctattactcataacatagaagtattatactagacaatgcatttgagctttcagttagtgggacacttggatttcattcattcccagattcacataaatctcaccaaacttcacataagccattgtcatcattc

SEQ ID NO: 492816 - DNA, 732 bp, Homo sapiens
  misc_feature (29)..(29): n is a, c, g, or t
  misc_feature (61)..(61): n is a, c, g, or t
  misc_feature (90)..(90): n is a, c, g, or t
  misc_feature (177)..(177): n is a, c, g, or t
  misc_feature (218)..(218): n is a, c, g, or t
  misc_feature (220)..(220): n is a, c, g, or t
  misc_feature (341)..(341): n is a, c, g, or t
  misc_feature (365)..(365): n is a, c, g, or t
  misc_feature (369)..(369): n is a, c, g, or t
  misc_feature (386)..(386): n is a, c, g, or t
  misc_feature (410)..(410): n is a, c, g, or t
  misc_feature (425)..(425): n is a, c, g, or t
  misc_feature (443)..(443): n is a, c, g, or t
  misc_feature (487)..(487): n is a, c, g, or t
  misc_feature (489)..(489): n is a, c, g, or t
  misc_feature (495)..(495): n is a, c, g, or t
  misc_feature (497)..(497): n is a, c, g, or t
  misc_feature (501)..(501): n is a, c, g, or t
  misc_feature (521)..(521): n is a, c, g, or t
  misc_feature (546)..(546): n is a, c, g, or t
  misc_feature (591)..(591): n is a, c, g, or t
  misc_feature (604)..(604): n is a, c, g, or t
  misc_feature (622)..(622): n is a, c, g, or t
  misc_feature (629)..(629): n is a, c, g, or t
  misc_feature (631)..(632): n is a, c, g, or t
  misc_feature (634)..(634): n is a, c, g, or t
  misc_feature (636)..(636): n is a, c, g, or t
  misc_feature (638)..(638): n is a, c, g, or t
  misc_feature (647)..(647): n is a, c, g, or t
  misc_feature (659)..(659): n is a, c, g, or t
  misc_feature (684)..(684): n is a, c, g, or t
atcaccaccaaagatcccatattcaacantcaaactgcaacataaacaacagaatttattntcagtgacagtacttactcggtggcatcnccttactctacaatacctgcccctactactactcctcctgctccagcttccacttctattccacggagaaaaaaattgatttgtgtnacagaagtttttatggaaactagcaccatgtctacagaaantnaatcatttgttgaaaataaagtagcattcaagaatgaagctgctgggtttggaggtgtctccacggctctgctagtgcttgctctcctcttctttggtgctgtagctggtcttggattttnttatgtcaaaaggtatgtgaaggncttnccttttacaaacaagantcagcagaaggaaatgatcgaaancaaagtagtaaaggnggagaaggtcaatgatanaaaccctaatgaggaatcaaagaaaactgataaaaacccagaananttcaanantccnagcaaaaatattgtgtgatncctggaagctgtaagtttagatganatagaaatgaggagaaacatctgaggctggtttctttttatgttncttaccctgcccnagctggggttatcaaaanggctaangnncnananaagaaagtncacccttggttnctaactggaatcagctcaggactgncattggactatggagtgcaccaaagagaatgcccttctccttattgta

SEQ ID NO: 492817 - DNA, 782 bp, Homo sapiens
ggcgcccagacaggaggcccgactctgtgtcttctccgccgagagtgcacgtcagaagttggaccaaggaaggcgggcactgtccgatctcgacctcatgctgccgatgccagccgtggaccgtgcagagggttatccgcacctcatccagcttccctcgtgagctgttcatgcaactgcgcgatgcgcatctccaggaggctcctacggtcagtcgtgctccatggggcaccatgaagcccatctctgggattgccatggccaagaatgaatcaccagaaaagggccctcgccgttcctttgcgggtccagccttgttgggtccccatgactctggccgggcgtgggactgatcccaacatcgctcaggtcccggggcaccccttcccaaacctttgcccagcttgacagttcttgagacttggactactgcttggttgcgcaagttgccggggagggaaacccctttgcgcaggtcgactatgtaccagaccccaacgtccaccagggcactcaccaggatccccgtgataagggcgatgcatgcgactgggcgcgcgacgcaacctcggagagacgagggcgacgccgtcgagcactgcaaccacaaccaggcactcgcccacctcgcaccgcaccggcatccggaaatgacggctcacaaaaccacgcgacacataacgaaagacccccaccgccagccacgccccgcgcaaccacccaccactccgcacacaagcacaaacacgaaaatcccacacacgccgcacgccgcacacgcc

SEQ ID NO: 492818 - DNA, 838 bp, Homo sapiens
gcccttcccgggggcggcagcggctggtcgcgggcggctctgcatggtgcgggggcgtggagccctgggatcagatgcgaccgagtcgcgcggagtcgtcgcgcggagcatcggtcttggatgctgtcctgtccgcttgtggtcctgttccgggatggtccggaagaatccttggcgtgaagatggcgcgtcacgacgcaggcgacccgatggtaccctggacggttgcagtcatgaatggctcgtctaatggtcatggaagctgctgagacaaggagaaggtccttgcatgagtgtgtcgcggagagtgcatggagagtagcagtgagaatgaactgcaaaggctgtattacccttgaagtgtatggtatacgacgtggttaggacacaacttgggaacacgtgcaccgtacgcccgaaaagcaaaagtccgactagaagagttcttttctatgccctcgttcaatcatagtgagatggtaggttccccgatggcgtaacgaggggacatagacctgggccattgaatcgggcaccatgcagttttggagagtgctttcaaagcagcgtggggatttgctcctacaaaaggagggaaaatcacagcattggtgaaagtaaccgacatggggctttgccgtttctttgcgtaggcacttgttggtgaagtagctttcattatgtaaccaaaacacgatggggcgagacccaaaagttcccagtagtaatccggcgtaccagggattggcatccctgtaacttggcatccagttcccctcgaaggcaaaggggtctcctgcgcccgaaagttctcgcgaaccgacacggtgttactggg

SEQ ID NO: 492819 - DNA, 181 bp, Homo sapiens
cgtcgacgcaaatgaaaaatgttacaactactggatattctgtctgtgtatgtgttgtgtgtgatgtttatataaaagagctctaattaactagcttaaagaaaaataagcacttaaatcagatattttgtcagaaaaactaaaactaatgagctagtttagttcatataactttcgtaat

SEQ ID NO: 492820 - DNA, 967 bp, Homo sapiens
tggagccctccggaaacctctgactggccagccccactacttctgcacccagatgcaacctcgcagtccatgctcccagggccccgacactgcacccagaacttcaccccctgcaggaggaagccagaggcccccaggagtcaccacagaaaatgtcagagtgaggtcagtggcggagccacagtgaggaggaagaggagaagcgaggcggcaacgcacggacaaagcgcacgcaggtgggcagcatggtaggccccagggaagcacgaagcgaggcaggcagcacggcacgacgcaagcagccacaggaccgagcacctgacgctgcgcaaccgtgaactctgctcgccccctttgattccgcttgttgttcccccccttggaaggtgcggccctgaaggtggactgttaccggggtgcaagagggaaattgtctataactccaagaggcatcacttttcatggcccccacaccttggttcagaacagttggcaaaccatcccaaaggccacacatacggacacccatttgcgaagccgaccgtggggaggacttcccagcaagcatccagggacgggcacgcacttgacgaataaacaggcccgtgacggggcacccaaagggacccaacaaggatcggcccccgaaagtgcacccaccggctgcgtccagaactcctagcctcaccctggccagagcccccccaattcccttccaaggatccatagaagctgttcataccattaccattcctttgcccccttggaaccctgagcacaaatacaccaggtatcgccataatatagaggatacgcatagcacccatttgatttcgccccacacagacaagattcgtacccaaaggaacacactagacattagcaccggtgttggacccccaaatatccaaccaaaacatggtgaggcgtacagagaacacagcgtctggggggaaactgcgccatg

SEQ ID NO: 492821 - DNA, 494 bp, Homo sapiens
caggaagagagagtcctgcagaaagacgtgctacatcaggagccccctgctgagccccatccccagaaccacagggatccttggggtgggtttgctttaacatagtgtatttcctcagtgtgaataggccctgattttatggagcccatgagccaccagccttcttctgggtctgcttccctttgattttctaacaactccccttgagagaactgaggtgactaccctgtcactgtgtccaagaccagagataagctgtaggtttgtgatgctaaatctgtagtgagagaatggtgcttagcataattttgtgtttggttttctgtttggagttttgctcttagatgttttggttttcttattgatatgctatttgttcttattatttttcaaaaattgctagcatcattcactgtttatactgacttctgtttttaatgcccattaagagaatgttttatgaataataaacttttgtaactcttcaaaaaaaa

SEQ ID NO: 492822 - DNA, 683 bp, Homo sapiens
atattatcatatgtattggttgagcactcctgggacgtctctatgcaatactactatatcgctcacatctcatatcctccctactatgccctagagaggaatacgtactagcgctgattggcattatagcgtactctcataaccctcaacacccagtccctcttagccaatattgtgcctattgccatagtagtctttgtccgactgcgcaagctagcgcgtggagcctagcacctactaagtctcaagtctccaacacatatggcctagactaggtacattaacctaaacctagtccaatgctacaaagctatatcgtacccaagaatgatattactaccactgacatgactttccaaaaaacacataatttcgaatcaactcaacgccaacaccgacaagccttaattatatagctatctatccctcgtacgtatctttttaacgcagaatcgaactaatctaatcttattgtatgcttcgttcacacacaaagcattgtcgatccagagcgcgactaaacgagagcccgcacacttgcctatagtacttagtcgtcactcttgactttcgtgaaccactctcgtagtacttcgagtcaagtcaaatgggacacttgtatcacagttgaacccaattgatcacgaatgaccaccataccgtcgtgaatactattgctcact

SEQ ID NO: 492823 - DNA, 133 bp, Homo sapiens
  misc_feature (2)..(2): n is a, c, g, or t
tnttagcaagtaaataaaagcagtttagtatatcggccggattcatataatccagaatctaaccaaaatatgataataaaattcagtaaaatggttgaccacattaataaaggtggctatggaaacttctaaa

SEQ ID NO: 492824 - DNA, 350 bp, Homo sapiens
ctgttactcgtctctacagtatccccctctgtatccctgagcacctgtgccacggagggttgctcgatagccattattccagaatcttgcgactggtggtggtgtctgtcagacacacacaggtcgccagtgatctctcacacccacctcatgctccagaaccatcgcctttgtgtactgctgtcctagtctcagtacccggtacacacctctcctacgttttgtccatgaggatttacctttcaccctcgactgatccgtgaaagcaccgcttcaagttctctcagcattatggatctgttttcactgttttctataactgacggatgtcaggtgcgcgtttcctgata

SEQ ID NO: 492825 - DNA, 231 bp, Homo sapiens
tcgctgctcatttccaaatagctgggattataggcacgcaccaccacgcctggctactttattttgtattttagtagagatggagtctcacacatgttgcccaggctggtcttgaactcctgagctcaggcagttcacccatctggcctcccaaagtgttgggattacaggcgtgaggcaccacgcccagccaagaaggatgtttttttggtcactgtggacggatgcttg

SEQ ID NO: 492826 - DNA, 176 bp, Homo sapiens
agccccgttatacgtatatcactgcatcattatcttcatcatcacatggacccatctgcttcattgtcactgtcgctgctgtcctggcttgttgccatggttgccccaggaagccacctttgaagaagttgttgccgtaagtgtctcgttgtagttagggtactcttcgttgtcat

SEQ ID NO: 492827 - DNA, 648 bp, Homo sapiens
tgggaaccgcgctggaggaaggcgctgcgcggcgaggagaccaaggggtctgtggaaatcatgagacccggacttgaactgacgccctgggtactctgcagttgcctaggctagagtcagtcagctgcagtgtgtgacgggacacgtgatgtgaccgtaggaatgcaggcactgaccgactacaagaagctgcgggccttctttgtggcggaggaggagcatttcctgccggaggctgagaaggaggaggggctccctgaggacgagctggctgaccccactgagcggttcaggtcactgctgcaggcggtctcggagctggagaagaagcatcgcaacctgggcctcagcatgctgctgcagtgcatgtgcgccaacccgtggcagtcccagatctggatggcaggaggatgtgatcctcatctccatgggaagtgtcagcgtgtggctgccagggaagcgtggcacgtgcgcctggccttgggtccatctacatagttgcgtgtctcaacaatgtccatttatccttcaccctgaggcgttgtccgggggctgcaaacacctcccggtagaggctggcactgaggacccttcccacctgtgcccgtaccttcctgaacgtcctaggcacagcccatcctccatgag

SEQ ID NO: 492828 - DNA, 139 bp, Homo sapiens
cagacgggtcggactgggatgttctgacatctcacacctctcggtacttcgtgcttcacaggcatcactaatgtccggtgagggactttcatgtgcgggcagggtgcagcgagtcggcgtcttcgctcttgggttctgc

SEQ ID NO: 492829 - DNA, 239 bp, Homo sapiens
tacccaaagacttttttttattattacatggcccgggattgatgggaagggacagatgtagtgggcaaccatggttagcatgggatgcccatcccaatggccatgaatgggccaaaggggccgcccctctgcataatggttttcccaaggccgcccatcagtttttgaccccgcattccgatcctgaaacaggaaaaggagccgaaaagcgccccggccgccatgcccacggcccaacc

SEQ ID NO: 492830 - DNA, 140 bp, Homo sapiens
tccatctcagccttccaaagtgctaggattacaggtgtgagccaccacgcctgacctagttaagactttgattggacacccccccgccacacacacacacacacacacacacacacacacacacacaggggtagcgagcg

SEQ ID NO: 492831 - DNA, 210 bp, Homo sapiens
ccgaatgggttgcttgtcccaaacccaccagttatccagtgtattatttggaccaggaaatagttgttgtgggtgccacagctgagagtcagattgtctgggtgctttaaattgatcgattcagaggtgggtgctggcaataccattgttttgtgttaattgaaacgcagaatagatacccgtttggtaataaaaatcccttgctgttta

SEQ ID NO: 492832 - DNA, 282 bp, Homo sapiens
taaattcgcggcccgtcgacggagtgcttgagctcaggagcttggggctagctgggcagcgtggcaaaaccctatttctaataaaagatacaaaaattagccaggtgtggtggtgtgtgcctgtaattccagctattcaggaggttgaggtgggagaatcacttgagcctgggaggcagaggttgcagttgcagtgagctgagaacgtgccactgcagtccagcgttgggcaacagagccagactgtctcaaaaaaagaggggggaaagaaaaaagtcgacg

SEQ ID NO: 492833 - DNA, 172 bp, Homo sapiens
caaactatatatcaatgataagcaaatgggtaaatgacaataatgagtgatcctggtacaggtggtataagtgttctttatatgttttatttgtacactttgtaagttttaaagtatttctaagtaaacagtaatatgcacaattaaataatatatatatataaaaaaaaaa

SEQ ID NO: 492834 - DNA, 536 bp, Homo sapiens
tgggaaaagtctcgctctgtggcccatctggattgcagtggcccaatctgggctcatgaaacctctgggtcccggtcaagtggttcttctgccttcagccttcccgagttagcgtgggatacacgggtgcacgcaccccccacgcccagcttaatttgcggatatggtacagtaacagagtgggattttcaccatattgggcttcaggcgtggctctgaactcctgtgacctcaagttgatccaccacacctcagcctcccaaagttcacgggccaggagcgtgctttttattaaggaggaaaaattcccccacgggagaaacttctttttttaccctttttcataggcgtgccttaaaagagataattttccctcaaacctcccggttgctgcagtggtgctgacgacttccattaaacttacgagaaattgtattacaacccttaaatcttaggggtttactcacctttgtggcaaactcttaccctttttcaggggggctaatctgggagcatcagcgttttcacgcagagag

SEQ ID NO: 492835 - DNA, 724 bp, Homo sapiens
atactcgtggaacttgataaatgaagccatatctgagaatgtagctactcaaaaggaagtctgtcattactaaggtatctctaaataaacacattatgtaaggaagtgcccacaacatagttatcacatgtgcagactccttaggcaaactcaaactagcatctcaattgcagcagccacataacaatagatggatcacccaaataacttttgtttttaacaccagctatcccagtaaggctatccatgcatgtgtgctcaacattttcatttcaactttgcacatcttgcaaccactgcaagctgtgttcagggattcaaactcataattctgttcttaacaagcaaaatttatctgcaaatgtgcaagttctgcagcatcattcagctcaatgaattagtcgtctggggttacttccttgtttctcaagtcatacagcaatgtgcaagaatcatttgcaaaactccaatgcaaatcaattctcagctgccaacatgttgcacctccttatcatatattcttttatccacctttcgatctatttgatatatatgtatgtggttgcctaccactctgcgtatatttcatcagattggtgtcgcctaaactttattcccattggttcagcactcctcgctcagtctattattcgaacctcgtccaaatctattcacctggggtcctaccagcaccgcacccttcacaacaattctcacagctgag

SEQ ID NO: 492836 - DNA, 409 bp, Homo sapiens
tgttgggggcaaaccacttcgacctggatttgagtccccacgatggacgccacttgctgagaccagctaggtcagggagaccctaacccagcagtactagaggaattaaagacacacatacagaaatatagaggtgtgagttgggaaatcaggggtctcacagccttcagagctgagagccctgaacagagatttacccatgtatttattaacagcaaaccagtcattagcattgtttctatagatgttaaattaactaatagtatcccttatgggaaacgaagggatgggtcaaattaaaggaacaggctgggctagttaactgcagcaggagcacgtccttaagccaccctgggcgggccaagtgttccttgccctcatccccgtaaatagacaagcttctagcttg

SEQ ID NO: 492837 - DNA, 150 bp, Homo sapiens
tttggtaaacaatgcccatcaaattccgaaagtatttgagatgaacgtatggagtggttagtcattgctacatggctggacctgcagtgcggctaaagttattttaggcctattataaagctatggtcaggttatatacctagggtatac

SEQ ID NO: 492838 - DNA, 1347 bp, Homo sapiens
taaaaaaattgtgcattccaataattaaaatcatttgaacaaaaaaaaaaaaaaaaaaaaaaaaaaaaaaaaaaaaaaaaaaaaaaaaaaaaaaaaaaaaaaaaaaaaggaggggggggaggataaaaaacgacgtggttgttttattaattgagtgagaattattttttgttgaaaagatgtttttagaatgtgtgtgtgtgagagaagaataatatatgaaaataatatgtcgtgggaggagagaaattatgttataaaaagaaaagttgtgtttttcaccataaatcctctatattatattgaaggtgaatgacacacaaaagaagataataaggggagagaaaagaggggtgtatatatataagtgagtagtttatatataaaatataatatgtttgggggagaaaaaaaaaaaagggtggaggcagagaaaaaaagagaggtgtgtgtatatatagagtaagagaaatatgatattataaatgaatgattattactctccctgtattgtggaagaaaaaatttttctgtgggggagaaatagaaggactatatataaaaaaatatggtgggagcaaataaacaatacaaaaaaaaaaaacaaaaaaaaaaagagggggggagcggcggcaactataaaaagatatatctcctccaaagagaggggggagcaaccaaaaaaaaaattgagaacgaagcaaccacagcgtagtataatatcataggagaaaaaaaagaggggggcgccaccacaaaaaaaaaagggagaataacaataaaaataaagaggagagagacagaagagggcgcggccggcaggatgaaataaacaacagacggagcaaaaaaagggaagagaaaaaaaaggtagacaaacacggagaagaaaactttcatgaggaagaaaaaaacaactaatcaatctcagaaggagaggaggaataaaaaaatatataggaggaagcaaaaatcatctccgacagaaaggatatatatagagaatgatgcaggagagaagatataaaaaaaaaattatgaagggggattatataggtgagtaaaaacaaacacagagaagtataatttatgaaggagacgaagaaaaggaatatgtatggtcatcaataagaatgataattaaatttgagaaaaatcatttaaaacgaggagggaaatcagaatacatatactaaacagagagaggagacaggaaaagaaagagataatagagaaggaggagaggagaaaaaaaaaagaaagaaggaagagcagtaggagagacagaagataaaaaagagagaagaagaaagaaggaagaagtataagaagaaagaaatataggaa

SEQ ID NO: 492839 - DNA, 390 bp, Homo sapiens
ttatgcccaatttctgcttccaaagaaagaagaagtaaaaactaaaaggcagaaatgaaatccacaggcagacagcccagcgccacaccatgggcctggtagttaaagatcgagccctgacctaatcggttatgttatctacagattacagacattgtatagaaaagcactttgaaaatccctgtcctgttctgttccattctaattactggtgcatgcagccttcagtcacttactccctgcttgctcaatcgatcacgaccctctcaagcaaacccccttagagttgtaagcccttaagagggataggaattgctcactcagggagctcagtttttgagacgtgagtcttgccaatgctcccggccgaataaagcccttcctttcttt

SEQ ID NO: 492840 - DNA, 121 bp, Homo sapiens
gcgtcgacaatttattaagaactatcgggccacacgtcagcagtaacatcaatattattagaaagtctatcagaatagaaatgagggtggccaaccaaggggatttattcttcaggagctc

SEQ ID NO: 492841 - DNA, 142 bp, Homo sapiens
tacatgatacattttttttttccaggaaacagaaacaggtcttgggtcgggtattaatatcaaacgcatttaactttaaaactgatcccaataagcatggcccttacacagttcatgaccaatatttagttatatgaaaatg

SEQ ID NO: 492842 - DNA, 1244 bp, Homo sapiens
tgcagtggctcatgcttgtaatcccagcacttgtgggaggccaaggagggagggtcacttgagtccaggggttcgagagcagcctgggcaagatagggagaccccgtctttacaaataatttttaaaagttagctgggtgtggtggtgcacacctgtgcaccaaagctaccttgagaggccgaggtggggagggatcgctttgaacctgggaggctcgaggctgcagtgcgccatgatcgtatcactggcactcaagcctggcgaacagagcgagacccggtcccaaaagaaacgaaggacacggacacgaaccgacaggtatatcaagggtgagcttcctattataagatatggcgccaatgtgaaaacctggggctgtgtttgaattgtgcagccaaggagagacggcagcaagaaggataggtgggaaaaagcagaaaattttagggtttgactcaatgacgtgtatggggcgtgaatttggggaagcacttcttcttccaatctcctcctcttagtaaaatggtcaagcatcctggaagggctccaaggtctggaaggggtagggtccattataaaatcaaggaagagggggcccatcttgtcgccagggtggggagatcccggttaaacacacaaacaaacaacaacttcgcgcgcgccgcacagagatttacaccctccgtggggggcccattaatacaccggcactggccaagaacgggacaaagggggggcccaaaaaccgggagggcggaaacacaatgtggcatggcaaccagcaactacctccgctccgcggcacaacacagacacgcacgagcccacgacgcccaacgacaccacactacacaacgagagcaaccaccgagacccacaccacacaagacgatgcacgagcaaacacagcacaacgcacacacacggcgcaacaacgaagaaagagtagggagcaagcaggcggaagagcgaggcagagagcgagagtgagcgccgagggagacgccgccaggctagcagagcaccggcaagagaggcgaagtgcagaaggacagacgacaaggcagcaacagaggaggactggcagcggcgcaggcgatcgagcagcgggcaccagacgaggcgcgaatgggccatcgcaccagccagcgaggacacacgcagccagagcgaagccaccgaaagaccgggcagagcacgagtaaggggcgacagcgccaggcgacggcaggaaacaggcacg

SEQ ID NO: 492843 - DNA, 591 bp, Homo sapiens
  misc_feature (506)..(506): n is a, c, g, or t
ggcattcctgaagctgacagcattcggcccgagaggtctcgttccggggccttagctgggctcgcgctactctgtttttctggcctggaggctatccagcgtactccaaagattcaggtttactcacgtcatccagcagagaagggaaagtcaaatttcctgaattgctatgagtctgggtttcatccatccgacattgaagttgacttactgaagaatggagagagaatggaggggaccattcagacttgcctttcagcagggactggtctttctatctctggaactacactgaattcacccccactgtagttaagggggatcgagacatgtaagcagcatcatggaggtttgaagatgccgcatttggattgaatgaattccaaatcctgctggctggctgtttattgatatgctcatacacttacactttatgcacacaatgcagggttataataccgttaacatggacatgatcttctttacaattctactttgagtgctgnctccatgtttgatgtatctgaccaggttgctccacaggtagctctaggaggcctgcccttagagctggtgagccgacggtctctt

SEQ ID NO: 492844 - DNA, 591 bp, Homo sapiens
ggagaaagacgcacccaggggctggggaattgtcacaggtataaactctagaattggggaatgtagagtcctgtattggcaaagccggttggtttttgcgccctaggctatataaaaaaccgtggaatggaatgttgtcttgatttggtctaaatttggatatatatgaggtctctgaatatatccaaaatggattttggttgatagatttataatggaacccttttctaggtcctgaataaatatagcctgctttccctagatgcctttgtgtaggaaggatatacctttccctattactctcatcagctgaagaatatggactattggggtaccccaaatatgtggccttccatttggtggtttggtgccagcttagtggtttgtaatggaggttttggaaatggaaccggtggaatatctaaggtcaggcccctagtaacaggggtttggtaaatcctttcagaatccttgaagccgtcttaaagggtcttttgcagatgggaccaatttggaccatttgaatataggattttgaggtctagtaggactgagattggccccaaccaattaaaaactattccatttttg

SEQ ID NO: 492845 - DNA, 331 bp, Homo sapiens
cgctctagagtatccccgtcgcgtgtgctaccgacaggaaggctcagcatgactcacctacagcaacccgcccaaccgataaacctcgcgcacaaagcctcgctcatcgatcagcaatggagcccaagagtggttgccgaaatgaacgactaccagttcaaggtggtgcgtatcgagggtgaattcatttggcattcgcaccccgaaaccgatgaagcgttcctggtgcttgaaggcacgctgcgtatcgacctgccggagggcccggtgtatgtgaagccgggtgagttgtatgtggtgccgcgtggcattgagcacaggacagcacacg

SEQ ID NO: 492846 - DNA, 402 bp, Homo sapiens
gtgtgagtaccattgtaaattaaaatatcgttgactcaaaaatgacttacaggttgggcacagtggctcacgcctgtaatcccagtactttgggaggccgaggcaggtggatcactttgacgtcaggagttcgagaccagtctggccaacacggcgaaaccctgtctctacaaaaaatacaaaaattatctgggcatagaggcacgtctctgtagtcccagctacttgggaggctgaggcaggagaatcacttgaatccaggaggtggaggttgcagtaagccgagatcacaccactgtactccagcttgggcaacacagcgagactccgtttcaaaaaaaaaaacaaaattgacttacaaaaagaaaaggacttactttttcaacttacggtgggtagtca

SEQ ID NO: 492847 - DNA, 635 bp, Homo sapiens
tagtaaaaaggggggttccccttgtgggccaggctggtctcaaactcccgacctcggggtgactccacctggcctcgggcgcttcccaaaggtgtggggattacagggcggtagacgccaccgggcgcctgggccttcagtttcttccataggccgttcttgtcacccaaattatgctgcctacccagaggggcggggttagacctaggctgaaatatccacttgggtttctaagtggatgtgggcctccctttcccccattttcgcctttccgcagaaatatcgcttcaagtttccatttcccgaggggagcctcgtgggggagggggcggccattcgggcctccgtccccagtgggccaccttggaacacttcggcgggcttgggggacatattccacactcgtttcccctgtgagcccagattgtgcccccaacacatcctttcactggggggttcttatagcaggtttatcacagataattccactaaacgtccgttcactttaccctcgtggatgccacgctggaaaatattcccaatatctaagccctccttgaaatgtctggggggtaccatactttttacagaaccctttttgggcctttttaaaacaacaacaaaaaaaagagggg

SEQ ID NO: 492848 - DNA, 273 bp, Homo sapiens
gggatggaacagttctctatcttcattgtgcgtggtggctagaggaatttacttttattttactttacttttatttttcttgagacagactttcactcttattgcccaggctggagtgcaatggcacgatctcggctcaccacaacttccgcctcctggattcaagcgattctcctgcctcagcctcccgagtagctgagattacaggcatgcaccaccacgcccggctaattttgtattttttgtagacgatgggcgtttcctccgccactt

SEQ ID NO: 492849 - DNA, 734 bp, Homo sapiens
aagggtgcctccatcggcctggaactacaaaatgcccttgaccttcctcacatggggtctgtcaccttgcatctctgataagccatccaccttcctggtcagtgcctacagggggagagcctttctgagaagcaggtcctgtggtatctgagaatggtctagagagctccccactgcccatctgcccccgaatttcctgccaagctctggggagtggggtggggggagggacgtccgatggatgacaggccgccagcccagacgtggggagagaagcctgagtcctttcctgtgtgataaaatcaggctaatttacttggacttggggtgattcgtccggctccttagcactttatgcaggtgagcccatgaagttagtggtccattacttccttacagcactgcatctttcatcttcacaactgtctcctggccctgtgcgactccgctgcgacactggcacagctcttcgtggcgttctcaattctctccgtgagcgagtcggggcctgagaaggcatttcatcaggaggtctccttctgcacgtccatgacatgagcttttcggaggccaaggaagtagaggagggtgagagatgccggtcactgccacaggcacctccgtgacccggacccatccagacacgtcgcaggcttgggctccgcgacggagaagtctgagctgtgaagggaaagcccgcagtgactggtctgaggtcgcccttgactctccag

SEQ ID NO: 492850 - DNA, 219 bp, Homo sapiens
  misc_feature (17)..(17): n is a, c, g, or t
  misc_feature (115)..(115): n is a, c, g, or t
  misc_feature (132)..(132): n is a, c, g, or t
aattaaagaaaaacttnttaaacataggccagtgattttcatttatcaactggaaaatttactcctttttaaaacaattttaataataccaagatttgactttcctccaaagttntaagaaagccccccatntataatataatataatatataatggtaataaataaaaaaaaaaggcaaccctgctcaggtatcatccaaaacatgatcacattcaga

SEQ ID NO: 492851 - DNA, 296 bp, Homo sapiens
  misc_feature (293)..(293): n is a, c, g, or t
attatccccacatatgcagaaggaagggtggagaagcatcggaccaagatcacatcccttttttttttcggagagggagggggagtctcacggtgtaaccccagctagtctggaactccgggcctcagggatccaccggcctcagccccccaagtagctgggattacaagtgctagccacggaaccgggccagaatcacatcattttgaaatgggctgaactaaggatttaaacccattgtctggattaaacattcccaaggatggtttgccatgggtaaggtctggtgtcanatc

SEQ ID NO: 492852 - DNA, 434 bp, Homo sapiens
gcagagcgcgcagaaacacttgcggcagcagatgcagccgcacaggcaagtcgaagcgctgtcgccgatcaggctgcagcgattggcgactgcgcagcggacattggctgaaacggctgcggccagagccttccaggccaatgcgctggcgcagatccaggcggttcaggcgcagcttctcgcagatcgaactcttgagcagcaacgtcttcgtgcacagattaccgatgtaggtcgtcagcaatccttggctcgcctggctgaaatccgtttggcggaggcagcagtcaccaatcaacagacatcagctcagtcggcacataatcaatcgttgagcgcggaagttatcgctcagtcccgcgtaactgccgcaaacgtggcataggtagcctcgcgagcagctgacacggctgcagtctcagcacaaagtgcag

SEQ ID NO: 492853 - DNA, 928 bp, Homo sapiens
gaccacgcgtccgcatgcctgtagttccagctacttgggaggctgaggtgggaggattgcttgagcctgggaagtagaggctgcagtgaactataactgtgctagtggccgggcgcagtggctcacgcctataatcccagcactttgggaggccaaagcaggtggatcacttgaggtcaggagttcgagaccagcctggccaacatggtgaaactctgtgtctactaaaaatacaaaaaattagctgggtgtggtggcgctcgcctgtagtcccagctacttgggaggctgaggcaggagaatcacttgaacccagaaggcagaggtagcagtgagccaagatggtgccactgcactccagcctgggcgacagagggtgactcctcacaaaaaagaaaaatagctaaaatatgattgtaccactgcactccagcctgggtgacagagtgagaccctgtctctaaaaaaaaaacaaggaaaatcgacggaacaaagaatgtcagcatgtcagcgttcctccaaggagtggttgggtcaacgaagacagggtggtctcctaaacaaacggctccccacggtgcgagaggcagaggccctttaatctggccgagttttgggagggcctgggggctttcctgcactacttcctggaccatctgggcctgccacgcactaccaacgcccagaagggaacgatctccgtgcatcggggcaagagacgggccagagggaagctggcgggcctcaggggataaaggcccggggggcatgggggcgcggcccatcaaattacccgaaaagaagaagcggaagggcctccagagagcaacacgcgttttaggagaccccgacaaaccaatgggggaacaacaccccgaggataaggccgggagcacacatgtagaaccgctccgcagagacgactcgg

SEQ ID NO: 492854 - DNA, 773 bp, Homo sapiens
gcaaaggagtaggtggtgggatctcaccgtggctccgattagccttttctctgccttggttgctgtgatcttcagcgggaatctcgaaatggcgttggcgggtaaggctggaaagggactccgtgcaaagagccaagacaacaggcggttacccgctcgcagagagccggcttgcaaggtccccagtggggccgctatacatcgacatctaaagatctaggacagacccagtcatggagcgtgtggtgcgcgactgccgctgtgtacaggcgcagccatcctgggagtaccctcaccgcagaggtacttgacctggcaggaaatgcgtcaaaagaccttaaaggtaccagcgtattaacccctcgtcaggttgcaacttgcaaatccgtggagatgcccgaattggattcttctcatcaaggctacaattggcctggtggtggtgtcattccacgacatccagaaatctctgatggggacagaaaggaccagcagaacgacttgtcctagaggatgcctggaatgcccttgtaatctcaggacctctaaatactctaacgagctgtccaaggggtaggtgactcccagtggactgtatctctgctgaaaaacacaatttgccttgtgtaactcctatttgagcaagttgcacgtttaattgagcttccaagcaagccaatatctgcaattcgagtcttaacccatttagtgttctgtgcgtcaaagaagttatgatctgcagactggttagactcgcggcggttccaaacgtg

SEQ ID NO: 492855 - DNA, 146 bp, Homo sapiens
ccagcatagaatgactacatacttccgggggttgagatgatatctatctcattttagttttggtttgcatttctctgatggtcaatgatgttgagcaccttttcaccttttcatatgtgtgtttgacattcgtatatcttctttgg

SEQ ID NO: 492856 - DNA, 238 bp, Homo sapiens
caattttcattttttttttttaaaaatttggggggttgggtttaaaacccaaatttcggggagcccccagcctttcccccaaggggccctttttggcccaaaagggcgggtaagggggttttttttaaattaaaaggtttaaaaaaaatttttaataaaaccgggccaaaaggggccggccttttgggatttggaagggggggcccctaaaaaaacggaaaggggtttttttttggca

SEQ ID NO: 492857 - DNA, 807 bp, Homo sapiens
agatgccatcagagctttgtgaatcagctggggtgttctcactggataaacaacacatagcaggtgtgcattcattacaaatatatagtatctgccaatggtggagcctacgtttaaagagtgagtatgtcttgtatctaaggtggatacgagcgtactgttgtaaactgcaagatttttacttgctgagagaatctgttttagagtatagtggttggcctccatgattatttataggttttataaattttagaatcaatttctctttaaggtggctcagagtttttcaagcatcttgtgcacagtaaaattgagtagaagttcatttgtgccttctcttgtgttctttatccaaatttggaagtttatagcttacatatggtaactgcatcctgttcggacactatatgtctaaattttgaaactgtgtggtgtgcgctaagaagtaggaataacaacgtgaaagctaattaaggtcacaaactgcggtgaaacccttaaaagtccacatcttctgatattgtgaaccgtacccctggccagtattagtttgctttcgtggagtttttccttactttaaactgacagtggacctttgtaaattgtgcacacgctcatgatctacaaatgggcctctaactggaatgaatcctaattgcctctcatgttttaacccttgcacaactcaacatttcagtggaccttaggatcgagctagtgcagacacttgtggcttccttgttcaattgtggcctacaagttgaatgggatggccctcggagagggacaacttggggggagtaagct

SEQ ID NO: 492858 - DNA, 129 bp, Homo sapiens
cagcgctgagggcgagagagtcggtcggtgtctccggccataatgacccaggctgagatgggtgatacggagaacgaataggagaagggcggcgagaaagaagaaggagcagcgcgtctaaaagcggcc

SEQ ID NO: 492859 - DNA, 548 bp, Homo sapiens
gtgttctgcggatcctcgagttgaactgtgtttgggaggaggcatgcacgctggtgcatgttgaagagcctcacacggagacccgtacgaccgtacttacctgagacacaggatctgggatttggtggtggtaaactcagcaggtgtggctgaggtaggagtaacagtccctgaccccatcaccgagtgcaaggcaggggccttctgcctgtctgaagatgctggacttggtatctcttccactgcctctctccgagccttccagcccttctttgtggagctcacaatgccttactctgtgattcgtggagaggccttcacactcaaggccacggtccaaaactaccttcccaaatgcatccgggtcagtgtgcagctggacgcctctcccgccttcctagctgtcccagtggagaaggcacaagcgcctcactgcatctgtgcaactgggcggccacctgtgtccttgggcagtaaccccaaagtcattcggccatgtgaatctcactgtgagcgcagaggcactagagtctcaagagctgtgtggg

SEQ ID NO: 492860 - DNA, 261 bp, Homo sapiens
tattgtgaagagtaagtcatccatggctgtaacacaccagcatcgccagatggggtgcgggaatgtaggcaatttatgtaacctttgcagcagcagctgctgtgaccgcaaggggtgatactggggtgattgagcatttttaagtgtaagtattcacatcatgatatgtctgtagctgtgttttatcatctgaggttgttcatttgggggacagaaggatcaggcatgatctccttaaaccccatattccgtttcattaat

SEQ ID NO: 492861 - DNA, 111 bp, Homo sapiens
acggactacggactgactggcgggcacggactacgttacgaccggtttctactttcctgagcgtctgagatgttagtattagttacgtttgtgtgagtgttaggaaaaggg

SEQ ID NO: 492862 - DNA, 904 bp, Homo sapiens
gattaaatctcagtaatgtgctgctcgcatagatgacatgtcgtaataggaaaagttacttgtagatctttagaccttgggtggtcacttaggctgtggagagtcactaccctatgttggcgatcttactagattgggagggacctttgccgtgtacaggtgatgggactttctgtgaccttgactctcgacgtatgcgaagtagagggtttcatgtagttaatcgtgacatgtcaagaattgggaagagtgtaaccttttcttgttctttggaagcattcactctttgagggtccctcaggaacttaagactagtagatgtccacttgggggggggaaatccgctgaatagactatccgatcgaattgctgttgagcttgcacgagtgggcgccaaggggaaacgataaaacaaacagcgtcaggctttattgggttctacccagaaacgaataactcgggagagtgtcagcgataccgtttttttttaagaagacatccaatcttagtcggaagccggactgagggttggatgcgtcaccagaggggcgttaccaccgttcgcttttcattgcctctggagaaggataccctttttatagaattggtttctccaacccaatttgggtctttggttttttggccgccagtgcgtaaaacccgtgttgaacgacgggtgtggtggggcctaatgtcactgatggggtgcctcaaaaagggttcccataaggaaatgttaaccttcgacagtatggcagacttttgggtcatgtccaccctggactccatggaattatcccgaaacagtgaattgtgtcaaacgggtttagccaagtggctcattctactaacctggggaattactacgaaaggggtcccaaaaacgtcggacataggattcaag

SEQ ID NO: 492863 - DNA, 255 bp, Homo sapiens
  misc_feature (90)..(90): n is a, c, g, or t
  misc_feature (158)..(158): n is a, c, g, or t
  misc_feature (213)..(213): n is a, c, g, or t
  misc_feature (224)..(224): n is a, c, g, or t
caatgccccacttttaataatggatagaacaaccaggcagataatcaataagagaacagatgacttatacaaccctacagaccaattggnattaacagacgtacagaatattctactccacaacagcagaacacatattcttctcaagggcatatggnacatcctctgggacagataacacgttaggccacatgacaagtcttaacaaatttnagaagactganaccataccaagcatcttttccaatcacaagg

SEQ ID NO: 492864 - DNA, 265 bp, Homo sapiens
atggcctcagtctccatggtctgcttgtggccacctcatcatgaactgtcggccacagttctttaccacagattccatgacctccagggcatacaaggcgacgtgtgggttctgtcgttgactttcttcttgatgggattcacagcatattttgctctgaaaaggaaacattgataaaagcagagaaaaacgggaaaaaaatagtctcagcaactaagatgagaaaagctcatcttagtagctgaggaccatcgttggggtaccg

SEQ ID NO: 492865 - DNA, 199 bp, Homo sapiens
cggctgacttatttaaggtatatctccttctttgtatctttgaagagggagtctcgctctgtcacccaggcacaatctcggctctcactgcaacctgcaactccgggcttcaagtgactctcctgtgtcagcctccgggggagctggcaccacaggcacatgccaccatgcgtggctaatatccgcatgctgagcagag

SEQ ID NO: 492866 - DNA, 117 bp, Homo sapiens
tgtcccacaagtgacttgatcaactattcaatgcattttaggaagattgctctggccacatgtagtagagaagcatgtacgaggctgtcacgattatccacggtgaaagctgatgac

SEQ ID NO: 492867 - DNA, 420 bp, Homo sapiens
  misc_feature (64)..(64): n is a, c, g, or t
  misc_feature (108)..(108): n is a, c, g, or t
  misc_feature (121)..(121): n is a, c, g, or t
  misc_feature (170)..(170): n is a, c, g, or t
  misc_feature (176)..(177): n is a, c, g, or t
  misc_feature (181)..(181): n is a, c, g, or t
  misc_feature (191)..(191): n is a, c, g, or t
  misc_feature (197)..(197): n is a, c, g, or t
  misc_feature (200)..(200): n is a, c, g, or t
  misc_feature (215)..(215): n is a, c, g, or t
  misc_feature (219)..(219): n is a, c, g, or t
  misc_feature (221)..(222): n is a, c, g, or t
agcggatctccttcgacggtgtctgcatgtgcttcttcccaagaaattttcagaaactgaaccnacactatttcataccgatgctagtgctcctgaagtcctgtagcnaagaccctctcanatgtttatgaaatgaacagacaggccagatgcagtggctcacggctgtnatcccnncacnttgggaggcngaggcnggnggatcacgaggtcangagntnnagaccagcctgggcaacatggcgaaaccccatctctactaaaaatacaaaaatttgacaggtgtggtgatgcgtaccacctgtaattccagctacttgggaggctgaggcatgagaatcacttgaacccaggatgcagaggtggactctcttctgatgaagaggaggggaccagctctcaagcagaacaccgtcgaag

SEQ ID NO: 492868 - DNA, 413 bp, Homo sapiens
  misc_feature (64)..(64): n is a, c, g, or t
  misc_feature (108)..(108): n is a, c, g, or t
  misc_feature (121)..(121): n is a, c, g, or t
  misc_feature (170)..(170): n is a, c, g, or t
  misc_feature (176)..(177): n is a, c, g, or t
  misc_feature (181)..(181): n is a, c, g, or t
  misc_feature (191)..(191): n is a, c, g, or t
  misc_feature (197)..(197): n is a, c, g, or t
  misc_feature (200)..(200): n is a, c, g, or t
  misc_feature (215)..(215): n is a, c, g, or t
  misc_feature (219)..(219): n is a, c, g, or t
  misc_feature (221)..(222): n is a, c, g, or t
agcggatctccttcgacggtgtctgcatgtgcttcttcccaagaaattttcagaaactgaaccnacactatttcataccgatgctagtgctcctgaagtcctgtagcnaagaccctctcanatgtttatgaaatgaacagacaggccagatgcagtggctcacggctgtnatcccnncacnttgggaggcngaggcnggnggatcacgaggtcangagntnnagaccagccaaccccgtctctactaaaaataccaaaatcagccgagtgtactggtgtatgcctgtcatcccagccactcgggatgctgacgccagagaatcacttgaacctgggaggccgaggttgcagtgagctgagatcatgcccttgcactcctgtctgggctatccagagcgaaattccgtctcgac

SEQ ID NO: 492869 - DNA, 125 bp, Homo sapiens
cactaagcacgagacgacagcagtagagccttctctgtcagtgtggacatgaaactcttgtacagtatgctgcttcaatctgactggtatagcaggacagttaattccgtgggcctctagtaatt

SEQ ID NO: 492870 - DNA, 160 bp, Homo sapiens
  misc_feature (3)..(3): n is a, c, g, or t
cgngctgtcacgccggggtcgcgggttcgagtcccgtccactccgccatataaataccaaagccgcatttatttcgataaatgcggctttttgctttgtagctcagatgccgatttttgtgcaacccaaacctcattcaagaggctttggggttgtcgct

SEQ ID NO: 492871 - DNA, 152 bp, Homo sapiens
tgagaggatcccctcccaatgatgagaaactgtctctgtctagctcctcaagacttctttcatgtatgggagaaatacgcccctagcttgtttaaatcattgttaatttggttttctacaataaacactcaatgcctccttctgatcaattc

SEQ ID NO: 492872 - DNA, 391 bp, Homo sapiens
atgccaataacctccaccctgaagctcaagcgctccggggttaaaggcacggtattggtggccgatgattcgctgcgcattgatgtggaacttggcctgctgatgtcggccatgagtggcacgatcaagtccgaaatcgaaaaggccctggataaggccctggcttgatacggctgtgcttagggtgccgattctaattttaaaccttactttgtgcccaagccctcaactcttgcgggccgtccgccacccaattctgtgtgaggtgcaccatggccaaagttattttgaagaaaaaaatcgacgttcagaccactcccctgagtgaggttaaaagctacgcccgcaagatctggctggcgggtcttggcgcctaggaggttattggcat

SEQ ID NO: 492873 - DNA, 231 bp, Homo sapiens
ttctgcacctgtagtcccagctagttgtgaggctgacgcagaagaattgcttaaacccgagaggcgcggacttgcagtgagcagagatcgcgccactgcacaccagccagactagcaactgctggcagaactacctggacttccaccgctgtcccaaggcaatgaatgctcattttgcccaaagctttctgtttggggctttgaaaagtgagccctgactgggtgtggtgg

SEQ ID NO: 492874 - DNA, 785 bp, Homo sapiens
  misc_feature (162)..(162): n is a, c, g, or t
atgtgtcgggaacatcgcggtagggtgggatccttctcgatcgagccgatgatctcggtactcgaggacggccaccgttgctggaatgccttcgggggcagcggactcctcagaggcataggtacagccgctcaccgctacagcgacgacggccagagaagngccggcggcgtgacgcagagatttcatgtgacgttccttcgcaggtgcggtgtcggtcaacaccacatggtacataattatgcatacgagagcataatctcaagttgggggtgtgggggtagggctaaggggctatgtgtagatggggatctctgtggccagttgtacgaatggacaatgtgctgcagacgaaggaatgtaatatcgaagaaattgttgtgtttgggctatgagaattataataatatgcgttggatgtggtgagtaaccgaattaagagtggcgtgtagaattgataatggagaggctgtgatgaaatgacttgcgggtgtcgtcggggctactgtggtattgacattcggaatggctgttggtgcgtttgcttctactagtggaaatatagggatcgatacggggcaaaatgtcagttttcatggtcgatacacctatggagtggcgcatcggggctgggctggcaaggcggttgagggtcaccggaaccttggcgtcactggttctaactcaggtcatgtcaatgtcccgcagcaagggtactcgtggaggagaattggtcaccgtaacattggccgcaaggtgggtgtcacttctgatgttgagccctg

SEQ ID NO: 492875 - DNA, 525 bp, Homo sapiens
  misc_feature (471)..(471): n is a, c, g, or t
ccttccctgacccaaaacatgtcaccaagttcaaattattcttaacccttaactacttccagaattcacctacttctgtccatccaaactcctcctgacttagttctgcctataataaaacttcagtaaggtaaggtaataatcacacaagttgtttttcgtcacctgatctaactcattccaatctataatccattcagtcagaaaagccatcttactaataaagtgcaaattgaatattcagtcccttgcttaaacttatcttatgaattacaagttccttagaaagacagcataagttccctatttcaccaacctcatcttccagcctttcttcttatgaaccctagattttagctgaatcaagacttcctggatcagtgtcaatcattcaatggctcttcagtttcatatatcttgttcccactacttgaaatacttttgctatgagatcttattcccatccaccanaaaaatgcttactttaccttttgaagctcagcccaggcattttaactctaggaa

SEQ ID NO: 492876 - DNA, 658 bp, Homo sapiens
  misc_feature (36)..(36): n is a, c, g, or t
  misc_feature (71)..(71): n is a, c, g, or t
  misc_feature (97)..(97): n is a, c, g, or t
tcatgcctaccctttttttggaagtttccagccgcnatttgaaatgaaatgacaaggtgtatatttgatcnattttcattcccaccattgcattacnacctctaacttaaatgggtaaccctaaggcatatcaaagaagcagattgcatgataaacggaaatagaaaaaaagaacctacatttattttgctttagcatccttactctcaccttttatgagattgagagtggacttacatttccttttttacattttcgtatacttatttttttagccatcattatatgtttaagtctattatgggcaaccaatctttggaagctgaaaactgaatttaaagaatgctatcttggaaaattgcatacgtctgtgcaattttttattctgcctagtgctattctgcttgtttaactagattgtacaaaataacttcattgcttaatatcaaattacaaagtttagacttggagggaaatgggctttttagaagcaaacaattttaaatatattttgttcttcaaataaatagtgtttaaacattgaatgtgttttgtgaacaatatcccactttgcaaactttaactacacatgcttggaattaagttttagctgttttcattgctcaataataaagcctgaattctgatcaataaaaaa

SEQ ID NO: 492877 - DNA, 742 bp, Homo sapiens
cccccccccgttttatggggcgggcggtatttcccggaaacaattcatattggttttttggtccttaaaatatgtttcaaaacgcgggggcgcgccgtttccggtatttgttccccgggccgcccctttttttgggaggcccttttttaccccctgtttcccaggccttgtgtcctctaaattttcctttgggatttcccgggggccgcccaaccggggcgcccccaggcccccctgtgttttgggtcccctccttctttgggggcaaggagagagagggggccccctccccccttccctcttaaaaaggggccccctttgagaccggggggccccccttttttttcggccacaccccccggccttttttccctaagaggtgtgggggggaaaaagaaaacccttaaggttggcccgggggggtttttttaacaacccccggcccccccccctcccttttaaaaaaaaaaccccccccggggggggggggggggggtgccccagggggcccctttttttttttcccccccccttttaaggggggggttttcgggggggccccccaaacccagggccccgcccccccccccttttttaaaggggggcccccccccggggggcccggggggggtggccccccttttttttcccccctgcccgggggggggggggggttttttgaaaataaaacccccccccccttccgggcccccccccaataaacccttttttttggggggga

SEQ ID NO: 492878 - DNA, 590 bp, Homo sapiens
gtcacttttgcagaaaagcatttactgactgttgacttggccaaatccctgtgctgtgtttcctagcacggtaaatcaactgtatccagtagtgggacagatgcagcatgaaagaagaaagttacaattgctttatctgatgctgtcactcatgcctggtgttgagaggcgcacattttaaaaagtctaatagctccgacatatctaggaaacagatgggaaacaaatgaagcattgatggattcgcaaattccagttctttgatatttgtctgcccaggaatgggtgggacagagaaatgtaagggaataatgaggatacgggtggggaaaggcttgcaatttttcccgttcttctttggatatggactgaaggaaggatgtggggaggaggtgtttatcttttgcttgtactctgaacttttccaaagttactgattccttgggatataaaactgtaatcaagagtctctaatggataactgcaattatgcattgagtcattcaacaaatacacattaatactgactaaattaagctcgaatggaacttcagggcaaaagaacagagaaaataaaataccactagaga

SEQ ID NO: 492879 - DNA, 403 bp, Homo sapiens
  misc_feature (7)..(7): n is a, c, g, or t
tgagganacccaaccctgccacccacagctaccaacttaagtaacgctgaaaccctttcctttaaatccagcttaccgtcagatgaactagggatacttgggaaattatgattaaagccctacgttcaaagtcaagtaatagactatttttaaaaatacatggtaaggagaaaaaagtgtctatgttgaacaactgagaaacacttaagcgaggttacaaatgactaataactatgcacaacaatcttttccaggatcaactttttcctttgcaaaaaaaaatcatttacagacattcaacaagttaattctgttataaatgataggccatatgtatgttccaacctgcttccttttagtactaggacagtgtagtaccggcacttcagtaagtgttaacttt

SEQ ID NO: 492880 - DNA, 1062 bp, Homo sapiens
gccgacacccgagccggaggcgggcgggggcgccaaggcgaagatgggggactagagcgtggtgggatcacgatgaggatggtcatggatgatgcacacgacgaggaagcaccccaaggatcgaccacggtcagatctctgtccgctgggcggacgatcgaggcccggggtggcaatcgcatggaagcaagctaccgagtagaggcagaacggaggacaactagggacacgggcgacttagaccagcgcagtgacaccgtcgcaatggatgtgctcgtacgctgccatgaggaatccgtgataggagcctggaggtggccggagggacgtgcaacgggaagggagccttgcgaagacgcgctgtgaagcgccgcaggaatggcgagcgatgagcatggcactccagtgagcgaagccgggaaggctgggaaagcggtaagtgcatgggaggggcgtgagtggccggcatgaaggacacggcagacaagaacgcactgacacgcgtggtacaaagggtggtgcaccctaggggcgtacaacgccaacaacaggaacggcggcatttgcaaggactaaagacagtccactggggtcagacatgttagcccacaaagttccgcggcgacatgtcaccgcgtgagagccagcgtgacattccacgacaggggcaagggtgggacagcggggaacgacaacgcagaaagagagcgaaaggagagcccacatctcgtaattggaaaggcaaacactataccagttagagaaaagagagaggatataccaaagtagcaatggttctttgggaccaaaattggcatgtgcgggcgacagcacgtgtgtggtaaatatgaatcctagtaggagcaaaagaacgagtaagacccgttgcatatcaagcacctgagtcgagtacaccaaccattgaggattgcttggacgaaagggaacagaaaataagacgccagacgatgaaaccgtgagaagctcaaaatatgtgggtagtacaggagagtgttagtgaaccgttaaagaagggtgttggggaaagaggaagggaaaact

SEQ ID NO: 492881 - DNA, 367 bp, Homo sapiens
gtaccacgaaaaaagcgtgaagatctaagatatcgctggagacttagtagccttctgatattccccgcagagacagacacttccatatcagagtgagagtgtggaatacgcgaaccaatatatgtgcgtgagcctctcttctttgtgattcaaatcctgcccgcttcttacacgtacatctcctagcatacgaatgtataatgcagtctgatcagaactgtcataggaaatagctccacgcctctgagagagctgccggggattggggcagccgaagagagcggagctggagctgaagctgatggctcctcggcggctgaggacgtgctgggggaccggcctgtccaggggcagtaccggcagctgg

SEQ ID NO: 492882 - DNA, 848 bp, Homo sapiens
aaaatacaaaaattagccgggcatggtggcacgtgcctgtagtcccagctacccgggaagctgaggcagagcaatcgcttgaacccgggagacggaggctgaagtgagccgagatcgcgccactccactcccgcctgggcaacagagtgagactccgtctcagagaaaaaagaaagaaaaaaatcggggcaggctggggtgcaggggcctcaccctggtaaattccccagcactttgggcgagggccaagggcggggttgaactcacggagggccaggagtccaagaccaaagcccggtcccaaatgatgttgaaaccccggtctcttactaaacttacaaaatttagtggccgtggtgtcaggcgtctgtaatccccagttaactcaggagtctggagagcagaggatttaggtttgaccccgaggaggcacaagtgttggcatgtgacgccaaggatcggtggccactggcacttcccagtctgtggtggacacaaggcgagattcaagtctccaagaaaaaaaaattcagctggcgcctatgtgtgggatttgagctggcaagccgtggttaaaccaggagggctgaccctcgcggccctctccctttggcgcccagggaggggtccgggctaccacgtcccgcctttggttgatttcgccctggcctctttagtcgtggggccgcgagaacgcaaccgctgtgttcaaaaagggacatttctgggctctccggggtgtttccggcccaacccttcgctggacgggactgttgtttcacccttcgtgcttcggggaacagggttgaccgccaatatgggggttggctcgcgcccgatggagtccg

SEQ ID NO: 492883 - DNA, 1460 bp, Homo sapiens
  misc_feature (491)..(491): n is a, c, g, or t
  misc_feature (790)..(790): n is a, c, g, or t
acacggaagttcacctattgtaccacgactggaacttccgtccattgcttccattttagaatggatatgaacgctggcagaacttctcgagtgagtctctacagacctctaagagctatcaaagagagatcagggattgccaactgcctatctacaactggcgaccttgctacacgttgatatgccagtgacagcgcgtttccctcctaataagtgataagagatgatggatgaatacttcagtcatttgtcccaggctcagccatccagaagtctagctctgggctggacaagaaacagggtactaatattgagcggaacgagattgaagaactaaagcttagtggcgctggactcggaagacggtgctagatgctaggtcgccctgctagagcgtccggacgtgtgtagtccttgtggatcaactacttttacgcaagaatagtatatctcagccatggagtacgcctcgcttgaaggatcgcttggantcgatctggggacaagccagaccacaaggcatgctgtaggagtgacacatttaacacgccataataccacgggcagctcgtgccatgatcactcaatgaacatgtgacctgtctcctgtgagattagatcttaccggagaatctcacatccctctgagaattacaaccctcacgaagctgagcacatactgtctgtcgaccccttggaaaatcatagttcttcctctccaacatgggcaccccccttaagggccacccatagagtggttcccaagcctatggaatttcgagctccgtcnttgtggcggaagggaagtgaggcaagagacaggcttatctcagtccaatgtaaacccactgtgtaaggaaaaccgcaaaattgggtcctccagggcctcccttcggcttagaggccccaccacggcgttctgggtggcgaagtttcggtccaccgtatggggcacaaccctccatctggcattcgattgtctcccacactttagctagccctctgtctcaccgcggcgccgttaccatagtaggggcggattgcccaaacggaggttgtgagcattgcccttcccccgttgggacgctctttgtgtcttcccctaccccgtgggaatgtgttcccgtcgcggggggttacttttgaacccaggcggtgtagggaccccctggcttgccgaatgcatacctagcaccccgaagggacaatataaaggtgttgtgaattgcgccaacgactttcagtttgagaccctccagtcagacaaacgaaaagtgtgggctgatttacaacagtgtccgccaagtagagctgtagggcgacccccatgggatccgtaggcgataacttaccaaatggggcttgcgccctggagaacgacatctcggagagcgatagaaacgccgtcttacacacccacaacaccctctgtgtgtggcgtacactatcacggctataaa

SEQ ID NO: 492884 - DNA, 116 bp, Homo sapiens
caggctggactcaatggtgatagcagggtcttcagatggtggggggcacactcgcatggcgctgcatgcagctctgcaatgcggttccatgtcatccagtcgtgctcatggctcat

SEQ ID NO: 492885 - DNA, 462 bp, Homo sapiens
caggaggatcacttgagaccaggagttcaagatgagtctggacaacatattgagaccctgtctctacaaaaataattagccaggtgtggtggcacatgcctgtagtcctaactactcaggaggctgagacaagaggatctcttgagcccaggtgtttgaagtagcagtgagccatgattgtgccactttgctccacctgggtgacagagttagaccctgtctccaaaaagaagaaaaaaaatttcttaaatttaaatggaaaaaacataccagaacctatgggatacagcaaaagcagtgctaagagggaagtttagagcaataaacacctacatcaaaaaaaagtagaaagatttcaaataacctaatgatggaccttaaggaactagaaaggcaggacaaaacaaaccaaaattagtaaaagaggaataatgagacagagagaaataaaaaatgagattg

SEQ ID NO: 492886 - DNA, 366 bp, Homo sapiens
gtctacttgcctggcctgactgactgtattatagatgacctgaggtgtgcgtgcgtgtgcgcacgcgctcatatgtatatatgcaactgttgaagctttttctgttgtgtgcatacagtttcaaggctcaccactttgcactggaagaccagtaaggggatcataccaggagaagctgatcctttctcccaagtcaacaatgatctgtagttctttgttcaagggtaagaccccatgaaaaatgtccccttccctgtgctacacaggaagatgcttattaaaaatagaaatcgtgggctggtgagatggctcaccgggtaagagtactgactgctctcccgaaggttctgagttcagatcccagca

SEQ ID NO: 492887 - DNA, 104 bp, Homo sapiens
gggcacaaaagcaaaagactcggaccctatttggtaggggaaaaaaaatttgaaatgtttttaattattttgattgctggaataaagcatgtggaaatgcccca

SEQ ID NO: 492888 - DNA, 137 bp, Homo sapiens
  misc_feature (46)..(46): n is a, c, g, or t
  misc_feature (80)..(80): n is a, c, g, or t
gcacttgcggttatcataccttccaaaatcattttctattctttangatttctttcctgtgagacccttaaatttgtttngttttattttattttatttgagacagagtttcgcttttgccactccagcctggagag

SEQ ID NO: 492889 - DNA, 478 bp, Homo sapiens
  misc_feature (119)..(119): n is a, c, g, or t
  misc_feature (313)..(313): n is a, c, g, or t
  misc_feature (367)..(367): n is a, c, g, or t
  misc_feature (397)..(397): n is a, c, g, or t
  misc_feature (402)..(402): n is a, c, g, or t
  misc_feature (423)..(423): n is a, c, g, or t
  misc_feature (437)..(437): n is a, c, g, or t
  misc_feature (454)..(454): n is a, c, g, or t
  misc_feature (468)..(468): n is a, c, g, or t
tgtttttttctcttgcctgactgcgctgtgggtacttccagtactatgttgaataacagtggtaaaagtgggcatcctcatcttgttccagtccttagaggaaaagctttcaacttttncccattaagtatgctgttagctgtgggtttgtcatagaagacctttattatgttgaggtatgttctttctatgcctagtttgttgaggattttcatcatgaagtgatgctgaattgtattgaatgcagaaatccttgacaaaatactaggcaaatcaaatctaacagggacatcggaaaaggataattacaccnttaatcagggtgggggttttatcccggggggaatgccaagggatggatttccanccattaccaccaaattccaatggaattgtnggttntattccccggttaaaccgganttttggggacccanaacccttttggttcccnccttggttagggtngccggggggg

SEQ ID NO: 492890 - DNA, 205 bp, Homo sapiens
cgcgacgaacgcagtgagctatactcatgccactgccctccagcctgggcgataagaatgagaccctcccgcactgtatagatagatgagatatgatagatagcatagatagtatgcgagttgattggaggtgcccacccatgggagtcacgatcagataagatcgaatccgactgtattaccatgagataagataagaggagta

SEQ ID NO: 492891 - DNA, 107 bp, Homo sapiens
ggacaaggacaaaggcaaggcattctaattcagaattcttggacatcacggtctactacagggatgcccttaatgctctgccttaaggaatggaacaacgcttttca

SEQ ID NO: 492892 - DNA, 258 bp, Homo sapiens
tggacaaggtgttgctctgctgccctggctggaatgcagtggtgcaatcctagctcactgcagcctcgaactcctgggctcaagtgatcctcctgcctcagccatctgagtagctgatactatagctgtgcactagcatacctggctaatttttaaatttttagtagagacgggggtctcactatattgttcaggctggaagatacctttttacaagttttattctataaaaaagtcaaacatctcccaaaatccctt

SEQ ID NO: 492893 - DNA, 845 bp, Homo sapiens
  misc_feature (564)..(564): n is a, c, g, or t
  misc_feature (584)..(584): n is a, c, g, or t
atcttcaaaaataagttaattggatatattgtcatatcaaactacaaagtgtacaaagttaagtttagcccttttctagaaagtgatctttaaaattaaaaatgctcctcttttaaattcaccaaatttatgtgtgggaaggcaacaaactgatttggtaagtgccactgcaatattccctttcaagtgtggcctaaatttcaatcttaagggtgggatggctgttgtgtgctctgtgtgagaaatgatgtaggcttctactaatttaaaaagagagtgaaaaatatacataagcctataaaaaaagatttgtgcaattgtgaaagcctgttaattttttatgtagacatacctacacacgaaagggttaaattcacagcttactagttcctgtgcttccagtatttcaattggtctcctcccctcattattattattactactagtactattattttgcacatagttaactgcccttcaatatgatgcttaaacaaagtgctgttctgtggtatcgtatctctaaataatcatatttaattttttaaaacaaggttgcagttnctaattgttcgtcctgtgtnttgtggtgtgtaataaagcagttttctttcatggttattatacattagtgctgtaaatatcttgtatatgtctggaatgtgtgaaagttgataattagttaaccctgttgaagcaatgtttggtattttataactagaattacaaaaaaaaaaaaattattggggggcgcgagaattaaacttggggcggcaggaagaaagataggtagaaggagggtgaacaaacggggagggaacaggggttgtaaaagcaaagagaga

SEQ ID NO: 492894 - DNA, 784 bp, Homo sapiens
  misc_feature (564)..(564): n is a, c, g, or t
  misc_feature (584)..(584): n is a, c, g, or t
atcttcaaaaataagttaattggatatattgtcatatcaaactacaaagtgtacaaagttaagtttagcccttttctagaaagtgatctttaaaattaaaaatgctcctcttttaaattcaccaaatttatgtgtgggaaggcaacaaactgatttggtaagtgccactgcaatattccctttcaagtgtggcctaaatttcaatcttaagggtgggatggctgttgtgtgctctgtgtgagaaatgatgtaggcttctactaatttaaaaagagagtgaaaaatatacataagcctataaaaaaagatttgtgcaattgtgaaagcctgttaattttttatgtagacatacctacacacgaaagggttaaattcacagcttactagttcctgtgcttccagtatttcaattggtctcctcccctcattattattattactactagtactattattttgcacatagttaactgcccttcaatatgatgcttaaacaaagtgctgttctgtggtatcgtatctctaaataatcatatttaattttttaaaacaaggttgcagttnctaattgttcgtcctgtgtnttgctttattacacaccagcaaagaacacaggaacgaaacagatagaaactgcaacttgtagctggtgtgtatacagcggttcttttcatggttatttaatacattagctgccgtgtaacataattcttgttatcacatgctctggcaatgtgttgtagaagtgtagttagattagttttagaacccttgtttgacagcc

SEQ ID NO: 492895 - DNA, 706 bp, Homo sapiens
  misc_feature (649)..(649): n is a, c, g, or t
tagcagatacttggccacctttaaactggttggaagaagctatataaaggttatttttttaaggaagaagaccattttacttatgaggttcagaaatctatgatttcctacaaccagtaggatcttacattttaaaatggccagaaaaaaaaattaaggccctctttttttctctttcctttttttgaggggaggagaccttatcttttaaagctgggaaaggtatatagagagagattaagccactttaatatttcacttaaattggccttaaattagctgcactttatagagactcagaaaaggccttttctttaaaggataggccttttctgttggtaaatatttaaatgaaggaaggcattgtgcatatggtgtggaaggtaggaagatgggttttgaacaggatatgaccaaaggactaattaaaaatggctgatctggtgtaggtggcagttgaaactacatccatgtctccataaggcatccttcaaaggcccaggcgctgccaggggtgttgcctggaagctggaggaaccgatttcaggaagtagacactgaagacattactgactccaggcatgcttatgggagtaggaatctggttcttggtcctaattcccttagttaatcccaccctgggaaatcncagaggcttggggatttttccaatttttaggccctatttcaggggttaatgagctta

SEQ ID NO: 492896 - DNA, 530 bp, Homo sapiens
aatggctgagcgtttagctgacaaatatgaggaagctaagagaaaaacaggaggatatcatgaacaggatgaaaaaactacttcacagttttcactcgtgagctcccagttctctactgatagtgagcgagacatgaagaagagaattacagctgatacctgatcaacttcgacattttgggcaagtgccatcgaaacaggttactatgaaaaaggattatcaactagcaaaagatggaggaaggtgttgagtcttccaataaacctcaccattattctctaggtgccgtaccagcgagaagtgcattcatgtccatccgtgtaaggaggagggtgagacacatagatgggaaatgtggtgaatgctaaatcaatgatatccgcaatcatgtagacttctgacaccaccaggagctgactcacaggcctgaactgaacaccattgaaggcttaaacccatattgtaacacagcaggtagaattatctaagtttgataagaaggtgtttgatgagatacatgagaaaatga

SEQ ID NO: 492897 - DNA, 1298 bp, Homo sapiens
  misc_feature (190)..(190): n is a, c, g, or t
  misc_feature (975)..(975): n is a, c, g, or t
  misc_feature (1298)..(1298): n is a, c, g, or t
tggctaagtgtagacagacaggcatggctgagcgaaggccagatgattgtgggcttcctgctgcagaactgcaaaatggactacaggaaggggcatccgcaatgtcggtttgcactagagagcgtgcgctctcctgggactcttcgagccacatgtagatatcgtcgtcatatcgcaatagtcatcatgnctgactttaaataataacgatactcttaggataagaccgatcgctgattaacatgttgtgagaacgagatctgaactctacacatgggacatcgagcaactattagacccaagtgcacgtggtgtcataaggatgcagaaaatcgcatgtgtaccagataagttctccactttgtttgaactcgagattgcgtatgacagagagttgatacttttaacataggtagccgtataagtgcgagaaaacaccatgatcaccgttcgctagactagagatgataattcatccggatatgagataaacctgtgccatgtcgcacatgaaatcgagcagcaagctcaattccaattcggacaaggtctatatccgccaaggtataattaaacagaagggatcaactaataaggtctgattgattgagggaatcagaaggtgcactatcgtgggtgacgcatcacaagggaacacaaagggagatacacaacacaacttcatgaccccaagaggagaagatcccatatggactattcccccaatggcaagacggatccctattacaccagagctaaagggagacacctttcgttcaagcaaccccacgaagacaattgtttggaaacccgagacgcgttatgtctggtagggacacacagaaaggggcaaacatccttcggaaaccagtacggtggacacgttggcgtggcccttggaatataggaagaaggcctttatacattactttgggagagggccctttgctggactcacgtgggagagggatcacngctttttgtacatataaaggccatattgtgtggcattgaagaaaccaaatagtgtagagcctttgagaagtggtccgccttcattgaatggatgaacccattttgtgcacatgaggaacgaggtgagttctcaagacaattagtgttgcagaacgattatatgaacactacacggcgtgcagcaccactgagccacaaaactcatccgggctcaccatctttcagaatggacaatgtgttgagcttagaaaaacgcactgcatcgaggagtgggcaaccgatccgacaaaaagaatggagcataaccaaatggaagacacgtn

SEQ ID NO: 492898 - DNA, 798 bp, Homo sapiens
ccacctcggtgtctttgagcaggtgctgcctgccatcctgcccccaccagtgaggctgggctgagcctcccgctgcgtggcccccgggcgcggcgctcggcttccccacacgatgtggacctgtgcctggtgtcaccctgtgaatttgagcatctgcaaggctggtgtgtccaatggcacctgtgcacctgctgtccccctgtgcagctctgaatgacatgcagtgccctggtcacagtgaactgggcatggtgtggcttgtgggtgtgcctgatggagactgccacccacatcggtcagctgagtccctgcccaccctgtctgactctggatccctgtgccccttgcccccggtgctggcagactcagacgaagacacagagggcttttggagtccctcgccacgaccctttgcctgaccccctcaaggtccccccacacactgacttgacccatccagacatctgcattggtggaccccgagatgctgccccccaagacagcactggcaaacgtgagaacgtcagccagacaccctggaagcccctgtgccctgccccaactcacgcgctgctgaccaccaaagccactccagattgctgctgccgaataaccaaagtggcttgctggtttgggaccgtgtcaagctgacactcagtgcccgggatttgagcccagtagagaagggagccgggcaccccttcagaaagtcttcaaccccaagatgcaatcgagggcgatgtggtaacaagcacagccggggtttatgcacccaccagtccggctactggacgtgca

SEQ ID NO: 492899 - DNA, 552 bp, Homo sapiens
  misc_feature (1)..(1): n is a, c, g, or t
  misc_feature (61)..(61): n is a, c, g, or t
  misc_feature (125)..(125): n is a, c, g, or t
  misc_feature (305)..(305): n is a, c, g, or t
  misc_feature (325)..(325): n is a, c, g, or t
  misc_feature (336)..(336): n is a, c, g, or t
  misc_feature (340)..(340): n is a, c, g, or t
  misc_feature (343)..(343): n is a, c, g, or t
  misc_feature (352)..(352): n is a, c, g, or t
  misc_feature (375)..(375): n is a, c, g, or t
  misc_feature (379)..(379): n is a, c, g, or t
  misc_feature (399)..(399): n is a, c, g, or t
  misc_feature (418)..(418): n is a, c, g, or t
  misc_feature (435)..(435): n is a, c, g, or t
  misc_feature (441)..(441): n is a, c, g, or t
  misc_feature (450)..(450): n is a, c, g, or t
  misc_feature (452)..(452): n is a, c, g, or t
  misc_feature (469)..(469): n is a, c, g, or t
  misc_feature (516)..(516): n is a, c, g, or t
nagatttaaaaatgagacttttcaagcaagcactgcctatagcatagtctcatattttganaatttaaacctatagttttaattatatataaagaactattttaaaaaatcacacccacaagtanaaagactggtaatctgtttacaaagtgcagcgtcagtactgtcaaactcatctcatacaaaagattatgtgtggtttctcgggctttaaaactcccctgtgtttccattttaaatgcttttaacattgagtcatcctgcatacatgaaaagcctgtgtaatgaagccgtgggtcctttancacctgctattaattaattncaacattagtnagtntgngacctgggnagtaaattgtcatcatctgattnatgnggtcagatttatctgaatanaaatttctgcacctggttnatggagttcagtgaatncccaancacaaactnantagctttttgtatattnaatttcttgtaatgctttgtgcaatggtccatttcaaataaacttgnacgattttattatcctccctctttttctcatccaag

SEQ ID NO: 492900 - DNA, 199 bp, Homo sapiens
tcacgtggtagaacacttctatacacattttatgaggcagcattactctgataccaaatccagaaaaagatactacaatgaaaactacaggccagtatctctgatgaatatagcaaaacacacacacacacacacacacacacacacacacacacacacaacactcacacccatcccgagacaccacgcacacccagtc

SEQ ID NO: 492901 - DNA, 1416 bp, Homo sapiens
  misc_feature (219)..(219): n is a, c, g, or t
  misc_feature (355)..(355): n is a, c, g, or t
  misc_feature (614)..(614): n is a, c, g, or t
  misc_feature (910)..(910): n is a, c, g, or t
agcatagtgactcacaccgtgtaatcccacgtcactttgggaaactcgaggagctcaacaggacctgatcgggccatgacagtgagcgcatctgtctgagctacatctcccgtgtgtccacaattcgaggaggtcaccggaggcagcatgctgggatagtgaagcgatagactctcagactagagtggtcttccttcgattagcgagaggttccgaacnattacaggtctggctcgatccgttcaaacatagccaggatacaggacgtgactggacattgcaacgtcaacctgcaaagaactaacaattgaatacggagccttcgtgtggccgagtggctcgtccgagccccgtncagttgtagcccgaagtgggtgggggatagtacgagcagcacgcatctatcattcccttctcgcgtccactagactttggccatgagtctctaagtaccttagagggtagcaccaagataagtaggcggtcaatgcgtggactatcactcaatctagggaatccaaccattcacaagttctagacatggttgaatattgcccccgcggatgcaaccgggctcgtttgtgcatccagtggattgtggctccctagttacngatgaaagggaaaaacacgtactctgtgtggggacttgaaagctacagcagcgatatgaaccggggctaaatcccataaattgagacgtgcaactctcgtaccaaagggcttcgatccagggaaagtggaaccttttgcagtatcttttggcatagccttagggaaccaataggtcccgtatatcaacaacggaaagtctcctaaagcaaatgtgcggcggttgccatggggccccaaagggcacacagaggtaattcgctgtccgacttggttggcaacgacttgaaattttctntcagacaggattctaaaatatacacacacgtgagaagctatggaaggtagtttgactcgcgtacactcagtctgggaggtgccaccacaaatcccaaattatatgggccatccggaagaggcgccggttctttggattcacgcctacgttgggctattacacaatttggcacaattccgtttcgccgaatgcacactcgaaaagaaagttcgattcataacagggtggggcccatttgccgttttaagggggacttcacgaaagacgggaaaaacacacttccctaagtgtaaaggcccttccgttccgcgaggatgggacaccacgcaacacaacagagtggagagcggttccccataggaacgcgacataggatagggccgagaagcattccgatgcgccacccaaaaggaagggataccagataggaccccaaccacagaatgcttgaacgctttgcttgacggagagcgtccacccacggacaatttggagaaccccaccgg

SEQ ID NO: 492902 - DNA, 801 bp, Homo sapiens
cttctttttacctatttcaaattgtagttagatatatctgataaaattctgaatttcttttctgttatcttgaattacttagagttatctaaaaagagctatttgaattctctgtctgaaaggtcacatatctctgtttctcctggattgatccctggttgtcttatttacttcatttagtgaggtcatgttttcctggatggtcttgatgttaattggtgtctaagcattgaaatgttaggtatttattgtagtcttcacagtctggacttgtttgtgcccatcctccttgggaaggttttcaggtatttgaaagaactagggtattgtggtctaagccatagctgcgtgagggggcacctcaagcctagtcaaggttgtggttcttgtagacttgtagaggtactgccttggtggtcttggatacaaccctgaagaattctctgtattatgaggcagagactcttgttctttagccttactttttcccaaacaaatgaagtctctctgtgctgagctgcctagggctgcaggtagagtgacatactacccccctggccctcactactgggactgtgctgggtcagacctgaagccagcacagcactaggtcttgcccatggcttcctgtaaccactacctgggtaccaccatgttcactcaagtccctagggctctaccatatagccaaggtggtgaagcagccaggtgggtgtctaaccttcagggcaggagagtaccccaagacccggggtgggtaccagagactgggcatgaggagctagggactgcagacgaaga

SEQ ID NO: 492903 - DNA, 349 bp, Homo sapiens
cgatagaatcgagctcggtaccgactgcatctgtgcctctacaaggttaacacttcggctaaatagctttgaaattacagcttcaccaggactttacattcagcactaagaaaatagacatcttaggccgggcgcggtgctcacacctataatcccagcactttgggaggccgaggtgggtggatcactaggtcaggagttcgaggctattctgactaacatggtgaaacgccatctctactaaaaatacaaaaaattagccgggcatggtggcacgcgcctgtagtcccagctactcgggaggctgaggcgggagagtcacctgaaccagggaggcatagattgcagt

SEQ ID NO: 492904 - DNA, 2182 bp, Homo sapiens
gttaagaaaatgtgccaagattacctcagtaattctggtctgtgttctcaggagaccctggaaataaacaatgtgtcttctgtggcttcagcgtcacctagtgcaggctgccattcaacaaacgcattgtcaacagtcaaccaaaagaaacccattggccaccataccctgaggactaaccctgacacagatgcccttccagatgccctcagtagtctaactgattccatcgccccagccttgggggagaagcactgctgcctatgcactccatttacaggtgaactgtcacccctacaactcagcttgcaaccagccctggccaccaccagtttccccacactgagctgaatattggacatgcccatcttagacattccagcccattctgaaattccacatcgattcacccgacaaagtctgaagttccagggcaatttatctggaaaagctcacctggaatcatgtgtcatttcaaccaacaactgtcgaagaggacgtggcatcaaaaccaaggttatcaattatttataagggttgtgtggtggttggtccaagcatctctccttcatgccatcactcctttcaagagctgcctctattttctaatttagcacaggaatttagatgcccctaaataagtaggcatccagtatctgcccacaccagttttagtgagagtacatatggagacactgccaccacccctgctctcctactgcataccccaccatgccaaagcatggtggctcacacctgtaatcccagtgctttgggaggccaaagaggaggaacacttgaggccagaagtatgagaccagcctgggcaacatagtgagacctcatttctataaataagttaaaaaaacaaaaaaatagggcacagtggtgcacatgtgtggtcccagttactcagcaggctgaggctggaagatcacttgagcccaggagtttgaggctgcagtgagctaggattatgccactgcactctagcctgggcaacagagagagaccccatctctaaaaagagggagaagaaggaaggaggaggaagaagaggaagaggaggaggagaaatactgctctttctcaggcccaaggtaaaaaggtttttggtctcatgttgaccagaaagacattgatatttaattaagcaatataaaaaggctcattgttaggattaaagagtaagtaaaatcaatattgagataggaggatggaggacaccaactgagttccgatcccaatgaagaggagaaaaagctacaactatctaggtgaaatatctacttatcctagaagaagccttttgacagcaacataaaattcatacctataggtttttaattcctatggatgccgtagcaaataacaaaaacttggatggcgtaaagtaacagatgtttactcttttccagtattggagaccaggaatctgagatcaaggtgtgggcaggggtgcgctccccctggaggttctaggagaggatccttcctgcctcttccagctcctggtggccccaggtgtccctgggcttgtggccacatcactacattctctgcctccatctccacgtgaccttttcctctgtgtctgtgtctcctcttctgtctcttagaaggacactggtcattggatttaaaggccacctgggtaatttatagtgatctaatctcaagaatctttccttaattacatgcaaatactctttatccaaattagtttgcattcacaaattctggagcttagtacttggacatatattttggggggttgatggttggaggggcttttattcaactcagtacatcttaataaggaattaatgccccccaacttgccttacaagtcatatattaaaaacaatgttggcctggcacagtggctcatgcctgtaatctcaacactttgggaagccaagggaggaggatcacttgagcccaggagttggagaccagcctggataacaaagggagacccagtttctacaaaatatttaaaaattagccaggcatgatggtgcatgcctgtggtcctagctattcagggaactgaggtgggaggatcacttgagcctggaagttcaagacagcagtgagctatgctcacaccactgcactccatcctgggcaacagagctggactctgtctcaaaaaacataacactaaaacatcaaaatt

SEQ ID NO: 492905 - DNA, 716 bp, Homo sapiens
gtctcgctctgttacccaagctggagtgcagtggtacaatctcatctcactgcaacctccgcctcctgggttcaagtgattctcctgcctcagcctcccaagtagctgggattacaggtgtgtgccaccacgcctggctaattttgtatttttagcagggacggggtttcactatgttggccaggctggtcttgaactcctgacctcaagtgatccgcccaactcgcactcccgaagtgctgggattacaggcgtgaaccaccgtgcccagcctgtgtgttgcttattgacacctgagaaagtcgacataaggcaattccgtcattgtgtgaacatcacagggtgcacttacacagacctagatggcacagcctaccacacacctaggccacatggtgtaacctattgctcctacgctaccaacctgtacagcttgttaccccactaaatactgtaggcaactgtaacaaaatggtaagtgattgtgtatctaaacacttctttatcattattattataccttaagttctagggtacatgtgcacaatgtgcaggtttgttacgtaagtatacatgtgccatgttggttgctgtacccattaactcgtcatttacattaggtatatctcctattgctattcctccccctccccaccatgacagaccccagtgtgagtatctgccgggtcccaggtcatggaatccactatgagaaa

SEQ ID NO: 492906 - DNA, 170 bp, Homo sapiens
tgcggcacggcggtcagtggtcttggtgtgctggcctcgtgagacgaaggccccagaagtgacgcagccctctattggcccgaatcttctggagtcgctccaggtcttcacggcgcttgttgtccagaccattggctaggcactggctgtattttccatccctctcggcg

SEQ ID NO: 492907 - DNA, 195 bp, Homo sapiens
ctagcgtaaaaggaaaatacagaaggatcgtcttagtggccagagttaaacacacatacatctgcccaaatcttcccagagaggtgccaaaggacaggttgtctatagccagagaaaaaaagagttttgtttggctgcgagatagagagcccagtctcccagcggtgttctggacagtttttccttaagggccag

SEQ ID NO: 492908 - DNA, 325 bp, Homo sapiens
aaaatgtagaggaaatagaaatgtatttaagggcacagaaataaatgctatctacatgcaaatcatggagagattcaaaaatagaaaagaagttaacagtgcctaaatcctagagttgatcacatgtagtgtaagaataaatgtatgaaaactcattaaattgtagtatcagacttgctcaaggagttaaaagatagagattagtgaaagacgcagagaagtttaccatagaagataaatctgaataattatccatcacaacgtaaaatccaattcagacttcagtaaaaaacacctataagagtgaaaaggcagggaggaagaa

SEQ ID NO: 492909 - DNA, 594 bp, Homo sapiens
tccaatttgtccaactacttcatcctctgtacatactttaccatgtccaggtgtactgtcacgcaagtagttatcccgtatgattgactgcctgctcaattatcacctcatccagctccgtcttctttagaacactgtatcatggatctgatgttacccagccgtcattgtctctgtcatacgtgctgaagatcatgccgttgtgaatggtcatggtcctgatgtctcccatcatctgagatgctccatccatgagggcattacgaactgttcctctatacttgttcactaagatctggtatgtgttggcttcattctgtacagtgattcctccatagtgagcctttactatgtctccattccagtcctccatgtctatcaaaagttctgtgggtcccatcctggtaagctggctacttgtatcatttccaagccaatattcacttgctagtcctcagtaattcttcccatctgtgttgtctgcatcatttcctaatccctgaatcactgtccatcctacatcttctgtattcatgtcccagtatactcgatacggtttgacagctctgtcaggttgaatgacatacatctcag

SEQ ID NO: 492910 - DNA, 879 bp, Homo sapiens
tcttcaaggaggacgactgacaatcccccaagcaccatcaaccgagccccccatactcgctatgttggagctccagaccctccataggacacgcaaaagccctgggccccaatggaagagttttcctaccagcgcttcaggactcgggcttgtgcagcacgagacgcttacagcttgatacgcgcagtggcaaagagactttagggaaaggacggtgtgaagcctcagaatgagaggagtgcacgaagcggttcacacactgatccacttggctactccctgtcaggacacatagctcctgaaaatggtagcgctcagtcacttcctgcaccagcggggtccccgaactgcttgctttgctggctttcccgtaacaccacgacggatctatttgtcgtcgttcccatcaacgacctgttcctagccatagaagatgatatctgaaatatagatcaagggtaaagggaacagatgttgcagctcccgacccctgtaatccccacaacaccaagaccacaggtctagcatccagggcaacagcctgccttctctcctcccaccacccccactgcccatcttatgcctcgctcctttgcgtgctaccagaactgaccgtgaacggcatggaatccactctgtgtgcatgaatcttctgtgcctgccttccattagactttgcaccagagacacggttgtccagcgagtgaccctcaggctcgttcatctcttctcattgcggagcctgagcggcccagtcacaagtgtactgtaacactcaagatgcaccatacgccttcatgcccatatggtatgtggaagctatgactcaggacctcccatcaccccccaagactcatctcccaagtagtaatgctttta

SEQ ID NO: 492911 - DNA, 131 bp, Homo sapiens
cagggagcagaagtccttctggacagtgtgatgcccctgtcagacgatgagcagttttcccggaagcagatgccgcatgagcgagatgacggggaatacagcactgcttgctccaggtgaacaagttacag

SEQ ID NO: 492912 - DNA, 1049 bp, Homo sapiens
ggcagcgctggagtcaaaagccggttccggacccagttccctgtctgagcagtctgcctcctctttacaaatgacagatgcccgcttgtgtccttcgccaagaggactttccttggacaaggtgtacgtgacccggagccaatctcctaacgacgccgatagccgccatcagaaggggcgactcaaagcatcgatgctgcatggtggcatagactcgagacgagacgcgaagactcgacggagagaatatacaaaaacacaacgtcgctttcattacgcccggcgttagatcaaggaaatccccaggagatgcacggcatcttgctgcgaccttgtcatgggcgagcggatacccgtgccccactttgtacatcagtagtattaacccaaacagagagggttctaaaatatgcgacttcaaaggaatacctacaaggcaggaaatcacacgtggggaggtgatgaaaatagagaaacacgttaggggcaatcaagttgacagggaagtcggacaatggcggtgcgccgatgcggtacaattacattgtgttgtgttgaacccaatatgaaattgggacgagaaaaccaggtataacccagtcgatagttaggaataaagtgtggacgtatgacaagttgggatagtacgaacgcccgctgtgtgagacgtgactgggataatgaatatgagagattcagtatgcaatagaggagctgtaacagaggctataaatgtgttgtggcagggaataattaattaacggaggcggacagtggggtatgtaatgacagtggacgggaaaggtgatcgcaacccaaaaacaatgaatgtgcagtgaggttgttgactgacagactgtagagtggtagcgggggtgaaactaattaatataattgtatcgacgagtaatgataataggatacaggaaatgactaattgataagcgaactatagtgtagtaatgtacgtgttagaggaattttcaggacgtgcactatataacacgggaggtagtgttatgtgtagcgaagaaattattagtatgccg

SEQ ID NO: 492913 - DNA, 177 bp, Homo sapiens
gttgggctgaatggctgtatcaccaccccggtgaatcatgacatgatgaagttttgtgagtccgggccctccagctcatcagggccacgcacacctccgtccctccaagttgtagaattttgggggcggaggcttggtccgggaccagaagactgttcggcagactccctttccttg

SEQ ID NO: 492914 - DNA, 395 bp, Homo sapiens
gactcaagaggatcccagtcggttctaccatagatttaactgactactaagcagttttattgggtggctccttgaatgtggcaaacacttaaatgcagtccctgctttaaatgaacttattgtcacaagatttcctttttattttttctctatatctttgtttacttattcttttccatcattgtgttataacaaactatagaaaataatgtttcctatattccatgatgtattcaggaggaaaaggataattcattaagttaaaattattttccccaagtcattcctgtgaaattgcagaattgtagaatcttgccaaaaaattaataatgattacttaaaatatttaagtagtttaaaagtaggtaaactgttgctgtatggtagaaccgact

SEQ ID NO: 492915 - DNA, 307 bp, Homo sapiens
cccctcctttccagcccaattttttgggtccaaaccgggttgtcccttttttagaaaacccttttaaactttttaaaaattttaacccttttttcagcaaaaatggagaggggtgccaatcaattcccattttttaagccccttaagaaaaacggtccttgggcatttttgaggttccctcatggagctccccaaatccatttttagggaagggattttgggtcaaaacgatttgaccccctttgccctgtcccccaggataagtgacccctaggccccaggaaataaaagccgatgatttgtgtga

SEQ ID NO: 492916 - DNA, 414 bp, Homo sapiens
  misc_feature (347)..(347): n is a, c, g, or t
  misc_feature (394)..(394): n is a, c, g, or t
  misc_feature (408)..(408): n is a, c, g, or t
gggcacaggtcagtgggaggcattcgtgcctctctgtataacgctgtcacaaccgaagacgttgagaagctggcggccttcatgaagaatttcttggagatgcatcagctgtgaacatgaccagccacgctctgcctgtgagcagcacgcagcgtcgtttagagtaacttgggattgactacagaaacttaacagacatggatttttttttcccaaatacatgcttattacagattcctttctcaaagaataacgacttaaacatcaagggcactgcagagcttgagggaaactccccaggttaacaggccaccttccattctcaatgttgacctgggaagcatttnggaaaggtttctttcccggttggtctccttaaattgaattcaagccngtcaagccactttnggttgc

SEQ ID NO: 492917 - DNA, 212 bp, Homo sapiens
tagaggatcccccgcacgtgtcggataagcgggttggccaggtgtcatagtccttctcgtgcaacagggcggcgcgacacccaggctgagcgtggtagatgcacgtccatgtccacgtcgcttcccaaggccagcacggtggttaccacgttctgcttgggcatggagtgcgctgactcgtgcagactgtcgttgcccgtgacgccgtccgt

SEQ ID NO: 492918 - DNA, 550 bp, Homo sapiens
ggaaaacccggtaatgatgtccgggttgagggataggaggagaatgggggataggtgtatgaacatgagggtagactttcattctcccctttattataacaattcctttttttaacaaacccaagtgagaacagtctacagtgttttacatttttgcaaatctcttgactgtccggcttaataaaaaacagctggattctcatatcggcttctgcattcaatcagctgtgataaatgttgttttggataaaagtatgccaaggaaaccccgcctcacgcagttatttttgttgaaaagggaggaaaatttttatagtctcttcaaataaattgtcaatattctcttttgccattatacccaaacccaacccatactgtcttaccttcgctatctcccattccgcacacttaaacctattctataaactttttgtcctcaattttcttaaaattcacctatctgcctttgccccttaataaatcttttgctcattcctgcattttgaaaaatcatccatgggccatttggaaaacatttctttctcttact

SEQ ID NO: 492919 - DNA, 437 bp, Homo sapiens
ctaaaccctcattgcttgctgcagaaagtcaaatttcttatttagggttctcttgcccaaatgtttccaagaatccccggatccttatatgtgtccaaataacagatctgattgtcacgtggggctgagctatcacttcatatcctcaagccaaagaggttggccaagatggctttctgccctcttaattgttgcagtcaccttcatggtaaagatggaagtgggtgtgaagtaagaaagataatgccttttttggtggtactttctcttagggatagaggtgtcccttcaaatcaagataatttgaggcttaaagtgttatagcaataactgtgagtggattttcttagttagttttcattagtccttagttttctcaggtattatcagcctggggggaaggggcagaagatcttaattccctgaccaaatagcat

SEQ ID NO: 492920 - DNA, 429 bp, Homo sapiens
ttgacaggtgcgcagccacgctgggctaatttttgtatttttagtagagactgggtttcaccatgttggccaggctggtctcaaattcctgacctcaggtgatccacccccttcagcctcccaaagtgctgggattacaggtgtgagccactgctcccaccttctcccctttttctgatactctctttgatatagtttggatgtgtgttcctgctcaaatctcatattgaattgtaatctccagtgtaggaggtggtgcttgagatgggaggtgactggatcatgcgggtggatttctcatgaatggtctagcaccatctccctaggtactgtcctcatgacagcgagtgagttctcatgagatctggttgtaaacagtgtgtaacgcctcctccctctcccgtcgctctgccatagggtaccgagctc

SEQ ID NO: 492921 - DNA, 97 bp, Homo sapiens
ggagccaggcttcgcttcaaggcggctctaccttttctcagaatggtttcctgatgtgtcaatgtgaaagttaaataaaatttatgtgccaaacctg

SEQ ID NO: 492922 - DNA, 281 bp, Homo sapiens
cgggcccagcctgcccaaaccttgggccctggaagagtccttcaccccatcactagagtgctctgaccctgggctttaacgggccctattccaccgcctccccaactagagcctgtgaccttgggaccaaagggggagtccctctactattgcgactcatcctaggctgcggccactttcagggaggggccggctggcctgaacgctcagcccaccctacactttttgctgagggtgctctgacgtccacgattatggagcactattacccttatccaaag

SEQ ID NO: 492923 - DNA, 448 bp, Homo sapiens
  misc_feature (407)..(407): n is a, c, g, or t
  misc_feature (434)..(434): n is a, c, g, or t
cacattaacctcggttttcaaaagtgttcttaaaagaatttttacagccaaatacatagaaactagatgatttttcaacttacagaaaactacccaactataagataaccagagacatttattcaaggaagtttcataagttatgatcaattctccatttttaatcatctgggggatttgtttctaaactacagtttaagtgattttagcttttgatttgtgttcatcatagatataaaaccttatttgtagatggataaactgccatatctgaggtaggagaagctgtgagttcagggacagctttggctacatatcgagttctgggacagctggcctatattgtggagcctgtctccaaatcaataccaaaaagaaaataacatggactataatattttttttcntcatatactttttaaaagtggggacanttacccatttttcc

SEQ ID NO: 492924 - DNA, 217 bp, Homo sapiens
  misc_feature (27)..(27): n is a, c, g, or t
  misc_feature (114)..(114): n is a, c, g, or t
  misc_feature (133)..(133): n is a, c, g, or t
tttgagaccagcctgggtaacacagtnagaccccatctctacaaaacatttttaaaaattagttgggcatggtggtatgtgcctatagtcctggctactcaagaatctgaggcnggaggatcactggagcccnggagtttgaagttgcagtgaactataatcatgccacttgtactttaccctggacgacaaaggggagactctgtctctttttaga

SEQ ID NO: 492925 - DNA, 409 bp, Homo sapiens
  misc_feature (409)..(409): n is a, c, g, or t
gtctagactccaaagccaggcgagagatagagagaccaggcagatgaggagctcaacagaataccaagccgatagctgcgacggaccaagcttaacgctgagtcaacagcccccgtgctcttcacaggagtggtggatgctcgttgagagcggactgtgctggcactggcgggaagtatggctgggacatcggtagatgcttaccacctggtcactgatcgcatgcgccggacagtcaagttcctgtgtgctctgctgcggggaatcttcaatctgtccgtggactggctgcatcaggcccgtaaggctgcgttctatataccgccggatgaatatgtggtgaccgaccctgagcaggagaagaactatgggtttagcctttgacgcactgagcagggctctggagctn

SEQ ID NO: 492926 - DNA, 102 bp, Homo sapiens
cgtagctgggcaggccttatgtgggtctgagaggggggcatggctgaggggattgcctttggagtgtgcatggacattaccacagaaagcctgtgtgaagtg

SEQ ID NO: 492927 - DNA, 1474 bp, Homo sapiens
ggactttcacttggcggagcatgagtgacgtgtgggggacaagtatccatcttcattctgtgcagcaggttgtatagagagctcgcgccttcaaacgtaatctctaacttcgtggacgcgagtgacctccaggaagtacatccaatagagtaacagtcatgagccttgattctagtacggaagctgaaagattgtattgagttaccatttactggcctgcggaaacagctagcacaatcagctttgccacaatccttatcgagcgggacactgaccatcgtaaaacgctcgtacactgacgttcgtgcaaagcgcatacgctggggcttcagcaactgcggcagcacgcgaaccactgcatcgatccacctccgaggcaacggtcccttaacacgaccatgctattcccgatggagcaagtgcgcttaccatgtccagagcttgacctgggggactttcccgaacgccgccagccagtaccatccccacttcgttcattccctcgcttgcgtccctacgccgctacacgccgcatttgcactttgccctttgcgtgccccgcgccttgcgacttcccctgcttgcgccttcttcgccctcctccgcgcctcgcacccgccctcttcaacccccaagaagtgtctatgtatccccatccgagcggcaggacaatggccacgtgcggaacttgcggtataagcacggcgaacacgacgggcaagccttccattgtacaaatctcccggcatcctgtggtcgcgttccacgtccgtggatcaagcttgcaccaacgctacttgcttgcacaccactagcgcacttgacaccactttgactgcatttgtccgcacgagtggtacgggcacagtgtccaccccagtgggctgactgagagtgcctccgataatacacttcgtcgctctctatctgcccttactccctaatacccaatcaatatcgcttatcccccttgacatctcttgacactactgccctaatattcaatgtaactgcggtcccctttaactactccaacccgtcattctcctttccttgccagctcaactctcgactgcaaacactgccctgtatatatctccacagatcgtaatcattactcccgcgccaaatagcaagccttggccacgctctttgccacgagcgcaacaccattcacccccgagcaggagccgcattgtaggatgcatctcactcggcccccctttcagagcaatataccatcgggtgttcccgcggacgaaatacctccccttggattgctcactgcagttgatctcggcaacaagatagcactcacacaatacccatagatataatggacgcattggtcccaccgcgtgcactcgtacagtatgacgcaatcgtcgtccctacaggtttgaatccctccgtcttcactcgctacgcggtctccctctctcgagtccatttgtggttgtccgctcgtgtccta

SEQ ID NO: 492928 - DNA, 118 bp, Homo sapiens
cagctgattcacagtaaagtcatggagctcacacgtggctcgcaactggggcataaggacgataaccggcatccccatcctcagtaaaacctcaccacagcccccacagagagagcgt

SEQ ID NO: 492929 - DNA, 341 bp, Homo sapiens
tgccactttttgcaactggtttgttgtcacatttcatctccattctttgcatttctgagaacacttaaacgtttctgcaggtccattttatatctaacttgaaagaccgtataactttctggttgccagcatgcttatctttcttttcagctcatccattttacagctgtgccctactgtgattgattttccaaatctaaattaccttgagcagcagtttagcataatatgccttcagtggcattcaataaatggagtttcccttagcacagttctgtcagaagtgcgtttgagattgtgtgtatatatatgtatgtgtattttaagttattatttgtatt

SEQ ID NO: 492930 - DNA, 511 bp, Homo sapiens
  misc_feature (231)..(231): n is a, c, g, or t
  misc_feature (239)..(239): n is a, c, g, or t
  misc_feature (257)..(257): n is a, c, g, or t
  misc_feature (312)..(312): n is a, c, g, or t
  misc_feature (337)..(337): n is a, c, g, or t
  misc_feature (378)..(378): n is a, c, g, or t
  misc_feature (463)..(463): n is a, c, g, or t
  misc_feature (466)..(466): n is a, c, g, or t
atgaccccaatacgcaaaattaaccccctaatctaattaaccactcattcatcgacctccccaccccatccaacatctccgcatgatgaaacttcggctcactccttgggcgcctgcctgatcctccaaatcaccacaggactattcctagccatgcacttacttcaccaggacggccttcaaccggcctttttcatcaatcggcccacatcactcgaggacgtaaattangggctgantcatccgctacctttcangccaatggggccttcaatattctttatctgccttcttcctacacatcgggacgangcctatatacggatcatttctctantcagaaacctggaaactcgggcatatcctcctgcttgcaantataggcaacaggcctttcatagggtatgttcctcccgtgaggccaaataatcattctggagggccaacagtaattacctttacnatngggccatccccatacattgggggaaggacctagtttcaatgtctg

SEQ ID NO: 492931 - DNA, 374 bp, Homo sapiens
  misc_feature (18)..(18): n is a, c, g, or t
  misc_feature (64)..(64): n is a, c, g, or t
  misc_feature (213)..(213): n is a, c, g, or t
  misc_feature (218)..(218): n is a, c, g, or t
  misc_feature (240)..(240): n is a, c, g, or t
  misc_feature (278)..(278): n is a, c, g, or t
tgcacgatggaccgtganctccaccggggactcttaatctcggtggaatgctgtgcttatcctncctggggtgccagagtttggaaaacgggaggcgatgctgaatttaactgtgtatccttagtgtccggcaccgtgtttggatctcaaggggagctcagtgaatttgatggatgaacatgtaaggtaacagatgctcgcttcctttcgggnaggcntcatctggcttcaaaaaaaaanttcatgtcgcctctgctgcagtccacttcctatcgcgnatctctacctaattggactacactctctctactcttcattgactattttgaggtttttccggataaaaaacaaacgtcagcatgccaaaaaaaaaa

SEQ ID NO: 492932 - DNA, 828 bp, Homo sapiens
tgggaaagtcatgtcaggggtagtaatataatggtggggacaattagtttaaccattgggagtaggttaaggttattgtacgtagtctaggccatatggtgttgggaaattggaaactagtagggctaggcccaccgctgcttcgcaggcggcaaagactagtatggcaataggcccaaatatgggtctaaaagggatgtgggtgtttagacgggttaatgagaagctagcctaataatgtgaaccagcgacatagtatttatttcccttacataggacattaacatagggaggacattgagggtgatgaagcgactaataccatagaatattacccatagaaaggtgacaagtggtaaaagtgccacaagatacataatcactataaacatgcataacaaaaagggagagaggaacaacatgagagaaacaacaaaataatgacagtaaacaacaacaacaacaaacaagagcaagactcggaaacacacagagagacacaacaagcaaaaaaaataccgtgagaagaataccgaacccacgagggaacccggcaccgaaacccagcaccgcgaagaggtacaacacgagagaactaaatgagtccacaaggcaaacaaagaagacacagaaaccacccacaaaaaaagaaccaaagaggaaactaattgagggacggaaagaggagaaaaccacatggaaatgagcgacgaaaaattacgagaaaaaaaaaacgagacaccccattggaggcgcaggcgaacaacacacgggacaaacaaagggcgcggaacagacgatttaaccagccatctgaggaagcgacca

SEQ ID NO: 492933 - DNA, 353 bp, Homo sapiens
  misc_feature (272)..(272): n is a, c, g, or t
tggtgattaagatccacacgtacgcttcttcaggctctgtcacggtcacagaatctaactggctcttctccatagtagggcggcgattcagcactgtctggcaggtaaccttattagcagtgtagaaaaagaggcagaggaagagaacaaaagaagaagaggaagagggacatgaggaggcggttgtcgctggacttaacgatacatggttttctccgagtggagctgggggacccgtgtttgatgacgatctttggttcgcaggatgtgcnggtggcgcaggccttgggaggaagggtgattggcccgggaggaggtggcctgcaccggcttgggggtttggcgggaaaggc

SEQ ID NO: 492934 - DNA, 138 bp, Homo sapiens
  misc_feature (40)..(40): n is a, c, g, or t
  misc_feature (125)..(125): n is a, c, g, or t
tctagggtgaagtttattctgttttcacatctaggttgtnggggagagtgatagacaaagttctggattctgggcatcgtcggcgcatgcttgtaatcctacttgggaggttgagacaggaggantgcttgaacccag

SEQ ID NO: 492935 - DNA, 81 bp, Homo sapiens
gcggccgcctactactactactgctcgaattcaagcttctaacgatgtacggggacatggggttggtttgaaaccagcttt

SEQ ID NO: 492936 - DNA, 332 bp, Homo sapiens
tgtgataaggatggaggagcatccctatagtcatctccaggtatatggaggatacatctactattaggactttacgctacgaagcgaaagcttctcaaatcatgaaaattattaatattactgctgttagagaaatgaatgagcctacagatgatagagatgtaacatgtggtgtatgcatcgggatagaccgagtaacgtcggggacatccggataggccgagcaagtgttgtgggaagaacagttagacattcactctgatgcatctgctagtgacctggcttttggcgtaggtttggtctagggtgtagcctgcgccattcactctgta

SEQ ID NO: 492937 - DNA, 170 bp, Homo sapiens
  misc_feature (27)..(27): n is a, c, g, or t
gagctccttaccgtttgtgtctgtgancggcccactactggtggatgaggcgcctacaactcctgctcctctgctgactcggctggcccagcacatgaagtggtcatctggtttcgttcctagactctgccttggaaagcagtccatccctgcacagtccagctgacccc

SEQ ID NO: 492938 - DNA, 757 bp, Homo sapiens
  misc_feature (578)..(578): n is a, c, g, or t
  misc_feature (592)..(592): n is a, c, g, or t
  misc_feature (649)..(649): n is a, c, g, or t
  misc_feature (710)..(710): n is a, c, g, or t
ggcacgaggtcacaactgaccgtgccgcatgacctctcagagcctcagctactggaggagacatgctctcacgacaggggagaggcactaagtcatggacctggctgcaaggtactgaaggctgctgcagctatggctgcacgtcaccctcctgagccgcagctttgctggcagacatcctggtgtgaaatcaccacattctgcatctgcaaggctccccctacatcctaaagactcatgtgacggactcagactactgactacatgtggaattctctctgctcagagatctcacttaaatatatatacacagccttggatacgtgataacactagtgtgcacaccagcatgcttgaagaggcacgtctgggccagatgctgcgcaggccgcagctgcagatgggcctgtgtgcacacaacatgatgctatgcatgtctagtcgacgatcactcaaccagactcagattcaggagctcagctgcatactcactagggactatggatacctgcatacgcaacggatatcaacaggggaagaggtcttgctcgaagagactttgagcaggtctacaactnggctgacatgatcngactggtacgtgaatagactgtcgtagctacttctgtcagactcactgatacactantactatatgtgatgcatcaggactgtctgactactcagtgatgatgctagtgtcgtcaggnactcagcgacgtagcatgggcacaacacatcgatgttgctgcgggcc

SEQ ID NO: 492939 - DNA, 1307 bp, Homo sapiens
  misc_feature (7)..(7): n is a, c, g, or t
  misc_feature (65)..(65): n is a, c, g, or t
  misc_feature (101)..(101): n is a, c, g, or t
  misc_feature (119)..(119): n is a, c, g, or t
  misc_feature (128)..(128): n is a, c, g, or t
  misc_feature (135)..(135): n is a, c, g, or t
  misc_feature (141)..(141): n is a, c, g, or t
  misc_feature (163)..(164): n is a, c, g, or t
  misc_feature (167)..(167): n is a, c, g, or t
  misc_feature (185)..(185): n is a, c, g, or t
  misc_feature (232)..(232): n is a, c, g, or t
  misc_feature (250)..(250): n is a, c, g, or t
  misc_feature (277)..(277): n is a, c, g, or t
  misc_feature (280)..(280): n is a, c, g, or t
  misc_feature (285)..(285): n is a, c, g, or t
  misc_feature (291)..(291): n is a, c, g, or t
  misc_feature (294)..(294): n is a, c, g, or t
  misc_feature (297)..(297): n is a, c, g, or t
  misc_feature (323)..(323): n is a, c, g, or t
  misc_feature (335)..(335): n is a, c, g, or t
  misc_feature (343)..(343): n is a, c, g, or t
  misc_feature (351)..(351): n is a, c, g, or t
  misc_feature (354)..(354): n is a, c, g, or t
  misc_feature (359)..(359): n is a, c, g, or t
  misc_feature (372)..(372): n is a, c, g, or t
  misc_feature (384)..(384): n is a, c, g, or t
  misc_feature (388)..(388): n is a, c, g, or t
  misc_feature (419)..(419): n is a, c, g, or t
  misc_feature (456)..(456): n is a, c, g, or t
  misc_feature (461)..(461): n is a, c, g, or t
  misc_feature (839)..(839): n is a, c, g, or t
  misc_feature (847)..(848): n is a, c, g, or t
  misc_feature (852)..(852): n is a, c, g, or t
  misc_feature (862)..(863): n is a, c, g, or t
  misc_feature (871)..(871): n is a, c, g, or t
  misc_feature (875)..(876): n is a, c, g, or t
aaagtcnatcccttgattctcccgttggggaacaatttttcgtttgcctggtcaggtgcctggcnagggagcccatgttttctttccctgggtccctgaanaataatagcaggccctgncattaaaanaactggnttttcnacaactccccaccaaagccgcnnccnattacagataggagagtntttaaaagaccccactcagcccctctaagaggccttggacaaggacngctccccaaaggatgacntctgggactctttgtccattttctcgnttnccggnaaaggngcnagnagatgttctccaaacgctttgaaccnaagcatgggccncgcccacnggcccccnggnagagntcaagccatcggngctgctagagtncttnctggactttccagagaccagtattccctttngctgcctctaaaaggcctgtccccgcacacatcaganacacnccggtctcatgggggtcacaagcttttttttttttcttaaagaattttcaaaatcaaattccagaatgattttacggagatatcccaggaaaattaaggcttctcttaaacactaaaaaggcatgtaattgcttgttagcaaaatggatatgacacatctctgatacttttttcattattggttgggctgagcagtcagaagacctggtcgtcgtcttgactttggcaaatgagccggagccccttgggcaggtcacacaacctgtcccagcgagggacaccgagtggcccttcatgtacatccatggtgtgctggcttaaaatgtaattaatcttgtaaatatactcctagtaatttaagattttgtttttaaactngaaataanngatngtatagtgcnntgtttttnaaannaaaaaaaaaaagaaaaaaacaaaaaaacaaaaaaacaaaaaaaaaaagggggggggggaataaaaaaatttacccggagggtggcgccccaacttaagaggctgatgcaccacgatcatattgcttggtcgatcaaaaaaaggcgggggcccccaaaaataggagaggacagccgacaataaataatgacgacaggaccgactcgatcgagcccacgccggtctttacaaaacacacgctcgtgctagctagcgcggcacaaaaacacgctccaagcacgtggctggcggccagtctatcgtggaaaacgcagaacaccccacaacaacggagtagggggggggcgaacaaaaacaaggaagaacaaacaacgtccacccaaacagacaattaccaagcagctgctcggaggggacacacacccacacgtt

SEQ ID NO: 492940 - DNA, 116 bp, Homo sapiens
aaagcagccaccaattaagaaagcgttcaagctcaacaaccactacctaaaaaatcccaaacaattaactgaactcctcaaaaccaattggccatctatcacctatagcagactaa

SEQ ID NO: 492941 - DNA, 936 bp, Homo sapiens
  misc_feature (7)..(7): n is a, c, g, or t
  misc_feature (85)..(85): n is a, c, g, or t
  misc_feature (90)..(90): n is a, c, g, or t
  misc_feature (468)..(468): n is a, c, g, or t
  misc_feature (476)..(477): n is a, c, g, or t
  misc_feature (481)..(481): n is a, c, g, or t
  misc_feature (491)..(492): n is a, c, g, or t
  misc_feature (500)..(500): n is a, c, g, or t
  misc_feature (504)..(505): n is a, c, g, or t
ttttctntatttttttcttgacgtgctcagaaaccatgaggcccgggggcgtccttgaaaaggcctgtccccgcacacatcaganacacnccggtctcatgggggtcacaagcttttttttttttcttaaagaattttcaaaatcaaattccagaatgattttacggagatatcccaggaaaattaaggcttctcttaaacactaaaaaggcatgtaattgcttgttagcaaaatggatatgacacatctctgatacttttttcattattggttgggctgagcagtcagaagacctggtcgtcgtcttgactttggcaaatgagccggagccccttgggcaggtcacacaacctgtcccagcgagggacaccgagtggcccttcatgtacatccatggtgtgctggcttaaaatgtaattaatcttgtaaatatactcctagtaatttaagattttgtttttaaactngaaataanngatngtatagtgcnntgtttttnaaannaaaaaaaaaaagaaaaaaacaaaaaaacaaaaaaacaaaaaaaaaaagggggggggggaataaaaaaatttacccggagggtggcgccccaacttaagaggctgatgcaccacgatcatattgcttggtcgatcaaaaaaaggcgggggcccccaaaaataggagaggacagccgacaataaataatgacgacaggaccgactcgatcgagcccacgccggtctttacaaaacacacgctcgtgctagctagcgcggcacaaaaacacgctccaagcacgtggctggcggccagtctatcgtggaaaacgcagaacaccccacaacaacggagtagggggggggcgaacaaaaacaaggaagaacaaacaacgtccacccaaacagacaattaccaagcagctgctcggaggggacacacacccacacgtt

SEQ ID NO: 492942 - DNA, 951 bp, Homo sapiens
cggagacgaggatgccgggggcccgaaagtgagattggggcactcctgacaagaaaggaaagctgaaaggcaaaggggttctaaaggaacggcaacccaaggaaaaacacgggaggacatccagggcagagcgaagaataagacctagaggtgacccaggtagacggatcaaagccattctcatcaaaaaccaatgtcagtgtgaaccagaaagtgcccaaccaggtatacccaaagttcataggaatcacagggggaaatcagaatagacaagggcaatcctgacgaggggaagaactgaggcatcgcgctacttagcttcaaaacattgcggggctatggtaacccaaagagcatggtatgatataagcgacacgcggaccaatggaacagaatagaaaacccagagataaatacatatatttaccaccaactgattttcaccaaaggtgccaggaatgtgtatcagggaagggatgccctcttcgatgaagggtactgggaaggctgaatattcatctgcagaataatgaggctgggcccctaatgtctcaccatacacataaaattaaaatgattggagacataaatatagggcctgaaattatgaaactactggaggagaccacaggggaaatgtttcaggacatgggtcaaggcaaagattttgtggctaagatctcaaagacaaaaatggacaggtgggactatattgagctgaagggattctgcaagacaggggagacagtcagcggagtgaggagacaatctgtagaacgggagaatatgtgcagactatttatccgacaggggactagtgttgagagtatacaaggaattcaacagcaaaaggaaaatcccttttaaagagtgggagggggaacgtggcggggacatttctcaaaggaggacatacaaatggccaagtatatggagggaatgttaacatcg

SEQ ID NO: 492943 - DNA, 509 bp, Homo sapiens
gcaagaaaccagagcgggacaatcagttaaagcagtgaaaatagattattcagaactatgacaataggggaacagatactatcggtatagaactgggctcaataccaaatacaaggtggaccagtggggattataaatatagcccaggagcagagtggggccagtcgatggaaaatgactaatgcgaggaaacatcaggggtaaagggggattgttacgtaaactgacctgacaagattcttgctgaaggcaggtgagggtgatcaaatattacgtgggggatagtacaagatgaggaatttgatcagatattaagggtgatcagatattgaggctgggagattctagctaaactgacttatcaggaatcttgctaaaatttggcaatgccaggattccccttggtaatcatgatcagttaccccagccaaaagcatagctcccttgtttgacagttgattcaggagcctgagggacccgaagtggtcgggtgggagttttcactttta

SEQ ID NO: 492944 - DNA, 473 bp, Homo sapiens
  misc_feature (67)..(67): n is a, c, g, or t
  misc_feature (103)..(103): n is a, c, g, or t
  misc_feature (214)..(214): n is a, c, g, or t
aaaatgttttggatggtcctacattagcaattaaaatgctgtggcccagaagtaaacaccttacctnagcccctgagtgattaggatgatcagagctttcccnggtgaccccataggaaatagaacacgagcaagaaaataaacttctgttatttaaagcccactgagattttgggattgttattgcatataatttagtttatggccgggtacngtgtgtcacgcctgtaatcccagcactttgggaggtcatagtgggctgatcacctgaggtcaggagtttgagaccagcctggccaacatggtgaaaccccatttctactaaaaatacaaaaattaggcaggcgtggtggcgggtgcttgtaatcccaggtactcaggaggaatcgcttgaacctgggaggtggaggttgcagtgagccaagattgtatcactgcactccagcctgggcgacagagcaagtctccgtctc

SEQ ID NO: 492945 - DNA, 360 bp, Homo sapiens
tgtctccgtgcattacgtaagtagcacgtgatgccactatgtctcattagaagtgatgtggggttcgagattagcatcagcgtaagaaagctagtgtctgacactgcttaaattactattatcttttttgtaattaataaataatctgaatcttgtaaatatcctgtatcccattaaacttaatagttgtagcatcctggcaattctcacatgtattatatacagacaatcgtgggacaaaactaggttcctggagatgcagaagttaggcacaagactgtatttctgagcagccagagtggatctagtcagatcagaaagaagccagcttatctaggtgactaaaaatttacactactt

SEQ ID NO: 492946 - DNA, 1124 bp, Homo sapiens
  misc_feature (150)..(150): n is a, c, g, or t
agcgactgaagcagcatggtcaagccgtgtggggctgcgcctgagcggggaatgcccgcaagacaggtggaggtcttcacgacacgaatcttccacagtgaggctgaggaattcctctacagattcttgccacacgaacatcatataccntgaatcagctcttgcaacgaggtactcccatcaattgtggcttgactttgactttccctccggtgtccctacttggacatccccaatccctagaccctccataccaaggcatgatgacgatggaaaccagattaatgcatggagtaatgaccagaagatcaccttaaaggatagtggcacttctctcccatgtggcatataggatggaacaagtaccgtgtaccccctgactgtggaccacttgtgctttgaaacgctcacggagagctcgttggtaccttccttcaaaaggtaggaacaaatggcatttactggcctcgatttcatccatagggcatttcactaaccaagcattgaattctgccccatacgaaattaggaaccgaatacgagacaatttgcattctccttcgagcgtgcttacgtccaaattcctatgagtacgcaaatgcgttgcttcgagacggaaggtgttggaaaagtggcgcgagtcaaaagaaccgcaaaaacgctgggcataaagcttctatccaatgtacttaccgccaattatccaatggtaactttgctcaagaatcgtgagtggattagctagtgagcgcaatgggcctgccaccaaggcagaactcatagtacatttggatttaccgtgagacctttggtgccattgatccgagaattgacggcacggctaatcgggagagactcacgggctcaatgggttgcatgggaaccaggaaggcccttatacatattgcctgagcttttgtaactaatcagtctaggcattgaactatgcgacggcaagaaattggatcaacccacacacgggttgaacacaaaaggccagcctaggtacctggaaaaccggggaagtaggacggcaaaatgtgacgaagcgcagaacagaagaagagcgaaaagaaaacacaaaccaagagagaatcccgcgccaacgactaacccagcacaag

SEQ ID NO: 492947 - DNA, 421 bp, Homo sapiens
tcgcccgggtgcatgcttgtgcggaacatgcaggttgtaacataagtatacatgtgccatggtggttgctgcacccatcaacccgtcatctgggttttaagcctgacatacatcaaagtacttcctcaaaataaaagggcacatatatattaagatcatcaccagcaataattattacagccatatagttaatgtggcatgacattatttggcaagccttttagaaatctagaacagaccaagtaaatatttcccctaattttactttcagcatagtgttcctttaacaaatatttattacgtacttattcctttatacttattcctttaacaaatatctattacgtactgtatatcaggtgtgattctgatgccaaaatgtagcagcaaataaaacagataaaaatccatgaccacatgc

SEQ ID NO: 492948 - DNA, 193 bp, Homo sapiens
  misc_feature (4)..(4): n is a, c, g, or t
cggnccgcccttttttttttaatagcagttggtaagaacaaaacgggatggcatcagaatggtctgggaagttttggtctgtgggcagtatggggctggggccaaatgcaaaggatttttatacattctacaacaggttaccaaatggaaaggtcatggctttactttgggtcaaaacaaagggcggccgctg

SEQ ID NO: 492949 - DNA, 133 bp, Homo sapiens
ctgaggtccatggggagcttactgacgtcatggtcgtcatgcaggccaagtgcagaagcatccactggtttataagaaaggccaagcataggcagaatgcttcttagagagtaactccttcaaaatgccattg

SEQ ID NO: 492950 - DNA, 159 bp, Homo sapiens
agccggacctcagttacaacagctaaggatacagcattattctagcagcatccattctgtttagccttccactgttagagatttgagggtacatgtacttcctaaatttggagataattatctttctgtaagttcgttatgcttgactgttgtaactgg

SEQ ID NO: 492951 - DNA, 274 bp, Homo sapiens
gctgaggtgaggcacgagaatcacttgaacccaggaggcagaggttgctgtgagccgagattgtgccactgcactccagcctgggcaacaagagcaacatactgtctaaaaaaaaaaaaaagggtaaccctggcccaaatttttgggggccaataggattgtttgggcccaggagttcaaaaccagggggggcaacatagcaagaccccttctttacaaaaaaaaattttaattccggggccaggggatggacacctgtagccccagctcctca

SEQ ID NO: 492952 - DNA, 162 bp, Homo sapiens
agaagagttgtcaatatgctggtccattgaacgaattaatgacatctctttcttaaaattcaaagttttgattgattaaattttgaggtacataagaaatgaatagaaaccaaagattttcctgattttccctctaagaaataaatccaaaatttctggttt

SEQ ID NO: 492953 - DNA, 457 bp, Homo sapiens
ctgtctagaggatccctaggctaaatgacctcccatcactctctctattcaagctagacttcttaatccttctggagctaagccagagctagctgtccctccttcaaaagtatagggtaagaagcacaattttccagggcgtatagcaatgaaaaccatagtatcttaatggatgtctaagattattgttaagggataggaagagtaatgtcagcaaatacatgttagagttgatggcattttaataagcatgtggattgcttgtaatgtaattataacattttttagttaataactacaattaaaatgacatatcagatactatttataaaaaccttcctctgatgggagaagactgcgcagtcttctcccatcaggagtacatactctaaaagtaaattgtactgatccctcatatttccgttcttcatttctttgcactgatgggacgaagacg

SEQ ID NO: 492954 - DNA, 136 bp, Homo sapiens
ttggggctcatcagggggggaaacgggcagggctggcgaacggggaaccccttttcccaccccaaccggctctcctcttctactcacttttcccactccaagcccagcccagggagatggactggaagggagcaaa

SEQ ID NO: 492955 - DNA, 659 bp, Homo sapiens
  misc_feature (41)..(41): n is a, c, g, or t
  misc_feature (559)..(559): n is a, c, g, or t
ccactggggaaattctgaagccaggtggagccatacacggngctctctcccacccgggctcctgtgttgggccttcctttgagaaaccacaaaacaagctgctggaggtctgagtgcctgccctgccttcctgcacaaacggggccctttttaccctgaggatggcatctggtggtcaggaagatgcctggacagcaaatcctcactgggcctcgcttccccctcacagaaagggttagggggcctcttacggaatgcatgactagctacagaacgggcatacacaggcaatgcctattgccaagggagaagtaaatgttagttttaagaccctatgcaccattcaaggcagaagggtcagagtgtgagggtgcctgacccaaagaaaaaccgtttctgtgggttctaaaccgtatacaattttggggggtccccattgaagaattctacacaactggaatcttccatttgcttcagggcttggaaatgggattgagccagtggaagaactggaccccaaagcttcattaagtgctgggccttccggtaaattgccaanctgccccaccgaatctcccttgggtaaacccccttaaatgtgctagcgctgggccatttttggcccttaaaaaggtgccattttaagagagccccggggg

SEQ ID NO: 492956 - DNA, 205 bp, Homo sapiens
caggcggcaaaggaaaaaaaaaaaatttgggcagtgtgactcctggtttagctggaggggacaggccggggtgagtgcagctcccccccgcctccctaccccctccctccaggggcagcttttttaaaccccccctgaagtaccggccgtcagcctttccgaagtcatccctgtccctatcagtaaagtcccccctcggtttcca

SEQ ID NO: 492957 - DNA, 804 bp, Homo sapiens
taaaacactatatttttacatacaagtatgcttttattatacagataataaagatgggggaaggttctgtttttcttaataggtgaagaaatcttgaagaccagaaattggatcttactgaaaaactgatgttttttgttttttttttaaattatattgtccagctatggaagatggatttttttttcatgatcctttaactctcaagttcatctttaaatgaactctttttttttggttattggaggtaggttggtttggaggagataactaaccctagctgtccccagtctgacaaaggtttttggattggacttaatctcccagtagtggggccgatgttttaaaaacacttgctggtgttggaatggtggctgaaaggtttcctgggccaatgtgagcgacggaaatttttctgcctcataataatatccaggatgagtgtgggtccgacctacagggcgtaatagatggacccagtgaagacacagatgttcctgttcagagcacccagttaattgttttaccgtttaagacattctgtgctcaggtggccttgcaagattaaaccctttcccggaggatgtgggcctggcctgccttgaaaaaccaggttgttcaagaactcgttctgttaaaaattaccgatgccaatcagagaaacgcattttccatcccgttcccgaggaggtccatcctactgtgagtgcagaatgactgtctattgaaggggttcaagtgagtgctgaaggtacacagcacttttggaaacggagatattccacaagttgtccccagaggtag

SEQ ID NO: 492958 - DNA, 105 bp, Homo sapiens
tttccccctggggccccccccgggggggggggggttcccccttcccgggttttttttttctttgggggcccccccccaggtttttaagggggttttttttttcca

SEQ ID NO: 492959 - DNA, 1627 bp, Homo sapiens
aataaaaaaaaaaaaaaaaaaaatttatatccttttctccccaccatccgggttatcacaggagatctataaggacaggcagaaatttctcagaaacaggttttatcaacaggtgggccttccttcagaacctgtgggtcaacatgtggggcattcagcgggtggtatcagctacacttcgtgagaggacattctcacgaagtgaaccagggactatttgtgcacctcttgtggggcaagggctcgaaaccagtctcaagttccacaaaagaagtgccgcggattgtggagaaagccagagaggccaagaagaagaagtggcgtgggaactccgggaaagccataaagcccaagcgcaggaaacaagggtggtcgtggcctcagaataccgtggagtgtgacgaactcgaagaagtgggccaaggggcaccagaagagagacatatagcgaaaagcgtggaagaaaagggccgcccctattgaaacattcgagagggtcaaacaccgcggcgcgaagacacagaggctgtgacaccctggtgggccgtaattcgagctctctcacgaggggggtgggcacaagaggaaactctcaagcccaagcacagacactgtgggaggacagacacagccggagtgtgtgccacaggtgtgcacagggtgttggtgtgagaaacgcggggggcccccacagccagagggtgtgggccacagtgtggcacagggcggcacgcccgagaggcaagcaatcgtcgcccgcgggggcggggggaacacacaaagaggcactctctggggagagtggccgccgggggagttgtgccgctgtgaaacagacacataggcgggggacaaagccgggggcacgcgcgcacttacacaaagacgctgtggggaaagccggcctattaaagccccgtgtcgagggcccgggcagagacaaagattccccccagattattaatacttttaatttgccagaggcgctagggaacggccagcaaaaaactgcgccggagggattcaactgtgcgagcgaggcaattacgacgtatgtggggagacaaaacgttttgcacggggcccttatttgtgcgcaaataatggggggggccccggaagaggcccacggaagcagcgaaagtggattacggacgcaaagtatagtggggcctaaaagaaacaggggcagaacaagaggcccttctcacccacgtgtgttccccacacgagagggagggggcaatacaagcggggaacacatgggggggtgccttgaaacgacagacggggtgcccccaggagtttgcgcgcagaggagaaaactaccaggggggtgccccaggtgggaactaatctgcgaggcaacatgagaacccaagcaaggtgggtggtaccaccgagagatagtggacaacaactaggggggggccccaccatggtgacgcggcggagacaacacacgcgtggcagacaaaacaaaaccagacgcggcgcacaacgaacagagtggtgtgcgatgatcaacccacagggaggcagagataacccagacgaagaacacaacgacgtggagtaaagaccgagtgagtaacacatcaacgaactcagagcagaccaatactag

SEQ ID NO: 492960 - DNA, 799 bp, Homo sapiens
  misc_feature (259)..(259): n is a, c, g, or t
caatgaaaaatgatgcaagtgttcacagaagctttattcatttacctaaaactgaaagcaacgccagacactcttcaactggccaatgggtaaacaaacggcagcccaccggttccataaaacagcactcagcaggagacaggactgggccactgatgctggggcagcggggataagcctgaaatgtcttatgcagagtgaaagaggccacacttagaaggctgcagtttttgttttttatatgccatcttggaaaagncaacactatagcaacagagaagagctctgcagtcacgaggggctggggcagtggaaggactgactttcagagggacaagagggaattctggggggctgtggaaagattctgtatcttgatgctgatggttgttacatggctgtgtgcattgatcaaaactgaagtatgcatcagaaacagcgacttggactgtatgtaaattatactgcagtttttttgtttgtttgtttgtttgtttgtttgtttttgagacggagtctggctgtgttgcccaggctggagtgaagtgatattggctcactgcaagctccgcctcccaggttcacatcattttcttgcctcagcctcccaagtagctgggaccacaggtgtccaccaccatgcctggctaatttttttgtatttttaatagagacaaggtttcaccatgttagccagggtggtctcgatctcctgaccttgtgatctgcccgcctcggcctcccaaagtgctgggattacaggcgtgagccaccgtgcccagcctatactgcagtttta

SEQ ID NO: 492961 - DNA, 387 bp, Homo sapiens
aagatatacacgtggccaacaagcatatgaaaaaatgctccacattacaaaaatgcaagtcaaaaccacaatgagataccatctcacatcagttagaacggttattaaaaagtcaaaaaacaggctgggtgcggtggctcacacctgtaatcccaacactttgggaggccaaggtgggaggttcacttgagcccagaagttcaagaccagtctgggcaacatagggaaaccctgtctctacaaaaaatttaaaaattatccaggcttggtagcacatgcctgtgggtcccagctacacaggagggcttgaaagcaaaagaatcactgagtctgggagggtcaaggcttgcagtgaggcacagttgttcatgccacttgcacttcagg

SEQ ID NO: 492962 - DNA, 179 bp, Homo sapiens
accgaactgcgcgggatatagtacgcaagggaaagatgaaaaattatagccaagcataatatagcaaggactaagcccgtataccttctgcataatgaattagctagaaataactttgcatggcgagccagagctaagacccccgtacagcagacgagctacctaagaacagctacaag

SEQ ID NO: 492963 - DNA, 840 bp, Homo sapiens
agcgggagcagtgggcatgtgaaatgcagctaatctaatccaactgctatgtgctgtgagggtggaacacacactgactgcaagacctggaaggaagaaaagatacagtatcttattagatagttttagtattacattgcagcagttgaaagtgatatttcagatagattgggttacatgaaatatattattaaagatttatcgaggaaggaaggaaagaagaaagacgaacaacgaagctccgtctccctcgtccctctccctctccccagcggtcgtccctctccgctctctctcgcacggtctccctctgatgccgagcccaagctgctccctctccctctccccacggtctccctctccctctctctccatggtcgtccctcgtgatgccgagcccaagctggactgtactgccgccatctcggctcactgctgacctccttgcctgattctcctgcttcagctgtgccgagtgcctgggattgcaggcgcgcgccgacacgcctgactggttttcgtattttcttggtggagacagggtttcgctgtgttggccgggctggtctccagctcctaaccgcgagtgatctgccagcctcggactcccgaggtgccgggattgcagacagagtctcgttcacatcagtgcgtcaatgttgcccaggctggagtgcagtggcgtgatctcaggctcgcttacaaactcgcactcccagcctgctgccttgggctcccaaaagtgccgagattgcagactctgcccgtgcgtaccccggtctggggaagttgaggagccgtctctgccttgccgcccatcgtctgggatgtgaggacccc

SEQ ID NO: 492964 - DNA, 1152 bp, Homo sapiens
gccgccaggcttccctcctcttcctttctccgccatcgctgctgtgtgcttgagctccgtcgtgtctctgccgatgtactgtctctacaagcacttgtcaggattagagcgattcctggcccaagaatacaaagagccacaagctcgtcccacttaccccgagtcgggattcggagtgtaatacactgccgtgatactagaacatcaggtgagcaactcctgataaggatgacactttggagaacgataccaggctggcgtctattggatggtaacttgacacagtgagtatgtgtggccacactagttgtatgcgtgctcgtgagagggtctacgaatcactgcttaccggatatcgaagcttggaaagacttgtcttgcacgtattctcggcagacttgctgacccgtggtcattcgcgtctctccattgacatcctttgtttagattgaacccaacgggttgtgggcttggggcattgcgcattccaggctaaattcacaatttagttggtaatggggcacctctctcaatatgtctctacacacacactatgaacttcgaagcggcactcacacatgggaggatccctttaacaggagaccatggacatgaaaagtgtctatttcggccggcctctcatgctggggcccttttgcgagaacatccactttgtatcctgacctacacccgagctacgtttcgtgggcgggcgaggggttccaccctgggtttagagagttgaaacgcgttcaaccctgtgtgtggcgctgcccccggccttcctgtgtttgcgcacctgcgacgcacccctctccggcgggcgacgcttaagcctgttcccgagggcgccggttcgtcgccaatgtcttctcacgcctcggccgcccttatctccacatgaggcgcgccacacggtggggttgggcccaccaacgaccatggcgccgttgctcgactagaacccccatagaccccccgcgtagaattgaggcccatctccacgaaggccacgagtgcaccatcagttccccaggaggcatgtatgtcctaacaccgaaagcttagttcctccctccacacacgcgctaggcaacacggcattgatagcccggcacttgtgtgctcgcccccttccccttaggggtggcc

SEQ ID NO: 492965 - DNA, 246 bp, Homo sapiens
  misc_feature (47)..(47): n is a, c, g, or t
ctgcgccaggtattttgcattttagtagagacggagtttcatcatgntggccaggctggtcttgaactcctgacctcaggtgatccgcctgccttggcctcccaaagtgcagggattacaggcatgagccactgtgcccggccgatgagcaccttgctttgctcttctctccattctatatacttaactccctcttcggattatcctcagacccaatcattgagtcaagttactttactgagcacc

SEQ ID NO: 492966 - DNA, 150 bp, Homo sapiens
cagcgagtcacagtgttggcttatccagtgtgctttgcatcatcagaagatatccaaaatactggtgcatccgcacaaagactgatcacggggatctttagcattccaaggcacgcaacgcattctttctaaccgcgcttactcaatcac

SEQ ID NO: 492967 - DNA, 817 bp, Homo sapiens
  misc_feature (21)..(21): n is a, c, g, or t
  misc_feature (117)..(117): n is a, c, g, or t
  misc_feature (143)..(143): n is a, c, g, or t
  misc_feature (156)..(156): n is a, c, g, or t
  misc_feature (159)..(160): n is a, c, g, or t
  misc_feature (186)..(186): n is a, c, g, or t
  misc_feature (225)..(225): n is a, c, g, or t
  misc_feature (304)..(304): n is a, c, g, or t
  misc_feature (306)..(306): n is a, c, g, or t
  misc_feature (308)..(308): n is a, c, g, or t
  misc_feature (312)..(312): n is a, c, g, or t
  misc_feature (320)..(320): n is a, c, g, or t
  misc_feature (374)..(374): n is a, c, g, or t
  misc_feature (383)..(383): n is a, c, g, or t
  misc_feature (404)..(404): n is a, c, g, or t
  misc_feature (417)..(417): n is a, c, g, or t
  misc_feature (437)..(437): n is a, c, g, or t
  misc_feature (674)..(674): n is a, c, g, or t
  misc_feature (679)..(679): n is a, c, g, or t
  misc_feature (681)..(681): n is a, c, g, or t
  misc_feature (689)..(689): n is a, c, g, or t
  misc_feature (692)..(692): n is a, c, g, or t
  misc_feature (706)..(706): n is a, c, g, or t
  misc_feature (721)..(721): n is a, c, g, or t
  misc_feature (815)..(815): n is a, c, g, or t
ttttttgcggtgctttatatngaggtgacatttaccagtgtggaaatatcgcagttttcaaatctcactcggatcttcagtggttcgagtgtttgtccgacacagcgggggctggtngtctgaagttgaattcctcccatgcntgcgccatccccngtnnagtccttcctcatcaccgtcgcaccngctcacacagtggggtggctggctgctgaggcaattccncaatggtttctccggtctttggccatctttacgttgccacccatgccccattcttcaccccagctgtgcttcaccagcnantntttnttgttatntgattctgtgctttcaaatccgtagccaaccaccagcacaccatgatccatgtnttcactgcngcagtgtggctcagaaataantgccttctttatnggccggggggggctcatggnctgcggtcaatagcaacgagagatgggccccacagttgcgactgccttcagtcgagggccttctcctgcttagggatgtccacaaagccggtgtcattagctacagaatacttgggattgtacttacaggattcttctgttgcctcatatggataggattcctcagagtgcaggcctccattatcctgaacatactggaaagcataatccattaggccaccattgcagccttcattnccttnangcccagancantttaccagattctnctcactcagtgaganaagcctcccagttttccggaacatctgttcttcaagagcaccagttgcactaaaagcccaacaagaaccacactgaccctgattcttcacaggngt

SEQ ID NO: 492968 - DNA, 382 bp, Homo sapiens
aaattctctttccccccctcttctccaatcaagcccttggagttagatttaggtccttttatctcgtccctctacaaatgtattttccccttgcataattcatgccaacccgggtttttttaggtttctccattttcccccctaaggaggggccccacccaaattttctctaatttgggcctgaaacttgtttcttttcccgttttcccctttccctggggccccctgtcttccaatccctgctggggaatcatgaaaccccttttagctctttgcatcttcccccaggggatttttgtttttcaaaaggaagtagattttaactggccccctttgaggactgccccccttgataaataaactggcttggggtttccatcca

SEQ ID NO: 492969 - DNA, 111 bp, Homo sapiens
ctgggaggcggcagcgtaggaggccgctggagatggtgctgaggacgaggaggccgttggtttgatcatgctcactaggccactgaccaagctgaagaggggctcagtcca

SEQ ID NO: 492970 - DNA, 607 bp, Homo sapiens
gatcccgacggacgcattcacccgcttcacaaccatgactaggtcggtgactgacctcttcagatgccactcagtacacatcatttgcttagattttgttagagcccaaagtctggtcaaatgagaaggtggtaatgaagctcacgaaactggcgtccactgtgaacactggtcgtatatgcgataagactaggcaatgtggtacatgctatacaggcaactgagcagagcattcatgccactgacctggtacctcgataatgcttaacattagccaacctgaaccgtgtgatttatttcatctgtgacaccatcctctgggtgaggagcgtaggtctcacctcaggcatcaacaaagagaaatggagaacgagggctgctcaccactactactattctcttctgctgagccttgtgagggatctgtatgaaatctccctgcagatgaaacgagttacatgtgacagggcaaagaaagagacatcagcatcccaggatcctctttggttcagcgtggctgaggaggaaacagaatggcatccatccttactacttctattattccgatctctgaagcagcatcctcccttgctcctggacacagtga

SEQ ID NO: 492971 - DNA, 124 bp, Homo sapiens
actaaacacattctctgtttgttcaactcatctcagtgaccctaggtcatagctgtgtcctcagtcgatcagctcaagatcgcctgttgggatgttaaacgggctcgctgcacatagtcactga

SEQ ID NO: 492972 - DNA, 143 bp, Homo sapiens
agaccccttgcccgcgggaaaaaattaaaaaaccccccccggaaaaaaatgttaacaccccccccgagaaaaaaaaacaagggggccttcctcagaagaaaaatatgcccccccccccaaaaaatataaaccccccccaccag

SEQ ID NO: 492973 - DNA, 355 bp, Homo sapiens
  misc_feature (32)..(32): n is a, c, g, or t
  misc_feature (128)..(128): n is a, c, g, or t
acagatacatgcctcaacatctggctaatttnctttattttctgtagacacagggtctctctatgttgcccaggctggtctcaaattcttagactcaagcaatcctcccactgctgggattacaagtntgagccactgcatctggcccgaactcactgttaagttgaaaatatcataagttgaaaatgtcagccaggcgcagtggctcatgcctgtaatcccagcactttgggaggtcatggtgggtgggtcacaaggtcaggggttcaagaccaaccggccagcatggtgaaaccccatcttcttactaaaaatacaaaaaatttagccagggcatggatggtgcgtgcctgtt

SEQ ID NO: 492974 - DNA, 251 bp, Homo sapiens
tctgatacaatcagctcgtgtacccaggtcttttcccctcaaagattagcaaatagcatccaggaaacacccgtttggacagcctaaccaggattcctctcaggctctgtttgccatgttactccacactctagctgcagtggagctgaggcagttgctggtcatcgattcccaagatcctggggtaaggtcctgtccgcgaacagagaaggctccctcagggaatggtggcagctgcgtttcacttccga

SEQ ID NO: 492975 - DNA, 472 bp, Homo sapiens
tccataatgtgtgcccaggctggagggcagtggcatgatctggctcactgcagcctctgcttcccgggttcaagcagttctcctgcctcagcctccgagtagctgggattacaggtgtgagccaccgcacctggccaaattcttgctcttaaaaaaaaaaaaaaatgggcacatgcctgtagtccagctactggggaggctagagtgggaggatcgctggagcccgggggtgggaggcggcatggagttatggtcacatcactgcactccacggggtgacagagtgagacccagtctcaaaaagatagaaactataaaagggaactatacagaaattcgggagcataaaagtacaataactgagatgaaaactttattagaggggtcaccaatagattggggcagacagaagggcccatacctgggtcagccctcttagagggacggatccattggggcacacattatggag

SEQ ID NO: 492976 - DNA, 882 bp, Homo sapiens
ggtgaccggcagccccagacctgcctgccttcctgacttctgtgccagagcataggtcattcagccgcttgaatcagtcttttccccccaaccggtccccaagctgtgtgtacccgatacagggaaggtccagcattgcagatagtcgaggaagcgccattatatcattcccgtgcgctctacaaatagttccgtgagaaagatggccgtggaactcgatccgtgcttggcgtgcgtgtctcatattctctcggcctgtcagctagagttattgtggctctgcagagttggagaaggcacatgattatagatacagagagttacgcccccaagcaggtcactgcgtcaccagagtttgagagagtattgcgggcacaacaagaactgtgtggagttttatcctatattcataattacacttgtggactggcatgggtggcagtttcaaccaaggtttatgctacttgtctgggtctggtgtacagtatatggccgtcacctatacttctggaggatattcagaagctgctaaaaaaacggatcaccgttttccgactgagatctgggggatttggcctaggaggaccctccctaggtggccctgcagatatcgcaacccagctttcttggatgagtattctgaacctcatattgccaagacatctgaagcggataattctaaaatgaatcttcattccctataatgcgtggccagaacgctgttccaccatggagtagtattgggatcattggtagactacactaacgtccgtaaatacacaaaacaaaaacaaaaattgagaagcgcgtgcccacagaacatagaaaaactattagtcgcgcgcgcaggaaaaaatagcaagggtcaaagaacaggcaaaa

SEQ ID NO: 492977 - DNA, 589 bp, Homo sapiens
  misc_feature (52)..(52): n is a, c, g, or t
  misc_feature (502)..(502): n is a, c, g, or t
  misc_feature (567)..(567): n is a, c, g, or t
tgtttatcgatgccactgaggttggcatcatcagtggctcgaggatgtcacnggactgagaggcttctgcacttgccttcatcgaattttcagtctggagtacaattgtttgccttccttcctccacctttctatttggctctgctgatattcctgaaacatttggagtgcttcctgtaaactctggaaagaaatggcttggaaatcagaattttctgttcagtgtttcccaagaactgcctcttcctttaatgagctggagagatgcttcctaaacttttccctttttttatctccttcattcactccatccgggagaggcatgcactcaggcgaacattccctgaacacctgctgtcttctgagcagccataaaatagctcctgctgtggtgcagggggggtggtctagatgaaggagtggctcagagttgactagaactcttaagtgcctggtggctgcagcataggacctggggaggctgctcaggccctgtcctttngggggtcttgtgcggaggctgcggcagtggtctttaagctttctttgctgttgtagcaacctttntgaaaggtggcatcgataaaca

SEQ ID NO: 492978 - DNA, 316 bp, Homo sapiens
tagtacacttgaaaggtagacagagcacgtgacggtactagtgctggtacgcctacatcacctgcacccaggggacacatggcatcgtctccgcacctgatgacctaagaagctgcatcatgtatggctggtatcagatgactgctacacctcagcccgaggctgcactgccaacctggacaacttcgacaaggccacctttgatgccattactaagacctacagacatacctggattcgcgaccgacctggattcgcgaccgacctggattcgcgaccgacctggattcgcgaccgacctggattcgcgaccgaa

SEQ ID NO: 492979 - DNA, 293 bp, Homo sapiens
gcgctccgacgcgcgctcccaaaggtcttgcgccgaaagacgcgacacagcacccgcctgccacgcgaagtcgaccccctcgcgatcccacgcttgaaccaacatcatcgcccgccctgaagttgcatggcgcacaggtctagtccagttccgcgaagctcttgtgaccttttcggaccgcctaggcggacgcgcgcgattggttcactatcgctgcaaacaaattaccgggaggattgggtcatgatgcggatgttcagccttagcctggctctggccttagccctggcgac

SEQ ID NO: 492980 - DNA, 682 bp, Homo sapiens
ggccgggggcctcggataacccgaatgggcggtccaaaaaattgcccaacaaaggctagttcttgacgtaacggcggttcctaaaaacagtttatttcatgcctgcctgggatagggattagagcaaggggagctaaacctcccggccagcagcctgtctatgacgccctccttcacccggttagagggtccctcaacagagcttggacgtcatcaaagatatgcgtcctgttctgtcagagaagacatgcctgtcagctctacataatagatcaagggccttggtcagctaacgttcagtggacagctccattcattgaggggtgtgtcttcaaccagggcatgcatcgtgtataatgaccacagtcccagttaacagcctgatcagtgcgctgagacacaggtagcgactgcacttatagcagaggttcggataatgctcaccctgccaagtggctcggatgtcctagaggttccatcagggggagttactttcgatagataataccattgcagaacctgtccatggagggccgtgctatttcagtcctcaacaggcgcagatggagggtcatactgagtcaaaatgaccctgtatgagccccttcctatatggagtcattcagaagccattcggccagggaatacagcattgtctagttccagttcaatatacttccgc

SEQ ID NO: 492981 - DNA, 213 bp, Homo sapiens
gtacttgaggatcctccccgactagccgacagggggatacacgttcgcgagatgatggagcgtcagattttactgaacctccaaaaggcggcatagatggcgagcagtggtgagcagcgccatgcacgacactgcacagccgatcaccagtgggaccgagggggagcccgccagctccagggtcaggtccttgggctgtcgggctagtcgggg

SEQ ID NO: 492982 - DNA, 908 bp, Homo sapiens
ggcggcaacttctgggtgccaggtgcatcctatgcccgcccgaggcccctgacaccaccatgggggtctgggcccggcctcgacctgaccctcctggagcccagatacacccctacccaacagcgaaacaaaaataaaggatataagaacggacaagaacatacaagacaagacgaaaaacaagtaaaaataccacaaagaagacaaagatcacagaaagccccgagacaagcacggacacacagaacacacaagcaacatacccgacacgagagagacagagagacacaaatagagacacaggccgcagacagaaaagacacagagcacagtcgatacaacacacagagcctgagagacggctgcaagaaccacccgagaacccgacggacccacaacccctcacacgcagacctcaccatgaagcgtcaacgagacaaaagagagtacgaacaggccgccgcaaacaggaagagcaaaccatgaggaagacatccagaggcacaacaccgcagcagcaagatgaaacagacgggaaccgagcggcgcagagaaacgcacagcagcaaaagaacccacggcggaagccaggcagaagatatcccagagaaccgaacgaaacaaacgaaacaatgcacaaggcacagagaacaccacgcggaagaaggaacgcaggagcaaaaaatagaaatcaaaaaaacacagtatctcacaacacaaagaacaacaaaataccaatcaaaacaaaaaaccaaaacacaaaacacacaacaaagatacaacaagtaaaataacaacagatacaaacaaacgaaaaccacgacagcaaacaagacacaacaaccacaaacacacaaatacaaataactaagctataccaaatccagcacccccacaccacaatccta

SEQ ID NO: 492983 - DNA, 322 bp, Homo sapiens
ggtgatacgtgggtgagaaaggtcctggtccgcgccatagcccagcgcgcctcgaagccatgcctcggaaaattgaggaaatcagggactttctgctcacaccccgacgaaaggatgccaaatctgtcatgatcaacacaaataaggacaacgtgaagtttaaagtacaatgcatcatatacctttacaccctgttcatcactgacaaagagaaggcagagaaactgaagcaatccctgccccccggtttggcacagaaggaactgaaatgaaccatacacactgattgaaactgggtgatattaaaatactgaatatcctt

SEQ ID NO: 492984 - DNA, 162 bp, Homo sapiens
agggagcccgactgaggatatggatcctggccggcgcaagatctacaccctctgcaggggagttttgaggcccagcgagagctcacagggcgccggcggaaccgcgacgctttccgcggcacggccccctctgtcgcgacgaacactattccaggacgccct

SEQ ID NO: 492985 - DNA, 89 bp, Homo sapiens
  misc_feature (15)..(15): n is a, c, g, or t
cattaaaatatgtgnaaaacccagaaagcatccatcatgaatgcatccatcatgaatgcaagatactttcaataaaaagtaagttatat

SEQ ID NO: 492986 - DNA, 163 bp, Homo sapiens
tggtgtgactggcagacaatctcacctggctacttcattcacacctacctgtggctgtcggccatgtgatggagcagatactcgaacggtatgtgcactgctgctcatgcctggtgcattaagagggtgacagatgtcatgctcacactgctgatcgtgtgac

SEQ ID NO: 492987 - DNA, 1284 bp, Homo sapiens
gtgagctgcgccagaccgcatctgagtggttcgtgtgcccacctgctccttctgctggtccctgccgccacctgtccactgctcagctgttgtagatgaatgatgtgtgggtcggaacagcgccatctgccgcctggtgtctgctgtgggcccttttcatttgggtactgcatctacttcgaccgcaaaaagacgaagtgaccccgaacttcacagaacaggcttcgcagcaacgacagaaagaaacagaagcttgccaaggagagagctgggctttccaagattacctgcaccttcaacagatgctgaagctgttcagcaagtccttcctatgcaagcaaaatcaccagctactggctgcaaccagttaaatcagctcaacaggtagccatcatcgcagcacagggctgtcacaacatcatgcaccacacatgccacattgcatcgtagtgtcgcgcccagccgacagcgagtttgacttgccagtgtcttcaccagtcgaacactctatcgcaaccaacgcaagtgtctccaagatgcttatactagactcaagctcccaaccacattcagtcagagcaatatgtacagtgctcagagcttgcgcctgcaacgcatgcatgtgcgccatgccgacaccccacactgtcacacattaactccacacctctccacttaaccacctactctcacacacagctccttgcgaacgtacgcagcagcccctcgggggggcactacacgggcacactactgctacggtaatggaacctaccaccctggacagtttcaacaaaagttcgctgtttcaccttcggtgcaccgactcccagtatgggctcacccaccctcacactcgcaccccagtgacaacgtgtctctctgcaagagccattttacatctatacagtaccctaaatgagttcaccacggcatacggccgctgcagacgtcccggagacagacgcgtgcgaccgtacacacgggcgacatgtcccagctggcaagtacagacgaaccaccgggcccccatcggacgaccgccccgacccaaggacggcgcgcagaggcgacaacccccccgccagggcaccgcgcgagccgccgacaggacgccgacgacgggaccaagacagcccagggggccagacacgacacgggcacccgacacagcggaaccccgcgccgaggccggacaccaagcaccagagcacggaggccgcagagacggaagaacgagacacccaccacggcccaacgggagcgagacccgacccacaacac

SEQ ID NO: 492988 - DNA, 214 bp, Homo sapiens
ttttacagttccccgctcgctctcctctgtggtggtcagcttcacattctcagcgaactctccttctttgggtctggctgaagttgaggatctcttactcctctaggccacggcaattcacccgttgctggccttggaggcctctgtctctcacctccatcagcttgtgaccagatgctggcctaaggtggatctgcggttggcctcgtggctc

SEQ ID NO: 492989 - DNA, 453 bp, Homo sapiens
tgcaaacagtacaaaaacatgtagtgaaaaatatttcttccagagctgggtgtggtggcgtcatacctgtaatcccagcactttgggaggccgaggcgggcggatcacgaggtcaggagagcgaggccatcctgaccaacatggtgaaaccccgtctctgctaaagatacaaaaattagctgggcgtggtggcacgcacccctagtcccggctactggggaggctgagacgggagaatcggtcgaacccgggaggcggaggtaggagtgagcctagatcgcgccagggtactccagcctggcgagcagagtgagactcacgtcttcaagaaagaagaaggagggatgttgtcttcgcatgccctataatccaggtcatctggctaaggctgcttacccttgcctggagtgaaacttccagctagtaattgtcttatgtttggaaagagatatt

SEQ ID NO: 492990 - DNA, 581 bp, Homo sapiens
gacgccaactaaatctgtattccctagcagctgtttttactatgtttttcttatagtcttcaaaaggattgtagttttgcgggggacccttttttgaaaaacctttggctcctaggaagaagctatttcgtgcgttttggggggttggggacggtcctgtctgaaagtgaattctcctgtttacaccttgcccattcaataatcctggtacgcccagtggaaacctaacaggactaacagaatccctccttatcttgggttaaagcaacctggtctccagaactagaacacaggtttacacatttaactttcgtaaacccacctttaaaaaattttggcaaggacttgtgcaagaaggctataaaggctacattgggttattagcctaagtagatccacggtggatcctatgttggtgggaaggttaaattggacacaaaataactttccttaatttgtaataaattggtgggaatggtttccaacttctgttaaagatcattaatccacacagaacattcatacttggtcaaacaggttataaggtctctgaacgggggggtcgtccaacaaaaacattc

SEQ ID NO: 492991 - DNA, 306 bp, Homo sapiens
  misc_feature (153)..(153): n is a, c, g, or t
agtagatttgagcaggaataaaggcgtcttgaagaaacgtcctatacgatgcagttgttttggaatggcttgatttcttatattaaacccacttgatacactggtttggttctttgactcgggatctatcttgaattgctttcactagtacanccaagggttaagttaaaaactactattaaacttttgttataagcccttggccatcttgagggtggaattatttttccaaaaaatactaatatctattgaacttgagactaagccattagtttggaccttacttccccggtggtacccgagctc

SEQ ID NO: 492992 - DNA, 130 bp, Homo sapiens
ccgagaggtgtgccccagcaagtggaaggaacccctcgaatccgccagttacaggaagtctgtcttccaccaggtctgaagagtctatgcctgatgtcctcctcatgttgatcatgttatagccgggtac

SEQ ID NO: 492993 - DNA, 1171 bp, Homo sapiens
  misc_feature (1004)..(1004): n is a, c, g, or t
gaggctccggcggacctctggttggacatggctgctttaccagcttagcccacagcgacgctaacgttatagcagttcgtaagaaggcagtgacagttgctatctgcctctaccagaagggatatttggcaaagcaaattctggtcgagttccaagactgattcgtgatcgcaagatacctgaaggatcggggcaacgagaagaattccggaacgaaacagacataggtgcgcagccgaaggaggatatcgactccggatgatagaattatctctacaggccacctagtgctagctcagaggtagttcagaatacaagatccatctgggctttaagcctacaaatctttagacatattagactatttgatttctagacaaggagtttgtcaacagtctccgaatgatagtagccgtttgcaagtttaagggcatgtaaacaatggggagcagagcaaaaagctcgcaagtgtctgtagctatctctagtaatgtgacaagtgtattatgggtcgtatcagtagaaaggccacaaagggagaaataaacaacaatccgaggaaatcaagttctgactcattttacatcaacatgcaaagaaatgagtaaacactcctggcgaatatgtatctggaaatagagttgtgttgaatagtgaactgttgcttacgacgacaaggttcctgtcaaaaaatggagaggtacattaaaaaaaccaatataaaactacagattggtgggcccaatggttagggtactcggtcttgggtaacgaaactgattgcaaattttgaggtgggaaaaggttggttaaaaattgcagaaaaaactataaatctcatggtaggggttacgagcagagtggttgtaggttgggcctttcaaatgtggctttggtttagagtgactcgccagatttacatttgtaagaggtggagtcgggctctaggttgggcgctctagagagttaggggaattgcaacactgttgggaaagaggttggcnaaaggggggaagtttttactcaaacgggaaacccatggaacccttgaggacacaataaggcatattgtgcttggcaaaaaagcctttacaattactttcttaaacttgaagagagaaagaattaaacgaaaaaatttaaaggctttggcgtgttgaggagatgggga

SEQ ID NO: 492994 - DNA, 282 bp, Homo sapiens
tataaaaatttttaggtccaatcccaataaagtaaaataactttagttttggtcagacagttgattagctctattgatgctaaggcaggataactgttcagaggttttgatgcaaaactctgctgttaatctggaattaagaaaaaattataaaatatgctacccttgcttaatgggtaaattggggggttgggcatatctttaaaaccccttgggagccaatctgtaaatgtttgttgaaatgaaatatttggtaaataaatgaaaaatttgcctttttta

SEQ ID NO: 492995 - DNA, 518 bp, Homo sapiens
  misc_feature (35)..(35): n is a, c, g, or t
  misc_feature (120)..(120): n is a, c, g, or t
agcgtgttaaaggattggaatatggaagtcaggtnatgtgagtctaccaattaattttttcccaacattatttggacttttctaggttcttaacattttcataacattatagaaacaatntgtcagtttccataaaaaacaaaaaaatagatcctggaaatttgactaggatagccttgaatttatagagcaattcggagagactgacattttaacgacattgcatcttctgattcatgagcatggcatatctttccatatatttagatcttttttcacttctttccaaagtgttttggtatttgtcattgtacagtcttatatactttggttatatttatccctgagaatttagtggttttgatgctatcataggttatattttaaattttaatttctgattgcttattgctagtatgtagaaagattttttcacatattcaccatgtattcttacacatatttggttagattatccctaagaatttagtacttctgatgttgttgtaggttgtatt

SEQ ID NO: 492996 - DNA, 201 bp, Homo sapiens
tactgtggacgatctcagatctccgcatctgtaatgcggttgatcacagcaatctcctgttggtgttgcgcaggtcgtacaccatgtatgcctgcggtgcactgcagctcctcgtacttgtgtctggtaccaggactcagcctcagcccggcttctctgagcaatctcctcatattgggccttgacctcagcgatgatgct

SEQ ID NO: 492997 - DNA, 131 bp, Homo sapiens
catgtccgggcatgtacgggcaaggcgctttggagtaggcttatttctcttgtcctttcgtacagggaggaatttgaagtagatagaaaccgacctggattaccccggtctgcaagcccggtacatgcaag

SEQ ID NO: 492998 - DNA, 136 bp, Homo sapiens
gttggggttcctacagatacgaagatgaagtgtagctgttcctccacgtggagcccggatagaggggacggctgtgtgccatctcatagaagatgcaggccacaccccacatgtaatctgagtggagtagtcgcgt

SEQ ID NO: 492999 - DNA, 1035 bp, Homo sapiens
gacgctgtacctgggcacgtcccggattgaccagcgcgtactgctagcagagaccatgtactgcctgacggggcagaggctagatggcagcacccaggtgacagtggaagaacctggtacagcagcccagtgtggtggacctgtgtggccagcatgcctactgatacagctccacctgcgacatggtgtaccgcagcctatgcctccaccaaggacgagctacccgcacatcaatgactgtctgctgacgcagcagagaagggagtgaggaccctcacgtgcggctgctgtcagatggggctcagcctgatcctctccaatgctgtgagccccagattgcatcagcagagcgaatacgcccacagggggctggacaatgttggatggagaacctccccatcctgcagacagcccacggagatcggtcctgtgcggacaccaaggacgcttgtgtcgtactaaggtgtcgcgagtgcccaagagatggagtctagcgccaaaggcacacggatggccacccaacacgacgcgacgccggcgcgaccgcaaccccgccggtgcctgaagcaccagccgggccgtgccaccaagcaccacagtcacggaacgtgacccggcgccccccccccaaacccaacaccctggagccccacgctcagaggcccagcagtggcgcatgacatagggagcccgacaacacgccgccaggccccaacgcccggcacccacctgagcagagaccgaacaacctatgccgcctaacacacgacagcccgccacaggcccaaggcaacgaacaccacatcacctgggcaatggacttcagagagtctgaatgatacccgacgccaagtattgccacaaccgcgcactgcgaaagacgcgattctatcagtccatgcatacgctcacttgggagacccacccatgtgaccgctaatgatcgacctagagggacaacaacgtcaaccactataaagaccacgtcacattgctgccaatacctagcacaccacccggcccgtacgccccacg

SEQ ID NO: 493000 - DNA, 448 bp, Homo sapiens
  misc_feature (19)..(19): n is a, c, g, or t
  misc_feature (68)..(68): n is a, c, g, or t
  misc_feature (144)..(144): n is a, c, g, or t
  misc_feature (260)..(260): n is a, c, g, or t
  misc_feature (313)..(313): n is a, c, g, or t
  misc_feature (366)..(366): n is a, c, g, or t
atggttaaagtgtttggantttttaagttaagcttttgggttaaacacaagtccatggtgaattgggnataccccactaaaaagaaaacatgaaagaattaagaaaaaccttgaaacagctaagcttggctgtcctacccattncaggatgccctgcaaaccaaccactagctgctcctgcaaacacattatgtgttccttttccctgagaaatatccttgatgtgtttggtggcagtatctacagaagcggcagccacnaccgccttttgaagctctccatagtagtagaatcaggaaagataagcacagcnttcagttttgttcagcaccatacacaagctcctagctgggcaaaggaaatctnaagctgcatgaagttccattacgtgtttttgttgaacacaggtggcctcatccatccatccatccatctcaattaaaaaaaa

SEQ ID NO: 493001 - DNA, 142 bp, Homo sapiens
accctgggaaggttttgatcctgtgactcatcatttctttgctttctattcatttcatatttagagaccctgtttctaattaatcaacagcatttagtatgacttataccataaacgtattttcactccttcacccaagcta

SEQ ID NO: 493002 - DNA, 378 bp, Homo sapiens
  misc_feature (25)..(25): n is a, c, g, or t
acccccggggggggcccccttaaanaagcctggggttttttcaaaattcatccagcccattggccgctcaaacccaggggcaaagaaaattttaggggaggttttcctcctcctccccttagggggggggagggaacagggcagccccccaaggagggttttggcccctgtccccccgggggcccttatggccaaaaattttccctgggggggtgggtcaggggctggggttggttctaaggacttgggttctcccaaaagttttgtttttttaaaaaaattaaattcctgttttcttaaaaatttttggggttatatgtttggttttttaaaacctttaaggggccccccccccttccataaaaacccggcttggga

SEQ ID NO: 493003 - DNA, 217 bp, Homo sapiens
ctagaggttaccacagtcttgctcccatcacgaggtggaagctagactcactctggaactccagttttacgtttttttgaggaactgccatactgtattgctattgtggctctatcacccaccaagcagtgtaggagggttctcttttctccacaccctctcggcatttcttatttgtactttttgatgatgtcgtttctgatgggacgaagactgg

SEQ ID NO: 493004 - DNA, 720 bp, Homo sapiens
  misc_feature (401)..(402): n is a, c, g, or t
  misc_feature (439)..(439): n is a, c, g, or t
  misc_feature (533)..(534): n is a, c, g, or t
  misc_feature (539)..(540): n is a, c, g, or t
ctcacgactgtccaggggccgacaggcgcccaggcgggcagaggggcttcatgtcagggatgccccaaccagcggctgtgcgcttctggagcgggggccacatccggacacggctatagaggaaatcaaagagaaaagtgaagactgtaaaacacaaaatcttggtattgtctgggagaaggcggatgcttggcgaaaagcacattcagcgcccaccttgcccagtggcctagcagaggatgaaatactacacagagttgctcttcgtagacagtcgagtatatgtgggccatcgattcccaagatagactcgggattcggcagggagagcacggttctaccaagagtgcgctcaggctggtctccaagtgtacgtggatagtacaaccttggtgggtganngtcggtgggcttcctgctcagcagtcctgatgatgcngttatctggaggggacccaagaaaaacggcatgatcaagcagttcctccgagatgtggactggggagaggtcgactacctcattgtggacaccnnacctnngacgtcggatgaacacctctcggtcgtccggtacctggccacagcacacatcgatggagcagtgatcatcaccatccccaggaggtgtcactcaggtggtcccggagaatctattttggcgcagggtaacttgccttctcggggtggggggaccctgcgggcccccttcctaggaaattc

SEQ ID NO: 493005 - DNA, 166 bp, Homo sapiens
cctagctggggcaggagtcacagtgttccatccaaagcccccgcagtctcgtcatttcgttttcagcaagcagcatgcagcagcagcagcaccagtcatgctatggtgtcattgctctgcagttgcatccacagcacaatccagtggcaggcaacattctgttggc

SEQ ID NO: 493006 - DNA, 414 bp, Homo sapiens
  misc_feature (330)..(330): n is a, c, g, or t
ctagaggatcccgcgctgaccatacacgtcaagatcaaacagcatacctgctaggctaagatagatggtgtgattccacggggtttggatcaatacaataacaaacctttttcctttgacatactctgaatttggtggttgggggggagggggtgtgtgtgtgtgtgtgtgtgtgtgtgtatgtgtgtgtgtgtgtgtgcacgcgcagtgtccatcagtatcagtgcctgcctgagtgaggaaaattacatcccgggttctgtatagaggagaaggatgtatagagcaacgtgaaacattagccctccttttattatagagactagtgtngagtgttcttaaaaggggatttttttcccttagagcaattttttctcttcgcgataaagtgaagtatggctcagcgctgggtac

SEQ ID NO: 493007 - DNA, 151 bp, Homo sapiens
actctagaggaccccctgctgtgatcataccatggaccacctccacaacagggatactccaccccagcagcagcatgtacccagggcagcaatggttacccatggacatgcagcagtggctacttgtcctatcacatgggtgggtccatgt

SEQ ID NO: 493008 - DNA, 124 bp, Homo sapiens
cgccccccccgccacgcgccccgcgcgcgcgggagggcgcgtgccccgcacagagcgccgggtccgggatccggtgcggattgccagtcgtcctgagaaacggaaagagaatggaatgcggccg

SEQ ID NO: 493009 - DNA, 254 bp, Homo sapiens
ctaacttaacatagtgagctgactacagtagtactgtctacattacattctgatggataataaaaccagagaaattagacagaaggccaaggaggcataaacctgataacacacatatccgccacacatgcacacacaaaacatacacgcacacaaaggttatctactgaccacaaacgtgatagaaaaaagctttgcatgcgctacactccaataaaaacccttaatcataataaactgtggcaatacctgtg

SEQ ID NO: 493010 - DNA, 124 bp, Homo sapiens
atttatgggagaagggtataaaaaacaaacaggttgagacgactatggcatcagcaacaccagataaaatacgagattgtgcagttgttattggcgttggggggacgatcacatagaggtcgag

SEQ ID NO: 493011 - DNA, 105 bp, Homo sapiens
gccgcaggcgttatttcacgactggaagaagaggaacaggacattcttgcagcgactccgagaaaatgcttgctcaccttgtgggacaagcgccgggacctggcc

SEQ ID NO: 493012 - DNA, 1048 bp, Homo sapiens
  misc_feature (699)..(699): n is a, c, g, or t
  misc_feature (800)..(800): n is a, c, g, or t
tgtcacatgggatttatcaccttcccaacgtccatgtagcgcttcccttcaataacttaggcccctatttttttcccgacccaacacctgttcctccatattagcccccagtgattggggcccgcaattgtgaaccaccgcaggtattagccacccatttcccccatgggcgcacaccaaacaacaaaccacaccctcgtgccccaaaatagggccctcttcggataaccgcggatataattccctcatatttatttacccctctcacgaaagtttgtttattttttttcgccacggagtatttttttctcgaggacctcttttgacccacactctccacggctcttatagccccctctatccctcccccaccactttaaggagaggcgacaacactgtgggcgccccacaacacacaggcactttcacacccccccgctatatattctccctcctctagagaagtgtccccacactctccctcatatacaacacacactctcgcgctgagtgttaactcgcgcactttcacacgagaggtatttacacacatgcacccccctcgtgaggcgtctacacacacaatatgatgtgtttatatatataagggatacacacactcccggagacacccacacaatatatattttcacaacgcacactgtgcgtgtatatgtagcacaatgtgttatactcggnggttcttctatattttaaccctcccttaccacaagcctcacagagagtgatactttcgagagtttcccgcttcacaccacattttccgagccggcgacatnttatcgggcgtcacacactgttgtttgtatagccacacacaggcgttccaccggagacttcaccgtcacttatttggctcaaactttcctcacctaatttgcttcactcccccacactatatattttcacctttaacaatccacaacactcacctttggcttcgaaagcccccccctgataactggcacttttgtaagaatgtggtttgactatttttgtaagtctccatttattgatgagggtttta

SEQ ID NO: 493013 - DNA, 885 bp, Homo sapiens
  misc_feature (855)..(855): n is a, c, g, or t
agaaactaatggcatctacgagacgacgcagagtagacgaggacggcgatattcgatacatacatatacgagtatcagcgcgacgaatatgccgggaatggctaacgcggggggtacggtggccccaatttacgagatagacgtacccgagcctattactcgtacataatcatcgctatccccaccggcgtcaaagtatttagctgactcgccacactccacggaagcaatatgaaatgatctgctgcagtgctctgagccctaggattcatctttcttttcaccgtaggtggcctgactggcattgtattagcaaactcatcactagacatcgtactacacgacacgtactacgttgtagctcacttccactatgtcctatcaataggagctgtatttgccatcataggaggcttcattcactgatttcccctattctcaggctacaccctagaccaaacctacgccaaaatccatttcactatcatattcatcggcgtaaatctaactttcttcccacaacactttctcggcctatccggaatgccccgacgttactcggactaccccgatgcatacaccacatgaaacatcctatcatctgtaggctcattcatttctctaacagcagtaatattaataattttcatgatttgagaagccttcgcttcgaagcgaaaagtcctaatagtagaagaaccctccataaacctggagtgactatatggatgccccccaccctaccacacattcgaagaacccgtatacataaaatctagacaaaaaaggaaggaatcgaaccccccaaagctggtttcaagccaaccccatggcctccatgacttttcaaaaaanaaacaacaaaatgtgggggcgccgaattaa

SEQ ID NO: 493014 - DNA, 453 bp, Homo sapiens
  misc_feature (342)..(342): n is a, c, g, or t
  misc_feature (415)..(415): n is a, c, g, or t
aagaacaaagtaaaggatggaggttttataaagagaagtgttacatattttgaaagacaggtcattggcactagtaaagttttggggaggtggcaagccctgattggtgagtgacagtggtgggtaatactggtcttagagtcagcaacaagttgtttcagtagccattagataaactggtttcaggttacaataggcagtttcagcagccaggcttacagagaattataatcttggagcaatgttacatccctccccctcccctggcccccccaccccatccctgcccctcagctctgatttagttggagtacggaatagggatggacccaatttagtatngtccagcttttcacacatggaaggtttgaattttattggaaacattgttaaattttggaaatttacatgtttnacattggccaaaaagcttttttttaaccaaaattttgg

SEQ ID NO: 493015 - DNA, 473 bp, Homo sapiens
  misc_feature (443)..(443): n is a, c, g, or t
taaattgggggcggggtggcgccatttttttgtggacgctagggccgagccgagggaaaatccattttattgtcatatttaccgggggggagcatactttcttcccacaacactttctcggcctatccggaatgccccgacgttactcggactaccccgatgcatacaccacatgaaacatcctatcatctgtaggctcattcatttctctaacagcagtaatattaataattttcatgatttgagaagccttcgcttcgaagcgaaaagtcctaatagtagaagaaccctccataaacctggagtgactatatggatgccccccaccctaccacacattcgaagaacccgtatacataaaatctagacaaaaaaggaaggaatcgaaccccccaaagctggtttcaagccaaccccatggcctccatgacttttcaaaaaanaaacaacaaaatgtgggggcgccgaattaa

SEQ ID NO: 493016 - DNA, 210 bp, Homo sapiens
aaaaaaaaaaaaaaaggggtttaaaaaggtggggccggttttcccgcccaattttggggtttttttttgggttaaaaggcccggggggaaagggggccgggggtttggggtcccccccccaaaggcccctttgggttgggtttttttttttttttttcttttaccccctggggaaaaacccctttggttttaaggattttccggttttta

SEQ ID NO: 493017 - DNA, 1660 bp, Homo sapiens
  misc_feature (44)..(44): n is a, c, g, or t
  misc_feature (46)..(46): n is a, c, g, or t
  misc_feature (101)..(101): n is a, c, g, or t
  misc_feature (147)..(147): n is a, c, g, or t
  misc_feature (180)..(180): n is a, c, g, or t
  misc_feature (202)..(202): n is a, c, g, or t
  misc_feature (310)..(310): n is a, c, g, or t
  misc_feature (1630)..(1630): n is a, c, g, or t
cccacgacgtccgggttgactattctctacaaagcagcaaaganantggaacactagtacctattattgcggcgcagtgagcgtggagtcctaggcacagntctaagcctccgttattcgagccgagtctgggccaggccaggcaancctttctaggtaacgatccacatctacaacgtnatcgtcacagacccatgcattngtaataatcttcttcatagtaatacccatcataatcggaggctttggcaactgactagttcccctaataatcggtgcccccgatatggcgtttccccgcataaacaanataagcttctgactcttacctccctctctcctactcctgctcgcatctgctatagtggaggccggagcaggaacaggttgaacagtctaccctcccttagcagggaactactcccaccctggagcctccgtagacctaaccatcttctccttacacctagcaggtgtctcctctatcttaggggccatcaatttcatcacaacaattatcaatataaaaccccctgccataacccaataccaaacgcccctcttcgtctgatccgtcctaatcacagcagtcctacttctcctatctctcccagtcctagctgctggcatcactatactactaacagaccgcaacctcaacaccaccttcttcgaccccgccggaggaggagaccccattctataccaacacctattctgatttttcggtcaccctgaagtttatattcttatcctaccaggcttcggaataatctcccatattgtaacttactactccggaaaaaaagaaccatttggatacataggtatggtctgagctatgatatcaattggcttcctagggtttatcgtgtgagcacaccatatatttacagtaggaatagacgtagacacacgagcatatttcacctccgctaccataatcatcgctatccccaccggcgtcaaagtatttagctgactcgccacactccacggaagcaatatgaaatgatctgctgcagtgctctgagccctaggattcatctttcttttcaccgtaggtggcctgactggcattgtattagcaaactcatcactagacatcgtactacacgacacgtactacgttgtagctcacttccactatgtcctatcaataggagctgtatttgccatcataggaggcttcattcactgatttcccctattctcaggctacaccctagaccaaacctacgccaaaatccatttcactatcatattcatcggcgtaaatctaactttcttcccacaacactttctcggcctatccggaatgccccgacgttactcggactaccccgatgcatacaccacatgaaacatcctatcatctgtaggctcattcatttctctaacagcagtaatattaataattttcatgatttgagaagccttcgcttcgaagcgaaaagtcctaatagtagaagaaccctccataaacctggagtgactatatggatgccccccaccctaccacacattcgaagaacccgtatacataaaatctagacaaaaaaggaaggaatcgaaccccccaaagctggtttcaagccaaccccatggcctccatgacttttcaaaaaanaaacaacaaaatgtgggggcgccgaattaa

SEQ ID NO: 493018 - DNA, 181 bp, Homo sapiens
tgctgtatgcggtggcgcgatcttggtactgcaatctcccttccagattgaagcaatcctcctgcctcagcacaagtgtgcactaccacggctgcctaatttttgtatttttggtagagacgggggttttgccatgttggcaaggctggtttgaaactgctgacctcaggtgattcacctg

SEQ ID NO: 493019 - DNA, 1283 bp, Homo sapiens
  misc_feature (1253)..(1253): n is a, c, g, or t
actggccgtcgtgttagatcaagaatcagttatcagggtgattcccgcatcatggggcgtcggtatacctaacgatatcgtctttacacctagcaggtgtctcctctatcttaggggccatcaatttcatcacaacaattatcaatataaaaccccctgccataacccaataccaaacgcccctcttcgtctgatccgtcctaatcacagcagtcctacttctcctatctctcccagtcctagctgctggcatcactatactactaacagaccgcaacctcaacaccaccttcttcgaccccgccggaggaggagaccccattctataccaacacctattctgatttttcggtcaccctgaagtttatattcttatcctaccaggcttcggaataatctcccatattgtaacttactactccggaaaaaaagaaccatttggatacataggtatggtctgagctatgatatcaattggcttcctagggtttatcgtgtgagcacaccatatatttacagtaggaatagacgtagacacacgagcatatttcacctccgctaccataatcatcgctatccccaccggcgtcaaagtatttagctgactcgccacactccacggaagcaatatgaaatgatctgctgcagtgctctgagccctaggattcatctttcttttcaccgtaggtggcctgactggcattgtattagcaaactcatcactagacatcgtactacacgacacgtactacgttgtagctcacttccactatgtcctatcaataggagctgtatttgccatcataggaggcttcattcactgatttcccctattctcaggctacaccctagaccaaacctacgccaaaatccatttcactatcatattcatcggcgtaaatctaactttcttcccacaacactttctcggcctatccggaatgccccgacgttactcggactaccccgatgcatacaccacatgaaacatcctatcatctgtaggctcattcatttctctaacagcagtaatattaataattttcatgatttgagaagccttcgcttcgaagcgaaaagtcctaatagtagaagaaccctccataaacctggagtgactatatggatgccccccaccctaccacacattcgaagaacccgtatacataaaatctagacaaaaaaggaaggaatcgaaccccccaaagctggtttcaagccaaccccatggcctccatgacttttcaaaaaanaaacaacaaaatgtgggggcgccgaattaa

SEQ ID NO: 493020 - DNA, 1055 bp, Homo sapiens
tcctccatgatactataaatgtatcaggtccacttttttcttcttactttaggtgatcctgtggcaggccaggtctcactaacagctgaacaggcaggcctccatggcaactgtttcagcactgagtagttaagtttaatagagccagtgtcctcatacgtaggctggaatgcaacaaaatcccaccaatagttttgcctagtcctttcttgggccttggagcatgacaagataacgaaggaattcttaacaggacccctttacaattaaatatgttttattgggggcctgaaggacctccccagactgccacaagcaagctttactggggactaaaggaactccccaaacctccatgatttagtaggagacaagataagggtaatctctgtggtgcctggacccatttagattaagtaaatttactcaggctccagaggaaggtcttcaagactcagatcttagttatagattagaagttaatcacttatgtctttagatgaatgcacacttacatgtagacatatagcttagaagttatataagctctgcaaaactttgtaattttgagttggtctggtgatatttccccagccttcttcctatacccggttacagaaataaactctgttctttcccagttcatcttcatctcgttattgggccacaaaaatatgcagcctgacccttggtttggtccgagaacaattccactataaaatgtggatttattattgaattatatcctgtctttgaggagcaagtaataggattcacaattcaatctcctgtaccccatgtattaattggcttacatggctggaagtccatgtcagacagggaaggctttgcttcaggcctaatccagtttcattgttctctgactttgtcatctgcccctcttctgtgtgctagcttcatccagaagttagcctctttcacaacagtaaaatgcatacagcaatttcaggctttccacacactaagtttcccagagatgagcagagtttctctatctgtggctcatacgctaagatatttcttcccagaagctt

SEQ ID NO: 493021 - DNA, 1267 bp, Homo sapiens
  misc_feature (1237)..(1237): n is a, c, g, or t
aaccgcaggggcttcgaggtgccactccctctctttacttagcttccaggtcctaaccatcttctccttacacctagcaggtgtctcctctatcttaggggccatcaatttcatcacaacaattatcaatataaaaccccctgccataacccaataccaaacgcccctcttcgtctgatccgtcctaatcacagcagtcctacttctcctatctctcccagtcctagctgctggcatcactatactactaacagaccgcaacctcaacaccaccttcttcgaccccgccggaggaggagaccccattctataccaacacctattctgatttttcggtcaccctgaagtttatattcttatcctaccaggcttcggaataatctcccatattgtaacttactactccggaaaaaaagaaccatttggatacataggtatggtctgagctatgatatcaattggcttcctagggtttatcgtgtgagcacaccatatatttacagtaggaatagacgtagacacacgagcatatttcacctccgctaccataatcatcgctatccccaccggcgtcaaagtatttagctgactcgccacactccacggaagcaatatgaaatgatctgctgcagtgctctgagccctaggattcatctttcttttcaccgtaggtggcctgactggcattgtattagcaaactcatcactagacatcgtactacacgacacgtactacgttgtagctcacttccactatgtcctatcaataggagctgtatttgccatcataggaggcttcattcactgatttcccctattctcaggctacaccctagaccaaacctacgccaaaatccatttcactatcatattcatcggcgtaaatctaactttcttcccacaacactttctcggcctatccggaatgccccgacgttactcggactaccccgatgcatacaccacatgaaacatcctatcatctgtaggctcattcatttctctaacagcagtaatattaataattttcatgatttgagaagccttcgcttcgaagcgaaaagtcctaatagtagaagaaccctccataaacctggagtgactatatggatgccccccaccctaccacacattcgaagaacccgtatacataaaatctagacaaaaaaggaaggaatcgaaccccccaaagctggtttcaagccaaccccatggcctccatgacttttcaaaaaanaaacaacaaaatgtgggggcgccgaattaa

SEQ ID NO: 493022 - DNA, 1669 bp, Homo sapiens
  misc_feature (44)..(44): n is a, c, g, or t
  misc_feature (46)..(46): n is a, c, g, or t
  misc_feature (101)..(101): n is a, c, g, or t
  misc_feature (147)..(147): n is a, c, g, or t
  misc_feature (180)..(180): n is a, c, g, or t
  misc_feature (202)..(202): n is a, c, g, or t
  misc_feature (310)..(310): n is a, c, g, or t
  misc_feature (1636)..(1636): n is a, c, g, or t
cccacgacgtccgggttgactattctctacaaagcagcaaaganantggaacactagtacctattattgcggcgcagtgagcgtggagtcctaggcacagntctaagcctccgttattcgagccgagtctgggccaggccaggcaancctttctaggtaacgatccacatctacaacgtnatcgtcacagacccatgcattngtaataatcttcttcatagtaatacccatcataatcggaggctttggcaactgactagttcccctaataatcggtgcccccgatatggcgtttccccgcataaacaanataagcttctgactcttacctccctctctcctactcctgctcgcatctgctatagtggaggccggagcaggaacaggttgaacagtctaccctcccttagcagggaactactcccaccctggagcctccgtagacctaaccatcttctccttacacctagcaggtgtctcctctatcttaggggccatcaatttcatcacaacaattatcaatataaaaccccctgccataacccaataccaaacgcccctcttcgtctgatccgtcctaatcacagcagtcctacttctcctatctctcccagtcctagctgctggcatcactatactactaacagaccgcaacctcaacaccaccttcttcgaccccgccggaggaggagaccccattctataccaacacctattctgatttttcggtcaccctgaagtttatattcttatcctaccaggcttcggaataatctcccatattgtaacttactactccggaaaaaaagaaccatttggatacataggtatggtctgagctatgatatcaattggcttcctagggtttatcgtgtgagcacaccatatatttacagtaggaatagacgtagacacacgagcatatttcacctccgctaccataatcatcgctatccccaccggcgtcaaagtatttagctgactcgccacactccacggaagcaatatgaaatgatctgctgcagtgctctgagccctaggattcatctttcttttcaccgtaggtggcctgactggcattgtattagcaaactcatcactagacatcgtactacacgacacgtactacgttgtagctcacttccactatgtcctatcaataggagctgtatttgccatcataggaggcttcattcactgatttcccctattctcaggctacaccctagaccaaacctacgccaaaatccatttcactatcatattcatcggcgtaaatctaactttcttcccacaacactttctcggcctatccggaatgccccgacgttactcggactaccccgatgcatacaccacatgaaacatcctatcatctgtaggctcattcatttctctaacagcagtaatattaataattttcatgatttgagaagccttcgcttcgaagcgaaaagtcctaatagtagaagaaccctccataaacctggagtgactatatggatgccccccaccctaccacacattcgaagaacaccgtaatagctagaggaacaccgtaatagctagaggaacaccgtaatagctagaggaacaccgtaatagctagaggaacaccgtaatagctagaggaacnccgtaatagctagaggaacaccgtaatagctag

SEQ ID NO: 493023 - DNA, 1187 bp, Homo sapiens
ggaattgcgcgttgtggccattgctggccagcggggctgtggaaccatgtgtcccccgtgtggggctgccgtctgcccctgtctgccctgcccctgtgcccgcgcctgcccctgatcacctgtccggccatcaggccgaggacgaggagcagcagcccaccgagatcgagtcgcgtatgcatgaacgtgttacgtgcaatggcgatgacgcgccatccgtgctcaccaagattcccttcttcagagaaataatagtgagctccgttattcctgcgaggcacgtgtgtgctggaacaacacggagatccagtctggcagtgcaggatccatggaccagggaggtgctgcgtacgacgtttgtcgtgtcagtgactctgcgagcgaccatgacacagaggacagttggttgcaagacttgactcgtgacttgccaacaaagggagtgcgctgaggcataggactctagctgagaagtgcgcgtggcgcggtttaagagccaggagaacggcagcatccgtgaacacagcgtgataggaacgcgaggttgagtcagccccggatgcactaagtcgtcattgggccacatggggaaggcgagcgaccacacgggcccctgtgcgagccgaacaggcggtgctcaaagcgcaacaccggcagttggacgatagccacgggctctgacacacacgaccactttggacgtcgacaggttccgagtttgggtcgcgaaaccgcttggcaccagcggaagtgcttactagagcgcggaagggggttatgggggcagttcagcgcggcagttagtatacagaggcgttccgttgtgaagttcacaggtattttggagagttgagagttatcgcagagagttagcaagaggggggagaaaccaaggggtagaggaatgggcaatagtgggaagaggataaagggctaggcagagcgagtttagtgacgttagcagtattacaagcagggactaggagagtgggagactggacagtttgaggaggcacggattgggaggctagggacagtttcagaggtaagaggaagagcgcataaagagaggagagcgccggggtgagagtccggcgggggaagggtaggggggagctgggggcagagagggcaagggaaattttgtattggcaggtggttattctagcagagctgaagagtgtgag

SEQ ID NO: 493024 - DNA, 465 bp, Homo sapiens
aggaagtagaacctactccatagtacactcttcgtaagtcagtagtacgaagtccgagagggagtctcactctgtcgacccaggctggagtgcggtggtgtagatctacggctcaccctaccaccacccaggttacaagcgattctactcacctcagcctcccaagatagctagggatatacaggcgtgcaccaccacgcccagctaatttgggtattataggtagagatggggtttcaccatgcaggtcaggctgatctagaactcccgacctcaaggtgatccgcctgcctcagctttgtcaaatagtaacacatatttcaccaaaactctcatttcttcattgactttgttgctaatctcttaatccactcaacagttgtcatttatattctgtcaattgcatctttgtccgcttctagagatccggggtcaatgaggacgggtccctgatgctccaattgt

SEQ ID NO: 493025 - DNA, 230 bp, Homo sapiens
aatacaccatctctacaaataagagaaaaaaattagccgggcatggtagcatgcacctgcagtcccagctacttgggaggttgagatgggaggatcatttaagcctgggatgtcgaggctgcagtgaactgtgattgtgatcacaccactgcacttcagcctgggtgacagagcaagaccatgtcttaaaaaagtctttttttcatattgacccagtgctcagagtcctc

SEQ ID NO: 493026 - DNA, 1187 bp, Homo sapiens
  misc_feature (44)..(44): n is a, c, g, or t
  misc_feature (46)..(46): n is a, c, g, or t
  misc_feature (101)..(101): n is a, c, g, or t
  misc_feature (147)..(147): n is a, c, g, or t
  misc_feature (180)..(180): n is a, c, g, or t
  misc_feature (202)..(202): n is a, c, g, or t
  misc_feature (310)..(310): n is a, c, g, or t
cccacgacgtccgggttgactattctctacaaagcagcaaaganantggaacactagtacctattattgcggcgcagtgagcgtggagtcctaggcacagntctaagcctccgttattcgagccgagtctgggccaggccaggcaancctttctaggtaacgatccacatctacaacgtnatcgtcacagacccatgcattngtaataatcttcttcatagtaatacccatcataatcggaggctttggcaactgactagttcccctaataatcggtgcccccgatatggcgtttccccgcataaacaanataagcttctgactcttacctccctctctcctactcctgctcgcatctgctatagtggaggccggagcaggaacaggttgaacagtctaccctcccttagcagggaactactcccaccctggagcctccgtagacctaaccatcttctccttacacctagcaggtgtctcctctatcttaggggccatcaatttcatcacaacaattatcaatataaaaccccctgccataacccaataccaaacgcccctcttcgtctgatccgtcctaatcacagcagtcctacttctcctatctctcccagtcctagctgctggcatcactatactactaacagaccgcaacctcaacaccaccttcttcgaccccgccggaggaggagaccccattctataccaacacctattctgatttttcggtcaccctgaagtttatattcttatcctaccaggcttcggaataatctcccatattgtaacttactactccggaaaaaaagaaccatttggatacataggtatggtctgagctatgatatcaattggcttcctagggtttatcgtgtgagcacaccatatatttacagtaggaatagacgtagacacacgagcatatttcacctccgctaccatcaagatagcgatcgacatagcgtagaagtatttagcggactcgtggaaatctgcggtgagcgagctgaagagagctggtgccgtgctcagacactagggaacatcaagatttgaaccgcaggagaccggactgacgctgggataacctctgatggataaacatagtgcaatgccgaaggactaaggagaagatcctgcgacatggcctaataaatggtcagtatgttgcaacaaggaggctgcaa

SEQ ID NO: 493027 - DNA, 363 bp, Homo sapiens
  misc_feature (223)..(223): n is a, c, g, or t
tatgctgtctcaggagtacttgattctatagaaaacctccaaagtagatgtggactcaaggggaaagcaaggcaaagagaaaatgattagggtactggttggaaacaaaagtacagacagaacacaaaaggtttcgggcatttgaaagtcaaagagtattcagcgtgggatgaattacgaaaggaatttgaaactgcaggacttaagaagcttttctccgaanttggtactggctcgtggtaaaatgaaatggaagacaggaactcttttagttaaaatagcagtgtttttggtggttttggcattgggattgggggagtggttaatggaacatagtcaattttaaagctttctcgtgaagca

SEQ ID NO: 493028 - DNA, 850 bp, Homo sapiens
  misc_feature (44)..(44): n is a, c, g, or t
  misc_feature (46)..(46): n is a, c, g, or t
  misc_feature (101)..(101): n is a, c, g, or t
  misc_feature (147)..(147): n is a, c, g, or t
  misc_feature (180)..(180): n is a, c, g, or t
  misc_feature (202)..(202): n is a, c, g, or t
  misc_feature (310)..(310): n is a, c, g, or t
  misc_feature (820)..(820): n is a, c, g, or t
cccacgacgtccgggttgactattctctacaaagcagcaaaganantggaacactagtacctattattgcggcgcagtgagcgtggagtcctaggcacagntctaagcctccgttattcgagccgagtctgggccaggccaggcaancctttctaggtaacgatccacatctacaacgtnatcgtcacagacccatgcattngtaataatcttcttcatagtaatacccatcataatcggaggctttggcaactgactagttcccctaataatcggtgcccccgatatggcgtttccccgcataaacaanataagcttctgactcttacctccctctctcctactcctgctcgcatctgctatagtggaggccggagcaggaacaggttgaacagtctaccctcccttagcagggaactactcccaccctggagcctccgtagacctaaccatcttctccttacacctagcaggtgtctcctctatcttaggggccatcaatttcatcacaacaattatcaatataaaaccccctgccataacccaataccaaacgcccctcttcgtctgatccgtcctaatcacagcagtcctacttctcctatctctcccagtcctagctgctggcatcactatactactaacagaccgcaacctcaacaccaccttcttcgaccccgccggaggaggagaccccaccccaccctaccacacattcgaagaacccgtatacataaaatctagacaaaaaaggaaggaatcgaaccccccaaagctggtttcaagccaaccccatggcctccatgacttttcaaaaaanaaacaacaaaatgtgggggcgccgaattaa

SEQ ID NO: 493029 - DNA, 155 bp, Homo sapiens
agtctagaggatccctggggttgacttcgggagagcagacccaccctgtcgaaggcgcatcgcccaccacctccctcctcgtgccggccctgcttctccccagattccaaccccaggaaaaacgtgcttctccgcgaagagtcaattccatcagg

SEQ ID NO: 493030 - DNA, 497 bp, Homo sapiens
  misc_feature (464)..(464): n is a, c, g, or t
atgctcgagcgtccccatatactgcagcgacataccctagtcccaacgtacatcctctgtcaattcactttatcatatccattcgtgcctggatctaacgtgtgtcattccctcataaaatctatccttcggactatccggacttgcgccgctggtcgctcggactaccccgtactgtgattgccacatgaaacatcctatcatctgtaggctcattcatttctctaacagcagtaatattaataattttcatgatttgagaagccttcgcttcgaagcgaaaagtcctaatagtagaagaaccctccataaacctggagtgactatatggatgccccccaccctaccacacattcgaagaacaccgtaatagctagaggaacaccgtaatagctagaggaacaccgtaatagctagaggaacaccgtaatagctagaggaacaccgtaatagctagaggaacnccgtaatagctagaggaacaccgtaatagctag

SEQ ID NO: 493031 - DNA, 309 bp, Homo sapiens
tggcaatatactatagttccgccggggggatgatgagaggagattataaccaagcatcatatagcaaggatctatatcccctattaccttctgcattcatgaatgttactagaattaactttgcaaggatagcgcaagcttatacccccgtaatccagacgagctacctaagatctgcttagagcgcacatcccgtctatgttccacaatactgggaagattctataggtagaggcgacgaacctaccgtagcctggttcattagctttttcgtctgtcttgtaatgtctaagttcaactttaaatttg

SEQ ID NO: 493032 - DNA, 212 bp, Homo sapiens
gcctatcaaagatgttaggggaatcaattctagtgatgatgggcatgaaactgtggtttgctccacagatttcagagcattgaccgcagtatacccccgtgtcgtgtagctggtgaaagctggtttgcgtttaagacgtccgggcaattgcatcgtgtttttaacgcctaagagtggggacagactcatgagatgcagcggtaccgcagctc

SEQ ID NO: 493033 - DNA, 391 bp, Homo sapiens
agatatgactagcgtatgacacgctagctttaatagtaaagatcattctttacggactccacttataactcccatctagcccaatttcgacgccccgatcgctgggtcaatattacttgccgcagtactcttataactcggctgctatagtatactacgcctcacactcgttctctaccccctgaccaaacacatcgcctaccccttccttgtactatccctattaggcataatggttacgagctccatctggctatgacgtacagacctaatatcgctgcattgcatactcttcaatcagccacatagccctcgtagtaacaggcattctcatccaaaccccctgaagcttcaccggcgcattcgttctcattatctcccaccggcttac

SEQ ID NO: 493034 - DNA, 245 bp, Homo sapiens
tatgactctagaggaccccccaacttttatgtaactggctttcctaggctgggggcttgaactaagtaaagacgccaaggagttcagactctagatagcagagaagtaagtctcattacaaaaacttgcaagctacgtgtaagagtccaccccgatgaagctgttacagataggtgtatctatggactagaattctcataagtatcatattggtacaagactacaacaacaaatgtaggctaagc

SEQ ID NO: 493035 - DNA, 664 bp, Homo sapiens
tctctctcttgatcatttggcattcttcatattacatcatcacacataaaattgttgattctcgtgttagaaggaaccatttttaaaagtacagtttcttacctgatactggaatccctgctataatatagctagtcattgccaagctacacttggaaaaaatagacgaaagaaaactcaaaattcatgctcatatgctattgagcatttagtgacattgcagctaccttatttgagaaggcagcattccactgataacatatatcaccctctaagtatggcatgctcctcttacaaacagttaagcttcagagcagtagtgcaggaaggaaaaaagtcccttcataaataaatccttttgcctaaatgaaagaatatacagtactcataaaaatggcgattagagcccagcatgagaaagataccctcataacactaataatattagcaataaaaataccctctgagatttgctattccagagaaaatatttgctattattgttattattattatattactgctaataataataatgggttgcttgctaagagattgagcctttgctgtaactaagtaagcatacttagaaagtgctcccctgaagacatttcttcaattaataaagaagactgacagatcttctcacagcaaaaaaaaaaaa

SEQ ID NO: 493036 - DNA, 1030 bp, Homo sapiens
cgcggtggctcacacctgttatcccagcagttgggaggctgaggcaggaggatcacttgagcccaggagtttgagacaagcctgggcaacatggtgaaaccctgtgtctacaaaaaaaatacaaaaattagtcaggcgtggtggtgcgcacctgaagtcccagctactctggaggctgaggcaggaggattgcttgagcccaggaagtggaggctgcagtgagccaagattgtgccactgcactccaggctaatcaacagagcaagacccagcgtccaaaaaaaaaaaaaaaaaaaggggtttggtgtgtgatggggccctttttcacccaaattttcaaggttattatcagagaaccatagaggccttagttctttcagaccaattagcccgtgggccggataagctattaacgcggtataacaattaacgtggagaggggccacacttacttcatgtggcccttatttggggaaggggccacccttaggcaatttttcgacccatttaacctttccctagtagaggagttatattacagttgctgtcaccaagagttcgataaagttcgtaggggagatatctcctagtaagaaaaaattcgggtatgtacggcgttatagagtcacaagggcctaatcagggttttcagacacagtttctttagagttaagaggccttctatacccggggggaggagaaaaagggggaagagaagaagtagagaacgacaagaaaaaagaatgaaaaaaaactactggggggggcagccgcagacgagcccacacgaaaaaggcgtcagttgcaaacacacacgcagaggggcgcgcggcggcccaccaagacgagttaaagtagcgacaaggggccaaaggtgaggtggcaccccacggagagacaacatcgtgggaatagaataaaaatggacggggtaggaatccacccaccccacataaaaaaaccagcccggggggggggaaacaagcagacggtgtggttgagaaaaaaacatcacgatagaggaggtgat

SEQ ID NO: 493037 - DNA, 472 bp, Homo sapiens
ccctttgtcttcagaagcactcatgtcaacaaaaaggacacccacacaaaaaccccattcagaggccatcagcatcaaagctcaaaggtagataaacacacgaaggatgaggaaaagccagtgcaacaatgctgaaaattccaaaaaccataatgcctcttctcctccaaatgattacaactcctctccagcaagggcacaaaactggacggaaatgagtttgacgaattgacagaagtaggcttcataggtgggtaataacaaactcctttgagctgaaggagcatggtctaacccaatgcaaggaagctaagaacattgataaaaggttacaggaactgctaactagaataaccagtttagagaagaacataaatcttcttgaagaacgagtatcaataactgaatcaatcaagcagaagaaaggatatcagagattgaagatcaacttaaatcaaatgtgaagacaaag

SEQ ID NO: 493038 - DNA, 288 bp, Homo sapiens
gtaggatgagctcatagtcattgctgtcgatgggcctagagtacgcattcttaattaaagtcatcactttatcctgtgtactatcgtattcctacaactcaactcaaactccagaaccacgaccctactactatctcgcacctgaaccacgctaacatgactaacaaccttaattccatccaacctcctctccctaggaggactgcccccgctaaacggcttattgcccaaatgggcccttatcgaagacatcacaaaaaacaatagcctcatcatccccaccagggt

SEQ ID NO: 493039 - DNA, 738 bp, Homo sapiens
taagtatattccattttattataaagcagggctcccaaatcttttcacagggtacacctcgagggtggagaacatccaagcacaccgtggatggtggatgggacccacttcgtgggtaccctgatgaggaagctctaggtgtagaaattcaggacgcggtcttcagagcagagggctggtctcacgtcccgtgtctgccacttactaacgtgctgtgaccttgagcaagccacttaattttctcgtgctccttctcgttggtaaaaggggtacaacgtggtggctcagcagataagggacctaattacacgttaacagaactcagcacaaagccgtggcacacagacaggctctcaccagggtgccattctcagcacaagtgcttggttgacgcatacgtggtggcagtgggcaggtgtggtgccccaagggggtgtgggcctcaggagacccgatgcagcaaagaggcagtgaccacggaggcaggggacaaatagcccatatctttaacaggacactcgtgcctgacacctggcaaaagtggagaagaccatgagagcacccaaactaaagcggatcccaacgatgggggaacacactaacgggcaacacagcgggaggacgtgaacatcgggaaatggggaactccctggggataccccaagatgggccaaaaacccggaaaactcataactacacaaggtgaacaccaggcgaacaccccgaagtccggacacc

SEQ ID NO: 493040 - DNA, 744 bp, Homo sapiens
tggggaaagggccgtctcccttcggtgtcacctggggctgaacgtgcagtggcacgggtctgggctcgcttgcaacctctggcctccagggtccaagtgattctcgggcctacagcctcccatgcagctggggacatacaggcacgtgccaccaggctccggcataatttgtggtgatttctaagggaaagaggggggcttggcagccattggggaataaggagtgggtctcagaaggtcctcacctcagatagatccggacaccgcctcgggccttgcacaaatgtgctagggataacagggcgtgacgccattggggcccgggggcataagagccaggcacgttattgtatcactgggggaagactccccagacaagacgaccggtcaaagggtaacaaagggggaaaagctgtcggccactatataagtcccatcctgaaacgactgggtttagagacgggcgcgggagagaccctcgacacccccggcagcgcgagcacacacacatgcgggtgcggggcggcagaacacgcgaacaacggggggccacatgggctccactaacccaacgggcacagcatcaccccccgccggaggggggcctcacccagaatactgacaacggccacctataacagcgagaaccaagaacgttggtaacgaacgaccccggcagcacagataacccaacgtgctcggcggaaaaaaagggcagcaaaaagaggaaccagataaaagagg

SEQ ID NO: 493041 - DNA, 600 bp, Homo sapiens
gggaacactaagaaaaacgggttaaccccaataaagccccgtgggggccgcactgtttcacgggggttataaaccccccaaagtatttagcgctcttcgaccaaaaaagaggcgtgtttgcttcaacttttcgacggaataaattagagctcccctctaagttagtcttttcttaagagaacgttggtgacaggttgcgcaaaatttgaataataagctctcctgtgtatggcaatagcaccacgcgcccccacctcactaggtggttttacatcggtagaccccctctctaaaaacaggcgggtgcgtttggcgagaaaatttttcttaagaatctcagggctatgacaccccccttcttcaagtattacacgagtcgccaacttttctacctgtgaggatatgaccacagaccccaccttcttggggcctgttctttacaaccctccggagacattctctgcatccacatcatggatttaaacaaaaattgggaagaagaaagtatcttcattataacccgaaaatatacttcggagggacttttatttctatcaagggcagaaggggcaataaagtcacagcaataataaaaaaggg

SEQ ID NO: 493042 - DNA, 210 bp, Homo sapiens
acagctcaggcagaggggctaagagaggttggggaaccaaagtcatgggagaattcgaaggaaggcctcagcttggtgctgctatcccttttccctatgaaagtcggcaaaaatggccgggcgcagtggttcatgcctgtaatcccaacacttgggagctgaggcgggcggatcaggaggtcaggagatcgagacaaccttgggtaatgg

SEQ ID NO: 493043 - DNA, 723 bp, Homo sapiens
agcgttgttgcctaccaaagctcctcaagaccaatttcatgagatgaagaagcttccggagggagatggccctagtgcccagtttcgggtgccaggcgggggcttcctgtgacctgcgggaagggggtggggggcccaagcggccccttctgctccaaggcacaggggctctgcggctgcaggcctggttggtcaccccgtctgcatctgctggatacccaccccctccagagacggggctcactgccgccacggcaggtccccaggggcgaggtcttccggccccaccggtggcacctgaagcacttggagcccgtggatttcctgggcaaggccaaggtaaaggtggggacggcgtcctggggcatggcggctggtgctgagccctcgaactgtgttcccagggatggggggaggtgcagtccaggccaccgtaagggccaggagggtagagagtgggcccacagccatcctcaaactggcgcccacggtaggggggcggtgccccaaatggggctgtgagcttgaaggcagagcccactagagccggctgcataggagggggctccagctctctcaacaaggaccctgcaggtgccacccgtccccagactgggccatggccacagccacagccttgcagcctcccagagtcctgcgtctctctgcgtcctttcatgcctttgtgtctccatgtgtccctgccacagacagcgaagtccc

SEQ ID NO: 493044 - DNA, 1140 bp, Homo sapiens
gtcgtttataaacgggcccgcgcgttgacgcccacctcggtccgccatgctgctatccagtgccgctgctgctcggccctccatcggcctggccggtcgccgagaccatgccgtctacttcaaggagacagctttctggatcggagcacgggtggacttcccgcctggactcgaactccacaatcacacacgtcacgacttctctggccacaacttcgttctcacgttcccggcacagcttctacggctgacgagggagacccgcatacaaggctttgcagacacacgccaggcattgccacgcattcttactgcatctgctcggcccagcttctcgcagccctcttcacgcacaccaacaggaccacgacgcctggctggctcgcagctctccacggctgcacacccacttgcagccacgcaaccactcgcacactgctgcgcgggccggccctattgctgcaacggcctggtcttccatacactaccctctctgggcacccacgcaccagcaccacttgccaccgcgaacgaccttcccagacattacgacaccacatcgattagctacctggcgtcaccccgacacattcctagctgggaccccctggccaacccaccacgccaaccgggttccacatggctccaccttcctttctacacctacacccacaacgtggcgcccacacccaaaccccgctgccccgtgcacttcaaccagccacacgcggacacaccgttccccgcgctacgcccagcacccgcacctggcacctcgccacggcctctgcaaccccaccgcaaccaccctggcagtaacccaacccaccccttgcaccctctcggcttgcgcccgcggcccacccaacggcaaacccgaccacagccaacccacccctctaagtttgccaacacgcgctttagaacaagtagcaactctttggcatcccacaagcagagggcagccgcaacagcgcgtactctgtgccaaagcgcctcacccgtggggtcatgttccccccctcagtgcgcgccaagacaggcgcagcacccggcacatccattctggggctgcgcaaacccatcattagcccgcagtggactcccacgcgaccgctcccaaaacccgtcacacagcca

SEQ ID NO: 493045 - DNA, 123 bp, Homo sapiens
cctcctgattttacctctacaaaggttgtccccgtgacagcatttgtccccccccctcagccacatcatgctcagcccccctgccttggtgaggacccaaaggtaaaggtgtatgcagttgca

SEQ ID NO: 493046 - DNA, 302 bp, Homo sapiens
gtggctgttctaatgccccagcccgaagtggggagtgttgtgggggtcagagccctcccccagcaggagagaacctcccggaggggtactctgtggggcctgtgtcccctgctcgggagtaaggctggtcctggggtcctccttgaatggaacccactgggcctgccgagtgctgtgttcttcctcagtctggctgtgggcaggagcggacttttccagtgtcacccagggtgagtgcaaaataaagacggcgagtgtggctctgtccatcccttccctcctggagggtaaagggctcccgg

SEQ ID NO: 493047 - DNA, 221 bp, Homo sapiens
attctagaggatcccgaacgggtatcggttgaagaggaggagaccaacaggctccctgtgtggcaggatgcagagtgctgctggtgatgtgtacacctgcaagtccctgccagggatgagcgctgcagcctgacgcagaactgttcacatggtcatacctgctgaaccctcattgcccacgggaacaccgagtcaggcctcctgagcagccagtccacgtg

SEQ ID NO: 493048 - DNA, 926 bp, Homo sapiens
ccatataccaatgatggcgcgatgtagacacgagaaagcactataccaaggccactcacgacatccaacctgtcctaaaagaggccttcgatacgggataattcctatttattacctcgagaagtttgtgttcttcgcaaggatttttctgagctctttgaccatctccagctcatagctccactagcaccctcaattatagggaggggccacatgggatcgcactcaaacatgggcatcaccccgtcataggaaatcccctacgaagtctccacgtcctaaatgactaatccgtatttactgcgctaatcacggagttcatcagaattcacgctgacgtcttcacacataggtgcatagtatgcaatatggcaaattcgtataagtcaataataaacttttcaatgccatcatggcttattttacaatatgtacactctggagttcttctcatttatgtaacgcctacgctaatcaaagactccttcaggaagttaacttatacggaccgatacttcacccttttaatcgcgatttttcccgagggagggaattcatacggggcttcaatcagtatatctgctggatatgccgcgcggggacatatcccaagcgggaaggtttaccacccggtccatttcacttgtgcgcttcgagacctttttgcccatgcaaagttacgtgctgggctattcaattcccgcggccaaaagcagaaataactcattaattcaccttttttttaagcaattcaccataaattcattccaccttttgtggtggacttatacggaaaaggccgggcctggcaccttgtggtgagcctcggggcaagtgttctggtcaagaactgttggggtcttggagcgtacatttccttggatctggttccatcccaattccttattgcggactcggacaagggg

SEQ ID NO: 493049 - DNA, 739 bp, Homo sapiens
tgaaagccgctcagaatttgtatataccctaaataggttaatgggaccaggttaaccaagtgtcgaacagacacaaaagagcccaggtaggtcctttgtggccccgtgccagtgaatgtcaacctcactgagttgagtctgagtcgtaaatggaagcacagtccaacagagtgagcacatgtccgcaggacagctggatgcgcagcacgtaaacttgtggatccgtagtggtcaggtaagccataacctgagcagcatgatcgtttgtgaacaaggattggtcgagcattggcatgcagcccagctgaccgccccatgtacatcgcaagtggagacctggaaaagagccacgcatagatagaggtctgcacaggacaggtttccagtctcggtatgacagaagcccttgatgctgcccttgcctacatgaattaatgccttgagactaggcagagtgaggtcaggcggcctctcctcgtgaagcgatctcagagtcgcgtcatggaggttgtgcggttcgacatcatagtatagggtcacaatagtgtgtgtaccccccgctgagcctgagccagcggacagtggggagctagcctcgagaccctagtgggatagcaatcaatcaggatcgtccagcggcccacgcccatctctagcagtggagtgatatcaggaggaaggttctagcaacagtctggcagagtaattagaatggcagatcgcccccacctgcatgatc

SEQ ID NO: 493050 - DNA, 127 bp, Homo sapiens
  misc_feature (26)..(26): n is a, c, g, or t
  misc_feature (58)..(58): n is a, c, g, or t
gtagtgctaggtgtccgagtcctcanggcatgtcagtagtttaacaagacgcatgttntgaactacgctccgattgtcccatccccgccgggccaaaacagatttggtgggccacccagggatcccg

SEQ ID NO: 493051 - DNA, 472 bp, Homo sapiens
  misc_feature (13)..(13): n is a, c, g, or t
  misc_feature (32)..(32): n is a, c, g, or t
  misc_feature (34)..(34): n is a, c, g, or t
  misc_feature (46)..(47): n is a, c, g, or t
  misc_feature (50)..(50): n is a, c, g, or t
  misc_feature (53)..(53): n is a, c, g, or t
  misc_feature (55)..(56): n is a, c, g, or t
  misc_feature (62)..(64): n is a, c, g, or t
  misc_feature (66)..(66): n is a, c, g, or t
  misc_feature (76)..(76): n is a, c, g, or t
  misc_feature (83)..(83): n is a, c, g, or t
  misc_feature (86)..(86): n is a, c, g, or t
  misc_feature (90)..(90): n is a, c, g, or t
  misc_feature (94)..(94): n is a, c, g, or t
  misc_feature (111)..(111): n is a, c, g, or t
  misc_feature (113)..(113): n is a, c, g, or t
  misc_feature (116)..(116): n is a, c, g, or t
  misc_feature (122)..(122): n is a, c, g, or t
  misc_feature (143)..(143): n is a, c, g, or t
  misc_feature (149)..(149): n is a, c, g, or t
  misc_feature (198)..(198): n is a, c, g, or t
  misc_feature (217)..(217): n is a, c, g, or t
  misc_feature (232)..(232): n is a, c, g, or t
  misc_feature (235)..(235): n is a, c, g, or t
  misc_feature (245)..(245): n is a, c, g, or t
  misc_feature (247)..(247): n is a, c, g, or t
  misc_feature (250)..(250): n is a, c, g, or t
  misc_feature (255)..(255): n is a, c, g, or t
  misc_feature (270)..(270): n is a, c, g, or t
  misc_feature (281)..(281): n is a, c, g, or t
  misc_feature (283)..(283): n is a, c, g, or t
  misc_feature (291)..(292): n is a, c, g, or t
  misc_feature (294)..(294): n is a, c, g, or t
  misc_feature (300)..(302): n is a, c, g, or t
  misc_feature (306)..(309): n is a, c, g, or t
  misc_feature (311)..(311): n is a, c, g, or t
  misc_feature (316)..(316): n is a, c, g, or t
  misc_feature (318)..(318): n is a, c, g, or t
  misc_feature (321)..(321): n is a, c, g, or t
  misc_feature (324)..(324): n is a, c, g, or t
  misc_feature (326)..(326): n is a, c, g, or t
  misc_feature (333)..(333): n is a, c, g, or t
  misc_feature (358)..(358): n is a, c, g, or t
ggggggaaaaagntacttgacttggagggaangngtatgtattagnnggnagncnntggttnnnanttataaagtnatataantcnttcnttanagtaaaaaaaattttcntnaanaactanaatataatactgaagatgaanaaaaanaaaaccaaataggagtgtttgtattcctttagagatctggatatttttnaaagacttgctttttacgnacattgtgatagagnatnttttgttgantnatntaacntccatgtgtgggtcntttgttttatnanaaccatgnngnaggttnnngggnnnncngtatntnttncananctcacanccaggaacacttattttgaacaatncagacagtacttgccagagtcccaaatgctgaattattgaaccatgtttttttttcctttgttgaaaaaaataaaccagggtgatttctataaatcaccagtttttggcattgg

SEQ ID NO: 493052 - DNA, 128 bp, Homo sapiens
ccatgggtcctgggccccttcccccacttcaggctaccagcactgcagggagggtaagggctggctccagatacccctcccccacagattcctagcaatgaaaatctaatatattcttctgttgcccc

SEQ ID NO: 493053 - DNA, 267 bp, Homo sapiens
  misc_feature (55)..(55): n is a, c, g, or t
  misc_feature (71)..(71): n is a, c, g, or t
  misc_feature (82)..(82): n is a, c, g, or t
  misc_feature (180)..(180): n is a, c, g, or t
ggaggggcctggtgggaggtgattggatcatgggggcagacatcccccttgctgntctctcaataatgagnttttatgaganctggtcgtttgaaagtgtgtagcacctcctcctttgctctctttttcctgctggccatgtgaagatgtgcctgcttccccttcgccttccgccatgantgtaagttttctgaggcctctccagaaggagaagcctgtatagcccacagaactatgagtcaattaaacctcttttctttataaatt

SEQ ID NO: 493054 - DNA, 164 bp, Homo sapiens
  misc_feature (73)..(73): n is a, c, g, or t
ctgtcacaccgacctgtcacaccggggcctgtcacagcatgacctacctgtcacaccggggcctgtcacactngtgcctgtcacaccgacctgtcacaccactgcctgtcacactgacttgtcacaccagtgtctcacaccgacctgtcacaacagtacctgtc

SEQ ID NO: 493055 - DNA, 164 bp, Homo sapiens
  misc_feature (7)..(7): n is a, c, g, or t
  misc_feature (16)..(16): n is a, c, g, or t
  misc_feature (159)..(159): n is a, c, g, or t
gaggtanggacgacanaaataatctacaaaaatttcaaacatcactggcggtagatattcctccagctcaggggggaacatccggaaactggcatctccggctgcagctggggttccagcttgcatcacggggaaacacagctatctccgtggatgcanggaag

SEQ ID NO: 493056 - DNA, 293 bp, Homo sapiens
  misc_feature (123)..(123): n is a, c, g, or t
aggatgtggaagatcctggtggtgatgaagacagtgcagagctgcaagcctcagaccgggttctgagtacacagtcagtgtggttgccttgacacgaatgatatgtgagagccagcccctganttggaacccagatccacagctaattccgtgcaccaactggacctagaagttcactcagtgtcacactccacaagccttgagcgcccatgtggacacacacccaattgttcagcatcatctggatattcgatgtgcgtggtgaccctccaagtgagaagacctggaaccaa

SEQ ID NO: 493057 - DNA, 583 bp, Homo sapiens
  misc_feature (16)..(16): n is a, c, g, or t
  misc_feature (95)..(95): n is a, c, g, or t
  misc_feature (208)..(208): n is a, c, g, or t
  misc_feature (218)..(218): n is a, c, g, or t
  misc_feature (224)..(224): n is a, c, g, or t
  misc_feature (241)..(241): n is a, c, g, or t
  misc_feature (265)..(265): n is a, c, g, or t
  misc_feature (282)..(282): n is a, c, g, or t
  misc_feature (304)..(304): n is a, c, g, or t
  misc_feature (321)..(321): n is a, c, g, or t
  misc_feature (376)..(376): n is a, c, g, or t
  misc_feature (395)..(395): n is a, c, g, or t
  misc_feature (403)..(403): n is a, c, g, or t
  misc_feature (434)..(434): n is a, c, g, or t
  misc_feature (466)..(466): n is a, c, g, or t
  misc_feature (468)..(468): n is a, c, g, or t
  misc_feature (491)..(491): n is a, c, g, or t
  misc_feature (500)..(500): n is a, c, g, or t
  misc_feature (515)..(515): n is a, c, g, or t
tcacatagtttttttnttcgttgagtttagcccaagtttgactggtattttcagttcacttaccaccattccagcagaatagcagagcaatttcnattttgcagtgaatcagggttaatcatcccagaactgtttgatagcaaaagactaaaacaactcaagtgcctaccaacagtggacaggttacataaaatataatgcatttgcntaatgcagtncatgcnactgtgtacaggaagcnctgtatgtgctcatagggaaagtnctccaagatagattgtnatgaaaagggcaagtgcagaanagtctacacagtctgcnacctggcaagaatgagaaaagtgaagaaaacacgtatcattcattattgactganatcagcggggatgaatacngggcaganacacaagagaaagagaagtggccacctgggnaagtgggggggtgggttctttatatatgatcncnttacttcaaatagtttgaacccngtgaatgtnatacttatttcacanattaaacacattttgtattcagaagaacttcccctcaataatattctttctcttcattttatcctcct

SEQ ID NO: 493058 - DNA, 129 bp, Homo sapiens
ctctagagtgatacccgcgcggctgcggcacggcgatagttgagccgatcagctcaccgccgttcagcagctaggtactccacactgtagccctcagcggccgctcgcaccgcggctcctgccacctca

SEQ ID NO: 493059 - DNA, 627 bp, Homo sapiens
ggagagagaactagtctcaagttttatttttatttttaatgggctttggtagagggaggtaggtggtattattgataatttgttgtgatagaaattgatggcccctaaaataaaggaaacacctgtgctagggtttaagggaaggaagatggtataggctctacggaggcctccagggtggagagtagtcccctgctaagggagggtaaactgttcaacctgttcctgctccggcctccacttatagcatgatgcagagcaggatgtaggagaaagggaggtaagagttcaaaagctatatgtggttaatgcggggaaaggccatatcgggggacaccgaattattaggggaacatagttcagttgccaaagcctcggattatgagtgggatatactattgaagaaagatttttaccagcttgacatggggctgttgacgaataaccgtcggtaaacatggtgagtacgtaacccctaaaaagaggttgccataggattgcgcccaaaactacgaggatcgaaaataaaggaaggacttacaagacatgatcccataggaaaatccacacacatgcaccgaaataataaggaaatagtgtaccaatgtatatggggaaggaaaaaaa

SEQ ID NO: 493060 - DNA, 114 bp, Homo sapiens
  misc_feature (48)..(48): n is a, c, g, or t
  misc_feature (50)..(50): n is a, c, g, or t
  misc_feature (56)..(56): n is a, c, g, or t
cagcttctgcaggaggaatccaggctagcaaagaatgaagctgcgcgnantggcantcgtggtggaagcagagaaggagtgtaacctggagctctcagagaaactgaagggagt

SEQ ID NO: 493061 - DNA, 202 bp, Homo sapiens
tggggatactgccagccattgggtgcacatgtggtctgagcagtcagccaaagataaaccaccatatgaacagacagcagctaagctaaaggagacatatgacaggatattgctgcatatcgtgccaagggcaaaagtgcagcaggccagcagggccctggcaggccaacaggctcacagcaggagcgcgcaccacaagttg

SEQ ID NO: 493062 - DNA, 120 bp, Homo sapiens
ccgctctagagtatcccccctgcttctgcctctctagtctggcacggtgaagagacatgagaggggcagaagcaggaagcagaagcaggagcgcttcctgcttctgcgcctctcatgtct

SEQ ID NO: 493063 - DNA, 1356 bp, Homo sapiens
  misc_feature (325)..(325): n is a, c, g, or t
agcggcttaatccggcccgactcccccctccccccgagcgccgtccggctgcaccgagctacgcatccgagttacaggctcgtgctaagctaacgccgtcgacgaatctcccttcatgtacgccatcactgattatctaccggggacctcagtccagcgcacgatgaggatgtgctccgacatctacaaggatcctgggagatcgcggacgggttgtgcctgtgaggtagcgacgtgggaacgatgcgtcaagataggaaacgaacggtaatcctttcgagtgacatcaggcgttacgaatctggtggagaaattgcacttcctngcatgaaatcgcccccgaaggggacgaatacgggtaaccagacaaagcactagatacttcagctcgcgtgatccgactaattgatcgagtagaaacccagtgcacactgccatgggaaagcaacgttctcagcaaaaagacaacctagcagacgatacgtaccactcgagcacgaattgaccattgataatacaaatccaaaaacgggaaaaactgtgatacgaatagcacgtaggaacccaagaagatagtagtaaaaagagccgttattactgacctcgtgggggactcgcacgaaaccataagtgcgagtgcgcaacgactcccgtatgtcgtaacgcttatcctcactaacctcgtatcgcagaggcatgcatctactattaattgcgtcggaccacacagcacttggaagcttcgcgcactaatctgtggcgattatgcgactgtggcatactataatagttggccgaacgtaaaccgctcgttggcgaacgtcgcacgaggcgtaagtatgaaaaccctgccacattattacatagaattagtcgacctcttgtggtacaatctcgactcggtctgtatacacccacacacatttcgcgaacaacagcacttcgtttaacactccacacaattgttgcggccacacattctaaatagttgcgtgcaaatcacttaatattcaaacccactggagtgacaaataccacgtacagaacgtttggggcccctactctgtgccacatgagcccatgcattcccctacgagacgacgtcagcgcctatggtgctacctttctaaaggaagccacaaattatggcgaaccattcgacgttggcttccacattcgtcttcgaactgccttcccttatccaaatcatactacttcgttggacccgatgacatgtgaagtctaacgtcgctgtagcaccttgcggcacgggacacgtgtggtctcagtactagccaacaacacacgctcttgtttcatagtgtaatgcggtagtgctaccagcagcggacgtcc

SEQ ID NO: 493064 - DNA, 422 bp, Homo sapiens
ggaactcaaggaactctttttcagtgaccagacagaccaaacgtcatcaaattgttcctgtgctacgtctgaacttcagagagaaaccctctttcttggcaagtgggctcgattcaaaatgtaggcattttccagaaaaagggtccgtgtttcttgaagaacaggaactggtaattattaacgggaactgtgtttaactttggcaaagcgacggtttcgggaaaactgttttggacattattcaacagaaacggtttaaggttgttttggggtctcctaagagtaagtaacaagcgagaagagaaggcccagacaatgttctttcaagtttggatgctggccctgaggacacgtgcccatcagcagaggagccaaggctgaacgtccaggtcacctccacgcccgtgatcgtgatgcgcggg

SEQ ID NO: 493065 - DNA, 223 bp, Homo sapiens
gaggacatggatgaatgtgagcaggcgttggctgctgagcccaaggccaaggaccccgggggttatctgcccaagagtacctccccgctggatgaatttaagcgcaaggacttcaatgaggacacactctctgtggcactgccatattactgggagcactttgataaggacggctggtccctgtggtactcagagtatcgcttccctgaagaactcactcaat

SEQ ID NO: 493066 - DNA, 300 bp, Homo sapiens
gttgaccgatgtgcgagccactgagcgcggggcgagccagcgagaggtcgcgagcggtggcgctgcctgcagcctgcagcctccggtcggccgtcgagccagtgcgcgtgcgcggcggcggcctccgcagcgaccggagagcggactgaccgacggtagggctagcgagccagcggtgtgaggcgcgaggcgaggccgagccgagagcgacatggtggaccgcgagcagctgctgcagcgggcgcggatggccgtgcaggcggagcgctacgacgacatggcctacgctatgaaggcagt

SEQ ID NO: 493067 - DNA, 582 bp, Homo sapiens
  misc_feature (37)..(37): n is a, c, g, or t
  misc_feature (75)..(75): n is a, c, g, or t
  misc_feature (144)..(144): n is a, c, g, or t
  misc_feature (204)..(204): n is a, c, g, or t
  misc_feature (216)..(216): n is a, c, g, or t
  misc_feature (224)..(224): n is a, c, g, or t
  misc_feature (329)..(329): n is a, c, g, or t
  misc_feature (382)..(382): n is a, c, g, or t
  misc_feature (430)..(430): n is a, c, g, or t
  misc_feature (434)..(434): n is a, c, g, or t
  misc_feature (436)..(436): n is a, c, g, or t
  misc_feature (454)..(454): n is a, c, g, or t
  misc_feature (518)..(518): n is a, c, g, or t
  misc_feature (577)..(577): n is a, c, g, or t
  misc_feature (582)..(582): n is a, c, g, or t
cagatgctccagctcactgaaggcgacaggccaggcngcctcattaacaactatactacaagggtaaacagctgngctaactggctgacagttataaaaacacaaaaaggagcctgggaaacagcaaagtcaacagggaacagnaagtgggtaccccctttgccagaagctaattgttttctgggacctccaatgcaagatggnggcaagagaganagatgtanggcagctggcggcaggccctgcgcccacagctcctcgcctgtcctttgaccacagatcccatcctgcatgactcaaggtcccataggcttggcctagctcttatngataggggaacaatagaggggaacccagcctcaacccaagtcagaaggtagcnttttgccttgggaggtctgtccattgaactcaaagggaggcagttacngcangngggctaagcatgttgacnaccatggctcatggcaacctaagatggcagaagacaaacacagaaaccaatggggtactaggangtctgcacaacatggagtcctgctccccgtacttagtccactctctgcctctcgagcgnaactn

SEQ ID NO: 493068 - DNA, 255 bp, Homo sapiens
tggcgtcacctattcacgggcagcgcctctcctgctcgtccgggaaggcgatgtcgaagatctcccggtagtgttccacgaaggtgcaacctccaggccctcgagtgatgcaaagctgccaggatcgtagaaagtccattcttagtcctcgagctggcagagagaatgcacgatgaccccatcagcgcattggcccggcaagaggctcttctcctttaatagcccacacaaacaaaggcagggactcttgccccg

SEQ ID NO: 493069 - DNA, 237 bp, Homo sapiens
actacgacgaagcgcacgatgggcgtcaactcgggtccagcgagcgcatatcatagtaggacccgccagctgcgagacaaaggcggcagcggggtcaggggcgcacttggactcggacccgaggtgcggtctgcgctagcattcacgggcaagaggagggcctgtctctgcgaaggcagggtgtagaccctcgtccacccgcaaagcagcacatggagacgcttccacgggtgaact

SEQ ID NO: 493070 - DNA, 746 bp, Homo sapiens
gcgcctcattaccatcatgagcatcatcacaatcatggacatcagcaccttgggagcagtgagctttgcagagaatcagcaagccaggagcaccaaatgctcctactcatcctgctcctccaggcctgcatcgactcaccgataagcgaccagggtcagcataggcagggtcacccgagagaaccgagatatgccagcaagtgaagatttgacaaggatttacagaagagaagctctgtcgaacagagatgtataaatcaagtggactctgtaaagttgccacagattcacgagttggctcctaggagcgtgatgctgccattgtcgacatctgatatttgaaaaaacagggtctgctgattcgcctgacagtgtaaatgaaagacctcccatcttgtatgtagctgacagggacttcgggcagaggagaacataagctgagatcttgtcagtgacgttgcctcgcagctgcctgacgaagtaagtcagcagcttagtagcccagcagaagccagtgccagtgggacgctagaaagaatccaggcaaagaaagtgagaatgagcttcaagctaaagtatttaacaataggacgatagtcgcccaatttagtctagacatcaatttcatttccagcatttttataaaataccaaattagtgaagcagaaatagaaattagatattgtgcaagacatggggaaatctgactggaatggggttccagattttaaattttatgtcctaga

SEQ ID NO: 493071 - DNA, 854 bp, Homo sapiens
gacagacgtcttttggacgaccgatccccggggacgctcccccccggtgtggcgccccctatgatgaaccaccgggtctggtctcagcccctccggggatttttactcttagacccccggggggggggatgaccaattttctcaccaccggggcccaagcttgttgcgccaccttggcggcccttttgggggcgcacccacctagagaaccacaagtgtgttgcgaccacagaaacacacaggtggggcccgctgcccggaattttcccccgggggaattgtttttggccgccgccgcgcctccgcgcccgcggtgtggtggcgaccacccggattttctctggtgtcttgcgggacagtgacgctcccccccggcgtgtgtatttataaaagatgtgcgccgcccccacccacccacccctggggggagatcttcccccccgtctgctaataggcccccccctgtggtgatgaaccggggtgcccccccgcggtgatggagcccccccccccgtgcccctcagtggacgcctctgttggccagagaagaagcgcgcggtgtaatatttctctctagaatcctctgggggtattttcctcgcccccccccttcttcttgggagaccccccctctcgtcatgtgtgatgaggagaacccccctccccgatgttgccccgagcccccccgatgcccgcttcgttgaactcgggcacctcctccccgggcaacccccccccttgggtgtttttaaagggccccccccccccccggtccccaaattttccgttttccccccggaatttaaaaaaaatatttttttgaaaaaaaaaaaaaaaaaccccccctggcccca

SEQ ID NO: 493072 - DNA, 237 bp, Homo sapiens
  misc_feature (3)..(4): n is a, c, g, or t
  misc_feature (32)..(32): n is a, c, g, or t
  misc_feature (40)..(40): n is a, c, g, or t
  misc_feature (84)..(84): n is a, c, g, or t
  misc_feature (94)..(94): n is a, c, g, or t
  misc_feature (110)..(110): n is a, c, g, or t
  misc_feature (131)..(131): n is a, c, g, or t
  misc_feature (170)..(170): n is a, c, g, or t
  misc_feature (172)..(173): n is a, c, g, or t
  misc_feature (198)..(198): n is a, c, g, or t
  misc_feature (201)..(201): n is a, c, g, or t
  misc_feature (209)..(209): n is a, c, g, or t
  misc_feature (220)..(220): n is a, c, g, or t
  misc_feature (222)..(222): n is a, c, g, or t
cannactagcaagcatctagttgaacactctntatttttngtaccagcattcactggctgttcccagctccaggaactcaggtnggattcatanttttttccgtttcctngctcttaggaaaagtactganagctcataatttgttgttttttttaggatattttctttntnnctagaagcaatgctttttttttctnggnataatttnttttacatttntnaaagaatagctattc

SEQ ID NO: 493073 - DNA, 749 bp, Homo sapiens
ggagcagcttcgcgtcggtcccgagggatctggtctcattgcttcaacagcagttctgcgacggcacacacgatccggtggtactactactatccagaccatccgtatccggcccatcacgacattctcctactcccgctttggcaacgctcacgaggcaccgatcattcgttcgagacacactacatcacataggcgtactactgagcgaccccctggcgcacgacaacacaggcttctctatatggtgcgtctagcgcctcacatatcctatgcgccacaccgcacagccccaactgcacgcgcctcccaccaaggacgtatacagactccaggcaagagctgtaactatgcgcaggcacgtacccgctgggcaggcgccaggcccctggctgcaaacgcagcacacgtgaggctcagcaaatcatactgggctacacctcttggaccaaggggaccccaattccgcgttaacggaccgcccactaagccgctctttcacgtttacctaccatggggacgccccctatccataagattcctacgggaaccgccgggccgcaaactggcaacatgcgctgggggcctgctcaccttggagcacacagctgctggccccggcgttgtaaagaccccctaagcctctctttcgcattcctccgcacggcctagggaacacatctggccgacctccaggaccgctgcacaggcacaaccgccctgtcgcgaaacagccgcagcctcttcat

SEQ ID NO: 493074 - DNA, 308 bp, Homo sapiens
gacctaatcccatatgtctctttacactatatagctagtctgcactttggggggtcaaactaaacaaagttactgcccagaccaatgttcgtcgtttctcctatgttttcttctagtagtttttacagattctggtattacaattaagtctttaatccatcttgagtagatttttgtgtatgttgtaagatgagtccactttcatttttctgcatgcatatctctagctttcccaacaccatttattgaagaggctatattattctttttatgtgtagtacacacctttgttaaaaatcaattgactg

SEQ ID NO: 493075 - DNA, 863 bp, Homo sapiens
gaaaccgcggttgccggagcccgaactgaggcggcggcgggagcccggttggcgtctggtcttcgcgtcggccccgctggagccagactgctgcccccggcgctggggagaagatggtgcctagctggcctcgggcccgaccacgcgccgacacgagtgagcccagcgcgaccgcggggcgtccgccgagcagctgggcccggctgggcccggggcgcgcagctgcccgccggggcggggtggagctgatcagacataatgttcagcatcaaccccctggagaaccttgaaggtgtacatcaggcagtcgtgctcccctgggtggtcttcatgatcaggcgtaagcgccattggcatagctttcctgaccctgggctacttcttcaaaaatcacggagattaaatccccagaaatggcagagggattggaatcactttctgctacggttcactgattcggccttgtgtgtactcagagcaatgaaaccctcaaagcatctcacaaagcgaaaccagaactcccggacaggtacaagtgaccaagcgggcaggccagagcattccacccagtccccccaggcctggaggactcggggcccggtgaatatctcagtctcaagtcacgcataaccctgggacccactgaaaacccttccggaaggggtaattccccggccaacgcgttcggcccaatccttgtaacatcgaagcaatctaaggggcatcacacttgtgacgttcacaggccagggaaagaccacgaaggaggataacaacataagctttaaccctttcgtagcagcgttggagcctcgaattgactgtcgccgcgtcaactggacactgttgagccagtgtggtaa

SEQ ID NO: 493076 - DNA, 439 bp, Homo sapiens
tcgtctcacataagattgttgtgaaaattaaataagatagatgtatgtcatgtcgccaaacagacatctttatcgcaggagtcagtcgacagaccccatcaaggacaagatagtagctacttggggctttgccggtcatgtgacctccatagcagttgactcaactgcacagtttgaacactgtagccatagactgtgcataaattagtgggtattgttgtgctccaataaaagtttatttatggacatcgacacctttaggtctcatatgagtgctacatgtatcagtgagcacctggtgttctcctgcattacagcttagctttgtctgaccctctcagccccgctccaggcttcacgcatctcctccaccgcctgaaccgcctcccttgatgcatctatacttattctccttatgtattattttttatttttttat

SEQ ID NO: 493077 - DNA, 129 bp, Homo sapiens
ctagcggacccttatatctacgtctcatcacgtggtcattagaagaaatgcatgataagaaccacaactgagatgccatctcacgccagttggaacggctgtcattagaaaggtcaggagacaacagat

SEQ ID NO: 493078 - DNA, 457 bp, Homo sapiens
gcagacgcgtcatgcaatatactcgctgtggcacgtgtctcagtcttgacatcagagagctgcatagaatggtgctatggtggtggattttcgtgtcctctaacactacatgtacagctctaatctctactgctggaggtggggcctaatgggaggtgtttggtgtcatgggggcagatccctcatgaatagatgaatgccttccctgggggatgagaaggtgagtgagttctcactttatttattcccttgagaactggtggttaaaaacagcctggcacctcaccgctctttcctcctctctggccacgtggtctctgcacacactggctcccctttaccttctgccacatgtagaagcagcctaaggccttcaccagggacagatgctcaatgttgaacttggtaaccatcagaaccccaagccaaataaagcttttctctataaattacccag

SEQ ID NO: 493079 - DNA, 144 bp, Homo sapiens
ggcaagtggaggctgcagtgagctgtgatcatgccactgcattccagcctgggcaacagagtgagaccccatctcaagataagtaaggtttgtcagtacctgatggtggttctttccgcagatgtcagtcccaagtcgcgaaga

SEQ ID NO: 493080 - DNA, 127 bp, Homo sapiens
  misc_feature (28)..(28): n is a, c, g, or t
  misc_feature (58)..(58): n is a, c, g, or t
  misc_feature (69)..(69): n is a, c, g, or t
gtgaaaatgcggtgtatcctcacgtacntgtgtactttgtacatatatttaacctttnatacctatgtncgatttttttttgttttgtcctggctttgaggcttgttttgttgtctgtgtctgtctg

SEQ ID NO: 493081 - DNA, 394 bp, Homo sapiens
ttacaaccccacgatcaccgatgaccagcctggggcaacagagagagacctcatctctacaaaaaaggaagaaaaaaggaaaaccagcctggacaacatagggagacccagtctctatcaaaaaaagaaaaaaaaaagatttaattttttaatatagctggacatggtggtatgcgcctgtggtgctagctattcaagaggctgaggtgagatgatcacttgagcccaggagttcgagttgcagtgagctatgttcgtgccactgcattccagcctgggtgacagagcaagaccctgtctctaaaagaacaaaaaaaaaaagagagagaaagaggctagacaagtctctggaggagtttggggcaaaagggagcagagaacactgatggtgtga

SEQ ID NO: 493082 - DNA, 333 bp, Homo sapiens
taatctaatgaaatataatagatcacatacagaatgaagactcagagccaggcacatatatagaaaagaatctgtgactacctaatacatgcaatgagtagcaagtaaatctaacagtcatacatcctggaattatacaaatttgcacagttaacaaattgaagacattcaatcaaatatgtaacattgctgaactgaagaaatattaccagtataaattaggactgacctgctaaatcaaatgcattctacctcttcagattcagatttaaaatgatggtcgtattaccgagctacattaacaaaaaactctgctaaataaaatgcggatcc

SEQ ID NO: 493083 - DNA, 131 bp, Homo sapiens
ctgatcagaggattagctggactcgtaacagaaggtgtttcttgagaccagcttcctctccaagagtgatcattccttcttcaagacagtgaccagccatcggagaatagaaggtgacgagtgcccagcgc

SEQ ID NO: 493084 - DNA, 176 bp, Homo sapiens
ggactgctgcttctctctcgctaagtgtccagaacatccgggccacagcctccaggcgtctcggggcgtctggcttgccataggtgcgacacagctcccgcatcttgagggcggcagggcctcaatctcagcccgcccgtggcggaagtcagccagggccaggccatggtggccca

SEQ ID NO: 493085 - DNA, 408 bp, Homo sapiens
ctagaggatcctctcgcttacaaacctcacagctgcagtgttccaatgctcctctagttcagcctggaatggtgctaattttacttttcgagaaatcctatcagcctgttgattgggtttagtcaaaggcaatctctaggtcttcccgggaggacaggatttttgtttgttctgttttttggagacacgggtcttactattttgctcaggctgggcttgaactcataatcgtcctgcctcagccttcggcatagctgagactaggcgcatgccaacacaccccgccccagcatggctttgaaggcccttctctgctattttgcagtcatcagctgatccaagtccctaattttaaacttcacatttagcctgcaggaggctccttcaatgctaggcctgtgggctcag

SEQ ID NO: 493086 - DNA, 186 bp, Homo sapiens
ttaacggtcaggaagatgtaacaattaaaaatgtctgctacaggccagcgcgtggatggctcacacctgtaactcccagactacttggaaggcgaaggtgggagaattgcttgaaccccaggggaccccaggggcagaggtcgcagtaagccaatatcgtgccactgcactcctccctaagaccct

SEQ ID NO: 493087 - DNA, 157 bp, Homo sapiens
acaggatcctcggagccttacctttacatcaatttgtctactaatccagtcttcatcccttcaaccaaattatacactgaaccatctgaccattgacccatctagctatcaactccatcttaccatatactcaggccccaatcacccttccaaaaat

SEQ ID NO: 493088 - DNA, 775 bp, Homo sapiens
tctcgaactcctgaactcgtgatcgccgctcggcgtcccaggtgctgggattgcgggcgtgagccaccgcgctgggcctagatcaaatctttatccatgctcattggaacacaggattactgggttgaaatcattctagtttgtcatattagatacttgtaagatgaatctattttagcacaaggtataaataactacgggaggtcggatctctatctgctatccttttgtgcattgggcgtataccacgtctaggtactaaaacagctttgcttatgtggccaggggaaaacatggcattctgtgcgcaaagtcctacatgatcgtcaggacctgtcttggtccctcccttgtttatggtcattgtaagatgcccgcatgttaatggcttaagctgtcactggagctgggtgtaatacccgcttcattcctcctcccatcgctcttacccgaaacatgaagtgggcactgtgactctattgagatctcgataagatcatcatttgacacttgtagttccaacgtggagcggaggtaaaccagtgatatcgtgatgtgctggctggattgacgaagctcaagcatcgaattctaaaatcgctgtccgaaaatatgccctattatttttgtcccaactctggctaagtgtaaagcttctgaagccagttttatagtttgatacattgtggtgaaggatgtactcgctgttctattgaaatgaacctacagttagtaggtgtcaccatcagggttagaacattctgactagaaattc

SEQ ID NO: 493089 - DNA, 130 bp, Homo sapiens
tcgggatcatgaagaacttggctgtcagtgtctgaggaggtaggatcgtcgtagaaggatctgggactgccagtatctgagagtgacgcctgcatgaggatctgtgtctgtcagacctgagcaagccagt

SEQ ID NO: 493090 - DNA, 219 bp, Homo sapiens
catttactcttgacaaataaaacatatatttactaaaatgtgtttaattttcctttctgaaaactctcattttaaaaacgttcatttaattatgtatttgaattattttggagatgaggtattttatgagtattttcagacaatgaaacttattagtctgtgtcagattctgagcaatcatagagtcatctaagttgtaaataaacccttgcatagcac

SEQ ID NO: 493091 - DNA, 676 bp, Homo sapiens
ccgggatagtagagtagagagagcgagtagagtagagtagagtagagtagtagtagtagtagggggggactcggctatggtaagtaagtacggtgactaaccccgctacccctacaccccataccccataccaccggcgacgccgcagagggcagtaccgctagggccgcaggaaatagcccgaaaactgaagacatacgcaggaggagagcgacgctagagccacaatcgggctactatacgataaatagcaactaggcaagggaagcacgtaaggggaccacatacaatagacagcctattacaacagtatagcagggactacacgtacccataacactaccacaggagcagaaggccatacccggtgcccaatatacctaagaacaaaaggcgcgagcagaaaataaataataccccagctaactaaatagactgcacaatggggaagacacaagctctaacaacaatccaacccaagtcgaacgcattaattataggaaccgcaacccttacgacgatggccggtacacgcacataggccaccctatactagggcatgccaatgcagaaacgttaccagttaggccactagggcaggaaactgggccgcacgggtcacctaaatgtaggcgcccaaaactagtggaggaccccaaaacttaacacccatacc

SEQ ID NO: 493092 - DNA, 847 bp, Homo sapiens
  misc_feature (847)..(847): n is a, c, g, or t
ggcggcgcgaggcgagccgggcgcggcggcagcagggacgacccaggctggagctgaggccgagctgagggcgcccgagccccccgccccggccgtcctctggctccgagcgctcagccccgggcctgcggagacatgaacgccccgggcccacgcacccgggcgcatgcggcccgtgccccgtggtgccccgtgatgaggctcctgcgtgtcgcgagctgccacctgaaatgagcgattggtgtacaaactgatatgaggtgaaccttccagcaggtaatgccatgttaggggaatggagcgagaggagcggatggaggatcgccatgccaggcaagttggggtggtcctcaagagccttggcctccagcatggtcctgcaggggtactccggaggacctgttcacgaagtgcccacaagaactgccccatgcccccaaggatgcggaccaccgttgaactcagatcttgctctcgcggccgcatctccgcaacgatggctcccgagacctgttgtctattggcaatggacaagacagagtggattacgtgttgcggatcccttgtgcacgacgggtgttcccaggacacacaaaccggataaccttgtacccgagctccccggtgtcccagcccctcggaaacttacaagctgtgcagcaacgccttgggctcatcgtctgatcgacattggtgagcgagtgggtgcagaggcattcgactcgaacccactatcacacaatagcgcccagcggggcattggcccatacgggccagatgtgcgccaacctcaatcgatgttggaaagggcttggaagtggccatcaggcacaggcttgggagcctn

SEQ ID NO: 493093 - DNA, 102 bp, Homo sapiens
aaaggcaactgcgcgccgacctcagcgtataacccatgcacctgctcaggactcagcccggcggtttcgtttcggatgacaacatcgccgaccttgggcaaa

SEQ ID NO: 493094 - DNA, 983 bp, Homo sapiens
agcaagaaggaacagaaagaaacttcggagacaaacacggagggacagcacagaaggaactacaagaagaaatgtcaggctgggtctgatgcctcctccagaacccagagtgagaattgctaactttgatgcgagtattaggaacagaagctgttcgagaaccttcacgtagggtagaagcccacgtcatgagctcagatggcgagatgagatcgcgagaaaggcgcgatgaagaggccatcgttctgtccgtatactcacagtagaacagagaaatggtccagaagaattaaaaagcttagagaagacatttcacgagggggtacacatatctgtatatagagttcgaaatttgagcaatccagccaagaaggttcaagacttgaagccaaatgctgggcaactgtacctgacagggcgtggtggtactgcacaaggatgtcaacgtggtagtacgtggaaggggggcccaatggcccagatgacattgaagcgtcttatgctgcatcggataactgtgggatgaacagacatctaacataaagggagatgatgatgaggagtctgatgaggaagctgtgaagaagagcaacaaatgttgtactaagttgggagaggtacacagccaaagacggaagctttggacgagcttgaagttatacaacaggtgttcctagcagagcaacagtggatacaggagacataccagaaacacctggggactcgaagctaactgcgaacccattaagcagctagacggttagaattcttgtcgctcaagacagtccaactggacttgggacgaattaagtgcagaagcccctttggcacatattacttcactctaagactatttggtagtccataaagacaatcataacctgaaaaggaaacatccgaagacgccctcccacagttggaaaggaggtagaactagagacgtgtagccaagggaggaacatgcaggaaagagggggcaatta

SEQ ID NO: 493095 - DNA, 341 bp, Homo sapiens
gaggctgccacgcctccatgggtggtccacacttgcttacggtggtcccaactcgcttggctggcccaacgacgactgtctggttcttaacaaataccagagcctatagaacattgctaaagggatttcagccacaacctgaagctcaccaagaatgagttttctggacctggttaaagtgtcacagaagggagtcaggaaataagaatccccaacaaatataagagaacagaatgatactagtccctactagtccatgacaaggggtgccaacttaggcatttaaagctatcaaagatgatgctggtgaggggacctggccacttttgtaatcgtctgac

SEQ ID NO: 493096 - DNA, 305 bp, Homo sapiens
agtcagctgcttccacattaaaatacttactactccgcagctcaccaccacttgcaagcctttctccaaccggatctgttatacacaccctgagtactctggatagtggaatgcgataattgcgacttgcaatctccccaatacgagtgcatgtgaatacatccctactgccattaaattccgcaattctctcatgtcgagtcaatgtgcgtgaaaatatgccggggggaataatgccacgtaaccaccaatgaaattgtcgcagaattggctacgagggacatctacaaagtctgtgcattcgg

SEQ ID NO: 493097 - DNA, 389 bp, Homo sapiens
ggctcccccctgaaaatctctgatttcaccttctgtcacaggagggacaaaagttactcccatctccaaaaagtaacaggtacttttattataatataaagttaggcccggctcagtggctcactcctataatcccagcactttgggtggctgaaaggcaggcagatcacttgagcccaggagttcaagaccagcctgggcaacataatgagacctgctttccaaaaaaaaaacaggaaaagtatagttgataagtatagatgtcgggcacacaggaagcagtataagtctataatgctgctgtgctatttaattttcccaaacgtccatccttgcagaatttggtgatcagtgaacagagtatctaaacggggacatattgacccaaa

SEQ ID NO: 493098 - DNA, 299 bp, Homo sapiens
cccccccccccaaagggccccccccccgggggaaaaaaaaggtcccccaggggccaaaaaaaaatttttttggggggggggggacccccccccccccatggccccccgggggtttggggggttccccccggggcaaaccgggggccccaagggggggtttcgggggcccgggtttttaccccggggcccccgggggggccgggggggggttttaggggggaccccccccggggggggcccggggggttttccccgaacggggggttttggggtttggttttggccttttaaatttttta

SEQ ID NO: 493099 - DNA, 133 bp, Homo sapiens
  misc_feature (50)..(50): n is a, c, g, or t
catataattatatatatatacattagaaatatggaacataaaaggagaanctctaaagaaatcaaagtgattgctctagcgaagagactggaaagtgagaggaatactgtattttgtaacatataacggtggg

SEQ ID NO: 493100 - DNA, 103 bp, Homo sapiens
atgtctagcatgaaaacaagtttttttatgatcagatggttcactagcaaatgacctcaaataagccagatgaacattgaagaaacggtcaccagttctctgg

SEQ ID NO: 493101 - DNA, 210 bp, Homo sapiens
tctacaccggggacagtattactccagagtttaagcattaagcaatggtgaattgaaaaaaaatggtacaagtgtgtcagcaggaggctgatgagcagttactgtggaaaacccaaatcaagcagggctggactgccatctttggtcagtttccacattctgtaattacggagttggcccaggtcaaagttctattttttcttatttctc

SEQ ID NO: 493102 - DNA, 387 bp, Homo sapiens
aaatgaccatgtctactgttgtcaggtggcagagatatctactctgaagccttgtatgggcctgggtacgttgtggagcctgatgctggaattgaagtctggcgtgctagcagcctgtgccttgttttgatccttggccttgggcttgtgccttggcctttggccggcacagcctgagccgcctggcaatacggacacgagcacgcttcccaagcttggggtgggcaatgtaggccagtcgatcgagcttgcggctgacaccctttgggatcttgggcttaacctccttgggctttacgagggccttgatagcctcggcacgtgcactcatggccttggcattgttggcctgcatcttctttaggccctttttgttgtgcttcttgg

SEQ ID NO: 493103 - DNA, 429 bp, Homo sapiens
  misc_feature (14)..(14): n is a, c, g, or t
  misc_feature (73)..(73): n is a, c, g, or t
  misc_feature (105)..(105): n is a, c, g, or t
  misc_feature (108)..(108): n is a, c, g, or t
  misc_feature (121)..(121): n is a, c, g, or t
  misc_feature (210)..(210): n is a, c, g, or t
gaacgaggaggggncacaaaaacccaaaaatcggtgaatccgggagctgtttgaaccattcaccaaattgatngttgctagcagactataaggagaaagggagangantcaatggacgcantaaaatgataagggggatatcactaccatcccacaaaaatacaaactaccatcggagaatactataaacacctctatgcaaataaactngaaaatctagaataaatggataaattcctggacacatacaccctcccaagactaaaccaggaagaagttgaatctctgaatacaccaataacaggctctgaaattgaggcaataatcaatagcctaccaaccaaaaaagcccaggaccagaaggattctcagccgaattctaccagaggtataaaggggaactggtaccattccttctgaaactattcc

SEQ ID NO: 493104 - DNA, 449 bp, Homo sapiens
agatgttggtgtgtgccctggggttgttgtgggcctcatgggcattgtggggggcactgtttttatcatccaaggcctgggttcagttggtgcttccaaaccccaagggcccttgtgaatcccctcctggaagggaagggggctcgcccttttcaggggcaaaagaatgggcttggtaaaagacccagccctattttttgggccggtttatcaaatcccctttttccccccaaaatttttcctctccccctttttttgggggttaagggggtaaatccccccaggggtcccaaaagcctttacattttttccccggccccccgatttttttttttttttttcaaaaggtacccacccagacaaggctggggggagccccccgggtaccttattcccccggaacccccctttaaaatttccaagggagcaataaattccttttttgggga

SEQ ID NO: 493105 - DNA, 281 bp, Homo sapiens
attgtttcagtcccaaaaaacttttttggggacctctgggtagccccttttactctttgatatttcctatggacaaagcttttattgttgtaaatccctttttaaaggttaaataggattgttaacaactatgggtttgcagttttttgagtaggtgagtttttaaaatgggtaaatcaaaataattagaccacttgttaatttctttaaaactaaaaataaattacttttttatttcaggggcttaggtaatttaaaataaaccttccatttatggtcca

SEQ ID NO: 493106 - DNA, 468 bp, Homo sapiens
gcaaccaatagttgacataagcaaccgacatttacaggaccgtgtgcctacacttgaacacttgcgggtgaacacaagataaaagacaacaacaacaactgcaagggtagaggagacacgtcataaaaaaaagaagaaaaaacaaacggactaaagggggataaaaggcatacaccgatactacgacagtgcacttaaactactagaccgatggggatggggcggttcacagcgagagtaaagaacagaggcagcggggaagtaaggaaatgagtagcgggaccgaccgactactggcaacgggaccgtacattgaacgtcaattaggacaccagctgcgggggggaccacataaggcactaagcacaaacgacatgaaggtgcaaatcaggggtatagtgcactgcgggcgaaaacgagtagggtacactcaacagtgagcaataggactgaacagaacgttgttgc

SEQ ID NO: 493107 - DNA, 825 bp, Homo sapiens
taggttgaatctgtgggttccgactcagagggccagctgtatgtggatttctttttctttggcaactgcatattttaactttctgatgctgatattcagaatttttgacatttaaaaattaccgttgttagtgggaactggagatgtttgaagaatatagaacagaagattattctgttgcatgcagactgagatagcagagtctatcagataccctggttctctgataaaagaagtatcttgatttctggagaactagcagataaccccaccatgccacagagggtcttcatgtcaagttcatggtccgcaacctcagaggagccttgggcgaggtcctcagacctctaacatacacttgctgtgctcttcatttgtttcccacggtgattagtccaaatctctacctctctccccctaccccctacttcatccttatcctttaggcctttccttctcaacagatgatgtcatctcttatttcactgagcaaactgggtatcccaggaggagactccatccacttcctgcccccttgccaaaaatgtatcttgatttttccttcctctttacttcctggctgcctgccttcaaggaagtcaggtccctccctttctccaggattaatttctccagctcattcttgattttgtccctgtctctccagggagcttgcctccatgattagcttcatcctttgttccacttatgacagtgtccgctgtgtcgacttctttcattcagcttataaagatcccaaggcttcccatttaaaaaaattaaaaaaggattttttttttgcccctacaccctccaatttctttc

SEQ ID NO: 493108 - DNA, 786 bp, Homo sapiens
tgcacagaggtaggagaaacaacttgcccttagccgaagagttgacaaaacactggcgtttaattggttggggtcagataagaagaggagtgacaactcaagccaacagctagatgatgactgaagaataccagtttaaataatacatacggatggatgtggcaagttggaatgcctcttaacaaccaaggggtatatttctcaaagagcaatcattggggaattgatttcacagttcgttaccttagtaggtaacgagtaaggttattctctttgttgatattacatgatcgggtgtatcggaaaactgtagcggtagctacaagttgactagtcagaaactgtggctataaggttgggcctggatagtctgcttttgggcaccaatttaaccaattcccacatcaggtcacatttgtgcatcatgcagccctgaggttgggtgggtcatcaattcggtggcagttgattgcagtctggctctgtgacccaggctgcagtcgcatgggcgatgactctgaaaaaactcgtgtcgccccgggggttcatagcgatccatccagtgtgcttcagtccttccctgaagaagtggacataacagggtgccgcggccaccacacgtggggtgtaagttgttgcggttgtatacagtacagacgggcctttcggagcattgtagggcaaagagccagggcatcaccctgaccatcagggggtgtattaggccaccttcggcttcacaaagtcgggggggattacagggcgtgaggccacctttgccaagcc

SEQ ID NO: 493109 - DNA, 144 bp, Homo sapiens
tgatacattcgtgtccagatgattggataaagggtagcttactgtgttgtccgtgccgattcaggcttacaatgagtgaggtctgcgagctaggagatcaataaagttgattggcttagtgggcgggacacgaatgttcagggc

SEQ ID NO: 493110 - DNA, 100 bp, Homo sapiens
  misc_feature (5)..(5): n is a, c, g, or t
ggaantgcttacaccagatactcccaccagagagaaagtatttgcctggaatgtaaacatttcaatcaataagtgacattcggaggtccgaagacagatc

SEQ ID NO: 493111 - DNA, 119 bp, Homo sapiens
  misc_feature (1)..(1): n is a, c, g, or t
ntgtaaggatccagtctcactcactcttctgcagctgtgtttgtaccaaatatttcacctgtttctttttttattttattctatttttttttttgtgtgtggggggaaaaaaaaaggag

SEQ ID NO: 493112 - DNA, 193 bp, Homo sapiens
cgaaaggctttctcatgtctactcacatacctttgctagcatactacacccatatccgcgtgtccgccggtcactctgccctgaatgataaccttcaataggtttacacatgctcattacgtcacccttcaagtatatcttcccggagccgataatcaccatggcttcagattcctccgtgtaacaaacaagc

SEQ ID NO: 493113 - DNA, 109 bp, Homo sapiens
  misc_feature (10)..(10): n is a, c, g, or t
ctgcactggnagctgcctggtgaccagaagtttggagtccgctgacgtcgccgcccatgatggcctccaggctgaccctgctgaccctcctgctgctgctgctggctgg

SEQ ID NO: 493114 - DNA, 179 bp, Homo sapiens
  misc_feature (125)..(125): n is a, c, g, or t
  misc_feature (176)..(176): n is a, c, g, or t
tgagcagtacggaaggtaattgtccaaatatgcacaatggtatgaaccaacaggcatatgcatatccgtgctactgcagcttgcacctatgattggttatccaagtgccaacaggatattcccanataagactttagacagtatatgtaaatgtcgtgtttttcagtaattgctcnttt

SEQ ID NO: 493115 - DNA, 322 bp, Homo sapiens
atcagcaagaaccccaaggacaagaggcttgtgtggttcagccagagcatgacccatggattccagttagagtatggcggccagggctcctaccctgccgatgtggccatacagctgaccttcctgcgcttgatgtccaccgaggccttccagattatgacctaccactgcaagaacagcgaggcctacatggaccagcatactggcaacctcaagaaggccctgctcctccagggctccaacgagatcgagatccgagccgatggcaacagccgtttcacctacaggggaactgtctaaggctgcacgagtcacaccggag

SEQ ID NO: 493116 - DNA, 105 bp, Homo sapiens
aacatgagaaattttgtggcctgataagtcatatttcctcaccctgtgagcttcttcttgggaagtcaacaaagacttttggcagttcctttgggttataaccca

SEQ ID NO: 493117 - DNA, 522 bp, Homo sapiens
tagcgactaccaggagacagtgtctaccaggcaggcatgatcatgaggaggactccgtctcacacaggaaaacagcaataagaagtatgccggctgattagtgtgacaagaataaaacagaatgtccatggaatgtacctgcccggtaaaatgttggatcatttacattcatgtggcagagaatccgacggctattaagagaaagtgaacaaattaagaatttaaaagacaggttcaggcatgtcataagtgaaaacaagaaggcttaatacaaacttgtggggttaggtccgtgtgtgtgtgtgtgtgtgtgtgtataacagagaatatggccagtgctagagttctttctccttctctctctctcttttttttttaaaataactcttggggaaagtgggtaaataagcctgtgccaggtgtacgtgtggtgaaatacccaccactaaagttttaaagtaccatattttctcaatagggccttcttatgtatgaacaagattatgcggggcacttaaaata

SEQ ID NO: 493118 - DNA, 366 bp, Homo sapiens
  misc_feature (45)..(45): n is a, c, g, or t
  misc_feature (66)..(66): n is a, c, g, or t
  misc_feature (107)..(107): n is a, c, g, or t
  misc_feature (360)..(360): n is a, c, g, or t
acaaataatctgggaaatgtgacacctccaaaggaacggaataangcaccagtaaaccaacactanagaaatgaagatctacaaacttcctgaaaaagaatttaaantaattgtcttcaagaagtccagtgagctaaaatagaacacagataggcaattaaatgaaatcaggggaaaaataaacaaaatgataagtttaacaaagagatagaaaccattcaaaaaaaaaaaaaaaaattctggagctgcaaaacacaattacagaactgaaagattcaacagagaacttcaacagcagacttgatcaagcagaaaaaaaaaaatcagcaaactttaagacagatcagttgaaattacccnagtgag

SEQ ID NO: 493119 - DNA, 797 bp, Homo sapiens
  misc_feature (55)..(55): n is a, c, g, or t
  misc_feature (61)..(61): n is a, c, g, or t
  misc_feature (66)..(66): n is a, c, g, or t
  misc_feature (70)..(70): n is a, c, g, or t
  misc_feature (76)..(78): n is a, c, g, or t
  misc_feature (579)..(579): n is a, c, g, or t
cttagttatgacgatccaatagctcttccactgtaaagcatgtagcacagaactnttcaanaggantttncagtannntaacggcagctgctattcaatactcctaagatttcaaagatgatgagctcaaacatggtgcaagaaaatgcaaacgtcacggagaagatcacctgtacaacatactgacgtatctgttaaaagccaaacagagactagaagttatttccttgtttaaaaactgaactgataacctccatctggttacaaggcagaaaacttattttgaggaaattctcaagtcattggaagtagggccacaacagcaacttgcctggagctaaagaaaaagatcaatataggtggcacttctgaatcttgagtaactattaccagcatcctcctgtggatgaagacttctgaggacaagaagatgaagtgacagggtcatagcgtgcacttacaattcctgatgccatactgacaaaaaactgacagattcctacataatggttaatgctcaaaggtgctacttaacactttgctgacactggactccgtgtggaccatccctagggaggntttaacgttctgccagatcgagatgtcacagttgccactttccttcagaccatccacctcctgcgacagttacccgctgaacataccgaaattgacccacatcgcccactttacatcagtactttttgctgagtaggtacactcctttcgaattgcaccgatccgcgtcccacccatcccaaacacgcagtcgtgtacgtataccacctctctctgtt

SEQ ID NO: 493120 - DNA, 474 bp, Homo sapiens
gcttgctctgccagcagtgctgggccggccctgtaaacgtcacctcttgcccccaccagctctctgctctctgaaagctttcttcttgtgcccttaaagtcagcttgccttttgatacaatttggatgtgtgtcccctccaaatctcatgttgaaatgtgactcccaatgttggaggtggagactagtgggaggtgttggatcatgggggcggctcccttgtgaacggcttggtgcccccacttcgtgatgagtgagagctcactctgttagttcactcgggagctggttgtttaaaagagtctggtagccctcctcccctctctcttgctccttctctcaccacatgacacacacgggctctgctttgccttccaccatgagtaggagcttcttgaggcctcaccagaagcaggtgctgccatgcctcctggacagcctgcagaaccatgagccaaataaacctcttttcttt

SEQ ID NO: 493121 - DNA, 379 bp, Homo sapiens
  misc_feature (55)..(55): n is a, c, g, or t
  misc_feature (61)..(61): n is a, c, g, or t
  misc_feature (66)..(66): n is a, c, g, or t
  misc_feature (70)..(70): n is a, c, g, or t
  misc_feature (76)..(78): n is a, c, g, or t
cttagttatgacgatccaatagctcttccactgtaaagcatgtagcacagaactnttcaanaggantttncagtannntaacggcagctgctattcaatactcctaagatttcaaagatgatgagctcaaacatggtgcaagaaaatgcaaacgtcacggagaagatcacctgtacaacatactgacgtatctcatagtctttaaacaattggcgcatgaagaaaagccacccaaatccaaaaaatagtatctgggaggtaatcatgatgctggagtcgatgaggaaactcatggccaagtgtaaggaaggctcctgcctacacttcccactccccgaggccacagcacgctggggccacaggccccctgacacggtct

SEQ ID NO: 493122 - DNA, 172 bp, Homo sapiens
tgagcggtctggtagagcggtctcaactctctagagacttacagcctgcctaaactgaatcaagaagaaatagatcaacttaatagaccaatcattggaaaccaaattgaatatgtcataaaaacactccctacaaataaaagtccaggaccagacggcttcacaagtgaat

SEQ ID NO: 493123 - DNA, 898 bp, Homo sapiens
caggagttgagaccagcctggccagcatggtgaaaccctgtgtctactaaaaatacaaaaaaaagttagctgagtgtggtggtgtgcgcctgtaatcccagctactaaggcaggagaatggcttgaacccaggaggtggaggtcgcagtgagctgagatcgcgccagtgcgctccagcctgggcaacagagtgagactctgtctaaaaaaaaaaaaaaaagaaaagaaaaaaagaaaatttgaagaacaataacttttctacttttgaaataggataatttttcaaaatggtttaacctccgggaaatccagggttattttttataacgggagtggagagataccttttcagaggaaaacaagaggctaattcccaggtaagagctaagtagaattattgttaaccaatttggacaaaaatttcttcatagtggagcaaaaggaactaagtctacataaatctagttttaaatatattagagggcaaatggtctttgataggtatatcctgtataataccctttaatgagatgaatatcccttatattccaaaaaggaaatgtgggtgtcagatatttccagggaaaggtgattgtggagtggggacaaacggttgaaattgttcgttcattgtcttgtgtgcttgtcccaagttgtgagtgtaggcaacaatcgggtggaaggccataatcgtaaaattttgcgctgagaggtgttgagggcctggaaacacaggggttgtgggatgcacgagatataaatgaggaggtgggtgagggttactgaatttgcgtgagtatttaagagctgaaggtacgagtgagatatgtgtggctgtgcattggtatgggagacaaaaatggggtgaagggaattgatgtatgtatatggttttata

SEQ ID NO: 493124 - DNA, 120 bp, Homo sapiens
tggtggacactttaccaggtttaatgatcacctctgctgcatctaccatgtactccactttttcccacaatgagctttacaccttctgcactgggacacatggtcctgcctgtgtcccat

SEQ ID NO: 493125 - DNA, 414 bp, Homo sapiens
cttagttccttctctaaatttcacaaacatgtaaaatgcaaccaggttaagaaacagaactttatctacaaccaactacatcagatgcttgtgtgtccaactccctggcaatcaatacttttgtgctaaacattcccttgtttttccttatacttttagaacctatgtgtgtgcatcccaaactgtataagtttgccttttgaaaactcagcataggccgggcgcggtggctcatgcttgtaatcccagcgctttggaaggccaatgcgagtggatcacttgagcccaggagtctaagaccagcatggccaatgtggtggaaccccatctctactaaaaattagccaggcatggtgttgcatgcctttagtcccagctactgggaggctgaggcaggagaaccaattgaacctg

SEQ ID NO: 493126 - DNA, 341 bp, Homo sapiens
attgcttgagtcaggagttcgagagcagcctgggtaacatggtgaaaccccatctctacaaaaaattttttaaaaagctggggatagtggtgcacgcctgaagtcctagctactctggaggctgaggtgggagaatcgcctgaacccaggaggcggagcttgcaaatgagacgagatcgagccactgcactccatcctgggtgacagactgagaccccttctcaaaaagaaagaaaaacaacaaaatatcactgagctccagccgggacagagtgagaccccttctcaaaaaaaacaaaaacaaaacaacaaaatgccacttgtaactgcagcttgctcag

SEQ ID NO: 493127 - DNA, 282 bp, Homo sapiens
aaaaatggaaagaaaggaaaaaggggtcttttggtttggtccccggccccccggggccaccctttttcccccgccctcccccggggtttttttaaggggggggttttcggaaagccccccccccccttccccgggtggatttgggggaaattacccctgggcccccaaggggttttcgggaatgcccttccttggtttgttttttttttttttaccttggggtcccttttttcctttggggattttttttttccttgttttaaattttttggggccctttta

SEQ ID NO: 493128 - DNA, 394 bp, Homo sapiens
acaacacacttgaggagatacttgaacaatttggattcagccgctaagatgattaatcagcttaactcagtatcaaatcattgaaagtcataatggtacaagctatctctctaacttccaggcccacggctcaggtcaatttgaatacagcatatacagtgtccagtaacacataacattgtatgcatcgacacatggaggaacagtatttcagtgtccttaacactctaaaccccgatcgcatttacagactctgattctacagtgatgattgaattctaaaaatggttatcattagggcttttgatttataaaactttgggtacttatactaaattatggtagttattctgccttccagtttgcttgatatatttgttgatattaagattct

SEQ ID NO: 493129 - DNA, 578 bp, Homo sapiens
  misc_feature (60)..(60): n is a, c, g, or t
  misc_feature (199)..(199): n is a, c, g, or t
  misc_feature (230)..(230): n is a, c, g, or t
  misc_feature (406)..(406): n is a, c, g, or t
gagatggatggaacagaaaataaatctaagatttggatgctgaacggcccattctggggngtgtcccttgaccgtctgcaaagcctggtgccgttgaggaagggggtcccccatgtaccgcgcatcatcgctagagcattggattggcaagctctgaagtcatcctgccagtcccggcggttcaagtggtcattcgaantggcgcggttctcatgctgggaacaagctgngccattgcaaggaagcttcgatgagtcctcccagtcggtgcagcaaacttcagggaagccatgcgcattgtgagcagacggtttttacccaacgaaagcctggaaggaactgtcatcacggagaaatatgggaaagatgccaccaatgtgggggatgaaggcgggtttgctcccanagatcctggagcaataaacgaagggccttggggaaggccttgcgttgaaaagcacctgtggcgtaattcgggggcaaaaggggcttgggacttaacgaacttggatacaggtggtcatcggcatggacgtagctggcctccggagttcttcagagtctggcgaacgtatgga

SEQ ID NO: 493130 - DNA, 365 bp, Homo sapiens
gtcgatctacacgatacccggattctcggtacactgatttccgatccaaaatcattatcttaccttgacttttcacgaatactgaactttctatcattcagaaacatagtggcacagccattgccttgggctccacttaaagggtctgaattttggtcctctggtctcttgccatgtttcccagcccctctagggagaacatatcgtgcagcgtttgacttcctcctgggctttcccgcacgtgcttcaccgtgcatgccctgcgcgtccctcagggcttcaatcctcgattacatttctgagacctccgggtccgcctggaggagaggcccaactgatttgtccctattgcgctctgccttttc

SEQ ID NO: 493131 - DNA, 1224 bp, Homo sapiens
aaacgccgaggaaccctggctgagcgcgggagcagagcatcctggccagaacaagccaacggatgccaagacagagagtggacacactggacaaacaagcagacagaagactgtactggccgctggactccgctgccctcccccatctccccgccatctgcgccctgtgaggatgagcccagacttcagggccatggatgtggagccccgcgccaaaggccgtccttcttggagccctttgtccaccaggtacgtgtggggcacctcatgcgtgctccgctacaatagagacaaacctgtagcaagcccctggtcccaaagggaacatcagtatcctacgagagccatccctgctgaagatgcgcaaaaattcactccccagaacaaaggtgtggtatctgtgcgctttgaaggaagatgaggacaggaaccttgctgtctacaatagcatatccatctgaccaggggacgcactggaactcgcggaccattgtagataactcccagacatgagaagcccagaacgcgtcacgcctcctacacgaggacaaccaaagaaaaaaccatcatgctctcagacacagccgaccacgagcgcgtcacggacctgggcgcgtccagcaccgcacaagagccgaggaccctcgacagagccgtcaagcgacgaagacaagacccagcgcagtggctaaggaacatctgaaggtcatgccacctcaccactgcgagcagaaaagcaacggcggaaatagcgcggtaccgcgacgccacagcaccgccgtacgaaacgcgtgtgggacccgcgcacgcggggcccccccaggcccacgagcgccacacgaggagatgcccgggacgacactgcagaggacaaccggcacaccgcaggtcgcagcctagaggcaccagcggggacagagacggagaagagcgacacgggcaaccgacaagccgccacgagggggtaccgatgcaccgcccagcgcaaaggcggcccccagcgaaaccaaaacaagaggggacgcagacagagagagccagacggagagaacggggccaacacggcccgacgagacgcgccacaaccagcaacacgcgagaccgacaagcagcccgacgccagcaacggaacgaccccaccacagcccacgcggacgacgacgcggaggcacagcaaacagacgcgcaccgcgacgacgccaactcacagaaccccaggcagcc

SEQ ID NO: 493132 - DNA, 107 bp, Homo sapiens
aaccaaaaccaccaccacaccaacaaccaccccaagaaccacgcgtatgtcctatgggcgctgcttctgaccgaagacgagcgcaggagtcgtgagcgaggaagcgg

SEQ ID NO: 493133 - DNA, 103 bp, Homo sapiens
cttaccacaggcacgtacttacctgtagccacgaagtcaccaagccacacgtactaaaggttgaagtcaaagatatgtacagggtataaaacaaataccaagg

SEQ ID NO: 493134 - DNA, 159 bp, Homo sapiens
gcatccgacaactgaatttccatgtcagctggggctctcagccgcccaaggggaggacaacagaggccagctgcggaggaaggctggcaccagccccaaatccaaacccaacctacaggctaatacatgcccctgggacggacccggtcccagcagcac

SEQ ID NO: 493135 - DNA, 197 bp, Homo sapiens
ccataaaagaattgggtgaccacgtgaccaatttgcgcaagttgggggcccccgaatttggtttggcggaatttctttttgaaaagcaccccctgggagacagtgataatgaaagctaacccccgggctattttccccatagccggggggtgatttccctggtcaccaaggcagtgcaggcatgtgggggtttcctt

SEQ ID NO: 493136 - DNA, 210 bp, Homo sapiens
  misc_feature (168)..(169): n is a, c, g, or t
tttcggcacagctttgatcgcagccttgaagaggactcagctaagccctgtccagattcctggcccacagaaactgtgagataatcagtgtaggtggttttaagccactaaatgtgtagtaatttgttatgcagcaatagaaaacacgtggcccggaagtttggggcnnatggagaactatggaaatccagcaaaaggacagtgcaggat

SEQ ID NO: 493137 - DNA, 203 bp, Homo sapiens
  misc_feature (153)..(153): n is a, c, g, or t
cgtcctcaagtgatccgtcatccaattccatctcgttagcatcgtcgtcatcgtcttcatctccctctatcagcttcatcatcctcctgatcatcttccgcagcttcctccgtcctcctcctcttcatcctagactatcatccgtcatcctcngttacttgccactgcgtgtccctcttcctgagatgtgctcactcctcatc

SEQ ID NO: 493138 - DNA, 992 bp, Homo sapiens
  misc_feature (886)..(886): n is a, c, g, or t
  misc_feature (992)..(992): n is a, c, g, or t
agcggagagcggctgcgacacccatgtaggcatgcggacctgtactctgagggagctgcgggggttccgacctgtcgcctggcgctgcatgacctggtagccataggatagccaggaggtaggacaccgctgacgactaggggtttgtgctcatcttgtcgtcagagcttggtcatccagtactccctgtgctcataggaagaagtcccaggctgggttcaatcctccccaggtgtgctgggatttacgttgtgtgaagccgaacactagcctcgagaggaaagatgagattggaatgatagactaagaggatgatcacattaggactacgacctcctcttggcatggagggcaacacaggggagggatgcaataatactcatgagattactgaataggaaacttgagttcaccttaactgaagcagtccatcagatgggctcgggaatacaacctgtgaagtcacagcagtaaggttctcgatccacgtgagtctacaggtcaaaagcctgaggaacgctgctcgagtgtaatactcatgctgggcgagagctgtaacacgctaggaccatcttaggacgagtgtaatcttcgagtatgcgtggtgtgtgcaccagcggatgaggtgtcgagtgtgcgtcaccgttgctagtggcctcgattgaccagtgtctcgaatcgtcccgcaggtgcatcgaggcgcactccctcgccgaccgtcaaaatcctccgcagaaaagtggctcgggggatttgacgcgagaccgttgatgctcacccttgggcgccacaagcaccccagtttccttggctcatccgtttcggcgcaacgggatacgtccatcctagtatcgcgagggccttatgtgccgtttaacgcgaaggntgggggaacgtttgaaagttcgcaccaattcccttgaaagggggccgagaaataaccctaagaattacagttactccgcggaaattgcttcctggccagcaataan

SEQ ID NO: 493139 - DNA, 544 bp, Homo sapiens
gggccgcgggtccgccaccccaagacccgtggaagaaaggccggccccgggtccatccatgaggaaaaaggacgtacacgccgccctgggcgcaacagacattcccccaccacggaacccagcgcgtgggtgcgaaggagaatctcccccattatcgccccacgccctaaaagactctcgcccaccaggatacggccagggtactcgtctacagccatctgatgaaagccgaatatccagaagaggccccagattaagaggtatcttctccatccagactgcccgagtaggagagtagaagaagaaaaagtagagcacccatgtatgttccctgaggtctccacacccttggatccaggagatttattgaaatagaatccctgcaccctaaggaaatgctgaagacttttggacttcgcccgatctgtcccaccttcaggtcactccagcctaccattgggatgaatttccaaaccccccggggacccgtttgaattttttctgtgggggcctgtattattttccataaatctgggacccaccc

SEQ ID NO: 493140 - DNA, 229 bp, Homo sapiens
aaaaaaaaaaaaaagccggaaaaaaaaaaaaaaacccctgaatgcggaagagctcggctcccgtttagccttttggacttaaggaaataaaaaacccccaaagggtttcccctttttttaaaaagtgaagattgctggatactatttattccacttataatttatgttaccccctgatttttgttttttgtcatggcaaagcctttttttaataaagttatgccttcca

SEQ ID NO: 493141 - DNA, 811 bp, Homo sapiens
atctcaatttgaattgtatctcccagaattcccacgtattgtgggagggcaccagagggaggtaattgaatcatgggggccggtctttcccatgctattctcgtggtggtgaataagtctcactagatctgacgggtttatcaggggtttccgcttttgcttcttcctcatttttctcttgccccttgccacgcaagaagtgccttttgcctcccaccataattctgaggcctccccaaccatgtggaactgtaagtccaattaaacctctttttcttcccagtctcaggtatgtctttatcagcagtgtgaaaacggactaatacacatggtaattccatgtttaactttttgaggaacagcccaactgttctccacagtggctgcaccattttacattcctgccagccgctcatgaagcttccaatttttccatatctttgccaagatttattattgtctgtctttttgattgtagcctttctagtgggtgtggagtggtatttcattgtggttttgatttgcatttccctagtaattaacggtattgataatcactttcatgaacttatttgccacttgtatgttttctttggataaatgtcttttccggtcctttgcctattttaaaatggtaccatttgtctttttattgacttatcataatatttatgtattctgggatactaggatccttattatattactttcatctgcaaattatttctctcattctgggttattgtcttttcactttcttgacagtgtcttctaataaccaacagttttaattttcaaacaccccaccact

SEQ ID NO: 493142 - DNA, 344 bp, Homo sapiens
ccaggtccgggtggtgccaaaggcgacaaaacgcctggcggtccgaagccaggtgacggtccgggcctaagtacgcctggcggacaccccaagccgacgcatataggcggcgatgagccccgcgggggccgtcagcaccacccgacctaccagcagcagcatcaccaggggccgtcggccggcgagcccggtggccgcatcgaggagaagatctcggactctgaggggttcaaagccaatttgcctctcttgaggaggcctggagagcttacacacagcgatgtcggctgcatgttgggaatctacctgctgatatcacggaggatgttcggattcggatttat

SEQ ID NO: 493143 - DNA, 297 bp, Homo sapiens
  misc_feature (41)..(41): n is a, c, g, or t
actcggcatgggtcagtatcaggacttatgtgatgcatgantagatctgtcaataaactatcatgaaaccataagaacccctaacaggaggatccaacgtagcctttgttgatcttagtttcttacaattcctcatggaaatacaaggattggctgggcatagtggtgcacgcctgtagtcccgggtacttgggacgctgacgcaggacaattgcttgaactccagaggtggagattgcggtgggccaagatcacgccactgcacgccagcctgggcaacagagcaagactccatct

SEQ ID NO: 493144 - DNA, 884 bp, Homo sapiens
tggtttttaaaattatgttaattaagcatatgtacacttaaaagaaaattggccctctgaacccacccagcaaaaaacatgcacaaccccaaggtatttgtggaagggaggggccccggccccaatttagcagttgggacgatgcaatcctgtgagtcgcaagcacccagtcaggagagagctggcactgaagtgtccagcaggctggattcccctgccgtttggccctaaaataagcgtgcgccatagccaaaggtctgtttaatgccctcaaagtagtacctgttgccagccctgtcgcgtccgctctctcctcaggagcggggatgcctcgaccttccatgccacagctcagtctctccgttcttgtcgactgacggtcacggtgactggtggcaacagtgtccctctggccaagatttaacgcctccatttcttcacagatttgtttctcagggcccagcatcgtaaatcccccagagacgtgccattctaaccttgtggaacttcccacctctgctctgcttctaactgtttgcgcgaagcttggcgtaaagcccttgtaccagcctctgtgggttggttaaccactctatagagctcctctggctgacgtccgaggaggtctccttaagagtgctttacaggtggggtatttgactcccacaggtctgcccggtttcgaaggagcaggttactgggcgcccccagttcggtgcggtgtccccggtttctgaccccttctgtggaaaatgcccggtccctgtcgggcggttatccctgttttcaagttcccttctcttaggcagattgtcggcttgggccatcttctccgttttaacgagtccttttcctcacgcttgctccgtaaccctggccattct

SEQ ID NO: 493145 - DNA, 552 bp, Homo sapiens
  misc_feature (4)..(4): n is a, c, g, or t
  misc_feature (6)..(6): n is a, c, g, or t
  misc_feature (11)..(11): n is a, c, g, or t
  misc_feature (38)..(38): n is a, c, g, or t
  misc_feature (48)..(48): n is a, c, g, or t
  misc_feature (51)..(51): n is a, c, g, or t
  misc_feature (69)..(69): n is a, c, g, or t
  misc_feature (75)..(75): n is a, c, g, or t
  misc_feature (89)..(89): n is a, c, g, or t
  misc_feature (95)..(96): n is a, c, g, or t
  misc_feature (100)..(100): n is a, c, g, or t
  misc_feature (102)..(102): n is a, c, g, or t
  misc_feature (107)..(107): n is a, c, g, or t
  misc_feature (109)..(110): n is a, c, g, or t
  misc_feature (124)..(124): n is a, c, g, or t
  misc_feature (131)..(131): n is a, c, g, or t
  misc_feature (135)..(135): n is a, c, g, or t
  misc_feature (137)..(137): n is a, c, g, or t
  misc_feature (142)..(142): n is a, c, g, or t
  misc_feature (148)..(148): n is a, c, g, or t
  misc_feature (163)..(163): n is a, c, g, or t
  misc_feature (170)..(170): n is a, c, g, or t
  misc_feature (178)..(178): n is a, c, g, or t
  misc_feature (180)..(180): n is a, c, g, or t
  misc_feature (182)..(182): n is a, c, g, or t
  misc_feature (185)..(185): n is a, c, g, or t
  misc_feature (195)..(195): n is a, c, g, or t
  misc_feature (200)..(200): n is a, c, g, or t
  misc_feature (211)..(211): n is a, c, g, or t
  misc_feature (224)..(224): n is a, c, g, or t
  misc_feature (227)..(227): n is a, c, g, or t
  misc_feature (232)..(233): n is a, c, g, or t
  misc_feature (237)..(237): n is a, c, g, or t
  misc_feature (242)..(243): n is a, c, g, or t
  misc_feature (245)..(245): n is a, c, g, or t
  misc_feature (251)..(251): n is a, c, g, or t
  misc_feature (254)..(255): n is a, c, g, or t
  misc_feature (257)..(257): n is a, c, g, or t
  misc_feature (261)..(262): n is a, c, g, or t
  misc_feature (264)..(264): n is a, c, g, or t
  misc_feature (266)..(266): n is a, c, g, or t
  misc_feature (277)..(277): n is a, c, g, or t
  misc_feature (300)..(300): n is a, c, g, or t
  misc_feature (317)..(317): n is a, c, g, or t
  misc_feature (320)..(320): n is a, c, g, or t
  misc_feature (329)..(329): n is a, c, g, or t
  misc_feature (332)..(332): n is a, c, g, or t
  misc_feature (336)..(336): n is a, c, g, or t
  misc_feature (338)..(338): n is a, c, g, or t
  misc_feature (357)..(357): n is a, c, g, or t
  misc_feature (364)..(364): n is a, c, g, or t
  misc_feature (371)..(371): n is a, c, g, or t
  misc_feature (386)..(386): n is a, c, g, or t
  misc_feature (389)..(389): n is a, c, g, or t
  misc_feature (417)..(417): n is a, c, g, or t
  misc_feature (422)..(422): n is a, c, g, or t
  misc_feature (437)..(437): n is a, c, g, or t
  misc_feature (483)..(483): n is a, c, g, or t
  misc_feature (486)..(486): n is a, c, g, or t
  misc_feature (514)..(514): n is a, c, g, or t
tggntnttaangggctgacctttattaactttaatatntcatctgccnggncctgggggaagggacttngatctntgggcattgggggnccttgnngggngnggggngnntcagagtgcccagngttcagngggntnggggngaagtntgggttccacgcctngggggtnttactccngngnganggggacagcngaggnggagagggagngcaggggggtagngcngcggnncccnctggnngnactctnggnntngggnntngngtgggggccgnggcggcaagtggaaggggggggnggggttcaacttgaccncgngcggaaacnggntttngngggggacaaagagcggggngaacttnaaggggnaaagcccgaagagtngcnggggttcgttctccttgggagggccggncagangcaatagggccgggngccccagggctgggctggggggtgccacccccatggggacctcgtnggnaacttctcccaaccgagttaacgggggncagagggcagaggtgggggcagggtagaggtgggggca

SEQ ID NO: 493146 - DNA, 170 bp, Homo sapiens
agccggtatagaggatccctgcgtactgggcgtatgtcttttttcctaaatcacaacaaaactaactaatactaacatctcagacgctcaggaaatagaaaccgtctgagatgttagtattcgttagtattgtggtgagtgtcaggacaagggcatacaggactaggaag

SEQ ID NO: 493147 - DNA, 101 bp, Homo sapiens
agtcggtacctacttttccacagtggtagagaggtatattgttaaattgcgattttggttgtttccccagacattaggctaagctagggagaagagggtct

SEQ ID NO: 493148 - DNA, 699 bp, Homo sapiens
gaaggaacccgagcctgggctgcacgcgtgtccaaccggtttcctgtcgcggagcttctccgggtcccgtattcctcgttcgaacgccctctcgtgcgcccgtcgtgtcccgtgtgtccctccggagacgcctgagccgcccgcgcacacctgaagctggcgggcctatggcgcctgctctcgatcctcagctcgtcctccccgaccccgtcacccggcacttcatgtcttggagcgggccccgtagcagtcgcagcagggcgcggctgtcggcgcgatcgatggaggctctccaggtcgtcccgggatattgctgctgcagttcctggacaggatgttctccaagttcacgctccatcctgcaacaagccggtggaggcgcttggaccttctcttcctttacaagaagatcccgtatatcacgtggaaggcaattacccattagctacatagagacttcagatgataaagccccagtgaccgatacaaatattccatcgcatctggaacagagtgttagatatactggttcaagaagaacaatgaacgggaatctggagagacagggccatgtatggaatatttgcttcatcacaagatcttggaaacattatagtaccttggggaaagctgagtgtaagttcctgattcacaccatgttcttgggcattagtacatgcattaatgtcttacgaataa

SEQ ID NO: 493149 - DNA, 545 bp, Homo sapiens
cttccttatagttaaataaataaaaatattcatcctcttaattttatagccacctctttataaaaaactaacttttttacaatcattctttaaataattttaaaaatctaccaaattctataattacacaaaattatgccaaaccccctttttataaaaactccttttatatatacctacatctccgattcaaatacaatgcccccctctccacataaaaaaacatattctttactaaactcctaaattgaaccacccttgtcctatttctttcatatctataaaacactatcccactcccatttttctgaggcccctttacattttgtttgcctcaaccaccaccaataaactcccttaaatcttacaccaaaataacatctctttaattattaaaaaataaaatattttttattattactttatcgtacttcttcactattataactaacaccctttcatataaatactaaacctctcttaactctcctataaattctcattaactttcgtggcgaaaaatctaaaataaaatttaattatcc

SEQ ID NO: 493150 - DNA, 1030 bp, Homo sapiens
ctggggagcgccagaaggggagagccaccagagatacctgaggaacaaggagttgtccttcttggaggttaagtttgtccacatctccgtttccaagacctttgacagcgtgcccgttgttaaagtctcttgattttcagcagccactgtcaagcagtgagtggctactcagaccaggttgtccatcagcggagatcagctacctcctcgctgcgtcgctgcctgctcactgagctgccatctttttctgtgtgtggccagtccacgagttaccgcagtgccatcggattcttactgcacatgacccgaagtgcagaatatgaaacggcgagtactgacacggacaggagggagtctggcagccaagcagtgtctgttgaatggggcccctgaactggctgcagactggctaaatagacgatcacagttcttcccagagccagctggaggtctgtggcagcatccgacgctcagaactggctggtactacatccaggattccaggacaaggagagcctacatcactgacagatggaacgctgtctgcccttgatgtcctgctgactcggactccagtctcacagggcatacgggtaccctatctactaccagatgcaccacggacgcatcgaccaactggaaggactccatggaaaacaggaagacatacccacctcgcggctggcacgcgcaccactcaccaatccgcgcagaacaacgcccaccaccatggatagccgaagacccacacaaccggcaccgcacactctcggaacaacccagtgccatcccgccaacacccaaccaccgccacggcaccacggggccaccaccagcccccaccgccctcgcaaagcaaaccagcgcgcactacacacacactgggcctgccgcaccgcgaccgcccccccaccgtgaggcaaccaccgcaggccacaagccacaacgcgacaacgcgccaaggggaccacaacaaagcaggcaaacgaagacccccgccaacacacacaaacagaccacgcagactacc

SEQ ID NO: 493151 - DNA, 232 bp, Homo sapiens
gagactggttaaatggctgtgacaagaaatgctgacaaaaaacatggacagtgaaggccaggctgagggggcctcagataaaaataagaagctttctggaaaatgtctctcttttggatatggaaagcttacacaatgcctgtaccatcattgtaccttagacgcagtgaacttgctttttatttcagagacttgtaggcaaaagagaatgtagccttgacccagaaaaaaa

SEQ ID NO: 493152 - DNA, 647 bp, Homo sapiens
aaaaaagaatcccatgaaatacggtgtttcacttttcaagttccaaggaaccatggtgaatatggtttccccttccaagtaacccttgtgaatgtggttatacacctccagcctgggtgacagaacaagactctgtctctaaataaataagtaaattcagtttggaccaatgaagaaggtaatatgtaaatatggaatattgggaaaaattgaccacgttatttggagttaatgttaaggaatcaagggaaacattgaactaattggacttagactcatctctgctatgactatcattctactttagatccctaatgccaggcaaatagtccctccttattaagaataaatgtactggctgggcatggtggttcatacttataatcccagcactttgggaggctgaactgggaggatcacctgaggccaggagtttgagactagccctggcaacatagcaagaccctgtctctacaaaaaaatttttaaaaaattagctgggtatggggtatgcacctatagtcccagctactcaaagactgaagcgagaggatcacttgagcccaggagttcaaggctgcagtgagctatgattgcactaccgcacaccagcctgggtgagggggtgagacctggactcaagggga

SEQ ID NO: 493153 - DNA, 870 bp, Homo sapiens
cttcatcgacaaggtgcggttcctggagtcagcagaacaaggttctggacacctagagtggaccctgctgcagtgagcagtggaccaagactgtgaggcagaacctggagccgtggttcgagcagtacatcaacataccctcaggaggcatgctgtgacagcatcgatgggggaacggtggccgcctggagtcagagctgagaaacatgcaggacctggtggaatgacttcaagaacaagtatgaggatgaaatcaacaagcgtaccactggctgagtaatgagttagtgatggctgaagaaggatgtagatgctgtcatagatgaacaaggtggagctaggaggccaaggttgatgcactgatggatgagattaacttcatgaagatgttctttgatgcggagttgtcccagatgcacgacgtggtgtctgctgagacctcagttggtcctctcgcagtgggacaatgagaccgtgaatctggacctggataggcgatcatcgctgaaggtcgaggcccagtatgacggagattggcaaactggagccgggcatgaagccgtagtcctgggtatctagaccaatgtatgaggagcttgcagtcaagacagctggccggcatggtggatgtacctcacggcaagtaggtcaaggcatgagatctgctgaagattgaaccggatgatccagaaggctgagaagccgagaattgactagtgtcaagaagacgagtggctgcctaatcgtgcagaaacgccattaggggaatgccgagcatgcgtggggaagctaggcctcaaggggattgccagggaaacacgctgggtcgaagctggaggaggcctgaggaaggccaaagcaggaccatgg

SEQ ID NO: 493154 - DNA, 160 bp, Homo sapiens
agctcgccgaacggcagggcgcacggaggaagggctgtgaggtactgggtgcagggaactgagtgtttagcggcatcccccggtagtcgatccaagccccttcctcctcctcctcctcctcttccgccccggaaagttagcgaacctccggcagcggccg

SEQ ID NO: 493155 - DNA, 111 bp, Homo sapiens
tcaccgagaggcgttagtaatggggttggtggggtttgcttctaagccttctcctatttatgggggtttagtattgatgttagcggtgtggtcgggtgtgttattattctg

SEQ ID NO: 493156 - DNA, 794 bp, Homo sapiens
agcgggggaaccggggataggcccgatagcgcgaacgaaactcgggcatgggcatgcccacagtccctgtaagactctcgtgtagtgctcctggctcggcgtactcttgcctcgtgctgacaagacgccagcacgcccagagagcttcagcagctgcacactgcaaggaggcaaaaagcccttcgcaatgctacattactctctgcacagacggccgtgtatgtaggactctactcttgcaactggatgttcccagtttctctatatgtaacctgtgagttctccttcacgttgacatactctcagcgaggagacctcgtgtctgcggtacaacgtgagcaacagcaaacgtcactctcgaaactacgctgaaacacaaaagcgcaggaagggcggaccgggaaggcgcgagaccggcaagagaggggagaagggcccggggaacgacgcatcgggaccaagatgcggggcccgggtgcgagcagctgaacctctcgggccccaggcagtggtgacctgggtggcgacgctcgtggaggccgaggagcttctggaccggcgcttcgggggaccaagtggagaggctgctggagtagtcgctgagtcctcccttagttcttcgcgccggctcgcccacgggtccagggtcccagacgcacttgcagtctccgcagcaccgagcggggctccacgaatcgcgaactccagactccagctcaagggcagggagcgcggctgggtctctggaaagccatttttacatcactggctctgatgcccatgtgaggtcggag

SEQ ID NO: 493157 - DNA, 978 bp, Homo sapiens
  misc_feature (127)..(127): n is a, c, g, or t
gaatgcgtcactaacctcgtactcttagcttgttggggacgtgtaaccgggaaaccggtgtctgatcctgatcggacttcgcgcgtcctaatcgccgtagaccacgtatgcagtgaggtgcgaatcntccactccatccgttgtgtgaccagtgactggatgctccaagagttggcggtcgaaatgccatgcatggagaggcttcatagctgtacttggtaacatcgagcatcactgcgccggtatggaccagggaatgccatatgtgacaataggacccatcggggggcagtgcagaatgatctcactttacaacacacttacttcagatgtagacaggcgcgcgtggacaatgcactgtgaacccctgggacgtgttgattctcgtagagcattgcgaagcaccactagtcactctgagtgtaagcttctgcacgtggacacctgaccgaccaagcgtgcttccacccactgagacagtctgcatcaacaggtcaagagaaggatgtctgccaagtaggagctatgactccgagggacagctagcacacattggccaagggagatcatctgaccttgctgttggaaccagaaattcgcaagctggtctgaccagtgcaccggtcttcagggcgttcgtagagtttaccacagctgtggtgcgcgggaactggttctggggttcaccgtcccgtgctcatggacacgtcctctcagttgattatggccagaagtccaaagctggagtgctccatttacccaagacccagggtttccacaagctagtaggtggaggcacctactgaagtccgattcgctcagcaacaaaagccaagccatgggagcatgcctgattgggtgccttccaggggtagaacgcaaggagggccactctatggaaggtctggtcgagaaacctcgatatcggagcggccaagcttaactaaccttaccggcttattagccgaagggtctcca

SEQ ID NO: 493158 - DNA, 433 bp, Homo sapiens
gtgcagtgagcgagatcgcgccactgcactccagtctggcatagagtgagactctgtcagaaaaaaaaaaaaaaaaaaaatgggggttgtgttctgaccaaccaacatttttattaatttggttcctttttttttccaatttcttttgggtaacatcttttcaaaacaagattccttaaaaagaatcagacagagaaagggagaaagaaaatcgggttcaaagaaattatgctattcagttagaatagctccatttttatgatggtaaaattaattttacatggtggtcctcctttatacaagagatattccaacaacagtttcctcaaaggtagtcccgggttaacccgggacctcttttggagaccaatgtagtccatctgataaataagatgagaagtcctggctgtcctgcatcagggtccaccggtca

SEQ ID NO: 493159 - DNA, 223 bp, Homo sapiens
gactctacaggatccccatttccgatttgtttttcaccaaaatgcgagttgtggtttaaacattcgattcagtacttgatacggctgtggtacatatatctgaaaatggtatatcgcatttacaatttcacattgttagtgatagacgcaacatctaatactgtattaaatggtcaagtcacactatcccattctaggcgatgttatattagttccacgacaa

SEQ ID NO: 493160 - DNA, 404 bp, Homo sapiens
  misc_feature (101)..(101): n is a, c, g, or t
  misc_feature (172)..(172): n is a, c, g, or t
taagaatatggcaaaatataccttgccccgggccttaataaaggggaacaacaaagcctaagatgaccagcaccacctgttaatgggcatggatttaattngaatattttgaggcccactggtgagaccctcttgcctcacaaaaaaagatttccttttaaaatatcactgnccattgacaatgaaccctagacacctgagagctctgatggaaatgtacaaggagattaatgttttcatacctgccaacacagcatctgttctgcagcctgtggatcaagaagtcatttcaacttatgagtcttattatttaagaaatatatttagttatttagtaaagctatagctgacatactttcttgagatggaatctactcctggtgaagatgctgtgaacatttgaa

SEQ ID NO: 493161 - DNA, 187 bp, Homo sapiens
caaaggacgagatgaccgcatagaaaagcgagaagagatccgagaagataggaattcaagagatggacatgatgaaagataatcaaagaagcgctatagaaatgaagggagttccagccctagacagtccccgaagcgtcggcgtgaacattctgcggacagtgatgcctacaacagtggagatgat

SEQ ID NO: 493162 - DNA, 693 bp, Homo sapiens
ggcactgcagagcaaccactttgaactgatgcctgcgcactgagtgccacgcaggggctggtgctctgtgagtggcaatggccactggagcgggcagactatgtggcactggccattgtggacgggcacctgcaactgagctacaacctggtgctcccagcccgtggtgcttgcgttccacctgtgcccgtcaacaccaacctgctggttgcgtggtctgtggcacatatgtggatgcatgatgggaaggttccctgcaggtgggcaatgatgtgcccctgtgacctggctcctccccgctgggctgccacgcagtctggacactgatggagccctgtggcttggggggcctgcctggagcttgccctgtgggcccagcatcttgccaatggcctacggcacagggcttttgtgggctgcttgcggggacgtggtgggtggggcgggcacccgctgcacctgctggaggacgccgtcagcaagccaagagcttgcgggcctgcccaaccccatgagcttggcaaccagtaggccccgtgcccgcgtgtaatcttatccccgtatctgtgtacaacttgtcggcttttctgatctgagtttccttgccgtgagtgtcggccgggaggcacttcttggcctggcttccttccgtccaggcagccgtgcttgagacagacctattgctgcgggatg

SEQ ID NO: 493163 - DNA, 340 bp, Homo sapiens
aaccaatagtctcaaagtaaaacaccacacatcacaaaggatacgtctgcatctttctacttactatttctaaacacttgtggagcatcagcagtttgctcagttgatttatctttttgcctttgctgtcacatcataaccagctttacatccatttagaatctgcacaattaagagagctgattagcataggcaatgctgcaactccatatgtcatatcgttttctgacaatgagggctatatgacagcaccattgtggaactagtggatgagttgctcatccctatgctgcaggagcagtggcatagcacattggagtccttggctgaggattccctt

SEQ ID NO: 493164 - DNA, 772 bp, Homo sapiens
gtcaccctattagttttttccttgcagcatttcacttgcttcttgcttttttaaaacaaaaatttatgcactaccctccctgcatccatgttcctgctgcctcatattcattcattcttcagtctggtggcaatcagcattcagtttctctccataaaactgttattagacatccaaaacagaaaaaaatgaatactaagaaatacaaaactactgttgttcggccgcacgcacggggcccctcagaaaaaagctattgtggtacgagcaatgtaggttgggcggccgcgcgcgggcccccttaaaggactactggaggacacagtgggtcaatccctggtgtgtccccaagaaggagaaaaaccggcggactccaagcaatagacggtgcatgagtctttgcccgcacccaagcgaaaaagaatactcgccccggaggggcgaaaacccaggacggcggtcgctcgagcacgcgaattccccagcgaaggcacagactcccagagcggcgccaacacaggggtgactaccctaaacacccagtggggggatctcgcacaagagagcagacccacagggaccctcaaagagagtgataaaacaccccgtaggcgcgtcggggcggataccagcggaaaggcatcgaaacgtgacaggaactccatgggcggacaccaagagtgtgggtagggaagaacccaagggaaaagacagggaggcaagacggacacaccgtgcgcacaggagaaaacctagagacaagatcaaagtg

SEQ ID NO: 493165 - DNA, 533 bp, Homo sapiens
catgcgtagtcgatctaaggatccccctcaggatacctcaacctccagttgggttaccttctgctccatataagtagtctgtgttatctcctcatagtccttctctcatgcgtacagtcaagttatctctcttctgcttgagatagggtactcgttgtcgaagttcttctgttccaagtactgataagtttgctattggtcctgtcaatgctcgcatgctctaatccaggcatatctcctggcctatgtagtgggagggaggaagtttcagacctctgcactttacttgccgacggttctatggactgagtagcataatgcattttagcttctgagggtgggtgtagcaatgatgttcaccatcgccttgggaatcatgcattatagcagcattcagtgaaatggcactgtgtggtcttctgtgtgagcgctctgatagctgtggaggcctcttccttgcttcttcctggtcatattcctcttgggatatcctaggaaataccctcaggatgacatctcttcgagttcaggtc

SEQ ID NO: 493166 - DNA, 934 bp, Homo sapiens
  misc_feature (383)..(383): n is a, c, g, or t
ttttggctggtcagcggcagtcgtaggtgcctagcaccgttggacgctcgccggtcgacatcctggagtggcatggaagagtccaggttctgtgggacagctgagagtagcagtggctggtgtacttgaaaactaaactattaaccgaacacggtataatgcatatgtttgctgaacctcatcttacgacacacgacgagataaattggacctagattgtggcattatgcttaaacatgaggacctatgcaacctgcgtttgccctatacatccgccagtgatcctgggcctctgtggaaggttgaacaacggcgtggttctaagactccctagagatgccatttgtcgattcgtgcacggattcactcatggtcctcggatnggactagtccttccatgtgagcttgggttgtcgacgctacccaggagtattatcgcgtctccgtaaatcacgctgtgagcgcttggcttggaaacctcgttacttgtggactcctctctttttgtgtacctcttctctgatgaacttcacgaatggctttcctacgcctttgcgcttgggggaagcaccactgagcggctctcttgaagttatgttcccacgcctgtcatacttcggagacctgtgtagtgcaatccagtacaggatcaatgcccttggttctcgatatacaatcttgtgcgcttgagtagttcctaagcacaagaaacactttactacaaagatgaaagaacagtgacgttgtgtagatcggccacacatagtgtgcaatgcaaattttccaggggtagatggaatggcgacccctggttgtggaagcaaacgaaaatttaacacaggttgcaagacaaatctcttacctcgtgtgaaagttgccaaggaggtaagaagtgtggcgaatacaaagcattggttcaaggaatttgctggca

SEQ ID NO: 493167 - DNA, 282 bp, Homo sapiens
  misc_feature (25)..(25): n is a, c, g, or t
  misc_feature (52)..(53): n is a, c, g, or t
  misc_feature (100)..(100): n is a, c, g, or t
  misc_feature (211)..(211): n is a, c, g, or t
  misc_feature (214)..(214): n is a, c, g, or t
  misc_feature (222)..(222): n is a, c, g, or t
  misc_feature (267)..(267): n is a, c, g, or t
caataactatattaccatacaatanaaatactccatgaatagtttcccaagnnctggagcgaccacatagggaggaaatgtaaatgtctcaatttttgtncacaaaagtatattttatcaaattgctgtaagctgtggatagcttaaaaggaaaaaagtttcctgaaatctgggaaacaagacatttaaagaatcagcaaaatttcaaatnaanaattatgnaaatattatcctcactagttcatttagtcccatgaaattaattantttctctgcttgatc

SEQ ID NO: 493168 - DNA, 142 bp, Homo sapiens
aggacagagcacgcgacagaacccaaacaaatacatcccttatggcagaccatggcaatagagaaggagaggctggaatgacacttacttacgacccaactacagtctgctatacagaacggcttttatccttcaccatact

SEQ ID NO: 493169 - DNA, 182 bp, Homo sapiens
agctcggccctatttacgcctaggagaagataacacgtctttattttgacacagatgccaggatttccctctaaagggtttaccagatcatattctcatgaattgtatatgaatacattggatactatcaatttcagtcttaaattatttcctactgttgttatcatttgcatgcgttcctc

SEQ ID NO: 493170 - DNA, 551 bp, Homo sapiens
gacgctctctctgtgggtacagcgagaggacgagcagaagcagggtggggcatcacctcacccgggaagcacaaggggtcggggaactccctcccctagccaaaggaagtcataagtggactgtgccatgacggaacagtgcattccagcccagataccatgcttttcccatggtcttcacaacctgcagtccaggagattccctcgggtgcctacaccaccagggccctgggtttcaagcacaaaacgggggggccatatgggcagacaccaagctagctgcaggagcttttttccatatcccagtggcacctggaatgccagcaagacagaaccgttcactctcctggaaagggggctgaagcaagggagccaagtggtctagctcagtggatcccacccccatggagccgttcaagctaagatccactggcttgaaattctcgcttgcagcacagcagcctgaagtctgaccggggacgcttcagcttggcatcttgcattactgaggcttgcataggtggttttccccccacagagagagcgcgggt

SEQ ID NO: 493171 - DNA, 466 bp, Homo sapiens
  misc_feature (15)..(15): n is a, c, g, or t
ccctaggaaggaatnccttcaaaaccctttaaggccttggggtaatttaataaattctggaggaaaacctttggggaatagtgagtaaaaagtaaattcagatgatgaattctgattgaaggcccggaaactggagaaataagacttccatttaagggatggacatcagtccacatgaacttgtacagaagggatgttttgaggctgggtgtggtggcttatacctgtaattccaacactttggaaagccaaggcaggaggattgcttgagcctaggagtttgagaccagcctgggcaacataatgagacgtcgtctctacaaaaaaaatttaaaaattagcattggtggtgtgcccttgtagcccagctacttgggaggctgaggtgggagtatcacttgagcccaggaggtcgaggctgtttgtgctactgtactccagcctaggcaacagagcaagaccctaa

SEQ ID NO: 493172 - DNA, 1218 bp, Homo sapiens
tttccaccttgttcttaaggtcccctgtttatatttcttctatgtgggttaccttgtcacacgtccagtagttgggggagactaatgctgctcgtgttcctcatgtccccagatgtctgtcccgtcgctttccgtgagtgtgtgggtgtcacactggtccgacacgaggatttgttgccgcgctggtcctcggtgggacacctgcgagtgtagagaggtggttttttgtcgccttttataagggggtagagcaatgacgttgttcctggcttgcattttgatttttccccaacagtgtgaacattgtcgcaacgggacgctgttgatatttttgttacgccaaagccagaccaatggggcaccactcgggggggggacacaattcgtcactctctaatattggggaaataaagaggtttcgaatgatgtgtgagaaccttgtgtgtttcctccctagcagctagtcggggggacccccgggtgttaatatattcccactgtggactcacatcactttctgtgcccccccacaacacacccccactggggctgtctgcacctgtgttttctctcgagcacttgtgccacaagaacacggattgggctttgggagttgcgcacaacccactttgttgtgtgttttggaagagggtgcacccgcggaaggcctatagaattttctttggccggcacaatttttgaaggggcccacgggcacactcaaaggatccggtaaagctccaaagcacgaataggtgggattctttctcccgccttctttggggaattaacgttgtggaaggtcggcaccttttcttctgctgttctccccttcccctgtttggaacccgtgcaatattcccggaaaggaatctttccacagcctcacagaaggagaggcacagcacccgagagggtgtccctgtttgaaccacacgccgcacatttgggaataatgtgcccttcctcacagggtcttgcttggaacacgctccttttcacaggcaccagccctggaactaatttccacggcaccacagctgtgggccccaggaagcccagctcacaggtgctccccctccacaccacatgggcacaggctgtgccaaaaagccacctggcttttttcagcactttgctgtctggcggcctctcactgggactacccctgtggcttttacgggttttttttgcgttaaagttaaccctaggtttctt

SEQ ID NO: 493173 - DNA, 379 bp, Homo sapiens
  misc_feature (179)..(180): n is a, c, g, or t
  misc_feature (233)..(233): n is a, c, g, or t
  misc_feature (379)..(379): n is a, c, g, or t
cggttctcagcgtgaatgatgcaggagtcctgagggtacggtactatacccatgcactggcagctacctcatctcatcaagtacggcgtgccctaccacattgtgtggcagccctcttcaaggccaaagtcacaggcccccgtctcgtcagcaaccacatgcctccacgacgacatcanntcagtgttctgtagactctctgaccaaggccaccttgtgccccccatgcatgnggccccgggtccctgtgcctgctgacgccagctaggtggtggccaagggcctggggctgagcaaggcctacgtaggccagaagagcagcttcacagtagactgcagcaaagcaggcaacaacatgctgctggagggggccgcgcgn

SEQ ID NO: 493174 - DNA, 711 bp, Homo sapiens
  misc_feature (671)..(671): n is a, c, g, or t
acatagacattatggtaatgataaacgttatatcaacgtaatgtatataacatccagagtcataagtgaacgtaggttacaacagatggaagttgtcagtgtatagttgatcatatgtatgttgtggacaaacagaattttgagaaaagcttaaggtcaggcagtgctagagagtttctgtatggcaggcaagaattcttccttttgaacaagaccgaaaaacctcaggacaaagagaaagtatatcttttaaaaactgatttcatagtaatgtttctacatattttgaagcacctttatgtatttagagcatatcaaattaattcatttctttccctgttaataaaaaaggtacattcacagaatcagtgtacttagaataaaaaataaacagaggaaataagaactaactcgagttaataacaacatctttaaggacaagtttggtcatttaaaaactaagtctagtatagttttgctagtttttaattactcctttcatacttaatatttcaaatatagctgcttcagcaggacagcttttcagtatcacagtaagtacagcccaatacaggatcatccaaaaacacgttgacacttccaagacactggcacggggtccacggagttttgcgcgtaaaatttaaaaaaccttctacggtgatgtttangcccggagcatcattctcacctgtatcatccggatcctcg

SEQ ID NO: 493175 - DNA, 436 bp, Homo sapiens
ggtactgcgctagcggcattagtgaacggattcggcgttaccatgagcgtggtggaggtcacagatgcggctcagatctggcgttgctgtggttgtggtgtaggctgacagctgtagctctgattcaatccctagcctgggaacttccatatacaatgggtgtgcacctccccccgcaccccccgccgaaaaaaaagatggggtagagggagacagtgagatgtggggtgaatccagggcctatggtgaacatgcattctgaactccagggcaggaaagggaccctggggtctcaggccgcccaccatgccctcctcagttgggtcttgggaacattccatgtagaaaaagggtcatgtgtctcatgtgaactccatgctcttgggatcacaccccatactctgcgagtaccctcgttcacttaatgccgctagcg

SEQ ID NO: 493176 - DNA, 476 bp, Homo sapiens
cgttcttcctcccccttcgtaggagctggagctatttctgagctacgtagtgcgtgagagaaatgcagagcaaagcggcagtccccggacaggcatgggctctgaccaggaggacagcaagcccatacacgctgagacacgacctgaattccagtgagagctttgtcacctcctggcgtgtacatgtgtcactagagctcatccaagtgtccctggacaccctgaggtgactaggaacagtgacccaacttactccctgggggaagctgcaggggcaccttgggcatacgacactgaaccacagccaagcacatggcctcagcaagaacgctgcccagacacctcctaccagagggagcaagctggcataaactcgggcatcgatggagtgcaagactgttggacacgagcccttggcggcgatatactacacttctgcacagctcgccacacgagtagcagcccgcaacttggac

SEQ ID NO: 493177 - DNA, 136 bp, Homo sapiens
cgaccgttacgctgaagaaacaggcaggaactgcttcgctcttgggtactcccagatatatctgcaacacggtggataggcacttccttctagctatgcaatccctatgccattcttaactagctctggtcctctg

SEQ ID NO: 493178 - DNA, 279 bp, Homo sapiens
tttttttagacacagggtctcactcttgctcaggctgagggtagtgatacaatcatggcttcctgcagcctcgaatttctgggctgaaacaatcttcctgccttagcctcctgagtagctgggactacagacctaccccaccaagcccagctaatttttaaaactttttgttgagatgggggtctcactctctcacccaggctggagtgcagagacacaatcatagctcactgcagtcttgaagtcctgagctcaagcgatcctcctgccgtcgacgcg

SEQ ID NO: 493179 - DNA, 663 bp, Homo sapiens
  misc_feature (107)..(107): n is a, c, g, or t
  misc_feature (114)..(114): n is a, c, g, or t
  misc_feature (118)..(118): n is a, c, g, or t
  misc_feature (125)..(126): n is a, c, g, or t
  misc_feature (135)..(135): n is a, c, g, or t
  misc_feature (143)..(143): n is a, c, g, or t
tcaagcaaaatgggctagctcggaagctgccgaggggcggaggagttgccgaagcaagtccggaagctaccgagcgagtccggaagatgccgaaagggagcagcggngaagagnaggnggatacnncgcaagacncgggagangggatccaaaaacgtgtgatacaggaaggccgaggagagctcccggactttcaagatgggaccaaggccacgttccactaccgggacgctgcacagtgacgacggagggcaccgtgctggactgacgagccgggctcgtggcaagctccatggatgctcatcgacttggcaagaagtgtcaacgcgtgccgtgtgtgggagaccatcgtgtgcaccatgcgagaacggggagattgcccagattcctctgtgacatcaaagtcagtgtggtcctgtacccgattggtggtcaagagtctccgtaagatcgcggtgggcaaggaccccctggagggccagcggacttgctgtcggtgttgcacagatgcggtgaacacgagctccctgggccatgctagacctggacgccctgcagcagaagccccagaacccatcatctatccacatggagatgctgaaggtggagagccctggcatcgtacgcatcaggacccatgggccattgacagacgaaggagaa

SEQ ID NO: 493180 - DNA, 274 bp, Homo sapiens
  misc_feature (53)..(53): n is a, c, g, or t
  misc_feature (255)..(256): n is a, c, g, or t
ctggtacttctcttcatctctccttagacattaacactatctcaccagaaccntcctaggcgacccagacaatataccctgccaacccttaaaaccctccccaatcaagcccgaagattttccatcgctaaaattctccgatccgtccctaacaagctaggaggcgtcctgcctattactattcccaattcctcatcctagcaataatccccctcctccatatatcgaaacaacaagagcataactatttcggcnnccactaaaggccaatcac

SEQ ID NO: 493181 - DNA, 172 bp, Homo sapiens
ggactcttacatactcaattcccatcctataaagcactcatacttaatgcatcccgcagctacacacacacaacacacagcacacgcattaacacagcacacacacgagcacaggagatacacaaacgcacagcatacacagcacacagatgagcacccgtcgtgcgaatcg

SEQ ID NO: 493182 - DNA, 167 bp, Homo sapiens
attcatcagcggcatgatgtgcgtgatactgaggaagctcaaatagagttccggagctgggttgattgtgttccagtacagaatccacattcagatatgccattttgtatttaatcattattttttgagttttttgtggcaaagagtattgtttcctttaaaagcca

SEQ ID NO: 493183 - DNA, 287 bp, Homo sapiens
gcattacaagccgcagcagtccccattttcaaatcagaggcatagtctgatgtgtttatggtaaactgccatctggcttgggtctatctgttttcctttctttgctgaataggacggggggactctgaagagtcgaggtcttcacagtgtggtttatttctcaagtgtgaatattgcacaccttcatggcttgaaccattacaaatgtaactatgctggcaccagacttcataactgtcgacttagttatgtcatcattaaaaagttagaggcgttgtaatcccaga

SEQ ID NO: 493184 - DNA, 559 bp, Homo sapiens
  misc_feature (296)..(297): n is a, c, g, or t
  misc_feature (328)..(329): n is a, c, g, or t
  misc_feature (363)..(364): n is a, c, g, or t
  misc_feature (366)..(366): n is a, c, g, or t
  misc_feature (383)..(383): n is a, c, g, or t
  misc_feature (396)..(396): n is a, c, g, or t
cgagctcggcaccctgattgctttataccctctgaacactgctttagcgatgtcccagaaattctggcatgatgtgtctttattctcattgggttcatagaacttattgatttctgccttaattttattggctacccagtagtcattcaggagcaggtagttcagtttccatgaagttgtgcagttttaagtgagcttcttaatcctgaattctaatttgattgcactgtggtctgagagagtacttgatattatttcagttttcttaaatttattgaggctcgttttgtggcctnncatatggtctatcttggagaaagttccatgnnctgttgaatagaatgtatattctgcagttgttgnntngaatgttctgtataatntgttaagtccatntgttccagggtatagtttaaatccattgtttctttgttgactttctgtctcattggcctgtctagtgctgtcagttacatattgaagtcccccactattattgtgttactgtctatctcatttcttaggtctattagtgatggttttataaatttgggagctc

SEQ ID NO: 493185 - DNA, 459 bp, Homo sapiens
ggccgctcgcgcagcgcctcgcgcacactgcggactgcgggcgtgcacataatccgcgagcaagacgaggccggcccggtggagatcagcgcctgagccgcctcgggatcccctgagaggcgcccgcggtctgcggccagtggcccgggggaaagctggggctgggaagcccgggcgcggcgcgctggggacgaggggaggtcccgggggggcgctggtgtctcgggtgtgaacgtgtatgagcatgcgcagacggaggcgggtgcgcggaggcggcagtgttgatatggtgaaaccgggtcgcatttgcttccggtttactggctgtgtcctcacttggtataggttgtgccctcttaggaccacatagattattacatttctggcccaatacccaaaagggttttatggaaactaacatcagtaacctaacccccgtgactatcctgtgctcaacca

SEQ ID NO: 493186 - DNA, 546 bp, Homo sapiens
  misc_feature (23)..(23): n is a, c, g, or t
ctagcggtggcataaagcggtcncgtttagaactacgggacacccggcttagtgcccgaacaaggaagtcccttaacattcgggcttacgacttgtggaagtagcactgtcctgcctattcctcttcagcacgtggctaatgcgcattacagcgagcgtactattgtgcgttcaggctgggtttttcatgtcaaggcgttgtggaacggcgctcattgatattacgtcagctggcgaaataggaatgttatgcaatcgcattaaggtgggtgtcagcatggttcttctagaccggccgctgtatactgctgtccggtggattgaatttagctgacggtatatgaaaaatgtccggtagcatgtccgggccagttagcttggttcctccagagcgtccggggtcttatagtacctgtctcagacagtgaaactgaaagggcagggtgggccttggtgggtatttggagcggagtggtggtatgccctcttgtccctcttggtcttttggatcgtttagtttccgtatcaaatgagtaggatgggcgc

SEQ ID NO: 493187 - DNA, 620 bp, Homo sapiens
gcttcccgtgcctcatacgcgagcatctcctctactggttgccgtccgtagcgaacagacatccatggcgcatgtagacacctattaaaatatcaggacaagtctgaaacaaagtagtaaaatgtatataactcttacctgtagtcattcttttacttttaaatttgttgctaatctctgataatgaagatacttactctgatactacagctgagctgtgagggcttccagggaaaatggaaacaaaatggtgtacttaggtaatgggtagtagatactgagtcttcctttcctttactgacccttctcgaggacatttgcttaactcaaactataagtagtactctctttacatattactataatggaaatgaattgctctgtgctgaaatttgaagaccagataatgaaactgaaaagcaaacaaatttactgcatctgtctacccttcattcatgagaactccagaatgagtgttgaccactgaagcatctattaagtctgtgtaccatagtgccatacaggtttgctgtctcatatgcatcatctgagatcattgaaatttttgacaataaaatatctggattgatcctgaaggaactagtagatcggtttagggt

SEQ ID NO: 493188 - DNA, 640 bp, Homo sapiens
atctaagctactaatatagtattagcccatagtaagtgcttagtgcaatgtagttactgtagtatcatttagtattattatctcagtgttgtttcttaactactgtatcctcagtgctgtcacagtgcctagcatctacttgggttcaataaatattcgttgaataagatgtattcatctggcctttaaaatcctggcgattagtaagatcataatgttgcatacagcatatggtgcttactaactaagaagaagattccctgataaatagaatgcatcttgccttgatagaataagtaataggaggctcctactgctgtaggagcagtgtgatcacagatatcaggatagtacagcaatgtgcgaaagctgggtgaccttgaggagagtgcttaaggagcctctctcagcgtagggtagttctagttcacttcgcctttcaaatgtgagtgagaggcaccaggcaaaagtagagtttttacaatatttggcgaattcacaatatgttcaatagccggacagttgaccttggtaggtgtattcaacacatacagattcggctcctttgaaagaatcccgtgtgttggctttgcctgtaatcgcagcaatacccaagaggtgcggcgaggaatggtttaac

SEQ ID NO: 493189 - DNA, 142 bp, Homo sapiens
ggtacgtggtgagacggccgctggacccccttgtgctcctggtgctcctggtgcccctgacccgttggccctgctggcaagagtggtgatcgtggtgagactggtcctgctggtcccgccggtcctgtcggccctgttggcg

SEQ ID NO: 493190 - DNA, 122 bp, Homo sapiens
gcttttatgtgaagcatggcaatcctgggttggtagagaaggagctactatccataattgaaggtggtatcatcggtcctgcagcttggaaatatcgtcttcaagaaggacagaaacacaga

SEQ ID NO: 493191 - DNA, 381 bp, Homo sapiens
tgggtagccgaactcgacatacgtatcctggtctttgctattacctgtatcagctgataacttctaaaatattctacctatgtgatcgtaaagatcagtgtggtcagcaccacctcctgaccacttgagaaccttttgagccgcgtcataaggaggcactctgtcaccctagcacaggtctcccgctgtaccactggctcacccacatagataagcagagtgcacaaaaaaataaaacttctattaaagaatcattctgagcccaagatcagacacggagtgacattgcaaactcactaaatgcagggagcctaagaaactggagttctccaacgggcacccaaacaacatctctactctaatttctgtgcccataacaag

SEQ ID NO: 493192 - DNA, 500 bp, Homo sapiens
tccttagagcactataagcgaagagcagtcagtaagataataaggacttctgtatacctgtacgagtttgctaagtcgtagccccaaactatacattctgcttcaatgcgctttacctcttcatctttcttgctattaaggaaaaattagtttcctttgattccgtaaaaacctaagagagatcagtacaaacacaatgcacaccaaaatgcagcaggatacggagaggcaacattgaagagggcggctaatgacagaatggtgtttggttctacctactggtaagagaagtttactggtgtcatggggcttcatgcatccactctatagctgatgtgtaacttatgaacaacactcacaaactacaacagtgatttctgaaaatattctatgttctagcctcgaaaatgttgtgcaggctaatgcctaggcaacactgaatagttcagtctgcatatgtttagcagatactggccgccctgtacaccaagtcttatctg

SEQ ID NO: 493193 - DNA, 381 bp, Homo sapiens
aaggttttagaccctctggaaagtaaacatctgcattaatcagtgtttgttgaacacccggggcttatgaaaagcattccctgggagcagatttcccccacgtccaacatcagagcaaagcgttttgctcagcacaggatgggcattagaggcatgttagccagttttgatcccccctccccagttttttgggtcaagtgtttttaaataagagaaaacagctttgggaggaagaaaaaattcagcaacataaactaggggcatttcatcaacgaactgttccctacataactcagagcggcccaagagaacccggatttttcagcaccaagttgaccagtcccagctccagtccattaaaaaaaaaaaagtgccatgtta

SEQ ID NO: 493194 - DNA, 291 bp, Homo sapiens
  misc_feature (269)..(269): n is a, c, g, or t
gaaacctatcctttgggagcaaaatatgtggttctaaattatctctcctcctctttctcaagtttccccaaaagaacttgagaattctcttcatgttcctgaaaaaaactgtgttaaggaggagaggagcaggaatcagaagatggttccaattccttctctggtccaatttccttgcgatcaaatgatctttgaggttgttccattgtctttttgaaccattgttccttccctagtaaaatggagtgaaaatcattttactgacttgnttacttaacaaatttttgtggg

SEQ ID NO: 493195 - DNA, 185 bp, Homo sapiens
  misc_feature (33)..(33): n is a, c, g, or t
ggatcttagacagcggaccccacctccccgggncctgttgcggtcggagtggagagtctctgagctgtgagattgatcttgcctcttattggagaggaagccgggcgccagacacacggggctcctgctttgggagccaggtccgcggccgagattgaccccagtaggggggtcgggctgtctga

SEQ ID NO: 493196 - DNA, 274 bp, Homo sapiens
  misc_feature (92)..(92): n is a, c, g, or t
  misc_feature (107)..(107): n is a, c, g, or t
tcccagaccctgagggcacctgtcagggtcatcccatttgggtgctgctttgagggctactgggggactgtgggcactggacgtggctggangcaggtggtgtcacntgagtacattctttgctagcagacagtggatgaggccccttcctcttccctcaccaagcctggggctgtgccagcctgtcttaggcagggctttgcagaggcgctcagcgtgaacacgggtaaaggcgtgtgctcattgccctgcggaccaggcgcagcgggcgccg

SEQ ID NO: 493197 - DNA, 346 bp, Homo sapiens
ttatctctcctatcaaacacggatgagtaacgactgctgagacatataagtacttaactcaagcaacaaaaacatcatcagacaagttaagaaattagctccaagaagaagtaaatcggtcttaacttaggattcaaacatgagtttaaatgaaccagtatgccattactcctagaacatgaggacatatcgcctaaaaggactcaccaaaagcatacatacaggtgggaaatcctaaatctatgcactgacactaagcagacatccatatccagcaccgagaggcacaacactttgcaaagatatcctcaaaaatattttacacgagtttctaccctgtatgtgt

SEQ ID NO: 493198 - DNA, 582 bp, Homo sapiens
gagctcaacaggggggaaggaatggctagttccctgcataaaccaattactataaatgataaactcctgtttgagtgaactaacatccagctaaatatttttacctgcacacctacatgtaaccgacggctcttgtgtggttggtcttcccctcctcccttttcttctctgtccacccgtcttcacattttttttctctctctctcacttcttttctttctcttccgtacgcccgcgctcgatctaatatcaaccacgtttattcttttattatttattttattttttttatttttttatggagttttttgtagcaacgttgtaggtttatatatttcttgcaacatctttttttgattttggtcttttctcacttttttttactcttactcatccggacgcctctcctcccggtctcttactttctttcctcctttactagacgcacgtttttctttatttaacatctagtgactgtatactttttatcgagtcagttgctgggacgactccgcgtcattcgctggtgcatctgtgtacgacccttctattcctccccggatctaccattatcctttcctg

SEQ ID NO: 493199 - DNA, 1342 bp, Homo sapiens
  misc_feature (98)..(98): n is a, c, g, or t
  misc_feature (107)..(108): n is a, c, g, or t
  misc_feature (294)..(294): n is a, c, g, or t
  misc_feature (296)..(296): n is a, c, g, or t
  misc_feature (318)..(318): n is a, c, g, or t
  misc_feature (323)..(323): n is a, c, g, or t
  misc_feature (330)..(330): n is a, c, g, or t
  misc_feature (334)..(334): n is a, c, g, or t
  misc_feature (339)..(339): n is a, c, g, or t
  misc_feature (348)..(348): n is a, c, g, or t
  misc_feature (353)..(353): n is a, c, g, or t
  misc_feature (357)..(357): n is a, c, g, or t
  misc_feature (359)..(360): n is a, c, g, or t
  misc_feature (366)..(366): n is a, c, g, or t
  misc_feature (377)..(377): n is a, c, g, or t
  misc_feature (380)..(380): n is a, c, g, or t
  misc_feature (397)..(397): n is a, c, g, or t
  misc_feature (399)..(399): n is a, c, g, or t
  misc_feature (402)..(402): n is a, c, g, or t
  misc_feature (405)..(405): n is a, c, g, or t
  misc_feature (413)..(413): n is a, c, g, or t
  misc_feature (621)..(621): n is a, c, g, or t
  misc_feature (852)..(852): n is a, c, g, or t
  misc_feature (900)..(900): n is a, c, g, or t
  misc_feature (907)..(907): n is a, c, g, or t
  misc_feature (940)..(940): n is a, c, g, or t
acagggttgcggcgggcggaacggtgtctccttcactccgccctccagcagctggagcagcagcccgaccgcgagcgtgccaagcggcttcagcagcnagcggacgnntggcggcggccccccccaggacaccaccagactcccctcttcccgcggcctcgccatggcgacccacggacagacctgcgcgcgtccaatgtgtatacccccaccatatgccgaccttggcaaagccgccagagacattttcaacaaaggattcggttttgggttggtgaaactggattgaaaacnangtcttgcagtggcgtggaattntcaangcccggntcanctaanacagacacnggtanagtnanngggacntggagacaaanacnagtggtgtgagtatggncnganttncacagaanagtggaacaccgaaaacaccccgggaacagaaaacgcaattgaagaccagaatagccaaggtttgaaaccgacattcgaaaccacccccccaccaaacacaggaaagaaaagcggaaaaaacaagtcttcctacaagagggagtgtataaaccctggccgtgatgtagaccttgaatcagcaggaccagcaacccaaggctcagccgnccccggttatgagggctaggcttgctggctaccagatgacctttgacagtgccaaatcaaagctgacaaggaataactttgcagtgggctacaggactggggacttccagctacacactaatgtcaatgatgggacagaatttggaggatcaatttatcagaaagtttgtgaagatcttgacacttcagtaaaccttgcttggacatcaggtaccaactgcactcgttttnggcattgcagctaaatatcagttggatcccactgcttccatttctgcnaaagtcnacaactctagcttaatggagtaggctatactcngactctgaggcctggtgtgaagcttacactctctgctctggtagatgggaagagcattaatgctggaggcccaccaggttgggctcgccctggagttggaggctttatccccgctgaaagaaacctttgggaatggatatccagaagatttgcccctaatatatttcccttgtgacccagcagcaaggcttttttcccccccagaagatgatccaaaccaaggatgatctccaccagagctgtattttaagtatttagaccgttctttgttagctggtttttagttggttatctagttacccatgctgcagtcctgccgtcacctatacattatttaaatgtatttaactgttaaatgcgctacccccccataatggaatagacccttatggaaactgtgga

SEQ ID NO: 493200 - DNA, 1380 bp, Homo sapiens
  misc_feature (98)..(98): n is a, c, g, or t
  misc_feature (107)..(108): n is a, c, g, or t
  misc_feature (294)..(294): n is a, c, g, or t
  misc_feature (296)..(296): n is a, c, g, or t
  misc_feature (318)..(318): n is a, c, g, or t
  misc_feature (323)..(323): n is a, c, g, or t
  misc_feature (330)..(330): n is a, c, g, or t
  misc_feature (334)..(334): n is a, c, g, or t
  misc_feature (339)..(339): n is a, c, g, or t
  misc_feature (348)..(348): n is a, c, g, or t
  misc_feature (353)..(353): n is a, c, g, or t
  misc_feature (357)..(357): n is a, c, g, or t
  misc_feature (359)..(360): n is a, c, g, or t
  misc_feature (366)..(366): n is a, c, g, or t
  misc_feature (377)..(377): n is a, c, g, or t
  misc_feature (380)..(380): n is a, c, g, or t
  misc_feature (397)..(397): n is a, c, g, or t
  misc_feature (399)..(399): n is a, c, g, or t
  misc_feature (402)..(402): n is a, c, g, or t
  misc_feature (405)..(405): n is a, c, g, or t
  misc_feature (413)..(413): n is a, c, g, or t
  misc_feature (890)..(890): n is a, c, g, or t
  misc_feature (938)..(938): n is a, c, g, or t
  misc_feature (945)..(945): n is a, c, g, or t
  misc_feature (978)..(978): n is a, c, g, or t
acagggttgcggcgggcggaacggtgtctccttcactccgccctccagcagctggagcagcagcccgaccgcgagcgtgccaagcggcttcagcagcnagcggacgnntggcggcggccccccccaggacaccaccagactcccctcttcccgcggcctcgccatggcgacccacggacagacctgcgcgcgtccaatgtgtatacccccaccatatgccgaccttggcaaagccgccagagacattttcaacaaaggattcggttttgggttggtgaaactggattgaaaacnangtcttgcagtggcgtggaattntcaangcccggntcanctaanacagacacnggtanagtnanngggacntggagacaaanacnagtggtgtgagtatggncnganttncacagaanagtggaatcagtgatgacactctgggcaacagtagatcagtcgctattgaagaccagatttgtcaaggtgggaagcatgacaatttggagtactactcatttacacgcaaaacacaggaaccgaaaataggtataatccacgtcgttcgttgtcatagagggatgtgtactaaaccgttgtgtttgctgagggtgcgaggtttagattatgcttggaccgatgcaagtccatgggttcagcatgtactacggttatgagggctaggcttgctggctaccagatgacctttgacagtgccaaatcaaagctgacaaggaataactttgcagtgggctacaggactggggacttccagctacacactaatgtcaatgatgggacagaatttggaggatcaatttatcagaaagtttgtgaagatcttgacacttcagtaaaccttgcttggacatcaggtaccaactgcactcgttttnggcattgcagctaaatatcagttggatcccactgcttccatttctgcnaaagtcnacaactctagcttaatggagtaggctatactcngactctgaggcctggtgtgaagcttacactctctgctctggtagatgggaagagcattaatgctggaggcccaccaggttgggctcgccctggagttggaggctttatccccgctgaaagaaacctttgggaatggatatccagaagatttgcccctaatatatttcccttgtgacccagcagcaaggcttttttcccccccagaagatgatccaaaccaaggatgatctccaccagagctgtattttaagtatttagaccgttctttgttagctggtttttagttggttatctagttacccatgctgcagtcctgccgtcacctatacattatttaaatgtatttaactgttaaatgcgctacccccccataatggaatagacccttatggaaactgtgga

SEQ ID NO: 493201 - DNA, 823 bp, Homo sapiens
  misc_feature (98)..(98): n is a, c, g, or t
  misc_feature (107)..(108): n is a, c, g, or t
  misc_feature (294)..(294): n is a, c, g, or t
  misc_feature (296)..(296): n is a, c, g, or t
  misc_feature (318)..(318): n is a, c, g, or t
  misc_feature (323)..(323): n is a, c, g, or t
  misc_feature (330)..(330): n is a, c, g, or t
  misc_feature (334)..(334): n is a, c, g, or t
  misc_feature (339)..(339): n is a, c, g, or t
  misc_feature (348)..(348): n is a, c, g, or t
  misc_feature (353)..(353): n is a, c, g, or t
  misc_feature (357)..(357): n is a, c, g, or t
  misc_feature (359)..(360): n is a, c, g, or t
  misc_feature (366)..(366): n is a, c, g, or t
  misc_feature (377)..(377): n is a, c, g, or t
  misc_feature (380)..(380): n is a, c, g, or t
  misc_feature (397)..(397): n is a, c, g, or t
  misc_feature (399)..(399): n is a, c, g, or t
  misc_feature (402)..(402): n is a, c, g, or t
  misc_feature (405)..(405): n is a, c, g, or t
  misc_feature (413)..(413): n is a, c, g, or t
acagggttgcggcgggcggaacggtgtctccttcactccgccctccagcagctggagcagcagcccgaccgcgagcgtgccaagcggcttcagcagcnagcggacgnntggcggcggccccccccaggacaccaccagactcccctcttcccgcggcctcgccatggcgacccacggacagacctgcgcgcgtccaatgtgtatacccccaccatatgccgaccttggcaaagccgccagagacattttcaacaaaggattcggttttgggttggtgaaactggattgaaaacnangtcttgcagtggcgtggaattntcaangcccggntcanctaanacagacacnggtanagtnanngggacntggagacaaanacnagtggtgtgagtatggncnganttncacagaanagtggaatcagtgatgacactctgggcaacagtagatcagtcgctattgaagaccagatttgtcaaggtgggaagcatgacaatttggagtactactcatttacacgcaaaacacaggaaccgaaaataggtataatccacgtcgttcgttgtcatagagggatgtgtactaaaccgttgtgtttgctgagggtgcgaggtttagattatgcttggaccgatgcaagtccatgggttcagcatgtactacggttatgagggctaggcttgctggctaccagatgacctttgacagtgccaaatcaaagctgacaaggaataactttgcagtgggctcactgtgagaagacgttcaaccggaaagaccacctgaaaaccacctccagacccacgaccccacaagcgcctgg

SEQ ID NO: 493202 - DNA, 221 bp, Homo sapiens
cccgttcagaataaatatacacccaatgtatgggcaggattcaaagtggatagtggcttggggtgcttagacagtgttatcgcttgggaccctggagtccttggggaaggcagtggtggcctcctaggccatggttgggattttggagggtttgttaggccctctcctggagtgtgcctggcccccctgcagcctgcttctctaaggtgtcggcacacgca

SEQ ID NO: 493203 - DNA, 634 bp, Homo sapiens
ccggcgtttcagtgtacattactggccctcggcctccaatttgccactcaggcgagatacttatggacccacaaagccagtatataggaggggatgctcagtgtctacctgcagtgccagaagttggcttgaacagccctactatctgccgcgcctcccagctccaccccctatcacgtgggtgctaggctagcttctagcgtagaggagcttcctactagatacacctagtagcatctatatagtagcctatcgtaccagatacggactagcaaatcccatattacccagagaggcttgggcagggcccactatgcccactatggccctgtgcccagagcgtaagggaggcagatggcagccaggggaagaagggaggtggggaagggccgccaccgcattgagggtcccctcccttgagaggaggccccatggcagttttcctgagttcttgatccacttaggtttaaacaacttatgtgaagctatgtgagatttgactgcatttcaaaagacaaaagcacatgttaccttctgatttgctctttgcctttcagcgacgctttcagatactttgtgagtgtctactctgtgctaggtgctgcgtagactgggatgtgtgtggctccatccg

SEQ ID NO: 493204 - DNA, 150 bp, Homo sapiens
tatataaacaatacatatacataaatatagataagaaaaatcactaaaatatactctactaacaccgaatacctaaaaacccatgaactaaaattaatttataatttgatagctaatccatgattcaaataaaattaacaataaattata

SEQ ID NO: 493205 - DNA, 126 bp, Homo sapiens
tctctgctcccagattcgggcaattctccgctcagactcctgagtagctgggactgcggacatacaccaccatgcttggctgttatttgttttttttagtggagacagggttcccctatgtttgcc

SEQ ID NO: 493206 - DNA, 250 bp, Homo sapiens
cgtcgacgtcggggtttcaaaccacagcccgtcgacaaacagcatcagcccggcgatgccgatgggcagggtgttgtaggtgatcacgctgactgcgctgccttgtttcttggtaatcacgtagcacaaggcatgcatgatcgcggcggccaggattgccagcaccccgaagaactcggcatggtccaggtgcaggccctggctcttgatgatcatgtacaggctgccgaaaccgatggcgatgtcgacc

SEQ ID NO: 493207 - DNA, 207 bp, Homo sapiens
ccaaaccactcacttactacagacaccttagccaaccatttaccaaataagtataggcgatagaaattgaacctggcgcaatagatatagtcccgcaagggaaagatgaaatttatacccacgcatattatggccaggcctaccccttataccttctgcataatgatttacctggaattacctttgagggggcccaggctagccccg

SEQ ID NO: 493208 - DNA, 104 bp, Homo sapiens
tctcatgtcttcctgctggtctggctggcttggccagagggagatgattccgggaggtgcttatgtctgtgctccttctgagggaacagtgggggccaggaact

SEQ ID NO: 493209 - DNA, 391 bp, Homo sapiens
atcgagaaagcgcgcagaccataggtacgagttcgagttcggataataggccatcccaaacagacactccgttccgactataaacaacagaaataaataaaggaaaaatcaaaatacctcatatccccatcttaccacaccacgatcccccgacgctctagcccatactcccccataccactcacattccaataagccgtcgcagccacccagagggggagtcccccgaccccgaccccctccccccccgagacggggctctatctcgctatttaggccggaccgtagagagtcgagactacgttatcgcatcttagttcgggtgatagcgagatctcgctccaaataaataaatgaaaataacgacgagacccaatactatcggccgcgg

SEQ ID NO: 493210 - DNA, 267 bp, Homo sapiens
cccccatattaaaaactttttttggaaggggaatttacaatgcttttggcttttgtcaatttttaaatttgccaattttaaaaatttcccagggggggggattttttaacctttttttgggaaagcccccccccccccatttttcaattcagttgggtttaactcacccccattgaaaccaaaaaaaagtttttaagggggctttttgccaggttccaagaatttgagtgaaaggggggcccctttttcaggggctcaatttctaag

SEQ ID NO: 493211 - DNA, 148 bp, Homo sapiens
ggctgtagaactggcaaatgggagagccaggacccacattcaggcctgtctgggctgggctgtgtgtcagctttgttgggttccagagtggtcagggtgaaggagcccttggatttggtaattaggagtcactcatggacctgtggcg

SEQ ID NO: 493212 - DNA, 139 bp, Homo sapiens
cccctcccctgaaagtttgggaacctaaaagtcctcggggaggggttctggatttaataagggaaagggggattgggggatccgggaggggggggttgtttttgacttgacattaaaaagtgttccatgtcccttttca

SEQ ID NO: 493213 - DNA, 940 bp, Homo sapiens
cgctggtagaagggtgggctttaacggggttgagaccgtcgttgtgccccccgggtatgtcaggtgttcgcttgtttcggaaataaggggaacccttcgcctgcgttttgagaccgcctttggccgcttgtattataagcgctgtggtgattagtgtgtgtgggaggcccaccggtttgttgaacagcttataaggggtgtaaccacagtcacacacaatgggtggggggaggtcttttctctcatcaaaaggggttgggtggtagtttttatgagagtgcccacccgtgggtgtgtttcgttgtggggcgggcacccactgtgttcttcataaggtggtggtaaaatggcctatgcgcgcctgtttatgccccctgtccgtaaaggtccctcgctcgttgctggccacccggggtgagcccccctgctgtgtgctggatgaaggccgcgcaccaccctctagcggtggggggttttttatttattataaggggcttcttgggagcagaccgccggttttgttcccaccccgctcgctgccttctgtgaaccgaccagtcttctgtgatactacgtgtttgggcacagtctttgccatggtggtttgtggtgggtggtgctcactcattatcaagggctggagggtttttgctgcgctctctgctgaggggacccctggccgcagttgtcctttttgtcctgtgggcccggtgttgttgtagtacaacttccgttttgggggagggaggcacctcacttcccgcccccctcgaccttctcgccccttaatgatgggtgttggggtatgggtaacatcctgggtctttcccggggaaaacctttttaaaaagagggccctcccaaggggttttaattttctgacaattttttggtccattaattaatgtggcacaattcccaaaaaactgttttttcccca

SEQ ID NO: 493214 - DNA, 885 bp, Homo sapiens
  misc_feature (1)..(1): n is a, c, g, or t
ngctatgcttgttgctactatacatgccgcggttgtgcatttacacaattctgcgtctatgcgtctctccgcggataactggtgacaccgccggtgccgccccttgttagtatttcacccgccttggttttaacccaggcgcaaaattttggggttcgggccacccccccagggatgggcccttctcgctcgattcacacacttggggcttctggttcaccgccttgtggtttcaggacgacctcgccgctggggggggcttttaaatcccgcggcggccacccggttgaggggtcctttctccctgctttctccaggacgacgacgccacctcgataaggtttaaatttaccacgggggtgggtcaacaccacaaacaccgataactgttcataaccagtaaatagttcttagtacagcccggtagtcccggatatgattgggaacgcccgcttgtaccgatgcttaataacaccccccgtacacttggggcaattatcaccctcctcccccgttaccagcaggcggtaccccccggccccgcgagttgtgcccctctccgccttgtgtcacatcgtgttttactgtgtcaagagccctggatccaattttgaaccacggttatcacacctccggcccacacagcggtgagaacagacacatatgttgtagtaggtcagctcttcggagaagcccccctaaccctacacacagtcttgtgtgtataatcacccctccagttggttctttaactcgcttctttcataaatgaagtttcacacggcaagattatcctattctgaaatagtttttccccccttcggtgaactcatatacccggagtatttttttaaaaactcaagacctttaatcccccacccccca

SEQ ID NO: 493215 - DNA, 311 bp, Homo sapiens
aactgccttttccactgctccacactggctgccgactcctgcagggctggggtcagccgtgcattgctctcccgaagggtctgcagctcgatctcccacttcttcacgttggctgcgctctgcgtcaaggcaatcttcagcttggcattctcagacttcaggggtgttttgggtggacccgcgtgagaagcccttttattggccggtccgttggcactgggatccctgggaagattacttgggggctccaatttttcccgcgctttggtttggggattttgggaggtttttttaccccccgggatattctt

SEQ ID NO: 493216 - DNA, 389 bp, Homo sapiens
ttagttcccatgcatttggctccagaaagaccccagtgccttttgacaatggccagggttttacctacttcttgccagtctttcccaaaggaaactcattccaaatacttcttttttcccgtggagtccgagaaggaaaatggaattgtggttcattctgtggtcccttgtaacctcaggtctttaatgtgctcactttcagatttaaaagatccaggtgttaatattttgggtatagtaatcattcctctaaacccctggattcttaaccctgttatatttcagtataaggggtggctttttcttttcatgtctttgatctggtttccttcctgtaattcagccccctgattttgttaggggggggaataatatgtggtttttgtaca

SEQ ID NO: 493217 - DNA, 223 bp, Homo sapiens
ctagaggatcccttcaagtagaggtggctgagaaagtgcagaaatcgtctgcccccaggaagatgcagaaggctgaagaaaaggaagtccctgaggactcactggaggaatgttccatcacttgttcaaatagccatggcccttatgactccaaccagccacataagaaaaccaaaatcacatttgaggcagatgtcagcgttgtgggtaccggagctcgaat

SEQ ID NO: 493218 - DNA, 298 bp, Homo sapiens
cccgttagctgggattacagggatgcgccaccatgcccagctaattttttttttcttattagagagggggtttcaccattgggccaggctggtttcgaactcctgacctcaaaggatccacccacctgggcctcccagagggctgggattacaggggtgagccactgttcctgccctcaaactgatcttaaatttaactgattggttagaatgaacttatcctcgttcattaacacctctttggccatgtagagctggggtgcaaaatgttctacccggggaggggggggcaccgagc

SEQ ID NO: 493219 - DNA, 115 bp, Homo sapiens
ggatttgctggtgcagtacaactaggcttaatagggactgctgaagacctggagaaagcgttggaactcactggtttgaaagtctttggcaatgaaattaaactagaaaaaaaaa

SEQ ID NO: 493220 - DNA, 110 bp, Homo sapiens
ggccgatctcctgcctcagccttctgagtggctgggactacaggcatacaccacatgtctggctcatttcttaaacttttgtagagacagagtctgtttgttgcctaggc

SEQ ID NO: 493221 - DNA, 653 bp, Homo sapiens
  misc_feature (653)..(653): n is a, c, g, or t
ttggtctaggtacgaggctggtttaatcggccgaggctgtcgccgcctcgtctgggctgttggctgcgggctgcgcccccgctgcttgccagctctgcacggctgcgtggctctgcggctgccctggtgctctgcaacgctgcggcgtggcgtgcatgggataacgcggccatggtgctgccgagatcgcctccgcagtgatgagggagtggtgggtccaggtggggcttgctggcctgtgcccctgcttgctagcgtacctgcacatcccaccccctcagctctcccctgccctatcactcatggaagtcttcagtgcaatgtttatcacttacaagggactgcgtatcttctaccaagactctgtgggtgtaggttggaagtccagagatattattgtgcttttacacggtttatccaacatccagctacgactggtacaagattatgggaagtgtcttgacctatgaggtattacatcggggtagattgcccttgatatactatagggctatgggcttacagtagagcaaagcctgagagccagcagtcaactatttcccagtaagtttttgaagacgagtggccaggccatacggttggaaagcgctatatttgcgggcatctcggaggctccaggaaccggcaggatn

SEQ ID NO: 493222 - DNA, 439 bp, Homo sapiens
  misc_feature (171)..(171): n is a, c, g, or t
gttccattggtcgatctgtctgtttttatgacagtaccatgctgttttgattattatagctttgtagtagactttaagaccaaggagcatgatggttccaattatattctgttcaaaattgctttggcgggttaggatcttttccggttttttttttttttttttttttcnaaagaaatttagcattattttcttaatatgtaaaaaatcctattgggaatttttaatagggaaatgccatttgaaatcctgttaaataaccaaaaatcctaacaggggtaattgggaataagttgtgggaccatttttaaaccaaataatccaaatcccttttccaaatggaaaccaatagggaaatggtccctttcaaattttaaataaccaatccggcttttaaattccttttttccaaaggttttgtagttttcagtagagattt

SEQ ID NO: 493223 - DNA, 401 bp, Homo sapiens
  misc_feature (151)..(151): n is a, c, g, or t
  misc_feature (243)..(243): n is a, c, g, or t
gacagaatctctccttgtcacccaagctggaatgcagtggtgtgatcttggctaactgcaacctctgcctctgggttcaagcaattcttctgcctcagcttcccgagtagctgggactacaggcatgcaccaccatgcccagctaattttngtatttttagtagagacgaggtttcaccatgttggccaggatggtctcgatctcttgacctcgtgatctgcccacctgggcctcccaaagtnctgggattacaggcatgagccactgcgcccggctgacatcgtttttaaaagtgggttccaagtccacattccttctgcaggttccataatctggtttttggggtttgcacacctttgtccctcttgggtgggaaagacgggtttccttgaccaggggt

SEQ ID NO: 493224 - DNA, 158 bp, Homo sapiens
atggtcactgtcttgcccattgcccactgcatcacagcagcaactttcagccacattcttaggtgccccatttgtcttcatgttacacacagttctaatcagcttggttatttggtttccaggtgccttgtctcttccacacagtgcatgggacgggg

SEQ ID NO: 493225 - DNA, 140 bp, Homo sapiens
ctgttatagaggatcccggggtagctcttgcggtataaatctctgggctacagacagtcatgtgtacattccctcctccccagaaagacaaggccacccagtcaaagcttagtgttcactgggtggcatcgataaacacc

SEQ ID NO: 493226 - DNA, 486 bp, Homo sapiens
  misc_feature (33)..(33): n is a, c, g, or t
ccacagaaacacagatgccaataaacgcacacnacatccaacatggctagcagagaaacaaacgaaagcttttgcatccacctgtcaaaaatggaaagctctgactatatcaggtgctgagggacagaggggatctcggcaggtgccaccccactgtggtcacggcccgatttggggagcagcgaggcaccctctagtaaaactgaaaatgggctgggtgcgctggctcacgcctgtaatcccagcagtttgggaagctgagacgggcggatcacttgaggtcaggagttcgagaccctgtttctacaggagtttaaaaacttaggccaggcatggtagctcgtgcctgtaatcccagcactttgggaggccgaggcaggcagatcacctgaggttgggagttcgagaccagcctgaccaacacggagaaaccccgtctcaactaaaaatacaaaaaattagccaggatgatctcgggtggtatca

SEQ ID NO: 493227 - DNA, 116 bp, Homo sapiens
agcggcgaacagtcactttgttgatgttcctttgctgtacataagcttgttcacttcatgtaatcctatttgttcacttttgctaggttgcctagcaaaagtgattgttccccgct

SEQ ID NO: 493228 - DNA, 1047 bp, Homo sapiens
gcggatgacgtccgtgtgcatgcggggggtgcccgggggccctggtggccctgggatggggaaccgcggtggtttccgcggaggtttcggctgtggcatccgggtgccgggttgatctgcggccagtggtacgtgggtcgcggggtcctgagtgccgcaggagactctggcggagcgcgaaaggtccagaaggcataatggagtggattgcccgtcaccaagttgggccgcttggtcaatggacatgaagatcaaggtccctggatggagatctatcgtcttctccctgctccattgaaggaatcagagatcattgatttcttacctgggaggcctctctacaaggatgaggtttgcgaagattatgtccagttgcagaatgcagacccgtgcccgtgccatggcgcaccaggttcaaggcatttagtggctatcgtgggactacaattgtgccacgttcgagtctggtgtgttaacgtgcatccagaggaggtggaccatccgaccgagtcgcagtggtgcgccgattcatctcattggaccaagtctcgtccatcgttccccagtgcgcagatggctactgtgtgggaacaagatcggcaagccccagactgtcccttgcaaggtgacaaggccgcttgcggcgtctgtgcatggtacgcctcgatcccttgcaccctaggtgggcactggcattcgtcgtccgcaactgtgcctaagaagctgctcatgatggctggtatcgatgactgttacagctcaagacccggggcatgcacatgacaaccttgggcaacttcggcaaggccgccgtttgatgccgattctaagaactacagctagctgaccccgacctcttggaacggaggactggtattcaaccaaggtctcccgtattcagcgaggttcactggagccaccttcggtcaagaacccacaagcagaagtctccgtggcagcgggacctcaaggctcccaggctggtgggtaccaacataaggaggtttaatacaagaacaaactaaggtgacttacggcggtacacac

SEQ ID NO: 493229 - DNA, 1505 bp, Homo sapiens
cccacgcgtcgaccacgcgtcctgaccacgctgtacgcccagctgctgtccgaccgtggtatctgtcagccagaacacaggtgtctgtgaaaactacccctaaacgccaaaatgaggaaagtgaaaagactcatatcaacattgtctgtcattggacactgtacgattcgggcaagtccagccactactggaccagtctgatctataacctgcggtggcattcgacaacaagaccccaatgacaaacgtttgatgacaggacggcatgctgagactgggaaatgggctcctatcaacgatatgcctgtgtgatctatggcataaacctgacaacgctgagctgtgacactgtgaggatatacacacactatgactatacatcctatgctgagaaaactttgaagaaccaagaccaagatacctaatgctgcacataatcacatctgagtgaccaccaagtggaccaaagaagcacctatcatacaacacacacagtgcattaacaatgggcacaatcatacagtgcatgaccatggattggaccataggaaacccatggcacctaatgatcatgcataggcatcgcgattgatacggggattgaaaaattctggacaaagacattgggataatcatacaccaaacgcaacattggtgagcaaagaaaccccagcaaacacagcacattgacctcatacatcatagggccatttacaacaaccaacgtgggatgatgatacaaaagacccacaaacacttacacacattagggacaagaagatgccattaacagcacaaaacacccatggagcaacataccacatcctaagtgaagaccacacaggccacatataacgagtcaccacagcacacgaccactcctcactcgaacgcgtaccccctttggcgttacaagtggaacacgttcaaagaccagcacctaacatacctttacactgcacaaacaatctggtgtctatactacaacccaccgcaacaaaaaagcaacaccgatcccgcaaggcccaaaacaggtcagggaaatagaccaacctgagatcgacccaacccacgtgcctagcacgagcacaaaagagaccaaaacaagaaagcccctcggcgcccaccaagaagagagggcacaacgaaaaccaccgaaaccaaggaactggccgacaatggccaaggatgaaacacacaacctagacagcaaaaccaaccgaggcacaagcaataactacaaccaacagagtgagcacaacatagacacatgcacacgtgcgtccccagccacacacacaagcaagagctaaagacaaatgcagttcgtcattaggacgaggaaactcgataatagcaaaaaagaatctagcattgcaaaaaaccaaaaatagcaacacaaaatactacgacattagtataccacacaatcgagaacggcacacatcttaaataacacataaaaactaataacactaaaatacgcaatcatgataaaaacttaa

SEQ ID NO: 493230 - DNA, 208 bp, Homo sapiens
aaagacatattaaattgtcaaactgatgtgatttccactgtaagaactaaaaacagaaggatggggaagattaagttaaaggaaggatccccgtttactcaactgcttctgaacagtggcagagttgggtgagaagtgggagatgaaggcagaaataagacaaagaagaaaggcaaagaaggcttcaactctgattgaaaatgagtgg

SEQ ID NO: 493231 - DNA, 384 bp, Homo sapiens
agagagaactgacgcaggaggcattttcccatgctgttctcatggtagtgaataagtctcatgaggtctgatggttttataaatggatgttcccctgcacatgctctctcctgcccaccatgtctgactaaattttgtatttttactagcagacgggctttcactatgttggccaggctggcctccaactcctgatctcgcgctccgtccaccccgacctcccaaagtgctaggatcataggcataagccaccacacccggcctcttttctctttctttttacttttttttactctggagactgagctttggcacatcgctggcccagcgctggagtgcaactggctgcgaatctccagcctcacatgcagccttccaccctta

SEQ ID NO: 493232 - DNA, 274 bp, Homo sapiens
cctaggctgggccacaaggcagactctctctcaaaaaaaattttttgagaaaaagagtaacagctgggccaggtgcaatggctcacgcctataccccagcactttgggagttggaggcaggagactcgcttgaggccaagagtttgagactaacctgggcaacaaagcaagacctctgctgttataaaaaatgaaaaaattagccaggcatggtactgcgagcctgtaatcccagctactctggaggctgaggtaggaagactgcttgaggcta

SEQ ID NO: 493233 - DNA, 367 bp, Homo sapiens
ggcctgcccatccagcactgcagatgcccccttgcccacctgctgttggtcccaccctccgtgcacctagcaggagtgccaggccccaaccggaacagccaggccattacccaggggagccagggttgcccccccccccagcgctgccagggagccgccatccgagctttagctgggggcccaaaggggccccccaggatttgtggccctgtaacattccctcgattttgttttcccgttcctccccccagtggttttgaaatcccagacctcgggtatataaaaaatgcagaacttgttttccgttcccccgccagttttatatttttggtttttcaaaaaaaaaccttaaaaactggaaaggaga

SEQ ID NO: 493234 - DNA, 350 bp, Homo sapiens
  misc_feature (17)..(17): n is a, c, g, or t
actgtggctaaacctcnaacctttcctataggaaatgtgatcagatcagagacacttgatcggttgggagtcagccctcaaggcctggcgacttccaggatcttggagttgctagaggaaaagtagttatgccctataggcggcatgagagacaagggatcagtttacctgccaactcctaccgtggaggaggagttccactgaccttgtgtagaaagatcaggaatccaggccagggtgattgaatgctgacaagaaatcactgtatatgtctctccagggcagtttcttaataagatgtttgtatttatttccagaccaataaatttgtaactttgcaaaaaaaaaaa

SEQ ID NO: 493235 - DNA, 932 bp, Homo sapiens
tgctgggggaacggggggtcggttgtcttctttgtggccccaaaaaaaaaaaaccacctcgtagtggttgggccgggggcgggggagggggggcccccggataaaacccccccggggggggggggggcgggctcgccggggtggtgtccgctggtccccaggtgataccccgcgtaaatagaggaccccctccccagcattctgtgggaggaccccagaaggagtgtcacctgtcggaagagggtggcgcccccaaatatcaccttgatggggggagaactgaggaacatcacgaagcgccatctccccacgagcgttcgccgtactttttttcacaacccagggccgaggagagaagtcggtcgacttatagaagagtcgtgtgagcccccgcctgagaaaccccaagtgttcggccccaggtaggtatccaacgagcgcgcggctgtgagtaagccccccaaaagagggcggatgacgaccacacggggtatcccggggggggctcgccggaaaaaaaccgagtgcgaaccccccacagcccaggggagatcccgccgcctccaaagacctccgggagggggacacacaaggtcgaccgggcgtgaacgaggcacaccgtcgcgggtcactccaacatgtggccccagtatacctgtttgcgcccgcatgaaagggcgccaccatgccgaaacagggggggcggccgctaggcgcgacccaccggagtggagtcgtaaatggggcccgaggaagaccgggaattggaggccccccaccagcggcgggcagggaggtcccggccaaacaaacatcactgatgtgggggcgataccccgttccagcaaggatggccccaactatgaggcgaagtgccgccaccgcggggggagggaacgccctggctgtcgccccagcgagagatccgccgg

SEQ ID NO: 493236 - DNA, 223 bp, Homo sapiens
ggttgatttaaaagaagttgagtttgggagatttagaaatgggagatttttaataagggcaaaagaaattcagtcacacctaaggattaacagaaggtaggggtgtattatctaaacagaaatcgggcggatgtgccataataaatggtctattagtaaaaaaatacactttagggcacagcatggtatcacaaattacagtagggacacttggcatccagag

SEQ ID NO: 493237 - DNA, 403 bp, Homo sapiens
gttgcttacagctttgcaccccggcatcagcacaggggtccctggcccaccctacggcagctgaggcagtgttttcctgtgaggactcccccatcagtggaccatagggagaagcccgatgccccattccgtgtttaccgtgacgcacaggacacgtgtgcaattcataggaacggaccagatcgtcctcatgagtgccatctggtacaggtgggtggcgctcacgtctctgtcctgcagcccatcgtggagccacagatagttctcccggtctcactcccagttcatgttgactttcggtagctctcgcatgcagttctattatacagccgtctacaagcgatgctttagtggcctaacctcatgtgatatacagctatttctagcagtcaggcagctctgc

SEQ ID NO: 493238 - DNA, 235 bp, Homo sapiens
tttttttttttgaaatggggtctctctccagcctgggcgacagagtgagactatgtctcaaaaaaattaaattaaaattaaaattgagcctgatgtggtggcacatgcctgtagttccagctatgcaggaagttaagatgggaggatcccttgagcttgggagatcaaggctgcagtgagctgtgattgtaactactgcattttagcctaagaaacagaaagagaccctgtttca

SEQ ID NO: 493239 - DNA, 399 bp, Homo sapiens
acctcactccatgtcacaagcgatcctctcccaggctggtcttgacttctggcctcaggcgatcctcacacctttgcctcccaaagtgctgggattgtaggcatgagcccctgcatctggcgcattttagccatttttaagtggcattaattatattcacaatgttgtgcaaccattatcactatttccacattttttcgataccccaaagagaaactctacccattaagaactaactccttattttccccttctgctagcccccttaacctcaaatctactttctgtctctgtggatttgcccattctagatatgtcatataaacaaaatcatatgatatttgtcattttgtgagtggcttagtttacttagcatgatgtttccaaggttcatccctg

SEQ ID NO: 493240 - DNA, 422 bp, Homo sapiens
  misc_feature (393)..(393): n is a, c, g, or t
  misc_feature (404)..(404): n is a, c, g, or t
  misc_feature (419)..(419): n is a, c, g, or t
gttgagccagtttccatttgtggaatacatctaactcggtcatggtgtataatccatttactctgctgctgaatgtgatttgcttgtattttggtgcggatttttacatctgtatttataagggatattggtctggtgttttcttatgatgtcttcctttggttttgatatcaggataatattagcctcatagattgggttaggaaatgttctctcctccgttttttttggaagagagagattggtgttaattcttgctagaacctttggtaggaatttgccagtaagcctatctggtcttggggtctttgggaggattttgattcgattcaatctatgtatttgttataggatcgttcgggattgtcccatcccccgagtcagttgctagcntgtgtgtttcntgggagtttttcccnttt

SEQ ID NO: 493241 - DNA, 144 bp, Homo sapiens
tcagctctgtacatctaacaggcattccccatgatatataataaactcggcaagacagagtctgggagccatggtgtgaccctgacctacccaggatatctaagtaacaactgctgaatatatacatcaagctgggtgttgcag

SEQ ID NO: 493242 - DNA, 175 bp, Homo sapiens
agttcatgcctgtagctctcttccttttgtttctcacccttcagaaacatatttttcagtagctccaggtagatgagccttttatatattttttaaaataccatttgcagggaaatcggctgaatttaaaaaggcagcccggggtgtacctagaatggcaaggaactgatgtaag

SEQ ID NO: 493243 - DNA, 331 bp, Homo sapiens
aagctcggccctgtgtatagcacaacctagggtcagtcttgcaggtggtaagccatttaccaagatagttgtaggtcaagaagggcagatttattagagaaattgtgaaaatatgttgcagtgggcagctcagcagagaaggggctacctgcaaagaggcaagggctggaggaaagttttatagggtcctgctgaagggtgctacgtgtggaatgaggtcattgtgcccgcaggttgtttgtgattagctgtctctaacaattgttcatacaataattgttcattattgttctcaacttggggctctccccaacctggggacccttcctta

SEQ ID NO: 493244 - DNA, 126 bp, Homo sapiens
ctgaagcacagaaacttggtaatgggatcaacatcattgtggccacaccaggccgtctgctggaccatatgctgaataccccaggatttatgtattatgaactgcagtgtctggttattgatgaag

SEQ ID NO: 493245 - DNA, 119 bp, Homo sapiens
gtggttcatggatgccagcccagcgccaacccggaggtacaggtgccgcgctgtggaagcagctcgcgtgtagaaccagttctcatcgtatggagcaagctctttgtgcttggccagct

SEQ ID NO: 493246 - DNA, 474 bp, Homo sapiens
gttaattgaaattagctcctggaaccttagaatgggagctactaatcccatctggcgcccttctccattaaatagataaggaagttgaggcctgggatggcgccaagatccacccaaagccactcactctgttggtagtgactttgggcctcctggcttgagacttcttgcctctggggctcttctgcctgaagacccattctgagtgctggaagtgcccaaacagtgagttgtcagggtgcattgggtaaatcacattcgcttcctaaacacaggtgctgtgagtgctctggcgaagtttggagcccagaatgaagagatgttacccagtatcttggtgttgctgaagaggtgagtctagcccaggggccctaatggggacagtgttcccttggacccaagcagctttcctttgtcttttttttttttaactgaaaagggagagaaaagttatacagctactgattgtagaaa

SEQ ID NO: 493247 - DNA, 224 bp, Homo sapiens
  misc_feature (54)..(54): n is a, c, g, or t
  misc_feature (115)..(115): n is a, c, g, or t
ggatgccaaatctgtcaagatcaagaaaaaactaaggaccaacgtgaagtttanaagttccgatgcccagcagataccctttacacccctggtcatcactgacaaagagaaggcnagagaaacctgaagccagtcccctgctcccccggtttggcagtgaaggaactgaaatgaacccagacacactgattggaactgtattatattaaaatacctaaaaatcc

SEQ ID NO: 493248 - DNA, 1186 bp, Homo sapiens
  misc_feature (116)..(116): n is a, c, g, or t
  misc_feature (121)..(121): n is a, c, g, or t
cgtctcgcggcggtaacggcggctagaggagcccggctgaggcgccagtacccggcccggtccgcatttcgccttccggcttcggtttccctcggcccagcacgccccggcccgcnccagncctcctgatccctcgcagcccggtccggccgcccgcctctgccgcgcaatgatgatgatggcgctgagcaagaccttcgggcagaagcccgtgaagttccagctggaggacgacggcgagttctacatgatcggctccgaggtgggaaactacctccgtatgttccgaggttctctgtacaagagatacccctcactctggaggcgactagccactgtggaagagaggaagaaaatagttgcatcgtcacatgactcacggatacacgacctactagaccaccagagtgacccctgttaccaacgcctcggcaaggtggaagagcttctggatggccaaacgaatacgagaagtaacacggacgagatggtccacacagcaacaggagcccaacaccaagacagtacacatcagggaaccagaaagcgacaaagaaaggaacaagacagcatggagatacccaacgcacaggacgcagaagaagaatcgacacagcagaagtaacactgccgaggacacaagaggacatccaacaagagcgcagatcaaacgaaggaaaccacggccaaatggacgacacgaaaaacacagacagagagcaacacgacaaaccgccccgagcgccgaagagtagaacacaacgcaccacgacgcaagatgaaacgcccaatgacgaaaaccgacaaacaaaaaagacaccagcgagaagcagtaagaaacccaaccaacacagaccaggcgaccaagaggaacgaacacggaagagcagaaccgaaacgccgagcagaccaaacgaaccgacccacccagcaagaccacagacaccgagacgaaaaggaacgaagacaaaccagacgcaacacgggaaagagagaacaaaacggcccaaacaaccagaaacgcggacgaacaaagaagcggacgcaaaagcgaaaagacaagacaagacaaaacgccgacaagaagcacagacagcacggacaacaatcacgacacacagcacaaagaaccagacacgaaaacgaaacagaacaacaagacaaaagccgaaccgacaacaagacg

SEQ ID NO: 493249 - DNA, 538 bp, Homo sapiens
tgaacccagtgacgcaagctggggcacaccacgagccaaagggacctgtagggcgtatcgcggcggtggaaagaaagacgagcgctcctggcagaggcggggagcgacgaagcaatctgttccggaccaccccggggagcaacccccgtagcgcccgctcaccccgggaatagtgggagagtgcgcgaaaaccgggggcacccatatgggctgggtgataatgtgaggaaaatcaaaatccgcccggcggttgtctcccacaccaatggggaggcccctccaaatatggagagggctatggcgcatagaaatgtgggtcgagtgcgacgattactgggttttaactggtgggggacaggtaattgtccgttgggagtattccatcttgatttatgtgtactgtttgtcgcaaacgactcccagcttgaacaccctctctttcgtacgggcacagtggtatgagaacatgggcaccccgttctttgagagaatataacaaacaactgttagaaccgccacaacaaatagcaaaacaaac

SEQ ID NO: 493250 - DNA, 260 bp, Homo sapiens
ctgagactgcaggcatgtatgtattcagtcttacattaatcaaggatgctgtgataatgtcacaattttattggctctgtaaatctatcccaagagaaggtcacatgtggatttcaagtttgtgaaaaaaaaaaaatcacttttccccataacatatactagtgtaagccaggtgcgctgggccaggagcttggagctcagtgaggaaaagagttagaccaggctccgcaaatctgtcagcaaagacaaatatgagagag

SEQ ID NO: 493251 - DNA, 720 bp, Homo sapiens
  misc_feature (116)..(116): n is a, c, g, or t
  misc_feature (121)..(121): n is a, c, g, or t
cgtctcgcggcggtaacggcggctagaggagcccggctgaggcgccagtacccggcccggtccgcatttcgccttccggcttcggtttccctcggcccagcacgccccggcccgcnccagncctcctgatccctcgcagcccggtccggccgcccgcctctgccgcgcaatgatgatgatggcgctgagcaagaccttcgggcagaagcccgtgaagttccagctggaggacgacggcgagttctacatgatcggctccgaggtgggaaactacctccgtatgttccgaggttctctgtacaagagatacccctcactctggaggcgactagccactgtggaagagaggaagaaaatagttgcatcgtcacatggtaaaaaaacaaaacctaacactaaggatcacggatacacgactctagccacacagtgtagaccctgtcaaaaagcctcggaacgtggaagagatactggatggcaacgatgcagaagtacaaggctcgtgtccatcagcacagagcacacacactacctcagggaacagaaggacaggaggaacagacagagagtacaccacccctgaccgaacagatcacaacactataaatgccgagacctgctccacaacatcaaccggaaacagcatgggacagagacccgaaacagaaagtccacacttgctcagcgaccatgacccagtgatcaccagaaaggctctcg

SEQ ID NO: 493252 - DNA, 799 bp, Homo sapiens
actcgcgtcggttggcgactcccggacgtaggtagttgtgggccgggttctgaggccttgtttgtctttactttgtccactctaggccagggatgccgtggtaccagacactggagaggagtgtcagtctgggctgtcgagaagccttatagctcgatgacctatgaatggcaggtgtgggattctcaaatatagggcatatctgatgggaacttgtgtgttagagtaacagatgatttaggttggttgggtataaaagagacctaatgctcaagagtgtataatgaaggattgagaaatgtcctagaggtcaagtaattgcgacttatgtgtagaccatggtaatgccgcgacaagtgttaccatggaatactgatgtgaatggtttgaaatgaagactttgtcgtgtacttaggaagtaaatatcttttgaattagagaaagtgttgggacagaaagtactttatgtaactaagtgggctgttcagaagcttaggaggtcatttttgtacattttccttttttagattacttttagaagagctagggatgccacatggttttccagtttagaacaggccttaattaaaccttttggaacatttgacaccaagaaattgcatctgtcttagaaactggagaattaattggatggttaggtcaaacatgtacttgggttttctctgtggaaatttgtatcagtacttcgaaaatgagatcttacggaaaacacagatttttttaagttagtcatgcttctttaatgaccctagtgtacacttggtgatcaggtttggga

SEQ ID NO: 493253 - DNA, 148 bp, Homo sapiens
cacgagggcgcacaccatgacggtgttcgatgtgctgggccacttcggcgtcaaccagagtactgggctgatcctgtaacaggtcatgaagcttacggacagatggggctctactgagttaccggttgacaaacgaaccaccttgctg

SEQ ID NO: 493254 - DNA, 281 bp, Homo sapiens
aagacagaaagtggtgcaaaaagtgcgtttcaaagatcttggcctatctgcacgtctgtccttcagttgccaatacggattctctttcgcagtctgtgtgcaaacgttctggaacagagtcttaaccagattcacactgatcgccttctttatgagctccctctcatatggcagagtcgcgatcatatgtcggccacctctgtaataacagatgacaatccatgccggttctctggtgtcgctgtaaaaatgagggtgagtctcatataaagacacaccct

SEQ ID NO: 493255 - DNA, 853 bp, Homo sapiens
gagaaagatgcctactaaaacagttggagagagcagaggttcggctggtaaggggatagataccaatgtttaaaatgtatctggtgagcaagagtttcttgaagccttcgcatctgtgccgtatgctggatgtgagtggatgggaaagaattatgcctgagggaatcgatataggggaacctcttactgatcgtgtaaaggatgtgacttggatcccgccttttaatcggatgctgcatggaaggttcgacctttggcaagctgtacgcttgggctgttcagaacattcgaaagtgttatggtggatgccagtgccatatttaaagagcttggtatccagccggttgccccgtgcaaacccatcaccaagtgagaacccatcgggaccgagcttggggaccatcccgcaagcccacttcctcctggtgatgctcagcgatgctcaccctgcagctgcagggcaaacaacttgacctcctgctcaagttccggcacgctgggcctcgctcagacggcactgcggcctgattgggcccagttgtgaacagcgtgtgaggacagatatgaatgcttctgtcaaggtggttcttgcacagttaggaagaacacaaggaaggaaacgggtcctgtgcagctgccctgttccagggccagaaatggctggcatggatggaagaatggcaacaagggtcacgagaggttgtggactgggcaacttggggcggacagattggctcctccaggccttaagccaagtggtggtgagctggaaaggacgggggatagagagcacgggagcaagggggaacaacctacggaggggaaagaggagtcaccaagggaagtgccacca

SEQ ID NO: 493256 - DNA, 614 bp, Homo sapiens
tgtgggcaggctggttcctcctgaggcccctctcctgggcttggagacgccgtcttctccctgtgccctcacagggtcatccctctgtgtgtgtctgtgtcctcatctcctcttcttatgagatgtcttagtccatctcaggctgctgtcacagaataccagaggctgggcggattagaaacaaaacacattgattctcccacagccctggaggcttggaggtctgagatccaggtgtgggcagtgctggttcctcctgaggcccctctcctgggcttggagacgccgatgcttctcccgtgtgccctacagagggtgcgtcccatcgtgatgatgtgtctgatgtccatcattctccatcgttctaagtgaagaatggcgtgtaggttcgcatcgtcacgggggctgtcttggttgagcgagtaaaggtaaagccgatgcagggggcctgcgtggcctggggagttaataacggaatagacgcaaaaagaatgatacgaattggaagttgtcattggcgtgaagcaggtgcgcatgggcaagtgggcctgggtgaaggggtttcctggcaggaatttccgcagggggtgctggagggccagtgtgaactgtgc

SEQ ID NO: 493257 - DNA, 127 bp, Homo sapiens
tggggtttaaatttttttggtaattttacttaaaacagttatttcctatttttacgcagataaattattggtggcttaaaatggtaaaatatagtaaactggagaaaaataaaatctattatacagt

SEQ ID NO: 493258 - DNA, 543 bp, Homo sapiens
gggaagaacgtcatgaaatttagattcttattaaaagttcttgaacatccctgaactatttaatattatttcttgtccagcagatcctgaatcttaaattagaagttggtgacaggtaagtgggaattttccggggagggagaacacggatatactcaaatctcaaaatattacactagtcgctatgtgcagagtaggttctatatccctcctttttttcccaccctggtaaactcttatttaaacttcaagatctgtctctaatattaacttcttggagaagtttgaccattcttccagttcccacatattattagcttatctttcctctgattttttctcatagcattctttcattcatttactaaaatatgcactaaaatatgcacctcattcagtatttttatataataacattttaagataatttgcatacagtataattcgcccatttaaattaaatggcgattaaattaatttaatttaacacaattaaattatttttagtatattcacagtatattttactgtattcttaaatag

SEQ ID NO: 493259 - DNA, 459 bp, Homo sapiens
  misc_feature (39)..(39): n is a, c, g, or t
  misc_feature (71)..(71): n is a, c, g, or t
  misc_feature (81)..(81): n is a, c, g, or t
  misc_feature (97)..(97): n is a, c, g, or t
  misc_feature (102)..(102): n is a, c, g, or t
  misc_feature (120)..(120): n is a, c, g, or t
  misc_feature (149)..(149): n is a, c, g, or t
  misc_feature (163)..(163): n is a, c, g, or t
  misc_feature (168)..(168): n is a, c, g, or t
  misc_feature (170)..(170): n is a, c, g, or t
  misc_feature (178)..(179): n is a, c, g, or t
  misc_feature (183)..(184): n is a, c, g, or t
  misc_feature (197)..(197): n is a, c, g, or t
  misc_feature (203)..(206): n is a, c, g, or t
  misc_feature (217)..(217): n is a, c, g, or t
  misc_feature (271)..(271): n is a, c, g, or t
  misc_feature (277)..(277): n is a, c, g, or t
  misc_feature (322)..(322): n is a, c, g, or t
  misc_feature (385)..(385): n is a, c, g, or t
  misc_feature (391)..(391): n is a, c, g, or t
gttcattaacaacataggaagccttgttctgtataaccngctagattccttaataatttgtcactagaggnagcccaaagncaaatattgggcaggnaatcngttctcactgggcccggnttccatgtaaaatctctgtgggggggggnatgggggggaccanctaangngaaggggnnttgnntttggttttgggnggtttnnnnggggggggggnatctgtgtttcacttcaaaatattggtttactgctaaacatcactctgaatttntgatgngggtactaacttcatacatttatcggcattgtccaaaatattttnttctttaatggaaaaagccattaatattcaaatgagggggtcacattaaaaaaaacccatacntaaganacagcctccaagaccattcaagccgcagtcagagagaaaaatgtttcgacagccaggttttcttcaaa

SEQ ID NO: 493260 - DNA, 87 bp, Homo sapiens
agccgggcccagcgagctcccgggaggtgtgtggacatcagccctgacggggaaggcgagccaggagcctgcaggcctgaaccaggg

SEQ ID NO: 493261 - DNA, 205 bp, Homo sapiens
accaggatgcaagccaagtcagtgctgtcagttgagcttctataacaaactctcccacacggggtgtcttaaaaaatacacattaatttctcacagggctagaggctgggaagttcaagatcaaggtgctggcagattgggtgtctggtgagagccagcctcctggcttgcagatggccaccttctaggtgtatcatcacatagt

SEQ ID NO: 493262 - DNA, 90 bp, Homo sapiens
tgagtagctgggaccacaggtgcaggccaccacgcccagctaatttcacttgatctcagctaaaaggtcgacaaatgataccagctaatt

SEQ ID NO: 493263 - DNA, 346 bp, Homo sapiens
taaatttgcggccggtctgacctaggaaattgttagaaacgtggattctggccaggcgtggtggctcacgctgtggtcccagcactttgggaggccaaggcgggtggatcacgaggtcaggagatcgagaccatcctggctaacatggtgaaaccccgtctctactaaaaatacaaggaaaaaaaaccaaaattagctgggtgtggcagctggcagctgtggtcccagctactcaggaggctgaggcagcagaatggtgtgaacccgagagccggagcttgcggtgagccaagatggcgccactgcactccagcctgggcaacggagcgagactctgtctcaaaaa

SEQ ID NO: 493264 - DNA, 1638 bp, Homo sapiens
  misc_feature (1288)..(1289): n is a, c, g, or t
  misc_feature (1298)..(1298): n is a, c, g, or t
cctgttctccgccgggcaccgctttgtgctcattgccgcctttgtttgggggccagcatgattgatgctacgcatgggttgtgcccacagaaagaccgagtgttggtccctcgggttccggggatttccctcggtgatattttcgtgtacgacgaccacgcgctttcctcgtgcccacagcaccccctattgccggtgtgggccaaagacacccacgcccccccttttcccggaagggccgcgcccacaaaaatgggggcgccccctacaggaggaaagagtgtggttgtggcaccaccagagttgttcgtaaaagaagaagaattatgggtaaatgagaatgaggttgagaaacggccaccacgcccgtagatagggtcgccgccaagaaataaaggagaaatatagtttgggggaagacgaaccacgcggttctggtccacatccccccgggggctcccctcaaggggggacccccacgaaatgttggccacaattcttgggaaatggggttctttccacaaagggtgttcctcgttgggtgtgtttttttggagaaagtggaaggttcctctttgccgtgtgtagatttatcgccccaaggaaaattgtgatttgggagaagagtttggcgccatttgttattatgggggaaaaaaatgcttctacaagatccctgggagagttgtatttctcgtagaaaggaataggtgttgttctccaccgcggcgttattaaaaaaacctcttgcccccctctggaagccctataaaaccttttcccacacctggggcgccactcggggagttttctctgaatgaccccgcgctggtagcccccagaaaaattgggtggtgtttcacaactcgggtttcccacacaaaatatttgggcccacagagcacccaacttgagattttgaaaaggccttctccacccctctgtgagagtgtctcacacagagctcatccccccgagcttgggtgtgatactctgggactctttctgtgtctctgtgtatctctgtgtgttttgggtgttttacactcataaaaaaaaaactctctcacccccactttcacagagttaccccggagaaagacgcccttctctttattttgtctctcacgtcactccccacacacgggtgtcccgcgcacacatttccgccgagaatgagaagagttgtagtttggagaattatcactggagaccccgcagagagggtgtggtcacagacccacacatatgagactcttgagaaagagaagtgggggtgtcacataannattggagtntcccacgagcacgccacttggaggaacaagacacactatggaaaagggctctgccccactgtctatttgtattcctctctcccactcgagaggttctttcggttatgagaaaagtataaaaatgtctcgagaaggaggccccaagtttgaaattggggaaagctcactggaggctttcactggtgaagcgcacgtaagtttctggagaaaaccacctcggggaacgagaccacggtgctataaagttgaacgcaggctgaatggatatgaaccccccgtcccagaaatctgttttaagttcagacttccaatagtggccaattaaaagtgctatttgtga

SEQ ID NO: 493265 - DNA, 784 bp, Homo sapiens
gattcctgaagctgagcagacattcgtgtccgagatgtctcgctccgaggtccttagctgtgctcgcgctactctctctttctggcctggaggctatccaagcgtactccaccagattcacggtttactcacgtcactccagcacagtaatggcaagtcaaatttcctgaattgctatgtgtctgggtttcatccatccgaacattgaagttgacttactgaagaatgcgagaggagaattgaaaaagtgcgagcattcagacttgtctttcagacaaggactggtctttctatctcttgtactacactgaattcaaccccactgaaaaagatgagtatgcctgccgtgtgaaccatgtgactttgtcacatgcccaatgatagttaaagtgggatcgagacatgtaatgcagcagtcactggatggtttgaatgatgccgccatttggattggactgaacttccaaattctgcttgcttgcatttttgtaatattgatatgcttatacaacttacacttttatgcaccaaaatgtacggtttataactaatggttccacatggaccatgatcttcctttaataattctaacttttgagttgctgtctccatgttctgatgtattccgagcaggttggctccacaggttagctctaatgagggctggcccactttacaggtggtggagccacaaaattctctttatccacatcaccatcttgttccgatttgcctcttcaactcttgcctcaaactgtaacaaaataacctgctaattaactcc

SEQ ID NO: 493266 - DNA, 203 bp, Homo sapiens
  misc_feature (134)..(134): n is a, c, g, or t
  misc_feature (140)..(140): n is a, c, g, or t
  misc_feature (194)..(194): n is a, c, g, or t
tgtaagaggtaagtaaaagatttcaatttgattcttctagagggggaaaagtagttgaaagtaggtcttcattttgcagtcatcaacctgtacgaattcttcatagttgaccttgtcccgtcgccaacaaatancctgcnttcccctgatcatttccatcctacttcttcaacctgttagcttttcccccaagnttgtcaatg

SEQ ID NO: 493267 - DNA, 663 bp, Homo sapiens
  misc_feature (19)..(19): n is a, c, g, or t
  misc_feature (69)..(69): n is a, c, g, or t
  misc_feature (71)..(71): n is a, c, g, or t
  misc_feature (82)..(82): n is a, c, g, or t
  misc_feature (85)..(85): n is a, c, g, or t
  misc_feature (93)..(93): n is a, c, g, or t
  misc_feature (98)..(98): n is a, c, g, or t
  misc_feature (121)..(121): n is a, c, g, or t
  misc_feature (142)..(142): n is a, c, g, or t
  misc_feature (144)..(144): n is a, c, g, or t
  misc_feature (147)..(148): n is a, c, g, or t
  misc_feature (151)..(152): n is a, c, g, or t
  misc_feature (154)..(154): n is a, c, g, or t
  misc_feature (182)..(184): n is a, c, g, or t
  misc_feature (188)..(188): n is a, c, g, or t
  misc_feature (237)..(237): n is a, c, g, or t
  misc_feature (262)..(262): n is a, c, g, or t
  misc_feature (271)..(271): n is a, c, g, or t
  misc_feature (274)..(274): n is a, c, g, or t
  misc_feature (276)..(276): n is a, c, g, or t
  misc_feature (288)..(288): n is a, c, g, or t
  misc_feature (301)..(301): n is a, c, g, or t
  misc_feature (307)..(307): n is a, c, g, or t
  misc_feature (312)..(312): n is a, c, g, or t
  misc_feature (334)..(334): n is a, c, g, or t
  misc_feature (340)..(340): n is a, c, g, or t
  misc_feature (383)..(383): n is a, c, g, or t
  misc_feature (427)..(427): n is a, c, g, or t
  misc_feature (429)..(429): n is a, c, g, or t
  misc_feature (441)..(441): n is a, c, g, or t
  misc_feature (468)..(468): n is a, c, g, or t
  misc_feature (503)..(503): n is a, c, g, or t
  misc_feature (512)..(512): n is a, c, g, or t
  misc_feature (648)..(648): n is a, c, g, or t
gcagggtggacagcaaganttaggacaagctaaaatcatcccctatttagaaaaaaaaaaaaaaaaagnanacaccagcaantantcccgggngggangtgggggcagaataaaaaaaaanctgcaatgattcctaattgtntnggnnggnngnagcgtggggggggggggggcggccaggnnngggnggataggcacaacttccaggtagtttttgggaagggtatgaggtccgangcaggctggccccttatcccccagntgccaagangangnctactggcagcncccccaaacttcnggctgncaccngcattgtcactgtgtccaaaancagcanccgggggcgcgccagggtgtcatggccaccccgggacacaccngccaggagcaacgtgtgggggttcttgttaaccggcactttgtntnacctctcacaanggtgcattcccaagaacttcacaatantacccacagcctcttcaagtgtcttgatggtaganaaggggaangtttcctccttctcaaattcatcccctacctcatcccaggctgcttcgaagttcagtttcatgaccttttgaatgtgatcagctacagtaacttccagatcttccagcacatactcatcctcatagccttcgtcancagtctccccagcgg

SEQ ID NO: 493268 - DNA, 329 bp, Homo sapiens
cccctccccgtgtatatatatttttttacctttataatttgccaatcttctctagtgttccaattttagcataggcactgccgaagagagcacaggattggcgcatttttatttttttttggagatagtctctatctcttgcccaggctgggttgcagtgccacagtctcagctcactgcaacctttgtctcccggtttaaagcgattctcctgcctcagcctcccaagaaactggtattatagtcgctttgccaccacgcccggttaattgttgtatctttagaagaggcaggtttttgctgtgttgcccagcttggtcttgaactcc

SEQ ID NO: 493269 - DNA, 323 bp, Homo sapiens
  misc_feature (34)..(34): n is a, c, g, or t
  misc_feature (37)..(37): n is a, c, g, or t
  misc_feature (47)..(47): n is a, c, g, or t
  misc_feature (65)..(65): n is a, c, g, or t
  misc_feature (70)..(70): n is a, c, g, or t
  misc_feature (102)..(102): n is a, c, g, or t
  misc_feature (130)..(130): n is a, c, g, or t
  misc_feature (136)..(136): n is a, c, g, or t
  misc_feature (285)..(285): n is a, c, g, or t
  misc_feature (299)..(299): n is a, c, g, or t
gattcggctcgagggagcaactgcccatgctggncgngcgcctgggncccggagagcaagcgcancgcgnaccctgtacacaggcttttccatcctggtgantctgctcctcgctggccaggccaccacngcctancttcctgtaccagcagcagggccggctggacaaactgacagtcacctcccagaacctgcagctggagaacctgcgcatgaagcttcccaagcctcccaagcctgtgagcaagatgcgcatggccaccccgctgctgatgcaggcgctgnccatgggagccctngccccaggggggccattgcagaat

SEQ ID NO: 493270 - DNA, 564 bp, Homo sapiens
cgctggcggcgaaaagcgctccaccgccccttcggccgcagcctcgtgcctctgcctcagccgcggcgtcgtcgcccgcggggggcggcgccgaggcgctggagctgctggagcactgcggctgtgtgcagagagcgcctgctgaccctgagagggagccccgcctgttgccctgttttgcactcggcctgtagtgcctgcttagggcccgcggccccccgccgcgccaacagctcgggggacggcgtgggcggcggggcgacggcacctgtgtttggacttgtcccgttgttcaacgcaaacagtgcttctccaaagactatcggtggagaaattactttcatgctgtgatagttggcagcaaggctgccaccgaggcccaggattgcgaaccagttgctgcacttagcttgttgaggataattgccccaagccaccaagcttactgtgttggaagtgctcgagaagccctcttgtgtgagaaccttgtgttagaggcggcaaacagcggggtgaagttacaccaagggaccattactgttgcgctctacgtggggccatgca

SEQ ID NO: 493271 - DNA, 488 bp, Homo sapiens
agttgaagctggcaggtatcagtagcgatggtgtgtgtagggcctgcaatctctatcttacaccaggtcaacctttcggtactatagaaactgtgcaggcaggcatgtatgtatatggcggcactattcacaatagcaaagacttggaaacaagccaaatgtccatcaataatagactggataaagaaatccatttatggataatgcagccataaaaaaggatgagttcctgtcctttgtagggacatggatgaagctggaaaccatcattctgagcaaactatcgcaaggacagaaaccaaacaccgaatgttctcactcataggtgggaattgaacaatgaaaacacttggacacagggtggagatcatcacacaccagggcctgttgtgcggtgaagggagtggagcagggatagcgtaaggagatatacctaatataaatgatgcagttaatgggtgtagacacaccaagcatggcaccatgta

SEQ ID NO: 493272 - DNA, 426 bp, Homo sapiens
  misc_feature (18)..(18): n is a, c, g, or t
ttttaccatctcaaccanggggactcttagcaaaggattttttgttgtcaaaataaagttaaattttgtccattagtttttgccattaaatgtattttatgagactaggtcattaacctaaagcatttaccgatggtttttaatttaccagaatatttgaacacccaagaataccctgcaacccctggctgtgccagttaactatctgactatttcaattccaggaagtttgaactattgtaaataataatgactttttctagtatttctaggattcatcaaaatccagcaaccactctgaaattaaactttctcttttctctcggcttttctaaaaagagttaatggtttaataattagattttatattatctctaggttttcagtgaagcataatggattaattgatggctactagaatttatt

SEQ ID NO: 493273 - DNA, 1146 bp, Homo sapiens
agcggggcctccgtgaggcggcctgggctgatggcggcggagtttttgtccataacgtgggcaaccggcagctggaggatggcctcactcgggccatgccgcagcttggggagcatggcgtctggggcgcttgaaggctggatgctggtgcccctgctggtacccgtgtctgcctgccggcgccttgcaccgtccgtctcatgggggcccctttggtccctcacttgctagacggtggaactcttcgtcataacaacttggggcaggtgcgatctctaacgagcggtcggcttgaatgtgaggcgcgttccggccttgtaccttcttacaagctcggaagccttgtctgaagccgaatagatgacggcctttccgtaacgctggggcacaggggatcggcggtgccgcctcggcgccgctccggattgggtaggggaccacggacatggctgacaaatttcccacccgggtatcacatacgcacaaacatttccggcagtgccataggggactgagcacctggtgctcaagctcctgtcaccggatcacttcgtttgtgaaccggaccccgagttgtgttagcaaacgctgaggtacaggaggcatatttgggactctagaccctaatacgggtttccggaggcacaccaggatagagaaatgccgcgtagtggtacgtggccgcgtgggccaacctgtttgtgtgctagaggtccacctccggcgcactagagcgccccttattcaccacatatggcgtcgaactgaccgattgggcgcatgtcggaagggaacttgttcactcagtataacgttaagttttcccacgcggaccgtttggcaacaataggtcattgcccaagaacaagctgtggggggggctcacccccatgggtaaacaacacacatacatgggctgtacatgttggagacccccgacacctctatcctatcgtagtgtacgttaaacccgtgagggcgccctctagctaaggtaaatagagacatgtacgcgaggcgcacagtgtggtcccacgaccagagtgccaccgtttagtgcgggcaacagatggctccaaccatcaacgcagtgtggagttaggtgctaagtcggaagaagctgtgttgtcaacttaccagacagaa

SEQ ID NO: 493274 - DNA, 158 bp, Homo sapiens
tgtaggagtagtgcaaggacttgcaaggacatacccctagagtagtacagtaccacggattcctagcctccctgagaccctgagtacctgccatctaactagtagatcatatgccccacccgctcgggggatcctacaagagtacgacctagcaggca

SEQ ID NO: 493275 - DNA, 256 bp, Homo sapiens
  misc_feature (54)..(56): n is a, c, g, or t
  misc_feature (78)..(78): n is a, c, g, or t
  misc_feature (81)..(81): n is a, c, g, or t
  misc_feature (119)..(119): n is a, c, g, or t
aaattattctaattcggctttaatctcctttaaggctttagtatatattacttnnnataaataggacggattaggtgnctnccttttcctttccatcccttgccccacccatcccactnaaccctagcttcattctccgcagctcattgaacaaggtcagcagaaagcagtcagactaatttcttctttcctgcactttcccactgtatctttaactgtgttcacaaggatcctctaaaccctctctgtgcccaag

SEQ ID NO: 493276 - DNA, 167 bp, Homo sapiens
ggttcatccatgttgctgcatgcgttagtacttctttttttttctgagacggagtttcgctcttgtcgcccaaactagagtgcaatggcgtgatctttggtccctgcaagctccacctcctggattcaagcgattctcctgggtcagcttgccgagtccgctgcatt

SEQ ID NO: 493277 - DNA, 92 bp, Homo sapiens
gcgataacagtgatagtttttaactctatggtcattgtatcacttctggaaaaatgtggagtagctgtaataaatctactccctgtattaaa

SEQ ID NO: 493278 - DNA, 555 bp, Homo sapiens
  misc_feature (312)..(312): n is a, c, g, or t
  misc_feature (376)..(376): n is a, c, g, or t
ggggggagggatagcattaggagatatacctaatgtaaatgacgagttaatgggtgcagcacgccaacatggcacatgtatacatatgtaacaaactggcaggttgtgcacatgtaccctagaacttaaagtataataataaaaaaagaaggtgtggatggttccttgaggttcgtcaccgttgtcaacagagcagcacagggtagcagtggacttctgaagtacacaagtgctacccactttcacatggaaaaggcaacccaaatagtgaatcaaatctgtatatttactggaccatataccatcttagtnacctctattctgagtacattgatgaaaaaaaatttttttagtaaaaataaaattgaattaaggntacataataaacaacaaaactcatcagggtattttcattttaagattaatgagggccgggcgcagtggctcaagcctgtaataccagcaatttgggaggccgaggcgggcggatcaggaggtcaggagatcgagaccatctggctaacacggtgaaaccccgtctctactaaaaatcca

SEQ ID NO: 493279 - DNA, 250 bp, Homo sapiens
ctcttcaggatcttctggcgcgggatcctggggaacggctgggcgaaggagcccggcctggtcttgcgtggacgagtgtggctagagctgggggaggacactccccacgtgtactgggagcctgcaggccaggcctgctgtgtgcactctatgcctccctggctctcgtatcagtgactgagcgagtgagccccgctagcctgtgtcctgtgcctggccttgtgagttctccatctagggcagagtgtat

SEQ ID NO: 493280 - DNA, 105 bp, Homo sapiens
tgttactgacttgaaaaactagatgacccaccaaaaaaacagacaaacaaaaaacctgttagaaatgaaaaacctcgtggtacctgagctctgaattctgtaatc

SEQ ID NO: 493281 - DNA, 454 bp, Homo sapiens
  misc_feature (229)..(229): n is a, c, g, or t
  misc_feature (252)..(252): n is a, c, g, or t
  misc_feature (256)..(256): n is a, c, g, or t
  misc_feature (261)..(261): n is a, c, g, or t
  misc_feature (264)..(264): n is a, c, g, or t
  misc_feature (279)..(279): n is a, c, g, or t
  misc_feature (284)..(284): n is a, c, g, or t
  misc_feature (307)..(307): n is a, c, g, or t
  misc_feature (325)..(325): n is a, c, g, or t
  misc_feature (334)..(334): n is a, c, g, or t
  misc_feature (342)..(342): n is a, c, g, or t
  misc_feature (367)..(367): n is a, c, g, or t
  misc_feature (369)..(369): n is a, c, g, or t
  misc_feature (387)..(387): n is a, c, g, or t
  misc_feature (398)..(399): n is a, c, g, or t
  misc_feature (422)..(422): n is a, c, g, or t
actccccataaggcattgatcaggattatggtttcccgttctgaaattgacatgaatgatatcaaagcattcttcagaagatgtatggtatctccctttgccaagccatcctggatgaaaccaaaggagattatgagaaaatcctggtggctctttgtggaggaaactaaacattcccttgatggtctcaagctatgatcagaagcctttaattatatattttcatccnataagcttaaataggaaagtttnttcncaggnttncagggtagctccctncatgntgaaaaatatagcctttaaatcntttttatattataactcngtataatanagataagncccttttttaaaaatgttttccccnanccataaaaccctatacangttgttttagnnccaatacatgagaaagatgtttntgtagctgaaaataaaatggcgtcccaagcca

SEQ ID NO: 493282 - DNA, 357 bp, Homo sapiens
gtcttgctatgctgtccaggctggtcttaaactcttgtgctcaatgcagttctcccacctcggcctccccaagtgctgggattacaggcgtgagacccagtccattgcttctttttttttttttttttatggaaacgcatttttgctctgccgcccaggttgaattgcagggttccaatctcagctcactgcaagtctccgcctcccaggttcatgccattctcttgcctcagcctcccaagtagtctggaactacgaggcgcttgcaaccacgcccagttattttttttgtaatcccagaaaagtataagtgtaccaccgttaaagccaggatgttctcactctcctgacctcatg

SEQ ID NO: 493283 - DNA, 706 bp, Homo sapiens
ccagcgtacgcccgagtaggaatcgcgaccacgcgtcgtctagaatatactatatcgctcacactcatatctcgctactatgtctagaaggaataatacatatcgtctgtcattatagctactctcataagcctcaacaccattccctcttagccaatattgtgcctattgccatactagtcttggccgctgcgaagcatcggtgggcctagggcctactagtctcaatctccaacacatatggcctagactacgtagataacctaaagctactccaatgctaaaactaatcgtcccaacaattatattactaccactgacatgactttccaaaagaacacataatttgaatcaacacaagcacccacagcctaattattagcatcatccccctactatttttttaaccaaatcaacaacgaacctatttagctgttccccaagcttttcctccgaacccctaacaatacccccgtccgtaatactaagctacctgaggtcctaccccctcgagagatcattggcaagccagtgccatcttatccagtgaagcgcactatcaggaataaaagactctacgctcgtctatagctaagtctccctacaaagtctcctgtagtgataacagtcacaggcagagaattaatccatatttgatatctggttcgaaaccacagcttatcgcaccgttgggtatcatcacccg

SEQ ID NO: 493284 - DNA, 138 bp, Homo sapiens
cgttataactatccatgatggtgactgtccatgctattctgttcgatattcctgtctttcacccgctagttgatcccacctcatgtgagactggcatgtgaatgagagcatttgccaaatgtgaggcggaaccattat

SEQ ID NO: 493285 - DNA, 313 bp, Homo sapiens
  misc_feature (5)..(5): n is a, c, g, or t
  misc_feature (7)..(7): n is a, c, g, or t
  misc_feature (9)..(9): n is a, c, g, or t
  misc_feature (15)..(15): n is a, c, g, or t
  misc_feature (148)..(149): n is a, c, g, or t
  misc_feature (306)..(306): n is a, c, g, or t
gttancngnaacaancacttaagagaaatatgttggtttgctgaatgcaggctacctaaattgatgcaagttagcttgagggagtgacgttgattgcatgttttgtatcaaaagaagaggtcattttaagcatttttccttcacagcnntttaaattggtctctgtggacacatggcttttaaattgctgtatgttgcagcagggatgttaactgtttgatgtccaagacttatagataactcattaaaagttatcttcaggctgaacaggtgtttaatttcaggagataaagatgataggaatgncccgggg

SEQ ID NO: 493286 - DNA, 437 bp, Homo sapiens
aaatgcttcactggttcctgggatatgtgagggcgctgcatatgtacatagatgtctttctgcacagcttcctcattgagtgacttgagtacttccttcctcgtgtgctggttgatgctagggcacaagcataggtcagcagtgctttggtatatacatggctgccttggtcaccgtcttgtgttgtcatccaggctgactacaggcaaaacagggcattgcgcacatcagggttagtgactgtaagaggaatctccgatagcgcgatggtgatatagtcggagaaggtcgcttcatcttctactcctccctgtatggcattgttgagcagtgatctatagctcctgtgtacagtcactgtccttatgcctctgggagagccatattaaggcttgggtaatgtgtgcgtgatcgatgaagatgtaggctcgagcttg

SEQ ID NO: 493287 - DNA, 95 bp, Homo sapiens
  misc_feature (12)..(12): n is a, c, g, or t
  misc_feature (26)..(26): n is a, c, g, or t
  misc_feature (29)..(29): n is a, c, g, or t
  misc_feature (40)..(40): n is a, c, g, or t
gccagcaccaancagacatctatctnctncatgtgcagtnctagcggggggacagatacgcagtattttggcccaggcacccggctgacagtgct

SEQ ID NO: 493288 - DNA, 217 bp, Homo sapiens
  misc_feature (5)..(5): n is a, c, g, or t
  misc_feature (7)..(7): n is a, c, g, or t
  misc_feature (9)..(9): n is a, c, g, or t
  misc_feature (15)..(15): n is a, c, g, or t
  misc_feature (148)..(149): n is a, c, g, or t
gttancngnaacaancacttaagagaaatatgttggtttgctgaatgcaggctacctaaattgatgcaagttagcttgagggagtgacgttgattgcatgttttgtatcaaaagaagaggtcattttaagcatttttccttcacagcnntttaaaagccatgtgtccacagagaccaactttaaaaagctgtgaaggaaaaatgcttaaaaatagct

SEQ ID NO: 493289 - DNA, 644 bp, Homo sapiens
  misc_feature (598)..(598): n is a, c, g, or t
  misc_feature (611)..(611): n is a, c, g, or t
aggaagtcgattatgatccagcttttcttccaggatgtcctcccgaattgctgtgccagcaaaatggagaagtactgttgagagagtaacatacttttcaagatgatgatttttgttgataatgctcccacacatcctcatttcattggtgatcttcatcccaatatcaaagtgttgtgtctccttccatataccacctctttgatccaaccaatgaatcaaggagttgtagcagtttttaaggcctattaaaagatcctaaggaggatctttgcccaggctattgctgcaactgaaaagcaccgagaggacactgatgcaattctggaaggtttacaacagctatgactgcatcaagaaccttgcttgggcatggactgatgtcaccaaggagtatgtgaatgacatctagaagacactgaagaagtttgttcatgacttcaaagaatctgctaaggatgaagaggttgcagaaatggacaaggctgtggttgacatggcaaacaactttaacctagatgtagatgaggatgacattgagaagctcctagatgtggttcctgaggaattgactaatgagctgttggaactggaacangaacacgccagcngaaagaaaggtgcaagaagaaaaaggaaactgc

SEQ ID NO: 493290 - DNA, 505 bp, Homo sapiens
gtgtagtacgcagctgtcacccctcctaatctagcactgatggctacgtcaagagttggcagcacaaagtgagatcgagaatcctggcgcacatagtagatagtgcccacacccatctctctactgaatgcctactccctcaaccagccactcatctctgactcgtgaggctcaaagagaacagatggcccctaggtgctctggttgggggtacgacggtcctaagagtcagtctttcaggcagtgacggctggcctgaaagtgtcagaagaagtggtaggtgggctcttacatccttgtgcacggtgggctcaaagcaaatccgtattgaccacgagtcatctgagtggaactatgaaacatgcctggcgacgcctgtgtccttggccccagaagtcactcatggaaacaccctatgacgtacttgttccgagacgcggcactgatgcaggcctcttggggcgcaccggccgggaggctacacacaggggatgggaccggccgt

SEQ ID NO: 493291 - DNA, 112 bp, Homo sapiens
tcactctgcaggatcccgacagcacagaggaggtggacagcacggaggaggactactcaaaaccatacctctctatgctgtccacctcctctgtgctgtcccacagaggagg

SEQ ID NO: 493292 - DNA, 127 bp, Homo sapiens
ccccaatcggccggccttcttagctgaggtctgtgtctggttattagcatcgttttcactttccttgggtcatctggaaaggccttggtcacccactgtgttctcacaccacagagtcaggcagtag

SEQ ID NO: 493293 - DNA, 194 bp, Homo sapiens
acacttgaggatcccgtgtgtcgagtaagataactgctcgaaatgtgatcatggttgtttaaaatctttacctctgcaattacctataaggcctttaagatcctgtactgatctgcctacccacaccacttcttcaaacctactctggccttgtcttttattcactcgtttcccttagtcaccattactctgta

SEQ ID NO: 493294 - DNA, 466 bp, Homo sapiens
  misc_feature (65)..(67): n is a, c, g, or t
  misc_feature (95)..(95): n is a, c, g, or t
attccagctcggtactcctaattggttcttcgatgacgccttcccccaaatacatacgttgaatnnnatcaagaggaaacaacattgtaaatcanctatacttcaggagttcccatcatggcacagaggaaatgaatctgactaggaaccatgaggttgcgggttcgatccctggcctcactcagtggattaaggatccagtgtggccgtgagctgtggtataggtcacagatggctcagatcctgctttgctgtggctatggcgtaggccagcagctgtagctcggattcgacccctagcctgggaacctccatttgccgtggatgtggtcctaaaaagcaaaaatcgatcaatcaatcagtcaactatacttccataaaataatttttcaaaaaagaggaaacaggagttcccgctgtgatgcaatgggatcagtggcatctcagcagcgacagcatggactcg

SEQ ID NO: 493295 - DNA, 250 bp, Homo sapiens
  misc_feature (65)..(65): n is a, c, g, or t
cttgttcatgggttcctcatggattcctcatggattcttcatggagtcctcatggattcctcatngacttcctctctggagttcctcactggattcctcactggattcctcactggattctctcatggattcctcagtggattcctctctggattccttcctggattccttcctggattcctccatggattcctccatggattccgtcctggattcctccatggattcctcactgaattcctccatggat

SEQ ID NO: 493296 - DNA, 481 bp, Homo sapiens
  misc_feature (21)..(21): n is a, c, g, or t
  misc_feature (51)..(51): n is a, c, g, or t
  misc_feature (60)..(60): n is a, c, g, or t
  misc_feature (62)..(62): n is a, c, g, or t
  misc_feature (73)..(73): n is a, c, g, or t
  misc_feature (89)..(89): n is a, c, g, or t
  misc_feature (97)..(97): n is a, c, g, or t
  misc_feature (135)..(135): n is a, c, g, or t
  misc_feature (152)..(152): n is a, c, g, or t
  misc_feature (154)..(154): n is a, c, g, or t
  misc_feature (158)..(158): n is a, c, g, or t
  misc_feature (214)..(215): n is a, c, g, or t
ccccgcctaagagggggccgnggctactacaaaggcacccctttcactagntttaaagcntngtttttaaagncttacatgctgttcangaccacgnaaaaaagctagaaacgggactacttaaaaattaatttngatagatgatttcttantngccnttcttggtctaaacttattaattttggtaatatttgatttaagtgtcttagatccnnttattttatacggaaagaaagatttagtatttcttacctgctatatgtaagttctgccatccggcatttaaggcgatcctcatccttcagcaatatgtatttgagttcacactatttctgttttacagcagttttgaaaaacacatactatgccaccaattgtcatattatttttagatgatgtaacatagccatcaaaattaatattatgtaatgcctaatacttagtatgtaaatgtcacgagatcatttttacattaaacgtc

SEQ ID NO: 493297 - DNA, 304 bp, Homo sapiens
cagagtccaaacagtgcccatagcccaaacagtgcccagagtccaaacagtgcccagagtccaaacagtgcccagagtccaaacagtgcccagagtccaatcagtgcccagagtccaaactttgccatacctcaacctgtttttttgattccacctgttttttactttggtcttttagaagcaggactttaattggatcaggtttttgtgttttaaacagtatctcagttttaacagtttgttcatttttatcatcctcttgttgttttactgtcacttatacttctccgttgtattggctttt

SEQ ID NO: 493298 - DNA, 428 bp, Homo sapiens
agcggggcttcaaatggaaaacgacgggcgccgcggggctgcaggcgcttccgcccccgccccgggcctggaccttcggggtcacctgactccgacctgcccgggccgggcggcacggggggtaaagtccgggccggggtcaggagcgcggctgcgggccgtggggggcggggtcccggagttctgcccctcgcagctccaggctcctcctcagcttccctctcctgcctcccacccccccgggggcggggcgaccctgggcaccgagacagacccgcgggtgggagatgcggggagaccctgggcgggggacccgagggtggagtgggcggggcgacttgaggcgctaggcctcagctgcgggccctggagccaggtgcacaggcatcgccgaggctgtcacgcctgtcgccaccaatgtctggacc

SEQ ID NO: 493299 - DNA, 120 bp, Homo sapiens
agggatacctatccagctaacattgtaaagcactgatcgtatagatagtagatgttatcaccatcagcaatttggattcccttctgaaaatccaccagtatattttggggaaaccaaaat

SEQ ID NO: 493300 - DNA, 130 bp, Homo sapiens
ttgggcagtctcacctaggcctgcagccatctgtcctgcctgaggtcaacggttccacagcgcaccaatagcggctgagactcgacggtgctgagcgcttgagtgctgctccacacccgagtgctagccc

SEQ ID NO: 493301 - DNA, 116 bp, Homo sapiens
tcctccatctctaatgtcacactataattgaaaacagttatctcgcctacatgttcatcagtcatattctgaactcatttagttctgaatcattaagcagagagtctctcttgtgt

SEQ ID NO: 493302 - DNA, 176 bp, Homo sapiens
ctgttcaccactcggtgcagctgcggccgcccactcacatgcccctaggccctgagacaggcggccttcattgagcgcctggcagatcgaacaggccccgaaggcctagaaccccccggagcagaagtccttcttcgccagactactggatgtacatcattcccgtgccgcacccg

SEQ ID NO: 493303 - DNA, 371 bp, Homo sapiens
ccctcttggctcattccaagcttggccaaaattggggaagtgggatggaggttgccctgcatcccccactcctctgcctgagtgtgtctttgtaatgtcagctggcatcatacaaagagcaggagaagcaaacacccagaactcttttgctggtcagagattcccacacccggaacgcccgcacaagcctcctccggagcccaattcacaagacttgagaccccgggatagaaatggggaaggggggccgggggaaaggtgcccgtgggactgctccccatccctcggtcctaatggggtcctgtttttcggggaggttgggggttggcgacagcttgaccttgtgtcttcgtcaataaactcacatttac

SEQ ID NO: 493304 - DNA, 128 bp, Homo sapiens
gtcaatgcttgggtcaggcttctatctgctcatctatactgactcaatccttacttagatctaccaggtctcacatcaaattttaattcctcagaacaactttccgaaaccatgctatctcaggtggg

SEQ ID NO: 493305 - DNA, 319 bp, Homo sapiens
cagtgagaatgtacttgcctagtggaacctgtactgcgttcaggagtcctcatccacagtgatgtgcagcagtggcacatcctacttcctgggacatgggctgctccacttgtaacagaggctctaaacacccaagaacaaaagaaaaccgccttgctggatgtttgggaagaatcagcaatgggacccagaagctgctggccgtgtggtgggtgtgcatttaacctgcatggagccttgttccccatcggtgtcctggggccaatgggagcaattgtccatgctccctggactctgttgtatactttgccagtgactg

SEQ ID NO: 493306 - DNA, 123 bp, Homo sapiens
gcgtgtatggtatgttgtgttggaagaagaggaggcgaggaggtggcctagatcgaatttccgttactgacgctatactgaccgcttactgatgctcgcttactgatgctccgcgtacttaaa

SEQ ID NO: 493307 - DNA, 104 bp, Homo sapiens
cacaaatcaggattcctccaagcgatgcagtacagagagccaaagaggtattgggaagaaatttcatgttaccctgagaataacggcgcaaagaaactaaagcg

SEQ ID NO: 493308 - DNA, 90 bp, Homo sapiens
  misc_feature (18)..(18): n is a, c, g, or t
ttttgggggggggggggngggggccccccccccccccccccccccccttttcctgggttttttggaaaaaatttggtttttttttgggga

SEQ ID NO: 493309 - DNA, 1014 bp, Homo sapiens
agcggagtgggcgggctgacactcattcagccgagggaaggtgatggcagagctatgagtgctgtgtgcttggaacttgccgtccccatacagacgccaggggggcataagcccatgaggccgagggctagacaaaacgacggccgcctcgagtaggaaggcacggccggtgcgtgcggcggtgagcagcatgtggatgagccgtgtgcgagcgggtgcagctgctgcgtgctggagactctgctagccgtggcgcaactgggctagccttgcggagtgtgtgtcctggcgcgcctgaaaggtcaccaagagatgcaccaggtgcgaatgcacctgcagcgtcgaggagcaatgatgcgactgagcggcccggatgagacttgccaggccgggaaagggaccagggcagtgctacctttaccgcaggtacccaacccgctaaactctcgaattcatgaggctgaggaggaggcatccagttagtaccaggtggtagcgccttgcagagtgacaacgcgtcaccatccacgcctgccgcttttacaacaccgcgctggtggggccgcacaagctttcggatgggtgtccgtgcgagtcttccctggcgtcactccgaagcgtgttcccgaaacaaaccccatgggccgttgccatggaatcctcgtggctgaaggccctggaatttcaccacttacatttgggcgacactatgcattggggaaattgaggggctgctgtggcacggagaaacctgcgtcatatgtgcgttgggcccacaggtagccatactgcataccgaaactcaccgagaacgggtgaaactgaagacacatttgggtgcaaccctggaatccagcaggtatcccgccattcctcacttcaattgcccttcccctgcaaccccagaatgggcttggcgagaaagggccgccggtgctcagtccctggggtgacatctcaagtgcactgggatatgggggagagtcgtgaagcacatgcccccgggcacattag

SEQ ID NO: 493310 - DNA, 933 bp, Homo sapiens
ataatcccctgggccaaaccgtcatctactctaccatctttgcaggcacactccatcacagcgctacgctcgcactgatttttacctgagtaggcctagaaataaacatgctagctttatccagttctaccaaaaaaataaaccctcgtccacagaagctgccatcaagtatttcctcacgcaagcaaccgatccataatccttctaatagctatcctcttcaacaatatactctccggcacaattgaaccataaccaatattaccaattcaatactcatcattcactcattccatacatggctatcgcaataaaacctaggaatagccccctttcacttctgagtccagagtttaccccaatggcacccctctgacatccggcctgctttctttctcacattgacaaaaaattaagcccccatcctcaatcatataacccaaatctctcccctcattaaaaagtaagcctttctcctcaatctctcaatcttatcccatcatagccaggcaggttgaatggtgattaaaccaaacccagctaacgcaaacatcttagcatactcctcaataacccacataggctgactacttagcagttctacctgtacaaccctaactataacattcttaattttcaactcattatatttatctacttaaaccgattcctacatactcattaagtcagacatgacctatcatattgcacttgaacaggcaactgtttaaaaccttatcatacgctctttctgggggtgcccgaaaacggttttccatggctatttaagcattcgacacaagctttttccatatatgactaaccctaaaaaattcaggataccacaacataccctaagagaaagggtaaccctcccccacgactttattaaaaaaaggtggatcgtgtgacccgatctctctcgataagcca

SEQ ID NO: 493311 - DNA, 895 bp, Homo sapiens
gatcctcatgcggcctcctgacgagcagcggctgtgcaaggatgaccaactcttggcctgatggcaagaccatctggacgagtgtggttcaccagtcaaacagagggcacaggcccactaagcacatagatgggcgctgcggttcccgggaagtatgacacctgtgtgagtgccctgtgcgttcggaggccgtttttcccaccgcctcgccaggaggcttgccctgatggtgattgaaaggccccaaggactcgtggaaagcaggtgccaagtgaaacaagccgtggcgggtgagactccagcaaagagggcccgttgccccaaaataaaagagattgggacggccagtcaaatttaactgtaaacactggggaaactttgaaaatggtcgtgtacaaggcaaaccgagaattcaccattgggggggggtgggaaaataacacacgcaacaaagtggtctataaacgggtttgccagtggtggcgcaggggcccaggtagcactaattaaagaaggaccgaggggattaaggtaagcttgtgagagggaaggaatgcagaagccgagaacgatgacgggctggccgaaggactgtgaaacgtcgtggggggtggaatcagggacaggtgggttctagaccccatgaaggatggtgttaggaggggtttccaccaggaatgttaaccgttaaaacggtgggggtgaggactggacgattgaatgaactaataatatgacagcaggggggcgggtgaatgaaggttcatgattaatgactaactatgtgtgcttggtaagcgaaaaaaatggggcagaaaaaatgtggtagtggcaataacaggctatatgtcatgagttccaaagatggacagtataagctatacaccaattagag

SEQ ID NO: 493312 - DNA, 883 bp, Homo sapiens
gtcttgcagtgggccggtgttgtgaccttttaggcgcctgcgcgccttcggtatcccctcggggggtcccaccctgtgcgagccgcgtttgaaggccctgccccgtgaattgaggatgctccggcgtacatttcaaggggtcacaaccccttccctggggcgtacaaatgtcccccggggggaaagatcccccctcttttggcgctcgggggacaggtggcccgcggttggctgtcttggaagattctgcccgtccgtccaaggcgggctcccccgacgcgtcgccccacacccgggggctgcttcgtcttctccgggcgcccccccgggtgccccccccgcggtcgaggctctgcgggtgggcgcaccaaactcgactgtggggataaaccgtcggtcggcggattcccccccctgcttgctccgcgagcgatcgttcggttctgaagcttccacgacggggagcccccatactttgttgtgtggcccggcgcgcccctaatgttgtctgatgacggtggagggtctcctcccccacgggtagtatggccttcctgccccccggattgcgggccctcctttcccctcccctcctaatgaggggcccaaggatcttccccgaaggaggatatcttatcatgggggcggcataaaatgaaatgacgctgattatagtggaggcccgaacccatgtgctggtcggttttctggggaagacaccattaatccccgcgatcttttaaaaggtctgctctatacgagcctccatccgccccttcttgtcttctttacttggtagcaagtcgacgggtctaagaacgaaataaaacgcgttctagcgtctttcccccaaaaaaaaatttttttcgcccacataatcaaa

SEQ ID NO: 493313 - DNA, 779 bp, Homo sapiens
tggagacagtctcgctgtgtcgcccaggagtgcaggggcacgatctctgctcatgaacctcggcctcccagattcaagcgattctggtgccttagcctcctgaggggctgggacttacaggcacgtaccattatacccggctaaaattggtattttcagtagagacgggtttggccatatgggccaggctagtcgtaaggtctctttttaacactgaatatgtagggggttcctggagggattagggttaacctagttaataataaatggtttccaggtaattatcaagtttggtcattttataaatctgaagagttaatatgggtcatcggatacaaataagcggtgaaatctggacggaggctaaaaaaaaaaaaagaaaaaaaacaaaaaacaaaaaaaaaaaaaaaacaaaccaacaaaaaaaaaaggggggggggcggcaaaaaaaaaatcccccggggggggccccaaatttatggcggcaccccgttttgcctggacacaaaagggggcccaaaaaagggggaccacataaaagaccgacaggcaccggggcgcccacgtctaaaaaacacgcccgtgggggcgcggggaaccaccaggctgccccggggaacctgggaggaagcagcccccatccgggcggcggggcaccctaggcgacaccacccccggagaaattaaacgccccgggaaaacacaacgcgcggggtacgggtgggaccacccgacaataccgccgcgagaaaatcccacggatgtagaaaaaatatcta

SEQ ID NO: 493314 - DNA, 670 bp, Homo sapiens
  misc_feature (273)..(273): n is a, c, g, or t
aaaaattagccggggcgcggggggagggggctggaatcccaggctactcgggagggtgagggaggagaatagcttgaactcagaggggagagggtggagtgagccgagggttggcgccactggaactccaggcctggggcgaacagaagtgggaactccggtctctataaaacaaaaaagaagatggcgtaactccgaagttgatattctggctattggattctggcttctcccctgggggtcttcttgggtccctgaagcccctcttccggngattccggcctctatcgggctctggctcctggttcttttctggtattggacatggatttttggctcaagggattaaagggaccacttcattgggcttctttggggaaacttggcaatctccccaaacagggcccctctggagaatttctctctttccatttggttctggtccccctttctccttttggcaacttcgatattttctccaggtttccttggattcctttggatacgtcccattcagggcactctgggcctccattcaaactggcagaactttttccacttcagcacttcagtcactttaacattaagggtccctggcctaaagggactccaaattctggaccagcttatgattagcacagctacacacaactcgagggggggccggtcc

SEQ ID NO: 493315 - DNA, 262 bp, Homo sapiens
  misc_feature (13)..(13): n is a, c, g, or t
  misc_feature (30)..(30): n is a, c, g, or t
  misc_feature (79)..(79): n is a, c, g, or t
  misc_feature (137)..(137): n is a, c, g, or t
  misc_feature (204)..(204): n is a, c, g, or t
  misc_feature (233)..(233): n is a, c, g, or t
  misc_feature (246)..(246): n is a, c, g, or t
gcaagggcgcccncaacgcgggaggcccantgtcgatggttgcttacgccagcagcgagtgagagcgagccggatgagntgagccgagccggagaagaggaggcggtggctcctacatctgggcccgctttaggggnattgttcgcttctctccctgcgcccaagggtccggccttgctgcctccgccccctcagatgctggcnccacttattccccgccgctgttgcttttnccacccaccgganaccccaggcttcagct

SEQ ID NO: 493316 - DNA, 103 bp, Homo sapiens
agcggtcctcccatgtcttgtgtgaggagcagagagaggtactggtcaggaaggaaaagtagaagggtcctgaagggcaaattagggtggtccaggttgtgct

SEQ ID NO: 493317 - DNA, 359 bp, Homo sapiens
gcgtcgacgatggatttgattatggcgaagaaagagcctgagggggaggtggatttacctcatgtgcacgctttgcttacccgtctgcgcgtagcctgacaataaacgtttttttttgtgtttttttgattaacgactcacctcttatctgaaggaagagccatgactaattctgaaataaaagcaaccctctcattctctgatggttcccaatccttagagatgccaatttacaagggatctatcggtcctgacgtgattgatattcgtaaattgtacggtgcgactggcatgttcacttacgatccgggttttatgtcgaccgcggcatgtaattcttcaattacttacattgatgg

SEQ ID NO: 493318 - DNA, 183 bp, Homo sapiens
gtgaatacatgaccaaatatttggtatcggagaggctttgagcaccagttaatctcattcctccctttttttcaatggcaccagctttttcagcttctattttcctaagtagcatttattcctaagtagcagggtattctagtagcatcttcctagacgagccatttgttcctggagatagca

SEQ ID NO: 493319 - DNA, 133 bp, Homo sapiens
gtaattctgcaccacagcacacccgtgggcttctgcaggtgtgcgaactgaccccattcccatggcagtgagggctggtgcctctgtactgctgtgcgctgagctccccaaagtcctgaggaggagcgccagt

SEQ ID NO: 493320 - DNA, 846 bp, Homo sapiens
agcggaatccgcagtgcacaacggttgtccgcggccgtaaggtgcatgggtaagccttgcatacatcatcaaagtgcatagcctttccaagatggtttatcagacatcactttgttcttgattctgtacatagcactccgagatgcctcaagcagagattttgcttgctgctacagaatgtctgcaaaagaaaataacaatgaggagcgtcgcgctgggccccgaccgccgggaggcgtcttgggctcgccccggagcttcctcccatgagtggcacaggtgactgctagcccgagtgcattgtctcagtgttccatacgactggatacccagaggacttgatatatcacgtggaccacaggtgctcacttaccccagaaactgtcaacactccttgtatcttgatctagtccaacaccgcgaacgtgttcatgctagagtctcacagctgggatatgggactgggaataggacagaccagagtggcctggattccatccatgtgttgcttcaccattgccactagaccacttgtgtttgcgcgatacctcgggtgcctattagctgtagttctatgcagaagaactgcgatcaagaacgtcgagaactgagggtggtacggagcaacacagcgcgctgccgttttgcaaggagcgccgcgaaattctcgattatcacgataagaaaccggggatgcgaccacaaaatgtgctcccacagtctagcagttaatcgtgccgacgaagaaaagtggtcgaaaccttgttcaacctccaggggcgtccgactctcgaaacaaatgtcggcaacacctttttctcaattcctcggccggaaaaaccccaa

SEQ ID NO: 493321 - DNA, 468 bp, Homo sapiens
ggtgaatgagtgagaccctgtttcaaaaaaaaaaagttggtggattcatgctctatattttatcccaaataaggaattagatgcagagcagaattaaaaggaagtaatttcaaaaaagattatcaacaatttaaaatgttgattcaatgaagtgattttttaaaaaaataaaaagccatagccttttctgtggcttttaatttaatttctacccccaagccatctacatatacacccaggcacttgcacatatgccttgcttaatatcttaagtatccggaataagcctcagtttaaagataaacttacagccaggcgcagtggctcattttaaaacacataacagcactcctaaactgcaccattcggttgccaggatttacaggacaattcccttggatgagagtctaatagactggtttgagaattgagtcggtgaagggaacgaatgctgttgctgatctgaag

SEQ ID NO: 493322 - DNA, 548 bp, Homo sapiens
ggatagatcgccatcatgaacgacaccgtagagtatccgcactacaaagttcatgagcaatgcgagcatacttcagaggaaacaaatggtcattgagtgtccttactagcccgtggaaggcgacagtgcctaagacagaaattcgggaaaaactagccaaaatgtacgagagagcacaccggatgtcatctttgtattgtggattcagtaactcattattggtggtggcaagacaactggctttggcatgatttatgattccctggcattatgcaacagaacaaatgaacccaaacgatagacttgcatagacatggcctgtatgacgaagaaaaagacctcatagaaagcaacgaaaggaacgcaagaacagatactgacagaaagtcatgggggactgcaaaggccaatgttggtgctggcaaaaagtgagctggagatcggatcacagccgaaggagtacaaggtgctgcaatgatgttagctgtgggcccaactggtggaatttttccgcaacgaaccattaatcaaactaaaagaacttcagg

SEQ ID NO: 493323 - DNA, 843 bp, Homo sapiens
tgccgctccacaacccttgctgctgcactcgtttgtcccccagttttgttttcccccctgtcacacgggggccccaaaaacttttgggggcctcttcccgaagaaaccttttacagcgaaacccttctcgggtaataccgcgcttctaccccgacctaagtagcccccgttcttgacgcgaggtcatatcaaatccccctcgttttaaaaatttctccggtcgattctttcccccaatggggcccccttcgcgtccggttgttttaccccgttttcccctagagagcgttgtgtgtaccgattaccccaatgtttccctgtcatttcatctgggcgggttttcaaagggtgtcacacttcaaacccttggttggtccaaacggggcaaatggcttgcggtaaattcgggtttgtctgagtttccgttttaacaagggtttctgtgtttaaaaaaggcttcaaggcctattctgaacaagggtttaactttgtttttaaaaacttgggttggggaattttcattttttttacccagcctacctattgccaccagtgtggaaacctaacaaactgggcggcacgacgttgtcctgttgtattgcgcaataaagctcataagggtcgctagcctgccctgaacttcaagagaaatatttctacatgtttgttcattctagtttatattagtcatttaaaatcctttaggttaagtcttaagactttattaaaagttagttttgagaaattgagacacaatactaatactgtaggaaattggtgaggcctgacgtaaaacgttctttgtaactgtgatttcctttggctatctcccgtggatgaaat

SEQ ID NO: 493324 - DNA, 255 bp, Homo sapiens
cagttcagtcgtgactggaaagatgcatcctcattctatggctgagatggaaaatatcaccaatggcttcactgaagacaggctctatgatatgcggggacataactcctccgaccttacagcagatcctgagcctactcgaatccaacaacgactatgctgatgactagctcatacctgtctgattctggttctactgtgtgagcatacaaaatccctagtcacacagtatttgaatgccacatggaaatcgct

SEQ ID NO: 493325 - DNA, 930 bp, Homo sapiens
gtaatttatttatgatgtgtataagctttgtatcattatgggtggttctcttttgtggatgtatttgtgtgtgtttcttgatgtattgtatgttgtgtgttggtgatgtatgattgttatgttgtagtgtgtgctctgtgtttgtgtgttgtcggtgtggtgttggcgtagtgtgtgttttagtgtatcttgtgtgtgtatctgttagtcaggtgttggtgtgttgatgtggtacaactatgtcccgtatctcgcgtttgtgtgaagccctttcgcctgttcggggtgttaccccctccccccccaattttgtttaccgctccttattggtctttttttccccgcgctatctgtctgggttgcgcgtattcttgtgccagggagcctgtcccgccaaatttgtttgtgtgcgcatccctttatacatgttttcacttgtgcctgttcccggaaaatattgtcccggtttttgtgccctttctcctcgggggcccttattcgctgggtgttgaccactagatgcgtccccgcggcatccttccttctgccaacgggttgttcctttccttcctttcccaggagagcaggcaatggcgggaaccccccgagagtaactgccctgtggtgccggaaacccccgcaactgtctggcctttcaactgcgatcggcagcaattccccgcggtattcttgtacatagagaccccagcgcctgttggtgagccacaagcaccaaccgcggggactatttcatcattgcgatgggaagtcaccgcagttgcttgttttcccggccgcccacagacgggggcatacacacagaggttcttcaaaagagatagttcccctccagggggaaccccccccaaacccctgcatccaaaagaggggggaacccctcccaaaaaaaacctttgggaaaaaaaaaaa

SEQ ID NO: 493326 - DNA, 124 bp, Homo sapiens
tgaaacttctaaaactaggcaaggaaggcctagtagagagttaggactttcaccatcactcagcagtaaccctagttttagaagtttcaatagcactcaatttttttcctctccccatccttcg

SEQ ID NO: 493327 - DNA, 1168 bp, Homo sapiens
cgcggagcctggtgagcgcaggcgcgagctgcgggcagaggctggagaggcggcagaatgcagccagaggagggcacagtgctggctgctggagctgctgtcctgaggtgcagctgcaacagtacttcctgcggctccgagacgacctcaacttgtctaccctgcctgtcccactttgagtactgtcaatgtaatgagtgacctggagaagatctggcatgggtctggcctggccagcggcggctgtgggagggctgtgaagcaggaggaagtgccttgtgcaaacgcaagtcgtggatgagtaaggtgtacagttggacaagctgacctggagtgcttgagttcccacctcatcactctcagagcaccttccggaagacctctgccctgcccctgggggcccatgcagggtgcagggggcccctgcagagcctcagctgcctcattggggaagaagggacctgcggcctacctggacgaaagctgggtgatggtatcctttggcgtgctgcgcacggggcgagtgtgaacggcggccctcacgtgaaagacggttgatgttgttggctgtgaagttgcctgaaagccctgatgttcctgagccacaggccagagagccactggcaccgacgttcatcacgtgagtgtcaaatggcccattgcaacttcgggtcggaccagccgcaaaaccctcatccggccttctagagtgagatgtgtgcgtcaactgcccgacatcatgaaagaatggctgactgctgcttggcacccacgatgggacaatccgatcaggattggaacaccgggcgataagattaaaggcccgccagtggtccgcgcttatcttcctgtgtgagaactctcgttgatgtcgcgccctaacgaatctgtatcaagtgtatccatgaatgatcacattggacattacctgtattatatcacagaggtcagcatgatacataccacggaggtaaacctgggtatgtccccgacaatctccggtcgagatggtgattgccgataagcatgcgggttaaaacaaagatggtgtgaactttgatgagccacaaatggtgacgagaagaaggctggtaaaatggcagaaaacgtatgcgttcagtacagttcaactatcaagaggtgggcccaaacgaagtattatgtcacc

SEQ ID NO: 493328 - DNA, 340 bp, Homo sapiens
tttgacaaaggaagaaatcttgaagggctcaaaatggctctgggcgacctcagtgtcattagttgcataaaactggtcatcggagtaggagaagcccaccccagctgtggactccaggtataacacatgggcaatcagattccaagaataggggtggtactccagggtgacaccatctggctggaccaggaaggggccaggctcggtgaggagcccatctagtgagctgcagccgggacccccatggagccaaagcaccacagggctgtgctcgggatccttctgggactccacaaaccagtaggggaggtgctgggagccggagcctttgaggtagccg

SEQ ID NO: 493329 - DNA, 119 bp, Homo sapiens
ggcccggtacagacactttgctgtgtatgtcctgggctatgtcactccatgaaacagccatcgctacaatgtcaccatgatctttgggagcatcttcaccagatctcacccgtctggct

SEQ ID NO: 493330 - DNA, 396 bp, Homo sapiens
tcatatcgtcttatgcccaatctctgcctccaaaaaaaagaagtaaaaactaaaaggcagaaatgaaatccacaggccgacagcccaggccgcaccctgggcctggtagttaaagatcgacccctgacctaatcggttatgttatctatagattacagacattgtatagaaatgcattgtgaaaatcgctatcctgttttgttctgatctaattaccagtgcgtgcagcccccggtcatgtaccccctgcttgctcaatcaatcaccaccctctcacacgcacccccttagagttgtgagcccttaaaaaggacaggaattgcacacttggggatctcggctcttgagacaggagtcttgccaatggccctcgctgaataaaccccttccttcttt

SEQ ID NO: 493331 - DNA, 371 bp, Homo sapiens
tagtggcaattggctccaggtttcccgggtgtccctgtgtcctgtgcttttgccctgctctggcttccctggctttctgatgctggtgccgttcaaaccgtgccgttatcccggctttttgagcacgctatgctccaagctcttcgcgcgcatcagctgggcattgacacctaccaggagtttgacatgaaagctatattccaaaggatcggaactattcgattcctgcattgatcccaaacctccttcttgcttctcggactcttattccgattgccttccaacattgggggaaacgcaagtcgaaattccggtctaagagcttggtgccgcatcttcccctgctcgctcattcggagtcctcggcttgg

SEQ ID NO: 493332 - DNA, 706 bp, Homo sapiens
ggaaaggtcttgggggccctgggcctgggtctgcgggagccccatctagcggggttccaaggcggcggcggcatcagtcgaggccctgctccgggagctcatctgtcccctttcgccctcacgccccccagtctgactccaggccctgtcccctgagctctgccctcggatgtccgacgccagagcctgcatcgccggggagccagaccccaaaggaaccacggaacgcctagcgtgggtccggggccccctgggcgggggtcccggggcgccccatcctcccttgggacccgttgtcccggtcctggtctttcccccggatctagtattcagggcggaccagcggagcggaccccgacagctgctgaccctcttagtaaaccccaccaaggcaactgcgcttcgcttccgagcatgctgattcgccatggtggcaccccaactttccccaagccacatatgattgctccaggaaaccggcttttccgggcaatttgcacgccatgctctgaggaaggagctgagcggccgagtggtgggacgcaaggacattacctccattctgagagccccagcgtacccccttgagcttcagcggacacgcagatcaagcgccctcgcccaggcctcctgctgggacaaacacccaaaccccaaaacaccacaacaccgggaacccaaaggcacaccaccctcaccccaaagc

SEQ ID NO: 493333 - DNA, 415 bp, Homo sapiens
tttggagctgccagtgcactccagcctgggcaacaatgagtgaaactctgtctcacaaagaaatgaaagaaagaaagaatggctctgcagtcagctgtaagtaaataccaggcactggtgtgctcacaccttgtacatcccagccgcttatgggagtgctgagtgcagcatggcgtgatacacattgatgtccgaggattttcactgaccatgcctgtggcaactgtggcaaaaccgctgtctctacaaagaaataaaaaattagccagtgttgtggtggtgcacacccataatcccagctactcagggggctgaggcaggaggattttgcttaagcccaggatgtcaagcctgcagtaagctgaggttgagtcactgtactccaggcttggatctccaccttgagatcctgtct

SEQ ID NO: 493334 - DNA, 954 bp, Homo sapiens
gagagagtggggactgtccggctacgaatcggcgacgtgtacgttgtgccatcgactatagagagaattagatatgggtgatgtagaaaaaggcccgaagatggtattatcgtaaggtgtgcccactgccgcaccgttgaaacatgggagtggaaaggtcaagaatgggccaaatctcgaatggtgatctttgtgcggaagagaggtcaggcccctggatagttcttacgcagccggcgaagtgaggatcgataaggcatcgatctgggggagaggatggaactagatggagataatttgggaagaaatcccataggaagtacattcctggggatgaagacatgatctttgtcggcattgagaagaaggaagagagggcagacttaagtagcgttatctcaagaaaagcgtatgtgaatgagtaataattgggactatgtggttattgatttactaagatacagaaatgtctgatgcatgttttgatgtgtaccatctcttcaatagatctcaatacaccagaattcagatctatgaatgagtgaccagaattattttgttgggcaagctcatggtttaaaactaagagtggttgtggttaagatgaatatgttcagagagaaggtggactgagaacgcccaattcagtatcatggtattagtgtgtacccatttaagatttgatagacttgcggcagtagtgttacttgtcataagatggtggtggctcttagactacgggagggggtgaatgaaatgttacgggcgtgaatgttagtgggggagaaggtccgtgttaagcacaaagaactcgttggggggcaagccccagaggggggaacacacgagggcccatgggggggagcacacaaacgggaagggtataaggaaggggtggtacaaaacaccctcggggaaaaaagctggcaaatagtaaaaatgtattctacagca

SEQ ID NO: 493335 - DNA, 296 bp, Homo sapiens
ctagctttaccctgtttaaaaacgtagtcagacctcataggtccttgctgtggaaaaacctgggggagaatgactactgggtacataacgaaatgaagggagaaataaagatgttctttgaaaccaacgagaacaaagacaccagataccagaatctctgggacacattcaaagcagtgtgtagagggaaatttatagcactaaatgcctacaagagaaagcaggaaagatccaaaattgacaccctaacatcacaattaaaagaactagaaaagcaagagcaaacacattcaaaa

SEQ ID NO: 493336 - DNA, 869 bp, Homo sapiens
ctagtttcctagccccgcgctcttcgtatccttcccagcctgcgccggagccatcaactttcaggagcatggacgtgaaggcgccctcgccccagcgcccctctgagatcctttgtgttttcctccgtttcctccggccgtattctattttggggggctctccgctccccctgcatctccccgtccccgttcccctctcgcgaaacatgcctccattccttcaccaggggccctcggaaggagctgcctgcctgaagcccggagacgccgcgccgagctcagccccgccgccgaccgccggctctcgaggcatgtgctgcgcatgccgactcaagtatggggactcctcggaatgctcgccagacgaacgcccgcggttccctgcctgccccaggccccagggcatcgaacgccggaccgaacagaatcacgaagacacctgacaccgaatcgagacgatacacataccatattattaaaacgagaaaaggcaggccattaacatcacgaccgaaccagcgatcagtccacacagacgtgagactacatgacgataacccacggataccaaccagttacatcagaacgaatatcaaacaacgagagagaggggacagccaaacacaacggggcaatttaccccgagaagaaacataccgcaaaaggcaaaaaacactagggagcaacccaatcccagaacgcacaaacaagaaaaacgtaacccccgaaagtcaacagacaaaagaaccagcaaagcacacgaatgcacaaaaacacagacccccacagcaacactcacaacaccgacaaaaacgaaccaacagcaaacaaggcacaaacagccaaagagaacactacactatacaaaa

SEQ ID NO: 493337 - DNA, 1212 bp, Homo sapiens
taaatagttaaaaaattttatcctaatagctataattacagggctgtgttggtcgaaatgaaaactgaaaacaagttttacaaaacaggtgtgattacctaattcggtgtattgaaagcagttaagaggttccacgacaccaaattagaccagttctgaggttcccccaagataattttaacagcctccagctctcaggttgttatactcaaaattcacaaaagacacaacagatagcaggtgtgctacttttccagatggcaaattcggaccctttgcaggctgcagggacagagaaaagctacatctcacacacaagaggtggaggtgcctcccgaggggctagtgggtctacggtgagacccgcctagcccggtttgcacagcgctcctgcctggtagaggccccagactatcctgccaaagtggtctgagcgagcacgagttgttgggggacgacggacccatctctggccacacgggagaccgagggacagtatggggccctgcgtcccataaggtcggcctgaacggtggttaagggcggcctgcggcataagggcgacgctggctgtgggaccccacagcctggccccgtgtgaaaccgtggaagcccagggcacaagcacattggctatgcgacatgccaggggtgacacccaagggcacaaagcgaatcgcggggactctctacgtgtgaccatgcgcatttgatcgcaatcatgtggcgcctccagcgacctcctttgttcctccgcagtggggacaccaagtcgtggtttggcggactggggctttcccgggcctgtacagttggcaatcccttatgctaaacggggtgtcccccctgtcgtgagtgttcccaggtgttcctccgactgggattcttgcaccttgtttgcggcacgatttggcctctggggattgcggggggttacaaacaagccgcatccacgcaaaatagtggagttttacattcacatggttcttaaggcatcctagagggggtttgggccggattctctccccaatatcgaaagggaaatcacctgggcgacgcccaggggtccccctgtgggcagtctaaaagcccgtctgttgagagtagaacacagcgactaggatcgttgtctgtggcaacacttaaaacactcgccagttggaagcaatggtgaaagaagatacgcaaaactgctctctgggtacacacacg

SEQ ID NO: 493338 - DNA, 760 bp, Homo sapiens
tcgatcagtagagctgagttgtaatggacacgagaaggtgtaccggctgttgctgaaatacggtgatgcctgggtgaagaagtatgatcgctcctccctgcggaccctggggtcagtgggagagcccatcaactgtgagtgcctgggagtggcttcacagggtggtgggggacagcaggtgcacgctggtgagacacctggtgtgcagacagaaacatggtggcatctgcatcgcaccacggccctcggaagaaggtggcggaaatcctccctgccatggcagatgatggcccttctttggcatcagtccccgtcctcatggatgatgaatgggcagcgtcgtggagtggcagcaactgtctcctgagtggccctgtgcatctcccagtgccatggcctggtgcatggccaggaccatctatgtgcgaccaccagctgattatgtggacagcctacttcaatgtgcctacccatgtgctattacattcacatggagactggggcttacctgaactgagggcggatatataccagatcacatgggctggatggatgatgtcatcaacatcatgtggccacctggctgggtgaccggcagaagatttgagtgacgccatcgaccgaccaaccctgcagataccagaaagtgctgtcattggctacccccacgacatcaaaggagaggctgcctttgccttcattgtggtgaacagatagtgcgggtgactcagatgtggtggtgcaggagctcagtcatggt

SEQ ID NO: 493339 - DNA, 231 bp, Homo sapiens
ggtcgaccaacaacttagccttggcaacaaagcaatatcccgtccttacaaaacaaacaaacaaacaaacaaaaaaactaattggccaggtgtgttggtgcatgcctacagtcccagctacttgggaggctgaggcaagaggatcacttgaacctagggagttcgaggctacagtgccctatgatggcaccactgcattgaagtatgggtgacaagagcaagaccctgtcc

SEQ ID NO: 493340 - DNA, 140 bp, Homo sapiens
tggatttccatttttaataaaaaaaaaattttatttatacagaattaaccttctctgtatatatgtgcataaaggtggtgggtgctaaattcatactaaacaacacttatattctcaataaaggggagtttgaaacattt

SEQ ID NO: 493341 - DNA, 828 bp, Homo sapiens
atcagtaggctgaggcacgagaatcgcttgaacccatggaggccaattgctgcagtgagccacgattgcaccagctgcactctaacctgagcaacacagactccatctcactaaaataaataaataaaaacaaacttgtaagagatgcccctcgattattttactaagtcgtggagtacagccattaagtttgaggtctacagctcagtataacgaacgtgactgtgtactgcccaaaaggcaacatattttgtggaagaaattcaccacggaattctttgggggctatctacttcaatacattgtcagtaggggagttatacccccttttataataacgttggtgttaacccgtacagtcttaaccaaggcattcttaatcccagtgaagtgccaccaccatttcaccctgtttcccaaacgtggtaccatagaaaataatcttgacataatcttcctatcacttggtcatcaaagtcctgtcatttttccaccctttgtaaacatctcttaaaatgtgtcctacgttcttcaccagacccttaattttaagctaccatcagcaccttttgcctgcgttgactgcaggttgtctcctaactgttcttcctgcagagaattcttggcccgtcccctgtatttcacgtcgagttgccatgcaggaattctccttttgcgttccgaaaggttcaatttttaatcaaggaaaacgcaagttaactttgcattttgcaccccttgctttaatatggctcgaatgggttttaattgggcccttaatggactgacaacggcacattttctgtgcgccactattttttgccgcat

SEQ ID NO: 493342 - DNA, 936 bp, Homo sapiens
tggcgctataacagctcccccccgctgtatgggccccttttactataatcggcgtcgaatcgtctcctccggggctgagccccccacgttctctagggccccgcttggacccgaaagtttttcctggaagaggagttaccgcctctggaaaaatgagccaaggttccaaaaatgctgccgtaattttagcgaatttaaagcataaaatttagagagaaatttaaccttacgagagttccctcgggaggaaaaataaaaggttttttaaacacacgcggaggggtgaatataaaccttctcttcctcgggggttaaaaaggtgagttgaaagaagattttagagaaaggactttccggcccccggtataatccccactttggaaggcgccaatgctcttttatgaaagttaaaattaaagggtaagcctttaaacacgcagtaaggttataggttgtaaaaggtgtaaggggggagttaaaataaatttgtaagggccgagtttctttttaaataagagagttttacccccaaggggagtttaaaacgcccctggaaatcacccgtccccacgggagagaagttgctgtcacttttaaacgctatgttgtaacgcacttcttcttgaccgccgagcgcgacaactggtgaacggaaattattggtggatagatgtgtaataggagttgagaacacctttgtgagaaaaaaaatagatagttttgaagtgggaaaactgggaagacacgaaatataccgggaaggtcgtaataaaaagagaataataagagaagaatatatgggaaattatataaagaataataaaacacaatcctttatagataaagaaaaaagaattaaattttaaacatcaaaattgggaaccaaaaaaaaaaaaccaattgggaaccaaaaataagggccaaaattaccaaaaa

SEQ ID NO: 493343 - DNA, 215 bp, Homo sapiens
gtttcaattcccacgttacttataaagaagcgttggtgaattttcacaaagctattttttgcgagtattttttagagtatttttaagaatttcacaagctatttccctcacatctcagggagctgagtaacaccatcgatcatgatgtagagtgtggttatgactttaaagtgatagtggtttatatgtgctataataaagagtgttctgcaaaa

SEQ ID NO: 493344 - DNA, 614 bp, Homo sapiens
ctgcggtgatctagagtgatccccacgagtgcacacacacagaagacacaacatccaaaaaaggagtgtgcgtgtgtgtggaataaccacccagccgcttgtcacactgccccataatctccaatggacttttaaaaccaacaaaagccgaaacggtggcccagaggctgctcctttgttatcccatgctttctaattcaagtcgaatgactgctttggtcacacttttttagtcacagtaaaaaatcacgggcgccctctggcatgcatgacatgcgataatcagaaaaggtaccactcccgtgttttttgtttctgaatatgtctgttcacggaccacaagggcatgggtcaccaatccgaagtggatgggactaaaccattgcgccttagaggccctcaattcaactacgaaccctttaacagcaacagcattaatatacgcttttggagctggaattaccgcgggtgctggcaccagacttgtcctccaattgttactcgattttggatgggtttaaatatcccccattgaaaacgacaatgcaaaagcactgtcggctctatttcttttcgctgcctcatcttattatttagaactagcgcaattcgcc

SEQ ID NO: 493345 - DNA, 131 bp, Homo sapiens
  misc_feature (11)..(11): n is a, c, g, or t
  misc_feature (17)..(17): n is a, c, g, or t
  misc_feature (31)..(31): n is a, c, g, or t
  misc_feature (53)..(53): n is a, c, g, or t
  misc_feature (91)..(91): n is a, c, g, or t
  misc_feature (103)..(103): n is a, c, g, or t
  misc_feature (114)..(115): n is a, c, g, or t
  misc_feature (119)..(120): n is a, c, g, or t
  misc_feature (126)..(126): n is a, c, g, or t
aatgtccttangtggancagggggtctgaangtacacctggaatttactgagnaaacttgtttgtaaaaactataagttaataattaattncattttcttacnaaaatatattnngggnnaattgnatact

SEQ ID NO: 493346 - DNA, 145 bp, Homo sapiens
ccccatattatgaggatatgcagtgtttctcggtgtctagggaaaaacagagacccacgttcccagacagcctggagcagaaaataggccgggtaagcaaaaaactagagttattaagagagacggacttatagacgtgaaatgt

SEQ ID NO: 493347 - DNA, 437 bp, Homo sapiens
  misc_feature (145)..(145): n is a, c, g, or t
tgtggaagtttgaacttgagagtgatgattttagggtatctggcagaaaaaatttctaagcagcaaagcattcaagatgcgccctggctgctttcaacaacctatggtcatatttgtgagcaaagaaattatgttaagttggaantatatttacaggggaagcagagcgtaaaagtttggagaatttgcagccagctatgtggtagaaaagaagagcccattttcagggaaggaattcaagcaggctgcagaaatttgcataagtaaaaaggagccaagtgctaatggccaagaaaatggggaaaaggccttgaaggcatttcagagacctttgtggcagcccctccctttcaccccaaggccaagtttaaaactgtgcattttgaaatcttgcaatgttgatgatgtaaaataaatcttttttcctgtgtttttga

SEQ ID NO: 493348 - DNA, 355 bp, Homo sapiens
caatggggtcctaaggccatagtcttgctccttaaagcccaagtggcttgggaccacctacaggtctcttgttctccaggaacaagaatgctagaatgggctactctcgaggcttcaggacctggttggagagcttgttttagaactagtatatttatttcttccccaagtatgttttactgcctgtgaaaagtccaaaaagacaatctttatataaaaatggactgtgttgacagcctcttccctaccttgggcccttgataaatgtttattggctgaaaatcggatgaatactgaattttaatggatctcaggtcttgtactttttttcccccttttatgctccatggaggtt

SEQ ID NO: 493349 - DNA, 328 bp, Homo sapiens
  misc_feature (144)..(144): n is a, c, g, or t
tgtacctgtgggtatcatcaactaaggaagggtcccaggttggggagagccccaagcttgagaacaagtaagtgaacaattagttgtactgaagccacttgttacgaaacagctagatcacaaacaacctgtgtgtaatatgtnttctcctacacaacgtagcacccttcagcaggaccctataaaactttcctccagcccttgcctctttgcaggtagccccttctctgctgagctgcccactgcaacatattttcacaatttctctaataaatctgcccttctttacctacaactatcttggtaaatggctttactacctgcaaaa

SEQ ID NO: 493350 - DNA, 117 bp, Homo sapiens
catggatttgctggtgcagtacaactaggcttaatagggagctcgaattcgaggctcgaattcgagattcaagcttctaacgttagaagcttgaattcgagcagtagtagtagtagg

SEQ ID NO: 493351 - DNA, 964 bp, Homo sapiens
  misc_feature (209)..(209): n is a, c, g, or t
  misc_feature (233)..(234): n is a, c, g, or t
  misc_feature (236)..(237): n is a, c, g, or t
  misc_feature (963)..(964): n is a, c, g, or t
cttttaaatatattttatatactgagtcattctattaggaaggatcatattatatataaaagaacatcactgctgttgatattatcaaattatttatacaaatttctgtggttcatttttaataaggtcctaaaacggagacatcctgctctcaagaggtgctgtcatcttcctttcatgtagattttcggggaaagatttactttatngaaagaagaaagggccgggcacanngnntcacgcctgtaatcccagcactttgggaggccgaggcaggcggatcacctgaggtcaggagttcgagaccagcctggccaacatagcgaaaccctgtctctcctaaaaatacaaaaattagttgggcatggtggcacacctgtaatcccagctacttgggaagttgaggcaggagaatcgcttgaacccaggaggtggaggttgcagtgagccaatatctcgccattgcactccagcctggatgacagagcgagactcaggaaaacaaaaaaccaagggagaacgctttggtagctctggttattaaacacttaaggtgattgggattaaccaaaaggaagttacatcaaccctccttcaaatttggccctgtgggcttcatttttagaagatgttcccggtaacctgaagggaaattcttttggcccaggggaataacttggaggattaagcagttctttcacacatcatggagagcggacacattaaagcacgtgttcaaaatgtcacatttaacctcgggaattcactgacaataatttaacccagaatgccttcttcacacattgataaaactatcaaggtttattacctaaaggaatcacactccggaagcgcagcagaacagaaataaatccgtggaaaataagtttaacatttaacacggaaaggatataaaatcagacacaaaagaaacaccttgcaatatgtctctattatataccnn

SEQ ID NO: 493352 - DNA, 122 bp, Homo sapiens
gattttatttaaataaattcttataacaataaaaaattaaccctagggtgggggtgcacactaataatcccagcaactcgggaggctgaggcacaaaaatcacttgaccccaggaggtggag

SEQ ID NO: 493353 - DNA, 143 bp, Homo sapiens
  misc_feature (22)..(22): n is a, c, g, or t
tgggggcccccgggtcccttgntgggggggaattttccagtttttcctccgttttccaggggccgctttttttataaaaaccctggtcattgaatttaaggccccccccaagtccagaatgaccttgcaagaccctttattca

SEQ ID NO: 493354 - DNA, 358 bp, Homo sapiens
actgacccgggcctcccctgtgtgaggaggacacgcctgccctggtcgagaaaaaatggagctaaaaagcccgtttcgctagaagggagcgaccaggcaaaataggtattaccaatgagaagacccgcttaaaaacaaggttatggtcagactacggcttataagacaccctgacatattcagttgacactatgccccaacaagctacagctatggatgtcgtttaagcactaataacggcttactcaaggtaacctggctaaaacctgggaatccaggaatacgcaatttcctgagaatttggacaaacaatggtacaagcttatacacaaagtgcacttgttcaattgtctgtgtt

SEQ ID NO: 493355 - DNA, 558 bp, Homo sapiens
  misc_feature (44)..(44): n is a, c, g, or t
  misc_feature (73)..(73): n is a, c, g, or t
  misc_feature (176)..(177): n is a, c, g, or t
  misc_feature (233)..(233): n is a, c, g, or t
  misc_feature (238)..(239): n is a, c, g, or t
  misc_feature (244)..(244): n is a, c, g, or t
  misc_feature (250)..(254): n is a, c, g, or t
  misc_feature (287)..(287): n is a, c, g, or t
  misc_feature (301)..(301): n is a, c, g, or t
gttttatttcatgtgtgtggatttagtactgatatgtcatagtngtgcacgttttagggatacatatgttatnttgatacatgtatacaatgagtaatgatcaaatcagggtaattgggatgtctatcaccttgaatatttatcttttctttgtgtcgggatatctattttaaatnnccatgctcgtcacctatgagactggaaggacaaaaaaatattttaaatactcgtcnttggnnggatntggacnnnnnggctctcatatactgttgatgagaatgccagtnggggcaatattttnggaagttaacttggcaatacttatcaaaattctaaatgcacattcttattgaccaggtaacataacttttagggatttatcttccagataaactggcacaaatacaaaatgatatatgcacaagtgtgttcactttagcattgttataatagcaaaattatgggtgcaatttgtatggttgttgataggagagaagtggataaatgatggtacttccatctaatagaacatctgacctttaaaaagtgtcagggtag

SEQ ID NO: 493356 - DNA, 330 bp, Homo sapiens
gattataggcgtgtgccactgcacccagcctgagttaaatgtttttaagatgagcttaacttgttcagtaacaataaaataatgtattttgattttttttttcccctggaaagtatgttgtcagtgatcatggaaaggccttgggatgcggtgtacatgctttcatttgttttgttttcatgccttcaaataaaattttaaaactatctgggccgggcatggtggctcatgcctataatcccagcactttgggaggctgaggcaggtggatcacctgaggtcaggagttcgaaactagactagccaacatggtgaaaccccgtctctact

SEQ ID NO: 493357 - DNA, 706 bp, Homo sapiens
  misc_feature (580)..(580): n is a, c, g, or t
  misc_feature (644)..(644): n is a, c, g, or t
  misc_feature (694)..(694): n is a, c, g, or t
gaatgtaataaagggtattcaattaggaaaagagaaagtcaaattgtgtctgtttgcagatgaaatgattgtatatttagaaaaccccatcatctcagccccaaatctcctttaactgataagcaacttcagcaatgtctcaggatacaaaatcaatgtgcaaaaatcaaaagcattcctatacaccactaacagaaaaacggagagccaaatcatgatgaactcccattcacaactgctacaaagagaataaaatacctaaaaatacaacttacaagggatgtgaaggacctcttcaaggagaactacaaaccactgctcaaggaaataagagaggacacaaacaaatggaaaaacattccatgctcatggataggaagaatcaatatcgtgaaaatggccatacgtcccaaagtaatttatagattcaatgctacccccatcaagctaccattaactttcttcaaaagatttggaaaaaaactactttaaaatttatatggaacaaaaaagagcccacatagcccatacaaatctaagcaaacaaaacaaaacataacatacaaactaaatacaacanaaaaacataccttgcagcattacgctacctgacttcaaactatactacaagggcacagtaacanaaacagcatggtactggtacccagtattatagaccaattggaccagacanaggccttgtttt

SEQ ID NO: 493358 - DNA, 409 bp, Homo sapiens
gccattagccgacatacaccatctgctgagactaggtctactcaaagttgttctgaatgtattaaatataggtcatgctgagccactttaagtcattgatactagtcatttatttacctatttgatgctcccttaactttttttttttttttttggaaagggattttcgctcttgtggcccaggcgggagtcaagggcacgatctcggctcaccgcaaccctcgcctccggggttcatgcaattctccgtgcctcagcctctccaagtatagtagggattacaggattgtgccaaccacccccggttaatttggtatattaagataaaaacggggattactccatgtgggacaggagggatcaaaaatcccgacctcaaataatctgcccgcctcggcctcccaaaatg

SEQ ID NO: 493359 - DNA, 250 bp, Homo sapiens
  misc_feature (1)..(2): n is a, c, g, or t
  misc_feature (11)..(11): n is a, c, g, or t
  misc_feature (14)..(14): n is a, c, g, or t
  misc_feature (17)..(17): n is a, c, g, or t
  misc_feature (20)..(20): n is a, c, g, or t
  misc_feature (25)..(27): n is a, c, g, or t
  misc_feature (31)..(31): n is a, c, g, or t
  misc_feature (33)..(33): n is a, c, g, or t
  misc_feature (36)..(36): n is a, c, g, or t
  misc_feature (39)..(42): n is a, c, g, or t
  misc_feature (49)..(49): n is a, c, g, or t
  misc_feature (57)..(57): n is a, c, g, or t
  misc_feature (73)..(73): n is a, c, g, or t
  misc_feature (95)..(95): n is a, c, g, or t
  misc_feature (119)..(119): n is a, c, g, or t
  misc_feature (162)..(162): n is a, c, g, or t
  misc_feature (164)..(164): n is a, c, g, or t
  misc_feature (193)..(193): n is a, c, g, or t
  misc_feature (208)..(208): n is a, c, g, or t
  misc_feature (210)..(210): n is a, c, g, or t
nntgcctttanccntcnagntttgnnnggcntnttnccnnnntttttanaatttttnatcaaatttatggtcnttatttcctcaaatacattttntgtcccagtatctgtctgggcttntggtgacactccaattgcacatacattacaccacctgccattntntcccaatcactgacgatctgttcattccntaacaatagtttttntntatgtgctacagtttggagaatttctactgacctgtcttc

SEQ ID NO: 493360 - DNA, 222 bp, Homo sapiens
tagctactgtataataggtaaatagtgtatgttggggggcaacagtttttatcctgttccctactttgttactaagtgcaaaagatggaaagcattgtcattcaaaattgaagtccaagcagaaaaaaaggactactcaaattgaaaaggcagtgcttagttcagggatgcttcaagcttatttgggttctctctccccacccctgtgttcttttaaagatt

SEQ ID NO: 493361 - DNA, 324 bp, Homo sapiens
agaaagcagaaatccatgaacacattgcttctcggccttttggctaagatcaagtgttagaaatccatgaaccactaaagggacttcattgattttttccagagagtagaaaaccacctttaggttttgctttttttcctgaatgcgtcataggcttgtgagtgattttttgtccattccaattgtgccttctttgtattatgataagatggggggtcctcaggagatcacaagttgtgtgaggattgcattaccaaccttatgagccttcaatgggggaggccagaaggtggaagggggcctgcaagttcatatggtgggttt

SEQ ID NO: 493362 - DNA, 539 bp, Homo sapiens
  misc_feature (64)..(64): n is a, c, g, or t
  misc_feature (149)..(149): n is a, c, g, or t
ctacttgacctgcccgggcccataaaattggcccaggccttgttgctgtctctgccccagcgantcaatgacagtgccctcagggccctgacactgcccattgttttcaagaagtatgggcctgaagccctagcagggaaccaagcctncccctcccttttagaagcccaagaagatgtcctcctgctagacgcgcaggcccaggttaagggctcagaagatgcagccaaagtggaaggtgggggccagacccagcagctgagctgaccccccttcagggcagtagcccaggagagatgtttgtgctgatttttatgccatcccttctggaagtgatgcccccttagaagctgccacttagagagaagcaccaaacggagaagccggccttgtgttcccccaaagaatgaaggaggatgtaaagttagaaaattgccagagaattttgaagactttaaaaagcccccccctttagctttttttcttggacagaaacatattccctgctttgaaataaagggaagggctctcctgtttta

SEQ ID NO: 493363 - DNA, 380 bp, Homo sapiens
  misc_feature (27)..(27): n is a, c, g, or t
  misc_feature (29)..(29): n is a, c, g, or t
accgcaaactcacatacaagatatttntnttttaaaacagcatacctgagacaacagtgaacagcgttatcgcctacttggaaatagtctcaacgtgcatgtagtagctaaactaatcaaaccttatatgaataattttgaaataactctgaaagatggtcatatgatttttcttcatttacagagacgcaaaatgaaattctgttttgaactaattctggtgaaaatgaacataaataatttgaatctgtccttattaacgaaattcgattttattccacaaatccatgtgcttcataatttttatttttcagagtcaaaacaaatactaactattaaccatactggggggccccctttactaaactcatctcactttc

SEQ ID NO: 493364 - DNA, 107 bp, Homo sapiens
  misc_feature (4)..(4): n is a, c, g, or t
  misc_feature (7)..(7): n is a, c, g, or t
  misc_feature (60)..(60): n is a, c, g, or t
gganaangtggtccaggagagtttcccagagctgccctcagaggagtgaaagggacattnggctgaagtctttctctgaaaaagccaaaggttatagggtacactta

SEQ ID NO: 493365 - DNA, 829 bp, Homo sapiens
taaaagggatcgaaaaaatttcggtcccagattattttgtcaagcacaaaactgcccccccttcttaaccttgccaatgccccgtgctgatagccacaccatctctttgcacatcctcctcgtgtatttgatcgcctagacattctccaggaccttttctaggctcttatttccaatccccccttttttggccctttcgtcaatttctctctgaatttcccctgttacacctgggtatctgcattttgagtcagccgtgttgcactaagggtgtaacctctgtcgagtcccccctgcgcgcgctttatattcatctctttcacgcccagaccaaagccctatacacactatgcgggtcaaaccacccaaacctgtatgtgcaaaagtcggtctagccccaataattatgcgggaaacaacacgtttctcctacataatgatatattcaccctttttccccccaagcttgtcttttacaccctgttcattctgtctatacctctcattacccctctgatacataggcggggcaccattatataacggggcaaactgcggtgtttctaaaatttttctgcaccagcatgcttcttgtaatgcacgctctctctccccatccccgtagcaccccttggccctctctccggttgattcatattagaggactatacaatcgtccttagatctggtcttatgacagcaggagttgtctgcctgtgagtgcccagcacccaccacgggggtggttgcagcgggtgcgaaacgaaaaaataggaaagaccatttgaacggcgaacacccaaattattctttttctttctacaaaaca

SEQ ID NO: 493366 - DNA, 418 bp, Homo sapiens
  misc_feature (94)..(94): n is a, c, g, or t
gaaagtgggtttccggcaacgaatcacgaacatgaacatcaaagggattcggcatgggaaagggtccctcctgtgctggctggctgggtgtcanaacctggctcctggtgtgcagagacgtgtggccccttggcccaatctggtcccgggcgggggctggccgaatggcagggtgaacccttcgaagaactggtttgaacgggccggtcggtctggtccactacatccacaacaacaactggtaagcccacatccatttcatctatttctgagaagggccttaatggatccggttccattggcaaggcttcttttagttggtatctcttttggaatccatggcttggggtggtaacagggtctcctcttaaaaaataaaaagctggactccttagagacatcaaaatctaaaaaaaaa

SEQ ID NO: 493367 - DNA, 304 bp, Homo sapiens
gagcttataagagcatacccctcacagctggcattatgtagtcaccccagaaagcatgggtctcaatgagcccacagtcatacatagctagtaatctttagctttattacatggaattaacaggagacagatatttccccagtacagccagacaagcacttggcctcttcatccttaggcctaaggtgtaccgtgagctcgtgagctgtgagaacgagaatagtagcgttttgctcagcccaggcactaacagctgtgtgacttgtaggggagtcactccacctcatctatcgagtaccggtac

SEQ ID NO: 493368 - DNA, 334 bp, Homo sapiens
  misc_feature (3)..(3): n is a, c, g, or t
  misc_feature (47)..(47): n is a, c, g, or t
  misc_feature (87)..(87): n is a, c, g, or t
  misc_feature (159)..(159): n is a, c, g, or t
  misc_feature (197)..(197): n is a, c, g, or t
cangggaagccctgctgttgcctgccagctgaactgggagcaataantttggcacccttgaagagaaaaatttacctcaactttaanttttcagtcagaatcatgaaagttgaatcaattgagatgtctacggtgttggctactgtttctgctgtgaantgttggtcctttttagttcaggcatgaacaagattacnttttcctcacaaatttatgtggatggtctgccagtgtgggcttcatcttttacatcatctaataccttcttaaaacaagttacccatttataagctgctaattttgggacgtcattattctataaacttttcataaa

SEQ ID NO: 493369 - DNA, 158 bp, Homo sapiens
tggagcgtgcttggtggcgtgcttgatgctggtccctttggatcgtggtgatttagggggtgaactcatgggaacgggatgctggcttgtgtaatcttactaggagctattagaagggctaggaccaaacctatccattcaacatagggtaccgggct

SEQ ID NO: 493370 - DNA, 119 bp, Homo sapiens
agcatgtgaacaggacacgcaagagcgtgcaagaagcctgtgaggtgaagaagggcaaagaccccaatgcccccaagtaggcccatgtctgcattacgatctgtgtgttcaatgccagc

SEQ ID NO: 493371 - DNA, 561 bp, Homo sapiens
tgcagcggctcacacctgtaatcccagcactttgggaggccatgatgggcggatcacttgaggtcaggagttcaaggccaacatgatgaaaccccatctctacaaaaaatacaaaaaattagccgggtatggtggtgggcatctgtagtcccagctactcgggaagctgaggcagtagaattgcttaaaccctggaggcggaggttgcagtgcaccaagattgtgccactgcactgtagcctgggcaaaaaaagagcaaaaccccgtctcaaaaaaaaaaaaaaaaaattggagtaatattagcagagattttccaaatttatggttagacaccaaaccaaagattccaggaagctttagagagcaccaggcgggataaattcggggaaaactcgaaaactcctaggcatattcatatttcaaacgggggaaaaagagacaagagaaagatttttcaaacgagagcaaggagaaaaccagttttttaccttattagaggagcaagagattaagcattacacgggaatttataagaaaaccatgcacagcaagaaagagagg

SEQ ID NO: 493372 - DNA, 1344 bp, Homo sapiens
  misc_feature (390)..(390): n is a, c, g, or t
ggagagagtctccttggatattagccgtcccaagatgccaggaggtggtggtaaatctacagtatgacgtatggcagcggtatgaagcgagaggccactgctagacgagctctatcaaggattgtgtgcagggagcgtaactcggatcctagtgatccacagggcgaaggtggccccttgtgcagaccctctccaaaggctttgaccttggtgcccttcccactctccgtctccgatcatcgtcttcttgtgaccatgaggaaggcctttcgcactaagccagctagccccccgcagcagccatacagtatcaccactatgtcggcagaatgggaggcgcggcttccatcagcatgaacttggcgcatatcggagctcgcatagtggtgnaaaacacctctctgcttccacttaggtagtttattaagcacaagtctccacattggattccatgacacaatcaacctataagactcagtcaatgcctttgactctgggtcgttggccaggttgtgttggctccctatccggggggcaacgggattgtgtgcgacgcttcttatagagcgtgaacagtgaagcttgtcgccagatgtagtggtagttggtgtaatggtcgctcgactggcttgattgcttattgagttgatgagtacatccaacaaacgattcaaactggccacgttagatacccgtctgttggtgtcatattattggcgagagccactcagggcgcaggatagcctacgggggaaggtacggctgaggagtacgactgcgcgggcaaaaggacggtgtgtgtatcagcgaacggcggccctaaacaaaaaggtacatggctcggaagggttggaacgcacccgtatgtgccctttacaaaacagccttgtggtgccctttgcttaacctatagattcgtgtcctaaggacagaacggtcctgatttgatcggcgccctcaatgagaagcgacaccggtcgaatcgtgggccgaagaggcacccaagcggacgagcataagagacacacgcgcggggggaggttgtagttacacaccacccccctatgcgtacagcaacatgtgggtcgggcatacattgaattcaacaccataatagtggcccgaaagaaggggccccaccaacgcctgcggacatgttcgtgggcgagaacaaccataggcaccccatttgtagtgtgccgcgagagacgaatgaaaagacaacccgcctggaaggaaccggaaactggccgcaacaagtatcgagctgtagagaaagactcgcgggagcgtacacaccatacccagatgagataacacaccgccaggagacagaaatcaccg

SEQ ID NO: 493373 - DNA, 719 bp, Homo sapiens
tccaattgaactctgaacttttaattgggcctcctgctccccaaagggtaccctgcttctggcgggctaaatgcctcaaaatcttggtgggctcattgggctctcaaaacaccacctttgtgccactccaacatatctccgggcgggtgtggagtggcatctttggagagtggatatggcatgtgagaagatgagcgtgcgtgtcacagaggacattcatccgaagatttaagagatccgtcgaccatcttccagacaaggcggcgagaaagagtgggcgaacacctcagagcctacacagagctaagaccctctagatgtgtacaagaagggggccatcataacatccctggaggcacatggggggcagagtacaccatacttagccacgaggggatcctgaggagcccagagatctgagaccctacaaggggggagcaagaaaaagaaaacacccgcagagatagaaagcgcagtggtcaaacacaaatacatgtagggtaagagggggcagaataaggagagggagaccccctccacaaaccactcccccacagaaggagcgcgaggaatacacactcacaaaagcgcgtgggcaaccattaacaagaaataagcccatacagtgggaagacacacaaggggtagaaaaccctccagggggaacggggaaacgtggaaaaagactcaccaagacctcgagggaaaaacaagataga

SEQ ID NO: 493374 - DNA, 288 bp, Homo sapiens
ggggcggtggctcaatgcctgtgctcccaacacctttgggagtgccgaggcgggagacacatctgaggtcagggtttgaaccaggccagccacaaggtgaaacccatctctacagaaataagaaattagcttgggcatgctggcgggtccctgtaatcccagctcctggggaggcttaggcagaagcattgcaccgcacccaggagggcggagggttgcttgtgagcccgagcccacttgcacttccaagccctggggtgaccagagcaaggactccgtctcaaaaaa

SEQ ID NO: 493375 - DNA, 596 bp, Homo sapiens
  misc_feature (460)..(460): n is a, c, g, or t
  misc_feature (514)..(514): n is a, c, g, or t
gttgtggatcatagcttgctgcaagcttgatttctggctcaagtgatcctcccatgtcagcctcttgagtagctgggactacaggtgtgcaccaccatgcccagttagtttaacaaaaaaagtttttagagatgggatcttgctatggtgcccaggctggagtgcagtagtgagatcatagctcactgcagcttcaagctcctggcctcaagcgatcctcctgccttggcttcccaaagtgctgggattataagcatgagttagtcctctgcttagattttaaaatctcaactccactcccttctatgtgcgtaaacaggggaagtactgaatttccctgagccttatcgtactcatctgataaatggatctaacagacctcccttacagggaatggactggggaggctgactctgtcaagcactaagcacagtgcctaaagcatcagaggcatcctttntttaagacgaagtctcactctattgcccaggttggagtgcagtggcacgatctnagctcacagcagcctctgcctcctgggttcaagtgatccttcgtgcctcagcctcccaagtagctgggactacaggtgtgca

SEQ ID NO: 493376 - DNA, 347 bp, Homo sapiens
attgctaactcataataagtatataacccgtggaatgtgtatgcatttgttattagtgcgtgtgcatttgtagtgtgtgtgtagtatgtgtctgatctgtatgtgtgcctgtatatgtaagcatgtgtttctgatctgtgtgctcaaatctgtggtgtgtgtatatgcgtgtgtgtctgatgtgtgtgcatctgtggtgtgtgtgcgtgtgtgtgtctgatctgtgtgtgtgcatctgtggtgtgtgtgtatgcgtgtgtgtgtctgatctgtgtgagtccatctatggtgtgatcgcgtgtgtgtgtctgatctgtgtgcgtgcgtctgaatgtggaggtagcaca

SEQ ID NO: 493377 - DNA, 1583 bp, Homo sapiens
  misc_feature (36)..(36): n is a, c, g, or t
caggtgcgccccgccccctgcctgcccggccacctncgggagccgcttccaataggcgttcgccattggctctggcgacctccgcgcgttgggaggtgtagcgcggctctgaacgcgctgagggccgttgagtgtcgcaggcggcgagggcgcgagtgaggagcagacccaggcatcgcgcgccgagaaggccgggcgtccccacactgaaggtccggaaaggcgacttccgggggctttggcacctggcggaccctcccggagcgtcggcacctgaacgcgaggcgctccattgcgcgtgcgcgttgaggggcttcccgcacctgatcgcgagaccccaacggctggtggcgtcgcctgcgcgtctcggctgagctggccatggcgcagctgtgcgggctgaggcggagccgggcgtttctcgccctgctgggatcgctgctcctctctggggtcctggcggccgaccgagaacgcagcatccacgacttctgcctggtgtcgaaggtggtgggcagatgccgggcctccatgcctaggtggtggtacaatgtcactgacggatcctgccagctgtttgtgtatgggggctgtgacggaaacagcaataattacctgaccaaggaggagtgcctcaagaaatgtgccactgtcacagagaatgccacgggtgacctggccaccagcaggaatgcagcggattcctctgtcccaagtgctcccagaaggcaggattctgaagaccactccagcgatatgttcaactatgaagaatactgcaccgccaacgcagtcactgggccttgccgtgcatccttcccacgctggtactttgacgtggagaggaactcctgcaataacttcatctatggaggctgccggggcaataagaacagctaccgctctgaggaggcctgcatgctccgctgcttccgccagcaggagaatcctcccctgccccttggctcaaaggtggtggttctggcggggctgttcgtgatggtgttgatcctcttcctgggagcctccatggtctacctgatccgggtggcacggaggaaccaggagcgtgccctgcgcaccgtctggagctccggagatgacaaggagcagctggtgaagaacacatatgtcctgtgaccgccctgtcgccaagaggactggggaagggaggggagactatgtgtgagctttttttaaatagagggattgactcggatttgagtgatcattagggctgaggtctgtttctctgggaggtaggacggctgcttcctggtctggcagggatgggtttgctttggaaatcctctaggaggctcctcctcgcatggcctgcagtctggcagcagccccgagttgtttcctcgctgatcgatttctttcctccaggtagagttttctttgcttatgttgaattccacttgcctcttttctcatcacagaagtgatgttggaatcgtttcttttgtttgtctgatttatggtttttttaagtataaacaaaagttttttattagcattctgaaagaaggaaagtaaaatgtacaagtttaataaaaaggggccttcccctttagaat

SEQ ID NO: 493378 - DNA, 1097 bp, Homo sapiens
ggcatggtggtgggtgcctgtgatcccagctacttgggaggctgaggcaggagaatcgattaaacccaggaggcagaggttgcagtgagctgagatcgcaccattgcactccagcctgggcgacagagtaaggctctgtctccaaaaaaaaaaaaaaaaaaaaaaaaaagggaaaccctttggattttttttcccttggcccggccttcaattccccacattggccgcccaatattattcccagttcttctcctttactccagcctttcaactcataggtgctaactggatttaacagtatttctacgaatgaccctacctcgtggtgtgtgctgatggacactaaaagggcatttcagaaacggtctgtggcccagaagcgtgacccttcggcactcttagaattttttacttctggacccgtctctacaagcggactattacacacgtttcgcacccatcaattcttggtcccggggggtttgccacgggttcgtgaaaccccgcgtggaactttatttcccaccaaactccttgtggctccctccccagtgtgcagaaaactcgtgccaccacatcgacgggcagggacaccgtgcgatgcttttatatcaggttcattccgaacaacggagatctctcttgcccccaggtgggtgcctcgacatcagcgcgacgatcgtctcgactgtcacaccctgccagaccccgtggggatgacgacggactccttcgtggcacttagggcaccccagtgcatgcgagggcatcacaggcgctgctgaccagtgcacgcgcctgtgggcgcagacgcaagtattcgattccgtgtgcagtggtatatacacccaatggcttgaagtattggacgttcccaccgagtgaaacggcctgcccgcttacatgtgcaccacatgtaatgtcgcgtgcccttacgctgggtatctctgagttctttctgcgtaagtacaccgtacttgacccaccttgccgcttagttcagccattcgctacatcagcgacattctggattgcaccgccggatcgagcccacaacacaaactacgcctgcgccacagtgcgctacgtcgcgggaa

SEQ ID NO: 493379 - DNA, 1686 bp, Homo sapiens
  misc_feature (36)..(36): n is a, c, g, or t
caggtgcgccccgccccctgcctgcccggccacctncgggagccgcttccaataggcgttcgccattggctctggcgacctccgcgcgttgggaggtgtagcgcggctctgaacgcgctgagggccgttgagtgtcgcaggcggcgagggcgcgagtgaggagcagacccaggcatcgcgcgccgagaaggccggagcgtcggcacctgaacgcgaggcgctccattgcgcgtgcgcgttgaggggcttcccgcacctgatcgcgagaccccaacggctggtggcgtcgcctgcgcgggcgtccccacactgaaggtccggaaaggcgacttccgggggctttggcacctggcggaccctcccggagcgtcggcacctgaacgcgaggcgctccattgcgcgtgcgcgttgaggggcttcccgcacctgatcgcgagaccccaacggctggtggcgtcgcctgcgcgtctcggctgagctggccatggcgcagctgtgcgggctgaggcggagccgggcgtttctcgccctgctgggatcgctgctcctctctggggtcctggcggccgaccgagaacgcagcatccacgacttctgcctggtgtcgaaggtggtgggcagatgccgggcctccatgcctaggtggtggtacaatgtcactgacggatcctgccagctgtttgtgtatgggggctgtgacggaaacagcaataattacctgaccaaggaggagtgcctcaagaaatgtgccactgtcacagagaatgccacgggtgacctggccaccagcaggaatgcagcggattcctctgtcccaagtgctcccagaaggcaggattctgaagaccactccagcgatatgttcaactatgaagaatactgcaccgccaacgcagtcactgggccttgccgtgcatccttcccacgctggtactttgacgtggagaggaactcctgcaataacttcatctatggaggctgccggggcaataagaacagctaccgctctgaggaggcctgcatgctccgctgcttccgccagcaggagaatcctcccctgccccttggctcaaaggtggtggttctggcggggctgttcgtgatggtgttgatcctcttcctgggagcctccatggtctacctgatccgggtggcacggaggaaccaggagcgtgccctgcgcaccgtctggagctccggagatgacaaggagcagctggtgaagaacacatatgtcctgtgaccgccctgtcgccaagaggactggggaagggaggggagactatgtgtgagctttttttaaatagagggattgactcggatttgagtgatcattagggctgaggtctgtttctctgggaggtaggacggctgcttcctggtctggcagggatgggtttgctttggaaatcctctaggaggctcctcctcgcatggcctgcagtctggcagcagccccgagttgtttcctcgctgatcgatttctttcctccaggtagagttttctttgcttatgttgaattccacttgcctcttttctcatcacagaagtgatgttggaatcgtttcttttgtttgtctgatttatggtttttttaagtataaacaaaagttttttattagcattctgaaagaaggaaagtaaaatgtacaagtttaataaaaaggggccttcccctttagaat

SEQ ID NO: 493380 - DNA, 188 bp, Homo sapiens
atcgctgtaatacaccagcgcgagcattttccgcatatgtacttatcagtggcagagacacaacaaaaaaagaaaatttcaggccacatatccctgatgaacattgatgtgaaaatcctcaatacaatactggcaaatcaaaaagcttatccaccacgatcaagtcagcttcatcgctggttattccg

SEQ ID NO: 493381 - DNA, 537 bp, Homo sapiens
gagcccaacagcaaactcatccaccgggatcgagactgggaacgggagcgcaggctgccctcctccccgctccctcccaggcacctgaaagcaatgagccggagcagacccatgactgtcagcagtcggcaagacgaagatgagccggaggcgatgcagacagagttccgtatggataaacccagcaggtgatgggagtgctcagggggagggagtcatagcaacatcctccatcacaggagacatatgaccaccatggagaacagtctcaagtccgggaagggggcagctgccatgatcccaggcccacagaggggcacggaaatccgtctctttctccgatcatcgggaaagatgtcctcaccagcactacgggccacggggaaactctaactcacacaccagtcacaagggaaagggggttctgaaaggatcaaagcgatctcatacgggtgagattcgacagacaggccggttggcatcggaggccaatgagctctgatatgctgtaccaagtgtgttacgagaacgaccatc

SEQ ID NO: 493382 - DNA, 1538 bp, Homo sapiens
  misc_feature (3)..(3): n is a, c, g, or t
  misc_feature (8)..(8): n is a, c, g, or t
  misc_feature (12)..(12): n is a, c, g, or t
  misc_feature (21)..(22): n is a, c, g, or t
tangctangtanaggccgggnnttaatcggcaccgagggcgcgttgggaggtgtagcgcggctctgaacgcgctgagggccgttgagtgtcgcaggcggcgagggcgcgagtgaggagcagacccaggcatcgcgcgccgagaaggccgggcgtccccacactgaaggtccggaaaggcgacttccgggggctttggcacctggcggaccctcccggagcgtcggcacctgaacgcgaggcgctccattgcgcgtgcgcgttgaggggcttcccgcacctgatcgcgagaccccaacggctggtggcgtcgcctgcgcgtctcggctgagctggccatggcgcagctgtgcgggctgaggcggagccgggcgtttctcgccctgctgggatcgctgctcctctctggggtcctggcggccgaccgagaacgcagcatccacgacttctgcctggtgtcgaaggtggtgggcagatgccgggcctccatgcctaggtggtggtacaatgtcactgacggatcctgccagctgtttgtgtatgggggctgtgacggaaacagcaataattacctgaccaaggaggagtgcctcaagaaatgtgccactgtcacagagaatgccacgggtgacctggccaccagcaggaatgcagcggattcctctgtcccaagtgctcccagaaggcaggattctgaagaccactccagcgatatgttcaactatgaagaatactgcaccgccaacgcagtcactgggccttgccgtgcatccttcccacgctggtactttgacgtggagaggaactcctgcaataacttcatctatggaggctgccggggcaataagaacagctaccgctctgaggaggcctgcatgctccgctgcttccgccagcaggagaatcctcccctgccccttggctcaaaggtggtggttctggcggggctgttcgtgatggtgttgatcctcttcctgggagcctccatggtctacctgatccgggtggcacggaggaaccaggagcgtgccctgcgcaccgtctggagctccggagatgacaaggagcagctggtgaagaacacatatgtcctgtgaccgccctgtcgccaagaggactggggaagggaggggagactatgtgtgagctttttttaaatagagggattgactcggatttgagtgatcattagggctgaggtctgtttctctgggaggtaggacggctgcttcctggtctggcagggatgggtttgctttggaaatcctctaggaggctcctcctcgcatggcctgcagtctggcagcagccccgagttgtttcctcgctgatcgatttctttcctccaggtagagttttctttgcttatgttgaattccacttgcctcttttctcatcacagaagtgatgttggaatcgtttcttttgtttgtctgatttatggtttttttaagtataaacaaaagttttttattagcattctgaaagaaggaaagtaaaatgtacaagtttaataaaaaggggccttcccctttagaat

SEQ ID NO: 493383 - DNA, 379 bp, Homo sapiens
aaacgatggggtggataatgtcctgtagatggaggagctggatggaatgtgtccgtagagtgaggagctggatagaaatgtgtccgtagaggaggatgctggattgaaatgtgtccgtagagtgaggagctggatgaaatgtgtctgtagaggaggagctgaatgaaatgtgtctgtcgaggaggcagcgggatggaatgtccttgtagaggaggagctggatgaaatgtccctgtagaggaggagctggatggattgtccctgtagaggaggagctggatgaaatgtccccgatagcaggcggcagctggatgaaatgtccccgtagcaggaggagctggatggaatgtccctgtagagggaggagctggatgaaatg

SEQ ID NO: 493384 - DNA, 1410 bp, Homo sapiens
  misc_feature (36)..(36): n is a, c, g, or t
caggtgcgccccgccccctgcctgcccggccacctncgggagccgcttccaataggcgttcgccattggctctggcgacctccgcgcgttgggaggtgtagcgcggctctgaacgcgctgagggccgttgagtgtcgcaggcggcgagggcgcgagtgaggagcagacccaggcatcgcgcgccgagaaggccgggcgtccccacactgaaggtccggaaaggcgacttccgggggctttggcacctggcggaccctcccggagcgtcggcacctgaacgcgaggcgctccattgcgcgtgcgcgttgaggggcttcccgcacctgatcgcgagaccccaacggctggtggcgtcgcctgcgcgtctcggctgagctggccatggcgcagctgtgcgggctgaggcggagccgggcgtttctcgccctgctgggatcgctgctcctctctggggtcctggcggccgaccgagaacgcagcatccacgaatgccacgggtgacctggccaccagcaggaatgcagcggattcctctgtcccaagtgctcccagaaggcaggattctgaagaccactccagcgatatgttcaactatgaagaatactgcaccgccaacgcagtcactgggccttgccgtgcatccttcccacgctggtactttgacgtggagaggaactcctgcaataacttcatctatggaggctgccggggcaataagaacagctaccgctctgaggaggcctgcatgctccgctgcttccgccagcaggagaatcctcccctgccccttggctcaaaggtggtggttctggcggggctgttcgtgatggtgttgatcctcttcctgggagcctccatggtctacctgatccgggtggcacggaggaaccaggagcgtgccctgcgcaccgtctggagctccggagatgacaaggagcagctggtgaagaacacatatgtcctgtgaccgccctgtcgccaagaggactggggaagggaggggagactatgtgtgagctttttttaaatagagggattgactcggatttgagtgatcattagggctgaggtctgtttctctgggaggtaggacggctgcttcctggtctggcagggatgggtttgctttggaaatcctctaggaggctcctcctcgcatggcctgcagtctggcagcagccccgagttgtttcctcgctgatcgatttctttcctccaggtagagttttctttgcttatgttgaattccacttgcctcttttctcatcacagaagtgatgttggaatcgtttcttttgtttgtctgatttatggtttttttaagtataaacaaaagttttttattagcattctgaaagaaggaaagtaaaatgtacaagtttaataaaaaggggccttcccctttagaat

SEQ ID NO: 493385 - DNA, 149 bp, Homo sapiens
gtagagacaggctcaagctagccagacagtctgtatagctttaccagtgcttgagcagtgtcctctcttcagcttcttctagtgctgttagtagtatcccaggcattagtcacatcgcttgttctcctgtccccttctgtcgtcttctc

SEQ ID NO: 493386 - DNA, 131 bp, Homo sapiens
tgacgatccctactcagacaagttgaccgtgagggtatcatacttgttggttgattgtcgatcttgggctgttaattgtcagttcagtgttttaatctgacgcaggcttatgcggaggcgaatgttttcat

SEQ ID NO: 493387 - DNA, 288 bp, Homo sapiens
caggaatcagctagtactgcatgctattcgtgggtacttctaacatttctttggaacacagaatgtgtgtcgttgccatataaacagcttggaagcactgtgtctcgtggattgtggaattgctgtactgtgactgggcctcccttacagctgctcttaccaattcctcttacgaactcttattcttaccgtctttacctctgtgattttttcccctaaacctcacccatctctctcccgtttccagattgcttaaaacctccttatggcgtgtggcatgtgacgata

SEQ ID NO: 493388 - DNA, 213 bp, Homo sapiens
cggattggcagatcccaccattgcattcagcctgagcgacaagagctgaactccatctttggaacaaaaaaaaaaagtacaggctcgggggctcatgcttataatcccagcactttaagaaggccaaggtaggcggatcacctgaggtcaagaagtgggacaccagccgggctaacagggttagacccggtctctactaaaattataaaaaag

SEQ ID NO: 493389 - DNA, 205 bp, Homo sapiens
gctgcagtgcaacgttcagatttgtggctagaaggctccagagctccgtcgcgaaccactggtgtaagctccaatagtctaaaagctgaagatcttgtgagtctgatgttcatcggcaggaagcatctaccacaggaaaaagattagggccagaacactgagcaagtcagcttcttccaccttctcctgcctgctttgtctagtc

SEQ ID NO: 493390 - DNA, 381 bp, Homo sapiens
  misc_feature (106)..(106): n is a, c, g, or t
ttattactactaaatttgtggttgtgtcgactgtggcctgtcgatgcaaggttatgagttcaagccccaccaggagcaagtattctttttgaagcctctgcctgtntatttctattccggaaaatgataatttattcaatccatttaggagtacaattcatcggtaataggtatgtcattgagatgacaggtcagagtgcaggcagagatagaatacaaattcatagccttctgtatcaccagctgtgcagggtggcaagcctgctcgaaattccaagcagatggttgtttgcgaagtgagttggtgcttcggcagagaaaataatcacctaacgtggggctcgaacaaaagaccctgagattaagagtctcagtcgacgc

SEQ ID NO: 493391 - DNA, 203 bp, Homo sapiens
cttatttccttcttatgggggaaatacttaattaacagcagaatgatacttaggggaaatctatatcactaatgcctatatctcagaaaagaagataaatctcaaagtcattgacctctgctttcccctttaagaaactaggataagaagggggaattaaactctaagcagaaggaagaacatgataaaggttgagcagaatt

SEQ ID NO: 493392 - DNA, 364 bp, Homo sapiens
  misc_feature (288)..(288): n is a, c, g, or t
  misc_feature (305)..(305): n is a, c, g, or t
gagattactgcgattatcactttaagcaggatggatttcgggctctcttgcagctgcggccgctgaacgtactgagctaactctatatgctcgagctctactattataagactttctatgagctgtaggatctggatgagctcgatccgctgcacgcgctgggtgcttcgctgtaaagttcgctgtgcggttaatgcagtcctagcacccgcggcgtcgggcccacgattgggcttgatagactgcttaaagtggttaagggctagggatcgtgcgtagctgtagtgntctccaggcgggggctngcccggaaaggggccccggagtatgcacacccaccccgcggtaacaaagtcttgcgggg

SEQ ID NO: 493393 - DNA, 150 bp, Homo sapiens
aatcctcctcctccttcctcctgctgtatctttctttcgtgctctctctttctacagcctctctgtctagtctccttccctctcgccctcccctgtctctctcgatcgctgtctctctccctaccctcggttatctatactctccatcca

SEQ ID NO: 493394 - DNA, 151 bp, Homo sapiens
  misc_feature (33)..(33): n is a, c, g, or t
  misc_feature (104)..(105): n is a, c, g, or t
  misc_feature (138)..(139): n is a, c, g, or t
cagcgtcgatggtgggtgggtggtcaatccgcnggctgccgacagcagccgcggctatttcctggtggacgaggcggacgccgcctcccggcagtttcagatcnngccgctcccgccgggtacctatagcggaatcgnntttctggtcggt

SEQ ID NO: 493395 - DNA, 978 bp, Homo sapiens
gccatatgcagcgatatttgggagttgatccctcggtgtcctgcctgggcgcacgctgcggtaacctgctgtctgtgtcctgtgagtcatgcgggtcagcgcagattgtatatccgctgacggattcctgtcccttgactgtccagtgatgcctgcggttagcgatccggggggcagcgagcagacggcgggaccccaggtgcccagtgacagtgtccgcaggtacgtgaggccactgtgggatctccctgcattcgggattataccgagaagctgaacgattgtagatgtagcctatagaggagaactggcacactcaaatgatgtttaccctacctgttggcaaccgatgagtccaaattcatgcttgctgacgaccttgcggacatagtgtcttttcgaatatacacagcaggaagttactgggataccgtctttcgcattggcggaggtctatttccacaaattggagtcgcagggatgttggttacctttgtagtggcgcgacgggtcgtgaagcaaagggccttcaccgccaggaagcggcgagttgcagagggattgctcattggtgtccaccgagcacactcaggggtgaaccttgatttgggcgctgaatgagtatttcaccgaagacaggatcgcccacagggttcaatgcgtgtgtgtctcccgtacctgcgtaccccgaaggctgtgcagtgacccaacgggtggaaagttggtggacttggcacgctcccttgcttttaagcggaacgcgacgctatccaactcgtttgtcccgtgcgaggctgcccaggaaaggcaaatcatggggatgtgacaccaaagaatcatggctaaactccaccacaatggtaggtcacccttgcgctaagatgacggcatcagacgagagacctagcgtgtggcacagtgagcctggggcgacctcctcgtatccaagcacgttggcaatgctcatggagttccacc

SEQ ID NO: 493396 - DNA, 126 bp, Homo sapiens
acctctatacggagccatattataactttatgcagtctgggcattcaggtgtgagccaccgtgcctggctacccagctagtttttaaaattttttgttgttgttgagatggagtctcactctgttg

SEQ ID NO: 493397 - DNA, 439 bp, Homo sapiens
  misc_feature (37)..(37): n is a, c, g, or t
  misc_feature (139)..(141): n is a, c, g, or t
  misc_feature (240)..(240): n is a, c, g, or t
  misc_feature (251)..(251): n is a, c, g, or t
  misc_feature (335)..(335): n is a, c, g, or t
  misc_feature (347)..(347): n is a, c, g, or t
  misc_feature (352)..(352): n is a, c, g, or t
  misc_feature (357)..(357): n is a, c, g, or t
  misc_feature (359)..(360): n is a, c, g, or t
  misc_feature (363)..(363): n is a, c, g, or t
  misc_feature (423)..(423): n is a, c, g, or t
accattctttccacttttagacctcctttagaaatantttattgcccatcctgaactaaagcactgacaaaaaaatttacaacaattatcagataatgtgcttagttcctggaaagttataaaaagatatatgtaaaannnaaatcctaagccacaaatattttatagagctaatacgggtcatgttttgttaggtacagtatctacggggttattacaaaatatacttttttataaggnttcttgtggtnaatgggctctcaccagagtagagtagtttagaaaagccatttcaaacgttttgcgattctgccttcaagtaaggggtaaaaggnaaatggcgtggnttgtngcgcngnngcntatactgtgcgggggttggtctctgcccctttctttcctggtgccctccaccgggcctgnttaggggcgatttctc

SEQ ID NO: 493398 - DNA, 1095 bp, Homo sapiens
ggctcatgagtaacaacactgtcggagctggacaccaagatccaggagaaagccatgatgtgtggatatggacatctgccgccgcatcgacatcaccgccaagctctgcagatgtggctcagcagcgcaactgcgaggacatgatccagatgttccagaagaagcttggtcccatccatgggtgtgggctggaagcgtggagctgcaaggctgaccgtctgacggatggacacctccctgtctggagagtgatgtggtgcccctgacaagccctgatggggatgaggacggagagcacagacctcaagaatcaacgaggcagatgcagcgcatgctcaaacagctgagggagtatgattatgaggacgaatgtgacagactgacttgggaggagactgaggagaacctgctgatttgaggaggataactcaggctatgccatggcaagatgcagaggcccatgggagagcagcaagtgaagatagccatggagaaaggtgattaaaggataacgagaagtcccatgatcaaaaaccgaggagaaggaggtatcaagagatgaccattgagcagatagagctggaaattggacagtgcaaagaacgaaatgatacggaaatgcaagagtacatggagatgtgaagatgaagctgatggccttggacagtgcaagattggcagaactagccgacaagatcatcagccagatatgtaagaccgaacagtatccatgactgccatgacagacccgaaaaaagaacagacaacgactgacaaacaagcctgagaatccgaaacgcaatgcacaatatagaagtacaatagaaacaaacctagcaacccacattagacaagaaggccaacaaaagcggacacacagagcaacacgagcgacaaagaacaaaacgaaacactcataacagagaaacatcagcaagcaggcctgaagcacaggcagacacacacacaaagaagaacacaaacagaagaccaagccatagcgagacccacacacgcagcaccactatgagcaaaacaccacgtaggaagaaagaaacataagaaagacacaaagaagagccggagagacaagaa

SEQ ID NO: 493399 - DNA, 1204 bp, Homo sapiens
ttcgaaactggacaggtgtcaccactggcgccacatttgtgtgagaacattctgggaagtttgtagtctcccaaagcggggggcacccaggggctcccccgtggggtccagtgttgcacccagttggtggttcgcgcgtggggaccccagtgtgccctgtcgagaaccggattttaggtccaaggagtagccccgttttttaggaccaccccaggtgtcttcccagttgttaaaacctatttggggaaaaaagctgccccccccgtggtgcgccaccccagagggttttataaaaagtgaatgtgacacttttggcgttttttttgcccgagagtgccttttggttgtttatctataagggaacctctttgtgggggaaaggagacacccacatgcgttataaccccccggtggagccccacttttgaagggaggagatgccccccccctgaggccccctggtgctatgtgccccccccattggagccccggggagggtttttggtcccccttctctgcgtctcttgtctttggccaagttctaaagggtctcacactgggcgtatcattggccctttgcggggggctttctaaggtgcacgtgtgccaccctggggaaagacccgagaatggggtaaacccctcgcccttggtagaaatgtggaccaaacactggtgtttcctcgcccgtgaggcccccccaggggatttttctggggcttcttataggtttgggatcacaatgcctgaaatttcggataatggggtgtaaagttaacttgttatttaaaaaagggtagtagggaaagataataaatacccaaaccccactaacccctcttctgggggttttttgtggcggttgaaaaaagtcccaccacatgtggtcactcagaaaaaatagccacttcctcaatacccaataattggagtcaggctccttgaacctttgaaggggccaggaatgcttcctggtgtgtgtaattagaatcccttcctgccttgtttcactggcacgtgaaaatgcctcttggtcctgtcccaaggtatttttcacctgaatttttgaaatcacatgttttaagttgcttgaccctgccccctgggtcccgatgctcctttgagcataacctgtactaaatcctttttcccctatccagtataatataaggagtgatgtgccattaaaaaaaagaaaaataaa

SEQ ID NO: 493400 - DNA, 261 bp, Homo sapiens
ggggttggggggccttttacaagggggggtttttttttaattgcctttttttttacaaaggggggtttttgcccccctaaaaaaaacccccccctcccctttgggggggtgaaacaaaaaaccaggggtttttttgggggtccttttttttggggggggcccccggtttttttgcccggggggtgggggggggaaaaacccttttggggggttttggagtttttttttttttaaagggcgtttttttttttttttttttta

SEQ ID NO: 493401 - DNA, 457 bp, Homo sapiens
  misc_feature (295)..(295): n is a, c, g, or t
ccttgtcctcagaaagagttgcccagacttagaagacttgatgaaaagggagagccactcgatccttgactccgttggtgagtctggacaccccagggaaagccacagtgcaagtggtcatcctggctgaccctgatggacatgaaatttgctttgttggggatgaagcttttcgagaactctctaagatggatccaaaaggaagcaaattattggatgatgcaatggaagcagacaaaagtgacgagtggtttgctacgaggaataaaccaaaggcttcgggttagtggaaganacatgaagagcacttacatctccagtccagtctgttatcagtctggcacttatgttttgagaaatgctcccaccacttggctgtgtcctgcataggaggtctgtgcagtagtttcactcttcaaagctctgtttttagaaatgaaatatttttatcactctt

SEQ ID NO: 493402 - DNA, 351 bp, Homo sapiens
  misc_feature (1)..(1): n is a, c, g, or t
ngagtgtgggttccgtgggtgtcttttcctcgtcgtttttcgttgcgcccgtcctttttcctatgtgtcccctcggggatcgtgggtccctacttgtacacttcggtttcctgggacggcatgccggatcgcatacccggaactttccgagatgtcgggttctgcttcacagtgcttgacggacccgcgctcgttcccacccgccgcgcccatagcagccctccgtcacttcttcaccgcacctcgactgccccaggccccgccgccgctccagcgccgcgcagccacccgccgccgccgcctctccttagtcgccgccatgacgaccgcgtccacctcgcagtgcgccag

SEQ ID NO: 493403 - DNA, 312 bp, Homo sapiens
atgatatgggtggtgtaacagtggagaggacagccgagaaatggggtggtaggttttttttggttttccgacagagtctctatctgttacccaggtgggagtgcaggggtgcaatctcccggctcacggcaacctcggcctctggggttcaggcgattctccggtgtcagcctcccgagtagctgggattacaggcgtgcacaaccacgcccggctaattttggtatttttagtagagacgggagtttcatcgtgtgggccaggcgggtctcgaacttggtacctcaggtgatctgcccgcttcggtgggtg

SEQ ID NO: 493404 - DNA, 781 bp, Homo sapiens
gccctcgagagtgccccgcccaatatggggtacacttatttgccgcaagtgtttaggtttaacgaggtgctcacactcctccgttgtctgtacaacggtgccccccctatattggccgcgccacccaccgttttttccgaccgggggttcacacgtgtaatccaggcgcctgggagccgtatccaggcgggttcacctgtggtcaggagttcaagacctgcctggcccagtatgattggagccgcggtcgtcctaacgagctaatgacagagattagccgcgccgtagtgtgcaatgcccgcaatcccacctactagggagctgagccaggagaatcgcttgaaccaggaggtggtagcccatagtgagccaagactgcacctctgcactccagccttggagcgacaggccccagactcctctctcccaaacgactttccccccaacacatttatcagttccttacagtcactcccctccaagtaggagcccacgcgtctagatctgcctaacttgggttactacacagacactagatctaagatcaaccactgagatggagatttgcagcaaggccaggaaactttcactgtacacgcggaacatcacacccgagatggtggtgaattattgataggtctaggcattaaggtggttttcaacgacgggcaggcggtagatgcatgaacataacacaaggctgcgcggagcttccccaacggccaagtgagtcccccacctccccctcgggcgaaaaaactttgttcgtcccacaaagaca

SEQ ID NO: 493405 - DNA, 703 bp, Homo sapiens
tggactcgacgcagccatgctgggcatggtagcatgcgcctgtagtcccagctacttgggaggctgaggcaggatgaatcgcttgaacccgggaagcagaggttgtcagtgatgcacgagatcagcgccactgtgactccagacctggacgacagagcgagacttctgccactgcactccagcctggacgacagagcgagacttcgtctcaaaaagaaaaaaacctctgcgacttgatatcaaaagaaagctaactgctagatctgatcgagttaagagtgtggatctgccatcctacagagccatggatgtaggcaagtctttacaatggcagtgtgtgtgtaaggaatcaatgaaacacagtgtgaaaaatattcctgccttaggagagcttagcaggaaagattggcactaaacataattatgaggtgctacattatgaaagggaagtacaagtttccatgggtggatattcaagatcagagacaacaagagcagagacactggtgaagacactttgaagtatgtgactcttcctgttacgagctgcacacaggtagtagcaaggaagcaattgggttgtgacaggagcggattgcaatgcagataaagaatgtacaatatacaatacatctggagagaggttacatatgttatgcacgcacacatcagactacaatacgctgaaatagcatgtaaatcc

SEQ ID NO: 493406 - DNA, 202 bp, Homo sapiens
cctccttgagtctcagtacaggctttggagcactgtctggtctgatcattactaaagatacgtcacgtggccttgtataagaaaaacacaggaatgctcacagcgtccgttttgaccgtctgactcgataacttgtgtccattgggcacaatggggacgctgggcctgtcctcattaaaaacattaatgcccccggcggccg

SEQ ID NO: 493407 - DNA, 565 bp, Homo sapiens
catgggatcaaaccccgtacacggggacctacaatgcttacagagttatagccaccacagaaagcttgtcaacactttggaaagggacgacccctaatctaatgagaaaatgtcatcatcaattgtacagagctggtaacatatgacctcatgaagggggcccttgtaaacaacaaaatactggcagatgacgtcccctgccatttactgtcagctcttgttgccgggttttgcaccacactcctggcctctccagtggatgtggtaaaaacaagattcatcaactctctgccaggacagtacccaagcgtaccaagctgtgcgatgtccatgtacaccaaggaaggaccgacggcctttttcaaagggtttgtggcttcttttctgcgactcgggtcctggaacgtcatcatgtttgtgtgctttgaacagctgaaaaaagagctgatgaagtccagacagacagtggattgtaccacataagcaacttggaggaagagatactgaacatcattgggcttctatgctgggagaccacgaataaaaccaaccaaagaaatcaaaa

SEQ ID NO: 493408 - DNA, 131 bp, Homo sapiens
  misc_feature (20)..(20): n is a, c, g, or t
  misc_feature (45)..(45): n is a, c, g, or t
gataatcctgtcctcctttnaaagcgaattctctactgaaaggcngctctgttaaggagctacaaactgctctcaaaagaatgaaatactgagtccaattcagtgaggcacagggttggactatggcacat

SEQ ID NO: 493409 - DNA, 1303 bp, Homo sapiens
cgcggtccggcggagcggcggcgggcgcatgtctagcgggttcggccgcgtgagcggaggtgcagtctcggcttccccgcggcactcgctcacgctgcaatacacagagccgcaaaggcacacacgcgtcatcccgaccgccacacgcctcagtccggagaccacccgcagtcgccccacacctcgccgcgccactactctgccacctcgccggccacagtccgcagcggcgctccatctctacccactcagtccacacactacacatctacacatcaacactcacgcacaacacacccatgccagaaacccaaccctcaccgcaccacacagtaaactcccacacacactactctaccaaacacatacacactgcagcacctcaactacaacctcatccactccacactctacacacacaacgcccacacactcacgactctcactccccacacccctccccacccccagccaccactcacatcccccgcaaacacacacaatcaccccaacaccacaccctcacccacacccaacacacaacccccaacacacaccaaccccacacccgccccaccacaccaccatcccactccacccccaccacccccctccacccaccacctcacaccacgcccaccccactaccccccacacgcacgcccactaccagaccagacgtccacacccccgcctcacccatcacacactcccacacacaccacccacccacctaccccctcccctaccctccaaacaatcgaccccccacccaatcccccctccacctcccccccctcccccacacacaatacaaatacacaaaccaccactacaccccccaaccgcacctcaccacggcatacacacacaacacactacacctcaccatcacaacaccagaatccccatactacctccccaccacacacgccaccacccccccctccccctctccgcggacccaacaccccctcactcccacaccacaccacacccctctccccccatcccacccactccaccacaccacaacccccacccccaccaacgtccaccccccctccccaccacaccccataacccccccccccaaccccacccaccgcccacacccaaccacaccccactcaccactcctacactcgcaccagcaccctcgaccaccgccctccactcccacaccgccaccaccacacctcccactcctaccacacaccccacgcacgaccaagacacaccaccacaaccacctctcctctacccacacctcgccaacacccgcctaccactcatcatcacc

SEQ ID NO: 493410 - DNA, 868 bp, Homo sapiens
  misc_feature (49)..(49): n is a, c, g, or t
  misc_feature (367)..(367): n is a, c, g, or t
ctttcccaattttctcccatcaaatttcaaaatataagtggcctctcgngttagaaccacaaccaagttttacaaacgaccacaatattctggcatcatcaatctgatcttcaaagatcatctaaaaaggaatttttgagaaaaaaaaagataattttaaccaaaaggaaccacttgtaatttatatttcagcactgaggagcaccaatgggagtcagaaaagaactctggagttctcccactagtaatgtgtttaatcatggaagctattagcctgctttctcacctagagaaataatataggtttggacctacatcgacttctcagcgtagtttatgtttttaaatattgtcggatcctatgatnaaacatggttctcccacgttccttctgaactacatttcaagatgacttatttttgaatatttctacgtgaggtggatgtgactcatatggtatctctaattatatctttacttagcacgctctagttgcccaaaacttcggctccaagattctcaatggttctaatactaacaaccaactgaaaaaaggtcacgacgtctcatacttctctaactacgaaaaatgccatttccgtcagtaatgaatcacatcttgtctgaagctgttactctatccctatccactcttaactgtcctcccacctaatgtattcccccctaaaaaacaacaaatccctctgtctgacgacaacctcattaccctaaactctcctatccctctttttctttcttcatcaagccttttaatattccgccctttactcttttaaaaggaaatttatacgattctctatctagctatatgtagttggtcgtttgtagaagtaatggcatatctatg

SEQ ID NO: 493411 - DNA, 356 bp, Homo sapiens
  misc_feature (65)..(65): n is a, c, g, or t
accctgcgcgggggaaatgccggcggggtcaggtgacttccggggcgacgaaggtagctgtcgcnaacctctacgcccagcttggccgcggcttgtcaccgatgacgatgccaaagctgcccggcgacagctcgtcgagcttaccttgcagcatgaacttgtcgatgatcgagacgttgcgctcctgggccgggtcgatgccgttgagcaggatcttctgcactttgccgtcattggtcagcaacccctgcatctgggtaaacggcgctaccgccaccaccttggggttctgctggaccttggcggccaggctttgccagtcgttgatgggcgcatcgccctcgatggtcgcgtgg

SEQ ID NO: 493412 - DNA, 146 bp, Homo sapiens
ttaaggagccgggaagcagaaagtacatgtgttcagtgtcgtggcagccaggcaccaagtttttgtaggatgtcagaagggacagccgggcgagctttgttggacctgttacaattgcgggcaggaaagttctttttgctaggtta

SEQ ID NO: 493413 - DNA, 140 bp, Homo sapiens
tctgttagcttgcgccagaatagcccaggtaatttgctgagcctaatggtgtgtcaggcgtcagtctaagtacctgggcgtatgagtagttggagaacgtgtgaatatggagtactgactaacagactgaggcatgaaat

SEQ ID NO: 493414 - DNA, 162 bp, Homo sapiens
aaacagctttcttttgtctcctgaagtgattgagacaggctccttactagtccataggcttctttctgccatatccgcctctgtccgacctctccacccagcagccagagtgctcctttccaagcaaataggtcaggttattgcttgtctcacatcttctcc

SEQ ID NO: 493415 - DNA, 254 bp, Homo sapiens
gcgatatagattagacattgtcctatgatgccctttcatgcttcacgtgccccagaaactgaatactgtacttccgtcgtctataataggtacagatcaggttatccttggacagtcaaatcgtatttcatcacaaacttggttaacccgatgacacaaaaatgtttccttttcatattcatcaaatatctgccgatcatgaaaataagcatgtgaacatattctgtaaatcctacggcatacagatcggggct

SEQ ID NO: 493416 - DNA, 264 bp, Homo sapiens
  misc_feature (15)..(15): n is a, c, g, or t
  misc_feature (104)..(104): n is a, c, g, or t
  misc_feature (231)..(231): n is a, c, g, or t
  misc_feature (251)..(251): n is a, c, g, or t
  misc_feature (257)..(257): n is a, c, g, or t
gcacgagcatgttancccaggctggtctcgaactcctgacctcgggcagatcatctgaggtcaggagaccagcctgcccaacatggcaaaacctcatcgctaanaaaaactcagccaggcacggtggtgggcacctgtaatcccagctactcaggaggctgaggcaggagaatcacttgaactcgggaggcggaggttgcagtgagccgagattgcgccactgtactccancctgggcgacaagagtgaanctttanttcaaaa

SEQ ID NO: 493417 - DNA, 199 bp, Homo sapiens
gttactcaaaaaaatcttatttctgtacttggattcagacttagaaggtagaaggctcgcagagagggcaagtcttcggtctcttcggcaatttgttcctggcgcttctccttaggctccttcatttctcttggcaaatgtttagcatattctgcagcctcttctttatttttgtgggtacgcttcttcttcagagccc

SEQ ID NO: 493418 - DNA, 327 bp, Homo sapiens
cgcccacggcagcccagctctcaagcagccgagactacaggcgcacgccagcatgtccagataatttttggtatttttagtagagatggggtttcaccaggtgggccaggagggtctcacatctcttgacctcgtgatctgcccatgtcggcttcccaaagggttaggataacaggcatgagctaccgtgcccagcctacttaaaatactctggaaatagctctccccacctccttttttttttgggaaaagtgagttccactcaacacccaggtggggcgtgcaggggggggactcctctaagagtcgaccggcgggcctggcagg

SEQ ID NO: 493419 - DNA, 889 bp, Homo sapiens
gcagatcaaccccagatgcagtaacagacactgtaccaagtgagtggactctcaccgggccatcactgatctggggccagactgatctctaccagtgtgtgtctttaaatcatccaccattacgtctcagactgccaaatcggtggctgggaccggggcagggtgatactgccatgcctcataggagagtccgcgccgcattactctgatgtgatcccaattcatcatcgctcacaagcaaacccatgaaggcaaggtattggtcaatcatacacttgtacaggagcaggaaactgggtagcaacagcaaggaggattgaaggagaactatgcccaaggatagacgacatgacttaggacatgaggcgtagtgatagtgagactacgaggcctatctagcgctccaaaagcgccccactagaagtcactcaaggtagactaacacacacgaggttaaacactgtaactatgacaagatgaatctaaagaaagctcagaagatgcacagaacggcatgcgtcataaagacgcctttatatccatgtcagtgtgaacattgccttgaagtccctctaacaagaggtagaccgcgtattagaaaggttgaggctaactggtcatctacgacccatacacttaaggggcagaactgcagcggaagactgcacgagcaaccaagaaaacgaagcgattaggtcacgacaagacacaaacggaggatttgacagtacatataactacacggcatacccggtggagccccattgcaagcgatcggacttccggtccacctaaaaggaatagaccaaaacacaggtgtaaggtacgatcaaacggatacgaggaagttaacttccattgccttgagaagaccccacatgacgtgaga

SEQ ID NO: 493420 - DNA, 340 bp, Homo sapiens
  misc_feature (154)..(154): n is a, c, g, or t
  misc_feature (276)..(276): n is a, c, g, or t
  misc_feature (316)..(316): n is a, c, g, or t
gggttttatggtaccagttactataatgaacatagtaaaaatgaaattaattgtacgcctttgcttgacaatataatgaaaagaattttatggttgattgttgcccattgggtttctttttactgtccttgaatttgtaataagtcagattgtnctctacctcttactacactgttttacaaaatagaataattggtaaagctgtatttaaagctttaccttctcttgaacaaagtcacaaagactaaccacagcaaattaaaaatatggaaattncttaagcaaattggaagtgactatacattcatttgaaggnaatatggggcatgtctggttactt

SEQ ID NO: 493421 - DNA, 582 bp, Homo sapiens
ttgccttgtacctggtagcaatgtttttttattatatgtgaattttgtttggtgttaaagcgttatattgtaggcataatagaaactaggtgtttggtagttgaattttgttggcacacaaagagttaaggcaaaacagcaaaatagtaacatttcagtagcaaccaagaggtacactgctattaggacttttgatagcttatccttccagaagttgttctcggtgtccgtgttttatgttatcaagacatgtgtatgcttcatacattgaatgggtagacaaaccaagtgatggtcaagataagttaggtaaggtgcaaagcaccatgttgggagagtattataaacagatcaacaagtcttaagtagacatgttgtagttatctgggcattcactacatgcctgctactgataaggaacactggtatcagctgttactcagtgtctgcagcagccttactgaggtgggtgttatcaccattttactacctcagggagtttaagtaactcagtgttactcactcaagtgactgtattgagatctaggtttgttaaaggccatgtgctttgctgtatacccg

SEQ ID NO: 493422 - DNA, 297 bp, Homo sapiens
caggtatggtgagcacgcctcttggcctagctgctgcgcgttgtctaaagtgagaggatcgctaagtccagaagattgaggctgtagtgaactttgattctcaccacatgcactccagtcctgagctgacagagcgacgaatctatcccaaatgaaagaaaaaaaactcccattaagtactacacagttagtccataataggttgcaaaaagttactaagctaccttgatattctaactatttcttccaaaaatgtatgtcaaaccccaaattttttattccaatatcaccaggcgc

SEQ ID NO: 493423 - DNA, 378 bp, Homo sapiens
gttttcagctccagtaacttttgcccgatgtatggcatagagaaactatgaagcagctcctagtagctcttgggggtcacctagtttgtggcgggtcagctctgcccggtactcgtatgcacttcttggacaccgactggtggatgtacacacagacctggatcagtccttaggatttcttacctgggaggattccagttactagggatctcattagaggaacacggtggccacagacttcagggcttctgccggccactcgttaaaccagtcaatggtacagcagttgaccagggagggaaactgcctcagacgagctcggaagacctctccgatggggctcatgcacagcaccatgtgaatattgctgcgcacacg

SEQ ID NO: 493424 - DNA, 117 bp, Homo sapiens
  misc_feature (7)..(7): n is a, c, g, or t
tgcacangcgagttcgagctaaaatccgtaagactgaaggtgacaacaaaagtcaaccgtcatgacaaaatcaagtggaaagaggaagaccgccaaagaacatctgagagaaactaa

SEQ ID NO: 493425 - DNA, 235 bp, Homo sapiens
ccgccacagttctccagcctgggtacagcaagacccgctcttaaaaacaaacaacaacagaagaatatacaaataggctttgcggggccaacgcggatcacgagatcaggagttcatgaccagcctgatcaacattgtgtaaccccgtctcttttttgtatttgtagaaatacgaaaatgagccaggcatggtggcgggttgcttgtaatccccgctactcgagaagctgtggcg

SEQ ID NO: 493426 - DNA, 946 bp, Homo sapiens
gggatcttatctcatctcaaggtgaccttctcaagagatgttcctgtcggggaggcgcgagaggcgcagcagagtatgtgcgagacaacatccagcttcatgggcagcaggtgtcgagaatcctcctccaggagaaggcctctatttgatgtgtgtggagcatgcaaagacagtctgggcgcggatgtacatgatgcccgtatgggtgctacaagtcataatgcactcagacggttggcatgtttgaagatgactcaggaagaacagatgcaaagaaccatggtccagttataacgagaaaggaagaaaacgctgaccttcagtggatatctgggtgcataagagaccagtaacatgtaaagaaagaaggattaacgcattagtcgtctcgaaaggtgagctgaaagtcaggcactgtactaaggggctcaaccaactgttacccattgtacagacctgactaaaggtcttcttcatctacttcctgtgcctggactatggcgttggacgatctgggatcattttaatcacttgtacattgatcacaaattgcctgattgtgactgaacaacgtaatgtgctattctacgcccttcctggtgccgtgtgacgttctcgccagaattgtgcatgatgactgtgtagcaactttctggacggcaaaagcgcacggacctaacagatcccctgattgagggccctcctttaactggccacagcagtaactgcgacaggagacagttctgtccggttcacgggcgaagggtagcctgcaaagtcggcggaagggcggaagacggcagacatggactcacagtggccacgataaaacaagatgaaaagagtatgaaatgcgtgtctccaaacggagccatccacgggaccccccaccggcagcacctcgacgcagggacacacaaacgacggggacgacagcgaacacacc

SEQ ID NO: 493427 - DNA, 1598 bp, Homo sapiens
  misc_feature (1310)..(1310): n is a, c, g, or t
gcatcttcttcgggttgtgcggtcctccattttttattgcgtggggcgcccctcttcggttgttgatgatgttctgcagcatctgtctgtctccgtctcctctcctctcttcctccggtgtggtcgggcgccgcccccctccttcttctgcgggattttttttcttggccggcacttggtggggcacccacacgtgggggggatatacaacccccccctcgggtgtgggaaagaggagcgcccccctcctctctcttgtcgttggtctgccccgccctatgtgttgtttgtttcccgccagggttgtttctcttccaagacgtcaccgctcgggccccaagaagagaatttctgcgccacacacgctgtgctgttatcagaggggacccccccgccgctgtattttaatgaagaaagaaggggctgccgcccctcccctctcgcggggggtataacccccctctcctgcaggaaaaagacactcaccgtcgtttggaggagaggagcaccacctcctctcctcccacccccactgcatcaaaagagctgggagggagatacttcccccccgcggcgagacacacaccgacagacttggtgggttgctcggcagcagagggtcgcaacaagctcttcgcgggagccacacacacacagaaggtgggccccctttcgagagaagagaagagttaattagcgcggtaggatacacaccccaccacgggtaagagaggtccttggttggctttcctcccgttcttggaaagtgcttgttgtacacgacacaacagagcgacaagaaataatactacaaaaagagggggggtgattatatatagcgcccccctcctcgttttgtgatgcagtctgctttgtcgccgttctctttgttttgtgtgtccacatgatctccacacacaattttgtggcccgccccacgcgggttttgtacacacaaagagagggggcgcacacacacagcagagggagatatatatcccgctaagagagagggtgtctttatatatgtgccccacagtgggacgcacaaaagaggggcgctttttagagaatatgcgtctgggtgggggttcttatatattcccctgtgacacacacacaacgcgcacaccttgttataagaaacacacatcggtgtataatgcgctatataatgtgcccacaagagagctctcgggagttattcctcatgggtgccccacacgggtctacaattctccggggatataatatacctggaacaccaccctcaactcccactttgtgtgcgctttctggtttcttttttnttatggggcgcttataaagtaaaagagagcccacctctcctttgcacacagatcaactcacacacgggttggtacactaaggcctcttaaattttgggccacaaattgtttgaaagaaatgggggcctgtttcacacgggttttggatatttgggtgtaaagcacaccgtttacacacacgaataagagccccaacgccttgcgggacaggcatttttttgggaaaatccattttttagggattgtttttcagcattttccaaaaaattttttcttctaaatgttcca

SEQ ID NO: 493428 - DNA, 463 bp, Homo sapiens
  misc_feature (35)..(35): n is a, c, g, or t
  misc_feature (68)..(68): n is a, c, g, or t
  misc_feature (156)..(156): n is a, c, g, or t
  misc_feature (158)..(158): n is a, c, g, or t
  misc_feature (171)..(172): n is a, c, g, or t
  misc_feature (184)..(186): n is a, c, g, or t
  misc_feature (402)..(402): n is a, c, g, or t
gtgagagctgttccatcaccaggtgctgtctacanccagctgctctcaaaatagctgccctgctgggntcggggctgatggaggagcagggcagggaacccatctgggcacatcctggatccctcctgggctgtcgcggcccagagcttgagctgnanccctgtgcccagnnactcgtgatgcnnnatgctggatttggaggtccctcctgtggggtctgtgtgcgtggtgggcaggggtaggggaagctgccctgctggcctggctctgggagtatgctggagacaggcaggtaatggccatgataataatgatgaccgtttatggcagtgataagcatcatcatccaaaatgaggcagaggccaggcacaggggctcatgcctataattccactgctttnggaggccggaagtttggaggattgcttgaaggccaagcattttgagaccagcctgggcaat

SEQ ID NO: 493429 - DNA, 1817 bp, Homo sapiens
  misc_feature (911)..(911): n is a, c, g, or t
  misc_feature (1151)..(1151): n is a, c, g, or t
  misc_feature (1499)..(1499): n is a, c, g, or t
cgcggacggataacgtgacctggcagggatgggctgacgtgcgacgatgctgacagaaggcactgcgtctactggtgtgttgacagcatgcgcttattgttgctagcatgagtgtatgattgccgcgacctcagcattgtctgttctcgctgagcgatggtgactacttgctttcattatgtcgttgtggtggttcgccgcaccgatcgatttgttgtcgtcttgtcgcccgctggttgtgtgtttctcttccctccgattggtgtacgtcttcgtctcgcgtctgactgaacgcccccccggttgtgcgatatatcacgtagtgatcggtggcggaacgcataattgatacgcgcggtgtgcctctctcatcagggggtattattctgctggtgggtgggcccgaccaccaccactatttgtgttgctgccctcatttgcgagtgatatacaagtctcggtgtgggcgcgaccgtcccggcggcgatcgataattgcttgtcgcctccgcctgccgcgggctgtcgacctccatgtagtgttgtcctctcgcgctgttcatttcccacctcccccgcggcgggctctcgccaaaatggttttttttttttagcctcgtggattcgctgtcgcgctccccacccgtcgctttcccccgcgcggggggtgccgccccataaattgttgtgcgaagaagtatgtgttgttccttgtccgtccgcccacagaggggtcgctcgttcgtttgagccccgccccctttagggggaattttccaagatgcggtgtgtgccgtgtgtgttccacgcgcatcttgatgggggttggcgcccctttgtacccttggcgcccacatgttgtggtaattgtttagccgcgaaaaccgtccttagttccaccgcttgttggancaacttcctgcggtatctttaccgccccccgaaaccaacccgcttgtattgttaatcccgctgttgtttagggcgtcaccaccccttgtgcccagcccgtattgggggtgcccctcagtccccatatatggggagagcctcgctaatatttttggcgcccacttccacctttataggtagaggggccttttcaacttttgccacgccttggaggtgtgttccccgccccctcatatgttntctcccacggcggtcttataacacacccccccgtatgtagccccccaaaacactcttatcacggccccccctcacatgatatccccactcgtgtgtcacacttatgtaccactatatatttccatcttaccgcgcgcgcgtataaaaatctctaaaacactcctgtgtcgttgctcccccacacacacacacactctttttcttccgcgcgccctatttcccgccggagatatggcccccccccgcagacgctgtatacctccgcgagcttatacccccgcaatgccacatataacgcccacccacgtgttgagacacactccccttatatcacattctcggtatagngctccacattacacatttctctctctataccacgccacgctataatatattataataaaattcttttcacatcgagatgttgaggaacgccttcgcctttcgagaagcgagaaaggtcctaaatatgtatgaagagaaccctccacttaaccctggaggtgagctaataatggagatgccccccacccctatccaccaccacattcgagagaaaccccgtaataccacattaaatttagaccaaaataggaagggatcgagacccccccaagctggtttcaagacccaccccctggcctccctgactttttcccccca

SEQ ID NO: 493430 - DNA, 407 bp, Homo sapiens
tctagcggatccctgagtgggttcttgcagaatgtgcctgtgctcacacagcggtttctcgcatggggcctgtctttggtgaccctctttctgcggtctctggctttgtcatgagggcgggttgtcaaatcgttttcggcggcccggatccggtttgggtgtgtgaagtcctggcctacgtgaagagatgcatgggtccgggagcaattgaaatctcatccccatcctgagcggcctctctcctaagatcaaaatgatcacactgcagccgaggacaagagccccacaggagctctttgtcccgcaggagagcagcggacccacgtcagagaagatgcttgtatcttttcacggctcttctctgagaaatgaagccacaccatgatacagtctgcaaggaacccacg

SEQ ID NO: 493431 - DNA, 275 bp, Homo sapiens
  misc_feature (42)..(42): n is a, c, g, or t
  misc_feature (63)..(63): n is a, c, g, or t
  misc_feature (66)..(66): n is a, c, g, or t
  misc_feature (89)..(89): n is a, c, g, or t
  misc_feature (111)..(111): n is a, c, g, or t
  misc_feature (133)..(133): n is a, c, g, or t
  misc_feature (145)..(145): n is a, c, g, or t
  misc_feature (178)..(178): n is a, c, g, or t
  misc_feature (255)..(255): n is a, c, g, or t
  misc_feature (259)..(259): n is a, c, g, or t
gaaaatcctttcctcttgggaaagtaatacaagtcttaagtnccattgtagggtgcgccttcnganacctgctgcacttttctgatatngttcaccacttttctgtcttcncagctttggggaattttggccnggcgcccctttncccgtccttgagacccgcggtccaggagaatcnggccgtctgtggcctcctgtggcggggcgctcttcgccgcctccggtgtcaggtttggctcccttgctccatccccnatcngtttcccgcgggcctt

SEQ ID NO: 493432 - DNA, 110 bp, Homo sapiens
tggatccacggatcccacttgtttaagaaaattacactgctacagcgttaaatatattttggattcacacttgagtgtaacttaatcctacccattcagaacttttgtag

SEQ ID NO: 493433 - DNA, 252 bp, Homo sapiens
acagggttgcttgagcctgggactgtcgaggctgcagtgagccataattgtgactggcactaaagtttgggtgacagattgagaccctgtctcaaaaaaaaaaaaaaaaaaaggtggtgtttttaaggattgtaaatttttttcaaatggttttgcaaaaaatttttaaaattttaatattttgaaaaacgaaaattcagtttcctttaaataacattaactaatttaacgccttaatcggttaatccaagg

SEQ ID NO: 493434 - DNA, 753 bp, Homo sapiens
  misc_feature (148)..(148): n is a, c, g, or t
  misc_feature (182)..(182): n is a, c, g, or t
tgccaaactagagaatgttgtagattcatgttattgtcctggtcgctgtcactaatcgttatcctgcaggattcatcaagtttgtccatacgcatcttcttacagaatggtacaacatgtaactgtacaataacgagacatcatgccntgagtaaagtgggtggcaattatgtaatgtcagnctgctctcacgtgacaagggcgattctttagtcttagtggggacacaagtcgtgatgcaactgtttcactgcatttggcctgtctctctgagtatcgattctatatcccggtcatttatccccatcctgagtgattttgacacctggggcgtggcctaggaggttcgcatggatttgtcccttcaatcaaatcgcagttgaataatcaaacacgatacgcgtactcgaatggcgatcacattgagatgcttatatactgaggctaaatttcttgacgaaaggcagcactagggggtagcgtttacttcaggggtgcattagaaaggcgccagccggtgcacgactgtagcgaaacaggggataaactagaagcgtgccttggggtcatggatttgaaccattctacttaggaaattccatgcctgtgatgctgcggcagggggtgtccgtcgaggatctttggcccgtcaatattcccgacgattgattggccaataagggttttacgtcgaatggcctttgtgctgctggaccaaatgcacgtcagcggaccttgaccaaaccagtatta

SEQ ID NO: 493435 - DNA, 162 bp, Homo sapiens
taaaatgccacgacaaggagctggagaaatatgtacgacccaaagaatgaggaggacgacatgcgtgagatggaggaggagcgactgcgcatgcggggagcgtttgatgaagaatgtggacaccaaccaggaccgcctacgtgaccctggagggagtccctt

SEQ ID NO: 493436 - DNA, 411 bp, Homo sapiens
gagaatctaccttcatcacatattgagcatggccctgcttcctgaccttgaccttttgtcactgccatcattaatctaggtgagactcctctcagctttttctcccttttgccccttcaatggtttctcattacatagtaattcttttatggcagacaactcctttgatgcactcccccttgctaacctcatgtctgtggagctcttagttccctagccacactagctcctctccactcaaggacatcatattatgcctcttctcaacttaaacacagcttatcagggaagcatttccagattccccacctcttccctgtgactgtttcctcggtagcacttatcactgttttttattttgtatttgtttaactttaattgctacctgtgtcccctcctatctgtaagctc

SEQ ID NO: 493437 - DNA, 1269 bp, Homo sapiens
  misc_feature (486)..(486): n is a, c, g, or t
gcttctgacaggctggtgctcctgcccgggaacatcctccgttgactcaatcatgggcttgtggtctggctcgccaggcgaacctgaagtcgtcaaaccgtggagagtgcctgtcgagctgcgaggcgatggtgtggcgtccgtgacgtgcttagaggcgtgtcgctgcgtgaagcctggggcgaagacaggcaacagacctgtgcctgcacttcgagacgcgctcgtcttcagacggcaccacgggagtacgcctacatcacatcgtagttgcaatacaagcgaaggtacggcggagggccgtgtggggacctgagcagcggtgaggctgtctttcccttccagcctggacagtagtttgcagagaggtgtgcatcaaccgttcgacgcaggccaacctcgaccgtctaatgctagcccagattggattaggaattcaagttccccgaaacgcgctcaacctgtgagtgccatctaactcacatnggcagcttgacggtgacttccaagatctaaatgtagtggcctttgacgtcgataatgcagcctagctccatggaccccaatcagaggcagcttgcctctgatccctctgagctggggctatagaaggaacattcagatacttgatggaaccaacatcaaaaggtgcgcaggccatattacaaacagcgtcggaggactgacccgatcagggaaccatcagcaaggtagtgaactcccaggtggccacgaaggccagcaagggattcccacgctggacattgaggcatctctcatacagcatgagtgcttccgaacgactactccagcatgacacgggggcacctgttttggaaaaaccacatcactaaacggtgttggacagggtggaagcccattgttcggggcctttacatttcctggtgacacaaaatggtggaccggggaaaacaacatctacggcgtgaaaactcactcagacagtggtcatgggagatgtaccatgataattccagtaaaagtgagaccccacaacccgaacacccccaggcggggtcaaagaggaaaacccgtgagactctgatcaccacggacgacacggttgcgcgaccaacacttgggtaggccccgacacagatggtcgcacaagacgatgaacagactcaacaagcgaacaaagcgacgaagatacccgcgatgcaacaaagatgggagatcccacagaggaaccaacgcgcatgactgaagacagagcacccaggactggagaaaaccacggaaacaaag

SEQ ID NO: 493438 - DNA, 376 bp, Homo sapiens
tagcctctaaacgggtcagaagcgaagtctcggctctgtcgcccaggcgggagttcagtggtgtgatcttgagctcactgcaacctcagcctccccggttcaagtgattcttctgcctcagtctcccgagtagccgggactgcaggcacatgccatcacacccagctaatttttgtatttttagtagagacagggtttcactgcattggccaggctagtcttgaactcctgacctcatgatccacctgcctcggcctcccaaagtgctgggattacaggcgtgagccaccgcgcccggcctggacagtgtctttggtaataaagttcagttttttttaatgtaaagtgccacacccaatgacatattttgtacaaa

SEQ ID NO: 493439 - DNA, 227 bp, Homo sapiens
cttagaggatccctccgtaacgagcgctcctaaaccctccgtaacagcgcccttcagtggtggtgctggtgggaagttttttcataggaggtgtatgagtatggtcgtagcggaatcgagtgtatgctagtgcgaattcataagaacagggaggttagaagtagggtcttggggacaacaatatgttgtgtgtagattaagggacagttgcgtcatatgttgttcct

SEQ ID NO: 493440 - DNA, 352 bp, Homo sapiens
tggcgtgcagtggtgtgatcatagctcactgtagtctcaaactctgggctcaagcagtcgtgctccctcagccttccaagtagctaggattataagtgcaagccacaacaccaggctgataggttatttttaatggaatttttccagatgtaatttacaaccatacagtttacctgcttagggtttacatctcacgcattttcgtacaattcacagcttgagtggccatcaccacagtccaacttttagcaaaattttcaagcgccctgagagcaacttcctcatgtctcagtatgcatatcactacttaaacgtttttattacgtgatatgatggcatgtgactttctcag

SEQ ID NO: 493441 - DNA, 135 bp, Homo sapiens
aggagttcgaggctagtcgggcatcatggtgagatgctgtctctgtgaaacagcaacaacaacaacaacaacaacaaattagccaggcatgatggcatgtgcttgtggtaccagctacacgggaggctgagtggg

SEQ ID NO: 493442 - DNA, 492 bp, Homo sapiens
tgaaagttagtgtatctggaatgtactaaatgtactagctactaagagttgtagttattgaaaaataaagtaaaacagacccaagtttcacaaaagactgtccttaaggtccttcaaagaaaaaaaaagcacattataaaagtcatttaagtattttgatacctagacacctgtgaatacaatcctacatatctaccttatacatattatttattatttcaaggccaacagggccagctcaaaacttgtatcattattttttgctcgccgtgaatctgccttgaagctctgaatttaaaagactcaagcaattagtggaaaatcagtcattgtgacaacttttcaagtgggtggggagtgtcttcaaatagccaatgatacggaaactttcttcacgctcttttttatatatttttttaagtctgcatatctaaattgagatcacttgaaatgagtcttgccacactgggcatttagcctaaaattaacacc

SEQ ID NO: 493443 - DNA, 360 bp, Homo sapiens
gaaaggaagaagaggaggtgtgggaaacagcttccacattgttatttaactcatcaccactatttctgatggccctttcctgtgtgtagcaaagcttcttgcatctgacttcttgtaggacacaacacccccaggtgtgggtcagtgtgaagacagcctccagcatcaggggcttttctttcaactttcttttgagtgacagctgctttgtctgcacgagcccgatagccacctccactaatgggcggtgggccagccctcaggttggaagcctcttctctcttcttgtcaaggggtcgatgaccacgggcactgaaaaacctctcctcattgtcgttgacaccttgggatttatctaga

SEQ ID NO: 493444 - DNA, 101 bp, Homo sapiens
actgttgcacacctgagcaaggtcatcatgacaaactttggtatcgtggaaggactcatgaccacagtccatgccatcactgccatcccagaaagactgtg

SEQ ID NO: 493445 - DNA, 157 bp, Homo sapiens
acttcagagaaactgaagagtctgttcagcagtttctacaagcaagtcgggacctccgcttgttctttgtttccaatatttggacacttagagtggtttgtgttttttctcatttactacgtggagtgtctagcgactgtcttgttctaaccatggg

SEQ ID NO: 493446 - DNA, 254 bp, Homo sapiens
  misc_feature (9)..(9): n is a, c, g, or t
  misc_feature (15)..(15): n is a, c, g, or t
  misc_feature (39)..(39): n is a, c, g, or t
  misc_feature (43)..(43): n is a, c, g, or t
  misc_feature (51)..(51): n is a, c, g, or t
  misc_feature (61)..(61): n is a, c, g, or t
  misc_feature (67)..(67): n is a, c, g, or t
  misc_feature (76)..(76): n is a, c, g, or t
  misc_feature (93)..(93): n is a, c, g, or t
  misc_feature (108)..(108): n is a, c, g, or t
  misc_feature (112)..(112): n is a, c, g, or t
  misc_feature (127)..(127): n is a, c, g, or t
  misc_feature (134)..(134): n is a, c, g, or t
  misc_feature (155)..(155): n is a, c, g, or t
  misc_feature (170)..(170): n is a, c, g, or t
  misc_feature (181)..(181): n is a, c, g, or t
  misc_feature (214)..(214): n is a, c, g, or t
  misc_feature (241)..(241): n is a, c, g, or t
  misc_feature (250)..(250): n is a, c, g, or t
  misc_feature (253)..(254): n is a, c, g, or t
tgagttgcnttttcngggatgaggaagtagggttaaacncccnagtttccngagggaggcncctganaggtgcccnttgtcagaccctaccanagcctggataggcanccanattggtcctcgcccntgctcgnactccgtggtggtcctgcccntctccctgcatgccngtgggtctgcnctggtgtgtgaaggtcggtgggttaactgtgtncctactgaacctggcaaataaacatcnccctgcaanggnn

SEQ ID NO: 493447 - DNA, 1361 bp, Homo sapiens
  misc_feature (305)..(305): n is a, c, g, or t
  misc_feature (640)..(640): n is a, c, g, or t
tggaaaaagtctatggaggccatggggttggtcttgaacccagtcttggggggtgttcgatcccttcccttttttggtcttagatttttattgttattccgggtttctctcgaatgtgtgtgtgtggtaggggtggggggctctccatttttgctcccctccgaaggtttagtggaggagtcctctctactatttaggcacttttccgctctcgaagccggacgcctctctcagccctctctcgggcgccagcggcccaagcttctccttctcaaagtgtgtctcttactgtggtcccacgaaantctccgtgtgtgcaagcctcagctgttgggaggggtgatctccctctcttacacccccagagtgtgctttgtgggtttctgttccaagagccctattattcataactctttgagtgctctagagcgcgggaagtgccttgtgacaccattgtgtaaaacagccacattcaagaacccaagagggtgtgtggcatctgaaggtctcccccattgtgttcccacacatatttgtggcaccccacaccgccgcgagcaattatgtgccccgagagagacaccggggatatatattgcgcctttcgcgcctataccccaagaagaagaggcaccccaanagagaggaactcttggcgtttttccacgcccttgaaaatgtccacgccctttttatttctttgggccccacccctgtgtggggacagcggggtagattttgtgggggggccccctatttgttgaaaagcaccccccgtgtgcctcccagtttatttagacgcgctttctgtgagagcgttaaaagacgcgttttccccaagtggaaaaggggggcgccggtggggggaacaccccctgaagcgggaggggaaccctctctcctcccaagtgtggaaggatctccactctgtgtggctccccgagagaatacccaacaccccggggggaggcgttggtcttggggcacatttttataccccggggaggttcctcacacccagggggagacacttggttttccccaagacatgtgtcttcttggggcacaaagggggcgccattttatttttcgggggggaccacccatcgtcgggggtggaaactttcccgggggaagtccctgtgttggtttttgccccctttgtccagagggggggttttaacaacacacccaggggatgttggtgcgtctcttctaaccaatggtattatttaaacccctcgggtttgtgttccccccaattctctcgggggggccactcttttatacgcaccgtcggtgtgtgtagaatatgcacaaaagagacgtcatgatgttttccccccccgcggtggtgtgat

SEQ ID NO: 493448 - DNA, 645 bp, Homo sapiens
cacaacgatggtcctcagctactaagggggctgaggtgggaggatggcttgggtccaggagatcaaggctacagtgagttgagattgtgccagtggactgcactccagcctgggcaacagaacaagacaccacctcccccaaaacccaaaaaaagacctggcattcataaatgaaacaacgacacacacacacacacacgatgcctttctctcactgccttaaaaacgctttgtcttcagggttcattagtttgactctgacgtgacttgctgtgaatttatttggatttatcctactcagggttcactcagcttctgaaatttgcagatttacagaagctgaggaccatcgttgcagctcactgcaacctctgcctcccaggttcaagcaaatctcgtgcctcaccttctcaagtagctgggatcacaggcatgtgccaccatgcccagctaatttttgtatttttagtagacacggggtttcaccatgttggccaagctggtcttgaactcctggcctcaactgatccacctgggcctcccaaaatgctgggattacaggcttgagtacagtggtgtgatctcagctcatgcaacctctgcctcccaggtggatcagctgaggaccatcgttggggatctcta

SEQ ID NO: 493449 - DNA, 604 bp, Homo sapiens
agatcgttttgtctgttctagagggaacgattgattctgcacaggcgcgatttgctattaagaatatactccagttaggtgatgggggctagctccctatacatgggaaatcattcaattatttcaatcataaagattcacgctatgtcattcggggacatggccatggattgcttcatattccgaagcatgtaatactcattgccttttttgtagacgtcacaatgaactcaatgtactattggatggcgaccttaaatgctctcaacattaccagaggcaacgtttgatgcttattctacataagatatacactattacatacttcttgacaatgacacgtgtataattgatgcttgacgctcatggtccgcaaattataatctgaagaaataacttagatcgaaccactgtcctcacactagtgcgtgcacatccaaccgaattaacgttctactatatttaaacacaagttgagctctccagtgttacatcttttctcagcaatcaagtatctcaagtcttatcgatttactgatacctcgatgaccaacaagctattctggtaactaccactgcgttacgcaagtgtgaacaacaattt

SEQ ID NO: 493450 - DNA, 419 bp, Homo sapiens
cacaacgatggtcctcagctactaagggggctgaggtgggaggatggcttgggtccaggagatcaaggctacagtgagttgagattgtgccagtggactgcactccagcctgggcaacagaacaagacaccacctcccccaaaacccaaaaaaagacctggcattcataaatgaaacaacgacacacacacacacacacgatgcctttctctcactgccttaaaaacgctttgtcttcagggttcattagtttgactctgacgtgacttgctgtgaatttatttggatttatcctactcagggttcactcagcttctgaaatttgcagatttacagaagctgaggacaacgatggtcctcagctactccggaggctgaggcaggagagttgcttgaacctgggaggcggagattgcagt

SEQ ID NO: 493451 - DNA, 1106 bp, Homo sapiens
  misc_feature (900)..(900): n is a, c, g, or t
agcggggaggaatgacgcgagccatgaggctgctgcggcgctggtgcgttcgcggctctgtttgctgtcgctgctccccagggcccggtcttgaggagccaacgggtcctgcctggtacgctcgtgcgatgaggggggctgtacggccccagctgagtgaggccctagcgagccccgtgaggtcacggaaaccgcagccgccgctcggtgagttagtgggcgagctgccgcgggggaaggaggtccgaagagcacgcgagcgtggaacacaagggtccgccaggagccagcaggtggcccgcctgctccagtcgtgggccacagagtgagtgttgcgatcagtcgccacgcgtgtcatgtcctataacttcaacactggatcctgtgagcgtgaaaccaccagcgtaccatcatccatcgcaatattgtggagcgcgcacgttcagccgattgaggggagcaagcacaagacaacagcacctggtgcgcttgagaagacccatacttgttagcgtatgccatggggtgacatgcgtacctgtggggtgcatacccgccgcattgtccctctactgctcaggatcacttcttcgcaacacttgtcgcacggaatgactagccaattgggaggtgcttcttctagattggagaaacatttggacttgacattctgttggacgcgcccaaacgtaaggatgtggcttggtgcaccgtttgttgggtggatgaccctcgttccatggggacgcccggtttcaggcgccacaaaccgttcaatttcctacgctgtgaatccccgctgcattcacataccggcaaggaattcctcaagcattcttggcactttgcaaaggggcaaaccccaggtggccttgtcgtatggttccagaattagttgcnccttggcctcaaggttcagtggctccacataccctagatatcctggggcctgattgctcttgaggtaaacgcgcaagcaggggcgacgcgttcgttgcccgaggtgcgccctatggccttaacaagttggcacacagatggaaaaacccaacgggtaatttttggaaggcttcacacttgttggagttgcacacggactcctagcc

SEQ ID NO: 493452 - DNA, 254 bp, Homo sapiens
caatgcgggcagcacggcaatcatatcccccaatattgggtgcctggaggtccaatcctgccaccaccacctattaatccaccctttcccccaggcccctgatgctcctcccccaggagtctccccatggcagatccatgcttaccccccaggtcgggcccctcatcctgatgccactagcacggctatccaggcatgccacccgttgggtccctaccgctcctcacatacccaacgcctgacccctggaatcc

SEQ ID NO: 493453 - DNA, 187 bp, Homo sapiens
gaactgttgtctgtcctatagcgctatgtgctgtgctgggtgtacactgtaccccacttggtccctatgctgacccagtgaaattgcagacctgcccctccaaactccacagtattggacccttgtgggctagtgccatggccttctacatgcctaccacctaatgaagcttgaatatgttgactgc

SEQ ID NO: 493454 - DNA, 103 bp, Homo sapiens
tcttggtattgaagttttgacttgtctgtctcctgaaactaaacatggtgcaacacaggactttttggatccctccagaaagtgtcagacgttttttcattga

SEQ ID NO: 493455 - DNA, 212 bp, Homo sapiens
catggtacgatactgtcaactctggaacaccattatctcattacatccaagaatattaattctctctaacattaccgcaaattcattagaatctccatgctcaaaatattcctgtatgagtaggtgttaaagtcttctcatgtgccctttcatccaaaggcgagacaacggtttcatcaaccaccgttctccttcgaggggagaagaccctg

SEQ ID NO: 493456 - DNA, 683 bp, Homo sapiens
ggcacgagctggttttaaagacaacttggcgcttgagatttaaggtgggacatagtgcggaggggcttggttagggccgctcatggaactgctcggaggaggtggtccagaaacaccactcatgcctgcccggcacgcagtggatgaccccgtggaagcctagacgccctccgttgaaggcatcaggcggggtggatcagccgcctctcagaaaacccttttagtgggacggggcaggctgtgtccccacaagagcgagaaccggcccgaagcaggactgaggaattccatctgcctgtaaaccctgcgtgtaggcttctctcgggaggataaaccttggtctaggaaatctctttagattccacccccaccccaggccccgcccagatattttcttttctgggctggacgtctgcacttcattcccctctgggggacgggataggagcaggacaatccccaggcccgggttcctcgattttgggggcacattctggccaccggagcctctttggtaaaccttgttcccacaggggttgttccaaagaaggcttttggcctggaaaaggctggtcccgcccccacaactttgaccgttcctggagcttaatacaatggatttattctgaaaacaggaaacaaggagttggggctggcagggctctcccggaatcccccggcgg

SEQ ID NO: 493457 - DNA, 927 bp, Homo sapiens
  misc_feature (927)..(927): n is a, c, g, or t
gtcccttgtatgggagctgttttcatgctatttcactctattaaatcttgcaactgcactcttctggtccatgtttcttacggctcgagctgagcttttgctcaccgtccaccactgctgtttgccaccaccgcagacctgccgctgactcccatccctctggatcctgcagggtgtccgctgtgctcctgatccagcgaggcgcccattgccgctcccaattgggctaaaggcttgccattgttcctgcacggctaagtgcctgggtttgttctaattgagctgaacactagtcactgggttccatggttctcttctgtgacccacggcttctaatagaactataacacttaccacatggcccaagattccattccttggattccgtgaggccaagaactccaggtacaagagaatacaggaggccttgccaccatcttggaagcggcgtgctaccatctcggaagtggttcacaccatcgttgggagctctgtgagcaacggacgcccccggtagcattttggcaaagccacgaaggacatgcaaagtgaatcgaagctgtcaaactacaagtggagccaagatgcagccaaagactaagatctgccgcagacccctggacggctgctagccgcgatctgatgttctgacctcaggacctcctgaggaaatctcagtggcaaccgctataaggcccaatagcagaagcacgtagaaggtcgcggcaactccaaaggactaggattccgggccatgggcctcagacggaaacggatcctagcgaagaacaaagcaaggaggacccccgacacggctaatccccccgacagagcaccttgcagggggatacattgtccgcgcgagggaaactccagacgaccttcggttaaaaagtttgtcctcccctcgtgtggcgtgttcctgcn

SEQ ID NO: 493458 - DNA, 304 bp, Homo sapiens
agatgggcgagatttaacaccagagatcacaatagttcatcaccactatcacaagaacagcacccagtggatcacctgaggtcaggagtcccagaccagcctgaccaacatggcgaaaccccgtctccaccaaaaacacaaaaaattagctgagcgtggtggcgggcaactgcaattccagctattcgggaggctgaggcaggagaatcccctgaaccggggagacagaggctgcagggagcggaagacagcaccacttgcactccaggcctggtcagtagaggtggagaacccggtctccaca

SEQ ID NO: 493459 - DNA, 118 bp, Homo sapiens
tgggtcggcacttacctcattcagtctgttccagctgagctcatctatggatcacaccggtggtgctgctagctggcagtagaagaatggctacgtgactgtcagtgagatcaatagc

SEQ ID NO: 493460 - DNA, 114 bp, Homo sapiens
  misc_feature (39)..(39): n is a, c, g, or t
  misc_feature (85)..(85): n is a, c, g, or t
tgctgcacctggggactgtgaccgactttaagcaaaccnccaacaaagggtattggttttcagttccgctattggtaagcattgnttccctggtaattcttctcgtcctaatct

SEQ ID NO: 493461 - DNA, 354 bp, Homo sapiens
cttacataattaaaattaacaagaaggtattataatatataaaaacttagtttcccctgagagttattctactttttaaaataaaaacttgtgttcacttccaacataaatatgttctcatgtaatttacaattataagacatgttccattctttaattgaggtgaaatacacataacatgaaattaccattttaaatgaacagttcagtggcatttaatatctttacaacgttgtccagtcactgctactttctagttccaaaatattttcatcatatcaaaataaaaccttgtttccaataaggagttatttctctgttatgggttgaatcgtgcctcactgaaaaaaaaaa

SEQ ID NO: 493462 - DNA, 467 bp, Homo sapiens
  misc_feature (265)..(265): n is a, c, g, or t
ctctactaaaagaaatgcatgcttgtcaggtgcagtggctcttgcctgtaatcccaacactttgggaggccgaggtgggcagatcacctgagatcaggagtttgagaccagcctgaccaatatggtgaaaccttgtctccactaaaaatttgccaggtgtggtggctggtgcccactacttgggaggccgaggtgggaggaccgcttgggcccgggaggtcaaggctgcggtgagctatgattacaccactgcactccagactgngcaagagagtgataccccgtccctaaaaaaagggcgggcgctttttttttttttttaatagggatactgaagggtctttattacccatgggccaccaacagtttcccagccacttgcggggccctctaggtctctccagcccactctagggacccaagaaatgcagccacagtccatctctcttttttctctccttcggggg

SEQ ID NO: 493463 - DNA, 121 bp, Homo sapiens
  misc_feature (10)..(10): n is a, c, g, or t
  misc_feature (41)..(42): n is a, c, g, or t
gaacccctanaggcacttaattgattagataatggcatttnnccgatgtgttaatgaattaagtgcctttagatggaattctttttttttcttcaaagaaataactattaaaaacctcaca

SEQ ID NO: 493464 - DNA, 103 bp, Homo sapiens
attctcttcaagctccactcccgggtcataccattctcctgcctctgcctgtagtcccagctactcgggaggctgaggcaggagaatggtgtgaacccaggag

SEQ ID NO: 493465 - DNA, 787 bp, Homo sapiens
ccggggtcagagaagtgctaggacataatgcccggcctcggccaccctgcacgtgcgtccaacatgccgccctcaagtctgccgaggacggatctcaaggtccctgttttcccagccaatggggggccgtcgtcaaaggatgtcaaggttgcttcccagataggaccggcaaagatggcactgatccagatgggctccagtggaggaggcggtccaggccctcacttgacctgcacaaccacgacctcgcgggagaaccaccacctgcgggtctccttcgtccaaggtccaccatctaggggcacaggcccccacggccgggccccctggcgacaactgtccatcattccagagaaaagccacgttgtgaagacagcctgaaggtgaccttagcagaccagagatgtttagtgtgggtggtaaagagaaatcaagtttaccatgttgtcgtaaaaaaagttaaatctagttcaccttgctcaccatgcaggtgacagggacagctcaggctcattggtgactgtggcagcgggagttcccaggcccatccacaccacggggccagaccctcaggggccatgcctttgctggggcctgtgtcgggcagtggggccatgcaggtgggcagccaccgaccacagacttggcttccttgtgccttaaaaaacctgccttcctgcagccacacacccacccggggtgtcactggggacccaagggtgggggggtcacaccagagagaggcagggggcctgccaggctcctgcaggatatgcagctggggcac

SEQ ID NO: 493466 - DNA, 1614 bp, Homo sapiens
  misc_feature (153)..(153): n is a, c, g, or t
  misc_feature (527)..(527): n is a, c, g, or t
  misc_feature (1251)..(1251): n is a, c, g, or t
  misc_feature (1359)..(1359): n is a, c, g, or t
tgcacgttgcgccacaacgccaactgtggtgttgcagattgtgcttttatctgctcggacgagatattgagaaatatagttttgtcttgcccacgccacagatgagatgatgtggttctcacaaagacgggtgtgaaaataataggcgcgccngtatataattattcccgccgcactatgtatatataagatgaaaccattgggcggcccttcacaccaaagaaggggaacgagcaacgcccccgaacgaggagaaaattttgggggggggagaaaaaacaccgcacgaacaacactgctcccgcagaagaagagaatgattgtggatctccccccgcccataatatacccacaagatgtgagatgtatgatatttaaggggaaccacacaactttgtggaagcgacccaccacccacagaaatttgttggggcccccccaacgagaaaaaatagggggaaatgtggagaaggcacacaaaccttgcccttggaaggggagatatatccccgccaacgagagttatnaattagaaaattgggggagaaaaaagacaaagtttgggttctcgaagaaaatttatggcgcccccaagagagaagaattgttataatttatcattttaaggcccccccacctctgggttgggggtctccccctcggaggggccctctgtggttggcgttatcctatttaaaagggacaaaggttttccccctatgatttattacaaggacgaaaaattatcggtttggagaaaattggggagtgggagagaaattatagagaagaaaaagggttttaaaaaaattataggggagagcacaacgcccagttattacagcacagggtgttctccagagagagaaacacttaaaatggggagacacttctcacactttgagagggagaccctcacagggagacaccaaactcggaaaagagtgtgaaaagagatattttcccctttggaggagttcacacagtgaggcaccactctgagacagaaatattgggagaggttcacagaaaaagttgttggttgggactcgaatataactcgagacccacaaaagagggctctttataggagaagtgtagaagttttcacaggaatggctctttctataaaagtgcacactatacttcacagagtatagagaatataaggagagagaataaaagagagaatatgtttccaccagctgggtgcacacatttatagaaacataagagaggccctcgagaagnttatattctgtaaagtttttcaccacggcgcccacacttgtgaacgctcacgccctcggtttctataatatccccacttatattataatatatcacacacttctgacnacagctggaggagaaaatataaagagagagaaatatggtttctttatatcacacaaaactgtgaactatttctgccacccacgaattctgagaaatcccacaggagaaaatgagtaaatgagattcacggcacctggttccacctggctgagtaactagcacgtattgaacttgagaatttaatccactctctagcttttctaaagttaaacttaagaccgtggatcgatatctttaccagaaaccagaagacca

SEQ ID NO: 493467 - DNA, 742 bp, Homo sapiens
gcagtgactgccatgttcccaggctccagcccgtggagagggagagggcacatctgggtatgccgccagtgtgtctttgcgatcgccaccaagaggggaggtgccctgaagaagggcccctatgccctgggccatgctgtgtatgaacgctttctctgccatatggactgaaaggcgcgtggcacatgcgtgatgcttggacatctgagcaatcgacagcggagagttcactgttacttgtggtgggccctggggagtggaacctcgaaaatgctgcagtgccggatcctgtctgcaagtgattccatgatgcctgcacccagtgtcttgagcaaagcccccgtcctctatgcgggagcagtgttctatgaactttgaacttgcttgtgtgtgtcggtcgggtgtgcccttgagcacaaagtccggagagctagcagcttcgctgggtggagtgtggcccgatcttgtcctgtatcatccgtcagtgttgtgctgtaatcaatgaaatactttgactctttgactctgtgagatccctccccttcagctatctgagaacttggggacaggttttgcgtcctgggggcagcttttcagaagacccgcaaacgggaggacacagttctgcccaaagctccgtctctgctctttaagcaggcacagaggacccgtgtcaatctcaggggagaagcgatcagaagaaggaagtgtctgccctggactcccaggatccggctgcgtc

SEQ ID NO: 493468 - DNA, 629 bp, Homo sapiens
  misc_feature (3)..(3): n is a, c, g, or t
  misc_feature (75)..(75): n is a, c, g, or t
  misc_feature (79)..(79): n is a, c, g, or t
  misc_feature (84)..(84): n is a, c, g, or t
  misc_feature (116)..(116): n is a, c, g, or t
  misc_feature (128)..(128): n is a, c, g, or t
  misc_feature (132)..(132): n is a, c, g, or t
  misc_feature (135)..(135): n is a, c, g, or t
  misc_feature (141)..(141): n is a, c, g, or t
  misc_feature (145)..(150): n is a, c, g, or t
  misc_feature (171)..(171): n is a, c, g, or t
  misc_feature (173)..(173): n is a, c, g, or t
  misc_feature (209)..(209): n is a, c, g, or t
  misc_feature (215)..(216): n is a, c, g, or t
  misc_feature (227)..(227): n is a, c, g, or t
  misc_feature (234)..(234): n is a, c, g, or t
  misc_feature (243)..(243): n is a, c, g, or t
  misc_feature (245)..(245): n is a, c, g, or t
  misc_feature (248)..(252): n is a, c, g, or t
  misc_feature (279)..(279): n is a, c, g, or t
  misc_feature (288)..(288): n is a, c, g, or t
  misc_feature (293)..(293): n is a, c, g, or t
  misc_feature (302)..(302): n is a, c, g, or t
  misc_feature (309)..(309): n is a, c, g, or t
  misc_feature (326)..(326): n is a, c, g, or t
  misc_feature (329)..(329): n is a, c, g, or t
  misc_feature (371)..(372): n is a, c, g, or t
  misc_feature (375)..(375): n is a, c, g, or t
  misc_feature (377)..(378): n is a, c, g, or t
  misc_feature (380)..(380): n is a, c, g, or t
  misc_feature (386)..(386): n is a, c, g, or t
  misc_feature (389)..(392): n is a, c, g, or t
  misc_feature (399)..(399): n is a, c, g, or t
  misc_feature (408)..(408): n is a, c, g, or t
  misc_feature (410)..(411): n is a, c, g, or t
  misc_feature (420)..(420): n is a, c, g, or t
  misc_feature (424)..(424): n is a, c, g, or t
  misc_feature (427)..(429): n is a, c, g, or t
  misc_feature (434)..(434): n is a, c, g, or t
  misc_feature (445)..(446): n is a, c, g, or t
  misc_feature (448)..(449): n is a, c, g, or t
  misc_feature (456)..(456): n is a, c, g, or t
  misc_feature (458)..(458): n is a, c, g, or t
  misc_feature (464)..(464): n is a, c, g, or t
  misc_feature (468)..(468): n is a, c, g, or t
  misc_feature (471)..(471): n is a, c, g, or t
  misc_feature (474)..(474): n is a, c, g, or t
  misc_feature (484)..(484): n is a, c, g, or t
  misc_feature (489)..(490): n is a, c, g, or t
  misc_feature (497)..(497): n is a, c, g, or t
  misc_feature (506)..(507): n is a, c, g, or t
  misc_feature (513)..(513): n is a, c, g, or t
  misc_feature (525)..(525): n is a, c, g, or t
  misc_feature (531)..(531): n is a, c, g, or t
  misc_feature (628)..(628): n is a, c, g, or t
atnagggaatgataggtcacaggtgacaagtttatagtaattttgtgtggccacaaaaagacgggcctgaaaaangaancaggntgtgaggtcagccactgctgggcacggctcanagtgtggggggnaggngtnggcagngggnnnnnngctcaggagaagaggcatgangncaaccatagcccccttcccttcctccactttcaggntgatgnnactcataaganatcttanactcaaatngngannnnngcggatccagatagagggggccagggnatgagtggntgaanaaggaagantcgctgnaggactgtggggcaganttnagattggcacggggggtgccatgcatcttgttgtagagggtnnttncnntncccctnccnnnntgttccntttttgctncnnattgggtgnaatntgnnntttcnttttcatcttnntnntacttantntatttngtantgnagnggcagtggtngtcgnntgagggngaggatgcnntttttngttttttattgntgttangttagttggcttggttttgcccttcccctggctctttctgtgtttgtggcgggggcgttagcatggggcggctttgggggcgcgtgctggctgtggnt

SEQ ID NO: 493469 - DNA, 583 bp, Homo sapiens
agctgtgtgatgggattgtgtgtctgagggcctttgaaccatgtagttagtaggacttgctgactgttcatgggttatgttttacgagaaaggtctgccgcgcctctcagccatccagtttggctatgggagtgaagtgaacagaagggtcctctggctggagagcagagttcctgcctagagcagcagccaagctgcagcccatccacccactaacccatgtttcacaggctgcccggtgccctggagaaactggccccaaggtctgaccctgccctgcaggagctatgggtctgactgggagatggccttgatcacaactttctaattctgcatgttatgagtgactccattgccctagacccagaattccctggccacctccctgcagggctgtgaagcccatgacaggcctcaccttttctctgctggagcacctgctgtcacagaggcgacagctcctgctgggcttgcctgtgtattttttataagttcttctcaagtgtcacttgtcttgccaggtagatctgcagctccctgagggcagggaccatgaggtgagtgacctccatggagggtctga

SEQ ID NO: 493470 - DNA, 519 bp, Homo sapiens
tgtgctgtagcctacattctgtatcagatggctgctgccttatatgcactcgggtggggagtcgcaacctgccgctgtcctctgggtctggtctagccacaccagggtcaatgctcgccttgcatgtgtccccagcgaggacgcccagttccccaaggtgcattggtcagcccgtgtaacttctagttctgcctggcacaatgaacgcctggatgtgcccgtgtggtgacgtggaagccaccctcaacttcctcaaggtccacttcttcccaaacaacatcatcctggagcttccctgcagctgggtcatctgcccggagggatgtgcagaatgtggcagacctgtcccagatgctggcgatgggagcgcctgtgagctggaaagccggaattcaacgtctggaccctgggaagcctgagatgatgagtttccccaaaaacaccaccccacatgtgccggctgagggacctgagcttatttgaagtcctgcctcattctcactggagcctcagtctctc

SEQ ID NO: 493471 - DNA, 129 bp, Homo sapiens
tgaaattatatttacctatataatgtaattagacttataacacttttatcctgctttaaatcagccagaagttcatctattatattgtattttaaatataccacggtattagaatctatttactgttat

SEQ ID NO: 493472 - DNA, 486 bp, Homo sapiens
  misc_feature (145)..(145): n is a, c, g, or t
actctagagatccattgcaagcactgccggtgatatgtaatgatatgatgagtgtctaggggctgtggttaagagtagaaacgctcccatagtggctgtagctgtccatcttgtctgtctatcggatgctatgtacgtccaaagnaacacagcctcttgagtaaagacctcaacacagggggctctaccttcattcgcacctcggcacggtctcaaaagacagatgttcatatccatctcctgcttgcccagatccaaatccctccctgtcctgctattctatgagtctgcactaaatgcctaacacttctctccgagtgttcaattgctgagaacattttgtgctgaattcatcgaagacagccctgtgttaattcatatttagaacccaacccatttcccccagaagaagacagctagcaacagcagcagaagaggccgactggcaatatttgggttctggcagtagttataaaatctctatgc

SEQ ID NO: 493473 - DNA, 151 bp, Homo sapiens
actttctaagagcattcgttttggaggcgcgaggaccaggtaggttaagtgaacatggtgcaataccgagtttgcctgaggagatcctggtgcatgacgtcagtcgcttaggatatcggtcatcaatgacagaacgcccggaggagagaca

SEQ ID NO: 493474 - DNA, 728 bp, Homo sapiens
gtacttttgtggccttggtgtccgatggggctggagggagagtgctctccacgtgacccagcagcacacccatgtgcagtgcgcctgcatactgtgtgggggcagccacaccccttggctgctgtttcctatgggctgcctttctagggggcatgtagactaggacctacgaggtctagcactgagctccatttgaatgatacctttcctatcccatattcccccacgagaagcagccgcttacagggttattcagtcctctgcctcatggctgaaattgctcatctcgtctgcagatgtctactatcctgtctacctaatgcactattatgtattgattctccatgagacagagagagagagagactatcagatagtttacacccaaagggtaggttttgtatatatttccagccttttttattaaggggaaggggagagttataaaaacccaaaccgttgtggtattaaggtgtatcatttataaaagggagagagaatctatataaagctatatcagatcagggcatagtcatccttatatggtccaatgtataccttgtacttttaaaaaaactttttataagaggaaaactaatattagtcttaggtgtacactaactcttcgtggtacacattgtatatatgtattcagttcatatcatcagatatggttagccatctgaaagactggccaggggtctgaaagatcgttgagaataggagat

SEQ ID NO: 493475 - DNA, 107 bp, Homo sapiens
gagagacctcgatcccagatgcgaatgtctgatactgtcgtggtactgttgtcaaaactaaaagagtgacattgggacactaccattcaccaaaccccagtgcttca

SEQ ID NO: 493476 - DNA, 1609 bp, Homo sapiens
gacactgttccctgtgcatcagtacagttggcccagcctacagggcccggtcgatcttcatggtgaacaggttctatgtcagacgcttgtgtctctttttcccggatctctgtcgtccttccaacacgctacagagggcttggcatgggcgtccggggcgtcgttgatcgagtcgggcgatagcgctgcgagtcgatctggaccagtcagatgccaaggcagtctcgacgaacggatgaagggagtcctcgagtgacaaacatcccgtagagaccgagctgcgcttaggactccgtatagccatgtgacgtgagatgaggcatgcctgagacgcaccagtagaaacgcaggcacgtgctttggacgtagcttaacagatccaggagcatgcatgttgcaccaacgatggtgacctccaaagatgaggatgaatgtgtgagccaatcttacgtctcgacggatcatcggcatggaccccttgagaggccctcacgtagtcttatcggacttagagtaccttataggaaacgaacttgctcgcgctagtacgcttccgttgcaagcatttggacgagaatagccccagatacgtattggcatgacttagcattggcaccctatctcaaggacgctcccaaatctactagaagaaccagaaggcgtagtgggcgaatggcggccacgaagttcttgttgtgaagcaatgggaccctacgccatagggtgcttccagaaacggttccctttggagtcgaaccactctggagtaattcatcgatcaagtaacttgcggacgctttggggacatcgattgcaggatctccgatagatgcctcatcccatctagtagaagtagacagcatttgctttcggtatcaaattggagatgaaatcgaaaacacatcgacaaagacctgggacaccggttaacagagaggggcccttaccaacaggcgcccacaggaattttgacccaggcacttccttgcagaggatctatggacaccaggtgtggaagaggtaagcaattggacgccccactacagagttcttcacacgtgtaacccttcgggcacaagagaatttcgattggggcagagaccagttcccgagaggcccctatattcagttcgacctgaatggccgttggactttctgggaaaaggaaacacagagtgaatggaagacctaggacacaacaagttaccttggggtcatacagagggcaaggattttggacaggaagacacgcaaaccaaccagttgggtccaccacacaagacgaggatcatgggcgtggcaggggtattggggacaggcttggctttgtagcaagtcggaacggctttcatccaagaaggctgtggacgaaaaccgataacacggtgccccaggctaccatttgtgcgaggacatttcggcaccgtgtggaacatcccagtgacagacaaatacttgaaagcggaccgagttttggcagtaaacaggccagtcatggggaagggtgaagaaagggcgcgggatagcggcgtatcatgaattgtgagcaggttcacagggggagtatcccgtggtgagcacccattgcgatactagggttggacagaga

SEQ ID NO: 493477 - DNA, 339 bp, Homo sapiens
tttttttttttgagactgagtctcactctatcacctaggctggagcgcagtggcacgatcttggctcactgcaacctccgcattctgggttcaagcgattctcttgcctcagactcccaagtagctgagattacagaagtgcaccaccacaccccgctgatttttgtatttttagtagagaaagggtttcaccacgttggccgggctggtctcgaactaccgacctcaagcgatccacctgcctcagtctcacaaaatgttgggattacaggagtgagccaccatgcccagcaggcatgtccatatattattatactgcacaatattccccgtcgacgc

SEQ ID NO: 493478 - DNA, 241 bp, Homo sapiens
acagggaggccaggtgttctagtggtggagttccaccattttggggtagtatctttgaccatctttggtgacgttacgttatcccagggtgaggtggaaaagcgtctcacctggaacctgatatatactcaggctgcacttccataccacttcccacataaacggggccacacattttggcactcttatctctggcatccctcatccccgaggaggcatctccatatccccgagaagagga

SEQ ID NO: 493479 - DNA, 500 bp, Homo sapiens
  misc_feature (19)..(20): n is a, c, g, or t
  misc_feature (33)..(33): n is a, c, g, or t
  misc_feature (38)..(38): n is a, c, g, or t
  misc_feature (40)..(41): n is a, c, g, or t
  misc_feature (59)..(59): n is a, c, g, or t
  misc_feature (63)..(63): n is a, c, g, or t
  misc_feature (66)..(66): n is a, c, g, or t
  misc_feature (70)..(72): n is a, c, g, or t
  misc_feature (82)..(82): n is a, c, g, or t
  misc_feature (104)..(104): n is a, c, g, or t
  misc_feature (209)..(209): n is a, c, g, or t
  misc_feature (216)..(216): n is a, c, g, or t
  misc_feature (231)..(231): n is a, c, g, or t
  misc_feature (235)..(235): n is a, c, g, or t
  misc_feature (242)..(242): n is a, c, g, or t
atcgagcttgggacccganncagtttacacaanctgcntnnaatccaagaaatcctagnatantcngaannncatgcatatncatttagtaagacctacatttntaaatgtatatgcatgtatttcagattatactaggatttcttggattagaagcacctacatttctaaataaattacatgcatgatatacaataaagaatactaanatgaaanttcaggacatttatntttntgcatgnaaatttaactactgtataacacacgcacatacaaaacaaacccacaaagcaacagtgtgtaataggtagtgagagacacacaaaataagcatatttaaaacgcctacaaacagcctttttttttaggcaacaaaatacgtccagtccttgacatcttctcatactcacctagcaccacagatgcaaggacctaacagtaaacatgtacaatctcatgcttaacacctaaagcatgcactgaatttgtgtaaactgatt

SEQ ID NO: 493480 - DNA, 141 bp, Homo sapiens
gtgaccaagaaacacaggcatgaagaacacttccaaaaacaaataccccgagaatccagtatcataccagcaatgatggaaatgatgggcaacccaagattctgaatggacttgcatgaagccatatgcagttcccagcgt

SEQ ID NO: 493481 - DNA, 437 bp, Homo sapiens
  misc_feature (19)..(20): n is a, c, g, or t
  misc_feature (33)..(33): n is a, c, g, or t
  misc_feature (38)..(38): n is a, c, g, or t
  misc_feature (40)..(41): n is a, c, g, or t
  misc_feature (59)..(59): n is a, c, g, or t
  misc_feature (63)..(63): n is a, c, g, or t
  misc_feature (66)..(66): n is a, c, g, or t
  misc_feature (70)..(72): n is a, c, g, or t
  misc_feature (82)..(82): n is a, c, g, or t
  misc_feature (104)..(104): n is a, c, g, or t
  misc_feature (146)..(146): n is a, c, g, or t
  misc_feature (153)..(153): n is a, c, g, or t
  misc_feature (168)..(168): n is a, c, g, or t
  misc_feature (172)..(172): n is a, c, g, or t
  misc_feature (179)..(179): n is a, c, g, or t
atcgagcttgggacccganncagtttacacaanctgcntnnaatccaagaaatcctagnatantcngaannncatgcatatncatttagtaagacctacatttntaaataaagagcaggcatgagatacagctaagcgagactaanatgaaanttcaggacatttatntttntgcatgnaaatttaactactgtataacacacgcacatacaaaacaaacccacaaagcaacagtgtgtaataggtagtgagagacacacaaaataagcatatttaaaacgcctacaaacagcctttttttttaggcaacaaaatacgtccagtccttgacatcttctcatactcacctagcaccacagatgcaaggacctaacagtaaacatgtacaatctcatgcttaacacctaaagcatgcactgaatttgtgtaaactgatt

SEQ ID NO: 493482 - DNA, 436 bp, Homo sapiens
  misc_feature (46)..(46): n is a, c, g, or t
  misc_feature (48)..(48): n is a, c, g, or t
  misc_feature (50)..(50): n is a, c, g, or t
agtctcaatggtgaaagtaaatttaaaatttttattttggccaggngngntggctcacgcttgtaatcccagcactttaggaggccgaggcaggtggatcatgaggtcaggaggttcaagaccagcctggccaacattgtgaaaccccatctctactaaaaatacaaaaattgtttagctctgtttttcataatagaaatagaaaaggtaaaattgcttttcttctgaaaagaacaagtattgttcatccaagaagggtttttgtgactgaatcagcagtgcctgccctagtcatagctgtgcttcaaaaacctcagcatgattagtgttggagcaaaacaaggaagcaaagcaaatactgtttttgaaattctatctgttacatctatttcttatttcaacaagttgagttatagtaatttagtacaaaacaacg

SEQ ID NO: 493483 - DNA, 402 bp, Homo sapiens
  misc_feature (167)..(168): n is a, c, g, or t
  misc_feature (170)..(170): n is a, c, g, or t
  misc_feature (244)..(244): n is a, c, g, or t
  misc_feature (261)..(262): n is a, c, g, or t
  misc_feature (373)..(373): n is a, c, g, or t
  misc_feature (385)..(385): n is a, c, g, or t
ctggggtgcctgtgctataaatgagtttcttcacatgaaaaacacagccagcccaagatgacttatctgggtttaggattcaatagtattcactaactgcttattacatgagcaattttcatcaaattctccaaacttcttaaaggaatgctttcggaaaacacgcnntngtataccctagatgatcgactaaaaatgcaaaactccttgggctttggttctttcttctatgtaaggatttctnaaaataactgccgactnntcaaaagggtgtttcttaaacacgacaaaataaactgttaaagaaaaattgtgaaagctcttggaaaacccacaattgtgtaaatatccatgtgtattttttcattaaaanggtttctgtaantaaattttctaagatta

SEQ ID NO: 493484 - DNA, 267 bp, Homo sapiens
tgagacggagtcttgcgtccgtcgcccaggctggagtgcagtggcgcgatctcggctccctgcaagttcgcctcccaggttcggcgcgatctcggctccctgcaagttcgcctcccaggttcatgccattctcctgcctcagcctcccgagtagctgggaccacaggcacccaccaccacagccggctaatttttgtatttttagtacagaccgacgagctggtcttgaatgcttgggctcaagtgatctgcccacctcaggtcgac

SEQ ID NO: 493485 - DNA, 970 bp, Homo sapiens
  misc_feature (46)..(46): n is a, c, g, or t
  misc_feature (48)..(48): n is a, c, g, or t
  misc_feature (50)..(50): n is a, c, g, or t
  misc_feature (734)..(734): n is a, c, g, or t
  misc_feature (755)..(755): n is a, c, g, or t
  misc_feature (763)..(763): n is a, c, g, or t
  misc_feature (835)..(835): n is a, c, g, or t
  misc_feature (845)..(845): n is a, c, g, or t
  misc_feature (852)..(852): n is a, c, g, or t
  misc_feature (859)..(859): n is a, c, g, or t
  misc_feature (866)..(866): n is a, c, g, or t
  misc_feature (884)..(884): n is a, c, g, or t
  misc_feature (926)..(926): n is a, c, g, or t
  misc_feature (939)..(939): n is a, c, g, or t
agtctcaatggtgaaagtaaatttaaaatttttattttggccaggngngntggctcacgcttgtaatcccagcactttaggaggccgaggcaggtggatcatgaggtcaggaggttcaagaccagcctggccaacattgtgaaaccccgtctcgagcggggtgcggtggctcacgcctgaaatcccagcactttgggaggccgaggcgggcggatcacgaggtcgggagatcgagaccatcctagccaacatggtaaaaacacaaaaattagccaggtgtggtagcgcgtgcctgtagtcccagctactcgggaggctgaggcaggagaataccttgaacccgggaggcggagtttgcagtgagccgagatcgcgccgcgccgacccactgcactccagcctggcgacagagcaagactccctctcaaaacaaacaaacaaacaaacaaacaaaaagcaaagcctgatctctactaaaaatacaaaaattgtttagctctgtttttcataatagaaatagaaaaggtaaaattgcttttcttctgaaaagaacaagtattgttcatccaagaagggtttttgtgactgaatcagcagtgcctgccctagtcatagctgtgcttcaaaaacctcagcatgattagtgttggagcaaaacaaggaagcaaagcaaatactgtttttgaaattctatctggtgcttggactattttgtaataattaaactttgatgntgagaaatcccactttattgncacttcantgcacttgaattcatggcttaaagtgagattggatttctaatgacgcctttagtaatcccaaccataaggtnaaatctatgnatattgngtatatntaaaccncgtttaacctaaatgganttcctggttaattccagggaagactggttgggaaacttttantaggtggttaccnaatactggtcttcctttcggcataccctaat

SEQ ID NO: 493486 - DNA, 228 bp, Homo sapiens
tagcaggcgctccagagtgtacttgaagccgatgtgaaaggatggctgctgattgtctagcaagtgaccctgctgaaaaactgtgtggggcctgtgcaaacttcgacgggaaccagaccaatgattggcatgactcccaggagaagccagcgatggagaactggagagcgcaggacttctaccccatgttatggctagaatcagtcatccaccaggaacgaagatttc

SEQ ID NO: 493487 - DNA, 204 bp, Homo sapiens
  misc_feature (46)..(46): n is a, c, g, or t
  misc_feature (65)..(65): n is a, c, g, or t
aagggacgggaggggaccccttttttttttttaaggaaacggggcnattttaagatgtaaaaccnaaactttaaaagtttggtcgggtcgtttgtatgaaaatttgaggctttgggttaaatctttccctggattgtgatttccctttagatgtattggactaagtgaaacttgttaaataaattttccttttaaaaactggga

SEQ ID NO: 493488 - DNA, 1964 bp, Homo sapiens
  misc_feature (1889)..(1889): n is a, c, g, or t
gtgccctgcagaagcgcgctctgttgcagtatcgtggttcctgggacggtgtccctgcgagtgattgcgcgagcagtgaagggtgcgcatctgcaggatatcggcgagggagtgactgttgctgcaccttcccgtgccataacgatcgctcacttcctcaagggactgcgtggcgatgcgcgcgtgtgagtctagcgctgtaagcgtctgctcgctggcatcgcgtgcatccttatacctgccgtgtctcatgagcgagcctcatcgcgcggccacacaacagtctacactccttccgctttcgcgtgctgaatcctagcgcatctaagcctagcggggatggatcacctacggcgcgtggccacgcgcgagcgagtaacttctcaaagtctcgctttccctgtgctagactctcggagacttgtacactagaccgaccgcaccagtgctggtaacagcatgacgtcgtaggcaacctatggcgcgtgaccgcgcgcggcaggaagggacgctaacgcaccagcctaggaaggctaagccttgtgcgtgttccctcgggtgcagacaaaccgcaccgtgctgattacccttgggctgacctttcgcaagcaccgacataccgaacgaagcgcacgcccctgcagcgaccaccgccacgcgaacaggtcaacacccgctggaccgtagcactgggcggcaccttgcgtcactcgttgcgcaggcaccaaacaccaccatgagacaacgaaggcaacctggccgcgctggcgaccgcagcggcgcacaccaccgctgcgcctacaagccctccactcgcgccctagcctagcgcccccccccccactgccgctcggaccccccgctgggactcctgccgcacaccccaccacgcgagcgcaccatgccccatcacccaccaccgcctcacacccccctagcgcactcaccgccgccgccaccggcgccccaccgcacacgccattgctgccgcaccctccccttacgacaacaccgcccggcccacacacctggcagcatccccaaccccagaaacctcaagcgcgcacacccatgctcccactaaacagcaggcggcccggacgcccagccgtcctgccccgcggcaccacacgcaccagcgcgaagctccaacatacgcacccccctccgcaccccccatgcacgagcgccccagccccccggacctccctcgccgagccactcgcatcgctcccccgccggaccctgcgcctccgcccccccgcggccgccctcccatcgctttggcccccggcgtgacttctgccgaccactagccgctcggccccccccttagcctcgccctacggcacagtgaacccccttggggcgctccaactggggcccgagcgacctccggacgcaaccccttcggcgccccctatgtcagcatatcgcgaacgcaccccgcgctaccccccagcgcacacccagcacccacgtcagcacagcgacacgtaggtccccgaactggtcgcgcactcatcgcgagccacatcccacccgcaccccgaccacgactcctacaccccacctgcactctctggccccgcccggctcccctcctctccacaaccctctgcacactctccgcgacccctctctcaactcacggcccgacccccacacatccacatccccacacctacacggcaacaacagtaccacaacacacagcaccacacaattacccgaagcccacctgacccacaccacaacagcatcgcgggcctcgcacacacatccacacatccactaggacactgcacaacaccgctcagacgatctaacactacctcacgatagcagcgacgaaccccaacccactgcactccagctcgctgaaccanacacacgcacaatcaatagacaccacgcccacatacatcctactaacaacagctagccggcttccagcaacatag

SEQ ID NO: 493489 - DNA, 231 bp, Homo sapiens
  misc_feature (9)..(9): n is a, c, g, or t
  misc_feature (64)..(65): n is a, c, g, or t
  misc_feature (76)..(76): n is a, c, g, or t
  misc_feature (91)..(91): n is a, c, g, or t
  misc_feature (139)..(139): n is a, c, g, or t
  misc_feature (172)..(172): n is a, c, g, or t
  misc_feature (185)..(185): n is a, c, g, or t
ggtgtctgnataaccctttgtggagaatgagattccccccacctgtgttgagaaaaataaacannctggagtcttngttcctgactcccanaaggaacgagagcattcccaggaaagagagattccctcggaaaatttnaaaatgtgaatcctagggggaaattggggattntgtctttccctgnttgaaaatgtttggatgggaataaatattcttcaggaaacataaaa

SEQ ID NO: 493490 - DNA, 406 bp, Homo sapiens
  misc_feature (40)..(40): n is a, c, g, or t
  misc_feature (241)..(241): n is a, c, g, or t
tgttgttggtgaatataatgacgttgttcttttttttaanaaaatttgtatttttaatttttgtgggtacacataggtgtatataaggcatgtgtgatactgtgatacaggcatgcagtgtgtgtaaatcacattggggaaatggggtccccgtcacttcaaacacttacactttctttgtgttacaaataattcagtgatacttttcgttatgtttaaatgtgtgataaattattgttgnccatagtcaccctgttgtgctatcaaatactaaatcttactcattctgtttttgtactcattaaccatccccatctcttcccccggccccattcctcttccgagcctctgggagccatccttctgctctatctccatgagttgaattatttttatttttagttcc

SEQ ID NO: 493491 - DNA, 285 bp, Homo sapiens
gcgagtatcgaggatgcgcgcctgcgccgccttgccgccaggcccttctgcagcaacaggtttcgccgatctgcttttcgatgctgtgcagcgggttgagggaggtcatcggctcctggaagatcatggcactgcggttgccgcgccaattttcgcaaggtgctcggtgaggcgccgatcagttcctggccgcgatacttgatggaacccagggtttcggtgccggctttttgcagccgttgcagggatcgaatgggccgtcaccgacttgcacgagcccgactc

SEQ ID NO: 493492 - DNA, 166 bp, Homo sapiens
ccccccccccccaaacagggcccaaagtgtgatgttccccctcctggggccatggggtttcattggtcatttcccccctatgagtgagaataagctggggttgggtttacccctttaaaattttgaaccatgttaattatattttttaaataaatttttttaatga

SEQ ID NO: 493493 - DNA, 1069 bp, Homo sapiens
tatgtattttaggggagagagcgaagcaagcagcccaatagggggggcgcacgcgggggagggggggggggggggcgcaaaaaagggcgcccgacgacgcaaaaacaccggggggtcaacaaggaggagacacacacaggcggggggcgccccccgtcgggggagagagaaccacagagagaaaacacacacaagagagaagagaccccgcgcgagtgattgtggagggagagagagcgcgagcggcgagcgcaggggaaagaggcgcggggtgcgccctctagagaggaggcgggaggggaggccccactctccagagagagcggaacaacacaccaccacacaccacgcgcgaggaggccccccgctgccgaggagagcggcgagaaaaaaagagagggagacaactgcgtgtgcgaacaccgcgcgtgtgtgagcacaaaaagagagcgagagcgcagcgcgtcgtgagcgagagcacacaaccaagagagaccacgaccaacacacacagagaaagacacagagagtgaagagggtgccgaccccacccagcgcgggggggacaacaaagaaccagcgaagagcggcgcggcgccgccgcagagagagacgacggaacagcacacagaacaaaagctgctctctgccaaagaagagacgctcctatgctgcgagacgaaacaccaccacaatcactctctctcctcgcagcggagaggagagaagagcccactgcgaggagagagccgtaccacccagagagaagagcgcggagaggcagagaagaaaccggtccactcaaaagtgagtggcgatgcacaccacgcgcagtgagaaaacacagccgagggctcaagcatggatagatgaggactgcagagataacaccccgccgagaagaaggaaccgctcaccagacaccgcgggacataacacaacaagagaagtgagatgaatcagagacgacaaccacgccgcaggagcagagagagcgcggcgcgacaccacacaccaagcaaacccgtcccggcaacgaaatcaaacaagaacagcggtgcgcagcatc

SEQ ID NO: 493494 - DNA, 131 bp, Homo sapiens
ctctccagtcgcaaccgaagccggattatcttctcttcatcctactcagactataactgtttaatctctcgtttctgctggtccttcatggtctctagtatactcctcaactcgcggacctctgtccttag

SEQ ID NO: 493495 - DNA, 530 bp, Homo sapiens
ttgcagaagtatctctatgatctgtctgcataatgggagactggctcacaggtcttatcttaaccagacattccttctactgattccaggtctgagacataacttactctttaaccaattgccacatagaaaattgtggaattcatgtatgacttggacccccctgcttagagttgtcctgccttttgggactcaaccaatgtatagcttagatatattaattgatgtcatatgtcctcctaaaatgtttaaaattaagctgcagccaaaccaccttgggcacctgttcttgggatgtcctggggctatatcatgggccattgttcactcacatttggctcagaataaatatcttcaaatattttacagtgaatctttttgtcaacattgtatgggcaataagttaaagaagaatatttaaaactgaaaaactaaattgtaaaatgttaagtagtaaagtgggactaagagcattaaaaatcatgtaaatactagagtaaaaaatagagtataaaaatactaaccattaa

SEQ ID NO: 493496 - DNA, 379 bp, Homo sapiens
taatctgtactcattgcgtagagagcaaactggtggttaccagatgctgggaagggtggaagggagcagtgaagggaggctggctactggctacaaaaacagttagaaggaataagttctagtttttgatagtatggtaaggcaactatagttaacaataaagttatgtatttcaaatagctagatgagaagctttgaattattcccaacacacacacaaaaatgatcattgcttggggtgataaatatcccaattatcctgatttgatccttacatattgtatgcatgtatcaaaatataacatgtaccccataaatatgtacaactattatatatcaataaaaaattgtaaaatgcaatcgcaatgagtacagatta

SEQ ID NO: 493497 - DNA, 175 bp, Homo sapiens
ctgctttagaggatccctcataggttcgcaggatggaaagttttcaggttcccaaagggaactctcaaatccaaaagggttatctttgagaccattccattctcctcagtggcttctccagggaattcttacagccaagtggtgacagtcacggcatgggcctgcgaacctatga

SEQ ID NO: 493498 - DNA, 243 bp, Homo sapiens
  misc_feature (59)..(59): n is a, c, g, or t
aggccccccccgggggggggggggttccccttttcccccaaaaatttttttgggggggngggggggggaaaccccccccccccggggggcccccccccgggcctttttttttgggggcttttgggtatttttccccctttttttttccccccccccccttttttggggggggggggtttttttttttttttttttcccccccgggggggaaagttttttttttccccccctttccccttttta

SEQ ID NO: 493499 - DNA, 474 bp, Homo sapiens
caccgcttattctttttgcctttttaacaaacatattatccgaattttttttctgcaagccactgatagtcgctgctaactagcttaattgacctttttacaaagtttgatccccaagcatcctaaactaaatcattgaatacttaaatcaggatattatctgctttactttacaaatccaaatcttttgtcaacaggatgaaacccatcttaaaggaaagatctgtgtccatcaggaagtttgtcctgttaaccaaatggttactgcactaccagggttactggtttatttttcagggagctgttaaagcaggagaactgttgctgcatgttttttatttggacctccgcacaatttggtaggatatccttaaccaacttccgacacttaacaaacttggtttaaattttttttttttttggaccatcctactacagattttttggacttaagggacatctttagacccattt

SEQ ID NO: 493500 - DNA, 259 bp, Homo sapiens
ccagtgcattccagccttggagtgacagagcaacactctgtctcaaaaacaaaaattcgtgaagacccataataattaactacggcttataatgcacctaaataactaatacacacacaaaaaaaccagtgatgtaatccatatgatctacctatggcatacctgggtatttacccaattgagtaacaaacctatacgtccacacaaaaaccggcatacatgtgtatctcgccgtttaactcttaatggccaaaattgg

SEQ ID NO: 493501 - DNA, 183 bp, Homo sapiens
catttctatcacatacccgaatttttaaagaacgatctaatcaaagactagaaatcaacattcaccatcatcaggatggaatgctcatttctatagctctaacaacagaaacagcagatagtggtggagccaaactgggatcgagacctgttgacctccttgcgtacgcgagataaaacttct

SEQ ID NO: 493502 - DNA, 499 bp, Homo sapiens
  misc_feature (417)..(417): n is a, c, g, or t
  misc_feature (423)..(423): n is a, c, g, or t
  misc_feature (452)..(452): n is a, c, g, or t
  misc_feature (494)..(494): n is a, c, g, or t
gcagcccagctggggagctagcatgccaggttggtctttaggcaccagagtctttaacaaaaaaatcctctagtactgtgtggttttctattcttccagttcactctcctgactgttcagaagcattttgctctcttttgcattttcttttaccttttttttctaatactgctttggtactagccagtgtggggaagagatacagtatgttggacagataaaaacatgtgttatttcttggtcaattttctattcatattccttattttggccaagttcttttgtttgtgctttgtaacataaggtacttgggagaccaagctgccctccttggcttttggctttttggtgtccttgaaggagaccagtcatgagtaccaaggaatttgtcagcttgggttctagaacttagcagangttganctctgctgcacattggcagaccaggtcangatgtctgcagttggagatgtaaatattttgtacagtaaatnaaatg

SEQ ID NO: 493503 - DNA, 255 bp, Homo sapiens
cgtataagcgagggcaacaggcctcagatctgtgtctctaagtagagctctatgaaacctctccacagtttctcactatatacgcatggctgagactgtgggatccttcttcatggctgtcatccacagcttaaagaatggaccgcgggctacacacttatttcacttcattggtttcaaccgtgtcaaaccaaggccagatgatggaatcactcatagcgatatgattgccaccgtggcacgttcttattaggc

SEQ ID NO: 493504 - DNA, 345 bp, Homo sapiens
atatgactcctttgtgtatttactatactatacttttcattgtcattttagaatgtatttcttctacttacaaaataaaaaagttaactgtaaaatggccttaggcaggtccttcaggaggtattccagaagtcactgttatcacaggaggacagctccatgtgtgttattgcccctgaagacagtgggacaagatgtggaggtagaagacagtgatactggtgatcctgaccctaacgtgtgtaatgtgtgtgttcgtgtcttcattctaagaaaacgttttgtacagatgtacagtgtgtttgagtttaagctaagtgttatttcaagagtcaaaaagttaaa

SEQ ID NO: 493505 - DNA, 473 bp, Homo sapiens
  misc_feature (98)..(98): n is a, c, g, or t
  misc_feature (112)..(112): n is a, c, g, or t
  misc_feature (114)..(114): n is a, c, g, or t
  misc_feature (119)..(119): n is a, c, g, or t
  misc_feature (149)..(149): n is a, c, g, or t
  misc_feature (152)..(152): n is a, c, g, or t
  misc_feature (177)..(177): n is a, c, g, or t
  misc_feature (187)..(187): n is a, c, g, or t
  misc_feature (206)..(206): n is a, c, g, or t
  misc_feature (217)..(217): n is a, c, g, or t
  misc_feature (227)..(227): n is a, c, g, or t
  misc_feature (231)..(231): n is a, c, g, or t
  misc_feature (235)..(235): n is a, c, g, or t
  misc_feature (239)..(239): n is a, c, g, or t
  misc_feature (243)..(243): n is a, c, g, or t
  misc_feature (247)..(247): n is a, c, g, or t
  misc_feature (285)..(285): n is a, c, g, or t
  misc_feature (287)..(287): n is a, c, g, or t
  misc_feature (306)..(306): n is a, c, g, or t
  misc_feature (311)..(311): n is a, c, g, or t
  misc_feature (338)..(338): n is a, c, g, or t
  misc_feature (343)..(343): n is a, c, g, or t
  misc_feature (352)..(352): n is a, c, g, or t
  misc_feature (356)..(356): n is a, c, g, or t
  misc_feature (358)..(358): n is a, c, g, or t
  misc_feature (363)..(363): n is a, c, g, or t
  misc_feature (366)..(366): n is a, c, g, or t
  misc_feature (369)..(369): n is a, c, g, or t
  misc_feature (381)..(382): n is a, c, g, or t
  misc_feature (386)..(386): n is a, c, g, or t
  misc_feature (389)..(389): n is a, c, g, or t
  misc_feature (395)..(395): n is a, c, g, or t
  misc_feature (428)..(428): n is a, c, g, or t
  misc_feature (442)..(442): n is a, c, g, or t
  misc_feature (450)..(450): n is a, c, g, or t
  misc_feature (456)..(456): n is a, c, g, or t
  misc_feature (465)..(466): n is a, c, g, or t
ccggctttgtgtgccgcgcgcgggcccgggccgcccgcgcctcgcctgggttccggggccgccgctgacccgcccgggctccgagcgccgcgcccgcngggccggccccgcntnctgcnctcctccgcctccgcctcctcctgccgccnggngggcgggctgcagccgccctccgcnctctcctgcnagctccctcgccgcgcgtncgttctccgtnctcccgggcnagcnagcnagcnagcnagcngggccggcggcgggcaccaggccgtcccgatgcccgancnaggccccaggatgaacggnttctngctgggcgagctgtgctggctcttttnctgcncgccctgcncgancngcatngcngcnaagctggccttnntgcngcncgatcncacctatacggtgttggtgctggatcagcgcgncgccggcgcgttcnctccggcnccggcncaggatacnnctgctgc

SEQ ID NO: 493506 - DNA, 154 bp, Homo sapiens
atgaaatatttatttatcctgagatacagggaacaggatattcgatatatgaatgagtctgccatatgtatatatatcagtatctctagtaagtatgatactatcttccatgaattagaattactgtagcatatctaagctccttctgtgctgt

SEQ ID NO: 493507 - DNA, 104 bp, Homo sapiens
  misc_feature (9)..(9): n is a, c, g, or t
  misc_feature (16)..(16): n is a, c, g, or t
ccctcattnacacganaaaacaccctcatgttcaaacccctatcccccattttcctcctatccctcaaccccgacatcattaccgggttttccttttaaaaaaa

SEQ ID NO: 493508 - DNA, 398 bp, Homo sapiens
  misc_feature (23)..(23): n is a, c, g, or t
  misc_feature (132)..(132): n is a, c, g, or t
  misc_feature (266)..(266): n is a, c, g, or t
  misc_feature (276)..(276): n is a, c, g, or t
  misc_feature (390)..(390): n is a, c, g, or t
  misc_feature (392)..(392): n is a, c, g, or t
  misc_feature (395)..(395): n is a, c, g, or t
  misc_feature (397)..(398): n is a, c, g, or t
gttttgccttaatgtaaggaaanggattttccctaattacccctcaaaacaaaaaagcttttagtgttttattgccatgttaccaaatattaataacatgaaaaattaatgagcctaggtgcggtggttcanacctgtaatccccagcactttgggaggctgagcccaggtggatcacctgatgtcaggcgttcaagactagcctggccaacatggtgaaacccgtttctactaaaaatacaaaaattagctgggcatggtggcancgcctgtaancccagctacttgggtggctgaagcaggagaattgcttgaacctgggatgcaaggttgcattgagctgagattgcaccattgcactccagcctgggcaacaggagtgaaactctntnttngnn

SEQ ID NO: 493509 - DNA, 269 bp, Homo sapiens
cttctactccacaaacaccggtgatacacattccacgtcaatacatggctgatgcaggaaaattgcttgaacctgggaggtggaagttgcagtgagccgagactgcaccactgcactccagactggtgcaacagagcaagactccatctcaacaacaacaaaaagagtattgaagtggctaaatattattggtgtatagtttatcttccctccaattactgcagtttatacttcatgtactttgagtttctgtctgtggaggtagcact

SEQ ID NO: 493510 - DNA, 217 bp, Homo sapiens
gattataggtctgtcggtagataagcagatgacgctatgtaataattctgcctcatagggatagtacaaggaaggggtaagctatgtgtcatgtcagggggtcgagaatgagtgtgaggcgtcttataccatagccgctttagttgtaagagtactgcggcaagtactattgacccagcgatgggggcttcgacatgggcttaagggagtcataagt

SEQ ID NO: 493511 - DNA, 160 bp, Homo sapiens
ggcctcattgcttatacttctcaacgcttatacttctcattgcatttccggtatgaagtataaacgcgttgagaagtataacgcgttgaggagtataaagcgtcgagaagtatcaagcgttgagaagtatacacagcgttgagaagtataaagcgttgag

SEQ ID NO: 493512 - DNA, 1655 bp, Homo sapiens
ccaggccggatgcccgcagtcctggggcgttgtgggagggctgcggctggacctgcggtggctacaagaaggcagccggacccccgcaccgcaggcccggaccatgacaggacgcgcgagcgaccagcgcagctcgcgtgcaggcatgaacacacctccgaactctatgcaggcgtgccatcacagaggataggactggagggagaggggcgtgcaagataagtataccacgggatggacgctgatgagaccgacggacgtaacgtgtataagaagggctgagaaagtacactggtgagaatcacaggagaaatgagaatcatgtgaaacaaaatacacatgaggaaacatcagaagatcaaatacaagaagaccaaaaagcatctgacacttacgcacaaaagagacgcgttgaggagcagtgaaagaaagacgggttggacgaccaaggacaaataaaaccgtggggacacacgcaatcgagatagaaatagggagatcaatagggaaagagaccgatcaggcacgcacactataacgacataagtggaaatttacatatcaccagtggagagcgtgcaatagaaaataacagcgaacaaagcaaaagacaccaaaggggagaaacagacaaaacaaaacacagtaagacaaaggagaggagacagccaagagaaagttcaaagcgaatcacccagaaaaccgcccatggagaccacaatagaaaataaacaccacgacaaaagaaagagacaccaacaacgaatcagcagtaaaacgacccaaaagaccatgggacacaccactcaagaacaacccagagagaaaagcccgcccttcggcaatacaaccagacgaggaaaagcaaggaagcgcgatgcaaagagataagaagagcaaagcgagcagaatcgcgggcacgggaagcaaaaaggggcatcacggcagggcacgcagaaacaggacagagaccggaacaacacacaaacggaggaaccacaggaacacacaccggaagaggccaccacaaggagaaccagtcccgacgagcggcacagggcaagcgcgacgcccgaacagcccactatgataaaatgacaagacagaaggacaaaagaacgatacacaagcaaacatgaaatggagcagctgaaccacacagggccaaaaaacacaagacgcagaccaaacagcaccaacagagaaaaacagcaacaggagacccatgaacgaaaacgaaaacacgggccgcagcgaacccgagcacaacaacgcacacccaccaagcacaaacgcgacgcgaaacgacagcaagacgaacacaaaagcaattggacacagataaacggacagccaacggcgaacgcgccaagcgggaacacccacgagctaggacaagcgccaagagaaggcagaacacaaacagaggaccgaggacgagaacacaccggacgagacgcacacaaacaggagcacgagcagaaacacgccggcagtagaagaaacaaagaacaccgtagaaggacagcaacaagagaaagacaaaggagagaagacaagacaaagacagcgcagacacatacacggagagacggagagacacaacagagcgggagcacaagggacagaagaatcagcgacagtagcggccacac

SEQ ID NO: 493513 - DNA, 162 bp, Homo sapiens
caatgttagaacggatgccattcttagagctcttgggagttgacacgtcagcagcattcccagggacccacaggcgtccagagcagcagcgcacaaagaaattactgtagtgtgacaggattctaggatgaacatgtccatttactcctggcattcctgact

SEQ ID NO: 493514 - DNA, 265 bp, Homo sapiens
tcctctccggctgcctcacgctctcctgcaacagcatccaccggattctcctcattatccttctcaagggctgcgatatcttcaggggcctctgaacagtcgccttcctccgtcccctcttccgctttgcagtgaacaacggcttgcttggggtacatcaggtcgtgcttgtgttccaggcgagtccaggcctcaggaatggctgtcctgttgctctgcatgcactcggctctctgtaccttgcccaggtctccatcaggcatca

SEQ ID NO: 493515 - DNA, 292 bp, Homo sapiens
aggtttgggggtttccccctttttcccccccccttttttgtggacccccggggggtttttcccccccggggcggttttttggggtttcaccctttttttccttatggtttgttgggctttcccttggggtcccccaaggggggggtaaaggggtcctttccgggtttggcttttgatttttttgggggggtttgaacccgttttttttcctttttttttttggggtttttaccccattaggtttttgttcccccggggttggttttttccatttaaaaatttttaaccccca

SEQ ID NO: 493516 - DNA, 297 bp, Homo sapiens
ccctgggttttttcccttagcggcttaaaaaagccttgggttaatttttttaaatatcccctaaaaaatcatagttttggggtagcccttgttttttaatgaaataactgcccctagagaaaactgtttaaaaccctttaattggccgtatttttgtaaggttcccttttgtaaaaagaataatattccaagacttttgtagcctccaaagtgaaaacttggttttgcgaaactatccttgtattaaatgggctttttaaataaaagctcgtaccccccctaattaagggcttgcca

SEQ ID NO: 493517 - DNA, 269 bp, Homo sapiens
gaactgctgcaaatatcgcctttatatgtgggggtaacgtgtggggagagggaaagtattcctctatgaaccctatgattaggtctcagtcttttagtgagcatgtggcttctggaatgtgaactttacaagtgcttctcagtttttttcttcccccttaggtgggacaagatggccagagtgggctggcgttgggcatttttcccttctcccaggccagttaggctcgtgataaaactccagccatttaggctctgattaaattcctc

SEQ ID NO: 493518 - DNA, 226 bp, Homo sapiens
cggctatggcataacagccaggtcctatgcctacctgtgcagtctgatgaaagacttcagcctctgctccatcacctccagtcattcctacactggccaagtattacagtacccagaggaaatgttgggaagatttctttacatcagattgatttgctttctaccaaatccttcccacctagcatgcgtcagggacataaagccttgcgggaaaatcaccaccagg

SEQ ID NO: 493519 - DNA, 1028 bp, Homo sapiens
cttttactacaggatttcactctctctatataccaatctagctgatgtaaggggatttatcatccgctgtggcacatgtacagatgaatctgagatatggggagtaccgggacatatgagtcacggcagtatgtcaatgtacccgtctcggttggtaacataactggtctcgagatcaatgggtcctcttgcacttccacttggtccaatttacacgtacacaaaattcatgcaaggtagaaggccctctgtgcacatttcttcctattaaatcttgtgatctctggttcgtatataacatgctcacgctagactcattctatggactccatgcaatgaacgtaggcatgaagggttgcagacgatagatgactactaattatcatgaaacataggcttgggggtactgaatctgggttcaattatactatggttctaaaatggatattaggacgtgtgcactgatagtagtttataacatgtgtaaaaaagtttggcagaaactcgttccatggcaagattgaatggaaaaaacatttatactactgcttaaaaagcttaatattagacacagggagataataagtattaattacaggggagttaataggataaagatcaaacatacgaaaataaattgttgagcaaaagaaagaacaggatacgtctcccacaaggaaagacgacactgaaaaaacacctcggacagtcctaccaagggagggactcacaacatggacagccaatatgctaccatgaacggtgtgatccgcacctctatcatcgagacaagggaacgagagaccccgcacctacatacgccatacgaacaatgtaaggggagaataagacacggcacgaggcacaacaggcgcgcaacgacaacagacggccggggacccggccagccaacaacaacgcagcccgagagaggaccagacgggaaccacacacggacagagacaacaaacgagaacagcaaacgagccccacacgcagcggcaaaaagcaggccgcaggcacaccgc

SEQ ID NO: 493520 - DNA, 1197 bp, Homo sapiens
tcgccggctccctttcagtgtggttgtcccccacaacgatttcgcgtcgtgggctcactgctttggtgtccgccccccccgcgaggggggggtagaaacacattccctagttcctgtgtccaaatcctgtgtctagacgtttttcgcgcgcgtattctctttgacagcggggctcccgtgccacgtggtatccgcttacagtgtgactggcggcacatggttgttggagctgttttgtcccacatatgctactcaccgtgtccaaatgttggggtgcctcaataccctctcgtacccccttgtgtggggggcgcccacccctctctgaggaaggggtgcctcattgttccgccgtgttctaggggacgccccgctgagttgtcgcccctttccacccctccccgcggagtttgtggccccaaagggttgtcacccccccactttgtgcccactttccgtccactcttgttcactgtgttgccccactcttgctgtccttgcgtcgcacccctcccgcgagttttcacggtgggtgcactttgagattccaccgcgtctttcccacaggagggtgttaaagaggcgttttatgtggtggttggtggagacgcacatctctgtgtgtcacagagtcgatactcttttcttctctatggacacctccccccctcttctcgcacacaccagagtttgtgaggttggtgcgggcgactaatattccgggcgcgccacacaggcgcgcccacatatctccacttgaggattcccctctccaatgtgttctgtgggggcgcacgatccacacaatattgccggcacccccctgggagaagagatttctcctcagatatggcacgggttatcacctctccctggagattttcgtgcccccacttatgccctgtggctcacacatattttataatccaatgtttcacaggcttgtctcctcggagagaccgcgggtgcgcaccgtgggagcccggctaggaccactgccgatgttctctcccctaaccctctttctgtctggtgtgcccccccccccctcgagtgccactctctgggtgtagttttttgccccctgcccgcgcgtgtcccggtgtttaaacaatggttttataattttccattttaccccccttttccccccctcttcgaatttttttattaaagccttttaattccccttaaata

SEQ ID NO: 493521 - DNA, 1664 bp, Homo sapiens
aaacgaccggaggctgttggagacttctggatgccttcaaggaggcgaacccggagtacagaggtggaaaatcagcctccatgcagtgcagcaatccatggccagagtctgagtggcagtggtgtgcccccacgtcctgaggaagcagatgcagcacctggtcactcacacaggcacagcacacaaattcaccaatgctgagcaaccatccgagccctggggaaaccagaagtcatgcacatcatcaagtccagcatcgagtgtgcaagccatctcaaaccatcagcaggcagcaaacaacacgttcacgcacctgttgcagttcacttgcatgtggttatatccactgttcgatctatttgaccagtaatgccagcacagcccagcagtggcatttgcctagcatcatccagttgcacagttggttgccttggcaccaagtgcccaatcaacaagcaccacttgcagagccacatagtgatacccacgtacgactacagatggccataagagtttgttggcaccatggactttcagctccatacactttagccaacacttgtgcacgtgacaaacaccattaggcaacccagatggggacacaccacaaagaggagatgagtgcacaacgcagctggagagacgacatgcacaccagctgcgagaccagtgactcgagcacctgagaggacaccccgaggccgacatcatacaggcaaaggggaaaccacaccgaaaacaacgcacaccaacagacaacggcaatacactcatgcccaccacagaagggctatcacgtgcaaccccggaaacggcaagtacatcaaacgagcacgcgtggccaagcgacgagcggccacgcaagcaacacagcccgtggagcacaagcgcccgagacacagccacacgacagcgcaccaggacgcagccatgcactaaagagcagtaacgaagagagcgcacgccaacgaaatcgcacgcactgggacaagccacaaaaccaccacgggccaccattacgatgccccgggccaaagcggcatctgcagagcaatccaaaaacaacgtgcagaccgtacacaccttgaacaaacccgcccaaagacagtgcataccaaagacaaggacgacgggatgatgacaatgacaagagttggacggaaacaacggcgaccactgacgacaccaagacgacaagacacactgcaccgacaaacggcgcgacactaacgagaacaccaacagacaaccgatggcaacgacacggaacccgaacatcccacagccagcgcaacacaagcaagcaccgtgcggagccacacgtaacaaccccaaggatgagcgaagaccccacacgacgccgacacgcaacagagccacaagaccaggcgacagagcacaccggaagtagaccaacaccccaacgcgccgaacagaacagaggcaagacagcagaagggaccacagagagcagcaacgacagcgagaagagtagcgacaaagagcacagcagagcaccagacgagaaacacacgacggacagatgcgaaaccaccacagaacggcagcaaaaagagacagaagacacacaagacgccagagacggcagacaccgacgcaacgacgcccaagacaagacaacacaaaccagactacaccagcca

SEQ ID NO: 493522 - DNA, 547 bp, Homo sapiens
  misc_feature (15)..(15): n is a, c, g, or t
gttgctcatccattngagaaagtagatgtgaaaaatgatatggagtacatagctacagctgctctgctggtgccctccagtaccccgaaagtacagtgcatggcaagcagacatcgcaggaatcaaaataaatctttagtcaagttataactaaatcactactgccaaatgtatctgtggatatcccttgtgacaaactgtgtaataggatgtttagagatctgctctcaaagcaagcctgagggaggcaagtcaagtttgagagagataaagaaggaagaatacgtggttattcagacattgggattatactgattagttctgtgtgttataagttattatgaagaaataaagtaaagaatataaaatagactaacatctcactataggaagacatactacaatacgacaaattagcgacgttagcaagcgaacttaacagaagagactaaattgtaatggacttaggtagtgtgtcaggctggccattagtgttatctaaatatgtgtatgtgcaagcggacgaggaatagagctaaagtaagtt

SEQ ID NO: 493523 - DNA, 478 bp, Homo sapiens
  misc_feature (172)..(172): n is a, c, g, or t
  misc_feature (351)..(351): n is a, c, g, or t
cccgcgaggtctgtctcttgcttcagtcagtgtctggacggaacaggatccggggactctcttccagacctccgagcggcctccgatgtcctctccggttggaagctccgggaccatcttctcggccatctcctgcttctgggacctgccagtcaccggatgtgtcggtggnttagtctcacttcgttgcgcgagagccaatcgcgatgagctccacagcattcgttcagaagttattccactcgaacgtggaggcatgccggtcaacagcccgtggtcaaattgtagtacctgcaggccgtccgtacacactacctctcgtcgtgggtcttctattgtcgacccgtcgantgcatgatggcctctggaaagcgtcgttgagtccatgcttcattgcgcgcgaacttggaccgaggtagaagccgtcgagggccatagcaaggcggtcgtcctgaagattgcgaaaaccagccgttgt

SEQ ID NO: 493524 - DNA, 742 bp, Homo sapiens
tggtgacaggtgcctcacagaaaaagaaaaaaaaacaacccgcgccacggtaaaagcgaggccgtgggtcccccacgatgaaaatgccttcccatcagctccgtggctctgggccctgttggacccgtggagaccctggttcaaagccacggtggtgggtcctcgtagcccgttaggggttacccccgctgcgcctcatctgacgcctgacgcgcggacgccctgtggccttttgcgaggcgcggagtctagctttactctctcaagcactagaacccgcgagagcttttgaccgaggggcggaacctgtagtttctcctttccgtgcaacgagacttttcggagattacgagccgaaggcggacctgtgttctcttccgtcaaagcgaaagacaccccggggcggtgcgcgccctaggggtgcccccgcagagtgcggcggaactccttgcgttttccgggcttcagaaacacccccggggaaaaccatccgggaaggcgcgagaagcagcctttttcctagcaaatgccttttgtggggcccgtgcccatccggttttgggagacatacctcaggagcccgtcatcagggcgggactaacaatccttcctgttggcagcccttaaatactacagggtcagacgacctgttaagaagggtccagtgtgcacattgggcacccaaagcccctgtgaatctgcccacgggttcccccaccaggcaagcgccaaccgggaaccg

SEQ ID NO: 493525 - DNA, 851 bp, Homo sapiens
gagtccaggccgctgagagtgggggtggctgggagcagcgcagcctccggtaggagagggcggaggccccggaggacccaggaatcaccttcaagcctatgtcgtgagcgctgggccagaaatttaagaaggaatatatctccatgtgttcatgtggcttggaaaattgtcatgtgggaggagtagagtgtgatgaacagacttccgtgctttagtagggaaatagtgggccagggaaactagtctcatggacccataggggatacatgggggtcaatccagctgtgtccttattagtcagtaagatctagggaaactcaccaggtgaagaattgattgaatgatgatgatgatgttgggtggtttaatggacatctatacaacctccattcaatttttcggctccagaccaataggttgatcaaagaaaactttccataattgtgcatcatcgaacgagaattgaaatggcctcagggaaaattatgcttgtaatttccttcctttcttcaaggagattggggcatctcaggaaggggagataataggtgagacaagtggttactcgattcgatgcacgcagcggaccattcagcacaccacccttcggcagcgaggccagaagaaaaaaaagtccttcctgtgttatccgacctggcgggacttctcccttgccaactaacagagagcacgaccccaagcgactgtggattctcccacttccaagtcctttctcacgaacagtaagcaccaagatgggaggtaagaccttttaaccctgtgacaatcgatgtgtcgcagggcacattattccagcaggagactggaaccataaaggccagatgtggacc

SEQ ID NO: 493526 - DNA, 105 bp, Homo sapiens
gtaccccgtaagttgccaaatgtaatgcttcttcaaaagaatactcatatattttgacactcaccatgttgctagcctgaatgctgttgaatgtgcaaaaacact

SEQ ID NO: 493527 - DNA, 373 bp, Homo sapiens
aaccacgggttagatgtaaatgttaaattcttccttactatgaaactttgctggtacttaaaatttagcataaacaaataatctaataaattttattcattagaaatatgaccaaaatttccaatataataacaaaaattaagggggatttaatgtatattttctattagccattccctggctatttgaagcatgttatcagtcattttgatagaaggcagaagtttgcattagttccagatctttcataaaatgttgacataaaataaaatgattcaatacccagtactcagtacactaaatgtagtaacaatttgtaccataatatgaaaagttttaatatcgatactccagtacatctgtactactaact

SEQ ID NO: 493528 - DNA, 499 bp, Homo sapiens
atgttattttttgggtttgaggttagcttgtaaaacccgtcaacttgaaaaatgttcttacttgagaataccgccttttccctcagaatttaatgtgtaacactgggttactcacagaatgaaaatctgtcttaaggggtttgtctggtttaaaagttttcacatcatcactggccgagagacattgttgctccgggcgctgaatggctcatgcccggctcggggacggcagtgacacctgcgtatgtgaggctccggaaactgaatctgacccttgcaaggacgtgcaaaaaacagaataggctttttgagcttttgacaaattgtaaataacgcggtttttacagaccttctggggaacgactgagaaataaaaagagggtgcttctcttccccttgaaaaatgaaagggggctcttcttgagatagaaacaagaaacctggtgtgttaccccacaacctgttgttttacttggggagggtgtttcccggggaatcg

SEQ ID NO: 493529 - DNA, 183 bp, Homo sapiens
atcggaactcagtgtcgagtagagtcccgtcgaaatcccacaagacagcgtgcaactaggcggtcggcggtcgctgtgtgcgttctcacggtggcattgaaatagtttgcctccgggtgattggacgacgaagtgcgtcgatggatgtggccagcgatgacagctggacactccgtctagaca

SEQ ID NO: 493530 - DNA, 156 bp, Homo sapiens
ctgggggacgacttacacccaggataccgtttcactgggcgtaggtttaccccggggaaacggttttccccgggattccgttttcactggcggtggtttaacaccgggaaaacgctttcaccggggttcccgtttccgggggcgtccggtttcccc

SEQ ID NO: 493531 - DNA, 277 bp, Homo sapiens
cggggttttaaggggggggaaagggggaaaggggggcccccttttttcctggtttttcccaaagcctttttaaagcagggtttcccccccagcaattttttttcccctttccccccccgggcctttttttttgggccagcccctttccccccccccttaatggaccccggggtttggttccttgggggggtgttcccaaatgggttttaggggaacaagggggttggggtttttggggggtttgatttttttttaaagggcccttttttgcccgcca

SEQ ID NO: 493532 - DNA, 216 bp, Homo sapiens
cagctagaaaggaggcctctctccaggctgccactaggccaggcacagaccagcacacacccagccagggccactgcattagacgaacaggctgtgccctgtgcacccctggcccagaggcagcctgatgggagtcctcctttctatctgcaacctgcatcactcagagtgcaagtgcctgcccgatgcactgcctgtgcgaggtccgctgctggg

SEQ ID NO: 493533 - DNA, 745 bp, Homo sapiens
gcctaggtaggggacggatggtgcctggagcagagggacccacaagtgcctccccgagcctagatcctggctcgtgaccactgcaatggtgcctgaggtgcagggccagaccagagcatcctgggtgtacagtgcctggtgctctccagtggcctggtgcctgattcatgtgtgcatgtgtggcactcctgaatgtgtgtcagatgctggcatcttgccagtgcagcccctctgtgcttcctgcatgatgtgtgtgttgcatgtgccctgtgtgtggcagatgccctgtgtgtggtcatgatgtgcctgtgtggtgccatgatgtgcatgattggaatgtggatgtgcattttgcttgacatgatgtgagctgtgggcaccctgggctccccactgcatgtctgtgccttgcctcctcctcctcctccacctccatgtcatgtgcttggaccggggaggtggtatgccttgttggcttgaggatgtgtgtgtcatgacctatgtgttggcacatgtggggctcccttgtgcaacaggacatgcagtgctttccttgcttggtgctgttacccctatggtttgcgagggtgacatacgagcgtcggggggttgggactcctgctcggtgggttgtccctttgtccactcggcaccccttcgccggcccaccatgggccgttggctcttgtgacttgtggcttgtccccacccctttctgggcctacatcaccactggccggtgtac

SEQ ID NO: 493534 - DNA, 503 bp, Homo sapiens
agctggttccaagaaaaccaacgctcccaactccgaagagtaaggggttgttagagagccctttcccagaaaggctgacactcgtgtctttagtccagcagccatgctggtcacttttaactggccaacagatgcccggtatttacccaccaaattctaaggaaaaataggacagaatagcaagtgaaaggggtccgatggtgctcactgcttggtgatagtcgattggccccacattgggtgccaaagtgtgtccggaattggttccttctggtgggttcttgaagggcagatcacctgaggttgggagttcgagactagcctcaccaagatgtagagaccccatctctactaaaaatacaaaattagcagggcatggtggtgcatgcctgtaatcccagctacttgggagaatcacttgaacccaggagacggaggttgcagtgagccgagatcacaccattgcacttcagcctgggcaaccagggtaaaactttgtcaaa

SEQ ID NO: 493535 - DNA, 858 bp, Homo sapiens
cttccgggtcccttcccctatcgtgtgcaccccaaggctggacacagtgagaacggggttgaggaggacacagaaggtcagaacgtgggcccacagaagtgttaccccttggagcccatcggagaccccagcgtccccggcccatgctaggacctatcaagggagtgaggccaaccgagagcccatcggagacctccgggtgccccgtcgcggtcagggaccatgcatggggacggagccattactatgaggcccaatcgtatgaaacacacaggtgcccaacacggttaggtacctacaaggggtatgatcctgcctgaggatcgccattcaggtaggcccccaagagagtccttctgatccaggagggcacaccctgcaattgtgggacctaaggccgacgccagtagaacgacccaagtgctggagaccactaacgggacacgacaggcacggggcaagagttacctggctttaggaggagctcagcacaagtgccgcacgaaaccccaatggtgtctgaaacactcttatgatgcacaagccccacggtgttacccgctgctaaccatggtcgaatggcaagtgctgtactcctggcggacgcagcagaaagtctaccggcctcgagatccgcgactgccgtatttccaagtcgtccggtggcacttggccccagggtttgctgccgtaaggctcgtgaattgggcactagtggggtttgcccggtcggggatgccatcattgggggcctcttcggtggatcagcactattttgtcctcgcatcttggcgttccttgcgcgaattgttgcatcgcttgagcttcactcatgcggcgttccttataggaggaggc

SEQ ID NO: 493536 - DNA, 861 bp, Homo sapiens
cgagtaataggaaacagttccaagggactcagctaagccactcagagaaaaaaagaccggagctttagttcggagagggagaaaaaaaaaagggtcacgggatagagggtcccttgggatcacgtgctcatcccgggcccagctcagctgtgatcagaggagcaagaccgtgagataaggctgaaacctgaaggaatttcaaagagggggccatgatgggcattcagcggcttcgtcaggagggggcacgagtaaccagcagatggggaaacccaggtaacgagtgcatagatgattggcctagggttcttgctgtctagtaggggagtccattgcgattcgagttcagccctagagaattcatcaactaccgaggcccagttgaagtcttctgggcaaattggagtttactaagatacaatactttccaaaatattgacatgtggtagatgtttgtttgcttggtctaggacggaaatcgtgagggttgcatgcatacattgaaggtttcttgaccctgggattacccatggtgggtaagtaattacgagcagacgatttaaatcgacagggcaatccgtggtccattagtccgatgacttcagccatggccttatactagcctgttgattctaccggcaatcttttaactttttgagtataaactcgaatgatatatgtggtatctttaaaaagcaatgtatttgggaaatcctgaagccttgtttaaaagttggagaggccaccgtgatggagacccaattacccaattaatcatggctcaggcagttatcaattcgtgtggcaaatcttttatggtgatctctcctcattcacctcctcgtgggtctgggaatcttc

SEQ ID NO: 493537 - DNA, 404 bp, Homo sapiens
gtcaggacccatcttgaggaggcagtctgtcctgtatcatgtagctcgaatgctgtgctgggagaactgctgctctctttaagctgtctggcagggacgtttaagtctgctgaagctgtgcctgcagccgccccttcccccacgtgctctgtctcggggtagctgtggtgggctccacccagttcaaacttcccagcagctttgtttacactgtgagggtaaaaccatctactcaggcctcagcaatggcggatgcacctcctcccaccaagcttgagtgtcccagctcaacctcagatgctgtgatagcagtgagaatttcaagccagtggatcttagcttgctgggctccgtgggggtgggacccgctgaacctgagcaagcccggagacctgagcaagcca

SEQ ID NO: 493538 - DNA, 438 bp, Homo sapiens
actcggcccaatccttgcagtcggcgggtgctgggggctcgacgcaccgagcggagtctggttgcagccttcaaagtcctaaaccgcgcggcgtgcgttcggggtttattgattgaattccgccggcgcggacgcctctgacagagagagagcgcgaaagatggaaatgggcagacggattcatttagagctgaggaacaggacgccctctgatgtgaaagaacttgtcctggaacagcagtcggtcgcatgaaggcaaactcgaaggactcacagatgaattagaagacctggaattcttaagtacaatcaaggtaggcatacaactcaatcgacaacttaccaaaagttaaacaaacttaagaagcttgaactaagcaataacagagtctcagggggcctggacatatcggaaaaaaagtgtccgaacataaagca

SEQ ID NO: 493539 - DNA, 167 bp, Homo sapiens
agggaacgttgaccagagacagaaacgccaacacattagtagagtggttattcatcacactccgggcagatccacagtacagctggctccttccccacccaaatcccgcagagtcctttactcacccatctcaccacgtttcaccgaggcaaagccttagaaatcag

SEQ ID NO: 493540 - DNA, 164 bp, Homo sapiens
caatgatggtcctcactcaacgatggtcctcagctcaacgatggtcctcagctactccggaggctgaggcaggagagttgcttgaacctgggaggcggagattgcagtgagctgagattgccccactgcactccagcgtgggcaacagactgagactctgcctc

SEQ ID NO: 493541 - DNA, 434 bp, Homo sapiens
agggtaaatatttacataaaagtagaattaatgtagtgatccataactgtactgtggactaagagtccttatttgttattttttcaacaaatttttctcagatattaactaggtcccaagcactttgctaaattctagagaagaataaagctaggccgggtgcggtggctcacgcctgtggtcccggcactttgggaggcttaggtgggcggatcgtggggtccgggggatcgggaccatcctggtcggcgtgatggggcctcgtctccactgggaatgcaagaattggctgggtgtggtggtgcgcgcctgtggtcccggctgctctgggggctggggcgggggagtcgcttgggcccgggaggcgggggttgcggtgggcgggggtcgcggcactgtgccctagtctggcaggggagcgggactccgtcaga

SEQ ID NO: 493542 - DNA, 116 bp, Homo sapiens
  misc_feature (39)..(39): n is a, c, g, or t
acgatctttgaggcaggacactgtgatctgcgtgccgtnaactcagctgccgacccaggagtcgcatactgtgaggtgtcacctccctgctcatggcactacccagactgccagag

SEQ ID NO: 493543 - DNA, 273 bp, Homo sapiens
ctcatttcagctctccatcttcacatggcattccctctgtgtgtctccacagagtcttccctctgtgcagatctatctctgtgtccaagtctcctctttttataaggaaaccagtcataatggacccacctgaatgacctcattttaacttgattacctctgtaaaaaatgtatttccaaataaagtgaccttatgaggtattgaagattaggaccacaacataccttttttgggaggacacaattcaaactgaaatgagccgggtaccgagc

SEQ ID NO: 493544 - DNA, 349 bp, Homo sapiens
tgaggttccgcgcgtagtgtttaccttctgtcttagaagagaaacagaaaagtgatgctgaagaagatggtggcactgtcagtcaagaggaggaagacagaaaacctaaagcagaggtaaaggaaaggggtcacacatttagttttaccaagttgaaggtacatttctgtaacagggaatattttaatacgggtagtttcacagtggcttatggcagtcacaaaattctgttcaaagcccaattttgttgcaagtgggcattctttgttgatacacggtcagtgttcttgtattgcataattttcacagctaccatattcaatcatcagcaagtatccgttttcagctg

SEQ ID NO: 493545 - DNA, 426 bp, Homo sapiens
  misc_feature (416)..(416): n is a, c, g, or t
taagtgcccatcagtaacagattggataaagaaaatatggtacacatacaccatggaatagtatgcagccataagaaacaatgagatcatgtctcaggaacatggatagagctggaggctattatccttagcaaactaattcaggaacagaaaaccaaataccacaggttctcagttgtgagtgggagctaaatgatgagaactcatgaacacaatgaagggaacagacactagggtctacttgagggtggaggatgggaagagggagaggagcagaaaaagtacctattggtgatgaagtactctgtacaacaaacccgtgacaagagtttccctatataacaaaccttcacatatacccctgaacctaaaagtttttttaattgtaaataaacggatcattaaaaaaaattttnttaataaaat

SEQ ID NO: 493546 - DNA, 341 bp, Homo sapiens
  misc_feature (32)..(32): n is a, c, g, or t
  misc_feature (37)..(37): n is a, c, g, or t
  misc_feature (87)..(87): n is a, c, g, or t
  misc_feature (180)..(180): n is a, c, g, or t
  misc_feature (185)..(186): n is a, c, g, or t
  misc_feature (257)..(258): n is a, c, g, or t
  misc_feature (261)..(261): n is a, c, g, or t
  misc_feature (296)..(296): n is a, c, g, or t
ggacgcgtgggttgcagctcagcatggctcanaccanctcatacttcatgctgatctcctgcctgatgtttctgtctcatatccaangccaacatgcccatacagagttgccccaggcccggatcagctgcgcagaaggcaccaatgcctatcggtcctactgctactactttaatgaanacccnnagacctgggttgatgcaaatctctattgccacaacatgaattccggcaacctggcgtctgtgctcacccannccntaggtgccttcgcggcctcactcattaaagagagnggcactgataacttcaattgcctgattggcctccatgaccccaaa

SEQ ID NO: 493547 - DNA, 376 bp, Homo sapiens
  misc_feature (23)..(23): n is a, c, g, or t
  misc_feature (66)..(66): n is a, c, g, or t
  misc_feature (105)..(105): n is a, c, g, or t
  misc_feature (144)..(144): n is a, c, g, or t
gagaatcccgagcaatgctgagnggtcaccaccggccgccttacaaggctcctgatggagcactanatatggaaggaacaatggtaccgccactgccaaaaactncaaatttgcaagaccttgacactatgaagaaatgcatcnctaatgggcagagtaaccgctagcatcgtatgacggatcaaattcacacataacatattaaccttaaatgtaaacaggctaaatgccccaattaaaatacacacactggcaaattggataaagagtcaagacccatcggtttgtggtattcaggagacccatcttacatgcaaagacacacataggctcaaaataaagggatggaggaatatttaccaaacaaatggtaagc

SEQ ID NO: 493548 - DNA, 520 bp, Homo sapiens
ggagaactagtctcgagtatttttatttttttttgcaggtaaccggaaccttaaattaattatgtggaatgcttaatgcaaagtaataggggctaaagtggctagaaaaggggactactgaaataaagtaacaggaacacagtaatgattactgtggattggggggctgcaaaacaggaaaataggggcagatatagctacatacttatattcaaataccactgggaggcaaggggtaagaggcaagggcaaaatgtacaggtcaggatctctagtgtcttcagcctgccgacagcaaccgtgggtgctgggccctgtgtctccgtggagccaagggttagggcctgagcagttgtcactctcgtggaaagcccaggagtggggctgactgagcaggggccataaagcctagtaagggaacgagggaggctggcaaggagcccaggagggaggctctgtgaattgtctctgatcctttcctggagcccctgcctcgtacacctcctgggatgcgtctcag

SEQ ID NO: 493549 - DNA, 369 bp, Homo sapiens
ctcgttatccctatgcgcgtgacctttatcaagtcgagcgtaatccttgatcatcttctacgtgtgtctcatgaatcgatcacttcagatacctcccacatggagagctcacccattgctgcctatccttcccattgtacaagtgtgcttgttggaagttgcctgtgttgggaaacgaacaggattggacggtgctctctggggtgttctcctatctggcagcctgttgaagtcctcgtgttgctcattgtgcttgagcgatactcgccgccgcttcagctccatcttgaggccacgcaggattctccgctatcgagatctcctcaggctcagggtgcgagctcgcttccgtgactcctcctccaacga

SEQ ID NO: 493550 - DNA, 1051 bp, Homo sapiens
ggtagaactcacttgcaacgcatggaggcagaggttacagtgagcctccatcgctccactgcactcccgaacgcgtggcgtgagactagtagcgaaaactgtctctacaacaaagacacgaagaagccacactaaagaggtatactgccagctataaggttcgtactgttcaagactgaaacctttcaaaattatgacctatcctgagaaaccatgactagtgaccactcacgtgggccctggggaacttccttaagattctaaatgtattgcgtgtagaaaggctgcatgatacatgaaagcgggatctgccgtgaaacatattggtgctcacgtcttgtctctcacagatataattatccctcctattcattgcctgtctgaagcagctcttagggttaacactatggcaacggacctgctagatgtgggcagctgcattagtgaattctgaatgccccccactgtgtagaaacaaatctggcacaatcggttctaatggataatacggccccagggatcatagtacaggcccctagaggactgactcgaggctacgagtgacgcgttggttatctcgcaccaatgaagcgcgtcacgtaccctttgtgtacttacagcgttgcgtgattcttcagaagacttgtaggatttttgcacatgaaactctaatttgactccaaactggctgaatgtattgcatgatgtggctctccaagagatggggaaatgtacgactcgtagtgcacttaccgtttcccttgcccccatttgaggacgttgaccttggtagcttcgcgtcgattgataaccagtttgcagtctgcgagggtcctaaggcgaagatcgtcccgtctccttaacttgaccaggctcccgtttaggagttcctagaggaatggcgccctaggttccattctccctgcgtccggacggtttgcctttcgtcgcgcggatggggggcccttgggtggcttgtgatgttggtgcctttttcgctgtggcccagggttgactagcccgggcgccccttttgtgtgggccccagggg

SEQ ID NO: 493551 - DNA, 337 bp, Homo sapiens
gctgtacactgtggtgagggaacacactcctcaatttctttacatgtcaagggtagttttcgggtttcatattccaaaaatgaaacttaccaactctttttgtcatattcttcaaagaaggtcgcgatgttgtgctcacaacaacctttgtggatgatattaaagctttggcaactacctatggaaagggagaatattttggctttttggaaacctatggaactcacttcagtagctctgggtctcttagaggactctatgaactcatatatgttttggataaagcctccacggagcgcgaaggcgttggactctgacatgagatgccctgggttcc

SEQ ID NO: 493552 - DNA, 787 bp, Homo sapiens
  misc_feature (22)..(22): n is a, c, g, or t
  misc_feature (39)..(39): n is a, c, g, or t
  misc_feature (69)..(69): n is a, c, g, or t
  misc_feature (89)..(90): n is a, c, g, or t
  misc_feature (96)..(96): n is a, c, g, or t
  misc_feature (101)..(101): n is a, c, g, or t
  misc_feature (124)..(124): n is a, c, g, or t
  misc_feature (127)..(127): n is a, c, g, or t
  misc_feature (136)..(136): n is a, c, g, or t
  misc_feature (206)..(206): n is a, c, g, or t
  misc_feature (210)..(210): n is a, c, g, or t
  misc_feature (276)..(276): n is a, c, g, or t
  misc_feature (298)..(298): n is a, c, g, or t
  misc_feature (382)..(382): n is a, c, g, or t
  misc_feature (437)..(437): n is a, c, g, or t
  misc_feature (442)..(442): n is a, c, g, or t
  misc_feature (482)..(482): n is a, c, g, or t
  misc_feature (489)..(489): n is a, c, g, or t
  misc_feature (517)..(517): n is a, c, g, or t
  misc_feature (527)..(527): n is a, c, g, or t
  misc_feature (531)..(531): n is a, c, g, or t
  misc_feature (565)..(565): n is a, c, g, or t
  misc_feature (567)..(567): n is a, c, g, or t
  misc_feature (609)..(609): n is a, c, g, or t
  misc_feature (636)..(636): n is a, c, g, or t
  misc_feature (645)..(645): n is a, c, g, or t
  misc_feature (649)..(649): n is a, c, g, or t
  misc_feature (659)..(659): n is a, c, g, or t
  misc_feature (662)..(662): n is a, c, g, or t
  misc_feature (670)..(670): n is a, c, g, or t
  misc_feature (699)..(699): n is a, c, g, or t
  misc_feature (707)..(707): n is a, c, g, or t
  misc_feature (764)..(764): n is a, c, g, or t
tggtgctccgtggaggaggcgnagggatcctcgttaaangccttttgtgcggtttggtggatttggggngcaccactctccgccctaannccaaanccaangtgtcttcaggccggatcacctnaanagtcaagtnagacaagtgcactcaacagaaaggttcttcaaatgtgagaaatgtgatggcagctttcgccacgaaggancggntgcgggcgcacacagtacagacacagaggagaaaatgccatgtcaagtgtgtggcaaaatgctganctcggcttatatttcggaccanataaaggtgcacagccagggtcctcaccatgtctgtgaactaagcaaaaaaggtactggtgaggtttgtccaatggcggcggcngcggcagcgacgcgcacggtcagcagcggcagcagttagcagcccctccccacanctgtngggctccctctccggggcgcggaggggggtgcctgttganctctcanccactttccctcctcaaaccctgtgtgnagctctcaanttgngtttgcgggtggagagggggagaatgggagttananttccttgggtacaaactccctctccccccctctttttcccanccaactccctattttccctaccaaacnaaggagccntccngaaaggaaanggngggaaganatgtttttctttagggggaattccgctanggtttttnaccgattttgttttctcctggctcctctttctatcacgacctgaaccccacacaaancctgtccccctcgggttgtggtt

SEQ ID NO: 493553 - DNA, 480 bp, Homo sapiens
  misc_feature (451)..(451): n is a, c, g, or t
  misc_feature (462)..(462): n is a, c, g, or t
ctggaattcagtggcgcaatctcggctcactgcaagctccgcctcatgggttcataccattctcctgcctcagctactccagaggctgaggcatgagagttgcttgaacctgggagatagaggttacagtaagccgagatcgtgccactgcactccagcctggcgacagagcaaactccatctcaaaaagaaaaaaaaagttccgttagacaaaaggaataaattcaagagatgtactgcacagcatggtgactacagttaataacaccatattgcatccttgaaaatcattaagagagagaaaaaaagaaagaaaatcattgcgagtagaatttgagtgttcttaccacaaaaaaatgggaagtatgtgaagtcatgtgtgttatgctgcttgatttaagcacaatgtaaacacgtttcaaaacatcacattggacatgataaatatatncaataaaagancaaaatacatttgcaaaa

SEQ ID NO: 493554 - DNA, 464 bp, Homo sapiens
  misc_feature (145)..(145): n is a, c, g, or t
  misc_feature (405)..(406): n is a, c, g, or t
  misc_feature (423)..(424): n is a, c, g, or t
  misc_feature (427)..(428): n is a, c, g, or t
  misc_feature (431)..(432): n is a, c, g, or t
  misc_feature (434)..(434): n is a, c, g, or t
  misc_feature (437)..(438): n is a, c, g, or t
cgtacatgtatatccacaggtttgtagacaaatgttgcagccttttttgtaacagtgaaaaactgaaaacaacctggaagtccagtgatgggaaaatgaatatatttctgtcttagattggggaacccaaagcagattccaagantgaaatttaagtgaaagcagtttatttgctaggtcataccagaagtcatcaatcgaagtatggagaaatggaactgagaaggtaaaaaccagttcaaaatcagtgaggaggttctcaatggtaacgagctccatactgctgagatacagggaaacggaggggagaaagctagagtatttaacccccactccttggttgtcagctccctgtcctgtgtgtgggcagaacgtactccacctactcaatagcaagttccaggnntttggaaagaagtgctnnaanntanngnaanngtaatcccaaacacttaaagcaattc

SEQ ID NO: 493555 - DNA, 1014 bp, Homo sapiens
gccacgcgtccgcggacgcgtgggtcgacccacgcgtcgatgttgatagaaacaataatgatggtgatgggactgagggggggagcagcaggacgcaaggatgaggaaagacagctaaataaaaagggatgaagaaaagaaagaagccacagggaatattttggcgagagacagagacacacatcagagcccgaacaggactagactcaacagacagacaatcacacaaagaccaatcacctcagtgggagaaacaggaaaaacatgaatatgtacacaaaaataacacaggcaaatacaaggaaaatagtcaaaacaaaaaaaaaacacaaacacggaagagacagaaaaacacagaaaacctcaaagaggaaccacaccaaaaaagacatacacaaaaaaaaaagaagataacaatcgacgcaacaccaaaaagataaaatacaaactcaataactcaaagtaaaaagaaagaacgtaattaaaagataggatgaatagaaacaaacagagaaaagatagaaaaactaatagaaccatgcaacaccaatattcatgggtacaatcaaaaaaaaattggaaccaaacaacaaaaaacaataacaaagaaacagcaaacgaataaaaaaaaagaaagaaaacatatgaaacaagaaaacagaaaaagagaaaaacaaaaaaatagtagataactcaacagatagataagaaacacaagaagaacaaataagaacgagcgaaaaaaaacaataagaggatgaacacgggggcaaaacagcaacaagaacagtagagaaattagggacctacaaagtagaggacagacaaagagaaaagctgaaagtaacggacagataaagacaagacagaagaggtaaaaaaacgaagaagcaaaaaagaagggaatacactcgaagcagaaaaaagaaaaggaagtatcagaaaataaagacaaaggcagaacgaagatagacataagcaacaataagaaataacgaaacaacaagcgaaaaa

SEQ ID NO: 493556 - DNA, 288 bp, Homo sapiens
ctgagatgacagtcggcgcatgcttgtaatcctacttgggaggttgagacaggaggatcacttgaggctaggagtgggaggctgcagtgtactatgttcgcatctgtgaatagccactgcactctagcctggacaatatagtgagaacccatctcaaaaaaaaaaaaaaaaaaaaaggggcaaggttttaaaccttactggaaaaatttggcccaaaaggaaaaaaaagttttgggaaccggggggtaaccccaaaccctccaaattatgaaaaaattgggggggggg

SEQ ID NO: 493557 - DNA, 391 bp, Homo sapiens
aaagaggagagattgggaagacttggtgagtttggggcatgaaagggcttgccggattaggagaagcctcattgctttcccagttgagacaagggttttccccatacaaaggatgcgttggggtgtcgtcgccagtgtcctcatcagtattcattcaggaacaaattgatggataactgggagtttttttgtcaatgtagacttaccacatcttgcaaaagcatagctaccctggaggaattcaaaggagtaggtagtgtgtggatgtaaaacgtttgagttgtcacaaagaaggaaggggacaagtaatcaatgcatttaggccccgaacatggctttaatggtttagggtaatccaaatccatttttttcccaaattcatttcctttta

SEQ ID NO: 493558 - DNA, 114 bp, Homo sapiens
tgatgctcagtggaaaacatgcaagtgcaggtatgccttcgaaatactaatttcctttcctttggatagatgcccaattgtagaattactgtttacacacatttttgttcaata

SEQ ID NO: 493559 - DNA, 818 bp, Homo sapiens
ggtgatttttatagcatcctttttaataaaggtgaatacagattgctataaaaggttctgcaatgacctgatactagcttcaagaggttctgctcagatagtaaattgagagttatcataataggaaactgtggcggtccaagccaactgtgctgtgtcacatactagcgatgtagagtggctttcatacttgtttttgtttttaagttaacaccctcctttacccccagcagtatctcaggttatagaatcagagatgcagcagtgacaaatggcattttaacttgtaaaatcgtgtgatgatgcttatcattttgaaatagaagaataaaaacctggtcccgtttcaccagacatgaatttcaagtggagtcgtcgttctctgagagtgagtgtcttgacattttcacccaggccctcctgtcatcacatcaccggctgtcactggcgggtggccgtaaacgtcctgcgttgctatattaggatctctgcagttcaggcttcaaaaccagttcagtgtatccgggcgacgggtagtggtggtgcatgcctgtctgcgtgcccagctggcgagccagtagattagcaggaatctgtcgaatggccattcgacgagcaccatatagcagggacggcgagacaaatcgagagcgagggcgctggccgccagctagatcacagcgcgggggtcatgtgctcgcgtcctacgagggtattcagctttttgttatgcttcaattaagacgggaatcaagccttacacgtagaactattggtaatctaagtttccatcttaccacgtaggggtaaacatgtga

SEQ ID NO: 493560 - DNA, 481 bp, Homo sapiens
  misc_feature (413)..(413): n is a, c, g, or t
  misc_feature (421)..(421): n is a, c, g, or t
  misc_feature (468)..(468): n is a, c, g, or t
acagagcgcaaggaaactcccctcctcccaaaaaacgtttgaacaggagaccaagccgccgatcttaattggaggccgccgccaatatgcactgtacattccacaagcagtgccttcttattttacttcttttggctgttaaactttgaaagaggcaaagaggttggatcaagtttaaatgactgtgccccccctttcacataaaagaactactgacaagggggcgcgcgcctgcctttcccatttgtttatctttcgggcgggcggggaaggaaaaaacttccattttggtgaaggaaaaaggggggtggaaaaaggggggtgggcccacagtgaaatctagagtaaaaccaagcgggcccaggtgtccgcaggctgtaatgcagtttaatcagagtgccattttttttttngtccaaangattttaattatgggaaggcacaatttttttaatatgcaaataaaangtttaaaaactta

SEQ ID NO: 493561 - DNA, 1310 bp, Homo sapiens
acggggctccagcattcagtcaatattccgaggagatgaagatgctaagacacatagagatcaggtgcctgtgaggagagatactccctacgctaggtatcacggctgcatggtatgaacggagagaagcacaaggtacttgtgccagcctggagacacactgtctagcgctcagctggatattgttcttgaccagagtgcctggcgtcgacgtggtgcttaccagacctacgagctgaggtagcaagggattgtagcctctgcgagaacacccgtaactctggaacacgcccattacggaaattcgtggacacgattgacatgaacgccgtgagggactgatgatgtctggggctggagaggtcagccagggtgggcacgctgaggcgaactcgcatgagcgcaggagtattctaacgacacaaggctggccaggcgatgcgaggtcgacccgcagaaattactagcggcggcaatgcaagactgttagagagaacaggcatctggcatcgcctcactggacgttagctctggggcggattgtgggaccccaggtctttccctgcgtacggccattggaaaaagataccaggtgggccaactggttcacaccattcctgctcatgagtggggtggtgaactccccttggtttgttgggcccaaagagatctctcaaggcatctcctgctcaatttactagtttagattcatgagcattggggcggcccgtcagtcaccgccctatgtgagcaaacaataccaattgggcccagtgggggcggttcaccttccaaggggacgcttggggggggcttttagcggcggcaaaggcatttgttcggcgtttgaacggacacgacacttcccccggttagtagggtttggcgagggaaatctgtgtacccccttctagggaagctggtgttgggacgatgctcgcctttgggggttggcttttggctccttggaacaccacgccggtttgggcaggggtaggacttgggccatttggggacttggcaagagtcaccgggacgcgacatgcacctggggctctgcagacggaccgggaaacacggggcaacacaatggaccatagttcgcaaaggcggaaggcgcatccacctgtgtgaagggcgcacagggcacaagaaccccactacacttccccacttggggcccagaagtggcgccagtggacaatgttttcctccaaaaacgcaacaacggcaccaaatggcgccccagacatgggcaacaccaagatacctgtggcggaggcaggccaagaccccaggagaccatacgg

SEQ ID NO: 493562 - DNA, 103 bp, Homo sapiens
gtggactgacggtccagccgaggtgtggctgcacacaaggatcagacccccactacctgccagcacactcccagaatagtcatcagaggactctggctcacga

SEQ ID NO: 493563 - DNA, 1189 bp, Homo sapiens
ataaggccagaacggactgcgacacagcccatcccactcgagacgcatcgacgatcgacattatggccgactcccataccgactccaagacccagacctcagccatggcatgccccctggatcaggccattggccatcctcgatggaccatcttccacaagtactccggacagggagggtgacaagcacaccactgagcaagaaggagctgaaggagctgaatccagcacaggagctcaccattggctcgaagctgcaggatgctgcaacattgcaaggctgcatggaagcacttggcaccggcaacaaggacccaggcaggtgaacttcccaggcagtcatgtcaccattcactgggggccatatggactttgactctacaaatgaagccctcaagggctgaaaataacatagggaagatggcgacacccatctgaggggtccatctctgagtcaaatccagaggctgggctacatcgtccaataccactaacaccaggatcaccattgcacacgaacaaacacaccaaccgcacacaaaacaccgacacacacaaaacaggcgacagcggccgccaaccacacaaccgcagaaggagaggcccccacaatctccacgcggaccaccgcaggcacacatgacccaaccgcaagagacccccaaacaaagaggcacgaaaacaacagaaagacgacagacgcacaccgagcacggcactacaacacaccgtacacgagagcgggacacccagggcaaacacggacgcgccacccacgaccccggacagccccacgaacatgcgcgaggctgcccccaccacagggacccaccccacccccacacgcccacctcccgcgcccgccagcaggaccacaccgaaacagaacaaaaacgcactcccacgcgtagcccgcaccacacacatcgagccgccgctcccacgacccaaacgggacgaaacggggcaagccaacagcaccaaaatcacaacccacgcgcgcgccacgcaaacaacaaccccacaccgaaaccgaccagcccgaagagacgccgccgccaaccacccacgaccaagcaaaagggcgcgcaagcgaccagccgccgagcgcgcaccaacaacacggcgcgcccgcagccccagcagaagcccgcgagacagacccacaccgaccccaccccggcgccgcc

SEQ ID NO: 493564 - DNA, 733 bp, Homo sapiens
ggctttgtgggtgagctcgtttgtgtgccctgtgagtggtggacagtgtgttggtgattggtaggatcctggtatccggtaatcaggtcaaaatgcagatcttcgtgagaaacctgtagcggtaagagcatcatcccttgagtgtagggagacccagctgatcaccatcggataaatgtgaaggtccaaggatccgaggataaggaaggcatatcctcccgcacgcagcgagcaggctcatctttgcaggcaaggagctggaggaggggcacagtacgtcgtttcatgacgtacagactagtccagaaggaatggtcgaccctgcacctggtcctgttgtcttgagaggtggtatgtgagtagtcttcggtggtaagatcctgaagcaggagtagatccagtcactgcgtggacagtggaagcccagatgaacaaccaatcgaaaaactgtgaatggccaaagattccaggagtaacacgaaggcatcccgtacccgagccagcaggaagggctcatctgtgtgcaggcaagcaggtggaagatggccggacgtctttctgacgtgacaacatccagaagggagtcggaccctgcacctggtcctgcgtctagagaggtggtatgcagattctttcaggtgaatgaccctgaccggggagaacatcagtctggaggtggagcccaagtggagacagccgaaaattgtgaggccaaagaatccaaagattaaag

SEQ ID NO: 493565 - DNA, 116 bp, Homo sapiens
  misc_feature (81)..(81): n is a, c, g, or t
aaggcttacgtcatggagagtatgacctacctccagcatccctgctgtgaggtaggtcatactctccatgagtaaccttcntcgagccgatcagtgatgcctggaccaacctggct

SEQ ID NO: 493566 - DNA, 992 bp, Homo sapiens
gagggcaagggtagggaggaggcgggcgaaccgcgtcgctgggcctgaaatgtgggctgctgagctgctgccctgctggctgggggaccacaagccaatgtcgacgggctgctgaaagaccattgccgctggggttgtcgggcgctgcttgaagaaatgcgtccctgtgcagggggctgcccaaatggtaccatagatgcacttcaaggcaagttctccccctggtccccgtctgtccactgaaggcagtgtctggacttcggatccagacaatgcctgtgagaaaaagcgtccgttcagcttcctcaggcaggagccttggccttgtgccgccgtggcccaagcatcagtgaaaaggagatcaacgctggcttccctgacctgagttgctgaggcaaagccctccctgtgccagctgggctgcagaagctggtatgtccacgagcctccgtgggacaatcatgggagttccctgggacagagggatcccgatggaaccatcggcacccttgagccaagtatcacttgacggccccttgggtcaccattccggaaagcagggcaacgaacgaacggtgggttgccccagccatgtgcaccaagtgccgtgcatatgaagataacgtagggacgaccctaacgggacgaagtgaccccggacgtccaaagcagacacatccagtaacttcctgggaaccgcttcttacctcagtaccggcattcttccattccggagaatgcaccactcaacaccaggtaaaaacgcctcaatgcattgggagtgggactgaggccgaagccaagagccgcaattcccaaaagaaccaattcgggcaggcagttcagacgcccaacatgggaaaggggtcactctgcaggtgtgtgtcaagacagtgcctgacagcacagagggagaaacctcctgttgtgagcaaagagtattgcacgttgtggccaccctagtagccggtggattcgctgggagatccatg

SEQ ID NO: 493567 - DNA, 866 bp, Homo sapiens
caccccggcgcgcccaagcgcaggggctcctcgggctcagtggttgttgacctcctgtactggagagaacataagaagactggagtggtgttggtgccagcctattcctgcgtgctttcattgacagtatccagcattgtgagcgtaacagcctaacattgcctttggccctgctctctgtgaccatcagcttaggatatacaaggcgtgtgatccaagctatcagaaatcagatgaaggcacccattcagggcatatcttggaatctgaagttgctaatatctgaggagtggttccagaagtaacagaaattctgctcttggccatgtgaacttgcacgataaaaggaactcaggcgcctctactatagtatgatgacttcagttcgaattctctgcaagtttgcagggtgatgtgggtattaaccctattgtgtggtgccctgttataagtggccctgacactactctgaatgttggctctacattatcactcttcagggtccctgttatttattgaacggcatcaggcacaggatagcattcatatctaagggcctttgcacatacgactgttcacaagactgcttattgcgtaaaaatcccagaggcaagaaattccctggatttgaagcgcaaaaggttgaattgaaaaggcgcgaaaataattagaaggaggtcatctaaaggggatattcattgattaatacggggagggtccgggaagaaagaacctgaggtgcagtcctttcccggatcgtggtagatctattttagcctcctttgttgaaatactgtttgccgccctgttcccacttagtggacggctgttggtaccggaacaatttgcctatatctcggggggaa

SEQ ID NO: 493568 - DNA, 675 bp, Homo sapiens
  misc_feature (3)..(3): n is a, c, g, or t
  misc_feature (347)..(347): n is a, c, g, or t
  misc_feature (437)..(438): n is a, c, g, or t
  misc_feature (444)..(446): n is a, c, g, or t
  misc_feature (455)..(455): n is a, c, g, or t
  misc_feature (495)..(495): n is a, c, g, or t
  misc_feature (507)..(507): n is a, c, g, or t
  misc_feature (521)..(521): n is a, c, g, or t
  misc_feature (675)..(675): n is a, c, g, or t
ttnaggaaacgttccttcacgagtctgccttagtctttcacctgtgttcacctcagctaaacgttccttcacgttccttcacgtgtttgccccagcaaaacaccacccaaccaactttccaagaagccctttagtttccacttcgtgtaagttctcctctagaaatgttggtatggaggactgggttggctgcaaggtgcttgctgcaaggctgtgagaatctgagtttggctccgtggcactcacataaaagttgagccctaaagccaggcatagggctggagagatggctcagcagttaagagcgctgactgctctttcagaggtcctgagttcaaatcccagcnaacacatggtggctcacagccatctgtaatgagatctgatgccctcttctggtgtgtctgaagatagctacagtgtacttatgtataatnntatttnnntctttgggntggagtgagaagaaaaaaaataaaataaaataaagccggncataacatcgcncgtttatgtcaccnctgccctctggtccctgcattttgggtggttcaccactgccctctggtccctgcattttgggtgagtgtaactatcatgtttcttatattgaatagttttctgcaatgataggtaactattttatgaccaagaaacacagtatttatatatatn

SEQ ID NO: 493569 - DNA, 146 bp, Homo sapiens
tggcgacacgtacgcttggcattaaggcgacagcgatttctagtgatagtcagtagaattagaattgtgaagatgataagtgtagcagtggaaggttaactggttagatattgctagcggggtaccgacgctctgaattctgtaat

SEQ ID NO: 493570 - DNA, 117 bp, Homo sapiens
  misc_feature (69)..(70): n is a, c, g, or t
cgcaggctgcgctttgagctagcggcgccgggatttgcgctgtccctcccaaaggtgatgaagaggggnngagacaggaccccaatgctcctgaaaaggcgactatctgcctgtcac

SEQ ID NO: 493571 - DNA, 111 bp, Homo sapiens
tctgtttcttaaaattagggctttgtggggcaggcacggtggctcaagcctgtaatcccagcactttcggaggccgaggtgggcggatcacctgaagtgcaggaaacaaga

SEQ ID NO: 493572 - DNA, 217 bp, Homo sapiens
  misc_feature (172)..(172): n is a, c, g, or t
ctgaattttgtaatacccacttaaaaattttattctcagctgggcgtggtggctcacacctatgatcccagcactttgggaggccgaggtgggcggaccatgaggcaggagatcaagaccatcctggctaacatggtgaaacccatctctactgaaaatacaaaaaatgtanccgggcatggtgggcacgtgctgtagtcccagctgctcgggaggc

SEQ ID NO: 493573 - DNA, 622 bp, Homo sapiens
  misc_feature (125)..(125): n is a, c, g, or t
  misc_feature (167)..(167): n is a, c, g, or t
  misc_feature (177)..(177): n is a, c, g, or t
  misc_feature (187)..(187): n is a, c, g, or t
  misc_feature (199)..(199): n is a, c, g, or t
  misc_feature (236)..(236): n is a, c, g, or t
  misc_feature (315)..(315): n is a, c, g, or t
  misc_feature (317)..(317): n is a, c, g, or t
  misc_feature (323)..(323): n is a, c, g, or t
  misc_feature (339)..(339): n is a, c, g, or t
  misc_feature (342)..(342): n is a, c, g, or t
  misc_feature (375)..(375): n is a, c, g, or t
  misc_feature (397)..(397): n is a, c, g, or t
  misc_feature (421)..(421): n is a, c, g, or t
  misc_feature (423)..(423): n is a, c, g, or t
  misc_feature (427)..(427): n is a, c, g, or t
  misc_feature (436)..(436): n is a, c, g, or t
  misc_feature (439)..(440): n is a, c, g, or t
  misc_feature (442)..(443): n is a, c, g, or t
  misc_feature (445)..(445): n is a, c, g, or t
  misc_feature (449)..(452): n is a, c, g, or t
  misc_feature (456)..(456): n is a, c, g, or t
  misc_feature (459)..(459): n is a, c, g, or t
actaggctgcggaagacgggcactgataggaagcgttcacgtagcaggtatttcccatattctggagcccagcccccaccgcagcaggtctcctgctactcagaggaagcttctccctgggagcnagctgtcttgccacaggagccaaatcatcacagaggtcgacncgggtctcanatgagagtgntgacttctcagngagagaagtccgctggatttcagcaaaagctgcatcnggccgagaagatgtgagttttgaaaagtggttgaactgccactcacctcccaagtagagtgagtcgtcctccatgtcgncnggaacnaggatcacaaggtttntcngctgggaccgcaggttgcagaaagacgctatcncttccgagtcttcaaatgacgngctctctggccgcatcagcccttntntaantcacccccnccnncnncnacannnnaccnacncatcaggtgcgcgataaaccaatcaaatatcagcactcaattaaggaatgagtcacagggtgtgtccccttgcatcgctgggaattcaacagacacagcccacatcatgacttctagaacacctgaatcaaactactcctcaggctgatagacacatgtaata

SEQ ID NO: 493574 - DNA, 837 bp, Homo sapiens
cttcctactccctcattgtacccattctaatcgccaatggcgattcctaatgcttaccgaacgaataaattcttaggactatattacaactagcgcaacaggccccaacgttgtaggcccctacgggctactacaacccttctgctgacgcccataaaactcttcaccaaaagagcccctaataatccctgccatatctaccatcgacctcgtctacatcgaccgctcccggaccattacgctctcaccgatcgctctttcttactcatgaaccgcccttcatccccccaattacctcaatctccctgttcaaaacttcaaatcatatgtctccatatatattctaagacagcctctagcctattccgagtaagtacaaagccatcaagatcacggttgaaagcatcaaagatcaagatctacactcatgaagcaggcagtcactggagaagcgagatatcgccgaaatgaaatcgttcatactgaagatcatcccttagctcattcatgctacctatcaagcattgctgaactgaacgtgtgctgccattagaaccatgctctcaccctttagtcaatgatacaacaaggaacacctcatgagttacttgctgctcattgatgaccattggcccatgatagtggtgcagttgagtctccgacattaagcccgaggacaaccgaaaactcccgttcaagctgtgcctgaagcgagattacgaagtcagtctcatgcttaaccattctgaataaaccggaggaccccttcgtcttaatttacataaccgaaataggaaacttttataataaaccccaagcactaaaatttctagaaca

SEQ ID NO: 493575 - DNA, 164 bp, Homo sapiens
gatattatgactgtttcctgattagtgtgaagttgcgctttcgtatttcgggtccaataatctaggatggtcacttaggatgttcccagccttcctggggccactggatttatactgtttagtgaagtcatcatctttgcccccaggataaccattatactgac

SEQ ID NO: 493576 - DNA, 234 bp, Homo sapiens
ataaaatctgacccatgtaactagagcaatctgctgttctccctcttcaaaagatcatttactccttccaatctctctttctagtctctgcagagcattacatatatttcgttctcactcagtactttttagacaggtcaaagttttcatccattaattcctgttgtttcttcattgcagtagtttcattactgcttacatttgctccactgtctgccgttgttcttcgacgaa

SEQ ID NO: 493577 - DNA, 230 bp, Homo sapiens
tcacaggcattgacctattcagacaagccggcctcgggcatcatctcgtacataggaagtgagcggatgaccctcctggctcccctgaattctgtcttcacagatggaacacactccaatagatgcccatacaaggaatatgcttcggaaccagataattaaagaccagctggcctctacgtatctgtaccatggacagaccctggaaactctgggcggcaaaaaactga

SEQ ID NO: 493578 - DNA, 208 bp, Homo sapiens
tgatcgcgatttctgctgggagcctgtgcagcgttactcatcacttaacccccggaatctactgcccggaaacagacaactgcatggagactagcgactgatcggatgatgccggtcacctcgagtgccgtgggttccgtcatgagtgacgctgcccaggccccagccgacatcgaggtacttggtctgcatgcctgacgtaaagctg

SEQ ID NO: 493579 - DNA, 427 bp, Homo sapiens
gcggcgccctataaatggggggggcaggatcggtggctaacatctgcgatcccagcacttataggaggtcgaggcagaagaattgctttaaccttagaaggcggagcgtagcattaagactgagatcatgctagatgcgctccagcactgagcaaccagagcgagacttcatctcagacaataaaaaataggggccaggcacagtggctcatacctataatgccagcactttgggaggccaaggcgggcagatcacgaggtcaggagtttcagaccaatattgtgaaaacccatctctacgatgattacaaaacaaattatccaggcgtggtgatgcacgcctattatcccagctactctggaggctaaagcaggagaatcactttagcccaggagtgtcaaaggttggggttagctgaagatcgcg

SEQ ID NO: 493580 - DNA, 501 bp, Homo sapiens
gaggaccttcataggactcagggcagcaggcagcgtctggaaccagggtctcgcacaaggtcagcacctggagcataggtaggtaaccgacaggagccgaaggccacgtccccaaactgagagaccacaggtcagctgcttgagcgacggcagtttgatagaggtgctcggcgcaggcactggttacattggtgaaggccaaactgaggttctccaggtttccgaaggagccggagctcagcaaacgagccaagtcagcgtctgtggacttggagggcagtgtaagcctggtgggcccgcctttcttttgcagctccttcagctcccgttgccggtcacagagctgctcgtacatgcgcttccccacgtctgtgctctccagggttgagattgtctgcagttgggtgtcgagtgagcgataattttgattccagcatccagcacaggatctccaccatggtctggtccccctcagtgcaggagcctgcggacccagcttgt

SEQ ID NO: 493581 - DNA, 589 bp, Homo sapiens
cattatgcaggtgactctagacggactccccctcttgatgcaagtgtccatggccacgtgtcgtaactaccattgagtaagcacatcaatagatggttgtaattggttatggagacagggtattgctgcgttgcccatgcgggagtgcagtggtgcaatcatggctcgctgcagcctccagttcctggtgctcacgtgatcctcctgtccaggctggtcttgaactcctgggttcaagctatcctcctgcttcagcctcccaaagtgctgggattacagcacttgagtgcccaggcacacagtcactttttgaccacggaatgacgatataagtttcttcaaccattgcatgcctagaatgcaagagaagctctgggatattacactcgagacacagtctctggaaaagaacttaactttgagcagacagaatcttttccagtgtgcactacaaaaaacctgtactccaaaatatccatagaagtgttgcttagaatggggcacaagcccacgggaagacccaccctcacagggttcatgagactcaccagccaggcttgaggcttgtatggtagtcaggcatcaccca

SEQ ID NO: 493582 - DNA, 399 bp, Homo sapiens
  misc_feature (373)..(373): n is a, c, g, or t
ttccccgcacgtgttgtgggtagtgctagcgggaatctgccgctcagtattagtttgttagagttgagatctagctctcagaaagcggctgcgcgcatcctttgcagaccctggggacaaaataaatgggtctcccaccagttgaatcacctgtatcatcagatcggataccaggctcagtttctggatgctgagtggactgtgcgtgcgggactatttcaagacggcatcctatgtcttgcttggctattcaaatagttgatactgttgctccagataattcgaagggttttgtgttctgctttcacttcagaagttatcgggcagtgagttgcggcgcgaagcctttagctttcacttcactacttatgcntcgttgaaaagggctagccactactg

SEQ ID NO: 493583 - DNA, 506 bp, Homo sapiens
gcacgaacatacacaaacccaagcacatcagtagatcggcatggcgcacttccaggaggtggactactgctcggaggaggtgagggcggtgggctacccggtccgccgcggctgcggcggcgtgcaggagcacatcgtcaaggagacgttcgtgcaggagttcgacaccgccggccgccgccatggtcaccacggccgtggctccggccacttcgaggtgcgcgagagtaggctggaggaggacatcaacacccgcaccggcgagttccacgagcgcaaggagaacttcgtcgtcagggccgatgactaagcttacacgttacggagcacactacgatgtgtgtatatgtcggcatcatatatatgtatgtgtgatgttgcgcacagtcgtatagcgtatgcaggcgtgcgtgtttggcggctatcagccccgatcgtgcgcgcgtgcagcgcttaaataagcgctgatcgtgaacaagaataaagcttctcgtgataaatattcc

SEQ ID NO: 493584 - DNA, 601 bp, Homo sapiens
tgaggtctgctcgtgcgcatgctgttgctggtggccatggcgtgggaccgcgctcaagaggctgatggccgagtacaaacaattaacactgaatcctccgtgaatggaattgtagcagtgccccatgaatgaagagaacttttttgaatgggaggcattgatcatgggcccatgaagacacctgcttatgagttatggtagtatttcctgccatcctgagtttacccactatgattacccgttaagtcccccaaagatgagatattacctgtgagatgtttcatcccaacatctaccctgatgggagagtctagcatttccatacctccacgctgccagtgcgatgaccccatgggctactgagagcagctgcggagcggtggagtacctgtgcagagtgttggacgaagatcctgctgtcggtgcgtgagcatgctggcagagcccaatgaccgaaagttggagctaacggtggatgcgtccaaacatgttggtgcgatgacctggtgagccagctctataagattgccaatgcagatctgtccagcacagtctctgcggattgtgagacctggcctcgcaacaggtcgcgcacacactg

SEQ ID NO: 493585 - DNA, 259 bp, Homo sapiens
ggaggggccagggtttaaccggggggtcctcttgaggggggcaaagggtgagcctcccagcccctctttggaggcctttttaggggaggtttttttataagccaaaggtttttaaaagcaaatgggggtttccccccagggggacgtggggcaggaacagggggttttcccccagccagtcagtatgttttgcaaacggtaatttatattgcccttggaacccagggggccatttttaggtactaaaaagcttttccca

SEQ ID NO: 493586 - DNA, 269 bp, Homo sapiens
cataatagtttatataacccagataaatatggttcactatttatagaactacacatagagagctatacagtcacgtgcctaatccccactttacaactacaagcaggatgctggtagcaaactaagatatatatttcatacttttatgtattaaattccactagtgcttcatgaaagacactatcagaacaacaattcaccataatccccctttgccatgaggaaggtaatactggtcagtaagccaggtatcgataacgtaaagtcag

SEQ ID NO: 493587 - DNA, 140 bp, Homo sapiens
  misc_feature (129)..(129): n is a, c, g, or t
tcacaacatgcacgaggctggaattcagtggcattcacagggctgatgtcactacagccttgacctcctggccttagtcagtccagctgcctcagcctccgatggtagctggaactacgaggcccagcntacataatttc

SEQ ID NO: 493588 - DNA, 169 bp, Homo sapiens
  misc_feature (23)..(23): n is a, c, g, or t
  misc_feature (84)..(84): n is a, c, g, or t
ggctgaggtaggaggattgcttnagcccaggaggttgaggttgcagtgagccgtgattgcaccactgcactccagagagttatntgctgaagctcccgcattattgtgctttcctggcttgtctttgaagtgggagtatgccatgggctacttcactgggggaggactg

SEQ ID NO: 493589 - DNA, 1066 bp, Homo sapiens
  misc_feature (131)..(131): n is a, c, g, or t
  misc_feature (937)..(937): n is a, c, g, or t
ggagtttctgcgcttccttctccctctctccagacgtcgtgtcgtccggtcctatgtcgcgcgggccctccggagcctggaggggggacacagcgcggccaggagcccctcggcccgggcgcctggaattngcgatctcggtgatgacgatgacgccgaacaaggaaggggcccacgctggcaagcttggggggccccgggcgccccgggggcccgccaggcgcacgggaggggcgtccaggagctcaaacaacccggagttacggacctagggtgtcggacgcatttggccaggggcctcggggagagattctctgggttaaaattcctcaccaaacacttcttggctaaccaaggggacttggctcctgcggggcattaccatataaggcttaacccccagcggaatcaacgcctcacctctgtgggctgggcactctccggggaggctcgttttctggcccaccgcggcaaatcatacacagtttcgcacgagattggttggacccatgcaggcccttgtgtgaaggtgtcctccaataagccgtggcgccttcggcttgtgcaactcgtgccattcgggggggctccctggagattccttcccactctaaaagcctccttggagattatctaggacctcacacgggtggattgtcaccaccgccccgggtaaatttattcttatcacttcttgcgaacggaacgagttcgcggcttgtcacaacgatggtgaaacatttgggcgcacacatttgcgccctacagccacaatcgtgcgggacaacggcacaaggggatgttccctcaaaaaagagaccctccgtgtagagagcggggacccaaacaagggacgtactagtcgccccatagactgatgtccgttgttcttctgtcttcttcgtgcgctcgccttgcgctacatcctcacatcccngtcgtctacgatgatccagtgcgacgcaatcaccactccaccacatcgaccagactgaactgacacgcgtaccaacagaaccagacacacacgcagcaagcacgcgcagccacggctcacgactatacg

SEQ ID NO: 493590 - DNA, 208 bp, Homo sapiens
taacagccggcgcctgtataaccgatatacggagttcagcacggtgctcactgttgtcgacggaacttgtacagcgcaggcatgcaccgtaatggtgaatacacgtcgaccaggctccatctttacgatattgagagaggtcatcacggtgctcacgtgtcgacggaacttgtccagagaaggcatgcaccgcagtggtgaatacaca

SEQ ID NO: 493591 - DNA, 637 bp, Homo sapiens
  misc_feature (637)..(637): n is a, c, g, or t
agcggcgttaggagagtttggggcgaggctgaaggcgcttggtgggacttcgtgggcggggcctggagtgggtttggggtcgccggggtggagcctggggactggggggctgtagaggcagggcctggagactgcggggttatcggtgcggggcctggagagggaatagggtccctagggtggagactggggactgcggagttataggggtctggagagggtagggggtccctgggatggaccctggagattgggggttataggggcggggcctgaagaggctatggggtccctgggatgaagcctcgtatttgggggcaataggggaagggcctggagagtacgtggggtccccggggtggagtctggggactggggagttttaggggttgggcctggagagctaagggcgttggaggctggacctggagagtacatgggacccctacggtgaagcctgagaatttagggagctggtgactgccctcatgtgtgatttgcggcggccagcggcaggtgggatgatggacttggcctacgtctgtgagtgggagaaatggtccaagagcacccactgccatcggtgcccctggcctgcgcctggtcctgccgaaatctcatcgccttcaccatggcn

SEQ ID NO: 493592 - DNA, 104 bp, Homo sapiens
tggggagtcaacatgcagtactttttaatctctgacaactgagagggcagagttaatttgatctagtaaggtggatgtttgaattgtgggtgcaactgcaattg

SEQ ID NO: 493593 - DNA, 420 bp, Homo sapiens
gtcaggagcatactttgtctccggttcttcaggacgtgtctccacgatgatgcttagtcagcagggtctcactatgttgtccctccgtgggttcctcaagtctcgtggcctcaagcgatctgccagcctctgcctccctgtcactgctggtgcattaccagtctgagccaccacaatcagccccgtgtttcatgagctgttactccattccaggagcctatcagttgggccccctctgattcttgaccaaggtgtccacctccttcatgaaccggagacacagctcctcttcccatggcagagcaatgcactgcacagtcaccagaagtccgacggatcctcttaccgtctctgagaaattcttgtcagaactatctccgtagtaccccttgtagaaggccagttcctcctcgtcctgta

SEQ ID NO: 493594 - DNA, 432 bp, Homo sapiens
gagagggtgaagagtgaggagaggagggggtaagggcatgcacaaggggaaggacgatggcggtgagtgaaagaaggactagatagagatgggagaggtagaggagagtcaggagaagagtgagatgaaagggatcagcatcagcaaaggtaggtagacagagagagaggagggagaggctgtgaggagtgtgtatggagagagagacgaggaggcgaggagcatgggatgtgatcagagcaaagacgtgaggaaggtaagcagcgtgggagacagagggctgaaggataagaatgaatagggtggctatcaatagcgaggtctatagaactctatcgatatagctctctctctctctctactctatatatatatatctatctctactactactactactactactactactactactactacactactact

SEQ ID NO: 493595 - DNA, 170 bp, Homo sapiens
ggcacgagagaagaaggaggttcctgcctgtgccagcaaacccgtaagcaaaaagcgaaggcatattttcgcagcagctgcaggcattcaagcgcccttcagtaaagcagtcttttccccaaaagcatgcgttcgcataggccaaggcaggcaggccttatctatcaaaa

SEQ ID NO: 493596 - DNA, 1042 bp, Homo sapiens
  misc_feature (1042)..(1042): n is a, c, g, or t
aaaacaccaaatggcgtgatgacgccggtgcagcggggtgggcccggggtgccctggtggccctgggatggggaacctgcggtggcttcctgctggaggtttctgtgcagtggcatcctgtgggcctggggtctgcggcctgtggactggtggcctggggccgaatgggcctgcggagctcgctggagtgcaatggcctgaggatacaggacgtggatgccctgtcaccaatgttgggcctgcttggtcaaggacatgaaagactcaatgtcccttgcgcaggagatctatctctttctccctgcccaattaaggaatcacgagatcattcgagtttcattccttggaggtgccctctcgtcaaaggatcgaaggttttcgaaggattatgccgagtgcaaggaaagcaggaaccctgtgccggccatgcgcaaccaggttcaaaggcataacaggttgctcatcggggggactaaccaattgtgcacacacaggtcagtcgtcatgggatgatagtaacaaggagtggcatccccaaaagggcagaggtagagcacaaaccgcgacaaactcacaagatgagaggcagcccaaatcaagtcccattggagccccaaagcctacatcccgaattcctgatgacacccccaggattggaccggccacagaacggtggccttaaccttgagcggcgggggacaccccagagcggaatttctgggtgacaaaattggcacccccaaagcagagcgtgtgtgataaccgcattatggccagacgtggtttggaaccaatgaggtatgcctcatgggcagtttaggccggtggcactttccgtttggcttcgggcctcttggaggattaaacccatggccccatgttaccgaaatatcaacgccaccgatttagagctaacccccacccaagaaggaggaggtagggcacagactcatttagggaggcgcaaaagattccacggggatacagattttcccactgagacgagagcccccgtttagggatatgaccacgttataacagn

SEQ ID NO: 493597 - DNA, 594 bp, Homo sapiens
gtgacttgttccagccaaaatagttaagttggtcgagacatgtagcagcatcatgaagtttgaagattccgcctttggatgatgaattccaaattctgcttgcttgctttttaatattgatatgcttatcaccttccctttatgcgcaaaatgtaggggtataataatggtaacatggacatgatcctctttataattctaccttgagggccgtctccatgtttgatggatctgagcagggtgctccacaggtagctctaggagggctggccacttaaaggtggggagcagagaattcttttatcccacctcaacctcttgggcagatttgaactcttccatctcttgccctcaaagcctggtaagatagttaagggggcataagttaacttcccattttcatactctgcttagaatttggggggaaatttagaaatataattggccggattattgggaatttgttataatgaatgaaaccttttgtcatataagattcatattttctttttatacctttgataaagtaaggcatgggtgggggtaatttgggttatttttgttcccccagtttaattaatccttaaacttgga

SEQ ID NO: 493598 - DNA, 1014 bp, Homo sapiens
  misc_feature (47)..(47): n is a, c, g, or t
  misc_feature (74)..(74): n is a, c, g, or t
  misc_feature (77)..(78): n is a, c, g, or t
  misc_feature (110)..(110): n is a, c, g, or t
  misc_feature (134)..(134): n is a, c, g, or t
  misc_feature (137)..(137): n is a, c, g, or t
  misc_feature (179)..(179): n is a, c, g, or t
  misc_feature (181)..(181): n is a, c, g, or t
  misc_feature (188)..(188): n is a, c, g, or t
  misc_feature (203)..(203): n is a, c, g, or t
  misc_feature (1002)..(1002): n is a, c, g, or t
tccgaaaatgtccatgcgctaccatcatctatgctatgcctggctgntcctctgcactctgggtttcctcatgngannaacagaaaagttatgaacatcttctcctattnatgtctggagattgtgtgtgtctntgnatatccctcttaatttatatccccaccgcaaaactgtgaatnancccccanaaagctgttcgttgnattctagtcattattgccctgggcatctcaggatctctcttggcaatcacattttggccagctgttcgtgagaataaccgacgcgttgcattggccacaattgtgacaaattgtgttgctccagtatgctgctttctgtgggctgcttagcatactttttgatgcaccagagatggaccatctcccaacaactacagctactccaaaccaaacagttgctgcagccaagtccagctaatgaggaaattctcttttgttttttggagcatggttctttgggaagtggcatccactgcaggaaagcagaatgagcagagccagcagaactgatggagtggcacaaattcccagtgtctggatggtgccacactggcgcctaatcacccgtttaacaagcagaaattaaatgttgctcagcacatgtgtctttcagctcttccttttcacccatggatgatcattgcgagcatgcgctgattggactgaaatgccggggaataggttaggcatgctcagtgccgtccctttgccaccacagtcaaatgacatgcttcactgtggtaccttaatacctgaaatagaaccatggaaaattctgatgtcctctctctgaattatgtacagactacctgggggatcctcttctctccaaatgttagccatcctgaagtagccgaacagtagaaactttggtggggattaaccgggagcttgaaaatttgtctttggtaacctgatactggacagctgaactgaatggctgcaaaataaatacctcacatgatgtctgtgtctgcantttgtgactttg

SEQ ID NO: 493599 - DNA, 1065 bp, Homo sapiens
  misc_feature (47)..(47): n is a, c, g, or t
  misc_feature (74)..(74): n is a, c, g, or t
  misc_feature (77)..(78): n is a, c, g, or t
  misc_feature (110)..(110): n is a, c, g, or t
  misc_feature (134)..(134): n is a, c, g, or t
  misc_feature (137)..(137): n is a, c, g, or t
  misc_feature (179)..(179): n is a, c, g, or t
  misc_feature (181)..(181): n is a, c, g, or t
  misc_feature (188)..(188): n is a, c, g, or t
  misc_feature (203)..(203): n is a, c, g, or t
  misc_feature (1053)..(1053): n is a, c, g, or t
tccgaaaatgtccatgcgctaccatcatctatgctatgcctggctgntcctctgcactctgggtttcctcatgngannaacagaaaagttatgaacatcttctcctattnatgtctggagattgtgtgtgtctntgnatatccctcttaatttatatccccaccgcaaaactgtgaatnancccccanaaagctgttcgttgnattctagtcattattgccctgggcatctcaggatctctcttggcaatcacattttggccagctgttcgtgagaataaccgacgcgttgcattggccacaattgtgacaaattgtgttgctccagtatgctgctttctgtgggctgcttagcatactttttgatgcaccagagatggaccatctcccaacaactacagctactccaaaccaaacagttgctgcagccaagtccagctaatgaggaaagactcacttgagataccctctccttgctgaagtttttcttgacttctccagttctcttttgttttttggagcatggttctttgggaagtggcatccactgcaggaaagcagaatgagcagagccagcagaactgatggagtggcacaaattcccagtgtctggatggtgccacactggcgcctaatcacccgtttaacaagcagaaattaaatgttgctcagcacatgtgtctttcagctcttccttttcacccatggatgatcattgcgagcatgcgctgattggactgaaatgccggggaataggttaggcatgctcagtgccgtccctttgccaccacagtcaaatgacatgcttcactgtggtaccttaatacctgaaatagaaccatggaaaattctgatgtcctctctctgaattatgtacagactacctgggggatcctcttctctccaaatgttagccatcctgaagtagccgaacagtagaaactttggtggggattaaccgggagcttgaaaatttgtctttggtaacctgatactggacagctgaactgaatggctgcaaaataaatacctcacatgatgtctgtgtctgcantttgtgactttg

SEQ ID NO: 493600 - DNA, 786 bp, Homo sapiens
  misc_feature (17)..(18): n is a, c, g, or t
  misc_feature (30)..(30): n is a, c, g, or t
  misc_feature (32)..(33): n is a, c, g, or t
  misc_feature (50)..(50): n is a, c, g, or t
  misc_feature (61)..(62): n is a, c, g, or t
  misc_feature (774)..(774): n is a, c, g, or t
ttcgtgcggactaaccnngacgcgttgcantnntggccacacacttgttngacaacttgtnngttgctccactactgcgtgctattcctggttgggccctagcttgggccattacttttgttttgattgccaccaagaagattgggacccatcttccccaaacaaactacagctactccaaaccaaacagttgctgcagccaagtccagctaatgaggaaattctcttttgttttttggagcatggttctttgggaagtggcatccactgcaggaaagcagaatgagcagagccagcagaactgatggagtggcacaaattcccagtgtctggatggtgccacactggcgcctaatcacccgtttaacaagcagaaattaaatgttgctcagcacatgtgtctttcagctcttccttttcacccatggatgatcattgcgagcatgcgctgattggactgaaatgccggggaataggttaggcatgctcagtgccgtccctttgccaccacagtcaaatgacatgcttcactgtggtaccttaatacctgaaatagaaccatggaaaattctgatgtcctctctctgaattatgtacagactacctgggggatcctcttctctccaaatgttagccatcctgaagtagccgaacagtagaaactttggtggggattaaccgggagcttgaaaatttgtctttggtaacctgatactggacagctgaactgaatggctgcaaaataaatacctcacatgatgtctgtgtctgcantttgtgactttg

SEQ ID NO: 493601 - DNA, 777 bp, Homo sapiens
ccacgcgtccggcgacaccctcccccccacatacacacgcagcgtttgataaattactggttttcaacgaaaaaaaaaaaaaaacaaaaaaaaaaaaaaaaaaaaaaaaaaaaaaaaaaaaaaaaaaaaaaaaaacaaaaaaacaaaaacaaaaaaaagaacaaaacgaccaacacaacacacgacaaacaacgcgacagcgagagccacgcagcaagagagaccgcgagcagaggggacaagcccgcaaagacaacgagagcaacaacgcagagcgcgcagacacggaaggggggtgcggagagaaaaagagaggagggaagaacgccgagagcagacacgaagagagagcaagaggggagagaaaaaagagggagagacagaagcggggaagaaaggacggaagacacgcgcggaggagagccgaggacaaaaacaggaggagacgcgacagaacagaacagagaggaggcgcagacgcagagagaggagaagagaggaagaagcgaagagaagggaggagaggagagagaagaagaagggaaggaagaaaagggaagaggaggagggagaagaaagcggaaggcggagcagcggcgcgagatggcacgggaatgccagaccgcgaggcagaagagcgcggtgaggggagaagagaaagacaaggagagaagaaggagagggacgaagaaagagaaggaggagagagagggacagccgcgaagggcaggagagcaagaagacagacaaaggcggcgaggaagaagggcaacggag

SEQ ID NO: 493602 - DNA, 301 bp, Homo sapiens
cggtcgttctagaggatccctcgaagatggccggctggtatgagactgccgacgactgggggccacacttgccccccaagatagaggctggactttgacttggagaaactgtgttctatctccctctcgaacacatcaatgcttatgcctgtctggtgtggggcaagtactttcaaggccggggttggaagtctcagcgcctacattcacagggtcgagtttcagccaccgaggtttgcgctcaacctccaacagcctcgaagttttactggccttcgcagaccaagtaatgcagatcgat

SEQ ID NO: 493603 - DNA, 144 bp, Homo sapiens
tggatctcgagcatgttggcctactgagatgctgccagggtccctgtaagagggaagacacgcgggaaacaggcttgcacccagacacgacaccatgcatctcctcggcccctggctcctgctcctggttctagaatacttggc

SEQ ID NO: 493604 - DNA, 359 bp, Homo sapiens
gcgcttcttctggtcacgccgtcatcgtagaatcgcctaccatatgtgtgcaatcaacaaacgcatcagcaatcggacaggaaaagaatggcatggaagcagattgccacacaacaagtgctttgcgcgggattgcaccaatagtttcagaacatgagcagtgtagaactatatggtcgaaatcgcaatttgctgtctacttagcatctaaaggccagaaacaaggaaagtgccctgcactgatattggctctccaagtttaggcttgcacagagcccttgtttatatcaaaatctggttatcatcgagatctgcttcagaacatggtcttgtggtcaattgctccagaatacctagcc

SEQ ID NO: 493605 - DNA, 1315 bp, Homo sapiens
agcagaacaagctgtaggagtgctgcattatgaatctctgatggaaatggtgagaaagagtagcgcagagggagtgtgatcctagctgtacaggaaaaaagacctatggatcactcatggtaacgaacatggccaacagggttcttcagaactggagctcaacggtattccagacgcacaatccgactagaaatccagattcaacgtgatcgcgtgtgcagatccttctagctgctgtgcaacatctctccaggaagtgtgtcattctgggataaggtagctaaacaatcaagatgcatagctcttgagccatgattcatctcgtatagttgggtatctcggtcatacctcttgattcaacgggatagttaccgatatcaagcgcctcaagcgtggagtgatactagggggcgaggtactaatgagtgaaatgctcctgtatggacagattaggagctacatggatggacagatggttgggatggatggactattcctcaagtgtatagtggacggcctatttaaaggctttgctgggcaattggattaaagatacacttatgcgtgtacatgaccctaggttagctggtgggctcagcctgatgggcgtttagtcgtgagtagtactttgctgacctgtgctccctgtgaaatcgcaacgagtacaataccctattctagtggacgtaggtgatgcagctgctttctcggcagaaatatcggtggacaatgcagaaacgttcgacatggttctgtgaaagccgaacgattcatgtcaggtgtataggtgatatttggacctttgcttattggaggaggacgttttcacaagaattaatttaagagggtggtattcgacactactcttccagccagaggcttccccaaagacccaggtggaacaaagtacagaactatcgaccaaggtgggattaacctgacatggcactaacaggcgaaaggctggttgggaaaccataataatggaatcgagacaccggtacaaaaagagggaacacagaaaacgaccaacccggacgggggcgcgcgggaaaaccccgaaagaaaacacacacgggaaaaattgcacgatagcgggaacaaggaaaccaacgggcagacaaaagaagccacgaggaaaaaagaaaagcaatacgagcacagagagggatacacacacacagaaaagaaaacaaagagcgtaaagagcagcaaacaatacaacaaagacagcaaaatggacagcacagagagcgacgagaaagacctgaaatcaaaaaacacgaccgcagcagaaagcacaacacgagcagag

SEQ ID NO: 493606 - DNA, 184 bp, Homo sapiens
agccatgcacaggaaggaacacatgacccttctgtctgtgactgttgctgagtatctgtttcatgtggtagaattgtggataagtgtttagtgaccctatcatcactgtaaccgtcgcgcctggcatagatgtagtgatttggatggtgtgttttcaataaatgcctctggggccctgatgata

SEQ ID NO: 493607 - DNA, 342 bp, Homo sapiens
taggtgacctagaggatctccaaacacgcaatcttccaagagaaaataaaaacataacttggcagcttgcttaagtttctgtcatcctgcctacacatattcttccagtggttctcaaagtgagggtactaggactggtagcatcagcatcacctggggacttgttagaaatgccggttctcagaccaacctcagacctaccgaatcagaaactctgggggtaaagcccagcaatctctgtgctaataagccttaccaagtgattttgatgggaattccagtataagaatcattgacagacacgcctggcccactccttttttcctgttagcacagaaaagg

SEQ ID NO: 493608 - DNA, 194 bp, Homo sapiens
cgttttcttcagcttataacatggcggttgattttaatatctacttcatagcgtaaatttgtgctctatttaaagtacttggactgcagataatggcagcgtatcattactgtttaattatcacctggagaggccatcacgggataccggagctcgacattctgtaagtcctggtcgatagcctgtttccgtgt

SEQ ID NO: 493609 - DNA, 569 bp, Homo sapiens
  misc_feature (141)..(141): n is a, c, g, or t
  misc_feature (205)..(205): n is a, c, g, or t
  misc_feature (207)..(207): n is a, c, g, or t
  misc_feature (210)..(210): n is a, c, g, or t
  misc_feature (225)..(225): n is a, c, g, or t
  misc_feature (227)..(227): n is a, c, g, or t
  misc_feature (233)..(233): n is a, c, g, or t
  misc_feature (246)..(247): n is a, c, g, or t
  misc_feature (255)..(255): n is a, c, g, or t
  misc_feature (261)..(261): n is a, c, g, or t
  misc_feature (264)..(264): n is a, c, g, or t
  misc_feature (270)..(272): n is a, c, g, or t
  misc_feature (278)..(278): n is a, c, g, or t
  misc_feature (285)..(285): n is a, c, g, or t
  misc_feature (290)..(290): n is a, c, g, or t
  misc_feature (296)..(296): n is a, c, g, or t
  misc_feature (311)..(311): n is a, c, g, or t
  misc_feature (326)..(326): n is a, c, g, or t
  misc_feature (347)..(347): n is a, c, g, or t
  misc_feature (358)..(358): n is a, c, g, or t
  misc_feature (380)..(380): n is a, c, g, or t
  misc_feature (388)..(388): n is a, c, g, or t
  misc_feature (393)..(393): n is a, c, g, or t
  misc_feature (397)..(397): n is a, c, g, or t
  misc_feature (416)..(416): n is a, c, g, or t
  misc_feature (418)..(418): n is a, c, g, or t
  misc_feature (422)..(423): n is a, c, g, or t
  misc_feature (449)..(449): n is a, c, g, or t
  misc_feature (452)..(452): n is a, c, g, or t
  misc_feature (467)..(467): n is a, c, g, or t
  misc_feature (478)..(478): n is a, c, g, or t
  misc_feature (498)..(498): n is a, c, g, or t
  misc_feature (505)..(505): n is a, c, g, or t
  misc_feature (565)..(565): n is a, c, g, or t
ctgggtgctttggtgtcggagatccgagagtcggagatcggagagtcggacacaggacagtcggacaccggacagtcaaacaccggagagttagactgggcttctcggtggggagaggctctgggataactactgttacanctttgaagggtcaaggaaaaaaatttggattattttaaaaaaaaatttggaaaaaaaaaaaatngngtncgtttcaactctaantnaagaantggattctataannagtaagcnaaatgnagnaaaaannnaaattnaaaaaantacgnaaaggnaaaaaaaacttattnaaaaaaaaaaaatantaaaaaaaaaaaaaaaaaaangtttaaaaaantataataaaggggcaaaaaatnaatataantattnaaanaaagattggaataaaaaanantttnnatagtatggtaaagttaaaaatattntgnaaaatgtatttaaantggaaaagttnagaaaaattaagcttgaaantattaangtaaaaatggctggaaaggaggtatttattgttatgaataaaggaggtggaaagagcttntgtt

SEQ ID NO: 493610 - DNA, 428 bp, Homo sapiens
  misc_feature (147)..(147): n is a, c, g, or t
  misc_feature (151)..(151): n is a, c, g, or t
gctcgatttagcttctagcttaccaatggctgtgatcccatttttgacagcaaacctgtcctacccaaagtcttgtaagtttacctttgagtacaggtgatttgaactgtgaaacctgtaccacaacacggggtgcactagttggtntggntatgggtggtctgtaccctatccttttggctatacccgtcaatgggggccttgctgccaggtatgaatcaagtcccctcccacagaggggaaacatcttcaactactggattacagtttctaagcctgtctttagaaaaatgttatttcctactttacttcagactgtgtttgcatcctatcttgggtctagacaatataaactcctcataaaggcccttcagttacctgaacctgacttagaaattcattgaagcaaatatgtacaaacaaaaata

SEQ ID NO: 493611 - DNA, 326 bp, Homo sapiens
  misc_feature (58)..(58): n is a, c, g, or t
  misc_feature (229)..(229): n is a, c, g, or t
  misc_feature (244)..(244): n is a, c, g, or t
attggtgggagttgcccaagggaggcccaccaaaaaagaaaaatcccttgataactgntgcctgccctttttaggcaaccccgtaaacaagggcacacagccagcactgtgtcttgcctttcagatcttaacagagcaggagggcttaacgtggtgattttggagcctcttagtgacctggtttcgtctgtgacagggacttaaactttctggttcagtagtgtgttanacataacactgaatnccttactgggatacagatttttgctcaggaatggctatgacactttttctaggctctaccaataaaagccacttgaaggttc

SEQ ID NO: 493612 - DNA, 149 bp, Homo sapiens
gacagtactcccgtttgccccaggatcgctggtccccatacatgcccacgctgtggagcaggccagatgaggctgtatacaaactcgcatgaatcaggtagggaggttatggaggaggggcattatgcccaagagccattggtggcacc

SEQ ID NO: 493613 - DNA, 114 bp, Homo sapiens
gtggagctatgtcaagctaccccttcatagggaaatatgagtgccttggtgatcaagcattaacgaacaattaaggtaaaacttggatgtgtggatttctaacgcgggactcta

SEQ ID NO: 493614 - DNA, 199 bp, Homo sapiens
  misc_feature (70)..(70): n is a, c, g, or t
ctgttagaactcctgggctcagtgatacgctgcttggctccagagtgtgcgataaggtgtgagcgcgcanccggcttgtgtttattttcttttcagatcaatccatctgattggaatgaatcttgctttttgcaaaatgcatggatatactcttttattgtctgttccccggcaaaaaacacacgtgccacacgaataa

SEQ ID NO: 493615 - DNA, 299 bp, Homo sapiens
cttttgttagtttttaaggaaatgaaactgcattgttccctttggcttgactgttcttttttatggcgtcttttagtgttgtagttgtaatatgaaaaccttaggtaaatgttgggcagtaatgtgaacaaaacagtgggaagggagtaatttttaaaagcttatctacattgctgctgtaatacttacattcaactccagatctcaaataccaccaactttaatatcaaagtcccttaaagtcagaaggtgttataatgtcagtggatggggttattccctgtgtacaaagagtcagg

SEQ ID NO: 493616 - DNA, 939 bp, Homo sapiens
gcggaatccagggtcgtaattatatgtaaatctctgcgtcgtgctgcgtgcccacgagtatggctgaataccgtgagtggggccgggctcgggctggagggcgggatcaggggctcgacctgtatcctccttctcgcttggtcgcaccggcagttccaccatctcagccctcttctgcagttaacggggctgtgcgcgaggagagcgatcactgcaagtcggtcgagtgagatctcgacgctgtgtgcagaagctggtccgagccagtcgggctttgtgacgtgatcctgcatactgtaaagccctttcaatatcgactaacctagcatccagtggccagtggcaccccttcacaaaaaggcgacacgttccggggctaaggccccgagaggttcaggatcctgcccagccagtacaaggcacagtgaagagtttgcccacaaatgcaggccccaggctttggactgttactccggtaaaggtggttcttcccctttgggattcaaggccaggcaaatggagccatcaatgtggcgagttgaccagaaagttctggttgggataatgaagagctgctgtttctttccagtgctgcttcttggggcagtgactttgtgaaccacttcattttttatggcaaggtggggatccctaaaaactgagatgatgaagacttcccggtttacaggggccctggttttttaactccacctggtataatgatctccacaccccgcgagaggcctgagggtgcgttctgaagaacctgcagtcttattggacgaccctgagctacggaggctgctgggagtgggaagactaatatggtgcgtcgcgcttacaacgcgtgttaagcttccggtcaagcaaaagcgggtctttcgtggaaaagagcacaacggcgtgctcgttccccgtgtaaggatcggccaaggcata

SEQ ID NO: 493617 - DNA, 1313 bp, Homo sapiens
actcataactcggaggcttggcaagctgactaggttcccctaagtaatcggatgcccccgatatggcgtattccccgacagtaaacaacataagcttctgactcttacctcccgtctctccatactccgtgctcgacgatcgtgctatagtggaggccggagcaggaacaggttgaacagtctacccgtcaccattagcagggaactagctcaccaccactggagcctcacgtagaccataacgcatcttcatccattacaccatagacaggatgtactcactcataatcttagagggaccaatcaaatgtatcatcacagcaacaaattaatcaaatactcaaacacccacatgcacagtaacaccaagtacacaaacagcccacgtcagattcgatcatggatcacagaaccataaatcaacaagacaaggaacactacaatacaaaccgtcatactcatcacgcagggtcactagccaaggctgggccagtcacacactataagctaccgtaaacgagacacggacacaccatccaaaaccaacacgacaaacacaagatccatacagaaaaccccgggaccggagaaggaaagagggagaaacaaacaagtaaataataacaccaaacaacactcatacaaggaaagagaaaagtagagaaccaacacacaggacaagtacaaaaaaccgcaaacaatcgcagataaccacaaggaggacagaacagagaccatacaaagtcctacccccacacaccgggacaccacaacaaaataaaatccggcgacacccaacagaagcaacaccaaccaagacacatacacgataaacgacaacggaaaccgaaacaaccaaaacaaatcacaaagagcaaaccccccgccgaggaaaccagagcagcaagcaaaaccacaacatacatgaacccagacaagagaaataacaacgggaagaacacaaccgaaccaacaaaacacccaaccggcgaaccaccaaagacagagcatcaacccccacccggcagacagcggacacacgcacaggactagaccaaggcaccacaggacagcaagcacgaacacaaaaaaaaacaagacatacaaccaaaaaagcaacaaacacaacaacagaaccgccaaaaccaacaagaaacacgccacacaacagaccacgacaaccccaaacaacacaaaacaacacaaccacagaccagcacacagaacacaaaccaaaggacagaaagaaccaacaaaagccagcacacaaaccacaaaacaacacaaaacgccgacaaatccacacagcacaa

SEQ ID NO: 493618 - DNA, 145 bp, Homo sapiens
gggattaaaatgctccctaaaagcagaaactcttggtgtctgcctcaatgcaacaggtaggtagttccaaaacacttgtgaaaaaggtctttgtttgggatatactctctctggaaaggaacaaggagcttatttatctgtgccg

SEQ ID NO: 493619 - DNA, 244 bp, Homo sapiens
cttccatccgtcggcggcagaccctgccgggagccggcttgccgctatggatgatcgggaggatctggtgtaccaggcgaacgtgggccgggcagcctgggcgatacgacgaaatggtggagtcaataaggaaagtggcaggcatggatgtggagctgacagttgaggaagaaacctcctatctattgcatataagactgtgatgggagctagaagaccctccgggagataatcaggcacattt

SEQ ID NO: 493620 - DNA, 158 bp, Homo sapiens
gctcgtttcagtttttgtctttttggccggcagaagaattaaattgtccatgaagagactgagttcaagttggatttaaagggagcagttgaggaagaattcctaagaaagtcatcattctggccaagcacgatggctcatgcctgtaatccagcact

SEQ ID NO: 493621 - DNA, 437 bp, Homo sapiens
gacacggagctgaactacgggagggctcgagcgggacacagctctggagctcgcaactggggctggcatcatcaccagagcttgcaggatccacgaacacctgaagaacagggctagtgacctcatgaactttgatgacccggcttgactacaacaagatcaccctgtggacaagctgaccattcagggcctgaaggacttcacccctgacaaggccccgtgaagtagcatcatcaagcaccccaacggaacccaggagaacatcctcctgaaccacaccttcaaacgagacgcagaattgagatggtaccgcggctagtcagttgccatcaacagaatgaaggaactgcaacagtgagggcagtagcatcccggccccgccgatggtataaagtaccagctccagttccagctccggatcatagggaccggagctt

SEQ ID NO: 493622 - DNA, 422 bp, Homo sapiens
ctgctgcgagtaacttggacgcagagtagtgcgactagatatcatagtggtgatagtgtgcgacagacacatgtggagagtacgctatgagttgtgagagaagaggagagagcacagcgcagagaagacacactcgtgagagacacaatatacacaacaccacagaatactcgtgtgtggaaggttcttaacacactataaaggcgcgaggactgggttccaatacacacgggccaaggacgttagcttgacacatatcaccatggtcaaaggttccggccatatttgcatttgggctatattttggagggacacggtatccattccccgtgtgcctgagatttctctcttctgtgcacgcgccatcggtgtgtttcacactgtgttaaggaagttaacgcgaggattctgagtgcggctct

SEQ ID NO: 493623 - DNA, 310 bp, Homo sapiens
  misc_feature (89)..(89): n is a, c, g, or t
  misc_feature (220)..(220): n is a, c, g, or t
  misc_feature (252)..(252): n is a, c, g, or t
  misc_feature (263)..(263): n is a, c, g, or t
  misc_feature (283)..(283): n is a, c, g, or t
  misc_feature (290)..(290): n is a, c, g, or t
  misc_feature (295)..(295): n is a, c, g, or t
gcccagcctggggggcccgcccagccctccctggcctttccactgtttccactttccagggcccattcaagtttttgctttgagtcaanggggttccctgcctgcagccccccatcagcattatgccaaaggcccgggggtccggggaagggcaaaggtccccaggctggtttaccaggtagttggggagggtccccaaccaaggggccggcttttgtcnctgggctctgttttccctgttggtctgcggtntgggttttttntttggcaaacaccaatgatnttccaanaaaanatttcagatgcccca

SEQ ID NO: 493624 - DNA, 1935 bp, Homo sapiens
  misc_feature (1248)..(1248): n is a, c, g, or t
gcgtgatgcgtggcgatcgactcgacgcttactggtctctggtttgggatattctactatatagaaaccctgtagattataacaagactaatttaggtataaccttatagagcaaactccatatactcatcctcacgccacagctgtgagcgtacttttcgtgtgtgctttctcctctctctatctacattctatagcgtatcaactcagtgtcatacatttaaagtcgatgatattccatgttttatagatgattgagagtctcgcgaagagtatctataattctgagattgggggacatagaagttatctctagacaaatatcctacctagtgccttagcgtgggatactttaacactatggggacattcgcgtctacctatgcttctaccaaagtgaccaagaacgcgatctttagcttgattactacgtggctcgtgttaatcctgggtgatctcaactcgtgaataccttgcatgtttactactagcctggacatgggtattcaagattgggacccataacccatgcagcacgtgcgccctacatttaagcgatattttgcaagggatcaccaattgcgtctctttggcccctttttgccttagggctcttcttggaatcactctacatacatttaatcaccctcaattgtttgcacttaaccataacgtttaatgccccttggcttttcgcccctcgggcccttaggcacattaaacaaaagggacaaattattaggaccatatatgtgtgggaccccaacagatgttttttaaaataacggttggggcaaatggtttacaactgtgtgccgtatttaaagctaagcctaccctttagataaataccaggcggcgggaacacaccttactgtgttgtgaaaacaggggttaagccatccaagacgggttacccaaacacggatcccttatgtaagagatcttattccacaaataagactctatatatatcacgagtagcccaagatatttttttggtttgttcggccatagctttgcaagacaagcgggggttggctccccccaagtatgaggggtgactccacacatttgccatcttggtcccgactttttggaggaagccataggtctttgggaaagcacccaacctataaatttggcttggtgtgtgtttggcccgacagagtattccatatttgggagactctgcgtcaaggagtagctctcccagaacacacagagagaggggcccttatgggtatngcatttgtgagtcttgttattataatttagcccctcttatatttggttataacacagggagccagagaaggtttcaaccaggtgagtgagagcgttaacagaacggcttatcacagttcgagataggtgagagcctcgagagggtagacaaacaaaaatcatagagaaataggcagacgtaggacgcccaattaggagaggaatattatactccacccagtcgggtaagtcggtcgacgcaccacaagcagtaatattgtacagtagtagccgacgagcgatcctccagtgttagtctagcagaccgaagaagccgccagtaattgactagataggaacacggcatgactaacacgtccaagcgcacgcgtgagagagtagcgcggctatgtgagacgaggggatatatggaggtagacagtatgtacaccgatattagttgtgaagagaacaataatgcaagggggagtagacatgattagatattgaagcaagaagttattagttgcgacagatgtgatgataatgatggtgaagagtggttgaagcagcaattatggagagatgaatatagatatgtaaagaacagtcgggagagttagaataaagaatgaagagatttatgatgatgataacgcatgattgtatataggtgagatgtatcgacagtagagaaaatagaaatag

SEQ ID NO: 493625 - DNA, 268 bp, Homo sapiens
caacgggagctgtagatggggcaagctggtacaggtgtgtgcagacacggagacgatggcaatgtcagaaaaggtgggggtcaaactcgttttggacatcgatcggaattaaggaaagcatagatgtggacaggtgcagtgtgtgtccatatcacggcagagtgtctgcgggagagtgacttgggaggagctgtaggatggaagatcttgaaagctccacattagaggtgaacttggagcatcttgtgattgcagggcaaatgggtcg

SEQ ID NO: 493626 - DNA, 260 bp, Homo sapiens
ctagtaacaccccttccccacagtgagtagaatcaaattttgcaggcatctcgcatccagtcattctttctcatccctctctaacatgtactcttcaaactatgttcattatttctacaatcactctttccaaattgaaatgtaatccacattacataccacataattcacccttttacataaaattcagggagttttagtatattcacaagatcgtgcaacaatcaccactaattccagaacaaggctaggcaaggtgg

SEQ ID NO: 493627 - DNA, 110 bp, Homo sapiens
ggagacagggtctccctcccgggctggaatgcaatggcacaatcatagctcactgcagccttcaactgctggacttgtgacccttctgtcgtcttctcacaaaccgtata

SEQ ID NO: 493628 - DNA, 112 bp, Homo sapiens
ttttggtcgtctctgaggttcccccggtaagactggacctctctgtgctttgggcacggcgacttagattatagagaggtccaatcttccggggttccgagctcgatcttcg

SEQ ID NO: 493629 - DNA, 1248 bp, Homo sapiens
ccgcgggggggtgctctttctgttgttggtgatatctctgctcgctcccccccacctttttgtttttgtcgctgaagcgtccttgttctctctgttttgttctcccccgggtggtcacaccctttgtggggtcgccctctattttttctcacttttttgtttgatctctcctcggtctgccatcgtaggtctccctcctcctgcggatggtgtgaggggctgtaatttttttcctctcgggagcagaaatataatatcctccttgtctttactaaaagtagaagcagggcggttgtttttttttgggggcgaaaaataaaaaagggttccctcgcagtgatatagggttgtttatttatatacgtttctatttgtatctttattatcccctctccccccctccccgctcgtgaatatagtttatagagaacatttcgtcggcgccagcgtgttttttttttttttgtcacacagaagattggttgtttttccgcccccccacgtttgttttgttttttcgcacctctcttgtttgtgtgggaggtatctgtgtgtgtacacacattgtcgtctccgtttctctcttctcactcgcggtaaccaccacgcactctctctctctccactccgggagaagatgtctcaacatttgtgtgtatatttctctctcacccacgcacaccacgaagagatttttaatctccctttatataataaatagacgcgcccgccacacccctctcggagaggtattatatttggtgcgaagacaatataaaatatttgtgtgtctccacaaagaacaccacacacttttatatatttctctccccccctctctttttatatatattgtttacacctcatatataccccacactctctgtggtgggatatttgtgaggaggggggtgttttgtgtgagagaggaatatatatattttataaataaaattattctatgagagagagaggagggcgccccacatatagttgtgggagatatatacacacctctctctttaaaaagtggcgcgccccacacaagagatatctcttctaccacccctctcactacatgttttgtgagagagagacccacacacaaatatataatatttccccccttatccacaaaaaaaacgcgcccctccccccctcccccccacctttgtgcgcccccccttttcttttttcttccccccccccccgggggggggaaaaaaaaaaatttttttttttttttta

SEQ ID NO: 493630 - DNA, 320 bp, Homo sapiens
atcacatagacggtattgatgctgacctcattgcaacgtggtagggactagacaccacccaatttagagtgcatcattatcataaagatgacgagaatgatgctctacttggtggcccagcacagctcactgctgaagagaaatacaaggtactgtgaaagatgccatcgtgtccactgccctacatgtggaacctgagaactactttatgctcctgtctttgatggttcgggaacagatatggagcccagactcgtatcgatagcagtcacatcgattgtaaggctacacctctaaccttatacgggtactactgcggt

SEQ ID NO: 493631 - DNA, 164 bp, Homo sapiens
  misc_feature (123)..(123): n is a, c, g, or t
  misc_feature (139)..(139): n is a, c, g, or t
  misc_feature (162)..(162): n is a, c, g, or t
cgttcatgatggagcttggctctccttcctctccatggctgacatcttcctcctcgctgccgctgtactcatattctgtctcctctttctcaccccgcttcttccgggatcggtcaatgtggnccttaagctggatgcngacctgccgctccgtgggctggncc

SEQ ID NO: 493632 - DNA, 342 bp, Homo sapiens
aataactggacactctgtgaaccaaatgtttctacataaggggactccctccactcgcatattttacggtgacgtcccacctgaattggacactgcgcttctcttactgtcgaagcagtctttgatctatgataacagatgaagtacacgtggcaacctgtgtttacattgcacttggtatatactgatcctttgtatgcactaatttcgtatcccctaaggttctatcacacggacaaagagaacgagactaacggaaccgggactctatcatcgttatcttcgcgtgtgtctgatgggaacaataaaaaggcaccaaataaaaaggacacgatacgcata

SEQ ID NO: 493633 - DNA, 343 bp, Homo sapiens
gctgagttcatctgatgcacctgctcaggacacaggttccagtgcagctgctgtcgaaacagatgcatcaaggacaggagcccagccgtaattgagaattcctgtggcgagagtccaggccttaccaacgccggcaacaaatggaaacaggaataactttcagaggacaggattgactggccgagtgtttatttccaagacagctcagaatgcagtggctgctctcttgagacagcacgggctcacagccctcatacatagcagaagatgaccatttcaaacctcgaagcccgatatcgtataaaacactacgtcttcacgtggaaaacacaacttcccgact

SEQ ID NO: 493634 - DNA, 667 bp, Homo sapiens
atctcaatttgaattgtatctcccagaattcccacgtattgtgggagggcaccagagggaggtaattgaatcatgggggccggtctttcccatgctattctcgtggtggtgaataagtctcactagatctgacgggtttatcaggggtttccgcttttgcttcttcctcatttttctcttgccccttgccacgcaagaagtgccttttgcctcccaccataattctgaggcctccccaaccatgtggaactgtaagtccaattaaacctctttttcttcccagtctcaggtatgtctttatcagcagtgtgaaaacggactaatacacatggtaattccatgtttaactttttgaggaacagccaaactgttctccacagtggctgcaccattttacattcctgccagccgctcatgaagcttccaatttttccatatctttgccaagatttattattgtctgtctttttgattgtagcctttctagtgggtgtggagtggtatttcattgtggttttgatttgcatttccctagtaattaacggtattgataatcactttcatgaacttatttgccacttgtatgttttctttggataatgtcttttccggtccttttgcctattttaaaatggtaccatttgtctttttattgaattatataatc

SEQ ID NO: 493635 - DNA, 569 bp, Homo sapiens
ttgagatatactagattccattccgtgaaatttcgttccattctattccattgcattactttccattcaattccattccatttcatttcagtccattcgcttcctttcctttcgattcaattccatttgattccactccattctatgcgatttcattccaatcgattcaattccattcgatgacattcctttcgtttccattccattcgagtccattcaatttgagcattcgtgtccattctattcgagtccattccattaccgtctattctattcccttccattcctgttgattcaatttcattcccttccattcgattcctttccattcgattccattcctttccattccattccattcgttcccattccatgtgatttcattccattccagtccattatattcgagtccactccactccattctattacattcaattccttttgagtctgttccataacactccattcatttcgattccatttcttgccagttttcttccattttattccattccgttcgattccattccattcgattgcatctcattcgaatacttttcattctc

SEQ ID NO: 493636 - DNA, 310 bp, Homo sapiens
ccaccgcccctttccccatccgtcccccctcagggaccaaaaagtccaaaaggggccgtgggggttcagggcgttaggaaaccgggtgggggtgagggtagccctttagccctgtcccttcggttgtgagagcagcaggaccctgggccagttccaaaaacctgggggtgtgtttgggggtggggtgtgagtgggtatgaaagtgtgtgtttgctggggcagctgtgcccctgaatcatgggcacggagggccgcccgccccgccccgcgctcaactgctcccgtggaaaattaaaggggtgaatcatga

SEQ ID NO: 493637 - DNA, 367 bp, Homo sapiens
  misc_feature (21)..(21): n is a, c, g, or t
  misc_feature (27)..(27): n is a, c, g, or t
  misc_feature (32)..(32): n is a, c, g, or t
  misc_feature (47)..(48): n is a, c, g, or t
  misc_feature (54)..(54): n is a, c, g, or t
  misc_feature (56)..(56): n is a, c, g, or t
  misc_feature (59)..(59): n is a, c, g, or t
  misc_feature (72)..(72): n is a, c, g, or t
  misc_feature (76)..(76): n is a, c, g, or t
  misc_feature (94)..(94): n is a, c, g, or t
  misc_feature (101)..(103): n is a, c, g, or t
  misc_feature (115)..(116): n is a, c, g, or t
  misc_feature (150)..(150): n is a, c, g, or t
  misc_feature (154)..(154): n is a, c, g, or t
  misc_feature (162)..(162): n is a, c, g, or t
  misc_feature (188)..(188): n is a, c, g, or t
  misc_feature (195)..(195): n is a, c, g, or t
  misc_feature (206)..(206): n is a, c, g, or t
  misc_feature (237)..(237): n is a, c, g, or t
  misc_feature (254)..(254): n is a, c, g, or t
  misc_feature (285)..(285): n is a, c, g, or t
tcccccccctgcagccgcggnggtatntcccnccagatcctcgccanncttttnanaanttttttccccctnaaanttcccaaaaaaaaaaaanccccccnnngtttaaggggannacctttccctggacctgggggtctcgccgtatcncatnaccaggtnctaaatgacccgacatgcatcacctncctttcnatgaccaaccnccctgtccccgtcccgctgacctgcccccgnggcgtctcacggtgatncctgcccctgacattggtgttcactgtagcnaactacattctggatgggaattttcatgtacatgtgtggcatgtggaaaatttcaaataaaatggacttgatttagaaagcc

SEQ ID NO: 493638 - DNA, 428 bp, Homo sapiens
acttagcagagacggtgtttcagcatgttggccaggatgctctcaatctccttacctcatgatccgcagccttgggcatcccaaagtgctgagattacaggcatgagccattgggcccagccagatcaacttttcaagagcccacaggcaatgttctaccaaatagcttattaaaacatctggatcctggaatattagctaggtttaaaaatagcttcctggtttgaatactgtctttaccttctctccatgaatccatatgccatccatccatgaatttatgcatgcattcagcaaatacttatcaagtgcctccagggtttcagacttctgtgtatgcactcgaggtagaaatgtaataggctaagcgaagtctctggccttactgagtttaacatgtagtgcggacacgtgagccagacaaacct

SEQ ID NO: 493639 - DNA, 1299 bp, Homo sapiens
ggatccacttcctcctcagggaataaaggctcagggaccggcagttctacgtactagaagcccaccatgcctcatcaggagctctaccggatgacatggcctgtgtctcccaccatggaatggacatgtggacaggacgctagactcactccatggcaagacctatgattgctaacaccatccacatggactgaatgagtgcacaccacactgaccactgacgactatatgtagaccagtgggatgacatggaggaagtggagtccacccaatgcccacaattccaacacgggcccgggaacactggccaactgccaacggacgctcgcgccggcacatgagcaagaatccatgggatgcagacatatcataccatgatctctaaggggacaaatgacaacactatcacatggttgatacaaagaaccactcacactgcaccaagcagcgtacaccagagagaaccatagctgcacggaaccgtaatactactagaacacggcatcccatctacggcacaagaagccgcgagagataccgctgcaacgcaccagggaaacacgattgaagccaaacctagagacaaaaggaacatcaaggccccaagaataggcacatacatcgtaagagaatacctcacacaagcacgcgtgcggaacgaagacaccaggcaccgcatcactcacacgccctgaccacataacaacgaataccccaaaagaaaccacaggggaggtccatggtcggccgcaatgcacacacacaggcttggcgaccaccgagtggacgacttcatcgtgcgaaagccgcacgcaatcgaacatccccgcaggacccagaaggccctcgacagagggcccgcagaagaaaaggtgggaaacccgggcaccgacgaccacacgtgggccgagggctcacaacaaaaaaacaaagaacaggggcgccaagagacgggactaccatgactaggacagattagagccaaaaagccacgagagtacggcacaagagccacacccaccggcgcaatagccacaggaacgagccaaagaaacaccaggaacagggcgaggggagacaacggggtcccggcacaaacgttacggcacaaaatagagatagagaaccggagacgagaaagagggaaaaagagagaagaggccgaggaaaccgaggaccacgcaaggaaggacgaagcaaagagcaaacgcaagaaaaaagcaaggaaaagacggacccccccgagaagtaacggacgcaaaagacgaagcagacagaggacagaggcagacagcgaaa

SEQ ID NO: 493640 - DNA, 694 bp, Homo sapiens
atttcagatattgtatagaattggtgaatccattgagcttaacttgacccctaaaaggcttctgtatgtatgctgggccgatcaacggtactacatgaccagtgggaaattcctgtgactatccatcaccatttgcaaagctctcttcacctgtgaaacaagatactctatcaatattacaaggccattgtcacgctgggacagaaacaatcaaggatctgaatgcttttcgtatgtctccagaagacacgactgtacgcctactcattcacgtaagatctctgtgtcgtttgacgacagagcgtccaacgatctactttatcttcactccgcttgtaaggtttctacggctgacggaacatgtttataactaagtcacgcacagctctcactgtttgcgtacatatttgtgttccttgctcacagtacgtgccgcacagttaagacactgggagtccttggacagaggatcgaagaactttctcgtacccgatacaagcaacacagagaaaaggaattcctgtggcgtaatgacaccatgtacttattgaacttgggaacacaatgtctcagccgtccacgttccccaattgtgtctgccttattagccccgcatagtgcttcaaggcgtggaacaccaacgtctactgtgtcaaaactggggcatctcaacaagtgagaagaatatggaccc

SEQ ID NO: 493641 - DNA, 180 bp, Homo sapiens
tttaaaaaggggggggtttccccgccccggggggcccccccccttaaaattttttttaaaaggggccccccgcccgggggggaaaaagggggccccccttttgggtttttcgggggggcccttgggtttttccctagggggggggggcggggggttcccctttttttttttttgggggga

SEQ ID NO: 493642 - DNA, 406 bp, Homo sapiens
cttgagggaaaattaaagaagcatggaaaatatatcacagtttttcacatccataagtatgagttctcagagcaagagatttaggaaccatgggaaggatagaataatgaaagaaataattgaagaaaatttcctgagctgtagaaacgtaatgaattttcagattgaaagagcccatctagtaaccaaaatgcatggaaaaagatccacaattttagcactcttaaggacaagcgactcccaaaattattgccagcgagagcgaaacaatacggacactccaataactaagttcttagccgctcgtcttgaatgcttgaagcacgtcgaccagtgacttcactctctgcgacacaatagattttgccctatgtcttctactactcagcccctacatcttatcatg

SEQ ID NO: 493643 - DNA, 186 bp, Homo sapiens
ctgtcgtccagcaggtctgcccagggtgcctcttctaattcggagtcttctacttcttgctcagtgtccatcttgcagagccagatcaagtctccccaaagcagtgacttctcacagcaatgtggcatttggccctctagtgggcagaagctgccctgattcttcctgaaggtcaaacaataaata

SEQ ID NO: 493644 - DNA, 1204 bp, Homo sapiens
ttgtcaccagataatggctcttatggcagcttactcttaattacctcatactatgtataatacaaattatagtgaccggtaattaaaaagtaagctgacatgaagccagtatcgtgagaatgcctctgagataaaagatcgcaggagagctaccaggtaacagaatcgtcagtggaaacgcagctaaagaggcagctacctctgagggaatactctagcagacagtccagatcctagaagggcataaacactccgtctaccagtaatcagaacaaaacacacaacacaaccaaaccagagaagacatcaagagcgaagaacacaaccacacaccaggagaacacacacaaaaacaacctagacaacacgagaactggggagacgcagacagacaagagggaaacaatgcaacacccaagagacggctagcagcaagcaaaaaggaaccaaggagaagcaacaaaacaacacgacacagcaacagcaacagccacacgcgaagcaaaagagacagaacaacaatcgagacagcagcgccacaaaagaacacaacaacattacagacgagaggaaaagcgcaaaccagccaaaacaagaacacaacacgaagcgagaacaaggacgacgcaccgaaaaagcacatgaaaaagagacaacaggcaaccacagacacacacactaacacagagagaccacgccacagcgaggaacagacccacacgccgcgaagaactacaggagcagacacgagaaagcaaagaagagcgccaccagacactaacagaacgaaacacgaaagacaaagcagaaggagaacgaacaacgagcgtaagcaagcagaccagcacacacaacgaccagacaagcacacacgcagcaacacacgagacacaggacgaacaccagacagaaccgtcggagcaaacacgaggctggccacgcgagcagcgcagcagcagaagacacagacacagacgcacgagcagaggcgaacacgaccagaacacagaccaagaacgagacgaagcagaacaggacaacacccagaaccgcgacagcaacgcgcagacgaccagcatcgaaaacagacaacgaggaggcgagaagctagcagcgcccgaggccacccgacaggcacgcagccgccacgccgcagagtactcacagacgaccagactggagcagcacacaccagccgaggagt

SEQ ID NO: 493645 - DNA, 478 bp, Homo sapiens
agcggggaacactcacttaatctttaagctggttttctttttttttttgggaaattaagtaacttgaaaagattaagtgattaatattcatgtggctgtgtcaggaatccccgagccttctctcaggcttgatgatccactaaaaggactcagaagagctgtaatagtcacagctgtgttttaacggcaaaaaggatacagattaaaattagcagagggaagggtgcttggagggaagtccagaggaaactaggcacacgcttgggtgtctctccccaggggcgtcacgtggatgtgcttagctctcccagcaatagtgtcacttcatgtgtgaagaatggtaaaccaggccagcgcacctgagcctcgagtctagagatttggtggggggccagtcacatacgcaggcagtgcccttgtgattgacctcactcaggctccagtgccccagtgcaaaaacaagtgatggttccccgct

SEQ ID NO: 493646 - DNA, 151 bp, Homo sapiens
ccgcgctattatcctaaggtcagataagtgtcagcctcatcttatttttatgagtaatgaagacttgcctccactccctctttctggagtgtaacatccgaaggcatgcttgaagtacccctgggcttctcttaacatttaagcaagctga

SEQ ID NO: 493647 - DNA, 135 bp, Homo sapiens
aagggcgcatgcagatgtggggcaggcaatgtgggtgggtctttgtcatgttccaacactgtccattttcatttttcaacgttgttcagcattcatggggcagtcagttgtgcatctgcagacgtggcagtcagc

SEQ ID NO: 493648 - DNA, 309 bp, Homo sapiens
ggccccggtccctggcctgtgtcctgcctgcgtggtggccccttgcgtcacagtatttgtcccttctgctcatccctgctgcaggtgcctcctcctgcccccgcactccactcccagccatggctccccttccccaggcaagctggaacctactgtgaatgcagccttggctcagcgcgacgctcatcgccctcttgtggtgctggcggcatcagtgcactgttctgtgcccgcatcgtggaattggtgcttggggcaagggtgaacatgcccgagcaagtggaaacaggttggtggagaattttgggg

SEQ ID NO: 493649 - DNA, 106 bp, Homo sapiens
tgctgttctggcagtgggtaggtcatgttctgagaggcatagcttggccagcaggcgcatgaagggcaagtggggtagccatttccttgagacgtcactccattct

SEQ ID NO: 493650 - DNA, 316 bp, Homo sapiens
catcatacacctcaggagtggaacctcagctgaacatacctatcaagaggacatgattcagtccacttctggatgactctgcaaacggctgcagatgtatcatactcggtacattgaactacttacaagatctggagactattacaggttcttatgtgcgatgctgaagagtttggacgatctgaagctgaaaaatatcaagatcgaagtttatggatgaggagctcagactggcccggagatgccaactcgtgaaaactagtaatcaagaacaaattccttggatcatgaacctgcaggaaataccagtgcagag

SEQ ID NO: 493651 - DNA, 1393 bp, Homo sapiens
  misc_feature (284)..(284): n is a, c, g, or t
  misc_feature (505)..(505): n is a, c, g, or t
tggaaacaggttcttgctctgtcacacaggctaaagtgcaagggcgcaatctcggctcactgcaacctcgtccctcccagggctttaagcaatctcccctcccacctctcagcccctcccaagtatagccggaatctcacgaggcagaaagccaccggcgaaccagcttaatttttagtatatttttttgtgcaaagaacggcatttgtgccagtgtgtgtgccccgaggcctcgcctctcttgaacacctcctgtgagagccctcagagcgaactcttcaccncacaccctcggcccctcccaaagagtgtgccttgaggaattcacgagcgcgtgtggaccccacccacgccccgggccaaaaaacaaagagaatttatatatataaaaacaagtgtgtctatacaccgagttctcggtggcgcaagggcgcgttataaagagtgtgtataataaaaattttctcaacccggtgaagagagtgggggtcttccccatctcacnctatagggagattgtaggcgactgtgccttctcctgtggaggtgtggagaggctgtagacatgtgtgaaaatctccacattctctataccgtgagagaggctctatatgtcgcatgtggagtacattgtgggcaagaaaaaaacagagtgaagtgagacacacttataaacacactctctcaaatatctcttctctctcgcgtgtgggagagagacacaacacagagactctcctctttgagagagagagagagactctgtgagagaggtgtctccaaaagtctccctcttatctccccccagtgtggttcctctctatattctcagggaccactctctcacaagcctgtgtgcaagggtgctcccgtgtgtcatatatttgtaagcccacaatgtgtgggccatatgttgaggcccgttgcccccaattcgcggcaacagaaaattatttctcttagggggcccccattcacactgtttgtggccctatttctgtgttgggccacaaatggccccaagggaaggattccttctccagcggcgggggggggcacccccagccccgtggagaggggttggcagtatccaccacagagaactacagtgtgggagcagtggggagggtagtacactctccattatggggcaccccccccaagagtataaaggccacacacaaaaaaagttgtttccccccccatagtgtgggatataattagggggggctcttccaaaaaagagcgattgtgtaagacacccccacaagtattcccccaataataagagtttccctggagaataataatagacccacggactattgttgttgtgtgtttttacaacgcacacaaaaaggcaccacgaattgtaattaggagaaaagagatc

SEQ ID NO: 493652 - DNA, 413 bp, Homo sapiens
gaagtatcggatcccacagcaatcccctcattctctatagggagtatgaaccactcctcttgtctctccaggcaggaggctgagttcaataagtccatgggagaactcttgacttgtacccacatcctaaacgtcactggtgagtcaggcaatggcaattactcagttctccatataccctgggctgatgtctggtggtactgtggggagaggaacctccataacctgttacggtccaattggaccggtacttgtgctttagtccaactggctgttccctttaccctggcattccataagatacctgaaaattcacatggccaccaaaaccggagacatttaacaaattcctttaatcccaatatctacattgacacagtgagtccccaggggggggaaagggcaccgcaaaa

SEQ ID NO: 493653 - DNA, 319 bp, Homo sapiens
tgatgaatctagctgaatccctgatgatggtgtgacaatcacctgagagctgcatgtggcatcccacatgtagatcccacatgtacacatcccaaggagctccacaggagacaggtctcctgattactggaaatcatacaggctccctgcaccctatatatatttagctttcatgcacatcatctatctttcatcttactgctcagcactactacagcttttaatagaatacgcaattcatcagtttttttttattaggagcacagtctaggctctggtaggctcacggctggaagtagcagtgggccacacatacata

SEQ ID NO: 493654 - DNA, 103 bp, Homo sapiens
tgtggcgacggggtcatcaggtggaggatcacacttgagtcgggaaggttgaggctgcaatgaacggtgatggtgccactgcactgcagccggggcaatagaa

SEQ ID NO: 493655 - DNA, 157 bp, Homo sapiens
  misc_feature (142)..(142): n is a, c, g, or t
gctgcgaggctaccatggaactccacaatagtttcttttaaaagaaaaagaaacaccattaaattccatttaacagttcatatttattaagaaccacgttgtgtatatgatttctaacggtatctactagacttgttctccnatagtggctatacca

SEQ ID NO: 493656 - DNA, 900 bp, Homo sapiens
tctgcattcacacaagtcccgtcatggtaatgttagcgtctctaactctagacagtaagaaggctcctaggcacacacacagaacaaggttggcattgcgtctcctttctactcacttgtatggccctaggcttctacaatgcggcagggccctgagcgctcagctacttgagccttggtacccttgcctgaaaaattgtttattggtgaggtaacatacaagtgtgtgtaagttttctaagcacagtacctggctgactgtcaaacactccatggatgctagttacttggtatgattagtattgccaagaggcactcatggagctctgtaaaaggcaaaaatttagtaagcccaatccctttaatctaatgttaagcactgtgtcttcttcttattcttaaacttaagtgcgtgttgaacactagttaacaccctgagatgattacctcctatgctgttttataattccccatttggaacagggttggtccgataacggtcagtcaaggggacacttcgacaatatttgtctttattggtgaagtcataactttggctcgatgtatatctaatttgggatcccattaccatcggagaggagcagatcaatttctatacagctctataaaattttgcgtatcacagtatttaagacaggttgcgatcttcatgatgtgataccacttaagcttggaaccaaacaacaagctatcttggataggaccccactagacgcaattaggccggtccccacgacccacaaagcaccttgactggttgccacacatcctcgtccaaagcctccccacgcacagcggcgctatcgcgagtctctcccaggttgccaaacgactcctgcgcgccccaagaatggactagaaccctccctcaacagggac

SEQ ID NO: 493657 - DNA, 258 bp, Homo sapiens
  misc_feature (79)..(79): n is a, c, g, or t
  misc_feature (99)..(99): n is a, c, g, or t
cgcatgcctcctcctcctgataaaaaggtcaatgatatttgatgacttttgaacaggaggtgacagagggacccaagantaggaagatttatagtgagnctcagagcccatccctagtaacagggcagagagactcctgtgcccgcgtaggctgaaggcctgccctagggcgacacagagattccatctggccaaccctttcattcagccaggacttcctgagcatccacgctgtgccagatgcggtcctagacagta

SEQ ID NO: 493658 - DNA, 159 bp, Homo sapiens
gtggggtggagctgcaggaagtgcatcaaaagatcagggtttaaaacatttgccatttgagacagcgctaatcagcggagagaaataaaggaaatattcatctttatacagattaaccattgagataatctctgtaacactcacacctgtgatgatgga

SEQ ID NO: 493659 - DNA, 269 bp, Homo sapiens
agcaggagagcagcaccacatagctggttctatgtcggttcttaataaaatgatgctaggcttcccctttggttactattatttgtatagtatttccttgatacgactccagtgaaaaaagaggtgagtgctataatttagataccagagttctagcctgcaccccttaccattatatcctctaacattttcttgtccatattaccaagttttatctattttgatgcacattccaattgggtttattacattctttaaatgtactttca

SEQ ID NO: 493660 - DNA, 138 bp, Homo sapiens
gtcgtcgacggagcaaatcagggggagcacatgtgagaagtatagagggcagtagatgcaagagatatgacagtggagaaaggagaggcctttggggtggaagagcacttgtggcgagaccctgcttgcacaggaaca

SEQ ID NO: 493661 - DNA, 212 bp, Homo sapiens
gggggccccccccccgtttttttttcccccttttaaaacccgggggcccttcccccctccggtttttttcctgggggggggggggggtttctttttttcccgggggcccctttttcccttttggcctttttttacccttttttttgggccttttttgggggggccccccgggggcccggtgcggtttttccgggtttccccccggggctcca

SEQ ID NO: 493662 - DNA, 102 bp, Homo sapiens
aaatgagctcggtaccgattgtcccaatcctcactatctgcttcatcgcgccaactatatttcactttacatccaaacatcactttggcttcgaagccgccg

SEQ ID NO: 493663 - DNA, 1330 bp, Homo sapiens
  misc_feature (978)..(978): n is a, c, g, or t
gcccgggaaatattctcccccggcggataattgtcgtggtccgagacccacacaacagcgcgggtttcctccgatagctcgctgaagggggggaagtttgcggatagctcacaagcccggcttctcgcccccccccgaatatggggtgtgttttctttttgtgcgacgaaaagccggaacgaccaacagttgttctccccttcgaacgcggggggagagccttgtgaagccccgacaacaacagttgtgtttgtcccgccacggaaaaaaggtgcgcccccgcggacacccgcttccgcgggaccaaagacgcgctttctataaatattgtgtcaccccctcgtgcagagagcaaaggttaatatagacaccgcggtttccggaggagccgccccagaagcccccccacatgtgccccacacagagaaaaaagcggtgacctcgtgtcggggaagaggggggccttctgtggaggggctctcgcccacaggagacacacacacaaagtgggtgctctctgtgtatatagagagagtgcttacacccgtgacatgtggggggagaacagagaagagacagagtttcacaggcacactctgtgtggtgggagagctctccccacacagggagaaagtgggaaattaaaagtgtgttacacagagagtggggcttataatatgtgcaacacactctctctctctaaagagaggctatacacacatcggcgagatcggcgtgtggagaagagatagagagagagacacacacacacagagagacacacacaacatctcaagagagaagagcccacacaagccacagcacaggcacaggcacagcacagtcacagtcacagcacagcgacacaattgcccgcacagcacagcacacacacagcacagcacacacacacacacagcacagcacacacacacacacagcacagcgcacacacagcacagcaccacagtataaagnggcgaaaacacatttcctcgctttctacaccacaattataaccacactgagaattgctatattttttctcctttggccacagaataagctaaggttttctggtttccccacacacagtaaggtggttttacaacaataaagaattagggtgccttttggagaaagagaataagttgcacgtggtttaataaggagataagttgtggtaagaaatttaagtttatattttgcacatttggctaaattggtctgtgctgcaatggttaaataaatcctggattatagattataaagtttctgtagacattctctgtgaagagcaagctatcccccaaaaaagtctgtttatcca

SEQ ID NO: 493664 - DNA, 143 bp, Homo sapiens
cgttattgtgactctagatgatcccccgcccgtacatgggcctgccccagtggttgcccgagtcgttaagtgcgattggttagagtggattccagtctgggtcattcatgcggagtgatgcggctgggccctggctggttggg

SEQ ID NO: 493665 - DNA, 879 bp, Homo sapiens
cgcccacgtcaccgtaagtcgcacggcggccccggcacgcccacagccgttaagcggacacctgttagcatcttgcgtttccttggcctcttctctttgctggttctgcaaagaatggctacaggggccactttccctgaggaagccattgctgactcgtcagcgaatctgtctaatgcgccttagagccactggtgaagatgaaaacattctcttctctccattgagcattgctcttgcaatggcaatgatggaacttgcggcccaaggatctacccagaaagaaatcccgctctcactgcggatatcgacagtctagaaaacggaatagactctcctttctccgaacgacatttcccacatcccacctgctcaacacacccatccccgtcatgcaccccgcctcttgctggcctcgcgcaaactagatccccctggtaacgaagagtgtgcggccaggtgccaagagattcgcccgccgcaccctaccgttacccgcacttcctgcccccctggagcatctagcccgcccacacaccccagacgagcgcggctaccccgccccccaaccccggtgctgcccgccgtcagctcgcaggtagacatacctcagtccactccccactcgcctcgccaccatccgcctccctctcatcaccgacacattaccgcccctccccgcgttcggtcactcgacgacccccatgcgccccgcttcccgccacagccgacgcgcctgagcatcgaaggcccccccgctgagcagccgccgtagtgcgacccgcgctccccgccaccatgtacccctgccaccctccccgcgaatattcgaccgctcttacttttacccacccgatcaccacatccccgtcaccacac

SEQ ID NO: 493666 - DNA, 278 bp, Homo sapiens
aattctaaaatagaggggctgggcacagtggcttatgactgcaatcaggtactttgggagtctgaggcaggaggattgcttgaggccaggagttcagacgagcccagacaacatggcaaaatcctgtttctaaaaaaaaaaaacttaaaaacttagccgggcatggtggtgcatgtctgtattccctgctgttcaggagactgaggcaggagaatcgcttgtgcccaggaggtcaagtttggcactgagccgtgttcaagccactcccgtaccagggg

SEQ ID NO: 493667 - DNA, 757 bp, Homo sapiens
gggagtcgggacgtggagacccggggtcccggcaggcgggcggtccgcgggcgcaggtggggatgcaccgtcgggggtgggagctgtgtgccatcgccaagaagaaagcttgcagaggccaggtataaggagcgagggacggtcttggctgaggaccagctagcccagcatgtccacagcgagtgtgggacatgttctagagacccaaactgggaggaatttggcgatgcagatacaccaagctcggaggatccggaagcagtccatgagttccgtgtgcagattcccagggacatgtgtgcaaggcaattggctgtggatccagcgtggctctctgggagaaaggcattgtggtctgagcatgctgggcgtgggggacttctattgacgaactaggtgtccgaagattcatcgatagtgtgccgtgagcagctgagagcaatcgtgaatgtgaggtcgtgatgactttggagtgaactacatcaaacaggtgttgacagggacaggggccaagttcggccaggatgtcaggtccaagatgactctggtcagagccatcaagaaactactggcacttggcactggcttcggcatcatccctgtgggcggccacttacctcattcagtcgtgttccagctgagctcaatatggatccacaccggggtgctgcagactggcgagagaagaatggtacgtgactgtcagtgagatcaaaggccagtcttaatgggagaccgaggaacgcggaagtggtga

SEQ ID NO: 493668 - DNA, 683 bp, Homo sapiens
tattgcggcctcgggtcggcgccaattgttgcgtgacatgagactgtctagtggcggagggaaaaacggtcaaaaggggattattcaaatgtaccgaaaaccttctcccgggatcaggcgcggcggaacccccaggccaggggcaccatctggtggggcagaaggtgattgaattactcagatatgaagatcatcatctaggtttcagtgtaaacaggccctggatattcttaagtggccattttggactttacagatgtattttggataattttgccccagaagtttattacacattggcaagaatcgtctgtgaaggtgaattgatagtagtgaacaattcagcaagctacattacacaagagacccaggcagccatctcttcagatatcaaggttcaaacggattatatcactggctacagtatttcagctggtgatacattatgcctcccctatcccacagccacgtagtaggagagttcttacagccgaacactgagaagacgtgataatgtactgagtagtaacagcaagttcaaactgacctgacgtattgccggaagtttacatggaccagtgaaattctaccattataagaacagtgtacgcactcattgacttcggctccttcatgtcaacaactgggaccctttcaccgactgacgagactttgcacagaca

SEQ ID NO: 493669 - DNA, 263 bp, Homo sapiens
atcgggtagccagagtcacgcggagaaaccagttttcacactgctcaatctatttttactgtgaatcactttctcttcggcagcgatcagtcccccatcctgctctcccactccagatccttttttcattgggtgagtacaattcccgctgagtgtacttcgtactcaggtagggctgttcaagcgggtgaaaaggagttgcaacacgggagatatcttcctcaactctcgctcagggggtatcctctagaagtcgagcctgc

SEQ ID NO: 493670 - DNA, 924 bp, Homo sapiens
ccgatgagtaacccgaagcccctagaggagtgtgtcacctgcctgagtggcacttctgtcccaccagcatcagaccagtgcctgaccgagtcccctggcaccatgttttgggacgagtgaagaagcgggtggagatctcctgcgccgtaccaacttcgagcacctgtgtgcacactgggcttcgaccagcactgagcagaagttcactggtggctgccccgccagtggcagagcctgatctgaggagtcgtgctcgccgtgcccaatgcccctcgtcgaccccagcctgcatcacctccatccatgaccggtggccccacaagaccatctgtgcggggcagcaaagtgtgccaaagatggtgtgccctcaccgctgctgctggactgagtttgagaacatgtcggtgacacgcatccaagatcacctgctggacgagacagccctgctgccggcctgcccgtgcccgccagtgacgacatgggatgccagaggagcctggcaccacggcccagagtgggggaccagtacaacgtgcatggccagccgagggacggctacgacaggtcacacgcgcaaggccgggctggtccggcacatggtagacaggtcgacctgggccggctggccaagagaaaagaggcgccaaggtacttcgcgtgacgggcctcaagggaggatcccacacaggcacgtcctcacgggcggacaaaaggggcacccaccaatcatactgaggcccttgccttgttctggggaagcccgcgcaagagcattgactggtactcttgtgacgcggactggggtcacacaaaggttggcaagctgggccttgggacctcttaacagagcgtaacccgcacggtgctcaaatgtgtaaccagcaccaggccacggtggtgcgccaaggtatagaacccccgatg

SEQ ID NO: 493671 - DNA, 650 bp, Homo sapiens
  misc_feature (301)..(301): n is a, c, g, or t
  misc_feature (440)..(440): n is a, c, g, or t
  misc_feature (443)..(443): n is a, c, g, or t
  misc_feature (481)..(481): n is a, c, g, or t
  misc_feature (511)..(511): n is a, c, g, or t
tggcagtagctttatcttttgagcctctggaatcaggtgtcatgagggcagtgagtcagcaatagccaggaaggaggctactctcagagggtgaagcacaagggacaagccttcccgggactgcggcaggaatctcagacccttgaagacacacgcctcactaatgggcccaagcaggagtgtctcagagagtcacttgctctgtgccatcaggggatcccctttccctcttggagtctcagtttgctcatctgtgaaatgaagcagcatgactgtctccctcagtccctccggccctggncttctggtcttgcttcgtagtctccgttctgcattcacatcgctctttgaccatcgctcctgatcactgcaaatggagaagtcccttccaggctcccccagcctctggggctcctgcaagggaactcaccctccaggtngtnctgccactcatgcatccaacatggttattatagaaaanaaatgatgacaatactcacaaggactgtangttaaccctccttggatgcctgcacatgctggacaattgacatgcatcatcttatcgaagcctcacagcaatttgatgaggaaagcgctactgtgatccccattttagaattggcaaaactgaggctcagagagaacat

SEQ ID NO: 493672 - DNA, 356 bp, Homo sapiens
acattgcagtacccagttctgacacaaggagccaaccatgggaccttgttcggccaccaaggtaggggccgaggacctcatgagccaaagagaatgaaacaaaatgtggatgggctactgttggacacactggtccgtcatactaaatcatgtagataatgatcaggaacctccctattcaatgataacattacacgaaatggcagaaacagatgaaggatggttggatgttgtccagtctttaattagagttattccactggaagatccactgggaccagctgttataatattgttactagatgaatgtccattgcccactaaagatgcactccagaaattgactgaaattctca

SEQ ID NO: 493673 - DNA, 623 bp, Homo sapiens
gctggacgcagtggctcacacttgtaatcccagcactttgggaggccgaggcggttggatcacttgtggtcaggagttcgacgaccagcctggtcaacctggtggagccccatctttactgaaaatacaaatattaggacaggcgcaatggctcccgcctgtaatcccagcacttcgggaggctgaggtgggtggatcacaaggttaggagatcaagacagcaccctggccaacatggtgaaaccccatctttactaaaaatacaaaaattagctggatgtggtacgtgcacacctgtggtcccagcaactagggagcagtgacggcaggagaatcacttgaacccgggcaggcaaatgttgcagtgagccattgcacttcagcctggcaactagggcaacggtggcgtgcgatcacaaggttaggcagatcaacgaccaccaccctgtgtccaccatgcgctgacaacccccactctttacctaataacactacctacacaacttacgctggcatgtggtagctgcacaccttgtggtcccaggtcaactatgggacgacgtgacgtgccacgctgatgaaattcatccttgaagccccgggacggcaaccactgtttgcag

SEQ ID NO: 493674 - DNA, 860 bp, Homo sapiens
  misc_feature (470)..(470): n is a, c, g, or t
  misc_feature (834)..(834): n is a, c, g, or t
taaaatccccacggaccggactggtatagtttccaggtatctgcaagatttgcagcgtccttttgagaactcggacggtttccaggcagaaaccttctaggtacgctagccttctgcccggacgaggcgcgacgtgagccttcagaccggccctccatattagcggaccttccaacagcacgagcgtcaagggctcaaatgactctcggctttctcaagaacaaagccgattccagaggattcgaagaagactgatgtaagcagggatgcgggactgtgctcctgtgagtggataagttcgccgtttgtgacacaacggggtcgtggaccgctggtgctgacatggacttcactcctaccccccgatgcccgtccacggactcggagacgcctgaacatgcattacagtcacgggaagcggactctatgcgaatggtaaatcgacagggcctacgtcaatattctcctcnagacatacacgaatcgctgagtacgcacattgcagcagcaacgaagagagacgtaatgctatgctaactcgcgcaaccttatgctgatggatgtgcaactgccacgtcttctcttgctgtagtcatcccctcgagtcccagcgtccctacgcattgcctccaggtacatcaatcccgtccggataaagaaggacccagagggtaagaaggaacattggaggcgggacgccactccatgtcctcggagccccgcgaggtccaggcccagcaacttcccggcatccgcgctgaacagcctgaagcctggcctgggccgagcagtggcagcagagagtggcctggagagggaagccacatgccacantagacagccacagcagtcaagaataa

SEQ ID NO: 493675 - DNA, 221 bp, Homo sapiens
tctgcaggcactgcgtcacgggcggaggaggtgaggcacaaaagcgacaggcgcaggaggaggcgagcgcttgcggacggcaggtgcaggacgggaggcagcgtaagcggcaggcggaggtggatgctggcctcgcgcgtgaaggccgaggccgaggcggcgcgcgagaagcagctcgcccctgagttagcagctcgcccctgagttaacccagcagctcg

SEQ ID NO: 493676 - DNA, 392 bp, Homo sapiens
  misc_feature (18)..(18): n is a, c, g, or t
tgagaagaacagagttanagaatatagtcccatgggaaaagaagcccatcattgactgataaaccaaggagattctatttgctttacagaaggagctactgaaaggctagctgtggtttataaatcttttagtcttatcctgacatagtagcagcacttgaatgctgaccttgaaataaaaagcactgtgctctgtgtggaattcaagtagagatatttccatataacctgatgttacttatatattttgtctattttaacaagcgagaaagaatgagagagaaagcattaataagagctatgtagaagaggtggcatagagcctgaaaggacttggaaggatgattctaattgcaaacagttcaaataaaaaaattatggccaatctgaaa

SEQ ID NO: 493677 - DNA, 176 bp, Homo sapiens
ctaatgacgacagtgttatattctttatgagcgaacaaccgggtaggcttctttgccgggcgatatagagcactgtgttgctctgcaccatgtcgtccaccacgttgctcgtggacacctccttagagcggaactgcaatggcgccgacgggttctccccatgcgtggatagccag

SEQ ID NO: 493678 - DNA, 1589 bp, Homo sapiens
gagcgtctctacgaaaggcggcgcaacatggagccaagcatgactgtggttgagtccactttgactcagaaatacttgggtctgagtagtgaagagcatctcgtgtctatgcttcacactatacatgaaccttacttgcgcagatgacggctcgttcagctagggacccacaggatacccaaagagtcgtcattcgtgcatggctctcgaacggtgtgctgtagttgattcttgtagcggatcgatgctcctttcatcatcggactatttgcgaagaatactggattgggacatgctttgaggccaccttcatagtaacataacagtttccacacgcctcgaattctcatctgggcaaggcacgtcgctctgcccatgtggtgtgagaacatacacataggccgctgcactatacaacctcatctcgatactaggggcccatgttaggtcacaatccgtttcatactacccccgtttagcaacctatcacatcacgttggcgtgtactacatctcccatagtggacgcatcccagcaaaacattccgaccgttgtggccatcctagataagcaccagtagaagggaggtctcctcggaatacgtcgcatcccacgcataagttcagggagtttggcatcctactagactagggaactatacaaccgccggccaatgcgaggctttcatcacctttaggaacgctggcgccaggtgtctctctaggatatcgccgtcagaattagctcatggggcgatatcattcgcaacttcaccataccataaaccgccgtcgaaacacgcctacatttcctcaggctatatgagctaggtgagaactaacgggaactgcattacctatgtccagttggtcgtccacacacgcgtgaacctccagataaatttcatagcgggctggcgaccggccccccatacaaagatgcctcccgtggcaactcagcaacacgggaacttcgtaaatttgcgggaacacactgagatacctaatttggtaccaccatcccgaacggagcatgttggtctggcgcggtggaatcccatagccgtttgggaccctatttggcaacaatagggcacactgtatagaggttcacaacgactacacatttctccccacggatatacctcaggggcacctccacaggcgccatctatttctggccgaataacatcaggcaccgcgctttcggcatatccccatatgtgacttatgtggtcgacgatcccctccgtatactattctaaacaccgccccttcaccatcttccagatgtagtacactctgcattccactctccgcgcacgctcaagtgaactgtcactgagtatacaacacatacactccgtctttcgtgcagatggaaacacctgacccctagttcccgcgcctcgtatggagacattaaggcgtacgaacaaccgccgaaccgcagtgggtgcacgcgtcttcacaagtgtgagctagctatacgacgcgacggtctgcgaccttacgatggcagacacagtcgcacaagagcttggacgccgaaccgcacgctgaccagcagtatactgctacatcatagcg

SEQ ID NO: 493679 - DNA, 325 bp, Homo sapiens
gcattattctcctctccatggacccgtgatgcatgcctctccctagtcagtgtaccaggcacattcacacgacaccaactccttaccctctcttcacatggatcctcttcaagcttaaacctgggaggactcacaaatggcagtggaacgatcctctctgctgctccaggcgctggtgctcagtaccgcagatgcacgcagcgcctccagcctcttcagcccgagcagcactcttttctcttcctctcgtttgcgatatggaatgtctgatgtcatgccttctggaaggagcgggcttttggaagattttcgaaacaaatcggta

SEQ ID NO: 493680 - DNA, 124 bp, Homo sapiens
cgtccttatcatacctaccagggtttaattctctgaatcaaaagatcagttcagagaggagcctgttttgtcctcatgcaggggtgaagatgtgcagagcaccgtgggaatgtccaagcccaga

SEQ ID NO: 493681 - DNA, 160 bp, Homo sapiens
gagagagagagaaagaaagaacaaacaaacgaaagaaagtcttgctgtgcccaggctggtcttgaactcctggcctcaagggatcctcccaccttggccacccaaagtgctaggattacagacatgagccactgtgcccagcctaatatgtggatccttg

SEQ ID NO: 493682 - DNA, 298 bp, Homo sapiens
  misc_feature (58)..(58): n is a, c, g, or t
  misc_feature (250)..(251): n is a, c, g, or t
tgtggtgttagaggatcggagtatgctgacagtcatgaaggaattattgaggtcaggncacggggctggcaggaggtgccttcaaggaagaacaacttatttgacttcttcttgggacgcaggttgttggtgtgacacacttcttcttgcggagttgacagcacgagggtgaaggcgagcatagcacttgcggcagatcatcttgtcgcagttgtatttcttgggcaagcttggcggagaagaaggctcnnaataatgcacctctgcaggcgcaacacccaggtgcacgggtggactc

SEQ ID NO: 493683 - DNA, 197 bp, Homo sapiens
ttggacctaaatatcacatctgtgacatgcaaatagcccagttgtacatgtgacttgcctgatccttttcactctgaatgattttttttttgtttttcagttgggttacacgccagtcagtctgggggttgtacagttcctccagggttccaaaccaatgtgcagagtctcaggccctgaagagctcacggcgtata

SEQ ID NO: 493684 - DNA, 316 bp, Homo sapiens
cctgtggttagcacaactagggtcagtttgcaggtggtaagccattaagatagttgtaggtaaagaagggcagatttattagagaaaatgtgaaaatatgttgcagtgggcagctcagcagagaaggggctacctgcaaagaggcaagggctggaggaaagttttatagggtcctgctgaagggtgctacgtgtggaatgaggtcattgtgcccgcaggttgtttgtgattagctgtttctaacaattgttcatacaataattgttcattattgttctcaacttggggctctccccaacctggggacccttcctta

SEQ ID NO: 493685 - DNA, 419 bp, Homo sapiens
cctcagagcccgagctggctcccagcaccagtgtgaatggtcctgtatcgactacagcttgatggacatgctgactggcgggcaggagaaggacggctgggagccccggggcaggtccaggtccagggggtgtgtgtgatcccatcctccgctcccagctctgatgctgccatgcagggacagggcaccatgggatgtctgtgggaccttccaacactcttccaggaccccaaagctgcctggggagctgggaaaaggacggcttgtgagcctggaaatgctgggcatgaacgggccaagctcgaccctggggacagagaaaatgacccgcagggaccatgctccgcatgggcagtgagtgagctctcccagcgccctgggtgcctggaggctgtgattcacaggaaagtgtgcggccg

SEQ ID NO: 493686 - DNA, 126 bp, Homo sapiens
atgcagcggtactgatttgcagcgttatggtttgcagcgcatactcagtttgccagcggtactgtttgccagcgttgggcccaggttcttggtgcagggggtcccgcagctcgcaattcgtcacat

SEQ ID NO: 493687 - DNA, 194 bp, Homo sapiens
cttataagacccagcattattattatattagactggcttgcttttggatttaaccacgccgcttgttcctgagaaaacaaagtattaggtagtagccaaaggtccaaacacatttgtcacttcctacacatccctacatgagccccttgagggagaaaaactgtttatggctcttgaaatcccccagcaacttt

SEQ ID NO: 493688 - DNA, 130 bp, Homo sapiens
tcggtacccctcacaagacctggcagaagcaggaagcaccactctgtgcagtcatcctaaatataggttcagagcatctcctggtgaatgacatattttgtcaatcactgccaggatctccatttaagcc

SEQ ID NO: 493689 - DNA, 237 bp, Homo sapiens
cagtaggggaagggagcctccatagggatgtagaactaggaagtatgtgcctgcgttcaggcgttcaggctggttgcctcatcgggatgatgatagccaaggtggggataagtgtggtttcgacagacagactattacaactatgacttagttctgtggctgacgactgttatacttacaggagactttgtacgggaggatagtactacgagacggtagacgtttatttcgtgatag

SEQ ID NO: 493690 - DNA, 612 bp, Homo sapiens
  misc_feature (593)..(593): n is a, c, g, or t
actgacaggcgggcctgaccgcgcatgcggattttgacacttcatgacatgtaattatttagagcagtaatgaatattgacctgttttggattaactgatgaccttaggaaatgatccaatagtatctactatggagaagctgaatatactccatttggagtgaacagaccggattgttacagaattttcacgatgacagatccaatgatggacttttttgatgatgccaatctttttggagagaccttagaaggattgtcaaatgatgcattagctcaatcaggacctgtttcactagatgatgaattgaatttggatgcagaatatgaaccggcgtgcatagattcactgaaccatgttcacggtactgcaacatatgatggtaatcaatcttacggtagcacaactgaacatgtgttatctccacactctcagtttaatcgatctccaatgcatgctcagaaccaacgcaatggatggtttctagatggtatcatatggccgttcgatgaggcgccgataaacagctactaccagtttacatggaatggatgtctttttagcaactagacattgacactctatgcattanagtgctatgcgcacatctg

SEQ ID NO: 493691 - DNA, 414 bp, Homo sapiens
  misc_feature (49)..(49): n is a, c, g, or t
  misc_feature (91)..(91): n is a, c, g, or t
  misc_feature (350)..(350): n is a, c, g, or t
tttatcctcacagccagctgtaaaaggcagctgcttattggtttttacnccattttacagatgatagactgaggaacagcgatattacttnataatatatatatatatattttttttgttagacagagtctcactctgtcacccaagcttggagtgcagtggtgtgatcttggcatactgcaacctccgcctcccaggttcaagcaattctcctgcctcagcctcctgaggagctgggattacaggcatgtgccaccatgcctggctaagttttgtatttttagtagagacggggttttaccacgttgaccagactggtctcgaactcttgacttcaaatgatccacctnctcaggctcccaaagtgctaggattacaggcatgagcccctgtgccaggctgaaactgattctt

SEQ ID NO: 493692 - DNA, 614 bp, Homo sapiens
gagagagagaactagtctcgagtttaatttataatttcctctaaaggtttgaggggaaatgctggacaattgtacgtgggtatggaaacatgtcatataagtaatgctagggtgagtggtcaggaagtttttccactaggaggtgtatgagtgggccgtagcggaacccgggggtatgctgtacgaattcataaggacacagggagtgttcagaaagctagggtcttggtgcacaaaatatgtcgtgctagagtccaggggagagtgcgtcatatgttgtccctaagagaagaattggtagtgggtaagacgggttgttcatcaataacatcaatggtaagagcagttatacccggactcatagacaaacataagggcagaagcgggccctgagcgacgtcattaacgcacagctaagaagccctgaaaaactaaaatacacgagaacaaccccgaatatcgggccacaaggtacggaaagcggagagtacacggggagagagacaacgagactaagaagtgcggaagataaaaatcataattaatagggaccaagggggtacacagaatagagaaagaaaaaataaacacaaaaggggagaacataaacgaag

SEQ ID NO: 493693 - DNA, 128 bp, Homo sapiens
accatcagttaataagactgttcggtcactgtgcctgtcagactcgaggcagtggtaacactgcacagtgctatgtggcttctctttgaggatttttgggtttgtaactaaattcctgcttatctcct

SEQ ID NO: 493694 - DNA, 730 bp, Homo sapiens
ttggcacgagggcccgcagtgtctgtcgaggggccgcgccgctctcccgcagcccgcgccccgtccgcgaggcccctggttgacgcggtggcctgcgaggcgcctacacccgcaggccgctggcaggccgtcccaggaggccccggcgccaacgggacccggcgcgtgggacagcggctctgctggcggctggcgtggagggatggcctgtgaccggggcgacggggacgaagccttcgcccgcgggacctgtgtccggggtgggggctccagttcctccgaccgcccgtgcgctgggagggaggccgagcccggggaacgccgctgtgccctgcctcgtcccccactgtggccgcgccagactccatcccggtgccagacgcgtccacgggcccaacatcccagagatctccgtcaggactactcgacctacagcataagagagagtagggaatagcgacaacaagagaaaacggaaagaaaaacgccccatagaacagaccgatttgagaacgatgataagacaaggatccggacgcaaaccaaccagacactattgaaaataaacaaataacaaagggaacagactatgacagcacagaaggccatacgcagggagaatcagccaacacacatcaatattgaaaggagggaatgtaagacaaatagaagacaacacatctaaatataacataactgagaggatacataaaggcgagagtgtaattgc

SEQ ID NO: 493695 - DNA, 185 bp, Homo sapiens
cctcgttaactgatccttaaccaccaagtgaggtcaaggataacctgtgtctcaaggatactagtcaggttcattactgctgaaccacaatgggaactcatcttccatcactatttttatgctccagtcaacaaaccggctcctccatccaaaacaattatttgtattatgattgtcaatgtgcc

SEQ ID NO: 493696 - DNA, 300 bp, Homo sapiens
acaccagccgctttggggaggagctcctagcctaccaagagagatggaaagcatagactgggacccgaatgtcaccaccatcatctcatcttcaccaccatctggcagcttccatgcctcctaagccagtgcgtcccaggcactgggcacagctctgcccaccttatcaccagtcctccggacagcactgcaagccagctacctttatcaacacacccggttgatagatggctcatgtatgctatttacttcatgtatactctatttgaaattttctgtaataaaaagtttaaagaaaaa

SEQ ID NO: 493697 - DNA, 112 bp, Homo sapiens
ctgacaccattctctctccatttacttcttggtgggtaccctaactctctgactctctagaagtgcccccagatgggggtaaacccttattaaacacatgcaattatgagtc

SEQ ID NO: 493698 - DNA, 112 bp, Homo sapiens
tatactcaatctgattagattttaaattcagcactttatcatattctgtatttcacttgaacctccagctgaatgatggatcacacaattaaatcgttacaacagtcatact

SEQ ID NO: 493699 - DNA, 161 bp, Homo sapiens
atcaacatatccagaagcgggacctggaggcggagcatgtggaggtggaggacacgaacctcaaccgttggacctgtagcttccgaatcctggtagtgtcggccaagttcgaggggaaaccgtgcttcacagacacagctcggatcctagcatgactatac

SEQ ID NO: 493700 - DNA, 162 bp, Homo sapiens
cccggtttttgggaaaaaattttccccaaaaccccaaaaaaaaaaaacccctagatttttttccccaagaccggttcccggggcccagggggttttttttcaaaccgccaaggtttgggttttaaacaaaaaaagtccccgttaatgggaaaccccgcccca

SEQ ID NO: 493701 - DNA, 393 bp, Homo sapiens
  misc_feature (151)..(151): n is a, c, g, or t
  misc_feature (168)..(168): n is a, c, g, or t
  misc_feature (217)..(217): n is a, c, g, or t
gatctagaggacccgggacgggagatgtctggaggcagaagataacagcagcatctcgaccagcctcggcctgaaaggaaatctttataatcaggtagggttcacagataattcttttttaaaaaaaacccaccctcctagagaagcacancggtcaagagtctggtncacacaacttcagcttggcatcacgagtctggtatcccaagaaaatcangggggtacaatgggtgggttaacactaggatactttctaaataaactctttttttttttttttttttttttttttttttttttttttttttttttttttttttttttttttttttttttttttttttttttttttttttttttttttttgtctttggggggggaaggccacaacaa

SEQ ID NO: 493702 - DNA, 278 bp, Homo sapiens
  misc_feature (75)..(75): n is a, c, g, or t
ctggttaatacttcttaagatcttgggataattagtggtgtggaaagtaaagaagtcacaggttgggacatttanacaagggtgaaggaggcgcgaggaatgtgttcattcttttattgtgcgtggttttaacctgactgagtacaagatcaacaagagcactgtactcctggcaattattacatatgttagaacatggattttgcactgtaacacatttacaccatctatggggacgtgattgctttttataaagttcaaaataaagatttattttc

SEQ ID NO: 493703 - DNA, 189 bp, Homo sapiens
cgagtcggaccagtctgttctacatacaaaaaagaaaatctctacccagatagcttcactggtgaattctaccaaacatttatcaacataaataaataaataaccacgattctacacgaaggtgttccaaaacaagtttgaaacacctttatctcattctatgagggccagcatcatcctagagagcaa

SEQ ID NO: 493704 - DNA, 307 bp, Homo sapiens
ctgacatctctgattaacctctgggcaggaacagagtctcagcatgtgttttaattaatgaaacaataattgaccagccttttctctgcaatcattattaattcattcattcaatcaatcaatcaatccatccacaggtaggtaggaaaggctttgcccgtagggtgcagagagtatcccatcagagcctcttcatactatattccaagacatagcgtttgcgcgatgaaacatatctatatctctaagcgctttagagcacacacagtagctctcacacacttctcacatgatcttgtctctagtc

SEQ ID NO: 493705 - DNA, 222 bp, Homo sapiens
cacgaggtgtccctgtgcgtggccgtggttggcaattgtaacaatcctggtcacctctaacaggtcaaaattcaaatcttctcgaaaacccctatcggcaagaccatcaccctttaagtggtgcccaatgacaccatcaaatattttacggccaaaatccattataacgaaggaattccccccgaccatcaaaggctcatctttgcaggcaagcagctggaa

SEQ ID NO: 493706 - DNA, 85 bp, Homo sapiens
ccccctttttttttcccaacccttggggaagccccttccctttaataaattgcccgtgtttaagtgacccttgagaaaaaaaaaa

SEQ ID NO: 493707 - DNA, 857 bp, Homo sapiens
  misc_feature (50)..(50): n is a, c, g, or t
  misc_feature (59)..(59): n is a, c, g, or t
  misc_feature (89)..(89): n is a, c, g, or t
atcgcattcagtccacaatttccgctatactcactcaatatacccacaancacggttantagggaaccttctcttcgcttgaccccggnacacgccctcaagcatgcttggattcatcagatctcttatacctcaagccacagcccacgccccagaccctgaggaaatccaattcctttttcccctctgagacaaggaaggacaaggatcaaggctgtcatcactcgagcagataagcagatgacagcaccaactaaactacagacacaacacgcgatagcccctctaagcactgtttaacttcacgtgatcaaccacgactgcttccacgatcgccctctacactagctcacattcttacaccgctgtaagcgccccaccacatcatattccgtcccctgcccgccagatatcctcaactcccaccccctccccacccatatcctctctccaccccaccttcccacccgcacacaatctcccctcttcacaagcctacaatatcacccccgcagctctccctccccgagcattctatgcccccctcttataccaccctgttcggcccccatccttaccagctccttccctcacacgccacacccacctgttctaagccgcttctgttccccaccgtgcgcgccatctcgcccctaggtttttatccataccctaccaataactatacactatcgtctcaccacacacttgtagccaacccacatgccctcaccccaatacccctacctgcgcccccagatcaaacccattccaacaccccacacacccacaatcagccgccatcatctatactaactccacttaaccatcgccttcaccccagcgacccactgcat

SEQ ID NO: 493708 - DNA, 495 bp, Homo sapiens
ttttaaagcaggaaacaaaggctactgactatagcatagatttatgttacatgttacaagcatgaaatgttaaaatatatccatttacaacagagtaaacagacaacgtacagaatgggagaaaatatttgcaaactatgaatctgacaagggtctaatatccagcatctataaggaacttaaatttacaagagaaaaacaaccctatttaaaagtgggcaaaggacatgaacagacacttttcaaaaaaggacatccatgtggtcaacaagcacgtaaaaaaaagctcagtatcactgatcattagacaaatgcaaatcaaaaccacaatgagataccatttcacaccagtcagaatgactgttagtaaaaagtcagtaaataacagatgctggtgaggttgcagaaaaaagagaacacttatatacggttggtgagagtgtatgtaagttcaaccattgtggaaagcagtatggtgatgctcaaagatcttcg

SEQ ID NO: 493709 - DNA, 514 bp, Homo sapiens
aaaaaaaaaattttaaaaaaaaaaatttttaaaaaaacaaaaaaaaaaaaaaaaaaaaagcaaaaaaaaaaaaaaaaaaaaaaaaaaaaaacccgttttttttttggggaaaaaaaaaaaccttttttttttttaaaaccccttttattaaaaaaaacccccccttttttgggggaaaaattttttaaaaaaaaaaaaactttttaaaaaaaaaaggggtttttttttggttttcttaagggggggaaaattaaaaaaacccccccccccccttttttttttaaaaaaggtgaaaaaaattaaaaaaaaaaggggtttttttaaaaaaaaaaaaaaggggggaaagggtttttttaaaaaaaaaaaaaaaaaattttcgggggggggaaaaaaaaaaaaggggggggggaaattttaaaaaaccccccccccttttttttttattcccggggggggggcccaaaataaaaaaaaaaatttttttttttttttttaaaaaagggttttttttttt

SEQ ID NO: 493710 - DNA, 746 bp, Homo sapiens
  misc_feature (28)..(28): n is a, c, g, or t
  misc_feature (58)..(58): n is a, c, g, or t
agcgatttgtctcctaaaaggcgtttgnctatcctaacttgaagatttgtcaggctcntcgatagagtcgcaagtccagtatgccacataagaagtgcatctgatcagatgttctctcatatatggtgtcgatctttagtacctccatcagcatctggatggtgtcatttcatgcacacagcttggtcatagcaagacccgtgtacatactcaggggtgtcagtaaaatgttatctttgtcatccatggaatctgccaggtgctgatagaaagtggtatcatagcgggcattggccttgtacagttcccagactcgccggttgatggcctccgggatcttctgttctgagccctcatcctcagttgccttcttctccatggatcggtaaatgcacatgggcttcatgggaatgttgctcggcttgactgtgcagatgtccacagggctaccgtgacaggtcatacagtccccaacgcccatgagcagcaagtctacagactattccttcctggtgtggccaagagaaaggctgactcctttgaaccaagtgcaggggtccgggacaggttcagtcctagacttcttgccagggtacagttcagttgcctggacgtggtcatgttgtaatgagcatcatgttatggctatttggagtattatgtgctctattcctcgcgctttatccagaggttacagttcctatcccattggaatccatgagcgcttatcttccacagggttgggc

SEQ ID NO: 493711 - DNA, 105 bp, Homo sapiens
tcgcgctatcggtatcccgttccgccctggtcctgttcgcgttcagcagcagttgactcttgtcctgagcccctgccgcttcggcgatcatcttcagcgtgcggt

SEQ ID NO: 493712 - DNA, 276 bp, Homo sapiens
agatcccgaatcggcttccatacagaacagtgattactctcacttcacaaatgactgtaaaatgtcggcgtcgttcctgttcggcaccgggtctacactgaggtattttaaaaataaaggttatattagaatcctcaacagatctctttaaaattacctcctgtgtaaccaccaccaaatcctatcttctaccacaattatcccttcccccaatgccaagaccaaagcacaataactgaatatttctattgaagtccgatcttcataaataagttg

SEQ ID NO: 493713 - DNA, 515 bp, Homo sapiens
  misc_feature (18)..(18): n is a, c, g, or t
  misc_feature (22)..(22): n is a, c, g, or t
  misc_feature (61)..(61): n is a, c, g, or t
  misc_feature (101)..(101): n is a, c, g, or t
  misc_feature (103)..(104): n is a, c, g, or t
  misc_feature (107)..(107): n is a, c, g, or t
  misc_feature (119)..(119): n is a, c, g, or t
  misc_feature (149)..(149): n is a, c, g, or t
  misc_feature (152)..(152): n is a, c, g, or t
ggaaaaaaaaaaaaaaanaaanaagattgatatttaacaagagaaaaaaaaaaaaaaaagnccgggttttttaaaaaaaaagaggggggcccccccaaaanannaanaaaaaaaaaaanaaaaaaaaaaaaaaaaaaaaaaaaaaaaanaanaaaaaaaaaaaaaaaaaaaaaaaaataaaaaattaaaacatataaaaaaaaaaaaaaaaaaaaaaaaataatacaaaaataaaaagaataaaaaaaaaaaaaaaaaataaaaagataatcataaaaaaacaaaaataattttaaaagttaatgaaaaaaaaaacaaaataaaaaaaaattaaaaaaaaatactttcaaaaaaaataaaaaatttaaaaaaacaaaacaacagaaagcccagtttctaaaaaaaaaaataaaaaataaaaataatattaaaagaaaaaactaaaaacaaaaaaaaaaaaaaaggagaataaagaaaaaaaaagaatacttaaaaaaaacgaacaaaaaaagtaa

SEQ ID NO: 493714 - DNA, 779 bp, Homo sapiens
ggtcccttggtgaagaccccccgagcccaggcatctggccctcggtcccctggccccgcctcctgtcagtggactgtcctggcacgtgtggccctggcgcccctgcctgcgctgtctgccatcgcgctgtgactgcccgcatgctgccagcctcagctcgtggggccgcccgtgctgtgcctgcaatccttccgtgcgcctgccaggcgggacagtggggagggtggtcgggggtgtctgtgtgggccgtgggcaactgagcttgtacacatgggtgccttctgtcggaggactggctcaggtgctctgtgccggttgcttggagcaggggctgcgggaccccaggccccttggggaagagcagataggaccaagcctagcatgaggaggccaggtgtgtggggcccgggtgtgcaagtgctgggcctgccagtgtggatgtgcctggagccccttcgccaggcggctttcactgacggtgctggccagggcagcagggccggtttggcgacctggaggtggatatgggtagtggctgccagcccagccaagcctgtccccttggggcattctctcgaggctgctgggtgtcctggcaggcacgtcctgtggggtcagcacgccggctgcagcgcagggtgggcctgagatcgggtgccgaggcccccatctcagctgtctggacacgcagccctgagctgtcattgcagcttcctccgacatccttggcggagtctgtgtctcggcccagcccagacctctttctgggaaccctccag

SEQ ID NO: 493715 - DNA, 253 bp, Homo sapiens
cacgttcatctatcacaacttggtgttcttatgcagaagatgtgggtcacacacaggtgcaattattggactcatggtgggcggtgtagtccataccgcccgtgctcgtcatcaacaggtgatgctgaagaggaaacagtacacatccatacatcatgatgatggtggaggttgacgccgatgtcaccccagcggcgcgccacctgtccaacgctgcagacagaacggctacgaaaacggcatcttcatcgag

SEQ ID NO: 493716 - DNA, 778 bp, Homo sapiens
  misc_feature (20)..(20): n is a, c, g, or t
  misc_feature (667)..(667): n is a, c, g, or t
gggggctcaaacttattttnagcggacagggcgcgggctatcacaaacacccgaatggcactagcctcacaacccggcaccaccagaagcaagcgaaacaaactttttatgaaccaaatgacgcgcatgagaccacgacgtacaggagtccatcctctgatcttctagacatgctccggttgtattctgagaaccagggcggtgccaaaaatgtcatgaagaaagatattacgcgcacacggggcctctctctgggacaatcctaaattaaacactattactatgtttaggccaccgctgaccttaaaagcgagcttcttgtggacagttccgcctaaaactaggaggtgtaagccacaacgggggggttcttatccagtcgcggttactactacatggatgactttgccttcataagaccagtgccatggcttttccctttggcataacattggggaacataggtgaaacgcgcgtccgcctttctcttccaaacgagtgtccccagtaggaaacgggaaaatgggatttggaccggtttcctacctaactaacacttcttgtaacaaaagtgggatattattccatggagtccccagtagggctgaaccttgttgaattccacaaacactagaaggacccatctttgatcgcgtaaagtttattncccctttctacacaggaaagcctgtcctataaaaagctggcttcaaacggcaaaccgggaaaatacccgcacatatggcgtttggaacatacggtggccccaaaccctagc

SEQ ID NO: 493717 - DNA, 802 bp, Homo sapiens
  misc_feature (16)..(16): n is a, c, g, or t
  misc_feature (18)..(18): n is a, c, g, or t
  misc_feature (82)..(82): n is a, c, g, or t
  misc_feature (123)..(123): n is a, c, g, or t
  misc_feature (226)..(226): n is a, c, g, or t
  misc_feature (256)..(256): n is a, c, g, or t
  misc_feature (262)..(262): n is a, c, g, or t
  misc_feature (313)..(313): n is a, c, g, or t
  misc_feature (338)..(338): n is a, c, g, or t
  misc_feature (340)..(340): n is a, c, g, or t
  misc_feature (346)..(346): n is a, c, g, or t
  misc_feature (348)..(348): n is a, c, g, or t
  misc_feature (463)..(463): n is a, c, g, or t
  misc_feature (483)..(483): n is a, c, g, or t
  misc_feature (488)..(488): n is a, c, g, or t
  misc_feature (566)..(566): n is a, c, g, or t
  misc_feature (588)..(588): n is a, c, g, or t
  misc_feature (595)..(595): n is a, c, g, or t
  misc_feature (611)..(611): n is a, c, g, or t
  misc_feature (686)..(686): n is a, c, g, or t
  misc_feature (701)..(701): n is a, c, g, or t
  misc_feature (703)..(704): n is a, c, g, or t
  misc_feature (713)..(713): n is a, c, g, or t
  misc_feature (734)..(734): n is a, c, g, or t
  misc_feature (794)..(794): n is a, c, g, or t
aactccccggtgtganangggtagggaatgctcccggcggcgacggggccgagttcaccagccgccggggcagtagtcgaangcccggcgcggcatgtcctgggtgccgcggtgcgggcagtnaacgcgcgccgggcgggatgggccggcgccgggcgccaaaactgtaccgggctccgttcccgttgtacgcgcttcaggtcgaccccagcactgggctgctcancgctgcgggcggaggaagcgccgccaaaanaggaanaaaaaatggcgtgcactttctgcagctaaagctgattaatgggcgcttgantgcctccttgctgcactcccataananaaaaanangggccaccataaacttggcactggctggtgacatccttgctgcagggcaggatgccactgtcagctcctgcgcttccaggcacatcaacagcagggcaacaaagcaaaaaaagcnggttccaaggagcaggggcntcganaaaagaaaggagcagccccagacagagaagaaatgtggagcggaaacccagcacgaggggctagaactcagggtaganaatttgcaggcggtgcagacanactttanctccgatccactgcanaaacttgtgtgcttcaaccacgataataccctgcttgccactggaggaacacatggctacgtccgtgtctggaangtgcccaccctggananngttctgganttcaaaccccacgaacggganattgaacacctggctttacggcctgatggcaacttggtaaccgtgggcggggaccttaangcctctgt

SEQ ID NO: 493718 - DNA, 669 bp, Homo sapiens
  misc_feature (8)..(8): n is a, c, g, or t
  misc_feature (64)..(64): n is a, c, g, or t
  misc_feature (106)..(106): n is a, c, g, or t
  misc_feature (108)..(108): n is a, c, g, or t
  misc_feature (132)..(132): n is a, c, g, or t
  misc_feature (138)..(139): n is a, c, g, or t
  misc_feature (182)..(182): n is a, c, g, or t
  misc_feature (189)..(189): n is a, c, g, or t
  misc_feature (212)..(212): n is a, c, g, or t
  misc_feature (218)..(218): n is a, c, g, or t
  misc_feature (251)..(251): n is a, c, g, or t
  misc_feature (273)..(273): n is a, c, g, or t
  misc_feature (277)..(277): n is a, c, g, or t
  misc_feature (282)..(283): n is a, c, g, or t
  misc_feature (323)..(323): n is a, c, g, or t
  misc_feature (325)..(325): n is a, c, g, or t
  misc_feature (373)..(373): n is a, c, g, or t
  misc_feature (468)..(469): n is a, c, g, or t
  misc_feature (659)..(659): n is a, c, g, or t
aattaaanaaaaaaaaaaattaagcatgtcacagaatatagtttatgattattagaagaatgangttaaatcaatacttgggagattgtttattaatgtgtgaatnangtctttttttaatattcataaatngttttnnaattttaaatgtgttttagaaagaaattggttactccttgggnaaaaaanaagtgtgcattacaacggctagnggaagngtttaaaggatagattttcatttatatttaggnaagaatgtgtctctggccttcngggnttggnnccatagcaaaagacataaatacatattgtaattataaatngngcattgtaattataagtggtaaattctactacaaaggtcagctatggntagattcagtgagttttaccttaaaatattggcttaaaacaattcaaatcaaatggataaaacaactttttgctttccaatggcattatgatttnnggtggtatgggaagagaagttctcaaaccaatagtcttcaaggttgcagagagaagcttctgtctgccactttcctgatgtactgaatggcccttggtatatctttataaaaatgttaaacccacagagctatttaaagataaaaaaaacttacataactttatttttcaaagactaatatgtctcaggnacatttagct

SEQ ID NO: 493719 - DNA, 291 bp, Homo sapiens
gtaattgttttctttgtaataagaaggtgtggttgtatgatcacccaaatggatgtaggaatggcatttgacaaaattcagatcttttcatgacacaaacacttaacaaactaggagtagaagggaatttcctcaatctgatgaagtacatctatgaaagacttacagctgacatcatacttaacagtgaaagattgaatgctttccccctaagattggaaacaagacaggctgtccattcttgccaattatatttaatattatgctgcagattctagccagagcaattgg

SEQ ID NO: 493720 - DNA, 2371 bp, Homo sapiens
  misc_feature (42)..(42): n is a, c, g, or t
  misc_feature (52)..(52): n is a, c, g, or t
cggcggaaaacacattaggctttgggatcgaaggtccgtggnttttgtcagntctgggccaccgaccggggacgacgacgacgacgacgacgacgacgacgacgacgacgacgacgacgacgacgacgacgacgacgacgaacgacgacgacgactaccgacgacgacgacgtacgtacgtacgtacgcacgacgcacgactgctgctagctgctagctgctcttgctgctcgggacgcggcggagtcgggcgctatctatctggtcggtcttaccgccgtcgtcggtcgagcgatgatcgatcagcatcgaccgaacgaaacgaaagatcgatgagaagcatagtacctagagatcgagcgaaagtgcgtctagacgtagagttcgagaggagtagatcgtcattagtcgtcagttcgctcgtggatgatagtgactattactttcttccttgcttgatgcgcgcgatgctttttcttgctgcgttgtgattgttgctggtaggttgttgattgttgttgattgttgttgttgattgaatgttgttggttggttggttgtttgatagatgatagattggtggttcgatggtggtagaagggtgggtgagtgataggatagttggaggatggagaggtgagatacaagacagtaattcgaaagatgcaacggtgttagataagtgagtagtctacgcttctatctcacgctgaactcaacattgcagatagctagctttcgcttccctcgctctcgctggtgatggtgttaggtatacttaaggtatagtcatcctttcctgtctattgctatctttgcgtgtcattggcttggagatgatttgcatactgtttactatacatttacttatcatatgctgtggctattcactatgccatgttacttgaattgcacgggaagcacaagccatgcatgcgaatggcaaggaaatccatgctggcgccgccacggcagcgtagcggacggcgaggacggcgcaccggcaggtgtaggacaaggagcaggaggagaggcgagaggcagaggatacggaagagtcagtcagtacgcaccccgtcagcacagcacctactcgccggcgcacgggagagggcaggactcgggacgctgccagcaacgtcccgagacaggggcagaggacgggacagtacaggacctgcacgaggcgcgcgcagcgtcacgcaccaggaccgacacggatagctcgcgcaacagtccgcccgatcgagcagcgacgcgaagactcgttcggtatgaatacgataccgtaccggacacactcgactccgatagcaatcgtaccgtgaggatgggacagagcagggaaggagataggactagcatccatcacgattcgcacgagaggtagagactagagctaccggaaggcgaaagaaagagataagagcgaggagtgaatcggataggtatgctcgagtacggatcgcgctaagataagacaggccacgggcagagaagatcagacagcgcagagaccggtacggacggtcagcactgtctgcatcaccccagcacgcccagcccgctcgatccctaagcatgcgtaggatcgactgcgtcgcttacactgagtctcttgtgtcgcttcgttcgattcaattgctcatgtgattcctcagttgcgtctctttcttgtgcttgtcgttccttcgctgcgccgtcgctgattgaccacaacggagagatgtgcgagacctcttgcacactgctgtctgtactactctgtgtgtggtgtgttcggcgttggagtgatatcattgagcagacgacgtgaggccgagctgatctgagtgagagcagagagattgatagcgggagactggagcgagagctgcagcaacacgatagggtgtagcacaatgacgagggactcacccacagagctcgacgctcctggaccgtggatgcctgattgtaggctccacccgaacggccgactgtccgtacctggtagctcgggacgaaccagccggctagccgacgacgcgaatcgcaaggacacaagacacagcagacagaagacagaaggaccaggcacgctgcgccgacgacgaccatcggatgcagcggcaccgcacgtgatgcggcctgatgacgtgacgagcccgaccgcagagacgagagaacagcgacactcgcgagggaacggctaacggacagagcgcgacccgagagaggcagaagtttgaaggaggagacatagaactccactcccagacgcgcgaggatccgccgacagcgaacggctcacccgcgcacgaccgcgaagtctcgccgagaccactcaatctggaacgcctgactcctgccccgggaccgtgcattactg

SEQ ID NO: 493721 - DNA, 611 bp, Homo sapiens
gcaagacaaaggactattgtcaaagagtcagcgtgcttcgcattcaacatgctgccgttaaacttgacgtgccgtaaatcatgtttgatgtgccatagcactaccaacatacgaggtatcccgacgagaagaggtcttgtatgtagtcaagactccagtgcagaccatgcatttaagctctgcaagcaaccagcttgcaaggctggccagaattgtaaggcctcaggtaaggatgggctatttaggaagctcctaacccatatttgcgagtggatggcatctttcgaaagtttaatgggcatcaatacgttaaacgacagtgtcccaaagtcacatttctacatttccctcagctgggttttactgaagaacgtttctatcggggccgtcccaccaaatttgttctttatatcatcttagggggttaatagacgcatcatggtttgactaagttaacaagtgaattagtcatcttatcacacgttgcatgcgttttgtgtgagaacgctggattaacacatcttaagtggaacaacttgtgtggtacagtgaatcgtaatggttgacacgtgtgtgaagctttggttaaaaaattgggacattgtctggta

SEQ ID NO: 493722 - DNA, 1302 bp, Homo sapiens
cccacgcgtcgctccccctcgccctctcttcggcccccccgcatttcagcgttcactctgacgtgctcccactatctctgcccccctctatccttgatacaacagctagagctcaattatacccgagtgaccatttgtccgcacgcccgaaaagtagcaacatctggacgcgcgcccacagcgcgaagacagagccgggcgtaccgcggacgactcgggacgacatcgcatcggaataccgctaagagcggccgacccagaacagacaaaggagcggcactccatcaacaagagcacacgcacaaataccagcacccccacggagccgagcgacgacacacaaacacagccaaacgacacagacaacaaacagcacaaaacaaacggagagagacagcagcaggagcggacaacacaaccaccacgccccacggcacccacaaacaagatccgcagcaacacaccggggcaccacccaacgagggaaggcaacagacctccacacacgacgaaaacccaacccgaaacaaaccgacaaaggcgacacacagaacacaacacacaacccaacgaccgagcagccaccacacaagccacacacacaacgggcagcccaggaacagacaccacacaacccacacgcaacaccgcgcacgcgacaaacgagcgccacacgcggcacacaggaccccccgggacaaacagcccccccagccgcacgagcgaaaggagaccccacgaggacgaaccgacgccagcacaaaaccccgcggcaaccaaaatccaccaggaccgacgaggcagagaaggcgagacagagatcagaggacgacagcgacccacgaaaccagacgacacaacatagccagcagcagccacaacgcgcagagggaccaacgcagacgaagaggccgcccaccgcaggagagaggagcatggccacagaacaaaacagcaaggcaggagacgaaacagcaagacacccagaaagcggcaacaacagaacacacaacaaaagcacagagagcgcaacagaggcgacaaagggacccagagcaaacgaagaaagagcacagcaccgccgccacaacgcacccccacggcggacagggacacccagcacccacgcaggacgcaacccccaccgcaccgacagaaccaccacaagcagacacaacacaacccacccagcccccccacccagccacccgccgcagcccacccacagcacaacgcacaccacaccgacaagcggagaacacagccgagcaaacccaacaacacacgcagcgcccacgccga

SEQ ID NO: 493723 - DNA, 127 bp, Homo sapiens
ggggatagatagtggggcaaacccattgtctctaacccacaatttcttgggttcttaaattctgggtttcttgttctatgtggcaggtgtgtgtgtgtgtgtgtttgtgtgtgtgtgcatgtgtgtg

SEQ ID NO: 493724 - DNA, 192 bp, Homo sapiens
  misc_feature (28)..(28): n is a, c, g, or t
  misc_feature (53)..(53): n is a, c, g, or t
  misc_feature (56)..(56): n is a, c, g, or t
  misc_feature (111)..(111): n is a, c, g, or t
  misc_feature (113)..(113): n is a, c, g, or t
ccgtccagggagcccgggcctgccggtnattgccaggccgcagcgtcagatcnggntacctcctggtgaagcacagccagacggaccaggagcccatgtgcccggtgcatngnaacaaactctggagtggatacagcctgctgtacttcgagggccaggagaaggcgcacaaccaaggacctggggctggcg

SEQ ID NO: 493725 - DNA, 692 bp, Homo sapiens
ggtttgcttaggcgcagacggggaagcggagccgacatgccagctggcccggagctgggtttgtcgcaaaatcttatgctgagccccgacggcagtacccttacgagcaaatctcgtctcgaccaagagctgaaagctgatcggcgaggtatgcggctccgagaacaaacgttgatggtctggagggtcaaactttagcctggccaagatccgcacatggccggccgggaactgctgacgcttgatgagaaggaccacggcgtcctgtcgaaggcacacgccctggtgcggcggctggtccgcattggcggtgcttggatgcgggcacagatgaggcttggattcacgtcctgggcctgaagcagtagaggattgcttgagagagacgcctagcagaggccatggtcttcaaggctgggcttgggcaaagtccatccaccacagctccgcgtgctgatccggcacgagaccatatcagggtccgcaagcaggtggtgaacattcccgtcctgtgcattgtaccggactggcatacaccgagaaggcacatcgacctttcatactcatggcagctcatcacctacacggggcgttggccagacccgaggcccggcggatgaatctgagaagggaatgtgccaaggacaggggccaagggtagagtgagcttgaggggcttggaagacagacca

SEQ ID NO: 493726 - DNA, 383 bp, Homo sapiens
ctgtgaagactggttgctgggaggcactgaatagtgaacaacgaagctagttcaaatttgcataaatcatccctgctatagcctagattctcctaggtagtagttactttcagaacggcaacatgagctgtgcaggtccatatgagggtctacttaatcctattatgatatctctagtaactctggcagtaacagaagcaaagtaactctggacatgacagacatttagacgaatctggcagtacactgagtttaaactggacaccaagcaggcaaaggcctggaaggtttcgctctctttgtgcctaacaggttttgaaaaccttgaaggccagtccacttttgacaagaagtactgtgtagtctgcttgcagccttctctt

SEQ ID NO: 493727 - DNA, 202 bp, Homo sapiens
cggcacgaggcgtccccctggctcacccactctgtgtcagcatgcaagcctttgggagctgtgagccaccatgttgaataggacattcagaagggttgagatcctagctatatgacaggcactatgatatatgttctcattctcaagttttaatgctcataacaacactgaagataggtggcattattctctccctgcagga

SEQ ID NO: 493728 - DNA, 248 bp, Homo sapiens
gaggatccccaataaattgttggcattgatacattaaatatgaccatgcttatgataaaggtgttgctattgttttagaagttgctaaagacaatacagcaatagcctctgaagactagtcagatattttaaaaatagaattaattaaattatagtaatagtaataataagattgtgttttattcgttcaaagttgaatagtttattaatttattgaatgaacccgatcaatgaccaacaatttattg

SEQ ID NO: 493729 - DNA, 135 bp, Homo sapiens
gttgttcagagtggaggaggagggtgatagtggctgtttactaagacagcaagggatgtgaagggacagccaggcatcagtgcaagaagcatgcagtagacaaagtggaagggcaaacacaatggcccagatggc

SEQ ID NO: 493730 - DNA, 344 bp, Homo sapiens
gaaagggtcttggtgaatgaaagcattatatagttgtgatggagcaggatcagaattgtgaagtacaaaagacaagacgtataattattaaactcagtcttgattaaagggaaaggctataaattataggcgtgaaaagtattcagcatgaatctcagattctatataagcatgaaagagtacaaaagatgttggagtccagtaagcccatatctaaagtatctgtaaaggcttcaaggactttaggtttattttgatatactagtgttcttctgtgacaagttgatgtatatctccaagacttaaggccattccctggctcttggcacgaatgcttatatggc

SEQ ID NO: 493731 - DNA, 160 bp, Homo sapiens
  misc_feature (10)..(10): n is a, c, g, or t
  misc_feature (53)..(53): n is a, c, g, or t
  misc_feature (91)..(91): n is a, c, g, or t
agcataagtnatgtccgccccctgagtgacccccagacaagggggaggagcangtcaacttctgtgagtccaccaatgactatgggccatntgatggtgggggtcctgtggcagctcttgatgaatcaggggggccaactccctcttcctatggaggaat

SEQ ID NO: 493732 - DNA, 1000 bp, Homo sapiens
aatggcgcaaataaatactaccgtatggaccaccataattaaccccatactccttacactatgcctcatcacccaagctaaaaatattaaacacataactaccacgctaacctcccgtcaccgaagggccaaaaaggtaaccaaaagacagcagaaaaattattcctgtgcgcctgagctactgcagaagaaaggatttggtcatcagggttccgtgcttgccgcagcaaattatgccaggggaccatgtgtcagggtggtggacttacagacgccagttaattgggactgagggggcagggatccatcctactggttgatgaaactttcgcgggatgagacctgcagtctctaaagccatacgggtcacgcggcactctgggcacatggcaggtgctgataccacaggacacatggttccccatgtaatatcatactgtcaacctgcccaaatgcatgtgagtgggttgtgatggcaagcatgtgatgtaggcaaacgtgaacagaaggcaagactatttgtggaggccatgcagcgcttacgcggtccaggaaatggcaacgaccagacaagacagatcacccatctgcatgactgtggacaacctcgcaataagtttggcgctcggcgtgcgcatctttaaacaacagatcaattcccttcttgtagctcaggagaagcacccctccaacccaattggatcgacaagaacccagaaacattgggcactccgcgagtcccactgagctccatgtatccttgtacctcccatggctagtggatggcgaataaggtaatgatatcacataacacgcactacacggcaaaaaaaaaaaaaaaaaacatgggggacgcacagcgagtcacgacaaggctgcgggcaaaagagaacagcacagacaaagacacagaacaaagaccacaacaaccgacaggcaacaggcagcagaaaacagaacgcaacgaacgagcaaagagcaaaaccacgacgcagctaca

SEQ ID NO: 493733 - DNA, 184 bp, Homo sapiens
atggagaggtcacagcttgccaaagggtaaacaactcgccgcaggtaactctcatccgtgtggttatcatacagccacggagcatcaagcacatcatgcatggtcaccaggtgggtccattttcactcatagactccagcaacgaaccctccgcaagctccatgcatcgtgaccacacaactcc

SEQ ID NO: 493734 - DNA, 303 bp, Homo sapiens
aaaaaatacccaatttttatttggcatacctgaacaaagctggaaaaaaaatttcaaaaagaaaggggcccgggggaagcctgttcaaaaggagctttgtttcctgcaggctgccacctggagaaacactttttcccaggaggggcttggtatgttttaatttaaggccacgctgcctttgtccaaattaacagatgtttttttttgcacttaatccctcccccacagtttccagggagaggcttttttcaagccacaggatcgattcgtcggggaaggaatcaatactggggtttttcgggc

SEQ ID NO: 493735 - DNA, 761 bp, Homo sapiens
  misc_feature (475)..(475): n is a, c, g, or t
cagattactggggggggggagctttatactacgatgattccgtaggctcatatccatgaatgctcacaagaactgctacttaacctcatagacccatacaggcaggtgcagctgaccacatgctctggcccgctactcatcgagggtctgtggctatgggttaatctagcgggaggatgtctaataggagtaccacacagaggccttctatgtcaagttcactggacaacctttgatggcatgtcacagatcatctgtctcacatgacaatggatctcaacgggttgccgctgggagcaaggcactcagcagacactgatgacttggtctgaagaattacatcttctgtaaaggcacatgggagacacccttctgagtcaatgacaccgtagaataggactctcactgggaccacgtgcacacggtcattgtgcatattatcaagccgatatgcatgttaacatccattactgtntgaagcacttcagctgtttcatggtgatgtatgaactatgccacgacacctgcatatttatactgactgatcaagagagaccacatcggctggactatgaacatacccaggatagtatcacctatgttgtggataatgatgacagtaaggctgcctgctgacacttatccctgtgcataactgctacctattattccaagagctgcctgagttcactggacatcactaatgcctctcaggacctgataatgctgggcgggtcatcaacagactaggactgggctct

SEQ ID NO: 493736 - DNA, 432 bp, Homo sapiens
  misc_feature (197)..(197): n is a, c, g, or t
ctcgctgtgtcagccaggctggagtgcagtggcagaatctcggctcactgcaacctccgcctcccgggctcaggcaattttcctgcctcagcctcccgagtagctgggattgcaggtgtgtgccaccacgcccggctaatttttgtatttcgtatttttagtagaatactaaaacaacatggtttcaccatgttggnccaggctggtcttgaactcctgacctcaggtaatcccccaacctcggcctcccaaagtgctgggattacagacgtgagccaccacgcccagcctaggaccatctggttcttgacacagtataggaaggagggaaacagggttcaggaggaaggcagtctgggtacagtgggggaaggaacacagttcccgaaggttttccaggaggttttgttgttacatagtgtttttaggggt

SEQ ID NO: 493737 - DNA, 535 bp, Homo sapiens
gaccagattgctcgaggcagcggagtgcgatggcgacgtgcgttttgtgctgggcgattcgtcgttgcccaccgcgccgttgcagggcggctcgtattaccgtgtcctcggtgggtacggcggtgtagcaagccgtgtgaagcgctgaatgccaagttgttgcaggtcgcccggcagacctacccggtgttcaaggacgccgaagccgtgcggtttgaagagggccaactgcacgccggtgatgtgagtgtttcgttggcgcaactggtcaaggacagcggtgaggaggtgctgcaagcacaggttgacagcgagccggacaagaagcgccagggctatgcctgcgcgacccatacggcggtgtttgtcgaggtgcgggttgatgaagacctgggcaccatcaaggtcagccgtgtggtcagcgccattgccgcggggcgcgtggtcaaccccaagatggcccgcagccagatccttggcggcggtggtgtggggcattggcatggccctgcatgaaggcgtccgtagcgggccg

SEQ ID NO: 493738 - DNA, 126 bp, Homo sapiens
atcagcggcacggccccgatgggcttctgcaagcttgcgcacctcatccaccgggcccaacatgagggaagtgcctgtgtccccaatggcctcacagccctccttggcaagggtcaggccgctggc

SEQ ID NO: 493739 - DNA, 463 bp, Homo sapiens
  misc_feature (103)..(103): n is a, c, g, or t
  misc_feature (110)..(110): n is a, c, g, or t
  misc_feature (115)..(115): n is a, c, g, or t
  misc_feature (139)..(140): n is a, c, g, or t
  misc_feature (152)..(152): n is a, c, g, or t
atgagtgcaggggccaggggaacccgtgaggatcactctcaaatgagattaaaaacaaggaagcagagaatggcagaagggaaaaaacaaattgggcggcggnaatcttncaagncaatttcgcggccgcaaaacaacnncccttgtgggangatgagagtgaccaggttgaactgggaagtggaaaaaggagtttgagtcactggcacctagaagcctgcccacgattcctaggaaggctggcagacaccctggaaccctggggagctactggcaaactctcctggattgggcctgatttttttggtgggaaaggctgccctggggatcaactttccttctgtgtgtggctcaggagttcttctgcagagatggcgctatctttcctcctcctgtgatgtcctgctcccaaccatttgtactcttcattacaaaagaaataaaaatattaacgttcactaaa

SEQ ID NO: 493740 - DNA, 201 bp, Homo sapiens
taggacgtcactgcacgccaacctgggtgacagagccaacagagcagactgtcaaaaaaaaaaaaaaagcctgtgtatctttctcatctcaaatcccttttattaccccttattaatccattccattccatcagtttccctgtaaaacctctatttggaaattatttcctgattcgttttatcaccatttcccctgttatc

SEQ ID NO: 493741 - DNA, 440 bp, Homo sapiens
aaggattctggtgatcgcagctctggggtctgtggctgtgtcacactcaggtcacacacagcatgtggagtagtgagcagttcacttctagtcatctgttgatttaattatccccattagggagacatttttaacgggttttagagtcctttggcaaaactgactgtgccccttgtgtcagtgaaaagactttcacttggatggcaacccatcaccatcaccatgtacaatgcacagatgaatctgggctgggcaatcacaggcaatgcttgacaaggggtgggtgacatcatgtccacaaagatgcccagaaatgaggtcgtgaggaagggtgggtattaggaagcaatgtggtgggtcctggccgaggtctaacatccctagcagccttcctcaggcacactgtgacagtggagtgggcacacgtatcgtttcaggca

SEQ ID NO: 493742 - DNA, 123 bp, Homo sapiens
  misc_feature (34)..(34): n is a, c, g, or t
tgctatcccggtcggacgaccgactttgcacgtnggaccgctacggacctcctctgtgcttccacctcctctgtgctcctcctctgtgtgtccaccctctgtgctgtcctcctctgtgcttgt

SEQ ID NO: 493743 - DNA, 645 bp, Homo sapiens
atggtgcagcaagtgcggcaagatcaaggctcgagatcttcgcgggaagaataaggaggagctgctgaaacagctggacgacctgaaggtggagcttgtcccagacctgcgcgtcgccagagtgacatggcggacggggcctccaaggctcgtctaggataccggagtgcgtccggaaatcgcattggcccgtgttctcacagttattaacccagactcagaagagaaaacctcagggaacattctagcaagggtcaagaagtaggcaaggcccctggacctgcgggcctaagaagagcacgtgccgtgcgcagtcggttcaacaagcacgaggaggaagccgtgaagaccaagaagcagcagcggaaaggagcggctgtacccgcgtgacggaagtacgcgggcaacgggcgggagggtgcgccgattgtataaatatggaggcaacagactggggtggaggaatatagcacactagatattagagatttgacacaacgagatcattattgtgcggttggattcgtgcctggaaaatagaagtgaaaagaccggattgttgtactgtgtaggcaaccctggatgattggcactagagtcttgaatgttgtaatagtagcttgggggcaagggtcgggataccag

SEQ ID NO: 493744 - DNA, 178 bp, Homo sapiens
caggcgcttagtcgttccgagttcagctgtgtgaaggcgacagtggtgcagggtcttccgtgtggtattacgacggtccctatactaggccgtccccttgaataatgcagtaagggacccccattttacgacacagggcaggcaagaagacaaccagcttgatggaagcgtcgcgcat

SEQ ID NO: 493745 - DNA, 269 bp, Homo sapiens
gaatccaaggggcccttggttttttttacaaaaaatacatttttcaagaggaaaatgttaagggcataaaagctttccccttagctttttaagcttggtttggggcatcataaaaaaggatcgggatcattcttatggggcccggaggttttgccccaaatccccgaccaagtcccctctttttaaaaacaaaaaagggggaaataaagggtaaaaccttttaattgggggaaggggctgataaatgactttattttacaaagctcctt

SEQ ID NO: 493746 - DNA, 382 bp, Homo sapiens
gggggatgaagggttttttttagagacaggcctcactctgatgcccagcctggaatgcagtggtagatcacagctcactgcagcctcgaactccgtggccgcaagaaatcctcccaccttagccaaccaaagtgtggggatggcaggagtgaccactgtgtccagccaggaaagcccttcggtttcactggaatgatatttctgccgcagacctacagccatggtggtattaaacggcatcatggcaggaaaagaaaaggtgagaggtgaccgtttggcttttttctgaacatatcagaccaaaccggggctgtctggcacttttttttttttttttttttttttttttttttttttttttttttttttttttttttttttt

SEQ ID NO: 493747 - DNA, 825 bp, Homo sapiens
  misc_feature (825)..(825): n is a, c, g, or t
ccaacacaacatcacctctagccatcaccagtacttagcaggcaccagccgatgcccagccgacacactgttctacccggccgcacgatacccctaacccgtgcaacacggctagccataatcaccttgctacccttaacttccgcggcaccatgatactgaactggcctccaacgacggcgatatcaacacatgcatcatcatatacctattctacaccccagcatgcacacactcgacccctgcacccggtgaaagaagcgccgagagcccactacaccaacaagccacagcacgcacgaagaaccgccatactgggcagacctctctaccactataagactacaaacccgccaaacacgacgctaacccataaacaccaaacagcaccccaacaaagagtacaccgttgaaccagcctaaacacaaaacacacgcatagaccactatcaaccaacacaaactattaccggcgctacagcagagacgacggaaacgccactacggccgaacgcccacggcagaagccccgccgaaaaagcacccatttccacggcaatgaccacatgcagatgatcctactattgcccaccactacggatacacgttattccacgcccacaagaagtttcctaccaacgtgccccggaccaccccctaactcccttacacttaaccagcttctcacaaacatatagtgcaactccctcagaatatgacttacacacctatgcatggcaagtccgcaactagccggcgcgcaaacaccccactagggaccttatagcaccctcattttacggcgcgttgcatcattatccaacn

SEQ ID NO: 493748 - DNA, 409 bp, Homo sapiens
attgctggcgcgttcaccagtgaacagtataccattatacggatcacgggccgtcgttacaccgggaaccagttatcccattgataccgattcaggggcggtcgtgtccacccgcgaaaccgtataccgattatgggattacaaggcgcgtcttcctgctcccggaaacacgctttggccggccgtggtggttcactcgcctgaggtcaggagttcgaccagccttgccaccgtggtgacccccatctctactaaaaacacaaacttcgtcgggcatggtggcgcatgcctataatccaagctactggggaggctgaggttgcagtaagctgagatggtgccattgcactccagcctggccaacaagagtgaaactccatctcaaaaaaaaaaaagggggacccccaaa

SEQ ID NO: 493749 - DNA, 148 bp, Homo sapiens
gcgttaggacacgcagcgtgcggatgtgagtgacatgcgtctggatcacacagggttgctctgtgtccccttcttccctcccctccagcgccccttatgggggtgtgtggacacaggtcctggcacttagcgttcagcgggagctttc

SEQ ID NO: 493750 - DNA, 250 bp, Homo sapiens
atcagctcggcccatgttcagatattgccgcaagaagctcctggctgatcaggctgatggcccgcaggtctaagatcaaggaagcacgcgagccccgtgaatagcgcctccaggccaggaatggaggatatcatcaagactttatccaaggaggaagagaccaagaaataaaatctcccactttgtctgtacatactgtgcctcgtgtgattacatagatcagccattaaaataaaacaatccttatctg

SEQ ID NO: 493751 - DNA, 297 bp, Homo sapiens
aggagaaacctggctctgctccttgccgtgtgggtggccggctgtgtggctttgaggaagtgacctaagctctctagacctggttccccagctgggaaggactggacaaatgcaactcggaagatccccgtctgactccaaaattctaaggctctagggtttaacagttatttgtagagtacgcacggtggaatcttgtgctggttgctatggggaggtggagggggagtgagaatacaaaggaacgagtttcggtccgggtggaggtaaaatataggcacgacgttttaaaattaa

SEQ ID NO: 493752 - DNA, 1655 bp, Homo sapiens
cgggagaccggggttcgattccccgacggggagcacaggagcagcactgccggcgggggcgggtgccagggacttggaggtggaggggacgcggcggtactctggcgtcttccgacttcgactccttaccttaaaagatgctggagtcatatgtaactccaattttaatgagctatgtgaatcgctacatcaagaacttaaagccgtcggatctacagctttcactatggggtggagacgtggtactcagcaagctcgagttaaagttggatgtgctggaacaggaactgaaattaccattcacttttttaagtggacatattcatgaattgaggattcatgtaccatggacaaaactgggttcagaaccagtggtaattaccatcaatactatggaatgcattttgaaacttaaggatgggatacaggatgaccatgaaagctgtggttctaattctaccaaccgtagtactgctgagagcacaaaatcatcaatcaaaccgcggagaatgcagcaggctgctcctacagatcctgacttaccaccaggttatgtgcagagtctgattagacgagttgtaaataatgtaaacattgtgataaataatctcatactaaaatatgttgaagatgatatcgtcctttccgtcaatatcacttctgcagaatgctatacagtaggtgaattatgggatcgtgcattcatggatatttctgcaactgatttggtgctgagaaaggttatcaatttttctgactgtacagtttgtcttgataaacggaatgccagtggtaaaatagaattttaccaggatcctttattatacaaatgttccttcagaactcgtcttcattttacatatgaaaacctaaattccaagatgccatctgttattaaaattcatactttagtggaaagtttgaaactttctatcacagatcaacaactgcctatgtttattcgtataatgcaacttggaattgctctttactatggagaaataggcaattttaaagaaggcgaaatagaggaccttacttgtcataataaagatatgctaggaaacattacaggttctgaagatgaaacaagaatagatatgcaatatcctgctcagcataaaggtcaagagttatattcacagcaagatgaggagcagccacagggatgggtgtcatgggcctggtcctttgtgcctgcaattgtgagttatgacgatggcgaggaagactttgttgggaacgatcctgcatcaaccatgcatcaacaaaaagcacagactttgaaggatcctattgtttctataggattttattgcacaaaggcaacggtgactttcaaagtaggtcttttctcttgctgtttatatctctagcaactttaatgcttaaatttggattgttagtacaattctagctttattcaagtttgctttgcattcagtagatgtgagatagagtctaacagttcttacttcataaaattacatggctcctccacttgaaatctttgaattctgatcccttcctgtcttcttagggcattctccacatttcttttttattagcttcatggatagttttttgccctattgaatcattcagttggtgtacaaacatgccttaatattgtcattaaaaaagaaaggaacagc

SEQ ID NO: 493753 - DNA, 992 bp, Homo sapiens
agcggggtggtcgctgccccaacccacgcactgcgacgccgcgggcctgaattgcagttcctgtgccctggcactaatgactggcacctcctgcggcccattgcccttctgcctgcattgcccactgagtcccactctggactgtcttcagcagcggttcacacttgatgacccagccctctcccgctggccccgatgcagggcccaccatattaggacgggcgtgactggacaaggccccatgagacaactgcgggatgacgtccccagaactctcacgtggccatgcccaaccgactgtgagcactcctgctgtgctgcacgctttccaggggattgccctggcgcacgcaggacggcaaaccttgcattaccgcaaagaatagcacctggttctacagctagtggatccacaaggggtcccttcacaatggcactccaaccccatgtcccgctgtggcatcaacacccaactcgctttgcagtgatctcttagcaagtgggcaaggacccccttctgatccccatgcgacccacttaccacagcttaaatacccgcacaaaggccttggccagcaaacttggcagcgctccgcgagcccagaaattggcctccccattgcaggcggggggccccacaagtcacgaaaggcatgcctatactccgaggattcccatggtttccaagcacccagagggtacccaaggtgccccacgctgtcatttggcgacagcattggcgcaacctgacagctcacaccccgctatatttgcccccccccatacttggatccccctcgcgcacaacccgattcctaggacccctctggctcctcacacaacgtgcgctgtacatcaaaggcctggaccacaaccaccccaagcggacgcacaccacagcacaactgccctcaaccgggcataacccccaagcgtgttcccacgaatatcacaatagtcccgaacagtccagctttcatggataccttctg

SEQ ID NO: 493754 - DNA, 1250 bp, Homo sapiens
cttccagtaagcggacgctgggtgggtccacggcctcttgtgcctcggtgcactgtgtactattgcactgagactgttgtaaacttcgaagtggtctgggcactggggacgttgtgttgtatgtggttgctcctccctctcgggccctatgggccgtacatggtgtttactcagtgggccaagctaggcctcgcctacggcgttgttcgttcgagtggaaaatgacctcgcctacatgtgtattgacccttcctgcattggtttttgcgtgtacaccattcgttgtaatcatgcccccattggccgtgttgctctttagatcataaagtttcgtaatcgggcgtagaaattctctggggttgtgtccatcacactttgatgttcctcttggccccttgcaaactgctacgtggtaagctcatcgcccattttcgcaattcaactctgtgcacgcattttgtgtgatatttttgtgttttcgtccatgcagtaacgtgacgaaggaacgtttggctatgaacctctaagcaaggcataatgtgagtggcactatgtcttgatcctctggtagaaactcctatgggtacagtgcacttcaaactgactcaggacgaagggggtcatggagttcaaagatccactacgccatcgagagggtatgcgcctgtcattatggacagtcttcttgcctcgcatcggctagttcctgtggtccgttaaggacgtaagacacttggcttcacatggctactggaggaattcaatgtcctggtttggcagtgtgaatcaaaggggctgggcagttacctttcgggagggtcacgcaatgcgctcatgaaccgtgcccatgtgccaggctgcttgtggcttctgtcccgtcagctttctcgtgaatgctgtggaatctgatgagctagtgggcttactctttggggttcttctggtgatagctaagcctgcctggggatgacttcactaccatgttcaacaacaccaaaccgaggccaggtacggtggcccacacctggaatccctagcagctgacgggaggctgaagcaggcagagttgcttgagcataggagttacgagaccagctctggacgacaaagtgagaccttatctctacaaagaaatcataaaaaatatatcgtgggcatggtgctgggcacctacagtcccagctactcggatgaactgaggtggaaaagactcacctgagcctggagaattcgagggtacggtgagtcca

SEQ ID NO: 493755 - DNA, 555 bp, Homo sapiens
  misc_feature (33)..(33): n is a, c, g, or t
  misc_feature (539)..(539): n is a, c, g, or t
  misc_feature (545)..(545): n is a, c, g, or t
  misc_feature (551)..(553): n is a, c, g, or t
gagctcggtacccgagaggtgggaccacgggtntcctcctaccaagctgactgttgaagtccttgtggtgctcagggaggatgggtgacactcgctgttgcttcagcttcatcttgagcccacacagcatctccactacccaggtctcctcaggctcaggggcgagctccttctccggctcctcctcagattcatctgaccactccctcttccttttccagccaagggacctacatggggggctgggatctaccccaggggctgagtaaagaaaccaggccaccgtgtaatgcttctgcatctgatcaccttagaccccgacccaaaaccccaaaccactctccatcctccccagcctcgcagactgctggcttctccaagccatctttctgattttctcctctgctcaaccccatgtgccactccttcccctccccattcttccctctctctgtcctcagaacactgcctcatatccttccctggtccctggctctctgagtccctccttttttgttttgttttgttttgacagagcnagaccntgcttnnnca

SEQ ID NO: 493756 - DNA, 1669 bp, Homo sapiens
cgggagaccggggttcgattccccgacggggagcacaggagcagcactgccggcgggggcgggtgccagggacttggaggtggaggggacgcggcggtactctggcgtcttccgacttcgactccttaccttaaaagatgctggagtcatatgtaactccaattttaatgagctatgtgaatcgctacatcaagaacttaaagccgtcggatctacagctttcactatggggtggagacgtggtactcagcaagctcgagttaaagttggatgtgctggaacaggaactgaaattaccattcacttttttaagtggacatattcatgaattgaggattcatgtaccatggacaaaactgggttcagaaccagtggtaattaccatcaatactatggaatgcattttgaaacttaaggatgggatacaggatgaccatgaaagctgtggttctaattctaccaaccgtagtactgctgagagcacaaaatcatcaatcaaaccgcggagaatgcagcaggctgctcctacagatcctgacttaccaccaggttatgtgcagagtctgattagacgagttgtaaataatgtaaacattgtgataaataatctcatactaaaatatgttgaagatgatatcgtcctttccgtcaatatcacttctgcagaatgctatacagtaggtgaattatgggatcgtgcattcatggatatttctgcaactgatttggtgctgagaaaggttatcaatttttctgactgtacagtttgtcttgataaacggaatgccagtggtaaaatagaattttaccaggatcctttattatacaaatgttccttcagaactcgtcttcattttacatatgaaaacctaaattccaagatgccatctgttattaaaattcatactttagtggaaagtttgaaactttctatcacagatcaacaactgcctatgtttattcgtataatgcaacttggaattgctctttactatggagaaataggcaattttaaagaaggcgaaatagaggaccttacttgtcataataaagatatgctaggaaacattacaggttctgaagatgaaacaagaatagatatgcaatatcctgctcagcataaaggtcaagagttatattcacagcaagatgaggagcagccacagggatgggtgtcatgggcctggtcctttgtgcctgcaattgtgagttatgacgatggcgaggaagactttgttgggaacgatcctgcatcaaccatgcatcaacaaaaagcacagactttgaaggatcctattgtttctataggattttattgcacaaaggcaacggtgactttcaaactcacagaaatgcaagttgagagtagttattacagtccacagaaagtaaaatctaaagaagtattgtgttgggaacaagaaggaactacagttgaggcccttatgatgggagaacctttctttgattgccagattgggtttgttggttgcagagccatgtgccttaaaggaattatgggtgttaaagattttgaagagaatatgaatagaagtgataactgaagcctgtttcttcatttgtggtgacaatttgagtacgaaaggtttcacataccttacaaattcattgtttgattaccggaagcccaaaaattatggaactcgcg

SEQ ID NO: 493757 - DNA, 475 bp, Homo sapiens
gtcaaatccaggcagtctgacttagaaactctcattctgcatttctaattttcctttgtgtgggggctcaggttctagataggatgttcagaaatggactaatatagctgaggggcaagaattactcttggcaggcagggatctccttggttctgacaactttagcattctgatccataggtcagtagacattaaactctatcaataatgacagtgtgactgttccattggataagcgccccagaaatgtggaactccttcataacagaagctgcctaaaaatagtttaatatagcaggacaaaaaaagaataacaatattgaaattggaaagaataattgattctgcctccttcccagtgcaggatttttctagatatctctaacagacagtcacttggtctcttcttgaactaaactcccctgcagttacttcaactgcttattagagaagaattttctgactaccttcttgg

SEQ ID NO: 493758 - DNA, 565 bp, Homo sapiens
  misc_feature (59)..(59): n is a, c, g, or t
  misc_feature (61)..(61): n is a, c, g, or t
  misc_feature (65)..(65): n is a, c, g, or t
  misc_feature (67)..(67): n is a, c, g, or t
  misc_feature (69)..(71): n is a, c, g, or t
  misc_feature (75)..(75): n is a, c, g, or t
  misc_feature (86)..(86): n is a, c, g, or t
  misc_feature (326)..(326): n is a, c, g, or t
  misc_feature (521)..(521): n is a, c, g, or t
tttttcgggtgccctttccacatcaaccacaaacgccatcgacctcctctgggttcccntnacanangnnncagntcgtccccctngcatcactcgaatcactgtcaaatgctccctgctggggtttcctggagtctctccccaagccagggggcttcctagtgcagcctgaacatctttccaaagcacgacaacctcactgcccacctgaacaacttccttagctgatgcctttctctatcgaggccagggtccacagtgtcaattctaccctctctacaatctctacaagcacactggctcgccatcttggtatttcctggctnggcttcactgctccttccaaatgccctccactcgactttgtgtttgtgttttctgtctgggtgtcccgcacacatgtggctctgaagggaaggacccattccttgaagtcagttcaccccacagcctctgtgatgccttccctcatcttccaacttctgcatgcccgtagctctctagttacatcctgttataangtgacattgggattaggtcatctctcctgattgtgtagaaattg

SEQ ID NO: 493759 - DNA, 176 bp, Homo sapiens
tacgagcgcaggaatagaaaattagaggatctgcaatataggtagagcggataacattttaaagctggagaaggcttttactttgcgatctggggaagtagccaggttgtaagggagaggatgttgaatttcaagtgcaatgtgggaatagcaactagaagctggcgtcgtaagag

SEQ ID NO: 493760 - DNA, 142 bp, Homo sapiens
tcagcagcaacttcgtcctctcaggatttctcggtactcgcggcgagtgtggtgcacacgccgaaagctcctaataccgacgcgagtccgatagatcacatggacgaagttgttgcagatcgttgtggacgaagttgttgga

SEQ ID NO: 493761 - DNA, 124 bp, Homo sapiens
gttcaagtctgaccgaagatttggaaaagtcccaatggaactatccggaacatcctgggggggactgtcttccgggagcccatcatctgcaaaaatatcccagctgcctagtcccttgagtgtg

SEQ ID NO: 493762 - DNA, 474 bp, Homo sapiens
taaatacatctgcaggaaaaagtcttagcttattaaagctactctataaaattagaagtgattattagaggaggtgcacagatatcactttagggacacacaaaaaaatctgaaaaagaaaggaaacatgatacctcaaaggaacatagtaattctcccataacacaccccaaataaaaagaaatttataaaagacctgaaagggaattcaaaataatgattgtaaggaaactcagtgaagcgcagagaacacaagtagacaatataaagaaatcaggaaaacaattgattagaatgagaaattcaacaaagagatagatataaaaaaagagccaaatagaaattcttgaatcaaataattcaataaaggaaataaaaaatataatcaagaccttcatcagtagactagacaaggacaagaaataatttctgagtttgaagataggtttcttgaaataacccagacaaaccaaa

SEQ ID NO: 493763 - DNA, 1507 bp, Homo sapiens
  misc_feature (59)..(59): n is a, c, g, or t
  misc_feature (61)..(61): n is a, c, g, or t
  misc_feature (65)..(65): n is a, c, g, or t
  misc_feature (67)..(67): n is a, c, g, or t
  misc_feature (69)..(71): n is a, c, g, or t
  misc_feature (75)..(75): n is a, c, g, or t
  misc_feature (86)..(86): n is a, c, g, or t
  misc_feature (326)..(326): n is a, c, g, or t
  misc_feature (1491)..(1491): n is a, c, g, or t
  misc_feature (1497)..(1497): n is a, c, g, or t
  misc_feature (1503)..(1505): n is a, c, g, or t
tttttcgggtgccctttccacatcaaccacaaacgccatcgacctcctctgggttcccntnacanangnnncagntcgtccccctngcatcactcgaatcactgtcaaatgctccctgctggggtttcctggagtctctccccaagccagggggcttcctagtgcagcctgaacatctttccaaagcacgacaacctcactgcccacctgaacaacttccttagctgatgcctttctctatcgaggccagggtccacagtgtcaattctaccctctctacaatctctacaagcacactggctcgccatcttggtatttcctggctnggcttcactgctccttccaaatgccctccactcgactttgtgtttgtgttttctgtctgggtgtcccgcacacatgtggctctgaagggaaggacccattccttgaagtcagttcaccccacagcctctgtgatgccttccctcatcttccaacttctgcatgcccgtagctctctagttacatcctggacactgggattaggtcatctgccttgattactcccagtcccattagactagatgcctgtagaaggcagggtcctggcaaaatatcaatgtattcaatttcttttatttttttgagacagacttgccctgtcccccaagctggagtgcagtggtgagatcatagctcaccgcagcctcaaagtcctgagttcaagcaatcctcttgcctcagcctcccaacgtgctagcatctcaggcgtgagccactgcacctggcccgaaaccaagctttctcatcccaagcgccaacctttatcaagtctagcctagtcctctatcgtctcctaagtgtccctcatgagtgatcacttctgagtcctcctgcgtggagagctcagccactgggggcgtatctttcccattggaaaagtgtggttattggaagtttcctctttttagaaagaacaggattggaggtgctctctggggtgtcctcctaccaagctgactgttgaagtccttgtggtgctcagggaggatgggtgacactcgctgttgcttcagcttcatcttgagcccacacagcatctccactacccaggtctcctcaggctcaggggcgagctccttctccggctcctcctcagattcatctgaccactccctcttccttttccagccaagggacctacatggggggctgggatctaccccaggggctgagtaaagaaaccaggccaccgtgtaatgcttctgcatctgatcaccttagaccccgacccaaaaccccaaaccactctccatcctccccagcctcgcagactgctggcttctccaagccatctttctgattttctcctctgctcaaccccatgtgccactccttcccctccccattcttccctctctctgtcctcagaacactgcctcatatccttccctggtccctggctctctgagtccctccttttttgttttgttttgttttgacagagcnagaccntgcttnnnca

SEQ ID NO: 493764 - DNA, 183 bp, Homo sapiens
  misc_feature (72)..(72): n is a, c, g, or t
gaccgagtaatctgtctggtcataagtataggtagtcaagagtgattgcatactctcccggcctcacacccntggggtaaagtttgtttctgtgtgtaagcacacacacacacacacacacacacacacacacacacacacacacacagtgtgaggactaacatgtgcgctccgagacaggga

SEQ ID NO: 493765 - DNA, 1785 bp, Homo sapiens
  misc_feature (227)..(227): n is a, c, g, or t
gctgagaacaggtccttgttagatgctgaatccacagggtgacacactttctggccggacgagtcatgactccgacgccaggtgaacatctgtggtgtgcagtgcctaggcaacatgtggcctctcgagacccaagtaacaacgctcactaattgtcctacgtgtctcttaaggtagtctatcactctatatatccttgtgctcgtgcgagcctgctcacatgaganatgattgatgcatgatgcttgcagggctcgtactcacagacctcgtgcgaccgtagacccatgggcatgccgacgccgtagaagacgacagcatggattgcacatggtggcatgcaaaagcatgtgtactcagccttgcttccctttccggtcgtctcgtatccgatcacaccacaacggctgctttacgaaccgacgcgagcagtgaagacaagtccgtaagcagacgccacttggagaaccatggcctctcgcatacatccaacccacgcatggcgaacaaacattccatggccattctcctcccgactctcttcccttggagacatcaggggctggatcccaggcccaaatcgtctggccaccacacaccggtcctggctccgttagcgcgagaacttctggggaccgtacccgaccataaccctctgcatctgcccaaatgcaatgcgacaaaacgcccccaacattccctacgtacaacttccaacaccgcgcgagctacaccacacaaccagcacgcattccctatgggagcccaatatggcgcaatccgatggcacaccgaacccggtgacctcaatacccatctccattatccaccccaccatactgcccacgcaacaaaacgaggctccaacagcggcgcgcccatacacactcagggagccctaggacctccccacatccctgggaacgctatcacgaccgacgcccttggaccgacgcggcaccacactagatgcggcgcgatcgacagtggaccgcaacccccaaacacaaggaccattggcgctccccactagaaccttcgcacatacgcgactggcaaaggagccccacaacgcagaaaaagccagacacgcaacgcacccacccgggccaaacaaacgtccggggcacgcagaaccttccggcgaccagaccacgacttcctccgccgcaaccccaccgccacccgacccctgcaccggagcccgcacgccccacccccaaccgcacacacgctaccccacccaacccaccccacgccccacccgctccgacaccacccacacgcgcgcaccgtcacccacaaccccgcacagcctccacactgccacccggagcacccatagcgcaacaggacacgccacagtaacaaacgaagacagcaaaggacgcagacgacggcacgaaccaatccagcacgcggcaccccggacacccgacaggcccaccaagctcccacaagacgaggaatccacacgagaaaggagcgcagccggagcgcaccaacagaactagcgtagcagaccgcagccgtcccgcgccagcagcagaatgagcgagaagaacagcagcgacggggccgcagcaggcggaggacgacacacaacaggaggtggacacatcaaaatcgatggaggccaaccacacgccgctggcgtccaaccagctgatgcccaacgcagaacgagcagcaaacaaggctcgtgcgcgaaccaacaggcggtgcagcagcccacagcgcgacacacaaacagacacgcgcccacaacaggcgagaccacagcat

SEQ ID NO: 493766 - DNA, 1134 bp, Homo sapiens
  misc_feature (98)..(99): n is a, c, g, or t
  misc_feature (102)..(103): n is a, c, g, or t
  misc_feature (105)..(105): n is a, c, g, or t
  misc_feature (109)..(109): n is a, c, g, or t
  misc_feature (115)..(115): n is a, c, g, or t
  misc_feature (128)..(128): n is a, c, g, or t
  misc_feature (134)..(134): n is a, c, g, or t
  misc_feature (136)..(136): n is a, c, g, or t
  misc_feature (138)..(138): n is a, c, g, or t
  misc_feature (143)..(143): n is a, c, g, or t
  misc_feature (152)..(152): n is a, c, g, or t
  misc_feature (163)..(163): n is a, c, g, or t
  misc_feature (173)..(173): n is a, c, g, or t
  misc_feature (186)..(186): n is a, c, g, or t
  misc_feature (199)..(199): n is a, c, g, or t
  misc_feature (212)..(212): n is a, c, g, or t
  misc_feature (215)..(215): n is a, c, g, or t
  misc_feature (219)..(219): n is a, c, g, or t
  misc_feature (228)..(230): n is a, c, g, or t
  misc_feature (233)..(235): n is a, c, g, or t
  misc_feature (237)..(237): n is a, c, g, or t
  misc_feature (242)..(242): n is a, c, g, or t
  misc_feature (244)..(244): n is a, c, g, or t
  misc_feature (1118)..(1118): n is a, c, g, or t
  misc_feature (1124)..(1124): n is a, c, g, or t
  misc_feature (1130)..(1132): n is a, c, g, or t
gcaatgccatgatatcagctcactgccacctctgcctcgtgggttcaagcgattatcctgtctcagcctcctgagtgcctgggatacacaggcatgcnnggnnantttntgtatngttagtataaatnaggttncncnatatnggtctggtnggtctcgaacnactgacctcnagtgatccacccntctcagcctcccnaagtaatgggatnacnggcntgagctacnnnccnnngncttcntntttctttggacacagggttttgctctgtcacccaggctggagtgcagtggtgcagtcatagctcactgcagcctcaaagtcctgagttcaagcaatcctcttgcctcagcctcccaacgtgctagcatctcaggcgtgagccactgcacctggcccgaaaccaagctttctcatcccaagcgccaacctttatcaagtctagcctagtcctctatcgtctcctaagtgtccctcatgagtgatcacttctgagtcctcctgcgtggagagctcagccactgggggcgtatctttcccattggaaaagtgtggttattggaagtttcctctttttagaaagaacaggattggaggtgctctctggggtgtcctcctaccaagctgactgttgaagtccttgtggtgctcagggaggatgggtgacactcgctgttgcttcagcttcatcttgagcccacacagcatctccactacccaggtctcctcaggctcaggggcgagctccttctccggctcctcctcagattcatctgaccactccctcttccttttccagccaagggacctacatggggggctgggatctaccccaggggctgagtaaagaaaccaggccaccgtgtaatgcttctgcatctgatcaccttagaccccgacccaaaaccccaaaccactctccatcctccccagcctcgcagactgctggcttctccaagccatctttctgattttctcctctgctcaaccccatgtgccactccttcccctccccattcttccctctctctgtcctcagaacactgcctcatatccttccctggtccctggctctctgagtccctccttttttgttttgttttgttttgacagagcnagaccntgcttnnnca

SEQ ID NO: 493767 - DNA, 994 bp, Homo sapiens
tgactacctcaagtttctgtgcaccgtgctgctgaaaagatcgtcacatggagtctctgtggcaacagaatcgtggcccaaacagtagagggcacccacaaaaggggtcgcgccgtgtttcctcgccctgtgatgttctccagacgatttttaaatctcgccgctgttgttttacacgccgcgagcttcttttcgggagagggcaaagagagttttcgggaccgcgatttgcctctccccgcgaacgcatgagctgtgcgctctctgggataccatggcgaacaagccgcctggttggcggcctctggaaaattctggctctgttcgcccaaactcagaaacttgaggggtactgcagagctcttaaaatgctgtcttgtgcaccaaccaccactctgcggaaaattgggttgtggcccccgcccactgttggtgcaaaacgttggcgaacgagacaatgcgtcgtcgccccggggattgcctcatataatgttacaaaaaaagtggagtagaggagcccccttttacaaacaatcaagggcggcgtgcaaatacataatacaatcgagcgcacatatcctcttagagagactggctgacttgttacaagagatgctgttaaacaccaacagcactgttgtttgcggagcaccaccacagagccgtaaaaatttgtttcattgtgaaaaagaggtgcatcaggcgcggtggtgtcccgagaaaatagagatcagatctttttggtccgccggggagatggtttcaatactcttatatttataagcgcggctaataaagatttttgaggaaatatacaacaagagatgactagacgcgctccacaatcacaagtataataaaccaagtgggggcacactctcaccacagaacttagaacgatacttaaattttgacacactaaggggaagacaggacaagctcgtgttaaaaggagcgtgtgttttaaaaaattttttaaacaccccacaaaaca

SEQ ID NO: 493768 - DNA, 1506 bp, Homo sapiens
  misc_feature (59)..(59): n is a, c, g, or t
  misc_feature (61)..(61): n is a, c, g, or t
  misc_feature (65)..(65): n is a, c, g, or t
  misc_feature (67)..(67): n is a, c, g, or t
  misc_feature (69)..(71): n is a, c, g, or t
  misc_feature (75)..(75): n is a, c, g, or t
  misc_feature (86)..(86): n is a, c, g, or t
  misc_feature (326)..(326): n is a, c, g, or t
  misc_feature (1490)..(1490): n is a, c, g, or t
  misc_feature (1496)..(1496): n is a, c, g, or t
  misc_feature (1502)..(1504): n is a, c, g, or t
tttttcgggtgccctttccacatcaaccacaaacgccatcgacctcctctgggttcccntnacanangnnncagntcgtccccctngcatcactcgaatcactgtcaaatgctccctgctggggtttcctggagtctctccccaagccagggggcttcctagtgcagcctgaacatctttccaaagcacgacaacctcactgcccacctgaacaacttccttagctgatgcctttctctatcgaggccagggtccacagtgtcaattctaccctctctacaatctctacaagcacactggctcgccatcttggtatttcctggctnggcttcactgctccttccaaatgccctccactcgactttgtgtttgtgttttctgtctgggtgtcccgcacacatgtggctctgaagggaaggacccattccttgaagtcagttcaccccacagcctctgtgatgccttccctcatcttccaacttctgcatgcccgtagctctctagttacatcctggacactgggattaggtcatctgccttgattactcccagtcccattagactagatgcctgtagaaggcagggtcctggcaaaatatcaatgtattcaatttcttttatttttttgagacagacttgccctgtcccccaagctggagtgcagtggtgagatcatagctcaccgcagcctcaaagtcctgagttcaagcaatcctcttgcctcagcctcccaacgtgctagcatctcaggcgtgagccactgcacctggcccgaaaccaagctttctcatcccaagcgccaacctttatcaagtctagcctagtcctctatcgtctcctaagtgtccctcatgagtgatcacttcacattcctcccacatggagagctcacccactggggcctatttttcccattggaaaagtgtggttattggaagtttcctctttttagaaagaacaggattggaggtgctctctggggtgtcctcctaccaagctgactgttgaagtccttgtggtgctcagggaggatgggtgacactcgctgttgcttcagcttcatcttgagcccacacagcatctccactacccaggtctcctcaggctcaggggcgagctccttctccggctcctcctcagattcatctgaccactccctcttccttttccagccaagggacctacatggggggctgggatctaccccaggggctgagtaaagaaaccaggccaccgtgtaatgcttctgcatctgatcaccttagaccccgacccaaaaccccaaaccactctccatcctccccagcctcgcagactgctggcttctccaagccatctttctgattttctcctctgctcaaccccatgtgccactccttcccctccccattcttccctctctctgtcctcagaacactgcctcatatccttccctggtccctggctctctgagtccctccttttttgttttgttttgttttgacagagcnagaccntgcttnnnca

SEQ ID NO: 493769 - DNA, 119 bp, Homo sapiens
tagaggatccgaatcgtgctggtgcttgaagcagagccagctagccctgagcgggactacagcccctactacaagaccattgaagagctccgggacaagatcctgaccgccaattccct

SEQ ID NO: 493770 - DNA, 410 bp, Homo sapiens
tatgtaaggaaaccataacacagattgctgagtgccttctacaaagtgccaagattaattgcagagccaagactagatttctaatccagtgctctttattttgtgaactgtcttctatataagcatcggtgtttgggttggaggttttctgcttcttaggtacaagaggaagaagaatctgtacagaaccaaaaacatcttaatttttgtaatcaggatgtctacctttactgacaacatttactgacaacatttccttctgaaaataggttattgaaagatcaaggatctttgccagtgaaatccttaactggaagtgggtgggtacaagatagaaaactcatttggtataacaattttgttgttttttagtggaaccttgcttctctgttctgacatttccatgtctc

SEQ ID NO: 493771 - DNA, 1487 bp, Homo sapiens
  misc_feature (59)..(59): n is a, c, g, or t
  misc_feature (61)..(61): n is a, c, g, or t
  misc_feature (65)..(65): n is a, c, g, or t
  misc_feature (67)..(67): n is a, c, g, or t
  misc_feature (69)..(71): n is a, c, g, or t
  misc_feature (75)..(75): n is a, c, g, or t
  misc_feature (86)..(86): n is a, c, g, or t
  misc_feature (326)..(326): n is a, c, g, or t
tttttcgggtgccctttccacatcaaccacaaacgccatcgacctcctctgggttcccntnacanangnnncagntcgtccccctngcatcactcgaatcactgtcaaatgctccctgctggggtttcctggagtctctccccaagccagggggcttcctagtgcagcctgaacatctttccaaagcacgacaacctcactgcccacctgaacaacttccttagctgatgcctttctctatcgaggccagggtccacagtgtcaattctaccctctctacaatctctacaagcacactggctcgccatcttggtatttcctggctnggcttcactgctccttccaaatgccctccactcgactttgtgtttgtgttttctgtctgggtgtcccgcacacatgtggctctgaagggaaggacccattccttgaagtcagttcaccccacagcctctgtgatgccttccctcatcttccaacttctgcatgcccgtagctctctagttacatcctggacactgggattaggtcatctgccttgattactcccagtcccattagactagatgcctgtagaaggcagggtcctggcaaaatatcaatgtattcaatttcttttatttttttgagacagacttgccctgtcccccaagctggagtgcagtggtgagatcatagctcaccgcagcctcaaagtcctgagttcaagcaatcctcttgcctcagcctcccaacgtgctagcatctcaggcgtgagccactgcacctggcccgaaaccaagctttctcatcccaagcgccaacctttatcaagtctagcctagtcctctatcgtctcctaagtgtccctcatgagtgatcacttcacattcctcccacatggagagctcacccactggggcctatttttcccattggaaaagtgtggttattggaagtttcctctttttagaaagaacaggattggaggtgctctctggggtgtcctcctaccaagcagcctgttgaaggcctcgtggtgctcagggagcacgagcgacactcgccgtcgcttcagcttcatcttgaggccacacagcatctccgccacccagatctcctcaggctcaggggcgagcaccttccgtggctcctcctccaacgactcctcagattcgtcccaccactccatcttccttttccagcaaaaggacctatgcggggggctgggatctaccccaggggctgagtaaagaaaccaggccaccgtgtaatgcttctgcatctgatcaccttagaccccgacccaaaaccccaaaccactctccatcctccccagcctcgcagactgctggcttctccaagccatctttccttctgtctgtctcctctgctgagctccatgtgccgctccttctcctccccattctcccgtttctctgtcctcagaacacttcctcatatccttccctggtcctgcctgagatgggatcctcagaacaccatca

SEQ ID NO: 493772 - DNA, 1501 bp, Homo sapiens
  misc_feature (59)..(59): n is a, c, g, or t
  misc_feature (61)..(61): n is a, c, g, or t
  misc_feature (65)..(65): n is a, c, g, or t
  misc_feature (67)..(67): n is a, c, g, or t
  misc_feature (69)..(71): n is a, c, g, or t
  misc_feature (75)..(75): n is a, c, g, or t
  misc_feature (86)..(86): n is a, c, g, or t
  misc_feature (326)..(326): n is a, c, g, or t
  misc_feature (1485)..(1485): n is a, c, g, or t
  misc_feature (1491)..(1491): n is a, c, g, or t
  misc_feature (1497)..(1499): n is a, c, g, or t
tttttcgggtgccctttccacatcaaccacaaacgccatcgacctcctctgggttcccntnacanangnnncagntcgtccccctngcatcactcgaatcactgtcaaatgctccctgctggggtttcctggagtctctccccaagccagggggcttcctagtgcagcctgaacatctttccaaagcacgacaacctcactgcccacctgaacaacttccttagctgatgcctttctctatcgaggccagggtccacagtgtcaattctaccctctctacaatctctacaagcacactggctcgccatcttggtatttcctggctnggcttcactgctccttccaaatgccctccactcgactttgtgtttgtgttttctgtctgggtgtcccgcacacatgtggctctgaagggaaggacccattccttgaagtcagttcaccccacagcctctgtgatgccttccctcatcttccaacttctgcatgcccgtagctctctagttacatcctggacactgggattaggtcatctgccttgattactcccagtcccattagactagatgcctgtagaaggcagggtcctggcaaaatatcaatgtattcaatttcttttatttttttgagacagacttgccctgtcccccaagctggagtgcagtggtgagatcatagctcaccgcagcctcaaagtcctgagttcaagcaatcctcttgcctcagcctcccaacgtgctagcatctcaggcgtgagccactgcacctggcccgaaaccaagctttctcatcccaagcgccaacctttatcaagtctagcctagtcctctatcgtctcctaagtgtccctcatgagtgatcacttcacattcctcccacatggagagctcacccactggggcctatttttcccattggaaaagtgtggttattggaagtttcctctttttagaaagaacaggattggaggtgctctctggggtgtcctcctaccaagcagcctgttgaaggcctcgtggtgctcagggagcacgagcgacactcgccgtcgcttcagcttcatcttgaggccacacagcatctacccaggtctcctcaggctcaggggcgagctccttctccggctcctcctcagattcatctgaccactccctcttccttttccagccaagggacctacatggggggctgggatctaccccaggggctgagtaaagaaaccaggccaccgtgtaatgcttctgcatctgatcaccttagaccccgacccaaaaccccaaaccactctccatcctccccagcctcgcagactgctggcttctccaagccatctttctgattttctcctctgctcaaccccatgtgccactccttcccctccccattcttccctctctctgtcctcagaacactgcctcatatccttccctggtccctggctctctgagtccctccttttttgttttgttttgttttgacagagcnagaccntgcttnnnca

SEQ ID NO: 493773 - DNA, 1342 bp, Homo sapiens
  misc_feature (59)..(59): n is a, c, g, or t
  misc_feature (61)..(61): n is a, c, g, or t
  misc_feature (65)..(65): n is a, c, g, or t
  misc_feature (67)..(67): n is a, c, g, or t
  misc_feature (69)..(71): n is a, c, g, or t
  misc_feature (75)..(75): n is a, c, g, or t
  misc_feature (86)..(86): n is a, c, g, or t
  misc_feature (326)..(326): n is a, c, g, or t
  misc_feature (1099)..(1099): n is a, c, g, or t
tttttcgggtgccctttccacatcaaccacaaacgccatcgacctcctctgggttcccntnacanangnnncagntcgtccccctngcatcactcgaatcactgtcaaatgctccctgctggggtttcctggagtctctccccaagccagggggcttcctagtgcagcctgaacatctttccaaagcacgacaacctcactgcccacctgaacaacttccttagctgatgcctttctctatcgaggccagggtccacagtgtcaattctaccctctctacaatctctacaagcacactggctcgccatcttggtatttcctggctnggcttcactgctccttccaaatgccctccactcgactttgtgtttgtgttttctgtctgggtgtcccgcacacatgtggctctgaagggaaggacccattccttgaagtcagttcaccccacagcctctgtgatgccttccctcatcttccaacttctgcatgcccgtagctctctagttacatcctggacactgggattaggtcatctgccttgattactcccagtcccattagactagatgcctgtagaaggcagggtcctggcaaaatatcaatgtattcaatttcttttatttttttgagacagacttgccctgtcccccaagctggagtgcagtggtgagatcatagctcaccgcagcctcaaagtcctgagttcaagcaatcctcttgcctcagcctcccaacgtgctagcatctcaggcgtgagccactgcacctggcccgaaaccaagctttctcatcccaagcgccaacctttatcaagtctagcctagtcctctatcgtctcctaagtgtccctcatgagtgatcacttctgagtcctcctgcgtggagagctcagccactgggggcgtatctttcccattggaaaagtgtggttattggaagtttcctctttttagaaagaacaggattggaggtgctctctggggtgtcctcctaccaagctgactgttgaagtccttgtggtgctcagggaggatgggtgacactcgctgttgcttcagcttcatcttgagcccacacagcatctccactacccaggagncggtggttgtagtgagctaggatcatgccattgcagtccagcctggacagcaaagctagactccatctcaaaaaaaaaagaaaagaaaaagtaaaaaatttaaaaattagatgggcatggtgacatgtgcctgtaatcccaggtactaaggaagctgaggtaggaggatgacttgagcctaggagttcgaggctgcagtgagctctgatcgcaccactgcactccagcctgagtgacacagca

SEQ ID NO: 493774 - DNA, 439 bp, Homo sapiens
  misc_feature (423)..(423): n is a, c, g, or t
  misc_feature (429)..(429): n is a, c, g, or t
  misc_feature (435)..(437): n is a, c, g, or t
ggtgtggtgatctagaggatccatctcaggcaggacgagcacttccgtggctcctcctccaacgactcctcagattcgtcccaccactccatcttccttttccagcaaaaggacctatgcggggggctgggatctaccccaggggctgagtaaagaaaccaggccaccgtgtaatgcttctgcatctgatcaccttagaccccgacccaaaaccccaaaccactctccatcctccccagcctcgcagactgctggcttctccaagccatctttctgattttctcctctgctcaaccccatgtgccactccttcccctccccattcttccctctctctgtcctcagaacactgcctcatatccttccctggtccctggctctctgagtccctccttttttgttttgttttgttttgacagagcnagaccntgcttnnnca

SEQ ID NO: 493775 - DNA, 107 bp, Homo sapiens
tatgaaagagaaaattttttgccccacgtggtttttatgatttttttttgtatgggagtatcacaccggttggtttgtatacaaattccttttttgccctttatttt

SEQ ID NO: 493776 - DNA, 243 bp, Homo sapiens
ggggggtgcccccccccccccccccgggggtttttttgggggggggggggtttttttttgggggccccccggccccccccccgccctttgggaaggggggcctcccccggttttttgccccccggggggttttttcccccccccccccgaaggggaattggggggcttttttttttttttgggggccccggggggtttttttttccgggggggtttttttgggggaaaaaattttttttttta

SEQ ID NO: 493777 - DNA, 874 bp, Homo sapiens
  misc_feature (20)..(20): n is a, c, g, or t
  misc_feature (22)..(22): n is a, c, g, or t
  misc_feature (27)..(27): n is a, c, g, or t
  misc_feature (177)..(177): n is a, c, g, or t
  misc_feature (226)..(226): n is a, c, g, or t
  misc_feature (337)..(337): n is a, c, g, or t
  misc_feature (349)..(349): n is a, c, g, or t
tttgtttcttggattggggngngggtnctggccaagaactcagtcatttttctgtgtaccaggttgcctaaatcatgtgcagatggttctaaaaaaaaaaaaaaaaaaaaaaaagaggaaaaaaaaaaaaaaaaaaaaacggtgtgcttttggtttaaggggccagaaaccttggtncgtggtgacagttttagcaccgtgccctcagttaaaggggtttaatttngtggtttaacccttagaacgttgccaaccaaagagtttttacccacagttctgccacttggcagaaagaagagaaaaaatttcaaaccccacatgtgttttattttttttntgggcctacccncattgggtctctaaaagtgccatctgtggaagagaggggtgacatttctaacgcatctagaaatatgtgttttttgtggggggaaagaaaacacccctttttaaggtgtctttctacctgtttataaacctcttatagatttccccgaaacaaagcgaccaccagatatttgtgacaacgtcttgggcaacattttcctatattgtggcgcgcccagaagtttcgacgccggggggccccaaaagaaaaatgcttgtgcccccctgtgatagagacaggttggggcaaaatattagcgccttataaaaggggcggtagtaagtcgccaggttgtaacactctttaccagaggtttttaagagaaccccaaaagaatgtcgtcctcttggctttttttcacccaagaaatttctcccccccattttaagaggggtgtggagagtgggcgcaccaactggtggaggcccccgtttgaaccccagaggacgtcccctgtggggctcccagagttgtaaaagggggtta

SEQ ID NO: 493778 - DNA, 1005 bp, Homo sapiens
  misc_feature (787)..(788): n is a, c, g, or t
gaaatcgttgcctatgacattgatgagccaaggatctgactactcactcggtgaactgctgtgtgtctgtgccaacctctgtactgatgtccaattgcaatgtagtgatggtcactatagagtgatctaatgcgtcgtgcatcgaaatgatagactatagtcacctcgatggtcattgtacatgtgctcaatagctcggccgagaccgaaggaccatagaagcccgtgagtctccgacgatacgaggcatcttccgttgaccttgagtgcaccctgaaggaaacctgtgagggctttgatcgagtagtccgttgttctagcacgatgagtactcgatcaagcactatgcacgacgtgagtgatgcgacctcagggcttccacttttgagagaatccatgcaaagcttagaaagaccttgttgcgagaacaggttcgcagccaacggagatcccaggatatcgatgcagctcacgcagagttagacacgcttgagagcttcaatcacacatgactactacgtgactctcttgtgggcactttactaacttctgtgtccagaacggctctacaagcactccttccaattaaaacgtctctatcgtggaaagcgaaatgaaccagtgaaaaccaagacccggacctttaatacaagtacaggcggtttgcttctgcctagcgataccaagaggtctcagatctatgggagtcgtcagattatactggagaaagaggaaacagaagagctaaaacggtttggtgatccaggtttgatgctcatgggtttcnncatgccgattggtgactcgtaaaagaagagcaccattaaccttgaaggccctcccctgatacgatgtaccccagaatggaagttcggtgggttaatatgcggaagcttcaagcccttgttacagttgcgtctggttcattccatgtgttctcggaaaacggacagttacagcaattgtagcaagatacaacacccccgtaggaagcattccttcata

SEQ ID NO: 493779 - DNA, 862 bp, Homo sapiens
atcagtttatttatattatttttaataaacatgattttatgttatagtgctgtataatatagacaagtctcattataatatagaataaagggattcaatttctgctaagaatattaaaaatactttctaaattaagtgcacccaatacctagtgcatcccagtagattagaaagcaaaagattctaataggaatatagatagatttctaaatacctagtaattagcgtggggactttcaacacccccatctctcagcactggaccagatcatctagacagaaattcatcacagataacattggatctaactacactttagcaccgtatagacctaatagacatttacagaacttttcatctaatagctgcagaacatacattcttctcatcagcacaggaaagattctcccaggatagatcatatcttaggccacaaaacaaattttaagaaatggaaatcatatcaagtatcttctcagacccacaatggaataaaactagaaatcaataacaagtgaaatttggaaattgtacaaatacatggaaattaaacaatatactcctgaatgaccactgggtcaatgaagaaattaagaaggaaataaaaaaattcttgaaacaaatgaaaaggggaacacaacataccaaaacctgtgggatacagcaaaagcagtgctaagagggatgtttataacagtaaacacttacatcaaaaaagtaggaagatttcaaataaacagccaaatgatatatctcaaggaattagaaaagtcaagaacaaatcaaagccaaaattagtagaaggaaataaatatcagtgcagaattaaaggaataaagataaccacaggacaagaccatg

SEQ ID NO: 493780 - DNA, 153 bp, Homo sapiens
ctacggaccctacatggctggctgcacatggcctcgcttttagcctatttgttttcaacatgcttttttcactaagcttaatcctttctagcttttaatttaaggtgaaagatgtgtgactcttccttctacttcaacactgtggaaactatt

SEQ ID NO: 493781 - DNA, 314 bp, Homo sapiens
cattaggctcacctgtgggaatcaaaagtgttagcttgcttcacggaacacttgcagcacttgtccaactggtccccaccgaacctctcattcttgattcagaggcactgctcccagcatccaaagcagcagtccagcatttggccattttgtttgggctgtgcatccagtgtcacacgcatcttttccactcattgcagtcccatgtgtccccagcaccagccagtgtgccccacccaaagtccaattgtagcaaagtcttgtcatcagctcatctctgccaccactccattgcagtgccagtccacttcttg

SEQ ID NO: 493782 - DNA, 808 bp, Homo sapiens
  misc_feature (100)..(100): n is a, c, g, or t
  misc_feature (325)..(325): n is a, c, g, or t
  misc_feature (590)..(591): n is a, c, g, or t
aaagactaggctaggtacgaggcgggtggaatcggccgaggcgagatacagggcatctttccctttgaaactttggaattgccacccttggaaaggaaanaccctgggggctttgacatatccttgttctacagagatatcatcagcatagcagaggatgaggactcaggttcactttgaggaatccagcagctagaagacctgttgcggaaggttcgcgcaaggagaccaggaagcgagcactcagcaggttaaagctgaagctcaacaaagatatagtgatctctgtgggcatttataatctggtccagaaggctctcaaggncccttccccttccccccaaaaaatttaaaaaaaaaggggcccttttcccttaaaatttcccgggggggcgggaaaaaaaaaccccaaaaaaatgaaccagtgaaaaccaagacccggacctttaatacaagtacaggcggtttgcttctgcctagcgataccaagaggtctcagatctatgggagtcgtcagattatactggagaaagaggaaacagaagagctaaaacggtttggtgatccaggtttgatgctcatgggtttcnncatgccgattggtgactcgtaaaagaagagcaccattaaccttgaaggccctcccctgatacgatgtaccccagaatggaagttcggtgggttaatatgcggaagcttcaagcccttgttacagttgcgtctggttcattccatgtgttctcggaaaacggacagttacagcaattgtagcaagatacaacacccccgtaggaagcattccttcata

SEQ ID NO: 493783 - DNA, 301 bp, Homo sapiens
tgctaacaaagacttttttttatactttttaatattatgctacagaagatttttctagacccagagcagtggctcacacctgtaatcccagcacttgggaggccgaggcaggcagatcacttgaggtcggcagttcgagaccagcctggctaatgtggtgaaaccccaactctactaaaagcacaaaaaattagccgggtgtgttggtgcatgcctgtaatcccagctactcaggaggctgaggcagaagaattgtttgaacccagaaggcagaggttacagtgagctgagatcacaccac

SEQ ID NO: 493784 - DNA, 253 bp, Homo sapiens
cgagcttggttctttccgtatggtagcttggttctttccgtatgacaaaaactagcccccatctcaatcatataccaaatctctccatcactaagcgcatgctactatctcactctctagcaacggaaccaagctaccggctacgcgagctcgaacacggacttaggggcatagcggtgtcctgaggcagaacgagggcctgtgactaggctgactgccgcctactgagcttcaacggctacatagttccctg

SEQ ID NO: 493785 - DNA, 999 bp, Homo sapiens
  misc_feature (425)..(425): n is a, c, g, or t
gccctcctggtcccctgcctctactgcctggcgcctgcggttcctcctggccccaatggcacctgctgcatggcgcctgctggtccctcgctgaccgctgtggcacctgctgcctgaccccttgctggcctgtgggccatgccctgtgtcactagtggccatgccctggtatgggcatcctacatgacagctgcagcctggcccctgtggtcgctgctagcccatgtgccagctggtaccatgcccccgcgtgcactcctcaccctccgagcactgccgactggcccgccatgcttcctcccatgtgacatgtgcttgcctgccccctggtgggccttcctatgcccctgtgtcatgtactgtgccatgcccctgaatggtccctgctagggccagggcccatgcctgccccctgtgcggtcgcntgcattgctgccccatggcatgccccagcgggttacgtcgcgaatgccccatgatgcagccctggcccacgtcactgccttcacctcctgtggccctgggacgtgctgaggcagccagaatggcagctgctcatgggccctggagcagcccttgaccaacccaatggcggctgctcataggtgcccatgatgcatgccctgcccagccccttgcatggctgatcatgggccccaacaatgcccgtgaaaaaccccagacctggttgatccccattcccgaatcgcccttcaatcctggggcatgcagggcccgacctgtctggactctcctgggcgccgttgcagccaaactgctggtgagccctattgatctggtgcgcgcccgtcagccccggtctcgtcctggcctgggcaatcctgcaggccccttgcgcgtccggtggacctgatctgtgccctgggatggccgtcagggcccatctgttgcgccttggatcttatgcttgcaggcactccccatatgggtttcacgccctccagtgtgattgacctgaaggcccagggcaggcggttc

SEQ ID NO: 493786 - DNA, 383 bp, Homo sapiens
cttttgacaactcagtgtgagtttagctttattggggagggggtgatctaaaacactctttacgccggcacacagaccccaacatcgacacccatcaccaccatcactactgtgaccccaaccccaacacccaccggcacacagaccccaaccacgacacccatcatcaccaccagcatggtgaccccaatcccaagcacccactggcacatcaggccctaacctcaatagtcatcatcaacaccagtatggtgacctcaagccccaacacccatcggcacacagaccccaacaacgacactcatcatcaccaacagcatggtgaccgcagccccaacacgccactcggcacacggaccccgagacctcgaccctttgcatcc

SEQ ID NO: 493787 - DNA, 1124 bp, Homo sapiens
ccgaaaggttagtctcatttagaaaaatcgaaagtgcacagccacttcaacagggcaatcatcatgcaggtttttatttctttccaacacacacacacacactttgcatttcattcattcggtcagtcatcattggtctagcacacatggtagtcagcgccagatttgtttcttcattttcaatggtgtccccaatctttgcaacatcattaaaagtgttatcaccatcttgggtggctaagtggttatgtgggaacacgaacatcgtgattgtgcactttcattatcagattatactataatgtgcaaatttatatttgtggcccgtggcatgggtattagagggtgcatcagagtccttcaagcgcaggccataataatcttcataattatcatggtcatcgtgaggcgtcatacataacgcacgcatcatcatagtcgtggtagtccgtccatagtcaatcaatggtcaacccatactatcacaatcataatcatcgcagtggttatacatctctacacattgtcatcacaaacaacgatccatataatcgaacagtggtctccatcaacatttgtgcacctcatctccatgagggcccacaggctatctcaccatcttccagtcacaatcacaacagccggttaacacatatatacagagagtgacactttacacctgtgggaacccctttaatttccggtgggtcgaacaaacaacgaaactacacatttcacataagtgctccacacaacgcgcaccttatcaaacaggttgtggacatattatattactcagcgacacacatgcgcagacatcacctctatttcgggctgacaacccctaagagaacatgtgggaacacaaaaagtcgcagggaatactacgggacgcaacaaccacacagcgcgtttagagccgcatcccgaacaagacacaaaaaacacacatcggaggctcgataaaacgataacacaaaacaacccatagggcaaactatcaccgcaaaactgggtccccaacggcgagcactaacgcagtagagctacaccaagagcttatgaaaccagtgtacgccgaaggaccacagcaccaaccggacccctaaaaacaagcgcgaaat

SEQ ID NO: 493788 - DNA, 125 bp, Homo sapiens
gctcggtccttctacagcaagacgaacagtctggggttcttctgtgcccccagtggttatgcatggcaccctctctgggccagcacagccttgtgctgggggcatgactagaggaggggattccg

SEQ ID NO: 493789 - DNA, 222 bp, Homo sapiens
ctgaagcactgggctctgtggtttattggcgtctgattcctatggcaccaggagaggctggaaaagtaaagagggtgttgatggagacgatgggtgatagggaagaggcataggcctgacagttcacccaagagcagcagcttggagcacttgcacatggcacacacattgacatacacaaagttgcctagttttcccaagtgcttcaagagtcctcccatg

SEQ ID NO: 493790 - DNA, 958 bp, Homo sapiens
  misc_feature (72)..(72): n is a, c, g, or t
  misc_feature (102)..(102): n is a, c, g, or t
  misc_feature (105)..(105): n is a, c, g, or t
  misc_feature (284)..(284): n is a, c, g, or t
  misc_feature (598)..(598): n is a, c, g, or t
  misc_feature (926)..(926): n is a, c, g, or t
aggtaaaggccgaggggcaaagaaaaggaaagcatctggctctgaaaatgaaggcgatcataaccctggcangaaaacagccagagagcgggcaagaaaccnaanaaaacatcttttgatcaggattcagatgtggacatcttcccctcagacttccctactgagccaccttctctgccacgaaccggtcgggctaggaaagaagtagaatattttgcaaagtctgatgaagaagagggtgaggttgattttgcgatggttaattaagtgcccaaagagcacanacatttttcaacaaatatcttggggtggccttttggcttctctggctcagacttttggacatctggcttattttaatgtgatgatggaattgacgggtttttattattgtggtaggccttttacattgtggtcttacacatacagttgtatggctcttttttactcattgaaatgggacgtactgggctgatggggttcgacaatttgttatgggactgggcggcattagcacagattgttagtggtcatggggacaaactacggaccctggttttgtggatggaagttgaaccatgagagagggggaaaaaanaaacaatggcctcgtttgccctcaacggggggagctttggcggccggttccctttaaggggggggaaatgcaggagccccggttccttgagtccctcggctcggtcgttcgtgtgggggggacggggtccactccatggaagggcgggatccggctgtccgcagatatacgggggtggcgccgagaaggaggtgtgagccaaggggcggcagggggcgggaacgggaaagggcgggtgtgctggggttttcatgagcggcgggccgcgggggaggtcaaaatgtacgctgtaatgcctgggcgcgaggccgcgcggctagaggaaacnggccgcgtccctcggagcgagaggaggtcttg

SEQ ID NO: 493791 - DNA, 1095 bp, Homo sapiens
taaggtaaaatcttttttttccaaaaaaaaaaacaccccaaaaaaccaaagtgtttcccaacccaccacagggagagggagatatggggataggggggagggtgtctggtccatccagcctgtgccccacagcccatgttggtgtttgggcagcaaataaggggtgtatggggtgtattggcgcccaaaaatataaatggggttggtggtgtcgtcatgggcgagaggagaacgcggggtgggacaacagctgtgtgggagagaccccggttagaaggggagacaggggccacagccagagggtccacgaccggggggacaccgccagaagggtgggcgagcgccattcacaaacactattcctcggtggagatcaaaaccacacgcgggtggaaaccccctattctttgtgggggcccaaatcagcagcggaggacactaatgagcggctctgtgtggcaagagctactctggggtgcgacacagagtgtgccacattttgtgagagagggtgggggggggcgcccccccaacacgcggggtgtgacctcctgtagtgtggaatcaccagaaagatactccgcggtgcgtcacaaaatagttctccccccgaaatatgcgtcgtggcgacaagaagagtagttgagagtactcccggcgggaataatacaccgcgcggagagaacagtatatgtgtcgtgggggcccccccccccaagtagttgtgttttcgagcgcaccacataatatcacgcgggggttacaaacagactcgtgtgtgaaagcggcggggatatcattgtgtggggccacaaacacacgggggaggagaccaccccacaagccgctcgtcaaaaggcaggtggggcggcgagcatagatcgctgttttgagcgacacagaaaccaggggtgtattaccccccccgggggaggagaaccagctgggggtgtggcccccccaaaaaaacgcggagagcggtgggcaagaaacatccccctgtgttgatgatacgcccccccacaacgaagaaatgttggcgccacgcgggaggccatccactatgaagcacagaagggtgagcctcccccaggg

SEQ ID NO: 493792 - DNA, 270 bp, Homo sapiens
atttgtagacggggtcatcactctggcacccaggctagagtacagtggcacaataatggctcactataacctacacctcccacattcaagtgatcctccagcctcagcctcccgagttgctgggaccacaagctattcacctatgtttaggttgactcttctgctctctcccttctgctgataagcccgttcagtgaattttttatttctgttcttgtgtttttcagttctagaatttccatttgattgttcttttatgatttgtttctt

SEQ ID NO: 493793 - DNA, 310 bp, Homo sapiens
acagatcatactggagagctgccacaaccagaacattctggagtaccatccatcatccaaatggaaacatcacagagctcctcctgaaggaaggtaacgcacgctgtgtggactggtcgattgcagtatacacccggggcgcagaaaagctgagggcggcagagaggtaagccaaagagcgcagactgagaatatggagagactatatggctcccacagctaatatggaccaaaaggacaaacagtaagacgccaaggtgatgcaggatcagaatgctgatgccatagttgtgaagcagaactcaggcga

SEQ ID NO: 493794 - DNA, 1243 bp, Homo sapiens
gcgtaatctactctaccatctattgcaggcacactcatcacagcgctaagctcgcactgatttattacctgagataggcctagtaaataaacatgctagactttatattacagtgtctacgcgcgaaagagaaataagaccctacgttccacagtaagctgccagtcaagctatttcctcgacacacagcgaagccgcagtccataagtcctgtctaagtagcgtatccgtcttcaacaagtatagctctccggcacaatgaagccataacgcaatactacctaatctaatacgtcatcgagttaataatcataatggcgtatagcaataaaactaggaatagccgccctattcacttctgagtcccagaaggcttaccgcaaggtcaccccgtctgacgatccggacctgcgttcttcatcacatgacaaagaactaggacaccgcatctcgaagtcatatagcacaaatactctcccgtacgactaaagagtcaggccgttctcgcgtcacaaatcgtctagcaagtcgttaatcctagtccatagcaagggcagatatgaggatggaagttgaggacgacgaaaaccctaactacggcacaaagtcgttagcatactcgctcacattacccaacagtcaggatcgccgtcatacggcagggactaaccagtagcaaccccctaagacatagagcccgatgctggaagtgtaaccgtatggataataatgccttaagttaactacccggtattgcagtaacttgactccagctttaaaactcccagaaacccacgaagccggaactacttatcatcggcagccagacaaacaaggctaccatgacgtaaaaccccattaagttcacgtgcacgcatcaaatatgcaataagagggccatgccccgggacaagcgggctgattagcccataaggtgacccgatcggaggaagtacaccaacaacagaaaaggctgaaagtctgcagtaaaatgcatagacacagagacggtcctgtaagtctaatctaccgtgtcctaatgtaagaatgtaagataagattagtccgatgttaaccgttaaacgaaacggaggctgcgaggaaagacagccaagactcccacagatgtacgatccggcgtgcacattccccgttagaactgtgacccaatcgttgtcacacaacaagcggcaatagatgtattgtgggtaagggaaagggataaggacggatgagcgacgtg

SEQ ID NO: 493795 - DNA, 89 bp, Homo sapiens
tttgctggtgcagtacaactaggcttaatagggacatgcaatacactcgtgtaaaaacctggacacgcaccacttgaatctaaaaaaaa

SEQ ID NO: 493796 - DNA, 956 bp, Homo sapiens
cagggggccttcagagttcccgggaacacccttcccagtgcccctccgagcagatgctgacagactcccatgccccctgcatatcactccgctaggcctgctgcttcctcattcgtgtactgcctcactctcaggctggatcgtcagggtacacagaagctggtcactgaaagcagacaagcggcatgcccctggcgactatcagaaccgtcgtatcctctaacacattgtgtggtgtgcttctgacatctaggtctgcatgctgtgcggcggctctggcccaggcctcctggaaggttatctcagagatgtggacagcactcgttggtgcatgagtccaggcactaaatgtgactgctcatgtctgctgtcatgaagcatggcaggagcatcacacaggcctcatatcgatggtgatcctgctcgacatgagttgggtcaaacagccgttgctcatcaagcagatcctagcataccgagggtggcaagcgtcactaagacggccctatcttaccatgggccacaattgcatcactagggaccatgggcccaatgacgccatggttaacataactggggacacgcacggcgtaagttcaccatggaacaaggattaccaaagcacctgggaaagtacccagagcaacacccgtgggaagcatacggggcgagcaaacccaaaaccagaattccacccaattcccaaaggggccgatacactaccccatcgtgcccaaaccaagcgcagcccccgtggacacaccaagggtggccctaggtcggaagaacaccaaggctggcgaccacaggatgccagaggacacgacccgacgggcgaaaaggaccagcgtggaacgggaccgggaagggaactaggcacgcgggggtaacccccccgtcgaggacagacaggccagcaacagcggaacgcgacagatgagcaatagccgcgacaa

SEQ ID NO: 493797 - DNA, 144 bp, Homo sapiens
gttgttggtctggcgtaacacgaactttattgttggagccacttgaaccatttccagaacgcgttctagaatttattgctgttgttttcatcaaatgtgtcaacaatcatatcgtaatggaagcgaccatcataagctggcttt

SEQ ID NO: 493798 - DNA, 326 bp, Homo sapiens
ctgagcgctgtggctcatgcctgtaatcccagcactttgggaggccgatgcaggtggatcataaggtcaagagatcgagaccatcctggataacatggtgaaaccccgtgtctactatacaaacaattagccaggcgtggtgttggcaggtgcctgtagtcccagctaccggggaggctgaggcaggagaatggtgtaaacccgggaggcagagcttgcagtgagctgagattgtgccactgcactccagcctgagtgacagcacgagactccctctcacgactcgagcgcttatgcatgcgcccgcatttcgagctcctggcccc

SEQ ID NO: 493799 - DNA, 462 bp, Homo sapiens
tgtggcgacgggggtctcaaaaaggagagggattagatattacgggacaccatatccgagttataagcaagatatttataactggaactactcaaaaagggaatgggtatatagcatgcagggacgagctttctgccacgggaaatatggcagcagatgggatgacaaccggtctggagttttctgatgagcagccttacagcaggacagaagctggactggctaactctaaagaccttacctgtattaaagtatccatggtcctggccttcaagagctgtaccgttcacttagaggaaaatatccctacacataaaacagagaacaccatagggtggtgagactgcatggaaagaactacaggagatctggacccagggcagtggctcacgcctgtaatcccagcagtgtgggaggccaagctgggcagatcacaaggtcaggagttccagaccaggctga

SEQ ID NO: 493800 - DNA, 890 bp, Homo sapiens
tgtcgcgggcggtttgtggggcattgtgcgtcccgggggtgtggccccgtcgtgtgggggtctctcgcattgcgcgtgtggcgggacaatctcggggttagagggtcacaccccacgggtttgaagtttatcttgggtcgaagggaaagtggtcaacgcgggtgggttggtagcccccttcccgcggggcgaaattgccctccggcgcctgggggtctctccaagtgttaggagagggtgttaccccggggtgcaggttggggaagtctcgggcattccagcacgtccaagtgcacgactggggacccacggtcattcctgggggacgccccagtttttggctctgctgatgcggaacagagacccccgggggggggacggtgcccgccgtatccccccggattcgttgaacagggtggccgcctaagcttcggcccaatgatagaagtcttgtgcccagatctcacttttaactaatgcggctcacacaggtcccaaaaggtattttttccccccggagttctcaccaaaggacactccattccacacgcgtcagcactctctacccgaagtatcttcatccaaacatcttgggtatgtcttgcttaaggctccctaaacaataaagtggtttctcccttaactagccccgcataatcatagacgtctcttgcgccccaattctctagtccgggtgaggcaattctaaacccaatttctggttaacttcaataaacaatatccttctcatagcaaaacatagctttcatggaagtagatgaatatcccagcaaatgtgtcccaatttcaataacagtcttattatacaaaaagaacgcatgggtacgactcaccccaatatgtataaatcaccagcgccttttaatcca

SEQ ID NO: 493801 - DNA, 318 bp, Homo sapiens
  misc_feature (9)..(9): n is a, c, g, or t
tcactgccncgacggctctctttgtggactcagtccacttgcacccagtgaaataaacaaccttgtggctcacacaaagcctgttggtggactctcctcacatggacatacgtaacagttgggagttcaagaccagcctgaccaacatggcgaaaccccgtctactaaaaatacaaaaattagccggacgaggtggcatatacctataatcccatctactcaggagggtgaggcaggagaatcacttgaacccttgaacctgcagccaagatcgtgccactgcactccagcctgggtgaaagagcaagactctgtctc

SEQ ID NO: 493802 - DNA, 330 bp, Homo sapiens
cgagttctgaaatgtgtatgattcggtttcagaactgtatctttggccggggtgcggtggcacacgcctgtaatcccagcgactttgggaggctcgaggcgggcggatcagctgaggtcaggaatttgagaccagcctggccaacatggtgaaacctcatctctactaaaaatacgaaaattagtcgggcgtggtagcaggcgcctgtaattccagctacttgggaggcagaggcaggagaattgcttgaacctgggaggtggagattgcagtgagctgagattgtgccattgcacttcagcctggggaacaagagcaagactttgtctc

SEQ ID NO: 493803 - DNA, 132 bp, Homo sapiens
gtgcctatagtcccaactacttagaggaggatcgcttgatctcaggaggttgaggctgcagtgaattatgattgtggcattgcactccagcctgggtggtagatcaaggctttgtttcatttgaaaaaaaag

SEQ ID NO: 493804 - DNA, 154 bp, Homo sapiens
tgtacttctggtccacgtaaaagcaggaagctagtgcagccaggcaagctcatgctgggtcggaagagctggtcaaagggacttgggtattcactacttacccactgaggtctaaccctggaaatacttaagagttggttgaataccacctttg

SEQ ID NO: 493805 - DNA, 649 bp, Homo sapiens
  misc_feature (49)..(49): n is a, c, g, or t
accctgaggatccccatgccaataacctccctttactcacacatttttntttagtaggtttagcccctttactgagggagattggtgcatcacctctcacactgctggctccctggatctctgtatattttcctcttccatctttcttcctctcaatctactcacccttcctacccaggaagaggcacaaattcctcatcctcagcagagagatttggtggtcctcttttgggaattccccttacacctcaagtatgtcattacgatgaacattgtatttcccggcgggccattctaaccctgtgctgtgaccaaggagccagcttgctccctctgtccctcagccaccctcggcacggtatcagtgccccgcctgctggcttctttgctacaggatagcaatagcacttctcacatcacatgcagacacaacaataattagaggaagagacatctggctttttcttgttttttgcttttttttttgagaaggaaaaaatattttccgagaaatttctcaactcacacctttcaaaggacattggctaatgctgtgtcacatgcctgtgcttaaaccagtcacctgccaggggacaggaccgtgaggattggtttactcagactaaacttggttctttgggcctaaaat

SEQ ID NO: 493806 - DNA, 141 bp, Homo sapiens
ctatcggtgtatcgtgcagggcacccgcagtttgcaggtactgtcactactcagactggtgacagcctctgggacaggccttcgggaaggccctgaggccttgaaaacatctcctgggtcccaggacttgaacggctctgg

SEQ ID NO: 493807 - DNA, 282 bp, Homo sapiens
gtaaatccctacacatttgggaggcccaagagggtggatcacaccgaggtccagaggtccagacccgcctggccaacaacgggaaaccgtggtctctactaaaatacacgcacttaccccgcgtcgtggtggttgggcaccctataatcctagctactcaaggaggctcgatggcacggacgagagctgcttgaaaccccgggggccgaggctgccgtgacccccaaatcataccccttcactccaaccaaccccccctgggtgaaaaaagaaaatctgttc

SEQ ID NO: 493808 - DNA, 344 bp, Homo sapiens
cctctgaattccacacgcatatagaatcctccacgtcctctatggccaccacctctgtaggagggttctagcaaatcttatgttatagcttttcttggagccagtgttctgttacttttctggtggaagagcctttttgctttcttccttatatggctccaagagtttttgggcttcttccttccgaagttcaacataggttattggatcaaagcactcagctacctctgggagggtcacgtttcctttcattttgaggaccgcagtgtactggtaggtctttcccctctacttctgcttatcttcgtgtgtgcttcgcttatagtcttcatcttttgggcaaa

SEQ ID NO: 493809 - DNA, 345 bp, Homo sapiens
ggccctgcttactgggcgtatgcctcccaaagtgctgagattacaggtatgagccactgcacctggcctgtctcttcactttcctgatggtgtcctttgaaggacaccaaatgtttccagttttgatccagtcctgttgatcatgtctcctgttgcttgtgcttctgagtcatgctgtcctcatcctgttgcttttattccttgtgaggcgacataacaagggaacttccacatgtcctctcgcattgtaaatacataaaccatgccttccctgcagcctctgcttcttctctaacgcagaacatctctctagaaacaaagtattccagatttcccatacgccca

SEQ ID NO: 493810 - DNA, 217 bp, Homo sapiens
  misc_feature (83)..(83): n is a, c, g, or t
cgccgtcgagcgctctcccgatcgatgcgaatggcgcgcagctcagtgcgtacgcacgatcgaagcggcgacccggaatctcntcttgtaggcgcgcctgatggtcgccgaaagggcgtgcctgaaagcgcagatagaggcgtcgtagctgacctaggggggccggtgagcgcgaggtcaatctgtgtagtagaatatcaagagacctgctgggacg

SEQ ID NO: 493811 - DNA, 233 bp, Homo sapiens
cccaagggggggggggggggggggtttcccccccggggggggtttttttttttgggggggggccccccccccgggtttttgggggttttttttttggggggggcccccccccgggggggggcccccccttctccgggggggtttttttttggggtttttttttcccccccccccggcgccccccccccccccccgggggggggggggttttttaggggtttttctttttttta

SEQ ID NO: 493812 - DNA, 234 bp, Homo sapiens
acccccgggaacccgggggcctggggggaattttaccccttcccttttttcccccccatttggcccgtaaatggggggtgggggggccccggggcccctttaaatcccttttttttttttttccccccccgttcccccggggggggaaatttttcgggggggcggtttttttcccccgggccctttttgggggggcccccccctgggggcaaattaaaaccccccaaaccccca

SEQ ID NO: 493813 - DNA, 791 bp, Homo sapiens
agcgggtggtcttgacgtgagctatctggcatggcggcctggcattgcagcggggcactggagctgcaagtgggcctaggcctggagtttccaagaccgacaggacgtctgctccctccacgcctggtcgtctgatctgccactgctaaggggtccactgcgggtggccttgatccggcagctagaagcaactgaggccttcctgagtcccggtgctgttccaagccgccggcgaaaccaggtcatcgtggacgaagcaccgacccgttggaaccggaacgcaggttcttgaagtcctgaagttcgagttcctcgaagggggaagaacagatcctctgtaatatttcaaatagaagagaagaagatatgttagaaaggagacaagtactccacattccagagttctatgttggaagtattcattcagtgttactacagctgacccatatgccagtggaaaagatcagccagtttctggggatttgcattcagagatcaggaagaggacttggagctactttcatccttaggaatgttatcgaaggacaaggtgtcgagatttgctttgaactttataatcctcgggtccaggagattcagtttctcctgcttggaacttaggttgaattactggcttgtcagcgcgttatgttctatttagatcaaatgagatacatgatattgaaagaatagagcagcattgtagtttagactatcttaggctttattgctttgaaaagaagattggcctattgtatctcacaattctggtctagattcagttatgaatg

SEQ ID NO: 493814 - DNA, 728 bp, Homo sapiens
taacgtgggtagatatggggagtaggtgcgtgcatggagggtggagtagaattgaggcgtaggtagaaagtcagaaggttaagggaggggtgcagtgggtggctatgaaggggtggggcatgatgaggctatggtttttgggtgaattcttcgaataagggcccaattggggcaaaaagccggatataggtgggggcaggccctcctagggagcaggaggggtggagtggaatataaggggtgtcagctcagtggtaagcctgggttacagggtgcgaaactagtaggtagggctcgggggtgccggaaacaaccaccttgggcccggccggaaagggccgcgccacatgtgggcactcaggctaacgcgcgaaggcgtaccagcccaagtgcccggaagtgcgcagaagaagagggtcaacaagtggcgatgcacggcaacacagtgcagcgactatgcgggcggccggcgaggtggctccagcagagaaatcgcgggcgcacactcctcagcgcacagactgggagcgggacaccggtggtcatcccaccgccgtggatacccgtgacaagggcagcacacgggggacacagggtgtcacaaacacaccagcgaagggcgagaaaccacatacgacgacggaaacaccaaccactcccaacaaaaacacctcgaaagcgccagcaacagagggccccgcacaacgaacagcactcacgtggaccgt

SEQ ID NO: 493815 - DNA, 454 bp, Homo sapiens
  misc_feature (454)..(454): n is a, c, g, or t
gcgggcgctctagagatcccaggtgcttagacctccccaggctttatgtaagaacttgcagaagtactgaggtggcaagagactggactcccgtgtaccagtgctgttttttgtcatgcgagcctgtgattcatagcttcctggggtgttggggagaatcacctttgggtaagccaggttagcactgacagtttgtctttagaatcaagcagatgtggaatcaaaatctggctgtatccatgaccagctctgaagccatgagtgggtaacatagctttagaagcctcagcatactcatctggaaagtggaagtgatcatgtctattttgcagagttgttgccacttttcctctctggaccccactttccccatctgtcagatgaaagagtgggatgagatggcctgtctatttatctctcaatcacaatggctctatttgaaaaaagtttgaan

SEQ ID NO: 493816 - DNA, 200 bp, Homo sapiens
caggatcctcacacgcgaggcacataccaaagtcgcgatcttcacgagcccggtgtcgccgatcttcagggtatacgccgataggtccaaattgtacacgccgagaggtccgtaatcgccgatcttgacgaacgcattatcgccgatcttcacgagcgcattgtcgccgatcttcacgactttggtctggttactcggcg

SEQ ID NO: 493817 - DNA, 866 bp, Homo sapiens
ggaggaggagctttgcctagcttgcagggcagcgcaggcagaccggcggcgggagaacgcaagatgaatgcaggctcagatcctgtgtcatcgtctcggcggcgcgaccatcataggttccttcaatggtgccttagctgctgtcctgtccaggacctggctccacttgtcatcaaagaagtcttgaagagggccactgttggtccggaaagatgtgtctgagggtcatctcttggacatgtcttggcagcagggttgtgggccagaatccctgtttagaaccaaagcccagttgtgcggttccaggaattcccttaactcttgttcccaaggcaattgggagctgccagaatggaatcttgtggggtacagggccataaaaaaaggctgttgtgcctttgccaagtaccagctccaattagggcaataagggaggacttccaggcattagtgtgttcccacggacgccttgcacaaattattgagcaagggttcttcactttgtggttacttgagaacccaggaggtacacggcatagcgggagaattgccacttgacttgacgaggtaattacttcctggtgaaatggtcttaacgcggattgctattcaagcaaagtggtccataattgggtattacacggttgaaacaattgtatggcaataaatatgggccaggtgacggtcgcagaagatcagggacaaggttgcacgttctggttcccagaaagaggcacagcagaattgccacggacaggctggcgcattttgacacaacgacgatttgtaccagttttggctgttcccctacaaagacggcttcattggcagttaaacagatgagttcctcgcctgggagaattgag

SEQ ID NO: 493818 - DNA, 300 bp, Homo sapiens
  misc_feature (42)..(42): n is a, c, g, or t
agagaagttctctggacgagcttatagagtgtgcaggttctngtatcctttggtcaagggtattcatatgaaacctatgtaaacctagtgcaattacggtccttcggtcagacccaggatggggtcagaacggacaggggccgtgccgatgccgatgctggtggtgttagcgctcagtcaaggcattttaaattgttgtttggtctacaatgttggtcttttagaagtaaaaatattttttggttctttaagtgaacagtttggttatgcagtgcagcagtttataaattcaaaaggcaa

SEQ ID NO: 493819 - DNA, 329 bp, Homo sapiens
  misc_feature (12)..(12): n is a, c, g, or t
  misc_feature (123)..(123): n is a, c, g, or t
  misc_feature (243)..(243): n is a, c, g, or t
  misc_feature (313)..(313): n is a, c, g, or t
attccgacccangcctccaatacatcgtggtattgggggtttttcaggttttttgctaactgcccccttgctttgcagggatgcgttttggcgttcatcaggccgcaggaggccatacaatcnattcggattgactgcgactggcctacttgcggacgacacgcacgcgttttattgaaaaccacaatctaagtcgccgagcaaccgcagcgcgtcgcgttcgtgcaggcagatggcacaacnatcatagggctagatattactacgaaaacgatggggcaaccgcgtttctttcctggccaaaatccattangtttttgaaagataaa

SEQ ID NO: 493820 - DNA, 274 bp, Homo sapiens
acctcgcctcccggatcaatgccatctctgcctcagcctcccaagtgctgacaccaggcggatcacatgagccagagttcaagaccaacccggccatcatgttgaaacaccatctctacctctaatcttaaattagccggcctggtgacgcatgcctgtgatcccagctactcgggaggtcgagtgctgaggcacgagaattgcttgaacctgggagtcggaagttgcagtgagctgagaatgtgccactacactccagcctgggcaacagagc

SEQ ID NO: 493821 - DNA, 457 bp, Homo sapiens
taggtgaggtatcatacagcgctatcctacaaggcagagtttccacaggatctacgataccccagagaggcatcctgataggcatccagcaatcattccggtcaagattccttggagtggctgagcaattacacaatgaaggtttcaagctgtatgccacggaagccagcatcacgatctggttcaatgctcaacaagtgtacctgacatcccagctggcatgggcgtctcaatatggacagagatcccagaccgtcgtcttccattcagaaactagcatgagagcatggcaggattgagcctagggcttaagcttcccaaacaacaaccactaaattctgtccatgcataattcatgtgattccggaggacagcagttgcatagtggactccctctcctcactaattttcaggtgaccaaactttttgctgaagctgtgcagaaatctctccaagg

SEQ ID NO: 493822 - DNA, 267 bp, Homo sapiens
ccggcatgctggctgctgcggtcgacgtctcgcggatccgcggcacatgtgctggcatcgggtggcgcggaccactcccctcacattccacaggcccatggactcactatggtaccaaactcctaccaacactgaccaatacagaccaccggtgggtttttttttttttttttttttttttgttttttttttttttttttgttttttttttatttttttcgttttgttctacaccgtcacaaaacacaactatagtatagtgggggg

SEQ ID NO: 493823 - DNA, 934 bp, Homo sapiens
gtctctcgccaggcgctcctcgtgtcaagttgatatgtcgttctttaaatcgctctgcgatggaaactccacttgcacgcacctgctcgttgatgccctacgcggaaagacagtggccgatcctggtaatgctgcatacgtacttctcttaagaatcatctcaatcctagttgagactgacttgatccgagaaagtggtttgcattgtggcggagcagacgaatgttggcgctctcctatcatctgagcatgccagcacagatccagcttgttcccattccgctggagacagtgcatgctggctcgctagatgggacagagaacgctcatgatgccgtcgaaggcctattcgctaaggtgcaccgtggtcaaatacaaacctaagcttcctgtcaatgaaatttgcttgtcctcagatactcgcgggggagatagttgttcgtgcgctgtgtaaggtgtgtctgccgacacaggattggattcctcgaccgtagatgaagtcccgggagcaagtagttctgctagtgcgcgattcaagagggtggccaattccttgcatgacctcggtggcttgcgttgccgttttggcgcgcccagtgctgtcatcgttctccatggatggacccataggccacgagaagaacacaagttggggtccttcagtgggagctcgggaagataaagaaaccttccttgttatggccccaatgggaatatcatagcgttatggaccccctgtgaaggatacttccgcagggaggccacccgattcgtataatcgctagccagttcgaattgtcgctggggtgattcgccgcagtggggggaacccccgtttggtttatggctggacgtacctcggcggcttgcttgtttccttggttctgaacgatctttccaccgtttcttcccttggagcgcttggttcgtccca

SEQ ID NO: 493824 - DNA, 820 bp, Homo sapiens
gattcgtttccgcttgcgctgtgagcggaggcgagtgtatgtgcgagaataacagtgtcaagccccgctgcccgccatcgtgccgccgcccggaaggccaccgctgcggatgattttcctgcatggattgggagatactgggcacggatgggcagaagcctttgcaggtatcagaaagttcacatatcaaatatatctgcccgcatgcgcctgttaggccctgttacagttacatatgaacgtggctatgccttcatggttggatattatcgggctttcaccagattcacaggaggatgaatcttgggattaaacagaaaggaggaaaaattataaaaagcttttgagtgtgatcaagaaggtgaacgaattgggcatttccttctaacaagaacttactacgggagggttatctcagggcaaggaagactataatcttgcatattacgtggcccttacgcaaacaggcagaaacgttggcaggtgtcaacctggcaacattcaagctttgcatgtgctttccaactatcgaggactatacttttatcacacaagaggtccctaatcagagatgggtgcttaaatagaggattatattcatatttcctccccaagtgccaccggaggaatggtagaccccattagggatacaccctggaactgagtagggaaccacctttaacagggtgggaaaaaaacgtagagaacaatttgggatagaacatcccaagcccaaaggatagaccctgataaaaaaacctgatggacaggggcactgaatggcaccaagatccgggggtcaacacagggaacacaggcc

SEQ ID NO: 493825 - DNA, 210 bp, Homo sapiens
  misc_feature (76)..(76): n is a, c, g, or t
ggacctgcaagcgtagaccaaagtactgggactacaggcatgcacctctccacgccctgtatttttatatttttangtagggatggctttcaccatgctggccttaagtgatccgtccgccttggcctccaaagtgctgggatttcaggcaagcgtcaccacacccgacccctcactagtatttcagcatttgggtactacgctttggca

SEQ ID NO: 493826 - DNA, 116 bp, Homo sapiens
atcttcctgttctgccctctgaaagcagtgacccaagatgtacctttgtatctatctagccatgcgttgtgagctggagctatcaggtatgcagcctgcacatttcctgagagatg

SEQ ID NO: 493827 - DNA, 755 bp, Homo sapiens
ggaagatgggacgaggcctcagcgcgatgacatatgccgtcagtcgagcgcaggaggcgtcctcttcagcgtatctctccacctctacccggaagcacaccctctcacagacgtaccaatgttaattgtgttataatttcatggatttagttatacataccttaaatagtttctactaaagattcgttgacgattatcatggcaaatttgggccaagtattatcattgaattttctgtgtcggatttcctctaggatttcgccagttcctacaacgtgcagtagggcggcggtagctcttgctgtctgtggactctgctcagctgtgtcctgtaggagtcgagatgtgtctgtgctttattatggccttgtttatatatcactgaggtatactatgccatgtacatagactattttttataatctttacatgctggtttaaattcagacaggaaatagatcaaggaaagtatatatattttcttctaaaatttattatattcgtgtgacaaataatcattttcatcttggtcagctaaaatgttctcagtgaccgtatatgagtaggtgtttctttctctgaagagatgaaagagctgataatatttcttaattgctcagtatgtttctgcccattatgaaagatgaccataaggtattcatgattttcaccttctccttgcaggagaaggcctccgttaacccctggggcctttttgtggggcgggaaaagggttttacctggacgggccaagg

SEQ ID NO: 493828 - DNA, 118 bp, Homo sapiens
  misc_feature (88)..(89): n is a, c, g, or t
gcatcccccagcaccattctttcatttcccaacaccattcagttcagccaacagtcctggtgggcattctcacaacagttcttcattnngctgtcctttcaacaggggtcacgcagct

SEQ ID NO: 493829 - DNA, 882 bp, Homo sapiens
  misc_feature (882)..(882): n is a, c, g, or t
ctgacggtggcctgctgtgagctcagtgctggcgtggccgcggctgggatggcgaagagcaacggaggagaatgggcctgctgcgcgccctgcgtgcctggggaaagcctgtccgggaacccgggagagcctggcccagtggcccctgactgcctgcaaccaccgatgaactcagctctctcgggtctgactcggagtgccaactggcttcgccgagcgccgcatcgacaagttcggcttcatcgtggtgctcgcagggcgccgagggcgcgctggaggaagtacccctggagggttgcttgaggcagagggagtccaagtggctggacattgctcaaacaactgggacaaatggatggccaagaagcacaaaacgattcgtcttgcggatgccaaaaggggcatcccgcacttctctgcaggggccagttgccttggcaggtaccctgtcatgtgaggcacaggtgaacgttacagcagaaccctgtgaacagtttgacgaggctgggacatgtcccctgggggaccccaaagtggcctggacgtgacttgcaggcgtgaccatgcaccggcagtaccacaattccaatgagatgtatgtgtcccatgggtgggggtgccaacgcgccaagcactggacacctaattccagtagtgcctgaaggcgcttacacggctcgacaccggtgcgcggacgtaatgcggcatagttggcacagagcccaagtgcacgcccgaattgccgggcgtggtagttgcgtccaattggcatactgaccctggcttagagacaagaggacctatctgggatgacctggataccacgcatctggttgaagaacgaaccctgaccctgtacttactaccaagggcaagaacgcn

SEQ ID NO: 493830 - DNA, 305 bp, Homo sapiens
gttgaggggaggcgagctcctttcttgcagccccgtctgggctgtgaggttcagaaccaggagggcccgagcacgaggccgcaccctgaggacagtggacggctcggagctgccaccccgacgcacatgtgacactgctcccatcgcaggagaagaaaccagatctttctcagtcactctccctagagctttatgcttgatgcatctcacctaaccttacctgataccacctaattttggggccattttcttttttgttttggagacggagtctcgctctgtcgcccatgcgtggattgccagga

SEQ ID NO: 493831 - DNA, 1244 bp, Homo sapiens
  misc_feature (217)..(217): n is a, c, g, or t
aatcaaaccacacactacatacacacacaacaaaaaaacaaccaaaaaaaacaaaaagaaacaaatacgagaaaaaacaaaaaaaacaagacgaaaatacagacaagaagaacgaaaaaaacgagcgtacactggaacaaacacatggagatagaattggtttggaacccccccccccccccccccccccccccctggtgaagctgcgggagggtcnttttttttgtttaaaaaaagagccggtgctaaggaagtggataggaagtattcagcacgaccagggtgggacccccaccgttggccccagtagttttttttaaaaaacgcgtggcacacaagtcaagtggtcaaggcatgccgacaacgacttcatggacgtacaccatcacggccgccactaggagccatacaagaacagtactcgagaagcaaagagagagagagataggccccccccaggcacggacaggcacgcagaaagtttgactaccagggggactagaactaagcagcaagggacacagcaagagacactagcgcagaggagcgaaaaccggaggagcacgaagaacgagagcgcagacgagacagcgaggggagcaagggtgaagcacagcagcaggcggagcgaccgaggacgcgaaagcaggcggcgggacaagacggagcgcaggagaggcgaagccgaatggacgacgagagcgcacgagcggcacgagcagagcgcgatagaagagacgcagcagaagcgagagcgaaccaagcgaagcgccgcgagggaaacgacgaccacaaggaggagacgggcacgacccgcggcggccgccggggcgcgacgaagcaccgacgcgaggaagggacaggaggcaggagaggcagcgcgagacaaccgaagacagactagagcatgcgagagcgcgagaaggcggaggacgcaagcggcccagagcccgcgaacggcccggacgctccaagcggagacgagagcgagcaggcacggagggcgccgggaggggcacagtgaaggagaacaggaagagagaggaggcgcgagcacacagaggcaaggaggccacgaggaggtggaggacgagtgagagaaggggaagaacgaggacggggaggaggcaagtgcgagacgagggggagaacgacgggcggccggacaacggaggcggagcgcaacagcggagcgcgaccgccgtcggcgacacagcgcgcgcgcacgggccgcggaggcgggc

SEQ ID NO: 493832 - DNA, 650 bp, Homo sapiens
  misc_feature (26)..(26): n is a, c, g, or t
atacccacgtttgtggtgggaggacngctgcgggtctagcactcatacttcgggttggcgtactacaccttatttgtctaccatgcctccttcggggagtacctcatctaagtagtgcatcactaccctgtcactgccttgtctcataaaggtaaggcagctgtgccagtagagacctctgcctaagtccaaaactgtcttgccggccacggcttactacacacaggttgagtgcggaagtcccaccaggcaccccatttaacagataactttgtaggttccccaccttaagtagccctatcttggttaaagcaacggttcctctattaatttgtcctcccaccacaaacgtgggatccgtgcacgttaacgattactaggactatgcagaaaccttgcctttcccaaagcagcgtcctcccaccacaaacgtgggatccgtgcacgttaacgattactaggactatgcagaaaactttccaagattactttccctttttgccttgttcaccatctgtattcaactaggctgcttaccttttgtcactgctccgagacgatttcatacagcgagctctctagcaccttatgttccgaaccctcattcgttcttgcgactctttcactcctactcatagaccctgacatac

SEQ ID NO: 493833 - DNA, 2380 bp, Homo sapiens
tggcgaattcggcacgagggccacgcagaagtcgcgtgtctaggtgagtcgcggtgggtcctcgcttgcagttcagcgaccacgtttgtttcgacgccggaccgcgtaagagacgatgatgttgggcacggaaggtggagagggattcgtggtgaaggtccggggcttgccctggtcttgctcggccgatgaagtgcagaggtttttttctgactgcaaaattcaaaatggggctcaaggtattcgtttcatctacaccagagaaggcagaccaagtggcgaggcttttgttgaacttgaatcagaagatgaagtcaaattggccctgaaaaaagacagagaaactatgggacacagatatgttgaagtattcaagtcaaacaacgttgaaatggattgggtgttgaagcatactggtccaaatagtcctgacacggccaatgatggctttgtacggcttagaggacttccctttggatgtagcaaggaagaaattgttcagttcttctcagggttggaaatcgtgccaaatgggataacattgccggtggacttccaggggaggagtacgggggaggccttcgtgcagtttgcttcacaggaaatagctgaaaaggctctaaagaaacacaaggaaagaatagggcacaggtatattgaaatctttaagagcagtagagctgaagttagaactcattatgatccaccacgaaagcttatggccatgcagcggccaggtccttatgacagacctggggctggtagagggtataacagcattggcagaggagctggctttgagaggatgaggcgtggtgcttatggtggaggctatggaggctatgatgattacaatggctataatgatggctatggatttgggtcagatagatttggaagagacctcaattactgtttttcaggaatgtctgatcacagatacggggatggtggctctactttccagagcacaacaggacactgtgtacacatgcggggattaccttacagagctactgagaatgacatttataattttttttcaccgctcaaccctgtgagagtacacattgaaattggtcctgatggcagagtaactggtgaagcagatgtcgagttcgcaactcatgaagatgctgtggcagctatgtcaaaagacaaagcaaatatgcaacacagatatgtagaactcttcttgaattctacagcaggagcaagcggtggtgcttacgaacacagatatgtagaactcttcttgaattctacagcaggagcaagcggtggtgcttatggtagccaaatgatgggaggcatgggcttgtcaaaccagtccagctacgggggcccagccagccagcagctgagtgggggttacggaggcggctacggtggccagagcagcatgagtggatacggtaaccaaggagcagtgaacagcagctactacagtagtggaagccgtgcatctatgggcgtgaacggaatgggagggttgtctagcatgtccagtatgagtggtggatggggaatgtaattgatcgatcctgatcactgactcttggtcaacctttttttttttttttttttttctttaagaaaactttcagtttaacagtttctgcaatacaagcttgtgatttatgcttactctaagtggaaatcaggattgttatgaagacttaaggcccagtatttttgaatacaatactcatctaggatgtaacagtgaagctgagtaaactataactgttaaacttaagttccagcttttctcaagttagttataggatgtacttaagcagtaagcgtatttaggtaaaagcagttgaattatgttaaatgttgccctttgccacgttaaattgaacactgttttggatgcatgttgaaagacatgcttttatttttttgtaaaacaatataggagctgtgtctactattaaaagtgaaacattttggcatgtttgttaattctagtttcatttaataacctgtaaggcacgtaagtttaagcttttttttttttttaagttaatgggaaaaatttgagacgcaataccaatacttaggattttggtcttggtgtttgtatgaaattctgaggccttgatttaaatctttcattgtattgtgatttccttttaggtatattgcgctaagtgaaacttgtcaaataaatcctccttttaaaaactgccaaaaaagcaacgaaaaaaaaaaaacacatgggggggggcccggcccgagaaatttaaaaacctcgtggggggggaccagggggatggaaggccccacggccaaggacccgggcgaaagggcgggcccccaaaaaaggcgggggcgcggtcgacaccagggggggccggcccacggccggcac

SEQ ID NO: 493834 - DNA, 419 bp, Homo sapiens
  misc_feature (402)..(403): n is a, c, g, or t
aaatttgaaccatgtaaatatttctttttcaaaatataaggttaaaaaatatacctaccttaaaaaacgttcatataaatgaccagaagcaactgaaaaaatgtttaggacatctttttcctttttgttttctttatgcaagcttactgtgaaacttggaataaaaaagtaattgacatttcttaaacatacatatggaaacattgtatgcctaaatagtaaatataagcaatcaatatagaaatgtatttcaaaatagttaagctataaacactctataatatttacaaactaatattaaaatatttgacaatatcatttgaagctttatgagtttttttttaaatttgtaatgtggaatataactatattgtctttaggtgaatgggctggtatttttgnntttttgtgattttgca

SEQ ID NO: 493835 - DNA, 1761 bp, Homo sapiens
gacctcgactcttagtcttgtcgcgggcacggctaaccggcgacccggctgtctgctcctgctcgccttcgcctcctaatccctagccacctatgcgctgagtgcatctccatccacgcttggccaggctggctgctccagcacttggcaactgcctgctggcgagcctctactgccatggcaacacgcgcatccacgcccgactgcgccacgactgccacagctgcacaacgacccactcgcgcgcgcgcacgcgcacgactgacctcccttcaaccacccctctcctctcacgctgacgaccgcggccgccctgcgccacacgccaccgtgccacccccgggcgcccttgcctgcctccctgcctagcaccctctgcggcacacccacaccaggcctcactctgcacctgcacactcctctccggcccacccctggtgccaaccgccctacctccgccccacgaccgatcctctcccacccccattgacgagaaccaacgccctccgagcttcccacgcaagcgtgcccccacagtgaccacacccgcacgtgggcgttggacgcccaaaaccttaacacccctgatcttgcgcccccctgcacagcgcgcgcccaacccgtgaaacacatcaccaaactgcggcgccccaaccaacgcgcgcacgccgagctccgcacgtctgtaaacccccttctgacgctcggcctcaccgcagacccgccgcaaccaccttctccggccccgctacgtgccccgtgcgcgcgcctctgggcaccccccgagtgtgccctggccccaacctcccggcgtcgtcttcccttcttctacgcagtgcgccccctctcccttctgtccgccctctctcctcccccaacccaaggctcctttctcacgggcgccctgcgctgcgcccgcaatacctcttggtcccttctcacttggcggcgccttttccacccgcgctcccccccccctgcgcgctttcccatcggcgcgcagaccgcggcgttccctcccgtcccacgcgcttctggaagctttctccttggcggccctcgacgcacatcgcgcctccctaccgcgcccctgggcgcacgcttctcctttcccccgcgttctatttacccccccaaggctcccatccccccccaggcagcctcttcctccctacgcatgcgcctccctgcctctgcgtctatctgcacggcccgcctgtaactcgacagatcccctcccccacttcccgctttcacagccccaccactcccgacccaactcacaagcccccatggcggaacgccaaactctcatctggaactcatcggatgcctcacttctaccacttaggtgctgagtcaacacacatctagaacagcgcacccactcctcctaacttccaaaccactccccttgcgccaccgccacaaccaccaacaccccctcagcgcaccatcatctcgcgcacgggccgtccctccccaccgccgataccaccgttatacacccccattctaatgcgcggagcgtttccagtctacaagcgcccagaccaacttcgccggcgtccccggtctccgcacttccaccgtgggccttcgccgcgtcctgcgcacttctgtgaattgcgacgccccctgtagatttcgttgcgcatcttgagacagggaaatcttccacgcaacacaaccccccgtcgtctcgccccctaccccccctcgtcgcttcgcctctgtccgcgctatcgtgctcgagcagca

SEQ ID NO: 493836 - DNA, 122 bp, Homo sapiens
  misc_feature (20)..(20): n is a, c, g, or t
cgttgtgtcctctggcattngtgtggctttttcgcgttccttcgggtcctttctcggtcttcacgcagggccgcccctccttgtccttcctcagcctggccgcctggcactctgcacgctgg

SEQ ID NO: 493837 - DNA, 3078 bp, Homo sapiens
  misc_feature (1351)..(1351): n is a, c, g, or t
  misc_feature (1431)..(1431): n is a, c, g, or t
  misc_feature (1474)..(1474): n is a, c, g, or t
  misc_feature (1617)..(1617): n is a, c, g, or t
  misc_feature (1619)..(1621): n is a, c, g, or t
  misc_feature (1623)..(1626): n is a, c, g, or t
  misc_feature (1628)..(1628): n is a, c, g, or t
  misc_feature (1630)..(1630): n is a, c, g, or t
tggcgaattcggcacgagggccacgcagaagtcgcgtgtctaggtgagtcgcggtgggtcctcgcttgcagttcagcgaccacgtttgtttcgacgccggaccgcgtaagagacgatgatgttgggcacggaaggtggagagggattcgtggtgaaggtccggggcttgccctggtcttgctcggccgatgaagtgcagaggtttttttctgactgcaaaattcaaaatggggctcaaggtattcgtttcatctacaccagagaaggcagaccaagtggcgaggcttttgttgaacttgaatcagaagatgaagtcaaattggccctgaaaaaagacagagaaactatgggacacagatatgttgaagtattcaagtcaaacaacgttgaaatggattgggtgttgaagcatactggtccaaatagtcctgacacggccaatgatggctttgtacggcttagaggacttccctttggatgtagcaaggaagaaattgttcagttcttctcagggttggaaatcgtgccaaatgggataacattgccggtggacttccaggggaggagtacgggggaggccttcgtgcagtttgcttcacaggaaatagctgaaaaggctctaaagaaacacaaggaaagaatagggcacaggtatattgaaatctttaagagcagtagagctgaagttagaactcattatgatccaccacgaaagcttatggccatgcagcggccaggtccttatgacagacctggggctggtagagggtataacagcattggcagaggagctggctttgagaggatgaggcgtggtgcttatggtggaggctatggaggctatgatgattacaatggctataatgatggctatggatttgggtcagatagatttggaagagacctcaattactgtttttcaggaatgtctgatcacagatacggggatggtggctctactttccagagcacaacaggacactgtgtacacatgcggggattaccttacagagctactgagaatgacatttataattttttttcaccgctcaaccctgtgagagtacacattgaaattggtcctgatggcagagtaactggtgaagcagatgtcgagttcgcaactcatgaagatgctgtggcagctatgtcaaaagacaaagcaaatatgcaacacagatatgtagaactcttcttgaattctacagcaggagcaagcggtggtgcttacgaacacagatatgtagaactcttcttgaattctacagcaggagcaagcggtggtgcttatggtagccaaatgatgggaggcatgggcttgtgtaaatatcgttagtttttttaaaaaccnaaacgtttatatctgtataagtcaattataagttaagttaatctatttatttaataagtttagcataagaaacttaggcnaagcagtttcttgatatttgagttttgtatctggcttacttanatccttgtgagttatgaagttccttaggatagataattcaaattaggtttaagtagtcttgggggaggggcctacggagtgaaactcttaatttttctaagtataaagtttaaatcaatagcaaaacaggattaagataaatntnnncnnnntnanggtattgacatgcctttgatgtatcaaactgagggggaacccactaaatccagtcaagcagtttcataagatcttcacaaaatgcctctacttacggaatcatgttgattttagtcctgctgatgtgtgtaccgttagcactttggtttatcaatatttgactggctcaaatgatggatagaagggtggcctggttatagacagtaggcagaaggaggcagagggttacagtaatgtaagatcaagactggaaaatgatagctatagaattacaagcccggtaccaccaggtaccacatcacataagaaaaaaggttctaatgttttcttaacttaacagcaaaccagtccagctacgggggcccagccagccagcagctgagtgggggttacggaggcggctacggtggccagagcagcatgagtggatacgaccaagttttacaggaaaactccagtgattttcaatcaaacattgcataggtaaccaaggagcagtgaacagcagctactacagtagtggaagccgtgcatctatgggcgtgaacggaatgggagggttgtctagcatgtccagtatgagtggtggatggggaatgtaattgatcgatcctgatcactgactcttggtcaacctttttttttttttttttttttctttaagaaaactttcagtttaacagtttctgcaatacaagcttgtgatttatgcttactctaagtggaaatcaggattgttatgaagacttaaggcccagtatttttgaatacaatactcatctaggatgtaacagtgaagctgagtaaactataactgttaaacttaagttccagcttttctcaagttagttataggatgtacttaagcagtaagcgtatttaggtaaaagcagttgaattatgttaaatgttgccctttgccacgttaaattgaacactgttttggatgcatgttgaaagacatgcttttatttttttgtaaaacaatataggagctgtgtctactattaaaagtgaaacattttggcatgtttgttaattctagtttcatttaataacctgtaaggcacgtaagtttaagcttttttttttttttaagttaatgggaaaaatttgagacgcaataccaatacttaggattttggtcttggtgtttgtatgaaattctgaggccttgatttaaatctttcattgtattgtgatttccttttaggtatattgcgctaagtgaaacttgtcaaataaatcctccttttaaaaactgccaaaaaagcaacgaaaaaaaaaaaacacatgggggggggcccggcccgagaaatttaaaaacctcgtggggggggaccagggggatggaaggccccacggccaaggacccgggcgaaagggcgggcccccaaaaaaggcgggggcgcggtcgacaccagggggggccggcccacggccggcac

SEQ ID NO: 493838 - DNA, 220 bp, Homo sapiens
atcccctctccctactgatcctagtgaaaatatgctcaagggacaaaaactaagttcatcaattttatctttaagattcagtttaagtggggatcctttaggcctacttggacttggaccacaccttggactattctttccctaatcagcacacaatattcaaagaagcaacaagtggaagactttcttatctctcttttgttaggatacagtagggaga

SEQ ID NO: 493839 - DNA, 2599 bp, Homo sapiens
  misc_feature (51)..(51): n is a, c, g, or t
gcttgcggccgccgccatttcctttcctctacgctggctctcggcccgggnccccacggttcggggcgccgacagctgttgctcaggacagctttgggggtccggtcgccggacgaggaggtgttggagtcgccggggtgggtgcatccgcccggtttttgctccgtgggggggcggtgcgggcccgggcgcgcctcggaggcgaaggacagcttaattggcgctctcagttctggtcctccccgctttgcagtttgtttcgacgccggaccgcgtaagagacgatgatgttgggcacggaaggtggagagggattcgtggtgaaggtccggggcttgccctggtcttgctcggccgatgaagtgcagaggtttttttctgactgcaaaattcaaaatggggctcaaggtattcgtttcatctacaccagagaaggcagaccaagtggcgaggcttttgttgaacttgaatcagaagatgaagtcaaattggccctgaaaaaagacagagaaactatgggacacagatatgttgaagtattcaagtcaaacaacgttgaaatggattgggtgttgaagcatactggtccaaatagtcctgacacggccaatgatggctttgtacggcttagaggacttccctttggatgtagcaaggaagaaattgttcagttcttctcagggttggaaatcgtgccaaatgggataacattgccggtggacttccaggggaggagtacgggggaggccttcgtgcagtttgcttcacaggaaatagctgaaaaggctctaaagaaacacaaggaaagaatagggcacaggtatattgaaatctttaagagcagtagagctgaagttagaactcattatgatccaccacgaaagcttatggccatgcagcggccaggtccttatgacagacctggggctggtagagggtataacagcattggcagaggagctggctttgagaggatgaggcgtggtgcttatggtggaggctatggaggctatgatgattacaatggctataatgatggctatggatttgggtcagatagatttggaagagacctcaattactgtttttcaggaatgtctgatcacagatacggggatggtggctctactttccagagcacaacaggacactgtgtacacatgcggggattaccttacagagctactgagaatgacatttataattttttttcaccgctcaaccctgtgagagtacacattgaaattggtcctgatggcagagtaactggtgaagcagatgtcgagttcgcaactcatgaagatgctgtggcagctatgtcaaaagacaaagcaaatatgcaacacagatatgtagaactcttcttgaattctacagcaggagcaagcggtggtgcttacgaacacagatatgtagaactcttcttgaattctacagcaggagcaagcggtggtgcttatggtagccaaatgatgggaggcatgggcttgtcaaaccagtccagctacgggggcccagccagccagcagctgagtgggggttacggaggcggctacggtggccagagcagcatgagtggatacgaccaagttttacaggaaaactccagtgattttcaatcaaacattgcataggtaaccaaggagcagtgaacagcagctactacagtagtggaagccgtgcatctatgggcgtgaacggaatgggagggttgtctagcatgtccagtatgagtggtggatggggaatgtaattgatcgatcctgatcactgactcttggtcaacctttttttttttttttttttttctttaagaaaactttcagtttaacagtttctgcaatacaagcttgtgatttatgcttactctaagtggaaatcaggattgttatgaagacttaaggcccagtatttttgaatacaatactcatctaggatgtaacagtgaagctgagtaaactataactgttaaacttaagttccagcttttctcaagttagttataggatgtacttaagcagtaagcgtatttaggtaaaagcagttgaattatgttaaatgttgccctttgccacgttaaattgaacactgttttggatgcatgttgaaagacatgcttttatttttttgtaaaacaatataggagctgtgtctactattaaaagtgaaacattttggcatgtttgttaattctagtttcatttaataacctgtaaggcacgtaagtttaagcttttttttttttttaagttaatgggaaaaatttgagacgcaataccaatacttaggattttggtcttggtgtttgtatgaaattctgaggccttgatttaaatctttcattgtattgtgatttccttttaggtatattgcgctaagtgaaacttgtcaaataaatcctccttttaaaaactgccaaaaaagcaacgaaaaaaaaaaaacacatgggggggggcccggcccgagaaatttaaaaacctcgtggggggggaccagggggatggaaggccccacggccaaggacccgggcgaaagggcgggcccccaaaaaaggcgggggcgcggtcgacaccagggggggccggcccacggccggcac

SEQ ID NO: 493840 - DNA, 3170 bp, Homo sapiens
  misc_feature (1443)..(1443): n is a, c, g, or t
  misc_feature (1523)..(1523): n is a, c, g, or t
  misc_feature (1566)..(1566): n is a, c, g, or t
  misc_feature (1709)..(1709): n is a, c, g, or t
  misc_feature (1711)..(1713): n is a, c, g, or t
  misc_feature (1715)..(1718): n is a, c, g, or t
  misc_feature (1720)..(1720): n is a, c, g, or t
  misc_feature (1722)..(1722): n is a, c, g, or t
tggcgaattcggcacgagggccacgcagaagtcgcgtgtctaggtgagtcgcggtgggtcctcgcttgcagttcagcgaccacgtttgtttcgacgccggaccgcgtaagagacgatgatgttgggcacggaaggtggagagggattcgtggtgaaggtccggggcttgccctggtcttgctcggccgatgaagtgcagaggtttttttctgactgcaaaattcaaaatggggctcaaggtattcgtttcatctacaccagagaaggcagaccaagtggcgaggcttttgttgaacttgaatcagaagatgaagtcaaattggccctgaaaaaagacagagaaactatgggacacagatatgttgaagtattcaagtcaaacaacgttgaaatggattgggtgttgaagcatactggtccaaatagtcctgacacggccaatgatggctttgtacggcttagaggacttccctttggatgtagcaaggaagaaattgttcagttcttctcagggttggaaatcgtgccaaatgggataacattgccggtggacttccaggggaggagtacgggggaggccttcgtgcagtttgcttcacaggaaatagctgaaaaggctctaaagaaacacaaggaaagaatagggcacaggtatattgaaatctttaagagcagtagagctgaagttagaactcattatgatccaccacgaaagcttatggccatgcagcggccaggtccttatgacagacctggggctggtagagggtataacagcattggcagaggagctggctttgagaggatgaggcgtggtgcttatggtggaggctatggaggctatgatgattacaatggctataatgatggctatggatttgggtcagatagatttggaagagacctcaattactgtttttcaggaatgtctgatcacagatacggggatggtggctctactttccagagcacaacaggacactgtgtacacatgcggggattaccttacagagctactgagaatgacatttataattttttttcaccgctcaaccctgtgagagtacacattgaaattggtcctgatggcagagtaactggtgaagcagatgtcgagttcgcaactcatgaagatgctgtggcagctatgtcaaaagacaaagcaaatatgcaacacagatatgtagaactcttcttgaattctacagcaggagcaagcggtggtgcttacggtagccaaatgctaggaggcatgggtttgtgtaaatatcactttagtgtcttttttttaagctaaccttgtatgccttttctctcatttcagaacacagatatgtagaactcttcttgaattctacagcaggagcaagcggtggtgcttatggtagccaaatgatgggaggcatgggcttgtgtaaatatcgttagtttttttaaaaaccnaaacgtttatatctgtataagtcaattataagttaagttaatctatttatttaataagtttagcataagaaacttaggcnaagcagtttcttgatatttgagttttgtatctggcttacttanatccttgtgagttatgaagttccttaggatagataattcaaattaggtttaagtagtcttgggggaggggcctacggagtgaaactcttaatttttctaagtataaagtttaaatcaatagcaaaacaggattaagataaatntnnncnnnntnanggtattgacatgcctttgatgtatcaaactgagggggaacccactaaatccagtcaagcagtttcataagatcttcacaaaatgcctctacttacggaatcatgttgattttagtcctgctgatgtgtgtaccgttagcactttggtttatcaatatttgactggctcaaatgatggatagaagggtggcctggttatagacagtaggcagaaggaggcagagggttacagtaatgtaagatcaagactggaaaatgatagctatagaattacaagcccggtaccaccaggtaccacatcacataagaaaaaaggttctaatgttttcttaacttaacagcaaaccagtccagctacgggggcccagccagccagcagctgagtgggggttacggaggcggctacggtggccagagcagcatgagtggatacgaccaagttttacaggaaaactccagtgattttcaatcaaacattgcataggtaaccaaggagcagtgaacagcagctactacagtagtggaagccgtgcatctatgggcgtgaacggaatgggagggttgtctagcatgtccagtatgagtggtggatggggaatgtaattgatcgatcctgatcactgactcttggtcaacctttttttttttttttttttttctttaagaaaactttcagtttaacagtttctgcaatacaagcttgtgatttatgcttactctaagtggaaatcaggattgttatgaagacttaaggcccagtatttttgaatacaatactcatctaggatgtaacagtgaagctgagtaaactataactgttaaacttaagttccagcttttctcaagttagttataggatgtacttaagcagtaagcgtatttaggtaaaagcagttgaattatgttaaatgttgccctttgccacgttaaattgaacactgttttggatgcatgttgaaagacatgcttttatttttttgtaaaacaatataggagctgtgtctactattaaaagtgaaacattttggcatgtttgttaattctagtttcatttaataacctgtaaggcacgtaagtttaagcttttttttttttttaagttaatgggaaaaatttgagacgcaataccaatacttaggattttggtcttggtgtttgtatgaaattctgaggccttgatttaaatctttcattgtattgtgatttccttttaggtatattgcgctaagtgaaacttgtcaaataaatcctccttttaaaaactgccaaaaaagcaacgaaaaaaaaaaaacacatgggggggggcccggcccgagaaatttaaaaacctcgtggggggggaccagggggatggaaggccccacggccaaggacccgggcgaaagggcgggcccccaaaaaaggcgggggcgcggtcgacaccagggggggccggcccacggccggcac

SEQ ID NO: 493841 - DNA, 3019 bp, Homo sapiens
  misc_feature (1292)..(1292): n is a, c, g, or t
  misc_feature (1372)..(1372): n is a, c, g, or t
  misc_feature (1415)..(1415): n is a, c, g, or t
  misc_feature (1558)..(1558): n is a, c, g, or t
  misc_feature (1560)..(1562): n is a, c, g, or t
  misc_feature (1564)..(1567): n is a, c, g, or t
  misc_feature (1569)..(1569): n is a, c, g, or t
  misc_feature (1571)..(1571): n is a, c, g, or t
tggcgaattcggcacgagggccacgcagaagtcgcgtgtctaggtgagtcgcggtgggtcctcgcttgcagttcagcgaccacgtttgtttcgacgccggaccgcgtaagagacgatgatgttgggcacggaaggtggagagggattcgtggtgaaggtccggggcttgccctggtcttgctcggccgatgaagtgcagaggtttttttctgactgcaaaattcaaaatggggctcaaggtattcgtttcatctacaccagagaaggcagaccaagtggcgaggcttttgttgaacttgaatcagaagatgaagtcaaattggccctgaaaaaagacagagaaactatgggacacagatatgttgaagtattcaagtcaaacaacgttgaaatggattgggtgttgaagcatactggtccaaatagtcctgacacggccaatgatggctttgtacggcttagaggacttccctttggatgtagcaaggaagaaattgttcagttcttctcagggttggaaatcgtgccaaatgggataacattgccggtggacttccaggggaggagtacgggggaggccttcgtgcagtttgcttcacaggaaatagctgaaaaggctctaaagaaacacaaggaaagaatagggcacaggtatattgaaatctttaagagcagtagagctgaagttagaactcattatgatccaccacgaaagcttatggccatgcagcggccaggtccttatgacagacctggggctggtagagggtataacagcattggcagaggagctggctttgagaggatgaggcgtggtgcttatggtggaggctatggaggctatgatgattacaatggctataatgatggctatggatttgggtcagatagatttggaagagacctcaattactgtttttcaggaatgtctgatcacagatacggggatggtggctctactttccagagcacaacaggacactgtgtacacatgcggggattaccttacagagctactgagaatgacatttataattttttttcaccgctcaaccctgtgagagtacacattgaaattggtcctgatggcagagtaactggtgaagcagatgtcgagttcgcaactcatgaagatgctgtggcagctatgtcaaaagacaaagcaaatatgcaacacagatatgtagaactcttcttgaattctacagcaggagcaagcggtggtgcttacgggtagccaaatgatgggaggcatgggcttgtgtaaatatcgttagtttttttaaaaaccnaaacgtttatatctgtataagtcaattataagttaagttaatctatttatttaataagtttagcataagaaacttaggcnaagcagtttcttgatatttgagttttgtatctggcttacttanatccttgtgagttatgaagttccttaggatagataattcaaattaggtttaagtagtcttgggggaggggcctacggagtgaaactcttaatttttctaagtataaagtttaaatcaatagcaaaacaggattaagataaatntnnncnnnntnanggtattgacatgcctttgatgtatcaaactgagggggaacccactaaatccagtcaagcagtttcataagatcttcacaaaatgcctctacttacggaatcatgttgattttagtcctgctgatgtgtgtaccgttagcactttggtttatcaatatttgactggctcaaatgatggatagaagggtggcctggttatagacagtaggcagaaggaggcagagggttacagtaatgtaagatcaagactggaaaatgatagctatagaattacaagcccggtaccaccaggtaccacatcacataagaaaaaaggttctaatgttttcttaacttaacagcaaaccagtccagctacgggggcccagccagccagcagctgagtgggggttacggaggcggctacggtggccagagcagcatgagtggatacgaccaagttttacaggaaaactccagtgattttcaatcaaacattgcataggtaaccaaggagcagtgaacagcagctactacagtagtggaagccgtgcatctatgggcgtgaacggaatgggagggttgtctagcatgtccagtatgagtggtggatggggaatgtaattgatcgatcctgatcactgactcttggtcaacctttttttttttttttttttttctttaagaaaactttcagtttaacagtttctgcaatacaagcttgtgatttatgcttactctaagtggaaatcaggattgttatgaagacttaaggcccagtatttttgaatacaatactcatctaggatgtaacagtgaagctgagtaaactataactgttaaacttaagttccagcttttctcaagttagttataggatgtacttaagcagtaagcgtatttaggtaaaagcagttgaattatgttaaatgttgccctttgccacgttaaattgaacactgttttggatgcatgttgaaagacatgcttttatttttttgtaaaacaatataggagctgtgtctactattaaaagtgaaacattttggcatgtttgttaattctagtttcatttaataacctgtaaggcacgtaagtttaagcttttttttttttttaagttaatgggaaaaatttgagacgcaataccaatacttaggattttggtcttggtgtttgtatgaaattctgaggccttgatttaaatctttcattgtattgtgatttccttttaggtatattgcgctaagtgaaacttgtcaaataaatcctccttttaaaaactgccaaaaaagcaacgaaaaaaaaaaaacacatgggggggggcccggcccgagaaatttaaaaacctcgtggggggggaccagggggatggaaggccccacggccaaggacccgggcgaaagggcgggcccccaaaaaaggcgggggcgcggtcgacaccagggggggccggcccacggccggcac

SEQ ID NO: 493842 - DNA, 140 bp, Homo sapiens
cattacaacagaagacatgaccatatcccgactccaacagcatctgcaaggaatggaaatcttctgaaaatgacatgcgcagtaacagaataattcaagcggaactgaagatctatccaaaacatgttactgctctgaaa

SEQ ID NO: 493843 - DNA, 871 bp, Homo sapiens
  misc_feature (9)..(9): n is a, c, g, or t
  misc_feature (11)..(11): n is a, c, g, or t
  misc_feature (19)..(19): n is a, c, g, or t
gcggggttncngtggggcncgcgttgaggctgcggtcatggagggagcaggagctggatccggcttccggaaggagctggtgagcaggctgctgcacctgcacttcaaggatgacaagaccaaagaagcagcagtccgcggcgtgcggcaggcccaggcagaagacgcgctccgtgtggacgtggaccagctggagaaggtgcttccgcagctgctcctggacttctagggatctcagccgtggctgaggccacccccagaggagcccctggtccacagaagcaggccttgtgtttccagcggcctctgataagaggcagggaaggacctgaaggatttggagttgattcaaacaagatctctgggagtctccagcctgtgcagaaggggcaggactgcagtgcactgcgggccttggagtgtccagtggggacactggtgtgggaaggggcagcacctggggagtccctgcctctcctccctgggacaatagtgtgcatgccacccggggtcctacaggcaggtgctgggaaaggcctggccagcaggtagcctgtgtgtttgacaaacagcagctggcagcgctgcctcctgcccacattcctgccacccgacatcaaagctggcgtgtgacctttccagccatgcgatattccccttggaagatgcttccccaggctataaatttgttctcacaaagcaacatcaataaatcaaaactgtctctcccaaaaaaaaaaaaaaaaatataataataatttattttaatatattatgatatactattttactattttacaaaataaaaaaaccttgggggggggccccggttccccaaattcgccctattgggaatgcgtttaacatataa

SEQ ID NO: 493844 - DNA, 2522 bp, Homo sapiens
tggcgaattcggcacgagggccacgcagaagtcgcgtgtctaggtgagtcgcggtgggtcctcgcttgcagttcagcgaccacgtttgtttcgacgccggaccgcgtaagagacgatgatgttgggcacggaaggtggagagggattcgtggtgaaggtccggggcttgccctggtcttgctcggccgatgaagtgcagaggtttttttctgactgcaaaattcaaaatggggctcaaggtattcgtttcatctacaccagagaaggcagaccaagtggcgaggcttttgttgaacttgaatcagaagatgaagtcaaattggccctgaaaaaagacagagaaactatgggacacagatatgttgaagtattcaagtcaaacaacgttgaaatggattgggtgttgaagcatactggtccaaatagtcctgacacggccaatgatggctttgtacggcttagaggacttccctttggatgtagcaaggaagaaattgttcagttcttctcagggttggaaatcgtgccaaatgggataacattgccggtggacttccaggggaggagtacgggggaggccttcgtgcagtttgcttcacaggaaatagctgaaaaggctctaaagaaacacaaggaaagaatagggcacaggtatattgaaatctttaagagcagtagagctgaagttagaactcattatgatccaccacgaaagcttatggccatgcagcggccaggtccttatgacagacctggggctggtagagggtataacagcattggcagaggagctggctttgagaggatgaggcgtggtgcttatggtggaggctatggaggctatgatgattacaatggctataatgatggctatggatttgggtcagatagatttggaagagacctcaattactgtttttcaggaatgtctgatcacagatacggggatggtggctctactttccagagcacaacaggacactgtgtacacatgcggggattaccttacagagctactgagaatgacatttataattttttttcaccgctcaaccctgtgagagtacacattgaaattggtcctgatggcagagtaactggtgaagcagatgtcgagttcgcaactcatgaagatgctgtggcagctatgtcaaaagacaaagcaaatatgcaacacagatatgtagaactcttcttgaattctacagcaggagcaagcggtggtgcttacggtagccaaatgctaggaggcatgggtttgtgtaaatatcactttagtgtcttttttttaagctaaccttgtatgccttttctctcatttcagaacacagatatgtagaactcttcttgaattctacagcaggagcaagcggtggtgcttatggtagccaaatgatgggaggcatgggcttgtcaaaccagtccagctacgggggcccagccagccagcagctgagtgggggttacggaggcggctacggtggccagagcagcatgagtggatacgaccaagttttacaggaaaactccagtgattttcaatcaaacattgcataggtaaccaaggagcagtgaacagcagctactacagtagtggaagccgtgcatctatgggcgtgaacggaatgggagggttgtctagcatgtccagtatgagtggtggatggggaatgtaattgatcgatcctgatcactgactcttggtcaacctttttttttttttttttttttctttaagaaaactttcagtttaacagtttctgcaatacaagcttgtgatttatgcttactctaagtggaaatcaggattgttatgaagacttaaggcccagtatttttgaatacaatactcatctaggatgtaacagtgaagctgagtaaactataactgttaaacttaagttccagcttttctcaagttagttataggatgtacttaagcagtaagcgtatttaggtaaaagcagttgaattatgttaaatgttgccctttgccacgttaaattgaacactgttttggatgcatgttgaaagacatgcttttatttttttgtaaaacaatataggagctgtgtctactattaaaagtgaaacattttggcatgtttgttaattctagtttcatttaataacctgtaaggcacgtaagtttaagcttttttttttttttaagttaatgggaaaaatttgagacgcaataccaatacttaggattttggtcttggtgtttgtatgaaattctgaggccttgatttaaatctttcattgtattgtgatttccttttaggtatattgcgctaagtgaaacttgtcaaataaatcctccttttaaaaactgccaaaaaagcaacgaaaaaaaaaaaacacatgggggggggcccggcccgagaaatttaaaaacctcgtggggggggaccagggggatggaaggccccacggccaaggacccgggcgaaagggcgggcccccaaaaaaggcgggggcgcggtcgacaccagggggggccggcccacggccggcac

SEQ ID NO: 493845 - DNA, 183 bp, Homo sapiens
ttaaactcctgactgtgaaaaagagttaatcacagactcttttgcctgctcttggtactcttctcctcctactgaactgtatccaacttccatattaaatttttgctttatcttattatgttttattttgtattatttggttgttatctcttagaagccttttttttctaatagagacagaaa

SEQ ID NO: 493846 - DNA, 1297 bp, Homo sapiens
  misc_feature (9)..(9): n is a, c, g, or t
  misc_feature (11)..(11): n is a, c, g, or t
  misc_feature (19)..(19): n is a, c, g, or t
gcggggttncngtggggcncgcgttgaggctgcggtcatggagggagcaggagctggatccggcttccggaaggagctggtgagcaggctgctgcacctgcacttcaaggatgacaagaccaaagaagcagcagtccgcggcgtgcggcaggcccaggcagaagacgcgctccgtgtggacgtggaccagctggagaaggtgcttccgcagctgctcctggacttctagggatctcagccgtggctgaggccacccccagaggagcccctggtccacagaagcaggccttgtgtttccagcggcctctgataagaggcagggaaggacctgaaggatttggagttgattcaaacaagatctctgggagtctccagcctgtgcagaaggggcaggactgcagtgcactgcgggccttggagtgtccagtggggacactggtgtgggaaggggcagcacctggggagtccctgcctctcctccctgggacaatagtgtgcatgccacccggggtcctacaggcaggtgctgggaaaggcctggccagcaggtagcctgtgtgtttgacaaacagcagctggcagcgctgcctcctgcccacattcctgccacccgacatcaaagctggcgtgtgacctttccagccatgcgatattccccttggaagatgcttccccaggctataaatttgttctcacaaagcaacatcaataaatcaaaactgtctctcccaaaaaaaaaaaaaaaaaaaaaaaaaaaaaaaaaaaaaaaaaaaaaaaaaaaaaaaaaagaggaaaaaaaaaaaaaaaaaaaaaaaaaaagagaaaaaaaaaaaaaaaaaaaaaacaaaaaaaaaaaaccaagggcgacacaaaaacgagagacaacaaaaagagacaagaacacaggacaccaagcacaaacacaaagagaaagggaaaaaaagagacaaaggggcatttatgtcgagaaaagaagaaaaaaacaaaagaggagagaaaaaaaaaaagcaaaaaaatacgtataaaatataaaaagacataaaaaagaggaaaaaataaaaaagagaaaagggagaaagaagagagaaaaaaagacagaagaaagagagcgcgaggaaaaataaaggaaaaaacgaaacaccacaccaccagaaaagatgacaaaacaggacacacagaggacaggcaggagaggaccgtggcgagaacacaacgacaagaaagaacgaaagaaacaaacgaaggagagacaaagaaaggaggagaggaaagagagagaaacaacgacacggagaag

SEQ ID NO: 493847 - DNA, 2371 bp, Homo sapiens
tggcgaattcggcacgagggccacgcagaagtcgcgtgtctaggtgagtcgcggtgggtcctcgcttgcagttcagcgaccacgtttgtttcgacgccggaccgcgtaagagacgatgatgttgggcacggaaggtggagagggattcgtggtgaaggtccggggcttgccctggtcttgctcggccgatgaagtgcagaggtttttttctgactgcaaaattcaaaatggggctcaaggtattcgtttcatctacaccagagaaggcagaccaagtggcgaggcttttgttgaacttgaatcagaagatgaagtcaaattggccctgaaaaaagacagagaaactatgggacacagatatgttgaagtattcaagtcaaacaacgttgaaatggattgggtgttgaagcatactggtccaaatagtcctgacacggccaatgatggctttgtacggcttagaggacttccctttggatgtagcaaggaagaaattgttcagttcttctcagggttggaaatcgtgccaaatgggataacattgccggtggacttccaggggaggagtacgggggaggccttcgtgcagtttgcttcacaggaaatagctgaaaaggctctaaagaaacacaaggaaagaatagggcacaggtatattgaaatctttaagagcagtagagctgaagttagaactcattatgatccaccacgaaagcttatggccatgcagcggccaggtccttatgacagacctggggctggtagagggtataacagcattggcagaggagctggctttgagaggatgaggcgtggtgcttatggtggaggctatggaggctatgatgattacaatggctataatgatggctatggatttgggtcagatagatttggaagagacctcaattactgtttttcaggaatgtctgatcacagatacggggatggtggctctactttccagagcacaacaggacactgtgtacacatgcggggattaccttacagagctactgagaatgacatttataattttttttcaccgctcaaccctgtgagagtacacattgaaattggtcctgatggcagagtaactggtgaagcagatgtcgagttcgcaactcatgaagatgctgtggcagctatgtcaaaagacaaagcaaatatgcaacacagatatgtagaactcttcttgaattctacagcaggagcaagcggtggtgcttacgggtagccaaatgatgggaggcatgggcttgtcaaaccagtccagctacgggggcccagccagccagcagctgagtgggggttacggaggcggctacggtggccagagcagcatgagtggatacgaccaagttttacaggaaaactccagtgattttcaatcaaacattgcataggtaaccaaggagcagtgaacagcagctactacagtagtggaagccgtgcatctatgggcgtgaacggaatgggagggttgtctagcatgtccagtatgagtggtggatggggaatgtaattgatcgatcctgatcactgactcttggtcaacctttttttttttttttttttttctttaagaaaactttcagtttaacagtttctgcaatacaagcttgtgatttatgcttactctaagtggaaatcaggattgttatgaagacttaaggcccagtatttttgaatacaatactcatctaggatgtaacagtgaagctgagtaaactataactgttaaacttaagttccagcttttctcaagttagttataggatgtacttaagcagtaagcgtatttaggtaaaagcagttgaattatgttaaatgttgccctttgccacgttaaattgaacactgttttggatgcatgttgaaagacatgcttttatttttttgtaaaacaatataggagctgtgtctactattaaaagtgaaacattttggcatgtttgttaattctagtttcatttaataacctgtaaggcacgtaagtttaagcttttttttttttttaagttaatgggaaaaatttgagacgcaataccaatacttaggattttggtcttggtgtttgtatgaaattctgaggccttgatttaaatctttcattgtattgtgatttccttttaggtatattgcgctaagtgaaacttgtcaaataaatcctccttttaaaaactgccaaaaaagcaacgaaaaaaaaaaaacacatgggggggggcccggcccgagaaatttaaaaacctcgtggggggggaccagggggatggaaggccccacggccaaggacccgggcgaaagggcgggcccccaaaaaaggcgggggcgcggtcgacaccagggggggccggcccacggccggcac

SEQ ID NO: 493848 - DNA, 712 bp, Homo sapiens
agcgggggggagtcacctcagctggcagtgtaccagcgtgttagaaagcagcctcaggaacgggcatctccatcactggcgtcaccatgggagactgtgctgggtgtcttctccctcgccagctgggttccatgcctctgcagcggtgcctgatgtgggctgtgtagttgctgtcctaacagtaagaattccacggtgactcgcctcatttatgctttcattctcctcctgagcactgtcgtatcctatatcatgcagagaaaagagatggaaacttacttgaagaagattcctggattttgtcgaagggcggcatttaacaatccatgaggctgatatacaatgcacgataaagcattgtgatgtgctcggttggttcataaagctgtgtatccggatccagctttgcccatggcccatcttttcctttgtctttctctctgctcatgttcacaagtcaaaaacaagtaaagatctccgagcggcagtacacaatgggttctcggttcttcaacaatttgctgcccttattcggaatccatggtttggctcctttctacattccctgggggctatttcacgctcagtctggtttgtcgttggcatgactaaggggccgccctcttcatccctcattcagctgcgtgctgcttggtacgattttgctcattccttggaatgaatcctggggtaaatcgaatggaagaaggca

SEQ ID NO: 493849 - DNA, 1060 bp, Homo sapiens
aggtggggaggaagaggaggaggaagaagaaggtgatggtgaggaagaggatggagatgaagagacgcccctgctcaacgggcaatgctcaatgcaggcaaaatggggcagcaggaggctggacaatgcaggtcagcacgacagcaagaggcaagcaaggtgggtgcaggcaagcaggcaggcaggcaagcaagcaaggtgcatggtgcaggcaagcaggatggagcatgaagatgacggaagctgagatcagactacggagcaagacgggcagactgacagatgactgagtgatgcacgatgtcagataccaagcaagcacgacagaccgaccgaggactgagctcagacagacacaaacaaggaccaacgttaacactaagaagaaacacaagtgccgccgatgaccatattcaacccatccacattcccgataatcagaaatctaaaccatggatcacgcttcgagatagcacgaggcccgacccgaaccaccagtgggcaaatgccaaccgacagatgacaacgcgcatcatccagcaaaccaaggccaaaacatgagaactggcaacagggcgcaggaaacaaaagaaccaacaacatccaaaggacccatgcaaacacaactacacaagctacacaacaacaaggcacactaggcgaagccaataacacatcaaccatcacacaacaagcacggaaaaacacatggcacacgggcccagaccacacaaaacgcaacccgagaatgacaaacaacaaaacctaagaaagcaaacaaaagaaccaaaccaaagacataaaaacgagcagacgacccagtgtccactcactaacccacacaacggagaaaaccaccaacgctggacaaaacacaaaggacagaaaatgaaacacacagaaacaccgaacctaagcaccaaaagacagctccaggaaaagtcaaacaggacgaatgcaccggagacggaacccaacaaggagacagagacaacgaacgcagaacgggcaacagggcgccacaaacacagagatagaaccagaaacacaagggaacaaa

SEQ ID NO: 493850 - DNA, 681 bp, Homo sapiens
  misc_feature (9)..(9): n is a, c, g, or t
  misc_feature (11)..(11): n is a, c, g, or t
  misc_feature (19)..(19): n is a, c, g, or t
gcggggttncngtggggcncgcgttgaggctgcggtcatggagggagcaggagctggatccggcttccggaaggagctggtgagcaggctgctgcacctgcacttcaaggatgacaagaccaaagaagcagcagtccgcggcgtgcggcaggcccaggcagaagacgcgctccgtgtggacgtggaccagctggagaaggtgcttccgcagctgctcctggacttctagggatctcagccgtggctgaggccacccccagaggagcccctggtccacagaagcaggccttgtgtttccagcggcctctgataagaggcagggaaggacctgaaggatttggagttgattcaaacaagatctctgggagtctccagcctgtgcagaaggggcaggactgcagtgcactgcgggccttggagtgtccagtggggacactggtgtgggaaggggcagcacctggggagtccctgcctctcctccctgggacaatagtgtgcatgccacccggggtcctacaggcaggtgctgggaaaggcctgccacccgacatcaaagctggcgtgtgacctttccagccatgcgatattccccttggaagatgcttccccaggctataaatttgttctcacaaagcaacatcaataaatcaaaactgtctctcccaaaaaaaaaaaaaaaaa

SEQ ID NO: 493851 - DNA, 2399 bp, Homo sapiens
tggcgaattcggcacgagggccacgcagaagtcgcgtgtctaggtgagtcgcggtgggtcctcgcttgcagttcagcgaccacgtttgtttcgacgccggaccgcgtaagagacgatgatgttgggcacggaaggtggagagggattcgtggtgaaggtccggggcttgccctggtcttgctcggccgatgaagtgcagaggtttttttctgactgcaaaattcaaaatggggctcaaggtattcgtttcatctacaccagagaaggcagaccaagtggcgaggcttttgttgaacttgaatcagaagatgaagtcaaattggccctgaaaaaagacagagaaactatgggacacagatatgttgaagtattcaagtcaaacaacgttgaaatggattgggtgttgaagcatactggtccaaatagtcctgacacggccaatgatggctttgtacggcttagaggacttccctttggatgtagcaaggaagaaattgttcagttcttctcagggttggaaatcgtgccaaatgggataacattgccggtggacttccaggggaggagtacgggggaggccttcgtgcagtttgcttcacaggaaatagctgaaaaggctctaaagaaacacaaggaaagaatagggcacaggtatattgaaatctttaagagcagtagagctgaagttagaactcattatgatccaccacgaaagcttatggccatgcagcggccaggtccttatgacagacctggggctggtagagggtataacagcattggcagaggagctggctttgagaggatgaggcgtggtgcttatggtggaggctatggaggctatgatgattacaatggctataatgatggctatggatttgggtcagatagatttggaagagacctcaattactgtttttcaggaatgtctgatcacagatacggggatggtggctctactttccagagcacaacaggacactgtgtacacatgcggggattaccttacagagctactgagaatgacatttataattttttttcaccgctcaaccctgtgagagtacacattgaaattggtcctgatggcagagtaactggtgaagcagatgtcgagttcgcaactcatgaagatgctgtggcagctatgtcaaaagacaaagcaaatatgcaacacagatatgtagaactcttcttgaattctacagcaggagcaagcggtggtgcttacgaacacagatatgtagaactcttcttgaattctacagcaggagcaagcggtggtgcttatcaaaccagtccagctacgggggcccagccagccagcagctgagtgggggttacggaggcggctacggtggccagagcagcatgagtggatacgaccaagttttacaggaaaactccagtgattttcaatcaaacattgcataggtaaccaaggagcagtgaacagcagctactacagtagtggaagccgtgcatctatgggcgtgaacggaatgggagggttgtctagcatgtccagtatgagtggtggatggggaatgtaattgatcgatcctgatcactgactcttggtcaacctttttttttttttttttttttctttaagaaaactttcagtttaacagtttctgcaatacaagcttgtgatttatgcttactctaagtggaaatcaggattgttatgaagacttaaggcccagtatttttgaatacaatactcatctaggatgtaacagtgaagctgagtaaactataactgttaaacttaagttccagcttttctcaagttagttataggatgtacttaagcagtaagcgtatttaggtaaaagcagttgaattatgttaaatgttgccctttgccacgttaaattgaacactgttttggatgcatgttgaaagacatgcttttatttttttgtaaaacaatataggagctgtgtctactattaaaagtgaaacattttggcatgtttgttaattctagtttcatttaataacctgtaaggcacgtaagtttaagcttttttttttttttaagttaatgggaaaaatttgagacgcaataccaatacttaggattttggtcttggtgtttgtatgaaattctgaggccttgatttaaatctttcattgtattgtgatttccttttaggtatattgcgctaagtgaaacttgtcaaataaatcctccttttaaaaactgccaaaaaagcaacgaaaaaaaaaaaacacatgggggggggcccggcccgagaaatttaaaaacctcgtggggggggaccagggggatggaaggccccacggccaaggacccgggcgaaagggcgggcccccaaaaaaggcgggggcgcggtcgacaccagggggggccggcccacggccggcac

SEQ ID NO: 493852 - DNA, 878 bp, Homo sapiens
  misc_feature (766)..(766): n is a, c, g, or t
cagacacactcaggctaggtatgaggactgggtggtttactttggccgaggcttggcactcttggctctttggagaaaacgtgtaacaaaagatgcagaagggctagctgacagagatgtccagaagattataggggatatacttcagatgaccaacgacccacgtgtcatgaacagcagctataaaagccatgtttgcagctccatgaacagaggactgaaattacaccaaacaatttataatacaggcctgtaaattactactctgatgactatgaacaagtgcgcagaagctgcagtccagctatatctgggtcgtacagtacagctctatacctgaaagcattgtacccaattccttcttctaaatgacatgaacatacgctatagttgatgatgcgttatggcaaaattttgtcacatggtcaatgtgatgtgctctatgggtggtatcgtgttcaggcagcaaaacttgttgggctctatgtgagcaagtcagttctcatttcttgtgagcagacccttgacaagaagctgatgtcagatctgaggaggacaacgtactgcacatgagcgtgccaagtgaactttacagtatcggagggagtatcaccagtggcagaaagtggggagatgattgctcccaatgaagacagtagataccgggggcgttgacccttgatttgagtcaggatgcttgtatgagcttcagtacaatgcggtgggacgatgagatgtatacggtacggacttgctgctgtggatngccctctgcgatgttgggccagtcttcccacatattgctgaacattgcttgattcctagttaatgtcacgatgaaaagagcaaaccttgcggctaataacaggaaatttaaa

SEQ ID NO: 493853 - DNA, 529 bp, Homo sapiens
  misc_feature (9)..(9): n is a, c, g, or t
  misc_feature (11)..(11): n is a, c, g, or t
  misc_feature (19)..(19): n is a, c, g, or t
gcggggttncngtggggcncgcgttgaggctgcggtcatggagggagcaggagctggatccggcttccggaaggagctggtgagcaggctgctgcacctgcacttcaaggatgacaagaccaaagtgagcggggacgcgctgcagctcatggtggagttgctgaaggtcttcgttgtggaagcagcagtccgcggcgtgcggcaggcccaggcagaagacgcgctccgtgtggacgtggaccagctggagaaggtgcttccgcagctgctcctggacttctagggatctcagccgtggctgaggccacccccagaggagcccctggtccacagaagcaggccttgtgtttccagcggcctctcctccctgggacaatagtgtgcactgccacccgacatcaaagctggcgtgtgacctttccagccatgcgatattccccttggaagatgcttccccaggctataaatttgttctcacaaagcaacatcaataaatcaaaactgtctctcccaaaaaaaaaaaaaaaaa

SEQ ID NO: 493854 - DNA, 2370 bp, Homo sapiens
tggcgaattcggcacgagggccacgcagaagtcgcgtgtctaggtgagtcgcggtgggtcctcgcttgcagttcagcgaccacgtttgtttcgacgccggaccgcgtaagagacgatgatgttgggcacggaaggtggagagggattcgtggtgaaggtccggggcttgccctggtcttgctcggccgatgaagtgcagaggtttttttctgactgcaaaattcaaaatggggctcaaggtattcgtttcatctacaccagagaaggcagaccaagtggcgaggcttttgttgaacttgaatcagaagatgaagtcaaattggccctgaaaaaagacagagaaactatgggacacagatatgttgaagtattcaagtcaaacaacgttgaaatggattgggtgttgaagcatactggtccaaatagtcctgacacggccaatgatggctttgtacggcttagaggacttccctttggatgtagcaaggaagaaattgttcagttcttctcagggttggaaatcgtgccaaatgggataacattgccggtggacttccaggggaggagtacgggggaggccttcgtgcagtttgcttcacaggaaatagctgaaaaggctctaaagaaacacaaggaaagaatagggcacaggtatattgaaatctttaagagcagtagagctgaagttagaactcattatgatccaccacgaaagcttatggccatgcagcggccaggtccttatgacagacctggggctggtagagggtataacagcattggcagaggagctggctttgagaggatgaggcgtggtgcttatggtggaggctatggaggctatgatgattacaatggctataatgatggctatggatttgggtcagatagatttggaagagacctcaattactgtttttcaggaatgtctgatcacagatacggggatggtggctctactttccagagcacaacaggacactgtgtacacatgcggggattaccttacagagctactgagaatgacatttataattttttttcaccgctcaaccctgtgagagtacacattgaaattggtcctgatggcagagtaactggtgaagcagatgtcgagttcgcaactcatgaagatgctgtggcagctatgtcaaaagacaaagcaaatatgcaacacagatatgtagaactcttcttgaattctacagcaggagcaagcggtggtgcttacggtagccaaatgctaggaggcatgggtttgtcaaaccagtccagctacgggggcccagccagccagcagctgagtgggggttacggaggcggctacggtggccagagcagcatgagtggatacgaccaagttttacaggaaaactccagtgattttcaatcaaacattgcataggtaaccaaggagcagtgaacagcagctactacagtagtggaagccgtgcatctatgggcgtgaacggaatgggagggttgtctagcatgtccagtatgagtggtggatggggaatgtaattgatcgatcctgatcactgactcttggtcaacctttttttttttttttttttttctttaagaaaactttcagtttaacagtttctgcaatacaagcttgtgatttatgcttactctaagtggaaatcaggattgttatgaagacttaaggcccagtatttttgaatacaatactcatctaggatgtaacagtgaagctgagtaaactataactgttaaacttaagttccagcttttctcaagttagttataggatgtacttaagcagtaagcgtatttaggtaaaagcagttgaattatgttaaatgttgccctttgccacgttaaattgaacactgttttggatgcatgttgaaagacatgcttttatttttttgtaaaacaatataggagctgtgtctactattaaaagtgaaacattttggcatgtttgttaattctagtttcatttaataacctgtaaggcacgtaagtttaagcttttttttttttttaagttaatgggaaaaatttgagacgcaataccaatacttaggattttggtcttggtgtttgtatgaaattctgaggccttgatttaaatctttcattgtattgtgatttccttttaggtatattgcgctaagtgaaacttgtcaaataaatcctccttttaaaaactgccaaaaaagcaacgaaaaaaaaaaaacacatgggggggggcccggcccgagaaatttaaaaacctcgtggggggggaccagggggatggaaggccccacggccaaggacccgggcgaaagggcgggcccccaaaaaaggcgggggcgcggtcgacaccagggggggccggcccacggccggcac

SEQ ID NO: 493855 - DNA, 561 bp, Homo sapiens
tttttttctaagtctaaaaaggttttatttaatcaacataaccatatccaataaaatgcatcttcagaaaaaattaattgcttgcttattagtggaaaatcatatctttaaaaaaaaacaataaatccgactgactattgtagtgtttgatgcaaatttccatccaggcctcttcctttggctcatgccctttcataaactcttgtggaagtcacgcctttcataacacattccaccaccagcttgtcaccatctcgttttctctttattgtggtcgactttccatcccacttctgcacctgcaccaggccccgccatctagggttatgatgctcttcaccttcctgtcgtctgcggtgatttcatcgaattccacgcccagtttgaaggaaatctcggtgtttttaaaagtactctctgaccggatggtgaccaaatccccatttacgctgatgatcatgttgggcttggccatgcctgccactttccttgtgcaaagcccactcccacttctttcatgtaatcatcgaagttttcactggagacaagcttccaggttcc

SEQ ID NO: 493856 - DNA, 240 bp, Homo sapiens
ttgtgaattgtcctagactttaaatatctgtcttctgcaagtgggacaagagaaaaatgaagaagaaaataaaagcaaaaaaaaaaaaaaaaaaaaaagaaaaaaaattaattggcccttaaattcccttccaattggctccaccctaagggaagggtttggaacctgtgctaaaagggttgcaccaagtgctgcctgccaagtgtgttggtttctccaagattcaaacacagcacccat

SEQ ID NO: 493857 - DNA, 1510 bp, Homo sapiens
tggcgaattcggcacgagggccacgcagaagtcgcgtgtctaggtgagtcgcggtgggtcctcgcttgcagttcagcgaccacgtttgtttcgacgccggaccgcgtaagagacgatgatgttgggcacggaaggtggagagggattcgtggtgaaggtccggggcttgccctggtcttgctcggccgatgaagtgcagaggtttttttctgactgcaaaattcaaaatggggctcaaggtattcgtttcatctacaccagagaaggcagaccaagtggcgaggcttttgttgaacttgaatcagaagatgaagtcaaattggccctgaaaaaagacagagaaactatgggacacagatatgttgaagtattcaagtcaaacaacgttgaaatggattgggtgttgaagcatactggtccaaatagtcctgacacggccaatgatggctttgtacggcttagaggacttccctttggatgtagcaaggaagaaattgttcagttcttctcagggttggaaatcgtgccaaatgggataacattgccggtggacttccaggggaggagtacgggggaggccttcgtgcagtttgcttcacaggaaatagctgaaaaggctctaaagaaacacaaggaaagaatagggcacaggtatattgaaatctttaagagcagtagagctgaagttagaactcattatgatccaccacgaaagcttatggccatgcagcggccaggtccttatgacagacctggggctggtagagggtataacagcattggcagaggagctggctttgagaggatgaggcgtggtgcttatggtggaggctatggaggctatgatgattacaatggctataatgatggctatggatttgggtcagatagatttggaagagacctcaattactgtttttcaggaatgtctgatcacagatacggggatggtggctctactttccagagcacaacaggacactgtgtacacatgcggggattaccttacagagctactgagaatgacatttataattttttttcaccgctcaaccctgtgagagtacacattgaaattggtcctgatggcagagtaactggtgaagcagatgtcgagttcgcaactcatgaagatgctgtggcagctatgtcaaaagacaaagcaaatatgcaacacagatatgtagaactcttcttgaattctacagcaggagcaagcggtggtgcttacgaacacagatatgtagaactcttcttgaattctacagcaggagcaagcggtggtgcttatggtagccaaatgatgggaggcatgggcttgtcaaaccagtccagctacgggggcccagccagccagcagctgagtgggggttacggaggcggctacggtggccagagcagcatgagtggatacggtaaagcctgtttgttactgtacttagagtaagttatggtaaagcctgttcgttactgtacttagagtaagttatggtaaagcctcttactcgta

SEQ ID NO: 493858 - DNA, 126 bp, Homo sapiens
  misc_feature (76)..(76): n is a, c, g, or t
cgttggtcagtggtcatctccatcttcatttgaaaacgtgaaagaaaagtgggtgccgtgagataactcaccactngtccaacagactccgttgcttgcattgtcggggactcaagattgatctca

SEQ ID NO: 493859 - DNA, 719 bp, Homo sapiens
  misc_feature (227)..(227): n is a, c, g, or t
  misc_feature (702)..(702): n is a, c, g, or t
  misc_feature (707)..(707): n is a, c, g, or t
  misc_feature (710)..(710): n is a, c, g, or t
tgttttctccctataagaacacccctcttctccaggaaaaaaaaatttttttttttcccccgcgggcggccctttttttaaaaagaagaatttcctcccccccacaaaagggccccccggaggaattttttttggtgcctcccccccgcgtgggaagaagggcctttaaaacaaagaaggaaccgcgcgtggttggggggtgtttttaaaaagaaagaatttttttngcaccaacacaaaacccacccaaaaggagttttccttccctccccccccccccccaccaccttttttgggccccctcctcaccccccctggttgtcctccccccccccccagattttccccccccccttgtgtttttccccgggggaaattttttttgtggcggggcccccggcgccttttttttttttaggggggggggacaaccccccggggggggcttcggtttttttccccccccccccaaaaggcccctttttttggaaaaaaatttaaaaaaagccccccaaaccccccccgggttttttttggggccaacaaacataggaaaaaggggggggggaatatttttatagccccttcccccaaaaatttttcccccaaaattctttggaataaaacccccttttaaccatttttttgaaaagttttccccttcccttaccaagtgggaaattgggggggttatgccccccnggaanaangcctgcagc

SEQ ID NO: 493860 - DNA, 393 bp, Homo sapiens
cttttggggtctttgctaaagtgactaataggtttgcgatcaggttaccaatgtttctgattcgcctgcatctgggaggtgtcccccaggacactatactttgagtgctaaaactgccagggtcccaggcaaactggaacagatgaatcacattaaaagcaataatcactgcggaacacatcctattcacaactgtaatcaaagctatagatacctgcggacaaagtttactactaactagaggcatgagggaattaatacaaagtattctccaaccagattggccagtattacagaagctgctaagacctaacgctggagaaggtgtttgggaagataacagctgcacagagaactacttagtagattgagcaaagaccccgggtaccgagc

SEQ ID NO: 493861 - DNA, 353 bp, Homo sapiens
gctgaccaatggtgcgaggacacagactcatatgtttatgtacatgacaagcgtgattttgggcagtaatattcccctatgtgtgggatcagggaagttcatgagtgcagagccgttgtgggcaagtgtgaccgtgggctgacaacagctgttgcggatcatatgcaagctgagccaactacctatgatgcgtgatagaattcaggctttctggaaagctatctgactgactacactggctctgcgtctctaggaggaccatatgacctaatatatgtattggataaagcttgcatgaagaggtgagtggatgctagacgacatgagaggccctgtgtatgatgcgtcgcttt

SEQ ID NO: 493862 - DNA, 243 bp, Homo sapiens
gccaccgccgactgaaactgcaccgaccccccctcgaggacctgctcttaggttcagaagcaaacctcacgtgcacactgaccgacctaagagacgcctcaggcgccaccttcacctggacaccctcaagcgggaagagcactgttcaaggaccacctaagcatgacctctacggctgctacagcgtgtccagtgccctgccgggctgcgccgagccatggaaccatgggaagaccttcactt

SEQ ID NO: 493863 - DNA, 106 bp, Homo sapiens
gggccatctgcggtgggagcccgccaccaaaatgcagatttttcgtgaaaacccttcacgggggaaggactgttcactctccgagggttgaacccttcgggttacg

SEQ ID NO: 493864 - DNA, 810 bp, Homo sapiens
agcgggggatagtatggcggactggtgatggagtgaggagaatgaaaagaacgtgagaatagaggagcggcgggttgagaaaatggctgtagatggtgggtgtgtgagacaatgtatgagtgaggtaagggtcagcatgggatagcccatgatactatgcacatgcttgcctacgatgcgagtcgtggtaccctatctaaaccatcgctgtatttcagaaccgaggctactcgtacactcttcatccagtatacgtgggtagaagacttacgatggtaatagtctcatagatccactatgtgatactggctggtgctatagcgagtgtagagtgctcctgaataagagtcgtggaccattggtctggctatgtggagaaccacgagttcatgtgcataggaatatggacacgtaataagatagtttccatatcgaaatataggcacgtttggtattgtagggcactagaagagtattgggacagatctcagaggctcgaatgttatgctagccaggaatattagtaaagatgtaccatgagtataccgtaagattgagtgtatgtagtcgcacagcgattttcatcgggatgattgcgaagatcgttaacagagggacatttgctaatcgcgtaagaattcagtaattattgtagtgttgagcactggcactcataatcgatcggtcatgaagaatagtgataaatggggtattgttgaataatatcattctaaaatttagtgaaaatgatgggtgatctgtaagtaatcatagacatgaaattgtacccttttgaatagatgaggtagg

SEQ ID NO: 493865 - DNA, 456 bp, Homo sapiens
tgacttaaagcaacacaaatttattatcttacagttcttgaggttctttatcatcacatctcctctgactctgacccttctacctctctctttcccttataagggtcttcattattatattgggcatcctcagataacccaggacaatcatttcatcttaaaatcatgaatttaatcaaattggaaacgtaccttttgccatgtaatatgacatagtcatatgcttcagggatgaggcagtagacatctttctagagaacattatttagcttactgcaactggcaattagccaattcaaacaaactgtctattgaatgcgttgaagactagagcaagaattgtcagccaggagccagatgggaatggaagagaaaagaacagggaagttgaaaacttttgctgaagggcctgtgcaatccatggtgcatgataaaaggtgcagagggtttgtgcaa

SEQ ID NO: 493866 - DNA, 833 bp, Homo sapiens
acaaacaagtcaagccacctctcgcgaatcactatagcacaatgtcctgccatggtagctcgtaccagagagagagtcttcaggctgagtcgctgaacttcaagaaaacgcttcaggaagaaaaggctgagttgctcagaacaacattgatggagtcggaagaaaatgagaggagcaatgaagaacatgcataagtgttcgagcatctttgattgggaacaacagaccaattttaacactgttgtaagcaagagagaaaatgagaccagaaaatgtaataagatgatcttagttgatgaagttgaaacgtacaatgcagcaacaggaacgggataaagattggatgaagagtcactttctggaagatcgagctcgttggcttgaggaaaagaaaaagctgtgaagaagaatgtcagtaagtcagcgtagtagcagttgggttccttcaccatatgtagctacagcccagaactttatggagcttgtgcactgaatcccaggtgaatcagatagatccgtgtggaaacggagcagatgacaggaagagtggattcagcaattggagacaaagcatgatgtgtgtcacaagaaagatatgcataatgtggtcgtgaagaaagaactgcggataggggcgtggagaagcaacctttgtatttgaaaaggaccgaaggacaaataagcggtaactcaaagactggttgtctccagaaagcatgtattgagcattttcaagggcttctgaaaggataggtactcggagatgtcaggggggagattttggacatcaactggagaaacgcagaaattaggtttttactggtggcgaatgg

SEQ ID NO: 493867 - DNA, 88 bp, Homo sapiens
gatacagggtgtattatctcatatactttcagcactcagatttgataaagaagttgctcttttcactcaaggtcttggatggttttat

SEQ ID NO: 493868 - DNA, 1165 bp, Homo sapiens
gatccagataggcgacacgccggcgggcggctgaggtcgggaatggctgctgtactgcagcgcgtcagagcggctgtccaactcgagtcgtgcgtgtgtagggctgtaacccgggtcccatgtaccctcacaaggcaccaacacctacctagtggggaccgggccccaggagcactcctcattgacactggagacaccagcacttccagaatacatcaggctgtttaaagcaggctctcacactgcaattaacacacagcaatcccaggcaccattgtagtgactcactggcacccgagatcatctggaggcatagcgcagatattccgtcacagcatcacactactgaccactacctattgcatcacaaacctcccacggactcctcagagacgcacgaccctcactacgcgacactggagacgcaacactactgtacatctgacaccactggcgactcgtgactcaccgacctgacgggagccactctaccagagctcctctataccccttggccacaccgtgcttgctcaccatggctcctacttcttagacacgacgggcacaagtgctcactcttacctgcgcgatttgcatacctagcgggcacacggcacaaccgggactctggcacagaacctctatgcatatactgacacctccttacaacacgcacgtatcattgcacacactccaagcttgactatactctcatcccaggaccttggcccaaggttactccaacttgccgacagctcaaccttccacacaacttcactcgcctaccggcacatttcgcgaaagagcaactacctaccatcaacttcgctgaacaccattcacgcactcactcacggcaaaggtgcacgctgtgtcagaccccctcgcacagcaactctccgtccaacctacacttcaactctcgcacaacaaacaacatcatccactctgccacaccacccacctgcaccgccacccacttcccacacagcactaagcaccacagtgacacccaatcctcacaacccccaaccctgtaatagccatacaaacacctcaacaacatacaccacaccatacgatcaaacaacacccacatcaacgtactcgcaacgcctcacccactgctaccatccaaccatacccaccatatgtccgcctacat

SEQ ID NO: 493869 - DNA, 816 bp, Homo sapiens
  misc_feature (11)..(11): n is a, c, g, or t
  misc_feature (74)..(74): n is a, c, g, or t
  misc_feature (157)..(157): n is a, c, g, or t
  misc_feature (175)..(175): n is a, c, g, or t
  misc_feature (190)..(190): n is a, c, g, or t
  misc_feature (197)..(197): n is a, c, g, or t
  misc_feature (212)..(212): n is a, c, g, or t
  misc_feature (218)..(218): n is a, c, g, or t
  misc_feature (227)..(227): n is a, c, g, or t
  misc_feature (236)..(236): n is a, c, g, or t
  misc_feature (244)..(245): n is a, c, g, or t
  misc_feature (248)..(248): n is a, c, g, or t
  misc_feature (252)..(252): n is a, c, g, or t
  misc_feature (258)..(258): n is a, c, g, or t
  misc_feature (264)..(264): n is a, c, g, or t
  misc_feature (278)..(278): n is a, c, g, or t
  misc_feature (280)..(280): n is a, c, g, or t
  misc_feature (311)..(311): n is a, c, g, or t
  misc_feature (335)..(336): n is a, c, g, or t
  misc_feature (347)..(348): n is a, c, g, or t
  misc_feature (369)..(369): n is a, c, g, or t
  misc_feature (385)..(385): n is a, c, g, or t
  misc_feature (410)..(410): n is a, c, g, or t
  misc_feature (464)..(464): n is a, c, g, or t
  misc_feature (471)..(471): n is a, c, g, or t
  misc_feature (479)..(479): n is a, c, g, or t
  misc_feature (520)..(520): n is a, c, g, or t
  misc_feature (524)..(524): n is a, c, g, or t
  misc_feature (552)..(552): n is a, c, g, or t
  misc_feature (556)..(556): n is a, c, g, or t
  misc_feature (567)..(567): n is a, c, g, or t
  misc_feature (572)..(572): n is a, c, g, or t
  misc_feature (584)..(584): n is a, c, g, or t
  misc_feature (589)..(589): n is a, c, g, or t
  misc_feature (591)..(591): n is a, c, g, or t
  misc_feature (597)..(597): n is a, c, g, or t
  misc_feature (599)..(599): n is a, c, g, or t
  misc_feature (643)..(643): n is a, c, g, or t
  misc_feature (740)..(740): n is a, c, g, or t
  misc_feature (792)..(792): n is a, c, g, or t
ctttagggganttgtagccctatcgaatcaaattattacaatatcatctgaaagctttatataaacgtatttcngttcttaattgcactaatgcatacagtttgatatataagcttttttcttgtgttttttctactttgggaggttatatactttntatgagatacatagaaantctactggtttaagngtacttngttttacttttactntagacnttttttccnaccagtttngatgtggnnganccancctttngtatanataacttacttccncnaaaatatttaaagggtatttttagtgtttantgtaagttttgtagtctttttttnngggggtgtgtnntagtctctttactctcagtangtgctctgggctgatngataaacacactaaatttaacaccnttgttgttttgctttttttgtacaatatcattattatgcagtgattgtgatagncttttanggtgtctnccgtcccaaaaattgttaatgagcggctattaatttttgantttntcactagtcttaaggtatgctctgaagnctgntctggtacttnttttntttgtttttttnttttngngggccncnctctctccccaggtcctcccaaggtatctaaaatagactgaaantccttgacagcagattcacaagcaaacaactccttgtccttcataaaggcctccagctgaggtagaacctgctctttcctctcttgctctgcttgtnctgtgagcactttctctttgaaaataaagtggcagcctccatagctgagggnagaaacatatgtgattaaagtagt

SEQ ID NO: 493870 - DNA, 225 bp, Homo sapiens
acggaggcttgctctgttgcccaggctggagtccagtggcatgatctccgctcactacaacctctgcctcccgggttaaggcatttctccctgcctaatcccgagaggtggaggtgcagtaggctgagactgcgctactaactccagcctggacgacggagcagattcagtttaaaggaccaaaaaaaaaggtaaagggcggtaaccattcttaaaattggtaaa

SEQ ID NO: 493871 - DNA, 1014 bp, Homo sapiens
gattagatggcgtgactgtctcacagaaagtgctccgctcccaaaaatgggtccctcgagcttgcctgcctcgtaagcgcagcaagtatgcatcgtgcgaaggtgaacagcttgccgtaaagtgatgacgcacgtgcgcataacccgagtctcaagcctcaccactccttccctgtggatactaggtctggccatgagctcacatcttgcgggatgtcaactaggccgggatcctaggtgaacaactaaggagtgtggttgctaagtgcatagatgcaccattgttagaaacgaactcacccatggaggtgtgttggcgccatttgtggcgcgtctacggtgataacagcccttcgaggactccggacccttcagtggactgtcttgtgtctgagtcaccactcagtgatgaagtgccaagaggcgtaccctactaaaagacattgctactgagagacctaaaagagtcaatgcggctcttaccggaagtaactagcaaacgatacattgcccagtgattgaggactgtggcccgaactcatgttggacaatatggcttaacagtctgtctcatcgaaagtgactagcccctgtcttacgcgtctatttgcccatactccagatgctccttgcctgtctgcatctcaaggatggccaactgactggtagatacctgcgtgaaccggcaggcggggtgggcgctgaacgccgaaactggcgggccccagaacagcgcttgatacagggacgtaccgctacccttggtcggcgccggctgacatacaatgtgcggagacgaccaggataggcgtccgacgggagcaacacttggaaccgcaagcatcccaagacaccaggcgcgccagggccgtatgggcgagaccgtcgcgagactgcgtgcaccggggcacgaaaccgcggacaaagaaataaagcgcgcaaaacgggaaacagaacccgacaacagaccaaccagcacgaaccaagaaggcacaacacacgaggaccaccaca

SEQ ID NO: 493872 - DNA, 207 bp, Homo sapiens
gactacaggcacatgcaccacgcgtggctagtttttgtatttttaatagagacagtgtttcaccatgttggtcaggctggtctcgaactcctgagcctcaggtgatccgccctccccagcctcccaaagtgctaggattacaggcgtgagccacggcgcccggccaaataatatctatcttaaaccagcagtcttcctcaaacttta

SEQ ID NO: 493873 - DNA, 896 bp, Homo sapiens
tcgcgggagcggatggcggcggcgtagcggctccactcgaccgccgggggtgaggaggcggcagccacgacctccgttgcccgggtctccaggtctgccggggagacgcagtgcgagacgcgggccctagtaggaggccgtggccaccgggacccctgaacctgtctaaccggcgcttggagcacttcccccggggtcgcgggtcgtaggtacgacctgtaagacatcacccaggctgaactgtcgcggaaccggtttcccgacggtagcccagtagtgcggcgtgccagcaatggtgtcccctggagggcctgagcctctaccataattggcctgagatgcctgataccagtcttggggaatctctagagccaacaactactctacaaactctaggtcgcgagaaccagtctgtcgcttgctttgtcacccatatccatcttggcactaggcattgcccgctgagggtgcctcatctgttcaggaacaatcgaacaaatgctggggagctctgctcacctgacatcatggcgagcccgtgggaagccctagcgataagcttagaacggtgaacaagaaacaatagctcggaattcctgggcctcggagatattgtgtagggcttccttcttccctagcgggaactctagatttccggatggaagcacgctcaagtatcgcatgacgcggaagatgctggggggaccttcccctctgggtccggccctggtatatactcttgtaaaacagcgttcccagaaaatcccaagtctcccttcttgacgcctgagggcaacctgaacagtcaatctagagtggacaagcaaaccctcatgacggaagacacctgccagagtctgcctgaaggggaaaattaacaactacaatataggcaa

SEQ ID NO: 493874 - DNA, 153 bp, Homo sapiens
  misc_feature (104)..(104): n is a, c, g, or t
ctacttgaaaagtatatgttttatttgtatttgttagttgtagcattttgtatatgacaagaggtgtcattactgattatatgattattgtctagggtatttcnagatactgtagagtcatgttatgaatttcccactaattgttgatttgtc

SEQ ID NO: 493875 - DNA, 351 bp, Homo sapiens
ggctcggggcggctgggcgggcgcacaccatccccgcgggcggcgcaggagccggcgacagcgcgcgagagggaccggggcggtggcggcggcgtggaccgggatggaaggttaagtcctgagcagcagcagcagctgcagccgcctgtgagccaggtcctgcgctgccccgtgccccctgcctcggccgctgggtgcgcccgcagcccggtgattcgctctctctctttgtgcgtttgaagggatgcgcggtgactgtccttgagcgcggaggggcgagctctccggcgggagctgccggagcaatgcggaggcgcatggagcgtgcggccggactggcggcggcggctg

SEQ ID NO: 493876 - DNA, 894 bp, Homo sapiens
ggggtgaaatcggattaaaatggccagcatgaagaggcttcagaatgggcaagatgcagtcttgggttgtcacccaggctgagtgcagcggcacaatctccagtcactacaattccgcctcccgggttcaagcgattctcctgcctcagttcctgaatagtttgggattacaggtgccggtgaccacacccagctaatttgtattttggagtagagcacgggatttcaccatgtttggtcaagctggtctcaatctcctggcctcatgatccgcccccctcggctaccaaagtgctgggattataggcatgagcctctgcaccggtagctctttcttatgacagaagtttctcaccagagtactttcttctgagaaggcagtatcatttttccatatgtaatctccacaagaaccactttcaaacaaataacagtacacctggcactttaaaagaacttcacacattcacaagggagtaaaacaaaccaagatttattatttagaaaaatctagcttagttcttacatgagtagcttttgagatggcacaccacacccttaaaatcaaggattcggggggtaacacgtccaggcatactcgttgggaaattcaggtcttgttcaattactttacgaagattgtccacctagatggcgcaaggagtagattggaaataacgtcgataaggtaaacaactaatttaattacgaagttggtgccgttcaccacggtccctgctgtttcgagacagcgtgtggccaattacgcggcaaatgccactgtcaagaggaagccacataaacacatatgagccgtgacacactgcgctggaaacggctgaagtggagcacaccatacaatcgttgtgtctgtgtttctcgattttgcgctgg

SEQ ID NO: 493877 - DNA, 160 bp, Homo sapiens
aacgggtgatgcggttggagaggtacaccaggagataccctcagataaagcccaggcccatgcatcttttctgcttgcttgaaattgatattatggaaggatgggtgtgcgatcactctcttgatgtatgtggtccgctgctgcaaccgcatcacccgtt

SEQ ID NO: 493878 - DNA, 321 bp, Homo sapiens
aacctttaatatcagggtgcaacatcggtgatgtacttgatccaactatcgaggtcgtagacacctattgttgatatggactctagaacaagattgtgctgttatccctatggtaacttgttccgttgagtcacgttattggatcaagtatgatctatagtagttcgccttgactggtgatgtcttagctatgtctgctcggaggttggtttctgttccgatgtcgctcccgagcgcaatttcttatgcatgtttgtgtactttaggacctgtgggatttgtttttctcctatatgctttagtagtttagcgctccatagg

SEQ ID NO: 493879 - DNA, 4853 bp, Homo sapiens
  misc_feature (567)..(567): n is a, c, g, or t
  misc_feature (601)..(601): n is a, c, g, or t
  misc_feature (620)..(620): n is a, c, g, or t
  misc_feature (623)..(623): n is a, c, g, or t
  misc_feature (721)..(721): n is a, c, g, or t
tggcgaattcggcacgagggccacgcagaagtcgcgtgtctaggtgagtcgcggtgggtcctcgcttgcagttcagcgaccacgtttgtttcgacgccggaccgcgtaagagacgatgatgttgggcacggaaggtggagagggattcgtggtgaaggtccggggcttgccctggtcttgctcggccgatgaagtgcagaggtttttttctgactgcaaaattcaaaatggggctcaaggtattcgtttcatctacaccagagaaggcagaccaagtggcgaggcttttgttgaacttgaatcagaagatgaagtcaaattggccctgaaaaaagacagagaaactatgggacacagatatgttgaagtattcaagtcaaacaacgttgaaatggattgggtgttgaagcatactggtccaaatagtcctgacacggccaatgatggctttgtacggcttagaggacttccctttggatgtagcaaggaagaaattgttcagttcttctcaggtatgtagtcatgtttgttgctgagcagtgagttttggctagcttatggcaaggngatttaatagacgttaaagttgagtagcttaggnatttcagtagttgtaaatngcnaatgaattaatgttttcttcctagagaccttcaaataatttaagcccatcttaaaggtggaaatgaagtacttccaaaatgttaactttgcctatatntagtattatagttcagagtagatctttcattgaggattgccctcaacagcttaactactttcctcacattggtgtccagctaagtacctcaagttaaaggtaagatccctttaccagcagatcatcagtgcgatgaattaggttgttgtaaattatggcaagtgtctgtgttgcaagagacacgtatttgggtcatgtgaccagaagcatctaatggtctaattctctttaatgcaaaagtcggtttatgaaagacttggtttaacctgtgtggtataaacttactgaaaatcagatgtagtgagagtagtttgaatgcttgtagtctcagtatctgaaataagtgttttgaaattgttcctgggcctaaagtatttgaatgtttttatgctgaagagctgataagattgcatgtttaacaatgttagataagatatcgtatattttaagtattaatatttatgatgtgatacactggaagcaagaaatcctttcatggtttagtgtagtatgttaaaaattgatatatgtatcgagtcctaatgtcagaatttttaaaatcaagtctgtttgtttgacactaaattggtgagaattgaatgctgtcaacgttaaatatgaacataatttcatatcttctaggaaagtgctttaagtcctttttgtaagcttgggaatgtatccacggaaaggatttttcatagacggaatttccagaagtgaatcataactactgttagagcataagcatgcatgattgtgctgtgtagatcagttttgttgaaagtttagattgttgtgtttgtcaattataatttaatgtttcagtttttatatgaaatgttgtaaatgtatacctttttaaaaacttgaagttccaataacttaaagcattgaaatataaaatgaggtaaaaggtgttttgaatttagtaaaactgttatttaatgcttaaaacttaattgaattgtataattctcaacattaagttgcatagatatgtgttcttaagttgttgaattcttaatgcatcctgtgttcagcaagttttttttaatatatactgtaccatgggtgtgttaagaatagttatactttataataatggaacttcatattattgcaatgcatatttaaagagtacttgttgaaagcataccattcacctaaagttaaaaattctggtttatttaaagctataagaagaatcatttctgggcttgtgatgttaatattgcccccctactggggttatttgtccttgggttgaagggttggaaatcgtgccaaatgggataacattgccggtggacttccaggggaggagtacgggggaggccttcgtgcagtttgcttcacaggaaatagctgaaaaggctctaaagaaacacaaggaaagaatagggcacaggtggggatggatggttggttggatatgtcacttttcttatggtaaacaattaaatccatattctctctgcttaaaagaagaaattaatgttttgtagtcctaggtaattgatgttttgccatgatttccaaacttgtgtcagtcccacgttacacgcaaactaaattttaggtttgaaatttgtccctagttaattggtctgcttgacaattttgtgagtcttattaaccccaatcaatagagttgagagactatggctttaaaaaattaatgcaaacctggctttagctgtaataacacccacctagaataaattaatattaccataagaaaatgtgatactttctgatcttgtttttaaagttgaaatgcaacaaactttttcttgctgtatataaatattctgcatagtattaataagcatagctttcaagaaattgtcacaaaaggttttattctctttgcttgtgactatttttcattgaagcatgcgcttacctatgctgattcttactaaaagcataggctggggtatttattggcgaaaggaaatgtgtagtgtgggctggactgttggtggaggctggctttttagcccacttgctatacatgctgccaatggatttaagacttgaaatgttgaaagttgagtggaattatttccctcctaaaacatttatttacagtactcctctctacccctaaggttgggctctgcctcagaggagtgagttttttttttttttctataaagtttacattgtcttactatttattgagtgaatttctggtcattgcctatgcaaatataagaaatctggctttaaatattagtcagtttcatggctatgactagattgttttcttgtataactaaatacctgtataaaatgaactaatgttttctctcccctccctaccccttccttatgaacaatgctttaatattgaaatctttaagagcagtagagctgaagttagaactcattatgatccaccacgaaagcttatggccatgcagcggccaggtccttatgacagacctggggctggtagagggtataacagcattggcagaggagctggctttgagaggatgaggcgtggtgcttatggtggaggctatggaggctatgatgattacaatggctataatgatggctatggatttgggtcagatagatttggaagagacctcaattactgtttttcaggaatgtctgatcacagatacggggatggtggctctactttccagagcacaacaggacactgtgtacacatgcggggattaccttacagagctactgagaatgacatttataattttttttcaccgctcaaccctgtgagagtacacattgaaattggtcctgatggcagagtaactggtgaagcagatgtcgagttcgcaactcatgaagatgctgtggcagctatgtcaaaagacaaagcaaatatgcaacacagatatgtagaactcttcttgaattctacagcaggagcaagcggtggtgcttacgaacacagatatgtagaactcttcttgaattctacagcaggagcaagcggtggtgcttatggtagccaaatgatgggaggcatgggcttgtcaaaccagtccagctacgggggcccagccagccagcagctgagtgggggttacggaggcggctacggtggccagagcagcatgagtggatacgaccaagttttacaggaaaactccagtgattttcaatcaaacattgcataggtaaccaaggagcagtgaacagcagctactacagtagtggaagccgtgcatctatgggcgtgaacggaatgggagggttgtctagcatgtccagtatgagtggtggatggggaatgtaattgatcgatcctgatcactgactcttggtcaacctttttttttttttttttttttctttaagaaaactttcagtttaacagtttctgcaatacaagcttgtgatttatgcttactctaagtggaaatcaggattgttatgaagacttaaggcccagtatttttgaatacaatactcatctaggatgtaacagtgaagctgagtaaactataactgttaaacttaagttccagcttttctcaagttagttataggatgtacttaagcagtaagcgtatttaggtaaaagcagttgaattatgttaaatgttgccctttgccacgttaaattgaacactgttttggatgcatgttgaaagacatgcttttatttttttgtaaaacaatataggagctgtgtctactattaaaagtgaaacattttggcatgtttgttaattctagtttcatttaataacctgtaaggcacgtaagtttaagcttttttttttttttaagttaatgggaaaaatttgagacgcaataccaatacttaggattttggtcttggtgtttgtatgaaattctgaggccttgatttaaatctttcattgtattgtgatttccttttaggtatattgcgctaagtgaaacttgtcaaataaatcctccttttaaaaactgccaaaaaagcaacgaaaaaaaaaaaacacatgggggggggcccggcccgagaaatttaaaaacctcgtggggggggaccagggggatggaaggccccacggccaaggacccgggcgaaagggcgggcccccaaaaaaggcgggggcgcggtcgacaccagggggggccggcccacggccggcac

SEQ ID NO: 493880 - DNA, 105 bp, Homo sapiens
gctgaggacactgccatttattactgtgcgagggagggcgagtggtttggaaattcacacgaaagggactacttctacttcggtgtggacgtctggggccaaggg

SEQ ID NO: 493881 - DNA, 4807 bp, Homo sapiens
  misc_feature (567)..(567): n is a, c, g, or t
  misc_feature (601)..(601): n is a, c, g, or t
  misc_feature (620)..(620): n is a, c, g, or t
  misc_feature (623)..(623): n is a, c, g, or t
  misc_feature (721)..(721): n is a, c, g, or t
tggcgaattcggcacgagggccacgcagaagtcgcgtgtctaggtgagtcgcggtgggtcctcgcttgcagttcagcgaccacgtttgtttcgacgccggaccgcgtaagagacgatgatgttgggcacggaaggtggagagggattcgtggtgaaggtccggggcttgccctggtcttgctcggccgatgaagtgcagaggtttttttctgactgcaaaattcaaaatggggctcaaggtattcgtttcatctacaccagagaaggcagaccaagtggcgaggcttttgttgaacttgaatcagaagatgaagtcaaattggccctgaaaaaagacagagaaactatgggacacagatatgttgaagtattcaagtcaaacaacgttgaaatggattgggtgttgaagcatactggtccaaatagtcctgacacggccaatgatggctttgtacggcttagaggacttccctttggatgtagcaaggaagaaattgttcagttcttctcaggtatgtagtcatgtttgttgctgagcagtgagttttggctagcttatggcaaggngatttaatagacgttaaagttgagtagcttaggnatttcagtagttgtaaatngcnaatgaattaatgttttcttcctagagaccttcaaataatttaagcccatcttaaaggtggaaatgaagtacttccaaaatgttaactttgcctatatntagtattatagttcagagtagatctttcattgaggattgccctcaacagcttaactactttcctcacattggtgtccagctaagtacctcaagttaaaggtaagatccctttaccagcagatcatcagtgcgatgaattaggttgttgtaaattatggcaagtgtctgtgttgcaagagacacgtatttgggtcatgtgaccagaagcatctaatggtctaattctctttaatgcaaaagtcggtttatgaaagacttggtttaacctgtgtggtataaacttactgaaaatcagatgtagtgagagtagtttgaatgcttgtagtctcagtatctgaaataagtgttttgaaattgttcctgggcctaaagtatttgaatgtttttatgctgaagagctgataagattgcatgtttaacaatgttagataagatatcgtatattttaagtattaatatttatgatgtgatacactggaagcaagaaatcctttcatggtttagtgtagtatgttaaaaattgatatatgtatcgagtcctaatgtcagaatttttaaaatcaagtctgtttgtttgacactaaattggtgagaattgaatgctgtcaacgttaaatatgaacataatttcatatcttctaggaaagtgctttaagtcctttttgtaagcttgggaatgtatccacggaaaggatttttcatagacggaatttccagaagtgaatcataactactgttagagcataagcatgcatgattgtgctgtgtagatcagttttgttgaaagtttagattgttgtgtttgtcaattataatttaatgtttcagtttttatatgaaatgttgtaaatgtatacctttttaaaaacttgaagttccaataacttaaagcattgaaatataaaatgaggtaaaaggtgttttgaatttagtaaaactgttatttaatgcttaaaacttaattgaattgtataattctcaacattaagttgcatagatatgtgttcttaagttgttgaattcttaatgcatcctgtgttcagcaagttttttttaatatatactgtaccatgggtgtgttaagaatagttatactttataataatggaacttcatattattgcaatgcatatttaaagagtacttgttgaaagcataccattcacctaaagttaaaaattctggtttatttaaagctataagaagaatcatttctgggcttgtgatgttaatattgcccccctactggggttatttgtccttgggttgaagggttggaaatcgtgccaaatgggataacattgccggtggacttccaggggaggagtacgggggaggccttcgtgcagtttgcttcacaggaaatagctgaaaaggctctaaagaaacacaaggaaagaatagggcacaggtggggatggatggttggttggatatgtcacttttcttatggtaaacaattaaatccatattctctctgcttaaaagaagaaattaatgttttgtagtcctaggtaattgatgttttgccatgatttccaaacttgtgtcagtcccacgttacacgcaaactaaattttaggtttgaaatttgtccctagttaattggtctgcttgacaattttgtgagtcttattaaccccaatcaatagagttgagagactatggctttaaaaaattaatgcaaacctggctttagctgtaataacacccacctagaataaattaatattaccataagaaaatgtgatactttctgatcttgtttttaaagttgaaatgcaacaaactttttcttgctgtatataaatattctgcatagtattaataagcatagctttcaagaaattgtcacaaaaggttttattctctttgcttgtgactatttttcattgaagcatgcgcttacctatgctgattcttactaaaagcataggctggggtatttattggcgaaaggaaatgtgtagtgtgggctggactgttggtggaggctggctttttagcccacttgctatacatgctgccaatggatttaagacttgaaatgttgaaagttgagtggaattatttccctcctaaaacattaggagtgagttttttttttttttctataaagtttacattgtcttactatttattgagtgaatttctggtcattgcctatgcaaatataagaaatctggctttaaatattagtcagtttcatggctatgactagattgttttcttgtataactaaatacctgtataaaatgaactaatgttttctctcccctccctaccccttccttatgaacaatgctttaatattgaaatctttaagagcagtagagctgaagttagaactcattatgatccaccacgaaagcttatggccatgcagcggccaggtccttatgacagacctggggctggtagagggtataacagcattggcagaggagctggctttgagaggatgaggcgtggtgcttatggtggaggctatggaggctatgatgattacaatggctataatgatggctatggatttgggtcagatagatttggaagagacctcaattactgtttttcaggaatgtctgatcacagatacggggatggtggctctactttccagagcacaacaggacactgtgtacacatgcggggattaccttacagagctactgagaatgacatttataattttttttcaccgctcaaccctgtgagagtacacattgaaattggtcctgatggcagagtaactggtgaagcagatgtcgagttcgcaactcatgaagatgctgtggcagctatgtcaaaagacaaagcaaatatgcaacacagatatgtagaactcttcttgaattctacagcaggagcaagcggtggtgcttacgaacacagatatgtagaactcttcttgaattctacagcaggagcaagcggtggtgcttatggtagccaaatgatgggaggcatgggcttgtcaaaccagtccagctacgggggcccagccagccagcagctgagtgggggttacggaggcggctacggtggccagagcagcatgagtggatacgaccaagttttacaggaaaactccagtgattttcaatcaaacattgcataggtaaccaaggagcagtgaacagcagctactacagtagtggaagccgtgcatctatgggcgtgaacggaatgggagggttgtctagcatgtccagtatgagtggtggatggggaatgtaattgatcgatcctgatcactgactcttggtcaacctttttttttttttttttttttctttaagaaaactttcagtttaacagtttctgcaatacaagcttgtgatttatgcttactctaagtggaaatcaggattgttatgaagacttaaggcccagtatttttgaatacaatactcatctaggatgtaacagtgaagctgagtaaactataactgttaaacttaagttccagcttttctcaagttagttataggatgtacttaagcagtaagcgtatttaggtaaaagcagttgaattatgttaaatgttgccctttgccacgttaaattgaacactgttttggatgcatgttgaaagacatgcttttatttttttgtaaaacaatataggagctgtgtctactattaaaagtgaaacattttggcatgtttgttaattctagtttcatttaataacctgtaaggcacgtaagtttaagcttttttttttttttaagttaatgggaaaaatttgagacgcaataccaatacttaggattttggtcttggtgtttgtatgaaattctgaggccttgatttaaatctttcattgtattgtgatttccttttaggtatattgcgctaagtgaaacttgtcaaataaatcctccttttaaaaactgccaaaaaagcaacgaaaaaaaaaaaacacatgggggggggcccggcccgagaaatttaaaaacctcgtggggggggaccagggggatggaaggccccacggccaaggacccgggcgaaagggcgggcccccaaaaaaggcgggggcgcggtcgacaccagggggggccggcccacggccggcac

SEQ ID NO: 493882 - DNA, 137 bp, Homo sapiens
tttttttaaagttgcgtacaggctgggtgcattggctcatgcctgtaatcccaacgctttgggagaccgatgtgggtggatcacctgaggttggaaagtcccctatgtatttgcatccgaataaaagccagtttttc

SEQ ID NO: 493883 - DNA, 1307 bp, Homo sapiens
tggcgaattcggcacgagggccacgcagaagtcgcgtgtctaggtgagtcgcggtgggtcctcgcttgcagttcagcgaccacgtttgtttcgacgccggaccgcgtaagagacgatgatgttgggcacggaaggtggagagggattcgtggtgaaggtccggggcttgccctggtcttgctcggccgatgaagtgcagaggtttttttctgactgcaaaattcaaaatggggctcaaggtattcgtttcatctacaccagagaaggcagaccaagtggcgaggcttttgttgaacttgaatcagaagatgaagtcaaattggccctgaaaaaagacagagaaactatgggacacagatatgttgaagtattcaagtcaaacaacgttgaaatggattgggtgttgaagcatactggtccaaatagtcctgacacggccaatgatggctttgtacggcttagaggacttccctttggatgtagcaaggaagaaattgttcagttcttctcagggttggaaatcgtgccaaatgggataacattgccggtggacttccaggggaggagtacgggggaggccttcgtgcagtttgcttcacaggaaatagctgaaaaggctctaaagaaacacaaggaaagaatagggcacaggtatattgaaatctttaagagcagtagagctgaagttagaactcattatgatccaccacgaaagcttatggccatgcagcggccaggtccttatgacagacctggggctggtagagggtataacagcattggcagaggagctggctttgagaggatgaggcgtggtgcttatggtggaggctatggaggctatgatgattacaatggctataatgatggctatggatttgggtcagatagatttggaagagacctcaattactgtttttcaggaatgtctgatcacagatacggggatggtggctctactttccagagcacaacaggacactgtgtacacatgcggggattaccttacagagctactgagaatgacatttataattttttttcaccgctcaaccctgtgagagtacacattgaaattggtcctgatggcagagtaactggtgaagcagatgtcgagttcgcaactcatgaagatgctgtggcagctatgtcaaaagacaaagcaaatatgcaacacagatatgtagaactcttcttgaattctacagcaggagcaagcggtggtgcttacgggaagcaagtgatgtggaaagcagttcaggcataggaaagagtaagttcaaaggccctgtggcagaagcaggaag

SEQ ID NO: 493884 - DNA, 104 bp, Homo sapiens
tgtatctgtagtcccagctactccagaagctgaggtgggagcatcacctgagcccaggagttcgagggtgtagtaagccatgatgacgccactgcactccagcc

SEQ ID NO: 493885 - DNA, 4850 bp, Homo sapiens
  misc_feature (567)..(567): n is a, c, g, or t
  misc_feature (601)..(601): n is a, c, g, or t
  misc_feature (620)..(620): n is a, c, g, or t
  misc_feature (623)..(623): n is a, c, g, or t
  misc_feature (721)..(721): n is a, c, g, or t
  misc_feature (2767)..(2767): n is a, c, g, or t
tggcgaattcggcacgagggccacgcagaagtcgcgtgtctaggtgagtcgcggtgggtcctcgcttgcagttcagcgaccacgtttgtttcgacgccggaccgcgtaagagacgatgatgttgggcacggaaggtggagagggattcgtggtgaaggtccggggcttgccctggtcttgctcggccgatgaagtgcagaggtttttttctgactgcaaaattcaaaatggggctcaaggtattcgtttcatctacaccagagaaggcagaccaagtggcgaggcttttgttgaacttgaatcagaagatgaagtcaaattggccctgaaaaaagacagagaaactatgggacacagatatgttgaagtattcaagtcaaacaacgttgaaatggattgggtgttgaagcatactggtccaaatagtcctgacacggccaatgatggctttgtacggcttagaggacttccctttggatgtagcaaggaagaaattgttcagttcttctcaggtatgtagtcatgtttgttgctgagcagtgagttttggctagcttatggcaaggngatttaatagacgttaaagttgagtagcttaggnatttcagtagttgtaaatngcnaatgaattaatgttttcttcctagagaccttcaaataatttaagcccatcttaaaggtggaaatgaagtacttccaaaatgttaactttgcctatatntagtattatagttcagagtagatctttcattgaggattgccctcaacagcttaactactttcctcacattggtgtccagctaagtacctcaagttaaaggtaagatccctttaccagcagatcatcagtgcgatgaattaggttgttgtaaattatggcaagtgtctgtgttgcaagagacacgtatttgggtcatgtgaccagaagcatctaatggtctaattctctttaatgcaaaagtcggtttatgaaagacttggtttaacctgtgtggtataaacttactgaaaatcagatgtagtgagagtagtttgaatgcttgtagtctcagtatctgaaataagtgttttgaaattgttcctgggcctaaagtatttgaatgtttttatgctgaagagctgataagattgcatgtttaacaatgttagataagatatcgtatattttaagtattaatatttatgatgtgatacactggaagcaagaaatcctttcatggtttagtgtagtatgttaaaaattgatatatgtatcgagtcctaatgtcagaatttttaaaatcaagtctgtttgtttgacactaaattggtgagaattgaatgctgtcaacgttaaatatgaacataatttcatatcttctaggaaagtgctttaagtcctttttgtaagcttgggaatgtatccacggaaaggatttttcatagacggaatttccagaagtgaatcataactactgttagagcataagcatgcatgattgtgctgtgtagatcagttttgttgaaagtttagattgttgtgtttgtcaattataatttaatgtttcagtttttatatgaaatgttgtaaatgtatacctttttaaaaacttgaagttccaataacttaaagcattgaaatataaaatgaggtaaaaggtgttttgaatttagtaaaactgttatttaatgcttaaaacttaattgaattgtataattctcaacattaagttgcatagatatgtgttcttaagttgttgaattcttaatgcatcctgtgttcagcaagttttttttaatatatactgtaccatgggtgtgttaagaatagttatactttataataatggaacttcatattattgcaatgcatatttaaagagtacttgttgaaagcataccattcacctaaagttaaaaattctggtttatttaaagctataagaagaatcatttctgggcttgtgatgttaatattgcccccctactggggttatttgtccttgggttgaagggttggaaatcgtgccaaatgggataacattgccggtggacttccaggggaggagtacgggggaggccttcgtgcagtttgcttcacaggaaatagctgaaaaggctctaaagaaacacaaggaaagaatagggcacaggtggggatggatggttggttggatatgtcacttttcttatggtaaacaattaaatccatattctctctgcttaaaagaagaaattaatgttttgtagtcctaggtaattgatgttttgccatgatttccaaacttgtgtcagtcccacgttacacgcaaactaaattttaggtttgaaatttgtccctagttaattggtctgcttgacaattttgtgagtcttattaaccccaatcaatagagttgagagactatggctttaaaaaattaatgcaaacctggctttagctgtaataacacccacctagaataaattaatattaccataagaaaatgtgatactttctgatcttgtttttaaagttgaaatgcaacaaactttttcttgctgtatataaatattctgcatagtattaataagcatagctttcaagaaattgtcacaaaaggttttattctctttgcttgtgactatttttcattgaagcatgcgcttacctatgctgattcttactaaaagcataggctggggtatttattggcgaaaggaaatgtgtagtgtgggctggactgttggtggaggctggctttttagcccacttgctatacatgctgccaatggatttaagacttgnttgctccccccccccccccccctcccctcccaaaacatatatttacagtactcctctctacccctaaggttgggctctgcctcagaggagtgagttttttttttttttctataaagtttacattgtcttactatttattgagtgaatttctggtcattgcctatgcaaatataagaaatctggctttaaatattagtcagtttcatggctatgactagattgttttcttgtataactaaatacctgtataaaatgaactaatgttttctctcccctccctaccccttccttatgaacaatgctttaatattgaaatctttaagagcagtagagctgaagttagaactcattatgatccaccacgaaagcttatggccatgcagcggccaggtccttatgacagacctggggctggtagagggtataacagcattggcagaggagctggctttgagaggatgaggcgtggtgcttatggtggaggctatggaggctatgatgattacaatggctataatgatggctatggatttgggtcagatagatttggaagagacctcaattactgtttttcaggaatgtctgatcacagatacggggatggtggctctactttccagagcacaacaggacactgtgtacacatgcggggattaccttacagagctactgagaatgacatttataattttttttcaccgctcaaccctgtgagagtacacattgaaattggtcctgatggcagagtaactggtgaagcagatgtcgagttcgcaactcatgaagatgctgtggcagctatgtcaaaagacaaagcaaatatgcaacacagatatgtagaactcttcttgaattctacagcaggagcaagcggtggtgcttacgaacacagatatgtagaactcttcttgaattctacagcaggagcaagcggtggtgcttatggtagccaaatgatgggaggcatgggcttgtcaaaccagtccagctacgggggcccagccagccagcagctgagtgggggttacggaggcggctacggtggccagagcagcatgagtggatacgaccaagttttacaggaaaactccagtgattttcaatcaaacattgcataggtaaccaaggagcagtgaacagcagctactacagtagtggaagccgtgcatctatgggcgtgaacggaatgggagggttgtctagcatgtccagtatgagtggtggatggggaatgtaattgatcgatcctgatcactgactcttggtcaacctttttttttttttttttttttctttaagaaaactttcagtttaacagtttctgcaatacaagcttgtgatttatgcttactctaagtggaaatcaggattgttatgaagacttaaggcccagtatttttgaatacaatactcatctaggatgtaacagtgaagctgagtaaactataactgttaaacttaagttccagcttttctcaagttagttataggatgtacttaagcagtaagcgtatttaggtaaaagcagttgaattatgttaaatgttgccctttgccacgttaaattgaacactgttttggatgcatgttgaaagacatgcttttatttttttgtaaaacaatataggagctgtgtctactattaaaagtgaaacattttggcatgtttgttaattctagtttcatttaataacctgtaaggcacgtaagtttaagcttttttttttttttaagttaatgggaaaaatttgagacgcaataccaatacttaggattttggtcttggtgtttgtatgaaattctgaggccttgatttaaatctttcattgtattgtgatttccttttaggtatattgcgctaagtgaaacttgtcaaataaatcctccttttaaaaactgccaaaaaagcaacgaaaaaaaaaaaacacatgggggggggcccggcccgagaaatttaaaaacctcgtggggggggaccagggggatggaaggccccacggccaaggacccgggcgaaagggcgggcccccaaaaaaggcgggggcgcggtcgacaccagggggggccggcccacggccggcac

SEQ ID NO: 493886 - DNA, 1257 bp, Homo sapiens
  misc_feature (1228)..(1228): n is a, c, g, or t
tggcgaattcggcacgagggccacgcagaagtcgcgtgtctaggtgagtcgcggtgggtcctcgcttgcagttcagcgaccacgtttgtttcgacgccggaccgcgtaagagacgatgatgttgggcacggaaggtggagagggattcgtggtgaaggtccggggcttgccctggtcttgctcggccgatgaagtgcagaggtttttttctgactgcaaaattcaaaatggggctcaaggtattcgtttcatctacaccagagaaggcagaccaagtggcgaggcttttgttgaacttgaatcagaagatgaagtcaaattggccctgaaaaaagacagagaaactatgggacacagatatgttgaagtattcaagtcaaacaacgttgaaatggattgggtgttgaagcatactggtccaaatagtcctgacacggccaatgatggctttgtacggcttagaggacttccctttggatgtagcaaggaagaaattgttcagttcttctcagggttggaaatcgtgccaaatgggataacattgccggtggacttccaggggaggagtacgggggaggccttcgtgcagtttgcttcacaggaaatagctgaaaaggctctaaagaaacacaaggaaagaatagggcacaggtatattgaaatctttaagagcagtagagctgaagttagaactcattatgatccaccacgaaagcttatggccatgcagcggccaggtccttatgacagacctggggctggtagagggtataacagcattggcagaggagctggctttgagaggatgaggcgtggtgcttatggtggaggctatggaggctatgatgattacaatggctataatgatggctatggatttgggtcagatagatttggaagagacctcaattactgtttttggtaaggtaagaattgaatttctcagttgaaggatgcttacactcttgtccatctagacctcaattactgtttttcaggaatgtctgatcacagatacggggatggtggctctactttccagagcacaacaggacactgtgtacacatgcggggattaccttacagagctactgagaatgacatttataatgtaagtgtgagatgaactcacaagtcaatatttcagtatggcagtaagtcagccttattctataaatgtgagcactatgttagaaattttaggtttttttagtaacgttagaaagtnggttgaattctttgaaatgccaggtaaag

SEQ ID NO: 493887 - DNA, 4928 bp, Homo sapiens
  misc_feature (567)..(567): n is a, c, g, or t
  misc_feature (601)..(601): n is a, c, g, or t
  misc_feature (620)..(620): n is a, c, g, or t
  misc_feature (623)..(623): n is a, c, g, or t
  misc_feature (721)..(721): n is a, c, g, or t
tggcgaattcggcacgagggccacgcagaagtcgcgtgtctaggtgagtcgcggtgggtcctcgcttgcagttcagcgaccacgtttgtttcgacgccggaccgcgtaagagacgatgatgttgggcacggaaggtggagagggattcgtggtgaaggtccggggcttgccctggtcttgctcggccgatgaagtgcagaggtttttttctgactgcaaaattcaaaatggggctcaaggtattcgtttcatctacaccagagaaggcagaccaagtggcgaggcttttgttgaacttgaatcagaagatgaagtcaaattggccctgaaaaaagacagagaaactatgggacacagatatgttgaagtattcaagtcaaacaacgttgaaatggattgggtgttgaagcatactggtccaaatagtcctgacacggccaatgatggctttgtacggcttagaggacttccctttggatgtagcaaggaagaaattgttcagttcttctcaggtatgtagtcatgtttgttgctgagcagtgagttttggctagcttatggcaaggngatttaatagacgttaaagttgagtagcttaggnatttcagtagttgtaaatngcnaatgaattaatgttttcttcctagagaccttcaaataatttaagcccatcttaaaggtggaaatgaagtacttccaaaatgttaactttgcctatatntagtattatagttcagagtagatctttcattgaggattgccctcaacagcttaactactttcctcacattggtgtccagctaagtacctcaagttaaaggtaagatccctttaccagcagatcatcagtgcgatgaattaggttgttgtaaattatggcaagtgtctgtgttgcaagagacacgtatttgggtcatgtgaccagaagcatctaatggtctaattctctttaatgcaaaagtcggtttatgaaagacttggtttaacctgtgtggtataaacttactgaaaatcagatgtagtgagagtagtttgaatgcttgtagtctcagtatctgaaataagtgttttgaaattgttcctgggcctaaagtatttgaatgtttttatgctgaagagctgataagattgcatgtttaacaatgttagataagatatcgtatattttaagtattaatatttatgatgtgatacactggaagcaagaaatcctttcatggtttagtgtagtatgttaaaaattgatatatgtatcgagtcctaatgtcagaatttttaaaatcaagtctgtttgtttgacactaaattggtgagaattgaatgctgtcaacgttaaatatgaacataatttcatatcttctaggaaagtgctttaagtcctttttgtaagcttgggaatgtatccacggaaaggatttttcatagacggaatttccagaagtgaatcataactactgttagagcataagcatgcatgattgtgctgtgtagatcagttttgttgaaagtttagattgttgtgtttgtcaattataatttaatgtttcagtttttatatgaaatgttgtaaatgtatacctttttaaaaacttgaagttccaataacttaaagcattgaaatataaaatgaggtaaaaggtgttttgaatttagtaaaactgttatttaatgcttaaaacttaattgaattgtataattctcaacattaagttgcatagatatgtgttcttaagttgttgaattcttaatgcatcctgtgttcagcaagttttttttaatatatactgtaccatgggtgtgttaagaatagttatactttataataatggaacttcatattattgcaatgcatatttaaagagtacttgttgaaagcataccattcacctaaagttaaaaattctggtttatttaaagctataagaagaatcatttctgggcttgtgatgttaatattgcccccctactggggttatttgtccttgggttgaagggttggaaatcgtgccaaatgggataacattgccggtggacttccaggggaggagtacgggggaggccttcgtgcagtttgcttcacaggaaatagctgaaaaggctctaaagaaacacaaggaaagaatagggcacaggtggggatggatggttggttggatatgtcacttttcttatggtaaacaattaaatccatattctctctgcttaaaagaagaaattaatgttttgtagtcctaggtaattgatgttttgccatgatttccaaacttgtgtcagtcccacgttacacgcaaactaaattttaggtttgaaatttgtccctagttaattggtctgcttgacaattttgtgagtcttattaaccccaatcaatagagttgagagactatggctttaaaaaattaatgcaaacctggctttagctgtaataacacccacctagaataaattaatattaccataagaaaatgtgatactttctgatcttgtttttaaagttgaaatgcaacaaactttttcttgctgtatataaatattctgcatagtattaataagcatagctttcaagaaattgtcacaaaaggttttattctctttgcttgtgactatttttcattgaagcatgcgcttacctatgctgattcttactaaaagcataggctggggtatttattggcgaaaggaaatgtgtagtgtgggctggactgttggtggaggctggctttttagcccacttgctatacatgctgccaatggatttaagacttgaaatgttgaaagttgagtggaattatttccctcctaaaacatttatttacagtactcctctctacccctaaggttgggctctgcctcagaggagtgagttttttttttttttctataaagtttacattgtcttactatttattgagtgaatttctggtcattgcctatgcaaatataagaaatctggctttaaatattagtcagtttcatggctatgactagattgttttcttgtataactaaatacctgtataaaatgaactaatgttttctctcccctccctaccccttccttatgaacaatgctttaatattgaaatctttaagagcagtagagctgaagttagaactcattatgatccaccacgaaagcttatggccatgcagcggccaggtccttatgacagacctggggctggtagagggtataacagcattggcagaggagctggctttgagaggatgaggcgtggtgcttatggtggaggctatggaggctatgatgattacaatggctataatgatggctatggatttgggtcagatagatttggaagagacctcaattactgtttttggtaaggtaagaattgaatttctcagttgaaggatgcttacactcttgtccatctagacctcaattactgtttttcaggaatgtctgatcacagatacggggatggtggctctactttccagagcacaacaggacactgtgtacacatgcggggattaccttacagagctactgagaatgacatttataattttttttcaccgctcaaccctgtgagagtacacattgaaattggtcctgatggcagagtaactggtgaagcagatgtcgagttcgcaactcatgaagatgctgtggcagctatgtcaaaagacaaagcaaatatgcaacacagatatgtagaactcttcttgaattctacagcaggagcaagcggtggtgcttacgaacacagatatgtagaactcttcttgaattctacagcaggagcaagcggtggtgcttatggtagccaaatgatgggaggcatgggcttgtcaaaccagtccagctacgggggcccagccagccagcagctgagtgggggttacggaggcggctacggtggccagagcagcatgagtggatacgaccaagttttacaggaaaactccagtgattttcaatcaaacattgcataggtaaccaaggagcagtgaacagcagctactacagtagtggaagccgtgcatctatgggcgtgaacggaatgggagggttgtctagcatgtccagtatgagtggtggatggggaatgtaattgatcgatcctgatcactgactcttggtcaacctttttttttttttttttttttctttaagaaaactttcagtttaacagtttctgcaatacaagcttgtgatttatgcttactctaagtggaaatcaggattgttatgaagacttaaggcccagtatttttgaatacaatactcatctaggatgtaacagtgaagctgagtaaactataactgttaaacttaagttccagcttttctcaagttagttataggatgtacttaagcagtaagcgtatttaggtaaaagcagttgaattatgttaaatgttgccctttgccacgttaaattgaacactgttttggatgcatgttgaaagacatgcttttatttttttgtaaaacaatataggagctgtgtctactattaaaagtgaaacattttggcatgtttgttaattctagtttcatttaataacctgtaaggcacgtaagtttaagcttttttttttttttaagttaatgggaaaaatttgagacgcaataccaatacttaggattttggtcttggtgtttgtatgaaattctgaggccttgatttaaatctttcattgtattgtgatttccttttaggtatattgcgctaagtgaaacttgtcaaataaatcctccttttaaaaactgccaaaaaagcaacgaaaaaaaaaaaacacatgggggggggcccggcccgagaaatttaaaaacctcgtggggggggaccagggggatggaaggccccacggccaaggacccgggcgaaagggcgggcccccaaaaaaggcgggggcgcggtcgacaccagggggggccggcccacggccggcac

SEQ ID NO: 493888 - DNA, 301 bp, Homo sapiens
  misc_feature (45)..(45): n is a, c, g, or t
  misc_feature (58)..(58): n is a, c, g, or t
  misc_feature (66)..(66): n is a, c, g, or t
  misc_feature (75)..(75): n is a, c, g, or t
  misc_feature (78)..(78): n is a, c, g, or t
  misc_feature (85)..(86): n is a, c, g, or t
  misc_feature (163)..(163): n is a, c, g, or t
  misc_feature (188)..(188): n is a, c, g, or t
cgggtccccggtcccccgggtaatttgcgggcggggtcccctttncctccccggtttngtgtcccnggggccttnccnccccccnntttgtggccgtgtccgtgccccgggggtagggggggcaaaatggggcttccccttttcctttgggtccggggtttgnatgggaaaatcctttttccccaatnccgttgggggacgtggggtgggggcagggggacggtgggggagcccttgcccccgattttgggtgggcctccccgccccaggggtcactcagtgatcaggggtaaaaagggct

SEQ ID NO: 493889 - DNA, 267 bp, Homo sapiens
tgttgtagatggggcagaggaatctagaacaatgggacagccagcttgacttgtaaggtacagctataaaaacaaggtaggaatgaggctagacctttaactatccctaaggcatacttggctagctaccttctgtccctgtgatctggcagcatagatcggttgatgactgtgcatcttacccagttcgtggaatttgtgttgtttgttgtttgtaaagtaaatacaggaagagcgatcgttgaaaaaaaataataaaagagaggg

SEQ ID NO: 493890 - DNA, 909 bp, Homo sapiens
  misc_feature (859)..(859): n is a, c, g, or t
  misc_feature (864)..(864): n is a, c, g, or t
tggcgaattcggcacgagggccacgcagaagtcgcgtgtctaggtgagtcgcggtgggtcctcgcttgcagttcagcgaccacgtttgtttcgacgccggaccgcgtaagagacgatgatgttgggcacggaaggtggagagggattcgtggtgaaggtccggggcttgccctggtcttgctcggccgatgaagtgcagaggtttttttctgactgcaaaattcaaaatggggctcaaggtattcgtttcatctacaccagagaaggcagaccaagtggcgaggcttttgttgaacttgaatcagaagatgaagtcaaattggccctgaaaaaagacagagaaactatgggacacagatatgttgaagtattcaagtcaaacaacgttgaaatggattgggtgttgaagcatactggtccaaatagtcctgacacggccaatgatggctttgtacggcttagaggacttccctttggatgtagcaaggaagaaattgttcagttcttctcagggttggaaatcgtgccaaatgggataacattgccggtggacttccaggggaggagtacgggggaggccttcgtgcagtttgcttcacaggaaatagctgaaaaggctctaaagaaacacaaggaaagaatagggcacaggtatattgaaatctttaagagcagtagagctgaagttagaactcattatgatccaccacgaaagcttatggccatgcagcggccaggtccttatgacagacctggggctggtagagggtataacagcattggcagaggagctggctttgagaggatgaggcgtggtgcttatggtggaggctatggaggctatgatgattcccagggntaagnaggcgataggttgggggcacaaattggggaaacccctatggtgtg

SEQ ID NO: 493891 - DNA, 2288 bp, Homo sapiens
tggcgaattcggcacgagggccacgcagaagtcgcgtgtctaggtgagtcgcggtgggtcctcgcttgcagttcagcgaccacgtttgtttcgacgccggaccgcgtaagagacgatgatgttgggcacggaaggtggagagggattcgtggtgaaggtccggggcttgccctggtcttgctcggccgatgaagtgcagaggtttttttctgactgcaaaattcaaaatggggctcaaggtattcgtttcatctacaccagagaaggcagaccaagtggcgaggcttttgttgaacttgaatcagaagatgaagtcaaattggccctgaaaaaagacagagaaactatgggacacagatatgttgaagtattcaagtcaaacaacgttgaaatggattgggtgttgaagcatactggtccaaatagtcctgacacggccaatgatggctttgtacggcttagaggacttccctttggatgtagcaaggaagaaattgttcagttcttctcaatattgaaatctttaagagcagtagagctgaagttagaactcattatgatccaccacgaaagcttatggccatgcagcggccaggtccttatgacagacctggggctggtagagggtataacagcattggcagaggagctggctttgagaggatgaggcgtggtgcttatggtggaggctatggaggctatgatgattacaatggctataatgatggctatggatttgggtcagatagatttggaagagacctcaattactgtttttcaggaatgtctgatcacagatacggggatggtggctctactttccagagcacaacaggacactgtgtacacatgcggggattaccttacagagctactgagaatgacatttataattttttttcaccgctcaaccctgtgagagtacacattgaaattggtcctgatggcagagtaactggtgaagcagatgtcgagttcgcaactcatgaagatgctgtggcagctatgtcaaaagacaaagcaaatatgcaacacagatatgtagaactcttcttgaattctacagcaggagcaagcggtggtgcttacgaacacagatatgtagaactcttcttgaattctacagcaggagcaagcggtggtgcttatggtagccaaatgatgggaggcatgggcttgtcaaaccagtccagctacgggggcccagccagccagcagctgagtgggggttacggaggcggctacggtggccagagcagcatgagtggatacgaccaagttttacaggaaaactccagtgattttcaatcaaacattgcataggtaaccaaggagcagtgaacagcagctactacagtagtggaagccgtgcatctatgggcgtgaacggaatgggagggttgtctagcatgtccagtatgagtggtggatggggaatgtaattgatcgatcctgatcactgactcttggtcaacctttttttttttttttttttttctttaagaaaactttcagtttaacagtttctgcaatacaagcttgtgatttatgcttactctaagtggaaatcaggattgttatgaagacttaaggcccagtatttttgaatacaatactcatctaggatgtaacagtgaagctgagtaaactataactgttaaacttaagttccagcttttctcaagttagttataggatgtacttaagcagtaagcgtatttaggtaaaagcagttgaattatgttaaatgttgccctttgccacgttaaattgaacactgttttggatgcatgttgaaagacatgcttttatttttttgtaaaacaatataggagctgtgtctactattaaaagtgaaacattttggcatgtttgttaattctagtttcatttaataacctgtaaggcacgtaagtttaagcttttttttttttttaagttaatgggaaaaatttgagacgcaataccaatacttaggattttggtcttggtgtttgtatgaaattctgaggccttgatttaaatctttcattgtattgtgatttccttttaggtatattgcgctaagtgaaacttgtcaaataaatcctccttttaaaaactgccaaaaaagcaacgaaaaaaaaaaaacacatgggggggggcccggcccgagaaatttaaaaacctcgtggggggggaccagggggatggaaggccccacggccaaggacccgggcgaaagggcgggcccccaaaaaaggcgggggcgcggtcgacaccagggggggccggcccacggccggcac

SEQ ID NO: 493892 - DNA, 2021 bp, Homo sapiens
tggcgaattcggcacgagggccacgcagaagtcgcgtgtctaggtgagtcgcggtgggtcctcgcttgcagttcagcgaccacgtttgtttcgacgccggaccgcgtaagagacgatgatgttgggcacggaaggtggagagggattcgtggtgaaggtccggggcttgccctggtcttgctcggccgatgaagtgcagaggtttttttctgactgcaaaattcaaaatggggctcaaggtattcgtttcatctacaccagagaaggcagaccaagtggcgaggcttttgttgaacttgaatcagaagatgaagtcaaattggccctgaaaaaagacagagaaactatgggacacagatatgttgaagtattcaagtcaaacaacgttgaaatggattgggtgttgaagcatactggtccaaatagtcctgacacggccaatgatggctttgtacggcttagaggacttccctttggatgtagcaaggaagaaattgttcagttcttctcacaggaatgtctgatcacagatacggggatggtggctctactttccagagcacaacaggacactgtgtacacatgcggggattaccttacagagctactgagaatgacatttataattttttttcaccgctcaaccctgtgagagtacacattgaaattggtcctgatggcagagtaactggtgaagcagatgtcgagttcgcaactcatgaagatgctgtggcagctatgtcaaaagacaaagcaaatatgcaacacagatatgtagaactcttcttgaattctacagcaggagcaagcggtggtgcttacgaacacagatatgtagaactcttcttgaattctacagcaggagcaagcggtggtgcttatggtagccaaatgatgggaggcatgggcttgtcaaaccagtccagctacgggggcccagccagccagcagctgagtgggggttacggaggcggctacggtggccagagcagcatgagtggatacgaccaagttttacaggaaaactccagtgattttcaatcaaacattgcataggtaaccaaggagcagtgaacagcagctactacagtagtggaagccgtgcatctatgggcgtgaacggaatgggagggttgtctagcatgtccagtatgagtggtggatggggaatgtaattgatcgatcctgatcactgactcttggtcaacctttttttttttttttttttttctttaagaaaactttcagtttaacagtttctgcaatacaagcttgtgatttatgcttactctaagtggaaatcaggattgttatgaagacttaaggcccagtatttttgaatacaatactcatctaggatgtaacagtgaagctgagtaaactataactgttaaacttaagttccagcttttctcaagttagttataggatgtacttaagcagtaagcgtatttaggtaaaagcagttgaattatgttaaatgttgccctttgccacgttaaattgaacactgttttggatgcatgttgaaagacatgcttttatttttttgtaaaacaatataggagctgtgtctactattaaaagtgaaacattttggcatgtttgttaattctagtttcatttaataacctgtaaggcacgtaagtttaagcttttttttttttttaagttaatgggaaaaatttgagacgcaataccaatacttaggattttggtcttggtgtttgtatgaaattctgaggccttgatttaaatctttcattgtattgtgatttccttttaggtatattgcgctaagtgaaacttgtcaaataaatcctccttttaaaaactgccaaaaaagcaacgaaaaaaaaaaaacacatgggggggggcccggcccgagaaatttaaaaacctcgtggggggggaccagggggatggaaggccccacggccaaggacccgggcgaaagggcgggcccccaaaaaaggcgggggcgcggtcgacaccagggggggccggcccacggccggcac

SEQ ID NO: 493893 - DNA, 313 bp, Homo sapiens
gggggtttttaaaaaaaccccccccatctggggttttattttaaaggataaaaaaggaatttttttaagggagccacttttttcccaattaaaataaatgaaaaataaatccccatttggctaaattgaaagctttttgttttaaatttgcaaagcccttgaaaaattttttagggcctaggaggtttggggattcctcttttggggggggccccacccctcctttaagcaaaaaaaatcccttggcaaagcaaaatgggttaaaactttataaagctttgggtttgaaaaaaaaagggttttttaaaattta

SEQ ID NO: 493894 - DNA, 2898 bp, Homo sapiens
tggcgaattcggcacgagggccacgcagaagtcgcgtgtctaggtgagtcgcggtgggtcctcgcttgcagttcagcgaccacgtttgtttcgacgccggaccgcgtaagagacgatgatgttgggcacggaaggtggagagggattcgtggtgaaggtccggggcttgccctggtcttgctcggccgatgaagtgcagaggtttttttctgactgcaaaattcaaaatggggctcaaggtattcgtttcatctacaccagagaaggcagaccaagtggcgaggcttttgttgaacttgaatcagaagatgaagtcaaattggccctgaaaaaagacagagaaactatgggacacagatatgttgaaggtttgatttacattgccctagttacagtaaataaagcattaaacaatagaggtctcacccctcctgtaaatatagtttattgtcttttgttatagcatccataagttctttctgtagaggtgggtctccatttatccagagtccactggttgggttattaccacttaaaccattagtactatgctgttttttatacaaaagcacataagctgtgtcctttggaaacctgctcgtaattttctggactgactgaaatgaagtaaatgtcactctactgtcattaaataaaaaccattcttttgacatttccttattttccaaatcctgttcaaaaactgcactgggactatctctccctagtaaatgactctgggaggatgctaatgccagagcctcagactggtggtacatctgatatgaagagtctgtacttgtgatatttctggcataagaatagtaatgcccactttcagaggatataccagagtgaaccacaacggaacttaatagatagggcaccaattttgtgcaggaagcttcatcagtccctgaaggctttaattttttagcaaggttctcactaagatcagtgaagtcaacatctacagaccaactttctgacaatgaagagaaagaagtaattcttttaactggcaactccaaaaccagtggcagtgatacattgtctaaaattttccttctcacatgatacttctgatcatatgaaaatctcaggagagtaagaataaggtattcaggttcctccgtgatttgcatagttttctcagcattttgcagagaggcacagttttcacaataatattggttatcaccagtaagaatctctggagccaaaaaataatttagtaagtcagttactgaaggtgtggtttcacctcctggtttctgaggtacatctttattaacaagaatcttgttagattcgttagggacagaagtgttttcagaacagtaaaactcattaggaggactgcctatggttttttcattcacaagtgagtcacagatgaaggcagctgttgttggattataaactactggttcttctgaaggaccgggtacagaggcttgcattagaccaccatcttgtatactgggtgatgatgctggatcttggacagacatgttttccaaagaagaggaaggacaaaaggcaagcgaaagatctgtaaaggcttccactttttgtgaggtactcctgcagttcaaacaacgtatgtgagttcgtagttttcctccaaacattttttctattaaagtcttctcaccgtcacttgtacgaggggtctctgttagtactgctgctttactagctacttcctgtaaagaagtttcactgcattccagaatttcagaaggcttgtgtgaggcctgaactttcaagatcttttcttcttcatggagcctgtcaaggagaaatctgaggtattcagaacagtcttgctgtgatctgggagtaaaccatggaggtctggaagcctcaaagaatatccgaggtgcgtatgcttccctctgtgtatgggccagaaaggcaaaaagatgctgtaattttttcattaatgaattgcacccatttagatttaaagataatacttgtctcctgaaatctgtggccataaacaaggcttgtataacactgttcatataacatgtatttcctaggttaataagaccagttttcccagtttcagattttccagaaagtctagacaagcaagacgccaaagaattggattgagaagtccaggcactttgattgagaattaacttaatcttctcttcactgggcttaggaaaatcctttattgcctccagaataggttcatagagatctggaaatccagaataatgatacatcatacagtgtatcaattctgttaattgtactaagaaggctgtacttgaaggcagaccatcatttttgaaagaatgaaccaaattaaccacatgaggaacaatcaaatggaacgcctctggagaatgctgaaagctaagcagcatgtgagaaagaactgcaagagcaccaggtctcacaagaggaaaccaaagtcgattaaaaaccagttctattttcagcaaagtaacatctatcaaaatagtaaacttctggacagctgccagtcctttcaggagtgcaattacccatgtatccacatgctgagccaatggccaggatagccagtcaatcattctgcaaagggcttgggtcatacttgcatcttttacatttggatccgtagtaaggctcctgatgagaactgtaatcatctgaagaggaatatgctgcacaaggcttgccaatgctacagaaggttcaaatgatgcatctgtggaagagatgcttgcaaaaacttcttgcagggaaggcagtagtgtggcaggctcggccttccagatgttctgcagcaagttactcacttttgtcacctgggagacatattcccgcagctctctttcctgggtggacacgcactggaattggcctatcgttcgaaccagctgtgtcgac

SEQ ID NO: 493895 - DNA, 363 bp, Homo sapiens
  misc_feature (31)..(31): n is a, c, g, or t
  misc_feature (69)..(69): n is a, c, g, or t
  misc_feature (181)..(181): n is a, c, g, or t
  misc_feature (226)..(226): n is a, c, g, or t
ctgtcccgcgttggccaaatctcccggaacnacgtgggcggccagcgcagcctggtcaacaagtggacnacgttcctaaaggcgcggctggtgtgctcggtgcccggcgttaagggcgacacccactttgatcagctccaggatgtgtttttgttgtcctcgcgggaccaccggaccccgntgctttatgccgttttttccacgtccagcattttccagggctttncggtgggggtgtacagcattaacaacgtgccccgggcctttttgggaccctttgcacccaaggaggggcccatgccccagtgggtgttataccagggttgggtcccctacccccggccaggcatgtgccccagcaga

SEQ ID NO: 493896 - DNA, 1159 bp, Homo sapiens
  misc_feature (135)..(135): n is a, c, g, or t
  misc_feature (665)..(665): n is a, c, g, or t
  misc_feature (748)..(748): n is a, c, g, or t
gaccgagagggacggacggcccaaactggatgaatgctgactgcatgactgactgtatgccgactgaccggctcgtactgctattgctgattaggctctacgtgtggcggctgagaaggtgatggattccgtatngcgacaccatcaggccaatccatgagacaagacggtgaataataagacaaaggcaggtcaagcccctagttgattgttggagtatctggaagtgcatagctatccagatatcgtgtcgacaaggagacgtcggaatgcataggattaggcccgttcgtacataccgcatgcacctttataactaaccagcgtatatgcataccagagggttacatacaagacgactaggaggcctctgctcatgaggtggctacggccgaaattggtaagggtagggagcccataatctcaaattggaggtcagccgaggcagcaaggattaaagaaatcgtctcagaaggaccattgcggttgaacttacgcaatggggacttacgagggacaaaccgaacgctaagcacacattcgtggccagcggcaaccacctgtggctttgggacatccggaagacactttacacaaagaaaagccacatacaatgaaacattcccaattctttacaagcacaacacggggaacaaccagaaacngggtgattcgacgaaaagggacaaaacaagaggggggcggcaaaagccaatccaacacggcgcggccgagaaagaaaaggccnccccggaaagagggacccaacagttccgcacattggaggcgatagaggacacccccagtttcccaaagaagcaacgatgggcccccaaacaagtgacacaagggaaagcgccctttcaggaaggtggagaaagcccccaaaagaaatgagcgttgtccaggcacagtgaaacccccatttttaccacgggaaaacatcaagggcaaaggacacgattgggagccacattttttccccaaagagggaacatcgtgaccgacaaggagttcaccacaccacacggagtggctcatataattattcccacataaacacacgcgcgcatcgtctggtgcacacaccacacgggtgaaagcggaacgcggtcctactcgtgtgacgaccacgtctctcgtcgacagcggaccacaa

SEQ ID NO: 493897 - DNA, 161 bp, Homo sapiens
gaaaggtctccgtcccaggaagcgggacgatggcagttcaattcttagagcaaccgtcgaatccacacctcctggaactcctaccccaattgaaacaaggataaaatccactgaacatggagggcccattgctggcctgaactattttggtcgtctttttt

SEQ ID NO: 493898 - DNA, 318 bp, Homo sapiens
gatggtgttgtctagagcactggcattggcgtgacgagggaacagcacaaaggtgatgtcaccaatgttgtcacccacagcggagtctgtgtcttttagctacagaggaggttccttgttgctaaagatgacctgtggggctgtgtggttgggtgtgcgttcttctttgaactcctgcatgaacacctttccaatgaccacataagcgttattcttaaacactgtgctgaagactactgtgactatgtcctttttaaactcaacatacatggtctcatcatccgtataatggataactgccctgttctatacttcctt

SEQ ID NO: 493899 - DNA, 368 bp, Homo sapiens
acatgttgatgggcatccatacggaaagtcatccaagaacagatcacaagatcctgggcagggtggatggtaaataggccacatcctgggggtcttcttattaccttcatggagctgataaaaaccccagcgttaagttcgggaaccatgaattggtacagggtgccccaaaaatcgaaaagtaatcccagtcggtcgcacagtgctgctggggacagaagcaggcccagcaagtaagggaggggacgggtgccagttagacaaaacggcttctctgtggtaggtgtcagtctagaggtctcacggcaccggagtcataacgggacggaagaatcctttcaactcttcctggattcccgtagggttcc

SEQ ID NO: 493900 - DNA, 209 bp, Homo sapiens
gcgaaaccactagttaatatcttgctgagagaaaccccgactcattttctaatgtcggagcccattccagatgtatcctagaaacacctgcgtccatcagcaaactatatgacactcaagattttgtcacgtacaaaccacagatgttccacagatagaaagtcagcttattatataaccacaagcacagcactagcattgtagctttt

SEQ ID NO: 493901 - DNA, 393 bp, Homo sapiens
  misc_feature (319)..(319): n is a, c, g, or t
gaaagtaataatggtcgaagtaggtctcatcattcacatacacagtaaagcacgtaaacactgttgtagtcgtataaacttattatctatcacaacgccaatattaacttgcgagaataatagagccactggtttaatgtttcctcaagataggtttatgtgtaagctagtatcctgtgtgtacgtagaaatgattcaatacctgcagctggcgaattaggaattgtatttgttgccttttttatattagatgaggtgcaaaaattttaatgctagtcagtatgcaccaccacaggaaagttagatcccattagcactngaaactacagttttggaaacttaggctaagttaatttgatttgttacttgactcacctactgaccttttctttt

SEQ ID NO: 493902 - DNA, 308 bp, Homo sapiens
  misc_feature (131)..(131): n is a, c, g, or t
  misc_feature (286)..(286): n is a, c, g, or t
  misc_feature (299)..(299): n is a, c, g, or t
ctcgatctccgcaaccttccgcgccgtcaacaagacagcactcaacaactccggatccgcctccgccaactccccgacgttccgatacctcttccgaggcaccacgagcacatgcacccgcgcctgcgatntgatgtcccgaaacgcaaacgtggcgtcgtcctgatacacgacgtccgccggaatctccccagcaataatccgctcgaacaacgtctccgccgcatcgctcatacgcgacaccctacaaacccccactggccaaggcgacgaacacacgccacgnaaccaccccactngccaaggcg

SEQ ID NO: 493903 - DNA, 197 bp, Homo sapiens
taaaagggagtcgggctcggtcgcccaaaggggagtgcgtggcgcaatctgggctcacggaaagctcggcctccggggttcaggccattctccggcctcagcctcccaaatagcggaaattacgggggtgcccaccacgctcgagctaatttagggtaatgctaagagatcagggggaatcctctaaaagtcgcacc

SEQ ID NO: 493904 - DNA, 165 bp, Homo sapiens
cggagacgagaactgggccttgctactatactgaaactgactgaaaaaccaacgaaagagagctgggtgtggtggcacgtgctgtggtccccgctccccgggaggcttgaaaggaatcgctgaggctaagagtatgaggctcccgtgtgctatcatcacatctgt

SEQ ID NO: 493905 - DNA, 844 bp, Homo sapiens
  misc_feature (155)..(155): n is a, c, g, or t
gcgtgcagtgttgtaactaccccgtccgcgtgggctctaggaacagctcagctacagccctcgggtgccatccgtttaaatctgtggcattttcagagcctcatcgtgtcaggccttaagtgtcagctggcaggatacgtcataatctcacacgnctaaaaattacgatgaggtaacatgttccctgcattcttaatcgtgtaattgtcctgcacctaatgtggtacagtacaccaagtatagacttagtacattctgtgcactatacacataaaaacatagaacaaacaaaacagaaagaaaaaaaaagggggggcggaagccatatactatatgtcccacaggggagcctcgcggatgcagagagaaccgcacagaggatgtggtaaccagggtggtggtcccctatgtaggtgtgagcatcggtttaacatggtctatgctgtggcggcaggcgcaggtcatttaggacacgcctggtggtccatagggcgcgcaaaacatactgtgggggtactctgtggggggtatgttgtaggaggattgggtgaccccacgtaatttctacgtagtggtgtgtgcctacgcgatatattgggccaaaatatattgatgctccatataaggagtggtatagaagcctcgctgaggggggggtaaagatgaggataagaatgtgtgaagggggatgtcaatgggggtgggtctgtaacaatgaaggacaggggcatatcagggcggtttagccttggaaaaaacctctttcggggcaaaccaggggtgaaatattagcttatgtcatagcagttcttctgtgtctgcgcgaggggcattcggataataa

SEQ ID NO: 493906 - DNA, 172 bp, Homo sapiens
cctccaggtaccctcctccccccctctcgaaaaccctagcttcgattcctggctggaacgctccctctaccggccccctgacgcgcgtagaatttgattacagtcatgatttcaagaaaagcagcttaggacagtaagaatcaggagaggcctcttcactctctgcccagga

SEQ ID NO: 493907 - DNA, 147 bp, Homo sapiens
ttttttttgttcaaaaaagggaaagggccaatttttccccaaaagtctttttaaaacaaaaacaacccgttttctgtgaaatccccaaaaatgttggaaaagtttgtttccattttaaaaaaaatccataaaaaccccccaggggga

SEQ ID NO: 493908 - DNA, 470 bp, Homo sapiens
tgttgtatgccacagaaataaccagatttccttgacaattgtatatttaatgtgtctttgactagaatgtcttaaaaattttatcatctacaattattgttttattggattcttctcaaaaagcggcttacagtcaactacagtccaaaatttgctccttggaagactcctgaatgcaggtttctgatgatgtcagaaagactgtgctgttggattagacagaaaacttctaggactctaattaaaaggctgatgtggtcataaagattgctaacccagtatgaagcaaaacaagagttaattgcatggactgagctaatagaggactgaactgattcttttgtggcttttttggtttgaaacattgctgattctttttgttgttcagtgtcaaattttttttctcttgagctatttgtagcccttaacaattgagtatactcttgtaaataaaatttaaagcagaaaaa

SEQ ID NO: 493909 - DNA, 242 bp, Homo sapiens
aataccccagaatagtagacatttgttatccctatgttcatgtggacagccggagcctagaaatgttaagagattttattccaggtcttataattgctggttgctttgctagacatggcgtgggttagcctggctgagtgaactgtttggccatttacttttcctgagtgacagcagtttattttggtctgatctcttgaataatgcattctgaactgttgccaggttatactttattgctt

SEQ ID NO: 493910 - DNA, 186 bp, Homo sapiens
tagtcctccgggggtcagcttgcggccggcaggtgcggttactcaaggtccgaggtttctggcaaggtacaccttttcttctaggctttcagagccctttatcatggtctgctgaatagtttccaaggtacttagttgtatgtagaggagcagagcagggaaaaaggagtttaaccattttattca

SEQ ID NO: 493911 - DNA, 991 bp, Homo sapiens
cggatggtgccataggttcgaggccggcggttaagttgagcggaggcttcctcttccttaataaccacccacagacatctgttgccaacgcatcgttgcacttcagccttcgctccgtctgttttcgccttagcaacccatctctttccaccacaaacctgagcggcccgtgctcggcgtcggcagcctcccgtcagtccctctcacgcttatctcctggccctgaagcacatcaaggtttcagcagacagctgtcttcaaccagcccactggcccgcatatcctaacgtcccagatggtgtcctcgaagaccgaagccaactttcctttcgtgcccgacagaagctcaagcccaggtgtcgccgtctacccccttaccctgcaccccaggagctcacccagcccctcctggagcagcccagggccccgtgaggcccctgttcgagatgccccaaggcagcctcctcactggcacagtcagactttcagcttctcccggcccagggctcatctgtgaccaagttcttcccagatgtgggctattagaccacgctagttcccatgaggccaaggcgcctgtaatataccctcaacaggttgcctctggtgcaatgaggttcccgagaactgcaaggacctctattgcatttgagcacgcagcccgtattccaactgcggggagtctccccgaaggagccatccctgccaagaatccaggacaccaagcctgttccaagagagcttcaacagtgcgcgggaagggcgtggcctgaggtcagcctggagacgtgaacactcccatttccactgggaagcagcgcgcttgggggattgaaccccaggacgcctggagggggtcaacactgttaacgtgactccagccagggcttgggggaccccataggggaagacacagtacacaggcggcaccccgtgaaacgacggggggcgccacagaaggtcacggcaagcccagagaagcgcagataag

SEQ ID NO: 493912 - DNA, 299 bp, Homo sapiens
tgacgaattactccctcaacatacacttagaatggtataaacttcttataactgaaggtatgagaaaaactaaatttgtcatctgctcttcaggtacgaactcaaaagaaaccccctttttctccatgaaacttacagttctggagagatttctgaggcgatcctgatgtagttgttttcggagatgctgaatttatggaagagcacccactccggcatcttcttggtgacagagtaacaagacagggggtgcagctgtgctacctgcttgtgtgtcagcatcaggtagttccccgagc

SEQ ID NO: 493913 - DNA, 428 bp, Homo sapiens
  misc_feature (69)..(69): n is a, c, g, or t
  misc_feature (89)..(89): n is a, c, g, or t
agccacttggggacctggttgccttttctatcttctgtctggtttctgtctggtgtctgtctcttctcntgcctctgtcatgtcccccnatccttctttgttgtacccaccttccttcagtgctagaacagaacagcgtaacttatgttcccattgttaagacttcaggcctaaccaacaagtgtctttcctttctcctggggagggcggcctcttttgcctcctgccctgaaaatgccatcatactttgggtctccatagtgggttccctttgctcagaagagcaggctgctaatgccaccaagggcctggccgcagtagcctctggtgcctgtggggagccgaccctgccatgatctttcttgttctctttttgatattttaagactcttaaaattttagatactctaaactttaaaaaaaaaaaa

SEQ ID NO: 493914 - DNA, 544 bp, Homo sapiens
cggcacgagggttggtggaataacaataaaaagactgcaaagatggctataattttcagagttaaaaaatgcaaaccatactgtggcaaaaccttaattctgagcccactaaatcaaaacttgtatacaaacagcagctacccctatgctcctctgccagccagataaaatgtcagggtatgaaggctcagctgatgaaggagcacaaacgggttctcagtcatcttggcagggcctgttctgcaggctttatcaagcccagatggtctttatccacccgtgaacctccttgtgcagagtgaggcctgatggccttggccctaaaatcaccagacctggcttcaaaccccagctggcacattttccagaggtgcaaccttgcacctccatttccttctgtgtaaaacagagataaccacagctcctacctgcccaggctgctgagaggaggtgagatggatacaatgcaggaacacagcggtagcacttactgtatttttttattgttattatcttacctttttttctgatgttggagcgcccg

SEQ ID NO: 493915 - DNA, 145 bp, Homo sapiens
aaatcgaaggacaccacatcctattgctgagaccgtaggatgttaactgtagtggacaagaagtcattgacatgttaataccagaataaattatctttagtggaaggaataggatactaccaatgctgactcacagttattctta

SEQ ID NO: 493916 - DNA, 1068 bp, Homo sapiens
  misc_feature (1068)..(1068): n is a, c, g, or t
gtgggaacactgtgtgcggctgctgcaacggcaggacttgggccttagatattcctaggtagagtgttcgtcgtggagtagccgcctgggacaggacttgtaaacagaggttaacacgagaaatctgcctcctgggccatggccgttttcatagagcgcctgtgttcttgcatctatgagcccacgagtacgaagacaggatgggccagttccgtcacagaggatagcttggcctgcctgagcaagaagagtgggatacgtgatcttgggatctcgtccatcaccagactctgagccttcaatgacaggcaggctgcaatggacacgggaggtacactggacccctgcatgaggggcactcgaagatcttgcatgctggggagcgggggaggggatgccgtggtaatgccacctgtaacacgtccagcatgaccaacctgcgagcagaggcatcatgtccttcagaacgaggggaagaatcgtgacctctgatcaagaaagcacagaaggaggagacgctgtgggaccctaagtgcagaggctcaatcgtaacacagcggatgccttgcggcggttggttgcaacacactcggatagggtgcagagagagatgtcgaggagcacagccaaggacgcgaccgttaccgtgtatccatggccactcggggcatggatgagccaggggaaccctggaagcagacacgcaagggagaaaccccggttaaccctttttctgagaagaactggccagtgttgacagttgagaatggaccaatttggggaacctagacctgtggccaacttgtgggacaaacgttggaggaactcttgcgatcgaaaggggaaaggacagtccgttggggagaccacccccgcaaccaaaagggccgacgagcagacgagttcctggaccacaaattgggagagcgcatggggaacttaggggagagtagggatgaaattccaataccagcccgaaacaccggccactccgggagaggacagcgggccaaacgcaagcgggttgccgtggacagccaaaaaagacccaaacgaggcccacagggn

SEQ ID NO: 493917 - DNA, 175 bp, Homo sapiens
aaaaaaaaaaaaaaaaattctggtagagacagaatctcgctattgtggcccaggttggtttcaaactcctggcctcaagcaatcctcccacctcggccccccaaaggtgataagataaggggcgtgagtcaccttgggttggaaactttggattgagaattaaaattataaatta

SEQ ID NO: 493918 - DNA, 387 bp, Homo sapiens
aagagatgtacgaatgttttcaaaaccaagtatcacagtttaatgtacatggccgcaccataatgagatgtgagccattgtgattgtggggacagagggagagagatgtaattttacaatcatgtacccccataaacatggctgtaaacccactgcatgcagaaacttgaatgtcactgccagacattcatttccagagagaacctatcccaaatgtggaattaactgcctatgccaagtccctgaaaacacagcttcagtatagtggggctcattcacacatgaatcaagcaatccagcctcatgggaagtcatggcacagataactgtcaagcccttgcacagctggagaaatggcatcattatcagctataatgacttgtatct

SEQ ID NO: 493919 - DNA, 106 bp, Homo sapiens
tggggacgagggggacgaagactggagggacctccctcctacaagctaccgatcccaaaagcgacgctggaggcgacagtgagatgccctcccagctcttcactcg

SEQ ID NO: 493920 - DNA, 415 bp, Homo sapiens
gaaatgaaatcaacccgagtgcaggggaatggaatggaatggaatgcaatggaatggaatcatccggaatggaatggaatggaatggaatgcaaagcaatggaatcaactcgattgcaatggaatggaatggaatggaaaggaatacattggaatcaacccgagtggaatggaatggaaaggactggaatggagtggaatggaatggaatcaacccgactgcaggggaatggaatggaatggaatgcaatggaatggattcaacttgaatggaatggaaagaatggaatcaacacgagtggaatggcatggattggaatggaatggaatggaatcaacccgagtacaggggaatggaatggaatggaatgcaatggaagttgatccggccgcgaatttagtagtagtagtcgacc

SEQ ID NO: 493921 - DNA, 2187 bp, Homo sapiens
  misc_feature (567)..(567): n is a, c, g, or t
  misc_feature (601)..(601): n is a, c, g, or t
  misc_feature (620)..(620): n is a, c, g, or t
  misc_feature (623)..(623): n is a, c, g, or t
  misc_feature (721)..(721): n is a, c, g, or t
tggcgaattcggcacgagggccacgcagaagtcgcgtgtctaggtgagtcgcggtgggtcctcgcttgcagttcagcgaccacgtttgtttcgacgccggaccgcgtaagagacgatgatgttgggcacggaaggtggagagggattcgtggtgaaggtccggggcttgccctggtcttgctcggccgatgaagtgcagaggtttttttctgactgcaaaattcaaaatggggctcaaggtattcgtttcatctacaccagagaaggcagaccaagtggcgaggcttttgttgaacttgaatcagaagatgaagtcaaattggccctgaaaaaagacagagaaactatgggacacagatatgttgaagtattcaagtcaaacaacgttgaaatggattgggtgttgaagcatactggtccaaatagtcctgacacggccaatgatggctttgtacggcttagaggacttccctttggatgtagcaaggaagaaattgttcagttcttctcaggtatgtagtcatgtttgttgctgagcagtgagttttggctagcttatggcaaggngatttaatagacgttaaagttgagtagcttaggnatttcagtagttgtaaatngcnaatgaattaatgttttcttcctagagaccttcaaataatttaagcccatcttaaaggtggaaatgaagtacttccaaaatgttaactttgcctatatntagtattatagttcagagtagatctttcattgaggattgccctcaacagcttaactactttcctcacattggtgtccagctaagtacctcaagttaaaggtaagatccctttaccagcagatcatcagtgcgatgaattaggttgttgtaaattatggcaagtgtctgtgttgcaagagacacgtatttgggtcatgtgaccagaagcatctaatggtctaattctctttaatgcaaaagtcggtttatgaaagacttggtttaacctgtgtggtataaacttactgaaaatcagatgtagtgagagtagtttgaatgcttgtagtctcagtatctgaaataagtgttttgaaattgttcctgggcctaaagtatttgaatgtttttatgctgaagagctgataagattgcatgtttaacaatgttagataagatatcgtatattttaagtattaatatttatgatgtgatacactggaagcaagaaatcctttcatggtttagtgtagtatgttaaaaattgatatatgtatcgagtcctaatgtcagaatttttaaaatcaagtctgtttgtttgacactaaattggtgagaattgaatgctgtcaacgttaaatatgaacataatttcatatcttctaggaaagtgctttaagtcctttttgtaagcttgggaatgtatccacggaaaggatttttcatagacggaatttccagaagtgaatcataactactgttagagcataagcatgcatgattgtgctgtgtagatcagttttgttgaaagtttagattgttgtgtttgtcaattataatttaatgtttcagtttttatatgaaatgttgtaaatgtatacctttttaaaaacttgaagttccaataacttaaagcattgaaatataaaatgaggtaaaaggtgttttgaatttagtaaaactgttatttaatgcttaaaacttaattgaattgtataattctcaacattaagttgcatagatatgtgttcttaagttgttgaattcttaatgcatcctgtgttcagcaagttttttttaatatatactgtaccatgggtgtgttaagaatagttatactttataataatggaacttcatattattgcaatgcatatttaaagagtacttgttgaaagcataccattcacctaaagttaaaaattctggtttatttaaagctataagaagaatcatttctgggcttgtgatgttaatattgcccccctactggggttatttgtccttgggttgaagggttggaaatcgtgccaaatgggataacattgccggtggacttccaggggaggagtcaggtcacccgagcctttaacaaaaatacggggatttagttaaaacgttaaaatactggccgtgcatagtaaatcacgcctgtaatcccggcactttgggaggccgaagggcgtggatcacactgtgagcagcgttgg

SEQ ID NO: 493922 - DNA, 2007 bp, Homo sapiens
tggcgaattcggcacgagggccacgcagaagtcgcgtgtctaggtgagtcgcggtgggtcctcgcttgcagttcagcgaccacgtttgtttcgacgccggaccgcgtaagagacgatgatgttgggcacggaaggtggagagggattcgtggtgaaggtccggggcttgccctggtcttgctcggccgatgaagtgcagaggtttttttctgactgcaaaattcaaaatggggctcaaggtattcgtttcatctacaccagagaaggcagaccaagtggcgaggcttttgttgaacttgaatcagaagatgaagtcaaattggccctgaaaaaagacagagaaactatgggacacagatatgttgaaggtttgatttacattgccctagttacagtaaataaagcattaaacaatagaggtctcacccctcctgtaaatatagtttattgtcttttgttatagcatccataagttctttctgtagaggtgggtctccatttatccagagtccactggttgggttattaccacttaaaccattagtactatgctgttttttatacaaaagcacataagctgtgtcctttggaaacctgctcgtaattttctggactgactgaaatgaagtaaatgtcactctactgtcattaaataaaaaccattcttttgacatttccttattttccaaatcctgttcaaaaactgcactgggactatctctccctagtaaatgactctgggaggatgctaatgccagagcctcagactggtggtacatctgatatgaagagtctgtacttgtgatatttctggcataagaatagtaatgcccactttcagaggatataccagagtgaaccacaacggaacttaatagatagggcaccaattttgtgcaggaagcttcatcagtccctgaaggctttaattttttagcaaggttctcactaagatcagtgaagtcaacatctacagaccaactttctgacaatgaagagaaagaagtaattcttttaactggcaactccaaaaccagtggcagtgatacattgtctaaaattttccttctcacatgatacttctgatcatatgaaaatctcaggagagtaagaataaggtattcaggttcctccgtgatttgcatagttttctcagcattttgcagagaggcacagttttcacaataatattggttatcaccagtaagaatctctggagccaaaaaataatttagtaagtcagttactgaaggtgtggtttcacctcctggtttctgaggtacatctttattaacaagaatcttgttagattcgttagggacagaagtgttttcagaacagtaaaactcattaggaggactgcctatggttttttcattcacaagtgagtcacagatgaaggcagctgttgttggattataaactactggttcttctgaaggaccgggtacagaggcttgcattagaccaccatcttgtatactgggtgatgatgctggatcttggacagacatgttttccaaagaagaggaaggacaaaaggcaagcgaaagatctgtaaaggcttccactttttgtgaggtactcctgcagttcaaacaacgtatgtgagttcgtagttttcctccaaacattttttctattaaagtcttctcaccgtcacttgtacgaggggtctctgttagtactgctgctttactagctacttcctgtaaagaagtttcactgcattccagaatttcagaaggcttgtgtgaggcctgaactttcaagatcttttcttcttcatggagcctgcagcagaggatatcattatatagctacttaaattaacttcaaatgtcatttctatttaaaaatattagtggcttctataaactattctaatcaaatttaatgtaaacaaatcaggtttttcctgttttaattaaaagaaaattgaacagttttgagatgcagaaaaaaagctgggtggctattactactctatattctcatacactttct

SEQ ID NO: 493923 - DNA, 2871 bp, Homo sapiens
tggcgaattcggcacgagggccacgcagaagtcgcgtgtctaggtgagtcgcggtgggtcctcgcttgcagttcagcgaccacgtttgtttcgacgccggaccgcgtaagagacgatgatgttgggcacggaaggtggagagggattcgtggtgaaggtccggggcttgccctggtcttgctcggccgatgaagtgcagaggtttttttctgactgcaaaattcaaaatggggctcaaggtattcgtttcatctacaccagagaaggcagaccaagtggcgaggcttttgttgaacttgaatcagaagatgaagtcaaattggccctgaaaaaagacagagaaactatgggacacagatatgttgaaggtttgatttacattgccctagttacagtaaataaagcattaaacaatagaggtctcacccctcctgtaaatatagtttattgtcttttgttatagcatccataagttctttctgtagaggtgggtctccatttatccagagtccactggttgggttattaccacttaaaccattagtactatgctgttttttatacaaaagcacataagctgtgtcctttggaaacctgctcgtaattttctggactgactgaaatgaagtaaatgtcactctactgtcattaaataaaaaccattcttttgacatttccttattttccaaatcctgttcaaaaactgcactgggactatctctccctagtaaatgactctgggaggatgctaatgccagagcctcagactggtggtacatctgatatgaagagtctgtacttgtgatatttctggcataagaatagtaatgcccactttcagaggatataccagagtgaaccacaacggaacttaatagatagggcaccaattttgtgcaggaagcttcatcagtccctgaaggctttaattttttagcaaggttctcactaagatcagtgaagtcaacatctacagaccaactttctgacaatgaagagaaagaagtaattcttttaactggcaactccaaaaccagtggcagtgatacattgtctaaaattttccttctcacatgatacttctgatcatatgaaaatctcaggagagtaagaataaggtattcaggttcctccgtgatttgcatagttttctcagcattttgcagagaggcacagttttcacaataatattggttatcaccagtaagaatctctggagccaaaaaataatttagtaagtcagttactgaaggtgtggtttcacctcctggtttctgaggtacatctttattaacaagaatcttgttagattcgttagggacagaagtgttttcagaacagtaaaactcattcacaagtgagtcacagatgaaggcagctgttgttggattataaactactggttcttctgaaggaccgggtacagaggcttgcattagaccaccatcttgtatactgggtgatgatgctggatcttggacagacatgttttccaaagaagaggaaggacaaaaggcaagcgaaagatctgtaaaggcttccactttttgtgaggtactcctgcagttcaaacaacgtatgtgagttcgtagttttcctccaaacattttttctattaaagtcttctcaccgtcacttgtacgaggggtctctgttagtactgctgctttactagctacttcctgtaaagaagtttcactgcattccagaatttcagaaggcttgtgtgaggcctgaactttcaagatcttttcttcttcatggagcctgtcaaggagaaatctgaggtattcagaacagtcttgctgtgatctgggagtaaaccatggaggtctggaagcctcaaagaatatccgaggtgcgtatgcttccctctgtgtatgggccagaaaggcaaaaagatgctgtaattttttcattaatgaattgcacccatttagatttaaagataatacttgtctcctgaaatctgtggccataaacaaggcttgtataacactgttcatataacatgtatttcctaggttaataagaccagttttcccagtttcagattttccagaaagtctagacaagcaagacgccaaagaattggattgagaagtccaggcactttgattgagaattaacttaatcttctcttcactgggcttaggaaaatcctttattgcctccagaataggttcatagagatctggaaatccagaataatgatacatcatacagtgtatcaattctgttaattgtactaagaaggctgtacttgaaggcagaccatcatttttgaaagaatgaaccaaattaaccacatgaggaacaatcaaatggaacgcctctggagaatgctgaaagctaagcagcatgtgagaaagaactgcaagagcaccaggtctcacaagaggaaaccaaagtcgattaaaaaccagttctattttcagcaaagtaacatctatcaaaatagtaaacttctggacagctgccagtcctttcaggagtgcaattacccatgtatccacatgctgagccaatggccaggatagccagtcaatcattctgcaaagggcttgggtcatacttgcatcttttacatttggatccgtagtaaggctcctgatgagaactgtaatcatctgaagaggaatatgctgcacaaggcttgccaatgctacagaaggttcaaatgatgcatctgtggaagagatgcttgcaaaaacttcttgcagggaaggcagtagtgtggcaggctcggccttccagatgttctgcagcaagttactcacttttgtcacctgggagacatattcccgcagctctctttcctgggtggacacgcactggaattggcctatcgttcgaaccagctgtgtcgac

SEQ ID NO: 493924 - DNA, 273 bp, Homo sapiens
tggcgaattcggcacgagggccacgcagaagtcgcgtgtctaggtgagtcgcggtgggtcctcgcttgcagttcagcgaccacggtgggtaccgtttttgcgaggattgtttgtccccatatctctgggagggccacggggaccttggcgagctgcaggctgccgtcgagagccgcgagtggttcgctgaatctcggcaccgccgctgaggcctgcaggccgcgccgactctattgtgtgagaagtcggaggaggcggagcggaagcggccgc

SEQ ID NO: 493925 - DNA, 110 bp, Homo sapiens
aatgtctctcactgagcagatatagcagaatcgtgagctgagtatagaatctaaacatagaacaaaccctattgataagaatctgcaatatgctgggatagtaaatgaaa

SEQ ID NO: 493926 - DNA, 872 bp, Homo sapiens
ggccctgacagattctcctatcggggtcgcgaggtacgctcagatgggtacctggacggtttcgttgaccatgctgtcccgggtggtactttccgccgcgccacagtgggcccctctctgaatgaatgcaggcgcattcctctaggtccaggggcgtatatgctaagggcatacaaggcacgcttttcattatcacgggcgtgtgcaactactcgtttgtgcctgtcacaccacgctctctcgctgagctacggatgggaggaagagcttcgttgatggacgtagagtccgctgagggaattcttccagatatgtctgtctagtcctaaaacactggtgtatagcaggaccctattggtactctgggaactggtgcttatcttgtacgccttatatctcgagacatgaaatattattgtgagttagtcgcatgacgaactttctactgctcctagtcatgaatatcgtaggtgtaggctgggtctgatggaatgatataaaatatggtcccttttttggttggcagaactctggtgatcaggcttcggatgacgcaagccaagctgtgcccaacctaagaagaggcgacggcaggcttgccatgcacaaacagcatccagaatgctaattcgatgactgggagcaatgtgcacagcgtgtgcactgggtattcgagatatgccgccatcaccttttaggagtgtgcagtggaataaacctgtgctgagggttgtgggaacgtgacttagccggagaactactgtttagagtggtgtccaggaggaaacgaatccgtcctggacaatgcataattatgctcgtgcgaaaacatgatgtggtcaaagtgaacaagaacccatgataaatcgggg

SEQ ID NO: 493927 - DNA, 224 bp, Homo sapiens
cagggtccaccacgtcgggatgtgcgcccagccctcttcgcgatcgccttcgctcagctcgatgacaccttcgatgacttcgtagagcatttgcccggccatcgccacggccatcagcacgccaagcggtggcaccgccatggccaccaggttgagaccgaacaggccaatgctcatgtaatgcgcggcgcgcagtgagcgcgaggcctcatcgacatctgcgg

SEQ ID NO: 493928 - DNA, 199 bp, Homo sapiens
ttacatgatacaatcgagctcggtaccgtgagtgaggatggtaggtatggatgccgcccaagagcgctgaggtagtttacgaggtggaggcatgtttgttggcattgtttgagaacttgttccagctcgaggggaatgagaagcatctggaaccggagaatgtagtgaggggttggctggtgacattccaagcttgatg

SEQ ID NO: 493929 - DNA, 502 bp, Homo sapiens
tgaggacaatgaggaccgcactgaaggcagtggaaacaaacgcttccccaatgtcatacgtgatgcgttagatatactagacatgtatacatacgagatgcattctacatacagcgtagcggcatgccgcaagcatacgctgtgcttttcataaacaaaagcagtgaagtctcacaacggccccggaggggggtcagtcatatgatcctcaccccatgtcacagatgacgaggtgaggcacggaagggctgagggtggcaatgggacggaagccgcagtggcctggctctggccccctcccaatccatctgcactggccaggactggggtgctggacacagggcagtggggtgtgggcggcgtgtgagtcgcagggccggttccgcgggttcagggcccatcgggattcaccagcagcagcgccaggctctacggtcaggaccagatgggccttggtcaggcggcctgtggcagggcccttggcctggagcagccctccgag

SEQ ID NO: 493930 - DNA, 397 bp, Homo sapiens
  misc_feature (49)..(49): n is a, c, g, or t
ctccgaccactgcgccctgcctattttcatattgaacttttaaattagntttctttatggtggcgggatgattattgtaattatacttgggaacagaagtgatgaaaaaggtatgttacttgagatatgggaaacgctattttccatgtttagttatggggtattcaagtctaactagtggaaagtatggatacattttatttatttttttgagacggagtctcgctctgttactcaggctagagtgcagcgatgcgatctcagctcactgcaacttctgcctcctgggatcaagcaatttctggctaatttttgtatttttagaagagacggggtttgaccatgttggccaggctggactaaaacacctgacctcaagtgagctgcctgccttcac

SEQ ID NO: 493931 - DNA, 1567 bp, Homo sapiens
  misc_feature (438)..(438): n is a, c, g, or t
  misc_feature (452)..(452): n is a, c, g, or t
  misc_feature (454)..(454): n is a, c, g, or t
  misc_feature (468)..(468): n is a, c, g, or t
  misc_feature (471)..(472): n is a, c, g, or t
  misc_feature (474)..(474): n is a, c, g, or t
  misc_feature (481)..(481): n is a, c, g, or t
  misc_feature (511)..(511): n is a, c, g, or t
  misc_feature (534)..(534): n is a, c, g, or t
  misc_feature (546)..(546): n is a, c, g, or t
  misc_feature (574)..(574): n is a, c, g, or t
  misc_feature (591)..(591): n is a, c, g, or t
  misc_feature (593)..(593): n is a, c, g, or t
  misc_feature (612)..(612): n is a, c, g, or t
  misc_feature (615)..(615): n is a, c, g, or t
  misc_feature (620)..(621): n is a, c, g, or t
  misc_feature (625)..(625): n is a, c, g, or t
  misc_feature (627)..(627): n is a, c, g, or t
  misc_feature (639)..(639): n is a, c, g, or t
  misc_feature (646)..(646): n is a, c, g, or t
  misc_feature (1174)..(1174): n is a, c, g, or t
  misc_feature (1354)..(1354): n is a, c, g, or t
  misc_feature (1367)..(1367): n is a, c, g, or t
  misc_feature (1455)..(1455): n is a, c, g, or t
ttagacatccttccgtgatcgccttgactccagggggtctatatctcagggtgttctccctaatttatgcgtaggaagactgtgttctaatagtgcagaatcacagtgtggcgccgtctgtaaacatattgttcagaggtagcaggttatgcacgctggtatcaactgtaatgttgatgtccgaagctcctagggtaaccccccttggggcaacaaagattgggcacggaattttattaaaaaagtccggtgtatgtatcatcagaatttcttcggaatggatccagatttagcccatttgaggctactctaaagtcagattaaccggcattataactggaataactttaaatacctgttcctttttagatgttcttatccggctgctcccctatcagacctcatcttcggtaatgttattttttgtttacctccctncattcatcacatgntnattgaaaacttagntcnncnagtttgncaatactgcttttagaactgtaagtagtcnaagaacgttgcccaagatcaaanttttaaaaaaanaaatgagcatgtgatatgtggcaatgtnttcactctacttggtantnagactaaaccattcctcantgntctannatgntnaagaaatcattnagggggnagggagatggatgctcagttgtcacatcaaaggatacagcattattctagcagcatccattcttgtttaagccttccactgttagagatttgaggttacatgatatgctttatgctcataactgatgtggctggagaattggtattgaatttatagcatcagcagaacagaaaatgtgatgtattttatgcatgtcaataaaggaatgacctgttcttgttctacagagaatggaaattggaagtcaaacaccctttgtattccaaaatagggtctcaaacattttgtaattttcatttaaattgttaggaggcttggagctattagttaatctatcttccaatacactgtttaatatagcactgaataaatgatgcaagttgtcaatggatgagtgatcaactaatagctctgctagtaattgatttatttttcttcaataaagttgcataaaccaatgagttagctgcctggattaatcagtatgggaaacaatcttttgtaaatgcaaagctgttttttgtatanactgttgggatttgcttcattgtttgacatcaaatgatgatgtaaagttcgaaagagtgaatattttgccatgttcagttaaagtgcacagtctgttacaggttgacacattgcttgacctgatttatgcagaattaataagctatttggatagtgtagctttaatgtgctgcacatganactggcagccctngagttcatagatggacttttgggacccagcagttttgaaatgtgtttatggagtttaagaaatttattttccaggtgcagcccctgtntaactgaaatttctcttcaccttgtacacttgacagctgaaaaaaaacaacatgggagtaataatgggtcaaaatttgcaaattaaagtactgttttggtgtgggagttgtc

SEQ ID NO: 493932 - DNA, 1593 bp, Homo sapiens
  misc_feature (438)..(438): n is a, c, g, or t
  misc_feature (452)..(452): n is a, c, g, or t
  misc_feature (454)..(454): n is a, c, g, or t
  misc_feature (468)..(468): n is a, c, g, or t
  misc_feature (471)..(472): n is a, c, g, or t
  misc_feature (474)..(474): n is a, c, g, or t
  misc_feature (481)..(481): n is a, c, g, or t
  misc_feature (511)..(511): n is a, c, g, or t
  misc_feature (534)..(534): n is a, c, g, or t
  misc_feature (546)..(546): n is a, c, g, or t
  misc_feature (574)..(574): n is a, c, g, or t
  misc_feature (591)..(591): n is a, c, g, or t
  misc_feature (593)..(593): n is a, c, g, or t
  misc_feature (612)..(612): n is a, c, g, or t
  misc_feature (615)..(615): n is a, c, g, or t
  misc_feature (620)..(621): n is a, c, g, or t
  misc_feature (625)..(625): n is a, c, g, or t
  misc_feature (627)..(627): n is a, c, g, or t
  misc_feature (639)..(639): n is a, c, g, or t
  misc_feature (646)..(646): n is a, c, g, or t
  misc_feature (1200)..(1200): n is a, c, g, or t
  misc_feature (1380)..(1380): n is a, c, g, or t
  misc_feature (1393)..(1393): n is a, c, g, or t
  misc_feature (1481)..(1481): n is a, c, g, or t
ttagacatccttccgtgatcgccttgactccagggggtctatatctcagggtgttctccctaatttatgcgtaggaagactgtgttctaatagtgcagaatcacagtgtggcgccgtctgtaaacatattgttcagaggtagcaggttatgcacgctggtatcaactgtaatgttgatgtccgaagctcctagggtaaccccccttggggcaacaaagattgggcacggaattttattaaaaaagtccggtgtatgtatcatcagaatttcttcggaatggatccagatttagcccatttgaggctactctaaagtcagattaaccggcattataactggaataactttaaatacctgttcctttttagatgttcttatccggctgctcccctatcagacctcatcttcggtaatgttattttttgtttacctccctncattcatcacatgntnattgaaaacttagntcnncnagtttgncaatactgcttttagaactgtaagtagtcnaagaacgttgcccaagatcaaanttttaaaaaaanaaatgagcatgtgatatgtggcaatgtnttcactctacttggtantnagactaaaccattcctcantgntctannatgntnaagaaatcattnagggggnagggagatggatgctcagttgtcacatcaaaggatacagcattattctagcagcatccattcttgtttaagccttccactgttagagatttgaggttacatgatatgctttatgctcataactgatgtggctggagaattggtattgaatttatagcatcagcagaacagaaaatgtgatgtattttatgcatgtcaataaaggaatgacctgttcttgttctacagagaatggaaattggaagtcaaacaccctttgtattccaaaatgtttgagaccctattttggaatacaaagggtctcaaacattttgtaattttcatttaaattgttaggaggcttggagctattagttaatctatcttccaatacactgtttaatatagcactgaataaatgatgcaagttgtcaatggatgagtgatcaactaatagctctgctagtaattgatttatttttcttcaataaagttgcataaaccaatgagttagctgcctggattaatcagtatgggaaacaatcttttgtaaatgcaaagctgttttttgtatanactgttgggatttgcttcattgtttgacatcaaatgatgatgtaaagttcgaaagagtgaatattttgccatgttcagttaaagtgcacagtctgttacaggttgacacattgcttgacctgatttatgcagaattaataagctatttggatagtgtagctttaatgtgctgcacatganactggcagccctngagttcatagatggacttttgggacccagcagttttgaaatgtgtttatggagtttaagaaatttattttccaggtgcagcccctgtntaactgaaatttctcttcaccttgtacacttgacagctgaaaaaaaacaacatgggagtaataatgggtcaaaatttgcaaattaaagtactgttttggtgtgggagttgtc

SEQ ID NO: 493933 - DNA, 1106 bp, Homo sapiens
  misc_feature (438)..(438): n is a, c, g, or t
  misc_feature (452)..(452): n is a, c, g, or t
  misc_feature (454)..(454): n is a, c, g, or t
  misc_feature (468)..(468): n is a, c, g, or t
  misc_feature (471)..(472): n is a, c, g, or t
  misc_feature (474)..(474): n is a, c, g, or t
  misc_feature (481)..(481): n is a, c, g, or t
  misc_feature (511)..(511): n is a, c, g, or t
  misc_feature (534)..(534): n is a, c, g, or t
  misc_feature (546)..(546): n is a, c, g, or t
  misc_feature (574)..(574): n is a, c, g, or t
  misc_feature (591)..(591): n is a, c, g, or t
  misc_feature (593)..(593): n is a, c, g, or t
  misc_feature (612)..(612): n is a, c, g, or t
  misc_feature (615)..(615): n is a, c, g, or t
  misc_feature (620)..(621): n is a, c, g, or t
  misc_feature (625)..(625): n is a, c, g, or t
  misc_feature (627)..(627): n is a, c, g, or t
  misc_feature (639)..(639): n is a, c, g, or t
  misc_feature (646)..(646): n is a, c, g, or t
ttagacatccttccgtgatcgccttgactccagggggtctatatctcagggtgttctccctaatttatgcgtaggaagactgtgttctaatagtgcagaatcacagtgtggcgccgtctgtaaacatattgttcagaggtagcaggttatgcacgctggtatcaactgtaatgttgatgtccgaagctcctagggtaaccccccttggggcaacaaagattgggcacggaattttattaaaaaagtccggtgtatgtatcatcagaatttcttcggaatggatccagatttagcccatttgaggctactctaaagtcagattaaccggcattataactggaataactttaaatacctgttcctttttagatgttcttatccggctgctcccctatcagacctcatcttcggtaatgttattttttgtttacctccctncattcatcacatgntnattgaaaacttagntcnncnagtttgncaatactgcttttagaactgtaagtagtcnaagaacgttgcccaagatcaaanttttaaaaaaanaaatgagcatgtgatatgtggcaatgtnttcactctacttggtantnagactaaaccattcctcantgntctannatgntnaagaaatcattnagggggnagggagatggatgctcagttgtcacatcaaaggatacagcattattctagcagcatccattcttgtttaagccttccactgttagagatttgaggttacatgatatgctttatgctcataactgatgtggctggagaattggtattgaatttatagcatcagcagaacagaaaatgtgatgtattttatgcatgtcaataaaggaatgacctgttcttgttctacagagaatggaaattggaagtcaaacaccctttgtattccaaaatagggtctcaaacattttgtaattttcatttaaattgttaggagccccgtgccattagctcctccatcttccgatccgtcgttttatataccgctcaatatataatgcaagtcggcaagggttgagtcctcgtttcatactttagttagtttttgtttcattttttttcaattaaagtgcataaaccttaaa

SEQ ID NO: 493934 - DNA, 308 bp, Homo sapiens
gtgctcagaacaccggtttctattaggcagcaagacttcaactacagcttccatatttcaacatatacaaaatcagctcaaactggcttaaagatttaaatgtcagacctaaacctacaaaactactagcccaacacatggagaaaatactaaaggaccatggtctgggccaatatttctttgtttaagacatcaaaagccccggcaacaaaagcaaacataaactgggattatgtcacgctaaaaagccttcgcacggccaaggccacaatcaacaaggtagctggacatggtagctcacaacatat

SEQ ID NO: 493935 - DNA, 401 bp, Homo sapiens
tctactacttttcaagctaaaaacatcacttgtatacatactcatacttcagtcacggttttgaggactctggaaatttatcgtggagtcaatgaggaaatcttgtttctaattaaatttggaaagaagactacttgcaaaataaaaagtcgttatcagcctgttcatatttaatattaatttctctgtcctccaggcaggtactgttaaaacaatagttcctagagactaaaaacaaccgtttgttgtctcattcctacttctcactgactgtgtgtgacaccagtgttcacgggagaatcccctcccatggttttcctcctgaataaccgtctgtgatttttctgaactcaaatgcaacgtcccaccagatgctccagtcaagagcatttagctgactt

SEQ ID NO: 493936 - DNA, 767 bp, Homo sapiens
  misc_feature (405)..(405): n is a, c, g, or t
  misc_feature (417)..(417): n is a, c, g, or t
  misc_feature (457)..(457): n is a, c, g, or t
  misc_feature (493)..(493): n is a, c, g, or t
taacgcatagccaacaaacacaaatacacctaacatctgctgcattcagtgtgtgtgtgtgtctcgctgcttacaatacactgtatctactgctagtatgtaaatggtcctctttgacgctgatagcgtggtttcgtgactcagacctataggtccgattgtcacatgcttcctgctgtatacaacactcattggcacagtggtagttagaggtgaaaagtatagctgtcaagcccaagggcttagctttagggctcctcctgagttcggcccacagtagaagcaagattttaactagccccttttcctcttcaccctcccatgatgcgcagtgttcagaaagctggtaagtcctagggatttccagaagtagcctgcagaagaaggtaagtttgaaagccactncagggtcctgangctgtcatgctcagtgagccattttacagttctccaaagnctagccctgtttcggacctgcacttcacctctaagntatgtacaactcaacctgcatccctctaaaagacctatatccatattcaccattgggtaatatgaggccctgagcgggccttgaatgctaaaaagaggcaggagacgcagggctacatgcagataccacaccacggctgccggctggtctgtcgtaagacagaaagaaagacgctgggcccaattttgacttggccagcggacacgcttgggcgtaagctatctttatctgtgcggaggctagctgacccatctccttgaggcattccctttgg

SEQ ID NO: 493937 - DNA, 775 bp, Homo sapiens
atggtcttgattgaaagattgctaatgcaagtaatgaaggcagcagatgaggtagatgaaggtaaattaaatgatcattttcgcgtctcgtggtactggcgagacgtggatcagggaagctcagacaaagtatgaatgtaagagtgaagtcgattagcagagtatgagcaattgatagagtgttcatggatggtgaacttggcagcaagatacctgtgcatcccaacgactcatgtgaataaaagccagagctcaaatgatacttttcccacagcaaggcagcattgcgtgcgtgcaagtagaagttcatgaagtacgtgttaccaggactacagaagttgacatgatggtcttgatgcatgaatccaagagagttggcacgagatcatcaagattggacgtagtcatagtcaggatgctgttgcattactcttgggcaggaatttagtggtgatgttcaagaagtaaaatatgcaatgacaagaataagagctgccatgccaatgaatctatgagctcgcagctggaggcactggtgtcggatacagggtttaaatactagaatggggttggctgaagaggttgctgcgaaagtgggtgggcttagaggctgtgcttgtttgtcactgctccgaagtaacatttgaagctcgtggctgctcatgacgctcgggttgagctcagtggagccatgaacactactgcctgcaggtctgatgaagatagcctgatgatatacgatttagggggttctggtcctcggtcaggtctggga

SEQ ID NO: 493938 - DNA, 849 bp, Homo sapiens
atgcccctcatttacgaataaatattatactagcatttatccatctctactttctaggaatactagtatatcgctcagctagcactcgatactctcccttactatgcctagaaggaataatagctattcggcgtgttcattgataggctagctctcgagtaacccgtcgaacagccacgtccactcttaggccaatattggtgcctatttgccactactaagtctttgccagccgtgcgacgctagcgtgtgtggcctagccgcttactagtcgtcatatcatcgcaatcacatgatggtcgtagacatactgtacgataacgcataaagcatacgtccaatgcgtaaaactgaatcgtcccaacatattatcattactacctagtgacatgacgtcttccacagagaacgacataggatttggcaattcaatcgacaaccatcctcacagaccgtgaagtaattagtcatcatctcctcttactatttggtaaaccaatgtcaactgacaaacctatttagcttgttccgcgcaagcattttccttacagatcctctcggtagacatagacccttccttccctaattactaagttaccctggattccttatgccttctagctgtcatgtggaagtcacaaggcccatctttgatccaggtgatgccactaattaggacaattaactgtgtcagggaaggtccgctcagattgttaaggccgttgttcggcctttaaaaggattgttgatcctggcattgaagggagaattctaagtgaccttcaaggttgttcaaggcagggtttaaaaggttcctggagaaaggctttggaaaaccaaacgagtggg

SEQ ID NO: 493939 - DNA, 308 bp, Homo sapiens
cactgccaaagtaaaacattaggtcaggcatggtggctcaggcctgtaatcccagcattttgggaggctgaggcaagtggataacttgaggtcatgagttcgaaaccagcctggccaaaacagtgaaaccccgtctctactaaaaatacaaaattagccagatgtggtggcgcacacctgtaatcccagctactcaggaagctgaggcaggaaaatcgcttgaacctggggaggtggaagttgcagtgagccgagatcgcaccactgcacttccagcctggggtgacaagaggcggaacttccatctc

SEQ ID NO: 493940 - DNA, 426 bp, Homo sapiens
ctgagggcttgctgtgcggatggctgctatggtgtgctgcggttcatcctggagagtggggcacaggctgcgcggttgtggtgtctgggaaactccgaggaccgagggctcaatccatgacgtatgtggatggactgatgatccacagtggagaccctgttaactcctacgttgacactgctgtgcgccacgtgttgctcagacagggtgtgctgggcatccaggtgaagatcatgctgccctgggacccaaatggtaagattggccctcagaagcccctgcctgaccacgtgcgcatagtggaacccaaagatgagatactgaccaccacccacatctcaagaacagcagggtgggaaggccagacgcgcctgccatgccccagacagtccccacagaataacagggtctccttggacgctgtat

SEQ ID NO: 493941 - DNA, 751 bp, Homo sapiens
agcgggagtgagcctgtagctgactggtggcttccggagaggctcgcagaagtgggaggtgccgggacgtggcgagagctgagcatctgccagggcgggcggaagggcgcggcctctccgaccgggtgtaccatctgtcgcgtgcgcgagagctctggtgaaagaaaagatgttgtcccggttaagagtagtttccaccacttgtactttggcatgtcgacatttgcacatacaagcaataaggcaagccatcttatgctgaacccaagaacaaacaagggaatggcatttactttaccacgaacgacaaatgcttggtcttcaaggacttctatctcccaaaatagagacacaagatattcaagccttacgatttcatagacacttgacgacacatgactagccctttggaaccacatctctctacactaatgggacatacaagacacgacacattgagcaaatctgttctcatagaatacctgcaagatgacatctgagagtctaatgcccaattgtatatacaccgacggttggtcttgccctgctcccagtatggacacatctttagaagaacctaaggggattattaatttcgatctcagacagaggtcatgttagatcaattgtggataactggccagaaaatcatggttaaggctgtagaagtgactgatggagagagaattctgggtctggaaatctgggtgtctatggaatgtgaattccaggtagaaaactttgtctgtat

SEQ ID NO: 493942 - DNA, 1496 bp, Homo sapiens
tctccccttctctctttggccctcacaacagggggagaggaagccaattcacatttttctcagtttattataacctgtggtgtggcagcccaactcacactgtgcagaagtgtgaaaaaggctttcgtggcagcccagcttctgtgcccagctctcacgtggtgcctttgagagggcggggggaggggtggtgtggccgcgctcgcccccgtgatgtgtgcaagaggcgccacggtgtgtgaacagaagaagaagtatccgtggatcgtggtcctcctcagcagacaagaggcgtgtggagtggtgtgagccgagatgacagagcgcgtgagactatacagagtgtgtgcgcaagagagatctcacctcgcgcgacaagaatcacgcgagcgggcggggagcaaagagagacacacacaggcatacacacggtgcgtgagcgcgtgcggagagaccaccacagaaaaagaggtggtccctgcgccgtgtgtctcaagagagacacacagagaggcggcgcaaggcccaccaaaaagaggattgtggagtgtgtagctatctcattatccccgtggtattttgttgagccacacatctcatcaacaagggttcccccacaaagtctagcgcgtactccaaaacgaatagaattctggtaaatattgtgagaaatacagaaactcccaacctacaaaaaaataggcaaaagaggcgcttattggaaaattatagatcgcgccccaaaggaggctcacattgtgagagaactccaaattaaaacaaaagatcgagggccgcctctgaaagacgcaaccaccccagaacatacaaagaggaatccccctgtggagcacataccaaaaaactagaggccagccacaacgagacacccctctcccgaacagactcggcgcaacacaacagtgtgctggaagaggagcgagatgccccacctcccacaggggccgtaagcgaaaaaaataagccacaccgctgaacacgccccagaccagtgcccacatggtgaacacatcacaaaagaataggggacaccacataacgccgaacgatcacacactaggtagacacgcccctccttgcgaagacggagcacaaaaccactacgaatgcacagctgcagcaaaaccccgcaaacatagaagaaagaacagccaaccacaccagaggaatgagacccacacaaacaaaagggaaacgcaacccacagagaaagtgtaacatcgcggtacactctacttcaccaaccaagtgatccaccacctatcaccagaggaattcctaccaacgaacgaaaagccaatacataccacaaggagatcgaagaacaaactcagagaccaaatcgaagagaaataatgacaatatgcataacacccagaagaaaactaccaggacataaattaagtaatagtcaacgatgcagttacagacaacccagataagaaacaaaacaaagagccgaaaaacacagacag

SEQ ID NO: 493943 - DNA, 772 bp, Homo sapiens
ggggatgtggaatatttgtcataaataaataatgaaaacctaaaaaaaaaaaaaaaaaaaaaaaaaaaaaaaaaaaaaaaaaaaaaaaaaaaaaaaacaaaaataagcatacaaaacaaaataaaaacataataaaacccctttttgggcccccttggcccaagccaatttaaaccccgacaatttttgggggggggcccaaattagggctttcttggccaattcccccttttggggggggatttccctttccctggccggggttttaccaaggaggaccggggaaaaccctggggttaccaaatttaatggctttggggcaaatgccctttttcccagttggggtaatagcaaaagggcccccaccggtcggcttttcaaactgttggccaacccgaatggccaatggaaatttaacccctttattttttggtaaatattccgcggaaatttttggttaaacaaccaattttttaacccaatggccgaatacgggaaaatccctttttaatcaaaaagattacccccaaatggggggggggttggccccagtgggaacagagccctcttttaaaaagggggccctcaccccaagggggaaaacccgttttcgggggggggcccctttggaacccccccctaaaaaattttttggggcggggggccaaaacctaaaatggaccctagggggcccccttttaaatttgcgggaaggccccacccggcgaaggggggacctggggcgcccccgggcccttgtttcgcccccccc

SEQ ID NO: 493944 - DNA, 897 bp, Homo sapiens
catgtcatcattccccggattgaacgtactcttgcttatatcatcacagagctggcatgagagagagcgagaagagcttctataggttaaacgaaaactacaacgagaagacaaaacgattctaaaggaaaaatctgagaaggacttggagcacaaggagcagcagctggagcaggtgttggagcctgctaatcttctggctgaagagaacggacgacggatcttctatttgaataatctttcctgttctggttctttgagaaaccctaacactggcttcattttaattcacagtgtgtagcgttcgacttccgtgtggctattgacttcttctcgagcctacacgaacttctcacctcggcttcgtacacacacttctacctagcactgctctactttactgggcacttactctttgccagaactcactaactttagcaaccatttatcatggcatgacaacgagactctgtaaaacctgcccaggaacttacagaatttactttgcgagaagcgttatcatactccatttacatctgtgttacacgtgatctgcttaccaagcatatcaggaaatacctcttaggaagcattagcggtctcagcgccaattcacctgtggagcagctttcattcctagccacttgcaaaccttgcgcgcctgcgctctgcacattgctgccgcccttcttgcttcccatgggtacttctccaactttgctcaaccccctgcccctctcttccctttgcctgcaccaggcttcccctggtccgctgctctcgtcccctgcgcacggccctcctggccccactctccacactgccgactgctggctctcaacaccccccccccctcgccccccccccaccaccccaccccccccccacccccaccct

SEQ ID NO: 493945 - DNA, 341 bp, Homo sapiens
ccccctccatatgcagtgtgctgcagaggcttggttatcgccctcttctccccaactcttagccacgtcccagtggcggcgggagaacggtggtcccaagccactgtactgggttcgggtttcactatgttgcccaagctggagtgcagtggtgcgatctcagcttactgcaacctccaccttccgggttcaagcagttctcctgtctcagccttcccaagtagctgggactacaggcgcacgccatcacacccagctaatttttgtatttttagtagagacggggattcaccatattggtcagactggttacaaactcctgacctcaggtgatccgcctg

SEQ ID NO: 493946 - DNA, 1670 bp, Homo sapiens
  misc_feature (294)..(294): n is a, c, g, or t
  misc_feature (656)..(656): n is a, c, g, or t
tctcttttaacttttttaatgggtctcaaaatttctgtgttgacaaattttgtgtggctcaagttgtgttttccatttaaaaagtctcacgtgatttttaaaaacttaattaactttaaacacgtgccacacgccaaaacaagacaaaccaagagtgtggctccacgaaaacattctcctccttgttccttctcgtgaagaggtttgttcaccgagtgccctgtgtgtgttattcattatacaccagagtctcttgttatacttcactataacacttttacagatgtggccccnaatgtgtgaaaacaacaaaacgagttttctgtgaagacagcccgtgtctcttctccacacccacactgtgtatatataagagaagtgtgtgggtgtgagacagagagttatatatagaggagactataatattatatctcatattttttacacgccctctctctgtgagacgctttctttcagtggggcagagacactattgtgagtgtagacaaccctattgtgatcccagagactctccgcagagatcagaagaccgcttttctgttgtgtgttccccaactgtgtggcttgtgtgagagttgacaacacacgcccacacagcgcgccacaacagctgtgtgtctgtgtgtctcttcaanttaatccacaagcagaacacagaggacacaaagacggcgaaaccccccacagagagggtgtggggaaatagggactctgtaggagaagcaaacgcgctcttcctctccaagagacaacccacaccaattgtggggcggcctttgtcgcccccaaggagaggagaacccccaattatacttttcacacgccacactcgtggcgaccagcggccgatttcacacgcaagaaggaggctttctcacagagaacatattctagagggggggggcacaatattcttttatccgcgaagcattcattttatttttataaccccccaagaatgaaaacccggcggggcggacaacttcacacacaatttcctatttgtatcaccctcatttatttaccaggcgctctttaccgaaggaccacacaaacactcttgttggtaacttattttgggtaccaccacagttcggtcgttgggaagagcaccccccccgtggtgtctgttgctgcggccaaaaattccccgcaaaattatcacacacgaaggagggagggacacatacttataacgaccccgccggcgggggcgcgaccctatcaaattgtggatggggccccccgttgtgagacagtgacgacttatcaaacagggggatcaattaatactttcccacccccttgtgtaatacccacccagcatgtgaaataagacccccacagtgctgtgtcggtcttataccccactatgaggggaggggaggacgcacaatccttgatcggccgcagtgatacaacccccgcaggcacgaaagtctctgctgcccacaagcgacaagaaaaaacaattaccgcttcgtcagagaagacacaccgccatctgttctttctgaagagacctattttgatgaagagcgcgcccccagatttgtggtcgtcccccgcgagggaaagaaacgaaaatgatctccatcaacagagaacagttccacagaggagggcaccaatcatcacagcacacgagt

SEQ ID NO: 493947 - DNA, 605 bp, Homo sapiens
gcaagcctgtgttgactggacacaagatggtatataatgccattgaaggcacgattcgcttcattgtgcgctgacgtgtgacctcttaatgcagtgaccagacacaatcttgtatttaggacaacgggatcatgttcactattcaaacataagctcttctataccatgctggattggttaccctgggggtgaggagcactgtattatgaaagggataatgcagacagcgaatattgagattgagctagaagactttaagctccatggtctaggacgtgtatatgtaggacaagtgaaggctcccctccactgggttcaaccgactgaacatatgaagatatctattttgtctgacggcataagagacattggtactcaaaggcgaagatggcacacatgttgagtggttcaaaaagaatgtttatggcattcaattgtccccaggatgtgcaacactgtatgtatttctcaatggaattttcaacattttggttgacaaagaagggcgcatcaatttacattgttttggaaagctcccacgtgtaatggagttttaacatctgtggatagtgcaattgatgtatattgctagctgttgctgcaga

SEQ ID NO: 493948 - DNA, 203 bp, Homo sapiens
cgtgaaccatgatagttgagtttgatgtttttcacatgaacatgatcatggtctggcgttgtggtgctaatttaaggtagtacaatccagaggaaggaacctggtctatggaaatggatgtctgggttcccctctgtccttgtcagtatgggcaagttacagcctctctggttctctgagaatttaccacagctttgaagtgc

SEQ ID NO: 493949 - DNA, 696 bp, Homo sapiens
ggggtaaagggatattgtcgacccacgcctcgctcttctcggtaggcctttgaagttgcttactcacatgtcaataaattaaccacagcttcattagaccaccaggtctaaagtctgttgacagtttcagcatgactgaatcgctcatattttttttatatgcttccagaaattggcattggtctctcttatagaagtttgtgtgtaaacatgcccatgttcataaatgatttccacttactggctacaacataaattattagctttcttagaatgtatgatgtagtaaaagctcaatatacaacatttactctaactctcctcttctctcaaaatcttataccataaattagcatattcactaaaaaacactgtgccaccagtgtaaacgaacaagtgtgataataaacaggtgccataaaagataactattgaccttgctggcatcttaaacaccctgacactaccgacatacttcataaataacaaacacttagtgcaacactaagtatattagcgagactacaacaacacaacaaaagacaacaaacgcgaggcacgacccgggctcctagaagtactactccacatcggaaggtgcgcgcccaaaagcgctatcacgggaacatcccccccagacataacacagtacaaaacaaaaggagagccacataataaggaaggagagaatacaag

SEQ ID NO: 493950 - DNA, 241 bp, Homo sapiens
taagtatgatcaaaactacgagcatcagagaccgtacaagatttattagagcagcttattgttccgaatgaaaagagtggagcttttagctaaatatgccaataagaaatattgcctagcacaaaagcctgcaccactgcttgagtctccttttaaagatagagatcatttccatcttggccaccttactctcactactctcaaccattaaaagctagctggtgtacctggtaacttatct

SEQ ID NO: 493951 - DNA, 198 bp, Homo sapiens
gggttggggtttttcccccccccccccccgaaagggccttttcctttttttgggggaaaaggggcccgggggggggagcccccccccccccggttttttgggggtgggggggggattttgggggggcccccgggtttttttttttccgggcccccgggggggtttttggccccccggggggccggggggcccccccca

SEQ ID NO: 493952 - DNA, 235 bp, Homo sapiens
gggtgcagtgcaagctctcagtaggatatacattctggggtctgaaggatggtggccctattctcacaggtccatgaggcagtgccccagtagggactctgtgtgtgggctccaactccacatttcttttctgcactgccctagcagaggttctccatgagagccccacccctgcagcaaacttctgcctgaatatccaggcgttttcatacatcctctgaaatattgacttctg

SEQ ID NO: 493953 - DNA, 175 bp, Homo sapiens
tctgaccttcggaaggagttcacagaagcgatggaagccaaacaggtggctcagcaggaagctggaagctacagaggacatcgcataccagctctcacgctctcggaccatcacctacctgccagcgagcagtccgtgctcctccagctgacccagtgaggcccaccctgcctgc

SEQ ID NO: 493954 - DNA, 371 bp, Homo sapiens
aagagaagagcctaggaaaaatatctgctgcccgggcagggagggcagtgacgcgagtcatggggtcacggcagaccacaagcttccatctcaggtgatcctcccacctcagggctccccaccctgagtagctgggactacaagcatgtgccagcacaccaccaggctaggcgaagggtgggtattcgtgcgagagatgccgttgccctaagttgcttaggcttctttggaagctcttagactcaaataatcggccggcatgggcctccccaagggctggaattaccgggccatctaaatctttaatctcagattggcctggtgacagatggaggggtactttttctgacatgatgaggctaggggggctg

SEQ ID NO: 493955 - DNA, 321 bp, Homo sapiens
ttaagaccttttatattcagaactgattataatttcccccattttgggttactgtcctgccaagggccccacccagttttaagcaaccaagtaattatgtttgggtctataaaccaccgggtccttggtaaacccagccccagttaaaagtttgttttaaaccaggaaaaacctgggtttgaatgctctttgggtcccttgtaccctgtaaaacctgcaagttttttagatcccctaaattttagggtcccggggggcaaagtgaatattgtaccaaacccccctgggttagccccttaaccctttttttttcataaccta

SEQ ID NO: 493956 - DNA, 182 bp, Homo sapiens
catcctttgtcgcggcactgagcctctttttttatttgaaactacttaaactccaagacaggctcacgtaactcgtctgtttcaaggtgcaagaaccatatgtgttagcgtgaaatctagctcaatttacatgatatactttgtgacacagaacactgattatgtgtacgccaagagagccg

SEQ ID NO: 493957 - DNA, 252 bp, Homo sapiens
gttaggacatattctctctgcttctatcttctgacaaagattgtagaacataggtatatttccttccttaaatgttggaaaaattcatcagtgaacccatgtgggcttagtgctttctgctttggaaggaacacttgtttggtgttctctaagtttcctggatctgtggtttatttcctgactttaatttgcaggaaattctcagtcatagttagcttcgcaatactgctatctgactccttttattatttg

SEQ ID NO: 493958 - DNA, 109 bp, Homo sapiens
gaggtgctgcagctcttgaagatggtgggcagcaggaagttgagcagcgccagagctccgggaggttgttcttcagccgtgttcccctcaaccgccagccgccgggttc

SEQ ID NO: 493959 - DNA, 556 bp, Homo sapiens
attgtgttgctctttcaacttcagtcgtcacggagggagctcagtattttgacaaggaatgtgaactggctgttgtatatttagaagtgagtcttccttgtgctcctttcccttccaagtgttgacattatttcagtctgttgctatttttcattggctggtttctctagattagtgaggcctgatcctttccatggcactcacaccctgtttgtacccaactccccactggtggctgctggctgatcacaccatgctgttttcgtgttttatggagaagtgttcaggtgtggctgctgtgtttgatattaaatctgagatgaacttcaggagatttcctgctttttattacaaataattttggctaggggcagtgttatcctgttcataaatcaggtgttctcagagatttaataatttagaattcacatgaggatttggtggaataaacatttcctttctctgttaagctgcctcttaactttctatcttcccctttctcttcactgcttccatttttttaagccttctttaagtctttgccaaaaataaaaat

SEQ ID NO: 493960 - DNA, 702 bp, Homo sapiens
tgagagagagataaggggtgtgaagatgaggagaatagagagagaggaggagtggataggaagggagaggagagaataatagtagatagaaggtaagaggtatagaatagtgagataagtgagaggagagaggaggagaaagagggtagggatggagagtagagatgaggtatgaaagagagaggtggagagagataagatggagaggggaggagatagagaataagaggagggaggagaggataagggaaggagagagggtagaggaggggaagaagagatgagggagatgatgttagaaggagggagaggaatatgggaagggggaggagggtaggaggagagaggaggaggaggagaggagagggggggagggataaggaggaggagaggagggggaggaagatgagtatgagggagtagagggaggggtaagaagagagaagagagatagaggagagagtggagagatagagaagaagagaggaggggagaatgagagagtggtagggagaagaggaggggagggtgagagggagagatagggagagatagggggggggaggttagacgacagaagggggccgggcgcggtggctcacgcctgtaatcccagctctcagggaggctaagaggcgggaggatagcttgagcccaggagttcgagacctgcctgggcaatatagcgagaccccgttctcc

SEQ ID NO: 493961 - DNA, 611 bp, Homo sapiens
caagatagctggcttctgggtgacagttccttctttcttcgaacctggctcatgaccccacttcacattcctgaaactccagcagaatatcgctataacatggcccattctgcaactcacagtgtgattgagaagactttccgaaccctctgctcccgattccgctgcctggatggatccaagggggcactgcagtactcaccagagaaatccagccatatcatcttggcctgttgtgtcctccacaacatctccctggagcatgggatggatgtttggtcctctccaatgacaggacccatggaacagcccccggaagaggagtatgagcacatggagtccctggacttagaggctgaccgtattcgtcaggagctaatgctcactcattttagctaatgtagaaggtggagaggagggatacttcccaggagttgtgacagactttcctcctcatcaccttttacacagttccatcatctagcatgactgagtatacagatacttgtcataaactgacatttaatatgtgtgttttggtaaggttggggctatgccagaatatcttgattcatttgcatatgcattaattaaactgaaaccaagaaaaa

SEQ ID NO: 493962 - DNA, 432 bp, Homo sapiens
ctcgcgacgtgttatccccggtcattgatagcgcacgcatctgccgttcatctgcaggagcctctccattgggttcatccattccaggaatagagtcatggccatcaaacaggcagtttgatctctcctcttcctcctggaggccacaagattagggccgagagtcggatcagacaaatcgaatctacaatccttaagctcctggcagggcccagccaaggccttgcttccatgctaacgactccttccaagatggccagtcccagcatgcttccaagcaggtttcttccgtgtcctctggaccctcatcgtcttaagagctgccgcctataagagggactattcttgagatcctatcctctaacatttgtttccacacccaatacaaaaaatctctgggtcaaaagtctagaacgcttaggctgtcagaca

SEQ ID NO: 493963 - DNA, 571 bp, Homo sapiens
  misc_feature (65)..(65): n is a, c, g, or t
  misc_feature (81)..(81): n is a, c, g, or t
  misc_feature (108)..(108): n is a, c, g, or t
  misc_feature (127)..(127): n is a, c, g, or t
  misc_feature (235)..(235): n is a, c, g, or t
  misc_feature (338)..(339): n is a, c, g, or t
  misc_feature (351)..(352): n is a, c, g, or t
  misc_feature (379)..(379): n is a, c, g, or t
  misc_feature (420)..(421): n is a, c, g, or t
  misc_feature (530)..(530): n is a, c, g, or t
gctggcgggacaagacctcctatcgctggcagcttctgcaccggcctcaagttggctacattcgnggtgaagctctatgangggaccccatgcttggtggcggattcntggggtgatcattgacacnatccatgctgaggggggcgtctgtggtgtattcgtgctgtctcccaatgaaaacagtaatctggtccaagtctcctagtatcggatgcagatgacgacagtgcctganggacatttgagcctattccggacggcagactgctcccagggaagggtcgtgacggaggaggccaccacgattcagaacttcagacctttgtagacctctttgnngccttggggtcnncatcctggagacgcctgaggtctaaangctacagcccgctcaggccgaaccagcagacccgttcttcnntggctcccaaagaggaggttcccagtcccagaggggttggtcgaccccgagcccttcaggggcatgagacagttttcaacggggtattacgtcaggcactaaccccagngaaagatgacagcacattgccataaagttgtggttgttgtt

SEQ ID NO: 493964 - DNA, 309 bp, Homo sapiens
ttcgaccaaagaacctctaaaaagatattcagcacttacactcatcagaaaggtcatagcctcacaggtattgacaatacatgtttgcaacatgtatagaaatagaaatttgcatattgataatgaaaatgttagttggcgctaatgcacttcagcaagcaagtatgcaatatctactacagttgaagatgagtccacattacatttaagcattctccattactgagtttacgctacaagaaaattcttgcatatgtcctaggagtcataaacaagaatttgcactgctaggcattggttgcaacaata

SEQ ID NO: 493965 - DNA, 264 bp, Homo sapiens
gcgatacgacattgaggccaaatgcctccacaacaccagggagattaaggacctgaagctgaaggtgatggacctccgtgggaagttcaagcggccgccccttcgtggagtccctttctcggctgaggccattctccgggcccttctgggctccaagaaaagggtgtccatggatctgcgggccaacctcaagtcttttgagaggggagacacaccgagggggcccctctggaggtggctcacttgggaaaacgtgccccctct

SEQ ID NO: 493966 - DNA, 332 bp, Homo sapiens
tgttccagtatgcgctgccccatgggccgcaagaagggagccaagctgactcctgagaaagaagagattatataaacacaaaacgatctaaaaaacttcagaaaaaatatgatgaaaggaaaaagactgccaaaatcagcagtctcctggaggacgcagttccagcagggcaagcttcttgcttgcattcgcttcacggccgggacagtgtggccgagcagatggctatgtgctagagggcaaagagttggagttctctcttaggaaaatcacggcccgcaaaggcaagctaaattccttgttttgtcttcacccattgtaataaagagtgt

SEQ ID NO: 493967 - DNA, 109 bp, Homo sapiens
cttttgccccttgggccctttttgggggcccttttaacccagttttttccaaaaaaccggggggggccgggccgggatttccggggtttttttgcccccccgggcccca

SEQ ID NO: 493968 - DNA, 613 bp, Homo sapiens
  misc_feature (22)..(22): n is a, c, g, or t
  misc_feature (100)..(100): n is a, c, g, or t
  misc_feature (134)..(134): n is a, c, g, or t
  misc_feature (137)..(137): n is a, c, g, or t
  misc_feature (163)..(163): n is a, c, g, or t
  misc_feature (166)..(167): n is a, c, g, or t
  misc_feature (171)..(171): n is a, c, g, or t
  misc_feature (198)..(198): n is a, c, g, or t
  misc_feature (204)..(204): n is a, c, g, or t
  misc_feature (239)..(239): n is a, c, g, or t
  misc_feature (243)..(243): n is a, c, g, or t
  misc_feature (252)..(252): n is a, c, g, or t
  misc_feature (330)..(330): n is a, c, g, or t
  misc_feature (408)..(408): n is a, c, g, or t
  misc_feature (415)..(415): n is a, c, g, or t
  misc_feature (475)..(476): n is a, c, g, or t
  misc_feature (478)..(478): n is a, c, g, or t
  misc_feature (482)..(482): n is a, c, g, or t
  misc_feature (492)..(492): n is a, c, g, or t
  misc_feature (597)..(597): n is a, c, g, or t
gggccagcagaatgccccaggnagaacgtggaggaggcttccttgactgtggtgcgtagtgtctgaaaactcagggtattatgtgacaacacatttaagnattccattgttgcaaattccttcttctttgttgncanggtcaaacaatcaattggactttaantgnngttntattgttttttttgagtgttcttggcngtggcnccgtgggtacgcggggcgtccggggtagggggccnctgnagtgtgggngtgagttggcgcgtcactagagtatggtggttaagggtgtgccggttcccagaaacaccttacacgggattgtcagtntttaccccagagaagctgatatggtcttgaggggggaaatgatcacaggaatggtctcttcttttttttttcttgatncgtagtnaatactcctagtgatgttgtattgctggccttcatgggcaaatgtcaggacacagcggtnntngccngcatcttccngggccactcgtgtacgagtaagtgagtggtcccctcacacttagaaatttctcattgtctttatccaaaagaagagaatccttgtaccattgaatcttcacgtcngttttgtcacgggtga

SEQ ID NO: 493969 - DNA, 141 bp, Homo sapiens
atccgagtgggacacggggagagctgtgaccatgggagagctacaggagggaggagggggcccagaggctctggcagtgtgtgaagacaagcagtgggtgaccccgtcacggccctactgtccatccctgcaccagtgtgt

SEQ ID NO: 493970 - DNA, 243 bp, Homo sapiens
cgagagatgacatgcagtttctttttatagacattggcccaggtgccaggcacaatagctcatgtctgtaatcccactgcttctgtaggccgaggggtgagaattgcttgagtccaggaatttgatgaccagcctgggcaacacagcaagaccctgtttctacaaacaaaacaaaacaaaacaaaaaacattagctggacatggtggtgtgcaccttgatttccagctactcaagaggctgag

SEQ ID NO: 493971 - DNA, 122 bp, Homo sapiens
cattatggcttatcaatagctcttattctcattatccaggcttttggaaggcaatcaatatatggatctatatccttggaaattaaataggaaacagtttaatcccttaggttcggagactc

SEQ ID NO: 493972 - DNA, 210 bp, Homo sapiens
tcagtcacccaattgccctttggtcagcattgaatgtgaactgggtaatggtgcacaggtgtctttttttataaatgaaatgatggacctgtaagtctgtggtaaacggtaccttgaaggaattgtaattgccggcatttggtcttttgcaataaaagagtaattgtgttccggctaaaaaatacaaaaacaaaaaatataaatagacca

SEQ ID NO: 493973 - DNA, 264 bp, Homo sapiens
ggaacgggctggtgcattcggggggcccggttctcgccgtcgctccaactccatcttggccctcggttattacccggaactcgcaccccagatcggccgccgcgctcagcggtgggggtcggtgacccgggaggaggggttagcccggtccacgagcctggagagctcggactgcaagtccctggacagatcaacagtggcttcgggccggaggaagacacgggttacctggatggggtgtcgtagcccgaaggtcagccctca

SEQ ID NO: 493974 - DNA, 868 bp, Homo sapiens
  misc_feature (460)..(460): n is a, c, g, or t
  misc_feature (485)..(485): n is a, c, g, or t
  misc_feature (571)..(571): n is a, c, g, or t
  misc_feature (576)..(576): n is a, c, g, or t
atggcccatgcagcgcacgtaggtctacataggacgctactatcccctatgatagagatgagctgtatcacctttacatgagtcacgcgcgcgtcgagtaatcgatgtgttgcctgtatgcgtggcttcactaggtcctggtagtggcccttgttcctaaacactcgacaatacaaacgtaagcgtatgtactaagcagtctcacgacgctcagggacagatagtagagacgcggtctggatacgtatgcctgtcctcgtccactcatttccttagtgcctcgagtacggcacgctccccgagttcccttagcgtgcatttcggtatatatctatatatcagactgtaggctgaaacgaatgctccttctccttttgccatttcaatagtcaaatttggggcaaaccaattgggtatctgaaaccgtaacgagataacaccggacatatgcgagtagggnctagatcgtatcagaacatccgtancggtagccattttggccccatgttgtatgtccctagaaaaaccaggcgcgagaccctgacgaagcttccccttgaagcaggttgancatgntcgaagtttgatacatacccgtaatttgggaagtccccccaattacgttattccattaatctacagtggacagagaccgtacttgcgctccatggagcttgtcccccagatttagagcctataaaaccagattgccagttcccccggaaacggtcgtagagtgaaaagtcaactttcacccggtttcatagaagcggggggtgctatcgtactggtgccagtgctcttgaatctctggtgggagcattacagcagatttcgatggccatacgtcgtagagattaattcccct

SEQ ID NO: 493975 - DNA, 411 bp, Homo sapiens
agataacatgttacccaagataacttgacgtgataggtagatagataggcatatagatgactgattgataaatgaatataaataaataaatgcataaaagattatagaatattaatataaatgaaaggtacttgtgttatatactaattttttgaaattaagcagatcaaaggactttatatatgggaatgagagatcttagagggttacagaacattttttgccacaaaacatattttgggaacatgtattttcaagagaattaagctgaaggaaacattagaataacatgtacctaagttattaaattttaaaattcacaattcagttgctattttacatttcagtttctctcaaagtttagccaacaaaaggcatttataagccctccaatgctggtaaatatgtcga

SEQ ID NO: 493976 - DNA, 137 bp, Homo sapiens
cggtctacccttaagttggatagttgagatcgttcgccagactctatcatcgttacgataaactgcgtgcggggtgctcggtctgcaagcgcagtatctgaggaactcggaggaccactactaatatgtaaacgact

SEQ ID NO: 493977 - DNA, 1346 bp, Homo sapiens
  misc_feature (215)..(215): n is a, c, g, or t
gagttcttgttcgtggattgctagtgatcgtcaccttgacaatgcagatcttcgtcgacatcactcgtgcactggttaagtaccactcaatccatcgcatgtgttgaggcccacgttgacggcgcactcgaagagtgtcagatggcacacagatccgaatgactaacggaagggcattcccctcgcatgatgcatgccatgcatgcgctgtgatncttgtgcatggagaacacatgcattgcgatagtagtgagagccgtcgaccctggtcttgaacgtaccaaaccatccctagaaaatgacgtccagcccctgtgctactcgttgggtgcttcccgtccctcgatatgggtgaggattagctagatagtcttatctcgtgtatatcaacgacgttcgaccattgggtctaaggtacccctacttcagcgcgctttctgcatgtgttcgagagggcacaccacgcttgagctatcgcaatcttctggacggaattcttgctacccaaaaagggcgagaacaagaactaccacagtccagactagagcgcgaaaattgcgcgattgtcgcgcttaccctattgacactccagtggacatgatgggcgttgagacgtttccgtttgtgggcccctggtgcattacaacagtccattgattcgaggacaccgaacgtccagggaactgtccgatcccctcccttggctgccattttgacatcctaaacgaattaaaattacaccaccgaaattccaggaaggcctttaaaatagccgacaattgtaaccccccctttgcgggttgtcgcatttgcctgtgacacactatttacgattagacaggcggtttgggtgccaccattgccgaaagattagattcggaattgccgcgcaggaattcgtagaaaaacgggctgtgtgaggcttggggtgccataatgaagttagaatcccacatgtccaattttccccttttcgggaaccctcgaataagggggaaaaaggacacggcgcaaagagattgcaacgttaaagctcacaattttcggaatgctataacatcggtttgtcgtaggaagggcgggtcgaagagaaaagccaaattacgcccagtgtgcggacactcccaaagcgggccatacgggtcgggattaacccctttggcgtctggaaaaaccaattggcaaagaaagacggttttatgacataccctcctttaggggccaagcgaggtttaagggggcaccggctatgcagagaggacaatactgtcgcttcgaaaaaccacccgttggttgcatcgtaaggttcattcagttcgcaatgccacattgggagaaatcgcaca

SEQ ID NO: 493978 - DNA, 491 bp, Homo sapiens
  misc_feature (20)..(20): n is a, c, g, or t
tacagcaacctgctgtgcgnactcctgcgcggcatcgtggcaccaccaaggccgctgcttgcagtacccatcgccttccgcggcccaggacatggtgcgagagggtcaaggagctgggccacagcacccagcagtttccgccgcgtctaggccagctggcagccgcctgagggtggtgaacccccaggacgggcgacaggcaagcggcgaagcgcggtggcggccggttcccaagctcccttggctcccatgtcaacgagtcgctgtgccacaggcttagggacaggaccccagctctgcgtcggtcctggtgccctggatgcccaggaactctgtatatactttatggcccgggcagggctgtggggccatgcctcctcaggagccgaagcccaggcgccggccagtggccttccccagccatgcaccacgggcccgggtcgcggtcaccagacgggcgctggcagctgctgagcggtccttgcaagccc

SEQ ID NO: 493979 - DNA, 748 bp, Homo sapiens
tgcgagtgagacacgctctcgccggcgcatgactgagcagatgacccttcgtggcagccctcaagggccacaacggctgggtaacccagatcggtactaccccgcagtgcccggacagtgatcctctccgcctctcgagatagagacccatcatccatgctagtgaagactgaccacgggtatcgatgcacccaactcatcgtgaattccacagcgtgctcggcaggggtcactcccaacatttgttagtgatgtggttatcttccatcagatggcacagtgtgccctctcaggctcctgggatggaaccctgcgtcctctgggactctcacagacggtggcagccaccgcgagggcgatgtatgtgggccatacccaaggatgtgctgagatgtggccttactctctctgacaaccgtgcagattgtcgtctgagatctcgaggataagaatgcatcaatgctatggaataccctgggttgtgtgcgagtatacactgtccaggatgagagccactcagaggtgggtgtcttgtgtccgcattctcgcaccatgcagcagtataccctatcatcgtctcctgtggctgggacaagcgtggctcaaggtatggaacctggctaaactgcaagtctgaagaccaagccacattggccatcacaggcctatctgaacacggtgactgtctctccagattgatgcctctgtgcttctggaggcaggattggcagcatgtcatgggatccag

SEQ ID NO: 493980 - DNA, 1098 bp, Homo sapiens
  misc_feature (617)..(617): n is a, c, g, or t
  misc_feature (633)..(633): n is a, c, g, or t
  misc_feature (672)..(672): n is a, c, g, or t
acgacccttggggtgaaaaagggaaaagggttctatattctcgtcccgcgttcaagagcctctgtgtggggggccccgctggcgaacacaacagagtggcccccaaggggagtgacgccggagtttttcctggtgatcccccgccccctgtggggcaccacattgtggggtgtcccaaagaaatccgccggcaggggggttatattacaccacaccgcggtggtggagtagagttgggcccccccccccacccgccacaggaggatcgccacagaaatcacggcgttctttggggggtggccccccccccgcaccacagagtgtgggcctctccgggggtgccccatcggggccccacaacagacttcggggccacaagaagagaaaagggagagaaaaagcgtgggagagacactccgggtgtgcctctgtctctgggggcacacacacacagaggcccactctcgattttgatatgtgagctccgttgatacacccacagagacacgggggtcacagattgacacacagctctgagagttttttctcttgagactctggggcccaacacacagggggcacacacttttcgcccttctccacacaggttgtgaatntgctctgagagagagngggagacacacacagtgttgagaaaagtgtgggagagcncggtagagagttcagatttggggcggcctctggagagagacccctctgcgcgcctctgagaagctctgcccacagctctgttggtggaacacagactgggacacctcgaggggctctcacaagcaggccccgcgcttacgccacacacgcctgtgcccacaacacttcactggaatagacgcacagaaagaatagaatagaattcgcagagtggattcacagaccctgggggaacctgggtgttgggacctgacctcccagctctctgtgaatcacgtgtggaaggaaccccccccacgcgcaccggccggcgttcaaggtggagaacccctgtaggagacctggtggcccaagctgaaaggagaattgggcggagatttgagcccctcccagagatggccaatataaactgactttcaacatcca

SEQ ID NO: 493981 - DNA, 872 bp, Homo sapiens
  misc_feature (2)..(2): n is a, c, g, or t
  misc_feature (71)..(71): n is a, c, g, or t
  misc_feature (78)..(78): n is a, c, g, or t
  misc_feature (84)..(84): n is a, c, g, or t
  misc_feature (129)..(129): n is a, c, g, or t
  misc_feature (141)..(141): n is a, c, g, or t
  misc_feature (144)..(144): n is a, c, g, or t
  misc_feature (147)..(147): n is a, c, g, or t
  misc_feature (150)..(150): n is a, c, g, or t
  misc_feature (153)..(153): n is a, c, g, or t
  misc_feature (172)..(172): n is a, c, g, or t
  misc_feature (177)..(177): n is a, c, g, or t
  misc_feature (201)..(202): n is a, c, g, or t
  misc_feature (208)..(208): n is a, c, g, or t
  misc_feature (217)..(217): n is a, c, g, or t
  misc_feature (231)..(231): n is a, c, g, or t
  misc_feature (237)..(237): n is a, c, g, or t
  misc_feature (243)..(243): n is a, c, g, or t
  misc_feature (265)..(265): n is a, c, g, or t
  misc_feature (269)..(269): n is a, c, g, or t
  misc_feature (275)..(276): n is a, c, g, or t
  misc_feature (279)..(279): n is a, c, g, or t
  misc_feature (283)..(284): n is a, c, g, or t
  misc_feature (293)..(293): n is a, c, g, or t
  misc_feature (316)..(316): n is a, c, g, or t
  misc_feature (343)..(343): n is a, c, g, or t
  misc_feature (364)..(364): n is a, c, g, or t
  misc_feature (376)..(376): n is a, c, g, or t
  misc_feature (380)..(380): n is a, c, g, or t
  misc_feature (386)..(386): n is a, c, g, or t
  misc_feature (412)..(416): n is a, c, g, or t
  misc_feature (421)..(421): n is a, c, g, or t
  misc_feature (431)..(431): n is a, c, g, or t
  misc_feature (437)..(437): n is a, c, g, or t
  misc_feature (443)..(443): n is a, c, g, or t
  misc_feature (478)..(478): n is a, c, g, or t
  misc_feature (482)..(482): n is a, c, g, or t
  misc_feature (497)..(497): n is a, c, g, or t
  misc_feature (855)..(855): n is a, c, g, or t
gngattacaccactgcattccagcctgggcaacggagtgggaacctgcctggagaaaaaaaaaaaaaaagnagaaccnagaccngatatacaacctaaagcagtgatatttctagaagaaatcctaggngaaaatatttgngancgnggngangaagaatctatcaaatacnaaacnttttttaccaccttgaccaaaagnnattggnttatatacntcatcatatcattnaattcnaaatcnacagagatcaatgtcactttcncagngaaagnncgngagnnttcaatgangccctgaactcacactcccaagngaaccataacaccatatttccagagtngagtttattagaacaataacnggggataatganaaanattgancaaagactgagcctaggaaggggggnnnnnggggnggcgtatgcncaaggnaattcntcagaaccacagggggctcattgggtcctattaanagcngagagtgaatgaatnaacagataaaacagagacctgagtagacggtagtcgaatattcttgtacatgtattctacctctagattccatagaaagaactaaaagtacatgaatttcactaccaacatctccatcagttaccagctgtatcaccttggatcagtcaggtaacctcccgcgaatctggttgcttccggggcaggggatccgcgggctgcaggtttgagcctgggagccggcagggtggagcagttggagggccaagcctttgagctccagggggggtggccgggacagtgggtagtgccagccgatcggcgtcctggggattgcctgaatgtgaggtctgggttcacccgcggtgacctgagtctngggatgccctacagtga

SEQ ID NO: 493982 - DNA, 1014 bp, Homo sapiens
ttggctattgtatccgttgcgtttgtgtctggttcatccattgtgttaaattttttccccccctttatagtacgttgctaaagatattcctattgcagggagcggcatgtgttcctatatgaaattatcttctctggcctaagtacgatcacaacgcagtccgatctccgacatatcttgtggtgctggtacacggccagcagtcgctccggcaccggtgcgggattacttcttgaagttccaggctcagtaacatcagatccctaatgcagcctggggcgcggcaaagcctggtaccagaccaagttggagaccctccaggacccaggctgggaagcaatggggaacgacctccggcatacccggaatgagatttcagagatgaaccgggccatccagaggctgcaggccggagactcgacacacattcaagaaccagcgtgccaaggttggaggccgccattgcagaggctgaggagcgtggggaacccggcgtctcaaggaatgctcgagccaagcaggaggagctggaagccgccctgacagcgggccaagcaggataaggcagcggcagctgcgtgagtaccaggaactcatagagcgtgaagcctggcccaggacatcgagatcgccacctaccgcaagcttgcgtggagggtcgagggagagccggttggctggagatgggagatgggacaccgtgaatatctccatgctgattgaattccactggtggcagtagcagtggcggtggcattgggctgaccctcgggggaaccatgggcagcaatgccctgagatttctccacgcagtgacgggtcctgggctcgcatgaaggacttattccatccggaaccgcatccgaccagtcgcaggagtgcccgcgaatgataccgcctcccaacatctccactctctccacgtccaccaccccacaatcacaagtaagaatttccaacccgctctcacaatgccgtcgcttcccagaccaggtaaatcacgtcgggaaagta

SEQ ID NO: 493983 - DNA, 1116 bp, Homo sapiens
gtcctagctgctggcatcactatactactaacagagcggaagctcgaacacacaacttcttcgaccccgccggaggaggagaccccagttctagtaccaagcagcctatgctgattagtcggtcaccctgaagtagatattcttatcctaccaggcttcggaataatctcccatatgtagacttactactccggaaaaaaagaaccatgtggatacattaggtatggtctgagctatgatatcaatgggcttcctagggtgatatcgtgtgagcagcaccatactagtttagcagtaggaactagacgtagacacacgagcatatttcacctccgctaccataatcagtcgctatccccaccggcgtcaaatgtatggtagctgacgtcgagcaacatctcgcgaggtgaagcaaatattagagagtgatcatgctgccagtgcatctgagcccataggcattcgatctttcttgtatcaccgataggttggaccatgaacgtgggcatttgtagttaaggcaaaaatcaataaaatagaagatacgtagataataagatgagggtcactacggcttggtgaagcctccaactatacccactaatgatcctaatcaaatcaggcagccgtaagtatgccatcgatagagagggcctttcattcactgattgccccaatgctcagggctacagccctaagaaccaggaccatacgacaaaactccattttcacctatcatgttcaatcgggaggtaagaatctaaagtgttcatataggcacgaacaaattttagtggggacatatcccgggaaaggccccggacgtttaaaatgggagatacacggaatggaaaacagaaaattggaaacctgtcttagtatctgtgtagggctcaattcaaatttgcgccgtaaacaggctgtacactgttaagtaacatgtgcagtggatttgggaaaaagcctatcggattgaaaggggaaaggtcaaaaatagtaaagacaggaagacgtcgatagaccgggaggttgaccaaagagtgtgtgagcaccaaagcgagacgaaaggtagaaaagaacggtagtacaaaaccaggaaaacaagagcgaggagaa

SEQ ID NO: 493984 - DNA, 117 bp, Homo sapiens
aggctgctatttggaaagggaaacaggtgtaccagagcttcaggggtgacaggtgtaatatcctattaaagctactggaaatggttcatcttacaaaagcataaacaaattccccaa

SEQ ID NO: 493985 - DNA, 113 bp, Homo sapiens
actcggtccgagatatgtggatgggggcacgaggagggctgcgtaggcatcagcttcctcctgtcctcatcgacaggctggtcctctactgcgggagcctggctgggcaaata

SEQ ID NO: 493986 - DNA, 683 bp, Homo sapiens
  misc_feature (26)..(26): n is a, c, g, or t
  misc_feature (212)..(212): n is a, c, g, or t
  misc_feature (222)..(222): n is a, c, g, or t
  misc_feature (224)..(224): n is a, c, g, or t
  misc_feature (237)..(237): n is a, c, g, or t
  misc_feature (253)..(253): n is a, c, g, or t
  misc_feature (262)..(262): n is a, c, g, or t
  misc_feature (265)..(265): n is a, c, g, or t
  misc_feature (294)..(294): n is a, c, g, or t
  misc_feature (317)..(318): n is a, c, g, or t
  misc_feature (331)..(331): n is a, c, g, or t
  misc_feature (333)..(333): n is a, c, g, or t
  misc_feature (359)..(360): n is a, c, g, or t
  misc_feature (365)..(365): n is a, c, g, or t
  misc_feature (369)..(369): n is a, c, g, or t
  misc_feature (378)..(380): n is a, c, g, or t
  misc_feature (383)..(383): n is a, c, g, or t
  misc_feature (399)..(399): n is a, c, g, or t
  misc_feature (419)..(419): n is a, c, g, or t
  misc_feature (426)..(426): n is a, c, g, or t
  misc_feature (432)..(432): n is a, c, g, or t
  misc_feature (455)..(455): n is a, c, g, or t
  misc_feature (464)..(464): n is a, c, g, or t
  misc_feature (466)..(466): n is a, c, g, or t
  misc_feature (504)..(504): n is a, c, g, or t
  misc_feature (507)..(507): n is a, c, g, or t
  misc_feature (515)..(515): n is a, c, g, or t
  misc_feature (520)..(520): n is a, c, g, or t
  misc_feature (523)..(523): n is a, c, g, or t
  misc_feature (528)..(529): n is a, c, g, or t
  misc_feature (546)..(546): n is a, c, g, or t
  misc_feature (579)..(579): n is a, c, g, or t
  misc_feature (585)..(585): n is a, c, g, or t
  misc_feature (621)..(621): n is a, c, g, or t
gtttcgtgtcgctgcgtgaagcatgngtgctttcagctggacagtagattacaaagcatctccgatcacgttaaggcagatgatcaatctgtggctgcatctgtaactcctcctgggaaaataatcctgttggagtagggggctcttcccagttgtttggttagttggcccaggaaggggcagtactggagctggcgggtggggagccaggncccaactgtntngtcactgctcgtnctgctggccctctgtnactgatgcnganacggaagccctggcccattgatagacatnactgaaagcaacacccaactganncataaaacatgantncttccacagggtcaccttattgtctnnaccanaaanagcaaggannnaangctgtaaatggaccanacaacaaatgaccaaaacanaaacgtnagaacntgtaacaacaaatttaaggggancacgtattngnttgagggaacatacacaggtccaaatagaacaaacgancanactggganaaacnggngaagnncaggtaggcaggccganggagggggcccaggccacaactcgaacccagtnactgtncgcttctagcttctgctcctccttccactggccgtnctcctcctccttccacagcttgatgaggttgttacagccacctgatgcaaacctcttgatgt

SEQ ID NO: 493987 - DNA, 492 bp, Homo sapiens
gaaatgagttgggatctgggcaagatgtcttctgagctcctactagtgtggtggctgaggagttagaaggaaatgtgaaccaatggcaaagaagttaaaagctttgaaaaaaaattagacgaatggataactataataaccaaggcagagaagtccttaaaggacctgatggagctgaaaaccaaggcacgagagctatgtgacaaacgcacaagcctcagtagccaatgcgatcaactggaagaaagggtatcagtgatggaagacaaaatgaatgaaatgaagcaagaagagaagtttagagaaaaaagaataaaaagaaatgaacaaagcctccaagaaatatgggactatgtgaaaagacaaatctacgtctgattgatgtacctgaaggtgacggggagaatggaaccaagctggaaaacactctgcaggatattatccaggagaacttctccaatctagcaaggaaggccaacattcaaattcagg

SEQ ID NO: 493988 - DNA, 966 bp, Homo sapiens
  misc_feature (966)..(966): n is a, c, g, or t
tctcccctcccccccttaaaccatattcccctcggaaggcgctaccccgggcaggggcaaagcgggctcatcaccccgggaaacaccaaggacacaagaagacacagaaggcacaagagaaagaaacaagaaaaacgacaggagagaaacacaagcacgaaaacagcaagaggagagaaaaaaaaccaaaaaacaggaacaacccaaaagaacaaacaacaggaaaaacacagaacgaacaccaaaagcacaaaaaggcgacagacaaaagaagcaacacacaaaaacaaaggaacacaaaacgagaacaagaaaacaaaacggcaaaacaacaccaacacaaataaacaccacaaaaaacacaaacacagaaacaacacgaaagaaacacataaaacaaaagaacaagcaaacaaaaccacaaagaacaagaggacacaaacaagcccagactcaacacaaacgcaacagagaaacaaagcagaaacaaacatccataaccacacacaaagacaacacaggcaacacgaaaacccataaacacacacaagacataaacaacaaaacaaaaaaacggaaaacacaaagacaacagaacaagaagaccacacaacacacaaaaaacacgacaaacaaacagagaacaaagcacagaacaacagaaataacaacaaccaccacacgcacacaacatgaaacacgaaaaaaaacagaaaaaacagaaacaaacacaacaacaaacaagacaacacagacacaaacaagaacaagaaccaaataacaacagaaaaaccagaaacagacgaacataagcttaagaacagagtagaagaaacaagaacaagacaggataagtcaacgctagagaaacacatgtaagcaacgtaacgaagaagagaacaaatacaaaagaaaaaaacagaaacacaagattgtgtgtctctcttctctctctaatcatacaan

SEQ ID NO: 493989 - DNA, 177 bp, Homo sapiens
ggacctcataggttcgcaggcacacaggtgcacagcaggttctggataattcggccgatttggcaaaacgctttcgcaaactgggcgcgccggtggtgatggttcgcgtcggttggtctgacacctttgcagaagcgctgaagcaagaagtggatcgcccgtcccctgcgaacctat

SEQ ID NO: 493990 - DNA, 843 bp, Homo sapiens
gggctgtaccggtctggaatgtataggatggaggagcggagggagaagtaggttgcgagctcagcacaggctccggcgctggctcccgcagactgagtttgggagatgtctaacgtgattttttttttttcccggaaggcaaatggctggcgtggaagcacaacccgctttcactcttcgaatttgtgcttagctcttttcttgtaccttgcgactcgtgaccaacatgctgtgatgtgtgccgagggaggaattggtaagagtgagacggcgaatccctctgactgtcccagccttctgcttcaccgcccacccgcttttcctttctgtttactctctccgtgtttctccccgcttccactttccctagctcggtgtttagactttgatgaccatggctcaacaactacgagttctggcgctgtcactgacacttaaaacaaacaaaacaagcaaaagcataaacatgattacaccacttttcaatcattggttaaaggggaatttcaaaaatctattttacaatgctggattcggtaaaaaggtaaactgcacacgcgggcgcacacgggcacgcacacacacgcattcccacccacacacactccttggtcatcccgttgtgaaataacgcagttaacagaacatacgggtcatcctgcctcaaaggtgatcaacaccggcgaacggctgttgaacgcactttaagccccccgcaggacttgacttccttacagggcttcgcattccccctaagggtcgaattccctctcggacgcaaatcagcggtgtcacgcatcgcgcacgctctcctcggaaacatagttcccagccggacctgtc

SEQ ID NO: 493991 - DNA, 798 bp, Homo sapiens
  misc_feature (34)..(34): n is a, c, g, or t
  misc_feature (86)..(86): n is a, c, g, or t
  misc_feature (223)..(223): n is a, c, g, or t
  misc_feature (312)..(319): n is a, c, g, or t
  misc_feature (348)..(349): n is a, c, g, or t
  misc_feature (353)..(353): n is a, c, g, or t
  misc_feature (355)..(355): n is a, c, g, or t
  misc_feature (371)..(371): n is a, c, g, or t
  misc_feature (392)..(392): n is a, c, g, or t
  misc_feature (395)..(395): n is a, c, g, or t
  misc_feature (403)..(403): n is a, c, g, or t
  misc_feature (512)..(512): n is a, c, g, or t
  misc_feature (518)..(519): n is a, c, g, or t
  misc_feature (521)..(521): n is a, c, g, or t
  misc_feature (524)..(524): n is a, c, g, or t
  misc_feature (638)..(638): n is a, c, g, or t
  misc_feature (663)..(663): n is a, c, g, or t
  misc_feature (687)..(687): n is a, c, g, or t
  misc_feature (690)..(691): n is a, c, g, or t
  misc_feature (699)..(699): n is a, c, g, or t
  misc_feature (701)..(701): n is a, c, g, or t
  misc_feature (715)..(717): n is a, c, g, or t
  misc_feature (720)..(722): n is a, c, g, or t
  misc_feature (797)..(797): n is a, c, g, or t
gttgctcccctgccgggtgtgttagaagcaagtnagaggaagaaggtcttggggactacgggcgccaccgagaacccatacgaggnagccgccgacggggggtcgccggggcggggccagaacggcgcgcgaaggccaaccagaacggcggcaagaactagggggacgcggggcaggtgctgtgggagttggctggacctgtgggatcgacgtctgcgccgtncaggagccgcccaggggagagagcggagactcgggaggaggatgtgcgctccgacccgggcaaggcttcccatccctcccttcctcttnnnnnnnnggggggggggggggtcggggtgaggatcnnaccncnagctctgccaagaaanaccgaataccttgagagcganacntaagcgcnggggaagacagggatagaagagacgacagcgctttgataagagggtttttagactaacttccacctgtgacgagtgcatggggcctgcgccctgagaggttgcctttcnttttcnncncgnaccctgggggtttgtggtgatgttaagttctgttaggaccaaggtggatctcagtaaggaggtagagtagatttgtgaacagctgtcggaggtagaatctttgcagacccagantgggtgggtgtagacactttgccangggtggtagctttatttgtaatcntcnnagtgaaancnttgggaaatccagnnntcnnnaactcttgcgtttcttgtaagactttctaagcgcatggctttgtcgtaagacttctcgtggccatgtgtctcacnc

SEQ ID NO: 493992 - DNA, 313 bp, Homo sapiens
agggcggaagaaagatttagtggcccggcgcggtgggtcatgcctgtaatcctagcactttaggaggccgagacggtagaatcgcttgagtccaggagttggagaccagccctggcaacatagtgagaccctgtctctattaaaaaaaaaaaaaatttgaaattcagccaggaaaatgcctttagcccctgtttagaagttgttggggaggctgaggtggaaagattgtttgagcctgaaaaatcgaggttgaagtgagttttgattgaaccactacactccagtttgggtgaaagaccaaggccctgtttca

SEQ ID NO: 493993 - DNA, 130 bp, Homo sapiens
gagtgatcctcctttccaaagcggagatgctgcagttaggctgttggttagggcaatgaactaggacagtcccacagtgtaccttcagatcatcttttctctccatttcatgtcccctaaccaacagcct

SEQ ID NO: 493994 - DNA, 253 bp, Homo sapiens
agaacaagactctgtctcacaaaagaaaatataaaaatttgaggccaggtgtagtggctcacgcctgtgattccagcactttgggaggccgaggtgggcagatcacttcaggtcaggagttcaataccagcctggccaacatggcaaaaccccatctctactaaaattacaaaaattagctgggcgtggtggtgggcacctgtagtcccagctacttgggaggctgaggcaggagaattgcttgaccccggga

SEQ ID NO: 493995 - DNA, 173 bp, Homo sapiens
tgccgagacaggcgatctcagtcgatgatgcgccgtggcgatctgggctcagcaggcggatgcatggtccttcaggatcaggccttcttcatggcgtggaagagggagatgagcttcccagagtaggggttccttgtacccagtgacggcgcgcctctggccgacagcagctt

SEQ ID NO: 493996 - DNA, 217 bp, Homo sapiens
gacagcagcacacaggattccaggaaccagtgtttgatgaagctaggactgagcgagcaagctagcaagcagcatcttcgtggctgaatatcggaaaagagtccaggagccactgcgatttggtgaaggaagctaggaagaacgaaggagcgctaactatttggtggtcaagctcggatacaggattctaggatggagcgagtgcaacaagtgtgct

SEQ ID NO: 493997 - DNA, 474 bp, Homo sapiens
gccaatgttgtaatttgtattttccctttaaaattatttattttttccagatattcacatttactgatataacattgttcttgaaattgacaaagtcttttagatctgtagtcttgtctcttttaagacagagtattggccaggctaggtggctcacgcctgtaatcccagcactttgggaggctgaggcaggtggatcacagggtcgggagtttgagaccaggctgcccaatatggcaaagccccgtctctgccgaaaagacaaaaaattagctgggtgtagtggcaggtccctgtaatcccagctacttgggaggctgaggcaggagaaccgcttgaacctgggaggcggaggttgcagcgagctgagatcgcgccactgtactgtagcctgggcaacaagggtgaaactctgtttttttttttttttttactgtagcctgggcaacaagggtgaaactcttttttttttga

SEQ ID NO: 493998 - DNA, 213 bp, Homo sapiens
aaaccccccgggaaaattttcccccccccccgggaaaaaaaagggggaaaaaaaaaatttttttataatgtgggcttaaataaaaagccccccggggcgggtttttttaaaccccgccctttttttccggggggggccccgggtttttttgcccccccccggggcgggggaatttttaaaaaacccctttaattccaaagggtttttggggta

SEQ ID NO: 493999 - DNA, 494 bp, Homo sapiens
cccatttcctccacagagaaactcggggagctgctcaggggtgtctggggcgtccccaagagcggcaccccgcagcctcggtgctctggacttcgggagccaggttactccgggttggtctcctcagcacaccgagcagcaccccgggcctctgcccaccagaggccaacagcctggccccagctgtgaggactgaaatatctccagatgttgccacgggtcccctgggaggcagaagcagccacagtttgaactgtgccctagaagacggcaaagctccacagaggccttccctcctcatgtccctgtcctgtgcatgaagtctggtggggaccccagaggcaggggcttgaggatttgtgccggagagtcccgagactgcagcagggccgacctggatccctccctccctgccttgcccctcccaagctgtgtgagtctctcaacctttcacagtgtcagaatcctctgtacaataaagttcatcagatcca

SEQ ID NO: 494000 - DNA, 341 bp, Homo sapiens
  misc_feature (39)..(39): n is a, c, g, or t
  misc_feature (243)..(243): n is a, c, g, or t
  misc_feature (327)..(327): n is a, c, g, or t
gcactcccaccactgcccctgcagcaccgaggggcaggntgctggggtcctgttacctactgcgtcccacgaaacgcaggcctggggggctccaaaagcttgttctccactcagcctgtaggctcctccttgatcctgcttggcctgcagaccctcctcccaccccttgaaccagggcatctggatgctgactctgtggtggcctctgatgtctgacaccaccaacagaccctgggccaggtncctgaccccagactctgtgcctgaggccatggtatagtggggaagaccaggctcagggccctagagtccccctcccagcccatnttgagcaacgtggg

SEQ ID NO: 494001 - DNA, 436 bp, Homo sapiens
  misc_feature (149)..(149): n is a, c, g, or t
  misc_feature (167)..(167): n is a, c, g, or t
  misc_feature (314)..(314): n is a, c, g, or t
  misc_feature (325)..(325): n is a, c, g, or t
  misc_feature (334)..(334): n is a, c, g, or t
  misc_feature (349)..(349): n is a, c, g, or t
  misc_feature (378)..(378): n is a, c, g, or t
  misc_feature (428)..(428): n is a, c, g, or t
actaagggagcttggcaatcttaccccgccttgtggccggaagacatcgcctctagatcaccagtagtagaggccccgcctggtcagtgaccagatgcttaacgcccggcggtaccctaagccgtgcggaggtgagcatcatcagtttngtccttcaaatagggccnctgtatggatggctacacgagggttcagctgtctcttacggtgtgaggagtggtaatgaccttcccctggagaggcggtgatggtgcagcaagacgaggagaccctatggatctcccatttattaatgcgggcagtacctaactaancctcgggtccnaaactaccnaaccttcaatggaantttcggttgggacgacctcggaacagatnccaacctccgaccagtacatatcttagacttcgccagtccaaccgtgctnctaaaaaa

SEQ ID NO: 494002 - DNA, 103 bp, Homo sapiens
  misc_feature (5)..(5): n is a, c, g, or t
tattngtgtgtcgacgtgtattcaccatgcggtcatggctccctgtacaagtaccgtcgagaagtgagcacgtgctgacctccaaatatcgtaagctggagct

SEQ ID NO: 494003 - DNA, 992 bp, Homo sapiens
acaaggaggaagttgctattgaagtctcaagagacatacatatcgaacgcttgtgaatgaagagagaaacatacaacatcttataatcattaatacctgtcatgttcgcctcaagacctatctgtggcccagtatgcattattgttgtggaaagtgtaaccgaatgtgaccacgcgccaccatgtgcctggagcttggattagaagcaatcacgattctgtatggttgcgacattaagtaacaaagaactggttagttgaacagatattctgaaaaggaaagagcataatgagtgaatatttagtccatcaatgtacctggacccctaatgccttaaaatacctggcaactacttgggaagaggcattcgtttaaaaattgcatgtaattgacgtggttgttattgcgacccatgcgccagagtggccagggagcactggaacaaggtaactgcacttattgagaaatattcttggcaatcaaaaaagcacgtaagtctgctagagagtaatctatctgtgaaaagttcctcagtgattctatagtgagactgtctagtaactcagtgcgatgatactagggctgtgctacggtccactttgcctgctgaaggatgatacattgctattccgagaacatttgtgcatcagagcgttatatggaagccccatgaaaacttttaatgagtggttttaggcatatgaatttccgttccagtaaaaaactggcttttgaatacctcaagcgattttactgagaaaggtgctctgaaccccatgaccctacaatttaccggattgggttttggccaggcctttggttccccactggtgagttgaggacactgtctacgggccgggttgcggaatgaggggaagctctcgttcacaagttcctttaaactttgcccctttgtttcatggaaagggctgcccttattttcgcgcccataagacgttttgagtccacaaatttctggcacgcggggtttg

SEQ ID NO: 494004 - DNA, 126 bp, Homo sapiens
aagcttaatagtgaacagccaaaagctatatgtgatggcttattgtagtgaaggtaactaagacgtggtgttccatgactatcagagtacatccatggcggaggtccagttatttgagctttgacc

SEQ ID NO: 494005 - DNA, 516 bp, Homo sapiens
  misc_feature (145)..(145): n is a, c, g, or t
  misc_feature (177)..(178): n is a, c, g, or t
ccgcgcctcgccaagaacgccggcgctgagttctccgacaaaggctattccaccatcgtcgcccgtgccgagggcgatgacgaactggtcgagatcctcgggttgcgcatcgacattccggccaagctgttgcgcgacctgctgncagcgcgccaaggataccgtacgcgcccgccnntgtcgcgctcgcatcgccccgggcacgcgaggagatcagccaggtgctgaacgacatcgcccaggacgaggcccgcagccgcgccgcaactagcgcatcgccgaagagctggtcaagctgatgaagcagctgaacgagctcgatgacgcggcggtctacaaattcgccgagagcggcaagttcgacgaagtcacggtcgtctgccgtgctcaacgacatgccgatcgcgatgatcgagcgcctgatgctcggcctgcgctccgacctgctgctgatcccgtgtcgttcggcgcggctcaactggccgacggtcgagaccatccatggcaagcggccgc

SEQ ID NO: 494006 - DNA, 812 bp, Homo sapiens
  misc_feature (365)..(365): n is a, c, g, or t
acccaccgaggcagctgtcagcctgggctgagggtgggcatgaggcacggagtcagcacttggatctagcggatgtgagtgtttttctgtgccccaagttgtagtggaaggtgggcactagctgctggtgcccacagacacagccagtcggtggcaaacagggaggtctagcccagcagagagatgaggacatttggcttctccttcatgcccgacagctatgagctgagcttctgcttggcttggaaatgaaataagacttggtatgaatatgtgccaaggcctccccagttgtcatcctgcctctttgtgccctcgccgtgtcctttggccccctatccctacacccatgcaccctgtttccnttacagattttgatatggttcgtagtgtgtaatagaaccaagccgagtcgcccttttatcagaagggtctgaagaaggcagcgagcggacagagtaggtgaacacatggcctgcaagtgcgaccagcgtcagacccagtacgtgtgcccacagtggacacacttcacatgctccaaatataacgccaccgcggcagggcatgtgtacacggcatgtacagaaacagcattgcatgcactagcagatgggcactcagcacagatgtggagagggactggtctgatcctgctgaaagccattaaggagaaagcgaatttcccagtgccgggctgcagcagagccttataggggccctgtttccgtggggatgcgcttcctctggcagcaagccccaattgccaagtcactggtggataacttttccgtgccttctcaagaggcgagaaa

SEQ ID NO: 494007 - DNA, 172 bp, Homo sapiens
ggtcggagcctggacgggatactcgaaggggaattcatcggtcatgctgctcggtgaaccgagacatgcctcttgtccgtggggtcttgctgatgtaccagttcttctgggccacacggggctgagtggggtacacgcaggtctcaccagtctccatgtagcagaactgact

SEQ ID NO: 494008 - DNA, 145 bp, Homo sapiens
tattatgtgggtttgtcacctaaagtattttaaaataaagactggtttgtatatttatttatttatttatttatttatttatttattatatttatttattatagagatggagtctcgctcatgttgcccagctgtggatgagacg

SEQ ID NO: 494009 - DNA, 580 bp, Homo sapiens
ggcacgaggtctacggagactgtgacttccagctagggaaactagatggcatgctctccgcggtatacgctgcgaatgcagtccagactcaggcgaagacgtgcgcaaggagtgccaagactgcccgctgctggccacgctgaacgacaccagcgtggtgcacagccgagaaagctgccctggccgccttcaacgctcagaacaacggctccaattctcagctggaggaaatttcccgggctcagcttgagccactccgacctgctacctatgaggagtatacagtgactggcactgactgagatgtaaagaggcacacaggcagcaagtgaacctgctggaggaacctgccggtgttcaacacagccgtgactacagtccacagatgagcatgagagtccaccggtgggatcaatgcactctcgatcaatgggactgactcacagtgctacccagatcatggactgagtcccagagacatgacgcgacacactgaccactcagtgcgctatagacactcgaaactagctcgatcaccaggaggcattcgcttggcggtctcagcgtagtgacctgctgc

SEQ ID NO: 494010 - DNA, 830 bp, Homo sapiens
aatgtcttttttataaagcaaaaaaagacaataattgcatttatgagctcggcaggatctgttcttgtcatagccattgactatacatttgctactggtgattcagtttttaattttttagtcacaggaaatttttaactctactgtagatgcatgtccatgcattttctgtgttatggaaatccactgatttttttttttttccaatggggggttcctggcaatcggtttcataattaagggcctccatttaatctctatttcataatttttaattttaagcgcagcaattgaaccaaaatgggccagtttaaaaattggtgtgcgcctggtaccacaaatgtgtccagagggttaagaaaacgccttctttggatttgggtggggccttggattggccttgggttaagggtaaagggaaccggttacacttgggagcttgggaacccaaggcagcgctttgggtgaacctgggcccggggatagaaaattggcgggggaaagctatagagcaaggggaggggccctgaaggccgtgccaggggtgtacaggggtgctccaattaaggggcggtcctacgggtaccctttaatggtgacttcaacatttccaaagctttacaggggtccataggtgttctccgcgtactggtgttttaccaccaagtgggctttcttggtcctagttcgcggtaccaattttgcgggcaagaggttacaaacttggtttatccagaccataatttattggcggggccatgtatccattaaattgggttaccgttaggcacaggtaggccggctattgccgaaaaattgccttaagacta

SEQ ID NO: 494011 - DNA, 147 bp, Homo sapiens
accgcatactcggcagggctcccgcggtctcggcggaggcgggcgtgggccacgagagtgtggaggagttgtacttgtacaggtcgaagagtgtctgctctgtgatacggtccagctcttccagctcctctttaatttccttgtacc

SEQ ID NO: 494012 - DNA, 169 bp, Homo sapiens
gagagcagcctaattccatacaggtttcttacgtcaagtagaaaatgatttcgacagttcctgagaactgacaatcatctttcattatcagggtaattctatcacttcaataagaattatataagtgctttgacaatcgcgtgttgtgttgttcagtcatgtttggctt

SEQ ID NO: 494013 - DNA, 186 bp, Homo sapiens
tgactactttgccaggctctactgacctatgacgactttttgtaccacagtgacattcaagttcattctggcaacgctctacccagtgtctgcccgcactggtttacatggagcgcctcgaagtccacagcaattgctccgtcgcctacttcaatgcttccaggtcacagggcccagcatctactc

SEQ ID NO: 494014 - DNA, 139 bp, Homo sapiens
gtaaggttgtacagaggttggtccagtgtgttcagtgtgatatcagtgaaggtccagctccaggagaagcctgttttcaagaaggttgacagaagaactagggggtttcagattaatgtcctccatagcagcctttcgt

SEQ ID NO: 494015 - DNA, 103 bp, Homo sapiens
tgcatcacttcgcgcacacaaatcgctccaccaacaggatttgcgcgaggatgtgtgcgcgaagttgtgtgcgaggatgtgtgcgcgaggatgtgtagcgcga

SEQ ID NO: 494016 - DNA, 86 bp, Homo sapiens
  misc_feature (2)..(2): n is a, c, g, or t
  misc_feature (79)..(79): n is a, c, g, or t
anagagatacacaaaaggcacaacaatcctaaaaatcatatacaaaacaggagcacaactaccccttcccatataaatnaacaggg

SEQ ID NO: 494017 - DNA, 923 bp, Homo sapiens
agtgtccattacggccgggggggctatgctggcttgacaggggctgggctcttccgaacagaagcatggatctcggaagtccctgagctgctggagcgcgtgtgtggagccccccagaggatatgctttcgtcgacaaggaatccgtcgcctggcagctggtgactccaaatgtcctcacctcgcagtaggttcctggtaacctgaggactactgagaacagggactgtcgatggcttggaagtcccggtggggaccgttgtactgtatcaggtggagccacaggcatttatgggggcctgatttccctgcatggtcaagtgaactgccctttgatgctcatggcccacattctgtcccaagagcaggcaccgtagcccccagtgccctgtacaaccctgctgcgctgtcaaagcactgttccatgactcgatgaggagaagcgtccgctggggcgggagggggtcgcgcgtgcctctcagcctgtcccctcacacaaggcgagaaggagagggtgctcaaggaaggtcaggagggaacatccgtaacaagcaggcagtcaggagcagcggccggggaagacggagtacacttgatggggtggaaagccggtggcaagcctgttctgcacaggagccatggaaatgctggaagacagtcatggcctgggcaggcacgatcttctgggaagttcaatcacgcagattggagacgctattggtccaacttgcaagaaggcgccacagccccatgtgttagagactaacccgggcaatatcagcacagggcaactcaagaccaaagggcgcgggacgcccgggggagaaatagcaagaacaacgatcggcacggacacaccggcccgcgaaataaactagcagaagaccacagacaagacacacaagcagacacgacacccccaca

SEQ ID NO: 494018 - DNA, 143 bp, Homo sapiens
atcccccacgagccggcggccacgctgagatcgtcctctgcttgcgcattccctcggcatccggacgacgctcagcggtgagtgacatggccccagacgtcccgttacttcggtgatccgacgccaggccacgtcccagatgc

SEQ ID NO: 494019 - DNA, 167 bp, Homo sapiens
  misc_feature (45)..(45): n is a, c, g, or t
cgactctagaaggatcccctcaacgctttatacttccctcaacgnctttatactttctcacgctttatacttccgtattgaattcaagtataatattaagtatgcatggaagtataaagcgttgaggtgcgtaggcgacggcgcggcgggaagtataaagcgttgag

SEQ ID NO: 494020 - DNA, 874 bp, Homo sapiens
cagcaccttcttcgaacccgtccgtgaaggaggatgaccccattctatagccaacacctattctgattctgacggtctaccctggaaagctaatattcttgtactaccaggcttcgagaagaatctcccatattgtagcttacatactccgtgcaataaacgagccactttgcgggtcacataggtatggtctgagactatgatatcaactagtgttgtcctacgggatgttagcgggtgagcacagcatatatgtacaggaggaatgagacgtagacgcatgagcatatctaaccgtccggtggccataatcatcgctatccccaccggcgtcaaagtatgtagctgactcggccacactccacggaagcaatatgaaatgatctgctgcagtgctctgagccctaggattcatctttcttttcaccgtaggtggcctgactggcatgtattagcaaactcatcactagacatcgtactacacgacacgtactacgttgtagcccattccaatatgtcctatcaataggagctgtatttgccatcataggaggctccattcatgatttaccctatctcaggtgacacctagaccaaaactacgccaaatcatttcactatcatatgcatcggcgtcaattaacttcttccacacacttctcggctatcggatgcccgagttctcggactaccgatgttcccaagaaatctatcattgtagccctcctttctacgggattatattctgatggaggctcgtcgaggaagcattgaaaactccaccggggattgggcccccccatgaacgttatcaaagggcgccagccgacagcgtgaaaaaaaagccgcgctctggccgagatcgtccgaaccg

SEQ ID NO: 494021 - DNA, 1214 bp, Homo sapiens
gctgagccagcaggctgacggtgatcgattcggcagctgcaagagctgcggctggctggcaggacggacggtcctggctccatgcgtggagacctcgctgcagcagaagatgagtgctcagcaggcccagtgccatggagctagaggctctggcactgggcggcagcacaggccggccgcagctgcaggctgagggcctgcgtgctgctttggctaggggctgcggttgtccggcaagaattttggcacagcagtggtgcagccagctgtgagctggcacagcaggttccagcaggctgcacccaagcagcagctgtcctctttgaccacaggctccacgcaggagtgctctttccagtttagaccatgcaaggctgcagggctatgcgagcaagtctctggcagtcagtacttggcaaacccagcacagcagccagggggcacagcccacaggcagctaggcctgcaggctccagcgtggcaggcctgagctagcttcgggcaagcgagctggcagcaagcaccacaggcaagacttggcagtgactcagggtgcaacactagcgttagcgcactctacagaaaaaatatagcagggaggcaaacaagatacccatacttgcagaacccaaagactagcaactgggacactaggagcagacaagaaaaagcacccagggcacaacccattgcaagcgaactatcgcagaggcacggaaccggagagacagacctgaccaggccacacagagagaacaccgcagacaaggagcgggaatgcacgagaccaaggacagcatcgcacggacggggcggaaggacgagcatgcatccggggaatgtgggacctcacaacagtgggaacaaggagtaacatgccgcgaaaacaggcaggcaggcaatgctgaagttgaacccaggacgggcacaagacgcagcgaggtgtatgatgacggttattgggtgacatgccatcacgtgaaaggagtcggggcttgttgtcgagaactgagggcagccaaagacaacggcgaacaggcgcagggagaagagggggccaggcggggcgagacacacgagcagagaagaagaagaattggggccggaggaacagaaaagcaaccaagccgacgaggcgagccagcggaccggcaggaggggagagggaacggcgaagaccacagaaaaaagggcggggggcgccagacagagag

SEQ ID NO: 494022 - DNA, 116 bp, Homo sapiens
ttggggctccattcaggtgagggcagagtattatggccttggagctcctctcctcgctggtggcacacataatgccagtaagaagatccacactgcagccccagttaggcgctgcc

SEQ ID NO: 494023 - DNA, 193 bp, Homo sapiens
  misc_feature (43)..(45): n is a, c, g, or t
  misc_feature (47)..(48): n is a, c, g, or t
  misc_feature (50)..(50): n is a, c, g, or t
  misc_feature (55)..(55): n is a, c, g, or t
  misc_feature (61)..(61): n is a, c, g, or t
  misc_feature (65)..(65): n is a, c, g, or t
  misc_feature (187)..(187): n is a, c, g, or t
gcggcggcgtatcgcttaactaaattattattataattattannntnngnagatngatatngccngcgcgggggagtatcgctggagtttcaaaagggaagtggtatctccttcatcaagactacttgccattgagtccatactggcaggaagatgaagcatacacacggctgtatggctcagcgcngggtac

SEQ ID NO: 494024 - DNA, 183 bp, Homo sapiens
caagtataaataaaatcctgagttttaaaattttgagtcccgcttaaacattttaaaaattttgttatgtatttttctttgaacatgtctttctgcctgcaaacaaaacagaattttagtattggtttacaaaaagttaactaaacccatatattactttaaaaataaatgttaagggcaaga

SEQ ID NO: 494025 - DNA, 562 bp, Homo sapiens
  misc_feature (23)..(23): n is a, c, g, or t
  misc_feature (67)..(67): n is a, c, g, or t
  misc_feature (123)..(123): n is a, c, g, or t
  misc_feature (142)..(142): n is a, c, g, or t
  misc_feature (171)..(171): n is a, c, g, or t
accagtggggcctgaagattaanagcttggactttggattgaaaggctccagttccagattctgatnccttgactatacgccttggacagattccttaatttctctgaagtctgggttttccntcatctgaaaaatacttgncagtaggctgggcacagtggttcttgccngtaatcccagcactttggcacctgaggctggcagatcacttgaggtcaggagttcaagaccagcctggccaacatggtaaaacctcgtctccattaaaaatacaaaaatagggccaggtgctgtggctcatgcctgtaatcccagcactttggcaggccaaggcgggtggatcacctgaggtcgggagttcaagaccagcctgaccaacatggagaaaccccatctccactgaaaatacaaaattagacaggtgtagtggtgcatgcctgtaatctcagctacttgggaggctgagacaggagaatcgcttgaacctgggaggcggagattgtggtgagtcgaaatcgtgccattgcactccagcctgggcaacaagcgagactccgtctc

SEQ ID NO: 494026 - DNA, 792 bp, Homo sapiens
gaccgcagcgtaggtgctaccacctgtgcgtcgccgccgccattttgatggctggaagagtccggttctgggacagctggaacagtggtggtgactggaataactttaccaaatgtaaagctattgcggaactaatcttctccagcggagatggccaaatgtgctttgtaacagagccagactgttttcctatctcccaggatttttgctctttacttaaaagggttgtcatcccaaagcctttttcgactgcaggatcatcaggttcggatgagtctcatgtggctgctgcaccctccaagatatattgctctcgaaacagtgtggcctcgactgaaactattggggacccttttggacctcaagatcacgaaggttccaggcttccttgggaacatagggttttaggatgtcaccttcgcatggggactgcgttcacaggaacgaaaagcctggttcataaaaacttttgcctgatgttctagcagaaccctttattcacggtgaacgaccatgacgtatgctagatgggccccactattgtgcaattgcacctttcagggggttactggatgccaccctggtttgaaacaatgaacagtttaacgcagtgcaggaaagaccttacttttgcacagttgcccagaaggtagacgggtgtccctatacaaaaacattgtcccagcacattgcttgcgccacaacgattttggactcacctggttgtccaggaagtaggcttcgtggcgaactaatgaattctgactggtaacctcacaaaactaagaattg

SEQ ID NO: 494027 - DNA, 221 bp, Homo sapiens
cgcagtagggcatcaagcaagaggaagaaagtggagatctacgatgtcctcatgtctactcacatgcacacgttacgtttgatcgggtttctgggccacatggtctgtgaatcactttcaggtctgaggatacaagagtcattgaaaaaggtaaaatagcctgggtcagtggctcacgcctgtaatcccagcactgtgggaggccaaggcaggtggatcag

SEQ ID NO: 494028 - DNA, 207 bp, Homo sapiens
gcggacctattggggatcgcctggtggctggcgatcaccaagctagcaagtgatcttccgttcttgtcatcattcacagtcgtgacactgacgctgcgcacaggagtcttgaacttgataagaggatgggtatgattatgcctgttgctcgggtgtgcttcgcagttctggcagaaatcggtatcgtggcacactgcgcacttgtag

SEQ ID NO: 494029 - DNA, 386 bp, Homo sapiens
ggtggaaaaaaaagcatgtccggtccctccgggcttggccacattattaacccaggaggaatgtcagggggcggcaattttgccccagggggggcctcccggggccctcccatcccacccggtggcatgcagggcgggtttggaggccaaaaccgggggagcaggcccaacgatgcccgcttcacttgccgctaatgagaacttggaatcctgtgtcctgtttcgtggcaacaaggctatgttctgttaggagttcccttaaactgggtaaaaaaatttttttttaatttgctgccaaattgtagctcaaaacaatgtgaatttgtttttcgttttggggttttttttttttgtaaaaaatgtgtttccgttcacaaaccctttta

SEQ ID NO: 494030 - DNA, 350 bp, Homo sapiens
  misc_feature (324)..(324): n is a, c, g, or t
cagaatggcacgctctacatcgcctgttacgaaccgtcatgcatcattcgcctgaccgctggcggtacgccggaaacctatctcaccgaccccacggcccacacactctgtcaccccacgaactgcgccttccgagcatcggagttgttcattgccaacctcggccggtggcacctggccgtcatcgacaccgacaccacgggactggcgctcccggtcctgtaaaccagccatccgcatcacgcaacgtccggccactttcgatcgcagcagaggaacgaatccaccatgcccgttgaccgcgaacccgccgatgagagccgnatgcagcccactaccgccggcaactc

SEQ ID NO: 494031 - DNA, 286 bp, Homo sapiens
acaacccaaagtccgggactaaaacattttcggtttctagtggttgttacgaagctacaagagcgacgatggaggatgacgcaccgagtgttgatggtcgagatgtctccgggagcggcgaggctttaacgagggagggaggcagaacttcaatgtgaggcctcagtctggggcaaatgggcttcccaaacactcctactggttggacctctggcttttcatccttttcgatgtggtggtgtttctctttgtgtattttttgccatgacttgttagcgcgtgctgt

SEQ ID NO: 494032 - DNA, 1483 bp, Homo sapiens
tgtgtaggagagctcctcgctagagttgttgatgatacacgcaggcggagaatttgttttccccgaggacagacgaggggatattttttttgctgggtgctccagcggacgaccgccgtggggggggtgactaccataccgttcataaactggtagaaagaagagtcgcccctatgtcggggccaagggcctgtataaatatgccgcggccgctttctgcgtcgcacgacggaaagagagttcgtgtgtggtgttatgatgatagtatggttgatcacaaccgctttctctggagagattctctatagtaggaatggtaagagcggtgtgtaaaatagacccccgaaaatggacggctatcgaaggaagaggagccggaaagtagttttggttgtgtaggaaaggcccccccactttggtcgacggagaattttcatgtaaagcattcgtgggcaccatgtgtgttttgtcccccgccccccgacgttaagcgggggttggtgtggttgccccagagaaatggcgtgttgttgagagaagaaaggtttgcgatgtgcccccacgatatgtccccacgggagaagggttaccccccacgtgtttaaatagaagaagggagttgttggcctgtggagaccccacaaggccacaaaagattttttgtggcgcacatccaacaaagggtgttacacgccagcgccacagtggtctctgtgggaccccacagagggcttcgagactcgtttgtggcgtttttaaagactgccctctctctctcgtgaaaagggcacttttttggacactatgtgtgcccccgccaaggctcgccctctgttctcgagataagagaagagcccccacgtgggccacgaaggcggccttctgtaaactgtgtgcacacatgtgtctttacactgccgtgagatatatgacctcatctctatagaggagaaaaatgttagagagtttcacaggggtgacaccacagagaatggagattataggagttgaccgcagagtttgatatggcgcacattgttccacgtatcccgtatattctataagagaaaataaaatatacgcaccacgctaaggaggctcttctagagcacttgttctcggttgtttataacgctggttctgttcactcacaaatttcccctctttcacgtttttaaagagaatgttcgtctaaccacgaagaaaaatgctgtaaatattttgtaacacacacttttttttaaccagggcccaaaaaaagaaaaaaaggtttttgggaaccacaatgagacttattaaagtggttttatataaaaccatccaattgtctttgtatattttggataagccacgccagtacccagcgtttccatttgtacaccagtctgtggccattggaaaaaaaggagtcttgtgattgttgaagtgaattatgttatataatgccaagagaagattaaatatttaaaaacatattttttta

SEQ ID NO: 494033 - DNA, 347 bp, Homo sapiens
tgaacactcgatgtttttcatctacacaatagaggtaatcctagtaaccgtctcatatggtggttgtgaggattaaatgggattgctagcatggaacctggtgaagcactccataacggttcaaacagtggtagtaataacagtaataacaatagcaatattatctgatctctctgggcctctgttagccagctgtaaattcgatctctttccctctcccttccaactttactgagttcttttaataaccagccacgggcttggaaatgccttgacctttactaaccgagttgtatattgagcctagccctagcccttttaagtggcactgcccgggctccccagat

SEQ ID NO: 494034 - DNA, 1471 bp, Homo sapiens
gccctggtgtgattaccgtcctgcgacggttgttctctggagcagcgtacttttatctccgatccgacttctcatcctaccataagtgcgtgccgacacccgatggaagattcgatggacatggacatgagcccccatgaggccccagaactactcttttcggttgtgaccctacacacggccgaaacacagacttactcaccatttacacggtggactaactgactgacaccactgaccgcaaccacgttactcctttacacgacacccggatcacgattatacgagggactggatgcaacacggctgacgattgcaacactatgattgaacgcacgcaggcaactgacattaccgaacaggcagatccacaattacaacgtaacacacattggaaacatttagacacaaaatgtcatggtaccagaccaccacgcggttatacacacatttgggcggagacatatttgaacaaattacaacgacacaacacacgaatgaggtcatataacgggatactgacacggtggtgggtttacaagagggactcaattgttgccaaattattcacgatcgggcaccacgacaaacatattaagataagacatggtatagagacggggcacacggagttggacactgaaaggatcaacaagaacaggcatatggacaatagacagagatcggaaccggaacatcggtctgcaaaacacatatcattgtcacagggatagtcacttccatggaggaaactacagaacgagaatacatagaatcacacattgtgaaatagggtggagatcacgacaccagagatttccccagacacgtacaactaatcatgttaaaacacatattgtaatcgaatgacctgtgccacgcactggacaatgaccgcacacggcaccgcaacggcaccgcacgagaccagcacatgacacgacacagccatgaccgtgcacaggacccggatcgcaccacagggcacagacgtgacaggaaccgcgagacacgcacaaccaaaacacagacacacgtaccaaataccaacagcaacaacgagacagacgacgaaagcgacatgacacaaaataatggcaccaaatagaggatgcacaagaaacaggcgaatgtagcaagagaaacagcaaaaataacagaaagaaatactaaatatcacaatagcagtcaatcaataggagatacaacaaaagattcatttcacagcgacacaatagttctaacaatcacgtaacatacatacaaaaggagacataaaatatgatataaacaatatcaacgcaccacaacgacctacatataaaaataagcgataaattaacaaaattaggaccacataataactaatacaacaacatggaaccaaaaatgaggaaaataaaacacaaatagtgtatcaatcgacaacaaggtaactatacaaaacatagcatgtaagtacacaaaagat

SEQ ID NO: 494035 - DNA, 662 bp, Homo sapiens
  misc_feature (8)..(8): n is a, c, g, or t
  misc_feature (75)..(76): n is a, c, g, or t
  misc_feature (82)..(82): n is a, c, g, or t
  misc_feature (88)..(88): n is a, c, g, or t
  misc_feature (91)..(92): n is a, c, g, or t
  misc_feature (106)..(106): n is a, c, g, or t
  misc_feature (113)..(113): n is a, c, g, or t
  misc_feature (115)..(118): n is a, c, g, or t
  misc_feature (121)..(121): n is a, c, g, or t
  misc_feature (137)..(137): n is a, c, g, or t
  misc_feature (147)..(147): n is a, c, g, or t
  misc_feature (150)..(150): n is a, c, g, or t
  misc_feature (170)..(170): n is a, c, g, or t
  misc_feature (181)..(182): n is a, c, g, or t
  misc_feature (191)..(191): n is a, c, g, or t
  misc_feature (193)..(195): n is a, c, g, or t
  misc_feature (199)..(199): n is a, c, g, or t
  misc_feature (204)..(204): n is a, c, g, or t
  misc_feature (218)..(218): n is a, c, g, or t
  misc_feature (227)..(227): n is a, c, g, or t
  misc_feature (259)..(259): n is a, c, g, or t
  misc_feature (285)..(285): n is a, c, g, or t
  misc_feature (289)..(289): n is a, c, g, or t
  misc_feature (305)..(305): n is a, c, g, or t
  misc_feature (309)..(310): n is a, c, g, or t
  misc_feature (358)..(359): n is a, c, g, or t
  misc_feature (372)..(373): n is a, c, g, or t
  misc_feature (379)..(379): n is a, c, g, or t
  misc_feature (389)..(389): n is a, c, g, or t
  misc_feature (396)..(396): n is a, c, g, or t
  misc_feature (401)..(402): n is a, c, g, or t
  misc_feature (408)..(408): n is a, c, g, or t
  misc_feature (423)..(423): n is a, c, g, or t
  misc_feature (476)..(476): n is a, c, g, or t
  misc_feature (478)..(478): n is a, c, g, or t
  misc_feature (510)..(510): n is a, c, g, or t
  misc_feature (518)..(518): n is a, c, g, or t
  misc_feature (521)..(521): n is a, c, g, or t
  misc_feature (542)..(542): n is a, c, g, or t
  misc_feature (557)..(557): n is a, c, g, or t
  misc_feature (575)..(575): n is a, c, g, or t
  misc_feature (578)..(578): n is a, c, g, or t
  misc_feature (588)..(588): n is a, c, g, or t
  misc_feature (627)..(627): n is a, c, g, or t
tccgatanagagactaaaaatacaaaccaaaactagcgtaatcccccagcccatacttcatttttaaacaaaaannccaacncctganaannattcttccccattnaaatccnannnncanctccagtcccaactcnaacccctgcntgncgccgggggcggcttcaggnttcgggcaagnnttccagcanannnaagnaggtngtggccctattgtnagttttcanccttcctgccctggtccaggctcaccatgttnttccgggggttgcaccaggtcacggngttnttggtagcgcattttngtcnntgttgtttgctctccagttttttggtgttcacatcccagatgttaagnnccccatcataggnncttgcnagtgcatagnttctgtncgggnngggcanagctttggtccagtnagaaccacacttgaggccatcggccctgaacacctggggggtgttgctgacangnaggtcgatgaccttgagtgtgttgtctcgggnccagctgngcnggtgcagttggtcgtggctgnggctcagggaggtgncccggccctgcacagggntgncctgggtgcngtggggccccctgctgtcccagaaccggattttttggtnattgtgggcactaatgatgatatggtccccacaca

SEQ ID NO: 494036 - DNA, 256 bp, Homo sapiens
acaggtggctttatctgggattggttgatcagggttgttgaaaatgagacgcctggtgagtcattttacgcttatggtggtgactctggggaccacccaatgatcggcaatttagtctggatggtttgcttttcccagaccgcaccccaaagccagccttactgggagcggcattttgtcagcagtactttggctttcgctgttcggacacgcctgtcacccgagcgtacaagttactagcagcatctgttaaaca

SEQ ID NO: 494037 - DNA, 328 bp, Homo sapiens
ttttcttttcctattgaaatagcacatctttctgatacaggccatctacttaaatcttcaacaaaatataaatatttgaaatgggattaaacaaaataatcacaattccatttcatctggtatttcagctgcttgccagccacttagttatattggatcttagcaaacactccaattagtggcaagaatgggaatgcccggtgacagatgtgtcattgactttttgtcctctggtagcaaagagcaatccttccaggacacaactgctgcatacatgcgtagtccaattgacgtaactacagtcattgttttaatggagcaggacttt

SEQ ID NO: 494038 - DNA, 1249 bp, Homo sapiens
  misc_feature (117)..(117): n is a, c, g, or t
taaagggggtggtttaaattattttattggtcctttgtgttacacataattctcacggtaagaggggttagtgaaaaatattacagaccactgtgggagtgttttaagaaacacctntacatgtgtggtgcccttccacttgggcgcgtggtaaattatatagtggtcaaagataaatctccccttataaaatgtgtgagcgcccacgtgtgtgtggagacaaaatgtggtaatttgtgtgggtctctcacacgcgtggacaaacatattattttcacacaaataggtctcaaaaaaaaaaaaaaaaaaaaaaaaaaaaaaaaaaaaaaataaaaagaaaaaaaaaaaaaaaaaaacaaaaaaaaaaacaaagaaacaaaaataaagaaaaaagaaaagcagagacagacgaaaaaggcaaaacaagaaacgaacagaagcaaaaactgaagaaaaacgacacgtggaacaaccaaaaaaacaaaaaaagaaaaaagaaaaaacacaaacagagagaagagagcaaacaagaaaaaaacaatgaaaccaaaaaacgaaaacataaacaaaagcgaataggaacaagaaaaaacaaaaacaagagacccaacaacagacagaagcaaagccgaaaacaagaaaaaaagaaacagacagaaagaggacagacagatagcagagggacaaaaaaaagagcaaaaagagaaacaaaaaacagaaaaaaaaaacaaagacgaaaaggaaaaaaagaaacaaaaaaccaaaaggaaaaaaaaacaaaaaaaaagcagagtgaacacgcgacagacaaggaaacaaaaaagcaaaggaagatacagaaagaaccacgaacaagtaggaacgaagaagaacaacgacaaagggagagcacaacggcagcaaaagagcagaacgaagaggaacgacacaacgcccacaaacgaacaggaggaagacgacaagagagaggatacatacgggatacacccaagaaaaacaagagaaacaacgacaagaagcaacaacaagacacaacagaaaaaaaaaagaacgaaaaaatagagacgaaaaaacagacccgcacgacaacaaaaaacaaccaagagaacgaatgaaagaacgagaaaacaacagacaacgcataaacaaaccgacggaggacaaaacacgatggaacacaaggagcacaaaacacacgacagacaaaaagaacaaagacaacaaggagacacacaacaccagacaacca

SEQ ID NO: 494039 - DNA, 1469 bp, Homo sapiens
  misc_feature (2)..(2): n is a, c, g, or t
  misc_feature (72)..(72): n is a, c, g, or t
  misc_feature (151)..(152): n is a, c, g, or t
  misc_feature (155)..(155): n is a, c, g, or t
  misc_feature (393)..(393): n is a, c, g, or t
  misc_feature (431)..(431): n is a, c, g, or t
  misc_feature (511)..(511): n is a, c, g, or t
  misc_feature (515)..(516): n is a, c, g, or t
  misc_feature (607)..(607): n is a, c, g, or t
  misc_feature (611)..(611): n is a, c, g, or t
  misc_feature (849)..(849): n is a, c, g, or t
anggaccttgtaaaactacaggcaggggaatatgtttctcttgggaaagtagaggcagctttgaagaatctnccactagtagataacatttgtgcatatgcaaacagttatcattcttatgtcattggatttgtgtgccaaatcaaaaggnnctnactgaactagctcgaaagaaaggacttaaagggacttgggaggagctgtgtaacagttgtgaaatggaaaatgaggtacttaaagtgctttccgaagctgctatttcagcaagtctggaaaagtttgaaattccagtaaaaattcgtttgagtcctgaaccgtggacccctgaaactggtctggtgacagatgccttcaagctgaaacgcaaagagcttaaaacacattaccaggcgnacattgagcgaatgtatggaagaaaataattattctcntctggcatcagtttgctacagtgagctcagatcaaataggaaaatacttgaaatgcatgtctcaagctgcaaggcaaacnccanncctcatattaaactattacttctcatgacgtcaccatttttaactgacaggattagtaaaacattaagacagcaaacttgtgtctgtctcntctnccatttcccccgccaccaacttactttaccacctatgactgtacttgtcagtatgagaatttttctgaatcatattggggaagcagtgattttaaaacctcaagtttttaaacatgatttatatgttctgtataatgttcagtttgtaactttttaaaagtttggatgtatagagggataaataggaaatataagaattggttatttgggggcttttttacttactgtatttaaaaantacaagggtattgatatgaaattatgtaaatttcaaatgcttatgaatcaatcatgtcgaaccacaagattgtcgctgtcgtaattatcgtctatgtcatgcattctgagagaaataccatatacccatacttatgttttcacagcaagttgacgatcttgttcgaatcatatgcctgtccagtgtccttctttattaatcattccatttctttaattcacgaacaaaaattgaatctcgggtcggtgatagcactgaacacaagacatcacgcacagacgagggttcactcaagttctacatacagtaaagtggagcatacacaccagcatgttgtacaaccaccagattcgcataaatcgagactcttagtaagactctacgtggcaccaactgtgtcactgacagtcctccctgtctcctcctgatggaacaactcggggcaaaataccccacaattacagtcggagcgactttcttgaccaaacgacggatagaattcatcgacaaagtagtatatcaacgtatccatcgcatctccgggactatatgatatctgatatccatttggaaccaactactcccgacacactactatccaaacactcgttcagccaacc

SEQ ID NO: 494040 - DNA, 2872 bp, Homo sapiens
cttagatggcacaatccaggctgttgcaccccttcttttcatcagtgagatgtaaagtctttatcagggacttcaaatttgcatttgtcctagaactcactgctaggtaaatctgctaactatgcgagacagagagctacttattctctgctttgagattcccggaaacagcatctacagccttggacaaggccatagtctgttttacccctattagcttaacaggtcctaccttctgccttgctttggtttctcctactgtattttttttttttttttttttgagatggagtctcgctctgtctcccaggctggagtgcggtggcacaatctcggctcactgcaacctccgcctcccgggttaaagcgattctcttacctcagcttcctgagtagctgggattacaggagcatgccacaagacccagctaatttttgtgtttttagtagagacagagttttgccatgttggtcaggagttcaaaaccagcctgaccaacatggtgaaaccccgtctctactaaagatataaaaattagtcgtgtgtggtggcgcgtgcctgtaatcctagctactcaggaggctgaggcaagagaatcactggaacccggaaggtggaggttgcagcgagccgagattacaccattgcattccagcctaggcaacagagtgagactccatctcaaaaaaaaaaaaaaaaaaaagaagaagaagaaagaaatgatgcatgcaaagttcttagcacaatgcttgccaccattatgattattttcctattcttgggggtaaacagtgggtcttttctttgatgtggtctttgcaggaggccaagctcgttgttttgatctatgtaggggccgtttggttctgccctgttcccccatccatcctacaagcctaaccttggcctactggcaagacagatggtccttgtctcactggccttgcagtggggtgaaggtcattgttctgacccactaccctggcgatttgtcttggcccacattgctagatggggaagggctgtgggttggctcagccttacgcactgtctcctggcagtggcatgctgactagcattaggggtgaggccaacctctgcctcagtatgctggagccagctagagaagatgctttcccggagggtgtcagagccctgtttggtgttgaaacaacacagaaactgctgtgctcaccccttccccatctagcagtcagccacccagcccagcttctggtccttctactcactgtgactcctcacacattacacccacatgagcatgcatgcatacacacacgcgtgcacacacacgtgcgcacacacacatgcacacactcgcacacacgtgcgtgcacacacacgcgcgcacacacacaggcctgccctcatcttccccatccctgttactacccttcctcctcctggttaaataagcagcaaagggaaaagtgggcactgacaaaatgtgtaagctggcaggacctaatctaatatacaggtggataacaaaacctcatagccaatgaacaggacaggaatctgataactcacaagagtgtgctatagttttctgctgaaatttctaaaaaatttctcttcacagccactcctcttttggatcaaagataatcaaagtaagatgattcttctttacaaaataaggcgggtctcattacctttggcctgattacttacataagtgcagcaagaatggtaatcgatcacataggcctttttaaatttgctttgctgaaacttttcgtaaggaatctcagattgtacctttgaaagctacgaagccaaggcaagaattcgtcaccagattttgcctatagcacctacagattttgggtagatcttctcttcctgaagttcccaaaatatcctaagcctcctggacctggcaggaagtgaccttctttactcatctgtaatgctgaggacactgtaagccaggtaccaggctggctttccctagaagatattgtagactgggtccatcaagtctacttcagttccttaagactgtctggtcatatctgatgcatcattttcaaatatgacattccagtcaaagccttggttgtataaccagtatttcccatcatgtcctgttataaggaggacagattcttattgaacttgtgtgaataaatatattccatgaagatgagaacattcaataagaatttctggccaggcgtggtggctcacgcctgtaatcccaacactttgggaggctgaggcaggcagatcatctgaggtcaggcgttcgagaccagactggctagcatagtaaaaccccatctctactgaaaaatgcaaaaaaaaaaaaaaaaaaattagccgtggtggcaggtgcctgtaatcccagctacttgggaggctgaggcaggagaatcacttgaactcgggaggtggaggttgtgatgtgctgagatcgtgccattgtactccagcccaggcgacagaacaaaactccgtcccccaactcccacacccctcaaaaaaagaatttttgaattctggaggggttaggcagagagaaaaagataaatgcttcatttctgttttaaaaaagcataatcagccaggcacggcggctcacgcctgtaactccagcactttgggaggccgaggtgggtggatcacctgaggtcaggagtttgagaccagcctggccaacatggtgaaaccccatctctactaataatacaacaattagccaggcgtggtggcacgtctgtaatcccagctactccagaggctgaggcaggagaatggcttgaacccgggaggcagaggttgcagtgagccgagatcgcaccactgcactccagcctgggcgacagagtgagactccttctc

SEQ ID NO: 494041 - DNA, 156 bp, Homo sapiens
tccataatgtgtgcccagggcctgaactagcctgtggggcatggagcaggaggcagtggattttagaaacacttagaagggccaggcatggtggctcatgcctgtaatcccagcacttagggaggccgaggtgggtggatcacttgaggtcaggag

SEQ ID NO: 494042 - DNA, 184 bp, Homo sapiens
ctgtgctgtcaggtcatttgccactgagtcacctcatctagtttgcattgcttcattcaagcgttcttcatgtagaccacagagcttctcagcattagcctgtgagatgagaagaagaggttggacatgatttatagaagccgtgctgaattaactggataaggaaggaggataggggtggttc

SEQ ID NO: 494043 - DNA, 201 bp, Homo sapiens
ggtttgaccaacatggtgaaaccccatctctactaaaaatacaaaatttagccaggcatggtggtacgttcctgtaatcccaggtactcgggaggttgaggcaggaaaatcatttgaacctgggaggtggaggttgtcgtgagccaagatcacaccactgcactggtcgcagcctgggcaatcgagtgagatcctgtttca

SEQ ID NO: 494044 - DNA, 316 bp, Homo sapiens
cacgaggcggtaccccgacatccacgccgctgcctttggaacctgcctggccgcctccgtggttgcccctggctctggcagggtgctatatgctgtcttcagcagagacagccggcgcagtggggggcccggtgcgggcctctgcctgttcccgctgggcgaggcggacgccaagatggaggacagccgcaacgcctgctacacagggacccgggatgcccgtgacatcttctacaagcccttccacggcgatatccagtgcggcggccacgcgccgggctccaacaagagcttcccatgtggctcggggcacctg

SEQ ID NO: 494045 - DNA, 240 bp, Homo sapiens
tacatttgtaagaaaaacctagagagccatagatagtgcgacatctaaggtcctctgtacacagtgaattagcaaacctcagcctatgtgttactaccctgataatattctttgcaagggtatctagaagcctctaagtttttcacaactggagtatcacacacttgagtgaaacacaatacttaatgtatggtactagattgccaaatccataaaaggtgtctggaagctattggatgt

SEQ ID NO: 494046 - DNA, 524 bp, Homo sapiens
ctacctctttttcctgaagcttgaagctcttcgggatgtcttccagcgtaatcagcaggatggcaattggaggatcaacagggttgtggcagggcaggtacatccgcctaaagcaggatgtgttttcagccctggtagggcagggccagatatacgtgcatctcaatgatggtatctggagtctgatcaagtccggtaggttcagccctctacgcctcccgcctctacctgagccgataccaggacactcaaccagaacggctggccaagcacaccccaggtggcccatggatccgagggaatgtgtacatccacccgaacgccaaggtggccccctcggctgtgctgggcccaatgtctccatcgggaagggggtgaacgtgggtgagggtgtgcggctccgggagagcatcgtcctccaatgagccactttgcaggagcacacgtgtgtcctgcatagcatcgtgggctgggggagcaccgtgggacgctgggcccgcgttgagggtaccccagtgacccta

SEQ ID NO: 494047 - DNA, 382 bp, Homo sapiens
  misc_feature (176)..(176): n is a, c, g, or t
  misc_feature (192)..(192): n is a, c, g, or t
  misc_feature (216)..(216): n is a, c, g, or t
  misc_feature (233)..(233): n is a, c, g, or t
  misc_feature (272)..(272): n is a, c, g, or t
cccttaaacggggggccccaggcttattaaaggagatggcgaggtcctaaaggaaattgtaaccaaagaacgacccaaaaagatcaacaagcaagccccccgagggggctgcctggccttccaaattcgaagtgggttgcttcccttagggccccccctggccaaggcctttggangaccctggcggcccancctgggcaggtttcagggggccantgggaaaccttatgggngctggtggcctttcccccctggattggtttttggcccancccagttttttttcaggggcagggggtggaggttggggtccccggcctgcttggcccccccattttaaaaagcagcccttttcagctattaaaggccccctggatagcca

SEQ ID NO: 494048 - DNA, 627 bp, Homo sapiens
tagaggatcccggtattgagtggccatgtgaggtcatgttttcctggatggtgttaatgctagtagatgttcttcagtgtctgggcatgaagagttgagcatttatgtagtcttcactgtccaggcttatttataggcagcctttttggaaaggctttccagatttgaaaggacttgagttttgtgatctaaggcatttctgctttagagggcaccctaagcccagtaatgctgtggttcttgcacagtcatagaggtaccaccttaatagtcttagacaaaatctggttgaattatctaggttaccaggcagagactcttgttctctttccttactttctgccaaacatacagtctctgtctcttctaagccacctaaagccacctttaacctcattagaaagtgacacaagcacccccgtggccacctaccactatgactgtgctccaaccaagaatttcatatacagccaaactaagccttataagcgaaggagaaataagatccttttcagacaagcaaatgctaagggaatttattaccaccagacctgccttacaagaggttcttaagggagtgctaaatatggaaaccaaagaccatcacatggccactcaatactgggt

SEQ ID NO: 494049 - DNA, 714 bp, Homo sapiens
tttgggctctagagggggtagagggggtgctatagggtaaatacgggccctatttcaaagatttttaggggaataaattctaggacgatgggcatgaaactgtgtgttggccccacagatttcaaagccattgaccgtagtatacccccggtcggtgtagcggtgaaaaggtggttgggtttagacgtccgggaatgtgcatcgtgttttataagccctaagttgtggggacagctcatgagtgcaagacgtctgggtgatgtaattattatacgaaggggggctctcaatcgggagtactactcgatgtgtcaacgttcaaggagttcgcaggtcgccgtggtctctaggaataaggggggaagtatgtaggagtttgaaagattagctccgccgatagtcgggtgtactcgtaggttcagtaccattgggtgggccaatttgatttgatggtaagggagggatcgtgtgacctcgtctggttatgtaaagggatgcgtagggatgggagggcgatgaggactaggatgatggcgggcaggatagtccagacggtccaatatcccggagcgtcagagatgtagtatcagtaacgaggtctgcgaggtgtaggacagggctacaggactaggaagccgatacggaaatgatacagagggcggaccctgaagggggaaaggccccaagaaagggagacgcctgggaacaactggc

SEQ ID NO: 494050 - DNA, 447 bp, Homo sapiens
  misc_feature (17)..(17): n is a, c, g, or t
  misc_feature (41)..(41): n is a, c, g, or t
  misc_feature (49)..(49): n is a, c, g, or t
  misc_feature (183)..(183): n is a, c, g, or t
  misc_feature (401)..(401): n is a, c, g, or t
cccaccttaatccaaanttgtgaaacccttcaaaaaataangcccctantgttaataaaagagtctgtgaaattaatacccttggcctacccatttatggtttttccagcatttgggttgttatatttgaaaaaatacttttagttgtttaatccttataaaaaccttttcctaaataagagnctgggccgggcgcagtggctcatgcccggcgggtagatcacctgagatcaggagttcgagaccagccctggtcaacatgatgaaaccccatctctactaaaaatacaaaaaattagctgggtgtggtggcgggtgcctgtgattccagctactggggaggctgaggcaggagaagcgcttgaacctgggagttggaggttgcagtgagccaggaatcngccactgcactccagtctgggcaacaattgcaaaactcttgtctca

SEQ ID NO: 494051 - DNA, 1051 bp, Homo sapiens
caggcggagaagagacaagagaaactcactgcagagctggaattagcttcagacagagcttgactggagacgggctgaaggccaggctgagtggagatgcagcccaaaaatatgcatgtggatgtgacgctggacccggcctcggcgcaccccagccttggaggtgtcggcaggatggcgagagctgtgtcttcccgctgggtctgccgccaggctccggctgcctggccatccgcagctggttctcgggagcagacgtgctgcgctggagcccttggaagcggttctccgctggcccggcaacttacgtgggcgagtgctgacactgttggagcccggccggctagtcctgcttgatttcccttggagcggcccttgcccttggcccgtcgggtttcactgtcgccgccgtgtgccccttgcgtgctgtctcttgacccccttgcggcccggtcgctaccgtggtatcgcccttggtggcgcctgggtgcgaacacgagcgcgcttgcgcacacagctcaccctctcgcggtacccactttgagcgccacgcggtcaacccctcggcggcatctcgcgacgagcctaacatcagcccgatttggtctggtaaagatgtgacaccccaccaatggagtgcgaaccatcccctcatggaggggacagatcttctactcgcgccatggtgcgatctcttcacctccatagatgctctcactcaggattattaccaaaatctcacttgtggcatcactcactctatactacctattacccaacaaaccacgaatagtagctactacccacgaaaaccaacagcaaactcttcaccctcccaaaagcaccaattcacttttaaccaaccaccctattttacccctcataagttaaaaaccacaccccactattctacacttacatacagtaataattccatcatcactacactacaactgatagcaataggaaagtacataacaacttatccatccaccaagagggcagccaccgataatgtggtgctccacaccaaataacatcaaccgtgtga

SEQ ID NO: 494052 - DNA, 1473 bp, Homo sapiens
  misc_feature (331)..(331): n is a, c, g, or t
  misc_feature (608)..(608): n is a, c, g, or t
  misc_feature (1473)..(1473): n is a, c, g, or t
gctggacttgtcttggttgccagacacctgacgtacccggcgagcggcgacgttctctttgtgactaaaagacagtgtcctagtgctccaagcctagtgagtctactggggtaccgcctctccgtcgtccgcccatcgatgccctaacttctcatggctaactggcaaaatctatccggatcggcacaaacttctgaggcaattagctcgaaaggtgcttggggcgtgaattgtgatgcgtgagcgagagattgcgtgtggctgctagtcggtcacatagccagctaggtggagcatcaaactatggatgggagtagcactttcggtacantcaaagagcatccgaccagcgcgtgcgcaaccgagccacgtaggattaaacctttcacaggttggggggaggacgttccgaaggacgcagcacgtggtcggcatggggaagggccctgtcacagaagcctgtgtggaacattggggatgcacctgatgagatatacagagtggttccttgtgcagccagaaaagcgtccatgcagaggggcagcagcggccccggaaagcatcctcgaggggcacccaaggatacacatgggactcagacgtatggngtgcacacgtgcagtcctgaagcatgcacggccggcatggacggcttggtgatgcacccaggggtcataccgctcccgaggagctgaagtaggtcagcaagcgtagaaacccgcagggcccgtaagggcgcgatccgattgggctcgatgctcaggcgcaccgtgcttcaacattggacccgcctatcctggtccctgaggcccaccgtttccctggggaggtcaataaggagcagtcgccccctttgaacagccaggttggcactgttgctctgggggaggtcccccatgggcacatttgtcccctatttaggcgccatggggtgcttcaggcgaccttcctctaggaaagcatagatattgatgcaaaactttacacctgggtaaaaccggagaacaatagagactggaaagcggcgtttgcactgaaggcgcccaaaaggtatctggccctcgaggggggttcacatctgctgagaaaccccccccacaatatcaacaaggggccctgggacgccctaaaggaacagcccaaaggagaggactttgagaagacgaggagacaagtacaggaggcggacacacagagagacatgggcccctaaagaattaacccatggccacgcaagcaacaaacgctacacaacatcagcggcgagaaaaataaacaggcaagcagagacgaaaaaaaccaaacgagatactcaacgaggagacacaccagaccgacgagcagcgcaaccgacaatagccaggccgagagctagacccacgcgcacaaacagcagagacaagcaaccaacacaaaacaaagcgaccacccagcgcagaccagaagcaccatgcacccaccaacaccgagcgn

SEQ ID NO: 494053 - DNA, 194 bp, Homo sapiens
actcgagctcgacgccatggaagcgcgcctcaccccgcggaaacgcgtacaccgggtacgaggcgactcgccgtcctcccccggactcctccatcacctccaccggtgccttccagcgcgatgaagcgagagaaacggctggcgaaggcgctcgccttgaagcgagttcgatggcctccattccacatgtgcgg

SEQ ID NO: 494054 - DNA, 424 bp, Homo sapiens
ggcgcggccgcgcgctgcagctcgagttcgggccgcggggggaggctttggagcggcgccggcggtggctcggccggttcaacccctccgccccgcatccccaccgagcgcggacttccatgatgcggacgtccgcatgggaccgggatcgacaggactggcggacgtacacacttcaggaatcccagccttacggcgtgctcggcgacgcccagaatgcacaatgtcacccggccctcatgtacctcgcatgtgcttgcccaccgacgctcatggatctgcattattgcaccgtgagcctcctgggcttattcgcacgggcctaatcgaacttattattgcttgtcacacatctcatcactcgaactgtacattacacattcactcgctttgtacctatcacaagtgtatctcatatctcctc

SEQ ID NO: 494055 - DNA, 985 bp, Homo sapiens
  misc_feature (964)..(964): n is a, c, g, or t
tccatggcatcctctcgctgctacaactgttcttcacgttgtaatcctctgccaagagcaacttcaacggtacccggaaccattccccccacattggagatacgcctttaccggatcagaaccaagccccgtcgatccctcaccccctgggccacctattctccaaagtcctcataggacctcacgcgctcatggtcaaccaatcttccgtgacatccccagcagcagaccacatagcaatgcttcctcattacagagccaattccatgtcagctcttcttatgaaggtatctgctcgcactggtacttactgatcatcatttgtccaaggacctgatcccaaccttgaagaaagtccttaaagaactatatacttacatatgtaggcattaaggaataagtacagacagtcaaactgaaggtatcctttgacactattagactgacccctcagtcaggcctatgcatgaaagagtgcctttcctaagtaagtcaaagctcaacaagtatggagatacttgggacgagtgaaaagacttacatcatttgcacatgaaggagtttcaacatccagcttcatctaggctggtcatgattacctgcatgctttgagctcagcagcagtcgttcataaacacaggttaaatacagagatcctgggtttttgtaggtttgacttctatggtgttttaaaaaaacacagagttttagtggtaatatgtgtgtaaatgtactcaccattagggattcatttgaatgatggtattataccatggattgtatacgagtttgtgaaattgttgcaagggcaaagataactcttacaaaaccgtcgagagtacaatgctctagaatcgagcatatatagaaaatacaatgatatctgcagtgttgaaattggggtggatggggggagcaagcataatttttaagtgtgagctgtgcatcaagaaattactaaaantatcttccgtgtggcatattt

SEQ ID NO: 494056 - DNA, 1034 bp, Homo sapiens
ccagcgcgtcgtagatattatactaagcattaagcatctcacttgctaggaatactatatatatcgctcacacctcatatcctccctactatgcctagaaggaatagagtactatcgcgtgttgcattatacgctactgctcataatgcctcaacacccactccctcttagccaatatgtgcctattgccatactaagatcttagccgccctgcagaaccacaagcagagttgtggggctagcacctacgaaatcttcaagtcgtccaagcaacagtatggccttagacgtactgttatcagtaactactaagacgcatgaacatccaaaatgcgtaaatgttaatcagtccctaaatcagataaatattacttacgcacatgacagtgagctttccaagaaggacataattctgaatcaactacaaaccagcccatcgagtctctaatttataagtgatcattccctctactatttttgaatccaaatccctgaaacagaactattgatagctgatttcccccagggccttttgcctctcgaacaccgcctaacataggccgcgccgtctcttaaatactaaacatacacttgtacatcactaatcctcattcaaaggaacactggaaatgaccaagcgttcatttttcattcacgtgtatacctaggttattcacgatcaaacagtacatcatatatcatgcgtcatataacgtaactcctctcctgagaagatgtcttcctctaagtgcaataaggcgattcatcgaaggcaataagaaagggaaagcactacttatgtaggaatgcttcctccagaacaacgaggctttatacaccacacacttaggggaaaataatcaaccccagattgagagccacaccacgataggattgtctgctgaggcaaggtgataattgccaatatttaaagcccctaagaggttcacttcctctacgcaacagcgctatttccacatccaaacctacggtctaaccatctaatcactcctaagccagaaattaattctacc

SEQ ID NO: 494057 - DNA, 313 bp, Homo sapiens
tcgacctcgtgggaatgcagcccagtagatctcagcttcattttgaagtggctacatgtctggggtatatacctgggatttgttgtctggcgccaggaaaatttaggacacagacacacatgaggagtttaagagcgaaggtttaataggctgaggtgggtagatcacttgaggtcaggagttcgagaccagcctgaccaacatggtgaaaccctgtctctactaaaaatacaaaaaaaattagccgggctttgtggcacacacctgtaatctcacctacaggttggggaggagaggctgaggcaggagtttg

SEQ ID NO: 494058 - DNA, 123 bp, Homo sapiens
atggtatctggggctctgtgggactgattgtatactggcagagagaccagcctgaccaacaaaaaaattaggtgggcgtggtggtgcatgcctgtgatcccagctatttgggaggctgaggca

SEQ ID NO: 494059 - DNA, 171 bp, Homo sapiens
attcatggaagagttatatgcagattgcagagagaaatgagggaagttcgcctacaccgggccatctgctggggtcagtggtggtgctgctgtatgtcttgtgactgcccaacggtgacctggtggtgatcctcatacgagtctgaccgtgcagtgcactgcaatgcttgt

SEQ ID NO: 494060 - DNA, 235 bp, Homo sapiens
tagtgactcagggcagagtggccagcacacctctcatccgcccctcctgctccatcactgctgagcctctccccatctaggaatgttggaacctggggcatcataaaggatagcaagctacccttccaaggcccgagccagcccagagaggagcatgtttccttatacattccccataagggggatacatacatgggaggggggacacagaaaagaggggggggagaatggcgca

SEQ ID NO: 494061 - DNA, 194 bp, Homo sapiens
gaagattggcactctccaacttctatacctcccaaacctgatcagcccctagacgtaatgccagcccctccacccgaggacaaagcgtgcggtgaagcgcaagtctcaccctcctgctctatctcagagctcagacacagaccggccgtccctacaaatggtgggggaaaagtagctccagctcaaccatctga

SEQ ID NO: 494062 - DNA, 326 bp, Homo sapiens
  misc_feature (12)..(12): n is a, c, g, or t
  misc_feature (102)..(102): n is a, c, g, or t
cccccccccccncccccccaatcttcttatactggggtataatagttcataaaagaaactctctttatgggtgagatattcccactttttggtaacccattncaaaaccaaccgccctcttcagttatttaagatgcttttgttgcgagcggagctctagagtgaagcctcctgtgtgtgtgtgagataataacaccttgtaactcattacagctgggcactatttacataaaccagagctgagccaggcaggaatttgctgattaatttatttttaatggagtgaagtataccatgcaccaaaataaactttactgtgtgtacct

SEQ ID NO: 494063 - DNA, 470 bp, Homo sapiens
tgaatatgaattaagttaaaaaaaatcctcaggaacttgagaatacattcacatggtatatacctgatttcccaggaagaactgataaaaatgaataaatggaagaaagacacaattagttcaacaggaaacttactgtatgactcgtagaacatacacacatactcacactctgtgcttctggatgtaggactttcttaagcatttcttctagggccagtctagtggtgatatattccctcagcttgggcttgtatgtgaaatactttattataaactcatttatgcaggataactttgctgggtatagtatccttgactgacagttattttagtcatggagcacttcttacaaaaaattattttttcagacagtctcactctgcactccagccggggcaacagagcaagagtctatctcaaaacaagaaaaataaagagcatcctataattttatcatagatggccgg

SEQ ID NO: 494064 - DNA, 111 bp, Homo sapiens
ccctggtatgcggttggtctggttgttctcccggatgaccatgttgtacgctgcatgcatggggcaccacagataggatgtatggtccgttcacatgttgattgaaacgct

SEQ ID NO: 494065 - DNA, 170 bp, Homo sapiens
taagcagtctctcccatcaacgcatcttctcccatcaggatctataacctatttatttagatagaagtggcagtgattcatattcatttgttatattcaagttggcagtattttattattggaacaaccataataatccttagcatatatgctgatgggagaagactgcg

SEQ ID NO: 494066 - DNA, 458 bp, Homo sapiens
atatttatttacactgtaccaactcgctgggagcttaaacaacacactgggaacatcctccgtgaggcactggatgcacagatttatttgaaactacatgaactccacgacaggctcactaactctttttcaagtgcaacaacaaatgtcggctctgagaaataaccaagtcaatagattattggtgacacacacacgagtacgtgagcccagagagcctacccacctatgtatttcctgcagaggcagaggtctcagggagcttttgagtgaacgccccgctgtattcactgcacttgaaatggccattagcatttcatcacgatccaacatttgagcatttctttattcagacacaccatgtttactgctctattctaattcttcaggatcagatgatcagccggtattcggatgcacgagactctactatgtatccaacatacgaggacactatc

SEQ ID NO: 494067 - DNA, 173 bp, Homo sapiens
gacgaggggcaccccggacagtgacctgatgcactgaataaatagatcagaatgactgaaaaagccccagagccacatgtgggggaggatgaccatcattacctggacagcaagctcaattagaagcctccaccacagaagtccctgagggagctgcaggaaatggacaaaga

SEQ ID NO: 494068 - DNA, 183 bp, Homo sapiens
  misc_feature (13)..(14): n is a, c, g, or t
  misc_feature (108)..(108): n is a, c, g, or t
  misc_feature (147)..(147): n is a, c, g, or t
  misc_feature (158)..(158): n is a, c, g, or t
cttcagtgtcctnngagagattattgggcagtctttaataatgaaaactttaccttgaattacacacacacacacacacacacactcacacactcacacacacacagngagagagagagagagagagagagagacagagagagaggngagagtcaagntctagggtgttaagtccaacattat

SEQ ID NO: 494069 - DNA, 94 bp, Homo sapiens
gggacggtgactcagaatccttgggttaggccctttttgcctttcttttcctttcttttttttctttgtccttttttctcctggcggatttttt

SEQ ID NO: 494070 - DNA, 1541 bp, Homo sapiens
  misc_feature (1)..(1): n is a, c, g, or t
  misc_feature (47)..(47): n is a, c, g, or t
  misc_feature (830)..(830): n is a, c, g, or t
  misc_feature (953)..(953): n is a, c, g, or t
ntcgctgcgttctcccgcggggttttttgtcgctgaccacagcggcngggctcgcgcgcagatctgcttcgttgccgccagggttgtccgcgcgccccccgaatagtgttgctctggtttttgtgtggcagctggctcccgttccctcccaatgtgggggggtagtttcgctccgacaaccgcctacttggtgtactaccgtcgccccctttcccgggttggaaagagaacgggggcgccgtgtagtcgtcgcgctgtgtcgccattggtcccgccgccctccaccgccgtggtatatttctgtgggggccgccttcctaaagcccagccccccgcttttggatgtgttctctgccccgcagggtttgttcctcgttgggaaccttcgcgccctcttcttgccccgccgtgacccaggcccccgcccgggttgtgtgaccgaggtctcctgggaaaagggggcggcccttatttttaggcccctctttttttttccaaggaggcaacaggttaccccccccgcttgtttcgttccgcgcgggacccccccacggagaagggatttccaattctctgggggagtggccccgctcctaggaggagaactctggggaagtggccaccattttccaaagacaccaaatatgcccccgcccatgtggagaaattccttgttgcccacaggagggaaagaggtctcttctcgttgcgcccaaatatgtcccaaagtcgaaaggcccctggtgggaccccccccaaaggatattccagaaaagggcacactttggaaaattcctcaaagcgccccaaagtgcgcaaatagtgcgctnccccataggggggatacacacagaggcgcccccttttgtgtgtcccacaggcgcgaagatagcgtggagcaacacagcgtttcttgccgaacacattctccgggagttatagagacagagatntctcccccgggagaagcccccacagagatttcttgtctccccttcttgtatccggcgcccacacatgtggctcacacgtgtcgacattgggagaatgtgcacgccacatgcacacccctgggcgtcctcgtgcacattttctggagttctctgttgcgcacacgccacagagggtatatacacacgcgccgcacagtgttgtgcgcccgccacattcacatatagcgctatacctccacatgcgacatatagtgtacgaggcacgagcccttgcacagagaggtctctcgggccctatatgttcacacagagaggcgcacacaaacacacacacatggtgtccacaaatcgggggagattggtgaggcccacgcctgctgtgagaatgggagagaaagagctatccttggagattccactcacccaacactcactggatccgcctttatctgatctttctccgaggcccacccgcaagggtactgaagagcctcacacctgggggcacttttgtgggtggagggccacgagtgtgtataccccggcttgttctggaaggagaaggcctttgctgcctgaaagtttcca

SEQ ID NO: 494071 - DNA, 1253 bp, Homo sapiens
attggtgttcggtcctttcgcggggtgtgacggtcgtgtgatgttttgtgtttggttggctggcttggctcgtggtgtgggttggccccctttggcctgtcccggtttgttttctccgcgatttttggggggctggtatttttgtgggtctttgtcacctcgcttttcggcgtgtgcgtcgttgaactcttccacgcacacttttctggttctcccctttttctccttgggcctggtgtggcggcgctctcgtgggcttggaggtttgtcaatccacgcgcttgcccctcctgtttgtggcgaaagtccccctctgtgattgtggattgtgtcgtgtgtcggcccgggggactgggagtctccagagtgggtgggtggggccccccagttgtttttgtggtgtggcggcggtgtgtcccctggagttcctgtctttattgtgtttgttgtcgccgtgccgccctgtgagcggcccttttttttgtcttgtgtgtgaatctgtctgttaggcccctttcttatgatgtgctcttggaatttgtttgggttacccccacatcccacgtgtgttagttctaagaagtccccgcagactaagttctcttaggtatactgttgtgtaccccacagttagaattatcgagagctccacaaactttggggcctgtgtaacataggttgctcacaccacagcgtaaatatattggcagacgaatcttgggtacccccaacccccccccgcagtattaataatatatttctcacatagtaataatatatattatgctcgagataaaattatccctcgagggaagtgtacaatgcttaatttttgttgtgtaatatcttttcgccactctatcttcttaataataattttgacccacaaagaggacctgtgagaatatcttatggccctgcccgaaatatatgtgaccagaccaccgagccactgtgtaggaagacctttaccgcgtaatcacttaactctatccccgcaaatgatggactacccaggttataatggtgtgttacctacaccttcacatcacgtaatattacgccaattctccacaatgttagtcaccacttggtttgtctgcccttgtacactttctttattcactgatattaccacgtgctgtaacctgggtggtcccttttataacccaaaccacttatttgccaaacccgagggtattatttgtttttaaagacttttgtaaataaaggcttccaaatgttttcttata

SEQ ID NO: 494072 - DNA, 395 bp, Homo sapiens
  misc_feature (19)..(19): n is a, c, g, or t
  misc_feature (21)..(21): n is a, c, g, or t
  misc_feature (27)..(27): n is a, c, g, or t
  misc_feature (47)..(47): n is a, c, g, or t
  misc_feature (55)..(56): n is a, c, g, or t
  misc_feature (98)..(99): n is a, c, g, or t
  misc_feature (102)..(102): n is a, c, g, or t
  misc_feature (109)..(109): n is a, c, g, or t
  misc_feature (135)..(135): n is a, c, g, or t
  misc_feature (137)..(137): n is a, c, g, or t
  misc_feature (164)..(165): n is a, c, g, or t
  misc_feature (184)..(186): n is a, c, g, or t
  misc_feature (206)..(206): n is a, c, g, or t
  misc_feature (218)..(218): n is a, c, g, or t
  misc_feature (233)..(233): n is a, c, g, or t
  misc_feature (300)..(300): n is a, c, g, or t
  misc_feature (305)..(305): n is a, c, g, or t
  misc_feature (313)..(313): n is a, c, g, or t
  misc_feature (319)..(319): n is a, c, g, or t
  misc_feature (343)..(343): n is a, c, g, or t
  misc_feature (366)..(366): n is a, c, g, or t
  misc_feature (374)..(375): n is a, c, g, or t
ggtaatatgatttatctcnanactagnagagaccaaccgaacccccncgaccttnnggagggagtccgaactagtctcaggcttcaacatcgaatacnnggnggccccntcgccctattcttcatacggaatacncnaacgttattataataaacaccctcacnnctacaatcttcctaggaannncatatgacgcactctcccgngaactctacacnacatattttgtcacnaagaccctacttctaacctccctgttcttatgaattcgaacagcatacccccgattccgctacgacnaactnatacaccncctatnaaaaaacttcctacggctcacccnagcattacttatataatatgtcnccataccnnttatcaatctccaacattcc

SEQ ID NO: 494073 - DNA, 998 bp, Homo sapiens
gcctccggcggccgcggtcgcgatgctacccctgaaagccaaaatgggaaaggcaaagactcatatcaacattagtcgtcataggtacacgtagattcgggcaagtccacactactggccatctgatctatatatgcggtggcctcgagaaaagaaccattgagtaatagagcaaggaggctgctgagatgggaaattttctccttcaagtatgcctagggtcattggataaactgaacgcctgagcggtgaacgtggtcatccccgattgtatatcctccttgatgcaactttgagtaccagacaagtacttacgatgactgaatcattgatgaccacccaggcacacagagaactcttatcgaaataacaatgattatcgagggacatctcaggcttgactgtgctgtcctgagtgtgttagctgcgtggatgttggccgatattttgaagctggtagtctccaaggatatggggcagagaccgatgagacatgcccttctggcttacacaactgggtgttgcccaccacggtaatagtcggtgtataacagaaagtggacttccctctgaggccagcctacacgccagaagagatatgaggaacattgtgacgcgaaggtcatgcacttacattaagaacaattggtctacctacccgacaaccgtatgcattatgtgaccaaatctctggtgtgggtatggtgacaacatggctggacgcctatgttggtaacatgcacttgggttcccaggtgattgggaaagttcaccctgtgaccgattggaagtgacacacgggcacccaccactggctcaaggaatctggactgaattattcccaacaaaccgtccaaatggacgagacacttgcacatagcccatacagagatgttcccaaaattgggcgcatggcaatagtcgtctacgccgaggccacacggtacacaaccagagtgcggcaccaggcccaaacctacaagacaccaacacgtaac

SEQ ID NO: 494074 - DNA, 404 bp, Homo sapiens
taatttgtgtattttctcttagcagcttgctcccccaatttagaacaattactcaattcagtacttgcaatacagttttatttggctctatgatattatctttattaaagtaatagagaactgggctgggtttggtgactcacgcctgtaatcccagcctttgggaggctgaggcgggtggattacctgagctcgggagttcgagaccaacctggccggcatggcgaaaccctgtctctactaaagatacagaaattggccaggcgtggtggcaggtgcctgtagtccaagctacttcaaaggcttaggcaggagaatcacttgagcctgggaggtgaaggttgcactgagctgagatcacaccattgcgctccagcctgggtgacagagtgagactctgtctc

SEQ ID NO: 494075 - DNA, 115 bp, Homo sapiens
gccgtgcacgagctgtgggtctctgaagggacccccccatcggactgccaaattctccggttgccccgggatattatagaaaattatttgtatgaataatgaaaataaaacacac

SEQ ID NO: 494076 - DNA, 181 bp, Homo sapiens
cgtgtgtggcaaacctgtctgtacaaaaaatacaaaaaatttagctggatgtggaggtacacgtctgtagtcccagctacatggggggctgaggtggggaagatcagttgagcctgggatgcagtgagccatgatggcaccactgcactccagctgggatgacagagtgagactctatctc

SEQ ID NO: 494077 - DNA, 104 bp, Homo sapiens
tgttgggattacaggcatgaaccacctcacctggccaaacttgacatttttgggagattttatttagtgcccagtaaatctacattttgaatagggtaaggctg

SEQ ID NO: 494078 - DNA, 219 bp, Homo sapiens
cccggcccgaatttcccgggtatttggccaccccccgggccgggccccttaagtgggatcaacccccgggcccggttggtttttccttcccccccccccccccctgccctttgggcgcccggtttccaaaaaaaagattttttggccggtttttttaccccgggttctgggattgggttttttagggaccaaaaaaaagccggttttttccgcccccca

SEQ ID NO: 494079 - DNA, 181 bp, Homo sapiens
ggggaaaaggaaagcatatgtcagttgtttaaaaccccatatctattttttaactgattggataactctaagatctgatgaaggatattttttattgcccttttgtcccttgattatattgggaagttggctaaacctgaaaaatgtttttaaaactgtgaataaatggaagctcctttta

SEQ ID NO: 494080 - DNA, 462 bp, Homo sapiens
agggcgcatggttgcaagtaacagaaatccaactcaaagtggcttaagcaaaagaagccatcaggaatcggtctctgtctcctacctctgctatcctgtctgcctcacaggtgggtctggacctgcagggcaaaacagcactcagcaaggccatctatcagaggaacaaactccctcttctttgtgcatagctgccaggatcacccgagattgaccctgctcccgagtacccatgcctgacataagcaccatgaccaaggagatggggctcacgacctcagcacagcctggtctgcaccagaaatttgtagagtctagtactattaagaaaataggccgggtgcggtggctcacgcctgtaatctcagcactttgggagactgaggtgagcagatcacctgaggtcaggagttcgagaccagcctggccaacatagtgaagccccgtctctactaaaaatac

SEQ ID NO: 494081 - DNA, 447 bp, Homo sapiens
agaaacaaagaacatgtacctaacactagacatagccccctgaggctgtctcacacatgtaggacagagatggtcttgcatctactagacctacgtgataccgcccgcctcggcctacccaaaatgctagaggattacaagtatgagccaccgacgcccgaacatactcccacatttataaaccctttatatctggggggttgtacgtgacagagaccaaagtccaactgacttcaacacaaaaaggcactatgagtgcgtcatgtaactgaaacgttcggagtatcaggcatagctcgatccaggggatcaaacgatgacaaggattctctctataacctctcttggctctgccgtctgctgagtaggcctcctcctcagaggggttctacctgcttgcggccactccaggcttacatcctactgcttttcagcgccatagaaaga

SEQ ID NO: 494082 - DNA, 211 bp, Homo sapiens
aagtatataataagactagtataattctaggtaagaagataacagaatatttccaaatagagatttgccacatcacatatggcacattttccaacactattctatgtctatgcaactattcctcatagtcttggcttatgtcttttctctgtaagacacagtataaaagatcataaaggcaaagaaatatgtaccactcgcacacacaggc

SEQ ID NO: 494083 - DNA, 184 bp, Homo sapiens
tgaagggattacttaacttccctacagattgtttagaagacccttttaggagttatttgattttagaagggtctaaacttgtccctgtctttaagctatttggccactctacgtgttgtagaaaactgataataaaaccaatgattgttgttcatggaaaggccaataaatttttttccgtgga

SEQ ID NO: 494084 - DNA, 774 bp, Homo sapiens
  misc_feature (30)..(33): n is a, c, g, or t
  misc_feature (36)..(36): n is a, c, g, or t
  misc_feature (125)..(126): n is a, c, g, or t
  misc_feature (128)..(128): n is a, c, g, or t
  misc_feature (160)..(160): n is a, c, g, or t
  misc_feature (164)..(164): n is a, c, g, or t
  misc_feature (168)..(168): n is a, c, g, or t
  misc_feature (180)..(180): n is a, c, g, or t
  misc_feature (182)..(182): n is a, c, g, or t
  misc_feature (203)..(203): n is a, c, g, or t
  misc_feature (207)..(207): n is a, c, g, or t
  misc_feature (224)..(224): n is a, c, g, or t
  misc_feature (233)..(233): n is a, c, g, or t
  misc_feature (237)..(237): n is a, c, g, or t
  misc_feature (260)..(261): n is a, c, g, or t
  misc_feature (264)..(264): n is a, c, g, or t
  misc_feature (272)..(272): n is a, c, g, or t
  misc_feature (278)..(278): n is a, c, g, or t
  misc_feature (284)..(284): n is a, c, g, or t
  misc_feature (295)..(295): n is a, c, g, or t
  misc_feature (326)..(327): n is a, c, g, or t
  misc_feature (335)..(335): n is a, c, g, or t
  misc_feature (349)..(349): n is a, c, g, or t
  misc_feature (361)..(361): n is a, c, g, or t
  misc_feature (363)..(363): n is a, c, g, or t
  misc_feature (374)..(374): n is a, c, g, or t
  misc_feature (412)..(412): n is a, c, g, or t
  misc_feature (421)..(422): n is a, c, g, or t
  misc_feature (427)..(427): n is a, c, g, or t
  misc_feature (433)..(433): n is a, c, g, or t
  misc_feature (436)..(437): n is a, c, g, or t
  misc_feature (483)..(483): n is a, c, g, or t
gggctgatcgtcagatcaaataaagttatnnnnttncaaaaaaaaaaaaaaaaaaaaaaaaaaaaaaaaaaaaaaaaaaaaaaaaaaaaaaaaaaaaaaaaaaaaaaaaaaaaaaaaaaaaaaannanaaaaaaaaaaaaaaaaaaaaaaaaaaaccttntggnccgnttggcccaagtngnttttaaattgggccaggtttntccntggggccgaatttgggnctaattggnccanttccccttatggggggccgtttnncanttaatggnccgcgntttaanaacgtcggacntggaaaaccctgggggttcccaaattaaatnnctttgaanaaaatccccttttncccagttggggnantaccaaaaggncccgacccgatggcctttccaaaaagttgcccaccctnaagggcaannggaantttgangcnnaaatttttggtaaaaatccgggtaaaattttggtaaaaccagttantttttaacccaatgggccgaattgggaaaaacccttattaattcaaaggattaccccgaaataggtttaagggttgtcccagttggaaccaggagccccttttaaaaaaccggggactcaaacgtaaagggccgaaaacccgtttttaagggcaagggcccattacgggacccttcaccctaataagttttttttgggccaggggcccaaaagccttaaatgggaccctctaagggaccccccttttaagactttacggggaaaagccgggaaccgtgcaaggggggccct

SEQ ID NO: 494085 - DNA, 830 bp, Homo sapiens
gtagaaaagtcttatgtgtagcaaaagtatgtttcctattacctgagtaaaagtgggttttctagattctgcatctttgtttacatctctcgttgcctaggatggctttcatccttcaagtggtagtgatcttttaaagcctatttcagatgttacatcttttgtgaagcccttcctgcacatatctctttgagagacatttgtgctactaatatttaattcactggtattgcctcttgtcatgtaccctttcatcccagctgaaccgggcactaggactgggtatagctcttatatttctttatattttcatctcggtaaaatgccgtagcactaactatgagaataattttaattaacttagttgaaagtagttctgaaacttgccagactcaaagtgtagagcacaacagcaactgtgcttgaccgtactccttggtttacatctattgtcttgacaaaaatattaatagcatttcctttcacttttagaaatactcgagtttgtatgataaattttaggttcactttacctcatgctataaatggtggtgttctggtggacttggtgaatcaggagatgtttatcaacaattaccaaagcagagattctgattagtaggcaaggtggctataaatgtgattttagaaggatgtctaagatcaggtaagtagtgtgaaagacgaactcgttcggacggggaaaggcttggtgggaaggaggggaagggggggggagagaacatttcttgggggttggggaaataagatgtatggtggggttttttttagactattttttttttggaccgggatgggggggggcaaac

SEQ ID NO: 494086 - DNA, 184 bp, Homo sapiens
cgatctagagatccccaaatattataaacgcctcacactacaatcttgctaggaacaatcatagtgacgcggctctcccctgtaactcgtacacaacatagttagtcaccaggagcctacttctaacctccctgttcttatgaattcgaacagcatacccccgattccgctacgtgtccggcca

SEQ ID NO: 494087 - DNA, 1831 bp, Homo sapiens
  misc_feature (1297)..(1297): n is a, c, g, or t
actagttctagatcgcgagcggccgccctttttttatttggtttatttaaaaggcagagcctcctaagaacatcaaagtgggtcctagcaaaagtatataaagtccctaaagcaacttaatacgtggaaagcttagtttatttgatttgacaagaggggggcacactcatctcgtggtgagcaggagagggggaaatacagtgggagacaatccgaatagcatcacgggtacaccctttggagggacaggggaatcactttccacctatcagagccatcccaaggaatacgaccacaacaaacacgcggtgtgtgtgcaccaaacacagcgccgcggcataagttctaaaaacttgagcgaggcacggagataaaacaccgcgagacacccaccagggtgtgccgcccaacggaggggacccacacacaccaccaggagacacccacaaaggaacacaaagacactacgcgtggcacgagggagcccactcacatacaaagtggcaccgaacaattaaccagggcacgcgatacaaacagaggggcccccaacgccaccaacaacattgcccacaaagaaccaccacccgggaggggcaactaaccacatcacccactacacaatcacaacaaccccatcatcacctaccatcacacccaaagagccccgcgacaacacctaagcaaacaccacgtgctgacaacacccgcgacaactaccaccaagcacaccaacacaactacgcgggcacagcgcgcgcccaccacccgcgactcgagcacgacccccaccccccagagggactagcaccccagccgacacaacaacaccacaacagagccgccgcaactcctccaccacacgacgaaaacgaccgacaggggggcgacccgcagaaacaacagccatataaacacctacagatacgagaaagcacgcaatacatctcgccaacaacacaccccgctgcaacctgcatcaacacgacgacgacacgccgagggggacccaccccccagagaattagcagaccacacgaaccaatcacaaaaccaccagcggtcgaaacacaccgttgtcggcaccaacaacacagccaaccgtgtcgaacagcacagacagcggacggcagacacaggaacaaaccaaacaagacaaaaaaaaccacccacaacacaagctacagcagcccacaacgcacgtggatcaaccaactgctagacaacccgcacacatgacgaaccactctccagatcagacccatcagcaagcagatgaaccacaccacacagcgcnacacaagccagacgaccccacaactgggagacagaccacaccaccgccacaaagcagcaacagacaacaccaactacaccagcggcgcagaccaccccacgagcaaacccccgacacaagacagacgggaccgacagacaagcgccccaccaaaccactactaacgacacaaccacaaatcagcggagaacacagccaaactactagctagcagccacccagctgacgatacccgccacgcgtaatcacacccaacaacagtcagcgcactcacaggcgaccacaccacaaacagcgggcacacagcaaacactagtacgaccaaataccgaacacggtactaactcattcccatcggcggctgctcttatcccgaccagcagcacaacgaccaaagacaagaccagaaccacacacacaaccaccacacacaccccgaacacccaacacaagaaaagaacgcacagcacacgctcaaacgacgacacgaccgagacaaacacaacacaaacagacacacacaacgaaaacaca

SEQ ID NO: 494088 - DNA, 180 bp, Homo sapiens
gtaatatcatgacgcgagctagggattaaggtcaccgtatgcaggccatggctgagaaaagaccagagatacagatgatagccagtgatgtggtcatatatgatccatgatgccagccttgaagaatgcaaaaaaagagggcacccatcatgctgtggtggttctacccaagagagtcaa

SEQ ID NO: 494089 - DNA, 449 bp, Homo sapiens
tgcaacatttttttgaatgttagtttgattaacattaattttgagtacacagtgtgattgtcagtaccttgtaatggtactacttttgaaagtaatttaaaaatttgaatgaatttaaggtttacagaatacttgttcattgtttcctcagcaagtcagtttaatgttcattttcccgtttgtcgttgggataaagaatacgggtgtttgagggctcactcacttgcatgcaaaaatttccattttaaagattattttgcctaaaattagcgttgtaatactttaaaagaaatattttgtaaaccttatttcactgcaaatttccaaatctgcataaaacaattataattggagaaagattggtaattgttttataaagaatttatgaattctgtataaatttcttctaacatttaatacaattttttaataaaaatttattttaacct

SEQ ID NO: 494090 - DNA, 364 bp, Homo sapiens
aaatattcctctgtctctattttgtgtcatactaataaaatcactctggttttcttatggttacagtttgtattatgtatcttttccacaattttactttcaactaacttgtgattttgaatctgaagtgggtctcttagatgcatataattaggtcttgcttttttatacagttggataacctgtaccttttaactcgacatgactttacgcttaaggtaattatcgctatggttgcatctctgcctcccattttgagtttctcaaatgctctttacattcctctcttactccttccctgcattcctctgtcgttgaataaatatttttactgtccccttttcaaaaaaacacaacacaaaac

SEQ ID NO: 494091 - DNA, 668 bp, Homo sapiens
  misc_feature (81)..(81): n is a, c, g, or t
  misc_feature (195)..(195): n is a, c, g, or t
  misc_feature (314)..(314): n is a, c, g, or t
  misc_feature (484)..(484): n is a, c, g, or t
  misc_feature (486)..(486): n is a, c, g, or t
  misc_feature (574)..(574): n is a, c, g, or t
cggcgacaaaccaacccctttaaaaacactcttaaaaggggtaaccattttttaattcatccggggccaactccggggaanagagaatgttttcgttcccatttccgggataaaagccctttccccaaggaatttttttaaaagacctttgttttttgtcaaaaattttttttttttttaaggggggaaaccccnttttttttgccctcacaaaacgcccccatttcaagttctatgcccgcccccccttttaatctccccaaggtcttttccttttcctgcaaaaaagggaaattgcaccacggttttttctnaggaataacttttccattccccggagtttttcacgtatacagcccacattcgccacggcttttttttttgtcttccaccaaaagcaaaggcccccccatgtggttctggcggaggcggggcggtcctttacccctttttgggaaaccccaccccctgtaagatcttcaancnctttgcggggttaaggaaccccccccctccctccccccgggtagaggtgggctcgtttccccccgccccccagtggtccatctcggcnaaattcccagagggcgaacacacttcgcgggggtttctccggcggggcgagttttaggtgccctttacccaacggaatatcaaacacccccggc

SEQ ID NO: 494092 - DNA, 345 bp, Homo sapiens
cgtactcctacatctgcaatcccagcaaccttggtcggcgggggcagtcgggacacgagctcaagcaaacgagaccatcctggccaacatggtgaagcctcatctccactaaaaacacaaaaattagctgagtgtggtagcacgtgcctgtagtcccagctactcgggaggctggtgcaggagaatcacttgaacccaggaggcagaggttggagtgagctgagatcgcgccaccgcactccagcctgggcaacagagcgagactccatctcaaacaaaaacaagaacaaaaacaaacataaagttggcacagaaaagggaccaagtttaaaaaagggttttaag

SEQ ID NO: 494093 - DNA, 270 bp, Homo sapiens
aggattgcgccactgcactccaacctgggcgacagagtgggactccatctcaaaaataaaataaataggtgaagaactccaggacagttagctgggctgcatgaaggtcatggccccccgtctctggagtgacctagggtggtcctgcactctgggaggggagcctgtaggacgtggtgccagccccagatcccagcacctcccaggtgcccccacagaagggcatcagtggagaagcctgtccacccatggtcagcacccagggggctg

SEQ ID NO: 494094 - DNA, 959 bp, Homo sapiens
tgagtttgtttgtttgttttgtgggaggatggggaagagaaagctgaggagtaagcgaaaagcagagagacagtccggaagaggaagagaggtaatatgtttcccggcaatgttatgctggtccgtatgcttggtggttgttaataagtctgttgtttgtcgcgtcctggtgccataaacctctgggttgtttttccgttggggtgtgcctccccctcctgttttactcccggtttctctttggggtcctgcagctcccaaagaaaacggttgcgtacgaaaaaggggcgcgccggttgtttaagcctggagggtccccataattctcctgggtctggggagccgccgcccctttctatatagtgggttcccccgccagccgccacacccgtggtggggggcttttccaccggaacatacacctccgtcggagcacacttcctcgggctgtgggaaataatcagcagccacgaaccaccacgcgacaggggcggtcatctacaaaagcacacgcagggcacaccaagaggcgtctcgaaggctagcctacacgtttgccacacagttgtctccgagcaaatgctgaaccgcgcatatccgagtgttttgacgcccaacatcgtctccagcccccccttacagagcaacagggggccgagaagcgctctttcataactagttcattctctcacaagaggccaccgctaaagttacattgtcaaataaggacgctgttagataggtaccaatgcacgtctctgaagccctccacacaggcgatagagtggacaactgttctttggggacacccttagcgggttgtatcttttctcatcgccgtgcacgctatggacattgttagcagcttgtacataacagcaaatttgtcaaccagggcaaccagggccccacacttatgccacaaatttggggccccctcaaaacagtccacataaaca

SEQ ID NO: 494095 - DNA, 411 bp, Homo sapiens
cgacattgcaaactttttggcagggtgggagactgagtctcattttgcactccagcctgggcaacaagagcaagactccatctcaaaaaaaaaaaaaaaaaaaaaaataatgagcagggcgtggtgacaggtgcatgtaatcccggctcctcggaaggctaaggcaggagaatcacttgaatccaggaggtagaggttgcagtgagccgagatctcgccattgcactccagcctgagtgacaagggtgaaactccatttcaaaaaaaaaaaaaggatcgggcatggtggctcacacctgtagtcccagcactttgggaggcggaggcaggcggatcacctgaggtcaggacttcaagaccagcctggccaacatggtgaaatcctgtcatcacaaaaatgcaaaaaaatag

SEQ ID NO: 494096 - DNA, 431 bp, Homo sapiens
ctgaatttacacagtttgcttcattgtattttcaaacaaatagaaaataaacttattaggaagcattttcttaaaaaaaaaaaaaaaaaaaaaaaaaaaaaaaaaaaaaaaaaaaaaaaaaaaaaaaaaaaaaaaaaaaaaaaaaaaaaaaaaaaaaaaaaaaaaaaaaaaaaaaaaacaaaaggggatccctagtaaccctattacccaaaaaacaaataaaataaaaaaacttagggaaaaaattttaaaaatgggaaaaagggaaaaaccatgtattaacgaaattaaaatgaccagacgaatttcctaaatgcactttacctaataggaaacagccatgcccaattgacatttaaacatgatacccccgaatagcaattggcaaaatgaatgttaaacattagggaaatacgaggaaattattagaa

SEQ ID NO: 494097 - DNA, 109 bp, Homo sapiens
agatcgagctcggccctctagtttagaagttcaatagcacctagttttagaagtgtcaatagcacctagtttaagaactctcaacagccctagtttaatgctattgaaa

SEQ ID NO: 494098 - DNA, 1531 bp, Homo sapiens
  misc_feature (229)..(229): n is a, c, g, or t
  misc_feature (1144)..(1144): n is a, c, g, or t
agggaagcgcacgatagctgcgccggagacgatgagcgaagagcagcgaggcggaatcacaggcgacgccacagacatcccacgatggagggacagagaaccatggtagtctggcagtacctgggcgcgcgagtggaggaggcaacagctaggccttcgtatgacattgtgagctctaatgtccagagagcataacattacaaggcgctgctctagagattctattgtngcaagttgtggatctgcatcgatccgtgaagaagactcctagtggcaattccttcatgaggaagatatcatttgaggacgcgcttggacgatgcggaaggacggcaacaaagcatgatgttcagtaagatcttgacaggacacatgtgcatgtgcacttgccgttaccagaatctccagaagtggggaatgcgcattgaaggactttatcttgcacttgctcatacccgagcaccccatagctcgcgacgaatgagctctaaaacagggaggtatcgcgcaggtggccgcaactggaggagatggccatgaattcaagggacggcccttgggaggcagcttcatgagccatccagtgacatgggccacacgtagtagactgagactaattccttttaaacttgtttttgaaggtaaacagggggttctaaattcaaccccgattaggataggcaattttcaaacgcatagccatccaacatgggtggcccctggtgcgttctatactagaacgccatatacgcgtcccaacattgtctgactatagacttgaaagcttggttgaccatatggtttgtgataccaaacaagatgctttcttgaaccttagaacattacacccttagaaccgcacccgacacctgtatagacctaaccttctctgctctcagagcgatttgaccctaccgttgttatcatacgtaatccggcgggattacctgtagccccattattcttacttttcccgcctaagtgccggaacggaattgggaaccccttggaattggcatttcttaccttcgcgtcacaatgtgggttggaaccttggaaacactcggtggcggccgatcgttataccctctttatcacccataaggcttggatttagaatctttctggaggaatcagcaaggcnctgtgggccataggaaccgcaatcacccggacgacaactttttcggtttccggttaacatttggctgtcttaaaacgccctcacgaaacttctggcacgacagtttttgggtgttgacgggccaaaaaagaggcccccaatgagtgtgggtgtttatcagcgggcgctgtggacacacacccggtgtacgacgctggtgcagaatggaccattttccacgggcggtaatcggcaaccacacccctttctgtgcccttctcactgcgggaggctttattctacacttgggtgacacatacacaagcccgggaaaacgaattaggcctatgagaatcttaagagaattggggtgctacaaaagcagtgcgtgcgtgacacacggcgacc

SEQ ID NO: 494099 - DNA, 444 bp, Homo sapiens
  misc_feature (348)..(348): n is a, c, g, or t
  misc_feature (414)..(414): n is a, c, g, or t
  misc_feature (423)..(423): n is a, c, g, or t
  misc_feature (441)..(441): n is a, c, g, or t
aagtgcagctttgttacatggatatattgcgtggtggtgaagtctgggattttagtgtaccatcccccaagcaatgtacattgtacccataagtcatctctcaatcccccatcccccatccttccacgcctccagtgtctgtcattccaccttctatgtccatgtctgcacattatttcactcccacctacaggtgaggacattcggcgtttgactttctgtgcctaagtcatttcacttaagataatgggcctccagggtccatccatgttgttgcaaatgacaggatttcattcgttttgagggacctaggcaggcattccgtgtataaatggcaccacatttttnttttatccagccatctgttttatggggacactcaaggtcggatccctggcaaggaactaagggatngaaagggtngggaggaaaggggaggantta

SEQ ID NO: 494100 - DNA, 136 bp, Homo sapiens
ttgagacagagattgagacatccagccccacctctctagacaagaaagatgactggggagtgaaacacagtgtcagcattggaacagtggtcaccagtggacacaagggttggctgtactctccacctcctcacat

SEQ ID NO: 494101 - DNA, 126 bp, Homo sapiens
aagtcgctcctggtttcctggatactttagtctctccactgtgacggacatgttggccaaactggagaggtcctgtccaggctgacagcttgcgaaactgttccccatatgtacctcatcgaatgc

SEQ ID NO: 494102 - DNA, 331 bp, Homo sapiens
  misc_feature (152)..(152): n is a, c, g, or t
  misc_feature (160)..(160): n is a, c, g, or t
agcaggtgctctgagtacctgagcctggccctaggctcgcagcaaaagcaggaccggattgagggcttgaagcggcacatcgagaagcaccgttaacccacgtgcgcatcgtagaagaccatccttgcgcatgcgtggacaagtgactccantcctcgtntgagcgccatccgcaaggatcaagggacgactgttgactgtactatgtttgactcactcccagtgaccccgactttcgagggagaactgagtttctcatacgattgacctgtgacctctgaggacatttccacagggcgtctggtcgccaacctcacccccccaagccaca

SEQ ID NO: 494103 - DNA, 124 bp, Homo sapiens
cttccgtgcccaggtggcacctacttaagacagctgctatagaaggccattgtcatcacagactagggtgtgacatcaatagtttatgaagcgactaaggatatagaagagggccggaagatca

SEQ ID NO: 494104 - DNA, 128 bp, Homo sapiens
tacttaaattcagtatattcagcagtgctggatacatacacgttgctatgcagcccatctccggcaactcctattgtgtctttcacagtaaaactctgtatatgttacacaaagagtacccatttagg

SEQ ID NO: 494105 - DNA, 271 bp, Homo sapiens
acggcatcccactgttctactagtagaaaatgcgtgatgttgtttcctgctgccctcatggtcttgcgtctgaagcctacaagaaagtttgcctatctggggctcctgtctcacgaggttggcttgaagtactagtcagtgatagccaccctggatgataagagtaaagtgaaagtcaagatcttctaccgtaataagatacagctcattaggtcacgtaaacaggcctataatatcgtggagaatgaaaattgacaaatacactgaggtc

SEQ ID NO: 494106 - DNA, 804 bp, Homo sapiens
  misc_feature (594)..(594): n is a, c, g, or t
aatataatttggcatgatgatccatattacatatgtattcggtagaatcttgaagatagtccataaacttaatgatcgcgttgacaaatgaggttatagatattacggcaattttttctggataggatatctgttctatggtggtagtgatgattcgaacttgatcagagacatcccatttgccttgtaacatataggggtgaaagctgagggctcatttactaagagtacaaaggaatgctggggaagcagattattctagtccttatgctagaggatgaagttggactcgattttaatgtgtgatcgtttggggtctagtcaggtataattgtatagctttcgttgataatggggtaagttttctacatgttatggagtaacagtaataggttcatttatatgtcgcatagctagaagacgagtgtcaaatattttgagagcacctggtctacgggacataattggagtctaaagtcgctgatccgtagctagagtaggaaaacagatatagtatttgtaatagccttattgttttgtgaatccgtaatgacgcatgacgggttcttggcgtctcttttggaatctaagtgngaggtttccggtagatgattgtacgttaagtcaatccctggcgaacaataaattggaggattctggtgttgcagtaagtggaaacgtttgcatgagcgactgtggggggaacgatgtgaaggatattgtgccgacagtggcagaggttaacttcggtttggggcattttttgaagcttggattgaatttcaagaatttgggggggagaaa

SEQ ID NO: 494107 - DNA, 134 bp, Homo sapiens
  misc_feature (36)..(36): n is a, c, g, or t
  misc_feature (115)..(115): n is a, c, g, or t
  misc_feature (121)..(121): n is a, c, g, or t
gagagcttgagctcacacgcaaagatcagaggaccnacagagagggctctttggaatgaggaccagggctaacctttccggcctttgacccatcacaccccatttcctcctcttncccttnccccgccgcccca

SEQ ID NO: 494108 - DNA, 635 bp, Homo sapiens
  misc_feature (473)..(473): n is a, c, g, or t
  misc_feature (529)..(529): n is a, c, g, or t
  misc_feature (558)..(558): n is a, c, g, or t
  misc_feature (615)..(615): n is a, c, g, or t
  misc_feature (635)..(635): n is a, c, g, or t
tactgtggctcacacctgtaatcccaacactttgggaggctgaggcaggcggatcacgaggtcaggagatcgagaccaactctggcctcccaaagtcctgggattatagctgtttcctaatccaggacaaaattatgctggcgggtaagaataaaggtctaactcctaacttgactccaagtaattagaggaaaggacagcttacagtagccataggtttccatggagtacacactatctacctgtacaccatagacgtaaatgctaattacagcaacaaaaagggccacccttatcctgagaatggactcctgaagtttacagtcttaaagtctaaagattattggccaggcgcgatggatcacgcctgtaatcccagcactttgggaggccaaggcgggtggataacttgagctcgagtttgagaccagcctgggcaacatggtgaaacccttgctttactaaaaatacanaaaatagctgggtgtggtggcacttgccttgtaattcagctgcttgagaggctgangcacgaggatcgcttgagccctggaagcngaagattgcagtgaagttgagatggtggcaacttgccttccaggcttggggaacagnatggagacctttgtctcccn

SEQ ID NO: 494109 - DNA, 287 bp, Homo sapiens
gctctgagggtcccgggccggttggcagctggcgcaacgaggccagagcccgtgcccggcagaggagctcaagtcggtctgggcccgttgccaccgactcccacctccagcacccatgcccgctgcaccgctgccatcctcagattcaccgcgtgctctgcgcggccgaggccggagccaccacatccacctcgccccagagcaggctctgctccctcctatggagcggctgtgtgccaggctgctcagactcctgggtggcttccagacggaccgggcagcccctc

SEQ ID NO: 494110 - DNA, 485 bp, Homo sapiens
ggtatatttgaccaaacagggctttagtttaccccttttgacaccctgtgacttagactgacgtgacaccacgcgagtgctttccgttagcctcatgatgttcggactagtacagacgcatacctacaacggaggagaaccagtggatatccatcagttggctgccatcaaccgcaaagggccatttggactctaactaaggaccgcgtgaaaccgtgtgatacttctgggcaagtgcgtgactcaatgacagcgagccacggggcctattgctctcattgatcacggacgtactattgagaaggcctcgccttatggctagtagacatatgggtaaggacatgctacccttaaaatgtcagggtgcataaaagctggaattccatgggccatacgcagatgaagggaactcgaggacccgtcgattccttggataaattaggtatgggaaactgtgggaacttatccatcttccagaaagatgc

SEQ ID NO: 494111 - DNA, 200 bp, Homo sapiens
aaatgttatcggaacggagctgactgtgtgtaatgtctcccctgtaatcccagtaccttgggacggccaagggggaaggattgcttgaggccaggagtttgggatcatagtgagaccccgcctctatttaaaaaattaaattttgttttgttttgttttgagttgcagtcttgctcttgttgaccatgctgacgtgcaat

SEQ ID NO: 494112 - DNA, 145 bp, Homo sapiens
ggcccgaatcctaatacggggagaagggggtggcgaggttattaagaaaaggttggtaagatcaggatgaaggggaattcataggatatggcagttaggtggtcaatgatagccttgaaggagaaagagtgtcacaggaaggttg

SEQ ID NO: 494113 - DNA, 225 bp, Homo sapiens
  misc_feature (60)..(60): n is a, c, g, or t
  misc_feature (83)..(84): n is a, c, g, or t
  misc_feature (88)..(88): n is a, c, g, or t
  misc_feature (94)..(94): n is a, c, g, or t
  misc_feature (99)..(99): n is a, c, g, or t
  misc_feature (106)..(106): n is a, c, g, or t
  misc_feature (108)..(108): n is a, c, g, or t
  misc_feature (114)..(114): n is a, c, g, or t
  misc_feature (124)..(124): n is a, c, g, or t
  misc_feature (126)..(126): n is a, c, g, or t
  misc_feature (128)..(128): n is a, c, g, or t
  misc_feature (133)..(134): n is a, c, g, or t
  misc_feature (141)..(141): n is a, c, g, or t
  misc_feature (146)..(146): n is a, c, g, or t
gaggcgaggaagtcaccatcaaaccactttatctacagttagcataagatgtgagaagtnttgacaggaagctgcagcttagnntggnatgatnacatnctccatngncaacangattgacacngnantgcanncagaganccccnaggggaatcaagggaagccttctttgctagttctggttccctgagggcccccagtcccctttcttttgttccctccccc

SEQ ID NO: 494114 - DNA, 205 bp, Homo sapiens
agagaataccaggagacgagcacatctacacgtcatcgtcacagcccatgcatttgtaataatcttcttcatagtaatacccatcataatcgagaggcgtttggcaactgactagttcccctaataatcaggtgcccccagatatggcgatttccccgacataaacaaccataacgcttctgatctcttaccacacctctctcct

SEQ ID NO: 494115 - DNA, 116 bp, Homo sapiens
gtgggatacacactactcacattgaccagtaccaaaagagacacacatagtaagatcacttgaagctgggtaccaactatcaaatgacagaccaaaaggagagacgcacacacaga

SEQ ID NO: 494116 - DNA, 114 bp, Homo sapiens
ataccctacttatgtgttaatgcacttggcattcttgcagagagacatccggttgttcaactcatcgcattcatttacatcgacacaggtcatcttggccgtatccaagtgata

SEQ ID NO: 494117 - DNA, 424 bp, Homo sapiens
  misc_feature (57)..(57): n is a, c, g, or t
  misc_feature (79)..(79): n is a, c, g, or t
  misc_feature (148)..(148): n is a, c, g, or t
  misc_feature (217)..(217): n is a, c, g, or t
  misc_feature (219)..(220): n is a, c, g, or t
  misc_feature (222)..(222): n is a, c, g, or t
  misc_feature (230)..(230): n is a, c, g, or t
  misc_feature (277)..(277): n is a, c, g, or t
  misc_feature (280)..(280): n is a, c, g, or t
  misc_feature (405)..(405): n is a, c, g, or t
  misc_feature (410)..(410): n is a, c, g, or t
gactctagaggatccccgtcagatgctcagctcacgggaaggagatgttaactaacntaaaactaaagctgatactcgntgctctttagggagcttcccttgactctcttgaaagagacacagccccattttacattatttcgtggantttcaccacatagtatagtttttttctgtaagtccctattcttactgtaataacaggctggaacctgangnntntgaagaancctcagtggcccatccctgactgacacttgggagacctcaaagcagncanagagcagcagctagggctttaaaaccctgagctttaagactccccactagcttcgctgctccctttggcactgcttaacgctgccctcagctttccctcactctgctactaactggggcatactnctggncaggcacccacctc

SEQ ID NO: 494118 - DNA, 255 bp, Homo sapiens
cgcgagggagcaccctcggatattctacaccagagaactcatatactacatcaccgctcagagatacccacggtaccactcacatgcacacacacataccagaccacagacatacaccactcacatacactcacacatataacacaccagacacacacactcacacatataccataccacacacacacacaccactcacattcagataataccacaccaggccaggcgcggtggctcacacctgtaatcccaaca

SEQ ID NO: 494119 - DNA, 1090 bp, Homo sapiens
  misc_feature (1)..(1): n is a, c, g, or t
  misc_feature (452)..(452): n is a, c, g, or t
  misc_feature (454)..(454): n is a, c, g, or t
  misc_feature (479)..(479): n is a, c, g, or t
  misc_feature (529)..(529): n is a, c, g, or t
  misc_feature (535)..(535): n is a, c, g, or t
  misc_feature (553)..(553): n is a, c, g, or t
  misc_feature (584)..(584): n is a, c, g, or t
  misc_feature (737)..(737): n is a, c, g, or t
  misc_feature (867)..(867): n is a, c, g, or t
  misc_feature (879)..(879): n is a, c, g, or t
  misc_feature (910)..(910): n is a, c, g, or t
ncactagatgcggggtgtggaatgttcgcgttctgtttctctctctcttctgtgttcgttatacttgcgctcgttcttgtcgtgtcgttcttgatctctcctccttgtgtctattatttctgttttcgtctgtgttccttcctgcctattcgctcggtgtgttttgtcccccgcgccctccccgtttgtgttctttccgtgcttgacctttccgttccgcgcccgtgtattatgatttttataggtctttttttgccccggccctactctggcataccgcggtgtcgtggaaaattgggggagttatattagtgattccccttcccctttatgggggcgcacgagagtgttcttatgagagtgtgtagtacgcgtgcaacaaagtgaaatcttctgagtgtgaaccaacccaccactggacatactgtttagcccacttttttagaaaaggncngcaccctccggaaccatggtgatgncacttctccaatactgcccagactcacagtcccaagaagtaatgttcttnaacganttagaagagattttagangtcattgaaccatcagaatttgtgaagatcntggaacccctcttccgccagttgcccaatgtgtctcccagcccacacttcccggtgccagagcgagctctctattactggaataatgaatacatcatgagtttaatccagtgaccacgccagcgaagattctgccccatcatgtttccttccntgtaccgccactccaagaccccttggaccagaccatacatggcttgatatacacgccctgaagctcttcatggagatgaacccaaagctatttgatgactgtacaccaccgttccaagcccgagaaactnaaagagaagctnaaaatgaaagaacgggaagaagcctgggttnaaatagaaaatctagcccaacccatcccccggtactaaaaaagagaataacatgaaacgccccgggttacttgaatgtttttataagataggaatatatgtcttcaccctgggggggtctcgatttcactaacgttgtatatgaaaatgtctgccataaaaagtacttttaaactttgta

SEQ ID NO: 494120 - DNA, 408 bp, Homo sapiens
aggaggcagggaggagacagcacagcccccaccacagtattctagcacacacatgaggcctgctagggagaagagaacatgaatagggaagctacagaagtatatgacggacagacgaacaggaaaatgggcacggagaggaaaggacaggaaaggaagagaaggtactgaactatagcaaggtaaatataaggtccacgatacctagagggactgaacgcacagagccgaagaacgtcccggaaatagggtaccacgaagggtgtatatctacatgcacaaccgcagctcggaatattcagcccacacacatacccaccttgaaactctatgttatcaaggcccctagatggcctccactgcatcctctgcccgctccatgtgtacaaaggcctaatctatcacgat

SEQ ID NO: 494121 - DNA, 103 bp, Homo sapiens
gcggccgcctactactactactgctcgaattcaagcttctaacgatgtacgggggcatgtgatgtctggtctgaatgcacaagctaagagagcttgcaaaaaa

SEQ ID NO: 494122 - DNA, 298 bp, Homo sapiens
tggaaagagtcatatcactatctgtgtatgttctttatcgcgttatcagtgtgccgggcgccactctgagcatgctacatgcagcatcttgtgtgttccccacagtgccctgtataatgtgtgctctgggttgtgcccattaacaaatatgtcttctgccgttgtttttttattctatgtaggctgtcctccacatattgtcgtaacccagttccgctgctctcttggttgacctcttttatcctacgataatgcacaaccacggcgctgtgaatgatgtaggataggccaggctatt

SEQ ID NO: 494123 - DNA, 140 bp, Homo sapiens
ggttgaaggctgcagacattggagttgcgatgggccagactggtccagatgtttgccaagaggcagcagacatgatcctagtggatgatgatttcaacccataatgtctgcatcgaagggtaagggttttaataccttaa

SEQ ID NO: 494124 - DNA, 498 bp, Homo sapiens
gagagagaaaggcagggcagagaggactccctgtagcttgtgaggtgaaggcagaggtatgaggaggagaggcctgcagatgaggaccccattgctccatggtgacagggggctgctaggtgtcttcactcttcaagagggtgagcggtagggaagcagagtggtcaggaatgcagtctctgggagccagtactgtctggtttggaagtcccagctctgtactatgtctagcagtgtgtacattttaaattcttcctctggaagatagaaggaacaatggcaccttcgtcatagggatgtgggtgaagtattcatggaggcagggtgtgtaatgtcgctgatagcagctcctggtacagaagtattacccttcattagcagggtcttgttgagctgtgtgtgagcaccagcacccctgatagggtgtgttcctgtaagtccctgggcctccgagcaagtccccagcagtctactcggctactcaagtggaccttgtct

SEQ ID NO: 494125 - DNA, 246 bp, Homo sapiens
actggtcgctgatttacatcattaaacagctgtgcccgtccctacgccatcggggggctgtttagagcaaagggagacagcttttacgctcctgctcctgttcccatgccaataatgctaagcagcccaaactgttgaagtactccaggaagcatttccgccagcttacccatggagggttacacgtcccctgcgaggaaggaggctgcgccgtcctgctggccaggggcgtccacgtggcagacg

SEQ ID NO: 494126 - DNA, 104 bp, Homo sapiens
ccacacacgttactggtgtcacggtggcggcgaggttgtaggtgagtggacgatcacgccatatgcactcccacctgagatagagtcagatcctgtctccctcc

SEQ ID NO: 494127 - DNA, 279 bp, Homo sapiens
ttacaacccacgatcacaatgcatgttaagtacgtgaaccggtcaggcacagtggttcacgcctgggatcccacctactatatgggaggacaaggtgaggtggatgtgcctgagagtacccaaggtcaagaagtttgagagcagcctgggcaacatggtgaaaccccatctctatcagaaatacaaaaaattagctgggcgtgggtgggtgggcgccggtaatcccagttactcgggaggctgaggcaggagaatcacttgaacccgggaggcagaggt

SEQ ID NO: 494128 - DNA, 279 bp, Homo sapiens
ccccgggttttttttaaaaaatttttttaaaaaaaaggggttttttcccctttttcccctttctcccaaaaggtttttttatttaaaaaatgggggccccccctatttttccctttttttttttttgttaaaacccccccccggaagtgggggaacaccccaacccaaattttttttgggggaaaccttgtggggggggggaaattgggggaaccctttttttttttttaaagttttttggaaaaaaaaagcgcccccaaaaaatttattttttttaaa

SEQ ID NO: 494129 - DNA, 757 bp, Homo sapiens
  misc_feature (428)..(428): n is a, c, g, or t
gactcgtgcgcctaccagacagtggcggaggacggcgctcgctagtctcccaggtcgcggtacacggcgagaacgggcggggcggtctcggctgcgtccgggcgatccagtgcttagttccgtcatatccctctccacgacctcggtcgagcatgttcaccagggcccaggtgagacggattctgcagcgggtgcccgggaagcagcgatttggcatctaccggttcctgcccttcttttttgtcctgggaggaacgatggagtggatcatgattaaagtgcgcgtgggccaggagaccttctatgatgtctaccgtagaaaagcctcagaaagacagtatcagagaaggctggaagatgaatgagactgaacttcagcagtcaataaagtcaatatgaatttttaaaaaaaaaaaagaaacaaaaanaaaaaaaaaatttgggggggcgcctgggcccctggaagagagttgaaacaccaatcgttgggggacgagcgagcgcccacagggagtcgtgtaatgtcaaccagggggcaacaaaggagggtgcccagagaagaaagaacagcgggcaccgagaaacaaggggctgtggatgtcaccacccagtaaaaacacgcccgggggggacaacccgggcgggtttgtgaacacgaactcccacgagaggggaggccggaggagcaaagaggggactagtatacacagaggggccaagggagctcgacatacaaatatcccacggcggggggaga

SEQ ID NO: 494130 - DNA, 1046 bp, Homo sapiens
  misc_feature (717)..(717): n is a, c, g, or t
gtttaccatactggccaggctggtctcaaactcctgaccttgtgatccgcctgcctcggcctcccaaagtgctgggattacaggcgtgagccactgtgcccggcctggaaagaagattctttacatgaaggtggcgagtcaaaggtctggcaaagcagcagctggaacaaggaaactgatctcctctccccacctgaaggtttctggatatgggagagggagcatcagagagccaagaggcaagaagtgcctttgaggagccaggttttagttaagaaggatgacttcagagcacagaatagaaattatgggggagaaggaagtgagggacatcttaaaacactaagagatgtgctaagacatgattctatctttcaagacactgacttttaccctatttaagtctagaactccattatcatagtcctcatctaactcaagttttgttttaagtttattttggcattgagttaaatattaatgccaagattcagaagtaggtgacagacctagactattggttaaattattcagattgttttaattttaaatatgtttcttaaacatctgagcaactttttgtttgatacagatgatgtctaccgtagaaaagcctcagaaagacagtatcagagaaggctggaagatgaatgagactgaacttcagcagtcaataaagtcaatatgaatttttaaaaaaaaaaaagaaacaaaaanaaaaaaaaaatttgggggggcgcctgggcccctggaagagagttgaaacaccaatcgttgggggacgagcgagcgcccacagggagtcgtgtaatgtcaaccagggggcaacaaaggagggtgcccagagaagaaagaacagcgggcaccgagaaacaaggggctgtggatgtcaccacccagtaaaaacacgcccgggggggacaacccgggcgggtttgtgaacacgaactcccacgagaggggaggccggaggagcaaagaggggactagtatacacagaggggccaagggagctcgacatacaaatatcccacggcggggggaga

SEQ ID NO: 494131 - DNA, 270 bp, Homo sapiens
gactcgtgcgcctaccagacagtggcggaggacggcgctcgctagtctcccaggtcgcggtacacggcgagaacgggcggggcggtctcggctgcgtccgggcgatccagtgcttagttccgtcatatccctctccacgacctcggtcgagcatgttcaccagggcccagatgatgtctaccgtagaaaagcctcagaaagacagtatcagagaaggctggaagatgaatgagactgaacttcagcagtcaataaagtcaatatgaattt

SEQ ID NO: 494132 - DNA, 807 bp, Homo sapiens
  misc_feature (478)..(478): n is a, c, g, or t
gcactgacccgtcaactcccggtttcccggcgcacgcccctcgtgagatgctgtggtcttttctagcaacgtcgacaggctttccaacaaaattcctctttcctgcgcagaaccgctctccactcgcatttcttctgctcagatccgtattccgagcccgcacgcataccaggctgtgctcagggtccggaggaggccgacccagtagccgtgggccctgtcggaggggagccagctgggcgcgcgttgttttctgaggtggccgcgctgtctttcagggtgtgtgtacattcgaaactccactgaaccttgattgaagacctacagtgtggcagtccatggcctggggactgatgatgtctaccgtagaaaagcctcagaaagacagtatcagagaaggctggaagatgaatgagactgaacttcagcagtcaataaagtcaatatgaatttttaaaaaaaaaaaagaaacaaaaanaaaaaaaaaatttgggggggcgcctgggcccctggaagagagttgaaacaccaatcgttgggggacgagcgagcgcccacagggagtcgtgtaatgtcaaccagggggcaacaaaggagggtgcccagagaagaaagaacagcgggcaccgagaaacaaggggctgtggatgtcaccacccagtaaaaacacgcccgggggggacaacccgggcgggtttgtgaacacgaactcccacgagaggggaggccggaggagcaaagaggggactagtatacacagaggggccaagggagctcgacatacaaatatcccacggcggggggaga

SEQ ID NO: 494133 - DNA, 136 bp, Homo sapiens
agtactccatgacagtaatttttttacttacagcgataattagaaatttctgtggttttcacttgaccttaaaatctatttttccttagggagactttacattttccatacgtacctggagtatatgggttacgcc

SEQ ID NO: 494134 - DNA, 624 bp, Homo sapiens
  misc_feature (295)..(295): n is a, c, g, or t
gactcgtgcgcctaccagacagtggcggaggacggcgctcgctagtctcccaggtcgcggtacacggcgagaacgggcggggcggtctcggctgcgtccgggcgatccagtgcttagttccgtcatatccctctccacgacctcggtcgagcatgttcaccagggcccagatgatgtctaccgtagaaaagcctcagaaagacagtatcagagaaggctggaagatgaatgagactgaacttcagcagtcaataaagtcaatatgaatttttaaaaaaaaaaaagaaacaaaaanaaaaaaaaaatttgggggggcgcctgggcccctggaagagagttgaaacaccaatcgttgggggacgagcgagcgcccacagggagtcgtgtaatgtcaaccagggggcaacaaaggagggtgcccagagaagaaagaacagcgggcaccgagaaacaaggggctgtggatgtcaccacccagtaaaaacacgcccgggggggacaacccgggcgggtttgtgaacacgaactcccacgagaggggaggccggaggagcaaagaggggactagtatacacagaggggccaagggagctcgacatacaaatatcccacggcggggggaga

SEQ ID NO: 494135 - DNA, 598 bp, Homo sapiens
cacggatgcatctgcagactggtgtgaggtagactcatttcatgttcataatatgaaatccagatctttggatacttctcctctgaagaagatcctattgcttcccagttggatgaagaaaatttggttttctttgtgtctagaaaaaggcgaattttaatttcaggtagtagaagacgagatgtgattaagagcattgtcaagatacctcacctggatttactaataacagctactcagaaaggattaataacagtttttaataaccagttcttcagtaatctccagctcaggaaatctttcagaagttgaagtcacagacagccagattctgtcagaggagggggctgtgtgggccctggaggtggtgcagtgagggatgcagagtgtgggcgtggagtctgggctccagcctcgcactaacacttacagctgtgcgtgttatttaatatctgcatgccctggttcctcatcccgaatcatagaccttctttcttgctgtttaagtgagttaatactcatgaagtgcttagcatcattagagttcctcagcaaatattggccattgctataataaacaaataatgtgaaaacaaaa

SEQ ID NO: 494136 - DNA, 449 bp, Homo sapiens
atacaggtaaaagtcccagctcatcactagcatgtctagggtctagggtgagtagatgggtatttagatgatctggggagcaccagctatgttcattctacgataaggggaggctggtctgtaaacacaaaaattgttgtccagatctttcatctgtttatgatcatcaacaaagacttgttagacaggtctagtcttagacactatggcggttaatctagggaagatgaattaaatgggtagatagtgatgcatacctgtatacactgatgtcatgtataagggatttgggggggatacctcagttcatgtggaagggacagtctcggtgtgtcccatgaatcaccttggcactgcaacacatggtttgtgctcagaaaaagtctttcatggtgacaggaagacagtttccctggagctggccatgaaggccttagaagccatttctg

SEQ ID NO: 494137 - DNA, 393 bp, Homo sapiens
ctttatgcaagtaaaatacctttgaaataatcattatgtgattaaaattttatcataattttcagttcttcagtaatctccagctcaggaaatctttcagaagttgaagtcacagacagccagattctgtcagaggagggggctgtgtgggccctggaggtggtgcagtgagggatgcagagtgtgggcgtggagtctgggctccagcctcgcactaacacttacagctgtgcgtgttatttaatatctgcatgccctggttcctcatcccgaatcatagaccttctttcttgctgtttaagtgagttaatactcatgaagtgcttagcatcattagagttcctcagcaaatattggccattgctataataaacaaataatgtgaaaacaaaa

SEQ ID NO: 494138 - DNA, 836 bp, Homo sapiens
aagtgccgtaggtgttaccggcccccccggagttacgggatggccggtgtgcgtccgcctgctggacctggtgcaccgtcagcctgcctggtgcactgggactggtgctgggggctgctgacctcgtggctattgagtgcccaggatcccgtgagacgcccgctgccctcagtgaccctgctgggtcgcacgccctccccagcttctgctgctcgctgctcttcgtgcagggcgaggtcaggtgcccccttctcgcctctcttctcttctcttctcttcctcctccacttctgtgcccgcggagactccggccgcccccttccgcaggggtgtagtaatctgcggagctgacagcagcccctgtagccaccctgcccgaagtctcctggaagcggcactgagctcatggccagccgcagcccctggcggacccactagttggacctgaggagccatgccctcctccctgcacccaaacttggagcacttgaccttttggctcgttgcgacgggggcaggctcgctgggttggctggaccatgctgcggatgcctgcgagggcatcttgcctggatgacctgtctggctgcactcccgggctcctggctttgcctctggggatcccgagtgtgtccaacatcagaccgcatgtggactgagacctagagtcatggatgtatgccgtcgtcttgcactgtggctcctctggggactcctcctgcaccatgccagagcctcagacatagtcacatgtgagaaggcgaccaggaaccagctcgggggccaactctgagtgagtccactggagcagagtatttggcgaattgacaaagccc

SEQ ID NO: 494139 - DNA, 414 bp, Homo sapiens
gttctgcgcgtgcgcggaagacggacggcgcgtggcggaaggcaggctagctcctcgccgtgcaggagggtatacggcttaaggaggctgcggtggacaccacttcttaatgtcgaaggtcttcgcggcgctcacctcggctcctactgttcggcacggtacgcaccagccaccttctgcgccgaaggcagtcggtcgccactgagaggaaccgctctaggcacgtacaggcactatgaggatgcgtcgcgcgcggagcactctgggacttgtagctctggacatggagcgagctgtgccgctcgcggtgcctctgggtcagacagaggtgttccaggccttgcactggatgcatatgaccatgttctgccagagcgtctcaccatgagcgaagagtctgacggctgtcaactt

SEQ ID NO: 494140 - DNA, 199 bp, Homo sapiens
gtggccagaagcttctgacgagaaaggctgacagcagctccagtgaggaagagagcagctccagtgaggaggagaagacaaagaagatggtggccaccactaagcccaaggcgacttccaaaggagcttttacctttccttccaaggaggcttcctagggtagtagggacaacagctctctatttcaggcacactctcc

SEQ ID NO: 494141 - DNA, 992 bp, Homo sapiens
  misc_feature (37)..(37): n is a, c, g, or t
  misc_feature (42)..(42): n is a, c, g, or t
  misc_feature (45)..(45): n is a, c, g, or t
  misc_feature (50)..(50): n is a, c, g, or t
  misc_feature (713)..(713): n is a, c, g, or t
  misc_feature (786)..(786): n is a, c, g, or t
  misc_feature (987)..(987): n is a, c, g, or t
taacatacggtctaggacatgccaatggttatcaggncgagnccngctcntgcagtattagttcttgcagctggtggtggcggctgaggcggcatggatctcagcgagctggagagagacaatacaggccgctgtcgcctgagttcgcctgtgcccgcggtgtgccgcaaggagccttgcgtcctgggcgtcgatgaggcgggcaggggccccgtgctgggccccatggtctacgccatctgttattgtcccctgcctcgcctggcagatctggaggcgctgaaagtggcagactcaaagaccctattggagagcgagcgggaaaggctgtttgcgaaaatggaggacacggactttgtcggctgggcgctggatgtgctgtctccaaacctcatctctaccagcatgcttgggcgggtcaaatacaacctgaactccctgtcacatgatacagccactgggcttatacagtatgcattggaccagggcgtgaacgtcacccaggtattcgtggacaccgtagggatgccagagacataccagggtgacgttcacgcgcgggtcaaatacaacctgaactccctgtcacatgatacagccactgggcttatacagtatgcattggaccagggcgtgaacgtcacccaggtattcgtggacaccgtagggatgccagagacataccaggcgcggctgcagcaaagttttcccgnggattgaggtgacggtcaaggccaaagcagatgccctctacccggtggttagtgctgccagcatctgtgccanggtggccgggaccaggccgtgaagaaatggcagttcgtggagaaactgcaggacttggatactgattatggctcaggctacccaatgatcccagacaaaagcgtggttgaaggagcacgtggagcctgtgttcggttccccagttgtgcggttcagctgggcacggccagaccatcctggagaaagaggcggaagatgttnatggg

SEQ ID NO: 494142 - DNA, 123 bp, Homo sapiens
ctgtaccgcgattaaactcactacagtaacaccattgacacaaatgttaacccagaacagtgacatgtgtgtaacctggaacagggacatgatgtaaccctgggacagtggagagtgctgtaa

SEQ ID NO: 494143 - DNA, 950 bp, Homo sapiens
ggtatgggttagtacggttaattgatagagaggtgtagtcagtgggtcgggatcggaaattatggtgtatgcagatcgattacgtatagaaactggatagttaagaagtgagggttgcgttagtgacgatccattcgctggatacactcatgcgagaggagactcgcctagtgggaattggtgctaaagcaccagaaagtcgacataatcctgatccctcgtctcgaatccacgtgggcactcgtatcccttctttcggcacctaccggagtattaaagtacactccatgatgatgataaactgtttcagggaatctgtatcctcttcattggaaattcccaacagagttggtctgcggtgtctgtgctcccatctcttgttcaggggcctgtggtgctttggttccttcccttcgtgaatgtgcgcacgtgtttgacctggtctacatgagcttcggtggtgaattgtgtgacccttgcgggtccgggagacttcttcacgagtttgtggcaaccatccaagaggcgattttgtggggccattacccaaacggttgtgcttgacttgtgcgccattctactctctgaactaacggtagcttgtctctgttatactcggcatgaataaatacagctatggctatgcccagtgtcctgtggaagttagtgccagtgagaactcgtccaaggattgaaaagccactcgagagagatatggtcagagagatctgctacgtcatgtcccatgaggaatattttcaaaacaaggagttctccctgtggtgacgcggcacaagcatggtttaaagtcttcggcactcttggttctgaaagtgccattgtggacacgtttagaaatcggcacggggaacaatgacgacatggtgagtggacttcggctgaatcattctgcctcgcgagaagaaggcccccgtcaagcatcttcggac

SEQ ID NO: 494144 - DNA, 848 bp, Homo sapiens
  misc_feature (37)..(37): n is a, c, g, or t
  misc_feature (42)..(42): n is a, c, g, or t
  misc_feature (45)..(45): n is a, c, g, or t
  misc_feature (50)..(50): n is a, c, g, or t
  misc_feature (642)..(642): n is a, c, g, or t
  misc_feature (843)..(843): n is a, c, g, or t
taacatacggtctaggacatgccaatggttatcaggncgagnccngctcntgcagtattagttcttgcagctggtggtggcggctgaggcggcatggatctcagcgagctggagagagacaatacaggccgctgtcgcctgagttcgcctgtgcccgcggtgtgccgcaaggagccttgcgtcctgggcgtcgatgaggcgggcaggggccccgtgctgggccccatggtctacgccatctgttattgtcccctgcctcgcctggcagatctggaggcgctgaaagtggcagactcaaagaccctattggagagcgagcgggaaaggctgtttgcgaaaatggaggacacggactttgtcggctgggcgctggatgtgctgtctccaaacctcatctctaccagcatgcttgggcgggtcaaatacaacctgaactccctgtcacatgatacagccactgggcttatacagtatgcattggaccagggcgtgaacgtcacccaggtattcgtggacaccgtagggatgccagagacataccagggtgacgttcacgccggtccacggcataggggataaggtcagtggcagtgtagtgtgactgggacggctggtggttagtgctgccagcatctgtgccanggtggccgggaccaggccgtgaagaaatggcagttcgtggagaaactgcaggacttggatactgattatggctcaggctacccaatgatcccagacaaaagcgtggttgaaggagcacgtggagcctgtgttcggttccccagttgtgcggttcagctgggcacggccagaccatcctggagaaagaggcggaagatgttnatggg

SEQ ID NO: 494145 - DNA, 844 bp, Homo sapiens
  misc_feature (37)..(37): n is a, c, g, or t
  misc_feature (42)..(42): n is a, c, g, or t
  misc_feature (45)..(45): n is a, c, g, or t
  misc_feature (50)..(50): n is a, c, g, or t
  misc_feature (565)..(565): n is a, c, g, or t
  misc_feature (638)..(638): n is a, c, g, or t
  misc_feature (839)..(839): n is a, c, g, or t
taacatacggtctaggacatgccaatggttatcaggncgagnccngctcntgcagtattagttcttgcagctggtggtggcggctgaggcggcatggatctcagcgagctggagagagacaatacaggccgctgtcgcctgagttcgcctgtgcccgcggtgtgccgcaaggagccttgcgtcctgggcgtcgatgaggcgggcaggggccccgtgctgggccccatggtctacgccatctgttattgtcccctgcctcgcctggcagatctggaggcgctgaaagtggcagactcaaagaccctattggagagcgagcgggaaaggctgtttgcgaaaatggaggacacggactttgtcggctgggcgctggatgtgctgtctccaaacctcatctctaccagcatgcttgggcgggtcaaatacaacctgaactcccacatgatacagccactgggcttatacagtatgcattggaccagggcgtgaacgtcacccaggtattcgtggacaccgtagggatgccagagacataccaggcgcggctgcagcaaagttttcccgnggattgaggtgacggtcaaggccaaagcagatgccctctacccggtggttagtgctgccagcatctgtgccanggtggccgggaccaggccgtgaagaaatggcagttcgtggagaaactgcaggacttggatactgattatggctcaggctacccaatgatcccagacaaaagcgtggttgaaggagcacgtggagcctgtgttcggttccccagttgtgcggttcagctgggcacggccagaccatcctggagaaagaggcggaagatgttnatggg

SEQ ID NO: 494146 - DNA, 15534 bp, Homo sapiens
ccagccgtgtgtgatgagtggccacaccttgcctcctcttcccgtcccaggcaccaacagcacagagcaggccagtgtacccagagccatggcagccacgctgggagccggcacgccccccaggccccaggccaggagcatagctggggtgtatgtggaggcctcgggccaggcccagagtgtctacgccgccatggagcagggcctcctgcctgctgggctcgggcaggctctgctagaggcccaggcagccactgggggcctggtggacctcgcccggggccagctgctccctgtgtccaaggccctgcagcagggtctggtggggctggagctgaaggagaagctgctggccgctgagcgtgccactacgggctatcctgacccctacggcggtgagaagctggccctctttcaggccatcgggaaggaggttgtggacagggccctggggcagagctggctggaggtccaactggccactgggggcctggtggaccccgcccagggagtgctcgtggcccctgagccagcctgccaccagggcctcctggaccgggagacatggcacaagctgtcagagcttgagcctggcacaggtgacctgcgcttcctcaaccccaacacgctggagcggctgacataccaccagctgctggaaaggtgtgtgcgtgcccccgggtcggggctagccttgctgcccctcaagatcaccttccgctccatgggcggggcggtgagtgcagctgagctgctggaggtgggcatcctggacgagcaggctgtgcagggtctgcgggagggcaggctggccgcagtggacgtgagtgcacgtgccgaggtgcggcgctacctggagggtaccggcagcgtggccggggttgtcctgctgcccgaaggccacaagaagagctttttccaggctgccaccgagcacctgctcccaatgggcaccgcgctgccactcctagaggcccaggctgccacccacaccctggtggaccccatcacaggccagcggctgtgggtagacgaggcagtcagggcgggcctggtcagcccagagctccatgagcagctcctggtggctgagcaggccgtgacagggcaccacgaccccttcagtggctcccaaatcccccttttccaggccatgaagaaggggctagtggacaggccactagcactgcggctcttggatgcccagctggccacaggcgggctggtctgtccagcacgcaggctccggctgcccctggaggccgccctgcgctgcggctgcctggatgaagacactcagcggcagctctcgcaggctggcagcttctcagacggcacgcacggcggcctgcgctatgaacagctgctggccctctgtgtcaccgacccagagaccgggcttgccttcctgccactctcagggggaccccggggaggggagccccagggacccccattcatcaagtacagcactcggcaggccctgagcacggccacagccaccgtctctgtggggaagttccggggccggcccgtgtccctctgggagctgctcttctctgaggccatctcctcagagcagagggcgatgctggcccagcagtaccaggaagggaccctctccgtggagaagctggccgctgagctgagcgccacccttgagcaggctgcagccactgccagggtcaccttttctgggctgagggacaccgtgacaccaggagagctgctgaaagccgagatcatcgaccaggacctgtacgagcggttggagcatggacaggccacagccaaggatgtgggcagcctggcctcggcgcagaggtacctgcagggtacgggctgcattgctggcctgctgctccctggctcccaggaacgcctgagcatctatgaggcccgatgcaaggggctcctccggcccggcactgccctcatccttctggaggcacaagctgccacaggcttcatcatcgacccaaaagcaaacaaggggcactccgttgaggaggcactgagggctgctgtcattgggcctgatgtgttcgcgaagctgctgtcggctgagcgcgctgtcactggctacactgacccctacaccgggcagcagatctccctcttccaggccatgcagaagggcctcatcgtccgggagcacggcatccgcctgctggaggcccagatcgccacgggcggcgtcatcgaccccgtgcacagccaccgcgtgcccgtggacgtggcctaccggcgcggctacttcgatcagatgctgaacttgatcctgttggacccttctgacgacaccaagggcttcttcgaccccaacacgcacgagaacctcacgtacctgcagcttctggagcgctgtgtgcgtgaccccgagacgggcctgtacctcctgccactcagcagcacgcagtccccgctggtggacagtgccacccagcaggccttccagaacctgctgctctccgtgaagtatggacggtttcaggggcagagggtctccgcgtgggagctgatcaactctgagtacttcagcgagggccgcaggaggcagctgctgcgtcgctaccggcagcgcgaggtcacgctggggcaggtggcaaagctgctggaggcggagacgcagagacaggcggacatcatgctgcccgcactgcggagccgggtcaccgtccaccagctcctggaggccggtatcattgaccagcagctgttggaccaagtgctggccgggacaatcagcccggaggccctcctactcatggacggcgtccgcaggtacctgtgcggcctgggagctgtgggcggtgtgcggctgctgccctctggccagcggctcagcctctaccaggccatgaggcagaagctgctggggcccagggtggccctggccctgctggaggcccaggcggccaccggaaccatcatggaccctcacagcccagagagcctctcggtggatgaggccgtgcgcaggggtgtggtggggccggagctgtatggcaggctgaagcgggctgagggtgccattgctggcttcagagaccccttctctgggaagcaggtgtctgtgttccaggccatgaagaaaggtctcatcccttgggagcaagctgcccgcctcctggaggctcaagtggccacaggagggatcattgaccccaccagccaccaccacctccccatgccagtggccattcagcgtggctatgttgaccaggagatggagacagccttgtccagctcctccgagaccttccccacaccggacggccaggggcgcacgagctatgcccagctcctggaggagtgccccagggatgagacttctggccttcacctcctgcccctgccagaaagtgctcctgccctccccaccgaggagcaggtccagaggagcctgcaggccgtgccgggggccaaggatggcacatccctctgggacctgctcagctcctgccacttcaccgaggagcaacggaggggcctgctggaggacgtgcaggaggggaggaccactgtgccacagctgctagcctctgtgcagaggtgggtacaggagaccaagcttctggcccaggcccgcgtcatggtgcccggcccacggggtgaggtacccgctgtctggctgctggatgctggcatcatcacccaggagacccttgaggccctggctcagggcacgcagtcgcccgcccaggtcgccgagcagccggcggtgaaggcctgcctgtggggcacaggctgcgtggccggtgtgctgctacagccctctggggccaaggccagcatcgcccaggccgtgagggatggcctcctgcccacaggcctgggccagaggctgctggaagcccaggtggcatctggcttccttgttgaccccctgaacaaccagagactgtcagtggaggacgcggttaaggtcggcctggtgggcagggagctgagtgagcagctcgggcaggccgagagggcggcggccgggtacccagatccctactctagggcctccctctctctgtggcaggccatggagaaggggctcgtgccacagaacgagggcttgcccctcctgcaggtgcagctggccacagggggtgtggtggaccctgtccacggggtgcacctgccccaggcggcagcctgcagactcggccttctggacacacagacgagccaggtgctgactgcagttgacaaggacaacaagttcttctttgaccccagtgcgcgggaccaggtgacctaccagcagctcagggagcgctgcgtgtgcgactccgagaccggattgttgctgttgccactgccttcagacacagtgcttgaggtggacgaccacaccgcggtggctctgagggccatgaaggtgcccgtcagcacagggaggtttaaggggtgtagcgtgtcactctgggacctgctgctctccgaatacgttggcgctgacaagcggcgggagctggtggcactctgtcggtctgggagggctgcggccctgcggcaggtggtcagcgcagtcaccgccctggtcgaggctgcagagaggcagcccctgcaggccaccttcagagggctccggaagcaggtgtcagccagggacctgttcagggcgcagctgatcagcaggaagacgctggacgagctgagccaggggacaacgactgtgaaggaggtggcggagatggacagcgtgaagcggtccctggagggaggcaacttcattgccggggtccttatccagggcacccaggagaggatgagcatcccagaggccctgaggaggcacatcctgcggcctggcacagccctggtgctgctggaggcacaggcagctaccggcttcatcatcgaccccgcggagaaccggaagctgaccgtggaggaggcgttcaaagcaggaatgttcgggaaagaaacctacgtgaagctgctgtcggccgagcgcgccgtcaccggctacaccgacccctataccgggcagcagatctccctcttccaggccatgcagaaggacctcatcgtccgggagcacggcatccgcctgctggaggcccagatcgccacgggcggcatcatcgaccccgtgcacagccaccgcgtgcctgtggacgtggcctaccagcgcggctacttcagtgaggagatgaaccgcgtcctggcggaccccagcgacgacaccaagggcttcttcgaccccaacacgcacgagaacctcacgtacctgcagctgctggagcggtgcgtggaggaccccgagacgggcctgtacctgctacaaatcataaagaaaggagaaaactacgtgtacatcaatgaggccacgagacacgtgttgcaatccagaactgcaaaaatgcgcgtggggaggtttgctgaccaggtggtctctttctgggacctgctgtcctctccatacttcacagaggacaggaagcgggagctcatccaggagtatggagcccagagtgggggcctggagaaattgctggaaatcatcaccacgacaattgaagaaacagagacgcaaaaccaaggcatcaaagtggcggccatcagaggggaggtgacagctgcagacctgttcaactccagggtcatcgatcagaagaccctgcacacacttcgtgtggggaggactgggggacaggcactcagcacgctggagtgtgtgaagccctatctggaaggcagcgactgcattgcgggggtcacggtgccctccaccagggaggtcatgagcctccatgaggccagcaggaaggagctcatccctgcagcatttgcgacttggctgctggaggcgcaggccgccaccgggttcctcctggacccctgcacccgccagaagctctctgtggatgaggctgtggatgtgggcctggtgaacgaggagctgcgggagaggctcctgaaggctgaaagagctgccacgggctacagggatccggccacaggagacacgatcccgctgttccaggccatgcagaagcagctcatcgagaaggcggaggcactgaggctgctggaggtgcaggtggccacggggggtgtcatcgacccacagcaccaccaccggctcccactggaaacagcctacagacggggctgtctgcacaaggacatctatgcgctcatttccgaccagaagcacatgaggaaacggtttgtggacccgaacacgcaagagaaggtctcgtaccgagagctgcaggagaggtgccgcccacaagaggacacgggctgggtgctgttcccagtgaacaaggctgcacgggactccgagcacatcgatgacgagacgagaagggccctggaggcagagcaagtggaaatcacagtgggaaggttcagaggccagaaaccaacactgtgggcactactgaattccgaatacgtgacagaggagaagaagctccagctggtgaggatgtatagaacacacaccagacgggcactgcagacggtagcgcagctcatcttagagttgatcgagaagcaggaaaccagcaacaaacacctgtggttccaaggaattagacgacagatcacagcttctgaactcctcagctcagccataatcacggaggaaatgctccaggacctggaaacgggacggagcacgacgcaagagctcatggaggacgaccgcgtcaagcgctacctggagggcaccagctgcatcgcgggcgtcctggtgcccgccaaggaccagcccggccgccaggagaagatgagcatctaccaggccatgtggaagggcgtgctgcggcccggcacggccctggtgctgctggaggcgcaggcggccaccggcttcgtcatcgaccccgtgcgcaacctgaggctgtcggtggaggagcccgtgcccgcgggcgtggtgggcagcgagatccaggagaagctgctgtcggccgagcgcgccgtcaccggctacaccgacccctacaccgggcagcagatctccctcttccaggccatgcagaaggacctcatcgtccgggagcacggcatccgcctgctggaggcccagatcgccacgggcggcgtcatcgaccccgtgcacagccaccgcgtgcccgtggacgtggcctaccggcgcggctacttcgacgaggagatgaaccgtgtcctggccgaccccagcgacgacaccaagggtttcttcgaccccaacacgcacgagaacctcacgtacgtgcagctgctgcgccgctgcgtgcccgacccggacaccgggctctacatgctgcagctggcaggccggggctccgccgtgcaccagctgagcgaggagctgcgctgtgccctgcgcgacgcccgcgtgacgccaggctcgggcgccctccagggccagagcgtctccgtctgggagctcctcttctaccgcgaggtgtccgaggaccggcgccaggacctgctgagcagataccgggcgggcacgctgaccgtggaggagctgggcgccaccctcacctcgctgctggcccaggcccaggcccaggcccgggccgaggccgaggccgggagcccgcgcccagacccccgggaggccctgcgtgcggccaccatggaggtcaaggtgggccgcctccgggggcgcgcggtgcccgtgtgggacgtgctggcgtccggctacgtgagcagggccgcccgggaggagctgctggccgagtttggctcggggaccctggacttgcccgcgctgacccgccggctgaccgccatcatcgaggaggccgaggaagcccccggggcccggccgcagctccaggacgccaggcgcggcccgcgggagccagggccagccgggcgaggggacggcgactcggggcgctcccagcgagagggccagggggagggcgagacccaggaggccgccgccgccgccgccgccgcccgccgccaggagcagaccctgcgtgatgccaccatggaggtgcagcgcgggcagttccaggggcggccggtctccgtgtgggacgtcctcttctcctcgtacctgagcgaggcccgccgagacgagctcctggcccagcacgcggccggcgccctgggcctgcccgacctcgtcgccgtcctcacccgggtcatcgaggagacggaggagcggctcagcaaggtgtccttccgcggcctgaggcgccaggtgtccgcctccgagctgcacacgtccgggatcctgggccccgagaccctgcgggacctggcccagggcactaagacgctgcaggaggtgacggagatggactcggtcaagcgctacctggagggcaccagctgcatcgcgggcgtcctggtgcccgccaaggaccagcccggccgccaggagaagatgagcatctaccaggccatgtggaagggcgtgctgcggcccggcacggccctggtgctgctggaggcgcaggcggccaccggcttcgtcatcgaccccgtgcgcaacctgaggctgtcggtggaggaggccgtggccgcgggcgtggtgggcggcgagatccaggagaagctgctgtcggccgagcgcgccgtcaccggctacaccgacccctacaccgggcagcagatctccctcttccaggccatgcagaaggacctcatcgtccgggagcacggcatccgcctgctggaggcccagatcgccacgggcggcgtcatcgaccccgtgcacagccaccgcgtgcccgtggacgtggcctaccggcgcggctacttcgacgaggagatgaaccgtgtcctggccgaccccagcgacgacaccaagggtttcttcgaccccaacacgcacgagaacctcacgtacgtgcagctgctgcgccgctgcgtgcccgacccggacaccgggctctacatgctgcagctggcaggccggggctccgccgtgcaccagctgagcgaggagctgcgctgtgccctgcgcgacgcccgcgtgacgccaggctcgggcgccctccagggccagagcgtctccgtctgggagctcctcttctaccgcgaggtgtccgaggaccggcgccaggacctgctgagcagataccgggcgggcacgctgaccgtggaggagctgggcgccaccctcacctcgctgctggcccaggcccaggcccaggcccgggccgaggccgaggccgggagcccgcgcccagacccccgggaggccctgcgtgcggccaccatggaggtcaaggtgggccgcctccgggggcgcgcggtgcccgtgtgggacgtgctggcgtccggctacgtgagcggggccgcccgggaggagctgctggccgagtttggctcggggaccctggacttgcccgcgctgacccgccggctgaccgccatcatcgaggaggccgaggaggcccccggggcccggccgcagctccaggacgcctggcgcggcccgcgggagccagggccagccgggcgaggggacggcgactcggggcgctcccagcgagagggccagggggagggcgagacccaggaggccgccgccgccgccgccgccgcccgccgccaggagcagaccctgcgtgatgccaccatggaggtgcagcgcgggcagttccaggggcggccggtctccgtgtgggacgtcctcttctcctcgtacctgagcgaggcccgccgagacgagctcctggcccagcacgcggccggcgccctgggcctgcccgacctcgtcgccgtcctcacccgggtcatcgaggagacggaggagcggctcagcaaggtgtccttccgcggcctgaggcgccaggtgtccgcctccgagctgcacacgtccgggatcctgggccccgagaccctgcgggacctggcccagggcactaagacgctgcaggaggtgacggagatggactcggtcaagcgctacctggagggcaccagctgcatcgcgggcgtcctggtgcccgccaaggaccagcccggccgccaggagaagatgagcatctaccaggccatgtggaagggcgtgctgcggcccggcacggccctggtgctgctggaggcgcaggcggccaccggcttcgtcatcgaccccgtgcgcaacctgaggctgtcggtggaggaggccgtggccgcgggcgtggtgggcggcgagatccaggagaagctgctgtcggccgagcgcgccgtcaccggctacaccgacccctacaccgggcagcagatctccctcttccaggccatgcagaaggacctcatcgtccgggagcacggcatccgcctgctggaggcccagatcgccacgggcggcgtcatcgaccccgtgcacagccaccgcgtgcccgtggacgtggcctaccggcgcggctacttcgacgaggagatgaaccgtgtcctggccgaccccagcgacgacaccaagggtttcttcgaccccaacacgcacgagaacctcacgtacgtgcagctgctgcgccgctgcgtgcccgacccggacaccgggctctacatgctgcagctggcaggccggggctccgccgtgcaccagctgagcgaggagctgcgctgtgccctgcgcgacgcccgcgtgacgccaggctcgggcgccctccagggccagagcgtctccgtctgggagctcctcttctaccgcgaggtgtccgaggaccggcgccaggacctgctgagcagataccgggcgggcacgctgaccgtggaggagctgggcgccaccctcacctcgctgctggcccaggcccaggcccaggcccgggccgaggccgaggccgggagcccgcgcccagacccccgggaggccctgcgtgcggccaccatggaggtcaaggtgggccgcctccgggggcgcgcggtgcccgtgtgggacgtgctggcgtccggctacgtgagcggggccgcccgggaggagctgctggccgagtttggctcggggaccctggacttgcccgcgctgacccgccggctgaccgccatcatcgaggaggccgaggaggcccccggggcccggccgcagctccaggacgcctggcgcggcccgcgggagccagggccagccgggcgaggggacggcgactcggggcgctcccagcgagagggccagggggagggcgagacccaggaggccgccgccgccgccgccgccgcccgccgccaggagcagaccctgcgtgatgccaccatggaggtgcagcgcgggcagttccaggggcggccggtctccgtgtgggacgtcctcttctcctcgtacctgagcgaggcccgccgagacgagctcctggcccagcacgcggccggcgccctgggcctgcccgacctcgtcgccgtcctcacccgggtcatcgaggagacggaggagcggctcagcaaggtgtccttccgcggcctgaggcgccaggtgtccgcctccgagctgcacacgtccgggatcctgggccccgagaccctgcgggacctggcccagggcactaagacgctgcaggaggtgacggagatggactcggtcaagcgctacctggagggcaccagctgcatcgcgggcgtcctggtgcccgccaaggaccagcccggccgccaggagaagatgagcatctaccaggccatgtggaagggcgtgctgcggcccggcacggccctggtgctgctggaggcgcaggcggccaccggcttcgtcatcgaccccgtgcgcaacctgaggctgtcggtggaggaggccgtggccgcgggcgtggtgggcggcgagatccaggagaagctgctgtcggccgagcgcgccgtcaccggctacaccgacccctacaccgggcagcagatctccctcttccaggccatgcagaaggacctcatcgtccgggagcacggcatccgcctgctggaggcccagatcgccacgggcggcgtcatcgaccccgtgcacagccaccgcgtgcccgtggacgtggcctaccggcgcggctacttcgacgaggagatgaaccgtgtcctggccgaccccagcgacgacaccaagggcttcttcgaccccaacacgcacgagaacctcacgtacgtgcagctgctgcgccgctgcgtgcccgacccggacaccgggctctacatgctgcagctggcaggccggggctccgccgtgcaccagctgagcgaggagctgcgctgtgccctgcgcgacgcccgcgtgacgccaggctcgggcgccctccagggccagagcgtctccgtctgggagctcctcttctaccgcgaggtgtccgaggaccggcgccaggacctgctgagcagataccgggcgagcacgctgaccgtggaggagctgggcgccaccctcacctcgctgctggcccaggcccaggcccaggcccgggccgaggccgaggccgggagcccgcgcccagacccccgggaggccctgcgtgcggccaccatggaggtcaaggtgggccgcctccgggggcgcgcggtgcccgtgtgggacgtgctggcgtccggctacgtgagcagggccgcccgggaggagctgctggccgagtttggctcggggaccctggacttgcccgcgctgacccgccggctgaccgccatcatcgaggaggccgaggaggcccccggggcccggccgcagctccaggacgcctggcgcggcccgcgggagccagggccagccgggcgaggggacggcgactcggggcgctcccagcgagagggccagggggagggcgagacccaggaggccgccgccgccaccgccgccgcccgccgccaggagcagaccctgcgtgatgccaccatggaggtgcagcgcgggcagttccaggggcggccggtctccgtgtgggacgtcctcttctcctcgtacctgagcgaggcccgccgagacgagctcctggcccagcacgcggccggcgccctgggcctgcccgacctcgtcgccgtcctcacccgggtcatcgaggagacggaggagcggctcagcaaggtgtccttccgcggcctgaggcgccaggtgtccgcctccgagctgcacacgtccgggatcctgggccccgagaccctgcgggacctggcccagggcactaagacgctgcaggaggtgacggagatggactcggtcaagcgctacctggagggcaccagctgcatcgcgggcgtcctggtgcccgccaaggaccagcccggccgccaggagaagatgagcatctaccaggccatgtggaagggcgtgctgcggcccggcacggccctggtgctgctggaggcgcaggcggccaccggcttcgtcatcgaccccgtgcgcaacctgaggctgtcggtggaggaggccgtggccgcgggcgtggtgggcggcgagatccaggagaagctgctgtcggccgagcgcgccgtcaccggctacaccgacccctacaccgggcagcagatctccctcttccaggccatgcagaaggacctcatcgtccgggagcacggcatccgcctgctggaggcccagatcgccacgggcggcgtcatcgaccccgtgcacagccaccgcgtgcccgtggacgtggcctaccggcgcggctacttcgacgaggagatgaaccgtgtcctggccgaccccagcgacgacaccaagggcttcttcgaccccaacacgcacgagaacctcacgtacgtgcagctgctgcgccgctgcgtgcccgacccggacaccgggctctacatgctgcagctggcaggccggggctccgccgtgcaccagctgagcgaggagctgcgctgtgccctgcgcgacgcccgcgtgacgccaggctcgggcgccctccagggccagagcgtctccgtctgggagctcctcttctaccgcgaggtgtccgaggaccggcgccaggacctgctgagcagataccgggcgggcacgctgaccgtggaggagctgggcgccaccctcacctcgctgctggcccaggcccaggcccaggcccgggccgaggccgaggccgggagcccgcgcccagacccccgggaggccctgcgtgcggccaccatggaggtcaaggtgggccgcctccgggggcgcgcggtgcccgtgtgggacgtgctggcgtccggctacgtgagcggggccgcccgggaggagctgctggccgagtttggctcggggaccctggacttgcccgcgctgacccgccggctgaccgccatcatcgaggaggccgaggaggcccccggggcccggccgcagctccaggacgcctggcgcggcccgcgggagccagggccagccgggcgaggggacggcgactcggggcgctcccagcgagagggccagggggagggcgagacccaggaggccgccgccgccgccgccgccgcccgccgccaggagcagaccctgcgtgatgccaccatggaggtgcagcgcgggcagttccaggggcggccggtctccgtgtgggacgtcctcttctcctcgtacctgagcgaggcccgccgagacgagctcctggcccagcacgcggccggcgccctgggcctgcccgacctcgtcgccgtcctcacccgggtcatcgaggagacggaggagcggctcagcaaggtgtccttccgcggcctgaggcgccaggtgtccgcctccgagctgcacacgtccgggatcctgggccccgagaccctgcgggacctggcccagggcactaagacgctgcaggaggtgacggagatggactcggtcaagcgctacctggagggcaccagctgcatcgcgggcgtcctggtgcccgccaaggaccagcccggccgccaggagaagatgagcatctaccaggccatgtggaagggcgtgctgcggcccggcacggccctggtgctgctggaggcgcaggcggccaccggcttcgtcatcgaccccgtgcgcaacctgaggctgtcggtggaggaggccgtggccgcgggcgtggtgggcggcgagatccaggagaagctgctgtcggccgagcgcgccgtcaccggctacaccgacccctacaccgggcagcagatctccctcttccaggccatgcagaaggacctcatcgtccgggagcacggcatccgcctgctggaggcccagatcgccacgggcggcgtcatcgaccccgtgcacagccaccgcgtgcccgtggacgtggcctaccggcgcggctacttcgacgaggagatgaaccgcgtcctggccgaccccagcgacgacaccaagggcttcttcgaccccaacacgcacgagaacctcacgtacctgcagcttctgcagagggccaccctggaccctgagacggggctcctatttctttctctctctctacagtgactgggcttcctccgtgcagttttctgcaactctggagaagttgaggcatacttgtgtgtctgggttgtttttttttttttttgtcattctttaattttgttgttttacccattcgttatctgtggaaaacgttttaagttgtcatgtgacagaaacttttcctttgtccatcgaggtgtttcataagttttttggtgtgttttctgggtcgtctatgtgtcatatggttttacttttctcccggaatt

SEQ ID NO: 494147 - DNA, 212 bp, Homo sapiens
  misc_feature (116)..(116): n is a, c, g, or t
  misc_feature (172)..(172): n is a, c, g, or t
  misc_feature (196)..(196): n is a, c, g, or t
ggacacagttgaggcaatgttaagagggaaattatacctctaaatgaccttattcaaaagctagggaatctcaagttaacaacctaacatcacaactaaaagaactggagaaccangagcaaacaaacctctctagaagacaagaatcaacctaagagttgaactgaagaanatacacacacacacacacacacanacacacacacacattc

SEQ ID NO: 494148 - DNA, 4589 bp, Homo sapiens
  misc_feature (194)..(194): n is a, c, g, or t
  misc_feature (196)..(197): n is a, c, g, or t
  misc_feature (206)..(206): n is a, c, g, or t
  misc_feature (224)..(224): n is a, c, g, or t
  misc_feature (1415)..(1415): n is a, c, g, or t
  misc_feature (1538)..(1538): n is a, c, g, or t
tccctttatgcgaccgccgggcctacttaggccatgcgccggggcctgctgagagccacaactgctgcgctcctgctggaggcgcaggcggccagtggctttctggtggaccccgtgcggaaccagcgcctgtatgtccacgaggccgtgaaggcgggcgtggtgggccccgagcttcacgagcagctgctgtntnncgagaaggncgtcaccggctacagagncccctactcgggcagcaccatctccctcttccaggccatgcagaagggcctggttctccggcagcacggcatccgcctgctggaggcccagatcgccacgggcggcatcatcgaccccgtgcacagccaccgcgtgcctgtggacgtggcctaccagcgcggctacttcagtgaggagatgaaccgcgtcctggcggaccccagcgacgacaccaagggcttcttcgaccccaacacgcacgagaacctcacgtacctgcagctgctggagcggtgcgtggaggaccccgagacgggcttgcgccttctgccactgaaaggggcggagaaggctgaggtggtggagaccacgcaggtgtacactgaggaggagacaagaagggcatttgaagagacacagatcgacattcccggcggcggcagccacggtggctccaccatgtccctgtgggaggtgatgcagtcggacctgatccccgaggagcagcgggcccagctgatggctgacttccaggccggccgggtgaccaaggaacgcatgatcatcatcatcatcgagatcattgagaagacagagatcatccgccagcagggtctggcctcctacgactacgtgcgccgccgcctcacggctgaggacctgttcgaggctcggatcatctctctcgagacctacaacctgctccgggagggcaccaggagcctccgtgaggctctcgaggcggagtccgcctggtgctacctctatggcacgggctccgtggctggtgtctacctgcccggttccaggcagacactgagcatctaccaggctctcaagaaagggctgctgagtgccgaggtggcccgcctgctgctggaggcacaggcagccacaggcttcctgctggacccggtgaagggggagcggctgactgtggatgaggctgtgcggaagggcctcgtggggcccgagctgcacgaccgcctgctctcggctgagcgggcggtcaccggctaccgtgacccctacaccgagcagaccatctcgctcttccaggccatgaagaaggagctgatccctactgaggaggcctgcggctgctggatgcccagctggccaccggcggcatcgtggacccccgcctgggcttccaccttcccctggaggtggcttaccagcgtggctacctcaacaaggacacgcacgancagctgtcagagcccagcgaggtgcgcagctacgtggacccgtccaccgacgagcgcctcagctacacgcagctgctcaggcggtgccgtcgtgacgacggcaccggccagctgctcctgccnctgtcggacgcccgcaagctgaccttccgtggcctgcggaagcagatcaccatggaggagctggtgcgctcgcaggtcatggacgaggccacggcgctgcagctgcgggagggcctgacctccatcgaggaggtcaccaagaacttgcagaagttcctggaaggcaccagctgcatcgctggtgtcttcgtggacgccaccaaggaacggctctcggtgtaccaggccatgaagaagggcatcatccgccccggcacggcctttgagctcctggaggcgcaggcggccaccggttacgtcatcgaccccatcaagggactgaagctgacggtggaggaggctgtgcgtatgggcattgtgggccccgagttcaaggacaagctgctgtcggccgagcgcgccgtcactgggtacaaggacccctactctgggaagctcatctccctcttccaggccatgaagaagggcctgatcctgaaggaccatggcatccgcctgctggaggcccagatcgccacgggcggcatcatcgaccctgaggagagccaccggctgcccgtggaggtggcctacaagcgcggcctcttcgatgaggagatgaacgagatcctgaccgacccctcggacgacaccaagggcttctttgaccctaacacggaggagaacctcacctacctgcagctgatggagcgttgtatcactgacccccagacgggcctgtgtctcttgccgctgaaggagaagaagcgggagcggaagacgtcctccaagtcctccgtgcgcaagcgccgagtggtcatcgtggaccccgagacgggcaaggagatgtcagtgtacgaggcctaccgcaagggcctgattgaccaccagacgtacctggagctgtccgagcaggagtgcgagtgggaggagatcaccatctcctcctcggacggcgtggtcaagtccatgatcatcgaccgccgctccgggcgccagtacgacatcgatgatgccatcgccaagaacctcatcgaccgctcggcactggaccagtaccgcgccggcacgctctccatcaccgagttcgccgacatgctctcgggcaacgccggtggtttccgctcccgttcctcctcggtgggatcctcctcctcctaccccatcagccccgccgtctccaggacccagctggcctcctggtcagaccccactgaggagacgggccccgtggctggcatcctggacacggagacgctggagaaggtgtccatcaccgaggccatgcaccggaacctggtggataacatcacggggcagcggctgctggaggcgcaggcctgcaccgggggcatcatcgaccccagcaccggtgagcgcttccctgtcaccgacgccgtcaacaagggcctggtggacaagatcatggtggaccgcatcaacctggcccagaaggccttctgcggcttcgaggacccacgcaccaagaccaagatgtcggccgcccaggccctgaagaagggctggctctactacgaggccggccagcgcttcctggaggtgcagtacctgaccggcggcttgatcgagcccgacacgccgggccgcgtgcccctggacgaggccctgcagcgcggcacggtggacgcccgcaccgcacagaagctgcgtgacgtgggcgcctactccaagtacctcacctgccctaagaccaagctcaagatctcctataaggacgcgctggaccgcagcatggtggaggagggcacggggctgcggctgctggaggctgccgcgcagtccaccaagggctactacagcccctacagcgtcagcggctccggctctaccgccggctcccgcaccggctcgcgcaccggctcccgggccggctcccgccgcggcagctttgacgccaccggctccggcttctccatgaccttctcttcatcctcctactcctcctcgggctacggccgccgctacgcctcggggtcctcggcctccctggggggccctgagtctgccgtggcctgaggctgcctgtgcccaccccgctctgcatgcggcccagcccggctcccaccgaggcgcgggggccgttttcaacgcttaaaggtgtcttcctcccaagtggtgcctaaagtttaaccaaaaagaccagactaatatattaatatatatctgctgtccagacagcctgtatcttgggggacagggctggcccagccctgctggccgcctcaccccctcgggtctcctcactcccttctacctgccactcacacagccaggtgccttggagggtcccaagctgggccccagcccaccctcctgtcttcccagggtagcccgcctgccagtcctagctgcacagggcagctgggcccaaccctgtctgtagagggccctggtgtttctagcactggcctgcacggtgggccttgctggggacggggggccccagtcagcctctctcccagtctacccagagaagccccttccccatgggaagacgaggccctcgggcccagcccccacagtgctgtctgatctgtgctttccagctcaccccccacactcactcctgagacccctggcctccggcgtcagcctccagcctctgttcccctagtaagtgccttccatgtcggcctctaaccccaggccccgaggacccagacccagtggggaggcggacgttccagccggcatggctgggaactgcagacctgtcctcctggtgggtccaggggcccctccagcttgtggagccccacactggggtgccgcctgcccgtctctctcccatggagccccagccccctttgggcccagggacaccagccaggctctgtgctgaccctcctgttgcacccagccctggtctcagcagcgaccacccctgcctccaccctccgagctttgcatgttccactaaccccgggcgggtggcaggtggaggtgtcaggctgctggcgcctctgcaagggcagaacactaacctgaccgtgggcggggccttgcggtatccgcccccaataaaagcaattccaaccttaaaaaaaaaaa

SEQ ID NO: 494149 - DNA, 4544 bp, Homo sapiens
  misc_feature (194)..(194): n is a, c, g, or t
  misc_feature (196)..(197): n is a, c, g, or t
  misc_feature (206)..(206): n is a, c, g, or t
  misc_feature (224)..(224): n is a, c, g, or t
  misc_feature (1415)..(1415): n is a, c, g, or t
  misc_feature (1538)..(1538): n is a, c, g, or t
tccctttatgcgaccgccgggcctacttaggccatgcgccggggcctgctgagagccacaactgctgcgctcctgctggaggcgcaggcggccagtggctttctggtggaccccgtgcggaaccagcgcctgtatgtccacgaggccgtgaaggcgggcgtggtgggccccgagcttcacgagcagctgctgtntnncgagaaggncgtcaccggctacagagncccctactcgggcagcaccatctccctcttccaggccatgcagaagggcctggttctccggcagcacggcatccgcctgctggaggcccagatcgccacgggcggcatcatcgaccccgtgcacagccaccgcgtgcctgtggacgtggcctaccagcgcggctacttcagtgaggagatgaaccgcgtcctggcggaccccagcgacgacaccaagggcttcttcgaccccaacacgcacgagaacctcacgtacctgcagctgctggagcggtgcgtggaggaccccgagacgggcttgcgccttctgccactgaaaggggcggagaaggctgaggtggtggagaccacgcaggtgtacactgaggaggagacaagaagggcatttgaagagacacagatcgacattcccggcggcggcagccacggtggctccaccatgtccctgtgggaggtgatgcagtcggacctgatccccgaggagcagcgggcccagctgatggctgacttccaggccggccgggtgaccaaggaacgcatgatcatcatcatcatcgagatcattgagaagacagagatcatccgccagcagggtctggcctcctacgactacgtgcgccgccgcctcacggctgaggacctgttcgaggctcggatcatctctctcgagacctacaacctgctccgggagggcaccaggagcctccgtgaggctctcgaggcggagtccgcctggtgctacctctatggcacgggctccgtggctggtgtctacctgcccggttccaggcagacactgagcatctaccaggctctcaagaaagggctgctgagtgccgaggtggcccgcctgctgctggaggcacaggcagccacaggcttcctgctggacccggtgaagggggagcggctgactgtggatgaggctgtgcggaagggcctcgtggggcccgagctgcacgaccgcctgctctcggctgagcgggcggtcaccggctaccgtgacccctacaccgagcagaccatctcgctcttccaggccatgaagaaggagctgatccctactgaggaggcctgcggctgctggatgcccagctggccaccggcggcatcgtggacccccgcctgggcttccaccttcccctggaggtggcttaccagcgtggctacctcaacaaggacacgcacgancagctgtcagagcccagcgaggtgcgcagctacgtggacccgtccaccgacgagcgcctcagctacacgcagctgctcaggcggtgccgtcgtgacgacggcaccggccagctgctcctgccnctgtcggacgcccgcaagctgaccttccgtggcctgcggaagcagatcaccatggaggagctggtgcgctcgcaggtcatggacgaggccacggcgctgcagctgcgggagggcctgacctccatcgaggaggtcaccaagaacttgcagaagttcctggaaggcaccagctgcatcgctggtgtcttcgtggacgccaccaaggaacggctctcggtgtaccaggccatgaagaagggcatcatccgccccggcacggcctttgagctcctggaggcgcaggcggccaccggttacgtcatcgaccccatcaagggactgaagctgacggtggaggaggctgtgcgtatgggcattgtgggccccgagttcaaggacaagctgctgtcggccgagcgcgccgtcactgggtacaaggacccctactctgggaagctcatctccctcttccaggccatgaagaagggcctgatcctgaaggaccatggcatccgcctgctggaggcccagatcgccacgggcggcatcatcgaccctgaggagagccaccggctgcccgtggaggtggcctacaagcgcggcctcttcgatgaggagatgaacgagatcctgaccgacccctcggacgacaccaagggcttctttgaccctaacacggaggagaacctcacctacctgcagctgatggagcgttgtatcactgacccccagacgggcctgtgtctcttgccgctgaaggagaagaagcgggagcggaagacgtcctccaagtcctccgtgcgcaagcgccgagtggtcatcgtggaccccgagacgggcaaggagatgtcagtgtacgaggcctaccgcaagggcctgattgaccaccagacgtacctggagctgtccgagcaggagtgcgagtgggaggagatcaccatctcctcctcggacggcgtggtcaagtccatgatcatcgaccgccgctccgggcgccagtacgacatcgatgatgccatcgccaagaacctcatcgaccgctcggcactggaccagtaccgcgccggcacgctctccatcaccgagttcgccgacatgctctcgggcaacgccggtggtttccgctcccgttcctcctcggtgggatcctcctcctcctaccccatcagccccgccgtctccaggacccagctggcctcctggtcagaccccactgaggagacgggccccgtggctggcatcctggacacggagacgctggagaaggtgtccatcaccgaggccatgcaccggaacctggtggataacatcacggggcagcggctgctggaggcgcaggcctgcaccgggggcatcatcgaccccagcaccggtgagcgcttccctgtcaccgacgccgtcaacaagggcctggtggacaagatcatggtggaccgcatcaacctggcccagaaggccttctgcggcttcgaggacccacgcaccaagaccaagatgtcggccgcccaggccctgaagaagggctggctctactacgaggccggccagcgcttcctggaggtgcagtacctgaccggcggcttgatcgagcccgacacgccgggccgcgtgcccctggacgaggccctgcagcgcggcacggtggacgcccgcaccgcacagaagctgcgtgacgtgggcgcctactccaagtacctcacctgccctaagaccaagctcaagatctcctataaggacgcgctggaccgcagcatggtggaggagggcacggggctgcggctgctggaggctgccgcgcagtccaccaagggctactacagcccctacagcgtcagcggctccggctctaccgccggctcccgcaccggctcgcgcaccggctcccgggccggctcccgccgcggcagctttgacgccaccggctccggcttctccatgaccttctcttcatcctcctactcctcctcgggctacggccgccgctacgcctcggggtcctcggcctccctggggggccctgagtctgccgtggcctgaggctgcctgtgcccaccccgttttcaacgcttaaaggtgtcttcctcccaagtggtgcctaaagtttaaccaaaaagaccagactaatatattaatatatatctgctgtccagacagcctgtatcttgggggacagggctggcccagccctgctggccgcctcaccccctcgggtctcctcactcccttctacctgccactcacacagccaggtgccttggagggtcccaagctgggccccagcccaccctcctgtcttcccagggtagcccgcctgccagtcctagctgcacagggcagctgggcccaaccctgtctgtagagggccctggtgtttctagcactggcctgcacggtgggccttgctggggacggggggccccagtcagcctctctcccagtctacccagagaagccccttccccatgggaagacgaggccctcgggcccagcccccacagtgctgtctgatctgtgctttccagctcaccccccacactcactcctgagacccctggcctccggcgtcagcctccagcctctgttcccctagtaagtgccttccatgtcggcctctaaccccaggccccgaggacccagacccagtggggaggcggacgttccagccggcatggctgggaactgcagacctgtcctcctggtgggtccaggggcccctccagcttgtggagccccacactggggtgccgcctgcccgtctctctcccatggagccccagccccctttgggcccagggacaccagccaggctctgtgctgaccctcctgttgcacccagccctggtctcagcagcgaccacccctgcctccaccctccgagctttgcatgttccactaaccccgggcgggtggcaggtggaggtgtcaggctgctggcgcctctgcaagggcagaacactaacctgaccgtgggcggggccttgcggtatccgcccccaataaaagcaattccaaccttaaaaaaaaaaa

SEQ ID NO: 494150 - DNA, 938 bp, Homo sapiens
atggatactttgtaccgtgtcccgtgcttgatgtgctcgaatgtcccaactgaagctgaaaagaagccggtcctggttgcacatgcggtcggcatgactgtgtatgctctgagtggtggttgtcttactgcctcatcaccggaggcaataagtttatgattgtccattgttgaacctcaccaaggatgtcggttctatgactgaggcaacatgtggcatcagaggccatgtagcttgctttggactacagagtgaatggacagaggatatgatggacaggactggcatccagcttcgtatatacaagggaggtcttaggtttcataatcgctgggaccgatctgaatgcgaccaaagtatcccgaaaatctaatagattgcacgtatcttagggtgcattggatgcgtctgttgtgctatttgagttatttcatggcgtagagtatgcatgagagtgaaacttgcggtatattcggaatgggttagagtgcatttgattaagtagatcagtggatactggattgctcatgtcaatgaatgtttacaaaggtgtaccattcctgtaatatgaggatgtggggatggatgagagcgggaggaataggatatatctagtgaaacactgtatgtgtattgcacgctgggactagatgttcttcatgttgcttcgcagagacgacgttaatccgagaatttgttcctggtggccaatggtataccatgatgttgggtgcattccttggtggataattgagttttgcatattcaggttaaattgagtagtgttttcgaaaccctcaaggatgggaggacgtattagacatagaaacccaagatcgattgacgcgagagaaaaacaggggccaagaggtgaggtaaggagagagagaaaggggaagtaaaaagatgggagtatggaaagaattgagttttttgga

SEQ ID NO: 494151 - DNA, 4511 bp, Homo sapiens
  misc_feature (194)..(194): n is a, c, g, or t
  misc_feature (196)..(197): n is a, c, g, or t
  misc_feature (206)..(206): n is a, c, g, or t
  misc_feature (224)..(224): n is a, c, g, or t
  misc_feature (1415)..(1415): n is a, c, g, or t
  misc_feature (1538)..(1538): n is a, c, g, or t
tccctttatgcgaccgccgggcctacttaggccatgcgccggggcctgctgagagccacaactgctgcgctcctgctggaggcgcaggcggccagtggctttctggtggaccccgtgcggaaccagcgcctgtatgtccacgaggccgtgaaggcgggcgtggtgggccccgagcttcacgagcagctgctgtntnncgagaaggncgtcaccggctacagagncccctactcgggcagcaccatctccctcttccaggccatgcagaagggcctggttctccggcagcacggcatccgcctgctggaggcccagatcgccacgggcggcatcatcgaccccgtgcacagccaccgcgtgcctgtggacgtggcctaccagcgcggctacttcagtgaggagatgaaccgcgtcctggcggaccccagcgacgacaccaagggcttcttcgaccccaacacgcacgagaacctcacgtacctgcagctgctggagcggtgcgtggaggaccccgagacgggcttgcgccttctgccactgaaaggggcggagaaggctgaggtggtggagaccacgcaggtgtacactgaggaggagacaagaagggcatttgaagagacacagatcgacattcccggcggcggcagccacggtggctccaccatgtccctgtgggaggtgatgcagtcggacctgatccccgaggagcagcgggcccagctgatggctgacttccaggccggccgggtgaccaaggaacgcatgatcatcatcatcatcgagatcattgagaagacagagatcatccgccagcagggtctggcctcctacgactacgtgcgccgccgcctcacggctgaggacctgttcgaggctcggatcatctctctcgagacctacaacctgctccgggagggcaccaggagcctccgtgaggctctcgaggcggagtccgcctggtgctacctctatggcacgggctccgtggctggtgtctacctgcccggttccaggcagacactgagcatctaccaggctctcaagaaagggctgctgagtgccgaggtggcccgcctgctgctggaggcacaggcagccacaggcttcctgctggacccggtgaagggggagcggctgactgtggatgaggctgtgcggaagggcctcgtggggcccgagctgcacgaccgcctgctctcggctgagcgggcggtcaccggctaccgtgacccctacaccgagcagaccatctcgctcttccaggccatgaagaaggagctgatccctactgaggaggcctgcggctgctggatgcccagctggccaccggcggcatcgtggacccccgcctgggcttccaccttcccctggaggtggcttaccagcgtggctacctcaacaaggacacgcacgancagctgtcagagcccagcgaggtgcgcagctacgtggacccgtccaccgacgagcgcctcagctacacgcagctgctcaggcggtgccgtcgtgacgacggcaccggccagctgctcctgccnctgtcggacgcccgcaagctgaccttccgtggcctgcggaagcagatcaccatggaggagctggtgcgctcgcaggtcatggacgaggccacggcgctgcagctgcgggagggcctgacctccatcgaggaggtcaccaagaacttgcagaagttcctggaaggcaccagctgcatcgctggtgtcttcgtggacgccaccaaggaacggctctcggtgtaccaggccatgaagaagggcatcatccgccccggcacggcctttgagctcctggaggcgcaggcggccaccggttacgtcatcgaccccatcaagggactgaagctgacggtggaggaggctgtgcgtatgggcattgtgggccccgagttcaaggacaagctgctgtcggccgagcgcgccgtcactgggtacaaggacccctactctgggaagctcatctccctcttccaggccatgaagaagggcctgatcctgaaggaccatggcatccgcctgctggaggcccagatcgccacgggcggcatcatcgaccctgaggagagccaccggctgcccgtggaggtggcctacaagcgcggcctcttcgatgaggagatgaacgagatcctgaccgacccctcggacgacaccaagggcttctttgaccctaacacggaggagaacctcacctacctgcagctgatggagcgttgtatcactgacccccagacgggcctgtgtctcttgccgctgaaggagaagaagcgggagcggaagacgtcctccaagtcctccgtgcgcaagcgccgagtggtcatcgtggaccccgagacgggcaaggagatgtcagtgtacgaggcctaccgcaagggcctgattgaccaccagacgtacctggagctgtccgagcaggagtgcgagtgggaggagatcaccatctcctcctcggacggcgtggtcaagtccatgatcatcgaccgccgctccgggcgccagtacgacatcgatgatgccatcgccaagaacctcatcgaccgctcggcactggaccagtaccgcgccggcacgctctccatcaccgagttcgccgacatgctctcgggcaacgccggtggtttccgctcccgttcctcctcggtgggatcctcctcctcctaccccatcagccccgccgtctccaggacccagctggcctcctggtcagaccccactgaggagacgggccccgtggctggcatcctggacacggagacgctggagaaggtgtccatcaccgaggccatgcaccggaacctggtggataacatcacggggcagcggctgctggaggcgcaggcctgcaccgggggcatcatcgaccccagcaccggtgagcgcttccctgtcaccgacgccgtcaacaagggcctggtggacaagatcatggtggaccgcatcaacctggcccagaaggccttctgcggcttcgaggacccacgcaccaagaccaagatgtcggccgcccaggccctgaagaagggctggctctactacgaggccggccagcgcttcctggaggtgcagtacctgaccggcggcttgatcgagcccgacacgccgggccgcgtgcccctggacgaggccctgcagcgcggcacggtggacgcccgcaccgcacagaagctgcgtgacgtgggcgcctactccaagtacctcacctgccctaagaccaagctcaagatctcctataaggacgcgctggaccgcagcatggtggaggagggcacggggctgcggctgctggaggctgccgcgcagtccaccaagggctactacagcccctacagcgtcagcggctccggctctaccgccggctcccgcaccggctcgcgcaccggctcccgggccggctcccgccgcggcagctttgacgccaccggctccggcttctccatgaccttctcttcatcctcctactcctcctcgggctacggccgccgctacgcctcggggtcctcggcctccctggggggccctgagtctgccgtggcctgaggctgcctgtgcccaccccgctctgcatgcggcccagcccggctcccaccgaggcgcgggggccgttttcaacgcttaaaggtgtcttcctcccaagtggtgcctaaagtttaaccaaaaagaccagactaatatattaatatatatctgctgtccagacagcctgtatcttgggggacagggctggcccagccctgctggccgcctcaccccctcgggtctcctcactcccttctacctgccactcacacagccaggtgccttggagggtcccaagctgggccccagcccaccctcctgtcttcccagggtagcccgcctgccagtcctagctgcacagggcagctgggcccaaccctctctcccagtctacccagagaagccccttccccatgggaagacgaggccctcgggcccagcccccacagtgctgtctgatctgtgctttccagctcaccccccacactcactcctgagacccctggcctccggcgtcagcctccagcctctgttcccctagtaagtgccttccatgtcggcctctaaccccaggccccgaggacccagacccagtggggaggcggacgttccagccggcatggctgggaactgcagacctgtcctcctggtgggtccaggggcccctccagcttgtggagccccacactggggtgccgcctgcccgtctctctcccatggagccccagccccctttgggcccagggacaccagccaggctctgtgctgaccctcctgttgcacccagccctggtctcagcagcgaccacccctgcctccaccctccgagctttgcatgttccactaaccccgggcgggtggcaggtggaggtgtcaggctgctggcgcctctgcaagggcagaacactaacctgaccgtgggcggggccttgcggtatccgcccccaataaaagcaattccaaccttaaaaaaaaaaa

SEQ ID NO: 494152 - DNA, 5551 bp, Homo sapiens
  misc_feature (194)..(194): n is a, c, g, or t
  misc_feature (196)..(197): n is a, c, g, or t
  misc_feature (206)..(206): n is a, c, g, or t
  misc_feature (224)..(224): n is a, c, g, or t
  misc_feature (1415)..(1415): n is a, c, g, or t
  misc_feature (1538)..(1538): n is a, c, g, or t
tccctttatgcgaccgccgggcctacttaggccatgcgccggggcctgctgagagccacaactgctgcgctcctgctggaggcgcaggcggccagtggctttctggtggaccccgtgcggaaccagcgcctgtatgtccacgaggccgtgaaggcgggcgtggtgggccccgagcttcacgagcagctgctgtntnncgagaaggncgtcaccggctacagagncccctactcgggcagcaccatctccctcttccaggccatgcagaagggcctggttctccggcagcacggcatccgcctgctggaggcccagatcgccacgggcggcatcatcgaccccgtgcacagccaccgcgtgcctgtggacgtggcctaccagcgcggctacttcagtgaggagatgaaccgcgtcctggcggaccccagcgacgacaccaagggcttcttcgaccccaacacgcacgagaacctcacgtacctgcagctgctggagcggtgcgtggaggaccccgagacgggcttgcgccttctgccactgaaaggggcggagaaggctgaggtggtggagaccacgcaggtgtacactgaggaggagacaagaagggcatttgaagagacacagatcgacattcccggcggcggcagccacggtggctccaccatgtccctgtgggaggtgatgcagtcggacctgatccccgaggagcagcgggcccagctgatggctgacttccaggccggccgggtgaccaaggaacgcatgatcatcatcatcatcgagatcattgagaagacagagatcatccgccagcagggtctggcctcctacgactacgtgcgccgccgcctcacggctgaggacctgttcgaggctcggatcatctctctcgagacctacaacctgctccgggagggcaccaggagcctccgtgaggctctcgaggcggagtccgcctggtgctacctctatggcacgggctccgtggctggtgtctacctgcccggttccaggcagacactgagcatctaccaggctctcaagaaagggctgctgagtgccgaggtggcccgcctgctgctggaggcacaggcagccacaggcttcctgctggacccggtgaagggggagcggctgactgtggatgaggctgtgcggaagggcctcgtggggcccgagctgcacgaccgcctgctctcggctgagcgggcggtcaccggctaccgtgacccctacaccgagcagaccatctcgctcttccaggccatgaagaaggagctgatccctactgaggaggcctgcggctgctggatgcccagctggccaccggcggcatcgtggacccccgcctgggcttccaccttcccctggaggtggcttaccagcgtggctacctcaacaaggacacgcacgancagctgtcagagcccagcgaggtgcgcagctacgtggacccgtccaccgacgagcgcctcagctacacgcagctgctcaggcggtgccgtcgtgacgacggcaccggccagctgctcctgccnctgtcggacgcccgcaagctgaccttccgtggcctgcggaagcagatcaccatggaggagctggtgcgctcgcaggtcatggacgaggccacggcgctgcagctgcgggagggcctgacctccatcgaggaggtcaccaagaacttgcagaagttcctggaaggcaccagctgcatcgctggtgtcttcgtggacgccaccaaggaacggctctcggtgtaccaggccatgaagaagggcatcatccgccccggcacggcctttgagctcctggaggcgcaggcggccaccggttacgtcatcgaccccatcaagggactgaagctgacggtggaggaggctgtgcgtatgggcattgtgggccccgagttcaaggacaagctgctgtcggccgagcgcgccgtcactgggtacaaggacccctactctgggaagctcatctccctcttccaggccatgaagaagggcctgatcctgaaggaccatggcatccgcctgctggaggcccagatcgccacgggcggcatcatcgaccctgaggagagccaccggctgcccgtggaggtggcctacaagcgcggcctcttcgatgaggagatgaacgagatcctgaccgacccctcggacgacaccaagggcttctttgaccctaacacggaggagaacctcacctacctgcagctgatggagcgttgtatcactgacccccagacgggcctgtgtctcttgccgctgaaggagaagaagcgggagcggaagacgtcctccaagtcctccgtgcgcaagcgccgagtggtcatcgtggaccccgagacgggcaaggagatgtcagtgtacgaggcctaccgcaagggcctgattgaccaccagacgtacctggagctgtccgagcaggagtgcgagtgggaggagatcaccatctcctcctcggacggcgtggtcaagtccatgatcatcgaccgccgctccgggcgccagtacgacatcgatgatgccatcgccaagaacctcatcgaccgctcggcactggaccagtaccgcgccggcacgctctccatcaccgagttcgccgacatgctctcgggcaacgccggtggtttccgctcccgttcctcctcggtgggatcctcctcctcctaccccatcagccccgccgtctccaggacccagctggcctcctggtcagaccccactgaggagacgggccccgtggctggcatcctggacacggagacgctggagaaggtgtccatcaccgaggccatgcaccggaacctggtggataacatcacggggcagcggctgctggaggcgcaggcctgcaccgggggcatcatcgaccccagcaccggtgagcgcttccctgtcaccgacgccgtcaacaagggcctggtggacaagatcatggtggaccgcatcaacctggcccagaaggccttctgcggcttcgaggacccacgcaccaagaccaagatgtcggccgcccaggccctgaagaagggctggctctactacgaggccggccagcgcttcctggaggtgcagtacctgaccggcggcttgatcgagcccgacacgccgggccgcgtgcccctggacgaggccctgcagcgcggcacggtggacgcccgcaccgcacagaagctgcgtgacgtgggcgcctactccaagtacctcacctgccctaagaccaagctcaagatctcctataaggacgcgctggaccgcagcatggtggaggagggcacggggctgcggctgctggaggctgccgcgcagtccaccaagggctactacagcccctacagcgtcagcggctccggctctaccgccggctcccgcaccggctcgcgcaccggctcccgggccggctcccgccgcggcagctttgacgccaccggctccggcttctccatgaccttctcttcatcctcctactcctcctcgggctacggccgccgctacgcctcggggtcctcggcctccctggggggccctgagtctgccgtggcctgaggctgcctgtgcccaccccgctctgcatgcggcccagcccggctcccaccgaggcgcgggggccgttttcaacgcttaaaggtgtcttcctcccaagtggtgcctaaagtttaaccaaaaagaccagactaatatattaatatatatctgctgtccagacagcctgtatcttgggggacagggctggcccagccctgctggccgcctcaccccctcgggtctcctcactcccttctacctgccactcacacagccaggtgccttggagggtcccaagctgggccccagcccaccctcctgtcttcccagggtagcccgcctgccagtcctagctgcacagggcagctgggcccaaccctgtctgtagagggccctggtgtttctagcactggcctgcacggtgggccttgctggggacggggggccccagtcagcctctctcccagtctacccagagaagccccttccccatgggaagacgaggccctcgggcccagcccccacagtgctgtctgatctgtgctttccagctcaccccccacactcactcctgagacccctggcctccggcgtcagcctccagcctctgttcccctagtaagtgccttccatgtcggcctctaaccccaggccccgaggacccagacccagtggggaggcggacgttccagccggcatggctgggaactgcagacctgtcctcctggtgggtccaggggcccctccagcttgtggagccccacactggggtgccgcctgcccgtctctctcccatggagccccagccccctttgggcccagggacaccagccaggctctgtgctgaccctcctgttgcacccagccctggtctcagcagcgaccacccctgcctccaccctccgagctttgcatgttccactaaccccgggcgggtggcaggtggaggtgtcaggctgctggcgcctctgcaagggcagaacactaacctgaccgtgggcggggccttgcggtatccgcccccaataaaagcaattccaaccttaaaaaaaaaaaaaaaaaaaaaaaaaaaaaaaaaaaaaaaaaaaaaaaaaaaaaaaaaaaaaaaaaaaaaaaaaaaaaacaaaaaacaaaacagaagaaaaaaaaaaaacaaaaaaagacggggggccgggctaccatcgaatcacccactcgcgggggcgcgcccacaacaatatcgacgcgacaccactgagtcgatgaggagaacgagggtggccccaacaaagaggagtggtaggtatatatcaacaagcgccgacgagacgccgcgtgctatgctaaaaaagaaacacagaatgtgaagcgaaagaacgggcgaacaagcaggaaaagtaatagaagagaagcgacaccacattattgggtggagcggagacgaccaagagagtgagtagcgacacacaccactctccagcaagaggaattatagaagcgactggagggagggaaaaaataaaaaacgataaggagaaagagactatgtaggggtagaaaccaccggaccaaatggttacaagtatgaacacaaggaaagttccgaagaagaaagatagtaaacgacagaagaaactttactcccccgccgtctcttttatactcaaccgagagagaagaaagcacacacaacagaaagaaaaaaacagagagaacgaaacgaaagaaagagaaaaaagaaagaaaaaacaaagaagaaagaaagaaaaaaagaaaagaagaaaaagaagaaagaaaaaacgaaagaaagaaaaaaggagaaaaacagaagacaaaagaaaaagaagaaaaagaacaaagggaacaagcaagaagcaagggaaaaaaaaagaagaggagagagacagagagaaaagagagacgagggaagacagaagagcaaaaggaaaaaagaacaaaaaaagaaaaaggagaaaaaaagaagaaagaaaagcagaaaaaaaaaaggagagaagaaggagagaaaaaagggagagaag

SEQ ID NO: 494153 - DNA, 4373 bp, Homo sapiens
  misc_feature (194)..(194): n is a, c, g, or t
  misc_feature (196)..(197): n is a, c, g, or t
  misc_feature (206)..(206): n is a, c, g, or t
  misc_feature (224)..(224): n is a, c, g, or t
  misc_feature (1415)..(1415): n is a, c, g, or t
  misc_feature (1538)..(1538): n is a, c, g, or t
tccctttatgcgaccgccgggcctacttaggccatgcgccggggcctgctgagagccacaactgctgcgctcctgctggaggcgcaggcggccagtggctttctggtggaccccgtgcggaaccagcgcctgtatgtccacgaggccgtgaaggcgggcgtggtgggccccgagcttcacgagcagctgctgtntnncgagaaggncgtcaccggctacagagncccctactcgggcagcaccatctccctcttccaggccatgcagaagggcctggttctccggcagcacggcatccgcctgctggaggcccagatcgccacgggcggcatcatcgaccccgtgcacagccaccgcgtgcctgtggacgtggcctaccagcgcggctacttcagtgaggagatgaaccgcgtcctggcggaccccagcgacgacaccaagggcttcttcgaccccaacacgcacgagaacctcacgtacctgcagctgctggagcggtgcgtggaggaccccgagacgggcttgcgccttctgccactgaaaggggcggagaaggctgaggtggtggagaccacgcaggtgtacactgaggaggagacaagaagggcatttgaagagacacagatcgacattcccggcggcggcagccacggtggctccaccatgtccctgtgggaggtgatgcagtcggacctgatccccgaggagcagcgggcccagctgatggctgacttccaggccggccgggtgaccaaggaacgcatgatcatcatcatcatcgagatcattgagaagacagagatcatccgccagcagggtctggcctcctacgactacgtgcgccgccgcctcacggctgaggacctgttcgaggctcggatcatctctctcgagacctacaacctgctccgggagggcaccaggagcctccgtgaggctctcgaggcggagtccgcctggtgctacctctatggcacgggctccgtggctggtgtctacctgcccggttccaggcagacactgagcatctaccaggctctcaagaaagggctgctgagtgccgaggtggcccgcctgctgctggaggcacaggcagccacaggcttcctgctggacccggtgaagggggagcggctgactgtggatgaggctgtgcggaagggcctcgtggggcccgagctgcacgaccgcctgctctcggctgagcgggcggtcaccggctaccgtgacccctacaccgagcagaccatctcgctcttccaggccatgaagaaggagctgatccctactgaggaggcctgcggctgctggatgcccagctggccaccggcggcatcgtggacccccgcctgggcttccaccttcccctggaggtggcttaccagcgtggctacctcaacaaggacacgcacgancagctgtcagagcccagcgaggtgcgcagctacgtggacccgtccaccgacgagcgcctcagctacacgcagctgctcaggcggtgccgtcgtgacgacggcaccggccagctgctcctgccnctgtcggacgcccgcaagctgaccttccgtggcctgcggaagcagatcaccatggaggagctggtgcgctcgcaggtcatggacgaggccacggcgctgcagctgcgggagggcctgacctccatcgaggaggtcaccaagaacttgcagaagttcctggaaggcaccagctgcatcgctggtgtcttcgtggacgccaccaaggaacggctctcggtgtaccaggccatgaagaagggcatcatccgccccggcacggcctttgagctcctggaggcgcaggcggccaccggttacgtcatcgaccccatcaagggactgaagctgacggtggaggaggctgtgcgtatgggcattgtgggccccgagttcaaggacaagctgctgtcggccgagcgcgccgtcactgggtacaaggacccctactctgggaagctcatctccctcttccaggccatgaagaagggcctgatcctgaaggaccatggcatccgcctgctggaggcccagatcgccacgggcggcatcatcgaccctgaggagagccaccggctgcccgtggaggtggcctacaagcgcggcctcttcgatgaggagatgaacgagatcctgaccgacccctcggacgacaccaagggcttctttgaccctaacacggaggagaacctcacctacctgcagctgatggagcgttgtatcactgacccccagacgggcctgtgtctcttgccgctgaaggagaagaagcgggagcggaagacgtcctccaagtcctccgtgcgcaagcgccgagtggtcatcgtggaccccgagacgggcaaggagatgtcagtgtacgaggcctaccgcaagggcctgattgaccaccagacgtacctggagctgtccgagcaggagtgcgagtgggaggagatcaccatctcctcctcggacggcgtggtcaagtccatgatcatcgaccgccgctccgggcgccagtacgacatcgatgatgccatcgccaagaacctcatcgaccgctcggcactggaccagtaccgcgccggcacgctctccatcaccgagttcgccgacatgctctcgggcaacgccggtggtttccgctcccgttcctcctcggtgggatcctcctcctcctaccccatcagccccgccgtctccaggacccagctggcctcctggtcagaccccactgaggagacgggccccgtggctggcatcctggacacggagacgctggagaaggtgtccatcaccgaggccatgcaccggaacctggtggataacatcacggggcagcggctgctggaggcgcaggcctgcaccgggggcatcatcgaccccagcaccggtgagcgcttccctgtcaccgacgccgtcaacaagggcctggtggacaagatcatggtggaccgcatcaacctggcccagaaggccttctgcggcttcgaggacccacgcaccaagaccaagatgtcggccgcccaggccctgaagaagggctggctctactacgaggccggccagcgcttcctggaggtgcagtacctgaccggcggcttgatcgagcccgacacgccgggccgcgtgcccctggacgaggccctgcagcgcggcacggtggacgcccgcaccgcacagaagctgcgtgacgtgggcgcctactccaagtacctcacctgccctaagaccaagctcaagatctcctataaggacgcgctggaccgcagcatggtggaggagggcacggggctgcggctgctggaggctgccgcgcagtccaccaagggctactacagcccctacagcgtcagcggctccggctctaccgccggctcccgcaccggctcgcgcaccggctcccgggccggctcccgccgcggcagctttgacgccaccggctccggcttctccatgaccttctcttcatcctcctactcctcctcgggctacggccgccgctacgcctcggggtcctcggcctccctggggggccctgagtctgccgtggcctgaggctgcctgtgcccaccccgctctgcatgcggcccagcccggctcccaccgaggcgcgggggccgttttcaacgcttaaaggtgtcttcctcccaagtggtgcctaaagtttaaccaaaaagaccagactaatatattaatatatatctgctgtccagacagcctgtatcttgggggacagggctggcccagccctgctggccgcctcaccccctcgggtctcctcactcccttctacctgccactcacacagccaggtgccttggagggtcccaagctgggccccagcccaccctcctgtcttcccagggtagcccgcctgccagtcctagctgcacagggcagctgggcccaaccctgtctgtagagggccctggtgtttctagcactggcctgcacggtgggccttgctggggacggggggccccagtcagcctctctcccagtctacccagagaagccccttccccatgggaagacgaggccctcgggcccagcccccacagtgctgtctgatctgtgctttccagctcaccccccacactcactcctgagacccctggcctccggcgtcagcctccagcctctgttcccctagtaagtgccttccatgtcggcctctaaccccaggccccgaggacccagacccagtggggaggcggacgttccagccggctgctgggaactgagactgtctctggtggtcacggcctctcgttgtgggcccactgggtgcggctgcgttttccatgagccccccttggccggacacagtgtgttccctttggcaacctgttagagaccttccccggttggtcc

SEQ ID NO: 494154 - DNA, 4329 bp, Homo sapiens
  misc_feature (194)..(194): n is a, c, g, or t
  misc_feature (196)..(197): n is a, c, g, or t
  misc_feature (206)..(206): n is a, c, g, or t
  misc_feature (224)..(224): n is a, c, g, or t
  misc_feature (1415)..(1415): n is a, c, g, or t
  misc_feature (1538)..(1538): n is a, c, g, or t
tccctttatgcgaccgccgggcctacttaggccatgcgccggggcctgctgagagccacaactgctgcgctcctgctggaggcgcaggcggccagtggctttctggtggaccccgtgcggaaccagcgcctgtatgtccacgaggccgtgaaggcgggcgtggtgggccccgagcttcacgagcagctgctgtntnncgagaaggncgtcaccggctacagagncccctactcgggcagcaccatctccctcttccaggccatgcagaagggcctggttctccggcagcacggcatccgcctgctggaggcccagatcgccacgggcggcatcatcgaccccgtgcacagccaccgcgtgcctgtggacgtggcctaccagcgcggctacttcagtgaggagatgaaccgcgtcctggcggaccccagcgacgacaccaagggcttcttcgaccccaacacgcacgagaacctcacgtacctgcagctgctggagcggtgcgtggaggaccccgagacgggcttgcgccttctgccactgaaaggggcggagaaggctgaggtggtggagaccacgcaggtgtacactgaggaggagacaagaagggcatttgaagagacacagatcgacattcccggcggcggcagccacggtggctccaccatgtccctgtgggaggtgatgcagtcggacctgatccccgaggagcagcgggcccagctgatggctgacttccaggccggccgggtgaccaaggaacgcatgatcatcatcatcatcgagatcattgagaagacagagatcatccgccagcagggtctggcctcctacgactacgtgcgccgccgcctcacggctgaggacctgttcgaggctcggatcatctctctcgagacctacaacctgctccgggagggcaccaggagcctccgtgaggctctcgaggcggagtccgcctggtgctacctctatggcacgggctccgtggctggtgtctacctgcccggttccaggcagacactgagcatctaccaggctctcaagaaagggctgctgagtgccgaggtggcccgcctgctgctggaggcacaggcagccacaggcttcctgctggacccggtgaagggggagcggctgactgtggatgaggctgtgcggaagggcctcgtggggcccgagctgcacgaccgcctgctctcggctgagcgggcggtcaccggctaccgtgacccctacaccgagcagaccatctcgctcttccaggccatgaagaaggagctgatccctactgaggaggcctgcggctgctggatgcccagctggccaccggcggcatcgtggacccccgcctgggcttccaccttcccctggaggtggcttaccagcgtggctacctcaacaaggacacgcacgancagctgtcagagcccagcgaggtgcgcagctacgtggacccgtccaccgacgagcgcctcagctacacgcagctgctcaggcggtgccgtcgtgacgacggcaccggccagctgctcctgccnctgtcggacgcccgcaagctgaccttccgtggcctgcggaagcagatcaccatggaggagctggtgcgctcgcaggtcatggacgaggccacggcgctgcagctgcgggagggcctgacctccatcgaggaggtcaccaagaacttgcagaagttcctggaaggcaccagctgcatcgctggtgtcttcgtggacgccaccaaggaacggctctcggtgtaccaggccatgaagaagggcatcatccgccccggcacggcctttgagctcctggaggcgcaggcggccaccggttacgtcatcgaccccatcaagggactgaagctgacggtggaggaggctgtgcgtatgggcattgtgggccccgagttcaaggacaagctgctgtcggccgagcgcgccgtcactgggtacaaggacccctactctgggaagctcatctccctcttccaggccatgaagaagggcctgatcctgaaggaccatggcatccgcctgctggaggcccagatcgccacgggcggcatcatcgaccctgaggagagccaccggctgcccgtggaggtggcctacaagcgcggcctcttcgatgaggagatgaacgagatcctgaccgacccctcggacgacaccaagggcttctttgaccctaacacggaggagaacctcacctacctgcagctgatggagcgttgtatcactgacccccagacgggcctgtgtctcttgccgctgaaggagaagaagcgggagcggaagacgtcctccaagtcctccgtgcgcaagcgccgagtggtcatcgtggaccccgagacgggcaaggagatgtcagtgtacgaggcctaccgcaagggcctgattgaccaccagacgtacctggagctgtccgagcaggagtgcgagtgggaggagatcaccatctcctcctcggacggcgtggtcaagtccatgatcatcgaccgccgctccgggcgccagtacgacatcgatgatgccatcgccaagaacctcatcgaccgctcggcactggaccagtaccgcgccggcacgctctccatcaccgagttcgccgacatgctctcgggcaacgccggtggtttccgctcccgttcctcctcggtgggatcctcctcctcctaccccatcagccccgccgtctccaggacccagctggcctcctggtcagaccccactgaggagacgggccccgtggctggcatcctggacacggagacgctggagaaggtgtccatcaccgaggccatgcaccggaacctggtggataacatcacggggcagcggctgctggaggcgcaggcctgcaccgggggcatcatcgaccccagcaccggtgagcgcttccctgtcaccgacgccgtcaacaagggcctggtggacaagatcatggtggaccgcatcaacctggcccagaaggccttctgcggcttcgaggacccacgcaccaagaccaagatgtcggccgcccaggccctgaagaagggctggctctactacgaggccggccagcgcttcctggaggtgcagtacctgaccggcggcttgatcgagcccgacacgccgggccgcgtgcccctggacgaggccctgcagcgcggcacggtggacgcccgcaccgcacagaagctgcgtgacgtgggcgcctactccaagtacctcacctgccctaagaccaagctcaagatctcctataaggacgcgctggaccgcagcatggtggaggagggcacggggctgcggctgctggaggctgccgcgcagtccaccaagggctactacagcccctacagcgtcagcggctccggctctaccgccggctcccgcaccggctcgcgcaccggctcccgggccggctcccgccgcggcagctttgacgccaccggctccggcttctccatgaccttctcttcatcctcctactcctcctcgggctacggccgccgctacgcctcggggtcctcggcctccctggggggccctgagtctgccgtggcctgaggctgcctgtgcccaccccgctctgcatgcggcccagcccggctcccaccgaggcgcgggggccgttttcaacgcttaaaggtgtcttcctcccaagtggtgcctaaagtttaaccaaaaagaccagactaatatattaatatatatctgctgtccagacagcctgtatcttgggggacagggctggcccagccctgctggccgcctcaccccctcgggtctcctcactcccttctacctgccactcacacagccaggtgccttggagggtcccaagctgggccccagcccaccctcctgtcttcccagggtagcccgcctgccagtcctagctgcacagggcagctgggcccaaccctgtctgtagagggccctggtgtttctagcactggcctgcacggtgggccttgctggggacggggggccccagtcagcctctctcccagtctacccagagaagccccttccccatgggaagacgaggccctcgggcccagcccccacagtgctgtctgatctgtgctttccagctcaccccccacactcactcctgagacccctgctgaccctcctgttgcacccagccctggtctcagcagcgaccacccctgcctccaccctccgagctttgcatgttccactaaccccgggcgggtggcaggtggaggtgtcaggctgctggcgcctctgcaagggcagaacactaacctgaccgtgggcggggccttgcggtatccgcccccaataaaagcaattccaaccttaaaaaaaaaaa

SEQ ID NO: 494155 - DNA, 4118 bp, Homo sapiens
  misc_feature (194)..(194): n is a, c, g, or t
  misc_feature (196)..(197): n is a, c, g, or t
  misc_feature (206)..(206): n is a, c, g, or t
  misc_feature (224)..(224): n is a, c, g, or t
  misc_feature (1415)..(1415): n is a, c, g, or t
  misc_feature (1538)..(1538): n is a, c, g, or t
tccctttatgcgaccgccgggcctacttaggccatgcgccggggcctgctgagagccacaactgctgcgctcctgctggaggcgcaggcggccagtggctttctggtggaccccgtgcggaaccagcgcctgtatgtccacgaggccgtgaaggcgggcgtggtgggccccgagcttcacgagcagctgctgtntnncgagaaggncgtcaccggctacagagncccctactcgggcagcaccatctccctcttccaggccatgcagaagggcctggttctccggcagcacggcatccgcctgctggaggcccagatcgccacgggcggcatcatcgaccccgtgcacagccaccgcgtgcctgtggacgtggcctaccagcgcggctacttcagtgaggagatgaaccgcgtcctggcggaccccagcgacgacaccaagggcttcttcgaccccaacacgcacgagaacctcacgtacctgcagctgctggagcggtgcgtggaggaccccgagacgggcttgcgccttctgccactgaaaggggcggagaaggctgaggtggtggagaccacgcaggtgtacactgaggaggagacaagaagggcatttgaagagacacagatcgacattcccggcggcggcagccacggtggctccaccatgtccctgtgggaggtgatgcagtcggacctgatccccgaggagcagcgggcccagctgatggctgacttccaggccggccgggtgaccaaggaacgcatgatcatcatcatcatcgagatcattgagaagacagagatcatccgccagcagggtctggcctcctacgactacgtgcgccgccgcctcacggctgaggacctgttcgaggctcggatcatctctctcgagacctacaacctgctccgggagggcaccaggagcctccgtgaggctctcgaggcggagtccgcctggtgctacctctatggcacgggctccgtggctggtgtctacctgcccggttccaggcagacactgagcatctaccaggctctcaagaaagggctgctgagtgccgaggtggcccgcctgctgctggaggcacaggcagccacaggcttcctgctggacccggtgaagggggagcggctgactgtggatgaggctgtgcggaagggcctcgtggggcccgagctgcacgaccgcctgctctcggctgagcgggcggtcaccggctaccgtgacccctacaccgagcagaccatctcgctcttccaggccatgaagaaggagctgatccctactgaggaggcctgcggctgctggatgcccagctggccaccggcggcatcgtggacccccgcctgggcttccaccttcccctggaggtggcttaccagcgtggctacctcaacaaggacacgcacgancagctgtcagagcccagcgaggtgcgcagctacgtggacccgtccaccgacgagcgcctcagctacacgcagctgctcaggcggtgccgtcgtgacgacggcaccggccagctgctcctgccnctgtcggacgcccgcaagctgaccttccgtggcctgcggaagcagatcaccatggaggagctggtgcgctcgcaggtcatggacgaggccacggcgctgcagctgcgggagggcctgacctccatcgaggaggtcaccaagaacttgcagaagttcctggaaggcaccagctgcatcgctggtgtcttcgtggacgccaccaaggaacggctctcggtgtaccaggccatgaagaagggcatcatccgccccggcacggcctttgagctcctggaggcgcaggcggccaccggttacgtcatcgaccccatcaagggactgaagctgacggtggaggaggctgtgcgtatgggcattgtgggccccgagttcaaggacaagctgctgtcggccgagcgcgccgtcactgggtacaaggacccctactctgggaagctcatctccctcttccaggccatgaagaagggcctgatcctgaaggaccatggcatccgcctgctggaggcccagatcgccacgggcggcatcatcgaccctgaggagagccaccggctgcccgtggaggtggcctacaagcgcggcctcttcgatgaggagatgaacgagatcctgaccgacccctcggacgacaccaagggcttctttgaccctaacacggaggagaacctcacctacctgcagctgatggagcgttgtatcactgacccccagacgggcctgtgtctcttgccgctgaaggagaagaagcgggagcggaagacgtcctccaagtcctccgtgcgcaagcgccgagtggtcatcgtggaccccgagacgggcaaggagatgtcagtgtacgaggcctaccgcaagggcctgattgaccaccagacgtacctggagctgtccgagcaggagtgcgagtgggaggagatcaccatctcctcctcggacggcgtggtcaagtccatgatcatcgaccgccgctccgggcgccagtacgacatcgatgatgccatcgccaagaacctcatcgaccgctcggcactggaccagtaccgcgccggcacgctctccatcaccgagttcgccgacatgctctcgggcaacgccggtggtttccgctcccgttcctcctcggtgggatcctcctcctcctaccccatcagccccgccgtctccaggacccagctggcctcctggtcagaccccactgaggagacgggccccgtggctggcatcctggacacggagacgctggagaaggtgtccatcaccgaggccatgcaccggaacctggtggataacatcacggggcagcggctgctggaggcgcaggcctgcaccgggggcatcatcgaccccagcaccggtgagcgcttccctgtcaccgacgccgtcaacaagggcctggtggacaagatcatggtggaccgcatcaacctggcccagaaggccttctgcggcttcgaggacccacgcaccaagaccaagatgtcggccgcccaggccctgaagaagggctggctctactacgaggccggccagcgcttcctggaggtgcagtacctgaccggcggcttgatcgagcccgacacgccgggccgcgtgcccctggacgaggccctgcagcgcggcacggtggacgcccgcaccgcacagaagctgcgtgacgtgggcgcctactccaagtacctcacctgccctaagaccaagctcaagatctcctataaggacgcgctggaccgcagcatggtggaggagggcacggggctgcggctgctggaggctgccgcgcagtccaccaagggctactacagcccctacagcgtcagcggctccggctctaccgccggctcccgcaccggctcgcgcaccggctcccgggccggctcccgccgcggcagctttgacgccaccggctccggcttctccatgaccttctcttcatcctcctactcctcctcgggctacggccgccgctacgcctcggggtcctcggcctccctggggggccctgagtctgccgtggcctgaggctgcctgtgcccaccccgctctgcatgcggcccagcccggctcccaccgaggcgcgggggccgttttcaacgcttaaaggtgtcttcctcccaagtggtgcctaaagtttaaccaaaaagaccagactaatatattaatatatatctgctgtccagacagcctgtatcttgggggacagggctggcccagccctgctggccgcctcaccccctcgggtctcctcactcccttctacctgccactcacacagccagcttgtggagccccacactggggtgccgcctgcccgtctctctcccatggagccccagccccctttgggcccagggacaccagccaggctctgtgctgaccctcctgttgcacccagccctggtctcagcagcgaccacccctgcctccaccctccgagctttgcatgttccactaaccccgggcgggtggcaggtggaggtgtcaggctgctggcgcctctgcaagggcagaacactaacctgaccgtgggcggggccttgcggtatccgcccccaataaaagcaattccaaccttaaaaaaaaaaa

SEQ ID NO: 494156 - DNA, 636 bp, Homo sapiens
caaaccctgaactatgcgcatggcttttcccgggacgaaaaaccccagtcagcctctctcccagtctacccagagaagccccttccccatgggaagacgaggccctcgggcccagcccccacagtgctgtctgatctgtgctttccagctcaccccccacactcactcctgagacccctggcctccggcgtcagcctccagcctctgttcccctagtaagtgccttccatgtcggcctctaaccccaggccccgaggacccagacccagtggggaggatggctgggaactgcagacctgtcctcctggtgggtccaggggcccctccagcttgtggagccccacactggggtgccgcctgcccgtctctctcccatggagccccagccccctttgggcccagggacaccagccaggctctgtgctgaccctcctgttgcacccagccctggtctcagcagcgaccacccctgcctccaccctccgagctttgcatgttccactaaccccgggcgggtggcaggtggaggtgtcaggctgctggcgcctctgcaagggcagaacactaacctgaccgtgggcggggccttgcggtatccgcccccaataaaagcaattccaaccttaaaaaaaaaaa

SEQ ID NO: 494157 - DNA, 1116 bp, Homo sapiens
  misc_feature (194)..(194): n is a, c, g, or t
  misc_feature (196)..(197): n is a, c, g, or t
  misc_feature (206)..(206): n is a, c, g, or t
  misc_feature (224)..(224): n is a, c, g, or t
tccctttatgcgaccgccgggcctacttaggccatgcgccggggcctgctgagagccacaactgctgcgctcctgctggaggcgcaggcggccagtggctttctggtggaccccgtgcggaaccagcgcctgtatgtccacgaggccgtgaaggcgggcgtggtgggccccgagcttcacgagcagctgctgtntnncgagaaggncgtcaccggctacagagncccctactcgggcagcaccatctccctcttccaggccatgcagaagggcctggttctccggcagcacggcatccgcctgctggaggcccagatcgccacgggcggcatcatcgaccccgtgcacagccaccgcgtgcctgtggacgtggcctaccagcgcggctacttcagtgaggagatgaaccgcgtcctggcggaccccagcgacgacaccaagggcttcttcgaccccaacacgcacgagaacctcacgtacctgcagctgctggagcggtgcgtggaggaccccgagacgggcttgcgccttctgccactgaaaggggcggagaaggctgaggtggtggagaccacgcaggtgtacactgaggaggagacaagaagggcatttgaagagacacagatcgacattcccggcggcggcagccacggtggctccaccatgtccctgtgggaggtgatgcagtcggacctgatccccgaggagcagcgggcccagctgatggctgacttccaggccggccgggtgaccaaggaacgcatgatcatcatcatcatcgagatcattgagaagacagagatcatccgccagcagggtctggcctcctacgactacgtgcgccgccgcctcacggctgaggacctgttcgaggctcggatcatctctctcgagacctacaacctgctccgggagggcaccaggagcctccgtgaggctctcgaggcggagtccgcctggtgctacctctatggcactgtttggactctgggcactgtttggactctgggcactgtttggactctgggcactgtttggactctgggcactgtttggactctgggcactgtttggactctgggcactgtttggactctgggcactgtttgaactctg

SEQ ID NO: 494158 - DNA, 784 bp, Homo sapiens
  misc_feature (326)..(326): n is a, c, g, or t
gccgtcgcgagcgtctctgggaccggaagtgcgggcgagctgcgtgtccccgggttctgacaggagcagcctgtgggcacctgcggcggtagttggaggcgggagagggtccgtagcctgcgccgtcctgccccgtccatgggtccttcctgtcggacctcggttctggcgggctgcggctgctcgacccgacctaagtgctgctgcactcaagcgcggccgattggtgcggtgactggagctactgtaggaggcgcatcgcactggattcttgggcgcgtggcttttcgccgcccgcatgaccccagaggcactgtacattgtcngtgacgaactgccagtggagtctccgagcccatgggtcggacgtgcagcaggtatttgctggtgctggatgaccctgtagcccggggcttttttagcccggagggagcttctgcccggaccaatccgcaaaggagcgtcgcgggagcgtctgccaagttgggccctgagcttgaagcgggacggatggcggtcagctaggagctggcaggtctacacggccagagtttcgtcccgcgaagactgccccttcccagagtgagacccacgaagcgctatactggtgtcgaggcaccaaacgtgtaccggcaatccttgcggtgccccgcggtgactggccagacaccggaagtcagcttgttgctacaccagtgcccctggtgggctctggactactaccaaacatgccaggactggtggggcctgcctggctggcacttggctggcccactttccgaga

SEQ ID NO: 494159 - DNA, 121 bp, Homo sapiens
cacaacacctccatctcatgcatcatccttaatgacatatcatatacgaaactatgcaatatatcagtatgctgtaatggtacgactcatcgaatcagtcaactgttctgtgtgaatgtat

SEQ ID NO: 494160 - DNA, 300 bp, Homo sapiens
taggctggagtgcagtggcgtgatctcactgcaccctccacctcccagattcaagtgattcttctgcctcagcttcccaagaagctgggattacaggtgcgtgccaccacatctagctaatttttgcatatttagcagagatggagtttcactgtgttggccaggctgatcttgatttcctgatctcaggtgatttgcccaccttggcctcccaaagtgctgggattataggcatgagccaccacgcccagccatttctcattgttaacacaaaggtaaaagcccttctgtcgtcttctc

SEQ ID NO: 494161 - DNA, 584 bp, Homo sapiens
ctcaccaaatggattatgggccatggctggtagttttagtgagtgctgtagggttaattcgaaaataggcagaattccattcctcccaaggtggccaaatttagctatactgatgtaattgtcctttacctgggtatggattccctggcaccccttcatgtccacatatgtagccaattttgtggaaacataaccatttggagcttctgtaattttgagccctgctctaaccaccagcctaatataaaattagtttggttttgccagtctaccaatgagctcctgccacaggactcccagccctttttcttttttcccctaactttagccatggaggatcttgggccctttatttttggggtttttttaaatcccgaagggatatagaaaccctttccgatttttcctctggtttggtcttgccgatggttttctatccaaaaccctttttttccctaccgatatttggtgccccggccgatactgctggattttggcctttttttttccggtcctttaaaactgccaaacccatttggttcctgggcccaactggctttaaattaattttcctgttttttgga

SEQ ID NO: 494162 - DNA, 308 bp, Homo sapiens
  misc_feature (32)..(32): n is a, c, g, or t
agtggtacaatgataatcttcattttacgatntgaatttcttggccgggcttggtggctcacgcctgtaaccccagcattttggaaggctgaggcaggaggatcacttgagcccaggagttggagaccagcctgggcaacatagtgagacccccatttctacaaaaaataaaaataaaaaatgagccgggtatggtggtgtgcacctgtggtcctggctacttgggaggctgaggtgggaggattgcttcagccagggaggtggaggctgcagtgagcctaggcaacagagagaggcttcatgtcaaa

SEQ ID NO: 494163 - DNA, 723 bp, Homo sapiens
gcgaatgggttgagacctcaggattgtctcgggagctgacataatgacacatgcctgcgatcagcctggggataggacaacagactacaccatccacgtttggttcattgctgccgaggcctatgctcgtttactataccagagctttatgggtagaatcccggcgctgcccacgagttctcttttacaagcaatcgatgtctgcgtcatacctgaggtccatgcatgtgaacgtagacttctgacatcgcactgcgtcaattccctctggatgctgccatcacttttgctccgtagcatccttgttgtaccccgaggtcactggtgcatggaggtgtaccatggtacctgtgcaaaggacccagcttcccagtagccattaagagaagaggcaggacgctagaacggccgtatcggtgatccatgaacgtaggtagcacgtcgtgaagctacggctatcgttgttccaacgcctagtcaactcttacacgataacgacctggccttggacgttgtgcccgcatgatgttggccttttgggtggtgccgccgaatggcacccgtgatgacgatacatgcgttggaggcgtggtggcgtcaaggcatccatgagctcagtgcccaagccgcgtggcgtcgtaatcgagagacctcagtgctactcaccgagtctgcttcgcattctcacgtgatgctctggtcccatatctggtaggacaagtg

SEQ ID NO: 494164 - DNA, 1064 bp, Homo sapiens
gctcctggatgggtcccgactgctgcaggaggtggtgatgagcctgtccaagtgctactcctccctgcctggactcgatgaacgctgagatccgcatccgctggctggagattgtggtccgaaagactaactatctgacctccacagggtgcggcgcttcctggagagccagatgtcacgcatgtacaccatcccgctgtacgagtacctcctgcaccggtgccctcaagtccttcgcgcttggaggtcttctaccagacgcagggccggctgcacaccaacctgcagcaatagccatccagcagatcctgtacccagggctagggctcccagcaaagagcccgactcagagcacaagcacggagctgggacaaggctggaaggaaaaaaaacagaatccggacgacaagaagggcccttgtcttgcttgtacggaccgagtgagcacacaaggaagtgacaatccatactactcagaggacgtcaaatgtggtcttgccataaggcacctgataggacggagcttgagccatcgaaacctatccaggacaacaccacaaatgttggcctaccctgaaggtcaaaggcactgagccctgcaactgcgaatatcggggccactggagccatatatgcttccatagcaagtgacctacaaagaacccattcaccaataggatatacccaatggggaaagggaagaaataggcgagacgatgaggaccatcccattaatactgcttacgcaagcagacagcatattacaattggtattctccccaatacaaaggcacacaataaaacagcaatacccattaacaaaaacaagtactacaaatctctcacctacacaactgacgaactaacctaccacccggaatcaaaacacgacacagtccacacctaagacatcgacaacaaaacaaaatataccgcaacataacaatagatacacaggtccagtcaactacaataaacactcatacgaacataaaccataaaatacgactccaccaaaacaacacacacaagcaacacacaacaacacaactaaaactctacct

SEQ ID NO: 494165 - DNA, 222 bp, Homo sapiens
gaagggcgaatcctaaacacatgcgtattactggtataaggagtataaatcacctgagctaaccatagcctattagaaggctaccgatgccaaatgatttaagcactgcttattacaattgtactggggctatatttaaccctcctacaaccgttaaagaactttgagctggccttcactatttccgacgtgctatacggataaacatttttgggtgcctca

SEQ ID NO: 494166 - DNA, 127 bp, Homo sapiens
gcaacgcgcgcggaggaggcaggaaccggagcgcgacagttagcttggttaggcaccatggcttgggatcaacaaccatcgaggccggtgaagcgcaagattccaggttcttgcagccagcaggcag

SEQ ID NO: 494167 - DNA, 327 bp, Homo sapiens
tggagccaagaggatggcggagctgtggctgtggccacggggcaaacagcataagcgcgggtgggttgtgttggaagaaacgggatggtaaaaactggcctaccgatggagagaggaaaggagaggcagaagaggggagaaaaacgagaaaagggtaaaagggctgagaaaggggagaatagaagaggattgcaacaaaaagccaagggcattaagtgtggatttctcctgaaggcaggagcgcataggctaaattagatctgagtcggacattggattaaaactggttgtagccttttattaaggggtagacacactttttctttt

SEQ ID NO: 494168 - DNA, 284 bp, Homo sapiens
  misc_feature (65)..(65): n is a, c, g, or t
  misc_feature (92)..(92): n is a, c, g, or t
  misc_feature (276)..(276): n is a, c, g, or t
  misc_feature (281)..(281): n is a, c, g, or t
ccaaggctcaactctgcagtttatactatatggcaacatttgccttctacgattgaggtatacancctattttcagggtgtttgtgtaggtnaaggcagtccattatgtcacacagcgcaggacatagcaagtgctcactattatatggcagctgagacagctatgtagataattcagattgagaaacaacccagtgtatcccaaattacccagacactgtctatatataatattctcttggagtaatcagtataggataacataagaacactggnctcanaat

SEQ ID NO: 494169 - DNA, 230 bp, Homo sapiens
  misc_feature (137)..(137): n is a, c, g, or t
gtactgatcgctaggaggcccctgtatcagttgctgctgggtggagcagtggtgttgtgttcagctggaggatgaatcagtgtcagaggtgtacactacttctgcgtctctgcagcttcgcacgccagcgagtgccnatgtgcttgtaggcacgcaggatgccatcagcgctgcgaatccccgggttatcgacgacagcagagcccgcaagctctccacagatcttaagc

SEQ ID NO: 494170 - DNA, 367 bp, Homo sapiens
aactcatccattccaaaatatgcccggtgctatacgcacagctagctcctagaccaaacatttagtactattagaccagcttcatacacaggttccacgagtcatgtcaacacagcgtgtaagctaacacatcaacacaaacaatgggtccacgtcctgcagatgcagccgactgcagaataactacctgctgtccgcaccgttccacagtataaatatgctgcaggagttcgcaatcctcagcaacatcttaatgcacaagccacaagttacaatgcaacagcctgctgtccatgtacaaggtcaggaacctttgactgcttccatgttggcatctgcccctcctcaagagcaaaagcaaatgtag

SEQ ID NO: 494171 - DNA, 310 bp, Homo sapiens
ccttgggctttttttttgggaggggggggggggggggggccccccaaaggggccctttcccacgccccccccccccccggggggccccccaagggggggccccccctttttttttcccccccctttggtaattagggggggccaggggtggggggggggacaaaccccggggcggcccggggggggttttcccctttttccccccccccgccctttgggggttttgggggggggggccccctcccgggggggggggggggggacccccccgggggggttccccccttgggaaaacccctgggttgggcca

SEQ ID NO: 494172 - DNA, 166 bp, Homo sapiens
  misc_feature (14)..(14): n is a, c, g, or t
caggcagaagaaanaaaatatgtatggatatatataacaatagaaatgtattctctctgttctggtggccagacatctgaaatcaaggtgtcatcagggctgtgctccctccagagattcaaggggtgggtccttctgtgcttcctccagctcttggctcttaccg

SEQ ID NO: 494173 - DNA, 326 bp, Homo sapiens
gggtatggcaggaccccggagggaggaaaggaaaaaggtggagcgaagaaaggaaacggagacccagaaaggagaggagagggagggaaccagcacgacaagagcagcgagggaccaacgccggggacgaggaacaaagacagcgacaagaaaagagaccgcggagacaaaccgaaagaagggagaccgccggaaaaaacggcagaaccgcgacagaaggaaaccaacaccgagggaaaccaaaaaagcgaccatacgagaaacgaagcccagaacccaccagcaaaacgcacgggagagaagggccacgaacaagacgccgcggc

SEQ ID NO: 494174 - DNA, 287 bp, Homo sapiens
  misc_feature (53)..(53): n is a, c, g, or t
  misc_feature (57)..(57): n is a, c, g, or t
  misc_feature (61)..(61): n is a, c, g, or t
  misc_feature (73)..(73): n is a, c, g, or t
  misc_feature (98)..(98): n is a, c, g, or t
  misc_feature (110)..(110): n is a, c, g, or t
  misc_feature (138)..(138): n is a, c, g, or t
  misc_feature (157)..(157): n is a, c, g, or t
  misc_feature (208)..(208): n is a, c, g, or t
  misc_feature (246)..(246): n is a, c, g, or t
  misc_feature (286)..(286): n is a, c, g, or t
gaagtttcgctcttgttgcccaggatggaggtgcaatggcatgatctcaaaanaganaganagaaagacaganatagaatagacactgttctaaagangattcacaaatnaccagtaagcacatgacaatatactcanatgtcactaatcattaggnaaatccaaatcagaactacagtgagttacaagatactgccttacacccgtnagtgtggctactgaaaacaaacaaaccaacaacaaggncaaaacccagaaataacaagttttgacaacaatgtggggna

SEQ ID NO: 494175 - DNA, 117 bp, Homo sapiens
  misc_feature (2)..(2): n is a, c, g, or t
  misc_feature (93)..(93): n is a, c, g, or t
  misc_feature (99)..(99): n is a, c, g, or t
tncattgaaggattggttattctagacttctctgactggcgtgttttggctttaattagatatttttgcttagactttttaaataatttaccnttcttnttttccccagtagtttgc

SEQ ID NO: 494176 - DNA, 212 bp, Homo sapiens
tcccttcgactgtggactcagagtggaactacgtgtttacacgtacggcaggcagccttgtgtatggaggcacacacgtccaagtctatcaggaagaaggggcactgggagctgcacagacagcaagcagcatgctcgatagaccacgaggatctgagtctgaattggagattacttacgaacaatgactccatggggtgataccttcgaag

SEQ ID NO: 494177 - DNA, 95 bp, Homo sapiens
gagtatatccacaaatgttcacttctaaaacgatattctttgaaataattattatttgagtagagataaagctttggcctgcattatattctctc

SEQ ID NO: 494178 - DNA, 266 bp, Homo sapiens
acacctgactggattgaaatgcagtgcaatgcaatacggtggaatacaattgaatggcagtgcagtgcagtgcaatgaaatgcaatgtaattccgaacaaatggaattcaatggcagtgcagtgcagtgcaacggattgccaaggaatgggaaggaattggcaattgaatggcactgcggtggcaatgcagtgaagtggaatgccatgcaattgcgttgcgtgcagtgtaatgccatgccatggaatggaatggattcgaatggaa

SEQ ID NO: 494179 - DNA, 271 bp, Homo sapiens
  misc_feature (46)..(46): n is a, c, g, or t
cacgatcccgacggatatatgttgttatgaggcttttgatactatnatgctatagtaattacggctatggaatatgctttatatcgaattagagatgaagaggttgggaggacattgctatgttggagctggttatgcatgttcaggttttcatggtggtcatttcgtacattttagcagggttgccttttcgtgcaacttaaaattacattgctaatttcttctcaccactaatattcaattacgagttcatattgatattggagcttat

SEQ ID NO: 494180 - DNA, 404 bp, Homo sapiens
cagatcacctgaggtcaggagttcgagaccagcctggtcaacacagcgaaaccccatctctactaaaaatacaaaaaattagccgggcgtggtgatgcatacctgtaatcccagctactcgggaggctgaggtaggaggataaacttcagcccgaaaggtcgaggctgcagtgagccatgaccacaccactgcactccagcctaggagtcagagcaagacctggtctcaaataaataaataaataaataaaaagccagcagctttttatagaaacttggcaagctaattttaaaaatcatatggagccagacatggtagcgtgtttgtgtagttgcagctactcaggagactgaggtaggaggatcacttgagcccaaaagttggaggccagcctaggcaacat

SEQ ID NO: 494181 - DNA, 332 bp, Homo sapiens
ccacaggtggcagttctcatctgatggtgcagatattggctttggggttttcctgaagaccaagatgggggaacggcagcgggctggggagatgacagaggtgctgcctagccagcgctacaatgcccacatggtaccagaggatggaagcctcacctgcacagaagctggagtctgtaagtttgccctgggaggttggagccacctatcccatggtttagggacagaaacaggggtagtattcaggcacatacagcctaggtcagtgccattcatccatacagtcactcattcagtccacactctcaagtgcaccttcggtgccctaggag

SEQ ID NO: 494182 - DNA, 482 bp, Homo sapiens
  misc_feature (156)..(156): n is a, c, g, or t
  misc_feature (163)..(163): n is a, c, g, or t
tcctttcaaggtccccgtgatcaacatcccaacgaaccctccgggccgaccatgtggtttggtccctgttcaacaccctcttcttgaactggggctgtgtggggttcatagcattcgcccactccgtgaagtctagggacaggaaaatggttggcnacgtgcncggggcccaggcctatgcctccccccccaagggcctgaacatttgggccctgattttgggcatcctcatgacccttggattcatcctgttactgggattcggctctgtggccgtctcccctattttgtttccgataatacaggaaaaacgggggttttagtaaccgcccctagcctgccacctttgccctcccctgtgcaatgctggccctgcccgctgggggtgttgcccccgcccccttggtcctgcccctaaaaacagccgtttatacccccccccccgttttcagggtccttccataaagggcccgggcttgtga

SEQ ID NO: 494183 - DNA, 751 bp, Homo sapiens
gatgtgtgcacagctatttggacaatgactacccatattcattagtcgttgggcattttgtaaattatcttataattgagctaattgtaatctttaagcagtaatattacacaacaaaaaccgtgtataattattattaaactaataatgttgtctctctggctagatattaaactccttgagggcagggactgctctggacctgtatgtaatggggtgcccagtgcctgatactgtgcctaacacatacggtggaggtcaaaatatatgttgaataaatcaatgtatgagtttgtccatgagggcaataaaggggaaaacgtaaggggaaaagcatccagagaatagttcccactggtttaggctagacaagcaatgtaccaatgttttggttgccccagagtccctagtacggagctatttcctacatcattcaccatcctgagcacagagaccttctgaagtcttattccattgttgcctttaacagcaaagaaaaaagaaacttggaagccagctccctggatgtactgtatatcttttgaaaacaaaaagtggtctttggtcatttcagagaaattttaaattcatggtaatatgaaaaagaactcattgtttaagaaaaatattttggccaggcacagtgctcatgcctgtaattccagcactttgggagccaaggcatgaggaacatttgagaccaggggttcaacactagcctgggcaacatagtgagacccccacttctaca

SEQ ID NO: 494184 - DNA, 312 bp, Homo sapiens
  misc_feature (14)..(14): n is a, c, g, or t
  misc_feature (78)..(78): n is a, c, g, or t
  misc_feature (84)..(84): n is a, c, g, or t
  misc_feature (92)..(92): n is a, c, g, or t
  misc_feature (105)..(105): n is a, c, g, or t
  misc_feature (138)..(138): n is a, c, g, or t
  misc_feature (149)..(149): n is a, c, g, or t
  misc_feature (155)..(155): n is a, c, g, or t
  misc_feature (175)..(175): n is a, c, g, or t
  misc_feature (180)..(180): n is a, c, g, or t
  misc_feature (191)..(191): n is a, c, g, or t
  misc_feature (203)..(203): n is a, c, g, or t
  misc_feature (208)..(208): n is a, c, g, or t
  misc_feature (213)..(213): n is a, c, g, or t
  misc_feature (243)..(243): n is a, c, g, or t
  misc_feature (245)..(246): n is a, c, g, or t
  misc_feature (249)..(250): n is a, c, g, or t
  misc_feature (260)..(260): n is a, c, g, or t
  misc_feature (263)..(263): n is a, c, g, or t
  misc_feature (273)..(273): n is a, c, g, or t
  misc_feature (276)..(277): n is a, c, g, or t
  misc_feature (279)..(280): n is a, c, g, or t
  misc_feature (282)..(282): n is a, c, g, or t
  misc_feature (284)..(284): n is a, c, g, or t
  misc_feature (291)..(292): n is a, c, g, or t
tatacgtcattggntaacaggccctccggggatcgacaggtgtgcattgtttgcgtattgctatatttcccgcaaatngccatnttttctangacaaaaagtcantttgtggtttcgggtctaccacaggcctagctnctcggcggggngtatcnatgtcgatatctgcgtttgngactntgggggtgggngttgggttcggnggggngctangtgctgctccatctatgaatggctccgatntnnggnntgggaccccnttngactgccccnganngnncngnggccccnnggcccccaagttgctgctta

SEQ ID NO: 494185 - DNA, 122 bp, Homo sapiens
caagtgatctgtatgattctgtagatcaaaacagttataggtcaacttggtatctagcatttgggaggttaagcaggtgtactgcttgaggccaggagttcaagacagcccaagcaaatagt

SEQ ID NO: 494186 - DNA, 205 bp, Homo sapiens
accaggatgggccctcgaccctgcagccctgcatcgaccctcattgagaagcccagcaggcccccgggcattctggccctgctggaccgaggcgtgctggttccccaaaagccaccgacaagagcttcgtggagacggtgattgcaggagcaggccacctaccccaagttccagaagccaagccagctgaggacaagctgtttct

SEQ ID NO: 494187 - DNA, 1245 bp, Homo sapiens
catgccgcctggttttttgttagcaggtcccatctgtttttgtcctccttctttttaggctctccctgttgggcgcctgttgtcctccttgtgtggggagtgttctttagttgctctcgcgggtcccctcttaggggccccccttttgtctctccccgaggcccgcagccgatcttattaatcggacattgttggcccttctgttttcggtgattcccaggaggccctggggaggacagttttcttgtgtccaggttctgtgcacaattgttggccacgtgggaacgcccctgcgtgagtggctccggtgttttagtcccccccccgggatattttggtccccagagggcgcctgttcgttagaggtttttggcgttctgggcccccctggggggccccctcccccattttgcgtggccccgtgtttccacttctcttggggacacgtttcctctgttcccccggttctccaggccaacccgttccccgggatccccccgggcgtttttttggtggttatcgggacccccccggggcttgtccccccccagcccgtttttctcccggatggccctatcttgtaatggtgtcacccgtaccggcgcccatgtgccccgtggtgtacaccacccgcggtttcttccctcttgccgctttatatgtggcaccattgccccatatcccatgccacaccccccaagagggagcctccccctcgcagatgggtttttgaatgttggtggtatatcgtggcttcgcggaaaatttttgccccatagcctgcgcccccatttctcccgtggaacacccccataggggaggtccataccctgtatcttggtgacattcttcaccagaagtatcccctggaagaagatattgtataaaagagaagaacccaggcttgcctgctgagaaagcgcccggggaccccagggaggaatttccagggtgatatggactgctctccccgtccctgagttccacctgcgtacctccacccctgaggttcccagacatggtcctgacaggtgtcaccaggtgccctctgggcctattccagcctattccctgactgaagactggagccgctccagcctgcccccggaagactggtctcccagctccccctgctccaggcccctgaatgggttaggagcccacccctgactggttttaagctgtttttgcataggctcttaacccaccctgggaaaatggttgatggaaaataaacccccgttt

SEQ ID NO: 494188 - DNA, 716 bp, Homo sapiens
cccagatactcagcgatgttctgagagcaggagaatcgcttgaacccggaacgtggaggttgcattgagctgagattgagccattgcactccagcctgggcaacaagagcaaaactccatctcacaaaaaaaaaaacaaaaaaccgacagattgcctgaagaacatgggataaatatattaaaacaaaagaggattaacatgtgacatcacagatatatgcaccggacaatggggacgaaccccaggaaacacatatacaagaaacacttggagaaactggagcgaacacaagacgaatattccattcataccccccagtggaaccagagcaagagatcagagagaacacaaatcgcaacacgccgtgagagtagaaagactgcaattcgcgcccctatactcaacaaaaacatccagaaatcatcgagtgacagacacacatacagctaatcacaccctagaacatcacgccatgagcgagacggaccacccaagcgccacccacagatggaaatacaacaagaagataaacccactggagcgacaccaaagagaatacatgatgaaccacaaccacaaacacaaatgcagagagacactacaaactaggggagaaaaaataaccagaacaatacaacaagaaactgcaagcaaataagagagagaaagaggggaaaaccagacgggcaccaccgctacagatcattacaaacct

SEQ ID NO: 494189 - DNA, 106 bp, Homo sapiens
cccaggaacgttgtgatgtggctgaacaacccagcactgctgattttgctgctggcactcttcagtcgcacgcgcagaactaatcgtccccttccccctccgcctt

SEQ ID NO: 494190 - DNA, 105 bp, Homo sapiens
gttctcttcctcaaaagcttaggtataaatgctcagaacagttatttaaaaataatgcaaacaaataaaacaaaaaaacctgccagcagatcctgctgaaatact

SEQ ID NO: 494191 - DNA, 421 bp, Homo sapiens
ccttttttaggggaaaaccccgccttttttttaaaccataattttaaaaaattttgggccaagaaaagggggaaatatttggggaaaaatttttttccccttttttccaattggatttccccaatgggatggttccccttgggccataggaatagggtttaatggggggggacttgggttttttaggcccggttttggggggggggccaaaatgggccccttaggggtgtgtttattgttaaaaaccaaaaggggattttggggggtttttctggggcccctaaggggaaagatttttgctttggggggttcccaaaaaggggctcctttttttccggggtttggggaaaatttttgggaaaagttttccgggccttcccgggttttggcgggcccaaattaaattttttggcccccctta

SEQ ID NO: 494192 - DNA, 627 bp, Homo sapiens
agcgggtgtgccgggagcgcccataggggggaggaggtcttcggaggcatgctctgaggctggcagtgtcccgtaggccgcatggataggcgagacgagatggtggaggaggcgggtggaaggttatgacctgcaagaaagaatgcccgtagaataactactgccttcagtgtttcacctcagcgctcgtgcgaaaagtcaggcgttcagcgcagaaatgagttgggaaggacaccaataagggctacctggacgaatgacggattagcgcacggggttgctgcacagatcactcgtacatccgtccacagacagacttatgatggggaacatatatggttcaccggaggaagacaggaaccaggagcggagggggggaatggttctttcctatcgtttggatgggcaagctaatcgcactaaaggactggggggcgtgagtataccttgttcgggaattggaatgggcctttgacaatgggtgccccaaaaggggcaaggtattaacctaggctttaaccagaaaggaactggggggggaacagctttcttcccaagggggttgaccgttattggtaggaccgggatgagcttggaatcggggcccatgccccagggatatatgcc

SEQ ID NO: 494193 - DNA, 285 bp, Homo sapiens
gatcattcctgtattaaactttcacatgccaaaaggtttcgtgccgttttatctgccatccgtgtttgacctgtttagggcagaggcaataagtcagaagtcttcaagttgccatagttccatgtgtgtcattggactggcttataaacagctgtcttggactctcccttccttaacactgactggtcatcactatcattagcgaaaaagcaacaaattgttcgttatcatccctttacacagataagctgactggtgggcttcaaataataaaaacatacacat

SEQ ID NO: 494194 - DNA, 175 bp, Homo sapiens
gcacgagagaataggagctagggtctacagaagtggagcacattgtaactggatgacaacagtggcccagcaaaaccacagaaacttaatgagaaacttaatttgctccccttggtttaatgactttttaatatttaaagatgtttgctaaacctctaatcctcaaaacaaaaat

SEQ ID NO: 494195 - DNA, 421 bp, Homo sapiens
acattctcctaagacactatctcgtctgcatatactagactgcaatggctgttaatgctcctttactgacttaccttagtttgaggttaaagagtcatgctttagtctcgtagcatatctaaatatatatttcttaatgacgtctaatattcatgtacattgatatacacatatgctatgtcctcagttatagagataatccacactaccaagagactgctgatctggattcatgtatatcctcagcgtcaagcctaggaaagtagagtccatagtaggttgcaaacagctgttctccataatattaggtgtgttagagtagcttatatgtacctctgtatacataccccattcatgtctgtgtctctctttcatttaaaaccttgagtaaccctgtcatagtacagtgagtggtgtatgt

SEQ ID NO: 494196 - DNA, 126 bp, Homo sapiens
ccgcaatgacccacccaccccaaacaaaaccaaaaccaaacagaacaaaacaaaccccatctgaaaccaaacctttggatgatgaagtttaaagagtcaataaatagaaacaccagatgactgcaa

SEQ ID NO: 494197 - DNA, 772 bp, Homo sapiens
ggcgacgcggcggctgcggggactggtgcggcggtgctgagagtgttgctggcggcgtgctgcgtgcgcagccccgggcgtgcgggtgggaagatggactaccatgatgggtgcctgcgtggagacccatgggtcggacccatatgtgagtcctgtctgtcagtgacctccttgatcggtcttcttgcttgcggtttctcgtgtgaagtgaggagcttcggggtgttggctgtggctgcgcggactcctcttgggatccgatgatggatcccacccggtgatcgggaatggggttacaatgcagtgaggcggaaaggctctcgccggggcacagaaagatccccatgggccgcaaggcgtgctgtcgcctgcaaaggcactgacccacgagcccactgcctccctccttcctgggtggagcaggggccttgccttcatctccaaggcccgggggctccggcatctcgacgcggcttctggcgacacgggcaaaagagagacaggaggctagtccgagccggagccagtgtgaccacactgttggcacttgactgtccccaagagcacatgcagtgagcctgtgtctctgaggccgtagttgggcgacgacgagacggacagtgatgtccaggcctgcgcccgggggccactggagacctgacccatcaaagcggagtgaaacgccaaagctcacctgaaaaacctgctgagacaggggccttgtgcaacgaggtccagctactccatacttcgccaaggtctcaggggacct

SEQ ID NO: 494198 - DNA, 161 bp, Homo sapiens
tgagaagctgtctccattcgttggagatctgcgacgaggtggaggactcctcctacgataatcatctcgagggcgacgaccccaatgagtggaggtgggccacgcatttctacattctttgttgcacccattacgacagattccatctcgttacacgtgca

SEQ ID NO: 494199 - DNA, 575 bp, Homo sapiens
  misc_feature (334)..(334): n is a, c, g, or t
cttactaatcccacatacactttctcacctcacctctctccaccctctctcttcttcttattccatttcactcttatctcttcctctctctcttcaacaaatccaccttcttttccctatactacttccctttttcctctttctccctctctactcctctcttatatatttatttctttctttctcataatcctaattcttttcctttctatcttccctaattacctcttttttctctttttctttttttcccctcctccctcttatctctttcttccctctctttcttcactcttctttctctctatttctctcctatcctcccactttcttntttcacattactacctttcttccctctcatttatttttccttaaaacccattctcccaacctctcatccttatattttcatattcctatctcttccttctctttatatacatatctcttccctcccatctcttttctatttttcttttattttttcttatcatctctcctaccatttatcactcttcacttcttcttcatccctctctcctattcctcctatattctcttctcctatttcg

SEQ ID NO: 494200 - DNA, 911 bp, Homo sapiens
  misc_feature (317)..(317): n is a, c, g, or t
tggttccaaggtttaaatcaagccttgttttttaaaattactttatccctgcttcttctcaaggggttctccctttgttttggcccttttctcctttttcctacttgggcagagattgggcttcccggtccgaggactcttttggcgggcttggctccagtttacgccatagtgatacccacctttgctggggtgaatgcctacgtggacagttgtggtcgccattatagcctttttccccgctgtgaaccccgtttcaagtgtctagataacaaatattttcttcccgtgtataaaccgtggacatacttgttgcnccaatttgtgcgtgaaccttatagtagtgtgctccaggttaacaaaccgtgaactctcatcatctccttatctcgagagtggcgcatgtggactccggcccgttgtgatacccttcagtgctcactacaggctctcttgtggggacaacagatgggagaagcgacatataaacgtcttctcctcttcagaatgtggtggagaaagggcgtcgcatttgtgaacagcgtccccttttgggagagactttttctggagcattagcgagatcgccggaagattcacaccaaaggggggtatcaaaaaaatctccaccatattggaggccgcgatctcccgcgtctttttcgatgtaggggcgagacgtgatgacacgagaagatatattgtctcccccaccacagagtgggggagagcgcacccacctatataggagataacactctggccgagcaaaggaaaacgcgcccgagcctcagggacaacgccaatattttcgcgcaaaacaagggggggactcaccagggctctcccaaaaggggccccgggaaaaacttggggcaacgaacccaatcggtaagaggtgggacaaaaag

SEQ ID NO: 494201 - DNA, 117 bp, Homo sapiens
cttttttccctttcccccttccctctccctctccttctacctctttttgagacagtctcactgagattgcaccactgcactacaccctgggtgacagagcgagactttgtctcacca

SEQ ID NO: 494202 - DNA, 490 bp, Homo sapiens
ttgggggtccaggggtgaaaagcttggtgaaggattttaaggacttcccattggctgaaggctggcaaatggagtttgccatcctctgactacagccattctgaggactggaaaggataccctgagaagtggcctattttatttctgctggaagctggatgcttcctgccctcgaaaatcagactccaagttcttcaactctgggactcggacctttgaacacagactgaaggctgcactgtcggcttccttacttttgaggctttgggacttggactgacttcctggatcctcagcttgcagatggcctattgtgggacctcaccttgtgatcacgtgagtcagtgctccttaacaaactcccctttgtatatacatctatcctactacttctgtcactctagagaaccttgacgaatacggttatgcatttttattaatgtaaattatgccttaattaccaataaataccttctcaacctccaaaaaa

SEQ ID NO: 494203 - DNA, 398 bp, Homo sapiens
ccggaagattggactctacaaaacatgtatggtgtcaatcaaaaagatgctatcttagtcagaagtcttgagcaaagtatgttctaacacaaacaaaaattaattctctgtatttcaaacaactcaaataagtttcctgtccccactgaatagctcatgaatttcattctaatgttcaatcaggtgtctttagcaatagttctcgtgtgtaaggttgtaaaaaatgtcacaaggaacatgctattaatgtaagtactcaaagttataactgattttaaaacgtttttacatacattaaaggtatccaagttgtatttccctagacaatcatcactttaatttgaattagaaaacacattcaagtgggggaaaaaatgagggggagtagtaaaacctag

SEQ ID NO: 494204 - DNA, 848 bp, Homo sapiens
  misc_feature (736)..(736): n is a, c, g, or t
  misc_feature (779)..(779): n is a, c, g, or t
  misc_feature (784)..(784): n is a, c, g, or t
gggcagagaaggcccggaggggctctgcgtctgtagtggcgctgcttgggcccgtggcggattgtaagctgctggttttgcggctgggaagagcggcgagagggttcggcatttttcgtcgggatccccgcgaaggatgagtgctgccatgagagtctcacccgcatggggtgaagcgttcagccttcctccagatgacgatctgggatctagcaattgggaggcagcgagacttgggtaatgaagagagaaaacgaaaagttcttgagacttatgggtgcaggaaatgaaagaacatactggtcgtcttgttataggagatcacaaatcaacatctcacttccgaaccggggaagaagacaagaaaattaatgaagaactggagtctcaatatcagcaaagtatggacagtaaattatcaggaagatatcggcgacattgtggacttggcttcagtgaggtagaagaccatgatggagaaggtgatgtggctggagatgatgatgatgacgatgatgattcacctgatcctgaaagtccagatgattctgaaagcgattcagagtcagagaaagaagaatctgctgaagaactccaagctgctgagcaccctgatgaagtggaggatcccaaaaacaaaaaagatgcaaaagcattattaacatgatgttggtaaatccagtggttcataactcccaaagctagtcttgtattaaagtaagccttgtgtacatgncgggggacggttttaggccgaccttgtttttattttaaaggcnttaanattaaaggtggggtcaagggggggacttgggggtataaattgggaaggttcacaaattgagtta

SEQ ID NO: 494205 - DNA, 415 bp, Homo sapiens
aaagaaccattcactgatcaagatactcagaacatgaacaggaaggtgaacaagtgatgaaatgcaaagggagcatcattgtgagatggctccaggaacaggacggacaaggtgcggccttaggactcaggccgactggggcagatgcttacacaccatccagactgaagaccgagtctggtccaatgctatcagcccattacatcagctctttagtgacagggacggcttgatgcgggcacttctcacccctgagaatctgggacctcaacagtgggcagctgatgacacacttgggcagtgcctttcccccaggggctggggtgctggatgtcatgtatgagtcccctttcacactgctgtcctgtggctatgacacctatgttcgctactgggacctccgcaccagcgtccg

SEQ ID NO: 494206 - DNA, 837 bp, Homo sapiens
gcacctttctggtaatcctggatctccagtggcactacctctaagagatgaagcagcgggtctcagaacatcccctgaggcccctgcgagagaacctttgagaaggacaacccctcagctaaggagccagtggtcccagagtaggtcacctgtgggccaataagcacaagggctggagtccggtcagggcctgcgcaagaccttccatcgttgcctgagcggctcttcagaattcataagagggtccagcactgtggaagtaaacaatctcgggtaccctcagacacatgtatgttttatcgaggagaaaaaaccaaaggaggtgatgggaggcttttcaagacgcgtgctccaaactcatcaactcctcccagctgctttaccaggagatatagtgagtgttgtgcctgaataaggagatccagagccagcagcggctggagagcctgtccgagacacccgggacctagctctccagctggcagcctcgcgaaggccctggtctcctccgttagtcgtacctgctgcggactctccatggacctccagcggcatcccgtctggcaggaaaatcacccgtggctgcgcaatgaggcaccgtgcttgctctccatgtacccgatgaagaccaagaacctgcaagaggtcatctctagagctgattgtggtcagaaggcctcctacatgcgcagtctaagcattgctgggatcatttccaacttttcaactttcctccggcccactttccaccagggcaccatggtttttctgtttcagggttttcgaagttggccagtccttccacctgggagacttgggcctttctcgagtgtgggg

SEQ ID NO: 494207 - DNA, 954 bp, Homo sapiens
  misc_feature (191)..(191): n is a, c, g, or t
  misc_feature (724)..(724): n is a, c, g, or t
  misc_feature (861)..(861): n is a, c, g, or t
actgaatgtatatgtttattagtgtagcgtttgactatgaagtttgtcctattctatagtatcttatacttaggagtcgtgaatagctattcagtgagacatgactcgtctgcttgtgtcatacttggtttttatactccagttgagctgtggctactaatacactatcacgaccacgttgatacacatgnatagaagctgcagatgggtcgtcgtgcgaagaagtctatacaagtgcgtccatttctcagtgtgtgtatgcacatgagagtggttcagtcgtaccctacttaattagcattgataatacatattacacgagcaattattatcatatcttgggatattttatgccaatggatattttaatacactcttgatgtcacctcacattttagactataagaatattatttgattcgtaatacctcacttctatgactcctcactttacacggtgctagcatcacataattcagcttagacatatgagcagtcccagtgcacaaatgtgcacatttcttgatgatgagtatttatttcggcagacgcagtaccgataacaatggatcacacgcacgagatagagtgtagattgatcatataatccatgtaatcattcgtctcataataatccacaccaagtgatgaccaaaccagcatagagaatcatgagacaattcattcatcaacgagacgaatggactagtatatccctgtaaantcacaatcgctacgagtagatctagtatgaactttagcaattgtccataattggctcgggctgcgatatcaggccagaagtctactacataatggtgcgaataccattaattacatgtataccattacagccgtaanttgagtttttagacaataaatagtccgcaagcttttccgcgcgaactcgataggcataattgtgtacacctgtctgggtctgcctagatttcc

SEQ ID NO: 494208 - DNA, 811 bp, Homo sapiens
  misc_feature (729)..(729): n is a, c, g, or t
gggcagagaaggcccggaggggctctgcgtctgtagtggcgctgcttgggcccgtggcggattgtaagctgctggttttgcggctgggaagagcggcgagagggttcggcatttttcgtcgggatccccgcgaaggatgagtgctgccatgagagtctcacccgcatggggtgaagcgttcagccttcctccagatgacgatctgggatctagcaattgggaggcagcgagacttgggtaatgaagagagaaaacgaaaagttcttgagacttatgggtgcaggaaatgaaagaacatactggtcgtcttgttataggagatcacaaatcaacatctcacttccgaaccggggaagaagacaagaaaattaatgaagaactggagtctcaatatcagcaaagtatggacagtaaattatcaggaagatatcggcgacattgtggacttggcttcagtgaggtagaagaccatgatggagaaggtgatgtggctggagatgatgatgatgacgatgatgattcacctgatcctgaaagtccagatgattctgaaagcgattcagagtcagagaaagaagaatctgctgaagaactccaagctgctgagcaccctgatgaagtggaggatcccaaaaacaaaaaagatgcaaaagcattattaacatgatgttggtaaatccagtggttcataactcccaaagctagtcttgtattaaagtaagccttatngtcacaatgcacagtggaggactgcttatagagcacagaccttagtattataatcttcaaaaaggcccttttaaataattac

SEQ ID NO: 494209 - DNA, 100 bp, Homo sapiens
cccttcctttgttcctggtgcacagcgtctgtgagcgcacagccagactctcccgttcacacagggtcatcctcaagatcgtcaatgtttatcagctcga

SEQ ID NO: 494210 - DNA, 1833 bp, Homo sapiens
  misc_feature (775)..(775): n is a, c, g, or t
  misc_feature (1418)..(1418): n is a, c, g, or t
ttgcgtggatcaatgcattgtgtgttttgctatgtccttgcgtattgctcgacgtgtgtctgcgcgtgtcgtcgtcgctcgtcccgtctcgggcgttcttcacttgcgtattatcctgccgatatcgttatcttctccgatctgctgctggtgggctgcgactctgtggtgtcctaagatatttcttggtggcccctttggggccctttcttccggggtctctacagatcggcgttgtctcttctgcgttggtgcccgtctgtgggtgacatgttatgcccgcgaccttttctgtggtcaccccacctggttgggcccgttgttttactccccgcgcctcccccttttgggggacccgcccccagagttgtgttgctcaaccacagggtgtttttcctgtgggtcctcgggacagacctgtgtccgccctctttcgcccctctgtattgccccgcgcccacgttcttttggggggcgcgcacacccaggcttggggggtgggtgtctcacaccccgccggtgggtctactatgcgtgcatttttggggtacacccccctcccgcggggacccaccacaatgtggggctattaatacccccccgcacgttttttgtcgtcgtgctgtaatttatccggccagtctttgctctgtctcggcccccacgctttgttgtggttggtggcgcacccaacccacgccgcgctgtttatggtgcccccccaccctccttcttttttgagcagagtgggttcgtttgggccccaccgcggagntgaatttatcgttctgtcgtgcgcgaagtgcctcccccacgagggagggagttgggatagaggctgggtccccctcacgggttatcccccctccccggggttgtccgtgttatacccccccctcggggcccactctcttctcgttcttctcctgggtgggaggacagcaccgcgatgatgggaagccatacacaaaataatcctctgtcgtgtcctctcccacacaccaaataataaaaaaacaattttttctatcttaaaatatgtcttttaataataggaatatatacatatccaataactcctctcatccccccctcatatgcgcttatctctctcgtgtatagatgtgttggtctatcaaggtgttgtatagaagaacacttctatcttattttataaccacacccactctctttttgtgaaactctctgtttcttatgaatatgaatgcacaccctgatggtgcgtttgtacagacacacacacacactctgttcactatgacactcgtgttctacacacacaaaaatatattgttcccccctataaatgtcccctctcatatattatataaatatagagactcgtctgtatatatctatatctttaaattattgtgaattttgtataaaacattctntctgtgcgccacaacacctccacagactccctaccaccacacttttgccctcatagggccctcatatgcccagcagcggtgtcacagcgagtctcacacaagacacatcctctctgccacgcgcggacacacagcgagagatttttctacatctccctctatttattctcttggggacccaccactacacatagagacatagatatattgtcgtagcacctcggtccgcgcaaccctcgggtaccaccgagactatagatatcagattctgcgctccacatatcctgcctccatcctgggccacatattgttgtaaactttgacacctggactattttggtgatacatttttttccacaaaaaaaagatttttttggggagagaaaataaacaaataaaaaataaaataaaataa

SEQ ID NO: 494211 - DNA, 519 bp, Homo sapiens
  misc_feature (260)..(260): n is a, c, g, or t
  misc_feature (365)..(365): n is a, c, g, or t
  misc_feature (379)..(379): n is a, c, g, or t
  misc_feature (405)..(406): n is a, c, g, or t
  misc_feature (431)..(431): n is a, c, g, or t
  misc_feature (500)..(500): n is a, c, g, or t
gggcagagaaggcccggaggggctctgcgtctgtagtggcgctgcttgggcccgtggcggattgtaagctgctggttttgcggctgggaagagcggcgagagggttcggcatttttcgtcgggatccccgcgaaggatgagtgctgccatgagagtctcacccgcatggggtgaagcgttcagcctccccagacgacgatgtaaatatatggcgatggctgaggttgaggctactgcctggagtagccggaaggtggttngagaggacgcgcctgagtggcctgcacgggagagcccaggaagaaaccagaagaatgagtggaaatgcctcccttaatctttatgaaggtcagaagtttgaagangcccacacgctganagccggagaactgcgtaagaaggggnntgaagaaggaaattctgaaaggtcnaggagtggagcttagtcaagggattctacgtcctttttggggggccattgctttctcgggctttgtacnccattatagagacggcgct

SEQ ID NO: 494212 - DNA, 282 bp, Homo sapiens
ccctgaacatccgtgtcacaaaacattagctggacatggtggtgcatgcatgtggtcccgactactcaggcggctgaggcaggaagatatcttgagcccacgaggtcaaggctgcagtgagccatgatcatgctactgtactccagcctgggcaacagaacaagaccctatctcaaaataaaaaaaggaagcgagaatgcagagtttcctctgtgatatcaagcacttcagggtggtagatgctgccatggtcgaacacctgctggaggacacgaatgtcca

SEQ ID NO: 494213 - DNA, 164 bp, Homo sapiens
tccagcactaagccccgtctgacgtgagaggatcccattcaggccaggaattcgagactggactgagcaacattgggagacctcgtctctactacaaaatcacaaataagaaaaattaacggcatggtggtgcgtgcctatagtcccaactactcaggaggcag

SEQ ID NO: 494214 - DNA, 731 bp, Homo sapiens
  misc_feature (22)..(22): n is a, c, g, or t
gggaaaagaccaatggagggtnacctacccttgagcagctttaatgggaagaataagctagagatgtttttctgtaactgctaaagcttgttatttattcctcctccaatccccaaatccacgacctttgaaaacaggaggtgtgtctgaaaaaacaaggcaaaaatgaccttaatcctgacaaggttgtaaggacatattatcaccctagggaacagtgtggcacttttagaaactgctgagggagatttacgtaaacttgtgattaggctgagagcctttcaaagcagggagtacatagtaggcactcagttaatgcagaataaacaggaagtggtgaggagccaactctttgctgacttgccattgttgctgggccgtgtcacttgctcctgaagtggctgcaagggttctgcctccactgaagcacacaagtgcccattctgtggagggaaagccaaaagccctttcctttggctttgcccatgtggcttcagggcttgaaatcctaagggatccagagtggcagtgcagtccagggtgtgctgggtcggcagtgaagatgaggaagaggatggagaagggggatggagagaggatagttcctggtagggcacacactttcactgccccccaaaaggcactgcaagcctgggtgggaggcttctgggggaaacggctggatggtggacagccctcctacatcctggtgtccagtggttcctcagtgt

SEQ ID NO: 494215 - DNA, 271 bp, Homo sapiens
  misc_feature (110)..(110): n is a, c, g, or t
  misc_feature (189)..(189): n is a, c, g, or t
  misc_feature (207)..(207): n is a, c, g, or t
  misc_feature (235)..(235): n is a, c, g, or t
ttgggcatggggtctgtaggggtgggcagcatcccggtggacgggctagcacctcctccatacagacagcaggctcttggggcggggaccagtgggggacacctgccacnccccgcccccccttcacacacacactgtaaacatcatggtgggccgcagcgctcagacggaacagaaaccctgtacacnccaaccccatgctcagcntaaaagtaaacatgggggcacacaccancccggcttccaggcctacatgaccccattgccgccg

SEQ ID NO: 494216 - DNA, 341 bp, Homo sapiens
cacgccggtatgtctagagtgcaagtgttataaaaaatagacaaaaccaccatcacaaaaaaaaaaattggcagcgaagagaaatgaagaaaaacggaagaaaaaaaaaaaaacgggaaaaaaggacccatcaaatttcccaccacacataaccgaggggggcattggcccggccgggttattggcggacaattcaaaacaagaggcttaagaacaaaccggaggggggagggggaccctcaaaagtcgcccggcgggcttgcaggcggggccggggcggccgtttaacaccgcggacagaggcaacgagcacacgcagcgagagagaccagagaatctag

SEQ ID NO: 494217 - DNA, 444 bp, Homo sapiens
agtgtctctggctgtggacaagagtacgggaaaagagaagaagatgactatcagtaagtgacaagggccgaagagcaaggaagacatggaaggtatggtccaggaaactgaaaagtacaaagctgacgatgagaagcagagggacacaggtgctcatccaggacatcactgtgcatctcctatgccttcaccagtgcaaagcgactgtggaaaatgagacaccttcgaggcaagcatcaacgatgaggacaaacaagaagcatctggaccagtgtaatgaaattatcaactggctagataagacatccagcactgctgagaaggaagaatttgaaacatcaacagaaagagctggcagagagttagcaaccccatcatcaccaagctgtaccagagtgcaggaggcatggcaggaggaatgcccgggggtaggaggtgggtacc

SEQ ID NO: 494218 - DNA, 181 bp, Homo sapiens
gggggtgaataggtgctgttccctctcttatgagcggaacgttgatctgtaagccacacctgctgtcatgggtgtaactacctcattcatgacctcccagaaatctgtctgatgagctagacttatgttgatgaaacgatgtacctgtcaggaattacaaaggaattagattcatgtgtta

SEQ ID NO: 494219 - DNA, 465 bp, Homo sapiens
  misc_feature (5)..(5): n is a, c, g, or t
  misc_feature (32)..(32): n is a, c, g, or t
  misc_feature (49)..(49): n is a, c, g, or t
  misc_feature (127)..(127): n is a, c, g, or t
  misc_feature (187)..(187): n is a, c, g, or t
  misc_feature (192)..(192): n is a, c, g, or t
  misc_feature (455)..(455): n is a, c, g, or t
tccgnccctaaccttattacacatttcccgcnaccaaaccccggactcncctacttactgaggagtcccagggtcctttaaagtggggaaaatggccatttagaaacccccggttaaatccatgagntccctattgatagttcccaattcaaatttaacattaaaaaatttccttaggcctgggaancaaantgttacgcctgtaatcccagcactttgggaggcccaaggtgggtagatcgcttgagctcaagagtttgagagcagccctgggaaacatagcaaaacctaatttctacaaaaaatacaaaaaattagttgggtgtggtggtgcacacctgtagtcccacctatgtgggagtttgaggtaggaggattgcttgagcccatgaggtctaggctgcagtgagtcgagatggcaccactgcactccagccttggtgacagaatgagantccatgtctc

SEQ ID NO: 494220 - DNA, 111 bp, Homo sapiens
attcgcggccgcgtcgacttttttttttctaacgcttaatacacttgatttttcttggataaaaacccaatgctgtggccacagctggagcctgagtccgttgcacggaaa

SEQ ID NO: 494221 - DNA, 400 bp, Homo sapiens
  misc_feature (336)..(336): n is a, c, g, or t
  misc_feature (344)..(344): n is a, c, g, or t
  misc_feature (375)..(375): n is a, c, g, or t
ctgcctcagcctcccgagtagctgggactacaggtgcccgccacaacgcccagctaatttttgtatttttagtagagacggggtttcaccgtgttagccagaatggtttcgatctcctgacctcgtgatccgccccgcctcagcctcccaaaggcatgagcaccgtactcggcctgcccaggctggtcttaaactcctgggcctcaggtgatcctactgcctcagcctcctgagtagctgggattacagacacagcccccgttcccagcttctagcatttcttaaggacaaaattggtgtgtaagtaacagggaaatttcacattatggctgttantcattctnttattattcacaggccatgtttaggaacaanttggggtttttcaaaacaaggcgtt

SEQ ID NO: 494222 - DNA, 240 bp, Homo sapiens
gtacctggcacggggtataaggatacattcctcctcatatccaggtagtgactgtaatcaagtttgactatcaggataaagctcatagagatatcatgattgactgcaacatatgtgccatggacattaatgttacacaaccatactagtatccttcttcctgaagagcaacagctcctgctccttggaggttgttgggaactgctttacctttggtacctacttcaacccccatatacg

SEQ ID NO: 494223 - DNA, 487 bp, Homo sapiens
tccagataaatatggaatagatagttactagttatgcacttagcaactccctaccagcacatctgggtaaatacagattactttaagtgctgttccttagtacttgtttatcattttgtttaaaaaaattctcaaggagtggggaagcttacattatagactccctggaaagtcttcctggtctgcatcggcactccgttatttgagggtaccatttctaggtagccattgaaggtagtgctccgtgagtcatcctttgagccttctcatgcctacagcagcgctaaggcagcaccttccagaaattctctaaagggttctgtcagattctagtgttggtcctaagactaatttgaactggtgcttctttagaactcagagtttacagagtattattggaaattggaaggaactagacgccgcagtctggagacacttactggctgtgaagtgtctttcagtgatgtggtgttcctgttaaccacaa

SEQ ID NO: 494224 - DNA, 460 bp, Homo sapiens
  misc_feature (8)..(8): n is a, c, g, or t
  misc_feature (103)..(103): n is a, c, g, or t
  misc_feature (119)..(119): n is a, c, g, or t
  misc_feature (143)..(144): n is a, c, g, or t
  misc_feature (146)..(146): n is a, c, g, or t
  misc_feature (237)..(237): n is a, c, g, or t
  misc_feature (264)..(264): n is a, c, g, or t
  misc_feature (269)..(269): n is a, c, g, or t
  misc_feature (301)..(301): n is a, c, g, or t
  misc_feature (305)..(305): n is a, c, g, or t
  misc_feature (330)..(330): n is a, c, g, or t
  misc_feature (341)..(341): n is a, c, g, or t
  misc_feature (378)..(378): n is a, c, g, or t
  misc_feature (395)..(395): n is a, c, g, or t
  misc_feature (397)..(397): n is a, c, g, or t
  misc_feature (405)..(405): n is a, c, g, or t
atataagnttagcaagagcacctttcaaagtcacagttccaatggtttttgtaaggtcaaccagaggcagagaacacaatcatggtggcttagcgtcaaaatnatgacaagttgtcaanctaatgttttttgttaaatataannancacccactctgcttctgtcctgtgaggaatggggggaagtagggagtcaagatttgatattaatgtagatcgcatgtgacacttgcgtggncagcagacaagggtccccacccatgcncaggnttggacaaaatggtggctatgttttttgtgcnaaanctcctcatctttgctatgtttagcntagatcttgangtgtctgatcctcccgggacatggaggaaccactggntcagcagcagcaccaanantaggttgnaccaatgtgcgtgtttttggggggtgcgaaaattttcctgagggtgaccccaatg

SEQ ID NO: 494225 - DNA, 220 bp, Homo sapiens
acacagaaaaccatggaacctgagtcatgtattatgcttccccatgtagacttgcagctgtctattaactctaccttttatcttcaaagatcaaggaaacatttattatgattacaaattcctgaactcacatctagtactcaagtcaaaccaatataactaggtatctaaatcaactgaactgacatgacatgcactcggaaaaatcaccctatatatc

SEQ ID NO: 494226 - DNA, 273 bp, Homo sapiens
  misc_feature (38)..(38): n is a, c, g, or t
cggtatctacaggactcctgctgctcctcttcactgcnatatttattgagcattgtatgctaggttaggcatgtggagtaggtgttcttgcctttggggagttgacattatgaaaggaattcttatgccatgtggactctgagccagtcccatggggaggcccaggctcacagaagctcgcaggagtgggtctgcacttctaggaaaagcacaagtaggggctgagagcccagcaggaaagcaggttggttttgagtttacagtgtaatttgg

SEQ ID NO: 494227 - DNA, 1071 bp, Homo sapiens
aaacaccaaatggcggatgacgcctggtgcagcggggtgggcccggggcctggtggccctgggatggggaaccgcggtggcttccgctggaggtttcggcagatggcatcctgtgggcctggggtcgctggcctgtgtgacctgtgtgtgccggtgtgcctgagtgcctgcggagctcgctgagagtgcaatggcctgaggatacggacgtggatgcccgtcaccaaagttgggccgcttggtcacaggaccatgaagatcaatgtccctgagaggagatctatctcttctccctgcccattaaggaatcagagatcattgatttcttcctgggggccatctctcaaggatgaggtttgaggattcatgccagttgcagaagcagaccctgttgccggccagcgcaccaggttcaaggcatttgtatgctatcaggggacttacaatgggccacgtcggtctagggtgttaccgtgctccatttgagtgtggaccaccgtcatcctgtggttggcatcatcctggccaagctctcacatcgtcccctgttgcgcaagagggctaactggggggaacaaagatcggcgaagcagcgcagaagtgtccctctgacaaggttgaccattgccggattgtgggctctgtgctgggtacgccctcatcccttgaagcaccagggtgacaactggccattcgggtcttcctgcacccgttgtttgccgtaagcggaatgcatggctccattgattgtgcatgggtagttcggatcggccgttgctttacaaccttcccaggcgccgtgggcgtggaaccttggcacaccccttggggcgagttttcggcacgagggtccaggcttttgtgaattgctcgcattttcttcaaggcaacccttagcagggcgttaaccttgtagccccccggagcccttcttggaaacgggacgaacttggtaattatccccaaggagttttgccgctactccgagtggagttacacgtggaaccacgtgtacggtacgaagaaccccgagacccaagaagtattccgggtgaagaggcgacattcaag

SEQ ID NO: 494228 - DNA, 493 bp, Homo sapiens
tctagctcggtaccccacaccacctgagtcagggggaagacctgacatatcactaagggtagaagactttagagttttagtgtgtaatgaaatcaatctaagcgaaccttgtgatgttgctgccagaaatatggaccatctctatagaaatatgctatgtttcaagaatgaaaatccactttggttaagtggtgaatccacttttgagaattcttttttttctaatatgagaagaatagagttggtcacttagaagaggatgacctgcatggaaaggtatctccaagcttgtgaaaaacaggcaaaggaaccataacgtttagcctggagaagaaatgatgcatcagggttccttttcaaataattgactagggttagagttgttctctgtgaccgaaaggggatgagaataggattgatgggtaaaaaatacagggagattcattttggctcactgtcatctaaaaagagaacaggctgacatggaaagagt

SEQ ID NO: 494229 - DNA, 294 bp, Homo sapiens
tttttttccctttttccccccccaaatttgggggggttaaagggcccccccccccaccgtttttggggtttggccggggcccccttcccggtttttaaaaacaaaattggggcttttccccccccggttttttttttaaaccgggcccccttttttttcccggggggggggggtttaacccggggaccaaacccccgggggcccccccggtttttttttccccccccaccccccggggggggggcccgtttttttttcctccccccccaggtaaattaattttttttttgggga

SEQ ID NO: 494230 - DNA, 183 bp, Homo sapiens
caaaggacgtccatactcagctgacactgcatgtgggcacttactgtgctcatgcccacacacacttgcacaacatgcagaaggccagcacagttggatccactctcactagagaagacagtcgagaatacgctggaaaacctgacgatgagcagctacacgatctgcctctatacaaagact

SEQ ID NO: 494231 - DNA, 409 bp, Homo sapiens
  misc_feature (173)..(173): n is a, c, g, or t
  misc_feature (178)..(178): n is a, c, g, or t
  misc_feature (182)..(182): n is a, c, g, or t
  misc_feature (196)..(196): n is a, c, g, or t
  misc_feature (201)..(201): n is a, c, g, or t
  misc_feature (207)..(207): n is a, c, g, or t
  misc_feature (222)..(222): n is a, c, g, or t
  misc_feature (264)..(264): n is a, c, g, or t
  misc_feature (270)..(270): n is a, c, g, or t
  misc_feature (279)..(279): n is a, c, g, or t
aggtggtggtggtggtggtgatttggggtagttatttgttaactatggaccagtgaacgtagtttacgatcttgaaatgaaacttagatttttctggggaaatgttcagatcagttttgtgaactgtaaatcaaaaaccttttctacgtttatttttatttctgcaaattagnaacanattnatgttttcactatnatttnggattnaactcttccatggtntatgagccaatataagaaaaaaatattttttgttccattgtnattttnaacaattgnaacttttaccaatgattgaacatgtttttattacagtatttaacattcccccaaagaataccctgcaaagtgtaaactttgtcccatatgtgatatactgttctgctacaataaagatcaaacctaaaaa

SEQ ID NO: 494232 - DNA, 338 bp, Homo sapiens
gggatattgggagcacttccatctcataggtggattcaaagatatcatagagtggttgaaagagttcatctaatgacctgtaatccaacacaagggagtttctagggtttcagaaacagggttttggcagccaaggttgcatcatgcagatgaagcctccaggtcagccaggcttcagagagaatagcatggtacatttgtcccatagtcagacttacaaggtgcccacactcttcagtaaaatctctctgggtcaggacagcagcacttcaaaaaggaatctctaacagacattcagcataatatcccacaaagaaccagctttgcaagcaggccat

SEQ ID NO: 494233 - DNA, 250 bp, Homo sapiens
tgaatcgagctcggtacgtgctagcggcattaagtgaacgcccctttgctcacaaagcaacgcttgcctttttctcacctagccgcctagtctccagagggcaaagagggtctgggttgcctcgggctccctgggccctgctcctttgctcgtggtttcctgagcttgaaacccactccgaacgggttctccttcgtggagaagcaggagttggcaggaaaatgccttcgttcacttaatgccgctagcg

SEQ ID NO: 494234 - DNA, 223 bp, Homo sapiens
tctgatacttggactattcgacaggtctatggccaaaaggtgtgttatgcacgaactcattcagtcaactatacagacgttcattctccctgcatttggcaggggtatacccaggatattatctaacgtatctaacaggtgtgttcatgacattagcagcacgagctatgagacatacctttagacattattacattgaaccggatagcttgccgggtaaggc

SEQ ID NO: 494235 - DNA, 328 bp, Homo sapiens
tttttttttttgagacagagtcttgcgctgtcaccgacaaagtgaattttaaggcacaggtattagtagagaaaatgaaaaaacaatcaatgactcggaaatttaagagaattttaaatttttatccacataattacatagcctcagaatatacaaagaaaaaatgacaaaacggccgggcatggtagctcacacctgtaatcccagcactttgggaagccgaggtgagtggatcacctgaggtcaggagttcgagaccaggagaccagtctgaccaacatggtgaaaccccgtctcacgaaatacaaaaaaattagctgtgcagtcg

SEQ ID NO: 494236 - DNA, 134 bp, Homo sapiens
aggtcagaccttcacctcccctaaccccaaacatagtccacttttaggaggagcaaatgtaggtcatgtttttgttggacttcttgttttttgtgacttcatgtgttccattgtccccgctgccatggaacaca

SEQ ID NO: 494237 - DNA, 150 bp, Homo sapiens
cttgaggatcccggatggttgtgacgcctgggacagctaccaagcttcttggttcaaagaagctcttgaggtgccgatctgccagacaccgatggcacgagatgagggtctgcagaatggaccaccacagcacccgcttggttggtgctc

SEQ ID NO: 494238 - DNA, 217 bp, Homo sapiens
aaaaaaaaacaaacaaaaaaaaaaaaagcaaaaaaaaaaaaaaaaaaaaacaaaaacagggaatagaaagatacctgatgacccaccctgctatcacaatggaaagacaatagcaccatagccgcgccagggcaatccaacacgaattccccctctggctgagaacacaagcccgctcgatcaaccaaataaaaatcacaaagcctagaaatagaca

SEQ ID NO: 494239 - DNA, 103 bp, Homo sapiens
ccgattatatagtggcagtgagcactgaaaacccagttttggccaggtccagtggctcacacctgcaatctctacatgtctggtaagccgaccagcctcagga

SEQ ID NO: 494240 - DNA, 808 bp, Homo sapiens
  misc_feature (144)..(144): n is a, c, g, or t
  misc_feature (217)..(217): n is a, c, g, or t
  misc_feature (249)..(249): n is a, c, g, or t
  misc_feature (268)..(268): n is a, c, g, or t
  misc_feature (299)..(299): n is a, c, g, or t
  misc_feature (316)..(316): n is a, c, g, or t
  misc_feature (338)..(338): n is a, c, g, or t
  misc_feature (355)..(355): n is a, c, g, or t
  misc_feature (360)..(360): n is a, c, g, or t
  misc_feature (377)..(377): n is a, c, g, or t
  misc_feature (383)..(383): n is a, c, g, or t
  misc_feature (395)..(395): n is a, c, g, or t
  misc_feature (402)..(402): n is a, c, g, or t
  misc_feature (438)..(438): n is a, c, g, or t
  misc_feature (536)..(536): n is a, c, g, or t
  misc_feature (538)..(538): n is a, c, g, or t
  misc_feature (544)..(544): n is a, c, g, or t
  misc_feature (569)..(569): n is a, c, g, or t
  misc_feature (581)..(581): n is a, c, g, or t
  misc_feature (583)..(583): n is a, c, g, or t
  misc_feature (585)..(585): n is a, c, g, or t
  misc_feature (587)..(587): n is a, c, g, or t
  misc_feature (589)..(589): n is a, c, g, or t
  misc_feature (604)..(604): n is a, c, g, or t
  misc_feature (606)..(606): n is a, c, g, or t
  misc_feature (630)..(630): n is a, c, g, or t
  misc_feature (635)..(635): n is a, c, g, or t
  misc_feature (651)..(651): n is a, c, g, or t
  misc_feature (657)..(657): n is a, c, g, or t
  misc_feature (660)..(660): n is a, c, g, or t
  misc_feature (696)..(696): n is a, c, g, or t
  misc_feature (702)..(702): n is a, c, g, or t
  misc_feature (709)..(709): n is a, c, g, or t
  misc_feature (721)..(721): n is a, c, g, or t
  misc_feature (726)..(726): n is a, c, g, or t
  misc_feature (729)..(729): n is a, c, g, or t
  misc_feature (733)..(733): n is a, c, g, or t
  misc_feature (736)..(736): n is a, c, g, or t
  misc_feature (795)..(795): n is a, c, g, or t
tagtgtacaaaaaggacactagatcttttaagaaaatatcaggaaactgaagacgcagatagatgcctttcaattgtaacattttggcaaaagtggaaagttcttgtaaacaccaaccccatggctcaaaatagtttttctccncagtacaacattaaaagaaaaaaaaatagtatcaataagttagaccatatttaatcagccagaactttgtccnccaacccccaaaacacaaaacttttcttagcntcataattccttaaaaggngaacaaataaacaacaaaaacaacaacaacnacaaaaaggcaaattcnactgacagccccctgggctggntcccagggcagaggggngggcngtcccgggctggggccncctganatcatcccaccncaccggngtctgcgcgggctgcctgcgggcgacacagccaggnccagctgactctgggggcctcctggggcctgcccggcccttccccggcccggcccggcccaaagagaaaaacaacaacagccattgaaacatgaaggntnagtttnctcggagctctgggaacccgggggncccaaaggagananantntngggcaggggtgggananactgtgggccccccacagtcagcnctttngaagctgttaggaggnaccccnccnccccccagtttagaaaaatagacatctgtttttttncatttntgttctncctgcctgactnctganggnagcngtnacccccatgtgatccctgggccctgagttacagccgccatccaccccccaccacctttncaagttatggctt

SEQ ID NO: 494241 - DNA, 315 bp, Homo sapiens
ccggtgcgtcgcgtaggccatatgatggatacgaggtgacagccggtctgtactccctcagcgcttacccataggagaagtaatgtgaactgatgtgcggagcaaacaggaaacttacccccaactctcactctagtatactaggaatcctttcctttggtactcttttaactaagagggaaataaataccatggtcagaccctcatttcacagactgaggaaccttagggcctacacaaggggcaagtggttggccaaaagtgtacaagtgggattgggaagctagcaaggggacatagaagctaggtctctta

SEQ ID NO: 494242 - DNA, 1490 bp, Homo sapiens
aaacaaaaaaaacagcaaaaaaacaaaaaaacaccaaacaaaaacaaccaaccccccactcacaacacatacacaaaacaagaccaaaaccactccgcacacacaccactctacgcgctacccgaagagccacaaaacgaagcgccgcccacacatatcagtaacagacctggcgcacgccacactccgatcctccagagccgtcgtccgcgcgcggccacgctcgtgcatgcgctagactccttcgtatagtggctcctgcgcccacttcgctctgtacttttgtgcgcgcgtccgtctctcctccctgggacgcagcacacggtcgcgtctgagatcagagtataactgtactctttggctggcttgtattcttgccgtcgcctcgcccgtgagtgctcgcccaggcgcgccccaaccaccccacctgcgcttctcttccgtgtccgtgttccgtcagcccgccccagcgcacctggcgccggccctcgcgcggcgcgcctctctactgcccctaccaccatacatggcaaggccgggcgtagagtcaggctcaggcagacacctcagccccaccccggagctggacgcggcgccacgcgccagcgcgcagaagcaaagccaccccaccacgcgcgcaaagcggcgagcaccccccccccacacgcgcgggaccggaggcgcgcacgcgccggcgccgcgcggcgcacgcacgcgccaccgcccgcagcggcgacgcccgcaacaacccccaggcccaaccaccgcacccagccccagagccccacgcggacacgcgagcgcgctaaagcagtccacacaagagcggcacacccgcgcccccgacagcgccgcagcggcgacagcagccgccacccggagaccgcgcccggcacgcggcccacccagggcccgcagccagccgcgccaccggcgcaggggcacacccgggccacccgcggcgcccgcccggatccgcccgggccgccccctgcaccacggcacgcccgccacgcgggcccggccgtcgcgcccgcgcgacgcccgcgacgcgccggtcgcgcaccgacccgagccggcgccgggcaggctccccgggccgcgccggcgcgccggaagcagcggccccggacgcgccgcctgtgggtggggagccgccacccggcagcgcgcgcgccggcgcgccgagacccgtgcggccgccgcgcgagaccatgcgctccggtcgggcggagtgggccgaccgccgccggggaggccgacgacgccgggccaccggggccgagcccggccgcggccgcgctcgggggcgtcccgcggtcgggcggcccccgccccccgccgccccgcggccgccgcggaccacgaacgacgggcggacaacgccccggaccgcggcagccggggcggccgggcggtaccggcggtggaccgcgccgccgcgcggatccaccacaagtccagacgggcgggcgcgacggcgcccgata

SEQ ID NO: 494243 - DNA, 507 bp, Homo sapiens
tgatggctaaaccttcctgacaatgtcacagggccagcctcctgccctttgcaaagcactggatcctcaaagaataatttacactccagaaaatggaatccatactgggtgggttctatcacgtgtagccttgggggatgagacctgggaagaccgatgtgaatacatgcaggacggggcatccggtgtctgccagctgccacctgctccggacctgggccaccggctctgctgcctcagcctcttcacttgctccattttaatcacagctcactcatcagccttctttggagaatgctggggactgagtggcaaggtagggagactccgggctttaccttaagtggacgtatgttggaacagtaacttcgccccctaataatgataataataacagcaactgaggaagagctggggttcacagagcacctgctctgcaaacagcctgcaggatctttcggtgaaagttgtgaaacatggacatttaggtgctccataagtgttagc

SEQ ID NO: 494244 - DNA, 363 bp, Homo sapiens
aagcagttaatacagactcagcagatcgcgtagacatttgctgcatgggtaaattagagaatagaaatttgcccctggagatgcacacacctcatgctagcctcacgaaagtggaataagccttcgaaaagaactggtcctagaagcttgtatctagatatcagcactggattgtagaactggtcggctgatatggaccttgtatggaagtacaacgtgtcccccttggtatgggtaaaataccctgtacatatcttggagtacaacctttagtacgtgtggctaggccacttcgtggcctaaggtaagaacgtgcttgtggaagacaagtctgtggctgggagcgtctgtataaactgcttg

SEQ ID NO: 494245 - DNA, 182 bp, Homo sapiens
gggggtttttttcccccaaaaaaccccttttttttagggggggttccaaaggggggccccccagggggggagggggtttttttggggttttttttttggtttttcaaaaaggggggcccccccccccccgggtttttttttttggcctttacccccttgaataaagggggggttttttttta

SEQ ID NO: 494246 - DNA, 374 bp, Homo sapiens
  misc_feature (9)..(9): n is a, c, g, or t
  misc_feature (39)..(39): n is a, c, g, or t
  misc_feature (65)..(65): n is a, c, g, or t
  misc_feature (91)..(91): n is a, c, g, or t
  misc_feature (321)..(321): n is a, c, g, or t
  misc_feature (369)..(370): n is a, c, g, or t
gttttttanacggagtctcgctttgtcgcgctactgcantccaccctgggtgacagagcaagacnccatctcaaaaaaaaaaaaaaaaaanaaaaaatttgttagcttacaaaaatgtaatctatagaaaacctttcagagctgggtaaagtggatcacaccttggcttgggcccaggagttggagaccaatgagacccagactctactaaacaaaaaccagcctggtgtggtggcacacacctgtggtccaacctgctcggaaggctgaggcgggaagattgcttgagcccaggagttcgaagcttcagtgagctatgantcgtgccactgcacttcagcctgggttacagtgagaccctgcctcaanngatc

SEQ ID NO: 494247 - DNA, 99 bp, Homo sapiens
tcaggcactgaatgcctggtcagtgcacaagcctggagctgctggtcagcgctgcatggctcttatcaacagcagtccttgatgggagaagccaagaag

SEQ ID NO: 494248 - DNA, 234 bp, Homo sapiens
atctacgggtccctttccatttcttcctcccctttcatttactcacttactactggttgaccatcctcaaaggctgtatggcctctgcatggaatcttgcgcaaggttatggaaaattattgagcccactcttttcatgatcactgttcgctgtgtgtcccgagggcactaactcagagtgtcctttgaccccttcatcagtgtgtcacccggccaattctgtgcccatttcaa

SEQ ID NO: 494249 - DNA, 716 bp, Homo sapiens
  misc_feature (1)..(1): n is a, c, g, or t
  misc_feature (93)..(93): n is a, c, g, or t
  misc_feature (121)..(121): n is a, c, g, or t
  misc_feature (134)..(134): n is a, c, g, or t
  misc_feature (160)..(160): n is a, c, g, or t
  misc_feature (194)..(194): n is a, c, g, or t
  misc_feature (285)..(285): n is a, c, g, or t
  misc_feature (327)..(327): n is a, c, g, or t
  misc_feature (329)..(329): n is a, c, g, or t
  misc_feature (360)..(360): n is a, c, g, or t
  misc_feature (419)..(419): n is a, c, g, or t
  misc_feature (691)..(691): n is a, c, g, or t
nttagatcgtatcacatcatagatacatggtagatatacatcagatgattagtaatagatgatgagtatagcaatatagcattcaataggacntagcatccaggctttggatctgtgtacnatcctggtgatcnaaggatgctgtaagattaatgatccntgatactttcagcttgacatctagagccctttcntcagcctcttgttccatatttctcactatcctgctgtcctttgatctagtgtaatcaccttgcacgttactcacctatttaaaatgtgcanattcatctcccagcagcagcgagatgaattccgtgtgtgtgngngtgtgtgtatgtgtgtgcttgttgcccgagnggagttgagggatctaaatgagcatccagagctgctgaagataagaagcccaaacatanagttggggacagatgtgacaatggagtgatgctcaggctgagctgaatcagcacatctggcaggcagccaccctcatttaaagcagttccttccaacccgctggtgacaggagccctgctccagaactggggagatctgaggctggggtggctggcagaggtaatcggcagcccactgttccctgctttgccagcaccctaaggctccctcctacctaagccagggctgagcctcagagcagccaagaaagcctgatccagccccagggcanaatcagaccacagggcagctcgtgc

SEQ ID NO: 494250 - DNA, 144 bp, Homo sapiens
ccccgactagccgacagggtagctggcggaggcttgaggcttggaggaggcacctgggggagggacatctcagctgagaccccactgggggactaggaatgagccaggctaaggaaggaggagggtctgtcgggctagtcgggg

SEQ ID NO: 494251 - DNA, 1414 bp, Homo sapiens
caacagagacaagatacacacgagcagcaggtccagctagtcaaacgagcgagatagagagaacaataacgacacgagaaacaagacaaaagataaaacacacatctaacgcacgaccaccgcacagagaaccgtcgcgaacataacacactatttacaaccacaacaaccactcatcaaaacaaaacacacaaacagaaacaaaaaacaatacacataacacaaaacaacaacaaacagcaaacaaaacagcaaaacataatataaaaacataaacaacaaaaaaaaaacacaaaaaaataaacacaaaagacagcagatcacaaaaggctaaaaagaagacgaaaagcaagcaacacgaacacaggaagagatgaaaaataaaccaaagaagaaaagataaaaaagacaaagaagaatgaaaagacaactaaaaaaatgagaaaaaagatacgaagcgcagaaacaaaatactaagcgaaacacgaaacaagaccaaagaacaagcgtggatcagagaagcgaacaaagcagaagagaacgatgctaacgaaacaccgagaagaatgacacaaaatgaaaaagaaagagagcagcaagaacagcaagagcacaagagcaagacagacgaacaagaaaagacggagagaaagcgagagagaacagaaaaaagagaaaagaagtgagagaggagagaggaaagccaacaaggaggaacagagaacaagagaggagagaacgagagggaggaagaggagaagaggagaggagagtaaggaggaggacaagaggagaagagaagaaaacaaaagcgacgagagaagaagtaaagaagagcacagaaaagcatcaaagacacagcaaacgaagagaggaaggagacagaaaaacgagagaacgaagcaaagaaaagagaacacgcaacacaggaacagaaagagcacaaacgagacaaagaagagagagccacaagaaaaggagacagaaagtcgaggaggaagagaagacgagaaaaggaagacagtggcgcagagacaaaaaaggacaacaaaatacacgcttacaaacaaatcgactacaacacaaaagaaacaacaaaacatcatcataaataatataagagtaaaatcaaactaaaacaatacaacaaaaacgaacacatcatcaacgcaacactacaacatccaaaatacatcaatcaacaaaaaatcaaaaagaaacaacaaataaaaacaaagcatcatacaacaacaaaataaaaaaaacacagcatacatcaacacgagacccacaccctcaaatacaaaaacataaactactaatctaaacaacaaattattataactatatgacaaaaaaaaatatatacaattataacaataataaaacatatacaaaaagacacaaacgaaag

SEQ ID NO: 494252 - DNA, 649 bp, Homo sapiens
aagtaccagctcctccctgactcctattagctcgctagaggtattgctttcttccctactctttatagctgagatgtagctagaaagcacttccctgtatacactttcttgccttccatgcacccttctctaataaagcttccagctacatcagaacaatcttttacttgcaatgactgactgtcgtccatcccatagtcctctacttagtaaacttaacagcattaaatagaaatctgtcttcttctggagcaccaatcttcccttggcttccaggatagcccagcctcctcctccttacaggtctggtgatatacactcgattcttgtctgccagtgaatcagttactaatactggcagtgtccaaatacctcttcttacccaccccctaccgtctccaaggttggtttcaacgcccttcctatggctatgctatgagaatgacataggctagtaataggatctgctcatttaataatggtgaggatataatgagtacatatatggcacgtacttaaagtaatgccaggcaaaatgatagtttgccccttgagtcgatagctgtagtaacgatttgtggatgaaactgaatgcatcagacatactatgtatcaggactatacattccatatcatctaatgcctcaat

SEQ ID NO: 494253 - DNA, 1090 bp, Homo sapiens
gggcgccgggcagcggcctacaaccttggtccagcacggcatcaccaacctgtgcgtcatcggcggggatggcagccttacaggtgccaacatcttccgcagcgagtggaggcagcctgctggaggagctggtggcggaaggtacgatctcagagactacagcccggacctacgtcgcaactgaacatcgcgggcctagtgggctcatcgataacgacttctgcgtgcaccgacatgaccatcggccacggactcggccctccaccgaatcatggaggtcatcgatgccatcaccagacactgacccagagccaccagaggaccttcgtgactggaagtgatgggacggacaatgcgtggtacctggcgcatggatatctgcactggcctccaagggaccgagtggactgtatcatcccccgaggctccagaccgaggacgggatgggagaaactccatgctgtgagaggctgggtgacgactcggagaccagggaatcccgactgaacatcatcatcatcgatgagggtgcccatggaccgcaaggggaagaagccatctcgatccaagactacgtgaagggacctgggaggctcaagaggactgggacattcgagcaaaccgtgtacaatgtagctggggccaacgtgcagagggggagaggacagcacaatctgcctacgacaccggatacgtgagacagaccagatggggcaatgggcagagccgggacgaattgggcagcatggataggcaacgaccccacggcgcttgaacaacggccggaggacctggacggtcggagcagaaccaatcatacaaggggcaaccccatgtagacgaagcagggatggacacactacaagggaagcgcggcagacaagaattcaccacaagggaaaggatgcccacgaaaacgacgccagtgtgaaagtaacaaggaagggatcggaaggacagagcaataccaagcagaatcagagggagggaggaggaactagaagaaaacaacatcaggacaccataaaaagaggcaacaatgggccgcaaacggcaaagacacaccaaagggagaaaagacgaagcgaac

SEQ ID NO: 494254 - DNA, 786 bp, Homo sapiens
  misc_feature (662)..(662): n is a, c, g, or t
  misc_feature (744)..(744): n is a, c, g, or t
cctggccgaacgtggttattttgtcagggtgaggacgcgtgcccatgacacagcctcaggaagtcctgatgacctgtgcccaaggtggtcagggcacaacttggttttatacactttagggagacacaagacattaatcaatacagtaagaagtacactggttttgtccataaaggtggggagaacttgaagcagggaggggtcttccaggtcacaagtaggtgagagacttatagttgcattcttttgagtttctaattagcttttacaaaggagccaatcagaatatgcatttacctcagtgagcagagggatgactttgaatagaatgggaagcaggtttgctctgagcagtttccagcttgaattttccttttagcttagtgattttgggggcccaagatattttcctttcacttagtctatacatacgtctcatacctccctcttaagaactagcagccaggtgcagtggctcaggcctgtaatcccagaactttgggagggtggggtgggcagatcatgaggtcaagagattgagaccatcctggccaacatggtgaaaccccgtctctactaaaaaatacaaaaaattagccaggtgtggtggtgtgtgcctgtagtcccagctactagggaggctgaggcaggggattcacttngacccaggaggtggaggttgtagtgagctgaaatcgcaccactgcactccagcctggtgacagaacaagactccatcaaggnttgacctggccattgtcacctctgaatgtccacccaaccagc

SEQ ID NO: 494255 - DNA, 106 bp, Homo sapiens
tctctttgacccagtctttcttggtctgtctccagcgctttccgcatccaggcgatgatgtttgactaaagaaagttcagcatcatggagagggttacgagctcga

SEQ ID NO: 494256 - DNA, 176 bp, Homo sapiens
tatcccttacagctggaccccacacagcatgacgcatcaagaagaagatcagatgctgaagctggacaaggagaacgccatcgaccgcgccgagcaggctgaacgcgacaagaagcaagctgaggaccgctgcagcagttggaggaggagcagcaggccctccagaagaagctgaa

SEQ ID NO: 494257 - DNA, 838 bp, Homo sapiens
ggagtacgcgcgaagccttgccatgggaatcgtgatgactgtggtggggcctttacgatgggtaccattgtggtggtatctttcaagcaatcaaaggttttcggcaattctccagtgggatgtaaaccacagactacagagggagttgacagcttattaaaaccgagggctccacagtaaggaggtagcttgcagttggggagggctgttttccatgcattgactgtagtatggttcaagtcagaggaaaggaagatccctgaactccattcacaagtggtgccttaaggggagccatactggagcaagaaaatggaccagtgccatggttgggtcagccgcaatgtgtggcatgctcctagctttaatggagggagctggtatctgtgtgacaagattgtgcctctgcacagttctcccaatggtcctcagtttgcagaggacccctcccagtgtgcttcaactcagttaccttcctcacctttgggggactatcgaccaatatcagtaggacttcttctcctagtcatttctttaacaggaaccgaagtggtggttcgagaagggattcagaagatcacgttacagtctgtgttaaaaccctaggtgggacaggttatggccatggctataagagaccttggccttgttctatttaagggacagggggaggggcaaggataacgtattttccctgatgttgggtccaacaatgtgcacgtaggaaaacgtaggtgagatggcccagggacagggtgttaatctgggatccgggggtggtcaacaagggggctttaaagagagggggccaacaatttctcaattatccgtagttatg

SEQ ID NO: 494258 - DNA, 696 bp, Homo sapiens
  misc_feature (2)..(2): n is a, c, g, or t
  misc_feature (121)..(121): n is a, c, g, or t
  misc_feature (159)..(159): n is a, c, g, or t
  misc_feature (161)..(161): n is a, c, g, or t
  misc_feature (196)..(196): n is a, c, g, or t
  misc_feature (213)..(213): n is a, c, g, or t
  misc_feature (216)..(217): n is a, c, g, or t
  misc_feature (236)..(236): n is a, c, g, or t
  misc_feature (285)..(285): n is a, c, g, or t
  misc_feature (322)..(322): n is a, c, g, or t
  misc_feature (374)..(374): n is a, c, g, or t
  misc_feature (387)..(387): n is a, c, g, or t
  misc_feature (430)..(430): n is a, c, g, or t
  misc_feature (475)..(475): n is a, c, g, or t
  misc_feature (550)..(550): n is a, c, g, or t
  misc_feature (579)..(579): n is a, c, g, or t
  misc_feature (614)..(614): n is a, c, g, or t
  misc_feature (630)..(630): n is a, c, g, or t
  misc_feature (678)..(678): n is a, c, g, or t
gnagaaaaagtttaatgaactaatcgtttcttgatttttatacaaagtgatagatcatgcacatttttttcagtttttaaatattttgctaagtgcaaatactagattcctctctccagtnttaaggcaagtgagagggggctgtgggtggggagcgtnangccctgcggcaagccctgcagggcagagagagggngcgagcggcctcagggntgnntgtggtctgaactgctctntgggcactggcacggccccttgctggctggtctgaagacccccagtgcntctgtgcccaatggggtgactggtccaggcaggagcncgaggttcaggccctgcctctggacagaggggcctggagaaccagggtgggngcgcacggcagcnctgtggtcccccgtgcctggctcggggaggatcctcaggaatnagggaccctccaaggaaagagggcgcggctccttccccaccagcncagtttggccagaacagctggcactcctcttaaatgacccacccctggggtttggccttaggagaaacatcactntgggctccccctcccctgccagggttgangccagcccctgtttagggctgtatctgcagccgcngcctgccccctttgtnctgcctggggctcttgctggagccacgtgccttgggtacagggcaganggagccgaggctccaggg

SEQ ID NO: 494259 - DNA, 326 bp, Homo sapiens
cgcagactcagcggggactttctcggagcgactgtggtggttacatggttagagaccatggactatgtaaactgttgtattgcttctgtgtgagtgtcttagcaaaataaagttgtcaacatgttgctgtttttatgctataaaaacctggttttcagaatgagtatgactttagaataattttgacatattttgtagcagaattttttttttaaggcttcaaattttgtaatgaagctcctttatttttaaggcatccaacatgttctggaagctggaaaccttgaatttgtgttttttgttgaataaagttacagttctaagca

SEQ ID NO: 494260 - DNA, 472 bp, Homo sapiens
acgcgtccgcccacgcgtccggtttttttaacttttatttttattttgagataattgtagatttacatgcagttgaaataatacagagattccatgtgcccttcacccaatttcccccagtggtaacatcttgcaaaactatagcacaatatcacaactgggatactgacatcgatagctgtgatatagaacatttccatcatcacaaggatccctcatgtttctcacagccacgcccaattctctcccatcctcaccccctccttaacacagccaccactaatctgttctccatttctataattatgtcacttcaagaacgttatataaatggaatcttttggtacaaaacctttttaaattggcctttttcattcagcataattctctggaattataagttgctgcctgtacccatagtttgttcttttttattgctgagtagcactcacggtatgaatgtactatggtt

SEQ ID NO: 494261 - DNA, 464 bp, Homo sapiens
  misc_feature (264)..(264): n is a, c, g, or t
gcacccagtccaaaactaagacaccatatagggcaacattcacaggttccaggggtcagggcctgatatccttgggggtcatcagcagcctaccacaggggtatcatgacccatattacagatggggagctgagggccaggaggtgaaacatcaaccaagttcccagcaccacatctgcctgcctgtgtctgcctggcttgctacaaggcttctgtgactgaccttttacagcacctttctgggcagaaggctcagacccagtncctgacctgacacacatgagtcatgagaccagagccagcttcatagatgtgtgacccgtgccgtcacaggggccctgtgctcagaagctgccatgcttggtttggtgccttgctgtcgccaccttgaaattcctgataattttgattttcatttgcactagacccacaaattatgtaactgtcctacatgtgaactgaca

SEQ ID NO: 494262 - DNA, 799 bp, Homo sapiens
  misc_feature (19)..(19): n is a, c, g, or t
  misc_feature (63)..(63): n is a, c, g, or t
  misc_feature (65)..(65): n is a, c, g, or t
  misc_feature (82)..(82): n is a, c, g, or t
  misc_feature (106)..(106): n is a, c, g, or t
  misc_feature (109)..(109): n is a, c, g, or t
  misc_feature (113)..(113): n is a, c, g, or t
  misc_feature (118)..(118): n is a, c, g, or t
  misc_feature (122)..(123): n is a, c, g, or t
  misc_feature (126)..(126): n is a, c, g, or t
  misc_feature (129)..(129): n is a, c, g, or t
  misc_feature (134)..(134): n is a, c, g, or t
  misc_feature (139)..(139): n is a, c, g, or t
  misc_feature (153)..(153): n is a, c, g, or t
  misc_feature (181)..(181): n is a, c, g, or t
  misc_feature (185)..(185): n is a, c, g, or t
  misc_feature (252)..(252): n is a, c, g, or t
  misc_feature (264)..(264): n is a, c, g, or t
  misc_feature (279)..(279): n is a, c, g, or t
  misc_feature (296)..(296): n is a, c, g, or t
  misc_feature (321)..(321): n is a, c, g, or t
  misc_feature (326)..(326): n is a, c, g, or t
  misc_feature (356)..(356): n is a, c, g, or t
  misc_feature (783)..(783): n is a, c, g, or t
accttacataaattaagantgaatacatttacaggggtaaatgggaaggggttccaactcaangnaagtgacagcccagggngttctggccaaagacatcagctanganaggnaactnggtnntanggnttggnctttncaaccctgacaganccgcaagataaaacaactggtttttgcnagcntctagagaaatcccagaacactcagccctgacacgttaataccaaggggaacagttaacttcaatanaaggtcaaaatnagcaacaagttctanaatccagtgctgatatnagatacaagcttcaaggacaatttnttttngaaggcttattccagtttcgtgaggctagnatgaggtgtgtgcatttgccaggggaaaatttctattctcaattaacccatgcagcaaatgctacgcatctgctgagtccgtttagaagcatttgcggtggaggatggaggggcccgactcgtcgtactcctgcttgctaatccacatctgctggaaggtggacagtgaggccaggatggagccaccgatccacaccgagtacttgcgctctgggggtgcgatgatcttgatcttcatggtgctgggcgccagggcggtgatctccttctgcatcctgtcggcaatgcccggatacatggtggtgccgcccgacagcaccgtgttggcgtacaggtctttgcggatgtccacgtcacacttcatgatggagttgaaggtggtctcgtggatgccgcaagattccatacccaggaaggaaggctgganagcgcctccggacacc

SEQ ID NO: 494263 - DNA, 405 bp, Homo sapiens
  misc_feature (264)..(264): n is a, c, g, or t
gcacccagtccaaaactaagacaccatatagggcaacattcacaggttccaggggtcagggcctgatatccttgggggtcatcagcagcctaccacaggggtatcatgacccatattacagatggggagctgagggccaggaggtgaaacatcaaccaagttcccagcaccacatctgcctgcctgtgtctgcctggcttgctacaaggcttctgtgactgaccttttacagcacctttctgggcagaaggctcagacccagtncctgacctgacacacatgagtcatgatcttaacgtcacaggggcctgtgctcagaagctgccattactgaaatctgataattttgattttcatttgcactagacccacaaattatgtaactgtcctacatgtgaactgaca

SEQ ID NO: 494264 - DNA, 885 bp, Homo sapiens
  misc_feature (23)..(23): n is a, c, g, or t
  misc_feature (62)..(63): n is a, c, g, or t
  misc_feature (65)..(66): n is a, c, g, or t
  misc_feature (68)..(68): n is a, c, g, or t
  misc_feature (71)..(71): n is a, c, g, or t
  misc_feature (76)..(76): n is a, c, g, or t
  misc_feature (79)..(79): n is a, c, g, or t
  misc_feature (85)..(86): n is a, c, g, or t
  misc_feature (94)..(94): n is a, c, g, or t
  misc_feature (107)..(107): n is a, c, g, or t
  misc_feature (111)..(111): n is a, c, g, or t
  misc_feature (120)..(120): n is a, c, g, or t
  misc_feature (129)..(129): n is a, c, g, or t
  misc_feature (171)..(171): n is a, c, g, or t
  misc_feature (198)..(198): n is a, c, g, or t
  misc_feature (315)..(315): n is a, c, g, or t
  misc_feature (370)..(370): n is a, c, g, or t
  misc_feature (420)..(420): n is a, c, g, or t
  misc_feature (423)..(423): n is a, c, g, or t
  misc_feature (432)..(432): n is a, c, g, or t
  misc_feature (449)..(449): n is a, c, g, or t
  misc_feature (453)..(453): n is a, c, g, or t
  misc_feature (461)..(461): n is a, c, g, or t
  misc_feature (470)..(470): n is a, c, g, or t
  misc_feature (475)..(475): n is a, c, g, or t
  misc_feature (479)..(479): n is a, c, g, or t
  misc_feature (505)..(506): n is a, c, g, or t
  misc_feature (511)..(511): n is a, c, g, or t
  misc_feature (530)..(530): n is a, c, g, or t
  misc_feature (536)..(536): n is a, c, g, or t
  misc_feature (843)..(843): n is a, c, g, or t
agaaaaagaggtatataaaatgnggtcatgaagaaccaagccaatctcacctttctttaaanncnnanganaaggntcnttttgnntgtgtggngcagaggcagggntggngcgacaggnttttggggnggtgtgggcgcaggggtttgctcagctcacagctagcgcggngggcagagcaacccttcggcccaagcnatcctcgcagcttgcacagaagcttcctgaacctaagggatccgttcccagctctccttaaattcccagtccccaccctgggcctctctccctaacgatcttgtcgctttgggagcncctgaagtgaaccctgaaatactccctccgtcaactctgggctcagacctttgcncttctctgtgttacaaggaaatttcggtcaagagggtgggaacaggtggnttnagaccgtgnagcgaaagcgcactgcnaggnaagtgttnaggcaaatnttatntctncttattcagtctgagcgggacctaannttctnaccaccgagcaatcctgcntatgcnggacatgcatcttgggcgactccggatggaggtgggatgagggagggcggggcagataccaggaggtctgggccttagtagggaatggacgtgtgttcttatgaaggctgcaggcaccgggcacagctcctggcccagctgcccctcagtggtacacaggaagcagggcccaggaaaactgagatggcaaaataggcccgggctctggaaagcaacgtgaggtcatgcagatctcactaggcagacctcgtcgcgtggaagagaaatgccaggaaaaggggtcactgcaggaggcacctcggatctnatggcaggcaggaccttgcatcaaaatgacttttctttagaa

SEQ ID NO: 494265 - DNA, 324 bp, Homo sapiens
tctactacaaatctgcctacattgttataccctggatgtacgtgcaatgttcgcgaagaagcctcccctttacccttcctcgcagtagccagaatagtcaggggtaaggtgggtcgactcctttcaggtctctgggatacagtgctgactactggtacataggagctaggcttgcaagccccagttgcggcgacataaagcaatcagagtcaaattatctagagtagcgcaaaagccctttggagggagctcctccatcttagttttcctaggatctcaaggaaaaacccgagggaagaaagtcagtgggggaccagcgaactg

SEQ ID NO: 494266 - DNA, 288 bp, Homo sapiens
aaaaagcccggggggcccccccccccccgggggccccggggggggggggggccccgggggaatttttttcccttttttggggccccaaaaagcttgtttttccccgggccccgggtgggttttttttcccttatgggggggggggggggagcccccaaaccaaagccggggtttggggcccctggtatttttgggggggtttttttgctttttcccccctgggtttttttttttgggtttttttttttcccccccccccccctgggttttttttttggggggccccca

SEQ ID NO: 494267 - DNA, 324 bp, Homo sapiens
tcggcactaggactttccagattcttccagcaacccaacagccacccgtttcctcactctcccaatgcagtacccaaactctctggacacacacactcctcattcacactcagaccagaagctttcagatgcactgatacccactcttactgctctgaagacccatgaccaggatggttagcgatggaaaacatgatggcccctgcctagaatcagaggagatgcaggtgctttagaacaacatggtgtcattgctatatgactcaaaatcgtgtgggtgaacgttcatgcctctcacaagtgtgttggtggatggttcactga

SEQ ID NO: 494268 - DNA, 376 bp, Homo sapiens
agtaggtgagcaccatgaggtgaggtctgtgtgtttgtttttgtttcggtttttagcgtttatttggatggtttggtatagttacgactaaggtgacttcaactcctaataatctatggcaagttgtggtctcttaagcctcattagtttcatagcgaagacatatactagcaaactaccagggagatcccttacccggcactcaagagagacgcgcccgcaacccttcagaaggaggaccaccaaccggaggactcgataataaatcgacccacagataccacgtaatgacacaccccgctcctcgcgaggacctcccagaaagcgaatccggtaccccagactcaacctaagcacccgcggataccagtcgccc

SEQ ID NO: 494269 - DNA, 1032 bp, Homo sapiens
ggaaggcttgcacaggctgaaagctttgtttctcgtgcctgctgtaacaagggactgagcacagacacacggatgagtggggtcatttccagatattcaggtcacagcagaagcaggcaaaatggatccccacgttgcagctatgaggacgtgagtacactattctctttgtgatggcctatcgctgctctctaggtggtgctccatctgaagattcaagcgttattgcaatgagactgcgagacctgccatgccaatttgctagactctcaaaaccaaagcctgagtgatctagtagtatttaggcgaggagccaggaaaagctctggttctgaatgaggtatacttaggcaagtcagaaagtttgacagatgttcatgtccagagtatactgggccgcacgaagctcttgatatcgcgacaggtgggaccgctgagacttcagcaagtcttcagattcaatggcacgaagggactgtgatcaagtgtatcagtccgatcagagaaaatgccctagcaggaagtgatgtcgcatctcgagccagatgcaattcgtgaactgtacagttgcttgctagaacttcagtcaactgtgaacatagtaccgaattgtctcactagtaacaggaaacatggtgtaccataagattctgactctgctgcagtctatagcagcggtctaccccaggaactctgaagacagatgcagtcggatgcgcgtaaggaacgcacaggacattcaacctattcgagctatggactgactaatttagtgccacgaaaactctccaagcatcaatgggttcacacgaaagctggtacgaacgtagggccattcaggcttggtacagggtttgcattcgccccctgtcattgtttaccgaaggcaactagtggaccccagtcatttcttggataatttccggggcatccatctggactaacgcaatggcgggcttttatcatccgggcaaccgtgtttctccataataagaaggctttggaggaaaccccttcgcaaccttcccccac

SEQ ID NO: 494270 - DNA, 654 bp, Homo sapiens
tttgctagatgacatgatcacctagaaaatatgaaagaatgaccaaaaaaaaaaaaatcaatgaatccaggagctgattttttgaaaagatcagcaaaacagactgctagccagactaataaagaaaagggtattcaattaggaaaaggggaagtcaacttgtctgtttgcagatgacatgattgtatatttagataacccaattgtctcagcccaaaatctcctaacactgataaaaacttcagcaaagtctcaggagacaaaatcaatgtgccaaaatcacaagcattcctatacaccaataacagacagagggccaaatcatgagtgaactcctattcacaattgctacaaagagaataaaatacctaggaatacaacttacatgggatgtgaaggaccttttcaaggataactacaaaccactgctcaaggaaataagagaggacacaaatggaaaaacattccatgctcacggataggaagaatcgatatcgtgaaaatggccatactgcccaaagtaactgatagattcaatgctattcccatcaagctaccattgactctcttcacagaattagccaagacaatcctaagcgaacagaacaaagctggaggttatcatgttacctggcttctaactatactacaagg

SEQ ID NO: 494271 - DNA, 386 bp, Homo sapiens
ataaagagaaatcaatttgtttttgtgggtttttttgctagcctgtacagggagttaatacgtagcataaaaagaatgtcagggagctctctgagtctgaatcttttctgattctgagggctgccagattcagaagtagctctttgttcaactaagctctttattcctctaaagaaaaaaaaaaaaggaatgttatttttggatttttaggaggtccttaaagtgccaatccatacattgaaaaagaaattttgagtttaaatttaaaatatttaaaaacgttaagaacatcatgttcttaacgttttttaaatattttaaaacgttaagaacatgatgttatatcataagatcaaagtaatgtaacataggatagagatgtaatg

SEQ ID NO: 494272 - DNA, 840 bp, Homo sapiens
  misc_feature (33)..(33): n is a, c, g, or t
tttagaactgggttttaagacaactgctatggncagaaggtaaatgggaatggccttatgaaggtaacatgatggcctaataagaaaatgaattgttggccacagagttgaatttaattggagttagatagttcagaatgtagcacttgccctataaatgaattcagattggtcctatttatataatattagaattaatatattatcatgtaagtgggaatttatttgttaagtggactctcaaattttagaactttgtgtgaaatatctcccagaaaacacaaaaggtttcaaggtatcacccaaagctagggaatcaacaaagtactttattaatgcaagaccacaatttaagccccaggcaggaatccaacagtaacatttttcctttaggttaagcagtaattttttgaatggtcatttttaatgggtctcacacatgcatattgtaatatcattcatgttgaggttttcaacaaagaaccaattttgttaatataatgtacaaaaatagtgggttcattttctgaattcagtctttgaaataaaaactcctgtggtttgggcggtgttcctgaagtgtatggggtgattcacccccaagctaatttttaaaagtcatttttgaagtggggaagtctcatgagagattgttgacgtttgtatttactccaagagtcatgattcaaactagtttacattattagcagttagggtctaattaatgggaaagggtgtggggtaaattcggaaattttcttaagattataaatatgggctaatggtaaagattaacaggttatggccaacattagttgaaagcgctttacggggcagaga

SEQ ID NO: 494273 - DNA, 226 bp, Homo sapiens
gactgatcacgccgccgagtagctgaactacagggccgcacacgcccggctatctttgtatttttagtagagacggggtttcacaatattggccaagctgatcttgaactcctgacctcgtgatccaacctcctcggcctcccaaagtgctgggattacaggcgtaagccaacgcgcgcgatccaagggttttctgttttctgtttatttgtttaagctttacttc

SEQ ID NO: 494274 - DNA, 906 bp, Homo sapiens
acgcccctatcttttgtccgacctataatgtttgctgtccgccccgaaattcccgggtttcccccattccgcgggtgcacctgcgcctatacaacgatgttgcagcgtttaaggatccacgatcccaactcgtgtgtcctccggggtttccacaactgctgttcccgcgcaggtgccccccaagttgtgttctctgtggcggatgcgcgcagtgttcgaccccgcctgttggtgggccccaggatacgtgactctgtctccaccttggtgggactcccacggctcccctgagacccgccttggtggccccgtcgcccaatcctggtctcgcccgcaaattgggggctccctcattatgaggaccgccctatgtgcccccccccccctctctgagaggctgcctgagcaaggtttactccctgacgcttccctttgtgctaggaggctggttggttgtccccacggtctctccacttcccgacgcttccccgagtgtgacgctctcctctgatgggccactctttctgcgcgtcgtggcccggctgcactacgtacgccacttcagtcactcatgcgggccctctctctcattgccctgctcacacgcgaacaggcgccgctctttttaagacacacgcgctccttcgccactgctgtataggcattccccagttgatacagtgccttcacctcctgggctccacaccaccgtaggggtgtcgcaccacctgagcaatcatcatcaaggggagcccacattttgttgtatcattgcttgtgcacacagcgccggtgaagttggaacccccccacgggtcaagacaagacatgtaaaaatgcaatcgcctacttatcattgtcaaaaaacacccctttgtgactcctttccgccccccacaaagacaa

SEQ ID NO: 494275 - DNA, 270 bp, Homo sapiens
tctaatggcactaaatgagaatgacctacatcctcccaatcagacgccaagatgatcacagtaggattcagaacgtctcagctaacaacaacagtagcaagtagcagaaattcaactgaaatggagcaaagaaaggtgaaggtaaaacgataccaaaagtcccctaatgccatctactaactgcaagaaaagcttccacagtttaactcaatatcatggacacggcgtactgcaggtgagttgagcagatgttagcaggaagagaggcat

SEQ ID NO: 494276 - DNA, 382 bp, Homo sapiens
  misc_feature (9)..(9): n is a, c, g, or t
  misc_feature (11)..(11): n is a, c, g, or t
  misc_feature (269)..(269): n is a, c, g, or t
  misc_feature (349)..(349): n is a, c, g, or t
cctcaagtnanccacccacctcagccttcccaaaatcctgggattaccaggcgcgagccaccacgtccaactttataaagaaaagaggtttaattgactcagttccacaggctgtacaggaagcaccactggggaggcctcaggaaaattacaatcacggtcgaaaatgaaggggaagtgagcacgtctttcatggctggagaaggaggaaaagatagcggggggagatgccacacacttttaaacaactggatatcagccaggcgcangtgtcacgcctgtaatcccagcactttgggaggccaaggtgggtggatcacctgaggtcaggagttcaagaccagcctgncaatatggcgaaaccccatctctactaaaaata

SEQ ID NO: 494277 - DNA, 112 bp, Homo sapiens
attcatattggcggtgagcatcgcactccagcggtgaaacaagagtgagactccacctcaaaaaaaaaaaattaaagaaatagggttgggccgcaagggttcaccgcatttg

SEQ ID NO: 494278 - DNA, 245 bp, Homo sapiens
aggctccagtcttaacgatatattggaggtcagcacggtagctcacgtagtcgacgagaacttgtacagtgcaggcatgcaccgcagtggtaaatacacgtcgaccaggatccatcttaacgatatttggtggtcagcacggatctcaagtatcgacggaacttgtatagggaggcatgcaccgcagtggtgaatacacgtcgagctgcatgacatagcatagcatactcgggtactgaaggata

SEQ ID NO: 494279 - DNA, 1532 bp, Homo sapiens
tttgatatgattctatttattataagtcaaatagatataattcattatgagaatgaaatgaattattgttaatagttatgagattaacataaacaatcatcgtcgtgtattgccagaaaagttattaagatggtagcagttgttctcgtgtctctagcacatcccccttcagagaaactttcaaatagaaaatgaaactgggcatctctgctatgcaaatattggtggctgttgtcatattcctgcaacagcccttgacagtgggctgggctgggtgctgttctcactttaaatccggggagctgaggcttggaggaataaagggaacagccccaggacttgaacagagcccttgggtcacccatgtctctactgtagcttctaggccgtttcccctggggatccaatgtgtttcctgttgtccccaatcttttaaatttttttccattattagagttagtaccagcagccagggtggaactgcaattcgtgaagattgcattggcttgctttaaaagaatggtatctgtacgggtcccttaaccattcgaggggcaccatcgggcttgtgggtcatgctgggaagtggcccggctgcctgtgacagtttctcagccaggcagggactcttttccacacgatgacactggaactgaatgccacactccttctccttggaagaaaaaattgtgtgtaggacaaggactcaggacatgggtgtggaagaatctctgtggtacgagcccagcctggaagaactcttaggctgcgtggacgctgcccggccacggtgacggagctgttccaatgcctgcttcccgagacaggcccatgaaatcatgcaggcttgagcccggcttctagaaggagcacgcctctggccagggtggctggtggaaaccagtcctggccaagggagccccggccaggctgccaggtaggcagcaggcggcagggggttaatgtggggagcgggcaggggtggggtgggaagccagctggggaaatgggggctgcagggcccagccgacaggcacagacacagggggctctgtctgcttgcccgctgcctggcactgtgactaaccgcccactaatgtgagtctgaagtcagcccttgtgtcgtccctggggttctgggagcacagcgaaaaccctttccagcagcccccctcattctggaacctgcagccccaacatccattctttcagctctcagggttgctgggggctgatgagccagtggaagtatccctttccctggccaggaagggccaccagcaaaaaagaagcagaaaaccagtctcccctactctgggtggggaagtggggggcacaggagcctactaaacctacgtgaccgccgtggtagctgctccacacgcagcaaaggagccattgaaatggggagaggccaaatcgaatatggaaaaaatggcaaaatatcccgttcacagtttcatacgagcaacacactgaaataggattttggaaatttatattagattaaaatgaattttagtactaaagtg

SEQ ID NO: 494280 - DNA, 328 bp, Homo sapiens
  misc_feature (160)..(160): n is a, c, g, or t
  misc_feature (316)..(316): n is a, c, g, or t
gtcgacatcaagctggccagggtcaccaaggtaatgagcgggacaggttctcagggacagtgcacgcaggtcgcgtggaattcatggacgacacgagccgatccatcatccgcaatgtaaaagggccccgtgcgcgaaggcgacagtgctcacccttttnggagtcagagcgagaagcccggaggttgcgctgagcttggctgctcgctgggtcttggatgtcgggttcgaccacttggccgatgggaatggtccgtcaaatctgctcttttttttgtccgcacacgtaactgagatgctctttaaatagagcgtntgtgtttcaagt

SEQ ID NO: 494281 - DNA, 865 bp, Homo sapiens
ggccggtctctctgaggggttgtgggtgccgatctctctgaggggctgggtggtgctgctctctccgagcgggtggaatgccgttgtctctagatgggtgggggtgccgctctacattggctccatatcatgtgacgtttatggtactggtgtatggtctctcttcattctttacggtgctcagtattttgaacgtcgcttatcaacacgggaaaggcctcttggccggtcaccacgtacggacgcatgaccggtcatcgtcgtggtgaggctgatatgctcacatgattactgactaggtagagagggaaaatcctaagacagaggaactccagagatgagtgtctggagcgcttcagttcaggctttaaaggccaggacgggccacacgtggctggctggctcgttccagtggcggcacgtccttgggcgtctctcatgtctgcagctcaagggctggcacttttttacaagtataacacaatgggttgttattgttctattgtttatcatggtagcaggtgatcttgtggtctgctgtggacattcggggtgagtcctgttgctgcgctgtgtagcggatgttgagaatacgggtgcgttcctccgtgaatgtggtgtgcccgatggcgttgggggaattgtacagcgtggaccaatgctctacctgtagcgtgcaatagccgtggtaaacacctgtccttacgaaaacggcctcgtttgctttatggggggaagaacagaaacagattgatagcggggggctctctgtcaaacatggtttttgagctctagcaccagcacataatcagtcggcgagattgccgccacaaatatggggcactcgaggggacaccaaggccca

SEQ ID NO: 494282 - DNA, 538 bp, Homo sapiens
cagcgagtatgctgtcgcagtcagacagtgtcacgttatgctgcagtaacaaacagtcctaaaggctatatggatatacaacagcaaaggtgtattacttgctcatgccgcttgcccatttcaatgtctgtgctctcatccatgccatgttcactctgggacctgggctggccaaaccacccccgtctgagacattgccagtctcatggtggtagagggtgacagatggcataaccaccagctggctcttgaagcttctttccagagacgatgtgcgtcccttccacccaaattttattggccaaagcaagtcacaaggtcgccctggatataaaatactatcagagagaggcactgccagtcagacatcaagcgtgatatcagcgagacaggaaggtatgatctacccaagggagagcaagcaaatattttcaacaataacacaaatctaccacagctgggatcccagcaggggtatggtttatgcaaatcaagatcccatcaagcaggatcagacccctggtggggccttgtgtgc

SEQ ID NO: 494283 - DNA, 565 bp, Homo sapiens
  misc_feature (465)..(465): n is a, c, g, or t
  misc_feature (470)..(470): n is a, c, g, or t
actagtccacggttggctagttacatcagatataatgggggtataggcattgcataaatatacccattccacatgggagaaattggccaaaacaaagaggttacagggcctatgcaagtccaaaatccagcggggcagccaaatcttaacactctgaaatgatcttctttgactccatgtctcacatcctgatgcaagaactgggcgcccatagccttgggcagctccacccctttggctttgcagggtacagcccctctcctggctgctttcatgggctggcattgagtgtcttttctaggtgtacagcacaagctgttagtgtatctaccattctggggtctggagaacagtgcccctcttctcacagctccactaggcagcaccccattggggactcagtgtgcaggctccaactccacattccccttctgcactggcatagcagaggttctccatgaaggncctgnccctacagcaaacttcttcttggacattcaggcatttccatacatcccatgaaattgagacagaagtttccaaacctcggggcttgagttctgtg

SEQ ID NO: 494284 - DNA, 302 bp, Homo sapiens
cagaggctgcggccggggggcacgtgttatcatcaggggagagatagtcctgcggtctgctccccgtcatcgctgtatccccaacgccgcccgatgtgtccccgtgtgtctcctgcccgccgcgccggattaagagccgtgtcaggaagaggaaacctgcaccgagacaaagcagggggagcaccaggcacaagcccctccccacactccccaggcacaggcgggcacccggcctcaccatccagggtcagccggtcctcccgcacgccgcccgccacattcctgcacatcaccgtcttcac

SEQ ID NO: 494285 - DNA, 249 bp, Homo sapiens
tgtatcatgcttatatgatagaatgggatccttaaatgtcccattaatccaagggcataagaaaaaaggggactaagattccccttggccatttaaaaaaatatagaaggtagatataaaccccggcctagtgaccattacgataaatattagtggtccactcgtggatcagttccaactaaatggatggggaaaaatataacatcctaacattactaaaggaaagctggagtggttacctattacggg

SEQ ID NO: 494286 - DNA, 484 bp, Homo sapiens
gggaacaagtcatttggtgaaaggtcacgagggcacacaggcccagggaagactggagatttatgctactattatagagactcttcccctcccccatacctgaccaccgatagcaacaggctccagtataatgagagtaacgacagcgggaagtatggcaagattcagactctattggagaaagagttcttttttggtggtataaaatttattttatgttttaagttttctgtagagatggggatctctctatgtggcccaggctagtctcgaactcctaggctcagacaattctcccagctggacatctcatagtgctgagatcacaggcgtgagccacagtgctcagccaaggagttcttaaagaagcccaaagacaaatggagagaccataacagggacacctgaggaatctgaacagtcggtcacctagaagtacagtgaagatgaaacacagcccaagttggagccagaataacaaaaa

SEQ ID NO: 494287 - DNA, 191 bp, Homo sapiens
gggccgcggtagtcgaacaaaggagcaggggctgctcgccggagtggacccgccacccacgctcccggggtcgctgcgcaagcgggctctcgtctacttgccaccatgaccgccaagcggctacaggccgaggcggtgcgagatccagttcggccgtcagtcaactgcgagcaatcaagtaccatgagcgg

SEQ ID NO: 494288 - DNA, 460 bp, Homo sapiens
atatataaatacacagacacacatatatacaaacacacgcattcattttcgtccacagttcctggctcataactcccacagcccttgttacactcttttgttaacattgggtgtgtcaggcctcaggagacaatcactctaacctcctgcccttccttttacctgcccaagacaggactctaatcttccctacctttctgatggtgggtcataaaactcattccagagacggtcccaccccatatcctgctagaaggaatgctgctgtcatgaagcttccataaaaaccaaggggactggattcagagagcttccagataactgaacatacagaggttctagaagggtggtgcgcccagggagggcacaggaagctccatgcccttccttcatacctcaccctatgcatctctttatctgtatcttttataatatcctttataataaaccagtaaatgta

SEQ ID NO: 494289 - DNA, 279 bp, Homo sapiens
atattgcccctaggctgggaacaagggagatctctctcaaaaaaaattttttgagaaaaagagtaaagctgggccaggtgcaatggtcacgcctataaccccagcactttgggagttggaggcaggagactcgcttgaggccaagagtttgagactaacctgggcaacaaagcaagacctctgctgttataaaaaatgaaaaaattagccaggcatggtactgcgagcctgtaatcccagctactctggaggctgaggtaggaagactgcttgaggcta

SEQ ID NO: 494290 - DNA, 660 bp, Homo sapiens
  misc_feature (629)..(629): n is a, c, g, or t
ctgcacaatctggatacacagattagcacttcctagggggataagaatgcatcttcatacataaaaacacacacaccaagcaaaaaacaccaccactacagcaagatgacactaatgagcaatggactttttttccaggaggaaaagttttaatttattcaaagaaatagcataaaaatccccgtacataattcttaatctttcaaataccttctcagatgctttccctccacccaaccaggagagaagtgttccatactttttccacactatgccaggctcctctcttctctttcacatttccccacttaggtgggcccagggagaagctcatttggcttgaaagccaaggtgttactcacaaataaccattccaatcgacttgcaaagatacaattcattaagtgctatgcacgaaaagtgaaagctatgaagagagattattttaaggagacttatatggcgaaagtgagagcaagcctttctgaggagtgaggttaaacattgatcctaaaggtgttgaaaggtgggccagccaagataatggacaaacactaactgggctcacaagatgcacaaagcccagtgtgtttaaccactaaactttaccttttaaaaatatgcgacgngcacgtcacaggggtacacccgtgcacaggg

SEQ ID NO: 494291 - DNA, 431 bp, Homo sapiens
gaatttctggctggtattacttttagaagcacagagtctccctacctttctgtcataaccagcctcttgtgttaaggttcttaaggaataacttgtgctggctgatgagctcataattttgacttcaatatgatctttttatagtctcttccctatttgtgaatgtttttcttttctttcatactcctacaacattttgttcttgtatccattcaggtgaaatctatccttaattctctgagtggagaagaattagagactctaaaagttgaattagagcaactcaaagaaacattttctctagcagaattttgtgaagaagaggaagaagagaaaaaaggtaatatgaaaatttagtatctgagtggagaggatgcagtgtgtttgtatgcagtgcattgcccttgaaataaattatttactcttattaa

SEQ ID NO: 494292 - DNA, 228 bp, Homo sapiens
ctgtgctgccatgccacacaagccaacagccctgaggatgctctgtggctccattttcagctgcatggagaacaggcacagtcagttctcagatatgctgctggtgggcatggcccactcacctgcaactttcagtgtcaccactctcactggcgctgggcctactatgccatttgttggcctgcacatcgacgcctggacagggctaccgagcgtcgaacttccgta

SEQ ID NO: 494293 - DNA, 177 bp, Homo sapiens
tgaagatctttattactatgctgcctcagtaaaggctggctatcaaagttctgtactaaagtctggaggtgattagcattaagccatgggacaagctactaccttcttcctgacccctgttcccagggagccattacggagaggcttgaatctatcactgcccaaatccctgcgaaa

SEQ ID NO: 494294 - DNA, 217 bp, Homo sapiens
tggccccaactgggcccttggaagtacaaatttaaggaaaaaccccccccccccgtaaaggaattattttcctgttgttccaattttgtggggtttttattcaacgggggtaaaaccaaggttctgggggacaggggggtcccttagccccctgtgtttttccaaaccctttcccaaactttaaacttggaattaaaaaaaaattttttaaccccca

SEQ ID NO: 494295 - DNA, 470 bp, Homo sapiens
cttgagcatagggtgatggtagtcattctctgtagggagatcctctccactgggaaggcgcgtaacatgccttttaatggcatggtctctgctactgcaacctgtgtggctccaaggtggttcgggagtttccagaattaattgtatacatgttttgtttgtttgtttttgtttttgttttgagacggagttttgctcttgtcgcccaggctggatcgcaatggctcactgcaacctccgcctccctgcctcagcctcccgagtagctggtatttcaggcgcccgccaccacaccgggtaattttggtatttttagtagagacagggtttcaccatgttggccaggatggtctctatctcttgacctcgtggtccacctgcgtaggcctcccaaagtgctgggattacaggcctgagccactgcgcccagttttctcctaactccattttacaagcaaagatcaaggtta

SEQ ID NO: 494296 - DNA, 206 bp, Homo sapiens
atagggcgcctccccgtccctcggggccgcggtgagcaggaaagacaacacgttcacagaaagggagctgagtgaatcttaccagatggggctgcctggtctggggatagttgctcgtctgacccaggcatggtgtttgggaagccgctggacaatattctactatgtaagcactccactccccagccctcccctccccatctgcg

SEQ ID NO: 494297 - DNA, 110 bp, Homo sapiens
agtggcgctagtgtgcatggcatattgcagcacattctggcttgcattgtgtgtatgccagctggtccaatgtcgtgcccaactgagctcccccaccaggtctgccagct

SEQ ID NO: 494298 - DNA, 195 bp, Homo sapiens
aatttggttggccccttccccccggggggggtttgggtaatttttcccctttggatccctttccccccccaggggggaacccttgggtttttaaggttcttgggggggggtttttccgcccccttttttttttaacccggtttgggttggcccttttgggggttttccaaatttccctttaatttttttccccca

SEQ ID NO: 494299 - DNA, 154 bp, Homo sapiens
tatatgcttaacaggtgttttgaaataccatgctcagcccaacacagaccaattaatacaatctcagtgggtgggcctgacactgtgcttttttgagttcctaggtgatcgtatgtgcaggtggagttgagaaccactaatgatgagatacagc

SEQ ID NO: 494300 - DNA, 240 bp, Homo sapiens
gagactccatagaataagtaattcatctttcactgcctcacagtgatgcagtgacatcttctgtttctcccacatcctcttgatgttgctgatctgactcctgtgcgtgcacagcctgtccagagttccacttcacggtccagggtgacgtgttgctcttggtggaataagagctccgtgcttgtctcatctgtgatatatgtcaggacagttctttctcagagtcagctcctgttctcc

SEQ ID NO: 494301 - DNA, 498 bp, Homo sapiens
  misc_feature (1)..(1): n is a, c, g, or t
nttaacagttcatatgacaaatacccgaatcaacaagcgccttatattgtctaatttcagatccgaaagtaccatttgtgcttgagcctcagcctccattataagagtctatgtgataacaaagtgtggtcatagtccagcccctccatatgtagctcgcgcataattctaaatgaatggcacagatattaatccgaaggtctctgttatttaaagtctgtaacttgttcccaataaggtttctctttcacagtctggggcctaacgttggggagaagccaccctctcctgaaatcccatctttctgtttccttatgtagcccctatgatctgattaattgtcaatcagatgatcaaaagcctcttgaacaaagatgagaatcttggccacatccgtgtggtcacattaataccgtgcacgagtgcacatgctcagtaatttaggctctgcgctgtggaatgaggtctgtttttgagtctcatataaaaacacaacat

SEQ ID NO: 494302 - DNA, 865 bp, Homo sapiens
ctgcactctctgcctagcgtgctcgcaacgctcattgctttccttccctccctcggtcttccttcgtcacgctgtaatggtgattgtggcgctcgcgacagacagggaggcggaggcagaggacacttgtcatggccgcctctaaatcctgtgtgaggcagcaggttggtcagcagccgctgtacctgagctcctgggagtgtgtgtgtggtgcgtgcggctgaggactagcagggcccgggcactggggagggctagccgcgatgggcagcttggcttctgtgcggtctggtggcaccccctgctgcttgggcagcgggtgccatatacctgtggagtcaggcagcaacggcgccgggaggccagaggccggggcgacgccagcggcctgaagcgcaacagcgaacggacagaccccggaggccagggccagtgcggccccgggcagcgggacacccatgaaggtcccggtgctcactatggacatgaacctctcttgcatcacgagccacaagcagccaagactacaaggcgacatcaatatcaaacaacgcagtgaacacaatatgaacaagcctattcagtggctatagctgaggctatcagcttgttgccctagagaagaagaatgtagaccttgcgtacaatagtatcagaaacagagcttgctgcccttgtgcaaccaaggttggccacacacacgtgggcacacgcacacgttggcgcccacccggacttggtaccaaacacgcctggtgggcacccgttgacgccaccaaattagtggttcacaccggcctcgtcagttcaggaccggtgccaacacaggcccccagttgagccacgcttagcacagagtcaggac

SEQ ID NO: 494303 - DNA, 474 bp, Homo sapiens
  misc_feature (8)..(8): n is a, c, g, or t
  misc_feature (96)..(96): n is a, c, g, or t
  misc_feature (208)..(209): n is a, c, g, or t
ccctaacngcctggaatccataccgctggcccccataaaacctagtgtccagtaaattgggaaaaggtttgaaacccccatacagagtatgttccncctggaccacaaaagaccttaaaataaaaaactcctgatgaagaacctccagggaccacaaagaaggcaccctgtagacacgggggccctcccttgaaggtagagggtgggnnggagggagaggatcagaaaaaatagctattgggtgctaggcttacttcttgggtgatgaaataacgtgtacaaacctccccgacacgagtttacctatataacaaagctgaacatgtgcctctgaatctaaaatacaagtttagtaaaaagcaaagttgtattagaagtcagtaagactaggtgtggtgactcatgcctgtaaccccagccctttggaagaccgattcaggaggatcacttgagcccaggagttcaagaccagac

SEQ ID NO: 494304 - DNA, 201 bp, Homo sapiens
  misc_feature (40)..(40): n is a, c, g, or t
  misc_feature (94)..(94): n is a, c, g, or t
ccccccccccccctccggcccttgcggtgaaaccccctcnccccctcccccagggtttttaagtttcccgtttggttggtggggaggtttccangggcccccccccccccccctttccccaggggtgggaagggaaaatttttttcccagggcaaaaaatttttaaaaaaacgggggttttgccctttttttaaaccccca

SEQ ID NO: 494305 - DNA, 154 bp, Homo sapiens
tcacatacacggcccgcagagagtcctggggcacaggaagcaggacaggtcagcctgggtccggggttgggctccatgtgggtcattcataaccgaggttggggtcacgtaccgggatgatgacccacactttctccaggagggatgaggatgg

SEQ ID NO: 494306 - DNA, 952 bp, Homo sapiens
ctacagcttttccatgtaacattagtcttggttctgaacacttctctaacaggcacaatggtcacattttttgcacaatttattccttaattccctctgtggcagctaaaatgggctcttcaccaagtttaaacacaaaatttcatcataacaaaaatactactaaatataactactgtttccatgtcccatgatcccctctcttcctccccaacctgaaaaaacatgagttcctattttttcctgggcagcagggggggatcgcattagcaaccaccacaatgtagtgttgtccaatttcaaacatttggcgcatatggcattttctaacttaggaaagccacaagtgttctggggcccatcatgacatttgggtacgcattaacctggtaccgtttggtgcttccaaatcacttttgggttttcaagaatttcttgatactcttatagcctgccttcacttttgatcctttattctttctattgtgccaggtgcacacagattaccttcctgttttagccttctgtcttgtccacaacattcttacttggtggccatgtacttggcaaaaggccgcatgaaccttactgggtccacctcagggctcaaagggcacccgtggtccctatggaggcgatccccaagacaaaatcctaaaacaaaaatacgcggcaccacatctccctaagggcagacaccgggtaatcaccctttaaaacgtccatacccacagagggggcaaagaacgggcggaaaaaacgtcccatttacccaacactctccacagggggggggagaaaaaccacacacgtgacaacaatcacccgtggtggagacaaacacacgcggtaaccaagcggctggtaacagagccaccccaaacaagacgtagtgagcgagagcgcccacagcgcccgcaggcgacaccaagcacctgagcgagctgttccc

SEQ ID NO: 494307 - DNA, 174 bp, Homo sapiens
tggtctaaaatgtgttgtgttgaaaggacagctgatcacaggcatggaccaggctctgtagggatgtgcgtaaacagagacgtttcgtgaagattcccccaaagcttgacatacggaaatgaaggagtttctggtgtgatcccccccaattcagtgcttcattttgatgtactt

SEQ ID NO: 494308 - DNA, 285 bp, Homo sapiens
tctcctacctgtagtcccagctacctgggagactgaggcaggagaatcgcttgaacccgggaggcagaggttgcagtgagccaagattgcaccactactctccagcctggggacagaatgagactccgtcaaaaaaaaaaaggaattaaggagggagagagttgaaggaaaggaaggacaaaaggaaggaaggagagaaggaaggaaggagaaggaaaggaaaaatttcatagattttgataggacattagagaatttttaaaacattgttcatgaccagtaaag

SEQ ID NO: 494309 - DNA, 404 bp, Homo sapiens
attcgcggccgcgtcgactttattttttttttttctggagacagagtcttgctctgtcacccaggctggagtgcagtggtgtgatctcggctcactgcaacctccacctcttgggttcaaacgattctcctgcctcagcctcctgagtagctgggattacaggcacgcgccaccacgcccggctaattttcgtatttttagtagagatggggtttcaccatgttggccaggctggtcttgaactcctgaccttaggtgatccgcccgccctggcatcccaaagtgctgggattacaggtgtgagccactgtaccctgcctggtatgtagaattttctaacaaatagtttagtggtcgacgcggccgcgaatttaatagtagtagtcgacccgggaaattctggc

SEQ ID NO: 494310 - DNA, 177 bp, Homo sapiens
gatggtgatctcgttgtactgcgtgctagcttgggcatgggggcctccacggtcagtgtgcccggaggggacggggagtagtaaacttgggtggcgtccacaccggggggcagcgtgtatttccgcgtgaaggcaccggagatatagccatgctcgtcctgccgctcctcgtgcttg

SEQ ID NO: 494311 - DNA, 2399 bp, Homo sapiens
  misc_feature (2364)..(2364): n is a, c, g, or t
actaactctacctttctggcttcagggggaggagagttagatcatgcatttgtccgatccatctctgttcacaggacaccagacatcagagacagagagaaaaattcaaagggccaacccgtctttcctttgggcaggtgctatctagacctgaagtagcgggaagagcagaaaggatggggcagccatctctgacttggatgctgatggtggtggtggcctcttggttcatcacaactgcagccactgacacctcagaagcaagatggtgctctgaatgtcacagcaatgccacctgcacggaggatgaggccgttacgacgtgcacctgtcaggagggcttcaccggcgatggcctgacctgcgtggacctggatgagtgcgccattcctggagctcacaactgctccgccaacagcagctgcgtaaacacgccaggctccttctcctgcgtctgccccgaaggcttccgcctgtcgcccggtctcggctgcacagacgtggatgagtgcgctgagcctgggcttagccactgccacgccctggccacatgtgtcaatgtggtgggcagctacttgtgcgtatgccccgcgggctaccggggggatggatggcactgtgagtgctccccgggctcctgcgggccggggttggactgcgtgcccgagggcgacgcgctcgtgtgcgcggatccgtgtcaggcgcaccgcaccctggacgagtactggcgcagcaccgagtacggggagggctacgcctgcgacacggacctgcgcggctggtaccgcttcgtgggccagggcggtgcgcgcatggccgagacctgcgtgccagtcctgcgctgcaacacggccgcccccatgtggctcaatggcacgcatccgtccagcgacgagggcatcgtgagccgcaaggcctgcgcgcactggagcggccactgctgcctgtgggatgcgtccgtccaggtgaaggcctgtgccggcggctactacgtctacaacctgacagcgccccccgagtgtcacctggcgtactgcacagaccccagctccgtggaggggacgtgtgaggagtgcagtatagacgaggactgcaaatcgaataatggcagatggcactgccagtgcaaacaggacttcaacatcactgatatctccctcctggagcacaggctggaatgtggggccaatgacatgaaggtgtcgctgggcaagtgccagctgaagagtctgggcttcgacaaggtcttcatgtacctgagtgacagccggtgctcgggcttcaatgacagagacaaccgggactgggtgtctgtagtgaccccagcccgggatggcccctgtgggacagtgttgacgaggaatgaaacccatgccacttacagcaacaccctctacctggcagatgagatcatcatccgtgacctcaacatcaaaatcaactttgcatgctcctaccccctggacatgaaagtcagcctgaagaccgccctacagccaatggtcagtgctctaaacatcagagtgggcgggaccggcatgttcaccgtgcggatggcgctcttccagaccccttcctacacgcagccctaccaaggctcctccgtgacactgtccactgaggcttttctctacgtgggcaccatgttggatgggggcgacctgtcccgatttgcactgctcatgaccaactgctatgccacacccagtagcaatgccacggaccccctgaagtacttcatcatccaggacagatgcccacacactagagactcaactatccaagtggtggagaatggggagtcctcccagggccgattttccgtccagatgttccggtttgctggaaactatgacctagtctacctgcactgtgaagtctatctctgtgacaccatgaatgaaaagtgcaagcctacctgctctgggaccagattccgaagtgggagtgtcatagatcaatcccgtgtcctgaacttgggtcccatcacacggaaaggtgtccaggccacagtctcaagggcttttagcagcttggggctcctgaaagtctggctgcctctgcttctctcggccaccttgaccctgacttttcagtgactgacagcggaaagccctgtgctccatggctgccatctcacctcctgctgggcagggggcatgatgcgggccagtgctccagccacagaaaagaaagttcatgctttgttcagcctgccttcttttctcccttttaatcctggctgtcgagaaacagcctgtgtctttaaatgctgctttttctcaaaatgggacttgtgacggtgtacctgaggcccccatctccttaaagagtgtggcaaaataatgatttttaaatctcaanaaaaaataaattgacagcagagaggaacacacact

SEQ ID NO: 494312 - DNA, 462 bp, Homo sapiens
gtagaaggaagggctttattcagctgggagcattggcaagctactgccttaaaatccgagctccccgagtgcacaatttctgtcgcttttaagagctcacaacactaaaatttcacatgaaagggtcgtgattgatttgagcaagcaaggtgtacgtgacgggctgcatgcaccgatggtcagagagaaacagaacagggcagggagtttcacaatgttcttctatagaatgtctggaatctatgaataacatcggtttctaagtcatgagttgatttttaactactaggtttaggccaggcaggcccaggtccagttttgggcctggcgctgggctgcctgtctttgatttcacttccttttttttaaaaaaaacaaaacaaaacaggtactgagtataaaacaatatgagagggtctctctcttccctcgctttaactttcggagggctgaaattctttc

SEQ ID NO: 494313 - DNA, 988 bp, Homo sapiens
  misc_feature (953)..(953): n is a, c, g, or t
gacttggaggaagaagagtgctcattgcaagctgttggctggaacctcacctggcctagcagtgtcctggagcaatgtggccccgtcctcggcctgtgctctaaacatcagagtgggcgggaccggcatgttcaccgtgcggatggcgctcttccagaccccttcctacacgcagccctaccaaggctcctccgtgacactgtccactgaggcttttctctacgtgggcaccatgttggatgggggcgacctgtcccgatttgcactgctcatgaccaactgctatgccacacccagtagcaatgccacggaccccctgaagtacttcatcatccaggacagatgcccacacactagagactcaactatccaagtggtggagaatggggagtcctcccagggccgattttccgtccagatgttccggtttgctggaaactatgacctagtctacctgcactgtgaagtctatctctgtgacaccatgaatgaaaagtgcaagcctacctgctctgggaccagattccgaagtgggagtgtcatagatcaatcccgtgtcctgaacttgggtcccatcacacggaaaggtgtccaggccacagtctcaagggcttttagcagcttggggctcctgaaagtctggctgcctctgcttctctcggccaccttgaccctgacttttcagtgactgacagcggaaagccctgtgctccatggctgccatctcacctcctgctgggcagggggcatgatgcgggccagtgctccagccacagaaaagaaagttcatgctttgttcagcctgccttcttttctcccttttaatcctggctgtcgagaaacagcctgtgtctttaaatgctgctttttctcaaaatgggacttgtgacggtgtacctgaggcccccatctccttaaagagtgtggcaaaataatgatttttaaatctcaanaaaaaataaattgacagcagagaggaacacacact

SEQ ID NO: 494314 - DNA, 701 bp, Homo sapiens
  misc_feature (666)..(666): n is a, c, g, or t
atctcagcgcaataatgaacacgcccggtcggacgaactgagctgattctagagatcgaggatagtgccaagatgggagatgtctcgtacggctacagttactggtatctcagtcacacagtgatgtccggagattcggagcggcgatatctggatctaagtctccgctccgatgtgaagtctatctctgtgacaccatgaatgaaaagtgcaagcctacctgctctgggaccagattccgaagtgggagtgtcatagatcaatcccgtgtcctgaacttgggtcccatcacacggaaaggtgtccaggccacagtctcaagggcttttagcagcttggggctcctgaaagtctggctgcctctgcttctctcggccaccttgaccctgacttttcagtgactgacagcggaaagccctgtgctccatggctgccatctcacctcctgctgggcagggggcatgatgcgggccagtgctccagccacagaaaagaaagttcatgctttgttcagcctgccttcttttctcccttttaatcctggctgtcgagaaacagcctgtgtctttaaatgctgctttttctcaaaatgggacttgtgacggtgtacctgaggcccccatctccttaaagagtgtggcaaaataatgatttttaaatctcaanaaaaaataaattgacagcagagaggaacacacact

SEQ ID NO: 494315 - DNA, 163 bp, Homo sapiens
aggcatgaaatgctaaggttttaaaatatgtcatggattggaagaatggcattgataaagaacaaagttcagttatggaaagagaaacacagaaggaagagacacaataatcagtcattatgtattcatgtgagaagtcagacagtaagatttgacggggaaa

SEQ ID NO: 494316 - DNA, 454 bp, Homo sapiens
  misc_feature (419)..(419): n is a, c, g, or t
tctgattggtcagcctagacgaggcagcttatgttaatttgcacaaaagtacagcagtactagcagttgccctgtcactgttttcttttcagggctcctgaaagtctggctgcctctgcttctctcggccaccttgaccctgacttttcagtgactgacagcggaaagccctgtgctccatggctgccatctcacctcctgctgggcagggggcatgatgcgggccagtgctccagccacagaaaagaaagttcatgctttgttcagcctgccttcttttctcccttttaatcctggctgtcgagaaacagcctgtgtctttaaatgctgctttttctcaaaatgggacttgtgacggtgtacctgaggcccccatctccttaaagagtgtggcaaaataatgatttttaaatctcaanaaaaaataaattgacagcagagaggaacacacact

SEQ ID NO: 494317 - DNA, 1209 bp, Homo sapiens
aagcacaatcaagaactgacatctcagtccgttagctgcagaagaataaatgcaatctattagaaaaacaattggacatacatgcgaaatatgataaagcatgccgaaactggacgaggacatctgtcttacgcacgaacaccaagtttcccctacgaacagacgaaacgacaaccctgactcaaacagcatgttcagagccaaccttgaacacaattggatcttcttgacacaggacgtataaccaaacttaccacaactgcaggcccattgccacgaaaaacaaaactgcaacgagtatggaacgcaacaactaccattgaacgacagaaccacggacacacggacaaacgacactgacaacggctacacgggcacgctcgacgctgcgacagcacctcggctcctacgcacaaccaacacctacgacctttacctccttcacgaaacgactacaacgggaccaaaccactaccccgaaggactggctatacgcccaacagatgcccacaggcaaagcgaaaacttccacacaacacacacaaacggcaaacgctccaaaaacagaacacaacccccaagacacacaaacaggcggaacgaatcggcacaccgcgcaagcccaaggggagaaagcacacaacgagagagatgccgcaacggagggcccaacaaacaacagatggcgaagcgggaaagagataacacacaccgcgggaggcacgaccctaaacgagaccacgacacacagcgctcaccaacaaaacaagcgggagcaccccccagcattaacaaacaacacatcgggagcgacctggcgagcacgggctcacaacataaaaccaaacacaaacaccaccatgaggcagaaacagaaaaagagacacaaccaggctcacacagacaggacacaccagaaacaaaacaaacagacaaaccgctacgacagaaaggatataaaaccactcaaaaaccagatccagccaacagcaaaaaaacgggggaagtaggggacgaaacaggaacgaacttccgcacacacgaacagtcaaacaaacaaataaacagcaaacccgggtacaacgcaagctacaacccagatacaagaagaacaaaatccaccagagcgaaagacacagcccccgacgggcaacaacaataacggacctggcaaagaccaaaccaaaacgaggcaacaacacaaagata

SEQ ID NO: 494318 - DNA, 599 bp, Homo sapiens
attgtgggaagctttgttcttttgctctttgcaataaatcttgctactgctcattctttgggtccacactgcctttatgagctgtaacactcaccgtgaacgtctgcagcttcactcctgaagccatcgagaccacgaacccactgggaggaaaaaacaactccagacacaccgccttaagaactgtaacactcaccacgaaggtctgcagcttcactcctgagccagcgagaccacaatcccaccagaaggaagaaagtccaaacacatccgaacatcagaaggaacaaactccagacacgctgcctttaagaactgtaacactcaccgcgagggtcagcggcttcattcttgaagtcagtgagaccaagaacccaccaattccggacgcagtaggatgatggttatcagagggtaggaaggggtagcagtggtgggaggtagagatggttaatgagtatcaaaatatagttatatacaatggaataagatttagtatttgatactagatctagttttggctactacaacaatgtgattactgacggaagagagagaccttctcatgtcgttttatactcagtacctgttttaagaag

SEQ ID NO: 494319 - DNA, 2290 bp, Homo sapiens
  misc_feature (2255)..(2255): n is a, c, g, or t
gagactaactctacctttctggcttcaggtgctatctagacctgaagtagcgggaagagcagaaaggatggggcagccatctctgacttggatgctgatggtggtggtggcctcttggttcatcacaactgcagccactgacacctcagaagcaagatggtgctctgaatgtcacagcaatgccacctgcacggaggatgaggccgttacgacgtgcacctgtcaggagggcttcaccggcgatggcctgacctgcgtggacctggatgagtgcgccattcctggagctcacaactgctccgccaacagcagctgcgtaaacacgccaggctccttctcctgcgtctgccccgaaggcttccgcctgtcgcccggtctcggctgcacagacgtggatgagtgcgctgagcctgggcttagccactgccacgccctggccacatgtgtcaatgtggtgggcagctacttgtgcgtatgccccgcgggctaccggggggatggatggcactgtgagtgctccccgggctcctgcgggccggggttggactgcgtgcccgagggcgacgcgctcgtgtgcgcggatccgtgtcaggcgcaccgcaccctggacgagtactggcgcagcaccgagtacggggagggctacgcctgcgacacggacctgcgcggctggtaccgcttcgtgggccagggcggtgcgcgcatggccgagacctgcgtgccagtcctgcgctgcaacacggccgcccccatgtggctcaatggcacgcatccgtccagcgacgagggcatcgtgagccgcaaggcctgcgcgcactggagcggccactgctgcctgtgggatgcgtccgtccaggtgaaggcctgtgccggcggctactacgtctacaacctgacagcgccccccgagtgtcacctggcgtactgcacagaccccagctccgtggaggggacgtgtgaggagtgcagtatagacgaggactgcaaatcgaataatggcagatggcactgccagtgcaaacaggacttcaacatcactgatatctccctcctggagcacaggctggaatgtggggccaatgacatgaaggtgtcgctgggcaagtgccagctgaagagtctgggcttcgacaaggtcttcatgtacctgagtgacagccggtgctcgggcttcaatgacagagacaaccgggactgggtgtctgtagtgaccccagcccgggatggcccctgtgggacagtgttgacgaggaatgaaacccatgccacttacagcaacaccctctacctggcagatgagatcatcatccgtgacctcaacatcaaaatcaactttgcatgctcctaccccctggacatgaaagtcagcctgaagaccgccctacagccaatggtcagtgctctaaacatcagagtgggcgggaccggcatgttcaccgtgcggatggcgctcttccagaccccttcctacacgcagccctaccaaggctcctccgtgacactgtccactgaggcttttctctacgtgggcaccatgttggatgggggcgacctgtcccgatttgcactgctcatgaccaactgctatgccacacccagtagcaatgccacggaccccctgaagtacttcatcatccaggacagatgcccacacactagagactcaactatccaagtggtggagaatggggagtcctcccagggccgattttccgtccagatgttccggtttgctggaaactatgacctagtctacctgcactgtgaagtctatctctgtgacaccatgaatgaaaagtgcaagcctacctgctctgggaccagattccgaagtgggagtgtcatagatcaatcccgtgtcctgaacttgggtcccatcacacggaaaggtgtccaggccacagtctcaagggcttttagcagcttggggctcctgaaagtctggctgcctctgcttctctcggccaccttgaccctgacttttcagtgactgacagcggaaagccctgtgctccatggctgccatctcacctcctgctgggcagggggcatgatgcgggccagtgctccagccacagaaaagaaagttcatgctttgttcagcctgccttcttttctcccttttaatcctggctgtcgagaaacagcctgtgtctttaaatgctgctttttctcaaaatgggacttgtgacggtgtacctgaggcccccatctccttaaagagtgtggcaaaataatgatttttaaatctcaanaaaaaataaattgacagcagagaggaacacacact

SEQ ID NO: 494320 - DNA, 1107 bp, Homo sapiens
gttagaaagcctgatattgcctgactcggtaacagctcagagcaggtcagaactggggacagtctgggccgtccttactgcctgcattgatcgctctgtaatgccagcactgtctctggaggaaccactgagcgaggtgaatgaaggacgagggactcgtgtgtgctaggaagaactcagagcctgtggagagcccccattcactagaagcactgagagcatgcggtcccctcgtcagggttctgaatttcctgctgggtgttcacaatagatgctatgtgtatcttataactctatcttagctttattcccgcgcagcgttctcatgagcaccggtgggagtaagatcttgcattctcttgaacagttgttggagggcttgcgcaatctatctttgtgttggccttgatctagcgcattgagccatcaaagcccccggtcctatagccatccgttctttagacaccttgcacacccagagttcagggtacttgtgtggggaacactttgcagcggtgaatgagaagggcacgcgtccaacgggggaggggtatgacccccaagcaaaggagaccgagaattgacccccgtaaaccaaaaggtttggccgtggccctttcttccagggagtttggcccaaagaccattatttgattatttgacgccggttatgtaccccaataaggcatggaagcctcccgcccttgatatgatccttggaacccacacgttgggggcccccttggttcatctgggtggaagttcttatggaccgatatcccagaatacccaatgtcaccccttatacccacggactggcgccgttatgtcctcttaagccaaatgagcaatggcggcatgtctccatggaagttacagccagaccaatgtaagtctaaagccttgtgcggtcttataccctgtgttccctacctttgtgcgcaacacaaacgagcgcgggttctagattaaaaacttcgagtttctaacgccaaggcaagccaacagaccttttgggactaccggctgcccagattctttacctgtgcgcctacgaagtcaaaagtctaagtgggcccgcagtcgaaggaattggtaagttcacat

SEQ ID NO: 494321 - DNA, 1418 bp, Homo sapiens
  misc_feature (1383)..(1383): n is a, c, g, or t
actaactctacctttctggcttcagggggaggagagttagatcatgcatttgtccgatccatctctgttcacaggacaccagacatcagagacagagagaaaaattcaaagggccaacccgtctttcctttgggcaggtgctatctagacctgaagtagcgggaagagcagaaaggatggggcagccatctctgacttggatgctgatggtggtggtggcctcttggttcatcacaactgcagccactgacacctcagaagcaagatggtgctctgaatgtcacagcaatgccacctgcacggaggatgaggccgttacgacgtgcacctgtcaggagggcttcaccggcgatggcccctgtgggacagtgttgacgaggaatgaaacccatgccacttacagcaacaccctctacctggcagatgagatcatcatccgtgacctcaacatcaaaatcaactttgcatgctcctaccccctggacatgaaagtcagcctgaagaccgccctacagccaatggtcagtgctctaaacatcagagtgggcgggaccggcatgttcaccgtgcggatggcgctcttccagaccccttcctacacgcagccctaccaaggctcctccgtgacactgtccactgaggcttttctctacgtgggcaccatgttggatgggggcgacctgtcccgatttgcactgctcatgaccaactgctatgccacacccagtagcaatgccacggaccccctgaagtacttcatcatccaggacagatgcccacacactagagactcaactatccaagtggtggagaatggggagtcctcccagggccgattttccgtccagatgttccggtttgctggaaactatgacctagtctacctgcactgtgaagtctatctctgtgacaccatgaatgaaaagtgcaagcctacctgctctgggaccagattccgaagtgggagtgtcatagatcaatcccgtgtcctgaacttgggtcccatcacacggaaaggtgtccaggccacagtctcaagggcttttagcagcttggggctcctgaaagtctggctgcctctgcttctctcggccaccttgaccctgacttttcagtgactgacagcggaaagccctgtgctccatggctgccatctcacctcctgctgggcagggggcatgatgcgggccagtgctccagccacagaaaagaaagttcatgctttgttcagcctgccttcttttctcccttttaatcctggctgtcgagaaacagcctgtgtctttaaatgctgctttttctcaaaatgggacttgtgacggtgtacctgaggcccccatctccttaaagagtgtggcaaaataatgatttttaaatctcaanaaaaaataaattgacagcagagaggaacacacact

SEQ ID NO: 494322 - DNA, 337 bp, Homo sapiens
  misc_feature (39)..(39): n is a, c, g, or t
  misc_feature (43)..(43): n is a, c, g, or t
  misc_feature (66)..(66): n is a, c, g, or t
  misc_feature (110)..(110): n is a, c, g, or t
  misc_feature (113)..(113): n is a, c, g, or t
  misc_feature (129)..(129): n is a, c, g, or t
  misc_feature (133)..(133): n is a, c, g, or t
  misc_feature (140)..(140): n is a, c, g, or t
  misc_feature (161)..(161): n is a, c, g, or t
  misc_feature (163)..(163): n is a, c, g, or t
  misc_feature (175)..(175): n is a, c, g, or t
  misc_feature (177)..(177): n is a, c, g, or t
  misc_feature (217)..(217): n is a, c, g, or t
  misc_feature (228)..(228): n is a, c, g, or t
  misc_feature (242)..(242): n is a, c, g, or t
  misc_feature (275)..(275): n is a, c, g, or t
  misc_feature (280)..(280): n is a, c, g, or t
  misc_feature (291)..(291): n is a, c, g, or t
  misc_feature (300)..(300): n is a, c, g, or t
  misc_feature (304)..(304): n is a, c, g, or t
aaaaaaattggctacattgaccataattaaagttaaaantttnccaatgatgtacagttttatggntaaagttgctgtggttggttgcattacatgacacagaaaactgnccnctacctcacgtgaaanaaanattttanatggttttactaaaaataagncncatgtatctggncncctagtttacaaattttgaattatatttattgaaacatgncatactgtgcnctgagcttataccncaattgtattttgtgctgttttccattttcatnccttntaaataacttntataaattntggntcaaatactaaataaaaacttttaatgccaatt

SEQ ID NO: 494323 - DNA, 2045 bp, Homo sapiens
  misc_feature (2010)..(2010): n is a, c, g, or t
gagactaactctacctttctggcttcaggtgctatctagacctgaagtagcgggaagagcagaaaggatggggcagccatctctgacttggatgctgatggtggtggtggcctcttggttcatcacaactgcagccactgacacctcagaagcaagatggtgctctgaatgtcacagcaatgccacctgcacggaggatgaggccgttacgacgtgcacctgtcaggagggcttcaccggcgatggcctgacctgcgtggacctggatgagtgcgccattcctggagctcacaactgctccgccaacagcagctgcgtaaacacgccaggctccttctcctgcgtctgccccgaaggcttccgcctgtcgcccggtctcggctgcacagacgtggatgagtgcgctgagcctgggcttagccactgccacgccctggccacatgtgtcaatgtggtgggcagctacttgtgcgtatgccccgcgggctaccggggggatggatggcactgtgagtgctccccgggctcctgcgggccggggttggactgcgtgcccgagggcgacgcgctcgtgtgcgcggatccgtgtcaggcgcaccgcaccctggacgagtactggcgcagcaccgagtacggggagggctacgcctgcgacacggacctgcgcggctggtaccgcttcgtgggccagggcggtgcgcgcatggccgagacctgcgtgccagtcctgcgctgcaacacggccgcccccatgtggctcaatggcacgcatccgtccagcgacgagggcatcgtgagccgcaaggcctgcgcgcactggagcggccactgctgcctgtgggatgcgtccgtccaggtgaaggcctgtgccggcggctactacgtctacaacctgacagcgccccccgagtgtcacctggcgtactgcacagaccccagctccgtggaggggacgtgtgaggagtgcagtatagacgaggactgcaaatcgaataatggcagatggcactgccagtgcaaacaggacttcaacatcactgatatctccctcctggagcacaggctggaatgtggggccaatgacatgaaggtgtcgctgggcaagtgccagctgaagagtctgggcttcgacaaggtcttcatgtacctgagtgacagccggtgctcgggcttcaatgacagagacaaccgggactgggtgtctgtagtgaccccagcccgggatggcccctgtgggacagtgttgacgaggaatgaaacccatgccacttacagcaacaccctctacctggcagatgagatcatcatccgtgacctcaacatcaaaatcaactttgcatgctcctaccccctggacatgaaagtcagcctgaagaccgccctacagccaatggtcaagatgcccacacactagagactcaactatccaagtggtggagaatggggagtcctcccagggccgattttccgtccagatgttccggtttgctggaaactatgacctagtctacctgcactgtgaagtctatctctgtgacaccatgaatgaaaagtgcaagcctacctgctctgggaccagattccgaagtgggagtgtcatagatcaatcccgtgtcctgaacttgggtcccatcacacggaaaggtgtccaggccacagtctcaagggcttttagcagcttggggctcctgaaagtctggctgcctctgcttctctcggccaccttgaccctgacttttcagtgactgacagcggaaagccctgtgctccatggctgccatctcacctcctgctgggcagggggcatgatgcgggccagtgctccagccacagaaaagaaagttcatgctttgttcagcctgccttcttttctcccttttaatcctggctgtcgagaaacagcctgtgtctttaaatgctgctttttctcaaaatgggacttgtgacggtgtacctgaggcccccatctccttaaagagtgtggcaaaataatgatttttaaatctcaanaaaaaataaattgacagcagagaggaacacacact

SEQ ID NO: 494324 - DNA, 1810 bp, Homo sapiens
gagactaactctacctttctggcttcaggtgctatctagacctgaagtagcgggaagagcagaaaggatggggcagccatctctgacttggatgctgatggtggtggtggcctcttggttcatcacaactgcagccactgacacctcagaagcaagatggtgctctgaatgtcacagcaatgccacctgcacggaggatgaggccgttacgacgtgcacctgtcaggagggcttcaccggcgatggcctgacctgcgtggacctggatgagtgcgccattcctggagctcacaactgctccgccaacagcagctgcgtaaacacgccaggctccttctcctgcgtctgccccgaaggcttccgcctgtcgcccggtctcggctgcacagacgtggatgagtgcgctgagcctgggcttagccactgccacgccctggccacatgtgtcaatgtggtgggcagctacttgtgcgtatgccccgcgggctaccggggggatggatggcactgtgagtgctccccgggctcctgcgggccggggttggactgcgtgcccgagggcgacgcgctcgtgtgcgcggatccgtgtcaggcgcaccgcaccctggacgagtactggcgcagcaccgagtacggggagggctacgcctgcgacacggacctgcgcggctggtaccgcttcgtgggccagggcggtgcgcgcatggccgagacctgcgtgccagtcctgcgctgcaacacggccgcccccatgtggctcaatggcacgcatccgtccagcgacgagggcatcgtgagccgcaaggcctgcgcgcactggagcggccactgctgcctgtgggatgcgtccgtccaggtgaaggcctgtgccggcggctactacgtctacaacctgacagcgccccccgagtgtcacctggcgtactgcacagaccccagctccgtggaggggacgtgtgaggagtgcagtatagacgaggactgcaaatcgaataatggcagatggcactgccagtgcaaacaggacttcaacatcactgatatctccctcctggagcacaggctggaatgtggggccaatgacatgaaggtgtcgctgggcaagtgccagctgaagagtctgggcttcgacaaggtcttcatgtacctgagtgacagccggtgctcgggcttcaatgacagagacaaccgggactgggtgtctgtagtgaccccagcccgggatggcccctgtgggacagtgttgacggtacgtcctggccagtgggggacagaaccagagcactgcctggttcaagtttcagctctatcacttcctagttatagaagctttggggagttatttagcctggctgtgcctcagtttcatcaactgtaaagtggagaaataatagtacctactccacaggtgtattgagaggattgaatgagttaatgtgttgaagtgattaggacagtgactgcacacagtaagtgctcaataaacatcagcttcaaataaagaaagcaattcatggtgatagttctccattttacagatgggaaaagtagggccatagtagggattgtctcagccagtaggcatcagcattgggttcagaaactagtctatttgtctccagtggtcctggaaggcaaggtctgtatccttaatgtacagagaatcaggacctcacctacagaggcctcctcaaatgaaacccagaggtaaatgtttgtgtgagcagagcattatctcctgccacctccctcattaccagaggaagaaagaaagagaaagagaggaagaaagaaagagaaggaaggaaag

SEQ ID NO: 494325 - DNA, 128 bp, Homo sapiens
agtgactctagcaggatcctttgtcatccccttcgtgggcggggtccaggagggctggaggttaattttgggagcgttccctgggagtagtgttctggggatcagtgctcctctgggccgggcccgaa

SEQ ID NO: 494326 - DNA, 392 bp, Homo sapiens
aggcctttttggggggggccgggccccgggaccgccccggccggccggaatttttggcccggtttttttatagcccaaaaaaaaggatatccccttttttttggaacaaaaaagaaccggcccccccctttggggggtgtggccccgggggcccccttttttaaaaggccggtcccttttaaaaaagggggcccataaaaaaattcccccctttgccggcccggtggggagggggccgggggtttttttttttgggggccttttttaaggaaaaaaataataccccaaaggatcttggggggggggttgtaatggccccctggaacctttttacttttggaaggtcttccgtttcttttaaccctttttttaaaaagggttttaaaattcca

SEQ ID NO: 494327 - DNA, 338 bp, Homo sapiens
  misc_feature (12)..(12): n is a, c, g, or t
  misc_feature (124)..(124): n is a, c, g, or t
  misc_feature (168)..(168): n is a, c, g, or t
  misc_feature (338)..(338): n is a, c, g, or t
tttccaatgaanattcccaacctagatgcaaaagaggcatgagtaacccttgggcaaacaacataacaggattgatttaaaaccccacataataatgagttcctattaagcttatgatccctgnccaggtgttggtcgtcacgcctgtaatcccagcactttgggagncggaggtgagtggattacctgaggtcaggagttcgaaaccagcctggccaacatggcaaaaccctgtctctattaaaaaagtacagaaaattagctgggtgtggtggtgcgcgcctgtaatcccactactctgtaggctgagacaggagaattgcttgcttgagccccan

SEQ ID NO: 494328 - DNA, 252 bp, Homo sapiens
  misc_feature (235)..(235): n is a, c, g, or t
cctggggttcaaaggcatctgcatctgttgagctagcccagaaggagaatctgtgatgcggatgacgtgaaggggtggagcgacccggatatggaagcatctttgcacaatttttacatgtacttattggcacaaattcgggcagcctccagggcttcagaggacagctgctcaaattcatctgacaccatgtggccataaagcggaaactcatccacttttaccttctctccgncccaggtcaaaaatgcg

SEQ ID NO: 494329 - DNA, 505 bp, Homo sapiens
gtctcagttcatcgctcaggctggagtgcagttgttgtgatcatggctcactatagccttgatctcctgggctcaggtggtcctcccacctcagcctcccaaatagctgggaccacaggtgcataccaccacaccagctcatttttttttgtattttttgtagacacgaggttttgccatgttgcccatgctagtctcgaacccctgggctcaagcaatccacctgccttggcctcccaaagtgctgggattatagtgaggtatctcactcagcctcaagctaattatttaaaaggcaaatgatcctatgtaatggaaaatgaatctgtggtattgttattctcattctgcagtattacttgccaatcttactactgaaaatagaacttttcttttgaaattctgattaatttgaggtgagattaaacattaatccaggcttactttgtattttcagtaacagcatggagttggtacagtactttacagagtgaaatattattta

SEQ ID NO: 494330 - DNA, 259 bp, Homo sapiens
  misc_feature (7)..(7): n is a, c, g, or t
  misc_feature (9)..(9): n is a, c, g, or t
  misc_feature (11)..(11): n is a, c, g, or t
  misc_feature (167)..(167): n is a, c, g, or t
  misc_feature (194)..(194): n is a, c, g, or t
  misc_feature (222)..(222): n is a, c, g, or t
ccaattngncntgccgggggattcctccagtttttccactaatgtcttaaaaaatctcagagatgggctcttgctgaatattgcccaggttagtcttgaattcctgcctcaggtgatcttcttgcctcggcctcccaaagtgctgggattacggcatgagccactgngcctggctacattctggatattaagcntttgttaaatatgatttcttttcctttnaggcagatgatgctttttcttctctctttttaaaatt

SEQ ID NO: 494331 - DNA, 404 bp, Homo sapiens
  misc_feature (134)..(134): n is a, c, g, or t
  misc_feature (152)..(152): n is a, c, g, or t
  misc_feature (202)..(202): n is a, c, g, or t
  misc_feature (214)..(214): n is a, c, g, or t
  misc_feature (354)..(354): n is a, c, g, or t
  misc_feature (365)..(365): n is a, c, g, or t
gcgctgtgccctgggcttgtgtgggctgccagcagctgtcccataaaggacctgatcgctggtgccagactgggattggggctgggtggaaactgctcttgggtcccccatggacgcacataggtctggaccangacgtggggaggccacanggtctctagagctgttatagggactcccagggacaccgagcttcttttcnatcctcctccangcactgtgacgccttggtgatgcggtggcggtgccaagtgccggcgcagctggcaaggcatccctcctccatgattgatgggcacccagagagcccagagctgctgtgagactgggtctgggacacttaggccagagggngattcttcctngttggggctgcaacagagccaggcagttccacagaggca

SEQ ID NO: 494332 - DNA, 250 bp, Homo sapiens
aggttgggagtttgagaccagcctgaccaatatggagaaaccccgtctctactaaaaatacaaaaaattagccgggcatggtggtgcatgcctgtaatcccagctactccggaggctgaggcaggagaatcacttgaacccgggaggcagaggttgtggtgagccaagatcacaccattgcactccagcctggacaggtaatgtctgtcaaaaaataaataaataaagtcaaaagtatgaaaaagttaaa

SEQ ID NO: 494333 - DNA, 498 bp, Homo sapiens
  misc_feature (117)..(117): n is a, c, g, or t
  misc_feature (200)..(200): n is a, c, g, or t
gcaagctctgagtagctaggaattacaggcgcacaccaccacacccggctaatttttatatttgatcctttttatatttttagtagagatggggtttcaccatgtaggccaggctgntcttgaactcctgacctcaggtgatccacacacctgagcctcccaaagtgctgggattacagatgtgagccagcgcacccggncaaaaaattatttttagatttgacaaataaaaatcgtatatatttatggtgtgcaacatgatgtttggaagtatgtatacatggtgggatggctaaatcaaactatgtgtgcattaccttacatacttatcattggttggtagtgagaacacttaaaatctactctcagcaatttcgagtatacaatacatagctatggtagtcacctgggtgtaggataggaggcctgttgaacttattccttctgtctaacagaaactcggtgtccctttgacccatcatctccccactcccctat

SEQ ID NO: 494334 - DNA, 1311 bp, Homo sapiens
tggaaaatgaaatgtttcccatcataggggattctaaagcacgttctccacgttatgcggggtgcaagcgtggagtgctcttgtgggcaataagtgtggtaaccacgttgtgggcagtggaatagcacacagggtgtgggtgctctttcaaaaaggccaaccaaaataggccctcacgtgtgccctccgtgcaaagccaccgaatagcgtgcgccctctgggaaagccgcagaactctgtggtttataaagtgctccgtggagccaatttctcgtcgccaccagaagcccgtggaagagggaaagtttgtgcaaatctcagaagagttctcagtgtggcacttcgtgatataagcgctctctaagttctccacgggagaggcgcgccacacaagagtttcacccagaggggcctgtgtgatacagaagaagtagagagggtctatcttctctatcacaccccccctctccagagagtcagagagagggcggcacactctctgtgtgccagaaacgcgagggtcttttgtgtgggtgacgcccttatgtgtggggtctctccccgtggagaggggtgggacgtgttatacaacacacaccacgggtggcgccagataatatttaggcgggcggggccacaagtgtcgttgtgtcttttgtgtgtgacaacgagaaacgctcctgatgaggtggtaccacagaagagaagacaactctctctcatgttaaaaatgataacaccccccgcgtctttatctccctcctgatgccgggagtggtggggaggagcgcccttccgagagagaagaactggccgagaacagaacggtggcgacgcgaccagctctaggggccgtgttatagagaggagtaggagaccacgaacaggacagggggcgaacagcacactcaaagagtcccacccacgaggaagagtctcttattgtgtattatatattctatcgtagctactattactacttgcctacacatctatattccccacacagagttgtgattctaagagagcggcaacatcccaccacgacgaagaagcaaccagcggggcatcgcgggaccaacaaagcagcttcatctcacccaaggaacagacagacggcgggcgacacaaaatgctcgtcgccccaccatataaaaaaaggaggaaggccccctccagctgagcagtgctgggctgtgtgcgacgcacgcctctctaatatacgcccccactagaaccaagaagggagggcatactgcggggaagacacctaccagggagagggggaacaccaccccctagagactgaag

SEQ ID NO: 494335 - DNA, 239 bp, Homo sapiens
tctttaaggtcataggtttgttagtttaccaacccaaaatttgtaatagtggaacccgggccccaaaatataagcagcttgaaactggctttcccaatcttgaaatttggccccaagtgttttatatatgcagatttaatgtaaaatccagaacttggactccctcgttaaaattatttatgtgtaacattcaaatgtgggcattaaatatgcttccccagtaaaatttgaaaaactga

SEQ ID NO: 494336 - DNA, 99 bp, Homo sapiens
gccagcaccaaccagacatctatgtacctctgtgccagcagtatgggacagggggcttccactgaagctttctttggacaaggcaccagactcacagtt

SEQ ID NO: 494337 - DNA, 505 bp, Homo sapiens
tggttactctagcggatccctgaaaaggtagctgttactgctgcatgttaggtaactggccgtcacttcatacaagtcataacttttccttatgaagttatgatcttcaagtgagagatggagggactgcttctgcccaagattacatgtatgtaatctaggacttcgactgtcactagatatgtttcaactatcattaaacatcctgaattaactgctgtgacatggctgaggtacatacattaggaagaccgtctaccgaatacctacctatcagccattttgcagtctgtagttcttctcttgaccatgggagaaggcaaatcactaatagccaccgttcttattttttcaagtcaggtttttttataaaatataacaaacagggacccctaactgtctcagctgggtttttttttaatgatttcttctggaaaggtgatagttttagtgtttccatgccttctttggtccatgttcattataactggtgactgtcgcatta

SEQ ID NO: 494338 - DNA, 485 bp, Homo sapiens
ccatgctccgggagaagatggagtacagtgccagctgcagtgcgtgcctgtgccctgcatccccaacaatgcccccgcctgagtacccctggtccaatggaagagtgtgatgcaatggggctctgagtgcagtgaccaatgccagccttcctccctgccatgtgccatgagccagggtgcttgagtgcatgtgtgccagccaatggccatcagcatgtctctggactgaccctgccgtgctgtcaactggtggtgcctctctcgtgcccatccatctctggtgaaccctgacctgactagtgtgaatgtgagctgggtcaaaaaatgatgcctgtgaaggagatgacctgtgtcttgaaatgttttccctgtgaagacagcattatagatgagacgatgatgatgatcagtgaatctagcagaatgcagaatgatgtgcatggcctggatgtgcacagaatgagtgcctgctgatgttggcagca

SEQ ID NO: 494339 - DNA, 914 bp, Homo sapiens
  misc_feature (340)..(340): n is a, c, g, or t
gtgagcttgcgagaccttctaatgggagcgtcagcctggaatggggctctgaaagtcccggagggtcccctattgatggcggagggagacgcggctggcggaccggagcctccatggcgggaggatgagatctgggttgatggagaatcttcggcaagacggctctacgcctgaattaccgaaaaggttctctcttgatgactactcgctgtgcgaccgacaggatctttcctctctttcgccacacaagatcctggtggatccacggaccttggaatcagaactgaggcttggtcagccgtggcgttgcaggccgttgtgtgagccgcagtgtcacccntggggtctgctgccggtgggtgttctagtctcgcgggaaagatgtgagcttgtcgcggtaggtggtgaaccgtcaccttgcaggcgagagctctcctgtgacttaccggacccttctgcgcaggccgtaacgtacacgaggctcaacgcggaaagcaaaacgttgcttgatatctttcgtacgcgtcaaacacgtgcctatcgtagtaggagtagattcgacgagctttaccttcccggagcgtagggtcgggggcttccttcccagagcggcgcgcgatagcctcgggagggttgcgtacctctgccttttttacgctcgattgcggagagagcccaccaccggacgtctctgagggaaacgccatttcggaaacgcacgaacagccttgcgcatgctggcccttcgagggtccttacgctttttacccctgattttcgtccttgggtccttggtcctattaattccttgggcttttcctttgggttgcgaatccccctaacctttggtttcccctttgtcgggatcattccactttaatggaatcccgaaggttattcccacgaaggcccct

SEQ ID NO: 494340 - DNA, 166 bp, Homo sapiens
actctagctcggtacccctctgggcactgtttggactctgagcactgtttggactctgggcactgtttgggctctgggcactgtttggactctgggcactgtttggactctgggcactgtttggactctgagcactgtttggactctgggcactgtttgggctctg

SEQ ID NO: 494341 - DNA, 111 bp, Homo sapiens
  misc_feature (46)..(46): n is a, c, g, or t
  misc_feature (51)..(51): n is a, c, g, or t
  misc_feature (58)..(58): n is a, c, g, or t
  misc_feature (68)..(68): n is a, c, g, or t
aaacccacccatgtcaatgtgtctgttgtcatggacggtaggtggnacggncacctgnctactgtagnccgcccgcctgtccccacccctgaataaactccatgctccccc

SEQ ID NO: 494342 - DNA, 283 bp, Homo sapiens
acgggtggcgagtgggcacagaggtgtagataagtcaggttggaggggatgtgaagccttcatgtgtccaggatcagtgacgtgcacgtgacactcactgaagaattgcatgctgaggtcacgaggttgctctcgggagcccgggctcgtcgggtcctagcccatgaagcaagctcggccccacttcaaatccaaattttctgcggggcttcaccagaagtcggttgaacaatagatgtcgcacgatgggcaccgtgctccgacttatgggggtgtcgatctc

SEQ ID NO: 494343 - DNA, 194 bp, Homo sapiens
acgcagtgggcatttcagctgtgcatgaatttcagtatatcagtagctccttttaagtgtataatcaaaacagtgcttcaaagaacaataacggtaataattataaggagaggtcaagagggtacagggtctgttaatacattcacaacaagaatgaatgaattgggtcaaatatcaaataagtagatgcaatt

SEQ ID NO: 494344 - DNA, 373 bp, Homo sapiens
  misc_feature (87)..(87): n is a, c, g, or t
cttacacgcaatctttgtcttcgctgggtattgctttgcccttgcctgtgatctttgtggacccttatcaggagatttctgatttgnccgtgtctgtttcctcagaagcatgtgatctttgttctccttttgccctttgaagcatgtgatctttgtgacctactccctgttcttgcacctccctccccttttgaaatccttaataaaacttgctggctttaaggctcaggtgggcatcatggtcctaccgatacgtgatgtcacccccagcagcccagctgtaaaattcctctttgtactctttctctttatttctcagctggctgacacttaaggaaaatagaaagaacctatgttgagattgcggtgtttg

SEQ ID NO: 494345 - DNA, 172 bp, Homo sapiens
cacagttggtgggctagtaatttaggctgtgggatattcccatcagaacaatgctgctttaagaggagaaaagtcccgactcgttattagcatacatctgcatacacatctctagggcgcgcgcgcgctcacatacactcacattcactcacacacccccacactcttcatc

SEQ ID NO: 494346 - DNA, 334 bp, Homo sapiens
  misc_feature (22)..(22): n is a, c, g, or t
  misc_feature (114)..(114): n is a, c, g, or t
  misc_feature (121)..(121): n is a, c, g, or t
  misc_feature (159)..(159): n is a, c, g, or t
  misc_feature (165)..(165): n is a, c, g, or t
  misc_feature (264)..(264): n is a, c, g, or t
  misc_feature (306)..(306): n is a, c, g, or t
tagggggccaattatggtaggnagcattgcagggtcagaggtctgagttcggaatttgagctggggcaggtccctgttgagaggcacttctggtctgaagatagctccattgancccctgnagttcaggtgtagtgcctataggaccaagctcacagcnatggtnaggggcgcctgctagggccacggccaggaggcattccccgaagccttgctcccctggtgcagcagggctgtgggaggtggtgacattgaggccagcttntttcaccagaagcttagcgttcaccaaagttcaaatccagcnatagcttggaagcctctataaaaggagg

SEQ ID NO: 494347 - DNA, 135 bp, Homo sapiens
tgccctgggtgaattacacccttccccgattcaagggccagctgagagtcacgggagctgcgaaccggacgtttccaaggcatggccctctctcgggacgaacccattccacctgtgcgtgttgttgccggtagc

SEQ ID NO: 494348 - DNA, 133 bp, Homo sapiens
cagccccagtcttgtttttagcagcattcacccgtgtctgttcactgaccaaagaagaagagtttgtcaaggttaacagttgggcaaaagctctggttcctctttaagtggtaatgcttcataccaactttcc

SEQ ID NO: 494349 - DNA, 445 bp, Homo sapiens
gcagggattacaggtgcatgtcaccccgcttggctaatttttgtatttttagtagggacagtgtttcaccatgttggccaggctggtcttgaactcctgacctcaggtgatctgcctgcctcggcctcccaaagtgctgggattacaggcgtgagccaccgtgcctggcctttttgtttttttttttttttttttaacaaaaacaactccagtttgattctggacatgggtcgaccgcggcccgtaattttagtcgtgtagtcggcccccgggaatttcgggccggttccttggagggcgttccagggttttccttttagtgggggccgtttaagaggtttgggggaaatcatgggcccaaggcggggttctcgggggggaaatgtgttttccgtttacaaattccccccaaaatatcggggccggggagcttataggtggtaag

SEQ ID NO: 494350 - DNA, 645 bp, Homo sapiens
  misc_feature (261)..(261): n is a, c, g, or t
gggtgcggtggctcatgcctgtaatcccagcactttgggaggctgaggcggtcagatcacaaggtcaggagttcgagatcagcctggccaatgcagtgaaaccccgtctctactaaaaacacaaaaaaattacccgggtgtggtggcgagcaactgtagtcccagctacctgggaggctgaggcggaacaattgcttgaacccgggaggcggtggcggaggctgcagtgagccgagatagtgccactgcaccccagcttgngcaacagggcaagactctgtctcaaaaaaaaatcccagcactttgcgaggccgaggtgggcagatcacgaggtcaggagatcgagaccatcctggctaacacggtgaaaccccacctctactaacaatacaaaaaattagccggccgtggtgttggccgcctgtagtcccacctactcccgggaggctgacgcaggagaatggtgtaaacttaggaggccggagcttgcagtgagcacagaattgcgccattgccctccaagcctggccgacagaagtgagactttatcataacaacaaaaagggaaaacacggaaatggttttacatttccttcctttggatttttataggataggccggttgggcattcctttcgctttgct

SEQ ID NO: 494351 - DNA, 105 bp, Homo sapiens
cggctgcggcacgggagattgtgaatgaaggggggcgagcggactgtgaagtattaagggagcaaagctgcccgccgcgggccaggcgctctaggtaaacaagaa

SEQ ID NO: 494352 - DNA, 840 bp, Homo sapiens
  misc_feature (13)..(13): n is a, c, g, or t
  misc_feature (95)..(95): n is a, c, g, or t
  misc_feature (119)..(119): n is a, c, g, or t
  misc_feature (122)..(122): n is a, c, g, or t
  misc_feature (160)..(160): n is a, c, g, or t
  misc_feature (174)..(175): n is a, c, g, or t
  misc_feature (182)..(182): n is a, c, g, or t
  misc_feature (185)..(185): n is a, c, g, or t
  misc_feature (198)..(199): n is a, c, g, or t
  misc_feature (211)..(211): n is a, c, g, or t
  misc_feature (219)..(219): n is a, c, g, or t
  misc_feature (221)..(221): n is a, c, g, or t
  misc_feature (301)..(301): n is a, c, g, or t
  misc_feature (369)..(369): n is a, c, g, or t
  misc_feature (393)..(393): n is a, c, g, or t
  misc_feature (396)..(396): n is a, c, g, or t
  misc_feature (443)..(443): n is a, c, g, or t
  misc_feature (487)..(487): n is a, c, g, or t
  misc_feature (589)..(590): n is a, c, g, or t
  misc_feature (836)..(836): n is a, c, g, or t
ttctatgcaaaantatgccttcccactgcttaaatgatatatgatatgatacacaaaccagttttcaaatagtaaagccagtcatcttgcaattntcagacataggtaaaaccctatcnganaccttacacacacacacacacacacacacatgtgtgcncgccaatgacaaannggggttnggnctctcctaaaatnngagcatgggggnccttggtngngggggggggggggcactgtgtcacccctccctacaatccaggtagtttcctttaatccaatagcaaatctgggcatattnggggggggtgattctgacagccacgttgaaatcctgtggggaaccattcatgtgcacccactggtgcnctgggagggtgccaatggtttttnggncccacttctgctgctgtgtcttccacatcctcacatagaccccaganccgctggcccctggctgggcatcgcattgctggtagagcaagtnataggtctcgtctttgacgtcacagaagcgatacaccaaattgcctggtcggtcattgtcataaccagagaagtgaattctgccccctggcagctgcttagnnggagggctcaccccaatcttcataaattttctcttgtggggctttttgagttccaggagggcataatcataatccatgccgatgtcattggcattgcccttgatccaacccttgggcacatgggtgcgtttcacccggatccactgaaatttcatctgctcgggcatggctgaagtggagtcgttggcccctcgaacaccatctttaaacttgggctttaggaagcccctcgcagcttctgggttncttt

SEQ ID NO: 494353 - DNA, 295 bp, Homo sapiens
aactcctaagattcagtgctccttcccagtgccatgcgtccagaatgctatcgttatgggaaatgtgtacccacaggtgggaagatacatggtatgcaaggttcaggtgcttttggctacctcagttccctcatcatcattatgctaataggcagctctgtatccagcacctacttcactagccaggcaaggtcatatgaagtgctcaagcccaggacctattacatcataagctctcaataactgatgcatacttatacagagatttaccttcttaacagagcttagacaagga

SEQ ID NO: 494354 - DNA, 114 bp, Homo sapiens
agcgatcccctgaaacttcccggggcctcactgtcaacccaacacaggcatgctcataaggaaaggttaaaaaaagtaaaaggaactcggcaaatcttaccccgggaagttcca

SEQ ID NO: 494355 - DNA, 870 bp, Homo sapiens
gggcgacggggtaggggttggcgctcaggcggcgacatggcgtatcacggcctcactgtgcctctcatgtgatgagcgtgtctggggctcgtccggttcttggtgcctgcttcatccctaagggtcctaaccggggagttatcattaccatgttgttgacctgtcagtttgtgctatctcttttgctgatgtgcaattctggcccaaatcaaccctctctttgaccgcacttgacaaatggacaccatctgtatctgaagtatcatgtgccttgaggaagaagacatgcctctacagtgctcagtctttgaggtcaccgagaagagaatgccttctagatgcaaaatcacttcaaaacagaccattttcttgattgcctgtttgtggccattagctgccttaaaagtgttaacagcaccatttgaaatgccttattctacaatgcagcgtgttttccttggcttttgtgcacttgtgaattacgtgcctccataactgaatgtgccgattccacaaaaagattatgtactcttctgagatagaagatgtgtctctgagagatagtttatctctcttggattttgtggattgaagatgggtcctgccttctcacgtgggaatcagtgaggtgtttaggaactggtgcaagaaacagaatccagggggggtcaggcaggggaaacccggtagggggagagcattaacgaatggaccaataattcggtgggtttctttgcacttgaaaaatttctttaaaaaaaaaaaaatttgggctgccgagattaaacgtgggggcgcggagaagtagttcaacagggtaggggtacaaacgggggtgaagtgtgtgttcattccgtgggcgagagaaga

SEQ ID NO: 494356 - DNA, 355 bp, Homo sapiens
gaaagaccccatgcagacgtgactgtctttaaagcttcagtaatgttcacagaagcattaaacaattgttacgactcttctggctgagaattctaggagtccatataggtgacagcttataggaagggacatgggagctttcaaatgtggcattggaatcctgactatgtccccaaattggtgactgaggctttcgcaaggatactgctcattatacgtgcccagatatccatctgtacaataggtgtttacatgaggattgtatgcacggtactagccttgccttgtggggcgacttgtccgagttactgagctactgatctattatttcaggtgcgctgatatgttacttgcg

SEQ ID NO: 494357 - DNA, 116 bp, Homo sapiens
  misc_feature (2)..(2): n is a, c, g, or t
tnttagaccagttcaggtgaagaaagacctggaaacttctgttaactatagctcagtaggggctaaaagcgtgttaatcggcataaaaaggcaatgagatcttagggcacacagca

SEQ ID NO: 494358 - DNA, 882 bp, Homo sapiens
  misc_feature (44)..(44): n is a, c, g, or t
  misc_feature (79)..(79): n is a, c, g, or t
  misc_feature (82)..(82): n is a, c, g, or t
  misc_feature (89)..(89): n is a, c, g, or t
  misc_feature (115)..(115): n is a, c, g, or t
  misc_feature (127)..(127): n is a, c, g, or t
ccaacacacaactcttactgatccactttatacattactaccgnctcccgcgttgacgccatcaatacaatattcctcntgngttaaanatctcgcacgcacagcgagctatggngcgaagtagagnaacagtcagtgtattcttattcgtccggtaacaatctacatagatgcgactcggaaaaatcaatttaacgattacactagcaagaaagaaagttgtcgtgggtctctaattaatagatttaccctttatagaacatattttcctttagatcaaggcaaaaatatcaggagcttttttacacacctactaaaaaagttattatgttagctgaaacaaaaatgccagaaggataatattgattcctcacatctttaacttagtattttacctagcattccaaaacccaaatggatacaacatgtttaattaaatttcacaatgctaaggctctaacagataactatgagcatataagaacaatggcctggatcaatctagttctttacttaatcaattcaaattctgttccgctataaaggtgtgggactatgtatcatctatatctttgctatatctaaagaacatgataagattttaatgtctttatcgcgaagaatatgaattaggaagaaaagaaattgaagtacggaaagcagaatagaagagtagtatattcgggcagcggatagtgataaatttacctaccaagaacacaactctctactattagacacccactccatctgctcataataaataattaggtataattctatgttacgagtgtttgcttataattaaactctcaattatcaaagaatcaaatccatataatacgcatgagtatatacggtattttataaactacaataatt

SEQ ID NO: 494359 - DNA, 929 bp, Homo sapiens
  misc_feature (2)..(2): n is a, c, g, or t
cnctgggagtagctggactgtgtcgttgtgtctcacatcactgcgcaagcgagtgctctttgtactattttcgcctaagtggtccgccgcgggtgctccgccccccgtgtcgtgttgtctctgtttttgggggcctccccctcattttgggctgggctattacttcccttgtgagggtattctctgctaccccccgagggtcctcccctccccggccaaagggtggttttcggcctttcacagcgatccctcttctccgggcccccccggttcacacaataccgcgtgccccgcgagacacgagcgtgtcctctacccccccttggggggtctcccggacatcccaaagaggctcccgcggagccccaccaaatccctcgggccacccccgtgccccacaacgagtatcggggcaatgcccaaggggaccactcactcttggcgttcttttccaaatcaacaaggacatatctgtctttgatcatccactcggcgtcatcctccttattcttccgaggagggttgccgcacggccctttcctccgtgctttcccggggggcactctgcatgcgagatacccccttggagggctcccccctcacggaggcgtcaccatcatgcagcgcacgacccccgtcatgttccaaccacgatatgaattcttatttcccccgcgaggaagttcttccttccctggtcataatcaaaaccgcacccatcccgcggcctcttctcttcacgcacacgaataggcatagggttgtgtaatccccttccttctatgctctcgcactacgatggaagttattttcatagaaattaacataccacaacagtcttttttatacacgccttgttaaaaataacacaacaaaaaacacccaatgttaaaaaaaagcggcccttccccctagagaaccacaaaaca

SEQ ID NO: 494360 - DNA, 584 bp, Homo sapiens
  misc_feature (17)..(17): n is a, c, g, or t
  misc_feature (211)..(211): n is a, c, g, or t
ctgctcagtcgttcttnggggagaaccgtctgcgcagcatggggctagcagcctggtggagttcaggaaaggggggatctaggcatacatacatacatacagaggaaggtatgagaagggacccccgtttgaatttcccagtcgccccatttgcaggaaggtggaggccacagcttgtgccctcccactcaccagccccatctcctttcanacatgcctgcacttgctctccctgcagccagcatccctcacggctaccatttccccctggccagtgaagaagcactaagaggcagacgctacaaccatggcggcaagaggcctggtccaaagacaagagttcaggtccccactaagaagctctatgacttggccaggtgcggtggctcacacctgtaatcccagcactttgggaggccaaggcaggtcaagagatcgagaccatcctggccaacatggtaaaaccccgtctctactaaaaatacaaaaaattacttgggcgtggtggcgcactcccgtagtcccagctacttgagaagctgagatgggaggatggcttgagcctgggaggcggaggttgcagt

SEQ ID NO: 494361 - DNA, 879 bp, Homo sapiens
ccgacccggttgttgcggaagcccccttcttggggggtacaaacccgcttgtccccggcccaccccggtgtggttgaaacagcatgggggcattgaatgaagaatttgcggctcagaatctccttaggggaaaaggcgtaacggccccccggtgtcgtcgggctacctcgactcccccacagttttcggtaggtacctaggatataaaccgtctgcacaccctctgtgaagagactcaatcaaaggcggaagaccaccctttgttaccacaccccgcaaatcgacttggcgctctgtctcccccgcgcccgctaataacacctggggaaagagaaactcactttcggcttgtccaactacaatccccccccttccctttataagaaaaacattggggttctatatacttttattgaggccgcctaaccttgttctactctttccatcagaaggagctaaaaaagcctttttgttatccgcgatatgatttccccttctgaggaattctccctgatccttgcgcctgctagcctcctcgctctatagatgcccccgtctttcgggcgatcgagacccactccaacgcgtaacaagagaatctccttgagagcgtcctcggtacatcttaagggcagagttagcacgcccattacagtcatgctagggcgcacgagcccggggccccccgctactaattaggtgggaggacaaagttctcccaccgatgtttgattctatgccgtggtaattgtacaacgcgtgtacggtctatggtgagtgcggcacaacccgacaggccattgctcaaagttgtttgggacgttacgaggccttctcccctcccacgggctctcccattccaccagcccaataaaaaca

SEQ ID NO: 494362 - DNA, 225 bp, Homo sapiens
gaggctgaagcaggagaatcgcttgaacctcggaggcggaggttgcaatgagccgagatcgtgccactgcactgcagcctgggcaacgaagcaagactctgtctcaaaaaaaaaaaaaaaaatcgaaaagagggccttccagctttattttgctaaaagtagtctttacggggcccggggggttttgtaaacacggcagttccgatttactagactaaacctagc

SEQ ID NO: 494363 - DNA, 312 bp, Homo sapiens
tctagaggacgtaattctgcacccacagctgtccagtgagaagtatgcatgtttccacgtcccccggtcaggaccacccgctcgttatggcagaagagctctttgatccagcgagccatgccagtgttcactgacatcaggtacgctgggaagtggcgccggtgggacacagtccagtcggtgggggagttggaagcagtggtagtccccagtggccaggtagatgacacagtgatagagctcattcccttcccgggtgaccagctggttcttgcaggagtcacacgacgcggcttgtgggtggcagacatt

SEQ ID NO: 494364 - DNA, 469 bp, Homo sapiens
aagttgattgccattcaaattggtgtctcctatatacaacacatcatttctctgtagccactttcaagacttttccttttagttttcaaaaggttccattaagatgtgtcttagcaggtcaggcacggtggctcatgcctgtaatcccagcattttgggaggccgaggtgggtggatcagttgaggtcaggagtttgagaccagcctggccagcatggtgaaaccccatctctactgaaaatacggaggttagctgggtatggtggcacatgcctgtagtacaagctacttgagaggctgaggcaggagaatggtttgaacctgggaggtagaggttgcagtgagccaacattgcgttattgcactccagcctgggtgacagagcaagactctgtctcaaaaaaaaaaactcaaaatgtacaaacgaggggattcccaaggttttcccggggcccgaaaattaggggtt

SEQ ID NO: 494365 - DNA, 503 bp, Homo sapiens
  misc_feature (1)..(1): n is a, c, g, or t
  misc_feature (314)..(314): n is a, c, g, or t
  misc_feature (320)..(320): n is a, c, g, or t
  misc_feature (326)..(326): n is a, c, g, or t
  misc_feature (337)..(337): n is a, c, g, or t
  misc_feature (340)..(340): n is a, c, g, or t
  misc_feature (368)..(368): n is a, c, g, or t
  misc_feature (370)..(370): n is a, c, g, or t
  misc_feature (422)..(422): n is a, c, g, or t
  misc_feature (425)..(425): n is a, c, g, or t
  misc_feature (469)..(469): n is a, c, g, or t
nttctgggggggaggaaaggggcagttgagtaagacggctaaggggactgggaagcctgaggtggtgggggctctgccttaggcctcctcttcggcctcctcaccggaatcctcctcctcttctgcggtggcatcctggttctgctgttactcagagacgaggtcgttcatgttgctctcagcctcggtgaactccatctcgtccatgccctcgcctgtgttccagtgggggagggccttccggcgggacatggcagtgaactgctccgggatgcgcttgaagagctcctgggtggctgtgcttttgccattgnaggtgnctgccntcttgaggccncgnggtggggtgtcacagacggctgtcttgncnttgttgggggtccattccacaaagtagctgctgttcttgttctgcccgtttngcntctgctcatcgccctccttcatggacatccgcccccggcggacngcagccacggtgaggtatcggccgtggcgggggt

SEQ ID NO: 494366 - DNA, 486 bp, Homo sapiens
caggtctggttgcccatcgggccgagcggatattcgtagcgcttcgagccgtcggtgaactcgcgcacggtctcgggcttgcccatcgtgccgcgcacgtcggcctcggtcgattcgccgaccttcagccccttgagcagcagcggcgcgggcttgatcgcggtgaagaagtccctgatgcgttgcacgtcgagattgccttgcttgtcatcgcagccggtcagcgccagcgcggcggccagcatcgtcacgggaagcagccggaaacgaaaaatcatcggaagaaatgcgcgtggagaaaacacgcggcaaggatacctgcgcagcgccaaaagcgcgagacgggcgcgcggcccgtctcgtgttcaatgcgtcgtttcggtttccgtttcggcgtcgggcacgcggctcgccggctgcggcgcacgcggcacggccggcggcgcgccgatgcggcggcgcgtgcgcacgagttcggccaactgc

SEQ ID NO: 494367 - DNA, 488 bp, Homo sapiens
  misc_feature (279)..(279): n is a, c, g, or t
  misc_feature (303)..(303): n is a, c, g, or t
  misc_feature (454)..(454): n is a, c, g, or t
  misc_feature (470)..(470): n is a, c, g, or t
  misc_feature (480)..(480): n is a, c, g, or t
aggtagaggagctactaaaggaagtaaggctgtcagagaagaagaaggatcggattgatgccttcctacgggaggtcaaccagcgggttgtgagggtgccctcagtccctgagacagagctcactgaccaggcatggctcccagctggggttcgagtgcccctccaccaagtgccctatgccgtgaagggcgtgtttccgacttcctagcccccaagcccaggattactgtatgtgaggcaagctacctttctgggcaacctagcatccgaccagatcngtcaaatgtggaatgtaggcactngaccaatgcccaggagaaattcctacagagacaagagacgggctcgaaccagacgctacttccagcaagcggtgcccatctaccgtggcccacttcggctcaccaccatgagcccagagaccacccctcttaggcagctgtttgcttctcnctacacaaatggctgnccacctgaanaccctcac

SEQ ID NO: 494368 - DNA, 705 bp, Homo sapiens
gcggtgcggtggtgactgtgctacgagcctggctggtgggtgtgctgccgagccccggccctggccctggccctcgctgtgcctcccagtgctcctgcaccccttgattgcttgctgctgtggtgcttgatgccctgcttcggcctggtgactgatgtgttgaatgtatattccttgtgtgccatgatgctgtgctcctgtgatgttcctgtgtgaccaatgtgttctgcctgccttcttggcatgctggtaccctgacatccactatatgcaacacattgtcgttgactgtgaatgacatatgtacacctgggatgtgtgaccccttgaccatgaaacttgcttgtccctggctgactccatgacacaatgaccaacatggatgccactgcttgtgtgcctgatgctgactaatttccttgccaatgtttgctcactctgtgtgtactgtccttggatgtgactctatattgtgtgacccacatgaatcagaccatgactaccttcacctgtgaacatcaaccacgccctggctgatggtgtgtggagtgaactgatgtgtttacttgtgtgaactctgacaacagtggcttggactgaacatcctgccgtgcgaagccttgggtctcctctagcttatatggttgtctccagagctgtccaggactttggtcttgcccggttcaaaagccacgtgaccaagac

SEQ ID NO: 494369 - DNA, 507 bp, Homo sapiens
  misc_feature (56)..(56): n is a, c, g, or t
ggagttccagttagctagatcggccactgcactcctgcgtgggtgacagagtgagnctcatctcaaaaaaaaaaacaaaaacaacaacaacaacaacaaaaaacaaccagagaaatagcacttgttaactacaattgtgactctaggtaaacttgggccttaatatggttagacaagaagggttttaggtaacttgcctttttagatcctatttaggcttattagtctatattctacattcttgcacgatggaaattactagagaagtgggataattctttgttgtggggaaaataaaatttgttgtgaaaatatactgtattttaaaatatttagaaagattataaataactggagaaaagataatttcatatactaatatgatggaattagcctagcagatgttaaaaatcctttctgaaaattataatctaaaattatttgggaaattacaatggaactgaataatctgtacgttggtatattaaagccatttttatattgtga

SEQ ID NO: 494370 - DNA, 465 bp, Homo sapiens
  misc_feature (171)..(171): n is a, c, g, or t
ggtggacacggtggacgtactcccggggccggttggcccccggcagagggtgctgtgcaacatcgaggccgacacctactggtgcatgagcaagctgctggatggcattcaggaatgaaaaaggagaaacgtagaagcctagttgtgcggttggagaactggtaaccttcngtattcctactttgcgccctggggtcccaaggacgtaccgtcgctgacttactttgttcctcgcaacaggagctacacactgtgcccactagagatatattctggcccaagcacccatactttgtcactttcccctcctttactaatatttgtcatacattgttattctttctgctagatctattcggctttgttgcccccttagagaaaggattgaatcattaagtgtaaaacgtgtataaagtttcaaatgtcgcttctctgatggtgagtacccgacggtgccattgaaaa

SEQ ID NO: 494371 - DNA, 103 bp, Homo sapiens
tgcaacacgccgagagaccacaccgtctcaaaaaaaacacagaacagcacaaaaaaaaggaatggatagagcccatgctgcattcctccaatgctgggacaaa

SEQ ID NO: 494372 - DNA, 137 bp, Homo sapiens
tgtctggcattccatttactcttttatgcacgtctagttttcagaattgctctatcgccagctgcagtggcatgcacctgtagtcccacctacttgggaggatccagtggcgcgggggctttgtatgattatgggcg

SEQ ID NO: 494373 - DNA, 907 bp, Homo sapiens
gacagtcacatcaatatatagaacttaccatcaccagccgaagttgatagaaactatagttcagaattaccctcctttaaaaaagtaagagactattgtttcttttaattcggtatgaataaaagaagtttttggaacaagactcttaaacagttgtttagacatgattagtcaaacatactttgttaagtccgtgagtgcttacaggtagttgttaaaataaattttagggccgggcatggtggctcgctcacacctataatcctaggatctgggggaggtcgaggcaagctgatcgcttgagcccaggagtttaagaccggcctgagtagcatagcaagaccctgtctctacaaaaaaaacaaaaattagctgggcatggtggcatgcacatgtagtcagagctactgggggtgctgaggtgggaggatcgctttgagcccaggagagtgaggctgcagtgagctgagattacgccactgactctagcctgggcaaggtgagaccctgctcaaaaaaaaataaaaataaaataaaacactttaattagaatctatttttacctattttctaaaattatttaaatgcttagcaggaagcataaggaaaagccatcggctccaatacttatgatgacagaaggagcaattgaggcttggctttcctctcttaatagggtgtccgagaataaagaaatcaactgggtgatgaatcatggaagatttgattcccttcggaaaggcagatttctatagtagcatgtaccaaaatagtcgggggtaaggagaataaagttaagggaagaggactggaatgttttgggaaagtgacatgttaaaccgttaaggaaggggaagagattaaaaaaacaggtgggctttcactttgtttattttggtgctttttt

SEQ ID NO: 494374 - DNA, 396 bp, Homo sapiens
  misc_feature (204)..(204): n is a, c, g, or t
ttttcaaaaagttccaattctaaaaacccaaaatggtggtttttagaacctatttgagggattccaccaaaccctttaatgttaaaataaaatttaaccaaaaaccctgtaaagccggttttgcttcccccttgattttttccaatttaaaatttatattaggggtctataaagggataaaaatggattttggccaatttgttncttaataaaaaaaagacccgttttctttggaagtttgttttaatgcccaaaggggatatgaattccaaaaaattttagccgccaaaatggttttgctataaaatgagaagtctccctgaaaaaggtttttttttgctcctttttttaaaaaagggctctttaaatctgtttaaataaaattggccctttgga

SEQ ID NO: 494375 - DNA, 114 bp, Homo sapiens
gattcagttacagtcagggacgggccgacggactgtgtcgggcgatgggcacgggcatttcttacgtttatagctagtctgtttgcattctgattgggaacactgggatcattt

SEQ ID NO: 494376 - DNA, 842 bp, Homo sapiens
  misc_feature (6)..(6): n is a, c, g, or t
gctctncctcccccctgttataaagaaaaaaatagaatagaaaaaaggaagcgaaacagtataggactgccactcaatataaacagttgtaacgctctcttatgtatctgtgattactaataatacctgtgtgtaagattgtcgccctctttaagttctttaccccgcgtggtttgcactgtcttccacaccgtctctgttgaacaaaacgaggattttcccccttttacccctctcctccccttgttaatatcgccccgtggtcgaggacacaccttgggggttatttcaagcggccctttttaattgctgatcattcccctgctgtttaaaatccccccctccctccaagatatgtccggagacgttcatcatgttcaaaacgtgtgctgtctcattagaacacaggttgccgcaatcaagcacacgtgtccacccgcgggaactcgtgcccaaagttatctgtaaaccctgggccggttcccccagcaggatggtagctcccgggggggagccgccgagcccatattcctcgcgccaataaataagcggggaagatgtcttatacacgggcccgcaccaatagagcagaattactcggtaaatggccaccagcacgggtgcaaagtgttagacaggcgggcatgtgccagccataaacacacgtggcgcccgcaaatgggtggccccacaagagccccggtggagccgccacgtttccttgtaataaaacctagaagaccccacgtacatggacgccactgaaaatcttatccacacagtaaaccgcattttttcagccttagtggggccccaaaaaaaccccttttgttcgacaaaac

SEQ ID NO: 494377 - DNA, 592 bp, Homo sapiens
  misc_feature (395)..(395): n is a, c, g, or t
  misc_feature (409)..(409): n is a, c, g, or t
  misc_feature (426)..(426): n is a, c, g, or t
gtgctgtgtccaaatcgcacacttctctgtttaggccatctacgtggctttacatctccttcgtgaagtcaaacgtggaatcagaacacctgcacgttctgtctgatgcgctgctcattgtagctcttggccaggaccaaaaccccacgctgtagctagtagcgcatggcaatcaggcctgaggtacgcttgtgctttttttgccaaggcacaaaggactgggtcctccaagagcaccgggaagttcgggtccacccatggatccttctcggtgggatcccagaagcactataggcaaccagaacaatgtctatttgacttgcaaaaatccagcagattaactctggttgaagtaaggatgacattccacctggttgcagacaggcttgtacttnagccctggcttgtngaggatcatctccagcngcctgtggttgaagtaggacagcccgatgtgacttgggcgaatcctgcatcttttgacatttatcattggcttcccttggggcacaaagatccactgtgtcatctagtatttgtccattttcatctttagggatcacttcctccacctgggtttacagacactgga

SEQ ID NO: 494378 - DNA, 1447 bp, Homo sapiens
aagcgtggtatcaacgcagagtggctattatggccgggagaaacagacctgctcaatacttttcaaggacgcattcacctttgcccaacacaaccacatgcacagcacaagcacacacacaacatcacacagtggcaagctcaacattcaagcagctaaaccaggcagccaagcaagcaaaaccaacacagttcagcacagcaagcatgctgcacaatggacaatcgtctagcacagcacaccagcattggcatcgcttgcttcgcaaaatcttttccggagtgcatcttcagcatgcatctaggcaccttggtcagcagcacagcatttcaccaccaatcactctttcctcgaacatccatggggtgcacacatcacacacagtgggcatcagcaacttccgtcccagcagggcagccaacacagcaggggggcatcaaattcttcatttgcaaacagcacataataggctctaagggtaaaggcctattggcgcgtcaaaagccccaacaggaatgccaacaatcaaatcgggtcaaatcctttaacgaatttccaaaggcaaacacagagaaagttgcactttgagggaaaagttaacgtcagcaagcggcaggccaggttgggcacaccacatgaaagccaacttggcagaggaaaaaaagtcacactcagcaaacagaaccccagacaaaggcaacatcccccgctaacaacccaaagatgtggacaacgttgccaaccaccacgcgttccggcttcaggcattttctaccaaccggcgggcaccaccacgggcacacaccggggcgtcacaacttcacaacggctctggcgcccccaaggacccctgtggggggttcctccggcgtacacacaggggccaccacacagttacccaagtcgcttcgccaggggggccacacggaaacagcgcggacaccaatttgggccttaaggttgcactgcgcaacggcacacccactggccatctcgaacagcacttgggaactcggcacacacaagtggcgtcgccaaacacgtggcgacccgctggtgcacccacaccgcaacgccacacggcacggaaccggaaacaccacggaccacaaagcaccaaggcacaaccccctgggtcaattccccaccatacgccaacctaggaaacaacacccacaggccacacaacacgtggcgtggccattgcgacagagaacccacagctagcgatcattacgggttccaaacagcgccccaactactgagccagcttgaccactcggcgtgacaacagtacgggaggagtcgctacacacccgcacgatcatccggccacaagggcgaggagcccctctaacaccaacggcgacaccaaccgcggcaactatagagggaccacaagcactcacactcgtatcgcacacccctggtgaccacacaacaggga

SEQ ID NO: 494379 - DNA, 89 bp, Homo sapiens
agggtcaggtcttcccagaggccttacttatgtcgtcagtctggggaactctgccatgtgcttctatcactgtgcggttacctctttca

SEQ ID NO: 494380 - DNA, 368 bp, Homo sapiens
  misc_feature (59)..(59): n is a, c, g, or t
  misc_feature (94)..(94): n is a, c, g, or t
  misc_feature (262)..(262): n is a, c, g, or t
  misc_feature (280)..(280): n is a, c, g, or t
  misc_feature (325)..(325): n is a, c, g, or t
  misc_feature (349)..(349): n is a, c, g, or t
gatcctctagagtcggcccttagataacatcattgaaactttgcgtgttactgcctttnacatttgttggagttcattgtagattctggatatnagccctttgtcagatgaacattgatgcaaaaaacctcaataaaatactggcaaaacgaatccagcagcacatcaaaaagcttatccaccatgatcaagtgggcttcatccctgggatgcaaggctggttcaatatacgcaaatcaataaatgtaatccagcatataancaaagccaaagacaaaanccacatgattatctcaataggatgcagaaaaagcctttgacaaanttcaacaacccttcatgctaaaanctctcaattaaattaagta

SEQ ID NO: 494381 - DNA, 506 bp, Homo sapiens
tcccaagtggtggggtgagagtaagttaactttggtgccaggtgaaaggtgggggctctttgcttagactccctatcatggaaagattggagttttctatgcagggccctggggaaaaggattgctgattctgactgcccctgatcagagagattaggattgtattttgacataggatttggaacccatttaaatgttgaagttccctgagacagctctccagctgttgagcctgcgccaggggataagcagcccctaatgaaaggctttgctccctttcccccctcgccaatgttgttgttgcggcctttttgatttgaatcctctgttatagacattttttaaaaacgatttcctctttcattgggcccaagggctgagagtttgaggccccatttttgctgggtaaaaaaatcctgactggggcctttaattcagcaaactgttcatttttttgtcagacaatgtcatattcaactctgttcatattaaacccctgtgaagca

SEQ ID NO: 494382 - DNA, 445 bp, Homo sapiens
gattcctagagtagtcccctctctgccccagattccagagaagcaatctgtgaacccttttgaaaacatttgctgccactagctcagagcgagacgtagtgacctaggaattcaagtagctaactttcaatgaagctggaagtgtgcctgtcttggcggatttagaaactggacagccccttcctatcttgaaaccacatttgatttgacagcgtagctaaaaggaaaaggacgaatagtaactgggttgagttttatgtgcacacggaacatataaacacagcttcaagataaagaactttgagtcagattttcacatgtcatgtgtgagaccatgcagcaaacaatagagagatgggatgggatagctgttgcagactgagatgggattaaaaagggatcccatggcttttcacttagctaaaacaatctggaaatgttaacg

SEQ ID NO: 494383 - DNA, 366 bp, Homo sapiens
cggctgtgacctgcgactagagcagttgtaccctagaggcatgtgtgttgtgactgtgggccgtgactgcggtagacgtctataagccgttaccgcagacccgaactatcacaatcctgggttgtcgatctgcgtggctggacttattgatgatttagctgcgagcatgtcgctttgtggactcttaccgtataacctgctaatactctatgacgcagaccgtactagtctatggacgtgactctcatacttgacttgcagacacagtcgttctagatagtactgctatctcttattatacagactgtatcgacaataatggttatgcttgagtatgcatgatcatgtgtcatctgtacacatccc

SEQ ID NO: 494384 - DNA, 337 bp, Homo sapiens
caggattcacgtgcgtaggcgacggcgctgtggtcatgcctgtatcgcagcactctgggaggcaaggcggatggatcacttgaggtcaggagttcgagacgattctgcgcaacatagtgaaaccctgtatctacaagaaataaaaaaattagcccgccatggtggcctgtgccaccatgtctcagctactcggtaggctgaggtgggaggatcacctgagctcaggaggcagaggttgcagtgagctgagattgcgccactgcactccagcctgggtggcagagggagactccgtcccaaaaaaaaagaaaagagaaacgagctgttcaccttccgg

SEQ ID NO: 494385 - DNA, 170 bp, Homo sapiens
  misc_feature (13)..(13): n is a, c, g, or t
aaattgcctccancaagcagtgcttctgaataggatattggtgtactggatctttctcaaatgtgtgaaaatggcaacaagcgcctgtcttattttgtccagctccgtggcagacagcaaatcattcagagggaaatctttcatcagaggatagtagtcattcacagttt

SEQ ID NO: 494386 - DNA, 1196 bp, Homo sapiens
caatggacctatgcaaggacatgagcagttaatacatctacacccaattcagacacagtggctgaggtgactcctgtatgctccagaccccagtatctccagcaccgaccagtccccgaagctctgacccgccccccgtccccatcacgccaacaggaaacgaagcaccgcaaggaacgacaacagcaactagcaaactatcacagagccgacaggccatgtccggccacgtagcctgagagaacaagaagacaccacttctggaggcttatatcacttcgtgtcgcctcactggaccaagacatggccacttttagaaagccacgcacgctcatgagcgcagcgcggaccgcctggggctccacaggccactcgcagaagcccacgagtccgatggccacgccgggcacgctcgcagcgaggagcacccacggaacacaggtcccgggccgggacagagccaagagtccgaaggccaatggcacaggtggccaactgcgcaagtcccggaatcgccatgcccgccgcgcgtaaagtaccacaacgtgaatgctgccacccgtggcgcacgcagcccaatggaaattcgccaaactagaacacacagagtcacgagaaccctcctacgcgacacgcccctcaacatggttcgacaaattgcagcaccaccttggcctctacagcagtcgcaatcacaacactcgtggcacaaatcacttagtcagccacccgccaaaggcccactctctacccccggacagtttaccgcgaactcacgtccgctgcgaaacaccatgtcacgaatgtacccacattgtgccccaacgtattcgaaacacacacaaagtcaacggcgtttggcactgcctccgactacccccacatccgcgccaacacccccgcggcactaaggccccaacccaacagcgcaccaagcacgaagagcaaggacgcccaagcaccaaaggtgagcaccgccaacccccacgacactccccactgcgagccaaccaacccctccccaaacaaaggcgcctccaggcaacaaggagccaacctctcaaacccacacggcccacaactccccccggagacagagtgaccacacgcgcgcccgcgcacatgtggggggaaccccaccgaagcacaagcgacaaaccgtacagggagaacccaagacacccccaacaaccagc

SEQ ID NO: 494387 - DNA, 206 bp, Homo sapiens
aagtctgtcacactccaggctggttgtccaggaaaagttggcaactttcactgttgggaaattttcacttaaaaataggtcgaagttaagctgggagtggtggctcacgcctgtaatcccagctacttggaggctgaggcaggagaaacacttgaacccgggtggcggaaggtgcggtgagccgagatcgcgccattgcactccac

SEQ ID NO: 494388 - DNA, 541 bp, Homo sapiens
ccggccaggctattggttgaatagtaggctgatggttccgataataactagtatgggcgataagagggtgtaagttatgccttgtagttaagaagtggcgctagggcatttttaatcttcagagcgaaagcctataatcactgcgcccgctcataacggggatggccatggctaggttatagatagcttgcggtggttagtgtaaataagtaaggcaggagtccgaggaggttggttgtggcaatcaaaatgaattaaggatactagtataagagatcaggttcgtcctttagtgttgtgtatggttatcatttgttttgaggttagtttgattagtcacttgttgggtggtgattagtcggttgttggtccgagcggaggtccgctcggaccatacctatgtatccaaatggttctttttttccggagtagtaagttacaatatgggagactattccgaagcctggtaggataagaatataaacttcagggtttatcgtgtgagcacaccatatatttacagtgaatagacgtagacaca

SEQ ID NO: 494389 - DNA, 108 bp, Homo sapiens
ggactgggctgtagttatgtgcttggtgtgatcgcttgatcctgggatcctccaggagagaagggtcctcgggcttggccatggcttgtcagggagagccgaggggag

SEQ ID NO: 494390 - DNA, 232 bp, Homo sapiens
aaagtgtcttcattagttatggatgatgaaatagaaagtgacgcacaaaaagaatcactttctcccggacaattgagactaacttttgaagaaattggagcgacaaagacaagaaaaccgaaagaagcaagctgaagaggaagcaagaaaaagtttagaaagaaagagaagggtgctttttaaagaagcaggggggcaaatggtaaatgaagttggggatggtccgcacagg

SEQ ID NO: 494391 - DNA, 155 bp, Homo sapiens
  misc_feature (32)..(32): n is a, c, g, or t
  misc_feature (35)..(35): n is a, c, g, or t
  misc_feature (79)..(80): n is a, c, g, or t
  misc_feature (140)..(144): n is a, c, g, or t
  misc_feature (147)..(148): n is a, c, g, or t
acaatttaaaaggcaggcgttggaccaaaaanccnaagttattttccattcaaggcaggcaaaagaaaagttcttaatnncaaggcaaatagccactatttgtatagacacaaatatgaaaactataggatgatcaaaannnnngtnntcatatc

SEQ ID NO: 494392 - DNA, 344 bp, Homo sapiens
ggtcggtccttaacccatccattttttttggggggcaattgagaacacataaagcaagcaggtacctagcatccccctcctaaagtttaaattcagagcccagggtcccccccaagcctcaagggagcctcaggtttttttaatttcctcccctcccagtttgaagcaaacaggttattgcctagtcccccccaatcccaaggggggggtgggtaagggcagcatgggggggtggcctggggggggagtaaaaaagtccctgtggggggggggaaagggggacttgggggtggggggggtggccccttcagttttgttcctattaaaggcccttttgaagggca

SEQ ID NO: 494393 - DNA, 848 bp, Homo sapiens
ctcggcgtgtcgttgttgtcggcgcatcccgcttcgggttaggtcgttcctgtgcgtcccttcctctcctcccttcggacccatagatctcaggctcgggtctgccgtccgccggagatcactgttgatccggtccgtacatgcggtcccgtggccaccatgtccctaagcacgggaaacggaaggagatctacaagtatgaagcgccctggacagtctacgcgatgaactggagtgtgcggcccgataagcgctgtcgcttggcgctgggcagcattcgtggaggagtacgaaaacaaggttcagcttgttggtttagatgatggagagttcacgagtttactttgcagaaacacctttgaccacgccatacgcccaccagaaagctcactgtgagatcccgtgactagcaacaaggcgtctatccagacctactggtcgagcaagcggctgactatctccgtgtgtggacgggttggtgaaacatgagaccaggctcgagtgtttgctaaacaatactcaggaactctgatttctgtgctcccctgaactcctttgactggacactgaggtggatcctttatcgtttaagggtacctcaagcatttgatacgacatgcacccatctgggggctggagacatgggccaggtgtaacgggcgagtgaatctcgtgtctggccactgtgaatgaccccgtttgatcgcccatgacaaagaggtctattgatattgcatttacgtcgtgccggtggtggcagggccattgtatgcctctgtggatgctgatggctcggtgcgagtgttttgaactcccgctattagaacaaatgacatcatttagaagaa

SEQ ID NO: 494394 - DNA, 819 bp, Homo sapiens
ctagcgtatccggatacggtacgcactattatagccgtaaggtccatatactgctcaatgggaagttgaaaacactgatgggaactgttgtaatttattgcagctgggaagcatatgctagcagtaacctattcattctctcaagcctcccagaatagagcacaaataggtatcatcttgtatcatgatccacaagacgtagatttccatagtctccctaggtatatatagagcttatcattacacctatgtgtgggtcacctcctccacatggctttctgatatgggtatatcatcagagttccgagtcattcacgaggtagactgagggccacttccaagactgatatggctcatccgtagaccagctcgtcgtgacctggaatgtaggagcatgatgggtgacgccttgtggcatcctcctagattcatgagcgttctccagatgctcggtagtactcgtaggttacgagtagtacatgctcaatggggactgaattctcagcaaagagaaagccctggattcttaggacattttgcgtggatgtgctatgcagaaatcctgccatcaatgtgaaacgaccctgctgtttgtgggtgtgcaccaatcatcgtgcattgaacattcagggtgatgattgcaccttgtggaaccaagacaattgacctgtggcgagacttgctttggaatgttgccatagtaaaggtgggcctacaagccttgtgcaagaaagtgccgcggaaaagactcgcatcgctgtgccacgaggtaccgtatggggactatacaatctgtctggtccaataatacaaggattg

SEQ ID NO: 494395 - DNA, 314 bp, Homo sapiens
aaggaagggtccagcgatggggagagccccaagttgagaactaagtaagtgaacaattattgtatgaacaacttgttacggatacagctgagatcacgaacaacctgtgtgtaaaatgagtttcattacacacgtagcacccttcagcaggaccctataaaactttcctccagcccttgcctctttgcaggtagccccttctctgctgagctgcccactgcaacatattttcacaatttctctaataaatctgcccttctttacctacaactatcttggtaaatggctttaccacctgcaaaactgaccctagg

SEQ ID NO: 494396 - DNA, 304 bp, Homo sapiens
ctgagatagagccactggactccagcctgggcgagagtgcgagactacggctcaaaaaaaaaaaaaaaaaaagggtaaaatttgaaagttaaaatgaccccttaatcggggggcggcaaaagggttgtggtgtaagcaggctggaaaacgacattagtctcctcgggacatctcctagcagagctctcggagtggactaggtgtattcccaatggagcagtaatattttggaagggaatcttttttttttcttttcccccttgagcagaagggtctcaacgggggcgctaaaaatatccagtaa

SEQ ID NO: 494397 - DNA, 331 bp, Homo sapiens
tatagcttcagactgggattccagaacttaccattgaaaacagagcttttaggccaggtgtggtggctcacacctgtaatcccagcactttgggaggccgaggcaggtggatcgcttgagctcaggagttcgagagcagcctgggcaacatggtgaaagcccgtctctaccgaaaaatacaaaagaaaaacagctgggtgtggtggtacgtgcctgtagtcccagctactttgccacctaagctggagtgcagtagcatgatcttggctcactgcagcctcgacctcctagattcaagtgatcctcccacctgcagtccccgaaggtcgac

SEQ ID NO: 494398 - DNA, 218 bp, Homo sapiens
tctttcttcccaacttttattttaggttcagggagtacatatgcacatgtgcaggttttatacgggtaaactctgtgtcatgggggcttggtatacaatttatgttgtcaccccggtaataagcataatacctaataggtaactttttcgatcctaacccccctcccacccttcaccctcaagttaagccctggcttatggtcgacgcggccgcgaat

SEQ ID NO: 494399 - DNA, 324 bp, Homo sapiens
ctttggggtctttgctctttgtttctaggagaaaacacacacacacacacacacacacacacacacacacacacacacacacggattctatatcgaggagacatttggtgtttacaaaccttgtagatactgaagggacgagagagtttttttgtgtgggtggtcacaaagagctcgcgggcctacacacagtgctctgtggagggactcaaatcttgggaggagaggggtgagctttctgtgggcctctcacacacacacgtgagagagagagaagagtgtagcagagaccacaagagagcagagagcgggcaccgcgctcga

SEQ ID NO: 494400 - DNA, 311 bp, Homo sapiens
catgattgtgcggagtgggatgtaaatatcgccttcctctcgcctattcctcccatgaaaaatggcttcctggccgggcgtggtggctcctgcctgtaatcccagcactttgggaggcctgaggtgggctggatcgcctgaggtcgggagtttgagaccagcctgaccaacatggtgaaaccccatctctactaaaaatacaaaaattagccaggcgtggtggcgcatgcctgcaatcccagctactcaggaggctgaggcaggagaatggcttgaacctgggaggcggaggttgcagtgagttgggatgg

SEQ ID NO: 494401 - DNA, 179 bp, Homo sapiens
gaggctgtgcacagaagcccacagctgagaggagcagtgcgcagacacctagaacccagagggcaggaggggcccaggacactggcaggcccatcctgtgaagccgaggcccacgtagcaccagcacgaattcccttagcaacagcacgaattcccttagcagcagcacgaattccctt

SEQ ID NO: 494402 - DNA, 678 bp, Homo sapiens
  misc_feature (146)..(146): n is a, c, g, or t
ctgatttataaacaaggttcaatatagaatgatataactgctgcaaccggcgctgccacaactacctgtgcgcattgtccaggggcctgaggattgatagcccccacccctgtgccactgcatctagcgcccatgtgcaccattgnggggcctgagaataggcccactctgcctgcactggcacatgtgcacatcatctgagggtctggagatcaatatatgccactcactggcatctgcaggcaccgtctgcagaccagaggtaaggccagccccacctgccacaagtgcactgggacctctggacataatatgggggcctaggaaatgacccaccctgctccctgccactggcccctgtgcacaccattgggagggcctaaagaaaagccaaccttgcctgtggcttccattaccagaaccaacatacaccttttagggcactaaaactaggcttgctttacttgttactgccacttgaacaggtcgtttgcttggggataaaccaatccttccaacaagaaccaatgtgcacaattttgggggctctaaggaacgggcttccttgtgtgctactaaggtcaatgtttcttggggcccttgggatttacccaaatttctttatcaccattggtgtcttgttggacttttgggcctcatggatctttcttcttgcct

SEQ ID NO: 494403 - DNA, 444 bp, Homo sapiens
  misc_feature (23)..(23): n is a, c, g, or t
atatatataaggcaaggtctcanagggtcctgagctgtctccatgcagttggtgtggctgggttcctaacatgtggatgaggtggtgttcaccttcctgtaagcctccagctctcaggaagctttctgaaccatgtccttttgggccttttatggagacttcattacacaggcatgattgattaaatgattaaaccattggcccttggtgatcaactaccattcttcccaattcttgaagtttggagagtgggtttgaaagtcccagccctctaatcctaccttggtctttctggtgaccagcccccatcctgaggctacctaggggctgccagccattagtcagtcattaacatataaaaagacaccattttggagatttcaaagattttaggagttgcatgcaagtaaatgcgaatgaagaccaaatatatatttcacaata

SEQ ID NO: 494404 - DNA, 343 bp, Homo sapiens
tagcctcatggtaggaaaatggttcttgaacaaattacagacacaaatgacttaaatggaatagccctgtatagggcaaactagtggcccccaggagacactacccttccatgccccagacctctgtcttgcatgtgacaattgccaatctggactaccccaagatggcacccaagtgtttgacttctggctacctacggttaccatgtcactagcgtcttattatttcagacctacaaattgtttaaatatatgtcgtcacagtgtaccaaaaaaatgtccagtcggtaaaaaggtctaactctgccaattaagagccagtaagtaacagctattgctgtcc

SEQ ID NO: 494405 - DNA, 111 bp, Homo sapiens
atcagctcggaccacccagataactacgatagcccttatgaaacttaagggtgaaggtggatttagcagtaaactgagaatagagtgcttagttgaacagggccctgaagc

SEQ ID NO: 494406 - DNA, 284 bp, Homo sapiens
  misc_feature (19)..(19): n is a, c, g, or t
  misc_feature (24)..(24): n is a, c, g, or t
  misc_feature (34)..(35): n is a, c, g, or t
  misc_feature (37)..(37): n is a, c, g, or t
  misc_feature (41)..(42): n is a, c, g, or t
  misc_feature (48)..(48): n is a, c, g, or t
  misc_feature (50)..(52): n is a, c, g, or t
  misc_feature (107)..(107): n is a, c, g, or t
  misc_feature (199)..(199): n is a, c, g, or t
  misc_feature (203)..(203): n is a, c, g, or t
  misc_feature (269)..(269): n is a, c, g, or t
  misc_feature (271)..(271): n is a, c, g, or t
  misc_feature (273)..(273): n is a, c, g, or t
  misc_feature (280)..(280): n is a, c, g, or t
ccccacatagaaacttgcntgtancccggggcanntncccnnttttgntnnnaaaagacgagccccaagttcacacttccatggggacaagaccagccctgctcccntttctatgcagaatgcggctgaccagagagctggatcagggcacctggcagacccagtctagggaagagctgtggatttttgaggctgtgtntgtngccccttctaggaattttcccttcacgattcttttccctaaatgcccagtgctctgctccaacctntntnctccccnatcc

SEQ ID NO: 494407 - DNA, 98 bp, Homo sapiens
cgagcggccgcccgggcaggtaccccacctttgcacccaggccgggccagctgtctgatccaggcggtgctcaggaatggttgtggggggctgtggtc

SEQ ID NO: 494408 - DNA, 108 bp, Homo sapiens
ggccggtccgtctttcccaacacatgaaataagtccaaatatgaaaatagagtttagtgtgattaaaggtataaaccttcctaatgttgacctgtgtgggcgataaat

SEQ ID NO: 494409 - DNA, 868 bp, Homo sapiens
  misc_feature (665)..(665): n is a, c, g, or t
gggaggagaggagagcatagcagctgaaacgcaagatggaatgtgggcaggaaagaggtcctgaatggagagcccgacggaactatctccgttagctccccggggccgattgtggcaagtgtcccatgctttctcgcgaggtgctaacctgagaacggcgcgttctgtatccgtgtgtgggtagtggggtggtccgtcatcgatcgttggttgattgtggtggagcgacttggctcgatggagatcttcctagcactgagcccagtataacacctactggagaatgggtatcatgagatgatgagcatttggggctgccggaaggccaggaaagtctggactcctgtagtgagcacctggttaccaagcttgcgcactcttgtcgacacgatccggcgtcacaagcttgggccttctgaggcggtatgggacttatcccaagcgatgctgtctgattcgcgcgtaccagaggccaatcgcccctaggctatcgtgcatggtactatcgattgacacgatccggatcgctaagaagaagcattccccgcgaggacatgtgaaagggctcttcgaaatatgaagagaggttcgaccaaaggttctcacgagggatagagctcttcatgtacgaggccaatggcgcggcagggcgcctaacgtgtcgntaagcttgagtgggcgaaggcagtagggggccgacaattgcagggcatcagcatcccctccggggaggggaccctggcctttacctggtgacattaggcagaagaaagaccccttggtgtggccgggtggtggcaatcatacttagattcgagatgacgcctccgagggtcagaggaaagcactcaacgggaaaggaaaacgc

SEQ ID NO: 494410 - DNA, 743 bp, Homo sapiens
  misc_feature (126)..(126): n is a, c, g, or t
  misc_feature (189)..(189): n is a, c, g, or t
ctctggtcacttccctccaagtccccggcccacacaagctcctggagtcccaggccccttgggggcagcatctctggtggcaggcatcttccccaaatattcaaccttctggggctcctttctggnccaggaggggaactggaagtttccctagagaagcacttggctaaaggggctccaggtccccanactcctgggggaagaagggatccagaggctctggcggcacaaaggcctccactggttctctctgggggtgggcacccccttcctggtgggccctggtgggcaccacaacaaaattggattcggtccaggcggaataatttcttaatttaactctggttccaacatgggtgggtgaagtgagatctaaccctgggaactctctcgccacacaagggaacttatagaacacggcagggtcatggaaccaaatgtaacacattttggcattaatattttatagtaacaaagggtgtaacagaggcccaagaacagggatgtagggggatggcgagaataacttgggcctgtggggcatcggcagggaaactcttggcgaaggatgtgtgtatactccggttggaaagtggggaacgttgacaagaaccggcttgtgtagaaggaggcgcatgggagagggagggtcttgggattgagaagaaccagggacgaaacaaaaatgttccggagacactggaggcgaaactttggggacctttcgtttcacgagggagtcc

SEQ ID NO: 494411 - DNA, 102 bp, Homo sapiens
acaaccaattttttttacttctatcaccctagattagttttgcctgttcttcaacttcatataaacttcatataaatgggggcgtacagtatatcccctttt

SEQ ID NO: 494412 - DNA, 189 bp, Homo sapiens
aagacaaacccaatatacctatcatatgctcaagacgtagttaggctactgaaagacatgacatggtctctaaccaagtctattacctcagagatccacacatcagacatcatactctatactccaaagcagcacaccatggctgctagtgtacctctcctatctctatcatcctacttttagatacct

SEQ ID NO: 494413 - DNA, 301 bp, Homo sapiens
tatgtggatgggggaaaaggaataagaatttacaaagtcagatgggggtgcttccaagtccacacaattaatttggatatttttaatcatatccaaccactcacattggggctatgttaagtcatagctcaattggttcccttacggttcggcagcagatcactggccggtctcttttcaggtctaaggcagaaaaacaaaaaacaaacaaacaaaaaaaccggttctaaactaatcctcaaactggctcagtcagtccttaaaaggggttttaggggaggctatagaaccaatcaacata

SEQ ID NO: 494414 - DNA, 381 bp, Homo sapiens
atacggaactcgagctggtaccctcgataaggggcaagcgtggtggctcatgcctgcaatcccagtactttgggaggccaaagccagaggatcatttgagcccaggagtttgagatcagtttgggcaacatggcaaaaccttgtgtctacaaaaaataaaaaattatccaggcatggtggtgcatgcccgtggtcccagcaacttgggaggttgctgatgggaggatcacttaagcctgggaggtcaagcctgcagtgagtcacgcactccagcgtgggtgacagagagagactctctcgaaaagaaaaaaacacacacacatgtagaaagcccagttaaagtggaattttacacaagaaacaattttttttggccttatc

SEQ ID NO: 494415 - DNA, 157 bp, Homo sapiens
gggtggtattggcagtggcgggggtagcagctccagcgtcaaatttgtctccaccaccatcctcctcccggaagagcttcaagagctaagaacctgctgcaaggtcactgccttccaagctgcagcaacccatgcccatggcagattgcctacttct

SEQ ID NO: 494416 - DNA, 166 bp, Homo sapiens
ccgacagagcgtttctcaatctgtccttaatattggttataggcagtattgattaggtcacctcatacacatacatagagaaatcaggtcagagggaggacaccattcttggtcagagcttccttcaccaacaaattttggtaccaccataacctcttcctcctct

SEQ ID NO: 494417 - DNA, 402 bp, Homo sapiens
cacctgggcgcgccatctacgcgccgcgcccacccaaatacccgggccacccctcccccataccacagggctggggtgctgctagcccatggaactgttttctgtgctaccgtgagccgcccctgaactctccagtggcccagctggtacgtggctccgctcagtacgcgcacgccgtatgtgtgactgtccccgcatcatcgcacgtacagtaccagacgttacgccgacgatgcgcagacatccgaccattatgtaccgtcccacatacagtcgcagggcctaaccgctaactatgtctggaccgccaccgtccggaccgcacacatcaccgtacatacaacaaccgacacggacacccactggctccgacagcccgtccactccaaccctcttctacca

SEQ ID NO: 494418 - DNA, 429 bp, Homo sapiens
  misc_feature (337)..(337): n is a, c, g, or t
gtcatcgattccaccctccgtgtgctcagcctccggagtagctggggattacagggtgtgcaccaccaggcccggctaattttggtattttaagtagagatgtgtttcaccaggtgggtcaggcgggtctcaaactccggacctcaggtcatccacccgcctgggcctcccaaagtgctgggattacaggcgtgagccaccaggcccggccctcctttcttattttgaaagtcttggacatggatagggttttctatagttcccacagagatgtgtggttggtggcttcgagtttataacttgggtaggaaagggtacatctagcccttcctatgtngatattatggacttcacaggttagggaaccatgaactagtttcagaagtgcgggagttacagtgttactacgggtccaccaggcctacggtg

SEQ ID NO: 494419 - DNA, 408 bp, Homo sapiens
  misc_feature (148)..(148): n is a, c, g, or t
tcataacagccggtagtaggttctgtatataaaaaagagtgtgacggataaatgtgaccaaataagattttctgatcactctggttgtggctgaatgtgaatctcttctgaatgtgctggagaaatattcggatcactgacattctgncacgtatattaattgttgaaattcttattcctctatcacactaaaataatagtctataaagatagactgaatattattcactttaatattctaccatacagtactttcctctgtaaaaggccgacaaagggcatggtaaagggcagaacagaatgggggaatgaatacataaaaaagaaggaggaaggtactcaacaactcagactggttaatgagagttgagcaatagtgaaagaaagaacaagagaggagagctataa

SEQ ID NO: 494420 - DNA, 226 bp, Homo sapiens
gaggttttgggggtgagagtatacaaaacgcaagaatcttctctcaaatttcagagaggggggtgcacgtgcccgagccaatatgcgcctataatgtgatatgggggttgtcccagagccagagccggggtttttgtgggggccagagggggcagcgcactgtgtgtaggggtatctgtgagagtcccccctgttgtcgtcttgtagcagcagaatagtagtaggc

SEQ ID NO: 494421 - DNA, 340 bp, Homo sapiens
  misc_feature (264)..(264): n is a, c, g, or t
tcttttggtcagagagtccatatatctattctcatacatacaaaataaaggggacattgctgaactcagggatttttaaggtaagcgaatattttatttcctcggtctcgatgggattgacttcattatacaagaacttgccgctgacagaactgacacacacattttcccccagagaaagaaccctctttcattagcagagatgaattgaaatgtcatgtctgagtgcattcctgctccccactctcaccccacaaaatcccncaagtgaaaataaatcaataaaatccccctgatttactaaaagtcatccctcccaaactttttaactagcagctgg

SEQ ID NO: 494422 - DNA, 1042 bp, Homo sapiens
tacttggcttggagactggcgcggcgtacgtgtccgaggtcactagttgcccggtagtacagcggcacatgaatagaagcagcaatgagagccagtcagacaggcacttcgaacaattcaataaatcaatgtgaaagtcttgaaaaaggatccaggacaactgaagtgaagctaaaactctactgctgctatataagcaggccactgaaggaccgttgtaacatgcccaaaacaggtgtattggacttgatcaaaaagggccaaatggtgacgcatgtgaatgcccttggaagcctgcccaaggaagcagccagagcagaactatgtaggatttaggagtcacagataaaagagatcctatcattaggaatccatctagtacagagtggagacctggcaacagacagagaagatacaaacatggagatacagaaaagctctggatggaagaccctccggaagacatggcatacacaacagatcaagataacaaacacggacacaaaaccagacaaaaatgcacataaaaacacatgagaatgatatcatgcaaaataatgacgagcaacattaacagctggccagcacaggcatgacgtcaagtcatcacatgataaacaacagagaaatggttgactataacagaacgtgggcaatgatctgactaaccaatcacagcatatacccacacttggatagacgtagaaggagaaacgactacaaaactaacatgacagaaaaaactgagtggaactaagtagggaccatgatatacaagaaaaacctacaaactctgactagacaaaggatacatggaacaagaaagaaagcaaacaaccgaaaacacagcaagcggaaaaaccaagccgagaaatgaaacagacgacaggacagcagtacaaaaaacaaaaaaaacaaacacaagagacaaagcacaagagaggatgaacacaataacaaaacaaccgaaaaaaaatgcccgacaaaggagccaaaaaggcaaataggaaagaaacaagaaaagacagagagaatacacccg

SEQ ID NO: 494423 - DNA, 346 bp, Homo sapiens
  misc_feature (69)..(69): n is a, c, g, or t
acttattctgggtgttgtgagttgggggaaaacctgtgaaaacccagagtccccaggttttacaccaanagtgccaaattattttgactggattagctaccatgtagaaaggccttttatttctcagtacaatgtataaaattgtgatctctctcttcattctatctttttctctcaagagttccatttaaatgaaaataaacggggtatatttaatatttctctagggggggaaaaatgaagcaaaatctcattggatatttttaaaaggtctcccacagaggtttatgcccatattggaatttttgttgtatatttctcaaataaatattttggtgaagcataa

SEQ ID NO: 494424 - DNA, 295 bp, Homo sapiens
ggctgaatagtattccactatatataagtaaacatctgttgaatggacacttagattgcttccaaatcttaactattgtgaacagtgctgcaacagacataggaatgcagatatctctttgatgtattgctcttctttcttttggttatatacctacccagcagtgggattgctggatcacatggtagctctacttttcaattttttgaaaaacttccaaactgttctccatagcacttgtactaatttacattcccaccaacagtgtataaggcttcccttctgtcgtcttctc

SEQ ID NO: 494425 - DNA, 402 bp, Homo sapiens
tgggcaggctgcagtgcactccagcctgagtgacaaggagagagactccatctcaaataataaagaagaaataactcaagataacctatcttgtataatgtatatttgaaggcacctgtagtattgtaacatagactgtttctcacaggttaattttggtggaggcataaaagtctttagaatcaccatgaaggcacttgtgttaggaagatacaaacaaacaaaaagccctcacgaatggagcctgtgaacgccgtgaatggagtgttcccacatccatcgaataacaaaaattattatagaagacgctgcagatcccataaccttgcactaagaccagcacaaccttacacaaaaaatacttctgcaaggatttctgcccagcacctgcctgtccaacct

SEQ ID NO: 494426 - DNA, 449 bp, Homo sapiens
  misc_feature (97)..(97): n is a, c, g, or t
  misc_feature (99)..(99): n is a, c, g, or t
  misc_feature (120)..(120): n is a, c, g, or t
  misc_feature (129)..(129): n is a, c, g, or t
  misc_feature (173)..(173): n is a, c, g, or t
  misc_feature (190)..(190): n is a, c, g, or t
  misc_feature (196)..(196): n is a, c, g, or t
  misc_feature (202)..(202): n is a, c, g, or t
  misc_feature (231)..(231): n is a, c, g, or t
  misc_feature (252)..(252): n is a, c, g, or t
  misc_feature (259)..(259): n is a, c, g, or t
  misc_feature (281)..(281): n is a, c, g, or t
  misc_feature (285)..(285): n is a, c, g, or t
  misc_feature (297)..(297): n is a, c, g, or t
  misc_feature (312)..(312): n is a, c, g, or t
  misc_feature (315)..(315): n is a, c, g, or t
  misc_feature (360)..(360): n is a, c, g, or t
  misc_feature (379)..(379): n is a, c, g, or t
  misc_feature (399)..(399): n is a, c, g, or t
  misc_feature (411)..(411): n is a, c, g, or t
  misc_feature (414)..(415): n is a, c, g, or t
  misc_feature (434)..(434): n is a, c, g, or t
ggcgattttagtgaagtttacgctcaaaagcaggattccccagctttccgttgcacaaccagtgaagggcagtccagcccagcccctatttgagttncnggctacccaaggactttgtanacctctttnctggggaggacgctcccaagctaatagacttccttaagctgaanagaaatcagcaggaggncgactnatgagngtgctggaactggaaaaaaggaggccccncccccccgctccgggagctgntcatcanccgcaacttcctgccgaccctnatgngggtgggccgancagtgtggacatcanccnctttttatattcatggacattcccctggggaaaaaaacggagggnctttgctacttgtaaaaanaacataataaatagattttnaacataggaaanccnnactgttttgataataaaangctttttatgaaata

SEQ ID NO: 494427 - DNA, 996 bp, Homo sapiens
cggagcctgggacaccgccggcggtcagagaagcggatcccgtccgagccccggtcccctaatgtaagcgccgaccgtccgccggaagctcgcctatggatggtcccccgtcccgcacataaggtgcctctttgcatagcactagttccccagccgcacgctctctggaccactacatgctggactgggcaatggccgggtcggaggagggcagcacgtacagacccaattgtgcaccagcttgctgggaacaagactctgtcaagtttaacgctggttctgctgcggcggagtcgtgcggtacggcaatattccatgccttcgttccatccgcattggtcaagggacagtttcacgaggtacccaggagaggcaccaattggagcgggcttcctcacacagactgtctgcctggattgacacaaacaggtcaaggttgtgaagatcgtggggaccaccagtcttggcacagggagccggtatcgacagctctgggcccccaatgtactaatcggggaggcccagtgttgccatcgtggtctatgacatcaccaagacagatacatttgcacgggccacgaactgcgtgaaggagctacagaggcagtgccagccccaacatcgtcattgcactcgcgggtacaaggcagacctggccagcaagagagcccgtggaattccagttgccttgggatgctggagtgcgaggatccacttggaggccaggacgtcgagaacagctaagcaccagaagcagagcctaatggaacgacaacaggttggtgtcactgggcacattcgaaaaactgccactgaacgtgtacacgaagacctttccgtgcgctggctcagaggtttcccaaaagaagcccccaaattagctgtgtggcccggcgcaaaccacgtgtgtgaccccatggaagaaaacacagcagtgcggagacctgctgtctccaattggacccctttagtatcactagaccggacaccacgaga

SEQ ID NO: 494428 - DNA, 401 bp, Homo sapiens
gaagatcttctgtcttttgtttagatatttatttatttattgagacagggtctcactctgtcgcccaggctggaatgcagtggcgcagtcttggctcaatacaacctcaacctcttgctagtctcaaactcttgagcccaggaggcagcgattgcagtgagccaacattgtgccactgcactgcagcagagtgagagaccgtgtttcaaaataaaataaaatagggagggatagcattaggagatatacctaatgctagatgacgagttaatgggtgcggcacaccagcatggcacatgtatacatatgtaactaacctgcacattgtgcacatgtaccctaaaacttaaagtataataataaaaaaataaaataaaataaaataaaaattctcaaaaaaa

SEQ ID NO: 494429 - DNA, 217 bp, Homo sapiens
tcctctctttatgtgtatactgtgaaacggctgatcaaagactctaaagaatactactgcttgtctcttatctacccacaccttttaaaaactttcttccttctttccccttcaaatattgaagctctcaaaatcatcttcggagaaaggcacaaacctacctcccagatgtgcatccttcatctgggccacataaactttctaaattgattgagag

SEQ ID NO: 494430 - DNA, 390 bp, Homo sapiens
tcaccctacacatagcaatcaataaaagtacaaacatatataagctctaaagcaggctatatctaccacacagaaccctcattactatccttactactgacaactctcccttaatccctatttcaagtttagtttccctgacatctaatctacatgctactatcaagaagagcttaaattttaaaccacaagtctaaccacggaaaagccttcaagagctctccaacacctacagcacttggaacctactatacatctccggcaagcatcattgcccatcactccctaagcccactttacactactaagtaatacagctcctagatccctgcactgtgtgagtatgcttaggtcagcacttcatcagtatctactttgtactatatataa

SEQ ID NO: 494431 - DNA, 735 bp, Homo sapiens
  misc_feature (13)..(13): n is a, c, g, or t
caaatcagttttnttggtgtctttgcagggaatgaaagaagataatgagcagataatcagcagccatttcctttcagttacggtatatgattctgcctgagaaagcaggatttatgggaaggaaaacttgtctaaggctcatcaagatggcctgacccagagtcacctaagagaactcttccaacttaaatgactagggtgtgtaatcagttgcttcttattctgtgtctcagatttcctagtccatgacatttaatagtgagtatagagtaggatattctatacattttagtatttggcccttggaaacaaagttaaataccatgtcactcagaagactctcaaagtttgtgtataaatggcgaagtatgcactatgagagattctaatccattcacatcattcttgagttgtgcaaatacacttggctttgatttcacttggtgatctaaatttgtttatttaagctgcaagaaagttacattaatttggaatgtgtcatcacttggacccagtatatcagatttttattgagtaaaatgttaaaaataataagtgtaactcagattctggatgttcgagtttacaatacattgcctgtaataaaagctgattctgaagtgcatttttcttgacttactttggcagaaatatacttatatcttaatttatagtttgtaagtttatactgttttctaaaagtaataaatcatttcatgaaaaataaaaaaaaaa

SEQ ID NO: 494432 - DNA, 300 bp, Homo sapiens
aaataaacttgaccttaataactccttagcagggggtctaaagctacgctccttattcaaacaggcctccacaaactccttgaggggtttactgtagtttccttccagcactccggaggtgctcatgaagcacgcgccaagcactgctgaagcggtcatcccagtccgaggtccagcgaaggattgtatcccagcccacagcacatggcacaaaccaatcattaccagtgttctggctaccctggctcacatggaatcacagccatcgactggagcatctatccaggtcaggcatctctt

SEQ ID NO: 494433 - DNA, 272 bp, Homo sapiens
  misc_feature (93)..(93): n is a, c, g, or t
  misc_feature (110)..(111): n is a, c, g, or t
  misc_feature (208)..(208): n is a, c, g, or t
acacccccaagaaaaacacagggtgtggagtagaaaaaggttataagttggatcttaattgtaaattaaccttgagtgtcaagttctaaagcngactcagtgcatgaacnnaggaagactactgtataggtttttttttttctccttttaatgagaaagctttgcttaagggttgcatacttttattggagtaaatctgaatgatccnatcctttggagtaaaactagtgcttaccagtttccaattgtatttagcttctggttggaatttg

SEQ ID NO: 494434 - DNA, 904 bp, Homo sapiens
  misc_feature (888)..(888): n is a, c, g, or t
gatgactcagtccgtgtgtataatgccagcagcaccatagtcccctccctgaagcaccggctgcaggaaatgtggcgtctctggcctggaaaccccttagtgcctctgtcttggctgtgtcctgccacgagtcgtgcgttcttatctggaccctggtgcctacctccgttgtctaccgcgaccctcttctggtgtgcccagagtgctgtctcaccctgtgcatacacctgttaccagtttgtgactggcccccagtgggtgggcggctgtctcgagcttcacccgtggatgcttctatccgggtatgggatgtctcaagcagagacctgtgtccccttccctggtttcgaggaggtggggtgacccaactgctcgtggtgccccagacgggagcaaaatcctggtgtaccacttccttgcaggctgtctagcgagtctggtaaggcccagatgtggtcttgtgacgaggtggcatactctatcaggcgctgtccaaattgtgtgctggagccagatggaagcgattgtggtcactgtattggggagagcatgtgatatgctcgcccggtttgtgccgaacgttgtggtgcgggcaccagggggcgccttggctaggtgcaagtccgcaccgattgcgtgcgaatcgcgtgggaccacaaatcctgaccccggatggtgaggggcagctgcgcggagcgccatccatggctggacccgccgggacgccggccggcgtttatagggagcccagttctgcggtgcagcagctcgttttgaccacaacgccgttggcccctgcggtccgggcgggcacccgcggtctttcagaaggcccggggggggcggacccgcatagtcacgtgcggccgcatgtcctttctctctgcntcatccctgttcatgg

SEQ ID NO: 494435 - DNA, 127 bp, Homo sapiens
aggcatttatacaaaccgtactgaggaatctacaatctagaagataaatgacaacagagtcaaagcacctatctcagaagcagtaaggccactctatgatctctaagcagagaagcagtttgtctgt

SEQ ID NO: 494436 - DNA, 312 bp, Homo sapiens
  misc_feature (25)..(25): n is a, c, g, or t
  misc_feature (45)..(45): n is a, c, g, or t
  misc_feature (78)..(78): n is a, c, g, or t
  misc_feature (259)..(259): n is a, c, g, or t
gtactctcaaccttgttaccttccnccccttgtaaaatcattttnctgtctatatatatgtttgcactcacccctttncttagaaaaaatgctaacatactctcaacactattttgcacttcgcttttgtcacttaacggcatcctcaagatcactccatgactgtacatagagctcttcctcattcctttttccagttgtatatgctgccttgtgctgctccacattatttacttattttttatcagaactgaagtcnccaggtaggtacattctttccagacttcatgaggggtaagttgggagggtgag

SEQ ID NO: 494437 - DNA, 168 bp, Homo sapiens
cccttgtgccaggctggcaggcagcaaggcacagtggtcagcagttctcacctgggcacccccctagctggcagggccagccttgtcccatgggtgcacaggccccatggtggcaggcaggcagggccctgctggcgtggcttggccttgtggtccctgcagctctgc

SEQ ID NO: 494438 - DNA, 892 bp, Homo sapiens
  misc_feature (1)..(1): n is a, c, g, or t
nagcacacagagacagaggaggtcggcgacggcagcctcgcccagccaagtcgtgtattgcagttgtcttctgtgatattttggttcaggtgtgtcctcagtgaagtttttttgtccgctcttaatttgcccccccccgcttgtgtcctcagcgcctttaaagaagaaagtgcccccttgcctcataattggagagtccttgctttttctaaagaggaaacctctctcccctttgagaccaaggaccccttggtttcggaaagccatcgtcttgggcaatcaaaaaggaactctgctgggaacacaccagtattccgcgcgttccccagcacttgttaggccaccatgggcaaatacagactccccccgaaacttctcttggccgaaatggagcttcctgaccctctttcatataggggttttctaaaacgggctattgtaacctgtttgttaaagcaagaaggtttcgaagcaagcgtctttcacagtagcctataactgaaggaatcacgtgacttccctgtgatgtatgggtgtttcctgcaaaagtagtctcgaatttgatgctggaccacccccccgaggtgttcctcgtacattattactcccccacagagcgtttttaagcatccccatccttttgccctgtatttgtccccatttttgcaatccccatagaaggtcgccaccttattgtactccaggaaatgcgactctaatccttctcttcccaaatcgctgtaagtcttatccccctatataaacccctctttgtcctctcgctttaagtcaggatacaccccgggtcgtttaaaaaggagattttctctcaccaacattgcgggccacttttgtcctccccatttaaaaaaatgagaaacccttaacaagc

SEQ ID NO: 494439 - DNA, 139 bp, Homo sapiens
atttcccttcccttcttttaatgatgctttaaaaataagtaatacatccaggctgaacaggcaaaaataaggataaattatagcagaagggacctaagagataaggatgaactttctgattaagaagggtaatgtaaac

SEQ ID NO: 494440 - DNA, 709 bp, Homo sapiens
  misc_feature (52)..(52): n is a, c, g, or t
cattgtacaaagttatgtttatcaaactatgtgatatatttataatacatancttagaaatgtgtgatattgatcctttcggatgggactgttagttatcttggtctctgatggactcacagaaaattaaaaacctgcaaactgaaactcaccgtgaaaatatttgatataggtgtttttggatgcattttaaaaataataagtattctcattatttaaacactattgtaacacttcagcaagatgcagatttaggcctgaaatcaaccactggaatatatgaacaagaactgatttatggatgttactttatagagttttattatacacagtccccaggactatatagccaatcccagtagggcttaatcaggtaccgttaaatactgggctttaggaccataatcctaaactgcagaatgacatttatctaaagtaattaccttgtgactcaaccacatttcactagtatttgctaatctccctagcatatgggatctgggaattaaaaataagcagatcaaataaattacattttatggtatccttagaggatacaatttgactttggaattgaaaatatgtttgattgcgttactttgttaattttttttacaaggaaaaattaaaagaaagaaattcttctatatgaaaatgttactgtatagctttaaaggcagtaagaataaactcgtagccatgaattacc

SEQ ID NO: 494441 - DNA, 918 bp, Homo sapiens
ggcttctcctagatcgcaccgcctcttcctcctggcaagctatataatgatatcgcgtacacattccgttgctctcttccacgaggaggcctagacgccgccgcttgtgctgcgagccatgtctactagtgatccctgaaaagttccagcatatgatgcgagtactcaatacgcaacatcgatggcgcgggtggaacacatatcctttgccatcactgcccattgaagggtgtgggccgaagcatcatgctccatgtggtgttgaggaaacgcgagacattgacctcaccaagagggcgggagcaagtcactgaggagtgacggtggaacaccggtcgtgcatcgaccatgcatgcgagcaatcccacgccaatcccatgatcccagagtgcgttcttgaacggcacacgaaaggcatgtccaaagggatggcagaaaatacccagtctaggtcctacactccgatacgggtcattggcacgaccacacgctccagatgtagatgacctggcagctggacttggagagaacgattccgggcccaatcagagggactgctttcaactatctcggatgcctatcagctgtccgcaggccaggtactaccgaagacctacgtgtccgccgtggcgcgccaccgtgggtgttgtcgcagcgcacggacctaaggtcgcgtaggccttgtcgtgtcactacctagttgagtctccttgcaactggcaggaccccgtcttcgtggggctgtggtgtgacggcttgggcggggactctggggcccaggaaccccggtgtgagaggcagccagagggcgggcctaccccatttcttgtccggcccccagggggggtacacggctgggttgctccctttagaccccccggtcacttcccccaatcgtcccaggccttggcccgcata

SEQ ID NO: 494442 - DNA, 105 bp, Homo sapiens
aaaaaaaagggggccgcttgggtttttgaacttgttgcggggggtgcagtgagtccagatcatgcccctgccctccagcctgaggggcagagtggggctccccca

SEQ ID NO: 494443 - DNA, 183 bp, Homo sapiens
gcggccgcgtcaccggtctcagaatgtttgtgtcaattggccattaagtgagtagtaaggactgttaatgatcacggtgccaaacctctgaagaaaggaaaggtttagggaccactgtggtcacttacccttggttctcggtggaaatcacacttactgccaccagaggcgccttgaaaacaa

SEQ ID NO: 494444 - DNA, 307 bp, Homo sapiens
  misc_feature (136)..(136): n is a, c, g, or t
caaaggggggggggggggggcggggggggggtttttataaaaaaagctgttttttggacccccccattcccccgggaacccccccccccgggttttggcccccaaaaaaaaccccgggggcgttcccccccccggnttttaatttgggcgggggggggggaaaaatttttcccccggaaacccgttggccccttgggcccttttgggggccccataaaaccaggttgggccaaaaaaccggggggggcccgggcgggaattcccggggaacccggggggtaaaaaaaaaaaaggttggcctttttta

SEQ ID NO: 494445 - DNA, 462 bp, Homo sapiens
  misc_feature (60)..(60): n is a, c, g, or t
ccccgccagtggagagggaaaatgtggtgaaccggtggagtctggggatggaaaaggacntggccaaagttcccccgaagccgctgaagtgatgaaccacgaacctggaaccaagggaaggaaaattaaaggaggaggaacccaagcccatctacgcctgccagtggatgatggggatgctagtgccgagtgagacagaggctggactgtgataaatgtaggggtgggatttccagaccctgtttttagggcagaatttctgatttattactggactttgtaataatgaaatgatggaattttggttataagctctgtatttagatgtatgtttatatgattcagatatagacttattaaatttcatatgagatttgattgatgaccatttttaagacattcacttccatagttttcagcacttagtacacatgaattttgagaaacactgttctctaagat

SEQ ID NO: 494446 - DNA, 400 bp, Homo sapiens
cccctccctcttttctctcactcgctaccccccgtatcttacgctctcccttaaggctagtacaggaaagcatggtctggtataggcttcacggaaacttacactcatggcagaaggcgaagagggaggaggaacgtcttacatggccccaatcatgcagatacatatcgaatgctgggaggtgctcttccctctttaaactaccatatctcatgtcacttcctgtttcaaaaacatatatggatatctcctccattcccgcgccacactcccactcctttctttcactctccctttcccctccttcgtccatctccctttttttttcctcttcacctcgtcctcctctcctacctttcacttcaccatttccttcttttactttctttctcttccttct

SEQ ID NO: 494447 - DNA, 396 bp, Homo sapiens
cgaccgaaactctgcgcgggtgtacgaagtttcggcttggcctgtcgccccgatctagagccggtggtagtctttagccgtgtcgttgtcaggcagcccttatgggcaatcacaagatcggaattcgtcgggtcaacgtcgagaaaatcctgctggcggcggagaaggtcttcgccaacaaaggctatggcagcaccgccatggccgacatcgccgaagaagcgcaactgccgcgctccaacctgcattactacttcaccaccaaaagcgagctgtacagcgcggtgctgttcgacctgctggagttgtggaagcaggacgccctgagctttgaaaccttcgacgaccctcgggtggtgctcagcagctacatccgcgccaagatggccgcgcgag

SEQ ID NO: 494448 - DNA, 194 bp, Homo sapiens
cgcttctcccacaggcttgtccccaggcccagcagtgtgagagccagtcttcccaggccaggacagggttcagggaggcagctctgtggtgctgaggcctggccatcctgtgtcacaacctcctccatggccagagtgaggtgaccttgctgggggtgaccatgcctgggcctgtgcttggcaagtctttgaaa

SEQ ID NO: 494449 - DNA, 149 bp, Homo sapiens
tagaggacacgtgcctactgccgtatgtatttcagcactgcctcagatgcaagtgaagaccataacccagtggtcaaaggacagacagaaggaaaaatacctggaactgttgtcttcgggcatggttgataacatgaccaagacttgtg

SEQ ID NO: 494450 - DNA, 264 bp, Homo sapiens
atgacatgctgtgcagcagcggcaggccggtagggtctggctcagtagcggttgcaagcatgatgagcgaggtcatctcgtcttcgctggtggcgtagtagttaccagtgagagcttggaagatttcctggacggtgcccgcttggccaggtaggtaaatgatcccgcctcggcaacggttgaggaggatatcttcgcgcagcgcattcgagaagtacttgatgatgctggtcgcaaagacattgggtggttcgtgaccgtaga

SEQ ID NO: 494451 - DNA, 231 bp, Homo sapiens
ctcccccctggttttggccccccatgggccctaaggttctccccatgttgggctcaataaatgggccacccctttctttacctggccggtaggctcctggcccctaggtttttttaaaaggggaatgcccctggccctccccccctttgacctgctcctgcccccgtccaccccctttccccttttttaaaaataaaatccccctgcctgtggggtgccccggtccaaata

SEQ ID NO: 494452 - DNA, 114 bp, Homo sapiens
cacaacgttgaaaagggaggcaagcacaagatcggccaaatctccataggtgtcttttgggcggaggacaggtcaggccctggatactcttacacagcgcaataagaccaaagg

SEQ ID NO: 494453 - DNA, 547 bp, Homo sapiens
  misc_feature (18)..(18): n is a, c, g, or t
  misc_feature (72)..(72): n is a, c, g, or t
  misc_feature (110)..(110): n is a, c, g, or t
  misc_feature (118)..(118): n is a, c, g, or t
  misc_feature (151)..(151): n is a, c, g, or t
  misc_feature (153)..(153): n is a, c, g, or t
  misc_feature (167)..(167): n is a, c, g, or t
  misc_feature (173)..(174): n is a, c, g, or t
  misc_feature (222)..(222): n is a, c, g, or t
  misc_feature (265)..(265): n is a, c, g, or t
  misc_feature (304)..(304): n is a, c, g, or t
  misc_feature (317)..(317): n is a, c, g, or t
  misc_feature (344)..(344): n is a, c, g, or t
  misc_feature (357)..(357): n is a, c, g, or t
  misc_feature (364)..(364): n is a, c, g, or t
  misc_feature (371)..(371): n is a, c, g, or t
  misc_feature (373)..(373): n is a, c, g, or t
  misc_feature (397)..(397): n is a, c, g, or t
  misc_feature (405)..(405): n is a, c, g, or t
  misc_feature (409)..(410): n is a, c, g, or t
  misc_feature (428)..(428): n is a, c, g, or t
  misc_feature (431)..(432): n is a, c, g, or t
  misc_feature (436)..(436): n is a, c, g, or t
  misc_feature (453)..(453): n is a, c, g, or t
  misc_feature (484)..(484): n is a, c, g, or t
  misc_feature (530)..(530): n is a, c, g, or t
aaaaagatacagtctccncgcccacccacagataggcttgtctgcgctacacgcggataatccctctgtagnaggggagctgttggccttgatccccacggcctagtagntgttgacncgcgctctgtcttcgatgctcgtgtcctggggncngctcgtctatggcntgaganntgcgtcgggtagattggcaggagctccgagtggaggagagatgatctntcatgcgcttgaggtgtttgtcgcctcttggtcgcggtgaggnttgtgtccctagaggttcagatggcggcatgtatctggnagaaaaaggcccnctaggattgtatgagagagaaaggganctctttctcgtgngcaccanacaagcnantaaaacttctacgtggcttgaaanacaatccntgcnntctgtgtgagagaggaanganngctnttattatagtaaaatcntcttgctaggttatctttgtttctcatgttngatgtttggccagctttattctcgttgttcgtaggtctgcttgtangctcgtcatgtgtgaag

SEQ ID NO: 494454 - DNA, 196 bp, Homo sapiens
catgtcggtcccactgatgccagctcactgcacgcactgcacgcccagccggggtgacacaagcgaaactctgtctcaaaaacaaaacaaaacaaaaaaccagaattgagagaccagaatgggaggctttttggactctatatgctgggtagagcggggtatggatgggaataatccttaattcctttctacatag

SEQ ID NO: 494455 - DNA, 136 bp, Homo sapiens
aagatgttattaaagttttataaaaaggccaggtgtgcagtggctcacacttctaatctcagtgctttgggaggccgaggcgggggtattgctcgagcccaggagttcaagaccagtctgggcacacattatggag

SEQ ID NO: 494456 - DNA, 603 bp, Homo sapiens
agcggagcagctggagggcagaggatgcggcagcggggtgtcctgttctcgccatgaagccgcagcagagcgccggtgtccggaaaggtgtttcattcagcgagactacagtcagtggcacacgctgccagttccagaccaagttccctggcggagctggagaaccgtgattgatatggcaatcagtttgaatcaatacagtttcgaactcgtaagactaaccgtttatgcagaagcagagaagctcggcggccagtcatatctcgcaaggtttgtttggggtctggtcgtaacagcatagtaccatcttccgtatgcatggaaactcattatgagaaggttctgaagaaagtctccaatgtacattcaagagcagactgatgaagatctatgctccacaaagggctcctccgtgacagacccatatgtgagcgacggactgcgagttagttgaaacatgtaccattgtatgaaagacaagaggcatgagcagttgggaaggataaaccgacagaaattgctagatcccacattccagccgggccctcatgtatcgacgtggccagactgtagcagtgtccctacctcctctccagagcatca

SEQ ID NO: 494457 - DNA, 392 bp, Homo sapiens
  misc_feature (21)..(21): n is a, c, g, or t
gggcctagcccaaggagggtncccttgcctttccccccggcaagaatttaaagagtgaccccaaggataagaaaaagcaactttgtgtggtgggggggcggggggtagtaagaacaccttaacttgagatcctaccttccttaagagcattttaagcatacaataaagtattatgaactataggcacgatgtggtacagcagatctctggatcttattttatcttgccaaatgggcaggaggaaacttggaggtgatggatgtttattacactgattgtggtaatggttccacagatgtatgcatgtattcaaacccatcaaaatgtatacattaaatatatgcagggtttttattataattatatctcagtaaagctgttaaatattaaaa

SEQ ID NO: 494458 - DNA, 160 bp, Homo sapiens
atacaggaaacagctttaccaggtcacagtatttagcaggcagcagtgtattgtcagaacaaagctatattaccagtgtttcttcattgtcgaaactcacatgctgaagtttattggacataatgacaaagaaatagatatcggtgtgaaggagatatct

SEQ ID NO: 494459 - DNA, 138 bp, Homo sapiens
  misc_feature (45)..(45): n is a, c, g, or t
taagttctaaacagtttcggtttctcaaccgtgccttttcttttngcttaattttttccttatggtttttgtgccactgttctatttctaggctttaaggcttagtcattgcgttcaaaaacttgcgactgcattaaa

SEQ ID NO: 494460 - DNA, 198 bp, Homo sapiens
ttttgcccccgctttatttgtcccccaagggtgggcccccctaggggtactggtagaaatcccttactcagttagaattttcctaaaaataagctttatttatttttttgtgaaaacaaaaagttttgggtcctttactactttttctacagtggccaattgttactcccctaataaaagcccactggtccctgttga

SEQ ID NO: 494461 - DNA, 309 bp, Homo sapiens
gtacgaggtggacaacctcgtgggaggctctactgacggagatgcagctcttccgagggggcccgtaagccagtgtacaattggtgtgcgtgttgggactttacctgcaccttctcctggcagcatggttcaagtggaggtgtctggtcagctcattctcaccaagctctccgtgacctcctcgggcacctaccggtgtgtggccaccacccagatgggccgcgcatccggtgagctgacccgtctcggttaccgaatccctcccgggggcgagtggccggcgctctgattggggtgcctccgtgggcg

SEQ ID NO: 494462 - DNA, 853 bp, Homo sapiens
agtttaaggatgtagctcttttatctaagaattcagatgtcatggcaaaaggcgagatttactgtttaaaaattgaataattttacatgacattcttgaaattctaagaagtccatgtgttagaaccattttcaaaaattcatcagcattcattaaagggcaaacataaatgcattcaatgcataattttggaaggtttaatgtgcagctcagacttcaagtaaactttggttctatttgtgtccattgaatgttctggaaatgacaaaaatatgtaaatggcttcatctaagttgcagtgttttaacagttgcaaagatgtgctctactcaaacagtctatagtcaattctacacctccaccatgcaacatgcagcacagtcattccttgttataccagggctgaatcttgcagatcagccgaggaatctacatgttcactttaggtaacaggggcataggtcccgtcgttaagatgaccagacagtcaaacagctgtcgctgggcaagtctggcctgctcctcattttatagtctcagaacatggcctttaggtctctatccgtatgggcacttcactaagaccgacggtacaccctttgtgaaactataaaaagctgccctgactttccccctcttctcctatttatgtcccttagatattttagggagcctatactaatttccacaccaggcacactttagtcccttagaaggcattatttcatacacttacgatgattaccactggtggtaggcacactctacgtaccgcaggaggaccccattcggcttgacggcgggccgattggtcacaggcagctaggtccaaggtggatacatgcctcaggtg

SEQ ID NO: 494463 - DNA, 1463 bp, Homo sapiens
  misc_feature (226)..(226): n is a, c, g, or t
caaatcccgggggagagaaaacacaccattgggggcgccaccatcttggtgggtgcccgccataactatccccacaggaagagatgcggtccccacgaaatggttccgcacaaaagggggagcctccctcgccaccccccccccggagtgggggtcgcccctcctcttgaagggaagagacccccccacgaagaaataaacttcggtggcgggagaaggagaacgncccccccattcctctggatggattgtgacgcgtttcacacagaaagcggccccccacaccacagagagaggttgttttttttttgtactgtgcttctcctggcgaggaaaccccttttttttggcggagaaatttttttataagggaggatttttgagaagccttctgtatttataaggggcgccccccctctggagtagagtaaatttagtggaaaccctcttcttgtcgtgaaacaacaattttctcgcgaaaaatgttgtctctgagtaagaggatatcttccgccgccaaaaaagtgcgcgccaattttgtccccccaaagccccacacagcgtgtgagagaaacagagaatatgtgattacaccctctggggagattctcacactgcagaatgtgtgtcccccacatctccctctggagagagagccccctctgcgtgtgtgtgccccaccactctgataatcaccgcgccacttttttaattgtggcctctcacagaccgcctctggcgcaaactccccacacaccacggggagaaagagtttgtagaaagtgttgagtttgaggagagagccgctccatctgtggtgaccaccacccacagctctttaataggcgccacagagagagactctgggagactctgagagacactttttgtgtgtgagagaaaaagagtgtttttcgggacaccctctctcagagaatagtgatatacacccccgccccacagagtgtgggtgtggacacttgtcctttttgtgtgtgaaagagagacaccagcagtgtctcaaggtgtacccagagagagagtgtcctttttctcagagcgacactctgtgcgacacacagtgtgatagagagggagactccccgcgggcgcacgacccaaccgcgtgctctctcccagagagacccccctgtggcgcacgaccactgtgttctccagaccacagagagaggtcacacacccacagtatatttgtgccctcttatatgtctgtataagagtgtttatacaccagagaagagagaagaaagagagccaagttctctcttacacttgtgaaaaacatctcttggatccagaaatttgtgggtgtgggagaaaaagaaaagatggggtttatcaagagggtgatttgtgaatatttttgccagccatttaaggctggcgcgctttaataaaggaataaagataataaataaaggaatttttgacacaattccaca

SEQ ID NO: 494464 - DNA, 1238 bp, Homo sapiens
tatagtaaaaacggggtttcactgtgttagccaaaatggtcttgatctcctgacctctagaactggtgaagatacataaattgggtgggtgggttttcaaaaaaaaaaaaaaaaaaaaaaaaaaaaaaaaaaaaaaaaaaaaaaaaaaaaaaaaaaaaaaaaaaaaaaaaaaaaaaaaaaaaaaaaaaaaaaaacaagagaacagaaaaaaaaaccaacaacacagagcgaagaaagaaaagaacagagaaacaccgagagacagacagagaaagagagacaggagaagacgagcgggccacaacaagacagacgacagacaaagggagaaggccgagaaagagacaaaagcggacaaacgaggagaagcagaacagaagaaaggaagcgacaaggcaagagccggcgggagaacgaccacaagaaggagagagaaaagaggcccgagccggaagacaaacgacacaggaaagagcacaggagagagggaccgacaacaagaagaagaagaagaggaaagacaacgagcggagcggcaaagaagaaacagggacgggtgagagaggagaacgaccaacaaacagaagagcgagagagagcagagaatagaaaaaagaaacggagcgcgagagaagaaaacagaaagacgacgacagaaacaaccacaaaaaaaaaacagaaacaagacgaagaaagccaagtacaagaagagagaaaggagaaaccacgaagaaagacaaagaaagaaagacaaaaaagaaagaagacgaggacaagcagaaaaaacaaaaaaaaagagccacaaaacaggacaaaagaacaggaggcaaagagagaaaaaagcacgcaaagagaacggaaaggaaaaaaagaacaaaaaacaagcaaaagagcacaaagacaaacacaacacagaaaaagagaaaaaagagcacaaacaggaaccagacagaaccacggaccgagagaccagccgcacacggacggccgacgaaggaccagagaacgaagagaggcctagccagaaaagacagaccaacaaagcgacggacaacacgacccgcgacgacacgggaccaagaagaaaccggcacaacgaacaacaagcacgaagacagaacacaagacccacgacagcaccaaaacaaacaaaaactcacggaaacaagaaagaaagaaaaaaaaaacgaaagaaaacgaaagcagacgacgacaacgacacgcacaaccaaagacgc

SEQ ID NO: 494465 - DNA, 335 bp, Homo sapiens
ggagagagagagatatcagagagagacataagtgggcacacagacacacacagacacacacacacacaccccaaacgcagacacacatacagcaggtaacacccagccccaggcagcccgtgaagctgctgggttctgctctacgcgactacgacccaccggtgagagagcagcccacgggcacacgggcagacctgtcctggacatcacaagggcaccacttttggggagactcacgggcacaccgtgcgcgcacacctgaggctgggatcctgcgctgcctccccggcgatccgtctgaggtttcttcctactgaggcttctcctcgctcgat

SEQ ID NO: 494466 - DNA, 808 bp, Homo sapiens
gatttgccgcccattttgtccgtgtctgttatacttgatcggggttgcaccgcgcttgttgtttcagaatttttgctccgggttccttgagattcgagtaatcttaggaggattttctagtgccacacaccgaattcattggatttattggggggggtacattgaatctgtactcacttttgatagtacggtcatctgaacctattaggtctttccaaccaagtgccgccagatgtcttccagtttttgccttcttaatttctttgccagccagaagtttgtaggtgttccagataccagacttttgcctctttggttgtttattcctgagtattttctttatgatgctactgtacatagagactgtttccctaatttcccttggagattgttcaaccatggtgggttgttttttttttgaaacttttagaaataccttgtaattccattctataaatattagtcattccaaatctggcccccatcttaggaataccaaagtaaatccccgttctttttttcctaaaatgtcaccatgtaatagatctaaccttgcatatatttctgatgtgatgaaatgttgatatatattttctatcgtgccaactacagctctgaaaatttttccaagatagtacatgtattatgttttctataatacttacaccatcattattgttttaccttttatatctcatattctattttaattatggaatggtattattacatatccctgattaaaatattaaaatgtgctatgggaaaattaagaaaagacatattaaataaaccttgttatgtagta

SEQ ID NO: 494467 - DNA, 202 bp, Homo sapiens
tgcttccagtggctggtgcagtcccagcaggatctgctgttgggggctcctggccgtggtcactggtgggcatgtgatgccacatccctctgtcctggcctggctctgcaccactggttttggcttccatctttgttgtgttcaccttggcccatgctgccccttcgccatcttgcagaaacatgcactgtagtggaacggg

SEQ ID NO: 494468 - DNA, 219 bp, Homo sapiens
ctcatgctgctaatccagcactgtggaggcgagggggtggatcacgaggtcaggagatcgagaccatcctggcccacacggtgaacacccgtctctactacctataaaaacaaaattagccaggcatggttgggacctacctgtagtcccagctactatggaggctgaggtgggagtactagcttgagcccaggagtttttttctgccaggaaaccacg

SEQ ID NO: 494469 - DNA, 870 bp, Homo sapiens
gagaagatattaaattttacatgtgacagtgaaatgctatgtggtttataagattacagaccatttgttttcatgtggataattttagtgcatgctcacccggtatgtttttttttttaactgtgaacatttggcttgtctggttttcctttttttaattagataatcacacggaaaattaagcctgttcatatctttaacattcaggatggcaaaccaaggaaagaacgcattgagagattttaagatgtcccttataaggggagaagtgttcttaaaaagtcaaccagaaaactgtcatgcctttattggtcggcaaggatgtcttggtaatgtgtttcatgaatagaatatccaatagagataagctgacttgaatcatttcggagcaatttggccctgtgtaatatgtgtttcacgcacatatttgcacgtgggatttctccaacagaacaggggattcactacgtgccactttaacaagcaccaataggtattattcaaactccgagcatggggtcagaggaacatcacctcaatgttcaataatccttaaaagatatgggcttcatatactgtaatcattaaagggaaccaaggccgtcgggcgactacagcgtctttcgaatcacagaattatgccaccacatccgatgccaggtccctaattggtcaaaggaaggggatcaaggcacaaggggggcccgagactttaaaggtatcccgggatgagggccagcagggacgcggagccacaagaagagggcgaagaggccgcatagctcgccaggtggggcaaaaaaacggaaatggtaactccaggtgaacaaaacaccctgggcgaaccgagggggcagaacaagagggaaa

SEQ ID NO: 494470 - DNA, 105 bp, Homo sapiens
ggatgtaaaggacgtgtgacactccacacacagtggactgagcagaggcggcgtgggaccagaccctcccacatgccagcctggccaaggtggcacagaccagag

SEQ ID NO: 494471 - DNA, 653 bp, Homo sapiens
gactagttctagatcgcgagcgtcgcccttttttttttttgtttggtggtttaaaagcaaggcatgctggtggatgactctgtaacagactaatgggaatggttgaagctgctcccgtggttccactcgggagagtaatctgggacatcttagtgtttggtttggttttttcccctcctctttttttggggggggagtgtgtggtggggttggtttttaagtctggtattttaaattcattaaccagtggttagcccttagggggaggaggacggattgattccacattccacttcctagatctagtttagaaaacttgttccccatcgggggctcttaggagggagtatagtaaagggcctcatttaataacatactccttttggaaagtggccttttctctccacccttgagtagatccagtattggatgaacactctatgaaagtgggtggagcccatctggcccctcctcttttctaggacgccctatttgtgactggtgactttcagggactttggttggccattggcggattttgggggaggtaatttctaacttctttcacggataacatggaagaaaagttatggccccttggaaatggccccaaatgattgcaggttggtaattaaaaaaattttttccctttc

SEQ ID NO: 494472 - DNA, 352 bp, Homo sapiens
tgcgggagcaaggggcttgatcagggatcaggggagcttgacctcgggggctcacgtgatcctcgggggtcagcctcccaggtagcgggaaccataggcacacaccatcataccgggctaacctttggatctcgggaaaagacagggtctcacttggtggcacggggcgggtctgagaacctcgtggactcaagcagtcctccggcctggacctcttaaagtctttgaataacaggtgtagagccagggtgctgggcttcaattattcagtgtctgtaggatttggtatctggcaatttcactagaatttattttctttatttttttatttattttaggaatagagtctggc

SEQ ID NO: 494473 - DNA, 657 bp, Homo sapiens
  misc_feature (8)..(8): n is a, c, g, or t
  misc_feature (11)..(11): n is a, c, g, or t
  misc_feature (50)..(50): n is a, c, g, or t
  misc_feature (58)..(58): n is a, c, g, or t
  misc_feature (60)..(60): n is a, c, g, or t
  misc_feature (75)..(75): n is a, c, g, or t
  misc_feature (94)..(94): n is a, c, g, or t
  misc_feature (148)..(148): n is a, c, g, or t
  misc_feature (168)..(168): n is a, c, g, or t
  misc_feature (175)..(175): n is a, c, g, or t
  misc_feature (180)..(180): n is a, c, g, or t
  misc_feature (187)..(187): n is a, c, g, or t
  misc_feature (198)..(198): n is a, c, g, or t
  misc_feature (210)..(210): n is a, c, g, or t
  misc_feature (236)..(236): n is a, c, g, or t
  misc_feature (245)..(245): n is a, c, g, or t
  misc_feature (247)..(247): n is a, c, g, or t
  misc_feature (252)..(252): n is a, c, g, or t
  misc_feature (259)..(259): n is a, c, g, or t
  misc_feature (295)..(295): n is a, c, g, or t
  misc_feature (303)..(304): n is a, c, g, or t
  misc_feature (311)..(311): n is a, c, g, or t
  misc_feature (313)..(313): n is a, c, g, or t
  misc_feature (321)..(321): n is a, c, g, or t
  misc_feature (331)..(331): n is a, c, g, or t
  misc_feature (344)..(344): n is a, c, g, or t
  misc_feature (392)..(392): n is a, c, g, or t
  misc_feature (397)..(397): n is a, c, g, or t
  misc_feature (427)..(427): n is a, c, g, or t
  misc_feature (436)..(436): n is a, c, g, or t
  misc_feature (438)..(438): n is a, c, g, or t
  misc_feature (463)..(463): n is a, c, g, or t
  misc_feature (466)..(466): n is a, c, g, or t
  misc_feature (515)..(515): n is a, c, g, or t
  misc_feature (524)..(524): n is a, c, g, or t
  misc_feature (534)..(534): n is a, c, g, or t
  misc_feature (575)..(575): n is a, c, g, or t
  misc_feature (593)..(593): n is a, c, g, or t
  misc_feature (622)..(622): n is a, c, g, or t
cggcatcnacntatcctttggtccccccccagaggagacaggtttcctcngcttgccncngaggatgtggcatcngccgcccccaccccccccnccccccgtgaaccgcgggagttgggacagcggccagggctagatgggtgggacnccagtcctccgcccaaagcntgccccngtgcngggcgcnccttggaggcnagccccgggccntggccgagttttgcagcccaaggtcntggcaggcncnttgcngtgggcngcccgagagcaggccggagttccagacccccccccngagcagcnngccagantnccaggccnagtgacatcngtttgagcagatnaatatgccattgggaaaatcaaagactgtcggagaggaggacatggcngaccntaactaaagtgagggggaaagtagagcacnaaaagttcnangaaaggagatgaactccttattccntcngatgaaaatatagtcagaacagatgagtagtagaacttaaacatgcccngagttgccnggaatttgcnaaagccctgatataattcccgttgctgtagaaagactttcnacagtcactaatatatcnagttatgttccctagaaaaaaagtttacntagtttatagaaatgggctgaaaaatcccaattac

SEQ ID NO: 494474 - DNA, 1281 bp, Homo sapiens
gctctgtggtggcggcggctgtgagcggctggcactgctgtgcgcatgcggcggaggccagctggtgcgcctgtcggcgtgctggccctgtcggccgcgggatgagtgaagctggaccgagcccgtctgccttggagcatgagcgctgcgccgccgcgggctcgatactcctccggctcggcacgccgcgggtgctggacgccgactgccgcctgaaggcagaacctacgcctgaccgggcccggcggcggcatgagcccgcgcattgcagcagcgcgacgcgggaatgacagcgggcgctgggcaggcgaacgggcgtgtggttgcgcctgaggcacgatacttttcactgaagtaagggggttgtacattgccattaccagtatctcaatcacagctatgtcctggaaatacaggccaaactgaatatgcgttgaatttcgtaaggagtatcccctatttcattgatttgacagagaacgcacaaggatcaagggtttgaaatcacacgttgtaagtactaccttgcagccaggaggcagacgtgaccagtgggaggtctggcagagccgagcacgtgaaagtcctgggtggacagaaacggccccaaggggcacaagacccaggactgttgggtaatgacggaatgcgctatggcattcacatggcgcaggcagcttattatttctgtaaccttgcattggggaccgggcagggtaagcagaaggagggagaacaacaggagtagggagcatataacaaaggggtgactggagttacccacttgagattaaccaatgaggtgtggacaacaacatttgggaacttaaccaagcagagatcagggggatgaaacataccaaatgggtgacagcggaccaatacgtatagaaacgtggggccaatgaagcactaaatgtaacgtgcgagatcacacggagtataatgtagattggggaaattccacgagacagacggaacgcgatgtggtggacagaaaaccccgacggggtgattacgaaattgagtatgaggccacaaagatgcttgcgtggaggcgcacatggggcagggattggcacagcaaccaacaatatcattgacttgatgaggagtaccatacatgatggtaagaccgaacgagagacgagccatacagggaactgcgcagtgtaatcacgtcggcgagactttacctaaatcacactacaactattccgggtgtaaagagagggaaacgagacacgtacagataataacggagggcaaaaaaaggcagaa

SEQ ID NO: 494475 - DNA, 890 bp, Homo sapiens
ggctgtgccccgccggcttctacggcttgggctgtcgccgccggtgtggccagtgcaagggccagagccgtgcacggtggccgagggcctggtgcttgatgtgcgagcccggctggatacggaaccaagtgcgaccagccttgcgccaccggtttctatggcgagggctgcagccaccgctgtccgccatgccgcgacgggcatgccgtgtaaccactgatcaccgtggcaagtgtactgcgcgtgcaacaggcgggctggatcgtgcgaccgtgtgcgagaccaagttgtagcaatggcactttacggcgaggactgcgccttcgtgtgcgccgaactgctggcagcggacactgcgacttccagtcggggcgctgcctgtgcagccctggcgtccaccggtgccccactgtaaacgtgacgtgcccctgcccggactccagcggctggcggactgtgctcaggcctgccagctgccactgaggacactgtgcgacccggtcactggtgcctgccactctagaaagccaagcagcgcagagggctgtgatgggctgcggggctgcggctgctcgtcctgctcgtctgctgctgctctcgctgctcggctgctgttgcggcttgccgtcggcaaggacccgttacgcgccgtggagctttccgctttgggaggaaagaaggcgccgaaccggaatatgcgtggcgcttcagtcgcatcagcattgaagctgcccggattccggctccggagggagaaactacccaaagtcgtagtggacacgacgatcttggtaacacaatcaatgcagttctggaccacctcagggttgggcagcctcaccaactgtctctcggggctcctttctcgttgaaacacttttagggctgtt

SEQ ID NO: 494476 - DNA, 1192 bp, Homo sapiens
gcccgccggacatcaggcggctcccggggtcatcagacattatgccgggcatgatgccactgatccctttgtggccttccacatcaacaaggggccttgtgaagaagtatatgaactctctcctgattggagacctgtctcaaagaacagggccagtctttgagcccaccacggaataacgagtctgactagatgagttccgtggagtctgcgggccacagggtgagcggattgggagctcattgaagtgccaagacatgtctacttcctgctgtaccttgtctgcacatcttgctgctggatggtgctagcctggctcatccttgggggtctttggagacgttcttttatggccttcctcctcgtgtgtcggtgctgctcaggtgcagttcaggcccaggcgtggctggttgcagcatgctttggggcacctgtcggtcttcagcacctgcacagtgggacaccatgcttgctacagtcattaatgtgattgggacatactgacaggggggaccccctgtcaagattggtcggaaccgcacgagtgcacttgtccaggcagcagtgccaaggcccaacctggcttccagaaagacccagacatgcaatgatgcatacccttcttctttgcgctttgggggaaggatccatactcgtgtgcgagctttgggaagacaagaagtgatcaagactatattgccgaacaatctacatgcaccagaatactttcttcctgaatttggcccccgagtcttgggtgacttctctaactttccaagctgcgtatatttccacatggtcatctcagcagacactgaagtgcggttgtacttggagcctgcgatgacgtaacctttctacggtcgggtttcttcctacactttttgtgcccactaatctggggctgaaaagacattccgggacctgtactacgataaggtcagggttccctgaaaacgcaactgggtgtgagcagtgggctgatcaccatacttgaacctatatttcccccatgcatcattgcgaccatgaccgggaaccccggtcactgcggttccaccacagtgccaggggcccaatgtaaaggtgctcccaaatcgtgtgctttaaaagactgggcacacgtggtacacaccgctggatttcgaatgtgagccacattgtttgtccacaagttctcaacaatatcaca

SEQ ID NO: 494477 - DNA, 881 bp, Homo sapiens
ggctggctgagaggaagtgctaaggctatggacactctgctgctgggatcacctgagatgagtcatgctaggtgtctcaggtctgagcagtggtcctggtggcctgtggtctacaggcctggtgtctgctcctccccctgcccccatgtctggagttgagctgtcggggacccaggtgtcctggtgtcgcggatggaggagccaaagctgttccagggaaccgtgatgtctgggcctagggcatgagacctgagtcctggtcgccagtggcagacatggcactagaatatagtggccacctacatcgtttgccaagtacccctgtgatgtgtgccgtcttcggggccggcacgatgtgatctcactgacgaattgtggctaccctgccagtacccagactctgtttgtctacctgtcgctagaagacagctgacttatgagaaatcttcgtctttgacacttggtaagtctcctaggccagatcagacggtttacccacccgctacctcactctcctacaggaagaagacagtcctaggagctgatagccagaggaggagtccatccacagggccctggcatgcccacaggatcccctaggggctggccgctgtgttgtccacgggggtgagttctggagccagtaccggattaatgtgacgtgaggtgaacccactgggtgccagcacactgcctgctggatgtgagcttgagaagcatcttggcctgacccacccaggctgctggtagagtcacgtaccaggttacccccgacgctggagcaggtggacttacctgctcctgggcgtgcagccattctggtcaattccgttggagacgcgggcaatccagcctgttccgggacatggctggggggggtc

SEQ ID NO: 494478 - DNA, 328 bp, Homo sapiens
gtgactctagcggatccagtgtcatgtataccttactgatacacgaacacgtgacacgtggatgctgtatttaagtggtgtatgttattttcttgagtaaccaatggctgaaaaattaatggttcaaccaggttagatccttggtccgtgtggaatccccaatggtttttccttcttggttggtggaggcctggtggatgttcctggggaaggtcctggttcctttatattaagggtggtgggcgttgctttctcccttctgcttttatcttttccacagttgaggctgggtatgtactttcaaagaaatggccatgaatatgtgtaa

SEQ ID NO: 494479 - DNA, 454 bp, Homo sapiens
gcgtcgactataaacagaagatctttcctcttctcgtttacagtaaaggctcttggtatctttctgttggaatgatttctatgaacttgtcttattttaatggtgggttttttttctgggtagatttaggcctaaatcggcatcatgccaaacttgtgactttgaagctaatcctccaagattgaggttttgttggccttgacttacctggagtaaaggccttaattcccttccttgggctatggttggaggttaattttaaagagggtccggttttccttgaaccgggaaaaggctatggccttggcccggtctcttacatatcgcttgggggaataaataggcggtggtggtatctgaaaaaaagaacaaaaaaatttttccgccctacaggtggtcgttagtatatgtcgcggcggcgccattttgaggagtagtaggccaccgggttctt

SEQ ID NO: 494480 - DNA, 539 bp, Homo sapiens
  misc_feature (141)..(141): n is a, c, g, or t
  misc_feature (251)..(251): n is a, c, g, or t
attggtatgtgagtccagtatggtgctctgtggaggaggctggttcaggcgcgttcattgaccatgccaccacaacgacggatcctcggagtggagcaatcgatccacccttgctgtgagtctcctatctcaaaatgtacnacgcgatctatagtgagcacgaggctcccctaagggcctgggccgctccttgggcgcactaattccgatcattccatgaagtaccaagtcctaacgtttgaacatacacnctacgccctgtatcgatggagccctatagggcctgcagcccatggaggacttgtgtatgtgttctctgtgtgatggaggagggaaaatatctagactcgtaaacacatagattattcttaaccgatacgtgctttatagactcggtatgctttgcaccgtcctgtgacttcaatcgcgcttgagtcgtggatgtagcgacggtgtacccacaggcgctcaaggcgggcatcgtttgggctgactatgtgtgtgacacagtcgcgtgaacgttttcgcctcggggtgca

SEQ ID NO: 494481 - DNA, 243 bp, Homo sapiens
gatcagctccgtcggcgagtggatcatgccgtccatgaagtccacgtcgcgctccgcacagtgcctccggatcgcggcgagatactccgcgagggtggagtagcgctcgtacctcacgtgcacgaacgacctcgcgggcaccagcttgaacttcacgcgtgtgagcacgcccagggtgccgaacgagccatgcatcatgtggaagaggagcgactcgtcgttgtcgggtgttgcccgccgcac

SEQ ID NO: 494482 - DNA, 179 bp, Homo sapiens
atggagaccccaggctgagcaggctgaggcaggagaatccttaatcccagaggtggaagtgcagtgagccaagatcatgccactgcactccaccctgggcaacagagtgagactccgtctcaaaaaacaaaaaaagaacaggccaagataggagggagagaaagctgctgacgcccccc

SEQ ID NO: 494483 - DNA, 489 bp, Homo sapiens
gattttgaatctgacaggttctcagctgcttttattaaataacggattttcttaataattactgtactcaaacttagcaaaaagctctatttatagcccagttttttagtcacacactattgtgtcttgtcaaattgaaaccatatactacattctttacttattaagatggtctttctttgtaataattttggagtaaatagtttacttatctaaacctctgatttctgatttaacagatttttgaagcatttattttccttaccatacataaaaattgtcagttgaggacaaggaaggattaacctggactacggtgaataattgttcaggttgcttactgtgtaactccagaggagcattcacatggtacaatttgcagatttaagtatttattacaaccattttctggcagataacagtggaacaccctgttctgttaaaattagtttattatgacaaattgcctacagatggacattaaactgt

SEQ ID NO: 494484 - DNA, 181 bp, Homo sapiens
cgctctcgcgctctcccctccctcgctcgttttctctctctctcgcccttgccctctcgctctctccctcgctcgttttctctctctctctctctctctctctgtctctcgctctcgccctctctctctctctgtctctctctctctctctctctctctctctcccttctgtcgtcttctc

SEQ ID NO: 494485 - DNA, 783 bp, Homo sapiens
acggcaggttctcggcccgaaagaagctgacaaagcgcctgagtgaccggctaacatcgtgagggcggggaataaggcagcgtgttgtgctgtgtatggacgtgggctttaccatgagtaactccattcctggtatagtaatccccatttgaacaagcaaagaaggtgataaccatgtatgtacagcgacagagtgatcgctgagaacaaggatgaggattgcttattaggtcctgtctggtacaagatggcacatgaccaattcccctttctggtggggatcagtatcagaacatcacagtgcacatgagatctgatgctaccagattttgacttagtctggaggacattagaaagcgaaatccaatccagtgttctcaacaggctgacttcctggctgcactaatcgtgagcatggatgtgattcaactatgaaacaataggagacgaagttcgagaagaggcatatatgaaatatacactgacctcaagcagccgattccagacacaaagtcagcgtgagatataactaagttcatcgcgtgaagaaatgtgacatctccctgccaagtccttctctgcctgttctccacctttggaaaggcatgactgccaggtgcggacagagggtacaccggccctgtcagcttaggtggtcattgccctttcgttcccagtaaaaggaataccgaaaatcagagaagtctggcattatgaagaggggatgaactttaaaggcgaaatgtggccaaaatatacaggaactcaaaagggcttaaattt

SEQ ID NO: 494486 - DNA, 270 bp, Homo sapiens
ggctgttcctcgaggattccattccagcagggtgaacggaaacaaatacaaacccgaacgtgttccgtcgcaggatgggcgccgcctgtcccgggccttagcccgacatctcttctcgctgctccttgtccctgcgcacctcggccgtgtgcagctccttctcgcgcagccgctcgcgcagtggggccaggtgtgcctcgggaatctccttgctgagctccaatcttgtagttgaggcttctcctctgtgctgaaaaatagcttgacggg

SEQ ID NO: 494487 - DNA, 405 bp, Homo sapiens
  misc_feature (7)..(7): n is a, c, g, or t
  misc_feature (24)..(24): n is a, c, g, or t
aacccgnccagtttgtttttttcntaacagtcagggtcttggctctgttaccccggctggagagtagtgatgtggatcatagctcactgcatcctcaaactccctgggcttaagcagtcttccctggcttagcctcccgagtagctaggactataggcacataccaccacacctggctaatttttaagttttttcatagagatagatcttgctttgttgaccagcttggccaacatggagaaacccccccatctactaaaaatacaaaaatttgctgggcgcggtggcacatgcctataatcccagctgccctggagactgaggcacgagaattgcttgaaccttgaactgggaggtggagtttgcagtgagctgacatcatgccactgcactccagcctgggta

SEQ ID NO: 494488 - DNA, 1618 bp, Homo sapiens
  misc_feature (1618)..(1618): n is a, c, g, or t
ggggtttgccgccagaatcacaggtgtcgtgaaaactacccctaaaagccagaatgggaagaggtacacagactcatatccaggacattggtcgctcagtaggcacacgtaggattcgcggcgaaggtccactgcattactggtccatctggatctagtaaagtgcggtggcagtcggacaaatagacaccattgaaacacatttgagaaggcaggctgctgatgactggagaaacgggcgtccgttcaatgtactgcactgggatctgtggagtaacatcgtgaacatgctgaagtcgttgaatcgctgggtgtcagccagttggactactcgtgccttgttggagaactttgacggagccagggcacaagttaactcagtggtgcacctgacttcgagttgggaattgtgcctccgaaggacgagcgagcaggcagctgtatagtcgagaaaagagcgattgtacttgagcgaaggggataccagttcgtcacgagcatggagctggttgacctggatccgtgggaattgttgttgacatgggctggcctgttggccgtgacattgtctgagatggcctggtagtcgtccagaagtaaactggtgcaggagcccagaaggaggcctttgcccatatcatggcgttaagcagcacctggggggtgatgcacagaggcaagcataaagttggacagcggtggtttggaaaccagaagacttgtggaatttccccagctttggaaggcccaacgcccctaacaaggacccgtggcaatccaggacttattgcatgggatagagtgggtttcaaccggggaacggtccaggagcaaacttctaccactttcaaacgaacacaagtttggggctttaactaacgcccccccagaaaccaaccaagtgtcatagcaagttttccggttgacccaaaagtatttcctggggattcgtcgccagcactaggggtgacacgaaaccacatggccatagagcacggccgagagtggtggcctaaacccagtgggccctttggagggtttccaaggcgtgcacttgggaaacacaagcggtccacaacgccggtattacgcggatctttggcgccacaattggcccacgtttgggacaaccccatcggcccttggaccttttaccgaggctatccactgagacattggcatgtttcctaaatcaagcccaaaactaacgcccggaccgttgatgagaaagccccagtgtggaccctggccagtcaatacaggggactgttctttacgaacacctttgcgggagcaaattgggtcaccggcacccaggtttagggccccaatataggaagcacaggcggtggtctactacaaacccacggcataaggggagggagcaccacttgtgcgcacaaagcaaaggaataagtccggagaagagcaacactgtgcctgaaagagcccacacagatagcctagtactgaaaacatctactgggcaacaaagtcggcagtcgaccacataaacttgggaacacagagctactcaggctgttgtggtagctccacaataccacacaaagtaggacacaagtgagcagtagaacacaagacgcaagcagaatcgatn

SEQ ID NO: 494489 - DNA, 467 bp, Homo sapiens
  misc_feature (467)..(467): n is a, c, g, or t
gtcccctgtgggtgctcctgaggctctggacctcagaggcctccagaaagacagtgggcctctgcctgacgccccctgtgaggtctcactgctggggtgagccccccaatggactacctgtgattcccctgaatcccatacctgaacctacacatgcctgctccctgtgcatgcaacctgtgctggtgtaatgtgagtgccctgtgggtgcttggtgtgatgtgctgcctgtgtgagaaatgcctgcctgcccgatgctagatgtgtgcccacgccaatagcatcaatcgcccgccgatggacgcgcaatgtaaagtgattgggaaagacaagagacgagagagaaagaagcacaataaccacgagacaccaaaagatcgccaagccaaatggatcaaggagcacacccattcataaaaaaaaggccaacgggaagatagaacacaaaccgaaaagcaagacgaaan

SEQ ID NO: 494490 - DNA, 369 bp, Homo sapiens
cgcgactggccttgcgggagagttggggcctgctcctgaagagataccgctatgtcgatcgacatcgaatcttcggatgtgatccgccttattatgcagtacttgaacgagaacagattacatcgagcgttagtcaccttgcaagaggagactactgagactgtgaatactgtcgacagcatcgagagttgtgcggctgacattaacagtgctcattgggatactgtgttgcacgctatacagtctctgagaattgccagacccctcattgacctctatgaacaggttgctctggaattgatagagctccgtgtagtgtgctgccaggtcacttatgagacagactgatcccatgatcatgttttactt

SEQ ID NO: 494491 - DNA, 1217 bp, Homo sapiens
  misc_feature (91)..(91): n is a, c, g, or t
  misc_feature (105)..(105): n is a, c, g, or t
  misc_feature (118)..(118): n is a, c, g, or t
  misc_feature (126)..(126): n is a, c, g, or t
  misc_feature (545)..(545): n is a, c, g, or t
ccacccacaccctcggaaaaggacaggtggcccagaggcatccgtgtgttcaagaaccgcagaacatgaatgtgacaccatcccaaccagnactgttcaggtgtncttgttctcttgntctcactnactgactaccagcttctcgaggggagggccccgtctgagacacagagcttcacacgttccttctgctttatttcctctccctagtgaaacattaaacacaggaggaaaagatacagatgtagccatcagaaggaagtgaggctgtcattccaaatggccccccaccatgaagaaacccaggcttcttaaatcaggaacctcacgtctcagttttccctcaggtttctttctgtggtgtgaggacagaaacaggcgtccctgcattcctcagcaatcctctccttcctctaaaggcacgggagaggatttccgagcgcctgcgatgctgtggggaaccgcaggctgggcaccgtcaccaacgcgtcacaacagagcaaatctgcatagccttccccaactaccaccgaaaggatggctcnggctcagcttggtgaacgctcattaaacaaaaagcacactcgagtttcctagcttcattccagaactgctattgtggcacaacaaattcacaacaaattcacatcggagtcccctcgaccgggagctgcgggcccgggaatgcacagcacaggcagaagcattcgtggttcgtcagctcctggcagacgggactcacttcacggacacacagacccacgatcttcatgctattagggtaatttcatcttcacagtaaaaaatcaccaattcccagagaaacggagcatcagcccagctgtcgcacagggtctcgcgggtgctggtcacgggacctgcggccactccaagctaatgaagagccgtttactccggaggtgagtccccgagggaggactgaagtccaagctaaaaaggcggcgccagcgaagcggaggccgcttcctccagggaagagcccccagccctcccgggcccatccgaggcgccccacgcgggagcgcacggtggccggaggcggcgcggagccgagtgtgaggagggcagccgccgccacggcagtggccccacgcgcgcctcggtggcaggtgctccagcgggcggggcacgcggagcccgggctgtaccggacagtcctggaaaaccacaggaaagctacgcgagggtggcggccg

SEQ ID NO: 494492 - DNA, 823 bp, Homo sapiens
ggggtgttcctctctccccacacccggagtttcccgggcctgccattgtggacccgccccctatgctttacaccttagtctctttgcccacagacctcctcattccctcccaaaacatcctctcaagagaagggaggagaagtttcaagaaagtcaggaggggtgggtttggaccctgggcagggtggaggcagtgaccttgcccttggtccctctagccttcttccctgtgcaaaagagaatgaccctggagaggcattcttgtaggagaagaatctagcggccgtgggagaattggggccggagccggcggtgggcagagtccgctgctatacacacatggaggaattctcacgcccaagccccgactctctacgaccttggaggactcctgtgacttcactgctctgcgctctggagaacactggagagagtcctaccgacgttcaaactagagcaggtaaagagccagagtaacatgacctgccaccagtgcccgttgcccactgccctctgccctggtagcccccaggggattccttggcccatccgcatcatctctgcaagaccggatgtgtgtggacccctccatagagtgccccaacaaccaggaccaagatggggctcccaaaggaggtaaaggagaaccctttggcagagtgcttaaggacacctgactacctagaaaagttagacgcaggcagacgttgatcccaaggtcgaacgctcctcagaagcaaggtgggtcctgacagcagtggaattctcccagcaggcatgcaggacacgagggtgttgttaacacacaaagggagtgggaccg

SEQ ID NO: 494493 - DNA, 1135 bp, Homo sapiens
  misc_feature (91)..(91): n is a, c, g, or t
  misc_feature (105)..(105): n is a, c, g, or t
  misc_feature (118)..(118): n is a, c, g, or t
  misc_feature (126)..(126): n is a, c, g, or t
  misc_feature (545)..(545): n is a, c, g, or t
ccacccacaccctcggaaaaggacaggtggcccagaggcatccgtgtgttcaagaaccgcagaacatgaatgtgacaccatcccaaccagnactgttcaggtgtncttgttctcttgntctcactnactgactaccagcttctcgaggggagggccccgtctgagacacagagcttcacacgttccttctgctttatttcctctccctagtgaaacattaaacacaggaggaaaagatacagatgtagccatcagaaggaagtgaggctgtcattccaaatggccccccaccatgaagaaacccaggcttcttaaatcaggaacctcacgtctcagttttccctcaggtttctttctgtggtgtgaggacagaaacaggcgtccctgcattcctcagcaatcctctccttcctctaaaggcacgggagaggatttccgagcgcctgcgatgctgtggggaaccgcaggctgggcaccgtcaccaacgcgtcacaacagagcaaatctgcatagccttccccaactaccaccgaaaggatggctcnggctcagcttggtgaacgctcattaaacaaaaagcacactcgagtttcctagcttcattccagaactgctattgtggcacaacaaattcacaacaaattcacatcggagtcccctcgaccggacacacagacccacgatcttcatgctattagggtaatttcatcttcacagtaaaaaatcaccaattcccagagaaacggagcatcagcccagctgtcgcacagggtctcgcgggtgctggtcacgggacctgcggccactccaagctaatgaagagccgtttactccggaggtgagtccccgagggaggactgaagtccaagctaaaaaggcggcgccagcgaagcggaggccgcttcctccagggaagagcccccagccctcccgggcccatccgaggcgccccacgcgggagcgcacggtggccggaggcggcgcggagccgagtgtgaggagggcagccgccgccacggcagtggccccacgcgcgcctcggtggcaggtgctccagcgggcggggcacgcggagcccgggctgtaccggacagtcctggaaaaccacaggaaagctacgcgagggtggcggccg

SEQ ID NO: 494494 - DNA, 627 bp, Homo sapiens
gcactcgtacccacaccacctgagtcatacaaaaattaaaaatctctaaacagacctataactagtaaggaggttcaatcagtaatcaaaaacatcccaacaaagaaaagcccagaaccagatggcttcactggtgaattctatcaaacaattttgaaagaattaaaactaatccttctcaaactcttccaaaaaaactgaagagagaatgcttccaaactcattctatgaggccactattaccctgataccaaaaccaaagatactaaaaaaaaaaaaaaaaaagctacagactgatattactaatgaatattgatgcaaaaatactcaacaaactactagcaaaccaaattcaacagcatattaaaaggattaaacaccatgaccaagtggaatttaatcctgtaatgcaaggatgttttaacatataacaatcaatcagtgtaacacatcacattaacagaatgaaggacaaaaactacagtcatctgaatgcagaaaaagcatttgacaaaatttaacaaactttcatgataaaaatactcaacaaaacaggaatgaaaggaaattacctccacatataaagtccatgtatgaaaaacccacagctaacctttcactcaaaat

SEQ ID NO: 494495 - DNA, 1220 bp, Homo sapiens
  misc_feature (91)..(91): n is a, c, g, or t
  misc_feature (105)..(105): n is a, c, g, or t
  misc_feature (118)..(118): n is a, c, g, or t
  misc_feature (126)..(126): n is a, c, g, or t
  misc_feature (545)..(545): n is a, c, g, or t
ccacccacaccctcggaaaaggacaggtggcccagaggcatccgtgtgttcaagaaccgcagaacatgaatgtgacaccatcccaaccagnactgttcaggtgtncttgttctcttgntctcactnactgactaccagcttctcgaggggagggccccgtctgagacacagagcttcacacgttccttctgctttatttcctctccctagtgaaacattaaacacaggaggaaaagatacagatgtagccatcagaaggaagtgaggctgtcattccaaatggccccccaccatgaagaaacccaggcttcttaaatcaggaacctcacgtctcagttttccctcaggtttctttctgtggtgtgaggacagaaacaggcgtccctgcattcctcagcaatcctctccttcctctaaaggcacgggagaggatttccgagcgcctgcgatgctgtggggaaccgcaggctgggcaccgtcaccaacgcgtcacaacagagcaaatctgcatagccttccccaactaccaccgaaaggatggctcnggctcagcttggtgaacgctcattaaacaaaaagcacactcgagtttcctagcttcattccagaactgctattgtggcacaacaaattcacaacaaattcacatcggagtcccctcgaccgggagctgcgggcccgggaatgcacagcacaggcagaagcattcgtggttcgtcagctcctggcagacgggactcacttcacggacacacagacccacgatcttcatgctattagggtaatttcatcttcacagtaaaaaatcaccaattcccagagaaacggagcatcagcccagctgtcgcacagggtctcgcgggtgctggtcacgggacctgcggccactccaagctaatgaagagccgtttactccggaggtgagtccccgagggaggactgaagtccaagctaaaaaggcggcgccagcgaagcggaggccgcttcctccagggaagagcccccagccctcccgggcccatccgaggcgccccacgcgggagcgcacggtggccggaggcggcgcggagccgagtgtgaggagggcagccgccgccacggtcacgtgtgccctcatcgtcggctgcctcaggttggctaggatagctcacagtcgggtcgggagctacatcggagacaccgtgtctagaaaccggcccagtgcctggagaaacgcacag

SEQ ID NO: 494496 - DNA, 1019 bp, Homo sapiens
  misc_feature (209)..(209): n is a, c, g, or t
ttctgtgtttctttttttatttccattagtctctcgtctgcttctatctttatcctgtggactaagagacagagtgcagcataaacctagagagagaataccagaagatcgaagaaggaaaagggaagagacgagagcatgtccgtccgtctaaatccctccgtaaagagtgggtgttagcagccaactgttaggttcgtgtatctctnccagcagccggcttgttatattaccccctctgcaacagagaacacttggcaaagtgggggacaccacagctgtgtgtacaaagggttatagtgagaagtgttgtcccccgccgctttatggaaatggtggtgtccgcggaacagatgctagataaaaccgtaatgggggtataaaaaggaaaaaaaaaaacagggggtcggactgggaaacgtgcaccaagtagctgcatgaagaaaccgggtagggattggtggagactttgtgcagcgctccatttgggacggagtcccatcaccacgttggggacgcattcctatgacccccggcttctcctccctttgtggaccccccggaggggcccaactcagtgtggtgctaacatagcccgctggcaccactagtctccgggcggtggacaatgagagagaccacgtcttctcttcgcaccatccccttagcgtggaggaagtctagagaagggacgtgcggagaaccactcctggggacgactcagaagcattatgtgcacccatgtcgcgctgctcttgtagaaaacaataatgtatcatgcctctgtcacccacagatacactctctgcggtgttataataacctcacgacatgcatttttctccgagcttgctctttgcaataactcttccaccacgattattaaccctcaccgcgctacgctccctcattttctaaacagcggatcccaccaaactggatatttctcacacactttattcatattccacattcttcaaaagcgaccacaattcgcacagcacaataaacaaaaaaat

SEQ ID NO: 494497 - DNA, 222 bp, Homo sapiens
  misc_feature (5)..(5): n is a, c, g, or t
ggttntagcagcgggatggggccagatgtataggcgtgggcatgtggcaggcaggtgggcagtccaggagcagcacgggatgacaagcctccgctccactcccacccccgtacctacccacgttgtgtacaaaagcccttcaggcagccactggtggtcaagagtatactctgtggagctcccacgggaaaggggctcccccagttcagaccctgctttcag

SEQ ID NO: 494498 - DNA, 1176 bp, Homo sapiens
gacgtggtgtgaggttagcatacgtatcaaggacaggtaactacgcatggctcccgaagtgttgccaaaacctcggactgcgtggccgtgtactggccaggcggtcttgcgtaagatcgatagtggctagtagcaattcgtgcgtatcgcctgggggttagcagcttgggtataagtttcgtgtggcgtgatctaaacgaaagaaggcatacgcgagatttcatacagaaactacgatgtccatgaaagattttggaggagatgaggacaggctaggtatccttgtcagcagttgtacaggtaatgctctggaatataaagaattgctgtcagggttggaaattacctgagaagtttggtgcactggactctgtggttacctgtgaactgatgcacacatgcaatatcgttgggcctaaaggagcagtacgatgtcccgttcttggagtgaaagtgaagagcagattgtaagcatacaagtaccttttgaaacaaaacccgcttacacaaagagaaacaccaacagaacagagaccacgtacaaaccaaaaacactaaccaaacagctagaaacgcgagacgaaggacacgagagcaagatagagaagaaaaagacaagaaaccgagagccaaccaaggaaccatgagagacaagagctaacagaagcacacaggaagagacaaggcgagcgcagaacgagaggcgaccagttgcccgcgcaacaacaccctcggctacacgccgctacgacgagcccgacacgacgaaaagagcacacacagagagtaccctgagcaaatggaaagcacaagggggggtaccggggtagcacgcgaggtgaccgggggacgaccgtcagaagcgggggggaaaccggtgaaacaccggcgagaaaacgcgacacagcgcacggacgccgaacactgcaccaccaactgaccgaccccacgctgagaaacacgggaggcaggacgagagacccccaaacacatctcggcagacgcgacacaaaacacgggacacgcgacaccgagacagagagagaccaaaacccacgacaagcgacccgaaaccgtgacagacgaaggaagaacgcgtatagagacagcccggaggtcgacggaagagggacacaccatgatgtagaccccacagaacggggaacacgccagagc

SEQ ID NO: 494499 - DNA, 421 bp, Homo sapiens
gggttccggtacaagatgggggttggggttggccccttcccccccaacggtgttttcccggagaatggggctcttggttaaaacccaaattttttggggggaaaaaaaatcccccggggttgggttaaacccgggggtggttgttccggttttccagccccgaaaaaaggatttatccctgaagggaaagcccttggggttggttcaaattcagggggttttgttccgccagccccccccgtttaaaaccagggattccgggaatttttggggggggtttttggttttgaaaaagggactggtccgccgggtggtgaataaggttttaaggtttcctgggtcccgaaaaaagatgcccgatggccctttaggcccccttggggttttttaatggggccattaaaggcccttttgtttggga

SEQ ID NO: 494500 - DNA, 161 bp, Homo sapiens
  misc_feature (2)..(2): n is a, c, g, or t
  misc_feature (73)..(73): n is a, c, g, or t
cngctctagaggacccggaacactacgatggcaactgtttattttcatgtcagagtagaggtcacttgctgtnaatatcaacaagcattaaagatttgtctttgctagaataagtgaactaatactacgtgtttcgtcaaattgacccagaacgtatatcc

SEQ ID NO: 494501 - DNA, 534 bp, Homo sapiens
  misc_feature (503)..(503): n is a, c, g, or t
  misc_feature (522)..(522): n is a, c, g, or t
tatggaattattatcctttatatagtaataataaaattgcttcaaatctttatagttgtaaattattgtcttttgtcattcatagccttccaaatattgattagactctgacaaaaatggccagaaagaaaaccagacaaagcaaatacagtgaatgatgagtagcagacctgaccgatacattgcgttgcacattgtaagagagtcttcactacacgatttctccaccatgttatgtgtagaatactaagcatgataacagtctggtggggtgggttatgatgaacaagcaagaaacatgaaattgctaagcagttttagaaatgataagaatttagcttagttaaatgcttatttagtaagcaaaaattacttttagcatactgtttgtaaaagtggatttagaacccttaaatgggcataatgtgtgtataagacacaggagtctgccttgacttggaagggaaccagctatgggtgtggatcccaactgcaaagatgcnggcatgagtgtgaggaccntgggactgatct

SEQ ID NO: 494502 - DNA, 468 bp, Homo sapiens
ttttcttctccagtctcaggtatgtctttatcagcagcatgaaaatatactaatacatatttcatgttaatgggctgggagatttagtattgttaagatggtttgaatatttgtccccttcaaaactcatgttgaaaattaattcccaaaatgacagtattgagaggtggggcctttaagaagtgattgggtcatgagggatctgctttcatgaatggattagaaatggggtcttgctgtgaatggattaatggcttatgctggaattgagactgttggcttcataagaagaggaagagagacctgagctagcatcctcagcccccttgccatatgatgccctgcattacttccagactctgcagagagaccttaccagcaagaaagccctcaccaaatgcagcccctcaaccttgcacttctgagcctctataattctaagaaataaaatcctgttctttataaatt

SEQ ID NO: 494503 - DNA, 187 bp, Homo sapiens
agatagccgaacaaatagcaataccaggaagaacagacataagagtaggaaatatatagtatggaaggtataccagaaaaagacatggatgaaagacgaagaacttcttgaacagaaaacacaagaaaagatacaaaaacaagaaagacaacaaagatagatatctagatagaataatagatagata

SEQ ID NO: 494504 - DNA, 365 bp, Homo sapiens
cgcagtagctcatgcctgtaatcccagcgctttgggaggccaaggtgggcaaaccacctgaggtcaggagttcaagaccagtctggccaacatggtgaaaccccgtctctactaaaaatacaaaaattatccaggcatggtggtgggcacctataatcccagctactcaggtggctgaggcaggagattcgcttaaacctgggagacggaagctacagtgagcagcgatcgcaccactacactccagcctgggcaacagaacgagactccgtctcaaaaaataaaaataaaataaaaaataaactatttggttatcaggctgagtggcataagctcaatgtgactatttagtaacttccccgttc

SEQ ID NO: 494505 - DNA, 476 bp, Homo sapiens
tgcaagaaacacagagttctttgacgtgacaagaagaattataaataaaatagctccaaggcagacaggctgaatgagccttttaagacagcctgttggtgcctcaaactttaatacttagaatatcaaatgttagctccacgaggatagcatcctgggatacgtgtgtgtgtgtacgcatatgtatacgtgtgcataagtgtgtatatgtaggtttgtgtgtagcgataaatgttttgttgcctttatggcctgggggctgattgagggcctggtggaacgcccctagcccagaggaaggagcaggccctacctgcgttctccctgggttactccctacttcattacacgtaggcaaacaccaaaagccagggaaagcataactgctgtagataacaagggcagatctcagatagagaaaagctttctctgcaataaagaattattttgtgaatggtgaaaaaaaataaaaacaa

SEQ ID NO: 494506 - DNA, 872 bp, Homo sapiens
  misc_feature (149)..(149): n is a, c, g, or t
  misc_feature (231)..(231): n is a, c, g, or t
  misc_feature (263)..(263): n is a, c, g, or t
  misc_feature (280)..(280): n is a, c, g, or t
  misc_feature (282)..(282): n is a, c, g, or t
  misc_feature (285)..(286): n is a, c, g, or t
  misc_feature (288)..(288): n is a, c, g, or t
  misc_feature (291)..(291): n is a, c, g, or t
  misc_feature (293)..(293): n is a, c, g, or t
  misc_feature (308)..(308): n is a, c, g, or t
  misc_feature (323)..(323): n is a, c, g, or t
  misc_feature (328)..(328): n is a, c, g, or t
  misc_feature (394)..(394): n is a, c, g, or t
  misc_feature (402)..(402): n is a, c, g, or t
  misc_feature (458)..(458): n is a, c, g, or t
  misc_feature (508)..(508): n is a, c, g, or t
  misc_feature (527)..(527): n is a, c, g, or t
ggacggttggaggaacggcagtattcacacgtcggctgctgggaagatctggattctcgtttcaggtcaccatcagaaaagctaagtttgctgtatagtgaggatcaggagatctgatcctgattgcagaaccttccctgattacagantcttgggattgttgagaggattacatgtaaagtaccaggacagtgcatggcacatgtcgtttctcccacttcacccttctanaccatcccagaagatctataagatttcatcgngggaaatcactaggagntnctnngnaangngaaagaaggaagatngtcggttggaataanacacngggttgaatgagttccagaaagcagggttctcaacctcgtggacagcaatctggagaagaagagancttcaaanaaaccaactagaagcaacatgcagagaagtccaatgagaggggcctcctcaggaangaagacagctggtccacagcagaaaaatcttgaaccagatctcccaggangatggggtggtcgctctgnacgagaaccccccttcaggatccgtgaggaagaccagaacgaacaaagcagaagactccatggaaaagcgagatggtggcagtaaccagcgaaggacctccagaacccctcggaagaaaagggccggggcagaccccacgtggatgaaagtgacagaggcgtcacacacaatagaaatggagggtcaacgtgacgaagacctgacgactgcagaccagggcagtagaggaactgggactcaggcaacacagccagagcagccggaccaacccagccaagacaacagtacgaggcaaccggaagcagtagcaaattgcagcaacgcggcgaaaatgtgcaacagcg

SEQ ID NO: 494507 - DNA, 818 bp, Homo sapiens
  misc_feature (149)..(149): n is a, c, g, or t
  misc_feature (177)..(177): n is a, c, g, or t
  misc_feature (209)..(209): n is a, c, g, or t
  misc_feature (226)..(226): n is a, c, g, or t
  misc_feature (228)..(228): n is a, c, g, or t
  misc_feature (231)..(232): n is a, c, g, or t
  misc_feature (234)..(234): n is a, c, g, or t
  misc_feature (237)..(237): n is a, c, g, or t
  misc_feature (239)..(239): n is a, c, g, or t
  misc_feature (254)..(254): n is a, c, g, or t
  misc_feature (269)..(269): n is a, c, g, or t
  misc_feature (274)..(274): n is a, c, g, or t
  misc_feature (340)..(340): n is a, c, g, or t
  misc_feature (348)..(348): n is a, c, g, or t
  misc_feature (404)..(404): n is a, c, g, or t
  misc_feature (454)..(454): n is a, c, g, or t
  misc_feature (473)..(473): n is a, c, g, or t
ggacggttggaggaacggcagtattcacacgtcggctgctgggaagatctggattctcgtttcaggtcaccatcagaaaagctaagtttgctgtatagtgaggatcaggagatctgatcctgattgcagaaccttccctgattacagantcttgggtctcccacttcacccttctanaccatcccagaagatctataagatttcatcgngggaaatcactaggagntnctnngnaangngaaagaaggaagatngtcggttggaataanacacngggttgaatgagttccagaaagcagggttctcaacctcgtggacagcaatctggagaagaagagancttcaaanaaaccaactagaagcaacatgcagagaagtccaatgagaggggcctcctcaggaangaagacagctggtccacagcagaaaaatcttgaaccagatctcccaggangatggggtggtcgctctgnacgagaaccccccttcaggatccgtgaggaagaccagaacgaacaaagcagaagactccatggaaaagcgagatggtggcagtaaccagcgaaggacctccagaacccctcggaagaaaagggccggggcagaccccacgtggatgaaagtgacagaggcgtcacacacaatagaaatggagggtcaacgtgacgaagacctgacgactgcagaccagggcagtagaggaactgggactcaggcaacacagccagagcagccggaccaacccagccaagacaacagtacgaggcaaccggaagcagtagcaaattgcagcaacgcggcgaaaatgtgcaacagcg

SEQ ID NO: 494508 - DNA, 118 bp, Homo sapiens
agtaaaactacatctcactgatacacactagtcgaaccactagtattttatatattatgttttgggacgtgtctcattctgtaccaggttgagtgcagtgaccaatcacagtcactga

SEQ ID NO: 494509 - DNA, 664 bp, Homo sapiens
gggactgagccgctgagggtagttacgcttatttttttttggtctttggttttttttttccctttttcctgggagaacgggggtctcgtatatggcccaggaaggttctggaaacctctcgtgggcaaatattagacgaagagcccgcttcccccaaaaacaacagcgaaaaacaaaaacaaaaagaacaaacaacagggtgacggacacagcgctgcccccccgaaaacacaccttacagacagcacaaaagagagacagggcagcggcatgaggaccaccaacagacgggcaaaggtgacaaaaagggggggcaaaaagaggggtagcacacagaagggaaacacaacgagggtgacacaagacaaaaggagagagagggaaaagcctccccacgccagagaagaaaaaacaagagcgcccgcaggcggggaagacaacagcgcgggcgaggcgcgtcgccagcggaagcaaacaaaaatccacaaaggtcgagggcgcagacaagcacagaagaggggcacacaaactacacaaccggcgggaggccactaattccacaacaccaacaaggcgcaacaaccagacagcacgaagggccgaccgaaagcaaacagaaaacaaaaaaaaaaacagccccccccggcccagagaggggggggga

SEQ ID NO: 494510 - DNA, 258 bp, Homo sapiens
ggtacactcacacctgtaatcccagctactttgggaagctgaggcaggtggatcacgaggtcacggagttcgagaccagcctggccagcatggtgacgtgccccactctctactacaaaatacaaacaatgtagcttgggcactggtggctgcactgcctgtgtgtccctgtgctaccttgggacggctgacagcaggacgaatatgcttgacgccttgtggagtgcggacggtttgcacgttgatgcccgacgactc

SEQ ID NO: 494511 - DNA, 260 bp, Homo sapiens
gcaggctggaagtcagaacaagaagcttatagaggaactagaaaccttgagagacattcgttctcccaaaacagattactagaaatatttaactatacaacagaaggcagcatgtatagtatgcttatagaaggaatacaatatatagctgaccagaatggtggcttcttttctttgtatcattcatcttcttcttaaatcacttaacattcctgaaatgcttcactgtacgtagttcagtcgtagctattacttcgaat

SEQ ID NO: 494512 - DNA, 371 bp, Homo sapiens
  misc_feature (18)..(18): n is a, c, g, or t
ttttgttttaattagggnccctttcgggggaaaaataaagtaaaatttaataaagcctttgatcacatctcaatccataagttagctacaaaacaaaaaatcctagaactttttagagccatcacgactgacgaggtgaccgggaacaccagttagagaagggggttcggtgtttggggtggtgcggtgtttccggctgttgaaaagaatttgaatgaaattacaaactacccctcgtcaaaaatccacatgaagttgatattggtgcttataaatcactctctcccagtccctcactggttccaaccttcaggtgataaaaattaggatgggatccatcttccctgtgctgacagtctggggtccccgca

SEQ ID NO: 494513 - DNA, 218 bp, Homo sapiens
  misc_feature (6)..(6): n is a, c, g, or t
  misc_feature (12)..(12): n is a, c, g, or t
  misc_feature (100)..(100): n is a, c, g, or t
  misc_feature (187)..(187): n is a, c, g, or t
attaanaagctncttaaattaacagctctgaggaatttcccaggtttgggggtcaggtgggtcccaaaaccctcccttggggggcccaaacgataatgangcaaaaaggaagagaaccctctccagcctggctgacccaaacccaaccacacaatggtttgtctcaatctgacccagggggctgganccctccgtaaattgttgaacggctgcttccc

SEQ ID NO: 494514 - DNA, 356 bp, Homo sapiens
  misc_feature (47)..(47): n is a, c, g, or t
  misc_feature (173)..(173): n is a, c, g, or t
  misc_feature (235)..(235): n is a, c, g, or t
  misc_feature (241)..(241): n is a, c, g, or t
  misc_feature (268)..(268): n is a, c, g, or t
  misc_feature (289)..(289): n is a, c, g, or t
  misc_feature (340)..(340): n is a, c, g, or t
  misc_feature (342)..(342): n is a, c, g, or t
ttcctcaaccttctgaattagtgttgaaagtcccggttttacagaanggggactctaaacttagaggagttacctgctttgccaagaaaattctcaaacacagacatgtcagcctccagcgcctgtgttctcctgattgcaaccctgaatagctccacctcttagcaacccanaatgataacaaggggacgtctgtacccttcgatcacacactccccacgctcagtcactgcancaccanaaacccctgttgagctggtacactcanccctggggaacctacgcctanacctaaggggctgaactccgtatctcacgacaggtcacctcacaccatcancnaggggaatccgccc

SEQ ID NO: 494515 - DNA, 763 bp, Homo sapiens
  misc_feature (2)..(2): n is a, c, g, or t
  misc_feature (55)..(55): n is a, c, g, or t
  misc_feature (124)..(124): n is a, c, g, or t
  misc_feature (153)..(153): n is a, c, g, or t
  misc_feature (204)..(204): n is a, c, g, or t
  misc_feature (227)..(227): n is a, c, g, or t
  misc_feature (287)..(287): n is a, c, g, or t
  misc_feature (290)..(290): n is a, c, g, or t
  misc_feature (351)..(351): n is a, c, g, or t
  misc_feature (393)..(393): n is a, c, g, or t
  misc_feature (395)..(396): n is a, c, g, or t
  misc_feature (417)..(417): n is a, c, g, or t
  misc_feature (430)..(430): n is a, c, g, or t
  misc_feature (460)..(460): n is a, c, g, or t
  misc_feature (479)..(479): n is a, c, g, or t
  misc_feature (518)..(518): n is a, c, g, or t
  misc_feature (526)..(526): n is a, c, g, or t
  misc_feature (536)..(536): n is a, c, g, or t
  misc_feature (541)..(541): n is a, c, g, or t
  misc_feature (553)..(553): n is a, c, g, or t
  misc_feature (563)..(563): n is a, c, g, or t
  misc_feature (584)..(584): n is a, c, g, or t
  misc_feature (601)..(601): n is a, c, g, or t
  misc_feature (630)..(630): n is a, c, g, or t
  misc_feature (637)..(637): n is a, c, g, or t
  misc_feature (640)..(640): n is a, c, g, or t
  misc_feature (649)..(649): n is a, c, g, or t
  misc_feature (651)..(651): n is a, c, g, or t
  misc_feature (701)..(701): n is a, c, g, or t
tngaaaaaaccctaaaagaaacccccctcggcttcaaggatcctctttctgaccntaaaacctgcttcttggggggtggccatccctgcaacccgcccacccctaagtccctttacttttgtantctaactccaaggtattgttcagacctcngctcctgggggccggcccctggagtcttccctccctggtagcctcttaccngaattccaaaacacctaaggaanaaagatggatgggctggtggggaggggggtggctggggctgggccttcaccattccaganacnaggccagtgattatgcaaactgggggaatctcctcccatatctcccaagatctggtcctgnccaggccatgctaaactaacccctgccccaactctcctcccnannttaccttccttcctacccccntctccctctcccntcccctgactgttccacccaggaggagganactttaaatagccgggctnacagttttttattttaaaggaatttggctggggagctgnacagggcnccctgtgatntgaanaaagcttttggngcttgtcctnacaaccccctcagtcctcccnccctgtcctcccctgtntcctttcctcctcctgggttcatgttgtnataaaanaanattgttggngngtaattaatttgttcaaaagaaaaaaaaaagcaaaacaagagacttggtnccgactgaagcctattttaattttattttattattttcctcttgttagaaataaaaccctta

SEQ ID NO: 494516 - DNA, 395 bp, Homo sapiens
  misc_feature (91)..(91): n is a, c, g, or t
  misc_feature (94)..(94): n is a, c, g, or t
  misc_feature (116)..(116): n is a, c, g, or t
  misc_feature (225)..(225): n is a, c, g, or t
  misc_feature (227)..(227): n is a, c, g, or t
  misc_feature (230)..(230): n is a, c, g, or t
  misc_feature (260)..(260): n is a, c, g, or t
  misc_feature (299)..(299): n is a, c, g, or t
  misc_feature (315)..(315): n is a, c, g, or t
ttcaaaagagatacaactgaagcttgcaatggaacggatcattaaggaccttctcagaaatagatgaaatggatgtgggcttagcagttgntgntgaggatgattcggcacttcangagcttgagataattgtcgattttatgtgaatccctgcgtaggcagtggagcaggttataataagcagggcgagactcttcatcagccatctgcagggatggaagtccncnacnagacaggggtagaacttcattttctttggnttcaggatgaacctggctgctatcaacttccatgccctntataacccgtttgggnttgctcctctctctacagctttggataggatagcctccgggcttctttgcataccacgtctttccgtgaccagatgatac

SEQ ID NO: 494517 - DNA, 967 bp, Homo sapiens
  misc_feature (279)..(279): n is a, c, g, or t
  misc_feature (631)..(631): n is a, c, g, or t
aagagcgtgtgcgcgctgctccccggtgtcttttcgtgctccgcgcgcttctattacaaggcgtgttcttcatggcaggatcattcttcaccaattgatggggtctgggtcgcctccttcctccaccaagcgggttttctccggggcccgccgtcgcgtttttttaaaaccgccggcggggtggtttttcttccctcgccccgcgcgggctctttcatcccgccgcgccaccccttctgttttttgcttcgcgccaccacaagacgggccgcccctctnctccacactgtggcgcagacttggtgctccccccttgggggccccaccacccctggggcggaccacatcctcgtgttccccctgggggcaaaacctctctggtgagtcccgtactacaacattgttcgccgcgcggcgcgtcctgcgggggtgtattatctcccccgttgtttttttctgcccacacccccttgggttcacccagaagagacgtcgcttgctgtagaatctctcctcctcctcgctcgctcgccacacgtagtgtgtgtgttctttctctctcctcgccccccacgcagcagcttgttttgtttgttgtttgtgcgctgcggaggagggccagaccgatagnagaaaacactactctctctttagatagtcgtgcgcggcggtacaaccacaataaaatagggaacaaagaggagtcgctgttccccaagacagctgcggcggggtgcaaacacaaaaccctgtggaggaaccacctcttctatcgggaggggcgacgacccacaccacaacgtcgctgcagacctcccccccaccccaacgaaaaaggccccctccgtcggcccccaagaggggtttttttttccccccccccgggattttttctcgggggcccacaacttccgggaaaaaaaaaatattttttgggggccccaaaaaaattttttttttcccccca

SEQ ID NO: 494518 - DNA, 140 bp, Homo sapiens
ttaagtatagaatggggggaaatactgtgggttaatggttcagactgtgagcttccttggggaagatgaggtatgtatccacggcttccacatctttcaactggtggtttactcgaactgttctccaccctgttctgtgc

SEQ ID NO: 494519 - DNA, 1123 bp, Homo sapiens
  misc_feature (1)..(1): n is a, c, g, or t
  misc_feature (390)..(390): n is a, c, g, or t
  misc_feature (574)..(574): n is a, c, g, or t
nacaaaaaaaacggagtttttgtttccctagatttgcatccaaaagagaaggcggccgtttgttttgttgggtgttctgcctcgcgttggtgtagataagcagaccaaccacaaaaccaacagaggggggggggttccctcgtcgaaagcaccatctctttggttaggagtagaggatccacccaaagggtgaagcggcggggttctaacaaatgttattactttgtggggcgatcacaccacatgaccctctccagtagggatggacgatatgtgtgtgttcaccactgagagcgtggtgtaccacactcatttgtccctatttccctcttttgttgggtccttggggtacattgtggtgtggtgtagcgcgcctcccgccccaccatntggtggctcctccgcccacatattgttgggtctcccagcaggaatatgactcccacacaggggtgtgtcacctggtcctctaaactgctcccgtttggttagcgcagcagctccttgttcgttgtggaagagacacggagcgtgctaaacaccagcttgtggtggggccccacacagaagcctnctttgttgagtgtgagagtcccggagggaaaactcttggcgggtttcaaccacccggcggcgtgtgtgcgaccacaggggagtgatccttgtgagagccacttgttgtgccccccccacaaccgaggagagggttgtaggacatctccacacagaggagtaatagacagggcaattcgtgccacaagagagggcccccacacaactgggggcaaaacatcagaagggctacagagccaggcggtgtgaagaccgtcagagcgccttccttcgtgcccttggaaaccaccacccctccctagcacacaagggagtgtcccgcccctggagaggaaccaagcgaggatgacccaagacttcctgacacctcagtgttcccagggcaacccctgggaggcgagcgcaaactggggctggcgggcagcccaaacttagtgccctccctgggcgcccccccccccttggtggcctttgtgaccccccttaagggtgcgtggtgaattttttttttaaaagggttcccaattaaaagttgggccccctcctttta

SEQ ID NO: 494520 - DNA, 181 bp, Homo sapiens
cacgtacaagggttttcccatgaaatttacattgagttgtccacctccagcttatagggcttctggaacagagtgggtcttgctcttagtgattccatgggagaaaatggaattggaggtactagtagaattcaggggaactgtccagtcagagacttcgactgtcatagatttggagctt

SEQ ID NO: 494521 - DNA, 294 bp, Homo sapiens
  misc_feature (137)..(137): n is a, c, g, or t
  misc_feature (173)..(173): n is a, c, g, or t
  misc_feature (214)..(214): n is a, c, g, or t
  misc_feature (250)..(250): n is a, c, g, or t
  misc_feature (263)..(263): n is a, c, g, or t
  misc_feature (280)..(280): n is a, c, g, or t
attcggcacaggagggaagtacctgcagtgaccctgcccccatgaccttggccaggcaggatgattccagagcccgtactcgtggggatcctcactgaccagcccagccccatccgcaagccaggctgggctggcantaacttcgctgggctctcccaagaccatcagcagcncatccagccccctgggctcgggctgctgctggttcttcatnaagtcccttggtctctagctcggcagggctgctctnctctccgccctcntttgtgtatcaagtggncttttttttttttt

SEQ ID NO: 494522 - DNA, 528 bp, Homo sapiens
  misc_feature (59)..(59): n is a, c, g, or t
  misc_feature (104)..(104): n is a, c, g, or t
  misc_feature (164)..(164): n is a, c, g, or t
  misc_feature (170)..(170): n is a, c, g, or t
  misc_feature (190)..(190): n is a, c, g, or t
  misc_feature (214)..(214): n is a, c, g, or t
  misc_feature (473)..(473): n is a, c, g, or t
  misc_feature (475)..(475): n is a, c, g, or t
  misc_feature (511)..(511): n is a, c, g, or t
  misc_feature (528)..(528): n is a, c, g, or t
ccgggctaccatgcgaagccccgtctctacaaaaagtacaaaaatagccaggcgtgctngctgctagtccccagctacttgggagctgaggtgggaggagaatntgattggcccatcttgagttatgagcctgacacttgactaaagggagggcaattatcccnagactnatagcatcactccaaatatnattgcatgggaagatgactctacnaataaaaagaaactgggtgctgggcgccagttgtcacgcctgtagtcccagcactttgggagcccagggcgggtggatcacctgaggtcgggagttcgagaccagcctgaccaacatggagagaccagcctgaccgtctgtactaaaagtgcaaaattagtggggcgtggtggtgcatgcctgtggtcccagctgcttgggaggctggggcaggggaatcacttgaacccagggggcggaggttgtggtgggccgagancngccattgcgctccatgcctgggaaataagagtgaantccgtctcaaaaaaagn

SEQ ID NO: 494523 - DNA, 362 bp, Homo sapiens
cgatctcatgaccttatgatctgaccgccttggactcccaaagagctgtgattacaggcgcctgtgggcgcatactatgcctgccttctgtagcatggactgtgctctgagctgcgcctttcaggagagctctgcggggcatcatagcctttctgagctcatggcatgagatgtacggtggtgagcgacctcgattgagcaagtggcttaacctatctgggctctacgagaagggtcagtagatcttcgcatgggcacttaagagaatgcccggcatattagaagggcttcatgtctgctttaaaggtagcccttgccaaggatcttgtaaggcgcacttgtttgagcaaggagtgaggcct

SEQ ID NO: 494524 - DNA, 313 bp, Homo sapiens
agatcataggtgacgacaggtgacatatgatagtgacatgtaccggaagcgggtgagtgatagctccatttgctcctatgatctaatgccaagctaagacaggcttacggttacagtggaaattgcgagctcacagaggagcggacatgcagcaaggctgacgcaggtaaagcagagaggggtggatgacccagggagtggctcagttcacgaaaagctgagcgggtgaacgtccacggtactcaaacgcggtgagggagctcgcggcccttgccgtccacgtagggcttcatgtgggacacgcagtagtcgg

SEQ ID NO: 494525 - DNA, 339 bp, Homo sapiens
cgtgagatagcagtccgtgaggcgtcggtgtggcagaagtaacgagccaggtcgtcagggctgactagtgtgcacgatgagttgctggccccggacggtgacgtcgttaatcccaggaaggtgtgcagaccctcggccagtccggagggatcggtgagggtcgccctgacaatggatccggacaccgaggcgcgaacctcattgatgggaccgtccgcgacgagctgtccaccactgacgaggacgacgcgacgggcggagggaatcggcctcctcgatgtagtgggtggcgaaaaatgaccgtacgcccggtgtcggcctcctcacccattgactgct

SEQ ID NO: 494526 - DNA, 161 bp, Homo sapiens
ggtcgctctgaggatcccgaacttctgctccaattcgcgtactagccggacttggatatgctggaaaggatttcagttgaggaacgggagaccaagattatgatagctttccgaccaccaccaacttcaatttccttagctgccgtaatatcgcgtcagtt

SEQ ID NO: 494527 - DNA, 362 bp, Homo sapiens
accggtatgttggcttaccggttagctgacgcgtcaaccggcgaggttaaggtcggagccttcaaattccgactcccagaaacgacgggtggagcagtggaaaatatccacgccagcgtcagacagtggcttgagaaactcacccaacgcctcaggggtttgcaccaggcgcgcggtgtagtcttgctgcttccactgggagaaacgcaagatgatcggaaagtccggttttcgacagcggcgcgggtggcctggatcagctcaatggcgaagcgcgaacggttggccaggctgccaccgtatacgtcggtgcgctggttgctgccttcccagaagaactggtccacgacgtgaggtaggag

SEQ ID NO: 494528 - DNA, 915 bp, Homo sapiens
atcctgccctggggtcggcccccctcccggtgggcgcttcacctctgtcaagtgtttgcgttgtccttgcccgccatcacatgtggttccttaaacgcccgcgggccgagtgtttccccctcccaaagggagttttttgcgcttccgcccgtgtgctcgcccgcctttgaatgggcccagtggttttgtcccaagattcctgttgaccccccagtgcgtttctagcagtgcgttctgaagacccacctgggcgagtttaccacacctctcctttagttctgcgaacatcttggtttggatcccagtcggaacagcgctcctctagaactgtgcggccaaatccccctccaatgttggttcactaaaattaggcgcccttccagcaaaatatgcgcctccacggctatattcctcccgcgcatatctccgccactatctgctacttctctttaaacctccccccttgtattgttcttattgtgtagtttattaaaacacccccctccccagtccttcacccgcgcgtcaacaacccaaacattaatcctccttaattccccccctccccgcagaatttggaagcaactttaaatcccccagagcaggtctcttgccgaacacactcttcgtgtgcgtacggagttctctttcttcccccgcgtttgagcacccgcggttctgagatggagtggggagcacccctgttgtaccataacacaagccctcttctgtggactagagaatatccttcagaacacccacaaactcttcttgcccactaattctcgcagcccactcctaagatgggttagcgaaaattctttgggggaaacactcctgctgaaagatgaacagacacacaggggagcaacaaaggggcaccaaacaaaaacccttttttccccaaacaaaaca

SEQ ID NO: 494529 - DNA, 301 bp, Homo sapiens
gtaggagtgaacatgtctattgcgtgaagcagatgatgtgattaagatgtgggaaagggattggtgaaattggaacaatccagaataacaatgataattgttgaagagtatgcaaagatgatttggcaaatagaacattgaaatgcccagaaactccaagaggaattagcctcaggaaaattagtggaacaggctaattctccaaaacaccagtggggagaagaggaaccaaattctcagacggaaaaagatcataactagtgaagatgaggatgacgataaactatgcagactgatattg

SEQ ID NO: 494530 - DNA, 998 bp, Homo sapiens
  misc_feature (108)..(108): n is a, c, g, or t
gaaactagtccatggcataaccgtatgtaccgccattcttcagacctgtcataccatgttcgcagtcagctcatgctcatggacgcaccccgtggatgctgccagaantctccagccactccgagtagtccccattccgtaacttggcaaagctcaaccactcactagttatgagtcgcgagactagtccgaacgtgtgtctgcatattaatgtccttatgtcgacagtgccggttacgcgtcctaatctcagaagcttggtcgatagagtttgaaatcagcacagatggattgctgtggatcaactcaggatcaccagataatttcaatcatccaggttgactgtgcctgacacctcgagtgtacatcaatccgaagtgccaggactagcatgagttcgttattgttccacttgagtaccgcagtgcaaagtaattgaccgtcggatccccaaggcctactatctcgtatcacagaaatccagcttacattctaaggaaccaactctcatacggtcccaaactagctgaagtcgcatgtttgcctgactaacgtctgtgagacattcatcgaatggtcatcagatgcgactattaattcccatgcaaattatctgtctttcgtccacctacaattttggccccagccacacttttcaattccacttcagacagtcttttttgggtagtagttcaggtgcccagcttaacgcgggctggggcacgatggtcccttgtcctcacgagttgctacagatgcctctttcactgttcagtcagcgtgcctgggtactccagtgtttggacacttggaaacatgcacctgttaatcaaggcacgtggttcaggaccacctcccgggagtctacgaggccagtggctgtaaagtttcacctcgggggggggagaaagcctctgttaaagttggaattgcccttccgtggggctgggactgttcgtgtgccttgtggacccgcgcaaggtttttggggttggcca

SEQ ID NO: 494531 - DNA, 251 bp, Homo sapiens
tgtgcctggcccttttctgctaaaaataaaaaattagccaggcatggtggaatgcgcctgtggtcccggctgccagggaggctgaggcaggagaatcgcttgaaccaggaggcagaggttgcagtgagccaagatcacgccactgcacttcagcctggatgacagagtgagactctgtcaaaagacaaagacaaagaacaacacagagagggcagagaaagaagacgaaagagcacggcagggagggaggc

SEQ ID NO: 494532 - DNA, 441 bp, Homo sapiens
  misc_feature (9)..(9): n is a, c, g, or t
  misc_feature (11)..(11): n is a, c, g, or t
  misc_feature (60)..(60): n is a, c, g, or t
  misc_feature (77)..(77): n is a, c, g, or t
  misc_feature (118)..(118): n is a, c, g, or t
  misc_feature (157)..(158): n is a, c, g, or t
  misc_feature (364)..(364): n is a, c, g, or t
  misc_feature (395)..(395): n is a, c, g, or t
  misc_feature (407)..(407): n is a, c, g, or t
  misc_feature (424)..(424): n is a, c, g, or t
ccggctgtncntagggggacctttatcctgctcaccgtgccaggataagcctgcgcttgncctaaccagcgcagcanaaccgtctcaatgccttttggccacatccgtcattgcagancaaagtttacacgacgtcccaaagtgacgttcatgctanngtgtttttccagaaatattggtttcatgtttcttattggctctgctcctgtgcttatatcatccaaaaactttttaaaaaggtccagaattctattttaacctgatgttgagcacctttaaaacgttcgtatgtgtgttgcactaattctaaactttggaggcattttgctgtgtgaggccgattcgccactgttaaaggttcctnagagttggcctggtttgtctctgggagatgngaattaaaccanattaaagagctttccantggagggcttggtattg

SEQ ID NO: 494533 - DNA, 383 bp, Homo sapiens
agccacaattagctggggcacaggctaatgggagaaaacaggttggtaagaggtgattgaaagagaatgaatggaagggaacctaggctggacagtgacgagaaggctgcagcaagcctgtgtgacatgaaatccaaattagaagaagaaagaaaaacatggtgatgcttttcataggcaggactggcaatagaaggaacaagaggaagaggagcacggtatgggggaagaaaaaggaagtcaacaagtaacagccagcacacttcgtgacttcagatggtggaggtggaaacaagccatggcttgacaccagaaagtcaccccaatatgccaatttacataaagacaagcttgttcaattaaggggacaaaacataaaggca

SEQ ID NO: 494534 - DNA, 608 bp, Homo sapiens
  misc_feature (97)..(97): n is a, c, g, or t
atcaaccactgtgaacttccaagggaagttcttgatgcttatctcaactgcacctttcccatcgcatttcactgtacatagagcatatcatgcatanatagttctcacaaatgtgtcagttgacatgaatgcaatgatgtcagaattcggggcaacctcaagttcggttgttactctggtcaaaaggttctatccgaagctagatgctccagcacagatgtgtgtgtaattacctcgcttatgagttgccacaatcaatggtgtcagttcctctgtaagtaggcctttgtacacttcatgctgagccaccagaacatttgctatgcctgctactcaacagagatcttgtgccaccttgtcacatttggttccagctactaagcagaacgcttcacatacaaggcgtgtggttacagtaatggtattaaaagtaatgggtgctacggaatcgtttgcatgctcagctattgccagggtcctctgaaattgtagcaatgaggccgaccgccggaactgccacggaaccgccgctcggaacatggtctccgcttccgccgcatcctcggccttacagcagcgccgtgcacggccaactggcgacgcctcag

SEQ ID NO: 494535 - DNA, 128 bp, Homo sapiens
tctgaaaaagtgctcaacctcccccctcctggaagctgtgaattcctcaggaagtaaaccgagaagatgccagctcccagaagctcagcatcactgcccgctcttctccagtgttgggcttgctcctg

SEQ ID NO: 494536 - DNA, 326 bp, Homo sapiens
tctcagccatgttcatgcaccacatctgggggaggctgagacacgcggcccgctcgagcccgaagcaatagaggttacaaagtttacaaagctatgatattgctgctgcactccagcctgggtgacaaagtgagaccttatctctattaaaaaaaaaaaaagacatactgtccataataattatacatatggtgatgtttcagtacatgtatccccccaaatgtttctgagtgtggccctgaagtgtctctgtccccctgataatcaccacacagtgttatttttcatcacttctttatcgtgtaaagtgtagagatacggggacc

SEQ ID NO: 494537 - DNA, 993 bp, Homo sapiens
  misc_feature (75)..(75): n is a, c, g, or t
  misc_feature (91)..(91): n is a, c, g, or t
  misc_feature (100)..(100): n is a, c, g, or t
  misc_feature (103)..(103): n is a, c, g, or t
ttacgcacgagcatggaactgaaggtgtagaaccatgcgcctgaagaaaacggaacgcgagcaactgcggctganatatggtggccactgngcctatgtnggngttgtgcttgtgggtaacagatggcacgaggatcagcttgagccgatcatccgacaagtcgataagcccaccgagaggccagaaaaccatcgcctcgacaacatgatgcccgcctgcgccccgtgtaatcgaagtaaagggcggcaggagcttgaaggctggcgcaattggcttgcagggcacgtgaatagcctcaatgagtatcacggcatatatcgaatggcaaaagcctttgggttggtcgtggagacggcggctccggtcgtcttttactttgagaaatgccaggccgggcgagaatgaaagccctgactattcggcagccttgggcttggctcattgtgcacgctgggaagaacgtcgaaaaccgcagttggaggtctcactaccgcggccgctttctggtgcatgcggcaaaaggaatgacccgtcgcgaatacgaagaggccaaggcgtggtcttgtgcttgcggagcgattgagatccctgcgtttggtgaactggaccggggcggtgtgattggttcggttgaattggtagacgtcctcgatcacagcgactcaccctggttcatggggccaaaggcttttttgctacgcgatccgcaaccccttccatttgtgccgcttaaaggtcgactcggattcttcgaggcaccaaccgctcatgactgagatagacgaattgcaggaggagcgtcgcctctgctccatctgtgatgatccaatgattgaggggcaggccttccacggcattcgccaagcccattgggattgtgctcagcaggcgccggcggagactcctgcccagggtttcatttgttcatgcggcaacagaggccgagggtgctatgggggaagcccggcttacgcctcacccctaccccgatc

SEQ ID NO: 494538 - DNA, 262 bp, Homo sapiens
aaagagaacagattgattttaacaacatgtttcccgtaatgtcctaacttaatagcactggaaaatctttctgttaagaaaaggaaaactaactgaccttcaacaggctctttatagcaaaggcattttcgtgccccacagaacagtcttgtataagggagatttatcagggacttccaggaagcgagagttccgtaattttctaacactgaagcaaagctacgggaactaggtttaccatctcctagacacaacccctctt

SEQ ID NO: 494539 - DNA, 670 bp, Homo sapiens
gcacagagaacacgccgcgatcacagtgtgccacacgggagcatgtctaccaaatgtgggaatatgtggacccggctactccacccctctggaggccatgaaaggacaccaaggaagagaacggctacctggcctggatttaccggaacacaagcactgagggcccagattatctggccactgtggatggtgaccccaaggcttcccagaattgcgcaggtcattcaccggctggccatgcccaacctgaaggaccagctgtattacttaagagggaacaactgcagcagctggttcggtgatatgcaccaagtcgcgcacacaagctggtgctgtccagactcatcttctctctgcatctatgtggtggacatgggctctgagacccgggccccaaagctgcacaagggcatatgagcccaagggcattcatgccaagtgcgaactggcctttcttcacaccagacactggctgtgcagacgggaagtgatgatcagattcctgtgagacactaagggcaatggcaaagggggttttgtgctgctggatagggagacattcgaggtgaacgggacatgtgagcctgtgggtgctgtaccgctggctatgacatttgggaccagactctacactgtgatgagcagcactgtagagggcaggtctcacgtg

SEQ ID NO: 494540 - DNA, 480 bp, Homo sapiens
cctgcagagaaccctcatttctgttactgctgaataagattccattgttgaatatttattcacttactgaaggacatttggttgcttccaagtttggcagttatgaataaacctgctgtagacgtctggtttttgtgtggacctaagttttcaactcatttgggtacgtacaaaggagtgcagttgctagattgtatggtaagattatgtttagttttataagcgactgccaaactgtcttccaaagtggctgcaccagtttgcatttttaccagcaatgaatgagagtttctgttgttccacatccttactagcatttggtattgtcagtgttttggttttttaccattctaataagtgtgtagtggtatctcgttttaatttgcaatttcctagtgagcatcttgatgttgagcatcttttcatatgcttcttggccatcttctttggtgaggtacctgttcagatcctttcccccta

SEQ ID NO: 494541 - DNA, 158 bp, Homo sapiens
gcaaacaaacaaacaagacacacacaaacatgaatcaccagaggtaggtagggcaaggttttagctggaagcacatgtatgtctatgattacattacacaacattactcactatggcagctttctactctcatcatttgttagttatctggcaggggg

SEQ ID NO: 494542 - DNA, 357 bp, Homo sapiens
ctaacttatagagaagtagagagtagaatggtgataaccagaggctgggaggggaggggtgagtatagaaaaaagggatacattggtcaacaggtagaaacttatagttagataggaggagtagttctggtgttctattgcagagcatgttgactgtagttaataataatgtattatgtatttcgaaatagctaaagagagaactttaaatgttctcaccacaaagaaattataaatatttaaagtaatggatatactaattgctatactctggtgtgatcattccacaatgtgtacgtatattgaaacatcactttataccccataaatatgtaaaattattgttggtccaattac

SEQ ID NO: 494543 - DNA, 741 bp, Homo sapiens
gggggggggcgggtaaacagacttggccggcgaaggaaatcagcaggacgcctgcgcacaacatgtgggcaaccacctgtgccgctccgtgcctgcagagagttgaggaagaagatgaaacgtggaagtttgaagaccaggatagtaaagaagccaaaaaaccaaatttcataaatttgggacaccagtctgccgacatcacattacatacctaggtgctgatatggaagaatttcatggcaggactttgcccgatgacgacagctgtcaggtgatcccagttcttccacaagtgatgatgatcctgattcccggacagactttacctcttcagctttttcaccctcaagaagtcagtatggtgcggaatttaattcacgaaagatagaacctttggctgtccttgcttacagcacatgtccacggaaagggaagcacagtttgggaacaacagcagagattatatgcctatcgagaagaacaggattcgggaatggagatagtgaacagtgaacagccatgggacacacaaaggttcaaagtccttgagctaagaaccagtcagatggaatccagcaagctaaagtgcaaatccttcccgaatggtgtgtgtgccttcaaccagtgttgcagttcacttagaaatcccctcataaagtgccagcatttttcgcttcaaacctgtctcacagagaagaccaatgttcctactaacgtggcgcgcagaatcccagaagcaga

SEQ ID NO: 494544 - DNA, 342 bp, Homo sapiens
caacaagttgctctatccaattggattacaaccggtatcgaaaattcgggtcacttcaggataacttcaggaccccggtgcaaggctatgagaagatttcatgggaaaacttttctcaggtatcctgaagaagttttagcggtttttacgagttataatttagatgatactcaggcctcaagaaaaaagagggaagactggaaaccaggaggagaccatgtttatttggcaaaatttttaccaagtgaaaagcggagggatttacaactggagtgacagtagctttcgtcgacacatccggtggcagtatctcattttatcccaatatctcgaggggtgtca

SEQ ID NO: 494545 - DNA, 1306 bp, Homo sapiens
ggagccttagaaaccggccccgtgatcgcgagccggagccggagccggagccggggccggcgggctgctgaggcccgagcggcaggagcgcagctgcggagcggctgagccagggctgcccatgtctgctgatgaatgctgcctgcctgccttctgccctgccctggcgcctgcagccccggggctggtccagtggggctgggcactggcgtctgctgcatgtgcgcctggcagcccttggatggggcagccggcttagcgcgctgcgctctttgtccccgcagtgtcgcagccagggcgggcgggggcgccgcccagtccccggccccttggagcgcccgccgcgggtccccacctccattggacgcctttcaggggggggcattgaggccttggaggcggggctagccgggagggggctccgtgccggcctgcctggccgccacccgcattgacaattggggccctgcctttccaccttggccccggccctgccgaccccctgcagaggccggctcgaggaaacttccgaccagcgaggtcgtcgtgacacggagtcctgccagagaaggaagcgcggcgggggaaccccaaaggggccccgaggcaccaggtggtgcgggagtgcacggggcttgcggagggcgcagaacgacccaggccaaagaaagaaggaaggcaggcgtgcgtgatcgttacggcactatcacaaggccaggcaagttgcaaggaagcttaggaggccacgttccaagaaggacgcggttacccccgaatattgagcattagggggaggaaaatcgccgtgtggaccaaccctcagcggagctgtgcgtgcgggtctgggtcaaaagaccgggggaggccaaggtggcgataagcgcgaagcgataaccagcaagttcgacccgctccaaggtgttgcgtaagtgcaggagatcagccggcgcatatttccacgccttataaaggacgttttcccaccgggataacactatacaagcagtgtggggcgcgcgcagtaggcacgtgggccgggggccggcttcaaccaagaagctaccttttaactcctaaaggccggaggtgtccagcacaggttttagagcaagcgactactctagaaagacgtggcgagcgaggggcagcggaggggtcgccagagggcgaaagcaaaaacgggtggagcacaggaaggaggcggaggtgcgacgccactaagagagagagtactaaagtaggctagcagactcgtctacattctgctcgccacctgtctccttcctccttgctcgtcttattatat

SEQ ID NO: 494546 - DNA, 511 bp, Homo sapiens
ctctctactcaccggctccgaatggctcaaacctcaaggccaagctgtaccctataccgggcatctctccccagggttgggtatgtggaaagtgtgggattcaggttggttaaataaaacaaggggtggtttttttaactagtgacagcaaactgggtagtaaacggtctgttctgtggctacagagtaaccatagagtatacatgagccaaagagtatacatgaatctcagctagtaacttaggtttcaggatcagattctctaaaaacagggcggtccagcagaacattctacagggaaggaatcgttctattcggcatggtccaatatggtagccactaggcaaatgtgacggtggagcacatgaaatatgtctagtgcaacttagggacggaattttaagttttaaaaatggtaattaatttaaatctagatttacatagctgcgtgtagctggtgactgtggtatatggcagtgtagcactgaagaaatatcttcactacattccc

SEQ ID NO: 494547 - DNA, 392 bp, Homo sapiens
cgtcgacgtttcacctttctcttcatagagcagtttggaaagactctgtctgaaaagtctgtaagtgattagtaagaccactttgaggccttcgttggaagcgggatttctcatttactgctagacagaagaattctcagtaaatcctttgtgttgtgtgtattcaactcacagagtggaaacttcctttattcagagaagttttgaaaaacactttttgtggaatttgcaagtggagatttcaagcgatttgacgccaatcttagacatggaaatatcttcatactaaaagtacacagagtcattcgtagaaagtagtttgtgatgtgtgccttcaactcacagagtttaacctttcttttcatagagcagtttggaaacactgtcgacgc

SEQ ID NO: 494548 - DNA, 234 bp, Homo sapiens
tagcgttggtgtctgcatccaaatacgacccttcgacaggcagaacaggctgtttgacaaatcaacttgttggcacccggtagtccttagcgacatattgggcgatgtgatgtttactggagacatgcacatcgccggcgtcgtacaacttcgaaaatggtctaaaccggtttcgccactgtttcccggtcaaactcgatcatacgtctccccatgtatcgagtcatagcaagt

SEQ ID NO: 494549 - DNA, 109 bp, Homo sapiens
ctcgttgcgcagcctgccgctgctgttcaagcgcccggcactggtggcgctgtacgtgccgacggcgatggtggtgacggcgcagttcacggcctacagctatgttgag

SEQ ID NO: 494550 - DNA, 308 bp, Homo sapiens
gatcgtgcctaagctgagaatctccttttgaccctgggtcacgttacaagaacatcggtttatcggcgcttggggccactgttaagtcaaatcccttcttcacacgatccgctgcagtgacaccattctggagggagccctcgtagaagatgtaggatgggaaggcgctgagtgcagggtgcatcctggtactggacctgcaggctgatgggccggatgcccaagcaccagcaggcgctcggacagcgattgtgacagccctgtgcctttgggcggccttcttgccacatcagcaccaggaaattctt

SEQ ID NO: 494551 - DNA, 552 bp, Homo sapiens
ctttttcacctccacacttgtggtggatttgaccatccgggggccaatatgaggttgggcaaaggccctcttgtcttctttcaagttcctcaagcccgcccacaagaaccagggaaagatggggcagttcagtggctttaaccttgggggccgactcctcccccccccccgcaatttcgccaaaaccaagaaatagcccccgcccccccccctgggcccccaatgatgggttgtttggccaaaaatcttgctccccttttgggggggggtcccccccccccctcgggcccccctgttccggggaacatggagccctggggttttttttttttttttttttaataaacccaaagcagggtcccgtcccccaggggtgtttcccccctgcccctgcgggttcttttaacaggatttttgggccggggcttccactcagggcaacggcaggcccggttgtgggttcccccccggtcttggccccaggggtggcagccggtttctggggccccccctttggtttttttaattaaggtccaagttgggttttcccca

SEQ ID NO: 494552 - DNA, 1065 bp, Homo sapiens
  misc_feature (1)..(1): n is a, c, g, or t
  misc_feature (3)..(3): n is a, c, g, or t
ncntaatacaccctcagactacttttgttatttgttcttttcttctcttctgatctttgctctctttgtttctctgtctgtattctctcattcttgttttctctcattctatgtggtctataactattgtatattgttctttttttcttctcttcttgttgtctttacctttttctatatttctttctgcttccatttgcttcatatcttgtccccgtttccgaaattcttttatcacccccttgaactgctccctgccacatccattcagtacggtctaaccacaaacccgctcctggtccaccttcagccgtaccagatctgccgatggccaagctatcagatatgagggatggctgacacatgcgggaagaagaacgtatgttggcgctctcgtgctcccaggtgctagcactcatcacagctgttgaatccatcttgggacctcgatgagagctgaatacttggatgtgaccagcaggcgtgtcgaagcaagggaagaaggccggtttaggacagcctggccctgggtgtacacgaagggcttcttctttcctgctgtctgctcgggagccaaccagcaaaccccgggtccctccccgacgcggtaggtgagcagcacctggaggcgctcggcggcgcggcagggctgcgggaaggacacgcacagggcctggccatagtgcgagaagggctgcgtgtagaagctcacgggctccgcaggcggctcctccgagccgggccgctcccgccgcagcgccgccgccgtcacctccaggcacgggtgcgagtccagccgcagctcggcggcgccctcgggctccaggcagcgcaggtccaggaccgcggtgccgctcagcccccggctccctgcgccgggccctggaggcccgaactcagcccgcaggtccaggtgcaagtgcagcagctcaaaggcccggaagttggaggccgaggccacgtccacagcctgcgcggagtgcagcggccgccgggccgcgccgctgccgggggaatgctcgccgctcgccatggccgcagagccgttgctcaccggccggccgc

SEQ ID NO: 494553 - DNA, 978 bp, Homo sapiens
  misc_feature (1)..(1): n is a, c, g, or t
  misc_feature (3)..(3): n is a, c, g, or t
ncntaatacaccctcagactacttttgttatttgttcttttcttctcttctgatctttgctctctttgtttctctgtctgtattctctcattcttgttttctctcattctatgtggtctataactattgtatattgttctttttttcttctcttcttgttgtctttacctttttctatatttctttctgcttccatttgcttcatatcttgtccccgtttccgaaattcttttatcacccccttgaactgctccctgccacatccattcagtacggtctaaccacaaacccgctcctggtccaccttcagccgtaccagatctgccgatggccaagctatcagatatgagggatggctgacacatgcgggaagaagaacgtatgttggcgctctcgtgctcccaggtgctagcactcatcacagctgttgaatccatcttgggacctcgatgagagctgaatacttggatgtgaccagcaggcgtgtcgaagcaagggaagaaggccggtttaggacagcctggccctgggtgtacacgaagggcttcttctttcctgctgtctgctcgggagccaaccagcaaaccccgggtccctccccgacgcggtaggtgagcagcacctggaggcgctcggcggcgcggcagggctgcgggaaggacacgcacagggcctggccatagtgcgagaagggctgcgtgtagaagctcacgggctccgcaggcggctcctccgagccgggccgctcccgccgcagcgccgccgccgtcacctccaggcacgggtgcgagtccagccgcagctcggcggcgccctcgggctccaggtgcaagtgcagcagctcaaaggcccggaagttggaggccgaggccacgtccacagcctgcgcggagtgcagcggccgccgggccgcgccgctgccgggggaatgctcgccgctcgccatggccgcagagccgttgctcaccggccggccgc

SEQ ID NO: 494554 - DNA, 315 bp, Homo sapiens
aatgcatatgatgtttgagggctgttttgaaattatttttcttttcgggtcttccaaaattcaagaaaagttgattgccttgaagattcccaaatttaaggttttttggcatgggtgttttctattaaaaattggttatatgatgtcaaagtaatcctttcataatagaattgacatgctctgggatagtttgccaaaggtaaattataaagtgaaatctcttgtttcattatcttcccttctaaccccaaagatttgtttttctagaaaaaatgtccctctctggctttaataaaattatgcctccgaaatcca

SEQ ID NO: 494555 - DNA, 105 bp, Homo sapiens
aggagaattgcttgaacccaaaaggcggaggttcaaggtgaaataagatcgcccccctgcacttcagtatgggcaatgaaagcgaaactccctttcctaaaagca

SEQ ID NO: 494556 - DNA, 424 bp, Homo sapiens
ctggcctatggtgaaacccacctctactaaaaatagcaaaataagccacggtgtggtggcaggtacctgtagtcccagctacttgggaggctgaagcaggagaattgcttgaacccaggaggcggaggttgcagtgagccgagatcataccactgcactccagcctgggcaacagagtgaaactctgtctcaaaaacaaaaaaaaaagaattcacccatattattcattatgctatagattttaaaaacttcttcactccctttatcttctattatcgccctttagggagacatggaaaaccttttatctgtttacttcagggaaactatatgagatactgaataattgtaatgtattcagtgttaattataaatacgcagcgtatgttttgatatgtatggtatttatgtgctttaggtaatt

SEQ ID NO: 494557 - DNA, 316 bp, Homo sapiens
tggctctcgcaccgaacagttagctaaattgtaatgcaaggaaataagtgctaccccactaaacacacaaatagtaagaaggcaaaacagcctttgctgagacagagaaagtttgagtggtctggatagaagatcaaaccagccacaaccttgccttaagccaaagcccaacccagaacaaggctccatctctctccagttctataaaggctgagagagatgaggaagctgcagaagaaaagttgcaaactagcaaactagttgattcatgaagtttaaggaaagctaatcctgtaaaataaaagggttaggggct

SEQ ID NO: 494558 - DNA, 260 bp, Homo sapiens
taactcctcctctttctcctcctcctcctcttcctcaaactcgggttccagcattgtctcaaactacaggctccaagctgggtctcaaactcaggctccaacttagtccgaaactacgggctccacctcggtccctaactactagtcaccacctctgtgtaggtctcagtactaccgactcctcccagccagcggataggtataggcggtataagatcaccaccaggattctaccggggatcctactaaaagtcgacctg

SEQ ID NO: 494559 - DNA, 1330 bp, Homo sapiens
  misc_feature (1)..(1): n is a, c, g, or t
ncgcctgtggagcaagtaccgtcttgtgggtcgactctttggtgtgtgtctcgtgatcggtgctcttgtttctgttttgtcatgtgtttctttggtgtgtttctctgtttttgatgttgataggctgttggtatgggccggtcttgcctttggtgctggtatttgtcggctattgtttctccctgtgttgtgttttttcttgtgatcttgtagtatgttgtttcttagtgtagcgttgtggagcctgggtaatgcgactttgatttgtacgagttgtttgtgcttttggctgtggggctcctttggtgctgttgagcgcttatgtgtggtgggccctcgtgtgacttaatggccctgggatctacccctgtacgctttttttgaatggtaattctgccggattgaggaacttgggaggcatggtcttggttgtgctaggactctcgcgctggataaagtgcgccttacttttcgtggaccacccttgcaggctctgagattaaggtgattatgccggaggcaccactgtagtctgtgatactcagagtcccactcccgtgctagctcaaagtgcaccagcctcatgggccccagtggcttgaagaagtctaatgaaggtgtccagtgtctagtattctctcctgtcctattgtattggggtcgctctattgtatgtggggatcttgcattcccctgcttgcccatatcatttgacgaatgccgctaatatagggcatcctgcgccctcgcctgttgtgaggctcaggcactggaaggtcagttgccatggttaccgaggaccctggtgtactctggtgctgtcctgttctactggacctcgcgcgatcccaagccgccaggggtgctctgctgggggctccatttggtgtacgtcgtgggcccccactttcaagccagctttctgacggccttccgatcctgggccgtgaaccacagcaggaggagctccagctaagacctccccactccccgctgagggagtggaggtcgggtgtcacgtccaggaatactgaaggaatagcccgaggaaccgggctggggtttatttaaactgttctgtgtgggtctggggagaggagagcaccttaactattattggggttggcttggggctggggcaggatctcagccataaagtgccagtttgcttagttctcactgtctcctggtatgtgctgccctgctctggggatgcacaggcaggcagggtgggggagggaggttcctcgcaggtctcagcccggtacagggtcattgcaagcagcctcctgggcagtcgtaaataatccggggatgtctcaattagttt

SEQ ID NO: 494560 - DNA, 766 bp, Homo sapiens
tcaaaagtgatggtttaggacgcactatattgaatgactccctgtgtatttttacacccacagttgttatattctccctgttaaaatagttggaaaggggaaatttctgatttaacccaaatggttatcatcctaggtaacttatttcagcacacagtctgatatttccaaattctttctttttcgaccttatactctgagttattacttactgtaagtggtgtatatgaaagcccccacgcacttttcccctatggatctcctaatatgccccgctaatccaacagtctttgtttgtttttctattaaaaacgccactccagaaagatataatgtgaaaaagaaaggaattttacgagcgtagggaaaagatgaaatgtcacgacactttgaagaactattatgttaaagtgatataagcaccttaatatacttgagaaactcttcttaatatgcccatgaggtaggcctgatctttgaaatagtgaataggaataccatgcaatttcctcagtgagtcactgagtagaatgagttggtgggatccttgggaagccacaacggagcggagttctggatcactgtcccctcccgtcccgtgaatccccgagcccgcacgacctgcccccccgccacagcttataccctggaatgaggacacaggtgatactttgagctgtggactgaactggccgacaccacctgtaccagattgaatttcaccttgtaaggaggaagtgaatgaaataaaggatccccctaagga

SEQ ID NO: 494561 - DNA, 856 bp, Homo sapiens
aacattcggttgcgtcgctgttacccagatttgtaagtgaagatgctcatagttgtgtgcctagtaccatcatggtggtgtctcgggtgtgttggcattcttttcgagttccttatactcacggcgcctaccggtacgctgctgacagaaactcgcagatggcatgttctgcaggatgcatatactgggagttcgtagtcaggacacggtcacgctcagaaggagagactccggacttttagaaatgtaccgtgctggagtggtcgggtgctttctgggttggggctgatgggggcgggcgggtacgtttgtacctgggtggcacggaagcccatgagatgggataccccccgagtccatggaccattacgcagatggtcatcggcctcagcattgccaccgtggggttatcgttgtcatggcagaccccaaaggaaggcctaccgcggttgtttgaaagtaaccaccagtgaatctgtcttctgtctctgtccctttccccgtgacacacagagcaggcatggaatttaatgggtgtctggacaagacacttgttcatggacagacatcactactggggatactaccaagactgaaacacgaaacaatcgtatgtggtcattctctggctatgggaggtgtttggtggccttcaccagattttcacagggaaccaattaaattccctcaggagaacgttaacaaaaaaatactttaataacgatacatacatagtaaacaattttttggggggcagcgccacgcgaaggtttttagacactttttggcgcggggcccggaataagtaagtggtcaccgtgtcacagaagcccgctacaatgcgggttccccctaa

SEQ ID NO: 494562 - DNA, 602 bp, Homo sapiens
  misc_feature (1)..(1): n is a, c, g, or t
ngtggtcctctactcctctctgcctgctgcgcggcgctgcgctctgcgcgcgccactactagtatttactcactctcgcgcgcagcactactatcattctccccgcgctgtctctctcgcgccgcgcgcgcgctgtgtgctctctctctccgcgcgcgcactatagtatgtgtcgcgctccacacgacacgaatcacgcgcgcgcgcgcgcgcgagatcgtgcagcagggagctgcgcgacccgcggcggcgtcgtcgcgtctcagcagaagaggtttgtcgtctctgtgtgtgcctcctcgccgcccgtccgcgcgcccactctcctgtgtgtgtgggcacaccacgcgtcgtgtgtgtctctctctgtttgtctgtgtgttgtgttgtgtctcgagacgaggtgcgcgcgcgcggtccgcggcgcggtggtgtgattattatctagtgaggtttcgccgcgcggtgtcgtttgctgcgtgacctccaccacggtgagtggatgacacgtgagaagcgagtacatagttgtccccccggagtgtagtacagtaacaaaacaaaaatagaaaagagagaaagaaaacccccgaacaagaaca

SEQ ID NO: 494563 - DNA, 698 bp, Homo sapiens
  misc_feature (2)..(2): n is a, c, g, or t
  misc_feature (112)..(112): n is a, c, g, or t
  misc_feature (233)..(233): n is a, c, g, or t
  misc_feature (244)..(244): n is a, c, g, or t
  misc_feature (257)..(257): n is a, c, g, or t
  misc_feature (261)..(261): n is a, c, g, or t
  misc_feature (270)..(270): n is a, c, g, or t
  misc_feature (286)..(286): n is a, c, g, or t
  misc_feature (288)..(288): n is a, c, g, or t
  misc_feature (290)..(290): n is a, c, g, or t
  misc_feature (297)..(297): n is a, c, g, or t
  misc_feature (303)..(303): n is a, c, g, or t
  misc_feature (310)..(310): n is a, c, g, or t
  misc_feature (322)..(322): n is a, c, g, or t
  misc_feature (324)..(324): n is a, c, g, or t
  misc_feature (328)..(328): n is a, c, g, or t
  misc_feature (330)..(330): n is a, c, g, or t
  misc_feature (336)..(336): n is a, c, g, or t
  misc_feature (350)..(350): n is a, c, g, or t
  misc_feature (354)..(355): n is a, c, g, or t
  misc_feature (360)..(360): n is a, c, g, or t
  misc_feature (363)..(363): n is a, c, g, or t
  misc_feature (367)..(368): n is a, c, g, or t
  misc_feature (375)..(375): n is a, c, g, or t
  misc_feature (378)..(380): n is a, c, g, or t
  misc_feature (427)..(428): n is a, c, g, or t
  misc_feature (697)..(697): n is a, c, g, or t
cnatgatcgtctatcaatggagagattttcgtatttctatattctaatagttcacgatccttgcttgatgtcagtaattcattatcgactataccaatagttgcatcttccnccagaatatttgcttgatatgctccaatcggaatttcaggcaatccaatgtagtcatgatctgccactactgaaccttgcaagagataaagactttcttgttcactggattctcttatgtngggcttaaggngggacattttganaggncttttcagnctacccccagtgttgncncncaggccngccccnccccttnctgtaatatagncnatgncncaaggnccaccccattcagnctgnnaacgnccncccnncccccanttnnncctttgtcttaaaacttcatgccccccttttaaatgaaatgtttttnnttgtttgggtttctttttaacaatgatcttgcttttatttagttcatccaaattgttgttctccatctggcccagtgaagttgtcttattctccattattttatcagcttctttaattgcatctagaattttggcaaacatacttgtattatcaccatccacttcatgaagactatctgaagtctcaggcatataaggatttcgactaaacatttgaaaatatggtgtatttttagtaggttccaagtgagttacattgaaggcaattna

SEQ ID NO: 494564 - DNA, 853 bp, Homo sapiens
  misc_feature (390)..(390): n is a, c, g, or t
  misc_feature (494)..(494): n is a, c, g, or t
  misc_feature (496)..(496): n is a, c, g, or t
ggcggtcctccccgcccggcgggcccagcagccctaggagcccagcgccgccgcatgtcctccggggctagcgcgagcgccctgagcgcttggtagagcagctcaagttggaggctggcgtggagaggatcaaggtctctcaggcagctgcagagcttcaacagtactgtatgcagaatgcctgcaagggatgccctgttggtgggtgttcccagctggaagtaaccccttcggggagcctagaatcctgtgctttactctgaagactcgaagagaagtttggctgaggaatgccttcaagcacaaagtggatgaatgactgccttcaagtctcaagaaaacacttttccctaacttttagagatatttcagccctttccttgtggccgnggtcctatagccaaaatcacagatattccatgagtttcctacttggagtgagaaaactgggtgaaggaatagaattttaaatagtaataactgctgtgtttttngngtgcaagtacttttatacataagataaaaaaaacttacacaaaatacaaaaatgactcttttcataagtgagtactaagatttctatacctggaatatcatgtatgttccatttacgtggatgttacactttaggacggacaatagtttgttattaaccacaatgaatacttataagtgtggtcgtggaagttattatccataaaaattgtctttgtcatgattataatctaaatgagaccagaagtcaattgggcgggcacaacgcgtattaccccgcggcgggctcaaggggagcggttttaccattgggcagtttcgaccttgcaaatgtatgttcgcgccgtaaaaaactttg

SEQ ID NO: 494565 - DNA, 96 bp, Homo sapiens
gctgaactcatgagaagtatgggattgccacttcaatttggtaggataactgcacataaggattttgaggtatctatgaatactagaaataaagtt

SEQ ID NO: 494566 - DNA, 426 bp, Homo sapiens
ctagaaaaggaacattgaataaaaagacaagagaacagagacataaccctaaaaacctaaaaagtcaggaagaagtagccaacaagattagaaaggtagtaagaaaactagaaggaaagttttaagatgggaagtaagtggtcaagtctgttcaacgctgacccacggtcacctagcatataggagatatgggcattgggtttaggagcatggttccagtcacggctcccctcaccagagtaacttggactttcatgatcgctcgcagatagactcctcggtgtggtttctttcgcataggcttcactttaggtcagtggggcagtttggttccggtggatttttatatagtcattgtctctttcatgtggtcttaggtcaagctgcggatttagcggcactggctttataaattattatattcat

SEQ ID NO: 494567 - DNA, 380 bp, Homo sapiens
tcctatagtgcatggctggcggagtgcatggctgcggagtgcatggctggcggagtgaatggctcacacctgtaatcccagcactttgagagaccaacgcgggcagatcacttgaggtcaggagttcaagaccagtctggccaacatggcgaaacctgtctctactgaaaaaacaaaaattagccgggcgggtggcgcacacctgtaatctcagctgttcgggaagctgaggtaggagaatcgattgaacctgacagatggaggttacagtgagccaagattgtgccactgcacttcagcctgtgtaacagagtgagactgtctcaaaaaataatgataataggaagtttcctcaggcttccccagccattgcactccgg

SEQ ID NO: 494568 - DNA, 105 bp, Homo sapiens
ggtacgagtaacgctgagtctgttctttaatggacaccgtccacttgtctgcatcctgactgaggcgggaacaggaggggtttgggaaatggtgccactgggcct

SEQ ID NO: 494569 - DNA, 734 bp, Homo sapiens
gactcccgctgtatattaaggcgccggcgatcgcggcatgatgactgctcccggacaagggcggtgatgcgttctgctttggacttctcgagttgagtgcgtcgcactccttctgcgcagcgcgactctgcatgtcctcgagtcgcagatctttccacgaggagccagcatacttcctgacacatggaaattgttgttcgtcgttgccaattcttgatcccgatttgccccagagctctttcctgcatgaataagctaggctaaagtctctgttgttctatgcccaaaactgccccaagatgatggaagttggggccaagccagcccctcgggcatttgtccactgcagcagtacactaccaacagatcaaagaaacccctccggccagtgaagaaagacaaaactgctaaggccaaggtccaacagactcctgatggatcccagcagagtccagatggcacacagcttccgtctgggcaccccttgctgccacaagccaggcactgcaagcaaatgccctttcctggcagcacagatgactcagaacgaggggagcagtgtcttctgcaaagccagtcttgagcttcaggaggatgtgcaggaaatgaatgccgtgaggaaagaggttgctgaaacctcagcaggcccaggtgtggttagtgtgaaaaaccgatggaggggattccagtggactgtgaagaacttccaggaccattttgcaaaagcaagacca

SEQ ID NO: 494570 - DNA, 186 bp, Homo sapiens
ggtcccagggtgactaacatgagaaccccttctctgcagcatctgataaaattacctgcgtagctttagagatcactgctgcctgaccagcagccgctctgctggaatctgtccagaaagccccttggggctcagaaaagtaggtgggttaataatagaagtaggctatgggttaggtctacctgg

SEQ ID NO: 494571 - DNA, 104 bp, Homo sapiens
agggggggggggtttttttggcccccccggccctttgggcccaaaccccctttcccttttttttttcccaggggtgggtttttccaaaaaaaaaaaaggttgga

SEQ ID NO: 494572 - DNA, 253 bp, Homo sapiens
  misc_feature (99)..(99): n is a, c, g, or t
ccccccccccccccccccggggggggaaaggggggggttttttcccccccccccctggggcgggggttttttagccttttttcccgggggggggggccntttttttccttttccccgggatcccccccccgggggggggcaggttttttccccccaatttttttttgggcccccccggttccctttggtccccccggggtttttttcgtttttggggcccggggttccctttaaaaaaagggggggtttttga

SEQ ID NO: 494573 - DNA, 172 bp, Homo sapiens
gggggggggggcccttttttaggggtaaccccccccctttaagggtggggggggggggtgggttaaaaatttggggggtggggtttattttttccccgggtgggggttccccctttaggggttggggttagggggaccctttttttaaatttttccttttttaaacggggga

SEQ ID NO: 494574 - DNA, 236 bp, Homo sapiens
ggaaaagaccttgaaacaatggaagaaattccaaattgactgttagagtgctcctaggaaaggaaacaataggatagatagatggattagatagatagatgattagatagatagatagatagatagatagatagatagatagataggaggggatttattgtggcaattggctcacatgattatggatgccaagtccacagtgtgtcatctgcaagctggagaaccaggaactggtg

SEQ ID NO: 494575 - DNA, 178 bp, Homo sapiens
acttttggaacatggctcacataatacctggcaaacttaaaatctggataccggcaggcacggtgtctcacacctgtaatgccaacactttgggaggcgaggcgggtggatcacttgaagtcaggagttcgagaccagcttgcgcaacatggtgaaattccatctttactaaaaatac

SEQ ID NO: 494576 - DNA, 132 bp, Homo sapiens
tcgagccggtaccaacctgaagttgccaaatgtaaagcttcttcaaaagaataactcatatatttttgacactcaccatgttgctagcctgaatgcgtggaatgacaaaaacacacaaatcaatgtgtgtgt

SEQ ID NO: 494577 - DNA, 200 bp, Homo sapiens
cccactccaccttataccagacaaccttagccaaccatttacccaaataagttaggcgatagaattgaactggcgcatagatatagtaccgcaaggaaagtgaaaattataaccagctaatatagcaggactaccctatacctctgcatatgattactaggatactttgcagggaccaagctaagcccccgacccagacg

SEQ ID NO: 494578 - DNA, 802 bp, Homo sapiens
ggcaggcagatcactggaagtcagtagtctgagaccaaccagaccaacatggtgaaacctcatctctactaaaaatacaaaaaattagccgggcgtggtgtggggcacctgtaatcccagctactcaggaggctgaggcaggagaatcgtttgaacctgggaagcagaggttgcagtgagctaacatcatgccactgcaatccagcctggacaacagagtgagaccccatctcaaaaaaaaaaaaggaaacaaccaaacaaggtggtttcaattcagggtactcttaaccatccatctcttccggtataaaacctcggtaggtcccacggtttcatcccttctccatctggggcccgttggagaacattgggtgtgggtgcgcatacccgttgatgtcgtgaggaaccagtaattctgggttaaagggttcccctgttggggtacttatatagccttgtttgaaattcctttttccgggtatgacccgtgaatattcggctgagcgatcatgaggaaatccgattgcatcgccgtggggcttgacctcttctacaagggggcgtgccgctttataggctatgggacctatatgtgcgggaatgagaactccgcgggtagcccaggatttgttgtcgttgggggagcgggtccgtccctccagcttaccggagccagactcttagagcgacactcacgccgactgggtacgcgcgtaccttatgctggtccccaatctttcagatcaaacgttggcgtgcagcttcgagaattcgctatagctcccttttcgacgacaccgca

SEQ ID NO: 494579 - DNA, 898 bp, Homo sapiens
  misc_feature (2)..(2): n is a, c, g, or t
  misc_feature (67)..(67): n is a, c, g, or t
  misc_feature (74)..(74): n is a, c, g, or t
  misc_feature (91)..(91): n is a, c, g, or t
  misc_feature (94)..(94): n is a, c, g, or t
  misc_feature (96)..(96): n is a, c, g, or t
  misc_feature (105)..(107): n is a, c, g, or t
  misc_feature (110)..(111): n is a, c, g, or t
  misc_feature (115)..(116): n is a, c, g, or t
  misc_feature (129)..(129): n is a, c, g, or t
  misc_feature (133)..(133): n is a, c, g, or t
  misc_feature (139)..(139): n is a, c, g, or t
  misc_feature (150)..(150): n is a, c, g, or t
  misc_feature (152)..(152): n is a, c, g, or t
  misc_feature (154)..(154): n is a, c, g, or t
  misc_feature (156)..(156): n is a, c, g, or t
  misc_feature (159)..(160): n is a, c, g, or t
  misc_feature (175)..(175): n is a, c, g, or t
  misc_feature (180)..(180): n is a, c, g, or t
  misc_feature (184)..(185): n is a, c, g, or t
  misc_feature (201)..(201): n is a, c, g, or t
  misc_feature (203)..(203): n is a, c, g, or t
  misc_feature (207)..(208): n is a, c, g, or t
  misc_feature (214)..(214): n is a, c, g, or t
  misc_feature (229)..(229): n is a, c, g, or t
  misc_feature (306)..(306): n is a, c, g, or t
  misc_feature (312)..(312): n is a, c, g, or t
  misc_feature (319)..(319): n is a, c, g, or t
  misc_feature (329)..(329): n is a, c, g, or t
  misc_feature (336)..(337): n is a, c, g, or t
  misc_feature (339)..(339): n is a, c, g, or t
  misc_feature (341)..(341): n is a, c, g, or t
  misc_feature (343)..(343): n is a, c, g, or t
  misc_feature (404)..(404): n is a, c, g, or t
  misc_feature (408)..(408): n is a, c, g, or t
  misc_feature (419)..(420): n is a, c, g, or t
  misc_feature (427)..(430): n is a, c, g, or t
  misc_feature (439)..(439): n is a, c, g, or t
  misc_feature (441)..(441): n is a, c, g, or t
  misc_feature (465)..(465): n is a, c, g, or t
  misc_feature (486)..(486): n is a, c, g, or t
  misc_feature (504)..(505): n is a, c, g, or t
  misc_feature (507)..(509): n is a, c, g, or t
  misc_feature (567)..(567): n is a, c, g, or t
  misc_feature (660)..(660): n is a, c, g, or t
  misc_feature (678)..(678): n is a, c, g, or t
  misc_feature (724)..(724): n is a, c, g, or t
  misc_feature (728)..(728): n is a, c, g, or t
  misc_feature (733)..(733): n is a, c, g, or t
  misc_feature (753)..(753): n is a, c, g, or t
  misc_feature (760)..(760): n is a, c, g, or t
  misc_feature (777)..(777): n is a, c, g, or t
  misc_feature (799)..(799): n is a, c, g, or t
  misc_feature (820)..(820): n is a, c, g, or t
  misc_feature (829)..(829): n is a, c, g, or t
  misc_feature (894)..(894): n is a, c, g, or t
tnatttcccgcttttattttgcttttgaaatctttttccttggtggatttgtacgtgtatacactanaagcctnaaataaagtataaacanaananaaaaacaannnaannaaannagaaaaaaaaaanaaanagcacnagggcagaaananancnaanncccctaaaaccaaangaacncaannaaaagggaaggggaancncaanncaaccnaaaagcaaccaaacnaaaaaaaaagggaaacaaggaaaaaaagaaaagaggggaatctgtccaagaggggagagaaaagaaaaaaaaggtanaggganaagtgtntagggtctanggccagnnangngnatggcagaatcatttgtgtgatgaagcaggctcctcctgccaaaaggagagccaaggggcncctncaacccctttnnttttttnnnnaggccagtnanttcaagcaggggttggtagaaggnaagtgctttaaaaatgttganttctcacacgcagaagcnntnnnctccagttttgtgttgggagggcaatgtgtacccagggcagggtacagtagatgaccnctacctgcacacatatagatggaggtgaactggagcagagggtcagggttagggtcacccaaagtccctgttcctttacccagcctctgttcncatggagatgcctttctnccaggccttcaaggacagtgtgtccactacactgcgtggtgaagtncttnttggnatctaactattatgagatangagagcnctctgcaagtaggtgangaacgagtgagctttaaagacnattactgagagtgtcactgcnactgctgcnatggaggtgagagctaaatccggggaatgccggacggtcacagcttgctttttgtacaacttgtntata

SEQ ID NO: 494580 - DNA, 181 bp, Homo sapiens
agtaacgatgcagtcctcacaagcggtcctcgctatgactaagctcctcctttagcatcgcggaagggcttcaagatgagctgtcttggttcccgttgaggcccagtaccctgagttccatgatctccttcggtgaagagcacaggagggaaaaggggaatggacttctacaggatggagt

SEQ ID NO: 494581 - DNA, 138 bp, Homo sapiens
cattaatgagattgattcgtgctctgcaaaaatgttgtcttaacgctaagttaataacagcaacagctgctctgtaatagtggaatcttcatcgaatgagatttcgaccttctgctcctctcaaaatcacattaagca

SEQ ID NO: 494582 - DNA, 231 bp, Homo sapiens
ggtcatcacttaccctgcccttctttttcctcagaacaccgtgaactttggtggtattatttggtatctccccactgcatgtaaactcccgtggtgaccttgcatgtcttatgcaatcctcattaaaacctttttttttttttttttttttttttgtttttttttttttttttttttttttttttttttttttttttttttttttttttttttttttttttgtgtgggggg

SEQ ID NO: 494583 - DNA, 145 bp, Homo sapiens
atagcgtcgagctcggaccccactacctctctagcaactgaatttagcaaatacaatcgtaatcccagcatgttagggaggccagggtgggcagatcatctgaggtcgggagttcaagaccagcctggccaacatggggaaaccc

SEQ ID NO: 494584 - DNA, 208 bp, Homo sapiens
aggcgccctacaggattatagcttcccttctctaaactactctatatttatattctacctctgctcaacttactattggctaacacatacataaaaatattaagtaactagatgtaaaaatggataaacctctttagttcttgacttcaagtatgggagaacttttattgtgtccccattaagtatgatgctggcttttatacctgag

SEQ ID NO: 494585 - DNA, 136 bp, Homo sapiens
ttcgattggcgggcacttacagtggctgggtcaggccatgagacacaggtaggttctggtcacaggtagaaggcagcagccacctgggtgatggctgggctgcaggtccttctacgggtgacctagtgggcttgta

SEQ ID NO: 494586 - DNA, 650 bp, Homo sapiens
  misc_feature (650)..(650): n is a, c, g, or t
ctgcgcgatctgcggatctcagcgaacgctctttctggaccacacacctaccattgttgggagcatggagggagtggtgggggcctccgatgaacagctcatcatcggctggtacatcttacccgtgctggtgtgggtgttcaggtactccctgcagaggctggaatacactgagtggcggaccggacgaagagtgtgaaggatcgcacacagagagcccccaactgaggacccagcttccagccctgtgcggacgtattataggtgctccagtgcatgtcgggcagacgggcgcacaggccgcgcaagaatgaggcgatcactgtggtccctcgccagaggagcacttgtgaaggtcagagaggggccatgagacccccgtggaaacactgccgacaatgacttaggatccatctcccttgtccacccactttgaccgggtccactcatgggcatggtttacaaagagaatttggttacgtggacattaaagtcataagcgagaataggggaaacttggggtacgtctttggcttgaaagcaccttacgggagttaaacagatgagttaggcagttttttgtagaaaatggagtactaactggttggtttttggaaagccacgtaaaatgtaatacaccggtgtctgtn

SEQ ID NO: 494587 - DNA, 386 bp, Homo sapiens
cccgtcgctctacaggatcctcctggttgtccggtctatcacttttgtatatcttttcaatctaccagctcctgtcagtcttcgtatttttttaatgagttttttgtgtctctatcttcttcagttctgctctatagttactatattcttgccttctgctagcttttgaatgtttgctcttgcttctctaggttcttttgtgattattcaggaccaggttgttcagtttccatgtagttttgtggttttgagtgagtgtcttaatcctgagttctagtttgattgcactgtggtctgagagacagttagttataatttctgttcttttacatttgctgaggagtgctttacttccaactatgtggtcaattttggaataagtgcga

SEQ ID NO: 494588 - DNA, 842 bp, Homo sapiens
agcggatggcggcggtggcggtggcggcggctggtgcgcgcctgagaagaggggacgccagcccggtcaggcctcgtgtgcggcctacacgctccgttcgctcgtctcgctcccgcctcccgccccgcgcccggccatggcggacgccgtcgtcctgccctgacgtcccggtgcctctcatcgagtcggacgctgtagcttcgcttatcgcccggtacctatcggctgggcccgtgtcggagagcggaccagtgtgctggtgcaggagtctggagcgagttgaccgagttgtatgccgaaatgagatgtggactagtggatgtggcaatcgagcacaacaggagctacgaggagtcggtctcgtccaactaatgcatgttggctcctgatcatcttttgcaaatctgcgaacgcagtcggtcctatgttggatagaagaaattccagcacagtatttcgaagagttacttctttacttggtgcacgaaggcagtctttgctacgtacagcagaaggtaccttaactttgaagaagtgtcctgctttgtatcagtagcctaataattattataagttgtgcaagtattgtaaagcatgtgcgaagcaaaggtgactacttgtaactattaatcatgctgtggactataaaaattcttctgcatttagccatagaacattgacttttattaccattaagttgtttaactgggtccttctgcatttaaaaaagttgattacgatattagatgttcagcttaaaaagcttgaagttattctgagaatgttgttgacgtttaatcaatgtgacgttcttaacttttccattttggtagctccctcct

SEQ ID NO: 494589 - DNA, 4454 bp, Homo sapiens
aaataaagaaagatattttcatgggcagaagatgccactcctcttcccttactccattacgacacttggattaaaattaagtgatagaacaagtaaattcaaaaaaggaaaaaagaactaaataaatcagttcgatccatccttctggcttaccttccacagtcctcttgtcccctcttgctggtaaatgttcatgaagttgcctatcattcctccttgaatggtgttgctttgcgcttgcatccgaatctagagattattttaaagaccaacatcagaaagaaactaccacaatcccacccacaaccaatgtatacctctgacagtcagtccgtcagtcagttgcttaataaccattagcaaggaaaaaactgtcatataaatactgctatgatgctaccttaaaatgactaaaacgtataaaaatttattcttaggaactctgagatctccaaaaagcatctaagagagtccagagtcctacgtacagcagttcattaaatgtcaaaaggagaaactgatttttgtgaaaaaagtctttctaggatagaaaacagcatacttccctactactatataggtgagagaaaagttaatttcaaaggtttaatctaattaatgagttatccagtgtacctggcagcacgaagcacaggcaagcatagttcttaaattagctgctccaagccactacagtctccagccagctgaaccaaaaggtatgcaggcgagctagccaagtgacagccacatgatacctgttacactctgttacactttaattagtggaatccacatgaccaagattccaacataaaaagaatgtttgatgtagctctttgcatttttaagaatgaagaaagattttttactacaaaatgtgtaccttatttttgtttagggagcaaatacgttaccactaacttctaaaagaactgttattgccacacgaacgtgggaaaataaaccaagatacaggaactgccttcccataaggcctaagatataattaagaaattaatgagagtacgaatatttttctctagctctcttaccccaacactggtaaacttatggcaaaggtacctgtatttcttccttacccacgaggtccctttgctacaatgcatatataactgtagtgtacccagaatactgcagatggctgtaatgcttgtcagaatcccctattagattgaaggctctctgagggcagggtccttgtcttactcatatttggattctaaccatggcgtataccaactggtacaagatagaagcatagaatactagttaaatagtggggcagaaaaagaaaagaggggaagtaggaaaggaatactctgtggggttcaaaaagtaagtcattcctaatttttattttatttaattagttgcttccaaaaaaggatttaaagatgctctatccctagtattttcaataaggtctcctaatgtgttatgtaatctaattgtagtaattaaattttttcatctgtatttcctgaaataaattacaagagatacagcatgagccacggcacccggcctctaaaacgattcgtaaaattcaaaatccaacaaaaacacaggtgggtccagatgtggcaaattattagctcactaagtgaaagcctagcccctcatatttattctcaatgaaaatgtaagtgaagaagttcaagacagaatcaggaaaaacaagcctactttcctccatccgatatgcctgtcctattatcctctccaaaccaacaaccacgttgtggcatggacactccccgggtgtctttctgcatttccccacttccttcttgaattgcaatcagggtttctgctgccctcaccctcaaaactcccctcttcaaggtgaccaactgacatctttgttgctaagttaaatgaggcttttcaagtaggatcttgtataagctctttgcagtgtgtgccactgtttaccctttgtcctacttgtagctgtctcctccctgttctgctgtagcatcaccccctctgacttcttttcttttctctacagcatcctacctgtgtctgctggggttccccagaaatctatcctatgcttcttctctccttactgtacatgttccctgtgtgagctcacctactcccaaggcttcaactgccatctaaaggctggccaggcacggtggctcatgcctgtaatcccagcactttgggaagccagggcaggcagatcactgcacctcaggagtttgagaccagcctggacaacatggcaaaaccccatctctataaaaaatataaaagtagcgccagacacggtggctcgcgcctgtaatcccagcactttgggaggccgagacgggtggatcacttgagatcaggagtttaagaccagcctagacaacatggtgaagccccgtctctactaaaaatacaaaaaactggccggttgtcatagctggtgcctgtaatcccagctactcgggaggctgaggcaggagaattgcttgaacctgggaggcagaggttgcagtgagcctgggcaaccgagtgaaacgccatctaaaaaaaaaaattgtgtgtgtgtgtttgtgtgtgtgcagctaggtgcagtggcttgttgtgcctatagttccagctatgtagggggctgcaatgagaggatcgcttgagcctgggaggtggaggctgctgtaagccattttgtgccactgcactccagcctgggtgacaaagcaagaccctgtctcaaaataaataaatgaaaaataaaataaaagactgatgactccaaatccatgcttccaacatggatccaaagacacatttccaatcttccaagattctccatttagatgtcctgtgtataccttcagatagggtcccacactgaactacttctcttccttctccaaacagtcatctctcctcttgtgtttcctaaaccaggacatggaagctccagctacacactggcaaaaaccaccaattgagacattagtcttggctcctccttcccttctacccgcttcatgtatggaaacctcatattaggtcacgtagtgctatcagtcctacaccctaaatagttttctagcctgtcttctttttcctcatccccaaaaccaattcagatcctcatctagtcttcctacatgacagccctgcttctagtgctccctgtctcttaattctttctctccatggcaggcaggtgatgtttacaatgtaaagctgatcaggtccatcctcctacttaaacactttcagtggcttctgtctgccatagatatagcaaactcaaatgctgacaggtaccaagaaagcagatgccatgagtgaatgatccaggctgggtcgaactgcacacacatatactatgtgagtgacagaggttttgtaaaccagagacagtatccttcaccccagctactactgtcataactgaatgaatgtgggcctaatgttgatttctctcaagaagatggagtcccagatttttatgtgcaatttctcatttttaaaatattggctcaattaaaaaaacaaaaacctctggggattggtggatccatggcagggctgtgggtcaccagtttgtgctgtggtgtactggagaaaatcaagatgcttagcgtgacatgaggctgtccacgttcttttcctgcaggtattctgatataggtctcactcactatccagtgcctacagaatactgttcattaaatactgaaagactggaaagtagttcactgcaactcttatcaacatcatataattttcaatatggcaaaaacctccttaattcagaatatctaagaaaagagctattttcaaagcatgaaaaaccgaacagaatgtttttaaacaaacaataatttttaatggtgtctgtctgtactgaatatagtaaaacagtttcaccaaaacatctgctgcataatatatatacttagaaattagagttgaaattaaaagtgaaaaatctgtcatgctattgttctttcaaacacacctcaaacttttacttgtgatctgtgcagtcttggtctgaagtctatacccatgtgaaacagtgaacagtgacacagaaatgcatgaaggcctactcaccccgagtagagtgctttcagcccttcttctctgcctatcctcactaatgcgtgcaacattcctcggtatctaatttccttaaattttgcatcattcgtctggccttgaatctggagccgtgtcttggttaaatcaattggaaatgtaccttaaaatttaaaaagaaattcacttaataaaaagaaattccactaaataaaggatacgtagtgatatattactgaggaaacattcagactacaatataaactaagaaagtgattaagaaatggcactttgcaatcttgtttatatttttaaaaattgaggaatcaaaagattaataaaacccaaaaaatgcatagatataaaaa

SEQ ID NO: 494590 - DNA, 127 bp, Homo sapiens
caagatggtcctcactcactggatctgcaagtgagctgagagaacaaagtagaaaccataacctttggccaggcatggtggctcacgcctgtggtcccagcactttggaagctgaggaccatcgttg

SEQ ID NO: 494591 - DNA, 207 bp, Homo sapiens
ctaaggcttatatgatttctttaaaatttaagataattggagttaaaaggcttgattatggtaccaaggcatggactctgttggccattcaggccaaggtttatgggggcaattaaaaagggctacacttggaaaatttggccaaaacaaatgtaaccccccctcccagagcaagctggaaaattttcctatattgcagaagtatca

SEQ ID NO: 494592 - DNA, 675 bp, Homo sapiens
gggttccatccggctctctttcctctcacaaatttggatagcagccgggggataggaggcggccctccatttccccccgcaatttttaagcgggtattttttagttggtttcccctttttttcaaaactaacttggccaaaaccaaatgagatggccaggctcttttgttttttttgttttgttttgggttttttttttttttggccgcgccccggattttaaaactgggcggtggaaggtgcacaccgttggttggagcgggcatccccccaagtttcccatgtggcccggggctttttttgccccttgttgttttttttaaagtccttcccaatattggaggccttgttcaggggggtcccctgccctccttaaagccccccccctttttttttaggggaaggggcccgtcctttccccagtcccccccggggggggggtagccttgcttttgggttaattttgtaaagccaaattttttttattttccccctaaaaccttttttttttgtttttttttgaaaaaggggcccttggggccccccctcccccctttttttgcccccccctttaaaggtttaaggggttttggtttccccgggggggggggggggccccccggggtttccttttccctttctttgggcccgttttattaaagggcccccccttta

SEQ ID NO: 494593 - DNA, 622 bp, Homo sapiens
ggttgcctgatcctgggctcgttggcggcgtcactgatcagcttcgctccggatcctcggaatcccgtagtcgcggggaggcagagcgtctgtgagctgcttgtccccatcctgcggtcgtcctggggacacagagccctccgtggtgcccggggtattggtgattgtgagccaggtacctcgatcttcctcctcgtgcgccctgccctctggccctctcccagcacctggtgccacagcctgatggcacgcccatggtctgggcctgggtggcgatggcgtcacgtggtgtcccctctttggcctggctcgcgtgactgcctctgggtcctgggtggcaggtccttccttgataggggtgccgtcattgcacaggacatgcccagaacactcgggttccaacatcgggaggaagaggaaagtacgcgcacatctacgggacgggagggatactagatagattttcttgcccctcccaaggaatccaagccgtgattaccggggggtctgcaacgcctaggttcactgtgaaccgcgagcagcccgttttactcctccggttttccccagcaccgatggatcgtgtccttaggtgtaggatcctgctctggcttttcgatga

SEQ ID NO: 494594 - DNA, 319 bp, Homo sapiens
cagaaggagggcaggatgagctgccgacgtgtccaccacctcctggactcttccgcagggacttcggcagcttcgagcacattttgcaaaagcgtcgagtatttctttctcaggcttgttgctgtcaatcagcttggtcacctccttcaccaggaattcacacaccttacaggaaacatcagactttgctgagacctcgcgctttttaatgggctccaccagctccagggcaggtatgacattcttggaggccactttggcgggcaccagagtctgcatgggcatctctttcacctcatcacagaacccaaccagcgca

SEQ ID NO: 494595 - DNA, 794 bp, Homo sapiens
agcggggtggcagacttggtcgggtctgccattccgcgctgtggaggtttgttttttactctttgcagtaaatcttgctgctgctcactctttgggtccgcactgcttttgtgagctgtaacactcacggagaaggtctgcaggttcatttctgatgccagcgatggacacgcagcccgccaggaggagatgaaactgccgaacgctgccgaacatcagaaggaacaaactccaatacacgccgcctttaagaactgtaagcatcctggagggtccggcggcttcatgaagtcgcagagaccatggaacccaccaattccggacacaatatgcactcattgcactccgagcctgggtgacagagtgaaaccctgtctcagaaacttagcttccattgacgaccagctttggctgttccaatctcactcacaggctctgaaagacccatgctcgtctttggattgcttggtacctgcagcacgtttccatgcctgggagggagaatacagagtaagtgaacagtttatctcttactggaacagttccaatgctcttagagattataagtaagtgaatgaaaacaatgagttcaggcattcagtgggaaaatccgactctgaacaggtatggaggtgggtctggatttggtcaacatttcacttcgctactcgtctgaaatgcagctcagagcgaagggaggccagcaatcaggtaacgcacgtcatggtgagagtacctttggtcaccacgggaaaacaaaactaacaagtgtttggcaagagacacagatcgga

SEQ ID NO: 494596 - DNA, 978 bp, Homo sapiens
  misc_feature (61)..(61): n is a, c, g, or t
  misc_feature (72)..(72): n is a, c, g, or t
  misc_feature (80)..(80): n is a, c, g, or t
  misc_feature (129)..(129): n is a, c, g, or t
  misc_feature (157)..(157): n is a, c, g, or t
ggactccgtcgtccgcccgcgccctgagggagcctgtgcgcgtcgactgcccagagtccgngaatcctccgntccgagcncgtccggactcccccgatcccagctttctctcctttgaaaacactaagnataatgtcactgcatcagtttttactanagcaatcacctgtcatgcctggagtcagtggctcgtactcagaattgccctcagtacccagataatcacgacgtgcacctctataagaacgaacgggagccagagggtgaacgctcatgaactcaaggatcacaacggagacatcacaggtattgactgggctcccaagagcgatcgcattgtcactctgtggggcagaccgcaatgcctatgtctggagtcataacagatggtgttaggaagccaatcctggtgatcctgatgaattaatcgcgcagctacttttgtgaagtggtcccccctagagaacaactttgctgtgggaagtggagcacgactcatttctgtacgcaactcttgagtctgaaaatgactggtgggtgagcaagcgacatgaaacaagccgattcgctccacagtcctcagtcttggattcggcattcccaacagacgtttccgctggcacgcaggatcatgtgacttctcaatgtcggagtgtaactctgcctactattacacagacgtggctgcaccaagccgagccagcacgcccctggggcagcaccgatgccctttggggcagcctactgtcaaaagctcagttgccatgtgtgcacctgagcggcttgcgtcccacagggggtcaagacctccgcgtgccaactgaggaccccgcctttggccaggcgtcaggccacggacgagcaaaccggttactgagggccgatgtcctaagcaacacgccgcaggcacccgaacgccggaaacacacgacatttacagcacacaccatccgtgggccccttagcgtgcagaaaaac

SEQ ID NO: 494597 - DNA, 548 bp, Homo sapiens
  misc_feature (246)..(246): n is a, c, g, or t
  misc_feature (253)..(253): n is a, c, g, or t
  misc_feature (363)..(363): n is a, c, g, or t
tatcccgattgttcttcaagagtctgccaccagccaccaagatgatgactggtatatatataatttctagctcggttgtggtggatcacgcctataatcgccagcactttgggggaattaagggttggatcacttgagctcaggagtttgagaccagcctggccaacatggtgaaactgcatctctacaaagaaaaaattagtcaggcatggtggcgcatacctgtagtcccagctacttgggagnctgaggngggaagatcacttgagcccgggagttgaggctgcaatgagccggaatcacagcactgcactctagcctgtgcaacagagaccctgtctgaaaaacaaaaaaagttggtcntccagggagtcagtgcttcctgctcctcttgtgttactttttcctctcctgtctgaaacctccttttactgttgtcctccactggttaccatcatcatcttcaagtatttgtacgatacctcctgggtctgtctatactctaacatcctgataacactttttctgttacattagggcctcaccag

SEQ ID NO: 494598 - DNA, 158 bp, Homo sapiens
tgagctctagtctatactagacctgatctatactacctatttatccgtggcctatctatgctcgtcatctatactgacatatctatacagaccgatctatactgacctatctatactgacttatctatactgacctaatctatcctgacttatctatc

SEQ ID NO: 494599 - DNA, 696 bp, Homo sapiens
ctgcaagcaaggctaccagctcatagaggggaaccaggtgctgcattccttcacagctgtctgccaggatgatggcacgtggcatcgtgccatgcccagatgcaagatcaaggactgtgggcagccccgaaacctgcctaatggtgacttccgttacaccaccacaatgggagtgaacacctacaaggcccgtatccagtactactgccatgagccatattacaagatgcagaccagagctggcagcagggagtctgagcaaggggtgtacacctgcacagcacagggcatttggaagaatgaacagaagggagagaagattcctcggtgcttgccagtgtgtgggaagcccgtgaaccccgtggaacagaggcagcgcatcatcggagggcaaaaagccaagatgggcaacttcccctggcaggtgttcaccaacatccacgggcgcgggggcggggccctgctgggcgaccgctggatcctcacagctgcccacaccctgtatcccaaggaacacgaagcgcaaagcaacgcctctttggatgtgttcctgggccacacaaatgtggaagagctcatgaagctaggaaatcaccccatccgcagggtcagcgtccacccggactaccgtcaccatgaacaccgacgattgttgacgacgccccgtcccacgcgagcatggcctacagttccaat

SEQ ID NO: 494600 - DNA, 125 bp, Homo sapiens
ggaagctgtcatcatcttcttctgtcatctccttggcaaactccaagatcctgcgtgttctcgcatcacgcccgttcgctctgcacgactccaatgtccttgtttgtacagatgttgggagagaa

SEQ ID NO: 494601 - DNA, 1441 bp, Homo sapiens
ctgcaagcaaggctaccagctcatagaggggaaccaggtgctgcattccttcacagctgtctgccaggatgatggcacgtggcatcgtgccatgcccagatgcaagatcaaggactgtgggcagccccgaaacctgcctaatggtgacttccgttacaccaccacaatgggagtgaacacctacaaggcccgtatccagtactactgccatgagccatattacaagatgcagaccagagctggcagcagggagtctgagcaaggggtgtacacctgcacagcacagggcatttggaagaatgaacagaagggagagaagattcctcggtgcttgccagtgtgtgggaagcccgtgaaccccgtggaacagaggcagcgcatcatcggagggcaaaaagccaagatgggcaacttcccctggcaggtgttcaccaacatccacgggcgcgggggcggggccctgctgggcgaccgctggatcctcacagctgcccacaccctgtatcccaaggaacacgaagcgcaaagcaacgcctctttggatgtgttcctgggccacacaaatgtggaagagctcatgaagctaggaaatcaccccatccgcagggtcagcgtccacccggactaccgtcaggatgagtcctacaattttgagggggacatcgccctgctggagctggaaaatagtgtcaccctgggtcccaacctcctccccatctgcctccctgacaacgataccttctacgacctgggcttgatgggctatgtcagtggcttcggggtcatggaggagaagattgctcatgacctcaggtttgtccgtctgcccgtagctaatccacaggcctgtgagaactggctccggggaaagaataggatggatgtgttctctcaaaacatgttctgtgctggacacccatctctaaagcaggacgcctgccagggggatagtgggggcgtttttgcagtaagggacccgaacactgatcgctgggtggccacgggcatcgtgtcctggggcatcgggtgcagcaggggctatggcttctacaccaaagtgctcaactacgtggactggatcaagaaagagatggaggaggaggactgagcccagaattcactaggttcgaatccagagagcagtgtggaaaaaaaaaaacaaaaaacaactgaccagttgttgataaccactaagagtctctattaaaattactgatgcagaaagaccgtgtgtgaaattctctttcctgtagtcccattgatgtactttacctgaaacaacccaaagggcccctttctttcttctgaggattgcagaggatatagttatcaatctctagttgtcactttcctcttccactttgataccattgggtcattgaatataactttttccaaataaagttttatgagaaatgccagtgtgcaaaatgaaaaaaaa

SEQ ID NO: 494602 - DNA, 2003 bp, Homo sapiens
ctgcaagcaaggctaccagctcatagaggggaaccaggtgctgcattccttcacagctgtctgccaggatgatggcacgtggcatcgtgccatgcccagatgcaagatcaaggactgtgggcagccccgaaacctgcctaatggtgacttccgttacaccaccacaatgggagtgaacacctacaaggcccgtatccagtactactgccatgagccatattacaagatgcagaccagagctggcagcagggagtctgagcaaggggtgtacacctgcacagcacagggcatttggaagaatgaacagaagggagagaagattcctcggtgcttgccagtgtgtgggaagcccgtgaaccccgtggaacagaggcagcgcatcatcggagggcaaaaagccaagatgggcaacttcccctggcaggtgttcaccaacatccacgggcgcgggggcggggccctgctgggcgaccgctggatcctcacagctgcccacaccctgtatcccaaggaacacgaagcgcaaagcaacgcctctttggatgtgttcctgggccacacaaatgtggaagagctcatgaagctaggaaatcaccccatccgcagggtcagcgtccacccggactaccgtcaggatgagtcctacaattttgagggggacatcgccctgctggagctggaaaatagtgtcaccctgggtcccaacctcctccccatctgcctccctgacaacgataccttctacgacctgggcttgatgggctatgtcagtggcttcggggtcatggaggagaagattgctcatgacctcaggtttgtccgtctgcccgtagctaatccacaggcctgtgagaactggctccggggaaagaataggatggatgtgttctctcaaaacatgttctgtgctggacacccatctctaaagcaggacgcctgccagggggatagtgggggcgtttttgcagtaagggacccgaacactgatcgctgggtggccacgggcatcgtgtcctggggcatcgggtgcagcaggggctatggcttctacaccaaagtgctcaactacgtggactggatcaagaaagagatggaggaggaggactgagcccagaattcactaggttcgaatccagagagcagtgtggaaaaaaaaaaacaaaaaacaactgaccagttgttgataaccactaagagtctctattaaaattactgatgcagaagaaaaacaaaaaaaaaaaaaaacaaaaaaaaaaaaaaaaaaaagggcggccgggcgccggtcaaaaaagatttctctccccccgggggggcgcccaatgtagtcgcgcgcggataccccaggtttctcttggataaaaggggggcgccccatataagggggcgagcccgatatttatatcaacgccgaagagcgacgctggcgcggctgttctacaacaaagcgccgcgaagcagggaaaaccggtgaatcaggtgggggaactctcgtcgcgggaagggaacccctcctactcttcgcgcgggggagcgacctcatacgtgtgggacacaaatctttccctctatagggcagatttattagccgctctcagtggcgggacaattcaatcacacactttttagaaggctgtatatatcagcggtggttaaaacaccctagccggcgacatatgtggacctggggccgcgtagaagaaaccttctgtggctacatgaggagggcggatcttgtctctctctcttggcgaacacgatattcttttccaccggggggcgcccttcacgtcgataaataatgtccgttggttgctctcgcgccatccctgacgcttctcggctgcggtcgtcgtccgtgacctcgacgccgatcgccgttgtcgcatggcggtcgtccatctgggccccggccagccgaccccgccccgcggtgtcgagcgcggccgctcgctctctcagtcgacgccctggcgagtgcgtccttctctgtcgcgcgcttgtgt

SEQ ID NO: 494603 - DNA, 1311 bp, Homo sapiens
  misc_feature (890)..(890): n is a, c, g, or t
  misc_feature (1311)..(1311): n is a, c, g, or t
ccacgcgtacgggcgaccgctgagtgccgcggagagtgacggctggcccggtcgacgggagcctggggcggggctggctgtgcccagctgaatggatgcgcgctggtgctgtgtctggcccctgcccccgtcccctgccctgccgttccctgtgttgactcttcagtggtgccctgggatgtgctgggctgcgatgtgccccatgcgtgctggctgtgctgtggatagttctgtcgcatgtgatgcgagacacgactcattctgactggtgcgaacgtgttgcctgctgtgacttgacacacttcttgctgctgttccggactgtgctgcctgacgttgcgcttgtgacgtgcagtgccaaccatgatgggaacaaccatccgagatgtgcaggaatgcttcaacgtgatgacgacttgccgtacacaggccgaccttgatggctacgactgtgagcagacgtatacgcacgaggagtcgcgcagaacgagatagtagagccgcgagtacgactacacactatcaactcgcaagcgacttgaccatcgagcacgcagcgcgatgcatagcagcctgcattgcacatgtcgacccaagtcacatgtgcaacgcacgcacaccactcacgagagcaccacaagcagcactgctacgcatagtatcactcggcactcaacacgagaaagcagctggcatcccgaagtcgacaccacacatataccgcacacgcagtgcgcactcggaatcgctcatccaagaccaggacacgcaccaccagcacacacacaaccaaacgcacccgagcacacaggcctacgcagaactaacacacgcacggaccgatgacatcgacgcgggcacaacccggaccaaacgcactaggagcgcancacataacaagaacactggggacctgcgcgcccgacgagaaccacgaaccaagaccactcgaggagaagctacgcagaccacgcaaactccgagaacgataactgcgtgatctactcactcagaagcgtaggccgccaagaacggcatggataagcacggctgagacccccacacatgcgagcgacgcacataccgggatcacaacggacaggcgaccgaactgagccaaacgggcagagcacacgcagggcaccggacggagcaatcaacaccggtgctaggagcaccaccaagcgctatcagcacacccgagcgcggacacgcctccacgacagcgtgcaaatcgcacgccgtaccgcgcagacaccacaccgagcagccacccacagaccccccatacaacgacaagacaaccagccn

SEQ ID NO: 494604 - DNA, 1039 bp, Homo sapiens
  misc_feature (47)..(47): n is a, c, g, or t
  misc_feature (66)..(66): n is a, c, g, or t
  misc_feature (92)..(92): n is a, c, g, or t
  misc_feature (96)..(97): n is a, c, g, or t
  misc_feature (106)..(106): n is a, c, g, or t
  misc_feature (128)..(128): n is a, c, g, or t
  misc_feature (135)..(135): n is a, c, g, or t
  misc_feature (140)..(140): n is a, c, g, or t
  misc_feature (145)..(145): n is a, c, g, or t
  misc_feature (180)..(180): n is a, c, g, or t
  misc_feature (193)..(193): n is a, c, g, or t
  misc_feature (196)..(196): n is a, c, g, or t
  misc_feature (200)..(200): n is a, c, g, or t
  misc_feature (211)..(211): n is a, c, g, or t
  misc_feature (213)..(213): n is a, c, g, or t
  misc_feature (231)..(231): n is a, c, g, or t
  misc_feature (238)..(239): n is a, c, g, or t
  misc_feature (242)..(242): n is a, c, g, or t
  misc_feature (248)..(248): n is a, c, g, or t
  misc_feature (250)..(250): n is a, c, g, or t
  misc_feature (271)..(271): n is a, c, g, or t
  misc_feature (276)..(276): n is a, c, g, or t
  misc_feature (279)..(280): n is a, c, g, or t
  misc_feature (282)..(282): n is a, c, g, or t
  misc_feature (289)..(290): n is a, c, g, or t
  misc_feature (292)..(292): n is a, c, g, or t
  misc_feature (295)..(296): n is a, c, g, or t
  misc_feature (298)..(298): n is a, c, g, or t
  misc_feature (302)..(302): n is a, c, g, or t
  misc_feature (322)..(322): n is a, c, g, or t
  misc_feature (331)..(331): n is a, c, g, or t
tctctctactagctgccccaacacccctgttatccccaaaggtaacnacgaaagcgcaaaaagctnacgcccttcttttggtatgtgtttcnctgnngcctaccanaaaatgttgggtaggtgttttnatgtaantcttnggtanatttcactctccattcgcgcaggggttcaggcgtnccaccaccggatnaancctnacagggttgantncctaacgaattttttgangggggannatncgcgcntngctaggagcttggaaaaatangtgtnacnnantggggtnncnaanntnagtnagggagtgtgcgctccgctnaccaaacgnatacccttctacgacctgggcttgatgggctatgtcagtggcttcggggtcatggaggagaagattgctcatgacctcaggtttgtccgtctgcccgtagctaatccacaggcctgtgagaactggctccggggaaagaataggatggatgtgttctctcaaaacatgttctgtgctggacacccatctctaaagcaggacgcctgccagggggatagtgggggcgtttttgcagtaagggacccgaacactgatcgctgggtggccacgggcatcgtgtcctggggcatcgggtgcagcaggggctatggcttctacaccaaagtgctcaactacgtggactggatcaagaaagagatggaggaggaggactgagcccagaattcactaggttcgaatccagagagcagtgtggaaaaaaaaaaacaaaaaacaactgaccagttgttgataaccactaagagtctctattaaaattactgatgcagaaagaccgtgtgtgaaattctctttcctgtagtcccattgatgtactttacctgaaacaacccaaagggcccctttctttcttctgaggattgcagaggatatagttatcaatctctagttgtcactttcctcttccactttgataccattgggtcattgaatataactttttccaaataaagttttatgagaaatgccagtgtgcaaaatgaaaaaaaa

SEQ ID NO: 494605 - DNA, 263 bp, Homo sapiens
cctatgctacacattttaactttaagctacgacccagtatgaaatatgagtcctagggggagtactatgctgtatgtacatgacatgctctgcagtctctacggaaatattggattcaagatagctgactgttggacctggcatcaaatacacgcccatgtatccttctgtcgtaaagtaagaacgctcttgcatttgatgtggactaaatatagatgatatcactatctgctattctgcctttgttctgaaacaattgcttt

SEQ ID NO: 494606 - DNA, 1390 bp, Homo sapiens
ctgcaagcaaggctaccagctcatagaggggaaccaggtgctgcattccttcacagctgtctgccaggatgatggcacgtggcatcgtgccatgcccagatgcaagatcaaggactgtgggcagccccgaaacctgcctaatggtgacttccgttacaccaccacaatgggagtgaacacctacaaggcccgtatccagtactactgccatgagccatattacaagatgcagaccagagctggcagcagggagtctgagcaaggggtgtacacctgcacagcacagggcatttggaagaatgaacagaagggagagaagattcctcggtgcttgccagtgtgtgggaagcccgtgaaccccgtggaacagaggcagcgcatcatcggagggcaaaaagccaagatgggcaacttcccctggcaggtgttcaccaacatccacgggcgcgggggcggggccctgctgggcgaccgctggatcctcacagctgcccacaccctgtatcccaaggaacacgaagcgcaaagcaacgcctctttggatgtgttcctgggccacacaaatgtggaagagctcatgaagctaggaaatcaccccatccgcagggtcagcgtccacccggactaccgtcaggatgagtcctacaattttgagggggacatcgccctgctggagctggaaaatagtgtcaccctgggtcccaacctcctccccatctgcctccctgacaacgataccttctacgacctgggcttgatgggctatgtcagtggcttcggggtcatggaggagaagattgctcatgacctcaggtttgtccgtctgcccgtagctaatccacaggcctgtgagaactggctccggggaaagaataggatggatgtgttctctcaaaatagtgggggcgtttttgcagtaagggacccgaacactgatcgctgggtggccacgggcatcgtgtcctggggcatcgggtgcagcaggggctatggcttctacaccaaagtgctcaactacgtggactggatcaagaaagagatggaggaggaggactgagcccagaattcactaggttcgaatccagagagcagtgtggaaaaaaaaaaacaaaaaacaactgaccagttgttgataaccactaagagtctctattaaaattactgatgcagaaagaccgtgtgtgaaattctctttcctgtagtcccattgatgtactttacctgaaacaacccaaagggcccctttctttcttctgaggattgcagaggatatagttatcaatctctagttgtcactttcctcttccactttgataccattgggtcattgaatataactttttccaaataaagttttatgagaaatgccagtgtgcaaaatgaaaaaaaa

SEQ ID NO: 494607 - DNA, 599 bp, Homo sapiens
gcggccgcctactactactactgctcgaattcaagcttctaacgatgtacggggacatgttctgtgctggacacccatctctaaagcaggacgcctgccagggggatagtgggggcgtttttgcagtaagggacccgaacactgatcgctgggtggccacgggcatcgtgtcctggggcatcgggtgcagcaggggctatggcttctacaccaaagtgctcaactacgtggactggatcaagaaagagatggaggaggaggactgagcccagaattcactaggttcgaatccagagagcagtgtggaaaaaaaaaaacaaaaaacaactgaccagttgttgataaccactaagagtctctattaaaattactgatgcagaaagaccgtgtgtgaaattctctttcctgtagtcccattgatgtactttacctgaaacaacccaaagggcccctttctttcttctgaggattgcagaggatatagttatcaatctctagttgtcactttcctcttccactttgataccattgggtcattgaatataactttttccaaataaagttttatgagaaatgccagtgtgcaaaatgaaaaaaaa

SEQ ID NO: 494608 - DNA, 319 bp, Homo sapiens
  misc_feature (40)..(40): n is a, c, g, or t
cactttatagatcccctctttggtggtgctctcaagtcangagcttttatcttctgccatctatgataacacagtgaatctgtaccggcagaaggatgataactgggtatactctcccacccttgagggccatgaatccactgtgtggagctgggcctttgaccctagtggccaacgcctggcgtcttgtaatgatgaccgtactgtgcgtatctggcgtcagtatctaccaagcaataaacaaagggtggcatgcaacggctcttaccccaaatggaaatgtatctttacttttaccggctttcactcaaagaccatt

SEQ ID NO: 494609 - DNA, 1399 bp, Homo sapiens
ctgcaagcaaggctaccagctcatagaggggaaccaggtgctgcattccttcacagctgtctgccaggatgatggcacgtggcatcgtgccatgcccagatgcaagatcaaggactgtgggcagccccgaaacctgcctaatggtgacttccgttacaccaccacaatgggagtgaacacctacaaggcccgtatccagtactactgccatgagccatattacaagatgcagaccagagctggcagcagggagtctgagcaaggggtgtacacctgcacagcacagggcatttggaagaatgaacagaagggagagaagattcctcggtgcttgccagtgtgtgggaagcccgtgaaccccgtggaacagaggcagcgcatcatcggagggcaaaaagccaagatgggcaacttcccctggcaggtgttcaccaacatccacgggcgcgggggcggggccctgctgggcgaccgctggatcctcacagctgcccacaccctgtatcccaaggaacacgaagcgcaaagcaacgcctctttggatgtgttcctgggccacacaaatgtggaagagctcatgaagctaggaaatcaccccatccgcagggtcagcgtccacccggactaccgtcaggatgagtcctacaattttgagggggacatcgccctgctggagctggaaaatagtgtcaccctgggtcccaacctcctccccatctgcctccctgacaacgataccttctacgacctgggcttgatgggctatgtcagtggcttcggggtcatggaggagaagattgctcatgacctcaggtttgtccgtctgcccgtagctaatccacaggcctgtgagaactggctccggggaaagaataggatggatgtgttctctcaaaacatgttctgtgctggacacccatctctaaagcaggacgcctgccagggggatagtgggggcgtttttgcagtaagggacccgaacactgatcgctgggtggccacgggcatcgtgtcctggggcatcgggtgcagcaggggctatggcttctacaccaaagtgctcaactacgagaattcactaggttcgaatccagagagcagtgtggaaaaaaaaaaacaaaaaacaactgaccagttgttgataaccactaagagtctctattaaaattactgatgcagaaagaccgtgtgtgaaattctctttcctgtagtcccattgatgtactttacctgaaacaacccaaagggcccctttctttcttctgaggattgcagaggatatagttatcaatctctagttgtcactttcctcttccactttgataccattgggtcattgaatataactttttccaaataaagttttatgagaaatgccagtgtgcaaaatgaaaaaaaa

SEQ ID NO: 494610 - DNA, 1254 bp, Homo sapiens
  misc_feature (757)..(757): n is a, c, g, or t
  misc_feature (768)..(768): n is a, c, g, or t
  misc_feature (774)..(774): n is a, c, g, or t
  misc_feature (776)..(776): n is a, c, g, or t
  misc_feature (778)..(778): n is a, c, g, or t
  misc_feature (780)..(780): n is a, c, g, or t
  misc_feature (783)..(783): n is a, c, g, or t
  misc_feature (787)..(787): n is a, c, g, or t
  misc_feature (793)..(793): n is a, c, g, or t
  misc_feature (797)..(797): n is a, c, g, or t
  misc_feature (801)..(801): n is a, c, g, or t
  misc_feature (804)..(804): n is a, c, g, or t
  misc_feature (813)..(813): n is a, c, g, or t
  misc_feature (819)..(819): n is a, c, g, or t
  misc_feature (828)..(828): n is a, c, g, or t
  misc_feature (831)..(831): n is a, c, g, or t
  misc_feature (846)..(846): n is a, c, g, or t
  misc_feature (859)..(859): n is a, c, g, or t
  misc_feature (871)..(871): n is a, c, g, or t
  misc_feature (874)..(874): n is a, c, g, or t
  misc_feature (1052)..(1053): n is a, c, g, or t
  misc_feature (1068)..(1069): n is a, c, g, or t
  misc_feature (1083)..(1083): n is a, c, g, or t
  misc_feature (1131)..(1131): n is a, c, g, or t
  misc_feature (1156)..(1156): n is a, c, g, or t
  misc_feature (1160)..(1160): n is a, c, g, or t
  misc_feature (1165)..(1165): n is a, c, g, or t
  misc_feature (1193)..(1193): n is a, c, g, or t
  misc_feature (1196)..(1196): n is a, c, g, or t
cgtaggtaggcgcgggctggtccgtgtgtgctccgtgctcgggcgtccgtccgcggcggcgcgagtgggcgggcgctgtgtttgggtggtcttgccccgtgtttggtgcggtttggtgcggggtgtgtggcgggggtcttcttggcttttcttggcgctgtggtgtgtggctctgtcgtctgggggtgtgggcctggttgcgtccctctttgtttgcctccccacatacaccccttggtgtgaagcaccccacccggtttgggcccccctatggacctcgagtgaccacaaagtgtgcacaataaaccaggcgttgtaaacaccggccctgttctttatttcgggtttctaagggtacgaagcccattgggtggcgggaattttcgccacagaggccatagcacccataggaagaagagtcctaaggaaaaatagaggcgcccacttggggaaaagggggacccggcccttgaatggttaaaatatctccgggcgttccaccaagtgacctggatgttgcgctagggacgcttccggtgttctaccagagttttcaggaagccctcaaggacctgcccccggggcacacaggtgtgagaaaagtgagggcccgtaacaaggaagtgaaattctgagattgtttggggcttaagccgtggcaccccctgcttcccatgcgtccccggcccccacatcacatctggccctccaatagaatattttttgtgtccaattggtggttgttgcgcccaggctnggagtgccagntggcgncncntnttnggcntccacntgcncacnctnccaaccatntcgggnctccaaacngantttctccagcctctnagcctccctgagntagcttaggacntcncaggtgctctccacccacgcccggctaaatttttgtaatttttatagtaagagaatggggtttccccacatggttggccacaggctggtttctgaaactcctggcctcaaggtgtgaatccgcccgcctctcgcctctcccacagcgctgaaagttaacaaggtgtgaaccccaccgnngcccacggccctccnntaggttttaaggangtccccagccctcctcccttctgggcccgacccgcttatactgctccnttttccccggccaaaatgccccccnagtnctgcncagggaccccccacccaggggccctgcnccntgagataatgtgaatacgactgtggacccaacgccaattaaacctctgtttgttccga

SEQ ID NO: 494611 - DNA, 1225 bp, Homo sapiens
ctgcaagcaaggctaccagctcatagaggggaaccaggtgctgcattccttcacagctgtctgccaggatgatggcacgtggcatcgtgccatgcccagatgcaagatcaaggactgtgggcagccccgaaacctgcctaatggtgacttccgttacaccaccacaatgggagtgaacacctacaaggcccgtatccagtactactgccatgagccatattacaagatgcagaccagagctggcagcagggagtctgagcaaggggtgtacacctgcacagcacagggcatttggaagaatgaacagaagggagagaagattcctcggtgcttgccagtgtgtgggaagcccgtgaaccccgtggaacagaggcagcgcatcatcggagggcaaaaagccaagatgggcaacttcccctggcaggtgttcaccaacatccacgggcgcgggggcggggccctgctgggcgaccgctggatcctcacagctgcccacaccctgtatcccaaggaacacgaagcgcaaagcaacgcctctttggatgtgttcctgggccacacaaatgtggaagagctcatgaagctaggaaatcaccccatccgcagggtcagcgtccacccggactaccgtcaggatgagtcctacaattttgagggggacatcgccctgctggagctggaaaatagtgtcaccctgggtcccaacctcctccccatctgcctccctgacaacgataccttctacgacctgggcttgatgggctatgtcagtggcttcggggtcatggaggagaagattgctcatgacctcaggtttgtccgtctgcccgtagctaatccacaggcctgtgagaactggctccggggaaagaataggatggatgtgttctctcaaaagaattcactaggttcgaatccagagagcagtgtggaaaaaaaaaaacaaaaaacaactgaccagttgttgataaccactaagagtctctattaaaattactgatgcagaaagaccgtgtgtgaaattctctttcctgtagtcccattgatgtactttacctgaaacaacccaaagggcccctttctttcttctgaggattgcagaggatatagttatcaatctctagttgtcactttcctcttccactttgataccattgggtcattgaatataactttttccaaataaagttttatgagaaatgccagtgtgcaaaatgaaaaaaaa

SEQ ID NO: 494612 - DNA, 297 bp, Homo sapiens
  misc_feature (224)..(224): n is a, c, g, or t
cgtcgacgcagtgtgagctgagcgtggtggctcatgcctgtaatcccacagtttggtatgctgagctgggaggatacttgagcccaggagatggataccaccttgggcaacatagtaagaccccatcttcacaagaaatttaaaaattaggcaggctcggtggtatgcatctgtggtcccagctactcaaaaggctgaggtgggagaatgccacttaaacctgngaggtcaagactgtagtgagccacgttcattgcactgcactctagcctgggagagagagtgagaccccatctc

SEQ ID NO: 494613 - DNA, 243 bp, Homo sapiens
gacttcatatcagcctacgccattagatggactcctcagatattctgctgatttataggtggtgattgcagctttgatgctatacaggtgagggcagtcttgctacaggagccacatgcgcattggtcttcatgagcatgtctgggatctcccgaagctctgcagttcactgaatcaagctctgaccagccttattgcaaggttggatgcctggtcagagcagcagggaaagacagggcgggg

SEQ ID NO: 494614 - DNA, 340 bp, Homo sapiens
tcgactctaacgatccccagttttattgctataggctattatgattattaatagatcagatatagattggtagtattggttatggttcattgtccggagcagtattttgtagaaaaggatagctattagaaggattatggatgcggttgcttgcgtgaggaaatacttgatggcagcttctgtggaacgagggtttatttttttggttagaactggaataaaagctagcatgtttatttctaggcctactcagggtaaaaaatcagtgcgagcttagcgctgtgatgagtgtgcctgcaaagatggtagagtagatgacgggttgggccaggggattaat

SEQ ID NO: 494615 - DNA, 1134 bp, Homo sapiens
ctgcaagcaaggctaccagctcatagaggggaaccaggtgctgcattccttcacagctgtctgccaggatgatggcacgtggcatcgtgccatgcccagatgcaagatcaaggactgtgggcagccccgaaacctgcctaatggtgacttccgttacaccaccacaatgggagtgaacacctacaaggcccgtatccagtactactgccatgagccatattacaagatgcagaccagagctggcagcagggagtctgagcaaggggtgtacacctgcacagcacagggcatttggaagaatgaacagaagggagagaagattcctcggtgcttgccagtgtgtgggaagcccgtgaaccccgtggaacagaggcagcgcatcatcggagggcaaaaagccaagatgggcaacttcccctggcaggtgttcaccaacatccacgggcgcgggggcggggccctgctgggcgaccgctggatcctcacagctgcccacaccctgtatcccaaggaacacgaagcgcaaagcaacgcctctttggatgtgttcctgggccacacaaatgtggaagagctcatgaagctaggaaatcaccccatccgcagggtcagcgtccacccggactaccgtcaggatgagtcctacaattttgagggggacatcgccctgctggagctggaaaatagtgtcaccctgggtcccaacctcctccccatctgcctccctgacaacgatacttctacaccaaagtgctcaactacgtggactggatcaagaaagagatggaggaggaggactgagcccagaattcactaggttcgaatccagagagcagtgtggaaaaaaaaaaacaaaaaacaactgaccagttgttgataaccactaagagtctctattaaaattactgatgcagaaagaccgtgtgtgaaattctctttcctgtagtcccattgatgtactttacctgaaacaacccaaagggcccctttctttcttctgaggattgcagaggatatagttatcaatctctagttgtcactttcctcttccactttgataccattgggtcattgaatataactttttccaaataaagttttatgagaaatgccagtgtgcaaaatgaaaaaaaa

SEQ ID NO: 494616 - DNA, 715 bp, Homo sapiens
gaaaaattaacttcccctctgttccccaagccttacccgggggggggggggcacccactgtgatcacagctgcccacaccctgtatcccaaggaacacgaagcgcaaagcaacgcctctttggatgtgttcctgggccacacaaatgtggaagagctcatgaagctaggaaatcaccccatccgcagggtcagcgtccacccggactaccgtcaggatgagtcctacaattttgagggggacatcgccctgctggagctggaaaatagtgtcaccctgggtcccaacctcctccccatctgcctccctgacaacgatacttctacaccaaagtgctcaactacgtggactggatcaagaaagagatggaggaggaggactgagcccagaattcactaggttcgaatccagagagcagtgtggaaaaaaaaaaacaaaaaacaactgaccagttgttgataaccactaagagtctctattaaaattactgatgcagaaagaccgtgtgtgaaattctctttcctgtagtcccattgatgtactttacctgaaacaacccaaagggcccctttctttcttctgaggattgcagaggatatagttatcaatctctagttgtcactttcctcttccactttgataccattgggtcattgaatataactttttccaaataaagttttatgagaaatgccagtgtgcaaaatgaaaaaaaa

SEQ ID NO: 494617 - DNA, 774 bp, Homo sapiens
  misc_feature (43)..(43): n is a, c, g, or t
  misc_feature (87)..(87): n is a, c, g, or t
  misc_feature (109)..(109): n is a, c, g, or t
  misc_feature (158)..(158): n is a, c, g, or t
  misc_feature (195)..(195): n is a, c, g, or t
  misc_feature (204)..(204): n is a, c, g, or t
  misc_feature (228)..(228): n is a, c, g, or t
  misc_feature (245)..(245): n is a, c, g, or t
  misc_feature (269)..(269): n is a, c, g, or t
  misc_feature (275)..(275): n is a, c, g, or t
  misc_feature (296)..(296): n is a, c, g, or t
  misc_feature (304)..(304): n is a, c, g, or t
  misc_feature (311)..(311): n is a, c, g, or t
  misc_feature (350)..(350): n is a, c, g, or t
  misc_feature (356)..(358): n is a, c, g, or t
  misc_feature (379)..(380): n is a, c, g, or t
  misc_feature (383)..(383): n is a, c, g, or t
  misc_feature (390)..(390): n is a, c, g, or t
  misc_feature (397)..(397): n is a, c, g, or t
  misc_feature (453)..(453): n is a, c, g, or t
  misc_feature (460)..(460): n is a, c, g, or t
  misc_feature (530)..(530): n is a, c, g, or t
  misc_feature (579)..(579): n is a, c, g, or t
  misc_feature (587)..(587): n is a, c, g, or t
  misc_feature (591)..(591): n is a, c, g, or t
  misc_feature (723)..(723): n is a, c, g, or t
aagactacatgcttaacattaagcttagaaacataattgctgnaatacattaaaaatacttcattttccaatattgtaaagtatatntcccaatacctggtataaatcnccttttgcacaaaaatttaaaggacatcctacagctagctattactacngcgttaagtaatcatttgaaggaataattcacaaggngagcaggtnataaaactaagcataataattatngcatttaactaaaaaanatcaagtagttctgaattacactngtgttnggtcttagtaatgggcatatncactttcnagctacnagtttgataaatatactaagattgtataagagtggggtncccggnnntgggttttctggggggggtannttnctttccngtgtccntccccaacagcagttggaattttcttttgaacacaaagtaaattaatgtttatacngtttttncacctgagtcatgtaaaaggggactcctttcattttaaaaagttatatttaatttttgggggccttaatnaaaatttaacatttaaccatgtgtttttttttgtaaacagtctacatgncaacaaangganaagggttaacaaaggcaaatactgacttcatttgtgttttaaacacgattatatgaatttttcttttttaattaaaaaatgacataaaaccattcatataggtcctcttctctcaactgctttgagatatanctttaaatatgggtagatcaagacaagtaatgttgggaatctcttatcctg

SEQ ID NO: 494618 - DNA, 615 bp, Homo sapiens
ggcaggcaatgacggtgggcacgtgtctgcgcgcgccgagtggggcccctacaagaccgagcccgccaccgacctcgtgcctgctggcgactcaagcctgcgagaaggggccggcagacgtggacctacctgcaggacgagcgcgccggccgcgagcagaccaggcctgtgaagcctacgcccgtgagggctggacaccaagaagttactcttaatggacttgcccatagcccacaccgccgtttgacggggggctctgaacgggatgacatattaacgtgggtgctgcaggctgaggatgggcacatggacgggtgattatggttggcccacgtttatcctcctgatcatggcgctctcgtgatcacttgcacacagtggcacgctatccctctagacagccgtgatacatgacgaagagattgtgctggataccttgcgtgtcaagtgcagcgtccctgacgtgtggctggtggccgtgcacatcgagagatacgtccaccgtgtttgggactgcgctcaactatgtgtctctcagaacttctgggtgttggcgcctgagcgatcctgacctggctacgagcccggaaacattccttcaacaagcaaaaggtg

SEQ ID NO: 494619 - DNA, 379 bp, Homo sapiens
tcctggagactagacagtttcagaatgctaaggcacagcaggagttgaatccagtgtcaagaggattacagagtatctcatacattgctggtgggaatgttacatggtgccgctgttttggaaagcagtccagcagtttctcaaaatgctaaacatagaattacacagtaactctgagataacatcccacttcacggattgaaagagaattgaaagcatatgtctacacaaaaacgtgtacatcaatgcccataggagcattatacataatagccaaaaagtggaaacaacctaaatgcccatcgatggacaaatggataaacaacatgtggtatatgcatatgatggaatattattcagccaaacattcaagccgtca

SEQ ID NO: 494620 - DNA, 179 bp, Homo sapiens
  misc_feature (6)..(6): n is a, c, g, or t
  misc_feature (18)..(18): n is a, c, g, or t
  misc_feature (57)..(57): n is a, c, g, or t
  misc_feature (153)..(153): n is a, c, g, or t
  misc_feature (165)..(165): n is a, c, g, or t
ggcagngcccatggcggngggcggcacccagaacgggcgggcaggccggctccgcanacagggtattgctgtgttgcccaggctgatcttgaaactcctggactcaagtgaatcctgacctcagcctcctgaagatagctgggaattacaggngtgccaccatgncccagcttgtaatt

SEQ ID NO: 494621 - DNA, 149 bp, Homo sapiens
aggccttgggggtggggcctcctttagccccctcctcctgggggatgctccccagggttagggggctggttttaggggaaaaggtggggggttttttttgtaaaataaaaacaaggttttgtacaaaaattaacacccttgtttagaga

SEQ ID NO: 494622 - DNA, 107 bp, Homo sapiens
cctcacagaccctgaagcttcaccggcgcagtcattctcataatcgcccacggacttacatcctcattactattctgccgctgcaaacttgtaccggtggcaaccaa

SEQ ID NO: 494623 - DNA, 430 bp, Homo sapiens
gaaaagggaaggaggtggaggggagggcaatagaggcgggcacactcagtataacttaatggaactatagggtactccctctctgacattttgggcaaattcctctaaaaaatgtttctatacagtaccattccttctcccatcattggcttccatatcagtgccagtattatagaaagatctaggtctaaaagaagccaaaagcagtcttaaataatgggaagctttcgggcagatgggtctaccatcagtctatcgggcagtgtatccctctacatcttctccctcatcatcgggcaggggttgggaagcacggagctccatcaagcggtcttctctaacctcctgggggggggagctaagtactggattttctccaaaccatgatatctggaagtgctccacatctcatctttttgggccatatcta

SEQ ID NO: 494624 - DNA, 228 bp, Homo sapiens
gagcgggattcgtcgctgcggagtgtcgctgcgcactgcctctgccacctcgcggatcaggagccagcgtggttcgccccgatgcctccggtgccggtggagaggaagcgagagggaagccagcgttgctgggattgacgcacggtgcgtcgccctaccgccgtggaaagaagcccagagccaccggtgaccaggtcaggatcgcgttgccaccggctcgtcagccga

SEQ ID NO: 494625 - DNA, 92 bp, Homo sapiens
gagaggcagaggataaaggaggaagagaaaagggcagcagaggagaggcagaggataaaggaggaagagacaatccagcagccagggtcgac

SEQ ID NO: 494626 - DNA, 867 bp, Homo sapiens
  misc_feature (48)..(48): n is a, c, g, or t
ttttttttttagcctaaaaaagcaactttattaatgtcctgcagcagngtacattagtaattataacaatgcattaaaattttcatttcatgtcataaaaaatcagtttccttcatgatgatacatttatgtttaactggagtgagtttggtccctccaaaaaacctttctggggaacatgccttctccagggactgcttcctaaagatgcccaggttgcttaccacaggtcactcttgggtcatttaaaagctcgtcaagctgtctggactgcaccctctcacctgaagttgagccaaattcccttctctcaaaccctaacgccgccatcacctaagacactggggccatctcggcctgggtcagagcattactaacaacgctaatggtggggatactcttgggtcatagactcttaatcttcatttaagcatacaaacaactacagtctaacaagtaggctcctgctatctctaaaagctattttaaatcacacttaacctatgtcctggcgaaaattcaccaccctggactgggtccagtctgcccattcccctgttggaactctagtatcagtcgtcgccattacgcaactccacttgtgagctgacaaaccactgcactgatatctcgcggaccccccaaggggtctcacggccgacctgcccctgctgccaagacatcaccatatccttgtccacatacactttgaacctccctaaaggtgccctgaacccgggttccaccgtgcctttcttcctgacactgccccgttataacccttgcgtcaagagttcctcaacccggtttacctctctctcttacccacatggccttaccccctagctcgcctcatctttcccatgc

SEQ ID NO: 494627 - DNA, 89 bp, Homo sapiens
cgcctctgccaccacgggcttgcagcaagaccatgcaggatgttcctgtggctccatttggtttcaaaagcatttaggggcttccttgc

SEQ ID NO: 494628 - DNA, 762 bp, Homo sapiens
aggaggggagcgggacaggatcacttcaagctatgtgtgaggttgcagaaataagaaggaaatatctccatggtcattgctgaaaatgtcaggcgaggatagagttgatgaaagatcgtgcttaataagggaatatggccatgcaactagtctcagggccataggggatccattgccacccagctgtggtccttatagccagtagatctaggacctcaccagtgaagctgatgatgctgatgatgatgtggtgttatgaatctatacaactccttcaatttctgctccagcaatagctgtcaaagaacccttcatatcggcttcatcaaaaaagttgaaaggcctcaggaaattattctgtaaatcctccttcttcaagagattgtggcatctcagaagggaactatcagtgagaccacttgtatggtgatgaaggaggccttagaacccaatgggggacgcagagaaaaagtctcctgttaatccgaatggggactcctgactaaaaaaaaccaaacgatttggattctcccacttccagcctttcaagaagtaagaccaaacttggggtaaaacctttaaccctgtagaatgactgtcgcgcaacttattcaggaaggggaattgactcatatagcttgggatgcctacaacgaaggtatgcatctccgagaaaagaatcctccaaatttagaccttgtggcccgggaaactgttaaaagcgtaagcagtgctgggaaccacggggaacaatggggacga

SEQ ID NO: 494629 - DNA, 638 bp, Homo sapiens
aaagtctgtttttagctaaaaatcacagtgataactgctctgggaatcaaacctatcattgatcttgagtattttggtccgtctgagaggctccatacttgaatctcatcatcttgatagctgtacccgctgttgaaaatgttaggaatttcacacctttctctgcttcctgtaagccatgttccccagcgtcgtatttattgtccccatcgagctgttctactgccacataatccacaaatgattcaaatatatttttctttcctttgatacttagctggatatcataataatcttctcttctatcagaccgatagtctacttctttacactggatataggacaccattttgccgcggaataatttgggtatggtgccctctacacaggtgcctttcatcttattttccacattatcgagcaacactcgacaaagctcctgaacatcatgttgcatgaagctatctaaagtttcccacccaaatgactttgttaacttttttgttcctacaggtttatcactatgctgtaattcatagaacactctttgtaatgctaaagagacgcttttagacgaatcatccccctcggttggcatcatgtacacagcctttcgtagcttattcgtgaaaaataac

SEQ ID NO: 494630 - DNA, 342 bp, Homo sapiens
catggccgatcaggtacacggccaagtgcaagtcacatctccacatagacatctaccacccaccatggactactacagggcatacatactcctcctcgataggtacttctatacaggtaagacagatcctcctatcaggactctcaatctgaatctccaggtaaactctagaacaggatacagttacagtaccagacaccctgaacagagccatagatgtcggcttccacactacatgacgacaggtacaactctagtactacatacttgagtgcggaaatcatccgaggccagacgggcattgtacaatctgcagaaggacataaggcattgtccactgtg

SEQ ID NO: 494631 - DNA, 190 bp, Homo sapiens
cgttggacgaaggaatgaacggcgcagctcgaacgatgggggcgcggaggagtggagtaccccttgtctcgggtcggtctgagatcccctcgcggattggcgctcctatatgggcgctttaccttcatcttcggcgcgagaggccgcgggtggtgcttacttatttggcgaaaccaaacatatggggcat

SEQ ID NO: 494632 - DNA, 514 bp, Homo sapiens
cgatacactgaagatgaagtgtaaaaaaagagaggcacagaaataggtctcaccaaggaaaaatgataatagtagcttagatataaaactaaatcaacaagtaaataaactatacaggtcaactacaaaccaaaaccagccggaaagactcaacctgaaaaaatgctaaaaaataaggcataaatctgcataatattgagtttcatatccaatctctccttaccctgtacaatgtatgctttacctgatctggctctaggggcttacaagagaacgggtaccggatcccgtcttcaatgtgccctcaaatgtccagaacaaagttattgtcaatctgctgagggtgcttacggaagatgagctttagccatcattatgtctactaatccagtagttaaggacgtagcgccaaatatgactgcttccacttggacttctggaacgacttaaaactctgacagtgccttgcctggaccgtattatgttggaaaagagaaaaccagcaaaattattg

SEQ ID NO: 494633 - DNA, 504 bp, Homo sapiens
  misc_feature (375)..(375): n is a, c, g, or t
  misc_feature (397)..(397): n is a, c, g, or t
  misc_feature (401)..(401): n is a, c, g, or t
  misc_feature (407)..(407): n is a, c, g, or t
tttgagatgaggtctcactatgctgcccaggctggagtgcagtggctgttcacaggtgtgatccttccacctcagtctcccaagtagctgggactacaggcatgtgcaccacacccagatacatgttttaatcacaacagcaactttaattataagtcactctaagatgcagtgatacatacaaagcattctaaaaacaaaaacaatgtttaaaaagcacacatttttacttcaacataatttcttatgcatgtgcagccaatgggaaaatctattatagctattgttgccttttgaggttgagaggaaaggacagagggaaaaattatttacttagtattccttgtcgccatgatctttgtccataaaagtcangaacgcctgtttgtgtttctangggntcaggnttgggatacattacagaagcctgtaaattaaaacacaaacctaaataatagtttatggaactcatcgcaaatcaactcttgcccaacctttgactga

SEQ ID NO: 494634 - DNA, 868 bp, Homo sapiens
cagacatgcgccaccacgccctgctagtttgtatttttagtagagacagcctggccatttgaaccgaggaagaggctgcagtgagccaaggtcatgccactgtactccagcctgggcgacagaggtgagactctgtgtcaaaaaaaaaaaaaggaaaggaaaggaatttaacatttggaatttggcaataactccagcaaataattccttattttatattcccttaagagaattgaacattttttgtttgatttaaaacctgtgtacccgaattgtggctcagcagcatttattcgtaattagccaaaagggtggaaccggttcaaattgtccatgaatcttacgaatgggttaacgcaaaacatggtctctgggcaacagaggtgtgtggcctgtaactctagctactctgggagggctggaaggctgaggcaggaagcctgagcccaagggagtttccaggtcagcctgggcaactttggcaagaccctgtttccctttaacaaaacaaaggtggtgttacccttcacaatgaagtggtttttccccatttggtactggtacttgctatggattcgcattaacttgaaaattgaggttaattgacagaagacgataattttatttgattggtattaattagaaaatgtccggaaaagaggaattcacggcaatggacggttatatcgggggcccgggacaccggagggggtggtaacaaaggggggaagcccaagaggtgggtcttggggcggttaacagtggattgttgtgttggtgtggctcttgtgttcactttaaaacccattggtcttacagggattcaggtgaaattccaaggtgcctacaggtgtaaatgtgaaattgg

SEQ ID NO: 494635 - DNA, 126 bp, Homo sapiens
tctagaggatccacttatgtctgaccacgtattaagttctttttaaaagataaagtactataaagaaaagacagggagaaaaaaatggaattgggcaaaaacattaagggtgggtcagaacataag

SEQ ID NO: 494636 - DNA, 283 bp, Homo sapiens
cagtggttcacatctgtagtcccagcactttgggaggctgaagcaggaggattgcttgagcccaggagctcaagattagcctaggcaacatagtgaaaccccatctctaccaaaaaaaaaaaaaattcaaaaatttagaaaggggtgttggaataaccctgtggccccagtttctcagggggttgagggggaaagttcattggaccctagggggtaaagggtgaactgagccgtgatcgtgccactgaaccccagcctgagtgaaagggaaagatttggggga

SEQ ID NO: 494637 - DNA, 873 bp, Homo sapiens
ccacgcgtccgaacttttctaagcttcaatttctagttatctagaatggggatgattcacctaaatactcttatgcctgtatacttcagggtatatatataagaatgtatatgtgacttgtcaggcaatgtgctataaggcctaataataataattaataaagaatatgttcttagtgttgtatttatttcacttgatgtttataaagtaattatattttggagacttctaacagtatcactattctaagtgccttcctggattaagatggaaaacgagatgatatacataaagtgtacacagtgcttaccacgtagtcagttattcaatcacatattgtcctatcttctcccttctgttacataaagctaatttcgatgcaacttactttagacatgatactctcttaaagtcagatttaattatgtcacatgcattcaaaacattatctctcaaacaatattgccatatgagccctcagatttggagatagcagaactgtcaggtgatgtcaatcacatctttcctcaaagttctacaaagcctgggatatggccgagaaatcccagcatctatgccgcaatctcgcagcaacacagaaatggcaacccccggcagcagcctcaagccaccaggaacgacaaacaaagtggcacatgatccaccacagaaatcgcccggaccaaaactccatcggcagatgaatacaggtgaacccaggagaggacctgggacagaaaacggcacataccaaggcaaccaatcgcgacagccaaccgaaaagacacaccgacccacacaaacccacgcaacccagacacacatcaaccacacaccaacaaaacagacacgcccacaagccaacacgcacac

SEQ ID NO: 494638 - DNA, 146 bp, Homo sapiens
tccactagtgtaggcctccgctccgagcccgaccggactcccccgatcccagctttctatccttcgaaaacactaagactaacgtcactgcctaagcgtttactagagccaatcacctgtcatgcgtgaaacagggagaggactta

SEQ ID NO: 494639 - DNA, 402 bp, Homo sapiens
atgatcatcctacccgagatggtgggcagcatggtgggcgtctacaatcccagctacttgggaggctgaggcaggagaatcacttgaacccgggaggcggaggttgcagtgagccgagatcgcaccattgcactccagtctgggcaacagagtgagattccgtctcaaaaaaaaaaaaggaaagggaaaaaaaattagctttataccttccttccttggtttccaaccggccaggaaatttcttgaacattccaaatttcagtggattaactccaaaacaaattttataaggtataaattaaatttacttctaatagtaatagtatacttaaaaaggcctcagggtatattatctttcttaaacaggttacaattcagtgcaggttactttaaccaattatg

SEQ ID NO: 494640 - DNA, 109 bp, Homo sapiens
gcggccgcctactactactactactgctcgaattcaagcttctaacgatgtacggggacatgtttgatttttacactgaaaaataaaaaaatcctggtatgtttaaaaa

SEQ ID NO: 494641 - DNA, 105 bp, Homo sapiens
  misc_feature (15)..(15): n is a, c, g, or t
  misc_feature (40)..(40): n is a, c, g, or t
  misc_feature (67)..(67): n is a, c, g, or t
tccccggggttcaangttataaaatatgtttgtgtagagnacaagggacaatgcgtcatatgtggtncccccgaagatgcagtggtgagggtgtctatcagaaca

SEQ ID NO: 494642 - DNA, 446 bp, Homo sapiens
tcgaagatggccggtgggtgctctcagatctgaccaggagttggcttgggtggaaacggtggtttcatccaacatatgctatgggacatgattattattccattcaaatggattacagacttcttgaggagaggacaaacttatctctcatggtgtggttttagaatacgttgataaccaaggaagaaaccatgccagcggtgaccagttcaacttcttaaggcagagactaagcgttttgcatatcgtgttctgacccgggacatcagtagtggtgaatggcccagcatcggttccatctggtaacaactcccgtgctgtgtcttaaaaccacctcttcctatgttcagtctgtggttgggacagtctgacccaaccttgagcttggtggggtgaacatgtcattcagccctcatcaatcagcaaatccatctgaactggtggag

SEQ ID NO: 494643 - DNA, 271 bp, Homo sapiens
aatttgggcacgaggtaccggtgtagaaaaaccagtgtagaaagggttaagccccagccccaggtgtggccctcatgggggtgagggctcccttggggggcctgccagcaaagccagtgccataagggagttaaaggggttgtcccccccttaattcaagttcccctttcaggttgtcacaaaggccttgtgccgcccgcttggcccccctgttttgtggattcctttggaaagggctccgtgggcaggccaataaaaagttttgcttcca

SEQ ID NO: 494644 - DNA, 999 bp, Homo sapiens
  misc_feature (767)..(767): n is a, c, g, or t
cggactaggaccagttccttcagtacatactacttgacatcctaattatagaatgtatgtcgcaacctaatttactgacccctatagaagttgatgatgagtcatgttcgcagacttgataattctcaactctacgggccttcatggtagcaggaggaccaaataatatgagagactcccaagggaaacaattgagcctatcctctgccagttccttacttaagcttcgccccaattataccatcattcaaaggcgcctggggcatggtgagataacaaataaaggaaagtattcacatacatgtacgcccggcaacagtagttccaggacttgtgactcctctggacccctctgtctatggtggcagtcatgctatgatagagcatgagctaagggtagattggtccacaggcttgccatctaacatgtggagcagtcaaaatgatgtttctttagtctttagataggaagagaaagaagaagccatctttagttgtatattttgccaaaagtgacttcaaaaataaataacctggttttggacatttagatttctcccatttaaattttccttaaggaaagaattattttctacaatagaaaattaagcatgtagcatattgccaggcatatataggccccacaggtgcacattcactgcactgtgaggttaatcaggttcttggaactcccctccagtgccactcggcagtgattttagcagaagaatcactctacgggaatgtatgagtgccatgttgacgtncaggagtgacgttctacagtgaacactcaacatttttttggagccacctcataaatttgagcgggggtacaaaaaagtttattaggattggtttgggccaaagaaattcgcacggtgaaaatatggctatatgtattactggcagttttgtgggaaagttggattatgaccccacggagaagcactagatcacgaagggaaccagattatctagaaattcctatcttagtaa

SEQ ID NO: 494645 - DNA, 1147 bp, Homo sapiens
  misc_feature (928)..(928): n is a, c, g, or t
  misc_feature (933)..(933): n is a, c, g, or t
  misc_feature (936)..(936): n is a, c, g, or t
gtatacagacggtatgtgtacgatgaagggtatagctaactgggtgcaaggttggaagaaaagatgggtggaagacaagtgcaggtaaagaggtgatcaacaaagaggacttgtggcactggagaggcttacccagtggaatggacattcagtggatgcatgttcctggtcattcgggatttatacggcaatgaagaagctgacagattagccagagaaggagctaaacaatcggaagactgagccatgtgactttagtccttgggagaacttgagccagcggctgtcttgctgcctgtacttactggtgtggaaaatagcctgcaggtaggaccattgcagtgatgggcagatgcgtctttcacacggaatcaggcacagtggccttctgtgacatgtgtttataaaaaatggttaagtatataataaattgaacatctttgagattggagaattatgtgagatttccacattatgtttactgggttcaatactgtccttgcttgttttattgcaggcaagcaaggcaaatggcctaaaatgctgtggcttatattttgataagaaatcaaaaaaccattggttaaaagatgcaactcagaagtctggaagtattctgaaagcatccatttaccgtccagttgacaggtttgagtctcctgcttgtataggtgacttgtgcccatgggtacattaaaggaacatgctgcccagggcctgggcggacagctcagtgggcaggatgtgtgctgggtctcagccccatgtgcctgcttgctgggcagttagtatagggcaaagcctgcctgcggcgaccctggctgctaggccattctctaggaacagctgcgactcataaagaccaagaagcataaataaactttcaaaaatttatttggctctttcgttaaaaactgtgcaaattacnaccancanacacacacacaaaaactttgttggccggctgggacccgaaaaagttttaacccctccgtggggccgggggccccgtggtacgtggccccgggccaagcgggcccaaggagaccgcgcacacacggcgccggtccccccttaaaaaccgcggcgaccccgctgcgacatcccaaggtccgaggcaccgggctcacagagccagagctatacg

SEQ ID NO: 494646 - DNA, 828 bp, Homo sapiens
atggacatgcagcgaggtaggtctacggagacgctattgccccgtatcatagatgagctgatcgcctttcatgatcacgcgcctcataatcatgttccttatctgctgcctagtcctgtatgccctttttcctaacactcacaacagaagtaactaatactagcatctcagaggctcaggaaatagaaggccgtctgaactatcctgcccgccatcatcctagtcctcatcgggctcccatccctacgcatctttacataacagacgaggtcacgatccctcccttaccatcaaatcaatttggccaccaatggtactgaacctacgagtacaacgactacggggacttaatcttcaaactcctacatacttccccaattattcctagaaccaggcgacctgcgatccttgacgtgacaatcgagtagtactcccgattgaagcccccattcgtataatatttacatcacaagacgtctggcacctcatgagcttgtccccacataggcttaaaaacgatgccattcccggacgtctaaaccaaccaacttcagcgctacacgaccgggggtatactacggtcaatgctcctgaaatccagtggagcaaaccacaggttcatgccctttcgtcctagaattagttcccctaacatcctttgaaataggggcggtattaaccttataaacccctctacccctcagaattgagacgcacacgacaacaacacaatctgtcgtcgcccccatccaaaacttcaccaccatcgggggcgggcctggacatcactgctaggtgtccgaggaccgggcagccggtgttccccaa

SEQ ID NO: 494647 - DNA, 1738 bp, Homo sapiens
gtatacagacggtatgtgtacgatgaagggtatagctaactgggtgcaaggttggaagaaaagatgggtggaagacaagtgcaggtaaagaggtgatcaacaaagaggacttgtggcactggagaggcttacccagtggaatggacattcagtggatgcatgttcctggtcattcgggatttatacggcaatgaagaagctgacagattagccagagaaggagctaaacaatcggaagactgagccatgtgactttagtccttgggagaacttgagccagcggctgtcttgctgcctgtacttactggtgtggaaaatagcctgcaggtaggaccattgcagtgatgggcagatgcgtctttcacacggaatcaggcacagtggccttctgtgacatgtgtttataaaaaatggttaagtatataataaattgaacatctttgagattggagaattatgtgagatttccacattatgtttactgggttcaatactgtccttgcttgttttattgcaggcaagcaaggcaaatggcctaaaatgctgtggcttatattttgataagaaatcaaaaaaccattggttaaaagatgcaactcagaagtctggaagtattctgaaagcatccatttaccgtccagttgacaggtttgagtctcctgcttgtataggtgacttgtgcccatgggtacattaaaggaacatgctgcccagggcctgggcggacagctcagtgggcaggatgtgtgctgggtctcagccccatgtgcctgcttgctgggcagttagtatagggcaaagcctgcctgcggcgaccctggctgctaggccattctctaggaacagctgcgactcataaagaccaagaagcataaataaactttcaaaaatttatttggctctttcgttaaaaactgtgcaaattaaaaaaaaaaaaaaaaagtaagacaccgggggggcacaggggctcacttgctgggaatcctaagcactttggggaggccaaggcggggcagatcacttggaggtcaggagtttggagaccagctgggccaacatggacgaaaccctgggtctctactaaaattacaaaaattatccaggtggtgggtgggcacgggctggtagtcccagctactggggaggctgaggcacaagaatcacttgaacccaggcggcagaggttgcagtggagccaagattggcaccactggcactccatcctgggcgcaacagagtggagactctggtctcaaaaaaaaaaaaagtgtcgtcaaaggtgttggccagtgatacattaattaagtttaaacccttttttttataaaaacttaccgggaggtgccccaaaacaattggtttggtttatggaatcgattttggctgggacgggttgaatacctttggttgtcccccagcgtggtggaaggaatatacgtcttggggccaagatacccaagggaagggtctcccaaacggtggcgcttcaggacagaagacccttttttgtcccccctctgggcccaaaaggtaatgcttgatttacacaaaagagacttctgggtaggaggggagggaagctggtcggttcgtggggattccatcacacagcgggtcaatggggcgcggcgccaaggctacgggcgtatagggaaaccgcgtttcgcatggtcagggaatggcactgcgggggacgaggccatcgcagggggcgagaaaccaactggaagtagggcca

SEQ ID NO: 494648 - DNA, 261 bp, Homo sapiens
  misc_feature (236)..(236): n is a, c, g, or t
ctcaggcacacctacaccccttatcatactagttattatcgaaaccatcagcctactcattcaacctatagccctgggcgtacgcctaaccgccaacattactgcagagccacctactcatgcacctaattggaagcaccaccctagtcaatatcaacgcattaaccgttccctgctacactatatcatcattcacaagttctaatttctatctgacatatcctagtaaatcgctngtcgcgcttaactccaatgcactac

SEQ ID NO: 494649 - DNA, 350 bp, Homo sapiens
  misc_feature (89)..(89): n is a, c, g, or t
  misc_feature (91)..(91): n is a, c, g, or t
  misc_feature (129)..(129): n is a, c, g, or t
  misc_feature (179)..(179): n is a, c, g, or t
  misc_feature (214)..(214): n is a, c, g, or t
  misc_feature (255)..(255): n is a, c, g, or t
  misc_feature (303)..(303): n is a, c, g, or t
aggaggggttcttcaacaaccccccaaaggacccctgatgcccaaccacaagtcgggtttgcccttaaaccccttaaaccgcaagctanantgctgtaccccatttacagacatggttgctgagtgccntgtgtcctgatttttgcatgctggtcatgacctgaaggaaatctattagncgtataatgtatgtctggtgtttttaacgtgatcntgatcagctctgaggtgcaacttcttcacatactgtacatncctgtgaccactcttgggagtgctgcagtctttaatcatgctgtttanactgttgtggcacaagttctcttgtccaaataaaatttattaataag

SEQ ID NO: 494650 - DNA, 131 bp, Homo sapiens
agtatcgagtgtctagtcatccttccccacttggaacataccatatgcatcttgcaggcctggcataagcatttcctctgtgaaacctcctttgctgccactcaaggagagtcatctaacttccactttcg

SEQ ID NO: 494651 - DNA, 134 bp, Homo sapiens
gcagacatagaggaagtgccttcggtaaagcaggtgaagttaagggcaaatcatatatttaattaaaactaaagcaaggcattttctttcacttctttaaaagggaaggattagccccccttgacaaaggaaaa

SEQ ID NO: 494652 - DNA, 118 bp, Homo sapiens
  misc_feature (1)..(1): n is a, c, g, or t
naaggcagatagaatcgagctggtaccgtgcatcactcttgtagtacacataggggtagtattcttgtggactcaggtttaaaccgggaatatccataggagcatcaataatagctgc

SEQ ID NO: 494653 - DNA, 210 bp, Homo sapiens
gaaaccctaataacggagatcgaaatttttatcctgacgctatagagatagtaccgtaagggaaagatgaaagaataaaataaaagtaaaaaaaagcaaagacttaccccattctaccatttggcataagtggtttaaccatgaaaaaatctaacaaatgagaactttagcttagataccccggaaacctagacgtagctaccctatgca

SEQ ID NO: 494654 - DNA, 216 bp, Homo sapiens
  misc_feature (41)..(41): n is a, c, g, or t
gattctgtggccttctaagatgaagccaccctcagtccagngaaggtgtgctggtattttctcatgacagccaagagcagattgtgaaatcgctcagctcccaggtgagagcaagcaaaaatcttggctgcgggaaaggaagcaaaagagaaaaattaaaagccagcccagaagtgtaccttgactttataaaaacctaagcgtcattggttccga

SEQ ID NO: 494655 - DNA, 486 bp, Homo sapiens
aacagatcgtgagtgaactgggggatggggccaccagggagtgggagtcagtgccaccagtggcagtggggataggggtgacagtgacacgcgaacacgagccatgtgctgggcgtggcgcatgtggggctccagacctcagggtgccatcagccagggccaccagacgagctcctgggaactcaggccagcaccaggcaggctcatcggcgggggctccaccagcacagcagagaacttggtgtcaccgaaggcctcgttcatgcgcgtctcgaagaagcgctgcaggccgatgatggactgcacgtctgccttgtcctcagttaacttgtagaattgcttgaacatgcggaccacatcctgggcaaactcctgtggggagctgtagggaggtgacaacttctcctggaggcggccacgatcaggtcagatccaggtgccaccgggctggtccaggagaaggcggagcggcagcagctgatgcag

SEQ ID NO: 494656 - DNA, 493 bp, Homo sapiens
aggtgttcctcagattgacattcacttttgacattgatgccaatggtatactcaatgtctctgtctgtggacaaagagtttcgggaaaagagaacaagattactatcattaagtgacacgggccgatttgagcataggaagacattgaacgtatggtccaggaagctgagaagtacaatgctgaaaatgagaagcagagggacaaggtgtcaattccaaaaattcacttgagtcctattcctttcaacatgaaacgcgactgttgaagatgagaaactttctacggcaagattaacgatgcggacaaactaaaaaatccatggacaagtgtaatgaaattatcaactggcttgataataatcagacatgctgagaaggaagactttagaacatctaaaagtaaagagctggagaagagtccgcaaccccattatcaccaagctgtaccagattgcaggaggcatgccaggaggaatgcccgggggtaggaggt

SEQ ID NO: 494657 - DNA, 520 bp, Homo sapiens
  misc_feature (376)..(376): n is a, c, g, or t
gatacacacgtatgtcacgagatgacgtcttctgtgctgggactggctcatggcgctctatgtgatatctcgactccttacaagtgactattcacatgaggaagcagataactgctcctgggattattcctggtcaggagatgggggtggtctacgaagcgtcgttgggcgcacgtgatccgtcccgcctcaagcctcccacaagtgctagggattatacggcatagagccactgcgatggaaacagaggctgctgcttaagttgcccaaagtcttgcagagtgggatgtgagcagaggcatttgactccagggcctaagtccttaacacagctctgcagcatttaccctgatactcaaccccttccttccccaancccccaccatcaggcattaagactactgcctaggggcagggccttggttggcagtgtgtgtcttatcccagccactgcagaggcaggaggatcgcatgagcctgagatgagaccagcctgggtagcatagcgagaacctttctc

SEQ ID NO: 494658 - DNA, 122 bp, Homo sapiens
taaacggagctggactacggcgagggtctgagccgggagcatgcagctcttgagcctcgccaccttgtgggctgtgccatcatcaccaagagctttgccaggatccacgagaccaacctaga

SEQ ID NO: 494659 - DNA, 459 bp, Homo sapiens
cccgggggagagggggtctcatctctcagactactatagaagccaaagtctctacaggggcctacaaggcccttcattatcggtctctctacttctcagacctcatctactaggttggtggaataatggaatgaattactccctaaaacaaaagaacccaagtctgactaatcgggagaactatcaaaaaaggaacattccaggggtacatctcaaagatttcggaatcaggctttcgggggggggagtagaaaattggtgtatgggcggggctggggggcttatgcctataatctcagcacttaaggaggcggaggcggacgcatcacatgagcccaggagcttgagaccagccggggcaacagggcaaaaggccatctccacaaaaaatacaaaaatgagcggggtaggggggtgcacgcccgcagtcccagctacccaggaggctgaggtgaaggg

SEQ ID NO: 494660 - DNA, 349 bp, Homo sapiens
  misc_feature (19)..(19): n is a, c, g, or t
  misc_feature (61)..(61): n is a, c, g, or t
  misc_feature (343)..(343): n is a, c, g, or t
tcacccacaaggacatgcnaggagaactgtcgggaccccaggaaagactcattcccaaaanaccccaggccgggcacagtccgtcaagcctgtaatccccaacactttgggagaccgaggtgggggtatcgattgagcctcggaggtcgagatcagcctgggaaacacagggaggcccccatcgctacaaaatattttaaaaattagccaggtgtggtggcttgtgcttgttgtcccggctacttgggaggctgaagtgggagggtggcttgagtccaggagttcactgcactgagctgtgatcacaccactgcactccagcctggacgacagagtgagaagnaaatct

SEQ ID NO: 494661 - DNA, 118 bp, Homo sapiens
tccacagatcatggcagatggtgtgtccaaacatacactgccacaggaaaattgaatgccgtgatgattccaaccaggcctacgggattccactgctcaatcagtgcatggccagaag

SEQ ID NO: 494662 - DNA, 205 bp, Homo sapiens
tctcccaagcagccgtataccacaggtgcgcaccaccacgcccggctaatttttgtatgcgcgatcgatatgggggcttggccatgctgcccacgctgttctcaatcccctgaccttaagtgatccacccacctccgcctcccaaagtgttgggattacaggcgtgagccaccgcacccataatttaaaattttttttttttttt

SEQ ID NO: 494663 - DNA, 262 bp, Homo sapiens
acaccctctctccccacatgacattttcattaatattgaaacaagcttgttgattcgtataattacaagacgttgtacaaaatattcacagcgacctgttgagtgtagccttaggcctggaactgcgtgacaccgtatgcctactccgcgatcagaggataggaagtcccaccccggccttccagcagtcacgcgagccatgtgtctggcattccctgattccgctgtctcccaaccctcactggtgggcggaaggcggggt

SEQ ID NO: 494664 - DNA, 392 bp, Homo sapiens
ctagaggcctccctgcccagccagtcctcggcctctgacagtcccacagaacagctccagagcaacgtgtgacagcgctggcctctccacatttcctgaggactcttcctggaaaccctgacccacccccacaggcggtaacactgaggaccttgcaaaacctcacactgtgttctggggtctcgcactgccccacactgtgactgagcagcctctgaggcgtttaaggaggaagtcacgtgtgtcataggggtcacatatgaaccagacacattccccaagccctggagtctgaaagggggtcactacatttcatagaccatcacctgatcctgatttcctgtgtctactgagaagccccatgcagggcagcagtgcctgggaatgatcct

SEQ ID NO: 494665 - DNA, 1164 bp, Homo sapiens
  misc_feature (1065)..(1065): n is a, c, g, or t
  misc_feature (1071)..(1071): n is a, c, g, or t
gagagccgaggtctgggctgcagtaggtcccggcaaccgcaggctcgcggcgggcgctgggcgcgggatccgactctagtcgtaatggaggcgggcggctttctggactcgctcatttacggagcatgcgtggtcttcacccttggcatgttctccgccggcctctcggacctcaggcacatgcgaatgacccggagtgtggacaacgtccagttcctgccctttctcaccacggaagtcaacaacctgggctggctgagttatggggctttgaagggagacgggatcctcatcgtcgtcaacacagtgggtgctgcgcttcagaccctgtatatcttggcatatctgcattactgccctcggaagcgtgttgtgctcctacagactgcaaccctgctaggggtccttctcctgggttatggctacttttggctcctggtacccaaccctgaggcccggcttcagcagttgggcctcttctgcagtgtcttcaccatcagcatgtacctctcaccactggctgacttggctaaggtgattcaaactaaatcaacccaatgtctctcctacccactcaccattgctacccttctcacctctgcctcctggtgcctctatgggtttcgactcagagatccctatatcatggtgtccaactttccaggaatcgtcaccagctttatccgcttctggcttttctggaagtacccccaggagcaagacaggaactactggctcctgcaaacctgaggctgctcatctgaccactgggcaccttagtgccaacctgaaccaaagagacctccttgtttcagctgggcctgctgtccagcttcccaggtgcagtgggttgtgggaacaagagatgactttgaggataaaaggaccaaagaaaaagctttacttagatgattgattggggcctaggagatgaaatcactttttattttttagagatttttttggaggttggcgtgcaatctttagaatatgccttatatgctgatatgaatatgccttaaaataaagtgttccccacccctgccaaaaaaaaaaaattctttntataanctaaaaaaaaaaaccttgaggggggcccggtacccaattggccttagtgaggccgatacattcactgcccgccttttcaacggcctgactgga

SEQ ID NO: 494666 - DNA, 420 bp, Homo sapiens
  misc_feature (39)..(39): n is a, c, g, or t
  misc_feature (65)..(65): n is a, c, g, or t
  misc_feature (184)..(184): n is a, c, g, or t
aaccagctactgaagagtcttgttgggggtaaagattcngttcaaactcttttgtaatcaagttngctatctcttaagagatccctcttctccaaagttggaggcatcatgctacttgacttcaaactatactacaaggctacagtaaccaaaacagcttggtactggtaccaaaacagacatntagaccaatggagcagaacagagacgtcagaaataacaccacacatctgcaaccatctgatctttgacaaacctgacaaaaacaagcaatggggaaaggatctcctattcagtaaatggtgctgggaaaacaggctagccacatgcagaaaatgaaactggaccccttccttacagcttatacaaaaattaactcaaggtggattaaagacttaaaagtaaaaccctgtctctact

SEQ ID NO: 494667 - DNA, 1074 bp, Homo sapiens
gagagccgaggtctgggctgcagtaggtcccggcaaccgcaggctcgcggcgggcgctgggcgcgggatccgactctagtcgtaatggaggcgggcggctttctggactcgctcatttacggagcatgcgtggtcttcacccttggcatgttctccgccggcctctcggacctcaggcacatgcgaatgacccggagtgtggacaacgtccagttcctgccctttctcaccacggaagtcaacaacctgggctggctgagttatggggctttgaagggagacgggatcctcatcgtcgtcaacacagtgggtgctgcgcttcagaccctgtatatcttggcatatctgcattactgccctcggaagcgtgttgtgctcctacagactgcaaccctgctaggggtccttctcctgggttatggctacttttggctcctggtacccaaccctgaggcccggcttcagcagttgggcctcttctgcagtgtcttcaccatcagcatgtacctctcaccactggctgacttggctaaggtgattcaaactaaatcaacccaatgtctctcctacccactcaccattgctacccttctcacctctgcctcctggtgcctctatgggtttcgactcagagatccctatatcatggtgtccaactttccaggaatcgtcaccagctttatccgcttctggcttttctggaagtacccccaggagcaagacaggaactactggctcctgcaaacctgaggctgctcatctgaccactgggcaccttagtgccaacctgaaccaaagagacctccttgtttcagctgggcctgctgtccagcttcccaggtgcagtgggttgtgggaacaagagatgactttgaggataaaaggaccaaagaaaaagctttacttagatgattgattggggcctaggagatgaaatcactttttattttttagagatttttttggaggttgcagtgagctgagatcgtgccattgtgatatgaatatgccttatatgctgatatgaatatgccttaaaataaagtgttccccacccctgccaaaaaaaaaaaa

SEQ ID NO: 494668 - DNA, 101 bp, Homo sapiens
ctctgcagtagggtgtgcagtgtggtgtgatgtgggtgtgtgcgcgtgcacacgggttttttagtgtctgtctgctgtgtcagtgtgtggtgtctgggttg

SEQ ID NO: 494669 - DNA, 931 bp, Homo sapiens
gggattataggcgtgagcaccggcggtgcttaaatctatttatctgacgtcccaactaggaaatttttgtccaaatgagtatatgtgatttaaagtagacactcgaggtaacaataggatttatctcagttccctatctcccttcaatctattcttcatatggtcaataattcttttttcttcgtggacgaggggtcctctggcgcaaaggttggaaggtgccggggtggcaactcttgggctccaggggacccttggcctcctggttggtccaggggggattcccctggcctaaaggcctcccgggaaggaacgctgggaggatagcgcagggggcaatcgccggcaaatacagcaccgccgggaaaacatcgccggcaatctcaccacacgacacgacgcacacaggttttgcggccccagggtgggggtccacaaaatcgtcccggacctaagggtggatcccaactgggctataaaggctctcccacaaaaggtgtgtcgggaccaaacagggggaggaaaacccgcgctggcacccgggcacacacaggggaatttcgtagcaaacatcgtgcgtccttcgccaagaaacagtgcggttgctgccgtcttggcaattaaaaagggaacccaaaacatttttgtggtgggggggcccacaacagggacaccgaggtgatggatgcaaaaggccttgtgggccacccaattaattcaccaagatccttcaagggcagaaacagtggggcgtggggggctaccttgggactcccacaggccagtggggaacttccctggattacgtgggcaggcaccgctgggactcaccattgtggcacccaaggctttggccaagtgaagggtggcgcttcagggcctaaagaaggcgtttcatcaactcataaaaaggggggcgcttaagatccgg

SEQ ID NO: 494670 - DNA, 1186 bp, Homo sapiens
gagagccgaggtctgggctgcagtaggtcccggcaaccgcaggctcgcggcgggcgctgggcgcgggatccgactctagtcgtaatggaggcgggcggctttctggactcgctcatttacggagcatgcgtggtcttcacctcggacctcaggcacatgcgaatgacccggagtgtggacaacgtccagttcctgccctttctcaccacggaagtcaacgtgttgtgctcctacagactgcaaccctgctaggggtccttctcctgggttatggctacttttggctcctggtacccaaccctgaggcccggcttcagcagttgggcctcttctgcagtgtcttcaccatcagcatgtacctctcaccactggctgacttggctaaggtgattcaaactaaatcaacccaatgtctctcctacccactcaccattgctacccttctcacctctgcctcctggtgcctctatgggtttcgactcagagatccctatatcatggtgtccaactttccaggaatcgtcaccagctttatccgcttctggcttttctggaagtacccccaggagcaagacaggaactactggctcctgcaaacctgaggctgctcatctgaccactgggcaccttagtgccaacctgaaccaaagagacctccttgtttcagctgggcctgctgtccagcttcccaggtgcagtgggttgtgggaacaagagatgactttgaggataaaaggaccaaagaaaaagctttacttagatgattgattggggcctaggagatgaaatcactttttattttttagagatttttttttttaattttggaggttggggtgcaatctttagaatatgccttaaaaggccgggcgcggtggctcacgcctgtaatcccagcactttgggaggccaaggtgggcggatcgcctgaggtcaggagttcaagaccaacctgactaacatggtgaaaccccatctctactaaaaatacaaaattagccaggcatgatggcacatgcctgtaatcccagatacttgggaggctgaggcaggagaattgcttgaacccaggaggtggaggttgcagtgagctgagatcgtgccattgtgatatgaatatgccttatatgctgatatgaatatgccttaaaataaagtgttccccacccctgccaaaaaaaaaaaa

SEQ ID NO: 494671 - DNA, 1139 bp, Homo sapiens
gcgagagggagggcaaaagaggaaggctgggtgattcctggtaatgtgttattttgagaaaaagcttcggcagcacactccagaaaaaaacttcccaaaccctgggcaactgaggttctgatgtggagctctggatggaaagcgtgctgaagtcttgttaaactagcaagcttttgtttggaggtccaccgccgaaggcgcacaggcctgtgggaacacgagcgttgagactgggggcgtctagatgatccaaggctcggacctcaggcacatgcgaatgacccggagtgtggacaacgtccagttcctgccctttctcaccacggaagtcaagctaaggtgattcaaactaaatcaacccaatgtctctcctacccactcaccattgctacccttctcacctctgcctcctggtgcctctatgggtttcgactcagagatccctatatcatggtgtccaactttccaggaatcgtcaccagctttatccgcttctggcttttctggaagtacccccaggagcaagacaggaactactggctcctgcaaacctgaggctgctcatctgaccactgggcaccttagtgccaacctgaaccaaagagacctccttgtttcagctgggcctgctgtccagcttcccaggtgcagtgggttgtgggaacaagagatgactttgaggataaaaggaccaaagaaaaagctttacttagatgattgattggggcctaggagatgaaatcactttttattttttagagatttttttttttaattttggaggttggggtgcaatctttagaatatgccttaaaaggccgggcgcggtggctcacgcctgtaatcccagcactttgggaggccaaggtgggcggatcgcctgaggtcaggagttcaagaccaacctgactaacatggtgaaaccccatctctactaaaaatacaaaattagccaggcatgatggcacatgcctgtaatcccagatacttgggaggctgaggcaggagaattgcttgaacccaggaggtggaggttgcagtgagctgagatcgtgccattgtgatatgaatatgccttatatgctgatatgaatatgccttaaaataaagtgttccccacccctgccaaaaaaaaaaaa

SEQ ID NO: 494672 - DNA, 453 bp, Homo sapiens
gaggacctatgtctcgacgtagattgatctctgcaatatatgtagctgactctggagcctctgcattttctttaaaacattttaactgattcattcgttccgcagcatgcctctggtgctctccaaatgggatgtcataaggcaagctcatttcctgacacgttcacatgcacacataaaagggttctcatcattttgggtactttggaaaaggaataatctcttggctttttaatttcactcttgatttcttcaacattatagctgtgaaatatccttcttcatgacctgtaataacctcataattacttgatctcttctttaggtagctataatatgggggaataacttcctgtagaaatatcacatctgggctgtacaaagctaagtaggaacacacccctcgagccctctctgacagattgtttagatctaatccatcaatattccagg

SEQ ID NO: 494673 - DNA, 1172 bp, Homo sapiens
gagagccgaggtctgggctgcagtaggtcccggcaaccgcaggctcgcggcgggcgctgggcgcgggatccgactctagtcgtaatggaggcgggcggctttctggactcgctcatttacggagcatgcgtggtcttcacccttggcatgttctccgccggcctctcggacctcaggcacatgcgaatgacccggagtgtggacaacgtccagttcctgccctttctcaccacggaagtcaacaacctgggctggctgagttatggggctttgaagggagacgggatcctcatcgtcgtcaacacagtgggtgctgcgcttcagaccctgtatatcttggcatatctgcattactgccctcggaaggctaaggtgattcaaactaaatcaacccaatgtctctcctacccactcaccattgctacccttctcacctctgcctcctggtgcctctatgggtttcgactcagagatccctatatcatggtgtccaactttccaggaatcgtcaccagctttatccgcttctggcttttctggaagtacccccaggagcaagacaggaactactggctcctgcaaacctgaggctgctcatctgaccactgggcaccttagtgccaacctgaaccaaagagacctccttgtttcagctgggcctgctgtccagcttcccaggtgcagtgggttgtgggaacaagagatgactttgaggataaaaggaccaaagaaaaagctttacttagatgattgattggggcctaggagatgaaatcactttttattttttagagatttttttttttaattttggaggttggggtgcaatctttagaatatgccttaaaaggccgggcgcggtggctcacgcctgtaatcccagcactttgggaggccaaggtgggcggatcgcctgaggtcaggagttcaagaccaacctgactaacatggtgaaaccccatctctactaaaaatacaaaattagccaggcatgatggcacatgcctgtaatcccagatacttgggaggctgaggcaggagaattgcttgaacccaggaggtggaggttgcagtgagctgagatcgtgccattgtgatatgaatatgccttatatgctgatatgaatatgccttaaaataaagtgttccccacccctgccaaaaaaaaaaaa

SEQ ID NO: 494674 - DNA, 522 bp, Homo sapiens
  misc_feature (5)..(5): n is a, c, g, or t
ccgtnttccctcacgcgcagaatcctggatcatgacgtaggtgcctatggaattctgcgaggcaataaaaaacgacaccggagagacaaaccgaaggctgttctgaacaaatcacagagtggcacgttctagagggtcgattactggaatcatagtcaaacaagtgaggtccaaagcagagctcaggagcagtcataaagttacggccacacagcccgcgtgaacgagagttgggtctggaacaccgcttgcgagcatctccctgtgagaaaaaacccaacccccccatccctcacaggaggagaaaactttcgggggagaaaggggggagcgcagcagacagagaacacaagaacccggagcgcacgctggtttcaagccagaggaacactgttgtgaacaaaaccgaccccagcagaccacccaggggaccgacgacacaaaccgcgggacaggggcggcaacaaaccgcaccacccagagccagaaaaccccgcggcgagcgacaagggcggccaacgc

SEQ ID NO: 494675 - DNA, 512 bp, Homo sapiens
gttgtagctcgttctatagcatagccaaagcatgactaagcaaaaagaacaaatctggaggtatcacattatctgcttcaaactatcctacaaggccatagtcaccaaaatagcatggtactggtataaaaataggcaaatagaccaatggaacagaatagagaacccagaaataaacccaaatacctgcagccaagtgatctttgacaaagaaaacaaaaacatggagtggggaaagaacaccctatttaacaaatcgtgctaggataattggcaagccacatgtggtagaatgaacctggatcctcaccttttgcattatacaaaaatcaactcaagatggatcaagatttaaatctaagacctgaaaccataaaagagcccaaatagccaaagcagtactaagcaaaaagaacaaatctgggggcatcacattattcaacttcaaaatatactacaatggtatagttacccaaatagcctggggccaagtttaacacttacaacggggc

SEQ ID NO: 494676 - DNA, 970 bp, Homo sapiens
gagagccgaggtctgggctgcagtaggtcccggcaaccgcaggctcgcggcgggcgctgggcgcgggatccgactctagtcgtaatggaggcgggcggctttctggactcgctcatttacggagcatgcgtggtcttcacccttggcatgttctccgccggcctgctaaggtgattcaaactaaatcaacccaatgtctctcctacccactcaccattgctacccttctcacctctgcctcctggtgcctctatgggtttcgactcagagatccctatatcatggtgtccaactttccaggaatcgtcaccagctttatccgcttctggcttttctggaagtacccccaggagcaagacaggaactactggctcctgcaaacctgaggctgctcatctgaccactgggcaccttagtgccaacctgaaccaaagagacctccttgtttcagctgggcctgctgtccagcttcccaggtgcagtgggttgtgggaacaagagatgactttgaggataaaaggaccaaagaaaaagctttacttagatgattgattggggcctaggagatgaaatcactttttattttttagagatttttttttttaattttggaggttggggtgcaatctttagaatatgccttaaaaggccgggcgcggtggctcacgcctgtaatcccagcactttgggaggccaaggtgggcggatcgcctgaggtcaggagttcaagaccaacctgactaacatggtgaaaccccatctctactaaaaatacaaaattagccaggcatgatggcacatgcctgtaatcccagatacttgggaggctgaggcaggagaattgcttgaacccaggaggtggaggttgcagtgagctgagatcgtgccattgtgatatgaatatgccttatatgctgatatgaatatgccttaaaataaagtgttccccacccctgccaaaaaaaaaaaa

SEQ ID NO: 494677 - DNA, 466 bp, Homo sapiens
gaattaggaaaaagagctctactggggagttagatcacctgggtttaaaagtcgatgccaaaatttactaactatatgaccttgggaaaattaatattatatattaatatatattatatcatataatatatattaatatatattaatataatatatcacataatatatataaatatatagcctcaggcttctcatatatcaaatggtaataaaaacagaacatagggatttttggattattaacgagacaatccatggaagcacttcacataaatgcctgtcacataatattcactttataaactatagctcttattgttccttaggattacagtgatatattaataacaatagctaatgagtttggcactgttttaagctcttcccaaatattaaataatttaatccccaaacaatcttctgaggcagtgatcttaacataataaactgtattctcaaatcagaa

SEQ ID NO: 494678 - DNA, 1766 bp, Homo sapiens
  misc_feature (571)..(571): n is a, c, g, or t
  misc_feature (582)..(582): n is a, c, g, or t
  misc_feature (617)..(617): n is a, c, g, or t
  misc_feature (622)..(622): n is a, c, g, or t
  misc_feature (1420)..(1420): n is a, c, g, or t
  misc_feature (1424)..(1424): n is a, c, g, or t
  misc_feature (1426)..(1426): n is a, c, g, or t
  misc_feature (1429)..(1429): n is a, c, g, or t
  misc_feature (1432)..(1432): n is a, c, g, or t
  misc_feature (1434)..(1434): n is a, c, g, or t
  misc_feature (1441)..(1441): n is a, c, g, or t
  misc_feature (1454)..(1454): n is a, c, g, or t
  misc_feature (1465)..(1466): n is a, c, g, or t
  misc_feature (1471)..(1471): n is a, c, g, or t
  misc_feature (1487)..(1487): n is a, c, g, or t
  misc_feature (1490)..(1490): n is a, c, g, or t
  misc_feature (1503)..(1503): n is a, c, g, or t
  misc_feature (1523)..(1523): n is a, c, g, or t
  misc_feature (1533)..(1533): n is a, c, g, or t
  misc_feature (1535)..(1535): n is a, c, g, or t
  misc_feature (1548)..(1548): n is a, c, g, or t
  misc_feature (1553)..(1553): n is a, c, g, or t
  misc_feature (1559)..(1559): n is a, c, g, or t
gagagccgaggtctgggctgcagtaggtcccggcaaccgcaggctcgcggcgggcgctgggcgcgggatccgactctagtcgtaatggaggcgggcggctttctggactcgctcatttacggagcatgcgtggtcttcacccttggcatgttctccgccggcctctcggacctcaggcacatgcgaatgacccggagtgtggacaacgtccagttcctgccctttctcaccacggaagtcaagtgaggggccgacggctgcggtagtgggaaaggctaccagagggaggtgggggcggggcaggaggagcaagagtgaaagaggtttggccgggacgcggtggctcacgcctgtaatccctgcactttgggaggccgagacgggcggatcacgaggtcaggagatccagaccatcctggctaacacggtgaaaccccgtctctactaaaaatacaaaaaattagccgggcgtggtgccgggcgcctgtagtcccagctactcgggaggctgaggcaggagaatggcgtgaacccaggaggcggagcttgcagtgagccgagatcgtgccancgtactccagnctgggcgaatgagcgagactacgtctcacataaanataangtgtgcaaagacccttggggtcctcctctcacattgaacccttttgagccatgtccatccccttccaccctgcagcaacctgggctggctgagttatggggctttgaagggagacgggatcctcatcgtcgtcaacacagtgggtgctgcgcttcagaccctgtatatcttggcatatctgcattactgccctcggaagcgtgttgtgctcctacagactgcaaccctgctaggggtccttctcctgggttatggctacttttggctcctggtacccaaccctgaggcccggcttcagcagttgggcctcttctgcagtgtcttcaccatcagcatgtacctctcaccactggctgacttggctaaggtgattcaaactaaatcaacccaatgtctctcctacccactcaccattgctacccttctcacctctgcctcctggtgcctctatgggtttcgactcagagatccctatatcatggtgtccaactttccaggaatcgtcaccagctttatccgcttctggcttttctggaagtacccccaggagcaagacaggaactactggctcctgcaaacctgaggctgctcatctgaccactgggcaccttagtgccaacctgaaccaaagagacctccttgtttcagctgggcctgctgtccagcttcccaggtgcagtgggttgtgggaacaagagatgactttgaggataaaaggaccaaagaaaaagctttacttagatgattgattggggcctaggagatgaaatcactttttattttttagagattttttantttngnagntgngngtgcacnctttagaaatatncttaaaaggcnngcgcngtggtcacgcctggtnatncccagcactttgngagggccagtgtggcggatngctgaagtcngnagtcaagaacaantgatnacatgntgaacccattttttctataaatccaaatttccagatgatagccatgccgttatcccataattgggagcggcggcaggaatgcgtgtacccagacgtgagctatctcaggctcagagcccaggatataatagaccatcaagataatatacaaaaaaggtgcccctgtagaaaaacacacacacaaggggcacatctagtgccaaatcg

SEQ ID NO: 494679 - DNA, 145 bp, Homo sapiens
caataaccgcgcgacgagcaggcccggcacgggactctcgagatagtgctgcgcgatgaacgcctccagcacctgcacctcgatcggcgcgtcgggcgcctcgccttccgtgtcctccccctcctccgcgcgttattgcctaatg

SEQ ID NO: 494680 - DNA, 447 bp, Homo sapiens
  misc_feature (1)..(1): n is a, c, g, or t
  misc_feature (6)..(6): n is a, c, g, or t
  misc_feature (28)..(28): n is a, c, g, or t
  misc_feature (48)..(48): n is a, c, g, or t
  misc_feature (68)..(68): n is a, c, g, or t
  misc_feature (81)..(81): n is a, c, g, or t
  misc_feature (189)..(189): n is a, c, g, or t
  misc_feature (238)..(238): n is a, c, g, or t
  misc_feature (259)..(259): n is a, c, g, or t
  misc_feature (320)..(320): n is a, c, g, or t
  misc_feature (330)..(331): n is a, c, g, or t
  misc_feature (345)..(345): n is a, c, g, or t
  misc_feature (367)..(367): n is a, c, g, or t
  misc_feature (426)..(426): n is a, c, g, or t
ncgaantcgccgtgaaaacgccccccanttgacccaatttagcagggncaaaatttccctgccaccanaatctctgagccnccaaagtagtaatggaaattgttttaagtgacgcccgtgactgatgtatggggatagttgaactgaacattccggagcaatggagtggagaccctggttgtagaattncttaagctgggaagacgtgccctggttcccataaatcctttgtgcaatnccatggttttcattggacagnctcttcaaaaaatcatagtccacatcaaatcccatgcccaaactgaacaaggagatattgncttggatgtnnccttaacgttttcntgaatttttgacagttttagtngcccacttgttggatctccatcagaaaccaaaatgatcagcgagacggagttggggctnacagcccaagtattgcttatt

SEQ ID NO: 494681 - DNA, 233 bp, Homo sapiens
  misc_feature (36)..(36): n is a, c, g, or t
aaaaactttcaggctgggtatatcattgtataaaanctttcaggccaggggtttacgcctgtaatcccagcactttgggaggccgagatgggtggatcacctgaagtcaggagtttgagaccagcctggagcctggccaacatgaaccccgtctctactaaaagtaaaaaattagggcatggtggtgcatgcctgtaatcctagctactcaggaggctgagacagaagaatcg

SEQ ID NO: 494682 - DNA, 333 bp, Homo sapiens
aataatgagccactgtgcctggccagttttcatctttagcatctcctattatacatatgttgcgtcttcttttcctgtcttatgtgctactctttcttgagcttttttcatctctttcatttcttttttattcttgaaaattttgtcattttgtttttcttaaggcaccattgtgtttatttgttctaaggttcttctagtttaatcttcgtttctgaagttactttttcttttgtttctaatatattctgagagaagcacattgtttctgagtttttctaatgctggtttctggttaatgtgtgttatgtgtttaatgtatttcagtttgtt

SEQ ID NO: 494683 - DNA, 457 bp, Homo sapiens
gccacgtcgtacggagagtgcgggtcacagaagtagtgaagaagtattctcagttacagtatgcgctaatcccatcacgcctttatatggagaaggaacgagagaaggaaagttatgtgatgatgaggcagaggaagagaaaggtgagaaagaagaggtaagatgaacgatgatgaagaaatagcctaagtatcgtagatgtgggttcaggatgaggaggatgatcagcggtatggataagaaggatgaaaacgtaagaagtatcgagagagaaattacattgattcatggaaggaacgtaaacgaagatcaaggcgtatctggatccagaaactcctgcatgacatcagcctcaagaggagtatggagaatgtctacagagatgcctcactaattgactgggaagagcacttggccagtcaagcacgttgtctgtggaaggtctgttggcaagtca

SEQ ID NO: 494684 - DNA, 332 bp, Homo sapiens
ggtcgactgctgctgatgatgatctagggactgcaattttagaattgctgagctagagtgatggatttactttcagttttgagatattcatgtctactggtaatgtctagctcaccaccaattttgtagcttctagtgctgtttcttcttttctctctgcttctttttttcttttctcttctaaactctcaattctactacgcttaatgaaaaacaaagcaaaaaacacttacatgaatctccccagccaaaaggaatgaacttttacatccttattcactgaggagtcctacctgttgagtattatatcggcttttctcatctatgttaca

SEQ ID NO: 494685 - DNA, 84 bp, Homo sapiens
attgtgaggttatgggggatgctcgctccaaccgactgctgtcagcttcaccgttccagtatgtaaatcctgagtcaagccaac

SEQ ID NO: 494686 - DNA, 350 bp, Homo sapiens
acataaagtccttttaaggagataatctaaaatgaaaagtggatccccagcccatttatcagtggtcagttaatgcctaagagtgagagtagttctattcacattcctcaagatatttaatatcggctgcgttatgtcttatgtctgcttcaatcatttattggcggcaaaggattatatagtctatgaggtgccttgctgtgtaggaggatgaaaggggagttgatagtctcatgggactaatttggcttcaagtttcatgaatctgtaactagaatttaattttcaccccaataatgttatatatagcctttgataaagagcaaataataaattaaacctattctttc

SEQ ID NO: 494687 - DNA, 381 bp, Homo sapiens
ctgaacaccttccacaacatcgccctggtgacagtgatgagcaccgggagtctgcaatggcgccacctgcatctctgacacactggaggatcctcctgtcggggctacctgctttgcatctgcatgacttcctctgccagctctcatgatactcgcgatcctcaggacgcaggtcacattcacctgtgggcagagggacaggtcagacacccaggcccacccagacgaccatccatgaactgtgctccccagctctcccgccggtctccgactagggcatggctgaagccttgccttccttgcaggggggccagccattgtctcccacctggggagtttcttcctggcatcatgccttctgaataaatgccgattttatcc

SEQ ID NO: 494688 - DNA, 440 bp, Homo sapiens
agcgggttatcagaagaggccgttgagcgcggcgcgtgaccaggctgtgcagcggttctcccacccagcaaccgtgcccgccgcagaccgctcccagccgcggagccgagcacagcgtcgtggcaggcgtccaccgcctcggcgtggccgcctcctctctctgcctcactgtgtggccctcacctcatgccgtaggctcagagccagacccaggccaggctcaggcccatccccggcacggcagcgagccaaagtgaacaccggcaacgcgagtggaactcgaccagaagcaaagggaccgaagacagaagggaaacagaggaatgagagcgacgccgacggagagataaaaaggaacgaggacagataagaaaaacaaagttatagaaaccgttatgggaaaagaaaaagaaaaggaaaagaacacaagagaaaaagac

SEQ ID NO: 494689 - DNA, 400 bp, Homo sapiens
  misc_feature (344)..(344): n is a, c, g, or t
  misc_feature (375)..(375): n is a, c, g, or t
tcttaatttaaaaaatgtggttataggtatattttacagagcactaattacaaaatgagagacataataattgttaaaaccttgcttagaaggttccccttttatttgggggcatattggcagaatgtgtaaagggagaaaggtacagcctaagggaagaacatgtttgggttgcatgggactttattttctggtccactttcattttttccagtccctcctgtgtttgcctctgccgctagtgtaaactgggatttcagtcttacagtagtctgtctacccagtggcattgtgcttgtttgaattcagttcagagtaggaggttggggtttggaactaggaantcaggaggaccccagacccccagctctggcntcgggacttggcttttgtggactct

SEQ ID NO: 494690 - DNA, 239 bp, Homo sapiens
gtccacccctggagccccaaaatgtttagcccttctttaacttttttttcctaaaacacattgctactcttcctttcccatgttcgtttctggagcagctttactccaagaggaaggaatcagtaatcaacacaagtaataggtctgagtagcagatttcaaataccacaacaagggcaggcaaatagaaatatgctgagcaggtcaggcgcagtggctcatgcctataatcccagcac

SEQ ID NO: 494691 - DNA, 1064 bp, Homo sapiens
  misc_feature (135)..(135): n is a, c, g, or t
  misc_feature (406)..(406): n is a, c, g, or t
gctcctttcgtcgcctgatcgccgtccatcatgggtcgcatgctatgttcccgggcagaggtgcctgtcccagcttcggactggtacccatactcgactgcaagccgctccccacattgggattgaacgttgacnatcctgatcgagggtgaaggagcagtactttatcataacttggtcctacgtaagggcctttactctcggtcacagaactcggctgttacattccgtgatgagtagttctacactggatggttgcaccaaaagctcaccgctctattgttagtaccaagtgcaaactcataaagactctttgagagcaaattcccctcttaagttgcatgacacgggagcctatggcgtactctgtaatgcgtctcctcggacatgcattctgcatacccanttttagtctcataaggacacacgaccatgtcttgtcatcgctatccagaagagacgacaattctttagaagaacggaaatcaatgacacacggatcaaaggtattgctatacagttacaccgtcctcgagttcttaattcagatgaagccggattgcacccgtgtccggctcgactattactgaatgaaccaatgcgaggtcgcgtcccttcccatacttggagacctatggaagtcatgctaacagcctctgacctgtgtcgcataaaattttgtccgtgtacctccatgcattaaaaatgatttgttttactcatgacataatccctagaaaatcgcatgacgaccataagttcgggggcgcaccgctggccccaggaaaaaagctatggcaacaccttgcggggggacgcgggcaccgaaaggcaaggaacaagggcaaacagggtgtccaggagggaccccgtgcaaaacatgggatggccattccgcaaaaaacccggaggtccacggcgctgaaacaccaggaggcgcggaagggtattacggccatcgcgaccacgcgcgcagcagatcgatgtacaaccgcaaccagctgcgcacccagagacggcggacacggacatcaccacgacgcaacacggcacagagcgagcat

SEQ ID NO: 494692 - DNA, 711 bp, Homo sapiens
  misc_feature (8)..(8): n is a, c, g, or t
  misc_feature (103)..(104): n is a, c, g, or t
  misc_feature (121)..(121): n is a, c, g, or t
  misc_feature (123)..(123): n is a, c, g, or t
  misc_feature (159)..(159): n is a, c, g, or t
  misc_feature (169)..(169): n is a, c, g, or t
  misc_feature (176)..(176): n is a, c, g, or t
  misc_feature (233)..(233): n is a, c, g, or t
  misc_feature (266)..(266): n is a, c, g, or t
  misc_feature (275)..(276): n is a, c, g, or t
  misc_feature (354)..(354): n is a, c, g, or t
  misc_feature (400)..(400): n is a, c, g, or t
  misc_feature (420)..(420): n is a, c, g, or t
  misc_feature (487)..(487): n is a, c, g, or t
  misc_feature (562)..(562): n is a, c, g, or t
  misc_feature (620)..(620): n is a, c, g, or t
  misc_feature (646)..(646): n is a, c, g, or t
  misc_feature (700)..(700): n is a, c, g, or t
tttttttngcccagagaggggccgggacttccctcagaatcacacagaagcggggttgtggggaacccacttgcccccacaccagggtgctctctgctcctanngggaggtggggtggttncntccttgttcagggtgaccatgggaagcccatttggngttagatgcnccgagangccaccgggaagaccatgggggcctgttccgttccctgctccccatacaggcgaggntgcgtgctcacagcttcctgttccccaggttgncctgcttgnnacgcacccggtggctgctccatccacacgcaagattgctacttcagatgctccgcacgctggagatgctggtcaggtnctcccgcatccgaaagctgagcgagcgggagctgcgatatctgtgncttggtctcagagagctgtnggtggtgtgaagctccggagtgagcctcgacggcccgggccaggcagtgcccgggccctcgcatgcncagccggagacacccgcagcagaggaagctgagcacggctctgcacacctccctgctgcggaaggagtggatganggggttgaccgccgagttgaggacggccagggccaggatccagtgcatgccccgcagntactcctgggcccagaggttggagcnaaagacgtgggccagcagcagcccgaagagtgggccccagcacaccagggaggncagccggatca

SEQ ID NO: 494693 - DNA, 428 bp, Homo sapiens
tgattagtcaataggctggttgcagaaatttaggaatagacatggcattaaatttttaaagatttgtggtgataaaacttctgctgatcgtgaagcagcggagcaattcattgatgagtttgccagcatcagctggatgcagtggcgcatgcctgtaatcccacctctttgggagggtgaggcgggaggattgcttgagcccaggagtttgagaccagcctgggcaaaatagggtgacccaattgctacaaatctttttaaaaaaaattagctgggtggtggttcatgcctgtagtcctagatactccagaagctgaggctgaaggaccacttgagcccaggaatttgaggctacggtgggctctgatcatgccactgcactgcactcctacctggatgacagagtgagaccctgtctcttaaaaaat

SEQ ID NO: 494694 - DNA, 452 bp, Homo sapiens
  misc_feature (38)..(38): n is a, c, g, or t
  misc_feature (423)..(423): n is a, c, g, or t
cctgtctccgttctctgcagatcttgggatctggtgcnatctgagagccatcccatgcctggtgtggttcatctttactgcttgagcagcccatctccaggcagttctatccttgggtctcattgtcagaattacttctcactctggccctcccgcatgtcccgctttcctgctgtaattctcttcctagcacttatttctaacatactatgtattttacttactcatttggtttgctttcttcttcattagaatataaactctacaaagacagctatttttatggttttctttgtgtggtttttttgtttgtttttttaccaataccattttctttgctttttgtggtggttggtttgttttctcattaaactttatcagctcttcttccgactccagccctgctcttgtattttagcctgnctcttgccttgggaacaggcttctgctgt

SEQ ID NO: 494695 - DNA, 311 bp, Homo sapiens
taatagcggtccatatcaatgcagtaggaaacactagatcaataagacatagagagcagggacgcacagagtataggggggctacagccatactacaacagccccatacagttccctaagtgtatcccctacaacataccccatacagtgatatctagaagcctctgctatagtactccaagagataagggaactcactagcttctctatctctggccagctagtgatgctagaattctagtatcatagtagctagatatctacagctcacggctcatacaaaatataggagctatttgattcatagtatc

SEQ ID NO: 494696 - DNA, 557 bp, Homo sapiens
  misc_feature (111)..(112): n is a, c, g, or t
  misc_feature (127)..(128): n is a, c, g, or t
agcggaggagatccaaagtttggtgtctctctctctctgtctctttctttctctttctccccccaaaccactctcactccctccctccctctctccttcccctatttgcannatcatatttcctccnnctctgcttcttttctcttctgccctccttgtgggcagtcatgaaaatcattcagactgtgttgattagcagatttattattctattgagaaaaaagccacctgggaaatgttgttgtgagattatttttatatgaaggaataagctgaactcaagcagatggtaagaatagtacaaacacccttaaggcaccaatctcactggacaccacagtattctgaaaggcgatttgacacttaattcccattttcttaaaataacagttttggtgacttaaaacatatttgaggagtatcactatggatgtgtggaaaaaaatgtttgccagtactcaggcaaaaaatagggtacattaagcagggtggctgtgcattcactgggaatttcctggggggggtgagaaagcgaatttctaactcgcaagagtgac

SEQ ID NO: 494697 - DNA, 212 bp, Homo sapiens
  misc_feature (1)..(1): n is a, c, g, or t
nctgtgtgtgtgtgttagggatatgtatttggggtgtgtgtttgggatgtgtacatatatagacacgtgcttaatgatgaggacaaatttggagaaatctaccattaggcaattttgtctttgtgtgaacatcatagattgtactcacacaaacctaggttgtatagcctacaatgcacctaggctctgtggtacagcctgtggctcctaag

SEQ ID NO: 494698 - DNA, 964 bp, Homo sapiens
ctgcccgcaacatactcgtcacagcaacctggtctgcaaggtgtctgactttggcctgtcccgcgtgctggaggacgaccccgaggccacgctacaccaccagtggcggcaatgatccccatccgctgagaccgtccccggaggccatttcctaccggaagttcacctctgccagcgacgtgtggagctttggcattgtcatgtggcgaggtgatgacctatggctgagcggtcctactgggagttgtccaaccacgatggtgatgaaagccatcaatgatggctttccggctccccattacccatgggatctgccctctccgatcatctaccagactcatggatgccatgtgctggtcatcaatggagcgtgctccgccccgcactccaaggttcgtctgaccatcgtctagcatcctggtacaagctcattcgtgtccctgtactccctcaggaccctggctgacttttgacccccgtcgtgtcgtatcctggctccccagacgcgagacggctcgtgacggggtgctcccttccgcgcggtgtccgagtggctggagtccatcaaggatgcggctcgtctccggagccgttcatggcggcccggcgtacacctgtcgcatcgtcataacgtggtgcagatgaccaacgcacgcctctcgacgagcgatcgcgcgtgcggctgcccggctaccagaagcgcactcgactacacgcctgctgggacatcgggaccacgtgagccttggtgggtgatccccattctgagcctacaacagcggcctggagccccctatcgggccctacgaatgcgttgccagcatcacgtattgcgcctctccgctctgctcccatgcttgggccacctgggggacgttaatctccattctcgctcctttccttccgcctgacacgtccgcttcgacggctctcagatgcacccctggccccacctgagagatac

SEQ ID NO: 494699 - DNA, 1398 bp, Homo sapiens
ctggtgaggggcccgcttgcctcggctacctgcgtgcaccaagccagaccgctgcccggcgccctctgtcctgacttcaggggctgccctgctcccagtgtcttcctgatggtgtggaagacgcacatggccatcccgccccttcacccgagggatgatgccacaccaatgctgtggcaccctggactctgtgggctgcactctgtgcccatgtggacactgctgggtaggcccagtcccccctcaccatggggcatgtgcacagcagcgatgggatcctgacttgaattttcccaacttgtaccccactccttgctgcagatggggcatgtgcccatagcactggtcctagcttccacacgtggtcggctgacgacggacgggagcccgtatgtcatcccttggaccctcaacggcctcccatcagttgactacgaagactcctagtagccccttaattacagtgaaaaagccatctagtgtacacctgtgattgcctaccgagtacccaattatccacttgaaccacttggcgagggctatggcgcttgagacgagttcggacattatgggcaagcagagtagcgtagataacccctacacctggctggtaccccctctctagaaccccaaaacacacccaaagcaaccactgggagcctccaggtggacacccacatggcatatggcaaacctatgcatggttatagagccacataacttgtgccctacggaccttgcgccatgaaggagtccaccgcatagatttgcttttgcctcgccgtagtgatgcaccattcttgcccaagagaactggggggcctaggccaagggattgagcgcgggcaccaagaacaaaggcaacagggatgggcatggctagggcggccaaacatcaagaggtgcccaccaccaaatccagagacacaatacaagagcgacaccccagacgcaataggagtggcacagagacccacaagccagacgacccgtggaacagtacacgcccaccatagcccagcacgtagtgaccaccgcggtgtggcacaagatgagcagcgccatagtagtagaacagaaagaccagatccacccccccgagaagaggagaatggagacaaacttccccctcaaccgtataacaaaactacgagagagcaacagcatagtacagacaacgaagacatgcaaacaccagagtaagcgacgagaaagaaacaaaaacaaaggcagcggagtcagaaaaaggagcctgcacatcgactcaggaaccaccgagcgaccagctagacaagcagcaacaccagaaaaggactggcccacgcagtacaaaagcagagctcagtatagaaaaccaagcacgaatatcatcagcctaccccagaacgaagccacaca

SEQ ID NO: 494700 - DNA, 428 bp, Homo sapiens
gtctacatcgtgcatttcacgcaggccgccgccctcgaacgcgcccaggcactgacgagcgtcaatttctgttccaaagaagagtaggaagcgatcgccgaggcgctgggtggtttccgcttcaccaccgggttcggaaaaacactctcccgcctggttcggcacggcatcggcgttcaccatgcgggcatgctgcccaagtaccgacggctcatcgaagttctcgcacaggacgggcttctcaaggtgatttgcggtaccgacaccctcggcgtcggcatcaacgtcccgatccgcacggtgctgctcacgggtctggccaagtacgacggtgtccgtactcgacatctgaaagcccgcgagttccatcagatcgccggtcgcgcgggtcgtgcaggctacgacacgatgggcaccgtcgtcgtaca

SEQ ID NO: 494701 - DNA, 1390 bp, Homo sapiens
ggaaatattggaaaaaaaaattgcgtctgtactgaacatgtacagacttttttcttgtccttattccttacacaatatagtacaataactatttgcatgacatttacatcggatattatgagtgatctagagttgatatgaagtatatgggaggatgtgcaaaggtgatgtgcaaatactatgtcattttatatcagggacttgagtatcctttgttaccctcaggagatcctgaaaccagtcccccatggatactgagggctgactgtatagtcctatcctcacggaactttcattctaatgggggaagactgactataaacaaaatatatgtaataggtggtggtaagtaccgtggagaagtaacaaatggggcaaagtgagttatacagctccattcttagaaaccttggagtacttttcttagtttatactcgtggtggtttccttttgtctcctttattacatgggactctgacatgtgcccatagctagggtgacagtaggatctacccgatagtagggtggcagtaggatctacccaaaaagcgtcctgctgatacaggaccaaagcatcctgttgttctcgagcctataaaaagagctaatggtcttgcttctcttaactgtggcctcctacactgtgttttggatgattggtgatgtcttggatattctgtttctttggaactttgaatatacaacactttactagggaattagcaatggaagcagagcaaagatgtacagaggaaacaatgcgtaactctgatggaattgaagtcatgaggcagcagagagcttaaattacagctttaaaaatttttattttttagagggaatttacttgggagtaacagcagtaatagttaacggagccagaatgcttgagtcatataattgcaaagcagagttgggagcaacagatgctaaagagtagttgctgtagttcctctttgggtcgtaggagcagttgtcatattactatatagctactgcatgaagaagagttcttagtgaggcctgggtgaacagctcttcttagtattctgtgtgaccccatttgaccttttaacaaatccctaagtaaataaatagcccctcaggtaaactaagtttttctctgctgtttttttgcttgagagagctataactgtaatagacttatatttctgaacattttagtgcttgccaatatttggtaatatttatgtttcctatatttgtaatgaacattcttcttccggtacattttttgttaaattattgtttgatggataaaagttcaccttttattgtataaaattgactgagattaatttatacacattgacaatgggtaaatagaatttttcagattattaaaagctgaaggatgcccacgtaagca

SEQ ID NO: 494702 - DNA, 1096 bp, Homo sapiens
  misc_feature (823)..(823): n is a, c, g, or t
  misc_feature (827)..(827): n is a, c, g, or t
  misc_feature (864)..(864): n is a, c, g, or t
  misc_feature (899)..(899): n is a, c, g, or t
  misc_feature (901)..(901): n is a, c, g, or t
  misc_feature (905)..(905): n is a, c, g, or t
  misc_feature (919)..(919): n is a, c, g, or t
  misc_feature (923)..(923): n is a, c, g, or t
  misc_feature (926)..(926): n is a, c, g, or t
  misc_feature (930)..(930): n is a, c, g, or t
  misc_feature (936)..(936): n is a, c, g, or t
gcggccgcctactactactaaattcgcggccgcgtcgactggaactcggagcacacagcactggcttactgtggtacctgtgcagtgaaattgaagacagaatcaccaggatggaacacaggtcttgcaggatcacggaaaaccttcttagagttgtcttgacaccactgatgtcgagtgtgcgggtgtttgtaggatggcctgccactcagtccaggggcaggagcaacggggagatcccacaagcaaagtgaactgggggatgggctgaaggggctccaggcaactgagccctactcgcaggtcctcggccttggcccaaacaggaatgaggggcacagagtgcccgggtaaccgctcctgggagcagtggggaactgtcggatacttgaactctcaagagctgggctctgagcgtcctcgtccagctgccaacttggccaaaggctaagccagcagattgttctgttgccgggcaacgcgacttctaaacctgagggagtgggcatgtgagcacataatggcaccagtgacagagcgaccataatggatgaataagcgcagccaggtacccgcgcaaggcacctgctggcaatggcaggaggcggacgtggggggtcgtgcagtaggtactggagggagagacgtgggcacaaaggtcgcgggaggaacaggtgcccacaatggctgcatatttgcccgtggatcactgaagattcctgctctcctgctgaggtggagactgcagtgagctgagatcgcaccattgcactccagcctgggcaacgagtgcaaaactcagtctccagataaaaaaaagaanaaanaaaaaaaagaggccgggtgtggtggcttatgcctatnatcctagcactttgggaggtcggggtggacggatnangagntcaggagttggagnccanccnggcnaacatngtgaaaccccgtctctagtaaaaatacaaaatttagtcagacatggtgggcaggagagagcatgtgcaggggaacatccatttataaaaccatcagacctcatgagacttattcactaccatgagaacagcatgggggaaactggctccatgattcagtt

SEQ ID NO: 494703 - DNA, 509 bp, Homo sapiens
gcggccgcctactactactaaattcgcggccgcgtcgagcaacagatgctaaagagtagttgctgtagttcctctttgggtcgtaggagcagttgtcatattactatatagctactgcatgaagaagagttcttagtgaggcctgggtgaacagctcttcttagtattctgtgtgaccccatttgaccttttaacaaatccctaagtaaataaatagcccctcaggtaaactaagtttttctctgctgtttttttgcttgagagagctataactgtaatagacttatatttctgaacattttagtgcttgccaatatttggtaatatttatgtttcctatatttgtaatgaacattcttcttccggtacattttttgttaaattattgtttgatggataaaagttcaccttttattgtataaaattgactgagattaatttatacacattgacaatgggtaaatagaatttttcagattattaaaagctgaaggatgcccacgtaagca

SEQ ID NO: 494704 - DNA, 540 bp, Homo sapiens
  misc_feature (333)..(333): n is a, c, g, or t
  misc_feature (356)..(356): n is a, c, g, or t
  misc_feature (360)..(360): n is a, c, g, or t
aagtctggtaggtcacacagaggaccaagcccagcagtactatgtgtgtagtgctgcagcagggcctgaggagaaggtgctgctgggcagctgtggcctctcttcagccagacccccagagcattgtagtcagcagtaacacatcaaaacaggtatctagccttcctgggcctctgtagtgaatgtacaaattctaatgtgattttcaaaattagtctagcccgcaagtacaaaaccatgcttagaagaaagaacaaagggaccgggcacagtggctcacgcctgtaatcccagcactttgggaggccgaggtgggcggatcacctgaggtcngagttccagaccagcctggccancatngtgaaaccccgcctctactaaaaatacaaaaattgcccaggcatggtgatgcgcacccataatccagctacttgggaggctgaggcaggagagttgcctgaacctaggaggcggaggttgcagtgagccaagattgcgccactgcactccagcctgggcaacagagtgagactctgcttc

SEQ ID NO: 494705 - DNA, 3638 bp, Homo sapiens
  misc_feature (3365)..(3365): n is a, c, g, or t
  misc_feature (3369)..(3369): n is a, c, g, or t
  misc_feature (3406)..(3406): n is a, c, g, or t
  misc_feature (3441)..(3441): n is a, c, g, or t
  misc_feature (3443)..(3443): n is a, c, g, or t
  misc_feature (3447)..(3447): n is a, c, g, or t
  misc_feature (3461)..(3461): n is a, c, g, or t
  misc_feature (3465)..(3465): n is a, c, g, or t
  misc_feature (3468)..(3468): n is a, c, g, or t
  misc_feature (3472)..(3472): n is a, c, g, or t
  misc_feature (3478)..(3478): n is a, c, g, or t
ggaaatattggaaaaaaaaattgcgtctgtactgaacatgtacagacttttttcttgtccttattccttacacaatatagtacaataactatttgcatgacatttacatcggatattatgagtgatctagagttgatatgaagtatatgggaggatgtgcaaaggtgatgtgcaaatactatgtcattttatatcagggacttgagtatcctttgttaccctcaggagatcctgaaaccagtcccccatggatactgagggctgactgtatagtcctatcctcacggaactttcattctaatgggggaagactgactataaacaaaatatatgtaataggtggtggtaagtaccgtggagaagtaacaaatggggcaaagtgagttatacagctccattcttagaaaccttggagtacttttcttagtttatactcgtggtggtttccttttgtctcctttattacatgggactctgacatgtgcccatagctagggtgacagtaggatctacccgatagtagggtggcagtaggatctacccaaaaagcgtcctgctgatacaggaccaaagcatcctgttgttctcgagcctataaaaagagctaatggtcttgcttctcttaactgtggcctcctacactgtgttttggatgattggtgatgtcttggatattctgtttctttggaactttgaatatacaacactttactagggaattagcaatggaagcagagcaaagatgtacagaggaaacaatgcgtaactctgatggaattgaagtcatgaggcagcagagagcttaaattacagctttaaaaatttttattttttagagggaatttacttgggagtaacagcagtaatagttaacggagccagaatgcttgagtcatataattgcaaagcagagttgggagcaacagatgctaaagagtagttgctgtagttcctctttgggtcgtaggagcagttgtcatattactatatagctactgcatgaagaagagttcttagtgaggcctgggtgaacagctcttcttagtattctgtgtgaccccatttgaccttttaacaaatccctaagtaaataaatagcccctcaggtaaactaagtttttctctgctgtttttttgcttgagagagctataactgtaatagacttatatttctgaacattttagtgcttgccaatatttggtaatatttatgtttcctatatttgtaatgaacattcttcttccggtacattttttgttaaattattgtttgatggataaaagttcaccttttattgtataaaattgactgagattaatttatacacattgacaatgggtaaatagaatttttcagattattaaaagctgaaggatgcccacgtaagcaaaaaaaaaaaagaaaaaaccaacaaaaataaacccaaacccctcaaacaatttcgaacacgaaacattcttctgatgccggcatccctgcttgcaggtgtgaagggggcaggaatcagcgaggtgtcctgggctgagtccccggagtgggaagaggtggcaggaaggggatctgaggaggagaacaggggtcctggtggtctgtgcttcttcccagacacgggagctgtagaggagacctctgcagcagatgctaggggggccactaggcccaggcagtcttgggacttgggtctgtcctgctgtgcatccatagtgggtgctttagaaacgggaggcccacccgaagcccctgttgcaagtgaggacaaagtgtgggaaggccgtgagggtctgcagtccgagatggccttgtcctcaacgtgcagtgcactgttgatgcgctggaatgccgcctctttttccaggtgcaggtcttcagccgtgacccggtaccccagctctaagggaggtggcagcatcaaaggctcccctcgcctgcgtggcagcaggggaatcttgcgtctacggggcctagaggcctgggatctgggggagccacccctgggggcgagtgtctgccctggtgctgtatctgccgccttttcacaccgggtgtgacccgaagagacagcctgaggcctgtcctcactcactgtctttgagtaactgagggtcagctggcagcgggatgaggctggccccctcctctgctttagccccggcaagcctcccgtggagctgtaggagctggagatggcatttcgtttggtgctcgagctcgtccaggatgtctgggatgtctggttatatctgatttctgagctctgggcatggaggtctgtctgcagaggcccgggcctgggcacaaagggagagaggcctccattgtcccgcaggggccaaaatgcagaccgtgcatccccggtgacctcggggaccgttctctgatcatcaggattttcttggactctggggtccttgtcctgctcaggcatccctgccccgctctccttgagggccctcaacactatcttccctggacacaagtctggggacagccgggtgttgtggaccccaaaggggtgactacctgctcctgggccccacagagtccttgtgctcagtgtagtggctgagctgggggatgccctggaactcggagcacacagcactggcttactgtggtacctgtgcagtgaaattgaagacagaatcaccaggatggaacacaggtcttgcaggatcacggaaaaccttcttagagttgtcttgacaccactgatgtcgagtgtgcgggtgtttgtaggatggcctgccactcagtccaggggcaggagcaacggggagatcccacaagcaaagtgaactgggggatgggctgaaggggctccaggcaactgagccctactcgcaggtcctcggccttggcccaaacaggaatgaggggcacagagtgcccgggtaaccgctcctgggagcagtggggaactgtcggatacttgaactctcaagagctgggctctgagcgtcctcgtccagctgccaacttggccaaaggctaagccagcagattgttctgttgccgggcaacgcgacttctaaacctgagggagtgggcatgtgagcacataatggcaccagtgacagagcgaccataatggatgaataagcgcagccaggtacccgcgcaaggcacctgctggcaatggcaggaggcggacgtggggggtcgtgcagtaggtactggagggagagacgtgggcacaaaggtcgcgggaggaacaggtgcccacaatggctgcatatttgcccgtggatcactgaagattcctgctctcctgctgaggtggagactgcagtgagctgagatcgcaccattgcactccagcctgggcaacgagtgcaaaactcagtctccagataaaaaaaagaanaaanaaaaaaaagaggccgggtgtggtggcttatgcctatnatcctagcactttgggaggtcggggtggacggatnangagntcaggagttggagnccanccnggcnaacatngtgaaaccccgtctctagtaaaaatacaaaatttagtcagacatggtgggcaggagagagcatgtgcaggggaacatccatttataaaaccatcagacctcatgagacttattcactaccatgagaacagcatgggggaaactggctccatgattcagtt

SEQ ID NO: 494706 - DNA, 422 bp, Homo sapiens
  misc_feature (333)..(333): n is a, c, g, or t
  misc_feature (356)..(356): n is a, c, g, or t
  misc_feature (360)..(360): n is a, c, g, or t
aagtctggtaggtcacacagaggaccaagcccagcagtactatgtgtgtagtgctgcagcagggcctgaggagaaggtgctgctgggcagctgtggcctctcttcagccagacccccagagcattgtagtcagcagtaacacatcaaaacaggtatctagccttcctgggcctctgtagtgaatgtacaaattctaatgtgattttcaaaattagtctagcccgcaagtacaaaaccatgcttagaagaaagaacaaagggaccgggcacagtggctcacgcctgtaatcccagcactttgggaggccgaggtgggcggatcacctgaggtcngagttccagaccagcctggccancatngtgaaaccccaactgctgccactcaccagaacaatgggagtagggtcagaaaatgtcagata

SEQ ID NO: 494707 - DNA, 3512 bp, Homo sapiens
  misc_feature (3239)..(3239): n is a, c, g, or t
  misc_feature (3243)..(3243): n is a, c, g, or t
  misc_feature (3280)..(3280): n is a, c, g, or t
  misc_feature (3315)..(3315): n is a, c, g, or t
  misc_feature (3317)..(3317): n is a, c, g, or t
  misc_feature (3321)..(3321): n is a, c, g, or t
  misc_feature (3335)..(3335): n is a, c, g, or t
  misc_feature (3339)..(3339): n is a, c, g, or t
  misc_feature (3342)..(3342): n is a, c, g, or t
  misc_feature (3346)..(3346): n is a, c, g, or t
  misc_feature (3352)..(3352): n is a, c, g, or t
ggaaatattggaaaaaaaaattgcgtctgtactgaacatgtacagacttttttcttgtccttattccttacacaatatagtacaataactatttgcatgacatttacatcggatattatgagtgatctagagttgatatgaagtatatgggaggatgtgcaaaggtgatgtgcaaatactatgtcattttatatcagggacttgagtatcctttgttaccctcaggagatcctgaaaccagtcccccatggatactgagggctgactgtatagtcctatcctcacggaactttcattctaatgggggaagactgactataaacaaaatatatgtaataggtggtggtaagtaccgtggagaagtaacaaatggggcaaagtgagttatacagctccattcttagaaaccttggagtacttttcttagtttatactcgtggtggtttccttttgtctcctttattacatgggactctgacatgtgcccatagctagggtgacagtaggatctacccgatagtagggtggcagtaggatctacccaaaaagcgtcctgctgatacaggaccaaagcatcctgttgttctcgagcctataaaaagagctaatggtcttgcttctcttaactgtggcctcctacactgtgttttggatgattggtgatgtcttggatattctgtttctttggaactttgaatatacaacactttactagggaattagcaatggaagcagagcaaagatgtacagaggaaacaatgcgtaactctgatggaattgaagtcatgaggcagcagagagcttaaattacagctttaaaaatttttattttttagagggaatttacttgggagtaacagcagtaatagttaacggagccagaatgcttgagtcatataattgcaaagcagagttgggagcaacagatgctaaagagtagttgctgtagttcctctttgggtcgtaggagcagttgtcatattactatatagctactgcatgaagaagagttcttagtgaggcctgggtgaacagctcttcttagtattctgtgtgaccccatttgaccttttaacaaatccctaagtaaataaatagcccctcaggtaaactaagtttttctctgctgtttttttgcttgagagagctataactgtaatagacttatatttctgaacattttagtgcttgccaatatttggtaatatttatgtttcctatatttgtaatgaacattcttcttccggtacattttttgttaaattattgtttgatggataaaagttcaccttttattgtataaaattgactgagattaatttatacacattgacaatgggtaaatagaatttttcagattattaaaagctgaaggatgcccacgtaagcaaaaaaaaaaaagaaaaaaccaacaaaaataaacccaaacccctcaaacaatttcgaacacgaaacattcttctgatgccggcatccctgcttgcaggtgtgaagggggcaggaatcagcgaggtgtcctgggctgagtccccggagtgggaagaggtggcaggaaggggatctgaggaggagaacaggggtcctggtggtctgtgcttcttcccagacacgggagctgtagaggagacctctgcagcagatgctaggggggccactaggcccaggcagtcttgggacttgggtctgtcctgctgtgcatccatagtgggtgctttagaaacgggaggcccacccgaagcccctgttgcaagtgaggacaaagtgtgggaaggccgtgagggtctgcagtccgagatggccttgtcctcaacgtgcagtgcactgttgatgcggggcctagaggcctgggatctgggggagccacccctgggggcgagtgtctgccctggtgctgtatctgccgccttttcacaccgggtgtgacccgaagagacagcctgaggcctgtcctcactcactgtctttgagtaactgagggtcagctggcagcgggatgaggctggccccctcctctgctttagccccggcaagcctcccgtggagctgtaggagctggagatggcatttcgtttggtgctcgagctcgtccaggatgtctgggatgtctggttatatctgatttctgagctctgggcatggaggtctgtctgcagaggcccgggcctgggcacaaagggagagaggcctccattgtcccgcaggggccaaaatgcagaccgtgcatccccggtgacctcggggaccgttctctgatcatcaggattttcttggactctggggtccttgtcctgctcaggcatccctgccccgctctccttgagggccctcaacactatcttccctggacacaagtctggggacagccgggtgttgtggaccccaaaggggtgactacctgctcctgggccccacagagtccttgtgctcagtgtagtggctgagctgggggatgccctggaactcggagcacacagcactggcttactgtggtacctgtgcagtgaaattgaagacagaatcaccaggatggaacacaggtcttgcaggatcacggaaaaccttcttagagttgtcttgacaccactgatgtcgagtgtgcgggtgtttgtaggatggcctgccactcagtccaggggcaggagcaacggggagatcccacaagcaaagtgaactgggggatgggctgaaggggctccaggcaactgagccctactcgcaggtcctcggccttggcccaaacaggaatgaggggcacagagtgcccgggtaaccgctcctgggagcagtggggaactgtcggatacttgaactctcaagagctgggctctgagcgtcctcgtccagctgccaacttggccaaaggctaagccagcagattgttctgttgccgggcaacgcgacttctaaacctgagggagtgggcatgtgagcacataatggcaccagtgacagagcgaccataatggatgaataagcgcagccaggtacccgcgcaaggcacctgctggcaatggcaggaggcggacgtggggggtcgtgcagtaggtactggagggagagacgtgggcacaaaggtcgcgggaggaacaggtgcccacaatggctgcatatttgcccgtggatcactgaagattcctgctctcctgctgaggtggagactgcagtgagctgagatcgcaccattgcactccagcctgggcaacgagtgcaaaactcagtctccagataaaaaaaagaanaaanaaaaaaaagaggccgggtgtggtggcttatgcctatnatcctagcactttgggaggtcggggtggacggatnangagntcaggagttggagnccanccnggcnaacatngtgaaaccccgtctctagtaaaaatacaaaatttagtcagacatggtgggcaggagagagcatgtgcaggggaacatccatttataaaaccatcagacctcatgagacttattcactaccatgagaacagcatgggggaaactggctccatgattcagtt

SEQ ID NO: 494708 - DNA, 112 bp, Homo sapiens
ttaaacgagtggccagtgttaaacgatggccagtgtaaaacgagcggccagtgttaacacgacggccagtgtacacctgcagtggcactgtaaaccgacgtcctgtgttcaa

SEQ ID NO: 494709 - DNA, 3238 bp, Homo sapiens
  misc_feature (39)..(39): n is a, c, g, or t
  misc_feature (69)..(69): n is a, c, g, or t
  misc_feature (123)..(123): n is a, c, g, or t
  misc_feature (2965)..(2965): n is a, c, g, or t
  misc_feature (2969)..(2969): n is a, c, g, or t
  misc_feature (3006)..(3006): n is a, c, g, or t
  misc_feature (3041)..(3041): n is a, c, g, or t
  misc_feature (3043)..(3043): n is a, c, g, or t
  misc_feature (3047)..(3047): n is a, c, g, or t
  misc_feature (3061)..(3061): n is a, c, g, or t
  misc_feature (3065)..(3065): n is a, c, g, or t
  misc_feature (3068)..(3068): n is a, c, g, or t
  misc_feature (3072)..(3072): n is a, c, g, or t
  misc_feature (3078)..(3078): n is a, c, g, or t
aagtttaaaacccctggtggttccccctttgtccccccnttaattaccaggggaactcctgaacatgtncccccatagcctagggtgaacaagtaggatcctaccccgaaaagtagggtggcnagtaggatcctaccccaaaaaccgtccctgcctgataacaggacccaaagcatcctgttgttctcgagcctataaaaagagctaatggtcttgcttctcttaactgtggcctcctacactgtgttttggatgattggtgatgtcttggatattctgtttctttggaactttgaatatacaacactttactagggaattagcaatggaagcagagcaaagatgtacagaggaaacaatgcgtaactctgatggaattgaagtcatgaggcagcagagagcttaaattacagctttaaaaatttttattttttagagggaatttacttgggagtaacagcagtaatagttaacggagccagaatgcttgagtcatataattgcaaagcagagttgggagcaacagatgctaaagagtagttgctgtagttcctctttgggtcgtaggagcagttgtcatattactatatagctactgcatgaagaagagttcttagtgaggcctgggtgaacagctcttcttagtattctgtgtgaccccatttgaccttttaacaaatccctaagtaaataaatagcccctcaggtaaactaagtttttctctgctgtttttttgcttgagagagctataactgtaatagacttatatttctgaacattttagtgcttgccaatatttggtaatatttatgtttcctatatttgtaatgaacattcttcttccggtacattttttgttaaattattgtttgatggataaaagttcaccttttattgtataaaattgactgagattaatttatacacattgacaatgggtaaatagaatttttcagattattaaaagctgaaggatgcccacgtaagcaaaaaaaaaaaagaaaaaaccaacaaaaataaacccaaacccctcaaacaatttcgaacacgaaacattcttctgatgccggcatccctgcttgcaggtgtgaagggggcaggaatcagcgaggtgtcctgggctgagtccccggagtgggaagaggtggcaggaaggggatctgaggaggagaacaggggtcctggtggtctgtgcttcttcccagacacgggagctgtagaggagacctctgcagcagatgctaggggggccactaggcccaggcagtcttgggacttgggtctgtcctgctgtgcatccatagtgggtgctttagaaacgggaggcccacccgaagcccctgttgcaagtgaggacaaagtgtgggaaggccgtgagggtctgcagtccgagatggccttgtcctcaacgtgcagtgcactgttgatgcgctggaatgccgcctctttttccaggtgcaggtcttcagccgtgacccggtaccccagctctaagggaggtggcagcatcaaaggctcccctcgcctgcgtggcagcaggggaatcttgcgtctacggggcctagaggcctgggatctgggggagccacccctgggggcgagtgtctgccctggtgctgtatctgccgccttttcacaccgggtgtgacccgaagagacagcctgaggcctgtcctcactcactgtctttgagtaactgagggtcagctggcagcgggatgaggctggccccctcctctgctttagccccggcaagcctcccgtggagctgtaggagctggagatggcatttcgtttggtgctcgagctcgtccaggatgtctgggatgtctggttatatctgatttctgagctctgggcatggaggtctgtctgcagaggcccgggcctgggcacaaagggagagaggcctccattgtcccgcaggggccaaaatgcagaccgtgcatccccggtgacctcggggaccgttctctgatcatcaggattttcttggactctggggtccttgtcctgctcaggcatccctgccccgctctccttgagggccctcaacactatcttccctggacacaagtctggggacagccgggtgttgtggaccccaaaggggtgactacctgctcctgggccccacagagtccttgtgctcagtgtagtggctgagctgggggatgccctggaactcggagcacacagcactggcttactgtggtacctgtgcagtgaaattgaagacagaatcaccaggatggaacacaggtcttgcaggatcacggaaaaccttcttagagttgtcttgacaccactgatgtcgagtgtgcgggtgtttgtaggatggcctgccactcagtccaggggcaggagcaacggggagatcccacaagcaaagtgaactgggggatgggctgaaggggctccaggcaactgagccctactcgcaggtcctcggccttggcccaaacaggaatgaggggcacagagtgcccgggtaaccgctcctgggagcagtggggaactgtcggatacttgaactctcaagagctgggctctgagcgtcctcgtccagctgccaacttggccaaaggctaagccagcagattgttctgttgccgggcaacgcgacttctaaacctgagggagtgggcatgtgagcacataatggcaccagtgacagagcgaccataatggatgaataagcgcagccaggtacccgcgcaaggcacctgctggcaatggcaggaggcggacgtggggggtcgtgcagtaggtactggagggagagacgtgggcacaaaggtcgcgggaggaacaggtgcccacaatggctgcatatttgcccgtggatcactgaagattcctgctctcctgctgaggtggagactgcagtgagctgagatcgcaccattgcactccagcctgggcaacgagtgcaaaactcagtctccagataaaaaaaagaanaaanaaaaaaaagaggccgggtgtggtggcttatgcctatnatcctagcactttgggaggtcggggtggacggatnangagntcaggagttggagnccanccnggcnaacatngtgaaaccccgtctctagtaaaaatacaaaatttagtcagacatggtgggcaggagagagcatgtgcaggggaacatccatttataaaaccatcagacctcatgagacttattcactaccatgagaacagcatgggggaaactggctccatgattcagtt

SEQ ID NO: 494710 - DNA, 400 bp, Homo sapiens
tggcccgggttactgcacgacttctattatcatacattagatttgctgttctgactttcatatacatagaacggacatagtatctgcatcttttatatctggcttgtatcactcaaaataatggccacttgcagaaagacactacagtcattacccccgaagatgccttcatgcctattcccactctacatcctcctcccagaaataaccactattctgacttctattatcatatattactttggcctgtacatgaatattcatctaaatccaatgagaccagtatctgcttaaacatatctagcgtactttcactcaaaataacagacaaacactttaaaaacacaagacagacatgtgtcacctaaagacgtaacagtcaccgatggaccgcatatgc

SEQ ID NO: 494711 - DNA, 866 bp, Homo sapiens
gggactagccgggttgtattggaaacgcggagtgagtgccgtgctgtgtaggggctaacaagttggacacccagaaggaggtgcaagctccaaagcagcaacaatgatatatatcttgtggagagtgtcacacagaagacatgatactaacaactctagggatccaatcagattgcatgcaagatgtgtggctacagaatacttgtcacaagaaccaaggacctacaaaagatgtggtcgttatgatgctcgatgattgctgggaatcccagcaggactgtctttaaattatacctgtggattggctcctcttcccatttctgatgggtggtcatagctgtgcgattcttgctatacagtagttcccccttatactgcggggagatacttttccaatggccccccagtgaacctccgtgaaaacctcaatacagtagcagatcttttataacatttgtttttttccatatatatataccctattgataaatgttataccttgtactaaaattaaaggccatgcgcaaagacgagtcacttacattactgttaataggaaccacctgcattgagcatacgtactacataacacagttctgtcgacatgttgggttggccttctcctgggcttcccaaaaaatcaatctttgctgtacatgtaacttcacctatttttagaatggtggttggactaacagggttaacccaaaaccctctggcagggaacctttggcgctgaaggggcgcgcacaactggtcattcacgcgatcacagctttctgtccattataacttatttcagacgaccctatatactgggaccctcccaactatttggttcaacgcactttggcccgatccgtgat

SEQ ID NO: 494712 - DNA, 196 bp, Homo sapiens
ggggggcctttttttttggggggaagttttttttttttgggggccccccctttacctggggggggttttttgggggccccccccccccccccccttttggggggcggggtttttttatttttttccaaaaagggggggggttgccccccccccggggggtttttcccccccccccggggcccctttttttttttta

SEQ ID NO: 494713 - DNA, 2741 bp, Homo sapiens
  misc_feature (2468)..(2468): n is a, c, g, or t
  misc_feature (2472)..(2472): n is a, c, g, or t
  misc_feature (2509)..(2509): n is a, c, g, or t
  misc_feature (2544)..(2544): n is a, c, g, or t
  misc_feature (2546)..(2546): n is a, c, g, or t
  misc_feature (2550)..(2550): n is a, c, g, or t
  misc_feature (2564)..(2564): n is a, c, g, or t
  misc_feature (2568)..(2568): n is a, c, g, or t
  misc_feature (2571)..(2571): n is a, c, g, or t
  misc_feature (2575)..(2575): n is a, c, g, or t
  misc_feature (2581)..(2581): n is a, c, g, or t
tggctcttgagggccctcgccctcgatgatgtccctcgtccttcgcctgtgcagtgcgcttttgatgaggccctgtgggagaccgcgtgatcttgggggaggcctcccgttgccccccgtagtcccttgtcccgaagtcccctacacgtggccatttgttttcccccgccagtgaccccgtaagaaggctatgccctgacggtcctgtcctgcacctcagctgatgctcatggagcgtttctgtaggacctagtcttggcgagatcgggatgagggctggccccctcctcggcatatagctcctgctcgggccccgattagctgtgggagctggagctggagctggcattacgtttgaggcaggatctggtccgggaggtctgggatctctggttatatctcacttctgacctctgggcacgtgctgcagctgtggctgaggccaagaaatgtgaggggcctccatccactgcattgagtagtgaccccgacgtggggttcaatgtggaggggggaggggctgctgcggcagctgcaggagccgaggtgccaggccttgttcttctcatgccggcatccctgcttgcagctgtgaaggtggcaggaatcagcgaggtgacctgggctgagtcccgggagtgggaagaggtggcaggaaggggatctgaggaggagaacaggggtcctggtggtctgtgcttcttcccagacacgggagctgtagaggagacctctgcagcagatgctaggggggccactaggcccaggcagtcttgggacttgggtctgtcctgctgtgcatccatagtgggtgctttagaaacgggaggcccacccgaagcccctgttgcaagtgaggacaaagtgtgggaaggccgtgagggtctgcagtccgagatggccttgtcctcaacgtgcagtgcactgttgatgcgctggaatgccgcctctttttccaggtgcaggtcttcagccgtgacccggtaccccagctctaagggaggtggcagcatcaaaggctcccctcgcctgcgtggcagcaggggaatcttgcgtctacggggcctagaggcctgggatctgggggagccacccctgggggcgagtgtctgccctggtgctgtatctgccgccttttcacaccgggtgtgacccgaagagacagcctgaggcctgtcctcactcactgtctttgagtaactgagggtcagctggcagcgggatgaggctggccccctcctctgctttagccccggcaagcctcccgtggagctgtaggagctggagatggcatttcgtttggtgctcgagctcgtccaggatgtctgggatgtctggttatatctgatttctgagctctgggcatggaggtctgtctgcagaggcccgggcctgggcacaaagggagagaggcctccattgtcccgcaggggccaaaatgcagaccgtgcatccccggtgacctcggggaccgttctctgatcatcaggattttcttggactctggggtccttgtcctgctcaggcatccctgccccgctctccttgagggccctcaacactatcttccctggacacaagtctggggacagccgggtgttgtggaccccaaaggggtgactacctgctcctgggccccacagagtccttgtgctcagtgtagtggctgagctgggggatgccctggaactcggagcacacagcactggcttactgtggtacctgtgcagtgaaattgaagacagaatcaccaggatggaacacaggtcttgcaggatcacggaaaaccttcttagagttgtcttgacaccactgatgtcgagtgtgcgggtgtttgtaggatggcctgccactcagtccaggggcaggagcaacggggagatcccacaagcaaagtgaactgggggatgggctgaaggggctccaggcaactgagccctactcgcaggtcctcggccttggcccaaacaggaatgaggggcacagagtgcccgggtaaccgctcctgggagcagtggggaactgtcggatacttgaactctcaagagctgggctctgagcgtcctcgtccagctgccaacttggccaaaggctaagccagcagattgttctgttgccgggcaacgcgacttctaaacctgagggagtgggcatgtgagcacataatggcaccagtgacagagcgaccataatggatgaataagcgcagccaggtacccgcgcaaggcacctgctggcaatggcaggaggcggacgtggggggtcgtgcagtaggtactggagggagagacgtgggcacaaaggtcgcgggaggaacaggtgcccacaatggctgcatatttgcccgtggatcactgaagattcctgctctcctgctgaggtggagactgcagtgagctgagatcgcaccattgcactccagcctgggcaacgagtgcaaaactcagtctccagataaaaaaaagaanaaanaaaaaaaagaggccgggtgtggtggcttatgcctatnatcctagcactttgggaggtcggggtggacggatnangagntcaggagttggagnccanccnggcnaacatngtgaaaccccgtctctagtaaaaatacaaaatttagtcagacatggtgggcaggagagagcatgtgcaggggaacatccatttataaaaccatcagacctcatgagacttattcactaccatgagaacagcatgggggaaactggctccatgattcagtt

SEQ ID NO: 494714 - DNA, 816 bp, Homo sapiens
  misc_feature (39)..(39): n is a, c, g, or t
  misc_feature (128)..(129): n is a, c, g, or t
  misc_feature (131)..(131): n is a, c, g, or t
  misc_feature (134)..(134): n is a, c, g, or t
  misc_feature (142)..(142): n is a, c, g, or t
  misc_feature (149)..(149): n is a, c, g, or t
  misc_feature (161)..(162): n is a, c, g, or t
  misc_feature (165)..(165): n is a, c, g, or t
  misc_feature (167)..(167): n is a, c, g, or t
  misc_feature (179)..(179): n is a, c, g, or t
  misc_feature (193)..(194): n is a, c, g, or t
  misc_feature (199)..(199): n is a, c, g, or t
  misc_feature (209)..(209): n is a, c, g, or t
  misc_feature (212)..(214): n is a, c, g, or t
  misc_feature (230)..(230): n is a, c, g, or t
  misc_feature (232)..(232): n is a, c, g, or t
  misc_feature (248)..(249): n is a, c, g, or t
  misc_feature (251)..(251): n is a, c, g, or t
  misc_feature (259)..(259): n is a, c, g, or t
  misc_feature (275)..(275): n is a, c, g, or t
  misc_feature (321)..(321): n is a, c, g, or t
  misc_feature (341)..(341): n is a, c, g, or t
  misc_feature (346)..(346): n is a, c, g, or t
  misc_feature (351)..(351): n is a, c, g, or t
  misc_feature (354)..(354): n is a, c, g, or t
  misc_feature (374)..(374): n is a, c, g, or t
  misc_feature (382)..(382): n is a, c, g, or t
  misc_feature (387)..(387): n is a, c, g, or t
  misc_feature (403)..(403): n is a, c, g, or t
  misc_feature (412)..(412): n is a, c, g, or t
  misc_feature (458)..(459): n is a, c, g, or t
  misc_feature (461)..(461): n is a, c, g, or t
  misc_feature (475)..(475): n is a, c, g, or t
  misc_feature (478)..(478): n is a, c, g, or t
  misc_feature (482)..(482): n is a, c, g, or t
  misc_feature (486)..(486): n is a, c, g, or t
  misc_feature (491)..(491): n is a, c, g, or t
  misc_feature (496)..(496): n is a, c, g, or t
  misc_feature (502)..(502): n is a, c, g, or t
  misc_feature (531)..(531): n is a, c, g, or t
  misc_feature (640)..(640): n is a, c, g, or t
  misc_feature (810)..(810): n is a, c, g, or t
aggctcagttaggtgttaccataagtattaacagaaganaaagggaaagcacaaacattttccctctaccagaaaagggtctgatgtaagataaactagcctgttggtttaacaatagctcattaaanngnccngacaatcngggagangatgtacttggnngcncngtcctctgacgncccattcccaaggnncagcnaaatactganaannnttaactggctcaaaantnatattgagagataaanncncttagtcncagcttcgcccccccntcccgcctccctgccactagctagattagtaattctgatgtttccntgtcatagtcctctgtgcgnccccnagggnctnccaactggtgcccctttgancagagtgnttttnaataatagattctccngtgcaccanctgttttttccagtataattctggtatttgtccctagaaatacagnngncaaagccgcctggnggnagtntctngtatntaggncataanatgttttggcagccctagatttcccagtntgagtctttttcatcaggaaaatcacattctggctcagtccaaggtaacactggaggcaatgatattgatggcttgttataagcaggaggcaacagtgaaagtattgantcctggctttcttctttcatctgtttgaagaaaacatgggacaataaactgcttgctgatggccttttctcaggatcttgttgcaacagagctgtaccaagctaaagaaggcaggagagaaagtttttgaggatggtgtgtgtaatcggtcactatttactgtgtgagtncactgg

SEQ ID NO: 494715 - DNA, 2893 bp, Homo sapiens
  misc_feature (2620)..(2620): n is a, c, g, or t
  misc_feature (2624)..(2624): n is a, c, g, or t
  misc_feature (2661)..(2661): n is a, c, g, or t
  misc_feature (2696)..(2696): n is a, c, g, or t
  misc_feature (2698)..(2698): n is a, c, g, or t
  misc_feature (2702)..(2702): n is a, c, g, or t
  misc_feature (2716)..(2716): n is a, c, g, or t
  misc_feature (2720)..(2720): n is a, c, g, or t
  misc_feature (2723)..(2723): n is a, c, g, or t
  misc_feature (2727)..(2727): n is a, c, g, or t
  misc_feature (2733)..(2733): n is a, c, g, or t
ggaaatattggaaaaaaaaattgcgtctgtactgaacatgtacagacttttttcttgtccttattccttacacaatatagtacaataactatttgcatgacatttacatcggatattatgagtgatctagagttgatatgaagtatatgggaggatgtgcaaaggtgatgtgcaaatactatgtcattttatatcagggacttgagtatcctttgttaccctcaggagatcctgaaaccagtcccccatggatactgagggctgactgtatagtcctatcctcacggaactttcattctaatgggggaagactgactataaacaaaatatatgtaataggtggtggtaagtaccgtggagaagtaacaaatggggcaaagtgagttatacagctccattcttagaaaccttggagtacttttcttagtttatactcgtggtggtttccttttgtctcctttattacatgggactctgacatgtgcccatagctagggtgacagtaggatctacccgatagtagggtggcagtaggatctacccaaaaagcgtcctgctgatacaggaccaaagcatcctgttgttctcgagcctataaaaagagctaatggtcttgcttctcttaactgtggcctcctacactgtgttttggatgattggtgatgtcttggatattctgtttctttggaactttgaatatacaacactttactagggaattagcaatggaagcagagcaaagatgtacagaggaaacaatgcgtaactctgatggaattgaagtcatgaggcagcagagagcttaaattacagctttaaaaatttttattttttagagggaatttacttgggagtaacagcagtaatagttaacggagccagaatgcttgagtcatataattgcaaagcagagttgggagcaacagatgctaaagagtagttgctgtagttcctctttgggtcgtaggagcagttgtcatattactatatagctactgcatgaagaagagttcttagtgaggcctgggtgaacagctcttcttagtattctgtgtgaccccatttgaccttttaacaaatccctaagtaaataaatagcccctcaggtaaactaagtttttctctgctgtttttttgcttgagagagctataactgtaatagacttatatttctgaacattttagtgcttgccaatatttggtaatatttatgtttcctatatttgtaatgaacattcttcttccggtacattttttgttaaattattgtttgatggataaaagttcaccttttattgtataaaattgactgagattaatttatacacattgacaatgggtaaatagaatttttcagattattaaaagctgaaggatgcccacgtaagcaaaaaaaaaaaagaaaaaaccaacaaaaataaacccaaacccctcaaacaatttcgaacacgaaacattcttctgatgccggcatccctgcttgcaggtgtgaagggggcaggaatcagcgaggtgtcctgggctgagtccccggagtgggaagaggtggcaggaaggggatctgaggaggagaacaggggtcctggtggtctgtgcttcttcccagacacgggagctgtagaggagacctctgcagcagatgctaggggggccactaggcccaggcagtcttgggacttgggtctgtcctgctgtgcatccatagtgggtgctttagaaacgggaggcccacccgaagcccctgttgcaagtgaggacaaagtgtgggaaggccgtgagggtctgcagtccgagatggccttgtcctcagtgtagtggctgagctgggggatgccctggaactcggagcacacagcactggcttactgtggtacctgtgcagtgaaattgaagacagaatcaccaggatggaacacaggtcttgcaggatcacggaaaaccttcttagagttgtcttgacaccactgatgtcgagtgtgcgggtgtttgtaggatggcctgccactcagtccaggggcaggagcaacggggagatcccacaagcaaagtgaactgggggatgggctgaaggggctccaggcaactgagccctactcgcaggtcctcggccttggcccaaacaggaatgaggggcacagagtgcccgggtaaccgctcctgggagcagtggggaactgtcggatacttgaactctcaagagctgggctctgagcgtcctcgtccagctgccaacttggccaaaggctaagccagcagattgttctgttgccgggcaacgcgacttctaaacctgagggagtgggcatgtgagcacataatggcaccagtgacagagcgaccataatggatgaataagcgcagccaggtacccgcgcaaggcacctgctggcaatggcaggaggcggacgtggggggtcgtgcagtaggtactggagggagagacgtgggcacaaaggtcgcgggaggaacaggtgcccacaatggctgcatatttgcccgtggatcactgaagattcctgctctcctgctgaggtggagactgcagtgagctgagatcgcaccattgcactccagcctgggcaacgagtgcaaaactcagtctccagataaaaaaaagaanaaanaaaaaaaagaggccgggtgtggtggcttatgcctatnatcctagcactttgggaggtcggggtggacggatnangagntcaggagttggagnccanccnggcnaacatngtgaaaccccgtctctagtaaaaatacaaaatttagtcagacatggtgggcaggagagagcatgtgcaggggaacatccatttataaaaccatcagacctcatgagacttattcactaccatgagaacagcatgggggaaactggctccatgattcagtt

SEQ ID NO: 494716 - DNA, 2573 bp, Homo sapiens
  misc_feature (2236)..(2236): n is a, c, g, or t
  misc_feature (2238)..(2238): n is a, c, g, or t
  misc_feature (2258)..(2258): n is a, c, g, or t
  misc_feature (2261)..(2261): n is a, c, g, or t
  misc_feature (2263)..(2263): n is a, c, g, or t
  misc_feature (2288)..(2288): n is a, c, g, or t
  misc_feature (2345)..(2345): n is a, c, g, or t
  misc_feature (2352)..(2352): n is a, c, g, or t
  misc_feature (2375)..(2376): n is a, c, g, or t
ggaaatattggaaaaaaaaattgcgtctgtactgaacatgtacagacttttttcttgtccttattccttacacaatatagtacaataactatttgcatgacatttacatcggatattatgagtgatctagagttgatatgaagtatatgggaggatgtgcaaaggtgatgtgcaaatactatgtcattttatatcagggacttgagtatcctttgttaccctcaggagatcctgaaaccagtcccccatggatactgagggctgactgtatagtcctatcctcacggaactttcattctaatgggggaagactgactataaacaaaatatatgtaataggtggtggtaagtaccgtggagaagtaacaaatggggcaaagtgagttatacagctccattcttagaaaccttggagtacttttcttagtttatactcgtggtggtttccttttgtctcctttattacatgggactctgacatgtgcccatagctagggtgacagtaggatctacccgatagtagggtggcagtaggatctacccaaaaagcgtcctgctgatacaggaccaaagcatcctgttgttctcgagcctataaaaagagctaatggtcttgcttctcttaactgtggcctcctacactgtgttttggatgattggtgatgtcttggatattctgtttctttggaactttgaatatacaacactttactagggaattagcaatggaagcagagcaaagatgtacagaggaaacaatgcgtaactctgatggaattgaagtcatgaggcagcagagagcttaaattacagctttaaaaatttttattttttagagggaatttacttgggagtaacagcagtaatagttaacggagccagaatgcttgagtcatataattgcaaagcagagttgggagcaacagatgctaaagagtagttgctgtagttcctctttgggtcgtaggagcagttgtcatattactatatagctactgcatgaagaagagttcttagtgaggcctgggtgaacagctcttcttagtattctgtgtgaccccatttgaccttttaacaaatccctaagtaaataaatagcccctcaggtaaactaagtttttctctgctgtttttttgcttgagagagctataactgtaatagacttatatttctgaacattttagtgcttgccaatatttggtaatatttatgtttcctatatttgtaatgaacattcttcttccggtacattttttgttaaattattgtttgatggataaaagttcaccttttattgtataaaattgactgagattaatttatacacattgacaatgggtaaatagaatttttcagattattaaaagctgaaggatgcccacgtaagcaaaaaaaaaaaagaaaaaaccaacaaaaataaacccaaacccctcaaacaatttcgaacacgaaacattcttctgatgccggcatccctgcttgcaggtgtgaagggggcaggaatcagcgaggtgtcctgggctgagtccccggagtgggaagaggtggcaggaaggggatctgaggaggagaacaggggtcctggtggtctgtgcttcttcccagacacgggagctgtagaggagacctctgcagcagatgctaggggggccactaggcccaggcagtcttgggacttgggtctgtcctgctgtgcatccatagtgggtgctttagaaacgggaggcccacccgaagcccctgttgcaagtgaggacaaagtgtgggaaggccgtgagggtctgcagtccgagatggccttgtcctcaacgtgcagtgcactgttgatgcggggcctagaggcctgggatctgggggagccacccctgggggcgagtgtctgccctggtgctgtatctgccttcttttcacagcgggtgacccgaagagacagcctgaggtccgtcctcactcactgtgtttgaggaactgtgggccagctggcagtgggatgaggctggccccctcctccgctttagttcctggaggccttccgtagagctgtgggagctggagctggcatttcgtttgaggcaggatctggtccgggaggtctgggatctctggttatatctcacttctgacctctgggcacgtgctgcagctgtggctgaggccaagaaatgtgaggggcctccatccactgcattgagtagtgaccccgacgtggggttcaatgtggaggggggagggctncnctgcggctcatcagcaggtnccngnccttgttcttctcatgccggcatcnctgcttgcagctgtgaagggcgcgggaatcagcgaggtgacctgggctgagtcccgngagtggnaagaggtggcaggaaggggatcnnaggaggagaacaggggtcctggtggtctgtgcttcttcccagacacgggggtcagcccaggtcacctcgctgattcctgccaccttcacagctgcaagcagggatgccggcatgagaaggacaaggcctgcacctcgctcctgagcgcccaggcctccccgcctccccattgcttatgtgttgggtcttagatgcga

SEQ ID NO: 494717 - DNA, 2675 bp, Homo sapiens
ggaaatattggaaaaaaaaattgcgtctgtactgaacatgtacagacttttttcttgtccttattccttacacaatatagtacaataactatttgcatgacatttacatcggatattatgagtgatctagagttgatatgaagtatatgggaggatgtgcaaaggtgatgtgcaaatactatgtcattttatatcagggacttgagtatcctttgttaccctcaggagatcctgaaaccagtcccccatggatactgagggctgactgtatagtcctatcctcacggaactttcattctaatgggggaagactgactataaacaaaatatatgtaataggtggtggtaagtaccgtggagaagtaacaaatggggcaaagtgagttatacagctccattcttagaaaccttggagtacttttcttagtttatactcgtggtggtttccttttgtctcctttattacatgggactctgacatgtgcccatagctagggtgacagtaggatctacccgatagtagggtggcagtaggatctacccaaaaagcgtcctgctgatacaggaccaaagcatcctgttgttctcgagcctataaaaagagctaatggtcttgcttctcttaactgtggcctcctacactgtgttttggatgattggtgatgtcttggatattctgtttctttggaactttgaatatacaacactttactagggaattagcaatggaagcagagcaaagatgtacagaggaaacaatgcgtaactctgatggaattgaagtcatgaggcagcagagagcttaaattacagctttaaaaatttttattttttagagggaatttacttgggagtaacagcagtaatagttaacggagccagaatgcttgagtcatataattgcaaagcagagttgggagcaacagatgctaaagagtagttgctgtagttcctctttgggtcgtaggagcagttgtcatattactatatagctactgcatgaagaagagttcttagtgaggcctgggtgaacagctcttcttagtattctgtgtgaccccatttgaccttttaacaaatccctaagtaaataaatagcccctcaggtaaactaagtttttctctgctgtttttttgcttgagagagctataactgtaatagacttatatttctgaacattttagtgcttgccaatatttggtaatatttatgtttcctatatttgtaatgaacattcttcttccggtacattttttgttaaattattgtttgatggataaaagttcaccttttattgtataaaattgactgagattaatttatacacattgacaatgggtaaatagaatttttcagattattaaaagctgaaggatgcccacgtaagcaaaaaaaaaaaagaaaaaaccaacaaaaataaacccaaacccctcaaacaatttcgaacacgaaacattcttctgatgccggcatccctgcttgcaggtgtgaagggggcaggaatcagcgaggtgtcctgggctgagtccccggagtgggaagaggtggcaggaaggggatctgaggaggagaacaggggtcctggtggtctgtgcttcttcccagacacgggagctgtagaggagacctctgcagcagatgctaggggggccactaggcccaggcagtcttgggacttgggtctgtcctgctgtgcatccatagtgggtgctttagaaacgggaggcccacccgaagcccctgttgcaagtgaggacaaagtgtgggaaggccgtgagggtctgcagtccgagatggccttgtcctcaacgtgcagtgcactgttgatgcgctggaatgccgcctctttttccaggtgcaggtcttcagccgtgacccggtaccccagctctaagggaggtggcagcatcaaaggctcccctcgcctgcgtggcagcaggggaatcttgcgtctacggggcctagaggcctgggatctgggggagccacccctgggggcgagtgtctgccctggtgctgtatctgccgccttttcacaccgggtgtgacccgaagagacagcctgaggcctgtcctcactcactgtctttgagtaactgagggtcagctggcagcgggatgaggctggccccctcctctgctttagccccggcaagcctcccgtggagctgtaggagctggagatggcatttcgtttggtgctcgagctcgtccaggatgtctgggatgtctggttatatctgatttctgagctctgggcatggaggtctgtctgcagaggcccgggcctgggcacaaagggagagaggcctccattgtcccgcaggggccaaaatgcagaccgtgcatccccggtgacctcggggaccgttctctgatcatcaggattttcttggactctggggtccttgtcctgctcaggcatccctgccccgctctccttgagggccctcaacactatcttccctggacacaagtctggggacagccgggtgttgtggaccccaaaggggtgactacctgctcctgggccccacagagtccttgtgctcagtgtagtggctgagctgggggatgccctggaactcggagcacacagcactggcttactgtggtacctgtgcagtgaaattgaagagacaatccagcagcccaggtcgacgcggccgcgaat

SEQ ID NO: 494718 - DNA, 377 bp, Homo sapiens
ctgattatagtaagtcacacaataaaatgctacattttgccgtaagaacaaggaggatgctttaataaattgtgctattctattatataatattagtgaagcctttcatattatattttttattaattttaacaaaataggagatcattgtgttacctataattagagtatatagagtttactagggttataatatcctcagactatccagtagaaggccagaaagattacggatcagtgctagaaaaaaatcacgatcaaagcttcaacataagttgtctctggaagatgggctacttttactgtcttctatttactcttctacatttctcattttctgttagaaatatatctactattttctatttactcttcta

SEQ ID NO: 494719 - DNA, 428 bp, Homo sapiens
ccgggctcgtgagggtggtttgacaaagcttttcgctgtggccctgagaggggttggtggcagctctgcagcttggtggctgtagggtggcttgcttggttcttaggagtactttctggggagccaatactcttcaaggagatgttgtctgagtccaaggccactgctgtgagtttgagctttcgtccttttcccgatctgtctgattgacaggggctcgagtagtccgcccactggctaccttggtaggctccttcagtctggaaggcgtaaggctcacctcctttgtgctgaggagacttgggtcaatgctgctgctcacagggcgaggtcaccccgccgccggtcacgctaatagaacttgacttggctggcggggcaggctgcggtacttgatgttagaacgggctccaggaccaaggaatcct

SEQ ID NO: 494720 - DNA, 522 bp, Homo sapiens
tgagaagtgcctcatggcgtgggagtccattattccactactgcaagagaagcaagagactaagtaggttttggaacagagactcttctgcctccacagggcatggaaccctgaaccagaatgatcctgcagtgccggagaggtcgccgtgggaaaacagcacaacagcacctcttgtgtgtgtactttctacccccgcccccagttgttttcagttagtatttattccttggagtctatgagactgtaatcatctctcagcagcatacctccgtattgtgaaggaacctcttaaatggaacactaaaagacttgaaactgaggggcaagataacccccacatgacacgtgacatcactttggggacagcccagttgccattgtgggacagaaccccagtcctgcgtttcagggacatggggagacatgaagaaggcagctgcagcttgctgtggagaccccgtggctctgcactttacccgtgagggcattaacctgacccagcatggaaggaggtgtggg

SEQ ID NO: 494721 - DNA, 329 bp, Homo sapiens
  misc_feature (127)..(127): n is a, c, g, or t
  misc_feature (320)..(320): n is a, c, g, or t
  misc_feature (324)..(324): n is a, c, g, or t
ccaacctcttcatcaaggttgatgttggtggagataaatgcgtgcacttgagggtgtttcaacccctcccccatgaaaacaagcctttgaccctgtcttcctatcagaccaacaaagaaaggcacgntgagctctcctacttctgattcggggctcctttgcacctgtgtttgggaccacgtagtaaaacccccctcggtgatggagagaagggagttgagcagcttctgttgtgattctcaaactgcgttgtattttgcatccttccaaataattattttcagaaaactgtatatgatctctctaaatatatatttttngggncttta

SEQ ID NO: 494722 - DNA, 383 bp, Homo sapiens
gggagatggcagacatggcggcagtagtggacagtatacacattgtataaggacgaatcagtgatagacagcctattacggtattatgatattttcgaaaactacatatatgtatatacatgtaaatatagacacatatatgtatatacatatatacacgcatgtatgcatatatggatatatatagctgcagtatatgcatgtatatatgcatgtatatatgtggatgtatatttatgtagttattgatgaactacgctgtgtctctcttttctccatttccacagctgtacgatggatatggtatttaatcaggcgagtttatacatcatatatatcatatcaggacgaatatatatacacctcctatcattaaattgatg

SEQ ID NO: 494723 - DNA, 1380 bp, Homo sapiens
agcggcttgtccgcccgctccccccgtccccccgaagcgccggcgtccggctgcactcgcgctcgttccgagtttcacggctcgtgctacgctagcgccgtcgtctgtctcccttgcagtcagctcggagtcgatgattatctaaccgggatcctacatccagagcgaccgatggagatggttctccgaccatctacgaaggatccgggtagaatcagtcggacgagtgttgtgccatggcgcgtgagtagcgggagagatggatgcaggtaaggatcagcatagggctatatcaatatggaatcgcatcgtgcaggcgtcaatttgggttagtggaaatactctgctctttcccgaacgtggcataaggcgcacgctgacggtggcggataagggtaaaccagaagaaatggcgagccatgttgaaatacgaagctcgcgtttgatgcagaagtaactctcgctccattggacacgccactgcgatcccatggccaagtgcataaatcaaagttttttaccatcgatagccggacaagtcccataacaaatggaaacgctatcaaattcaacgaagattgatcacttgacacatcatagttcattcatagggagacacctgtcgtaatgaaaccacgaacgattctcacgacaccaggatggtaacaaatccctttgtttgatcgaacttgggggccatggacagcaaaacaaaagtgcaagagcatacctgccttgtggagacttaagattgttctagtagaatcttagtcaaggttatggtatggtattttggggttggaaagatgacttaattggagaattcccatggaattggggcatggtggtgttgcatccttaaatttgttggcgattttaggcctgtaaggataggaagtcggtgtttgtttagactccactccgatcacttgagtacgaatattttccattctttgaggagagattcgggtttttaccgacgacagtgggtgccaccaccatggtttcaaaccacaacatagttgcggcgaaatttcacttcgccactgcggattccttaattccaccccattgggtccatcctacgctacagcgtggtgacgttttgcgttgggctatggtttcgagttccacaacgaaacataaattcacccgaagtggaacttctggaaggaatcgagtaagttgggcggaacgtgggatttgttcctagtcctttggaaggtcattcgtgttccactttgtgaatattttggaactctcggatgtactttctaatcgtggggacgtggggaaggggccaattaggtgtgggtgatagggaatgaaacacttcggtttaattgctaagggtgtgggttgtaaaggaaatttacgctg

SEQ ID NO: 494724 - DNA, 111 bp, Homo sapiens
tgcaggattgtctgcgaaacctcatcccggtcgacctgctcaaagattgccgccgatcaccaccgtgcctggcggtgtctcgaccagtaccttggtcttcacgtgcttagt

SEQ ID NO: 494725 - DNA, 248 bp, Homo sapiens
tacaggatttacttcgacggtgttctgaggctgaaagagtagaaactagggcagtgaaagagatctgatgcccggtaaaggggacagacaaaactaggggagatagtggaggacggcattccttcctactctgctttctcagtggcctccattggcagcgcctgacccatagagatgcactccaggaacaggacacggacatgaatcaagggaaagggaaaggccaggctcaagagggcttaatgctt

SEQ ID NO: 494726 - DNA, 99 bp, Homo sapiens
gattacctagacggagaaacttaattattctccctggatctctgtgtgtgtgagtgtgactgtgaatacctttctgccccgcagaagtttgagatctct

SEQ ID NO: 494727 - DNA, 319 bp, Homo sapiens
  misc_feature (19)..(19): n is a, c, g, or t
ccttctggacacccgcttngagaggaccatgacttagtgtcccccagtccaattgccgatggtgatgccagccggcaaaggcaccgactttactcttggatcgggactggcttcctccggcaagaccagccattgggaagagaggtcctcgtggacatatgggtcaggcatagcagagagggtcacagagtggggcaagtagacccatggaaccgtatgggccaggccctcacaagaccaaagccagcaccaaaggagtcagggaaggggttggtgagtcaagggaccccaagggcccaggaattatttcttgacagaa

SEQ ID NO: 494728 - DNA, 182 bp, Homo sapiens
  misc_feature (20)..(20): n is a, c, g, or t
  misc_feature (61)..(61): n is a, c, g, or t
  misc_feature (72)..(72): n is a, c, g, or t
  misc_feature (87)..(87): n is a, c, g, or t
  misc_feature (100)..(101): n is a, c, g, or t
  misc_feature (119)..(120): n is a, c, g, or t
  misc_feature (133)..(133): n is a, c, g, or t
  misc_feature (135)..(135): n is a, c, g, or t
  misc_feature (154)..(154): n is a, c, g, or t
  misc_feature (173)..(173): n is a, c, g, or t
  misc_feature (179)..(179): n is a, c, g, or t
accaggttctaaatgtggancccatctgctttgccccatttttcgggccctgccccccttnctgcgtccggngtcttctgccttccnccctcggtctctnnccccctccccctgtgtcnnccttcttcctggngngggggggtttgttgttgcntgtcagtgtgttggtttcntgtggncgt

SEQ ID NO: 494729 - DNA, 341 bp, Homo sapiens
  misc_feature (212)..(212): n is a, c, g, or t
tgctggtacccctattatgctttggagctacgttggcaacttggagggcactgctgacagatgctgggttggcagtgcactttcagtgaccactgtgttcacagtgcatcaaggtggtaggcactttggagtggcagagatgttggcagtgtgcactctgcccctactggaagcagactgactaggctctggcctgtgtctactcctctgcnaaccctgtttacacctcatgcatgccccctgctagagtgccaatgccatggggcatgcaggagtgagaacggagtgttgccagttagattacaaacttgaccactgatgaggtccaagtgcaagctggc

SEQ ID NO: 494730 - DNA, 1055 bp, Homo sapiens
  misc_feature (6)..(6): n is a, c, g, or t
  misc_feature (78)..(78): n is a, c, g, or t
  misc_feature (155)..(155): n is a, c, g, or t
  misc_feature (315)..(315): n is a, c, g, or t
  misc_feature (317)..(317): n is a, c, g, or t
  misc_feature (337)..(337): n is a, c, g, or t
  misc_feature (342)..(342): n is a, c, g, or t
  misc_feature (352)..(352): n is a, c, g, or t
  misc_feature (356)..(356): n is a, c, g, or t
  misc_feature (364)..(364): n is a, c, g, or t
  misc_feature (373)..(374): n is a, c, g, or t
  misc_feature (378)..(378): n is a, c, g, or t
  misc_feature (386)..(386): n is a, c, g, or t
  misc_feature (388)..(388): n is a, c, g, or t
  misc_feature (390)..(390): n is a, c, g, or t
  misc_feature (542)..(542): n is a, c, g, or t
  misc_feature (545)..(545): n is a, c, g, or t
  misc_feature (557)..(557): n is a, c, g, or t
  misc_feature (559)..(559): n is a, c, g, or t
  misc_feature (567)..(567): n is a, c, g, or t
  misc_feature (572)..(572): n is a, c, g, or t
  misc_feature (582)..(582): n is a, c, g, or t
catttngcgtcctggtcaatcatgacttcacccctctggagatcctctggaccttctccatctacctggagtcagtgnccatcttgccgcagctgttcatggtgagcaagaccggcgaggcgagaccatcaccagccactacttgtttgcgctangcgtttaccgcacgctctatctcttcaactggatctggcgctaccatttcgagggcttcttcgacctcatcgtccattgtggcaggcctggtccagacagtcctctactgcgatttcttctacctctatatcaccaaaagtcctaaaggggaaaaagttnanttttccggcaataccccggntcttntcaatatatntctnggcagcancgggaagcnntagnaagcggcnanantagtagcgctttcccatccagggtgcacttttttagaacccacctcttgtgctccccatcccgcctcctgccgggtttcagggggacagtggaggatccaggtcttggggagctcaggacttgggctgtttgtgagttttttgccttttggnacnaggaaaaaaaantntttccacnctttngtttttgatnctgataactcgtttttcttctactctgtggccccaatttttataaagtgtttttgagtgtcctatgggccggggcagggtccaagatcttttcccttccccaggcccctcggctccctcccagatcccacccccagccccactggttgccaaacactaaatctgccgacacccatctgccccacctcctgccatggccatgaaccgcgacccccactaaatttctagattggggatagggagaaagggaggcccaggaaggtctcccctgattttttttcatagtaatttttttccccagagtttgaattttttggtcttctcctggttttttggcaaattaggggggcccggggctcaagtgcgggaagggggctggcccgaggatcccatggctctcacaccatgtttttgtacagaactgatggttgaatctttgttctcttgaaataaacagaagaaaatgaaaaaaaa

SEQ ID NO: 494731 - DNA, 133 bp, Homo sapiens
gcaaaacctcttctctactgaagatataaaaaattagccaggcaggattgtgtgtgtctgtggtcccagctaccagggaggctgagataggacgattacttgagcccgggaggcgagttgcagtgagctgaga

SEQ ID NO: 494732 - DNA, 498 bp, Homo sapiens
tgagggagcttgaggagagaatcagcgaaatggcagtgctagcagtcatgcatgtgtctccctcagatcctggaccacctaacgatgatcgacaacaaaaacgagtctgagctggaggcccatctctgccggatgatgaagcacagtatggaccagactgggagcaagtctgataaggaaacagaaaagggagcatctcgaatagtgagtggcctgacttgaaagattgaggaacatgaggctacaccggaagtgatcttatctaaggtgtaggtcaccaggatatgctttccgaaggtccaaggtgaaggctcatggactggttgaatcagtctcctgctgtggtgcagtaaccatttccaccttgaaattttaaaatctaaactaagtataaccatgtgttttttggtccccaagaaagatcctaagcacttggtcaccagataaatagctagttctgcttaacatggaaagaatatgtccgtgccttctccatca

SEQ ID NO: 494733 - DNA, 1084 bp, Homo sapiens
  misc_feature (6)..(6): n is a, c, g, or t
  misc_feature (78)..(78): n is a, c, g, or t
  misc_feature (155)..(155): n is a, c, g, or t
  misc_feature (315)..(315): n is a, c, g, or t
  misc_feature (317)..(317): n is a, c, g, or t
  misc_feature (337)..(337): n is a, c, g, or t
  misc_feature (342)..(342): n is a, c, g, or t
  misc_feature (352)..(352): n is a, c, g, or t
  misc_feature (356)..(356): n is a, c, g, or t
  misc_feature (364)..(364): n is a, c, g, or t
  misc_feature (373)..(374): n is a, c, g, or t
  misc_feature (378)..(378): n is a, c, g, or t
  misc_feature (386)..(386): n is a, c, g, or t
  misc_feature (388)..(388): n is a, c, g, or t
  misc_feature (390)..(390): n is a, c, g, or t
  misc_feature (542)..(542): n is a, c, g, or t
  misc_feature (545)..(545): n is a, c, g, or t
  misc_feature (557)..(557): n is a, c, g, or t
  misc_feature (559)..(559): n is a, c, g, or t
  misc_feature (567)..(567): n is a, c, g, or t
  misc_feature (572)..(572): n is a, c, g, or t
  misc_feature (582)..(582): n is a, c, g, or t
  misc_feature (774)..(774): n is a, c, g, or t
  misc_feature (789)..(789): n is a, c, g, or t
catttngcgtcctggtcaatcatgacttcacccctctggagatcctctggaccttctccatctacctggagtcagtgnccatcttgccgcagctgttcatggtgagcaagaccggcgaggcgagaccatcaccagccactacttgtttgcgctangcgtttaccgcacgctctatctcttcaactggatctggcgctaccatttcgagggcttcttcgacctcatcgtccattgtggcaggcctggtccagacagtcctctactgcgatttcttctacctctatatcaccaaaagtcctaaaggggaaaaagttnanttttccggcaataccccggntcttntcaatatatntctnggcagcancgggaagcnntagnaagcggcnanantagtagcgctttcccatccagggtgcacttttttagaacccacctcttgtgctccccatcccgcctcctgccgggtttcagggggacagtggaggatccaggtcttggggagctcaggacttgggctgtttgtgagttttttgccttttggnacnaggaaaaaaaantntttccacnctttngtttttgatnctgataactcgtttttcttctactctgtggccccaatttttataaagtgtttttgagtgtcctatgggccggggcagggtccaagatcttttcccttccccaggcccctcggctccctcccagatcccacccccagccccactggttgccaaacactaaatctgccgacacccatctgccccccccaaaccncccccccttctcccntgaaacctcctgccatggccatgaaccgcgacccccactaaatttctagattggggatagggagaaagggaggcccaggaaggtctcccctgattttttttcatagtaatttttttccccagagtttgaattttttggtcttctcctggttttttggcaaattaggggggcccggggctcaagtgcgggaagggggctggcccgaggatcccatggctctcacaccatgtttttgtacagaactgatggttgaatctttgttctcttgaaataaacagaagaaaatgaaaaaaaa

SEQ ID NO: 494734 - DNA, 797 bp, Homo sapiens
catctcaaaaaaaaaaaaaaaaattagctgggcattggtggcgggcacctgtagtcccagctacttgggaggctgaggcaggagaatggcatgaactcaggaggcaaagcttgcagtgagcagagactgtgccactgccctccagcctgggcaacagagcgagactctgtctcaaaaaaaaaaaggaaaagaaaaagagggttccacgatcattgcccatggaaaattattccccagctagtaaagcacttcccattaatgtgatctacagtcttttaaaagggagcttctcaagaataagatggtgggtacaattggcttattggagaagggaaaaaaaaaccacccgatttttttaccaaggggaaaagaaggaatgtgatttctcatgatggaaagcttgattaagaattggcatacagttttggctccccaagaacccaaggccggctcgtggcaagaaacgaggggggttttcccgaaattgccagaaccgaaggttgcccttataaaggccaggttgcccgaattggttcccagaattgttaaagagaataggtgatgccaggagggaaaagctgggtttggggaacaaggggagcatgttttggtaaacaccgcgttaacactctattggtgccctttggaaagaccagaaccggggcagcctctaagtcaatcattggggtattatacagggcatgggcagctatgaatctggaatgtaagaggctacacgaattgaaagagcaacaagcagttggtttaaatacccgagaaaggttgttgccaaatga

SEQ ID NO: 494735 - DNA, 401 bp, Homo sapiens
taccatcgttataagcttctcacatcctcctcctgctctccagtcacgtcctcctcttcaccttcctcctcctcatcctcgtactcctcgtcttccactaccttagcatcttcatcatactcctcctcatcctcatcctcctcctcactcctcctggccctccacgttgccctcagcatccgagtccggggcctccttgttgtcccggtcatagccgtcgcgtgatgtgagttgcgagaggagcttgaacacattccctcggtagtcgttcaggtaggttacctcgcaattcaaacggtctaagctcttgaggtacactaccctcctcagtggctctattgtgctgaggtctataattatgtagccacttaaatttagatgcgtgaggtacggacacttaa

SEQ ID NO: 494736 - DNA, 5460 bp, Homo sapiens
  misc_feature (308)..(308): n is a, c, g, or t
  misc_feature (323)..(323): n is a, c, g, or t
  misc_feature (329)..(330): n is a, c, g, or t
gagaagaaacgtcaagtggtcaagccctgcaggaggcattgatgcgatcttccttactaccacactacagaacatcagtgaggatgttttagcagtaatggataataaaaatccaaccatcaagcagcagacatctctttttattgcaagaagtttccgccactgcactgcttctaccctgccaaagagcttgctaaagcccttttgtgctgcactacttaagcacatcaatgattctgctcctgaagtcagagatgccgcatttgaagcattgggtactgctttgaaggtggttggcgagaaagcantaaaccattcctagntgatgnngacacactcaagcttgataagatcaaagaatgttcagaaaaggtagaactgatacatggtaagaaagctggactagctgctgataagaaggaattcaaacctctgcctggaaggactgctgcttcaggggctgcaggagataaggacacaaaggacatttctgcacccaaaccaggacctctaaaaaaggcacctgctgctaaggctggtgggccaccaaaaaaggggaaaccagctgcaccaggaggcgcagggaatactggaaccaagaacaagaaaggactggagactaaagaaatagtggagcctgagctctcgatagaagtatgtgaagaaaaagcttcagctgttcttccccctacctgtatacagcttcttgacagcagtaactggaaagaaaggctggcttgtatggaagagttccagaaggctgttgagctaatggaccgaactgaaatgccatgccaggcattagtgaggatgctagccaagaaacctggatggaaagaaactaattttcaggtgatgcaaatgaagcttcatatagttgctttgattgcccagaagggaaatttttccaaaacgtcagctcaggttgtattagatggccttgtggacaagattggagatgtgaaatgtgggaacaatgcaaaagaagctatgacagcaatagccgaagcctgtatgttaccatggactgctgaacaggttgtgtcaatggctttctcacaaaagaatcccaaaaatcagtcagaaactctgaattggctatcaaatgccataaaagaatttggtttttctgggttgaatgtcaaagctttcattagcaatgtgaagacagctcttgctgcaacaaacccagctgtgaggactgctgccataaccctgcttggcgtgatgtatctgtatgttggtccctctttgcgaatgttctttgaggatgagaagcctgccctcctatcccagatagatgcagaatttgagaagatgcagggacaaagtccacctgctccaaccagaggaatttccaagcatagcacaagtggtacagatgaaggagaagatggagatgaaccagatgacgggagcaatgatgtcgttgatcttttgccgaggacggagatcagtgataaaatcacttcagagttggtatctaagattggtgataagaattggaagattaggaaagaaggcctagatgaagtggcaggtattattaatgacgcaaaatttatccaaccgaatataggtgaacttccaactgccttgaagggtcgactcaatgattcaaataaaatcttggtacagcaaacgctgaatatcctgcaacaactggcagtagccatgggcccaaatattaagcaacatgtaaaaaatttaggcatccctatcatcacagtccttggagacagcaagaacaatgttcgagctgctgccctagcgactgtgaatgcttgggcagaacagactggcatgaaggaatggctggaaggagaagatctttctgaagagctcaaaaaggaaaatcctttcttgaggcaagagcttctgggctggctggctgagaaactacctactcttcgttccacccctacagaccttatcctttgtgttcctcatctctactcctgcctagaagatcgaaatggagatgtgcgaaagaaggcccaagatgccttgccattcttcatgatgcatttaggatatgaaaaaatggccaaggctactgggaaactaaagccaacttctaaagatcaggtattggccatgctagagaaagccaaagttaacatgccagccaagcctgctccacccactaaagcaacttctaaaccaatgggagggtccgctccagccaaattccagcctgcatcagcacctgctgaagattgtatttccagcagtacagaacccaaacctgatccaaaaaaggccaaagctccaggattatcctctaaagcaaagagtgcacaagggaagaagatgccaagcaaaaccagcttaaaggaggatgaagacaaatccgggcctatttttattgttgttccaaatggaaaagagcaaaggatgaaagatgaaaaaggattgaaggtgctaaagtggaattttactaccccacgggatgaatacattgagcaactaaagactcaaatgtctagctgtgtggctaaatggttacaagatgagatgtttcactcagactttcagcatcataacaaagcccttgctgttatggttgatcacttggagagtgaaaaagaaggagttattggttgcctggatcttatcttaaagtggcttaccctgaggttttttggacaccaatacaagcgtcctgatgaaagcactagaatatttaaaattgctcttcaccttgctaagtgaagaagaatatcatcttactgagaatgaagcatcttccttcatcccctatcttgtcgtcaaggttggagaaccaaaggatgtcattcgtaaagatgttcgtgccatcctgaaccggatgtgccttgtctacccagctagcaagatgtttccctttatcatggaaggaaccaaatccaaaaactctaagcagagagcagagtgcctggaagagctgggatgtctggttgagtcctatggcatgaatgtttgccaaccaaccccaggaaaagccttaaaggaaatagctgttcacataggagaccgtgacaatgctgtacgcaatgctgcactcaacaccattgtaacggtgtacaatgtacatggggatcaggtgttcaaactgattggaaatctttctgaaaaggatatgagcatgctcgaggagaggattaagcggtcagcaaagagaccctctgctgcaccaataaaacaggtggaagagaaacctcagcgtgcacagaacataagctccaatgccaacatgttacgcaagggaccagctgaggacatgtcttccaaactcaaccaagcccgaagcatgagtgggcatcctgaggcagcccagatggtccgccgagaattccagctggatctagatgagattgagaatgacaatggtacagtccgatgtgaaatgccagaacttgttcagcacaaactggatgacatttttgagccagtccttattcctgaacccaagatccgggctgtttctccacacttcgatgacatgcacagtaatacagcatccacaatcaatttcattatctcccaagtagccagtggtgacatcaacacaagtatccaagctctgacacagatcgatgaggtcctgagacaggaagacaaagctgaagccatgtccggccatattgatcagtttctgatagccacttttatgcagctaagactcatctacaacacacacatggcagatgagaaattggagaaggacgagatcatcaagttgtatagctgtatcattggcaacatgatttcgctgtttcagatagagagccttgcccgggaggcctccactggagtactaaaagacctaatgcatggcctcatcaccttaatgctggattctcggattgaagatcttgaggaaggacaacaggtcatccgctctgtgaacctcttggtggtgaaggttctggagaagtcagaccagaccaacatcctgagtgccctacttgttttgctccaagacagcctgctagcaacagccagttctcccaaattctcagagcttgttatgaagtgtctctggagaatggttcgactgttgcctgataccatcaatagcattaacctagacagaattcttctggatatccacattttcatgaaggtcttccccaaagagaaactgaagcaatgcaaaagtgaatttcccataaggaccctaaagaccctgctacacaccttatgcaaattaaaagggcccaagatcctggaccacctaacgatgatcgacaacaaaaacgagtctgagctggaggcccatctctgccggatgatgaagcacagtatggaccagactgggagcaagtctgataaggaaacagaaaagggagcatctcgaatagatgaaaaatcatcaaaggccaaagtgaatgatttcttagctgagatttttaagaagattggctctaaagaaaacactaaagagggactagcagagttatatgaatataagaagaaatactcagatgctgacattgaaccatttctgaaaaattcctcacagttcttccagagctatgtcgaaagaggccttcgggtgattgagatggagagggagggcaaaggtcgtatttccacttcaacaggcatctcccctcagatggaagtcacatgtgtgcccacgcccacaagcacagtgtcctccataggtaacacaaatggggaagaagtggggccatctgtctacttggaaaggctaaagatcctccgacagcgatgtggtctggacaacacaaagcaagatgaccgacctcctttgacctctttgctctccaaaccagcagttcctactgtcgcctcttccacagacatgctccacagcaaactctctcagctccgggagtcacgggagcagcaccagcattcagacctggattctaaccagactcactcttcaggaactgtgacctcctcctcctccacagctaacatagacgacttgaaaaaaagactggagagaataaagagcagtcgcaaatgaagctgccccactcccccggcaccctgcagctttagtttactaaactagaagtcctcatagtttaaaatggcctcagcaggcctagtgtatacaaactggttgtatgtatcatgccgtggagctagggggaggagtcattgtggcacaagtatttgtacatactctgcttctctctgtcagcgtcctgctgctctagaagactgtccgtggatgagtttagtgtacagacttgtaaacagctgccccctctctgctcagtctagttcccagatccttttctttttaattgctcatttgtaaaattgtcctaatctttcctagctttttaatagttaatattagaaactctttaatagttttcctttcagtttgtgagctcttctctgtcgccctgaagggtcactgtattctgtatgaatgcatggcatgatacaactaatttaagagtcttttataaataaagtttgcattaacta

SEQ ID NO: 494737 - DNA, 4300 bp, Homo sapiens
ctgagatgttaaaccagagtgcttgaggatcagggctggattctgcctcatcaggctctggctcctccggggtctgtatgttggtccctctttgcgaatgttctttgaggatgagaagcctgccctcctatcccagatagatgcagaatttgagaagatgcagggacaaagtccacctgctccaaccagaggaatttccaagcatagcacaagtggtacagatgaaggagaagatggagatgaaccagatgacgggagcaatgatgtcgttgatcttttgccgaggacggagatcagtgataaaatcacttcagagttggtatctaagattggtgataagaattggaagattaggaaagaaggcctagatgaagtggcaggtattattaatgacgcaaaatttatccaaccgaatataggtgaacttccaactgccttgaagggtcgactcaatgattcaaataaaatcttggtacagcaaacgctgaatatcctgcaacaactggcagtagccatgggcccaaatattaagcaacatgtaaaaaatttaggcatccctatcatcacagtccttggagacagcaagaacaatgttcgagctgctgccctagcgactgtgaatgcttgggcagaacagactggcatgaaggaatggctggaaggagaagatctttctgaagagctcaaaaaggaaaatcctttcttgaggcaagagcttctgggctggctggctgagaaactacctactcttcgttccacccctacagaccttatcctttgtgttcctcatctctactcctgcctagaagatcgaaatggagatgtgcgaaagaaggcccaagatgccttgccattcttcatgatgcatttaggatatgaaaaaatggccaaggctactgggaaactaaagccaacttctaaagatcaggtattggccatgctagagaaagccaaagttaacatgccagccaagcctgctccacccactaaagcaacttctaaaccaatgggagggtccgctccagccaaattccagcctgcatcagcacctgctgaagattgtatttccagcagtacagaacccaaacctgatccaaaaaaggccaaagctccaggattatcctctaaagcaaagagtgcacaagggaagaagatgccaagcaaaaccagcttaaaggaggatgaagacaaatccgggcctatttttattgttgttccaaatggaaaagagcaaaggatgaaagatgaaaaaggattgaaggtgctaaagtggaattttactaccccacgggatgaatacattgagcaactaaagactcaaatgtctagctgtgtggctaaatggttacaagatgagatgtttcactcagactttcagcatcataacaaagcccttgctgttatggttgatcacttggagagtgaaaaagaaggagttattggttgcctggatcttatcttaaagtggcttaccctgaggttttttggacaccaatacaagcgtcctgatgaaagcactagaatatttaaaattgctcttcaccttgctaagtgaagaagaatatcatcttactgagaatgaagcatcttccttcatcccctatcttgtcgtcaaggttggagaaccaaaggatgtcattcgtaaagatgttcgtgccatcctgaaccggatgtgccttgtctacccagctagcaagatgtttccctttatcatggaaggaaccaaatccaaaaactctaagcagagagcagagtgcctggaagagctgggatgtctggttgagtcctatggcatgaatgtttgccaaccaaccccaggaaaagccttaaaggaaatagctgttcacataggagaccgtgacaatgctgtacgcaatgctgcactcaacaccattgtaacggtgtacaatgtacatggggatcaggtgttcaaactgattggaaatctttctgaaaaggatatgagcatgctcgaggagaggattaagcggtcagcaaagagaccctctgctgcaccaataaaacaggtggaagagaaacctcagcgtgcacagaacataagctccaatgccaacatgttacgcaagggaccagctgaggacatgtcttccaaactcaaccaagcccgaagcatgagtgggcatcctgaggcagcccagatggtccgccgagaattccagctggatctagatgagattgagaatgacaatggtacagtccgatgtgaaatgccagaacttgttcagcacaaactggatgacatttttgagccagtccttattcctgaacccaagatccgggctgtttctccacacttcgatgacatgcacagtaatacagcatccacaatcaatttcattatctcccaagtagccagtggtgacatcaacacaagtatccaagctctgacacagatcgatgaggtcctgagacaggaagacaaagctgaagccatgtccggccatattgatcagtttctgatagccacttttatgcagctaagactcatctacaacacacacatggcagatgagaaattggagaaggacgagatcatcaagttgtatagctgtatcattggcaacatgatttcgctgtttcagatagagagccttgcccgggaggcctccactggagtactaaaagacctaatgcatggcctcatcaccttaatgctggattctcggattgaagatcttgaggaaggacaacaggtcatccgctctgtgaacctcttggtggtgaaggttctggagaagtcagaccagaccaacatcctgagtgccctacttgttttgctccaagacagcctgctagcaacagccagttctcccaaattctcagagcttgttatgaagtgtctctggagaatggttcgactgttgcctgataccatcaatagcattaacctagacagaattcttctggatatccacattttcatgaaggtcttccccaaagagaaactgaagcaatgcaaaagtgaatttcccataaggaccctaaagaccctgctacacaccttatgcaaattaaaagggcccaagatcctggaccacctaacgatgatcgacaacaaaaacgagtctgagctggaggcccatctctgccggatgatgaagcacagtatggaccagactgggagcaagtctgataaggaaacagaaaagggagcatctcgaatagatgaaaaatcatcaaaggccaaagtgaatgatttcttagctgagatttttaagaagattggctctaaagaaaacactaaagagggactagcagagttatatgaatataagaagaaatactcagatgctgacattgaaccatttctgaaaaattcctcacagttcttccagagctatgtcgaaagaggccttcgggtgattgagatggagagggagggcaaaggtcgtatttccacttcaacaggcatctcccctcagatggaagtcacatgtgtgcccacgcccacaagcacagtgtcctccataggtaacacaaatggggaagaagtggggccatctgtctacttggaaaggctaaagatcctccgacagcgatgtggtctggacaacacaaagcaagatgaccgacctcctttgacctctttgctctccaaaccagcagttcctactgtcgcctcttccacagacatgctccacagcaaactctctcagctccgggagtcacgggagcagcaccagcattcagacctggattctaaccagactcactcttcaggaactgtgacctcctcctcctccacagctaacatagacgacttgaaaaaaagactggagagaataaagagcagtcgcaaatgaagctgccccactcccccggcaccctgcagctttagtttactaaactagaagtcctcatagtttaaaatggcctcagcaggcctagtgtatacaaactggttgtatgtatcatgccgtggagctagggggaggagtcattgtggcacaagtatttgtacatactctgcttctctctgtcagcgtcctgctgctctagaagactgtccgtggatgagtttagtgtacagacttgtaaacagctgccccctctctgctcagtctagttcccagatccttttctttttaattgctcatttgtaaaattgtcctaatctttcctagctttttaatagttaatattagaaactctttaatagttttcctttcagtttgtgagctcttctctgtcgccctgaagggtcactgtattctgtatgaatgcatggcatgatacaactaatttaagagtcttttataaataaagtttgcattaacta

SEQ ID NO: 494738 - DNA, 3479 bp, Homo sapiens
caatcattgtttgacagaggattgtcataagcttgtatgactttatcatttatgtgagctctcactttttatgtcatttgtctctctagccaacttctaaagatcaggtattggccatgctagagaaagccaaagttaacatgccagccaagcctgctccacccactaaagcaacttctaaaccaatgggagggtccgctccagccaaattccagcctgcatcagcacctgctgaagattgtatttccagcagtacagaacccaaacctgatccaaaaaaggccaaagctccaggattatcctctaaagcaaagagtgcacaagggaagaagatgccaagcaaaaccagcttaaaggaggatgaagacaaatccgggcctatttttattgttgttccaaatggaaaagagcaaaggatgaaagatgaaaaaggattgaaggtgctaaagtggaattttactaccccacgggatgaatacattgagcaactaaagactcaaatgtctagctgtgtggctaaatggttacaagatgagatgtttcactcagactttcagcatcataacaaagcccttgctgttatggttgatcacttggagagtgaaaaagaaggagttattggttgcctggatcttatcttaaagtggcttaccctgaggttttttggacaccaatacaagcgtcctgatgaaagcactagaatatttaaaattgctcttcaccttgctaagtgaagaagaatatcatcttactgagaatgaagcatcttccttcatcccctatcttgtcgtcaaggttggagaaccaaaggatgtcattcgtaaagatgttcgtgccatcctgaaccggatgtgccttgtctacccagctagcaagatgtttccctttatcatggaaggaaccaaatccaaaaactctaagcagagagcagagtgcctggaagagctgggatgtctggttgagtcctatggcatgaatgtttgccaaccaaccccaggaaaagccttaaaggaaatagctgttcacataggagaccgtgacaatgctgtacgcaatgctgcactcaacaccattgtaacggtgtacaatgtacatggggatcaggtgttcaaactgattggaaatctttctgaaaaggatatgagcatgctcgaggagaggattaagcggtcagcaaagagaccctctgctgcaccaataaaacaggtggaagagaaacctcagcgtgcacagaacataagctccaatgccaacatgttacgcaagggaccagctgaggacatgtcttccaaactcaaccaagcccgaagcatgagtgggcatcctgaggcagcccagatggtccgccgagaattccagctggatctagatgagattgagaatgacaatggtacagtccgatgtgaaatgccagaacttgttcagcacaaactggatgacatttttgagccagtccttattcctgaacccaagatccgggctgtttctccacacttcgatgacatgcacagtaatacagcatccacaatcaatttcattatctcccaagtagccagtggtgacatcaacacaagtatccaagctctgacacagatcgatgaggtcctgagacaggaagacaaagctgaagccatgtccggccatattgatcagtttctgatagccacttttatgcagctaagactcatctacaacacacacatggcagatgagaaattggagaaggacgagatcatcaagttgtatagctgtatcattggcaacatgatttcgctgtttcagatagagagccttgcccgggaggcctccactggagtactaaaagacctaatgcatggcctcatcaccttaatgctggattctcggattgaagatcttgaggaaggacaacaggtcatccgctctgtgaacctcttggtggtgaaggttctggagaagtcagaccagaccaacatcctgagtgccctacttgttttgctccaagacagcctgctagcaacagccagttctcccaaattctcagagcttgttatgaagtgtctctggagaatggttcgactgttgcctgataccatcaatagcattaacctagacagaattcttctggatatccacattttcatgaaggtcttccccaaagagaaactgaagcaatgcaaaagtgaatttcccataaggaccctaaagaccctgctacacaccttatgcaaattaaaagggcccaagatcctggaccacctaacgatgatcgacaacaaaaacgagtctgagctggaggcccatctctgccggatgatgaagcacagtatggaccagactgggagcaagtctgataaggaaacagaaaagggagcatctcgaatagatgaaaaatcatcaaaggccaaagtgaatgatttcttagctgagatttttaagaagattggctctaaagaaaacactaaagagggactagcagagttatatgaatataagaagaaatactcagatgctgacattgaaccatttctgaaaaattcctcacagttcttccagagctatgtcgaaagaggccttcgggtgattgagatggagagggagggcaaaggtcgtatttccacttcaacaggcatctcccctcagatggaagtcacatgtgtgcccacgcccacaagcacagtgtcctccataggtaacacaaatggggaagaagtggggccatctgtctacttggaaaggctaaagatcctccgacagcgatgtggtctggacaacacaaagcaagatgaccgacctcctttgacctctttgctctccaaaccagcagttcctactgtcgcctcttccacagacatgctccacagcaaactctctcagctccgggagtcacgggagcagcaccagcattcagacctggattctaaccagactcactcttcaggaactgtgacctcctcctcctccacagctaacatagacgacttgaaaaaaagactggagagaataaagagcagtcgcaaatgaagctgccccactcccccggcaccctgcagctttagtttactaaactagaagtcctcatagtttaaaatggcctcagcaggcctagtgtatacaaactggttgtatgtatcatgccgtggagctagggggaggagtcattgtggcacaagtatttgtacatactctgcttctctctgtcagcgtcctgctgctctagaagactgtccgtggatgagtttagtgtacagacttgtaaacagctgccccctctctgctcagtctagttcccagatccttttctttttaattgctcatttgtaaaattgtcctaatctttcctagctttttaatagttaatattagaaactctttaatagttttcctttcagtttgtgagctcttctctgtcgccctgaagggtcactgtattctgtatgaatgcatggcatgatacaactaatttaagagtcttttataaataaagtttgcattaacta

SEQ ID NO: 494739 - DNA, 157 bp, Homo sapiens
cagagtgcgcgttgtagatatctattaaagggtgtaccacagtgatgcctgattcttcaaaatacagtggtttctttacgctgtatagcctgcggggtcaacttgaactcaagccgccagagcgggatcgtgggcggcgagagcgcgctcccggggg

SEQ ID NO: 494740 - DNA, 5391 bp, Homo sapiens
  misc_feature (308)..(308): n is a, c, g, or t
  misc_feature (323)..(323): n is a, c, g, or t
  misc_feature (329)..(330): n is a, c, g, or t
gagaagaaacgtcaagtggtcaagccctgcaggaggcattgatgcgatcttccttactaccacactacagaacatcagtgaggatgttttagcagtaatggataataaaaatccaaccatcaagcagcagacatctctttttattgcaagaagtttccgccactgcactgcttctaccctgccaaagagcttgctaaagcccttttgtgctgcactacttaagcacatcaatgattctgctcctgaagtcagagatgccgcatttgaagcattgggtactgctttgaaggtggttggcgagaaagcantaaaccattcctagntgatgnngacacactcaagcttgataagatcaaagaatgttcagaaaaggtagaactgatacatggtaagaaagctggactagctgctgataagaaggaattcaaacctctgcctggaaggactgctgcttcaggggctgcaggagataaggacacaaaggacatttctgcacccaaaccaggacctctaaaaaaggcacctgctgctaaggctggtgggccaccaaaaaaggggaaaccagctgcaccaggaggcgcagggaatactggaaccaagaacaagaaaggactggagactaaagaaatagtggagcctgagctctcgatagaagtatgtgaagaaaaagcttcagctgttcttccccctacctgtatacagcttcttgacagcagtaactggaaagaaaggctggcttgtatggaagagttccagaaggctgttgagctaatggaccgaactgaaatgccatgccaggcattagtgaggatgctagccaagaaacctggatggaaagaaactaattttcaggtgatgcaaatgaagcttcatatagttgctttgattgcccagaagggaaatttttccaaaacgtcagctcaggttgtattagatggccttgtggacaagattggagatgtgaaatgtgggaacaatgcaaaagaagctatgacagcaatagccgaagcctgtatgttaccatggactgctgaacaggttgtgtcaatggctttctcacaaaagaatcccaaaaatcagtcagaaactctgaattggctatcaaatgccataaaagaatttggtttttctgggttgaatgtcaaagctttcattagcaatgtgaagacagctcttgctgcaacaaacccagctgtgaggactgctgccataaccctgcttggcgtgatgtatctgtatgttggtccctctttgcgaatgttctttgaggatgagaagcctgccctcctatcccagatagatgcagaatttgagaagatgcagggacaaagtccacctgctccaaccagaggaatttccaagcatagcacaagtggtacagatgaaggagaagatggagatgaaccagatgacgggagcaatgatgtcgttgatcttttgccgaggacggagatcagtgataaaatcacttcagagttggtatctaagattggtgataagaattggaagattaggaaagaaggcctagatgaagtggcaggtattattaatgacgcaaaatttatccaaccgaatataggtgaacttccaactgccttgaagggtcgactcaatgattcaaataaaatcttggtacagcaaacgctgaatatcctgcaacaactggcagtagccatgggcccaaatattaagcaacatgtaaaaaatttaggcatccctatcatcacagtccttggagacagcaagaacaatgttcgagctgctgccctagcgactgtgaatgcttgggcagaacagactggcatgaaggaatggctggaaggagaagatctttctgaagagctcaaaaaggaaaatcctttcttgaggcaagagcttctgggctggctggctgagaaactacctactcttcgttccacccctacagaccttatcctttgtgttcctcatctctactcctgcctagaagatcgaaatggagatgtgcgaaagaaggcccaagatgccttgccattcttcatgatgcatttaggatatgaaaaaatggccaaggctactgggaaactaaagccaacttctaaagatcaggtattggccatgctagagaaagccaaagttaacatgccagccaagcctgctccacccactaaagcaacttctaaaccaatgggagggtccgctccagccaaattccagcctgcatcagcacctgctgaagattgtatttccagcagtacagaacccaaacctgatccaaaaaaggccaaagctccaggattatcctctaaagcaaagagtgcacaagggaagaagatgccaagcaaaaccagcttaaaggaggatgaagacaaatccgggcctatttttattgttgttccaaatggaaaagagcaaaggatgaaagatgaaaaaggattgaaggtgctaaagtggaattttactaccccacgggatgaatacattgagcaactaaagactcaaatgtctagctgtgtggctaaatggttacaagatgagatgtttcactcagactttcagcatcataacaaagcccttgctgttatggttgatcacttggagagtgaaaaagaaggagttattggttgcctggatcttatcttaaagtggcttaccctgaggttttttggacaccaatacaagcgtcctgatgaaagcactagaatatttaaaattgctcttcaccttgctaagtgaagaagaatatcatcttactgagaatgaagcatcttccttcatcccctatcttgtcgtcaaggttggagaaccaaaggatgtcattcgtaaagatgttcgtgccatcctgaaccggatgtgccttgtctacccagctagcaagatgtttccctttatcatggaaggaaccaaatccaaaaactctaagcagagagcagagtgcctggaagagctgggatgtctggttgagtcctatggcatgaatgtttgccaaccaaccccaggaaaagccttaaaggaaatagctgttcacataggagaccgtgacaatgctgtacgcaatgctgcactcaacaccattgtaacggtgtacaatgtacatggggatcaggtgttcaaactgattggaaatctttctgaaaaggatatgagcatgctcgaggagaggattaagcggtcagcaaagagaccctctgctgcaccaataaaacaggtggaagagaaacctcagcgtgcacagaacataagctccaatgccaacatgttacgcaagggaccagctgaggacatgtcttccaaactcaaccaagcccgaagcatgagtgggcatcctgaggcagcccagatggtccgccgagaattccagctggatctagatgagattgagaatgacaatggtactgaacccaagatccgggctgtttctccacacttcgatgacatgcacagtaatacagcatccacaatcaatttcattatctcccaagtagccagtggtgacatcaacacaagtatccaagctctgacacagatcgatgaggtcctgagacaggaagacaaagctgaagccatgtccggccatattgatcagtttctgatagccacttttatgcagctaagactcatctacaacacacacatggcagatgagaaattggagaaggacgagatcatcaagttgtatagctgtatcattggcaacatgatttcgctgtttcagatagagagccttgcccgggaggcctccactggagtactaaaagacctaatgcatggcctcatcaccttaatgctggattctcggattgaagatcttgaggaaggacaacaggtcatccgctctgtgaacctcttggtggtgaaggttctggagaagtcagaccagaccaacatcctgagtgccctacttgttttgctccaagacagcctgctagcaacagccagttctcccaaattctcagagcttgttatgaagtgtctctggagaatggttcgactgttgcctgataccatcaatagcattaacctagacagaattcttctggatatccacattttcatgaaggtcttccccaaagagaaactgaagcaatgcaaaagtgaatttcccataaggaccctaaagaccctgctacacaccttatgcaaattaaaagggcccaagatcctggaccacctaacgatgatcgacaacaaaaacgagtctgagctggaggcccatctctgccggatgatgaagcacagtatggaccagactgggagcaagtctgataaggaaacagaaaagggagcatctcgaatagatgaaaaatcatcaaaggccaaagtgaatgatttcttagctgagatttttaagaagattggctctaaagaaaacactaaagagggactagcagagttatatgaatataagaagaaatactcagatgctgacattgaaccatttctgaaaaattcctcacagttcttccagagctatgtcgaaagaggccttcgggtgattgagatggagagggagggcaaaggtcgtatttccacttcaacaggcatctcccctcagatggaagtcacatgtgtgcccacgcccacaagcacagtgtcctccataggtaacacaaatggggaagaagtggggccatctgtctacttggaaaggctaaagatcctccgacagcgatgtggtctggacaacacaaagcaagatgaccgacctcctttgacctctttgctctccaaaccagcagttcctactgtcgcctcttccacagacatgctccacagcaaactctctcagctccgggagtcacgggagcagcaccagcattcagacctggattctaaccagactcactcttcaggaactgtgacctcctcctcctccacagctaacatagacgacttgaaaaaaagactggagagaataaagagcagtcgcaaatgaagctgccccactcccccggcaccctgcagctttagtttactaaactagaagtcctcatagtttaaaatggcctcagcaggcctagtgtatacaaactggttgtatgtatcatgccgtggagctagggggaggagtcattgtggcacaagtatttgtacatactctgcttctctctgtcagcgtcctgctgctctagaagactgtccgtggatgagtttagtgtacagacttgtaaacagctgccccctctctgctcagtctagttcccagatccttttctttttaattgctcatttgtaaaattgtcctaatctttcctagctttttaatagttaatattagaaactctttaatagttttcctttcagtttgtgagctcttctctgtcgccctgaagggtcactgtattctgtatgaatgcatggcatgatacaactaatttaagagtcttttataaataaagtttgcattaacta

SEQ ID NO: 494741 - DNA, 126 bp, Homo sapiens
acgactaccgcacttatgcagcctccgtggatgtggatacgggacggtgacgcctgccgttcccggatgccggcacgacgcaagctggacggctactaactgtgcgtgtactctctggggactcct

SEQ ID NO: 494742 - DNA, 2677 bp, Homo sapiens
  misc_feature (79)..(79): n is a, c, g, or t
cttttagtactccagtggaggcctcccggccaaggctctctatctgaaacagcgaaatcatgttgccaatgatacagcnatacaacttgatgatctcgtccaaatccaaaaactctaagcagagagcagagtgcctggaagagctgggatgtctggttgagtcctatggcatgaatgtttgccaaccaaccccaggaaaagccttaaaggaaatagctgttcacataggagaccgtgacaatgctgtacgcaatgctgcactcaacaccattgtaacggtgtacaatgtacatggggatcaggtgttcaaactgattggaaatctttctgaaaaggatatgagcatgctcgaggagaggattaagcggtcagcaaagagaccctctgctgcaccaataaaacaggtggaagagaaacctcagcgtgcacagaacataagctccaatgccaacatgttacgcaagggaccagctgaggacatgtcttccaaactcaaccaagcccgaagcatgagtgggcatcctgaggcagcccagatggtccgccgagaattccagctggatctagatgagattgagaatgacaatggtacagtccgatgtgaaatgccagaacttgttcagcacaaactggatgacatttttgagccagtccttattcctgaacccaagatccgggctgtttctccacacttcgatgacatgcacagtaatacagcatccacaatcaatttcattatctcccaagtagccagtggtgacatcaacacaagtatccaagctctgacacagatcgatgaggtcctgagacaggaagacaaagctgaagccatgtccggccatattgatcagtttctgatagccacttttatgcagctaagactcatctacaacacacacatggcagatgagaaattggagaaggacgagatcatcaagttgtatagctgtatcattggcaacatgatttcgctgtttcagatagagagccttgcccgggaggcctccactggagtactaaaagacctaatgcatggcctcatcaccttaatgctggattctcggattgaagatcttgaggaaggacaacaggtcatccgctctgtgaacctcttggtggtgaaggttctggagaagtcagaccagaccaacatcctgagtgccctacttgttttgctccaagacagcctgctagcaacagccagttctcccaaattctcagagcttgttatgaagtgtctctggagaatggttcgactgttgcctgataccatcaatagcattaacctagacagaattcttctggatatccacattttcatgaaggtcttccccaaagagaaactgaagcaatgcaaaagtgaatttcccataaggaccctaaagaccctgctacacaccttatgcaaattaaaagggcccaagatcctggaccacctaacgatgatcgacaacaaaaacgagtctgagctggaggcccatctctgccggatgatgaagcacagtatggaccagactgggagcaagtctgataaggaaacagaaaagggagcatctcgaatagatgaaaaatcatcaaaggccaaagtgaatgatttcttagctgagatttttaagaagattggctctaaagaaaacactaaagagggactagcagagttatatgaatataagaagaaatactcagatgctgacattgaaccatttctgaaaaattcctcacagttcttccagagctatgtcgaaagaggccttcgggtgattgagatggagagggagggcaaaggtcgtatttccacttcaacaggcatctcccctcagatggaagtcacatgtgtgcccacgcccacaagcacagtgtcctccataggtaacacaaatggggaagaagtggggccatctgtctacttggaaaggctaaagatcctccgacagcgatgtggtctggacaacacaaagcaagatgaccgacctcctttgacctctttgctctccaaaccagcagttcctactgtcgcctcttccacagacatgctccacagcaaactctctcagctccgggagtcacgggagcagcaccagcattcagacctggattctaaccagactcactcttcaggaactgtgacctcctcctcctccacagctaacatagacgacttgaaaaaaagactggagagaataaagagcagtcgcaaatgaagctgccccactcccccggcaccctgcagctttagtttactaaactagaagtcctcatagtttaaaatggcctcagcaggcctagtgtatacaaactggttgtatgtatcatgccgtggagctagggggaggagtcattgtggcacaagtatttgtacatactctgcttctctctgtcagcgtcctgctgctctagaagactgtccgtggatgagtttagtgtacagacttgtaaacagctgccccctctctgctcagtctagttcccagatccttttctttttaattgctcatttgtaaaattgtcctaatctttcctagctttttaatagttaatattagaaactctttaatagttttcctttcagtttgtgagctcttctctgtcgccctgaagggtcactgtattctgtatgaatgcatggcatgatacaactaatttaagagtcttttataaataaagtttgcattaacta

SEQ ID NO: 494743 - DNA, 5406 bp, Homo sapiens
  misc_feature (308)..(308): n is a, c, g, or t
  misc_feature (323)..(323): n is a, c, g, or t
  misc_feature (329)..(330): n is a, c, g, or t
gagaagaaacgtcaagtggtcaagccctgcaggaggcattgatgcgatcttccttactaccacactacagaacatcagtgaggatgttttagcagtaatggataataaaaatccaaccatcaagcagcagacatctctttttattgcaagaagtttccgccactgcactgcttctaccctgccaaagagcttgctaaagcccttttgtgctgcactacttaagcacatcaatgattctgctcctgaagtcagagatgccgcatttgaagcattgggtactgctttgaaggtggttggcgagaaagcantaaaccattcctagntgatgnngacacactcaagcttgataagatcaaagaatgttcagaaaaggtagaactgatacatggtaagaaagctggactagctgctgataagaaggaattcaaacctctgcctggaaggactgctgcttcaggggctgcaggagataaggacacaaaggacatttctgcacccaaaccaggacctctaaaaaaggcacctgctgctaaggctggtgggccaccaaaaaaggggaaaccagctgcaccaggaggcgcagggaatactggaaccaagaacaagaaaggactggagactaaagaaatagtggagcctgagctctcgatagaagtatgtgaagaaaaagcttcagctgttcttccccctacctgtatacagcttcttgacagcagtaactggaaagaaaggctggcttgtatggaagagttccagaaggctgttgagctaatggaccgaactgaaatgccatgccaggcattagtgaggatgctagccaagaaacctggatggaaagaaactaattttcaggtgatgcaaatgaagcttcatatagttgctttgattgcccagaagggaaatttttccaaaacgtcagctcaggttgtattagatggccttgtggacaagattggagatgtgaaatgtgggaacaatgcaaaagaagctatgacagcaatagccgaagcctgtatgttaccatggactgctgaacaggttgtgtcaatggctttctcacaaaagaatcccaaaaatcagtcagaaactctgaattggctatcaaatgccataaaagaatttggtttttctgggttgaatgtcaaagctttcattagcaatgtgaagacagctcttgctgcaacaaacccagctgtgaggactgctgccataaccctgcttggcgtgatgtatctgtatgttggtccctctttgcgaatgttctttgaggatgagaagcctgccctcctatcccagatagatgcagaatttgagaagatgcagggacaaagtccacctgctccaaccagaggaatttccaagcatagcacaagtggtacagatgaaggagaagatggagatgaaccagatgacgggagcaatgatgtcgttgatcttttgccgaggacggagatcagtgataaaatcacttcagagttggtatctaagattggtgataagaattggaagattaggaaagaaggcctagatgaagtggcaggtattattaatgacgcaaaatttatccaaccgaatataggtgaacttccaactgccttgaagggtcgactcaatgattcaaataaaatcttggtacagcaaacgctgaatatcctgcaacaactggcagtagccatgggcccaaatattaagcaacatgtaaaaaatttaggcatccctatcatcacagtccttggagacagcaagaacaatgttcgagctgctgccctagcgactgtgaatgcttgggcagaacagactggcatgaaggaatggctggaaggagaagatctttctgaagagctcaaaaaggaaaatcctttcttgaggcaagagcttctgggctggctggctgagaaactacctactcttcgttccacccctacagaccttatcctttgtgttcctcatctctactcctgcctagaagatcgaaatggagatgtgcgaaagaaggcccaagatgccttgccattcttcatgatgcatttaggatatgaaaaaatggccaaggctactgggaaactaaagccaacttctaaagatcaggtattggccatgctagagaaagccaaagttaacatgccagccaagcctgctccacccactaaagcaacttctaaaccaatgggagggtccgctccagccaaattccagcctgcatcagcacctgctgaagattgtatttccagcagtacagaacccaaacctgatccaaaaaaggccaaagctccaggattatcctctaaagcaaagagtgcacaagggaagaagatgccaagcaaaaccagcttaaaggaggatgaagacaaatccgggcctatttttattgttgttccaaatggaaaagagcaaaggatgaaagatgaaaaaggattgaaggtgctaaagtggaattttactaccccacgggatgaatacattgagcaactaaagactcaaatgtctagctgtgtggctaaatggttacaagatgagatgtttcactcagactttcagcatcataacaaagcccttgctgttatggttgatcacttggagagtgaaaaagaaggagttattggttgcctggatcttatcttaaagtggcttaccctgaggttttttggacaccaatacaagcgtcctgatgaaagcactagaatatttaaaattgctcttcaccttgctaagtgaagaagaatatcatcttactgagaatgaagcatcttccttcatcccctatcttgtcgtcaaggttggagaaccaaaggatgtcattcgtaaagatgttcgtgccatcctgaaccggatgtgccttgtctacccagctagcaagatgtttccctttatcatggaaggaaccaaatccaaaaactctaagcagagagcagagtgcctggaagagctgggatgtctggttgagtcctatggcatgaatgtttgccaaccaaccccaggaaaagccttaaaggaaatagctgttcacataggagaccgtgacaatgctgtacgcaatgctgcactcaacaccattgtaacggtgtacaatgtacatggggatcaggtgttcaaactgattggaaatctttctgaaaaggatatgagcatgctcgaggagaggattaagcggtcagcaaagagaccctctgctgcaccaataaaacaggtggaagagaaacctcagcgtgcacagaacataagctccaatgccaacatgttacgcaagggaccagctgaggacatgtcttccaaactcaaccaagcccgaagcatgagtgggcatcctgaggcagcccagatggtccgccgagaattccagctggatctagatgagattgagaatgacaatggtacagtccgatgtgaaatgccagaacttgttcagcacaaactggatgacatttttgagccagtccttattcctgaacccaagatccgggctgtttctccacacttcgatgacatgcacagtaatacagcatccacaatcaatttcattatctcccaagtagccagtggtgacatcaacacaagtatccaagctctgacacagatcgatgaggtcctgagacaggaagacaaagctgaagccatgtccggccatattgatcagtttctgatagccacttttatgcagctaagactcatctacaacacacacatggcagatgagaaattggagaaggacgagatcatcaagttgtatagctgtatcattggcaacatgatttcgctgtttcagatagagagccttgcccgggaggcctccactggagtactaaaagacctaatgcatggcctcatcaccttaatgctggattctcggattgaagatcttgaggaaggacaacaggtcatccgctctgtgaacctcttggtggtgaaggttctggagaagtcagaccagaccaacatcctgagtgccctacttgttttgctccaagacagcctgctagcaacagccagttctcccaaattctcagagcttgttatgaagtgtctctggagaatggttcgactgttgcctgataccatcaatagcattaacctagacagaattcttctggatatccacattttcatgaaggtcttccccaaagagaaactgaagcaatgcaaaagtgaatttcccataaggaccctaaagaccctgctacacaccttatgcaaattaaaagggcccaagatcctggaccacctaacgatgatcgacaacaaaaacgagtctgagctggaggcccatctctgccggatgatgaagcacagtatggaccagactgggagcaagtctgataaggaaacagaaaagggagcatctcgaatagatgaaaaatcatcaaaggccaaagtgaatgatttcttagctgagatttttaagaagattggctctaaagaaaacactaaagagggactagcagagttatatgaatataagaagaaatactcagatgctgacattgaaccatttctgaagatggagagggagggcaaaggtcgtatttccacttcaacaggcatctcccctcagatggaagtcacatgtgtgcccacgcccacaagcacagtgtcctccataggtaacacaaatggggaagaagtggggccatctgtctacttggaaaggctaaagatcctccgacagcgatgtggtctggacaacacaaagcaagatgaccgacctcctttgacctctttgctctccaaaccagcagttcctactgtcgcctcttccacagacatgctccacagcaaactctctcagctccgggagtcacgggagcagcaccagcattcagacctggattctaaccagactcactcttcaggaactgtgacctcctcctcctccacagctaacatagacgacttgaaaaaaagactggagagaataaagagcagtcgcaaatgaagctgccccactcccccggcaccctgcagctttagtttactaaactagaagtcctcatagtttaaaatggcctcagcaggcctagtgtatacaaactggttgtatgtatcatgccgtggagctagggggaggagtcattgtggcacaagtatttgtacatactctgcttctctctgtcagcgtcctgctgctctagaagactgtccgtggatgagtttagtgtacagacttgtaaacagctgccccctctctgctcagtctagttcccagatccttttctttttaattgctcatttgtaaaattgtcctaatctttcctagctttttaatagttaatattagaaactctttaatagttttcctttcagtttgtgagctcttctctgtcgccctgaagggtcactgtattctgtatgaatgcatggcatgatacaactaatttaagagtcttttataaataaagtttgcattaacta

SEQ ID NO: 494744 - DNA, 999 bp, Homo sapiens
gcctttctagaccattcttatgtggcgcgaatccaagtaaggtagagatagaagttggtcgtgcagtgttgcccatgggatgcttgtttcctcctattgtgactgcagactcacccaggtaagagaatgcgctagggagtgaacaaggaagcggttgctagaacgagaataagaggagtggcatgtcctcggcatggctcctttgaatcgcgatgcctttcagggagggagtcaggagggagctgagttgtcaaggcgtagtggaccgccgagctccttgcgcagggccctcttcacttcttgaagcggggtgacaaggaatgacggcaaatgtgtccttctttgtgggccaacaagacaacgagaggaactttggttaacgaaggatcaacagttggacacgtccctacattaaaccaggggaatttccaatggtacgcgttgggtctctgggcttacggacctttatcttgcctgtgagagtataaagacaatgagcaccatcatagcacgcgcaactgggactcgtaaggaaaaacatgatgatttctatagccaaggaccatttggtcaggacgctcacccaacgcagtgcgctgcagttgcttaggcatctcatcttggtgacccgtgacttcatcccacggctcacaacgctgggatagaaggcacaacccttggaggcggggacgtgcataatgggcctactacaaaaggccactggatatcccaggcccgtgaacccacgagggactggagtgaaaactacccacgtgtactagcgcacggggcagatgctgagcagccagccaagatgatgccgtcaatgacaagagccagcgaacagtatgccgtgacgggcaccagcaatgaaccggaatcaaaccatggagacctgggatagtgcacagacgaagggaacatacgggcacggctgacggagacacacgcaggcgtagtggccggaagagcctgacggcgcagtcgggggcacggccc

SEQ ID NO: 494745 - DNA, 356 bp, Homo sapiens
gactctacctgatctctcataggttcgcaggagagagcatgtgcagggaacatccatttataaaccatcagacctcatgagacttattcactaccatgagaacagcatgggggaaactgcctccatgattcagttatctccacctggccccacccttgacacatgggaattgttacaattcaagatgagatttgggtggggacagagccaaaccatataattcttccccggcccctcccaaatctcatgtcctcatatttcaaaagcaatcgtgccttcccctaagtcccccaaactcttatttcagcattaactcaaaattccatagtccaaagtctcatctgagacaaggcaag

SEQ ID NO: 494746 - DNA, 5420 bp, Homo sapiens
  misc_feature (308)..(308): n is a, c, g, or t
  misc_feature (323)..(323): n is a, c, g, or t
  misc_feature (329)..(330): n is a, c, g, or t
gagaagaaacgtcaagtggtcaagccctgcaggaggcattgatgcgatcttccttactaccacactacagaacatcagtgaggatgttttagcagtaatggataataaaaatccaaccatcaagcagcagacatctctttttattgcaagaagtttccgccactgcactgcttctaccctgccaaagagcttgctaaagcccttttgtgctgcactacttaagcacatcaatgattctgctcctgaagtcagagatgccgcatttgaagcattgggtactgctttgaaggtggttggcgagaaagcantaaaccattcctagntgatgnngacacactcaagcttgataagatcaaagaatgttcagaaaaggtagaactgatacatggtaagaaagctggactagctgctgataagaaggaattcaaacctctgcctggaaggactgctgcttcaggggctgcaggagataaggacacaaaggacatttctgcacccaaaccaggacctctaaaaaaggcacctgctgctaaggctggtgggccaccaaaaaaggggaaaccagctgcaccaggaggcgcagggaatactggaaccaagaacaagaaaggactggagactaaagaaatagtggagcctgagctctcgatagaagtatgtgaagaaaaagcttcagctgttcttccccctacctgtatacagcttcttgacagcagtaactggaaagaaaggctggcttgtatggaagagttccagaaggctgttgagctaatggaccgaactgaaatgccatgccaggcattagtgaggatgctagccaagaaacctggatggaaagaaactaattttcaggtgatgcaaatgaagcttcatatagttgctttgattgcccagaagggaaatttttccaaaacgtcagctcaggttgtattagatggccttgtggacaagattggagatgtgaaatgtgggaacaatgcaaaagaagctatgacagcaatagccgaagcctgtatgttaccatggactgctgaacaggttgtgtcaatggctttctcacaaaagaatcccaaaaatcagtcagaaactctgaattggctatcaaatgccataaaagaatttggtttttctgggttgaatgtcaaagctttcattagcaatgtgaagacagctcttgctgcaacaaacccagctgtgaggactgctgccataaccctgcttggcgtgatgtatctgtatgttggtccctctttgcgaatgttctttgaggatgagaagcctgccctcctatcccagatagatgcagaatttgagaagatgcagggacaaagtccacctgctccaaccagaggaatttccaagcatagcacaagtggtacagatgaaggagaagatggagatgaaccagatgacgggagcaatgatgtcgttgatcttttgccgaggacggagatcagtgataaaatcacttcagagttggtatctaagattggtgataagaattggaagattaggaaagaaggcctagatgaagtggcaggtattattaatgacgcaaaatttatccaaccgaatataggtgaacttccaactgccttgaagggtcgactcaatgattcaaataaaatcttggtacagcaaacgctgaatatcctgcaacaactggcagtagccatgggcccaaatattaagcaacatgtaaaaaatttaggcatccctatcatcacagtccttggagacagcaagaacaatgttcgagctgctgccctagcgactgtgaatgcttgggcagaacagactggcatgaaggaatggctggaaggagaagatctttctgaagagctcaaaaaggaaaatcctttcttgaggcaagagcttctgggctggctggctgagaaactacctactcttcgttccacccctacagaccttatcctttgtgttcctcatctctactcctgcctagaagatcgaaatggagatgtgcgaaagaaggcccaagatgccttgccattcttcatgatgcatttaggatatgaaaaaatggccaaggctactgggaaactaaagccaacttctaaagatcaggtattggccatgctagagaaagccaaagttaacatgccagccaagcctgctccacccactaaagcaacttctaaaccaatgggagggtccgctccagccaaattccagcctgcatcagcacctgctgaagattgtatttccagcagtacagaacccaaacctgatccaaaaaaggccaaagctccaggattatcctctaaagcaaagagtgcacaagggaagaagatgccaagcaaaaccagcttaaaggaggatgaagacaaatccgggcctatttttattgttgttccaaatggaaaagagcaaaggatgaaagatgaaaaaggattgaaggtgctaaagtggaattttactaccccacgggatgaatacattgagcaactaaagactcaaatgtctagctgtgtggctaaatggttacaagatgagatgtttcactcagactttcagcatcataacaaagcccttgctgttatggttgatcacttggagagtgaaaaagaaggagttattggttgcctggatcttatcttaaagtggcttaccctgaggttttttggacaccaatacaagcgtcctgatgaaagcactagaatatttaaaattgctcttcaccttgctaagtgaagaagaatatcatcttactgagaatgaagcatcttccttcatcccctatcttgtcgtcaaggttggagaaccaaaggatgtcattcgtaaagatgttcgtgccatcctgaaccggatgtgccttgtctacccagctagcaagatgtttccctttatcatggaaggaaccaaatccaaaaactctaagcagagagcagagtgcctggaagagctgggatgtctggttgagtcctatggcatgaatgtttgccaaccaaccccaggaaaagccttaaaggaaatagctgttcacataggagaccgtgacaatgctgtacgcaatgctgcactcaacaccattgtaacggtgtacaatgtacatggggatcaggtgttcaaactgattggaaatctttctgaaaaggatatgagcatgctcgaggagaggattaagcggtcagcaaagagaccctctgctgcaccaataaaacaggtggaagagaaacctcagcgtgcacagaacataagctccaatgccaacatgttacgcaagggaccagctgaggacatgtcttccaaactcaaccaagcccgaagcatgagtgggcatcctgaggcagcccagatggtccgccgagaattccagctggatctagatgagattgagaatgacaatggtacagtccgatgtgaaatgccagaacttgttcagcacaaactggatgacatttttgagccagtccttattcctgaacccaagatccgggctgtttctccacacttcgatgacatgcacagtaatacagcatccacaatcaatttcattatctcccaagtagccagtggtgacatcaacacaagtatccaagctctgacacagatcgatgaggtcctgagacaggaagacaaagctgaagccatgtccggccatattgatcagtttctgatagccacttttatgcagctaagactcatctacaacacacacatggcagatgagaaattggagaaggacgagatcatcaagttgtatagctgtatcattggcaacatgatttcgctgtttcagatagagagccttgcccgggaggcctccactggagtactaaaagacctaatgcatggcctcatcaccttaatgctggattctcggattgaagatcttgaggaaggacaacaggtcatccgctctgtgaacctcttggtggtgaaggttctggagaagtcagaccagaccaacatcctgagtgccctacttgttttgctccaagacagcctgctagcaacagccagttctcccaaattctcagagcttgttatgaagtgtctctggagaatggttcgactgttgcctgataccatcaatagcattaacctagacagaattcttctggatatccacattttcatgaaggtcttccccaaagagaaactgaagcaatgcaaaagtgaatttcccataaggaccctaaagaccctgctacacaccttatgcaaattaaaagggcccaagatcctggaccacctaacgatgatcgacaacaaaaacgagtctgagctggaggcccatctctgccggatgatgaagcacagtatggaccagactgggagcaagtctgataaggaaacagaaaagggagcatctcgaatagatgaaaaatcatcaaaggccaaagtgaatgatttcttagctgagatttttaagaagattggctctaaagaaaacactaaagagggactagcagagttatatgaatataagaagaaatactcagatgctgacattgaaccatttctgaaaaattcctcacagttcttccagagctatgtcgaaagaggccttcgggtgattgagatggagagggagggcaaaggtcgtatttccacttcaacaggcatctcccctcagatggaagtcacatgtgtgcccacgcccacaagcacagtgtcctccataggtaacacaaatggggaagaagtggggccatctgtctacttggaaaggctaaagatcctccgacagcgatgtggtctggacaacacaaagcaagatgaccgacctcctttgacctctttgctctccaaaccagcagttcctactgtcgcctcttccacagacatgctccacagcattcagacctggattctaaccagactcactcttcaggaactgtgacctcctcctcctccacagctaacatagacgacttgaaaaaaagactggagagaataaagagcagtcgcaaatgaagctgccccactcccccggcaccctgcagctttagtttactaaactagaagtcctcatagtttaaaatggcctcagcaggcctagtgtatacaaactggttgtatgtatcatgccgtggagctagggggaggagtcattgtggcacaagtatttgtacatactctgcttctctctgtcagcgtcctgctgctctagaagactgtccgtggatgagtttagtgtacagacttgtaaacagctgccccctctctgctcagtctagttcccagatccttttctttttaattgctcatttgtaaaattgtcctaatctttcctagctttttaatagttaatattagaaactctttaatagttttcctttcagtttgtgagctcttctctgtcgccctgaagggtcactgtattctgtatgaatgcatggcatgatacaactaatttaagagtcttttataaataaagtttgcattaacta

SEQ ID NO: 494747 - DNA, 5396 bp, Homo sapiens
  misc_feature (308)..(308): n is a, c, g, or t
  misc_feature (323)..(323): n is a, c, g, or t
  misc_feature (329)..(330): n is a, c, g, or t
gagaagaaacgtcaagtggtcaagccctgcaggaggcattgatgcgatcttccttactaccacactacagaacatcagtgaggatgttttagcagtaatggataataaaaatccaaccatcaagcagcagacatctctttttattgcaagaagtttccgccactgcactgcttctaccctgccaaagagcttgctaaagcccttttgtgctgcactacttaagcacatcaatgattctgctcctgaagtcagagatgccgcatttgaagcattgggtactgctttgaaggtggttggcgagaaagcantaaaccattcctagntgatgnngacacactcaagcttgataagatcaaagaatgttcagaaaaggtagaactgatacatggtaagaaagctggactagctgctgataagaaggaattcaaacctctgcctggaaggactgctgcttcaggggctgcaggagataaggacacaaaggacatttctgcacccaaaccaggacctctaaaaaaggcacctgctgctaaggctggtgggccaccaaaaaaggggaaaccagctgcaccaggaggcgcagggaatactggaaccaagaacaagaaaggactggagactaaagaaatagtggagcctgagctctcgatagaagtatgtgaagaaaaagcttcagctgttcttccccctacctgtatacagcttcttgacagcagtaactggaaagaaaggctggcttgtatggaagagttccagaaggctgttgagctaatggaccgaactgaaatgccatgccaggcattagtgaggatgctagccaagaaacctggatggaaagaaactaattttcaggtgatgcaaatgaagcttcatatagttgctttgattgcccagaagggaaatttttccaaaacgtcagctcaggttgtattagatggccttgtggacaagattggagatgtgaaatgtgggaacaatgcaaaagaagctatgacagcaatagccgaagcctgtatgttaccatggactgctgaacaggttgtgtcaatggctttctcacaaaagaatcccaaaaatcagtcagaaactctgaattggctatcaaatgccataaaagaatttggtttttctgggttgaatgtcaaagctttcattagcaatgtgaagacagctcttgctgcaacaaacccagctgtgaggactgctgccataaccctgcttggcgtgatgtatctgtatgttggtccctctttgcgaatgttctttgaggatgagaagcctgccctcctatcccagatagatgcagaatttgagaagatgcagggacaaagtccacctgctccaaccagaggaatttccaagcatagcacaagtggtacagatgaaggagaagatggagatgaaccagatgacgggagcaatgatgtcgttgatcttttgccgaggacggagatcagtgataaaatcacttcagagttggtatctaagattggtgataagaattggaagattaggaaagaaggcctagatgaagtggcaggtattattaatgacgcaaaatttatccaaccgaatataggtgaacttccaactgccttgaagggtcgactcaatgattcaaataaaatcttggtacagcaaacgctgaatatcctgcaacaactggcagtagccatgggcccaaatattaagcaacatgtaaaaaatttaggcatccctatcatcacagtccttggagacagcaagaacaatgttcgagctgctgccctagcgactgtgaatgcttgggcagaacagactggcatgaaggaatggctggaaggagaagatctttctgaagagctcaaaaaggaaaatcctttcttgaggcaagagcttctgggctggctggctgagaaactacctactcttcgttccacccctacagaccttatcctttgtgttcctcatctctactcctgcctagaagatcgaaatggagatgtgcgaaagaaggcccaagatgccttgccattcttcatgatgcatttaggatatgaaaaaatggccaaggctactgggaaactaaagccaacttctaaagatcaggtattggccatgctagagaaagccaaagttaacatgccagccaagcctgctccacccactaaagcaacttctaaaccaatgggagggtccgctccagccaaattccagcctgcatcagcacctgctgaagattgtatttccagcagtacagaacccaaacctgatccaaaaaaggccaaagctccaggattatcctctaaagcaaagagtgcacaagggaagaagatgccaagcaaaaccagcttaaaggaggatgaagacaaatccgggcctatttttattgttgttccaaatggaaaagagcaaaggatgaaagatgaaaaaggattgaaggtgctaaagtggaattttactaccccacgggatgaatacattgagcaactaaagactcaaatgtctagctgtgtggctaaatggttacaagatgagatgtttcactcagactttcagcatcataacaaagcccttgctgttatggttgatcacttggagagtgaaaaagaaggagttattggttgcctggatcttatcttaaagtggcttaccctgaggttttttggacaccaatacaagcgtcctgatgaaagcactagaatatttaaaattgctcttcaccttgctaagtgaagaagaatatcatcttactgagaatgaagcatcttccttcatcccctatcttgtcgtcaaggttggagaaccaaaggatgtcattcgtaaagatgttcgtgccatcctgaaccggatgtgccttgtctacccagctagcaagatgtttccctttatcatggaaggaaccaaatccaaaaactctaagcagagagcagagtgcctggaagagctgggatgtctggttgagtcctatggcatgaatgtttgccaaccaaccccaggaaaagccttaaaggaaatagctgttcacataggagaccgtgacaatgctgtacgcaatgctgcactcaacaccattgtaacggtgtacaatgtacatggggatcaggtgttcaaactgattggaaatctttctgaaaaggatatgagcatgctcgaggagaggattaagcggtcagcaaagagaccctctgctgcaccaataaaacaggtggaagagaaacctcagcgtgcacagaacataagctccaatgccaacatgttacgcaagggaccagctgaggacatgtcttccaaactcaaccaagcccgaagcatgagtgggcatcctgaggcagcccagatggtccgccgagaattccagctggatctagatgagattgagaatgacaatggtacagtccgatgtgaaatgccagaacttgttcagcacaaactggatgacatttttgagccagtccttattcctgaacccaagatccgggctgtttctccacacttcgatgacatgcacagtaatacagcatccacaatcaatttcattatctcccaagtagccagtggtgacatcaacacaagtatccaagctctgacacagatcgatgaggtcctgagacaggaagacaaagctgaagccatgtccggccatattgatcagtttctgatagccacttttatgcagctaagactcatctacaacacacacatggcagatgagaaattggagaaggacgagatcatcaagttgtatagctgtatcattggcaacatgatttcgctgtttcagatagagagccttgcccgggaggcctccactggagtactaaaagacctaatgcatggcctcatcaccttaatgctggattctcggattgaagatcttgaggaaggacaacaggtcatccgctctgtgaacctcttggtggtgaaggttctggagaagtcagaccagaccaacatcctgagtgccctacttgttttgctccaagacagcctgctagcaacagccagttctcccaaattctcagagcttgttatgaagtgtctctggagaatggttcgactgttgcctgataccatcaatagcattaacctagacagaattcttctggatatccacattttcatgaaggtcttccccaaagagaaactgaagcaatgcaaaagtgaatttcccataaggaccctaaagaccctgctacacaccttatgcaaattaaaagggcccaagatcctggaccacctaacgatgatcgacaacaaaaacgagtctgagctggaggcccatctctgccggatgatgaagcacagtatggaccagactgggagcaagtctgataaggaaacagaaaagggagcatctcgaatagatgaaaaatcatcaaaggccaaagtgaatgatttcttagctgagatttttaagaagattggctctaaagaaaacactaaagagggactagcagagttatatgaatataagaagaaatactcagatgctgacattgaaccatttctgaaaaattcctcacagttcttccagagctatgtcgaaagaggccttcgggtgattgagatggagagggagggcaaaggtcgtatttccacttcaacaggcatctcccctcagatggaagtcacatgtgtgcccacgcccacaagcacagtgtcctccataggtaacacaaatggggaagaagtggggccatctgtctacttggaaaggctaaagatcctccgacagcgatgtggtctggacaacacaaagcaagatgaccgacctcctttgacctctttgctctccaaaccagcagttcctactgtcgcctcttccacagacatgctccacagcaaactctctcagctccgggagtcacgggagcagcaccagctaacatagacgacttgaaaaaaagactggagagaataaagagcagtcgcaaatgaagctgccccactcccccggcaccctgcagctttagtttactaaactagaagtcctcatagtttaaaatggcctcagcaggcctagtgtatacaaactggttgtatgtatcatgccgtggagctagggggaggagtcattgtggcacaagtatttgtacatactctgcttctctctgtcagcgtcctgctgctctagaagactgtccgtggatgagtttagtgtacagacttgtaaacagctgccccctctctgctcagtctagttcccagatccttttctttttaattgctcatttgtaaaattgtcctaatctttcctagctttttaatagttaatattagaaactctttaatagttttcctttcagtttgtgagctcttctctgtcgccctgaagggtcactgtattctgtatgaatgcatggcatgatacaactaatttaagagtcttttataaataaagtttgcattaacta

SEQ ID NO: 494748 - DNA, 823 bp, Homo sapiens
  misc_feature (169)..(169): n is a, c, g, or t
cgcgcggccgaatggcggcgacaagggcccggtggctggacctcggtcgcgagactgccatggcccattgtgaggaatgaagaaagggctccggaagcgccgaggcgcggcctcccaggcccgcggcagggactcggaggacggcgagtttgagatccaggtcggaagnatgactgcccgtggccctggaagtctgggacctggaatgaccccgtggctcctaccttccccacctcggaatgcacctcggatgtggagccggacacccgggagatggtgcgtgcccagaacaagaagaacgaagaagtcgtggaggcgttccgagtcctagtgggcactgagcgtacccgtgtgttcgaaaggcgatcatgacaggaatggggtacaaggtgccaacacccatccagaggaagaccatcccggtgatcttggatggcaaggacgtggtggccatggcccggacgggcagtggcaagacagcctgcttcctcctcgccaatgttcaggagcgggctcaagtaccacagtgcccagaccgggtgccctgggccctcatcctctcgccgagccgagagctggccctgcatgacccttgaagttcactaatggagctaggcaagtacacgtggcctctaagactggcctgatcctgggtggagacaggatggaagaccagtttggagtcctggacgagagatcgcgacataattattggcaggcccggacggtaggagcatgtggctgtggaaaatgagcctgaatctgcagagtgtggaatacgtaggtgtacgggtgaaggctgaacggcttttatgaaattggg

SEQ ID NO: 494749 - DNA, 386 bp, Homo sapiens
gttctagaggatccctgatcgctgtatcgagggagggagaattcaaggacaggaggcatctacccttgtgtccctcttaagcacagggaatgaaaaatggggaaaggcagatttcggctatatccattttctggggtcaccagtgactctggtgggtggcatttggaggaatctaggaaaattcaggaacatgctccctccacattctccagattcaaggtcgtaagaaatgatggcctctcagggaatggggacagtcttccctttggttggggagtgggtgcccactctttaagtattagggcatctcaagatgcagaggtacttgtggaagacccatttgttcacttgcaaagtcccccatgtctgtggggacttacggtcta

SEQ ID NO: 494750 - DNA, 336 bp, Homo sapiens
gacaacatagaatgtggatatattcaaactttcaaaaggacagtgtttagaaagggtaaactaggacacagaaaacactgtgaattacccacgaccccaagtgcttccggctccagggaaataaccatttcatgtgttttgctgggaggtcacaccaatttttccccttatttaactgggtgcaacaatggacttcattcactatccccaaaaagctttctttttcaaaaccaacggaattttccccatttaatttttgggtcccaattggcagttcccatttctaatgggtttgtccggggttaccgaggctccgaatttcgctaactcatgggt

SEQ ID NO: 494751 - DNA, 5955 bp, Homo sapiens
  misc_feature (308)..(308): n is a, c, g, or t
  misc_feature (323)..(323): n is a, c, g, or t
  misc_feature (329)..(330): n is a, c, g, or t
  misc_feature (5770)..(5770): n is a, c, g, or t
  misc_feature (5824)..(5824): n is a, c, g, or t
  misc_feature (5865)..(5865): n is a, c, g, or t
  misc_feature (5879)..(5879): n is a, c, g, or t
  misc_feature (5897)..(5897): n is a, c, g, or t
gagaagaaacgtcaagtggtcaagccctgcaggaggcattgatgcgatcttccttactaccacactacagaacatcagtgaggatgttttagcagtaatggataataaaaatccaaccatcaagcagcagacatctctttttattgcaagaagtttccgccactgcactgcttctaccctgccaaagagcttgctaaagcccttttgtgctgcactacttaagcacatcaatgattctgctcctgaagtcagagatgccgcatttgaagcattgggtactgctttgaaggtggttggcgagaaagcantaaaccattcctagntgatgnngacacactcaagcttgataagatcaaagaatgttcagaaaaggtagaactgatacatggtaagaaagctggactagctgctgataagaaggaattcaaacctctgcctggaaggactgctgcttcaggggctgcaggagataaggacacaaaggacatttctgcacccaaaccaggacctctaaaaaaggcacctgctgctaaggctggtgggccaccaaaaaaggggaaaccagctgcaccaggaggcgcagggaatactggaaccaagaacaagaaaggactggagactaaagaaatagtggagcctgagctctcgatagaagtatgtgaagaaaaagcttcagctgttcttccccctacctgtatacagcttcttgacagcagtaactggaaagaaaggctggcttgtatggaagagttccagaaggctgttgagctaatggaccgaactgaaatgccatgccaggcattagtgaggatgctagccaagaaacctggatggaaagaaactaattttcaggtgatgcaaatgaagcttcatatagttgctttgattgcccagaagggaaatttttccaaaacgtcagctcaggttgtattagatggccttgtggacaagattggagatgtgaaatgtgggaacaatgcaaaagaagctatgacagcaatagccgaagcctgtatgttaccatggactgctgaacaggttgtgtcaatggctttctcacaaaagaatcccaaaaatcagtcagaaactctgaattggctatcaaatgccataaaagaatttggtttttctgggttgaatgtcaaagctttcattagcaatgtgaagacagctcttgctgcaacaaacccagctgtgaggactgctgccataaccctgcttggcgtgatgtatctgtatgttggtccctctttgcgaatgttctttgaggatgagaagcctgccctcctatcccagatagatgcagaatttgagaagatgcagggacaaagtccacctgctccaaccagaggaatttccaagcatagcacaagtggtacagatgaaggagaagatggagatgaaccagatgacgggagcaatgatgtcgttgatcttttgccgaggacggagatcagtgataaaatcacttcagagttggtatctaagattggtgataagaattggaagattaggaaagaaggcctagatgaagtggcaggtattattaatgacgcaaaatttatccaaccgaatataggtgaacttccaactgccttgaagggtcgactcaatgattcaaataaaatcttggtacagcaaacgctgaatatcctgcaacaactggcagtagccatgggcccaaatattaagcaacatgtaaaaaatttaggcatccctatcatcacagtccttggagacagcaagaacaatgttcgagctgctgccctagcgactgtgaatgcttgggcagaacagactggcatgaaggaatggctggaaggagaagatctttctgaagagctcaaaaaggaaaatcctttcttgaggcaagagcttctgggctggctggctgagaaactacctactcttcgttccacccctacagaccttatcctttgtgttcctcatctctactcctgcctagaagatcgaaatggagatgtgcgaaagaaggcccaagatgccttgccattcttcatgatgcatttaggatatgaaaaaatggccaaggctactgggaaactaaagccaacttctaaagatcaggtattggccatgctagagaaagccaaagttaacatgccagccaagcctgctccacccactaaagcaacttctaaaccaatgggagggtccgctccagccaaattccagcctgcatcagcacctgctgaagattgtatttccagcagtacagaacccaaacctgatccaaaaaaggccaaagctccaggattatcctctaaagcaaagagtgcacaagggaagaagatgccaagcaaaaccagcttaaaggaggatgaagacaaatccgggcctatttttattgttgttccaaatggaaaagagcaaaggatgaaagatgaaaaaggattgaaggtgctaaagtggaattttactaccccacgggatgaatacattgagcaactaaagactcaaatgtctagctgtgtggctaaatggttacaagatgagatgtttcactcagactttcagcatcataacaaagcccttgctgttatggttgatcacttggagagtgaaaaagaaggagttattggttgcctggatcttatcttaaagtggcttaccctgaggttttttggacaccaatacaagcgtcctgatgaaagcactagaatatttaaaattgctcttcaccttgctaagtgaagaagaatatcatcttactgagaatgaagcatcttccttcatcccctatcttgtcgtcaaggttggagaaccaaaggatgtcattcgtaaagatgttcgtgccatcctgaaccggatgtgccttgtctacccagctagcaagatgtttccctttatcatggaaggaaccaaatccaaaaactctaagcagagagcagagtgcctggaagagctgggatgtctggttgagtcctatggcatgaatgtttgccaaccaaccccaggaaaagccttaaaggaaatagctgttcacataggagaccgtgacaatgctgtacgcaatgctgcactcaacaccattgtaacggtgtacaatgtacatggggatcaggtgttcaaactgattggaaatctttctgaaaaggatatgagcatgctcgaggagaggattaagcggtcagcaaagagaccctctgctgcaccaataaaacaggtggaagagaaacctcagcgtgcacagaacataagctccaatgccaacatgttacgcaagggaccagctgaggacatgtcttccaaactcaaccaagcccgaagcatgagtgggcatcctgaggcagcccagatggtccgccgagaattccagctggatctagatgagattgagaatgacaatggtacagtccgatgtgaaatgccagaacttgttcagcacaaactggatgacatttttgagccagtccttattcctgaacccaagatccgggctgtttctccacacttcgatgacatgcacagtaatacagcatccacaatcaatttcattatctcccaagtagccagtggtgacatcaacacaagtatccaagctctgacacagatcgatgaggtcctgagacaggaagacaaagctgaagccatgtccggccatattgatcagtttctgatagccacttttatgcagctaagactcatctacaacacacacatggcagatgagaaattggagaaggacgagatcatcaagttgtatagctgtatcattggcaacatgatttcgctgtttcagatagagagccttgcccgggaggcctccactggagtactaaaagacctaatgcatggcctcatcaccttaatgctggattctcggattgaagatcttgaggaaggacaacaggtcatccgctctgtgaacctcttggtggtgaaggttctggagaagtcagaccagaccaacatcctgagtgccctacttgttttgctccaagacagcctgctagcaacagccagttctcccaaattctcagagcttgttatgaagtgtctctggagaatggttcgactgttgcctgataccatcaatagcattaacctagacagaattcttctggatatccacattttcatgaaggtcttccccaaagagaaactgaagcaatgcaaaagtgaatttcccataaggaccctaaagaccctgctacacaccttatgcaaattaaaagggcccaagatcctggaccacctaacgatgatcgacaacaaaaacgagtctgagctggaggcccatctctgccggatgatgaagcacagtatggaccagactgggagcaagtctgataaggaaacagaaaagggagcatctcgaatagatgaaaaatcatcaaaggccaaagtgaatgatttcttagctgagatttttaagaagattggctctaaagaaaacactaaagagggactagcagagttatatgaatataagaagaaatactcagatgctgacattgaaccatttctgaaaaattcctcacagttcttccagagctatgtcgaaagaggccttcgggtgattgagatggagagggagggcaaaggtcgtatttccacttcaacaggcatctcccctcagatggaagtcacatgtgtgcccacgcccacaagcacagtgtcctccataggtaacacaaatggggaagaagtggggccatctgtctacttggaaaggctaaagatcctccgacagcgatgtggtctggacaacacaaagcaagatgaccgacctcctttgacctctttgctctccaaaccagcagttcctactgtcgcctcttccacagacatgctccacagcaaactctctcagctccgggagtcacgggagcagcaccagcattcagacctggattctaaccagactcactcttcaggaactgtgacctcctcctcctccacagctaacatagacgacttgaaaaaaagactggagagaataaagagcagtcgcaaatgaagctgccccactcccccggcaccctgcagctttagtttactaaactagaagtcctcatagtttaaaatggcctcagcaggcctagtgtatacaaactggttgtatgtatcatgccgtggagctagggggaggagtcattgtggcacaagtatttgtacatactctgcttctctctgtcagcgtcctgctgctctagaagactgtccgtggatgagtttagtgtacagacttgtaaacagctgccccctctctgctcagtctagttcccagatccttttctttttaattgctcatttgtaaaattgtcctaatctttcctagctttttaatagttaatattagaaactctttaatagttttcctttcagtttgtgagctcttctctgtcgccctgaagggtcactgtattctgtatgaatgcatggcatgatacaactaatttaagagtcttttataaataaagtttgcattaactatacctgactcccaagatgctccatatcatggagtgttgggcagcaattttttaacttttggtaccagctgggtattcagccagttagagaaaggttaattactgcttacagagcttccctttttcttggctcacagacttggagctgtcttttattcctttggaatggaaggaactctccttccctgctctccacaaacagctcctagggagcagaaaaatctcatccttccttgttttgagattttggtcatgatttccctccaattatcaccagtcgtttcaagaagctcttgagcatcctaccactntgctgaccaaaagcacacaagattgcgcccagagattggctgggcttcagaggntctcacactacaactaagattgtgttcatttgacctaaggnagttgggaaatctntaagggttgctgcttggnttgataaagccccttttgtccccagcttacaattgctttacattcaatccgagtaggg

SEQ ID NO: 494752 - DNA, 234 bp, Homo sapiens
  misc_feature (39)..(39): n is a, c, g, or t
  misc_feature (46)..(46): n is a, c, g, or t
  misc_feature (88)..(88): n is a, c, g, or t
  misc_feature (91)..(91): n is a, c, g, or t
  misc_feature (137)..(137): n is a, c, g, or t
agctcggcccgtagcgggtttgcttcaaacaattatcgnttattgntcacttctatggcgggcgcagtttgataactatgtgagcatnggnccggcgtgcttcaaccacgccccaggcggacgctcacccaagctgntcctacgttgctgccgttgtcttatagataccgggagggtcggttatgccatcattgtcccggcactggttgaatgggggcatgttgcaaccagtcg

SEQ ID NO: 494753 - DNA, 150 bp, Homo sapiens
ccgatagccgaagtggatagaatacttggtacaccctggtgaggtgcatgaggtcatgtcactcaatttctggcagcaaactccgcagaaagagtccaaatttagtatcaagtttctccggaagtcattcctatacagtggcaaacgcgg

SEQ ID NO: 494754 - DNA, 162 bp, Homo sapiens
tctagaggatccttgagatgacaggaggaagtacatgctcagtgcaccatgaatgttgagacagagatgtgagacacctcagccccacctctctgcaacaggaaagatgattggggagggagcacaggtcagctgtgggaagtcgggtcatgtgtggacatg

SEQ ID NO: 494755 - DNA, 416 bp, Homo sapiens
attcctgagtataacccccttatcgtgctgacagcgctccaaacacggcattctcaggtgccattttgaatacgccccagggcacagtagccaggattcacattgtccaacgttatcatgtccatctgcaccatgttgtagcaacaaggatgcatgttattcatgactctgctcagggctgtgtacacgtttcctggccgccagaagatccacatctcaaacacgtgtgccttctaccgagtccagtgctcactcatactatgaagacgttctggctgagtcgcgctgcatccctgatagctgtgggctcacctacatcccccgtcgtggctcctaggacaatcgtggcgccctgcactcatgagggcttccaatgtgctgcccccctcttaatactcaccaataaattctacttc

SEQ ID NO: 494756 - DNA, 309 bp, Homo sapiens
  misc_feature (4)..(4): n is a, c, g, or t
  misc_feature (6)..(6): n is a, c, g, or t
  misc_feature (110)..(114): n is a, c, g, or t
  misc_feature (150)..(150): n is a, c, g, or t
tttntncccccccccccccccccgttgggcgccccaaaattttatttttttccccgggcatggttccggggaacattttcccaggaacggcctcggtagtaaaccccccnnnnngccttggagccatcttccttgaatcgcattttttantggactttgcgccgcttggaaaggtggcaccaggcccctggtcttcaaaaattgtttcctgtgaattttgtgactccaaataggccagtttgtgataagcttactctatgagttttcatttttttaaaaaaaagggaaggtatttttatattttctgta

SEQ ID NO: 494757 - DNA, 168 bp, Homo sapiens
tccagagttcaggtaggctagtgtctgatctcctaaccaccgcaagcaagatatccttccacaggtctatccacacagttaggatcaggctcactgctattgttgggatttgtagttactcatgccaggcacaggcacgcaaacgcacatttgcctgcaagtgtacac

SEQ ID NO: 494758 - DNA, 800 bp, Homo sapiens
gtgacgcgtgggtcggactgcgtggtgtccggacgcgtgggtcgaccacgcgtccgtggagtacagtgcgagtttagttgaagttgcaaagtcctggagcctccagagggctgtcggacgcgaagtagcagcgagcagatagagtccgcacgctccggcgaggggcagaagagcgcgagggagcgcggggcagcagaagcgagagccgagcgcggaccagccaggacccacaggcctcaccaggctgcccaggaagagccccagacatggagacaccacgctcctgtgctgcgaagtggaaacccatccgccggcgtaacccgatgccaaacctcctcaccgacgggtgctgcgggccatgctgacaggccgcaggaacacctgcgcgccctcgagttgttcgtaccttcaaactgtgtgcccacacggaggtcctgccagaccatgcggacagcatcgtcgccctcctggcactgcttggagctctgcgacggacacacgaacgctgccaggcaggacgctctccaccgccgagccactgacactctagccctaaagaacccggcatccctgatccacgagcgacgcccgtgcaaaacaagcagcacgccttgccccaccgcctgcgagcagcccacacgtgcgattgcctaccgtggggcccctcctcacggaatcgacacggaacgactaacagcacgccgcctagaaacgggcaccgagctacctccgccgcgccccaccaccaccacgccagcgcatcaccaccgccggcagccccaaggcacacctagcctgcc

SEQ ID NO: 494759 - DNA, 146 bp, Homo sapiens
ccctagttacgctcctgtccgtggtctcatcctgaccgtattacaaagttactttaagacctttgaacagtttaaaatggtttcatctagctctgacttttcttgctagccagatacctcgtgcggaacctaccgacagaaaatta

SEQ ID NO: 494760 - DNA, 343 bp, Homo sapiens
  misc_feature (177)..(177): n is a, c, g, or t
gtgaggatctgaggtatgctgccagtttatgagctatgagtaaagatgtaacaggcagcgaaaagtttgtgaatatacagtgtgccactaaaaactctctcggagattaaaaaaaaaaacaaagtaaacaaattctgagagagaatgaagagacatatcttgagtcttccagaaagngcaaataaaaaacggcaaatgggttgggtcccaggcgttcaccatgcctagagtggtgctgctatcaccactgtctcccctccctgccagtggctaggtagaggtaggggagaagggtcatcttggacatgctgcaaatacagcatttgcgggtgcaggcatacct

SEQ ID NO: 494761 - DNA, 125 bp, Homo sapiens
gtgaatacattgacttactgtacataaaaacacatttgtacttagggaagggtacgataagcatagtgatgactggttccgataggcctctatcagtatctctctacttacaccattattatcca

SEQ ID NO: 494762 - DNA, 357 bp, Homo sapiens
gataccacagctgaactttcttctaagtgccacagtgaacgagcagatcgtaagacaatctacagaattagtctgcacagcctatggtgaagtgcatgcaatcgtgatgaatccaatcaatgaatacaaagatccagagaacattcttcaccgatcgccgcatcatgtgcagacgcttctttcctgactatcttatttcattgagttagctatgacctacctttacagttgagtttgtatcataagattgtaagtcccgataatgccatgctgcatttggtctcaatcacagggaactaagtcatgctgacctgagctagtattgctgtgtatctactcttgagatgatctattttc

SEQ ID NO: 494763 - DNA, 324 bp, Homo sapiens
ctcggccgtgttagcacaataaggaagggtcccaggtagtgagagccccaagtagagaacaataatgaacaattactgtatgaacaactgttagaaacagctaatcacaaacaacctgcgggcacaatgacctcattccacacgtagcacccttcagcaggaccctataaaactttcctccagcccttgcctctttgcaggtagccccttctctgctgagctgcccactgcaacatattttcacaatttctctaataaatctgcccttctttacctacaactatcttggtaaatggctttaccacctgcaaaactgaccctagg

SEQ ID NO: 494764 - DNA, 724 bp, Homo sapiens
ggaggcggcacgacggccagcgctgatccgctccggggctctttaccccggagtctgggccgggtgcgcgggaaacggtataccgagcggagctggtacgccctctgccttcgtcattatcctgccggccggtcggtttccggatgaaacgaggagccaggaggagatatcacagctttcccagatcgggaggaacaatatggaacatgtgttctataccgcgtgactgaagacaatcaaagtgagctgtcctgacagtagtttgcgaaccagcagctagcagtttgtccagcctctaacatgggtccagcactttccagagcaaactcacgtgtttacacagaactcttggccttacgaagttttataacctcaagcttgttgatttaaaatattacctgcaaaagaaaagtacccggcacccactttccacagaatggccatggatgagtattatgtggatggtcattctgggtaacatcatacgctttcatcttggcctttctgttggtgcacaacgatgtttgccaatcctttggtacagccgtgggctcatggtgttggtgacccttgaggacaggcatgcaatttttagctgcaatattttgaaaccaccgggtaccgcggtaaactaggcgccaaggtaggaggaaaacaattcgccaagggtatcctttgccgtgaaccctgtacgatcgagaccggtggagcactctcatggctg

SEQ ID NO: 494765 - DNA, 383 bp, Homo sapiens
gcacgagaaaaaattagctgggcatggtgatgtgagcttgtggtcccagctgctcgggaggctgaggcaggagaactgcttgagcctgggaggcagaggttgcagtgagcccagattgcaccacagcactccagcctgggcgacagagcaaaattccatccgaaaaaaaaaatttggtgagaggtgggagataagtgagtaaagaacttaaaaaagcccaaaaacaattatctgggcatggtggtgtgctgcctgtagtcccagctactgaggagacagaagtgagaggattgcttgagcccagaagttcaaggctgcagagagctatgattacaccactgcattccagcctaggtgacagagtaacaccacccgtcgtaaga

SEQ ID NO: 494766 - DNA, 310 bp, Homo sapiens
cacaatcaagggacatgcatacatagtgaggtcaaacacaagaagtcacccatactgaaaacaccgcgaaaaacagccggcaatttatcggtacgaaagcactgaagtacctcgccccggtgacaaatacagccaaattgcgccaggactctgcgccagcccctctctatatatagaagagacaaccattcatctccctgacggacccgccctgagaacaaggcgagcaagcaacgcgaaatcatcgagatacataaatacgacgacacgcccagacggggcagcccagcacctgcaaccacccaatctc

SEQ ID NO: 494767 - DNA, 439 bp, Homo sapiens
  misc_feature (171)..(171): n is a, c, g, or t
aaaaaaaaggggggggtggacaaagtattagtatccccagttccacacaggcccaaattaaaggggtgttaagtttaaggggggtctatttttgcttttcccctgggggtgaattcccattatttggggtaatcagtgggtagggaattgaaggccagtaataaaaccccnaaaaaaaaaaaaagcctgatcttcccacacccccccaaaatatagttaaaaacttgtcaaaaagaccttcatatttaccaaggattcagccaattaaaaattattactgtcctttagattcctactggtttctagctgaagtgtttgggtttttgttttgtttttttcacagctgttgttagtttcccccgttctttcttaccgcactgaaatccagtaaatcactcagctctttgtccgtccctaaggcagccattcgctgttggta

SEQ ID NO: 494768 - DNA, 316 bp, Homo sapiens
ggcccgctctcgtgagactcattgacccctaacctgggcaactgcataagccacaggtgtggctctaaagaagacaaaagataaataagaatggatgcaagcagaaaaatcccactttaaaggcaaaaaatggaagttcccattgtggctcagcaggttaagaacctagctcatatccaggaggctgcagggttaattcctcactggcttaaggatctggtataggggcaagctgcagcacaggtcacagatgtggctcagatctagcctttctgtgtctgtagtgtggtccagaagctgcagctgtgattccacc

SEQ ID NO: 494769 - DNA, 156 bp, Homo sapiens
ggtcgatgagcagattgcttaacggtcaggaccaggaccagcagctacttttgtggaatggactcccacacatgtctcaagacacccgtcttgtacactcccacctgggtcccctaaggagtgcagacaccttaattggcaattgcacaccctacc

SEQ ID NO: 494770 - DNA, 399 bp, Homo sapiens
tggtgcctagaggatctcccgtaatatgtaaccaaggccaggcacggtagctcacgcctgtaatcccagcactttgggaggcgagacaggcggatcacctgaggtcaggagttgggaccagcctgaccagcatggagaaacccctactactaaaaatgcaaagattagccgggcaaggtggctcatgcctgtagtcttggctactcgggagactgaggcaggagaattgattggaccggggaggcagaggtttgcagtgagcctagatggcaccgctgcactccagcctgggcagcagagtgagatgctatctcaaaaaattaaataaataatatataaaaagaacaaaaaagacttaaggaaataaaaacattatttttatttcagtgcttatctatc

SEQ ID NO: 494771 - DNA, 964 bp, Homo sapiens
ggaaaagactcatatcatgcatgtcgtcttcggaacacgtagattcgggcaagtccaccactacgggccagtctgatctataaatgcggtggatatcgacaaaagaaccatgtgaaaaattcgaggaaggaggctgctgagatgggaaagggctccttcaagtatgcctgggtctggataaactgaaagctgagcgtgaagcgtggtatcaccatggatatctccttgtgggaaattggagaccagcaagtactatgtgactatcgattgatgccccgaggacgacatgagactttatcaaaaactatgattacagggacgatctcaggctgtacgtgtgctgtccgtgatgtggctgctgggtgttggtgaatttgaagctggtatcatccaagaatgggcggacccgagagcatgcccttctgggttacggcactgggtgtgagacaactaatgtcaggtgttgaacaaaatggattccacgtgtaggcagcctacagacagaagagatatgaggaaattgttaagggaagtcagggacttatcattagtgaaaattggtaaaaccccggaacagtagtcattgtgtgccagtttgtggttggaagggtgatggacatgctggagcaagtgtgagcatgcttggttgcaaggatgggaagtcaccgtaaggatggtgatgcagtggaagcacgctgttgaggtctggatgttcctacacattcgtcaatgaaagcctgtggcgtgtctcaagtgctaaaatggtggatgtctgtctggtggcaggggaggggttcaaccggtggggggttgtagtaagtcagggataattgggaggccaggttgggaggcgggaagggctggaagtgagagggggagttggaaataaagaggggcgcgtttaaagaaagcttgttggaatgtataataggagaatttttggtttcatattggaggtatagcc

SEQ ID NO: 494772 - DNA, 370 bp, Homo sapiens
gaaaatttgagttttcttaaatgatagaaatagattgatataattcggtatctacattttatattcccataataaaaaagaacataccctgtaatgtgccttccataaatgcatccagtaaatggagaaacaaactgggacacaaagctgttttggagttttatgtggaggggaaaaaaaagtatctgttatttatttctgaatgtgtaaatttcaaaaaacaaccttcaggttatataaagctttactaaatttcagacacatttcataaaatataagaaaaaaatattgttatcctcctgttaccttttaaatattttctatccagtgtgtcaagtctatatataattaaacagcagattaatcagca

SEQ ID NO: 494773 - DNA, 220 bp, Homo sapiens
atctacagcagccaaaggcttgtccctgactttatatggctgcgctggcgagcgactgagtcgtccgtgagaaaaagaggcgaggcttttccgagatcgtctcaaccatggcgccttcggtcgcagtttttggggttctcggtttgcaagaacccttggtacagagttcgcaaagcctttctaaccagctccgagcccggcagcgaaacccttaagttga

SEQ ID NO: 494774 - DNA, 144 bp, Homo sapiens
atgatgctcagctggagtgcagtggtgcaatgtgggcccactgcagccgggacctcctgggcgcaagtgatcttagtgggtaacacaccaagactccatctgtaaaaagttaagataaaggattactgaaagatgtcgtttcta

SEQ ID NO: 494775 - DNA, 1059 bp, Homo sapiens
cgaaagccaccttcccaacaaggtgggcccctttctctataaaatccgtgcctcttctcttggtctctccagggtactcagtgacatcggcacttggtccgctaccacaccgtaggcggcatctcggcgccagagtctgatcccctgaccgcgattgatgtatctgcttccttccgaagcttctagccaccatctgcagaggctggaatgtggggtctgcccagatcttggcgctgaattgccaagacaccctgggaccagagactggacgtgtacccaggcccgccttcacaggacacacggggcctgttgggtacgtgctgaagccagccttcatgcgagaccccaacggcacgctttaaccgccgcgtcctggctcaggggtcctggctgggcacggaagcggctcaacatcaggcgtcattttcggggcagcagctgcctaaagtcaacaagaataagaattcaatttgtggaccccaaagtgatcagtggagatccatggcgtgagacctggacgttggccagccgccagactgctgtcatcaccgaacaatggtttcaacctcatggtgggacacaggagtttgcgtttgaggctagtatgtgccatgacctctgccctcatccgcttcttggtggaagattactgatgcgcatcctccaagatatgacttgcattggccagagtaccatcgcaccttgaacagcctcaagcaaggataccgccaatgtccacctcatgtctaagaacggggaccagctatccatcagccaccctctttgtgaagatctccctcccaggagcttaggatggaggatagccagtaggggtctcccccatgagtggtctgggctcactatgtcaagcatgtggggatcagggtctaggatgctggctgctcccagcctacattgctcagaggataggccaccctaaattgcacttcagcctctaacatagtgtctgctgctgcctcctaggggaccaggagctagcgcagtcaacgtggagctgtccttctattccgttaggaataacactgcagcgctctccac

SEQ ID NO: 494776 - DNA, 919 bp, Homo sapiens
atctctgtctccgcggggtggagtcctttctcccgcgtaggggtgttgtcaagagagttcgttcccgcccccaccttttttcttcgttgtggcagcccctcgtttgggggggtgtagacggctactctgctcctatggtgcggcagcagccccgccctgctttgtgtggtgcgctccccgcccccgagggagttttttttttctcctctgtcctcccctccggaggtaggagcactgtctgttggggggtgtgcccacccagcaggcagcctctctcttctctctccatgatcactctggtgtgggtccgtctctctcctacgagagaatccactgggggcttggttctctcgccccgctctcaccgtggggttttttttttatgacacccaattctgtttttgtttttgttatgcacaccggtcggcccttgctctttgtctttctgactgaggttgcccacctggtttgttcctgcgctccccctctgtctttgtgggcgcccccccctcccggtggttgtttcgtcgggacgcacccctcggtgttgttgctctctctctggtgaccgtactttcactacaggggacgctgttcttcgttcgcatatctcctctcgctctcgtgagggagcctctctctcgtgacccacccccaccgagcggggctgctaggttgtttttcttgtgccgaccgacgatatttttctttcgtgcggtggtttgtggggagcgacatctttgtctgggtctccttcgctccccccccctcctctcctgtcccctcgcccctctctcctccgcgagcggggggggcgaggaagaaataaatagatgttcggtgtttttgggggaacccccctttttttttggggtgaaaacttttaaggggtttttttttaaaaccaccccccccccca

SEQ ID NO: 494777 - DNA, 214 bp, Homo sapiens
attaccttgcctatatactttacgacacgacacatgccttaccttgctgacaactgctgagaaatcctagaccacgttttcaaggctgggctcaacactgtcacctctacctacccctttgctgatgccttcctggcacctggtgcattctgaccaccttggtaccgtgtccttccacttgaccacgcgtgacggcacaactatacacacttta

SEQ ID NO: 494778 - DNA, 201 bp, Homo sapiens
gtccgcatgcagtgggcacagaaagacaaacttcacatgctctcatctatgtgggggagctaaaaattaaaatgactgaactgatggagatggtagagtagaaggacgtctaggggctatcacttgtagaagcagtattaaaaaaaaaaagtagaaggatggtttgcagaggctgggaagggcagtggagtggaggtgggg

SEQ ID NO: 494779 - DNA, 752 bp, Homo sapiens
  misc_feature (1)..(1): n is a, c, g, or t
  misc_feature (119)..(119): n is a, c, g, or t
  misc_feature (673)..(673): n is a, c, g, or t
  misc_feature (726)..(726): n is a, c, g, or t
  misc_feature (742)..(743): n is a, c, g, or t
ngctgcgcgggtgagcttcagggggttggatgagaataggtctgtatgtcgtaggcagatggagcttgttataattatgcctcatagggatagtacaggaaggggtagactatgtgttntgtcagggggttgagaatgagtgttaggcgtattataccatagccgcctagttttaagagtgctcggctaagtactattgacacagcgctgggcgcttcgacatgggctgtactgagtcataagtgaagtccgtatagaggcatctttactataagactagtcgtgtaagctagtcataatgagatgctggctcaggagtttgatagttcttggccagtgagagtcagtagtagaatgtttagtgagcctaggcgtgctgtaagtgtactgtagtgctatgagtagggcgagagagctgcttaaggtgtatcatagggcgtctggtcctgcgatcaagcgctctgcatggttgcctcagcgggtgctcatagccacggtgcggcttactgtagattgggtttggctatcgtcttattcgtagttggtctgctcatgctgtgggcatgcttagtagcatggtgatgtagcgagactctataaggagtacgataatgggtaagatgctttgatggtgccgtcgtatagttgatgtcacgtcgtggaataaatgtgngcagaatgggcgttaagctctagagagtatgtcagtgtctggaagttcagtgntatgttcagtcaattnncctgccaag

SEQ ID NO: 494780 - DNA, 206 bp, Homo sapiens
gaggagaaaaccgaaaaggttattgtagaattgattataatgcatggtagaagcctattctcagacctttagatgcctattaacctgatgcactggtaccaatgcccccattcgggtgtgacatcttcccttcaccacttggcacaacacagatattagagtcagctccaaaagctaacccatggtggttccggagagattcccaa

SEQ ID NO: 494781 - DNA, 142 bp, Homo sapiens
agttactgctaacttcagcagttatgtatatgtaaaaaatatcaaattggaaataaaatgctaatggtaagggtaagttaagacttaatatttgcaggattacatattttataaagtcggaataaaacaaaattataaaggg

SEQ ID NO: 494782 - DNA, 156 bp, Homo sapiens
catcagtctatcccggtcaagccgaagcccttcagctcgcggcaaccagcctgatcggaggtggtcgtaacgagaacaactcatcgggtgaagctaaagcggcccgatccaccaccaccggatcgaccgtgcctaagctagaaaccttcacgaccc

SEQ ID NO: 494783 - DNA, 822 bp, Homo sapiens
  misc_feature (232)..(232): n is a, c, g, or t
  misc_feature (386)..(386): n is a, c, g, or t
  misc_feature (401)..(401): n is a, c, g, or t
  misc_feature (424)..(424): n is a, c, g, or t
cgtccgttgctggccctggccggcggcctactgcgctgcttgctgctgctgctgggccaatggcggcggcgtgcgctggggctcccgggcccaggatgcggcggcggcgtcggcggacgggccccccgcggcagacggcgaggacggacttaggacccgcacagcaagcacctgtagcactggcctgacatgtttcacgcatcgggatccattagcgccgcgacactttcgntacatgttcttcgcgcccatggttgttgtgacatctgtccagtcggctgtctagccgaactttggaaatgacctgaggagaacaaagtacaacagtcattgtgcaagatgtccaagagtctatggtggcataaaacgatggacatgacagcggnaccacgtccgagcgntgtgcgtccgcaccgaggcgggntgcagtaggatagcccctaccttaaagtcttttgccagagccagtggccaagtagagctgttgaagttaccaggggtcctctgggacttccagaacacgtggaaacactggattgctgcagaacactgtaacgtaggagcccagtgacaccagagtccggaaggtggaaccgatccagtgcccccgagactcaagcaatgggcatgtatgagctctcaggcaagcaactttgagctgcacgttgtacaaggcgaccacgtttatcaagttcttcgctccgtgcttgtggtcactagcaaaagctcctggttccaagctgtggagcagctggatctggtgccttgaacattccgaaagctgtcaatgattgggcatcggtcgattgtacccagcactat

SEQ ID NO: 494784 - DNA, 195 bp, Homo sapiens
cagtctgtcatgtttgcatcttgcatcatcatgattcatacttcaaaacttctcggcatgaaaagaattgcccttcgcatacaaagaaatgttcatacctcaagtaggcaatacatgagctcaaaactgcccatctcacacatctgcaagaaccccaccacagccaaagcaccaggtgacataaactctaaaacc

SEQ ID NO: 494785 - DNA, 228 bp, Homo sapiens
  misc_feature (212)..(212): n is a, c, g, or t
gtcatgtggaccgaggcccactccaccctccatgccccagtgagggccaagaaagccgtctctacccattggcgaccccatgtgggcgctgggagtggctgccctaggagtgttgggcaatccctggcctggaagccttgtgttagtgtcttggaaagcagtggacgagggcctggaggggacggggcagccagtgccggggctcagctctngaggctccctggctgt

SEQ ID NO: 494786 - DNA, 751 bp, Homo sapiens
cgagcgagcgcccttattattttatttattatccgtatattaaagtttgtatcccttagtaagaattttctaaatcacaaaatagggtggcaatattgaggtaatagaatttatggcgtgctgaacatactagaatataaaggtaacttactagtggtatcgtcacatactaaagctttctaaaccagcgggtttctcacagacgagtatttacttttctttgaaagattaaattttagagacagcatagcgctgtgtaccaagcatacgcatggtaaccacaagtgcaacttttcgggaaatcctccccaaaagatattttacctcaaaatatcatatagcacatattttctccctacaaaaatagcttgtcagacatcattaatgggatgtatataccaactatgtacataagagccaccttgtaggctacgagtttaacgtggtttaaaacacagcgttggaggcaaacagtagcaacagcagcagcaaaggcaccaaacggacgaaaagacccagatattttcctcacgtcatagtcagacggtggttgtctcaccccttacataaacatccaagtgagatttctcacagtcgctaccctgtggcaacaacttaaagattctctagacaaggtctgggttaaagcctttagttacaaacagcttccttggggcatcaccggtatctggtagggctccagaaatactagattggagataggagggctcacaggatgagtctatatgtg

SEQ ID NO: 494787 - DNA, 158 bp, Homo sapiens
acctgtggggggggaatgcggaggtttgtgaagttgaacagtccatccatctgcactgagaggctggatcctgagtcccggggcagcatggatcccaggaaccttcctcctccagtggcagcacagtgactctacgcctgtgtctggacctgtgccct

SEQ ID NO: 494788 - DNA, 313 bp, Homo sapiens
ttatttaagacttcccccttaatttatttgcccccaggatgggtcagtttgttcagtggtcagcaggcccccccccccccgccgaatgcccttgccattgtggtcagacccccctcccaacacaacacgctggtggtttgtgtcagcctttgtaacgtgggaggctctcccgtgtcttccgggtgaactgtatttggattgggcgcattgtcacggtccgcccctggggtgcaggggccccttcctttgggcacccctgcattttgcatccccccctttaaacgctgtaataaacagactgttttccctcgga

SEQ ID NO: 494789 - DNA, 625 bp, Homo sapiens
ctgccgccggtgagcccagcactgcctgggagggccccgacctctcctgactggtggccctgggggctcatctgggctggctgtgccggtgcctcccctcacccccgtgcgccttccctccatcctgttccatgggacctcaccctcgggggagtcaagaagaaaaccttcaccccaaatatcatcatgtctggaagatcaatggaagatgcccaatggaagcaatgtaacttgtcaaggaaggatgaagctgtgaaagtggacagagacctgacaactgagaggggcatggacggattggcgaggccgtccatgaatgtgatccagtctcactccatctttgagcatgggcccatgccgaaaatgattgaagaaaaaatgggaactgggataagaccagttggatgtgtcagacttgggaccttctcatatcatcaagcattcaaagagagagaagagagagaccagacgaagaaactaaaccagatcttgcgatatgctgggagaagtgacgatttcctcgatgaccccgggccttgaggaacggacactcgaaaatattgcctgttgcagcttgccggctgggatcactcaaggatggcgttttaagggcaagaacaatgac

SEQ ID NO: 494790 - DNA, 213 bp, Homo sapiens
tgggccacacgactagaaatagagctactccagcctgggcataagagctacgccagcctgggcaataagagctactccagcctggcctggatattatacaacagatgcctaaatttatcaatgggtctaagacgagaatcacaagggaaatttaaaaatatcttagatgagtgaaattttttgtttttttttggtggagtctagctcttattg

SEQ ID NO: 494791 - DNA, 384 bp, Homo sapiens
gtctgtcgtcatctggtggtggaaaccacttctaggtttgaagagtcgcagtgcacgctctgcggggagccggaagggagagatggggagagatgatcccaacgcgtgactctaaaggccgaatactaaaggcttctgtatactcagggccacagaagctcaaccatgtccactggaaaggctcttactcgcaatttaaaacacaaaaatgaaaaaaagatacagacagcccaactaaatccttgaaatgcagcgtggcgtgaaaatggagcggcattttagttaacgagggtctggatgccattcacaggaatgcagtttctacagggttctgctttgcagagacctctcctgataataataataaatttactcagaacaaaa

SEQ ID NO: 494792 - DNA, 1042 bp, Homo sapiens
  misc_feature (1042)..(1042): n is a, c, g, or t
ggcagtgcgtcggtcccgccgaggtctgtctcttgcttcaacagtgtttggactgcgcaacagatccgtgcggtactctcttcctagcctccgacctgctcctccgtattatcctctccgcttgtcaatgctccgtggtaccatcttctcgtgctcgatctcctgtcttctttggaccatgtccacgcaccgttttggtggttagctcgctttcttgcgaaaccaaactcatcgagcttccgcgaggattcagtccaggagtttcattcgcgacctgtagcgtggtagcgcagcgcggtgcgaagcaacgcacttggtacaagttatgtacggcgtgcaagtgccctccgtcactatctcacagtcgtctgcttgggcctgcctaatgtgtcgaccccgctcgactgacctgtgagcatcctgtgagcaggctgattgaacggccaagatatacttctcggacgaaagtttagggtgcgagcggatgacacgaccgccaacggtgcgtagacgaagactcgttcttgcactgaaatgactgtcgacaaaacacacagcggatggtcaggtggctcaggcgagactctctgcccttttcgccacggcgtaccaatttcaaaagaaaaaagtgcctaagagtgtgcaataaggaatgcaatggttgtgagagcgtttggataagacaccccactatggaaatgagagcccaacttgggattaatgcctttggccttgaatttagggcccccctggggtcaggtaacaaacacaacgctttttgacaaatcttctatggggacccctgcttatttatgtgaaacatccatttcaaaatgtcctcccttaggtggaataacttattgacgccaggcttaaccacgtagaaggcaaccttccgagagctcacgtcctttgatttgtaggctttatccccctttgggggaaaagaaccttgcctatacgttttttccgcctatatgcaaggttggaacgcggtacaatgttggtacacagcatatcacttcggaacgagaaaatgtcn

SEQ ID NO: 494793 - DNA, 633 bp, Homo sapiens
  misc_feature (252)..(252): n is a, c, g, or t
tttctacgcaagtctcctgtgtttaaaacacgcggcaaagtagggcccctgagtctgtcatttgttgactgtttggaactagtgaaagccagcattggtgtaatatttttcaatggtctaattagaaagaataaggacaatgtgataaacacctgacccctattagcggggactctgaattaactggagctttgatttcgaggtctgctttcagcagcaagaggcaaattggctagaaaaagagtcagcctnggggaactcgggacacagccaaccccaggaatgtgcctttgggtcagagcccagcccagctctgcttccacagggagagatggggagagatgatcccaacgcgtgactctaaaggccgaatactaaaggcttctgtatactcagggccacagaagctcaaccatgtccactggaaaggctcttactcgcaatttaaaacacaaaaatgaaaaaaagatacagacagcccaactaaatccttgaaatgcagcgtggcgtgaaaatggagcggcattttagttaacgagggtctggatgccattcacaggaatgcagtttctacagggttctgctttgcagagacctctcctgataataataataaatttactcagaacaaaa

SEQ ID NO: 494794 - DNA, 129 bp, Homo sapiens
tctagaggatcccgtaaagtcataaaagcagaagtttcttcagtgatcttctctctaagaaacatcatcacctccatgtgccttacagaggccccgtgcgttctagtgcattgcaacacggtctctaca

SEQ ID NO: 494795 - DNA, 139 bp, Homo sapiens
gcccattttacttttgaatttaggttttactaattggcatttggaaggtcagcaagggcacaagccttactttggttaccgtggaaaccactgccgcccctccccgatgtgggggggtcaataaaaatggtggaattca

SEQ ID NO: 494796 - DNA, 565 bp, Homo sapiens
  misc_feature (252)..(252): n is a, c, g, or t
tttctacgcaagtctcctgtgtttaaaacacgcggcaaagtagggcccctgagtctgtcatttgttgactgtttggaactagtgaaagccagcattggtgtaatatttttcaatggtctaattagaaagaataaggacaatgtgataaacacctgacccctattagcggggactctgaattaactggagctttgatttcgaggtctgctttcagcagcaagaggcaaattggctagaaaaagagtcagcctnggggaactcgggacacagccaaccccaggaatgtgcctttgggtcagagcccagcccagctctgcttccacagggagagatggggagagatgatcccaacgcgtgactctaaaggccgaatactaaaggcttctgtatactcagggccacagaagctcaaccatgtccactggaaaggctcttactcgcaatttaaaacacaaaaatgaaaaagtgagtatagggttaacttggaacttttatgaaacacttaattcccttatttggtggttaagggaagtatgacaaggttttaaaaaatttcctgtgtcat

SEQ ID NO: 494797 - DNA, 172 bp, Homo sapiens
  misc_feature (26)..(26): n is a, c, g, or t
  misc_feature (83)..(83): n is a, c, g, or t
gctcgatttgccagccagccctctgnagtctggatcaaaggttctcaacatgaggtccctgaaccagcggctgcttttgctangaactgggaacttgtgggaaaggcagcgtctcagaccccaccccagatctactgaatcagaaactctgggggtggggccagcactttgt

SEQ ID NO: 494798 - DNA, 278 bp, Homo sapiens
ttttttttaaaaaaacattatttcaaagagggctgtagagtttccacatattattcccatatttgcagtttctggagaaggaattgaaaaatttaaaaattgttttaaaaagttcctggattgacagggcaaccaggaaaattatggccttttttaaaaacagttggtttatttttgggttttttatacaatgttttttttttagcccccattaaaggattgtgttttttctttcaaaatggatattattttaatttttttaaaatggtttttatgga

SEQ ID NO: 494799 - DNA, 422 bp, Homo sapiens
  misc_feature (63)..(64): n is a, c, g, or t
  misc_feature (74)..(74): n is a, c, g, or t
  misc_feature (97)..(97): n is a, c, g, or t
  misc_feature (136)..(136): n is a, c, g, or t
  misc_feature (179)..(179): n is a, c, g, or t
  misc_feature (183)..(183): n is a, c, g, or t
  misc_feature (364)..(364): n is a, c, g, or t
  misc_feature (376)..(376): n is a, c, g, or t
  misc_feature (378)..(378): n is a, c, g, or t
  misc_feature (389)..(389): n is a, c, g, or t
  misc_feature (400)..(400): n is a, c, g, or t
ccgaggtcgggtatataagcttgatccgaattcgtcgacaacctggttgatcctgccagtagnntatgcttgtncaaggacttagccatgcatgccncagaatcactgcattgcaggaatctgcgcatggctcatnacatcagacgtaatctgccgcaaaaatcttgcggtctccgcanaatnggataacttggcgaaacgccaagctaatacatgaaccaaccggatgttctctgttccggcggcagggcaacctgctgccatgggacgtccagcgaatgaatgaaagtaaaaccaatgccttcaccggcagtaacactcagaagtgttgattcaattcattccgtgcgaaagccgggttaanacccggcgtctntngacgaacaacngccctatcagncagcgatggccgtgtagtggac

SEQ ID NO: 494800 - DNA, 902 bp, Homo sapiens
ggagagaactagtctcgagtttccgatttctattttcccaaaaaaggatattttttttatccacaagtacctcgcaaataggaaaccaaagagggagccccaggcttgggacaaatctcagtggtataccccttccccaaacaaaacagggtggagagaggtggcccctatacaccctttatagtggctcgatctcgggccccctttgcatcacctcttgctgcagacatccatagggagcagggcccccacacatctccgcgtgggacacgtggcggatcaaatccgagctccaccacagcacgtgccctagtgcccaacagcccactttctttcccccaacaagagaagatactctgtgacggcgaaacgcggcagcactccgcgtgcgcgccgaagaaaacaagcggacgcgccaacgcgagaacgagaactagaaacccaactctgagcgcccaccctgacgccagacaccaagacaaccacaaaacctgcacacgcgagagtctcctcaaaaacacaaatgtggccacacacatacttgggcaacaaccccaaaacatacccacccaacacccacccaaaaggtgtggcgtcccccccagcagcagagccgttgacgctatgtcggcctcgacaacaccccaagcaacggcgccaaacacaccacaggtggcacaaaaaccccccaagaaaaacccccctattctgggggagaagcaaacgtcacataggacacgagtcacacgccgcgaccccccaacgcagcaacccggccaagaagaagacatcaggcagacagaaaacccaggccgagacccagaaccggacaagcagacccaccacccccagagtagccgaaatcaactgtgcgcaccacatacaccaccacccgcaaccca

SEQ ID NO: 494801 - DNA, 174 bp, Homo sapiens
agccggcaccgtctattactttctcggtggtctcatatcccatgtcggccattatgaaggtctcctcaaggttctcatagaaatcatcatctatgtgggaagcaccaaatacatcagcaaagctctccacgatattgtttctagtctttgcaagtccttccttgagtcttgcaa

SEQ ID NO: 494802 - DNA, 217 bp, Homo sapiens
  misc_feature (85)..(85): n is a, c, g, or t
  misc_feature (94)..(94): n is a, c, g, or t
  misc_feature (105)..(105): n is a, c, g, or t
  misc_feature (118)..(118): n is a, c, g, or t
  misc_feature (147)..(147): n is a, c, g, or t
  misc_feature (160)..(160): n is a, c, g, or t
  misc_feature (174)..(174): n is a, c, g, or t
gctgaggaccctataaatgtggcattgatccactacaactccggccaagagtaaaaacgccgaggagactattcaagacgccttnagtcgccgnctctttgcatnatgagctgcattntatttctcaattggtaattctcgtaattnagaatttcgtacngtgatactactatnatagacaatcatattctctatatcaatgaccaacaatttattg

SEQ ID NO: 494803 - DNA, 561 bp, Homo sapiens
ccgctctagaggatccgaagctgctaacaggatacttgacttcttcctttcaattggatacctttatttctttctcttctctgatagtctagctaaaacttcctagctatgttgcataatgatggtgaaagtgggcatccttgtcatgtttcatatcttacaggaaagactttcagtttttccccattcagtatgatactagttgtgggtctattatatatatgtagaggtatgttccttctatccctgctttttcagaggtcttttattgtgaagagatgttgaattctatcaaatgctttttcatccatcagttgagcatgataataaggtatttgtccttcattctgttgatatgatgtgtcacattgattgatttatgtatgttcaaccatccttgcatcccgggcaataaatcccacctggtcatgatgactgatctttttaatgtattatcgacttgggctcgctaaatatcttgtcgaggatttttgcatccatattcatcagagatgctggcctctggtttactttctcgatgtgtctttatctggttagggc

SEQ ID NO: 494804 - DNA, 814 bp, Homo sapiens
atacaaaagaaagatgcctgctgtcaccattttatataacatactggatgccttagctaatgcaagaatgccaaaaaatcgggggaaaaggaaaaatacaaagtatagtaaagaaggaacaatattattactattttggggtgattggggggtgtgtgtatgaaatctagtgaaacctagagattaattattaaaattaataagagtaaaacaagattgctgaattcaaatatctaagaaatctttcgtattcctgtttagaatacaagatagaaacaatcaggaaataaaattttggaaaagctgtaacaccattatagaagccccaaaacatatcaagtacctaggaatacatttaataagagaaacaatagctgaagaaaatgtaaaacgttagatattaaagaaaaatcaattaaaaagatatatggtgtggacaaaggagtattatatttatagagtacaacttcagtcagtatctcagtatgtaacttcttatagaactttatgacgtgattctaaaatgcaatgggttcagaggtcaagatactctttaatctcagtgaaacaaaatggaaggaatctgccatcagacgttaggatattacaaacgctacagtcatagcatagcatgagattcggcattgcgctggacaaaatagaccagtgtaacagctaaaagagtccggaacaccatgtaatgtactgtctatgtgatatgtgatcggagaatctgcgtggccagcacgccaatttgggaaatgacttgactttataaatggaaccatcttgtccgccggcacgcccgcgcgca

SEQ ID NO: 494805 - DNA, 152 bp, Homo sapiens
gtgctgcgtcgttctagaggatcccgggcagtacggatgtgccaggttggactgtggctggccagtgactgtatatgaaactgggacaaagcccatcttgggcacgtagcctgtggggtggcaggtgctcaggcttgggtgacagggtggat

SEQ ID NO: 494806 - DNA, 112 bp, Homo sapiens
tataacctctttaatgcgtgaaatcataagaataatcatcaaaggcaagagggttgggtattttcccgttggagacacatctggaatttgctgcaataaaataataataaga

SEQ ID NO: 494807 - DNA, 979 bp, Homo sapiens
gccggggcggggatcgggcggcgaccttgcggcgtgcggcaagcgcccctgggcccgccgccccctcccctcctgcgaggggagccgctgcatgtgggccgggggggcggcctctgcggtcgcggagtcggcgtgcgatcggcgtgcgggacctccctccagtggcgggcatggagtgctgatgcccgggttgcgcctggggcgtggggctccgtggtggcgtacctatgcccggaggcgccggtccggtgatcgaggcactggctcgacgggcccgggctgcgctgatgctccaagttgcgtggtggtcggcgacgagggcgcggtgggcaagacttgtgccgtacgtcagttgagcttatgcccaacagactgcctttctccggagggagtagcagtgccctagccggtcttaccgaatcgacttactggcatgctccaaggcgggtcacccgatggagggggcaaaagcgagtaacgcatccgtaaggggaaaacttcatattgagcatccggggacctgagatcgagagatagagaggcttatttgagcccgttcttgagagggccccatattacatcttaatcccgcaaaatgatcgctgacatagttactttccacttaattatttgccttatcatcacgggagtgggtaaaaagtcccaaggcccatacaggttattccagacgacaattggttaggacaaacgaagggagggcttgggggggtaaccccggggaaaaaccctattaaacggcggacacttacggggcagaggcccaagacaattggtttaaccccccgtagtctatcaactatcaagagttaggggaaaacgatccgagggaattattgaagtcgttcccggaagaaattggaccccccgaaaaaaaacgtatattagggcaaaggaacccttgacagctggactagttgaaaacaggaacaaaaacccctaaaattggtggtaggaacac

SEQ ID NO: 494808 - DNA, 164 bp, Homo sapiens
tctaaagaaacacacacacatttattttaaaatttgacataatccttgggcaattattagcatttttcagaagtttccgacactgatatctcaactccaaaccaataacaatagcttatttgattggtggaaggattatagaggggcccatgatccagatgaat

SEQ ID NO: 494809 - DNA, 148 bp, Homo sapiens
tatcctgggcagcttctagccttctggaataggatcatggtgggacctggaatctgtattttaatggaccctaatgagattctagatgtagaaacatgtttgagaggcaatggacctcatggacttcttccaaacttatggagccatt

SEQ ID NO: 494810 - DNA, 275 bp, Homo sapiens
cggggggaaaaaaccccggaaaaaaggggttttttttttacccccaccaagggggccccgtgaggggacaattttttcccctttttttgccgggaaaaaaccgtttaattttggccccataaaaaaaacccgggggggtttaggggtttttaattggtttttttcccagggggttttttttttaaagttttcccccccatttttttttttgggttcccaaaaaattttgaaaaaaaaaccttttttttttggggcctttttaaaaaatttggggg

SEQ ID NO: 494811 - DNA, 517 bp, Homo sapiens
  misc_feature (19)..(19): n is a, c, g, or t
  misc_feature (47)..(47): n is a, c, g, or t
  misc_feature (405)..(405): n is a, c, g, or t
  misc_feature (488)..(488): n is a, c, g, or t
  misc_feature (510)..(510): n is a, c, g, or t
atttcggcacaggggcagnatacgcgccattgcacaccaacctgggngacagagcaagattgcatctcaaaacaaacaataataataaataataaaaacctgatatttggctgggcgccgtggctcatgcctgtaatcctaacactttggaggattgctggagacaggggtttaagaccagtctgggcaacatagcaagaccctgtctctacaaaaaaggcaaaaattagctgggcgtggtggcttgtgcctgtagtgccagctatctgggaggctgaggcgggaggatcactagttcaagctgacagtaagctatgattgcaccgctgcactccagcctggggtaacaaacttaagaccccatctctctgttcttcaaaaaaagtgattacttcgcaaagatgntttagactccaagaagctttttgcatctcttttccaacccaaccattgaggtactgtgtaggctcctccttgaataattaacngggtgagctgaggttgcggccnttgcatt

SEQ ID NO: 494812 - DNA, 808 bp, Homo sapiens
tagtattctggctcacgaagagacccaggagttgtctaacatcttcagcatgtccgtgtgtcagcgttcacctgtgctgagtagctcgtatgggactgggtgtcgcgagaggcacaagtgactgatttcccgtggtatttgatcgagctcgactgcaccttggggtaagactctaccgggagaggttatgaatcggctttggggctccagcatggagggacgtagccatcctgtagtcctcgctagagatccccgtaagcttacatgtcgaatcgcgcgggggacatgtctgctggcttttccacgactcatgtgctgccgcgggatcgtatcttggcaatagagtcgtagataatctctagtaacatagatcgtgggacaaaaggtttggaagatcattaatctctgtggcttgctgagtgagagagaacactcgtcggtggtcttatttgaatgctttttattgtaaacctgaaagcaattggctcattgaataggggggagctggggtaacgaaacacatgaggagataagggtaggctttgaacaggaaaaaactttatttaggcattgatatggtaccaacgctttgaaaaagataagctagccgtaaggcccaatccaaaaagttaactgttttgaattgcacaaggtagatgaaagttagtgaggcgcttcgaaaagtggggccctcgggcatagggaagttgtacccggtttgggggtatggggtggggggagccacaccatttttcgaaggcggggttaaacttaagggcaaaagggttgggaaaatgggtaaggcgga

SEQ ID NO: 494813 - DNA, 321 bp, Homo sapiens
agacagtcttgctttgtcactggagtgtaggggtgcgatcatagctcactgcagcctcgaatccttggactcatgtgaccctcccacctcaggctcccgagtggctcagaattcaagtgggtgccatcattcccagctattttttttattttttgtagagatggggtctccctatttcacccaggctgctctcaaactcctggccacaagcagtccttctgcctcagcttacgaaagcactgggattacaggcttgagccactgtacccaactgctcacagtaccattctaaggataaaatgaattaagaacagtacaagt

SEQ ID NO: 494814 - DNA, 1232 bp, Homo sapiens
gataaacctacgcccaaaccactccaccttactaccagacaaccttagccaaaccatttacccaaataacgtataggcgatagaacttgcaccctggcgcaatcgcatctagataccgcaagggacagatgaaaaattataaccaagcataatatagcaaggacttaaccccatatcacttctgacataaatgaattaactagacatacacctttgacaaggagagaccccgctaagaaaccccgaaacccagcacgagctacctacgaacagctacacacgagcacacccgtatattgtacgcaaaccctagtcgggaacgactcactacggtagcgagccgaacagctaccggagcctggcagactagcctggcaagcaccacacactagcaatcaacgagcaccctcacacccatgaggccaaacagaaaacccatcgaaacatgcccctcggcgacaacgtaacatgacacgcaccacaaagaaggacacacggaatcacaagagcacacacagggacgcacaaaccacgggatagccagcacgccggctccacacaacaatacagaaagccccacccaatacggctagcggcccctcaaagaaggacaagacccaacccaaagaggaacggaacacaggaggatcgccacgaccgtccagacacacccaacaaagttaaccgttagagaaaatcgccccacacagccaattcttaacatgggcaaactacccgtcgacacaacccgccaaaattgtgcggaagcacacgaagtcgtaactcaaacacacgctaatatacgagacagagcaacactcaacacctgctaccagagcacgtacacaataaacacttgacaaacaaaagatcacgtcgccaatacccgaccaaataacggcagccatgagcagtccaaaaaaataaaacacagacaacacatcgacaaccagcaacaaccagacaaacagcgaccaacaagtaagacgagccgaagaacgaaggcacaaacaaacgcaacaagcagaagaaacaacgacacaaaagggatacacacacgcaaagacacaaaggggacagagcaccaagaagaacgcgacaaagggcatacgaacaccagaacacaacgagaccaagcacggcaccagacaccaacaaccacagcaacagagaagaacacgaagaagaagacggacacatacgaagcaacgcaacgagagaacaacaacagc

SEQ ID NO: 494815 - DNA, 208 bp, Homo sapiens
gactactagaggatccgctcttctccctgacacgtgaggtgggatctttacctctagatgagatggtcatgaagtgagtgtcctggggagaatctaagccctccgatgtgtgttctaaagttgttttatgctataattattaccatttttaatgatgttgtgtgtcctcccatttgttcagtgagacggttaaacctttcccccactc

SEQ ID NO: 494816 - DNA, 137 bp, Homo sapiens
actgcgtatgaaaaacacacaatcaccttattgtggcattgcgccgtacattcgagagtatgaggaccctcgagatgtccctcctccaactcgtgctgaaacccgagaggagcgcatggagtaggaacatgacgggc

SEQ ID NO: 494817 - DNA, 896 bp, Homo sapiens
ggatatcatatacccgtggaacataagatgatattgggactgcgcgcaaatataactcttgtgagcaaaaattgggcgactcaattgcacccctctgtgtgaggggcccctccacattttgccgtatggagccccgtcctctttttcgggaaacacgctctctctcccgaatgccaaacttctttccggctgagaatctaaaatgttgtgggaaagtcaaactatagttctgcttacagaaggaagctttgtctgccctgattaactttattggggttccccgcccggcaagaaacaagttgggcgagcccggcggaggcgagaaaaaacattggcgacgcacgaaaaagagttggcaaccaaggccacgaagggtaatggtgggaacgtttccgtaagaggccccacgaagaacgacggtacccccccgcccctgtcggcagctgccaagaagaagcagacacgtccccagccgacggtaacacttgtggcggcagggcacccccaacagtaagtatatggcggtacactctagcgaaacccaagcgggtctaccaaagcaatctctgatgagaagaggaccccttgatattctctgaggaggcacccagcctggcagccattctccccagtattggtatgcagcacgcagaggctagattccccaagaaaaagagggtgccagctcatgatggctgttcgagaccgtagtcagacaataaccaggcggacatcccctggggggacaaaaaaacaacaagggagttatcatttcgagagtcctcctacaagcagtagaaaattcattgagacaagttcttttctacagggaggaatattacgacacacaaaaatttccctttacgaaagcccaccgagaaacccccacataacga

SEQ ID NO: 494818 - DNA, 416 bp, Homo sapiens
cactgtgtactggctgctcaaatggatatcagcaaactgtcaaatgaaatggaaaaaaaaagtgaaacataagtctctactagatggaattacatttatggcataatgaaaattggggactacctcctataccactggaaagtacccctgtgtgcaagtattccaaaaactattagatagttaagagctttttttttctttttgcttctacttcacttatcactttttcctttgttttcttgactagtgaagtccctctgcatgtgggaatcagttaggtgtttgcagatatagagcgagggtaaattattatttatttcacttttaaattccatcctaatttgtatctacgtggtataattcaactgtaatttttccttgaattttgctttgtcgtaattaaagttaagtaattt

SEQ ID NO: 494819 - DNA, 501 bp, Homo sapiens
  misc_feature (440)..(440): n is a, c, g, or t
caaaaggtttattgaaatgcctgtagataaaatatgattatcatgaaactgatatggcgtttacaacatggggtcttttgctcttaaaatgaagtgaagctccccaagtccattgaccaataggaaaaatattatatcatcctgttcagataaagatctttaaaaaggtaaatctcttttgaaacggtcttttaaacgtgtccagcccgtttggctccccccaggtggagatgctgtccttctacaattgtgagtctgatgaatgggattatctgaatagtggctttcttcatggaataccacccggttccacaagtcgcccaaataatgcccttatcataaccattacgagtagatgcttctgtgtgagtgccaccttggtaataaactccatcgagatggacagcgtgacactggtttatacaccaaccagatccatnctgttcaggacaggtgccaataaacttatgattgtcattgtcccaggtactgaactgcatg

SEQ ID NO: 494820 - DNA, 100 bp, Homo sapiens
ctacaacctctctgctcagacagtacacattgatacaacttatcaaagccagccctctgtatgtagccatttcagcaaaataagccaattatgggttagg

SEQ ID NO: 494821 - DNA, 275 bp, Homo sapiens
gcttgcctccgcaccacagatgcttgtcttcttgtgattgttaccgtataattgtcaagccaaaggtttgaatttacacgtggcatcggcttggtattgataatttgattcaggattctgggttctaaccacctcctcttgcctgttcacttccttgcacccgaacacaatctttaaccccagggggccctccagtcatttgaccagaccgtgtgttcctaccacctgtgctcatccctcctacacagcattgtattttaaagagtgcgctcata

SEQ ID NO: 494822 - DNA, 160 bp, Homo sapiens
  misc_feature (92)..(92): n is a, c, g, or t
tgatccaactcttcctgtgtgaaaagaagaatgatggcaggaagaacataaagactttaaaactcctagccggggtttgtcggactctttgncagtagtgatttagccaaccaggcaacagagatacgatctaatctcctcgcccctctttcgggtcgcg

SEQ ID NO: 494823 - DNA, 320 bp, Homo sapiens
gattgtctccctcactcactactaagaatggccttctggtcaggcacggtgactcacatctgtaaaccttaaactttgggaggccaaggagggtggatcacctgaggtcaggagttcaagaccagcctggctaacatgatgaaaccccgtctctactaaaaatacaaaaaattagccgggtgtggtggtgggtgcctgtaatcccagctactcaggagactgaggcaggagaatcgcttaaacctgagaggcagaggttgcagtgagccaagatcacaccaccacactctagcctgggcgacaagagcgaaactccatct

SEQ ID NO: 494824 - DNA, 111 bp, Homo sapiens
gaaatattatactagcatttaccatcttacttctaggaatactaggtatatcgctcacacctaatatcctctctactatggcctagaaggaataatactaatcgccgttca

SEQ ID NO: 494825 - DNA, 361 bp, Homo sapiens
cgggagcgtatgttcacgggtgatataatcagctagaccgagtatcgcgccgggctgtgtgtggctctggggaacctgtcaagcagacccatcctggatagacgggcaaggtatgtgatgccagagagtcatacaagggttctggacaagtatgaagtctttctgccatcgtgtcccggaagcggtgactggaaggggtacacatggcaagaccatcacggacgccatcaacattggcattggcggctccgacctgtgaacccctcatggtgattgaaagcccttaagccatactcttcaggaggtcccccgcgtctggtatgtctccaacattgatggaagcgtcgcgcatgggtaccga

SEQ ID NO: 494826 - DNA, 411 bp, Homo sapiens
  misc_feature (32)..(32): n is a, c, g, or t
  misc_feature (42)..(42): n is a, c, g, or t
  misc_feature (71)..(71): n is a, c, g, or t
  misc_feature (86)..(86): n is a, c, g, or t
  misc_feature (100)..(100): n is a, c, g, or t
  misc_feature (215)..(216): n is a, c, g, or t
  misc_feature (231)..(231): n is a, c, g, or t
  misc_feature (237)..(237): n is a, c, g, or t
  misc_feature (411)..(411): n is a, c, g, or t
attgaatcttttcctttctatgacgatattcnctgtctccanacttctgattccaacttgtaacccatcgntagaaccaactcaanagtccatctcttcntgcagagcggtaacctcaggcggctgcccttctccctgcgtgacaccgcgtgtgtgcctctgccattgtcttagcatgctcaactggaagttggcttctgtgaacccttgcccannggtctccttttccangaccantgagctcaagggcatggacaccctcattcttcctggcactctacccactgtgggttgtggtttaatttttttttctctggaaagactatttcaggtttctcctggaccctctttaggttttttaacacaaattgggccccacattttctcaacaggtaacgggtgtaactcgtn

SEQ ID NO: 494827 - DNA, 426 bp, Homo sapiens
ccataatctccgtgctacttttaatcactccgtaacaggcctttttcactcgacatgcttcagacttggtgttcccaatgtcggtctctttcccctacagaagtcattgtcgtcaatcatcctttctgctgacagtcacctaccattttatacactaatgacctccaaatcctcatttctaattcaatcaccttctgcgttccagacaagcatgtccagcttcctccagctgaatgccctcacctcgattcactcagtggcaccaacagaacaacaaaaattcgctgggcttgatggctaacacctgtagtcctagctactctggaaggctgacgcacggcgaatcccttcagtccaggagtaggaggctgcagagagcaatgattatgccactgtactccagccaggacagcacagcaagaccct

SEQ ID NO: 494828 - DNA, 1559 bp, Homo sapiens
agctggttgtacaagtatagaatcttagttcaagcttataaatttggcccacagaatcctctaaatccccttgtaaatttaatctgttagatccaaagagggaactagctctttgtgactaccaggtaagataaaccttgtgagcagagagttaaacaaattattaacgatcccatatgtaggccttaaagagctagccgaccaatttaagataagcgttacaagctacagagaactgcttacctataaatgattcccgaaaacagtataacgtgaactctgatcacactcgcaatgttggaccaaattcgtagtccacccgtatagagagaacataattgtttaggatagtaaagtaagcaatgcaaaaaccaatttcatccatcctggtagttaaagcccctggctgtcaaagaatcttaataacgacatgacacatggacgcaagtgtaaccacgcaccgtatataatctttacgaaagtcttaatcctagacggaatggtctaattaattttacccccatcgacttagtgcaaaatccctaagcaactatgtgcaaattgctgccaataatatgggtacacagggttccacaaacacacaggtataacacagcgggaaactactgcgtcgggtaaattctatgaacacacactggcactggtttgtgaatctaaaaaaacactagtctgaccctttcaattagctaattcgagcccaagattacaatactatagaaaaattcagactaaagacaaagaaacatagataaaaatacgagacaagaaatccaagcactatcatagacagcgcaggttagcgtaacacttaaaagaaacaggatagacaacaactatggcgcaatcgaaatcggatcaagcaaaatcaacacagaaagaacacagaagaccaatttccacaacactacacaattatgccacacttcagatttcgaaagaccgaactaccacatcaaggcttcacacacactataaccagtacaaacagcgaaccgataatcggcgacactattacacagtcgccaacccgataagaaaaacaagtatcatagtcaattaccctcagcatacccatgtcaaccacagcgctaacataatgacaacaaacacaggacacacatgacagataagacactgtcaagacatcaccacaacaaacacaatttgaccaacctggtgtacaactacaacaggcggacaacaataaacaacacaaagacacagacacaacaagagcacgataagaaacacatacacatacatcaccaatatagaacagcagaggaagagaaacccaaaaaacacaagatcaagcgaaggaagaaaaacataggcgaaacagaacacaaggaccacaacagacaagcagagcacaacagagaaccaaccataccgacaaccccacaacacacaccacaaaaaaaaccacacggagaattacaacaaggaaaacaaaaacaagagacagacgacaaagacaaagaactaagaaacaccaaaaacaaacacaagcacacgacacataaacaggacaaaca

SEQ ID NO: 494829 - DNA, 177 bp, Homo sapiens
taacatcaatattgaccttagtttcttacacaagtgttgctaactcaatagtgaaggagacattattaaattttctgaacccatgagagatactagagatggggagtagaaagtatttgattcagagatatctgaagaacagaagaccagagattcctaaagtcacactccactcca

SEQ ID NO: 494830 - DNA, 676 bp, Homo sapiens
  misc_feature (3)..(3): n is a, c, g, or t
  misc_feature (82)..(84): n is a, c, g, or t
  misc_feature (91)..(91): n is a, c, g, or t
  misc_feature (93)..(94): n is a, c, g, or t
  misc_feature (129)..(129): n is a, c, g, or t
  misc_feature (140)..(140): n is a, c, g, or t
  misc_feature (152)..(152): n is a, c, g, or t
  misc_feature (154)..(154): n is a, c, g, or t
  misc_feature (174)..(174): n is a, c, g, or t
  misc_feature (178)..(178): n is a, c, g, or t
  misc_feature (183)..(184): n is a, c, g, or t
  misc_feature (189)..(190): n is a, c, g, or t
  misc_feature (194)..(195): n is a, c, g, or t
  misc_feature (218)..(218): n is a, c, g, or t
  misc_feature (223)..(223): n is a, c, g, or t
  misc_feature (228)..(228): n is a, c, g, or t
  misc_feature (230)..(230): n is a, c, g, or t
  misc_feature (232)..(232): n is a, c, g, or t
  misc_feature (236)..(236): n is a, c, g, or t
  misc_feature (256)..(257): n is a, c, g, or t
  misc_feature (266)..(266): n is a, c, g, or t
  misc_feature (268)..(273): n is a, c, g, or t
  misc_feature (275)..(275): n is a, c, g, or t
  misc_feature (540)..(540): n is a, c, g, or t
  misc_feature (672)..(672): n is a, c, g, or t
ggnattcagagcttacgcgtaatgatatataacaatagtagatagtatgattaagatagccatatgctgctatcaaagaaannnagagatnanntattattaaaagagaaggaaccacggatgatttgnggttatggccntgcagccttctngngaatcttaaaaggaaaaaanatgncgggnngtctnnagannctggaatgatgatacacgtacanaaatnactgnantnttcncccatatatcccttacggannaacaagtanannnnnntnttttttaaacaattcgacaataaaaaagtacaattttttttgtgctaaaaaaagggcaagacaacataaactccagttgtaaggactccatttgcatacttgatttaacactttttggtgctgcgaaggaaatgggactactgggctgttcgcagagcagcaacataatattagtgctttaagtaccagaaaccacccacagctttgtgcgcgccaagttgcgcgcgatgcgcaaagattcaagagacttcatttttagcttgtnacttgtcctaatgatagtagaccaggaagatccccatttaatagtacattccccatttttaaaaaaactgatgcctttttttttttttttttgtaaaattctgtatgtatgttaccattttttttcacatgntaca

SEQ ID NO: 494831 - DNA, 345 bp, Homo sapiens
  misc_feature (78)..(79): n is a, c, g, or t
cttttctgaggctcattcaggcctggtcccaccctggagtttctcctcacagaactcataagaggagaccagagattnnggaggtggcttctgctgcctctccagagcttatgctcacaatattctgaaacccaagagcagataaattagagcaataagctatatatttggaggtcttaacttctttcttttgaattaaaaccagtgcttgtagagacattccatcccagtagttactccacaagtcacaagaaagtaaagaacacaataaaagttcctttaactgcacttaacctttcctttctgtatcctccatctgtctacatttatcacttatgctataca

SEQ ID NO: 494832 - DNA, 122 bp, Homo sapiens
  misc_feature (48)..(48): n is a, c, g, or t
cgatcagctcggcccgcttataggttgtttattttaatggctgatctnatgtacacagaggccagtatgtacagacaaagtgagaggttttatttcttggtctcttcctccttggataaagt

SEQ ID NO: 494833 - DNA, 353 bp, Homo sapiens
actacgtctttgccatgcgaattttgctcgttgctgccttggccgtcagtgttgtcggctgtacccgctggtcgatggaccaccatttgaacaagcgcttaccgtgcctatggggtcggtgattgccagcgtgtcaccctggagttgtcccaggtcgatcgcgagagccgcactcgccgctacgtgcaaccggaggtttcgacgttgcgtgggcagtgcctggaacgccagaaactctttgtcgatgccgcacagacctatcagttcatcatcggccactacccgtcgagcgagtacgcctatcgagcccgtgcgcggctcgataccttgcagcaactggggcatctgccggc

SEQ ID NO: 494834 - DNA, 182 bp, Homo sapiens
tgtcttcgctgagtgagtggatactcggtcactgcacttctgctccaggtcaagcattctctgctcggctctgagtagctggattacaggtgcggcacaccggcttattatatgtatttttagtagacggcagagtttcaccatgtagggcaggctagtctcgaactccgtgactcagatga

SEQ ID NO: 494835 - DNA, 299 bp, Homo sapiens
gaaaaatcacttgctgacatttcaaatcaaaaaaattttacataaaagtctaaatttctgcattttcttgaaaaataggaagatttgtcaagagtaggttagtgttcccacgtcagctggagctgagcagtagctgtcccatgtcagcagggtcatgctacacagtgtcagggtgagtctgtgttctggttttcctgggacagcttggtttgttcccactgacctagcataattattaatagcatccccttttcttctgattttgagaagttttatatattcccttctgtcgtcttctc

SEQ ID NO: 494836 - DNA, 255 bp, Homo sapiens
  misc_feature (227)..(227): n is a, c, g, or t
tttttcaggttactagttaagtatgtattttgttcatcatttaattgtatacatatgtgcaaaatgtaataataagaaaatagaatatctttaatagtaatttatatttggaacataatgattttcatagtgtagtctggctcactattatggacttttactttgatttcagaaggatttgttcattaagttggtaatgaactgccaatggagtagaatgtttctangtagaatctgtgaagtgtaaatgtattt

SEQ ID NO: 494837 - DNA, 1176 bp, Homo sapiens
gctttccaagggagtggttgtgtgatcgcgcatcttagggaaaagatgttgctcgtgtcgtggcgcacactggtcgcgggcgaaccccgttcagacacgcccgacatctgtcgagcgtggtgcacagatggtctcggtggacctccgcagcagctcggcccagggcccacgggccatgacccgccgccctcggcaacctggcagtcgccgccgtggaacgagatacagtgtgtgaattcaggtctccgcgaagtattatgcactgtgtggcttctggtgggtgtcttaagtatgtggtctgatcacaccactgactgtggttgcccctggatttacgtgaaatgccgtatgcagggtggaccctccaagaagtacaagggcatactctaacggatatctcgagtgtagcatcttacaccgaggactggtgttacgtggtttggctaaatggatgggctcccgacttgtcctttggcgtacttcccgatgccagggacgtcttgctacgtgtcttggcttggtcagtgcaagctcctcttaagagctcgtggataatagccacataatgccttgcgagaaggagcaacttactgtagttctcgtgggcgcatatcacctaatattttgggctgcctcgtgccagtgcttgaatttcttggtgctggacaattggcgcctggggtccttatgggaaggcctgctaacgtgcttcggaattaccaaatggcgcaatcccaaggtaaaggggcaagcgagctctatgagggggacctggcaggctcccccagaaattgtactaacagggaaggcaaggggcctaaatagaggcattttctaacaaacggcggggtttggatccatctactgggattgagcaccatggataccccagttacacccaatgtagtggaagacgtcccgacgtggacttggagaacatgtacttgtttggaaaccaccgtggtaccaacgttttgggggggtcccctaaagccccccgacacgcttggcacttgtgtccaaacgcgcacgaaggcaggtagagttggtacaccatttttgggagacgcggggttcatataatctctggagagtctattaggcggcaacattgtgtgcttcacccctgggttaggtacttaggggaataattgccgttcgacttaataagacatg

SEQ ID NO: 494838 - DNA, 362 bp, Homo sapiens
ctatgcgcatatgattagtaggcatcgaggttatagacccggtgatgataagacgatgccacaaggtgccactggagaagagggaggacagcccaatggatagaatctggaaagacagccacacgtttccccctctgattctttaattcacccacaacatatgcccatggtgagttcttcaattgcaggcttattggtacaggaaatgagctcttgctcgagatttaagacggagtcaaatcatgggtctagccctaatgatgagtaactgatggtgaggatgagagttgtgacagtgctggtggtcatgaggaggatgaggatgatgaagaaaaaaactgcagtcacaaggacgattctcc

SEQ ID NO: 494839 - DNA, 191 bp, Homo sapiens
aagacgcatactcaggccccgaaatgcacagacacacagcatcatatgctaatgaggaattatcagcagatggtttataaaacatggcatttttatcttcttcacattttctgataatacaatggatgcaaacacgtcatgtggccgctctgaatggccacatgactcggtgtggagcttcggcgtgtgca

SEQ ID NO: 494840 - DNA, 1114 bp, Homo sapiens
  misc_feature (109)..(109): n is a, c, g, or t
ggtttggtagtgtgcgtggctgaatcacacgctcactgccgcctcgatgtcctgggctcagatgatcctccggcctcagacctcccaagctagactggtatcactaggntgtggcactgccaatgccgtggatgaatatattgttggagttgatgctaggaaagcgggatcggagttctcagccatgattgccgcaggacttggtcttgatccctcctagggctcaagtctaggctgtcccactctcgagacctcccacaagtgtgcttggacacttactcggtcactgagcgcactagcgacagcgtaacacctagcttcttggttggacttttagtttactttccttaggacggacaggagtcgtccgtctgttggcgtcagacgcagaggctgggggagcttgcagctggatgaaccatgcatggatgtcagctgggcagcccattaaagctgcctgggttcgtcagaatggatgcctgccagtccttgcggcctcctcataggtagtctggtaaccatagggtgacgacaatcacacgcgattgcccgaggcctcagaattatttggacatatcttttttctcgatgaggcagataggggggtcctctcgcattactagctcctagcgactggggcttccccaaagcgtatcatggcggtcgacgaattgatgcctccttggatttacagaccttgtccaacgttagcttgggagaccaagcaggcacttgtagcaagcgagtgccattgggcgttcctaatactttccgcgtaggcatgtctgggggggactcgtttgcatacccatttgccccaggtgcttgatccttcgagagcgtccttgaggttcacacgcattgccgtccccggatattccaggacttccgcaaaaaggttggcctagttacatctgaccctgggcctagttggaggcgcatcgtttgccagcccccatggtcgtccaaggctttaccggcactttgcggctttggggttaccccagtggtgagcggacattggtctcgccccgcggttcgccccccgggcaggcgcggtcgcccgcgggcgggaccctcgcgcgttggctctgtttgaccctcgagacttccc

SEQ ID NO: 494841 - DNA, 203 bp, Homo sapiens
agtaaacaaccaggaaaaatccaaagagtagcaagaggatcgggtgtatcaacaatgagatgtacaagaacttttgacacaatataccaagtttgcacagatggtaaaaaagatggtgaggtatctgaatggactttctcaaacggtaggcgacatagtctaacgaatagtgagccagatcacagactggcaacaatatgaac

SEQ ID NO: 494842 - DNA, 215 bp, Homo sapiens
acagcacacactaacacagcacacacaaacacacagcacacacataacatgcacacagcacacacatgcacacagcacacacatgcacacacagcacacacactcatgcgcagcacatacataaacacagctcgcagctgcgttcatgtatgtgctgcgcataagtgtgtgtcgcgagtgtgcatatgtgtgccgtgtgcaccgtgtgtcgtgtg

SEQ ID NO: 494843 - DNA, 1052 bp, Homo sapiens
gattgatcgctgagcaaacacaataatcttaacgcataccaacgccggcgcatggtggtgcataccctgtggttccaccactttgggaggctgaggtgggctgatcacaaggtcaatgcagttcgagaacaacctggtcagcatgatgaataccccgtttctactaaagaacttcgaataattatgtggtgccttgtgctagatgcctggtagtatcactcgagtgcatgcgcgagaggcgtcgtagtcatcgagaaactcggttgacagacgccaagcatggtgtcaccgtttgcggttagcaccagtattgtcaacagatgacgcctcgcattctggttgaacacagttcaggagtgccacctccctgcatagaatggcaacatgaggtcatcaagcaagatcaggactacgactgtcaatgcttgaggagtccgggtccactggggatcacagacctgctcgaggcgtgggcaaggtggagccgtccacgaactcttggactctccacccacgatggcgcagttccgggggcctgattctctgaaaggaaggagggccaatccattgcctggagggccaagttgaagctctgcctctttgagggtggtacacggaggcctgcctcgaaaaagatccccgatttccggccgcggcaaggcatgctgctgaagcacaagttcgtcacacgctacatcaagaagactccttctcaaggaggctcatcgaccgtataagcgctggcatgtcagagggtcctggcgaggagtcagcgtctgaggactcttaccattgatgggagggtaagaaggggagcgggcccatctgggtacgcctacatcgacgggtcacaccgaagcttcaaggggagggcgccataagaagcttgcgggcgcagagagggcaggtcagcgacaggccgcggattgaaaccagagaacaaaagggaaacggtgcggaagaactcgtcgggccggcatcaagaggcggtggggttacaaacatccgccatacaaacttcaagaacgtgaagaaccccggctccccggccg

SEQ ID NO: 494844 - DNA, 99 bp, Homo sapiens
cccttttctctttaaactcttcgtctgtccttttcgtttcttcttttcacttttttttttctcctctcctaccccccccggcccttctgtcgtcttctc

SEQ ID NO: 494845 - DNA, 668 bp, Homo sapiens
gtcgtaagggcggtgcccataaaattctagccctcgcctactccgtctaggactcggtctcgaaggggtcatgcgccccgtctgcggaaggcaatgatttttagggaatagttctaacgcactatggacgggcattagactcctacacctacgtagaagatatctcttcgttccctcactccggggaaaaggatgacgctatccacgtaacaaagtttatccgtcggttggggtccgataccaccttccttcgctcggtctcgtattgcaccgaaatcgagccaacgggtaaacccgacgaaggcaaatcgtttattgacttatattcgacgtcttgatcggttaccgaaatcgccgtctacgatcacgacgctacagccaccgatagtgtgttcaattcgggcactggtatgaccaacgctgcacgcgtcgtcgacgcgtcgaccgcctttatgttcgtcgagccgcccgatcatattcttgtatcgtagccccctgacacgtcctgcgactcgtctaagaatgccgactccaaagggcctgagttcgacgcatgcaccccgtccattaaacatagtaacagcaacggtctctagcttttgcggacggaggaataaacctgggacgttcgggggaatacggcctcaaaaaaagccgcatgcgaaatg

SEQ ID NO: 494846 - DNA, 354 bp, Homo sapiens
ttaattaatacccaagagactgacaaaatatgtacacacaaaaaatatgtgcttcactgttcatggaggcattattcataatagtaaaaaaaaaaacaaaacaaacagaaaaaaaaaaacaccccatatgtccaactgataaatgaatactcacactgtggtccattcatatgctaaaaactatacagcaataaaataaatgacatattgcattaacttacactacattggccaggtgtggtggctcatgcctgtaatcccagcattttgggaggctgaggcaggaggatcacttgaggtcaggagttcgagaccagcctggccaacatggtgaaactcgcgtcagaatagata

SEQ ID NO: 494847 - DNA, 114 bp, Homo sapiens
agtaagcaaaacctaggtgtgagcccggcccagaggcgctagcagtgggaccaacagtagatggcggcaacatgcttcaaccagcaaagctgcagcctcctggaaggcggcaag

SEQ ID NO: 494848 - DNA, 408 bp, Homo sapiens
cctgcttgaacagcgcttggacggaacacggcgctcgtgccacacaccgggcgagcgcccatagtcagccctacgagacctcttgaccggaccctgggactgacccaaggcctccggcggcgctccagcgccgggcacacaccgtcgccgccgccgtctctgcttagacgacgccatgacgaccgcgtccacctcgcaggggcgccagaactaccaccaggactcataggccggcatgaaccgccagatcaacctggagctctacgcctcctacgtgcacctgtacatggcttactactttgaccgcgatgatgcggcttcgaagaactttgccaaatactgtcttgaccaatctcatgatgagagggaacatgctgcgctgatgaagctgtagaacccgggtggccg

SEQ ID NO: 494849 - DNA, 316 bp, Homo sapiens
cacgaggagaagtgaaaaattacagatttgattggcatagatgcgattcggccagatgtgtctgctagctagcagctatagaagttagagtgcttttttatgtatttatttattttgagacggagtttaactcttgttgcccaggctggagtgcaatggcgcgatcttggctcactgcaacctccgccccacccccacccccgagtacaagagattctcctgcctcagcctcccgagtagctgggattacaggtgcatgccaacacatctggctaatttttctatttttagtagagacggggtttcgccacgttgg

SEQ ID NO: 494850 - DNA, 458 bp, Homo sapiens
ccacttgccagctgcaactttgacgcatattatcaggataggtgagattgatgggggccctttgaactcttcccagggaattatctttataatgttacagttttctctatagcatggtcatattgttaacattggttataaggtcatatggttagtatggttagtattggtggctcacagctgtaataccagcactttgggaggccaaggtgggaggatcacttgagccctggtgttcaaaaccagctctggaaacatagcaagaccttgtctctacaaaaaaaaattaaataaattaaaagattagctgggcatggtggcacatgcctgtagtcctcactacttgggaaactaaggtgggaggatcctttgagcttgggaggttgaggctgcagtgagctgtggttgtgccatggcactccagcctgggtgacagagtgagagcctgtctcaaaaaa

SEQ ID NO: 494851 - DNA, 1626 bp, Homo sapiens
  misc_feature (281)..(281): n is a, c, g, or t
  misc_feature (366)..(366): n is a, c, g, or t
  misc_feature (371)..(371): n is a, c, g, or t
  misc_feature (594)..(594): n is a, c, g, or t
  misc_feature (669)..(669): n is a, c, g, or t
  misc_feature (691)..(691): n is a, c, g, or t
  misc_feature (1064)..(1064): n is a, c, g, or t
  misc_feature (1475)..(1475): n is a, c, g, or t
gctgaccacgcaccatggtcggttgggaagcaacaagacgaccttacgaaaggcgggaagaactgggtagccatagaagaaatgtggttgatccattttctaatacatagcattggatatgcatgtgcaacacgccacctgcgtatgttccacatcattaacgaaaagtgattcgcgaataatgacagactcggtcgaccgaggcacgcctaatggatactcgacatagatttggcttcttggatgcgttcgtcacggtggtcgtgtgttctgtgtaaggntgatgatcgctatgcaatgtagtctctgcgaggacatctgatgtgaaaactctcgctacttataagagatagactctctaacccnctgantgtacttgacacgatgctgcaggtggctagacagagagcctgcacatggagctacacattcacaactgggcaaactaggaactcccttaactctctggttgatcaaatatactagtcgattcccgattggagatctagtagaccaaatcgcgcacgatgagattcgattctgtagagagcttctaccagatttgatctcgctaacatcgaccctaaccatctntggggttagcgatatgcaaattcgggctccttgatctcctgcgatagctcttgcggtcttgttaactctataganacatagccttgcagaaacagantcccacgagtgtaaccgtgatatgaacgctatcctatatatagcgcccaagtgctacattcgatagctatcgcggtcgcgggctctcacaactaccccgagacaattgaaaccgcagttggatgtccggccatgaagtccgatttgcatctcccgaaagaaaatggggtttgcaacgttagccccccatgtgcaatcgtttggccaacaagtaaaacgctcgggttccaaatcacacctttggggattcccccgaagaaacaagcctattttcgcgccagaatagtacccattaaggcaccttaacggacgtgtggtctgttctctctgaaattgtgaatgtcgccgtccaactcgaagtgaacattgatccntttaccgcaaagaggacatagaagagggtatttagagacctttgcgctggaacagaaagggccctcacaggatttattgcccatttcggtgtggaaaagaggggccgtccaccttggggaaggagcttttccccatggtggctggaacaagcgcgctaaggaaaaggatttccctggggagaaaaaaaatgtcgccacaatgtgggcggcaccttacatctacgacgggatgctttaaaccacaccgtttggaataccggtatagggcctgacatggtggggatttttttcacacacaggggcccgtgtggccaccaggaaaggttccaggtggtgcaaacatgatatcaccgcacgcctttgatacactataatatatggccctagccatatatacgaagtgcccgtaanctggggtcaagcaacatgacacgaccgtcggagagacactacttacggagcgcagacttcgatatatcacgggtgcagccaataaacacaggcgacacaataaatgacggcaacgtagatacatgatgaacttctcatcaacacagcgtgt

SEQ ID NO: 494852 - DNA, 100 bp, Homo sapiens
cgctgttgtgcacagcacgttcccatcaccattgtacttattgtttttagtgggaggtctgaagagcccttggaggggagaatataaagaaccaagacat

SEQ ID NO: 494853 - DNA, 348 bp, Homo sapiens
gggagtttatgtgaaagagtaaggcctctttgcagttgagtataagaggaaggcttgtgtctcgtgctcatccctggaaatggaatgtctcggtgtaaaccccgttcgtatgttctattcctcgcgataggagaaacccgccttatgtctgaaggtgacacttgctggcgccaatcctgctctttaatgcactgagatgtttgtgtaaagtcaaccttattcgtggcctatgtgcacctcaaggcctgctgaccctctccccacctattaccctatagtcctgccacatccccctctccgagtatggtagagatagtgctctatatatgcggagggacccgcgcgcgg

SEQ ID NO: 494854 - DNA, 233 bp, Homo sapiens
tgtctgagtccttctgtgcccaaatgtggagcaggctgcacagacttgaaccctggggttttgtgcctcctttttgtttcgatgtttttgaaacaaagtcttgctctgttgcctaggctggagtgtattggtgtgatctcggctcattgcaacctttgcctccagggttcaagggattctcctgcctcagcctcccgagttgctgggattacaggtgtgcaccaccactccag

SEQ ID NO: 494855 - DNA, 304 bp, Homo sapiens
tgtcaaactccataaccctcatgagatccactcacctcggcctcccaaagtatcgggattacaggcgtgagccactgcgcctggccctaaacaacctttaaaaagaacaaagttggaggactcacacttcctgatttcaaaacttacttcaaaactataataatcacaacatcatggtattggaataaggaaagacacatggaccaatggaataaagtagagaactcagaaataaactctcccgtatatcgtcaattgattttcagcaagggtgccaaaagtatttagaggggaaaggacagtc

SEQ ID NO: 494856 - DNA, 131 bp, Homo sapiens
acccacgctctgagcgcttgcggtacaccgagcctggatgcagccagcgcaagcaaaaagagcaaaatgagggccgtcctcatgctcgtcaactggccccacaaccaacgcatgaatgagcggaaacccag

SEQ ID NO: 494857 - DNA, 157 bp, Homo sapiens
caaaataaaaagtacaagctagtaagtaaaataaagcaggctaggcgggcgtggtggctcacgctgtaatcccaacactttgggaggccgagggggtggatcacgaggtcaggagatcgagaccatcctggctaacatggtgaaactcctctctact

SEQ ID NO: 494858 - DNA, 461 bp, Homo sapiens
  misc_feature (202)..(202): n is a, c, g, or t
  misc_feature (332)..(332): n is a, c, g, or t
  misc_feature (362)..(362): n is a, c, g, or t
  misc_feature (367)..(367): n is a, c, g, or t
tgtcattgaaagttgttataagcaggctggtacggtcgatccgggatttgacagcgtcggaatgctcaaaactttgggggagcaagcatgcaaaacctgaaagggggcccttccagaaacatgatgggctttattgatccgtgactgcgatgagagcgggtctttaaggccaagcatgtgcaacggggcaacctttccaaancgggttgtgccttggggttggtttggtgaaaacacttggggctgggggtcagcaagaacagacaaggacactgaaataacctgctctgagcgagtgagaacctactggatcatcattgaactaaaacacnaagcaagagaaaaaccttatgatagtaaangtttngcggactgcacttcatgaacggagatcacaacgcgttatcaatctggatccaaaattactcaccgagttttccgtatgagaataatgatatcag

SEQ ID NO: 494859 - DNA, 273 bp, Homo sapiens
taaggagataaagtttccccttttcccaaacagtttcacatttggacagcccctaattgatacaactttatggcagggttttagtgtgtgagtgggatcccaaaccctccatcctgtaaaaggggacagtcctattgtatgttagttaaccccctgatgatgtgagcctgtgagatgagcccatccccagttgttatgtttgaatttgctttgtgttgggacgctttaatgtagggtttccctaaataaatgaatttttatatactggactga

SEQ ID NO: 494860 - DNA, 197 bp, Homo sapiens
ggatgagtagtgctggtccccaaagccaccggacaagagcttcgtgtaaaaggtgatgcaggagcaggttaaccaccccaagttccagaagcccaagcagctgaaggacaacgctgatttctggattatccactatgccggcaaggtgacgagcactcacggggaggtgctggccagatcttcacaggagaggtgga

SEQ ID NO: 494861 - DNA, 326 bp, Homo sapiens
  misc_feature (5)..(5): n is a, c, g, or t
  misc_feature (21)..(21): n is a, c, g, or t
  misc_feature (141)..(141): n is a, c, g, or t
aatcnttggggaaaaaaaagntgtaattaaagagaaaatatggccggggtacgggtggccttatgcctgtaatccccaagcactttgggagacccgaggcgggtggatcacctgaggtcaggagttcaagacccagccctncaacatggccaaactctgtctctactaaaaatacaaaaattggctgggcataatggcgggcctgtaatcgcagctacaggctgaggcaggagaatcgcttgaacccaggaggatgcagtgatctgagattgtccgctgcattcctgcctgggagacaagagtgaaactctgtctcaattttagaa

SEQ ID NO: 494862 - DNA, 844 bp, Homo sapiens
  misc_feature (39)..(39): n is a, c, g, or t
  misc_feature (46)..(46): n is a, c, g, or t
  misc_feature (48)..(48): n is a, c, g, or t
  misc_feature (52)..(52): n is a, c, g, or t
  misc_feature (125)..(125): n is a, c, g, or t
  misc_feature (136)..(136): n is a, c, g, or t
  misc_feature (143)..(143): n is a, c, g, or t
  misc_feature (146)..(146): n is a, c, g, or t
  misc_feature (171)..(171): n is a, c, g, or t
  misc_feature (326)..(326): n is a, c, g, or t
  misc_feature (350)..(350): n is a, c, g, or t
  misc_feature (356)..(356): n is a, c, g, or t
cgcacacacaacaatcacccctcaaggacccgaaaaaanaaaaaangngggngggaagcttagaaactgaccgtgaactgtgctttaattaacccacccctacagtgctgagaataaaggattanaaactaccaanaacaatntantgcggccaggttccaaaaaaaaaanaaaatctaaatccaaaccagataagcagcttatccagtataccccctttccacttcttgcattcctccatgggaaccctgcttcttctgttgaacaggccagtacaacagcatcatcagaaattttgtcctggggggataaacccatacaacttnataaacttataaataccaacctanaccccnaaccaacccaaagtaagcttgttcgccttgaacccttgacctgaactgaacctactgaagctacactgttttatttatgtgaacttcctcctacacctcttgatagtgatattccacttttaaatagctaaatccccacgaagtggactttacatgtgtatattcatcaaaatcatgaactatttattctaaaccatcatttccctactttttttcaaaattcctttatttcttttaaccaaatacctcgagaataaaacccccttttgcttttctcactacccccacactcttccaaagcttccatgtgttactccccctccttacttaccccaaatcaattgccccttattgcccgctctttaattccaattcacatgcccctttttcctcccttttccgaaatttgaaatcctttttttccactccacccttacccccactaaattttctgttatttcctttatatccccgcctattccttcaag

SEQ ID NO: 494863 - DNA, 175 bp, Homo sapiens
accggacagaaaggaaaaccatgaaacgacttactggaaaagacaactgtgcaggaagggcaggcctccacggtagactgtaaaggtacccactggtgggtatggcagtcctataaggagggacagcatgcctggctccagacacacacttagagtgccagacaagaaccacacg

SEQ ID NO: 494864 - DNA, 917 bp, Homo sapiens
gctactttgacttcgtaactcgatgtgtgagagcggtggaccagggctgtggagacctacggcctgtggaagataacgctcctgtgggatgatctcgctgaaaacagggatccaggtcctgctgacggagtacagcttcgacagtcgccacaagcccgcgttcaccgaggaggacgtgctcaacatcttccccgtggtcaagcacgtaaacccccaaggccctcggatggcttccatttcttccagacgtgggcagtgccaatagatgcaagcagggctgtcctgcaaggagggctgtgagctcatcaatgaggccctgaatctgtgtaacaacgtctaccggagtcatgcacgtggagagctgtgcctgtctgcgcctcctcgcccgctccactacatcatgggcgactacgcagaggccctgagtaaccatgcatgaaggcggtgctgatgatgcgagcggtgtagatgggcaccgaggcaccccaacaccatccaggaatacatgcacctggccctgtactgcttcgccagcagccagctgtccaccgcctgagcctgctgtaccgcgctcgtactcatgctgctggtgtcggggaagacacccgagatggcgctgtggacaacaacatcggggctcggtgctgcacggcggtggtggagtacgacctgtcgctgcgcttctggaagaacgcgctggccgccacaccaaataccacgggccaagcccctcaagtggcctcaagccaccacctgatcgcccgagtctaccaaacgaagctgagtcgggcgcgcccgcgcacgcaaacggggtcaaccaccacagacgcgtggcggcgagctggaaaacacggagcccgcaccacggctgaccccagcgggccgcgcccagaacgacaccgcaggcagcaacgcgc

SEQ ID NO: 494865 - DNA, 658 bp, Homo sapiens
  misc_feature (208)..(208): n is a, c, g, or t
  misc_feature (245)..(245): n is a, c, g, or t
  misc_feature (252)..(252): n is a, c, g, or t
tgggggaacaaggtcgtgaaaaaaaaggtcttggtgaggtgccgccatttcatctgtcctcattctctgcgcctttcgcagagcttccagcagcggtatgttgggccagagcatccggaggttcacaacctctgtggtccgtaggagcccactatgaggagggccctgggagaatttgccattttcagtggcacaacaagtggtcgtntactagctaagatgtgttgtactttggatctgcattntgctacnacccttccttgtagtaagacaccaactgcttaaaacataaggatgttcagttcctccatttaacagatatgaggagcattctaagaggtgcagcctctggaagtggatcaaactagaactcatatgccatactagatatgttgtcaataaactttagtgacgtgaacaaaacaaacaaagaagaccttaaatctatgaggcgatctactcctcgtcggaggtagcgggaagaaaaccagggattctagggaaacggagcctattggtatgctttggttggtctacccggtccccatcctgacctggcttaaaaaagggcgctcgattctgacgaggttaacccatcttgaggccgtacgcattttcataatcgatgggcaaggcgtaaagccggttttacagagac

SEQ ID NO: 494866 - DNA, 432 bp, Homo sapiens
gaccgtctctgtttttcttttctttttatttttttgaaatacatttctttattttcattcccatatagcagagatggaacaaggatagtgatgctggaaaatcctgctttgatcaaatcatcacataagttaacgtcagaaaacctgtatttgaatctgactcctctatccttgccctgggaaattggacagattgacccagttgctgtgagggctgaattagatgatgctgaaagtgcttggcctgcagtggatatgcaaaacaatagctgttattttagacagtctccaagcagggaaaaaagtcttcatgccttctaactaatcatacaaacgtatgcagtgtgtttaaactctggcttcagagtttaacaaatacaaatctaatcgaaaaaattagtcaaactctatgaacaaatttataactaatac

SEQ ID NO: 494867 - DNA, 212 bp, Homo sapiens
gcagattacctgaggtcagtagttcagaccagcctggacaacctggtgaaaccgcgtctctactaaaagtacagaaattagctggttgtggtggtagtgggtacttcttattccaagttactcagcaggctgagattaggagatttgctttgaacccaggagattagggttgcagtaagccgagatcatgccattattactccagcctgggt

SEQ ID NO: 494868 - DNA, 511 bp, Homo sapiens
  misc_feature (511)..(511): n is a, c, g, or t
atctaacccaaactaactctgatagagcttatgcgaatttgatctatttctggacctgtgcgctcttcatacgttgcgtatgtagtaatgctaagtgtgattctattgttaacagggccttatatttttattggtgtatatacatttaagtagcatggcttataaatacaactacttcattagttgctcaactaacaaagcttatatcatgcacatgtgttggattttctacatgctccaaggcgctaattgaaacttaatgatttaaggcattttcaggggtaataccatgcccctcttaatttactggttaactctcactaacatggaaagccagggcagaatttactaatcattgtcggaatttgggtgtttttaatattatcactctctctctttagttctgtttgcaattaggagaataagaatctctttcggagccagagatctatgctgggcacggtggctcatgcctggaatttcagaactttgggaagcttatgcttgcacn

SEQ ID NO: 494869 - DNA, 177 bp, Homo sapiens
taaattctattgttttgaactctgatttaaaattaaatttcagctgggcgtgttggctcatgcttgtaatcccaacacttagggagtcaggagaatcacgggagttctttatttctagaccaatctgggcaacagagagaccccatctcttttaaataaaaagttaaattgcttaaa

SEQ ID NO: 494870 - DNA, 852 bp, Homo sapiens
  misc_feature (294)..(294): n is a, c, g, or t
agcggcgtcagaagtcggatgcggtggctcacacctgtaatcccagcactttgggaggcccaggcaggcggatcacttgaggttaggagttcaagaccagcctggccaacatggtgaaaccccgtctctactaaaaatacaaaagttagccgggtatggtggtgcatgcctgtaatcccagcttcttgggaggccgaggcacaaaaagtggttggacccagggagacggaggtttgcagtgaagtgaagatcgtcgccattgtcattccagcctgcggtgaacacagtagaganctgtcgatcttcaacatagagagaactaccataaaatattatactagatagagttcttcgacacctgaacttgtgtccgcgatgattgggcagagtgcactccttatgaggcgtgggctcctgtactccctgcatttttgctcccatctaaagagcgtggagtgctggatggatgagcagagaggtagtagtccggggagtagaaggtcagcacacacgggcgagtcaagcccgcgttacctccgctaatacccattgccaatatttcttgaagatccctttctccccttatctttgccaagtaagttttacccgaccccatcactctttcactccccttgtcccttaaaataattccacgttgtcttacctaagaatctctcttttgatcctgttcctttgattaacaccgatcagtgcctactaactgggtctaggacagacctctgttgagcagtcagagtcttccctgaatccacaattgcccctttccttggttgaccaggtatgactactggtcacacctttaccttgactatccctaacttccttctacta

SEQ ID NO: 494871 - DNA, 346 bp, Homo sapiens
  misc_feature (7)..(7): n is a, c, g, or t
  misc_feature (33)..(33): n is a, c, g, or t
  misc_feature (180)..(180): n is a, c, g, or t
  misc_feature (263)..(263): n is a, c, g, or t
ctttatnatattaaaggcccacctttgcctcanccaaaaagttggccttaaacaaaatggaacaacctgagaatcagtgctttaccttttttgaaattgcagaaatcccagcagaaattactaaaatctgatagtgtatcactgtaaaagtcacttttggtgtaggatttcagtcctttncagctctttttttgaccctgccgctgtgttttggtgtcaaggaagttctaggtttgtcctagagaaataggcacctctttttnctaatacaaaacatctgctagtttgatttacagtcttgctcaattaagcttaaggaatagggaagctaagaggaagtaaaatt

SEQ ID NO: 494872 - DNA, 852 bp, Homo sapiens
gggaaacagaagagtgagaagatcggtcggacatttgcgagaaccagaccactggacaaccatatgcagctgggcaggatcatgctacaatccagaatttgacgaaacctgaagccaaaggaccggaggaactccctgaaaagctaaagctctactcagagtttctggggaagcggccatggtttgcaggatacaagatcactatttgtagatgtttctcgtctatgagtgtcggttgacctccacacgtatatgttgagcccaactgcttggaacgccttcccaaatctgaaggaccttcatctcccgctttcgagggcttggagaagatcatctgcctacatgaagtccagccgcttcctcccaagacctgctgttctcaaagatggctgtctggggcaacaagtagggccttagaaggcacaggaggtgggagtgaggagcccatactcagcctgctgcccaggctgtgcagcgcagctggactctgcatcccagcacctgcctcctctttccgtttctcctgtttattacccatctgtaagctcgccaagatcttacgatgtgtccctctgtcagctgccccctaaacaccgctgtacccatgcaggacccgttatgaagcactgcagcatacgccactatccgttcgtgaacatcccgtcaccatcagttaccgcttccactgcagctaaagccagcctgaccttccgttcctgttagtggttgtgtctgcttaaaagggcatgcctggcccctcgccatgtggagactcagcccacgagctgtaccccgtgattgcatgaaggagcagcattgactggttatacggcggggtcctgcagacagtgg

SEQ ID NO: 494873 - DNA, 269 bp, Homo sapiens
aggcctatttgaattaaacagattttatgaatgtcttgttagctacttttttttttcctgcaaagccttgtggtaagtgtaagcttgcatatgcatcaacatgttaatcacagatagatctgtgcgatttaattgaataatgagttacttcattttgcttacttatacctttaatctttttatccatttttgcctttttaataaaatgaggagatgaacaataatgttcatttgtctttatgtttgccaaccaactgtaatgcatttgg

SEQ ID NO: 494874 - DNA, 181 bp, Homo sapiens
tggctgtctagaggatccctgtaccgcggaataccatactgcacacgccgagacccaaagcgaaatcgccgatcttcacgcgtgaagatcggcgacgaatggtttcatgtgtggaccttcggcgtgtgcatgcacacgacgaatgaccacactgagcagaccaatatcgccgatcttcacg

SEQ ID NO: 494875 - DNA, 128 bp, Homo sapiens
attttatctaacattagtttgtactactttataaatttgccacagtttttgctcacccctgtgacacccggattagtattacagttacaggtcttatcaataggagttcttacagacatttgtaacag

SEQ ID NO: 494876 - DNA, 742 bp, Homo sapiens
taacggctaggtacgaggcctggttggctggtgcggcgccgagtcttcgagcagtgccgggacaccatcatcgcgcgcaccaaggggctctccatcctcacccacgacgtgcagagccagctcaacatgggccgcttcggggaggcggggtgacagcctggtggagctgggcgacctggtggtgtcgctgacctgatgtgctcgtgcccactgcggcctatctggccgctgtgtgccacgccgtggcgcccagcccgcgcagcctgggcctggtgtgacctgctacctgctgtgactgcgatgcctgccacgatggtggagcagtggttgctgcctgtgcttgctgctgccactgccgctggcctgacattgactgcctgcagcttgcttgctcggagtgtgtctgcagtgtgcctgtctgctgcaacctcaatgttcctgactggactgcgtgcgccctgtgccagtgacaatgtcacgggaccgcttttctgctgggagcatgttcaagcttgggcgtcaagtgcatgagcaccagctgctgtcggcgctgctggcctgcgtgctgcgaggtgaagtgtggcgcccagtgagctggctgcgcagccgctgtgcgctcttcagcgggcccctgtgtgcagtgcagtgagcgccctggtaggcttcgccaccgagccgcagttcctgggtcgcgcggcagctgtgagcccgatgggcatggggtgagaccgcatcctggcgg

SEQ ID NO: 494877 - DNA, 229 bp, Homo sapiens
tggtcacttaggaactctgggggaagttgtacgagttgaagattagtccgccatcatcctagtcctcatcgcctcccatccctacgcatccttcacataacagacgaggtcaacgatccctcccttaccatcaaatcaattggccaccaatggtactgagccttaaaattacgcccctcgcgcaaactaatcttcaacatcatacatacattcccacattattcgggga

SEQ ID NO: 494878 - DNA, 137 bp, Homo sapiens
aataatcttaattggataattcgggtcgtctttccagcggggtactgccagtcatgatccccctcggggttatcggcagcaaaaaaaactcgcttgctgtgcttatcatcaatgatgcatcgcttaacgttgtactc

SEQ ID NO: 494879 - DNA, 361 bp, Homo sapiens
ggtcaaccatgtaccctatcgacagatcaggaggattagacacccctacccaacagctctgaccgtcaatgctatccatggttcaggtgccctccccatatgtgtcccaccacatcataggctacacatcgtagtgggcattccgcgatccggccatagtctacaccaacagtcaaacaggaatcgtcccagagtgatgtcggctcactccatagttcacagcatcaggactccgagaaggaagaacgaagagaagaacgccccacataaagaaacctcttaatgcattcatgttgtgtatgaaggagctgagagccaaggtcgtagctctgtgctcgttcgaagatagcgcggccatcaa

SEQ ID NO: 494880 - DNA, 230 bp, Homo sapiens
  misc_feature (229)..(229): n is a, c, g, or t
actcatcaacaaataaaaatagggccagcacagtgctcatactgtatgcagcactttgggagccaagggagatcacgagtagagttcagaccaatatgtgaaacccatctctactaaaataaaaaaaaattatccagcgtgtgtgcacgcgtgtaatcccagctacttaggtgctaaggaggagaatcctttgatcccaggggaagaggttggagtgagtgagatcgcng

SEQ ID NO: 494881 - DNA, 249 bp, Homo sapiens
tgatgaggagggtcatcacctcacccagtagtgcaaggggtcggggaattccctttcctagcaaagggaagccatgacagatggtaccggaaaatagggacactcccaccctaatactgcgcttttccaatggtcttagcaaatagcacaccaagagattatatcctgtgcctggcttggagggtcccacgcccacggaacctcactcactgctagcacagcagtctgagatctctccaaggtcagcag

SEQ ID NO: 494882 - DNA, 614 bp, Homo sapiens
gttccgcattctgaagcctccggagcgcacgtcggagtcggtccctcgtgacgaatcaccgactctctccccagctgtatttccaaaatgtcgctttctaacaagctgacgctggaaagctgacgtaaagggaagcgggtcgtatgagagtcgacttcaatgttcctatgaagaacaacagataacaaacaaccagaggattaaggctgctgtcccaagcatcaaattctgctgtggaccaatggagcaagtcggtagtccttaatgagccacctaggcggcctgatggtgcgcccatgctgacaagtactccttagagccagtggctgtagaactcaaatctctgctgggcaaaggatgtcctgtctgtgagggactgtgtaggcccagaagtggagaaagctgtgccaacccagctgtgggtctgtacatcctgtggagaacctccgtttcatgtggaggacagacgggacgggcacaagatgcttctggaacaaggttaaagccgagcagccaaatagaagctttccgagcttcacttcaagctagggatgtctatgtcatgatgctttgcactgctcacagagccacagttcatggtcggagtcatctgc

SEQ ID NO: 494883 - DNA, 335 bp, Homo sapiens
  misc_feature (14)..(14): n is a, c, g, or t
  misc_feature (63)..(63): n is a, c, g, or t
  misc_feature (77)..(77): n is a, c, g, or t
  misc_feature (95)..(95): n is a, c, g, or t
  misc_feature (101)..(102): n is a, c, g, or t
  misc_feature (118)..(118): n is a, c, g, or t
  misc_feature (123)..(123): n is a, c, g, or t
  misc_feature (137)..(137): n is a, c, g, or t
  misc_feature (142)..(142): n is a, c, g, or t
  misc_feature (152)..(152): n is a, c, g, or t
  misc_feature (172)..(172): n is a, c, g, or t
  misc_feature (185)..(185): n is a, c, g, or t
  misc_feature (233)..(233): n is a, c, g, or t
  misc_feature (241)..(241): n is a, c, g, or t
  misc_feature (245)..(245): n is a, c, g, or t
ggtgtgagctacgngcggttggctttgactgtgggtttggaagaagagcggggtgatgtgcangtagctcctcattntagtattattggctgggngggatnnaaaaaagtgggtttangggtnagggtggttgtcgnatggnacgtgtttangttatatagcagctttaggnttaggaagttctntggtttcactaatttgaggatagtgcaggacctcctccatcctctgcncagctccntttntgtaggcttgtgtcacccacttgttttggtatagtagtacatcagaggtgttgggtaggagggagatggcaagctttatctggctgtgtg

SEQ ID NO: 494884 - DNA, 130 bp, Homo sapiens
ccagctacgtggcggcgccggctcgctgctggtgggcgtgctggaatcgttctcgtccttctgggccagcgcctacaaggaagtgatcgtcttcacctttcattatcccggttctggtctggcgttcgtt

SEQ ID NO: 494885 - DNA, 203 bp, Homo sapiens
  misc_feature (3)..(3): n is a, c, g, or t
ggngacaagttagttaaacttttctcatctctatttgctcatctaaaagaatgaaagggtgggatcggttaatctcaatgatcgcttatagctgtgtaattcattctacaattctactacgtagattatacacacaaggagaaatcaataattcttttctgttgagctcagtgaagttaaaagaaacctactaatatttagtt

SEQ ID NO: 494886 - DNA, 277 bp, Homo sapiens
  misc_feature (73)..(73): n is a, c, g, or t
  misc_feature (142)..(142): n is a, c, g, or t
  misc_feature (144)..(144): n is a, c, g, or t
tcgtcttgcgagggaggggatcacagaatatctcaatgagatgtctgacaaatggaactggaagggcctttgnaaatcactggtccaagacttgcaaatgagggaactgaagagctgaaaatgaaaggacttgcgcaagctngntaaatggcagaacgaaggttaggactgtgatatttctgcaaggaacccacggtctgcaaggaggaagtagcccggctgcgggaactgctgatggctcagggactgtcagcctctgctctgcaaggaacccacg

SEQ ID NO: 494887 - DNA, 142 bp, Homo sapiens
  misc_feature (34)..(34): n is a, c, g, or t
agctatacaccactcagcagaggatagtgaaganaaaaagaagatcttaaaatgtgcgcaacacggcaggcggcatctaaagcagcttctaaacaggagagagatgctcatggaagatgtgggcagtgaggaagaacaagaa

SEQ ID NO: 494888 - DNA, 755 bp, Homo sapiens
atcaccattagctcttgaagtttctctagtttggtctagtgactattctgattcttagtttctaacatgaaccctaactaagacaaagtttgatatattatttattcgtttagagactggccttgtcatgtatgcccaggctgacgtcgggactcctgggctcattcgaatcctcctgcatcgagctagaaactgtacagtagtttcaggattttgaaggtgtgatagtgtagtatgtgtgagtatgctatatattccggtgtgtatatgaaatggagagtatcgttatctgagtggtggttgtcagtaatgctgtcaagtattcgttagagtggtgatcacacatgataacattggtttgaaatttgagcttatgaagaatttcttgactttctacgctatatgatcagttcacgttctcttagcctcaagttttattgctgtctaaattccagaagttcttgactggctataaggattccttcagctttcaaagtattcaatattctgatcatcggagtctggggttctggccaaacgacattgtttggtcaccgccggtaatgttagcgaagagaattgttattggccaagaacatgtctcataccacattcagttttttataagaaaaagttaatggtatgtggttatcctgagttcattagaattcgctttacgttatatttcgtgatggtctttaaagtacagagggcagattgtgggtgtgtaagttggtactgatgattgtatctaa

SEQ ID NO: 494889 - DNA, 327 bp, Homo sapiens
ctgctggtgaaatctagaggatcccgtccactcggtatggatagctagttagagtgtggacacaaagggtctccaaggccccaccagagtagctagatacagagtgtcgatggtgcgtcacaaaccctgagctagacacaggtgctgattggtgtgttacaaaccttgagctaggtacagagtgccgattggtgtatttacaatccctgagctagacaaaaggttcgccacgtccccaccagactcaacccagctggcttcacccactggatcgcgcactggcgaggctaggacactggcgaggctaggacactggcgaggctagga

SEQ ID NO: 494890 - DNA, 180 bp, Homo sapiens
gaccttcgttggaaacgggatttcttcttataatttcttgaaaaaagaattctcagtagcttctttgtgtgtgtgtattcaactcacagagttgaaccttcctttagacagagcagattggaaacactctttttgtggaatttgcaagtggagaattctagcgctttgacgccgtcgacg

SEQ ID NO: 494891 - DNA, 722 bp, Homo sapiens
aatgcgctgacgtactgtgatatcccgttgactgatggtatgcatggtaattagtacatgttagttgagcattccagctagggatgtattctgagcaagggttctgcacgttctgaagcctaacatatactatatcaggaatcagtggagtgctaggcgctcatacatagcgtatataatttttatctatcttagggatagaggccttttaagatacgaacgtaaacacgactcaaggaaataatgtaaacaactatagaggtcagtgtttatacatctttctcctttactaatagcaagggtacatccctaccatcaaaaagtggtatcctgtgcatcgttatccgataacaacggactataaacggacctaagccaggtactctctaaagtgagatatgggaggatgcagtagccggtgctggttgaacccaaatgattagaggtataatcatttccccactaaaatatttagtgttctcattggcccgtggtttactcgagtagagcccttggactagccgaagacagtttagcaaggctgcagccagctctctgcagaagagttaccccaccagccccaactatccgagcctcagacaaggtaagtccctcagagtcagagagctccgacaacatattggtttcccctgttgtctcccgactagtttgaactcttaggtgtgtggatccggaggggacaaggcaacaaccagagtaca

SEQ ID NO: 494892 - DNA, 189 bp, Homo sapiens
ctgtgcaacacggcgaaactgcatttctgctaaataaaaataataaaaaaattagatgggcatggtggtgtgcgcctgcaatcccagccactagggagactcaggcaggagaaccactcgaatctcggaggcggaggttgcaagtagcccaagatcgcaccactacactccagcctgggcaagaaagca

SEQ ID NO: 494893 - DNA, 117 bp, Homo sapiens
acacccatatgttatatacaggctgatgcacatacatcaggactccattcccagcatgcagatgcagtaggcgtaactgttgtgctaattccttgtacctatcgaggacaagaattt

SEQ ID NO: 494894 - DNA, 890 bp, Homo sapiens
gtctcgctcctttgttgggcaagcaggatgtgtcaggaggcgtgatctcagctcactagaaagcgtccgcctcctgggtgcaagcgattctcctgactcttgtctcacgagtagctggggttacaggtgcccgtcactagcagccagctaatttgtaattgggattgtgatatctgtgtagagccaacgttctgtcgtcggatgttgcccacgtggtggtcatcgaactccgtgtgtctcgggcagtgcatcctgaactcaggttcgcgcatatagctgagattggaggtcatgatgccagcatacgctggccgggctcagtgacttgtacacagatacctgctaaactcatgccagtatagaagagtaaccgtatgaataccatgttgggtctatatatactattactgtgtactcaagtgcttacattacattgtgctgatgtttcaactgttgccaaaatttgctcttcaaggagccaatgtttttctactatggctttgcttgggaagaacaaccctagtcacgagatagatacaggcagttggcttgtgctcggggacaatcgttctcccgctgttcccagagcgagtctattgccttggaatcctggggcaatgggaacaacccacggggcagggatcaaaggtagtcccctaggcacaaattcccgcaagtacctggaccactggggcccgcctcatggccgtagatcaggagtgttggcaggcggggtgaccaattgcagaacgctggcggggtcacgccgggcccaatggggatagggaacctgcagcgggggttaaggggcgtaccaaaaaaaaaacgcgggcgacaaaaagcgagacgccaggaggcgaaccgcaacggacggaacccataaagcggac

SEQ ID NO: 494895 - DNA, 199 bp, Homo sapiens
atttttttttaaaaaaaaggggctaagtggggggatttttaaaacccaaaattttaattttttttttttcaaccaggtttaagggccaatctgtgggttttccctttggtgggcccaggcgccctgccccccccgcccttggttggtaccagaactttttttatgatgggattttcatttaaggggcctttaagattga

SEQ ID NO: 494896 - DNA, 158 bp, Homo sapiens
tgtactcctaccaggtcgtgaacggcaaaggcactgcccgcatcgccatatcaggtgtcttcttgtgtacttagacttgccatcacagaaagtgtgttcattcagtatgggctgcacccctacagtggtctacggtgtcttcttttcgggggctgaat

SEQ ID NO: 494897 - DNA, 1174 bp, Homo sapiens
gctttttcgtctgtgctgccaacatgccatccatactgaatgaagaccccggaacacttagggcgtccatcgtgacgccacaggccacggcccgcatatcgcaatgccaccggaacgccagcccaggcggccgcggtacattgctaggtgagtctgcgttcaacacgcgggatcaacttcgactaagatacgcatccgaggctacatttgggaacagttggtatgaagcattagcatttaaatgaggaaccaagagcttcatggcctaagcttgtcatagccttgatcaacattgttgagactcttgagtcgagttagaaacagaccacggggtggaattgcatgcttcagaataccagaatactggaggcatgtctcccgcatcatttgatagtggtgcgactccgaggctaccttactcaccatggtttcctggagcacgaaggcggaaatcgcttcacccaaaaggcatgtgcatgttcaatcggtgttaacgtgctcaaaaattccttcacgcctcggacaggtagtctgtacgcatcacaaaatttcctgaagctggtatgggaggtggttgaccatggtggaacctagggatgcgcttcttacacaggccccaacacttggcacggaggcatgtttgtgcaattctacactatctccccttaacagtgtaacttttcatggcccaattttagaccacccgggatcctttaaacgcgccttctacgttccacttagacagaaggacgaagtagccataatcgcagagagcaatgcagaagaaggtgttcccgacgttaatcagtggtataaagcccttgcgtggatccacgaagggaacactactaattctaagcgcaacagaagcactcagacgtgcgaccgcggataactaagcggtgtggccacaagggagcagatatactagtgatattacattaacacagcttgggatgtacttggacacatctttgcaacactaccgcataattatgaggtccccccggttgtggcaacacttgccgaccattgtgaattgcgacaactaaaatcggtcagcagacggtgaggtaagccaggtagtaccacacacaaggtggacatttttctacgacaaacagcttgggagctcaagcagaggagtgccatattatcctcgtaatcatcctgt

SEQ ID NO: 494898 - DNA, 137 bp, Homo sapiens
cgagctcggcccgtgttaaatgaaagtaatgaaagaatgatactgtaatttcataccataattctcttggaaggaaatttcagtatcattcatttgggattattacagtgagaaagtgtgattaacttttgtaacat

SEQ ID NO: 494899 - DNA, 119 bp, Homo sapiens
gaatgtatggaattgaactgcacggaattgaattgaattgaattgaatggaatgcaatgccatggaatcaatcccgagtgcaatagaatggattcgaattgaatggaatgctatggaat

SEQ ID NO: 494900 - DNA, 294 bp, Homo sapiens
  misc_feature (26)..(26): n is a, c, g, or t
  misc_feature (52)..(52): n is a, c, g, or t
aaccaatggaaggacccccacctggnttccaggagattttcagtaactgganataagtcttctgtgatgattgtgattctcagggactgggaaaagatgcacaaaagttgcttattatactgtgaaaatttgaatcaattaatcaaggctgacagtgacactaatgaaacatgatatcaggaaaaatgtaataagccatctggtaagttttcttaaaggatgttgttaagaagtccatctaaaaacatgtctagacttttttatatccagaaaataaaaccaaaggataatatc

SEQ ID NO: 494901 - DNA, 112 bp, Homo sapiens
gatacgaatcgagccggtacccgccacaacatgcacaggtctctgtttagtaatacatcactgtataccgatcaggaatctgctcccaataaaggaacataaagattttttt

SEQ ID NO: 494902 - DNA, 988 bp, Homo sapiens
  misc_feature (307)..(307): n is a, c, g, or t
cgtacttgtgctatgaacactatgcaatcatcactgaatcttaataactacccttgagggattgcagacgtgtactgatcacatggtacctcctgtttggataggctgtaaataaacgctagatcattgatactgtctgacaaaaatgtgccgacttatgacaccagctctccaattgttgaactgtgtttgaccacaacgagcgttctgatgatacttgcatgatagaaacgcattatgaccgagagatcccgatgtaccatcccctggactgtgtctaagagtgaggaccactccggtgtccatnacaaggcgacagccacaattcgcaaaaagtgcatacgagtcagtgaatgaacccaaggctgctctgcctgggaaagccttgacttctagcgaaaccagcatcacatgaacctccattgatatcactaatattccaggaaaatacttaggttttgaattcaataaaagtgggcatgatgcctagattagtccttatatgctcgctaggcgcaagcataaactcgtccgtggattgtgatgcaaatccatggccaattattaggtttccaagcgaaatggcttgttgtctaggatggtacgaattatggtgcgtacatgcatagggggctggttgagtgtggctaagcttgccgatgcctttgcttacactgattggtgttggggtggctcgttgaagacattagacctgtttgagatgacgcatgtcataatgttcagtatgaaatacccagtgacaaagcaggagtggcgcccaactgggtataaacaaagtaggttttgaggcattatatatgcacgtcttgaagaaggaagctgaaagttcagggtcaggattgggtagcacctggtaagtatctgtagatgaagtagcctttcagaaactgtcctgtgtccaaatcaattgtcacaaggtcttaagggaaagttatggtgaatgctccgattgagagactggatagtg

SEQ ID NO: 494903 - DNA, 216 bp, Homo sapiens
  misc_feature (18)..(18): n is a, c, g, or t
  misc_feature (94)..(94): n is a, c, g, or t
  misc_feature (96)..(96): n is a, c, g, or t
  misc_feature (164)..(164): n is a, c, g, or t
  misc_feature (174)..(174): n is a, c, g, or t
ggcagaccacaggcaggnaagaggcacgtctgggtccctccctccttcctatcggcgactccagatcctggccatgagagctcgcacctccacntntcgccgctctggcccgggctctggcgaagtgctgccgctgctgatggcgcaactctgggccgcagagncggcatgctnccccaaaacgacacgcgcttggacccgaagcctatgggcccc

SEQ ID NO: 494904 - DNA, 208 bp, Homo sapiens
atgagaatcatggtcccacaccgtgcataaaggtaaatatccagtattaaatgttaaaaacgagagggcgagcgaaaacaaattagatgtatgtgtgttttacgtactataagaatgaatgtcttctaaaatcaaaatttcaaacagaaaccttataaaaaggaataaacctgacgtacctagaatgtaatttctgtgcccatttcaa

SEQ ID NO: 494905 - DNA, 186 bp, Homo sapiens
cgccaaactcggatttcactgttgcccctggaacattttagtggtgatacctaaagcctggaaaaaggaggtcttctcgcggccccagaccagtgttctgaagctggcacagtgacttcacatggggcaatggcaccagcacgggcagcagctggcaccttattggccatcaacatgtccctcatc

SEQ ID NO: 494906 - DNA, 158 bp, Homo sapiens
  misc_feature (28)..(29): n is a, c, g, or t
gccacggctccagctcatctgtttgcanntcagaccccgagctgtgcttgtggctgcagctactaactggctgcccacagggacctgtcaccatgcctcactcgtacccagccctttctgctgagcagaagaaggagttgtctgactatgcctcgcgg

SEQ ID NO: 494907 - DNA, 116 bp, Homo sapiens
gcttctagtaagcctctacctgcacgacaacacatagatgacccaccaatcacatgcctatcatatagtaaaaccccagcccatgaccccctgacaggggtcctcttcaggcctcc

SEQ ID NO: 494908 - DNA, 424 bp, Homo sapiens
  misc_feature (44)..(44): n is a, c, g, or t
  misc_feature (80)..(80): n is a, c, g, or t
ggcttgttatttgtaagttatcatgaaaaggtttatattccctnttcttaaaaaaagtgtagaaattttagagccaaaanaaacacaggcaaaaagaagttaaataacttgccggacggtggctcacccctgtaatcccagcactttgggaggccaaagcagggagatcacctgaggtcaggagtttgagaccagacgggccaacatggtgcaacatcgtctttactaaaaatacaaaaacaaaaattagccaggggtggtggtatgcacctgcagtcccagcaacatgggaggctgaacaggagaatcgcttgaacccgcgacagggaggttgtaatgagccaaggtcatgccactgcactccagcctgggagacagagcaagactccatctcaaaaacaaaaacaaaacaaaacaacaacaa

SEQ ID NO: 494909 - DNA, 351 bp, Homo sapiens
cgggcaagctccatctgctgctgctgttctcaaacagcatgtgagccatgttcttctgctccgagtgggctgtcaggagctggtccctgcagggtggacagctggtgactcatgaacagaagctggagctccttctctgctaggctctcttgggtccctttgacatctttggattccatagagtaccttcctagaaacctctccttccagtcactggacaaaagcttctctatggctggcaccaacttctttcaaatatcggttgaagtccagctatctcctggctaacagaggcagactccgagactcctggtctcttgggaactgggggacccatataccctctggaga

SEQ ID NO: 494910 - DNA, 377 bp, Homo sapiens
gactaagggccgtgacgtggtgccgctgagcttggaccccgaccaaaaaaaaaaaaaaaaaaaacaaaaaaaaatttttgggcggcttggccctaaaagtttttaaaaccttttttgggcgcgcgtcgcccaaacaacgtaagggtaagacttgcgctgacaatgcgtgtgtccccaaaggagaaactcccgtcggcacacaactcagcgtcgtgggcatctctccacaccacagcttaaaaaaacccgcgcggggtgggaacccaccagagagtgttcttgagacaacctccacgagatggcggttcccagagagcacatacaggggcgatcttatcaacaacgggtgtgccaacgcgacctacaatactaaatac

SEQ ID NO: 494911 - DNA, 927 bp, Homo sapiens
aagatgatgatgatgaataagtaggttctagcgcagtttttttctttttcttgtctataacagcatttaaccccccgtgtacgacaactcactccttttaaagaacaacaacattgaaatgtcaaggctgctgtcacgcatttgtttttaacactgctacacgtgtctttcttctggctcactagctctaacaccactacctgccactggtcgctctctagcactacgcccgtgctcctggctgcgctactttacaacctacgccacctacacctttgccccgcgccacacgaccatgggcgcccttgctacacctctgccaacctgcgacacatttaacacgccacgcgctctcttagtcgcgttgcaccccgcccccacacattctaccctctcctacctattgcggcgaactgtcctacacctactacactccactcctctcacaatacagctccctcctacactgacacgcctctacttacgcaacactacacattgctgctccttgctccacacctgcaacatcccccaccttctgctcccctacgccacaacaaacacaacacaacaaaaagatttcgaacacttgcatttcagcaaagcaccacttccatgaaaattgctatctcataagttaaacttcccaaaattcctctatcaaatttcacaacaacaaccacacaacaccacacaaacacacaccacccacacacactcaaacacacaactaatacacataccaacaccaaacaataaatcatcaacacactaacacaaaaaacaaaaaatacactctaactaaaacaaataacaatttacacattaactcctactaatatatctatataatactattcacgagcattactactggccttccacttactcatatacaataacacatatctttctcctcacttcacc

SEQ ID NO: 494912 - DNA, 158 bp, Homo sapiens
cttgggtacatgggcacagtgtttcagttgagcattagtatttaaatctgtagacttttaatcctacataatgtccgcggggctcatccaatcagttgaaggctttaagagcaaacagacctacaaagaaaagggaattctggctcaagactgtgctc

SEQ ID NO: 494913 - DNA, 467 bp, Homo sapiens
taaacacagaatcactcgggcaatggtgctggcgagctggccacgggggcaagggccttaccagccctagcctctagcacttctctaagtggccaaaaacaggggtgcatggtggtgtggtctcctttctggatacttagtcatggggaggatattacaaaaaagaaatttaaattggtggttcatagtctttcagaagtaagctcaactttagtcctggtgaacttaatgggggtggataatttgggggtgccagggtgaatggtgtttctcttggcgtggatatagtgttaccagtgggtacctcctataaagcattatgtgccctcaccgtgggttaaaaaaagaacaaacagtggtttgtgggtgaaacgctacgtgaaggtgcctgtgggaaagtgagaaaggtttctaatagagttaaaagtggatttttataaatttctcaaacaaaaaaaaacaaagga

SEQ ID NO: 494914 - DNA, 893 bp, Homo sapiens
tacctctgatcacatatcaggctaacgatagagaaagcattaggtttaagttgagggctaagaactggttgtttaaaggtttaaattgtggaaaagagcattgccttctttaagtgaatgatggtctcacaattcagtgacttgacctaatatttaagaatataaatatattttatttgaaaggctgagtgtggccctcaaacacttgctaaaactgcctagggcaggattcattagggcttgcagacaatgtcacctaaattgctgaatgtactcattataatatgatatctgacaaaggtagtacagcgtttctgagtcatttgggaccaactgcagatggttgtttaaaatgctggttcctgcacacaaattctctatcatactgaagcacatctgtaaaacatatagtaagaataagcttaggcttataagtaatattaaagtttaccaccagtgattccagttgcaactgaaaagttgagaacgaaggcttagtggtacgtcggggtataccaagctaaggatggatagcattataacctgggaaacgttaacaagagaataacagacatatcttgacttcttagttgtagatttatgactgtggatactacggtatggacgaaaaaagtctcccagaataattgtggatgtcacgagtcaatagtatagaactatctatcatagtgaagtgcaatgctaagagatgaagtaacgatgacaaaagctaacacaggaaaacaacatgggaactaaatgcacgacaataaatcggagaggaccacagagacacaacgccagccaaaagcaggaacaccccgaagacacggacaagaacacacaacgcggaaagcaaaggaaagaggaacagaacaacacacacaaaaaag

SEQ ID NO: 494915 - DNA, 257 bp, Homo sapiens
aaccctgggaatggcagccctgggtattgacaatgggcggagtacacatacaatgaggaatgtgttgctgcaaatccaaataggcccactaggcattgtgcccctatctgggttgtagaaggggccaaatgcagcaacgtaaccctcaccttagaaggaatgtctcgacagagcccacaccactggactcctagaaattttactgaggtggaagttccctgaatattaaccacgatttatttcccatcctatggttt

SEQ ID NO: 494916 - DNA, 714 bp, Homo sapiens
ggaccttacgcagccaacgtacaccgggccattatctccatctgctgctgcctcttcatcctcttcctcttcctctcggagctcaccggatttataacgacagaagttgtgaacgagctctatgtcgatgacccagacaaggacagcggtggcaagatcgacgtcagtctgaacatcagtttacccaatctgcactgcgagtgggttgggcttgaccattcaggatgagatgggcaggcacgaagtggggccacaatcgacaatccatgaagatcccgtgaacaatggggcaggctgccgttcgagggggcagttcagcatcaacaaggtccccggcaacttccacgtgtccacacacagtgccacagcccagccaagaacccagacatgacgcatgtcatccacaagctctccttttgggacacgctacaggtccagaacatccacggagctttcaatgctctcgggggagcagacagattcacctcaaacccccgttggcctcccaacgattaccatcctgaagatgggtggccccacggttaatgaggacaacgagtgggcaagcaggggtaactccataaccagtaccacgggtggccaacagggaatacgtcgctacagccaaacgggcgatcatccttgaaatctggttccgtaagaactcaagcccatcaggtcaagtacacagaaagacgggccggtgtacagatc

SEQ ID NO: 494917 - DNA, 930 bp, Homo sapiens
aaaagttatatatattttttccttctgattttaaaagaaatggggccaggcatgatggctcatacctgtaatcccagcactttgggaggcccaggttggtggatcacctgaggtcaggagttcgagacagcctggcaacatggtgaaaccccgtctctactaaaaatacaaaaattacccgggcgtggtgtcacacgcctctaatcccagcgtactcaggagactaaggcaggagaatcgcttgaacccaggaagcgaaggttgcagcgagaccagatcgcatcatccgtactccaggctgggcgacaagaacaaaactctgtctccaaaacaataacaacagcaaaacaaatgaataaacactcattatatctcatttgctttatttatctatatttaacttctattcattatgattattatcttgagacagagtctcattctatcacccaggctggagtgcaatgaggcaatctcgcctcatgcaacctccatctcccgggttcaagcaattctcctgtctcctccaggtagctggggttacaggtgtgcagcacacacctggctaatctctctattttagtggcagactgggtcccatccatgtggccaggctgatctcgaacagcctgacctccagctgaatccgccaacctgagggctcccacacgtgtggggagcccaccggcaccggggatcctagtacgtttcgacaacccagctcggcctggtcgtccacggctgaagtacaagggcggcacacacttgcatcgggaccgacaccctaccacgacccccccacatccacactcccacagacgagtaataggttcaaacgggactgacactaactgcctcgccactaaaaccaagccgcgctaccacctcagaactgacaaccctgacacccaacctacccaccccgctccc

SEQ ID NO: 494918 - DNA, 1117 bp, Homo sapiens
gcgcggtgctgggttctgcggagcagtcaggtcgcaggtgggcatcgcgcacggactgccagcccggggcgaccatgaatcctgcgctgacggggtccgagaggggcgccgcggaccctgtctgagctggtaggctttccgcggaacctcgagggcgcccatgtaacggcggcgagtgggtacggtctaccgtgtctcaaggagggcagtgctggagaaagctgctagcggggggcttgcatgcgagcgtgtggaagcgtgaagactgctgctctccatcaaccctgaactgcagtggcttgtagcatcttcatagggccaaggggccagtgtgagcggcccgggtccgaaagagaggctcaaggctttctgacgccgccattcgaaggtcctgatgcgtagattgcagtcgagagaagcacccgggtgcagtccacaattcgtactttcagcgcgtggtagaccggaagggggtgggcgggcggaagaatcgactttccgggttgcccccgctgggaaagatcccacggggggtggaagatcggctcgcaagcaagtcaagccctcttattgtcccttgtgttcgaactgtttcacaagagaccccaagtcatgggccacttcacaataacacatgttggtcgggtgccccccgggacaaggaagacccttccgggtgagccccgtgagagcgccctcgggatgttcccttaataaccaaggcgtggcaggcctacccagtactttttccctttccaagtgcttaaccccaatcgcaagcctacagtgggttggctttaggagggttcaaggggccgagagtctttccgttttggtgtcccctttctggggcctttgttgggtggggtcaagcggggattgatgtcttccaatttgtttggcaaaggggctgtgaaaagtgcgagtgggaccggtagttggacaggagaagggtagactgtgggagggcattggaaatgggacgttgtgcgggatagccacgatggtgaagggacagtggaatagagaggtatttaaggcaagggggatttaaccgaatagaagaattggcacgtcccttgggagtgggtaccggagaggttgagaagagaagaag

SEQ ID NO: 494919 - DNA, 294 bp, Homo sapiens
attttacgaggtaaacaatttttatcaccgtcagacctgaactgaagactagctgacagacgtgggatttctttgaccatcacggaatcgtggccaagcgcggtggctcacatctgtaatcccaacactttgggaggtcaagatgggcggatggcttgaatccaggtgtttgagatcagcctgggcaacatgacaaaaccctgtttctagtaaaaatacaaaaattaaccaggggcaagccatgaccatgcaccatggcactccagcctaggcgacagagcaggaccctctctc

SEQ ID NO: 494920 - DNA, 890 bp, Homo sapiens
agttgtgtgtgtgagagtagcacaagaaggaaaagacctaggcgggcttttgggaaatccccaatctctttatcgtgtttcaaatgggagtcctccccttcggtttttgcgcatttgttcccccaagacggaccatgtcctccggggattgcccttgtctgtggggaaacccttcgccttggtgggaagacctctcccccctcgcccgggggttttcaccacccgtccgcccgctgcttcttcccgcccgccggaggatcttcctgctcgctgccgtaagcaacaaccatatcttcctgtgtttgcccaacgacctgtgttatcacccccttccgtctctgcggcggggggtttatcaacgtcgcggtcgcccccttggcggtgttattattgtgcgtcgccgccccatgcgaatatttcccggcgctgtgcgtgttccagctcccctccggaggcaccaccgctgggtaatcaggaatctccacgtgtcaggtgacgctgtgacgtttgttttctaagacacgcccgcgctggaggaggctcgatccccccgcttctgccacgtctacccgcggggcgtctatccaccgataaagcaggcgtcttgatgccccctcgtgtccccaatgcgagggatattcattttcgcccggcgctcgcccccctctgaagcccgctccccgggaaggttgtcccctgcgccccccatgctgtgcatccaacaattttgccgggccggcttgtatacgcacccagctttctctcatcacgccttctccacccgcagaccatatcatgccgggggcctctttaatctctcgccagtgcttccatggcccctcaccccccctaccccccgcaagcactcttggcatccccccaacaaaaca

SEQ ID NO: 494921 - DNA, 178 bp, Homo sapiens
gaatcagctcgtaccgttatcagagtaggactttaatcgatcgacagttaccctacggataatagcgcaatcctattctagagtccatatcatcaatagggtttacgacctcgagtatttgatcatgacatctcgatggtgcagccgctattataggttcgtttgttcaacgattaaa

SEQ ID NO: 494922 - DNA, 87 bp, Homo sapiens
gctgaggacactgccgtgtattactgtgcgagaggagaggatatagcagtggctgaccagtacggtatggacgtctggggccaaggg

SEQ ID NO: 494923 - DNA, 210 bp, Homo sapiens
catagtactgttaagtctggaacagggcagttcagcgtgagagagagaaatacagggtattcaaataggacgagggaagtcaaactacgtctctttgcagatgacttagttctatatctaataaacgcatagtctcagcccagaagctccttcagctgataaacttcagcaaagtgtcgggatacacaatcagtatacaacaatcactat

SEQ ID NO: 494924 - DNA, 423 bp, Homo sapiens
aagatgttcccaaacatctgatcttagcaatggctctctgttcctcctcctcggagaggaggggataacacgcatatcatagacatcaacatatctagttcgattaacaaatacatcttgtaattaggaaattaagaggcgtctgactgtgtgctatgcttctgtcctgattgaccctctgctgctgggccaacaaagttaggagcatcttctgccaatcgcagacatagctgagcatacagtgagctatactttggctctactagggcttagtccacaatcagcagtatgaccccttaaaggatgagtttagactctacaccctcatagaggagctcaaggcatagcttgtcaaactttacaggagtaagcttattaagtatgcctctaactatcatgaagattgcatcatgtcgtacttaa

SEQ ID NO: 494925 - DNA, 632 bp, Homo sapiens
  misc_feature (454)..(454): n is a, c, g, or t
atacctactcacggtgcacagtgcatggctcatcctgacatctaccgtgcatagcgcatgacacggaaatgccatcttgcccccatggttgacccccctcatataggggggccacggcacccatcctacgggaactcaatttcccgcacaagagggctactgtgcactgtacgggcccataacacttgagcgtatctaaagtgaactgtatactgcacctggtacgacacagggccgtcccaatttggttgatcgttggaacgagaaaagggccttgtcgcgctgtttgaccacatcgacattatactaaaccatgctaatcactccaaaccactaatcaagctcgctcataccagactccacctatggaagagggaatgtaacaacaacactggcctgccgaatgacaacaatcgggactagggaaaaccggtggctgatcacactttaatcnctctatgaacgcatcccgcttttatacgatcacttaataccaaataggaccttaccattcgccattaccaacagatcctcagcctaagcggctattggaaactgtagacgggaatacttacttaaacctgcgaggaaactggtgtaaatcaactcagtaattaaccggagcgcctgtg

SEQ ID NO: 494926 - DNA, 1049 bp, Homo sapiens
tatgcgaatatgatggcagaggcatttgctctcggacgcccctaaggcggaggaaccggttgctgttgctgtagtgggtgggtgcttccaaacttgggggtacaatgacaccgttggtctggatcagagttgctttgaatagggcggagagatatgcttgatagagtgtgtaggggtattgccccggtggagcaatgttgtcagcctcgtgaggtcactctatgagtcacttgagtcctagtcaataccggttcctcttttgggcagcatgttcaaatatgctgagagaaaaagcggtcttaactagaatgcgatctgactcatccaatcgtggtggctactcgtctatgttaactattggcatcctgtggctatttgaattgggggattaatataggctcctcaacttctcacgtggtaccggcatggcgacttggagcttgttagtgctgtgatatccttatctagtcgactgaactggggttaccagaacctcatttcattaccctgcattgtattagcgccacaggatctttactccgtggtgcacacagctaaactttctcctaccaggaaatgggatccatggatggagtttttaggcggatgaccaccaagggaaaaccagggttgggcacggcctatactacgttgaaaggctgacccttacagctatgggagaggcaatagcccgaaggggggcaagccggggtcacccaggcgttcaacggcctaaggcttatgtttcgacccacgtggagactggcttgttggaatgatgctgacgctaaaatattcagtggcccctgacaggtatggctatggaaagatagggataagggtgcaatctttaaaggagcctcttgtcttcgggaattggcaattagagctgcggggtgagaaagagccccggatagatgatgtcaatctgtacccaagggcaaattgcgaaggattgagaagttacagttatggacgtgctgggtcggggtaaccagaggaagaagtaaaccattgagactattggtgagcgacatagcgacaatacg

SEQ ID NO: 494927 - DNA, 138 bp, Homo sapiens
cttgtgatacctactcttatgacagactcgctggacctcaaactgtacagcttagcaagccaagtcttgtaaaacagacagttaaatctcacacagaaacagatgtagaaacacaacagagagccggaacattaaccc

SEQ ID NO: 494928 - DNA, 1483 bp, Homo sapiens
gcttttctctagattaatgatttttcaatcattagcggtactagacacatcagcctaaagtggcatctggcacattgaatggcatttactgactaatgatcagtctttagctcttccctttgttatatgactttataggcttatgacttgatcaaatttacgtttctactaactggtaacgcggtgcagggtcactagtgcgacacgcgcttctctggcgctttctctacgctacttgcttgcacaaacctgccacacgctatctggcctacttatgatataacttagccccactcaaacttgcgccgaacacacaaacaccatgcaccccacgctgcttctactgctactctcaactgccagatctgcgcacacagcacacaagcgtagcctctgatatgctttcgacctttactgcttcaaacatctgtcctctcgagcgcaattaatccatcctttcctccacacacccttaacgccctgctctttctaaccgcagcgcaaccagcaacagtggccacaaactcctggcctaacctctacgcctcctcattaccaacccacgccgctgtaaaccccattcccaccacgcggcgcgacctatttccctgactctaccaccttccaacatccatttgctaatccaccccaaccctccatcgcgcacccctacctcctggcgctctaaacgggcaccttttctccacatgtgacacatttacacctcaatctccttcgccaacctaacatgtacatctgaacacatcacaacacctagcacccctactaattacaccaacccaacgctctttttactaacttataaaatttagctatcacacactactccctcttccctcaccacccccaactctcaccaccccacctccatcctcactaacctcttgcctacatacactcttaactatgcacacacccctccctttgattcatccggcacaaactcccacacacctccctagtatcaatacgagcatcgatacccaaaacacctcacctacaccactcaccttcctcttcactcttctcttcatccatatcctacatatcaacacccattctccactactctacaacaatcccccttcgcaccatcaccacacaccactatatccggcagaccctcagccatgcaccatccgcgaccactctctctaaagttacacgctgtgtctcgtgaacttaccctcccacatcctcacacccccgaccctagcccgtgcacaacacgtccacatctaaattaaacaaactcgctatatccaatatacatctcatgtctatctatcctccaattcttacgtggccaatatacacaccagattaactaatgcagtctctacatgaaccaactcatctatcaattctaatcactcaataaaaatacctccatctacctaaacctcacaacctacttgcactcctccactccccaatactttttatacccacactcatccat

SEQ ID NO: 494929 - DNA, 251 bp, Homo sapiens
ccttttgcgcctgcgtttggctcccagcttggaacgtcccagccgtgagtcgggtctcactgtgtcatcttcccacgcttgtttcaagagcattttttatgagatgctcccactgttttggaaggagaagcttcccctccgctggaggccccgttttgtgcccgatggccaggccatgtgtatgtgtatgtataaaatagatacatatatgtataaaactaagtaaataaacacatacacccggcacatga

SEQ ID NO: 494930 - DNA, 347 bp, Homo sapiens
  misc_feature (8)..(8): n is a, c, g, or t
  misc_feature (39)..(39): n is a, c, g, or t
  misc_feature (52)..(52): n is a, c, g, or t
  misc_feature (65)..(65): n is a, c, g, or t
  misc_feature (81)..(81): n is a, c, g, or t
  misc_feature (85)..(85): n is a, c, g, or t
  misc_feature (111)..(111): n is a, c, g, or t
  misc_feature (113)..(113): n is a, c, g, or t
  misc_feature (127)..(127): n is a, c, g, or t
  misc_feature (135)..(135): n is a, c, g, or t
  misc_feature (139)..(139): n is a, c, g, or t
  misc_feature (169)..(169): n is a, c, g, or t
  misc_feature (201)..(202): n is a, c, g, or t
  misc_feature (217)..(217): n is a, c, g, or t
  misc_feature (257)..(257): n is a, c, g, or t
  misc_feature (275)..(275): n is a, c, g, or t
  misc_feature (277)..(277): n is a, c, g, or t
  misc_feature (322)..(322): n is a, c, g, or t
tgtatttnggtcatattgccaactggaaagtcaaaattntctaacaactttnagtaagttctttnaagacttagtgctgtntttnatccagtttagaaagtaacttaattntnataccgctactaanacttcganaatntcttctttaatcacattcaatatggttaanagacaacactaattgacattgcgtgggctttnnctccctttgtttaanatgtcatttgttgagcaagagttgtatagtattatctacntacttgaggctgttaatncncattacagtgttttgtaatctatccacggaccatgatgcattgtnttgtgctcaacttgtgttttgtatt

SEQ ID NO: 494931 - DNA, 281 bp, Homo sapiens
  misc_feature (8)..(8): n is a, c, g, or t
  misc_feature (95)..(96): n is a, c, g, or t
  misc_feature (98)..(98): n is a, c, g, or t
  misc_feature (103)..(103): n is a, c, g, or t
  misc_feature (110)..(110): n is a, c, g, or t
  misc_feature (178)..(178): n is a, c, g, or t
  misc_feature (219)..(219): n is a, c, g, or t
  misc_feature (221)..(223): n is a, c, g, or t
ctcgtgcntggttaccatatgtattcatctgttgggatcttgtaaacatgaaaagggctttattttcaaaaattaacttcaaaataagtgtatanncntgcanctgttgntttcctcaacatggctcacaaatttctatcccaaatcttttctgaaggtgaagggtttagttttaacnctgcactgcaacaagttcacttcatatataacggattattntnnntcttttgaggtgaatataatttatattacaatggaaaggttctttaatactaaggatt

SEQ ID NO: 494932 - DNA, 674 bp, Homo sapiens
  misc_feature (136)..(136): n is a, c, g, or t
tgtcctgtgccgcaagcgaactggtgtgctgcggctgcggtgccccgcgggggttagaggtcaccatgctgaggtgtcgcgtggaggacgctgagtttgattctggaccctgtggctgttacccatgtgtcctagntaccctgtgtgctgcctgggctggtgggagctgccaagtttcctttcaaccatgtgtggtgcctgcatgcctcgaagtctcctcctccagtgccgcgcgctggatatgtcgtcctggaaaccagcccatgtctaggcttggatgatgacccacctccttctacgctgctcaaagactaccagaattgtccctgtgaattgagaaggttgatgatgtcgtgaaaatgactcttgtctttggaaattggccaacaatgaaggagatgctaaaaatcaagcaatgaacatgtttatgaaggaagatttgtttgcaaacccagatggacaccagatccctggaggctcgaattatttgccttgtcttgtcaggatccgcagttaatgaagaacacttggagaaacatcgtaatggacaaagcccacaaacgctatctgctaattgagcatttgaccagatgcacacaagatgctcaaaacctccgtaacaccaactatgatttctttgaggaggatatgctggggcctgtgaattgagtacc

SEQ ID NO: 494933 - DNA, 199 bp, Homo sapiens
ggtcagtgtctctacagctgctctcaacccatcatgtctttgttgatacagtttattcatattccttagtattttcttaagtctgaagtcccagagattatatagacacatttatggctctcgatagcattgccaactgttttctaaaagggtgtaaccgtgtcaaatgccactgggggaaaaatcgccacgcaaaacc

SEQ ID NO: 494934 - DNA, 109 bp, Homo sapiens
agactgctccattatcccgtctcatgtcaggatcacttgtgtagaccactatataggcagaagcacaaatctcaataccggaagaaccatcatcataaccattgggttc

SEQ ID NO: 494935 - DNA, 173 bp, Homo sapiens
tctgaagcctgggatttcttgtaatagtggctgaggtgattctttcagtggccaccattctgcttgtgaaaagtacacaccaaataaaaagaagcactcatgataggggaaagaatttgagcagattgaacagctgaaatcagatgatagccatggtatagaatcatcatgtc

SEQ ID NO: 494936 - DNA, 137 bp, Homo sapiens
actgatgcatcgtaacgatcgccgatgcgcttcgataacgagcgctccgtaactgacgccctagaatgtgtttacatctgggatcgcgattttcttttcttggtggcgctgtacggagggctgtacggaggcgtgtt

SEQ ID NO: 494937 - DNA, 251 bp, Homo sapiens
caggcacggctagtctcgcgaacgtgtatccctcgcgaacgtgtgatcccaacgttaaatctcctcttaagtcattcagacctaccaggtatctcatcattttcatttcttgaaagagtcatcattttctttttctttttcttttgagacggagtcgggctctgtcacccaggctggagtgcagtggcatgatctcggctctaccttgtctatatcaaccaacaccttttctgggataacacgttcgcgag

SEQ ID NO: 494938 - DNA, 462 bp, Homo sapiens
acccagtccagcactagcaaaacagagtcggagtgacacgaaggccgggaaggctatgtccacagggggtcttcggcaggtaccaggagttactagagtcactatcgggaaatctaaaaatatcctcttggtcatccaaaacccagatgtctacaagagccctggtacagatacttacctagtttggggggaagccaagatcgaagattaatcccagcaagcacaattagcagctgttgagaaattcacagttcagggtgaagctgtctcaaactttccagaaaacacacagactccaattgtccaagaggagcgtgacgaggaagaggtcgataacccaggtgtagaagtcagggacataacatgggtcatgtcacacgcaaatgtgtcgcaagcaaaggcagtccgagccctgaaaaacacgagtaatgatttggcacctgcgattatggacataccaat

SEQ ID NO: 494939 - DNA, 310 bp, Homo sapiens
  misc_feature (106)..(106): n is a, c, g, or t
  misc_feature (166)..(166): n is a, c, g, or t
  misc_feature (220)..(220): n is a, c, g, or t
  misc_feature (239)..(239): n is a, c, g, or t
  misc_feature (259)..(259): n is a, c, g, or t
tatcttactgtgttctgggatccaggagcctagtttttagaacctcctccaaccaagaccacttcattattccagaagactcactgaaccctttcttatgtacggntttcactactttcccagatcccctgtgtttagatctggcaaaaaaactagtactagccanagaaatatgcaccctggctaaacttagacaattgagtatctgctttccacaggntctttccatttcacagcanccttgcaggccatgtgttanaaatggtgctatacaagatgaaaggagtctgggatcccgagttactgcttg

SEQ ID NO: 494940 - DNA, 112 bp, Homo sapiens
agaaaaactcttggcttgttagaagaaagtatattctttctagaatttgggtgccaggaatatgtgttcatatcccagggcaaacgggtgtgtttttatcttcagacatgaa

SEQ ID NO: 494941 - DNA, 399 bp, Homo sapiens
  misc_feature (9)..(10): n is a, c, g, or t
  misc_feature (16)..(16): n is a, c, g, or t
  misc_feature (24)..(24): n is a, c, g, or t
  misc_feature (60)..(60): n is a, c, g, or t
  misc_feature (235)..(235): n is a, c, g, or t
  misc_feature (341)..(341): n is a, c, g, or t
  misc_feature (373)..(373): n is a, c, g, or t
gtgaagttnngtgttnccttcacntacaaaaaagagaggttttgtttgtttgtttgttcngttgtttgttagctgagtcaggatctggctctgttgcccaggctgaaatgcagtggcaagatcacgcctcactgaggcctcaactcccgaggctcaagcaatattctcccacctcagcctcccaagtagctgggactacagacttgcgccaccacacctgcctaatttttttttnatttctaggagagaagaggtcttggtatgtcgcccaggctgttctcaaattcctgagctcaacggatcctcccacctgggcttcccaaagtgctgggataacaggnatgagccaacctgcccagccagaaaagagagnttttaatgcttatgtgctttatgtga

SEQ ID NO: 494942 - DNA, 267 bp, Homo sapiens
ggggaagatcatttgccaaaaggcagctactgcaagtttttgggttcccttgtactgtaacaacataaaccagcacgcggttcccccccggggccaacctctccccgggccctcaggaaagtgaccagtgacccctggggttaggaaggtggctccagtaaagggttttggctgcctttggggaatgctgccttttgtttgggcctgtaaaattggtttgtgtcctgaccagccccaaaaatatacttccctgccctgaaaaacaga

SEQ ID NO: 494943 - DNA, 135 bp, Homo sapiens
gggtccacagggcgcaaaattcaagttagaaacccttccctttcttgctaggtgtccaaaacccttcgggggggccctttctctccttatggatcccttagaggcacaagcaaatctttttttttccttaaccag

SEQ ID NO: 494944 - DNA, 997 bp, Homo sapiens
  misc_feature (240)..(240): n is a, c, g, or t
caaacttggtggaatggagattccgaaaagagcaagcccaagggaaagtcaatgtctttggccgctaagctcagggttaatggcagaaaccttccatttcagcttgatctgttgactcgaacaatcagaagactagaagaacgatctatgacgaccaccgtaaaatttctactatagtgaatcggcctacgacacgatctgggcacccgagctctctggactgccaagtcagggcatagncctgatggcctgtcaactgtcaccatattgtcattccagcacgggtcaaagtttgccacgtcaatccgagacgtaggacaacccacatcagtcgggaggaacagtcagcatctcagtgaccgcgactagcggcgaacggatccgtgtctcgcggctctttgctcgtattggttagaacatgggcagttcacacgataattgtagacataggtccaatggtatcttctagcttcatagccagcggcaagtacatcattctgagattacgatgatgtgcggaccgcactgtctgctcagtctagcgcatggcctcgagtgtggcttcgcgcagcaaccaactgcgaggaccatccgatcgcattggctagctaccggcaacatatacaaacccccgcggaaagctaacgccttcgcagtcatcgagcggactacaagcgatggcaagggctgcttctagctaacagctttcttgggtacaagtcggagggtctctatgtcaaatagccagaaggcagactaggctctcagaaattttatatgatagcacgagagtcagtgtgacctactgatgacacagcaggagtcctaaagacagtaaacctccagagggatggtggtattgtgcaccattaggatacaggcaaagttggtccccctggattggacaggcagattttcccggcttcaagtgaaagaatggggattggtaaatggcaagattggactattaggttttgaaaacaggttttgagtgaca

SEQ ID NO: 494945 - DNA, 400 bp, Homo sapiens
ctcttgtcatacagaacgtccatggtgtcgcccacatagtacctgagcccatctagctcggtctccagcagcgttcgctcatccgccagccacacggtgttggcaaacctatgtggtgagtggggcaccctggcaggcaggaggaatatctctccgtgccgaatgacctcatcccggtgtttcccatgctgcaggactcggagaaccatgtctccctccagctggtgaaatacctcttcaccctattcgatgtgatagtccttcctggtgttggggcctccgacgaacatgactgtgagctgctcctggtgcatgagcttgttgcagaccgggggctggaaggagcaacggttctccttcacccaggccctcactcacaggcggcgctccatgactgtcc

SEQ ID NO: 494946 - DNA, 915 bp, Homo sapiens
  misc_feature (32)..(32): n is a, c, g, or t
  misc_feature (63)..(63): n is a, c, g, or t
  misc_feature (76)..(76): n is a, c, g, or t
  misc_feature (78)..(78): n is a, c, g, or t
  misc_feature (82)..(82): n is a, c, g, or t
  misc_feature (88)..(88): n is a, c, g, or t
  misc_feature (92)..(92): n is a, c, g, or t
  misc_feature (109)..(109): n is a, c, g, or t
  misc_feature (114)..(114): n is a, c, g, or t
  misc_feature (367)..(367): n is a, c, g, or t
  misc_feature (557)..(557): n is a, c, g, or t
  misc_feature (560)..(560): n is a, c, g, or t
  misc_feature (574)..(574): n is a, c, g, or t
  misc_feature (747)..(747): n is a, c, g, or t
  misc_feature (764)..(764): n is a, c, g, or t
  misc_feature (792)..(792): n is a, c, g, or t
  misc_feature (812)..(812): n is a, c, g, or t
  misc_feature (821)..(821): n is a, c, g, or t
  misc_feature (832)..(832): n is a, c, g, or t
  misc_feature (894)..(894): n is a, c, g, or t
caaaagggaggcaatactcgttaaaactcagncacaggttctccccgctcgttcccactgggnctccacccacatngnattnagcagnagtngcacgaaaaaaaaaaantcctnataaaagatacaagccgagcacaagaacagagaggttggttgacatttgcaaactccgataagatgcagggggcctcgggagacttggcgtttctcccaaagggctccccaacaccattctccttcctcctcgattttctggttgacaaatagttggaaagctcacttcgcttgggaggtgactcgggggaacttgatcgggggaactttcatcctgttaggaactcccgctttccattcctgggtctctgtnttgctccctggagaaggatggatcacggagggggccacagtcagctggggcagcaggtactccctacggcactagtctacagggggaaggacgctctgtgctggcagcggtggctcacgtggcctgtctgcactgtaaccacaggctgggatgtagccaggacttggtctccttggaagacaggtctgangtntggccaatccagtncttcagaccctgtctgaaacttgtatcttacgtgaacttaaagaataaaatgcatttctaccccgatctcgcccccaggactggcacgacaggcccacggcagaatagatcttttcccagttctgatcggtgcgtggaattccagccaccacttctgattcgatttcacagtnatcctgttctctgagtnttttaaagaagccattgtcaccccagtnagtgttccaggagtgggcancagccagtngggtgtgccantctccactccccagcccaggatgcggatggcatggcacccatcatctctccggtgacgtgtnggtacctcctgacttgtagag

SEQ ID NO: 494947 - DNA, 154 bp, Homo sapiens
  misc_feature (36)..(36): n is a, c, g, or t
  misc_feature (126)..(126): n is a, c, g, or t
cgttgttaaacggcggcccgtggattggattttggnggcccttttgaagggctttggcgttgcctgcccgggttcgttagcttgggtccttttgggcggccgccttcttcttcttctttggtgcgngaaggcggccggatgggcccccaatcca

SEQ ID NO: 494948 - DNA, 1255 bp, Homo sapiens
gttttgttttttctttttgtcccttggtttccctatctctaggttgttccgtctcttgtgttgtccttcgtgtttgttcgttgtgttcttgcctttgttctgctttttgtgtgatgttgtccccttgtttttcatttgtgctctcgcttggggttgtgccttcgtggtcgtttctgcactgtgggtccctgcgatgcgttttcttctgatgtatgcttcgtgtttgggcttttctcgtcctgtgccctggtgccgtgcgtccttggcgtgcgttgtcttgttcctggctgtctttcttgtttgtcctcttcctttgtgtgcctctttcttgtcttcgcggtttgtttttattgttcttttatttttgttgttcgttttttctttttttctgtttagctgtgggtcttgtggatgttcctttctggtggtgtctgtcccttctttgctcatgcacctggtattatgtggtatgttcctttatagttcttggtgatttgtcatggggccctgccttttatctaggttgttgtgcctgatctcgttgatgcccctatgtggccttgtcagtgtggttggatatcgccatgatctccgtcagttagtctccatgatgtcatgttctccatgccctcatggtagctccatggattatgtgtaattcgtgttgtgttttagtgtgtgtgtttatgggattcgggtgtgcagtcgttcatgggtccatgtattgtggtgccccctccctctcctctcctctcctatggtgagcccagcgtgggcaccgggccgtctcatgcctgtgttcccagggctgggaggacagtctctggcccttcttaggcttatgcctgcgtcccaagtctattctgtaatgccatgtttgggtctgtgttaataggaatgcatgtgtttttggttctgatttctgcctctgtagtctcaagtggggtgcagcccccagagtctctgtgcattgcttgccaagcgctcctatatgctgttcgccataactgctactacgatgctgcttgccattccaggtgcatgtgcatggccttgcgaatgggtttatctggcgttctgtctctggtgggcttctcactgcatgggtagttgtgttcctgtgtcatagggggagctgttgctccaggacaggatgtctgtcttccctattctgagggtacatgtccttaacgatcgcccggtatagtcagtgctcctcacgatacagcacgggattattgtcatgttccacttc

SEQ ID NO: 494949 - DNA, 766 bp, Homo sapiens
tgggctaaattctttaattttgggttaaaatttccactccaattttaattctggaaaaacagcctcgacaacatatatcgcactcattataaaaagcaaggggttatatcaaaaattattagtataaaatcacgggaaatcgggttgggaaccagaaaaaaatacaaaacagatatagatacatagacacgggacaattttttataataattgggaaaagtgttattttcccctaattctgggtctcctttttcttatagtgcgcatacgagtgttataaattttacaaaaaagtgaaaataaagcactagtattttacaaaagtgaataacaagggtcagggtgtggtgtgttctacattaggctttcagtccactctccatagtggtgtggtcccgtggtacagaatatatccacatccgctccacgcgctcttctattatgaacccccttcccaaatacccaacgccccgtggttcaaccttcaacacataggccttccataataataatcatagcccaccatcaagccataagccgggtatacactacaaatccttcggaatcagggggtggaagccattcaaaccatccaaaaatacggcccctagtgtcgggcgcactggcagaagacatgtagccccaaacaacttctcaaattattgaaggtacctttaagacaatacatataaaacatatcaaatgttcataaataagggggctcctttaaacctctaccaccattaacaaacaaccacaaagaaac

SEQ ID NO: 494950 - DNA, 171 bp, Homo sapiens
aaaatttgtttttggaaataaacaagggactttagtgtattaaaaaaaaaaaagaaagaaaagaagaagccaaaagtctaagctagatttaccacatgctaaaatatttgtatgtcagggactgtgcaattaaacttgaagttacttactggaattcaacaaaaaaaaaaa

SEQ ID NO: 494951 - DNA, 1354 bp, Homo sapiens
  misc_feature (747)..(747): n is a, c, g, or t
gcgggtatgcttcattcgatcggcttgggggcatggtgtctgggagaagagtagcatcagaccctagtgcgacggtcatgtccagtatttatgcaggttgctttgacctgaacccttagctagaatcttaaatgaaagaagctgctaggtaggtatgggtgtgttacgacagtacatcgcgtgcatgtggacctggtagagcatcatgatcttgtgaggcctgcttccctgtacagtgtggctactcatgttgactgctcatatctggtgtctccccgtggtagcagatgctctggatctggatgggagtctagagccagacttgaacacacaattaggttggcatgtctagacttgtttgttgccttggtgcctttgctactcggtactgggccagaaagcatagcatatgatttagacgctgggagcactgtctgacgtagtagtagatccaagtgacagggatggctatctatcgttcacgtgacgttatccttacgttccactctcgacatgtcaatcagtgcactaacgctcgctaataaggagctactacgactggaccctggattggaccactcaagaagccatcctggatgaggttcgttggatattggacatctccttgattgtgcatttattgtggagaaaccatggtagccctaaggattcgttgatctatgctgggttccatatttaatcggactgttggtcaatctgtgggactgactcctagaggagtttccntcctgaatagcgcagtcttgtgattggggacgcccatgtcggggtggaattccagttcacaagatccatccacggcgtaacgttcggttgccccggctctcaggaatgttttaacggaaaaggtgaagttcccgattgctgtggtcatccgtattgtggttaacgccccctgtgttagcgctgtacaggggcaagtgtgttggagacgtaaaaaggggtctgagtgggagcccaggttgcattgtgcgggggcacaaaagggacaaaagcttgaggcaaatagaaatgcgacataggaggacgcgaaccgagcaaacgggaaagagttaaaacagtttatagacagcatagctgtcttctctttctctccaattttctctctcttagttcctgaggccagggcaggagcaagcagaggagcaagaggtgggaaaggagaggaggcaggcaggagcgggagcgccgaagaggggaaagagaagaggaagagaaggaagagagagaagagggaggcagaaggggagaagagggaagaacgagaaagaggcagcgagtgctggtaacagcggagaaggagaaggaaagagcagaggaggagggaagggat

SEQ ID NO: 494952 - DNA, 96 bp, Homo sapiens
cccccccccccccccccccttctcccttttgaagaaccgggaaaaaaaaaatttaaacaaaaaagggggggattgacccccccaaaggggggttta

SEQ ID NO: 494953 - DNA, 945 bp, Homo sapiens
tggggggcggggggggagagaggcgcgggagagaagggggggggggggaggagacactatctcctcctctatcaaaagcgcgcgcgcggggggggggggagagagagacaaacaaaagagagagaggggtgaagaggggggcgccccccgcgcagaagcggggggtgagaggcggggcgcgcgcgcgtccacaaaaaacagacgggggggtgtaagaaaagaggggtgcggggagggacacacaaaaagggggcgggtgagaactctctgtgaggagagagagtagaggggcgccgatatgggcgcgccccgacgagagagagagagagagggcgggggggcggaggtgggtagagaatatactatataagagaggagaggggtgtgtttcggcggcaccacagaaaaaagcgagggcgggagaggcgcggcccggcgcggtgttctccccgaggcgtgtgcagagcccaccccgtagaaaaatagagagtagggagacaatccctcacccagacggggggggagcggcgaggagagggtccgtccgcggcgagagaccacgagcgcgagagggggggagcggaaaagaccaccaccattgcaggggcgcccccgaggggtgtcatccagcgagcgggcggagggggcgacaacaaaaatacacagaagaccgagggcgagggtcatcgaaccccgcaaagggccgcggagacaaaaagaggggggcgcagaggaaacatcaagcggcacccccccaaaaataggcacaagcacagaagccaccagagagacaggaaggaaggggcgcaacacggcaggtcacaaaaccacctaacgcgacacaaagcaggagggaggcccagcccgcccgccacagcgcgcgcacgaagcaacaacgggggggatgaaaaagtgggaaggggggcaggtgaccacccccccccg

SEQ ID NO: 494954 - DNA, 291 bp, Homo sapiens
cttgtactacccacgtgataacactgaatactggacgtgtttatacctgactaccttggacctgaactgaggaaacagcgatatgctgataatgagtagatggtagttaatcactcaggaactgtatagtcgatccagatacacacatctctaagaatagggggtccaaagcataatgctcgtggcatgaacaataagattacgagacagatgtcaggactcttgttggagagcctggatgactaagtgacatatgataggtgggcggcacggatatcatccagcctgcgt

SEQ ID NO: 494955 - DNA, 424 bp, Homo sapiens
ctgagggaccgtcttgtcctctcaaacgtgtcttcctgtgaacactgctgtctgggtccggactgctctagcagaaatgctatcactgtgtcatgaaagttatacttaactagggttaggccagaccaatactcagtgtcatttctacagactcagagtgctataattttagctattcccttttatttctgatgtcattttgttcataggtttctagaccaactggggagattcccgttaaaaagtatgtatactgaaacatagatattagatcatctagtttccaaaattgtgtaataggatttaggcatcaagtatgtgaacagtttatattctgtcatagtacatatctatttttggtatcatttcatttgtttccccttaagaaataaaagctatagtctccagttatctacactgaaac

SEQ ID NO: 494956 - DNA, 207 bp, Homo sapiens
acccctagaggatcccgacgctctctctgtggggcggcgagtcgtccgagggctcccgcacctcgggctgcggcaccagacatgtgggcatcatctcttagtgggccatgtggccagtgaacccttcatgaaaccacctctgcagtcctggagagttgctgtagaagaaggaaaagagaggaagacaacacaacacagagagagcgt

SEQ ID NO: 494957 - DNA, 437 bp, Homo sapiens
cgtcgacggccaacctctggaaatagctttgcccaagccctgagggtgcacaaccaaagagaaaccaccgtgcattggccccggggccagttttgctcagagacatggaaaagaaagagcaatatttttatgtgaagccagatatattattggaaagctaaatatacatgaattaaagaaatgtcacacgttgccggtgggctgctgtgggctgtcccgtttccatactcttcctggaatgtgaggacttgtttcttgcttctgtgcctttagagactgacctggcgtgggctggaagggccagcagagactgtctataaagtcctggctaagacaggcttcagaatgaatacgctcatttaaccaaaatctgccttagaccttttacttcctcctcccgccagacatacccctaagtcgacgcggccgcgaattta

SEQ ID NO: 494958 - DNA, 999 bp, Homo sapiens
  misc_feature (39)..(39): n is a, c, g, or t
tgacaggatacgaggctgggatgttatcagacaggcggngcatcttcgaacttagacttccggaaggactttggcgaggggggcagccattttggggggtgctgatggatacctgcggggtcggctatgttgccctgggggaggccggccccgtggggaacatgactgtggtagactctcctggacaagaggtgctaaatcagcttgatgtcaagacctcttcagaaatgaccagtgcagaggcttccgtagagatgtcattacctacccctttgcctggatttgaggattctcctgatcagaggaggctccctccagagcaggaaagcctctccagactggaacagccagatctttcttcagagatgtcaaaggtctcaaagcctagggcctcaaagcctggccggaagagaggtggtaggacacgaaaaggccccaaaaggccccaacagcctaatcctccatcagccccactggttcctggtctcttagatcaatccaaccctctgtccacccccatgcctaagaaacgaggtcgaaagtccaaggcagagctgctgctgctgaagttgtcaaaagacctagatcggccagaatctcaatctccaaagaggccccctgaggactttgagaccccttctggggaacgaccccgccgaagggctgcccaagtggcacttctgtatcttcaggaactggctgaagagctctcaacagccctgcctgcccctgtgtcctgtcctgagggccccaaggtgagcagccccaccaaaccgaagaagatccggcagccagcagcctgtccaggtgggagaagagggggtgggcccccggatgagacttctcaggtgagccacaagtggaagtgggcgcgggaagcctgactagcgggtgcgaacccaggttttggaaaacacgggagccaggcaacatagccggggggccaggaaatagtggggccacggagcgcagcgaagacacaacgccgcggcggcgtcc

SEQ ID NO: 494959 - DNA, 221 bp, Homo sapiens
  misc_feature (79)..(79): n is a, c, g, or t
  misc_feature (85)..(85): n is a, c, g, or t
gcattgcgttttgagtctcgggacccctgttagagagactatggcgctcaacaagaatcactcgggtgggctttggagngatcgncattttcaccgagagcattctattgtcctatgatcacgtggaactcacattcagtgacatgaagaacgtgccagaagccttggaggggaccatgaaaggcactgggtacgttaccccttgagggggtatgtttctg

SEQ ID NO: 494960 - DNA, 912 bp, Homo sapiens
  misc_feature (39)..(39): n is a, c, g, or t
tgacaggatacgaggctgggatgttatcagacaggcggngcatcttcgaacttagacttccggaaggactttggcgaggggggcagccattttggggggtgctgatggatacctgcggggtcggctatgttgccctgggggaggccggccccgtggggaacatgactgtggtagactctcctggacaagaggtgctaaatcagcttgatgtcaagacctcttcagaaatgaccagtgcagaggcttccgtagagatgtcattacctacccctttgcctggatttgaggattctcctgatcagaggaggctccctccagagcaggaaagcctctccagactggaacagccagatctttcttcagagatgtcaaaggtctcaaagcctagggcctcaaagcctggccggaagagaggtggtaggacacgaaaaggccccaaaaggccccaacagcctaatcctccatcagccccactggttcctggtctcttagatcaatccaaccctctgtccacccccatgcctaagaaacgaggtcgaaagtccaaggcagagctgctgctgctgaagttgtcaaaagacctagatcggccagaatctcaatctccaaagaggccccctgaggactttgagaccccttctggggaacgaccccgccgaagggctgcccaagtgggaatttttgtatttttaaggacttgggttgaggattctcaaaaggcttgcagccctggggcttggtctgaggggccccaggggggagccctacataacgggaaaagtggagctcgtgctgccctgtggaagagtggtgtgcgcccggtcacgtttcttccccggtgcgctcactggacatgtgggcagtgatcactatacgctgtgtgcagaggcatggctctggaggacacgcggg

SEQ ID NO: 494961 - DNA, 610 bp, Homo sapiens
aggcattgaggcagccagcgcagggccttctgctgaggggccagccggagcttgaggaacccgcagataagtttttttctctttgaaggatagagattaatccacctacttaaaaattatagccaataggttactaagatatggctaagcgttaagtttttaacgtaattttaatagcttaggattttaggagaaattatgaggacttagaagagtagcatgaggaaggaaaggataaagggtttctaaaccatgacggaggttgagatgaagcttcttcatggagtaaaaaaggtatttaaaggaaaattgagagaagggactacagagccccgaattattaccattagagggccattgctttaagattaaaaggaaggtgacttaaccagcttaaggtttagttaaaaggttgtaggtgattaaaataattggaaggcgaccttttaaaaggagattaacccgaaggtgattaaaggaccttgaaatccatgacgcagggttgcgccatttaaggcctagttaacgcatttactaaacgcagacgtggaaggattaatggaagtggtaggatgaaccatttggagaagattgaagtttgagtgaattg

SEQ ID NO: 494962 - DNA, 541 bp, Homo sapiens
ttttactaaaaagcactgctctagaggcaagagctctagaactctttaattaaagtgaaataaaatgaaaggctctgtttctcagctgcgctagccacattttaggtgcttggtagctaattggagctagcaactggcatattggggagcacagataatggatcatttccatccccacagaaagttttattggactgtgcggctgtagaatccctctccttcattaatgcttcttctgtttctccagccgagagcagaaacattcatactgggagtttgctgagtggattcctttagcctggaagtggcacttgttatctgagctgtaagttgaagcaacatctctgtagcttaggaagggtgacaccatgaggccgctccctacctgccccaggaggagaagtctccattgttttctgtacaacgtgaagggctacctgaagatggcaccctctaccgaataaacaggtgaagattgcacatccgcccttttttctgattctttcattaattcctttcttcatcccatctttgatttttc

SEQ ID NO: 494963 - DNA, 358 bp, Homo sapiens
ggctcgtgtaccgatgtgatgcatgtagagggaggtcacgctgtggatgtctgcatggaatgcatggccagacagctccgggatccgtctcactgtcaaactcgtgccgaagcctctggatgttggaagacacgcctgaaagccggtatgatcccatccaagccccctgaagcttcgccggtgcattcgttctcataatcgcccacgggcttacatcctcattactattctgcctagcaaactcataactactaacggcgctcacagtcgcatcataagtgcctctctcaaggacttcagactctactcccactaatagctttttgatgacttctagcacgcctcgctgacctcgcct

SEQ ID NO: 494964 - DNA, 204 bp, Homo sapiens
tctagaggcggggtttcaccatgttgcccaggtgggtctcaaactccggggcctcaagtgatctgcctgccttggctcccaaagtgcggggattacaggcatgagccacggcaccgggctaacttttccattttaatcagttatttcccatataaactttacaaaattcactattacatcccatcctcaggggtaccgagctcg

SEQ ID NO: 494965 - DNA, 573 bp, Homo sapiens
gagacctgtcaagaagggagaacctgtgaaggaatattaagagaggggagaggagtaagggagactattccatagggcgggagtttcaaagaggcataagggaatcctgtgaatcaaataccatggagatgttgaggaagctgaacagaaaataggtaacagattttgcattttcgatggaggagtagagcagaaggtgaagaagtcattatagtggttgaaacacaaatcttttaagatgctgatagggcagtgattggagggggaggtattgccaaagaagataaaaactgggaaagagctgtctctgggactttgtccaacctgtagaatttgctcccttatattttcttcaatttgatcctcagaaacagaaaccacactgccgaggaatggctcccaatggcttaccaaatcatatcatggctcctgtttggaagtgcctccatctcaccaaggacttgtgagacttggggacagggggctggggttaataaaggggtggtagaggagtgcaagggcggtattgaagtggggccgtgggaaagagaagcactcatgggtggaataccg

SEQ ID NO: 494966 - DNA, 1703 bp, Homo sapiens
  misc_feature (39)..(39): n is a, c, g, or t
  misc_feature (1470)..(1470): n is a, c, g, or t
  misc_feature (1550)..(1550): n is a, c, g, or t
  misc_feature (1554)..(1554): n is a, c, g, or t
  misc_feature (1581)..(1581): n is a, c, g, or t
tgacaggatacgaggctgggatgttatcagacaggcggngcatcttcgaacttagacttccggaaggactttggcgaggggggcagccattttggggggtgctgatggatacctgcggggtcggctatgttgccctgggggaggccggccccgtggggaacatgactgtggtagactctcctggacaagaggtgctaaatcagcttgatgtcaagacctcttcagaaatgaccagtgcagaggcttccgtagagatgtcattacctacccctttgcctggatttgaggattctcctgatcagaggaggctccctccagagcaggaaagcctctccagactggaacagccagatctttcttcagagatgtcaaaggtctcaaagcctagggcctcaaagcctggccggaagagaggtggtaggacacgaaaaggccccaaaaggccccaacagcctaatcctccatcagccccactggttcctggtctcttagatcaatccaaccctctgtccacccccatgcctaagaaacgaggtcgaaagtccaaggcagagctgctgctgctgaagttgtcaaaagacctagatcggccagaatctcaatctccaaagaggccccctgaggactttgagaccccttctggggaacgaccccgccgaagggctgcccaagtggcacttctgtatcttcaggaactggctgaagagctctcaacagccctgcctgcccctgtgtcctgtcctgagggccccaaggtgagcagccccaccaaaccgaagaagatccggcagccagcagcctgtccaggtgggagaagaggtggatggtgctccacgggatgaagacttttttctccaggttgaggctgaagatgtggaagaaagtgagggcccaagtgagagctcatctgaacctgagcctgtagtgccccgaagcaccccacgaggatctacttcagggaaacagaaaccacactgccgaggaatggctcccaatggcttaccaaatcatatcatggctcctgtttggaagtgcctccatctcaccaaggacttccgagagcagaaacattcatactgggagtttgctgagtggattcctttagcctggaagtggcacttgttatctgagcttgaggccgctccctacctgccccaggaggagaagtctccattgttttctgtacaacgtgaagggctacctgaagatggcaccctctaccgaataaacagatttagctcgatcacagcacatccagagcgctgggatgtgtccttcttcacggggggaccgctctgggctctggactggtgcccagtgccagagggggcaggagcctcgcaatatgtggctcttttctccagccctgacatgaatgagacacacccactgagccagcttcattcgggtcctgggctgctccagctctggggccttgggaccttgcagcaagaaagctgtcctggcaanagggccacttgtctatgggatgcttgtgacaacggtgatctgggacctcaagttctgcccagtggagcatgggaacttcnaggnaccctcggaaggctcctctcctgcccngttgggtctcttggtctggcctgatcagacgggaaacgtagtgctatttcagctctaacaccatccggaggcactgactggtcagaaaacaacaagatgaagatgatggcctgcagtatatc

SEQ ID NO: 494967 - DNA, 1778 bp, Homo sapiens
  misc_feature (39)..(39): n is a, c, g, or t
  misc_feature (1545)..(1545): n is a, c, g, or t
  misc_feature (1625)..(1625): n is a, c, g, or t
  misc_feature (1629)..(1629): n is a, c, g, or t
  misc_feature (1656)..(1656): n is a, c, g, or t
tgacaggatacgaggctgggatgttatcagacaggcggngcatcttcgaacttagacttccggaaggactttggcgaggcttgagtgtgcgtcagaatcccctgaagagcttgttaaaacacaaggtgctggccccatccagaattgctgattcggggcagccattttggggggtgctgatggatacctgcggggtcggctatgttgccctgggggaggccggccccgtggggaacatgactgtggtagactctcctggacaagaggtgctaaatcagcttgatgtcaagacctcttcagaaatgaccagtgcagaggcttccgtagagatgtcattacctacccctttgcctggatttgaggattctcctgatcagaggaggctccctccagagcaggaaagcctctccagactggaacagccagatctttcttcagagatgtcaaaggtctcaaagcctagggcctcaaagcctggccggaagagaggtggtaggacacgaaaaggccccaaaaggccccaacagcctaatcctccatcagccccactggttcctggtctcttagatcaatccaaccctctgtccacccccatgcctaagaaacgaggtcgaaagtccaaggcagagctgctgctgctgaagttgtcaaaagacctagatcggccagaatctcaatctccaaagaggccccctgaggactttgagaccccttctggggaacgaccccgccgaagggctgcccaagtggcacttctgtatcttcaggaactggctgaagagctctcaacagccctgcctgcccctgtgtcctgtcctgagggccccaaggtgagcagccccaccaaaccgaagaagatccggcagccagcagcctgtccaggtgggagaagaggtggatggtgctccacgggatgaagacttttttctccaggttgaggctgaagatgtggaagaaagtgagggcccaagtgagagctcatctgaacctgagcctgtagtgccccgaagcaccccacgaggatctacttcagggaaacagaaaccacactgccgaggaatggctcccaatggcttaccaaatcatatcatggctcctgtttggaagtgcctccatctcaccaaggacttccgagagcagaaacattcatactgggagtttgctgagtggattcctttagcctggaagtggcacttgttatctgagcttgaggccgctccctacctgccccaggaggagaagtctccattgttttctgtacaacgtgaagggctacctgaagatggcaccctctaccgaataaacagatttagctcgatcacagcacatccagagcgctgggatgtgtccttcttcacggggggaccgctctgggctctggactggtgcccagtgccagagggggcaggagcctcgcaatatgtggctcttttctccagccctgacatgaatgagacacacccactgagccagcttcattcgggtcctgggctgctccagctctggggccttgggaccttgcagcaagaaagctgtcctggcaanagggccacttgtctatgggatgcttgtgacaacggtgatctgggacctcaagttctgcccagtggagcatgggaacttcnaggnaccctcggaaggctcctctcctgcccngttgggtctcttggtctggcctgatcagacgggaaacgtagtgctatttcagctctaacaccatccggaggcactgactggtcagaaaacaacaagatgaagatgatggcctgcagtatatc

SEQ ID NO: 494968 - DNA, 162 bp, Homo sapiens
  misc_feature (49)..(49): n is a, c, g, or t
ccccctcataatgtatgcccattgtaactggaagtaagtaacttgcttntgattttacaggctcataggcagaaagaacttgccttgtctcagataagactttggacttggagttttgggtaatgctagaatggattacgactctgggcacacattatggag

SEQ ID NO: 494969 - DNA, 1618 bp, Homo sapiens
  misc_feature (39)..(39): n is a, c, g, or t
  misc_feature (1385)..(1385): n is a, c, g, or t
  misc_feature (1465)..(1465): n is a, c, g, or t
  misc_feature (1469)..(1469): n is a, c, g, or t
  misc_feature (1496)..(1496): n is a, c, g, or t
tgacaggatacgaggctgggatgttatcagacaggcggngcatcttcgaacttagacttccggaaggactttggcgaggggggcagccattttggggggtgctgatggatacctgcggggtcggctatgttgccctgggggaggccggccccgtggggaacatgactgtggtagactctcctggacaagaggtgctaaatcagcttgatgtcaagacctcttcagaaatgaccagtgcagaggcttccgtagagatgtcattacctacccctttgcctggatttgaggattctcctgatcagaggaggctccctccagagcaggaaagcctctccagactggaacagccagatctttcttcagagatgtcaaaggtctcaaagccccactggttcctggtctcttagatcaatccaaccctctgtccacccccatgcctaagaaacgaggtcgaaagtccaaggcagagctgctgctgctgaagttgtcaaaagacctagatcggccagaatctcaatctccaaagaggccccctgaggactttgagaccccttctggggaacgaccccgccgaagggctgcccaagtggcacttctgtatcttcaggaactggctgaagagctctcaacagccctgcctgcccctgtgtcctgtcctgagggccccaaggtgagcagccccaccaaaccgaagaagatccggcagccagcagcctgtccaggtgggagaagaggtggatggtgctccacgggatgaagacttttttctccaggttgaggctgaagatgtggaagaaagtgagggcccaagtgagagctcatctgaacctgagcctgtagtgccccgaagcaccccacgaggatctacttcagggaaacagaaaccacactgccgaggaatggctcccaatggcttaccaaatcatatcatggctcctgtttggaagtgcctccatctcaccaaggacttccgagagcagaaacattcatactgggagtttgctgagtggattcctttagcctggaagtggcacttgttatctgagcttgaggccgctccctacctgccccaggaggagaagtctccattgttttctgtacaacgtgaagggctacctgaagatggcaccctctaccgaataaacagatttagctcgatcacagcacatccagagcgctgggatgtgtccttcttcacggggggaccgctctgggctctggactggtgcccagtgccagagggggcaggagcctcgcaatatgtggctcttttctccagccctgacatgaatgagacacacccactgagccagcttcattcgggtcctgggctgctccagctctggggccttgggaccttgcagcaagaaagctgtcctggcaanagggccacttgtctatgggatgcttgtgacaacggtgatctgggacctcaagttctgcccagtggagcatgggaacttcnaggnaccctcggaaggctcctctcctgcccngttgggtctcttggtctggcctgatcagacgggaaacgtagtgctatttcagctctaacaccatccggaggcactgactggtcagaaaacaacaagatgaagatgatggcctgcagtatatc

SEQ ID NO: 494970 - DNA, 392 bp, Homo sapiens
  misc_feature (90)..(90): n is a, c, g, or t
  misc_feature (219)..(219): n is a, c, g, or t
gcgagctccatgtcaaactcccccaaccagcatcagcagcatgtcgccgtcacccatggtctcgggatcgtcatcgggatcaggaatgtnctcaccgaggaaatcagcgacatcgcgggctatcggccaatcgttggcctgggtcgcgtcggacagaaagacctgcacatttcggccacgcacccggacgatgacgtaaaactggtgatcgatggacancataccgacagccccagcatcaccgggcaaacgcctcagctgggtgatgagctcatcgaagtcattagcgagcatcggttccataggaactgcgacgcgctcaccgtcatcgttgtagagggctactacaaagtcgatctcatcctcgctggcgtcctcgagatcgtcgtcat

SEQ ID NO: 494971 - DNA, 1432 bp, Homo sapiens
  misc_feature (39)..(39): n is a, c, g, or t
  misc_feature (1199)..(1199): n is a, c, g, or t
  misc_feature (1279)..(1279): n is a, c, g, or t
  misc_feature (1283)..(1283): n is a, c, g, or t
  misc_feature (1310)..(1310): n is a, c, g, or t
tgacaggatacgaggctgggatgttatcagacaggcggngcatcttcgaacttagacttccggaaggactttggcgagggatctttcttcagagatgtcaaaggtctcaaagcctagggcctcaaagcctggccggaagagaggtggtaggacacgaaaaggccccaaaaggccccaacagcctaatcctccatcagccccactggttcctggtctcttagatcaatccaaccctctgtccacccccatgcctaagaaacgaggtcgaaagtccaaggcagagctgctgctgctgaagttgtcaaaagacctagatcggccagaatctcaatctccaaagaggccccctgaggactttgagaccccttctggggaacgaccccgccgaagggctgcccaagtggcacttctgtatcttcaggaactggctgaagagctctcaacagccctgcctgcccctgtgtcctgtcctgagggccccaaggtgagcagccccaccaaaccgaagaagatccggcagccagcagcctgtccaggtgggagaagaggtggatggtgctccacgggatgaagacttttttctccaggttgaggctgaagatgtggaagaaagtgagggcccaagtgagagctcatctgaacctgagcctgtagtgccccgaagcaccccacgaggatctacttcagggaaacagaaaccacactgccgaggaatggctcccaatggcttaccaaatcatatcatggctcctgtttggaagtgcctccatctcaccaaggacttccgagagcagaaacattcatactgggagtttgctgagtggattcctttagcctggaagtggcacttgttatctgagcttgaggccgctccctacctgccccaggaggagaagtctccattgttttctgtacaacgtgaagggctacctgaagatggcaccctctaccgaataaacagatttagctcgatcacagcacatccagagcgctgggatgtgtccttcttcacggggggaccgctctgggctctggactggtgcccagtgccagagggggcaggagcctcgcaatatgtggctcttttctccagccctgacatgaatgagacacacccactgagccagcttcattcgggtcctgggctgctccagctctggggccttgggaccttgcagcaagaaagctgtcctggcaanagggccacttgtctatgggatgcttgtgacaacggtgatctgggacctcaagttctgcccagtggagcatgggaacttcnaggnaccctcggaaggctcctctcctgcccngttgggtctcttggtctggcctgatcagacgggaaacgtagtgctatttcagctctaacaccatccggaggcactgactggtcagaaaacaacaagatgaagatgatggcctgcagtatatc

SEQ ID NO: 494972 - DNA, 635 bp, Homo sapiens
tgcagatgaacatagtgcatccggtatcgaccagatcctgtttcatcatgagcagggtcatgaccactgctcagaaacaagtcctgctgacctatgtcactgttggaaatgcttattcttcagggccataaagaaatagcacttgaggccaggcatggtggctcacgcctgtaatcccgcactttgggaggccgaggccggcggatcacgaggtcaggagatcaagaccattctgaccaacatggtgaaacgccgtctctactaaaaatacaaaaaatcagccgggcgtggtggtacatgcctataatcccagctactcgggaggctgaggcaggacaatcgcctgaaccctggaggtggaggctacggtgagccgagatcgtgccattgcactccagcctgggcaacaagagcgagactgtctcaaaaaataataataacctaaaccactaacggtcttttaatttacaaaaatcatctatggctatttttagcagactaaacgaacttcaataataaaccgggccaggcgtggcagctcacgcctgtaatcctagcactttggcaggccaaggcagggggatcacacggtcaggagtttgagaccagactgaccaacatggtgaaccccatct

SEQ ID NO: 494973 - DNA, 363 bp, Homo sapiens
tgctgaggcgatctagaggatcccttggggctccattcatgggttcatagggaggggcatgaggagggactgggtagggggtatggtgtttcttttgggagtgatgaaagtgtctggggataatatagtgggtaatagtggtacaactctgtaaatatactaacaccaatgaatggtacactttagaagagtgaactttatggtatgtaagttgaatctcaattttttaaaaaaagccaaagggctcaccttaaaaaatggatttcctcacttcggtttcaggccacccaagatatttctaaaaatatagaatggtttacaaggatattggacatttataatcctacagcaacaaatactaca

SEQ ID NO: 494974 - DNA, 123 bp, Homo sapiens
ctgtgctaggaatgtgtcaaatatggaaccaaaagaaacacagtaatatgctcctgtatgaagaaaccaagagttagtgccagccccagtgttactgagggttaggccaaaaacagcccattc

SEQ ID NO: 494975 - DNA, 679 bp, Homo sapiens
agcggactcacaggcatggggggttgctcggatccgggactgccgaagggggtgccacagcagtgcctggtagcgtgggctgtgaccttgtcactaaagcagagaaaccagttcttctgggcccacgaggtagctgtcccatgctctgctgaaccacgggtggctgaacatgcctcttgcaattccatcctgtatgctgactccgtacgtgggcctgtggcgactagtcttgcactcgtgtggagactaccttggagtcagaatgaagccagagaaagccattgggtccctgatttgcccgggaccggagacaggtcaccgaatatgagtacctaccattatgatttcctgcacggaaacgagaggcctccaggaaattgcgtagacggaatcatgcacctgaccaggccagcgtctcgtctgatgtgggcgctggaatgctcctgagtctatccattgtgtagcctgctgtaacgggtactactcggcctgtgatgcaggaggggcatgtgcaccagaaggctgagccaaggagactgagctcaagcatggggaacctgtccacggacttcatggcagctactggagtatagcaagaacagtcagagccatgctaagctcagcgggaggctagagaccaatcaagcagtggcccacggaagcaccagaccactccact

SEQ ID NO: 494976 - DNA, 465 bp, Homo sapiens
  misc_feature (56)..(56): n is a, c, g, or t
tccaggccctgtgggcaccaggatgccgctgtcatccagccagtgggctcgtcctntctcggggccttggggtctgccgttcctggctggcgcaccccctctccaggctgggtcctgagtgtccttgtgttacagaggctcccaacctccttctccccaaggctgttcttctcctgaagcaagcctctgaccacagggtcagctgacccccagggttgggtctgggcttggcaggcagcaccctgggtcgctgtggcttgggttccattcccttgggctattgctcgagccccctcatggccctgagccccgctttcccgccaggctcaagaccatcagcctggtgatccgcggcacgcagggggccgaggaggtgctcagggcccacgaggagcagctcaaggaggcccaggccgtgccggccaccctcccggagctcgaggccaccaaggcctctctgaaggt

SEQ ID NO: 494977 - DNA, 130 bp, Homo sapiens
gggtcctggggccagtctgtcctgactcaacctgcctccgtgtctcgggcttcctcggacaagtcggatctacaatcttcctgcaaccggatccaatcaattgacggttaatggtaattactatggttcc

SEQ ID NO: 494978 - DNA, 143 bp, Homo sapiens
tccattgggctgcttcattgtttagttccagtgtcttcatcttgcacgccaggcttatgcggcaggcagcacatgtttccatgttcattcatactcaaccatgcagttcttctcatagggtgcatcagcattggtccccgcca

SEQ ID NO: 494979 - DNA, 528 bp, Homo sapiens
agttcgacggagactctcgtaaggggtgacttacccctataatcccagcacttcgagaggccaaggtgggagtatggctggaggccaggagttcaataccagcctgggcaacatggtgaagccctgcctttaagaaaaaatacaaaaaattacctgggtgtggtgcagtgtacctgtagctcagctacccaagaggctgaggcaggaggattgcttgagcctaggagatcaagactgcagtgagccatgattgcagcactacactccagcctgagtgacagagcaacactctgtctcaaaaaaaaaaaaaaaaagaaaaggtgaaaagtttgaagatgtgaaccggtgggcctctttaggttaaaagaagtccgggagacggagtaggaacacctagtgagatcaagggaaaaccaagattggttatccacctgtggttcacggagaagggttggaccagtttggtcaagtgcggccgataggtcaggtgacttgcagacggagactggaccattggcttgaacaatt

SEQ ID NO: 494980 - DNA, 102 bp, Homo sapiens
tgacaatcgtgacaatccaatcctgaaccacagaggcttgaagttgtcacgattgtcaccaaccacagaggcttgaagtagcagtagttgtcacgattgtca

SEQ ID NO: 494981 - DNA, 138 bp, Homo sapiens
ggcgagaatcgaaactaagctggggtccatggagcctgcacccgcccgatctccgaggccccagcaggaccccgcctgtgctcaggagtcaccatgcctgtagaaccggacggggaaggacggaagttgtggtcaatt

SEQ ID NO: 494982 - DNA, 82 bp, Homo sapiens
cccgaagatgagacgtgtatcattaagatctgcgaataagataaaaggatatatatatataaaatataataataaaaaagtt

SEQ ID NO: 494983 - DNA, 950 bp, Homo sapiens
atagagataaataaatacatagtaccatcgtcgaaccaggacggacaaggagcgtgatgtcggtgtcgtcgcaggtgttttcccagctagtaagcggtggttgtgtcacgctgtgcgacctggtgcgaagtgccatgtgtggataacgctccgcaacaattatcagccttacacatggtgggtacagccgttatgtcacaggctggaacggatcgggccacctcggggctctggagtcgtaatatttcgcggttttagtcagagtccggagcactttaaattgcgttaatccgggcatgtcgacccacgtagtagtgttgtcctgttttacccgtcaggaaacttgatcaccataatggtgggtacacagtgctacagaagtggctccaatgagaggactcagcaccgtggcgggagcacacaaggttcctacgtctaggcgcttcccaacaccctggtggcggtcgcagaggttcgtacagccacccctggacgtcttgcacaagagttgaatcccgcccccccgacgtgggcccgaagaaccccgccgggcagaaacgcggcccccaagggggaagcgggggggccgggactgtgacccccccagggtcagacccccgttacttgcggtcgaaaggtctcacccggcacaacagcgtcacagatgaggatcgctatcataacaggttcaggaaccgtgagatcgcaccgcgctgaggggtaagacgcttcctcagctgatctggcaacaaactctcacacccaccaacgggcacctcactggccttttccatgtcggaggccacgttcaccagaacaaactgtacaataagggcgaggtttttttatattatttgctcgtgctcggagttggggcaatagaaaacccgcagccccgttgtgcttccaggaccacaaaaaaagaaaaaattctcgcaacaaacataaca

SEQ ID NO: 494984 - DNA, 829 bp, Homo sapiens
cgcagtggctcatgcctataatcccagcacttggggggccaaggcgggtggatcacctgaggtcaggagttcgagaccagcctgaccaacatggtgaaaccccatctctactaaaaaaaaatacaaaaattagctgggcgtggtggcgggcacctgtaatcccagctactcaggaagctgaggcaggagaatcgcttgaacctgggagctggaggttgcagtgaaccaagatcacgccatcgcactccagcctgagcgacagagtgagaccttgtctcaaaaaaaaaaaaaacaaaaaaggttcttagatgtgacccaaagggccctatcttataaaattttaaaaccggataatttagaaccccatctcaactaaaagccttaactctatgaaagacccggttaagaggatgaaaagacaggctacgggccaagagaacaattttggcaaacacccaagtgcgacaaagggactgtgtatcttgaaaaacacaagcactcacaaagggcttaatatcttggtaacacaaaccttcagtaatagttaaacgcagggtcttctcagtgatgtaccacattagaggcaaacaccctttcttggctgggcagaatgggtcaaatccctaagtggggatcagctttggaccgttttacctttggacattttcaaaggggtcctgtgagaataatctttaaagaaatcccttaacatgtgacagaatactatttcacctcccccggggacaatcttccctatattgcccttattatgtgcaaacggttggacgtccctaaattcccgcgctggagcatagttaaagtccgttga

SEQ ID NO: 494985 - DNA, 964 bp, Homo sapiens
gcgctcctcctccatggctgaccgctccatccgcactgtctggagtaggcctggtaccatggctggagtctcatggttgatagctttgagtaggaagcgagacaactgctgtcgagcaagaggaaaggaaatccttcgtggtagatagtgatcctacagtgatccataatattgcctaggactatgaggctacgatcgagctgtagcggagaaagcagaggtacattaaattcgtgtacatgctaagaccgtatatgatgggaagtaactctctagcgcttgaagtgtcatgtcagcacatctgccttagacctccccctagcaatgcatatgaatccctaaagcatcctcatctaaggattcattgtttgaggtggtcgaaattaatgtatctggatgatttgggaatatgcctagcagtcatgttactgtcgctctacagtgcatgttcatctgaggtgcccctagggtggccagtatgcattcggaacgtttcaatccatatggttgtgggtggtgctcttgaagatcagaaggatacgtcaagagcaagattagacgacttctgctttagaaactcattgagaagtctgacagggcatcaaggtattagagcattctaaaggggctggttccgtaactctgtacaaatgcttatgggattcaatttgtctttaatgctagaacgttactgcagtcaccagggtgatatgctggggaacttcttttactgagaactagaatcttgctggtataacacgtgctgacaagattatgttcgatacggaaaattcccaagattgtcgttggaagcaatgcacattaggtgcgtctgagagtgagaactgctggtcagacgccgtccagggggacccggtggggaacctcgcggcacgagtttggggaacgggtataaatcagcaaaacagggcggggaaattagttttgtggtggtgctttttct

SEQ ID NO: 494986 - DNA, 374 bp, Homo sapiens
ataaggacaaactacagacacatgcaacatcaatcactctcaaaaacatggaggatccgtcattggaaaaccagaatcacgagtaaatatgtaggctgggcacggtggttcacgcccataatcccagaactttgggagcccaaggtgggtgcattatgaggtcaggagtttgagaccagcctcgccaacatgctgaaactccgtctctaccaaacatacaaaaattagctgggcatggtggcacatgcctgtaatccgagctacttgggaggctgaggcaggagaattgcttgaacccgggagatggaggttacagtgagccgagatcatgacagtgcactccagcctgggtgacagagcgagactctgtctca

SEQ ID NO: 494987 - DNA, 407 bp, Homo sapiens
tatcaaaactattttttgggccagttaatctgtccatttggataaatttgggtggggatgaaaaaaaaaaaaaaaaaaaaaaaaaaaaaaaaaaaaaaaaaaaaaaaaaaaaaaaaaaaaaaaaaaaaaaaaaaaacaagagcaacaaacacataggagcaaacaaagacagaagacagtaccagacgacagaagcagggctcagagcagaaaaggacatgccgggcgagcgaccgaacaccacgagggcgtgagctggagacaaaacagcaggtgcgcaacgactgacggcgacatgcacgagcacgccgacaccaagacagacgcaccgcgcaccgcagcagcagaccaggaggagaggcaagaccgagctcacgagcagcaccgcgcacgagcgcccacaggcc

SEQ ID NO: 494988 - DNA, 177 bp, Homo sapiens
gctcggcgacgagggcctctacacctgctccttcgagacccgccacgagtcgtacacctagcatcagagtctacctcattgtccacgtccctgcccgcataggtgaactatctcgttcgccttgtgacaggtagaatgatggggggcgatgtgaacctggctattgcctggaccgtg

SEQ ID NO: 494989 - DNA, 360 bp, Homo sapiens
gtatgtccctttagaagagggttgtttcagtcggcccagtcactgccatggactcgcgggaaggccatgtcctttctccctcagccccttcccgttccggtttacatctcaggggaaaggccgcggggtctcccagcccgtcaccccgctgggtgtcagccagggctgcacggcgcccttggcctgggcagtctgagacttcctccgctggcttggggatgcgggggtcagcccgggcccgggccaccgcggcgacgcgcgtggcggggggggcagaggttagaccgtgctggaagtccgggtgcgggaagaagggacaggtgcggggagcagagggccgcagccctagcggctctcctt

SEQ ID NO: 494990 - DNA, 602 bp, Homo sapiens
gtggggatgagatttgcatggctgctggtatgcgtgcgagcctgctgacgggagtgtccctggccacggtgaacggccagcctaacgtgagctctggactttgtgggacagctgtcagtggcctagtgcctgcaggacaccatgaatgcaactgccagtcttggaacctgtgatgacaatgcccatgtgaaatgcaacattggtacaccgttgacttgtccctgtgtgacagcccctgtgctctgagtttggccacaggcttgttcagtagtttagccccacatgtttggtaactgccaatgatgagtggaatgtgtcttcattgtatgggggagcaaatccaaacatgaatgcttctcagactgtgcacaccatggatcttgggaaaacaccagtgggacttagatacctgcaagggcctcttgccccgggtatgaacatgctagcttcattccctcctgcacacctgaccgtatctgggtatttggaggtgccaaccaatcaggaacattgaaattgtctaacaagtcctgaatcctgaaaaccaggacgtggaccacgccagaagtgaccatgcccccatcattcccaagaacattcca

SEQ ID NO: 494991 - DNA, 339 bp, Homo sapiens
atcattggataagcagatgaggggtcattggataagcggatgaggggtcattggataagcggatgaggggtcattggataagcggatgaggggtcattggataagcggatgaggggtcattggataagcggatgaggggtcattggataagcggatgaggggtcattggataagcggatgaggggtcattggataagcggatgaggggtcattggataagcggatgaggggtcattggataagcggatgaggggtcattggataagcggatgaggggtcattggataagcggatgaggggtcattgaataagcggatgaggggcggtgggtcattggca

SEQ ID NO: 494992 - DNA, 484 bp, Homo sapiens
  misc_feature (58)..(58): n is a, c, g, or t
ccatctatgggccaatctacccatgggatcccctatggtgggccattcccattgtttnttgatccaaccctgataacattgctcacatgaaggcccaagggagcagctgttaggattggacttccaacacaatgtcggagtacagacctgctgaatgcactgaagacagtaattaatgatcctttgtgagtagaacaatgtttttcactaggtggtatttgtggacagcttctcttgtcaatagtgagcatgagtttcatcctttttataagagagtaatcttgaaagaatttaaatgatataaccaatctgaaatctgctttgtttttatcatctattatttaaaaattgtgtttgaatcccatacatctaatgagtaaccagttagtgaagcaattttctaaacaaaaataattttaaaatgatatagataatataaaaaatacatttcttaaaattttaacatgaatccatagaagaaagg

SEQ ID NO: 494993 - DNA, 788 bp, Homo sapiens
ttttttttttttggggaaggggggacaaggtctctgtcacccaggcgggagtgcaggggtgtgatcacagcttactgcaaccttgagcttctgggctcaagggatcctcccaccacctcattctcccagatggagctcccttccaaaggatcgttcctctcatggcacagccatattacaaagggtttccgtgctcaaggtgagtgtttgggtaagaacttcgcgtgagttccacgtggtggattacagttggtatggactactacgtgtaaattatagctggttgggagggatattagtcattatttaattcatgaccggtagactacaattcgaacttagggtaacctcagctctttagccattacggctatatttcttttccccaagttcacaaacaaactggataagcgtgcgtgggtttaaagcagaaggcacaccgtggtcagaatcttacccttaccctttaattgcggttacagtggcaccgtgagaagttttcacttcagaaccaggggaattttcccttaggaagggctcaacaggtgccagactcagaccagtgcacggctaagggtgaaaccacgcctgacagcgggaccagggattcccgacaaacacatgtgccagcatagttgagggcaataattcgggctccaaaggaatacgaaaacagcccaaccatgttgcccaacttgggaaccattgggtgaagggactagatctaacaatccccttacttcccaaccaaaaccctaaggtggaaaactctaatttatcaccctgcg

SEQ ID NO: 494994 - DNA, 152 bp, Homo sapiens
tcgagctcggtcccttgttaaggttgatttccagccacaagttacaatggcaacagcctgctgtacatgtacaaggtcaggaacctttgactgcttccatgttggcatcatgcccctcctcaagagcaaaagcaaatgttagggtgaacggc

SEQ ID NO: 494995 - DNA, 201 bp, Homo sapiens
accgctctcgtgagactgagcgtggaaacaaatccgacatatccatgaggattcgggtttgatctctggccctgctcagtgggttaaggatccaccattgccttgagctgcagtgtaggtcgaagacgctccttggatcccgagttgttacggctgtggtgtaggtctgtagctgtagtcccatttgactctgagcctggg

SEQ ID NO: 494996 - DNA, 585 bp, Homo sapiens
ttttttttggaagaataatgaacattcaccaggcatttactcgcagccaaacctaacccaacctaccacggttaagaatgtgttataacatgcactcatctacggccgaccatcaaccgagattagatatctggaggatgatccactagaagctcacattcaattaaaggctaggattaatttgtggatcatgctgaccaaaaagtagcgcaaggagaccgatggacacaagtctgtcacacacgagcaaatcctaggtatgcacaaatacgggaaaaaacctgttgtagttgtacgcacgcagacacaagagttaacatgtgaggagctctcagcacatcgagtcgaattgtaaggaatgtacaacaggggacgtaatgttagtccttttaccacactctactaaaagtgcctgagctaggcaggaccccagtgggccatgaaatctatcgcatgcggctacgtggaaccggccacatccaatcccctaagaacccaccggaacataacggactatgagcgagcgctagcaagctctataacgaattatggaggtgccccaggggagcgcactagattgccacc

SEQ ID NO: 494997 - DNA, 733 bp, Homo sapiens
  misc_feature (13)..(13): n is a, c, g, or t
  misc_feature (155)..(155): n is a, c, g, or t
  misc_feature (200)..(200): n is a, c, g, or t
  misc_feature (303)..(303): n is a, c, g, or t
  misc_feature (327)..(327): n is a, c, g, or t
  misc_feature (373)..(373): n is a, c, g, or t
  misc_feature (540)..(540): n is a, c, g, or t
  misc_feature (605)..(605): n is a, c, g, or t
  misc_feature (632)..(632): n is a, c, g, or t
  misc_feature (654)..(654): n is a, c, g, or t
  misc_feature (704)..(704): n is a, c, g, or t
gtaggaaatctcngttttttaaaaaaattgctgttattgtattattatgtcatgggttactctgtgcagcaaagcaaaaatgttcagttgtcctacttctccttgcttttatgtttggctttcagaatgagcagttggtcattatcatgtatttnttaaaatatgaccagttaataagtctgacaaacattttccaaccngtcatttttgaaaaggagaggatatttttgatacagatacacaatatacaaaaaatcccagagcgtgaaatttcaggcatccggggcctacaaataagaaacnaaacattaatccagttagttatcnatgggtataaagaaaaaaagcggcgaatcaatatgccggcgaaaanataaatcattacaaaacacaggcaacttcccccccccattacaaaggagcaaaaaccgagggaaaaatcgagggggcccccaaccaatgaaaacaatatagaccaaggaaatgaccagtcaagtcgagaagagagtaaggcaaaaatgagccactcatattttaggnataagtgacaaatatatttctctttattacttttaagggtttctctaatgtcttttgggagtggnagcattttatttgaatccactgttgcncatgggttgagccccacatacncccctcccctttcacctcaaagggaactcctttgtatgtagccacacacncatcattagtgtgaagatcaggcgggatc

SEQ ID NO: 494998 - DNA, 113 bp, Homo sapiens
ggactcacgctgagactcccccctctgatgctctgtctcctttattttttttggaaatggaagttccactcttgttggcccaggcttgaagttgcaattgccttgactcacag

SEQ ID NO: 494999 - DNA, 329 bp, Homo sapiens
tgagacggaatctcgctctgtcgcccaggctggagtgcagtggcgctatcttggctcactgcaagctccacctcccgggttcacaccattctcctgcctcagcctcccaaagtgctgggattacaggtgtgagccatgcccagcctacaaaaactttaaaaaacagctgggtgtagtgacatactcctgtggtcccagctactcaggaggctgaggcaagagtatcacttgagcccaggaggttgaggctgcagtcaaccgagatcaccccactgcactccagcctgggcaacagagtgataccccctttcaacaaaataaacatgaga

SEQ ID NO: 495000 - DNA, 1025 bp, Homo sapiens
gagttgacccccagagcctccgcagacctcaccggcatgccccctgtctgtccacgccggctgccgcactgcactagatgcccgtgggcgaagaggctgctatgtgctgatgcctgttggtgcagccgactggagtgactgagtcgagtgccgtgggcctccctttgtagtgtgttggtccccgcgtggtagggaccccagtgccgctgactggtcaaggacacacgtgggagcacccaccattctgtgcggtccccagcagccatctcaaccacctatccctgcgactcccttgactgggaagaagccccaagttgtccttgaattcctttttcactttgcatctcttcacgtgcaggctgggaccagcggagacaccgcggcgaatgcagatgagtgcaccggcgcactcagggagctgcctgggctccgtgtctctgagccccagggtggcaggagccaccggcacctctttcttcctctgtcatatggttcctctgtcaccagacacagtgtgcacagaaggaattggaccaggtcacatgtacgtagaaaactggtagaaagagcagacttagataaagcatctcctttggatattcatttccgctttgggcagcaggtgaacatctattataaaaacttctatctacaagaagtccacaacacatcaacactacggttggatgtcatgttcaacagtggcatacatacacgtaaagaatttcctgatcattccactggaccttacttgacatcaggacaaagtccttagcgtgctacgcccttaatcaaggaacccagcgaaccacaacctgaagccggggcaacgagcacccaccggaaagacgcaacaccggcacacaaccaccggcaaacaggtcccaaggccccaacccgacggacaccaccacacgcaccacaaagacagaaaaaccacaacgaacacacccaaacaagaaactacaaacccacacagaccaacccacaacaacaaagaccaagacgagccaaacaaacagaac

SEQ ID NO: 495001 - DNA, 356 bp, Homo sapiens
  misc_feature (32)..(32): n is a, c, g, or t
ttactacctactaaattcgccggccgcgtcgnaccccagatcccttgtcctctggcatctccgcctgcctggcttaggaagagggcagagcattgtcaggttttcctgtcttctcggcctttgagaaaaactactcttcagtgggaagtgttttcctaggctttatttggcggcgtgctggggaacttttaaattactgccttcctttaccgtcacgtaattcttgtattaatgcttcttgtgcaaaaagaaagggaagctgctaccgtgctttattagggctttccaggtggtccaggtttttaaaatcccatttccatagattaacttatgagtaaccgcgtcgacgtcgacgc

SEQ ID NO: 495002 - DNA, 497 bp, Homo sapiens
  misc_feature (392)..(392): n is a, c, g, or t
gtagaatgagtgtcagttaccagaggattaaatgatattagtattgtttagtctttgccaattaccacgggaccttgagaaagccctttaggttctctaggtctcagttttctcatctgttaaaatgggtataatatgaatcatcctatttatatctcaggtttggaaagaagaagaaaaaagagtacttgactaagaacaaaccttggagattatctggggaagcaaaaatatttgaaaaagcttgaagtggtatacaaatgtttaccagtttttaactacctttcttcctcttcagttgatttgtattttcagctttccagcccaccacattgtctaatccctcttgatctccccttgattcctgctttccagttggccaataaaacttntgttgtatggttgatgccttttcatcataagctgattgctcctctctcctttctccttggtttagcataaatctatatttcatctcacctgctcccgaatttcaa

SEQ ID NO: 495003 - DNA, 323 bp, Homo sapiens
acgatgcacagttggaaaggagatatgttaggcgtatctcttttctccgctgcttggtacttccgcttccggtcgtgccatcggagagtctcacgccccctttgtttctaacatggggttgtgatgaacttggtgggggggccctttcttccttcacgtggatgatggcagagccggtcggggatgcttggaagcacggtgcctcgcgtacccttttcctttttgctgatttgctctgatctctcccgccaggtggtttctggcccgtctgttggtagtggggcgcctcatattaacgtgtttggcacatgtttgctaaaagc

SEQ ID NO: 495004 - DNA, 310 bp, Homo sapiens
  misc_feature (42)..(42): n is a, c, g, or t
  misc_feature (59)..(59): n is a, c, g, or t
  misc_feature (76)..(76): n is a, c, g, or t
  misc_feature (251)..(251): n is a, c, g, or t
  misc_feature (260)..(260): n is a, c, g, or t
gaaccccaaaactgtggattataggaacaatattcccctatnagctggcttaccagccntgggtttcttcctggcntagactagctggtcaaccctggtacaggtgccgaacagtagccttggaaactggaatgcagaacactcagctgtgctccaccattgtacagctctccttctcccccgaggatctcaacctggtgttcaccttcccactcatctatactgttttccagctcgtctttgcagcagtnatattaggnatttatgtcacatacaggaaatgttatggaaaaaatgatgctgagtttct

SEQ ID NO: 495005 - DNA, 685 bp, Homo sapiens
agcgggtttttgttgatggagagcgcggcggagagcagagctccgggacccagggtgaccgggaaagcagggcatccccagcggcgggagcagccggcagcagcccaggcccgggactggggtgggggtgggaggggggctgaggggaggacctgaatgttgtgtggcggcagtggcacaagggacccctggagcccgtgacagcatcagagatcaagcatctggcatcaggggatcttcggacccagcaagaaggatcctgctcacagggtgaggtgtcctcccagagcaagccaacgagagattcacgctgccgccccacagtcatggagctgggcacccccgttacgtgacgactgctggcaagcaattagacagggccacgttaaagcggctcgaggtacgtccagtcccacgagtaagcgcgtccggacagggcccgtatgaccccgacttacaagaatctcagtcgtcaaggtcgcgaagtatagccaatgacccaatcgtagaagcagacataggcaacgctccaggaggggtagccaaacattaagcacatcacagacggtcttagtgcccattacttcaagaccgacagtcctggggtacataaggcgaggaatactctggagaggggagcatcgttagagacgggcgaatgcccgcatggtggcacatgacagcg

SEQ ID NO: 495006 - DNA, 321 bp, Homo sapiens
tcacaggccttctcatggcatcatactgtaattctgctcagaaccccaggaggcaggactaacattatcttctgtgtagaccaggggtggagcaactctgtgtgtgtgagtgtatgtgtgtgtgtgtgtgtgtgtgtgtgtgtgtaagtcattcaggacaagttcaaacacttatgtgtgtgtgtgtaggccatatcaggacaagtaaaaacacttatgggatgtgtttacactctcagggtgaatacatttctattgaccttctagagggggataaaagtggtattcgtgcagatcgctgctttctgagtagaacactag

SEQ ID NO: 495007 - DNA, 169 bp, Homo sapiens
tgccaacaccaagattggcccccgcgattccacacagtccgtttgcgggaggtaacaagaaataccgtccactgaggttggacgtggggaatttctactggggacaagagtgttgtactcgtaaacaaggatcatcgatgttgtctacaatgcatctataacgagctgg

SEQ ID NO: 495008 - DNA, 420 bp, Homo sapiens
  misc_feature (388)..(388): n is a, c, g, or t
atgttggctaggatggtcttgatctcctgacggtggcctcccaaagtgctgggatcacaggagttagccactgcgcccagccaccgttgttgatttaaagcctattttgtggatactgattctcctcaacttattatggagttatatccttataaacccattgtaagttgaaactattgtaagtcaaaaatacatttaatacatcgaacctatagaacattgtagcttagcttagccttcaccttaaatgtgctcagaacatttacattagcctacagttggacaaaccatctaatacaaaccctattttataataacatattggacagctcgtgtattttattgtacaccttactgaaagtgacagaatggttatatgagtactcanaatacagtttctatttgtgtgtcacttttgcc

SEQ ID NO: 495009 - DNA, 265 bp, Homo sapiens
ggctcgcctcttcttgcattctgaagtgtcacggggcctccgggcgcttgcgctatgtatctcgtcagtctactccactcgcgacatgaacgcagtactccgcgcgccgcctggtttccactctagacatactgggggtgcccgtggcatgattcctaagatggctcggatattgagcttagtggtgacagaacttcgtgctcgcacggagtcgcggtggttttgcctgttcctatcgttcggtgcggctgctcgtcgaagacga

SEQ ID NO: 495010 - DNA, 114 bp, Homo sapiens
ctattctattcagattactttcctgtgagacccttaaattagaaaagtattatttattttatttgagacagagtttcgcttttgtcactccagcctggagagaaaaaaaaaaaa

SEQ ID NO: 495011 - DNA, 109 bp, Homo sapiens
gccggaccctgcagccgcagagatgttgatggctaaggagaaccggattggcatttatgaacctccttttaaggaggggagtcattgtgtggcaaggaggatgttcaca

SEQ ID NO: 495012 - DNA, 90 bp, Homo sapiens
  misc_feature (52)..(52): n is a, c, g, or t
acatggataggcgtatgcatactacactaaggagaaacaatggtctacacanacgtagtgagaacattatctgtatacgggaactgtgat

SEQ ID NO: 495013 - DNA, 700 bp, Homo sapiens
cagagttatttaaaaatggttaatttgaggagataacatttaaactttgttcctaaatatataataataaaaggatggacttaatttgcaaaaaaaaaaaaaaaaaaaaaaaaaaaaaaaaaaaaaaaaaaaaaaaaaaaaaaaaaaaaatttagaccgcttggacccaaacaattttaaattaaacaaacttaatcatggcgaccgaaattcaagttaattggccaaatcccccttaaagggagccgattaaaatttaatggcccgcgttttaaaaagttcgaaatgggaaaaaccttggggtacccaacttaaatcccttggaagaaaatcccctttcccccggtgggggaaaaagcaaaaagccctaaccgaacggcttttccaaaaagtggcaaacctaaatgggaaatggaaattggaagcgcgaaaaatttggaaaaatttcggaaaaatttttggtaaaaaccctaaatttttaaccaaatgggccaaattggaaaaaccccttaaaactaaaagaattaaccggaataaggttgaggggttttcaaatttggaaaaaaggagcccttttttaaagaaccgggactctcaagtttaaagggctaaaaaaaccggtattaaggggcagaaggcccattttgtgaacaccattcccttaaacaagtttttggggacacagcgcccctgaagctct

SEQ ID NO: 495014 - DNA, 366 bp, Homo sapiens
cttacaaacttacttgtagttaacagcttagctgactacataactatgcgtgacaggtctccttaaaaatgatgatttatgggctggagcacggtgtggctcatgcctgtaatcccagtcgatctttgggaggccgaggtgggcggatcacttgaggttgggagtgcatgaccagcttgatcaacatgaagaaatcctgtctctattacaactacaacagtagccaggcatggtggcgcactgcgtgtaatcccagtctacttgggaggctgaggcaggagaatcgcttgaacctgggaggtagaggttgcagtgagtcgagatggtgccattgctctcgtttgggcaacaagagtgaaacctctt

SEQ ID NO: 495015 - DNA, 701 bp, Homo sapiens
atacttcttgcttccagaatgtgattttaaggaaaagaaaaataaataaataaatttaatacttctgagagacttctgcttctggaaaaaccgaattagatggtagtgagtttcttagttttttgccttatacatctcagacttggaactaaacaagccagcaaccatggtgaagaggctccttattactgctggggtgggggaatgggagttgcagctccctgtgtgacctccctggtacactagtggaggtggcctcattaccactggttaatgttcaaagtcctgactctgttaggcctcctctgaccccatcccaggggcaggggcttggcagggtttggaggccctggtttcctccctggccatctctgacagtattctggcagagacattacagcctccagaggattggttacattaagttggaaataaaatatataaactaaaaaaaagttatatatatgtgatcatatttttcaaggaataaagtagtatgggccgggcgtggtggctcacacctgtaatcccagcacttcgggaggccaaggtgggaggataacttgaggccaggagtttgaaaccagcctgggcaacatagttagaaccccatctctattaaaagaaaaatagtagtatgtaggatcgacaataacatgttgaaagaataagtagcaaattacgggttcagggtaagggac

SEQ ID NO: 495016 - DNA, 145 bp, Homo sapiens
aatagatatatcatcccatagtgataagattatccataggactagccgtacatagggcaaggagaacggtgaagctgcgtgcatacacgtgggaagatacgtcatacacacatgctataccacggagacgatgataccctacaca

SEQ ID NO: 495017 - DNA, 169 bp, Homo sapiens
cccttgggtgggccccccagggccccccccccccccccttggggtttggtcccgggggggggggggggggttccccccccttcccggggggtttccctttgggcccccaaatgggatattttgattaggggggtttagtgcccaaaaaaccccgtttttttccggggta

SEQ ID NO: 495018 - DNA, 281 bp, Homo sapiens
atttgtcaggtcaatgctaatcatgcaaagggttctctgcacgccagcagaggcacttagcacacaagtcacctcaactttaaaccaatgagatatagtttcctacttgatccactcattgaagaaggtgaaggtagcccaggacctgatagaaaatacatttttaatgtagaatattttaaatcttctacatttgactttgggttgtaagattttaaccttgccagttattgcttcttcagtaattatagatagaatgctaacagtgtccgactctgttt

SEQ ID NO: 495019 - DNA, 276 bp, Homo sapiens
ggtggaggtcccgtggtgaactggcctgctggacgtcgtggtgcaggtttgtccccgctgatccccctggtcctgtctggcgaggaaggagcccttgtgctgctggtcctgctgatgctcctgttctcgcgggtctcatggtattggtggacagcgtggtgtggtcggtctgcctggtcggagatgagagagaggcttccctggtctttctggcccctctggtgaacctggcaaacaaggtccctctgtagcaagtggttaacgtggtccccctgg

SEQ ID NO: 495020 - DNA, 271 bp, Homo sapiens
gctcgacagcataacatctacattcttacagagaagtagcggggaggcacaatgtaagcaggagagccgatgattagaaacctaggtctaactcacagcccgtgagctttcctccacgccccgatggctatccccttaaaaaagccagcaaggaggcgagtactcggagggcagaacccacggaatggcggcaccacacagcggccagagcccgtgctcgcgagccaaggacttgtcccgaccccccgtgcctgacggagggcgcacgtct

SEQ ID NO: 495021 - DNA, 105 bp, Homo sapiens
gatcgtttaagagtacttattgtgctctaaattctgttaggtgcttgtcataccttattgatcgttatagtacctcctcttgttgtgtagaaattgaacgggtac

SEQ ID NO: 495022 - DNA, 295 bp, Homo sapiens
cgagaattctggatcctcatggttggttaactgtatggaataatgtgaagggagctgagaatccatctgcccagagcaactatgcaggagcatgcctgaaatggcagctcatatttcttggcctcgtgctttctaggagtcctctcctaaaacagagacgcctccgtcagatacccacaattcttctaactaggcatgccctactttgttgagttcccacgttcgattcgcgagggaaaaaaaatcccaaacggatggaacttgggatgggggaggatcccaattccccattagt

SEQ ID NO: 495023 - DNA, 175 bp, Homo sapiens
  misc_feature (20)..(20): n is a, c, g, or t
  misc_feature (22)..(22): n is a, c, g, or t
  misc_feature (29)..(29): n is a, c, g, or t
  misc_feature (31)..(31): n is a, c, g, or t
  misc_feature (36)..(36): n is a, c, g, or t
  misc_feature (40)..(40): n is a, c, g, or t
tagcatcaagaatcatgcantntgattantngactnaaantatgttgaacttttcagcctccattgtgtattattggtgcaatactctgtgcaactatctcatccaagaccagaaggggctggcagattgcctgcttcacattaaaaccctccttattgtatcgatgctggacga

SEQ ID NO: 495024 - DNA, 1097 bp, Homo sapiens
gcggtcgcaccgcgagcagtagcgaccagggggtggctgccctaccctgcctttggtgtagccagtgcgtgtcctgcgcagtagtcttccgcgtgttgctactagtggtggtatatggtggtgccctttttcatagcgcttgttcgcacgcacgagtgtgcgggtttatggtcgcttctggtgtattcccccgctcgtgtagtgtggtgtgcacctcggtccgtcctcgcgccgcgggtcccccggtgaacgcccgtggtcctggccatccgggcgccagttttcagggagcgcactcaagggcgctatggtgccccttcgttttttccggatgacccctgcccccgctccgcctgagttctctggaacccattggagacccccctgtgggatctgaccctctggaggaagatacccctgtgtctccagctcttgtgagctagagattgaagctttgcccctggataccccgtcctctgtggagacggacctttcctcttcccggaagccatccgaggagccctttcacccctgtcttagagaatggagccggcctggtctcttctacttccttcaatggaggcgtctctcctcaccactggggagattctggtcccccctgccaaaaattctcggaaggagaagaagccaacccggatcacgggcccttaggaaacacgctatgtggaaaggccaaggtccgtgcactgagaagaatgggaaaaagatatgtaccctgcccagccccccttcccccttggcttccttggcccccgttgctgattcctccccgagggtggctctcccacgccctggcctggtgacccgctccctctgcatcccttttccacgcccggctgtccccaaccccccacttcaccacgcctcctcggcctggtaacttgccagaccagtgtggcccaccaccatagcgatcccagaagagatcatcgtgctctcagactctgatttagctgcctccccttctccctgcctcccagaatgtttctgggattaccatttggaggaaggtgggaacccagatgactgaggaagggatggactaagcttatccccttttggtggtgtttccttta

SEQ ID NO: 495025 - DNA, 595 bp, Homo sapiens
actgattcgctacatggactcaaataaaaggtacactactttaaaaacagcatgtatatatgagttttacttaaaaggcaaacatatctatgaatgatagaaatcagaacagtgattaccttgggagggagagattgactgggaacgggtgagacagaccctcctgggggggaggataatggataacagaaacgttttatagtttgctttgtgtggtgatcacagatatatacatgtataaaaatttattgacgtatgtattttctgtaagttaaatttcgcataaataaatataatatagccgggcacggtggctcacagcctgtaatcccagcactttgggaggccaaggtaggcagatcacctgaggttaggagtccaagaccagcctgaccaacatggagaaactctgtctctactaaaaatacaaaattagccgaatgtggtagcgtatgcctgtaatcccagctgctctggaggctgagacaggagaatcgtctggaacgtgggagacagaggttgcagtgagctgagatcacgccagcctgggtgacagagcaggactctgtctcaaagaaaaaaaaaagggggatcc

SEQ ID NO: 495026 - DNA, 333 bp, Homo sapiens
  misc_feature (27)..(27): n is a, c, g, or t
ggaagacctcaataaccaccatcaacnagcaggacctaactgatatttatagaacaccccacccgacaacagtagaatacacatgctttcaagtgaccacaggatgtatctaccaagatagacaataacctgggccataaaacaaacctcaacaacaaatttaagagttgaaatcatacaaagcatgttctcaggtcacaatggagtcaaattaaacatcagtaacggagagataccaagaaacctccaaaggcctggaaactatgcaacccatgtctaaataatccatgggtcaaagaagagctctcaagagaaatacattgaatttaccat

SEQ ID NO: 495027 - DNA, 953 bp, Homo sapiens
atgcccctcattgacataaatattatagtagcatttgagcatctcacttctaggaatactagtatatcgctcacaacctcatatcctccctatatgcctagaaggaatactactatcgctgtccattatagctactctcataaccctcaaaacccactccctcttagccaatatggtgcctatggccatactagtcttggccgctgcgacgacacggtggcgcctagccccttactagttctcaaatctccaacacatatggcctagaactacgttacataaagcctcaaatcctactccaaatgctaaacattaattcgtccccaaaccaattataattaaccttacgacagagacgatgacttttggccagaaaacacacatacgttttggaatcaaaaaaaaccacacccaacaggccttaatttcattgaggccaccatcgcgtcgggcatatgtgtttcaaccacaattccacaaacaaagcctatataagctgtacccccaaagcttgtatgctcggagcacatataagaatgccccatcgtaaatacataattaagggggaatcatagccgtaagaattaaagggacaggccaaggccacactttatccagtgcaccacactattcagatcaaacaacctcgtacctcttcaataataatctgcgtacaaatctcgttattaatacaatcacgagccacgtcatatcatgttatcttttgcgaaaccacatattccacttgttacatcaccggcaggcaccgactgaacgctgagcaggcaatctcgattctcactaggagacgtccctattatgatgaatacccaaagctaggtctaattatataatcaggcagattcatctgacatcatgtgtcacacgtataaacctttaacttgtccacggtacttgaatcgactatgttaaccgatccaaacttttgtaca

SEQ ID NO: 495028 - DNA, 122 bp, Homo sapiens
  misc_feature (3)..(3): n is a, c, g, or t
tcntggcagtcccatcgattggggagattatacccaggtcatccacagtggaggtcggaaaatgttcttggtcgtacccccactctcacaaacggaggggacggggtaccgagcacgaatcc

SEQ ID NO: 495029 - DNA, 158 bp, Homo sapiens
gaagagaggacttttgtggtgggcgaacgagtgacattggctgacatcacagttgtctgcaccctcttgtagctctataagcaggttctagaggccttctttccaccagccctttcccaataccaacctaaaaagggacacaccacggaaagagaagg

SEQ ID NO: 495030 - DNA, 874 bp, Homo sapiens
agcggcttcaaatgaaatgagaaagttagtaaatcattcagcaactatgcagtcttactcaatattaatgtacctctaaggcattagcaatgagaagggcaaataattatggtttggtaaagttaatatttattgaacataatgagaaataatctatatggactagtcatatgaaatagattttattctatttgtgtgcactggagctggaaagccaagactgaaactttatctcttgctgcctgtgataccacattgacataccagaagaatattggaatgatcagttgttagtggcctaggattttatttgcctgttgagacacagccataatagatgttaagtctgtgattcttagacttttcaggtgatagagtacctggaagtcattcataatgatcgttatagaacatcataacatttctacattttcaattctgccatgatagctagtgtatttttaattttcaataaatgtaaccaacttacatgaaggaatgcaatataaaattataatcagtacatttgtccaacgttttcattagtattatcacctacttattcatcagttactaatatttcctgttagaaaagtgaggcaggaattaaagattttttttaagaagcatggaaccaaaacttaaacttgctaaaaattattcattaatcttttctacattaagtgattatccagtttatactgctacaaggcaaaagtctgaggcaagtgttttaagttaacttttaaaggtgcagaagaaaattgaaaatctcatgtgaacgatgtgttaatttcatgcctaaatttcatattttaatatatattttaaacaactggtaatttggttgaaccttggaagaatgcaaaatttt

SEQ ID NO: 495031 - DNA, 1617 bp, Homo sapiens
  misc_feature (1345)..(1345): n is a, c, g, or t
tcatcttgtgaaagaagaggtttctcctgtcgtcccaaaatattggtccccctcttaactgctcgaggagatgcgcgcggcctcttcttctatggagtattttttctcctctacggtgcggtctcccctcactcctttgctcctggcgcccataatcacaccaatgggggtaaaacaatctcgtgggtttatccctaaaagacccccccccaggtggagtttgtaaactctctcgatgaggagagatttgttcgactttgtggatggattcatccccctggttgatattcctgtccggtcggggaaggcctctcccacacccagcccccccccagcttgtcttgagaaacgtttgtgtgtttgcccccctgtgagtgtaagaagttcttcctccccaacagggcgcgggaaaacagccccggggtgttttttgttgtccacaacctgtttcccccctgcagatcgcggcccttggggtgttgccccccccgtccccccccctctcccgtgtgtttttcttttcacggggtctttcttcggccccccccaccgcggagatgtcctttgtggccacagcccactcggtgtggcgcgtggtggagcaaccccccccgggtgtgcccccgccccccgttgcgcgcaaacaccacatttggcgccgcacatgatcttccctctgggggggccccccgtgtagacaacataattcttgtgtgtcgcacagagcgcctttgtgttgtttgtgtgtttctcgcagccatctcttctataggtggtggttcatcatctctgtgtggtgtttttgcgttcttctgcgggtgcctctgtgtgtttatatattgtcgttgttttttttcttggtgggggggatgaaatatcgccctacaatatatcacattgccgtctagacagatatgtctctatatagtagagagagatagagagatatagtgtgtgtctcactataaagagtgctcacaacagctctctctgagactctgtggggcgctaggggtgttttcgcgtctgtgtctctatgtggggtgtgtcccccaccactgctggtgtttccgagatatatggcggccccccccctgtgtcttttcgcgcgcacggcagaggctctgtgtgtttcctctcgcccacacacactctcgggggcgcacaacacaccctcagtagccccgcggagagggcgcctcgcagaggagtgtcccacatcttgtgttgtggcgcccgctcatgagagagtgtgtgtctctgcgccctctgagagagtgtcacacttgtgtgcgcacacaagagagacgcccgcacacacccggcgacgacactgtgtctctgncctctgagagagtgtgtctctgtgtgtctctgtgtgtgtataatacacacaggggaaaacacaggcaccctcgggttttcttttgtttcttttcttcctctttctttcctctggccacacagaagaaagggcttacacacaggcacttggaacacaccacaggtgtggcacacaaccgggctttaacttttggcttaatttataaaagatgagaaagaaaagattaaaaagggttaatttttccttcctctgtaaaatatccccgcctttta

SEQ ID NO: 495032 - DNA, 194 bp, Homo sapiens
gcctcgccagtggcaaggctttcttcctccaccattaccaacaataccgacatcaacagccactcggcttactgtcccgggcttaccagatgacccaaggatatttcaaatgtctttttcttttcttttttttttttttaaaagacagaatctggctcggtcatccaggtgggagtgcacgggcgcggctagga

SEQ ID NO: 495033 - DNA, 713 bp, Homo sapiens
ttgggggggtgggggaaaaaatgtggaaaaaaagtgggcggggggtgcccagggttaaccccccgggaaaattttggtgaaaggccagggattttgaaatattttatctttccaaaaaccggtttcccccccccgggggcccaaaaaaaaacccccccttcccaaatttttttaaaaaacagaaaactggggaaagccccccttccccccgggggggacgggttaaaaaggcggccaaaaaattaaaaaaaaaggggtttccaccccctttttttttttttagggggttttaaaaaaaccgggtggaaaaaagggggggaaaattttggccccccccccgggtttttttttttttttaaaaaaaatttttttccccttgtttgggggcaggcttacccttttaattagaaaaaaaaccctttaaaaagaaccctgggcaaaggggggttttcctttaaaaaaaaaggttccccccgggctttaagggaccccccaaagggaaaccccccccccggggttccctttaaaaaacgggggaactccctctttttcaaaattttttggggggccctttatttttttgggggaagggggttcaaaagaaatttttaaaaaaaaaagggggaaattttttccccggggacccaaaaccccaaaaaaaaagaaagaagaacacaagtcacagttcactgacctgctgaaaaaaagaaaaa

SEQ ID NO: 495034 - DNA, 1153 bp, Homo sapiens
  misc_feature (12)..(12): n is a, c, g, or t
aggatccccttncaaccccacgatcacgaagactccaggcctcccgaaggatgtatctgtggcagagctgctgagggagctgagcctcaccaaggaagaggaactgctgtttctgcagctgccagacaccctccctggccagccacccacccaggacatcaagcctatcaagacagaggtgcagggcgaggacggacaggtggtgctcatcaagcaggagaaagaccgagaagccaaattggcagagaatgcttgtaccctggctgacctgacagagggtcaggttggcaagctactcatccgcaagtctggaagggtgcaactcctcttgggcaaggtgactctggacgtgaccatgggaactgcctgctccttcctgcaggagctggtgtccgtgggccttggagacagtaggacaggggagatgacagtcctgggacacgtgaagcacaaacttgtatgttcccctgattttgaatccctcttggatcacaaacaccggtaaaatgagcaggtggaggaggacggcgcctgtgcccacggctgctgcctgctccagacattttgttcttgaatctgtgagacccagaaggggcccactgagcccactcactccagcctttggcaaccattgttccaggtcccccagggcttcctcccacagcagctgtgaatggcacagtgaccttcctgcagcgtggagatggcacatccttgctgctggggacttggccctgctatttatttttgtatttatgtcttaatctcttccactgatgcatcctccaagggtagatggggagggtctgtgtgaaggggccggcttctcttggtgcctgctgggttgcaggggcaggaagcgtgtggactgcagcttctgctggtgctccccccgtcctcctggaggcagtataggagagagagcaaggattgagtctgagacttaagcactcggtcccagcttgccagttcctggttctgtgtccttggacaaactacctaacctttctgagcctcctatacctcatccgacacaaatggggatgatacctacctccagggttggcgtgaggattcatgggctattatagatgaaaactgcacaaggccagaaccagcaggcactcaataaacgttcatgtcctttttctct

SEQ ID NO: 495035 - DNA, 269 bp, Homo sapiens
aaccgaacaacaaggcaatcctctgtgctgggacgtccctttctgctttgtgtggatttgattcagcgtgaatgatcaccctaggccgagcgccccgcctcacgcctgtaatcccaacaccctctttgaggtgggcggatcatctgaggtcaggagtttaagaccagcctcgccaacatggcgaaacctcatctccaccaaaaatacaaaattagccgggagtggtggtgcacacctgtaatcccagctacttgggtacatattacggt

SEQ ID NO: 495036 - DNA, 342 bp, Homo sapiens
caacggcaccactgatatcttcagagcaaggtacgcattgcccaggctcaaagaaggtgagaggctcagagcgtatgatggccaaaggttgaagtagtgagcttagtggcgtcaagatgataggcgttaatgaagtcaaaaggtaggccaagtggagtagaggaacatctaggtattgaagtggagctaaattcaaagccctctgaagacaggcgaatagcaaaggtgctatttcctagggctctccaggtatagtcgcagcttcagttgacgtatgaggccagctaggagcgattcggcttatataagtagcgatgaacataagaacagacccgaatttct

SEQ ID NO: 495037 - DNA, 1123 bp, Homo sapiens
  misc_feature (14)..(14): n is a, c, g, or t
  misc_feature (61)..(61): n is a, c, g, or t
  misc_feature (66)..(67): n is a, c, g, or t
  misc_feature (72)..(72): n is a, c, g, or t
  misc_feature (74)..(74): n is a, c, g, or t
  misc_feature (83)..(83): n is a, c, g, or t
  misc_feature (87)..(87): n is a, c, g, or t
  misc_feature (89)..(89): n is a, c, g, or t
  misc_feature (91)..(91): n is a, c, g, or t
  misc_feature (98)..(98): n is a, c, g, or t
tgagccctccaagnaccagaaacccagcctcccaagatttttttgaaggctgttaggagtnacctnncaagnanaggactgtntttngngntccaaanacctccctggccagccacccacccaggacatcaagcctatcaagacagaggtgcagggcgaggacggacaggtggtgctcatcaagcaggagaaagaccgagaagccaaattggcagagaatgcttgtaccctggctgacctgacagagggtcaggttggcaagctactcatccgcaagtctggaagggtgcaactcctcttgggcaaggtgactctggacgtgaccatgggaactgcctgctccttcctgcaggagctggtgtccgtgggccttggagacagtaggacaggggagatgacagtcctgggacacgtgaagcacaaacttgtatgttcccctgattttgaatccctcttggatcacaaacaccggtaaaatgagcaggtggaggaggacggcgcctgtgcccacggctgctgcctgctccagacattttgttcttgaatctgtgagacccagaaggggcccactgagcccactcactccagcctttggcaaccattgttccaggtcccccagggcttcctcccacagcagctgtgaatggcacagtgaccttcctgcagcgtggagatggcacatccttgctgctggggacttggccctgctatttatttttgtatttatgtcttaatctcttccactgatgcatcctccaagggtagatggggagggtctgtgtgaaggggccggcttctcttggtgcctgctgggttgcaggggcaggaagcgtgtggactgcagcttctgctggtgctccccccgtcctcctggaggcagtataggagagagagcaaggattgagtctgagacttaagcactcggtcccagcttgccagttcctggttctgtgtccttggacaaactacctaacctttctgagcctcctatacctcatccgacacaaatggggatgatacctacctccagggttggcgtgaggattcatgggctattatagatgaaaactgcacaaggccagaaccagcaggcactcaataaacgttcatgtcctttttctct

SEQ ID NO: 495038 - DNA, 314 bp, Homo sapiens
ggtgtactgctctagaggatcctatggcagagctgatgggacgctgtgatccagcactttggaaggctgagatgggttgatcacctaaggtcaggagttcgagagcagcctgaccaacatggtgaaacctcatctctactaaatacaaaaaattagctgggcatggtggcacatgcctgtaaatcccagctaccttgggaggctgaggcaagagaatcgcttgcacctaggaggcggagtgtttgccagtgagcttcaaacattgctgtcactgcactcctagcctggacagcaatgagcaaaactctgtctca

SEQ ID NO: 495039 - DNA, 1660 bp, Homo sapiens
  misc_feature (28)..(28): n is a, c, g, or t
  misc_feature (32)..(33): n is a, c, g, or t
  misc_feature (39)..(40): n is a, c, g, or t
  misc_feature (43)..(43): n is a, c, g, or t
  misc_feature (48)..(50): n is a, c, g, or t
  misc_feature (773)..(773): n is a, c, g, or t
  misc_feature (1108)..(1108): n is a, c, g, or t
  misc_feature (1206)..(1206): n is a, c, g, or t
  misc_feature (1317)..(1317): n is a, c, g, or t
cggctggtcgcgttgcaggtgaggttgngacnngcgggnnggncgcgnnncaggcaacatgtcggaaggaaacgccgccggcgagcccagcacgccgggagggccccgacctctcctgactggggcccgggggctcatcgggcggcggccggcgcctcccctcacccccggccgccttccctccatccgttccagggacctcaccctcgggggagtcaagaagaaaaccttcaccccaaatatcatcagtcggaagatcaaggaagagcccaaggaagaagtaactgtcaagaaggagaagcgtggagatggcacatccttgctgctggggacttggccctgctatttatttttgtatttatgtcttaatctcttccactgatgcatcctccaagggtagatggggagggtctgtgtgaaggggccggcttctcttggtgcctgctgggttgcaggggcaggaagcgtgtggactgcagcttctgctggtgctccccccgtcctcctggaggcagtataggagagagagcaaggattgagtctgagacttaagcactcggtcccagcttgccagttcctggttctgtgtccttggacaaactacctaacctttctgagcctcctatacctcatccgacacaaatggggatgatacctacctccagggttggcgtgaggattcatgggctattatagatgaaaactgcacaaggccagaaccagcaggcactcaataaacgttcatgtcctttttctctacctgagtctatttncaaacaaaatagagattctaaatctcccagaagcagcgactagagctgctcccgtccccactcttgccccttcctgctttatatcccgtcctcaccctgggcctgatgccctaaatttatggtgtcagatgttctatgcctttttctcctggctcctgttagccaggtgcctcctgtgtgagttactgtaatagctgcaggtaatagaaaggaagaagtcagagacccctcccagcaccctacaaaagccttgggggacatgttgggcccaggacatgttccctgcactctttcctttgcagttagtactcatgtatgagccgaagtcatatatngctaacaaaaaaactaaatccttcataagagaagttagggatgtattgaataatggcctctttgacacttggccgatgatgcccacttcaaaaacttngggtttcagaggcctgcccgtctcctgtcctagcactgccagagccacctactcagtgttactttttgggtctgtgatcctgttccctttaccaggtcattgtactgtgtngtccctggaggaacagcttctcctcttgtcttgacagtagggctgggggtcttcgcaccctggttcagctggagggagacgtgttgcagggttaacgaaaaggtctccctggcggcagcgtgtgtggcgggtcagaccgctgatgggcacaaccttccctttggtggggtcgggggatgctggctctgggaagtttgaacccataggggtccgggaaaacgctaccatcaccaccaatcctgaatcctagggccctgatatgggacacgcatacgagaactttcttaaagcacacgggaacatgagagggggccaaaacacaagcgaaaaggggggagtagaa

SEQ ID NO: 495040 - DNA, 142 bp, Homo sapiens
cacagctactccatacttgtcaaactgcaggggtagcgaacaagttccttataaatgagaaaataggcagccatggggagaaaaatgacaacgcggctttggtattccgtctgacagcagaagcactagagactaaaacaca

SEQ ID NO: 495041 - DNA, 508 bp, Homo sapiens
ccttcaagggctggcagtcttacagaggtctggatgcggtgagaatgagaggccagagggaccatagtgttgggcactgtctgaccatgttgcatttggaaggctaaatggggccatgaagaaggctggatatgggatcatggggtgtgatggcagcctacctggtgtcccctaccccacctgttctcggagaatccaagttgctacacaggaaggttctccaaggtccagtttcctttctcccaccagattggtggacggcttcagggaagaccacgagtcctggacagagatgggtaacaggaaggagtcggggatatacatcaaactatcaatcagctgtgtctctgatttgggagtgattggcggggatggggtgtggagagggttagtttggtatttctcatggccatgattttttttgtttctattcctcttgatatcacatgtgctctgaatcgacgggggacggggtgtaacccggaaactaaagcctccagtctccgcg

SEQ ID NO: 495042 - DNA, 157 bp, Homo sapiens
ccttgaacgtaaaacctgagagctgaagatggaaatgtgaaggcaatcctgctcttaggaggagaatctctgccttctctgcaaagagaaattgtcattttattttttaagggtgattttgccactgggaaaggctgaccacccagcgtcattttcc

SEQ ID NO: 495043 - DNA, 174 bp, Homo sapiens
ggttaaaaaaaaggttttgcagaatcatcccagtaagagcccagtggatgtcttgcaaatatttagagttggcagattgaaaagggtctccttccatgggaaaaaaaaaaatcctgtcttgttcataaattggcaatgtccataaattgaaatatggttccctgtttctcttga

SEQ ID NO: 495044 - DNA, 708 bp, Homo sapiens
gaccatctaagatattcatgtcttttgagatgaggtctcatatctgtcacccagactagagggcaagtggtgcaatcacatgatcaccacatggacttacaaactctctgtgtgcctccgcgaggtagctgcgatcacgggtgtgcacacatatcatgcccagctacatggtgaccttgtaatctatctaattacgtacggacagtggtcttagctgtgttcgcaccaagagatggtctcagaactcctgggctcaggtggtcctcccacgctaagcttccccaaatactggggattatagtgtgtgagccactgtgccccaagggcgttgtccttcaggactaactttgcaacgtgtcgtggcgaacggacttttggcacaacgcgtgtcgcacataacggaacatatggtcattccccaaggcacgatggggcgtagtacgccacgcgttggaaaactaaccacttaggggtttcaaatatacagatgagagaaaaaagggggtggtgctagcacaagcagataacactgtctgcgcgagcagtttgcgctgtgcagatgaaccgtggtataagtacacacagatatagctacacggggagatggcacccacaaggtaaagagaacgcgcatgtatgatttgcagcgctctaagcaaaagtgtagagagaaacccatgtggcagggtggtaggcagtggaacccga

SEQ ID NO: 495045 - DNA, 410 bp, Homo sapiens
ccgttaggaataggaggagaataggggatagttatgaacctgagggtgttttctcgtgtgaatgagggttttatgtcgttaatgtggtggttgagtgagccccattgtgtatgatggtcaatatgtagagggagtatagggctgtgactagtatgtcgactcctgtcactaggagagtgatatctgatcaggagaacgtggttactaccacaagagttctcccagtcggtcactagtgcggcggtaaggcgaggttagcgcggctagctacacgtcatcacaaagctattagtgggagtagactttgaagtccttgagagaggattatgatgcgactgtaagtgcgttcgtagtctgagtcggctaggccgcccctctcctgaggatgtaagccccgtggcgcgatcatg

SEQ ID NO: 495046 - DNA, 907 bp, Homo sapiens
gggtatttgaatgtttttcttttctcaccttatcctagaacttgaggctgggcgcggtggctcatccctgtaatctcagcacttgggaggccaaatgggcagatcacttgaggtcaggagttcgagaccagcctggcaacatggtgaaaccccatttctactaaaaatacaaaaattagccaggcgtggtggtgcacgcctgtagtcccagccaatcagtaggctgaggcacgagaatcgcttgaacccaggaggccaaggctgcagtgagccacgatgcaccactgcactctaacctgagcaacacagactccatctcaaaaaaaaaaaaagcaaaaggatcttgggaatgcggccgcccatattataactagtgggagcaggacgcgacataattttgccagtgacgctcatataaagacttgactggaggtatgaccaaggggcaacctttatctggtgggccaagaaaccatcaccaggggcatcactaacgagggggtgaaactacaccaccatggtccagaggggggcgggtactagccccccattaaaacaaggttcggtggtaccagaggctcaacaccaaagggcatacttgatcccagatgtaatgccccacacattgccccgggtcccaaacggctggcagtacacaatgccctggggaattccttgccaccaccgtgggagactacagtcggacatgtgacctggtagaacatcattaaggggcatacgcaaacaaccaccaactaggaacactagccttggcgaaaacggaagcacctaaggtccacgaagacggcccggataccatgaagaaacccctgtcagtcttacgaacacatggagcccagaatgcagtagcagacagaatgcacttgcagacgccgtctcaaggcga

SEQ ID NO: 495047 - DNA, 276 bp, Homo sapiens
cctggtacgggagtggacggtaatggcaatgtcgtcatggcagcggagaaaccggagaaaatcagccgctccacttggtacggctgtctgacggttctgagtacaaggttacgccatggcatgaatttgtcctggttgatggatctaagcgacaagctaaagacctacaacccggcgacgaactaatgcctcccaagggcgtggagggtgcttttggtaccctacacgacccggataaggcgtatgtggacgctaaggctcccactcccgtaccag

SEQ ID NO: 495048 - DNA, 347 bp, Homo sapiens
tgggttctgccactaatttgccatgtgacctaggcccagctgtcattttcctcatctagaaatgataggctgggtgtggtggctcacacctgtaatcccagcactttgggaggctgaggcgggtgggtcacctgaggtcaggagtttgagacccgcctagccaacatggtgaaaccccgtctctactaaaaatacaaaacttagccaggtttggtggcacacgcctgtaatctcagctacttgggaggctgaggcaggagaatcgcttgaacccaggaggtggaggttgcagtgagccgagatgacaccactgcactccagcctgggtgatagaacaagactgtctc

SEQ ID NO: 495049 - DNA, 361 bp, Homo sapiens
  misc_feature (197)..(197): n is a, c, g, or t
ctcatggaagaatgtggggtcagggacagtggcgggaggagctggctcaccaccctgtggacaatcacggcttataatttgtgattctgtggctttgtctaaagtcctaaagcacttgatatccagtctcacagactgctcacaacagtccacaaggctggtggggagtgcttcttttgaatgatatactaacgacnaaaataatagaagtgaacattctttgcaatgttcaagcagctagacacacttaagaccattaagaaagccaagaaataagacccagacaaggtgggcagaagttggaaggcaggagacaggtgtgaggaggtgggcctttctgatctgccagcccatctctcct

SEQ ID NO: 495050 - DNA, 728 bp, Homo sapiens
ccccactttgtggggggcagagcctttttggtggtcctgtgcccccacaatgtcttgtcgcctcctggttgcggccccgtcctttgatccccgcctgtttttgtccgtgtacgccaccgggtcaacgggtcctttggtttgctgacttggccgcatcctctcgcctttaagtgatcgccatgaggttggatgcagcaagagtccctgtttgcctctcgtggtcgccaccccacatcagttggtatggactactctcctcttgtgggtggtgtgccccacacacccctctgttagagagtaatgcccgaccccccacaatagtgctgttattccaaagaagcgtaaaaatttttctcttatttctctgagaactcatgattatcaaagcaccctcatgccacgttgctataaaatttctccctgtctattgtttatacaacacacccagactcacacacctgtaaaccactctttattatggctcacaccagacgagaaacatacccaccacacactcttggctgcctctgctcgtgcaccccacacttgcaagatgtatgcagattatccaggagcggggtctcaacacccacatatctatgtattaggttgttgttctagaagaaaattcctctttggtatcatatctattggagagctcgttgtctgttttgctccccacccaatgacagagctaccacacgttcccgacaaacaataacaaagca

SEQ ID NO: 495051 - DNA, 255 bp, Homo sapiens
gtggaggctggaatggagctggtgggccggaagtcctggggaggatttacacacagaccggagctggcttccgcaggcctgggcagagcatctgcacctgccggaaaggaacgtatctgttttgtttgcttttgcccaggtggggcctctgggctgtttgctgtggagcaaggctaattccctgagcccttgggggacgacagcttcaggagtaagaaaaagggtggggtttccagtttccattaatgttgaccc

SEQ ID NO: 495052 - DNA, 382 bp, Homo sapiens
ctctagaggataccctgtcacactttttgcaactggtatgatagtacacattatcatactaccatactattgcatttctgagaacacttaaacgtattctgcaggtccatattatatacaactagaaagacctgtatatacattctgagttgccacaatgtttttctttcttttcatgctcatccaattaaacatgctgcgcccttactgtagataacttttccaaatctaaaataccttggagcagacagtttagcaaatatatagccttcagtcggcattcaatcaaatggagtttccccaagacacagttctgtaacgaagtgcgtttgagattgtgtgtatatatatgtatgtgtattttaagttattacttgtattg

SEQ ID NO: 495053 - DNA, 449 bp, Homo sapiens
tagctcggtacccatcattccctctctcacgtatggttgcaagaataagcagagtttttgggttgtggtgaagtatctaagctagagtttgactagaaatgaaggcaggtaaatttgtaatcagaaagtcacaatgatttgatttgattgtgaaagtcacaatcccctgtgttaagttcatggactcaaagtagctttcccatatttgtacgtcattttaaacataaattatgctctaaggaccttacattcaaaaagggacgaaagcatttttatgaatgatagtggttataggaaatgtttatttcttttttgtttgtttatagtaaatctgatatgtctcgcttgcgattagctgctggtagtgccataatgaagcttgctcaggaaccttgttaccgtgaaattattaccccagaacagtttcagctctgtgcacttgttattaa

SEQ ID NO: 495054 - DNA, 404 bp, Homo sapiens
  misc_feature (3)..(3): n is a, c, g, or t
  misc_feature (61)..(61): n is a, c, g, or t
  misc_feature (105)..(105): n is a, c, g, or t
  misc_feature (171)..(172): n is a, c, g, or t
  misc_feature (178)..(178): n is a, c, g, or t
  misc_feature (185)..(185): n is a, c, g, or t
  misc_feature (188)..(188): n is a, c, g, or t
  misc_feature (192)..(192): n is a, c, g, or t
  misc_feature (195)..(195): n is a, c, g, or t
  misc_feature (197)..(197): n is a, c, g, or t
  misc_feature (202)..(202): n is a, c, g, or t
  misc_feature (204)..(204): n is a, c, g, or t
  misc_feature (206)..(206): n is a, c, g, or t
  misc_feature (210)..(210): n is a, c, g, or t
  misc_feature (215)..(215): n is a, c, g, or t
  misc_feature (223)..(223): n is a, c, g, or t
cgnccccatcctttcctctctcacgatcttccgtctctttctatccttcccctctctttgncatccactcagcaagctgagagtatgaccacatggcataacggnctctttagatattactgttgacatggtcgttgggaggaagagacaggtagatgtttttatcatcgnnaatagngccctgnggntcanagncntgtancngncgcngctgnttcatagncatcgtgggctacttcaagttgtctctttctgagggcaaacatttgacgtccaggtggctcaaattgggcagccttcacaggaccaggggaattggctgaaatccgctttttcctgctgtaaatcaaggccactacagcagcaacaatggctgctacagcagtcgcaatgaccacagccac

SEQ ID NO: 495055 - DNA, 146 bp, Homo sapiens
aaagttcagacgttttattgaacatgttataaaagaggtttagctcaagaaagaccaaagcccatgtcatcagtcagactcctcggattcttctttctttgcttccacgtttcttctcctcaaacctaaagaaaaaaaaacaaaga

SEQ ID NO: 495056 - DNA, 181 bp, Homo sapiens
gtggacaagtcctgtcgacaagtgagcacgtgctgacctccaaatatcgttaagctggagcctggtcgacgtgtatcacccatgggtccttgctccctgtacaagttccgtcgacacgtgaacaccgtgctgacctccaaatatcgttaagctggagcctggtcgacctctagacgatcct

SEQ ID NO: 495057 - DNA, 1515 bp, Homo sapiens
  misc_feature (945)..(945): n is a, c, g, or t
  misc_feature (950)..(950): n is a, c, g, or t
  misc_feature (953)..(953): n is a, c, g, or t
  misc_feature (1006)..(1006): n is a, c, g, or t
  misc_feature (1116)..(1116): n is a, c, g, or t
  misc_feature (1169)..(1169): n is a, c, g, or t
  misc_feature (1477)..(1477): n is a, c, g, or t
cccctccttccagcctctgctatgctaatacccagacccctaatgctgtaccagagtgtgcgctactcgacgcccgacctaaataattctctcgagagctcagacctgtgatgagtttcagtatgcactctcacgagaatggaccctcatagctatagtatttacatacgtcgtagggtataaaccgatcataacgaactgatagtgcgcagatggtgcactgcgcaattgaatgcaattattagcgccgcgagaacgaatatggcttcttgttcgataacctgtgctacaatccgagggttcacccttatgtgtaaattctggcctaagctcttggtcctatacagaatatgtgtatgacatctcgaggccttcagtctccgacgtaccattcggctatgcaccccttgaacttcaccctataactatcgaatagagtacattggcccagcgcaaaagcagtgataatagatccactagcattacagtaagccctaatgaattttccccaattctccttaagaaaacattgactcgtttaataaattgttggcaataccacgccgttaagtaattttaagtgctaccagtgtatgggttccatccgaccatgtttctggaggttcatcgaagagagttgggcctcgccacgtatccagatatttgaatttcttagaaagcccgtcttaaggcctaatggttatattcgacctgttggcaacctggccggcgatacatcatagctttgatgggcaccgccgtcgcggttgcgtaggactctttcgggcattggtacattgacagaagtccaaccggacaatgtatcgaagaaaaacttctcgcacagagatacttctttaacaggagcgtcccatataaagtcaaggaagaattacgattcctcggaggcagggtaccggcgccggggttatctttctaccgacntgtanatncaatagtgtgccctattacctttttccttcatagtttaaattatgaacttttntggattcgctacacaaaagggaaaattatgttctattttctccccttgtttaccctataaccccatggcgcattttgtgggcctgcggcacattccgcgacccaatcggnataaaagccggcaaaacggacgggaaccattaaggtaagtgggcccgtggatntgtgcggcgagaggccgtggcgcccggtttgggctgggggtgtcccgttctccccaacaatctgggtgcgtttccaacgaggctgtccctgtgcgggctgcgcccagggcgcgacccgcggatgtattgggaatgctcggccgaagaactacttaacagacccctcgctcacagtagtatttcgacgacggaaaaacactgtgctcttccggtgttcgatctcgttggtggcgattgagtgccaccccgagcagacctaccatgttgtatggtgtgaacaacccacctgtgcttaatgttgctgatcntctctcatatcgggtcgacacacacgttctagccgaca

SEQ ID NO: 495058 - DNA, 657 bp, Homo sapiens
tggggggaaaaaggggggttgggggaccaaaattttggggggaacgggggaaagggccatttttttgccccaaaaaaaattgggggggggggggtggtttcttctatatatagtggttgtggttgtgtttcttgcgggctgtaataaaaaagaggggggatggggggcctgggggggtattaatcgaggatgtatgagacgctgcagaaatttattgtgagcacctccctctttggcagaggggctaagagagggtgttgtggggtggcgctctcgacgagaaggtgtggaggaaaaatacacaatattatgaggggcgagggtgatgtagaagggatgagcgaatctatccagcgaggagggggggtcgagcggaggtgaggaaaaaaagagggggcctagagagccttgatcaagaacgcgcaccccaatattatatatcagaggtggtcgaacagaccagacagaaaagacgtcagccagaggggggccgactacaacgaatcgaaagacggtgctgtgggggacaccgccgccgcccccaggaggcccgcagatagaacggggcgagaggtgacgaatcagtcggaacacccgcgcaccaaccggagtatacgaccaccaccggggtcgccgaaagcagcgccaacaacaaga

SEQ ID NO: 495059 - DNA, 205 bp, Homo sapiens
gatccccgggccaccacggatgtggcagggagaaggacacggtgaagaagctgcaggaacagctgggaaaaggcagaggacggcagcagctcaacaggagggcacctctgtctgagtttccccttctggaacaagaagttattgttccacttaccaaaatgccttacacattccttacaaatgaaccaaacaacctacacatccg

SEQ ID NO: 495060 - DNA, 259 bp, Homo sapiens
tactgcctcagattctggtcttcccggatggacgtcttcgggaagatgacaggggtgcttcctttcgccatcttgaggcaatcatactgttccctgtgccgttttctctgggataggctgaataagatgattaggatgatcaatgcgagcagcagcaccgccatcacagcccccacgatcccatacacgaggctcggggcgatgttgaattcacaggtctctccccagtaccagtgtgtgttcgtatttgggcacaggc

SEQ ID NO: 495061 - DNA, 520 bp, Homo sapiens
tgactctagagttcccctcgaatcgacggttctcatatgtatttaaaaggtaaatgcaggccaggcatggtgtaatgccagcactttgggaggcgaggcgggcggatcacgaagtcaggagatcgagaccatcctggctaacacggtgaaaccccatctctactaaaaatacgaaaaattagctggacgtggtggtgggcgcctgtaatcccagctactcggaggctgaggcaggagaatggcatgaacccaggaggcggagtttgcagtgagcagagatcaagccactgcactccagcctgggggacagtgcaagattccgtctcaaaaaaaaggaaaattatgacaattcattccttttctagatgaataatattccagtgtatctgtatgcacatttggtttatccattcatctgtggatcagcattggggtggttggcatctttgggctattatgaatagtatgctatgaacatggagtcccttttatcaaatattgggggtatacaaataggagt

SEQ ID NO: 495062 - DNA, 110 bp, Homo sapiens
  misc_feature (62)..(62): n is a, c, g, or t
cctgggtagctcaggggaggaggtgggggtccaggagggggatccctctccacaggggtcancccaagggctgggtgctatttgtaagggaataaaatttgtagcccaga

SEQ ID NO: 495063 - DNA, 419 bp, Homo sapiens
cgatgaacatgtaagatagtaaataacctcatcatattgactcttgctgcagtaggacatcttatgtatttactcactgcctatgctacccatgtgctatcacatttttcctggttataatacatataagatggagagcaggatgggacagagctgcccttgctgatggcaccttcagtgtaagctcttgcttgccaatggccactcttgggggcacctgcttgcacctctcatcgggctctgggtgacaccctgctgttgtccttgtgggcattgagggttcactccaacggtgtgtccaggcgagctgcctcctcactggtcttgagggaatgtccagaggggccgggttacccaatcacttgctttgcttttgggttgatcttttttcatttctttggtgctacgataataatttt

SEQ ID NO: 495064 - DNA, 189 bp, Homo sapiens
tcagctcggtaccatgcctataacctcccttgcaaagaacaggttatatctgatgataaatctgaaatacttgagaccagaagtatttcagattttggattttttttaggtgctgaaatatttgcattgtatacttaaaagttcagcatcccaaatctgaaatgttccagtgagcatgatggaggtgct

SEQ ID NO: 495065 - DNA, 124 bp, Homo sapiens
gtggtgctatagaggatcccgacattgtgtctcagtgtcatagatattgatgtttgctgcgatggcgctaatgaacccaaccaattgggcgacttgagaccactcgaaccccacagtgccactg

SEQ ID NO: 495066 - DNA, 195 bp, Homo sapiens
aggtggcccgagcgcaggcgccttgggcggtcaacatcagcgcagggggggtctcaggacgtactaaggaccaacctggggcccaagggcacatgaagatgctcgtttctgcgctggagacatcaaacttactaaagacggcaatgtcctgcttcacgaaatgcaaattcaccacccacagcttccttatagcaa

SEQ ID NO: 495067 - DNA, 1187 bp, Homo sapiens
cggatatttggtatcgattggggccggggacgcggagcagtgtggccgcggcggggcagctgggccgccagcttggtgcctcgtgggaccgtctcccgctgctttggtcaccagcccctgccctgccctgaccctgctccgttctccgtgcctgctgatgccctgcctgtgcctggactttgctgcctgcgtcctggcgcatgcatgctgcgctcagtgtgggcccctgctctgtgcgccgtgctggtgacctgtggaatgccctgctgttaaactggggcaacctgtgtgaccctgtgcccgtggtatggcttgaatgtcagcaatcgagcacatgtccaatgctgccctgcgatgtcaagggaatgtattgccgacgatttttgctagtcctgagagtgaaccacaacacctgagcctcaacatgcacttgcaagtgatacaatggagactttgacgcagtcatcttggcactcggacacggttcagacgggaagccgtctatggtccagcatgatactccaagggatggactaacgcaagcgtcccacagaagtgaacgactctgaaacggctgcagggcccaaggcgtccgaggacaggacgctatcaaagacctttggaagcagcgcaaggacttgtgcaacatttgctcacggcagccttcagggaggacagcttgcgctatttgaggggccagagcagcacgaacggccattccaggtgcagaaagcaagggactgagggaccagttaagcgtacggaccttatcattggcgacagtacacagcgggaacggttacccacgggacacggactgaacacgaacacgacgaacagagacaaaacgacttatccacagaaggtttcccccttgggagaccccggttcacgttactagcagcgattacggttcaccctcactgtattggaacggagtttggtggacagaaagccgaaccgccaaaggggcgtccaacgcagggaagagggtgcgcagacgtagagacaaacgtcggcaaggataccatgtgacgttcacttcccagcgacaaccaatagagtaggaacataccgcgaacgacgtacttaggcagacggaccgttgagtgacgtgcgaacaaaggaaaagggcaggacaaaccataggaaagaatccgacatggaaacaaatctggcacacacgc

SEQ ID NO: 495068 - DNA, 85 bp, Homo sapiens
catggatttgctggtgcagtacaactaggcttaatagggacgttagaaggaaaactatcaaacagaaaggacatccacaccaaaa

SEQ ID NO: 495069 - DNA, 360 bp, Homo sapiens
gctatgcaggcagatcacgaggtcaggagattgagatcatcctggctaacatggtgaaaccccgtctctactaaaaatacaaaaaattagccgggcgtggtggcgggcacctgtggtcccagctacttgggaggctgaggcaggagaatcgcgtgaaccagggaggcagagcttgcagtgagccgagatcacaccactgcagtccagcctgggcaacagagcaagactccatctcaaaaaaaaaaaaaaagtttatggtctaaaaaaatacatagttcttcagctttcccaatcagatccattttaattaacccaccattgataaatgatttactttggccaacaaatggcccatttgga

SEQ ID NO: 495070 - DNA, 148 bp, Homo sapiens
ggacgtacctcaggaggccgctggcagtgtagagccgcgggcagtcggggtctcagagccagtgtctgtcaaaggctcagcatgtttctggctcactttctcagaggtcactttctttggtggattttggacgcgccatcgtgcgctt

SEQ ID NO: 495071 - DNA, 650 bp, Homo sapiens
ggtatgagcttgagattatacaccactttattttatcattagcggtacttttttaaccatggaggagaatctagctctttaatctaagagggccccatgggagccaccaatagagaccgcatcttgtggccattttcaaggtcaagcatctttcgtcctacagatgtaacaccacacatgtccctgagatagtggactggtatggcaatccattgcatgtgaggattatttttgcaggctcaaaggaaagaatcatacgaggatactgccaaacaattggtatgacggaccatttaccatcccagccatgaatctaatactatgagagcgccacagagtcggccagatcgataattgtaacagactgctagatacgagcaaactatacctgattatcaccatgaaggataggcatgacgtaagttacatccttaggaactgaacattaccgtccaccacgtggaagacgaagcctatagataaagtaatattgttaggctttgcagccaatttgtacagctatattaggtacggcagacacggagagccctgcttgaggcgaatgcactgctgcccgaaggaaccattagacacagtagcgcccaacccacggggggcatttccaggtttgtgtcccctttcattgagga

SEQ ID NO: 495072 - DNA, 766 bp, Homo sapiens
  misc_feature (114)..(114): n is a, c, g, or t
gagaatgcctgcatcaggagtctcatatatgactcggtttgctctgtctttcctcattggccgaacgccagtgcccctgcctcgctgccgtcgacgcatacgcctgccgctggnacctgcgggacgtctcgggccatgcatctggaatcggctcgagcagctctccatgaatagtgcttcgacttcttctttgtcttacagtgcgcaccctgacgaatcagagtatcgactcgggacagtttctcctaatgcaattgttttcagtatcgtctattcagcctgtaaagccactctacacagaatgtacatgagttaccgtggagataaatgtgagagaaaagagcgctcagtctacgaaccgctcactctgaaatgaggtccgcccatactggcaggtgatatgcattttgaaggcagatgtgaatccagagtctcatattgggagatgtatgataattatgctcaatcgagactgaaaggattcaggaagaggacgcgttggacccaaacgatactggatactggcaacaagctgttcctcattccagaagtaaggcgtctcattgataggacaagacgagtgagatgtactatagtctggtaccatgatgccaattacgaaaaagctccagaacgaaggagtctatgaactggcacttttcggatgaaacctggtgggccagctctgtggggttgatgcatttaaaagggcagttcatgctcatgtcactctaggtacacaaaatacgttggagtgttccacaca

SEQ ID NO: 495073 - DNA, 272 bp, Homo sapiens
atggatgtctacaacccccccatttacccagggggccggttttccaagggtaaacttctgcccccaccctcattttggggggggccctggggataagggctctttcctgagggtttcctgtttggtaggccctgcaaaagcccctgcagtggtttatagcatccctgtgaggggatcctttccctttttcaaatgaggaaacccagacctggagaagtccctcggcccccccaagatcccataacccctccaataaaaatccgttggatgga

SEQ ID NO: 495074 - DNA, 101 bp, Homo sapiens
ccgggacgaggcgatgatcctggcacgaggcaaagatccgggggacactttgtggaaagcagctgtgccttccatcatcatcatcatcatgacccagcttt

SEQ ID NO: 495075 - DNA, 971 bp, Homo sapiens
  misc_feature (191)..(191): n is a, c, g, or t
gccctgatgtgattccgtcctgcgcggatgttctctgcgagtcagctgattgcttatatatcatcacgatcctgctctttctcttcctatcctaatgtgcggtgactgacgaggcctgaatggaatcattcgatggagcattggagcagtgacgcaccccgtgagcgcgcccagtaactagtctattatcnggctctgtgaagctaaacggaccgatcgaagagtctatcagcttgtagacgtcgtcggggctatcatcgatgtcgacacccgtcgatgccacccctgtgtagtccttctagatgaatctcgggtcatagtcttacagggtgcctcgtgagcataagcggagtgaacgtatgctaccaagttggattcgaaaggcccaaggcgtgaatgaaaatgaacggtacagggcaggttccaagaatctgagagaggtttaaaacaccttgtgtacaaagcgtctcaggaggaccataatgtcttggtaaacagttccctaggtgggattcataacccctgttgtgcagcgcctttctgcatcaagttaacgtcaccccaaacagtttgcgttgcgtataacaggcttgtgaaaacttatgtccgggtatccaagggacccacgatgtccgttagtcaagttgtggacctttcctcctttaaatcatgcactgaaggcaaggggaccaattgtcccctaagatccatgatacgcaatgtcaagtactggaagtccacagcattgccgcatgaattgtcctataaaccttattgtccttgggatacagtcagggaaacttgacctcgccagctggaatggtgggcattggcgcattagtttcccaatgagtaattacgagaagcttataaactgcttgccctgcactcgcattgaagaccattaaatgaagagaactcagaattgactgcaacgaagggaccgcaatggatgaaaacggaatgacttg

SEQ ID NO: 495076 - DNA, 155 bp, Homo sapiens
gtgccacataaccatgattggtacttatctgttagcccatgtttgtatgtgtgcagctaaatgatcagatggggctttaaatcggcatatgtatgtgtgcgacccaattcatcatacgcaacgtgttccccctgaatttgttgcgatggcatcaa

SEQ ID NO: 495077 - DNA, 1010 bp, Homo sapiens
actacttcaggtcccagctggcaggaatgcatagaccagggcacgtataagacagttgtactacattgaatggtcgcataatcgtagagacatggtcataaacaaggcaaactgctgcgagggatgtcttgctgccatgacatgggcgaggtcatcctgatggtttgctatgactccgtgtctcgctggaaaaaaaggagggaggtgcattttactccctcgagctgcgcatgtacgtcatgctactgtaggtaatataacgggcaactctgaagtgagctcacatggcaaagatgtgtcctccctggttctacccactgctcgtccagttactagtcacatctctccatctaaagccaatggtatttacatatagtccagttgtggtatagacatcactctctgtctgagcaggatagcatcaactggatttactgattctgcatagatagctctttacttctttggaccatactatcacgcgcactaaattctagatcataatgggggctaggcatactgcaacatgaagctggcggtgtccctcgtctttcaacatttcctgtatactagtaatatgctgggtatgtctgtcggacgagacctgttggaaatccctatcatgggcctgagactccgacgcttttacaatgtcttatatacacggctttgtccgtatcgatttgagttccaggggcctcaatccttgactggcattgcgcgaacccttttgttcgcgtcagttcccctccgttgtcaattggtcgttgcaggaatggcccctgctggactgggactcggctcgtgtagctctcaagttcattactgaggtgtgcctggcgcacttgttgctacgccgcaggtgcgcgacagcttggactcactggccattggggatctaacatttttccccccttctggcactcgttacttctggcccacgttatatcacttccgcaccgtgggctggttcccgacctcctcttcttggcgggtccaaccgccgagcc

SEQ ID NO: 495078 - DNA, 319 bp, Homo sapiens
aacgcccaggccgacgtagaaaacgcccaggcagcgaaagagcgaaaccgtgccagcccggacccgaggaggcaacggattgaggaagcgctgagctgtagctcccggggtcctatctctctcagggccgaggcacgcagcgcagccgtctctctcttctctccaggcagatggggctgtggctatacgatggggtctccctcacctccagcccatgccagacgagcgtgcagctctctatcctcatggtgcccactaagagtcatactctgccagatgctgctcatcctgctgacccccatccactcagccaaagcag

SEQ ID NO: 495079 - DNA, 142 bp, Homo sapiens
gataagtcgaaactgaagaagacagagacgcaagagaaagatccactgccttacaaagaaacgattgaacaggagaagcaagcaggcgaattcgtaatgaggcgtgcgcgcgcaatatgcactgtacttccactagcattgc

SEQ ID NO: 495080 - DNA, 228 bp, Homo sapiens
  misc_feature (192)..(192): n is a, c, g, or t
tcctcctgggcggatgttatgatatgtttgcggtttcgatgatgtggtctttggaatagaaacctgtgaggaaaggcattcctgtaatgctaggtgccaatggtgagggaggcatgaaagtcattgagagtcgagcccaaaaagatgaagaaaaaatggaaattcaggagatccaactgaagatgattcaangaaactagttatacgctgccccaaatgaaaagtggc

SEQ ID NO: 495081 - DNA, 515 bp, Homo sapiens
atttttagtaaacttacagacttgtacagctatcaccacactttgagaacatttttcacccccaaaagttccctcttttgtgtctatttgcagtcactccccattccccctgcagccccagcctaccgctcatctactttgtgtttttctggttttaacttctctgggaattttacataaatggaatcattcaatatgtggtcttttttgagcctggcttactttttactttgcataatgcctttttttttaattgaggtgaaattcggataacatataattaatcttttaaagtgtataattttgtggcatttagcgcattcacaatgttatgcacccacggcagctctctagttgaagaatcttttcattccctcagaagaacaacctgtacccaataaataatcacttttcattctcccctcctttcatctcctggcaaccatcagttggctctatgggttaactattctggatattgcatataaaagaaatcatacaatatgtgaaaaaaa

SEQ ID NO: 495082 - DNA, 100 bp, Homo sapiens
ttcactttctacacaacttttattgaaacacatttttttggaaaatgattttaggttttccctatagagattcttaagaactgtcatttttatagcttta

SEQ ID NO: 495083 - DNA, 170 bp, Homo sapiens
caggcccaagattataggcagcaggacaatcagtcaacagtcactggcgggtgctgacatgaaatgcacgatcacagcatcaggcaaagacgcagattcacatcgccatattggtctgttccggcgtaaatacagcccacatctgatcacacaccaagacacgtccaacg

SEQ ID NO: 495084 - DNA, 446 bp, Homo sapiens
  misc_feature (269)..(269): n is a, c, g, or t
tctctttcagtaataattatctcttgcagagttaatgtgcaaatgaaatgggaataaatatgactggagactaccctacagaataccatatacataatttatattcaacattacaaccttatgtttgtgtttcaagaaatatggcttccttcattattttcttcaactagatgatgaagacaatagtaccaatgtaccaacggcccaaaaagctatttgtttattcattttttactgagaaaataaattgtcataaggtgacaaactanaatcactgctctccttcacagcccctaatgccaggtgtcttacataagagttgcatctttgcccaccccaaagttgacatgtacaagtttacaaggaaggatttcattatcaagcctcaactgtcattgccaggtcatttcaacccatgcacattttcttgctctgtgcccactgcc

SEQ ID NO: 495085 - DNA, 419 bp, Homo sapiens
ggtgttctagaggatcccaagtgtgctatgatctcacctgtgagtagccactgcactccaacctggacaacaaagtgagacactgtcttcaacaaacaaaacaaccacaaatcaaaaacactttaggggccaggatggtggcttacacctgtaatcccagcactctgggaggccaatgtgggcagatcgcttgagctcgggagtttgagaccagcctgggcaacatggcaaaaccccatctccattaaaaatacaaaaattactcaggcatagtggcgtgtgcctgtagtcccagctactcaggaggctgaggtgggaggatcacctgagcctgggaggtggaggttgcagtgagccaagatggtgccactgcattccaacctgggcacacattatggagatgggcacacattatggag

SEQ ID NO: 495086 - DNA, 689 bp, Homo sapiens
cacagtggctcatacctgtaatcctagcactttgagaggccaaggtgggcggatcacgaggtcaggagctcgagaccagcctgaacaacatggtgaaacctcatctctactaaaaacacaaaaattagccgggcagggtggtgtgcgcctgtagtcccagctattaaggaggccgaggcaggagaatcacttgagcttgggaggcggaggttgcagtgagccgataccgtgccactgcactccagcctgagagacagagtgagactcttgtctcaaaaaaaaaaagtgcttctgccaattagagcgaatttattaccaggtaaccagacaacctgcagaatgccgagaaaatattctcaaactgtgcctttcacagaggtctaatattcagcatctataggaaaaacaaaacccctccaaaaaaaacttttggggggcgccccggcccagaaaaaatgtttcaaaacccacctctgttggcggcgcgcgcacccaacgtgactgcacactggcatacagcgtggcccagggaacaacccggggccaagacacaaggcggtgggctctccaccaaaaaaaaaaaacccgcgggagcacgaggggtgttgaaccaaccccgaggggtccagcggccaaccgggtcttccaccggggtccacgaagcgataaaacgcggcccgggagggagg

SEQ ID NO: 495087 - DNA, 556 bp, Homo sapiens
gtgtctatgcgatgccacctgtacgtcaatctgccatcttctcttggtcaaggaagtcccaaagccagtccagagaaaacactgggaaatagacttcccttcttgagaggaggaacctcaaaataccatggctgtgtttttctgtctaccatggtaaagatcagtatatttggattttttttcctgcacccaatattttgcatttggtatttctaacagttgttctgtgtttctctttctctttccttgccttttttggttgatttttttctatggattttctgtttttaatttcgttgacttgtgctcttatttctttccttctgcttattttggatttaattggctcttctttttctaatttcctaacatggaaacttggagtatggattttagatctttcttatcaaatatatgcactcaatgctatacattttcctctaagccctgctttcacagcatcccacgaattttgataagatgtacattttttttccacttagctcaaaatactttaaaatttctcttgagatttcttctctgacttgtgttattt

SEQ ID NO: 495088 - DNA, 1303 bp, Homo sapiens
  misc_feature (1098)..(1098): n is a, c, g, or t
acagaaaacagaactttattccaagggccagaaggtttatttaaaattattttacactctcacttgtggaaattcagtgtgtggaggggctgtgggcccagcttcagcagaaaagaaaagagccctttcgtgtgtgcagccaccgagggccagaaggcctccagaaggctgtgggagcccgggtgcccccatgtgacagggccctgtggcgctgtggtgcgtgtgccagaggggccgggtgtgagacactctcacactgtggcctgtgagggcgctgtgacgagaggagatgtgtcaccaccaagcgccacaagagagaagtcttttgtggcacactgtggcgcgctgtgcgcgcccacgatgtgcgccagagggcgcacaacgccacaacacaacacaccccagaggagagacactatacggagcggagagggcacgccccgagtgcacaacgctgtggatatatacagaaggccgccgagagagtcatctgtgtgtagggtgtgtgaggtgttgcgagacgacacaggagcagagggtccccccatttagactctctcacacacaggagtctctcacagggggagcagtaatacaacgaggggaccccctgttgtgggtgtcactaatctaaaggagtctctcctgtgtgagatgtgtgatgagagctcgacaacgcggcgcgcgtgtgcggcgcagtgtgtactctccaccatgtgggcgcccccgcgaaagcgctctacgcaggcccgaagcgagagatgtgctcggataaaacacacgggggtgtcttctccgtgggcgaaccatttaccaccgctgtgggggccccccaagttgggtacaccaccggagtgcgacaattatttcccgccacaaacgagaggaagcggtgataacacaacttgtgttggcggggacaacccccgggcgcctcttttgccgagactatacaaaaagcttttttcccaacacacgggggcgtggtgccctactctacagaagaactcactctgagggacataatataaggacaccgaggcggggctgtcccgctgggcacacaccggcgtaaaaaaccccccctgtcggagtcgncggagaacacctaggggccatcacccgcgccggggcacaaccacaaacgcggcgcccacgacagattgcactacggcagcgcacactgatagcggagagttagaacacccgcgccccaccccgcaggcccaccaccacgatggtgtgggcgaaaacacctccggcggcggcccaccaggcagccctccaccacccaacacacagg

SEQ ID NO: 495089 - DNA, 450 bp, Homo sapiens
  misc_feature (53)..(53): n is a, c, g, or t
cctacctggtggttttgtgccttcccccactcttttttcatttttggatatgncgaagtcaggaaactcatcctcaggcgaccccctggcggctgggtggagaaggaaacctactattagccccccgtcctgcccgccgtggagcatcaggcccccccctttgcatccgaccccccccccctctttgtgttcttcagttttggagtttgggactctaccctggtaggaaagccccccagcatgtggggaaaccaaacgtcctggaattaagcctgtagctctatggggggaggggggagggctgccttaaaaccatccctctgtggaaatgacaacggggaaggtttttatgggcccttttgtttttgtaaaaaaggaacccccggaaagactgaaagaataccttttatatttggattttttcaaataaaaatggcttttataatggga

SEQ ID NO: 495090 - DNA, 232 bp, Homo sapiens
gggaggagctcgaccacgcacccaaagagatcacctctatctattgatcaccgtttctgatctcacctggctctgccccctatactcgtcggtgaaaccaacgtcccactctcgatctgaatcccattggagtaaatccccctgtaccccaaggcattaggatgggggagcaaaaagcaacttatgtattttcttccacccccaccccaaattaaaatgttaagctgctgga

SEQ ID NO: 495091 - DNA, 153 bp, Homo sapiens
  misc_feature (1)..(1): n is a, c, g, or t
ntatagatccccctatcaagaactggccaagaatgggtaatttataaaggaaagagggttaacttactccaaatccaacatggctgtggaggcctcaggaaacttacaattattggggaagggggagggggaccaccgtatcatggtcacaag

SEQ ID NO: 495092 - DNA, 276 bp, Homo sapiens
ttcgtcctcggtggggaaggcgcccatgcccaggaggccgttttccgattgcagcatgacttccatgccgtcggggatgtagttggccaccagggtcgggatgccgatgccgaggttgacgtagaagccgtcctgcagtccgcgggcgacgcgctgagccatttgttcgcgggtaagagccatgtttgttgtccttttagtcgggctggggaagggcgatcacttgcgcacggtgcgctgttcgatgcgcttctcgaaggtgccgcagatggcccg

SEQ ID NO: 495093 - DNA, 140 bp, Homo sapiens
  misc_feature (3)..(3): n is a, c, g, or t
tancttccacagggtctgtccagattccaggagattccatgtttgagtacataggacttccccaaaaacgaacaagaacagacattggtatctctctaatcaaatgctcctcgtgagccaccgtctgatcagccatggga

SEQ ID NO: 495094 - DNA, 214 bp, Homo sapiens
ctttcccccgtgagagacttcttcaattaaagctttgttgggctgcatcaccatgcaggagaaaaggaatacttaggggcgtggttaaattaccagtgtgcgtcaccagtgaggtatgcctcaacataagcctataaaacgttataaactgaactagaacatacccatgcagtgaatattttttcagtgctactaatgcaaacaaccacaccat

SEQ ID NO: 495095 - DNA, 272 bp, Homo sapiens
agatggtactcagtgcgaggctcagataagtattgcgggctgaaaggcaactgctgatactcaaaaccagtactaggtaacacgctcctctatacatcagaaggctgagaagcgatatctccctaaaaacagctttatttgataatcccaatgcagtggaccgtggctccttctggaaaatcactatcttgattactgagcacataattcagtgattgtcctgtaatggcacggataattttccacaaaattccgaagtggcaggaaacaag

SEQ ID NO: 495096 - DNA, 508 bp, Homo sapiens
tcgagtttacgtttactctggttccacagctgtgtgttctctagtgcctctcccttgggctaagcgagggcacagctccatgtccttctgaagcaccggaaccccgcagcagcacaggtagccaaggcctggctcgccaggaagccatgcttgaacactaggttgggaggggaacaccccagcactttggtcctattgaggcttgaagtgcctgcttgatcctgatcaaggggccaagtgaaagcctgtgctggttgtgggaaagtgccaggctcacatggtccagtaggcatacacgagcgtcaggaggataaacatggccacagagcgcagcatgttcttccggttctcttgccgtctccttctccagggacctctgtgccctctgggctcagctcccggctgtgaagtctggagttcgcgccctgcaggtctctccgacactggcacagcttctcctctagcccatcgatctatagagcgacgcccatattctcgcgcgtcttct

SEQ ID NO: 495097 - DNA, 423 bp, Homo sapiens
  misc_feature (25)..(25): n is a, c, g, or t
catacctggaccttctgttctctgntgtggaaagctctcccaactgttttcaagatcggcaatctcctactcagtttcttcaaggttcaccaatagttatccacttcctgtcccaaagctttccctagttcccttggcagagttgcatgcctcctcttcagagctccaactgcaccacgttcctctgtaacttcattcaatcattgctgtttttatacatgtctcacctctaagttggtgtctctggaactgtggctgaggtgaatacctgatatttttgccaaccagctttcatctattcatcctacttctgggaacagtgccctggatttcctctgggacaccatcccacccctgctgtaagccctgttattttagaccatccgtttccagaccactggggttgatgcagggatggccaca

SEQ ID NO: 495098 - DNA, 169 bp, Homo sapiens
gctcgacagcctgcgtcagattaaaacactgaacagacaattaacagcccaatatctacaatcacccaacaagtcattattaccctcactgtcacacaccacaggcatgctcatagggaagggttaaaaaagttaaagggacctcggcaaatcttacccggcctgttta

SEQ ID NO: 495099 - DNA, 116 bp, Homo sapiens
gttgctagtaaagtccccagtccgtaatcttttgtataacagtacaaaaaaaaaaggctcatgagagaaaatacctagatttagaattggctcttacatctttggtattttggtgg

SEQ ID NO: 495100 - DNA, 443 bp, Homo sapiens
caggaactggcagcatcgctcaccaggacactggacctgcaggagcagctgcagtctttgcgcagggagctggaacaggtggctcagaaggggcgagccagacggtctcagagtgccgagctgaacagggatttatgcaaagcccacagcgccctggtcctggccttccgaggagcccaccggaagcaggaagagcaacgccggaagttggagcagcaatggcactcatggaggctcagcaggccgaggaggtggtggtgcttgaagccactgcaagggccctggggaagcccaggcctcccctccccgcctccccaagcttggggagcacctttcttgtagtgcccccttacccaagccatgtcttggacaatgccaagacagctgctcggcactgtcatataacttgttcctggaagtgaaataaaaaaataaaaagaaaa

SEQ ID NO: 495101 - DNA, 280 bp, Homo sapiens
ttatgttgcctggaatagactggaaaaataactgcgacagtgcaaaagataaatcttgggccctttgatttacctgccagacaccactcacctgatagctgttggcatccagcctgtaagcgatcgttgcattactgaactctgtttcagttccacgaactgacaccactacctcgcaatgcatatccacaggcaccacattgaacacacgttagatgaaacccaaatggcaagaatgaatgtaacccatgaacaaggtctttatagcctctatctcgcg

SEQ ID NO: 495102 - DNA, 131 bp, Homo sapiens
ttttgaaaatgaattttttttttcctttgtggtttttaaaaaatgttgcccccgttatgcttcctgcctcgttacattttcctccggttaatgtaatgtttagttcctttgccattaatattttgctgcca

SEQ ID NO: 495103 - DNA, 446 bp, Homo sapiens
  misc_feature (20)..(20): n is a, c, g, or t
  misc_feature (23)..(23): n is a, c, g, or t
  misc_feature (136)..(138): n is a, c, g, or t
  misc_feature (145)..(145): n is a, c, g, or t
  misc_feature (229)..(229): n is a, c, g, or t
  misc_feature (292)..(292): n is a, c, g, or t
  misc_feature (388)..(388): n is a, c, g, or t
  misc_feature (401)..(401): n is a, c, g, or t
  misc_feature (414)..(414): n is a, c, g, or t
  misc_feature (438)..(438): n is a, c, g, or t
gagtccatgatccgcatggnagngcccacgcgcgcatccatctgcgggactatgtgatcgaagacgacgtcaacatggccatccgcgtgatgctggagagcttcatagacacacagaagttcagcgtcatgcgcannncgaaagnacttttgcccgctacctttcattccggcgtgacaacaatgagctgttgctcttcatactgaagcagttagtggcagagcaggtnacatatcagcgcaaccgctttggggcccagcaggacactattgaggtccctgagaaggacttngtggataaggctcgtcagatcaacatccacaacctttctgcattttatgacagtgagctcttcaggatgaacaaagtttcagccacgacctgaaangggaaatgattcntgcagcaattttngagggccttttggccttccttaanggtttcct

SEQ ID NO: 495104 - DNA, 776 bp, Homo sapiens
gccttgcatgtggactggcacctgcgggagctgaagctcaatgccagctccctgctctgctgctccattcgcctgcctacacagcagtctggtctgatggcaccaggaagtcctcacaggcaagatgaggtcattcgggcaggtcctgagccacacctcaagtccgaaagatgttccaatacacagctggcctcaaagggttccgccttccaggtgggccgttgacgttagccgtggtggcggagggctatgtcgccagctgctacaaaaacagccagtatcacctgtgatccatcctcctgtgagttacaatgacaccgctccccggatcctgttctgggcccaaaacttctctgtggccgtacaaggaccacgtggcgaggactgactcccctcactttggggtgcaggaactcaacctgactggctccttctggaaatgactcctttgccaggctctcactgaccctactaacgacctctttgtaccacactgacacttcaacatacactccctggccaaaccgcctctacccagctgtctgcccgcgcacttggctccaccactcgcgaccgcctcgaacctccacacgcacctggctccgtcgcctacttcagccgcttcccaccgtcaccccgccccaccactctactccttccgcctggcgaatcatgtccaccacccctgagcaacgaagggtcagtctacttcgcggccccgccgcgcccttctcccctggcagctcatgcttcagcgacctcacgacccaggcttc

SEQ ID NO: 495105 - DNA, 727 bp, Homo sapiens
tggaaatgatttcatttacgggggaaggccctttgtgatttaggccttatttctcttgtccttccgtacagggaggaattggaagtagatagaacccgaccgtggattacttccggtctgaactcagcatcacgttaggacttataatcgtgtgaacaaacgacacctttaatagcggctgcaccatcgggatgtcctgatccaacatcgaggtcgtaaaccctatgtgtgatatggactctaaaaatcaggtattggccctgtttatccctagggtaacctggtcccgtgggccacagttaatgggatccactcggagttatagtagtccgctttagactgggtgaagtcttagctattgtcctggctcgaaggtcggggtcctggcaccgaggttctgccccacaaccgacaatctttaacagtgcaggcttgggcatatctttaaggaccgtgagaggtctggttaaggtcacggtacagcactaaattaagacttaaagaggcctcccaataggaggtcttatcatcagatcttatgacatgctgctccactgccccgcccattttattcaaagagggcgacaggagtcaaacattttacaccgtggctttacaaaaccgttaaggacgacacaatggtgaacacccctatcttgtgagacgcacattaaatacatgggttcccattcatttaagggaacaaagggtcaacaaagtgcacacg

SEQ ID NO: 495106 - DNA, 201 bp, Homo sapiens
cgagctcttaaccggtgtttatctgatgcacctctcctgtgagaggtgtacctctggtgaatcaggactccgaaggagaggctctgacccagcaagtggagaatgtggaggcctctcagttaagaagactgaatataaagaaagatgatgagtttttccatattcgtcctacctgtgcttatgccatctggggccttgctt

SEQ ID NO: 495107 - DNA, 492 bp, Homo sapiens
ctctgtcctggcactgtctgtcctggacacgctgtgtccagatgatgagctggtcggttttgggttcagagctgggccatttctctttcctccgaggtatctggtgatgcagagactctttccccgcatccctcacatgaaagaccccatcggtgacagcttccaaaacgacaagctggtatgttgttttttctgccttgggacgggtctggaggcgtggtggccactttgggaggcccaggcggcgagaccacttgaggccaggaactggagaccagcctggccaacatggagaaactccgtgtctactaaaaatacaaaattagccgggtgtggtggcgggcgcatgtaatcccagctactcgggaggctgagggaggaggatcacttgaacccgggaggtggaggctgcagtgaactacgatcgagccactgcactccatctgggcgacaagagtgaaatggcctggactaggaggctggacacctgtc

SEQ ID NO: 495108 - DNA, 734 bp, Homo sapiens
  misc_feature (564)..(564): n is a, c, g, or t
aaaattactcgcaaaatggttcaacaattcccctttggttggcttacgcttataccggtacccccacaatttctcgccatgggaacatttagccttctactctaaagaactgccctccccggctgaaacttctcctggtccgcaaggctttagaaatgccagatatgtctgcaaaacccctggatgatcactcaaactggaggacgaggacaatatggctgggggtccagagcttgacgggggctgaaacacaagcaagtgaccgtagaggtcagtcaggtcagctcctgccacaagcaggcccaccacagtgacgaagggctcggggcgctccctaggcagcccccatacaccaccaggacctgagctcgtgagtgcgtctgggtcaggaagagacctctctgtgcgtctcaggctgagatgcagatttctgttttctaacaactggaagcgaccttgtacgatgtattgaaggtgtagtgtgccaaatgcttccgacggaggtgctggccttggatggtattctctctgcccacgctgatggtcactcaagtcctgggggantgctgtgtctgacccagcacgcacctcggggagagcagtcgcacgcctcacaagtcgggacgtggggcatgctgttctcactgcgactggactgaagcaacccagccagcctcgcgggccacgtacccaacccagacgactcattcagtaacattgccaggtacacaagc

SEQ ID NO: 495109 - DNA, 138 bp, Homo sapiens
cagcaccttgtgctctactgtccactcgtcagggaatggggtgaagttgtgcaggtcggccagcgacttctccacaccgtgcttatgccacagaagcatgcccagtgcctgctccatgttgtagccattgcactccgg

SEQ ID NO: 495110 - DNA, 159 bp, Homo sapiens
ctcggtctagcggttgaggatacagatgaggtcatcgatccctcgcttacatcaaaacaattgagcaccacatggtacttgaacctactgagtacacctgactacgtgtggactaatcttcaactcctacatacttcccccaatggtgagcggcgactt

SEQ ID NO: 495111 - DNA, 198 bp, Homo sapiens
tgattaacaaagtggttgtcaattccgtgaaactcatttcttaattcaaaacaaaagcttcagtgtgtgtccaaaataaactgttacgaattgacctacttgttttttttgagacggagttgcatttatgttgcccagactggagggcaataagcatggtctcggtttactgcaacctccgcttccaggggctcaatg

SEQ ID NO: 495112 - DNA, 262 bp, Homo sapiens
ccccccccccctttttttaaaaaccaaaaaaaaaaaaaacccccccaacccaaaccgggcccaagaaggggggaggggattttttccctttaaaaagctggggggtaaaatccccgccccggatggtcccccggttgggcccggcctgccccccgcctaggggcccggtttggtccctttggccagccccccctccccccggggggggcctcccaaaggttatttttttttttttggaaaaataaaaaatttcctttttgga

SEQ ID NO: 495113 - DNA, 351 bp, Homo sapiens
gggcctgaaggaccacgtgcttgtagcaggtggctgaaatgtgttcactaggttccgttatgtttgataatagtggtcttgaaaagtccctgtaatagatccaggagactgcattcctgccctgaaggaatgtatttctaaggcaaataggcaacttggtactatcttattctgagtagagagtggagaaagtattttcagactgaagaaaactttgaaaagtcaggagctaagctgctcggagctcagtgccgcagcatggctgtggtggacgcgggaaacaacgggaaagttcttgacagagtctgtgtccgctcagtccctgcacttttcctttccaaatgcatctcg

SEQ ID NO: 495114 - DNA, 408 bp, Homo sapiens
agaatcaggcagagggatagggatggggggtttaagggagagcattctctaatacccgtttgttcatgacgagattcagttgctctgagactatggggtacaagttagatcctccgaatctggagatgttgtagagctggaacgatgtgcagagtagtgaacgctttgatgcgcatgcacattttgggaagatgctgctcctcagtggacacaaaggccgagtggggtaaaaccacgaagggagggcatggtgaagtcagctctgtggatgcagccctcactgggctggaccaatggtactcttccttggagttggcctgtgttagcaaccacatgtcaccattgcatgtcatggcttggaattcttgggccaaccccaaaatgtgcttttgcttgactggatttatg

SEQ ID NO: 495115 - DNA, 101 bp, Homo sapiens
tggcgggaaatatcaggtgtccgggcttaacttctccgggagctaagttttacctggctggcagtagataccatggtggctatcagggcagaaggaaaaca

SEQ ID NO: 495116 - DNA, 546 bp, Homo sapiens
gcgtgaaactaggagaatctttattaaactcgggaccacccaaggaggaccgatggagcggagacagggactcccgctgcaggctgcgcggaggcacgaggcactgaaagacgtagagtcacaaggatgcaggcttcggcgatcagtgattgtcgatgctcacatgggctacgctgatgcccacggatgcctgcacctatttcaccaggaaggactactggcgctgcatgacatccaccatgggctggaaccaaatcttgatgcggaacaggaaggacttgcactgcaggcggatctaatgggactgctcctacagctaggcgcgcacattcgacacctgctacttcacctactgcaagcggacgcgggtgcgtgagaacatcatcttcatgcgcacgcgcagccgctcgacgcaggcctggaaccggttctgcagctattggccagacagtgagtccacagctgagaaccagacgcggaccaattccagcaggggctacaggcactagcggatggacttgaagccgcaatgggtgccctcactgg

SEQ ID NO: 495117 - DNA, 369 bp, Homo sapiens
attattgtacctcatggatttccagtgtgatgctgaataaaagtgatgagagagaacacatttgtcttcttcctgatcttagggataaagcattcattcattctcaccagaatggagtgaagacattgtaagaccaaggacaagaacacactgttacaaacaaaaagacacccttaaaatgtgacacgaacaggttttatccctgccaagaaatattttctgaattcctagattgattaaatggtccttctctgtgctctcataatatccttacttacatctgttttatcacttacaatattttattgaaattatctgttcatgtgcgtatttcctccagtagaccataaactccttaactccaggaaa

SEQ ID NO: 495118 - DNA, 304 bp, Homo sapiens
ccaccccatcaggcagtcagggaagcagtggttttcacatttatttccagccagacagcttgggggaggccaggcacacggtagatccgggccttccttcggcccctcactcagggatccaggaaaaccacttcgggcacctcatttagtctttatctatggttagaggtctcactcggtcacctaggcgggagtgcagttatggctcagggcagcctcaacctcccagcctcaagcaatcctccggccttagcctccggagtaacgggggccaggtactggtcaggcggggcaggggtaccga

SEQ ID NO: 495119 - DNA, 285 bp, Homo sapiens
agccaaatgttcaggtagtgctgggataaacaaattgtgcaaattgtggtgcacctatgcaatgaatactacttagtgaaatgtcaatgatggaaaagctcaggaaacttaaagaaaaatccccattgtgcacatttatgtgagaaatagacatgataaagaattaagctgacactcgggaggctaaggcaggagtattccttaagcccaggagtttgaggctgcagtgagctatgtgccactgcactccagcctgggtgacagagtgagaccctatctcaaaaa

SEQ ID NO: 495120 - DNA, 513 bp, Homo sapiens
tgatctagggagggagtgattataagactgggtcccaatgatttactcaaccgggctgggccctatgggagcaatgaacgattactgtagccctaaactcctggcctgaagtgatccttctgtctagcctttcccaaattgctgcgatctcaacactgatccaccatgcctggcctggatttacaaactaaacacatttccatctttaacgaataatgagtgctgatccacactaaaagcagataactcaaaggttgatattaactttcactgaccaaagttgtccaatctttacgacaactcatgaccaaaaggatctgcttgagacacaaacttgtaacagaaataacaaggctggaggaagagcctttatagatgcacataggaacatatctagtaccctgtcttgaaatgctaaccttattatgcttttttccaagaggaaagacctaaaggaaactgagtgactgtgctattgctggaataccaaattattacaaacttcatggctaa

SEQ ID NO: 495121 - DNA, 158 bp, Homo sapiens
cgattccattcaagctccgttcctctccagtccacggcgaaaccactccactctattccattccatcctttcaattccactcaattccactccacttcattccactaccctccgctcaattcaattccactcgaaaccattccattccactccactcc

SEQ ID NO: 495122 - DNA, 102 bp, Homo sapiens
ggtccggattctctgatacatcctgctcgcttcgctacccaagaccttcgacggactactggccgcagaccaagaagctggggaaatgtgcccggggaggtc

SEQ ID NO: 495123 - DNA, 1050 bp, Homo sapiens
ccttgtcggggtgccctcttgggcccttttggtggccgctgtgagttggtttgggccccccttataagggggctttgggggctttattaagtttctcgggtgccccccctgtttaggtgtgggcccagtataaaggtcgtggcccccccgaattttgggtgtgtacccctcttctttggctcttatggagttgcccggccccacctccccatccccgttgtgtccccaacaccccccttgttgtttgcccccctgagagcacccgagattgccacagggccccaaaaaaagtgggaaaaaacgggttttgggtagaaaaaatatagggtgtaaaaatatcccttaagaacccacatttcacactgcgcacgggaataccacggctcggaaagagacccccctggggccacacggccacagtgtctccaggaggggagattaagttggttctcgcctcttctaaaattttttgtgaaatttttaaaagtgttcgctgttgtagtcttgagagtgtacacacgtggggtggtctctttaagctataaagtataagaccacactgttgtccccacattctcccgggcccctctcggtgagatattgaaagaattgggtatcccctctatggaacaaaggtttaacacacccacgttttcccgctgggttgtaaataatatatttgagagagtgggtacccccttatgagaaaatagtttttcaacgccacgagtctcctgggttgagaataataaggttgaggggagggcgctatgtatattgaccacacatttttcacatgttatggagaacaccctgagaaatgtgacacaccacgctcaccacgcttctgagattgaaacacttgtccttggcttggttgccaccacgagaaaactcggagtatgttttacacacacacgggaaacacacttgtaggagcttccctttaccacacacactaacttttttaaatgttttggctatattgggtccactattttaatttagagcgttataagggtccaataaagccaacttttgatgcctcca

SEQ ID NO: 495124 - DNA, 182 bp, Homo sapiens
  misc_feature (3)..(3): n is a, c, g, or t
  misc_feature (125)..(125): n is a, c, g, or t
  misc_feature (155)..(155): n is a, c, g, or t
ggncccccagatatcgcccatgctggaggaaacttggatgaccttccctggctggtaatgactcgtgaatgtgaagggggcaggatgtggcaggagggaaagagtcattatagaaaaccagtggncttcccttttgagagcagggatacttggangaccctaaaggcaggagtctctcctgg

SEQ ID NO: 495125 - DNA, 307 bp, Homo sapiens
caatagtatgattacagattctgtgtatcacatttgaaatgctaatgttttggcttatgttgatagttgacaacccgtgttttagcttatgtagtgtggtttctgtttttggctatcttatgtagaaaggcatgtaaggtatggcatttcttattcttcattatttttactgggatagcttttccaagattttgaatagctaaatgtctacttttttcttactagtattttcatctcagcctcattgatgatcattcaagtcgtgatgaatccagtaatcagcccagtcctgcctttatactacgcc

SEQ ID NO: 495126 - DNA, 255 bp, Homo sapiens
  misc_feature (9)..(9): n is a, c, g, or t
  misc_feature (15)..(15): n is a, c, g, or t
  misc_feature (35)..(35): n is a, c, g, or t
  misc_feature (59)..(59): n is a, c, g, or t
  misc_feature (75)..(75): n is a, c, g, or t
  misc_feature (80)..(80): n is a, c, g, or t
  misc_feature (119)..(119): n is a, c, g, or t
  misc_feature (135)..(135): n is a, c, g, or t
  misc_feature (141)..(141): n is a, c, g, or t
  misc_feature (154)..(154): n is a, c, g, or t
  misc_feature (156)..(156): n is a, c, g, or t
  misc_feature (183)..(183): n is a, c, g, or t
  misc_feature (192)..(192): n is a, c, g, or t
  misc_feature (205)..(205): n is a, c, g, or t
  misc_feature (208)..(208): n is a, c, g, or t
cccaagccngccgcngggggaggtgatagccattncctcccgtgtaaattatgtaatgngaaatttttttaatcntcgcncgtaatacgtttttattttgttttattttgaatgatganccttcgtgcccccccntccccngtttttgtccccngncgtgagatgtatgaaggcttttggtcncccggggantgggtggaggcanccngggcttacctgtacactgacttgagacgggttgaataaaagtgcaca

SEQ ID NO: 495127 - DNA, 507 bp, Homo sapiens
  misc_feature (34)..(34): n is a, c, g, or t
  misc_feature (39)..(39): n is a, c, g, or t
  misc_feature (120)..(120): n is a, c, g, or t
  misc_feature (354)..(354): n is a, c, g, or t
  misc_feature (358)..(358): n is a, c, g, or t
cttagaggatccgacgctctctctgtgggggctntatanaccaggtgcctctctgcatcggtggctctgagggagccctctcgcccggcagcaggtgggatgcagatggggctggccagngctcctgtgcccacagcagcctctgggcagtgtcccctgggcttctgtgagcagccgcagcctgggtgtgaatcttggaggcccggtggtggcggagcatgctctccatctgggagaggctgagaccatggcagctcctggcgctgtcctccccgtgcccccttcctggctccccagcttccggcgcctctccagggccactcgggcagcccctgcccaccccacaggcccttntctnctcacaaggctttgatcccaggcggcacaattgggttttcaaagcattcacggcccttgtttgtgtccctgggcccccggctggaggctgaggtttcggcgttcctgggcctggcctttgaagcttcctcttattaatcttttaacatc

SEQ ID NO: 495128 - DNA, 801 bp, Homo sapiens
ctctaggtcctgggaagatggcgaaggtctcagagcttcacgatgtcacttggtaagaaatgagagatacaatgagaaaatggacgagaagaaaactcaagaaatagtgagcaaattgtgcgaagttggagaagaactaattaatgagtatgcttcgtaagctgggagatgatatttaggatctatatatgtaacaggtgatgattgccgcgactagactatggtctgggatgacttggcattgttttgtcttcaagagctgagaagacagttccctggcagtcacagagtcaagcgattaacaggcatgagatttgaagccatggaaagatctgatgatgctatacagctatttgataggatttcaccaacgaagatccaagtaacactgctgcaatgaaacgcgtaagattgccattcgaaacacgcccaggggaacaaagtgtggaggccattcgggagctgaatgagtatctggaacaatttgttgcagaccacgaagcctggggatgatacttgcagacacttgtagatcacactgaacatgactatgcaaaagcagccttttgttgagaggaactaactgatgactaattccagactaacacttattactgtcagcagtatgctagaagttaagtatacccgaaggtggacttgaaaacctcgaactttcaagaaacgtattttgcacaggccttgaaccgtgaacaacagaaatatgagagctttgtgtggacttgatatgtcgggaagtcatattggttctatccaaaagcagtgcaaaccgaaaaggcacct

SEQ ID NO: 495129 - DNA, 342 bp, Homo sapiens
  misc_feature (82)..(83): n is a, c, g, or t
ctcatggtgagaaccacaaatagaaggtataaaagtgatttcaagaagagatgaagccggctgggtgcagtggctcacggcnnttaatcccagcactttgggaggcagaggcaggtggatcacccaggagtttgagaccagccctgaccaagatggtgaaaccccccattctactaaaaatacaaaaattagccaggcatggtggcacgtgcctgtaatcccagctacttgggaggctgaagcaggagaattgcttgaatctgggaggcagaggttgcagtgagccgagatcgcgccactgcattccagcctgggcgacagagcaggactctgtgtcaaaaa

SEQ ID NO: 495130 - DNA, 539 bp, Homo sapiens
  misc_feature (393)..(393): n is a, c, g, or t
  misc_feature (405)..(405): n is a, c, g, or t
agcagtcaatgagagccctgctactcataatgaattcctccctcagtgggccaaaggatacccaatatgcatcgaggccaccaactctctaggcaatagatactcattaccataacatccaaagtctcgtcaatacacatgtattcatccactttattcccactgttaagccctatctgtacggctcggatcagtaccccatcgagcactaacacagtagatccttttttcattgggtcgacaaattcgggcagaaagtgttcgttctcaggtagggctggcaaggggtgcaaggggtgcaacggtgggatctcctcactctcctcagagctcacccgaacgtccacaggagcaggcgagcagatatggaccagttcactgcctcaatctcanagacccctgtgnacgtccgggtgagctctgaggagagtgaggcagtgaactggtccatatctgcacgctgctcctgaggagctcatcaatttcctcttgaatttcttgggctacataagtacttgtagaggtaatcctcggaacac

SEQ ID NO: 495131 - DNA, 150 bp, Homo sapiens
cgatctagaggatcccggtacgctcggaccacggcaacccagagctgacgcaggactaccttcgcattcagaaagacccggtgccttacatctgtgcctgagcccctcccttcgaatattctcgagtggcactatgtcgtccgagcggca

SEQ ID NO: 495132 - DNA, 85 bp, Homo sapiens
agaggaaaaggtgggggtaagggcagagagagcacttgagattgctggtgcaaagtgccaagctagctctgcaacagagcatcag

SEQ ID NO: 495133 - DNA, 570 bp, Homo sapiens
atcttgagtatccccatgctgcagccacgatgcacaatgacattctctatgactcagctgcctgagtagctgggattacaggcacgtgcagtcagatccagctgatttttgtattatttagtagagtcggagtttcaccacgctggccaggctggtctcaaactcctcacctcaggtgatccactggccttgtgctcctgaagtgcctttgttctcctttttgccctttgaagcatgtgatctctgtgacctactccctgttcttgcaacccctcccctttcaaaatccttaataacaacctgctggttttgcggctcaggcgggcatcagggtccccaccgatatgtgatgtcgccctgggaggcccagctgtaaaagtcctctctttgtaactctttctcttcatttctcagccaggcaacacttatggcacatagaaagaacctacattgaaatactgggggctggttcccccgatatctggggcgccaacgtggctatactttttcctgagtgcatgtggggacccgctcccctcttggagttgtgtagaaacgttcatcgggccg

SEQ ID NO: 495134 - DNA, 121 bp, Homo sapiens
gctgtctagaggatcccgtgagaatctgtcatcttctaaacagagcagcagcaggaattctcgcgggagcagcaggaatagcagcaggaattctcgcgggagcagcaggaattctcgcggg

SEQ ID NO: 495135 - DNA, 296 bp, Homo sapiens
tatatatagtatccgtcggggaggatgatgaaagagattataaccatagcatcatatagcaaggactatacccctataccttcatgcattcatgaatgttattagaattaactttgcaaggatagtccaagcttatacctctcgaatccagaccagctacctacagatactcgtcttagagcgcacacccgtctatgttgcacaatagctgggaagattctataggtagaggcgacgaaacctaccgagcctggtcttggcttgtctctgtctaggttgtctaagttcaactttaa

SEQ ID NO: 495136 - DNA, 203 bp, Homo sapiens
cactcactttatcctctaactctagaagagacacgtgtgtctcgtaatatggccaagaacattacactagtacgtgatgaactgattgaggattccaacgtggcagtctgttccagagccagtgccatgttgcttcctgtataaacccagggttcatactcgccggtctagagggggcatcctctcacatcgcactgcaggct

SEQ ID NO: 495137 - DNA, 431 bp, Homo sapiens
ggggctgatctacaaaaatacagttttgagaaaggtaccttgcacatgaaatgttgctgtgatcaccccattaatgttgaaaatcctgctgcttgccctggttcgttctgtacttccctagggacacaaagccagcaccaaatgatcagtacccaaggaagccgtagtctgcaccatgacagaacactatccaatgcttatctttaaaggtctaagtactgctgatgcgtacttttaacccaattgatagccgtgcgacactgactggtttaaacttgaacaactgccagtctggccaaatactgacggtacctatcatattcattttggcgcacattctcattagggcaaattttatcatatcaaatatactcatttcgatagtcagtttaaacagcatattactcttgatgaacaaggagtcctcgttt

SEQ ID NO: 495138 - DNA, 119 bp, Homo sapiens
gatgtagcagaaatcagtgatatgaagccgtcctatgatggcaatagtacagcgtcctattgatagtgacatagtggaagtgagctacaacgtaatacgtgtcgctacgtgtacggcca

SEQ ID NO: 495139 - DNA, 1232 bp, Homo sapiens
gcactgcactccggcctgggtgacagagtgagacgtctgtctttataaaaatgaaaaaagaggattcatgtccttagatatagatggtaagcccactgggcaggtactgtgtctaatgtttaggtgtggcacctgtcacattgttgagagctcaataaacgttcaacgaacaacaaaaaaaaaaaaaaaaagaaaaaagagagggggcgagcgcatacgacgacagaataccgccagcagggtgccaccagaattatagacgcgacgagacgcgcaagcgttatgctgtgtgaacgacaagggggcccacaataagagagagagcaagcgacgcattataaaagagacaaggacagcggcgccagaagatgataaaacagcgggttgtgagacagacaactggtgaaaaacaaaattgtgggtacaccctgtggagaacaacacaatattgtgcaaaaggcgacacaccatagaacatctgtgtgtgagaggtgaatcgaccatacaaaagctggtcgaaaaaaaacaaacaacccaaaaacgagacagaagtataaaaacagacctacatctataagcgcggaaacatatattagttcacacatcttctttcatatacgagatgtggtatcacataaaggccgcgtccaacaacccaccagcgcgaccgtgccaacaaacatgacgcacagtcgagccgcgcacagtcaacgaaacaaagatgcaagatgagccacaccaaccgagcggagccacagccacgacacctctaaaccaaaacgacgaaccactcactgaataaaccaccacgcggcgcggaccctcccacaagcagcacaaacacaaccacgcagccgacaccgcagccacgcacacgaccaccaaccaccaccacgaaccgccacgaacgacaacaacagagcgcacgaaaagcagagacgagaagagagagaaacaccaagcaaaagaagagacgagagcgacaacacaacgaaggacggagacgaacacaagacaccgagacagaccggaagaaaacgcacaacgaacaggagaggacaaggaatcggcaagacaaggagccacgagaaggagacacgagcagagcagcagacgacgaagaacagagagagagaaagcacaagaaaaaaggagcaagacacacaaaagaacgaccgacgcaaggcaaaggtagcgaaacaacaaaatacagaacaacagaacaccaacat

SEQ ID NO: 495140 - DNA, 1102 bp, Homo sapiens
  misc_feature (164)..(164): n is a, c, g, or t
gcaaaattaacccgctaataaaattaattaaccacgtcactcatcgatctccgccagcccgatccaagcatctccgcagtgatgacaacttcggctcacgtccgtggtggcgcctgcgctgagtcctcgcaagatcaccacaggagcatattccgtagccatgncactactcgaccagacgcactcaatcggcgttttcatcaatcgagcgcacgatcagcgtcgaggacggtaaactgtatggctggaatcatccggctacacttgcacgccaagtgggggcctcaatacttcgtttagtctgcctcttccgtagcacagtcgggcgaggccgtactattagcggtatcagttgtcgtcatacgtcaagaaaccgtgaagacatcggcgattatctcatcctgcattgcaatgtatgagcaatctagcccttgcataggcgtatggtccgtcgccgtgaggccgaaatagtctatatctggaggggccagcagtaacttacgaaagcttacgtatccgcgcatcccatacattggggacagacctagttcaatgaagtctgaggaggctacctcagtagacagtcccaacctcgacacgattctttacgcgtttgcacttcatctggcccttcagtgatcgcagccctagcagcactccacctcctattcttgcacgaaacgggatcaaacaatcccctaggaagtcacctgccattccgatgacagatcagcttccagccttactacacaatcgaagacgccctcggattactttctcgttcattgctctccttactgcctttacgctattctcaacaggagctcctaggcggacaggacaattataccctagtcaagccttaagacccttcccaaattgggccgaaggaaaatttcgtaattgggcttacgagtctccgcattcgggccttaaaactaggagggggcatggcctattgatatcagcgtaagtcctagtaaatatccacccgcccttttgcacacaaggtaatttggccgtagacgcatatgtggcacgggacccctctacgtgggggacacacgagcctcactcggcgagcacggagatcacaccatcc

SEQ ID NO: 495141 - DNA, 484 bp, Homo sapiens
ctggggcctggagtccagcccctttgcgaggctccaagaactggggttgtgccccggggttgtttggggcccccagggccatttggtgggcccctgtttcatcaccacaggcctggggtcaaggggggttctccaacacccagggcccttgggatttcccttctggaagggaggggggcttcccctttcccggggcagaagaatgggcctggttaaagacccagccctatttttggggggggtttttaaaatcccctttttccccccaaaatttttcccccccccctttttttgggggttgaggagggatatccccccagggggcccaaaagccctttcattttttccccggccccccggtttttttttttttttttcaaaaggttccccccccgacatgcctggggggagccccccggggcccttattcccccgggacccccctttaaaatttcccagggagccataaattccttttttggga

SEQ ID NO: 495142 - DNA, 396 bp, Homo sapiens
  misc_feature (29)..(29): n is a, c, g, or t
  misc_feature (52)..(52): n is a, c, g, or t
  misc_feature (131)..(131): n is a, c, g, or t
  misc_feature (153)..(153): n is a, c, g, or t
  misc_feature (172)..(172): n is a, c, g, or t
  misc_feature (208)..(208): n is a, c, g, or t
  misc_feature (280)..(280): n is a, c, g, or t
  misc_feature (325)..(325): n is a, c, g, or t
  misc_feature (329)..(329): n is a, c, g, or t
  misc_feature (337)..(337): n is a, c, g, or t
  misc_feature (345)..(345): n is a, c, g, or t
gtcaggtcactgccactgcctgggggctntagtcattcaagtggaagacgantgtaactgcgtggtgatgtgacaactgttcctcccagaccccagaggactggcttctaggttgggatcaatcctgaatntgttatgtgttaatttacttcnattaaaaaagtatagtatntataatacaaacaataacccttctggggtttcttgnggcggttggaaatagtcccacatgtggtcatcagaaaataagtcattcctcataccaatatagatcagctcnttgacctctgaggggcaggagtgcttcctggtgtgcgtattagantccnttcctganggtcaagntacttactcatcctttttccatatcagtataataaaggagtgatgtgcaat

SEQ ID NO: 495143 - DNA, 835 bp, Homo sapiens
gcacagagggaggagcgagctgatcagtgtgtctctattcagggcggtcgcggtcccgatggtccgcgtgcatttctcaggtccctccgaccgcctccctggtcgttcatagcgccttcgtatgatcccgcacgtgagtcgtgacgaacgttccagcgacgcaggccagtggcctctgttgactgagaagtgtggcatcatgacgtgaagcatcaagtgttgattcttacagcgaagtggattacaacttatgctgaagactaggctggcgaaggtctctctatgcccacaggaatcttcacttacgaacctttgcaatagattgatcgtgaagagaaccgagatcattacaactatctcgattgactctagagcttctagatcctagtctgacgtgaatctcccagtccctgatcccattcttctcatcgattagccatgtatggatctggatggtcccacttatcatatgcaagctgcaacgtgcttggcatgcagtgttgaatgagagctcttttccaagggacactccagaggtagtctgttgtatgctctcaattgcgtggatgcttgcatagatagtcaaatccagcaagtcatgatgtgagcattacttgacgaaacgtgaaaacctgagaatccggcttgtttgattgacgaaactgtaacacggtcaagaactgtgggttacaagctcctgatttcccaggatacgacacgatggaaaacaactttggggtgtccattcaggaggaaacagttgcagagctaagaactgttgagagtgaaagctgcattcttatctggaccagatttctacgattttatattaccg

SEQ ID NO: 495144 - DNA, 810 bp, Homo sapiens
gtggcgcccttccctccgcttctctgtgctccccgcgcccctcttggcgtctggccccggcctctcgctcacacttcatgcaaacttaccttagactcctcacattgtaacactcaacggcgacatggcgctactgcttcaaacaaggaatgccccacacagctgttaccatggcccaccaaacctgcgaacgagtctacacaaagtatacccagcaatgcatgatcaggcatcagattgtacaacaacacaagcttaacgcggcaagcattcttgcccaacgagaacttacagtgtgcgctacttgcagccacagtgcgaagccactctacaggagcaccgaggcagtagactctccgtgcacaatcgctgctgcaaggcagaacagtgactcagcacacagacagcaaatcgtacagccaccagcaggaaaagggtacctgggcttcaatctaatcagtcagtccagcccttgcctcacagcccagcagccaacgcaacgaccttcgctgaagcaaacacaaactggcgaaacgagacgccctgtagcctgccatgcgcaaacccccttagttacccccccttaacttcaaacactttcaacttgcagccaacttacactaaagcggatgcttacatacatcaaccaatcacaatctacacaagcgcgcaacccatactatgtgtgcacctaaccaataaacaacaccataagacataccatccaataaatattataaaaacacaataaccacaactatcaactcaaccacacactccataataaataaatcactatcatcacaccat

SEQ ID NO: 495145 - DNA, 320 bp, Homo sapiens
cgaggtactctaagatccctcttactgtgtgaggtatcaagtctcttcttctcttcttctggccatcttctctctcagttctggccactgcagtcccactgactgacatcaacactggatgatctctggcttcctgggggctactaagcctcacttcaggatccactgaggacaaagcattctttgatgatcctttgttcacatctgtccctgaggttccttcatcagcgggctcttgagaagatgaaggggttttagttggctgactcctctcctcttccttctgtaagactgtctgtttcgttacttctccagcactg

SEQ ID NO: 495146 - DNA, 511 bp, Homo sapiens
  misc_feature (507)..(507): n is a, c, g, or t
aacctttttaacagttttaagataaaattggctgcagccttggcaagatgtcgaatcaagcatgatgccctttcaatttaccacatccttccagaaacagttaggaaacaggaactaagggcctccactttaccactttatgcttggataaatacttgtaaaatcagccctgaagaagtttataataatttgaagagaagaggctataataaagtcaaatctgtattgcatattgatgataaagtctttgctgtggatcaacattgctatgatgtcttaatttttccatctcatcttaaaaatgatcttataaatatagatcttttcaaagattacaaacttatatttcaggtaaactaatatttactttcattgtgattctcaacaatccaacctagccaaagaacttctccacttaaaaataaaacctaacactgtttatatttttatagattatcagggaggtttataaggcctaattgtcaccttgaataaaattaatacctntaaa

SEQ ID NO: 495147 - DNA, 268 bp, Homo sapiens
tggtcccgcgccctaacttatctgctttgcaagggtaaatgaggctggaacaatatttttttggccacctgtagggtacgtcgtcaaaccaatcatagccccctggggacatgcagtggaagaactagatggtttgaaagtctctaagacccaaggcacctgatgtctgtttgctgtgcctccactatattgccgagtgggtgagtgtctgcacccacatcctcacacattgatctagatatgcctttatccactcgaattataaaca

SEQ ID NO: 495148 - DNA, 260 bp, Homo sapiens
aacctttttaacagttttaagataaaattggctgcagccttggcaagatgtcgaatcaagcatgatgccctttcaatttaccacatccttccagaaacagttaggaaacaggaactaagggcctccactttaccactttatgcttggataaatacttgtaaaatcagccctgaagaagtttataataatttgaagagaagaggctataataaagtcaaatctgtattgcatattgatgataaagtctttgctgtggatca

SEQ ID NO: 495149 - DNA, 1627 bp, Homo sapiens
  misc_feature (365)..(365): n is a, c, g, or t
  misc_feature (397)..(397): n is a, c, g, or t
  misc_feature (400)..(400): n is a, c, g, or t
  misc_feature (409)..(409): n is a, c, g, or t
  misc_feature (425)..(425): n is a, c, g, or t
  misc_feature (430)..(430): n is a, c, g, or t
  misc_feature (435)..(435): n is a, c, g, or t
  misc_feature (437)..(437): n is a, c, g, or t
  misc_feature (448)..(448): n is a, c, g, or t
  misc_feature (482)..(482): n is a, c, g, or t
  misc_feature (484)..(484): n is a, c, g, or t
  misc_feature (490)..(491): n is a, c, g, or t
  misc_feature (497)..(497): n is a, c, g, or t
  misc_feature (576)..(576): n is a, c, g, or t
  misc_feature (578)..(578): n is a, c, g, or t
  misc_feature (585)..(586): n is a, c, g, or t
cgccgtgtcggaggtaacagcaagatgattgcagtccgttgcgcgttgcttgcggccgtggtccgtgcccttcctcggtgggtcgggaatgggtctcgagaagatgcttggggtgcatctttcatggctgcaaggaagctgtccagtgaccatctatccacgcatcttcaacaggacgtgggactgcttgggatgtcgctctattcttgaagtagcgtattcttggagcgtgatacctcgtgatcgatcttgaagacaaggtgggcgtgtcttataacgatatggtgatggtattgcccgcgtacatgggctgaggaatgttcaagcagaagaaatggtagagttttcttcaggcttacagggtntgtccttgaacttggaacctgacaatgttggngtngtcgtgttnggcaatgataaactanttcanggaangnagatatagtgnacgaggacaggagccattgtggacgttccagttngntgaggnngctgtngggtcgtgtagttgatgcccttgtgtactgctattgactggacaagggtccaattggttccaacgacgcgtaggcgagntnggtctgnnaagcccccggtatcattcctcgacactcttcagactgcgaggacaccacactgcacgacctggggcaattacacggctagcatcgagactacgcctcggatcgcccacacattggcacagagggatcacggcgctgacacgcgaatcacacagggtagaccagacagacctggcgacaccaaacctcgacaccagctcactgacgaccaccacaccccaattacacccccaaggacacacgtcgcaaactggatgcgactcttgcactagacacaaagaaagacagctcgtaaccggcatcgcccggtacgcctacccgggcccacaaacgcaagacatccctacaagggagctcccaacactcgcggagaaaaacaagaacatgcacaacgacacagcaagccaagacgacagccaacgagtaccaacgcaagaaggagaggctgtcccgcgactcccgaaacctcaggcacatcattgcacaccgaacacaacaccaaaccactgaaacaacacgtacaacagccaagagaaaatgacaaccaccaagaaggaacaaaagtcactgtcagcaagaaacaacacagcacacaaacacacggcaccagaacccacccgaacagaacaaaaactacaaacaaacaaaaggcaagccagacgctaccaggaccccacaagatagcaagaaagaccccgaccgcaccaacccgtggaccagcgagaggcccaatacacgacaacaagcagaaacaaccaaaacacggcacggcgagaatgcaaagaacgaagaacacacagtaaacgcagaatataggaacgaaagaccgagacgagaatacaccagagaaaaaaaaaacaagagacgcaacaaagagaagggagcagtcacccacgggagcagcaacaaaggcagaagcaatcgcagacgcacgcagagccagagacaaagcaagacaagagaggatagacaacccggagaccgccaaaccaggaaagacgtagacaacaacagcgccacacagaagcccgaaccaagtaaga

SEQ ID NO: 495150 - DNA, 646 bp, Homo sapiens
gtctcacgcgcggagaccaagcgatagtggccccatgcatgcgtcgagctttggcttgtcgagatgggagtccagcacatccacggttctcctcctcccgtcgtgaaccactgttgacagctgatgtctggtgactaggatccgtagtaatgaggctctatcgtcatggactagttcggtcgcacatcgctccaaccgtggtgtcgcgagcgtcccgtcgagagcgaaccgggaatggagagcagcgagttgaaaaagccagaggcggagaggtgagggtgaccatatctcgtggactgtgagtaggaatgggcactctgggcgctgtcagcatggctaagaccatggtggtcgaggtgtctccaggtctgtgatctgtagagcctctcatgactccgctgactatttgaactcctatcgcgctgatgccctgcctgatcaagccatgtctgaacaggagggtcaagtcccagggggctcgggggctgccctccgtgacatgctggcagagcagtgtggagctgtggtggtcccagcagccgcggcgctcgtgcgctctgcgttcgtgcgtggccgtgggcctcgtgtgcaggctgtggcgcgggcggcgtggcactgctgtcaaccaccagcagccctcaggtga

SEQ ID NO: 495151 - DNA, 848 bp, Homo sapiens
ggagacgcacttgcactcttcaaggacctacagcttcaagatgttatgatgtgggtggtcagcggtctgagtcggaagtaagtggatccactgcttctgagggcgtcacaggccatcatcttctgcgtagcgcttgcatccgtcctatgacttgggtgctcagactgaggacgaggagatgaaccgctatgctagtgagagcgatgaagcttatccccgagtagtcgatcctgcaccatgctaatcctggttcgacaagtagcgacgatccgatcgagtccattcttccatctaatcaagcaagggacactgtgtatagagtgagacagatcactacactggtccccctgaccactctgcttcccttgagtacactgggtgccaactacatatgatgaggcatgctcgagctacgattccgggagtaggttttgaagtgaccatgcatactaacgcgcggaagacgaccgctggagatctacccgcacgtcacgtgcgccaccgagcaccacagcaactgtgcagtaacgtagtattggactgactcgctcaccgcactgtacatctagtctagaagaacgatctggagaggagtgccaggtctctctctgaaggggggccgctcggtgcacgggtgcgtgatgggcctgcgtggtacctttgtacctccgcgagaccccttgaggagcgtatgggtcgcccaggaatgactcgctcgtcccggacagttccgcgccgtccggctggttctccttgcttgaccgtctctttagtgcatcaggttcctcccgtgtacccactccgagtccaggacgtaacggatagggcgtttgcggacaggtccttcc

SEQ ID NO: 495152 - DNA, 173 bp, Homo sapiens
agctggcaacattctccaatgttatctagcatacagagtttaaatgccatgtgtagataaatccaattgagattgcatagtgcttgttatgcaacaggaactaaacatgaaatctactgcactgaggtcagggtatggtggtcccagagctcgaatctcgtaatacttggctc

SEQ ID NO: 495153 - DNA, 354 bp, Homo sapiens
  misc_feature (140)..(140): n is a, c, g, or t
  misc_feature (162)..(162): n is a, c, g, or t
atagtactcggagtaatagtgtttgtaagtgacgtatagctatctctaacagtagttaaatgtggagcaagatgaccagacaggattaaatttattgaattacagttacaagtggaaaaaatgactgacttactgcatgnagaagtattcatgtcacctgtnacaagctatggaactcaaatgtccatgtatataccaaattataaatgaccatgtaagggtaaaattaccggggatccatttacaaccaagaaattaaccaggtagttttccaggctgtttgattaatccagcagggtttactcttggaatccatagcatttctacaatttaattttggaccaagttctattc

SEQ ID NO: 495154 - DNA, 975 bp, Homo sapiens
tccgggttccattcgcatcgtgtccttagtgccggctcattaaaatcacaaatgaacatatagtggtgatgtcgatcagaggagcagaaattgttatcagtgaaagtgttgcccagtgggcaggtcggtaagaaattgtgagatgagggtagcaatatatcaatgggaccgtgatcgtcggagtgttgtcattatgtgatcgaaagataggttagattccttctttgtcataaagtatagcagccgatgatataactatgagcgatcaaatgtgggagttgaaggtacggattggtggctgtaataggggttgaatcgtcaaagaggttgataacttggaaagattatgatcgaaggggaggcattggtgagtaaaggaagcatggggccagaattatgggtagcatgtcatctcagacacaaacgtttacattgatgtatgatatactaattgagtgctatgctcgaaatatataaccaagaacatgggatgattcatgacttgtaaatgtgtacttcctttaattatatctctttgaagagattattcagatctgacatgctgggtggaattttgttggagtggtactgctttgtaactaagactggttgtggttaatgaaaatgttcagctggaatacactagaaaactcccaatcaagctaaactggtgtccccggtgacccctttttaagatatgacttgacttcggtggtaaggtgcaactttgtccccaagcatggtgggtggcctccctacaacttacgggctgcgcacagtgcgacttgcataccgtgccagggcctcttcacacggggggacgggccgaggtctcacccgaaaaaccccgggcgcggtggaggtcgccaggaggggggaacaaaggccgtgtcggggcccacaacccgaagcctaagacggggctaaaacacacatgcgccggactacaacatcacaattgcgatgaaaacaaag

SEQ ID NO: 495155 - DNA, 1338 bp, Homo sapiens
cggacgcgtgggctctacaaaccagcaaagacattggaacactatacctattattacggacgcatgagctggagtcctaggcacagctctaagcctccttagttcgagccgaggctgggccaggccaggcgaaccttctaggtaacgatcgcacatctacaagcgtatatcgtgcaacagccgcagtgcatttgtaagtgaatcttctgtcatagttaataccacagtcataagtcggaggctttggcaatctgactagttcccctaataatcggtgcccccgatatggcgtatccgcgcgcataaagacaacataagcttctgactcttagctccctctctcctactcctgtctcgcgatctgactatagtggatggccggagcaggaacaggttgaacagatctaccctcgccttagcagggaactacgtacccacgcctggagcctccgatagagctaaccatacttctccttacacctagcacggtgtctccctctatcttaggaggccagtcaattgttcatcacaacaatgtatcaagtatagagacgcccctgccattagcacaataccagagcgcccctcttcagactgatccgtcctaagtcacagacagtccgtacattctcctattctctcccagtcctaagctggctgggcgttcacttataggtaactaagcagaccagcaaacttatacacaactttcttcagaaccccgccgggaggaggatgacggccattcatatgcaagagctattctgcaatgaccgagtacaccactgaaagcttaaatatgcttcatgcctaacaaggctcgggaagtaatcacccatattggtcacctagaatacacggaacaaaagcaccaattgggtaccataggaatgcaccagcaacacaatgaaagacatacaaagcacaacagtgaaggccacacactattacggcaggactgaacgcaaaacagcgcgtttgtaccaccgcacacaaatacgagaaaccacgagggcaccagcaataacgaacgcacacaacgcgaacacacgacgcgcgcggtcgacccccgacacccctcgaggaaggagacattaccacgaagccccagaaccgagcgcaaacaaggagaatgagctcacaacgcacgaaacagatgaatggaccatagtctgcgacacaacaaacgaaggacgccaccaagaaagacaccgacaagaaaacacactcaccaaacacccgaccaacagcgcacaaggaagcaacagacaaaaacggcaaaccatacccgccacaagcgaacagcccataaaacaaagaaaacaagaggaacctaca

SEQ ID NO: 495156 - DNA, 1024 bp, Homo sapiens
  misc_feature (3)..(3): n is a, c, g, or t
  misc_feature (732)..(732): n is a, c, g, or t
  misc_feature (832)..(832): n is a, c, g, or t
  misc_feature (847)..(847): n is a, c, g, or t
  misc_feature (851)..(851): n is a, c, g, or t
gcncccgcagcgccggagtcaaagccggttcccggcccagtcccgtcctgcagcagtctgcctcctctttcaacatgacagatgccgctgtgtccttcgccaaggacttcctggcaggtggagtggccgcagccatctccaagacggcggtagcgcccatcgagcgggtcaagctgctgctgcaggtgcagcatgccagcaagcagatcactgcagataagcaatacaaaggcattatagactgcgtggtccgtattcccaaggagcagggagttctgtccttctggcgcggtaacctggccaatgtcatcagatacttcccccacccaggctcttaacttcgccttcaaaagataaatacaagcagatcttcctgggtggtgtggaccaagagaaccccagtttgtggcgctactttgtgcagggaaatctggcatcgggtggtgccgcagggggccacatcccctgtgtttggtgtaccctcttgattttgcccgtacccgtctagcagcttgatgtgggtaaagctggagctgaaagggaattccgaggcctcggtgactgcctggttaagatctacaaatctgatgggattaagggcctgtaccaagggctttaacgtgtctgtgcagggtataatcatctaccgagccgcctacttcggtatctatgaccactgcaaaggggaatgcttccggatcccaagaacactcacatcggtcatcagctggnatgatcgcacagactgtcacttgctgttgccgggttgacttcctatccatttgacacggttcggcggcgcatgatgatgccagtcaggcgcaaggactgnctccttaccaggccntttnatggctgcccggcaaggattgctccgtgatgaaaggcggcaaggctctttacaacgggtgcattggaccaatggttctcacaagcatgggcttggtccatatggccctggcctggctccacgcaacttcaggacctacactcagtaaatcctaaggctttccccccgtgcacg

SEQ ID NO: 495157 - DNA, 359 bp, Homo sapiens
atgtgtttcaacatgtactccgcggtcagaccccagatgtcagagctcgacggcagacaaggacaccatacctcagaatagttatatataaaagggacacggattgtgacacggttaccccatttgtgtttaaccccgctggccaggattagggtctgtggtgtgttctgtgttggttatggattctcccttgtgtgaggtctcttctggcccaactgggtggctgtggaagtctgtgaagtggcccaaccacaagcatacctattaagaggcccagagctttcaggccccacttcgctcttctctgtgcccacatatgcctccttattcgcgatatttcccacccccagagttttttt

SEQ ID NO: 495158 - DNA, 1081 bp, Homo sapiens
  misc_feature (3)..(3): n is a, c, g, or t
  misc_feature (789)..(789): n is a, c, g, or t
  misc_feature (889)..(889): n is a, c, g, or t
  misc_feature (904)..(904): n is a, c, g, or t
  misc_feature (908)..(908): n is a, c, g, or t
gcncccgcagcgccggagtcaaagccggttcccggcccagtcccgtcctgcagcagtctgcctcctctttcaacatgacagatgccgctgtgtccttcgccaaggacttcctggcaggtggagtggccgcagccatctccaagacggcggtagcgcccatcgagcgggtcaaagcttgcttgcttgagggttgacgttattgccacaggcaaggaatgatcactgcgagaataaaggcaattcaccaaacggctatttataagaaccgtgggggtggcccggttattccccaaaggggacgcaggggaagttctggcccatttcaggggggcgggaaaaccgtgggccaattggttcatcaagattattttccccaaccaaaggtttctataaatttcggctttcaaaagataaatacaagcagatcttcctgggtggtgtggaccaagagaaccccagtttgtggcgctactttgtgcagggaaatctggcatcgggtggtgccgcagggggccacatcccctgtgtttggtgtaccctcttgattttgcccgtacccgtctagcagcttgatgtgggtaaagctggagctgaaagggaattccgaggcctcggtgactgcctggttaagatctacaaatctgatgggattaagggcctgtaccaagggctttaacgtgtctgtgcagggtataatcatctaccgagccgcctacttcggtatctatgaccactgcaaaggggaatgcttccggatcccaagaacactcacatcggtcatcagctggnatgatcgcacagactgtcacttgctgttgccgggttgacttcctatccatttgacacggttcggcggcgcatgatgatgccagtcaggcgcaaggactgnctccttaccaggccntttnatggctgcccggcaaggattgctccgtgatgaaaggcggcaaggctctttacaacgggtgcattggaccaatggttctcacaagcatgggcttggtccatatggccctggcctggctccacgcaacttcaggacctacactcagtaaatcctaaggctttccccccgtgcacg

SEQ ID NO: 495159 - DNA, 170 bp, Homo sapiens
cgtgatcctcctgttcaacaaccggagggtgaaccctcgtcccctcgaacagcttgtttaaagagcacctgtgggtcaggcacagtggtgcataccctgtattcccagcaccttgtggaggccaaggctgggcatgattgcctagaagtcagtgagttcagagaaccagc

SEQ ID NO: 495160 - DNA, 130 bp, Homo sapiens
agattgacgagtctcaccgattggagtcctaattttaccacttacttttatttctttatttttttacttttatgctttgataaagagtctcaactctgtcgcccaggctgaagtgcagtgacgtgatctc

SEQ ID NO: 495161 - DNA, 1009 bp, Homo sapiens
ttacagatcgtctcctgttcaaatcctagtcataaatatttataatgcacacggtcattttgggatttgtttgtgagactcattgctgtcaccccgggggagtgcagggcttgatcttggctccctgcaacttctgcctcctgggtgcaggcgattcgattaacaatggagacgagtcgtgcagaggaaagaagtaacttagaatctaatctttagttaacctgggatatcacagaaagatactggggcctgccacttgtatttctttgtcctcaatactgaacactagacacatttgaaaccttcctcagaaggaaacaaaggcaactggttatgcctgggtggtggcatggaagatgcccattgttgcccaagttggcttaataagtattttgaaattagaaatgaaacatgaggtccaaggcctgtcgcagtgtccgctaccgcaacccattcctcctcccggggaaaacgagaaacccgtatcatcttccaaatttcggattcatcactgcacttaagaaatgaaccgttgggaattttaaaatgtgaataactcaagtatctggcttttgagatgcccggctgagcactaagttcaggcatagctgaatgccggggaagaaaccagagggggtatgctggctcctgatctttgacaggtggacagcacagctattcgaaatacactaagtgtgaggagaaacagcgtctgaggaaccagaagactatggagggccaggggaagcgtgaaaatcgcaaccaaatactgggtgagggcgaggtacgaagggcaaccgttgacacacaagctggcagggcatagaggacccggagaagcagaacccgacagaggaaaggccccagaatgtacaggacaaaagatcgaggggagggagggaaaggtgcacaaaagagcacagaagcagacgacaatagagaaacaaagagaagaaaggatagagcagagaccacagcagagcacactagccaacacagcacctctcat

SEQ ID NO: 495162 - DNA, 316 bp, Homo sapiens
ctgatagaccacaaatcgatatgtgatcatcacgagacaaccagagtgacatgcacatgtaacgccgacacgccggaggagatgcaccacatgagataaccctgctgaagagagtccaaaggggacaccagcgtgagagggccaggaattcatcgtgagaggctggttgcacacagaggtgaagaacagtccaaagatgtcttcactgacactgaagaaacggtggtttgtactcacccacaattccctggattactacaagagttcagagaagaacgcgctcaaactggggaccctggtcctcaacagcctctgc

SEQ ID NO: 495163 - DNA, 401 bp, Homo sapiens
  misc_feature (7)..(7): n is a, c, g, or t
  misc_feature (125)..(125): n is a, c, g, or t
  misc_feature (229)..(229): n is a, c, g, or t
  misc_feature (343)..(343): n is a, c, g, or t
  misc_feature (375)..(375): n is a, c, g, or t
  misc_feature (393)..(393): n is a, c, g, or t
gaatttntctttctgcatcgttctgtcataaaaaggggtactactatagaatagaatgcaggcttaggacccccgtaagctcactgttcaacccagcccagcaaactggtcagttataaattttnctgcaggtccctgaaacaacaacaaaaaactggatgaggtttccctcccatcttgttttatgtccttgggagcttgaccttataaccatacggcggtacttttncttggtctctgccatccagggaaccagaatttggggggttatgtcatagttagctctaaaaattatcttgagcagttaaaagcctttgcaagcttaaaattgactgctgtaggntccttctggggaaggagcaatgggaaaccttnccaaagcttatagctcanccagctga

SEQ ID NO: 495164 - DNA, 109 bp, Homo sapiens
tgatgtcattccccttggtgaagagggggatgtaaaggagacgagaagaacctatgtgaggtttaatttattaatggcaacaggaactaaaaaaaaccaacaggtccta

SEQ ID NO: 495165 - DNA, 203 bp, Homo sapiens
tgacggtgttctggttgcgcaggatatagaagtcgggctggggaagggagtggtaagggaggaacaggcctccaggtgtcattcgagtgagtgtgccccacagcaccagtttcagcaacatatggtcccggcaccgcaaggaacaagtgaaggctcttgctcctcagggagctccgcaaatgtttcatttattacacatggaa

SEQ ID NO: 495166 - DNA, 132 bp, Homo sapiens
  misc_feature (13)..(13): n is a, c, g, or t
  misc_feature (58)..(58): n is a, c, g, or t
  misc_feature (132)..(132): n is a, c, g, or t
atggcacatgcancgcaagttaggtctacaagacgcgacttcccctatcatagaagancttatcacctttcatgatcacgcccacataatcatttttccttatctgcttcctagtcctgtgcccatttcctn

SEQ ID NO: 495167 - DNA, 197 bp, Homo sapiens
agctcggaccccaatgctgtcaaatcgcaatggaattcctacatgcttacgaacgacaaattctaggctatatacaactacgcaaaggacccaacgtagtaggcccctacgggctactacaacccttcgctgacgcagtaaaggtctctcccaaatcctcctgtccatagctttgttggtgcctcctaaaaccagca

SEQ ID NO: 495168 - DNA, 159 bp, Homo sapiens
ctagaaagatattttagagaacttaaattggcattttacgaaaaatttgcatctcctaccagtctgtaagatgtacacaccagttttgtctgccgttgttactccaaatacaagtatgaccaacctgtctgaatatttatagctaattatttctagagc

SEQ ID NO: 495169 - DNA, 617 bp, Homo sapiens
  misc_feature (100)..(100): n is a, c, g, or t
  misc_feature (150)..(150): n is a, c, g, or t
  misc_feature (184)..(184): n is a, c, g, or t
  misc_feature (265)..(265): n is a, c, g, or t
  misc_feature (423)..(423): n is a, c, g, or t
ggagttgagagcagacctgactcttataacacacatgtcccttgccccagtcctatgacgcagcttcaggagtggatcctattgatgccgatgcttatgnttttgtgtttggctcgggagttaatgaggatgtagagagtccagagctgncaacatctcggccccttccaaagatactgttggntagtggtgctccaaaagtggaaaccccggcgctgaatattcagaacaagattcctggtcaggcaaagtcccctgaagaaantgataaagagaaagttcccctttttggctcagaaaggaaaatgggccccgccgaagaggatacaaatgggtattttgagaaaccctccgaccgtttgttttaacggacagaagtcctagcaactgtccttggtgggggaggtattggctttttccttngcaattttttttatcccgcgggtgggggatcgcatgaaaaaaaaggatgaaggaagctttgcccttggggaaccccaaccctcccgggctgcttttccgaaggccccctctaaggggttttttgggtaaaacccccccttagggtctctttttatgggatccctgaacttttccaaataaagcttttgcctaga

SEQ ID NO: 495170 - DNA, 170 bp, Homo sapiens
ctggatttaaatattgtaaaaaaaaaataagttataactgttataaagcagaacttttggtgcattttttaaactgttgaagtccctgggtaagtttgtttgggcaaagtttccgcaggatttattaaaacaaacttttttttttcttcaaataaaaaagtgcccctgga

SEQ ID NO: 495171 - DNA, 567 bp, Homo sapiens
  misc_feature (423)..(423): n is a, c, g, or t
aagggcttcctgtctcttgcctggtcctgttggtgaaaatgaagggctcttgttccaggcctgtcaccttggcaccctttaattaacagtgaactcacttcattctgtgattttaaaagctgatgcatttcacccaaatgaacgtaaccccacctatttgtcgttgaagtagagctttcctggaggaccacatcttctcgacaggtcgcaggtctggccttgcccggcgctggtgagccccagctggcttagaccgtgtagctcgtctgttaaagtctgaccagaagtggccgggcgcagtggctcatgcccgtaatcccagcaccttgggaggctgaggcgggtggatcacgaggtcaggagttcaagaccagcctggccaagatggtgagacccgaaccagacgatgccacatggctaatngaagtaggaggacacttaagcagcgtggtgggaggcaggagcctgtgaatctgccgctgactgctgtagggctgaggggaagaagattgcctgaacccaggaggtggacattcgcagtgaactgagatgacgccatgaactcca

SEQ ID NO: 495172 - DNA, 282 bp, Homo sapiens
tgatattcgtacatcgaatgacaatatgctcaaagaaaaatacgatatcatatcaagttgtccgtatttattttctgaagactttactgtaaatccttctcatatagcatgcggactgacagagaagcctaaatcaaatgagagcaaagtcatatgagaaaacactcatgcaatacacgtgtggagtgtccagcagctgctcactgctctgcccaatgctttagggatacagaaaacataggctctggccctaagaaacttcagatgccacattcttctagg

SEQ ID NO: 495173 - DNA, 143 bp, Homo sapiens
  misc_feature (134)..(134): n is a, c, g, or t
cttccccacaggcagctgtatgggttgacgcaggtacgagtggcatcacaacaaacccagtaagtccagccggcacagcggctccttgtgttctgttgtcttccctgctgctgccacatcctttaccctcctgntgcctctgg

SEQ ID NO: 495174 - DNA, 217 bp, Homo sapiens
tagcaatatggtaggtgatacgaagagtgaaagtgtacgtgacttaatgtactgattatatctttgtatagcactgtgatattattcagaaagcagagccactatgcaatcgcagttgaataagagctttgttccctgctatatggtaatgttaaagaaacaaatggcaatggtttaaatgacgttataacaatctcccacctagcaaaagaatcta

SEQ ID NO: 495175 - DNA, 110 bp, Homo sapiens
ctctcatccctcccattctccatttcccttccgttccctccctgtcaggcgtaattgagtcaaaggcaggatcaggttcccggcttccagtgcaaaattccgccaggaga

SEQ ID NO: 495176 - DNA, 465 bp, Homo sapiens
aagaagtagctactgataagagagcctgcgcccttggcttataattacatacatacagattgagccaatattttgcggggagtactgaggagtacactacttcttggaacctagagtactaactgatgcagtgctatagatgtgaagcaaggtgagcagtatatgatagagtctagatttcagcccagagtgggtactacgatgccccatctcatcatgtggggcaccttgtgcgagaccttgaggatagacgatgtccacgactacacacataatcagtgagagtggcctgggctcaaacaaagcttctgttaggatgtacagatcagtgctatgatataagcctgcataattgctcatgatatcacacacggaggtaaacatttaggtgagtttgacaattgccgcatgctgcatggtattcgcttgctaccctcaagcggatgcaagtgctgacatcgatac

SEQ ID NO: 495177 - DNA, 246 bp, Homo sapiens
  misc_feature (14)..(14): n is a, c, g, or t
  misc_feature (18)..(18): n is a, c, g, or t
  misc_feature (25)..(25): n is a, c, g, or t
accggggccgaatnctanttacgcntgtacctcactacttttaactctggcaaagccacaaacacattaaaggagccatttagagctcggcagtcgggtcagacccggaccttcctgggaaaagggtgtagaaggtctgtagacatagcggacgctgagaagtaaaaggcacgggacttaatcacaccaccgtgctctttgggctcaacttaatccaaaaagagaacggaagctccgtccttcctc

SEQ ID NO: 495178 - DNA, 3777 bp, Homo sapiens
tctcctgcgtagccatggcggtcccattccccaaccctctttccagtggtgacccaagcctccggggttcagggtgaccacaatgtctcccccactctgcatcccaggcccatatggcctggctctagagctccccactccatccagagtccctgtttccccaaagagaagggcccaccccggctcccgctcactcctcctcctgcctctgcatcttccccgggcgctgcctggacaggcctgcctgcgtgctgggacatgtctggcctccaaggaccgtcggtgggcgatggctgcaacggtggaggggccagagctggaggcagctgctgccgcaggagatgcttcagaggattcggacgcagggtccagggcgctgcctttcctgggcggcaaccggctgagcttggacctgtaccccgggggctgccagcagctgctgcacctgtgtgtccagcagcctcttcagctgctgcaggtggaattcttgcgtctgagcactcacgaggaccctcagctgctggaggccaccctggcccagctgcctcagagcctgtcctgcctccgctccctggtcctcaaagggtcgatctgggacctcggaccctggctctgagggccacatccgcctccccccttcccaggagggcaacgccgggacacactgggtgcctgtctccggggtgccctgaccaacctgcccgctggtctgagtggcctggcccatctggcccacctggacctgagcttcaacagcctggagacactgccggcctgtgtcctgcagatgcgaggtctgggtgcgctcttgctgtctcacaactgcctctctgagctgcctgaggctctgggggccctccccgccctcaccttcctcacagtgacacacaaccgcctgcagacgctgcccccagcactgggggccctatccaccctgcagcgcctcgatctctctcagaatctgctggacacgctacctcctgagattggaggcctgggcagcctcctggagctcaacctggcctccaaccggctgcagagcctcccagcctctctggcgggacttcggtccttgcggctccttgtcctgcacagcaacctcctggcctctgtgccagctgacttggcccgccttccactcctcacccggctcgacctgagggacaaccagctccgggacctgccccctgagctgctagacgccccctttgtgcgcctgcaggggaaccccctgggtgaggcctcgccagacgccccgagttcaccagtggcagccctcattccagaaatgcccagactgttcctgacctcagatttggacagctttcctgtgacccctcgaggctgctcagtgaccctggcctgtggcgtccgcctgcagttcccagcgggagccaccgccacccccatcaccatccgctatcggctgctgctgccggagccaggcctcgtccccctgggtcctcatgacgccctgctcagccatgtgctggagctgcagccccatggggtggccttccagcaggatgtggggctgtggctgctcttcaccccaccgcaggcccggcgctgccgtgaagtggtggtcaggacccggaatgacaacagctggggtgacctggagacctacctggaggaagaggcaccccagcggctctgggctcactgccaggtgccccacttctcctggttccttgtggtttcccgccctgtgtccaatgcctgcctggtgccaccggaggggacactgctgtgctcctcgggtcatcctggggtcaaagtcatcttcccccctggggccactgaggagcctcgtcgagtctccatgcaggtggtgcgcatggctggccgagagctgcaggccctcctgggagaaccagaggctgcagtgagccccctgctgtgcctgtcacagagcggtccccccagcttcctccaaccggtcaccgtgcagctgcctctgccctctggcatcacaggcctcagtctggaccgctcccgcctgcacctgttgtactgggcccctcctgcagccacctgggatgacatcacagctcaggtggtcctggagctcacccacctgtactggctctggtacaccaccaagaactgtgtgggaggcctggctcggaaggcctgggagcggctgcggctgcaccgtgtgaacctcatcgctctgcagcggcgccgggaccctgagcaggtcctgctgcagtgcctgccccgaaacaaggtggacgccacccttcggcggctgctggagcggtaccggggccccgagccctctgacacggtggagatgttcgagggcgaagagttctttgcggccttcgagcgcggcatcgacgtggatgctgaccgccctgactgtgtggagggcagaatctgctttgtcttctactcgcacctgaagaatgtgaaggaggtatacgtgaccaccactctggaccgggaggctcaggctgtgcggggccaggtgtccttctaccgtggcgcggtgcctgtgcgggtgcccgaggaggctgaggctgcccggcagaggaagggcgcagacgccctgtggatggccactctgcccatcaagctgccgagacttcgagggtccgaggggccacggcggggggctggcctctccttggcacccttgaatctgggagatgccgagaccggctttctgacgcagagcaacctgctgagtgtggctgggcgtctgggtctggactggccagccgtggccctgcacctgggggtgtcctaccgggaggtgcagcgcatccggcacgagttccgggatgatctggatgagcagatccgtcacatgctcttctcctgggctgagcgccaggctgggcagccaggggctgtggggctcctggtgcaggccctggagcagagtgaccggcaggacgtggctgaagaggtgcgcgcagtcttggagctcggccgccgcaagtaccaggacagcatccgacgcatgggcttggcccccaaggaccccgctctgcctggctcctcggctccacagcccccagagcctgcccaggcctaggccccacagacttttaggctggcccagatattccccagtggatgggcagagcccccaccttcaagtctctccagtgtgtggggacgggtccctgtgagcaacaaaactgcactgtttctttcaaaaaaaaaaaaaaaaaaaaataaaaaaaaaaaaaaaaaaaaaaaaaaagagagagggggcgcgcgcgcctctcacaagatgtattctccccccgggggggcgccccagttttacgcgcgctctccccccccatcgtttttttttgtgtccagagggggcgccccctagagagagggggcgctcggtttatatataaacgccgagagcgcgcgcgggcgcgcgcgctgtttaaaacaccgcgcctctggcggcggcgggaacaccagcgcggcccgactagcgcggggggcacctcttggggcggaaggagcacccccctactgcgcggggggggcggcgcggcgccatatatgtgtggggcacacacacctatcccctacgacggagagattattaagcaccggctccaagggggagaaactattctaaacactctttcaagcgccgtcgctacacgaggggggtacaccacaacacgcgcgcgcgaattatgtagcttcgcgcctggtcagaagacaacgttgttggcgtaccaacagaggagtactttagtcttcctgacgacactttttttttaccccggggcagccttatgctactaatcg

SEQ ID NO: 495179 - DNA, 272 bp, Homo sapiens
  misc_feature (162)..(162): n is a, c, g, or t
aagcggatggtgtgcttgtcactgtccagctcagagacgtagcacatcccggacagcccccgaggtgtgtgcaccgggcatcaatcacgccccgggcaccgttcagctgcacggcataaggacgctggctggttcaccttgagccccgtctcctcgaggctngtgacagtgagacggcgagcgtcataccgagagggagagccacaacaccacataggggtctgtccggtatgtgctcatcattgaacttgatagagacctcatagtcacct

SEQ ID NO: 495180 - DNA, 110 bp, Homo sapiens
gtggagaccaggccagccaggagatggaccttccagaggtggcagctgttggtggtgcctcttgagaggagcaggagttcaacgtgccattttcagcacgaggggcttgc

SEQ ID NO: 495181 - DNA, 3604 bp, Homo sapiens
ggccggcgggattccaggcgccgagcgcccgctgagcagccaccctttgcgcgccgcctgcagcgcagcttccccgggcgctgcctggacaggcctgcctgcgtgctgggacatgtctggcctccaaggaccgtcggtgggcgatggctgcaacggtggaggggccagagctggaggcagctgctgccgcaggagatgcttcagaggattcggacgcagggtccagggcgctgcctttcctgggcggcaaccggctgagcttggacctgtaccccgggggctgccagcagctgctgcacctgtgtgtccagcagcctcttcagctgctgcaggtggaattcttgcgtctgagcactcacgaggaccctcagctgctggaggccaccctggcccagctgcctcagagcctgtcctgcctccgctccctggtcctcaaaggagggcaacgccgggacacactgggtgcctgtctccggggtgccctgaccaacctgcccgctggtctgagtggcctggcccatctggcccacctggacctgagcttcaacagcctggagacactgccggcctgtgtcctgcagatgcgaggtctgggtgcgctcttgctgtctcacaactgcctctctgagctgcctgaggctctgggggccctccccgccctcaccttcctcacagtgacacacaaccgcctgcagacgctgcccccagcactgggggccctatccaccctgcagcgcctcgatctctctcagaatctgctggacacgctacctcctgagattggaggcctgggcagcctcctggagctcaacctggcctccaaccggctgcagagcctcccagcctctctggcgggacttcggtccttgcggctccttgtcctgcacagcaacctcctggcctctgtgccagctgacttggcccgccttccactcctcacccggctcgacctgagggacaaccagctccgggacctgccccctgagctgctagacgccccctttgtgcgcctgcaggggaaccccctgggtgaggcctcgccagacgccccgagttcaccagtggcagccctcattccagaaatgcccagactgttcctgacctcagatttggacagctttcctgtgacccctcgaggctgctcagtgaccctggcctgtggcgtccgcctgcagttcccagcgggagccaccgccacccccatcaccatccgctatcggctgctgctgccggagccaggcctcgtccccctgggtcctcatgacgccctgctcagccatgtgctggagctgcagccccatggggtggccttccagcaggatgtggggctgtggctgctcttcaccccaccgcaggcccggcgctgccgtgaagtggtggtcaggacccggaatgacaacagctggggtgacctggagacctacctggaggaagaggcaccccagcggctctgggctcactgccaggtgccccacttctcctggttccttgtggtttcccgccctgtgtccaatgcctgcctggtgccaccggaggggacactgctgtgctcctcgggtcatcctggggtcaaagtcatcttcccccctggggccactgaggagcctcgtcgagtctccatgcaggtggtgcgcatggctggccgagagctgcaggccctcctgggagaaccagaggctgcagtgagccccctgctgtgcctgtcacagagcggtccccccagcttcctccaaccggtcaccgtgcagctgcctctgccctctggcatcacaggcctcagtctggaccgctcccgcctgcacctgttgtactgggcccctcctgcagccacctgggatgacatcacagctcaggtggtcctggagctcacccacctgtacgcacgcttccaggtcacacacttctcctggtactggctctggtacaccaccaagaactgtgtgggaggcctggctcggaaggcctgggagcggctgcggctgcaccgtgtgaacctcatcgctctgcagcggcgccgggaccctgagcaggtcctgctgcagtgcctgccccgaaacaaggtggacgccacccttcggcggctgctggagcggtaccggggccccgagccctctgacacggtggagatgttcgagggcgaagagttctttgcggccttcgagcgcggcatcgacgtggatgctgaccgccctgactgtgtggagggcagaatctgctttgtcttctactcgcacctgaagaatgtgaaggaggtatacgtgaccaccactctggaccgggaggctcaggctgtgcggggccaggtgtccttctaccgtggcgcggtgcctgtgcgggtgcccgaggaggctgaggctgcccggcagaggaagggcgcagacgccctgtggatggccactctgcccatcaagctgccgagacttcgagggtccgaggggccacggcggggggctggcctctccttggcacccttgaatctgggagatgccgagaccggctttctgacgcagagcaacctgctgagtgtggctgggcgtctgggtctggactggccagccgtggccctgcacctgggggtgtcctaccgggaggtgcagcgcatccggcacgagttccgggatgatctggatgagcagatccgtcacatgctcttctcctgggctgagcgccaggctgggcagccaggggctgtggggctcctggtgcaggccctggagcagagtgaccggcaggacgtggctgaagaggtgcgcgcagtcttggagctcggccgccgcaagtaccaggacagcatccgacgcatgggcttggcccccaaggaccccgctctgcctggctcctcggctccacagcccccagagcctgcccaggcctaggccccacagacttttaggctggcccagatattccccagtggatgggcagagcccccaccttcaagtctctccagtgtgtggggacgggtccctgtgagcaacaaaactgcactgtttctttcaaaaaaaaaaaaaaaaaaaaataaaaaaaaaaaaaaaaaaaaaaaaaaagagagagggggcgcgcgcgcctctcacaagatgtattctccccccgggggggcgccccagttttacgcgcgctctccccccccatcgtttttttttgtgtccagagggggcgccccctagagagagggggcgctcggtttatatataaacgccgagagcgcgcgcgggcgcgcgcgctgtttaaaacaccgcgcctctggcggcggcgggaacaccagcgcggcccgactagcgcggggggcacctcttggggcggaaggagcacccccctactgcgcggggggggcggcgcggcgccatatatgtgtggggcacacacacctatcccctacgacggagagattattaagcaccggctccaagggggagaaactattctaaacactctttcaagcgccgtcgctacacgaggggggtacaccacaacacgcgcgcgcgaattatgtagcttcgcgcctggtcagaagacaacgttgttggcgtaccaacagaggagtactttagtcttcctgacgacactttttttttaccccggggcagccttatgctactaatcg

SEQ ID NO: 495182 - DNA, 783 bp, Homo sapiens
cttcccaagttcaatgaataactcgtgtgagcaaatcttagccagtatggtaatatagtaaagaagaactacaaagcagtgaactccttgctaccccgcacagactacaaagacctgtcagctgtctttctacgaaggcacgcacttctatcaggcttctaacacactaccgacaccaactactgttaacctgagctacaccccaacttcagcacactttaactacgggtaacaccttctaaacacggatctgccccgtgaactcacttacacggcgtccaagacttactaacggggaacacagccccaagcatcacaatctactaactttcgagccaaaaccatccactttaacacggactatataactaatgcgtgctacttctactggctaacctataacacagtttacagcttggagaaggtataacccacattagcacgacacaaacccattccgttgagctctcacccaccttactttagttacgttaagaatgttcacacggaccatcacgcttaaccacgttggttacacgtgaatactaaggaggtgtcgtcaagcttagacaaagagaagacaaattgggactacaccaatattacacatcaacgtcaaaaaaaaaagaatctcctacacaaattaacccaaacattaaatatcatcatagggctatctaaaaccatgcataaacttaaagtagcattcctaagaaccacacaatatggaacatcacccctagggcgccttaaacatcccacataagaaaccgcacatttccg

SEQ ID NO: 495183 - DNA, 687 bp, Homo sapiens
ggctgcaggaatccggaccgggttttgacagataacatttgccatgctatcaatcaggattcttatgtaataaactatatccgatggcctaccacaatccgggtgctgagctgcatcgcatgacgcgctcttcatcgacagtcatatagcagatcgtatctaagcctatatgatcgctaagtatggctggattgtaaccagccaagagatgctcagctgaatccgagagagcatcatcagcgtcacatgcgacgactctaggcttgcctaggaattgaatgtcagcagacgaaagctaacgttccgaatggtcgcgctgatcgatactagctggaacccaccagtggtgtactaggatgattagtcttctccatacactcgttaccatgagccgtgaggatccctaacgctttgaatgcagacctctcgagatactctatggtagactacgctggatgcgatatccagaaatgcctgctcatgaatcattcagcattttagactgaggcttcatcagatacattgacaacgttgaataggctcattttgttccatctgcactatagaccaggccagtaccataggtgccgtataccatattgtagtgactacaaggtgactcttgactctggtaattgaatgcagatgctctgagtatgaaggactcttttactacgagatgcctgg

SEQ ID NO: 495184 - DNA, 3553 bp, Homo sapiens
ggccggcgggattccaggcgccgagcgcccgctgagcagccaccctttgcgcgccgcctgcagcgcagcttccccgggcgctgcctggacaggcctgcctgcgtgctgggacatgtctggcctccaaggaccgtcggtgggcgatggctgcaacggtggaggggccagagctggaggcagctgctgccgcaggagatgcttcagaggattcggacgcagggtccagggcgctgcctttcctgggcggcaaccggctgagcttggacctgtaccccgggggctgccagcagctgctgcacctgtgtgtccagcagcctcttcagctgctgcaggtggaattcttgcgtctgagcactcacgaggaccctcagctgctggaggccaccctggcccagctgcctcagagcctgtcctgcctccgctccctggtcctcaaaggagggcaacgccgggacacactgggtgcctgtctccggggtgccctgaccaacctgcccgctggtctgagtggcctggcccatctggcccacctggacctgagcttcaacagcctggagacactgccggcctgtgtcctgcagatgcgaggtctgggtgcgctcttgctgtctcacaactgcctctctgagctgcctgaggctctgggggccctccccgccctcaccttcctcacagtgacacacaaccgcctgcagacgctgcccccagcactgggggccctatccaccctgcagcgcctcgatctctctcagaatctgctggacacgctacctcctgagattggaggcctgggcagcctcctggagctcaacctggcctccaaccggctgcagagcctcccagcctctctggcgggacttcggtccttgcggctccttgtcctgcacagcaacctcctggcctctgtgccagctgacttggcccgccttccactcctcacccggctcgacctgagggacaaccagctccgggacctgccccctgagctgctagacgccccctttgtgcgcctgcaggggaaccccctgggtgaggcctcgccagacgccccgagttcaccagtggcagccctcattccagaaatgcccagactgttcctgacctcagatttggacagctttcctgtgacccctcgaggctgctcagtgaccctggcctgtggcgtccgcctgcagttcccagcgggagccaccgccacccccatcaccatccgctatcggctgctgctgccggagccaggcctcgtccccctgggtcctcatgacgccctgctcagccatgtgctggagctgcagccccatggggtggccttccagcaggatgtggggctgtggctgctcttcaccccaccgcaggcccggcgctgccgtgaagtggtggtcaggacccggaatgacaacagctggggtgacctggagacctacctggaggaagaggcaccccagcggctctgggctcactgccaggtgccccacttctcctggttccttgtggtttcccgccctgtgtccaatgcctgcctggtgccaccggaggggacactgctgtgctcctcgggtcatcctggggtcaaagtcatcttcccccctggggccactgaggagcctcgtcgagtctccatgcaggtggtgcgcatggctggccgagagctgcaggccctcctgggagaaccagaggctgcagtgagccccctgctgtgcctgtcacagagcggtccccccagcttcctccaaccggtcaccgtgcagctgcctctgccctctggcatcacaggcctcagtctggaccgctcccgcctgcacctgttgtactgggcccctcctgcagccacctgggatgacatcacagctcaggtggtcctggagctcacccacctgtacgcacgcttccaggtcacacacttctcctggtactggctctggtacaccaccaagaactgtgtgggaggcctggctcggaaggcctgggagcggctgcggctgcaccgtgtgaacctcatcgctctgcagcggcgccgggaccctgagcaggtcctgctgcagtgcctgccccgaaacaaggtggacgccacccttcggcggctgctggagcggtaccggggccccgagccctctgacacggtggagatgttcgagggcgaagagttctttgcggccttcgagcgcggcatcgacgtggatgctgaccgccctgactgtgtggagggcagaatctgctttgtcttctactcgcacctgaagaatgtgaaggaggtgtccttctaccgtggcgcggtgcctgtgcgggtgcccgaggaggctgaggctgcccggcagaggaagggcgcagacgccctgtggatggccactctgcccatcaagctgccgagacttcgagggtccgaggggccacggcggggggctggcctctccttggcacccttgaatctgggagatgccgagaccggctttctgacgcagagcaacctgctgagtgtggctgggcgtctgggtctggactggccagccgtggccctgcacctgggggtgtcctaccgggaggtgcagcgcatccggcacgagttccgggatgatctggatgagcagatccgtcacatgctcttctcctgggctgagcgccaggctgggcagccaggggctgtggggctcctggtgcaggccctggagcagagtgaccggcaggacgtggctgaagaggtgcgcgcagtcttggagctcggccgccgcaagtaccaggacagcatccgacgcatgggcttggcccccaaggaccccgctctgcctggctcctcggctccacagcccccagagcctgcccaggcctaggccccacagacttttaggctggcccagatattccccagtggatgggcagagcccccaccttcaagtctctccagtgtgtggggacgggtccctgtgagcaacaaaactgcactgtttctttcaaaaaaaaaaaaaaaaaaaaataaaaaaaaaaaaaaaaaaaaaaaaaaagagagagggggcgcgcgcgcctctcacaagatgtattctccccccgggggggcgccccagttttacgcgcgctctccccccccatcgtttttttttgtgtccagagggggcgccccctagagagagggggcgctcggtttatatataaacgccgagagcgcgcgcgggcgcgcgcgctgtttaaaacaccgcgcctctggcggcggcgggaacaccagcgcggcccgactagcgcggggggcacctcttggggcggaaggagcacccccctactgcgcggggggggcggcgcggcgccatatatgtgtggggcacacacacctatcccctacgacggagagattattaagcaccggctccaagggggagaaactattctaaacactctttcaagcgccgtcgctacacgaggggggtacaccacaacacgcgcgcgcgaattatgtagcttcgcgcctggtcagaagacaacgttgttggcgtaccaacagaggagtactttagtcttcctgacgacactttttttttaccccggggcagccttatgctactaatcg

SEQ ID NO: 495185 - DNA, 3888 bp, Homo sapiens
  misc_feature (952)..(952): n is a, c, g, or t
ggccggcgggattccaggcgccgagcgcccgctgagcagccaccctttgcgcgccgcctgcagcgcagcttccccgggcgctgcctggacaggcctgcctgcgtgctgggacatgtctggcctccaaggaccgtcggtgggcgatggctgcaacggtggaggggccagagctggaggcagctgctgccgcaggagatgcttcagaggattcggacgcagggtccagggcgctgcctttcctgggcggcaaccggctgagcttggacctgtaccccgggggctgccagcagctgctgcacctgtgtgtccagcagcctcttcagctgctgcaggtggaattcttgcgtctgagcactcacgaggaccctcagctgctggaggccaccctggcccagctgcctcagagcctgtcctgcctccgctccctggtcctcaaaggagggcaacgccgggacacactgggtgcctgtctccggggtgccctgaccaacctgcccgctggtctgagtggcctggcccatctggcccacctggacctgagcttcaacagcctggagacactgccggcctgtgtcctgcagatgcgaggtctgggtgcgctcttgctgtctcacaactgcctctctgagctgcctgaggctctgggggccctccccgccctcaccttcctcacagtgacacacaaccgcctgcagacgctgcccccagcactgggggccctatccaccctgcagcgcctcgatctctctcagaatctgctggacacgctacctcctgagattggaggcctgggcagcctcctggagctcaacctggcctccaaccggctgcagagcctcccagcctctctggggtgagtagcccctgcgccccgacacactggccccacgggagggtccctgaagcctgcctgtcttctgcaggggcctctgcacccacaggcttggtccanagctgcctcttgggttgtccctccacctccctggcctttgagactccctcagtggcttcgtcagagttctctgagcccagctgtggaggagagtctgaaacagctgctctgggaggcggcagcaggagtgtcccagcgccgtgggctgggctggtgccaagcctaagccagcacctgcccgcagcgggacttcggtccttgcggctccttgtcctgcacagcaacctcctggcctctgtgccagctgacttggcccgccttccactcctcacccggctcgacctgagggacaaccagctccgggacctgccccctgagctgctagacgccccctttgtgcgcctgcaggggaaccccctgggtgaggcctcgccagacgccccgagttcaccagtggcagccctcattccagaaatgcccagactgttcctgacctcagatttggacagctttcctgtgacccctcgaggctgctcagtgaccctggcctgtggcgtccgcctgcagttcccagcgggagccaccgccacccccatcaccatccgctatcggctgctgctgccggagccaggcctcgtccccctgggtcctcatgacgccctgctcagccatgtgctggagctgcagccccatggggtggccttccagcaggatgtggggctgtggctgctcttcaccccaccgcaggcccggcgctgccgtgaagtggtggtcaggacccggaatgacaacagctggggtgacctggagacctacctggaggaagaggcaccccagcggctctgggctcactgccaggtgccccacttctcctggttccttgtggtttcccgccctgtgtccaatgcctgcctggtgccaccggaggggacactgctgtgctcctcgggtcatcctggggtcaaagtcatcttcccccctggggccactgaggagcctcgtcgagtctccatgcaggtggtgcgcatggctggccgagagctgcaggccctcctgggagaaccagaggctgcagtgagccccctgctgtgcctgtcacagagcggtccccccagcttcctccaaccggtcaccgtgcagctgcctctgccctctggcatcacaggcctcagtctggaccgctcccgcctgcacctgttgtactgggcccctcctgcagccacctgggatgacatcacagctcaggtggtcctggagctcacccacctgtacgcacgcttccaggtcacacacttctcctggtactggctctggtacaccaccaagaactgtgtgggaggcctggctcggaaggcctgggagcggctgcggctgcaccgtgtgaacctcatcgctctgcagcggcgccgggaccctgagcaggtcctgctgcagtgcctgccccgaaacaaggtggacgccacccttcggcggctgctggagcggtaccggggccccgagccctctgacacggtggagatgttcgagggcgaagagttctttgcggccttcgagcgcggcatcgacgtggatgctgaccgccctgactgtgtggagggcagaatctgctttgtcttctactcgcacctgaagaatgtgaaggaggtatacgtgaccaccactctggaccgggaggctcaggctgtgcggggccaggtgtccttctaccgtggcgcggtgcctgtgcgggtgcccgaggaggctgaggctgcccggcagaggaagggcgcagacgccctgtggatggccactctgcccatcaagctgccgagacttcgagggtccgaggggccacggcggggggctggcctctccttggcacccttgaatctgggagatgccgagaccggctttctgacgcagagcaacctgctgagtgtggctgggcgtctgggtctggactggccagccgtggccctgcacctgggggtgtcctaccgggaggtgcagcgcatccggcacgagttccgggatgatctggatgagcagatccgtcacatgctcttctcctgggctgagcgccaggctgggcagccaggggctgtggggctcctggtgcaggccctggagcagagtgaccggcaggacgtggctgaagaggtgcgcgcagtcttggagctcggccgccgcaagtaccaggacagcatccgacgcatgggcttggcccccaaggaccccgctctgcctggctcctcggctccacagcccccagagcctgcccaggcctaggccccacagacttttaggctggcccagatattccccagtggatgggcagagcccccaccttcaagtctctccagtgtgtggggacgggtccctgtgagcaacaaaactgcactgtttctttcaaaaaaaaaaaaaaaaaaaaataaaaaaaaaaaaaaaaaaaaaaaaaaagagagagggggcgcgcgcgcctctcacaagatgtattctccccccgggggggcgccccagttttacgcgcgctctccccccccatcgtttttttttgtgtccagagggggcgccccctagagagagggggcgctcggtttatatataaacgccgagagcgcgcgcgggcgcgcgcgctgtttaaaacaccgcgcctctggcggcggcgggaacaccagcgcggcccgactagcgcggggggcacctcttggggcggaaggagcacccccctactgcgcggggggggcggcgcggcgccatatatgtgtggggcacacacacctatcccctacgacggagagattattaagcaccggctccaagggggagaaactattctaaacactctttcaagcgccgtcgctacacgaggggggtacaccacaacacgcgcgcgcgaattatgtagcttcgcgcctggtcagaagacaacgttgttggcgtaccaacagaggagtactttagtcttcctgacgacactttttttttaccccggggcagccttatgctactaatcg

SEQ ID NO: 495186 - DNA, 851 bp, Homo sapiens
ttcccatttaggagaataacacagaaaacaaaagaaagaaatcaggatggtcaaatacttaatgttaaaaatgtgattgaaacaatatatatcacaagagataagatgacggatacaaaagtaagcgtgattgataaattctatgataggctaacacttcctggcaataagcaaaatatttcgtataggtagattataagcatagaagccacagaatcagtgctatgtatagacggagttctgaaaacttcaaactgtgaaagttggaagtaaggttcaattcaggctaggaaagcattagatcaatctctctttgtctgacacacacacagcatgacgccccattataggtgatcaaaggttcagtctgcactgaagtttaggatctaattgtaagtatctttatatttaccaaaatccctgtgttaactggaagcacagactgtaaacacatttagtggtatgcagactgttcaattaaatcagatcttaggccaccgacagatcaagtgcacaaggaaatacagtgtgataaaactggagaagccctaaataatcataattaacaaagctagaacacatatgcaagagcgttatagagaatataccttcttgttagatgtcccagggaacatcagacgatgttacagaatctagagcatattagcagagtcccacaatcaccggacgtaaaattaacttgcgatcgcacccaggaaggagcaacttgttgcacaccttgaaacggcaaatttccccggaactaaagcttggggggggggcacgggaaccaccggggggaatcggggtttcaacgggggagcaaggggccaaacggtcaagggagctca

SEQ ID NO: 495187 - DNA, 3948 bp, Homo sapiens
  misc_feature (1012)..(1012): n is a, c, g, or t
ggccggcgggattccaggcgccgagcgcccgctgagcagccaccctttgcgcgccgcctgcagcgcagcttccccgggcgctgcctggacaggcctgcctgcgtgctgggacatgtctggcctccaaggaccgtcggtgggcgatggctgcaacggtggaggggccagagctggaggcagctgctgccgcaggagatgcttcagaggattcggacgcagggtccagggcgctgcctttcctgggcggcaaccggctgagcttggacctgtaccccgggggctgccagcagctgctgcacctgtgtgtccagcagcctcttcagctgctgcaggtggaattcttgcgtctgagcactcacgaggaccctcagctgctggaggccaccctggcccagctgcctcagagcctgtcctgcctccgctccctggtcctcaaagggtcgatctgggacctcggaccctggctctgagggccacatccgcctccccccttcccaggagggcaacgccgggacacactgggtgcctgtctccggggtgccctgaccaacctgcccgctggtctgagtggcctggcccatctggcccacctggacctgagcttcaacagcctggagacactgccggcctgtgtcctgcagatgcgaggtctgggtgcgctcttgctgtctcacaactgcctctctgagctgcctgaggctctgggggccctccccgccctcaccttcctcacagtgacacacaaccgcctgcagacgctgcccccagcactgggggccctatccaccctgcagcgcctcgatctctctcagaatctgctggacacgctacctcctgagattggaggcctgggcagcctcctggagctcaacctggcctccaaccggctgcagagcctcccagcctctctggggtgagtagcccctgcgccccgacacactggccccacgggagggtccctgaagcctgcctgtcttctgcaggggcctctgcacccacaggcttggtccanagctgcctcttgggttgtccctccacctccctggcctttgagactccctcagtggcttcgtcagagttctctgagcccagctgtggaggagagtctgaaacagctgctctgggaggcggcagcaggagtgtcccagcgccgtgggctgggctggtgccaagcctaagccagcacctgcccgcagcgggacttcggtccttgcggctccttgtcctgcacagcaacctcctggcctctgtgccagctgacttggcccgccttccactcctcacccggctcgacctgagggacaaccagctccgggacctgccccctgagctgctagacgccccctttgtgcgcctgcaggggaaccccctgggtgaggcctcgccagacgccccgagttcaccagtggcagccctcattccagaaatgcccagactgttcctgacctcagatttggacagctttcctgtgacccctcgaggctgctcagtgaccctggcctgtggcgtccgcctgcagttcccagcgggagccaccgccacccccatcaccatccgctatcggctgctgctgccggagccaggcctcgtccccctgggtcctcatgacgccctgctcagccatgtgctggagctgcagccccatggggtggccttccagcaggatgtggggctgtggctgctcttcaccccaccgcaggcccggcgctgccgtgaagtggtggtcaggacccggaatgacaacagctggggtgacctggagacctacctggaggaagaggcaccccagcggctctgggctcactgccaggtgccccacttctcctggttccttgtggtttcccgccctgtgtccaatgcctgcctggtgccaccggaggggacactgctgtgctcctcgggtcatcctggggtcaaagtcatcttcccccctggggccactgaggagcctcgtcgagtctccatgcaggtggtgcgcatggctggccgagagctgcaggccctcctgggagaaccagaggctgcagtgagccccctgctgtgcctgtcacagagcggtccccccagcttcctccaaccggtcaccgtgcagctgcctctgccctctggcatcacaggcctcagtctggaccgctcccgcctgcacctgttgtactgggcccctcctgcagccacctgggatgacatcacagctcaggtggtcctggagctcacccacctgtacgcacgcttccaggtcacacacttctcctggtactggctctggtacaccaccaagaactgtgtgggaggcctggctcggaaggcctgggagcggctgcggctgcaccgtgtgaacctcatcgctctgcagcggcgccgggaccctgagcaggtcctgctgcagtgcctgccccgaaacaaggtggacgccacccttcggcggctgctggagcggtaccggggccccgagccctctgacacggtggagatgttcgagggcgaagagttctttgcggccttcgagcgcggcatcgacgtggatgctgaccgccctgactgtgtggagggcagaatctgctttgtcttctactcgcacctgaagaatgtgaaggaggtatacgtgaccaccactctggaccgggaggctcaggctgtgcggggccaggtgtccttctaccgtggcgcggtgcctgtgcgggtgcccgaggaggctgaggctgcccggcagaggaagggcgcagacgccctgtggatggccactctgcccatcaagctgccgagacttcgagggtccgaggggccacggcggggggctggcctctccttggcacccttgaatctgggagatgccgagaccggctttctgacgcagagcaacctgctgagtgtggctgggcgtctgggtctggactggccagccgtggccctgcacctgggggtgtcctaccgggaggtgcagcgcatccggcacgagttccgggatgatctggatgagcagatccgtcacatgctcttctcctgggctgagcgccaggctgggcagccaggggctgtggggctcctggtgcaggccctggagcagagtgaccggcaggacgtggctgaagaggtgcgcgcagtcttggagctcggccgccgcaagtaccaggacagcatccgacgcatgggcttggcccccaaggaccccgctctgcctggctcctcggctccacagcccccagagcctgcccaggcctaggccccacagacttttaggctggcccagatattccccagtggatgggcagagcccccaccttcaagtctctccagtgtgtggggacgggtccctgtgagcaacaaaactgcactgtttctttcaaaaaaaaaaaaaaaaaaaaataaaaaaaaaaaaaaaaaaaaaaaaaaagagagagggggcgcgcgcgcctctcacaagatgtattctccccccgggggggcgccccagttttacgcgcgctctccccccccatcgtttttttttgtgtccagagggggcgccccctagagagagggggcgctcggtttatatataaacgccgagagcgcgcgcgggcgcgcgcgctgtttaaaacaccgcgcctctggcggcggcgggaacaccagcgcggcccgactagcgcggggggcacctcttggggcggaaggagcacccccctactgcgcggggggggcggcgcggcgccatatatgtgtggggcacacacacctatcccctacgacggagagattattaagcaccggctccaagggggagaaactattctaaacactctttcaagcgccgtcgctacacgaggggggtacaccacaacacgcgcgcgcgaattatgtagcttcgcgcctggtcagaagacaacgttgttggcgtaccaacagaggagtactttagtcttcctgacgacactttttttttaccccggggcagccttatgctactaatcg

SEQ ID NO: 495188 - DNA, 909 bp, Homo sapiens
tgcccctccatttagataaatattatactagcattaaccatctacacttctaggaatactagtatatcgctcacaccctcatatcctccctactatgcctagaaggaatagtactatcgctgtgcacttatagctactctcataaccctcaagacccactccctcttagccacatatatgtgcctatatgccatacatagtctttgccgcatgcgaagcagcggtgggactagccctagtagtctcaatctccaacaaaatatggctagactacgtaacgataacctaaacctactccaatgctaaaactaatcgtcccaaaattttattattactagcagctgacatgcattttccagtaaaacacataattgtgaatcaaagcaagcacgccacagcctaattgattagagtcatcgcctctacgtatttttgacccaaatcaacgacacaacctaattgacggctgtgccccaagctttggctcggcaacgcttaataacacccttctaaatataactaacctggtccctaccctcacaaatcagtggggaaggcaaatggcacttatcgaggaacagttatcagaaaagaactgctacgcttcattgactaagcctcctacagaatgtcttcttatagtgtatcacaattccgcaggccaagaagtcagtactcaattagtatcttccttgagcacaagttattcccacctgggttaaaaccgagaggccacagccgaagcaggaagcggcatctacattgtaccctaaaggtcctcccgctaatgcaaataagaaaccagtcatagatcagacatacgcgaataactgcacaatatcgagacagtaacgaccacgcaatgcctgcggaccgtcatgcaacacggttataaacgagccgttgtac

SEQ ID NO: 495189 - DNA, 3868 bp, Homo sapiens
  misc_feature (952)..(952): n is a, c, g, or t
ggccggcgggattccaggcgccgagcgcccgctgagcagccaccctttgcgcgccgcctgcagcgcagcttccccgggcgctgcctggacaggcctgcctgcgtgctgggacatgtctggcctccaaggaccgtcggtgggcgatggctgcaacggtggaggggccagagctggaggcagctgctgccgcaggagatgcttcagaggattcggacgcagggtccagggcgctgcctttcctgggcggcaaccggctgagcttggacctgtaccccgggggctgccagcagctgctgcacctgtgtgtccagcagcctcttcagctgctgcaggtggaattcttgcgtctgagcactcacgaggaccctcagctgctggaggccaccctggcccagctgcctcagagcctgtcctgcctccgctccctggtcctcaaaggagggcaacgccgggacacactgggtgcctgtctccggggtgccctgaccaacctgcccgctggtctgagtggcctggcccatctggcccacctggacctgagcttcaacagcctggagacactgccggcctgtgtcctgcagatgcgaggtctgggtgcgctcttgctgtctcacaactgcctctctgagctgcctgaggctctgggggccctccccgccctcaccttcctcacagtgacacacaaccgcctgcagacgctgcccccagcactgggggccctatccaccctgcagcgcctcgatctctctcagaatctgctggacacgctacctcctgagattggaggcctgggcagcctcctggagctcaacctggcctccaaccggctgcagagcctcccagcctctctggggtgagtagcccctgcgccccgacacactggccccacgggagggtccctgaagcctgcctgtcttctgcaggggcctctgcacccacaggcttggtccanagctgcctcttgggttgtccctccacctccctggcctttgagactccctcagtggcttcgtcagagttctctgagcccagctgtggaggagagtctgaaacagctgctctgggaggcggcagcaggagtgtcccagcgccgtgggctgggctggtgccaagcctaagccagcacctgcccgcagcgggacttcggtccttgcggctccttgtcctgcacagcaacctcctggcctctgtgccagctgacttggcccgccttccactcctcacccggctcgacctgagggacaaccagctccgggacctgccccctgagctgctagacgccccctttgtgcgcctgcaggggaaccccctgggtgaggcctcgccagacgccccgagttcaccagtggcagccctcattccagaaatgcccagactgttcctgacctcagatttggacaggctgctcagtgaccctggcctgtggcgtccgcctgcagttcccagcgggagccaccgccacccccatcaccatccgctatcggctgctgctgccggagccaggcctcgtccccctgggtcctcatgacgccctgctcagccatgtgctggagctgcagccccatggggtggccttccagcaggatgtggggctgtggctgctcttcaccccaccgcaggcccggcgctgccgtgaagtggtggtcaggacccggaatgacaacagctggggtgacctggagacctacctggaggaagaggcaccccagcggctctgggctcactgccaggtgccccacttctcctggttccttgtggtttcccgccctgtgtccaatgcctgcctggtgccaccggaggggacactgctgtgctcctcgggtcatcctggggtcaaagtcatcttcccccctggggccactgaggagcctcgtcgagtctccatgcaggtggtgcgcatggctggccgagagctgcaggccctcctgggagaaccagaggctgcagtgagccccctgctgtgcctgtcacagagcggtccccccagcttcctccaaccggtcaccgtgcagctgcctctgccctctggcatcacaggcctcagtctggaccgctcccgcctgcacctgttgtactgggcccctcctgcagccacctgggatgacatcacagctcaggtggtcctggagctcacccacctgtacgcacgcttccaggtcacacacttctcctggtactggctctggtacaccaccaagaactgtgtgggaggcctggctcggaaggcctgggagcggctgcggctgcaccgtgtgaacctcatcgctctgcagcggcgccgggaccctgagcaggtcctgctgcagtgcctgccccgaaacaaggtggacgccacccttcggcggctgctggagcggtaccggggccccgagccctctgacacggtggagatgttcgagggcgaagagttctttgcggccttcgagcgcggcatcgacgtggatgctgaccgccctgactgtgtggagggcagaatctgctttgtcttctactcgcacctgaagaatgtgaaggaggtatacgtgaccaccactctggaccgggaggctcaggctgtgcggggccaggtgtccttctaccgtggcgcggtgcctgtgcgggtgcccgaggaggctgaggctgcccggcagaggaagggcgcagacgccctgtggatggccactctgcccatcaagctgccgagacttcgagggtccgaggggccacggcggggggctggcctctccttggcacccttgaatctgggagatgccgagaccggctttctgacgcagagcaacctgctgagtgtggctgggcgtctgggtctggactggccagccgtggccctgcacctgggggtgtcctaccgggaggtgcagcgcatccggcacgagttccgggatgatctggatgagcagatccgtcacatgctcttctcctgggctgagcgccaggctgggcagccaggggctgtggggctcctggtgcaggccctggagcagagtgaccggcaggacgtggctgaagaggtgcgcgcagtcttggagctcggccgccgcaagtaccaggacagcatccgacgcatgggcttggcccccaaggaccccgctctgcctggctcctcggctccacagcccccagagcctgcccaggcctaggccccacagacttttaggctggcccagatattccccagtggatgggcagagcccccaccttcaagtctctccagtgtgtggggacgggtccctgtgagcaacaaaactgcactgtttctttcaaaaaaaaaaaaaaaaaaaaataaaaaaaaaaaaaaaaaaaaaaaaaaagagagagggggcgcgcgcgcctctcacaagatgtattctccccccgggggggcgccccagttttacgcgcgctctccccccccatcgtttttttttgtgtccagagggggcgccccctagagagagggggcgctcggtttatatataaacgccgagagcgcgcgcgggcgcgcgcgctgtttaaaacaccgcgcctctggcggcggcgggaacaccagcgcggcccgactagcgcggggggcacctcttggggcggaaggagcacccccctactgcgcggggggggcggcgcggcgccatatatgtgtggggcacacacacctatcccctacgacggagagattattaagcaccggctccaagggggagaaactattctaaacactctttcaagcgccgtcgctacacgaggggggtacaccacaacacgcgcgcgcgaattatgtagcttcgcgcctggtcagaagacaacgttgttggcgtaccaacagaggagtactttagtcttcctgacgacactttttttttaccccggggcagccttatgctactaatcg

SEQ ID NO: 495190 - DNA, 3717 bp, Homo sapiens
  misc_feature (952)..(952): n is a, c, g, or t
ggccggcgggattccaggcgccgagcgcccgctgagcagccaccctttgcgcgccgcctgcagcgcagcttccccgggcgctgcctggacaggcctgcctgcgtgctgggacatgtctggcctccaaggaccgtcggtgggcgatggctgcaacggtggaggggccagagctggaggcagctgctgccgcaggagatgcttcagaggattcggacgcagggtccagggcgctgcctttcctgggcggcaaccggctgagcttggacctgtaccccgggggctgccagcagctgctgcacctgtgtgtccagcagcctcttcagctgctgcaggtggaattcttgcgtctgagcactcacgaggaccctcagctgctggaggccaccctggcccagctgcctcagagcctgtcctgcctccgctccctggtcctcaaaggagggcaacgccgggacacactgggtgcctgtctccggggtgccctgaccaacctgcccgctggtctgagtggcctggcccatctggcccacctggacctgagcttcaacagcctggagacactgccggcctgtgtcctgcagatgcgaggtctgggtgcgctcttgctgtctcacaactgcctctctgagctgcctgaggctctgggggccctccccgccctcaccttcctcacagtgacacacaaccgcctgcagacgctgcccccagcactgggggccctatccaccctgcagcgcctcgatctctctcagaatctgctggacacgctacctcctgagattggaggcctgggcagcctcctggagctcaacctggcctccaaccggctgcagagcctcccagcctctctggggtgagtagcccctgcgccccgacacactggccccacgggagggtccctgaagcctgcctgtcttctgcaggggcctctgcacccacaggcttggtccanagctgcctcttgggttgtccctccacctccctggcctttgagactccctcagtggcttcgtcagagttctctgagcccagctgtggaggagagtctgaaacagctgctctgggaggcggcagcaggagtgtcccagcgccgtgggctgggctggtgccaagcctaagccagcacctgcccgcagcgggacttcggtccttgcggctccttgtcctgcacagcaacctcctggcctctgtgccagctgacttggcccgccttccactcctcacccggctcgacctgagggacaaccagctccgggacctgccccctgagctgctagacgccccctttgtgcgcctgcaggggaaccccctgggtgaggcctcgccagacgccccgagttcaccagtggcagccctcattccagaaatgcccagactgttcctgacctcagatttggacagctttcctgtgacccctcgaggctgctcagtgaccctggcctgtggcgtccgcctgcagttcccagcgggagccaccgccacccccatcaccatccgctatcggctgctgctgccggagccaggcctcgtccccctgggtcctcatgacgccctgctcagccatgtgctggagctgcagccccatggggtggccttccagcaggatgtggggctgtggctgctcttcaccccaccgcaggcccggcgctgccgtgaagtggtggtcaggacccggaatgacaacagctggggtgacctggagacctacctggaggaagaggcaccccagcggctctgggctcactgccaggtgccccacttctcctggttccttgtggtttcccgccctgtgtccaatgcctgcctggtgccaccggaggggacactgctgtgctcctcgggtcatcctggggtcaaagtcatcttcccccctggggccactgaggagcctcgtcgagtctccatgcaggtggtgcgcatggctggccgagagctgcaggccctcctgggagaaccagaggctgcagtgagccccctgctgtgcctgtcacagagcggtccccccagcttcctccaaccggtcaccgtgcagctgcctctgccctctggcatcacaggcctcagtctggaccgctcccgcctgcacctgttgtactgggcccctcctgcagccacctgggatgacatcacagctcaggtggtcctggagctcacccacctgtacgcacgcttccaggtcacacacttctcctggtactggctctggtacaccaccaagaactgtgtgggaggcctggctcggaaggcctgggagcggctgcggctgcaccgtgtgaacctcatcgctctgcagcggcgccgggaccctgagcaggtcctgctgcagtgcctgccccgaaacaaggtggacgccacccttcggcggctgctggagcggtaccggggccccgagccctctgacacggtggagatgttcgagggcgaagagttctttgcggccttcgagcgcggcatcgacgtggatgctgaccgccctgactgtgtggagggcagaatctgctttgtcttctactcgcacctgaagaatgtgaaggaggtatacgtgaccaccactctggaccgggaggctcaggctgtgcggggccaggtgtccttctaccgtggcgcggtgcctgtgcgggtgcccgaggaggctgaggctgcccggcagaggaagggcgcagacgccctgtggatggccactctgcccatcaagctgccgagacttcgagggtccgaggggccacggcggggggctggcctctccttggcacccttgaatctgggagatgccgagaccggctttctgacgcagagcaacctgctgagtgtggctgggcgtctgggtctggactggccagccgtggccctgcacctgggggtgtcctaccgggaggtgcagcgcatccggcacgagttccgggatgatctggatgagcagatccgtcacatgctcttctcctgggctgagcgccaggctgggcagcccccagagcctgcccaggcctaggccccacagacttttaggctggcccagatattccccagtggatgggcagagcccccaccttcaagtctctccagtgtgtggggacgggtccctgtgagcaacaaaactgcactgtttctttcaaaaaaaaaaaaaaaaaaaaataaaaaaaaaaaaaaaaaaaaaaaaaaagagagagggggcgcgcgcgcctctcacaagatgtattctccccccgggggggcgccccagttttacgcgcgctctccccccccatcgtttttttttgtgtccagagggggcgccccctagagagagggggcgctcggtttatatataaacgccgagagcgcgcgcgggcgcgcgcgctgtttaaaacaccgcgcctctggcggcggcgggaacaccagcgcggcccgactagcgcggggggcacctcttggggcggaaggagcacccccctactgcgcggggggggcggcgcggcgccatatatgtgtggggcacacacacctatcccctacgacggagagattattaagcaccggctccaagggggagaaactattctaaacactctttcaagcgccgtcgctacacgaggggggtacaccacaacacgcgcgcgcgaattatgtagcttcgcgcctggtcagaagacaacgttgttggcgtaccaacagaggagtactttagtcttcctgacgacactttttttttaccccggggcagccttatgctactaatcg

SEQ ID NO: 495191 - DNA, 238 bp, Homo sapiens
ataaggatagcagtgctcgcagtgctgaataggggagcacaacgtgcattgtgcttctttcttagggaatattagaatctatatctcaatgctcataacggatcagaaatacagattatgatagcaaagcgacgttagtcgtgagctcttgtgaggaacgtcattggctttatcctctaggggagttagcactgtagagggtgaggtataaacagatggggtctagtaaaatctattc

SEQ ID NO: 495192 - DNA, 3833 bp, Homo sapiens
  misc_feature (952)..(952): n is a, c, g, or t
ggccggcgggattccaggcgccgagcgcccgctgagcagccaccctttgcgcgccgcctgcagcgcagcttccccgggcgctgcctggacaggcctgcctgcgtgctgggacatgtctggcctccaaggaccgtcggtgggcgatggctgcaacggtggaggggccagagctggaggcagctgctgccgcaggagatgcttcagaggattcggacgcagggtccagggcgctgcctttcctgggcggcaaccggctgagcttggacctgtaccccgggggctgccagcagctgctgcacctgtgtgtccagcagcctcttcagctgctgcaggtggaattcttgcgtctgagcactcacgaggaccctcagctgctggaggccaccctggcccagctgcctcagagcctgtcctgcctccgctccctggtcctcaaaggagggcaacgccgggacacactgggtgcctgtctccggggtgccctgaccaacctgcccgctggtctgagtggcctggcccatctggcccacctggacctgagcttcaacagcctggagacactgccggcctgtgtcctgcagatgcgaggtctgggtgcgctcttgctgtctcacaactgcctctctgagctgcctgaggctctgggggccctccccgccctcaccttcctcacagtgacacacaaccgcctgcagacgctgcccccagcactgggggccctatccaccctgcagcgcctcgatctctctcagaatctgctggacacgctacctcctgagattggaggcctgggcagcctcctggagctcaacctggcctccaaccggctgcagagcctcccagcctctctggggtgagtagcccctgcgccccgacacactggccccacgggagggtccctgaagcctgcctgtcttctgcaggggcctctgcacccacaggcttggtccanagctgcctcttgggttgtccctccacctccctggcctttgagactccctcagtggcttcgtcagagttctctgagcccagctgtggaggagagtctgaaacagctgctctgggaggcggcagcaggagtgtcccagcgccgtgggctgggctggtgccaagcctaagccagcacctgcccgcagcgggacttcggtccttgcggctccttgtcctgcacagcaacctcctggcctctgtgccagctgacttggcccgccttccactcctcacccggctcgacctgagggacaaccagctccgggacctgccccctgagctgctagacgccccctttgtgcgcctgcaggggaaccccctgggtgaggcctcgccagacgccccgagttcaccagtggcagccctcattccagaaatgcccagactgttcctgacctcagatttggacagctttcctgtgacccctcgaggctgctcagtgaccctggcctgtggcgtccgcctgcagttcccagcgggagccaccgccacccccatcaccatccgctatcggctgctgctgccggagccaggcctcgtccccctgggtcctcatgacgccctgctcagccatgtgctggagctgcagccccatggggtggccttccagcaggatgtggggctgtggctgctcttcaccccaccgcaggcccggcgctgccgtgaagtggtggtcaggacccggaatgacaacagctggggtgacctggagacctacctggaggaagaggcaccccagcggctctgggctcactgccaggtgccccacttctcctggttccttgtggtttcccgccctgtgtccaatgcctgcctggtgccaccggaggggacactgctgtgctcctcgggtcatcctggggtcaaagtcatcttcccccctggggccactgaggagcctcgtcgagtctccatgcaggtggtgcgcatggctggccgagagctgcaggccctcctgggagaaccagaggctgcagtgagccccctgctgtgcctgtcacagagcggtccccccagcttcctccaaccggtcaccgtgcagctgcctctgccctctggcatcacaggcctcagtctggaccgctcccgcctgcacctgttgtactgggcccctcctgcagccacctgggatgacatcacagctcaggtggtcctggagctcacccacctgtacgcacgcttccaggtcacacacttctcctggtactggctctggtacaccaccaagaactgtgtgggaggcctggctcggaaggcctgggagcggctgcggctgcaccgtgtgaacctcatcgctctgcagcggcgccgggaccctgagcaggtcctgctgcagtgcctgccccgaaacaaggtggacgccacccttcggcggctgctggagcggtaccggggccccgagccctctgacacggtggagatgttcgagggcgaagagttctttgcggccttcgagcgcggcatcgacgtggatgctgaccgccctgactgtgtggagggcagaatctgctttgtcttctactcgcacctgaagaatgtgaaggaggtatacgtgaccaccactctggaccgggaggctcaggctgtgcggggccaggtgtccttctaccgtggcgcggtgcctgtgcgggtgcccgaggaggctgaggctgcccggcagaggaagggcgcagacgccctgtggatggccactctgcccatcaagctgccggtgggactgagggacagcagaggggcggggcaggaccgaggcccaggggtgaccagggtgacatggtggagttgggggtggagcccagggcttaatgcactttttccttccaacagagacttcgagggtccgaggggccacggcggggggctggcctctccttggcacccttgaatctgggagatgccgagaccggctttctgacgcagagcaacctgctgagtgtggctgggcgtctgggtctggactggccagccgtggccctgcacctgggggtgtcctaccgggaggtgcagcgcatccggcacgagttccgggatgatctggatgagcagatccgtcacatgctcttctcctgggctgagcgccaggctgggcagcccccagagcctgcccaggcctaggccccacagacttttaggctggcccagatattccccagtggatgggcagagcccccaccttcaagtctctccagtgtgtggggacgggtccctgtgagcaacaaaactgcactgtttctttcaaaaaaaaaaaaaaaaaaaaataaaaaaaaaaaaaaaaaaaaaaaaaaagagagagggggcgcgcgcgcctctcacaagatgtattctccccccgggggggcgccccagttttacgcgcgctctccccccccatcgtttttttttgtgtccagagggggcgccccctagagagagggggcgctcggtttatatataaacgccgagagcgcgcgcgggcgcgcgcgctgtttaaaacaccgcgcctctggcggcggcgggaacaccagcgcggcccgactagcgcggggggcacctcttggggcggaaggagcacccccctactgcgcggggggggcggcgcggcgccatatatgtgtggggcacacacacctatcccctacgacggagagattattaagcaccggctccaagggggagaaactattctaaacactctttcaagcgccgtcgctacacgaggggggtacaccacaacacgcgcgcgcgaattatgtagcttcgcgcctggtcagaagacaacgttgttggcgtaccaacagaggagtactttagtcttcctgacgacactttttttttaccccggggcagccttatgctactaatcg

SEQ ID NO: 495193 - DNA, 243 bp, Homo sapiens
tgatatttaactttctggtgaaaacagataggataggcatcgtaaatgtttctatgacagcattcctgataaaattcactattttcattcatttaccccaaaatatttattataaaccttctatagctgtatactttgccatagtagttgagaatttaaagtcaattcccaactactatggcattttgtccatttactgtacactacttaattttatgttattttccagaaggagtctcgctc

SEQ ID NO: 495194 - DNA, 139 bp, Homo sapiens
ttattgacattcaagcaggtagagtagtagttggcctgttacataagttagtgagtagaaaatctgggaattagttattgttagttttggtgcttgacctagagaaaatctctcaggtggggacgaagtagaagagact

SEQ ID NO: 495195 - DNA, 1885 bp, Homo sapiens
  misc_feature (952)..(952): n is a, c, g, or t
  misc_feature (1722)..(1722): n is a, c, g, or t
  misc_feature (1731)..(1731): n is a, c, g, or t
ggccggcgggattccaggcgccgagcgcccgctgagcagccaccctttgcgcgccgcctgcagcgcagcttccccgggcgctgcctggacaggcctgcctgcgtgctgggacatgtctggcctccaaggaccgtcggtgggcgatggctgcaacggtggaggggccagagctggaggcagctgctgccgcaggagatgcttcagaggattcggacgcagggtccagggcgctgcctttcctgggcggcaaccggctgagcttggacctgtaccccgggggctgccagcagctgctgcacctgtgtgtccagcagcctcttcagctgctgcaggtggaattcttgcgtctgagcactcacgaggaccctcagctgctggaggccaccctggcccagctgcctcagagcctgtcctgcctccgctccctggtcctcaaaggagggcaacgccgggacacactgggtgcctgtctccggggtgccctgaccaacctgcccgctggtctgagtggcctggcccatctggcccacctggacctgagcttcaacagcctggagacactgccggcctgtgtcctgcagatgcgaggtctgggtgcgctcttgctgtctcacaactgcctctctgagctgcctgaggctctgggggccctccccgccctcaccttcctcacagtgacacacaaccgcctgcagacgctgcccccagcactgggggccctatccaccctgcagcgcctcgatctctctcagaatctgctggacacgctacctcctgagattggaggcctgggcagcctcctggagctcaacctggcctccaaccggctgcagagcctcccagcctctctggggtgagtagcccctgcgccccgacacactggccccacgggagggtccctgaagcctgcctgtcttctgcaggggcctctgcacccacaggcttggtccanagctgcctcttgggttgtccctccacctccctggcctttgagactccctcagtggcttcgtcagagttctctgagcccagctgtggaggagagtctgaaacagctgctctgggaggcggcagcaggagtgtcccagcgccgtgggctgggctggtgccaagcctaagccagcacctgcccgcagcgggacttcggtccttgcggctccttgtcctgcacagcaacctcctggcctctgtgccagctgacttggcccgccttccactcctcacccggctcgacctgagggacaaccagctccgggacctgccccctgagctgctagacgccccctttgtgcgcctgcaggggaaccccctgggtgaggcctcgccagacgccccgagttcaccagtggcagccctcattccagaaatgcccagactgttcctgacctcagatttggacagctttcctgtgacccctcgaggctgctcagtgaccctggcctgtggcgtccgcctgcagttcccagcgggagccaccgccacccccatcaccatccgctatcggctgctgctgccggagccaggcctcgtccccctgggtcctcatgacgccctgctcagccatgtgctggagctgcagccccatggggtggccttccagcaggatgtggggctgtggctgctcttcaccccaccgcaggcccggcgctgccgtgaagtggtggtcaggacccggaatgacaacagctggggtgacctggagacctacctggagggaagagnacccaaggntctggtcatggcagtgccattttctggtctgggttccgcgggcaagctggcgggcccgggggacgcggccccgggtcgggaacattcccgggcagaagacacgagtacacgggccgggacaaaggcggaaaaggggccgggtgtagccccagag

SEQ ID NO: 495196 - DNA, 1048 bp, Homo sapiens
gggcatgatacggggtgacgctatgtgtgtgggttggtgtcgtttccgtgctgatgaacaccgcaggtgactcgaggctctgtgtgtccccgcgtcgtagagaattggagaagcgatggatcgtgtcacgcgaaacagtgcgtaggaatcagggtcgttttgtgcatgccggtccggtagagggagcaggacacttgcgacagtagtgctggggaagcggaaagaggcaggatggtgagaatggacccatggagccggaagcagcgttagggtggcgagtccaatgctaggtggccgcaacagtcttagagctcggttggagatcttgtgaccaccatggctgtgcaggatatgccgttgaccgtgaccaatgtctcggagagacccgaagagtggaattctgttgtgccttggtgttatgcgggatgaggtgtccctggcggtggctctcgaatgcgcccctttgagaggaagggtcttgtatctcggtctgagcacatgtccccagcggcatcgtgggggaaagcctgttgccactgtggttggctagttcctggggggggcttgcaccgtgggttcgtagtgaaggagggtaggctcggtggacttcgcacggtgggaggtcttctcttgtcttggcggatgtttttggcgcgaactgcctccgaggggtgtttatgcaggctggatcgatacgcaggcaccaggttatacaaactaccaagttacgtggtgcctgtgcgattcgcgcttagatggcgttggcgtctcgcaataacaaccgcgggcgcaccatgggtttctgggaccctccacagggtcgtagggctatcaggggtactgcggggcagtcgtaggtaaaactattccgctcgtaggggcccggttagtactcatgccacaattatggcggggggcgcatatcatataagccagcgtgcaagccacaaggtacaataaggcggaaggaaagactactacgcgcactttggatgtaaccgctctggtattgaaccagacaacgatcgagcgctcttcgatctaagag

SEQ ID NO: 495197 - DNA, 203 bp, Homo sapiens
ccaaggcaggagaaatgcttgagcccaggagctcaagaccagcctggaccacaaattgagaccccatctctcaagaaaatgttaacaattagccaggttaatggtttgcctttagtcccagtacttccaagctagcaagaggtcttagcccaagattggagctcagtaccatgatatccacctgcactccagcttacaacaag

SEQ ID NO: 495198 - DNA, 1053 bp, Homo sapiens
gcagagtgtggtggggggtcctgggcaggtggacaggaccctctgtcgcccatcctctgcctgcagggatgatctggatgagcagatccgtcacatgctcttctcctgggctgagcgccaggctgggcagccaggggctgtggggctcctggtgcaggccctggagcagagtgaccggcaggacgtggctgaagaggtgcgcgcagtcttggagctcggccgccgcaagtaccaggacagcatccgacgcatgggcttggcccccaaggaccccgctctgcctggctcctcggctccacagcccccagagcctgcccaggcctaggccccacagacttttaggctggcccagatattccccagtggatgggcagagcccccaccttcaagtctctccagtgtgtggggacgggtccctgtgagcaacaaaactgcactgtttctttcaaaaaaaaaaaaaaaaaaaaataaaaaaaaaaaaaaaaaaaaaaaaaaagagagagggggcgcgcgcgcctctcacaagatgtattctccccccgggggggcgccccagttttacgcgcgctctccccccccatcgtttttttttgtgtccagagggggcgccccctagagagagggggcgctcggtttatatataaacgccgagagcgcgcgcgggcgcgcgcgctgtttaaaacaccgcgcctctggcggcggcgggaacaccagcgcggcccgactagcgcggggggcacctcttggggcggaaggagcacccccctactgcgcggggggggcggcgcggcgccatatatgtgtggggcacacacacctatcccctacgacggagagattattaagcaccggctccaagggggagaaactattctaaacactctttcaagcgccgtcgctacacgaggggggtacaccacaacacgcgcgcgcgaattatgtagcttcgcgcctggtcagaagacaacgttgttggcgtaccaacagaggagtactttagtcttcctgacgacactttttttttaccccggggcagccttatgctactaatcg

SEQ ID NO: 495199 - DNA, 1194 bp, Homo sapiens
gtgagcggccgccgagcgggtgcgggtgcggggctgcatctggccatcacctgcgctggcctgcgcagcggacaccgtgctgtaccggcctgctgtgcgccctggccacctggggcggaccgcggaacccgaggctatgtcccatgaaaagagtttttggtgtctggggacaactatcctccccccaaccctgggatatcctggtggtgtgtgccccaatgccagacaacaatgcacacacccataattggcatgcgagccatccgacatacacgacatatggagagcaccacagtaaagcgagaaagggagaacacacagataagagaagaatgcaaagggaaaccagaggcaagcaagaggatgagcgagagcagagcgagcagagacagcagaagaggcagacaagagcgggagaagagaaaacaggagaagacgaccagaggggaaaaggaagtgagagagacgagaagaagaaggcagaggaagagaggcagagagaaggcggagggacagggggaagacggaggaagcgaaaggcgagaggaaaagaaggagaggagagagaaggcaaacaagacacagaaggagcgggccacaggagaagaaagcgagaaggagaggaagaagacagaagccgcgcgcgccagcgagcggagaagccgaacagaagaggcaagcacgaagaacggagagaagacaagagacagagggagaggacgagaagaggagagagggcgagaagacaagaggagcagacagcacaacaagaacggtagcaaagcgaaagggagacggggaaggcaaaggcgacgcagcccggaggagacgagagggcggggagaaaggccggggcacaggaaagagggagacagcgcggcgcgagaggggaggggaggaacgcgggagaggcagacgaggaggggcagagggaacagagccaaagaagggaggcagggggaaaaaaggaggaaggagagaacggagaaacgcagaaagacggagagaagaagccaagggggagcacagacgaaaagaaaaaaaaagagaaagcaagaacacagagcaaggggacacacacacgagagaaacaccaacaaggacggggagacgggacataagagaagaaggacagaacgagagagaagaaacgagagaggcaagagagaagacaccgcagaggagacgaaacga

SEQ ID NO: 495200 - DNA, 658 bp, Homo sapiens
tcaagaatgctttctgtatttatttaaaaaaaaaaaattcccaaaaggggtaaaaaacaatcatcaaggatgtaggtgccaaacagagggcaaaaggtactaaaaaagttatgcctaagggaagtaaaaggtctagcctcatccctacctgtgtttaaataagctggtcacctaaattataaatagctaaagttccccaataggttctaaaattcctctggcccctatctaacaaactatgggcacgagccagtttgatttgcaagggcctcagtatgagggacccctatgtactaatacaggccagtacgagcgagtactaaggctaaactaagaaaggatctctatcccccattatgtgggtctcatttcaagtctatgtggatgactacctctacatggctggtgtgcaaaagtgggtttcacccctttgaaaaatatgggtcctttcagcattaaaattagcttaaactctgttagtaatggagtcaagtacatcctacctccttttacattgcggctgaaaaagtgaccgggctagggacattagaacattgggcgaccttaaataccggtagaaatcagctgccatttaagtgactcactagcgtaggggtcactaagcttcacaaacttacggaacttttttatggaatcg

SEQ ID NO: 495201 - DNA, 611 bp, Homo sapiens
  misc_feature (203)..(203): n is a, c, g, or t
  misc_feature (220)..(220): n is a, c, g, or t
  misc_feature (266)..(266): n is a, c, g, or t
  misc_feature (310)..(310): n is a, c, g, or t
  misc_feature (398)..(398): n is a, c, g, or t
  misc_feature (439)..(439): n is a, c, g, or t
acagaggccccaggcttggtctggcgggagggtgggtccagccctgatcctgctggtggactgttccggtgctcaccaggcgtgggctcctctccagccaccgcaacctgagtggggagaggtaccccctaagagacacccaatcagttaggcccggaaaggcggggagacaggcaggtgggactagctgtgcaaccttggtntcaggtctgagtagaanggattttctattcatcgtccgaggctttaaagcagggcaggagcgngcttggcaactctcaggtgctgtgcacttaagtgacacacctgngaggaatgtggagaagagacaagttcaggagcccacaggctgaggagccccccaagtcctcaagtctaacaccagaaatggtcactgnggttgccacctagccagagcgccacctctgagatgaggctnctcaggaaaaccttctccaccccactaacttctaaaggccatccaacctcagtctccactcctgcctgtcaccagaccagcctctgagccaccctccctgttctgccctgctctgttcccttttggcgggcgccagggtttagagccgggccgcaaaaggcttgctgccttg

SEQ ID NO: 495202 - DNA, 864 bp, Homo sapiens
  misc_feature (260)..(260): n is a, c, g, or t
  misc_feature (601)..(602): n is a, c, g, or t
tgatcctagcatcagcactatggctacgagtaagcgatgactctcaagcaatcattggtcctgaagatgtaggctctaactcctacgtggctgtgggcatgtgatagctcgtagggtgccatcaccgatgatcctggagtcttcctgtggatgctgcggatgactataagaaggaaagtcggctgacttgtcttactggtaggtaaaacataagtgcttgctgtctgatactcatgctacctgacagcgctggcgacagngttatacctctatggagctggtattattcaactagttctcatagtctgtaatcgcgtattgttgagatgcaacagctcatctattgaagaaacagcaaagcatttgtgtagtcgcacaacaggggcggaaatatgtgaagaaacacgagagtgtccagagataggccgagtaagtgtgttgttgtgcaacgacaagaggtttgaaagtgcgtgcgtttgtatggctcaaagtgggagcctgcctggattggtggtgaaactaaggagtgtgttcagacagcgtaatccttgatgagttagtgttggcctgtcctaagaatatagtccggagaggacacatnngccaaagactaatagatgggaaagagcaagctggttaccaaagtacgactctgtgatcgcatttccataacgacgacgttctagggaaaaagagagttcgcatgagtgagttatcggcaatactcaattctggcacctggcagtgtatgcgagcataactgggatttggcgtgtttacctattgcgtcctgtaattgggcacggaatcgcggaaaccacactgaagttctggtgggttgcaatcaaccctatcgttcggcca

SEQ ID NO: 495203 - DNA, 416 bp, Homo sapiens
  misc_feature (88)..(88): n is a, c, g, or t
  misc_feature (291)..(291): n is a, c, g, or t
  misc_feature (330)..(330): n is a, c, g, or t
  misc_feature (413)..(413): n is a, c, g, or t
acttgaggtcaggagttcaagcccagcctcgccaacatgatgaaaccccacctttactaaaaatacaaaaattagccgggcattgtgnaggcacctgtaatcccagatactccagaagctaaggcaggagaattgcttgaacccgggaggtggacgttgcagtgagccgagattgcaccactgcactccagcctgggtgacagagcaagactccatctcaaaaaacaaacaaaccaaaaaaatttccccctgtctctactaaaagtacaaaaaattagctgggcatggtgnacacagctgtggtccagctgctcaggaggctgaggtggncgatcacctgggcccgggaggttgaggcttcagtgaggctgtgatccagtcactatactccagcctcggcgatgggaccagancct

SEQ ID NO: 495204 - DNA, 428 bp, Homo sapiens
gaacttatatgtaagtttaaattttcggtagccacatttaaaaagtaaaaagcaggtaaaattaatttaggtgatatattttatttaatccaaatatccaaactatttcaacatataaccaatataaaattactaggccagactaggtagctcatgcctgtaatcccagcactttgggaggccaaggcaggtggatcacttgaggtcaggagttcgagaccagtctgaccaacacggtaaaaccctgtctctgctaaaaatgcaaaaaaaatattagccagtcatggttttgcgtgcctgttgtcccagctactcctcagtctgggaggctgaggcattaaaattgcctgaacccaggaggtagaggttgcagtgagccaagattgtgccactgcactccagcctgggcaacagcgagactccacctc

SEQ ID NO: 495205 - DNA, 306 bp, Homo sapiens
ccaattcctatacaatgcgatgagagatagacatgccacaaatctcacagacctcatacatcaaacaccagcccccatactctgagactccagacacaacggtatatccctacctgaagacccatccaagacaacccgcacattaagtagccttaggacctctcctatagacacacagggccatcctatgtaaggaatggtgacctgtaacaatatagtgtgccatactcttatggaaacagtgctatataaacagacaggatgtctaaagaaaactgggatgactctacccccagtaagagtccc

SEQ ID NO: 495206 - DNA, 696 bp, Homo sapiens
gggggtccccatcctattaggcggccgggatggaaattcctattcatcgggtgtgtttcccgatgtagccccccaacgtctgtcattttacccctcacacttggcaagtcgggtgaatggcaaggtgaattccttctcacaaagaaacggcttatgacccgagggcctcaaagctagaactcatccctgtctagagtggccaggagcggctgctcaaagtggtgccgtcgattataggtcttgtgagtccgccagcttgcaggttttatatcccacctccataggttaaacccagagtgcagaatgtgttattgaagattgtcacttgttcatagagcaagagatacttcaccgtggggatgctggtccgtttaactggttcagtggaagttaaaccattaaatgatggctcacgagtagtcacaacctttggagaacatatgatcattattcgccatgaatggatatattctgtgtggtcaagagttgtgtatacttccttgtccctgtactctgcttccgtcagtacccttaggatacgctttacaacacgtcaaggtctgatgttaaggccacgaactgctggaacaaacctaaatgggccccatgtgatttcacaaaagtgattgaactgtgggcccacaccaagtaggttggtgttatgtgaaccattggctcaaaataaagtacacactg

SEQ ID NO: 495207 - DNA, 387 bp, Homo sapiens
atcttacgtctaactcattgtattactagcattggggaatagctcaactttttaaacacattattggatttcctcccgcttcaaagattcacagaaaacttcatataaaaattcaggcccttcttgggcgatttttaaaatttgtatctttactagaacatgagaatcttttacccttggaagcttgaattataaatgtggtgtttggactgcctcagcagcaccagttgactggtcgtgttgcagcggtgtggggaggacggggcaggacgctgtagatctctccagacctgttgggatcctcagtgcctgcagggctctcgctgcctgtagggctgtctggggggtgggcatttagggatcgtgcggacggggtccaccccaaga

SEQ ID NO: 495208 - DNA, 813 bp, Homo sapiens
  misc_feature (39)..(39): n is a, c, g, or t
  misc_feature (84)..(84): n is a, c, g, or t
  misc_feature (223)..(223): n is a, c, g, or t
atgaataatgactgaaatgggaagacgtgacacacaacncatagggtgcacaagagatgggatgtgacaagaagaatgtctagntttcgactggtgcactctatatttcacagatagtgatacgactgggtgattggttggaaagcaatgctcccaaatcttctaaaagttctgcgttcatctgccaagagcaactgtcttgtcttggcttgatatgtcgagnttgttagaaagggtcataatcatgttctaaatttattcggtaatctttaggagggggccagcaacctagtagaggacaaatcaggcaggtctcagtcccaccaggtaagaaaactaccacttcttgatttttacagatttaaaaaaatcttttcagtgacctttctttttaatgtaaatacaaatttaaacctaggcttaatataggcgtttcccctttcacccaagtgatgtcacagttcgatgcaaaatcaatgatccagaatgatcgtgggtaaaaataactcaaagtgtttcttaagggtgagttggcatgcaaaaaattacattgattacagtgtgttttggagctggctctgtttgtgtgcatatgataatgcagagttgagccagagcctggaaatgtcattctagatctcactaactactggaatcagtgttttaatctcttggtggaaactttcagttgcttaactctctattggacagatttccccaatgttctacatcatttcatgttgtattacaatgtatgtacgaaatagtaacctgtgaactatgcttctccataacttttaaacaatatatata

SEQ ID NO: 495209 - DNA, 294 bp, Homo sapiens
  misc_feature (199)..(199): n is a, c, g, or t
cctaacaggattctacaggtagtgattggactgttctgttggcgagtgagactggtgtctcaacccggtatggtggtcactttgtccagtcaacgttacacggaagtaaatctgtcgaaatgcaccatgatgtttgagtgaagctcttcctgtggacactgtgggcttcaatgtcaagaatgtgtctgtcaaggatgtncgtcgtggcaacgttgctggtgacagcaaaaatgacccagcaatggaagcagctggtttcactcaaagcttcatggtgcatatcgacagatttta

SEQ ID NO: 495210 - DNA, 104 bp, Homo sapiens
tggggcttttcaccccgtttatttgcttttttgggaaaatcaaaaaccttgggggcctttttacccccccaaacccaagggggttttttcaagggcggcccctt

SEQ ID NO: 495211 - DNA, 248 bp, Homo sapiens
gagtgtggatgctcccacagcagcaggccggggccgtggtcgtggccgaccccactgagaggcaccctcacccatcacatggctggactggctggctgggtgcacttaccctaccttggcttggttactctcatttttacaaggcaaggtggtacgtacttgggcccactctcttcttactggaggctatttaaatccacaatgtaagacttcgaaacaaagcaaaaagagactaacacaaacagatg

SEQ ID NO: 495212 - DNA, 368 bp, Homo sapiens
actctagtaattcaataatacagtaaacccttgaacaacgcaggtatgaaatgcatagggtacgcttatatataggagtctcttcacctggctgggcaccgtgactcacatactgtaatcctggcactttggcacgcggagagcagagtggatcagttgcggccaggagttcgagaccagtctggacaacatggtgaaaccctgtctctactaaaaattcaccaaattaaccgggcattgtggacggagcactgataatccacacccacttggcagcgctagacgcaggccacgtcctctatgaagcctgggcgacagacgtatgcacagagccgcggttgagcccctgtcctccagccagggcgaaa

SEQ ID NO: 495213 - DNA, 254 bp, Homo sapiens
  misc_feature (32)..(32): n is a, c, g, or t
  misc_feature (46)..(46): n is a, c, g, or t
  misc_feature (81)..(81): n is a, c, g, or t
  misc_feature (88)..(88): n is a, c, g, or t
  misc_feature (109)..(109): n is a, c, g, or t
  misc_feature (222)..(222): n is a, c, g, or t
  misc_feature (237)..(237): n is a, c, g, or t
  misc_feature (247)..(247): n is a, c, g, or t
tccaaatcagtgaccctcaaattttagagtgnccataagaattacntcagacccttattgaaaatacagacccctgggtcnctcttcntccctagtgagttcaaatctncagaattctgacttaggtccatcttcgaaccacactttccagaaagttgtctgttgcccgcattcccactatcatgtccaattctgttccttcatattccttacataatctantttgtccttaattantggaatctcngaagttt

SEQ ID NO: 495214 - DNA, 372 bp, Homo sapiens
cagatctgggttcacatacccggcccttgtgctcggggagtaggtgtctctgtgcaccccacccagaggcactttgcgcctgcttggatgtgagcagacccggggttgttccaaacccctgccccattctgtgggcatggcttgctctgaggcgacgtgcagtctggggagaatgtggggcacgggggctggcctgtggctacctcctctcccctcatcccacagaccccagataaaagccgtctcccttctctgctctgtatgctcaaatacatttgagggtttattacaggaaagggacatgtgtccacaaaacggaatgagaaccacagctggagggtgagtgagagacagtggctgcgcagggggccg

SEQ ID NO: 495215 - DNA, 741 bp, Homo sapiens
cgctgtgtggctggcgtgctgcgtcgttcgcagttgcgccatctgtcaggagcggagccggcgaggaggggggctgccgctgggcgaggaggaggggtcgccgggagccgaaggccttcgagaccctgtcctgcctgcccgggctggcgagagtagaggcagaggttgttgtgcagatgcggctgcgtcctctcccgcccctgggcgcgccggcgccttcctcccagcgcacctgatggacctgcccggggtgcacagaaatgccagacgcccggctgcctgaaaccgtcccgggagtgcgggcccagccccggctgccctatgtgaggggatttccggggcggcccgggtgccctggaggaacaccccggtgggtgctgggaccccttttgaagtagcttccgtcgggaaatgggccccaagcggggtttccctgggggcccatgccgtgggtggaccccctcacgggaatacacaggccatcagaggcggagccccgcgaagcgaatatgggcgcggggcactcacgggcccccattgttgacgttggggcttcccgggaaggccctccaaggcggcccggtgccaagctatcttgtcaggagcgacaggcaatgatttgcttgcgttcctacaacctgtttggaccacaacgggaacccatgttccttgcgctctgtgtggggaagaccgcaacaatttgtgggtggtctttcttaccgcgttggcgcgaatcggtag

SEQ ID NO: 495216 - DNA, 104 bp, Homo sapiens
ccagtttgatctttgtaccgaggggccagtacttgaaacagctttgggatcaaatccttctctatgagccggcccaatgagccacaccacgagcccacaacgag

SEQ ID NO: 495217 - DNA, 175 bp, Homo sapiens
tccctgttccccactaaaatcagaacgaaacaaaaaaagaatttacagatataggacaatatccaacaatataacgaaagtaaaattctagaatatcatgatagccaaacagttaccatggcacgcagaagaatcagagaaaacaacccaggcataagcaaaagaggatgatcaa

SEQ ID NO: 495218 - DNA, 931 bp, Homo sapiens
gagacctcggctccggaatcacatgcagcccccctcgccctgagccagagcaccccgggtcccgacagccccgtcacactcccagcaaaatgggcaaggagaagaaccacatcaacatcgtggtcatcggacacgtggactccggaaagtccaccaccacgggccagctcatctacaaatgcggaggtattgacacaacaggaccatagagaagttcgcgccggaggcggctgagactggggaacgggactccttcaacgatctgcctgggatgctggacaaagctgaacggacggacgcgtgagcgcggactcacccactcgaccatctccctctggaagttcgagacccacacctggctaaccatagcgaaaccaccgtcctccacctaaaaatacaaaaacataaccacaggcagtaggtcaggacgcgcgccaggtaaacccagactacctcaagagagagactacaggaaggacgaaaccgcagaatccgggcaggcggacagctgcaccgcagccgagatcggcaccactgtacacctggcgtgcacagagagaggactctgactcaaacaaacacaaacacgcacaaaccagcagaccgcaccacaaaagagaccaaacgcacagaaaaccgacaaaccaaagacaacgaagaggaccgacgacgaaagcaacccagaccgcccacaacgcagcaaacacccagaaccacacgcacacacaaacaaccaccacacaagcacgagcacctcgcagcagccgaagcacgagcacacaacaaacccaagagacaacgcaacggcgcgacaccacaggcgcacaagcgcagagcaacagagaccacgtacaccaacaccaccacagacacacacacgggcaccccgaccaaacaccccacacacaaaacacccacccgacacccgcac

SEQ ID NO: 495219 - DNA, 180 bp, Homo sapiens
tggaggtatatagtggaaatgatagttcttcggcattactgcattataatagagggcttctactatgatccagacatggtctgtgaccggatgaatacaaacagagaattctcaggaccttcttaattgtaatcttatagtggactacaggctcacctgtctggaagcaggaataaccct

SEQ ID NO: 495220 - DNA, 179 bp, Homo sapiens
gccctggctgggtcaatggctgttatcacctggtccatggttatctgccgaggttgtgcttctgacgccttaatgtctcagagccagagaggcagagcaaggagaaaccggtgccttactcctttctcctttcattcccccatttcctggagtccttggtgcacccctcacgctctgtt

SEQ ID NO: 495221 - DNA, 379 bp, Homo sapiens
  misc_feature (103)..(103): n is a, c, g, or t
tcaccgtatatgtaaccaaatactcctgttcccaaaaactattgataaaataataataataataataataataataataattttaaaaaaagaaaaaaacagngcgggcgcggtggcacacacctgtaatcccagcactttgggaggccaaggcgggcagatcatgaggtcaggagatcgagaccatcctggctaacatgctgaaaccccatctctactaaaaatttcaaaaattagctgggcgtggtggcgggcgcctgtagtctcagctactcgggaggctgaggcaggagaatggtgtgaacccgggaggcggagccttgcagtgagctgagaatcgcgccattgcactccagcctgggcaacagagtgagactcc

SEQ ID NO: 495222 - DNA, 449 bp, Homo sapiens
tctgggcttgtcttacgttaggtgtagatcactagcaggtctacagatatgagtgaccttcactccgaatctgagagtgtttgccgacatagatgctttgtgtacatacaggtgccagactgtcatcactatgacaccggactccacagcgtgtaatccttggcacaacactgatcctcagtgcagtgcagcttcatgaacacaggcatcgcatacagatcggccatctggtcgataatccccatctgaagcgtccggatcgcagacaatggtagcattgacatgtacccgcagttcatgagagttcatggagatactcagaccttagcaagacgaggggcatagcctacatcaccgcaaatagacatggagcaattctagagggggcctaggtagaccaatatgctattaagatgctgtgtagtaaggtactgtctcagctcatagag

SEQ ID NO: 495223 - DNA, 127 bp, Homo sapiens
caagcggttttccgagagggtttcaaggtcgggctacccggttttcgccagctccccgctttttcctatgcaagcctaccccacttcgggggggcaggtttcaaccagtttgggataggtaaaaggg

SEQ ID NO: 495224 - DNA, 80 bp, Homo sapiens
  misc_feature (15)..(15): n is a, c, g, or t
  misc_feature (17)..(17): n is a, c, g, or t
gtgctggcaaagagnanatcagtaaaggctcgctctgtggagatgccttggtagtctcgtctttgttctgtgggttgatc

SEQ ID NO: 495225 - DNA, 1023 bp, Homo sapiens
gcgcagatggatccagcaggcgcctgtttccagctgccgcagtcatgacaggtagtgctcaatagtctctcgtttgtcacagttgcgttcgtgcacttgtgtcccatgtcgtccttctcgcaacggcagcatgcactctttcacacactgcactaggccttgtttacgcccatacaggcattggttgtgtaggaactacgcccagagtttcactcaaagtgcagggacacggagctctggccgtgccagagtctggcgatgctggcagacagttctgatgctggctgacccgagtggcccatgcaaaccttgtactggacgaacttacttcacgggtcgacacggccataccgtacgatcctgcaagaccagtagtcagctgatggaaacggacaatgctgcagctatgagcctcctactactgtgactgggcacactgaagtagcaagccacggagtgaagatgccgggggcagtgcctggacactcttgagcccgtgacaagctgaggactagacgtaccctagaatacggccaggagccagtgcagagcaccccgcgagggatccaatgggctatcagaagtcaggtccgacccttccgtcagtgcgtgacttccacagtcttggacccttagaaggtcacagagcacacagggcaggctgctggccatccaggcatctcagagctaacgttgggttacctcaaatcgaagggtgaggtggatgcatgagacactcttccaaggtcacaagggacggacgatgaggatccgatgcccaaccgcaggataccttgatgatccatggagaacgaagccgttcaagcaagtggcgaacgtgccctacagtcctgggagcctggggacagacaatccatcccaaccgaggtggcgcgctggaatcccaagcaatgccgaatcagagtaatgaaacgaactgaatagggccaacaacaagagttgctcacacacgggggcattcccgagggaccatacggacgccgagaagagtaggcccggggc

SEQ ID NO: 495226 - DNA, 150 bp, Homo sapiens
  misc_feature (108)..(108): n is a, c, g, or t
ggcgagtgcatgctattacaggcgcgatccctactgatcagcacggagttttgactgctccgtttcgactaggcggtcaccctccttagcaactggtggtccccgctnccgtgagtcacatattgatgccgaacttagtgcgggacaccg

SEQ ID NO: 495227 - DNA, 441 bp, Homo sapiens
  misc_feature (26)..(26): n is a, c, g, or t
  misc_feature (353)..(353): n is a, c, g, or t
tgtgctcgctttgagatagtgatggnttgttcagcaaggcacttgtgaaattgttggattggcaccatttttatagaacatcatttatccttgaaagaacaactggcaaactatggttattcagacttgagtccttggcagatactgtcgtgaatgaatgaagtgacagtatttgttgccactgataaaatttatgcttttaagattggaattttggccaggcgcggtggcccactcctgtaatcccaacactttgggaggccaaggcgggtggatcgcctgaggtcaggagttcaagaccagcatggccaacatggtgaaaccccatctctactaaaaatacaaaaattagncagacatgatggtgggcacctgtaatcccagctacttgggagactgaggcaggagaattgcttgaacctgggaggcacagattgcagt

SEQ ID NO: 495228 - DNA, 434 bp, Homo sapiens
atacggattttatgtaccgtaccggctgggttaacagatacttacagatggctattagcggtgcactatgccgtgagccgcctgcacgggcgttgaaagtagggacggacgcacggggggtagaacggagaactaaaattgggctagcgaggaaaaagtcggcaatggaaaaggggggatgcttagagccaagcaaatgccgggagagagcctttgaaacggccacaacgggacatgggtttagcgctggacgcggaagaccatgtatggaagggcaagtggggccgaaaaggaagctatactataggtgaggctgtgcaggtgggcacgcgtggagcattggtgttatatgcgggtgcgggacacccgtaaccgaggaaagtgcgaacggtggaagcggaaaaatagggagtgaatggaggttgggggggggg

SEQ ID NO: 495229 - DNA, 155 bp, Homo sapiens
ggggaatgtctgccccgtttagaggatccctctctgctccagatttgagcaattctctgctcagcctcccaagtagctgggattacaggtgtgagccaccgtacctggcagaaaatgtactttctttctcagaaatacttttaaaaaaaattgaa

SEQ ID NO: 495230 - DNA, 124 bp, Homo sapiens
ctgtatgcttgcaattctagcatagctcagctcatccatgcctcagaagtgtatctggatgagaacaggttactaagcatgaaagatgaaagagcagttggacttttcaaaaatacagcaaagt

SEQ ID NO: 495231 - DNA, 922 bp, Homo sapiens
gactctttctggtgttagatcgagctaccctctaaaagcagtttagagtggtaaaaaaaaaaaaaaacacaccaaaggctcgggcccaaaggggatgaaattcttcttggacttcctcctgctttctccggtaatggatcgtctggctccctagagtccttcggtgaagctttttattcctaagaggagaaaactcagtcaccggcgaaatcgtgctgatacaggcgagcggggcatgcgaatgggggagactggatggcctatgaatttggctaactttaacaaggcaagctgggtcctctggggatataattaagcttggacggggaggacaccagttgccaattgccagggactggggtgccacggtccaatacccttgggggtagactggcagcaacccgagacgatactttaacagcctctgccaaaggaagggctgcaccgggccgaacttgggaaggatggtaacgctactttcagctcaacatacatgcctggtgtacgtctaataacatcagaatggttgggcaacacaaagcatccctcagattggacagagacctctgacggttaagtgtaacgttgacacctttctctgggcactaacaaaggctattttcttcctgcatggcgaagaaataatcatgggccttattgcccatggtgtgcttccggcgctgactgccccggtccctttcttatgcctacggtcaacgcactgttggctgcggtttcttaaccttgaccgatgtacggcttgcttcacaattctgggttgacactggtgggtctattcgtcaccggtctcaaacccttcgtgtggccccttgtgcctggacggtcagcgtccggttcttcgcggagtccctttgtacatgggacggtgcgccgcaaatagttctcttgtatgtcaccctcg

SEQ ID NO: 495232 - DNA, 567 bp, Homo sapiens
tggttatacggacgatcatgcttagtgacgtgtctccaacagcagcgagagagtatccccgacctactgtgtacgatgcctgtctgaagctgcaatcccgttttgcagaaaaaccccagtcttagctcctccaggctcccaaggccggctggatcttcattcacagctctatgtgtgctgtctggggtggcttctccactgccttcttggcaaagaaggttggtccagaaagctacttctttgtccttcagcttctgggccgcctgagtgttggcaccaatctgcagatacccttccttctggttgtactctggccagtgtggcagcccttccccattggggttccattgcgagcaaagttggcccagaattttcatcaccatcttgctaagtctgatctcctcttctgaggcaccctcttttaaaaatggggccccaaagacggagaagagctcatccccgtggtctcctatcaccgtcttgggtttcatgtctgatgagaagcttggacggtactgaaactcatacatgtaggtgggtgctcaggatctctgtggtccgggccac

SEQ ID NO: 495233 - DNA, 433 bp, Homo sapiens
  misc_feature (13)..(13): n is a, c, g, or t
  misc_feature (155)..(155): n is a, c, g, or t
ttccaaacaaatncattcgtatatctccacagctctcaaatctctgagatctctagaagctcaatgagagagtggtcctctctctcggcaaggcatctctgtaatctcagagctaaggagaatcctctctgcaagtggtaacccaatccaacttntcttgtgtctctttctcctctgccctggtctggtgtagccagggcttttattgaactccgaggggaggaaatgcattcttaattgtcccatggttaccattggcaagcgggagaagcaccagaggtcccaccactcccattctgcccgactggcagcttgccccccaccttcaggcccaccctggtccaaaggtggggccttactggggacccaccctcttctgcccaggaatcagtctgcctcctgatgccatttgtgatccccagctcaccccagc

SEQ ID NO: 495234 - DNA, 177 bp, Homo sapiens
actgcgtcgctggaaggtcatagcacccactcacttagatgctaaaggtgattctagtacaatctagggattagggtcaggaacatgatcgcaagacacatggaaagctctctttatactcaaaagagctatccattgaaacgggatgtctaacgggatttaaacagctcccgtgga

SEQ ID NO: 495235 - DNA, 153 bp, Homo sapiens
aacgtagcacctcctttactggggataggatcccggtgagcgtatcactaacgcttcctttaatccttgttgccactggacccggcagtccggaggccgcaccagtctgccgccgccgccgccatcttttctcccctcagcccgccagccccc

SEQ ID NO: 495236 - DNA, 708 bp, Homo sapiens
  misc_feature (265)..(265): n is a, c, g, or t
  misc_feature (310)..(310): n is a, c, g, or t
ctctgtactttctacagtgaaagttgctacaggatctccctttgtcaagagatacatctgcggtggagtggaagcctgtggcaccattttctattgaagaggtagaagtggtcccacgcacacgagatgaaagtgttgggtgagaaacacttggacctcttgtatcccaccatactgcgccatgtaggggctggaatcgctgagagtattggagaaggagtaagcacagtgaaaccagctgacaaagttatcacactctttctgncacagtgtggagaatgtagctcttgcctgaattctgagggcaatntttgtatacaattcaaacagtcagaaacccaactgatgtctgatggtcccagcctgtttacctgcaagagaacatcaatatatcactttggtaataccagcaccttctgtgaatacacagtgataacaggaaatctcacttgccatgattgatgcagtcgctcctctagagaaacatgcctcattagctgggctttctcacttgcttggtgctgcatcaatactgccagggtgcctcagagttacctgtgctgtctttgcccggggggagacgcttgcatgtgcatggttggaaagcagaggagccccacgaccatgagtggagtaacaggagtttgaagcccggattggtgctatggtgcccacctcaggactaggaaccattacggtttttgttcg

SEQ ID NO: 495237 - DNA, 1462 bp, Homo sapiens
  misc_feature (112)..(112): n is a, c, g, or t
  misc_feature (265)..(265): n is a, c, g, or t
  misc_feature (343)..(343): n is a, c, g, or t
  misc_feature (1376)..(1376): n is a, c, g, or t
ggtctgagcgccaatgatgcagccctgtacgcatgaggcgtcctggcacgtggacagtgcactacagcacgcagtgcggggatctgcttacttgcgcattctagtgtttgtncgacaagcttgcttgcagttgcgccagaagtagaggtggatgcgagtgacgcagtcattgctagacagtcttggggaggcgcagcctcactgaacacgacaggccctgatgagctgcccgattcgaaacacccatagtgtagtccataacatncgtggctggcaacgagtgcacgacctaggtgtgagcgtgcattcctagcactgtcactgggcgcacgcgatgtagacngcaactcgtcgttacgatgtgtcgcagctggaggggaccctacgtggagaaagagctatccatggggatccaacccatgcatctaaatgaacgatagggcacgcgtggccgcccttgtggtgcccacggagaacgagcagggcaagcacacgggggtggccctccgaattggacacggaagggcaagccctgcccgtggcaaggccttcgccattggagagcgaaagccattgacgcacgaaacggaattggcaaccgcaagggaatgtcaatgggtgtgtggaaaggaccctttttccgattaataccgcgcgcggcgcccccatagggtcaggcggatggaagcccaaatccaacaaggagacgcagatcgactttgggttgcgccatccccttaagggttcgcataacctaggcgcgccaggccaaacccattaatcgggcttacctctttgccacagagtgggacacggtaatcgtggagcgagagacagaaccgccgggggcctacccaacctagggaaacgttttgccaagaactcatatcctcttaggaagaggaggggcttaaggtaggcctgatggccaccgccacagagggccacatataatccaggggaacacgttccccgaagaactctggccaggttcgcggatctggaaggctatacctttgggcacttctggcaaattttaagacttccaattttgtgcacggacttctctccacatacttgaatgaggaagggaagacggcttcaagggagggataggcaaaggcaaagaggaacagagaggtcgctgggagagcgggggagcacccattattctcggtgggccgcgacgggaaccaagttgcccagaggagcaagtacaaagcctttattgtgcctctcacctatacatcgtacccctgtggagcgcagcgatttgcgagaaaagcacccgcgaagaagagttgcggcacaaaaccctgagccctgtcggagtaccatctctgggtctatccatggtggagcagcagcacagtacncgcatcacgaatgtcggagtcagcagaattggccgcgcggagaagatcacggccatatgggggcaaatagaggccagagaccctac

SEQ ID NO: 495238 - DNA, 371 bp, Homo sapiens
agcacttgtggaggtcgggccacgtaccatcccagacatcaagaggccccaatgcgcttcacttgtttctcgcagacaggagaggcagccatgaaaactccaagcgccccttggcataagaaggagatgccccaaactactccacgtccagaaaactgatgggatctggctcatggggcggggcagcgcggcagtgataggacttcagagtgagcccaaggggctgggggaacagacccagctactgagcaccctgcggcatgagactccttgagaggtggggagcacggggccttcaggactccgctgccttcttgttggtcttgttccagagtttcttgagggtggaagacatgaagtaaggcctctcg

SEQ ID NO: 495239 - DNA, 210 bp, Homo sapiens
taagagcggctcatagtgcgggatattagattccagttataagtgatatcatatggtattgtctttatctttctggctcatttcactcagtatgagattctctagttccatccatgttgctgcaaatggcattatatcatccttttttatggctgagtagtattccattgtgtgtctataccacatcttcctaatcagaccgctcttacc

SEQ ID NO: 495240 - DNA, 658 bp, Homo sapiens
  misc_feature (149)..(149): n is a, c, g, or t
tgttattacccatcttctgaagcctacttctgtcaattcgtcaatatcattttctgtccagatttatgcccttgctggagaggagttgcgatcatttgggggaaaataggcattctattttttggaattttcagcggttttgtgctggnttttcctcatttttggggatttatctgccttcgatgttagaggctaatgacttttatatggagtttttgtgggggagatatttttggtgatgttgaagccgttgctttctgtgggttacgccttcttctaacaagctggcccctattcgcaagtctgctgcagccttctggagggccactccagaccctgttcaccctgggatcacccagggaggcttgcgaaacaacaaaagattgcttcctactcccttcctgggaaagtccggcccaaagcggaaccagcctgatgccacctggcgccctcctcgctggaggggcttgtcgcccccccgtggaggcgtctcccacccaagaaggacacacgtcacggtccccctttagggggcaacctctcctttatcaagccttacaaccttcgcctgggcaaatctcttagataaactcttttcaacctcggccccagttttccttcccggaccttcgcccccagctgcccacctccccttgcg

SEQ ID NO: 495241 - DNA, 416 bp, Homo sapiens
caagagtaccgaactgtcgagcgtcggtaccccaagcttctcaacggattgtattttttaatctcaatttagagtttggggtcgagtctcaaaaaagttaaatgaatggccttaagtcaaaacccactaacccaaatagcacagaatcaaactgcacgtttagataccagttctggttgactccggtatagtataacgggagccagtggccgacatggcgttgagaagcttaagcttctcaacgggagcgctgccaccttcatccccaggcctttcccacaacggcgagcatcttctaggcacccacttagagcccctcaacagacatgtgtccattcggtcctcgaccctaacaacctagtgttcaccccacactgtacagatgagcgaacagggaatggacgttgtgttaaatg

SEQ ID NO: 495242 - DNA, 100 bp, Homo sapiens
cgattctgccacctgaaacacagacactgcttactgccacacaggaaagaggaaacagaagagcagcaattaaagtcccagttactgagcggcacatagt

SEQ ID NO: 495243 - DNA, 133 bp, Homo sapiens
  misc_feature (13)..(13): n is a, c, g, or t
  misc_feature (45)..(45): n is a, c, g, or t
cagagcctgccanagggtggtggtcatggtgggggccggcatcancacacccagtggcattccagacttcagatcgccggggagtggcctgtacagcaacctccagcaccacaaccctactactatctcgcac

SEQ ID NO: 495244 - DNA, 904 bp, Homo sapiens
gcttgcccagtgaaacaccctcggctgggaagtcagttcgtgtcctgcgtcctctcctctcttctcgttgtgaacatggtgcgtactaacagcagacagtgttccaggcgcttacagaaaagtggtggtgctcgagctccagaaaggtgcttggctactatccagcatctgccattaattcgagatcagtttcatcgaggaaagttgaaaatcaatatgcaggaggggacccgcgaggcgttgcgcccaaattcccaagctggcaaacatcggacttggaagaattcttaaggcagcttgtgtgccctaaaagcattctgataaaagagaactcagatgcctgaagaggcacgacgcagcggtttcaggaaaacgccaagagaaaagcatgtcctttgcaaacctgatcagccaatgcatgacccagaatacgaactttctcatccatctgtgaataacgtctccgttgtgaccctggctatactagagtgtaccattacataaatgtgtgagtccaatcagcctttgtgaacaggcatgaagcttcaacaatccaggtcgaacatctccgatgtcaacagctagggtgtgaaattcgcagaatcacgtacactacattatggtaactagctcagctatcccagatactgcatcgcggcctactcacccacatcacgtgtcgagttcctgccaacatcaacgtccctgcatgggtccacacacagcatgggcaaccagacggcacatgggggacagcggccatcacggcgcgccacggaaagggcccagggcagcccacatggaaaaagaggtgctggcctaacagcgcacacacagaacaacaccatctggcgccgaacaaacagggcccacaagtcaccacaccgaggaaacgggcgaacat

SEQ ID NO: 495245 - DNA, 958 bp, Homo sapiens
ctggatggatgcggatcattgctatgatgaggatggatagtaatagggcaaggacgcctcctagttcgttagggacagatcggagaatagtgtaggcgaataggaaatatcatacgggcttgatgtgcggagggggtgttaaggcggtcgtgctagggctataattgtctgggtcgcctaggagagtctggtgagaatagtgtttgatgtcaattagaggagagaaggaagagaagtaagccgagggcgtctttgacttgtgtagtaagggtggaaggtgattttactcggaatgggaggtgattcctagggggtggttcgatccctgtttcgtgcaggaactaggaggtggagtgctgcgtagggctgcgataatgaagggcaagatgaagtgagatggtcaggaatcgtgtgagggtgggactgtctactgagtagagctcctcagattcattgaactaggtctgtcccaatgtatgggatggcggatagtaagtttgtaagttactgtgggccctcaggaatgatatttggctcacgggaggacttagcctatgaagggggtttgctacagtttggaagcaggaggattagtgcgatgattcaggttctgacttagaattgatacagattataagccacgcctgtgtgtactgaacattgcaagtccaggatttttgcgtgcccgtgggggtgaaaggttaccgatgaacaggcggatggaagttcgaaggcgacgggcagtctaaagcgcgagtgtgagccggaagaatccggtgttgaaagccgcgggagacttgccggacagggggccccgaaagagaccatctgcgtgggaggcggtagaagagctccttaacaatagtgggcccaggtggctacaagagggttaacccggagggggtgagggccccccaagcggggaggattgtgcgaaccctcagagaaagccgcgggg

SEQ ID NO: 495246 - DNA, 903 bp, Homo sapiens
gcgcttggcgtcggatgtgtatctgggctgcggatgacgcttgcttgcgggtacgatgggtgctctttgtgcggctgctgtgtctcgccctgtgctctggcccctgggccccgtcgcaatcctggtgggtcccgtcagggtcgcgctatcatctggtgctgcggcgaggatgctctggggtccgcatctgggtcctgatctatgttctgtgcagaaaggttattggttctacagtaggaagtactgtcacacaactgcaaacgactggtaccaaaggaatatctgtgatgcattcattctgtcgatcacaacataacgtagatgttgtcctggatatgataaaggttcctgtggtgcctgacagggcctgtcacattacatgaatctacaaaatgctcaacatgtattaagcatagatccttgtgcaagctcgggttgtatacgcaccgaccaactcatactagtacaggggccgacacttgaaagagctaaggccgtgagaatggaggggcccggctagtttcaactatcttcgcccctagcaacgaggctgggtctccttgccagctgaagtgctggactcctggatcagcaatgtcaacattgagctgtcaatgccctccgctaagcatatgggttgggacaggcgagatccatgtaatgaatgagcttgcaaaacaacggtatgagcctcaagctacttatgtaccccagaaattccaaacattccagaatccaccacgtaaacataatggcttgtaacttgtgaacttgtggccggtgtgtgaaagccgacgaccatgcaccaaagggtggtgcacctcatcgaaaaggtcaacatcccaacaccacaaaatcgccacatgaatcaagcacatgaacacctcgagtgataatcgaaaa

SEQ ID NO: 495247 - DNA, 544 bp, Homo sapiens
  misc_feature (452)..(452): n is a, c, g, or t
ggacccatgcctattttctttttttggagggaccccattgctttttagggaacggtttctgatcctaaacccctttatccacctgaattggtgaatctcactataacactaaaaacacaatttaacttaaataaatttcaaaatatcttaattataacattattcaacactattactggattaccccctcattccccctaccccctaatttacaccagaaaccttataccacgttaaacgggctttacacatgctaacccctcaatcagtccatgcccttataaaaccatttacacgtttcgttcaatcaaccattgccccacctttacaatataatctccgaaaataacactttctattcaatttaacgcactaggaccgcgttctctcgacccattaggcttttcttctcataaatgcacccgtttaaactaatccacctttttaaccanaaaaaccccaacccctgaccttatggattgggaaacttcaaaaccttaatcttttccaaattgggagcccgaaaggcggccaaataatataa

SEQ ID NO: 495248 - DNA, 352 bp, Homo sapiens
tgcttgcagaggaggaagaattccatctggagtcaagttctgtgcagagaaggactggggacagagaaccggtctccaaccaatttcagctggtctggtcttattaagtttggggttaacctgggggtgatgaagaaggtggagtctccccctggatggtgaaccggacttctgggcaaaacttggcatttgcattttggactcattgacgatgatgattgcccatggcgcaccagaacccagcgcagataagcccgccaacctggaggctgtgccagtcatagtagaaaggactgtttttatcttctaggtcattggcgtccaggacaggaaagtctgcaaggaacccacg

SEQ ID NO: 495249 - DNA, 151 bp, Homo sapiens
ggacgcatccccggattgcgcgggactttcaggacattcaggatgactgccattcactgcgcctggtaacttcacgtgggttctgggtttctacatttgtagcttgctgtgtcctttcttgtgacattcaactacgagtgacgggtcctgc

SEQ ID NO: 495250 - DNA, 305 bp, Homo sapiens
ggttggaggtacagaacttgatacactcctcaatgaacaggttgagatagcgctgactgatgaccgtggggactttgcccccagactcttttgggataatgggttactttaaactctatagggagggcaaaagctgccatgggtgagggcctacacaaggcctacaccggggaacgcatacgctaggaagccgtgcccatggctggaggcaagattgaggcgcgctgggacacatcagactgtctgcaatacggacagacacgccaaggcaagacaggatcactcagagaaactgacggcagccg

SEQ ID NO: 495251 - DNA, 1819 bp, Homo sapiens
  misc_feature (575)..(575): n is a, c, g, or t
  misc_feature (1073)..(1073): n is a, c, g, or t
  misc_feature (1528)..(1528): n is a, c, g, or t
tgcgggtgaggtctattcacagatgcgggtggtgctgagtctgtaagccattaggaggaagctgctggctaacggtcgatcattgttactgtgtggagtcacgatgtgctcttggcagctatctgggcgtggacacagtgtaacgcaagcaagaactgactcgccgaagatccgagtcagactctcgcagtcttacatggggaagggctccctggagaactctggctgtacacgacatggtcacgattgctgcgcaggatcacttctatctgcatacaggtactgcggccgtggcgtggggccggagactgcgtctctggtgacacccaaagggggacgtaatgaccccttttggttgtcagtataactaccagaatggatggcggcccaatgtacctcggtggtacacgggctggatggcccttggtgacggacggacactcgcgggacgggcgatagtctcgaagctgcgggcgacacggaccccccttgggaacgcacatatcaaaccacttgcgagctagaggacgaacgagcctaacacggctcgtgaactcagaggaaccaccacatgnggggggagctagcagagggcaaggaaagccaacggaggaaatcatagccccacgtattatcgacaggggcatcaggtaccgagcacttagcccggggggtgcccagttcgatcgctcagacctccggggtcgccaaggtatgcccgccacaggcgcgccgggatcccccgttgggtgtacataaccagaatacctcggggggaatctacacacggatcccaccatatatgtgtgtacgcaagggaccagattgtttcaaaaacaaagccgttagaagccgggttaaccccgtagctttccaaaagagacgttacatttttggacgcccaggtgttcgtcaaccacacagacagtaggtttcaaacaccaaacgctattgacgatcaagggccccaacacgtaagttccacacgggattcaagacagtgaagcccagcgttagaacggccttggcgcaggggcacatattccacaaaggacacgagcgcacgcactttngtaaccagacacaggaaattccacaatggttcaccacaacataagttacgggaatagagcccgttggcaacagacaagaccccggcactcatgggaaggcacgagaattccggcactggcagaggaccggccaacacaacatggggccacactccccaggaactgggggccaccgcaaacgcacacacgggcgtgcacttggtcacacgggttgtgggctcgcacacacatttggaacgagagtgacgagcacgcggagaagtgcacataaggaatggcaacacaaagatagacagcaaatcgacacagcgtagaacagaataagccaccgagaagcactcagtgtagaacaagagcacaccgcagcacaccaatgcacgacctccaaggaagaacagcaacaaaatattgacaagacaggaccatgccacaggggtaggaaacaacgcaggcanccaagaagaaagaggaaaatagacagagcgacactgaacaccacagcagggcagacacagtgcaaaaagaacgacacacagaacgcagtatggacgagggaaacaagcaaccgccgcagcaatggccacacaacgagacgaggacgcacactagacatgacacacagacgcgtcacaaccgaacaaacacaggaacaacggccaaaccacacaccacaacgaagagagaccacgcaacccagcacaacgagacaagcaacacaagaagaagagaaacaatcactcacaaca

SEQ ID NO: 495252 - DNA, 155 bp, Homo sapiens
ggggggggccccaaaaaaccccaattttgggggggctttttttcccccccccccaaaggggggggggtttttttcctttggggggggggggggggggggggttttttttttttccccccccccccccccttaaattttttttttttttttcccca

SEQ ID NO: 495253 - DNA, 279 bp, Homo sapiens
  misc_feature (34)..(34): n is a, c, g, or t
  misc_feature (41)..(41): n is a, c, g, or t
ccatgctctaatgccttgttggatcacggacaancctcttngccaagctacagcatcagcgatgttatcttgcagcaaagcactgcaggataaatgacaggcattaactgctcctggggtttagccatcattacaccagtagcggctattgatctgttaatatcccataatgcactgcttcgtgtctccagccattgtagtttgatagctcagtgtgttgtaaccacatctcccatttgtgccaaacacatccagttatggccatgcgagtaaatggca

SEQ ID NO: 495254 - DNA, 414 bp, Homo sapiens
gtgacaggatgtgtgagtattccgttcacttgaacactttaggggtcactgtggggttattgatggcctaatttcaacattattgtgtctcagagaatagggaggcccaaggaaagggagacagactggggaatggctggctggtggaactgtgagaatacatgtttattgattaaattcaccatcttatatgggcacagttcatggctccccaaaacaattacaatagtaatgtaaacaattactgatcacagatcaccataacagatataataataatgatgaaaaagtttcaaatattgtgagagttaccaaaaggtgacacaaagacatcaagtgagcccatgctattggaaaaatggtgctggtagacttgctttgacacaagatccctacaaaccttcaatttgttat

SEQ ID NO: 495255 - DNA, 744 bp, Homo sapiens
acgaaggtttgtcgtcaaaattcttgctgggacccccccccttctggcacgttgtgtccaactgtggggccgtgacgtggaccacccgaagtgcaggttttccaagaaattcttgggggacttagggcaccacctttctgggtggtgcactcccccgccacaccagggggtgcgcacatattgtagcgcgccctccttcgtcctccggggacatatggtaacgcccttcttcgagatatctccgccgcaccacatggtgtgtcctcgcatttagatttgttctcacctcacccacaagagaggaccaggaggcaacctgtgcggtgtctccaccaccgctgattccccccaccacccttgtgtgtaggccccctgagtttgtgcgactcagtgcctactccaccttaatatagcactatgcggggctattactgagagacaccaccctcgtggctctccacacagctgtggtgtagataccacactcgggtgtgtgtctgtctctgttcacaatacccacaacagatgcgggcagcaggataggagttgcacaacagccccacgacgccccccacctcactcaatgagaggacgacgagggcacgcggagaaatccaccaccaggaaccccgcggcagcccacagagagtgtaccacctcgaggccagcagaagagccaccacccgccccacccccccctgggagaccccagacgaagaagagcctccaccttccaacataacc

SEQ ID NO: 495256 - DNA, 711 bp, Homo sapiens
tattcatacagggatgggtgtcgtttatgtataggcagtggtggacaatatagatgcacagcaagctccacagctcatgggaccctgggtcacctaccctgggacctggggataagtttggctgtggacagtgctccaggtccgggggttccctggggtggatgaggaggcaggccctgcacagtaggtcctgtgtttagtcagctcaggcccagtctgacaggggctgtcacagaggctgcactggatagggaccatgggacccctgcaccccagctcatctctgacacaacccaggccattgagctgacactctgcgcggctgtaggatatgacagtagcctggagttggtaggagcactatatggcacccaatagagactgcggaaggtgctaggtagatgctggcagctcagagccggcggtccgtgcccttgcttgcgggccatctacctaccactggatgcagaagcccttctactctgacgaaagatgtgctactttggacgtggcctatgcctatggcaaactcagcttacaccagacccaggtgtcccagggcctggccaccgagctagctatacctacatgcccagactgacttctggtgaggtggcccactgtgcaagtccttcgcttatcaagtggtcagctgccctggttgaggctttgccagaacgtctgacagagcgcagaatcacctgccactgg

SEQ ID NO: 495257 - DNA, 964 bp, Homo sapiens
tctcattcaaaagtagtctgctattgtcgccgtgggcttgagctcgcccgtgccggccctctccgtggtgccgcgctgtgacgcacgcgggtggacgaggggaccgatcccgggtgcccatggccggtggcctgcatggtcgagcggggccgcgtgcctccccccgcacccgcgcccagcacggaggggctgccggcgccttcctgcagagcctgcgcaccctgttcgactatcctgtgactgaccaggcggcgcggttgctgtgcacctgccgcggagatcgagtcccgctggcagggcaccgacgcgcgggagctgccccgcgggtgtgctggggggcttgcgccaggtgtccccggccattggctacctgaccttcgagcgcttcgtggccggcctgcgcaccttccctgctgagcgccgacggctgccccccggtgacccctacgcggcgcccccggcccggcccgtggattagccgccgcgccgtcgcagccgcctgttgttcgctcgggctcgagcgaggccgcggacggctctgggagaggaatgcccctgccctgggcggtgccgcgccccctctggacggttcccagcgccgccggccagcatcacgagatgcagctgtgtcgccggttgacgcggcgccctcgcccgcgcatcccggagcgggtcccagaccgcggccctgacaccctactttcaggcccgttgcagcgttagccgggacgcttacgggccctgagggcgactacagggaattcccggtggcccccgtgtcccaggggccgtcgcagtcaccctcccagccgctcattctccgttaccaccaattgacgactatcataaggcgctccgtgaccatgtacatctgttttctcacctcacgtaagacacccctctgtgcacgttcgctgaacccccgagacaaacatccggccatctccgcactcaccccttcata

SEQ ID NO: 495258 - DNA, 305 bp, Homo sapiens
gaacagatcaatacgacagtgaccatcatcatttgtagaccaactgtttataccatcaactaaactactattcttgcgtaatcataacgaaaaagaggttgttgctgtagacccatgctgtctatcaagcaatgctcagcttgaagaatattcctgttttggcgactgcctataagttaatcttgggcgaaatgacttgtgccctaaaacaacctcctggacagtctgcaacttcctgaggcctgtactgaaataaaacatgaggcttttacgaatcatgtgttcaatgtacaccaagggaaaca

SEQ ID NO: 495259 - DNA, 549 bp, Homo sapiens
tatggggtgggtttgaaaccagcttgggggggttcgattccttcctttttggtctaaattaatgtatacgggttctcgaatgtgtggtaggggggggggccatccatatagtcactccgagggttctagggagggttcttctactattaggatgttttcgcttcgaaagcgaaaggcttctcaaactcgatgaaaattattaatattactggcctggttagcagcaaagtgaagtgaccctacagagtgataggagtgtccagtgctgggtgtatgcatcggggatagtccgagataccgtcggtggacatccccggaaataaggcgcggcaagaaaagtctgtcggggggaaacagaacatgtgacgaattagcccgcgcgcatgaccatttagttaggtcaccaacgggcccacgggccgacaaggtcagagctcaaaagcggcgccccccgccaaccagcggcgacactcgagcgaccagcaccccccacaatgatgcgacaacacaaagcccacgacgaacgcacaataacgcaacagcgacacc

SEQ ID NO: 495260 - DNA, 317 bp, Homo sapiens
  misc_feature (41)..(41): n is a, c, g, or t
ccccaggaatttgctttggagggaaatgtttatttttttcncgggaatattttaaagattggggcatggtggctcctcccgccagttgcaaacctgccccttccgcctgatttccgatccccctgggtgggccgcatttttggtcccctgcctgggtccatcgagggggctggctgtggcctgttttcctttgaccccccccagggtcatttcgggtcttggggggcccctggtgggagcttgtggagtcggttcccgtacctgtgcagaaaccgcctttgtgggtgctttttaaattaaacccgcccccgcagcca

SEQ ID NO: 495261 - DNA, 1283 bp, Homo sapiens
ttttttctggggtggggtttttcccaggggttttggtttggtttattccaaatactgaaaaagtccttggggctctggtggggttccccacgccctcagggctctccttttctctcccacactctcacgtgcccttttttcccaacagcaaatctcttattttacaaggacagaactttttaaaatgtgatttaagtggtggagttttctcaacatagcctctctgtgcaaaacttagagaggaagacgtgtttgtgccttctgtgttcgtggtggggaattgggagttttctttttattcttgcacccccgaggtctctctccaacccacccgtgaaacacagaggcgctttatttcttacaagagagcctcaaatataaaaacccccttttctcatattgggctatctctccaaattctctctttccccttctattactctataccccaatattcggtgacgcgtgggtgtgtggacttctcttgtgggagtataaattctcctaacgcgtggggggttataagaaaaattctcctatagcggtgtggacaacaccctgggtgtgtgtggtgtaccaacattcaaggcggttgtgaaaacccgtgtgttccgcgggaattaaggtgcagatattttctacaagaaagatgggggcttttataatagcgcgaggtaatacatagtgcgcctaacgggggtttaataaagatgtttcgggggctcttttaactcttaaaaaaataataaaaaaaaacagggggggggggccgttttcaaagaaaatttccccctcgcgagggggggccccaaaatgtatatagggtggttaccccccacggttttctctttgtgttcccaaaggggggggcccccatatagtaggggaagacccccagaaataatattaaagactaatacgacaatgattgcccgcacggattttattaacacaaaggctgcgctgtacatgcgggtggacaaagagtggtgcggttaaacgatgaggaaaatctctgttgtgtgggagaggggaaccccttatacttctgggtgggggggggagacgacaatatcatggggtgggcgcaaaattttccctataaagaggaggattttataagggccctaagagggagaaatatatacatttttagacgggggtatctttggttggtttaacaaaacgcgggatatttgctgttcgcgtttaaaaatttttgcgcacaaggaggatattaatttttgatatttcagtgggagagtatacgataattaaaatgc

SEQ ID NO: 495262 - DNA, 417 bp, Homo sapiens
cagaagcggcgctcgcgccaagggacgtggacctgcgctcgcgaggtcatggaggcgctgacggtgctagccgcgacaactactgaccacgggcgccaccgaaggctgcttctgctgccgctactgatgatcctgctgccgagtggagctgcgcagggctgctagacataggacaggccacggactcgagaagaggagtgccacttctacgcggctggacaagtgcacacgagagaggcatccaagagatcgatcgacgaccacttcctgcacctaagcaatgcgaagatttccaagacagagccctactgggaaggaacagctgagagcgctggataactgaatgagctgaagttaactgcatctcgagggtacttagtgtcctctgatacccacttgaggtcacagttgcgtgtg

SEQ ID NO: 495263 - DNA, 401 bp, Homo sapiens
gacgctctctctgtggggatactctcccatgtgggagagggctctcccttttgggccacctcacgctgcttcggaggacttggggatgctccctccttctcgtgagtcgttctactgatgtgggaaccatccacctactgctgatattctctagaggtctgcagtgagatgaagaagtgcctctggaatctgcatgggcttaccgcctccaaatgggcacatcagaggcaatgagatggggagcacatccttggtgaggggcagatggcagtacgggctgaggatccctgcacaccatgggcaaccagtgtcggaaaactggagttcaatgcttgcttgcccagctcctgcagacttgcttttgctctgtgccagagtaactcccccacagcagagagcgt

SEQ ID NO: 495264 - DNA, 829 bp, Homo sapiens
  misc_feature (11)..(11): n is a, c, g, or t
  misc_feature (19)..(19): n is a, c, g, or t
  misc_feature (24)..(24): n is a, c, g, or t
  misc_feature (45)..(46): n is a, c, g, or t
  misc_feature (49)..(49): n is a, c, g, or t
  misc_feature (53)..(53): n is a, c, g, or t
  misc_feature (58)..(58): n is a, c, g, or t
  misc_feature (73)..(73): n is a, c, g, or t
  misc_feature (81)..(82): n is a, c, g, or t
  misc_feature (88)..(88): n is a, c, g, or t
  misc_feature (100)..(100): n is a, c, g, or t
  misc_feature (115)..(115): n is a, c, g, or t
  misc_feature (120)..(120): n is a, c, g, or t
  misc_feature (137)..(137): n is a, c, g, or t
  misc_feature (144)..(144): n is a, c, g, or t
  misc_feature (170)..(170): n is a, c, g, or t
  misc_feature (173)..(173): n is a, c, g, or t
  misc_feature (186)..(186): n is a, c, g, or t
  misc_feature (208)..(208): n is a, c, g, or t
  misc_feature (229)..(229): n is a, c, g, or t
  misc_feature (246)..(246): n is a, c, g, or t
  misc_feature (248)..(248): n is a, c, g, or t
  misc_feature (255)..(255): n is a, c, g, or t
  misc_feature (258)..(258): n is a, c, g, or t
  misc_feature (267)..(267): n is a, c, g, or t
  misc_feature (270)..(270): n is a, c, g, or t
  misc_feature (273)..(273): n is a, c, g, or t
  misc_feature (298)..(298): n is a, c, g, or t
  misc_feature (305)..(305): n is a, c, g, or t
  misc_feature (330)..(330): n is a, c, g, or t
  misc_feature (332)..(332): n is a, c, g, or t
  misc_feature (345)..(345): n is a, c, g, or t
  misc_feature (377)..(377): n is a, c, g, or t
  misc_feature (380)..(380): n is a, c, g, or t
  misc_feature (392)..(392): n is a, c, g, or t
  misc_feature (430)..(430): n is a, c, g, or t
  misc_feature (435)..(435): n is a, c, g, or t
  misc_feature (437)..(437): n is a, c, g, or t
  misc_feature (454)..(454): n is a, c, g, or t
  misc_feature (460)..(460): n is a, c, g, or t
  misc_feature (472)..(472): n is a, c, g, or t
  misc_feature (475)..(475): n is a, c, g, or t
  misc_feature (478)..(478): n is a, c, g, or t
  misc_feature (480)..(480): n is a, c, g, or t
  misc_feature (485)..(485): n is a, c, g, or t
  misc_feature (503)..(503): n is a, c, g, or t
  misc_feature (514)..(514): n is a, c, g, or t
  misc_feature (521)..(521): n is a, c, g, or t
  misc_feature (540)..(540): n is a, c, g, or t
  misc_feature (545)..(545): n is a, c, g, or t
  misc_feature (556)..(556): n is a, c, g, or t
  misc_feature (575)..(575): n is a, c, g, or t
  misc_feature (578)..(578): n is a, c, g, or t
  misc_feature (589)..(589): n is a, c, g, or t
  misc_feature (596)..(596): n is a, c, g, or t
  misc_feature (601)..(601): n is a, c, g, or t
  misc_feature (605)..(605): n is a, c, g, or t
  misc_feature (611)..(611): n is a, c, g, or t
  misc_feature (614)..(614): n is a, c, g, or t
  misc_feature (621)..(621): n is a, c, g, or t
  misc_feature (625)..(625): n is a, c, g, or t
  misc_feature (627)..(627): n is a, c, g, or t
  misc_feature (629)..(629): n is a, c, g, or t
  misc_feature (636)..(636): n is a, c, g, or t
  misc_feature (660)..(660): n is a, c, g, or t
  misc_feature (663)..(663): n is a, c, g, or t
  misc_feature (672)..(672): n is a, c, g, or t
  misc_feature (680)..(680): n is a, c, g, or t
  misc_feature (687)..(687): n is a, c, g, or t
  misc_feature (689)..(689): n is a, c, g, or t
  misc_feature (691)..(691): n is a, c, g, or t
  misc_feature (709)..(709): n is a, c, g, or t
  misc_feature (715)..(715): n is a, c, g, or t
  misc_feature (741)..(741): n is a, c, g, or t
  misc_feature (743)..(743): n is a, c, g, or t
  misc_feature (748)..(748): n is a, c, g, or t
  misc_feature (754)..(754): n is a, c, g, or t
  misc_feature (787)..(787): n is a, c, g, or t
tgactggctanaaattttnaaaanttgcgaggcagtaagtgcccnnganagcnggcanagtgccgggaacacnaggccccnncggganaaaccagggccntaaggaaaggggctncggcnttggcttgagggaaggnacaaaantgggacaggccccggccgggagtatncanaagccaagggggnagcgggggaccacaccaccccnccccaccaaggccaaggagangcctttgaagtagcggnanagccctngcngccaggggncanacngcagggcggccaggcccccccgganccgagcngcagccccgaaacaccagggggcananagcattttcccangccgggccgggggggggcccccacccaggganctngaggcccccganagagaccaccaccatggcaaaaaggtcgaaggccccgnctgcnanccgccgcagcggaaacngtccantgacaaaccccntcntgngngtaancagcctggcccccaccanagtggcaaacngccccanagcccgtcctgccagcccnccacnccgacccaacnccggggggacaagtccgcnganactcaggccgntgcccanccctncccnccgccncanctgtttncctncntntcctagnaggaggccagccttcccaaagggnttntttagagcnctgccaancccaaanancncctttcctttgtccaaanagcccngcagagccacaaacagccgaagaatntnatttntccccncaaagatccggaagaagcgaagatctcggagcncacgctctactccaggttccttcatgaagcccatacccccca

SEQ ID NO: 495265 - DNA, 889 bp, Homo sapiens
cgagcacctcctctactcagtctctagctcgcctgggttctcccgattataggcaactcagccctgctcagcttgcctggataccgcgccaccactcgcagttctgctcgtcgttcccaggccgggtgtccagtggggcccctccaggaaggaacgagcttctacatgggcacgttgccaggatgagcctgagcagctggatgacgtggaaccgcatgcagagctgcagcagcgcaatcgagtgtgccccccaatctgaagacctgctatcccctggagtccaggccttccctgagcctgggcaccatcacagatgaggagatgaaaagctggagacccccaagagaccctgcgccgagcgcagtcatgcagccaatccagatagccgaggagcacgggcatcaacacccggtagcagcgcaaacgggtctccctagagcccacaaggccatggaactcgtgagtctaagaaggcaccagctgtttgccacgcccatgactccccgaagacgacattgaagggcgcaaacaggagcactactgaggcccagaagaaagcaggctccagctttctactaaacgggcctgaccgggcgccagatcgagggcctgcagcattcctcaacagcacaccaagaaagctagggaacaagcacttctggcggcggggacagccttcaaacgaaggcctggtccaaggtttccccaaaactcgcaggtggacccgccgtcttccgcggctagcaaccacacagacagggcgccatggtggcgccatggtgcaaccctcgagccagggacaggcaccaactaagggcgggccagagtgccaccgggtcccgaagtggcgacatgggccggcagggcttcgagcttcatatccgggaaa

SEQ ID NO: 495266 - DNA, 216 bp, Homo sapiens
atgcctcattattatgactgtggttcaacagtattgcgttgtcagactaggaaagccaacgagcaatatggttttagtttgctgaagactggccttattaatggacagcgttcctaacaagggattattaacttttatcaggtgttaacatctgtgtcaggaacatggcagtatgttacatgtcagaagatatgtttaattctatggtatttctaa

SEQ ID NO: 495267 - DNA, 300 bp, Homo sapiens
gatgttttacacacatgagggggggggttcattaaaactgttttctaatttttccaaagttaatctataattaattacttccctatacaaacaaattaagatgttcagataattgaataaggccctttgggtccttgttcatttatatcgcgggccagcattataagcagggggaaacttttagcttggggttccatggccggtaaaaatttttcccataaagggaacaaaggtttagttttttttgtataggaaatttccctgcccctaaataaaacattttgaaatgaaacaaggtta

SEQ ID NO: 495268 - DNA, 448 bp, Homo sapiens
tcttaagtctatgttagtggcatctattgtgcattctagaaataaagaatttgggatatacccattatgttaatcaaagtcctagcaaacacatttcgcaaaagcattcattttgtcttcgttttcgtgggatgggcagcaggagagaatctacagcatttgcgtttagttaaccaatcataactccagcatagtgacataggcagttcacatagccggtcaatatgtgaggtatccatcagtgtgagacaaggtcccggtctgttcctattggcctagctgacgctaacaaaatgggaggcttatggctctgcagcgacaattccagcaggacaagatgactttaagcccatattcagagccctagaagcagggcactactgagtatgtaatatttagaggtgaaacttgtgcaagagcccataatggtgcccctctaccttctttg

SEQ ID NO: 495269 - DNA, 155 bp, Homo sapiens
atctgtagaacagatcttagtatctaatctccagtaggctatccacttgctcttcatttatatattcttgtcctttcattatgcatttggatttttttttcaataacttcctgaatatgacttcattatgaatctggctttctgctatgttaatt

SEQ ID NO: 495270 - DNA, 199 bp, Homo sapiens
  misc_feature (163)..(163): n is a, c, g, or t
  misc_feature (174)..(174): n is a, c, g, or t
aggttgtcgcgtgatctagaggatcccgagtaccacctgaaataccatcttcccttggtcactaccaccgatactggtcttcctcctaccttttgggctgttcctcttgtacagacttctcctgatccctcttgatgccatagctgtgggagcaccccagggnctcagttcctnttctctactaagaaggtctcagaat

SEQ ID NO: 495271 - DNA, 213 bp, Homo sapiens
  misc_feature (35)..(36): n is a, c, g, or t
ttttctttttcttctttcttcataattagacgccnnacgccaatagttttctattttcaaagttttttatttaacataaaaatcatattattcgactgggtgcagtggcccaggcctgtaatcccagcactttgggaggacaaggatggaggatcacttgagcccaggagttcaagaccagcctggccaatatagtgagaccctgtctcttca

SEQ ID NO: 495272 - DNA, 988 bp, Homo sapiens
gcttctcctgcttccccgccggcggggccgacatcatgagggaaattcgtgcacttgcaggccgggcagtgcggcaatcgaatcggaacgccaagttttggggaggtgatcatgacgatgagcacagtgcgatctgaccccacgggtacctaccacggggacatgcgagcttgcaagctggaatcgcatcaacgtgtactacaatgagtgccaccagagaggcaagtacgttgccccgtgccgtgcatcgtggaatctggagcccggcagccatggacatcctgttcgctcggggccctatcgggcagatcttccggccggacacacttcgtttacggtcagagtggtgctggtgaacaatctgggccaagggtcactacaacagaaggcgcgcagctggtggactcggtgctggatgtcgtgacgaaaggagtgctgagagctgtgaactgcctgcggggcttgccagcgtgacccaataccctgcggtaggggggactgggtctgcgatgggtaccctacctcatacagagagatccgagcggagtacccagagcaggatcatgagcaacgttaacgtgtgggtgcctacggcccacaagtgtcagacacagtggtggagccctacaatggccgccctgctcgagtccgaccagctcgtagcaagacacaagacgaagaccttactggagttgatgacgaagtctctacgagcattgcttcagaagcctaaaggtgagcaagaccaacctatggtgacctgaaccacctggtgttcgtgctaccatgagtggggcaccacctgctgcgcttccaggcatttcaatgctgacctggtagaaagttggctggaaacatggccggtatcaccggatggacttcgaattgcccgggtttgcccaattaactagcaggcaagacagcagacggcggataccggccgagatcaccagagattgtgtgcaagaactgtgggtctgaacccggt

SEQ ID NO: 495273 - DNA, 252 bp, Homo sapiens
ttcccctgatgtttgcctgctagggtctctggttgttttttctctttttttttttagagacagaggcagagtctcgctcctgtcgcccaggctggagtgcagtggtgtgatcttggctcactgcaacctccaccacccggtttcacgccattctcctgcctcagcctcccgagtagctgggactacaggcgtccgccaccatgcccggctaatttttggtatttttagtagagacagagtttcaccgtgtta

SEQ ID NO: 495274 - DNA, 157 bp, Homo sapiens
actgatgctcgcgaaggtagagaactactgctttataatgatcgtataataaagtctctgaaaaggccttgattcagaataagcaagaaaggttcagtgaattcactttgtgcttctggggctgggaaaaacctttctctgtaacccgacactagcc

SEQ ID NO: 495275 - DNA, 322 bp, Homo sapiens
  misc_feature (83)..(83): n is a, c, g, or t
  misc_feature (88)..(88): n is a, c, g, or t
  misc_feature (116)..(116): n is a, c, g, or t
  misc_feature (137)..(137): n is a, c, g, or t
  misc_feature (142)..(142): n is a, c, g, or t
  misc_feature (277)..(277): n is a, c, g, or t
  misc_feature (295)..(295): n is a, c, g, or t
  misc_feature (311)..(311): n is a, c, g, or t
ggcacgagaagaagttgctgggaagaaaagtttctctgctcaggagcgggagtacatccgccagggaaggaggccacggcagntaagnaccagatcttggcccaggaagagaactngaagtttgagaagaataatgnatatngggacaccgtgtacaccattgaggttccctttcacggcaagacgtttatcctgaagaccttcctgccctgtcctgcggactcagtggtaccaggaggtgatcctgcagcccgagagatggtgctgtgggacaggncagtgactgcctgccagntcctggcagcggagtngaaagacaaca

SEQ ID NO: 495276 - DNA, 837 bp, Homo sapiens
ccctttgttcccggtttggaatatgccccccgccccccttccccaatattgtcttttcctccgcccgtccccggttgttttcctcccttgtctggtgacgagcatattcaatttccgtgtagcgcggcgcgtcaggcgtccgggtagcccccctttttttcttatcaagaaatcggccggccaccccgtcgttttatatgaggggggagtgagggcgcgcggcgcccacacatcgcagcctcatctcctcgtggtgggactataaaggggaatatgattatccctccggcaccaccaacatcgggggcactgggtatgaccatgttatccgggaacagccctcggcccccctcgtgggggagatctatggttgtgagtaaaagaagaccaaaactatattatggggccgacactctctcttggtgtggccgtagagagaacaaagaagacacacatcacatttgttgcgctcacatacgcatctcctcgcggcgagagataaagaagcggccgagtccatattgtgtcttctagtactccgccacatagcgccccgccagaccaggggtgtttgcccacaaacctgccgccaggagttatctgtgagagatagaatgtggtaaaaggttcaggtaataacgcaagaacactactctatttcggagacaacattctgggtcctcggacccgagttcggtggttcttaagtcgatgcggcgcctccccgcgcaggctgtttctttcacgggcggcggaaaagcgaactacgggctccaaaagggttaatggtgaaacaccccttcaaaaagttgatttccccggcagaaaaagacaaga

SEQ ID NO: 495277 - DNA, 122 bp, Homo sapiens
aaaaaaaaaatttgaaaaaaaatttggtttttccaaaatttgctttgaggggggggggggtttattaaaaaaggcaatttcggggattttgggggggaaaaaaaagccttgggccctttcca

SEQ ID NO: 495278 - DNA, 167 bp, Homo sapiens
  misc_feature (135)..(135): n is a, c, g, or t
ggaccacctctttgcctcatcttcttgtcaaaaacataaaacattcacatctcatttctgagtgccgatcatctttatcatgagagaagcaccggtacagacttctgaataattctgattggtcctcccaaaatnatttgagctgaatcagcttttttgcttgataa

SEQ ID NO: 495279 - DNA, 323 bp, Homo sapiens
agggaagatgatcgagttgggttggtaaggttaattcgtgtggtttgtgtgcagctagctgatatagtagccggattattactaaagggtcacagattgtgtgtatagatatgttggttgtggtgcacgagttgttcttcgtaggtataagagtcgtcatgatatgtattaaagcttggggtcctctgactagtcccgcatgactgagctcgctttctatggtcgccataggctcacagtttgacaggcagtctgtcgtaatcagccaagaatttaacatttgttttgttgagcaaggcaaccatcttctgcagccccaccag

SEQ ID NO: 495280 - DNA, 211 bp, Homo sapiens
ctccagggttttcttggggtgttttctctgatcacaacttttttgctacctggttttcattattttcccccaattcttttgaaaaatgggaatcttttttgaggtttagcgttttaagccctacgatggggtcattatttcatgactggggggttcctaaactctgaaatcagccttgcccaaggacttgagaataaatgagcctttttta

SEQ ID NO: 495281 - DNA, 877 bp, Homo sapiens
  misc_feature (1)..(1): n is a, c, g, or t
  misc_feature (21)..(21): n is a, c, g, or t
  misc_feature (212)..(215): n is a, c, g, or t
  misc_feature (224)..(224): n is a, c, g, or t
  misc_feature (226)..(227): n is a, c, g, or t
  misc_feature (232)..(233): n is a, c, g, or t
  misc_feature (242)..(243): n is a, c, g, or t
  misc_feature (246)..(246): n is a, c, g, or t
  misc_feature (248)..(248): n is a, c, g, or t
  misc_feature (250)..(250): n is a, c, g, or t
  misc_feature (255)..(257): n is a, c, g, or t
  misc_feature (264)..(265): n is a, c, g, or t
  misc_feature (268)..(268): n is a, c, g, or t
  misc_feature (284)..(284): n is a, c, g, or t
  misc_feature (287)..(287): n is a, c, g, or t
  misc_feature (290)..(290): n is a, c, g, or t
  misc_feature (303)..(303): n is a, c, g, or t
nctgactgtaataactgcggncctaaatggtctgcacagtcttacacaaaagcccaatacagtacatgaactatcggaaaagcagaactgctctaacaaggaagaggtgggagatctgagtcctggccccagcacccacttcaacttcagtcacctccttggaatctggggttctgcagcttgaaataatcagtttggattttaaacttatnnnnaacataatncnnctccnnggaactttnnaanantnttttnnnctaaatnntanaattattataataagnganctnataaaacagtctnttcctgaaaaacaaaaaaaaaatggcctttgttggtctgaccgggggagactattgcccccgctatacatgcagtgagggtgcactcctgaaccccgccaattgacttgccgtgtctccttccaccgttgagacgagcagtctagctacatcctacgccgccctaatcccatttttccaattccagggccacccgacgccccactgcggatacccaaggtccggcctgtctctgacctgctgcgccgcccgcgaccacctatgtcctgtaactctcactccccaatatctttaccatctcacgaacgtactaagaagcaccacgccccacactccaacacaaaccctttccgccgcttgcaccgctcttacacgatcccagatgaaaaatccgcacgccccccacacatactatactaccgctccattttatccactctcctgcttccggctgatcactcaatagcatgtccgagccgtcgtcacccccggtacacctaacgatacactgatcttcacccagacccctcctcctgctgcgcttcccagacgcgccagagtaaacataacggcct

SEQ ID NO: 495282 - DNA, 238 bp, Homo sapiens
gccgcggagaagaggaagagacaggacaaatgcaacgaggaagaagagagggaaaaagagagagaggaagagagcaagagaaggaaaagaaagagagagagaaaggaaagagaagaaggaagaagagggaaacaagagagagaaggagagagagagaaagaggaaaaagaaacacagcaaagaaaagaaagagaagaaaacgaaagagaaaaacaaaacacaacaaacacacaaaagg

SEQ ID NO: 495283 - DNA, 496 bp, Homo sapiens
  misc_feature (28)..(28): n is a, c, g, or t
  misc_feature (40)..(40): n is a, c, g, or t
  misc_feature (65)..(65): n is a, c, g, or t
  misc_feature (75)..(75): n is a, c, g, or t
  misc_feature (90)..(90): n is a, c, g, or t
  misc_feature (134)..(134): n is a, c, g, or t
  misc_feature (145)..(145): n is a, c, g, or t
agacataaaggaacgactgaacctctgnctggactgtganctgatgaactccagaagtacctatncttactgtgnactttaaagtttganggaagagaaagctgtaggaatccataaattcctaccaggaaatnccagggatctnccaattcctagacactgagaaatgggacacccagtggttccaagaacactttctgggactaacatagtcctcacacagggactgaggaaagaaagtgtctcctttcctgggaaagcacatgtaaaagttaagggcctgaatctcttctaaaccaataattgacctctagggcacccaccataatactgctaccttcagggcagaagacactgctctttgtaacccagccaccaccaaaaagcaaacagaaagaaggaaggatggttaagccattggataatactgaatctgtttccctaaggtgacttaaccttagagcaagacaacatccagggtaattttttgtagatt

SEQ ID NO: 495284 - DNA, 914 bp, Homo sapiens
tcttgttgtcatttataactattgaaccctttgctatgctcctgtgtcattgcattataagtcacagtgaaatgaatgtgtttcatgcatgtgatgatgattgagtaataattcctcccagaagagctgtgtacatacaaattaccattgagggctgatgtacgaaaggactcaatgacgacgcaaatggggcgacactaacgggaaagtactgagcttttgtagagaatttacctgacagacttgattaatgtacagctattttatctcgtgattttaagcatgccattaacactatgatctcatttcattaacgtatttgcatcatagtcgagtgatgctgaagtatggcggcttcattttatctgttgtcgcgcaaactgtcaatttagctatttctgtcagtaataattttgctaacgacgctagtattgtacactaaaagggcagttaggcttcattctcgtaggccactacttatgtttacccaatggttgactaaacgcatagatagtaaccacatcatgaccatgataactatagtgcgcgtatgtagtacgctgtacttggagagacactttatttattaaacaatgtttaggactaatatgacgactggtatgtcaacagtcattatctccctgatgtatagaaggcatcatacgtaggccacaatatctttagaacaacttcacccctctaaacgcgtcagaattaggcaactaaatctcagagtgctttgaccgtttatacatcgtcaggagacgttaggcttacagattctacgcacggttataccatgttaaatgagattaaatattctgcttagcccccatgtttaccacagcaataggcacctctcttcaacgcagaaccccacgatgacagcattcgtagacaagagagtacttcac

SEQ ID NO: 495285 - DNA, 593 bp, Homo sapiens
  misc_feature (221)..(221): n is a, c, g, or t
  misc_feature (232)..(232): n is a, c, g, or t
  misc_feature (259)..(259): n is a, c, g, or t
  misc_feature (271)..(271): n is a, c, g, or t
  misc_feature (281)..(281): n is a, c, g, or t
  misc_feature (289)..(289): n is a, c, g, or t
  misc_feature (299)..(300): n is a, c, g, or t
  misc_feature (303)..(303): n is a, c, g, or t
  misc_feature (305)..(305): n is a, c, g, or t
  misc_feature (312)..(312): n is a, c, g, or t
  misc_feature (315)..(315): n is a, c, g, or t
  misc_feature (317)..(317): n is a, c, g, or t
  misc_feature (327)..(327): n is a, c, g, or t
  misc_feature (338)..(338): n is a, c, g, or t
  misc_feature (358)..(358): n is a, c, g, or t
  misc_feature (360)..(360): n is a, c, g, or t
  misc_feature (362)..(363): n is a, c, g, or t
  misc_feature (366)..(366): n is a, c, g, or t
  misc_feature (371)..(371): n is a, c, g, or t
  misc_feature (375)..(376): n is a, c, g, or t
  misc_feature (379)..(379): n is a, c, g, or t
  misc_feature (383)..(384): n is a, c, g, or t
  misc_feature (391)..(391): n is a, c, g, or t
  misc_feature (396)..(396): n is a, c, g, or t
  misc_feature (420)..(420): n is a, c, g, or t
tttttttttttacaagactagttccaaaataaaaaggttaaaaaaaaattggtctaaatttaataattagtatagggatatgacctaataaatgtctccttacctaaagattcattggcttcctttaaaaaggggagggcaaacttagtagcttttcggaaccaagctaaggtctcggtccccaaaataggcggccctaaaagagttgttagcagggaganaaataaaagtnaatgtgctcctggtgtatatggcagtnaatctcctttcngttctacttnagcatacnatatatattnnacngngtacatnctnangcaattttangtatacactcngcaataattagaaaaaaggngngnnganaaggnattnnacnaggnnggattcnactcngtgggggccttcgatggaactcanggtggagctcagcctttccaatgagctctaagcatgtagatagcctgagctgtgtctaagcctggtgtttaaagatgggtatttctcatacaatatgggccctaaatccaaccatctacacatttttatctggtgtacaaaccaaagcacaatggtcttctcaaccattgggg

SEQ ID NO: 495286 - DNA, 822 bp, Homo sapiens
  misc_feature (404)..(404): n is a, c, g, or t
  misc_feature (555)..(555): n is a, c, g, or t
tggccggagtcaaagcgggtgctgctagcggaggcgccatatgggaggggacaaaactccggcgaaagcgagtgacacaaataaacccctggacccccttgttccctcagctctaagggccgcgatgtggtacctagaagactactcgggaattgattggagcagctccctagtggattctgcgggaccgctctcagggaaagtgcgcgagatgtggacctgccaggtgcagatgttgcagggattcacctagaacaaagagtcagctgaaatctttagtgacttgcaagaaaaataaaccctgagtgggagggaagacgcaattgggcttccatcaaaaaagaactactataaagccttgcgaagatggcgatgagacggtccagttggcaacccagattatntgacttggcagcctcttctaaaagattgaaaaccccaagaagatagatagactatcactatttctcatatgatgccatggtggggccttttccattggaaacatcttctcctagattattaccgttttaggaaaattagtcatctcctggntgcggcgttaaggtagagttaacgcggaaaaacacgttgctcacctgtggtgggcaagccttcaggggtatagatatccactacttattggtggtccttcccctggcgtcgccagcatttctttaccggaaccaaacgtccgtgtcagctcacaaacggcctctgtgggcggggccggccccaccagctgaggggtggcccccctttttggtgtgcgttggactgcttttcccccaaccgtgtacactgtgtccgttcagccctgac

SEQ ID NO: 495287 - DNA, 166 bp, Homo sapiens
  misc_feature (3)..(3): n is a, c, g, or t
tgnaacattcgtgtctatcataacattccatacatacttaaaaccaagcaaagggtggagttccatctttaaaaactaaacggcatttgggacaacacattcttggcaatagaacctggacacctacagactcgtgcccaactgagcggacggacacgaatgttca

SEQ ID NO: 495288 - DNA, 157 bp, Homo sapiens
atactttaccagtcctactcttccagctccccatttatatcctatgctcctgctactgatatacacccactatggtgcacttgcttatgggatgaggaacctccagggcttccaggaaagatacatttctaaatatcagtgctggccattgaggaag

SEQ ID NO: 495289 - DNA, 535 bp, Homo sapiens
  misc_feature (2)..(2): n is a, c, g, or t
cntggtggcctggtttgtgctcagatttcaaaattcaaggtcgtgacatgtgaacgaagaactagcttggacctagaataaaagctaagtgcttgacacatgcttatgtttgagatggaacttgttcttgtcctgaagggtagggtaggagcaggtgtatatgatctagcagttgctacatttccttagagaacaagacacaaataatccacaggatagaacaaagtatcatctcagcgttataaattcattccatttagagtttatactaaaagaagaaatcttggtcaacagtactagtcactgcttcctctttatgatcacacaaagctatgtccggtatttttattaagcaaatgcatcaattaatggaccatactagttttggtaatatgaaaacagttaaagatatcaatgagtgaaaaaatggtatcataagaaaaccaagccgggcacagtggctcacatctgtaaccccagcactttcagaggttgaggtaggtggatcattttgaggtcaggagttcaagaccag

SEQ ID NO: 495290 - DNA, 551 bp, Homo sapiens
gaatcagtcggtacctgacagtgaaatgaacacatgccatattatgctggtgcccagacaagtgagtaggtgtctacagtgttcccaaggagtggcttatcttcacagcatgcaaccaagagcgctcatttcacagggacctgaagaccagcaaagtaagttataataatgtgacacccctcagcctcttcctccttctctctcagtctcaccaccccgaagcccactctctagttctagctactcgggaggctgagccaggagaatcgtcttgaactcaggaggtggagtttagagggagccaagatcggcatcactgcgctccagcctggcgacaaagtgagagtccgtctcaaaaaatggaaagaacaaagaaagtacaagatcacaagcaggactgatggagcatatggatatgtagaaaaatacccagtcacgtgttctgatagtgctggcattcacattgtgtcttttgtgatatgcaatacgagtcgtgtcagtttgtgcctcacttgcgcagcgctgcatggtgctgaagcattgccatatta

SEQ ID NO: 495291 - DNA, 892 bp, Homo sapiens
  misc_feature (1)..(1): n is a, c, g, or t
  misc_feature (61)..(61): n is a, c, g, or t
  misc_feature (90)..(90): n is a, c, g, or t
  misc_feature (109)..(109): n is a, c, g, or t
  misc_feature (136)..(136): n is a, c, g, or t
  misc_feature (139)..(139): n is a, c, g, or t
  misc_feature (148)..(148): n is a, c, g, or t
  misc_feature (155)..(155): n is a, c, g, or t
  misc_feature (172)..(172): n is a, c, g, or t
  misc_feature (190)..(190): n is a, c, g, or t
  misc_feature (197)..(197): n is a, c, g, or t
  misc_feature (226)..(226): n is a, c, g, or t
  misc_feature (238)..(238): n is a, c, g, or t
  misc_feature (242)..(242): n is a, c, g, or t
  misc_feature (262)..(262): n is a, c, g, or t
  misc_feature (266)..(266): n is a, c, g, or t
  misc_feature (274)..(274): n is a, c, g, or t
  misc_feature (291)..(291): n is a, c, g, or t
  misc_feature (306)..(306): n is a, c, g, or t
  misc_feature (308)..(308): n is a, c, g, or t
  misc_feature (324)..(324): n is a, c, g, or t
  misc_feature (404)..(404): n is a, c, g, or t
  misc_feature (406)..(406): n is a, c, g, or t
  misc_feature (437)..(438): n is a, c, g, or t
  misc_feature (453)..(453): n is a, c, g, or t
  misc_feature (458)..(458): n is a, c, g, or t
  misc_feature (460)..(462): n is a, c, g, or t
  misc_feature (467)..(467): n is a, c, g, or t
  misc_feature (483)..(483): n is a, c, g, or t
  misc_feature (487)..(487): n is a, c, g, or t
  misc_feature (515)..(515): n is a, c, g, or t
  misc_feature (517)..(517): n is a, c, g, or t
  misc_feature (522)..(522): n is a, c, g, or t
  misc_feature (524)..(524): n is a, c, g, or t
  misc_feature (544)..(545): n is a, c, g, or t
  misc_feature (555)..(557): n is a, c, g, or t
  misc_feature (587)..(587): n is a, c, g, or t
  misc_feature (589)..(589): n is a, c, g, or t
  misc_feature (595)..(596): n is a, c, g, or t
  misc_feature (603)..(603): n is a, c, g, or t
  misc_feature (607)..(607): n is a, c, g, or t
  misc_feature (619)..(619): n is a, c, g, or t
  misc_feature (627)..(627): n is a, c, g, or t
  misc_feature (629)..(629): n is a, c, g, or t
  misc_feature (641)..(641): n is a, c, g, or t
  misc_feature (736)..(736): n is a, c, g, or t
  misc_feature (741)..(741): n is a, c, g, or t
  misc_feature (878)..(878): n is a, c, g, or t
ngaggaatagtcgggaggtgctgtgagggatacaccgcccggggcagcgacacagaaagcnttgggggggtctagagatggatggaagtnagggaagggccggggcaangaaggaggcggagaggcaactgtagcntcntccccaganttcagtntcgtggaaaaaaggctntttggtcaaaaaagcaangaatgcnggggagagcagaaacgaagcccttgaaangcccggccaggnatcntgcccctacaccggcacgcntttntttcgggnacgcccggagccgcggngccgcacgggtttcntngggggatttgggcggnggcgacctttcggagcgcggggaagcgggcagccgcgctcgctctgcgtatccgaggactcgtcgatgaaggccaggttntngctgggataatccagggccgaggccgtgggnngggaaggcggctganctttntnnnggggngaaggggatcggggcntgcncagcggctgcgctggaaagggcgtggangnagcantngctgctccttctccggcggnngggaggcggnnncggttcgctgggtcacgcgcgctgtcactntnccagtnnaactggnagcntgatctgtgatntgcccatntnttctcgatttcngtgggacactactcgcagccagttcccgatggtggtgagcactgaggcgaagtaagccaggccgagcaggatccagaaccacaccagcggctganaggcnggggagtcctgcctgggggtccgcgccggccacatagtcgccaaagcccacggtggtaagcgtcactatgacaaagtagatggcctccagcttgctttagtcctccatatagcagaacacgaacgtgggcgtgaggncaaagagcaggcag

SEQ ID NO: 495292 - DNA, 493 bp, Homo sapiens
  misc_feature (40)..(40): n is a, c, g, or t
  misc_feature (113)..(114): n is a, c, g, or t
  misc_feature (121)..(122): n is a, c, g, or t
  misc_feature (135)..(135): n is a, c, g, or t
  misc_feature (140)..(140): n is a, c, g, or t
gcccccgggcgccacctctgtacacttccctgacccttcncaggtgtgggtcactgccacctgtgcccatgggcaccccagagcacccactgtgaccactcagtgttcctttnntcccttnnccaaagttagggnccccncccaccagggcactggcctgtgaccttcgcaggggtcccggcccctcccaccactctagcctttctcaggctgcaccaaagattccatcatcagggccaactgagagtgagggagtctcacccaccgcttaccccagccctcccctgggagcagagagagaaaccctcttcatggaccagactctgcacccggtgagtgaggacagtcccagctgagtcccatcgatgttgaatctcatgccactgcaagtgccattcaccactgcgtcctgggctttacgagaccatgcaagacgggggttagtgaggaaggaggatttggggtgggggtggggtgattgaaaattagtata

SEQ ID NO: 495293 - DNA, 207 bp, Homo sapiens
gcaggcagtagcaagacagcagacttaaacatcagctagatggtaacatgcattgtcagctctcttgaagacatgggaaacctaagttacaccttgggttaaattcttcaccatattggtctgctgctcataaatttacctagcagtggtctgctgcctcaatccagcagtcttgaccattggagcattcatggttaactggtcaag

SEQ ID NO: 495294 - DNA, 107 bp, Homo sapiens
cgacacctaagcctgccaaggatgcgtgtcaggaggggtcggggagaaatcaggctctcgaagctcataaaattcaacgtgagggagcaagtacaagtacgcccgaa

SEQ ID NO: 495295 - DNA, 518 bp, Homo sapiens
  misc_feature (279)..(279): n is a, c, g, or t
  misc_feature (289)..(289): n is a, c, g, or t
  misc_feature (297)..(297): n is a, c, g, or t
  misc_feature (342)..(342): n is a, c, g, or t
tcggatgcagaggtcgtaggtacgttttatattatataaggacagaccaaaaatcaacctatcaaagcttcaaaaacttggggaaagggtgggattaagtacaagcacattgggcttacagtaaatgaactgatttttattaactggctttggcccattataaaaggctgcatatttactgggaaaccatagccgagcttcacggattatgcactaacagtaccagtattataatggccagcaatataatgctgcagcgcaagtcgtggtatgtctctngacgaagtgntgtctcanaaaataatatacttttacattaacagaaatttaatgtttctctgngcgtgggggctctgggctttcagagttgggttaatcagtgtggattctagatgatcaacataatggaccactcctgaatgagacttaatttggtctttcaaatttactgtcttaaatcagtttattaaatctgaattttaaaacatgctgtttatgacacaatgacacttggcatc

SEQ ID NO: 495296 - DNA, 883 bp, Homo sapiens
gccctggtgtgattccgtcctgcgcggttgttctctggagcagcgttcttttatctccgttcctgctcattctctcgctacctatagctgcagtgtcgctgtcatccgcgattgtgaacgcattcgatgtgacgatgtgaccatgaaggcctcccgtgcagtggccctagtaactgatctttgtcggattgatgacactagaggcctgacagaagattacttcactgtgtaatggctggcactcagatgagtggcagatacatggatgccagcacgatgtgtaactcttctttcatagtaaagcgaggtacacggtatccacgggagtgacctgcgctggcaaacacgggagtagatgtttgcctcgattggatgtagacatgacactgagtggcacactgcatacttcaccgcagagggccgaggattccaccattattagaaaccgtgaaagcgaccgttgtggcaaaaccgttgtttgcacacaaagtagttcattgcttagaagggcctacaaccgggatgtctcccccttctgttggggaggcattgtgtagagaagtagaatgaaaccaaaaccaaggattggcttcctttgaccggatttcgagcgctcgtggggatctccgaggggtcccacgatgccacttatttacggtggggaagccacggcgacctttttcatgcttcagccatggttagtgaaagtgcagacggcattggcgaagtaagcttccaagtacaagaacttgacacggaagagtacgtggcagaggacctgttggtaaaaacctccttctaatacggtcatttatttccttggcgaccaaactggccgtggtaccttggcccctcgtgagcaagcggttgccggtaagaccca

SEQ ID NO: 495297 - DNA, 101 bp, Homo sapiens
actcatcctggacttcagcttcatgtggtctctcgggtggtcttccatccttccgcgacttccagaggtaccatccttccgatattcaccttcttgcgatt

SEQ ID NO: 495298 - DNA, 141 bp, Homo sapiens
cttatgtgctcctcttcagcattcacagcacagtccgggacgtaggtatttcttaatgccaatgctgattgttgaacccacttattccaaaaagcccctctttcccaaggttggattttggcccaaggtttaaagttcttc

SEQ ID NO: 495299 - DNA, 202 bp, Homo sapiens
attgtagcgttctcagctcctctcggatgaactgatccgtcaccgtgtccatgtagcacggactacatcgaagtgataggagacgtcgaatggtcgtcgcgcacgggggcgtgcgatcggccgaggtatctagatgtcaccaaagccgcgggcccgccccccggcgggccggagaggggctggaaccgggttggttttgaga

SEQ ID NO: 495300 - DNA, 972 bp, Homo sapiens
tggatacattaggtatggtctggagctatgatatcaagttggtcttcctagtgggttgtatcgtctgtgagcgacgaccgatgatatttacgagataggagatagacgatagaacgaccacgtagacattattgtcactcgtccgtgctacccatgaatctatcgactatcccctatcggccgtcaaaggtatttagcggaactcgcccacactccatcgggaagcaatatgaagatgatcatgctgctagtgactctgagcccatagagatctcatctattcattttacagctcgtaaggtggtcctgactgtgcatcgtattaggcaaactcatcactagacatcgtagtacacgatgacgtagtaccgctgaaggttcatcattcgcactatgtcgctaatcgatacaggagcgtagtattgtgccattctatgaggaggctttcattcagctggaatttccccttattctcatggctatacctctaagacctacacagcttaagcgccaagaattccaatttcatctatgcattatttacatgtcggcgttcattcgtaactttgacttccgaaaacaattttctcggacctagtccgagaactggcaccgatcgatgactcggaactaccccgattgcatacaatcatatgagagaatctctattcattctcgtcaggctcattacatttcttctaacagtcggtaatattggattctttttcatgattcgaggaaagcccttcgctgtacgaatgagaaagagtccttaatagtacgaccaagaaacgcactctggatagaaaccatggaagttcgaacgtagaattggaatgtggcaccaggcaaactttgaacaagagcattacgaatgggaccccggtattactttaaacatcgtaagagcaacttgtggacaccaaattgaacgcaacattatacccgcttgttggagcgacttgcaacggg

SEQ ID NO: 495301 - DNA, 120 bp, Homo sapiens
agctcggtaccccttcgcgaatcccacatttaagcgaaaatcacgcgttttctcttcgagaatcccccatttaacacaaatatcacgcgttttctcttcgcaaatcccccatttaacccg

SEQ ID NO: 495302 - DNA, 1069 bp, Homo sapiens
atgtgaccgagtaccatcgaagctttcgtatggacatactaatatagtctgctcacaccttacatatttcatgcgctactatgtgtagaaggattaatagctgagtacgctggttcgaattcaatatgctactcgtcgagtatatccctgcaatgacctcgacgttccgcattcttatgcctagtgatttgttgcccgtactctgcccaatactgagtttcctcctaggctcgcctggctgatgccaatcctgggatggggacctcatgcccgttacataagatcttgcaaatctcgcaacaccgattatgggcccgtgagaactgatccgttccatacacccgtaagagcgcattatcgtcgcacattggcctcaaagaaactacatgcgctccgcgaagcaaatgtatatctactgatccacctgtggcatgacatttctcaagagagaatgagcataactccggaatcagacacaaccaacgccactagtgctaagttaatgaggattgattgcccttctatttattctgtaagatcgcacaaagtcaataaatgagagcgcataaattgtgaaggctcgctatgccccgaattgctgtctctaccttctggactcccacgtaacgaatacactacctcgcgtagatatctgatctacgctgagtcgtagccgtccacaatcgatgggcaagccatgtggtcactgtatccacgtagaagactagccatcatggtagggggcaagacttctaaccggctcgtaatagcgtaagtcatcccataccaatatgtcgtgtatctcatcacgatattaccaagtcagaagaacataaatcagtattggtgaaatggcgacactgaagcctgaaactgcaagcttgtggatgcaccctgggaccttggcgccagctgattgttggccccaagaccctttcgtggacttcttgctggcacaaggctggtggggcgctggagcctgcatgtgtatagaacacgccgatcccgcagcgaggatccccttggcggcgaacaggccactgtctcgaagacatgccatgagcactcg

SEQ ID NO: 495303 - DNA, 651 bp, Homo sapiens
ggctccctgtgacgggaagtggagggccgctgaataagcttccagaaatgatgcccacaccagtgtatcctattgaaagaggggactgatatgctcccaacgcatcccccagcttgtgagtaacatcagtgcctgccagtgattgctgaggctgtaagaactaccctgggtccccgtggcatgcacaagcttattgtagatggcaacgaggcaaaagcaacaatttctaatgatggggccacaattctgaacacttcttgactgttgtccatcctgcagccaccagactttggtagacattcgccaacatcccaagatcggctgacgtgggtgatggcaccatcctcagctgacctatggcatggacgtagcagagtttctgaaggctaggtgaaaccctatgtggaggaaggtttacagcctcacagatcatcattgcgatactttgcgcgcagccgtgcacccagatgtcaggttagggcaagatccaaaggagattagctgtgaccgggaagaaggcagagtaaagtggagcagaggaagctgctggaaaagtgtgccatgaccggtctgagctccaagctgatctcccaaagagaagctttctttgctagatggtggtggatgccggattgactgctcgatgctttg

SEQ ID NO: 495304 - DNA, 491 bp, Homo sapiens
ttctagaggatcctcggctgtgctgtgctctcatgcttgtaggacaggtgctgtgcattcgtgactgtgcctttccatggctgtgctggggtagggctgggcagagctgctttggaccttccgcctgtcctggcatcgtgcccttacttgagatatgatcacctgtgcccccgcccccaccccctggccatatggtgggacagcaagagccctacaatgactatgatctaatgaatgtcaccagcgccaggcttctcactcctcctggccaccgagccccctggaacccatggccagtgtagagcagctacagcttgtctggtttcaggtccacctcagggtgccaggtcccgtctccagcacacccctggaaagaaactgctgcaaaggcctactgaagcctgactgtggtgtttactgtcactctgcagctcaggcctcacatttcactgtagtgactcatatcccataatcggtagtcattagcaaaa

SEQ ID NO: 495305 - DNA, 515 bp, Homo sapiens
  misc_feature (22)..(22): n is a, c, g, or t
  misc_feature (28)..(28): n is a, c, g, or t
  misc_feature (199)..(199): n is a, c, g, or t
  misc_feature (497)..(497): n is a, c, g, or t
  misc_feature (513)..(513): n is a, c, g, or t
taagtccagtagagaaatggancctaanggaaaaattccctagatgaaaattaccaacatcctgatgaaaaatttgccctagatgagtttaaatagtaggatccagatgcctgtaaaaaaaaaataaagacctagtgaaacatgcagtccagggcaaatagaaaagtattccaagtgaggctgggtaccagtggctcanaccctgtaaccccccaacactttggaagactgaggttggaggatccccttgaactcaggagttcaagacccagccctgggcaacatggtgagacctcatctccactaaaataaaaaagaaattagcccaggcgtggggtatgtgcccatagtcccagttatttgggaagctgaggcaggaggatcacttgagcccaggaggtagaggctgtcgtgagctatgattatgccactgtattccagcctgggcaacagaacgagtgagaccctgtctaaaataaaataaaaagtacccaaantgaagcacagaccggncc

SEQ ID NO: 495306 - DNA, 574 bp, Homo sapiens
taccgatcgcttagctcagtgatcctcgctgctggagtgtttctgcttgagcgcatctcatgcgccagtagtggcgcccgccccgaacggtgtcgacggggcgtctctgagcggttcagggtcactggaagggacagaggtgattggaatattcattggagcttgaaaaggggttggaatgagagaaccgtttggaagcactggaatacagctttattcctacacgattagacccgttaccccgtgggtctggccgaccgtcctgactcggagatccctgagctgcgccgccgtttccttcgtcaacatccagcagctacttgatgagcgccctccagtgggcctaaggtccctatgccggcgcggggttacagcgagtggacagacaggccggtccctgtcctcgaggagcccatgatccgcgcgaagacaggcatttaacgacgactcaaacgatcacttaaatacaactgtggtgaaccgcacaagagggacgcgcggggctctgcggggaatgacgagcccgacctcgtctgcgacccaggaagggcaagggtggaccaggcaaggcgac

SEQ ID NO: 495307 - DNA, 214 bp, Homo sapiens
gctagcggcattctgtgaacgatctcaaaaaaagacaaaaaaaaaaaaaaaaaaagaatatttattctctggatctggccaaagtgtggggctcttgcgaagggaatgtggggagagggtgtccattgtgggaagagagaggggcatgtgtgtggtgggagaaaggagaaaacgcaaaggagaaccaagattggggagatttttctggtctggg

SEQ ID NO: 495308 - DNA, 218 bp, Homo sapiens
acttctctcagttcaacctcgagcttctgcaactgctcctgcatttctagaacctgtttcaggggtggcgcaggtgggctggcctctccttcaggaaggggaatatcatctctattaatttcctgtaccaattacaccaatattcgctctagctcttcacacctcttcacctcaccatcaaattttctttggaaagacttacgttctggttgaggtct

SEQ ID NO: 495309 - DNA, 523 bp, Homo sapiens
ggtcaccatagttgatggctctcaagcatataccaatattctccctcactaaacgtaagccttctcgctcactctctcaatcttatccatcatagcaggcagatcgaggtggattaaacgcgagaacccagttacgcaaaatcttaggatactcctcaattacccacataggatgaataatagcagttctaccgtgactaaccctaacataaccgttcttaagtttaactatttatatttatcctaactactagcgcattcctactactcaacttgaaggctccagcgaacacaaccctactactatctcgcagccgtgaaagcagagataacatgactaacagccttaattccatccaccctcctctcgctaggaggcctgcccccgttgaccggcttttggcccaaatggggccattatcgatagtaattcacaaaaaatcaattagcctcatcatcgcaccatcatagccacattaccctcctttaactctacttctacctatgcctaatctagtccacc

SEQ ID NO: 495310 - DNA, 217 bp, Homo sapiens
agttccaaggtaggcgagagcaaggggcatatacacagacttctaggaattccagtagctgaataagttggatagaactagatatatatctatatgcctttgctgaaatataaatgaaggcaaggaaatacggagtaagggataacgattcatacccctagcagctgatgtaatatttggacttggatctcaaattcctgaggatagaccctaagaa

SEQ ID NO: 495311 - DNA, 366 bp, Homo sapiens
ggtgaggagtgtgtgtgtaccggtaatgtgatagatcatacgtaatcatgatataccgtaatatataaggtaacatttatggctgaggtaccactgcatctctttgggtacacaaatgacgtcctgagtccagtcaggggtcgcagcttatcagaagaatcagggaacctcacgctacacaggcaatttctaaatatcatgattacctgggcttttcttctctagcttggaggtcatctctctatgcaccctgacaaaactacatcaatagaagggtatcatcaagtcaagctctcataaaccaaaggtatactatgaaaggccatgatcctagcagataaggggctcatagctgctcagtccctc

SEQ ID NO: 495312 - DNA, 179 bp, Homo sapiens
tgaacaaaaattgggcactcatctattcttttctcttgtgtcctactcattgaaaccaaactctgtgaaaggacccatgtaccagtatttatacctctaatgaagcacagagagaggacagagagctgcttaaactcacacaaccaatgaactcaaccacaacgctgaagagggaggta

SEQ ID NO: 495313 - DNA, 159 bp, Homo sapiens
  misc_feature (110)..(110): n is a, c, g, or t
gggctgggtgatctagaggaccttatatgctgctcacaagatatattgccatagagaaagttgtactttacagtggagaaatttgctgacaggattgtaaccatgtgatntaagttttatcaccagtaaagggacaagttgacaagtgtctcctggata

SEQ ID NO: 495314 - DNA, 749 bp, Homo sapiens
caaagaaatctaaaaggttcttccctcccttgtggcccgtggccattaaatccagaactccagaaattaattctgtttgttggcctaccacacacccctgagggcctccattgagggtccaagaagattttgacccacagaaaaggagccatggaacccaagttaagagttttgccggccaggtatggtggctcacgcctgtaatccacgcactttggaggctaaggtgggcggttcccctatgtcaggagtccaagacagccctggccagcatggtgaaaccccatctttactaaaaatacaaaaacctagccaggcgtggtggtgggcacctgtaatcccagctacttgggaggctgaggcaggagaatctcttgaacccaggagcgggaggttgcagtgagccgagatcgctccactgcactccagcccaggtgacagtgtgagactccatctcaaaaaaaaaaataagaggccgggtgcggtggctcaagcctgtaatcccagcactttgggaggccgaggcaggcagatcacgaggtcaggagatccagaccatcctggctaacacggtgaaaccccgtctctactaaaaatacaaaaaaattagtcgggcgtggtggcggacatcctgtattcacagctactcgggaggttgaggcaggagaatggggtgaacccgggaggaagagcttgcagtgagccgagatcgcgccactgcactccagcctgggtgacagagccagact

SEQ ID NO: 495315 - DNA, 697 bp, Homo sapiens
aaagtatctcggcttcccctggggcttttcggtgctggggtagaatgctggaggacgtgcctttgtgaaagatgtccctgtcttcgagaacccgatgggaaataacaatgaggcatggggtagggatttgaagctggcagactttgcgctgctgtgcctccatggcaaacggaagcctgtgactgaggctagaagctgccatcttccatggccccgaatcatcccgtggtgtctcggatggataaggtggaacgccttaaacaggggctgctccaccaacaggctaaatttgggagaaatggatttgcctgcccggccaagttttgcttattccagtttgaaaccaaaaaccttttgttcaatgacaacactgagggttgggccagactccatggcaaaacaacatatgaaaaatatttggggccccagtatgttgcgggcatttttaatttgaaaaaggggtcaacctcccccctcctggaagcctgtgaattcctcaggaagtaaaaccgaagaagaggggccgggtccccaagaaagcctcagccatttcctgcccccagcttttctccccaggggggttggggccttggcctcccctgctgaaggggggggttgcccatccatttggttacaattccctggggtggttttagcaaaaagtaaaatgagaaattttgttgattttttttcctta

SEQ ID NO: 495316 - DNA, 144 bp, Homo sapiens
  misc_feature (4)..(4): n is a, c, g, or t
ttgnaaatagagtgggacataattttctataccttgctcaagattccatgcagttgccatacagcctttgaggtatggtcaacctatagtaagtgagtaataataaggggaggaagaaatggaaaatttctgtgcccatttcaa

SEQ ID NO: 495317 - DNA, 580 bp, Homo sapiens
gatgtgaaagttcgggatttcgtgggatggtttcgagatcatatgcaaacgagctacggtcagaagatgggcagacaatggtgctcaaactcaaggactggcctccctgggggaagatttttccgacgcacatgatgccaaaccaggtttgaacgatctgatggagaaccttcctctgccagacaatatagccaaactgagaatggccaggctcacatcctggcctcctaggttacctagctacttaggtaagggcctggatcttgggccccaaggatgtacaacgcctaatggggttctgcatcaaccagccacgacggactaacgcaagaagtgggatacaacaaatcttcaccttcagcatgttgtcctggcatgctggtccaatcgtgcaccgcgcggctcatagctcagggcaattccccacaatccggcggcacaaggggtggcatccatggcactcgaacgaggcgtacgtccacacgcaaccaatacgcccgcacggtgaagattcgccgccatgaacgcgagaacgacaagcaggaacagaatcccatagaaatgggcacaaacagaagaa

SEQ ID NO: 495318 - DNA, 1088 bp, Homo sapiens
gctgaatctcctgttttctttatacaatgtggctgtgtagaacagctccaagaaatccgttattatcttctctgactcctccttgagtggtttgaagggtccccctcccattgcaccagtcatttagagatgaaggcatgcatgcttcctcaaatcattgcgacctgctgtcataatgtcagtttcagtggtatgtggtattagaatgatggaagagttttattcggcataggatagagcaggggtcagcaaactacagccagccacctatttttgaaagccttgcaagctgtttttacattttttatgttttacattttttaatagttaaaaaaattagaataagagtaatatttaataacatgaaaagcttatgaaattaaatttcagtgtaaaaggttcattggaagccaaacatacccattcatttacctttcttgtatggctgcttttgttctgcaacagtggacttgagtcattgctgcagagaccctctggtccacaaagccaaaaatatttaccatcttgattgcccttcacagaaaaacttgctgaccctagtatagtacaggatatgttggaaagaaaagaataaatctagaactgtgaggaatgtttccagaaaaacaaaggtggtgtcagtgtagtcattgatatgaaaggagagccgtgggaactgcattctagcacctaaaggaatgggtgaggagcatgagcaacagatgaataagtatggggaagaggccccagaatttagcaatggctgttctgtaacagggctcccacagttcacaggttagcaatgtgtgtgagtccgtgtttaatttgccctgttaaattctaacttctaggttttgatctttcattctagactactgacataattttgagttccaattctgtttgctgaattagctgtctttccatttggtctttaaaaatagactttcaggctatgtaataagtagttttttacttactgcacagtactttattgctttgaatgtcaggtgtggcaacagtaaacatttgtgtgtgcgatatgtgtttgagggccgttcatcctgagccagaatcaaaaaaaaaaa

SEQ ID NO: 495319 - DNA, 344 bp, Homo sapiens
gcggcgcccttttttttaaacttggtccttttctgtgccaactttatgtttgtctttgttcttgttattgtttgagatggagtctcgctctgttgcccaggctggagtgcggtggcgcgatctcagctcactccaacctctgcctcctgggttcaagtgattctcctgccttagcctcctgagtagctgggattacagatgtaagccaccgatcctggcccccccaaaaaaaaaggattttaagaaaaacttctctcgtgatccgcctgcctcgacctcccaaagttgctgggattacagatgtaagccaccgatcctggtccccccaaaaaaagggcgggcgc

SEQ ID NO: 495320 - DNA, 197 bp, Homo sapiens
agactgccggacccccacaagagacaacagagtattcagatcgccaatctgtagagggcagcagcagcctgcgcaggtgtttggcttagtatttgttatttttaaaaaataacagatcacgggtgtacgctgtgtttttcagctcattacactaagatgtgtatttccataacccaagaggggggtcgggctgtctg

SEQ ID NO: 495321 - DNA, 145 bp, Homo sapiens
gtatactcctatttcccagtggcatgtggttccatttcccagtacagtggctcatatttcccagtacagtggtcccatatcccaagaacagtgctctcattgcctaggcacgtgctcccatttcccagcgacggtgctcgagccg

SEQ ID NO: 495322 - DNA, 417 bp, Homo sapiens
gacatcgatacgactttttgtttgggatcttttttatttttagacacagatcaagattaacatcaacaacagacgaagattatagatcaaaaatacacacatgagtagtgctaataaacattcactaggaatgcaacaaatacccgtcataccataatcacacattcctcagagcacataataacacaattagcaggcatccaagaagagtctctacccagaaataaataatagtctctcacataaactaaccacgcagaattcacatgcctacagcacacaggacactaaaggtgagagaacagtagacacctcatctgtttcatctgcataatctgttcccgcatccacttcttcatctgcgtccacatccgtgtcttcatctgcgtcttgctctgtcccttctgtcgtcttctc

SEQ ID NO: 495323 - DNA, 223 bp, Homo sapiens
tcaatcgagctcggtaccgtcagacgctgaactatgtgaaagggggcgggacttgaggggcgtggctagtctgtgtgacgtgcggcgggggaggggcgcgccgttgctaaaggtgcgcgtgcgcttcattccactgccacaatggttcagctcccgctcagggaacgtcccgtcatgtcgcgcctttacctttggtccccactgcacatagttcagcgtctga

SEQ ID NO: 495324 - DNA, 370 bp, Homo sapiens
  misc_feature (345)..(345): n is a, c, g, or t
tttatcacccggaaaaaactcggcgtagatttcgttaatcgcggcgtaatttttccagtcggtaataaagatgctgttgaaggtcacatccgccatcgtgccacccgccgtctcgatcacttgcggatagtttccagaacgtggcgggtttgcgcctttgggtcatcggcaaacagcacgttattatgttgatcaaaagccagcgtaccggagacatacaccacgccatcagccagcgtgccgggaacgaagggggccagcggtgcctgctgccagcgggaataattacggattttggcatcgttaaactccttaagcgatatgagcaaaggacgtgggagaaangcgcgtcgcagaatgtttcgacgtc

SEQ ID NO: 495325 - DNA, 180 bp, Homo sapiens
ttgaggtatcccctttcgattgtggatccgagcagctgtgttggaggacattgctgttcagttcgtggacatggtgaaggggaaatctctcacgggggttgtgaatgcccagtgccccttaccatgtgccttactctccacacaccaatgccttggatttggtcgtggcagaatgctctg

SEQ ID NO: 495326 - DNA, 143 bp, Homo sapiens
  misc_feature (25)..(25): n is a, c, g, or t
  misc_feature (58)..(58): n is a, c, g, or t
  misc_feature (121)..(121): n is a, c, g, or t
cttcggcacagcagggcacccctanctgcactgacttccagatcatgggtctcccttnctccctgaggacaccaaattgatgagagcaagtttgagagaagaatgaatcaactgctatccnttcccctcacccccttcagccc

SEQ ID NO: 495327 - DNA, 1016 bp, Homo sapiens
acgcgtccagcttccggagaccggagggggccggcgtacgcagtcccccaggccgcacgtgaccatgctgtcccgacctcctgatacgaacaccaggccacgcagaatgaacgcaaggagctgcaggacaagaggaggcgagaggctatcactgcagggaacgtgcctgactaagaaagcttgtcggtggagtcaccgtcaagtgctgggattgggacctaggcctacatgtaaccagtagataagttcttgacctatgtaggtgaagacggcctacaaggtcctaggcatgtcctagatgttgtgcagtaggctaaggacagcgcgcgagctgtcatctggaatgtgtggtgagaacttcattcctgtgtaactcaaggaacacttggggcgataggtgtgatgaacttgcggtctcggagcgtcagaagcttggcactatgctgcacctagttgcgcacttgtgactttgcgaattatagtcttactaaaatgggcatgatcttgcagttcgttggcctctctctctagggccgctcattgctctgtctcgtcctggactaacttaccttatttccgcagttgcgtacgacttagacgcccttgattcgcgttgggcaaatggtatgcgtgcgttccttgattggcaccctcgctatgtacaattcagagaaatcgatccaaatgtctcatgctttcgttctaatgcatctttgattatttaatcgagttccaagcattttgaagtaaacaatttgtttcttggactaccctcaatacttccgataggtcgagctctaggcgcattcaatttgtcgcctatgagtggaaccctcctcgttggtacagtcgcttgtgactcgctcaattatgtgaaggtcactcggtgctccctcttggagcgttcgtctgagcatatcttcgcgtcccaggagggctctgggtttgctatgcacccaaaacgttcggaagcacatcgtggcactggtccaaattgttcatcttttggattctag

SEQ ID NO: 495328 - DNA, 964 bp, Homo sapiens
ggcaggctgggcgctgagatgccgaaaatgagtgccagaggacttgaactctgagactactggaccgtataccagtggactgaagttgccgtaagagaaccttgtgaaattcatgatctgcttcgcgtagagaggttccacttgtgtgacctaatggaactacaatgccgtagtcatccccattggacattggtccacccataaaataagaatatacccaggctcaaacacaatgactaacaaatggaactctctatatcgcatagcctgcagcaacatgaatctccaggggctctgagtgtgtgtcgtccggcctaagaaagtacactgagtgtcaagtctcaaggggcgagtgcctccagcgtgtcaacgttcgtatcctatgtgtcgtctatcaaatgccttcgaaatcgtcttcagctgggatgtatgtggagtgcagtaacttggatgaacgagctgagttgggagtgtcgaattgggagtgactctcatcttaaactggaccctccatacgaatgatactggcgagagatcaatggtggatcaggccaacttacctttgactgcgtgcgatagtaattgcaactctgcgatgttcacctcgttagaatgaggtagtggcatggttgctatcgagaatgcgcgcaaggggcttgatgttgatcctcttagttcgctctgggagacactggggaattcagacggtaatgcggaaaagattgcccagtaggatgacgaccgttggatggaaggaggacgaactcctatcaccaaccgttctttctgtgaaaagcttgggtgctggaaagaaacgacgtacccccgggcaggtgtatatgatgggatctggcagccctaccgggtcattgatgacgatccgaaaatggcccatagccgaccagctctttccacacccagaggcagtcatcactgggaaagaaggactgctgacaagaaaatg

SEQ ID NO: 495329 - DNA, 516 bp, Homo sapiens
  misc_feature (129)..(131): n is a, c, g, or t
aatcgcttgaacccggaatcagaggttgcaatgagctgagatcgcgccacactaccctgcggcctggaggacagagtgagatcccgtctcaaaaaaaagggaaaagaaaaagaaaaaaagaaaacttannnaaaactgcattaactgaaaatttaaaacataatcagtcacagctagattaaattatcattaatcccggttaaggaatcttatatcccaacagctaggtcttagcaatatgcaccatctctttttttttgggacggaatctgaccctgtcgcccaggctggagtacattggcgtgatcttggctcactgcaacctctgcctcccaggttcaagtgattctcctgccttagcctccctgtaatcactacttgggaggctgaagcaggagaatcgcttgaacccgggagtcagaggttgcaatgagctgagatcgcgccacactaccctgcagcctggaggacagagtgagattccgtctcaaaagagagaggaaagaaaaagaaaaa

SEQ ID NO: 495330 - DNA, 425 bp, Homo sapiens
  misc_feature (20)..(20): n is a, c, g, or t
  misc_feature (22)..(22): n is a, c, g, or t
  misc_feature (44)..(44): n is a, c, g, or t
  misc_feature (67)..(67): n is a, c, g, or t
  misc_feature (101)..(101): n is a, c, g, or t
  misc_feature (158)..(158): n is a, c, g, or t
  misc_feature (164)..(164): n is a, c, g, or t
  misc_feature (225)..(225): n is a, c, g, or t
  misc_feature (231)..(231): n is a, c, g, or t
  misc_feature (235)..(235): n is a, c, g, or t
  misc_feature (261)..(261): n is a, c, g, or t
  misc_feature (264)..(264): n is a, c, g, or t
  misc_feature (266)..(266): n is a, c, g, or t
  misc_feature (305)..(305): n is a, c, g, or t
  misc_feature (341)..(341): n is a, c, g, or t
ggcacgaggggtctgggganantttctggctatcacagcttatngaaggaggttgctactggcatcntagcaggcagagtgagtgctgctgttaaacccanccacaggacacagaacagtctcctgcaacaaagaattacccaaggcctggcgcggtngtcacncctgtaatcccagcactttgggaagccaaggcaagcggatcacttgagcccaggagttcanggtcancctnggtaacgtggtgaaacaccatctctncananaatacaaacattagccaggtgatgtgctgtgcacctgtngtcccagctactcgggaggttgaggtgggaggatcncctgagcctgggaggtctagactgcagtgagccatgatcatgccactgcattccagcctaggcaacagagcaagaccctatatc

SEQ ID NO: 495331 - DNA, 342 bp, Homo sapiens
  misc_feature (110)..(110): n is a, c, g, or t
  misc_feature (200)..(200): n is a, c, g, or t
  misc_feature (296)..(296): n is a, c, g, or t
  misc_feature (302)..(302): n is a, c, g, or t
ctagaggatcgcgcggagtgatggtgaaggatacaggattaggagctgcacacgccagctgatttttgggggggacgcagtttgtctttcggccaggctgagtgcagtgngcgatctcagtcactgggaactccgcttccaggttcaagcgattctcctgcatcagactcccgagtagctgggattacaggcgcctgcancacgcccgggtaatttttggtatttttaatagagacggggtttcaccatgtttggcaggatggtctcgaattcctgacctcaggtgatccacctgnctcagnttcccaaaatgctgggattacaggtgtgagccattgcact

SEQ ID NO: 495332 - DNA, 1093 bp, Homo sapiens
gcaccaaatggcggatgacgccggtgcagcggggtggtgcccgggggccctggtggccctggtgatgggggaaccgcggtggcttcctgcggagtgtttcggcagtgtgcatcctggtggccgtgggtctgcgtgccgtggacgtgggcctggggcctgagtgcccgctggagctcgcggaggcaaggcctgaggatcagtgagtggatagcccgtcaccaagttgggccgcttggtcaaggacattgaaggatcaaggtcccttgggaggagatctatcgtctttctccccttgccctattagagcgaatcaggagattcattgatttccttcctggtggtgccttctctcgaaggcatgaggctttcgaagcattatgccaagtgcagaatggcatggaccctgattgccaggccaggcgcacccagtgtttcaaggcactttcgttcgctactctgagggactacacatgggccaacggtcaggtacttggcgtgttacaagttgcatccaaatggacggtagagccaacggcacattcacaggttgggtgccaatcagtcacttgtgcacaaacgcaacattccaattcagttcgcgccagttagccgcgaaggatgtgcttaccttggggcggaaaccaaaggatcgggcaaaagacagcacaacaacttgttcgcctttggcaacggcgttcgacccctgtgcccagcttggccgggcttcttggtgcctttggttagcggcccttcaatttcgccctttgcaacccgcatgggggcccacattgggccatcttcgggttccttcccggcatacgcctgtggtcgcccttagcgggaagcagcagcctttgagcttcaactttggaagttggaggcattggagcataacttcgagacattgagaccgtttggcgttaagcaccgcccatttcaaagagcgcacccaggaggcaggcacatttggcaacattttgagtaccagaaccaccctatgtgcgcgccaaaacgattttccgagcccagaagaggaggcaccaacccatcttataggaatgtggaccccaagtatctgcgatagagggaaacc

SEQ ID NO: 495333 - DNA, 268 bp, Homo sapiens
cccccttacggattactcaacacaaagaggcacattgtaaaacatgggaagggcaggcgcgatggctcatgcctgtaatcctagcattttgggaagctgagtgcaggcaggttattgatgcccaggagtttgagaccagcctgggcaacacggcaagaccgtctacgaaaacatacaaaaatttacttggtgtggtggtgcgcatttgtagtcccagctactcaggaggctgaggtgggaagtcagggttttgggggaaattccctac

SEQ ID NO: 495334 - DNA, 167 bp, Homo sapiens
ttagtgattctgggtcatgacaccccaacgatcatatggctgagagtacatttgaacatgcaaggatgcatactaggattgcttttgtgtgtgtgttttagaacaatagaggtttgttgaccttttgtccttttttactcgctttataaaatatttcaacacggtat

SEQ ID NO: 495335 - DNA, 341 bp, Homo sapiens
taaaacaaagccaactgaaggcccaatttttttcctgttgagggccgtggatggcagatttaaagggaagaaccccaaaggcttgcaaagataggagagggtccctttttaatgcatgtagaagctcctttcgggggcccctcaaaagcatagcttggaagccccccttctgtgcggaattgggtcagggcaaatgtcacagcaggatttcccccacccaggtccctcttcccagacccaaaaagctgcaggggaggcctgccccctgtttttttgactttgccctcctttggcagcatagatccttaggggctcaataaaggtgtgctgtttttaactta

SEQ ID NO: 495336 - DNA, 644 bp, Homo sapiens
  misc_feature (511)..(511): n is a, c, g, or t
ttagcagtgtctcacacctctaatcccagcactttgggaggccgaggtggacagataacctgaggtcaggagttcaagaccagcatggccaacatggtgaaaccccgtctctactaaaaatataaaaattagctacgcatgggccgggtgcggtggctcatgcctgtaatcccagcactttgggaggctgaggcgggcagatcatgaggtcaggagatcgagaccatcctggttaacatggtgaaaccccatctctactaaaaatataaaaaattagccaggcatggtggtgggcgcctgtagtcccagctactcgggaggctgaggtaggagaatggcatgaacccgggaggtagagcttgcagtgagctgagatagcaccactgcactccagcctgggtgacagagcgaaactccgtctcaaaaaaaaaaaaattaacttggcgtggtggtgggcgcctgtaatcccagctactcaggaggctgaggcaggagaatcactagaagctgngaggcagaggttgcagtgagctgagattgtgccagtgcccttctgggcaacaggagtgaaactctgtctcaaacataatataaattaagtgtctttatatgttcgctgatgaattttgtcagtccacctattt

SEQ ID NO: 495337 - DNA, 131 bp, Homo sapiens
gacgcgtgtgagagagcaaggagaccatggttactctttgaaatggatggtggaaaattacgcggaaaaatttaatcacagagattgcgccatggcactccagcctgggcgacagagccagactccgtctc

SEQ ID NO: 495338 - DNA, 716 bp, Homo sapiens
gccgggcgcggtggcgcgtgcctgtagtcccgagtggctgggactacgggcgcccgctgccgtgcccggctaattttttgtatttttttttttagtagagacggggtttcaccatgttagccaggatggtcttgatttcctgacctcatggtccgcccgcctcggcctcccaaagggctgggattgccggcgtgagccaccgcgcccagtcaaagatttctcttttgaaattgaggcatgacctggtggtcaaacgcctggtggtttcacgcatacttggggggctgagggcatagagagatcccttgtatccccgaggtatggcagacgtacttgctagaggtagaccagctgcattgtgcccacgtgtgaccctctcatggggtgtggatgtctacgcaggtgatgcagctctgctcctgagaatttcactaacccaaaatcaaacatagagtagggacgtaaatcgatcgcacttcattatttccggaaagcggtatcaaacaagggatctgtagttcttgcccattagggtgagatacccacacgaaaacattactccattattggtttcgcggacggtcttttaccgcccccctccatagcctcgcatatacaagggggaggggcccgtttttttgtaatcgaaacagtaagacgtacacgtgcgaaagtgcagcgggatgggaaaacagcggtgctgggaatgacaccag

SEQ ID NO: 495339 - DNA, 125 bp, Homo sapiens
tcctcgtgaatagctgggaatcaggtgtgtgccacacgatcggctatttttttttggttttttagtacgagactgggtgtcaccgtgttagccaggatagtcgtcgatctcctgacctcgttgat

SEQ ID NO: 495340 - DNA, 398 bp, Homo sapiens
ggtatgagtaggactgccagtggtcttgagttacgtagaagtagtagttctggcccctcgaggattagtggtgggaatcgggcgtcgcgtatcttcgggcttggaagggttaatcgttctgggtctccgacgtgacggttcgcgcggatcgcgggagtagtatttaagacttcggctatttcgacgatttatctcctctagagtcggacggatcggggtcggagtttacggaagagggcggaggtgagtagggcagcagtggcggtggcagcggcgagggagagggtcgtcaggaggtttaaggtggggttaaggtcctaagtctctacgatccggtcacggaggaggaggaagaaggtgagtctacttagcttagttccattcatagtcgtcgcttc

SEQ ID NO: 495341 - DNA, 760 bp, Homo sapiens
gcctccaggctccctcagtgccttagccccaccccattgttctcccgaccccccagtccctgagctgctcactggtgagtgggtgtcagtgaaactggggcctggagtggtgagtgagtgggtgacttagtgtggcattaatgtgtgatgtgccagtgccatgccctgtgtggcctgaaagcctgtgcagcctggcgtgtgagcctggcctgactgtgccctcaaatggtgggggacacgtggtggcttcaatggacaaatggaaatgtgtccccaatgaagaacccaccattggcatgcataatgtggtgagctggctgaatgtggtggtgctgagcccaaggatacaccccctcccgtgtgccccattctgaggaccattaaggtgcccccggtgagtagtcagaaagtctcgatcgtggcacgtaggagaaaatacaaccctacccggaacagcaatagctcccgcaagtgacattaccattggaaacccagacctacagccagagcagactgtgccatctgctccccgggacccagcctggacacagtactgccaaaaacaaggaggaggaacttggccccatagcagccataacttgcagctgaatattgaccctgattggggagcagctgaagtgctgaagcctggggagcccatacagcaaactggactgtgaacatgggttgtgcacatatcccggataaagacaatgcagtcgtcctaaaaccatctgacatggcgggcgaaaaaaaaaga

SEQ ID NO: 495342 - DNA, 1026 bp, Homo sapiens
ccacgcgtcgcggacggcgtgggtcgacccacgcgtcgggattggggtggatttggttttgttcccctcctccactctccccgacccctccccgccttgttttaaatggattatcttggatctccttaccctacctggttattttgatcaaatcttttttgctgccccttcgtcacagtcatcagatagcaccccatccaaccgggggaggacaagctgcgtagtggaccaacgccacacggccatgacaatttcatcaatgcatcaaccatactcgggacgcccacaacgagatgggcacaagcaaacggggtgtgatgcgtcgtcatccaaacaccaacaaatgcaaatagacggacaagacacaggcggactacatacctcattagtcaacacaccctaccgctatacctccacactgtcccccaccaggaactggagccactaacgagggacggacgacaataggccatccacaaccaatgggccacaccacactgacaaaaagtacacgcaccgtaacaacacaatagttgctaagttcacgataacattaggtgatccccaaacaaaacgacaacacaacggcgtgcagccttctcaaagaagcacctacacacagagagacacacacctatacagacacacacccagcactaacagcagcacaacacaagaaacacattaagctgacccacaacaatcagccagcacacgcagaaccccgaagcaaacacacggatgccgagccggaaccaacaaacgaacacaagcgcactcacatcgacaggacaccacacacacaacgcgtcaccaccggtgacacaccactcctcaacaacatcgaccgccccgacgccaatgaacacgtgaagggaactggcacaacacacctccatactggtgcattagcgactacaacccagacaaccccagcccagactaccaggacctatacaaccaccaccgacaaacgatgcatctaccaaacacacaacagacacccgccacccagccaacacaaca

SEQ ID NO: 495343 - DNA, 654 bp, Homo sapiens
  misc_feature (654)..(654): n is a, c, g, or t
tttgctagatgacatgatcacctagaaaatatgaaagaatgaccaaaaaaaaaaaaatcaatgaatccaggagctgattttttgaaaagatcagcaaaacagactgctagccagactaataaagaaaagggtattcaattaggaaaaggggaagtcaacttgtctgtttgcagatgacatgattgtatatttagataacccaattgtctcagcccaaaatctcctaacactgataaaaacttcagcaaagtctcaggagacaaaatcaatgtgccaaaatcacaagcattcctatacaccaataacagacagagggccaaatcatgagtgaactcctattcacaattgctacaaagagaataaaatacctaggaatacaacttacatgggatgtgaaggaccttttcaaggataactacaaaccactgctcaaggaaataagagaggacacaaatggaaaaacattccatgctcacggataggaagaatcgatatcgtgaaaatggccatactgcccaaagtaactgatagattcaatgctattcccatcaagctaccattgactctcttcacagaattagccaagacaatcctaagcgaacagaacaaagctggaggttatcatgttacctggcttctaactatactacaagn

SEQ ID NO: 495344 - DNA, 438 bp, Homo sapiens
cggggacacggaaggggcttcgatcgtacagggccggacgtagaccgacccgagacggcgaggacatatcgccgccgaggccaccatgcacagcagggacactatcctgcacagccaacctagcgttggaggtctcctgagaactcagaataccctcagacctcgcactatactgaggctccaccctattcctgagagccatctgcctactgataggtgtatcgagcgagctttgtagacccagagattgccacagtatttaccagggcagccgtatatcctggagcggccctgtatgttgccatgtgccactcagtggctagcaggccctataggttacacaatacccagggctaattatccaaccggttccacatatccacctggatgcacaattcttgcggaaggcaggttttgtgctggtgccaattttggctg

SEQ ID NO: 495345 - DNA, 346 bp, Homo sapiens
aaaaaaaaccaattctgaagacccagtccaattttattatctcatgagattttaattcttgacaagtcaagaattggatgtctctatttttagaaagctaagggtattctctagactcggattctgtgttagcagtatcaaaccaacttagaattttacaattatgaaagcagtttccacccatgtggtcccaggagccctctgggcccaggcagaaatatggaagggttaagggttacagttaaagggctagaggtgagtctataatccactaattcaaaagtttagttaaatgaactcaaagtatctatagagtttccctagtgaccctgccttcgtaaagctg

SEQ ID NO: 495346 - DNA, 404 bp, Homo sapiens
  misc_feature (12)..(12): n is a, c, g, or t
  misc_feature (28)..(28): n is a, c, g, or t
  misc_feature (221)..(221): n is a, c, g, or t
  misc_feature (391)..(391): n is a, c, g, or t
  misc_feature (394)..(394): n is a, c, g, or t
aaactcttagangaaaacaagggcaaanccttcaagacattggatttggccagtgatttcctcagatatgacacccaaaagccacagacaaaacaagtagatcaattggacttcatcaaaatttaaaacttctggcccaggcacccgtggctcacaccctgtaatccccagcactttgggaggccgaggcatgtgaatcacccaagttaggagtttgaganccagccctggcccaacgtggtgaaacaacacaaaaattggccgggcatggtggcgggaacctgtagtcccagctactcgggaggctgaggcaggagaattgcttgaacctgggaggcggagattgcagtgagccgagattggccactgcactccaccccgggcaacagantangactccatct

SEQ ID NO: 495347 - DNA, 666 bp, Homo sapiens
agccccttgatggaccagttgtgtcccccaggaaggatgagaatagctactgaagtcgcttaagagccagccttactcagagcccttggcacaaacggcagttagaccagaaagctggaagttgaaatggtggagtcccagcttgccccgggaccagcttaatgggttctcgctcctggttatcgtgttttagtcccactggagtcgaccttgcattggggctaaacgcgcacccctgtaggaagcacgctctccctcgctcataacctctctgtcgaaggtatgcgacgacctcggcttgatctaaccacctgtgctcggaggcacaggtgtgttacacagtaattgtcctacacgccagctcacgacatgtctatgacctgtgaggacattgtcatgtgcagacctcgttatcctccaacttagggtctctcttaatgagccccctgccagccgcagcacgccagctctcactggcattgtaaagggtccttgcctcaccctcagtctagcacccccgtggcctttgatagcttaatacagcctccacttttgggctcaagtgatcctcatcctccccgtggtctttgttgctgcctgatggagtttcccggcacaagaagatttaaccaggtctcccattttaataaaattttgcaatcccca

SEQ ID NO: 495348 - DNA, 936 bp, Homo sapiens
ggcggtgtccactaatacgataccttccggaccagggggatggaccgggaagatcggagagacgggaaaacgtgcacctcagctcctgggtagagaaaaacaggggattctactccgtgcctcctgactatggtctggctaagagattcgcctgtaaatgctcccggtgcccatggagagggacccagcataggcaagccacaatactcagccttggatagggtggagagcactgagggactcactggagggcaccaagccagccacacagccagggaagtggcgaggggggcggaaacccatgcctccacagctgagcactgggaatgtcagcccagtaagtattggccagtcaggcgcctcgtggtcagagcagagccaccaggtcccactgccccgagcccatgcacagccactccctcctgccatgggtgggggaggctggaggtcattgcgagaggctggactgcttgccaccccgggtgctcccgctactagccatagcactgatcagtgacaatttacaggaatgtagcagcgatggtaattacctggaacagttttttgtttttgtttttgtttttgtttttgtagggggggggcaactaaacaaacacaaagtattctgtgtcaggtattgggctggacagggcagttgtgctgttggggtggtttttttctctatttttttgctagtgtttactatgtgttgtctaataatgatttaacgatctgccatcaatcatctctgtgctaagtatataaaagatttaaccaccttcccagtccgtcgtcccctcccccctactcaggcccttgaggctaccataggagatgctgtgaagactccacgaaatcccgagtccaagtcagacttgcacataataatattatattcagaataagatacatctcaggattataatgagccccccc

SEQ ID NO: 495349 - DNA, 936 bp, Homo sapiens
  misc_feature (1)..(1): n is a, c, g, or t
nccaggtgagcggccgagggggcggggacacgcaggcttggtggtataaatttgccacgtgcctccttacggacattacgccattgtggccgacatttcttgtatcgcgtgtcacatttgggtgtttcccgcccccgcattggggcttttatgaccagcggcttctccatcttctgtgatccgccacctacattaggatacattatcggggctgcataaaactactctacgctgggcccaatcttacacccaatctggcgacctcggtcggggagtcaggatctgacggcgggtgtttcgcttcatcccccggagaggttttgtgagggcgaatcctcaagcccaagtgcggctttccaattgtgccgccgtctctccccctggagaagacaatttcggcggcggaacgacccccgtttgcttaccttaatgggcgggcggggcccaaaaaaacataggatgggggtgagatatcaggcagtacacaccattaggtggagggaggaattcaatatgggcattgttttcataacacagaggaatataacgcactttctgtgcgtgcacccaacttgagtctagtacgttgctctctacgaagaattctcgctctgtccgccggagatccttctcaaaactcctccgcgcacatccccttgttaacaatactggccttaccatcaatctaagattatgagtagcgacacttgcactcccacctcctcttatgttagcaacccccccttccatatcactccactgaagcgacaggtttttcgcggctcggcgctagataggccacaatgctccgcaataacttggtttccctcgttggactttcgcagcggcgccaaactaacaacacgagaaccttgctgttgtgctacgaagacttccgccgcgcccaagaaaaaaataaaacaaacaaacatgcac

SEQ ID NO: 495350 - DNA, 989 bp, Homo sapiens
  misc_feature (90)..(90): n is a, c, g, or t
tggaaacggggttcttggcttcttggcccgggcgggagttacagatagtgtgcaattcacagcgtgacgtgcagccttgaccttccgggncctcagggattcctcgcgtgccttcagttcctcccaacataaggtgggacatacgggcacgttgccacaattactcagcttttttgggtgtgggttttagagacaagagatgtctcggtttttggttggccacggggcgtgggtcttgagaattcccggggggctacaaggcaattttctttccaacctacaggcctcccaaaagtgtggctgagagagatatacctggggtttggaggccaatgtggggaccaaaacccttcaagaaatctaatttttaatagtgggtgcttctggtctcctgagatgtggattttggaaggggaattgggtgacatgtttcacagttgggctgagatattattttcccaggttattattttgagaatcttcgggggatccttttgatatttccctcttatttttgggggtgttcctcctaaactattaattctattataaaaagggtcggggcttcataattattacagaggggtttcgtggggggaagattagtttggggtgcatatttatttgaaattccatttagagattgggttgcccactatagtcaatttaagggtctatatttcagaggtaaaaaaccccattttttttgtgggcccaaaatttttcttaaacagcgggttttttaacctttccaggaaggtggaggggcatgcgaaagaaggttttattaaagggaaaaagatccatattaaagagggggcaaattgggggtaattgggaaaggtatgggtggataattaaaggcccaaggttatggggggagtattaacgcgggggtttgtcgacttggagtctgtggtgcttggagttgtgaggcattttattatatagtttaaaagggggaaacgggttcttgtgaccatttatta

SEQ ID NO: 495351 - DNA, 1177 bp, Homo sapiens
agcggggtcgtctggttctctggctccggaagctgcgctccttcaccctcctcgtttggtgtcctgtcaccatggcgctggctgtcttgctgggtcctgcgtagccctttcctgacctgagatcaccccccgttcgtgcatgtgctgcttgccacccggtggtgccctgtggccggcggcggagctggggctggtgctggtcctgaggccttgcatggtgatgagcccggcatgggccggcgctgctggtggcatgaccatggaggggccggactgcgtggcaccgaagagcagggtccccgggacctgcctgcaagctacttggattagccgctgcagctgcatgcggcatcctggcactgggtgctcctggggcgctggtgtgcggtggctggctggcggtgctgtgcgtgcccccgtgcggctagcgttgggcacgttgcttgtgcacctcgtcttggcgggcctggggctcgtgacctgcgaagtcgggcctgattgcctggattgatggtctgctggaagtagaccgctcccgagtttcccgggactcgccggtggtgcttggactgacgcgggcggcgttgctagggggctgcttggtgccccgaggggacatcgggctggcttgtggacttggcgtcgtcacgctgggcggggcgcagaacgtgttgatccgagaagctctggtgggacccgtcgagtctgggccccccagcccccagacgcagtagtggtgtcctccattttggcgggttactggccacagtgcgtgcgaactcccggcgggagttcctagtggaaggcggactttgggaagaattccaccctagaggagggtagaagccaggaagcactgtactccggaagtgcaccgttgaggcatccctttccagcggtggcggacatggggccgaatgtgtgtttcgaccccgcgtgtcccgaggaagtttctgttcgtagcaccgcctattcaagcgaacagtgcaaacatttgagctgagagtgtggaagagagtcctatacaaaacttccgtgtgtgggaaacctctctggtgatctgaacctgtggaacccccgtgctctgtgcagcgattatacaatcgaacccccgtcggtagcggagcctgacgcttgtcccttggcgatttggggatagaaactctggatgataccc

SEQ ID NO: 495352 - DNA, 213 bp, Homo sapiens
gggggtttggccctggttttggattccagaaaagagggggcttgcctttttttgcccctttggggcccattgggtcctttggccccgggtttttttgggggacccctggggggggggttttttttccggttttttaggggcttttttttttttgccccggggtgggccaggggtgggtgggttttgtttttggaaacccacccccccccccca

SEQ ID NO: 495353 - DNA, 115 bp, Homo sapiens
tgatccaacttccatgaatcaaagcgtattccgttttcattcctgcattatccacttggttccctcccgcaggctgagcaagtctgtaaactgattctgggagaaaccaagctgc

SEQ ID NO: 495354 - DNA, 626 bp, Homo sapiens
  misc_feature (21)..(21): n is a, c, g, or t
  misc_feature (41)..(41): n is a, c, g, or t
  misc_feature (73)..(74): n is a, c, g, or t
  misc_feature (97)..(97): n is a, c, g, or t
  misc_feature (208)..(208): n is a, c, g, or t
  misc_feature (222)..(222): n is a, c, g, or t
  misc_feature (240)..(240): n is a, c, g, or t
  misc_feature (244)..(244): n is a, c, g, or t
  misc_feature (249)..(250): n is a, c, g, or t
  misc_feature (277)..(277): n is a, c, g, or t
  misc_feature (280)..(280): n is a, c, g, or t
  misc_feature (307)..(308): n is a, c, g, or t
  misc_feature (310)..(310): n is a, c, g, or t
  misc_feature (316)..(317): n is a, c, g, or t
  misc_feature (323)..(323): n is a, c, g, or t
  misc_feature (347)..(347): n is a, c, g, or t
  misc_feature (377)..(378): n is a, c, g, or t
  misc_feature (382)..(382): n is a, c, g, or t
  misc_feature (388)..(388): n is a, c, g, or t
  misc_feature (399)..(400): n is a, c, g, or t
  misc_feature (410)..(410): n is a, c, g, or t
  misc_feature (416)..(416): n is a, c, g, or t
  misc_feature (423)..(423): n is a, c, g, or t
  misc_feature (431)..(431): n is a, c, g, or t
  misc_feature (448)..(448): n is a, c, g, or t
  misc_feature (456)..(456): n is a, c, g, or t
  misc_feature (475)..(475): n is a, c, g, or t
tctggctaccgggactaaaanggaagcgttttgggggtcgnggcccggacttggggcggggggtccggccccnnggacagtttttaccgcatttccnctccactctcccgatttcctttcagtggatctccgggcgttcgtgcacttttacagaggctccaatctcacgcggacccagaaaccccagtgggtgaccgggaccctcagntccttcggggttanaagttctcagaggggcgngagngtggnnagatatgtgccgacaaaacatgtgtgnggngatctcctatagcggggcctcctgtgnngncctcgnnttctcncgacaaaacatctcttctctgcgncatatatatgtggcgaggtctcaaaacaanncagngtaccncatgtggctgnnggggtgcccnctgtgnggggcgnaaatatangcgccgtgaatttctcncaagtatnttgtgagagcgcaaaaggngtctctctgcgcgccccaaaagattggggggtgaggactgtggagaggtgagaggggagagcagcctctcgtggggggagaagagatttgggcgcaccaccagcgcgataaataagggctccctataaaagagggcgtaattttccaattg

SEQ ID NO: 495355 - DNA, 168 bp, Homo sapiens
cacatgtgagcctgttctcgtaaaatcagaatagctggtgtgggggtgggtgctataatccccaggttcttgggaggctgaggcaggagaattgttgggaccggggagcggaggttggcagtgaggccaagatcacaccaactgcactcccatgcctgggccgaaaag

SEQ ID NO: 495356 - DNA, 376 bp, Homo sapiens
ctcagctgcgtaggcgtttatacctaccagtattttgtcaaagccacaggtcgactcatggatgatgcctctatagctgctgcatgatgttcaaagaaccggcccttgcttgttgttacagagatgttgggcagagctatgcaggtgtttcattgtgaactctagctttgatcatggtaaaaagttaaccttttctattttttaatggatgttataccaactattcagaggaactcatacttcaaaaatattaggaaaatctgtcttatagtttctctaataaatatctgaaatctcagtacgacatgaaagaatgtcagaccattgttattgttgaaagtcatttgatgaatggtaaattctatgaaaagtaagt

SEQ ID NO: 495357 - DNA, 373 bp, Homo sapiens
  misc_feature (35)..(35): n is a, c, g, or t
  misc_feature (277)..(277): n is a, c, g, or t
  misc_feature (317)..(317): n is a, c, g, or t
aaaggtaagtctgagtggaatgactacctattttnccctggttgtcctgggtggtcagtgacgattgttatatcagctcaactcacagcttccaaagacttcttgagaagggctgtcttttttcaacatgctgcttggtgaaatgcaaagtgaatttgataagcttattacccttattcagaaagaaagggcttgaacaagctgaaacctttatgtgtgtgtgtgcgcgcgtatatacgtgtacttctttttaattaacagtatcgtcctctaaatngtaggagaacttatgctttcttatttattcatttttagtnaaaactaggttcatgttcctcatccagtgtatggaatatacccacatttttgtttt
